(19) United States
(12) Patent Application Publication
(10) Pub. No.: US 2021/0272652 A1
(43) Pub. Date: Sep. 2, 2021

(54) Method of finding structural variants for identifying and differentiating species, strains and cells in normal and pathological conditions

(71) Applicant: Xiaoqiu Huang, Ames, IA (US)

(72) Inventor: Xiaoqiu Huang, Ames, IA (US)

(21) Appl. No.: 16/805,783

(22) Filed: Mar. 1, 2020

(51) Int. Cl. G16B 30/10; G16B 20/20

(52) U.S. Cl. CPC G16B 30/10; G16B 20/20

(57) ABSTRACT

Large whole-genome datasets of short reads from species and strains in normal and pathological conditions are processed to find species-, strain- and condition-specific structural variants along with their estimated genome-wide copy numbers. These structural variants provide huge pools of genetic targets with molecular approaches to accurate & fast detection and identification of eukaryotic pathogens such as fungal pathogens and to precise diagnosis and accurate assessment of clinical conditions such as cancer, dementia, Parkinson's disease, Asperger's syndrome.

### CLASSIFICATIONS

[0001] C12Q1/6895 Nucleic acid products used in the analysis of nucleic acids, e.g. primers or probes for detection or identification of organisms for plants, fungi or algae

[0002] C12Q1/6886 Nucleic acid products used in the analysis of nucleic acids, e.g. primers or probes for diseases caused by alterations of genetic material for cancer

[0003] C12Q2600/156 Polymorphic or mutational markers

[0004] G16B50/00 ICT programming tools or database systems specially adapted for bioinformatics

[0005] G16B30/00 ICT specially adapted for sequence analysis involving nucleotides or amino acids

[0006] G16H10/00 ICT specially adapted for the handling or processing of patient-related medical or healthcare data

[0007] G16H50/20 ICT specially adapted for medical diagnosis, medical simulation or medical data mining; ICT specially adapted for detecting, monitoring or modelling epidemics or pandemics for computer-aided diagnosis, e.g. based on medical expert systems

[0008] G16H10/60 ICT specially adapted for the handling or processing of patient-related medical or healthcare data for patient-specific data, e.g. for electronic patient records

[0009] G16H10/40 ICT specially adapted for the handling or processing of patient-related medical or healthcare data for data related to laboratory analysis, e.g. patient specimen analysis

[0010] G06F19/00 Digital computing or data processing equipment or methods, specially adapted for specific applications

[0011] Y02A90/26 Information and communication technologies [ICT] supporting adaptation to climate change. specially adapted for the handling or processing of medical or healthcare data, relating to climate change for diagnosis or treatment, for medical simulation or for handling medical devices

### DESCRIPTION

[0012] An Amendment Directing a Sequence Listing into the Application

[0013] In response to the notice to disclose a Sequence Listing, the Sequence Listing is submitted via EFS-Web as an ASCII text file with the application. The applicant hereby states that the Sequence Listing includes no new matter. Every sequence in the Sequence Listing is one of the sequence fragments in Tables 1 and 2 in the previously-submitted specification (see new subsections named “Sequence Listing: fungal discriminating fragments” and “Sequence Listing: human discriminating fragments”). This statement indicates support for the amendment in the application. Because the Sequence Listing is submitted via EFS-Web as an ASCII text file, a substitute specification is provided, consisting of a marked-up version and a clean version. The applicant hereby states that the substitute specification contains no new matter.

### REFERENCE TO THE SEQUENCE LISTING AS AN ASCII TEXT FILE

[0014] The content of the ASCII text file of the Sequence Listing named “seq.list.ST.25.txt” with a size of 22,192,697 in bytes and with a creation date of Apr. 23, 2020 is incorporated herein by reference in its entirety.

### CROSS-REFERENCE TO RELATED APPLICATIONS

[0015] The present application is not related to previous US patent applications.

[0016] This invention was made without government support.

### FIELD OF THE INVENTION

[0017] The present invention relates to a data mining method of finding species-, strain-, and condition-specific structural variants by processing whole-genome datasets of short reads from eukaryotic species, strains and cells in normal and pathological conditions. These structural variants can be used as genetic targets with molecular approaches like PCR and hybridizations for the detection and identification of eukaryotic pathogens and as genetic markers and signatures for the diagnosis and assessment of clinical conditions.

### BACKGROUND OF THE INVENTION

[0018] Structural variants are differences involving a DNA segment of >50 bp between individuals, or (in cancer) between cells in normal and pathological conditions (Cameron et al. 2019). It is well known that many structural variants are associated with genetic diseases. Finding structural variants is important in understanding human diversity and disease susceptibility. However, structural variants are more difficult to find than single nucleotide polymorphisms (SNPs). All existing methods for finding structural variants in whole-genome datasets of short reads require a reference genome assembly to provide common genomic locations for mapping short reads (Cameron et al. 2019; U.S. Pat. No. 9,721,062). Therefore, these methods cannot find structural variants that are not connected to the reference genome. And it is much more expensive to find structural variants by producing whole-genome datasets of long reads. Thus, it is useful in health care to invent a novel method of finding structural variants in whole-genome datasets of short reads without using a reference genome assembly.

[0019] Filamentous fungi include the most important fungal pathogens of plants and animals. For example, some Aspergillus species cause serious disease in humans and animals, and some Fusarium species cause severe crop losses worldwide. Fusarium is a large genus of complex taxonomy with up to 1,000 species identified at times (Nelson et al. 1994). Aspergillus is a genus with a few hundred mold species. Fungal species and strain identification is necessary for effective control and treatment of diseases of plants and animals. Molecular typing schemes that use standard genomic regions have emerged as promising methods for identifying fungal species. These standard genomic regions include the nuclear ribosomal RNA internal transcribed spacer (ITS) region for barcoding the fungal kingdom (Schoch et al. 2012), the translation elongation factor 1-alpha locus for identifying Fusarium (Geiser et al. 2004), and the beta-tubulin or calmodulin locus for identifying Aspergillus (Geiser et al. 2007). However, in many cases, the ITS region is not sufficiently variable to discriminate between some fungi at the species level, and species level identification using single-copy nuclear genes (e.g. beta-tubulin for Aspergillus) is time-consuming and complex in clinical practice, although the identification is clinically necessary in cases (e.g. Aspergillus fumigatus species complex) where differences exist in antifungal susceptibility and clinical outcomes between closely related species (Lamoth 2016; Wickes & Wiederhold 2018). DNA-based tests for the detection and identification of fungal pathogens all use specific DNA sequences (for example, U.S. Pat. No. 6,387,652) or known genes (for example, U.S. Pat. No. 8,114,601) as genetic targets. These DNA sequences or known genes are not sufficiently variable to discriminate between some fungi at the species level.

[0020] In filamentous fungi, vegetatively growing cells distinguish self from nonself (allorecognition). During the vegetative growth phase, allorecognition can result in vegetative or heterokaryon incompatibility (HET) following fusion of genetically different cells, which disrupts growth and causes cell death (Glass & Dementhon 2006; Paoletti & Saupe 2009). However, heterokaryon incompatibility is suppressed following conidial anastomosis tube (CAT) fusion between vegetatively incompatible strains of Colletotrichum lindemuthianum (Ishikawa et al. 2012), suggesting that horizontal gene transfer (HGT) may result from CAT fusion (Manners & He 2011). Heterokaryon incompatibility involves a protein partner with a HET domain as a trigger of programmed cell death (Paoletti & Clave 2007). HGT allows for the species- and strain-specific acquisition of certain pathogenicity genes and transposons in multiple highly similar copies, called repetitive elements (Huang 2019). Such an element can be present in a much higher copy number in a particular species than in all other species. Or its variants can be present in high copy numbers in closely related species, and one variant with a sufficiently long unique region can be specific to a particular species. Fungal pathogens such as A. fumigatus (Fedorova et al. 2008) and F. oxysporum (Huang 2019) contain chromosomes with highly similar subtelomeres and with highly similar copies of transposons. These genomic regions are often species-specific and serve as anchors for homologous recombination (Huang 2019). Although the ITS regions of ribosomal DNA (rDNA) may not be sufficiently different between closely related species, other regions (such as intergenic spacers, or IGS) of rDNA may contain species-specific DNA segments, and so are parts of mitochondrial DNA (mtDNA). A sufficiently long element in a high copy number in a particular species can be used as a genomic marker for identification of the species. Such an element is easy to amplify by PCR because it is present in a high copy number. This type of element is useful in building an affordable and accurate multilocus barcoding chip for identification of the species.

[0021] There are two main approaches to finding specie-specific sequences from which diagnostic PCR primers and oligonucleotide probes are designed. The first approach is based on a known region of the genome. In this approach, the sequences of a target species and all its closely related neighbor species over the known region are generated and compared to find sequences specific to the target species, for example, the IGS region of F. virguliforme (Wang et al. 2015). This approach is time-consuming and labor-intensive. The second approach selects species-specific sequences over the whole genome. It works with assembled genome sequences of a target species and all its closely related neighbor species. However, long repetitive elements in multiple highly similar copies are missed by genome assembly programs in the reconstruction of genome sequences (Wu et al. 2009). Thus, primer design programs such as RUCS (Thomsen et al. 2017), which work only with assembled genome sequences of closely related species, cannot select candidate primers in elements absent from a positive (target) genome dataset, and cannot remove candidate primers matching elements absent from a negative (non-target) genome dataset. Some of these elements can be recovered by long read sequencing such as Single Molecule, Real-Time (SMRT) from PacBio, which is much more expensive than short read sequencing such as Sequencing By Synthesis (SBS) from Illumina. However, about 10% of 9331 complete bacterial genomes contain complex regions that could not be assembled with SMRT long reads (Schmid et al. 2018). On the other hand, these complex regions can still be present in short reads, which are more accurate than long reads (Schmid et al. 2018). Although repetitive elements cannot be assembled together with unique regions in a genome assembly, specialized method are designed to produce repetitive elements alone from datasets of short reads (Novak et al. 2010; Koch et al. 2014; Goubert et al. 2015). Still, no methods are known to use datasets of short reads to produce sequences and structures for identifying closely related fungal pathogens; these sequences and structures are later used to design PCR primers and hybridization probes for differentiating each fungal pathogen from its close related relatives.

[0022] Alignment-free methods have been designed to select diagnostic primers and probes for discriminating viruses and bacteria (Hysom et al. 2012; Pritchard et al. 2012) and to find discriminating k-mers for classing metagenomic sequences (Ounit et al. 2015; Ounit & Lonardi 2016). However, because these methods find diagnostic probes or discriminating k-mers only in assembled genome sequences, they cannot find primers and probes from genome regions that are present in the short reads but are not reconstructed and missing in the assembled sequence, due to short read length, repetitive regions or polymorphisms. And copy number information is missing from the genome assembly. This typing strategy is limited by the completeness of the genome assemblies, because it can neither find specific probes missing in all positive genome assemblies, nor reject non-specific probes missing in all negative genome assemblies. We collectively call these approaches assembly-based methods.

[0023] Some genomic regions that are difficult to assemble are missing in the genome assembly. Multiple copies of a repetitive element are assembled into a single copy in the genome assembly. So the number of occurrences of a fragment in a dataset of short reads can differ by a great deal from the number of occurrences of the fragment in an assembled genome. We present results to show that a significant portion of the genome is not represented in the genome assembly.

### SUMMARY OF THE INVENTION

[0024] The present invention overcomes the aforesaid deficiencies in the prior art by providing a method of finding structural variants for identifying closely related pathogen species or isolates and for differentiating normal cells from cancer cells or cells harboring disease mutations. Structural variants from the method are in the form of high-copy fragments that are specific to species or isolates, or differentiate between normal cells and cells harboring disease mutations. Because high-copy fragments are hard to assemble, they are underrepresented in genome assemblies. Thus, the new method finds those high-copy fragments in whole-genome datasets of short reads from a number of isolates, without using any genome sequences or assemblies. Note that pathogens like plant fungal pathogens contain host-specific subtelomere sequences that are present in high copy number (Huang 2019) and that human cancer cells harbor ribosomal DNA copy number amplification and loss (Wang & Lemos 2017). Structural variants from the method can be used in the design of a CRISPR-based system as well as PCR and hybridization systems to rapidly determine these variants are present in a biological sample. Such tests are useful in detecting pathogens or genetic disorders.

### BRIEF DESCRIPTION OF THE DRAWINGS

[0025] FIG. 1 shows a flowchart illustrating an embodiment of a method of finding structural variants for identifying and differentiating two or more isolates (or types of cells).

### DETAILED DESCRIPTION

[0026] The embodiments presented in this document are illustrative and are not meant to limit the invention. Other embodiments can be constructed without departing from the scope of the claims of the present invention.

[0027] We describe a computational method for finding unique high-copy fragments as candidates for PCR primers and oligonucleotide probes in identification and detection of species and isolates, and in differentiation of normal cells from cells harboring disease mutations. In the rest of this document, the term isolate is used to mean what were isolated from the sample in identification of pathogens, and to mean a type of cells in differentiation of normal cells from cells harboring disease mutations. For a number of isolates, with each isolate associated with its datasets of short reads, our method constructs isolate-specific DNA fragments from their datasets of short reads, instead of their assembled genome sequences. The method consists of two major steps, as described below.

[0028] Step 1: For each isolate represented by datasets of short reads, build an ordered list of all distinct fragments of length k (also called k-mers) that are contained in any of the short reads in forward or reverse orientation, along with the frequency of each fragment: the number of times it is contained (occurs) in the short reads in forward and reverse orientation. The fragments are listed in a non-increasing order of their frequencies, with the most frequent fragments at the beginning of the list.

[0029] Step 2: Produce isolate-specific lists of frequent fragments by keeping, in each isolate, only those fragments with high frequency and with no matches to fragments in other isolates and those fragments with sufficiently higher frequency than all similar fragments in other isolates (the default option), or only those fragments with high frequency and with no matches to fragments in other isolates (an alternative option). Specifically, if the default option is selected, then for frequency count cutoff c and factor cutoff f, the list of fragments for each isolate is revised to keep only those fragments such that if they have no matches to fragments in the other isolates, then their frequency counts are greater than f*c, and if they have matches to fragments in some other isolates, then their frequency counts are f times greater than those of the matched fragments in the other isolates. Through the alternative option, the resulting list contains only those fragments that have their frequency counts greater than f*c and that have no matches to fragments in other isolates. Those fragments are said to be unique to the isolate with respect to the other isolates. The frequency count cutoff c is used to exclude the fragments with frequency counts less than c, which are considered to contain errors. In one embodiment, a fragment g from one list and a fragment h from another list are said to be similar (have a match) if there is a gap-less match of length s (allowing for base mismatches) between the fragments g and h. The match length s can be set to a value between k/2 and k, where k is the fragment length.

[0030] Implementation

[0031] We first describe a method for constructing a general superword array (Huang et al. 2006; Huang 2017). Then we show how to implement steps 1 and 2 by building particular superword arrays.

[0032] A DNA word of length w is a string of w bases, with each base being is one of four regular bases A, C, G and T, or a non-regular base like N. A word model is represented by a sequence of (one or more) 1's and (zero or more) 0's, with each 1 bit denoting a checked position and each 0 bit denoting an unchecked position (Ma et al. 2002). In one embodiment, consider a word model of length 15 with 12 checked positions and 3 unchecked positions: 110110111110111. Two DNA words of length 15 form a match if they have the same regular base at each of the checked positions, regardless of whether they have base mismatches or non-regular bases at the unchecked positions. For example, the two 15-bp DNA words below on the left form a match, but those in the middle or on the right do not form a match.

| | | |
|---|---|---|
| 110110111110111 | 110110111110111 | 110110111110111 |
| ACGTGTCACGANCGA | TCGTGTCACGANCGA | NCGTGTCACGANCGA |
| ACATGCCACGATCGA | ACATGCCACGATCGA | ACATGCCACGATCGA |
| A match | Not a match | Not a match |

[0033] Below we define the code of a word under a word model of w bits so that two DNA words of length w form a match if and only if they have the same non-negative code. Let w be the length of the word model with e checked positions and u unchecked positions such that w≥e≥1. Then w=e+u. To calculate the code of a word of length w under the word model, the word is transformed into a string of e bases a₁a₂ . . . a_{c} by removing the bases at each unchecked position according to the word model. If any of these remaining bases is a non-regular base, then the code of the word is −1. Otherwise, the code of the word is defined to be the code of the resulting string:

code(a₁a₂. . . a_{d})=d(a₁)×4^{d-1}+d(a₂)×4^{e-2}+ . . . +d(aₑ)×4⁰, (1)

where d(A) is 0, d(C) is 1, d(G) is 2 and d(T) is 3.

[0034] A superword with v words of length w is a string of v*w characters, obtained by concatenating the v words in order (Huang et al. 2006; Huang 2017). The v word positions of the superword from left to right are referred to as word positions 1 through v. For example, the word of the superword at word position v refers to the rightmost word of the superword.

[0035] The value for the parameter v is selected such that the superword length v*w (also called the minimum overlap length) is smaller than the length r of each read. For example, for reads of length 100, we can set w to 15, and v to 6, resulting in a superword length of 90. A read of length r in forward orientation has r−v*w+1 superwords, starting at positions 1, 2, . . . , r−v*w+1, and in reverse orientation has another r−v*w+1 superwords. Two superwords form a match or are identical if they have identical regular bases at each checked word position. One superword is less (greater) than another superword if the string of bases at each checked position of the first superword, in lexicographic order, comes before (after) the string of bases at each checked position of the second superword. Each read is given a unique nonnegative integer, called a read index. Then each superword in each read in each orientation can be given a unique nonnegative integer, called a superword index, computed from the orientation of the read, the start position of the superword in the read in the orientation and the read index. There is also an inverse function that is efficiently used to produce, from a superword index, the orientation of the read, the start position of the superword in the read in the orientation, and the read index. The superword array for a set of reads is an array of all superword indexes that are sorted in the lexicographic order of the superwords.

[0036] Below is an example of eight superwords in a sorted order. Each superword is made up of four words of length 15, where each checked position of the word is indicated by the bit 1, and each unchecked position by the bit 0. The last position of each word in the superword is marked by a pound sign. The top three superwords are considered identical because they have identical bases at each checked position. The middle two superwords are also identical, and so are the bottom three superwords. Superwords in each block may have different bases or the undetermined base N at an unchecked position. The top block comes before the middle block because the top block has the base G at a checked position marked by an asterisk and the middle block has the base T at the same position. Likewise, the middle block comes before the bottom block, as determined by the bases at another checked position marked by an asterisk.

```
110110111110111110110111110111110110111110111110110111110111
                            # # # #
ATNAGCCCAGTTATCCTAGTCAGACTCAGGTTNCATCATTCNTCCGANCAGACTGACCAG
ATGAGGCCAGTCATCCTTGTGAGACTTAGGTTACATCATTCATCCGAACAAACTGANCAG
ATTAGNCCAGTAATCCTCGTAAGACTAAGGTTACANCATTCTTCCGACCANACTGATCAG
                                    *
ATCAGTCCAGTNATCCTTTTTAGACTTAGGTTGCAACATTCGTCCGAGCATACTGACCAG
ATGAGACCAGTNATCCTATTGAGACTGAGGTTACATCATTCTTCCGACCAAACTGAACAG
                                                                                *
ATGAGACCAGTNATCCTNTTNAGACTCAGGTTCCAACATTGCTCCGANCATACTGAGCAG
ATNAGTCCAGTAATCCTTTTAAGACTTAGGTTGCAGCATTGGTCCGAGCANACTGACCAG
ATCAGNCCAGTNATCCTATTTAGACTNAGGTTGCATCATTGATCCGATCACACTGANCAG
```

[0037] The superword array is constructed in v rounds of sorting. First the array is initialized to the superword indexes in an increasing order of their values. Then for each word position p from v to 1 (from right to left in the superword), the array is sorted in the lexicographic order of words of every superword at word position p. The sorting is performed by using a lookup table along with a location array as buckets for all strings of length c, where the location array is an integer array with its index running from 0 to the largest superword index. The lookup table is initially set to a negative value (denoting the empty bucket) at each index, the code of each string of length c. The bucket sorting is done by placing the elements of the superword array from left to right into their buckets and then by copying the elements in the buckets in reverse order back to the superword array from right to left. Specifically, the current element, a superword index, of the superword array is placed into its bucket as follows. The current superword index is used to find its word at word position p. Then the word of length w is turned into a string of length c by using bitwise operations to remove bases at every unchecked position. Next the code of the resulting string is used as an index into the lookup table, the lookup table value at the index is saved in the location array at the superword index, and the lookup table at the index is set to the superword index. After all the elements of the superword array are entered into the buckets constructed with the lookup table and the location array, the elements in the buckets, in reverse order starting with the largest bucket, are copied back to the superword array from right to left.

[0038] After its construction, the superword array is partitioned into sections with each section composed of identical superwords, which are found one by one by using a binary search.

[0039] In one embodiment, step 1 is implemented by constructing, for each isolate, a superword array for its dataset of short reads. For short reads of at least 100 bp, all superwords are of length 96=8*12, where each superword consists of 8 words of length 12. The word model is the sequence of 12 1's with no 0's. So each block of identical superwords in the superword array corresponds to all occurrences of a distinct fragment of 96 bp. The size of the block is the frequency of the superword (a distinct fragment of 96 bp) in the short reads in forward and reverse orientation. The fragments are arranged in a non-increasing order by their frequencies. Now each isolate is represented by its ordered list of distinct fragments of length k with each fragment associated with its frequency (≥1).

[0040] Step 2 is implemented by constructing a superword array for all files of fragments, one file of fragments per isolate with each fragment treated as a read. In one embodiment, for fragments of 96 bp, the following word model of length 24 is used 111011010110001100100111

[0041] The number v of words in every superword is set to 2 so that the length of all superwords is 48. Then each block of identical superwords in the superword array corresponds to matches of 48-bp superwords of some 96-bp fragments. For each block of identical superwords, if the block contains superwords of 96-bp fragments from two or more files (two or more isolates), then these fragments from two or more isolates have 48-bp superword matches (allowing for base mismatches). The fragments in the block are removed from their files unless there is a fragment whose frequency is f times higher than the larger of c and the frequencies of all fragments from other isolates. If there is such a fragment, the fragment is kept in its file. Note that for a block with all fragments from the same file, the fragments are removed from the file unless there is a fragment whose frequency is higher than f×c. So at the end of this process, only fragments whose frequencies are f times higher than the larger of c and the frequencies of all similar fragments in other isolates remain in their files.

[0042] We implemented the above method as programs Freq for step 1, Diff for step 2 through the default option, and Uniq for step 2 through the alternative option. Freq takes as input files of short reads from an isolate and produces as output a file of distinct fragments of length k each with its frequency in the short reads in forward and reverse orientation. The fragments in the file are arranged in a non-increasing order by their frequencies, with the most frequent fragments placed at the beginning of the file. Diff and Uniq take as input a number of files of fragments, with each produced by Freq on an isolate, and produces as output the same number of files of isolate-specific fragments. Each output file of isolate-specific fragments from the Uniq program contains those fragments in the corresponding input file that have high frequency but have no gap-less matches of length s (allowing for base mismatches) to fragments in the other input files. Each output file from the Diff program contains those fragments from Uniq plus additional fragments with sufficiently higher frequencies that the frequencies of all similar fragments in the other input files. The fragments in each output file are still ordered by their frequencies with the most frequent fragments at the beginning of the file.

[0043] Finding Structural Variants to Identify Closely Related Species

[0044] We present an application of the method in one embodiment. To show that it is better to mine discriminating fragments in short reads than in assembled genomes, we selected A. fumigatus and four other pathogenic species in Aspergillus section Fumigati, and Fusarium virguliforme and three other pathogenic species in the Fusarium solani species complex. The five Aspergillus species have little variation in their ITS region, and so are the four Fusarium species. For each of the nine species, a dataset of short reads for an isolate from the species was identified by its accession number from Sequence Read Archive (SRA) at The National Center for Biotechnology Information (NCBI).

[0045] We ran Freq on each dataset of short reads to produce a file of distinct 96-bp fragments each with its occurrence count. Then we ran Uniq (with the match length s set to 48) on the five files of 96-bp fragments for the Aspergillus isolates to produce five files of unique fragments. For each file of unique 96-bp fragments, top 50,000 (most frequent) fragments were taken from the file and were compared by Blastn (Zhang et al. 2000) to the database of all assembled genomes (including the assembled genome of the isolate itself) in the Aspergillus genus. We also repeated this process on the four files of 96-bp fragments for the Fusarium isolates, with the database of all assembled genomes (including the assembled genome of the isolate itself) in the Fusarium genus. Table 1 shows the species of each isolate, the accession number of each dataset of short reads, and occurrence count ranges for top 50,000 fragments, and the number and percentage of those fragments that have no matches to the database of the assembled genomes.

[0046] We found that 8,312 (or about 16.6%) of the 96-bp fragments each occurring 69 to 2,603 times in the short reads (NCBI SRA accession SRR3757108) of A. novo-fumigatus IBT 16806 have no match of ≥77% percent identity to 191 assembled genomes (including the assembled genome of this isolate) in the Aspergillus genus. This finding and similar results for four other isolates in Aspergillus section Fumigati are shown in Table 1. Also reported in Table 1 are results for several closely related isolates in the Fusarium solani complex: for each isolate, the number and percentage of 96-bp fragments with no matches to 252 assembled genomes (including (including the assembled genome of this isolate) in the Fusarium genus.

[0047] The results show that a significant portion of frequent fragments are present in the short reads but have no matches to the assembled genomes. Thus, there are two problems with mining discriminating fragments in assembled genomes. One problem is that discriminating fragments that are present only in an isolate but are missing in

TABLE 1
Number and percentage of 96-bp fragments (in each of several isolates)
with no matches to all assembled genomes (including its own) in the genus

| | NCBI SRA | Fragment | No. (%) of fragments |
|---|---|---|---|
| Isolate | accession | count range | with no matches |
| A. thermomutatus HMR AF 39 | SRR8165488 | 82-4038 | 10410 (20.1%) |
| A. novofumigatus IBT 16806 | SRR3757108 | 69-2603 | 8360 (16.7%) |
| A. viridinutans FRR 0576 | SRR9026512 | 29-6744 | 5241 (10.5%) |
| A. fumigatus JCM 10253 | DRR032500 | 110-5460 | 3149 (6.3%) |
| A. turcosus HMR AF 23 | SRR8165489 | 82-4945 | 940 (1.9%) |
| F. azukicola NRRL 54364 | SRR2102277 | 98-9999 | 8905 (17.8%) |
| F. cuneirostrum NRRL 31157 | SRR2098566 | 28-1113 | 5799 (11.6%) |
| F. phaseoli NRRL 31156 | SRR2098571 | 27-1932 | 2839 (5.7%) |
| F. virguliforme NRRL 34551 | SRR2098563 | 49-1285 | 2044 (4.1%) |

its assembled genome could not be selected by assembly-based approaches. The other problem is that non-discriminating fragments that are present in two isolates but are missing only in one of the two assembled genomes are selected as discriminating ones by assembly-based approaches.

[0048] We also used the new method to find discriminating fragments for isolates within the species of F. virguliforme. Note that F. virguliforme is a young pathogenic species with low single nucleotide polymorphism (SNP) rates less than 1 in 50 kb in core chromosomes between isolates within this species (Huang et al. 2016). We selected two databases of short reads (NCBI SRA accession SRR2098554) for isolate F. virguliforme LL0009 and (NCBI SRA accession SRR2096988) for isolate F. virguliforme Clinton-1B. We ran Freq on each dataset of short reads to produce a file of distinct 96-bp fragments. Then we ran Uniq on the two files of fragments to produce two files of unique fragments, where unique fragments in one output file had no strong matches (with percent identity above 93%) to ones in the other output file. We selected top 25,000 fragments with an occurrence count range of 35 to 1103 from the file of unique fragments for isolate LL0009, and compared them by Blastn with each of the assembled genomes for isolates LL0009, Clinton-1B, NRRL 34551, and Mont-1, all from the species of F. virguliforme. Of the 25,000 fragments, 3287 (13.1%) had no matches to the genome assembly of isolate LL0009, and 19,413 to 22,974 (71.9% to 79.1%) had no matches of ≥77% percent identity to the genome assemblies of the other three isolates. In particular, 168 fragments with occurrence counts of 822 to 1103 had no matches to the genome assemblies of the other three isolates, indicating that these high-copy fragments discriminate LL0009 from the other three isolates in this species.

[0049] Sequence Listing: Fungal Discriminating Fragments

[0050] The fungal discriminating fragments in Table 1 are provided in part 1 of the Sequence Listing, using the symbols and format in accordance with the requirements of 37 CFR 1.821-1.825. The sequences of these fragments (SEQ ID NO: 1 to SEQ ID NO: 47687) are listed in the order of their species in Table 1. The occurrence count of each fragment is given as an integer after numeric identifier <223> in the <220> to <223> feature section. For each species, the sequences of its fragments are listed in a non-increasing order of occurrence counts.

[0051] Finding Structural Variants to Distinguish Normal Cells from Cancer Cells

[0052] We present an application of the method in another embodiment. For frequency count and factor cutoffs c and f, let SV_{c,f}(U|S, T) denote structural variants in the form of fragments whose frequency counts in isolate U are f times higher than the larger of c and the frequency counts of all similar fragments in isolates S or T. The structural variants in SV_{c,f}(U|S,T) are said to be unique to isolate U with respect to isolates S and T. Below we give a precise definition of the notation SV_{c,f} (U|S,T). For a fragment u in isolate U, let freq(u) denote its frequency in the dataset of reads from U. The frequency count cutoff c is used to exclude the fragments with frequency counts less than c, which are considered to contain errors. A fragment u from isolate U is a structural variant in SV_{c,f} (U|S,T) if freq(u)≥f×freq(t) and freq(t)≥c hold for every fragment t in isolates S or T with a superword match to fragment u, or if freq(u)≥f×c holds in case fragment u has no superword matches to any fragments in isolates S or T with frequency counts equal to or higher than c.

[0053] We illustrate the use of the new method by providing results from its implementation on datasets of reads from four female human cell lines: healthy B lymphocyte cell line NA12878 (NCBI SRA accession SRR9644381), healthy B lymphocyte cell line NA24695 (SRR2831468), ovary cancer cell line SNU-251 (SRR10418660), and gastric cancer cell line SGC-7901 (SRR10447757). Below we use single-letter names for these four cell lines: W (White) for NA12878, C (Chinese) for NA24695, 0 (Ovary) for SNU-251, and G (Gastric) for SGC-7901. The dataset from each of the four cell lines consists of a pair of files storing paired-end reads of 150 bp. For each cell line, only the first of its two files, at 12.7-18.1X genome coverage, was used as input to the Freq program. In one embodiment, Freq produced a file of 120-bp fragments each with its frequency count, arranged in a non-increasing order of frequency counts. The Diff took input files of fragments from different cell lines and produced a file of structural variants unique to each of the cell lines with respect to the rest, with the frequency count cutoff set to 20 and frequency factor cutoff set to 10, and the superword model of 116 bits obtained by concatenating 4 copies of the 29-bit word model 11001100110010001100110011011. Note that two 120-bp fragments had a superword match of 116 bp if they had a gapfree alignment of 116 bp with a base match at every 1-bit position of the superword model. Other word models can be used with the new programs.

[0054] For each combination of two out of the four human cell lines, Diff produced, without using any genome assembly or database sequences, structural variants unique to one cell line with respect to the other. For example, SV_{20,10}(G|W) contained 421,963 distinct fragments whose frequency counts in cell line G were 10 times higher than the larger of 20 and those of similar fragments in cell line W. The frequency count of the first fragment in this set was 3850. A comparison of the fragment with the GenBank NR/NT nucleotide database revealed that it had perfect matches to genome assemblies of the bacterium Mycoplasma pulmonis, but no matches to any human sequences. A further comparison between the set of fragments and two M. pulmonis genome assemblies found 407,978 fragments having matches to parts of the bacterium genome. For example, the first fragment with an frequency count of 3850 had a total of 23 matches to the two genome assemblies, confirming that the fragment was part of a structural variant in the genome. Note that according to the NCBI SRA accession SRR10447757 record, cell line G was from a study entitled ‘Whole-genome sequencing H. pylori-infected gastric cancer cells’, but our sequence analysis showed that the bacterium pathogen in the cells was M. pulmonis, not H pylori. And because some of the fragments might come from a strain of M. pulmonis whose genome could differ in highly variable antigene regions from the two M. pulmonis genome assemblies, it was likely that SV_{20,10}(G|W) contained M. pulmonis fragments that had no matches to the two M. pulmonis genome assemblies. So we used a genome assembly-free approach to removing these M. pulmonis fragments from SV_{20,10}(G|W). By using a variant of Diff, we found a subset of 472 fragments, out of SV_{20,10}(G|W), with a superword match of 58 bp to the input set of fragments from cell line W, indicating that those 472 fragments might come from human sequences. The highest frequency count of these 472 fragments was 2818. Of these 472 fragments, 283 had matches to parts of human mitochondrion sequences.

[0055] Similarly, the output dataset SV_{20,10} (W, C) contained unique fragments from Epstein-Barr Virus.

[0056] For six combinations of two human cell lines U and S out of the four, SV_{20,10}(U|S) contained structural variants unique to cell line U with respect to cell line S. These six combinations are shown in column 1 of Table 2. For example, the output datasets SV_{20,10}(W|O) and SV_{20,10}(C|O) contained structural variants with at least 10 times higher frequency counts in the healthy cell lines W and C than in the ovary cancer cell line O. Recall that the dataset FG(O) is a sorted (in a non-increasing order of frequency counts) file of 120-bp fragments each with its frequency count in the dataset of short reads from cell line O. The highest frequency count of fragments in FG(O) having a match to part of a 45S rDNA repeat was 5403, that in FG(W was 6513, and that in FG(C) was 2563. So the number of 45S rDNA repeats in the cancer cell line O was not lower than in the healthy cell line C. However, no fragments in FG(O) with frequency counts equal to or larger than 20 had matches to parts of the 157-bp and 1869-bp DNA sequences encoding for the human 5.8S and 18S RNA genes, respectively. The highest frequency count of fragments in FG(O) having a match to part of the DNA sequence encoding for the human 28S RNA gene was 75. These observations help explain why SV_{20,10}(W|O) and SV_{20,10}(C|O) contained many fragments with high frequency counts from the three RNA gene coding regions, which were unique to cell lines W and C with respect to cell line O, respectively (Table 2). These results suggest that many 45S rDNA repeat units in cell line O were not full-length, missing the 18S, 5.8S and 28S gene regions. Similarly, FG(O) contained few fragments with frequency counts above 20 from human mitochondrion DNA. And Table 2 also shows that cell line G was low in copy number in parts of the region encoding for the 28S RNA gene. Note that our de novo method found structural variants of RNA genes unique to normal cells with respect to cancer cells through an analysis of datasets of short reads from normal and cancer cells, without using any assembled rDNA sequence; a previous study obtained similar results by mapping short reads onto an assembled rDNA sequence (Wang & Lemos, 2017).

[0057] Sequence Listing: Human Discriminating Fragments

[0058] The human discriminating fragments in Table 2 are provided in part 2 of the Sequence Listing, using the symbols and format in accordance with the requirements of 37 CFR 1.821-1.825. The sequences of these fragments (SEQ ID NO: 47688 to SEQ ID NO: 84193) are listed in the order of their isolate pairs (rows) in Table 2, and are further arranged in the order of their sequence types (columns) for the same row in Table 2. The occurrence count of each fragment is given as an integer followed by its isolate pair and sequence type labels after numeric identifier <223> in the <220> to <223>feature section. For each isolate pair and each sequence type, if the number at this intersection entry of Table 2 is not 0, then the sequences of the fragments corresponding to this entry are listed in a non-increasing order of occurrence counts. For example, SEQ ID NO: 47688 is the sequence of the fragment with the highest occurrence count for isolate pair SV_{20,10}(W|O) and sequence type 18S and its free text is of the form: <223> 990 for SV(W|O) and 18S, where 990 is the occurrence

TABLE 2
Some of the structural variants whose frequency counts in one cell line are
at least 10 times higher than those of similar ones in the other cell line: The number
of fragments (with a range of their frequency counts in parentheses) having a perfect
match to part of an RNA gene or a similar match to part of mitochondrion

| Variants for each | | | | |
|---|---|---|---|---|
| pair of cell lines ^{a} | 18S | 5.8S | 28S | mtDNA |
| SV_{20,10}(W \| O) | 1343 (610-990) | 31 (740-885) | 2616 (206-930) | 11570 (411-1934) |
| SV_{20,10}(C \| O) | 1734 (375-862) | 38 (496-600) | 2512 (206-733) | 15439 (212-1108) |
| SV_{20,10}(W \| G) | 0 | 0 | 204 (293-693) | 237 (411-1934) |
| SV_{20,10}(C \| G) | 0 | 0 | 169 (232-516) | 287 (363-871) |
| SV_{20,10}(W \| C) | 0 | 0 | 10 (301-336) | 148 (426-1738) |
| SV_{20,10}(C \| W) | 0 | 0 | 0 | 168 (229-811) |

^{a} SV_{20,10}(U | S) denotes structural variants whose frequency counts in cell line U are 10 times higher than those of similar ones in cell line S (see text for precise definition). Isolate notations: W (White), NA12878; C (Chinese), NA24695; O (Ovary), SNU-251; G (Gastric), SGC-7901. count, SV(W|O) is the isolate pair label with the subscripts omitted, and 18S is the sequence type. Note that the subscripts in the isolate pair label are difficult to produce in ASCII text.

### REFERENCES

[0059] [1] Cameron D L, Stefano L, Papenfuss A T. 2019. Comprehensive evaluation and characterisation of short read general-purpose structural variant calling software. Nature Communications 10: 3240.
[0060] [2] Fedorova N D, Khaldi N, Joardar V S, et al. 2008. Genomic islands in the pathogenic filamentous fungus Aspergillus fumigatus. PLoS Genetics 4: e1000046.
[0061] [3] Geiser D M, Jimenez-Gasco M D, Kang S C, Makalowska I, Veeraraghavan N, Ward T J, Zhang N, Kuldau G A, O'Donnell K. 2004. FU.S.A.RIUM-ID v. 1.0: A DNA sequence database for identifying Fusarium. European Journal of Plant Pathology 110: 473-479.
[0062] [4] Geiser D M, Klich M A, Frisvad J C, Peterson S W, Varga J, Samson R A. 2007. The current status of species recognition and identification in Aspergillus. Studies in Mycology 59: 1-10.
[0063] [5] Glass N L, Dementhon K. 2006. Non-self recognition and programmed cell death in filamentous fungi. Current Opinion in Microbiology 9: 553-558.
[0064] [6] Goubert C, Modolo L, Vieira C, ValienteMoro C, Mavingui P, Boulesteix M. 2015. De novo assembly and annotation of the Asian tiger mosquito (Aedes albopictus) repeatome with dnaPipeTE from raw genomic reads and comparative analysis with the yellow fever mosquito (Aedes aegypti). Genome biology and evolution 7: 1192-1205.
[0065] [7] Hihlal E, Braumann I, van den Berg M, Kempken F. 2011. Suitability of Vader for transposon-mediated mutagenesis in Aspergillus niger. Applied and Environmental Microbiology 77: 2332-2336.
[0066] [8] Huang X, Das A, Sahu B B, Srivastava S K, Leandro L F, O'Donnell K, Bhattacharyya M K. 2016. Identification of highly variable supernumerary chromosome segments in an asexual pathogen. PLoS ONE 11: e0158183.
[0067] [9] Huang X. 2017. Sequence assembly. In Keith J M. (ed.) Bioinformatics—Volume 1: Data, Sequence Analysis, and Evolution. Humana Press, Second Edition, 35-45.
[0068] [10] Huang X. 2019. Host-specific subtelomere: Genomic architecture of pathogen emergence in asexual filamentous fungi. bioRxiv doi: https://doi.org/10.1101/721753.
[0069] [11] Huang X, Yang S-P, Chinwalla A, Hillier L, Minx P, Mardis E, Wilson R. 2006. Application of a superword array in genome assembly. Nucleic Acids Research 34: 201-205.
[0070] [12] Hysom D A, Naraghi-Arani P, Elsheikh M, Carrillo A C, Williams P L, Gardner S N. 2012. Skip the alignment: degenerate, multiplex primer and probe design using K-mer matching instead of alignments. PLoS ONE 7: e34560. Notes: used genome assemblies. An input file of genome sequences in Fasta format.
[0071] [13] Ishikawa F H, Souza E A, Shoji J-Y, Connolly L, Freitag M, Read N D, Roca M G. 2012. Heterokaryon incompatibility is suppressed following conidial anastomosis tube fusion in a fungal plant pathogen. PLoS ONE 7: e31175.
[0072] [14] Koch P, Platzer M, Downie B R. 2014. RepARK-de novo creation of repeat libraries from whole-genome NGS reads. Nucleic acids research 42: e80.
[0073] [15] Lamoth F. 2016. Aspergillus fumigatus-related species in clinical practice. Frontiers in Microbiology 17: 683.
[0074] [16] Ma B, Tromp J, Li M. 2002. PatternHunter: faster and more sensitive homology search. Bioinformatics 18: 440-445.
[0075] [17] Manners J M, He C. 2011. Slow-growing heterokaryons as potential intermediates in supernumerary chromosome transfer between biotypes of Colletotrichum gloeosporioides. Mycological Progress 10: 383-388.
[0076] [18] Nelson P E, Dignani M C, Anaissie E J. 1994. Taxonomy, biology, and clinical aspects of Fusarium species. Clinical Microbiology Reviews 7: 479-504.
[0077] [19] Novak P, Neumann P, Macas J. 2010. Graph-based clustering and characterization of repetitive sequences in next-generation sequencing data. BMC Bioinformatics 11: 378.
[0078] [20] Ounit R, Lonardi S. 2016. Higher classification sensitivity of short metagenomic reads with CLARK-S. Bioinformatics 32 3823-3825.
[0079] [21] Ounit R, Wanamaker S, Close T J, Lonardi S. 2015. CLARK: fast and accurate classification of metagenomic and genomic sequences using discriminative k-mers. BMC Genomics 16: 236.
[0080] [22] Paoletti M, Clave C. 2007. The fungus-specific HET domain mediates programmed cell death in Podospora anserina. Eukaryot Cell 6: 2001-2008.
[0081] [23] Paoletti M, Saupe S J. 2009. Fungal incompatibility: evolutionary origin in pathogen defense? BioEssays 31: 1201-1210.
[0082] [24] Pritchard L, Holden N J, Bielaszewska M, Karch H, Toth I K. 2012. Alignment-free design of highly discriminatory diagnostic primer sets for Escherichia coli O104:H4 outbreak strains. PLoS ONE 7: e34498. Notes: used genome assemblies.
[0083] [25] Schmid M, Frei D, Patrignani A, Schlapbach R, Frey J E, Remus-Emsermann M N P, Ahrens C H. 2018. Pushing the limits of de novo genome assembly for complex prokaryotic genomes harboring very long, near identical repeats. Nucleic Acids Research 46 8953-8965.
[0084] [26] Schoch C L, Seifert K A, Huhndorf S, Robert V, Spouge J L, Levesque C A, Chen W. Fungal barcoding consortium. 2012. Nuclear ribosomal internal transcribed spacer (ITS) region as a universal DNA barcode marker for fungi. Proceedings of the National Academy of Sciences of the United States of America, 109: 6241-6246.
[0085] [27] Thomsen M C F, Hasman H, Westh H, Kaya H, Lund O. 2017. RUCS: rapid identification of PCR primers for unique core sequences. Bioinformatics 33 3917-3921.
[0086] [28] Wang J, Jacobs J L, Byrne J M, Chilvers M I. 2015. Improved diagnoses and quantification of Fusarium virguliforme, causal agent of soybean sudden death syndrome. Phytopathology 105: 378-387.
[0087] [29] Wang M, Lemos B. 2017. Ribosomal DNA copy number amplification and loss in human cancers is linked to tumor genetic context, nucleolus activity, and proliferation. PLoS Genetics 13: e1006994.
[0088] [30] Wickes B L, Wiederhold N P. 2018. Molecular diagnostics in medical mycology. Nature communications 9: 5135.
[0089] [31] Wu C, Kim Y-S, Smith K M, Li W, Hood H M, Staben C, Selker E U, Sachs M S, Farmant M L. 2009. Characterization of chromosome ends in the filamentous fungus Neurospora crassa. Genetics 181: 1129-1145.
[0090] [32] Zhang Z, Schwartz S, Lukas Wagner L, Miller W. 2000. A greedy algorithm for aligning DNA sequences. Journal of Computational Biology 7: 203-214.

The invention claimed is:

1. A method of finding structural variants for identifying and differentiating species, strains and cells in normal and pathological conditions, comprising:
(a) a data storage element storing two or more whole-genome datasets of sequence reads with no genomic location information, where the datasets come from different species or strains, or from cells in normal and pathological conditions; and
(b) a processing element associated with the storage element and configured to:
i. generate, from each dataset of reads, a set of all fragments each associated with its positive number of occurrences (frequency) in the reads in forward and reverse orientation, and arrange the fragments in non-increasing order of their frequency counts, where the length of fragments is less than the length of reads;
ii. store each set of fragments with their frequency counts in non-increasing order of these counts in an output storage element;
iii. obtain every input subset of fragments with their frequency counts≥c (a count cutoff);
iv. generate, from each input subset of fragments, an output subset of fragments such that the frequency counts of all fragments with no matches to fragments in any other subset are greater than f*c, and the frequency counts of all fragments with matches to fragments in other subsets are f times greater than those of the fragments in the other subsets, where the number f is a count factor parameter; and
v. store each output subset of fragments with their frequency counts in non-increasing order in a second output storage element.

2. The method of claim 1, wherein the datasets come from different species or strains of bacteria.

3. The method of claim 1, wherein the datasets come from different species or strains of algae.

4. The method of claim 1, wherein the datasets come from different species or strains of protists.

5. The method of claim 1, wherein the datasets come from different species or strains of fungi.

6. The method of claim 1, wherein the datasets come from different species or strains of plants.

7. The method of claim 1, wherein the datasets come from different species or strains of animals.

8. The method of claim 1, wherein the datasets come from human cells in normal and pathological conditions.

9. The method of claim 1, wherein the datasets come from animal cells in normal and pathological conditions.

The application's sequence listing, which the Patent Office published only in electronic form, follows.

SEQUENCE LISTING (84193 sequences)

SEQ ID NO: 1 - DNA, 96 bp, Aspergillus thermomutatus
  misc_feature: 963
gatgtgacccattcgcgattcccaggctgcataacttgacgtctgccatgtatttcagctctagttactaccttagcagtagcaattagacccatc

SEQ ID NO: 2 - DNA, 96 bp, Aspergillus thermomutatus
  misc_feature: 937
tgtgacccattcgcgattcccaggctgcataacttgacgtctgccatgtatttcagctctagttactaccttagcagtagcaattagacccatcgc

SEQ ID NO: 3 - DNA, 96 bp, Aspergillus thermomutatus
  misc_feature: 927
gtgacccattcgcgattcccaggctgcataacttgacgtctgccatgtatttcagctctagttactaccttagcagtagcaattagacccatcgca

SEQ ID NO: 4 - DNA, 96 bp, Aspergillus thermomutatus
  misc_feature: 926
tgacccattcgcgattcccaggctgcataacttgacgtctgccatgtatttcagctctagttactaccttagcagtagcaattagacccatcgcat

SEQ ID NO: 5 - DNA, 96 bp, Aspergillus thermomutatus
  misc_feature: 923
atgtgacccattcgcgattcccaggctgcataacttgacgtctgccatgtatttcagctctagttactaccttagcagtagcaattagacccatcg

SEQ ID NO: 6 - DNA, 96 bp, Aspergillus thermomutatus
  misc_feature: 923
agatgtgacccattcgcgattcccaggctgcataacttgacgtctgccatgtatttcagctctagttactaccttagcagtagcaattagacccat

SEQ ID NO: 7 - DNA, 96 bp, Aspergillus thermomutatus
  misc_feature: 908
gacccattcgcgattcccaggctgcataacttgacgtctgccatgtatttcagctctagttactaccttagcagtagcaattagacccatcgcata

SEQ ID NO: 8 - DNA, 96 bp, Aspergillus thermomutatus
  misc_feature: 905
taatctcaagcaattagagaagcaggcaagcacaatcaagaagctgcttagtgagcgtgggcatagtcccgctacccctactaaagctgctttaga

SEQ ID NO: 9 - DNA, 96 bp, Aspergillus thermomutatus
  misc_feature: 904
ataatctcaagcaattagagaagcaggcaagcacaatcaagaagctgcttagtgagcgtgggcatagtcccgctacccctactaaagctgctttag

SEQ ID NO: 10 - DNA, 96 bp, Aspergillus thermomutatus
  misc_feature: 904
aatctcaagcaattagagaagcaggcaagcacaatcaagaagctgcttagtgagcgtgggcatagtcccgctacccctactaaagctgctttagat

SEQ ID NO: 11 - DNA, 96 bp, Aspergillus thermomutatus
  misc_feature: 903
cataatctcaagcaattagagaagcaggcaagcacaatcaagaagctgcttagtgagcgtgggcatagtcccgctacccctactaaagctgcttta

SEQ ID NO: 12 - DNA, 96 bp, Aspergillus thermomutatus
  misc_feature: 903
atagatgtgacccattcgcgattcccaggctgcataacttgacgtctgccatgtatttcagctctagttactaccttagcagtagcaattagaccc

SEQ ID NO: 13 - DNA, 96 bp, Aspergillus thermomutatus
  misc_feature: 902
ctcatgttcaagatatggccaatattttgttgtcacagcgagggtttactgatattcaacctgtcggcaagaattgggtgtataactttattaaac

SEQ ID NO: 14 - DNA, 96 bp, Aspergillus thermomutatus
  misc_feature: 896
tcataatctcaagcaattagagaagcaggcaagcacaatcaagaagctgcttagtgagcgtgggcatagtcccgctacccctactaaagctgcttt

SEQ ID NO: 15 - DNA, 96 bp, Aspergillus thermomutatus
  misc_feature: 895
ttcctcttcagctttagtcaatttatgtgagttggcgcgttgttcagctcgaaaacagtgtccatttaatcgccgctgaagtgttgtccgcggaac

SEQ ID NO: 16 - DNA, 96 bp, Aspergillus thermomutatus
  misc_feature: 893
atctcaagcaattagagaagcaggcaagcacaatcaagaagctgcttagtgagcgtgggcatagtcccgctacccctactaaagctgctttagatc

SEQ ID NO: 17 - DNA, 96 bp, Aspergillus thermomutatus
  misc_feature: 892
tctcatgttcaagatatggccaatattttgttgtcacagcgagggtttactgatattcaacctgtcggcaagaattgggtgtataactttattaaa

SEQ ID NO: 18 - DNA, 96 bp, Aspergillus thermomutatus
  misc_feature: 891
ccccgaccatctcatgttcaagatatggccaatattttgttgtcacagcgagggtttactgatattcaacctgtcggcaagaattgggtgtataac

SEQ ID NO: 19 - DNA, 96 bp, Aspergillus thermomutatus
  misc_feature: 890
ctacgagctgcgcatgagaagaaaatccagaagaggaagcgatctacaaagcagatagcctctacagaaggactttctatccaggaaggccgggac

SEQ ID NO: 20 - DNA, 96 bp, Aspergillus thermomutatus
  misc_feature: 890
acccattcgcgattcccaggctgcataacttgacgtctgccatgtatttcagctctagttactaccttagcagtagcaattagacccatcgcatat

SEQ ID NO: 21 - DNA, 96 bp, Aspergillus thermomutatus
  misc_feature: 887
attcctcttcagctttagtcaatttatgtgagttggcgcgttgttcagctcgaaaacagtgtccatttaatcgccgctgaagtgttgtccgcggaa

SEQ ID NO: 22 - DNA, 96 bp, Aspergillus thermomutatus
  misc_feature: 885
tccccgaccatctcatgttcaagatatggccaatattttgttgtcacagcgagggtttactgatattcaacctgtcggcaagaattgggtgtataa

SEQ ID NO: 23 - DNA, 96 bp, Aspergillus thermomutatus
  misc_feature: 884
tagatgtgacccattcgcgattcccaggctgcataacttgacgtctgccatgtatttcagctctagttactaccttagcagtagcaattagaccca

SEQ ID NO: 24 - DNA, 96 bp, Aspergillus thermomutatus
  misc_feature: 883
cccattcgcgattcccaggctgcataacttgacgtctgccatgtatttcagctctagttactaccttagcagtagcaattagacccatcgcatatc

SEQ ID NO: 25 - DNA, 96 bp, Aspergillus thermomutatus
  misc_feature: 880
atctcatgttcaagatatggccaatattttgttgtcacagcgagggtttactgatattcaacctgtcggcaagaattgggtgtataactttattaa

SEQ ID NO: 26 - DNA, 96 bp, Aspergillus thermomutatus
  misc_feature: 879
cttcagctttagtcaatttatgtgagttggcgcgttgttcagctcgaaaacagtgtccatttaatcgccgctgaagtgttgtccgcggaacattgt

SEQ ID NO: 27 - DNA, 96 bp, Aspergillus thermomutatus
  misc_feature: 878
ctcataatctcaagcaattagagaagcaggcaagcacaatcaagaagctgcttagtgagcgtgggcatagtcccgctacccctactaaagctgctt

SEQ ID NO: 28 - DNA, 96 bp, Aspergillus thermomutatus
  misc_feature: 878
cctcttcagctttagtcaatttatgtgagttggcgcgttgttcagctcgaaaacagtgtccatttaatcgccgctgaagtgttgtccgcggaacat

SEQ ID NO: 29 - DNA, 96 bp, Aspergillus thermomutatus
  misc_feature: 877
tcctcttcagctttagtcaatttatgtgagttggcgcgttgttcagctcgaaaacagtgtccatttaatcgccgctgaagtgttgtccgcggaaca

SEQ ID NO: 30 - DNA, 96 bp, Aspergillus thermomutatus
  misc_feature: 876
actacgagctgcgcatgagaagaaaatccagaagaggaagcgatctacaaagcagatagcctctacagaaggactttctatccaggaaggccggga

SEQ ID NO: 31 - DNA, 96 bp, Aspergillus thermomutatus
  misc_feature: 872
ccattcgcgattcccaggctgcataacttgacgtctgccatgtatttcagctctagttactaccttagcagtagcaattagacccatcgcatatcc

SEQ ID NO: 32 - DNA, 96 bp, Aspergillus thermomutatus
  misc_feature: 869
ctcttcagctttagtcaatttatgtgagttggcgcgttgttcagctcgaaaacagtgtccatttaatcgccgctgaagtgttgtccgcggaacatt

SEQ ID NO: 33 - DNA, 96 bp, Aspergillus thermomutatus
  misc_feature: 867
tcttcagctttagtcaatttatgtgagttggcgcgttgttcagctcgaaaacagtgtccatttaatcgccgctgaagtgttgtccgcggaacattg

SEQ ID NO: 34 - DNA, 96 bp, Aspergillus thermomutatus
  misc_feature: 866
tgctattcttctagctcaagagaatcaggaactacgagctgcgcatgagaagaaaatccagaagaggaagcgatctacaaagcagatagcctctac

SEQ ID NO: 35 - DNA, 96 bp, Aspergillus thermomutatus
  misc_feature: 863
tcagcaccaaagacacctcataatctcaagcaattagagaagcaggcaagcacaatcaagaagctgcttagtgagcgtgggcatagtcccgctacc

SEQ ID NO: 36 - DNA, 96 bp, Aspergillus thermomutatus
  misc_feature: 862
cagcaccaaagacacctcataatctcaagcaattagagaagcaggcaagcacaatcaagaagctgcttagtgagcgtgggcatagtcccgctaccc

SEQ ID NO: 37 - DNA, 96 bp, Aspergillus thermomutatus
  misc_feature: 861
gtgctattcttctagctcaagagaatcaggaactacgagctgcgcatgagaagaaaatccagaagaggaagcgatctacaaagcagatagcctcta

SEQ ID NO: 38 - DNA, 96 bp, Aspergillus thermomutatus
  misc_feature: 861
cccgaccatctcatgttcaagatatggccaatattttgttgtcacagcgagggtttactgatattcaacctgtcggcaagaattgggtgtataact

SEQ ID NO: 39 - DNA, 96 bp, Aspergillus thermomutatus
  misc_feature: 860
tacgagctgcgcatgagaagaaaatccagaagaggaagcgatctacaaagcagatagcctctacagaaggactttctatccaggaaggccgggacc

SEQ ID NO: 40 - DNA, 96 bp, Aspergillus thermomutatus
  misc_feature: 858
gctttagtcaatttatgtgagttggcgcgttgttcagctcgaaaacagtgtccatttaatcgccgctgaagtgttgtccgcggaacattgtaaatg

SEQ ID NO: 41 - DNA, 96 bp, Aspergillus thermomutatus
  misc_feature: 858
caggaactacgagctgcgcatgagaagaaaatccagaagaggaagcgatctacaaagcagatagcctctacagaaggactttctatccaggaaggc

SEQ ID NO: 42 - DNA, 96 bp, Aspergillus thermomutatus
  misc_feature: 857
ttcagctttagtcaatttatgtgagttggcgcgttgttcagctcgaaaacagtgtccatttaatcgccgctgaagtgttgtccgcggaacattgta

SEQ ID NO: 43 - DNA, 96 bp, Aspergillus thermomutatus
  misc_feature: 856
tatcaagatgacaagttaccaagcaactggagaattgaagttagtccaaatggatggacaacagatcaaattggcatacgttggctacaaaaagtc

SEQ ID NO: 44 - DNA, 96 bp, Aspergillus thermomutatus
  misc_feature: 855
tcagctttagtcaatttatgtgagttggcgcgttgttcagctcgaaaacagtgtccatttaatcgccgctgaagtgttgtccgcggaacattgtaa

SEQ ID NO: 45 - DNA, 96 bp, Aspergillus thermomutatus
  misc_feature: 855
ctgcgcatgagaagaaaatccagaagaggaagcgatctacaaagcagatagcctctacagaaggactttctatccaggaaggccgggacctcatac

SEQ ID NO: 46 - DNA, 96 bp, Aspergillus thermomutatus
  misc_feature: 855
gtatcaagatgacaagttaccaagcaactggagaattgaagttagtccaaatggatggacaacagatcaaattggcatacgttggctacaaaaagt

SEQ ID NO: 47 - DNA, 96 bp, Aspergillus thermomutatus
  misc_feature: 853
cagctttagtcaatttatgtgagttggcgcgttgttcagctcgaaaacagtgtccatttaatcgccgctgaagtgttgtccgcggaacattgtaaa

SEQ ID NO: 48 - DNA, 96 bp, Aspergillus thermomutatus
  misc_feature: 851
agcaccaaagacacctcataatctcaagcaattagagaagcaggcaagcacaatcaagaagctgcttagtgagcgtgggcatagtcccgctacccc

SEQ ID NO: 49 - DNA, 96 bp, Aspergillus thermomutatus
  misc_feature: 851
atcaagatgacaagttaccaagcaactggagaattgaagttagtccaaatggatggacaacagatcaaattggcatacgttggctacaaaaagtct

SEQ ID NO: 50 - DNA, 96 bp, Aspergillus thermomutatus
  misc_feature: 850
gctgcgcatgagaagaaaatccagaagaggaagcgatctacaaagcagatagcctctacagaaggactttctatccaggaaggccgggacctcata

SEQ ID NO: 51 - DNA, 96 bp, Aspergillus thermomutatus
  misc_feature: 847
gagctgcgcatgagaagaaaatccagaagaggaagcgatctacaaagcagatagcctctacagaaggactttctatccaggaaggccgggacctca

SEQ ID NO: 52 - DNA, 96 bp, Aspergillus thermomutatus
  misc_feature: 847
agctgcgcatgagaagaaaatccagaagaggaagcgatctacaaagcagatagcctctacagaaggactttctatccaggaaggccgggacctcat

SEQ ID NO: 53 - DNA, 96 bp, Aspergillus thermomutatus
  misc_feature: 846
tcaagatgacaagttaccaagcaactggagaattgaagttagtccaaatggatggacaacagatcaaattggcatacgttggctacaaaaagtctt

SEQ ID NO: 54 - DNA, 96 bp, Aspergillus thermomutatus
  misc_feature: 846
tatgtgagttggcgcgttgttcagctcgaaaacagtgtccatttaatcgccgctgaagtgttgtccgcggaacattgtaaatgcgtgaagcttcac

SEQ ID NO: 55 - DNA, 96 bp, Aspergillus thermomutatus
  misc_feature: 844
tcgcgattcccaggctgcataacttgacgtctgccatgtatttcagctctagttactaccttagcagtagcaattagacccatcgcatatccagtc

SEQ ID NO: 56 - DNA, 96 bp, Aspergillus thermomutatus
  misc_feature: 842
cattcgcgattcccaggctgcataacttgacgtctgccatgtatttcagctctagttactaccttagcagtagcaattagacccatcgcatatcca

SEQ ID NO: 57 - DNA, 96 bp, Aspergillus thermomutatus
  misc_feature: 842
ggtatcaagatgacaagttaccaagcaactggagaattgaagttagtccaaatggatggacaacagatcaaattggcatacgttggctacaaaaag

SEQ ID NO: 58 - DNA, 96 bp, Aspergillus thermomutatus
  misc_feature: 841
tcaggaactacgagctgcgcatgagaagaaaatccagaagaggaagcgatctacaaagcagatagcctctacagaaggactttctatccaggaagg

SEQ ID NO: 59 - DNA, 96 bp, Aspergillus thermomutatus
  misc_feature: 841
cgagctgcgcatgagaagaaaatccagaagaggaagcgatctacaaagcagatagcctctacagaaggactttctatccaggaaggccgggacctc

SEQ ID NO: 60 - DNA, 96 bp, Aspergillus thermomutatus
  misc_feature: 841
acgagctgcgcatgagaagaaaatccagaagaggaagcgatctacaaagcagatagcctctacagaaggactttctatccaggaaggccgggacct

SEQ ID NO: 61 - DNA, 96 bp, Aspergillus thermomutatus
  misc_feature: 840
cctcataatctcaagcaattagagaagcaggcaagcacaatcaagaagctgcttagtgagcgtgggcatagtcccgctacccctactaaagctgct

SEQ ID NO: 62 - DNA, 96 bp, Aspergillus thermomutatus
  misc_feature: 839
aactacgagctgcgcatgagaagaaaatccagaagaggaagcgatctacaaagcagatagcctctacagaaggactttctatccaggaaggccggg

SEQ ID NO: 63 - DNA, 96 bp, Aspergillus thermomutatus
  misc_feature: 839
atttatgtgagttggcgcgttgttcagctcgaaaacagtgtccatttaatcgccgctgaagtgttgtccgcggaacattgtaaatgcgtgaagctt

SEQ ID NO: 64 - DNA, 96 bp, Aspergillus thermomutatus
  misc_feature: 838
ttatgtgagttggcgcgttgttcagctcgaaaacagtgtccatttaatcgccgctgaagtgttgtccgcggaacattgtaaatgcgtgaagcttca

SEQ ID NO: 65 - DNA, 96 bp, Aspergillus thermomutatus
  misc_feature: 838
ctttagtcaatttatgtgagttggcgcgttgttcagctcgaaaacagtgtccatttaatcgccgctgaagtgttgtccgcggaacattgtaaatgc

SEQ ID NO: 66 - DNA, 96 bp, Aspergillus thermomutatus
  misc_feature: 837
tttatgtgagttggcgcgttgttcagctcgaaaacagtgtccatttaatcgccgctgaagtgttgtccgcggaacattgtaaatgcgtgaagcttc

SEQ ID NO: 67 - DNA, 96 bp, Aspergillus thermomutatus
  misc_feature: 837
agacacctcataatctcaagcaattagagaagcaggcaagcacaatcaagaagctgcttagtgagcgtgggcatagtcccgctacccctactaaag

SEQ ID NO: 68 - DNA, 96 bp, Aspergillus thermomutatus
  misc_feature: 836
gacacctcataatctcaagcaattagagaagcaggcaagcacaatcaagaagctgcttagtgagcgtgggcatagtcccgctacccctactaaagc

SEQ ID NO: 69 - DNA, 96 bp, Aspergillus thermomutatus
  misc_feature: 836
gaactacgagctgcgcatgagaagaaaatccagaagaggaagcgatctacaaagcagatagcctctacagaaggactttctatccaggaaggccgg

SEQ ID NO: 70 - DNA, 96 bp, Aspergillus thermomutatus
  misc_feature: 835
caatagatgtgacccattcgcgattcccaggctgcataacttgacgtctgccatgtatttcagctctagttactaccttagcagtagcaattagac

SEQ ID NO: 71 - DNA, 96 bp, Aspergillus thermomutatus
  misc_feature: 834
tttagtcaatttatgtgagttggcgcgttgttcagctcgaaaacagtgtccatttaatcgccgctgaagtgttgtccgcggaacattgtaaatgcg

SEQ ID NO: 72 - DNA, 96 bp, Aspergillus thermomutatus
  misc_feature: 833
agggctggtatcaagatgacaagttaccaagcaactggagaattgaagttagtccaaatggatggacaacagatcaaattggcatacgttggctac

SEQ ID NO: 73 - DNA, 96 bp, Aspergillus thermomutatus
  misc_feature: 831
gtaaagcccatccttgagagttgatacactcaatagatgtgacccattcgcgattcccaggctgcataacttgacgtctgccatgtatttcagctc

SEQ ID NO: 74 - DNA, 96 bp, Aspergillus thermomutatus
  misc_feature: 830
aggaactacgagctgcgcatgagaagaaaatccagaagaggaagcgatctacaaagcagatagcctctacagaaggactttctatccaggaaggcc

SEQ ID NO: 75 - DNA, 96 bp, Aspergillus thermomutatus
  misc_feature: 830
ggaactacgagctgcgcatgagaagaaaatccagaagaggaagcgatctacaaagcagatagcctctacagaaggactttctatccaggaaggccg

SEQ ID NO: 76 - DNA, 96 bp, Aspergillus thermomutatus
  misc_feature: 830
ctcaagcaattagagaagcaggcaagcacaatcaagaagctgcttagtgagcgtgggcatagtcccgctacccctactaaagctgctttagatcag

SEQ ID NO: 77 - DNA, 96 bp, Aspergillus thermomutatus
  misc_feature: 829
ctggtatcaagatgacaagttaccaagcaactggagaattgaagttagtccaaatggatggacaacagatcaaattggcatacgttggctacaaaa

SEQ ID NO: 78 - DNA, 96 bp, Aspergillus thermomutatus
  misc_feature: 829
gctggtatcaagatgacaagttaccaagcaactggagaattgaagttagtccaaatggatggacaacagatcaaattggcatacgttggctacaaa

SEQ ID NO: 79 - DNA, 96 bp, Aspergillus thermomutatus
  misc_feature: 829
ggtaaagcccatccttgagagttgatacactcaatagatgtgacccattcgcgattcccaggctgcataacttgacgtctgccatgtatttcagct

SEQ ID NO: 80 - DNA, 96 bp, Aspergillus thermomutatus
  misc_feature: 829
aatagtgctattcttctagctcaagagaatcaggaactacgagctgcgcatgagaagaaaatccagaagaggaagcgatctacaaagcagatagcc

SEQ ID NO: 81 - DNA, 96 bp, Aspergillus thermomutatus
  misc_feature: 828
caagatgacaagttaccaagcaactggagaattgaagttagtccaaatggatggacaacagatcaaattggcatacgttggctacaaaaagtcttt

SEQ ID NO: 82 - DNA, 96 bp, Aspergillus thermomutatus
  misc_feature: 827
ttagtcaatttatgtgagttggcgcgttgttcagctcgaaaacagtgtccatttaatcgccgctgaagtgttgtccgcggaacattgtaaatgcgt

SEQ ID NO: 83 - DNA, 96 bp, Aspergillus thermomutatus
  misc_feature: 827
tccttgagagttgatacactcaatagatgtgacccattcgcgattcccaggctgcataacttgacgtctgccatgtatttcagctctagttactac

SEQ ID NO: 84 - DNA, 96 bp, Aspergillus thermomutatus
  misc_feature: 826
tggtatcaagatgacaagttaccaagcaactggagaattgaagttagtccaaatggatggacaacagatcaaattggcatacgttggctacaaaaa

SEQ ID NO: 85 - DNA, 96 bp, Aspergillus thermomutatus
  misc_feature: 826
gaatagtgctattcttctagctcaagagaatcaggaactacgagctgcgcatgagaagaaaatccagaagaggaagcgatctacaaagcagatagc

SEQ ID NO: 86 - DNA, 96 bp, Aspergillus thermomutatus
  misc_feature: 826
agctttagtcaatttatgtgagttggcgcgttgttcagctcgaaaacagtgtccatttaatcgccgctgaagtgttgtccgcggaacattgtaaat

SEQ ID NO: 87 - DNA, 96 bp, Aspergillus thermomutatus
  misc_feature: 825
attagagaagcaggcaagcacaatcaagaagctgcttagtgagcgtgggcatagtcccgctacccctactaaagctgctttagatcagcttataaa

SEQ ID NO: 88 - DNA, 96 bp, Aspergillus thermomutatus
  misc_feature: 825
aaagcccatccttgagagttgatacactcaatagatgtgacccattcgcgattcccaggctgcataacttgacgtctgccatgtatttcagctcta

SEQ ID NO: 89 - DNA, 96 bp, Aspergillus thermomutatus
  misc_feature: 825
aagcccatccttgagagttgatacactcaatagatgtgacccattcgcgattcccaggctgcataacttgacgtctgccatgtatttcagctctag

SEQ ID NO: 90 - DNA, 96 bp, Aspergillus thermomutatus
  misc_feature: 825
ccaaagacacctcataatctcaagcaattagagaagcaggcaagcacaatcaagaagctgcttagtgagcgtgggcatagtcccgctacccctact

SEQ ID NO: 91 - DNA, 96 bp, Aspergillus thermomutatus
  misc_feature: 824
atgtgagttggcgcgttgttcagctcgaaaacagtgtccatttaatcgccgctgaagtgttgtccgcggaacattgtaaatgcgtgaagcttcacg

SEQ ID NO: 92 - DNA, 96 bp, Aspergillus thermomutatus
  misc_feature: 823
ggctggtatcaagatgacaagttaccaagcaactggagaattgaagttagtccaaatggatggacaacagatcaaattggcatacgttggctacaa

SEQ ID NO: 93 - DNA, 96 bp, Aspergillus thermomutatus
  misc_feature: 823
tgtgagttggcgcgttgttcagctcgaaaacagtgtccatttaatcgccgctgaagtgttgtccgcggaacattgtaaatgcgtgaagcttcacga

SEQ ID NO: 94 - DNA, 96 bp, Aspergillus thermomutatus
  misc_feature: 823
taaagcccatccttgagagttgatacactcaatagatgtgacccattcgcgattcccaggctgcataacttgacgtctgccatgtatttcagctct

SEQ ID NO: 95 - DNA, 96 bp, Aspergillus thermomutatus
  misc_feature: 822
aattagagaagcaggcaagcacaatcaagaagctgcttagtgagcgtgggcatagtcccgctacccctactaaagctgctttagatcagcttataa

SEQ ID NO: 96 - DNA, 96 bp, Aspergillus thermomutatus
  misc_feature: 821
gccaacgtatgccaatttgatctgttgtccatccatttggactaacttcaattctccagttgcttggtaacttgtcatcttgataccagccctcaa

SEQ ID NO: 97 - DNA, 96 bp, Aspergillus thermomutatus
  misc_feature: 820
caaagacacctcataatctcaagcaattagagaagcaggcaagcacaatcaagaagctgcttagtgagcgtgggcatagtcccgctacccctacta

SEQ ID NO: 98 - DNA, 96 bp, Aspergillus thermomutatus
  misc_feature: 820
cgcgattcccaggctgcataacttgacgtctgccatgtatttcagctctagttactaccttagcagtagcaattagacccatcgcatatccagtct

SEQ ID NO: 99 - DNA, 96 bp, Aspergillus thermomutatus
  misc_feature: 819
gggctggtatcaagatgacaagttaccaagcaactggagaattgaagttagtccaaatggatggacaacagatcaaattggcatacgttggctaca

SEQ ID NO: 100 - DNA, 96 bp, Aspergillus thermomutatus
  misc_feature: 819
acctcataatctcaagcaattagagaagcaggcaagcacaatcaagaagctgcttagtgagcgtgggcatagtcccgctacccctactaaagctgc

SEQ ID NO: 101 - DNA, 96 bp, Aspergillus thermomutatus
  misc_feature: 819
attcgcgattcccaggctgcataacttgacgtctgccatgtatttcagctctagttactaccttagcagtagcaattagacccatcgcatatccag

SEQ ID NO: 102 - DNA, 96 bp, Aspergillus thermomutatus
  misc_feature: 818
ttcgcgattcccaggctgcataacttgacgtctgccatgtatttcagctctagttactaccttagcagtagcaattagacccatcgcatatccagt

SEQ ID NO: 103 - DNA, 96 bp, Aspergillus thermomutatus
  misc_feature: 817
tcaagcaattagagaagcaggcaagcacaatcaagaagctgcttagtgagcgtgggcatagtcccgctacccctactaaagctgctttagatcagc

SEQ ID NO: 104 - DNA, 96 bp, Aspergillus thermomutatus
  misc_feature: 817
caatttatgtgagttggcgcgttgttcagctcgaaaacagtgtccatttaatcgccgctgaagtgttgtccgcggaacattgtaaatgcgtgaagc

SEQ ID NO: 105 - DNA, 96 bp, Aspergillus thermomutatus
  misc_feature: 817
gctccccgaccatctcatgttcaagatatggccaatattttgttgtcacagcgagggtttactgatattcaacctgtcggcaagaattgggtgtat

SEQ ID NO: 106 - DNA, 96 bp, Aspergillus thermomutatus
  misc_feature: 817
gcgattcccaggctgcataacttgacgtctgccatgtatttcagctctagttactaccttagcagtagcaattagacccatcgcatatccagtctc

SEQ ID NO: 107 - DNA, 96 bp, Aspergillus thermomutatus
  misc_feature: 817
cacctcataatctcaagcaattagagaagcaggcaagcacaatcaagaagctgcttagtgagcgtgggcatagtcccgctacccctactaaagctg

SEQ ID NO: 108 - DNA, 96 bp, Aspergillus thermomutatus
  misc_feature: 816
tctcaagcaattagagaagcaggcaagcacaatcaagaagctgcttagtgagcgtgggcatagtcccgctacccctactaaagctgctttagatca

SEQ ID NO: 109 - DNA, 96 bp, Aspergillus thermomutatus
  misc_feature: 816
gcataacttgacgtctgccatgtatttcagctctagttactaccttagcagtagcaattagacccatcgcatatccagtctcatcaaagttgtaga

SEQ ID NO: 110 - DNA, 96 bp, Aspergillus thermomutatus
  misc_feature: 815
gcgcatgagaagaaaatccagaagaggaagcgatctacaaagcagatagcctctacagaaggactttctatccaggaaggccgggacctcatacaa

SEQ ID NO: 111 - DNA, 96 bp, Aspergillus thermomutatus
  misc_feature: 815
ctccccgaccatctcatgttcaagatatggccaatattttgttgtcacagcgagggtttactgatattcaacctgtcggcaagaattgggtgtata

SEQ ID NO: 112 - DNA, 96 bp, Aspergillus thermomutatus
  misc_feature: 814
ttgagagttgatacactcaatagatgtgacccattcgcgattcccaggctgcataacttgacgtctgccatgtatttcagctctagttactacctt

SEQ ID NO: 113 - DNA, 96 bp, Aspergillus thermomutatus
  misc_feature: 814
aatagatgtgacccattcgcgattcccaggctgcataacttgacgtctgccatgtatttcagctctagttactaccttagcagtagcaattagacc

SEQ ID NO: 114 - DNA, 96 bp, Aspergillus thermomutatus
  misc_feature: 814
gcccatccttgagagttgatacactcaatagatgtgacccattcgcgattcccaggctgcataacttgacgtctgccatgtatttcagctctagtt

SEQ ID NO: 115 - DNA, 96 bp, Aspergillus thermomutatus
  misc_feature: 814
atagtgctattcttctagctcaagagaatcaggaactacgagctgcgcatgagaagaaaatccagaagaggaagcgatctacaaagcagatagcct

SEQ ID NO: 116 - DNA, 96 bp, Aspergillus thermomutatus
  misc_feature: 813
caccaaagacacctcataatctcaagcaattagagaagcaggcaagcacaatcaagaagctgcttagtgagcgtgggcatagtcccgctaccccta

SEQ ID NO: 117 - DNA, 96 bp, Aspergillus thermomutatus
  misc_feature: 813
gcatgagaagaaaatccagaagaggaagcgatctacaaagcagatagcctctacagaaggactttctatccaggaaggccgggacctcatacaaag

SEQ ID NO: 118 - DNA, 96 bp, Aspergillus thermomutatus
  misc_feature: 812
accaaagacacctcataatctcaagcaattagagaagcaggcaagcacaatcaagaagctgcttagtgagcgtgggcatagtcccgctacccctac

SEQ ID NO: 119 - DNA, 96 bp, Aspergillus thermomutatus
  misc_feature: 810
gtggagcagctccccgaccatctcatgttcaagatatggccaatattttgttgtcacagcgagggtttactgatattcaacctgtcggcaagaatt

SEQ ID NO: 120 - DNA, 96 bp, Aspergillus thermomutatus
  misc_feature: 810
gatgacaagttaccaagcaactggagaattgaagttagtccaaatggatggacaacagatcaaattggcatacgttggctacaaaaagtctttatt

SEQ ID NO: 121 - DNA, 96 bp, Aspergillus thermomutatus
  misc_feature: 809
aaagacacctcataatctcaagcaattagagaagcaggcaagcacaatcaagaagctgcttagtgagcgtgggcatagtcccgctacccctactaa

SEQ ID NO: 122 - DNA, 96 bp, Aspergillus thermomutatus
  misc_feature: 809
gctattcttctagctcaagagaatcaggaactacgagctgcgcatgagaagaaaatccagaagaggaagcgatctacaaagcagatagcctctaca

SEQ ID NO: 123 - DNA, 96 bp, Aspergillus thermomutatus
  misc_feature: 809
gcaccaaagacacctcataatctcaagcaattagagaagcaggcaagcacaatcaagaagctgcttagtgagcgtgggcatagtcccgctacccct

SEQ ID NO: 124 - DNA, 96 bp, Aspergillus thermomutatus
  misc_feature: 809
gattcccaggctgcataacttgacgtctgccatgtatttcagctctagttactaccttagcagtagcaattagacccatcgcatatccagtctcat

SEQ ID NO: 125 - DNA, 96 bp, Aspergillus thermomutatus
  misc_feature: 809
ccaacgtatgccaatttgatctgttgtccatccatttggactaacttcaattctccagttgcttggtaacttgtcatcttgataccagccctcaat

SEQ ID NO: 126 - DNA, 96 bp, Aspergillus thermomutatus
  misc_feature: 808
caattagagaagcaggcaagcacaatcaagaagctgcttagtgagcgtgggcatagtcccgctacccctactaaagctgctttagatcagcttata

SEQ ID NO: 127 - DNA, 96 bp, Aspergillus thermomutatus
  misc_feature: 808
tagtgctattcttctagctcaagagaatcaggaactacgagctgcgcatgagaagaaaatccagaagaggaagcgatctacaaagcagatagcctc

SEQ ID NO: 128 - DNA, 96 bp, Aspergillus thermomutatus
  misc_feature: 807
cgcatgagaagaaaatccagaagaggaagcgatctacaaagcagatagcctctacagaaggactttctatccaggaaggccgggacctcatacaaa

SEQ ID NO: 129 - DNA, 96 bp, Aspergillus thermomutatus
  misc_feature: 807
tggtaaagcccatccttgagagttgatacactcaatagatgtgacccattcgcgattcccaggctgcataacttgacgtctgccatgtatttcagc

SEQ ID NO: 130 - DNA, 96 bp, Aspergillus thermomutatus
  misc_feature: 807
cgattcccaggctgcataacttgacgtctgccatgtatttcagctctagttactaccttagcagtagcaattagacccatcgcatatccagtctca

SEQ ID NO: 131 - DNA, 96 bp, Aspergillus thermomutatus
  misc_feature: 807
gtggtaaagcccatccttgagagttgatacactcaatagatgtgacccattcgcgattcccaggctgcataacttgacgtctgccatgtatttcag

SEQ ID NO: 132 - DNA, 96 bp, Aspergillus thermomutatus
  misc_feature: 807
atgacaagttaccaagcaactggagaattgaagttagtccaaatggatggacaacagatcaaattggcatacgttggctacaaaaagtctttattc

SEQ ID NO: 133 - DNA, 96 bp, Aspergillus thermomutatus
  misc_feature: 807
acacctcataatctcaagcaattagagaagcaggcaagcacaatcaagaagctgcttagtgagcgtgggcatagtcccgctacccctactaaagct

SEQ ID NO: 134 - DNA, 96 bp, Aspergillus thermomutatus
  misc_feature: 806
aagatgacaagttaccaagcaactggagaattgaagttagtccaaatggatggacaacagatcaaattggcatacgttggctacaaaaagtcttta

SEQ ID NO: 135 - DNA, 96 bp, Aspergillus thermomutatus
  misc_feature: 806
agcccatccttgagagttgatacactcaatagatgtgacccattcgcgattcccaggctgcataacttgacgtctgccatgtatttcagctctagt

SEQ ID NO: 136 - DNA, 96 bp, Aspergillus thermomutatus
  misc_feature: 805
tgcgcatgagaagaaaatccagaagaggaagcgatctacaaagcagatagcctctacagaaggactttctatccaggaaggccgggacctcataca

SEQ ID NO: 137 - DNA, 96 bp, Aspergillus thermomutatus
  misc_feature: 805
ctattcttctagctcaagagaatcaggaactacgagctgcgcatgagaagaaaatccagaagaggaagcgatctacaaagcagatagcctctacag

SEQ ID NO: 138 - DNA, 96 bp, Aspergillus thermomutatus
  misc_feature: 804
agccaacgtatgccaatttgatctgttgtccatccatttggactaacttcaattctccagttgcttggtaacttgtcatcttgataccagccctca

SEQ ID NO: 139 - DNA, 96 bp, Aspergillus thermomutatus
  misc_feature: 804
ctagctcaagagaatcaggaactacgagctgcgcatgagaagaaaatccagaagaggaagcgatctacaaagcagatagcctctacagaaggactt

SEQ ID NO: 140 - DNA, 96 bp, Aspergillus thermomutatus
  misc_feature: 804
cataacttgacgtctgccatgtatttcagctctagttactaccttagcagtagcaattagacccatcgcatatccagtctcatcaaagttgtagat

SEQ ID NO: 141 - DNA, 96 bp, Aspergillus thermomutatus
  misc_feature: 803
ccttgagagttgatacactcaatagatgtgacccattcgcgattcccaggctgcataacttgacgtctgccatgtatttcagctctagttactacc

SEQ ID NO: 142 - DNA, 96 bp, Aspergillus thermomutatus
  misc_feature: 803
agtgctattcttctagctcaagagaatcaggaactacgagctgcgcatgagaagaaaatccagaagaggaagcgatctacaaagcagatagcctct

SEQ ID NO: 143 - DNA, 96 bp, Aspergillus thermomutatus
  misc_feature: 802
gattcctcttcagctttagtcaatttatgtgagttggcgcgttgttcagctcgaaaacagtgtccatttaatcgccgctgaagtgttgtccgcgga

SEQ ID NO: 144 - DNA, 96 bp, Aspergillus thermomutatus
  misc_feature: 802
tcaatttatgtgagttggcgcgttgttcagctcgaaaacagtgtccatttaatcgccgctgaagtgttgtccgcggaacattgtaaatgcgtgaag

SEQ ID NO: 145 - DNA, 96 bp, Aspergillus thermomutatus
  misc_feature: 801
aagacacctcataatctcaagcaattagagaagcaggcaagcacaatcaagaagctgcttagtgagcgtgggcatagtcccgctacccctactaaa

SEQ ID NO: 146 - DNA, 96 bp, Aspergillus thermomutatus
  misc_feature: 801
gcgtggagcagctccccgaccatctcatgttcaagatatggccaatattttgttgtcacagcgagggtttactgatattcaacctgtcggcaagaa

SEQ ID NO: 147 - DNA, 96 bp, Aspergillus thermomutatus
  misc_feature: 801
aatttatgtgagttggcgcgttgttcagctcgaaaacagtgtccatttaatcgccgctgaagtgttgtccgcggaacattgtaaatgcgtgaagct

SEQ ID NO: 148 - DNA, 96 bp, Aspergillus thermomutatus
  misc_feature: 799
tcatcacggcgtttaataaagttatacacccaattcttgccgacaggttgaatatcagtaaaccctcgctgtgacaacaaaatattggccatatct

SEQ ID NO: 149 - DNA, 96 bp, Aspergillus thermomutatus
  misc_feature: 799
cgtggagcagctccccgaccatctcatgttcaagatatggccaatattttgttgtcacagcgagggtttactgatattcaacctgtcggcaagaat

SEQ ID NO: 150 - DNA, 96 bp, Aspergillus thermomutatus
  misc_feature: 798
agcaattagagaagcaggcaagcacaatcaagaagctgcttagtgagcgtgggcatagtcccgctacccctactaaagctgctttagatcagctta

SEQ ID NO: 151 - DNA, 96 bp, Aspergillus thermomutatus
  misc_feature: 798
caagcaattagagaagcaggcaagcacaatcaagaagctgcttagtgagcgtgggcatagtcccgctacccctactaaagctgctttagatcagct

SEQ ID NO: 152 - DNA, 96 bp, Aspergillus thermomutatus
  misc_feature: 798
aagcaattagagaagcaggcaagcacaatcaagaagctgcttagtgagcgtgggcatagtcccgctacccctactaaagctgctttagatcagctt

SEQ ID NO: 153 - DNA, 96 bp, Aspergillus thermomutatus
  misc_feature: 797
ttcccaggctgcataacttgacgtctgccatgtatttcagctctagttactaccttagcagtagcaattagacccatcgcatatccagtctcatca

SEQ ID NO: 154 - DNA, 96 bp, Aspergillus thermomutatus
  misc_feature: 797
cccatccttgagagttgatacactcaatagatgtgacccattcgcgattcccaggctgcataacttgacgtctgccatgtatttcagctctagtta

SEQ ID NO: 155 - DNA, 96 bp, Aspergillus thermomutatus
  misc_feature: 797
ccatccttgagagttgatacactcaatagatgtgacccattcgcgattcccaggctgcataacttgacgtctgccatgtatttcagctctagttac

SEQ ID NO: 156 - DNA, 96 bp, Aspergillus thermomutatus
  misc_feature: 797
cttgagagttgatacactcaatagatgtgacccattcgcgattcccaggctgcataacttgacgtctgccatgtatttcagctctagttactacct

SEQ ID NO: 157 - DNA, 96 bp, Aspergillus thermomutatus
  misc_feature: 796
gaatcaggaactacgagctgcgcatgagaagaaaatccagaagaggaagcgatctacaaagcagatagcctctacagaaggactttctatccagga

SEQ ID NO: 158 - DNA, 96 bp, Aspergillus thermomutatus
  misc_feature: 796
tcatgttcaagatatggccaatattttgttgtcacagcgagggtttactgatattcaacctgtcggcaagaattgggtgtataactttattaaacg

SEQ ID NO: 159 - DNA, 96 bp, Aspergillus thermomutatus
  misc_feature: 796
atccttgagagttgatacactcaatagatgtgacccattcgcgattcccaggctgcataacttgacgtctgccatgtatttcagctctagttacta

SEQ ID NO: 160 - DNA, 96 bp, Aspergillus thermomutatus
  misc_feature: 796
catccttgagagttgatacactcaatagatgtgacccattcgcgattcccaggctgcataacttgacgtctgccatgtatttcagctctagttact

SEQ ID NO: 161 - DNA, 96 bp, Aspergillus thermomutatus
  misc_feature: 795
gtcaatttatgtgagttggcgcgttgttcagctcgaaaacagtgtccatttaatcgccgctgaagtgttgtccgcggaacattgtaaatgcgtgaa

SEQ ID NO: 162 - DNA, 96 bp, Aspergillus thermomutatus
  misc_feature: 795
gcaattagagaagcaggcaagcacaatcaagaagctgcttagtgagcgtgggcatagtcccgctacccctactaaagctgctttagatcagcttat

SEQ ID NO: 163 - DNA, 96 bp, Aspergillus thermomutatus
  misc_feature: 794
tggtggtaaagcccatccttgagagttgatacactcaatagatgtgacccattcgcgattcccaggctgcataacttgacgtctgccatgtatttc

SEQ ID NO: 164 - DNA, 96 bp, Aspergillus thermomutatus
  misc_feature: 794
agtcaatttatgtgagttggcgcgttgttcagctcgaaaacagtgtccatttaatcgccgctgaagtgttgtccgcggaacattgtaaatgcgtga

SEQ ID NO: 165 - DNA, 96 bp, Aspergillus thermomutatus
  misc_feature: 794
catgttcaagatatggccaatattttgttgtcacagcgagggtttactgatattcaacctgtcggcaagaattgggtgtataactttattaaacgc

SEQ ID NO: 166 - DNA, 96 bp, Aspergillus thermomutatus
  misc_feature: 793
tgacaagttaccaagcaactggagaattgaagttagtccaaatggatggacaacagatcaaattggcatacgttggctacaaaaagtctttattcc

SEQ ID NO: 167 - DNA, 96 bp, Aspergillus thermomutatus
  misc_feature: 793
tagtcaatttatgtgagttggcgcgttgttcagctcgaaaacagtgtccatttaatcgccgctgaagtgttgtccgcggaacattgtaaatgcgtg

SEQ ID NO: 168 - DNA, 96 bp, Aspergillus thermomutatus
  misc_feature: 792
ttctagctcaagagaatcaggaactacgagctgcgcatgagaagaaaatccagaagaggaagcgatctacaaagcagatagcctctacagaaggac

SEQ ID NO: 169 - DNA, 96 bp, Aspergillus thermomutatus
  misc_feature: 792
cttctagctcaagagaatcaggaactacgagctgcgcatgagaagaaaatccagaagaggaagcgatctacaaagcagatagcctctacagaagga

SEQ ID NO: 170 - DNA, 96 bp, Aspergillus thermomutatus
  misc_feature: 790
acggcgtttaataaagttatacacccaattcttgccgacaggttgaatatcagtaaaccctcgctgtgacaacaaaatattggccatatcttgaac

SEQ ID NO: 171 - DNA, 96 bp, Aspergillus thermomutatus
  misc_feature: 790
caagagaatcaggaactacgagctgcgcatgagaagaaaatccagaagaggaagcgatctacaaagcagatagcctctacagaaggactttctatc

SEQ ID NO: 172 - DNA, 96 bp, Aspergillus thermomutatus
  misc_feature: 790
agatgacaagttaccaagcaactggagaattgaagttagtccaaatggatggacaacagatcaaattggcatacgttggctacaaaaagtctttat

SEQ ID NO: 173 - DNA, 96 bp, Aspergillus thermomutatus
  misc_feature: 789
tgagagttgatacactcaatagatgtgacccattcgcgattcccaggctgcataacttgacgtctgccatgtatttcagctctagttactacctta

SEQ ID NO: 174 - DNA, 96 bp, Aspergillus thermomutatus
  misc_feature: 789
attcccaggctgcataacttgacgtctgccatgtatttcagctctagttactaccttagcagtagcaattagacccatcgcatatccagtctcatc

SEQ ID NO: 175 - DNA, 96 bp, Aspergillus thermomutatus
  misc_feature: 789
gagagttgatacactcaatagatgtgacccattcgcgattcccaggctgcataacttgacgtctgccatgtatttcagctctagttactaccttag

SEQ ID NO: 176 - DNA, 96 bp, Aspergillus thermomutatus
  misc_feature: 789
caggctgcataacttgacgtctgccatgtatttcagctctagttactaccttagcagtagcaattagacccatcgcatatccagtctcatcaaagt

SEQ ID NO: 177 - DNA, 96 bp, Aspergillus thermomutatus
  misc_feature: 788
gtgctattctacgtgctattctacgtgctattctacgtgctattctacgtgctattctacgtgctattctacgtgctattctacgtgctattctac

SEQ ID NO: 178 - DNA, 96 bp, Aspergillus thermomutatus
  misc_feature: 788
attaaaccattcctggataacctttgggtcctcgcacttagcacgctgatagttataccgtcgggaataagttgttctcagctcatcacggcgttt

SEQ ID NO: 179 - DNA, 96 bp, Aspergillus thermomutatus
  misc_feature: 787
gagggctggtatcaagatgacaagttaccaagcaactggagaattgaagttagtccaaatggatggacaacagatcaaattggcatacgttggcta

SEQ ID NO: 180 - DNA, 96 bp, Aspergillus thermomutatus
  misc_feature: 787
atcaggaactacgagctgcgcatgagaagaaaatccagaagaggaagcgatctacaaagcagatagcctctacagaaggactttctatccaggaag

SEQ ID NO: 181 - DNA, 96 bp, Aspergillus thermomutatus
  misc_feature: 786
tgcataacttgacgtctgccatgtatttcagctctagttactaccttagcagtagcaattagacccatcgcatatccagtctcatcaaagttgtag

SEQ ID NO: 182 - DNA, 96 bp, Aspergillus thermomutatus
  misc_feature: 786
atggtggtaaagcccatccttgagagttgatacactcaatagatgtgacccattcgcgattcccaggctgcataacttgacgtctgccatgtattt

SEQ ID NO: 183 - DNA, 96 bp, Aspergillus thermomutatus
  misc_feature: 785
caacgtatgccaatttgatctgttgtccatccatttggactaacttcaattctccagttgcttggtaacttgtcatcttgataccagccctcaata

SEQ ID NO: 184 - DNA, 96 bp, Aspergillus thermomutatus
  misc_feature: 785
gacaagttaccaagcaactggagaattgaagttagtccaaatggatggacaacagatcaaattggcatacgttggctacaaaaagtctttattcct

SEQ ID NO: 185 - DNA, 96 bp, Aspergillus thermomutatus
  misc_feature: 784
tctagctcaagagaatcaggaactacgagctgcgcatgagaagaaaatccagaagaggaagcgatctacaaagcagatagcctctacagaaggact

SEQ ID NO: 186 - DNA, 96 bp, Aspergillus thermomutatus
  misc_feature: 783
catgagaagaaaatccagaagaggaagcgatctacaaagcagatagcctctacagaaggactttctatccaggaaggccgggacctcatacaaagt

SEQ ID NO: 187 - DNA, 96 bp, Aspergillus thermomutatus
  misc_feature: 782
gctatgaatagtgctattcttctagctcaagagaatcaggaactacgagctgcgcatgagaagaaaatccagaagaggaagcgatctacaaagcag

SEQ ID NO: 188 - DNA, 96 bp, Aspergillus thermomutatus
  misc_feature: 782
agaatcaggaactacgagctgcgcatgagaagaaaatccagaagaggaagcgatctacaaagcagatagcctctacagaaggactttctatccagg

SEQ ID NO: 189 - DNA, 96 bp, Aspergillus thermomutatus
  misc_feature: 781
tcacggcgtttaataaagttatacacccaattcttgccgacaggttgaatatcagtaaaccctcgctgtgacaacaaaatattggccatatcttga

SEQ ID NO: 190 - DNA, 96 bp, Aspergillus thermomutatus
  misc_feature: 781
acaagttaccaagcaactggagaattgaagttagtccaaatggatggacaacagatcaaattggcatacgttggctacaaaaagtctttattcctg

SEQ ID NO: 191 - DNA, 96 bp, Aspergillus thermomutatus
  misc_feature: 780
cacggcgtttaataaagttatacacccaattcttgccgacaggttgaatatcagtaaaccctcgctgtgacaacaaaatattggccatatcttgaa

SEQ ID NO: 192 - DNA, 96 bp, Aspergillus thermomutatus
  misc_feature: 780
agagttgatacactcaatagatgtgacccattcgcgattcccaggctgcataacttgacgtctgccatgtatttcagctctagttactaccttagc

SEQ ID NO: 193 - DNA, 96 bp, Aspergillus thermomutatus
  misc_feature: 779
atcacggcgtttaataaagttatacacccaattcttgccgacaggttgaatatcagtaaaccctcgctgtgacaacaaaatattggccatatcttg

SEQ ID NO: 194 - DNA, 96 bp, Aspergillus thermomutatus
  misc_feature: 778
gagaatcaggaactacgagctgcgcatgagaagaaaatccagaagaggaagcgatctacaaagcagatagcctctacagaaggactttctatccag

SEQ ID NO: 195 - DNA, 96 bp, Aspergillus thermomutatus
  misc_feature: 778
catggtggtaaagcccatccttgagagttgatacactcaatagatgtgacccattcgcgattcccaggctgcataacttgacgtctgccatgtatt

SEQ ID NO: 196 - DNA, 96 bp, Aspergillus thermomutatus
  misc_feature: 777
agagaatcaggaactacgagctgcgcatgagaagaaaatccagaagaggaagcgatctacaaagcagatagcctctacagaaggactttctatcca

SEQ ID NO: 197 - DNA, 96 bp, Aspergillus thermomutatus
  misc_feature: 777
ctcatcacggcgtttaataaagttatacacccaattcttgccgacaggttgaatatcagtaaaccctcgctgtgacaacaaaatattggccatatc

SEQ ID NO: 198 - DNA, 96 bp, Aspergillus thermomutatus
  misc_feature: 777
aaaccattcctggataacctttgggtcctcgcacttagcacgctgatagttataccgtcgggaataagttgttctcagctcatcacggcgtttaat

SEQ ID NO: 199 - DNA, 96 bp, Aspergillus thermomutatus
  misc_feature: 776
gagttgatacactcaatagatgtgacccattcgcgattcccaggctgcataacttgacgtctgccatgtatttcagctctagttactaccttagca

SEQ ID NO: 200 - DNA, 96 bp, Aspergillus thermomutatus
  misc_feature: 776
gctcatcacggcgtttaataaagttatacacccaattcttgccgacaggttgaatatcagtaaaccctcgctgtgacaacaaaatattggccatat

SEQ ID NO: 201 - DNA, 96 bp, Aspergillus thermomutatus
  misc_feature: 776
aacgtatgccaatttgatctgttgtccatccatttggactaacttcaattctccagttgcttggtaacttgtcatcttgataccagccctcaatat

SEQ ID NO: 202 - DNA, 96 bp, Aspergillus thermomutatus
  misc_feature: 775
gttggcgcgttgttcagctcgaaaacagtgtccatttaatcgccgctgaagtgttgtccgcggaacattgtaaatgcgtgaagcttcacgaacatt

SEQ ID NO: 203 - DNA, 96 bp, Aspergillus thermomutatus
  misc_feature: 774
ttcttctagctcaagagaatcaggaactacgagctgcgcatgagaagaaaatccagaagaggaagcgatctacaaagcagatagcctctacagaag

SEQ ID NO: 204 - DNA, 96 bp, Aspergillus thermomutatus
  misc_feature: 774
ggtggtaaagcccatccttgagagttgatacactcaatagatgtgacccattcgcgattcccaggctgcataacttgacgtctgccatgtatttca

SEQ ID NO: 205 - DNA, 96 bp, Aspergillus thermomutatus
  misc_feature: 774
ctatgaatagtgctattcttctagctcaagagaatcaggaactacgagctgcgcatgagaagaaaatccagaagaggaagcgatctacaaagcaga

SEQ ID NO: 206 - DNA, 96 bp, Aspergillus thermomutatus
  misc_feature: 773
caagttaccaagcaactggagaattgaagttagtccaaatggatggacaacagatcaaattggcatacgttggctacaaaaagtctttattcctga

SEQ ID NO: 207 - DNA, 96 bp, Aspergillus thermomutatus
  misc_feature: 773
ccaggctgcataacttgacgtctgccatgtatttcagctctagttactaccttagcagtagcaattagacccatcgcatatccagtctcatcaaag

SEQ ID NO: 208 - DNA, 96 bp, Aspergillus thermomutatus
  misc_feature: 773
agttgatacactcaatagatgtgacccattcgcgattcccaggctgcataacttgacgtctgccatgtatttcagctctagttactaccttagcag

SEQ ID NO: 209 - DNA, 96 bp, Aspergillus thermomutatus
  misc_feature: 773
cgattaaaccattcctggataacctttgggtcctcgcacttagcacgctgatagttataccgtcgggaataagttgttctcagctcatcacggcgt

SEQ ID NO: 210 - DNA, 96 bp, Aspergillus thermomutatus
  misc_feature: 772
attcttctagctcaagagaatcaggaactacgagctgcgcatgagaagaaaatccagaagaggaagcgatctacaaagcagatagcctctacagaa

SEQ ID NO: 211 - DNA, 96 bp, Aspergillus thermomutatus
  misc_feature: 772
gagttggcgcgttgttcagctcgaaaacagtgtccatttaatcgccgctgaagtgttgtccgcggaacattgtaaatgcgtgaagcttcacgaaca

SEQ ID NO: 212 - DNA, 96 bp, Aspergillus thermomutatus
  misc_feature: 772
aagagaatcaggaactacgagctgcgcatgagaagaaaatccagaagaggaagcgatctacaaagcagatagcctctacagaaggactttctatcc

SEQ ID NO: 213 - DNA, 96 bp, Aspergillus thermomutatus
  misc_feature: 772
catcacggcgtttaataaagttatacacccaattcttgccgacaggttgaatatcagtaaaccctcgctgtgacaacaaaatattggccatatctt

SEQ ID NO: 214 - DNA, 96 bp, Aspergillus thermomutatus
  misc_feature: 771
cccaggctgcataacttgacgtctgccatgtatttcagctctagttactaccttagcagtagcaattagacccatcgcatatccagtctcatcaaa

SEQ ID NO: 215 - DNA, 96 bp, Aspergillus thermomutatus
  misc_feature: 771
tcccaggctgcataacttgacgtctgccatgtatttcagctctagttactaccttagcagtagcaattagacccatcgcatatccagtctcatcaa

SEQ ID NO: 216 - DNA, 96 bp, Aspergillus thermomutatus
  misc_feature: 771
tattcttctagctcaagagaatcaggaactacgagctgcgcatgagaagaaaatccagaagaggaagcgatctacaaagcagatagcctctacaga

SEQ ID NO: 217 - DNA, 96 bp, Aspergillus thermomutatus
  misc_feature: 771
agctccccgaccatctcatgttcaagatatggccaatattttgttgtcacagcgagggtttactgatattcaacctgtcggcaagaattgggtgta

SEQ ID NO: 218 - DNA, 96 bp, Aspergillus thermomutatus
  misc_feature: 770
aagttaccaagcaactggagaattgaagttagtccaaatggatggacaacagatcaaattggcatacgttggctacaaaaagtctttattcctgag

SEQ ID NO: 219 - DNA, 96 bp, Aspergillus thermomutatus
  misc_feature: 769
gtgagttggcgcgttgttcagctcgaaaacagtgtccatttaatcgccgctgaagtgttgtccgcggaacattgtaaatgcgtgaagcttcacgaa

SEQ ID NO: 220 - DNA, 96 bp, Aspergillus thermomutatus
  misc_feature: 769
tcttctagctcaagagaatcaggaactacgagctgcgcatgagaagaaaatccagaagaggaagcgatctacaaagcagatagcctctacagaagg

SEQ ID NO: 221 - DNA, 96 bp, Aspergillus thermomutatus
  misc_feature: 769
gattaaaccattcctggataacctttgggtcctcgcacttagcacgctgatagttataccgtcgggaataagttgttctcagctcatcacggcgtt

SEQ ID NO: 222 - DNA, 96 bp, Aspergillus thermomutatus
  misc_feature: 768
gatctgttgtccatccatttggactaacttcaattctccagttgcttggtaacttgtcatcttgataccagccctcaatatggactgttcccttga

SEQ ID NO: 223 - DNA, 96 bp, Aspergillus thermomutatus
  misc_feature: 767
ttggcgcgttgttcagctcgaaaacagtgtccatttaatcgccgctgaagtgttgtccgcggaacattgtaaatgcgtgaagcttcacgaacattg

SEQ ID NO: 224 - DNA, 96 bp, Aspergillus thermomutatus
  misc_feature: 767
tgagttggcgcgttgttcagctcgaaaacagtgtccatttaatcgccgctgaagtgttgtccgcggaacattgtaaatgcgtgaagcttcacgaac

SEQ ID NO: 225 - DNA, 96 bp, Aspergillus thermomutatus
  misc_feature: 767
atggatcagcgtggagcagctccccgaccatctcatgttcaagatatggccaatattttgttgtcacagcgagggtttactgatattcaacctgtc

SEQ ID NO: 226 - DNA, 96 bp, Aspergillus thermomutatus
  misc_feature: 765
gttaccaagcaactggagaattgaagttagtccaaatggatggacaacagatcaaattggcatacgttggctacaaaaagtctttattcctgagac

SEQ ID NO: 227 - DNA, 96 bp, Aspergillus thermomutatus
  misc_feature: 765
agttggcgcgttgttcagctcgaaaacagtgtccatttaatcgccgctgaagtgttgtccgcggaacattgtaaatgcgtgaagcttcacgaacat

SEQ ID NO: 228 - DNA, 96 bp, Aspergillus thermomutatus
  misc_feature: 764
taaaccattcctggataacctttgggtcctcgcacttagcacgctgatagttataccgtcgggaataagttgttctcagctcatcacggcgtttaa

SEQ ID NO: 229 - DNA, 96 bp, Aspergillus thermomutatus
  misc_feature: 764
gtcaaccaattcagcaccaaagacacctcataatctcaagcaattagagaagcaggcaagcacaatcaagaagctgcttagtgagcgtgggcatag

SEQ ID NO: 230 - DNA, 96 bp, Aspergillus thermomutatus
  misc_feature: 764
acgtatgccaatttgatctgttgtccatccatttggactaacttcaattctccagttgcttggtaacttgtcatcttgataccagccctcaatatg

SEQ ID NO: 231 - DNA, 96 bp, Aspergillus thermomutatus
  misc_feature: 764
aggctgcataacttgacgtctgccatgtatttcagctctagttactaccttagcagtagcaattagacccatcgcatatccagtctcatcaaagtt

SEQ ID NO: 232 - DNA, 96 bp, Aspergillus thermomutatus
  misc_feature: 762
ttaaaccattcctggataacctttgggtcctcgcacttagcacgctgatagttataccgtcgggaataagttgttctcagctcatcacggcgttta

SEQ ID NO: 233 - DNA, 96 bp, Aspergillus thermomutatus
  misc_feature: 760
tcaaccaattcagcaccaaagacacctcataatctcaagcaattagagaagcaggcaagcacaatcaagaagctgcttagtgagcgtgggcatagt

SEQ ID NO: 234 - DNA, 96 bp, Aspergillus thermomutatus
  misc_feature: 760
ggtcaaccaattcagcaccaaagacacctcataatctcaagcaattagagaagcaggcaagcacaatcaagaagctgcttagtgagcgtgggcata

SEQ ID NO: 235 - DNA, 96 bp, Aspergillus thermomutatus
  misc_feature: 760
tatgaatagtgctattcttctagctcaagagaatcaggaactacgagctgcgcatgagaagaaaatccagaagaggaagcgatctacaaagcagat

SEQ ID NO: 236 - DNA, 96 bp, Aspergillus thermomutatus
  misc_feature: 758
ggctgcataacttgacgtctgccatgtatttcagctctagttactaccttagcagtagcaattagacccatcgcatatccagtctcatcaaagttg

SEQ ID NO: 237 - DNA, 96 bp, Aspergillus thermomutatus
  misc_feature: 757
tcaagagaatcaggaactacgagctgcgcatgagaagaaaatccagaagaggaagcgatctacaaagcagatagcctctacagaaggactttctat

SEQ ID NO: 238 - DNA, 96 bp, Aspergillus thermomutatus
  misc_feature: 756
ctgcataacttgacgtctgccatgtatttcagctctagttactaccttagcagtagcaattagacccatcgcatatccagtctcatcaaagttgta

SEQ ID NO: 239 - DNA, 96 bp, Aspergillus thermomutatus
  misc_feature: 755
cgtgctattctacgtgctattctacgtgctattctacgtgctattctacgtgctattctacgtgctattctacgtgctattctacgtgctattcta

SEQ ID NO: 240 - DNA, 96 bp, Aspergillus thermomutatus
  misc_feature: 754
ttgtccatccatttggactaacttcaattctccagttgcttggtaacttgtcatcttgataccagccctcaatatggactgttcccttgaagataa

SEQ ID NO: 241 - DNA, 96 bp, Aspergillus thermomutatus
  misc_feature: 754
agttaccaagcaactggagaattgaagttagtccaaatggatggacaacagatcaaattggcatacgttggctacaaaaagtctttattcctgaga

SEQ ID NO: 242 - DNA, 96 bp, Aspergillus thermomutatus
  misc_feature: 754
gttgtccatccatttggactaacttcaattctccagttgcttggtaacttgtcatcttgataccagccctcaatatggactgttcccttgaagata

SEQ ID NO: 243 - DNA, 96 bp, Aspergillus thermomutatus
  misc_feature: 754
gctcaagagaatcaggaactacgagctgcgcatgagaagaaaatccagaagaggaagcgatctacaaagcagatagcctctacagaaggactttct

SEQ ID NO: 244 - DNA, 96 bp, Aspergillus thermomutatus
  misc_feature: 753
ctatggatcagcgtggagcagctccccgaccatctcatgttcaagatatggccaatattttgttgtcacagcgagggtttactgatattcaacctg

SEQ ID NO: 245 - DNA, 96 bp, Aspergillus thermomutatus
  misc_feature: 752
ttagagaagcaggcaagcacaatcaagaagctgcttagtgagcgtgggcatagtcccgctacccctactaaagctgctttagatcagcttataaag

SEQ ID NO: 246 - DNA, 96 bp, Aspergillus thermomutatus
  misc_feature: 752
atgaatagtgctattcttctagctcaagagaatcaggaactacgagctgcgcatgagaagaaaatccagaagaggaagcgatctacaaagcagata

SEQ ID NO: 247 - DNA, 96 bp, Aspergillus thermomutatus
  misc_feature: 752
ctcaagagaatcaggaactacgagctgcgcatgagaagaaaatccagaagaggaagcgatctacaaagcagatagcctctacagaaggactttcta

SEQ ID NO: 248 - DNA, 96 bp, Aspergillus thermomutatus
  misc_feature: 751
cacgattaaaccattcctggataacctttgggtcctcgcacttagcacgctgatagttataccgtcgggaataagttgttctcagctcatcacggc

SEQ ID NO: 249 - DNA, 96 bp, Aspergillus thermomutatus
  misc_feature: 749
ttaccaagcaactggagaattgaagttagtccaaatggatggacaacagatcaaattggcatacgttggctacaaaaagtctttattcctgagact

SEQ ID NO: 250 - DNA, 96 bp, Aspergillus thermomutatus
  misc_feature: 749
tagctcaagagaatcaggaactacgagctgcgcatgagaagaaaatccagaagaggaagcgatctacaaagcagatagcctctacagaaggacttt

SEQ ID NO: 251 - DNA, 96 bp, Aspergillus thermomutatus
  misc_feature: 749
gctgcataacttgacgtctgccatgtatttcagctctagttactaccttagcagtagcaattagacccatcgcatatccagtctcatcaaagttgt

SEQ ID NO: 252 - DNA, 96 bp, Aspergillus thermomutatus
  misc_feature: 748
tgaatagtgctattcttctagctcaagagaatcaggaactacgagctgcgcatgagaagaaaatccagaagaggaagcgatctacaaagcagatag

SEQ ID NO: 253 - DNA, 96 bp, Aspergillus thermomutatus
  misc_feature: 748
acgtgctattctacgtgctattctacgtgctattctacgtgctattctacgtgctattctacgtgctattctacgtgctattctacgtgctattct

SEQ ID NO: 254 - DNA, 96 bp, Aspergillus thermomutatus
  misc_feature: 747
accattcctggataacctttgggtcctcgcacttagcacgctgatagttataccgtcgggaataagttgttctcagctcatcacggcgtttaataa

SEQ ID NO: 255 - DNA, 96 bp, Aspergillus thermomutatus
  misc_feature: 747
cggcgtttaataaagttatacacccaattcttgccgacaggttgaatatcagtaaaccctcgctgtgacaacaaaatattggccatatcttgaaca

SEQ ID NO: 256 - DNA, 96 bp, Aspergillus thermomutatus
  misc_feature: 747
acgattaaaccattcctggataacctttgggtcctcgcacttagcacgctgatagttataccgtcgggaataagttgttctcagctcatcacggcg

SEQ ID NO: 257 - DNA, 96 bp, Aspergillus thermomutatus
  misc_feature: 746
agctcaagagaatcaggaactacgagctgcgcatgagaagaaaatccagaagaggaagcgatctacaaagcagatagcctctacagaaggactttc

SEQ ID NO: 258 - DNA, 96 bp, Aspergillus thermomutatus
  misc_feature: 745
aaccaattcagcaccaaagacacctcataatctcaagcaattagagaagcaggcaagcacaatcaagaagctgcttagtgagcgtgggcatagtcc

SEQ ID NO: 259 - DNA, 96 bp, Aspergillus thermomutatus
  misc_feature: 744
aaccattcctggataacctttgggtcctcgcacttagcacgctgatagttataccgtcgggaataagttgttctcagctcatcacggcgtttaata

SEQ ID NO: 260 - DNA, 96 bp, Aspergillus thermomutatus
  misc_feature: 744
gtataagcgattcctcttcagctttagtcaatttatgtgagttggcgcgttgttcagctcgaaaacagtgtccatttaatcgccgctgaagtgttg

SEQ ID NO: 261 - DNA, 96 bp, Aspergillus thermomutatus
  misc_feature: 744
caaccaattcagcaccaaagacacctcataatctcaagcaattagagaagcaggcaagcacaatcaagaagctgcttagtgagcgtgggcatagtc

SEQ ID NO: 262 - DNA, 96 bp, Aspergillus thermomutatus
  misc_feature: 743
acgtctgccatgtatttcagctctagttactaccttagcagtagcaattagacccatcgcatatccagtctcatcaaagttgtagatatcttcgta

SEQ ID NO: 263 - DNA, 96 bp, Aspergillus thermomutatus
  misc_feature: 742
tgttgtccatccatttggactaacttcaattctccagttgcttggtaacttgtcatcttgataccagccctcaatatggactgttcccttgaagat

SEQ ID NO: 264 - DNA, 96 bp, Aspergillus thermomutatus
  misc_feature: 742
taccaagcaactggagaattgaagttagtccaaatggatggacaacagatcaaattggcatacgttggctacaaaaagtctttattcctgagacta

SEQ ID NO: 265 - DNA, 96 bp, Aspergillus thermomutatus
  misc_feature: 740
tagagaagcaggcaagcacaatcaagaagctgcttagtgagcgtgggcatagtcccgctacccctactaaagctgctttagatcagcttataaagg

SEQ ID NO: 266 - DNA, 96 bp, Aspergillus thermomutatus
  misc_feature: 738
caggcagtcggtcaaccaattcagcaccaaagacacctcataatctcaagcaattagagaagcaggcaagcacaatcaagaagctgcttagtgagc

SEQ ID NO: 267 - DNA, 96 bp, Aspergillus thermomutatus
  misc_feature: 737
gtatgccaatttgatctgttgtccatccatttggactaacttcaattctccagttgcttggtaacttgtcatcttgataccagccctcaatatgga

SEQ ID NO: 268 - DNA, 96 bp, Aspergillus thermomutatus
  misc_feature: 737
cagcgtggagcagctccccgaccatctcatgttcaagatatggccaatattttgttgtcacagcgagggtttactgatattcaacctgtcggcaag

SEQ ID NO: 269 - DNA, 96 bp, Aspergillus thermomutatus
  misc_feature: 736
aatcaggaactacgagctgcgcatgagaagaaaatccagaagaggaagcgatctacaaagcagatagcctctacagaaggactttctatccaggaa

SEQ ID NO: 270 - DNA, 96 bp, Aspergillus thermomutatus
  misc_feature: 736
tcttgatgttggctgtttttcacccctgaaaggtgcttacggacgattagtccaggaccagatgcagaagggtttcaatcatattgataaacttga

SEQ ID NO: 271 - DNA, 96 bp, Aspergillus thermomutatus
  misc_feature: 735
attcagcaccaaagacacctcataatctcaagcaattagagaagcaggcaagcacaatcaagaagctgcttagtgagcgtgggcatagtcccgcta

SEQ ID NO: 272 - DNA, 96 bp, Aspergillus thermomutatus
  misc_feature: 735
gatcagcgtggagcagctccccgaccatctcatgttcaagatatggccaatattttgttgtcacagcgagggtttactgatattcaacctgtcggc

SEQ ID NO: 273 - DNA, 96 bp, Aspergillus thermomutatus
  misc_feature: 735
ccaggcagtcggtcaaccaattcagcaccaaagacacctcataatctcaagcaattagagaagcaggcaagcacaatcaagaagctgcttagtgag

SEQ ID NO: 274 - DNA, 96 bp, Aspergillus thermomutatus
  misc_feature: 734
agcgtggagcagctccccgaccatctcatgttcaagatatggccaatattttgttgtcacagcgagggtttactgatattcaacctgtcggcaaga

SEQ ID NO: 275 - DNA, 96 bp, Aspergillus thermomutatus
  misc_feature: 734
tataagcgattcctcttcagctttagtcaatttatgtgagttggcgcgttgttcagctcgaaaacagtgtccatttaatcgccgctgaagtgttgt

SEQ ID NO: 276 - DNA, 96 bp, Aspergillus thermomutatus
  misc_feature: 734
gtacacgattaaaccattcctggataacctttgggtcctcgcacttagcacgctgatagttataccgtcgggaataagttgttctcagctcatcac

SEQ ID NO: 277 - DNA, 96 bp, Aspergillus thermomutatus
  misc_feature: 734
ataagcgattcctcttcagctttagtcaatttatgtgagttggcgcgttgttcagctcgaaaacagtgtccatttaatcgccgctgaagtgttgtc

SEQ ID NO: 278 - DNA, 96 bp, Aspergillus thermomutatus
  misc_feature: 733
tggatcagcgtggagcagctccccgaccatctcatgttcaagatatggccaatattttgttgtcacagcgagggtttactgatattcaacctgtcg

SEQ ID NO: 279 - DNA, 96 bp, Aspergillus thermomutatus
  misc_feature: 733
cgtatgccaatttgatctgttgtccatccatttggactaacttcaattctccagttgcttggtaacttgtcatcttgataccagccctcaatatgg

SEQ ID NO: 280 - DNA, 96 bp, Aspergillus thermomutatus
  misc_feature: 733
cggtcaaccaattcagcaccaaagacacctcataatctcaagcaattagagaagcaggcaagcacaatcaagaagctgcttagtgagcgtgggcat

SEQ ID NO: 281 - DNA, 96 bp, Aspergillus thermomutatus
  misc_feature: 732
tatgccaatttgatctgttgtccatccatttggactaacttcaattctccagttgcttggtaacttgtcatcttgataccagccctcaatatggac

SEQ ID NO: 282 - DNA, 96 bp, Aspergillus thermomutatus
  misc_feature: 732
agagaagcaggcaagcacaatcaagaagctgcttagtgagcgtgggcatagtcccgctacccctactaaagctgctttagatcagcttataaaggg

SEQ ID NO: 283 - DNA, 96 bp, Aspergillus thermomutatus
  misc_feature: 731
gcagtcggtcaaccaattcagcaccaaagacacctcataatctcaagcaattagagaagcaggcaagcacaatcaagaagctgcttagtgagcgtg

SEQ ID NO: 284 - DNA, 96 bp, Aspergillus thermomutatus
  misc_feature: 731
cctgctcattcatcaaattacttacaacctcttgatgttggctgtttttcacccctgaaaggtgcttacggacgattagtccaggaccagatgcag

SEQ ID NO: 285 - DNA, 96 bp, Aspergillus thermomutatus
  misc_feature: 730
gccatgtatttcagctctagttactaccttagcagtagcaattagacccatcgcatatccagtctcatcaaagttgtagatatcttcgtacgcgat

SEQ ID NO: 286 - DNA, 96 bp, Aspergillus thermomutatus
  misc_feature: 729
ataatatcaagagtggattccgagctactggcttaattccattcaacccagatgaggtgcttagacggtttactatccaactcaagactcctacac

SEQ ID NO: 287 - DNA, 96 bp, Aspergillus thermomutatus
  misc_feature: 727
tttgggtcctcgcacttagcacgctgatagttataccgtcgggaataagttgttctcagctcatcacggcgtttaataaagttatacacccaattc

SEQ ID NO: 288 - DNA, 96 bp, Aspergillus thermomutatus
  misc_feature: 727
tgcatgcctgctcattcatcaaattacttacaacctcttgatgttggctgtttttcacccctgaaaggtgcttacggacgattagtccaggaccag

SEQ ID NO: 289 - DNA, 96 bp, Aspergillus thermomutatus
  misc_feature: 727
ggcgtttaataaagttatacacccaattcttgccgacaggttgaatatcagtaaaccctcgctgtgacaacaaaatattggccatatcttgaacat

SEQ ID NO: 290 - DNA, 96 bp, Aspergillus thermomutatus
  misc_feature: 727
agcgattcctcttcagctttagtcaatttatgtgagttggcgcgttgttcagctcgaaaacagtgtccatttaatcgccgctgaagtgttgtccgc

SEQ ID NO: 291 - DNA, 96 bp, Aspergillus thermomutatus
  misc_feature: 727
atacatggtggtaaagcccatccttgagagttgatacactcaatagatgtgacccattcgcgattcccaggctgcataacttgacgtctgccatgt

SEQ ID NO: 292 - DNA, 96 bp, Aspergillus thermomutatus
  misc_feature: 726
tcagcgtggagcagctccccgaccatctcatgttcaagatatggccaatattttgttgtcacagcgagggtttactgatattcaacctgtcggcaa

SEQ ID NO: 293 - DNA, 96 bp, Aspergillus thermomutatus
  misc_feature: 726
ctgctcattcatcaaattacttacaacctcttgatgttggctgtttttcacccctgaaaggtgcttacggacgattagtccaggaccagatgcaga

SEQ ID NO: 294 - DNA, 96 bp, Aspergillus thermomutatus
  misc_feature: 726
taagcgattcctcttcagctttagtcaatttatgtgagttggcgcgttgttcagctcgaaaacagtgtccatttaatcgccgctgaagtgttgtcc

SEQ ID NO: 295 - DNA, 96 bp, Aspergillus thermomutatus
  misc_feature: 726
atctatggatcagcgtggagcagctccccgaccatctcatgttcaagatatggccaatattttgttgtcacagcgagggtttactgatattcaacc

SEQ ID NO: 296 - DNA, 96 bp, Aspergillus thermomutatus
  misc_feature: 725
ctgcatgcctgctcattcatcaaattacttacaacctcttgatgttggctgtttttcacccctgaaaggtgcttacggacgattagtccaggacca

SEQ ID NO: 297 - DNA, 96 bp, Aspergillus thermomutatus
  misc_feature: 724
atcagcgtggagcagctccccgaccatctcatgttcaagatatggccaatattttgttgtcacagcgagggtttactgatattcaacctgtcggca

SEQ ID NO: 298 - DNA, 96 bp, Aspergillus thermomutatus
  misc_feature: 724
cgtctgccatgtatttcagctctagttactaccttagcagtagcaattagacccatcgcatatccagtctcatcaaagttgtagatatcttcgtac

SEQ ID NO: 299 - DNA, 96 bp, Aspergillus thermomutatus
  misc_feature: 724
cgattcctcttcagctttagtcaatttatgtgagttggcgcgttgttcagctcgaaaacagtgtccatttaatcgccgctgaagtgttgtccgcgg

SEQ ID NO: 300 - DNA, 96 bp, Aspergillus thermomutatus
  misc_feature: 723
ttcagcaccaaagacacctcataatctcaagcaattagagaagcaggcaagcacaatcaagaagctgcttagtgagcgtgggcatagtcccgctac

SEQ ID NO: 301 - DNA, 96 bp, Aspergillus thermomutatus
  misc_feature: 723
tcggtcaaccaattcagcaccaaagacacctcataatctcaagcaattagagaagcaggcaagcacaatcaagaagctgcttagtgagcgtgggca

SEQ ID NO: 302 - DNA, 96 bp, Aspergillus thermomutatus
  misc_feature: 723
tgacgtctgccatgtatttcagctctagttactaccttagcagtagcaattagacccatcgcatatccagtctcatcaaagttgtagatatcttcg

SEQ ID NO: 303 - DNA, 96 bp, Aspergillus thermomutatus
  misc_feature: 723
ccatgtatttcagctctagttactaccttagcagtagcaattagacccatcgcatatccagtctcatcaaagttgtagatatcttcgtacgcgatc

SEQ ID NO: 304 - DNA, 96 bp, Aspergillus thermomutatus
  misc_feature: 722
ttcctactttgtatgaggtcccggccttcctggatagaaagtccttctgtagaggctatctgctttgtagatcgcttcctcttctggattttcttc

SEQ ID NO: 305 - DNA, 96 bp, Aspergillus thermomutatus
  misc_feature: 722
gcatgcctgctcattcatcaaattacttacaacctcttgatgttggctgtttttcacccctgaaaggtgcttacggacgattagtccaggaccaga

SEQ ID NO: 306 - DNA, 96 bp, Aspergillus thermomutatus
  misc_feature: 722
tcaatagatgtgacccattcgcgattcccaggctgcataacttgacgtctgccatgtatttcagctctagttactaccttagcagtagcaattaga

SEQ ID NO: 307 - DNA, 96 bp, Aspergillus thermomutatus
  misc_feature: 722
aagcgattcctcttcagctttagtcaatttatgtgagttggcgcgttgttcagctcgaaaacagtgtccatttaatcgccgctgaagtgttgtccg

SEQ ID NO: 308 - DNA, 96 bp, Aspergillus thermomutatus
  misc_feature: 721
accaggcagtcggtcaaccaattcagcaccaaagacacctcataatctcaagcaattagagaagcaggcaagcacaatcaagaagctgcttagtga

SEQ ID NO: 309 - DNA, 96 bp, Aspergillus thermomutatus
  misc_feature: 721
ctcaatagatgtgacccattcgcgattcccaggctgcataacttgacgtctgccatgtatttcagctctagttactaccttagcagtagcaattag

SEQ ID NO: 310 - DNA, 96 bp, Aspergillus thermomutatus
  misc_feature: 720
tggaaacagcatcttcagcagaacaatgctctacacgggcgccaccacgttgcagtgactgtcatattttagggcatagaaggacacagtgtccca

SEQ ID NO: 311 - DNA, 96 bp, Aspergillus thermomutatus
  misc_feature: 720
gtcggtcaaccaattcagcaccaaagacacctcataatctcaagcaattagagaagcaggcaagcacaatcaagaagctgcttagtgagcgtgggc

SEQ ID NO: 312 - DNA, 96 bp, Aspergillus thermomutatus
  misc_feature: 720
ggatcagcgtggagcagctccccgaccatctcatgttcaagatatggccaatattttgttgtcacagcgagggtttactgatattcaacctgtcgg

SEQ ID NO: 313 - DNA, 96 bp, Aspergillus thermomutatus
  misc_feature: 720
ggaaacagcatcttcagcagaacaatgctctacacgggcgccaccacgttgcagtgactgtcatattttagggcatagaaggacacagtgtcccag

SEQ ID NO: 314 - DNA, 96 bp, Aspergillus thermomutatus
  misc_feature: 720
gcgattcctcttcagctttagtcaatttatgtgagttggcgcgttgttcagctcgaaaacagtgtccatttaatcgccgctgaagtgttgtccgcg

SEQ ID NO: 315 - DNA, 96 bp, Aspergillus thermomutatus
  misc_feature: 720
cagtcggtcaaccaattcagcaccaaagacacctcataatctcaagcaattagagaagcaggcaagcacaatcaagaagctgcttagtgagcgtgg

SEQ ID NO: 316 - DNA, 96 bp, Aspergillus thermomutatus
  misc_feature: 719
accctttataagctgatctaaagcagctttagtaggggtagcgggactatgcccacgctcactaagcagcttcttgattgtgcttgcctgcttctc

SEQ ID NO: 317 - DNA, 96 bp, Aspergillus thermomutatus
  misc_feature: 718
tgccatgtatttcagctctagttactaccttagcagtagcaattagacccatcgcatatccagtctcatcaaagttgtagatatcttcgtacgcga

SEQ ID NO: 318 - DNA, 96 bp, Aspergillus thermomutatus
  misc_feature: 718
cctcatacaaagtaggaatcaggctgctgaagctttatctactatacctatggaaacagcatcttcagcagaacaatgctctacacgggcgccacc

SEQ ID NO: 319 - DNA, 96 bp, Aspergillus thermomutatus
  misc_feature: 718
catgtatttcagctctagttactaccttagcagtagcaattagacccatcgcatatccagtctcatcaaagttgtagatatcttcgtacgcgatcc

SEQ ID NO: 320 - DNA, 96 bp, Aspergillus thermomutatus
  misc_feature: 718
gacgtctgccatgtatttcagctctagttactaccttagcagtagcaattagacccatcgcatatccagtctcatcaaagttgtagatatcttcgt

SEQ ID NO: 321 - DNA, 96 bp, Aspergillus thermomutatus
  misc_feature: 717
cattcctggataacctttgggtcctcgcacttagcacgctgatagttataccgtcgggaataagttgttctcagctcatcacggcgtttaataaag

SEQ ID NO: 322 - DNA, 96 bp, Aspergillus thermomutatus
  misc_feature: 717
agtcggtcaaccaattcagcaccaaagacacctcataatctcaagcaattagagaagcaggcaagcacaatcaagaagctgcttagtgagcgtggg

SEQ ID NO: 323 - DNA, 96 bp, Aspergillus thermomutatus
  misc_feature: 717
acatggtggtaaagcccatccttgagagttgatacactcaatagatgtgacccattcgcgattcccaggctgcataacttgacgtctgccatgtat

SEQ ID NO: 324 - DNA, 96 bp, Aspergillus thermomutatus
  misc_feature: 716
ttggagcatatcccgaagctcgtgcaaaggcatttactccagataatatcaagagtggattccgagctactggcttaattccattcaacccagatg

SEQ ID NO: 325 - DNA, 96 bp, Aspergillus thermomutatus
  misc_feature: 716
ctactttgtatgaggtcccggccttcctggatagaaagtccttctgtagaggctatctgctttgtagatcgcttcctcttctggattttcttctca

SEQ ID NO: 326 - DNA, 96 bp, Aspergillus thermomutatus
  misc_feature: 716
tcctactttgtatgaggtcccggccttcctggatagaaagtccttctgtagaggctatctgctttgtagatcgcttcctcttctggattttcttct

SEQ ID NO: 327 - DNA, 96 bp, Aspergillus thermomutatus
  misc_feature: 716
gtctgccatgtatttcagctctagttactaccttagcagtagcaattagacccatcgcatatccagtctcatcaaagttgtagatatcttcgtacg

SEQ ID NO: 328 - DNA, 96 bp, Aspergillus thermomutatus
  misc_feature: 716
atctgcatgcctgctcattcatcaaattacttacaacctcttgatgttggctgtttttcacccctgaaaggtgcttacggacgattagtccaggac

SEQ ID NO: 329 - DNA, 96 bp, Aspergillus thermomutatus
  misc_feature: 716
ctttgggtcctcgcacttagcacgctgatagttataccgtcgggaataagttgttctcagctcatcacggcgtttaataaagttatacacccaatt

SEQ ID NO: 330 - DNA, 96 bp, Aspergillus thermomutatus
  misc_feature: 716
cttggagcatatcccgaagctcgtgcaaaggcatttactccagataatatcaagagtggattccgagctactggcttaattccattcaacccagat

SEQ ID NO: 331 - DNA, 96 bp, Aspergillus thermomutatus
  misc_feature: 716
ctgccatgtatttcagctctagttactaccttagcagtagcaattagacccatcgcatatccagtctcatcaaagttgtagatatcttcgtacgcg

SEQ ID NO: 332 - DNA, 96 bp, Aspergillus thermomutatus
  misc_feature: 715
agatggctatgaatagtgctattcttctagctcaagagaatcaggaactacgagctgcgcatgagaagaaaatccagaagaggaagcgatctacaa

SEQ ID NO: 333 - DNA, 96 bp, Aspergillus thermomutatus
  misc_feature: 715
ccttggagcatatcccgaagctcgtgcaaaggcatttactccagataatatcaagagtggattccgagctactggcttaattccattcaacccaga

SEQ ID NO: 334 - DNA, 96 bp, Aspergillus thermomutatus
  misc_feature: 715
atggctatgaatagtgctattcttctagctcaagagaatcaggaactacgagctgcgcatgagaagaaaatccagaagaggaagcgatctacaaag

SEQ ID NO: 335 - DNA, 96 bp, Aspergillus thermomutatus
  misc_feature: 714
tgcctgctcattcatcaaattacttacaacctcttgatgttggctgtttttcacccctgaaaggtgcttacggacgattagtccaggaccagatgc

SEQ ID NO: 336 - DNA, 96 bp, Aspergillus thermomutatus
  misc_feature: 714
tcatacaaagtaggaatcaggctgctgaagctttatctactatacctatggaaacagcatcttcagcagaacaatgctctacacgggcgccaccac

SEQ ID NO: 337 - DNA, 96 bp, Aspergillus thermomutatus
  misc_feature: 714
tacatggtggtaaagcccatccttgagagttgatacactcaatagatgtgacccattcgcgattcccaggctgcataacttgacgtctgccatgta

SEQ ID NO: 338 - DNA, 96 bp, Aspergillus thermomutatus
  misc_feature: 714
cctttgggtcctcgcacttagcacgctgatagttataccgtcgggaataagttgttctcagctcatcacggcgtttaataaagttatacacccaat

SEQ ID NO: 339 - DNA, 96 bp, Aspergillus thermomutatus
  misc_feature: 714
acacgattaaaccattcctggataacctttgggtcctcgcacttagcacgctgatagttataccgtcgggaataagttgttctcagctcatcacgg

SEQ ID NO: 340 - DNA, 96 bp, Aspergillus thermomutatus
  misc_feature: 713
ctgcaacgtggtggcgcccgtgtagagcattgttctgctgaagatgctgtttccataggtatagtagataaagcttcagcagcctgattcctactt

SEQ ID NO: 341 - DNA, 96 bp, Aspergillus thermomutatus
  misc_feature: 713
aggcagtcggtcaaccaattcagcaccaaagacacctcataatctcaagcaattagagaagcaggcaagcacaatcaagaagctgcttagtgagcg

SEQ ID NO: 342 - DNA, 96 bp, Aspergillus thermomutatus
  misc_feature: 712
gatggctatgaatagtgctattcttctagctcaagagaatcaggaactacgagctgcgcatgagaagaaaatccagaagaggaagcgatctacaaa

SEQ ID NO: 343 - DNA, 96 bp, Aspergillus thermomutatus
  misc_feature: 712
ttcctggataacctttgggtcctcgcacttagcacgctgatagttataccgtcgggaataagttgttctcagctcatcacggcgtttaataaagtt

SEQ ID NO: 344 - DNA, 96 bp, Aspergillus thermomutatus
  misc_feature: 712
ctcatacaaagtaggaatcaggctgctgaagctttatctactatacctatggaaacagcatcttcagcagaacaatgctctacacgggcgccacca

SEQ ID NO: 345 - DNA, 96 bp, Aspergillus thermomutatus
  misc_feature: 712
gcaacgtggtggcgcccgtgtagagcattgttctgctgaagatgctgtttccataggtatagtagataaagcttcagcagcctgattcctactttg

SEQ ID NO: 346 - DNA, 96 bp, Aspergillus thermomutatus
  misc_feature: 712
cctactttgtatgaggtcccggccttcctggatagaaagtccttctgtagaggctatctgctttgtagatcgcttcctcttctggattttcttctc

SEQ ID NO: 347 - DNA, 96 bp, Aspergillus thermomutatus
  misc_feature: 711
gataatatcaagagtggattccgagctactggcttaattccattcaacccagatgaggtgcttagacggtttactatccaactcaagactcctaca

SEQ ID NO: 348 - DNA, 96 bp, Aspergillus thermomutatus
  misc_feature: 711
tctatggatcagcgtggagcagctccccgaccatctcatgttcaagatatggccaatattttgttgtcacagcgagggtttactgatattcaacct

SEQ ID NO: 349 - DNA, 96 bp, Aspergillus thermomutatus
  misc_feature: 711
acctcatacaaagtaggaatcaggctgctgaagctttatctactatacctatggaaacagcatcttcagcagaacaatgctctacacgggcgccac

SEQ ID NO: 350 - DNA, 96 bp, Aspergillus thermomutatus
  misc_feature: 710
ttgtgagatggctatgaatagtgctattcttctagctcaagagaatcaggaactacgagctgcgcatgagaagaaaatccagaagaggaagcgatc

SEQ ID NO: 351 - DNA, 96 bp, Aspergillus thermomutatus
  misc_feature: 710
tctgccatgtatttcagctctagttactaccttagcagtagcaattagacccatcgcatatccagtctcatcaaagttgtagatatcttcgtacgc

SEQ ID NO: 352 - DNA, 96 bp, Aspergillus thermomutatus
  misc_feature: 710
tcacaaccctttataagctgatctaaagcagctttagtaggggtagcgggactatgcccacgctcactaagcagcttcttgattgtgcttgcctgc

SEQ ID NO: 353 - DNA, 96 bp, Aspergillus thermomutatus
  misc_feature: 710
atgtatttcagctctagttactaccttagcagtagcaattagacccatcgcatatccagtctcatcaaagttgtagatatcttcgtacgcgatccc

SEQ ID NO: 354 - DNA, 96 bp, Aspergillus thermomutatus
  misc_feature: 710
accaattcagcaccaaagacacctcataatctcaagcaattagagaagcaggcaagcacaatcaagaagctgcttagtgagcgtgggcatagtccc

SEQ ID NO: 355 - DNA, 96 bp, Aspergillus thermomutatus
  misc_feature: 710
attcctggataacctttgggtcctcgcacttagcacgctgatagttataccgtcgggaataagttgttctcagctcatcacggcgtttaataaagt

SEQ ID NO: 356 - DNA, 96 bp, Aspergillus thermomutatus
  misc_feature: 709
ttgtacacgattaaaccattcctggataacctttgggtcctcgcacttagcacgctgatagttataccgtcgggaataagttgttctcagctcatc

SEQ ID NO: 357 - DNA, 96 bp, Aspergillus thermomutatus
  misc_feature: 709
tgtgagatggctatgaatagtgctattcttctagctcaagagaatcaggaactacgagctgcgcatgagaagaaaatccagaagaggaagcgatct

SEQ ID NO: 358 - DNA, 96 bp, Aspergillus thermomutatus
  misc_feature: 709
tatctgcatgcctgctcattcatcaaattacttacaacctcttgatgttggctgtttttcacccctgaaaggtgcttacggacgattagtccagga

SEQ ID NO: 359 - DNA, 96 bp, Aspergillus thermomutatus
  misc_feature: 709
tacgtgctattctacgtgctattctacgtgctattctacgtgctattctacgtgctattctacgtgctattctacgtgctattctacgtgctattc

SEQ ID NO: 360 - DNA, 96 bp, Aspergillus thermomutatus
  misc_feature: 709
gttgtgagatggctatgaatagtgctattcttctagctcaagagaatcaggaactacgagctgcgcatgagaagaaaatccagaagaggaagcgat

SEQ ID NO: 361 - DNA, 96 bp, Aspergillus thermomutatus
  misc_feature: 708
tcctggataacctttgggtcctcgcacttagcacgctgatagttataccgtcgggaataagttgttctcagctcatcacggcgtttaataaagtta

SEQ ID NO: 362 - DNA, 96 bp, Aspergillus thermomutatus
  misc_feature: 708
caattcagcaccaaagacacctcataatctcaagcaattagagaagcaggcaagcacaatcaagaagctgcttagtgagcgtgggcatagtcccgc

SEQ ID NO: 363 - DNA, 96 bp, Aspergillus thermomutatus
  misc_feature: 708
ctatctgcatgcctgctcattcatcaaattacttacaacctcttgatgttggctgtttttcacccctgaaaggtgcttacggacgattagtccagg

SEQ ID NO: 364 - DNA, 96 bp, Aspergillus thermomutatus
  misc_feature: 707
tttgtacacgattaaaccattcctggataacctttgggtcctcgcacttagcacgctgatagttataccgtcgggaataagttgttctcagctcat

SEQ ID NO: 365 - DNA, 96 bp, Aspergillus thermomutatus
  misc_feature: 707
tggctatgaatagtgctattcttctagctcaagagaatcaggaactacgagctgcgcatgagaagaaaatccagaagaggaagcgatctacaaagc

SEQ ID NO: 366 - DNA, 96 bp, Aspergillus thermomutatus
  misc_feature: 707
tctacgtgctattctacgtgctattctacgtgctattctacgtgctattctacgtgctattctacgtgctattctacgtgctattctacgtgctat

SEQ ID NO: 367 - DNA, 96 bp, Aspergillus thermomutatus
  misc_feature: 707
ccaattcagcaccaaagacacctcataatctcaagcaattagagaagcaggcaagcacaatcaagaagctgcttagtgagcgtgggcatagtcccg

SEQ ID NO: 368 - DNA, 96 bp, Aspergillus thermomutatus
  misc_feature: 707
aattcagcaccaaagacacctcataatctcaagcaattagagaagcaggcaagcacaatcaagaagctgcttagtgagcgtgggcatagtcccgct

SEQ ID NO: 369 - DNA, 96 bp, Aspergillus thermomutatus
  misc_feature: 706
ccattcctggataacctttgggtcctcgcacttagcacgctgatagttataccgtcgggaataagttgttctcagctcatcacggcgtttaataaa

SEQ ID NO: 370 - DNA, 96 bp, Aspergillus thermomutatus
  misc_feature: 706
ttctgcatctggtcctggactaatcgtccgtaagcacctttcaggggtgaaaaacagccaacatcaagaggttgtaagtaatttgatgaatgagca

SEQ ID NO: 371 - DNA, 96 bp, Aspergillus thermomutatus
  misc_feature: 706
ctacgtgctattctacgtgctattctacgtgctattctacgtgctattctacgtgctattctacgtgctattctacgtgctattctacgtgctatt

SEQ ID NO: 372 - DNA, 96 bp, Aspergillus thermomutatus
  misc_feature: 706
catgcctgctcattcatcaaattacttacaacctcttgatgttggctgtttttcacccctgaaaggtgcttacggacgattagtccaggaccagat

SEQ ID NO: 373 - DNA, 96 bp, Aspergillus thermomutatus
  misc_feature: 706
caacgtggtggcgcccgtgtagagcattgttctgctgaagatgctgtttccataggtatagtagataaagcttcagcagcctgattcctactttgt

SEQ ID NO: 374 - DNA, 96 bp, Aspergillus thermomutatus
  misc_feature: 706
atacaaagtaggaatcaggctgctgaagctttatctactatacctatggaaacagcatcttcagcagaacaatgctctacacgggcgccaccacgt

SEQ ID NO: 375 - DNA, 96 bp, Aspergillus thermomutatus
  misc_feature: 705
ctcacaaccctttataagctgatctaaagcagctttagtaggggtagcgggactatgcccacgctcactaagcagcttcttgattgtgcttgcctg

SEQ ID NO: 376 - DNA, 96 bp, Aspergillus thermomutatus
  misc_feature: 705
cctatggaaacagcatcttcagcagaacaatgctctacacgggcgccaccacgttgcagtgactgtcatattttagggcatagaaggacacagtgt

SEQ ID NO: 377 - DNA, 96 bp, Aspergillus thermomutatus
  misc_feature: 705
aatacatggtggtaaagcccatccttgagagttgatacactcaatagatgtgacccattcgcgattcccaggctgcataacttgacgtctgccatg

SEQ ID NO: 378 - DNA, 96 bp, Aspergillus thermomutatus
  misc_feature: 704
gtgagatggctatgaatagtgctattcttctagctcaagagaatcaggaactacgagctgcgcatgagaagaaaatccagaagaggaagcgatcta

SEQ ID NO: 379 - DNA, 96 bp, Aspergillus thermomutatus
  misc_feature: 704
aacgtggtggcgcccgtgtagagcattgttctgctgaagatgctgtttccataggtatagtagataaagcttcagcagcctgattcctactttgta

SEQ ID NO: 380 - DNA, 96 bp, Aspergillus thermomutatus
  misc_feature: 704
agataatatcaagagtggattccgagctactggcttaattccattcaacccagatgaggtgcttagacggtttactatccaactcaagactcctac

SEQ ID NO: 381 - DNA, 96 bp, Aspergillus thermomutatus
  misc_feature: 704
cctatctgcatgcctgctcattcatcaaattacttacaacctcttgatgttggctgtttttcacccctgaaaggtgcttacggacgattagtccag

SEQ ID NO: 382 - DNA, 96 bp, Aspergillus thermomutatus
  misc_feature: 703
tatggaaacagcatcttcagcagaacaatgctctacacgggcgccaccacgttgcagtgactgtcatattttagggcatagaaggacacagtgtcc

SEQ ID NO: 383 - DNA, 96 bp, Aspergillus thermomutatus
  misc_feature: 703
tacacgattaaaccattcctggataacctttgggtcctcgcacttagcacgctgatagttataccgtcgggaataagttgttctcagctcatcacg

SEQ ID NO: 384 - DNA, 96 bp, Aspergillus thermomutatus
  misc_feature: 703
atggaaacagcatcttcagcagaacaatgctctacacgggcgccaccacgttgcagtgactgtcatattttagggcatagaaggacacagtgtccc

SEQ ID NO: 385 - DNA, 96 bp, Aspergillus thermomutatus
  misc_feature: 703
aagagtggattccgagctactggcttaattccattcaacccagatgaggtgcttagacggtttactatccaactcaagactcctacaccaccaggc

SEQ ID NO: 386 - DNA, 96 bp, Aspergillus thermomutatus
  misc_feature: 703
attctacgtgctattctacgtgctattctacgtgctattctacgtgctattctacgtgctattctacgtgctattctacgtgctattctacgtgct

SEQ ID NO: 387 - DNA, 96 bp, Aspergillus thermomutatus
  misc_feature: 702
tgtacacgattaaaccattcctggataacctttgggtcctcgcacttagcacgctgatagttataccgtcgggaataagttgttctcagctcatca

SEQ ID NO: 388 - DNA, 96 bp, Aspergillus thermomutatus
  misc_feature: 701
tcctatctgcatgcctgctcattcatcaaattacttacaacctcttgatgttggctgtttttcacccctgaaaggtgcttacggacgattagtcca

SEQ ID NO: 389 - DNA, 96 bp, Aspergillus thermomutatus
  misc_feature: 701
cctggataacctttgggtcctcgcacttagcacgctgatagttataccgtcgggaataagttgttctcagctcatcacggcgtttaataaagttat

SEQ ID NO: 390 - DNA, 96 bp, Aspergillus thermomutatus
  misc_feature: 699
tgtatttcagctctagttactaccttagcagtagcaattagacccatcgcatatccagtctcatcaaagttgtagatatcttcgtacgcgatccca

SEQ ID NO: 391 - DNA, 96 bp, Aspergillus thermomutatus
  misc_feature: 699
gcctgctcattcatcaaattacttacaacctcttgatgttggctgtttttcacccctgaaaggtgcttacggacgattagtccaggaccagatgca

SEQ ID NO: 392 - DNA, 96 bp, Aspergillus thermomutatus
  misc_feature: 699
atgcctgctcattcatcaaattacttacaacctcttgatgttggctgtttttcacccctgaaaggtgcttacggacgattagtccaggaccagatg

SEQ ID NO: 393 - DNA, 96 bp, Aspergillus thermomutatus
  misc_feature: 698
tgcaacgtggtggcgcccgtgtagagcattgttctgctgaagatgctgtttccataggtatagtagataaagcttcagcagcctgattcctacttt

SEQ ID NO: 394 - DNA, 96 bp, Aspergillus thermomutatus
  misc_feature: 698
tactttgtatgaggtcccggccttcctggatagaaagtccttctgtagaggctatctgctttgtagatcgcttcctcttctggattttcttctcat

SEQ ID NO: 395 - DNA, 96 bp, Aspergillus thermomutatus
  misc_feature: 698
cttctgcatctggtcctggactaatcgtccgtaagcacctttcaggggtgaaaaacagccaacatcaagaggttgtaagtaatttgatgaatgagc

SEQ ID NO: 396 - DNA, 96 bp, Aspergillus thermomutatus
  misc_feature: 697
tggcgcgttgttcagctcgaaaacagtgtccatttaatcgccgctgaagtgttgtccgcggaacattgtaaatgcgtgaagcttcacgaacattgc

SEQ ID NO: 397 - DNA, 96 bp, Aspergillus thermomutatus
  misc_feature: 697
ctattctacgtgctattctacgtgctattctacgtgctattctacgtgctattctacgtgctattctacgtgctattctacgtgctattctacgtg

SEQ ID NO: 398 - DNA, 96 bp, Aspergillus thermomutatus
  misc_feature: 697
catacaaagtaggaatcaggctgctgaagctttatctactatacctatggaaacagcatcttcagcagaacaatgctctacacgggcgccaccacg

SEQ ID NO: 399 - DNA, 96 bp, Aspergillus thermomutatus
  misc_feature: 697
cacaaccctttataagctgatctaaagcagctttagtaggggtagcgggactatgcccacgctcactaagcagcttcttgattgtgcttgcctgct

SEQ ID NO: 400 - DNA, 96 bp, Aspergillus thermomutatus
  misc_feature: 697
acaaccctttataagctgatctaaagcagctttagtaggggtagcgggactatgcccacgctcactaagcagcttcttgattgtgcttgcctgctt

SEQ ID NO: 401 - DNA, 96 bp, Aspergillus thermomutatus
  misc_feature: 696
ttctacgtgctattctacgtgctattctacgtgctattctacgtgctattctacgtgctattctacgtgctattctacgtgctattctacgtgcta

SEQ ID NO: 402 - DNA, 96 bp, Aspergillus thermomutatus
  misc_feature: 696
agagtggattccgagctactggcttaattccattcaacccagatgaggtgcttagacggtttactatccaactcaagactcctacaccaccaggca

SEQ ID NO: 403 - DNA, 96 bp, Aspergillus thermomutatus
  misc_feature: 695
taaagggttgtgagatggctatgaatagtgctattcttctagctcaagagaatcaggaactacgagctgcgcatgagaagaaaatccagaagagga

SEQ ID NO: 404 - DNA, 96 bp, Aspergillus thermomutatus
  misc_feature: 695
gataacctttgggtcctcgcacttagcacgctgatagttataccgtcgggaataagttgttctcagctcatcacggcgtttaataaagttatacac

SEQ ID NO: 405 - DNA, 96 bp, Aspergillus thermomutatus
  misc_feature: 695
caaccctttataagctgatctaaagcagctttagtaggggtagcgggactatgcccacgctcactaagcagcttcttgattgtgcttgcctgcttc

SEQ ID NO: 406 - DNA, 96 bp, Aspergillus thermomutatus
  misc_feature: 694
tattctacgtgctattctacgtgctattctacgtgctattctacgtgctattctacgtgctattctacgtgctattctacgtgctattctacgtgc

SEQ ID NO: 407 - DNA, 96 bp, Aspergillus thermomutatus
  misc_feature: 694
ctcttgatgttggctgtttttcacccctgaaaggtgcttacggacgattagtccaggaccagatgcagaagggtttcaatcatattgataaacttg

SEQ ID NO: 408 - DNA, 96 bp, Aspergillus thermomutatus
  misc_feature: 693
gcttataaagggttgtgagatggctatgaatagtgctattcttctagctcaagagaatcaggaactacgagctgcgcatgagaagaaaatccagaa

SEQ ID NO: 409 - DNA, 96 bp, Aspergillus thermomutatus
  misc_feature: 693
ctatggaaacagcatcttcagcagaacaatgctctacacgggcgccaccacgttgcagtgactgtcatattttagggcatagaaggacacagtgtc

SEQ ID NO: 410 - DNA, 96 bp, Aspergillus thermomutatus
  misc_feature: 693
ataaagggttgtgagatggctatgaatagtgctattcttctagctcaagagaatcaggaactacgagctgcgcatgagaagaaaatccagaagagg

SEQ ID NO: 411 - DNA, 96 bp, Aspergillus thermomutatus
  misc_feature: 692
ggctatgaatagtgctattcttctagctcaagagaatcaggaactacgagctgcgcatgagaagaaaatccagaagaggaagcgatctacaaagca

SEQ ID NO: 412 - DNA, 96 bp, Aspergillus thermomutatus
  misc_feature: 692
gagtggattccgagctactggcttaattccattcaacccagatgaggtgcttagacggtttactatccaactcaagactcctacaccaccaggcag

SEQ ID NO: 413 - DNA, 96 bp, Aspergillus thermomutatus
  misc_feature: 691
gatttgtacacgattaaaccattcctggataacctttgggtcctcgcacttagcacgctgatagttataccgtcgggaataagttgttctcagctc

SEQ ID NO: 414 - DNA, 96 bp, Aspergillus thermomutatus
  misc_feature: 690
acttattcccgacggtataactatcagcgtgctaagtgcgaggacccaaaggttatccaggaatggtttaatcgtgtacaaatcacgatcatgcaa

SEQ ID NO: 415 - DNA, 96 bp, Aspergillus thermomutatus
  misc_feature: 690
aaagggttgtgagatggctatgaatagtgctattcttctagctcaagagaatcaggaactacgagctgcgcatgagaagaaaatccagaagaggaa

SEQ ID NO: 416 - DNA, 96 bp, Aspergillus thermomutatus
  misc_feature: 690
actcaatagatgtgacccattcgcgattcccaggctgcataacttgacgtctgccatgtatttcagctctagttactaccttagcagtagcaatta

SEQ ID NO: 417 - DNA, 96 bp, Aspergillus thermomutatus
  misc_feature: 690
gttctcagctcatcacggcgtttaataaagttatacacccaattcttgccgacaggttgaatatcagtaaaccctcgctgtgacaacaaaatattg

SEQ ID NO: 418 - DNA, 96 bp, Aspergillus thermomutatus
  misc_feature: 690
attcctatctgcatgcctgctcattcatcaaattacttacaacctcttgatgttggctgtttttcacccctgaaaggtgcttacggacgattagtc

SEQ ID NO: 419 - DNA, 96 bp, Aspergillus thermomutatus
  misc_feature: 690
aaccctttataagctgatctaaagcagctttagtaggggtagcgggactatgcccacgctcactaagcagcttcttgattgtgcttgcctgcttct

SEQ ID NO: 420 - DNA, 96 bp, Aspergillus thermomutatus
  misc_feature: 689
ttgatctgttgtccatccatttggactaacttcaattctccagttgcttggtaacttgtcatcttgataccagccctcaatatggactgttccctt

SEQ ID NO: 421 - DNA, 96 bp, Aspergillus thermomutatus
  misc_feature: 689
tggataacctttgggtcctcgcacttagcacgctgatagttataccgtcgggaataagttgttctcagctcatcacggcgtttaataaagttatac

SEQ ID NO: 422 - DNA, 96 bp, Aspergillus thermomutatus
  misc_feature: 689
tgatctgttgtccatccatttggactaacttcaattctccagttgcttggtaacttgtcatcttgataccagccctcaatatggactgttcccttg

SEQ ID NO: 423 - DNA, 96 bp, Aspergillus thermomutatus
  misc_feature: 689
tctcacaaccctttataagctgatctaaagcagctttagtaggggtagcgggactatgcccacgctcactaagcagcttcttgattgtgcttgcct

SEQ ID NO: 424 - DNA, 96 bp, Aspergillus thermomutatus
  misc_feature: 689
gaaacagcatcttcagcagaacaatgctctacacgggcgccaccacgttgcagtgactgtcatattttagggcatagaaggacacagtgtcccagt

SEQ ID NO: 425 - DNA, 96 bp, Aspergillus thermomutatus
  misc_feature: 689
caagagtggattccgagctactggcttaattccattcaacccagatgaggtgcttagacggtttactatccaactcaagactcctacaccaccagg

SEQ ID NO: 426 - DNA, 96 bp, Aspergillus thermomutatus
  misc_feature: 689
atcaagaagctgcttagtgagcgtgggcatagtcccgctacccctactaaagctgctttagatcagcttataaagggttgtgagatggctatgaat

SEQ ID NO: 427 - DNA, 96 bp, Aspergillus thermomutatus
  misc_feature: 688
acctttgggtcctcgcacttagcacgctgatagttataccgtcgggaataagttgttctcagctcatcacggcgtttaataaagttatacacccaa

SEQ ID NO: 428 - DNA, 96 bp, Aspergillus thermomutatus
  misc_feature: 688
atttgtacacgattaaaccattcctggataacctttgggtcctcgcacttagcacgctgatagttataccgtcgggaataagttgttctcagctca

SEQ ID NO: 429 - DNA, 96 bp, Aspergillus thermomutatus
  misc_feature: 687
tgagatggctatgaatagtgctattcttctagctcaagagaatcaggaactacgagctgcgcatgagaagaaaatccagaagaggaagcgatctac

SEQ ID NO: 430 - DNA, 96 bp, Aspergillus thermomutatus
  misc_feature: 687
ctggataacctttgggtcctcgcacttagcacgctgatagttataccgtcgggaataagttgttctcagctcatcacggcgtttaataaagttata

SEQ ID NO: 431 - DNA, 96 bp, Aspergillus thermomutatus
  misc_feature: 687
catcaaagttgtagatatcttcgtacgcgatcccatattgcatgatcgtgatttgtacacgattaaaccattcctggataacctttgggtcctcgc

SEQ ID NO: 432 - DNA, 96 bp, Aspergillus thermomutatus
  misc_feature: 687
aagggttgtgagatggctatgaatagtgctattcttctagctcaagagaatcaggaactacgagctgcgcatgagaagaaaatccagaagaggaag

SEQ ID NO: 433 - DNA, 96 bp, Aspergillus thermomutatus
  misc_feature: 686
tcaaagttgtagatatcttcgtacgcgatcccatattgcatgatcgtgatttgtacacgattaaaccattcctggataacctttgggtcctcgcac

SEQ ID NO: 434 - DNA, 96 bp, Aspergillus thermomutatus
  misc_feature: 685
tcaagagtggattccgagctactggcttaattccattcaacccagatgaggtgcttagacggtttactatccaactcaagactcctacaccaccag

SEQ ID NO: 435 - DNA, 96 bp, Aspergillus thermomutatus
  misc_feature: 685
ctatacctatggaaacagcatcttcagcagaacaatgctctacacgggcgccaccacgttgcagtgactgtcatattttagggcatagaaggacac

SEQ ID NO: 436 - DNA, 96 bp, Aspergillus thermomutatus
  misc_feature: 685
cactgcaacgtggtggcgcccgtgtagagcattgttctgctgaagatgctgtttccataggtatagtagataaagcttcagcagcctgattcctac

SEQ ID NO: 437 - DNA, 96 bp, Aspergillus thermomutatus
  misc_feature: 685
ggagcatatcccgaagctcgtgcaaaggcatttactccagataatatcaagagtggattccgagctactggcttaattccattcaacccagatgag

SEQ ID NO: 438 - DNA, 96 bp, Aspergillus thermomutatus
  misc_feature: 684
atcaagagtggattccgagctactggcttaattccattcaacccagatgaggtgcttagacggtttactatccaactcaagactcctacaccacca

SEQ ID NO: 439 - DNA, 96 bp, Aspergillus thermomutatus
  misc_feature: 684
tggagcatatcccgaagctcgtgcaaaggcatttactccagataatatcaagagtggattccgagctactggcttaattccattcaacccagatga

SEQ ID NO: 440 - DNA, 96 bp, Aspergillus thermomutatus
  misc_feature: 684
ggttgtgagatggctatgaatagtgctattcttctagctcaagagaatcaggaactacgagctgcgcatgagaagaaaatccagaagaggaagcga

SEQ ID NO: 441 - DNA, 96 bp, Aspergillus thermomutatus
  misc_feature: 684
gttgatacactcaatagatgtgacccattcgcgattcccaggctgcataacttgacgtctgccatgtatttcagctctagttactaccttagcagt

SEQ ID NO: 442 - DNA, 96 bp, Aspergillus thermomutatus
  misc_feature: 684
agggttgtgagatggctatgaatagtgctattcttctagctcaagagaatcaggaactacgagctgcgcatgagaagaaaatccagaagaggaagc

SEQ ID NO: 443 - DNA, 96 bp, Aspergillus thermomutatus
  misc_feature: 684
gagaacaacttattcccgacggtataactatcagcgtgctaagtgcgaggacccaaaggttatccaggaatggtttaatcgtgtacaaatcacgat

SEQ ID NO: 444 - DNA, 96 bp, Aspergillus thermomutatus
  misc_feature: 683
tatcaagagtggattccgagctactggcttaattccattcaacccagatgaggtgcttagacggtttactatccaactcaagactcctacaccacc

SEQ ID NO: 445 - DNA, 96 bp, Aspergillus thermomutatus
  misc_feature: 683
aaacagcatcttcagcagaacaatgctctacacgggcgccaccacgttgcagtgactgtcatattttagggcatagaaggacacagtgtcccagtc

SEQ ID NO: 446 - DNA, 96 bp, Aspergillus thermomutatus
  misc_feature: 682
ttcctatctgcatgcctgctcattcatcaaattacttacaacctcttgatgttggctgtttttcacccctgaaaggtgcttacggacgattagtcc

SEQ ID NO: 447 - DNA, 96 bp, Aspergillus thermomutatus
  misc_feature: 682
atcaaagttgtagatatcttcgtacgcgatcccatattgcatgatcgtgatttgtacacgattaaaccattcctggataacctttgggtcctcgca

SEQ ID NO: 448 - DNA, 96 bp, Aspergillus thermomutatus
  misc_feature: 681
ggataacctttgggtcctcgcacttagcacgctgatagttataccgtcgggaataagttgttctcagctcatcacggcgtttaataaagttataca

SEQ ID NO: 449 - DNA, 96 bp, Aspergillus thermomutatus
  misc_feature: 680
cccgaagctcgtgcaaaggcatttactccagataatatcaagagtggattccgagctactggcttaattccattcaacccagatgaggtgcttaga

SEQ ID NO: 450 - DNA, 96 bp, Aspergillus thermomutatus
  misc_feature: 680
tcactgcaacgtggtggcgcccgtgtagagcattgttctgctgaagatgctgtttccataggtatagtagataaagcttcagcagcctgattccta

SEQ ID NO: 451 - DNA, 96 bp, Aspergillus thermomutatus
  misc_feature: 680
gttgtagatatcttcgtacgcgatcccatattgcatgatcgtgatttgtacacgattaaaccattcctggataacctttgggtcctcgcacttagc

SEQ ID NO: 452 - DNA, 96 bp, Aspergillus thermomutatus
  misc_feature: 679
ctttggtgctgaattggttgaccgactgcctggtggtgtaggagtcttgagttggatagtaaaccgtctaagcacctcatctgggttgaatggaat

SEQ ID NO: 453 - DNA, 96 bp, Aspergillus thermomutatus
  misc_feature: 678
tgctattctacgtgctattctacgtgctattctacgtgctattctacgtgctattctacgtgctattctacgtgctattctacgtgctattctacg

SEQ ID NO: 454 - DNA, 96 bp, Aspergillus thermomutatus
  misc_feature: 678
tgatttgtacacgattaaaccattcctggataacctttgggtcctcgcacttagcacgctgatagttataccgtcgggaataagttgttctcagct

SEQ ID NO: 455 - DNA, 96 bp, Aspergillus thermomutatus
  misc_feature: 678
ggaaggccgggacctcatacaaagtaggaatcaggctgctgaagctttatctactatacctatggaaacagcatcttcagcagaacaatgctctac

SEQ ID NO: 456 - DNA, 96 bp, Aspergillus thermomutatus
  misc_feature: 677
atcaaattacttacaacctcttgatgttggctgtttttcacccctgaaaggtgcttacggacgattagtccaggaccagatgcagaagggtttcaa

SEQ ID NO: 457 - DNA, 96 bp, Aspergillus thermomutatus
  misc_feature: 677
caatcaagaagctgcttagtgagcgtgggcatagtcccgctacccctactaaagctgctttagatcagcttataaagggttgtgagatggctatga

SEQ ID NO: 458 - DNA, 96 bp, Aspergillus thermomutatus
  misc_feature: 677
aggaaggccgggacctcatacaaagtaggaatcaggctgctgaagctttatctactatacctatggaaacagcatcttcagcagaacaatgctcta

SEQ ID NO: 459 - DNA, 96 bp, Aspergillus thermomutatus
  misc_feature: 677
tacgcgatcccatattgcatgatcgtgatttgtacacgattaaaccattcctggataacctttgggtcctcgcacttagcacgctgatagttatac

SEQ ID NO: 460 - DNA, 96 bp, Aspergillus thermomutatus
  misc_feature: 677
taatacatggtggtaaagcccatccttgagagttgatacactcaatagatgtgacccattcgcgattcccaggctgcataacttgacgtctgccat

SEQ ID NO: 461 - DNA, 96 bp, Aspergillus thermomutatus
  misc_feature: 677
cttataaagggttgtgagatggctatgaatagtgctattcttctagctcaagagaatcaggaactacgagctgcgcatgagaagaaaatccagaag

SEQ ID NO: 462 - DNA, 96 bp, Aspergillus thermomutatus
  misc_feature: 676
gacctcatacaaagtaggaatcaggctgctgaagctttatctactatacctatggaaacagcatcttcagcagaacaatgctctacacgggcgcca

SEQ ID NO: 463 - DNA, 96 bp, Aspergillus thermomutatus
  misc_feature: 676
tctgcatgcctgctcattcatcaaattacttacaacctcttgatgttggctgtttttcacccctgaaaggtgcttacggacgattagtccaggacc

SEQ ID NO: 464 - DNA, 96 bp, Aspergillus thermomutatus
  misc_feature: 676
tcgaactccctacaagaagcccttgactggggtgctacggagggtatcaccttcgcgccggataaatacgaactgatccatttctcgcgccgcaag

SEQ ID NO: 465 - DNA, 96 bp, Aspergillus thermomutatus
  misc_feature: 676
agtcactgcaacgtggtggcgcccgtgtagagcattgttctgctgaagatgctgtttccataggtatagtagataaagcttcagcagcctgattcc

SEQ ID NO: 466 - DNA, 96 bp, Aspergillus thermomutatus
  misc_feature: 676
caccaggcagtcggtcaaccaattcagcaccaaagacacctcataatctcaagcaattagagaagcaggcaagcacaatcaagaagctgcttagtg

SEQ ID NO: 467 - DNA, 96 bp, Aspergillus thermomutatus
  misc_feature: 675
tccttggagcatatcccgaagctcgtgcaaaggcatttactccagataatatcaagagtggattccgagctactggcttaattccattcaacccag

SEQ ID NO: 468 - DNA, 96 bp, Aspergillus thermomutatus
  misc_feature: 675
taatatcaagagtggattccgagctactggcttaattccattcaacccagatgaggtgcttagacggtttactatccaactcaagactcctacacc

SEQ ID NO: 469 - DNA, 96 bp, Aspergillus thermomutatus
  misc_feature: 675
taacctttgggtcctcgcacttagcacgctgatagttataccgtcgggaataagttgttctcagctcatcacggcgtttaataaagttatacaccc

SEQ ID NO: 470 - DNA, 96 bp, Aspergillus thermomutatus
  misc_feature: 675
gtcactgcaacgtggtggcgcccgtgtagagcattgttctgctgaagatgctgtttccataggtatagtagataaagcttcagcagcctgattcct

SEQ ID NO: 471 - DNA, 96 bp, Aspergillus thermomutatus
  misc_feature: 675
ggacctcatacaaagtaggaatcaggctgctgaagctttatctactatacctatggaaacagcatcttcagcagaacaatgctctacacgggcgcc

SEQ ID NO: 472 - DNA, 96 bp, Aspergillus thermomutatus
  misc_feature: 675
cctcttgatgttggctgtttttcacccctgaaaggtgcttacggacgattagtccaggaccagatgcagaagggtttcaatcatattgataaactt

SEQ ID NO: 473 - DNA, 96 bp, Aspergillus thermomutatus
  misc_feature: 674
tacactcaatagatgtgacccattcgcgattcccaggctgcataacttgacgtctgccatgtatttcagctctagttactaccttagcagtagcaa

SEQ ID NO: 474 - DNA, 96 bp, Aspergillus thermomutatus
  misc_feature: 674
catcaaattacttacaacctcttgatgttggctgtttttcacccctgaaaggtgcttacggacgattagtccaggaccagatgcagaagggtttca

SEQ ID NO: 475 - DNA, 96 bp, Aspergillus thermomutatus
  misc_feature: 674
tcaaattacttacaacctcttgatgttggctgtttttcacccctgaaaggtgcttacggacgattagtccaggaccagatgcagaagggtttcaat

SEQ ID NO: 476 - DNA, 96 bp, Aspergillus thermomutatus
  misc_feature: 674
gtacgcgatcccatattgcatgatcgtgatttgtacacgattaaaccattcctggataacctttgggtcctcgcacttagcacgctgatagttata

SEQ ID NO: 477 - DNA, 96 bp, Aspergillus thermomutatus
  misc_feature: 674
aacctcttgatgttggctgtttttcacccctgaaaggtgcttacggacgattagtccaggaccagatgcagaagggtttcaatcatattgataaac

SEQ ID NO: 478 - DNA, 96 bp, Aspergillus thermomutatus
  misc_feature: 674
gctattctacgtgctattctacgtgctattctacgtgctattctacgtgctattctacgtgctattctacgtgctattctacgtgctattctacgt

SEQ ID NO: 479 - DNA, 96 bp, Aspergillus thermomutatus
  misc_feature: 674
actgcaacgtggtggcgcccgtgtagagcattgttctgctgaagatgctgtttccataggtatagtagataaagcttcagcagcctgattcctact

SEQ ID NO: 480 - DNA, 96 bp, Aspergillus thermomutatus
  misc_feature: 673
ttctcagctcatcacggcgtttaataaagttatacacccaattcttgccgacaggttgaatatcagtaaaccctcgctgtgacaacaaaatattgg

SEQ ID NO: 481 - DNA, 96 bp, Aspergillus thermomutatus
  misc_feature: 673
ttccttggagcatatcccgaagctcgtgcaaaggcatttactccagataatatcaagagtggattccgagctactggcttaattccattcaaccca

SEQ ID NO: 482 - DNA, 96 bp, Aspergillus thermomutatus
  misc_feature: 673
aacctttgggtcctcgcacttagcacgctgatagttataccgtcgggaataagttgttctcagctcatcacggcgtttaataaagttatacaccca

SEQ ID NO: 483 - DNA, 96 bp, Aspergillus thermomutatus
  misc_feature: 673
agctcatcacggcgtttaataaagttatacacccaattcttgccgacaggttgaatatcagtaaaccctcgctgtgacaacaaaatattggccata

SEQ ID NO: 484 - DNA, 96 bp, Aspergillus thermomutatus
  misc_feature: 673
tataaagggttgtgagatggctatgaatagtgctattcttctagctcaagagaatcaggaactacgagctgcgcatgagaagaaaatccagaagag

SEQ ID NO: 485 - DNA, 96 bp, Aspergillus thermomutatus
  misc_feature: 673
cgaagctcgtgcaaaggcatttactccagataatatcaagagtggattccgagctactggcttaattccattcaacccagatgaggtgcttagacg

SEQ ID NO: 486 - DNA, 96 bp, Aspergillus thermomutatus
  misc_feature: 673
cactcaatagatgtgacccattcgcgattcccaggctgcataacttgacgtctgccatgtatttcagctctagttactaccttagcagtagcaatt

SEQ ID NO: 487 - DNA, 96 bp, Aspergillus thermomutatus
  misc_feature: 673
acactcaatagatgtgacccattcgcgattcccaggctgcataacttgacgtctgccatgtatttcagctctagttactaccttagcagtagcaat

SEQ ID NO: 488 - DNA, 96 bp, Aspergillus thermomutatus
  misc_feature: 672
atacactcaatagatgtgacccattcgcgattcccaggctgcataacttgacgtctgccatgtatttcagctctagttactaccttagcagtagca

SEQ ID NO: 489 - DNA, 96 bp, Aspergillus thermomutatus
  misc_feature: 672
tattattcctatctgcatgcctgctcattcatcaaattacttacaacctcttgatgttggctgtttttcacccctgaaaggtgcttacggacgatt

SEQ ID NO: 490 - DNA, 96 bp, Aspergillus thermomutatus
  misc_feature: 672
accgactgcctggtggtgtaggagtcttgagttggatagtaaaccgtctaagcacctcatctgggttgaatggaattaagccagtagctcggaatc

SEQ ID NO: 491 - DNA, 96 bp, Aspergillus thermomutatus
  misc_feature: 672
cgaactccctacaagaagcccttgactggggtgctacggagggtatcaccttcgcgccggataaatacgaactgatccatttctcgcgccgcaagg

SEQ ID NO: 492 - DNA, 96 bp, Aspergillus thermomutatus
  misc_feature: 672
attatgaggtgtctttggtgctgaattggttgaccgactgcctggtggtgtaggagtcttgagttggatagtaaaccgtctaagcacctcatctgg

SEQ ID NO: 493 - DNA, 96 bp, Aspergillus thermomutatus
  misc_feature: 671
ataatacatggtggtaaagcccatccttgagagttgatacactcaatagatgtgacccattcgcgattcccaggctgcataacttgacgtctgcca

SEQ ID NO: 494 - DNA, 96 bp, Aspergillus thermomutatus
  misc_feature: 671
caacttattcccgacggtataactatcagcgtgctaagtgcgaggacccaaaggttatccaggaatggtttaatcgtgtacaaatcacgatcatgc

SEQ ID NO: 495 - DNA, 96 bp, Aspergillus thermomutatus
  misc_feature: 670
tattgcatgatcgtgatttgtacacgattaaaccattcctggataacctttgggtcctcgcacttagcacgctgatagttataccgtcgggaataa

SEQ ID NO: 496 - DNA, 96 bp, Aspergillus thermomutatus
  misc_feature: 670
ttatgaggtgtctttggtgctgaattggttgaccgactgcctggtggtgtaggagtcttgagttggatagtaaaccgtctaagcacctcatctggg

SEQ ID NO: 497 - DNA, 96 bp, Aspergillus thermomutatus
  misc_feature: 670
aaactagctaattgtttatcacacataggaggtctactaccaaaagggctgtagggttcaatgtgtggattatgtagtctaaattgtcccatatac

SEQ ID NO: 498 - DNA, 96 bp, Aspergillus thermomutatus
  misc_feature: 670
ccttctgcatctggtcctggactaatcgtccgtaagcacctttcaggggtgaaaaacagccaacatcaagaggttgtaagtaatttgatgaatgag

SEQ ID NO: 499 - DNA, 96 bp, Aspergillus thermomutatus
  misc_feature: 669
cccttctgcatctggtcctggactaatcgtccgtaagcacctttcaggggtgaaaaacagccaacatcaagaggttgtaagtaatttgatgaatga

SEQ ID NO: 500 - DNA, 96 bp, Aspergillus thermomutatus
  misc_feature: 669
attgcatgatcgtgatttgtacacgattaaaccattcctggataacctttgggtcctcgcacttagcacgctgatagttataccgtcgggaataag

SEQ ID NO: 501 - DNA, 96 bp, Aspergillus thermomutatus
  misc_feature: 668
gaaggccgggacctcatacaaagtaggaatcaggctgctgaagctttatctactatacctatggaaacagcatcttcagcagaacaatgctctaca

SEQ ID NO: 502 - DNA, 96 bp, Aspergillus thermomutatus
  misc_feature: 668
tatctatggatcagcgtggagcagctccccgaccatctcatgttcaagatatggccaatattttgttgtcacagcgagggtttactgatattcaac

SEQ ID NO: 503 - DNA, 96 bp, Aspergillus thermomutatus
  misc_feature: 668
aaggccgggacctcatacaaagtaggaatcaggctgctgaagctttatctactatacctatggaaacagcatcttcagcagaacaatgctctacac

SEQ ID NO: 504 - DNA, 96 bp, Aspergillus thermomutatus
  misc_feature: 668
accaccaggcagtcggtcaaccaattcagcaccaaagacacctcataatctcaagcaattagagaagcaggcaagcacaatcaagaagctgcttag

SEQ ID NO: 505 - DNA, 96 bp, Aspergillus thermomutatus
  misc_feature: 667
ttaaactagctaattgtttatcacacataggaggtctactaccaaaagggctgtagggttcaatgtgtggattatgtagtctaaattgtcccatat

SEQ ID NO: 506 - DNA, 96 bp, Aspergillus thermomutatus
  misc_feature: 667
gagatggctatgaatagtgctattcttctagctcaagagaatcaggaactacgagctgcgcatgagaagaaaatccagaagaggaagcgatctaca

SEQ ID NO: 507 - DNA, 96 bp, Aspergillus thermomutatus
  misc_feature: 667
gtgatttgtacacgattaaaccattcctggataacctttgggtcctcgcacttagcacgctgatagttataccgtcgggaataagttgttctcagc

SEQ ID NO: 508 - DNA, 96 bp, Aspergillus thermomutatus
  misc_feature: 666
ttggtgctgaattggttgaccgactgcctggtggtgtaggagtcttgagttggatagtaaaccgtctaagcacctcatctgggttgaatggaatta

SEQ ID NO: 509 - DNA, 96 bp, Aspergillus thermomutatus
  misc_feature: 666
actatacctatggaaacagcatcttcagcagaacaatgctctacacgggcgccaccacgttgcagtgactgtcatattttagggcatagaaggaca

SEQ ID NO: 510 - DNA, 96 bp, Aspergillus thermomutatus
  misc_feature: 666
attaaactagctaattgtttatcacacataggaggtctactaccaaaagggctgtagggttcaatgtgtggattatgtagtctaaattgtcccata

SEQ ID NO: 511 - DNA, 96 bp, Aspergillus thermomutatus
  misc_feature: 666
ccgaagctcgtgcaaaggcatttactccagataatatcaagagtggattccgagctactggcttaattccattcaacccagatgaggtgcttagac

SEQ ID NO: 512 - DNA, 96 bp, Aspergillus thermomutatus
  misc_feature: 666
gataatacatggtggtaaagcccatccttgagagttgatacactcaatagatgtgacccattcgcgattcccaggctgcataacttgacgtctgcc

SEQ ID NO: 513 - DNA, 96 bp, Aspergillus thermomutatus
  misc_feature: 666
ctacaccaccaggcagtcggtcaaccaattcagcaccaaagacacctcataatctcaagcaattagagaagcaggcaagcacaatcaagaagctgc

SEQ ID NO: 514 - DNA, 96 bp, Aspergillus thermomutatus
  misc_feature: 666
ccaccaggcagtcggtcaaccaattcagcaccaaagacacctcataatctcaagcaattagagaagcaggcaagcacaatcaagaagctgcttagt

SEQ ID NO: 515 - DNA, 96 bp, Aspergillus thermomutatus
  misc_feature: 666
cattcatcaaattacttacaacctcttgatgttggctgtttttcacccctgaaaggtgcttacggacgattagtccaggaccagatgcagaagggt

SEQ ID NO: 516 - DNA, 96 bp, Aspergillus thermomutatus
  misc_feature: 665
tacacgggcgccaccacgttgcagtgactgtcatattttagggcatagaaggacacagtgtcccagtcgtaaaaggaattaatttttttgctatga

SEQ ID NO: 517 - DNA, 96 bp, Aspergillus thermomutatus
  misc_feature: 665
atattgcatgatcgtgatttgtacacgattaaaccattcctggataacctttgggtcctcgcacttagcacgctgatagttataccgtcgggaata

SEQ ID NO: 518 - DNA, 96 bp, Aspergillus thermomutatus
  misc_feature: 665
tatgaggtgtctttggtgctgaattggttgaccgactgcctggtggtgtaggagtcttgagttggatagtaaaccgtctaagcacctcatctgggt

SEQ ID NO: 519 - DNA, 96 bp, Aspergillus thermomutatus
  misc_feature: 665
taaactagctaattgtttatcacacataggaggtctactaccaaaagggctgtagggttcaatgtgtggattatgtagtctaaattgtcccatata

SEQ ID NO: 520 - DNA, 96 bp, Aspergillus thermomutatus
  misc_feature: 665
aagttgtagatatcttcgtacgcgatcccatattgcatgatcgtgatttgtacacgattaaaccattcctggataacctttgggtcctcgcactta

SEQ ID NO: 521 - DNA, 96 bp, Aspergillus thermomutatus
  misc_feature: 665
ccgactgcctggtggtgtaggagtcttgagttggatagtaaaccgtctaagcacctcatctgggttgaatggaattaagccagtagctcggaatcc

SEQ ID NO: 522 - DNA, 96 bp, Aspergillus thermomutatus
  misc_feature: 665
ctcctacaccaccaggcagtcggtcaaccaattcagcaccaaagacacctcataatctcaagcaattagagaagcaggcaagcacaatcaagaagc

SEQ ID NO: 523 - DNA, 96 bp, Aspergillus thermomutatus
  misc_feature: 665
ctacacgggcgccaccacgttgcagtgactgtcatattttagggcatagaaggacacagtgtcccagtcgtaaaaggaattaatttttttgctatg

SEQ ID NO: 524 - DNA, 96 bp, Aspergillus thermomutatus
  misc_feature: 665
acctcttgatgttggctgtttttcacccctgaaaggtgcttacggacgattagtccaggaccagatgcagaagggtttcaatcatattgataaact

SEQ ID NO: 525 - DNA, 96 bp, Aspergillus thermomutatus
  misc_feature: 664
ttatctatggatcagcgtggagcagctccccgaccatctcatgttcaagatatggccaatattttgttgtcacagcgagggtttactgatattcaa

SEQ ID NO: 526 - DNA, 96 bp, Aspergillus thermomutatus
  misc_feature: 664
ttcatcaaattacttacaacctcttgatgttggctgtttttcacccctgaaaggtgcttacggacgattagtccaggaccagatgcagaagggttt

SEQ ID NO: 527 - DNA, 96 bp, Aspergillus thermomutatus
  misc_feature: 664
gattcctactttgtatgaggtcccggccttcctggatagaaagtccttctgtagaggctatctgctttgtagatcgcttcctcttctggattttct

SEQ ID NO: 528 - DNA, 96 bp, Aspergillus thermomutatus
  misc_feature: 664
cctacaccaccaggcagtcggtcaaccaattcagcaccaaagacacctcataatctcaagcaattagagaagcaggcaagcacaatcaagaagctg

SEQ ID NO: 529 - DNA, 96 bp, Aspergillus thermomutatus
  misc_feature: 664
agatatcttcgtacgcgatcccatattgcatgatcgtgatttgtacacgattaaaccattcctggataacctttgggtcctcgcacttagcacgct

SEQ ID NO: 530 - DNA, 96 bp, Aspergillus thermomutatus
  misc_feature: 663
attatctatggatcagcgtggagcagctccccgaccatctcatgttcaagatatggccaatattttgttgtcacagcgagggtttactgatattca

SEQ ID NO: 531 - DNA, 96 bp, Aspergillus thermomutatus
  misc_feature: 663
tattaaactagctaattgtttatcacacataggaggtctactaccaaaagggctgtagggttcaatgtgtggattatgtagtctaaattgtcccat

SEQ ID NO: 532 - DNA, 96 bp, Aspergillus thermomutatus
  misc_feature: 663
gggttgtgagatggctatgaatagtgctattcttctagctcaagagaatcaggaactacgagctgcgcatgagaagaaaatccagaagaggaagcg

SEQ ID NO: 533 - DNA, 96 bp, Aspergillus thermomutatus
  misc_feature: 663
ctcagctcatcacggcgtttaataaagttatacacccaattcttgccgacaggttgaatatcagtaaaccctcgctgtgacaacaaaatattggcc

SEQ ID NO: 534 - DNA, 96 bp, Aspergillus thermomutatus
  misc_feature: 663
atattattcctatctgcatgcctgctcattcatcaaattacttacaacctcttgatgttggctgtttttcacccctgaaaggtgcttacggacgat

SEQ ID NO: 535 - DNA, 96 bp, Aspergillus thermomutatus
  misc_feature: 663
atattatctatggatcagcgtggagcagctccccgaccatctcatgttcaagatatggccaatattttgttgtcacagcgagggtttactgatatt

SEQ ID NO: 536 - DNA, 96 bp, Aspergillus thermomutatus
  misc_feature: 662
ttgatgttggctgtttttcacccctgaaaggtgcttacggacgattagtccaggaccagatgcagaagggtttcaatcatattgataaacttgatt

SEQ ID NO: 537 - DNA, 96 bp, Aspergillus thermomutatus
  misc_feature: 662
tattattctcactgcaaatattgtcgaattcaggggttagatggctgccatggccatcgagaaccaagagacgatatctgcctgtcgttcgaccag

SEQ ID NO: 538 - DNA, 96 bp, Aspergillus thermomutatus
  misc_feature: 662
gactgcctggtggtgtaggagtcttgagttggatagtaaaccgtctaagcacctcatctgggttgaatggaattaagccagtagctcggaatccac

SEQ ID NO: 539 - DNA, 96 bp, Aspergillus thermomutatus
  misc_feature: 662
gatgttggctgtttttcacccctgaaaggtgcttacggacgattagtccaggaccagatgcagaagggtttcaatcatattgataaacttgatttc

SEQ ID NO: 540 - DNA, 96 bp, Aspergillus thermomutatus
  misc_feature: 662
ccagataatatcaagagtggattccgagctactggcttaattccattcaacccagatgaggtgcttagacggtttactatccaactcaagactcct

SEQ ID NO: 541 - DNA, 96 bp, Aspergillus thermomutatus
  misc_feature: 662
cagctcatcacggcgtttaataaagttatacacccaattcttgccgacaggttgaatatcagtaaaccctcgctgtgacaacaaaatattggccat

SEQ ID NO: 542 - DNA, 96 bp, Aspergillus thermomutatus
  misc_feature: 662
aacaacttattcccgacggtataactatcagcgtgctaagtgcgaggacccaaaggttatccaggaatggtttaatcgtgtacaaatcacgatcat

SEQ ID NO: 543 - DNA, 96 bp, Aspergillus thermomutatus
  misc_feature: 661
aatatcaagagtggattccgagctactggcttaattccattcaacccagatgaggtgcttagacggtttactatccaactcaagactcctacacca

SEQ ID NO: 544 - DNA, 96 bp, Aspergillus thermomutatus
  misc_feature: 661
ctattaaactagctaattgtttatcacacataggaggtctactaccaaaagggctgtagggttcaatgtgtggattatgtagtctaaattgtccca

SEQ ID NO: 545 - DNA, 96 bp, Aspergillus thermomutatus
  misc_feature: 661
gaacaacttattcccgacggtataactatcagcgtgctaagtgcgaggacccaaaggttatccaggaatggtttaatcgtgtacaaatcacgatca

SEQ ID NO: 546 - DNA, 96 bp, Aspergillus thermomutatus
  misc_feature: 661
tcatcaaattacttacaacctcttgatgttggctgtttttcacccctgaaaggtgcttacggacgattagtccaggaccagatgcagaagggtttc

SEQ ID NO: 547 - DNA, 96 bp, Aspergillus thermomutatus
  misc_feature: 661
gtctcatcaaagttgtagatatcttcgtacgcgatcccatattgcatgatcgtgatttgtacacgattaaaccattcctggataacctttgggtcc

SEQ ID NO: 548 - DNA, 96 bp, Aspergillus thermomutatus
  misc_feature: 661
accaagcaactggagaattgaagttagtccaaatggatggacaacagatcaaattggcatacgttggctacaaaaagtctttattcctgagactac

SEQ ID NO: 549 - DNA, 96 bp, Aspergillus thermomutatus
  misc_feature: 661
cttgatgttggctgtttttcacccctgaaaggtgcttacggacgattagtccaggaccagatgcagaagggtttcaatcatattgataaacttgat

SEQ ID NO: 550 - DNA, 96 bp, Aspergillus thermomutatus
  misc_feature: 661
agtggattccgagctactggcttaattccattcaacccagatgaggtgcttagacggtttactatccaactcaagactcctacaccaccaggcagt

SEQ ID NO: 551 - DNA, 96 bp, Aspergillus thermomutatus
  misc_feature: 661
aaagttgtagatatcttcgtacgcgatcccatattgcatgatcgtgatttgtacacgattaaaccattcctggataacctttgggtcctcgcactt

SEQ ID NO: 552 - DNA, 96 bp, Aspergillus thermomutatus
  misc_feature: 660
cgactgcctggtggtgtaggagtcttgagttggatagtaaaccgtctaagcacctcatctgggttgaatggaattaagccagtagctcggaatcca

SEQ ID NO: 553 - DNA, 96 bp, Aspergillus thermomutatus
  misc_feature: 660
aacttattcccgacggtataactatcagcgtgctaagtgcgaggacccaaaggttatccaggaatggtttaatcgtgtacaaatcacgatcatgca

SEQ ID NO: 554 - DNA, 96 bp, Aspergillus thermomutatus
  misc_feature: 660
tgatgttggctgtttttcacccctgaaaggtgcttacggacgattagtccaggaccagatgcagaagggtttcaatcatattgataaacttgattt

SEQ ID NO: 555 - DNA, 96 bp, Aspergillus thermomutatus
  misc_feature: 660
atttccttggagcatatcccgaagctcgtgcaaaggcatttactccagataatatcaagagtggattccgagctactggcttaattccattcaacc

SEQ ID NO: 556 - DNA, 96 bp, Aspergillus thermomutatus
  misc_feature: 660
ggcaagcacaatcaagaagctgcttagtgagcgtgggcatagtcccgctacccctactaaagctgctttagatcagcttataaagggttgtgagat

SEQ ID NO: 557 - DNA, 96 bp, Aspergillus thermomutatus
  misc_feature: 660
agttgtagatatcttcgtacgcgatcccatattgcatgatcgtgatttgtacacgattaaaccattcctggataacctttgggtcctcgcacttag

SEQ ID NO: 558 - DNA, 96 bp, Aspergillus thermomutatus
  misc_feature: 660
caagcacaatcaagaagctgcttagtgagcgtgggcatagtcccgctacccctactaaagctgctttagatcagcttataaagggttgtgagatgg

SEQ ID NO: 559 - DNA, 96 bp, Aspergillus thermomutatus
  misc_feature: 659
tttccttggagcatatcccgaagctcgtgcaaaggcatttactccagataatatcaagagtggattccgagctactggcttaattccattcaaccc

SEQ ID NO: 560 - DNA, 96 bp, Aspergillus thermomutatus
  misc_feature: 659
atattattctcactgcaaatattgtcgaattcaggggttagatggctgccatggccatcgagaaccaagagacgatatctgcctgtcgttcgacca

SEQ ID NO: 561 - DNA, 96 bp, Aspergillus thermomutatus
  misc_feature: 659
gatttccttggagcatatcccgaagctcgtgcaaaggcatttactccagataatatcaagagtggattccgagctactggcttaattccattcaac

SEQ ID NO: 562 - DNA, 96 bp, Aspergillus thermomutatus
  misc_feature: 659
atgttggctgtttttcacccctgaaaggtgcttacggacgattagtccaggaccagatgcagaagggtttcaatcatattgataaacttgatttcc

SEQ ID NO: 563 - DNA, 96 bp, Aspergillus thermomutatus
  misc_feature: 659
aagcacaatcaagaagctgcttagtgagcgtgggcatagtcccgctacccctactaaagctgctttagatcagcttataaagggttgtgagatggc

SEQ ID NO: 564 - DNA, 96 bp, Aspergillus thermomutatus
  misc_feature: 659
acaatcaagaagctgcttagtgagcgtgggcatagtcccgctacccctactaaagctgctttagatcagcttataaagggttgtgagatggctatg

SEQ ID NO: 565 - DNA, 96 bp, Aspergillus thermomutatus
  misc_feature: 659
caaagttgtagatatcttcgtacgcgatcccatattgcatgatcgtgatttgtacacgattaaaccattcctggataacctttgggtcctcgcact

SEQ ID NO: 566 - DNA, 96 bp, Aspergillus thermomutatus
  misc_feature: 658
tattatctatggatcagcgtggagcagctccccgaccatctcatgttcaagatatggccaatattttgttgtcacagcgagggtttactgatattc

SEQ ID NO: 567 - DNA, 96 bp, Aspergillus thermomutatus
  misc_feature: 658
gtggtgtaggagtcttgagttggatagtaaaccgtctaagcacctcatctgggttgaatggaattaagccagtagctcggaatccactcttgatat

SEQ ID NO: 568 - DNA, 96 bp, Aspergillus thermomutatus
  misc_feature: 658
gcaagcacaatcaagaagctgcttagtgagcgtgggcatagtcccgctacccctactaaagctgctttagatcagcttataaagggttgtgagatg

SEQ ID NO: 569 - DNA, 96 bp, Aspergillus thermomutatus
  misc_feature: 658
aacagcatcttcagcagaacaatgctctacacgggcgccaccacgttgcagtgactgtcatattttagggcatagaaggacacagtgtcccagtcg

SEQ ID NO: 570 - DNA, 96 bp, Aspergillus thermomutatus
  misc_feature: 658
attcatcaaattacttacaacctcttgatgttggctgtttttcacccctgaaaggtgcttacggacgattagtccaggaccagatgcagaagggtt

SEQ ID NO: 571 - DNA, 96 bp, Aspergillus thermomutatus
  misc_feature: 657
ttataaagggttgtgagatggctatgaatagtgctattcttctagctcaagagaatcaggaactacgagctgcgcatgagaagaaaatccagaaga

SEQ ID NO: 572 - DNA, 96 bp, Aspergillus thermomutatus
  misc_feature: 657
gcacaatcaagaagctgcttagtgagcgtgggcatagtcccgctacccctactaaagctgctttagatcagcttataaagggttgtgagatggcta

SEQ ID NO: 573 - DNA, 96 bp, Aspergillus thermomutatus
  misc_feature: 657
atacctatggaaacagcatcttcagcagaacaatgctctacacgggcgccaccacgttgcagtgactgtcatattttagggcatagaaggacacag

SEQ ID NO: 574 - DNA, 96 bp, Aspergillus thermomutatus
  misc_feature: 657
acaacttattcccgacggtataactatcagcgtgctaagtgcgaggacccaaaggttatccaggaatggtttaatcgtgtacaaatcacgatcatg

SEQ ID NO: 575 - DNA, 96 bp, Aspergillus thermomutatus
  misc_feature: 657
acctatggaaacagcatcttcagcagaacaatgctctacacgggcgccaccacgttgcagtgactgtcatattttagggcatagaaggacacagtg

SEQ ID NO: 576 - DNA, 96 bp, Aspergillus thermomutatus
  misc_feature: 656
tcactgcaaatattgtcgaattcaggggttagatggctgccatggccatcgagaaccaagagacgatatctgcctgtcgttcgaccagtagtctca

SEQ ID NO: 577 - DNA, 96 bp, Aspergillus thermomutatus
  misc_feature: 656
tctcagctcatcacggcgtttaataaagttatacacccaattcttgccgacaggttgaatatcagtaaaccctcgctgtgacaacaaaatattggc

SEQ ID NO: 578 - DNA, 96 bp, Aspergillus thermomutatus
  misc_feature: 656
atatcttcgtacgcgatcccatattgcatgatcgtgatttgtacacgattaaaccattcctggataacctttgggtcctcgcacttagcacgctga

SEQ ID NO: 579 - DNA, 96 bp, Aspergillus thermomutatus
  misc_feature: 656
cagataatatcaagagtggattccgagctactggcttaattccattcaacccagatgaggtgcttagacggtttactatccaactcaagactccta

SEQ ID NO: 580 - DNA, 96 bp, Aspergillus thermomutatus
  misc_feature: 656
ataacctttgggtcctcgcacttagcacgctgatagttataccgtcgggaataagttgttctcagctcatcacggcgtttaataaagttatacacc

SEQ ID NO: 581 - DNA, 96 bp, Aspergillus thermomutatus
  misc_feature: 656
caaattacttacaacctcttgatgttggctgtttttcacccctgaaaggtgcttacggacgattagtccaggaccagatgcagaagggtttcaatc

SEQ ID NO: 582 - DNA, 96 bp, Aspergillus thermomutatus
  misc_feature: 656
catattgcatgatcgtgatttgtacacgattaaaccattcctggataacctttgggtcctcgcacttagcacgctgatagttataccgtcgggaat

SEQ ID NO: 583 - DNA, 96 bp, Aspergillus thermomutatus
  misc_feature: 655
tttggtgctgaattggttgaccgactgcctggtggtgtaggagtcttgagttggatagtaaaccgtctaagcacctcatctgggttgaatggaatt

SEQ ID NO: 584 - DNA, 96 bp, Aspergillus thermomutatus
  misc_feature: 655
tcctacaccaccaggcagtcggtcaaccaattcagcaccaaagacacctcataatctcaagcaattagagaagcaggcaagcacaatcaagaagct

SEQ ID NO: 585 - DNA, 96 bp, Aspergillus thermomutatus
  misc_feature: 655
gagcatatcccgaagctcgtgcaaaggcatttactccagataatatcaagagtggattccgagctactggcttaattccattcaacccagatgagg

SEQ ID NO: 586 - DNA, 96 bp, Aspergillus thermomutatus
  misc_feature: 655
gaccgactgcctggtggtgtaggagtcttgagttggatagtaaaccgtctaagcacctcatctgggttgaatggaattaagccagtagctcggaat

SEQ ID NO: 587 - DNA, 96 bp, Aspergillus thermomutatus
  misc_feature: 655
gaagctcgtgcaaaggcatttactccagataatatcaagagtggattccgagctactggcttaattccattcaacccagatgaggtgcttagacgg

SEQ ID NO: 588 - DNA, 96 bp, Aspergillus thermomutatus
  misc_feature: 654
caacctcttgatgttggctgtttttcacccctgaaaggtgcttacggacgattagtccaggaccagatgcagaagggtttcaatcatattgataaa

SEQ ID NO: 589 - DNA, 96 bp, Aspergillus thermomutatus
  misc_feature: 654
ttcaggggttagatggctgccatggccatcgagaaccaagagacgatatctgcctgtcgttcgaccagtagtctcaggaataaagactttttgtag

SEQ ID NO: 590 - DNA, 96 bp, Aspergillus thermomutatus
  misc_feature: 654
tctacacgggcgccaccacgttgcagtgactgtcatattttagggcatagaaggacacagtgtcccagtcgtaaaaggaattaatttttttgctat

SEQ ID NO: 591 - DNA, 96 bp, Aspergillus thermomutatus
  misc_feature: 654
attcaggggttagatggctgccatggccatcgagaaccaagagacgatatctgcctgtcgttcgaccagtagtctcaggaataaagactttttgta

SEQ ID NO: 592 - DNA, 96 bp, Aspergillus thermomutatus
  misc_feature: 654
gtgctgaattggttgaccgactgcctggtggtgtaggagtcttgagttggatagtaaaccgtctaagcacctcatctgggttgaatggaattaagc

SEQ ID NO: 593 - DNA, 96 bp, Aspergillus thermomutatus
  misc_feature: 654
caggggttagatggctgccatggccatcgagaaccaagagacgatatctgcctgtcgttcgaccagtagtctcaggaataaagactttttgtagcc

SEQ ID NO: 594 - DNA, 96 bp, Aspergillus thermomutatus
  misc_feature: 654
ctgattcctactttgtatgaggtcccggccttcctggatagaaagtccttctgtagaggctatctgctttgtagatcgcttcctcttctggatttt

SEQ ID NO: 595 - DNA, 96 bp, Aspergillus thermomutatus
  misc_feature: 654
cctgattcctactttgtatgaggtcccggccttcctggatagaaagtccttctgtagaggctatctgctttgtagatcgcttcctcttctggattt

SEQ ID NO: 596 - DNA, 96 bp, Aspergillus thermomutatus
  misc_feature: 653
tggtgctgaattggttgaccgactgcctggtggtgtaggagtcttgagttggatagtaaaccgtctaagcacctcatctgggttgaatggaattaa

SEQ ID NO: 597 - DNA, 96 bp, Aspergillus thermomutatus
  misc_feature: 653
ggcgcgttgttcagctcgaaaacagtgtccatttaatcgccgctgaagtgttgtccgcggaacattgtaaatgcgtgaagcttcacgaacattgca

SEQ ID NO: 598 - DNA, 96 bp, Aspergillus thermomutatus
  misc_feature: 653
ctctacacgggcgccaccacgttgcagtgactgtcatattttagggcatagaaggacacagtgtcccagtcgtaaaaggaattaatttttttgcta

SEQ ID NO: 599 - DNA, 96 bp, Aspergillus thermomutatus
  misc_feature: 653
atcccgaagctcgtgcaaaggcatttactccagataatatcaagagtggattccgagctactggcttaattccattcaacccagatgaggtgctta

SEQ ID NO: 600 - DNA, 96 bp, Aspergillus thermomutatus
  misc_feature: 653
gcatatcccgaagctcgtgcaaaggcatttactccagataatatcaagagtggattccgagctactggcttaattccattcaacccagatgaggtg

SEQ ID NO: 601 - DNA, 96 bp, Aspergillus thermomutatus
  misc_feature: 652
ttgttctcagctcatcacggcgtttaataaagttatacacccaattcttgccgacaggttgaatatcagtaaaccctcgctgtgacaacaaaatat

SEQ ID NO: 602 - DNA, 96 bp, Aspergillus thermomutatus
  misc_feature: 652
gatatcttcgtacgcgatcccatattgcatgatcgtgatttgtacacgattaaaccattcctggataacctttgggtcctcgcacttagcacgctg

SEQ ID NO: 603 - DNA, 96 bp, Aspergillus thermomutatus
  misc_feature: 652
cgtacgcgatcccatattgcatgatcgtgatttgtacacgattaaaccattcctggataacctttgggtcctcgcacttagcacgctgatagttat

SEQ ID NO: 604 - DNA, 96 bp, Aspergillus thermomutatus
  misc_feature: 652
agcacaatcaagaagctgcttagtgagcgtgggcatagtcccgctacccctactaaagctgctttagatcagcttataaagggttgtgagatggct

SEQ ID NO: 605 - DNA, 96 bp, Aspergillus thermomutatus
  misc_feature: 651
tgaccgactgcctggtggtgtaggagtcttgagttggatagtaaaccgtctaagcacctcatctgggttgaatggaattaagccagtagctcggaa

SEQ ID NO: 606 - DNA, 96 bp, Aspergillus thermomutatus
  misc_feature: 651
tctcactgcaaatattgtcgaattcaggggttagatggctgccatggccatcgagaaccaagagacgatatctgcctgtcgttcgaccagtagtct

SEQ ID NO: 607 - DNA, 96 bp, Aspergillus thermomutatus
  misc_feature: 650
tcccgaagctcgtgcaaaggcatttactccagataatatcaagagtggattccgagctactggcttaattccattcaacccagatgaggtgcttag

SEQ ID NO: 608 - DNA, 96 bp, Aspergillus thermomutatus
  misc_feature: 650
agataatacatggtggtaaagcccatccttgagagttgatacactcaatagatgtgacccattcgcgattcccaggctgcataacttgacgtctgc

SEQ ID NO: 609 - DNA, 96 bp, Aspergillus thermomutatus
  misc_feature: 650
ctcactgcaaatattgtcgaattcaggggttagatggctgccatggccatcgagaaccaagagacgatatctgcctgtcgttcgaccagtagtctc

SEQ ID NO: 610 - DNA, 96 bp, Aspergillus thermomutatus
  misc_feature: 650
cacaatcaagaagctgcttagtgagcgtgggcatagtcccgctacccctactaaagctgctttagatcagcttataaagggttgtgagatggctat

SEQ ID NO: 611 - DNA, 96 bp, Aspergillus thermomutatus
  misc_feature: 650
atttcagctctagttactaccttagcagtagcaattagacccatcgcatatccagtctcatcaaagttgtagatatcttcgtacgcgatcccatat

SEQ ID NO: 612 - DNA, 96 bp, Aspergillus thermomutatus
  misc_feature: 649
ccatattgcatgatcgtgatttgtacacgattaaaccattcctggataacctttgggtcctcgcacttagcacgctgatagttataccgtcgggaa

SEQ ID NO: 613 - DNA, 96 bp, Aspergillus thermomutatus
  misc_feature: 649
tgattcctactttgtatgaggtcccggccttcctggatagaaagtccttctgtagaggctatctgctttgtagatcgcttcctcttctggattttc

SEQ ID NO: 614 - DNA, 96 bp, Aspergillus thermomutatus
  misc_feature: 649
tgagaacaacttattcccgacggtataactatcagcgtgctaagtgcgaggacccaaaggttatccaggaatggtttaatcgtgtacaaatcacga

SEQ ID NO: 615 - DNA, 96 bp, Aspergillus thermomutatus
  misc_feature: 649
tcaggggttagatggctgccatggccatcgagaaccaagagacgatatctgcctgtcgttcgaccagtagtctcaggaataaagactttttgtagc

SEQ ID NO: 616 - DNA, 96 bp, Aspergillus thermomutatus
  misc_feature: 649
cttacaacctcttgatgttggctgtttttcacccctgaaaggtgcttacggacgattagtccaggaccagatgcagaagggtttcaatcatattga

SEQ ID NO: 617 - DNA, 96 bp, Aspergillus thermomutatus
  misc_feature: 649
tatttcagctctagttactaccttagcagtagcaattagacccatcgcatatccagtctcatcaaagttgtagatatcttcgtacgcgatcccata

SEQ ID NO: 618 - DNA, 96 bp, Aspergillus thermomutatus
  misc_feature: 649
gctttagatcagcttataaagggttgtgagatggctatgaatagtgctattcttctagctcaagagaatcaggaactacgagctgcgcatgagaag

SEQ ID NO: 619 - DNA, 96 bp, Aspergillus thermomutatus
  misc_feature: 649
agaacaacttattcccgacggtataactatcagcgtgctaagtgcgaggacccaaaggttatccaggaatggtttaatcgtgtacaaatcacgatc

SEQ ID NO: 620 - DNA, 96 bp, Aspergillus thermomutatus
  misc_feature: 649
ccaagcaactggagaattgaagttagtccaaatggatggacaacagatcaaattggcatacgttggctacaaaaagtctttattcctgagactact

SEQ ID NO: 621 - DNA, 96 bp, Aspergillus thermomutatus
  misc_feature: 648
ttacaacctcttgatgttggctgtttttcacccctgaaaggtgcttacggacgattagtccaggaccagatgcagaagggtttcaatcatattgat

SEQ ID NO: 622 - DNA, 96 bp, Aspergillus thermomutatus
  misc_feature: 648
catatcccgaagctcgtgcaaaggcatttactccagataatatcaagagtggattccgagctactggcttaattccattcaacccagatgaggtgc

SEQ ID NO: 623 - DNA, 96 bp, Aspergillus thermomutatus
  misc_feature: 648
cagtcactgcaacgtggtggcgcccgtgtagagcattgttctgctgaagatgctgtttccataggtatagtagataaagcttcagcagcctgattc

SEQ ID NO: 624 - DNA, 96 bp, Aspergillus thermomutatus
  misc_feature: 647
tccagataatatcaagagtggattccgagctactggcttaattccattcaacccagatgaggtgcttagacggtttactatccaactcaagactcc

SEQ ID NO: 625 - DNA, 96 bp, Aspergillus thermomutatus
  misc_feature: 647
gatattatctatggatcagcgtggagcagctccccgaccatctcatgttcaagatatggccaatattttgttgtcacagcgagggtttactgatat

SEQ ID NO: 626 - DNA, 96 bp, Aspergillus thermomutatus
  misc_feature: 647
atatcccgaagctcgtgcaaaggcatttactccagataatatcaagagtggattccgagctactggcttaattccattcaacccagatgaggtgct

SEQ ID NO: 627 - DNA, 96 bp, Aspergillus thermomutatus
  misc_feature: 647
aactagctaattgtttatcacacataggaggtctactaccaaaagggctgtagggttcaatgtgtggattatgtagtctaaattgtcccatatact

SEQ ID NO: 628 - DNA, 96 bp, Aspergillus thermomutatus
  misc_feature: 646
aatcaagaagctgcttagtgagcgtgggcatagtcccgctacccctactaaagctgctttagatcagcttataaagggttgtgagatggctatgaa

SEQ ID NO: 629 - DNA, 96 bp, Aspergillus thermomutatus
  misc_feature: 646
aaatattgtcgaattcaggggttagatggctgccatggccatcgagaaccaagagacgatatctgcctgtcgttcgaccagtagtctcaggaataa

SEQ ID NO: 630 - DNA, 96 bp, Aspergillus thermomutatus
  misc_feature: 646
tcagctcatcacggcgtttaataaagttatacacccaattcttgccgacaggttgaatatcagtaaaccctcgctgtgacaacaaaatattggcca

SEQ ID NO: 631 - DNA, 96 bp, Aspergillus thermomutatus
  misc_feature: 646
gggttagatggctgccatggccatcgagaaccaagagacgatatctgcctgtcgttcgaccagtagtctcaggaataaagactttttgtagccaac

SEQ ID NO: 632 - DNA, 96 bp, Aspergillus thermomutatus
  misc_feature: 646
gaactccctacaagaagcccttgactggggtgctacggagggtatcaccttcgcgccggataaatacgaactgatccatttctcgcgccgcaaggc

SEQ ID NO: 633 - DNA, 96 bp, Aspergillus thermomutatus
  misc_feature: 646
cgggacctcatacaaagtaggaatcaggctgctgaagctttatctactatacctatggaaacagcatcttcagcagaacaatgctctacacgggcg

SEQ ID NO: 634 - DNA, 96 bp, Aspergillus thermomutatus
  misc_feature: 645
gttgaccgactgcctggtggtgtaggagtcttgagttggatagtaaaccgtctaagcacctcatctgggttgaatggaattaagccagtagctcgg

SEQ ID NO: 635 - DNA, 96 bp, Aspergillus thermomutatus
  misc_feature: 645
acagcatcttcagcagaacaatgctctacacgggcgccaccacgttgcagtgactgtcatattttagggcatagaaggacacagtgtcccagtcgt

SEQ ID NO: 636 - DNA, 96 bp, Aspergillus thermomutatus
  misc_feature: 644
ttgatacactcaatagatgtgacccattcgcgattcccaggctgcataacttgacgtctgccatgtatttcagctctagttactaccttagcagta

SEQ ID NO: 637 - DNA, 96 bp, Aspergillus thermomutatus
  misc_feature: 644
tacaacctcttgatgttggctgtttttcacccctgaaaggtgcttacggacgattagtccaggaccagatgcagaagggtttcaatcatattgata

SEQ ID NO: 638 - DNA, 96 bp, Aspergillus thermomutatus
  misc_feature: 644
tacctatggaaacagcatcttcagcagaacaatgctctacacgggcgccaccacgttgcagtgactgtcatattttagggcatagaaggacacagt

SEQ ID NO: 639 - DNA, 96 bp, Aspergillus thermomutatus
  misc_feature: 644
ctcaagactcctacaccaccaggcagtcggtcaaccaattcagcaccaaagacacctcataatctcaagcaattagagaagcaggcaagcacaatc

SEQ ID NO: 640 - DNA, 96 bp, Aspergillus thermomutatus
  misc_feature: 644
aagcaactggagaattgaagttagtccaaatggatggacaacagatcaaattggcatacgttggctacaaaaagtctttattcctgagactactgg

SEQ ID NO: 641 - DNA, 96 bp, Aspergillus thermomutatus
  misc_feature: 644
caagcaactggagaattgaagttagtccaaatggatggacaacagatcaaattggcatacgttggctacaaaaagtctttattcctgagactactg

SEQ ID NO: 642 - DNA, 96 bp, Aspergillus thermomutatus
  misc_feature: 644
acttacaacctcttgatgttggctgtttttcacccctgaaaggtgcttacggacgattagtccaggaccagatgcagaagggtttcaatcatattg

SEQ ID NO: 643 - DNA, 96 bp, Aspergillus thermomutatus
  misc_feature: 644
attattctcactgcaaatattgtcgaattcaggggttagatggctgccatggccatcgagaaccaagagacgatatctgcctgtcgttcgaccagt

SEQ ID NO: 644 - DNA, 96 bp, Aspergillus thermomutatus
  misc_feature: 644
agcaactggagaattgaagttagtccaaatggatggacaacagatcaaattggcatacgttggctacaaaaagtctttattcctgagactactggt

SEQ ID NO: 645 - DNA, 96 bp, Aspergillus thermomutatus
  misc_feature: 643
ttctcactgcaaatattgtcgaattcaggggttagatggctgccatggccatcgagaaccaagagacgatatctgcctgtcgttcgaccagtagtc

SEQ ID NO: 646 - DNA, 96 bp, Aspergillus thermomutatus
  misc_feature: 643
tatacctatggaaacagcatcttcagcagaacaatgctctacacgggcgccaccacgttgcagtgactgtcatattttagggcatagaaggacaca

SEQ ID NO: 647 - DNA, 96 bp, Aspergillus thermomutatus
  misc_feature: 643
ggttgaccgactgcctggtggtgtaggagtcttgagttggatagtaaaccgtctaagcacctcatctgggttgaatggaattaagccagtagctcg

SEQ ID NO: 648 - DNA, 96 bp, Aspergillus thermomutatus
  misc_feature: 643
gctctacacgggcgccaccacgttgcagtgactgtcatattttagggcatagaaggacacagtgtcccagtcgtaaaaggaattaatttttttgct

SEQ ID NO: 649 - DNA, 96 bp, Aspergillus thermomutatus
  misc_feature: 643
agcatatcccgaagctcgtgcaaaggcatttactccagataatatcaagagtggattccgagctactggcttaattccattcaacccagatgaggt

SEQ ID NO: 650 - DNA, 96 bp, Aspergillus thermomutatus
  misc_feature: 642
ttgaccgactgcctggtggtgtaggagtcttgagttggatagtaaaccgtctaagcacctcatctgggttgaatggaattaagccagtagctcgga

SEQ ID NO: 651 - DNA, 96 bp, Aspergillus thermomutatus
  misc_feature: 642
cccatattgcatgatcgtgatttgtacacgattaaaccattcctggataacctttgggtcctcgcacttagcacgctgatagttataccgtcggga

SEQ ID NO: 652 - DNA, 96 bp, Aspergillus thermomutatus
  misc_feature: 642
tattctcactgcaaatattgtcgaattcaggggttagatggctgccatggccatcgagaaccaagagacgatatctgcctgtcgttcgaccagtag

SEQ ID NO: 653 - DNA, 96 bp, Aspergillus thermomutatus
  misc_feature: 642
ggtgtctttggtgctgaattggttgaccgactgcctggtggtgtaggagtcttgagttggatagtaaaccgtctaagcacctcatctgggttgaat

SEQ ID NO: 654 - DNA, 96 bp, Aspergillus thermomutatus
  misc_feature: 642
ggtgctgaattggttgaccgactgcctggtggtgtaggagtcttgagttggatagtaaaccgtctaagcacctcatctgggttgaatggaattaag

SEQ ID NO: 655 - DNA, 96 bp, Aspergillus thermomutatus
  misc_feature: 642
gggacctcatacaaagtaggaatcaggctgctgaagctttatctactatacctatggaaacagcatcttcagcagaacaatgctctacacgggcgc

SEQ ID NO: 656 - DNA, 96 bp, Aspergillus thermomutatus
  misc_feature: 641
ttattctcactgcaaatattgtcgaattcaggggttagatggctgccatggccatcgagaaccaagagacgatatctgcctgtcgttcgaccagta

SEQ ID NO: 657 - DNA, 96 bp, Aspergillus thermomutatus
  misc_feature: 641
gattatgaggtgtctttggtgctgaattggttgaccgactgcctggtggtgtaggagtcttgagttggatagtaaaccgtctaagcacctcatctg

SEQ ID NO: 658 - DNA, 96 bp, Aspergillus thermomutatus
  misc_feature: 641
atgccaatttgatctgttgtccatccatttggactaacttcaattctccagttgcttggtaacttgtcatcttgataccagccctcaatatggact

SEQ ID NO: 659 - DNA, 96 bp, Aspergillus thermomutatus
  misc_feature: 640
cagcatcttcagcagaacaatgctctacacgggcgccaccacgttgcagtgactgtcatattttagggcatagaaggacacagtgtcccagtcgta

SEQ ID NO: 660 - DNA, 96 bp, Aspergillus thermomutatus
  misc_feature: 640
gaattcaggggttagatggctgccatggccatcgagaaccaagagacgatatctgcctgtcgttcgaccagtagtctcaggaataaagactttttg

SEQ ID NO: 661 - DNA, 96 bp, Aspergillus thermomutatus
  misc_feature: 640
atattgtcgaattcaggggttagatggctgccatggccatcgagaaccaagagacgatatctgcctgtcgttcgaccagtagtctcaggaataaag

SEQ ID NO: 662 - DNA, 96 bp, Aspergillus thermomutatus
  misc_feature: 639
aatattgtcgaattcaggggttagatggctgccatggccatcgagaaccaagagacgatatctgcctgtcgttcgaccagtagtctcaggaataaa

SEQ ID NO: 663 - DNA, 96 bp, Aspergillus thermomutatus
  misc_feature: 639
agcatcttcagcagaacaatgctctacacgggcgccaccacgttgcagtgactgtcatattttagggcatagaaggacacagtgtcccagtcgtaa

SEQ ID NO: 664 - DNA, 96 bp, Aspergillus thermomutatus
  misc_feature: 639
cactgcaaatattgtcgaattcaggggttagatggctgccatggccatcgagaaccaagagacgatatctgcctgtcgttcgaccagtagtctcag

SEQ ID NO: 665 - DNA, 96 bp, Aspergillus thermomutatus
  misc_feature: 639
attcctactttgtatgaggtcccggccttcctggatagaaagtccttctgtagaggctatctgctttgtagatcgcttcctcttctggattttctt

SEQ ID NO: 666 - DNA, 96 bp, Aspergillus thermomutatus
  misc_feature: 638
tatcttcgtacgcgatcccatattgcatgatcgtgatttgtacacgattaaaccattcctggataacctttgggtcctcgcacttagcacgctgat

SEQ ID NO: 667 - DNA, 96 bp, Aspergillus thermomutatus
  misc_feature: 638
ggccgggacctcatacaaagtaggaatcaggctgctgaagctttatctactatacctatggaaacagcatcttcagcagaacaatgctctacacgg

SEQ ID NO: 668 - DNA, 96 bp, Aspergillus thermomutatus
  misc_feature: 638
aattcaggggttagatggctgccatggccatcgagaaccaagagacgatatctgcctgtcgttcgaccagtagtctcaggaataaagactttttgt

SEQ ID NO: 669 - DNA, 96 bp, Aspergillus thermomutatus
  misc_feature: 637
ggggttagatggctgccatggccatcgagaaccaagagacgatatctgcctgtcgttcgaccagtagtctcaggaataaagactttttgtagccaa

SEQ ID NO: 670 - DNA, 96 bp, Aspergillus thermomutatus
  misc_feature: 637
gcgcgttgttcagctcgaaaacagtgtccatttaatcgccgctgaagtgttgtccgcggaacattgtaaatgcgtgaagcttcacgaacattgcaa

SEQ ID NO: 671 - DNA, 96 bp, Aspergillus thermomutatus
  misc_feature: 637
ttacttacaacctcttgatgttggctgtttttcacccctgaaaggtgcttacggacgattagtccaggaccagatgcagaagggtttcaatcatat

SEQ ID NO: 672 - DNA, 96 bp, Aspergillus thermomutatus
  misc_feature: 637
gccgggacctcatacaaagtaggaatcaggctgctgaagctttatctactatacctatggaaacagcatcttcagcagaacaatgctctacacggg

SEQ ID NO: 673 - DNA, 96 bp, Aspergillus thermomutatus
  misc_feature: 637
actcaagactcctacaccaccaggcagtcggtcaaccaattcagcaccaaagacacctcataatctcaagcaattagagaagcaggcaagcacaat

SEQ ID NO: 674 - DNA, 96 bp, Aspergillus thermomutatus
  misc_feature: 636
acaacctcttgatgttggctgtttttcacccctgaaaggtgcttacggacgattagtccaggaccagatgcagaagggtttcaatcatattgataa

SEQ ID NO: 675 - DNA, 96 bp, Aspergillus thermomutatus
  misc_feature: 635
ggatattatctatggatcagcgtggagcagctccccgaccatctcatgttcaagatatggccaatattttgttgtcacagcgagggtttactgata

SEQ ID NO: 676 - DNA, 96 bp, Aspergillus thermomutatus
  misc_feature: 635
atcagcttataaagggttgtgagatggctatgaatagtgctattcttctagctcaagagaatcaggaactacgagctgcgcatgagaagaaaatcc

SEQ ID NO: 677 - DNA, 96 bp, Aspergillus thermomutatus
  misc_feature: 635
gccaatttgatctgttgtccatccatttggactaacttcaattctccagttgcttggtaacttgtcatcttgataccagccctcaatatggactgt

SEQ ID NO: 678 - DNA, 96 bp, Aspergillus thermomutatus
  misc_feature: 635
agacagtatatgggacaatttagactacataatccacacattgaaccctacagcccttttggtagtagacctcctatgtgtgataaacaattagct

SEQ ID NO: 679 - DNA, 96 bp, Aspergillus thermomutatus
  misc_feature: 635
acttagcacgctgatagttataccgtcgggaataagttgttctcagctcatcacggcgtttaataaagttatacacccaattcttgccgacaggtt

SEQ ID NO: 680 - DNA, 96 bp, Aspergillus thermomutatus
  misc_feature: 634
attacttacaacctcttgatgttggctgtttttcacccctgaaaggtgcttacggacgattagtccaggaccagatgcagaagggtttcaatcata

SEQ ID NO: 681 - DNA, 96 bp, Aspergillus thermomutatus
  misc_feature: 634
acagtcactgcaacgtggtggcgcccgtgtagagcattgttctgctgaagatgctgtttccataggtatagtagataaagcttcagcagcctgatt

SEQ ID NO: 682 - DNA, 96 bp, Aspergillus thermomutatus
  misc_feature: 633
ttgtagatatcttcgtacgcgatcccatattgcatgatcgtgatttgtacacgattaaaccattcctggataacctttgggtcctcgcacttagca

SEQ ID NO: 683 - DNA, 96 bp, Aspergillus thermomutatus
  misc_feature: 633
ctgcaaatattgtcgaattcaggggttagatggctgccatggccatcgagaaccaagagacgatatctgcctgtcgttcgaccagtagtctcagga

SEQ ID NO: 684 - DNA, 96 bp, Aspergillus thermomutatus
  misc_feature: 633
ctccagataatatcaagagtggattccgagctactggcttaattccattcaacccagatgaggtgcttagacggtttactatccaactcaagactc

SEQ ID NO: 685 - DNA, 96 bp, Aspergillus thermomutatus
  misc_feature: 632
tggttgaccgactgcctggtggtgtaggagtcttgagttggatagtaaaccgtctaagcacctcatctgggttgaatggaattaagccagtagctc

SEQ ID NO: 686 - DNA, 96 bp, Aspergillus thermomutatus
  misc_feature: 632
tcagcttataaagggttgtgagatggctatgaatagtgctattcttctagctcaagagaatcaggaactacgagctgcgcatgagaagaaaatcca

SEQ ID NO: 687 - DNA, 96 bp, Aspergillus thermomutatus
  misc_feature: 632
tagacagtatatgggacaatttagactacataatccacacattgaaccctacagcccttttggtagtagacctcctatgtgtgataaacaattagc

SEQ ID NO: 688 - DNA, 96 bp, Aspergillus thermomutatus
  misc_feature: 632
gtaatagacagtatatgggacaatttagactacataatccacacattgaaccctacagcccttttggtagtagacctcctatgtgtgataaacaat

SEQ ID NO: 689 - DNA, 96 bp, Aspergillus thermomutatus
  misc_feature: 632
gcaaatattgtcgaattcaggggttagatggctgccatggccatcgagaaccaagagacgatatctgcctgtcgttcgaccagtagtctcaggaat

SEQ ID NO: 690 - DNA, 96 bp, Aspergillus thermomutatus
  misc_feature: 632
cgtgatttgtacacgattaaaccattcctggataacctttgggtcctcgcacttagcacgctgatagttataccgtcgggaataagttgttctcag

SEQ ID NO: 691 - DNA, 96 bp, Aspergillus thermomutatus
  misc_feature: 632
attctcactgcaaatattgtcgaattcaggggttagatggctgccatggccatcgagaaccaagagacgatatctgcctgtcgttcgaccagtagt

SEQ ID NO: 692 - DNA, 96 bp, Aspergillus thermomutatus
  misc_feature: 631
tgcaaatattgtcgaattcaggggttagatggctgccatggccatcgagaaccaagagacgatatctgcctgtcgttcgaccagtagtctcaggaa

SEQ ID NO: 693 - DNA, 96 bp, Aspergillus thermomutatus
  misc_feature: 631
tgatacactcaatagatgtgacccattcgcgattcccaggctgcataacttgacgtctgccatgtatttcagctctagttactaccttagcagtag

SEQ ID NO: 694 - DNA, 96 bp, Aspergillus thermomutatus
  misc_feature: 631
tcttcgtacgcgatcccatattgcatgatcgtgatttgtacacgattaaaccattcctggataacctttgggtcctcgcacttagcacgctgatag

SEQ ID NO: 695 - DNA, 96 bp, Aspergillus thermomutatus
  misc_feature: 631
agcttataaagggttgtgagatggctatgaatagtgctattcttctagctcaagagaatcaggaactacgagctgcgcatgagaagaaaatccaga

SEQ ID NO: 696 - DNA, 96 bp, Aspergillus thermomutatus
  misc_feature: 631
gtcgaattcaggggttagatggctgccatggccatcgagaaccaagagacgatatctgcctgtcgttcgaccagtagtctcaggaataaagacttt

SEQ ID NO: 697 - DNA, 96 bp, Aspergillus thermomutatus
  misc_feature: 631
cacttagcacgctgatagttataccgtcgggaataagttgttctcagctcatcacggcgtttaataaagttatacacccaattcttgccgacaggt

SEQ ID NO: 698 - DNA, 96 bp, Aspergillus thermomutatus
  misc_feature: 630
gtgcaaaggcatttactccagataatatcaagagtggattccgagctactggcttaattccattcaacccagatgaggtgcttagacggtttacta

SEQ ID NO: 699 - DNA, 96 bp, Aspergillus thermomutatus
  misc_feature: 630
ccaactcaagactcctacaccaccaggcagtcggtcaaccaattcagcaccaaagacacctcataatctcaagcaattagagaagcaggcaagcac

SEQ ID NO: 700 - DNA, 96 bp, Aspergillus thermomutatus
  misc_feature: 630
ccaatttgatctgttgtccatccatttggactaacttcaattctccagttgcttggtaacttgtcatcttgataccagccctcaatatggactgtt

SEQ ID NO: 701 - DNA, 96 bp, Aspergillus thermomutatus
  misc_feature: 630
aattacttacaacctcttgatgttggctgtttttcacccctgaaaggtgcttacggacgattagtccaggaccagatgcagaagggtttcaatcat

SEQ ID NO: 702 - DNA, 96 bp, Aspergillus thermomutatus
  misc_feature: 629
aggaaatcaagtttatcaatatgattgaaacccttctgcatctggtcctggactaatcgtccgtaagcacctttcaggggtgaaaaacagccaaca

SEQ ID NO: 703 - DNA, 96 bp, Aspergillus thermomutatus
  misc_feature: 629
tattgtcgaattcaggggttagatggctgccatggccatcgagaaccaagagacgatatctgcctgtcgttcgaccagtagtctcaggaataaaga

SEQ ID NO: 704 - DNA, 96 bp, Aspergillus thermomutatus
  misc_feature: 629
tcgtgcaaaggcatttactccagataatatcaagagtggattccgagctactggcttaattccattcaacccagatgaggtgcttagacggtttac

SEQ ID NO: 705 - DNA, 96 bp, Aspergillus thermomutatus
  misc_feature: 629
caaatattgtcgaattcaggggttagatggctgccatggccatcgagaaccaagagacgatatctgcctgtcgttcgaccagtagtctcaggaata

SEQ ID NO: 706 - DNA, 96 bp, Aspergillus thermomutatus
  misc_feature: 629
taatagacagtatatgggacaatttagactacataatccacacattgaaccctacagcccttttggtagtagacctcctatgtgtgataaacaatt

SEQ ID NO: 707 - DNA, 96 bp, Aspergillus thermomutatus
  misc_feature: 629
ctcgtgcaaaggcatttactccagataatatcaagagtggattccgagctactggcttaattccattcaacccagatgaggtgcttagacggttta

SEQ ID NO: 708 - DNA, 96 bp, Aspergillus thermomutatus
  misc_feature: 629
gatacactcaatagatgtgacccattcgcgattcccaggctgcataacttgacgtctgccatgtatttcagctctagttactaccttagcagtagc

SEQ ID NO: 709 - DNA, 96 bp, Aspergillus thermomutatus
  misc_feature: 629
ctagctaattgtttatcacacataggaggtctactaccaaaagggctgtagggttcaatgtgtggattatgtagtctaaattgtcccatatactgt

SEQ ID NO: 710 - DNA, 96 bp, Aspergillus thermomutatus
  misc_feature: 628
tgttctcagctcatcacggcgtttaataaagttatacacccaattcttgccgacaggttgaatatcagtaaaccctcgctgtgacaacaaaatatt

SEQ ID NO: 711 - DNA, 96 bp, Aspergillus thermomutatus
  misc_feature: 628
aggggttagatggctgccatggccatcgagaaccaagagacgatatctgcctgtcgttcgaccagtagtctcaggaataaagactttttgtagcca

SEQ ID NO: 712 - DNA, 96 bp, Aspergillus thermomutatus
  misc_feature: 628
ccgggacctcatacaaagtaggaatcaggctgctgaagctttatctactatacctatggaaacagcatcttcagcagaacaatgctctacacgggc

SEQ ID NO: 713 - DNA, 96 bp, Aspergillus thermomutatus
  misc_feature: 628
gatcagcttataaagggttgtgagatggctatgaatagtgctattcttctagctcaagagaatcaggaactacgagctgcgcatgagaagaaaatc

SEQ ID NO: 714 - DNA, 96 bp, Aspergillus thermomutatus
  misc_feature: 628
caatttgatctgttgtccatccatttggactaacttcaattctccagttgcttggtaacttgtcatcttgataccagccctcaatatggactgttc

SEQ ID NO: 715 - DNA, 96 bp, Aspergillus thermomutatus
  misc_feature: 628
aggccgggacctcatacaaagtaggaatcaggctgctgaagctttatctactatacctatggaaacagcatcttcagcagaacaatgctctacacg

SEQ ID NO: 716 - DNA, 96 bp, Aspergillus thermomutatus
  misc_feature: 627
aagttgttctcagctcatcacggcgtttaataaagttatacacccaattcttgccgacaggttgaatatcagtaaaccctcgctgtgacaacaaaa

SEQ ID NO: 717 - DNA, 96 bp, Aspergillus thermomutatus
  misc_feature: 627
atcttcgtacgcgatcccatattgcatgatcgtgatttgtacacgattaaaccattcctggataacctttgggtcctcgcacttagcacgctgata

SEQ ID NO: 718 - DNA, 96 bp, Aspergillus thermomutatus
  misc_feature: 627
tagatatcttcgtacgcgatcccatattgcatgatcgtgatttgtacacgattaaaccattcctggataacctttgggtcctcgcacttagcacgc

SEQ ID NO: 719 - DNA, 96 bp, Aspergillus thermomutatus
  misc_feature: 627
aaggaaatcaagtttatcaatatgattgaaacccttctgcatctggtcctggactaatcgtccgtaagcacctttcaggggtgaaaaacagccaac

SEQ ID NO: 720 - DNA, 96 bp, Aspergillus thermomutatus
  misc_feature: 627
gtagatatcttcgtacgcgatcccatattgcatgatcgtgatttgtacacgattaaaccattcctggataacctttgggtcctcgcacttagcacg

SEQ ID NO: 721 - DNA, 96 bp, Aspergillus thermomutatus
  misc_feature: 627
cagcttataaagggttgtgagatggctatgaatagtgctattcttctagctcaagagaatcaggaactacgagctgcgcatgagaagaaaatccag

SEQ ID NO: 722 - DNA, 96 bp, Aspergillus thermomutatus
  misc_feature: 627
aagctcgtgcaaaggcatttactccagataatatcaagagtggattccgagctactggcttaattccattcaacccagatgaggtgcttagacggt

SEQ ID NO: 723 - DNA, 96 bp, Aspergillus thermomutatus
  misc_feature: 626
ttggttgaccgactgcctggtggtgtaggagtcttgagttggatagtaaaccgtctaagcacctcatctgggttgaatggaattaagccagtagct

SEQ ID NO: 724 - DNA, 96 bp, Aspergillus thermomutatus
  misc_feature: 626
tgccaatttgatctgttgtccatccatttggactaacttcaattctccagttgcttggtaacttgtcatcttgataccagccctcaatatggactg

SEQ ID NO: 725 - DNA, 96 bp, Aspergillus thermomutatus
  misc_feature: 626
aaattacttacaacctcttgatgttggctgtttttcacccctgaaaggtgcttacggacgattagtccaggaccagatgcagaagggtttcaatca

SEQ ID NO: 726 - DNA, 96 bp, Aspergillus thermomutatus
  misc_feature: 626
tcgaattcaggggttagatggctgccatggccatcgagaaccaagagacgatatctgcctgtcgttcgaccagtagtctcaggaataaagactttt

SEQ ID NO: 727 - DNA, 96 bp, Aspergillus thermomutatus
  misc_feature: 626
attgtcgaattcaggggttagatggctgccatggccatcgagaaccaagagacgatatctgcctgtcgttcgaccagtagtctcaggaataaagac

SEQ ID NO: 728 - DNA, 96 bp, Aspergillus thermomutatus
  misc_feature: 626
gacagtcactgcaacgtggtggcgcccgtgtagagcattgttctgctgaagatgctgtttccataggtatagtagataaagcttcagcagcctgat

SEQ ID NO: 729 - DNA, 96 bp, Aspergillus thermomutatus
  misc_feature: 626
attctattaaactagctaattgtttatcacacataggaggtctactaccaaaagggctgtagggttcaatgtgtggattatgtagtctaaattgtc

SEQ ID NO: 730 - DNA, 96 bp, Aspergillus thermomutatus
  misc_feature: 626
cttcgtacgcgatcccatattgcatgatcgtgatttgtacacgattaaaccattcctggataacctttgggtcctcgcacttagcacgctgatagt

SEQ ID NO: 731 - DNA, 96 bp, Aspergillus thermomutatus
  misc_feature: 626
cgaattcaggggttagatggctgccatggccatcgagaaccaagagacgatatctgcctgtcgttcgaccagtagtctcaggaataaagacttttt

SEQ ID NO: 732 - DNA, 96 bp, Aspergillus thermomutatus
  misc_feature: 625
tcgtacgcgatcccatattgcatgatcgtgatttgtacacgattaaaccattcctggataacctttgggtcctcgcacttagcacgctgatagtta

SEQ ID NO: 733 - DNA, 96 bp, Aspergillus thermomutatus
  misc_feature: 625
gaggtgtctttggtgctgaattggttgaccgactgcctggtggtgtaggagtcttgagttggatagtaaaccgtctaagcacctcatctgggttga

SEQ ID NO: 734 - DNA, 96 bp, Aspergillus thermomutatus
  misc_feature: 625
gcttcagcagcctgattcctactttgtatgaggtcccggccttcctggatagaaagtccttctgtagaggctatctgctttgtagatcgcttcctc

SEQ ID NO: 735 - DNA, 96 bp, Aspergillus thermomutatus
  misc_feature: 625
agttgttctcagctcatcacggcgtttaataaagttatacacccaattcttgccgacaggttgaatatcagtaaaccctcgctgtgacaacaaaat

SEQ ID NO: 736 - DNA, 96 bp, Aspergillus thermomutatus
  misc_feature: 625
agctcgtgcaaaggcatttactccagataatatcaagagtggattccgagctactggcttaattccattcaacccagatgaggtgcttagacggtt

SEQ ID NO: 737 - DNA, 96 bp, Aspergillus thermomutatus
  misc_feature: 624
aactcaagactcctacaccaccaggcagtcggtcaaccaattcagcaccaaagacacctcataatctcaagcaattagagaagcaggcaagcacaa

SEQ ID NO: 738 - DNA, 96 bp, Aspergillus thermomutatus
  misc_feature: 624
tgcaaaggcatttactccagataatatcaagagtggattccgagctactggcttaattccattcaacccagatgaggtgcttagacggtttactat

SEQ ID NO: 739 - DNA, 96 bp, Aspergillus thermomutatus
  misc_feature: 624
cttcagcagcctgattcctactttgtatgaggtcccggccttcctggatagaaagtccttctgtagaggctatctgctttgtagatcgcttcctct

SEQ ID NO: 740 - DNA, 96 bp, Aspergillus thermomutatus
  misc_feature: 624
actagctaattgtttatcacacataggaggtctactaccaaaagggctgtagggttcaatgtgtggattatgtagtctaaattgtcccatatactg

SEQ ID NO: 741 - DNA, 96 bp, Aspergillus thermomutatus
  misc_feature: 623
taagttgttctcagctcatcacggcgtttaataaagttatacacccaattcttgccgacaggttgaatatcagtaaaccctcgctgtgacaacaaa

SEQ ID NO: 742 - DNA, 96 bp, Aspergillus thermomutatus
  misc_feature: 623
caactcaagactcctacaccaccaggcagtcggtcaaccaattcagcaccaaagacacctcataatctcaagcaattagagaagcaggcaagcaca

SEQ ID NO: 743 - DNA, 96 bp, Aspergillus thermomutatus
  misc_feature: 623
gttagatggctgccatggccatcgagaaccaagagacgatatctgcctgtcgttcgaccagtagtctcaggaataaagactttttgtagccaacgt

SEQ ID NO: 744 - DNA, 96 bp, Aspergillus thermomutatus
  misc_feature: 623
atgaggtgtctttggtgctgaattggttgaccgactgcctggtggtgtaggagtcttgagttggatagtaaaccgtctaagcacctcatctgggtt

SEQ ID NO: 745 - DNA, 96 bp, Aspergillus thermomutatus
  misc_feature: 622
ataagttgttctcagctcatcacggcgtttaataaagttatacacccaattcttgccgacaggttgaatatcagtaaaccctcgctgtgacaacaa

SEQ ID NO: 746 - DNA, 96 bp, Aspergillus thermomutatus
  misc_feature: 622
ttcgtacgcgatcccatattgcatgatcgtgatttgtacacgattaaaccattcctggataacctttgggtcctcgcacttagcacgctgatagtt

SEQ ID NO: 747 - DNA, 96 bp, Aspergillus thermomutatus
  misc_feature: 622
atgctctacacgggcgccaccacgttgcagtgactgtcatattttagggcatagaaggacacagtgtcccagtcgtaaaaggaattaatttttttg

SEQ ID NO: 748 - DNA, 96 bp, Aspergillus thermomutatus
  misc_feature: 621
aattaagccagtagctcggaatccactcttgatattatctggagtaaatgcctttgcacgagcttcgggatatgctccaaggaaatcaagtttatc

SEQ ID NO: 749 - DNA, 96 bp, Aspergillus thermomutatus
  misc_feature: 620
gcatcttcagcagaacaatgctctacacgggcgccaccacgttgcagtgactgtcatattttagggcatagaaggacacagtgtcccagtcgtaaa

SEQ ID NO: 750 - DNA, 96 bp, Aspergillus thermomutatus
  misc_feature: 620
ggaataagttgttctcagctcatcacggcgtttaataaagttatacacccaattcttgccgacaggttgaatatcagtaaaccctcgctgtgacaa

SEQ ID NO: 751 - DNA, 96 bp, Aspergillus thermomutatus
  misc_feature: 620
ttcagcagaacaatgctctacacgggcgccaccacgttgcagtgactgtcatattttagggcatagaaggacacagtgtcccagtcgtaaaaggaa

SEQ ID NO: 752 - DNA, 96 bp, Aspergillus thermomutatus
  misc_feature: 620
atagacagtatatgggacaatttagactacataatccacacattgaaccctacagcccttttggtagtagacctcctatgtgtgataaacaattag

SEQ ID NO: 753 - DNA, 96 bp, Aspergillus thermomutatus
  misc_feature: 620
agcttcagcagcctgattcctactttgtatgaggtcccggccttcctggatagaaagtccttctgtagaggctatctgctttgtagatcgcttcct

SEQ ID NO: 754 - DNA, 96 bp, Aspergillus thermomutatus
  misc_feature: 619
tgctctacacgggcgccaccacgttgcagtgactgtcatattttagggcatagaaggacacagtgtcccagtcgtaaaaggaattaatttttttgc

SEQ ID NO: 755 - DNA, 96 bp, Aspergillus thermomutatus
  misc_feature: 619
tcttcagcagaacaatgctctacacgggcgccaccacgttgcagtgactgtcatattttagggcatagaaggacacagtgtcccagtcgtaaaagg

SEQ ID NO: 756 - DNA, 96 bp, Aspergillus thermomutatus
  misc_feature: 619
ctggagaattgaagttagtccaaatggatggacaacagatcaaattggcatacgttggctacaaaaagtctttattcctgagactactggtcgaac

SEQ ID NO: 757 - DNA, 96 bp, Aspergillus thermomutatus
  misc_feature: 619
cgggaataagttgttctcagctcatcacggcgtttaataaagttatacacccaattcttgccgacaggttgaatatcagtaaaccctcgctgtgac

SEQ ID NO: 758 - DNA, 96 bp, Aspergillus thermomutatus
  misc_feature: 619
caatgctctacacgggcgccaccacgttgcagtgactgtcatattttagggcatagaaggacacagtgtcccagtcgtaaaaggaattaatttttt

SEQ ID NO: 759 - DNA, 96 bp, Aspergillus thermomutatus
  misc_feature: 618
tgggtcctcgcacttagcacgctgatagttataccgtcgggaataagttgttctcagctcatcacggcgtttaataaagttatacacccaattctt

SEQ ID NO: 760 - DNA, 96 bp, Aspergillus thermomutatus
  misc_feature: 618
tgaggtgtctttggtgctgaattggttgaccgactgcctggtggtgtaggagtcttgagttggatagtaaaccgtctaagcacctcatctgggttg

SEQ ID NO: 761 - DNA, 96 bp, Aspergillus thermomutatus
  misc_feature: 618
agagacgtaatagacagtatatgggacaatttagactacataatccacacattgaaccctacagcccttttggtagtagacctcctatgtgtgata

SEQ ID NO: 762 - DNA, 96 bp, Aspergillus thermomutatus
  misc_feature: 618
ccaggaaggccgggacctcatacaaagtaggaatcaggctgctgaagctttatctactatacctatggaaacagcatcttcagcagaacaatgctc

SEQ ID NO: 763 - DNA, 96 bp, Aspergillus thermomutatus
  misc_feature: 618
cgtgcaaaggcatttactccagataatatcaagagtggattccgagctactggcttaattccattcaacccagatgaggtgcttagacggtttact

SEQ ID NO: 764 - DNA, 96 bp, Aspergillus thermomutatus
  misc_feature: 617
ttgtcgaattcaggggttagatggctgccatggccatcgagaaccaagagacgatatctgcctgtcgttcgaccagtagtctcaggaataaagact

SEQ ID NO: 765 - DNA, 96 bp, Aspergillus thermomutatus
  misc_feature: 617
cttcagcagaacaatgctctacacgggcgccaccacgttgcagtgactgtcatattttagggcatagaaggacacagtgtcccagtcgtaaaagga

SEQ ID NO: 766 - DNA, 96 bp, Aspergillus thermomutatus
  misc_feature: 617
tattctattaaactagctaattgtttatcacacataggaggtctactaccaaaagggctgtagggttcaatgtgtggattatgtagtctaaattgt

SEQ ID NO: 767 - DNA, 96 bp, Aspergillus thermomutatus
  misc_feature: 617
aatagacagtatatgggacaatttagactacataatccacacattgaaccctacagcccttttggtagtagacctcctatgtgtgataaacaatta

SEQ ID NO: 768 - DNA, 96 bp, Aspergillus thermomutatus
  misc_feature: 617
gctcgtgcaaaggcatttactccagataatatcaagagtggattccgagctactggcttaattccattcaacccagatgaggtgcttagacggttt

SEQ ID NO: 769 - DNA, 96 bp, Aspergillus thermomutatus
  misc_feature: 617
gcgttgttcagctcgaaaacagtgtccatttaatcgccgctgaagtgttgtccgcggaacattgtaaatgcgtgaagcttcacgaacattgcaaat

SEQ ID NO: 770 - DNA, 96 bp, Aspergillus thermomutatus
  misc_feature: 617
atcttcagcagaacaatgctctacacgggcgccaccacgttgcagtgactgtcatattttagggcatagaaggacacagtgtcccagtcgtaaaag

SEQ ID NO: 771 - DNA, 96 bp, Aspergillus thermomutatus
  misc_feature: 616
tttagatcagcttataaagggttgtgagatggctatgaatagtgctattcttctagctcaagagaatcaggaactacgagctgcgcatgagaagaa

SEQ ID NO: 772 - DNA, 96 bp, Aspergillus thermomutatus
  misc_feature: 616
ttgggtcctcgcacttagcacgctgatagttataccgtcgggaataagttgttctcagctcatcacggcgtttaataaagttatacacccaattct

SEQ ID NO: 773 - DNA, 96 bp, Aspergillus thermomutatus
  misc_feature: 616
tgtcgaattcaggggttagatggctgccatggccatcgagaaccaagagacgatatctgcctgtcgttcgaccagtagtctcaggaataaagactt

SEQ ID NO: 774 - DNA, 96 bp, Aspergillus thermomutatus
  misc_feature: 616
attaagccagtagctcggaatccactcttgatattatctggagtaaatgcctttgcacgagcttcgggatatgctccaaggaaatcaagtttatca

SEQ ID NO: 775 - DNA, 96 bp, Aspergillus thermomutatus
  misc_feature: 616
gttgttctcagctcatcacggcgtttaataaagttatacacccaattcttgccgacaggttgaatatcagtaaaccctcgctgtgacaacaaaata

SEQ ID NO: 776 - DNA, 96 bp, Aspergillus thermomutatus
  misc_feature: 616
cagcagaacaatgctctacacgggcgccaccacgttgcagtgactgtcatattttagggcatagaaggacacagtgtcccagtcgtaaaaggaatt

SEQ ID NO: 777 - DNA, 96 bp, Aspergillus thermomutatus
  misc_feature: 616
agatcagcttataaagggttgtgagatggctatgaatagtgctattcttctagctcaagagaatcaggaactacgagctgcgcatgagaagaaaat

SEQ ID NO: 778 - DNA, 96 bp, Aspergillus thermomutatus
  misc_feature: 616
acaatgctctacacgggcgccaccacgttgcagtgactgtcatattttagggcatagaaggacacagtgtcccagtcgtaaaaggaattaattttt

SEQ ID NO: 779 - DNA, 96 bp, Aspergillus thermomutatus
  misc_feature: 616
aatgctctacacgggcgccaccacgttgcagtgactgtcatattttagggcatagaaggacacagtgtcccagtcgtaaaaggaattaattttttt

SEQ ID NO: 780 - DNA, 96 bp, Aspergillus thermomutatus
  misc_feature: 615
ctttagatcagcttataaagggttgtgagatggctatgaatagtgctattcttctagctcaagagaatcaggaactacgagctgcgcatgagaaga

SEQ ID NO: 781 - DNA, 96 bp, Aspergillus thermomutatus
  misc_feature: 615
tcagcagcctgattcctactttgtatgaggtcccggccttcctggatagaaagtccttctgtagaggctatctgctttgtagatcgcttcctcttc

SEQ ID NO: 782 - DNA, 96 bp, Aspergillus thermomutatus
  misc_feature: 614
ttaagccagtagctcggaatccactcttgatattatctggagtaaatgcctttgcacgagcttcgggatatgctccaaggaaatcaagtttatcaa

SEQ ID NO: 783 - DNA, 96 bp, Aspergillus thermomutatus
  misc_feature: 614
tagtagataaagcttcagcagcctgattcctactttgtatgaggtcccggccttcctggatagaaagtccttctgtagaggctatctgctttgtag

SEQ ID NO: 784 - DNA, 96 bp, Aspergillus thermomutatus
  misc_feature: 614
atagtagataaagcttcagcagcctgattcctactttgtatgaggtcccggccttcctggatagaaagtccttctgtagaggctatctgctttgta

SEQ ID NO: 785 - DNA, 96 bp, Aspergillus thermomutatus
  misc_feature: 614
ggttagatggctgccatggccatcgagaaccaagagacgatatctgcctgtcgttcgaccagtagtctcaggaataaagactttttgtagccaacg

SEQ ID NO: 786 - DNA, 96 bp, Aspergillus thermomutatus
  misc_feature: 614
gaattaagccagtagctcggaatccactcttgatattatctggagtaaatgcctttgcacgagcttcgggatatgctccaaggaaatcaagtttat

SEQ ID NO: 787 - DNA, 96 bp, Aspergillus thermomutatus
  misc_feature: 614
atcccatattgcatgatcgtgatttgtacacgattaaaccattcctggataacctttgggtcctcgcacttagcacgctgatagttataccgtcgg

SEQ ID NO: 788 - DNA, 96 bp, Aspergillus thermomutatus
  misc_feature: 613
taaagcttcagcagcctgattcctactttgtatgaggtcccggccttcctggatagaaagtccttctgtagaggctatctgctttgtagatcgctt

SEQ ID NO: 789 - DNA, 96 bp, Aspergillus thermomutatus
  misc_feature: 613
aagcttcagcagcctgattcctactttgtatgaggtcccggccttcctggatagaaagtccttctgtagaggctatctgctttgtagatcgcttcc

SEQ ID NO: 790 - DNA, 96 bp, Aspergillus thermomutatus
  misc_feature: 613
atccaggaaggccgggacctcatacaaagtaggaatcaggctgctgaagctttatctactatacctatggaaacagcatcttcagcagaacaatgc

SEQ ID NO: 791 - DNA, 96 bp, Aspergillus thermomutatus
  misc_feature: 613
aaagcttcagcagcctgattcctactttgtatgaggtcccggccttcctggatagaaagtccttctgtagaggctatctgctttgtagatcgcttc

SEQ ID NO: 792 - DNA, 96 bp, Aspergillus thermomutatus
  misc_feature: 612
tagatcagcttataaagggttgtgagatggctatgaatagtgctattcttctagctcaagagaatcaggaactacgagctgcgcatgagaagaaaa

SEQ ID NO: 793 - DNA, 96 bp, Aspergillus thermomutatus
  misc_feature: 612
gagacgtaatagacagtatatgggacaatttagactacataatccacacattgaaccctacagcccttttggtagtagacctcctatgtgtgataa

SEQ ID NO: 794 - DNA, 96 bp, Aspergillus thermomutatus
  misc_feature: 612
caggaaggccgggacctcatacaaagtaggaatcaggctgctgaagctttatctactatacctatggaaacagcatcttcagcagaacaatgctct

SEQ ID NO: 795 - DNA, 96 bp, Aspergillus thermomutatus
  misc_feature: 612
agtagctcggaatccactcttgatattatctggagtaaatgcctttgcacgagcttcgggatatgctccaaggaaatcaagtttatcaatatgatt

SEQ ID NO: 796 - DNA, 96 bp, Aspergillus thermomutatus
  misc_feature: 611
catcttcagcagaacaatgctctacacgggcgccaccacgttgcagtgactgtcatattttagggcatagaaggacacagtgtcccagtcgtaaaa

SEQ ID NO: 797 - DNA, 96 bp, Aspergillus thermomutatus
  misc_feature: 611
ttagatcagcttataaagggttgtgagatggctatgaatagtgctattcttctagctcaagagaatcaggaactacgagctgcgcatgagaagaaa

SEQ ID NO: 798 - DNA, 96 bp, Aspergillus thermomutatus
  misc_feature: 611
agacgtaatagacagtatatgggacaatttagactacataatccacacattgaaccctacagcccttttggtagtagacctcctatgtgtgataaa

SEQ ID NO: 799 - DNA, 96 bp, Aspergillus thermomutatus
  misc_feature: 611
tactatacctatggaaacagcatcttcagcagaacaatgctctacacgggcgccaccacgttgcagtgactgtcatattttagggcatagaaggac

SEQ ID NO: 800 - DNA, 96 bp, Aspergillus thermomutatus
  misc_feature: 611
taagccagtagctcggaatccactcttgatattatctggagtaaatgcctttgcacgagcttcgggatatgctccaaggaaatcaagtttatcaat

SEQ ID NO: 801 - DNA, 96 bp, Aspergillus thermomutatus
  misc_feature: 611
gttataccgtcgggaataagttgttctcagctcatcacggcgtttaataaagttatacacccaattcttgccgacaggttgaatatcagtaaaccc

SEQ ID NO: 802 - DNA, 96 bp, Aspergillus thermomutatus
  misc_feature: 611
gcacttagcacgctgatagttataccgtcgggaataagttgttctcagctcatcacggcgtttaataaagttatacacccaattcttgccgacagg

SEQ ID NO: 803 - DNA, 96 bp, Aspergillus thermomutatus
  misc_feature: 611
gcaactggagaattgaagttagtccaaatggatggacaacagatcaaattggcatacgttggctacaaaaagtctttattcctgagactactggtc

SEQ ID NO: 804 - DNA, 96 bp, Aspergillus thermomutatus
  misc_feature: 610
cgcgttgttcagctcgaaaacagtgtccatttaatcgccgctgaagtgttgtccgcggaacattgtaaatgcgtgaagcttcacgaacattgcaaa

SEQ ID NO: 805 - DNA, 96 bp, Aspergillus thermomutatus
  misc_feature: 610
actggagaattgaagttagtccaaatggatggacaacagatcaaattggcatacgttggctacaaaaagtctttattcctgagactactggtcgaa

SEQ ID NO: 806 - DNA, 96 bp, Aspergillus thermomutatus
  misc_feature: 609
gacgtaatagacagtatatgggacaatttagactacataatccacacattgaaccctacagcccttttggtagtagacctcctatgtgtgataaac

SEQ ID NO: 807 - DNA, 96 bp, Aspergillus thermomutatus
  misc_feature: 609
cagaacaatgctctacacgggcgccaccacgttgcagtgactgtcatattttagggcatagaaggacacagtgtcccagtcgtaaaaggaattaat

SEQ ID NO: 808 - DNA, 96 bp, Aspergillus thermomutatus
  misc_feature: 608
gggaataagttgttctcagctcatcacggcgtttaataaagttatacacccaattcttgccgacaggttgaatatcagtaaaccctcgctgtgaca

SEQ ID NO: 809 - DNA, 96 bp, Aspergillus thermomutatus
  misc_feature: 608
gataaagcttcagcagcctgattcctactttgtatgaggtcccggccttcctggatagaaagtccttctgtagaggctatctgctttgtagatcgc

SEQ ID NO: 810 - DNA, 96 bp, Aspergillus thermomutatus
  misc_feature: 608
cgttgttcagctcgaaaacagtgtccatttaatcgccgctgaagtgttgtccgcggaacattgtaaatgcgtgaagcttcacgaacattgcaaatt

SEQ ID NO: 811 - DNA, 96 bp, Aspergillus thermomutatus
  misc_feature: 608
atattctattaaactagctaattgtttatcacacataggaggtctactaccaaaagggctgtagggttcaatgtgtggattatgtagtctaaattg

SEQ ID NO: 812 - DNA, 96 bp, Aspergillus thermomutatus
  misc_feature: 607
gcagaacaatgctctacacgggcgccaccacgttgcagtgactgtcatattttagggcatagaaggacacagtgtcccagtcgtaaaaggaattaa

SEQ ID NO: 813 - DNA, 96 bp, Aspergillus thermomutatus
  misc_feature: 607
tagttataccgtcgggaataagttgttctcagctcatcacggcgtttaataaagttatacacccaattcttgccgacaggttgaatatcagtaaac

SEQ ID NO: 814 - DNA, 96 bp, Aspergillus thermomutatus
  misc_feature: 607
cagacgtcaagttatgcagcctgggaatcgcgaatgggtcacatctattgagtgtatcaactctcaaggatgggctttaccaccatgtattatctt

SEQ ID NO: 815 - DNA, 96 bp, Aspergillus thermomutatus
  misc_feature: 607
agaacaatgctctacacgggcgccaccacgttgcagtgactgtcatattttagggcatagaaggacacagtgtcccagtcgtaaaaggaattaatt

SEQ ID NO: 816 - DNA, 96 bp, Aspergillus thermomutatus
  misc_feature: 606
tcagcagaacaatgctctacacgggcgccaccacgttgcagtgactgtcatattttagggcatagaaggacacagtgtcccagtcgtaaaaggaat

SEQ ID NO: 817 - DNA, 96 bp, Aspergillus thermomutatus
  misc_feature: 606
tcaagttatgcagcctgggaatcgcgaatgggtcacatctattgagtgtatcaactctcaaggatgggctttaccaccatgtattatcttcaaggg

SEQ ID NO: 818 - DNA, 96 bp, Aspergillus thermomutatus
  misc_feature: 606
gagagacgtaatagacagtatatgggacaatttagactacataatccacacattgaaccctacagcccttttggtagtagacctcctatgtgtgat

SEQ ID NO: 819 - DNA, 96 bp, Aspergillus thermomutatus
  misc_feature: 606
agacgtcaagttatgcagcctgggaatcgcgaatgggtcacatctattgagtgtatcaactctcaaggatgggctttaccaccatgtattatcttc

SEQ ID NO: 820 - DNA, 96 bp, Aspergillus thermomutatus
  misc_feature: 606
cgtcaagttatgcagcctgggaatcgcgaatgggtcacatctattgagtgtatcaactctcaaggatgggctttaccaccatgtattatcttcaag

SEQ ID NO: 821 - DNA, 96 bp, Aspergillus thermomutatus
  misc_feature: 605
ttcagcagcctgattcctactttgtatgaggtcccggccttcctggatagaaagtccttctgtagaggctatctgctttgtagatcgcttcctctt

SEQ ID NO: 822 - DNA, 96 bp, Aspergillus thermomutatus
  misc_feature: 605
atctggagtaaatgcctttgcacgagcttcgggatatgctccaaggaaatcaagtttatcaatatgattgaaacccttctgcatctggtcctggac

SEQ ID NO: 823 - DNA, 96 bp, Aspergillus thermomutatus
  misc_feature: 604
ctgctttagatcagcttataaagggttgtgagatggctatgaatagtgctattcttctagctcaagagaatcaggaactacgagctgcgcatgaga

SEQ ID NO: 824 - DNA, 96 bp, Aspergillus thermomutatus
  misc_feature: 604
ggtcctcgcacttagcacgctgatagttataccgtcgggaataagttgttctcagctcatcacggcgtttaataaagttatacacccaattcttgc

SEQ ID NO: 825 - DNA, 96 bp, Aspergillus thermomutatus
  misc_feature: 604
agattatgaggtgtctttggtgctgaattggttgaccgactgcctggtggtgtaggagtcttgagttggatagtaaaccgtctaagcacctcatct

SEQ ID NO: 826 - DNA, 96 bp, Aspergillus thermomutatus
  misc_feature: 603
cgtaatagacagtatatgggacaatttagactacataatccacacattgaaccctacagcccttttggtagtagacctcctatgtgtgataaacaa

SEQ ID NO: 827 - DNA, 96 bp, Aspergillus thermomutatus
  misc_feature: 603
ttagcacgctgatagttataccgtcgggaataagttgttctcagctcatcacggcgtttaataaagttatacacccaattcttgccgacaggttga

SEQ ID NO: 828 - DNA, 96 bp, Aspergillus thermomutatus
  misc_feature: 603
aataagttgttctcagctcatcacggcgtttaataaagttatacacccaattcttgccgacaggttgaatatcagtaaaccctcgctgtgacaaca

SEQ ID NO: 829 - DNA, 96 bp, Aspergillus thermomutatus
  misc_feature: 603
tatctggagtaaatgcctttgcacgagcttcgggatatgctccaaggaaatcaagtttatcaatatgattgaaacccttctgcatctggtcctgga

SEQ ID NO: 830 - DNA, 96 bp, Aspergillus thermomutatus
  misc_feature: 603
cttagcacgctgatagttataccgtcgggaataagttgttctcagctcatcacggcgtttaataaagttatacacccaattcttgccgacaggttg

SEQ ID NO: 831 - DNA, 96 bp, Aspergillus thermomutatus
  misc_feature: 603
aacaatgctctacacgggcgccaccacgttgcagtgactgtcatattttagggcatagaaggacacagtgtcccagtcgtaaaaggaattaatttt

SEQ ID NO: 832 - DNA, 96 bp, Aspergillus thermomutatus
  misc_feature: 602
ttataccgtcgggaataagttgttctcagctcatcacggcgtttaataaagttatacacccaattcttgccgacaggttgaatatcagtaaaccct

SEQ ID NO: 833 - DNA, 96 bp, Aspergillus thermomutatus
  misc_feature: 602
tcccatattgcatgatcgtgatttgtacacgattaaaccattcctggataacctttgggtcctcgcacttagcacgctgatagttataccgtcggg

SEQ ID NO: 834 - DNA, 96 bp, Aspergillus thermomutatus
  misc_feature: 602
agttataccgtcgggaataagttgttctcagctcatcacggcgtttaataaagttatacacccaattcttgccgacaggttgaatatcagtaaacc

SEQ ID NO: 835 - DNA, 96 bp, Aspergillus thermomutatus
  misc_feature: 602
gaacaatgctctacacgggcgccaccacgttgcagtgactgtcatattttagggcatagaaggacacagtgtcccagtcgtaaaaggaattaattt

SEQ ID NO: 836 - DNA, 96 bp, Aspergillus thermomutatus
  misc_feature: 602
ataaagcttcagcagcctgattcctactttgtatgaggtcccggccttcctggatagaaagtccttctgtagaggctatctgctttgtagatcgct

SEQ ID NO: 837 - DNA, 96 bp, Aspergillus thermomutatus
  misc_feature: 601
tccaactcaagactcctacaccaccaggcagtcggtcaaccaattcagcaccaaagacacctcataatctcaagcaattagagaagcaggcaagca

SEQ ID NO: 838 - DNA, 96 bp, Aspergillus thermomutatus
  misc_feature: 601
gaataagttgttctcagctcatcacggcgtttaataaagttatacacccaattcttgccgacaggttgaatatcagtaaaccctcgctgtgacaac

SEQ ID NO: 839 - DNA, 96 bp, Aspergillus thermomutatus
  misc_feature: 601
gtcaagttatgcagcctgggaatcgcgaatgggtcacatctattgagtgtatcaactctcaaggatgggctttaccaccatgtattatcttcaagg

SEQ ID NO: 840 - DNA, 96 bp, Aspergillus thermomutatus
  misc_feature: 600
caaggaaatcaagtttatcaatatgattgaaacccttctgcatctggtcctggactaatcgtccgtaagcacctttcaggggtgaaaaacagccaa

SEQ ID NO: 841 - DNA, 96 bp, Aspergillus thermomutatus
  misc_feature: 600
gacgtcaagttatgcagcctgggaatcgcgaatgggtcacatctattgagtgtatcaactctcaaggatgggctttaccaccatgtattatcttca

SEQ ID NO: 842 - DNA, 96 bp, Aspergillus thermomutatus
  misc_feature: 600
ctcggaatccactcttgatattatctggagtaaatgcctttgcacgagcttcgggatatgctccaaggaaatcaagtttatcaatatgattgaaac

SEQ ID NO: 843 - DNA, 96 bp, Aspergillus thermomutatus
  misc_feature: 600
atccaactcaagactcctacaccaccaggcagtcggtcaaccaattcagcaccaaagacacctcataatctcaagcaattagagaagcaggcaagc

SEQ ID NO: 844 - DNA, 96 bp, Aspergillus thermomutatus
  misc_feature: 600
gctgctttagatcagcttataaagggttgtgagatggctatgaatagtgctattcttctagctcaagagaatcaggaactacgagctgcgcatgag

SEQ ID NO: 845 - DNA, 96 bp, Aspergillus thermomutatus
  misc_feature: 600
gcaaaggcatttactccagataatatcaagagtggattccgagctactggcttaattccattcaacccagatgaggtgcttagacggtttactatc

SEQ ID NO: 846 - DNA, 96 bp, Aspergillus thermomutatus
  misc_feature: 600
aagctgctttagatcagcttataaagggttgtgagatggctatgaatagtgctattcttctagctcaagagaatcaggaactacgagctgcgcatg

SEQ ID NO: 847 - DNA, 96 bp, Aspergillus thermomutatus
  misc_feature: 600
agcctgattcctactttgtatgaggtcccggccttcctggatagaaagtccttctgtagaggctatctgctttgtagatcgcttcctcttctggat

SEQ ID NO: 848 - DNA, 96 bp, Aspergillus thermomutatus
  misc_feature: 599
acgtcaagttatgcagcctgggaatcgcgaatgggtcacatctattgagtgtatcaactctcaaggatgggctttaccaccatgtattatcttcaa

SEQ ID NO: 849 - DNA, 96 bp, Aspergillus thermomutatus
  misc_feature: 599
ccaaggaaatcaagtttatcaatatgattgaaacccttctgcatctggtcctggactaatcgtccgtaagcacctttcaggggtgaaaaacagcca

SEQ ID NO: 850 - DNA, 96 bp, Aspergillus thermomutatus
  misc_feature: 599
tgacagtcactgcaacgtggtggcgcccgtgtagagcattgttctgctgaagatgctgtttccataggtatagtagataaagcttcagcagcctga

SEQ ID NO: 851 - DNA, 96 bp, Aspergillus thermomutatus
  misc_feature: 599
gacagtatatgggacaatttagactacataatccacacattgaaccctacagcccttttggtagtagacctcctatgtgtgataaacaattagcta

SEQ ID NO: 852 - DNA, 96 bp, Aspergillus thermomutatus
  misc_feature: 599
attgaagttagtccaaatggatggacaacagatcaaattggcatacgttggctacaaaaagtctttattcctgagactactggtcgaacgacaggc

SEQ ID NO: 853 - DNA, 96 bp, Aspergillus thermomutatus
  misc_feature: 599
actccagataatatcaagagtggattccgagctactggcttaattccattcaacccagatgaggtgcttagacggtttactatccaactcaagact

SEQ ID NO: 854 - DNA, 96 bp, Aspergillus thermomutatus
  misc_feature: 597
gcctgattcctactttgtatgaggtcccggccttcctggatagaaagtccttctgtagaggctatctgctttgtagatcgcttcctcttctggatt

SEQ ID NO: 855 - DNA, 96 bp, Aspergillus thermomutatus
  misc_feature: 597
actcctacaccaccaggcagtcggtcaaccaattcagcaccaaagacacctcataatctcaagcaattagagaagcaggcaagcacaatcaagaag

SEQ ID NO: 856 - DNA, 96 bp, Aspergillus thermomutatus
  misc_feature: 597
agataaagcttcagcagcctgattcctactttgtatgaggtcccggccttcctggatagaaagtccttctgtagaggctatctgctttgtagatcg

SEQ ID NO: 857 - DNA, 96 bp, Aspergillus thermomutatus
  misc_feature: 597
atgacagtcactgcaacgtggtggcgcccgtgtagagcattgttctgctgaagatgctgtttccataggtatagtagataaagcttcagcagcctg

SEQ ID NO: 858 - DNA, 96 bp, Aspergillus thermomutatus
  misc_feature: 596
ggagaattgaagttagtccaaatggatggacaacagatcaaattggcatacgttggctacaaaaagtctttattcctgagactactggtcgaacga

SEQ ID NO: 859 - DNA, 96 bp, Aspergillus thermomutatus
  misc_feature: 596
cagcctgattcctactttgtatgaggtcccggccttcctggatagaaagtccttctgtagaggctatctgctttgtagatcgcttcctcttctgga

SEQ ID NO: 860 - DNA, 96 bp, Aspergillus thermomutatus
  misc_feature: 596
tccaaggaaatcaagtttatcaatatgattgaaacccttctgcatctggtcctggactaatcgtccgtaagcacctttcaggggtgaaaaacagcc

SEQ ID NO: 861 - DNA, 96 bp, Aspergillus thermomutatus
  misc_feature: 596
agctgctttagatcagcttataaagggttgtgagatggctatgaatagtgctattcttctagctcaagagaatcaggaactacgagctgcgcatga

SEQ ID NO: 862 - DNA, 96 bp, Aspergillus thermomutatus
  misc_feature: 596
agcagaacaatgctctacacgggcgccaccacgttgcagtgactgtcatattttagggcatagaaggacacagtgtcccagtcgtaaaaggaatta

SEQ ID NO: 863 - DNA, 96 bp, Aspergillus thermomutatus
  misc_feature: 596
gaattgaagttagtccaaatggatggacaacagatcaaattggcatacgttggctacaaaaagtctttattcctgagactactggtcgaacgacag

SEQ ID NO: 864 - DNA, 96 bp, Aspergillus thermomutatus
  misc_feature: 595
aagttatgcagcctgggaatcgcgaatgggtcacatctattgagtgtatcaactctcaaggatgggctttaccaccatgtattatcttcaagggaa

SEQ ID NO: 865 - DNA, 96 bp, Aspergillus thermomutatus
  misc_feature: 595
tatttgcagtgagaataatattattcctatctgcatgcctgctcattcatcaaattacttacaacctcttgatgttggctgtttttcacccctgaa

SEQ ID NO: 866 - DNA, 96 bp, Aspergillus thermomutatus
  misc_feature: 595
tgtagatatcttcgtacgcgatcccatattgcatgatcgtgatttgtacacgattaaaccattcctggataacctttgggtcctcgcacttagcac

SEQ ID NO: 867 - DNA, 96 bp, Aspergillus thermomutatus
  misc_feature: 595
ctactatacctatggaaacagcatcttcagcagaacaatgctctacacgggcgccaccacgttgcagtgactgtcatattttagggcatagaagga

SEQ ID NO: 868 - DNA, 96 bp, Aspergillus thermomutatus
  misc_feature: 595
gtagataaagcttcagcagcctgattcctactttgtatgaggtcccggccttcctggatagaaagtccttctgtagaggctatctgctttgtagat

SEQ ID NO: 869 - DNA, 96 bp, Aspergillus thermomutatus
  misc_feature: 595
actgcaaatattgtcgaattcaggggttagatggctgccatggccatcgagaaccaagagacgatatctgcctgtcgttcgaccagtagtctcagg

SEQ ID NO: 870 - DNA, 96 bp, Aspergillus thermomutatus
  misc_feature: 593
ttgaagttagtccaaatggatggacaacagatcaaattggcatacgttggctacaaaaagtctttattcctgagactactggtcgaacgacaggca

SEQ ID NO: 871 - DNA, 96 bp, Aspergillus thermomutatus
  misc_feature: 593
ttctattaaactagctaattgtttatcacacataggaggtctactaccaaaagggctgtagggttcaatgtgtggattatgtagtctaaattgtcc

SEQ ID NO: 872 - DNA, 96 bp, Aspergillus thermomutatus
  misc_feature: 593
gttgttcagctcgaaaacagtgtccatttaatcgccgctgaagtgttgtccgcggaacattgtaaatgcgtgaagcttcacgaacattgcaaattt

SEQ ID NO: 873 - DNA, 96 bp, Aspergillus thermomutatus
  misc_feature: 593
cagtagctcggaatccactcttgatattatctggagtaaatgcctttgcacgagcttcgggatatgctccaaggaaatcaagtttatcaatatgat

SEQ ID NO: 874 - DNA, 96 bp, Aspergillus thermomutatus
  misc_feature: 593
agcagcctgattcctactttgtatgaggtcccggccttcctggatagaaagtccttctgtagaggctatctgctttgtagatcgcttcctcttctg

SEQ ID NO: 875 - DNA, 96 bp, Aspergillus thermomutatus
  misc_feature: 592
ttatattctattaaactagctaattgtttatcacacataggaggtctactaccaaaagggctgtagggttcaatgtgtggattatgtagtctaaat

SEQ ID NO: 876 - DNA, 96 bp, Aspergillus thermomutatus
  misc_feature: 592
tggagaattgaagttagtccaaatggatggacaacagatcaaattggcatacgttggctacaaaaagtctttattcctgagactactggtcgaacg

SEQ ID NO: 877 - DNA, 96 bp, Aspergillus thermomutatus
  misc_feature: 592
tatccaggaaggccgggacctcatacaaagtaggaatcaggctgctgaagctttatctactatacctatggaaacagcatcttcagcagaacaatg

SEQ ID NO: 878 - DNA, 96 bp, Aspergillus thermomutatus
  misc_feature: 592
gtatagtagataaagcttcagcagcctgattcctactttgtatgaggtcccggccttcctggatagaaagtccttctgtagaggctatctgctttg

SEQ ID NO: 879 - DNA, 96 bp, Aspergillus thermomutatus
  misc_feature: 592
ggcatttactccagataatatcaagagtggattccgagctactggcttaattccattcaacccagatgaggtgcttagacggtttactatccaact

SEQ ID NO: 880 - DNA, 96 bp, Aspergillus thermomutatus
  misc_feature: 592
ctaaagctgctttagatcagcttataaagggttgtgagatggctatgaatagtgctattcttctagctcaagagaatcaggaactacgagctgcgc

SEQ ID NO: 881 - DNA, 96 bp, Aspergillus thermomutatus
  misc_feature: 592
gcagcctgattcctactttgtatgaggtcccggccttcctggatagaaagtccttctgtagaggctatctgctttgtagatcgcttcctcttctgg

SEQ ID NO: 882 - DNA, 96 bp, Aspergillus thermomutatus
  misc_feature: 592
cagcagcctgattcctactttgtatgaggtcccggccttcctggatagaaagtccttctgtagaggctatctgctttgtagatcgcttcctcttct

SEQ ID NO: 883 - DNA, 96 bp, Aspergillus thermomutatus
  misc_feature: 591
gctcggaatccactcttgatattatctggagtaaatgcctttgcacgagcttcgggatatgctccaaggaaatcaagtttatcaatatgattgaaa

SEQ ID NO: 884 - DNA, 96 bp, Aspergillus thermomutatus
  misc_feature: 591
acgtaatagacagtatatgggacaatttagactacataatccacacattgaaccctacagcccttttggtagtagacctcctatgtgtgataaaca

SEQ ID NO: 885 - DNA, 96 bp, Aspergillus thermomutatus
  misc_feature: 591
taaagctgctttagatcagcttataaagggttgtgagatggctatgaatagtgctattcttctagctcaagagaatcaggaactacgagctgcgca

SEQ ID NO: 886 - DNA, 96 bp, Aspergillus thermomutatus
  misc_feature: 591
tatagtagataaagcttcagcagcctgattcctactttgtatgaggtcccggccttcctggatagaaagtccttctgtagaggctatctgctttgt

SEQ ID NO: 887 - DNA, 96 bp, Aspergillus thermomutatus
  misc_feature: 591
gagattatgaggtgtctttggtgctgaattggttgaccgactgcctggtggtgtaggagtcttgagttggatagtaaaccgtctaagcacctcatc

SEQ ID NO: 888 - DNA, 96 bp, Aspergillus thermomutatus
  misc_feature: 590
tttctatccaggaaggccgggacctcatacaaagtaggaatcaggctgctgaagctttatctactatacctatggaaacagcatcttcagcagaac

SEQ ID NO: 889 - DNA, 96 bp, Aspergillus thermomutatus
  misc_feature: 590
catttactccagataatatcaagagtggattccgagctactggcttaattccattcaacccagatgaggtgcttagacggtttactatccaactca

SEQ ID NO: 890 - DNA, 96 bp, Aspergillus thermomutatus
  misc_feature: 590
tgaagttagtccaaatggatggacaacagatcaaattggcatacgttggctacaaaaagtctttattcctgagactactggtcgaacgacaggcag

SEQ ID NO: 891 - DNA, 96 bp, Aspergillus thermomutatus
  misc_feature: 590
caagttatgcagcctgggaatcgcgaatgggtcacatctattgagtgtatcaactctcaaggatgggctttaccaccatgtattatcttcaaggga

SEQ ID NO: 892 - DNA, 96 bp, Aspergillus thermomutatus
  misc_feature: 590
ccagtagctcggaatccactcttgatattatctggagtaaatgcctttgcacgagcttcgggatatgctccaaggaaatcaagtttatcaatatga

SEQ ID NO: 893 - DNA, 96 bp, Aspergillus thermomutatus
  misc_feature: 589
tcctcgcacttagcacgctgatagttataccgtcgggaataagttgttctcagctcatcacggcgtttaataaagttatacacccaattcttgccg

SEQ ID NO: 894 - DNA, 96 bp, Aspergillus thermomutatus
  misc_feature: 589
gcacgctgatagttataccgtcgggaataagttgttctcagctcatcacggcgtttaataaagttatacacccaattcttgccgacaggttgaata

SEQ ID NO: 895 - DNA, 96 bp, Aspergillus thermomutatus
  misc_feature: 589
gactttctatccaggaaggccgggacctcatacaaagtaggaatcaggctgctgaagctttatctactatacctatggaaacagcatcttcagcag

SEQ ID NO: 896 - DNA, 96 bp, Aspergillus thermomutatus
  misc_feature: 589
aaagctgctttagatcagcttataaagggttgtgagatggctatgaatagtgctattcttctagctcaagagaatcaggaactacgagctgcgcat

SEQ ID NO: 897 - DNA, 96 bp, Aspergillus thermomutatus
  misc_feature: 588
tgctttagatcagcttataaagggttgtgagatggctatgaatagtgctattcttctagctcaagagaatcaggaactacgagctgcgcatgagaa

SEQ ID NO: 898 - DNA, 96 bp, Aspergillus thermomutatus
  misc_feature: 588
gaagttagtccaaatggatggacaacagatcaaattggcatacgttggctacaaaaagtctttattcctgagactactggtcgaacgacaggcaga

SEQ ID NO: 899 - DNA, 96 bp, Aspergillus thermomutatus
  misc_feature: 588
gagaataatattattcctatctgcatgcctgctcattcatcaaattacttacaacctcttgatgttggctgtttttcacccctgaaaggtgcttac

SEQ ID NO: 900 - DNA, 96 bp, Aspergillus thermomutatus
  misc_feature: 587
tttatattctattaaactagctaattgtttatcacacataggaggtctactaccaaaagggctgtagggttcaatgtgtggattatgtagtctaaa

SEQ ID NO: 901 - DNA, 96 bp, Aspergillus thermomutatus
  misc_feature: 587
tccaggaaggccgggacctcatacaaagtaggaatcaggctgctgaagctttatctactatacctatggaaacagcatcttcagcagaacaatgct

SEQ ID NO: 902 - DNA, 96 bp, Aspergillus thermomutatus
  misc_feature: 587
ctgtataagcgattcctcttcagctttagtcaatttatgtgagttggcgcgttgttcagctcgaaaacagtgtccatttaatcgccgctgaagtgt

SEQ ID NO: 903 - DNA, 96 bp, Aspergillus thermomutatus
  misc_feature: 587
attatctggagtaaatgcctttgcacgagcttcgggatatgctccaaggaaatcaagtttatcaatatgattgaaacccttctgcatctggtcctg

SEQ ID NO: 904 - DNA, 96 bp, Aspergillus thermomutatus
  misc_feature: 586
tatgacagtcactgcaacgtggtggcgcccgtgtagagcattgttctgctgaagatgctgtttccataggtatagtagataaagcttcagcagcct

SEQ ID NO: 905 - DNA, 96 bp, Aspergillus thermomutatus
  misc_feature: 586
tatccaactcaagactcctacaccaccaggcagtcggtcaaccaattcagcaccaaagacacctcataatctcaagcaattagagaagcaggcaag

SEQ ID NO: 906 - DNA, 96 bp, Aspergillus thermomutatus
  misc_feature: 586
ctcgcacttagcacgctgatagttataccgtcgggaataagttgttctcagctcatcacggcgtttaataaagttatacacccaattcttgccgac

SEQ ID NO: 907 - DNA, 96 bp, Aspergillus thermomutatus
  misc_feature: 586
agcacgctgatagttataccgtcgggaataagttgttctcagctcatcacggcgtttaataaagttatacacccaattcttgccgacaggttgaat

SEQ ID NO: 908 - DNA, 96 bp, Aspergillus thermomutatus
  misc_feature: 585
tatattctattaaactagctaattgtttatcacacataggaggtctactaccaaaagggctgtagggttcaatgtgtggattatgtagtctaaatt

SEQ ID NO: 909 - DNA, 96 bp, Aspergillus thermomutatus
  misc_feature: 584
tgtataagcgattcctcttcagctttagtcaatttatgtgagttggcgcgttgttcagctcgaaaacagtgtccatttaatcgccgctgaagtgtt

SEQ ID NO: 910 - DNA, 96 bp, Aspergillus thermomutatus
  misc_feature: 584
cctcgcacttagcacgctgatagttataccgtcgggaataagttgttctcagctcatcacggcgtttaataaagttatacacccaattcttgccga

SEQ ID NO: 911 - DNA, 96 bp, Aspergillus thermomutatus
  misc_feature: 584
gagaattgaagttagtccaaatggatggacaacagatcaaattggcatacgttggctacaaaaagtctttattcctgagactactggtcgaacgac

SEQ ID NO: 912 - DNA, 96 bp, Aspergillus thermomutatus
  misc_feature: 584
cttctatgccctaaaatatgacagtcactgcaacgtggtggcgcccgtgtagagcattgttctgctgaagatgctgtttccataggtatagtagat

SEQ ID NO: 913 - DNA, 96 bp, Aspergillus thermomutatus
  misc_feature: 583
atttactccagataatatcaagagtggattccgagctactggcttaattccattcaacccagatgaggtgcttagacggtttactatccaactcaa

SEQ ID NO: 914 - DNA, 96 bp, Aspergillus thermomutatus
  misc_feature: 583
agaattgaagttagtccaaatggatggacaacagatcaaattggcatacgttggctacaaaaagtctttattcctgagactactggtcgaacgaca

SEQ ID NO: 915 - DNA, 96 bp, Aspergillus thermomutatus
  misc_feature: 583
aattgaagttagtccaaatggatggacaacagatcaaattggcatacgttggctacaaaaagtctttattcctgagactactggtcgaacgacagg

SEQ ID NO: 916 - DNA, 96 bp, Aspergillus thermomutatus
  misc_feature: 582
tttggactaacttcaattctccagttgcttggtaacttgtcatcttgataccagccctcaatatggactgttcccttgaagataatacatggtggt

SEQ ID NO: 917 - DNA, 96 bp, Aspergillus thermomutatus
  misc_feature: 582
ttgagattatgaggtgtctttggtgctgaattggttgaccgactgcctggtggtgtaggagtcttgagttggatagtaaaccgtctaagcacctca

SEQ ID NO: 918 - DNA, 96 bp, Aspergillus thermomutatus
  misc_feature: 582
ctttctatccaggaaggccgggacctcatacaaagtaggaatcaggctgctgaagctttatctactatacctatggaaacagcatcttcagcagaa

SEQ ID NO: 919 - DNA, 96 bp, Aspergillus thermomutatus
  misc_feature: 582
actttctatccaggaaggccgggacctcatacaaagtaggaatcaggctgctgaagctttatctactatacctatggaaacagcatcttcagcaga

SEQ ID NO: 920 - DNA, 96 bp, Aspergillus thermomutatus
  misc_feature: 582
tacttacaacctcttgatgttggctgtttttcacccctgaaaggtgcttacggacgattagtccaggaccagatgcagaagggtttcaatcatatt

SEQ ID NO: 921 - DNA, 96 bp, Aspergillus thermomutatus
  misc_feature: 582
gcatttactccagataatatcaagagtggattccgagctactggcttaattccattcaacccagatgaggtgcttagacggtttactatccaactc

SEQ ID NO: 922 - DNA, 96 bp, Aspergillus thermomutatus
  misc_feature: 581
ttatctggagtaaatgcctttgcacgagcttcgggatatgctccaaggaaatcaagtttatcaatatgattgaaacccttctgcatctggtcctgg

SEQ ID NO: 923 - DNA, 96 bp, Aspergillus thermomutatus
  misc_feature: 581
agtagataaagcttcagcagcctgattcctactttgtatgaggtcccggccttcctggatagaaagtccttctgtagaggctatctgctttgtaga

SEQ ID NO: 924 - DNA, 96 bp, Aspergillus thermomutatus
  misc_feature: 580
aggactttctatccaggaaggccgggacctcatacaaagtaggaatcaggctgctgaagctttatctactatacctatggaaacagcatcttcagc

SEQ ID NO: 925 - DNA, 96 bp, Aspergillus thermomutatus
  misc_feature: 578
ttggactaacttcaattctccagttgcttggtaacttgtcatcttgataccagccctcaatatggactgttcccttgaagataatacatggtggta

SEQ ID NO: 926 - DNA, 96 bp, Aspergillus thermomutatus
  misc_feature: 578
ggactttctatccaggaaggccgggacctcatacaaagtaggaatcaggctgctgaagctttatctactatacctatggaaacagcatcttcagca

SEQ ID NO: 927 - DNA, 96 bp, Aspergillus thermomutatus
  misc_feature: 578
tgagattatgaggtgtctttggtgctgaattggttgaccgactgcctggtggtgtaggagtcttgagttggatagtaaaccgtctaagcacctcat

SEQ ID NO: 928 - DNA, 96 bp, Aspergillus thermomutatus
  misc_feature: 578
tctattaaactagctaattgtttatcacacataggaggtctactaccaaaagggctgtagggttcaatgtgtggattatgtagtctaaattgtccc

SEQ ID NO: 929 - DNA, 96 bp, Aspergillus thermomutatus
  misc_feature: 578
tactccagataatatcaagagtggattccgagctactggcttaattccattcaacccagatgaggtgcttagacggtttactatccaactcaagac

SEQ ID NO: 930 - DNA, 96 bp, Aspergillus thermomutatus
  misc_feature: 577
tttgcagtgagaataatattattcctatctgcatgcctgctcattcatcaaattacttacaacctcttgatgttggctgtttttcacccctgaaag

SEQ ID NO: 931 - DNA, 96 bp, Aspergillus thermomutatus
  misc_feature: 577
ctatccaactcaagactcctacaccaccaggcagtcggtcaaccaattcagcaccaaagacacctcataatctcaagcaattagagaagcaggcaa

SEQ ID NO: 932 - DNA, 96 bp, Aspergillus thermomutatus
  misc_feature: 577
tattatctggagtaaatgcctttgcacgagcttcgggatatgctccaaggaaatcaagtttatcaatatgattgaaacccttctgcatctggtcct

SEQ ID NO: 933 - DNA, 96 bp, Aspergillus thermomutatus
  misc_feature: 577
tataccgtcgggaataagttgttctcagctcatcacggcgtttaataaagttatacacccaattcttgccgacaggttgaatatcagtaaaccctc

SEQ ID NO: 934 - DNA, 96 bp, Aspergillus thermomutatus
  misc_feature: 577
acgcgatcccatattgcatgatcgtgatttgtacacgattaaaccattcctggataacctttgggtcctcgcacttagcacgctgatagttatacc

SEQ ID NO: 935 - DNA, 96 bp, Aspergillus thermomutatus
  misc_feature: 577
agaaggactttctatccaggaaggccgggacctcatacaaagtaggaatcaggctgctgaagctttatctactatacctatggaaacagcatcttc

SEQ ID NO: 936 - DNA, 96 bp, Aspergillus thermomutatus
  misc_feature: 577
cgcacttagcacgctgatagttataccgtcgggaataagttgttctcagctcatcacggcgtttaataaagttatacacccaattcttgccgacag

SEQ ID NO: 937 - DNA, 96 bp, Aspergillus thermomutatus
  misc_feature: 577
aaggactttctatccaggaaggccgggacctcatacaaagtaggaatcaggctgctgaagctttatctactatacctatggaaacagcatcttcag

SEQ ID NO: 938 - DNA, 96 bp, Aspergillus thermomutatus
  misc_feature: 577
cgcgatcccatattgcatgatcgtgatttgtacacgattaaaccattcctggataacctttgggtcctcgcacttagcacgctgatagttataccg

SEQ ID NO: 939 - DNA, 96 bp, Aspergillus thermomutatus
  misc_feature: 576
tagcacgctgatagttataccgtcgggaataagttgttctcagctcatcacggcgtttaataaagttatacacccaattcttgccgacaggttgaa

SEQ ID NO: 940 - DNA, 96 bp, Aspergillus thermomutatus
  misc_feature: 576
aatattattcctatctgcatgcctgctcattcatcaaattacttacaacctcttgatgttggctgtttttcacccctgaaaggtgcttacggacga

SEQ ID NO: 941 - DNA, 96 bp, Aspergillus thermomutatus
  misc_feature: 576
gggtcctcgcacttagcacgctgatagttataccgtcgggaataagttgttctcagctcatcacggcgtttaataaagttatacacccaattcttg

SEQ ID NO: 942 - DNA, 96 bp, Aspergillus thermomutatus
  misc_feature: 576
ccactgtataagcgattcctcttcagctttagtcaatttatgtgagttggcgcgttgttcagctcgaaaacagtgtccatttaatcgccgctgaag

SEQ ID NO: 943 - DNA, 96 bp, Aspergillus thermomutatus
  misc_feature: 575
gaaggactttctatccaggaaggccgggacctcatacaaagtaggaatcaggctgctgaagctttatctactatacctatggaaacagcatcttca

SEQ ID NO: 944 - DNA, 96 bp, Aspergillus thermomutatus
  misc_feature: 572
ttgttcagctcgaaaacagtgtccatttaatcgccgctgaagtgttgtccgcggaacattgtaaatgcgtgaagcttcacgaacattgcaaatttg

SEQ ID NO: 945 - DNA, 96 bp, Aspergillus thermomutatus
  misc_feature: 572
tctactatacctatggaaacagcatcttcagcagaacaatgctctacacgggcgccaccacgttgcagtgactgtcatattttagggcatagaagg

SEQ ID NO: 946 - DNA, 96 bp, Aspergillus thermomutatus
  misc_feature: 572
ggaattaagccagtagctcggaatccactcttgatattatctggagtaaatgcctttgcacgagcttcgggatatgctccaaggaaatcaagttta

SEQ ID NO: 947 - DNA, 96 bp, Aspergillus thermomutatus
  misc_feature: 572
gtcctcgcacttagcacgctgatagttataccgtcgggaataagttgttctcagctcatcacggcgtttaataaagttatacacccaattcttgcc

SEQ ID NO: 948 - DNA, 96 bp, Aspergillus thermomutatus
  misc_feature: 572
ataccgtcgggaataagttgttctcagctcatcacggcgtttaataaagttatacacccaattcttgccgacaggttgaatatcagtaaaccctcg

SEQ ID NO: 949 - DNA, 96 bp, Aspergillus thermomutatus
  misc_feature: 571
caactggagaattgaagttagtccaaatggatggacaacagatcaaattggcatacgttggctacaaaaagtctttattcctgagactactggtcg

SEQ ID NO: 950 - DNA, 96 bp, Aspergillus thermomutatus
  misc_feature: 570
ttgcagtgagaataatattattcctatctgcatgcctgctcattcatcaaattacttacaacctcttgatgttggctgtttttcacccctgaaagg

SEQ ID NO: 951 - DNA, 96 bp, Aspergillus thermomutatus
  misc_feature: 570
aactggagaattgaagttagtccaaatggatggacaacagatcaaattggcatacgttggctacaaaaagtctttattcctgagactactggtcga

SEQ ID NO: 952 - DNA, 96 bp, Aspergillus thermomutatus
  misc_feature: 569
ctttatattctattaaactagctaattgtttatcacacataggaggtctactaccaaaagggctgtagggttcaatgtgtggattatgtagtctaa

SEQ ID NO: 953 - DNA, 96 bp, Aspergillus thermomutatus
  misc_feature: 569
taatattattcctatctgcatgcctgctcattcatcaaattacttacaacctcttgatgttggctgtttttcacccctgaaaggtgcttacggacg

SEQ ID NO: 954 - DNA, 96 bp, Aspergillus thermomutatus
  misc_feature: 569
caaaggcatttactccagataatatcaagagtggattccgagctactggcttaattccattcaacccagatgaggtgcttagacggtttactatcc

SEQ ID NO: 955 - DNA, 96 bp, Aspergillus thermomutatus
  misc_feature: 569
gagtaaatgcctttgcacgagcttcgggatatgctccaaggaaatcaagtttatcaatatgattgaaacccttctgcatctggtcctggactaatc

SEQ ID NO: 956 - DNA, 96 bp, Aspergillus thermomutatus
  misc_feature: 568
tggactaacttcaattctccagttgcttggtaacttgtcatcttgataccagccctcaatatggactgttcccttgaagataatacatggtggtaa

SEQ ID NO: 957 - DNA, 96 bp, Aspergillus thermomutatus
  misc_feature: 568
aattgcttgagattatgaggtgtctttggtgctgaattggttgaccgactgcctggtggtgtaggagtcttgagttggatagtaaaccgtctaagc

SEQ ID NO: 958 - DNA, 96 bp, Aspergillus thermomutatus
  misc_feature: 567
tcgcacttagcacgctgatagttataccgtcgggaataagttgttctcagctcatcacggcgtttaataaagttatacacccaattcttgccgaca

SEQ ID NO: 959 - DNA, 96 bp, Aspergillus thermomutatus
  misc_feature: 567
tcggaatccactcttgatattatctggagtaaatgcctttgcacgagcttcgggatatgctccaaggaaatcaagtttatcaatatgattgaaacc

SEQ ID NO: 960 - DNA, 96 bp, Aspergillus thermomutatus
  misc_feature: 567
gctttatattctattaaactagctaattgtttatcacacataggaggtctactaccaaaagggctgtagggttcaatgtgtggattatgtagtcta

SEQ ID NO: 961 - DNA, 96 bp, Aspergillus thermomutatus
  misc_feature: 567
ataatattattcctatctgcatgcctgctcattcatcaaattacttacaacctcttgatgttggctgtttttcacccctgaaaggtgcttacggac

SEQ ID NO: 962 - DNA, 96 bp, Aspergillus thermomutatus
  misc_feature: 566
ctccaaggaaatcaagtttatcaatatgattgaaacccttctgcatctggtcctggactaatcgtccgtaagcacctttcaggggtgaaaaacagc

SEQ ID NO: 963 - DNA, 96 bp, Aspergillus thermomutatus
  misc_feature: 566
gatggctgccatggccatcgagaaccaagagacgatatctgcctgtcgttcgaccagtagtctcaggaataaagactttttgtagccaacgtatgc

SEQ ID NO: 964 - DNA, 96 bp, Aspergillus thermomutatus
  misc_feature: 565
ttcagctcgaaaacagtgtccatttaatcgccgctgaagtgttgtccgcggaacattgtaaatgcgtgaagcttcacgaacattgcaaatttgctt

SEQ ID NO: 965 - DNA, 96 bp, Aspergillus thermomutatus
  misc_feature: 565
tgagaataatattattcctatctgcatgcctgctcattcatcaaattacttacaacctcttgatgttggctgtttttcacccctgaaaggtgctta

SEQ ID NO: 966 - DNA, 96 bp, Aspergillus thermomutatus
  misc_feature: 565
tcagcggcgattaaatggacactgttttcgagctgaacaacgcgccaactcacataaattgactaaagctgaagaggaatcgcttatacagtggat

SEQ ID NO: 967 - DNA, 96 bp, Aspergillus thermomutatus
  misc_feature: 565
tagatggctgccatggccatcgagaaccaagagacgatatctgcctgtcgttcgaccagtagtctcaggaataaagactttttgtagccaacgtat

SEQ ID NO: 968 - DNA, 96 bp, Aspergillus thermomutatus
  misc_feature: 565
gttcagctcgaaaacagtgtccatttaatcgccgctgaagtgttgtccgcggaacattgtaaatgcgtgaagcttcacgaacattgcaaatttgct

SEQ ID NO: 969 - DNA, 96 bp, Aspergillus thermomutatus
  misc_feature: 565
gactaacttcaattctccagttgcttggtaacttgtcatcttgataccagccctcaatatggactgttcccttgaagataatacatggtggtaaag

SEQ ID NO: 970 - DNA, 96 bp, Aspergillus thermomutatus
  misc_feature: 564
tctatccaggaaggccgggacctcatacaaagtaggaatcaggctgctgaagctttatctactatacctatggaaacagcatcttcagcagaacaa

SEQ ID NO: 971 - DNA, 96 bp, Aspergillus thermomutatus
  misc_feature: 564
ctatccaggaaggccgggacctcatacaaagtaggaatcaggctgctgaagctttatctactatacctatggaaacagcatcttcagcagaacaat

SEQ ID NO: 972 - DNA, 96 bp, Aspergillus thermomutatus
  misc_feature: 563
tttcagctctagttactaccttagcagtagcaattagacccatcgcatatccagtctcatcaaagttgtagatatcttcgtacgcgatcccatatt

SEQ ID NO: 973 - DNA, 96 bp, Aspergillus thermomutatus
  misc_feature: 563
ggactaacttcaattctccagttgcttggtaacttgtcatcttgataccagccctcaatatggactgttcccttgaagataatacatggtggtaaa

SEQ ID NO: 974 - DNA, 96 bp, Aspergillus thermomutatus
  misc_feature: 563
aatattattctcactgcaaatattgtcgaattcaggggttagatggctgccatggccatcgagaaccaagagacgatatctgcctgtcgttcgacc

SEQ ID NO: 975 - DNA, 96 bp, Aspergillus thermomutatus
  misc_feature: 563
atatgacagtcactgcaacgtggtggcgcccgtgtagagcattgttctgctgaagatgctgtttccataggtatagtagataaagcttcagcagcc

SEQ ID NO: 976 - DNA, 96 bp, Aspergillus thermomutatus
  misc_feature: 563
aataatattattctcactgcaaatattgtcgaattcaggggttagatggctgccatggccatcgagaaccaagagacgatatctgcctgtcgttcg

SEQ ID NO: 977 - DNA, 96 bp, Aspergillus thermomutatus
  misc_feature: 563
agatggctgccatggccatcgagaaccaagagacgatatctgcctgtcgttcgaccagtagtctcaggaataaagactttttgtagccaacgtatg

SEQ ID NO: 978 - DNA, 96 bp, Aspergillus thermomutatus
  misc_feature: 563
accgtcgggaataagttgttctcagctcatcacggcgtttaataaagttatacacccaattcttgccgacaggttgaatatcagtaaaccctcgct

SEQ ID NO: 979 - DNA, 96 bp, Aspergillus thermomutatus
  misc_feature: 562
tactatccaactcaagactcctacaccaccaggcagtcggtcaaccaattcagcaccaaagacacctcataatctcaagcaattagagaagcaggc

SEQ ID NO: 980 - DNA, 96 bp, Aspergillus thermomutatus
  misc_feature: 562
taatattattctcactgcaaatattgtcgaattcaggggttagatggctgccatggccatcgagaaccaagagacgatatctgcctgtcgttcgac

SEQ ID NO: 981 - DNA, 96 bp, Aspergillus thermomutatus
  misc_feature: 562
gtgagaataatattattcctatctgcatgcctgctcattcatcaaattacttacaacctcttgatgttggctgtttttcacccctgaaaggtgctt

SEQ ID NO: 982 - DNA, 96 bp, Aspergillus thermomutatus
  misc_feature: 562
atggctgccatggccatcgagaaccaagagacgatatctgcctgtcgttcgaccagtagtctcaggaataaagactttttgtagccaacgtatgcc

SEQ ID NO: 983 - DNA, 96 bp, Aspergillus thermomutatus
  misc_feature: 562
ccgtcgggaataagttgttctcagctcatcacggcgtttaataaagttatacacccaattcttgccgacaggttgaatatcagtaaaccctcgctg

SEQ ID NO: 984 - DNA, 96 bp, Aspergillus thermomutatus
  misc_feature: 561
ttagatggctgccatggccatcgagaaccaagagacgatatctgcctgtcgttcgaccagtagtctcaggaataaagactttttgtagccaacgta

SEQ ID NO: 985 - DNA, 96 bp, Aspergillus thermomutatus
  misc_feature: 561
ataatattattctcactgcaaatattgtcgaattcaggggttagatggctgccatggccatcgagaaccaagagacgatatctgcctgtcgttcga

SEQ ID NO: 986 - DNA, 96 bp, Aspergillus thermomutatus
  misc_feature: 561
gctccaaggaaatcaagtttatcaatatgattgaaacccttctgcatctggtcctggactaatcgtccgtaagcacctttcaggggtgaaaaacag

SEQ ID NO: 987 - DNA, 96 bp, Aspergillus thermomutatus
  misc_feature: 561
cagaaggactttctatccaggaaggccgggacctcatacaaagtaggaatcaggctgctgaagctttatctactatacctatggaaacagcatctt

SEQ ID NO: 988 - DNA, 96 bp, Aspergillus thermomutatus
  misc_feature: 561
cacgctgatagttataccgtcgggaataagttgttctcagctcatcacggcgtttaataaagttatacacccaattcttgccgacaggttgaatat

SEQ ID NO: 989 - DNA, 96 bp, Aspergillus thermomutatus
  misc_feature: 560
ttcagcggcgattaaatggacactgttttcgagctgaacaacgcgccaactcacataaattgactaaagctgaagaggaatcgcttatacagtgga

SEQ ID NO: 990 - DNA, 96 bp, Aspergillus thermomutatus
  misc_feature: 560
tagataaagcttcagcagcctgattcctactttgtatgaggtcccggccttcctggatagaaagtccttctgtagaggctatctgctttgtagatc

SEQ ID NO: 991 - DNA, 96 bp, Aspergillus thermomutatus
  misc_feature: 559
gcgatcccatattgcatgatcgtgatttgtacacgattaaaccattcctggataacctttgggtcctcgcacttagcacgctgatagttataccgt

SEQ ID NO: 992 - DNA, 96 bp, Aspergillus thermomutatus
  misc_feature: 559
gcctgggaatcgcgaatgggtcacatctattgagtgtatcaactctcaaggatgggctttaccaccatgtattatcttcaagggaacagtccatat

SEQ ID NO: 993 - DNA, 96 bp, Aspergillus thermomutatus
  misc_feature: 558
ttctccagttgcttggtaacttgtcatcttgataccagccctcaatatggactgttcccttgaagataatacatggtggtaaagcccatccttgag

SEQ ID NO: 994 - DNA, 96 bp, Aspergillus thermomutatus
  misc_feature: 557
aggcatttactccagataatatcaagagtggattccgagctactggcttaattccattcaacccagatgaggtgcttagacggtttactatccaac

SEQ ID NO: 995 - DNA, 96 bp, Aspergillus thermomutatus
  misc_feature: 557
gaataatattattctcactgcaaatattgtcgaattcaggggttagatggctgccatggccatcgagaaccaagagacgatatctgcctgtcgttc

SEQ ID NO: 996 - DNA, 96 bp, Aspergillus thermomutatus
  misc_feature: 556
ttctatccaggaaggccgggacctcatacaaagtaggaatcaggctgctgaagctttatctactatacctatggaaacagcatcttcagcagaaca

SEQ ID NO: 997 - DNA, 96 bp, Aspergillus thermomutatus
  misc_feature: 556
taccgtcgggaataagttgttctcagctcatcacggcgtttaataaagttatacacccaattcttgccgacaggttgaatatcagtaaaccctcgc

SEQ ID NO: 998 - DNA, 96 bp, Aspergillus thermomutatus
  misc_feature: 556
gtcgggaataagttgttctcagctcatcacggcgtttaataaagttatacacccaattcttgccgacaggttgaatatcagtaaaccctcgctgtg

SEQ ID NO: 999 - DNA, 96 bp, Aspergillus thermomutatus
  misc_feature: 555
ttctatgccctaaaatatgacagtcactgcaacgtggtggcgcccgtgtagagcattgttctgctgaagatgctgtttccataggtatagtagata

SEQ ID NO: 1000 - DNA, 96 bp, Aspergillus thermomutatus
  misc_feature: 555
cagcggcgattaaatggacactgttttcgagctgaacaacgcgccaactcacataaattgactaaagctgaagaggaatcgcttatacagtggata

SEQ ID NO: 1001 - DNA, 96 bp, Aspergillus thermomutatus
  misc_feature: 555
cgatcccatattgcatgatcgtgatttgtacacgattaaaccattcctggataacctttgggtcctcgcacttagcacgctgatagttataccgtc

SEQ ID NO: 1002 - DNA, 96 bp, Aspergillus thermomutatus
  misc_feature: 555
actaaagctgctttagatcagcttataaagggttgtgagatggctatgaatagtgctattcttctagctcaagagaatcaggaactacgagctgcg

SEQ ID NO: 1003 - DNA, 96 bp, Aspergillus thermomutatus
  misc_feature: 554
gctgccatggccatcgagaaccaagagacgatatctgcctgtcgttcgaccagtagtctcaggaataaagactttttgtagccaacgtatgccaat

SEQ ID NO: 1004 - DNA, 96 bp, Aspergillus thermomutatus
  misc_feature: 554
cagtgagaataatattattcctatctgcatgcctgctcattcatcaaattacttacaacctcttgatgttggctgtttttcacccctgaaaggtgc

SEQ ID NO: 1005 - DNA, 96 bp, Aspergillus thermomutatus
  misc_feature: 553
atatgctccaaggaaatcaagtttatcaatatgattgaaacccttctgcatctggtcctggactaatcgtccgtaagcacctttcaggggtgaaaa

SEQ ID NO: 1006 - DNA, 96 bp, Aspergillus thermomutatus
  misc_feature: 553
gatatgctccaaggaaatcaagtttatcaatatgattgaaacccttctgcatctggtcctggactaatcgtccgtaagcacctttcaggggtgaaa

SEQ ID NO: 1007 - DNA, 96 bp, Aspergillus thermomutatus
  misc_feature: 553
ggatatgctccaaggaaatcaagtttatcaatatgattgaaacccttctgcatctggtcctggactaatcgtccgtaagcacctttcaggggtgaa

SEQ ID NO: 1008 - DNA, 96 bp, Aspergillus thermomutatus
  misc_feature: 553
gatagttataccgtcgggaataagttgttctcagctcatcacggcgtttaataaagttatacacccaattcttgccgacaggttgaatatcagtaa

SEQ ID NO: 1009 - DNA, 96 bp, Aspergillus thermomutatus
  misc_feature: 553
tcgggaataagttgttctcagctcatcacggcgtttaataaagttatacacccaattcttgccgacaggttgaatatcagtaaaccctcgctgtga

SEQ ID NO: 1010 - DNA, 96 bp, Aspergillus thermomutatus
  misc_feature: 553
atgctccaaggaaatcaagtttatcaatatgattgaaacccttctgcatctggtcctggactaatcgtccgtaagcacctttcaggggtgaaaaac

SEQ ID NO: 1011 - DNA, 96 bp, Aspergillus thermomutatus
  misc_feature: 552
cgtcgggaataagttgttctcagctcatcacggcgtttaataaagttatacacccaattcttgccgacaggttgaatatcagtaaaccctcgctgt

SEQ ID NO: 1012 - DNA, 96 bp, Aspergillus thermomutatus
  misc_feature: 552
agtgagaataatattattcctatctgcatgcctgctcattcatcaaattacttacaacctcttgatgttggctgtttttcacccctgaaaggtgct

SEQ ID NO: 1013 - DNA, 96 bp, Aspergillus thermomutatus
  misc_feature: 551
tggctgccatggccatcgagaaccaagagacgatatctgcctgtcgttcgaccagtagtctcaggaataaagactttttgtagccaacgtatgcca

SEQ ID NO: 1014 - DNA, 96 bp, Aspergillus thermomutatus
  misc_feature: 551
aatatgacagtcactgcaacgtggtggcgcccgtgtagagcattgttctgctgaagatgctgtttccataggtatagtagataaagcttcagcagc

SEQ ID NO: 1015 - DNA, 96 bp, Aspergillus thermomutatus
  misc_feature: 550
tatgctccaaggaaatcaagtttatcaatatgattgaaacccttctgcatctggtcctggactaatcgtccgtaagcacctttcaggggtgaaaaa

SEQ ID NO: 1016 - DNA, 96 bp, Aspergillus thermomutatus
  misc_feature: 550
agttatgcagcctgggaatcgcgaatgggtcacatctattgagtgtatcaactctcaaggatgggctttaccaccatgtattatcttcaagggaac

SEQ ID NO: 1017 - DNA, 96 bp, Aspergillus thermomutatus
  misc_feature: 550
cagcctgggaatcgcgaatgggtcacatctattgagtgtatcaactctcaaggatgggctttaccaccatgtattatcttcaagggaacagtccat

SEQ ID NO: 1018 - DNA, 96 bp, Aspergillus thermomutatus
  misc_feature: 549
aaggcatttactccagataatatcaagagtggattccgagctactggcttaattccattcaacccagatgaggtgcttagacggtttactatccaa

SEQ ID NO: 1019 - DNA, 96 bp, Aspergillus thermomutatus
  misc_feature: 549
gcggcgattaaatggacactgttttcgagctgaacaacgcgccaactcacataaattgactaaagctgaagaggaatcgcttatacagtggatatt

SEQ ID NO: 1020 - DNA, 96 bp, Aspergillus thermomutatus
  misc_feature: 549
cttgagattatgaggtgtctttggtgctgaattggttgaccgactgcctggtggtgtaggagtcttgagttggatagtaaaccgtctaagcacctc

SEQ ID NO: 1021 - DNA, 96 bp, Aspergillus thermomutatus
  misc_feature: 548
ggctgccatggccatcgagaaccaagagacgatatctgcctgtcgttcgaccagtagtctcaggaataaagactttttgtagccaacgtatgccaa

SEQ ID NO: 1022 - DNA, 96 bp, Aspergillus thermomutatus
  misc_feature: 548
agcctgggaatcgcgaatgggtcacatctattgagtgtatcaactctcaaggatgggctttaccaccatgtattatcttcaagggaacagtccata

SEQ ID NO: 1023 - DNA, 96 bp, Aspergillus thermomutatus
  misc_feature: 548
tactaaagctgctttagatcagcttataaagggttgtgagatggctatgaatagtgctattcttctagctcaagagaatcaggaactacgagctgc

SEQ ID NO: 1024 - DNA, 96 bp, Aspergillus thermomutatus
  misc_feature: 548
atattatctggagtaaatgcctttgcacgagcttcgggatatgctccaaggaaatcaagtttatcaatatgattgaaacccttctgcatctggtcc

SEQ ID NO: 1025 - DNA, 96 bp, Aspergillus thermomutatus
  misc_feature: 547
aaaggcatttactccagataatatcaagagtggattccgagctactggcttaattccattcaacccagatgaggtgcttagacggtttactatcca

SEQ ID NO: 1026 - DNA, 96 bp, Aspergillus thermomutatus
  misc_feature: 547
actaacttcaattctccagttgcttggtaacttgtcatcttgataccagccctcaatatggactgttcccttgaagataatacatggtggtaaagc

SEQ ID NO: 1027 - DNA, 96 bp, Aspergillus thermomutatus
  misc_feature: 547
gctgatagttataccgtcgggaataagttgttctcagctcatcacggcgtttaataaagttatacacccaattcttgccgacaggttgaatatcag

SEQ ID NO: 1028 - DNA, 96 bp, Aspergillus thermomutatus
  misc_feature: 547
gaacccctgtgcgcttatctgtctgaccactaacttcggctcattctcaacccgttccactgcgaatccgtctgctaatcgcagtcgcggcccatt

SEQ ID NO: 1029 - DNA, 96 bp, Aspergillus thermomutatus
  misc_feature: 547
agcggcgattaaatggacactgttttcgagctgaacaacgcgccaactcacataaattgactaaagctgaagaggaatcgcttatacagtggatat

SEQ ID NO: 1030 - DNA, 96 bp, Aspergillus thermomutatus
  misc_feature: 546
tgttcagctcgaaaacagtgtccatttaatcgccgctgaagtgttgtccgcggaacattgtaaatgcgtgaagcttcacgaacattgcaaatttgc

SEQ ID NO: 1031 - DNA, 96 bp, Aspergillus thermomutatus
  misc_feature: 546
aaatatgacagtcactgcaacgtggtggcgcccgtgtagagcattgttctgctgaagatgctgtttccataggtatagtagataaagcttcagcag

SEQ ID NO: 1032 - DNA, 96 bp, Aspergillus thermomutatus
  misc_feature: 546
cagtggatattatctatggatcagcgtggagcagctccccgaccatctcatgttcaagatatggccaatattttgttgtcacagcgagggtttact

SEQ ID NO: 1033 - DNA, 96 bp, Aspergillus thermomutatus
  misc_feature: 545
cgctgatagttataccgtcgggaataagttgttctcagctcatcacggcgtttaataaagttatacacccaattcttgccgacaggttgaatatca

SEQ ID NO: 1034 - DNA, 96 bp, Aspergillus thermomutatus
  misc_feature: 545
cgaacccctgtgcgcttatctgtctgaccactaacttcggctcattctcaacccgttccactgcgaatccgtctgctaatcgcagtcgcggcccat

SEQ ID NO: 1035 - DNA, 96 bp, Aspergillus thermomutatus
  misc_feature: 544
tctatgccctaaaatatgacagtcactgcaacgtggtggcgcccgtgtagagcattgttctgctgaagatgctgtttccataggtatagtagataa

SEQ ID NO: 1036 - DNA, 96 bp, Aspergillus thermomutatus
  misc_feature: 544
attctccagttgcttggtaacttgtcatcttgataccagccctcaatatggactgttcccttgaagataatacatggtggtaaagcccatccttga

SEQ ID NO: 1037 - DNA, 96 bp, Aspergillus thermomutatus
  misc_feature: 543
ctcttgatattatctggagtaaatgcctttgcacgagcttcgggatatgctccaaggaaatcaagtttatcaatatgattgaaacccttctgcatc

SEQ ID NO: 1038 - DNA, 96 bp, Aspergillus thermomutatus
  misc_feature: 543
caagaagctgcttagtgagcgtgggcatagtcccgctacccctactaaagctgctttagatcagcttataaagggttgtgagatggctatgaatag

SEQ ID NO: 1039 - DNA, 96 bp, Aspergillus thermomutatus
  misc_feature: 542
tgctccaaggaaatcaagtttatcaatatgattgaaacccttctgcatctggtcctggactaatcgtccgtaagcacctttcaggggtgaaaaaca

SEQ ID NO: 1040 - DNA, 96 bp, Aspergillus thermomutatus
  misc_feature: 542
ctccagttgcttggtaacttgtcatcttgataccagccctcaatatggactgttcccttgaagataatacatggtggtaaagcccatccttgagag

SEQ ID NO: 1041 - DNA, 96 bp, Aspergillus thermomutatus
  misc_feature: 541
gtggatattatctatggatcagcgtggagcagctccccgaccatctcatgttcaagatatggccaatattttgttgtcacagcgagggtttactga

SEQ ID NO: 1042 - DNA, 96 bp, Aspergillus thermomutatus
  misc_feature: 541
acagtggatattatctatggatcagcgtggagcagctccccgaccatctcatgttcaagatatggccaatattttgttgtcacagcgagggtttac

SEQ ID NO: 1043 - DNA, 96 bp, Aspergillus thermomutatus
  misc_feature: 541
cggaatccactcttgatattatctggagtaaatgcctttgcacgagcttcgggatatgctccaaggaaatcaagtttatcaatatgattgaaaccc

SEQ ID NO: 1044 - DNA, 96 bp, Aspergillus thermomutatus
  misc_feature: 541
ccctgtgcgcttatctgtctgaccactaacttcggctcattctcaacccgttccactgcgaatccgtctgctaatcgcagtcgcggcccattagcc

SEQ ID NO: 1045 - DNA, 96 bp, Aspergillus thermomutatus
  misc_feature: 541
cccctgtgcgcttatctgtctgaccactaacttcggctcattctcaacccgttccactgcgaatccgtctgctaatcgcagtcgcggcccattagc

SEQ ID NO: 1046 - DNA, 96 bp, Aspergillus thermomutatus
  misc_feature: 541
ctgatagttataccgtcgggaataagttgttctcagctcatcacggcgtttaataaagttatacacccaattcttgccgacaggttgaatatcagt

SEQ ID NO: 1047 - DNA, 96 bp, Aspergillus thermomutatus
  misc_feature: 540
cactgtataagcgattcctcttcagctttagtcaatttatgtgagttggcgcgttgttcagctcgaaaacagtgtccatttaatcgccgctgaagt

SEQ ID NO: 1048 - DNA, 96 bp, Aspergillus thermomutatus
  misc_feature: 540
aattctccagttgcttggtaacttgtcatcttgataccagccctcaatatggactgttcccttgaagataatacatggtggtaaagcccatccttg

SEQ ID NO: 1049 - DNA, 96 bp, Aspergillus thermomutatus
  misc_feature: 540
acagaaggactttctatccaggaaggccgggacctcatacaaagtaggaatcaggctgctgaagctttatctactatacctatggaaacagcatct

SEQ ID NO: 1050 - DNA, 96 bp, Aspergillus thermomutatus
  misc_feature: 539
tgcagcctgggaatcgcgaatgggtcacatctattgagtgtatcaactctcaaggatgggctttaccaccatgtattatcttcaagggaacagtcc

SEQ ID NO: 1051 - DNA, 96 bp, Aspergillus thermomutatus
  misc_feature: 539
tgatagttataccgtcgggaataagttgttctcagctcatcacggcgtttaataaagttatacacccaattcttgccgacaggttgaatatcagta

SEQ ID NO: 1052 - DNA, 96 bp, Aspergillus thermomutatus
  misc_feature: 539
tctccagttgcttggtaacttgtcatcttgataccagccctcaatatggactgttcccttgaagataatacatggtggtaaagcccatccttgaga

SEQ ID NO: 1053 - DNA, 96 bp, Aspergillus thermomutatus
  misc_feature: 539
aacccctgtgcgcttatctgtctgaccactaacttcggctcattctcaacccgttccactgcgaatccgtctgctaatcgcagtcgcggcccatta

SEQ ID NO: 1054 - DNA, 96 bp, Aspergillus thermomutatus
  misc_feature: 539
atacagtggatattatctatggatcagcgtggagcagctccccgaccatctcatgttcaagatatggccaatattttgttgtcacagcgagggttt

SEQ ID NO: 1055 - DNA, 96 bp, Aspergillus thermomutatus
  misc_feature: 538
acgctgatagttataccgtcgggaataagttgttctcagctcatcacggcgtttaataaagttatacacccaattcttgccgacaggttgaatatc

SEQ ID NO: 1056 - DNA, 96 bp, Aspergillus thermomutatus
  misc_feature: 538
acccctgtgcgcttatctgtctgaccactaacttcggctcattctcaacccgttccactgcgaatccgtctgctaatcgcagtcgcggcccattag

SEQ ID NO: 1057 - DNA, 96 bp, Aspergillus thermomutatus
  misc_feature: 538
actgtataagcgattcctcttcagctttagtcaatttatgtgagttggcgcgttgttcagctcgaaaacagtgtccatttaatcgccgctgaagtg

SEQ ID NO: 1058 - DNA, 96 bp, Aspergillus thermomutatus
  misc_feature: 537
ttatgcagcctgggaatcgcgaatgggtcacatctattgagtgtatcaactctcaaggatgggctttaccaccatgtattatcttcaagggaacag

SEQ ID NO: 1059 - DNA, 96 bp, Aspergillus thermomutatus
  misc_feature: 537
attgcttgagattatgaggtgtctttggtgctgaattggttgaccgactgcctggtggtgtaggagtcttgagttggatagtaaaccgtctaagca

SEQ ID NO: 1060 - DNA, 96 bp, Aspergillus thermomutatus
  misc_feature: 537
tcaagaagctgcttagtgagcgtgggcatagtcccgctacccctactaaagctgctttagatcagcttataaagggttgtgagatggctatgaata

SEQ ID NO: 1061 - DNA, 96 bp, Aspergillus thermomutatus
  misc_feature: 536
ccatggccatcgagaaccaagagacgatatctgcctgtcgttcgaccagtagtctcaggaataaagactttttgtagccaacgtatgccaatttga

SEQ ID NO: 1062 - DNA, 96 bp, Aspergillus thermomutatus
  misc_feature: 536
ctgtctgaccactaacttcggctcattctcaacccgttccactgcgaatccgtctgctaatcgcagtcgcggcccattagcctcaatcgtcacccc

SEQ ID NO: 1063 - DNA, 96 bp, Aspergillus thermomutatus
  misc_feature: 536
cctgggaatcgcgaatgggtcacatctattgagtgtatcaactctcaaggatgggctttaccaccatgtattatcttcaagggaacagtccatatt

SEQ ID NO: 1064 - DNA, 96 bp, Aspergillus thermomutatus
  misc_feature: 536
aagaagctgcttagtgagcgtgggcatagtcccgctacccctactaaagctgctttagatcagcttataaagggttgtgagatggctatgaatagt

SEQ ID NO: 1065 - DNA, 96 bp, Aspergillus thermomutatus
  misc_feature: 535
tttactatccaactcaagactcctacaccaccaggcagtcggtcaaccaattcagcaccaaagacacctcataatctcaagcaattagagaagcag

SEQ ID NO: 1066 - DNA, 96 bp, Aspergillus thermomutatus
  misc_feature: 535
tctgtctgaccactaacttcggctcattctcaacccgttccactgcgaatccgtctgctaatcgcagtcgcggcccattagcctcaatcgtcaccc

SEQ ID NO: 1067 - DNA, 96 bp, Aspergillus thermomutatus
  misc_feature: 535
tatgcagcctgggaatcgcgaatgggtcacatctattgagtgtatcaactctcaaggatgggctttaccaccatgtattatcttcaagggaacagt

SEQ ID NO: 1068 - DNA, 96 bp, Aspergillus thermomutatus
  misc_feature: 535
tacagtggatattatctatggatcagcgtggagcagctccccgaccatctcatgttcaagatatggccaatattttgttgtcacagcgagggttta

SEQ ID NO: 1069 - DNA, 96 bp, Aspergillus thermomutatus
  misc_feature: 535
cggcgattaaatggacactgttttcgagctgaacaacgcgccaactcacataaattgactaaagctgaagaggaatcgcttatacagtggatatta

SEQ ID NO: 1070 - DNA, 96 bp, Aspergillus thermomutatus
  misc_feature: 534
gttatgcagcctgggaatcgcgaatgggtcacatctattgagtgtatcaactctcaaggatgggctttaccaccatgtattatcttcaagggaaca

SEQ ID NO: 1071 - DNA, 96 bp, Aspergillus thermomutatus
  misc_feature: 534
gtttactatccaactcaagactcctacaccaccaggcagtcggtcaaccaattcagcaccaaagacacctcataatctcaagcaattagagaagca

SEQ ID NO: 1072 - DNA, 96 bp, Aspergillus thermomutatus
  misc_feature: 534
tcaattctccagttgcttggtaacttgtcatcttgataccagccctcaatatggactgttcccttgaagataatacatggtggtaaagcccatcct

SEQ ID NO: 1073 - DNA, 96 bp, Aspergillus thermomutatus
  misc_feature: 534
tacagaaggactttctatccaggaaggccgggacctcatacaaagtaggaatcaggctgctgaagctttatctactatacctatggaaacagcatc

SEQ ID NO: 1074 - DNA, 96 bp, Aspergillus thermomutatus
  misc_feature: 534
gaagctgcttagtgagcgtgggcatagtcccgctacccctactaaagctgctttagatcagcttataaagggttgtgagatggctatgaatagtgc

SEQ ID NO: 1075 - DNA, 96 bp, Aspergillus thermomutatus
  misc_feature: 533
gcagcctgggaatcgcgaatgggtcacatctattgagtgtatcaactctcaaggatgggctttaccaccatgtattatcttcaagggaacagtcca

SEQ ID NO: 1076 - DNA, 96 bp, Aspergillus thermomutatus
  misc_feature: 533
atatttgcagtgagaataatattattcctatctgcatgcctgctcattcatcaaattacttacaacctcttgatgttggctgtttttcacccctga

SEQ ID NO: 1077 - DNA, 96 bp, Aspergillus thermomutatus
  misc_feature: 533
gccatggccatcgagaaccaagagacgatatctgcctgtcgttcgaccagtagtctcaggaataaagactttttgtagccaacgtatgccaatttg

SEQ ID NO: 1078 - DNA, 96 bp, Aspergillus thermomutatus
  misc_feature: 533
caattctccagttgcttggtaacttgtcatcttgataccagccctcaatatggactgttcccttgaagataatacatggtggtaaagcccatcctt

SEQ ID NO: 1079 - DNA, 96 bp, Aspergillus thermomutatus
  misc_feature: 532
ttatctgtctgaccactaacttcggctcattctcaacccgttccactgcgaatccgtctgctaatcgcagtcgcggcccattagcctcaatcgtca

SEQ ID NO: 1080 - DNA, 96 bp, Aspergillus thermomutatus
  misc_feature: 532
cttatctgtctgaccactaacttcggctcattctcaacccgttccactgcgaatccgtctgctaatcgcagtcgcggcccattagcctcaatcgtc

SEQ ID NO: 1081 - DNA, 96 bp, Aspergillus thermomutatus
  misc_feature: 532
cttatacagtggatattatctatggatcagcgtggagcagctccccgaccatctcatgttcaagatatggccaatattttgttgtcacagcgaggg

SEQ ID NO: 1082 - DNA, 96 bp, Aspergillus thermomutatus
  misc_feature: 531
gtgcgcttatctgtctgaccactaacttcggctcattctcaacccgttccactgcgaatccgtctgctaatcgcagtcgcggcccattagcctcaa

SEQ ID NO: 1083 - DNA, 96 bp, Aspergillus thermomutatus
  misc_feature: 531
tggatattatctatggatcagcgtggagcagctccccgaccatctcatgttcaagatatggccaatattttgttgtcacagcgagggtttactgat

SEQ ID NO: 1084 - DNA, 96 bp, Aspergillus thermomutatus
  misc_feature: 531
tcttgatattatctggagtaaatgcctttgcacgagcttcgggatatgctccaaggaaatcaagtttatcaatatgattgaaacccttctgcatct

SEQ ID NO: 1085 - DNA, 96 bp, Aspergillus thermomutatus
  misc_feature: 531
gaatccactcttgatattatctggagtaaatgcctttgcacgagcttcgggatatgctccaaggaaatcaagtttatcaatatgattgaaaccctt

SEQ ID NO: 1086 - DNA, 96 bp, Aspergillus thermomutatus
  misc_feature: 531
agtggatattatctatggatcagcgtggagcagctccccgaccatctcatgttcaagatatggccaatattttgttgtcacagcgagggtttactg

SEQ ID NO: 1087 - DNA, 96 bp, Aspergillus thermomutatus
  misc_feature: 530
atagttataccgtcgggaataagttgttctcagctcatcacggcgtttaataaagttatacacccaattcttgccgacaggttgaatatcagtaaa

SEQ ID NO: 1088 - DNA, 96 bp, Aspergillus thermomutatus
  misc_feature: 530
ttgcttgagattatgaggtgtctttggtgctgaattggttgaccgactgcctggtggtgtaggagtcttgagttggatagtaaaccgtctaagcac

SEQ ID NO: 1089 - DNA, 96 bp, Aspergillus thermomutatus
  misc_feature: 530
tgcgcttatctgtctgaccactaacttcggctcattctcaacccgttccactgcgaatccgtctgctaatcgcagtcgcggcccattagcctcaat

SEQ ID NO: 1090 - DNA, 96 bp, Aspergillus thermomutatus
  misc_feature: 530
tcaaggcctgctgaaaccgttgctgattccagaccgcaaatggcgcgagatagctatcgacttcatcaccaagctacctacctccggcgactgtga

SEQ ID NO: 1091 - DNA, 96 bp, Aspergillus thermomutatus
  misc_feature: 530
gtcaaggcctgctgaaaccgttgctgattccagaccgcaaatggcgcgagatagctatcgacttcatcaccaagctacctacctccggcgactgtg

SEQ ID NO: 1092 - DNA, 96 bp, Aspergillus thermomutatus
  misc_feature: 530
ctgtgcgcttatctgtctgaccactaacttcggctcattctcaacccgttccactgcgaatccgtctgctaatcgcagtcgcggcccattagcctc

SEQ ID NO: 1093 - DNA, 96 bp, Aspergillus thermomutatus
  misc_feature: 530
atgcagcctgggaatcgcgaatgggtcacatctattgagtgtatcaactctcaaggatgggctttaccaccatgtattatcttcaagggaacagtc

SEQ ID NO: 1094 - DNA, 96 bp, Aspergillus thermomutatus
  misc_feature: 530
cataatgtgttccatgttagtctgttgcgtcctgcggcgaacgatcctttcccaagccagttgagcactgactaccagccgcccgctgtgctagtc

SEQ ID NO: 1095 - DNA, 96 bp, Aspergillus thermomutatus
  misc_feature: 530
aatccactcttgatattatctggagtaaatgcctttgcacgagcttcgggatatgctccaaggaaatcaagtttatcaatatgattgaaacccttc

SEQ ID NO: 1096 - DNA, 96 bp, Aspergillus thermomutatus
  misc_feature: 530
cttgatattatctggagtaaatgcctttgcacgagcttcgggatatgctccaaggaaatcaagtttatcaatatgattgaaacccttctgcatctg

SEQ ID NO: 1097 - DNA, 96 bp, Aspergillus thermomutatus
  misc_feature: 530
cctgtgcgcttatctgtctgaccactaacttcggctcattctcaacccgttccactgcgaatccgtctgctaatcgcagtcgcggcccattagcct

SEQ ID NO: 1098 - DNA, 96 bp, Aspergillus thermomutatus
  misc_feature: 530
agaagctgcttagtgagcgtgggcatagtcccgctacccctactaaagctgctttagatcagcttataaagggttgtgagatggctatgaatagtg

SEQ ID NO: 1099 - DNA, 96 bp, Aspergillus thermomutatus
  misc_feature: 529
tgtgcgcttatctgtctgaccactaacttcggctcattctcaacccgttccactgcgaatccgtctgctaatcgcagtcgcggcccattagcctca

SEQ ID NO: 1100 - DNA, 96 bp, Aspergillus thermomutatus
  misc_feature: 529
tgtctgaccactaacttcggctcattctcaacccgttccactgcgaatccgtctgctaatcgcagtcgcggcccattagcctcaatcgtcaccccc

SEQ ID NO: 1101 - DNA, 96 bp, Aspergillus thermomutatus
  misc_feature: 529
ctggagtaaatgcctttgcacgagcttcgggatatgctccaaggaaatcaagtttatcaatatgattgaaacccttctgcatctggtcctggacta

SEQ ID NO: 1102 - DNA, 96 bp, Aspergillus thermomutatus
  misc_feature: 527
tctggagtaaatgcctttgcacgagcttcgggatatgctccaaggaaatcaagtttatcaatatgattgaaacccttctgcatctggtcctggact

SEQ ID NO: 1103 - DNA, 96 bp, Aspergillus thermomutatus
  misc_feature: 527
taattgcttgagattatgaggtgtctttggtgctgaattggttgaccgactgcctggtggtgtaggagtcttgagttggatagtaaaccgtctaag

SEQ ID NO: 1104 - DNA, 96 bp, Aspergillus thermomutatus
  misc_feature: 527
aaagcagatagcctctacagaaggactttctatccaggaaggccgggacctcatacaaagtaggaatcaggctgctgaagctttatctactatacc

SEQ ID NO: 1105 - DNA, 96 bp, Aspergillus thermomutatus
  misc_feature: 527
gcataatgtgttccatgttagtctgttgcgtcctgcggcgaacgatcctttcccaagccagttgagcactgactaccagccgcccgctgtgctagt

SEQ ID NO: 1106 - DNA, 96 bp, Aspergillus thermomutatus
  misc_feature: 527
ctacagaaggactttctatccaggaaggccgggacctcatacaaagtaggaatcaggctgctgaagctttatctactatacctatggaaacagcat

SEQ ID NO: 1107 - DNA, 96 bp, Aspergillus thermomutatus
  misc_feature: 526
tatctgtctgaccactaacttcggctcattctcaacccgttccactgcgaatccgtctgctaatcgcagtcgcggcccattagcctcaatcgtcac

SEQ ID NO: 1108 - DNA, 96 bp, Aspergillus thermomutatus
  misc_feature: 526
atctgtctgaccactaacttcggctcattctcaacccgttccactgcgaatccgtctgctaatcgcagtcgcggcccattagcctcaatcgtcacc

SEQ ID NO: 1109 - DNA, 96 bp, Aspergillus thermomutatus
  misc_feature: 526
ggaatccactcttgatattatctggagtaaatgcctttgcacgagcttcgggatatgctccaaggaaatcaagtttatcaatatgattgaaaccct

SEQ ID NO: 1110 - DNA, 96 bp, Aspergillus thermomutatus
  misc_feature: 526
ccatcgagaaccaagagacgatatctgcctgtcgttcgaccagtagtctcaggaataaagactttttgtagccaacgtatgccaatttgatctgtt

SEQ ID NO: 1111 - DNA, 96 bp, Aspergillus thermomutatus
  misc_feature: 525
ttatacagtggatattatctatggatcagcgtggagcagctccccgaccatctcatgttcaagatatggccaatattttgttgtcacagcgagggt

SEQ ID NO: 1112 - DNA, 96 bp, Aspergillus thermomutatus
  misc_feature: 525
ccactcttgatattatctggagtaaatgcctttgcacgagcttcgggatatgctccaaggaaatcaagtttatcaatatgattgaaacccttctgc

SEQ ID NO: 1113 - DNA, 96 bp, Aspergillus thermomutatus
  misc_feature: 523
actctcaaggatgggctttaccaccatgtattatcttcaagggaacagtccatattgagggctggtatcaagatgacaagttaccaagcaactgga

SEQ ID NO: 1114 - DNA, 96 bp, Aspergillus thermomutatus
  misc_feature: 523
tccactcttgatattatctggagtaaatgcctttgcacgagcttcgggatatgctccaaggaaatcaagtttatcaatatgattgaaacccttctg

SEQ ID NO: 1115 - DNA, 96 bp, Aspergillus thermomutatus
  misc_feature: 523
gcttgagattatgaggtgtctttggtgctgaattggttgaccgactgcctggtggtgtaggagtcttgagttggatagtaaaccgtctaagcacct

SEQ ID NO: 1116 - DNA, 96 bp, Aspergillus thermomutatus
  misc_feature: 522
tatacagtggatattatctatggatcagcgtggagcagctccccgaccatctcatgttcaagatatggccaatattttgttgtcacagcgagggtt

SEQ ID NO: 1117 - DNA, 96 bp, Aspergillus thermomutatus
  misc_feature: 522
acaatatttgcagtgagaataatattattcctatctgcatgcctgctcattcatcaaattacttacaacctcttgatgttggctgtttttcacccc

SEQ ID NO: 1118 - DNA, 96 bp, Aspergillus thermomutatus
  misc_feature: 522
ggcgattaaatggacactgttttcgagctgaacaacgcgccaactcacataaattgactaaagctgaagaggaatcgcttatacagtggatattat

SEQ ID NO: 1119 - DNA, 96 bp, Aspergillus thermomutatus
  misc_feature: 521
ctgccatggccatcgagaaccaagagacgatatctgcctgtcgttcgaccagtagtctcaggaataaagactttttgtagccaacgtatgccaatt

SEQ ID NO: 1120 - DNA, 96 bp, Aspergillus thermomutatus
  misc_feature: 519
cctttgcacgagcttcgggatatgctccaaggaaatcaagtttatcaatatgattgaaacccttctgcatctggtcctggactaatcgtccgtaag

SEQ ID NO: 1121 - DNA, 96 bp, Aspergillus thermomutatus
  misc_feature: 518
gcttatctgtctgaccactaacttcggctcattctcaacccgttccactgcgaatccgtctgctaatcgcagtcgcggcccattagcctcaatcgt

SEQ ID NO: 1122 - DNA, 96 bp, Aspergillus thermomutatus
  misc_feature: 518
gatcccatattgcatgatcgtgatttgtacacgattaaaccattcctggataacctttgggtcctcgcacttagcacgctgatagttataccgtcg

SEQ ID NO: 1123 - DNA, 96 bp, Aspergillus thermomutatus
  misc_feature: 518
cgtcaaggcctgctgaaaccgttgctgattccagaccgcaaatggcgcgagatagctatcgacttcatcaccaagctacctacctccggcgactgt

SEQ ID NO: 1124 - DNA, 96 bp, Aspergillus thermomutatus
  misc_feature: 518
atccactcttgatattatctggagtaaatgcctttgcacgagcttcgggatatgctccaaggaaatcaagtttatcaatatgattgaaacccttct

SEQ ID NO: 1125 - DNA, 96 bp, Aspergillus thermomutatus
  misc_feature: 517
ctaattgcttgagattatgaggtgtctttggtgctgaattggttgaccgactgcctggtggtgtaggagtcttgagttggatagtaaaccgtctaa

SEQ ID NO: 1126 - DNA, 96 bp, Aspergillus thermomutatus
  misc_feature: 517
tgccatggccatcgagaaccaagagacgatatctgcctgtcgttcgaccagtagtctcaggaataaagactttttgtagccaacgtatgccaattt

SEQ ID NO: 1127 - DNA, 96 bp, Aspergillus thermomutatus
  misc_feature: 517
ctttgcacgagcttcgggatatgctccaaggaaatcaagtttatcaatatgattgaaacccttctgcatctggtcctggactaatcgtccgtaagc

SEQ ID NO: 1128 - DNA, 96 bp, Aspergillus thermomutatus
  misc_feature: 517
catggccatcgagaaccaagagacgatatctgcctgtcgttcgaccagtagtctcaggaataaagactttttgtagccaacgtatgccaatttgat

SEQ ID NO: 1129 - DNA, 96 bp, Aspergillus thermomutatus
  misc_feature: 517
actcttgatattatctggagtaaatgcctttgcacgagcttcgggatatgctccaaggaaatcaagtttatcaatatgattgaaacccttctgcat

SEQ ID NO: 1130 - DNA, 96 bp, Aspergillus thermomutatus
  misc_feature: 516
tctaattgcttgagattatgaggtgtctttggtgctgaattggttgaccgactgcctggtggtgtaggagtcttgagttggatagtaaaccgtcta

SEQ ID NO: 1131 - DNA, 96 bp, Aspergillus thermomutatus
  misc_feature: 516
cgcttatctgtctgaccactaacttcggctcattctcaacccgttccactgcgaatccgtctgctaatcgcagtcgcggcccattagcctcaatcg

SEQ ID NO: 1132 - DNA, 96 bp, Aspergillus thermomutatus
  misc_feature: 515
ctctaattgcttgagattatgaggtgtctttggtgctgaattggttgaccgactgcctggtggtgtaggagtcttgagttggatagtaaaccgtct

SEQ ID NO: 1133 - DNA, 96 bp, Aspergillus thermomutatus
  misc_feature: 514
cactcttgatattatctggagtaaatgcctttgcacgagcttcgggatatgctccaaggaaatcaagtttatcaatatgattgaaacccttctgca

SEQ ID NO: 1134 - DNA, 96 bp, Aspergillus thermomutatus
  misc_feature: 514
atcaactctcaaggatgggctttaccaccatgtattatcttcaagggaacagtccatattgagggctggtatcaagatgacaagttaccaagcaac

SEQ ID NO: 1135 - DNA, 96 bp, Aspergillus thermomutatus
  misc_feature: 514
caatatttgcagtgagaataatattattcctatctgcatgcctgctcattcatcaaattacttacaacctcttgatgttggctgtttttcacccct

SEQ ID NO: 1136 - DNA, 96 bp, Aspergillus thermomutatus
  misc_feature: 513
tttgcacgagcttcgggatatgctccaaggaaatcaagtttatcaatatgattgaaacccttctgcatctggtcctggactaatcgtccgtaagca

SEQ ID NO: 1137 - DNA, 96 bp, Aspergillus thermomutatus
  misc_feature: 513
ttgcacgagcttcgggatatgctccaaggaaatcaagtttatcaatatgattgaaacccttctgcatctggtcctggactaatcgtccgtaagcac

SEQ ID NO: 1138 - DNA, 96 bp, Aspergillus thermomutatus
  misc_feature: 513
ttgatattatctggagtaaatgcctttgcacgagcttcgggatatgctccaaggaaatcaagtttatcaatatgattgaaacccttctgcatctgg

SEQ ID NO: 1139 - DNA, 96 bp, Aspergillus thermomutatus
  misc_feature: 512
gcgcttatctgtctgaccactaacttcggctcattctcaacccgttccactgcgaatccgtctgctaatcgcagtcgcggcccattagcctcaatc

SEQ ID NO: 1140 - DNA, 96 bp, Aspergillus thermomutatus
  misc_feature: 511
tgcttgagattatgaggtgtctttggtgctgaattggttgaccgactgcctggtggtgtaggagtcttgagttggatagtaaaccgtctaagcacc

SEQ ID NO: 1141 - DNA, 96 bp, Aspergillus thermomutatus
  misc_feature: 511
aaaatatgacagtcactgcaacgtggtggcgcccgtgtagagcattgttctgctgaagatgctgtttccataggtatagtagataaagcttcagca

SEQ ID NO: 1142 - DNA, 96 bp, Aspergillus thermomutatus
  misc_feature: 511
tgcctttgcacgagcttcgggatatgctccaaggaaatcaagtttatcaatatgattgaaacccttctgcatctggtcctggactaatcgtccgta

SEQ ID NO: 1143 - DNA, 96 bp, Aspergillus thermomutatus
  misc_feature: 511
tgatattatctggagtaaatgcctttgcacgagcttcgggatatgctccaaggaaatcaagtttatcaatatgattgaaacccttctgcatctggt

SEQ ID NO: 1144 - DNA, 96 bp, Aspergillus thermomutatus
  misc_feature: 511
tctctaattgcttgagattatgaggtgtctttggtgctgaattggttgaccgactgcctggtggtgtaggagtcttgagttggatagtaaaccgtc

SEQ ID NO: 1145 - DNA, 96 bp, Aspergillus thermomutatus
  misc_feature: 511
aatatttgcagtgagaataatattattcctatctgcatgcctgctcattcatcaaattacttacaacctcttgatgttggctgtttttcacccctg

SEQ ID NO: 1146 - DNA, 96 bp, Aspergillus thermomutatus
  misc_feature: 510
gatattatctggagtaaatgcctttgcacgagcttcgggatatgctccaaggaaatcaagtttatcaatatgattgaaacccttctgcatctggtc

SEQ ID NO: 1147 - DNA, 96 bp, Aspergillus thermomutatus
  misc_feature: 510
cctgctttatattctattaaactagctaattgtttatcacacataggaggtctactaccaaaagggctgtagggttcaatgtgtggattatgtagt

SEQ ID NO: 1148 - DNA, 96 bp, Aspergillus thermomutatus
  misc_feature: 509
tgctttatattctattaaactagctaattgtttatcacacataggaggtctactaccaaaagggctgtagggttcaatgtgtggattatgtagtct

SEQ ID NO: 1149 - DNA, 96 bp, Aspergillus thermomutatus
  misc_feature: 509
tcctgctttatattctattaaactagctaattgtttatcacacataggaggtctactaccaaaagggctgtagggttcaatgtgtggattatgtag

SEQ ID NO: 1150 - DNA, 96 bp, Aspergillus thermomutatus
  misc_feature: 509
ctgctttatattctattaaactagctaattgtttatcacacataggaggtctactaccaaaagggctgtagggttcaatgtgtggattatgtagtc

SEQ ID NO: 1151 - DNA, 96 bp, Aspergillus thermomutatus
  misc_feature: 509
aactctcaaggatgggctttaccaccatgtattatcttcaagggaacagtccatattgagggctggtatcaagatgacaagttaccaagcaactgg

SEQ ID NO: 1152 - DNA, 96 bp, Aspergillus thermomutatus
  misc_feature: 508
gtaaatgcctttgcacgagcttcgggatatgctccaaggaaatcaagtttatcaatatgattgaaacccttctgcatctggtcctggactaatcgt

SEQ ID NO: 1153 - DNA, 96 bp, Aspergillus thermomutatus
  misc_feature: 508
ggagtaaatgcctttgcacgagcttcgggatatgctccaaggaaatcaagtttatcaatatgattgaaacccttctgcatctggtcctggactaat

SEQ ID NO: 1154 - DNA, 96 bp, Aspergillus thermomutatus
  misc_feature: 507
gggtgcataatgtgttccatgttagtctgttgcgtcctgcggcgaacgatcctttcccaagccagttgagcactgactaccagccgcccgctgtgc

SEQ ID NO: 1155 - DNA, 96 bp, Aspergillus thermomutatus
  misc_feature: 507
aaatgcctttgcacgagcttcgggatatgctccaaggaaatcaagtttatcaatatgattgaaacccttctgcatctggtcctggactaatcgtcc

SEQ ID NO: 1156 - DNA, 96 bp, Aspergillus thermomutatus
  misc_feature: 506
aatgcctttgcacgagcttcgggatatgctccaaggaaatcaagtttatcaatatgattgaaacccttctgcatctggtcctggactaatcgtccg

SEQ ID NO: 1157 - DNA, 96 bp, Aspergillus thermomutatus
  misc_feature: 505
tgcataatgtgttccatgttagtctgttgcgtcctgcggcgaacgatcctttcccaagccagttgagcactgactaccagccgcccgctgtgctag

SEQ ID NO: 1158 - DNA, 96 bp, Aspergillus thermomutatus
  misc_feature: 505
taaatgcctttgcacgagcttcgggatatgctccaaggaaatcaagtttatcaatatgattgaaacccttctgcatctggtcctggactaatcgtc

SEQ ID NO: 1159 - DNA, 96 bp, Aspergillus thermomutatus
  misc_feature: 505
atgcctttgcacgagcttcgggatatgctccaaggaaatcaagtttatcaatatgattgaaacccttctgcatctggtcctggactaatcgtccgt

SEQ ID NO: 1160 - DNA, 96 bp, Aspergillus thermomutatus
  misc_feature: 504
tcggcaatcaccatgatctcctcacagtcgccggaggtaggtagcttggtgatgaagtcgatagctatctcgcgccatttgcggtctggaatcagc

SEQ ID NO: 1161 - DNA, 96 bp, Aspergillus thermomutatus
  misc_feature: 504
taaaatatgacagtcactgcaacgtggtggcgcccgtgtagagcattgttctgctgaagatgctgtttccataggtatagtagataaagcttcagc

SEQ ID NO: 1162 - DNA, 96 bp, Aspergillus thermomutatus
  misc_feature: 504
cttcgggatatgctccaaggaaatcaagtttatcaatatgattgaaacccttctgcatctggtcctggactaatcgtccgtaagcacctttcaggg

SEQ ID NO: 1163 - DNA, 96 bp, Aspergillus thermomutatus
  misc_feature: 504
aggtacttgcgcgcctacaggaagcaggcctacagctagatattgacaagtgcgaattcgaggtcaagagcaccaagtacttgggcttcatcgtcg

SEQ ID NO: 1164 - DNA, 96 bp, Aspergillus thermomutatus
  misc_feature: 504
agtctgttgcgtcctgcggcgaacgatcctttcccaagccagttgagcactgactaccagccgcccgctgtgctagtcgacggcgaggccgaatat

SEQ ID NO: 1165 - DNA, 96 bp, Aspergillus thermomutatus
  misc_feature: 503
ttctctaattgcttgagattatgaggtgtctttggtgctgaattggttgaccgactgcctggtggtgtaggagtcttgagttggatagtaaaccgt

SEQ ID NO: 1166 - DNA, 96 bp, Aspergillus thermomutatus
  misc_feature: 503
gcctttgcacgagcttcgggatatgctccaaggaaatcaagtttatcaatatgattgaaacccttctgcatctggtcctggactaatcgtccgtaa

SEQ ID NO: 1167 - DNA, 96 bp, Aspergillus thermomutatus
  misc_feature: 503
gaattcgacaatatttgcagtgagaataatattattcctatctgcatgcctgctcattcatcaaattacttacaacctcttgatgttggctgtttt

SEQ ID NO: 1168 - DNA, 96 bp, Aspergillus thermomutatus
  misc_feature: 502
agtaaatgcctttgcacgagcttcgggatatgctccaaggaaatcaagtttatcaatatgattgaaacccttctgcatctggtcctggactaatcg

SEQ ID NO: 1169 - DNA, 96 bp, Aspergillus thermomutatus
  misc_feature: 501
ttcgggatatgctccaaggaaatcaagtttatcaatatgattgaaacccttctgcatctggtcctggactaatcgtccgtaagcacctttcagggg

SEQ ID NO: 1170 - DNA, 96 bp, Aspergillus thermomutatus
  misc_feature: 501
tctacagaaggactttctatccaggaaggccgggacctcatacaaagtaggaatcaggctgctgaagctttatctactatacctatggaaacagca

SEQ ID NO: 1171 - DNA, 96 bp, Aspergillus thermomutatus
  misc_feature: 501
caggtacttgcgcgcctacaggaagcaggcctacagctagatattgacaagtgcgaattcgaggtcaagagcaccaagtacttgggcttcatcgtc

SEQ ID NO: 1172 - DNA, 96 bp, Aspergillus thermomutatus
  misc_feature: 501
atgttagtctgttgcgtcctgcggcgaacgatcctttcccaagccagttgagcactgactaccagccgcccgctgtgctagtcgacggcgaggccg

SEQ ID NO: 1173 - DNA, 96 bp, Aspergillus thermomutatus
  misc_feature: 500
tcagctcgaaaacagtgtccatttaatcgccgctgaagtgttgtccgcggaacattgtaaatgcgtgaagcttcacgaacattgcaaatttgcttc

SEQ ID NO: 1174 - DNA, 96 bp, Aspergillus thermomutatus
  misc_feature: 499
tgttagtctgttgcgtcctgcggcgaacgatcctttcccaagccagttgagcactgactaccagccgcccgctgtgctagtcgacggcgaggccga

SEQ ID NO: 1175 - DNA, 96 bp, Aspergillus thermomutatus
  misc_feature: 499
gtgcataatgtgttccatgttagtctgttgcgtcctgcggcgaacgatcctttcccaagccagttgagcactgactaccagccgcccgctgtgcta

SEQ ID NO: 1176 - DNA, 96 bp, Aspergillus thermomutatus
  misc_feature: 498
gttagtctgttgcgtcctgcggcgaacgatcctttcccaagccagttgagcactgactaccagccgcccgctgtgctagtcgacggcgaggccgaa

SEQ ID NO: 1177 - DNA, 96 bp, Aspergillus thermomutatus
  misc_feature: 498
cttctctaattgcttgagattatgaggtgtctttggtgctgaattggttgaccgactgcctggtggtgtaggagtcttgagttggatagtaaaccg

SEQ ID NO: 1178 - DNA, 96 bp, Aspergillus thermomutatus
  misc_feature: 498
ctaaaatatgacagtcactgcaacgtggtggcgcccgtgtagagcattgttctgctgaagatgctgtttccataggtatagtagataaagcttcag

SEQ ID NO: 1179 - DNA, 96 bp, Aspergillus thermomutatus
  misc_feature: 498
cagctcgaaaacagtgtccatttaatcgccgctgaagtgttgtccgcggaacattgtaaatgcgtgaagcttcacgaacattgcaaatttgcttct

SEQ ID NO: 1180 - DNA, 96 bp, Aspergillus thermomutatus
  misc_feature: 497
ttagtctgttgcgtcctgcggcgaacgatcctttcccaagccagttgagcactgactaccagccgcccgctgtgctagtcgacggcgaggccgaat

SEQ ID NO: 1181 - DNA, 96 bp, Aspergillus thermomutatus
  misc_feature: 497
tacataatccacacattgaaccctacagcccttttggtagtagacctcctatgtgtgataaacaattagctagtttaatagaatataaagcaggac

SEQ ID NO: 1182 - DNA, 96 bp, Aspergillus thermomutatus
  misc_feature: 496
tagtctgttgcgtcctgcggcgaacgatcctttcccaagccagttgagcactgactaccagccgcccgctgtgctagtcgacggcgaggccgaata

SEQ ID NO: 1183 - DNA, 96 bp, Aspergillus thermomutatus
  misc_feature: 495
tggagtaaatgcctttgcacgagcttcgggatatgctccaaggaaatcaagtttatcaatatgattgaaacccttctgcatctggtcctggactaa

SEQ ID NO: 1184 - DNA, 96 bp, Aspergillus thermomutatus
  misc_feature: 495
ggaataatattattctcactgcaaatattgtcgaattcaggggttagatggctgccatggccatcgagaaccaagagacgatatctgcctgtcgtt

SEQ ID NO: 1185 - DNA, 96 bp, Aspergillus thermomutatus
  misc_feature: 495
cagatagcctctacagaaggactttctatccaggaaggccgggacctcatacaaagtaggaatcaggctgctgaagctttatctactatacctatg

SEQ ID NO: 1186 - DNA, 96 bp, Aspergillus thermomutatus
  misc_feature: 494
cctaaaatatgacagtcactgcaacgtggtggcgcccgtgtagagcattgttctgctgaagatgctgtttccataggtatagtagataaagcttca

SEQ ID NO: 1187 - DNA, 96 bp, Aspergillus thermomutatus
  misc_feature: 494
gttgcgtcctgcggcgaacgatcctttcccaagccagttgagcactgactaccagccgcccgctgtgctagtcgacggcgaggccgaatatgaggt

SEQ ID NO: 1188 - DNA, 96 bp, Aspergillus thermomutatus
  misc_feature: 494
ctgttgcgtcctgcggcgaacgatcctttcccaagccagttgagcactgactaccagccgcccgctgtgctagtcgacggcgaggccgaatatgag

SEQ ID NO: 1189 - DNA, 96 bp, Aspergillus thermomutatus
  misc_feature: 494
agcttcgggatatgctccaaggaaatcaagtttatcaatatgattgaaacccttctgcatctggtcctggactaatcgtccgtaagcacctttcag

SEQ ID NO: 1190 - DNA, 96 bp, Aspergillus thermomutatus
  misc_feature: 493
ttccatgttagtctgttgcgtcctgcggcgaacgatcctttcccaagccagttgagcactgactaccagccgcccgctgtgctagtcgacggcgag

SEQ ID NO: 1191 - DNA, 96 bp, Aspergillus thermomutatus
  misc_feature: 493
tccatgttagtctgttgcgtcctgcggcgaacgatcctttcccaagccagttgagcactgactaccagccgcccgctgtgctagtcgacggcgagg

SEQ ID NO: 1192 - DNA, 96 bp, Aspergillus thermomutatus
  misc_feature: 493
gggatatgctccaaggaaatcaagtttatcaatatgattgaaacccttctgcatctggtcctggactaatcgtccgtaagcacctttcaggggtga

SEQ ID NO: 1193 - DNA, 96 bp, Aspergillus thermomutatus
  misc_feature: 493
gcaatcaccatgatctcctcacagtcgccggaggtaggtagcttggtgatgaagtcgatagctatctcgcgccatttgcggtctggaatcagcaac

SEQ ID NO: 1194 - DNA, 96 bp, Aspergillus thermomutatus
  misc_feature: 493
gtctgttgcgtcctgcggcgaacgatcctttcccaagccagttgagcactgactaccagccgcccgctgtgctagtcgacggcgaggccgaatatg

SEQ ID NO: 1195 - DNA, 96 bp, Aspergillus thermomutatus
  misc_feature: 493
gcttcgggatatgctccaaggaaatcaagtttatcaatatgattgaaacccttctgcatctggtcctggactaatcgtccgtaagcacctttcagg

SEQ ID NO: 1196 - DNA, 96 bp, Aspergillus thermomutatus
  misc_feature: 493
ccctactaaagctgctttagatcagcttataaagggttgtgagatggctatgaatagtgctattcttctagctcaagagaatcaggaactacgagc

SEQ ID NO: 1197 - DNA, 96 bp, Aspergillus thermomutatus
  misc_feature: 493
ccctaaaatatgacagtcactgcaacgtggtggcgcccgtgtagagcattgttctgctgaagatgctgtttccataggtatagtagataaagcttc

SEQ ID NO: 1198 - DNA, 96 bp, Aspergillus thermomutatus
  misc_feature: 492
ctatgccctaaaatatgacagtcactgcaacgtggtggcgcccgtgtagagcattgttctgctgaagatgctgtttccataggtatagtagataaa

SEQ ID NO: 1199 - DNA, 96 bp, Aspergillus thermomutatus
  misc_feature: 492
gatagcctctacagaaggactttctatccaggaaggccgggacctcatacaaagtaggaatcaggctgctgaagctttatctactatacctatgga

SEQ ID NO: 1200 - DNA, 96 bp, Aspergillus thermomutatus
  misc_feature: 492
tatgccctaaaatatgacagtcactgcaacgtggtggcgcccgtgtagagcattgttctgctgaagatgctgtttccataggtatagtagataaag

SEQ ID NO: 1201 - DNA, 96 bp, Aspergillus thermomutatus
  misc_feature: 492
gcttctctaattgcttgagattatgaggtgtctttggtgctgaattggttgaccgactgcctggtggtgtaggagtcttgagttggatagtaaacc

SEQ ID NO: 1202 - DNA, 96 bp, Aspergillus thermomutatus
  misc_feature: 492
aagctgcttagtgagcgtgggcatagtcccgctacccctactaaagctgctttagatcagcttataaagggttgtgagatggctatgaatagtgct

SEQ ID NO: 1203 - DNA, 96 bp, Aspergillus thermomutatus
  misc_feature: 491
tgaattcgacaatatttgcagtgagaataatattattcctatctgcatgcctgctcattcatcaaattacttacaacctcttgatgttggctgttt

SEQ ID NO: 1204 - DNA, 96 bp, Aspergillus thermomutatus
  misc_feature: 491
atgccctaaaatatgacagtcactgcaacgtggtggcgcccgtgtagagcattgttctgctgaagatgctgtttccataggtatagtagataaagc

SEQ ID NO: 1205 - DNA, 96 bp, Aspergillus thermomutatus
  misc_feature: 491
gcgattaaatggacactgttttcgagctgaacaacgcgccaactcacataaattgactaaagctgaagaggaatcgcttatacagtggatattatc

SEQ ID NO: 1206 - DNA, 96 bp, Aspergillus thermomutatus
  misc_feature: 491
agatagcctctacagaaggactttctatccaggaaggccgggacctcatacaaagtaggaatcaggctgctgaagctttatctactatacctatgg

SEQ ID NO: 1207 - DNA, 96 bp, Aspergillus thermomutatus
  misc_feature: 490
gttccatgttagtctgttgcgtcctgcggcgaacgatcctttcccaagccagttgagcactgactaccagccgcccgctgtgctagtcgacggcga

SEQ ID NO: 1208 - DNA, 96 bp, Aspergillus thermomutatus
  misc_feature: 490
gacaatatttgcagtgagaataatattattcctatctgcatgcctgctcattcatcaaattacttacaacctcttgatgttggctgtttttcaccc

SEQ ID NO: 1209 - DNA, 96 bp, Aspergillus thermomutatus
  misc_feature: 490
gcagatagcctctacagaaggactttctatccaggaaggccgggacctcatacaaagtaggaatcaggctgctgaagctttatctactatacctat

SEQ ID NO: 1210 - DNA, 96 bp, Aspergillus thermomutatus
  misc_feature: 490
cctctacagaaggactttctatccaggaaggccgggacctcatacaaagtaggaatcaggctgctgaagctttatctactatacctatggaaacag

SEQ ID NO: 1211 - DNA, 96 bp, Aspergillus thermomutatus
  misc_feature: 489
tctgttgcgtcctgcggcgaacgatcctttcccaagccagttgagcactgactaccagccgcccgctgtgctagtcgacggcgaggccgaatatga

SEQ ID NO: 1212 - DNA, 96 bp, Aspergillus thermomutatus
  misc_feature: 488
tcagcttgttcgcggctgaagacctccaggtgctcgtggtagtgcgcgggcagcttggtcttggggtcggtgtactgcttcgcttgcaaggcctta

SEQ ID NO: 1213 - DNA, 96 bp, Aspergillus thermomutatus
  misc_feature: 488
gccttattgatatccttgagggtgactgcgaatatctgcaccctcttacctttccgacgttggcgattccagacagcaaacccttgcgcagatata

SEQ ID NO: 1214 - DNA, 96 bp, Aspergillus thermomutatus
  misc_feature: 488
accactaacttcggctcattctcaacccgttccactgcgaatccgtctgctaatcgcagtcgcggcccattagcctcaatcgtcaccccctggtgc

SEQ ID NO: 1215 - DNA, 96 bp, Aspergillus thermomutatus
  misc_feature: 488
atcagcttgttcgcggctgaagacctccaggtgctcgtggtagtgcgcgggcagcttggtcttggggtcggtgtactgcttcgcttgcaaggcctt

SEQ ID NO: 1216 - DNA, 96 bp, Aspergillus thermomutatus
  misc_feature: 487
tccacacattgaaccctacagcccttttggtagtagacctcctatgtgtgataaacaattagctagtttaatagaatataaagcaggactatatca

SEQ ID NO: 1217 - DNA, 96 bp, Aspergillus thermomutatus
  misc_feature: 487
cccctactaaagctgctttagatcagcttataaagggttgtgagatggctatgaatagtgctattcttctagctcaagagaatcaggaactacgag

SEQ ID NO: 1218 - DNA, 96 bp, Aspergillus thermomutatus
  misc_feature: 487
cgggatatgctccaaggaaatcaagtttatcaatatgattgaaacccttctgcatctggtcctggactaatcgtccgtaagcacctttcaggggtg

SEQ ID NO: 1219 - DNA, 96 bp, Aspergillus thermomutatus
  misc_feature: 486
tatcaactctcaaggatgggctttaccaccatgtattatcttcaagggaacagtccatattgagggctggtatcaagatgacaagttaccaagcaa

SEQ ID NO: 1220 - DNA, 96 bp, Aspergillus thermomutatus
  misc_feature: 486
ccacacattgaaccctacagcccttttggtagtagacctcctatgtgtgataaacaattagctagtttaatagaatataaagcaggactatatcaa

SEQ ID NO: 1221 - DNA, 96 bp, Aspergillus thermomutatus
  misc_feature: 486
ctacagcccttttggtagtagacctcctatgtgtgataaacaattagctagtttaatagaatataaagcaggactatatcaaagatttgtaccaga

SEQ ID NO: 1222 - DNA, 96 bp, Aspergillus thermomutatus
  misc_feature: 486
tacagcccttttggtagtagacctcctatgtgtgataaacaattagctagtttaatagaatataaagcaggactatatcaaagatttgtaccagat

SEQ ID NO: 1223 - DNA, 96 bp, Aspergillus thermomutatus
  misc_feature: 486
ctctacagaaggactttctatccaggaaggccgggacctcatacaaagtaggaatcaggctgctgaagctttatctactatacctatggaaacagc

SEQ ID NO: 1224 - DNA, 96 bp, Aspergillus thermomutatus
  misc_feature: 486
actaacttcggctcattctcaacccgttccactgcgaatccgtctgctaatcgcagtcgcggcccattagcctcaatcgtcaccccctggtgcttc

SEQ ID NO: 1225 - DNA, 96 bp, Aspergillus thermomutatus
  misc_feature: 485
ttatcagcttgttcgcggctgaagacctccaggtgctcgtggtagtgcgcgggcagcttggtcttggggtcggtgtactgcttcgcttgcaaggcc

SEQ ID NO: 1226 - DNA, 96 bp, Aspergillus thermomutatus
  misc_feature: 485
acccctactaaagctgctttagatcagcttataaagggttgtgagatggctatgaatagtgctattcttctagctcaagagaatcaggaactacga

SEQ ID NO: 1227 - DNA, 96 bp, Aspergillus thermomutatus
  misc_feature: 485
ggtgcataatgtgttccatgttagtctgttgcgtcctgcggcgaacgatcctttcccaagccagttgagcactgactaccagccgcccgctgtgct

SEQ ID NO: 1228 - DNA, 96 bp, Aspergillus thermomutatus
  misc_feature: 485
gaccactaacttcggctcattctcaacccgttccactgcgaatccgtctgctaatcgcagtcgcggcccattagcctcaatcgtcaccccctggtg

SEQ ID NO: 1229 - DNA, 96 bp, Aspergillus thermomutatus
  misc_feature: 485
ccactaacttcggctcattctcaacccgttccactgcgaatccgtctgctaatcgcagtcgcggcccattagcctcaatcgtcaccccctggtgct

SEQ ID NO: 1230 - DNA, 96 bp, Aspergillus thermomutatus
  misc_feature: 485
cactaacttcggctcattctcaacccgttccactgcgaatccgtctgctaatcgcagtcgcggcccattagcctcaatcgtcaccccctggtgctt

SEQ ID NO: 1231 - DNA, 96 bp, Aspergillus thermomutatus
  misc_feature: 484
tcgggatatgctccaaggaaatcaagtttatcaatatgattgaaacccttctgcatctggtcctggactaatcgtccgtaagcacctttcaggggt

SEQ ID NO: 1232 - DNA, 96 bp, Aspergillus thermomutatus
  misc_feature: 484
ccttattgatatccttgagggtgactgcgaatatctgcaccctcttacctttccgacgttggcgattccagacagcaaacccttgcgcagatatac

SEQ ID NO: 1233 - DNA, 96 bp, Aspergillus thermomutatus
  misc_feature: 484
cctacagcccttttggtagtagacctcctatgtgtgataaacaattagctagtttaatagaatataaagcaggactatatcaaagatttgtaccag

SEQ ID NO: 1234 - DNA, 96 bp, Aspergillus thermomutatus
  misc_feature: 484
ctgaattcgacaatatttgcagtgagaataatattattcctatctgcatgcctgctcattcatcaaattacttacaacctcttgatgttggctgtt

SEQ ID NO: 1235 - DNA, 96 bp, Aspergillus thermomutatus
  misc_feature: 483
tgttgcgtcctgcggcgaacgatcctttcccaagccagttgagcactgactaccagccgcccgctgtgctagtcgacggcgaggccgaatatgagg

SEQ ID NO: 1236 - DNA, 96 bp, Aspergillus thermomutatus
  misc_feature: 483
tcctgcggcgaacgatcctttcccaagccagttgagcactgactaccagccgcccgctgtgctagtcgacggcgaggccgaatatgaggttgaatg

SEQ ID NO: 1237 - DNA, 96 bp, Aspergillus thermomutatus
  misc_feature: 483
ggggtgcataatgtgttccatgttagtctgttgcgtcctgcggcgaacgatcctttcccaagccagttgagcactgactaccagccgcccgctgtg

SEQ ID NO: 1238 - DNA, 96 bp, Aspergillus thermomutatus
  misc_feature: 483
cttagtgagcgtgggcatagtcccgctacccctactaaagctgctttagatcagcttataaagggttgtgagatggctatgaatagtgctattctt

SEQ ID NO: 1239 - DNA, 96 bp, Aspergillus thermomutatus
  misc_feature: 483
ccaggggtgcataatgtgttccatgttagtctgttgcgtcctgcggcgaacgatcctttcccaagccagttgagcactgactaccagccgcccgct

SEQ ID NO: 1240 - DNA, 96 bp, Aspergillus thermomutatus
  misc_feature: 482
tgcgtcctgcggcgaacgatcctttcccaagccagttgagcactgactaccagccgcccgctgtgctagtcgacggcgaggccgaatatgaggttg

SEQ ID NO: 1241 - DNA, 96 bp, Aspergillus thermomutatus
  misc_feature: 482
tagtgagcgtgggcatagtcccgctacccctactaaagctgctttagatcagcttataaagggttgtgagatggctatgaatagtgctattcttct

SEQ ID NO: 1242 - DNA, 96 bp, Aspergillus thermomutatus
  misc_feature: 482
gtctgaccactaacttcggctcattctcaacccgttccactgcgaatccgtctgctaatcgcagtcgcggcccattagcctcaatcgtcaccccct

SEQ ID NO: 1243 - DNA, 96 bp, Aspergillus thermomutatus
  misc_feature: 482
accaggggtgcataatgtgttccatgttagtctgttgcgtcctgcggcgaacgatcctttcccaagccagttgagcactgactaccagccgcccgc

SEQ ID NO: 1244 - DNA, 96 bp, Aspergillus thermomutatus
  misc_feature: 482
ctactaaagctgctttagatcagcttataaagggttgtgagatggctatgaatagtgctattcttctagctcaagagaatcaggaactacgagctg

SEQ ID NO: 1245 - DNA, 96 bp, Aspergillus thermomutatus
  misc_feature: 482
cctgcggcgaacgatcctttcccaagccagttgagcactgactaccagccgcccgctgtgctagtcgacggcgaggccgaatatgaggttgaatgg

SEQ ID NO: 1246 - DNA, 96 bp, Aspergillus thermomutatus
  misc_feature: 482
caggggtgcataatgtgttccatgttagtctgttgcgtcctgcggcgaacgatcctttcccaagccagttgagcactgactaccagccgcccgctg

SEQ ID NO: 1247 - DNA, 96 bp, Aspergillus thermomutatus
  misc_feature: 481
tttatcagcttgttcgcggctgaagacctccaggtgctcgtggtagtgcgcgggcagcttggtcttggggtcggtgtactgcttcgcttgcaaggc

SEQ ID NO: 1248 - DNA, 96 bp, Aspergillus thermomutatus
  misc_feature: 481
ttagtgagcgtgggcatagtcccgctacccctactaaagctgctttagatcagcttataaagggttgtgagatggctatgaatagtgctattcttc

SEQ ID NO: 1249 - DNA, 96 bp, Aspergillus thermomutatus
  misc_feature: 481
tgcttagtgagcgtgggcatagtcccgctacccctactaaagctgctttagatcagcttataaagggttgtgagatggctatgaatagtgctattc

SEQ ID NO: 1250 - DNA, 96 bp, Aspergillus thermomutatus
  misc_feature: 481
tgcacgagcttcgggatatgctccaaggaaatcaagtttatcaatatgattgaaacccttctgcatctggtcctggactaatcgtccgtaagcacc

SEQ ID NO: 1251 - DNA, 96 bp, Aspergillus thermomutatus
  misc_feature: 481
taatgtgttccatgttagtctgttgcgtcctgcggcgaacgatcctttcccaagccagttgagcactgactaccagccgcccgctgtgctagtcga

SEQ ID NO: 1252 - DNA, 96 bp, Aspergillus thermomutatus
  misc_feature: 481
agtgagcgtgggcatagtcccgctacccctactaaagctgctttagatcagcttataaagggttgtgagatggctatgaatagtgctattcttcta

SEQ ID NO: 1253 - DNA, 96 bp, Aspergillus thermomutatus
  misc_feature: 481
gtttatcagcttgttcgcggctgaagacctccaggtgctcgtggtagtgcgcgggcagcttggtcttggggtcggtgtactgcttcgcttgcaagg

SEQ ID NO: 1254 - DNA, 96 bp, Aspergillus thermomutatus
  misc_feature: 481
aggggtgcataatgtgttccatgttagtctgttgcgtcctgcggcgaacgatcctttcccaagccagttgagcactgactaccagccgcccgctgt

SEQ ID NO: 1255 - DNA, 96 bp, Aspergillus thermomutatus
  misc_feature: 480
ttgcgtcctgcggcgaacgatcctttcccaagccagttgagcactgactaccagccgcccgctgtgctagtcgacggcgaggccgaatatgaggtt

SEQ ID NO: 1256 - DNA, 96 bp, Aspergillus thermomutatus
  misc_feature: 480
tctgaccactaacttcggctcattctcaacccgttccactgcgaatccgtctgctaatcgcagtcgcggcccattagcctcaatcgtcaccccctg

SEQ ID NO: 1257 - DNA, 96 bp, Aspergillus thermomutatus
  misc_feature: 480
tagaactcgctcctcatcttactgagcacattagaatcattggaaacgcacattggaaacattggaaacgcacattggtagatacattggattgga

SEQ ID NO: 1258 - DNA, 96 bp, Aspergillus thermomutatus
  misc_feature: 480
aacttcggctcattctcaacccgttccactgcgaatccgtctgctaatcgcagtcgcggcccattagcctcaatcgtcaccccctggtgcttcatc

SEQ ID NO: 1259 - DNA, 96 bp, Aspergillus thermomutatus
  misc_feature: 480
ctgaccactaacttcggctcattctcaacccgttccactgcgaatccgtctgctaatcgcagtcgcggcccattagcctcaatcgtcaccccctgg

SEQ ID NO: 1260 - DNA, 96 bp, Aspergillus thermomutatus
  misc_feature: 479
tatcagcttgttcgcggctgaagacctccaggtgctcgtggtagtgcgcgggcagcttggtcttggggtcggtgtactgcttcgcttgcaaggcct

SEQ ID NO: 1261 - DNA, 96 bp, Aspergillus thermomutatus
  misc_feature: 479
gtcctgcggcgaacgatcctttcccaagccagttgagcactgactaccagccgcccgctgtgctagtcgacggcgaggccgaatatgaggttgaat

SEQ ID NO: 1262 - DNA, 96 bp, Aspergillus thermomutatus
  misc_feature: 479
ataatgtgttccatgttagtctgttgcgtcctgcggcgaacgatcctttcccaagccagttgagcactgactaccagccgcccgctgtgctagtcg

SEQ ID NO: 1263 - DNA, 96 bp, Aspergillus thermomutatus
  misc_feature: 479
aagcagatagcctctacagaaggactttctatccaggaaggccgggacctcatacaaagtaggaatcaggctgctgaagctttatctactatacct

SEQ ID NO: 1264 - DNA, 96 bp, Aspergillus thermomutatus
  misc_feature: 478
agctgcttagtgagcgtgggcatagtcccgctacccctactaaagctgctttagatcagcttataaagggttgtgagatggctatgaatagtgcta

SEQ ID NO: 1265 - DNA, 96 bp, Aspergillus thermomutatus
  misc_feature: 478
gtgtatcaactctcaaggatgggctttaccaccatgtattatcttcaagggaacagtccatattgagggctggtatcaagatgacaagttaccaag

SEQ ID NO: 1266 - DNA, 96 bp, Aspergillus thermomutatus
  misc_feature: 478
atgtgttccatgttagtctgttgcgtcctgcggcgaacgatcctttcccaagccagttgagcactgactaccagccgcccgctgtgctagtcgacg

SEQ ID NO: 1267 - DNA, 96 bp, Aspergillus thermomutatus
  misc_feature: 477
taacttcggctcattctcaacccgttccactgcgaatccgtctgctaatcgcagtcgcggcccattagcctcaatcgtcaccccctggtgcttcat

SEQ ID NO: 1268 - DNA, 96 bp, Aspergillus thermomutatus
  misc_feature: 477
ctgcttagtgagcgtgggcatagtcccgctacccctactaaagctgctttagatcagcttataaagggttgtgagatggctatgaatagtgctatt

SEQ ID NO: 1269 - DNA, 96 bp, Aspergillus thermomutatus
  misc_feature: 476
gtatcaactctcaaggatgggctttaccaccatgtattatcttcaagggaacagtccatattgagggctggtatcaagatgacaagttaccaagca

SEQ ID NO: 1270 - DNA, 96 bp, Aspergillus thermomutatus
  misc_feature: 476
tgaccactaacttcggctcattctcaacccgttccactgcgaatccgtctgctaatcgcagtcgcggcccattagcctcaatcgtcaccccctggt

SEQ ID NO: 1271 - DNA, 96 bp, Aspergillus thermomutatus
  misc_feature: 476
ctaacttcggctcattctcaacccgttccactgcgaatccgtctgctaatcgcagtcgcggcccattagcctcaatcgtcaccccctggtgcttca

SEQ ID NO: 1272 - DNA, 96 bp, Aspergillus thermomutatus
  misc_feature: 476
gtgttccatgttagtctgttgcgtcctgcggcgaacgatcctttcccaagccagttgagcactgactaccagccgcccgctgtgctagtcgacggc

SEQ ID NO: 1273 - DNA, 96 bp, Aspergillus thermomutatus
  misc_feature: 476
gctgcttagtgagcgtgggcatagtcccgctacccctactaaagctgctttagatcagcttataaagggttgtgagatggctatgaatagtgctat

SEQ ID NO: 1274 - DNA, 96 bp, Aspergillus thermomutatus
  misc_feature: 476
aggaataatattattctcactgcaaatattgtcgaattcaggggttagatggctgccatggccatcgagaaccaagagacgatatctgcctgtcgt

SEQ ID NO: 1275 - DNA, 96 bp, Aspergillus thermomutatus
  misc_feature: 475
cacacattgaaccctacagcccttttggtagtagacctcctatgtgtgataaacaattagctagtttaatagaatataaagcaggactatatcaaa

SEQ ID NO: 1276 - DNA, 96 bp, Aspergillus thermomutatus
  misc_feature: 475
taggaataatattattctcactgcaaatattgtcgaattcaggggttagatggctgccatggccatcgagaaccaagagacgatatctgcctgtcg

SEQ ID NO: 1277 - DNA, 96 bp, Aspergillus thermomutatus
  misc_feature: 475
catgttagtctgttgcgtcctgcggcgaacgatcctttcccaagccagttgagcactgactaccagccgcccgctgtgctagtcgacggcgaggcc

SEQ ID NO: 1278 - DNA, 96 bp, Aspergillus thermomutatus
  misc_feature: 475
gccctaaaatatgacagtcactgcaacgtggtggcgcccgtgtagagcattgttctgctgaagatgctgtttccataggtatagtagataaagctt

SEQ ID NO: 1279 - DNA, 96 bp, Aspergillus thermomutatus
  misc_feature: 475
caccaggggtgcataatgtgttccatgttagtctgttgcgtcctgcggcgaacgatcctttcccaagccagttgagcactgactaccagccgcccg

SEQ ID NO: 1280 - DNA, 96 bp, Aspergillus thermomutatus
  misc_feature: 474
tgttccatgttagtctgttgcgtcctgcggcgaacgatcctttcccaagccagttgagcactgactaccagccgcccgctgtgctagtcgacggcg

SEQ ID NO: 1281 - DNA, 96 bp, Aspergillus thermomutatus
  misc_feature: 474
gcacgagcttcgggatatgctccaaggaaatcaagtttatcaatatgattgaaacccttctgcatctggtcctggactaatcgtccgtaagcacct

SEQ ID NO: 1282 - DNA, 96 bp, Aspergillus thermomutatus
  misc_feature: 474
cgagcttcgggatatgctccaaggaaatcaagtttatcaatatgattgaaacccttctgcatctggtcctggactaatcgtccgtaagcacctttc

SEQ ID NO: 1283 - DNA, 96 bp, Aspergillus thermomutatus
  misc_feature: 474
cagcttgttcgcggctgaagacctccaggtgctcgtggtagtgcgcgggcagcttggtcttggggtcggtgtactgcttcgcttgcaaggccttat

SEQ ID NO: 1284 - DNA, 96 bp, Aspergillus thermomutatus
  misc_feature: 473
agaactcgctcctcatcttactgagcacattagaatcattggaaacgcacattggaaacattggaaacgcacattggtagatacattggattggaa

SEQ ID NO: 1285 - DNA, 96 bp, Aspergillus thermomutatus
  misc_feature: 473
tgtgttccatgttagtctgttgcgtcctgcggcgaacgatcctttcccaagccagttgagcactgactaccagccgcccgctgtgctagtcgacgg

SEQ ID NO: 1286 - DNA, 96 bp, Aspergillus thermomutatus
  misc_feature: 473
tgtatcaactctcaaggatgggctttaccaccatgtattatcttcaagggaacagtccatattgagggctggtatcaagatgacaagttaccaagc

SEQ ID NO: 1287 - DNA, 96 bp, Aspergillus thermomutatus
  misc_feature: 473
gcgtcctgcggcgaacgatcctttcccaagccagttgagcactgactaccagccgcccgctgtgctagtcgacggcgaggccgaatatgaggttga

SEQ ID NO: 1288 - DNA, 96 bp, Aspergillus thermomutatus
  misc_feature: 473
acagcccttttggtagtagacctcctatgtgtgataaacaattagctagtttaatagaatataaagcaggactatatcaaagatttgtaccagata

SEQ ID NO: 1289 - DNA, 96 bp, Aspergillus thermomutatus
  misc_feature: 473
ccatgttagtctgttgcgtcctgcggcgaacgatcctttcccaagccagttgagcactgactaccagccgcccgctgtgctagtcgacggcgaggc

SEQ ID NO: 1290 - DNA, 96 bp, Aspergillus thermomutatus
  misc_feature: 473
aaacaggtacttgcgcgcctacaggaagcaggcctacagctagatattgacaagtgcgaattcgaggtcaagagcaccaagtacttgggcttcatc

SEQ ID NO: 1291 - DNA, 96 bp, Aspergillus thermomutatus
  misc_feature: 473
ataggaataatattattctcactgcaaatattgtcgaattcaggggttagatggctgccatggccatcgagaaccaagagacgatatctgcctgtc

SEQ ID NO: 1292 - DNA, 96 bp, Aspergillus thermomutatus
  misc_feature: 473
aacaggtacttgcgcgcctacaggaagcaggcctacagctagatattgacaagtgcgaattcgaggtcaagagcaccaagtacttgggcttcatcg

SEQ ID NO: 1293 - DNA, 96 bp, Aspergillus thermomutatus
  misc_feature: 473
cacgagcttcgggatatgctccaaggaaatcaagtttatcaatatgattgaaacccttctgcatctggtcctggactaatcgtccgtaagcacctt

SEQ ID NO: 1294 - DNA, 96 bp, Aspergillus thermomutatus
  misc_feature: 473
aaaacaggtacttgcgcgcctacaggaagcaggcctacagctagatattgacaagtgcgaattcgaggtcaagagcaccaagtacttgggcttcat

SEQ ID NO: 1295 - DNA, 96 bp, Aspergillus thermomutatus
  misc_feature: 473
aagttagtccaaatggatggacaacagatcaaattggcatacgttggctacaaaaagtctttattcctgagactactggtcgaacgacaggcagat

SEQ ID NO: 1296 - DNA, 96 bp, Aspergillus thermomutatus
  misc_feature: 473
acgagcttcgggatatgctccaaggaaatcaagtttatcaatatgattgaaacccttctgcatctggtcctggactaatcgtccgtaagcaccttt

SEQ ID NO: 1297 - DNA, 96 bp, Aspergillus thermomutatus
  misc_feature: 472
gcgaacccctgtgcgcttatctgtctgaccactaacttcggctcattctcaacccgttccactgcgaatccgtctgctaatcgcagtcgcggccca

SEQ ID NO: 1298 - DNA, 96 bp, Aspergillus thermomutatus
  misc_feature: 472
aatgtgttccatgttagtctgttgcgtcctgcggcgaacgatcctttcccaagccagttgagcactgactaccagccgcccgctgtgctagtcgac

SEQ ID NO: 1299 - DNA, 96 bp, Aspergillus thermomutatus
  misc_feature: 472
gataggaataatattattctcactgcaaatattgtcgaattcaggggttagatggctgccatggccatcgagaaccaagagacgatatctgcctgt

SEQ ID NO: 1300 - DNA, 96 bp, Aspergillus thermomutatus
  misc_feature: 472
agcttgttcgcggctgaagacctccaggtgctcgtggtagtgcgcgggcagcttggtcttggggtcggtgtactgcttcgcttgcaaggccttatt

SEQ ID NO: 1301 - DNA, 96 bp, Aspergillus thermomutatus
  misc_feature: 472
acaggtacttgcgcgcctacaggaagcaggcctacagctagatattgacaagtgcgaattcgaggtcaagagcaccaagtacttgggcttcatcgt

SEQ ID NO: 1302 - DNA, 96 bp, Aspergillus thermomutatus
  misc_feature: 470
cgtcctgcggcgaacgatcctttcccaagccagttgagcactgactaccagccgcccgctgtgctagtcgacggcgaggccgaatatgaggttgaa

SEQ ID NO: 1303 - DNA, 96 bp, Aspergillus thermomutatus
  misc_feature: 470
tgccctaaaatatgacagtcactgcaacgtggtggcgcccgtgtagagcattgttctgctgaagatgctgtttccataggtatagtagataaagct

SEQ ID NO: 1304 - DNA, 96 bp, Aspergillus thermomutatus
  misc_feature: 470
ctgggaatcgcgaatgggtcacatctattgagtgtatcaactctcaaggatgggctttaccaccatgtattatcttcaagggaacagtccatattg

SEQ ID NO: 1305 - DNA, 96 bp, Aspergillus thermomutatus
  misc_feature: 470
cctactaaagctgctttagatcagcttataaagggttgtgagatggctatgaatagtgctattcttctagctcaagagaatcaggaactacgagct

SEQ ID NO: 1306 - DNA, 96 bp, Aspergillus thermomutatus
  misc_feature: 469
gagcttcgggatatgctccaaggaaatcaagtttatcaatatgattgaaacccttctgcatctggtcctggactaatcgtccgtaagcacctttca

SEQ ID NO: 1307 - DNA, 96 bp, Aspergillus thermomutatus
  misc_feature: 469
agttagtccaaatggatggacaacagatcaaattggcatacgttggctacaaaaagtctttattcctgagactactggtcgaacgacaggcagata

SEQ ID NO: 1308 - DNA, 96 bp, Aspergillus thermomutatus
  misc_feature: 467
gcacagacgacaggtaaaacaggtacttgcgcgcctacaggaagcaggcctacagctagatattgacaagtgcgaattcgaggtcaagagcaccaa

SEQ ID NO: 1309 - DNA, 96 bp, Aspergillus thermomutatus
  misc_feature: 466
ggtaaaacaggtacttgcgcgcctacaggaagcaggcctacagctagatattgacaagtgcgaattcgaggtcaagagcaccaagtacttgggctt

SEQ ID NO: 1310 - DNA, 96 bp, Aspergillus thermomutatus
  misc_feature: 466
cgatgcgggggtagtttatcagcttgttcgcggctgaagacctccaggtgctcgtggtagtgcgcgggcagcttggtcttggggtcggtgtactgc

SEQ ID NO: 1311 - DNA, 96 bp, Aspergillus thermomutatus
  misc_feature: 465
tgcggcgaacgatcctttcccaagccagttgagcactgactaccagccgcccgctgtgctagtcgacggcgaggccgaatatgaggttgaatggat

SEQ ID NO: 1312 - DNA, 96 bp, Aspergillus thermomutatus
  misc_feature: 464
ctgcggcgaacgatcctttcccaagccagttgagcactgactaccagccgcccgctgtgctagtcgacggcgaggccgaatatgaggttgaatgga

SEQ ID NO: 1313 - DNA, 96 bp, Aspergillus thermomutatus
  misc_feature: 463
ttcgacgatgaagcccaagtacttggtgctcttgacctcgaattcgcacttgtcaatatctagctgtaggcctgcttcctgtaggcgcgcaagtac

SEQ ID NO: 1314 - DNA, 96 bp, Aspergillus thermomutatus
  misc_feature: 463
gcctctacagaaggactttctatccaggaaggccgggacctcatacaaagtaggaatcaggctgctgaagctttatctactatacctatggaaaca

SEQ ID NO: 1315 - DNA, 96 bp, Aspergillus thermomutatus
  misc_feature: 463
gctacccctactaaagctgctttagatcagcttataaagggttgtgagatggctatgaatagtgctattcttctagctcaagagaatcaggaacta

SEQ ID NO: 1316 - DNA, 96 bp, Aspergillus thermomutatus
  misc_feature: 463
tagcgaacccctgtgcgcttatctgtctgaccactaacttcggctcattctcaacccgttccactgcgaatccgtctgctaatcgcagtcgcggcc

SEQ ID NO: 1317 - DNA, 96 bp, Aspergillus thermomutatus
  misc_feature: 463
ccgctacccctactaaagctgctttagatcagcttataaagggttgtgagatggctatgaatagtgctattcttctagctcaagagaatcaggaac

SEQ ID NO: 1318 - DNA, 96 bp, Aspergillus thermomutatus
  misc_feature: 462
atagcctctacagaaggactttctatccaggaaggccgggacctcatacaaagtaggaatcaggctgctgaagctttatctactatacctatggaa

SEQ ID NO: 1319 - DNA, 96 bp, Aspergillus thermomutatus
  misc_feature: 462
taaaacaggtacttgcgcgcctacaggaagcaggcctacagctagatattgacaagtgcgaattcgaggtcaagagcaccaagtacttgggcttca

SEQ ID NO: 1320 - DNA, 96 bp, Aspergillus thermomutatus
  misc_feature: 462
agcgaacccctgtgcgcttatctgtctgaccactaacttcggctcattctcaacccgttccactgcgaatccgtctgctaatcgcagtcgcggccc

SEQ ID NO: 1321 - DNA, 96 bp, Aspergillus thermomutatus
  misc_feature: 462
cgctacccctactaaagctgctttagatcagcttataaagggttgtgagatggctatgaatagtgctattcttctagctcaagagaatcaggaact

SEQ ID NO: 1322 - DNA, 96 bp, Aspergillus thermomutatus
  misc_feature: 461
gtcccgctacccctactaaagctgctttagatcagcttataaagggttgtgagatggctatgaatagtgctattcttctagctcaagagaatcagg

SEQ ID NO: 1323 - DNA, 96 bp, Aspergillus thermomutatus
  misc_feature: 461
gcttagtgagcgtgggcatagtcccgctacccctactaaagctgctttagatcagcttataaagggttgtgagatggctatgaatagtgctattct

SEQ ID NO: 1324 - DNA, 96 bp, Aspergillus thermomutatus
  misc_feature: 461
gccatcgagaaccaagagacgatatctgcctgtcgttcgaccagtagtctcaggaataaagactttttgtagccaacgtatgccaatttgatctgt

SEQ ID NO: 1325 - DNA, 96 bp, Aspergillus thermomutatus
  misc_feature: 461
cttattgatatccttgagggtgactgcgaatatctgcaccctcttacctttccgacgttggcgattccagacagcaaacccttgcgcagatatacg

SEQ ID NO: 1326 - DNA, 96 bp, Aspergillus thermomutatus
  misc_feature: 460
tacccctactaaagctgctttagatcagcttataaagggttgtgagatggctatgaatagtgctattcttctagctcaagagaatcaggaactacg

SEQ ID NO: 1327 - DNA, 96 bp, Aspergillus thermomutatus
  misc_feature: 460
agcctctacagaaggactttctatccaggaaggccgggacctcatacaaagtaggaatcaggctgctgaagctttatctactatacctatggaaac

SEQ ID NO: 1328 - DNA, 96 bp, Aspergillus thermomutatus
  misc_feature: 460
gttagtccaaatggatggacaacagatcaaattggcatacgttggctacaaaaagtctttattcctgagactactggtcgaacgacaggcagatat

SEQ ID NO: 1329 - DNA, 96 bp, Aspergillus thermomutatus
  misc_feature: 460
ctacccctactaaagctgctttagatcagcttataaagggttgtgagatggctatgaatagtgctattcttctagctcaagagaatcaggaactac

SEQ ID NO: 1330 - DNA, 96 bp, Aspergillus thermomutatus
  misc_feature: 460
agtttatcagcttgttcgcggctgaagacctccaggtgctcgtggtagtgcgcgggcagcttggtcttggggtcggtgtactgcttcgcttgcaag

SEQ ID NO: 1331 - DNA, 96 bp, Aspergillus thermomutatus
  misc_feature: 459
gatatccttgagggtgactgcgaatatctgcaccctcttacctttccgacgttggcgattccagacagcaaacccttgcgcagatatacgccgtac

SEQ ID NO: 1332 - DNA, 96 bp, Aspergillus thermomutatus
  misc_feature: 459
ctcctcatcttactgagcacattagaatcattggaaacgcacattggaaacattggaaacgcacattggtagatacattggattggaagacgcacc

SEQ ID NO: 1333 - DNA, 96 bp, Aspergillus thermomutatus
  misc_feature: 459
ccctgaattcgacaatatttgcagtgagaataatattattcctatctgcatgcctgctcattcatcaaattacttacaacctcttgatgttggctg

SEQ ID NO: 1334 - DNA, 96 bp, Aspergillus thermomutatus
  misc_feature: 457
gtaaaacaggtacttgcgcgcctacaggaagcaggcctacagctagatattgacaagtgcgaattcgaggtcaagagcaccaagtacttgggcttc

SEQ ID NO: 1335 - DNA, 96 bp, Aspergillus thermomutatus
  misc_feature: 456
ttgatatccttgagggtgactgcgaatatctgcaccctcttacctttccgacgttggcgattccagacagcaaacccttgcgcagatatacgccgt

SEQ ID NO: 1336 - DNA, 96 bp, Aspergillus thermomutatus
  misc_feature: 456
cccgctacccctactaaagctgctttagatcagcttataaagggttgtgagatggctatgaatagtgctattcttctagctcaagagaatcaggaa

SEQ ID NO: 1337 - DNA, 96 bp, Aspergillus thermomutatus
  misc_feature: 456
tcccgctacccctactaaagctgctttagatcagcttataaagggttgtgagatggctatgaatagtgctattcttctagctcaagagaatcagga

SEQ ID NO: 1338 - DNA, 96 bp, Aspergillus thermomutatus
  misc_feature: 455
ttattgatatccttgagggtgactgcgaatatctgcaccctcttacctttccgacgttggcgattccagacagcaaacccttgcgcagatatacgc

SEQ ID NO: 1339 - DNA, 96 bp, Aspergillus thermomutatus
  misc_feature: 455
agcacagacgacaggtaaaacaggtacttgcgcgcctacaggaagcaggcctacagctagatattgacaagtgcgaattcgaggtcaagagcacca

SEQ ID NO: 1340 - DNA, 96 bp, Aspergillus thermomutatus
  misc_feature: 455
cgacaggtaaaacaggtacttgcgcgcctacaggaagcaggcctacagctagatattgacaagtgcgaattcgaggtcaagagcaccaagtacttg

SEQ ID NO: 1341 - DNA, 96 bp, Aspergillus thermomutatus
  misc_feature: 454
agtgtatcaactctcaaggatgggctttaccaccatgtattatcttcaagggaacagtccatattgagggctggtatcaagatgacaagttaccaa

SEQ ID NO: 1342 - DNA, 96 bp, Aspergillus thermomutatus
  misc_feature: 454
ccctaacctatcggcaatcaccatgatctcctcacagtcgccggaggtaggtagcttggtgatgaagtcgatagctatctcgcgccatttgcggtc

SEQ ID NO: 1343 - DNA, 96 bp, Aspergillus thermomutatus
  misc_feature: 454
ctctgagaagttccgtataaagcgccgatagaagtttgcgaagcctaggaatgaccgcacgccgcgcgctgaggtcggggtctgccattccaatat

SEQ ID NO: 1344 - DNA, 96 bp, Aspergillus thermomutatus
  misc_feature: 454
caagggtttgctgtctggaatcgccaacgtcggaaaggtaagagggtgcagatattcgcagtcaccctcaaggatatcaataaggccttgcaagcg

SEQ ID NO: 1345 - DNA, 96 bp, Aspergillus thermomutatus
  misc_feature: 454
cccctggccgatgcgggggtagtttatcagcttgttcgcggctgaagacctccaggtgctcgtggtagtgcgcgggcagcttggtcttggggtcgg

SEQ ID NO: 1346 - DNA, 96 bp, Aspergillus thermomutatus
  misc_feature: 454
aatccacacattgaaccctacagcccttttggtagtagacctcctatgtgtgataaacaattagctagtttaatagaatataaagcaggactatat

SEQ ID NO: 1347 - DNA, 96 bp, Aspergillus thermomutatus
  misc_feature: 453
cctgcttcgacgatgaagcccaagtacttggtgctcttgacctcgaattcgcacttgtcaatatctagctgtaggcctgcttcctgtaggcgcgca

SEQ ID NO: 1348 - DNA, 96 bp, Aspergillus thermomutatus
  misc_feature: 453
tgatatccttgagggtgactgcgaatatctgcaccctcttacctttccgacgttggcgattccagacagcaaacccttgcgcagatatacgccgta

SEQ ID NO: 1349 - DNA, 96 bp, Aspergillus thermomutatus
  misc_feature: 453
aactcgctcctcatcttactgagcacattagaatcattggaaacgcacattggaaacattggaaacgcacattggtagatacattggattggaaga

SEQ ID NO: 1350 - DNA, 96 bp, Aspergillus thermomutatus
  misc_feature: 453
agcagatagcctctacagaaggactttctatccaggaaggccgggacctcatacaaagtaggaatcaggctgctgaagctttatctactataccta

SEQ ID NO: 1351 - DNA, 96 bp, Aspergillus thermomutatus
  misc_feature: 453
cttcgacgatgaagcccaagtacttggtgctcttgacctcgaattcgcacttgtcaatatctagctgtaggcctgcttcctgtaggcgcgcaagta

SEQ ID NO: 1352 - DNA, 96 bp, Aspergillus thermomutatus
  misc_feature: 453
gcttgttcgcggctgaagacctccaggtgctcgtggtagtgcgcgggcagcttggtcttggggtcggtgtactgcttcgcttgcaaggccttattg

SEQ ID NO: 1353 - DNA, 96 bp, Aspergillus thermomutatus
  misc_feature: 453
gaactcgctcctcatcttactgagcacattagaatcattggaaacgcacattggaaacattggaaacgcacattggtagatacattggattggaag

SEQ ID NO: 1354 - DNA, 96 bp, Aspergillus thermomutatus
  misc_feature: 452
tcccttgcctgcttcgacgatgaagcccaagtacttggtgctcttgacctcgaattcgcacttgtcaatatctagctgtaggcctgcttcctgtag

SEQ ID NO: 1355 - DNA, 96 bp, Aspergillus thermomutatus
  misc_feature: 452
ctcccttgcctgcttcgacgatgaagcccaagtacttggtgctcttgacctcgaattcgcacttgtcaatatctagctgtaggcctgcttcctgta

SEQ ID NO: 1356 - DNA, 96 bp, Aspergillus thermomutatus
  misc_feature: 452
gctcctcatcttactgagcacattagaatcattggaaacgcacattggaaacattggaaacgcacattggtagatacattggattggaagacgcac

SEQ ID NO: 1357 - DNA, 96 bp, Aspergillus thermomutatus
  misc_feature: 452
acctcagcgcgcggcgtgcggtcattcctaggcttcgcaaacttctatcggcgctttatacggaacttctcagagatagtacgcccgcttacagcc

SEQ ID NO: 1358 - DNA, 96 bp, Aspergillus thermomutatus
  misc_feature: 452
acacattgaaccctacagcccttttggtagtagacctcctatgtgtgataaacaattagctagtttaatagaatataaagcaggactatatcaaag

SEQ ID NO: 1359 - DNA, 96 bp, Aspergillus thermomutatus
  misc_feature: 452
atatccttgagggtgactgcgaatatctgcaccctcttacctttccgacgttggcgattccagacagcaaacccttgcgcagatatacgccgtact

SEQ ID NO: 1360 - DNA, 96 bp, Aspergillus thermomutatus
  misc_feature: 451
ctgcttcgacgatgaagcccaagtacttggtgctcttgacctcgaattcgcacttgtcaatatctagctgtaggcctgcttcctgtaggcgcgcaa

SEQ ID NO: 1361 - DNA, 96 bp, Aspergillus thermomutatus
  misc_feature: 451
acaggtaaaacaggtacttgcgcgcctacaggaagcaggcctacagctagatattgacaagtgcgaattcgaggtcaagagcaccaagtacttggg

SEQ ID NO: 1362 - DNA, 96 bp, Aspergillus thermomutatus
  misc_feature: 450
tgcttcgacgatgaagcccaagtacttggtgctcttgacctcgaattcgcacttgtcaatatctagctgtaggcctgcttcctgtaggcgcgcaag

SEQ ID NO: 1363 - DNA, 96 bp, Aspergillus thermomutatus
  misc_feature: 450
cataatccacacattgaaccctacagcccttttggtagtagacctcctatgtgtgataaacaattagctagtttaatagaatataaagcaggacta

SEQ ID NO: 1364 - DNA, 96 bp, Aspergillus thermomutatus
  misc_feature: 450
atagcgaacccctgtgcgcttatctgtctgaccactaacttcggctcattctcaacccgttccactgcgaatccgtctgctaatcgcagtcgcggc

SEQ ID NO: 1365 - DNA, 96 bp, Aspergillus thermomutatus
  misc_feature: 450
caatcaccatgatctcctcacagtcgccggaggtaggtagcttggtgatgaagtcgatagctatctcgcgccatttgcggtctggaatcagcaacg

SEQ ID NO: 1366 - DNA, 96 bp, Aspergillus thermomutatus
  misc_feature: 450
cccctgaattcgacaatatttgcagtgagaataatattattcctatctgcatgcctgctcattcatcaaattacttacaacctcttgatgttggct

SEQ ID NO: 1367 - DNA, 96 bp, Aspergillus thermomutatus
  misc_feature: 450
acataatccacacattgaaccctacagcccttttggtagtagacctcctatgtgtgataaacaattagctagtttaatagaatataaagcaggact

SEQ ID NO: 1368 - DNA, 96 bp, Aspergillus thermomutatus
  misc_feature: 449
tctctgagaagttccgtataaagcgccgatagaagtttgcgaagcctaggaatgaccgcacgccgcgcgctgaggtcggggtctgccattccaata

SEQ ID NO: 1369 - DNA, 96 bp, Aspergillus thermomutatus
  misc_feature: 449
gggtagtttatcagcttgttcgcggctgaagacctccaggtgctcgtggtagtgcgcgggcagcttggtcttggggtcggtgtactgcttcgcttg

SEQ ID NO: 1370 - DNA, 96 bp, Aspergillus thermomutatus
  misc_feature: 449
gcttcgacgatgaagcccaagtacttggtgctcttgacctcgaattcgcacttgtcaatatctagctgtaggcctgcttcctgtaggcgcgcaagt

SEQ ID NO: 1371 - DNA, 96 bp, Aspergillus thermomutatus
  misc_feature: 448
accccgacctcagcgcgcggcgtgcggtcattcctaggcttcgcaaacttctatcggcgctttatacggaacttctcagagatagtacgcccgctt

SEQ ID NO: 1372 - DNA, 96 bp, Aspergillus thermomutatus
  misc_feature: 447
ggccatcgagaaccaagagacgatatctgcctgtcgttcgaccagtagtctcaggaataaagactttttgtagccaacgtatgccaatttgatctg

SEQ ID NO: 1373 - DNA, 96 bp, Aspergillus thermomutatus
  misc_feature: 447
aatcaccatgatctcctcacagtcgccggaggtaggtagcttggtgatgaagtcgatagctatctcgcgccatttgcggtctggaatcagcaacgg

SEQ ID NO: 1374 - DNA, 96 bp, Aspergillus thermomutatus
  misc_feature: 447
ataatccacacattgaaccctacagcccttttggtagtagacctcctatgtgtgataaacaattagctagtttaatagaatataaagcaggactat

SEQ ID NO: 1375 - DNA, 96 bp, Aspergillus thermomutatus
  misc_feature: 446
taatccacacattgaaccctacagcccttttggtagtagacctcctatgtgtgataaacaattagctagtttaatagaatataaagcaggactata

SEQ ID NO: 1376 - DNA, 96 bp, Aspergillus thermomutatus
  misc_feature: 446
actcgctcctcatcttactgagcacattagaatcattggaaacgcacattggaaacattggaaacgcacattggtagatacattggattggaagac

SEQ ID NO: 1377 - DNA, 96 bp, Aspergillus thermomutatus
  misc_feature: 445
ggttttcctacggtctagcccgtaacattagaactcgctcctcatcttactgagcacattagaatcattggaaacgcacattggaaacattggaaa

SEQ ID NO: 1378 - DNA, 96 bp, Aspergillus thermomutatus
  misc_feature: 445
tagcccgtaacattagaactcgctcctcatcttactgagcacattagaatcattggaaacgcacattggaaacattggaaacgcacattggtagat

SEQ ID NO: 1379 - DNA, 96 bp, Aspergillus thermomutatus
  misc_feature: 445
atactcccttgcctgcttcgacgatgaagcccaagtacttggtgctcttgacctcgaattcgcacttgtcaatatctagctgtaggcctgcttcct

SEQ ID NO: 1380 - DNA, 96 bp, Aspergillus thermomutatus
  misc_feature: 444
ctagcccgtaacattagaactcgctcctcatcttactgagcacattagaatcattggaaacgcacattggaaacattggaaacgcacattggtaga

SEQ ID NO: 1381 - DNA, 96 bp, Aspergillus thermomutatus
  misc_feature: 444
ccaccaggggtgcataatgtgttccatgttagtctgttgcgtcctgcggcgaacgatcctttcccaagccagttgagcactgactaccagccgccc

SEQ ID NO: 1382 - DNA, 96 bp, Aspergillus thermomutatus
  misc_feature: 444
ggcagaccccgacctcagcgcgcggcgtgcggtcattcctaggcttcgcaaacttctatcggcgctttatacggaacttctcagagatagtacgcc

SEQ ID NO: 1383 - DNA, 96 bp, Aspergillus thermomutatus
  misc_feature: 444
atggccatcgagaaccaagagacgatatctgcctgtcgttcgaccagtagtctcaggaataaagactttttgtagccaacgtatgccaatttgatc

SEQ ID NO: 1384 - DNA, 96 bp, Aspergillus thermomutatus
  misc_feature: 443
tcgctcctcatcttactgagcacattagaatcattggaaacgcacattggaaacattggaaacgcacattggtagatacattggattggaagacgc

SEQ ID NO: 1385 - DNA, 96 bp, Aspergillus thermomutatus
  misc_feature: 443
tactatctctgagaagttccgtataaagcgccgatagaagtttgcgaagcctaggaatgaccgcacgccgcgcgctgaggtcggggtctgccattc

SEQ ID NO: 1386 - DNA, 96 bp, Aspergillus thermomutatus
  misc_feature: 443
gaccccgacctcagcgcgcggcgtgcggtcattcctaggcttcgcaaacttctatcggcgctttatacggaacttctcagagatagtacgcccgct

SEQ ID NO: 1387 - DNA, 96 bp, Aspergillus thermomutatus
  misc_feature: 443
ctcgctcctcatcttactgagcacattagaatcattggaaacgcacattggaaacattggaaacgcacattggtagatacattggattggaagacg

SEQ ID NO: 1388 - DNA, 96 bp, Aspergillus thermomutatus
  misc_feature: 442
tagcctctacagaaggactttctatccaggaaggccgggacctcatacaaagtaggaatcaggctgctgaagctttatctactatacctatggaaa

SEQ ID NO: 1389 - DNA, 96 bp, Aspergillus thermomutatus
  misc_feature: 442
ttagaactcgctcctcatcttactgagcacattagaatcattggaaacgcacattggaaacattggaaacgcacattggtagatacattggattgg

SEQ ID NO: 1390 - DNA, 96 bp, Aspergillus thermomutatus
  misc_feature: 442
tggccatcgagaaccaagagacgatatctgcctgtcgttcgaccagtagtctcaggaataaagactttttgtagccaacgtatgccaatttgatct

SEQ ID NO: 1391 - DNA, 96 bp, Aspergillus thermomutatus
  misc_feature: 442
cgctcctcatcttactgagcacattagaatcattggaaacgcacattggaaacattggaaacgcacattggtagatacattggattggaagacgca

SEQ ID NO: 1392 - DNA, 96 bp, Aspergillus thermomutatus
  misc_feature: 442
gcggcgaacgatcctttcccaagccagttgagcactgactaccagccgcccgctgtgctagtcgacggcgaggccgaatatgaggttgaatggata

SEQ ID NO: 1393 - DNA, 96 bp, Aspergillus thermomutatus
  misc_feature: 442
gtgagcgtgggcatagtcccgctacccctactaaagctgctttagatcagcttataaagggttgtgagatggctatgaatagtgctattcttctag

SEQ ID NO: 1394 - DNA, 96 bp, Aspergillus thermomutatus
  misc_feature: 442
actcccttgcctgcttcgacgatgaagcccaagtacttggtgctcttgacctcgaattcgcacttgtcaatatctagctgtaggcctgcttcctgt

SEQ ID NO: 1395 - DNA, 96 bp, Aspergillus thermomutatus
  misc_feature: 441
ttgcctgcttcgacgatgaagcccaagtacttggtgctcttgacctcgaattcgcacttgtcaatatctagctgtaggcctgcttcctgtaggcgc

SEQ ID NO: 1396 - DNA, 96 bp, Aspergillus thermomutatus
  misc_feature: 441
cagcccttttggtagtagacctcctatgtgtgataaacaattagctagtttaatagaatataaagcaggactatatcaaagatttgtaccagatac

SEQ ID NO: 1397 - DNA, 96 bp, Aspergillus thermomutatus
  misc_feature: 441
atttgatgaatgagcaggcatgcagataggaataatattattctcactgcaaatattgtcgaattcaggggttagatggctgccatggccatcgag

SEQ ID NO: 1398 - DNA, 96 bp, Aspergillus thermomutatus
  misc_feature: 441
cattagaactcgctcctcatcttactgagcacattagaatcattggaaacgcacattggaaacattggaaacgcacattggtagatacattggatt

SEQ ID NO: 1399 - DNA, 96 bp, Aspergillus thermomutatus
  misc_feature: 440
tactcccttgcctgcttcgacgatgaagcccaagtacttggtgctcttgacctcgaattcgcacttgtcaatatctagctgtaggcctgcttcctg

SEQ ID NO: 1400 - DNA, 96 bp, Aspergillus thermomutatus
  misc_feature: 440
ccccgacctcagcgcgcggcgtgcggtcattcctaggcttcgcaaacttctatcggcgctttatacggaacttctcagagatagtacgcccgctta

SEQ ID NO: 1401 - DNA, 96 bp, Aspergillus thermomutatus
  misc_feature: 440
gtctgtaacagatcactgatctgttcacaacagatcactgatctgttctcatcagatcattgctctgccgagcataccgctgctctgccgatggtc

SEQ ID NO: 1402 - DNA, 96 bp, Aspergillus thermomutatus
  misc_feature: 440
catactcccttgcctgcttcgacgatgaagcccaagtacttggtgctcttgacctcgaattcgcacttgtcaatatctagctgtaggcctgcttcc

SEQ ID NO: 1403 - DNA, 96 bp, Aspergillus thermomutatus
  misc_feature: 440
atcggcaatcaccatgatctcctcacagtcgccggaggtaggtagcttggtgatgaagtcgatagctatctcgcgccatttgcggtctggaatcag

SEQ ID NO: 1404 - DNA, 96 bp, Aspergillus thermomutatus
  misc_feature: 440
attagaactcgctcctcatcttactgagcacattagaatcattggaaacgcacattggaaacattggaaacgcacattggtagatacattggattg

SEQ ID NO: 1405 - DNA, 96 bp, Aspergillus thermomutatus
  misc_feature: 439
ttcctacggtctagcccgtaacattagaactcgctcctcatcttactgagcacattagaatcattggaaacgcacattggaaacattggaaacgca

SEQ ID NO: 1406 - DNA, 96 bp, Aspergillus thermomutatus
  misc_feature: 439
gcgtactatctctgagaagttccgtataaagcgccgatagaagtttgcgaagcctaggaatgaccgcacgccgcgcgctgaggtcggggtctgcca

SEQ ID NO: 1407 - DNA, 96 bp, Aspergillus thermomutatus
  misc_feature: 439
aagggtttgctgtctggaatcgccaacgtcggaaaggtaagagggtgcagatattcgcagtcaccctcaaggatatcaataaggccttgcaagcga

SEQ ID NO: 1408 - DNA, 96 bp, Aspergillus thermomutatus
  misc_feature: 439
tccctaacctatcggcaatcaccatgatctcctcacagtcgccggaggtaggtagcttggtgatgaagtcgatagctatctcgcgccatttgcggt

SEQ ID NO: 1409 - DNA, 96 bp, Aspergillus thermomutatus
  misc_feature: 439
cggcgaacgatcctttcccaagccagttgagcactgactaccagccgcccgctgtgctagtcgacggcgaggccgaatatgaggttgaatggatac

SEQ ID NO: 1410 - DNA, 96 bp, Aspergillus thermomutatus
  misc_feature: 439
gagcacagacgacaggtaaaacaggtacttgcgcgcctacaggaagcaggcctacagctagatattgacaagtgcgaattcgaggtcaagagcacc

SEQ ID NO: 1411 - DNA, 96 bp, Aspergillus thermomutatus
  misc_feature: 439
agaccccgacctcagcgcgcggcgtgcggtcattcctaggcttcgcaaacttctatcggcgctttatacggaacttctcagagatagtacgcccgc

SEQ ID NO: 1412 - DNA, 96 bp, Aspergillus thermomutatus
  misc_feature: 439
cgacctcagcgcgcggcgtgcggtcattcctaggcttcgcaaacttctatcggcgctttatacggaacttctcagagatagtacgcccgcttacag

SEQ ID NO: 1413 - DNA, 96 bp, Aspergillus thermomutatus
  misc_feature: 438
aggttttcctacggtctagcccgtaacattagaactcgctcctcatcttactgagcacattagaatcattggaaacgcacattggaaacattggaa

SEQ ID NO: 1414 - DNA, 96 bp, Aspergillus thermomutatus
  misc_feature: 438
agcccttttggtagtagacctcctatgtgtgataaacaattagctagtttaatagaatataaagcaggactatatcaaagatttgtaccagataca

SEQ ID NO: 1415 - DNA, 96 bp, Aspergillus thermomutatus
  misc_feature: 438
tgcctgcttcgacgatgaagcccaagtacttggtgctcttgacctcgaattcgcacttgtcaatatctagctgtaggcctgcttcctgtaggcgcg

SEQ ID NO: 1416 - DNA, 96 bp, Aspergillus thermomutatus
  misc_feature: 438
tatcggcaatcaccatgatctcctcacagtcgccggaggtaggtagcttggtgatgaagtcgatagctatctcgcgccatttgcggtctggaatca

SEQ ID NO: 1417 - DNA, 96 bp, Aspergillus thermomutatus
  misc_feature: 438
gctctcttgccgtccggaccttctagcagttcgatgcggtggtctacccctggccgatgcgggggtagtttatcagcttgttcgcggctgaagacc

SEQ ID NO: 1418 - DNA, 96 bp, Aspergillus thermomutatus
  misc_feature: 438
gcatactcccttgcctgcttcgacgatgaagcccaagtacttggtgctcttgacctcgaattcgcacttgtcaatatctagctgtaggcctgcttc

SEQ ID NO: 1419 - DNA, 96 bp, Aspergillus thermomutatus
  misc_feature: 438
gacaggtaaaacaggtacttgcgcgcctacaggaagcaggcctacagctagatattgacaagtgcgaattcgaggtcaagagcaccaagtacttgg

SEQ ID NO: 1420 - DNA, 96 bp, Aspergillus thermomutatus
  misc_feature: 438
attgatatccttgagggtgactgcgaatatctgcaccctcttacctttccgacgttggcgattccagacagcaaacccttgcgcagatatacgccg

SEQ ID NO: 1421 - DNA, 96 bp, Aspergillus thermomutatus
  misc_feature: 437
agggtttgctgtctggaatcgccaacgtcggaaaggtaagagggtgcagatattcgcagtcaccctcaaggatatcaataaggccttgcaagcgaa

SEQ ID NO: 1422 - DNA, 96 bp, Aspergillus thermomutatus
  misc_feature: 437
gaaccctacagcccttttggtagtagacctcctatgtgtgataaacaattagctagtttaatagaatataaagcaggactatatcaaagatttgta

SEQ ID NO: 1423 - DNA, 96 bp, Aspergillus thermomutatus
  misc_feature: 437
cccgacctcagcgcgcggcgtgcggtcattcctaggcttcgcaaacttctatcggcgctttatacggaacttctcagagatagtacgcccgcttac

SEQ ID NO: 1424 - DNA, 96 bp, Aspergillus thermomutatus
  misc_feature: 437
atgcagataggaataatattattctcactgcaaatattgtcgaattcaggggttagatggctgccatggccatcgagaaccaagagacgatatctg

SEQ ID NO: 1425 - DNA, 96 bp, Aspergillus thermomutatus
  misc_feature: 436
tctagcccgtaacattagaactcgctcctcatcttactgagcacattagaatcattggaaacgcacattggaaacattggaaacgcacattggtag

SEQ ID NO: 1426 - DNA, 96 bp, Aspergillus thermomutatus
  misc_feature: 436
tatagcgaacccctgtgcgcttatctgtctgaccactaacttcggctcattctcaacccgttccactgcgaatccgtctgctaatcgcagtcgcgg

SEQ ID NO: 1427 - DNA, 96 bp, Aspergillus thermomutatus
  misc_feature: 436
gtctagcccgtaacattagaactcgctcctcatcttactgagcacattagaatcattggaaacgcacattggaaacattggaaacgcacattggta

SEQ ID NO: 1428 - DNA, 96 bp, Aspergillus thermomutatus
  misc_feature: 436
gcctgcttcgacgatgaagcccaagtacttggtgctcttgacctcgaattcgcacttgtcaatatctagctgtaggcctgcttcctgtaggcgcgc

SEQ ID NO: 1429 - DNA, 96 bp, Aspergillus thermomutatus
  misc_feature: 436
gcccttttggtagtagacctcctatgtgtgataaacaattagctagtttaatagaatataaagcaggactatatcaaagatttgtaccagatacat

SEQ ID NO: 1430 - DNA, 96 bp, Aspergillus thermomutatus
  misc_feature: 436
cgtactatctctgagaagttccgtataaagcgccgatagaagtttgcgaagcctaggaatgaccgcacgccgcgcgctgaggtcggggtctgccat

SEQ ID NO: 1431 - DNA, 96 bp, Aspergillus thermomutatus
  misc_feature: 436
atctctgagaagttccgtataaagcgccgatagaagtttgcgaagcctaggaatgaccgcacgccgcgcgctgaggtcggggtctgccattccaat

SEQ ID NO: 1432 - DNA, 96 bp, Aspergillus thermomutatus
  misc_feature: 436
attaaatggacactgttttcgagctgaacaacgcgccaactcacataaattgactaaagctgaagaggaatcgcttatacagtggatattatctat

SEQ ID NO: 1433 - DNA, 96 bp, Aspergillus thermomutatus
  misc_feature: 435
ccgacctcagcgcgcggcgtgcggtcattcctaggcttcgcaaacttctatcggcgctttatacggaacttctcagagatagtacgcccgcttaca

SEQ ID NO: 1434 - DNA, 96 bp, Aspergillus thermomutatus
  misc_feature: 435
tgaaccctacagcccttttggtagtagacctcctatgtgtgataaacaattagctagtttaatagaatataaagcaggactatatcaaagatttgt

SEQ ID NO: 1435 - DNA, 96 bp, Aspergillus thermomutatus
  misc_feature: 435
gcccgtaacattagaactcgctcctcatcttactgagcacattagaatcattggaaacgcacattggaaacattggaaacgcacattggtagatac

SEQ ID NO: 1436 - DNA, 96 bp, Aspergillus thermomutatus
  misc_feature: 435
aaccctacagcccttttggtagtagacctcctatgtgtgataaacaattagctagtttaatagaatataaagcaggactatatcaaagatttgtac

SEQ ID NO: 1437 - DNA, 96 bp, Aspergillus thermomutatus
  misc_feature: 434
ttttcctacggtctagcccgtaacattagaactcgctcctcatcttactgagcacattagaatcattggaaacgcacattggaaacattggaaacg

SEQ ID NO: 1438 - DNA, 96 bp, Aspergillus thermomutatus
  misc_feature: 434
gtactatctctgagaagttccgtataaagcgccgatagaagtttgcgaagcctaggaatgaccgcacgccgcgcgctgaggtcggggtctgccatt

SEQ ID NO: 1439 - DNA, 96 bp, Aspergillus thermomutatus
  misc_feature: 434
ctctcttgccgtccggaccttctagcagttcgatgcggtggtctacccctggccgatgcgggggtagtttatcagcttgttcgcggctgaagacct

SEQ ID NO: 1440 - DNA, 96 bp, Aspergillus thermomutatus
  misc_feature: 434
acccctggccgatgcgggggtagtttatcagcttgttcgcggctgaagacctccaggtgctcgtggtagtgcgcgggcagcttggtcttggggtcg

SEQ ID NO: 1441 - DNA, 96 bp, Aspergillus thermomutatus
  misc_feature: 433
tttcctacggtctagcccgtaacattagaactcgctcctcatcttactgagcacattagaatcattggaaacgcacattggaaacattggaaacgc

SEQ ID NO: 1442 - DNA, 96 bp, Aspergillus thermomutatus
  misc_feature: 433
ttaaatggacactgttttcgagctgaacaacgcgccaactcacataaattgactaaagctgaagaggaatcgcttatacagtggatattatctatg

SEQ ID NO: 1443 - DNA, 96 bp, Aspergillus thermomutatus
  misc_feature: 433
tgagcgtgggcatagtcccgctacccctactaaagctgctttagatcagcttataaagggttgtgagatggctatgaatagtgctattcttctagc

SEQ ID NO: 1444 - DNA, 96 bp, Aspergillus thermomutatus
  misc_feature: 433
agcccgtaacattagaactcgctcctcatcttactgagcacattagaatcattggaaacgcacattggaaacattggaaacgcacattggtagata

SEQ ID NO: 1445 - DNA, 96 bp, Aspergillus thermomutatus
  misc_feature: 432
tctgtaacagatcactgatctgttcacaacagatcactgatctgttctcatcagatcattgctctgccgagcataccgctgctctgccgatggtca

SEQ ID NO: 1446 - DNA, 96 bp, Aspergillus thermomutatus
  misc_feature: 432
gttttcctacggtctagcccgtaacattagaactcgctcctcatcttactgagcacattagaatcattggaaacgcacattggaaacattggaaac

SEQ ID NO: 1447 - DNA, 96 bp, Aspergillus thermomutatus
  misc_feature: 432
gccaacatcaagaggttgtaagtaatttgatgaatgagcaggcatgcagataggaataatattattctcactgcaaatattgtcgaattcaggggt

SEQ ID NO: 1448 - DNA, 96 bp, Aspergillus thermomutatus
  misc_feature: 432
ctgagaagttccgtataaagcgccgatagaagtttgcgaagcctaggaatgaccgcacgccgcgcgctgaggtcggggtctgccattccaatatag

SEQ ID NO: 1449 - DNA, 96 bp, Aspergillus thermomutatus
  misc_feature: 431
aatttgatgaatgagcaggcatgcagataggaataatattattctcactgcaaatattgtcgaattcaggggttagatggctgccatggccatcga

SEQ ID NO: 1450 - DNA, 96 bp, Aspergillus thermomutatus
  misc_feature: 431
gcagataggaataatattattctcactgcaaatattgtcgaattcaggggttagatggctgccatggccatcgagaaccaagagacgatatctgcc

SEQ ID NO: 1451 - DNA, 96 bp, Aspergillus thermomutatus
  misc_feature: 431
actatctctgagaagttccgtataaagcgccgatagaagtttgcgaagcctaggaatgaccgcacgccgcgcgctgaggtcggggtctgccattcc

SEQ ID NO: 1452 - DNA, 96 bp, Aspergillus thermomutatus
  misc_feature: 430
gtaggtagcttggtgatgaagtcgatagctatctcgcgccatttgcggtctggaatcagcaacggtttcagcaggccttgacgccgctcacgccac

SEQ ID NO: 1453 - DNA, 96 bp, Aspergillus thermomutatus
  misc_feature: 430
accctacagcccttttggtagtagacctcctatgtgtgataaacaattagctagtttaatagaatataaagcaggactatatcaaagatttgtacc

SEQ ID NO: 1454 - DNA, 96 bp, Aspergillus thermomutatus
  misc_feature: 430
gacacgtgaccatcggcagagcagcggtatgctcggcagagcaatgatctgatgagaacagatcagtgatctgttgtgaacagatcagtgatctgt

SEQ ID NO: 1455 - DNA, 96 bp, Aspergillus thermomutatus
  misc_feature: 430
cagaccccgacctcagcgcgcggcgtgcggtcattcctaggcttcgcaaacttctatcggcgctttatacggaacttctcagagatagtacgcccg

SEQ ID NO: 1456 - DNA, 96 bp, Aspergillus thermomutatus
  misc_feature: 429
ctatctctgagaagttccgtataaagcgccgatagaagtttgcgaagcctaggaatgaccgcacgccgcgcgctgaggtcggggtctgccattcca

SEQ ID NO: 1457 - DNA, 96 bp, Aspergillus thermomutatus
  misc_feature: 429
tgcatactcccttgcctgcttcgacgatgaagcccaagtacttggtgctcttgacctcgaattcgcacttgtcaatatctagctgtaggcctgctt

SEQ ID NO: 1458 - DNA, 96 bp, Aspergillus thermomutatus
  misc_feature: 429
tctgagaagttccgtataaagcgccgatagaagtttgcgaagcctaggaatgaccgcacgccgcgcgctgaggtcggggtctgccattccaatata

SEQ ID NO: 1459 - DNA, 96 bp, Aspergillus thermomutatus
  misc_feature: 429
tcggagcacagacgacaggtaaaacaggtacttgcgcgcctacaggaagcaggcctacagctagatattgacaagtgcgaattcgaggtcaagagc

SEQ ID NO: 1460 - DNA, 96 bp, Aspergillus thermomutatus
  misc_feature: 429
attgagtgtatcaactctcaaggatgggctttaccaccatgtattatcttcaagggaacagtccatattgagggctggtatcaagatgacaagtta

SEQ ID NO: 1461 - DNA, 96 bp, Aspergillus thermomutatus
  misc_feature: 429
gcagaccccgacctcagcgcgcggcgtgcggtcattcctaggcttcgcaaacttctatcggcgctttatacggaacttctcagagatagtacgccc

SEQ ID NO: 1462 - DNA, 96 bp, Aspergillus thermomutatus
  misc_feature: 429
gagaagttccgtataaagcgccgatagaagtttgcgaagcctaggaatgaccgcacgccgcgcgctgaggtcggggtctgccattccaatatagcc

SEQ ID NO: 1463 - DNA, 96 bp, Aspergillus thermomutatus
  misc_feature: 428
ttgaaccctacagcccttttggtagtagacctcctatgtgtgataaacaattagctagtttaatagaatataaagcaggactatatcaaagatttg

SEQ ID NO: 1464 - DNA, 96 bp, Aspergillus thermomutatus
  misc_feature: 428
ccctacagcccttttggtagtagacctcctatgtgtgataaacaattagctagtttaatagaatataaagcaggactatatcaaagatttgtacca

SEQ ID NO: 1465 - DNA, 96 bp, Aspergillus thermomutatus
  misc_feature: 428
gcagatatcgtctcttggttctcgatggccatggcagccatctaacccctgaattcgacaatatttgcagtgagaataatattattcctatctgca

SEQ ID NO: 1466 - DNA, 96 bp, Aspergillus thermomutatus
  misc_feature: 428
tgagaagttccgtataaagcgccgatagaagtttgcgaagcctaggaatgaccgcacgccgcgcgctgaggtcggggtctgccattccaatatagc

SEQ ID NO: 1467 - DNA, 96 bp, Aspergillus thermomutatus
  misc_feature: 428
taatttgatgaatgagcaggcatgcagataggaataatattattctcactgcaaatattgtcgaattcaggggttagatggctgccatggccatcg

SEQ ID NO: 1468 - DNA, 96 bp, Aspergillus thermomutatus
  misc_feature: 428
ggtctacccctggccgatgcgggggtagtttatcagcttgttcgcggctgaagacctccaggtgctcgtggtagtgcgcgggcagcttggtcttgg

SEQ ID NO: 1469 - DNA, 96 bp, Aspergillus thermomutatus
  misc_feature: 428
gacctcagcgcgcggcgtgcggtcattcctaggcttcgcaaacttctatcggcgctttatacggaacttctcagagatagtacgcccgcttacagc

SEQ ID NO: 1470 - DNA, 96 bp, Aspergillus thermomutatus
  misc_feature: 427
atccacacattgaaccctacagcccttttggtagtagacctcctatgtgtgataaacaattagctagtttaatagaatataaagcaggactatatc

SEQ ID NO: 1471 - DNA, 96 bp, Aspergillus thermomutatus
  misc_feature: 427
agtcccgctacccctactaaagctgctttagatcagcttataaagggttgtgagatggctatgaatagtgctattcttctagctcaagagaatcag

SEQ ID NO: 1472 - DNA, 96 bp, Aspergillus thermomutatus
  misc_feature: 427
ctcggagcacagacgacaggtaaaacaggtacttgcgcgcctacaggaagcaggcctacagctagatattgacaagtgcgaattcgaggtcaagag

SEQ ID NO: 1473 - DNA, 96 bp, Aspergillus thermomutatus
  misc_feature: 427
ctagcagttcgatgcggtggtctacccctggccgatgcgggggtagtttatcagcttgttcgcggctgaagacctccaggtgctcgtggtagtgcg

SEQ ID NO: 1474 - DNA, 96 bp, Aspergillus thermomutatus
  misc_feature: 426
tggcgtgagcggcgtcaaggcctgctgaaaccgttgctgattccagaccgcaaatggcgcgagatagctatcgacttcatcaccaagctacctacc

SEQ ID NO: 1475 - DNA, 96 bp, Aspergillus thermomutatus
  misc_feature: 426
cggagcacagacgacaggtaaaacaggtacttgcgcgcctacaggaagcaggcctacagctagatattgacaagtgcgaattcgaggtcaagagca

SEQ ID NO: 1476 - DNA, 96 bp, Aspergillus thermomutatus
  misc_feature: 426
tcataggttttcctacggtctagcccgtaacattagaactcgctcctcatcttactgagcacattagaatcattggaaacgcacattggaaacatt

SEQ ID NO: 1477 - DNA, 96 bp, Aspergillus thermomutatus
  misc_feature: 426
taacattagaactcgctcctcatcttactgagcacattagaatcattggaaacgcacattggaaacattggaaacgcacattggtagatacattgg

SEQ ID NO: 1478 - DNA, 96 bp, Aspergillus thermomutatus
  misc_feature: 426
gtatagcgaacccctgtgcgcttatctgtctgaccactaacttcggctcattctcaacccgttccactgcgaatccgtctgctaatcgcagtcgcg

SEQ ID NO: 1479 - DNA, 96 bp, Aspergillus thermomutatus
  misc_feature: 426
agataggaataatattattctcactgcaaatattgtcgaattcaggggttagatggctgccatggccatcgagaaccaagagacgatatctgcctg

SEQ ID NO: 1480 - DNA, 96 bp, Aspergillus thermomutatus
  misc_feature: 425
taaatggacactgttttcgagctgaacaacgcgccaactcacataaattgactaaagctgaagaggaatcgcttatacagtggatattatctatgg

SEQ ID NO: 1481 - DNA, 96 bp, Aspergillus thermomutatus
  misc_feature: 425
ggagcacagacgacaggtaaaacaggtacttgcgcgcctacaggaagcaggcctacagctagatattgacaagtgcgaattcgaggtcaagagcac

SEQ ID NO: 1482 - DNA, 96 bp, Aspergillus thermomutatus
  misc_feature: 425
cctcagcgcgcggcgtgcggtcattcctaggcttcgcaaacttctatcggcgctttatacggaacttctcagagatagtacgcccgcttacagccc

SEQ ID NO: 1483 - DNA, 96 bp, Aspergillus thermomutatus
  misc_feature: 425
catcttactgagcacattagaatcattggaaacgcacattggaaacattggaaacgcacattggtagatacattggattggaagacgcacctaatg

SEQ ID NO: 1484 - DNA, 96 bp, Aspergillus thermomutatus
  misc_feature: 424
tatctctgagaagttccgtataaagcgccgatagaagtttgcgaagcctaggaatgaccgcacgccgcgcgctgaggtcggggtctgccattccaa

SEQ ID NO: 1485 - DNA, 96 bp, Aspergillus thermomutatus
  misc_feature: 424
ttgagtgtatcaactctcaaggatgggctttaccaccatgtattatcttcaagggaacagtccatattgagggctggtatcaagatgacaagttac

SEQ ID NO: 1486 - DNA, 96 bp, Aspergillus thermomutatus
  misc_feature: 424
tctagcagttcgatgcggtggtctacccctggccgatgcgggggtagtttatcagcttgttcgcggctgaagacctccaggtgctcgtggtagtgc

SEQ ID NO: 1487 - DNA, 96 bp, Aspergillus thermomutatus
  misc_feature: 424
tagcagttcgatgcggtggtctacccctggccgatgcgggggtagtttatcagcttgttcgcggctgaagacctccaggtgctcgtggtagtgcgc

SEQ ID NO: 1488 - DNA, 96 bp, Aspergillus thermomutatus
  misc_feature: 424
gccgagtgttcggtctctccggatggtcatctgctgtaccgaggccgcaaatgggcccccgactctgagccgctacggacgaggatcctgcaagag

SEQ ID NO: 1489 - DNA, 96 bp, Aspergillus thermomutatus
  misc_feature: 424
agcagttcgatgcggtggtctacccctggccgatgcgggggtagtttatcagcttgttcgcggctgaagacctccaggtgctcgtggtagtgcgcg

SEQ ID NO: 1490 - DNA, 96 bp, Aspergillus thermomutatus
  misc_feature: 423
tacgcccttgccagcttcaatgataaacccgaggtatttcgtgctcttgacctcgaactcgcacttgtcgatgtctagctgcaacccagcggcctg

SEQ ID NO: 1491 - DNA, 96 bp, Aspergillus thermomutatus
  misc_feature: 423
cataggttttcctacggtctagcccgtaacattagaactcgctcctcatcttactgagcacattagaatcattggaaacgcacattggaaacattg

SEQ ID NO: 1492 - DNA, 96 bp, Aspergillus thermomutatus
  misc_feature: 423
cagataggaataatattattctcactgcaaatattgtcgaattcaggggttagatggctgccatggccatcgagaaccaagagacgatatctgcct

SEQ ID NO: 1493 - DNA, 96 bp, Aspergillus thermomutatus
  misc_feature: 422
atgcgggggtagtttatcagcttgttcgcggctgaagacctccaggtgctcgtggtagtgcgcgggcagcttggtcttggggtcggtgtactgctt

SEQ ID NO: 1494 - DNA, 96 bp, Aspergillus thermomutatus
  misc_feature: 421
gcatagtcccgctacccctactaaagctgctttagatcagcttataaagggttgtgagatggctatgaatagtgctattcttctagctcaagagaa

SEQ ID NO: 1495 - DNA, 96 bp, Aspergillus thermomutatus
  misc_feature: 421
ttagtccaaatggatggacaacagatcaaattggcatacgttggctacaaaaagtctttattcctgagactactggtcgaacgacaggcagatatc

SEQ ID NO: 1496 - DNA, 96 bp, Aspergillus thermomutatus
  misc_feature: 421
tgacacgtgaccatcggcagagcagcggtatgctcggcagagcaatgatctgatgagaacagatcagtgatctgttgtgaacagatcagtgatctg

SEQ ID NO: 1497 - DNA, 96 bp, Aspergillus thermomutatus
  misc_feature: 421
cacattgaaccctacagcccttttggtagtagacctcctatgtgtgataaacaattagctagtttaatagaatataaagcaggactatatcaaaga

SEQ ID NO: 1498 - DNA, 96 bp, Aspergillus thermomutatus
  misc_feature: 421
tcctacggtctagcccgtaacattagaactcgctcctcatcttactgagcacattagaatcattggaaacgcacattggaaacattggaaacgcac

SEQ ID NO: 1499 - DNA, 96 bp, Aspergillus thermomutatus
  misc_feature: 421
tcatcttactgagcacattagaatcattggaaacgcacattggaaacattggaaacgcacattggtagatacattggattggaagacgcacctaat

SEQ ID NO: 1500 - DNA, 96 bp, Aspergillus thermomutatus
  misc_feature: 421
gtaacattagaactcgctcctcatcttactgagcacattagaatcattggaaacgcacattggaaacattggaaacgcacattggtagatacattg

SEQ ID NO: 1501 - DNA, 96 bp, Aspergillus thermomutatus
  misc_feature: 420
tgggggctctgctctcttgccgtccggaccttctagcagttcgatgcggtggtctacccctggccgatgcgggggtagtttatcagcttgttcgcg

SEQ ID NO: 1502 - DNA, 96 bp, Aspergillus thermomutatus
  misc_feature: 420
tgagtgtatcaactctcaaggatgggctttaccaccatgtattatcttcaagggaacagtccatattgagggctggtatcaagatgacaagttacc

SEQ ID NO: 1503 - DNA, 96 bp, Aspergillus thermomutatus
  misc_feature: 420
ggcgtgagcggcgtcaaggcctgctgaaaccgttgctgattccagaccgcaaatggcgcgagatagctatcgacttcatcaccaagctacctacct

SEQ ID NO: 1504 - DNA, 96 bp, Aspergillus thermomutatus
  misc_feature: 420
cgtaacattagaactcgctcctcatcttactgagcacattagaatcattggaaacgcacattggaaacattggaaacgcacattggtagatacatt

SEQ ID NO: 1505 - DNA, 96 bp, Aspergillus thermomutatus
  misc_feature: 420
attgaaccctacagcccttttggtagtagacctcctatgtgtgataaacaattagctagtttaatagaatataaagcaggactatatcaaagattt

SEQ ID NO: 1506 - DNA, 96 bp, Aspergillus thermomutatus
  misc_feature: 419
tagtcccgctacccctactaaagctgctttagatcagcttataaagggttgtgagatggctatgaatagtgctattcttctagctcaagagaatca

SEQ ID NO: 1507 - DNA, 96 bp, Aspergillus thermomutatus
  misc_feature: 419
aaatggacactgttttcgagctgaacaacgcgccaactcacataaattgactaaagctgaagaggaatcgcttatacagtggatattatctatgga

SEQ ID NO: 1508 - DNA, 96 bp, Aspergillus thermomutatus
  misc_feature: 419
tccaccaggggtgcataatgtgttccatgttagtctgttgcgtcctgcggcgaacgatcctttcccaagccagttgagcactgactaccagccgcc

SEQ ID NO: 1509 - DNA, 96 bp, Aspergillus thermomutatus
  misc_feature: 419
gggggctctgctctcttgccgtccggaccttctagcagttcgatgcggtggtctacccctggccgatgcgggggtagtttatcagcttgttcgcgg

SEQ ID NO: 1510 - DNA, 96 bp, Aspergillus thermomutatus
  misc_feature: 419
ctccaccaggggtgcataatgtgttccatgttagtctgttgcgtcctgcggcgaacgatcctttcccaagccagttgagcactgactaccagccgc

SEQ ID NO: 1511 - DNA, 96 bp, Aspergillus thermomutatus
  misc_feature: 419
atgggggctctgctctcttgccgtccggaccttctagcagttcgatgcggtggtctacccctggccgatgcgggggtagtttatcagcttgttcgc

SEQ ID NO: 1512 - DNA, 96 bp, Aspergillus thermomutatus
  misc_feature: 419
cgattaaatggacactgttttcgagctgaacaacgcgccaactcacataaattgactaaagctgaagaggaatcgcttatacagtggatattatct

SEQ ID NO: 1513 - DNA, 96 bp, Aspergillus thermomutatus
  misc_feature: 419
catgggggctctgctctcttgccgtccggaccttctagcagttcgatgcggtggtctacccctggccgatgcgggggtagtttatcagcttgttcg

SEQ ID NO: 1514 - DNA, 96 bp, Aspergillus thermomutatus
  misc_feature: 419
atgacacgtgaccatcggcagagcagcggtatgctcggcagagcaatgatctgatgagaacagatcagtgatctgttgtgaacagatcagtgatct

SEQ ID NO: 1515 - DNA, 96 bp, Aspergillus thermomutatus
  misc_feature: 418
cctaggggcgttcgatcggaagaaagccgacgaactgcccccgcatcgccctggggtcgatcaccgaattgagttgactaagggcgaagacgggaa

SEQ ID NO: 1516 - DNA, 96 bp, Aspergillus thermomutatus
  misc_feature: 418
gagtgtatcaactctcaaggatgggctttaccaccatgtattatcttcaagggaacagtccatattgagggctggtatcaagatgacaagttacca

SEQ ID NO: 1517 - DNA, 96 bp, Aspergillus thermomutatus
  misc_feature: 418
cgtacgcccttgccagcttcaatgataaacccgaggtatttcgtgctcttgacctcgaactcgcacttgtcgatgtctagctgcaacccagcggcc

SEQ ID NO: 1518 - DNA, 96 bp, Aspergillus thermomutatus
  misc_feature: 418
acgggccccatgggggctctgctctcttgccgtccggaccttctagcagttcgatgcggtggtctacccctggccgatgcgggggtagtttatcag

SEQ ID NO: 1519 - DNA, 96 bp, Aspergillus thermomutatus
  misc_feature: 418
cgtgtctcgatcagggtcaaactgcgcaagtatcggcgcagtagtgaacatcttcttcagctgctcgaaccgctgcgtgtgctcatacgtccattt

SEQ ID NO: 1520 - DNA, 96 bp, Aspergillus thermomutatus
  misc_feature: 418
catagtcccgctacccctactaaagctgctttagatcagcttataaagggttgtgagatggctatgaatagtgctattcttctagctcaagagaat

SEQ ID NO: 1521 - DNA, 96 bp, Aspergillus thermomutatus
  misc_feature: 417
gattaaatggacactgttttcgagctgaacaacgcgccaactcacataaattgactaaagctgaagaggaatcgcttatacagtggatattatcta

SEQ ID NO: 1522 - DNA, 96 bp, Aspergillus thermomutatus
  misc_feature: 417
ggggtagtttatcagcttgttcgcggctgaagacctccaggtgctcgtggtagtgcgcgggcagcttggtcttggggtcggtgtactgcttcgctt

SEQ ID NO: 1523 - DNA, 96 bp, Aspergillus thermomutatus
  misc_feature: 417
atagtcccgctacccctactaaagctgctttagatcagcttataaagggttgtgagatggctatgaatagtgctattcttctagctcaagagaatc

SEQ ID NO: 1524 - DNA, 96 bp, Aspergillus thermomutatus
  misc_feature: 417
caacgggccccatgggggctctgctctcttgccgtccggaccttctagcagttcgatgcggtggtctacccctggccgatgcgggggtagtttatc

SEQ ID NO: 1525 - DNA, 96 bp, Aspergillus thermomutatus
  misc_feature: 417
cattgaaccctacagcccttttggtagtagacctcctatgtgtgataaacaattagctagtttaatagaatataaagcaggactatatcaaagatt

SEQ ID NO: 1526 - DNA, 96 bp, Aspergillus thermomutatus
  misc_feature: 416
aacattagaactcgctcctcatcttactgagcacattagaatcattggaaacgcacattggaaacattggaaacgcacattggtagatacattgga

SEQ ID NO: 1527 - DNA, 96 bp, Aspergillus thermomutatus
  misc_feature: 416
tattgagtgtatcaactctcaaggatgggctttaccaccatgtattatcttcaagggaacagtccatattgagggctggtatcaagatgacaagtt

SEQ ID NO: 1528 - DNA, 96 bp, Aspergillus thermomutatus
  misc_feature: 416
taagtaatttgatgaatgagcaggcatgcagataggaataatattattctcactgcaaatattgtcgaattcaggggttagatggctgccatggcc

SEQ ID NO: 1529 - DNA, 96 bp, Aspergillus thermomutatus
  misc_feature: 416
gtacgcccttgccagcttcaatgataaacccgaggtatttcgtgctcttgacctcgaactcgcacttgtcgatgtctagctgcaacccagcggcct

SEQ ID NO: 1530 - DNA, 96 bp, Aspergillus thermomutatus
  misc_feature: 416
ggtctagcccgtaacattagaactcgctcctcatcttactgagcacattagaatcattggaaacgcacattggaaacattggaaacgcacattggt

SEQ ID NO: 1531 - DNA, 96 bp, Aspergillus thermomutatus
  misc_feature: 416
gatgcgggggtagtttatcagcttgttcgcggctgaagacctccaggtgctcgtggtagtgcgcgggcagcttggtcttggggtcggtgtactgct

SEQ ID NO: 1532 - DNA, 96 bp, Aspergillus thermomutatus
  misc_feature: 416
acattgaaccctacagcccttttggtagtagacctcctatgtgtgataaacaattagctagtttaatagaatataaagcaggactatatcaaagat

SEQ ID NO: 1533 - DNA, 96 bp, Aspergillus thermomutatus
  misc_feature: 416
acattagaactcgctcctcatcttactgagcacattagaatcattggaaacgcacattggaaacattggaaacgcacattggtagatacattggat

SEQ ID NO: 1534 - DNA, 96 bp, Aspergillus thermomutatus
  misc_feature: 415
ctcatcttactgagcacattagaatcattggaaacgcacattggaaacattggaaacgcacattggtagatacattggattggaagacgcacctaa

SEQ ID NO: 1535 - DNA, 96 bp, Aspergillus thermomutatus
  misc_feature: 415
ggcgaacgatcctttcccaagccagttgagcactgactaccagccgcccgctgtgctagtcgacggcgaggccgaatatgaggttgaatggatact

SEQ ID NO: 1536 - DNA, 96 bp, Aspergillus thermomutatus
  misc_feature: 415
gagcgtgggcatagtcccgctacccctactaaagctgctttagatcagcttataaagggttgtgagatggctatgaatagtgctattcttctagct

SEQ ID NO: 1537 - DNA, 96 bp, Aspergillus thermomutatus
  misc_feature: 415
ctaggggcgttcgatcggaagaaagccgacgaactgcccccgcatcgccctggggtcgatcaccgaattgagttgactaagggcgaagacgggaag

SEQ ID NO: 1538 - DNA, 96 bp, Aspergillus thermomutatus
  misc_feature: 415
ctattgagtgtatcaactctcaaggatgggctttaccaccatgtattatcttcaagggaacagtccatattgagggctggtatcaagatgacaagt

SEQ ID NO: 1539 - DNA, 96 bp, Aspergillus thermomutatus
  misc_feature: 414
tgcgggggtagtttatcagcttgttcgcggctgaagacctccaggtgctcgtggtagtgcgcgggcagcttggtcttggggtcggtgtactgcttc

SEQ ID NO: 1540 - DNA, 96 bp, Aspergillus thermomutatus
  misc_feature: 414
atcattaggtgcgtcttccaatccaatgtatctaccaatgtgcgtttccaatgtttccaatgtgcgtttccaatgattctaatgtgctcagtaaga

SEQ ID NO: 1541 - DNA, 96 bp, Aspergillus thermomutatus
  misc_feature: 414
tacccctggccgatgcgggggtagtttatcagcttgttcgcggctgaagacctccaggtgctcgtggtagtgcgcgggcagcttggtcttggggtc

SEQ ID NO: 1542 - DNA, 96 bp, Aspergillus thermomutatus
  misc_feature: 414
gtacaacgggccccatgggggctctgctctcttgccgtccggaccttctagcagttcgatgcggtggtctacccctggccgatgcgggggtagttt

SEQ ID NO: 1543 - DNA, 96 bp, Aspergillus thermomutatus
  misc_feature: 414
acgcccttgccagcttcaatgataaacccgaggtatttcgtgctcttgacctcgaactcgcacttgtcgatgtctagctgcaacccagcggcctgt

SEQ ID NO: 1544 - DNA, 96 bp, Aspergillus thermomutatus
  misc_feature: 413
aacgggccccatgggggctctgctctcttgccgtccggaccttctagcagttcgatgcggtggtctacccctggccgatgcgggggtagtttatca

SEQ ID NO: 1545 - DNA, 96 bp, Aspergillus thermomutatus
  misc_feature: 413
tcattaggtgcgtcttccaatccaatgtatctaccaatgtgcgtttccaatgtttccaatgtgcgtttccaatgattctaatgtgctcagtaagat

SEQ ID NO: 1546 - DNA, 96 bp, Aspergillus thermomutatus
  misc_feature: 413
ccgtaacattagaactcgctcctcatcttactgagcacattagaatcattggaaacgcacattggaaacattggaaacgcacattggtagatacat

SEQ ID NO: 1547 - DNA, 96 bp, Aspergillus thermomutatus
  misc_feature: 412
tctcggagcacagacgacaggtaaaacaggtacttgcgcgcctacaggaagcaggcctacagctagatattgacaagtgcgaattcgaggtcaaga

SEQ ID NO: 1548 - DNA, 96 bp, Aspergillus thermomutatus
  misc_feature: 412
tctattgagtgtatcaactctcaaggatgggctttaccaccatgtattatcttcaagggaacagtccatattgagggctggtatcaagatgacaag

SEQ ID NO: 1549 - DNA, 96 bp, Aspergillus thermomutatus
  misc_feature: 412
tattgatatccttgagggtgactgcgaatatctgcaccctcttacctttccgacgttggcgattccagacagcaaacccttgcgcagatatacgcc

SEQ ID NO: 1550 - DNA, 96 bp, Aspergillus thermomutatus
  misc_feature: 412
taggggcgttcgatcggaagaaagccgacgaactgcccccgcatcgccctggggtcgatcaccgaattgagttgactaagggcgaagacgggaagc

SEQ ID NO: 1551 - DNA, 96 bp, Aspergillus thermomutatus
  misc_feature: 412
ctctcggagcacagacgacaggtaaaacaggtacttgcgcgcctacaggaagcaggcctacagctagatattgacaagtgcgaattcgaggtcaag

SEQ ID NO: 1552 - DNA, 96 bp, Aspergillus thermomutatus
  misc_feature: 412
cggtctagcccgtaacattagaactcgctcctcatcttactgagcacattagaatcattggaaacgcacattggaaacattggaaacgcacattgg

SEQ ID NO: 1553 - DNA, 96 bp, Aspergillus thermomutatus
  misc_feature: 412
ccgtgtctcgatcagggtcaaactgcgcaagtatcggcgcagtagtgaacatcttcttcagctgctcgaaccgctgcgtgtgctcatacgtccatt

SEQ ID NO: 1554 - DNA, 96 bp, Aspergillus thermomutatus
  misc_feature: 411
cccgtaacattagaactcgctcctcatcttactgagcacattagaatcattggaaacgcacattggaaacattggaaacgcacattggtagataca

SEQ ID NO: 1555 - DNA, 96 bp, Aspergillus thermomutatus
  misc_feature: 411
aagtaatttgatgaatgagcaggcatgcagataggaataatattattctcactgcaaatattgtcgaattcaggggttagatggctgccatggcca

SEQ ID NO: 1556 - DNA, 96 bp, Aspergillus thermomutatus
  misc_feature: 411
accatgacacgtgaccatcggcagagcagcggtatgctcggcagagcaatgatctgatgagaacagatcagtgatctgttgtgaacagatcagtga

SEQ ID NO: 1557 - DNA, 96 bp, Aspergillus thermomutatus
  misc_feature: 411
cctcatcttactgagcacattagaatcattggaaacgcacattggaaacattggaaacgcacattggtagatacattggattggaagacgcaccta

SEQ ID NO: 1558 - DNA, 96 bp, Aspergillus thermomutatus
  misc_feature: 411
gtcataggttttcctacggtctagcccgtaacattagaactcgctcctcatcttactgagcacattagaatcattggaaacgcacattggaaacat

SEQ ID NO: 1559 - DNA, 96 bp, Aspergillus thermomutatus
  misc_feature: 411
cttgatgtgatcgccgcattccacaagattcgcattgcacccggagatgaatggctgacggccttccgtacgcggtttggtctgtacgaatggttg

SEQ ID NO: 1560 - DNA, 96 bp, Aspergillus thermomutatus
  misc_feature: 411
atgcatactcccttgcctgcttcgacgatgaagcccaagtacttggtgctcttgacctcgaattcgcacttgtcaatatctagctgtaggcctgct

SEQ ID NO: 1561 - DNA, 96 bp, Aspergillus thermomutatus
  misc_feature: 411
acaacagatcaaattggcatacgttggctacaaaaagtctttattcctgagactactggtcgaacgacaggcagatatcgtctcttggttctcgat

SEQ ID NO: 1562 - DNA, 96 bp, Aspergillus thermomutatus
  misc_feature: 411
agaagttccgtataaagcgccgatagaagtttgcgaagcctaggaatgaccgcacgccgcgcgctgaggtcggggtctgccattccaatatagcct

SEQ ID NO: 1563 - DNA, 96 bp, Aspergillus thermomutatus
  misc_feature: 410
gcgtgggcatagtcccgctacccctactaaagctgctttagatcagcttataaagggttgtgagatggctatgaatagtgctattcttctagctca

SEQ ID NO: 1564 - DNA, 96 bp, Aspergillus thermomutatus
  misc_feature: 410
gatatgtctgtaacagatcactgatctgttcacaacagatcactgatctgttctcatcagatcattgctctgccgagcataccgctgctctgccga

SEQ ID NO: 1565 - DNA, 96 bp, Aspergillus thermomutatus
  misc_feature: 410
gcgaacgatcctttcccaagccagttgagcactgactaccagccgcccgctgtgctagtcgacggcgaggccgaatatgaggttgaatggatactg

SEQ ID NO: 1566 - DNA, 96 bp, Aspergillus thermomutatus
  misc_feature: 410
cgaacgatcctttcccaagccagttgagcactgactaccagccgcccgctgtgctagtcgacggcgaggccgaatatgaggttgaatggatactgg

SEQ ID NO: 1567 - DNA, 96 bp, Aspergillus thermomutatus
  misc_feature: 409
tctcgatcagggtcaaactgcgcaagtatcggcgcagtagtgaacatcttcttcagctgctcgaaccgctgcgtgtgctcatacgtccatttaaat

SEQ ID NO: 1568 - DNA, 96 bp, Aspergillus thermomutatus
  misc_feature: 409
tcctcatcttactgagcacattagaatcattggaaacgcacattggaaacattggaaacgcacattggtagatacattggattggaagacgcacct

SEQ ID NO: 1569 - DNA, 96 bp, Aspergillus thermomutatus
  misc_feature: 409
tacaacgggccccatgggggctctgctctcttgccgtccggaccttctagcagttcgatgcggtggtctacccctggccgatgcgggggtagttta

SEQ ID NO: 1570 - DNA, 96 bp, Aspergillus thermomutatus
  misc_feature: 409
gtgtctcgatcagggtcaaactgcgcaagtatcggcgcagtagtgaacatcttcttcagctgctcgaaccgctgcgtgtgctcatacgtccattta

SEQ ID NO: 1571 - DNA, 96 bp, Aspergillus thermomutatus
  misc_feature: 409
ctcagcgcgcggcgtgcggtcattcctaggcttcgcaaacttctatcggcgctttatacggaacttctcagagatagtacgcccgcttacagccct

SEQ ID NO: 1572 - DNA, 96 bp, Aspergillus thermomutatus
  misc_feature: 409
cagttcgatgcggtggtctacccctggccgatgcgggggtagtttatcagcttgttcgcggctgaagacctccaggtgctcgtggtagtgcgcggg

SEQ ID NO: 1573 - DNA, 96 bp, Aspergillus thermomutatus
  misc_feature: 409
acaacgggccccatgggggctctgctctcttgccgtccggaccttctagcagttcgatgcggtggtctacccctggccgatgcgggggtagtttat

SEQ ID NO: 1574 - DNA, 96 bp, Aspergillus thermomutatus
  misc_feature: 408
cgtgggcatagtcccgctacccctactaaagctgctttagatcagcttataaagggttgtgagatggctatgaatagtgctattcttctagctcaa

SEQ ID NO: 1575 - DNA, 96 bp, Aspergillus thermomutatus
  misc_feature: 408
cctacggtctagcccgtaacattagaactcgctcctcatcttactgagcacattagaatcattggaaacgcacattggaaacattggaaacgcaca

SEQ ID NO: 1576 - DNA, 96 bp, Aspergillus thermomutatus
  misc_feature: 408
tcagcgcgcggcgtgcggtcattcctaggcttcgcaaacttctatcggcgctttatacggaacttctcagagatagtacgcccgcttacagccctc

SEQ ID NO: 1577 - DNA, 96 bp, Aspergillus thermomutatus
  misc_feature: 408
tatgtctgtaacagatcactgatctgttcacaacagatcactgatctgttctcatcagatcattgctctgccgagcataccgctgctctgccgatg

SEQ ID NO: 1578 - DNA, 96 bp, Aspergillus thermomutatus
  misc_feature: 408
gtgggcatagtcccgctacccctactaaagctgctttagatcagcttataaagggttgtgagatggctatgaatagtgctattcttctagctcaag

SEQ ID NO: 1579 - DNA, 96 bp, Aspergillus thermomutatus
  misc_feature: 408
gcgtacgcccttgccagcttcaatgataaacccgaggtatttcgtgctcttgacctcgaactcgcacttgtcgatgtctagctgcaacccagcggc

SEQ ID NO: 1580 - DNA, 96 bp, Aspergillus thermomutatus
  misc_feature: 408
agcctttaccttctcagggtccatgcatactcccttgcctgcttcgacgatgaagcccaagtacttggtgctcttgacctcgaattcgcacttgtc

SEQ ID NO: 1581 - DNA, 96 bp, Aspergillus thermomutatus
  misc_feature: 408
caacagatcaaattggcatacgttggctacaaaaagtctttattcctgagactactggtcgaacgacaggcagatatcgtctcttggttctcgatg

SEQ ID NO: 1582 - DNA, 96 bp, Aspergillus thermomutatus
  misc_feature: 407
tcctaggggcgttcgatcggaagaaagccgacgaactgcccccgcatcgccctggggtcgatcaccgaattgagttgactaagggcgaagacggga

SEQ ID NO: 1583 - DNA, 96 bp, Aspergillus thermomutatus
  misc_feature: 407
accgtgtctcgatcagggtcaaactgcgcaagtatcggcgcagtagtgaacatcttcttcagctgctcgaaccgctgcgtgtgctcatacgtccat

SEQ ID NO: 1584 - DNA, 96 bp, Aspergillus thermomutatus
  misc_feature: 406
gcgggggtagtttatcagcttgttcgcggctgaagacctccaggtgctcgtggtagtgcgcgggcagcttggtcttggggtcggtgtactgcttcg

SEQ ID NO: 1585 - DNA, 96 bp, Aspergillus thermomutatus
  misc_feature: 406
cgggggtagtttatcagcttgttcgcggctgaagacctccaggtgctcgtggtagtgcgcgggcagcttggtcttggggtcggtgtactgcttcgc

SEQ ID NO: 1586 - DNA, 96 bp, Aspergillus thermomutatus
  misc_feature: 405
ttccgtataaagcgccgatagaagtttgcgaagcctaggaatgaccgcacgccgcgcgctgaggtcggggtctgccattccaatatagcctttacc

SEQ ID NO: 1587 - DNA, 96 bp, Aspergillus thermomutatus
  misc_feature: 405
tgtgatcgccgcattccacaagattcgcattgcacccggagatgaatggctgacggccttccgtacgcggtttggtctgtacgaatggttggtgac

SEQ ID NO: 1588 - DNA, 96 bp, Aspergillus thermomutatus
  misc_feature: 405
tgctctcttgccgtccggaccttctagcagttcgatgcggtggtctacccctggccgatgcgggggtagtttatcagcttgttcgcggctgaagac

SEQ ID NO: 1589 - DNA, 96 bp, Aspergillus thermomutatus
  misc_feature: 405
tagcttttaccttgtcggggtccatgcgtacgcccttgccagcttcaatgataaacccgaggtatttcgtgctcttgacctcgaactcgcacttgt

SEQ ID NO: 1590 - DNA, 96 bp, Aspergillus thermomutatus
  misc_feature: 405
taccatgacacgtgaccatcggcagagcagcggtatgctcggcagagcaatgatctgatgagaacagatcagtgatctgttgtgaacagatcagtg

SEQ ID NO: 1591 - DNA, 96 bp, Aspergillus thermomutatus
  misc_feature: 405
gtccatgcatactcccttgcctgcttcgacgatgaagcccaagtacttggtgctcttgacctcgaattcgcacttgtcaatatctagctgtaggcc

SEQ ID NO: 1592 - DNA, 96 bp, Aspergillus thermomutatus
  misc_feature: 405
gcggtggtctacccctggccgatgcgggggtagtttatcagcttgttcgcggctgaagacctccaggtgctcgtggtagtgcgcgggcagcttggt

SEQ ID NO: 1593 - DNA, 96 bp, Aspergillus thermomutatus
  misc_feature: 405
gatgtgatcgccgcattccacaagattcgcattgcacccggagatgaatggctgacggccttccgtacgcggtttggtctgtacgaatggttggtg

SEQ ID NO: 1594 - DNA, 96 bp, Aspergillus thermomutatus
  misc_feature: 404
gtctcgatcagggtcaaactgcgcaagtatcggcgcagtagtgaacatcttcttcagctgctcgaaccgctgcgtgtgctcatacgtccatttaaa

SEQ ID NO: 1595 - DNA, 96 bp, Aspergillus thermomutatus
  misc_feature: 404
ttgatgtgatcgccgcattccacaagattcgcattgcacccggagatgaatggctgacggccttccgtacgcggtttggtctgtacgaatggttgg

SEQ ID NO: 1596 - DNA, 96 bp, Aspergillus thermomutatus
  misc_feature: 404
tgatgtgatcgccgcattccacaagattcgcattgcacccggagatgaatggctgacggccttccgtacgcggtttggtctgtacgaatggttggt

SEQ ID NO: 1597 - DNA, 96 bp, Aspergillus thermomutatus
  misc_feature: 404
cgcccttgccagcttcaatgataaacccgaggtatttcgtgctcttgacctcgaactcgcacttgtcgatgtctagctgcaacccagcggcctgta

SEQ ID NO: 1598 - DNA, 96 bp, Aspergillus thermomutatus
  misc_feature: 404
gtccatgcgtacgcccttgccagcttcaatgataaacccgaggtatttcgtgctcttgacctcgaactcgcacttgtcgatgtctagctgcaaccc

SEQ ID NO: 1599 - DNA, 96 bp, Aspergillus thermomutatus
  misc_feature: 404
cctcgctgtgacaacaaaatattggccatatcttgaacatgagatggtcggggagctgctccacgctgatccatagataatatccactgtataagc

SEQ ID NO: 1600 - DNA, 96 bp, Aspergillus thermomutatus
  misc_feature: 404
catgcatactcccttgcctgcttcgacgatgaagcccaagtacttggtgctcttgacctcgaattcgcacttgtcaatatctagctgtaggcctgc

SEQ ID NO: 1601 - DNA, 96 bp, Aspergillus thermomutatus
  misc_feature: 404
gaagtaccatgacacgtgaccatcggcagagcagcggtatgctcggcagagcaatgatctgatgagaacagatcagtgatctgttgtgaacagatc

SEQ ID NO: 1602 - DNA, 96 bp, Aspergillus thermomutatus
  misc_feature: 404
agcgtgggcatagtcccgctacccctactaaagctgctttagatcagcttataaagggttgtgagatggctatgaatagtgctattcttctagctc

SEQ ID NO: 1603 - DNA, 96 bp, Aspergillus thermomutatus
  misc_feature: 404
gaagttccgtataaagcgccgatagaagtttgcgaagcctaggaatgaccgcacgccgcgcgctgaggtcggggtctgccattccaatatagcctt

SEQ ID NO: 1604 - DNA, 96 bp, Aspergillus thermomutatus
  misc_feature: 404
ccatgcatactcccttgcctgcttcgacgatgaagcccaagtacttggtgctcttgacctcgaattcgcacttgtcaatatctagctgtaggcctg

SEQ ID NO: 1605 - DNA, 96 bp, Aspergillus thermomutatus
  misc_feature: 404
atatgtctgtaacagatcactgatctgttcacaacagatcactgatctgttctcatcagatcattgctctgccgagcataccgctgctctgccgat

SEQ ID NO: 1606 - DNA, 96 bp, Aspergillus thermomutatus
  misc_feature: 403
cagaagtaccatgacacgtgaccatcggcagagcagcggtatgctcggcagagcaatgatctgatgagaacagatcagtgatctgttgtgaacaga

SEQ ID NO: 1607 - DNA, 96 bp, Aspergillus thermomutatus
  misc_feature: 403
gtaccatgacacgtgaccatcggcagagcagcggtatgctcggcagagcaatgatctgatgagaacagatcagtgatctgttgtgaacagatcagt

SEQ ID NO: 1608 - DNA, 96 bp, Aspergillus thermomutatus
  misc_feature: 402
tgtctcgatcagggtcaaactgcgcaagtatcggcgcagtagtgaacatcttcttcagctgctcgaaccgctgcgtgtgctcatacgtccatttaa

SEQ ID NO: 1609 - DNA, 96 bp, Aspergillus thermomutatus
  misc_feature: 402
tgatatgtctgtaacagatcactgatctgttcacaacagatcactgatctgttctcatcagatcattgctctgccgagcataccgctgctctgccg

SEQ ID NO: 1610 - DNA, 96 bp, Aspergillus thermomutatus
  misc_feature: 402
ctgctctcttgccgtccggaccttctagcagttcgatgcggtggtctacccctggccgatgcgggggtagtttatcagcttgttcgcggctgaaga

SEQ ID NO: 1611 - DNA, 96 bp, Aspergillus thermomutatus
  misc_feature: 402
gaacgatcctttcccaagccagttgagcactgactaccagccgcccgctgtgctagtcgacggcgaggccgaatatgaggttgaatggatactgga

SEQ ID NO: 1612 - DNA, 96 bp, Aspergillus thermomutatus
  misc_feature: 402
atgtgatcgccgcattccacaagattcgcattgcacccggagatgaatggctgacggccttccgtacgcggtttggtctgtacgaatggttggtga

SEQ ID NO: 1613 - DNA, 96 bp, Aspergillus thermomutatus
  misc_feature: 402
ggtcaaactgcgcaagtatcggcgcagtagtgaacatcttcttcagctgctcgaaccgctgcgtgtgctcatacgtccatttaaatggtgtacctt

SEQ ID NO: 1614 - DNA, 96 bp, Aspergillus thermomutatus
  misc_feature: 402
ggccccatgggggctctgctctcttgccgtccggaccttctagcagttcgatgcggtggtctacccctggccgatgcgggggtagtttatcagctt

SEQ ID NO: 1615 - DNA, 96 bp, Aspergillus thermomutatus
  misc_feature: 402
cgggccccatgggggctctgctctcttgccgtccggaccttctagcagttcgatgcggtggtctacccctggccgatgcgggggtagtttatcagc

SEQ ID NO: 1616 - DNA, 96 bp, Aspergillus thermomutatus
  misc_feature: 402
ccatgggggctctgctctcttgccgtccggaccttctagcagttcgatgcggtggtctacccctggccgatgcgggggtagtttatcagcttgttc

SEQ ID NO: 1617 - DNA, 96 bp, Aspergillus thermomutatus
  misc_feature: 402
agaagtaccatgacacgtgaccatcggcagagcagcggtatgctcggcagagcaatgatctgatgagaacagatcagtgatctgttgtgaacagat

SEQ ID NO: 1618 - DNA, 96 bp, Aspergillus thermomutatus
  misc_feature: 401
cagcgcgcggcgtgcggtcattcctaggcttcgcaaacttctatcggcgctttatacggaacttctcagagatagtacgcccgcttacagccctca

SEQ ID NO: 1619 - DNA, 96 bp, Aspergillus thermomutatus
  misc_feature: 401
ggcatagtcccgctacccctactaaagctgctttagatcagcttataaagggttgtgagatggctatgaatagtgctattcttctagctcaagaga

SEQ ID NO: 1620 - DNA, 96 bp, Aspergillus thermomutatus
  misc_feature: 401
tagcctttaccttctcagggtccatgcatactcccttgcctgcttcgacgatgaagcccaagtacttggtgctcttgacctcgaattcgcacttgt

SEQ ID NO: 1621 - DNA, 96 bp, Aspergillus thermomutatus
  misc_feature: 401
ggtggtctacccctggccgatgcgggggtagtttatcagcttgttcgcggctgaagacctccaggtgctcgtggtagtgcgcgggcagcttggtct

SEQ ID NO: 1622 - DNA, 96 bp, Aspergillus thermomutatus
  misc_feature: 401
gggggtagtttatcagcttgttcgcggctgaagacctccaggtgctcgtggtagtgcgcgggcagcttggtcttggggtcggtgtactgcttcgct

SEQ ID NO: 1623 - DNA, 96 bp, Aspergillus thermomutatus
  misc_feature: 401
cggtggtctacccctggccgatgcgggggtagtttatcagcttgttcgcggctgaagacctccaggtgctcgtggtagtgcgcgggcagcttggtc

SEQ ID NO: 1624 - DNA, 96 bp, Aspergillus thermomutatus
  misc_feature: 400
agcgcgcggcgtgcggtcattcctaggcttcgcaaacttctatcggcgctttatacggaacttctcagagatagtacgcccgcttacagccctcac

SEQ ID NO: 1625 - DNA, 96 bp, Aspergillus thermomutatus
  misc_feature: 400
gtataaagcgccgatagaagtttgcgaagcctaggaatgaccgcacgccgcgcgctgaggtcggggtctgccattccaatatagcctttaccttct

SEQ ID NO: 1626 - DNA, 96 bp, Aspergillus thermomutatus
  misc_feature: 400
ctgtacaacgggccccatgggggctctgctctcttgccgtccggaccttctagcagttcgatgcggtggtctacccctggccgatgcgggggtagt

SEQ ID NO: 1627 - DNA, 96 bp, Aspergillus thermomutatus
  misc_feature: 400
ccatgacacgtgaccatcggcagagcagcggtatgctcggcagagcaatgatctgatgagaacagatcagtgatctgttgtgaacagatcagtgat

SEQ ID NO: 1628 - DNA, 96 bp, Aspergillus thermomutatus
  misc_feature: 400
aagagacgatatctgcctgtcgttcgaccagtagtctcaggaataaagactttttgtagccaacgtatgccaatttgatctgttgtccatccattt

SEQ ID NO: 1629 - DNA, 96 bp, Aspergillus thermomutatus
  misc_feature: 399
agtcataggttttcctacggtctagcccgtaacattagaactcgctcctcatcttactgagcacattagaatcattggaaacgcacattggaaaca

SEQ ID NO: 1630 - DNA, 96 bp, Aspergillus thermomutatus
  misc_feature: 399
ctgtaacagatcactgatctgttcacaacagatcactgatctgttctcatcagatcattgctctgccgagcataccgctgctctgccgatggtcac

SEQ ID NO: 1631 - DNA, 96 bp, Aspergillus thermomutatus
  misc_feature: 399
gggcatagtcccgctacccctactaaagctgctttagatcagcttataaagggttgtgagatggctatgaatagtgctattcttctagctcaagag

SEQ ID NO: 1632 - DNA, 96 bp, Aspergillus thermomutatus
  misc_feature: 399
ctgatatgtctgtaacagatcactgatctgttcacaacagatcactgatctgttctcatcagatcattgctctgccgagcataccgctgctctgcc

SEQ ID NO: 1633 - DNA, 96 bp, Aspergillus thermomutatus
  misc_feature: 399
gcagttcgatgcggtggtctacccctggccgatgcgggggtagtttatcagcttgttcgcggctgaagacctccaggtgctcgtggtagtgcgcgg

SEQ ID NO: 1634 - DNA, 96 bp, Aspergillus thermomutatus
  misc_feature: 399
ctacggtctagcccgtaacattagaactcgctcctcatcttactgagcacattagaatcattggaaacgcacattggaaacattggaaacgcacat

SEQ ID NO: 1635 - DNA, 96 bp, Aspergillus thermomutatus
  misc_feature: 399
caagagacgatatctgcctgtcgttcgaccagtagtctcaggaataaagactttttgtagccaacgtatgccaatttgatctgttgtccatccatt

SEQ ID NO: 1636 - DNA, 96 bp, Aspergillus thermomutatus
  misc_feature: 398
tggtctacccctggccgatgcgggggtagtttatcagcttgttcgcggctgaagacctccaggtgctcgtggtagtgcgcgggcagcttggtcttg

SEQ ID NO: 1637 - DNA, 96 bp, Aspergillus thermomutatus
  misc_feature: 398
tccatgcgtacgcccttgccagcttcaatgataaacccgaggtatttcgtgctcttgacctcgaactcgcacttgtcgatgtctagctgcaaccca

SEQ ID NO: 1638 - DNA, 96 bp, Aspergillus thermomutatus
  misc_feature: 398
tccatgcatactcccttgcctgcttcgacgatgaagcccaagtacttggtgctcttgacctcgaattcgcacttgtcaatatctagctgtaggcct

SEQ ID NO: 1639 - DNA, 96 bp, Aspergillus thermomutatus
  misc_feature: 398
gctgaagacctccaggtgctcgtggtagtgcgcgggcagcttggtcttggggtcggtgtactgcttcgcttgcaaggccttattgatatccttgag

SEQ ID NO: 1640 - DNA, 96 bp, Aspergillus thermomutatus
  misc_feature: 398
gatggacaacagatcaaattggcatacgttggctacaaaaagtctttattcctgagactactggtcgaacgacaggcagatatcgtctcttggttc

SEQ ID NO: 1641 - DNA, 96 bp, Aspergillus thermomutatus
  misc_feature: 398
agtaccatgacacgtgaccatcggcagagcagcggtatgctcggcagagcaatgatctgatgagaacagatcagtgatctgttgtgaacagatcag

SEQ ID NO: 1642 - DNA, 96 bp, Aspergillus thermomutatus
  misc_feature: 397
ttgttcgcggctgaagacctccaggtgctcgtggtagtgcgcgggcagcttggtcttggggtcggtgtactgcttcgcttgcaaggccttattgat

SEQ ID NO: 1643 - DNA, 96 bp, Aspergillus thermomutatus
  misc_feature: 397
tgaatgagcaggcatgcagataggaataatattattctcactgcaaatattgtcgaattcaggggttagatggctgccatggccatcgagaaccaa

SEQ ID NO: 1644 - DNA, 96 bp, Aspergillus thermomutatus
  misc_feature: 397
tgggcatagtcccgctacccctactaaagctgctttagatcagcttataaagggttgtgagatggctatgaatagtgctattcttctagctcaaga

SEQ ID NO: 1645 - DNA, 96 bp, Aspergillus thermomutatus
  misc_feature: 397
tctgctctcttgccgtccggaccttctagcagttcgatgcggtggtctacccctggccgatgcgggggtagtttatcagcttgttcgcggctgaag

SEQ ID NO: 1646 - DNA, 96 bp, Aspergillus thermomutatus
  misc_feature: 397
cttgttcgcggctgaagacctccaggtgctcgtggtagtgcgcgggcagcttggtcttggggtcggtgtactgcttcgcttgcaaggccttattga

SEQ ID NO: 1647 - DNA, 96 bp, Aspergillus thermomutatus
  misc_feature: 397
gttccgtataaagcgccgatagaagtttgcgaagcctaggaatgaccgcacgccgcgcgctgaggtcggggtctgccattccaatatagcctttac

SEQ ID NO: 1648 - DNA, 96 bp, Aspergillus thermomutatus
  misc_feature: 397
catgacacgtgaccatcggcagagcagcggtatgctcggcagagcaatgatctgatgagaacagatcagtgatctgttgtgaacagatcagtgatc

SEQ ID NO: 1649 - DNA, 96 bp, Aspergillus thermomutatus
  misc_feature: 397
agcaggcatgcagataggaataatattattctcactgcaaatattgtcgaattcaggggttagatggctgccatggccatcgagaaccaagagacg

SEQ ID NO: 1650 - DNA, 96 bp, Aspergillus thermomutatus
  misc_feature: 397
ccgtataaagcgccgatagaagtttgcgaagcctaggaatgaccgcacgccgcgcgctgaggtcggggtctgccattccaatatagcctttacctt

SEQ ID NO: 1651 - DNA, 96 bp, Aspergillus thermomutatus
  misc_feature: 396
ttcgcggctgaagacctccaggtgctcgtggtagtgcgcgggcagcttggtcttggggtcggtgtactgcttcgcttgcaaggccttattgatatc

SEQ ID NO: 1652 - DNA, 96 bp, Aspergillus thermomutatus
  misc_feature: 396
tgcgtacgcccttgccagcttcaatgataaacccgaggtatttcgtgctcttgacctcgaactcgcacttgtcgatgtctagctgcaacccagcgg

SEQ ID NO: 1653 - DNA, 96 bp, Aspergillus thermomutatus
  misc_feature: 396
aagtaccatgacacgtgaccatcggcagagcagcggtatgctcggcagagcaatgatctgatgagaacagatcagtgatctgttgtgaacagatca

SEQ ID NO: 1654 - DNA, 96 bp, Aspergillus thermomutatus
  misc_feature: 396
atagcttttaccttgtcggggtccatgcgtacgcccttgccagcttcaatgataaacccgaggtatttcgtgctcttgacctcgaactcgcacttg

SEQ ID NO: 1655 - DNA, 96 bp, Aspergillus thermomutatus
  misc_feature: 395
tgtacaacgggccccatgggggctctgctctcttgccgtccggaccttctagcagttcgatgcggtggtctacccctggccgatgcgggggtagtt

SEQ ID NO: 1656 - DNA, 96 bp, Aspergillus thermomutatus
  misc_feature: 395
tacggtctagcccgtaacattagaactcgctcctcatcttactgagcacattagaatcattggaaacgcacattggaaacattggaaacgcacatt

SEQ ID NO: 1657 - DNA, 96 bp, Aspergillus thermomutatus
  misc_feature: 395
gcagttcttcgcgcgacatgctgtacaacgggccccatgggggctctgctctcttgccgtccggaccttctagcagttcgatgcggtggtctaccc

SEQ ID NO: 1658 - DNA, 96 bp, Aspergillus thermomutatus
  misc_feature: 395
ccaagagacgatatctgcctgtcgttcgaccagtagtctcaggaataaagactttttgtagccaacgtatgccaatttgatctgttgtccatccat

SEQ ID NO: 1659 - DNA, 96 bp, Aspergillus thermomutatus
  misc_feature: 394
ctctgctctcttgccgtccggaccttctagcagttcgatgcggtggtctacccctggccgatgcgggggtagtttatcagcttgttcgcggctgaa

SEQ ID NO: 1660 - DNA, 96 bp, Aspergillus thermomutatus
  misc_feature: 394
tgtaacagatcactgatctgttcacaacagatcactgatctgttctcatcagatcattgctctgccgagcataccgctgctctgccgatggtcacg

SEQ ID NO: 1661 - DNA, 96 bp, Aspergillus thermomutatus
  misc_feature: 394
taacagatcactgatctgttcacaacagatcactgatctgttctcatcagatcattgctctgccgagcataccgctgctctgccgatggtcacgtg

SEQ ID NO: 1662 - DNA, 96 bp, Aspergillus thermomutatus
  misc_feature: 394
gggtcaaactgcgcaagtatcggcgcagtagtgaacatcttcttcagctgctcgaaccgctgcgtgtgctcatacgtccatttaaatggtgtacct

SEQ ID NO: 1663 - DNA, 96 bp, Aspergillus thermomutatus
  misc_feature: 394
gggccccatgggggctctgctctcttgccgtccggaccttctagcagttcgatgcggtggtctacccctggccgatgcgggggtagtttatcagct

SEQ ID NO: 1664 - DNA, 96 bp, Aspergillus thermomutatus
  misc_feature: 394
actgatatgtctgtaacagatcactgatctgttcacaacagatcactgatctgttctcatcagatcattgctctgccgagcataccgctgctctgc

SEQ ID NO: 1665 - DNA, 96 bp, Aspergillus thermomutatus
  misc_feature: 393
ttacagagctgctagagaagaacttcatacgtgtcagcagctcgtcagctgcagccccggtgctgctcgtgcgcaaacctggtggaggtctacgtt

SEQ ID NO: 1666 - DNA, 96 bp, Aspergillus thermomutatus
  misc_feature: 393
tgtctgtaacagatcactgatctgttcacaacagatcactgatctgttctcatcagatcattgctctgccgagcataccgctgctctgccgatggt

SEQ ID NO: 1667 - DNA, 96 bp, Aspergillus thermomutatus
  misc_feature: 393
tatagcttttaccttgtcggggtccatgcgtacgcccttgccagcttcaatgataaacccgaggtatttcgtgctcttgacctcgaactcgcactt

SEQ ID NO: 1668 - DNA, 96 bp, Aspergillus thermomutatus
  misc_feature: 393
ggggctctgctctcttgccgtccggaccttctagcagttcgatgcggtggtctacccctggccgatgcgggggtagtttatcagcttgttcgcggc

SEQ ID NO: 1669 - DNA, 96 bp, Aspergillus thermomutatus
  misc_feature: 393
ggctctgctctcttgccgtccggaccttctagcagttcgatgcggtggtctacccctggccgatgcgggggtagtttatcagcttgttcgcggctg

SEQ ID NO: 1670 - DNA, 96 bp, Aspergillus thermomutatus
  misc_feature: 393
gcagaagtaccatgacacgtgaccatcggcagagcagcggtatgctcggcagagcaatgatctgatgagaacagatcagtgatctgttgtgaacag

SEQ ID NO: 1671 - DNA, 96 bp, Aspergillus thermomutatus
  misc_feature: 393
cttgccgtccggaccttctagcagttcgatgcggtggtctacccctggccgatgcgggggtagtttatcagcttgttcgcggctgaagacctccag

SEQ ID NO: 1672 - DNA, 96 bp, Aspergillus thermomutatus
  misc_feature: 393
ctcgctgtgacaacaaaatattggccatatcttgaacatgagatggtcggggagctgctccacgctgatccatagataatatccactgtataagcg

SEQ ID NO: 1673 - DNA, 96 bp, Aspergillus thermomutatus
  misc_feature: 393
atgtctgtaacagatcactgatctgttcacaacagatcactgatctgttctcatcagatcattgctctgccgagcataccgctgctctgccgatgg

SEQ ID NO: 1674 - DNA, 96 bp, Aspergillus thermomutatus
  misc_feature: 393
atagcctttaccttctcagggtccatgcatactcccttgcctgcttcgacgatgaagcccaagtacttggtgctcttgacctcgaattcgcacttg

SEQ ID NO: 1675 - DNA, 96 bp, Aspergillus thermomutatus
  misc_feature: 392
cgcgcgcgcgagcattaggcggcagcggtccggggcaggccagcaggcaggggggcgcgcgcgcggcggtgaccagttggccggggccctcgagca

SEQ ID NO: 1676 - DNA, 96 bp, Aspergillus thermomutatus
  misc_feature: 392
tccgtataaagcgccgatagaagtttgcgaagcctaggaatgaccgcacgccgcgcgctgaggtcggggtctgccattccaatatagcctttacct

SEQ ID NO: 1677 - DNA, 96 bp, Aspergillus thermomutatus
  misc_feature: 392
gctctgctctcttgccgtccggaccttctagcagttcgatgcggtggtctacccctggccgatgcgggggtagtttatcagcttgttcgcggctga

SEQ ID NO: 1678 - DNA, 96 bp, Aspergillus thermomutatus
  misc_feature: 392
gtgatcgccgcattccacaagattcgcattgcacccggagatgaatggctgacggccttccgtacgcggtttggtctgtacgaatggttggtgacc

SEQ ID NO: 1679 - DNA, 96 bp, Aspergillus thermomutatus
  misc_feature: 392
gggctctgctctcttgccgtccggaccttctagcagttcgatgcggtggtctacccctggccgatgcgggggtagtttatcagcttgttcgcggct

SEQ ID NO: 1680 - DNA, 96 bp, Aspergillus thermomutatus
  misc_feature: 392
gcgcgcggcgtgcggtcattcctaggcttcgcaaacttctatcggcgctttatacggaacttctcagagatagtacgcccgcttacagccctcacg

SEQ ID NO: 1681 - DNA, 96 bp, Aspergillus thermomutatus
  misc_feature: 392
gcattccacaagattcgcattgcacccggagatgaatggctgacggccttccgtacgcggtttggtctgtacgaatggttggtgaccccttttggc

SEQ ID NO: 1682 - DNA, 96 bp, Aspergillus thermomutatus
  misc_feature: 392
cttacagagctgctagagaagaacttcatacgtgtcagcagctcgtcagctgcagccccggtgctgctcgtgcgcaaacctggtggaggtctacgt

SEQ ID NO: 1683 - DNA, 96 bp, Aspergillus thermomutatus
  misc_feature: 392
ccccatgggggctctgctctcttgccgtccggaccttctagcagttcgatgcggtggtctacccctggccgatgcgggggtagtttatcagcttgt

SEQ ID NO: 1684 - DNA, 96 bp, Aspergillus thermomutatus
  misc_feature: 391
tggatggacaacagatcaaattggcatacgttggctacaaaaagtctttattcctgagactactggtcgaacgacaggcagatatcgtctcttggt

SEQ ID NO: 1685 - DNA, 96 bp, Aspergillus thermomutatus
  misc_feature: 391
gtaacagatcactgatctgttcacaacagatcactgatctgttctcatcagatcattgctctgccgagcataccgctgctctgccgatggtcacgt

SEQ ID NO: 1686 - DNA, 96 bp, Aspergillus thermomutatus
  misc_feature: 391
agcagttcttcgcgcgacatgctgtacaacgggccccatgggggctctgctctcttgccgtccggaccttctagcagttcgatgcggtggtctacc

SEQ ID NO: 1687 - DNA, 96 bp, Aspergillus thermomutatus
  misc_feature: 391
catgcgtacgcccttgccagcttcaatgataaacccgaggtatttcgtgctcttgacctcgaactcgcacttgtcgatgtctagctgcaacccagc

SEQ ID NO: 1688 - DNA, 96 bp, Aspergillus thermomutatus
  misc_feature: 391
ccatgcgtacgcccttgccagcttcaatgataaacccgaggtatttcgtgctcttgacctcgaactcgcacttgtcgatgtctagctgcaacccag

SEQ ID NO: 1689 - DNA, 96 bp, Aspergillus thermomutatus
  misc_feature: 391
cccatgggggctctgctctcttgccgtccggaccttctagcagttcgatgcggtggtctacccctggccgatgcgggggtagtttatcagcttgtt

SEQ ID NO: 1690 - DNA, 96 bp, Aspergillus thermomutatus
  misc_feature: 391
atggacaacagatcaaattggcatacgttggctacaaaaagtctttattcctgagactactggtcgaacgacaggcagatatcgtctcttggttct

SEQ ID NO: 1691 - DNA, 96 bp, Aspergillus thermomutatus
  misc_feature: 390
tagtcataggttttcctacggtctagcccgtaacattagaactcgctcctcatcttactgagcacattagaatcattggaaacgcacattggaaac

SEQ ID NO: 1692 - DNA, 96 bp, Aspergillus thermomutatus
  misc_feature: 390
gggtccatgcgtacgcccttgccagcttcaatgataaacccgaggtatttcgtgctcttgacctcgaactcgcacttgtcgatgtctagctgcaac

SEQ ID NO: 1693 - DNA, 96 bp, Aspergillus thermomutatus
  misc_feature: 390
ctcttgccgtccggaccttctagcagttcgatgcggtggtctacccctggccgatgcgggggtagtttatcagcttgttcgcggctgaagacctcc

SEQ ID NO: 1694 - DNA, 96 bp, Aspergillus thermomutatus
  misc_feature: 390
cgtataaagcgccgatagaagtttgcgaagcctaggaatgaccgcacgccgcgcgctgaggtcggggtctgccattccaatatagcctttaccttc

SEQ ID NO: 1695 - DNA, 96 bp, Aspergillus thermomutatus
  misc_feature: 390
ctgaagacctccaggtgctcgtggtagtgcgcgggcagcttggtcttggggtcggtgtactgcttcgcttgcaaggccttattgatatccttgagg

SEQ ID NO: 1696 - DNA, 96 bp, Aspergillus thermomutatus
  misc_feature: 390
atgcgtacgcccttgccagcttcaatgataaacccgaggtatttcgtgctcttgacctcgaactcgcacttgtcgatgtctagctgcaacccagcg

SEQ ID NO: 1697 - DNA, 96 bp, Aspergillus thermomutatus
  misc_feature: 389
ttgccgtccggaccttctagcagttcgatgcggtggtctacccctggccgatgcgggggtagtttatcagcttgttcgcggctgaagacctccagg

SEQ ID NO: 1698 - DNA, 96 bp, Aspergillus thermomutatus
  misc_feature: 389
tgtatagcgaacccctgtgcgcttatctgtctgaccactaacttcggctcattctcaacccgttccactgcgaatccgtctgctaatcgcagtcgc

SEQ ID NO: 1699 - DNA, 96 bp, Aspergillus thermomutatus
  misc_feature: 389
gtatagcttttaccttgtcggggtccatgcgtacgcccttgccagcttcaatgataaacccgaggtatttcgtgctcttgacctcgaactcgcact

SEQ ID NO: 1700 - DNA, 96 bp, Aspergillus thermomutatus
  misc_feature: 389
gatcgccgcattccacaagattcgcattgcacccggagatgaatggctgacggccttccgtacgcggtttggtctgtacgaatggttggtgacccc

SEQ ID NO: 1701 - DNA, 96 bp, Aspergillus thermomutatus
  misc_feature: 389
gcgtaagacgcttacagagctgctagagaagaacttcatacgtgtcagcagctcgtcagctgcagccccggtgctgctcgtgcgcaaacctggtgg

SEQ ID NO: 1702 - DNA, 96 bp, Aspergillus thermomutatus
  misc_feature: 389
cttgtcggggtccatgcgtacgcccttgccagcttcaatgataaacccgaggtatttcgtgctcttgacctcgaactcgcacttgtcgatgtctag

SEQ ID NO: 1703 - DNA, 96 bp, Aspergillus thermomutatus
  misc_feature: 389
acggtctagcccgtaacattagaactcgctcctcatcttactgagcacattagaatcattggaaacgcacattggaaacattggaaacgcacattg

SEQ ID NO: 1704 - DNA, 96 bp, Aspergillus thermomutatus
  misc_feature: 388
cctagtcataggttttcctacggtctagcccgtaacattagaactcgctcctcatcttactgagcacattagaatcattggaaacgcacattggaa

SEQ ID NO: 1705 - DNA, 96 bp, Aspergillus thermomutatus
  misc_feature: 388
tcttgccgtccggaccttctagcagttcgatgcggtggtctacccctggccgatgcgggggtagtttatcagcttgttcgcggctgaagacctcca

SEQ ID NO: 1706 - DNA, 96 bp, Aspergillus thermomutatus
  misc_feature: 388
tacctgttttacctgtcgtctgtgctccgagagtgacccatcagtgaaaaccaatatatcatcaacgtacgcagatgcaaattcatccagaaagtc

SEQ ID NO: 1707 - DNA, 96 bp, Aspergillus thermomutatus
  misc_feature: 387
tgatcgccgcattccacaagattcgcattgcacccggagatgaatggctgacggccttccgtacgcggtttggtctgtacgaatggttggtgaccc

SEQ ID NO: 1708 - DNA, 96 bp, Aspergillus thermomutatus
  misc_feature: 387
cgtaagacgcttacagagctgctagagaagaacttcatacgtgtcagcagctcgtcagctgcagccccggtgctgctcgtgcgcaaacctggtgga

SEQ ID NO: 1709 - DNA, 96 bp, Aspergillus thermomutatus
  misc_feature: 387
ctccacgaccgtgtctcgatcagggtcaaactgcgcaagtatcggcgcagtagtgaacatcttcttcagctgctcgaaccgctgcgtgtgctcata

SEQ ID NO: 1710 - DNA, 96 bp, Aspergillus thermomutatus
  misc_feature: 387
ccttgtcggggtccatgcgtacgcccttgccagcttcaatgataaacccgaggtatttcgtgctcttgacctcgaactcgcacttgtcgatgtcta

SEQ ID NO: 1711 - DNA, 96 bp, Aspergillus thermomutatus
  misc_feature: 387
tacagagctgctagagaagaacttcatacgtgtcagcagctcgtcagctgcagccccggtgctgctcgtgcgcaaacctggtggaggtctacgttt

SEQ ID NO: 1712 - DNA, 96 bp, Aspergillus thermomutatus
  misc_feature: 387
ggtccatgcgtacgcccttgccagcttcaatgataaacccgaggtatttcgtgctcttgacctcgaactcgcacttgtcgatgtctagctgcaacc

SEQ ID NO: 1713 - DNA, 96 bp, Aspergillus thermomutatus
  misc_feature: 387
cccgtagcccagttggaagcatccgtctccacgaccgtgtctcgatcagggtcaaactgcgcaagtatcggcgcagtagtgaacatcttcttcagc

SEQ ID NO: 1714 - DNA, 96 bp, Aspergillus thermomutatus
  misc_feature: 387
ccgcattccacaagattcgcattgcacccggagatgaatggctgacggccttccgtacgcggtttggtctgtacgaatggttggtgaccccttttg

SEQ ID NO: 1715 - DNA, 96 bp, Aspergillus thermomutatus
  misc_feature: 387
acctgttttacctgtcgtctgtgctccgagagtgacccatcagtgaaaaccaatatatcatcaacgtacgcagatgcaaattcatccagaaagtct

SEQ ID NO: 1716 - DNA, 96 bp, Aspergillus thermomutatus
  misc_feature: 386
ttgtcggggtccatgcgtacgcccttgccagcttcaatgataaacccgaggtatttcgtgctcttgacctcgaactcgcacttgtcgatgtctagc

SEQ ID NO: 1717 - DNA, 96 bp, Aspergillus thermomutatus
  misc_feature: 386
taggtagcttggtgatgaagtcgatagctatctcgcgccatttgcggtctggaatcagcaacggtttcagcaggccttgacgccgctcacgccaca

SEQ ID NO: 1718 - DNA, 96 bp, Aspergillus thermomutatus
  misc_feature: 386
atggcattcaatgctcggtaatcaacacagaaacgtagacctccaccaggtttgcgcacgagcagcaccggggctgcagctgacgagctgctgaca

SEQ ID NO: 1719 - DNA, 96 bp, Aspergillus thermomutatus
  misc_feature: 386
atggacactgttttcgagctgaacaacgcgccaactcacataaattgactaaagctgaagaggaatcgcttatacagtggatattatctatggatc

SEQ ID NO: 1720 - DNA, 96 bp, Aspergillus thermomutatus
  misc_feature: 386
cctgttttacctgtcgtctgtgctccgagagtgacccatcagtgaaaaccaatatatcatcaacgtacgcagatgcaaattcatccagaaagtctc

SEQ ID NO: 1721 - DNA, 96 bp, Aspergillus thermomutatus
  misc_feature: 386
acagagctgctagagaagaacttcatacgtgtcagcagctcgtcagctgcagccccggtgctgctcgtgcgcaaacctggtggaggtctacgtttc

SEQ ID NO: 1722 - DNA, 96 bp, Aspergillus thermomutatus
  misc_feature: 386
accttgtcggggtccatgcgtacgcccttgccagcttcaatgataaacccgaggtatttcgtgctcttgacctcgaactcgcacttgtcgatgtct

SEQ ID NO: 1723 - DNA, 96 bp, Aspergillus thermomutatus
  misc_feature: 385
tgccgtccggaccttctagcagttcgatgcggtggtctacccctggccgatgcgggggtagtttatcagcttgttcgcggctgaagacctccaggt

SEQ ID NO: 1724 - DNA, 96 bp, Aspergillus thermomutatus
  misc_feature: 385
tgaagacctccaggtgctcgtggtagtgcgcgggcagcttggtcttggggtcggtgtactgcttcgcttgcaaggccttattgatatccttgaggg

SEQ ID NO: 1725 - DNA, 96 bp, Aspergillus thermomutatus
  misc_feature: 385
tcgcggctgaagacctccaggtgctcgtggtagtgcgcgggcagcttggtcttggggtcggtgtactgcttcgcttgcaaggccttattgatatcc

SEQ ID NO: 1726 - DNA, 96 bp, Aspergillus thermomutatus
  misc_feature: 385
gacaacagatcaaattggcatacgttggctacaaaaagtctttattcctgagactactggtcgaacgacaggcagatatcgtctcttggttctcga

SEQ ID NO: 1727 - DNA, 96 bp, Aspergillus thermomutatus
  misc_feature: 385
gtcggggtccatgcgtacgcccttgccagcttcaatgataaacccgaggtatttcgtgctcttgacctcgaactcgcacttgtcgatgtctagctg

SEQ ID NO: 1728 - DNA, 96 bp, Aspergillus thermomutatus
  misc_feature: 385
cagggtcaaactgcgcaagtatcggcgcagtagtgaacatcttcttcagctgctcgaaccgctgcgtgtgctcatacgtccatttaaatggtgtac

SEQ ID NO: 1729 - DNA, 96 bp, Aspergillus thermomutatus
  misc_feature: 385
ggcattcaatgctcggtaatcaacacagaaacgtagacctccaccaggtttgcgcacgagcagcaccggggctgcagctgacgagctgctgacacg

SEQ ID NO: 1730 - DNA, 96 bp, Aspergillus thermomutatus
  misc_feature: 384
caagtacctgttttacctgtcgtctgtgctccgagagtgacccatcagtgaaaaccaatatatcatcaacgtacgcagatgcaaattcatccagaa

SEQ ID NO: 1731 - DNA, 96 bp, Aspergillus thermomutatus
  misc_feature: 384
taggcgcgcaagtacctgttttacctgtcgtctgtgctccgagagtgacccatcagtgaaaaccaatatatcatcaacgtacgcagatgcaaattc

SEQ ID NO: 1732 - DNA, 96 bp, Aspergillus thermomutatus
  misc_feature: 384
aggtagcttggtgatgaagtcgatagctatctcgcgccatttgcggtctggaatcagcaacggtttcagcaggccttgacgccgctcacgccacac

SEQ ID NO: 1733 - DNA, 96 bp, Aspergillus thermomutatus
  misc_feature: 384
aatggcattcaatgctcggtaatcaacacagaaacgtagacctccaccaggtttgcgcacgagcagcaccggggctgcagctgacgagctgctgac

SEQ ID NO: 1734 - DNA, 96 bp, Aspergillus thermomutatus
  misc_feature: 384
gtaggcgcgcaagtacctgttttacctgtcgtctgtgctccgagagtgacccatcagtgaaaaccaatatatcatcaacgtacgcagatgcaaatt

SEQ ID NO: 1735 - DNA, 96 bp, Aspergillus thermomutatus
  misc_feature: 384
gccgcattccacaagattcgcattgcacccggagatgaatggctgacggccttccgtacgcggtttggtctgtacgaatggttggtgacccctttt

SEQ ID NO: 1736 - DNA, 96 bp, Aspergillus thermomutatus
  misc_feature: 384
cacgaccgtgtctcgatcagggtcaaactgcgcaagtatcggcgcagtagtgaacatcttcttcagctgctcgaaccgctgcgtgtgctcatacgt

SEQ ID NO: 1737 - DNA, 96 bp, Aspergillus thermomutatus
  misc_feature: 383
tgtcggggtccatgcgtacgcccttgccagcttcaatgataaacccgaggtatttcgtgctcttgacctcgaactcgcacttgtcgatgtctagct

SEQ ID NO: 1738 - DNA, 96 bp, Aspergillus thermomutatus
  misc_feature: 383
tcgccgcattccacaagattcgcattgcacccggagatgaatggctgacggccttccgtacgcggtttggtctgtacgaatggttggtgacccctt

SEQ ID NO: 1739 - DNA, 96 bp, Aspergillus thermomutatus
  misc_feature: 383
tagtccaaatggatggacaacagatcaaattggcatacgttggctacaaaaagtctttattcctgagactactggtcgaacgacaggcagatatcg

SEQ ID NO: 1740 - DNA, 96 bp, Aspergillus thermomutatus
  misc_feature: 383
ggatggacaacagatcaaattggcatacgttggctacaaaaagtctttattcctgagactactggtcgaacgacaggcagatatcgtctcttggtt

SEQ ID NO: 1741 - DNA, 96 bp, Aspergillus thermomutatus
  misc_feature: 383
gcttacagagctgctagagaagaacttcatacgtgtcagcagctcgtcagctgcagccccggtgctgctcgtgcgcaaacctggtggaggtctacg

SEQ ID NO: 1742 - DNA, 96 bp, Aspergillus thermomutatus
  misc_feature: 383
cgccgcattccacaagattcgcattgcacccggagatgaatggctgacggccttccgtacgcggtttggtctgtacgaatggttggtgaccccttt

SEQ ID NO: 1743 - DNA, 96 bp, Aspergillus thermomutatus
  misc_feature: 383
atcgccgcattccacaagattcgcattgcacccggagatgaatggctgacggccttccgtacgcggtttggtctgtacgaatggttggtgacccct

SEQ ID NO: 1744 - DNA, 96 bp, Aspergillus thermomutatus
  misc_feature: 382
gcaagtacctgttttacctgtcgtctgtgctccgagagtgacccatcagtgaaaaccaatatatcatcaacgtacgcagatgcaaattcatccaga

SEQ ID NO: 1745 - DNA, 96 bp, Aspergillus thermomutatus
  misc_feature: 382
tcgatcagggtcaaactgcgcaagtatcggcgcagtagtgaacatcttcttcagctgctcgaaccgctgcgtgtgctcatacgtccatttaaatgg

SEQ ID NO: 1746 - DNA, 96 bp, Aspergillus thermomutatus
  misc_feature: 382
agttccgtataaagcgccgatagaagtttgcgaagcctaggaatgaccgcacgccgcgcgctgaggtcggggtctgccattccaatatagccttta

SEQ ID NO: 1747 - DNA, 96 bp, Aspergillus thermomutatus
  misc_feature: 382
gtacctgttttacctgtcgtctgtgctccgagagtgacccatcagtgaaaaccaatatatcatcaacgtacgcagatgcaaattcatccagaaagt

SEQ ID NO: 1748 - DNA, 96 bp, Aspergillus thermomutatus
  misc_feature: 382
ggacaacagatcaaattggcatacgttggctacaaaaagtctttattcctgagactactggtcgaacgacaggcagatatcgtctcttggttctcg

SEQ ID NO: 1749 - DNA, 96 bp, Aspergillus thermomutatus
  misc_feature: 382
acgaccgtgtctcgatcagggtcaaactgcgcaagtatcggcgcagtagtgaacatcttcttcagctgctcgaaccgctgcgtgtgctcatacgtc

SEQ ID NO: 1750 - DNA, 96 bp, Aspergillus thermomutatus
  misc_feature: 382
aatggacactgttttcgagctgaacaacgcgccaactcacataaattgactaaagctgaagaggaatcgcttatacagtggatattatctatggat

SEQ ID NO: 1751 - DNA, 96 bp, Aspergillus thermomutatus
  misc_feature: 381
aagtacctgttttacctgtcgtctgtgctccgagagtgacccatcagtgaaaaccaatatatcatcaacgtacgcagatgcaaattcatccagaaa

SEQ ID NO: 1752 - DNA, 96 bp, Aspergillus thermomutatus
  misc_feature: 381
ggggtccatgcgtacgcccttgccagcttcaatgataaacccgaggtatttcgtgctcttgacctcgaactcgcacttgtcgatgtctagctgcaa

SEQ ID NO: 1753 - DNA, 96 bp, Aspergillus thermomutatus
  misc_feature: 381
ttaccttgtcggggtccatgcgtacgcccttgccagcttcaatgataaacccgaggtatttcgtgctcttgacctcgaactcgcacttgtcgatgt

SEQ ID NO: 1754 - DNA, 96 bp, Aspergillus thermomutatus
  misc_feature: 381
aggcgcgcaagtacctgttttacctgtcgtctgtgctccgagagtgacccatcagtgaaaaccaatatatcatcaacgtacgcagatgcaaattca

SEQ ID NO: 1755 - DNA, 96 bp, Aspergillus thermomutatus
  misc_feature: 381
tctcttgccgtccggaccttctagcagttcgatgcggtggtctacccctggccgatgcgggggtagtttatcagcttgttcgcggctgaagacctc

SEQ ID NO: 1756 - DNA, 96 bp, Aspergillus thermomutatus
  misc_feature: 381
tcggggtccatgcgtacgcccttgccagcttcaatgataaacccgaggtatttcgtgctcttgacctcgaactcgcacttgtcgatgtctagctgc

SEQ ID NO: 1757 - DNA, 96 bp, Aspergillus thermomutatus
  misc_feature: 381
tatagcctttaccttctcagggtccatgcatactcccttgcctgcttcgacgatgaagcccaagtacttggtgctcttgacctcgaattcgcactt

SEQ ID NO: 1758 - DNA, 96 bp, Aspergillus thermomutatus
  misc_feature: 381
cgaccgtgtctcgatcagggtcaaactgcgcaagtatcggcgcagtagtgaacatcttcttcagctgctcgaaccgctgcgtgtgctcatacgtcc

SEQ ID NO: 1759 - DNA, 96 bp, Aspergillus thermomutatus
  misc_feature: 381
gctgctagagaagaacttcatacgtgtcagcagctcgtcagctgcagccccggtgctgctcgtgcgcaaacctggtggaggtctacgtttctgtgt

SEQ ID NO: 1760 - DNA, 96 bp, Aspergillus thermomutatus
  misc_feature: 381
gccccatgggggctctgctctcttgccgtccggaccttctagcagttcgatgcggtggtctacccctggccgatgcgggggtagtttatcagcttg

SEQ ID NO: 1761 - DNA, 96 bp, Aspergillus thermomutatus
  misc_feature: 381
agtacctgttttacctgtcgtctgtgctccgagagtgacccatcagtgaaaaccaatatatcatcaacgtacgcagatgcaaattcatccagaaag

SEQ ID NO: 1762 - DNA, 96 bp, Aspergillus thermomutatus
  misc_feature: 381
ctcgatcagggtcaaactgcgcaagtatcggcgcagtagtgaacatcttcttcagctgctcgaaccgctgcgtgtgctcatacgtccatttaaatg

SEQ ID NO: 1763 - DNA, 96 bp, Aspergillus thermomutatus
  misc_feature: 381
cgcattccacaagattcgcattgcacccggagatgaatggctgacggccttccgtacgcggtttggtctgtacgaatggttggtgaccccttttgg

SEQ ID NO: 1764 - DNA, 96 bp, Aspergillus thermomutatus
  misc_feature: 381
ccgtagcccagttggaagcatccgtctccacgaccgtgtctcgatcagggtcaaactgcgcaagtatcggcgcagtagtgaacatcttcttcagct

SEQ ID NO: 1765 - DNA, 96 bp, Aspergillus thermomutatus
  misc_feature: 381
ccggaccttctagcagttcgatgcggtggtctacccctggccgatgcgggggtagtttatcagcttgttcgcggctgaagacctccaggtgctcgt

SEQ ID NO: 1766 - DNA, 96 bp, Aspergillus thermomutatus
  misc_feature: 381
aacagatcactgatctgttcacaacagatcactgatctgttctcatcagatcattgctctgccgagcataccgctgctctgccgatggtcacgtgt

SEQ ID NO: 1767 - DNA, 96 bp, Aspergillus thermomutatus
  misc_feature: 380
cggggtccatgcgtacgcccttgccagcttcaatgataaacccgaggtatttcgtgctcttgacctcgaactcgcacttgtcgatgtctagctgca

SEQ ID NO: 1768 - DNA, 96 bp, Aspergillus thermomutatus
  misc_feature: 380
taagacgcttacagagctgctagagaagaacttcatacgtgtcagcagctcgtcagctgcagccccggtgctgctcgtgcgcaaacctggtggagg

SEQ ID NO: 1769 - DNA, 96 bp, Aspergillus thermomutatus
  misc_feature: 380
gtatgtatagcgaacccctgtgcgcttatctgtctgaccactaacttcggctcattctcaacccgttccactgcgaatccgtctgctaatcgcagt

SEQ ID NO: 1770 - DNA, 96 bp, Aspergillus thermomutatus
  misc_feature: 380
ggcgcgcaagtacctgttttacctgtcgtctgtgctccgagagtgacccatcagtgaaaaccaatatatcatcaacgtacgcagatgcaaattcat

SEQ ID NO: 1771 - DNA, 96 bp, Aspergillus thermomutatus
  misc_feature: 380
gccgtccggaccttctagcagttcgatgcggtggtctacccctggccgatgcgggggtagtttatcagcttgttcgcggctgaagacctccaggtg

SEQ ID NO: 1772 - DNA, 96 bp, Aspergillus thermomutatus
  misc_feature: 380
ccacgaccgtgtctcgatcagggtcaaactgcgcaagtatcggcgcagtagtgaacatcttcttcagctgctcgaaccgctgcgtgtgctcatacg

SEQ ID NO: 1773 - DNA, 96 bp, Aspergillus thermomutatus
  misc_feature: 380
actccaccaggggtgcataatgtgttccatgttagtctgttgcgtcctgcggcgaacgatcctttcccaagccagttgagcactgactaccagccg

SEQ ID NO: 1774 - DNA, 96 bp, Aspergillus thermomutatus
  misc_feature: 380
cggaccttctagcagttcgatgcggtggtctacccctggccgatgcgggggtagtttatcagcttgttcgcggctgaagacctccaggtgctcgtg

SEQ ID NO: 1775 - DNA, 96 bp, Aspergillus thermomutatus
  misc_feature: 379
tttaccttgtcggggtccatgcgtacgcccttgccagcttcaatgataaacccgaggtatttcgtgctcttgacctcgaactcgcacttgtcgatg

SEQ ID NO: 1776 - DNA, 96 bp, Aspergillus thermomutatus
  misc_feature: 379
gaccgtgtctcgatcagggtcaaactgcgcaagtatcggcgcagtagtgaacatcttcttcagctgctcgaaccgctgcgtgtgctcatacgtcca

SEQ ID NO: 1777 - DNA, 96 bp, Aspergillus thermomutatus
  misc_feature: 379
tccggaccttctagcagttcgatgcggtggtctacccctggccgatgcgggggtagtttatcagcttgttcgcggctgaagacctccaggtgctcg

SEQ ID NO: 1778 - DNA, 96 bp, Aspergillus thermomutatus
  misc_feature: 379
tagagcggttacaggccgctgggttgcagctagacatcgacaagtgcgagttcgaggtcaagagcacgaaatacctcgggtttatcattgaagctg

SEQ ID NO: 1779 - DNA, 96 bp, Aspergillus thermomutatus
  misc_feature: 379
cccttgccagcttcaatgataaacccgaggtatttcgtgctcttgacctcgaactcgcacttgtcgatgtctagctgcaacccagcggcctgtaac

SEQ ID NO: 1780 - DNA, 96 bp, Aspergillus thermomutatus
  misc_feature: 379
gcttttaccttgtcggggtccatgcgtacgcccttgccagcttcaatgataaacccgaggtatttcgtgctcttgacctcgaactcgcacttgtcg

SEQ ID NO: 1781 - DNA, 96 bp, Aspergillus thermomutatus
  misc_feature: 379
cgcggctgaagacctccaggtgctcgtggtagtgcgcgggcagcttggtcttggggtcggtgtactgcttcgcttgcaaggccttattgatatcct

SEQ ID NO: 1782 - DNA, 96 bp, Aspergillus thermomutatus
  misc_feature: 379
agagcggttacaggccgctgggttgcagctagacatcgacaagtgcgagttcgaggtcaagagcacgaaatacctcgggtttatcattgaagctgg

SEQ ID NO: 1783 - DNA, 96 bp, Aspergillus thermomutatus
  misc_feature: 379
agctgctagagaagaacttcatacgtgtcagcagctcgtcagctgcagccccggtgctgctcgtgcgcaaacctggtggaggtctacgtttctgtg

SEQ ID NO: 1784 - DNA, 96 bp, Aspergillus thermomutatus
  misc_feature: 378
tggcattcaatgctcggtaatcaacacagaaacgtagacctccaccaggtttgcgcacgagcagcaccggggctgcagctgacgagctgctgacac

SEQ ID NO: 1785 - DNA, 96 bp, Aspergillus thermomutatus
  misc_feature: 378
tatgtatagcgaacccctgtgcgcttatctgtctgaccactaacttcggctcattctcaacccgttccactgcgaatccgtctgctaatcgcagtc

SEQ ID NO: 1786 - DNA, 96 bp, Aspergillus thermomutatus
  misc_feature: 378
tactccaccaggggtgcataatgtgttccatgttagtctgttgcgtcctgcggcgaacgatcctttcccaagccagttgagcactgactaccagcc

SEQ ID NO: 1787 - DNA, 96 bp, Aspergillus thermomutatus
  misc_feature: 378
agtatagcttttaccttgtcggggtccatgcgtacgcccttgccagcttcaatgataaacccgaggtatttcgtgctcttgacctcgaactcgcac

SEQ ID NO: 1788 - DNA, 96 bp, Aspergillus thermomutatus
  misc_feature: 378
cgcttacagagctgctagagaagaacttcatacgtgtcagcagctcgtcagctgcagccccggtgctgctcgtgcgcaaacctggtggaggtctac

SEQ ID NO: 1789 - DNA, 96 bp, Aspergillus thermomutatus
  misc_feature: 378
gtaagacgcttacagagctgctagagaagaacttcatacgtgtcagcagctcgtcagctgcagccccggtgctgctcgtgcgcaaacctggtggag

SEQ ID NO: 1790 - DNA, 96 bp, Aspergillus thermomutatus
  misc_feature: 378
gcgcgcaagtacctgttttacctgtcgtctgtgctccgagagtgacccatcagtgaaaaccaatatatcatcaacgtacgcagatgcaaattcatc

SEQ ID NO: 1791 - DNA, 96 bp, Aspergillus thermomutatus
  misc_feature: 378
aagttccgtataaagcgccgatagaagtttgcgaagcctaggaatgaccgcacgccgcgcgctgaggtcggggtctgccattccaatatagccttt

SEQ ID NO: 1792 - DNA, 96 bp, Aspergillus thermomutatus
  misc_feature: 377
tggacaacagatcaaattggcatacgttggctacaaaaagtctttattcctgagactactggtcgaacgacaggcagatatcgtctcttggttctc

SEQ ID NO: 1793 - DNA, 96 bp, Aspergillus thermomutatus
  misc_feature: 377
taatggcattcaatgctcggtaatcaacacagaaacgtagacctccaccaggtttgcgcacgagcagcaccggggctgcagctgacgagctgctga

SEQ ID NO: 1794 - DNA, 96 bp, Aspergillus thermomutatus
  misc_feature: 377
taccttgtcggggtccatgcgtacgcccttgccagcttcaatgataaacccgaggtatttcgtgctcttgacctcgaactcgcacttgtcgatgtc

SEQ ID NO: 1795 - DNA, 96 bp, Aspergillus thermomutatus
  misc_feature: 377
cagttcttcgcgcgacatgctgtacaacgggccccatgggggctctgctctcttgccgtccggaccttctagcagttcgatgcggtggtctacccc

SEQ ID NO: 1796 - DNA, 96 bp, Aspergillus thermomutatus
  misc_feature: 377
gcgtcaggtctcgcagctaatttaccaggccgatagactagctggtagttgaaccgactgagcaaatctgaccagcgcgcttgccgctcgtttagt

SEQ ID NO: 1797 - DNA, 96 bp, Aspergillus thermomutatus
  misc_feature: 377
aacatatcactgatatgtctgtaacagatcactgatctgttcacaacagatcactgatctgttctcatcagatcattgctctgccgagcataccgc

SEQ ID NO: 1798 - DNA, 96 bp, Aspergillus thermomutatus
  misc_feature: 377
atatcactgatatgtctgtaacagatcactgatctgttcacaacagatcactgatctgttctcatcagatcattgctctgccgagcataccgctgc

SEQ ID NO: 1799 - DNA, 96 bp, Aspergillus thermomutatus
  misc_feature: 377
catatcactgatatgtctgtaacagatcactgatctgttcacaacagatcactgatctgttctcatcagatcattgctctgccgagcataccgctg

SEQ ID NO: 1800 - DNA, 96 bp, Aspergillus thermomutatus
  misc_feature: 377
aacgatcctttcccaagccagttgagcactgactaccagccgcccgctgtgctagtcgacggcgaggccgaatatgaggttgaatggatactggat

SEQ ID NO: 1801 - DNA, 96 bp, Aspergillus thermomutatus
  misc_feature: 377
atatagcctttaccttctcagggtccatgcatactcccttgcctgcttcgacgatgaagcccaagtacttggtgctcttgacctcgaattcgcact

SEQ ID NO: 1802 - DNA, 96 bp, Aspergillus thermomutatus
  misc_feature: 377
aagacgcttacagagctgctagagaagaacttcatacgtgtcagcagctcgtcagctgcagccccggtgctgctcgtgcgcaaacctggtggaggt

SEQ ID NO: 1803 - DNA, 96 bp, Aspergillus thermomutatus
  misc_feature: 376
ttttaccttgtcggggtccatgcgtacgcccttgccagcttcaatgataaacccgaggtatttcgtgctcttgacctcgaactcgcacttgtcgat

SEQ ID NO: 1804 - DNA, 96 bp, Aspergillus thermomutatus
  misc_feature: 376
cttttaccttgtcggggtccatgcgtacgcccttgccagcttcaatgataaacccgaggtatttcgtgctcttgacctcgaactcgcacttgtcga

SEQ ID NO: 1805 - DNA, 96 bp, Aspergillus thermomutatus
  misc_feature: 376
cgagtgttcggtctctccggatggtcatctgctgtaccgaggccgcaaatgggcccccgactctgagccgctacggacgaggatcctgcaagagac

SEQ ID NO: 1806 - DNA, 96 bp, Aspergillus thermomutatus
  misc_feature: 376
agggtcaaactgcgcaagtatcggcgcagtagtgaacatcttcttcagctgctcgaaccgctgcgtgtgctcatacgtccatttaaatggtgtacc

SEQ ID NO: 1807 - DNA, 96 bp, Aspergillus thermomutatus
  misc_feature: 376
ccgtccggaccttctagcagttcgatgcggtggtctacccctggccgatgcgggggtagtttatcagcttgttcgcggctgaagacctccaggtgc

SEQ ID NO: 1808 - DNA, 96 bp, Aspergillus thermomutatus
  misc_feature: 376
gagctgctagagaagaacttcatacgtgtcagcagctcgtcagctgcagccccggtgctgctcgtgcgcaaacctggtggaggtctacgtttctgt

SEQ ID NO: 1809 - DNA, 96 bp, Aspergillus thermomutatus
  misc_feature: 376
cgtccggaccttctagcagttcgatgcggtggtctacccctggccgatgcgggggtagtttatcagcttgttcgcggctgaagacctccaggtgct

SEQ ID NO: 1810 - DNA, 96 bp, Aspergillus thermomutatus
  misc_feature: 376
cagagctgctagagaagaacttcatacgtgtcagcagctcgtcagctgcagccccggtgctgctcgtgcgcaaacctggtggaggtctacgtttct

SEQ ID NO: 1811 - DNA, 96 bp, Aspergillus thermomutatus
  misc_feature: 376
agagctgctagagaagaacttcatacgtgtcagcagctcgtcagctgcagccccggtgctgctcgtgcgcaaacctggtggaggtctacgtttctg

SEQ ID NO: 1812 - DNA, 96 bp, Aspergillus thermomutatus
  misc_feature: 375
ttttacctgtcgtctgtgctccgagagtgacccatcagtgaaaaccaatatatcatcaacgtacgcagatgcaaattcatccagaaagtctcttag

SEQ ID NO: 1813 - DNA, 96 bp, Aspergillus thermomutatus
  misc_feature: 375
ttctagcagttcgatgcggtggtctacccctggccgatgcgggggtagtttatcagcttgttcgcggctgaagacctccaggtgctcgtggtagtg

SEQ ID NO: 1814 - DNA, 96 bp, Aspergillus thermomutatus
  misc_feature: 375
gcccttgccagcttcaatgataaacccgaggtatttcgtgctcttgacctcgaactcgcacttgtcgatgtctagctgcaacccagcggcctgtaa

SEQ ID NO: 1815 - DNA, 96 bp, Aspergillus thermomutatus
  misc_feature: 375
tgtaggcgcgcaagtacctgttttacctgtcgtctgtgctccgagagtgacccatcagtgaaaaccaatatatcatcaacgtacgcagatgcaaat

SEQ ID NO: 1816 - DNA, 96 bp, Aspergillus thermomutatus
  misc_feature: 375
cgcgcaagtacctgttttacctgtcgtctgtgctccgagagtgacccatcagtgaaaaccaatatatcatcaacgtacgcagatgcaaattcatcc

SEQ ID NO: 1817 - DNA, 96 bp, Aspergillus thermomutatus
  misc_feature: 375
cgtcaggtctcgcagctaatttaccaggccgatagactagctggtagttgaaccgactgagcaaatctgaccagcgcgcttgccgctcgtttagtc

SEQ ID NO: 1818 - DNA, 96 bp, Aspergillus thermomutatus
  misc_feature: 375
cgcaagtacctgttttacctgtcgtctgtgctccgagagtgacccatcagtgaaaaccaatatatcatcaacgtacgcagatgcaaattcatccag

SEQ ID NO: 1819 - DNA, 96 bp, Aspergillus thermomutatus
  misc_feature: 374
cactgatatgtctgtaacagatcactgatctgttcacaacagatcactgatctgttctcatcagatcattgctctgccgagcataccgctgctctg

SEQ ID NO: 1820 - DNA, 96 bp, Aspergillus thermomutatus
  misc_feature: 373
ttttcgagctgaacaacgcgccaactcacataaattgactaaagctgaagaggaatcgcttatacagtggatattatctatggatcagcgtggagc

SEQ ID NO: 1821 - DNA, 96 bp, Aspergillus thermomutatus
  misc_feature: 373
tccacgaccgtgtctcgatcagggtcaaactgcgcaagtatcggcgcagtagtgaacatcttcttcagctgctcgaaccgctgcgtgtgctcatac

SEQ ID NO: 1822 - DNA, 96 bp, Aspergillus thermomutatus
  misc_feature: 373
gtaatggcattcaatgctcggtaatcaacacagaaacgtagacctccaccaggtttgcgcacgagcagcaccggggctgcagctgacgagctgctg

SEQ ID NO: 1823 - DNA, 96 bp, Aspergillus thermomutatus
  misc_feature: 373
gctgtacaacgggccccatgggggctctgctctcttgccgtccggaccttctagcagttcgatgcggtggtctacccctggccgatgcgggggtag

SEQ ID NO: 1824 - DNA, 96 bp, Aspergillus thermomutatus
  misc_feature: 373
agacgcttacagagctgctagagaagaacttcatacgtgtcagcagctcgtcagctgcagccccggtgctgctcgtgcgcaaacctggtggaggtc

SEQ ID NO: 1825 - DNA, 96 bp, Aspergillus thermomutatus
  misc_feature: 373
cggctgaagacctccaggtgctcgtggtagtgcgcgggcagcttggtcttggggtcggtgtactgcttcgcttgcaaggccttattgatatccttg

SEQ ID NO: 1826 - DNA, 96 bp, Aspergillus thermomutatus
  misc_feature: 373
atacgtgtcagcagctcgtcagctgcagccccggtgctgctcgtgcgcaaacctggtggaggtctacgtttctgtgttgattaccgagcattgaat

SEQ ID NO: 1827 - DNA, 96 bp, Aspergillus thermomutatus
  misc_feature: 372
gttgaggggctagagcgaggggctaccgccattgatggggtccgtacgcccaaggagcgggccgaagcggtcattacgaagatgaaggaggctaca

SEQ ID NO: 1828 - DNA, 96 bp, Aspergillus thermomutatus
  misc_feature: 372
gcgcaagtacctgttttacctgtcgtctgtgctccgagagtgacccatcagtgaaaaccaatatatcatcaacgtacgcagatgcaaattcatcca

SEQ ID NO: 1829 - DNA, 96 bp, Aspergillus thermomutatus
  misc_feature: 372
tcactgatatgtctgtaacagatcactgatctgttcacaacagatcactgatctgttctcatcagatcattgctctgccgagcataccgctgctct

SEQ ID NO: 1830 - DNA, 96 bp, Aspergillus thermomutatus
  misc_feature: 372
gttttacctgtcgtctgtgctccgagagtgacccatcagtgaaaaccaatatatcatcaacgtacgcagatgcaaattcatccagaaagtctctta

SEQ ID NO: 1831 - DNA, 96 bp, Aspergillus thermomutatus
  misc_feature: 372
gttttcgagctgaacaacgcgccaactcacataaattgactaaagctgaagaggaatcgcttatacagtggatattatctatggatcagcgtggag

SEQ ID NO: 1832 - DNA, 96 bp, Aspergillus thermomutatus
  misc_feature: 372
gtactgcgtaagacgcttacagagctgctagagaagaacttcatacgtgtcagcagctcgtcagctgcagccccggtgctgctcgtgcgcaaacct

SEQ ID NO: 1833 - DNA, 96 bp, Aspergillus thermomutatus
  misc_feature: 372
gacgcttacagagctgctagagaagaacttcatacgtgtcagcagctcgtcagctgcagccccggtgctgctcgtgcgcaaacctggtggaggtct

SEQ ID NO: 1834 - DNA, 96 bp, Aspergillus thermomutatus
  misc_feature: 372
acgatcctttcccaagccagttgagcactgactaccagccgcccgctgtgctagtcgacggcgaggccgaatatgaggttgaatggatactggatg

SEQ ID NO: 1835 - DNA, 96 bp, Aspergillus thermomutatus
  misc_feature: 372
acatatcactgatatgtctgtaacagatcactgatctgttcacaacagatcactgatctgttctcatcagatcattgctctgccgagcataccgct

SEQ ID NO: 1836 - DNA, 96 bp, Aspergillus thermomutatus
  misc_feature: 371
tactgcgtaagacgcttacagagctgctagagaagaacttcatacgtgtcagcagctcgtcagctgcagccccggtgctgctcgtgcgcaaacctg

SEQ ID NO: 1837 - DNA, 96 bp, Aspergillus thermomutatus
  misc_feature: 371
tacgtgtcagcagctcgtcagctgcagccccggtgctgctcgtgcgcaaacctggtggaggtctacgtttctgtgttgattaccgagcattgaatg

SEQ ID NO: 1838 - DNA, 96 bp, Aspergillus thermomutatus
  misc_feature: 371
gtgcgtcaggtctcgcagctaatttaccaggccgatagactagctggtagttgaaccgactgagcaaatctgaccagcgcgcttgccgctcgttta

SEQ ID NO: 1839 - DNA, 96 bp, Aspergillus thermomutatus
  misc_feature: 371
gcacccgtagcccagttggaagcatccgtctccacgaccgtgtctcgatcagggtcaaactgcgcaagtatcggcgcagtagtgaacatcttcttc

SEQ ID NO: 1840 - DNA, 96 bp, Aspergillus thermomutatus
  misc_feature: 371
cacctgccgtacgtggctacggtgcttcgccagcgacccatcagtgaagataagtacatcgtcgatgtacgcggaggcgaattcatccaggaagtc

SEQ ID NO: 1841 - DNA, 96 bp, Aspergillus thermomutatus
  misc_feature: 371
atgtatagcgaacccctgtgcgcttatctgtctgaccactaacttcggctcattctcaacccgttccactgcgaatccgtctgctaatcgcagtcg

SEQ ID NO: 1842 - DNA, 96 bp, Aspergillus thermomutatus
  misc_feature: 371
atcagggtcaaactgcgcaagtatcggcgcagtagtgaacatcttcttcagctgctcgaaccgctgcgtgtgctcatacgtccatttaaatggtgt

SEQ ID NO: 1843 - DNA, 96 bp, Aspergillus thermomutatus
  misc_feature: 370
catctattgagtgtatcaactctcaaggatgggctttaccaccatgtattatcttcaagggaacagtccatattgagggctggtatcaagatgaca

SEQ ID NO: 1844 - DNA, 96 bp, Aspergillus thermomutatus
  misc_feature: 370
tgcgtcaggtctcgcagctaatttaccaggccgatagactagctggtagttgaaccgactgagcaaatctgaccagcgcgcttgccgctcgtttag

SEQ ID NO: 1845 - DNA, 96 bp, Aspergillus thermomutatus
  misc_feature: 370
tgcgtaagacgcttacagagctgctagagaagaacttcatacgtgtcagcagctcgtcagctgcagccccggtgctgctcgtgcgcaaacctggtg

SEQ ID NO: 1846 - DNA, 96 bp, Aspergillus thermomutatus
  misc_feature: 370
tcagggtcaaactgcgcaagtatcggcgcagtagtgaacatcttcttcagctgctcgaaccgctgcgtgtgctcatacgtccatttaaatggtgta

SEQ ID NO: 1847 - DNA, 96 bp, Aspergillus thermomutatus
  misc_feature: 370
aatatagcctttaccttctcagggtccatgcatactcccttgcctgcttcgacgatgaagcccaagtacttggtgctcttgacctcgaattcgcac

SEQ ID NO: 1848 - DNA, 96 bp, Aspergillus thermomutatus
  misc_feature: 370
cttactgagcacattagaatcattggaaacgcacattggaaacattggaaacgcacattggtagatacattggattggaagacgcacctaatgatt

SEQ ID NO: 1849 - DNA, 96 bp, Aspergillus thermomutatus
  misc_feature: 370
ctgctgcgcggatgctcttaaattggccatttttaaatgcttgaattgcgagctgtattcggtcctctaattcagcagctggatctgtagattttt

SEQ ID NO: 1850 - DNA, 96 bp, Aspergillus thermomutatus
  misc_feature: 370
acccgtagcccagttggaagcatccgtctccacgaccgtgtctcgatcagggtcaaactgcgcaagtatcggcgcagtagtgaacatcttcttcag

SEQ ID NO: 1851 - DNA, 96 bp, Aspergillus thermomutatus
  misc_feature: 370
actgcgtaagacgcttacagagctgctagagaagaacttcatacgtgtcagcagctcgtcagctgcagccccggtgctgctcgtgcgcaaacctgg

SEQ ID NO: 1852 - DNA, 96 bp, Aspergillus thermomutatus
  misc_feature: 370
agtccaaatggatggacaacagatcaaattggcatacgttggctacaaaaagtctttattcctgagactactggtcgaacgacaggcagatatcgt

SEQ ID NO: 1853 - DNA, 96 bp, Aspergillus thermomutatus
  misc_feature: 370
acctgccgtacgtggctacggtgcttcgccagcgacccatcagtgaagataagtacatcgtcgatgtacgcggaggcgaattcatccaggaagtct

SEQ ID NO: 1854 - DNA, 96 bp, Aspergillus thermomutatus
  misc_feature: 369
tttaccaaacttgatgtgatcgccgcattccacaagattcgcattgcacccggagatgaatggctgacggccttccgtacgcggtttggtctgtac

SEQ ID NO: 1855 - DNA, 96 bp, Aspergillus thermomutatus
  misc_feature: 369
accaaacttgatgtgatcgccgcattccacaagattcgcattgcacccggagatgaatggctgacggccttccgtacgcggtttggtctgtacgaa

SEQ ID NO: 1856 - DNA, 96 bp, Aspergillus thermomutatus
  misc_feature: 369
tgggaatcgcgaatgggtcacatctattgagtgtatcaactctcaaggatgggctttaccaccatgtattatcttcaagggaacagtccatattga

SEQ ID NO: 1857 - DNA, 96 bp, Aspergillus thermomutatus
  misc_feature: 369
cagcagaagtaccatgacacgtgaccatcggcagagcagcggtatgctcggcagagcaatgatctgatgagaacagatcagtgatctgttgtgaac

SEQ ID NO: 1858 - DNA, 96 bp, Aspergillus thermomutatus
  misc_feature: 369
ggacactgttttcgagctgaacaacgcgccaactcacataaattgactaaagctgaagaggaatcgcttatacagtggatattatctatggatcag

SEQ ID NO: 1859 - DNA, 96 bp, Aspergillus thermomutatus
  misc_feature: 369
gcggctgaagacctccaggtgctcgtggtagtgcgcgggcagcttggtcttggggtcggtgtactgcttcgcttgcaaggccttattgatatcctt

SEQ ID NO: 1860 - DNA, 96 bp, Aspergillus thermomutatus
  misc_feature: 369
acactgttttcgagctgaacaacgcgccaactcacataaattgactaaagctgaagaggaatcgcttatacagtggatattatctatggatcagcg

SEQ ID NO: 1861 - DNA, 96 bp, Aspergillus thermomutatus
  misc_feature: 368
ggttgaggggctagagcgaggggctaccgccattgatggggtccgtacgcccaaggagcgggccgaagcggtcattacgaagatgaaggaggctac

SEQ ID NO: 1862 - DNA, 96 bp, Aspergillus thermomutatus
  misc_feature: 368
ctgcgtaagacgcttacagagctgctagagaagaacttcatacgtgtcagcagctcgtcagctgcagccccggtgctgctcgtgcgcaaacctggt

SEQ ID NO: 1863 - DNA, 96 bp, Aspergillus thermomutatus
  misc_feature: 368
cactgttttcgagctgaacaacgcgccaactcacataaattgactaaagctgaagaggaatcgcttatacagtggatattatctatggatcagcgt

SEQ ID NO: 1864 - DNA, 96 bp, Aspergillus thermomutatus
  misc_feature: 367
agcggttacaggccgctgggttgcagctagacatcgacaagtgcgagttcgaggtcaagagcacgaaatacctcgggtttatcattgaagctggca

SEQ ID NO: 1865 - DNA, 96 bp, Aspergillus thermomutatus
  misc_feature: 367
gacactgttttcgagctgaacaacgcgccaactcacataaattgactaaagctgaagaggaatcgcttatacagtggatattatctatggatcagc

SEQ ID NO: 1866 - DNA, 96 bp, Aspergillus thermomutatus
  misc_feature: 367
aagtggtttaccaaacttgatgtgatcgccgcattccacaagattcgcattgcacccggagatgaatggctgacggccttccgtacgcggtttggt

SEQ ID NO: 1867 - DNA, 96 bp, Aspergillus thermomutatus
  misc_feature: 366
tagtgcgtcaggtctcgcagctaatttaccaggccgatagactagctggtagttgaaccgactgagcaaatctgaccagcgcgcttgccgctcgtt

SEQ ID NO: 1868 - DNA, 96 bp, Aspergillus thermomutatus
  misc_feature: 366
tacaagcagttcttcgcgcgacatgctgtacaacgggccccatgggggctctgctctcttgccgtccggaccttctagcagttcgatgcggtggtc

SEQ ID NO: 1869 - DNA, 96 bp, Aspergillus thermomutatus
  misc_feature: 366
gttggaagcatccgtctccacgaccgtgtctcgatcagggtcaaactgcgcaagtatcggcgcagtagtgaacatcttcttcagctgctcgaaccg

SEQ ID NO: 1870 - DNA, 96 bp, Aspergillus thermomutatus
  misc_feature: 366
gagcggttacaggccgctgggttgcagctagacatcgacaagtgcgagttcgaggtcaagagcacgaaatacctcgggtttatcattgaagctggc

SEQ ID NO: 1871 - DNA, 96 bp, Aspergillus thermomutatus
  misc_feature: 366
ctgccgtacgtggctacggtgcttcgccagcgacccatcagtgaagataagtacatcgtcgatgtacgcggaggcgaattcatccaggaagtctcg

SEQ ID NO: 1872 - DNA, 96 bp, Aspergillus thermomutatus
  misc_feature: 366
ccttctagcagttcgatgcggtggtctacccctggccgatgcgggggtagtttatcagcttgttcgcggctgaagacctccaggtgctcgtggtag

SEQ ID NO: 1873 - DNA, 96 bp, Aspergillus thermomutatus
  misc_feature: 366
atgctgtacaacgggccccatgggggctctgctctcttgccgtccggaccttctagcagttcgatgcggtggtctacccctggccgatgcgggggt

SEQ ID NO: 1874 - DNA, 96 bp, Aspergillus thermomutatus
  misc_feature: 366
agtgcgtcaggtctcgcagctaatttaccaggccgatagactagctggtagttgaaccgactgagcaaatctgaccagcgcgcttgccgctcgttt

SEQ ID NO: 1875 - DNA, 96 bp, Aspergillus thermomutatus
  misc_feature: 365
ttattgtacatacctagtcataggttttcctacggtctagcccgtaacattagaactcgctcctcatcttactgagcacattagaatcattggaaa

SEQ ID NO: 1876 - DNA, 96 bp, Aspergillus thermomutatus
  misc_feature: 365
atctattgagtgtatcaactctcaaggatgggctttaccaccatgtattatcttcaagggaacagtccatattgagggctggtatcaagatgacaa

SEQ ID NO: 1877 - DNA, 96 bp, Aspergillus thermomutatus
  misc_feature: 365
ccgagtgttcggtctctccggatggtcatctgctgtaccgaggccgcaaatgggcccccgactctgagccgctacggacgaggatcctgcaagaga

SEQ ID NO: 1878 - DNA, 96 bp, Aspergillus thermomutatus
  misc_feature: 365
taccaaacttgatgtgatcgccgcattccacaagattcgcattgcacccggagatgaatggctgacggccttccgtacgcggtttggtctgtacga

SEQ ID NO: 1879 - DNA, 96 bp, Aspergillus thermomutatus
  misc_feature: 365
ggctgaagacctccaggtgctcgtggtagtgcgcgggcagcttggtcttggggtcggtgtactgcttcgcttgcaaggccttattgatatccttga

SEQ ID NO: 1880 - DNA, 96 bp, Aspergillus thermomutatus
  misc_feature: 365
acgcttacagagctgctagagaagaacttcatacgtgtcagcagctcgtcagctgcagccccggtgctgctcgtgcgcaaacctggtggaggtcta

SEQ ID NO: 1881 - DNA, 96 bp, Aspergillus thermomutatus
  misc_feature: 365
gtacaagcagttcttcgcgcgacatgctgtacaacgggccccatgggggctctgctctcttgccgtccggaccttctagcagttcgatgcggtggt

SEQ ID NO: 1882 - DNA, 96 bp, Aspergillus thermomutatus
  misc_feature: 365
cctgccgtacgtggctacggtgcttcgccagcgacccatcagtgaagataagtacatcgtcgatgtacgcggaggcgaattcatccaggaagtctc

SEQ ID NO: 1883 - DNA, 96 bp, Aspergillus thermomutatus
  misc_feature: 365
agtggtttaccaaacttgatgtgatcgccgcattccacaagattcgcattgcacccggagatgaatggctgacggccttccgtacgcggtttggtc

SEQ ID NO: 1884 - DNA, 96 bp, Aspergillus thermomutatus
  misc_feature: 365
agcttttaccttgtcggggtccatgcgtacgcccttgccagcttcaatgataaacccgaggtatttcgtgctcttgacctcgaactcgcacttgtc

SEQ ID NO: 1885 - DNA, 96 bp, Aspergillus thermomutatus
  misc_feature: 365
cccttagtcaactcaattcggtgatcgaccccagggcgatgcgggggcagttcgtcggctttcttccgatcgaacgcccctaggaactcgtggtag

SEQ ID NO: 1886 - DNA, 96 bp, Aspergillus thermomutatus
  misc_feature: 365
cgcacccgtagcccagttggaagcatccgtctccacgaccgtgtctcgatcagggtcaaactgcgcaagtatcggcgcagtagtgaacatcttctt

SEQ ID NO: 1887 - DNA, 96 bp, Aspergillus thermomutatus
  misc_feature: 365
ccgcacccgtagcccagttggaagcatccgtctccacgaccgtgtctcgatcagggtcaaactgcgcaagtatcggcgcagtagtgaacatcttct

SEQ ID NO: 1888 - DNA, 96 bp, Aspergillus thermomutatus
  misc_feature: 364
gacgatatctgcctgtcgttcgaccagtagtctcaggaataaagactttttgtagccaacgtatgccaatttgatctgttgtccatccatttggac

SEQ ID NO: 1889 - DNA, 96 bp, Aspergillus thermomutatus
  misc_feature: 364
aagcagttcttcgcgcgacatgctgtacaacgggccccatgggggctctgctctcttgccgtccggaccttctagcagttcgatgcggtggtctac

SEQ ID NO: 1890 - DNA, 96 bp, Aspergillus thermomutatus
  misc_feature: 364
gggaatcgcgaatgggtcacatctattgagtgtatcaactctcaaggatgggctttaccaccatgtattatcttcaagggaacagtccatattgag

SEQ ID NO: 1891 - DNA, 96 bp, Aspergillus thermomutatus
  misc_feature: 364
acaagcagttcttcgcgcgacatgctgtacaacgggccccatgggggctctgctctcttgccgtccggaccttctagcagttcgatgcggtggtct

SEQ ID NO: 1892 - DNA, 96 bp, Aspergillus thermomutatus
  misc_feature: 363
gcggttacaggccgctgggttgcagctagacatcgacaagtgcgagttcgaggtcaagagcacgaaatacctcgggtttatcattgaagctggcaa

SEQ ID NO: 1893 - DNA, 96 bp, Aspergillus thermomutatus
  misc_feature: 363
tggacactgttttcgagctgaacaacgcgccaactcacataaattgactaaagctgaagaggaatcgcttatacagtggatattatctatggatca

SEQ ID NO: 1894 - DNA, 96 bp, Aspergillus thermomutatus
  misc_feature: 363
tgagaaggtaaaggctatattggaatggcagaccccgacctcagcgcgcggcgtgcggtcattcctaggcttcgcaaacttctatcggcgctttat

SEQ ID NO: 1895 - DNA, 96 bp, Aspergillus thermomutatus
  misc_feature: 363
tatcactgatatgtctgtaacagatcactgatctgttcacaacagatcactgatctgttctcatcagatcattgctctgccgagcataccgctgct

SEQ ID NO: 1896 - DNA, 96 bp, Aspergillus thermomutatus
  misc_feature: 363
gatgcggtggtctacccctggccgatgcgggggtagtttatcagcttgttcgcggctgaagacctccaggtgctcgtggtagtgcgcgggcagctt

SEQ ID NO: 1897 - DNA, 96 bp, Aspergillus thermomutatus
  misc_feature: 363
atcactgatatgtctgtaacagatcactgatctgttcacaacagatcactgatctgttctcatcagatcattgctctgccgagcataccgctgctc

SEQ ID NO: 1898 - DNA, 96 bp, Aspergillus thermomutatus
  misc_feature: 363
atagtgcgtcaggtctcgcagctaatttaccaggccgatagactagctggtagttgaaccgactgagcaaatctgaccagcgcgcttgccgctcgt

SEQ ID NO: 1899 - DNA, 96 bp, Aspergillus thermomutatus
  misc_feature: 362
actctcggagcacagacgacaggtaaaacaggtacttgcgcgcctacaggaagcaggcctacagctagatattgacaagtgcgaattcgaggtcaa

SEQ ID NO: 1900 - DNA, 96 bp, Aspergillus thermomutatus
  misc_feature: 362
ttaccaaacttgatgtgatcgccgcattccacaagattcgcattgcacccggagatgaatggctgacggccttccgtacgcggtttggtctgtacg

SEQ ID NO: 1901 - DNA, 96 bp, Aspergillus thermomutatus
  misc_feature: 361
gcagcagaagtaccatgacacgtgaccatcggcagagcagcggtatgctcggcagagcaatgatctgatgagaacagatcagtgatctgttgtgaa

SEQ ID NO: 1902 - DNA, 96 bp, Aspergillus thermomutatus
  misc_feature: 361
cacccgtagcccagttggaagcatccgtctccacgaccgtgtctcgatcagggtcaaactgcgcaagtatcggcgcagtagtgaacatcttcttca

SEQ ID NO: 1903 - DNA, 96 bp, Aspergillus thermomutatus
  misc_feature: 361
tctccacgaccgtgtctcgatcagggtcaaactgcgcaagtatcggcgcagtagtgaacatcttcttcagctgctcgaaccgctgcgtgtgctcat

SEQ ID NO: 1904 - DNA, 96 bp, Aspergillus thermomutatus
  misc_feature: 361
tcaaactgcgcaagtatcggcgcagtagtgaacatcttcttcagctgctcgaaccgctgcgtgtgctcatacgtccatttaaatggtgtacctttg

SEQ ID NO: 1905 - DNA, 96 bp, Aspergillus thermomutatus
  misc_feature: 361
ggtttaccaaacttgatgtgatcgccgcattccacaagattcgcattgcacccggagatgaatggctgacggccttccgtacgcggtttggtctgt

SEQ ID NO: 1906 - DNA, 96 bp, Aspergillus thermomutatus
  misc_feature: 361
agttggaagcatccgtctccacgaccgtgtctcgatcagggtcaaactgcgcaagtatcggcgcagtagtgaacatcttcttcagctgctcgaacc

SEQ ID NO: 1907 - DNA, 96 bp, Aspergillus thermomutatus
  misc_feature: 361
ctagtatagcttttaccttgtcggggtccatgcgtacgcccttgccagcttcaatgataaacccgaggtatttcgtgctcttgacctcgaactcgc

SEQ ID NO: 1908 - DNA, 96 bp, Aspergillus thermomutatus
  misc_feature: 361
acgtgtcagcagctcgtcagctgcagccccggtgctgctcgtgcgcaaacctggtggaggtctacgtttctgtgttgattaccgagcattgaatgc

SEQ ID NO: 1909 - DNA, 96 bp, Aspergillus thermomutatus
  misc_feature: 361
cggttacaggccgctgggttgcagctagacatcgacaagtgcgagttcgaggtcaagagcacgaaatacctcgggtttatcattgaagctggcaag

SEQ ID NO: 1910 - DNA, 96 bp, Aspergillus thermomutatus
  misc_feature: 361
cgtgaatgggtgactaccattgaatgtatcaatacttctggatgggctctaccacctatgatcatctttactggcaaagtccatcaatcccaatgg

SEQ ID NO: 1911 - DNA, 96 bp, Aspergillus thermomutatus
  misc_feature: 360
aggttgaggggctagagcgaggggctaccgccattgatggggtccgtacgcccaaggagcgggccgaagcggtcattacgaagatgaaggaggcta

SEQ ID NO: 1912 - DNA, 96 bp, Aspergillus thermomutatus
  misc_feature: 360
ctgagaaggtaaaggctatattggaatggcagaccccgacctcagcgcgcggcgtgcggtcattcctaggcttcgcaaacttctatcggcgcttta

SEQ ID NO: 1913 - DNA, 96 bp, Aspergillus thermomutatus
  misc_feature: 360
atgagagcctaagggaaagacgcagcagaagtaccatgacacgtgaccatcggcagagcagcggtatgctcggcagagcaatgatctgatgagaac

SEQ ID NO: 1914 - DNA, 96 bp, Aspergillus thermomutatus
  misc_feature: 360
gtcaaactgcgcaagtatcggcgcagtagtgaacatcttcttcagctgctcgaaccgctgcgtgtgctcatacgtccatttaaatggtgtaccttt

SEQ ID NO: 1915 - DNA, 96 bp, Aspergillus thermomutatus
  misc_feature: 360
ggttacaggccgctgggttgcagctagacatcgacaagtgcgagttcgaggtcaagagcacgaaatacctcgggtttatcattgaagctggcaagg

SEQ ID NO: 1916 - DNA, 96 bp, Aspergillus thermomutatus
  misc_feature: 359
tctagaggttgaggggctagagcgaggggctaccgccattgatggggtccgtacgcccaaggagcgggccgaagcggtcattacgaagatgaagga

SEQ ID NO: 1917 - DNA, 96 bp, Aspergillus thermomutatus
  misc_feature: 359
caagcagttcttcgcgcgacatgctgtacaacgggccccatgggggctctgctctcttgccgtccggaccttctagcagttcgatgcggtggtcta

SEQ ID NO: 1918 - DNA, 96 bp, Aspergillus thermomutatus
  misc_feature: 359
gtttaccaaacttgatgtgatcgccgcattccacaagattcgcattgcacccggagatgaatggctgacggccttccgtacgcggtttggtctgta

SEQ ID NO: 1919 - DNA, 96 bp, Aspergillus thermomutatus
  misc_feature: 359
agtgaacatcttcttcagctgctcgaaccgctgcgtgtgctcatacgtccatttaaatggtgtacctttgtgcgtgagggctgtaagcgggcgtac

SEQ ID NO: 1920 - DNA, 96 bp, Aspergillus thermomutatus
  misc_feature: 359
gggtccatgcatactcccttgcctgcttcgacgatgaagcccaagtacttggtgctcttgacctcgaattcgcacttgtcaatatctagctgtagg

SEQ ID NO: 1921 - DNA, 96 bp, Aspergillus thermomutatus
  misc_feature: 359
gatagtgcgtcaggtctcgcagctaatttaccaggccgatagactagctggtagttgaaccgactgagcaaatctgaccagcgcgcttgccgctcg

SEQ ID NO: 1922 - DNA, 96 bp, Aspergillus thermomutatus
  misc_feature: 359
catgctgtacaacgggccccatgggggctctgctctcttgccgtccggaccttctagcagttcgatgcggtggtctacccctggccgatgcggggg

SEQ ID NO: 1923 - DNA, 96 bp, Aspergillus thermomutatus
  misc_feature: 359
aaacttgatgtgatcgccgcattccacaagattcgcattgcacccggagatgaatggctgacggccttccgtacgcggtttggtctgtacgaatgg

SEQ ID NO: 1924 - DNA, 96 bp, Aspergillus thermomutatus
  misc_feature: 358
tgttttacctgtcgtctgtgctccgagagtgacccatcagtgaaaaccaatatatcatcaacgtacgcagatgcaaattcatccagaaagtctctt

SEQ ID NO: 1925 - DNA, 96 bp, Aspergillus thermomutatus
  misc_feature: 358
tgctgtacaacgggccccatgggggctctgctctcttgccgtccggaccttctagcagttcgatgcggtggtctacccctggccgatgcgggggta

SEQ ID NO: 1926 - DNA, 96 bp, Aspergillus thermomutatus
  misc_feature: 358
cactctcggagcacagacgacaggtaaaacaggtacttgcgcgcctacaggaagcaggcctacagctagatattgacaagtgcgaattcgaggtca

SEQ ID NO: 1927 - DNA, 96 bp, Aspergillus thermomutatus
  misc_feature: 358
cgcagcagaagtaccatgacacgtgaccatcggcagagcagcggtatgctcggcagagcaatgatctgatgagaacagatcagtgatctgttgtga

SEQ ID NO: 1928 - DNA, 96 bp, Aspergillus thermomutatus
  misc_feature: 358
gagaaggtaaaggctatattggaatggcagaccccgacctcagcgcgcggcgtgcggtcattcctaggcttcgcaaacttctatcggcgctttata

SEQ ID NO: 1929 - DNA, 96 bp, Aspergillus thermomutatus
  misc_feature: 358
gtgaacatcttcttcagctgctcgaaccgctgcgtgtgctcatacgtccatttaaatggtgtacctttgtgcgtgagggctgtaagcgggcgtact

SEQ ID NO: 1930 - DNA, 96 bp, Aspergillus thermomutatus
  misc_feature: 358
atactagaatggcagacccctacatccactcgaggcgtacgatcgtttctcggctttgcgaacttctatcggcgctttatacggaacttctctgac

SEQ ID NO: 1931 - DNA, 96 bp, Aspergillus thermomutatus
  misc_feature: 358
ccaatatagcctttaccttctcagggtccatgcatactcccttgcctgcttcgacgatgaagcccaagtacttggtgctcttgacctcgaattcgc

SEQ ID NO: 1932 - DNA, 96 bp, Aspergillus thermomutatus
  misc_feature: 358
cgatgcggtggtctacccctggccgatgcgggggtagtttatcagcttgttcgcggctgaagacctccaggtgctcgtggtagtgcgcgggcagct

SEQ ID NO: 1933 - DNA, 96 bp, Aspergillus thermomutatus
  misc_feature: 358
cgaccctgtgcctacttctcgaaaaagaattcgcctgcggaatgcaactacgagatccacgataaggagctgctcgcgatcatcaacgcccttagg

SEQ ID NO: 1934 - DNA, 96 bp, Aspergillus thermomutatus
  misc_feature: 358
cctgagaaggtaaaggctatattggaatggcagaccccgacctcagcgcgcggcgtgcggtcattcctaggcttcgcaaacttctatcggcgcttt

SEQ ID NO: 1935 - DNA, 96 bp, Aspergillus thermomutatus
  misc_feature: 357
aaattcagtcgaacaagaagggagaatcttacttgcgatatctgctctgaaaaagaagcaaatttgcaatgttcgtgaagcttcacgcatttacaa

SEQ ID NO: 1936 - DNA, 96 bp, Aspergillus thermomutatus
  misc_feature: 357
caatatagcctttaccttctcagggtccatgcatactcccttgcctgcttcgacgatgaagcccaagtacttggtgctcttgacctcgaattcgca

SEQ ID NO: 1937 - DNA, 96 bp, Aspergillus thermomutatus
  misc_feature: 357
gcctttaccttctcagggtccatgcatactcccttgcctgcttcgacgatgaagcccaagtacttggtgctcttgacctcgaattcgcacttgtca

SEQ ID NO: 1938 - DNA, 96 bp, Aspergillus thermomutatus
  misc_feature: 357
tcgatgcggtggtctacccctggccgatgcgggggtagtttatcagcttgttcgcggctgaagacctccaggtgctcgtggtagtgcgcgggcagc

SEQ ID NO: 1939 - DNA, 96 bp, Aspergillus thermomutatus
  misc_feature: 357
gttcttcgcgcgacatgctgtacaacgggccccatgggggctctgctctcttgccgtccggaccttctagcagttcgatgcggtggtctacccctg

SEQ ID NO: 1940 - DNA, 96 bp, Aspergillus thermomutatus
  misc_feature: 357
ggtccatgcatactcccttgcctgcttcgacgatgaagcccaagtacttggtgctcttgacctcgaattcgcacttgtcaatatctagctgtaggc

SEQ ID NO: 1941 - DNA, 96 bp, Aspergillus thermomutatus
  misc_feature: 357
gaccctgtgcctacttctcgaaaaagaattcgcctgcggaatgcaactacgagatccacgataaggagctgctcgcgatcatcaacgcccttaggg

SEQ ID NO: 1942 - DNA, 96 bp, Aspergillus thermomutatus
  misc_feature: 357
cgacatgctgtacaacgggccccatgggggctctgctctcttgccgtccggaccttctagcagttcgatgcggtggtctacccctggccgatgcgg

SEQ ID NO: 1943 - DNA, 96 bp, Aspergillus thermomutatus
  misc_feature: 357
acatgctgtacaacgggccccatgggggctctgctctcttgccgtccggaccttctagcagttcgatgcggtggtctacccctggccgatgcgggg

SEQ ID NO: 1944 - DNA, 96 bp, Aspergillus thermomutatus
  misc_feature: 357
caaacttgatgtgatcgccgcattccacaagattcgcattgcacccggagatgaatggctgacggccttccgtacgcggtttggtctgtacgaatg

SEQ ID NO: 1945 - DNA, 96 bp, Aspergillus thermomutatus
  misc_feature: 357
acttgatgtgatcgccgcattccacaagattcgcattgcacccggagatgaatggctgacggccttccgtacgcggtttggtctgtacgaatggtt

SEQ ID NO: 1946 - DNA, 96 bp, Aspergillus thermomutatus
  misc_feature: 356
ttcgcagccagcatcaaggatattgagaaagcactgcaggtaaagacacatacagaccctgccgataagctaccagcgcactaccacgagttccta

SEQ ID NO: 1947 - DNA, 96 bp, Aspergillus thermomutatus
  misc_feature: 356
gagggtgcagatattcgcagtcaccctcaaggatatcaataaggccttgcaagcgaagcagtacaccgaccccaagaccaagctgcccgcgcacta

SEQ ID NO: 1948 - DNA, 96 bp, Aspergillus thermomutatus
  misc_feature: 356
atactccaccaggggtgcataatgtgttccatgttagtctgttgcgtcctgcggcgaacgatcctttcccaagccagttgagcactgactaccagc

SEQ ID NO: 1949 - DNA, 96 bp, Aspergillus thermomutatus
  misc_feature: 356
gatcagggtcaaactgcgcaagtatcggcgcagtagtgaacatcttcttcagctgctcgaaccgctgcgtgtgctcatacgtccatttaaatggtg

SEQ ID NO: 1950 - DNA, 96 bp, Aspergillus thermomutatus
  misc_feature: 356
ctttaccttctcagggtccatgcatactcccttgcctgcttcgacgatgaagcccaagtacttggtgctcttgacctcgaattcgcacttgtcaat

SEQ ID NO: 1951 - DNA, 96 bp, Aspergillus thermomutatus
  misc_feature: 356
cttcgcagccagcatcaaggatattgagaaagcactgcaggtaaagacacatacagaccctgccgataagctaccagcgcactaccacgagttcct

SEQ ID NO: 1952 - DNA, 96 bp, Aspergillus thermomutatus
  misc_feature: 356
ctctagaggttgaggggctagagcgaggggctaccgccattgatggggtccgtacgcccaaggagcgggccgaagcggtcattacgaagatgaagg

SEQ ID NO: 1953 - DNA, 96 bp, Aspergillus thermomutatus
  misc_feature: 356
ccaaacttgatgtgatcgccgcattccacaagattcgcattgcacccggagatgaatggctgacggccttccgtacgcggtttggtctgtacgaat

SEQ ID NO: 1954 - DNA, 96 bp, Aspergillus thermomutatus
  misc_feature: 355
tactagaatggcagacccctacatccactcgaggcgtacgatcgtttctcggctttgcgaacttctatcggcgctttatacggaacttctctgaca

SEQ ID NO: 1955 - DNA, 96 bp, Aspergillus thermomutatus
  misc_feature: 355
tagtatagcttttaccttgtcggggtccatgcgtacgcccttgccagcttcaatgataaacccgaggtatttcgtgctcttgacctcgaactcgca

SEQ ID NO: 1956 - DNA, 96 bp, Aspergillus thermomutatus
  misc_feature: 355
cagttggaagcatccgtctccacgaccgtgtctcgatcagggtcaaactgcgcaagtatcggcgcagtagtgaacatcttcttcagctgctcgaac

SEQ ID NO: 1957 - DNA, 96 bp, Aspergillus thermomutatus
  misc_feature: 355
gcagtgcagatcttcgcagccagcatcaaggatattgagaaagcactgcaggtaaagacacatacagaccctgccgataagctaccagcgcactac

SEQ ID NO: 1958 - DNA, 96 bp, Aspergillus thermomutatus
  misc_feature: 355
atcaaaggcgaagtggtttaccaaacttgatgtgatcgccgcattccacaagattcgcattgcacccggagatgaatggctgacggccttccgtac

SEQ ID NO: 1959 - DNA, 96 bp, Aspergillus thermomutatus
  misc_feature: 355
agtcaactcaattcggtgatcgaccccagggcgatgcgggggcagttcgtcggctttcttccgatcgaacgcccctaggaactcgtggtagtgcgc

SEQ ID NO: 1960 - DNA, 96 bp, Aspergillus thermomutatus
  misc_feature: 355
gagacgatatctgcctgtcgttcgaccagtagtctcaggaataaagactttttgtagccaacgtatgccaatttgatctgttgtccatccatttgg

SEQ ID NO: 1961 - DNA, 96 bp, Aspergillus thermomutatus
  misc_feature: 355
cgatcagggtcaaactgcgcaagtatcggcgcagtagtgaacatcttcttcagctgctcgaaccgctgcgtgtgctcatacgtccatttaaatggt

SEQ ID NO: 1962 - DNA, 96 bp, Aspergillus thermomutatus
  misc_feature: 355
aaactgcgcaagtatcggcgcagtagtgaacatcttcttcagctgctcgaaccgctgcgtgtgctcatacgtccatttaaatggtgtacctttgtg

SEQ ID NO: 1963 - DNA, 96 bp, Aspergillus thermomutatus
  misc_feature: 355
agagacgatatctgcctgtcgttcgaccagtagtctcaggaataaagactttttgtagccaacgtatgccaatttgatctgttgtccatccatttg

SEQ ID NO: 1964 - DNA, 96 bp, Aspergillus thermomutatus
  misc_feature: 354
cctttaccttctcagggtccatgcatactcccttgcctgcttcgacgatgaagcccaagtacttggtgctcttgacctcgaattcgcacttgtcaa

SEQ ID NO: 1965 - DNA, 96 bp, Aspergillus thermomutatus
  misc_feature: 354
ttcgcccttagtcaactcaattcggtgatcgaccccagggcgatgcgggggcagttcgtcggctttcttccgatcgaacgcccctaggaactcgtg

SEQ ID NO: 1966 - DNA, 96 bp, Aspergillus thermomutatus
  misc_feature: 354
tgttttcgagctgaacaacgcgccaactcacataaattgactaaagctgaagaggaatcgcttatacagtggatattatctatggatcagcgtgga

SEQ ID NO: 1967 - DNA, 96 bp, Aspergillus thermomutatus
  misc_feature: 354
cattccacaagattcgcattgcacccggagatgaatggctgacggccttccgtacgcggtttggtctgtacgaatggttggtgaccccttttggca

SEQ ID NO: 1968 - DNA, 96 bp, Aspergillus thermomutatus
  misc_feature: 354
tgaacatcttcttcagctgctcgaaccgctgcgtgtgctcatacgtccatttaaatggtgtacctttgtgcgtgagggctgtaagcgggcgtacta

SEQ ID NO: 1969 - DNA, 96 bp, Aspergillus thermomutatus
  misc_feature: 354
tctggatcctcacattttgcacgttgataatcgtacttgcgggtgtatttggatatgatctcatcatgtcgtttgataaagcgagaaacccagttc

SEQ ID NO: 1970 - DNA, 96 bp, Aspergillus thermomutatus
  misc_feature: 354
ctggaatcgccaacgtcggaaaggtaagagggtgcagatattcgcagtcaccctcaaggatatcaataaggccttgcaagcgaagcagtacaccga

SEQ ID NO: 1971 - DNA, 96 bp, Aspergillus thermomutatus
  misc_feature: 354
tcgcccttagtcaactcaattcggtgatcgaccccagggcgatgcgggggcagttcgtcggctttcttccgatcgaacgcccctaggaactcgtgg

SEQ ID NO: 1972 - DNA, 96 bp, Aspergillus thermomutatus
  misc_feature: 354
cgcgatagtgcgtcaggtctcgcagctaatttaccaggccgatagactagctggtagttgaaccgactgagcaaatctgaccagcgcgcttgccgc

SEQ ID NO: 1973 - DNA, 96 bp, Aspergillus thermomutatus
  misc_feature: 354
ctgttttcgagctgaacaacgcgccaactcacataaattgactaaagctgaagaggaatcgcttatacagtggatattatctatggatcagcgtgg

SEQ ID NO: 1974 - DNA, 96 bp, Aspergillus thermomutatus
  misc_feature: 354
acgaccctgtgcctacttctcgaaaaagaattcgcctgcggaatgcaactacgagatccacgataaggagctgctcgcgatcatcaacgcccttag

SEQ ID NO: 1975 - DNA, 96 bp, Aspergillus thermomutatus
  misc_feature: 354
caaactgcgcaagtatcggcgcagtagtgaacatcttcttcagctgctcgaaccgctgcgtgtgctcatacgtccatttaaatggtgtacctttgt

SEQ ID NO: 1976 - DNA, 96 bp, Aspergillus thermomutatus
  misc_feature: 354
aacttgatgtgatcgccgcattccacaagattcgcattgcacccggagatgaatggctgacggccttccgtacgcggtttggtctgtacgaatggt

SEQ ID NO: 1977 - DNA, 96 bp, Aspergillus thermomutatus
  misc_feature: 353
cccgtcttcgcccttagtcaactcaattcggtgatcgaccccagggcgatgcgggggcagttcgtcggctttcttccgatcgaacgcccctaggaa

SEQ ID NO: 1978 - DNA, 96 bp, Aspergillus thermomutatus
  misc_feature: 353
tcgcagccagcatcaaggatattgagaaagcactgcaggtaaagacacatacagaccctgccgataagctaccagcgcactaccacgagttcctag

SEQ ID NO: 1979 - DNA, 96 bp, Aspergillus thermomutatus
  misc_feature: 353
tcatacgtgtcagcagctcgtcagctgcagccccggtgctgctcgtgcgcaaacctggtggaggtctacgtttctgtgttgattaccgagcattga

SEQ ID NO: 1980 - DNA, 96 bp, Aspergillus thermomutatus
  misc_feature: 353
gtcaactcaattcggtgatcgaccccagggcgatgcgggggcagttcgtcggctttcttccgatcgaacgcccctaggaactcgtggtagtgcgct

SEQ ID NO: 1981 - DNA, 96 bp, Aspergillus thermomutatus
  misc_feature: 353
gcgatagtgcgtcaggtctcgcagctaatttaccaggccgatagactagctggtagttgaaccgactgagcaaatctgaccagcgcgcttgccgct

SEQ ID NO: 1982 - DNA, 96 bp, Aspergillus thermomutatus
  misc_feature: 353
cgatagtgcgtcaggtctcgcagctaatttaccaggccgatagactagctggtagttgaaccgactgagcaaatctgaccagcgcgcttgccgctc

SEQ ID NO: 1983 - DNA, 96 bp, Aspergillus thermomutatus
  misc_feature: 353
cttctagcagttcgatgcggtggtctacccctggccgatgcgggggtagtttatcagcttgttcgcggctgaagacctccaggtgctcgtggtagt

SEQ ID NO: 1984 - DNA, 96 bp, Aspergillus thermomutatus
  misc_feature: 353
ctcagggtccatgcatactcccttgcctgcttcgacgatgaagcccaagtacttggtgctcttgacctcgaattcgcacttgtcaatatctagctg

SEQ ID NO: 1985 - DNA, 96 bp, Aspergillus thermomutatus
  misc_feature: 353
cgcccttagtcaactcaattcggtgatcgaccccagggcgatgcgggggcagttcgtcggctttcttccgatcgaacgcccctaggaactcgtggt

SEQ ID NO: 1986 - DNA, 96 bp, Aspergillus thermomutatus
  misc_feature: 353
aagcatccgtctccacgaccgtgtctcgatcagggtcaaactgcgcaagtatcggcgcagtagtgaacatcttcttcagctgctcgaaccgctgcg

SEQ ID NO: 1987 - DNA, 96 bp, Aspergillus thermomutatus
  misc_feature: 352
ctgtaggcgcgcaagtacctgttttacctgtcgtctgtgctccgagagtgacccatcagtgaaaaccaatatatcatcaacgtacgcagatgcaaa

SEQ ID NO: 1988 - DNA, 96 bp, Aspergillus thermomutatus
  misc_feature: 352
ccagttggaagcatccgtctccacgaccgtgtctcgatcagggtcaaactgcgcaagtatcggcgcagtagtgaacatcttcttcagctgctcgaa

SEQ ID NO: 1989 - DNA, 96 bp, Aspergillus thermomutatus
  misc_feature: 352
tctggaatcgccaacgtcggaaaggtaagagggtgcagatattcgcagtcaccctcaaggatatcaataaggccttgcaagcgaagcagtacaccg

SEQ ID NO: 1990 - DNA, 96 bp, Aspergillus thermomutatus
  misc_feature: 352
tcgcgatagtgcgtcaggtctcgcagctaatttaccaggccgatagactagctggtagttgaaccgactgagcaaatctgaccagcgcgcttgccg

SEQ ID NO: 1991 - DNA, 96 bp, Aspergillus thermomutatus
  misc_feature: 352
agacgatatctgcctgtcgttcgaccagtagtctcaggaataaagactttttgtagccaacgtatgccaatttgatctgttgtccatccatttgga

SEQ ID NO: 1992 - DNA, 96 bp, Aspergillus thermomutatus
  misc_feature: 352
tacgaccctgtgcctacttctcgaaaaagaattcgcctgcggaatgcaactacgagatccacgataaggagctgctcgcgatcatcaacgccctta

SEQ ID NO: 1993 - DNA, 96 bp, Aspergillus thermomutatus
  misc_feature: 352
cgcgcggcgtgcggtcattcctaggcttcgcaaacttctatcggcgctttatacggaacttctcagagatagtacgcccgcttacagccctcacgc

SEQ ID NO: 1994 - DNA, 96 bp, Aspergillus thermomutatus
  misc_feature: 352
ctgttttacctgtcgtctgtgctccgagagtgacccatcagtgaaaaccaatatatcatcaacgtacgcagatgcaaattcatccagaaagtctct

SEQ ID NO: 1995 - DNA, 96 bp, Aspergillus thermomutatus
  misc_feature: 352
cgcagccagcatcaaggatattgagaaagcactgcaggtaaagacacatacagaccctgccgataagctaccagcgcactaccacgagttcctagg

SEQ ID NO: 1996 - DNA, 96 bp, Aspergillus thermomutatus
  misc_feature: 352
atccgtctccacgaccgtgtctcgatcagggtcaaactgcgcaagtatcggcgcagtagtgaacatcttcttcagctgctcgaaccgctgcgtgtg

SEQ ID NO: 1997 - DNA, 96 bp, Aspergillus thermomutatus
  misc_feature: 352
agcatccgtctccacgaccgtgtctcgatcagggtcaaactgcgcaagtatcggcgcagtagtgaacatcttcttcagctgctcgaaccgctgcgt

SEQ ID NO: 1998 - DNA, 96 bp, Aspergillus thermomutatus
  misc_feature: 351
ctaggcttcgcaaacttctatcggcgctttatacggaacttctcagagatagtacgcccgcttacagccctcacgcacaaaggtacaccatttaaa

SEQ ID NO: 1999 - DNA, 96 bp, Aspergillus thermomutatus
  misc_feature: 351
tggaatcgccaacgtcggaaaggtaagagggtgcagatattcgcagtcaccctcaaggatatcaataaggccttgcaagcgaagcagtacaccgac

SEQ ID NO: 2000 - DNA, 96 bp, Aspergillus thermomutatus
  misc_feature: 351
tccgtctccacgaccgtgtctcgatcagggtcaaactgcgcaagtatcggcgcagtagtgaacatcttcttcagctgctcgaaccgctgcgtgtgc

SEQ ID NO: 2001 - DNA, 96 bp, Aspergillus thermomutatus
  misc_feature: 351
gcccagttggaagcatccgtctccacgaccgtgtctcgatcagggtcaaactgcgcaagtatcggcgcagtagtgaacatcttcttcagctgctcg

SEQ ID NO: 2002 - DNA, 96 bp, Aspergillus thermomutatus
  misc_feature: 351
gcatccgtctccacgaccgtgtctcgatcagggtcaaactgcgcaagtatcggcgcagtagtgaacatcttcttcagctgctcgaaccgctgcgtg

SEQ ID NO: 2003 - DNA, 96 bp, Aspergillus thermomutatus
  misc_feature: 351
ccgtctccacgaccgtgtctcgatcagggtcaaactgcgcaagtatcggcgcagtagtgaacatcttcttcagctgctcgaaccgctgcgtgtgct

SEQ ID NO: 2004 - DNA, 96 bp, Aspergillus thermomutatus
  misc_feature: 351
actagaatggcagacccctacatccactcgaggcgtacgatcgtttctcggctttgcgaacttctatcggcgctttatacggaacttctctgacat

SEQ ID NO: 2005 - DNA, 96 bp, Aspergillus thermomutatus
  misc_feature: 350
tttaccttctcagggtccatgcatactcccttgcctgcttcgacgatgaagcccaagtacttggtgctcttgacctcgaattcgcacttgtcaata

SEQ ID NO: 2006 - DNA, 96 bp, Aspergillus thermomutatus
  misc_feature: 350
cctaggcttcgcaaacttctatcggcgctttatacggaacttctcagagatagtacgcccgcttacagccctcacgcacaaaggtacaccatttaa

SEQ ID NO: 2007 - DNA, 96 bp, Aspergillus thermomutatus
  misc_feature: 350
tcttcgcccttagtcaactcaattcggtgatcgaccccagggcgatgcgggggcagttcgtcggctttcttccgatcgaacgcccctaggaactcg

SEQ ID NO: 2008 - DNA, 96 bp, Aspergillus thermomutatus
  misc_feature: 350
tctagtatagcttttaccttgtcggggtccatgcgtacgcccttgccagcttcaatgataaacccgaggtatttcgtgctcttgacctcgaactcg

SEQ ID NO: 2009 - DNA, 96 bp, Aspergillus thermomutatus
  misc_feature: 350
tcactctcggagcacagacgacaggtaaaacaggtacttgcgcgcctacaggaagcaggcctacagctagatattgacaagtgcgaattcgaggtc

SEQ ID NO: 2010 - DNA, 96 bp, Aspergillus thermomutatus
  misc_feature: 350
tagatactccaccaggggtgcataatgtgttccatgttagtctgttgcgtcctgcggcgaacgatcctttcccaagccagttgagcactgactacc

SEQ ID NO: 2011 - DNA, 96 bp, Aspergillus thermomutatus
  misc_feature: 350
ccgtcttcgcccttagtcaactcaattcggtgatcgaccccagggcgatgcgggggcagttcgtcggctttcttccgatcgaacgcccctaggaac

SEQ ID NO: 2012 - DNA, 96 bp, Aspergillus thermomutatus
  misc_feature: 350
gtggtttaccaaacttgatgtgatcgccgcattccacaagattcgcattgcacccggagatgaatggctgacggccttccgtacgcggtttggtct

SEQ ID NO: 2013 - DNA, 96 bp, Aspergillus thermomutatus
  misc_feature: 350
gggaagaacacattgtacgcgatgatagcgcggaacttctactggccggagctttctgcagatgctcgacgattcgttaagaattgcgataagtgt

SEQ ID NO: 2014 - DNA, 96 bp, Aspergillus thermomutatus
  misc_feature: 350
ggaagcatccgtctccacgaccgtgtctcgatcagggtcaaactgcgcaagtatcggcgcagtagtgaacatcttcttcagctgctcgaaccgctg

SEQ ID NO: 2015 - DNA, 96 bp, Aspergillus thermomutatus
  misc_feature: 350
gatactccaccaggggtgcataatgtgttccatgttagtctgttgcgtcctgcggcgaacgatcctttcccaagccagttgagcactgactaccag

SEQ ID NO: 2016 - DNA, 96 bp, Aspergillus thermomutatus
  misc_feature: 350
cttcgcccttagtcaactcaattcggtgatcgaccccagggcgatgcgggggcagttcgtcggctttcttccgatcgaacgcccctaggaactcgt

SEQ ID NO: 2017 - DNA, 96 bp, Aspergillus thermomutatus
  misc_feature: 350
cgtagcccagttggaagcatccgtctccacgaccgtgtctcgatcagggtcaaactgcgcaagtatcggcgcagtagtgaacatcttcttcagctg

SEQ ID NO: 2018 - DNA, 96 bp, Aspergillus thermomutatus
  misc_feature: 350
ccttagtcaactcaattcggtgatcgaccccagggcgatgcgggggcagttcgtcggctttcttccgatcgaacgcccctaggaactcgtggtagt

SEQ ID NO: 2019 - DNA, 96 bp, Aspergillus thermomutatus
  misc_feature: 350
catccgtctccacgaccgtgtctcgatcagggtcaaactgcgcaagtatcggcgcagtagtgaacatcttcttcagctgctcgaaccgctgcgtgt

SEQ ID NO: 2020 - DNA, 96 bp, Aspergillus thermomutatus
  misc_feature: 349
ttaccttctcagggtccatgcatactcccttgcctgcttcgacgatgaagcccaagtacttggtgctcttgacctcgaattcgcacttgtcaatat

SEQ ID NO: 2021 - DNA, 96 bp, Aspergillus thermomutatus
  misc_feature: 349
agatactccaccaggggtgcataatgtgttccatgttagtctgttgcgtcctgcggcgaacgatcctttcccaagccagttgagcactgactacca

SEQ ID NO: 2022 - DNA, 96 bp, Aspergillus thermomutatus
  misc_feature: 349
gtctccacgaccgtgtctcgatcagggtcaaactgcgcaagtatcggcgcagtagtgaacatcttcttcagctgctcgaaccgctgcgtgtgctca

SEQ ID NO: 2023 - DNA, 96 bp, Aspergillus thermomutatus
  misc_feature: 349
ctggatcctcacattttgcacgttgataatcgtacttgcgggtgtatttggatatgatctcatcatgtcgtttgataaagcgagaaacccagttca

SEQ ID NO: 2024 - DNA, 96 bp, Aspergillus thermomutatus
  misc_feature: 349
agcagtgcagatcttcgcagccagcatcaaggatattgagaaagcactgcaggtaaagacacatacagaccctgccgataagctaccagcgcacta

SEQ ID NO: 2025 - DNA, 96 bp, Aspergillus thermomutatus
  misc_feature: 349
cgcgacatgctgtacaacgggccccatgggggctctgctctcttgccgtccggaccttctagcagttcgatgcggtggtctacccctggccgatgc

SEQ ID NO: 2026 - DNA, 96 bp, Aspergillus thermomutatus
  misc_feature: 349
cgtctccacgaccgtgtctcgatcagggtcaaactgcgcaagtatcggcgcagtagtgaacatcttcttcagctgctcgaaccgctgcgtgtgctc

SEQ ID NO: 2027 - DNA, 96 bp, Aspergillus thermomutatus
  misc_feature: 349
gacatgctgtacaacgggccccatgggggctctgctctcttgccgtccggaccttctagcagttcgatgcggtggtctacccctggccgatgcggg

SEQ ID NO: 2028 - DNA, 96 bp, Aspergillus thermomutatus
  misc_feature: 349
ctgctagagaagaacttcatacgtgtcagcagctcgtcagctgcagccccggtgctgctcgtgcgcaaacctggtggaggtctacgtttctgtgtt

SEQ ID NO: 2029 - DNA, 96 bp, Aspergillus thermomutatus
  misc_feature: 349
agtatgtatagcgaacccctgtgcgcttatctgtctgaccactaacttcggctcattctcaacccgttccactgcgaatccgtctgctaatcgcag

SEQ ID NO: 2030 - DNA, 96 bp, Aspergillus thermomutatus
  misc_feature: 349
ctctggatcctcacattttgcacgttgataatcgtacttgcgggtgtatttggatatgatctcatcatgtcgtttgataaagcgagaaacccagtt

SEQ ID NO: 2031 - DNA, 96 bp, Aspergillus thermomutatus
  misc_feature: 349
ctacgaccctgtgcctacttctcgaaaaagaattcgcctgcggaatgcaactacgagatccacgataaggagctgctcgcgatcatcaacgccctt

SEQ ID NO: 2032 - DNA, 96 bp, Aspergillus thermomutatus
  misc_feature: 349
actgttttcgagctgaacaacgcgccaactcacataaattgactaaagctgaagaggaatcgcttatacagtggatattatctatggatcagcgtg

SEQ ID NO: 2033 - DNA, 96 bp, Aspergillus thermomutatus
  misc_feature: 348
ttccctaacctatcggcaatcaccatgatctcctcacagtcgccggaggtaggtagcttggtgatgaagtcgatagctatctcgcgccatttgcgg

SEQ ID NO: 2034 - DNA, 96 bp, Aspergillus thermomutatus
  misc_feature: 348
catacgtgtcagcagctcgtcagctgcagccccggtgctgctcgtgcgcaaacctggtggaggtctacgtttctgtgttgattaccgagcattgaa

SEQ ID NO: 2035 - DNA, 96 bp, Aspergillus thermomutatus
  misc_feature: 348
tccaatatagcctttaccttctcagggtccatgcatactcccttgcctgcttcgacgatgaagcccaagtacttggtgctcttgacctcgaattcg

SEQ ID NO: 2036 - DNA, 96 bp, Aspergillus thermomutatus
  misc_feature: 348
gcccttagtcaactcaattcggtgatcgaccccagggcgatgcgggggcagttcgtcggctttcttccgatcgaacgcccctaggaactcgtggta

SEQ ID NO: 2037 - DNA, 96 bp, Aspergillus thermomutatus
  misc_feature: 348
gtagcccagttggaagcatccgtctccacgaccgtgtctcgatcagggtcaaactgcgcaagtatcggcgcagtagtgaacatcttcttcagctgc

SEQ ID NO: 2038 - DNA, 96 bp, Aspergillus thermomutatus
  misc_feature: 348
gcgacatgctgtacaacgggccccatgggggctctgctctcttgccgtccggaccttctagcagttcgatgcggtggtctacccctggccgatgcg

SEQ ID NO: 2039 - DNA, 96 bp, Aspergillus thermomutatus
  misc_feature: 348
gaagaacacattgtacgcgatgatagcgcggaacttctactggccggagctttctgcagatgctcgacgattcgttaagaattgcgataagtgtgg

SEQ ID NO: 2040 - DNA, 96 bp, Aspergillus thermomutatus
  misc_feature: 348
agttcttcgcgcgacatgctgtacaacgggccccatgggggctctgctctcttgccgtccggaccttctagcagttcgatgcggtggtctacccct

SEQ ID NO: 2041 - DNA, 96 bp, Aspergillus thermomutatus
  misc_feature: 347
tcgccaacgtcggaaaggtaagagggtgcagatattcgcagtcaccctcaaggatatcaataaggccttgcaagcgaagcagtacaccgaccccaa

SEQ ID NO: 2042 - DNA, 96 bp, Aspergillus thermomutatus
  misc_feature: 347
ttggaagcatccgtctccacgaccgtgtctcgatcagggtcaaactgcgcaagtatcggcgcagtagtgaacatcttcttcagctgctcgaaccgc

SEQ ID NO: 2043 - DNA, 96 bp, Aspergillus thermomutatus
  misc_feature: 347
atcgccaacgtcggaaaggtaagagggtgcagatattcgcagtcaccctcaaggatatcaataaggccttgcaagcgaagcagtacaccgacccca

SEQ ID NO: 2044 - DNA, 96 bp, Aspergillus thermomutatus
  misc_feature: 347
agcccagttggaagcatccgtctccacgaccgtgtctcgatcagggtcaaactgcgcaagtatcggcgcagtagtgaacatcttcttcagctgctc

SEQ ID NO: 2045 - DNA, 96 bp, Aspergillus thermomutatus
  misc_feature: 347
aatttaccaggccgatagactagctggtagttgaaccgactgagcaaatctgaccagcgcgcttgccgctcgtttagtcgcctgcgaactgtgaag

SEQ ID NO: 2046 - DNA, 96 bp, Aspergillus thermomutatus
  misc_feature: 347
ccctgagaaggtaaaggctatattggaatggcagaccccgacctcagcgcgcggcgtgcggtcattcctaggcttcgcaaacttctatcggcgctt

SEQ ID NO: 2047 - DNA, 96 bp, Aspergillus thermomutatus
  misc_feature: 347
aagcagtgcagatcttcgcagccagcatcaaggatattgagaaagcactgcaggtaaagacacatacagaccctgccgataagctaccagcgcact

SEQ ID NO: 2048 - DNA, 96 bp, Aspergillus thermomutatus
  misc_feature: 347
aaggaaccccattcacatggacggaggagcacaccaatcggttcgagcagctaaagaagatgtttactaccgcgccgattctcatgcagtttgact

SEQ ID NO: 2049 - DNA, 96 bp, Aspergillus thermomutatus
  misc_feature: 346
ttcttcgcgcgacatgctgtacaacgggccccatgggggctctgctctcttgccgtccggaccttctagcagttcgatgcggtggtctacccctgg

SEQ ID NO: 2050 - DNA, 96 bp, Aspergillus thermomutatus
  misc_feature: 346
gggccgcgatctgacgtgattgtgctaggtacgccatggtagccgatgaatcggtcgattagcagctgcgctacggtctcggcatcagttcgctca

SEQ ID NO: 2051 - DNA, 96 bp, Aspergillus thermomutatus
  misc_feature: 346
tagtcaactcaattcggtgatcgaccccagggcgatgcgggggcagttcgtcggctttcttccgatcgaacgcccctaggaactcgtggtagtgcg

SEQ ID NO: 2052 - DNA, 96 bp, Aspergillus thermomutatus
  misc_feature: 346
tagcccagttggaagcatccgtctccacgaccgtgtctcgatcagggtcaaactgcgcaagtatcggcgcagtagtgaacatcttcttcagctgct

SEQ ID NO: 2053 - DNA, 96 bp, Aspergillus thermomutatus
  misc_feature: 346
atttaccaggccgatagactagctggtagttgaaccgactgagcaaatctgaccagcgcgcttgccgctcgtttagtcgcctgcgaactgtgaagt

SEQ ID NO: 2054 - DNA, 96 bp, Aspergillus thermomutatus
  misc_feature: 345
ttctagtatagcttttaccttgtcggggtccatgcgtacgcccttgccagcttcaatgataaacccgaggtatttcgtgctcttgacctcgaactc

SEQ ID NO: 2055 - DNA, 96 bp, Aspergillus thermomutatus
  misc_feature: 345
taatttaccaggccgatagactagctggtagttgaaccgactgagcaaatctgaccagcgcgcttgccgctcgtttagtcgcctgcgaactgtgaa

SEQ ID NO: 2056 - DNA, 96 bp, Aspergillus thermomutatus
  misc_feature: 345
tcttcgcgcgacatgctgtacaacgggccccatgggggctctgctctcttgccgtccggaccttctagcagttcgatgcggtggtctacccctggc

SEQ ID NO: 2057 - DNA, 96 bp, Aspergillus thermomutatus
  misc_feature: 345
cccagttggaagcatccgtctccacgaccgtgtctcgatcagggtcaaactgcgcaagtatcggcgcagtagtgaacatcttcttcagctgctcga

SEQ ID NO: 2058 - DNA, 96 bp, Aspergillus thermomutatus
  misc_feature: 345
tatcaaaggcgaagtggtttaccaaacttgatgtgatcgccgcattccacaagattcgcattgcacccggagatgaatggctgacggccttccgta

SEQ ID NO: 2059 - DNA, 96 bp, Aspergillus thermomutatus
  misc_feature: 345
aaagcagtgcagatcttcgcagccagcatcaaggatattgagaaagcactgcaggtaaagacacatacagaccctgccgataagctaccagcgcac

SEQ ID NO: 2060 - DNA, 96 bp, Aspergillus thermomutatus
  misc_feature: 345
ggccgcgatctgacgtgattgtgctaggtacgccatggtagccgatgaatcggtcgattagcagctgcgctacggtctcggcatcagttcgctcac

SEQ ID NO: 2061 - DNA, 96 bp, Aspergillus thermomutatus
  misc_feature: 345
gtaaagcagtgcagatcttcgcagccagcatcaaggatattgagaaagcactgcaggtaaagacacatacagaccctgccgataagctaccagcgc

SEQ ID NO: 2062 - DNA, 96 bp, Aspergillus thermomutatus
  misc_feature: 345
aatcgcgaatgggtcacatctattgagtgtatcaactctcaaggatgggctttaccaccatgtattatcttcaagggaacagtccatattgagggc

SEQ ID NO: 2063 - DNA, 96 bp, Aspergillus thermomutatus
  misc_feature: 345
gatcctttcccaagccagttgagcactgactaccagccgcccgctgtgctagtcgacggcgaggccgaatatgaggttgaatggatactggatgag

SEQ ID NO: 2064 - DNA, 96 bp, Aspergillus thermomutatus
  misc_feature: 345
cttagtcaactcaattcggtgatcgaccccagggcgatgcgggggcagttcgtcggctttcttccgatcgaacgcccctaggaactcgtggtagtg

SEQ ID NO: 2065 - DNA, 96 bp, Aspergillus thermomutatus
  misc_feature: 345
cctccaggtgctcgtggtagtgcgcgggcagcttggtcttggggtcggtgtactgcttcgcttgcaaggccttattgatatccttgagggtgactg

SEQ ID NO: 2066 - DNA, 96 bp, Aspergillus thermomutatus
  misc_feature: 344
ttgtactgcgtaagacgcttacagagctgctagagaagaacttcatacgtgtcagcagctcgtcagctgcagccccggtgctgctcgtgcgcaaac

SEQ ID NO: 2067 - DNA, 96 bp, Aspergillus thermomutatus
  misc_feature: 344
caagattcgcattgcacccggagatgaatggctgacggccttccgtacgcggtttggtctgtacgaatggttggtgaccccttttggcatggcgaa

SEQ ID NO: 2068 - DNA, 96 bp, Aspergillus thermomutatus
  misc_feature: 344
ttccaatatagcctttaccttctcagggtccatgcatactcccttgcctgcttcgacgatgaagcccaagtacttggtgctcttgacctcgaattc

SEQ ID NO: 2069 - DNA, 96 bp, Aspergillus thermomutatus
  misc_feature: 344
tggtttaccaaacttgatgtgatcgccgcattccacaagattcgcattgcacccggagatgaatggctgacggccttccgtacgcggtttggtctg

SEQ ID NO: 2070 - DNA, 96 bp, Aspergillus thermomutatus
  misc_feature: 344
agtgcagatcttcgcagccagcatcaaggatattgagaaagcactgcaggtaaagacacatacagaccctgccgataagctaccagcgcactacca

SEQ ID NO: 2071 - DNA, 96 bp, Aspergillus thermomutatus
  misc_feature: 344
tgcttcgccagcgacccatcagtgaagataagtacatcgtcgatgtacgcggaggcgaattcatccaggaagtctcgaagggcccagttgatatac

SEQ ID NO: 2072 - DNA, 96 bp, Aspergillus thermomutatus
  misc_feature: 344
taaagcagtgcagatcttcgcagccagcatcaaggatattgagaaagcactgcaggtaaagacacatacagaccctgccgataagctaccagcgca

SEQ ID NO: 2073 - DNA, 96 bp, Aspergillus thermomutatus
  misc_feature: 344
gcctaagggaaagacgcagcagaagtaccatgacacgtgaccatcggcagagcagcggtatgctcggcagagcaatgatctgatgagaacagatca

SEQ ID NO: 2074 - DNA, 96 bp, Aspergillus thermomutatus
  misc_feature: 344
cgatcctttcccaagccagttgagcactgactaccagccgcccgctgtgctagtcgacggcgaggccgaatatgaggttgaatggatactggatga

SEQ ID NO: 2075 - DNA, 96 bp, Aspergillus thermomutatus
  misc_feature: 344
aggaaccccattcacatggacggaggagcacaccaatcggttcgagcagctaaagaagatgtttactaccgcgccgattctcatgcagtttgacta

SEQ ID NO: 2076 - DNA, 96 bp, Aspergillus thermomutatus
  misc_feature: 344
gtcttcgcccttagtcaactcaattcggtgatcgaccccagggcgatgcgggggcagttcgtcggctttcttccgatcgaacgcccctaggaactc

SEQ ID NO: 2077 - DNA, 96 bp, Aspergillus thermomutatus
  misc_feature: 344
atatcaactgggcccttcgagacttcctggatgaattcgcctccgcgtacatcgacgatgtacttatcttcactgatgggtcgctggcgaagcacc

SEQ ID NO: 2078 - DNA, 96 bp, Aspergillus thermomutatus
  misc_feature: 344
ggaatcgcgaatgggtcacatctattgagtgtatcaactctcaaggatgggctttaccaccatgtattatcttcaagggaacagtccatattgagg

SEQ ID NO: 2079 - DNA, 96 bp, Aspergillus thermomutatus
  misc_feature: 344
gaacatcttcttcagctgctcgaaccgctgcgtgtgctcatacgtccatttaaatggtgtacctttgtgcgtgagggctgtaagcgggcgtactat

SEQ ID NO: 2080 - DNA, 96 bp, Aspergillus thermomutatus
  misc_feature: 343
ttagtcaactcaattcggtgatcgaccccagggcgatgcgggggcagttcgtcggctttcttccgatcgaacgcccctaggaactcgtggtagtgc

SEQ ID NO: 2081 - DNA, 96 bp, Aspergillus thermomutatus
  misc_feature: 343
gcgcggcgtgcggtcattcctaggcttcgcaaacttctatcggcgctttatacggaacttctcagagatagtacgcccgcttacagccctcacgca

SEQ ID NO: 2082 - DNA, 96 bp, Aspergillus thermomutatus
  misc_feature: 343
tcgcgaatgggtcacatctattgagtgtatcaactctcaaggatgggctttaccaccatgtattatcttcaagggaacagtccatattgagggctg

SEQ ID NO: 2083 - DNA, 96 bp, Aspergillus thermomutatus
  misc_feature: 343
gtgcttcgccagcgacccatcagtgaagataagtacatcgtcgatgtacgcggaggcgaattcatccaggaagtctcgaagggcccagttgatata

SEQ ID NO: 2084 - DNA, 96 bp, Aspergillus thermomutatus
  misc_feature: 343
gtcgtctgtgctccgagagtgacccatcagtgaaaaccaatatatcatcaacgtacgcagatgcaaattcatccagaaagtctcttagtgtccagt

SEQ ID NO: 2085 - DNA, 96 bp, Aspergillus thermomutatus
  misc_feature: 343
gacctccaggtgctcgtggtagtgcgcgggcagcttggtcttggggtcggtgtactgcttcgcttgcaaggccttattgatatccttgagggtgac

SEQ ID NO: 2086 - DNA, 96 bp, Aspergillus thermomutatus
  misc_feature: 343
cagtgcagatcttcgcagccagcatcaaggatattgagaaagcactgcaggtaaagacacatacagaccctgccgataagctaccagcgcactacc

SEQ ID NO: 2087 - DNA, 96 bp, Aspergillus thermomutatus
  misc_feature: 343
ggaagaacacattgtacgcgatgatagcgcggaacttctactggccggagctttctgcagatgctcgacgattcgttaagaattgcgataagtgtg

SEQ ID NO: 2088 - DNA, 96 bp, Aspergillus thermomutatus
  misc_feature: 343
ccacaagattcgcattgcacccggagatgaatggctgacggccttccgtacgcggtttggtctgtacgaatggttggtgaccccttttggcatggc

SEQ ID NO: 2089 - DNA, 96 bp, Aspergillus thermomutatus
  misc_feature: 343
aactgcgcaagtatcggcgcagtagtgaacatcttcttcagctgctcgaaccgctgcgtgtgctcatacgtccatttaaatggtgtacctttgtgc

SEQ ID NO: 2090 - DNA, 96 bp, Aspergillus thermomutatus
  misc_feature: 343
agcctaagggaaagacgcagcagaagtaccatgacacgtgaccatcggcagagcagcggtatgctcggcagagcaatgatctgatgagaacagatc

SEQ ID NO: 2091 - DNA, 96 bp, Aspergillus thermomutatus
  misc_feature: 343
gaagtggtttaccaaacttgatgtgatcgccgcattccacaagattcgcattgcacccggagatgaatggctgacggccttccgtacgcggtttgg

SEQ ID NO: 2092 - DNA, 96 bp, Aspergillus thermomutatus
  misc_feature: 343
gaagacctccaggtgctcgtggtagtgcgcgggcagcttggtcttggggtcggtgtactgcttcgcttgcaaggccttattgatatccttgagggt

SEQ ID NO: 2093 - DNA, 96 bp, Aspergillus thermomutatus
  misc_feature: 342
tttcgagctgaacaacgcgccaactcacataaattgactaaagctgaagaggaatcgcttatacagtggatattatctatggatcagcgtggagca

SEQ ID NO: 2094 - DNA, 96 bp, Aspergillus thermomutatus
  misc_feature: 342
tagcaagaagctcgatgcccagcacgcgaagttcacagtactggaagctattggatcacatgcttaccgactagatactccaccaggggtgcataa

SEQ ID NO: 2095 - DNA, 96 bp, Aspergillus thermomutatus
  misc_feature: 342
ttacctgtcgtctgtgctccgagagtgacccatcagtgaaaaccaatatatcatcaacgtacgcagatgcaaattcatccagaaagtctcttagtg

SEQ ID NO: 2096 - DNA, 96 bp, Aspergillus thermomutatus
  misc_feature: 342
tgtgaacagatcagtgatctgttacagacatatcagtgatatgttcgaagggctatataaggacactcattaccattgtatctagcactcttagtt

SEQ ID NO: 2097 - DNA, 96 bp, Aspergillus thermomutatus
  misc_feature: 342
acctagtcataggttttcctacggtctagcccgtaacattagaactcgctcctcatcttactgagcacattagaatcattggaaacgcacattgga

SEQ ID NO: 2098 - DNA, 96 bp, Aspergillus thermomutatus
  misc_feature: 342
tcaaaggcgaagtggtttaccaaacttgatgtgatcgccgcattccacaagattcgcattgcacccggagatgaatggctgacggccttccgtacg

SEQ ID NO: 2099 - DNA, 96 bp, Aspergillus thermomutatus
  misc_feature: 342
gtgaatgggtgactaccattgaatgtatcaatacttctggatgggctctaccacctatgatcatctttactggcaaagtccatcaatcccaatggt

SEQ ID NO: 2100 - DNA, 96 bp, Aspergillus thermomutatus
  misc_feature: 342
ggtaaagcagtgcagatcttcgcagccagcatcaaggatattgagaaagcactgcaggtaaagacacatacagaccctgccgataagctaccagcg

SEQ ID NO: 2101 - DNA, 96 bp, Aspergillus thermomutatus
  misc_feature: 342
agcatgtcgcgcgaagaactgcttgtactgcgtaagacgcttacagagctgctagagaagaacttcatacgtgtcagcagctcgtcagctgcagcc

SEQ ID NO: 2102 - DNA, 96 bp, Aspergillus thermomutatus
  misc_feature: 342
gaagcatccgtctccacgaccgtgtctcgatcagggtcaaactgcgcaagtatcggcgcagtagtgaacatcttcttcagctgctcgaaccgctgc

SEQ ID NO: 2103 - DNA, 96 bp, Aspergillus thermomutatus
  misc_feature: 342
gaatcgcgaatgggtcacatctattgagtgtatcaactctcaaggatgggctttaccaccatgtattatcttcaagggaacagtccatattgaggg

SEQ ID NO: 2104 - DNA, 96 bp, Aspergillus thermomutatus
  misc_feature: 342
cctaagggaaagacgcagcagaagtaccatgacacgtgaccatcggcagagcagcggtatgctcggcagagcaatgatctgatgagaacagatcag

SEQ ID NO: 2105 - DNA, 96 bp, Aspergillus thermomutatus
  misc_feature: 342
cgtctgtgctccgagagtgacccatcagtgaaaaccaatatatcatcaacgtacgcagatgcaaattcatccagaaagtctcttagtgtccagttg

SEQ ID NO: 2106 - DNA, 96 bp, Aspergillus thermomutatus
  misc_feature: 342
cacaagattcgcattgcacccggagatgaatggctgacggccttccgtacgcggtttggtctgtacgaatggttggtgaccccttttggcatggcg

SEQ ID NO: 2107 - DNA, 96 bp, Aspergillus thermomutatus
  misc_feature: 341
tttacctgtcgtctgtgctccgagagtgacccatcagtgaaaaccaatatatcatcaacgtacgcagatgcaaattcatccagaaagtctcttagt

SEQ ID NO: 2108 - DNA, 96 bp, Aspergillus thermomutatus
  misc_feature: 341
ttgtgaacagatcagtgatctgttacagacatatcagtgatatgttcgaagggctatataaggacactcattaccattgtatctagcactcttagt

SEQ ID NO: 2109 - DNA, 96 bp, Aspergillus thermomutatus
  misc_feature: 341
tatgagagcctaagggaaagacgcagcagaagtaccatgacacgtgaccatcggcagagcagcggtatgctcggcagagcaatgatctgatgagaa

SEQ ID NO: 2110 - DNA, 96 bp, Aspergillus thermomutatus
  misc_feature: 341
ccctagcaagaagctcgatgcccagcacgcgaagttcacagtactggaagctattggatcacatgcttaccgactagatactccaccaggggtgca

SEQ ID NO: 2111 - DNA, 96 bp, Aspergillus thermomutatus
  misc_feature: 341
gctttgcgaacttctatcggcgctttatacggaacttctctgacatagtacgaccgttgacggcgcttacacagaaaggaaccccattcacatgga

SEQ ID NO: 2112 - DNA, 96 bp, Aspergillus thermomutatus
  misc_feature: 341
ctagcaagaagctcgatgcccagcacgcgaagttcacagtactggaagctattggatcacatgcttaccgactagatactccaccaggggtgcata

SEQ ID NO: 2113 - DNA, 96 bp, Aspergillus thermomutatus
  misc_feature: 341
aatcgccaacgtcggaaaggtaagagggtgcagatattcgcagtcaccctcaaggatatcaataaggccttgcaagcgaagcagtacaccgacccc

SEQ ID NO: 2114 - DNA, 96 bp, Aspergillus thermomutatus
  misc_feature: 341
ggaaaggtaagagggtgcagatattcgcagtcaccctcaaggatatcaataaggccttgcaagcgaagcagtacaccgaccccaagaccaagctgc

SEQ ID NO: 2115 - DNA, 96 bp, Aspergillus thermomutatus
  misc_feature: 341
gagcctaagggaaagacgcagcagaagtaccatgacacgtgaccatcggcagagcagcggtatgctcggcagagcaatgatctgatgagaacagat

SEQ ID NO: 2116 - DNA, 96 bp, Aspergillus thermomutatus
  misc_feature: 341
cttcgaacatatcactgatatgtctgtaacagatcactgatctgttcacaacagatcactgatctgttctcatcagatcattgctctgccgagcat

SEQ ID NO: 2117 - DNA, 96 bp, Aspergillus thermomutatus
  misc_feature: 341
agggtccatgcatactcccttgcctgcttcgacgatgaagcccaagtacttggtgctcttgacctcgaattcgcacttgtcaatatctagctgtag

SEQ ID NO: 2118 - DNA, 96 bp, Aspergillus thermomutatus
  misc_feature: 341
ctaagggaaagacgcagcagaagtaccatgacacgtgaccatcggcagagcagcggtatgctcggcagagcaatgatctgatgagaacagatcagt

SEQ ID NO: 2119 - DNA, 96 bp, Aspergillus thermomutatus
  misc_feature: 341
aaggcgaagtggtttaccaaacttgatgtgatcgccgcattccacaagattcgcattgcacccggagatgaatggctgacggccttccgtacgcgg

SEQ ID NO: 2120 - DNA, 96 bp, Aspergillus thermomutatus
  misc_feature: 341
atcgcgaatgggtcacatctattgagtgtatcaactctcaaggatgggctttaccaccatgtattatcttcaagggaacagtccatattgagggct

SEQ ID NO: 2121 - DNA, 96 bp, Aspergillus thermomutatus
  misc_feature: 340
tgctcagtgagctcgagcattcagcgggccttgcccgctacactactccccctcccctcgcgggtcgggggtgttctggcccgctcgctgctccca

SEQ ID NO: 2122 - DNA, 96 bp, Aspergillus thermomutatus
  misc_feature: 340
ccttcgaacatatcactgatatgtctgtaacagatcactgatctgttcacaacagatcactgatctgttctcatcagatcattgctctgccgagca

SEQ ID NO: 2123 - DNA, 96 bp, Aspergillus thermomutatus
  misc_feature: 340
ctatgagagcctaagggaaagacgcagcagaagtaccatgacacgtgaccatcggcagagcagcggtatgctcggcagagcaatgatctgatgaga

SEQ ID NO: 2124 - DNA, 96 bp, Aspergillus thermomutatus
  misc_feature: 340
gctagagaagaacttcatacgtgtcagcagctcgtcagctgcagccccggtgctgctcgtgcgcaaacctggtggaggtctacgtttctgtgttga

SEQ ID NO: 2125 - DNA, 96 bp, Aspergillus thermomutatus
  misc_feature: 340
aaaggaaccccattcacatggacggaggagcacaccaatcggttcgagcagctaaagaagatgtttactaccgcgccgattctcatgcagtttgac

SEQ ID NO: 2126 - DNA, 96 bp, Aspergillus thermomutatus
  misc_feature: 340
ggggcgttcgatcggaagaaagccgacgaactgcccccgcatcgccctggggtcgatcaccgaattgagttgactaagggcgaagacgggaagccg

SEQ ID NO: 2127 - DNA, 96 bp, Aspergillus thermomutatus
  misc_feature: 340
caaaggcgaagtggtttaccaaacttgatgtgatcgccgcattccacaagattcgcattgcacccggagatgaatggctgacggccttccgtacgc

SEQ ID NO: 2128 - DNA, 96 bp, Aspergillus thermomutatus
  misc_feature: 340
cgaaaacagtgtccatttaatcgccgctgaagtgttgtccgcggaacattgtaaatgcgtgaagcttcacgaacattgcaaatttgcttctttttc

SEQ ID NO: 2129 - DNA, 96 bp, Aspergillus thermomutatus
  misc_feature: 340
agattcgcattgcacccggagatgaatggctgacggccttccgtacgcggtttggtctgtacgaatggttggtgaccccttttggcatggcgaacg

SEQ ID NO: 2130 - DNA, 96 bp, Aspergillus thermomutatus
  misc_feature: 340
cctagcaagaagctcgatgcccagcacgcgaagttcacagtactggaagctattggatcacatgcttaccgactagatactccaccaggggtgcat

SEQ ID NO: 2131 - DNA, 96 bp, Aspergillus thermomutatus
  misc_feature: 339
gagtatgtatagcgaacccctgtgcgcttatctgtctgaccactaacttcggctcattctcaacccgttccactgcgaatccgtctgctaatcgca

SEQ ID NO: 2132 - DNA, 96 bp, Aspergillus thermomutatus
  misc_feature: 339
acaagattcgcattgcacccggagatgaatggctgacggccttccgtacgcggtttggtctgtacgaatggttggtgaccccttttggcatggcga

SEQ ID NO: 2133 - DNA, 96 bp, Aspergillus thermomutatus
  misc_feature: 339
cagggtccatgcatactcccttgcctgcttcgacgatgaagcccaagtacttggtgctcttgacctcgaattcgcacttgtcaatatctagctgta

SEQ ID NO: 2134 - DNA, 96 bp, Aspergillus thermomutatus
  misc_feature: 339
cgcggcgtgcggtcattcctaggcttcgcaaacttctatcggcgctttatacggaacttctcagagatagtacgcccgcttacagccctcacgcac

SEQ ID NO: 2135 - DNA, 96 bp, Aspergillus thermomutatus
  misc_feature: 339
gggcgttcgatcggaagaaagccgacgaactgcccccgcatcgccctggggtcgatcaccgaattgagttgactaagggcgaagacgggaagccgt

SEQ ID NO: 2136 - DNA, 96 bp, Aspergillus thermomutatus
  misc_feature: 339
aggggcgttcgatcggaagaaagccgacgaactgcccccgcatcgccctggggtcgatcaccgaattgagttgactaagggcgaagacgggaagcc

SEQ ID NO: 2137 - DNA, 96 bp, Aspergillus thermomutatus
  misc_feature: 339
ggcgttcgatcggaagaaagccgacgaactgcccccgcatcgccctggggtcgatcaccgaattgagttgactaagggcgaagacgggaagccgtt

SEQ ID NO: 2138 - DNA, 96 bp, Aspergillus thermomutatus
  misc_feature: 339
gctaatttaccaggccgatagactagctggtagttgaaccgactgagcaaatctgaccagcgcgcttgccgctcgtttagtcgcctgcgaactgtg

SEQ ID NO: 2139 - DNA, 96 bp, Aspergillus thermomutatus
  misc_feature: 339
acgcagcagaagtaccatgacacgtgaccatcggcagagcagcggtatgctcggcagagcaatgatctgatgagaacagatcagtgatctgttgtg

SEQ ID NO: 2140 - DNA, 96 bp, Aspergillus thermomutatus
  misc_feature: 338
gctcagtgagctcgagcattcagcgggccttgcccgctacactactccccctcccctcgcgggtcgggggtgttctggcccgctcgctgctcccaa

SEQ ID NO: 2141 - DNA, 96 bp, Aspergillus thermomutatus
  misc_feature: 338
tgagagcctaagggaaagacgcagcagaagtaccatgacacgtgaccatcggcagagcagcggtatgctcggcagagcaatgatctgatgagaaca

SEQ ID NO: 2142 - DNA, 96 bp, Aspergillus thermomutatus
  misc_feature: 338
tggaagcatccgtctccacgaccgtgtctcgatcagggtcaaactgcgcaagtatcggcgcagtagtgaacatcttcttcagctgctcgaaccgct

SEQ ID NO: 2143 - DNA, 96 bp, Aspergillus thermomutatus
  misc_feature: 338
tcgtctgtgctccgagagtgacccatcagtgaaaaccaatatatcatcaacgtacgcagatgcaaattcatccagaaagtctcttagtgtccagtt

SEQ ID NO: 2144 - DNA, 96 bp, Aspergillus thermomutatus
  misc_feature: 338
tcagggtccatgcatactcccttgcctgcttcgacgatgaagcccaagtacttggtgctcttgacctcgaattcgcacttgtcaatatctagctgt

SEQ ID NO: 2145 - DNA, 96 bp, Aspergillus thermomutatus
  misc_feature: 338
agacctccaggtgctcgtggtagtgcgcgggcagcttggtcttggggtcggtgtactgcttcgcttgcaaggccttattgatatccttgagggtga

SEQ ID NO: 2146 - DNA, 96 bp, Aspergillus thermomutatus
  misc_feature: 338
gaacagatcagtgatctgttacagacatatcagtgatatgttcgaagggctatataaggacactcattaccattgtatctagcactcttagtttta

SEQ ID NO: 2147 - DNA, 96 bp, Aspergillus thermomutatus
  misc_feature: 338
cccttcgaacatatcactgatatgtctgtaacagatcactgatctgttcacaacagatcactgatctgttctcatcagatcattgctctgccgagc

SEQ ID NO: 2148 - DNA, 96 bp, Aspergillus thermomutatus
  misc_feature: 338
aaaacagtgtccatttaatcgccgctgaagtgttgtccgcggaacattgtaaatgcgtgaagcttcacgaacattgcaaatttgcttctttttcag

SEQ ID NO: 2149 - DNA, 96 bp, Aspergillus thermomutatus
  misc_feature: 338
cgtcttcgcccttagtcaactcaattcggtgatcgaccccagggcgatgcgggggcagttcgtcggctttcttccgatcgaacgcccctaggaact

SEQ ID NO: 2150 - DNA, 96 bp, Aspergillus thermomutatus
  misc_feature: 338
aaaggcgaagtggtttaccaaacttgatgtgatcgccgcattccacaagattcgcattgcacccggagatgaatggctgacggccttccgtacgcg

SEQ ID NO: 2151 - DNA, 96 bp, Aspergillus thermomutatus
  misc_feature: 338
cagagcaatgatctgatgagaacagatcagtgatctgttgtgaacagatcagtgatctgttacagacatatcagtgatatgttcgaagggctatat

SEQ ID NO: 2152 - DNA, 96 bp, Aspergillus thermomutatus
  misc_feature: 338
aagacctccaggtgctcgtggtagtgcgcgggcagcttggtcttggggtcggtgtactgcttcgcttgcaaggccttattgatatccttgagggtg

SEQ ID NO: 2153 - DNA, 96 bp, Aspergillus thermomutatus
  misc_feature: 337
ttcgaacatatcactgatatgtctgtaacagatcactgatctgttcacaacagatcactgatctgttctcatcagatcattgctctgccgagcata

SEQ ID NO: 2154 - DNA, 96 bp, Aspergillus thermomutatus
  misc_feature: 337
cgttgatgatatattggttttcactgatgggtcactctcggagcacagacgacaggtaaaacaggtacttgcgcgcctacaggaagcaggcctaca

SEQ ID NO: 2155 - DNA, 96 bp, Aspergillus thermomutatus
  misc_feature: 337
tgtactgcgtaagacgcttacagagctgctagagaagaacttcatacgtgtcagcagctcgtcagctgcagccccggtgctgctcgtgcgcaaacc

SEQ ID NO: 2156 - DNA, 96 bp, Aspergillus thermomutatus
  misc_feature: 337
agagcctaagggaaagacgcagcagaagtaccatgacacgtgaccatcggcagagcagcggtatgctcggcagagcaatgatctgatgagaacaga

SEQ ID NO: 2157 - DNA, 96 bp, Aspergillus thermomutatus
  misc_feature: 337
tcattatcttctcgcgcagttgtaggcggtcatcgtcatcgtcaggcatatcttgttctcttcgcgatagtgcgtcaggtctcgcagctaatttac

SEQ ID NO: 2158 - DNA, 96 bp, Aspergillus thermomutatus
  misc_feature: 337
tatactagaatggcagacccctacatccactcgaggcgtacgatcgtttctcggctttgcgaacttctatcggcgctttatacggaacttctctga

SEQ ID NO: 2159 - DNA, 96 bp, Aspergillus thermomutatus
  misc_feature: 337
aagggaaagacgcagcagaagtaccatgacacgtgaccatcggcagagcagcggtatgctcggcagagcaatgatctgatgagaacagatcagtga

SEQ ID NO: 2160 - DNA, 96 bp, Aspergillus thermomutatus
  misc_feature: 337
taagggaaagacgcagcagaagtaccatgacacgtgaccatcggcagagcagcggtatgctcggcagagcaatgatctgatgagaacagatcagtg

SEQ ID NO: 2161 - DNA, 96 bp, Aspergillus thermomutatus
  misc_feature: 337
gttgtgaacagatcagtgatctgttacagacatatcagtgatatgttcgaagggctatataaggacactcattaccattgtatctagcactcttag

SEQ ID NO: 2162 - DNA, 96 bp, Aspergillus thermomutatus
  misc_feature: 337
aagattcgcattgcacccggagatgaatggctgacggccttccgtacgcggtttggtctgtacgaatggttggtgaccccttttggcatggcgaac

SEQ ID NO: 2163 - DNA, 96 bp, Aspergillus thermomutatus
  misc_feature: 337
ggcgaagtggtttaccaaacttgatgtgatcgccgcattccacaagattcgcattgcacccggagatgaatggctgacggccttccgtacgcggtt

SEQ ID NO: 2164 - DNA, 96 bp, Aspergillus thermomutatus
  misc_feature: 337
cctgtcgtctgtgctccgagagtgacccatcagtgaaaaccaatatatcatcaacgtacgcagatgcaaattcatccagaaagtctcttagtgtcc

SEQ ID NO: 2165 - DNA, 96 bp, Aspergillus thermomutatus
  misc_feature: 337
cctcctattctagttcttcagcgagttcttattgtacatacctagtcataggttttcctacggtctagcccgtaacattagaactcgctcctcatc

SEQ ID NO: 2166 - DNA, 96 bp, Aspergillus thermomutatus
  misc_feature: 337
gagagcctaagggaaagacgcagcagaagtaccatgacacgtgaccatcggcagagcagcggtatgctcggcagagcaatgatctgatgagaacag

SEQ ID NO: 2167 - DNA, 96 bp, Aspergillus thermomutatus
  misc_feature: 337
ctacggtgcttcgccagcgacccatcagtgaagataagtacatcgtcgatgtacgcggaggcgaattcatccaggaagtctcgaagggcccagttg

SEQ ID NO: 2168 - DNA, 96 bp, Aspergillus thermomutatus
  misc_feature: 337
cgtgcggtcattcctaggcttcgcaaacttctatcggcgctttatacggaacttctcagagatagtacgcccgcttacagccctcacgcacaaagg

SEQ ID NO: 2169 - DNA, 96 bp, Aspergillus thermomutatus
  misc_feature: 337
atggaccctgagaaggtaaaggctatattggaatggcagaccccgacctcagcgcgcggcgtgcggtcattcctaggcttcgcaaacttctatcgg

SEQ ID NO: 2170 - DNA, 96 bp, Aspergillus thermomutatus
  misc_feature: 337
accctgagaaggtaaaggctatattggaatggcagaccccgacctcagcgcgcggcgtgcggtcattcctaggcttcgcaaacttctatcggcgct

SEQ ID NO: 2171 - DNA, 96 bp, Aspergillus thermomutatus
  misc_feature: 336
ttcgcgatagtgcgtcaggtctcgcagctaatttaccaggccgatagactagctggtagttgaaccgactgagcaaatctgaccagcgcgcttgcc

SEQ ID NO: 2172 - DNA, 96 bp, Aspergillus thermomutatus
  misc_feature: 336
ttcgagctgaacaacgcgccaactcacataaattgactaaagctgaagaggaatcgcttatacagtggatattatctatggatcagcgtggagcag

SEQ ID NO: 2173 - DNA, 96 bp, Aspergillus thermomutatus
  misc_feature: 336
ttcactactgcgccgatacttgcgcagtttgaccctgatcgagacacggtcgtggagacggatgcttccaactgggctacgggtgcggtgatgtcc

SEQ ID NO: 2174 - DNA, 96 bp, Aspergillus thermomutatus
  misc_feature: 336
tctttacctgcagtgctttctcaatatccttgatgctggctgcgaagatctgcactgctttacctctccggcgttgttgagtatgtatagcgaacc

SEQ ID NO: 2175 - DNA, 96 bp, Aspergillus thermomutatus
  misc_feature: 336
tctcagggtccatgcatactcccttgcctgcttcgacgatgaagcccaagtacttggtgctcttgacctcgaattcgcacttgtcaatatctagct

SEQ ID NO: 2176 - DNA, 96 bp, Aspergillus thermomutatus
  misc_feature: 336
gcagagcaatgatctgatgagaacagatcagtgatctgttgtgaacagatcagtgatctgttacagacatatcagtgatatgttcgaagggctata

SEQ ID NO: 2177 - DNA, 96 bp, Aspergillus thermomutatus
  misc_feature: 336
cgcagctaatttaccaggccgatagactagctggtagttgaaccgactgagcaaatctgaccagcgcgcttgccgctcgtttagtcgcctgcgaac

SEQ ID NO: 2178 - DNA, 96 bp, Aspergillus thermomutatus
  misc_feature: 336
catgtcgcgcgaagaactgcttgtactgcgtaagacgcttacagagctgctagagaagaacttcatacgtgtcagcagctcgtcagctgcagcccc

SEQ ID NO: 2179 - DNA, 96 bp, Aspergillus thermomutatus
  misc_feature: 336
ggaccctgagaaggtaaaggctatattggaatggcagaccccgacctcagcgcgcggcgtgcggtcattcctaggcttcgcaaacttctatcggcg

SEQ ID NO: 2180 - DNA, 96 bp, Aspergillus thermomutatus
  misc_feature: 336
gattcgcattgcacccggagatgaatggctgacggccttccgtacgcggtttggtctgtacgaatggttggtgaccccttttggcatggcgaacgc

SEQ ID NO: 2181 - DNA, 96 bp, Aspergillus thermomutatus
  misc_feature: 335
tcgcagctaatttaccaggccgatagactagctggtagttgaaccgactgagcaaatctgaccagcgcgcttgccgctcgtttagtcgcctgcgaa

SEQ ID NO: 2182 - DNA, 96 bp, Aspergillus thermomutatus
  misc_feature: 335
tgctagagaagaacttcatacgtgtcagcagctcgtcagctgcagccccggtgctgctcgtgcgcaaacctggtggaggtctacgtttctgtgttg

SEQ ID NO: 2183 - DNA, 96 bp, Aspergillus thermomutatus
  misc_feature: 335
tgcatggaccctgagaaggtaaaggctatattggaatggcagaccccgacctcagcgcgcggcgtgcggtcattcctaggcttcgcaaacttctat

SEQ ID NO: 2184 - DNA, 96 bp, Aspergillus thermomutatus
  misc_feature: 335
gaaaacagtgtccatttaatcgccgctgaagtgttgtccgcggaacattgtaaatgcgtgaagcttcacgaacattgcaaatttgcttctttttca

SEQ ID NO: 2185 - DNA, 96 bp, Aspergillus thermomutatus
  misc_feature: 335
gtgtccatttaatcgccgctgaagtgttgtccgcggaacattgtaaatgcgtgaagcttcacgaacattgcaaatttgcttctttttcagagcaga

SEQ ID NO: 2186 - DNA, 96 bp, Aspergillus thermomutatus
  misc_feature: 335
tcgaacatatcactgatatgtctgtaacagatcactgatctgttcacaacagatcactgatctgttctcatcagatcattgctctgccgagcatac

SEQ ID NO: 2187 - DNA, 96 bp, Aspergillus thermomutatus
  misc_feature: 335
ctaatttaccaggccgatagactagctggtagttgaaccgactgagcaaatctgaccagcgcgcttgccgctcgtttagtcgcctgcgaactgtga

SEQ ID NO: 2188 - DNA, 96 bp, Aspergillus thermomutatus
  misc_feature: 335
gtgcggtcattcctaggcttcgcaaacttctatcggcgctttatacggaacttctcagagatagtacgcccgcttacagccctcacgcacaaaggt

SEQ ID NO: 2189 - DNA, 96 bp, Aspergillus thermomutatus
  misc_feature: 335
ctttgcgaacttctatcggcgctttatacggaacttctctgacatagtacgaccgttgacggcgcttacacagaaaggaaccccattcacatggac

SEQ ID NO: 2190 - DNA, 96 bp, Aspergillus thermomutatus
  misc_feature: 335
gaccctgagaaggtaaaggctatattggaatggcagaccccgacctcagcgcgcggcgtgcggtcattcctaggcttcgcaaacttctatcggcgc

SEQ ID NO: 2191 - DNA, 96 bp, Aspergillus thermomutatus
  misc_feature: 335
catggaccctgagaaggtaaaggctatattggaatggcagaccccgacctcagcgcgcggcgtgcggtcattcctaggcttcgcaaacttctatcg

SEQ ID NO: 2192 - DNA, 96 bp, Aspergillus thermomutatus
  misc_feature: 335
acctccaggtgctcgtggtagtgcgcgggcagcttggtcttggggtcggtgtactgcttcgcttgcaaggccttattgatatccttgagggtgact

SEQ ID NO: 2193 - DNA, 96 bp, Aspergillus thermomutatus
  misc_feature: 334
ttaccaggccgatagactagctggtagttgaaccgactgagcaaatctgaccagcgcgcttgccgctcgtttagtcgcctgcgaactgtgaagtac

SEQ ID NO: 2194 - DNA, 96 bp, Aspergillus thermomutatus
  misc_feature: 334
gccgcgatctgacgtgattgtgctaggtacgccatggtagccgatgaatcggtcgattagcagctgcgctacggtctcggcatcagttcgctcaca

SEQ ID NO: 2195 - DNA, 96 bp, Aspergillus thermomutatus
  misc_feature: 334
tacctgtcgtctgtgctccgagagtgacccatcagtgaaaaccaatatatcatcaacgtacgcagatgcaaattcatccagaaagtctcttagtgt

SEQ ID NO: 2196 - DNA, 96 bp, Aspergillus thermomutatus
  misc_feature: 334
gttgatgatatattggttttcactgatgggtcactctcggagcacagacgacaggtaaaacaggtacttgcgcgcctacaggaagcaggcctacag

SEQ ID NO: 2197 - DNA, 96 bp, Aspergillus thermomutatus
  misc_feature: 334
ggaaagacgcagcagaagtaccatgacacgtgaccatcggcagagcagcggtatgctcggcagagcaatgatctgatgagaacagatcagtgatct

SEQ ID NO: 2198 - DNA, 96 bp, Aspergillus thermomutatus
  misc_feature: 334
gcgcgacatgctgtacaacgggccccatgggggctctgctctcttgccgtccggaccttctagcagttcgatgcggtggtctacccctggccgatg

SEQ ID NO: 2199 - DNA, 96 bp, Aspergillus thermomutatus
  misc_feature: 334
gcgaagtggtttaccaaacttgatgtgatcgccgcattccacaagattcgcattgcacccggagatgaatggctgacggccttccgtacgcggttt

SEQ ID NO: 2200 - DNA, 96 bp, Aspergillus thermomutatus
  misc_feature: 334
gcatggaccctgagaaggtaaaggctatattggaatggcagaccccgacctcagcgcgcggcgtgcggtcattcctaggcttcgcaaacttctatc

SEQ ID NO: 2201 - DNA, 96 bp, Aspergillus thermomutatus
  misc_feature: 334
cgttcgatcggaagaaagccgacgaactgcccccgcatcgccctggggtcgatcaccgaattgagttgactaagggcgaagacgggaagccgttag

SEQ ID NO: 2202 - DNA, 96 bp, Aspergillus thermomutatus
  misc_feature: 334
cgaagtggtttaccaaacttgatgtgatcgccgcattccacaagattcgcattgcacccggagatgaatggctgacggccttccgtacgcggtttg

SEQ ID NO: 2203 - DNA, 96 bp, Aspergillus thermomutatus
  misc_feature: 334
cagccagcatcaaggatattgagaaagcactgcaggtaaagacacatacagaccctgccgataagctaccagcgcactaccacgagttcctagggg

SEQ ID NO: 2204 - DNA, 96 bp, Aspergillus thermomutatus
  misc_feature: 334
aaagtggttcaccaagctggatgtcatcgccgcctttcataagattcgtatcgcaccgggtgacgaatggttgactgcgtttcgcacccgatttgg

SEQ ID NO: 2205 - DNA, 96 bp, Aspergillus thermomutatus
  misc_feature: 333
gtccttacccttaaaagaaaggacaaggagacagggaaggacaaggcaacagaaaaggacaaggtgacaggaaagaacaaaatgacaggaggagca

SEQ ID NO: 2206 - DNA, 96 bp, Aspergillus thermomutatus
  misc_feature: 333
tgaatgggtgactaccattgaatgtatcaatacttctggatgggctctaccacctatgatcatctttactggcaaagtccatcaatcccaatggta

SEQ ID NO: 2207 - DNA, 96 bp, Aspergillus thermomutatus
  misc_feature: 333
tgaacagatcagtgatctgttacagacatatcagtgatatgttcgaagggctatataaggacactcattaccattgtatctagcactcttagtttt

SEQ ID NO: 2208 - DNA, 96 bp, Aspergillus thermomutatus
  misc_feature: 333
gcgttcgatcggaagaaagccgacgaactgcccccgcatcgccctggggtcgatcaccgaattgagttgactaagggcgaagacgggaagccgtta

SEQ ID NO: 2209 - DNA, 96 bp, Aspergillus thermomutatus
  misc_feature: 333
gtgaacagatcagtgatctgttacagacatatcagtgatatgttcgaagggctatataaggacactcattaccattgtatctagcactcttagttt

SEQ ID NO: 2210 - DNA, 96 bp, Aspergillus thermomutatus
  misc_feature: 333
gcaaagtggttcaccaagctggatgtcatcgccgcctttcataagattcgtatcgcaccgggtgacgaatggttgactgcgtttcgcacccgattt

SEQ ID NO: 2211 - DNA, 96 bp, Aspergillus thermomutatus
  misc_feature: 333
gaaagacgcagcagaagtaccatgacacgtgaccatcggcagagcagcggtatgctcggcagagcaatgatctgatgagaacagatcagtgatctg

SEQ ID NO: 2212 - DNA, 96 bp, Aspergillus thermomutatus
  misc_feature: 333
cgcgcgacatgctgtacaacgggccccatgggggctctgctctcttgccgtccggaccttctagcagttcgatgcggtggtctacccctggccgat

SEQ ID NO: 2213 - DNA, 96 bp, Aspergillus thermomutatus
  misc_feature: 333
accgccctagcaagaagctcgatgcccagcacgcgaagttcacagtactggaagctattggatcacatgcttaccgactagatactccaccagggg

SEQ ID NO: 2214 - DNA, 96 bp, Aspergillus thermomutatus
  misc_feature: 332
tccttacccttaaaagaaaggacaaggagacagggaaggacaaggcaacagaaaaggacaaggtgacaggaaagaacaaaatgacaggaggagcaa

SEQ ID NO: 2215 - DNA, 96 bp, Aspergillus thermomutatus
  misc_feature: 332
ttctcagggtccatgcatactcccttgcctgcttcgacgatgaagcccaagtacttggtgctcttgacctcgaattcgcacttgtcaatatctagc

SEQ ID NO: 2216 - DNA, 96 bp, Aspergillus thermomutatus
  misc_feature: 332
ttccacaagattcgcattgcacccggagatgaatggctgacggccttccgtacgcggtttggtctgtacgaatggttggtgaccccttttggcatg

SEQ ID NO: 2217 - DNA, 96 bp, Aspergillus thermomutatus
  misc_feature: 332
tgttctcttcgcgatagtgcgtcaggtctcgcagctaatttaccaggccgatagactagctggtagttgaaccgactgagcaaatctgaccagcgc

SEQ ID NO: 2218 - DNA, 96 bp, Aspergillus thermomutatus
  misc_feature: 332
tgtcgtctgtgctccgagagtgacccatcagtgaaaaccaatatatcatcaacgtacgcagatgcaaattcatccagaaagtctcttagtgtccag

SEQ ID NO: 2219 - DNA, 96 bp, Aspergillus thermomutatus
  misc_feature: 332
tggaccctgagaaggtaaaggctatattggaatggcagaccccgacctcagcgcgcggcgtgcggtcattcctaggcttcgcaaacttctatcggc

SEQ ID NO: 2220 - DNA, 96 bp, Aspergillus thermomutatus
  misc_feature: 332
tgctccgagagtgacccatcagtgaaaaccaatatatcatcaacgtacgcagatgcaaattcatccagaaagtctcttagtgtccagttgatgtac

SEQ ID NO: 2221 - DNA, 96 bp, Aspergillus thermomutatus
  misc_feature: 332
ggccgatagactagctggtagttgaaccgactgagcaaatctgaccagcgcgcttgccgctcgtttagtcgcctgcgaactgtgaagtactccaga

SEQ ID NO: 2222 - DNA, 96 bp, Aspergillus thermomutatus
  misc_feature: 332
tcgagctgaacaacgcgccaactcacataaattgactaaagctgaagaggaatcgcttatacagtggatattatctatggatcagcgtggagcagc

SEQ ID NO: 2223 - DNA, 96 bp, Aspergillus thermomutatus
  misc_feature: 332
tccacaagattcgcattgcacccggagatgaatggctgacggccttccgtacgcggtttggtctgtacgaatggttggtgaccccttttggcatgg

SEQ ID NO: 2224 - DNA, 96 bp, Aspergillus thermomutatus
  misc_feature: 332
tcattggaaacgcacattggaaacattggaaacgcacattggtagatacattggattggaagacgcacctaatgattgtgtagcgcacattggaac

SEQ ID NO: 2225 - DNA, 96 bp, Aspergillus thermomutatus
  misc_feature: 332
cggcagagcaatgatctgatgagaacagatcagtgatctgttgtgaacagatcagtgatctgttacagacatatcagtgatatgttcgaagggcta

SEQ ID NO: 2226 - DNA, 96 bp, Aspergillus thermomutatus
  misc_feature: 332
agttacccctttcggtatggcgaacgcacctagcaccttccaacggtacatcaactggacactaagagactttctggatgaatttgcatctgcgta

SEQ ID NO: 2227 - DNA, 96 bp, Aspergillus thermomutatus
  misc_feature: 332
gttgagtatgtatagcgaacccctgtgcgcttatctgtctgaccactaacttcggctcattctcaacccgttccactgcgaatccgtctgctaatc

SEQ ID NO: 2228 - DNA, 96 bp, Aspergillus thermomutatus
  misc_feature: 332
gttcactactgcgccgatacttgcgcagtttgaccctgatcgagacacggtcgtggagacggatgcttccaactgggctacgggtgcggtgatgtc

SEQ ID NO: 2229 - DNA, 96 bp, Aspergillus thermomutatus
  misc_feature: 332
gtgctcagtgagctcgagcattcagcgggccttgcccgctacactactccccctcccctcgcgggtcgggggtgttctggcccgctcgctgctccc

SEQ ID NO: 2230 - DNA, 96 bp, Aspergillus thermomutatus
  misc_feature: 332
cattatcttctcgcgcagttgtaggcggtcatcgtcatcgtcaggcatatcttgttctcttcgcgatagtgcgtcaggtctcgcagctaatttacc

SEQ ID NO: 2231 - DNA, 96 bp, Aspergillus thermomutatus
  misc_feature: 332
ggcagagcaatgatctgatgagaacagatcagtgatctgttgtgaacagatcagtgatctgttacagacatatcagtgatatgttcgaagggctat

SEQ ID NO: 2232 - DNA, 96 bp, Aspergillus thermomutatus
  misc_feature: 332
gcagccagcatcaaggatattgagaaagcactgcaggtaaagacacatacagaccctgccgataagctaccagcgcactaccacgagttcctaggg

SEQ ID NO: 2233 - DNA, 96 bp, Aspergillus thermomutatus
  misc_feature: 332
ctatactagaatggcagacccctacatccactcgaggcgtacgatcgtttctcggctttgcgaacttctatcggcgctttatacggaacttctctg

SEQ ID NO: 2234 - DNA, 96 bp, Aspergillus thermomutatus
  misc_feature: 332
caaagtggttcaccaagctggatgtcatcgccgcctttcataagattcgtatcgcaccgggtgacgaatggttgactgcgtttcgcacccgatttg

SEQ ID NO: 2235 - DNA, 96 bp, Aspergillus thermomutatus
  misc_feature: 332
agcaagaagctcgatgcccagcacgcgaagttcacagtactggaagctattggatcacatgcttaccgactagatactccaccaggggtgcataat

SEQ ID NO: 2236 - DNA, 96 bp, Aspergillus thermomutatus
  misc_feature: 331
tttaccaggccgatagactagctggtagttgaaccgactgagcaaatctgaccagcgcgcttgccgctcgtttagtcgcctgcgaactgtgaagta

SEQ ID NO: 2237 - DNA, 96 bp, Aspergillus thermomutatus
  misc_feature: 331
cggcgtgcggtcattcctaggcttcgcaaacttctatcggcgctttatacggaacttctcagagatagtacgcccgcttacagccctcacgcacaa

SEQ ID NO: 2238 - DNA, 96 bp, Aspergillus thermomutatus
  misc_feature: 331
gtgctagagcggttacaggccgctgggttgcagctagacatcgacaagtgcgagttcgaggtcaagagcacgaaatacctcgggtttatcattgaa

SEQ ID NO: 2239 - DNA, 96 bp, Aspergillus thermomutatus
  misc_feature: 331
gcggcgtgcggtcattcctaggcttcgcaaacttctatcggcgctttatacggaacttctcagagatagtacgcccgcttacagccctcacgcaca

SEQ ID NO: 2240 - DNA, 96 bp, Aspergillus thermomutatus
  misc_feature: 331
gttcgatcggaagaaagccgacgaactgcccccgcatcgccctggggtcgatcaccgaattgagttgactaagggcgaagacgggaagccgttaga

SEQ ID NO: 2241 - DNA, 96 bp, Aspergillus thermomutatus
  misc_feature: 331
tcgaaaacagtgtccatttaatcgccgctgaagtgttgtccgcggaacattgtaaatgcgtgaagcttcacgaacattgcaaatttgcttcttttt

SEQ ID NO: 2242 - DNA, 96 bp, Aspergillus thermomutatus
  misc_feature: 331
cgtagccacgtacggcaggtgctagagcggttacaggccgctgggttgcagctagacatcgacaagtgcgagttcgaggtcaagagcacgaaatac

SEQ ID NO: 2243 - DNA, 96 bp, Aspergillus thermomutatus
  misc_feature: 331
gcccttcgaacatatcactgatatgtctgtaacagatcactgatctgttcacaacagatcactgatctgttctcatcagatcattgctctgccgag

SEQ ID NO: 2244 - DNA, 96 bp, Aspergillus thermomutatus
  misc_feature: 331
cttcgcgatagtgcgtcaggtctcgcagctaatttaccaggccgatagactagctggtagttgaaccgactgagcaaatctgaccagcgcgcttgc

SEQ ID NO: 2245 - DNA, 96 bp, Aspergillus thermomutatus
  misc_feature: 331
acctgtcgtctgtgctccgagagtgacccatcagtgaaaaccaatatatcatcaacgtacgcagatgcaaattcatccagaaagtctcttagtgtc

SEQ ID NO: 2246 - DNA, 96 bp, Aspergillus thermomutatus
  misc_feature: 330
cctgtaggcgcgcaagtacctgttttacctgtcgtctgtgctccgagagtgacccatcagtgaaaaccaatatatcatcaacgtacgcagatgcaa

SEQ ID NO: 2247 - DNA, 96 bp, Aspergillus thermomutatus
  misc_feature: 330
ttcgatcggaagaaagccgacgaactgcccccgcatcgccctggggtcgatcaccgaattgagttgactaagggcgaagacgggaagccgttagaa

SEQ ID NO: 2248 - DNA, 96 bp, Aspergillus thermomutatus
  misc_feature: 330
tctgtgctccgagagtgacccatcagtgaaaaccaatatatcatcaacgtacgcagatgcaaattcatccagaaagtctcttagtgtccagttgat

SEQ ID NO: 2249 - DNA, 96 bp, Aspergillus thermomutatus
  misc_feature: 330
tcggcagagcaatgatctgatgagaacagatcagtgatctgttgtgaacagatcagtgatctgttacagacatatcagtgatatgttcgaagggct

SEQ ID NO: 2250 - DNA, 96 bp, Aspergillus thermomutatus
  misc_feature: 330
ccgtagccacgtacggcaggtgctagagcggttacaggccgctgggttgcagctagacatcgacaagtgcgagttcgaggtcaagagcacgaaata

SEQ ID NO: 2251 - DNA, 96 bp, Aspergillus thermomutatus
  misc_feature: 330
atcattatcttctcgcgcagttgtaggcggtcatcgtcatcgtcaggcatatcttgttctcttcgcgatagtgcgtcaggtctcgcagctaattta

SEQ ID NO: 2252 - DNA, 96 bp, Aspergillus thermomutatus
  misc_feature: 330
gtgcagatcttcgcagccagcatcaaggatattgagaaagcactgcaggtaaagacacatacagaccctgccgataagctaccagcgcactaccac

SEQ ID NO: 2253 - DNA, 96 bp, Aspergillus thermomutatus
  misc_feature: 330
ggaaccccattcacatggacggaggagcacaccaatcggttcgagcagctaaagaagatgtttactaccgcgccgattctcatgcagtttgactat

SEQ ID NO: 2254 - DNA, 96 bp, Aspergillus thermomutatus
  misc_feature: 330
agctatactagaatggcagacccctacatccactcgaggcgtacgatcgtttctcggctttgcgaacttctatcggcgctttatacggaacttctc

SEQ ID NO: 2255 - DNA, 96 bp, Aspergillus thermomutatus
  misc_feature: 330
aggccgatagactagctggtagttgaaccgactgagcaaatctgaccagcgcgcttgccgctcgtttagtcgcctgcgaactgtgaagtactccag

SEQ ID NO: 2256 - DNA, 96 bp, Aspergillus thermomutatus
  misc_feature: 330
caactcaattcggtgatcgaccccagggcgatgcgggggcagttcgtcggctttcttccgatcgaacgcccctaggaactcgtggtagtgcgctgg

SEQ ID NO: 2257 - DNA, 96 bp, Aspergillus thermomutatus
  misc_feature: 330
acggtgcttcgccagcgacccatcagtgaagataagtacatcgtcgatgtacgcggaggcgaattcatccaggaagtctcgaagggcccagttgat

SEQ ID NO: 2258 - DNA, 96 bp, Aspergillus thermomutatus
  misc_feature: 330
aagtggttcaccaagctggatgtcatcgccgcctttcataagattcgtatcgcaccgggtgacgaatggttgactgcgtttcgcacccgatttggt

SEQ ID NO: 2259 - DNA, 96 bp, Aspergillus thermomutatus
  misc_feature: 329
cttgtactgcgtaagacgcttacagagctgctagagaagaacttcatacgtgtcagcagctcgtcagctgcagccccggtgctgctcgtgcgcaaa

SEQ ID NO: 2260 - DNA, 96 bp, Aspergillus thermomutatus
  misc_feature: 329
ttctcttcgcgatagtgcgtcaggtctcgcagctaatttaccaggccgatagactagctggtagttgaaccgactgagcaaatctgaccagcgcgc

SEQ ID NO: 2261 - DNA, 96 bp, Aspergillus thermomutatus
  misc_feature: 329
tgagtatgtatagcgaacccctgtgcgcttatctgtctgaccactaacttcggctcattctcaacccgttccactgcgaatccgtctgctaatcgc

SEQ ID NO: 2262 - DNA, 96 bp, Aspergillus thermomutatus
  misc_feature: 329
tatatcaaaggcgaagtggtttaccaaacttgatgtgatcgccgcattccacaagattcgcattgcacccggagatgaatggctgacggccttccg

SEQ ID NO: 2263 - DNA, 96 bp, Aspergillus thermomutatus
  misc_feature: 329
ctagatactccaccaggggtgcataatgtgttccatgttagtctgttgcgtcctgcggcgaacgatcctttcccaagccagttgagcactgactac

SEQ ID NO: 2264 - DNA, 96 bp, Aspergillus thermomutatus
  misc_feature: 329
cgaacatatcactgatatgtctgtaacagatcactgatctgttcacaacagatcactgatctgttctcatcagatcattgctctgccgagcatacc

SEQ ID NO: 2265 - DNA, 96 bp, Aspergillus thermomutatus
  misc_feature: 329
gcgtacgttgatgatatattggttttcactgatgggtcactctcggagcacagacgacaggtaaaacaggtacttgcgcgcctacaggaagcaggc

SEQ ID NO: 2266 - DNA, 96 bp, Aspergillus thermomutatus
  misc_feature: 329
aaagaattcgcctgcggaatgcaactacgagatccacgataaggagctgctcgcgatcatcaacgcccttagggaatgggagtcggagttagtcag

SEQ ID NO: 2267 - DNA, 96 bp, Aspergillus thermomutatus
  misc_feature: 329
ctcgaaaacagtgtccatttaatcgccgctgaagtgttgtccgcggaacattgtaaatgcgtgaagcttcacgaacattgcaaatttgcttctttt

SEQ ID NO: 2268 - DNA, 96 bp, Aspergillus thermomutatus
  misc_feature: 329
atatcaaaggcgaagtggtttaccaaacttgatgtgatcgccgcattccacaagattcgcattgcacccggagatgaatggctgacggccttccgt

SEQ ID NO: 2269 - DNA, 96 bp, Aspergillus thermomutatus
  misc_feature: 328
ggcgtgcggtcattcctaggcttcgcaaacttctatcggcgctttatacggaacttctcagagatagtacgcccgcttacagccctcacgcacaaa

SEQ ID NO: 2270 - DNA, 96 bp, Aspergillus thermomutatus
  misc_feature: 328
gcttgtactgcgtaagacgcttacagagctgctagagaagaacttcatacgtgtcagcagctcgtcagctgcagccccggtgctgctcgtgcgcaa

SEQ ID NO: 2271 - DNA, 96 bp, Aspergillus thermomutatus
  misc_feature: 328
agcagaagtaccatgacacgtgaccatcggcagagcagcggtatgctcggcagagcaatgatctgatgagaacagatcagtgatctgttgtgaaca

SEQ ID NO: 2272 - DNA, 96 bp, Aspergillus thermomutatus
  misc_feature: 328
tcctgtaggcgcgcaagtacctgttttacctgtcgtctgtgctccgagagtgacccatcagtgaaaaccaatatatcatcaacgtacgcagatgca

SEQ ID NO: 2273 - DNA, 96 bp, Aspergillus thermomutatus
  misc_feature: 328
aaacagtgtccatttaatcgccgctgaagtgttgtccgcggaacattgtaaatgcgtgaagcttcacgaacattgcaaatttgcttctttttcaga

SEQ ID NO: 2274 - DNA, 96 bp, Aspergillus thermomutatus
  misc_feature: 328
taccaggccgatagactagctggtagttgaaccgactgagcaaatctgaccagcgcgcttgccgctcgtttagtcgcctgcgaactgtgaagtact

SEQ ID NO: 2275 - DNA, 96 bp, Aspergillus thermomutatus
  misc_feature: 328
gtgctccgagagtgacccatcagtgaaaaccaatatatcatcaacgtacgcagatgcaaattcatccagaaagtctcttagtgtccagttgatgta

SEQ ID NO: 2276 - DNA, 96 bp, Aspergillus thermomutatus
  misc_feature: 328
gtagccacgtacggcaggtgctagagcggttacaggccgctgggttgcagctagacatcgacaagtgcgagttcgaggtcaagagcacgaaatacc

SEQ ID NO: 2277 - DNA, 96 bp, Aspergillus thermomutatus
  misc_feature: 328
gggaaagacgcagcagaagtaccatgacacgtgaccatcggcagagcagcggtatgctcggcagagcaatgatctgatgagaacagatcagtgatc

SEQ ID NO: 2278 - DNA, 96 bp, Aspergillus thermomutatus
  misc_feature: 328
cttcgcgcgacatgctgtacaacgggccccatgggggctctgctctcttgccgtccggaccttctagcagttcgatgcggtggtctacccctggcc

SEQ ID NO: 2279 - DNA, 96 bp, Aspergillus thermomutatus
  misc_feature: 328
ggaccgccctagcaagaagctcgatgcccagcacgcgaagttcacagtactggaagctattggatcacatgcttaccgactagatactccaccagg

SEQ ID NO: 2280 - DNA, 96 bp, Aspergillus thermomutatus
  misc_feature: 328
acagtgtccatttaatcgccgctgaagtgttgtccgcggaacattgtaaatgcgtgaagcttcacgaacattgcaaatttgcttctttttcagagc

SEQ ID NO: 2281 - DNA, 96 bp, Aspergillus thermomutatus
  misc_feature: 328
atcctttcccaagccagttgagcactgactaccagccgcccgctgtgctagtcgacggcgaggccgaatatgaggttgaatggatactggatgagc

SEQ ID NO: 2282 - DNA, 96 bp, Aspergillus thermomutatus
  misc_feature: 328
gcaagaagctcgatgcccagcacgcgaagttcacagtactggaagctattggatcacatgcttaccgactagatactccaccaggggtgcataatg

SEQ ID NO: 2283 - DNA, 96 bp, Aspergillus thermomutatus
  misc_feature: 328
gaccgccctagcaagaagctcgatgcccagcacgcgaagttcacagtactggaagctattggatcacatgcttaccgactagatactccaccaggg

SEQ ID NO: 2284 - DNA, 96 bp, Aspergillus thermomutatus
  misc_feature: 328
agtggttcaccaagctggatgtcatcgccgcctttcataagattcgtatcgcaccgggtgacgaatggttgactgcgtttcgcacccgatttggtc

SEQ ID NO: 2285 - DNA, 96 bp, Aspergillus thermomutatus
  misc_feature: 328
ccttacccttaaaagaaaggacaaggagacagggaaggacaaggcaacagaaaaggacaaggtgacaggaaagaacaaaatgacaggaggagcaag

SEQ ID NO: 2286 - DNA, 96 bp, Aspergillus thermomutatus
  misc_feature: 328
aacagtgtccatttaatcgccgctgaagtgttgtccgcggaacattgtaaatgcgtgaagcttcacgaacattgcaaatttgcttctttttcagag

SEQ ID NO: 2287 - DNA, 96 bp, Aspergillus thermomutatus
  misc_feature: 328
aacagatcagtgatctgttacagacatatcagtgatatgttcgaagggctatataaggacactcattaccattgtatctagcactcttagttttag

SEQ ID NO: 2288 - DNA, 96 bp, Aspergillus thermomutatus
  misc_feature: 328
aggcgaagtggtttaccaaacttgatgtgatcgccgcattccacaagattcgcattgcacccggagatgaatggctgacggccttccgtacgcggt

SEQ ID NO: 2289 - DNA, 96 bp, Aspergillus thermomutatus
  misc_feature: 327
ttgagtatgtatagcgaacccctgtgcgcttatctgtctgaccactaacttcggctcattctcaacccgttccactgcgaatccgtctgctaatcg

SEQ ID NO: 2290 - DNA, 96 bp, Aspergillus thermomutatus
  misc_feature: 327
ttcttcagctgctcgaaccgctgcgtgtgctcatacgtccatttaaatggtgtacctttgtgcgtgagggctgtaagcgggcgtactatctctgag

SEQ ID NO: 2291 - DNA, 96 bp, Aspergillus thermomutatus
  misc_feature: 327
ttagaatcattggaaacgcacattggaaacattggaaacgcacattggtagatacattggattggaagacgcacctaatgattgtgtagcgcacat

SEQ ID NO: 2292 - DNA, 96 bp, Aspergillus thermomutatus
  misc_feature: 327
ttactgagcacattagaatcattggaaacgcacattggaaacattggaaacgcacattggtagatacattggattggaagacgcacctaatgattg

SEQ ID NO: 2293 - DNA, 96 bp, Aspergillus thermomutatus
  misc_feature: 327
gcagatcttcgcagccagcatcaaggatattgagaaagcactgcaggtaaagacacatacagaccctgccgataagctaccagcgcactaccacga

SEQ ID NO: 2294 - DNA, 96 bp, Aspergillus thermomutatus
  misc_feature: 327
gtccatttaatcgccgctgaagtgttgtccgcggaacattgtaaatgcgtgaagcttcacgaacattgcaaatttgcttctttttcagagcagata

SEQ ID NO: 2295 - DNA, 96 bp, Aspergillus thermomutatus
  misc_feature: 327
tagccacgtacggcaggtgctagagcggttacaggccgctgggttgcagctagacatcgacaagtgcgagttcgaggtcaagagcacgaaatacct

SEQ ID NO: 2296 - DNA, 96 bp, Aspergillus thermomutatus
  misc_feature: 327
tacgtggctacggtgcttcgccagcgacccatcagtgaagataagtacatcgtcgatgtacgcggaggcgaattcatccaggaagtctcgaagggc

SEQ ID NO: 2297 - DNA, 96 bp, Aspergillus thermomutatus
  misc_feature: 327
ggcaaagtggttcaccaagctggatgtcatcgccgcctttcataagattcgtatcgcaccgggtgacgaatggttgactgcgtttcgcacccgatt

SEQ ID NO: 2298 - DNA, 96 bp, Aspergillus thermomutatus
  misc_feature: 327
gctatactagaatggcagacccctacatccactcgaggcgtacgatcgtttctcggctttgcgaacttctatcggcgctttatacggaacttctct

SEQ ID NO: 2299 - DNA, 96 bp, Aspergillus thermomutatus
  misc_feature: 327
gcgtgcggtcattcctaggcttcgcaaacttctatcggcgctttatacggaacttctcagagatagtacgcccgcttacagccctcacgcacaaag

SEQ ID NO: 2300 - DNA, 96 bp, Aspergillus thermomutatus
  misc_feature: 327
accaggccgatagactagctggtagttgaaccgactgagcaaatctgaccagcgcgcttgccgctcgtttagtcgcctgcgaactgtgaagtactc

SEQ ID NO: 2301 - DNA, 96 bp, Aspergillus thermomutatus
  misc_feature: 327
gagctgaacaacgcgccaactcacataaattgactaaagctgaagaggaatcgcttatacagtggatattatctatggatcagcgtggagcagctc

SEQ ID NO: 2302 - DNA, 96 bp, Aspergillus thermomutatus
  misc_feature: 327
gaacatatcactgatatgtctgtaacagatcactgatctgttcacaacagatcactgatctgttctcatcagatcattgctctgccgagcataccg

SEQ ID NO: 2303 - DNA, 96 bp, Aspergillus thermomutatus
  misc_feature: 326
gcaccgtagccacgtacggcaggtgctagagcggttacaggccgctgggttgcagctagacatcgacaagtgcgagttcgaggtcaagagcacgaa

SEQ ID NO: 2304 - DNA, 96 bp, Aspergillus thermomutatus
  misc_feature: 326
gccgtacgtggctacggtgcttcgccagcgacccatcagtgaagataagtacatcgtcgatgtacgcggaggcgaattcatccaggaagtctcgaa

SEQ ID NO: 2305 - DNA, 96 bp, Aspergillus thermomutatus
  misc_feature: 326
atcattggaaacgcacattggaaacattggaaacgcacattggtagatacattggattggaagacgcacctaatgattgtgtagcgcacattggaa

SEQ ID NO: 2306 - DNA, 96 bp, Aspergillus thermomutatus
  misc_feature: 326
gagtgacccatcagtgaaaaccaatatatcatcaacgtacgcagatgcaaattcatccagaaagtctcttagtgtccagttgatgtaccgttggaa

SEQ ID NO: 2307 - DNA, 96 bp, Aspergillus thermomutatus
  misc_feature: 326
actagatactccaccaggggtgcataatgtgttccatgttagtctgttgcgtcctgcggcgaacgatcctttcccaagccagttgagcactgacta

SEQ ID NO: 2308 - DNA, 96 bp, Aspergillus thermomutatus
  misc_feature: 326
gtacgtggctacggtgcttcgccagcgacccatcagtgaagataagtacatcgtcgatgtacgcggaggcgaattcatccaggaagtctcgaaggg

SEQ ID NO: 2309 - DNA, 96 bp, Aspergillus thermomutatus
  misc_feature: 326
gcatgtcgcgcgaagaactgcttgtactgcgtaagacgcttacagagctgctagagaagaacttcatacgtgtcagcagctcgtcagctgcagccc

SEQ ID NO: 2310 - DNA, 96 bp, Aspergillus thermomutatus
  misc_feature: 326
ggctacggtgcttcgccagcgacccatcagtgaagataagtacatcgtcgatgtacgcggaggcgaattcatccaggaagtctcgaagggcccagt

SEQ ID NO: 2311 - DNA, 96 bp, Aspergillus thermomutatus
  misc_feature: 326
gctacggtgcttcgccagcgacccatcagtgaagataagtacatcgtcgatgtacgcggaggcgaattcatccaggaagtctcgaagggcccagtt

SEQ ID NO: 2312 - DNA, 96 bp, Aspergillus thermomutatus
  misc_feature: 326
attccacaagattcgcattgcacccggagatgaatggctgacggccttccgtacgcggtttggtctgtacgaatggttggtgaccccttttggcat

SEQ ID NO: 2313 - DNA, 96 bp, Aspergillus thermomutatus
  misc_feature: 326
aaagacgcagcagaagtaccatgacacgtgaccatcggcagagcagcggtatgctcggcagagcaatgatctgatgagaacagatcagtgatctgt

SEQ ID NO: 2314 - DNA, 96 bp, Aspergillus thermomutatus
  misc_feature: 325
ttcgcattgcacccggagatgaatggctgacggccttccgtacgcggtttggtctgtacgaatggttggtgaccccttttggcatggcgaacgcac

SEQ ID NO: 2315 - DNA, 96 bp, Aspergillus thermomutatus
  misc_feature: 325
ttacccctttcggtatggcgaacgcacctagcaccttccaacggtacatcaactggacactaagagactttctggatgaatttgcatctgcgtacg

SEQ ID NO: 2316 - DNA, 96 bp, Aspergillus thermomutatus
  misc_feature: 325
caggccgatagactagctggtagttgaaccgactgagcaaatctgaccagcgcgcttgccgctcgtttagtcgcctgcgaactgtgaagtactcca

SEQ ID NO: 2317 - DNA, 96 bp, Aspergillus thermomutatus
  misc_feature: 325
tgcagatcttcgcagccagcatcaaggatattgagaaagcactgcaggtaaagacacatacagaccctgccgataagctaccagcgcactaccacg

SEQ ID NO: 2318 - DNA, 96 bp, Aspergillus thermomutatus
  misc_feature: 325
cgagttcttattgtacatacctagtcataggttttcctacggtctagcccgtaacattagaactcgctcctcatcttactgagcacattagaatca

SEQ ID NO: 2319 - DNA, 96 bp, Aspergillus thermomutatus
  misc_feature: 325
tctcttcgcgatagtgcgtcaggtctcgcagctaatttaccaggccgatagactagctggtagttgaaccgactgagcaaatctgaccagcgcgct

SEQ ID NO: 2320 - DNA, 96 bp, Aspergillus thermomutatus
  misc_feature: 325
tacggtgcttcgccagcgacccatcagtgaagataagtacatcgtcgatgtacgcggaggcgaattcatccaggaagtctcgaagggcccagttga

SEQ ID NO: 2321 - DNA, 96 bp, Aspergillus thermomutatus
  misc_feature: 325
tagagaagaacttcatacgtgtcagcagctcgtcagctgcagccccggtgctgctcgtgcgcaaacctggtggaggtctacgtttctgtgttgatt

SEQ ID NO: 2322 - DNA, 96 bp, Aspergillus thermomutatus
  misc_feature: 325
gcggtcattcctaggcttcgcaaacttctatcggcgctttatacggaacttctcagagatagtacgcccgcttacagccctcacgcacaaaggtac

SEQ ID NO: 2323 - DNA, 96 bp, Aspergillus thermomutatus
  misc_feature: 325
acgtggctacggtgcttcgccagcgacccatcagtgaagataagtacatcgtcgatgtacgcggaggcgaattcatccaggaagtctcgaagggcc

SEQ ID NO: 2324 - DNA, 96 bp, Aspergillus thermomutatus
  misc_feature: 325
gcgagttcttattgtacatacctagtcataggttttcctacggtctagcccgtaacattagaactcgctcctcatcttactgagcacattagaatc

SEQ ID NO: 2325 - DNA, 96 bp, Aspergillus thermomutatus
  misc_feature: 325
ccgtacgtggctacggtgcttcgccagcgacccatcagtgaagataagtacatcgtcgatgtacgcggaggcgaattcatccaggaagtctcgaag

SEQ ID NO: 2326 - DNA, 96 bp, Aspergillus thermomutatus
  misc_feature: 325
aactagtccttacccttaaaagaaaggacaaggagacagggaaggacaaggcaacagaaaaggacaaggtgacaggaaagaacaaaatgacaggag

SEQ ID NO: 2327 - DNA, 96 bp, Aspergillus thermomutatus
  misc_feature: 325
ctagagaagaacttcatacgtgtcagcagctcgtcagctgcagccccggtgctgctcgtgcgcaaacctggtggaggtctacgtttctgtgttgat

SEQ ID NO: 2328 - DNA, 96 bp, Aspergillus thermomutatus
  misc_feature: 325
actagtccttacccttaaaagaaaggacaaggagacagggaaggacaaggcaacagaaaaggacaaggtgacaggaaagaacaaaatgacaggagg

SEQ ID NO: 2329 - DNA, 96 bp, Aspergillus thermomutatus
  misc_feature: 325
aagatgttcactactgcgccgatacttgcgcagtttgaccctgatcgagacacggtcgtggagacggatgcttccaactgggctacgggtgcggtg

SEQ ID NO: 2330 - DNA, 96 bp, Aspergillus thermomutatus
  misc_feature: 325
agacgcagcagaagtaccatgacacgtgaccatcggcagagcagcggtatgctcggcagagcaatgatctgatgagaacagatcagtgatctgttg

SEQ ID NO: 2331 - DNA, 96 bp, Aspergillus thermomutatus
  misc_feature: 325
accgtagccacgtacggcaggtgctagagcggttacaggccgctgggttgcagctagacatcgacaagtgcgagttcgaggtcaagagcacgaaat

SEQ ID NO: 2332 - DNA, 96 bp, Aspergillus thermomutatus
  misc_feature: 325
aagacgcagcagaagtaccatgacacgtgaccatcggcagagcagcggtatgctcggcagagcaatgatctgatgagaacagatcagtgatctgtt

SEQ ID NO: 2333 - DNA, 96 bp, Aspergillus thermomutatus
  misc_feature: 324
attcgcattgcacccggagatgaatggctgacggccttccgtacgcggtttggtctgtacgaatggttggtgaccccttttggcatggcgaacgca

SEQ ID NO: 2334 - DNA, 96 bp, Aspergillus thermomutatus
  misc_feature: 324
gtctgtgctccgagagtgacccatcagtgaaaaccaatatatcatcaacgtacgcagatgcaaattcatccagaaagtctcttagtgtccagttga

SEQ ID NO: 2335 - DNA, 96 bp, Aspergillus thermomutatus
  misc_feature: 324
tcaactcaattcggtgatcgaccccagggcgatgcgggggcagttcgtcggctttcttccgatcgaacgcccctaggaactcgtggtagtgcgctg

SEQ ID NO: 2336 - DNA, 96 bp, Aspergillus thermomutatus
  misc_feature: 324
ctatacatactcaacaacgccggagaggtaaagcagtgcagatcttcgcagccagcatcaaggatattgagaaagcactgcaggtaaagacacata

SEQ ID NO: 2337 - DNA, 96 bp, Aspergillus thermomutatus
  misc_feature: 324
gttgagaatgagccgaagttagtggtcagacagataagcgcacaggggttcgctatacatactcaacaacgccggagaggtaaagcagtgcagatc

SEQ ID NO: 2338 - DNA, 96 bp, Aspergillus thermomutatus
  misc_feature: 324
gttccgtataaagcgccgatagaagttcgcaaagccgagaaacgatcgtacgcctcgagtggatgtaggggtctgccattctagtatagcttttac

SEQ ID NO: 2339 - DNA, 96 bp, Aspergillus thermomutatus
  misc_feature: 324
acgttgatgatatattggttttcactgatgggtcactctcggagcacagacgacaggtaaaacaggtacttgcgcgcctacaggaagcaggcctac

SEQ ID NO: 2340 - DNA, 96 bp, Aspergillus thermomutatus
  misc_feature: 324
ggggtctgccattccaatatagcctttaccttctcagggtccatgcatactcccttgcctgcttcgacgatgaagcccaagtacttggtgctcttg

SEQ ID NO: 2341 - DNA, 96 bp, Aspergillus thermomutatus
  misc_feature: 324
cgtggctacggtgcttcgccagcgacccatcagtgaagataagtacatcgtcgatgtacgcggaggcgaattcatccaggaagtctcgaagggccc

SEQ ID NO: 2342 - DNA, 96 bp, Aspergillus thermomutatus
  misc_feature: 324
gctggacgcttgggagcagcgagcgggccagaacacccccgacccgcgaggggagggggagtagtgtagcgggcaaggcccgctgaatgctcgagc

SEQ ID NO: 2343 - DNA, 96 bp, Aspergillus thermomutatus
  misc_feature: 324
gccgatagactagctggtagttgaaccgactgagcaaatctgaccagcgcgcttgccgctcgtttagtcgcctgcgaactgtgaagtactccagat

SEQ ID NO: 2344 - DNA, 96 bp, Aspergillus thermomutatus
  misc_feature: 324
gccctagcaagaagctcgatgcccagcacgcgaagttcacagtactggaagctattggatcacatgcttaccgactagatactccaccaggggtgc

SEQ ID NO: 2345 - DNA, 96 bp, Aspergillus thermomutatus
  misc_feature: 324
gaagatgttcactactgcgccgatacttgcgcagtttgaccctgatcgagacacggtcgtggagacggatgcttccaactgggctacgggtgcggt

SEQ ID NO: 2346 - DNA, 96 bp, Aspergillus thermomutatus
  misc_feature: 324
cgcgaatgggtcacatctattgagtgtatcaactctcaaggatgggctttaccaccatgtattatcttcaagggaacagtccatattgagggctgg

SEQ ID NO: 2347 - DNA, 96 bp, Aspergillus thermomutatus
  misc_feature: 324
cctacaactgcgcgagaagataatgattcacccgagcaagctactcacaaaggatcccccaccctcagtggtgagccgactgatgctcgctagggt

SEQ ID NO: 2348 - DNA, 96 bp, Aspergillus thermomutatus
  misc_feature: 324
ccgctatgagagcctaagggaaagacgcagcagaagtaccatgacacgtgaccatcggcagagcagcggtatgctcggcagagcaatgatctgatg

SEQ ID NO: 2349 - DNA, 96 bp, Aspergillus thermomutatus
  misc_feature: 324
ccgccctagcaagaagctcgatgcccagcacgcgaagttcacagtactggaagctattggatcacatgcttaccgactagatactccaccaggggt

SEQ ID NO: 2350 - DNA, 96 bp, Aspergillus thermomutatus
  misc_feature: 323
caccgtagccacgtacggcaggtgctagagcggttacaggccgctgggttgcagctagacatcgacaagtgcgagttcgaggtcaagagcacgaaa

SEQ ID NO: 2351 - DNA, 96 bp, Aspergillus thermomutatus
  misc_feature: 323
ttatcttctcgcgcagttgtaggcggtcatcgtcatcgtcaggcatatcttgttctcttcgcgatagtgcgtcaggtctcgcagctaatttaccag

SEQ ID NO: 2352 - DNA, 96 bp, Aspergillus thermomutatus
  misc_feature: 323
tgtgctccgagagtgacccatcagtgaaaaccaatatatcatcaacgtacgcagatgcaaattcatccagaaagtctcttagtgtccagttgatgt

SEQ ID NO: 2353 - DNA, 96 bp, Aspergillus thermomutatus
  misc_feature: 323
tcttcgcagccagcatcaaggatattgagaaagcactgcaggtaaagacacatacagaccctgccgataagctaccagcgcactaccacgagttcc

SEQ ID NO: 2354 - DNA, 96 bp, Aspergillus thermomutatus
  misc_feature: 323
agcaccgtagccacgtacggcaggtgctagagcggttacaggccgctgggttgcagctagacatcgacaagtgcgagttcgaggtcaagagcacga

SEQ ID NO: 2355 - DNA, 96 bp, Aspergillus thermomutatus
  misc_feature: 323
atatattggttttcactgatgggtcactctcggagcacagacgacaggtaaaacaggtacttgcgcgcctacaggaagcaggcctacagctagata

SEQ ID NO: 2356 - DNA, 96 bp, Aspergillus thermomutatus
  misc_feature: 323
taggcttcgcaaacttctatcggcgctttatacggaacttctcagagatagtacgcccgcttacagccctcacgcacaaaggtacaccatttaaat

SEQ ID NO: 2357 - DNA, 96 bp, Aspergillus thermomutatus
  misc_feature: 323
taccttctcagggtccatgcatactcccttgcctgcttcgacgatgaagcccaagtacttggtgctcttgacctcgaattcgcacttgtcaatatc

SEQ ID NO: 2358 - DNA, 96 bp, Aspergillus thermomutatus
  misc_feature: 323
gttgagccgacgaaccatcttgaagtattccaggttgcggtggtccgtgatgagcttaaatcgcggcaggctgactaactccgactcccattccct

SEQ ID NO: 2359 - DNA, 96 bp, Aspergillus thermomutatus
  misc_feature: 323
gttacccctttcggtatggcgaacgcacctagcaccttccaacggtacatcaactggacactaagagactttctggatgaatttgcatctgcgtac

SEQ ID NO: 2360 - DNA, 96 bp, Aspergillus thermomutatus
  misc_feature: 323
cattagaatcattggaaacgcacattggaaacattggaaacgcacattggtagatacattggattggaagacgcacctaatgattgtgtagcgcac

SEQ ID NO: 2361 - DNA, 96 bp, Aspergillus thermomutatus
  misc_feature: 323
gctcgaaaacagtgtccatttaatcgccgctgaagtgttgtccgcggaacattgtaaatgcgtgaagcttcacgaacattgcaaatttgcttcttt

SEQ ID NO: 2362 - DNA, 96 bp, Aspergillus thermomutatus
  misc_feature: 323
aacatcttcttcagctgctcgaaccgctgcgtgtgctcatacgtccatttaaatggtgtacctttgtgcgtgagggctgtaagcgggcgtactatc

SEQ ID NO: 2363 - DNA, 96 bp, Aspergillus thermomutatus
  misc_feature: 323
gaggtaaagcagtgcagatcttcgcagccagcatcaaggatattgagaaagcactgcaggtaaagacacatacagaccctgccgataagctaccag

SEQ ID NO: 2364 - DNA, 96 bp, Aspergillus thermomutatus
  misc_feature: 323
agtgtccatttaatcgccgctgaagtgttgtccgcggaacattgtaaatgcgtgaagcttcacgaacattgcaaatttgcttctttttcagagcag

SEQ ID NO: 2365 - DNA, 96 bp, Aspergillus thermomutatus
  misc_feature: 323
cagatcttcgcagccagcatcaaggatattgagaaagcactgcaggtaaagacacatacagaccctgccgataagctaccagcgcactaccacgag

SEQ ID NO: 2366 - DNA, 96 bp, Aspergillus thermomutatus
  misc_feature: 323
cgctggacgcttgggagcagcgagcgggccagaacacccccgacccgcgaggggagggggagtagtgtagcgggcaaggcccgctgaatgctcgag

SEQ ID NO: 2367 - DNA, 96 bp, Aspergillus thermomutatus
  misc_feature: 323
aaggtaagagggtgcagatattcgcagtcaccctcaaggatatcaataaggccttgcaagcgaagcagtacaccgaccccaagaccaagctgcccg

SEQ ID NO: 2368 - DNA, 96 bp, Aspergillus thermomutatus
  misc_feature: 323
cgagctgaacaacgcgccaactcacataaattgactaaagctgaagaggaatcgcttatacagtggatattatctatggatcagcgtggagcagct

SEQ ID NO: 2369 - DNA, 96 bp, Aspergillus thermomutatus
  misc_feature: 323
agggaaagacgcagcagaagtaccatgacacgtgaccatcggcagagcagcggtatgctcggcagagcaatgatctgatgagaacagatcagtgat

SEQ ID NO: 2370 - DNA, 96 bp, Aspergillus thermomutatus
  misc_feature: 322
cagtgtccatttaatcgccgctgaagtgttgtccgcggaacattgtaaatgcgtgaagcttcacgaacattgcaaatttgcttctttttcagagca

SEQ ID NO: 2371 - DNA, 96 bp, Aspergillus thermomutatus
  misc_feature: 322
ctagtccttacccttaaaagaaaggacaaggagacagggaaggacaaggcaacagaaaaggacaaggtgacaggaaagaacaaaatgacaggagga

SEQ ID NO: 2372 - DNA, 96 bp, Aspergillus thermomutatus
  misc_feature: 322
ccgcaaggagtatctcgtcaaatggacaggttacgatcgtcctacgtgggaaccagctgtcaacctcgtcaatacggccgcgctggacgcttggga

SEQ ID NO: 2373 - DNA, 96 bp, Aspergillus thermomutatus
  misc_feature: 322
tatcttctcgcgcagttgtaggcggtcatcgtcatcgtcaggcatatcttgttctcttcgcgatagtgcgtcaggtctcgcagctaatttaccagg

SEQ ID NO: 2374 - DNA, 96 bp, Aspergillus thermomutatus
  misc_feature: 322
tatattggttttcactgatgggtcactctcggagcacagacgacaggtaaaacaggtacttgcgcgcctacaggaagcaggcctacagctagatat

SEQ ID NO: 2375 - DNA, 96 bp, Aspergillus thermomutatus
  misc_feature: 322
gttctcttcgcgatagtgcgtcaggtctcgcagctaatttaccaggccgatagactagctggtagttgaaccgactgagcaaatctgaccagcgcg

SEQ ID NO: 2376 - DNA, 96 bp, Aspergillus thermomutatus
  misc_feature: 322
gtcggaaaggtaagagggtgcagatattcgcagtcaccctcaaggatatcaataaggccttgcaagcgaagcagtacaccgaccccaagaccaagc

SEQ ID NO: 2377 - DNA, 96 bp, Aspergillus thermomutatus
  misc_feature: 322
ggttgagaatgagccgaagttagtggtcagacagataagcgcacaggggttcgctatacatactcaacaacgccggagaggtaaagcagtgcagat

SEQ ID NO: 2378 - DNA, 96 bp, Aspergillus thermomutatus
  misc_feature: 322
gacaaggactgaccgctatgagagcctaagggaaagacgcagcagaagtaccatgacacgtgaccatcggcagagcagcggtatgctcggcagagc

SEQ ID NO: 2379 - DNA, 96 bp, Aspergillus thermomutatus
  misc_feature: 322
gctatgagagcctaagggaaagacgcagcagaagtaccatgacacgtgaccatcggcagagcagcggtatgctcggcagagcaatgatctgatgag

SEQ ID NO: 2380 - DNA, 96 bp, Aspergillus thermomutatus
  misc_feature: 322
atttaatcgccgctgaagtgttgtccgcggaacattgtaaatgcgtgaagcttcacgaacattgcaaatttgcttctttttcagagcagatatcgc

SEQ ID NO: 2381 - DNA, 96 bp, Aspergillus thermomutatus
  misc_feature: 322
cttagggaatgggagtcggagttagtcagcctgccgcgatttaagctcatcacggaccaccgcaacctggaatacttcaagatggttcgtcggctc

SEQ ID NO: 2382 - DNA, 96 bp, Aspergillus thermomutatus
  misc_feature: 322
gacgcagcagaagtaccatgacacgtgaccatcggcagagcagcggtatgctcggcagagcaatgatctgatgagaacagatcagtgatctgttgt

SEQ ID NO: 2383 - DNA, 96 bp, Aspergillus thermomutatus
  misc_feature: 322
cgtcggaaaggtaagagggtgcagatattcgcagtcaccctcaaggatatcaataaggccttgcaagcgaagcagtacaccgaccccaagaccaag

SEQ ID NO: 2384 - DNA, 96 bp, Aspergillus thermomutatus
  misc_feature: 322
ctggacgcttgggagcagcgagcgggccagaacacccccgacccgcgaggggagggggagtagtgtagcgggcaaggcccgctgaatgctcgagct

SEQ ID NO: 2385 - DNA, 96 bp, Aspergillus thermomutatus
  misc_feature: 322
aagcaccgtagccacgtacggcaggtgctagagcggttacaggccgctgggttgcagctagacatcgacaagtgcgagttcgaggtcaagagcacg

SEQ ID NO: 2386 - DNA, 96 bp, Aspergillus thermomutatus
  misc_feature: 322
ccgatagactagctggtagttgaaccgactgagcaaatctgaccagcgcgcttgccgctcgtttagtcgcctgcgaactgtgaagtactccagatt

SEQ ID NO: 2387 - DNA, 96 bp, Aspergillus thermomutatus
  misc_feature: 321
tttgcgaacttctatcggcgctttatacggaacttctctgacatagtacgaccgttgacggcgcttacacagaaaggaaccccattcacatggacg

SEQ ID NO: 2388 - DNA, 96 bp, Aspergillus thermomutatus
  misc_feature: 321
ttgttgagtatgtatagcgaacccctgtgcgcttatctgtctgaccactaacttcggctcattctcaacccgttccactgcgaatccgtctgctaa

SEQ ID NO: 2389 - DNA, 96 bp, Aspergillus thermomutatus
  misc_feature: 321
ttcaccaagctggatgtcatcgccgcctttcataagattcgtatcgcaccgggtgacgaatggttgactgcgtttcgcacccgatttggtctgtac

SEQ ID NO: 2390 - DNA, 96 bp, Aspergillus thermomutatus
  misc_feature: 321
attagaatcattggaaacgcacattggaaacattggaaacgcacattggtagatacattggattggaagacgcacctaatgattgtgtagcgcaca

SEQ ID NO: 2391 - DNA, 96 bp, Aspergillus thermomutatus
  misc_feature: 321
tgtcatcgccgcctttcataagattcgtatcgcaccgggtgacgaatggttgactgcgtttcgcacccgatttggtctgtacgagtggctagttac

SEQ ID NO: 2392 - DNA, 96 bp, Aspergillus thermomutatus
  misc_feature: 321
tggctacggtgcttcgccagcgacccatcagtgaagataagtacatcgtcgatgtacgcggaggcgaattcatccaggaagtctcgaagggcccag

SEQ ID NO: 2393 - DNA, 96 bp, Aspergillus thermomutatus
  misc_feature: 321
ctgtcgtctgtgctccgagagtgacccatcagtgaaaaccaatatatcatcaacgtacgcagatgcaaattcatccagaaagtctcttagtgtcca

SEQ ID NO: 2394 - DNA, 96 bp, Aspergillus thermomutatus
  misc_feature: 321
tgcggtcattcctaggcttcgcaaacttctatcggcgctttatacggaacttctcagagatagtacgcccgcttacagccctcacgcacaaaggta

SEQ ID NO: 2395 - DNA, 96 bp, Aspergillus thermomutatus
  misc_feature: 321
tcggaaaggtaagagggtgcagatattcgcagtcaccctcaaggatatcaataaggccttgcaagcgaagcagtacaccgaccccaagaccaagct

SEQ ID NO: 2396 - DNA, 96 bp, Aspergillus thermomutatus
  misc_feature: 321
gaaaggaaccccattcacatggacggaggagcacaccaatcggttcgagcagctaaagaagatgtttactaccgcgccgattctcatgcagtttga

SEQ ID NO: 2397 - DNA, 96 bp, Aspergillus thermomutatus
  misc_feature: 321
tagaatcattggaaacgcacattggaaacattggaaacgcacattggtagatacattggattggaagacgcacctaatgattgtgtagcgcacatt

SEQ ID NO: 2398 - DNA, 96 bp, Aspergillus thermomutatus
  misc_feature: 321
tactgagcacattagaatcattggaaacgcacattggaaacattggaaacgcacattggtagatacattggattggaagacgcacctaatgattgt

SEQ ID NO: 2399 - DNA, 96 bp, Aspergillus thermomutatus
  misc_feature: 321
tacccctttcggtatggcgaacgcacctagcaccttccaacggtacatcaactggacactaagagactttctggatgaatttgcatctgcgtacgt

SEQ ID NO: 2400 - DNA, 96 bp, Aspergillus thermomutatus
  misc_feature: 321
taatgattcacccgagcaagctactcacaaaggatcccccaccctcagtggtgagccgactgatgctcgctagggtagcacccgacgaccctagcc

SEQ ID NO: 2401 - DNA, 96 bp, Aspergillus thermomutatus
  misc_feature: 321
ggagaggtaaagcagtgcagatcttcgcagccagcatcaaggatattgagaaagcactgcaggtaaagacacatacagaccctgccgataagctac

SEQ ID NO: 2402 - DNA, 96 bp, Aspergillus thermomutatus
  misc_feature: 321
aaaggtaagagggtgcagatattcgcagtcaccctcaaggatatcaataaggccttgcaagcgaagcagtacaccgaccccaagaccaagctgccc

SEQ ID NO: 2403 - DNA, 96 bp, Aspergillus thermomutatus
  misc_feature: 321
ccaggccgatagactagctggtagttgaaccgactgagcaaatctgaccagcgcgcttgccgctcgtttagtcgcctgcgaactgtgaagtactcc

SEQ ID NO: 2404 - DNA, 96 bp, Aspergillus thermomutatus
  misc_feature: 321
agtccttacccttaaaagaaaggacaaggagacagggaaggacaaggcaacagaaaaggacaaggtgacaggaaagaacaaaatgacaggaggagc

SEQ ID NO: 2405 - DNA, 96 bp, Aspergillus thermomutatus
  misc_feature: 321
gcctaccgaagtttgatatcgtcactgaccataagaatctggagtacttcacagttcgcaggcgactaaacgagcggcaagcgcgctggtcagatt

SEQ ID NO: 2406 - DNA, 96 bp, Aspergillus thermomutatus
  misc_feature: 321
gcctacaactgcgcgagaagataatgattcacccgagcaagctactcacaaaggatcccccaccctcagtggtgagccgactgatgctcgctaggg

SEQ ID NO: 2407 - DNA, 96 bp, Aspergillus thermomutatus
  misc_feature: 321
aaaaagaattcgcctgcggaatgcaactacgagatccacgataaggagctgctcgcgatcatcaacgcccttagggaatgggagtcggagttagtc

SEQ ID NO: 2408 - DNA, 96 bp, Aspergillus thermomutatus
  misc_feature: 321
cttcatacgtgtcagcagctcgtcagctgcagccccggtgctgctcgtgcgcaaacctggtggaggtctacgtttctgtgttgattaccgagcatt

SEQ ID NO: 2409 - DNA, 96 bp, Aspergillus thermomutatus
  misc_feature: 321
actgcgcaagtatcggcgcagtagtgaacatcttcttcagctgctcgaaccgctgcgtgtgctcatacgtccatttaaatggtgtacctttgtgcg

SEQ ID NO: 2410 - DNA, 96 bp, Aspergillus thermomutatus
  misc_feature: 321
catttaatcgccgctgaagtgttgtccgcggaacattgtaaatgcgtgaagcttcacgaacattgcaaatttgcttctttttcagagcagatatcg

SEQ ID NO: 2411 - DNA, 96 bp, Aspergillus thermomutatus
  misc_feature: 321
attccaatatagcctttaccttctcagggtccatgcatactcccttgcctgcttcgacgatgaagcccaagtacttggtgctcttgacctcgaatt

SEQ ID NO: 2412 - DNA, 96 bp, Aspergillus thermomutatus
  misc_feature: 321
aagctatactagaatggcagacccctacatccactcgaggcgtacgatcgtttctcggctttgcgaacttctatcggcgctttatacggaacttct

SEQ ID NO: 2413 - DNA, 96 bp, Aspergillus thermomutatus
  misc_feature: 320
ttcatacgtgtcagcagctcgtcagctgcagccccggtgctgctcgtgcgcaaacctggtggaggtctacgtttctgtgttgattaccgagcattg

SEQ ID NO: 2414 - DNA, 96 bp, Aspergillus thermomutatus
  misc_feature: 320
tgtccatttaatcgccgctgaagtgttgtccgcggaacattgtaaatgcgtgaagcttcacgaacattgcaaatttgcttctttttcagagcagat

SEQ ID NO: 2415 - DNA, 96 bp, Aspergillus thermomutatus
  misc_feature: 320
tagtccttacccttaaaagaaaggacaaggagacagggaaggacaaggcaacagaaaaggacaaggtgacaggaaagaacaaaatgacaggaggag

SEQ ID NO: 2416 - DNA, 96 bp, Aspergillus thermomutatus
  misc_feature: 320
tacgttgatgatatattggttttcactgatgggtcactctcggagcacagacgacaggtaaaacaggtacttgcgcgcctacaggaagcaggccta

SEQ ID NO: 2417 - DNA, 96 bp, Aspergillus thermomutatus
  misc_feature: 320
ccttctcagggtccatgcatactcccttgcctgcttcgacgatgaagcccaagtacttggtgctcttgacctcgaattcgcacttgtcaatatcta

SEQ ID NO: 2418 - DNA, 96 bp, Aspergillus thermomutatus
  misc_feature: 320
gtgagctcgagcattcagcgggccttgcccgctacactactccccctcccctcgcgggtcgggggtgttctggcccgctcgctgctcccaagcgtc

SEQ ID NO: 2419 - DNA, 96 bp, Aspergillus thermomutatus
  misc_feature: 320
gagaggtaaagcagtgcagatcttcgcagccagcatcaaggatattgagaaagcactgcaggtaaagacacatacagaccctgccgataagctacc

SEQ ID NO: 2420 - DNA, 96 bp, Aspergillus thermomutatus
  misc_feature: 320
agtgctcagtgagctcgagcattcagcgggccttgcccgctacactactccccctcccctcgcgggtcgggggtgttctggcccgctcgctgctcc

SEQ ID NO: 2421 - DNA, 96 bp, Aspergillus thermomutatus
  misc_feature: 320
aggtaaagcagtgcagatcttcgcagccagcatcaaggatattgagaaagcactgcaggtaaagacacatacagaccctgccgataagctaccagc

SEQ ID NO: 2422 - DNA, 96 bp, Aspergillus thermomutatus
  misc_feature: 320
actgaccgctatgagagcctaagggaaagacgcagcagaagtaccatgacacgtgaccatcggcagagcagcggtatgctcggcagagcaatgatc

SEQ ID NO: 2423 - DNA, 96 bp, Aspergillus thermomutatus
  misc_feature: 320
ccatttaatcgccgctgaagtgttgtccgcggaacattgtaaatgcgtgaagcttcacgaacattgcaaatttgcttctttttcagagcagatatc

SEQ ID NO: 2424 - DNA, 96 bp, Aspergillus thermomutatus
  misc_feature: 320
cttctcagggtccatgcatactcccttgcctgcttcgacgatgaagcccaagtacttggtgctcttgacctcgaattcgcacttgtcaatatctag

SEQ ID NO: 2425 - DNA, 96 bp, Aspergillus thermomutatus
  misc_feature: 320
ctcttcgcgatagtgcgtcaggtctcgcagctaatttaccaggccgatagactagctggtagttgaaccgactgagcaaatctgaccagcgcgctt

SEQ ID NO: 2426 - DNA, 96 bp, Aspergillus thermomutatus
  misc_feature: 320
cggaaaggtaagagggtgcagatattcgcagtcaccctcaaggatatcaataaggccttgcaagcgaagcagtacaccgaccccaagaccaagctg

SEQ ID NO: 2427 - DNA, 96 bp, Aspergillus thermomutatus
  misc_feature: 320
cagtgagctcgagcattcagcgggccttgcccgctacactactccccctcccctcgcgggtcgggggtgttctggcccgctcgctgctcccaagcg

SEQ ID NO: 2428 - DNA, 96 bp, Aspergillus thermomutatus
  misc_feature: 320
aggtgctagagcggttacaggccgctgggttgcagctagacatcgacaagtgcgagttcgaggtcaagagcacgaaatacctcgggtttatcattg

SEQ ID NO: 2429 - DNA, 96 bp, Aspergillus thermomutatus
  misc_feature: 320
accttctcagggtccatgcatactcccttgcctgcttcgacgatgaagcccaagtacttggtgctcttgacctcgaattcgcacttgtcaatatct

SEQ ID NO: 2430 - DNA, 96 bp, Aspergillus thermomutatus
  misc_feature: 319
ttgatgatatattggttttcactgatgggtcactctcggagcacagacgacaggtaaaacaggtacttgcgcgcctacaggaagcaggcctacagc

SEQ ID NO: 2431 - DNA, 96 bp, Aspergillus thermomutatus
  misc_feature: 319
cggtcattcctaggcttcgcaaacttctatcggcgctttatacggaacttctcagagatagtacgcccgcttacagccctcacgcacaaaggtaca

SEQ ID NO: 2432 - DNA, 96 bp, Aspergillus thermomutatus
  misc_feature: 319
agaggtaaagcagtgcagatcttcgcagccagcatcaaggatattgagaaagcactgcaggtaaagacacatacagaccctgccgataagctacca

SEQ ID NO: 2433 - DNA, 96 bp, Aspergillus thermomutatus
  misc_feature: 319
attatcttctcgcgcagttgtaggcggtcatcgtcatcgtcaggcatatcttgttctcttcgcgatagtgcgtcaggtctcgcagctaatttacca

SEQ ID NO: 2434 - DNA, 96 bp, Aspergillus thermomutatus
  misc_feature: 319
agagtgacccatcagtgaaaaccaatatatcatcaacgtacgcagatgcaaattcatccagaaagtctcttagtgtccagttgatgtaccgttgga

SEQ ID NO: 2435 - DNA, 96 bp, Aspergillus thermomutatus
  misc_feature: 319
agagcaatgatctgatgagaacagatcagtgatctgttgtgaacagatcagtgatctgttacagacatatcagtgatatgttcgaagggctatata

SEQ ID NO: 2436 - DNA, 96 bp, Aspergillus thermomutatus
  misc_feature: 319
aacaacgcgccaactcacataaattgactaaagctgaagaggaatcgcttatacagtggatattatctatggatcagcgtggagcagctccccgac

SEQ ID NO: 2437 - DNA, 96 bp, Aspergillus thermomutatus
  misc_feature: 319
agggtgcagatattcgcagtcaccctcaaggatatcaataaggccttgcaagcgaagcagtacaccgaccccaagaccaagctgcccgcgcactac

SEQ ID NO: 2438 - DNA, 96 bp, Aspergillus thermomutatus
  misc_feature: 319
gtacagcatgtcgcgcgaagaactgcttgtactgcgtaagacgcttacagagctgctagagaagaacttcatacgtgtcagcagctcgtcagctgc

SEQ ID NO: 2439 - DNA, 96 bp, Aspergillus thermomutatus
  misc_feature: 319
ggcgaagcaccgtagccacgtacggcaggtgctagagcggttacaggccgctgggttgcagctagacatcgacaagtgcgagttcgaggtcaagag

SEQ ID NO: 2440 - DNA, 96 bp, Aspergillus thermomutatus
  misc_feature: 319
aggtaagagggtgcagatattcgcagtcaccctcaaggatatcaataaggccttgcaagcgaagcagtacaccgaccccaagaccaagctgcccgc

SEQ ID NO: 2441 - DNA, 96 bp, Aspergillus thermomutatus
  misc_feature: 319
ctcagtgagctcgagcattcagcgggccttgcccgctacactactccccctcccctcgcgggtcgggggtgttctggcccgctcgctgctcccaag

SEQ ID NO: 2442 - DNA, 96 bp, Aspergillus thermomutatus
  misc_feature: 319
cgtacgtggctacggtgcttcgccagcgacccatcagtgaagataagtacatcgtcgatgtacgcggaggcgaattcatccaggaagtctcgaagg

SEQ ID NO: 2443 - DNA, 96 bp, Aspergillus thermomutatus
  misc_feature: 319
agtgagctcgagcattcagcgggccttgcccgctacactactccccctcccctcgcgggtcgggggtgttctggcccgctcgctgctcccaagcgt

SEQ ID NO: 2444 - DNA, 96 bp, Aspergillus thermomutatus
  misc_feature: 319
agatcttcgcagccagcatcaaggatattgagaaagcactgcaggtaaagacacatacagaccctgccgataagctaccagcgcactaccacgagt

SEQ ID NO: 2445 - DNA, 96 bp, Aspergillus thermomutatus
  misc_feature: 319
acatcttcttcagctgctcgaaccgctgcgtgtgctcatacgtccatttaaatggtgtacctttgtgcgtgagggctgtaagcgggcgtactatct

SEQ ID NO: 2446 - DNA, 96 bp, Aspergillus thermomutatus
  misc_feature: 318
ttgagccgacgaaccatcttgaagtattccaggttgcggtggtccgtgatgagcttaaatcgcggcaggctgactaactccgactcccattcccta

SEQ ID NO: 2447 - DNA, 96 bp, Aspergillus thermomutatus
  misc_feature: 318
ccattctagtatagcttttaccttgtcggggtccatgcgtacgcccttgccagcttcaatgataaacccgaggtatttcgtgctcttgacctcgaa

SEQ ID NO: 2448 - DNA, 96 bp, Aspergillus thermomutatus
  misc_feature: 318
gaccgctatgagagcctaagggaaagacgcagcagaagtaccatgacacgtgaccatcggcagagcagcggtatgctcggcagagcaatgatctga

SEQ ID NO: 2449 - DNA, 96 bp, Aspergillus thermomutatus
  misc_feature: 318
tatacatactcaacaacgccggagaggtaaagcagtgcagatcttcgcagccagcatcaaggatattgagaaagcactgcaggtaaagacacatac

SEQ ID NO: 2450 - DNA, 96 bp, Aspergillus thermomutatus
  misc_feature: 318
gtggttcaccaagctggatgtcatcgccgcctttcataagattcgtatcgcaccgggtgacgaatggttgactgcgtttcgcacccgatttggtct

SEQ ID NO: 2451 - DNA, 96 bp, Aspergillus thermomutatus
  misc_feature: 318
ggtctgccattccaatatagcctttaccttctcagggtccatgcatactcccttgcctgcttcgacgatgaagcccaagtacttggtgctcttgac

SEQ ID NO: 2452 - DNA, 96 bp, Aspergillus thermomutatus
  misc_feature: 318
ggtcgctggcgaagcaccgtagccacgtacggcaggtgctagagcggttacaggccgctgggttgcagctagacatcgacaagtgcgagttcgagg

SEQ ID NO: 2453 - DNA, 96 bp, Aspergillus thermomutatus
  misc_feature: 318
gatcagcctaccgaagtttgatatcgtcactgaccataagaatctggagtacttcacagttcgcaggcgactaaacgagcggcaagcgcgctggtc

SEQ ID NO: 2454 - DNA, 96 bp, Aspergillus thermomutatus
  misc_feature: 318
gagcgaatgaatgctacgttggaagcgtacctgcggaacttctgcaactacgcccagtctaattggaagtcgctgctgccgatggcccagcttgcg

SEQ ID NO: 2455 - DNA, 96 bp, Aspergillus thermomutatus
  misc_feature: 318
gaatcattggaaacgcacattggaaacattggaaacgcacattggtagatacattggattggaagacgcacctaatgattgtgtagcgcacattgg

SEQ ID NO: 2456 - DNA, 96 bp, Aspergillus thermomutatus
  misc_feature: 318
ccttagggaatgggagtcggagttagtcagcctgccgcgatttaagctcatcacggaccaccgcaacctggaatacttcaagatggttcgtcggct

SEQ ID NO: 2457 - DNA, 96 bp, Aspergillus thermomutatus
  misc_feature: 318
cccatcagtgaaaaccaatatatcatcaacgtacgcagatgcaaattcatccagaaagtctcttagtgtccagttgatgtaccgttggaaggtgct

SEQ ID NO: 2458 - DNA, 96 bp, Aspergillus thermomutatus
  misc_feature: 318
caggtgctagagcggttacaggccgctgggttgcagctagacatcgacaagtgcgagttcgaggtcaagagcacgaaatacctcgggtttatcatt

SEQ ID NO: 2459 - DNA, 96 bp, Aspergillus thermomutatus
  misc_feature: 317
ttccgtataaagcgccgatagaagttcgcaaagccgagaaacgatcgtacgcctcgagtggatgtaggggtctgccattctagtatagcttttacc

SEQ ID NO: 2460 - DNA, 96 bp, Aspergillus thermomutatus
  misc_feature: 317
tgagccgacgaaccatcttgaagtattccaggttgcggtggtccgtgatgagcttaaatcgcggcaggctgactaactccgactcccattccctaa

SEQ ID NO: 2461 - DNA, 96 bp, Aspergillus thermomutatus
  misc_feature: 317
atcagcctaccgaagtttgatatcgtcactgaccataagaatctggagtacttcacagttcgcaggcgactaaacgagcggcaagcgcgctggtca

SEQ ID NO: 2462 - DNA, 96 bp, Aspergillus thermomutatus
  misc_feature: 317
gggtctgccattccaatatagcctttaccttctcagggtccatgcatactcccttgcctgcttcgacgatgaagcccaagtacttggtgctcttga

SEQ ID NO: 2463 - DNA, 96 bp, Aspergillus thermomutatus
  misc_feature: 317
tattggttttcactgatgggtcactctcggagcacagacgacaggtaaaacaggtacttgcgcgcctacaggaagcaggcctacagctagatattg

SEQ ID NO: 2464 - DNA, 96 bp, Aspergillus thermomutatus
  misc_feature: 317
ggtcattcctaggcttcgcaaacttctatcggcgctttatacggaacttctcagagatagtacgcccgcttacagccctcacgcacaaaggtacac

SEQ ID NO: 2465 - DNA, 96 bp, Aspergillus thermomutatus
  misc_feature: 317
gtatatcaaaggcgaagtggtttaccaaacttgatgtgatcgccgcattccacaagattcgcattgcacccggagatgaatggctgacggccttcc

SEQ ID NO: 2466 - DNA, 96 bp, Aspergillus thermomutatus
  misc_feature: 317
caacgtcggaaaggtaagagggtgcagatattcgcagtcaccctcaaggatatcaataaggccttgcaagcgaagcagtacaccgaccccaagacc

SEQ ID NO: 2467 - DNA, 96 bp, Aspergillus thermomutatus
  misc_feature: 317
gcgaagcaccgtagccacgtacggcaggtgctagagcggttacaggccgctgggttgcagctagacatcgacaagtgcgagttcgaggtcaagagc

SEQ ID NO: 2468 - DNA, 96 bp, Aspergillus thermomutatus
  misc_feature: 317
cattgatggggtccgtacgcccaaggagcgggccgaagcggtcattacgaagatgaaggaggctacagagatggcgcagtcagagctggccgccgc

SEQ ID NO: 2469 - DNA, 96 bp, Aspergillus thermomutatus
  misc_feature: 317
ctggcgaagcaccgtagccacgtacggcaggtgctagagcggttacaggccgctgggttgcagctagacatcgacaagtgcgagttcgaggtcaag

SEQ ID NO: 2470 - DNA, 96 bp, Aspergillus thermomutatus
  misc_feature: 317
ctgtgctccgagagtgacccatcagtgaaaaccaatatatcatcaacgtacgcagatgcaaattcatccagaaagtctcttagtgtccagttgatg

SEQ ID NO: 2471 - DNA, 96 bp, Aspergillus thermomutatus
  misc_feature: 317
ctgcgcaagtatcggcgcagtagtgaacatcttcttcagctgctcgaaccgctgcgtgtgctcatacgtccatttaaatggtgtacctttgtgcgt

SEQ ID NO: 2472 - DNA, 96 bp, Aspergillus thermomutatus
  misc_feature: 317
atgtcgcgcgaagaactgcttgtactgcgtaagacgcttacagagctgctagagaagaacttcatacgtgtcagcagctcgtcagctgcagccccg

SEQ ID NO: 2473 - DNA, 96 bp, Aspergillus thermomutatus
  misc_feature: 317
attgatggggtccgtacgcccaaggagcgggccgaagcggtcattacgaagatgaaggaggctacagagatggcgcagtcagagctggccgccgcg

SEQ ID NO: 2474 - DNA, 96 bp, Aspergillus thermomutatus
  misc_feature: 317
aggcttcgcaaacttctatcggcgctttatacggaacttctcagagatagtacgcccgcttacagccctcacgcacaaaggtacaccatttaaatg

SEQ ID NO: 2475 - DNA, 96 bp, Aspergillus thermomutatus
  misc_feature: 317
cattccaatatagcctttaccttctcagggtccatgcatactcccttgcctgcttcgacgatgaagcccaagtacttggtgctcttgacctcgaat

SEQ ID NO: 2476 - DNA, 96 bp, Aspergillus thermomutatus
  misc_feature: 317
cagctaatttaccaggccgatagactagctggtagttgaaccgactgagcaaatctgaccagcgcgcttgccgctcgtttagtcgcctgcgaactg

SEQ ID NO: 2477 - DNA, 96 bp, Aspergillus thermomutatus
  misc_feature: 317
actgagcacattagaatcattggaaacgcacattggaaacattggaaacgcacattggtagatacattggattggaagacgcacctaatgattgtg

SEQ ID NO: 2478 - DNA, 96 bp, Aspergillus thermomutatus
  misc_feature: 317
agaatcattggaaacgcacattggaaacattggaaacgcacattggtagatacattggattggaagacgcacctaatgattgtgtagcgcacattg

SEQ ID NO: 2479 - DNA, 96 bp, Aspergillus thermomutatus
  misc_feature: 317
atagactagctggtagttgaaccgactgagcaaatctgaccagcgcgcttgccgctcgtttagtcgcctgcgaactgtgaagtactccagattctt

SEQ ID NO: 2480 - DNA, 96 bp, Aspergillus thermomutatus
  misc_feature: 317
agctaatttaccaggccgatagactagctggtagttgaaccgactgagcaaatctgaccagcgcgcttgccgctcgtttagtcgcctgcgaactgt

SEQ ID NO: 2481 - DNA, 96 bp, Aspergillus thermomutatus
  misc_feature: 316
ccaagccagttgagcactgactaccagccgcccgctgtgctagtcgacggcgaggccgaatatgaggttgaatggatactggatgagcgtgagaaa

SEQ ID NO: 2482 - DNA, 96 bp, Aspergillus thermomutatus
  misc_feature: 316
tcttcgcgatagtgcgtcaggtctcgcagctaatttaccaggccgatagactagctggtagttgaaccgactgagcaaatctgaccagcgcgcttg

SEQ ID NO: 2483 - DNA, 96 bp, Aspergillus thermomutatus
  misc_feature: 316
cgctatgagagcctaagggaaagacgcagcagaagtaccatgacacgtgaccatcggcagagcagcggtatgctcggcagagcaatgatctgatga

SEQ ID NO: 2484 - DNA, 96 bp, Aspergillus thermomutatus
  misc_feature: 316
tcactactgcgccgatacttgcgcagtttgaccctgatcgagacacggtcgtggagacggatgcttccaactgggctacgggtgcggtgatgtccc

SEQ ID NO: 2485 - DNA, 96 bp, Aspergillus thermomutatus
  misc_feature: 316
tagttacccctttcggtatggcgaacgcacctagcaccttccaacggtacatcaactggacactaagagactttctggatgaatttgcatctgcgt

SEQ ID NO: 2486 - DNA, 96 bp, Aspergillus thermomutatus
  misc_feature: 316
ccatcagtgaaaaccaatatatcatcaacgtacgcagatgcaaattcatccagaaagtctcttagtgtccagttgatgtaccgttggaaggtgcta

SEQ ID NO: 2487 - DNA, 96 bp, Aspergillus thermomutatus
  misc_feature: 316
gttcaccaagctggatgtcatcgccgcctttcataagattcgtatcgcaccgggtgacgaatggttgactgcgtttcgcacccgatttggtctgta

SEQ ID NO: 2488 - DNA, 96 bp, Aspergillus thermomutatus
  misc_feature: 316
cattctagtatagcttttaccttgtcggggtccatgcgtacgcccttgccagcttcaatgataaacccgaggtatttcgtgctcttgacctcgaac

SEQ ID NO: 2489 - DNA, 96 bp, Aspergillus thermomutatus
  misc_feature: 316
gtctgccattccaatatagcctttaccttctcagggtccatgcatactcccttgcctgcttcgacgatgaagcccaagtacttggtgctcttgacc

SEQ ID NO: 2490 - DNA, 96 bp, Aspergillus thermomutatus
  misc_feature: 316
gtacgttgatgatatattggttttcactgatgggtcactctcggagcacagacgacaggtaaaacaggtacttgcgcgcctacaggaagcaggcct

SEQ ID NO: 2491 - DNA, 96 bp, Aspergillus thermomutatus
  misc_feature: 316
cgtacgttgatgatatattggttttcactgatgggtcactctcggagcacagacgacaggtaaaacaggtacttgcgcgcctacaggaagcaggcc

SEQ ID NO: 2492 - DNA, 96 bp, Aspergillus thermomutatus
  misc_feature: 316
gaaaggtaagagggtgcagatattcgcagtcaccctcaaggatatcaataaggccttgcaagcgaagcagtacaccgaccccaagaccaagctgcc

SEQ ID NO: 2493 - DNA, 96 bp, Aspergillus thermomutatus
  misc_feature: 316
ctccaggtgctcgtggtagtgcgcgggcagcttggtcttggggtcggtgtactgcttcgcttgcaaggccttattgatatccttgagggtgactgc

SEQ ID NO: 2494 - DNA, 96 bp, Aspergillus thermomutatus
  misc_feature: 316
acccatcagtgaaaaccaatatatcatcaacgtacgcagatgcaaattcatccagaaagtctcttagtgtccagttgatgtaccgttggaaggtgc

SEQ ID NO: 2495 - DNA, 96 bp, Aspergillus thermomutatus
  misc_feature: 316
ctgcttcctgtaggcgcgcaagtacctgttttacctgtcgtctgtgctccgagagtgacccatcagtgaaaaccaatatatcatcaacgtacgcag

SEQ ID NO: 2496 - DNA, 96 bp, Aspergillus thermomutatus
  misc_feature: 316
attgtacatacctagtcataggttttcctacggtctagcccgtaacattagaactcgctcctcatcttactgagcacattagaatcattggaaacg

SEQ ID NO: 2497 - DNA, 96 bp, Aspergillus thermomutatus
  misc_feature: 316
attctagtatagcttttaccttgtcggggtccatgcgtacgcccttgccagcttcaatgataaacccgaggtatttcgtgctcttgacctcgaact

SEQ ID NO: 2498 - DNA, 96 bp, Aspergillus thermomutatus
  misc_feature: 315
acgtcggaaaggtaagagggtgcagatattcgcagtcaccctcaaggatatcaataaggccttgcaagcgaagcagtacaccgaccccaagaccaa

SEQ ID NO: 2499 - DNA, 96 bp, Aspergillus thermomutatus
  misc_feature: 315
tgtcgcgcgaagaactgcttgtactgcgtaagacgcttacagagctgctagagaagaacttcatacgtgtcagcagctcgtcagctgcagccccgg

SEQ ID NO: 2500 - DNA, 96 bp, Aspergillus thermomutatus
  misc_feature: 315
gtggctacggtgcttcgccagcgacccatcagtgaagataagtacatcgtcgatgtacgcggaggcgaattcatccaggaagtctcgaagggccca

SEQ ID NO: 2501 - DNA, 96 bp, Aspergillus thermomutatus
  misc_feature: 315
cactactgcgccgatacttgcgcagtttgaccctgatcgagacacggtcgtggagacggatgcttccaactgggctacgggtgcggtgatgtccca

SEQ ID NO: 2502 - DNA, 96 bp, Aspergillus thermomutatus
  misc_feature: 315
tgaccgctatgagagcctaagggaaagacgcagcagaagtaccatgacacgtgaccatcggcagagcagcggtatgctcggcagagcaatgatctg

SEQ ID NO: 2503 - DNA, 96 bp, Aspergillus thermomutatus
  misc_feature: 315
aatcattggaaacgcacattggaaacattggaaacgcacattggtagatacattggattggaagacgcacctaatgattgtgtagcgcacattgga

SEQ ID NO: 2504 - DNA, 96 bp, Aspergillus thermomutatus
  misc_feature: 315
tcagtgagctcgagcattcagcgggccttgcccgctacactactccccctcccctcgcgggtcgggggtgttctggcccgctcgctgctcccaagc

SEQ ID NO: 2505 - DNA, 96 bp, Aspergillus thermomutatus
  misc_feature: 315
ctggatgtcatcgccgcctttcataagattcgtatcgcaccgggtgacgaatggttgactgcgtttcgcacccgatttggtctgtacgagtggcta

SEQ ID NO: 2506 - DNA, 96 bp, Aspergillus thermomutatus
  misc_feature: 315
gtgacccatcagtgaaaaccaatatatcatcaacgtacgcagatgcaaattcatccagaaagtctcttagtgtccagttgatgtaccgttggaagg

SEQ ID NO: 2507 - DNA, 96 bp, Aspergillus thermomutatus
  misc_feature: 315
gtcgcgcgaagaactgcttgtactgcgtaagacgcttacagagctgctagagaagaacttcatacgtgtcagcagctcgtcagctgcagccccggt

SEQ ID NO: 2508 - DNA, 96 bp, Aspergillus thermomutatus
  misc_feature: 315
ggatgtcatcgccgcctttcataagattcgtatcgcaccgggtgacgaatggttgactgcgtttcgcacccgatttggtctgtacgagtggctagt

SEQ ID NO: 2509 - DNA, 96 bp, Aspergillus thermomutatus
  misc_feature: 315
ataatgattcacccgagcaagctactcacaaaggatcccccaccctcagtggtgagccgactgatgctcgctagggtagcacccgacgaccctagc

SEQ ID NO: 2510 - DNA, 96 bp, Aspergillus thermomutatus
  misc_feature: 315
atcttctcgcgcagttgtaggcggtcatcgtcatcgtcaggcatatcttgttctcttcgcgatagtgcgtcaggtctcgcagctaatttaccaggc

SEQ ID NO: 2511 - DNA, 96 bp, Aspergillus thermomutatus
  misc_feature: 315
gatgtcatcgccgcctttcataagattcgtatcgcaccgggtgacgaatggttgactgcgtttcgcacccgatttggtctgtacgagtggctagtt

SEQ ID NO: 2512 - DNA, 96 bp, Aspergillus thermomutatus
  misc_feature: 315
gaagttccgtataaagcgccgatagaagttcgcaaagccgagaaacgatcgtacgcctcgagtggatgtaggggtctgccattctagtatagcttt

SEQ ID NO: 2513 - DNA, 96 bp, Aspergillus thermomutatus
  misc_feature: 315
agtgacccatcagtgaaaaccaatatatcatcaacgtacgcagatgcaaattcatccagaaagtctcttagtgtccagttgatgtaccgttggaag

SEQ ID NO: 2514 - DNA, 96 bp, Aspergillus thermomutatus
  misc_feature: 315
ctgaccgctatgagagcctaagggaaagacgcagcagaagtaccatgacacgtgaccatcggcagagcagcggtatgctcggcagagcaatgatct

SEQ ID NO: 2515 - DNA, 96 bp, Aspergillus thermomutatus
  misc_feature: 315
ataaagcgccgatagaagttcgcaaagccgagaaacgatcgtacgcctcgagtggatgtaggggtctgccattctagtatagcttttaccttgtcg

SEQ ID NO: 2516 - DNA, 96 bp, Aspergillus thermomutatus
  misc_feature: 314
tgtgacaacaaaatattggccatatcttgaacatgagatggtcggggagctgctccacgctgatccatagataatatccactgtataagcgattcc

SEQ ID NO: 2517 - DNA, 96 bp, Aspergillus thermomutatus
  misc_feature: 314
tccatttaatcgccgctgaagtgttgtccgcggaacattgtaaatgcgtgaagcttcacgaacattgcaaatttgcttctttttcagagcagatat

SEQ ID NO: 2518 - DNA, 96 bp, Aspergillus thermomutatus
  misc_feature: 314
tattgtacatacctagtcataggttttcctacggtctagcccgtaacattagaactcgctcctcatcttactgagcacattagaatcattggaaac

SEQ ID NO: 2519 - DNA, 96 bp, Aspergillus thermomutatus
  misc_feature: 314
agttccgtataaagcgccgatagaagttcgcaaagccgagaaacgatcgtacgcctcgagtggatgtaggggtctgccattctagtatagctttta

SEQ ID NO: 2520 - DNA, 96 bp, Aspergillus thermomutatus
  misc_feature: 314
gagaagaacttcatacgtgtcagcagctcgtcagctgcagccccggtgctgctcgtgcgcaaacctggtggaggtctacgtttctgtgttgattac

SEQ ID NO: 2521 - DNA, 96 bp, Aspergillus thermomutatus
  misc_feature: 314
ggttcaccaagctggatgtcatcgccgcctttcataagattcgtatcgcaccgggtgacgaatggttgactgcgtttcgcacccgatttggtctgt

SEQ ID NO: 2522 - DNA, 96 bp, Aspergillus thermomutatus
  misc_feature: 314
gggtcgctggcgaagcaccgtagccacgtacggcaggtgctagagcggttacaggccgctgggttgcagctagacatcgacaagtgcgagttcgag

SEQ ID NO: 2523 - DNA, 96 bp, Aspergillus thermomutatus
  misc_feature: 314
gcagctaatttaccaggccgatagactagctggtagttgaaccgactgagcaaatctgaccagcgcgcttgccgctcgtttagtcgcctgcgaact

SEQ ID NO: 2524 - DNA, 96 bp, Aspergillus thermomutatus
  misc_feature: 314
gcaagtatcggcgcagtagtgaacatcttcttcagctgctcgaaccgctgcgtgtgctcatacgtccatttaaatggtgtacctttgtgcgtgagg

SEQ ID NO: 2525 - DNA, 96 bp, Aspergillus thermomutatus
  misc_feature: 314
ctcaattcggtgatcgaccccagggcgatgcgggggcagttcgtcggctttcttccgatcgaacgcccctaggaactcgtggtagtgcgctggtag

SEQ ID NO: 2526 - DNA, 96 bp, Aspergillus thermomutatus
  misc_feature: 314
cgcgcgctgaggtcggggtctgccattccaatatagcctttaccttctcagggtccatgcatactcccttgcctgcttcgacgatgaagcccaagt

SEQ ID NO: 2527 - DNA, 96 bp, Aspergillus thermomutatus
  misc_feature: 314
caactcacataaattgactaaagctgaagaggaatcgcttatacagtggatattatctatggatcagcgtggagcagctccccgaccatctcatgt

SEQ ID NO: 2528 - DNA, 96 bp, Aspergillus thermomutatus
  misc_feature: 314
aatcattatcttctcgcgcagttgtaggcggtcatcgtcatcgtcaggcatatcttgttctcttcgcgatagtgcgtcaggtctcgcagctaattt

SEQ ID NO: 2529 - DNA, 96 bp, Aspergillus thermomutatus
  misc_feature: 313
aacgtcggaaaggtaagagggtgcagatattcgcagtcaccctcaaggatatcaataaggccttgcaagcgaagcagtacaccgaccccaagacca

SEQ ID NO: 2530 - DNA, 96 bp, Aspergillus thermomutatus
  misc_feature: 313
tgcgcaagtatcggcgcagtagtgaacatcttcttcagctgctcgaaccgctgcgtgtgctcatacgtccatttaaatggtgtacctttgtgcgtg

SEQ ID NO: 2531 - DNA, 96 bp, Aspergillus thermomutatus
  misc_feature: 313
tgatgatatattggttttcactgatgggtcactctcggagcacagacgacaggtaaaacaggtacttgcgcgcctacaggaagcaggcctacagct

SEQ ID NO: 2532 - DNA, 96 bp, Aspergillus thermomutatus
  misc_feature: 313
tcagcctaccgaagtttgatatcgtcactgaccataagaatctggagtacttcacagttcgcaggcgactaaacgagcggcaagcgcgctggtcag

SEQ ID NO: 2533 - DNA, 96 bp, Aspergillus thermomutatus
  misc_feature: 313
tatcaactgggcccttcgagacttcctggatgaattcgcctccgcgtacatcgacgatgtacttatcttcactgatgggtcgctggcgaagcaccg

SEQ ID NO: 2534 - DNA, 96 bp, Aspergillus thermomutatus
  misc_feature: 313
actcaattcggtgatcgaccccagggcgatgcgggggcagttcgtcggctttcttccgatcgaacgcccctaggaactcgtggtagtgcgctggta

SEQ ID NO: 2535 - DNA, 96 bp, Aspergillus thermomutatus
  misc_feature: 313
atgtcatcgccgcctttcataagattcgtatcgcaccgggtgacgaatggttgactgcgtttcgcacccgatttggtctgtacgagtggctagtta

SEQ ID NO: 2536 - DNA, 96 bp, Aspergillus thermomutatus
  misc_feature: 313
catcttcttcagctgctcgaaccgctgcgtgtgctcatacgtccatttaaatggtgtacctttgtgcgtgagggctgtaagcgggcgtactatctc

SEQ ID NO: 2537 - DNA, 96 bp, Aspergillus thermomutatus
  misc_feature: 313
gagagtgacccatcagtgaaaaccaatatatcatcaacgtacgcagatgcaaattcatccagaaagtctcttagtgtccagttgatgtaccgttgg

SEQ ID NO: 2538 - DNA, 96 bp, Aspergillus thermomutatus
  misc_feature: 313
ccttaaaagaaaggacaaggagacagggaaggacaaggcaacagaaaaggacaaggtgacaggaaagaacaaaatgacaggaggagcaaggtagag

SEQ ID NO: 2539 - DNA, 96 bp, Aspergillus thermomutatus
  misc_feature: 313
ctccgagagtgacccatcagtgaaaaccaatatatcatcaacgtacgcagatgcaaattcatccagaaagtctcttagtgtccagttgatgtaccg

SEQ ID NO: 2540 - DNA, 96 bp, Aspergillus thermomutatus
  misc_feature: 313
acgaggatcctgcaagagacgcacgactcagtgcttacaggccaccccgggaagaacacattgtacgcgatgatagcgcggaacttctactggccg

SEQ ID NO: 2541 - DNA, 96 bp, Aspergillus thermomutatus
  misc_feature: 313
atattggttttcactgatgggtcactctcggagcacagacgacaggtaaaacaggtacttgcgcgcctacaggaagcaggcctacagctagatatt

SEQ ID NO: 2542 - DNA, 96 bp, Aspergillus thermomutatus
  misc_feature: 313
aagttccgtataaagcgccgatagaagttcgcaaagccgagaaacgatcgtacgcctcgagtggatgtaggggtctgccattctagtatagctttt

SEQ ID NO: 2543 - DNA, 96 bp, Aspergillus thermomutatus
  misc_feature: 312
tggcgaagcaccgtagccacgtacggcaggtgctagagcggttacaggccgctgggttgcagctagacatcgacaagtgcgagttcgaggtcaaga

SEQ ID NO: 2544 - DNA, 96 bp, Aspergillus thermomutatus
  misc_feature: 312
tggatgtcatcgccgcctttcataagattcgtatcgcaccgggtgacgaatggttgactgcgtttcgcacccgatttggtctgtacgagtggctag

SEQ ID NO: 2545 - DNA, 96 bp, Aspergillus thermomutatus
  misc_feature: 312
tctgcgtacgttgatgatatattggttttcactgatgggtcactctcggagcacagacgacaggtaaaacaggtacttgcgcgcctacaggaagca

SEQ ID NO: 2546 - DNA, 96 bp, Aspergillus thermomutatus
  misc_feature: 312
cctgcttcctgtaggcgcgcaagtacctgttttacctgtcgtctgtgctccgagagtgacccatcagtgaaaaccaatatatcatcaacgtacgca

SEQ ID NO: 2547 - DNA, 96 bp, Aspergillus thermomutatus
  misc_feature: 312
tgacaacaaaatattggccatatcttgaacatgagatggtcggggagctgctccacgctgatccatagataatatccactgtataagcgattcctc

SEQ ID NO: 2548 - DNA, 96 bp, Aspergillus thermomutatus
  misc_feature: 312
tctgacgtgattgtgctaggtacgccatggtagccgatgaatcggtcgattagcagctgcgctacggtctcggcatcagttcgctcacagggcact

SEQ ID NO: 2549 - DNA, 96 bp, Aspergillus thermomutatus
  misc_feature: 312
cccttaaaagaaaggacaaggagacagggaaggacaaggcaacagaaaaggacaaggtgacaggaaagaacaaaatgacaggaggagcaaggtaga

SEQ ID NO: 2550 - DNA, 96 bp, Aspergillus thermomutatus
  misc_feature: 312
tccgagagtgacccatcagtgaaaaccaatatatcatcaacgtacgcagatgcaaattcatccagaaagtctcttagtgtccagttgatgtaccgt

SEQ ID NO: 2551 - DNA, 96 bp, Aspergillus thermomutatus
  misc_feature: 312
gcgcaagtatcggcgcagtagtgaacatcttcttcagctgctcgaaccgctgcgtgtgctcatacgtccatttaaatggtgtacctttgtgcgtga

SEQ ID NO: 2552 - DNA, 96 bp, Aspergillus thermomutatus
  misc_feature: 312
gtcatcgccgcctttcataagattcgtatcgcaccgggtgacgaatggttgactgcgtttcgcacccgatttggtctgtacgagtggctagttacc

SEQ ID NO: 2553 - DNA, 96 bp, Aspergillus thermomutatus
  misc_feature: 312
ggagtatctcgtcaaatggacaggttacgatcgtcctacgtgggaaccagctgtcaacctcgtcaatacggccgcgctggacgcttgggagcagcg

SEQ ID NO: 2554 - DNA, 96 bp, Aspergillus thermomutatus
  misc_feature: 312
cttgttctcttcgcgatagtgcgtcaggtctcgcagctaatttaccaggccgatagactagctggtagttgaaccgactgagcaaatctgaccagc

SEQ ID NO: 2555 - DNA, 96 bp, Aspergillus thermomutatus
  misc_feature: 312
agaggctccaggttgtatccgtggtccaggaagaacggacttacccccgtgctcgtagcgtccctgccatttatcgcaagctgggccatcggcagc

SEQ ID NO: 2556 - DNA, 96 bp, Aspergillus thermomutatus
  misc_feature: 312
gcgcgcgcgcgagcattaggcggcagcggtccggggcaggccagcaggcaggggggcgcgcgcgcggcggtgaccagttggccggggccctcgagc

SEQ ID NO: 2557 - DNA, 96 bp, Aspergillus thermomutatus
  misc_feature: 312
gaatgagccgaagttagtggtcagacagataagcgcacaggggttcgctatacatactcaacaacgccggagaggtaaagcagtgcagatcttcgc

SEQ ID NO: 2558 - DNA, 96 bp, Aspergillus thermomutatus
  misc_feature: 312
ccgcgcgctgaggtcggggtctgccattccaatatagcctttaccttctcagggtccatgcatactcccttgcctgcttcgacgatgaagcccaag

SEQ ID NO: 2559 - DNA, 96 bp, Aspergillus thermomutatus
  misc_feature: 312
cgcaagtatcggcgcagtagtgaacatcttcttcagctgctcgaaccgctgcgtgtgctcatacgtccatttaaatggtgtacctttgtgcgtgag

SEQ ID NO: 2560 - DNA, 96 bp, Aspergillus thermomutatus
  misc_feature: 312
cgccctagcaagaagctcgatgcccagcacgcgaagttcacagtactggaagctattggatcacatgcttaccgactagatactccaccaggggtg

SEQ ID NO: 2561 - DNA, 96 bp, Aspergillus thermomutatus
  misc_feature: 312
aaagcgccgatagaagttcgcaaagccgagaaacgatcgtacgcctcgagtggatgtaggggtctgccattctagtatagcttttaccttgtcggg

SEQ ID NO: 2562 - DNA, 96 bp, Aspergillus thermomutatus
  misc_feature: 312
agctcgaaaacagtgtccatttaatcgccgctgaagtgttgtccgcggaacattgtaaatgcgtgaagcttcacgaacattgcaaatttgcttctt

SEQ ID NO: 2563 - DNA, 96 bp, Aspergillus thermomutatus
  misc_feature: 311
ccattccaatatagcctttaccttctcagggtccatgcatactcccttgcctgcttcgacgatgaagcccaagtacttggtgctcttgacctcgaa

SEQ ID NO: 2564 - DNA, 96 bp, Aspergillus thermomutatus
  misc_feature: 311
cttgatgctggctgcgaagatctgcactgctttacctctccggcgttgttgagtatgtatagcgaacccctgtgcgcttatctgtctgaccactaa

SEQ ID NO: 2565 - DNA, 96 bp, Aspergillus thermomutatus
  misc_feature: 311
cattggaaacgcacattggaaacattggaaacgcacattggtagatacattggattggaagacgcacctaatgattgtgtagcgcacattggaaca

SEQ ID NO: 2566 - DNA, 96 bp, Aspergillus thermomutatus
  misc_feature: 311
cgaagcaccgtagccacgtacggcaggtgctagagcggttacaggccgctgggttgcagctagacatcgacaagtgcgagttcgaggtcaagagca

SEQ ID NO: 2567 - DNA, 96 bp, Aspergillus thermomutatus
  misc_feature: 311
tgctagagcggttacaggccgctgggttgcagctagacatcgacaagtgcgagttcgaggtcaagagcacgaaatacctcgggtttatcattgaag

SEQ ID NO: 2568 - DNA, 96 bp, Aspergillus thermomutatus
  misc_feature: 311
tcttctcgcgcagttgtaggcggtcatcgtcatcgtcaggcatatcttgttctcttcgcgatagtgcgtcaggtctcgcagctaatttaccaggcc

SEQ ID NO: 2569 - DNA, 96 bp, Aspergillus thermomutatus
  misc_feature: 311
tctcgcagctaatttaccaggccgatagactagctggtagttgaaccgactgagcaaatctgaccagcgcgcttgccgctcgtttagtcgcctgcg

SEQ ID NO: 2570 - DNA, 96 bp, Aspergillus thermomutatus
  misc_feature: 311
ctcgcagctaatttaccaggccgatagactagctggtagttgaaccgactgagcaaatctgaccagcgcgcttgccgctcgtttagtcgcctgcga

SEQ ID NO: 2571 - DNA, 96 bp, Aspergillus thermomutatus
  misc_feature: 311
aaactagtccttacccttaaaagaaaggacaaggagacagggaaggacaaggcaacagaaaaggacaaggtgacaggaaagaacaaaatgacagga

SEQ ID NO: 2572 - DNA, 96 bp, Aspergillus thermomutatus
  misc_feature: 311
tcatcgccgcctttcataagattcgtatcgcaccgggtgacgaatggttgactgcgtttcgcacccgatttggtctgtacgagtggctagttaccc

SEQ ID NO: 2573 - DNA, 96 bp, Aspergillus thermomutatus
  misc_feature: 311
cttcttcagctgctcgaaccgctgcgtgtgctcatacgtccatttaaatggtgtacctttgtgcgtgagggctgtaagcgggcgtactatctctga

SEQ ID NO: 2574 - DNA, 96 bp, Aspergillus thermomutatus
  misc_feature: 311
agatgttcactactgcgccgatacttgcgcagtttgaccctgatcgagacacggtcgtggagacggatgcttccaactgggctacgggtgcggtga

SEQ ID NO: 2575 - DNA, 96 bp, Aspergillus thermomutatus
  misc_feature: 311
gcgcgctgaggtcggggtctgccattccaatatagcctttaccttctcagggtccatgcatactcccttgcctgcttcgacgatgaagcccaagta

SEQ ID NO: 2576 - DNA, 96 bp, Aspergillus thermomutatus
  misc_feature: 311
agagaagaacttcatacgtgtcagcagctcgtcagctgcagccccggtgctgctcgtgcgcaaacctggtggaggtctacgtttctgtgttgatta

SEQ ID NO: 2577 - DNA, 96 bp, Aspergillus thermomutatus
  misc_feature: 311
gaagcaccgtagccacgtacggcaggtgctagagcggttacaggccgctgggttgcagctagacatcgacaagtgcgagttcgaggtcaagagcac

SEQ ID NO: 2578 - DNA, 96 bp, Aspergillus thermomutatus
  misc_feature: 311
gtctcgcagctaatttaccaggccgatagactagctggtagttgaaccgactgagcaaatctgaccagcgcgcttgccgctcgtttagtcgcctgc

SEQ ID NO: 2579 - DNA, 96 bp, Aspergillus thermomutatus
  misc_feature: 311
gtataaagcgccgatagaagttcgcaaagccgagaaacgatcgtacgcctcgagtggatgtaggggtctgccattctagtatagcttttaccttgt

SEQ ID NO: 2580 - DNA, 96 bp, Aspergillus thermomutatus
  misc_feature: 311
aacggaccgccctagcaagaagctcgatgcccagcacgcgaagttcacagtactggaagctattggatcacatgcttaccgactagatactccacc

SEQ ID NO: 2581 - DNA, 96 bp, Aspergillus thermomutatus
  misc_feature: 311
gggtgcagatattcgcagtcaccctcaaggatatcaataaggccttgcaagcgaagcagtacaccgaccccaagaccaagctgcccgcgcactacc

SEQ ID NO: 2582 - DNA, 96 bp, Aspergillus thermomutatus
  misc_feature: 311
aagtatcggcgcagtagtgaacatcttcttcagctgctcgaaccgctgcgtgtgctcatacgtccatttaaatggtgtacctttgtgcgtgagggc

SEQ ID NO: 2583 - DNA, 96 bp, Aspergillus thermomutatus
  misc_feature: 311
gatcttcgcagccagcatcaaggatattgagaaagcactgcaggtaaagacacatacagaccctgccgataagctaccagcgcactaccacgagtt

SEQ ID NO: 2584 - DNA, 96 bp, Aspergillus thermomutatus
  misc_feature: 311
ctgccattccaatatagcctttaccttctcagggtccatgcatactcccttgcctgcttcgacgatgaagcccaagtacttggtgctcttgacctc

SEQ ID NO: 2585 - DNA, 96 bp, Aspergillus thermomutatus
  misc_feature: 311
gacaacaaaatattggccatatcttgaacatgagatggtcggggagctgctccacgctgatccatagataatatccactgtataagcgattcctct

SEQ ID NO: 2586 - DNA, 96 bp, Aspergillus thermomutatus
  misc_feature: 311
atcttcgcagccagcatcaaggatattgagaaagcactgcaggtaaagacacatacagaccctgccgataagctaccagcgcactaccacgagttc

SEQ ID NO: 2587 - DNA, 96 bp, Aspergillus thermomutatus
  misc_feature: 311
cacataaattgactaaagctgaagaggaatcgcttatacagtggatattatctatggatcagcgtggagcagctccccgaccatctcatgttcaag

SEQ ID NO: 2588 - DNA, 96 bp, Aspergillus thermomutatus
  misc_feature: 311
cctctagaggttgaggggctagagcgaggggctaccgccattgatggggtccgtacgcccaaggagcgggccgaagcggtcattacgaagatgaag

SEQ ID NO: 2589 - DNA, 96 bp, Aspergillus thermomutatus
  misc_feature: 311
aggctccaggttgtatccgtggtccaggaagaacggacttacccccgtgctcgtagcgtccctgccatttatcgcaagctgggccatcggcagcag

SEQ ID NO: 2590 - DNA, 96 bp, Aspergillus thermomutatus
  misc_feature: 311
cgtaatggcattcaatgctcggtaatcaacacagaaacgtagacctccaccaggtttgcgcacgagcagcaccggggctgcagctgacgagctgct

SEQ ID NO: 2591 - DNA, 96 bp, Aspergillus thermomutatus
  misc_feature: 311
ccattgatggggtccgtacgcccaaggagcgggccgaagcggtcattacgaagatgaaggaggctacagagatggcgcagtcagagctggccgccg

SEQ ID NO: 2592 - DNA, 96 bp, Aspergillus thermomutatus
  misc_feature: 311
cgagagtgacccatcagtgaaaaccaatatatcatcaacgtacgcagatgcaaattcatccagaaagtctcttagtgtccagttgatgtaccgttg

SEQ ID NO: 2593 - DNA, 96 bp, Aspergillus thermomutatus
  misc_feature: 311
caagtatcggcgcagtagtgaacatcttcttcagctgctcgaaccgctgcgtgtgctcatacgtccatttaaatggtgtacctttgtgcgtgaggg

SEQ ID NO: 2594 - DNA, 96 bp, Aspergillus thermomutatus
  misc_feature: 311
acttcatacgtgtcagcagctcgtcagctgcagccccggtgctgctcgtgcgcaaacctggtggaggtctacgtttctgtgttgattaccgagcat

SEQ ID NO: 2595 - DNA, 96 bp, Aspergillus thermomutatus
  misc_feature: 310
ttgatgctggctgcgaagatctgcactgctttacctctccggcgttgttgagtatgtatagcgaacccctgtgcgcttatctgtctgaccactaac

SEQ ID NO: 2596 - DNA, 96 bp, Aspergillus thermomutatus
  misc_feature: 310
ttcgcgcgacatgctgtacaacgggccccatgggggctctgctctcttgccgtccggaccttctagcagttcgatgcggtggtctacccctggccg

SEQ ID NO: 2597 - DNA, 96 bp, Aspergillus thermomutatus
  misc_feature: 310
ttcacccgagcaagctactcacaaaggatcccccaccctcagtggtgagccgactgatgctcgctagggtagcacccgacgaccctagccaactac

SEQ ID NO: 2598 - DNA, 96 bp, Aspergillus thermomutatus
  misc_feature: 310
caacgcgccaactcacataaattgactaaagctgaagaggaatcgcttatacagtggatattatctatggatcagcgtggagcagctccccgacca

SEQ ID NO: 2599 - DNA, 96 bp, Aspergillus thermomutatus
  misc_feature: 310
tggtagttgaaccgactgagcaaatctgaccagcgcgcttgccgctcgtttagtcgcctgcgaactgtgaagtactccagattcttatggtcagtg

SEQ ID NO: 2600 - DNA, 96 bp, Aspergillus thermomutatus
  misc_feature: 310
tctgccattccaatatagcctttaccttctcagggtccatgcatactcccttgcctgcttcgacgatgaagcccaagtacttggtgctcttgacct

SEQ ID NO: 2601 - DNA, 96 bp, Aspergillus thermomutatus
  misc_feature: 310
tcgtaatggcattcaatgctcggtaatcaacacagaaacgtagacctccaccaggtttgcgcacgagcagcaccggggctgcagctgacgagctgc

SEQ ID NO: 2602 - DNA, 96 bp, Aspergillus thermomutatus
  misc_feature: 310
tataaagcgccgatagaagttcgcaaagccgagaaacgatcgtacgcctcgagtggatgtaggggtctgccattctagtatagcttttaccttgtc

SEQ ID NO: 2603 - DNA, 96 bp, Aspergillus thermomutatus
  misc_feature: 310
taaagcgccgatagaagttcgcaaagccgagaaacgatcgtacgcctcgagtggatgtaggggtctgccattctagtatagcttttaccttgtcgg

SEQ ID NO: 2604 - DNA, 96 bp, Aspergillus thermomutatus
  misc_feature: 310
ctacctcttcacctacctcttcacctacctcttcacctacctcttcacctacctcttcacctacctcttcacctacctcttcacctacctcttcac

SEQ ID NO: 2605 - DNA, 96 bp, Aspergillus thermomutatus
  misc_feature: 310
acaacgcgccaactcacataaattgactaaagctgaagaggaatcgcttatacagtggatattatctatggatcagcgtggagcagctccccgacc

SEQ ID NO: 2606 - DNA, 96 bp, Aspergillus thermomutatus
  misc_feature: 310
gctggtagttgaaccgactgagcaaatctgaccagcgcgcttgccgctcgtttagtcgcctgcgaactgtgaagtactccagattcttatggtcag

SEQ ID NO: 2607 - DNA, 96 bp, Aspergillus thermomutatus
  misc_feature: 310
gctatacatactcaacaacgccggagaggtaaagcagtgcagatcttcgcagccagcatcaaggatattgagaaagcactgcaggtaaagacacat

SEQ ID NO: 2608 - DNA, 96 bp, Aspergillus thermomutatus
  misc_feature: 310
gactagatactccaccaggggtgcataatgtgttccatgttagtctgttgcgtcctgcggcgaacgatcctttcccaagccagttgagcactgact

SEQ ID NO: 2609 - DNA, 96 bp, Aspergillus thermomutatus
  misc_feature: 310
ctggtagttgaaccgactgagcaaatctgaccagcgcgcttgccgctcgtttagtcgcctgcgaactgtgaagtactccagattcttatggtcagt

SEQ ID NO: 2610 - DNA, 96 bp, Aspergillus thermomutatus
  misc_feature: 310
cgcaaggagtatctcgtcaaatggacaggttacgatcgtcctacgtgggaaccagctgtcaacctcgtcaatacggccgcgctggacgcttgggag

SEQ ID NO: 2611 - DNA, 96 bp, Aspergillus thermomutatus
  misc_feature: 310
cgccgcaaggagtatctcgtcaaatggacaggttacgatcgtcctacgtgggaaccagctgtcaacctcgtcaatacggccgcgctggacgcttgg

SEQ ID NO: 2612 - DNA, 96 bp, Aspergillus thermomutatus
  misc_feature: 310
cgcacctcctattctagttcttcagcgagttcttattgtacatacctagtcataggttttcctacggtctagcccgtaacattagaactcgctcct

SEQ ID NO: 2613 - DNA, 96 bp, Aspergillus thermomutatus
  misc_feature: 310
atctcgtcaaatggacaggttacgatcgtcctacgtgggaaccagctgtcaacctcgtcaatacggccgcgctggacgcttgggagcagcgagcgg

SEQ ID NO: 2614 - DNA, 96 bp, Aspergillus thermomutatus
  misc_feature: 310
atgttcactactgcgccgatacttgcgcagtttgaccctgatcgagacacggtcgtggagacggatgcttccaactgggctacgggtgcggtgatg

SEQ ID NO: 2615 - DNA, 96 bp, Aspergillus thermomutatus
  misc_feature: 310
accgctatgagagcctaagggaaagacgcagcagaagtaccatgacacgtgaccatcggcagagcagcggtatgctcggcagagcaatgatctgat

SEQ ID NO: 2616 - DNA, 96 bp, Aspergillus thermomutatus
  misc_feature: 309
ttgttctcttcgcgatagtgcgtcaggtctcgcagctaatttaccaggccgatagactagctggtagttgaaccgactgagcaaatctgaccagcg

SEQ ID NO: 2617 - DNA, 96 bp, Aspergillus thermomutatus
  misc_feature: 309
gccgcgcgctgaggtcggggtctgccattccaatatagcctttaccttctcagggtccatgcatactcccttgcctgcttcgacgatgaagcccaa

SEQ ID NO: 2618 - DNA, 96 bp, Aspergillus thermomutatus
  misc_feature: 309
ttctcgcgcagttgtaggcggtcatcgtcatcgtcaggcatatcttgttctcttcgcgatagtgcgtcaggtctcgcagctaatttaccaggccga

SEQ ID NO: 2619 - DNA, 96 bp, Aspergillus thermomutatus
  misc_feature: 309
tgttcactactgcgccgatacttgcgcagtttgaccctgatcgagacacggtcgtggagacggatgcttccaactgggctacgggtgcggtgatgt

SEQ ID NO: 2620 - DNA, 96 bp, Aspergillus thermomutatus
  misc_feature: 309
cctacctcttcacctacctcttcacctacctcttcacctacctcttcacctacctcttcacctacctcttcacctacctcttcacctacctcttca

SEQ ID NO: 2621 - DNA, 96 bp, Aspergillus thermomutatus
  misc_feature: 309
tctcgcgcagttgtaggcggtcatcgtcatcgtcaggcatatcttgttctcttcgcgatagtgcgtcaggtctcgcagctaatttaccaggccgat

SEQ ID NO: 2622 - DNA, 96 bp, Aspergillus thermomutatus
  misc_feature: 309
gccattccaatatagcctttaccttctcagggtccatgcatactcccttgcctgcttcgacgatgaagcccaagtacttggtgctcttgacctcga

SEQ ID NO: 2623 - DNA, 96 bp, Aspergillus thermomutatus
  misc_feature: 309
accctgtgcctacttctcgaaaaagaattcgcctgcggaatgcaactacgagatccacgataaggagctgctcgcgatcatcaacgcccttaggga

SEQ ID NO: 2624 - DNA, 96 bp, Aspergillus thermomutatus
  misc_feature: 309
gcttcgcaaacttctatcggcgctttatacggaacttctcagagatagtacgcccgcttacagccctcacgcacaaaggtacaccatttaaatgga

SEQ ID NO: 2625 - DNA, 96 bp, Aspergillus thermomutatus
  misc_feature: 309
tacgagtggctagttacccctttcggtatggcgaacgcacctagcaccttccaacggtacatcaactggacactaagagactttctggatgaattt

SEQ ID NO: 2626 - DNA, 96 bp, Aspergillus thermomutatus
  misc_feature: 309
gtttgatatcgtcactgaccataagaatctggagtacttcacagttcgcaggcgactaaacgagcggcaagcgcgctggtcagatttgctcagtcg

SEQ ID NO: 2627 - DNA, 96 bp, Aspergillus thermomutatus
  misc_feature: 309
cgactagatactccaccaggggtgcataatgtgttccatgttagtctgttgcgtcctgcggcgaacgatcctttcccaagccagttgagcactgac

SEQ ID NO: 2628 - DNA, 96 bp, Aspergillus thermomutatus
  misc_feature: 309
cttctcgcgcagttgtaggcggtcatcgtcatcgtcaggcatatcttgttctcttcgcgatagtgcgtcaggtctcgcagctaatttaccaggccg

SEQ ID NO: 2629 - DNA, 96 bp, Aspergillus thermomutatus
  misc_feature: 309
accaagctggatgtcatcgccgcctttcataagattcgtatcgcaccgggtgacgaatggttgactgcgtttcgcacccgatttggtctgtacgag

SEQ ID NO: 2630 - DNA, 96 bp, Aspergillus thermomutatus
  misc_feature: 309
cgcgcgcgcgcgagcattaggcggcagcggtccggggcaggccagcaggcaggggggcgcgcgcgcggcggtgaccagttggccggggccctcgag

SEQ ID NO: 2631 - DNA, 96 bp, Aspergillus thermomutatus
  misc_feature: 309
cgaggatcctgcaagagacgcacgactcagtgcttacaggccaccccgggaagaacacattgtacgcgatgatagcgcggaacttctactggccgg

SEQ ID NO: 2632 - DNA, 96 bp, Aspergillus thermomutatus
  misc_feature: 309
agtacaagcagttcttcgcgcgacatgctgtacaacgggccccatgggggctctgctctcttgccgtccggaccttctagcagttcgatgcggtgg

SEQ ID NO: 2633 - DNA, 96 bp, Aspergillus thermomutatus
  misc_feature: 308
ttggttttcactgatgggtcactctcggagcacagacgacaggtaaaacaggtacttgcgcgcctacaggaagcaggcctacagctagatattgac

SEQ ID NO: 2634 - DNA, 96 bp, Aspergillus thermomutatus
  misc_feature: 308
acggaccgccctagcaagaagctcgatgcccagcacgcgaagttcacagtactggaagctattggatcacatgcttaccgactagatactccacca

SEQ ID NO: 2635 - DNA, 96 bp, Aspergillus thermomutatus
  misc_feature: 308
ccttgatgctggctgcgaagatctgcactgctttacctctccggcgttgttgagtatgtatagcgaacccctgtgcgcttatctgtctgaccacta

SEQ ID NO: 2636 - DNA, 96 bp, Aspergillus thermomutatus
  misc_feature: 308
gtgacaacaaaatattggccatatcttgaacatgagatggtcggggagctgctccacgctgatccatagataatatccactgtataagcgattcct

SEQ ID NO: 2637 - DNA, 96 bp, Aspergillus thermomutatus
  misc_feature: 308
gtcgctggcgaagcaccgtagccacgtacggcaggtgctagagcggttacaggccgctgggttgcagctagacatcgacaagtgcgagttcgaggt

SEQ ID NO: 2638 - DNA, 96 bp, Aspergillus thermomutatus
  misc_feature: 308
ggtctcgcagctaatttaccaggccgatagactagctggtagttgaaccgactgagcaaatctgaccagcgcgcttgccgctcgtttagtcgcctg

SEQ ID NO: 2639 - DNA, 96 bp, Aspergillus thermomutatus
  misc_feature: 308
ctgtgacaacaaaatattggccatatcttgaacatgagatggtcggggagctgctccacgctgatccatagataatatccactgtataagcgattc

SEQ ID NO: 2640 - DNA, 96 bp, Aspergillus thermomutatus
  misc_feature: 308
ccccagggcgatgcgggggcagttcgtcggctttcttccgatcgaacgcccctaggaactcgtggtagtgcgctggtagcttatcggcagggtctg

SEQ ID NO: 2641 - DNA, 96 bp, Aspergillus thermomutatus
  misc_feature: 308
atcttcttcagctgctcgaaccgctgcgtgtgctcatacgtccatttaaatggtgtacctttgtgcgtgagggctgtaagcgggcgtactatctct

SEQ ID NO: 2642 - DNA, 96 bp, Aspergillus thermomutatus
  misc_feature: 308
agtatcggcgcagtagtgaacatcttcttcagctgctcgaaccgctgcgtgtgctcatacgtccatttaaatggtgtacctttgtgcgtgagggct

SEQ ID NO: 2643 - DNA, 96 bp, Aspergillus thermomutatus
  misc_feature: 307
tgacgtgattgtgctaggtacgccatggtagccgatgaatcggtcgattagcagctgcgctacggtctcggcatcagttcgctcacagggcactaa

SEQ ID NO: 2644 - DNA, 96 bp, Aspergillus thermomutatus
  misc_feature: 307
tgttgagtatgtatagcgaacccctgtgcgcttatctgtctgaccactaacttcggctcattctcaacccgttccactgcgaatccgtctgctaat

SEQ ID NO: 2645 - DNA, 96 bp, Aspergillus thermomutatus
  misc_feature: 307
tgcttgtactgcgtaagacgcttacagagctgctagagaagaacttcatacgtgtcagcagctcgtcagctgcagccccggtgctgctcgtgcgca

SEQ ID NO: 2646 - DNA, 96 bp, Aspergillus thermomutatus
  misc_feature: 307
gaggctccaggttgtatccgtggtccaggaagaacggacttacccccgtgctcgtagcgtccctgccatttatcgcaagctgggccatcggcagca

SEQ ID NO: 2647 - DNA, 96 bp, Aspergillus thermomutatus
  misc_feature: 307
tgatgctggctgcgaagatctgcactgctttacctctccggcgttgttgagtatgtatagcgaacccctgtgcgcttatctgtctgaccactaact

SEQ ID NO: 2648 - DNA, 96 bp, Aspergillus thermomutatus
  misc_feature: 307
gatgctcgtcggcctgtgccgcggcagcccaatgctcttccaatggtagttggctagggtcgtcgggtgctaccctagcgagcatcagtcggctca

SEQ ID NO: 2649 - DNA, 96 bp, Aspergillus thermomutatus
  misc_feature: 307
tcttcttcagctgctcgaaccgctgcgtgtgctcatacgtccatttaaatggtgtacctttgtgcgtgagggctgtaagcgggcgtactatctctg

SEQ ID NO: 2650 - DNA, 96 bp, Aspergillus thermomutatus
  misc_feature: 307
tctagcacctgccgtacgtggctacggtgcttcgccagcgacccatcagtgaagataagtacatcgtcgatgtacgcggaggcgaattcatccagg

SEQ ID NO: 2651 - DNA, 96 bp, Aspergillus thermomutatus
  misc_feature: 307
tatctcgtcaaatggacaggttacgatcgtcctacgtgggaaccagctgtcaacctcgtcaatacggccgcgctggacgcttgggagcagcgagcg

SEQ ID NO: 2652 - DNA, 96 bp, Aspergillus thermomutatus
  misc_feature: 307
ctgacgtgattgtgctaggtacgccatggtagccgatgaatcggtcgattagcagctgcgctacggtctcggcatcagttcgctcacagggcacta

SEQ ID NO: 2653 - DNA, 96 bp, Aspergillus thermomutatus
  misc_feature: 307
gtcgaagcaggcaagggagtatgcatggaccctgagaaggtaaaggctatattggaatggcagaccccgacctcagcgcgcggcgtgcggtcattc

SEQ ID NO: 2654 - DNA, 96 bp, Aspergillus thermomutatus
  misc_feature: 307
ccacggatacaacctggagcctctagaggttgaggggctagagcgaggggctaccgccattgatggggtccgtacgcccaaggagcgggccgaagc

SEQ ID NO: 2655 - DNA, 96 bp, Aspergillus thermomutatus
  misc_feature: 307
gataagtacatcgtcgatgtacgcggaggcgaattcatccaggaagtctcgaagggcccagttgatataccgttggaaggtactcggtgcgttcgc

SEQ ID NO: 2656 - DNA, 96 bp, Aspergillus thermomutatus
  misc_feature: 307
gccgcaaggagtatctcgtcaaatggacaggttacgatcgtcctacgtgggaaccagctgtcaacctcgtcaatacggccgcgctggacgcttggg

SEQ ID NO: 2657 - DNA, 96 bp, Aspergillus thermomutatus
  misc_feature: 307
cgcgcgaagaactgcttgtactgcgtaagacgcttacagagctgctagagaagaacttcatacgtgtcagcagctcgtcagctgcagccccggtgc

SEQ ID NO: 2658 - DNA, 96 bp, Aspergillus thermomutatus
  misc_feature: 307
gatgttcactactgcgccgatacttgcgcagtttgaccctgatcgagacacggtcgtggagacggatgcttccaactgggctacgggtgcggtgat

SEQ ID NO: 2659 - DNA, 96 bp, Aspergillus thermomutatus
  misc_feature: 307
catcgtcgaagcaggcaagggagtatgcatggaccctgagaaggtaaaggctatattggaatggcagaccccgacctcagcgcgcggcgtgcggtc

SEQ ID NO: 2660 - DNA, 96 bp, Aspergillus thermomutatus
  misc_feature: 307
ctactgcgccgatacttgcgcagtttgaccctgatcgagacacggtcgtggagacggatgcttccaactgggctacgggtgcggtgatgtcccaat

SEQ ID NO: 2661 - DNA, 96 bp, Aspergillus thermomutatus
  misc_feature: 307
aagcgccgatagaagttcgcaaagccgagaaacgatcgtacgcctcgagtggatgtaggggtctgccattctagtatagcttttaccttgtcgggg

SEQ ID NO: 2662 - DNA, 96 bp, Aspergillus thermomutatus
  misc_feature: 306
ttgatatcgtcactgaccataagaatctggagtacttcacagttcgcaggcgactaaacgagcggcaagcgcgctggtcagatttgctcagtcggt

SEQ ID NO: 2663 - DNA, 96 bp, Aspergillus thermomutatus
  misc_feature: 306
gtcatcgtcatcgtcaggcatatcttgttctcttcgcgatagtgcgtcaggtctcgcagctaatttaccaggccgatagactagctggtagttgaa

SEQ ID NO: 2664 - DNA, 96 bp, Aspergillus thermomutatus
  misc_feature: 306
tgccattccaatatagcctttaccttctcagggtccatgcatactcccttgcctgcttcgacgatgaagcccaagtacttggtgctcttgacctcg

SEQ ID NO: 2665 - DNA, 96 bp, Aspergillus thermomutatus
  misc_feature: 306
aaaagaattcgcctgcggaatgcaactacgagatccacgataaggagctgctcgcgatcatcaacgcccttagggaatgggagtcggagttagtca

SEQ ID NO: 2666 - DNA, 96 bp, Aspergillus thermomutatus
  misc_feature: 306
tgacccatcagtgaaaaccaatatatcatcaacgtacgcagatgcaaattcatccagaaagtctcttagtgtccagttgatgtaccgttggaaggt

SEQ ID NO: 2667 - DNA, 96 bp, Aspergillus thermomutatus
  misc_feature: 306
tcgcgcgacatgctgtacaacgggccccatgggggctctgctctcttgccgtccggaccttctagcagttcgatgcggtggtctacccctggccga

SEQ ID NO: 2668 - DNA, 96 bp, Aspergillus thermomutatus
  misc_feature: 306
tcgatcggaagaaagccgacgaactgcccccgcatcgccctggggtcgatcaccgaattgagttgactaagggcgaagacgggaagccgttagaac

SEQ ID NO: 2669 - DNA, 96 bp, Aspergillus thermomutatus
  misc_feature: 306
gttgttgagtatgtatagcgaacccctgtgcgcttatctgtctgaccactaacttcggctcattctcaacccgttccactgcgaatccgtctgcta

SEQ ID NO: 2670 - DNA, 96 bp, Aspergillus thermomutatus
  misc_feature: 306
caagccagttgagcactgactaccagccgcccgctgtgctagtcgacggcgaggccgaatatgaggttgaatggatactggatgagcgtgagaaac

SEQ ID NO: 2671 - DNA, 96 bp, Aspergillus thermomutatus
  misc_feature: 306
ctcgtcggcctgtgccgcggcagcccaatgctcttccaatggtagttggctagggtcgtcgggtgctaccctagcgagcatcagtcggctcaccac

SEQ ID NO: 2672 - DNA, 96 bp, Aspergillus thermomutatus
  misc_feature: 306
aggagtatctcgtcaaatggacaggttacgatcgtcctacgtgggaaccagctgtcaacctcgtcaatacggccgcgctggacgcttgggagcagc

SEQ ID NO: 2673 - DNA, 96 bp, Aspergillus thermomutatus
  misc_feature: 306
gcaaggagtatctcgtcaaatggacaggttacgatcgtcctacgtgggaaccagctgtcaacctcgtcaatacggccgcgctggacgcttgggagc

SEQ ID NO: 2674 - DNA, 96 bp, Aspergillus thermomutatus
  misc_feature: 306
gccagcatcaaggatattgagaaagcactgcaggtaaagacacatacagaccctgccgataagctaccagcgcactaccacgagttcctaggggcg

SEQ ID NO: 2675 - DNA, 96 bp, Aspergillus thermomutatus
  misc_feature: 306
gatgctggctgcgaagatctgcactgctttacctctccggcgttgttgagtatgtatagcgaacccctgtgcgcttatctgtctgaccactaactt

SEQ ID NO: 2676 - DNA, 96 bp, Aspergillus thermomutatus
  misc_feature: 306
gaagaacttcatacgtgtcagcagctcgtcagctgcagccccggtgctgctcgtgcgcaaacctggtggaggtctacgtttctgtgttgattaccg

SEQ ID NO: 2677 - DNA, 96 bp, Aspergillus thermomutatus
  misc_feature: 306
ctagagcgcatcgcgaaggcaaagtggttcaccaagctggatgtcatcgccgcctttcataagattcgtatcgcaccgggtgacgaatggttgact

SEQ ID NO: 2678 - DNA, 96 bp, Aspergillus thermomutatus
  misc_feature: 306
acagaccctgccgataagctaccagcgcactaccacgagttcctaggggcgttcgatcggaagaaagccgacgaactgcccccgcatcgccctggg

SEQ ID NO: 2679 - DNA, 96 bp, Aspergillus thermomutatus
  misc_feature: 306
ccagcatcaaggatattgagaaagcactgcaggtaaagacacatacagaccctgccgataagctaccagcgcactaccacgagttcctaggggcgt

SEQ ID NO: 2680 - DNA, 96 bp, Aspergillus thermomutatus
  misc_feature: 306
cagtacaagcagttcttcgcgcgacatgctgtacaacgggccccatgggggctctgctctcttgccgtccggaccttctagcagttcgatgcggtg

SEQ ID NO: 2681 - DNA, 96 bp, Aspergillus thermomutatus
  misc_feature: 306
acgagtggctagttacccctttcggtatggcgaacgcacctagcaccttccaacggtacatcaactggacactaagagactttctggatgaatttg

SEQ ID NO: 2682 - DNA, 96 bp, Aspergillus thermomutatus
  misc_feature: 306
agtggctagttacccctttcggtatggcgaacgcacctagcaccttccaacggtacatcaactggacactaagagactttctggatgaatttgcat

SEQ ID NO: 2683 - DNA, 96 bp, Aspergillus thermomutatus
  misc_feature: 305
tttgaccctgatcgagacacggtcgtggagacggatgcttccaactgggctacgggtgcggtgatgtcccaatacgacgatgacggcctgctgagg

SEQ ID NO: 2684 - DNA, 96 bp, Aspergillus thermomutatus
  misc_feature: 305
tgcgtatatcgatcgccgagtgttcggtctctccggatggtcatctgctgtaccgaggccgcaaatgggcccccgactctgagccgctacggacga

SEQ ID NO: 2685 - DNA, 96 bp, Aspergillus thermomutatus
  misc_feature: 305
tgcgcgagaagataatgattcacccgagcaagctactcacaaaggatcccccaccctcagtggtgagccgactgatgctcgctagggtagcacccg

SEQ ID NO: 2686 - DNA, 96 bp, Aspergillus thermomutatus
  misc_feature: 305
tgccgtacgtggctacggtgcttcgccagcgacccatcagtgaagataagtacatcgtcgatgtacgcggaggcgaattcatccaggaagtctcga

SEQ ID NO: 2687 - DNA, 96 bp, Aspergillus thermomutatus
  misc_feature: 305
ggcaggtgctagagcggttacaggccgctgggttgcagctagacatcgacaagtgcgagttcgaggtcaagagcacgaaatacctcgggtttatca

SEQ ID NO: 2688 - DNA, 96 bp, Aspergillus thermomutatus
  misc_feature: 305
acataaattgactaaagctgaagaggaatcgcttatacagtggatattatctatggatcagcgtggagcagctccccgaccatctcatgttcaaga

SEQ ID NO: 2689 - DNA, 96 bp, Aspergillus thermomutatus
  misc_feature: 305
gcgcgagaagataatgattcacccgagcaagctactcacaaaggatcccccaccctcagtggtgagccgactgatgctcgctagggtagcacccga

SEQ ID NO: 2690 - DNA, 96 bp, Aspergillus thermomutatus
  misc_feature: 305
gagtatctcgtcaaatggacaggttacgatcgtcctacgtgggaaccagctgtcaacctcgtcaatacggccgcgctggacgcttgggagcagcga

SEQ ID NO: 2691 - DNA, 96 bp, Aspergillus thermomutatus
  misc_feature: 305
accgcacgccgcgcgctgaggtcggggtctgccattccaatatagcctttaccttctcagggtccatgcatactcccttgcctgcttcgacgatga

SEQ ID NO: 2692 - DNA, 96 bp, Aspergillus thermomutatus
  misc_feature: 305
tcatcgtcatcgtcaggcatatcttgttctcttcgcgatagtgcgtcaggtctcgcagctaatttaccaggccgatagactagctggtagttgaac

SEQ ID NO: 2693 - DNA, 96 bp, Aspergillus thermomutatus
  misc_feature: 305
tcaccaagctggatgtcatcgccgcctttcataagattcgtatcgcaccgggtgacgaatggttgactgcgtttcgcacccgatttggtctgtacg

SEQ ID NO: 2694 - DNA, 96 bp, Aspergillus thermomutatus
  misc_feature: 305
gttgtaggcggtcatcgtcatcgtcaggcatatcttgttctcttcgcgatagtgcgtcaggtctcgcagctaatttaccaggccgatagactagct

SEQ ID NO: 2695 - DNA, 96 bp, Aspergillus thermomutatus
  misc_feature: 305
gtggctagttacccctttcggtatggcgaacgcacctagcaccttccaacggtacatcaactggacactaagagactttctggatgaatttgcatc

SEQ ID NO: 2696 - DNA, 96 bp, Aspergillus thermomutatus
  misc_feature: 305
cgcgagaagataatgattcacccgagcaagctactcacaaaggatcccccaccctcagtggtgagccgactgatgctcgctagggtagcacccgac

SEQ ID NO: 2697 - DNA, 96 bp, Aspergillus thermomutatus
  misc_feature: 305
gtatctcgtcaaatggacaggttacgatcgtcctacgtgggaaccagctgtcaacctcgtcaatacggccgcgctggacgcttgggagcagcgagc

SEQ ID NO: 2698 - DNA, 96 bp, Aspergillus thermomutatus
  misc_feature: 305
gtatcggcgcagtagtgaacatcttcttcagctgctcgaaccgctgcgtgtgctcatacgtccatttaaatggtgtacctttgtgcgtgagggctg

SEQ ID NO: 2699 - DNA, 96 bp, Aspergillus thermomutatus
  misc_feature: 305
ctttacctgcagtgctttctcaatatccttgatgctggctgcgaagatctgcactgctttacctctccggcgttgttgagtatgtatagcgaaccc

SEQ ID NO: 2700 - DNA, 96 bp, Aspergillus thermomutatus
  misc_feature: 305
gcgtatatcaaaggcgaagtggtttaccaaacttgatgtgatcgccgcattccacaagattcgcattgcacccggagatgaatggctgacggcctt

SEQ ID NO: 2701 - DNA, 96 bp, Aspergillus thermomutatus
  misc_feature: 305
gcacctcctattctagttcttcagcgagttcttattgtacatacctagtcataggttttcctacggtctagcccgtaacattagaactcgctcctc

SEQ ID NO: 2702 - DNA, 96 bp, Aspergillus thermomutatus
  misc_feature: 305
agatgctcgtcggcctgtgccgcggcagcccaatgctcttccaatggtagttggctagggtcgtcgggtgctaccctagcgagcatcagtcggctc

SEQ ID NO: 2703 - DNA, 96 bp, Aspergillus thermomutatus
  misc_feature: 305
gacccatcagtgaaaaccaatatatcatcaacgtacgcagatgcaaattcatccagaaagtctcttagtgtccagttgatgtaccgttggaaggtg

SEQ ID NO: 2704 - DNA, 96 bp, Aspergillus thermomutatus
  misc_feature: 305
cgatagactagctggtagttgaaccgactgagcaaatctgaccagcgcgcttgccgctcgtttagtcgcctgcgaactgtgaagtactccagattc

SEQ ID NO: 2705 - DNA, 96 bp, Aspergillus thermomutatus
  misc_feature: 305
cgtatatcaaaggcgaagtggtttaccaaacttgatgtgatcgccgcattccacaagattcgcattgcacccggagatgaatggctgacggccttc

SEQ ID NO: 2706 - DNA, 96 bp, Aspergillus thermomutatus
  misc_feature: 305
caacaaaatattggccatatcttgaacatgagatggtcggggagctgctccacgctgatccatagataatatccactgtataagcgattcctcttc

SEQ ID NO: 2707 - DNA, 96 bp, Aspergillus thermomutatus
  misc_feature: 305
catctgcgtacgttgatgatatattggttttcactgatgggtcactctcggagcacagacgacaggtaaaacaggtacttgcgcgcctacaggaag

SEQ ID NO: 2708 - DNA, 96 bp, Aspergillus thermomutatus
  misc_feature: 305
ctctagcacctgccgtacgtggctacggtgcttcgccagcgacccatcagtgaagataagtacatcgtcgatgtacgcggaggcgaattcatccag

SEQ ID NO: 2709 - DNA, 96 bp, Aspergillus thermomutatus
  misc_feature: 305
aaggagtatctcgtcaaatggacaggttacgatcgtcctacgtgggaaccagctgtcaacctcgtcaatacggccgcgctggacgcttgggagcag

SEQ ID NO: 2710 - DNA, 96 bp, Aspergillus thermomutatus
  misc_feature: 305
ctgatgggtcactctcggagcacagacgacaggtaaaacaggtacttgcgcgcctacaggaagcaggcctacagctagatattgacaagtgcgaat

SEQ ID NO: 2711 - DNA, 96 bp, Aspergillus thermomutatus
  misc_feature: 305
ctagttacccctttcggtatggcgaacgcacctagcaccttccaacggtacatcaactggacactaagagactttctggatgaatttgcatctgcg

SEQ ID NO: 2712 - DNA, 96 bp, Aspergillus thermomutatus
  misc_feature: 305
cctaccgaagtttgatatcgtcactgaccataagaatctggagtacttcacagttcgcaggcgactaaacgagcggcaagcgcgctggtcagattt

SEQ ID NO: 2713 - DNA, 96 bp, Aspergillus thermomutatus
  misc_feature: 305
aactcacataaattgactaaagctgaagaggaatcgcttatacagtggatattatctatggatcagcgtggagcagctccccgaccatctcatgtt

SEQ ID NO: 2714 - DNA, 96 bp, Aspergillus thermomutatus
  misc_feature: 304
ttcctaggcttcgcaaacttctatcggcgctttatacggaacttctcagagatagtacgcccgcttacagccctcacgcacaaaggtacaccattt

SEQ ID NO: 2715 - DNA, 96 bp, Aspergillus thermomutatus
  misc_feature: 304
gagcaatgatctgatgagaacagatcagtgatctgttgtgaacagatcagtgatctgttacagacatatcagtgatatgttcgaagggctatataa

SEQ ID NO: 2716 - DNA, 96 bp, Aspergillus thermomutatus
  misc_feature: 304
tggttttcactgatgggtcactctcggagcacagacgacaggtaaaacaggtacttgcgcgcctacaggaagcaggcctacagctagatattgaca

SEQ ID NO: 2717 - DNA, 96 bp, Aspergillus thermomutatus
  misc_feature: 304
gctcgtcggcctgtgccgcggcagcccaatgctcttccaatggtagttggctagggtcgtcgggtgctaccctagcgagcatcagtcggctcacca

SEQ ID NO: 2718 - DNA, 96 bp, Aspergillus thermomutatus
  misc_feature: 304
tgggtcgctggcgaagcaccgtagccacgtacggcaggtgctagagcggttacaggccgctgggttgcagctagacatcgacaagtgcgagttcga

SEQ ID NO: 2719 - DNA, 96 bp, Aspergillus thermomutatus
  misc_feature: 304
cacctcctattctagttcttcagcgagttcttattgtacatacctagtcataggttttcctacggtctagcccgtaacattagaactcgctcctca

SEQ ID NO: 2720 - DNA, 96 bp, Aspergillus thermomutatus
  misc_feature: 304
tcgctggcgaagcaccgtagccacgtacggcaggtgctagagcggttacaggccgctgggttgcagctagacatcgacaagtgcgagttcgaggtc

SEQ ID NO: 2721 - DNA, 96 bp, Aspergillus thermomutatus
  misc_feature: 304
ctagcacctgccgtacgtggctacggtgcttcgccagcgacccatcagtgaagataagtacatcgtcgatgtacgcggaggcgaattcatccagga

SEQ ID NO: 2722 - DNA, 96 bp, Aspergillus thermomutatus
  misc_feature: 304
tcaggtctcgcagctaatttaccaggccgatagactagctggtagttgaaccgactgagcaaatctgaccagcgcgcttgccgctcgtttagtcgc

SEQ ID NO: 2723 - DNA, 96 bp, Aspergillus thermomutatus
  misc_feature: 304
ggtgctagagcggttacaggccgctgggttgcagctagacatcgacaagtgcgagttcgaggtcaagagcacgaaatacctcgggtttatcattga

SEQ ID NO: 2724 - DNA, 96 bp, Aspergillus thermomutatus
  misc_feature: 304
tagtgaacatcttcttcagctgctcgaaccgctgcgtgtgctcatacgtccatttaaatggtgtacctttgtgcgtgagggctgtaagcgggcgta

SEQ ID NO: 2725 - DNA, 96 bp, Aspergillus thermomutatus
  misc_feature: 304
tagaaggtccggacggcaagagagcagagcccccatggggcccgttgtacagcatgtcgcgcgaagaactgcttgtactgcgtaagacgcttacag

SEQ ID NO: 2726 - DNA, 96 bp, Aspergillus thermomutatus
  misc_feature: 304
gtcaggtctcgcagctaatttaccaggccgatagactagctggtagttgaaccgactgagcaaatctgaccagcgcgcttgccgctcgtttagtcg

SEQ ID NO: 2727 - DNA, 96 bp, Aspergillus thermomutatus
  misc_feature: 304
catacgaacggaccgccctagcaagaagctcgatgcccagcacgcgaagttcacagtactggaagctattggatcacatgcttaccgactagatac

SEQ ID NO: 2728 - DNA, 96 bp, Aspergillus thermomutatus
  misc_feature: 304
gtagtgaacatcttcttcagctgctcgaaccgctgcgtgtgctcatacgtccatttaaatggtgtacctttgtgcgtgagggctgtaagcgggcgt

SEQ ID NO: 2729 - DNA, 96 bp, Aspergillus thermomutatus
  misc_feature: 304
gaacaagatatgcctgacgatgacgatgaccgcctacaactgcgcgagaagataatgattcacccgagcaagctactcacaaaggatcccccaccc

SEQ ID NO: 2730 - DNA, 96 bp, Aspergillus thermomutatus
  misc_feature: 304
catcgccgcctttcataagattcgtatcgcaccgggtgacgaatggttgactgcgtttcgcacccgatttggtctgtacgagtggctagttacccc

SEQ ID NO: 2731 - DNA, 96 bp, Aspergillus thermomutatus
  misc_feature: 304
ggatcccccaccctcagtggtgagccgactgatgctcgctagggtagcacccgacgaccctagccaactaccattggaagagcattgggctgccgc

SEQ ID NO: 2732 - DNA, 96 bp, Aspergillus thermomutatus
  misc_feature: 304
gcgttgttgagtatgtatagcgaacccctgtgcgcttatctgtctgaccactaacttcggctcattctcaacccgttccactgcgaatccgtctgc

SEQ ID NO: 2733 - DNA, 96 bp, Aspergillus thermomutatus
  misc_feature: 304
gcgtatatcgatcgccgagtgttcggtctctccggatggtcatctgctgtaccgaggccgcaaatgggcccccgactctgagccgctacggacgag

SEQ ID NO: 2734 - DNA, 96 bp, Aspergillus thermomutatus
  misc_feature: 304
gcgccaactcacataaattgactaaagctgaagaggaatcgcttatacagtggatattatctatggatcagcgtggagcagctccccgaccatctc

SEQ ID NO: 2735 - DNA, 96 bp, Aspergillus thermomutatus
  misc_feature: 304
gatcccccaccctcagtggtgagccgactgatgctcgctagggtagcacccgacgaccctagccaactaccattggaagagcattgggctgccgcg

SEQ ID NO: 2736 - DNA, 96 bp, Aspergillus thermomutatus
  misc_feature: 304
gatatcgtcactgaccataagaatctggagtacttcacagttcgcaggcgactaaacgagcggcaagcgcgctggtcagatttgctcagtcggttc

SEQ ID NO: 2737 - DNA, 96 bp, Aspergillus thermomutatus
  misc_feature: 304
gatagactagctggtagttgaaccgactgagcaaatctgaccagcgcgcttgccgctcgtttagtcgcctgcgaactgtgaagtactccagattct

SEQ ID NO: 2738 - DNA, 96 bp, Aspergillus thermomutatus
  misc_feature: 304
gacgaactgcccccgcatcgccctggggtcgatcaccgaattgagttgactaagggcgaagacgggaagccgttagaacccccatggggccctctg

SEQ ID NO: 2739 - DNA, 96 bp, Aspergillus thermomutatus
  misc_feature: 304
cggaccgccctagcaagaagctcgatgcccagcacgcgaagttcacagtactggaagctattggatcacatgcttaccgactagatactccaccag

SEQ ID NO: 2740 - DNA, 96 bp, Aspergillus thermomutatus
  misc_feature: 304
cacggatacaacctggagcctctagaggttgaggggctagagcgaggggctaccgccattgatggggtccgtacgcccaaggagcgggccgaagcg

SEQ ID NO: 2741 - DNA, 96 bp, Aspergillus thermomutatus
  misc_feature: 304
ccgagagtgacccatcagtgaaaaccaatatatcatcaacgtacgcagatgcaaattcatccagaaagtctcttagtgtccagttgatgtaccgtt

SEQ ID NO: 2742 - DNA, 96 bp, Aspergillus thermomutatus
  misc_feature: 304
aattcagtcgaacaagaagggagaatcttacttgcgatatctgctctgaaaaagaagcaaatttgcaatgttcgtgaagcttcacgcatttacaat

SEQ ID NO: 2743 - DNA, 96 bp, Aspergillus thermomutatus
  misc_feature: 303
tttgatatcgtcactgaccataagaatctggagtacttcacagttcgcaggcgactaaacgagcggcaagcgcgctggtcagatttgctcagtcgg

SEQ ID NO: 2744 - DNA, 96 bp, Aspergillus thermomutatus
  misc_feature: 303
tttcggtatggcgaacgcacctagcaccttccaacggtacatcaactggacactaagagactttctggatgaatttgcatctgcgtacgttgatga

SEQ ID NO: 2745 - DNA, 96 bp, Aspergillus thermomutatus
  misc_feature: 303
tttacctgcagtgctttctcaatatccttgatgctggctgcgaagatctgcactgctttacctctccggcgttgttgagtatgtatagcgaacccc

SEQ ID NO: 2746 - DNA, 96 bp, Aspergillus thermomutatus
  misc_feature: 303
ttggagcgtatatcaaaggcgaagtggtttaccaaacttgatgtgatcgccgcattccacaagattcgcattgcacccggagatgaatggctgacg

SEQ ID NO: 2747 - DNA, 96 bp, Aspergillus thermomutatus
  misc_feature: 303
gctggcgaagcaccgtagccacgtacggcaggtgctagagcggttacaggccgctgggttgcagctagacatcgacaagtgcgagttcgaggtcaa

SEQ ID NO: 2748 - DNA, 96 bp, Aspergillus thermomutatus
  misc_feature: 303
ttcttcgtaatggcattcaatgctcggtaatcaacacagaaacgtagacctccaccaggtttgcgcacgagcagcaccggggctgcagctgacgag

SEQ ID NO: 2749 - DNA, 96 bp, Aspergillus thermomutatus
  misc_feature: 303
gcatctgcgtacgttgatgatatattggttttcactgatgggtcactctcggagcacagacgacaggtaaaacaggtacttgcgcgcctacaggaa

SEQ ID NO: 2750 - DNA, 96 bp, Aspergillus thermomutatus
  misc_feature: 303
accttgctcctcctgtcattttgttctttcctgtcaccttgtccttttctgttgccttgtccttccctgtctccttgtcctttcttttaagggtaa

SEQ ID NO: 2751 - DNA, 96 bp, Aspergillus thermomutatus
  misc_feature: 303
cgctatacatactcaacaacgccggagaggtaaagcagtgcagatcttcgcagccagcatcaaggatattgagaaagcactgcaggtaaagacaca

SEQ ID NO: 2752 - DNA, 96 bp, Aspergillus thermomutatus
  misc_feature: 303
tgtaggcggtcatcgtcatcgtcaggcatatcttgttctcttcgcgatagtgcgtcaggtctcgcagctaatttaccaggccgatagactagctgg

SEQ ID NO: 2753 - DNA, 96 bp, Aspergillus thermomutatus
  misc_feature: 303
gagtggctagttacccctttcggtatggcgaacgcacctagcaccttccaacggtacatcaactggacactaagagactttctggatgaatttgca

SEQ ID NO: 2754 - DNA, 96 bp, Aspergillus thermomutatus
  misc_feature: 303
cgctggcgaagcaccgtagccacgtacggcaggtgctagagcggttacaggccgctgggttgcagctagacatcgacaagtgcgagttcgaggtca

SEQ ID NO: 2755 - DNA, 96 bp, Aspergillus thermomutatus
  misc_feature: 303
tcttgttctcttcgcgatagtgcgtcaggtctcgcagctaatttaccaggccgatagactagctggtagttgaaccgactgagcaaatctgaccag

SEQ ID NO: 2756 - DNA, 96 bp, Aspergillus thermomutatus
  misc_feature: 303
tcgcattgcacccggagatgaatggctgacggccttccgtacgcggtttggtctgtacgaatggttggtgaccccttttggcatggcgaacgcacc

SEQ ID NO: 2757 - DNA, 96 bp, Aspergillus thermomutatus
  misc_feature: 303
tcacccgagcaagctactcacaaaggatcccccaccctcagtggtgagccgactgatgctcgctagggtagcacccgacgaccctagccaactacc

SEQ ID NO: 2758 - DNA, 96 bp, Aspergillus thermomutatus
  misc_feature: 303
tatcggcgcagtagtgaacatcttcttcagctgctcgaaccgctgcgtgtgctcatacgtccatttaaatggtgtacctttgtgcgtgagggctgt

SEQ ID NO: 2759 - DNA, 96 bp, Aspergillus thermomutatus
  misc_feature: 303
tacagaccctgccgataagctaccagcgcactaccacgagttcctaggggcgttcgatcggaagaaagccgacgaactgcccccgcatcgccctgg

SEQ ID NO: 2760 - DNA, 96 bp, Aspergillus thermomutatus
  misc_feature: 303
cttggagcgtatatcaaaggcgaagtggtttaccaaacttgatgtgatcgccgcattccacaagattcgcattgcacccggagatgaatggctgac

SEQ ID NO: 2761 - DNA, 96 bp, Aspergillus thermomutatus
  misc_feature: 303
atctgcgtacgttgatgatatattggttttcactgatgggtcactctcggagcacagacgacaggtaaaacaggtacttgcgcgcctacaggaagc

SEQ ID NO: 2762 - DNA, 96 bp, Aspergillus thermomutatus
  misc_feature: 303
actcacataaattgactaaagctgaagaggaatcgcttatacagtggatattatctatggatcagcgtggagcagctccccgaccatctcatgttc

SEQ ID NO: 2763 - DNA, 96 bp, Aspergillus thermomutatus
  misc_feature: 303
ctttcttcgtaatggcattcaatgctcggtaatcaacacagaaacgtagacctccaccaggtttgcgcacgagcagcaccggggctgcagctgacg

SEQ ID NO: 2764 - DNA, 96 bp, Aspergillus thermomutatus
  misc_feature: 303
ccttgctcctcctgtcattttgttctttcctgtcaccttgtccttttctgttgccttgtccttccctgtctccttgtcctttcttttaagggtaag

SEQ ID NO: 2765 - DNA, 96 bp, Aspergillus thermomutatus
  misc_feature: 303
ctgagcacattagaatcattggaaacgcacattggaaacattggaaacgcacattggtagatacattggattggaagacgcacctaatgattgtgt

SEQ ID NO: 2766 - DNA, 96 bp, Aspergillus thermomutatus
  misc_feature: 303
ctagagcggttacaggccgctgggttgcagctagacatcgacaagtgcgagttcgaggtcaagagcacgaaatacctcgggtttatcattgaagct

SEQ ID NO: 2767 - DNA, 96 bp, Aspergillus thermomutatus
  misc_feature: 303
ctaccgaagtttgatatcgtcactgaccataagaatctggagtacttcacagttcgcaggcgactaaacgagcggcaagcgcgctggtcagatttg

SEQ ID NO: 2768 - DNA, 96 bp, Aspergillus thermomutatus
  misc_feature: 303
cgtataaagcgccgatagaagttcgcaaagccgagaaacgatcgtacgcctcgagtggatgtaggggtctgccattctagtatagcttttaccttg

SEQ ID NO: 2769 - DNA, 96 bp, Aspergillus thermomutatus
  misc_feature: 303
cctctagaggctccaggttgtatccgtggtccaggaagaacggacttacccccgtgctcgtagcgtccctgccatttatcgcaagctgggccatcg

SEQ ID NO: 2770 - DNA, 96 bp, Aspergillus thermomutatus
  misc_feature: 303
ccgtataaagcgccgatagaagttcgcaaagccgagaaacgatcgtacgcctcgagtggatgtaggggtctgccattctagtatagcttttacctt

SEQ ID NO: 2771 - DNA, 96 bp, Aspergillus thermomutatus
  misc_feature: 303
acggatacaacctggagcctctagaggttgaggggctagagcgaggggctaccgccattgatggggtccgtacgcccaaggagcgggccgaagcgg

SEQ ID NO: 2772 - DNA, 96 bp, Aspergillus thermomutatus
  misc_feature: 303
atcccccaccctcagtggtgagccgactgatgctcgctagggtagcacccgacgaccctagccaactaccattggaagagcattgggctgccgcgg

SEQ ID NO: 2773 - DNA, 96 bp, Aspergillus thermomutatus
  misc_feature: 303
ccaactcacataaattgactaaagctgaagaggaatcgcttatacagtggatattatctatggatcagcgtggagcagctccccgaccatctcatg

SEQ ID NO: 2774 - DNA, 96 bp, Aspergillus thermomutatus
  misc_feature: 303
agcgccgatagaagttcgcaaagccgagaaacgatcgtacgcctcgagtggatgtaggggtctgccattctagtatagcttttaccttgtcggggt

SEQ ID NO: 2775 - DNA, 96 bp, Aspergillus thermomutatus
  misc_feature: 302
ttgtaggcggtcatcgtcatcgtcaggcatatcttgttctcttcgcgatagtgcgtcaggtctcgcagctaatttaccaggccgatagactagctg

SEQ ID NO: 2776 - DNA, 96 bp, Aspergillus thermomutatus
  misc_feature: 302
ccgcacgccgcgcgctgaggtcggggtctgccattccaatatagcctttaccttctcagggtccatgcatactcccttgcctgcttcgacgatgaa

SEQ ID NO: 2777 - DNA, 96 bp, Aspergillus thermomutatus
  misc_feature: 302
gtgctcaactggcttgggaaaggatcgttcgccgcaggacgcaacagactaacatggaacacattatgcacccctggtggagtatctagtcggtaa

SEQ ID NO: 2778 - DNA, 96 bp, Aspergillus thermomutatus
  misc_feature: 302
gcgtttcgcacccgatttggtctgtacgagtggctagttacccctttcggtatggcgaacgcacctagcaccttccaacggtacatcaactggaca

SEQ ID NO: 2779 - DNA, 96 bp, Aspergillus thermomutatus
  misc_feature: 302
ctagaaggtccggacggcaagagagcagagcccccatggggcccgttgtacagcatgtcgcgcgaagaactgcttgtactgcgtaagacgcttaca

SEQ ID NO: 2780 - DNA, 96 bp, Aspergillus thermomutatus
  misc_feature: 302
tggttcaccaagctggatgtcatcgccgcctttcataagattcgtatcgcaccgggtgacgaatggttgactgcgtttcgcacccgatttggtctg

SEQ ID NO: 2781 - DNA, 96 bp, Aspergillus thermomutatus
  misc_feature: 302
caaggagtatctcgtcaaatggacaggttacgatcgtcctacgtgggaaccagctgtcaacctcgtcaatacggccgcgctggacgcttgggagca

SEQ ID NO: 2782 - DNA, 96 bp, Aspergillus thermomutatus
  misc_feature: 302
tgctcaactggcttgggaaaggatcgttcgccgcaggacgcaacagactaacatggaacacattatgcacccctggtggagtatctagtcggtaag

SEQ ID NO: 2783 - DNA, 96 bp, Aspergillus thermomutatus
  misc_feature: 302
cgccaactcacataaattgactaaagctgaagaggaatcgcttatacagtggatattatctatggatcagcgtggagcagctccccgaccatctca

SEQ ID NO: 2784 - DNA, 96 bp, Aspergillus thermomutatus
  misc_feature: 302
tcgaagcaggcaagggagtatgcatggaccctgagaaggtaaaggctatattggaatggcagaccccgacctcagcgcgcggcgtgcggtcattcc

SEQ ID NO: 2785 - DNA, 96 bp, Aspergillus thermomutatus
  misc_feature: 302
ccttggagcgtatatcaaaggcgaagtggtttaccaaacttgatgtgatcgccgcattccacaagattcgcattgcacccggagatgaatggctga

SEQ ID NO: 2786 - DNA, 96 bp, Aspergillus thermomutatus
  misc_feature: 302
cctcttcacctacctcttcacctacctcttcacctacctcttcacctacctcttcacctacctcttcacctacctcttcacctacctcttcaccta

SEQ ID NO: 2787 - DNA, 96 bp, Aspergillus thermomutatus
  misc_feature: 302
ctacaactgcgcgagaagataatgattcacccgagcaagctactcacaaaggatcccccaccctcagtggtgagccgactgatgctcgctagggta

SEQ ID NO: 2788 - DNA, 96 bp, Aspergillus thermomutatus
  misc_feature: 302
actagagcgcatcgcgaaggcaaagtggttcaccaagctggatgtcatcgccgcctttcataagattcgtatcgcaccgggtgacgaatggttgac

SEQ ID NO: 2789 - DNA, 96 bp, Aspergillus thermomutatus
  misc_feature: 302
gctagaaggtccggacggcaagagagcagagcccccatggggcccgttgtacagcatgtcgcgcgaagaactgcttgtactgcgtaagacgcttac

SEQ ID NO: 2790 - DNA, 96 bp, Aspergillus thermomutatus
  misc_feature: 302
cgttgagccgacgaaccatcttgaagtattccaggttgcggtggtccgtgatgagcttaaatcgcggcaggctgactaactccgactcccattccc

SEQ ID NO: 2791 - DNA, 96 bp, Aspergillus thermomutatus
  misc_feature: 302
caggtctcgcagctaatttaccaggccgatagactagctggtagttgaaccgactgagcaaatctgaccagcgcgcttgccgctcgtttagtcgcc

SEQ ID NO: 2792 - DNA, 96 bp, Aspergillus thermomutatus
  misc_feature: 302
catgtcgcgcggtgaattgcttgtcttacgaaagatgttgacagagctgctggagaagaactttatccgcattagtagctcttccgccgcggctcc

SEQ ID NO: 2793 - DNA, 96 bp, Aspergillus thermomutatus
  misc_feature: 302
gctagttacccctttcggtatggcgaacgcacctagcaccttccaacggtacatcaactggacactaagagactttctggatgaatttgcatctgc

SEQ ID NO: 2794 - DNA, 96 bp, Aspergillus thermomutatus
  misc_feature: 302
ctgcttgtactgcgtaagacgcttacagagctgctagagaagaacttcatacgtgtcagcagctcgtcagctgcagccccggtgctgctcgtgcgc

SEQ ID NO: 2795 - DNA, 96 bp, Aspergillus thermomutatus
  misc_feature: 302
cggcaggtgctagagcggttacaggccgctgggttgcagctagacatcgacaagtgcgagttcgaggtcaagagcacgaaatacctcgggtttatc

SEQ ID NO: 2796 - DNA, 96 bp, Aspergillus thermomutatus
  misc_feature: 302
gagcgcatcgcgaaggcaaagtggttcaccaagctggatgtcatcgccgcctttcataagattcgtatcgcaccgggtgacgaatggttgactgcg

SEQ ID NO: 2797 - DNA, 96 bp, Aspergillus thermomutatus
  misc_feature: 302
ccgaagtttgatatcgtcactgaccataagaatctggagtacttcacagttcgcaggcgactaaacgagcggcaagcgcgctggtcagatttgctc

SEQ ID NO: 2798 - DNA, 96 bp, Aspergillus thermomutatus
  misc_feature: 302
agtatctcgtcaaatggacaggttacgatcgtcctacgtgggaaccagctgtcaacctcgtcaatacggccgcgctggacgcttgggagcagcgag

SEQ ID NO: 2799 - DNA, 96 bp, Aspergillus thermomutatus
  misc_feature: 302
acggcaggtgctagagcggttacaggccgctgggttgcagctagacatcgacaagtgcgagttcgaggtcaagagcacgaaatacctcgggtttat

SEQ ID NO: 2800 - DNA, 96 bp, Aspergillus thermomutatus
  misc_feature: 302
aggtctcgcagctaatttaccaggccgatagactagctggtagttgaaccgactgagcaaatctgaccagcgcgcttgccgctcgtttagtcgcct

SEQ ID NO: 2801 - DNA, 96 bp, Aspergillus thermomutatus
  misc_feature: 302
agcgcatcgcgaaggcaaagtggttcaccaagctggatgtcatcgccgcctttcataagattcgtatcgcaccgggtgacgaatggttgactgcgt

SEQ ID NO: 2802 - DNA, 96 bp, Aspergillus thermomutatus
  misc_feature: 302
accgaagtttgatatcgtcactgaccataagaatctggagtacttcacagttcgcaggcgactaaacgagcggcaagcgcgctggtcagatttgct

SEQ ID NO: 2803 - DNA, 96 bp, Aspergillus thermomutatus
  misc_feature: 302
acgaactgcccccgcatcgccctggggtcgatcaccgaattgagttgactaagggcgaagacgggaagccgttagaacccccatggggccctctgt

SEQ ID NO: 2804 - DNA, 96 bp, Aspergillus thermomutatus
  misc_feature: 301
ggttttcactgatgggtcactctcggagcacagacgacaggtaaaacaggtacttgcgcgcctacaggaagcaggcctacagctagatattgacaa

SEQ ID NO: 2805 - DNA, 96 bp, Aspergillus thermomutatus
  misc_feature: 301
ttcgcaaacttctatcggcgctttatacggaacttctcagagatagtacgcccgcttacagccctcacgcacaaaggtacaccatttaaatggacg

SEQ ID NO: 2806 - DNA, 96 bp, Aspergillus thermomutatus
  misc_feature: 301
tgcgtttcgcacccgatttggtctgtacgagtggctagttacccctttcggtatggcgaacgcacctagcaccttccaacggtacatcaactggac

SEQ ID NO: 2807 - DNA, 96 bp, Aspergillus thermomutatus
  misc_feature: 301
tgatatcgtcactgaccataagaatctggagtacttcacagttcgcaggcgactaaacgagcggcaagcgcgctggtcagatttgctcagtcggtt

SEQ ID NO: 2808 - DNA, 96 bp, Aspergillus thermomutatus
  misc_feature: 301
tctttcttcgtaatggcattcaatgctcggtaatcaacacagaaacgtagacctccaccaggtttgcgcacgagcagcaccggggctgcagctgac

SEQ ID NO: 2809 - DNA, 96 bp, Aspergillus thermomutatus
  misc_feature: 301
tcttcagctgctcgaaccgctgcgtgtgctcatacgtccatttaaatggtgtacctttgtgcgtgagggctgtaagcgggcgtactatctctgaga

SEQ ID NO: 2810 - DNA, 96 bp, Aspergillus thermomutatus
  misc_feature: 301
tcctaggcttcgcaaacttctatcggcgctttatacggaacttctcagagatagtacgcccgcttacagccctcacgcacaaaggtacaccattta

SEQ ID NO: 2811 - DNA, 96 bp, Aspergillus thermomutatus
  misc_feature: 301
ctgcgtttcgcacccgatttggtctgtacgagtggctagttacccctttcggtatggcgaacgcacctagcaccttccaacggtacatcaactgga

SEQ ID NO: 2812 - DNA, 96 bp, Aspergillus thermomutatus
  misc_feature: 301
tactgcgccgatacttgcgcagtttgaccctgatcgagacacggtcgtggagacggatgcttccaactgggctacgggtgcggtgatgtcccaata

SEQ ID NO: 2813 - DNA, 96 bp, Aspergillus thermomutatus
  misc_feature: 301
gtttgaccctgatcgagacacggtcgtggagacggatgcttccaactgggctacgggtgcggtgatgtcccaatacgacgatgacggcctgctgag

SEQ ID NO: 2814 - DNA, 96 bp, Aspergillus thermomutatus
  misc_feature: 301
atgctcgtcggcctgtgccgcggcagcccaatgctcttccaatggtagttggctagggtcgtcgggtgctaccctagcgagcatcagtcggctcac

SEQ ID NO: 2815 - DNA, 96 bp, Aspergillus thermomutatus
  misc_feature: 301
ctcttcacctacctcttcacctacctcttcacctacctcttcacctacctcttcacctacctcttcacctacctcttcacctacctcttcacctac

SEQ ID NO: 2816 - DNA, 96 bp, Aspergillus thermomutatus
  misc_feature: 301
gctccgagagtgacccatcagtgaaaaccaatatatcatcaacgtacgcagatgcaaattcatccagaaagtctcttagtgtccagttgatgtacc

SEQ ID NO: 2817 - DNA, 96 bp, Aspergillus thermomutatus
  misc_feature: 301
ggcttcgcaaacttctatcggcgctttatacggaacttctcagagatagtacgcccgcttacagccctcacgcacaaaggtacaccatttaaatgg

SEQ ID NO: 2818 - DNA, 96 bp, Aspergillus thermomutatus
  misc_feature: 301
ggctgcgaagatctgcactgctttacctctccggcgttgttgagtatgtatagcgaacccctgtgcgcttatctgtctgaccactaacttcggctc

SEQ ID NO: 2819 - DNA, 96 bp, Aspergillus thermomutatus
  misc_feature: 301
agctgaacaacgcgccaactcacataaattgactaaagctgaagaggaatcgcttatacagtggatattatctatggatcagcgtggagcagctcc

SEQ ID NO: 2820 - DNA, 96 bp, Aspergillus thermomutatus
  misc_feature: 301
gctagagcggttacaggccgctgggttgcagctagacatcgacaagtgcgagttcgaggtcaagagcacgaaatacctcgggtttatcattgaagc

SEQ ID NO: 2821 - DNA, 96 bp, Aspergillus thermomutatus
  misc_feature: 301
gcgccgatagaagttcgcaaagccgagaaacgatcgtacgcctcgagtggatgtaggggtctgccattctagtatagcttttaccttgtcggggtc

SEQ ID NO: 2822 - DNA, 96 bp, Aspergillus thermomutatus
  misc_feature: 301
gaactgcttgtactgcgtaagacgcttacagagctgctagagaagaacttcatacgtgtcagcagctcgtcagctgcagccccggtgctgctcgtg

SEQ ID NO: 2823 - DNA, 96 bp, Aspergillus thermomutatus
  misc_feature: 301
agcacctgccgtacgtggctacggtgcttcgccagcgacccatcagtgaagataagtacatcgtcgatgtacgcggaggcgaattcatccaggaag

SEQ ID NO: 2824 - DNA, 96 bp, Aspergillus thermomutatus
  misc_feature: 301
cgccggagaggtaaagcagtgcagatcttcgcagccagcatcaaggatattgagaaagcactgcaggtaaagacacatacagaccctgccgataag

SEQ ID NO: 2825 - DNA, 96 bp, Aspergillus thermomutatus
  misc_feature: 301
cgttgttgagtatgtatagcgaacccctgtgcgcttatctgtctgaccactaacttcggctcattctcaacccgttccactgcgaatccgtctgct

SEQ ID NO: 2826 - DNA, 96 bp, Aspergillus thermomutatus
  misc_feature: 301
aactcaattcggtgatcgaccccagggcgatgcgggggcagttcgtcggctttcttccgatcgaacgcccctaggaactcgtggtagtgcgctggt

SEQ ID NO: 2827 - DNA, 96 bp, Aspergillus thermomutatus
  misc_feature: 301
acaacaaaatattggccatatcttgaacatgagatggtcggggagctgctccacgctgatccatagataatatccactgtataagcgattcctctt

SEQ ID NO: 2828 - DNA, 96 bp, Aspergillus thermomutatus
  misc_feature: 300
tttcgcacccgatttggtctgtacgagtggctagttacccctttcggtatggcgaacgcacctagcaccttccaacggtacatcaactggacacta

SEQ ID NO: 2829 - DNA, 96 bp, Aspergillus thermomutatus
  misc_feature: 300
cgccgcgcgctgaggtcggggtctgccattccaatatagcctttaccttctcagggtccatgcatactcccttgcctgcttcgacgatgaagccca

SEQ ID NO: 2830 - DNA, 96 bp, Aspergillus thermomutatus
  misc_feature: 300
tggagcgtatatcaaaggcgaagtggtttaccaaacttgatgtgatcgccgcattccacaagattcgcattgcacccggagatgaatggctgacgg

SEQ ID NO: 2831 - DNA, 96 bp, Aspergillus thermomutatus
  misc_feature: 300
tgctggctgcgaagatctgcactgctttacctctccggcgttgttgagtatgtatagcgaacccctgtgcgcttatctgtctgaccactaacttcg

SEQ ID NO: 2832 - DNA, 96 bp, Aspergillus thermomutatus
  misc_feature: 300
tctcgtcaaatggacaggttacgatcgtcctacgtgggaaccagctgtcaacctcgtcaatacggccgcgctggacgcttgggagcagcgagcggg

SEQ ID NO: 2833 - DNA, 96 bp, Aspergillus thermomutatus
  misc_feature: 300
tcgctatacatactcaacaacgccggagaggtaaagcagtgcagatcttcgcagccagcatcaaggatattgagaaagcactgcaggtaaagacac

SEQ ID NO: 2834 - DNA, 96 bp, Aspergillus thermomutatus
  misc_feature: 300
tccgtataaagcgccgatagaagttcgcaaagccgagaaacgatcgtacgcctcgagtggatgtaggggtctgccattctagtatagcttttacct

SEQ ID NO: 2835 - DNA, 96 bp, Aspergillus thermomutatus
  misc_feature: 300
tcacatctattgagtgtatcaactctcaaggatgggctttaccaccatgtattatcttcaagggaacagtccatattgagggctggtatcaagatg

SEQ ID NO: 2836 - DNA, 96 bp, Aspergillus thermomutatus
  misc_feature: 300
cgaatgggtcacatctattgagtgtatcaactctcaaggatgggctttaccaccatgtattatcttcaagggaacagtccatattgagggctggta

SEQ ID NO: 2837 - DNA, 96 bp, Aspergillus thermomutatus
  misc_feature: 300
gttcgctatacatactcaacaacgccggagaggtaaagcagtgcagatcttcgcagccagcatcaaggatattgagaaagcactgcaggtaaagac

SEQ ID NO: 2838 - DNA, 96 bp, Aspergillus thermomutatus
  misc_feature: 300
gtcggggtctgccattccaatatagcctttaccttctcagggtccatgcatactcccttgcctgcttcgacgatgaagcccaagtacttggtgctc

SEQ ID NO: 2839 - DNA, 96 bp, Aspergillus thermomutatus
  misc_feature: 300
cttcgcaaacttctatcggcgctttatacggaacttctcagagatagtacgcccgcttacagccctcacgcacaaaggtacaccatttaaatggac

SEQ ID NO: 2840 - DNA, 96 bp, Aspergillus thermomutatus
  misc_feature: 300
ctaccattgaatgtatcaatacttctggatgggctctaccacctatgatcatctttactggcaaagtccatcaatcccaatggtatcaagatatac

SEQ ID NO: 2841 - DNA, 96 bp, Aspergillus thermomutatus
  misc_feature: 300
gtaggcggtcatcgtcatcgtcaggcatatcttgttctcttcgcgatagtgcgtcaggtctcgcagctaatttaccaggccgatagactagctggt

SEQ ID NO: 2842 - DNA, 96 bp, Aspergillus thermomutatus
  misc_feature: 300
agaagaacttcatacgtgtcagcagctcgtcagctgcagccccggtgctgctcgtgcgcaaacctggtggaggtctacgtttctgtgttgattacc

SEQ ID NO: 2843 - DNA, 96 bp, Aspergillus thermomutatus
  misc_feature: 300
gctgaacaacgcgccaactcacataaattgactaaagctgaagaggaatcgcttatacagtggatattatctatggatcagcgtggagcagctccc

SEQ ID NO: 2844 - DNA, 96 bp, Aspergillus thermomutatus
  misc_feature: 300
gagctgatcagcctaccgaagtttgatatcgtcactgaccataagaatctggagtacttcacagttcgcaggcgactaaacgagcggcaagcgcgc

SEQ ID NO: 2845 - DNA, 96 bp, Aspergillus thermomutatus
  misc_feature: 300
gcagtgctttctcaatatccttgatgctggctgcgaagatctgcactgctttacctctccggcgttgttgagtatgtatagcgaacccctgtgcgc

SEQ ID NO: 2846 - DNA, 96 bp, Aspergillus thermomutatus
  misc_feature: 300
agccagcatcaaggatattgagaaagcactgcaggtaaagacacatacagaccctgccgataagctaccagcgcactaccacgagttcctaggggc

SEQ ID NO: 2847 - DNA, 96 bp, Aspergillus thermomutatus
  misc_feature: 300
gcatgtcgcgcggtgaattgcttgtcttacgaaagatgttgacagagctgctggagaagaactttatccgcattagtagctcttccgccgcggctc

SEQ ID NO: 2848 - DNA, 96 bp, Aspergillus thermomutatus
  misc_feature: 300
agagcgcatcgcgaaggcaaagtggttcaccaagctggatgtcatcgccgcctttcataagattcgtatcgcaccgggtgacgaatggttgactgc

SEQ ID NO: 2849 - DNA, 96 bp, Aspergillus thermomutatus
  misc_feature: 300
gagcacattagaatcattggaaacgcacattggaaacattggaaacgcacattggtagatacattggattggaagacgcacctaatgattgtgtag

SEQ ID NO: 2850 - DNA, 96 bp, Aspergillus thermomutatus
  misc_feature: 300
ctttcggtatggcgaacgcacctagcaccttccaacggtacatcaactggacactaagagactttctggatgaatttgcatctgcgtacgttgatg

SEQ ID NO: 2851 - DNA, 96 bp, Aspergillus thermomutatus
  misc_feature: 300
aggcggtcatcgtcatcgtcaggcatatcttgttctcttcgcgatagtgcgtcaggtctcgcagctaatttaccaggccgatagactagctggtag

SEQ ID NO: 2852 - DNA, 96 bp, Aspergillus thermomutatus
  misc_feature: 300
cggggtctgccattccaatatagcctttaccttctcagggtccatgcatactcccttgcctgcttcgacgatgaagcccaagtacttggtgctctt

SEQ ID NO: 2853 - DNA, 96 bp, Aspergillus thermomutatus
  misc_feature: 300
aggatcccccaccctcagtggtgagccgactgatgctcgctagggtagcacccgacgaccctagccaactaccattggaagagcattgggctgccg

SEQ ID NO: 2854 - DNA, 96 bp, Aspergillus thermomutatus
  misc_feature: 300
agaatgagccgaagttagtggtcagacagataagcgcacaggggttcgctatacatactcaacaacgccggagaggtaaagcagtgcagatcttcg

SEQ ID NO: 2855 - DNA, 96 bp, Aspergillus thermomutatus
  misc_feature: 300
ccgtgctcgtagcgtccctgccatttatcgcaagctgggccatcggcagcagcgacttccaattagactgggcgtagttgcagaagttccgcaggt

SEQ ID NO: 2856 - DNA, 96 bp, Aspergillus thermomutatus
  misc_feature: 300
attgcacccggagatgaatggctgacggccttccgtacgcggtttggtctgtacgaatggttggtgaccccttttggcatggcgaacgcaccgagt

SEQ ID NO: 2857 - DNA, 96 bp, Aspergillus thermomutatus
  misc_feature: 300
acccctttcggtatggcgaacgcacctagcaccttccaacggtacatcaactggacactaagagactttctggatgaatttgcatctgcgtacgtt

SEQ ID NO: 2858 - DNA, 96 bp, Aspergillus thermomutatus
  misc_feature: 299
tttcttcgtaatggcattcaatgctcggtaatcaacacagaaacgtagacctccaccaggtttgcgcacgagcagcaccggggctgcagctgacga

SEQ ID NO: 2859 - DNA, 96 bp, Aspergillus thermomutatus
  misc_feature: 299
tatcgtcactgaccataagaatctggagtacttcacagttcgcaggcgactaaacgagcggcaagcgcgctggtcagatttgctcagtcggttcaa

SEQ ID NO: 2860 - DNA, 96 bp, Aspergillus thermomutatus
  misc_feature: 299
tcacataaattgactaaagctgaagaggaatcgcttatacagtggatattatctatggatcagcgtggagcagctccccgaccatctcatgttcaa

SEQ ID NO: 2861 - DNA, 96 bp, Aspergillus thermomutatus
  misc_feature: 299
ttcgtaatggcattcaatgctcggtaatcaacacagaaacgtagacctccaccaggtttgcgcacgagcagcaccggggctgcagctgacgagctg

SEQ ID NO: 2862 - DNA, 96 bp, Aspergillus thermomutatus
  misc_feature: 299
tggctagttacccctttcggtatggcgaacgcacctagcaccttccaacggtacatcaactggacactaagagactttctggatgaatttgcatct

SEQ ID NO: 2863 - DNA, 96 bp, Aspergillus thermomutatus
  misc_feature: 299
tgctcgtcggcctgtgccgcggcagcccaatgctcttccaatggtagttggctagggtcgtcgggtgctaccctagcgagcatcagtcggctcacc

SEQ ID NO: 2864 - DNA, 96 bp, Aspergillus thermomutatus
  misc_feature: 299
tgcgaagatctgcactgctttacctctccggcgttgttgagtatgtatagcgaacccctgtgcgcttatctgtctgaccactaacttcggctcatt

SEQ ID NO: 2865 - DNA, 96 bp, Aspergillus thermomutatus
  misc_feature: 299
tgatcagcctaccgaagtttgatatcgtcactgaccataagaatctggagtacttcacagttcgcaggcgactaaacgagcggcaagcgcgctggt

SEQ ID NO: 2866 - DNA, 96 bp, Aspergillus thermomutatus
  misc_feature: 299
gctgcgaagatctgcactgctttacctctccggcgttgttgagtatgtatagcgaacccctgtgcgcttatctgtctgaccactaacttcggctca

SEQ ID NO: 2867 - DNA, 96 bp, Aspergillus thermomutatus
  misc_feature: 299
caccaagctggatgtcatcgccgcctttcataagattcgtatcgcaccgggtgacgaatggttgactgcgtttcgcacccgatttggtctgtacga

SEQ ID NO: 2868 - DNA, 96 bp, Aspergillus thermomutatus
  misc_feature: 299
gaacaacgcgccaactcacataaattgactaaagctgaagaggaatcgcttatacagtggatattatctatggatcagcgtggagcagctccccga

SEQ ID NO: 2869 - DNA, 96 bp, Aspergillus thermomutatus
  misc_feature: 299
taggcggtcatcgtcatcgtcaggcatatcttgttctcttcgcgatagtgcgtcaggtctcgcagctaatttaccaggccgatagactagctggta

SEQ ID NO: 2870 - DNA, 96 bp, Aspergillus thermomutatus
  misc_feature: 299
ccggacggcaagagagcagagcccccatggggcccgttgtacagcatgtcgcgcgaagaactgcttgtactgcgtaagacgcttacagagctgcta

SEQ ID NO: 2871 - DNA, 96 bp, Aspergillus thermomutatus
  misc_feature: 299
tagagcgcatcgcgaaggcaaagtggttcaccaagctggatgtcatcgccgcctttcataagattcgtatcgcaccgggtgacgaatggttgactg

SEQ ID NO: 2872 - DNA, 96 bp, Aspergillus thermomutatus
  misc_feature: 299
ggagcgtatatcaaaggcgaagtggtttaccaaacttgatgtgatcgccgcattccacaagattcgcattgcacccggagatgaatggctgacggc

SEQ ID NO: 2873 - DNA, 96 bp, Aspergillus thermomutatus
  misc_feature: 299
gctggatgtcatcgccgcctttcataagattcgtatcgcaccgggtgacgaatggttgactgcgtttcgcacccgatttggtctgtacgagtggct

SEQ ID NO: 2874 - DNA, 96 bp, Aspergillus thermomutatus
  misc_feature: 299
gaacttcatacgtgtcagcagctcgtcagctgcagccccggtgctgctcgtgcgcaaacctggtggaggtctacgtttctgtgttgattaccgagc

SEQ ID NO: 2875 - DNA, 96 bp, Aspergillus thermomutatus
  misc_feature: 299
gcgcatcgcgaaggcaaagtggttcaccaagctggatgtcatcgccgcctttcataagattcgtatcgcaccgggtgacgaatggttgactgcgtt

SEQ ID NO: 2876 - DNA, 96 bp, Aspergillus thermomutatus
  misc_feature: 299
gcgaatgggtcacatctattgagtgtatcaactctcaaggatgggctttaccaccatgtattatcttcaagggaacagtccatattgagggctggt

SEQ ID NO: 2877 - DNA, 96 bp, Aspergillus thermomutatus
  misc_feature: 299
gcataccgctgctctgccgatggtcacgtgtcatggtacttctgctgcgtctttcccttaggctctcatagcggtcagtccttgtctgatcgactg

SEQ ID NO: 2878 - DNA, 96 bp, Aspergillus thermomutatus
  misc_feature: 299
gcacctgccgtacgtggctacggtgcttcgccagcgacccatcagtgaagataagtacatcgtcgatgtacgcggaggcgaattcatccaggaagt

SEQ ID NO: 2879 - DNA, 96 bp, Aspergillus thermomutatus
  misc_feature: 299
acgcgccaactcacataaattgactaaagctgaagaggaatcgcttatacagtggatattatctatggatcagcgtggagcagctccccgaccatc

SEQ ID NO: 2880 - DNA, 96 bp, Aspergillus thermomutatus
  misc_feature: 299
gaaagccgacgaactgcccccgcatcgccctggggtcgatcaccgaattgagttgactaagggcgaagacgggaagccgttagaacccccatgggg

SEQ ID NO: 2881 - DNA, 96 bp, Aspergillus thermomutatus
  misc_feature: 299
cttcgtaatggcattcaatgctcggtaatcaacacagaaacgtagacctccaccaggtttgcgcacgagcagcaccggggctgcagctgacgagct

SEQ ID NO: 2882 - DNA, 96 bp, Aspergillus thermomutatus
  misc_feature: 299
agcaatgatctgatgagaacagatcagtgatctgttgtgaacagatcagtgatctgttacagacatatcagtgatatgttcgaagggctatataag

SEQ ID NO: 2883 - DNA, 96 bp, Aspergillus thermomutatus
  misc_feature: 299
ctgcgaagatctgcactgctttacctctccggcgttgttgagtatgtatagcgaacccctgtgcgcttatctgtctgaccactaacttcggctcat

SEQ ID NO: 2884 - DNA, 96 bp, Aspergillus thermomutatus
  misc_feature: 299
cggacggcaagagagcagagcccccatggggcccgttgtacagcatgtcgcgcgaagaactgcttgtactgcgtaagacgcttacagagctgctag

SEQ ID NO: 2885 - DNA, 96 bp, Aspergillus thermomutatus
  misc_feature: 299
ctaccttgctcctcctgtcattttgttctttcctgtcaccttgtccttttctgttgccttgtccttccctgtctccttgtcctttcttttaagggt

SEQ ID NO: 2886 - DNA, 96 bp, Aspergillus thermomutatus
  misc_feature: 299
aagccagttgagcactgactaccagccgcccgctgtgctagtcgacggcgaggccgaatatgaggttgaatggatactggatgagcgtgagaaacg

SEQ ID NO: 2887 - DNA, 96 bp, Aspergillus thermomutatus
  misc_feature: 299
cgcgccaactcacataaattgactaaagctgaagaggaatcgcttatacagtggatattatctatggatcagcgtggagcagctccccgaccatct

SEQ ID NO: 2888 - DNA, 96 bp, Aspergillus thermomutatus
  misc_feature: 299
ccgcgcgcacctcctattctagttcttcagcgagttcttattgtacatacctagtcataggttttcctacggtctagcccgtaacattagaactcg

SEQ ID NO: 2889 - DNA, 96 bp, Aspergillus thermomutatus
  misc_feature: 298
caggtgctcgtggtagtgcgcgggcagcttggtcttggggtcggtgtactgcttcgcttgcaaggccttattgatatccttgagggtgactgcgaa

SEQ ID NO: 2890 - DNA, 96 bp, Aspergillus thermomutatus
  misc_feature: 298
tcttcacctacctcttcacctacctcttcacctacctcttcacctacctcttcacctacctcttcacctacctcttcacctacctcttcacctacc

SEQ ID NO: 2891 - DNA, 96 bp, Aspergillus thermomutatus
  misc_feature: 298
cttaaaagaaaggacaaggagacagggaaggacaaggcaacagaaaaggacaaggtgacaggaaagaacaaaatgacaggaggagcaaggtagaga

SEQ ID NO: 2892 - DNA, 96 bp, Aspergillus thermomutatus
  misc_feature: 298
tcgtcaaatggacaggttacgatcgtcctacgtgggaaccagctgtcaacctcgtcaatacggccgcgctggacgcttgggagcagcgagcgggcc

SEQ ID NO: 2893 - DNA, 96 bp, Aspergillus thermomutatus
  misc_feature: 298
tcggggtctgccattccaatatagcctttaccttctcagggtccatgcatactcccttgcctgcttcgacgatgaagcccaagtacttggtgctct

SEQ ID NO: 2894 - DNA, 96 bp, Aspergillus thermomutatus
  misc_feature: 298
tcgctgtgacaacaaaatattggccatatcttgaacatgagatggtcggggagctgctccacgctgatccatagataatatccactgtataagcga

SEQ ID NO: 2895 - DNA, 96 bp, Aspergillus thermomutatus
  misc_feature: 298
agcgaatgaatgctacgttggaagcgtacctgcggaacttctgcaactacgcccagtctaattggaagtcgctgctgccgatggcccagcttgcga

SEQ ID NO: 2896 - DNA, 96 bp, Aspergillus thermomutatus
  misc_feature: 298
tcctttcccaagccagttgagcactgactaccagccgcccgctgtgctagtcgacggcgaggccgaatatgaggttgaatggatactggatgagcg

SEQ ID NO: 2897 - DNA, 96 bp, Aspergillus thermomutatus
  misc_feature: 298
cacatctattgagtgtatcaactctcaaggatgggctttaccaccatgtattatcttcaagggaacagtccatattgagggctggtatcaagatga

SEQ ID NO: 2898 - DNA, 96 bp, Aspergillus thermomutatus
  misc_feature: 298
taccgaagtttgatatcgtcactgaccataagaatctggagtacttcacagttcgcaggcgactaaacgagcggcaagcgcgctggtcagatttgc

SEQ ID NO: 2899 - DNA, 96 bp, Aspergillus thermomutatus
  misc_feature: 298
aaggatcccccaccctcagtggtgagccgactgatgctcgctagggtagcacccgacgaccctagccaactaccattggaagagcattgggctgcc

SEQ ID NO: 2900 - DNA, 96 bp, Aspergillus thermomutatus
  misc_feature: 298
gcgcacctcctattctagttcttcagcgagttcttattgtacatacctagtcataggttttcctacggtctagcccgtaacattagaactcgctcc

SEQ ID NO: 2901 - DNA, 96 bp, Aspergillus thermomutatus
  misc_feature: 298
gctggctgcgaagatctgcactgctttacctctccggcgttgttgagtatgtatagcgaacccctgtgcgcttatctgtctgaccactaacttcgg

SEQ ID NO: 2902 - DNA, 96 bp, Aspergillus thermomutatus
  misc_feature: 298
ctggctgcgaagatctgcactgctttacctctccggcgttgttgagtatgtatagcgaacccctgtgcgcttatctgtctgaccactaacttcggc

SEQ ID NO: 2903 - DNA, 96 bp, Aspergillus thermomutatus
  misc_feature: 298
ctcgtcaaatggacaggttacgatcgtcctacgtgggaaccagctgtcaacctcgtcaatacggccgcgctggacgcttgggagcagcgagcgggc

SEQ ID NO: 2904 - DNA, 96 bp, Aspergillus thermomutatus
  misc_feature: 298
ctgatcagcctaccgaagtttgatatcgtcactgaccataagaatctggagtacttcacagttcgcaggcgactaaacgagcggcaagcgcgctgg

SEQ ID NO: 2905 - DNA, 96 bp, Aspergillus thermomutatus
  misc_feature: 298
cattgcacccggagatgaatggctgacggccttccgtacgcggtttggtctgtacgaatggttggtgaccccttttggcatggcgaacgcaccgag

SEQ ID NO: 2906 - DNA, 96 bp, Aspergillus thermomutatus
  misc_feature: 298
catcagtgaaaaccaatatatcatcaacgtacgcagatgcaaattcatccagaaagtctcttagtgtccagttgatgtaccgttggaaggtgctag

SEQ ID NO: 2907 - DNA, 96 bp, Aspergillus thermomutatus
  misc_feature: 298
cgtcgaagcaggcaagggagtatgcatggaccctgagaaggtaaaggctatattggaatggcagaccccgacctcagcgcgcggcgtgcggtcatt

SEQ ID NO: 2908 - DNA, 96 bp, Aspergillus thermomutatus
  misc_feature: 298
cgctgtgacaacaaaatattggccatatcttgaacatgagatggtcggggagctgctccacgctgatccatagataatatccactgtataagcgat

SEQ ID NO: 2909 - DNA, 96 bp, Aspergillus thermomutatus
  misc_feature: 298
cgcatcgcgaaggcaaagtggttcaccaagctggatgtcatcgccgcctttcataagattcgtatcgcaccgggtgacgaatggttgactgcgttt

SEQ ID NO: 2910 - DNA, 96 bp, Aspergillus thermomutatus
  misc_feature: 298
cgcagtacaagcagttcttcgcgcgacatgctgtacaacgggccccatgggggctctgctctcttgccgtccggaccttctagcagttcgatgcgg

SEQ ID NO: 2911 - DNA, 96 bp, Aspergillus thermomutatus
  misc_feature: 298
actgcttgtactgcgtaagacgcttacagagctgctagagaagaacttcatacgtgtcagcagctcgtcagctgcagccccggtgctgctcgtgcg

SEQ ID NO: 2912 - DNA, 96 bp, Aspergillus thermomutatus
  misc_feature: 298
cacgtacggcaggtgctagagcggttacaggccgctgggttgcagctagacatcgacaagtgcgagttcgaggtcaagagcacgaaatacctcggg

SEQ ID NO: 2913 - DNA, 96 bp, Aspergillus thermomutatus
  misc_feature: 297
ttgcacccggagatgaatggctgacggccttccgtacgcggtttggtctgtacgaatggttggtgaccccttttggcatggcgaacgcaccgagta

SEQ ID NO: 2914 - DNA, 96 bp, Aspergillus thermomutatus
  misc_feature: 297
tgtacagcatgtcgcgcgaagaactgcttgtactgcgtaagacgcttacagagctgctagagaagaacttcatacgtgtcagcagctcgtcagctg

SEQ ID NO: 2915 - DNA, 96 bp, Aspergillus thermomutatus
  misc_feature: 297
atcttgttctcttcgcgatagtgcgtcaggtctcgcagctaatttaccaggccgatagactagctggtagttgaaccgactgagcaaatctgacca

SEQ ID NO: 2916 - DNA, 96 bp, Aspergillus thermomutatus
  misc_feature: 297
aacttcatacgtgtcagcagctcgtcagctgcagccccggtgctgctcgtgcgcaaacctggtggaggtctacgtttctgtgttgattaccgagca

SEQ ID NO: 2917 - DNA, 96 bp, Aspergillus thermomutatus
  misc_feature: 297
tgatgggtcgctggcgaagcaccgtagccacgtacggcaggtgctagagcggttacaggccgctgggttgcagctagacatcgacaagtgcgagtt

SEQ ID NO: 2918 - DNA, 96 bp, Aspergillus thermomutatus
  misc_feature: 297
tgagcacattagaatcattggaaacgcacattggaaacattggaaacgcacattggtagatacattggattggaagacgcacctaatgattgtgta

SEQ ID NO: 2919 - DNA, 96 bp, Aspergillus thermomutatus
  misc_feature: 297
atcgtcgaagcaggcaagggagtatgcatggaccctgagaaggtaaaggctatattggaatggcagaccccgacctcagcgcgcggcgtgcggtca

SEQ ID NO: 2920 - DNA, 96 bp, Aspergillus thermomutatus
  misc_feature: 297
tcttcgtaatggcattcaatgctcggtaatcaacacagaaacgtagacctccaccaggtttgcgcacgagcagcaccggggctgcagctgacgagc

SEQ ID NO: 2921 - DNA, 96 bp, Aspergillus thermomutatus
  misc_feature: 297
tcgtcgaagcaggcaagggagtatgcatggaccctgagaaggtaaaggctatattggaatggcagaccccgacctcagcgcgcggcgtgcggtcat

SEQ ID NO: 2922 - DNA, 96 bp, Aspergillus thermomutatus
  misc_feature: 297
gcattgcacccggagatgaatggctgacggccttccgtacgcggtttggtctgtacgaatggttggtgaccccttttggcatggcgaacgcaccga

SEQ ID NO: 2923 - DNA, 96 bp, Aspergillus thermomutatus
  misc_feature: 297
ccaggtgctcgtggtagtgcgcgggcagcttggtcttggggtcggtgtactgcttcgcttgcaaggccttattgatatccttgagggtgactgcga

SEQ ID NO: 2924 - DNA, 96 bp, Aspergillus thermomutatus
  misc_feature: 297
taccttgctcctcctgtcattttgttctttcctgtcaccttgtccttttctgttgccttgtccttccctgtctccttgtcctttcttttaagggta

SEQ ID NO: 2925 - DNA, 96 bp, Aspergillus thermomutatus
  misc_feature: 297
cgtttcgcacccgatttggtctgtacgagtggctagttacccctttcggtatggcgaacgcacctagcaccttccaacggtacatcaactggacac

SEQ ID NO: 2926 - DNA, 96 bp, Aspergillus thermomutatus
  misc_feature: 297
cgcgctgaggtcggggtctgccattccaatatagcctttaccttctcagggtccatgcatactcccttgcctgcttcgacgatgaagcccaagtac

SEQ ID NO: 2927 - DNA, 96 bp, Aspergillus thermomutatus
  misc_feature: 297
acgccgcgcgctgaggtcggggtctgccattccaatatagcctttaccttctcagggtccatgcatactcccttgcctgcttcgacgatgaagccc

SEQ ID NO: 2928 - DNA, 96 bp, Aspergillus thermomutatus
  misc_feature: 297
ggctagttacccctttcggtatggcgaacgcacctagcaccttccaacggtacatcaactggacactaagagactttctggatgaatttgcatctg

SEQ ID NO: 2929 - DNA, 96 bp, Aspergillus thermomutatus
  misc_feature: 297
ggcggtcatcgtcatcgtcaggcatatcttgttctcttcgcgatagtgcgtcaggtctcgcagctaatttaccaggccgatagactagctggtagt

SEQ ID NO: 2930 - DNA, 96 bp, Aspergillus thermomutatus
  misc_feature: 297
cgcgcgcacctcctattctagttcttcagcgagttcttattgtacatacctagtcataggttttcctacggtctagcccgtaacattagaactcgc

SEQ ID NO: 2931 - DNA, 96 bp, Aspergillus thermomutatus
  misc_feature: 297
aactgcttgtactgcgtaagacgcttacagagctgctagagaagaacttcatacgtgtcagcagctcgtcagctgcagccccggtgctgctcgtgc

SEQ ID NO: 2932 - DNA, 96 bp, Aspergillus thermomutatus
  misc_feature: 297
gatgggtcgctggcgaagcaccgtagccacgtacggcaggtgctagagcggttacaggccgctgggttgcagctagacatcgacaagtgcgagttc

SEQ ID NO: 2933 - DNA, 96 bp, Aspergillus thermomutatus
  misc_feature: 297
cgcgcacctcctattctagttcttcagcgagttcttattgtacatacctagtcataggttttcctacggtctagcccgtaacattagaactcgctc

SEQ ID NO: 2934 - DNA, 96 bp, Aspergillus thermomutatus
  misc_feature: 297
agtttgatatcgtcactgaccataagaatctggagtacttcacagttcgcaggcgactaaacgagcggcaagcgcgctggtcagatttgctcagtc

SEQ ID NO: 2935 - DNA, 96 bp, Aspergillus thermomutatus
  misc_feature: 297
atgctggctgcgaagatctgcactgctttacctctccggcgttgttgagtatgtatagcgaacccctgtgcgcttatctgtctgaccactaacttc

SEQ ID NO: 2936 - DNA, 96 bp, Aspergillus thermomutatus
  misc_feature: 297
aatcggagctgatcagcctaccgaagtttgatatcgtcactgaccataagaatctggagtacttcacagttcgcaggcgactaaacgagcggcaag

SEQ ID NO: 2937 - DNA, 96 bp, Aspergillus thermomutatus
  misc_feature: 297
cgcacgccgcgcgctgaggtcggggtctgccattccaatatagcctttaccttctcagggtccatgcatactcccttgcctgcttcgacgatgaag

SEQ ID NO: 2938 - DNA, 96 bp, Aspergillus thermomutatus
  misc_feature: 297
ctgatgggtcgctggcgaagcaccgtagccacgtacggcaggtgctagagcggttacaggccgctgggttgcagctagacatcgacaagtgcgagt

SEQ ID NO: 2939 - DNA, 96 bp, Aspergillus thermomutatus
  misc_feature: 297
catcgcgaaggcaaagtggttcaccaagctggatgtcatcgccgcctttcataagattcgtatcgcaccgggtgacgaatggttgactgcgtttcg

SEQ ID NO: 2940 - DNA, 96 bp, Aspergillus thermomutatus
  misc_feature: 297
atcagtgaaaaccaatatatcatcaacgtacgcagatgcaaattcatccagaaagtctcttagtgtccagttgatgtaccgttggaaggtgctagg

SEQ ID NO: 2941 - DNA, 96 bp, Aspergillus thermomutatus
  misc_feature: 297
aggtgctcgtggtagtgcgcgggcagcttggtcttggggtcggtgtactgcttcgcttgcaaggccttattgatatccttgagggtgactgcgaat

SEQ ID NO: 2942 - DNA, 96 bp, Aspergillus thermomutatus
  misc_feature: 297
agcgtatatcaaaggcgaagtggtttaccaaacttgatgtgatcgccgcattccacaagattcgcattgcacccggagatgaatggctgacggcct

SEQ ID NO: 2943 - DNA, 96 bp, Aspergillus thermomutatus
  misc_feature: 296
gatgtaccgttggaaggtgctaggtgcgttcgccataccgaaaggggtaactagccactcgtacagaccaaatcgggtgcgaaacgcagtcaacca

SEQ ID NO: 2944 - DNA, 96 bp, Aspergillus thermomutatus
  misc_feature: 296
ctcacataaattgactaaagctgaagaggaatcgcttatacagtggatattatctatggatcagcgtggagcagctccccgaccatctcatgttca

SEQ ID NO: 2945 - DNA, 96 bp, Aspergillus thermomutatus
  misc_feature: 296
cagcctaccgaagtttgatatcgtcactgaccataagaatctggagtacttcacagttcgcaggcgactaaacgagcggcaagcgcgctggtcaga

SEQ ID NO: 2946 - DNA, 96 bp, Aspergillus thermomutatus
  misc_feature: 296
cgagaagataatgattcacccgagcaagctactcacaaaggatcccccaccctcagtggtgagccgactgatgctcgctagggtagcacccgacga

SEQ ID NO: 2947 - DNA, 96 bp, Aspergillus thermomutatus
  misc_feature: 296
tcactgaccataagaatctggagtacttcacagttcgcaggcgactaaacgagcggcaagcgcgctggtcagatttgctcagtcggttcaactacc

SEQ ID NO: 2948 - DNA, 96 bp, Aspergillus thermomutatus
  misc_feature: 296
acatacgaacggaccgccctagcaagaagctcgatgcccagcacgcgaagttcacagtactggaagctattggatcacatgcttaccgactagata

SEQ ID NO: 2949 - DNA, 96 bp, Aspergillus thermomutatus
  misc_feature: 296
aacgccggagaggtaaagcagtgcagatcttcgcagccagcatcaaggatattgagaaagcactgcaggtaaagacacatacagaccctgccgata

SEQ ID NO: 2950 - DNA, 96 bp, Aspergillus thermomutatus
  misc_feature: 296
tacctgcagtgctttctcaatatccttgatgctggctgcgaagatctgcactgctttacctctccggcgttgttgagtatgtatagcgaacccctg

SEQ ID NO: 2951 - DNA, 96 bp, Aspergillus thermomutatus
  misc_feature: 296
gtaagcatgtgatccaatagcttccagtactgtgaacttcgcgtgctgggcatcgagcttcttgctagggcggtccgttcgtatgttgcgcaggtc

SEQ ID NO: 2952 - DNA, 96 bp, Aspergillus thermomutatus
  misc_feature: 296
ctgaacaacgcgccaactcacataaattgactaaagctgaagaggaatcgcttatacagtggatattatctatggatcagcgtggagcagctcccc

SEQ ID NO: 2953 - DNA, 96 bp, Aspergillus thermomutatus
  misc_feature: 296
cacattagaatcattggaaacgcacattggaaacattggaaacgcacattggtagatacattggattggaagacgcacctaatgattgtgtagcgc

SEQ ID NO: 2954 - DNA, 96 bp, Aspergillus thermomutatus
  misc_feature: 296
gcgcgcacctcctattctagttcttcagcgagttcttattgtacatacctagtcataggttttcctacggtctagcccgtaacattagaactcgct

SEQ ID NO: 2955 - DNA, 96 bp, Aspergillus thermomutatus
  misc_feature: 296
gcatcgcgaaggcaaagtggttcaccaagctggatgtcatcgccgcctttcataagattcgtatcgcaccgggtgacgaatggttgactgcgtttc

SEQ ID NO: 2956 - DNA, 96 bp, Aspergillus thermomutatus
  misc_feature: 296
gcacattagaatcattggaaacgcacattggaaacattggaaacgcacattggtagatacattggattggaagacgcacctaatgattgtgtagcg

SEQ ID NO: 2957 - DNA, 96 bp, Aspergillus thermomutatus
  misc_feature: 296
cgagtggctagttacccctttcggtatggcgaacgcacctagcaccttccaacggtacatcaactggacactaagagactttctggatgaatttgc

SEQ ID NO: 2958 - DNA, 96 bp, Aspergillus thermomutatus
  misc_feature: 296
attggaaacgcacattggaaacattggaaacgcacattggtagatacattggattggaagacgcacctaatgattgtgtagcgcacattggaacag

SEQ ID NO: 2959 - DNA, 96 bp, Aspergillus thermomutatus
  misc_feature: 296
atgggtcgctggcgaagcaccgtagccacgtacggcaggtgctagagcggttacaggccgctgggttgcagctagacatcgacaagtgcgagttcg

SEQ ID NO: 2960 - DNA, 96 bp, Aspergillus thermomutatus
  misc_feature: 296
atacagaccctgccgataagctaccagcgcactaccacgagttcctaggggcgttcgatcggaagaaagccgacgaactgcccccgcatcgccctg

SEQ ID NO: 2961 - DNA, 96 bp, Aspergillus thermomutatus
  misc_feature: 296
agaaaggaaccccattcacatggacggaggagcacaccaatcggttcgagcagctaaagaagatgtttactaccgcgccgattctcatgcagtttg

SEQ ID NO: 2962 - DNA, 96 bp, Aspergillus thermomutatus
  misc_feature: 295
ttgcgaacttctatcggcgctttatacggaacttctctgacatagtacgaccgttgacggcgcttacacagaaaggaaccccattcacatggacgg

SEQ ID NO: 2963 - DNA, 96 bp, Aspergillus thermomutatus
  misc_feature: 295
ttgagaatgagccgaagttagtggtcagacagataagcgcacaggggttcgctatacatactcaacaacgccggagaggtaaagcagtgcagatct

SEQ ID NO: 2964 - DNA, 96 bp, Aspergillus thermomutatus
  misc_feature: 295
ttcccaagccagttgagcactgactaccagccgcccgctgtgctagtcgacggcgaggccgaatatgaggttgaatggatactggatgagcgtgag

SEQ ID NO: 2965 - DNA, 96 bp, Aspergillus thermomutatus
  misc_feature: 295
acgccggagaggtaaagcagtgcagatcttcgcagccagcatcaaggatattgagaaagcactgcaggtaaagacacatacagaccctgccgataa

SEQ ID NO: 2966 - DNA, 96 bp, Aspergillus thermomutatus
  misc_feature: 295
tggctgcgaagatctgcactgctttacctctccggcgttgttgagtatgtatagcgaacccctgtgcgcttatctgtctgaccactaacttcggct

SEQ ID NO: 2967 - DNA, 96 bp, Aspergillus thermomutatus
  misc_feature: 295
tgcacccggagatgaatggctgacggccttccgtacgcggtttggtctgtacgaatggttggtgaccccttttggcatggcgaacgcaccgagtac

SEQ ID NO: 2968 - DNA, 96 bp, Aspergillus thermomutatus
  misc_feature: 295
tgagaatgagccgaagttagtggtcagacagataagcgcacaggggttcgctatacatactcaacaacgccggagaggtaaagcagtgcagatctt

SEQ ID NO: 2969 - DNA, 96 bp, Aspergillus thermomutatus
  misc_feature: 295
atatcgtcactgaccataagaatctggagtacttcacagttcgcaggcgactaaacgagcggcaagcgcgctggtcagatttgctcagtcggttca

SEQ ID NO: 2970 - DNA, 96 bp, Aspergillus thermomutatus
  misc_feature: 295
aagaacttcatacgtgtcagcagctcgtcagctgcagccccggtgctgctcgtgcgcaaacctggtggaggtctacgtttctgtgttgattaccga

SEQ ID NO: 2971 - DNA, 96 bp, Aspergillus thermomutatus
  misc_feature: 295
tccttgatgctggctgcgaagatctgcactgctttacctctccggcgttgttgagtatgtatagcgaacccctgtgcgcttatctgtctgaccact

SEQ ID NO: 2972 - DNA, 96 bp, Aspergillus thermomutatus
  misc_feature: 295
ccgactagatactccaccaggggtgcataatgtgttccatgttagtctgttgcgtcctgcggcgaacgatcctttcccaagccagttgagcactga

SEQ ID NO: 2973 - DNA, 96 bp, Aspergillus thermomutatus
  misc_feature: 295
cactagagcgcatcgcgaaggcaaagtggttcaccaagctggatgtcatcgccgcctttcataagattcgtatcgcaccgggtgacgaatggttga

SEQ ID NO: 2974 - DNA, 96 bp, Aspergillus thermomutatus
  misc_feature: 295
tatcttgttctcttcgcgatagtgcgtcaggtctcgcagctaatttaccaggccgatagactagctggtagttgaaccgactgagcaaatctgacc

SEQ ID NO: 2975 - DNA, 96 bp, Aspergillus thermomutatus
  misc_feature: 295
cgtgctcgtagcgtccctgccatttatcgcaagctgggccatcggcagcagcgacttccaattagactgggcgtagttgcagaagttccgcaggta

SEQ ID NO: 2976 - DNA, 96 bp, Aspergillus thermomutatus
  misc_feature: 295
tacctcttcacctacctcttcacctacctcttcacctacctcttcacctacctcttcacctacctcttcacctacctcttcacctacctcttcacc

SEQ ID NO: 2977 - DNA, 96 bp, Aspergillus thermomutatus
  misc_feature: 295
taccattgaatgtatcaatacttctggatgggctctaccacctatgatcatctttactggcaaagtccatcaatcccaatggtatcaagatatacc

SEQ ID NO: 2978 - DNA, 96 bp, Aspergillus thermomutatus
  misc_feature: 295
acatctattgagtgtatcaactctcaaggatgggctttaccaccatgtattatcttcaagggaacagtccatattgagggctggtatcaagatgac

SEQ ID NO: 2979 - DNA, 96 bp, Aspergillus thermomutatus
  misc_feature: 295
gtcacatctattgagtgtatcaactctcaaggatgggctttaccaccatgtattatcttcaagggaacagtccatattgagggctggtatcaagat

SEQ ID NO: 2980 - DNA, 96 bp, Aspergillus thermomutatus
  misc_feature: 295
gagcgtatatcaaaggcgaagtggtttaccaaacttgatgtgatcgccgcattccacaagattcgcattgcacccggagatgaatggctgacggcc

SEQ ID NO: 2981 - DNA, 96 bp, Aspergillus thermomutatus
  misc_feature: 295
gcacgccgcgcgctgaggtcggggtctgccattccaatatagcctttaccttctcagggtccatgcatactcccttgcctgcttcgacgatgaagc

SEQ ID NO: 2982 - DNA, 96 bp, Aspergillus thermomutatus
  misc_feature: 295
gccggagaggtaaagcagtgcagatcttcgcagccagcatcaaggatattgagaaagcactgcaggtaaagacacatacagaccctgccgataagc

SEQ ID NO: 2983 - DNA, 96 bp, Aspergillus thermomutatus
  misc_feature: 295
gcgatacgaatcttatgaaaggcggcgatgacatccagcttggtgaaccactttgccttcgcgatgcgctctagtgtctcgttgatcagcggaagg

SEQ ID NO: 2984 - DNA, 96 bp, Aspergillus thermomutatus
  misc_feature: 295
atcgcgaaggcaaagtggttcaccaagctggatgtcatcgccgcctttcataagattcgtatcgcaccgggtgacgaatggttgactgcgtttcgc

SEQ ID NO: 2985 - DNA, 96 bp, Aspergillus thermomutatus
  misc_feature: 295
accgaaaggggtaactagccactcgtacagaccaaatcgggtgcgaaacgcagtcaaccattcgtcacccggtgcgatacgaatcttatgaaaggc

SEQ ID NO: 2986 - DNA, 96 bp, Aspergillus thermomutatus
  misc_feature: 295
gccaactcacataaattgactaaagctgaagaggaatcgcttatacagtggatattatctatggatcagcgtggagcagctccccgaccatctcat

SEQ ID NO: 2987 - DNA, 96 bp, Aspergillus thermomutatus
  misc_feature: 295
gcaggtgctagagcggttacaggccgctgggttgcagctagacatcgacaagtgcgagttcgaggtcaagagcacgaaatacctcgggtttatcat

SEQ ID NO: 2988 - DNA, 96 bp, Aspergillus thermomutatus
  misc_feature: 295
ctgcagtgctttctcaatatccttgatgctggctgcgaagatctgcactgctttacctctccggcgttgttgagtatgtatagcgaacccctgtgc

SEQ ID NO: 2989 - DNA, 96 bp, Aspergillus thermomutatus
  misc_feature: 295
gcaatgatctgatgagaacagatcagtgatctgttgtgaacagatcagtgatctgttacagacatatcagtgatatgttcgaagggctatataagg

SEQ ID NO: 2990 - DNA, 96 bp, Aspergillus thermomutatus
  misc_feature: 295
gaagtttgatatcgtcactgaccataagaatctggagtacttcacagttcgcaggcgactaaacgagcggcaagcgcgctggtcagatttgctcag

SEQ ID NO: 2991 - DNA, 96 bp, Aspergillus thermomutatus
  misc_feature: 295
agaacttcatacgtgtcagcagctcgtcagctgcagccccggtgctgctcgtgcgcaaacctggtggaggtctacgtttctgtgttgattaccgag

SEQ ID NO: 2992 - DNA, 96 bp, Aspergillus thermomutatus
  misc_feature: 295
aagaactgcttgtactgcgtaagacgcttacagagctgctagagaagaacttcatacgtgtcagcagctcgtcagctgcagccccggtgctgctcg

SEQ ID NO: 2993 - DNA, 96 bp, Aspergillus thermomutatus
  misc_feature: 295
ccacgtacggcaggtgctagagcggttacaggccgctgggttgcagctagacatcgacaagtgcgagttcgaggtcaagagcacgaaatacctcgg

SEQ ID NO: 2994 - DNA, 96 bp, Aspergillus thermomutatus
  misc_feature: 295
cccatcagtgaagataagtacatcgtcgatgtacgcggaggcgaattcatccaggaagtctcgaagggcccagttgatataccgttggaaggtact

SEQ ID NO: 2995 - DNA, 96 bp, Aspergillus thermomutatus
  misc_feature: 295
ccaagctggatgtcatcgccgcctttcataagattcgtatcgcaccgggtgacgaatggttgactgcgtttcgcacccgatttggtctgtacgagt

SEQ ID NO: 2996 - DNA, 96 bp, Aspergillus thermomutatus
  misc_feature: 295
caagaagctcgatgcccagcacgcgaagttcacagtactggaagctattggatcacatgcttaccgactagatactccaccaggggtgcataatgt

SEQ ID NO: 2997 - DNA, 96 bp, Aspergillus thermomutatus
  misc_feature: 295
agcctaccgaagtttgatatcgtcactgaccataagaatctggagtacttcacagttcgcaggcgactaaacgagcggcaagcgcgctggtcagat

SEQ ID NO: 2998 - DNA, 96 bp, Aspergillus thermomutatus
  misc_feature: 295
agatatgcctgacgatgacgatgaccgcctacaactgcgcgagaagataatgattcacccgagcaagctactcacaaaggatcccccaccctcagt

SEQ ID NO: 2999 - DNA, 96 bp, Aspergillus thermomutatus
  misc_feature: 294
tttcccaagccagttgagcactgactaccagccgcccgctgtgctagtcgacggcgaggccgaatatgaggttgaatggatactggatgagcgtga

SEQ ID NO: 3000 - DNA, 96 bp, Aspergillus thermomutatus
  misc_feature: 294
ttgtacagcatgtcgcgcgaagaactgcttgtactgcgtaagacgcttacagagctgctagagaagaacttcatacgtgtcagcagctcgtcagct

SEQ ID NO: 3001 - DNA, 96 bp, Aspergillus thermomutatus
  misc_feature: 294
ttgaccctgatcgagacacggtcgtggagacggatgcttccaactgggctacgggtgcggtgatgtcccaatacgacgatgacggcctgctgaggc

SEQ ID NO: 3002 - DNA, 96 bp, Aspergillus thermomutatus
  misc_feature: 294
ttctttgtgatcgcgttcaacgcgcggtagtcgacacagaatcgtaaccctccacctggcttgcgggcgaacagcaccggagccgcggcggaagag

SEQ ID NO: 3003 - DNA, 96 bp, Aspergillus thermomutatus
  misc_feature: 294
tagcacctgccgtacgtggctacggtgcttcgccagcgacccatcagtgaagataagtacatcgtcgatgtacgcggaggcgaattcatccaggaa

SEQ ID NO: 3004 - DNA, 96 bp, Aspergillus thermomutatus
  misc_feature: 294
cagcgacccatcagtgaagataagtacatcgtcgatgtacgcggaggcgaattcatccaggaagtctcgaagggcccagttgatataccgttggaa

SEQ ID NO: 3005 - DNA, 96 bp, Aspergillus thermomutatus
  misc_feature: 294
aatgattcacccgagcaagctactcacaaaggatcccccaccctcagtggtgagccgactgatgctcgctagggtagcacccgacgaccctagcca

SEQ ID NO: 3006 - DNA, 96 bp, Aspergillus thermomutatus
  misc_feature: 294
tgcagtgctttctcaatatccttgatgctggctgcgaagatctgcactgctttacctctccggcgttgttgagtatgtatagcgaacccctgtgcg

SEQ ID NO: 3007 - DNA, 96 bp, Aspergillus thermomutatus
  misc_feature: 294
cgaagtttgatatcgtcactgaccataagaatctggagtacttcacagttcgcaggcgactaaacgagcggcaagcgcgctggtcagatttgctca

SEQ ID NO: 3008 - DNA, 96 bp, Aspergillus thermomutatus
  misc_feature: 294
tccaggtgctcgtggtagtgcgcgggcagcttggtcttggggtcggtgtactgcttcgcttgcaaggccttattgatatccttgagggtgactgcg

SEQ ID NO: 3009 - DNA, 96 bp, Aspergillus thermomutatus
  misc_feature: 294
taacaagctacgcgtgcgtatatcgatcgccgagtgttcggtctctccggatggtcatctgctgtaccgaggccgcaaatgggcccccgactctga

SEQ ID NO: 3010 - DNA, 96 bp, Aspergillus thermomutatus
  misc_feature: 294
tagactagctggtagttgaaccgactgagcaaatctgaccagcgcgcttgccgctcgtttagtcgcctgcgaactgtgaagtactccagattctta

SEQ ID NO: 3011 - DNA, 96 bp, Aspergillus thermomutatus
  misc_feature: 294
gtttcgcacccgatttggtctgtacgagtggctagttacccctttcggtatggcgaacgcacctagcaccttccaacggtacatcaactggacact

SEQ ID NO: 3012 - DNA, 96 bp, Aspergillus thermomutatus
  misc_feature: 294
gtcttacgcagtacaagcagttcttcgcgcgacatgctgtacaacgggccccatgggggctctgctctcttgccgtccggaccttctagcagttcg

SEQ ID NO: 3013 - DNA, 96 bp, Aspergillus thermomutatus
  misc_feature: 294
atatcttgttctcttcgcgatagtgcgtcaggtctcgcagctaatttaccaggccgatagactagctggtagttgaaccgactgagcaaatctgac

SEQ ID NO: 3014 - DNA, 96 bp, Aspergillus thermomutatus
  misc_feature: 294
catgtgatccaatagcttccagtactgtgaacttcgcgtgctgggcatcgagcttcttgctagggcggtccgttcgtatgttgcgcaggtccaacc

SEQ ID NO: 3015 - DNA, 96 bp, Aspergillus thermomutatus
  misc_feature: 294
cacgccgcgcgctgaggtcggggtctgccattccaatatagcctttaccttctcagggtccatgcatactcccttgcctgcttcgacgatgaagcc

SEQ ID NO: 3016 - DNA, 96 bp, Aspergillus thermomutatus
  misc_feature: 294
gcgctgaggtcggggtctgccattccaatatagcctttaccttctcagggtccatgcatactcccttgcctgcttcgacgatgaagcccaagtact

SEQ ID NO: 3017 - DNA, 96 bp, Aspergillus thermomutatus
  misc_feature: 294
gcagtacaagcagttcttcgcgcgacatgctgtacaacgggccccatgggggctctgctctcttgccgtccggaccttctagcagttcgatgcggt

SEQ ID NO: 3018 - DNA, 96 bp, Aspergillus thermomutatus
  misc_feature: 294
ccatcagtgaagataagtacatcgtcgatgtacgcggaggcgaattcatccaggaagtctcgaagggcccagttgatataccgttggaaggtactc

SEQ ID NO: 3019 - DNA, 96 bp, Aspergillus thermomutatus
  misc_feature: 294
gaagaactgcttgtactgcgtaagacgcttacagagctgctagagaagaacttcatacgtgtcagcagctcgtcagctgcagccccggtgctgctc

SEQ ID NO: 3020 - DNA, 96 bp, Aspergillus thermomutatus
  misc_feature: 294
ctttgtgatcgcgttcaacgcgcggtagtcgacacagaatcgtaaccctccacctggcttgcgggcgaacagcaccggagccgcggcggaagagct

SEQ ID NO: 3021 - DNA, 96 bp, Aspergillus thermomutatus
  misc_feature: 294
cgctgaggtcggggtctgccattccaatatagcctttaccttctcagggtccatgcatactcccttgcctgcttcgacgatgaagcccaagtactt

SEQ ID NO: 3022 - DNA, 96 bp, Aspergillus thermomutatus
  misc_feature: 294
cgcgaagaactgcttgtactgcgtaagacgcttacagagctgctagagaagaacttcatacgtgtcagcagctcgtcagctgcagccccggtgctg

SEQ ID NO: 3023 - DNA, 96 bp, Aspergillus thermomutatus
  misc_feature: 294
acgcagtacaagcagttcttcgcgcgacatgctgtacaacgggccccatgggggctctgctctcttgccgtccggaccttctagcagttcgatgcg

SEQ ID NO: 3024 - DNA, 96 bp, Aspergillus thermomutatus
  misc_feature: 294
cgatagaagttcgcaaagccgagaaacgatcgtacgcctcgagtggatgtaggggtctgccattctagtatagcttttaccttgtcggggtccatg

SEQ ID NO: 3025 - DNA, 96 bp, Aspergillus thermomutatus
  misc_feature: 294
actcacaaaggatcccccaccctcagtggtgagccgactgatgctcgctagggtagcacccgacgaccctagccaactaccattggaagagcattg

SEQ ID NO: 3026 - DNA, 96 bp, Aspergillus thermomutatus
  misc_feature: 294
aacgcgccaactcacataaattgactaaagctgaagaggaatcgcttatacagtggatattatctatggatcagcgtggagcagctccccgaccat

SEQ ID NO: 3027 - DNA, 96 bp, Aspergillus thermomutatus
  misc_feature: 294
agcatgtcgcgcggtgaattgcttgtcttacgaaagatgttgacagagctgctggagaagaactttatccgcattagtagctcttccgccgcggct

SEQ ID NO: 3028 - DNA, 96 bp, Aspergillus thermomutatus
  misc_feature: 293
tttgtgatcgcgttcaacgcgcggtagtcgacacagaatcgtaaccctccacctggcttgcgggcgaacagcaccggagccgcggcggaagagcta

SEQ ID NO: 3029 - DNA, 96 bp, Aspergillus thermomutatus
  misc_feature: 293
gaatcggagctgatcagcctaccgaagtttgatatcgtcactgaccataagaatctggagtacttcacagttcgcaggcgactaaacgagcggcaa

SEQ ID NO: 3030 - DNA, 96 bp, Aspergillus thermomutatus
  misc_feature: 293
ttcggtatggcgaacgcacctagcaccttccaacggtacatcaactggacactaagagactttctggatgaatttgcatctgcgtacgttgatgat

SEQ ID NO: 3031 - DNA, 96 bp, Aspergillus thermomutatus
  misc_feature: 293
ctcaactggcttgggaaaggatcgttcgccgcaggacgcaacagactaacatggaacacattatgcacccctggtggagtatctagtcggtaagca

SEQ ID NO: 3032 - DNA, 96 bp, Aspergillus thermomutatus
  misc_feature: 293
cctctatgcctactcttggtctgccttactgcctctctccctgtcttacatggtgccttcctccctaccttatattatacattcttcgctacctca

SEQ ID NO: 3033 - DNA, 96 bp, Aspergillus thermomutatus
  misc_feature: 293
tcttacgcagtacaagcagttcttcgcgcgacatgctgtacaacgggccccatgggggctctgctctcttgccgtccggaccttctagcagttcga

SEQ ID NO: 3034 - DNA, 96 bp, Aspergillus thermomutatus
  misc_feature: 293
gacgatgacgatgaccgcctacaactgcgcgagaagataatgattcacccgagcaagctactcacaaaggatcccccaccctcagtggtgagccga

SEQ ID NO: 3035 - DNA, 96 bp, Aspergillus thermomutatus
  misc_feature: 293
gaggatcctgcaagagacgcacgactcagtgcttacaggccaccccgggaagaacacattgtacgcgatgatagcgcggaacttctactggccgga

SEQ ID NO: 3036 - DNA, 96 bp, Aspergillus thermomutatus
  misc_feature: 293
ccagcgacccatcagtgaagataagtacatcgtcgatgtacgcggaggcgaattcatccaggaagtctcgaagggcccagttgatataccgttgga

SEQ ID NO: 3037 - DNA, 96 bp, Aspergillus thermomutatus
  misc_feature: 293
atgcatggaccctgagaaggtaaaggctatattggaatggcagaccccgacctcagcgcgcggcgtgcggtcattcctaggcttcgcaaacttcta

SEQ ID NO: 3038 - DNA, 96 bp, Aspergillus thermomutatus
  misc_feature: 293
atatccttgatgctggctgcgaagatctgcactgctttacctctccggcgttgttgagtatgtatagcgaacccctgtgcgcttatctgtctgacc

SEQ ID NO: 3039 - DNA, 96 bp, Aspergillus thermomutatus
  misc_feature: 293
gcacccggagatgaatggctgacggccttccgtacgcggtttggtctgtacgaatggttggtgaccccttttggcatggcgaacgcaccgagtacc

SEQ ID NO: 3040 - DNA, 96 bp, Aspergillus thermomutatus
  misc_feature: 293
ggagctgatcagcctaccgaagtttgatatcgtcactgaccataagaatctggagtacttcacagttcgcaggcgactaaacgagcggcaagcgcg

SEQ ID NO: 3041 - DNA, 96 bp, Aspergillus thermomutatus
  misc_feature: 293
gctcaactggcttgggaaaggatcgttcgccgcaggacgcaacagactaacatggaacacattatgcacccctggtggagtatctagtcggtaagc

SEQ ID NO: 3042 - DNA, 96 bp, Aspergillus thermomutatus
  misc_feature: 293
gcgcgaagaactgcttgtactgcgtaagacgcttacagagctgctagagaagaacttcatacgtgtcagcagctcgtcagctgcagccccggtgct

SEQ ID NO: 3043 - DNA, 96 bp, Aspergillus thermomutatus
  misc_feature: 293
gcgagaagataatgattcacccgagcaagctactcacaaaggatcccccaccctcagtggtgagccgactgatgctcgctagggtagcacccgacg

SEQ ID NO: 3044 - DNA, 96 bp, Aspergillus thermomutatus
  misc_feature: 293
gatagaagttcgcaaagccgagaaacgatcgtacgcctcgagtggatgtaggggtctgccattctagtatagcttttaccttgtcggggtccatgc

SEQ ID NO: 3045 - DNA, 96 bp, Aspergillus thermomutatus
  misc_feature: 293
gattcttatggtcagtgacgatatcaaacttcggtaggctgatcagctccgattcccattctttaagtgcgttgatgatagcgagcagctccttgt

SEQ ID NO: 3046 - DNA, 96 bp, Aspergillus thermomutatus
  misc_feature: 293
gagaatgagccgaagttagtggtcagacagataagcgcacaggggttcgctatacatactcaacaacgccggagaggtaaagcagtgcagatcttc

SEQ ID NO: 3047 - DNA, 96 bp, Aspergillus thermomutatus
  misc_feature: 293
atgatatattggttttcactgatgggtcactctcggagcacagacgacaggtaaaacaggtacttgcgcgcctacaggaagcaggcctacagctag

SEQ ID NO: 3048 - DNA, 96 bp, Aspergillus thermomutatus
  misc_feature: 293
ctaacaagctacgcgtgcgtatatcgatcgccgagtgttcggtctctccggatggtcatctgctgtaccgaggccgcaaatgggcccccgactctg

SEQ ID NO: 3049 - DNA, 96 bp, Aspergillus thermomutatus
  misc_feature: 293
cgcattgcacccggagatgaatggctgacggccttccgtacgcggtttggtctgtacgaatggttggtgaccccttttggcatggcgaacgcaccg

SEQ ID NO: 3050 - DNA, 96 bp, Aspergillus thermomutatus
  misc_feature: 293
cggtcatcgtcatcgtcaggcatatcttgttctcttcgcgatagtgcgtcaggtctcgcagctaatttaccaggccgatagactagctggtagttg

SEQ ID NO: 3051 - DNA, 96 bp, Aspergillus thermomutatus
  misc_feature: 293
cgatgaccgcctacaactgcgcgagaagataatgattcacccgagcaagctactcacaaaggatcccccaccctcagtggtgagccgactgatgct

SEQ ID NO: 3052 - DNA, 96 bp, Aspergillus thermomutatus
  misc_feature: 293
ccgcctttcataagattcgtatcgcaccgggtgacgaatggttgactgcgtttcgcacccgatttggtctgtacgagtggctagttacccctttcg

SEQ ID NO: 3053 - DNA, 96 bp, Aspergillus thermomutatus
  misc_feature: 293
cctgcagtgctttctcaatatccttgatgctggctgcgaagatctgcactgctttacctctccggcgttgttgagtatgtatagcgaacccctgtg

SEQ ID NO: 3054 - DNA, 96 bp, Aspergillus thermomutatus
  misc_feature: 293
aaagatgttgacagagctgctggagaagaactttatccgcattagtagctcttccgccgcggctccggtgctgttcgcccgcaagccaggtggagg

SEQ ID NO: 3055 - DNA, 96 bp, Aspergillus thermomutatus
  misc_feature: 293
cagtgctttctcaatatccttgatgctggctgcgaagatctgcactgctttacctctccggcgttgttgagtatgtatagcgaacccctgtgcgct

SEQ ID NO: 3056 - DNA, 96 bp, Aspergillus thermomutatus
  misc_feature: 293
atgtaccgttggaaggtgctaggtgcgttcgccataccgaaaggggtaactagccactcgtacagaccaaatcgggtgcgaaacgcagtcaaccat

SEQ ID NO: 3057 - DNA, 96 bp, Aspergillus thermomutatus
  misc_feature: 293
agaactgcttgtactgcgtaagacgcttacagagctgctagagaagaacttcatacgtgtcagcagctcgtcagctgcagccccggtgctgctcgt

SEQ ID NO: 3058 - DNA, 96 bp, Aspergillus thermomutatus
  misc_feature: 293
acctgcagtgctttctcaatatccttgatgctggctgcgaagatctgcactgctttacctctccggcgttgttgagtatgtatagcgaacccctgt

SEQ ID NO: 3059 - DNA, 96 bp, Aspergillus thermomutatus
  misc_feature: 293
acccggagatgaatggctgacggccttccgtacgcggtttggtctgtacgaatggttggtgaccccttttggcatggcgaacgcaccgagtacctt

SEQ ID NO: 3060 - DNA, 96 bp, Aspergillus thermomutatus
  misc_feature: 292
tgatatattggttttcactgatgggtcactctcggagcacagacgacaggtaaaacaggtacttgcgcgcctacaggaagcaggcctacagctaga

SEQ ID NO: 3061 - DNA, 96 bp, Aspergillus thermomutatus
  misc_feature: 292
tgagtagcttgctcgggtgaatcattatcttctcgcgcagttgtaggcggtcatcgtcatcgtcaggcatatcttgttctcttcgcgatagtgcgt

SEQ ID NO: 3062 - DNA, 96 bp, Aspergillus thermomutatus
  misc_feature: 292
ggacggcaagagagcagagcccccatggggcccgttgtacagcatgtcgcgcgaagaactgcttgtactgcgtaagacgcttacagagctgctaga

SEQ ID NO: 3063 - DNA, 96 bp, Aspergillus thermomutatus
  misc_feature: 292
caatgatctgatgagaacagatcagtgatctgttgtgaacagatcagtgatctgttacagacatatcagtgatatgttcgaagggctatataagga

SEQ ID NO: 3064 - DNA, 96 bp, Aspergillus thermomutatus
  misc_feature: 292
tagctggtagttgaaccgactgagcaaatctgaccagcgcgcttgccgctcgtttagtcgcctgcgaactgtgaagtactccagattcttatggtc

SEQ ID NO: 3065 - DNA, 96 bp, Aspergillus thermomutatus
  misc_feature: 292
cgaactgcccccgcatcgccctggggtcgatcaccgaattgagttgactaagggcgaagacgggaagccgttagaacccccatggggccctctgta

SEQ ID NO: 3066 - DNA, 96 bp, Aspergillus thermomutatus
  misc_feature: 292
gcatgtgatccaatagcttccagtactgtgaacttcgcgtgctgggcatcgagcttcttgctagggcggtccgttcgtatgttgcgcaggtccaac

SEQ ID NO: 3067 - DNA, 96 bp, Aspergillus thermomutatus
  misc_feature: 292
gtacgagtggctagttacccctttcggtatggcgaacgcacctagcaccttccaacggtacatcaactggacactaagagactttctggatgaatt

SEQ ID NO: 3068 - DNA, 96 bp, Aspergillus thermomutatus
  misc_feature: 292
gtacatcgtcgatgtacgcggaggcgaattcatccaggaagtctcgaagggcccagttgatataccgttggaaggtactcggtgcgttcgccatgc

SEQ ID NO: 3069 - DNA, 96 bp, Aspergillus thermomutatus
  misc_feature: 292
agtggaacgggttgagaatgagccgaagttagtggtcagacagataagcgcacaggggttcgctatacatactcaacaacgccggagaggtaaagc

SEQ ID NO: 3070 - DNA, 96 bp, Aspergillus thermomutatus
  misc_feature: 292
gcgaacttctatcggcgctttatacggaacttctctgacatagtacgaccgttgacggcgcttacacagaaaggaaccccattcacatggacggag

SEQ ID NO: 3071 - DNA, 96 bp, Aspergillus thermomutatus
  misc_feature: 292
agctggatgtcatcgccgcctttcataagattcgtatcgcaccgggtgacgaatggttgactgcgtttcgcacccgatttggtctgtacgagtggc

SEQ ID NO: 3072 - DNA, 96 bp, Aspergillus thermomutatus
  misc_feature: 292
gatatattggttttcactgatgggtcactctcggagcacagacgacaggtaaaacaggtacttgcgcgcctacaggaagcaggcctacagctagat

SEQ ID NO: 3073 - DNA, 96 bp, Aspergillus thermomutatus
  misc_feature: 292
ctttcccaagccagttgagcactgactaccagccgcccgctgtgctagtcgacggcgaggccgaatatgaggttgaatggatactggatgagcgtg

SEQ ID NO: 3074 - DNA, 96 bp, Aspergillus thermomutatus
  misc_feature: 292
cttcacctacctcttcacctacctcttcacctacctcttcacctacctcttcacctacctcttcacctacctcttcacctacctcttcacctacct

SEQ ID NO: 3075 - DNA, 96 bp, Aspergillus thermomutatus
  misc_feature: 292
cctttcccaagccagttgagcactgactaccagccgcccgctgtgctagtcgacggcgaggccgaatatgaggttgaatggatactggatgagcgt

SEQ ID NO: 3076 - DNA, 96 bp, Aspergillus thermomutatus
  misc_feature: 292
ccgctgctctgccgatggtcacgtgtcatggtacttctgctgcgtctttcccttaggctctcatagcggtcagtccttgtctgatcgactggttgt

SEQ ID NO: 3077 - DNA, 96 bp, Aspergillus thermomutatus
  misc_feature: 292
aagatgttgacagagctgctggagaagaactttatccgcattagtagctcttccgccgcggctccggtgctgttcgcccgcaagccaggtggaggg

SEQ ID NO: 3078 - DNA, 96 bp, Aspergillus thermomutatus
  misc_feature: 292
accgactagatactccaccaggggtgcataatgtgttccatgttagtctgttgcgtcctgcggcgaacgatcctttcccaagccagttgagcactg

SEQ ID NO: 3079 - DNA, 96 bp, Aspergillus thermomutatus
  misc_feature: 292
cacccggagatgaatggctgacggccttccgtacgcggtttggtctgtacgaatggttggtgaccccttttggcatggcgaacgcaccgagtacct

SEQ ID NO: 3080 - DNA, 96 bp, Aspergillus thermomutatus
  misc_feature: 292
aagtttgatatcgtcactgaccataagaatctggagtacttcacagttcgcaggcgactaaacgagcggcaagcgcgctggtcagatttgctcagt

SEQ ID NO: 3081 - DNA, 96 bp, Aspergillus thermomutatus
  misc_feature: 291
tttgtgagtagcttgctcgggtgaatcattatcttctcgcgcagttgtaggcggtcatcgtcatcgtcaggcatatcttgttctcttcgcgatagt

SEQ ID NO: 3082 - DNA, 96 bp, Aspergillus thermomutatus
  misc_feature: 291
ttgtgatcgcgttcaacgcgcggtagtcgacacagaatcgtaaccctccacctggcttgcgggcgaacagcaccggagccgcggcggaagagctac

SEQ ID NO: 3083 - DNA, 96 bp, Aspergillus thermomutatus
  misc_feature: 291
ttgtgagtagcttgctcgggtgaatcattatcttctcgcgcagttgtaggcggtcatcgtcatcgtcaggcatatcttgttctcttcgcgatagtg

SEQ ID NO: 3084 - DNA, 96 bp, Aspergillus thermomutatus
  misc_feature: 291
agcatgtgatccaatagcttccagtactgtgaacttcgcgtgctgggcatcgagcttcttgctagggcggtccgttcgtatgttgcgcaggtccaa

SEQ ID NO: 3085 - DNA, 96 bp, Aspergillus thermomutatus
  misc_feature: 291
cttcagctgctcgaaccgctgcgtgtgctcatacgtccatttaaatggtgtacctttgtgcgtgagggctgtaagcgggcgtactatctctgagaa

SEQ ID NO: 3086 - DNA, 96 bp, Aspergillus thermomutatus
  misc_feature: 291
tcggcgcagtagtgaacatcttcttcagctgctcgaaccgctgcgtgtgctcatacgtccatttaaatggtgtacctttgtgcgtgagggctgtaa

SEQ ID NO: 3087 - DNA, 96 bp, Aspergillus thermomutatus
  misc_feature: 291
ggtgcagatattcgcagtcaccctcaaggatatcaataaggccttgcaagcgaagcagtacaccgaccccaagaccaagctgcccgcgcactacca

SEQ ID NO: 3088 - DNA, 96 bp, Aspergillus thermomutatus
  misc_feature: 291
cgtcaaatggacaggttacgatcgtcctacgtgggaaccagctgtcaacctcgtcaatacggccgcgctggacgcttgggagcagcgagcgggcca

SEQ ID NO: 3089 - DNA, 96 bp, Aspergillus thermomutatus
  misc_feature: 291
aagcatgtgatccaatagcttccagtactgtgaacttcgcgtgctgggcatcgagcttcttgctagggcggtccgttcgtatgttgcgcaggtcca

SEQ ID NO: 3090 - DNA, 96 bp, Aspergillus thermomutatus
  misc_feature: 291
tgatgtaccgttggaaggtgctaggtgcgttcgccataccgaaaggggtaactagccactcgtacagaccaaatcgggtgcgaaacgcagtcaacc

SEQ ID NO: 3091 - DNA, 96 bp, Aspergillus thermomutatus
  misc_feature: 291
tcgtcggcctgtgccgcggcagcccaatgctcttccaatggtagttggctagggtcgtcgggtgctaccctagcgagcatcagtcggctcaccact

SEQ ID NO: 3092 - DNA, 96 bp, Aspergillus thermomutatus
  misc_feature: 291
tcggagctgatcagcctaccgaagtttgatatcgtcactgaccataagaatctggagtacttcacagttcgcaggcgactaaacgagcggcaagcg

SEQ ID NO: 3093 - DNA, 96 bp, Aspergillus thermomutatus
  misc_feature: 291
tatatgtttagtttagatatatggtcagcagaaattaatctagataatactcttaatatgactagtggtgatggaggaaattcttattttggaggt

SEQ ID NO: 3094 - DNA, 96 bp, Aspergillus thermomutatus
  misc_feature: 291
taccgctgctctgccgatggtcacgtgtcatggtacttctgctgcgtctttcccttaggctctcatagcggtcagtccttgtctgatcgactggtt

SEQ ID NO: 3095 - DNA, 96 bp, Aspergillus thermomutatus
  misc_feature: 291
taccgactagatactccaccaggggtgcataatgtgttccatgttagtctgttgcgtcctgcggcgaacgatcctttcccaagccagttgagcact

SEQ ID NO: 3096 - DNA, 96 bp, Aspergillus thermomutatus
  misc_feature: 291
tacatcgtcgatgtacgcggaggcgaattcatccaggaagtctcgaagggcccagttgatataccgttggaaggtactcggtgcgttcgccatgcc

SEQ ID NO: 3097 - DNA, 96 bp, Aspergillus thermomutatus
  misc_feature: 291
taagcatgtgatccaatagcttccagtactgtgaacttcgcgtgctgggcatcgagcttcttgctagggcggtccgttcgtatgttgcgcaggtcc

SEQ ID NO: 3098 - DNA, 96 bp, Aspergillus thermomutatus
  misc_feature: 291
atccttgatgctggctgcgaagatctgcactgctttacctctccggcgttgttgagtatgtatagcgaacccctgtgcgcttatctgtctgaccac

SEQ ID NO: 3099 - DNA, 96 bp, Aspergillus thermomutatus
  misc_feature: 291
gtgggggatcctttgtgagtagcttgctcgggtgaatcattatcttctcgcgcagttgtaggcggtcatcgtcatcgtcaggcatatcttgttctc

SEQ ID NO: 3100 - DNA, 96 bp, Aspergillus thermomutatus
  misc_feature: 291
gtgagtagcttgctcgggtgaatcattatcttctcgcgcagttgtaggcggtcatcgtcatcgtcaggcatatcttgttctcttcgcgatagtgcg

SEQ ID NO: 3101 - DNA, 96 bp, Aspergillus thermomutatus
  misc_feature: 291
ggccgccgcaaggagtatctcgtcaaatggacaggttacgatcgtcctacgtgggaaccagctgtcaacctcgtcaatacggccgcgctggacgct

SEQ ID NO: 3102 - DNA, 96 bp, Aspergillus thermomutatus
  misc_feature: 291
atcggagctgatcagcctaccgaagtttgatatcgtcactgaccataagaatctggagtacttcacagttcgcaggcgactaaacgagcggcaagc

SEQ ID NO: 3103 - DNA, 96 bp, Aspergillus thermomutatus
  misc_feature: 291
gcttacacagaaaggaaccccattcacatggacggaggagcacaccaatcggttcgagcagctaaagaagatgtttactaccgcgccgattctcat

SEQ ID NO: 3104 - DNA, 96 bp, Aspergillus thermomutatus
  misc_feature: 291
cggagctgatcagcctaccgaagtttgatatcgtcactgaccataagaatctggagtacttcacagttcgcaggcgactaaacgagcggcaagcgc

SEQ ID NO: 3105 - DNA, 96 bp, Aspergillus thermomutatus
  misc_feature: 291
gatgttgacagagctgctggagaagaactttatccgcattagtagctcttccgccgcggctccggtgctgttcgcccgcaagccaggtggagggtt

SEQ ID NO: 3106 - DNA, 96 bp, Aspergillus thermomutatus
  misc_feature: 291
ccgttggaaggtgctaggtgcgttcgccataccgaaaggggtaactagccactcgtacagaccaaatcgggtgcgaaacgcagtcaaccattcgtc

SEQ ID NO: 3107 - DNA, 96 bp, Aspergillus thermomutatus
  misc_feature: 291
gaaggtccggacggcaagagagcagagcccccatggggcccgttgtacagcatgtcgcgcgaagaactgcttgtactgcgtaagacgcttacagag

SEQ ID NO: 3108 - DNA, 96 bp, Aspergillus thermomutatus
  misc_feature: 291
ctttctttgtgatcgcgttcaacgcgcggtagtcgacacagaatcgtaaccctccacctggcttgcgggcgaacagcaccggagccgcggcggaag

SEQ ID NO: 3109 - DNA, 96 bp, Aspergillus thermomutatus
  misc_feature: 291
cgaagaactgcttgtactgcgtaagacgcttacagagctgctagagaagaacttcatacgtgtcagcagctcgtcagctgcagccccggtgctgct

SEQ ID NO: 3110 - DNA, 96 bp, Aspergillus thermomutatus
  misc_feature: 291
ccgagcaagctactcacaaaggatcccccaccctcagtggtgagccgactgatgctcgctagggtagcacccgacgaccctagccaactaccattg

SEQ ID NO: 3111 - DNA, 96 bp, Aspergillus thermomutatus
  misc_feature: 291
atatgtttagtttagatatatggtcagcagaaattaatctagataatactcttaatatgactagtggtgatggaggaaattcttattttggaggtg

SEQ ID NO: 3112 - DNA, 96 bp, Aspergillus thermomutatus
  misc_feature: 291
accgctgctctgccgatggtcacgtgtcatggtacttctgctgcgtctttcccttaggctctcatagcggtcagtccttgtctgatcgactggttg

SEQ ID NO: 3113 - DNA, 96 bp, Aspergillus thermomutatus
  misc_feature: 291
agactagctggtagttgaaccgactgagcaaatctgaccagcgcgcttgccgctcgtttagtcgcctgcgaactgtgaagtactccagattcttat

SEQ ID NO: 3114 - DNA, 96 bp, Aspergillus thermomutatus
  misc_feature: 290
ttacctgcagtgctttctcaatatccttgatgctggctgcgaagatctgcactgctttacctctccggcgttgttgagtatgtatagcgaacccct

SEQ ID NO: 3115 - DNA, 96 bp, Aspergillus thermomutatus
  misc_feature: 290
tatccttgatgctggctgcgaagatctgcactgctttacctctccggcgttgttgagtatgtatagcgaacccctgtgcgcttatctgtctgacca

SEQ ID NO: 3116 - DNA, 96 bp, Aspergillus thermomutatus
  misc_feature: 290
tgcgaacttctatcggcgctttatacggaacttctctgacatagtacgaccgttgacggcgcttacacagaaaggaaccccattcacatggacgga

SEQ ID NO: 3117 - DNA, 96 bp, Aspergillus thermomutatus
  misc_feature: 290
tcgcgaaggcaaagtggttcaccaagctggatgtcatcgccgcctttcataagattcgtatcgcaccgggtgacgaatggttgactgcgtttcgca

SEQ ID NO: 3118 - DNA, 96 bp, Aspergillus thermomutatus
  misc_feature: 290
ggaatcggagctgatcagcctaccgaagtttgatatcgtcactgaccataagaatctggagtacttcacagttcgcaggcgactaaacgagcggca

SEQ ID NO: 3119 - DNA, 96 bp, Aspergillus thermomutatus
  misc_feature: 290
tctttgtgatcgcgttcaacgcgcggtagtcgacacagaatcgtaaccctccacctggcttgcgggcgaacagcaccggagccgcggcggaagagc

SEQ ID NO: 3120 - DNA, 96 bp, Aspergillus thermomutatus
  misc_feature: 290
tcccaagccagttgagcactgactaccagccgcccgctgtgctagtcgacggcgaggccgaatatgaggttgaatggatactggatgagcgtgaga

SEQ ID NO: 3121 - DNA, 96 bp, Aspergillus thermomutatus
  misc_feature: 290
catatcttgttctcttcgcgatagtgcgtcaggtctcgcagctaatttaccaggccgatagactagctggtagttgaaccgactgagcaaatctga

SEQ ID NO: 3122 - DNA, 96 bp, Aspergillus thermomutatus
  misc_feature: 290
tagatgctcgtcggcctgtgccgcggcagcccaatgctcttccaatggtagttggctagggtcgtcgggtgctaccctagcgagcatcagtcggct

SEQ ID NO: 3123 - DNA, 96 bp, Aspergillus thermomutatus
  misc_feature: 290
tacggcaggtgctagagcggttacaggccgctgggttgcagctagacatcgacaagtgcgagttcgaggtcaagagcacgaaatacctcgggttta

SEQ ID NO: 3124 - DNA, 96 bp, Aspergillus thermomutatus
  misc_feature: 290
gtgcagatattcgcagtcaccctcaaggatatcaataaggccttgcaagcgaagcagtacaccgaccccaagaccaagctgcccgcgcactaccac

SEQ ID NO: 3125 - DNA, 96 bp, Aspergillus thermomutatus
  misc_feature: 290
cgcgaaggcaaagtggttcaccaagctggatgtcatcgccgcctttcataagattcgtatcgcaccgggtgacgaatggttgactgcgtttcgcac

SEQ ID NO: 3126 - DNA, 96 bp, Aspergillus thermomutatus
  misc_feature: 290
actgcgccgatacttgcgcagtttgaccctgatcgagacacggtcgtggagacggatgcttccaactgggctacgggtgcggtgatgtcccaatac

SEQ ID NO: 3127 - DNA, 96 bp, Aspergillus thermomutatus
  misc_feature: 290
gtatggcgaacgcacctagcaccttccaacggtacatcaactggacactaagagactttctggatgaatttgcatctgcgtacgttgatgatatat

SEQ ID NO: 3128 - DNA, 96 bp, Aspergillus thermomutatus
  misc_feature: 290
gtagcttgctcgggtgaatcattatcttctcgcgcagttgtaggcggtcatcgtcatcgtcaggcatatcttgttctcttcgcgatagtgcgtcag

SEQ ID NO: 3129 - DNA, 96 bp, Aspergillus thermomutatus
  misc_feature: 290
gtaccgttggaaggtgctaggtgcgttcgccataccgaaaggggtaactagccactcgtacagaccaaatcgggtgcgaaacgcagtcaaccattc

SEQ ID NO: 3130 - DNA, 96 bp, Aspergillus thermomutatus
  misc_feature: 290
gaactgcccccgcatcgccctggggtcgatcaccgaattgagttgactaagggcgaagacgggaagccgttagaacccccatggggccctctgtac

SEQ ID NO: 3131 - DNA, 96 bp, Aspergillus thermomutatus
  misc_feature: 290
cgatcggaagaaagccgacgaactgcccccgcatcgccctggggtcgatcaccgaattgagttgactaagggcgaagacgggaagccgttagaacc

SEQ ID NO: 3132 - DNA, 96 bp, Aspergillus thermomutatus
  misc_feature: 290
ccggagatgaatggctgacggccttccgtacgcggtttggtctgtacgaatggttggtgaccccttttggcatggcgaacgcaccgagtaccttcc

SEQ ID NO: 3133 - DNA, 96 bp, Aspergillus thermomutatus
  misc_feature: 290
gaagaaagccgacgaactgcccccgcatcgccctggggtcgatcaccgaattgagttgactaagggcgaagacgggaagccgttagaacccccatg

SEQ ID NO: 3134 - DNA, 96 bp, Aspergillus thermomutatus
  misc_feature: 290
gaaagatgttgacagagctgctggagaagaactttatccgcattagtagctcttccgccgcggctccggtgctgttcgcccgcaagccaggtggag

SEQ ID NO: 3135 - DNA, 96 bp, Aspergillus thermomutatus
  misc_feature: 290
cttacgcagtacaagcagttcttcgcgcgacatgctgtacaacgggccccatgggggctctgctctcttgccgtccggaccttctagcagttcgat

SEQ ID NO: 3136 - DNA, 96 bp, Aspergillus thermomutatus
  misc_feature: 290
cggcgcagtagtgaacatcttcttcagctgctcgaaccgctgcgtgtgctcatacgtccatttaaatggtgtacctttgtgcgtgagggctgtaag

SEQ ID NO: 3137 - DNA, 96 bp, Aspergillus thermomutatus
  misc_feature: 290
cgtcggcctgtgccgcggcagcccaatgctcttccaatggtagttggctagggtcgtcgggtgctaccctagcgagcatcagtcggctcaccactg

SEQ ID NO: 3138 - DNA, 96 bp, Aspergillus thermomutatus
  misc_feature: 290
cctttcggtatggcgaacgcacctagcaccttccaacggtacatcaactggacactaagagactttctggatgaatttgcatctgcgtacgttgat

SEQ ID NO: 3139 - DNA, 96 bp, Aspergillus thermomutatus
  misc_feature: 290
ccggagaggtaaagcagtgcagatcttcgcagccagcatcaaggatattgagaaagcactgcaggtaaagacacatacagaccctgccgataagct

SEQ ID NO: 3140 - DNA, 96 bp, Aspergillus thermomutatus
  misc_feature: 290
aagaaagccgacgaactgcccccgcatcgccctggggtcgatcaccgaattgagttgactaagggcgaagacgggaagccgttagaacccccatgg

SEQ ID NO: 3141 - DNA, 96 bp, Aspergillus thermomutatus
  misc_feature: 290
cataccgctgctctgccgatggtcacgtgtcatggtacttctgctgcgtctttcccttaggctctcatagcggtcagtccttgtctgatcgactgg

SEQ ID NO: 3142 - DNA, 96 bp, Aspergillus thermomutatus
  misc_feature: 290
cagaaaggaaccccattcacatggacggaggagcacaccaatcggttcgagcagctaaagaagatgtttactaccgcgccgattctcatgcagttt

SEQ ID NO: 3143 - DNA, 96 bp, Aspergillus thermomutatus
  misc_feature: 290
ataccgctgctctgccgatggtcacgtgtcatggtacttctgctgcgtctttcccttaggctctcatagcggtcagtccttgtctgatcgactggt

SEQ ID NO: 3144 - DNA, 96 bp, Aspergillus thermomutatus
  misc_feature: 290
agcataccgctgctctgccgatggtcacgtgtcatggtacttctgctgcgtctttcccttaggctctcatagcggtcagtccttgtctgatcgact

SEQ ID NO: 3145 - DNA, 96 bp, Aspergillus thermomutatus
  misc_feature: 290
acgtacggcaggtgctagagcggttacaggccgctgggttgcagctagacatcgacaagtgcgagttcgaggtcaagagcacgaaatacctcgggt

SEQ ID NO: 3146 - DNA, 96 bp, Aspergillus thermomutatus
  misc_feature: 289
ttcgccagcgacccatcagtgaagataagtacatcgtcgatgtacgcggaggcgaattcatccaggaagtctcgaagggcccagttgatataccgt

SEQ ID NO: 3147 - DNA, 96 bp, Aspergillus thermomutatus
  misc_feature: 289
gtcggtaagcatgtgatccaatagcttccagtactgtgaacttcgcgtgctgggcatcgagcttcttgctagggcggtccgttcgtatgttgcgca

SEQ ID NO: 3148 - DNA, 96 bp, Aspergillus thermomutatus
  misc_feature: 289
agtagcttgctcgggtgaatcattatcttctcgcgcagttgtaggcggtcatcgtcatcgtcaggcatatcttgttctcttcgcgatagtgcgtca

SEQ ID NO: 3149 - DNA, 96 bp, Aspergillus thermomutatus
  misc_feature: 289
tctatgcctactcttggtctgccttactgcctctctccctgtcttacatggtgccttcctccctaccttatattatacattcttcgctacctcacg

SEQ ID NO: 3150 - DNA, 96 bp, Aspergillus thermomutatus
  misc_feature: 289
ggtatggcgaacgcacctagcaccttccaacggtacatcaactggacactaagagactttctggatgaatttgcatctgcgtacgttgatgatata

SEQ ID NO: 3151 - DNA, 96 bp, Aspergillus thermomutatus
  misc_feature: 289
ctctatgcctactcttggtctgccttactgcctctctccctgtcttacatggtgccttcctccctaccttatattatacattcttcgctacctcac

SEQ ID NO: 3152 - DNA, 96 bp, Aspergillus thermomutatus
  misc_feature: 289
gtcactgaccataagaatctggagtacttcacagttcgcaggcgactaaacgagcggcaagcgcgctggtcagatttgctcagtcggttcaactac

SEQ ID NO: 3153 - DNA, 96 bp, Aspergillus thermomutatus
  misc_feature: 289
gtcaaatggacaggttacgatcgtcctacgtgggaaccagctgtcaacctcgtcaatacggccgcgctggacgcttgggagcagcgagcgggccag

SEQ ID NO: 3154 - DNA, 96 bp, Aspergillus thermomutatus
  misc_feature: 289
ggtgggggatcctttgtgagtagcttgctcgggtgaatcattatcttctcgcgcagttgtaggcggtcatcgtcatcgtcaggcatatcttgttct

SEQ ID NO: 3155 - DNA, 96 bp, Aspergillus thermomutatus
  misc_feature: 289
gcgaaggcaaagtggttcaccaagctggatgtcatcgccgcctttcataagattcgtatcgcaccgggtgacgaatggttgactgcgtttcgcacc

SEQ ID NO: 3156 - DNA, 96 bp, Aspergillus thermomutatus
  misc_feature: 289
agctactcacaaaggatcccccaccctcagtggtgagccgactgatgctcgctagggtagcacccgacgaccctagccaactaccattggaagagc

SEQ ID NO: 3157 - DNA, 96 bp, Aspergillus thermomutatus
  misc_feature: 289
gcggtcatcgtcatcgtcaggcatatcttgttctcttcgcgatagtgcgtcaggtctcgcagctaatttaccaggccgatagactagctggtagtt

SEQ ID NO: 3158 - DNA, 96 bp, Aspergillus thermomutatus
  misc_feature: 289
aaagccgacgaactgcccccgcatcgccctggggtcgatcaccgaattgagttgactaagggcgaagacgggaagccgttagaacccccatggggc

SEQ ID NO: 3159 - DNA, 96 bp, Aspergillus thermomutatus
  misc_feature: 289
gccagcgacccatcagtgaagataagtacatcgtcgatgtacgcggaggcgaattcatccaggaagtctcgaagggcccagttgatataccgttgg

SEQ ID NO: 3160 - DNA, 96 bp, Aspergillus thermomutatus
  misc_feature: 289
gagtagcttgctcgggtgaatcattatcttctcgcgcagttgtaggcggtcatcgtcatcgtcaggcatatcttgttctcttcgcgatagtgcgtc

SEQ ID NO: 3161 - DNA, 96 bp, Aspergillus thermomutatus
  misc_feature: 289
gagacacggtcgtggagacggatgcttccaactgggctacgggtgcggtgatgtcccaatacgacgatgacggcctgctgaggccctgcgcatatt

SEQ ID NO: 3162 - DNA, 96 bp, Aspergillus thermomutatus
  misc_feature: 289
gaatgggtcacatctattgagtgtatcaactctcaaggatgggctttaccaccatgtattatcttcaagggaacagtccatattgagggctggtat

SEQ ID NO: 3163 - DNA, 96 bp, Aspergillus thermomutatus
  misc_feature: 289
ccgccgcaaggagtatctcgtcaaatggacaggttacgatcgtcctacgtgggaaccagctgtcaacctcgtcaatacggccgcgctggacgcttg

SEQ ID NO: 3164 - DNA, 96 bp, Aspergillus thermomutatus
  misc_feature: 289
ccgatagaagttcgcaaagccgagaaacgatcgtacgcctcgagtggatgtaggggtctgccattctagtatagcttttaccttgtcggggtccat

SEQ ID NO: 3165 - DNA, 96 bp, Aspergillus thermomutatus
  misc_feature: 289
cccctttcggtatggcgaacgcacctagcaccttccaacggtacatcaactggacactaagagactttctggatgaatttgcatctgcgtacgttg

SEQ ID NO: 3166 - DNA, 96 bp, Aspergillus thermomutatus
  misc_feature: 289
actagctggtagttgaaccgactgagcaaatctgaccagcgcgcttgccgctcgtttagtcgcctgcgaactgtgaagtactccagattcttatgg

SEQ ID NO: 3167 - DNA, 96 bp, Aspergillus thermomutatus
  misc_feature: 289
agtgctttctcaatatccttgatgctggctgcgaagatctgcactgctttacctctccggcgttgttgagtatgtatagcgaacccctgtgcgctt

SEQ ID NO: 3168 - DNA, 96 bp, Aspergillus thermomutatus
  misc_feature: 289
acctcttcacctacctcttcacctacctcttcacctacctcttcacctacctcttcacctacctcttcacctacctcttcacctacctcttcacct

SEQ ID NO: 3169 - DNA, 96 bp, Aspergillus thermomutatus
  misc_feature: 288
catcgtcgatgtacgcggaggcgaattcatccaggaagtctcgaagggcccagttgatataccgttggaaggtactcggtgcgttcgccatgccaa

SEQ ID NO: 3170 - DNA, 96 bp, Aspergillus thermomutatus
  misc_feature: 288
atacatactcaacaacgccggagaggtaaagcagtgcagatcttcgcagccagcatcaaggatattgagaaagcactgcaggtaaagacacataca

SEQ ID NO: 3171 - DNA, 96 bp, Aspergillus thermomutatus
  misc_feature: 288
tgaccctgatcgagacacggtcgtggagacggatgcttccaactgggctacgggtgcggtgatgtcccaatacgacgatgacggcctgctgaggcc

SEQ ID NO: 3172 - DNA, 96 bp, Aspergillus thermomutatus
  misc_feature: 288
tcgccgcctttcataagattcgtatcgcaccgggtgacgaatggttgactgcgtttcgcacccgatttggtctgtacgagtggctagttacccctt

SEQ ID NO: 3173 - DNA, 96 bp, Aspergillus thermomutatus
  misc_feature: 288
cattggaaacattggaaacgcacattggtagatacattggattggaagacgcacctaatgattgtgtagcgcacattggaacagacagatgcacta

SEQ ID NO: 3174 - DNA, 96 bp, Aspergillus thermomutatus
  misc_feature: 288
tacgaacggaccgccctagcaagaagctcgatgcccagcacgcgaagttcacagtactggaagctattggatcacatgcttaccgactagatactc

SEQ ID NO: 3175 - DNA, 96 bp, Aspergillus thermomutatus
  misc_feature: 288
atcggcgcagtagtgaacatcttcttcagctgctcgaaccgctgcgtgtgctcatacgtccatttaaatggtgtacctttgtgcgtgagggctgta

SEQ ID NO: 3176 - DNA, 96 bp, Aspergillus thermomutatus
  misc_feature: 288
taaccgctctagcacctgccgtacgtggctacggtgcttcgccagcgacccatcagtgaagataagtacatcgtcgatgtacgcggaggcgaattc

SEQ ID NO: 3177 - DNA, 96 bp, Aspergillus thermomutatus
  misc_feature: 288
atcgtcactgaccataagaatctggagtacttcacagttcgcaggcgactaaacgagcggcaagcgcgctggtcagatttgctcagtcggttcaac

SEQ ID NO: 3178 - DNA, 96 bp, Aspergillus thermomutatus
  misc_feature: 288
gagcataccgctgctctgccgatggtcacgtgtcatggtacttctgctgcgtctttcccttaggctctcatagcggtcagtccttgtctgatcgac

SEQ ID NO: 3179 - DNA, 96 bp, Aspergillus thermomutatus
  misc_feature: 288
aatatccttgatgctggctgcgaagatctgcactgctttacctctccggcgttgttgagtatgtatagcgaacccctgtgcgcttatctgtctgac

SEQ ID NO: 3180 - DNA, 96 bp, Aspergillus thermomutatus
  misc_feature: 288
acccatcagtgaagataagtacatcgtcgatgtacgcggaggcgaattcatccaggaagtctcgaagggcccagttgatataccgttggaaggtac

SEQ ID NO: 3181 - DNA, 96 bp, Aspergillus thermomutatus
  misc_feature: 288
gtaaccgctctagcacctgccgtacgtggctacggtgcttcgccagcgacccatcagtgaagataagtacatcgtcgatgtacgcggaggcgaatt

SEQ ID NO: 3182 - DNA, 96 bp, Aspergillus thermomutatus
  misc_feature: 288
ggtcggggtctgccattccaatatagcctttaccttctcagggtccatgcatactcccttgcctgcttcgacgatgaagcccaagtacttggtgct

SEQ ID NO: 3183 - DNA, 96 bp, Aspergillus thermomutatus
  misc_feature: 288
cgaaggcaaagtggttcaccaagctggatgtcatcgccgcctttcataagattcgtatcgcaccgggtgacgaatggttgactgcgtttcgcaccc

SEQ ID NO: 3184 - DNA, 96 bp, Aspergillus thermomutatus
  misc_feature: 288
cgccgatagaagttcgcaaagccgagaaacgatcgtacgcctcgagtggatgtaggggtctgccattctagtatagcttttaccttgtcggggtcc

SEQ ID NO: 3185 - DNA, 96 bp, Aspergillus thermomutatus
  misc_feature: 288
gctgatcagcctaccgaagtttgatatcgtcactgaccataagaatctggagtacttcacagttcgcaggcgactaaacgagcggcaagcgcgctg

SEQ ID NO: 3186 - DNA, 96 bp, Aspergillus thermomutatus
  misc_feature: 288
agcacattagaatcattggaaacgcacattggaaacattggaaacgcacattggtagatacattggattggaagacgcacctaatgattgtgtagc

SEQ ID NO: 3187 - DNA, 96 bp, Aspergillus thermomutatus
  misc_feature: 288
gccgagcataccgctgctctgccgatggtcacgtgtcatggtacttctgctgcgtctttcccttaggctctcatagcggtcagtccttgtctgatc

SEQ ID NO: 3188 - DNA, 96 bp, Aspergillus thermomutatus
  misc_feature: 288
cgcacgactcagtgcttacaggccaccccgggaagaacacattgtacgcgatgatagcgcggaacttctactggccggagctttctgcagatgctc

SEQ ID NO: 3189 - DNA, 96 bp, Aspergillus thermomutatus
  misc_feature: 288
gacggcaagagagcagagcccccatggggcccgttgtacagcatgtcgcgcgaagaactgcttgtactgcgtaagacgcttacagagctgctagag

SEQ ID NO: 3190 - DNA, 96 bp, Aspergillus thermomutatus
  misc_feature: 288
gaccgcctacaactgcgcgagaagataatgattcacccgagcaagctactcacaaaggatcccccaccctcagtggtgagccgactgatgctcgct

SEQ ID NO: 3191 - DNA, 96 bp, Aspergillus thermomutatus
  misc_feature: 288
gaatcattatcttctcgcgcagttgtaggcggtcatcgtcatcgtcaggcatatcttgttctcttcgcgatagtgcgtcaggtctcgcagctaatt

SEQ ID NO: 3192 - DNA, 96 bp, Aspergillus thermomutatus
  misc_feature: 288
cccggagatgaatggctgacggccttccgtacgcggtttggtctgtacgaatggttggtgaccccttttggcatggcgaacgcaccgagtaccttc

SEQ ID NO: 3193 - DNA, 96 bp, Aspergillus thermomutatus
  misc_feature: 288
cagtggaacgggttgagaatgagccgaagttagtggtcagacagataagcgcacaggggttcgctatacatactcaacaacgccggagaggtaaag

SEQ ID NO: 3194 - DNA, 96 bp, Aspergillus thermomutatus
  misc_feature: 288
ctgaggtcggggtctgccattccaatatagcctttaccttctcagggtccatgcatactcccttgcctgcttcgacgatgaagcccaagtacttgg

SEQ ID NO: 3195 - DNA, 96 bp, Aspergillus thermomutatus
  misc_feature: 288
aagctactcacaaaggatcccccaccctcagtggtgagccgactgatgctcgctagggtagcacccgacgaccctagccaactaccattggaagag

SEQ ID NO: 3196 - DNA, 96 bp, Aspergillus thermomutatus
  misc_feature: 288
attggaaacattggaaacgcacattggtagatacattggattggaagacgcacctaatgattgtgtagcgcacattggaacagacagatgcactag

SEQ ID NO: 3197 - DNA, 96 bp, Aspergillus thermomutatus
  misc_feature: 288
ctactcacaaaggatcccccaccctcagtggtgagccgactgatgctcgctagggtagcacccgacgaccctagccaactaccattggaagagcat

SEQ ID NO: 3198 - DNA, 96 bp, Aspergillus thermomutatus
  misc_feature: 288
cggtaagcatgtgatccaatagcttccagtactgtgaacttcgcgtgctgggcatcgagcttcttgctagggcggtccgttcgtatgttgcgcagg

SEQ ID NO: 3199 - DNA, 96 bp, Aspergillus thermomutatus
  misc_feature: 288
cgatacgaatcttatgaaaggcggcgatgacatccagcttggtgaaccactttgccttcgcgatgcgctctagtgtctcgttgatcagcggaaggg

SEQ ID NO: 3200 - DNA, 96 bp, Aspergillus thermomutatus
  misc_feature: 288
agaaagccgacgaactgcccccgcatcgccctggggtcgatcaccgaattgagttgactaagggcgaagacgggaagccgttagaacccccatggg

SEQ ID NO: 3201 - DNA, 96 bp, Aspergillus thermomutatus
  misc_feature: 288
aagctggatgtcatcgccgcctttcataagattcgtatcgcaccgggtgacgaatggttgactgcgtttcgcacccgatttggtctgtacgagtgg

SEQ ID NO: 3202 - DNA, 96 bp, Aspergillus thermomutatus
  misc_feature: 288
acactagagcgcatcgcgaaggcaaagtggttcaccaagctggatgtcatcgccgcctttcataagattcgtatcgcaccgggtgacgaatggttg

SEQ ID NO: 3203 - DNA, 96 bp, Aspergillus thermomutatus
  misc_feature: 288
accgttggaaggtgctaggtgcgttcgccataccgaaaggggtaactagccactcgtacagaccaaatcgggtgcgaaacgcagtcaaccattcgt

SEQ ID NO: 3204 - DNA, 96 bp, Aspergillus thermomutatus
  misc_feature: 287
actactgcgccgatacttgcgcagtttgaccctgatcgagacacggtcgtggagacggatgcttccaactgggctacgggtgcggtgatgtcccaa

SEQ ID NO: 3205 - DNA, 96 bp, Aspergillus thermomutatus
  misc_feature: 287
tgtgagtagcttgctcgggtgaatcattatcttctcgcgcagttgtaggcggtcatcgtcatcgtcaggcatatcttgttctcttcgcgatagtgc

SEQ ID NO: 3206 - DNA, 96 bp, Aspergillus thermomutatus
  misc_feature: 287
cacccgagcaagctactcacaaaggatcccccaccctcagtggtgagccgactgatgctcgctagggtagcacccgacgaccctagccaactacca

SEQ ID NO: 3207 - DNA, 96 bp, Aspergillus thermomutatus
  misc_feature: 287
cggaagaaagccgacgaactgcccccgcatcgccctggggtcgatcaccgaattgagttgactaagggcgaagacgggaagccgttagaaccccca

SEQ ID NO: 3208 - DNA, 96 bp, Aspergillus thermomutatus
  misc_feature: 287
acatcgtcgatgtacgcggaggcgaattcatccaggaagtctcgaagggcccagttgatataccgttggaaggtactcggtgcgttcgccatgcca

SEQ ID NO: 3209 - DNA, 96 bp, Aspergillus thermomutatus
  misc_feature: 287
gccgatagaagttcgcaaagccgagaaacgatcgtacgcctcgagtggatgtaggggtctgccattctagtatagcttttaccttgtcggggtcca

SEQ ID NO: 3210 - DNA, 96 bp, Aspergillus thermomutatus
  misc_feature: 287
gctactcacaaaggatcccccaccctcagtggtgagccgactgatgctcgctagggtagcacccgacgaccctagccaactaccattggaagagca

SEQ ID NO: 3211 - DNA, 96 bp, Aspergillus thermomutatus
  misc_feature: 287
acattagaatcattggaaacgcacattggaaacattggaaacgcacattggtagatacattggattggaagacgcacctaatgattgtgtagcgca

SEQ ID NO: 3212 - DNA, 96 bp, Aspergillus thermomutatus
  misc_feature: 287
gcacattggaaacattggaaacgcacattggtagatacattggattggaagacgcacctaatgattgtgtagcgcacattggaacagacagatgca

SEQ ID NO: 3213 - DNA, 96 bp, Aspergillus thermomutatus
  misc_feature: 287
cgcttacacagaaaggaaccccattcacatggacggaggagcacaccaatcggttcgagcagctaaagaagatgtttactaccgcgccgattctca

SEQ ID NO: 3214 - DNA, 96 bp, Aspergillus thermomutatus
  misc_feature: 287
tcggtatggcgaacgcacctagcaccttccaacggtacatcaactggacactaagagactttctggatgaatttgcatctgcgtacgttgatgata

SEQ ID NO: 3215 - DNA, 96 bp, Aspergillus thermomutatus
  misc_feature: 287
tcggtaagcatgtgatccaatagcttccagtactgtgaacttcgcgtgctgggcatcgagcttcttgctagggcggtccgttcgtatgttgcgcag

SEQ ID NO: 3216 - DNA, 96 bp, Aspergillus thermomutatus
  misc_feature: 287
gtctttctttgtgatcgcgttcaacgcgcggtagtcgacacagaatcgtaaccctccacctggcttgcgggcgaacagcaccggagccgcggcgga

SEQ ID NO: 3217 - DNA, 96 bp, Aspergillus thermomutatus
  misc_feature: 287
cggagaggtaaagcagtgcagatcttcgcagccagcatcaaggatattgagaaagcactgcaggtaaagacacatacagaccctgccgataagcta

SEQ ID NO: 3218 - DNA, 96 bp, Aspergillus thermomutatus
  misc_feature: 287
gatgatatattggttttcactgatgggtcactctcggagcacagacgacaggtaaaacaggtacttgcgcgcctacaggaagcaggcctacagcta

SEQ ID NO: 3219 - DNA, 96 bp, Aspergillus thermomutatus
  misc_feature: 287
tacatactcaacaacgccggagaggtaaagcagtgcagatcttcgcagccagcatcaaggatattgagaaagcactgcaggtaaagacacatacag

SEQ ID NO: 3220 - DNA, 96 bp, Aspergillus thermomutatus
  misc_feature: 287
gtgctttctcaatatccttgatgctggctgcgaagatctgcactgctttacctctccggcgttgttgagtatgtatagcgaacccctgtgcgctta

SEQ ID NO: 3221 - DNA, 96 bp, Aspergillus thermomutatus
  misc_feature: 287
gaacggaccgccctagcaagaagctcgatgcccagcacgcgaagttcacagtactggaagctattggatcacatgcttaccgactagatactccac

SEQ ID NO: 3222 - DNA, 96 bp, Aspergillus thermomutatus
  misc_feature: 287
cacattggaaacattggaaacgcacattggtagatacattggattggaagacgcacctaatgattgtgtagcgcacattggaacagacagatgcac

SEQ ID NO: 3223 - DNA, 96 bp, Aspergillus thermomutatus
  misc_feature: 287
catactcaacaacgccggagaggtaaagcagtgcagatcttcgcagccagcatcaaggatattgagaaagcactgcaggtaaagacacatacagac

SEQ ID NO: 3224 - DNA, 96 bp, Aspergillus thermomutatus
  misc_feature: 287
gagaagataatgattcacccgagcaagctactcacaaaggatcccccaccctcagtggtgagccgactgatgctcgctagggtagcacccgacgac

SEQ ID NO: 3225 - DNA, 96 bp, Aspergillus thermomutatus
  misc_feature: 287
acgaacggaccgccctagcaagaagctcgatgcccagcacgcgaagttcacagtactggaagctattggatcacatgcttaccgactagatactcc

SEQ ID NO: 3226 - DNA, 96 bp, Aspergillus thermomutatus
  misc_feature: 287
gaaggcaaagtggttcaccaagctggatgtcatcgccgcctttcataagattcgtatcgcaccgggtgacgaatggttgactgcgtttcgcacccg

SEQ ID NO: 3227 - DNA, 96 bp, Aspergillus thermomutatus
  misc_feature: 287
aatcttatgaaaggcggcgatgacatccagcttggtgaaccactttgccttcgcgatgcgctctagtgtctcgttgatcagcggaagggggtaacg

SEQ ID NO: 3228 - DNA, 96 bp, Aspergillus thermomutatus
  misc_feature: 287
cgccagcgacccatcagtgaagataagtacatcgtcgatgtacgcggaggcgaattcatccaggaagtctcgaagggcccagttgatataccgttg

SEQ ID NO: 3229 - DNA, 96 bp, Aspergillus thermomutatus
  misc_feature: 287
cgagcaagctactcacaaaggatcccccaccctcagtggtgagccgactgatgctcgctagggtagcacccgacgaccctagccaactaccattgg

SEQ ID NO: 3230 - DNA, 96 bp, Aspergillus thermomutatus
  misc_feature: 287
caagctggatgtcatcgccgcctttcataagattcgtatcgcaccgggtgacgaatggttgactgcgtttcgcacccgatttggtctgtacgagtg

SEQ ID NO: 3231 - DNA, 96 bp, Aspergillus thermomutatus
  misc_feature: 287
atcgccgcctttcataagattcgtatcgcaccgggtgacgaatggttgactgcgtttcgcacccgatttggtctgtacgagtggctagttacccct

SEQ ID NO: 3232 - DNA, 96 bp, Aspergillus thermomutatus
  misc_feature: 287
atacgaacggaccgccctagcaagaagctcgatgcccagcacgcgaagttcacagtactggaagctattggatcacatgcttaccgactagatact

SEQ ID NO: 3233 - DNA, 96 bp, Aspergillus thermomutatus
  misc_feature: 286
tttctttgtgatcgcgttcaacgcgcggtagtcgacacagaatcgtaaccctccacctggcttgcgggcgaacagcaccggagccgcggcggaaga

SEQ ID NO: 3234 - DNA, 96 bp, Aspergillus thermomutatus
  misc_feature: 286
ttcacctacctcttcacctacctcttcacctacctcttcacctacctcttcacctacctcttcacctacctcttcacctacctcttcacctacctc

SEQ ID NO: 3235 - DNA, 96 bp, Aspergillus thermomutatus
  misc_feature: 286
cgaacggaccgccctagcaagaagctcgatgcccagcacgcgaagttcacagtactggaagctattggatcacatgcttaccgactagatactcca

SEQ ID NO: 3236 - DNA, 96 bp, Aspergillus thermomutatus
  misc_feature: 286
tgctttctcaatatccttgatgctggctgcgaagatctgcactgctttacctctccggcgttgttgagtatgtatagcgaacccctgtgcgcttat

SEQ ID NO: 3237 - DNA, 96 bp, Aspergillus thermomutatus
  misc_feature: 286
gcagttcgtcggctttcttccgatcgaacgcccctaggaactcgtggtagtgcgctggtagcttatcggcagggtctgtatgtgtctttacctgca

SEQ ID NO: 3238 - DNA, 96 bp, Aspergillus thermomutatus
  misc_feature: 286
tgcagatattcgcagtcaccctcaaggatatcaataaggccttgcaagcgaagcagtacaccgaccccaagaccaagctgcccgcgcactaccacg

SEQ ID NO: 3239 - DNA, 96 bp, Aspergillus thermomutatus
  misc_feature: 286
tgaatcattatcttctcgcgcagttgtaggcggtcatcgtcatcgtcaggcatatcttgttctcttcgcgatagtgcgtcaggtctcgcagctaat

SEQ ID NO: 3240 - DNA, 96 bp, Aspergillus thermomutatus
  misc_feature: 286
tcgtcactgaccataagaatctggagtacttcacagttcgcaggcgactaaacgagcggcaagcgcgctggtcagatttgctcagtcggttcaact

SEQ ID NO: 3241 - DNA, 96 bp, Aspergillus thermomutatus
  misc_feature: 286
gtcggcctgtgccgcggcagcccaatgctcttccaatggtagttggctagggtcgtcgggtgctaccctagcgagcatcagtcggctcaccactga

SEQ ID NO: 3242 - DNA, 96 bp, Aspergillus thermomutatus
  misc_feature: 286
ccctttcggtatggcgaacgcacctagcaccttccaacggtacatcaactggacactaagagactttctggatgaatttgcatctgcgtacgttga

SEQ ID NO: 3243 - DNA, 96 bp, Aspergillus thermomutatus
  misc_feature: 286
ctcgcgcagttgtaggcggtcatcgtcatcgtcaggcatatcttgttctcttcgcgatagtgcgtcaggtctcgcagctaatttaccaggccgata

SEQ ID NO: 3244 - DNA, 96 bp, Aspergillus thermomutatus
  misc_feature: 286
ggtgaatcattatcttctcgcgcagttgtaggcggtcatcgtcatcgtcaggcatatcttgttctcttcgcgatagtgcgtcaggtctcgcagcta

SEQ ID NO: 3245 - DNA, 96 bp, Aspergillus thermomutatus
  misc_feature: 286
taccgttggaaggtgctaggtgcgttcgccataccgaaaggggtaactagccactcgtacagaccaaatcgggtgcgaaacgcagtcaaccattcg

SEQ ID NO: 3246 - DNA, 96 bp, Aspergillus thermomutatus
  misc_feature: 286
gctacgggtgcggtgatgtcccaatacgacgatgacggcctgctgaggccctgcgcatattactcccggaaaaacacaccagccgaatgcaactac

SEQ ID NO: 3247 - DNA, 96 bp, Aspergillus thermomutatus
  misc_feature: 286
ggaagaaagccgacgaactgcccccgcatcgccctggggtcgatcaccgaattgagttgactaagggcgaagacgggaagccgttagaacccccat

SEQ ID NO: 3248 - DNA, 96 bp, Aspergillus thermomutatus
  misc_feature: 286
gctgaggtcggggtctgccattccaatatagcctttaccttctcagggtccatgcatactcccttgcctgcttcgacgatgaagcccaagtacttg

SEQ ID NO: 3249 - DNA, 96 bp, Aspergillus thermomutatus
  misc_feature: 286
gccgccgcaaggagtatctcgtcaaatggacaggttacgatcgtcctacgtgggaaccagctgtcaacctcgtcaatacggccgcgctggacgctt

SEQ ID NO: 3250 - DNA, 96 bp, Aspergillus thermomutatus
  misc_feature: 286
gatatgcctgacgatgacgatgaccgcctacaactgcgcgagaagataatgattcacccgagcaagctactcacaaaggatcccccaccctcagtg

SEQ ID NO: 3251 - DNA, 96 bp, Aspergillus thermomutatus
  misc_feature: 286
cttacacagaaaggaaccccattcacatggacggaggagcacaccaatcggttcgagcagctaaagaagatgtttactaccgcgccgattctcatg

SEQ ID NO: 3252 - DNA, 96 bp, Aspergillus thermomutatus
  misc_feature: 286
cagttcgtcggctttcttccgatcgaacgcccctaggaactcgtggtagtgcgctggtagcttatcggcagggtctgtatgtgtctttacctgcag

SEQ ID NO: 3253 - DNA, 96 bp, Aspergillus thermomutatus
  misc_feature: 286
acagcatgtcgcgcggtgaattgcttgtcttacgaaagatgttgacagagctgctggagaagaactttatccgcattagtagctcttccgccgcgg

SEQ ID NO: 3254 - DNA, 96 bp, Aspergillus thermomutatus
  misc_feature: 286
agcttgctcgggtgaatcattatcttctcgcgcagttgtaggcggtcatcgtcatcgtcaggcatatcttgttctcttcgcgatagtgcgtcaggt

SEQ ID NO: 3255 - DNA, 96 bp, Aspergillus thermomutatus
  misc_feature: 286
agctgatcagcctaccgaagtttgatatcgtcactgaccataagaatctggagtacttcacagttcgcaggcgactaaacgagcggcaagcgcgct

SEQ ID NO: 3256 - DNA, 96 bp, Aspergillus thermomutatus
  misc_feature: 286
agatgttgacagagctgctggagaagaactttatccgcattagtagctcttccgccgcggctccggtgctgttcgcccgcaagccaggtggagggt

SEQ ID NO: 3257 - DNA, 96 bp, Aspergillus thermomutatus
  misc_feature: 286
accccagggcgatgcgggggcagttcgtcggctttcttccgatcgaacgcccctaggaactcgtggtagtgcgctggtagcttatcggcagggtct

SEQ ID NO: 3258 - DNA, 96 bp, Aspergillus thermomutatus
  misc_feature: 285
atcgtcgatgtacgcggaggcgaattcatccaggaagtctcgaagggcccagttgatataccgttggaaggtactcggtgcgttcgccatgccaaa

SEQ ID NO: 3259 - DNA, 96 bp, Aspergillus thermomutatus
  misc_feature: 285
ttcagctgctcgaaccgctgcgtgtgctcatacgtccatttaaatggtgtacctttgtgcgtgagggctgtaagcgggcgtactatctctgagaag

SEQ ID NO: 3260 - DNA, 96 bp, Aspergillus thermomutatus
  misc_feature: 285
ttacacagaaaggaaccccattcacatggacggaggagcacaccaatcggttcgagcagctaaagaagatgtttactaccgcgccgattctcatgc

SEQ ID NO: 3261 - DNA, 96 bp, Aspergillus thermomutatus
  misc_feature: 285
agctggtagttgaaccgactgagcaaatctgaccagcgcgcttgccgctcgtttagtcgcctgcgaactgtgaagtactccagattcttatggtca

SEQ ID NO: 3262 - DNA, 96 bp, Aspergillus thermomutatus
  misc_feature: 285
gcgctggacgcttgggagcagcgagcgggccagaacacccccgacccgcgaggggagggggagtagtgtagcgggcaaggcccgctgaatgctcga

SEQ ID NO: 3263 - DNA, 96 bp, Aspergillus thermomutatus
  misc_feature: 285
ctgccgagcataccgctgctctgccgatggtcacgtgtcatggtacttctgctgcgtctttcccttaggctctcatagcggtcagtccttgtctga

SEQ ID NO: 3264 - DNA, 96 bp, Aspergillus thermomutatus
  misc_feature: 285
ctaaagctgaagaggaatcgcttatacagtggatattatctatggatcagcgtggagcagctccccgaccatctcatgttcaagatatggccaata

SEQ ID NO: 3265 - DNA, 96 bp, Aspergillus thermomutatus
  misc_feature: 285
tatgcatggaccctgagaaggtaaaggctatattggaatggcagaccccgacctcagcgcgcggcgtgcggtcattcctaggcttcgcaaacttct

SEQ ID NO: 3266 - DNA, 96 bp, Aspergillus thermomutatus
  misc_feature: 285
tacagcatgtcgcgcggtgaattgcttgtcttacgaaagatgttgacagagctgctggagaagaactttatccgcattagtagctcttccgccgcg

SEQ ID NO: 3267 - DNA, 96 bp, Aspergillus thermomutatus
  misc_feature: 285
taaagctgaagaggaatcgcttatacagtggatattatctatggatcagcgtggagcagctccccgaccatctcatgttcaagatatggccaatat

SEQ ID NO: 3268 - DNA, 96 bp, Aspergillus thermomutatus
  misc_feature: 285
gtgctaggtgcgttcgccataccgaaaggggtaactagccactcgtacagaccaaatcgggtgcgaaacgcagtcaaccattcgtcacccggtgcg

SEQ ID NO: 3269 - DNA, 96 bp, Aspergillus thermomutatus
  misc_feature: 285
gtatgcatggaccctgagaaggtaaaggctatattggaatggcagaccccgacctcagcgcgcggcgtgcggtcattcctaggcttcgcaaacttc

SEQ ID NO: 3270 - DNA, 96 bp, Aspergillus thermomutatus
  misc_feature: 285
gtacagcatgtcgcgcggtgaattgcttgtcttacgaaagatgttgacagagctgctggagaagaactttatccgcattagtagctcttccgccgc

SEQ ID NO: 3271 - DNA, 96 bp, Aspergillus thermomutatus
  misc_feature: 285
ggtaagcatgtgatccaatagcttccagtactgtgaacttcgcgtgctgggcatcgagcttcttgctagggcggtccgttcgtatgttgcgcaggt

SEQ ID NO: 3272 - DNA, 96 bp, Aspergillus thermomutatus
  misc_feature: 285
ctgacgatgacgatgaccgcctacaactgcgcgagaagataatgattcacccgagcaagctactcacaaaggatcccccaccctcagtggtgagcc

SEQ ID NO: 3273 - DNA, 96 bp, Aspergillus thermomutatus
  misc_feature: 285
ggcagttcgtcggctttcttccgatcgaacgcccctaggaactcgtggtagtgcgctggtagcttatcggcagggtctgtatgtgtctttacctgc

SEQ ID NO: 3274 - DNA, 96 bp, Aspergillus thermomutatus
  misc_feature: 285
aactgggctacgggtgcggtgatgtcccaatacgacgatgacggcctgctgaggccctgcgcatattactcccggaaaaacacaccagccgaatgc

SEQ ID NO: 3275 - DNA, 96 bp, Aspergillus thermomutatus
  misc_feature: 285
gaggccgccgcaaggagtatctcgtcaaatggacaggttacgatcgtcctacgtgggaaccagctgtcaacctcgtcaatacggccgcgctggacg

SEQ ID NO: 3276 - DNA, 96 bp, Aspergillus thermomutatus
  misc_feature: 285
gactagctggtagttgaaccgactgagcaaatctgaccagcgcgcttgccgctcgtttagtcgcctgcgaactgtgaagtactccagattcttatg

SEQ ID NO: 3277 - DNA, 96 bp, Aspergillus thermomutatus
  misc_feature: 285
ctacgggtgcggtgatgtcccaatacgacgatgacggcctgctgaggccctgcgcatattactcccggaaaaacacaccagccgaatgcaactacg

SEQ ID NO: 3278 - DNA, 96 bp, Aspergillus thermomutatus
  misc_feature: 285
cgtacggcaggtgctagagcggttacaggccgctgggttgcagctagacatcgacaagtgcgagttcgaggtcaagagcacgaaatacctcgggtt

SEQ ID NO: 3279 - DNA, 96 bp, Aspergillus thermomutatus
  misc_feature: 285
cgccgcctttcataagattcgtatcgcaccgggtgacgaatggttgactgcgtttcgcacccgatttggtctgtacgagtggctagttaccccttt

SEQ ID NO: 3280 - DNA, 96 bp, Aspergillus thermomutatus
  misc_feature: 285
atatatgtttagtttagatatatggtcagcagaaattaatctagataatactcttaatatgactagtggtgatggaggaaattcttattttggagg

SEQ ID NO: 3281 - DNA, 96 bp, Aspergillus thermomutatus
  misc_feature: 285
atcttatgaaaggcggcgatgacatccagcttggtgaaccactttgccttcgcgatgcgctctagtgtctcgttgatcagcggaagggggtaacgg

SEQ ID NO: 3282 - DNA, 96 bp, Aspergillus thermomutatus
  misc_feature: 284
tctttctttgtgatcgcgttcaacgcgcggtagtcgacacagaatcgtaaccctccacctggcttgcgggcgaacagcaccggagccgcggcggaa

SEQ ID NO: 3283 - DNA, 96 bp, Aspergillus thermomutatus
  misc_feature: 284
gtgaatcattatcttctcgcgcagttgtaggcggtcatcgtcatcgtcaggcatatcttgttctcttcgcgatagtgcgtcaggtctcgcagctaa

SEQ ID NO: 3284 - DNA, 96 bp, Aspergillus thermomutatus
  misc_feature: 284
ggacgcttgggagcagcgagcgggccagaacacccccgacccgcgaggggagggggagtagtgtagcgggcaaggcccgctgaatgctcgagctca

SEQ ID NO: 3285 - DNA, 96 bp, Aspergillus thermomutatus
  misc_feature: 284
tgacgatgacgatgaccgcctacaactgcgcgagaagataatgattcacccgagcaagctactcacaaaggatcccccaccctcagtggtgagccg

SEQ ID NO: 3286 - DNA, 96 bp, Aspergillus thermomutatus
  misc_feature: 284
acatactcaacaacgccggagaggtaaagcagtgcagatcttcgcagccagcatcaaggatattgagaaagcactgcaggtaaagacacatacaga

SEQ ID NO: 3287 - DNA, 96 bp, Aspergillus thermomutatus
  misc_feature: 284
agaaggtccggacggcaagagagcagagcccccatggggcccgttgtacagcatgtcgcgcgaagaactgcttgtactgcgtaagacgcttacaga

SEQ ID NO: 3288 - DNA, 96 bp, Aspergillus thermomutatus
  misc_feature: 284
tcgtcacccggtgcgatacgaatcttatgaaaggcggcgatgacatccagcttggtgaaccactttgccttcgcgatgcgctctagtgtctcgttg

SEQ ID NO: 3289 - DNA, 96 bp, Aspergillus thermomutatus
  misc_feature: 284
tacgggtgcggtgatgtcccaatacgacgatgacggcctgctgaggccctgcgcatattactcccggaaaaacacaccagccgaatgcaactacga

SEQ ID NO: 3290 - DNA, 96 bp, Aspergillus thermomutatus
  misc_feature: 284
aaggcaaagtggttcaccaagctggatgtcatcgccgcctttcataagattcgtatcgcaccgggtgacgaatggttgactgcgtttcgcacccga

SEQ ID NO: 3291 - DNA, 96 bp, Aspergillus thermomutatus
  misc_feature: 284
tcggaagaaagccgacgaactgcccccgcatcgccctggggtcgatcaccgaattgagttgactaagggcgaagacgggaagccgttagaaccccc

SEQ ID NO: 3292 - DNA, 96 bp, Aspergillus thermomutatus
  misc_feature: 284
tcgcacccgatttggtctgtacgagtggctagttacccctttcggtatggcgaacgcacctagcaccttccaacggtacatcaactggacactaag

SEQ ID NO: 3293 - DNA, 96 bp, Aspergillus thermomutatus
  misc_feature: 284
tcgagacacggtcgtggagacggatgcttccaactgggctacgggtgcggtgatgtcccaatacgacgatgacggcctgctgaggccctgcgcata

SEQ ID NO: 3294 - DNA, 96 bp, Aspergillus thermomutatus
  misc_feature: 284
tcctctatgcctactcttggtctgccttactgcctctctccctgtcttacatggtgccttcctccctaccttatattatacattcttcgctacctc

SEQ ID NO: 3295 - DNA, 96 bp, Aspergillus thermomutatus
  misc_feature: 284
ggctacgggtgcggtgatgtcccaatacgacgatgacggcctgctgaggccctgcgcatattactcccggaaaaacacaccagccgaatgcaacta

SEQ ID NO: 3296 - DNA, 96 bp, Aspergillus thermomutatus
  misc_feature: 284
cgtcactgaccataagaatctggagtacttcacagttcgcaggcgactaaacgagcggcaagcgcgctggtcagatttgctcagtcggttcaacta

SEQ ID NO: 3297 - DNA, 96 bp, Aspergillus thermomutatus
  misc_feature: 284
tactcacaaaggatcccccaccctcagtggtgagccgactgatgctcgctagggtagcacccgacgaccctagccaactaccattggaagagcatt

SEQ ID NO: 3298 - DNA, 96 bp, Aspergillus thermomutatus
  misc_feature: 284
atgttgacagagctgctggagaagaactttatccgcattagtagctcttccgccgcggctccggtgctgttcgcccgcaagccaggtggagggtta

SEQ ID NO: 3299 - DNA, 96 bp, Aspergillus thermomutatus
  misc_feature: 284
gatcggaagaaagccgacgaactgcccccgcatcgccctggggtcgatcaccgaattgagttgactaagggcgaagacgggaagccgttagaaccc

SEQ ID NO: 3300 - DNA, 96 bp, Aspergillus thermomutatus
  misc_feature: 284
gcgcaacatacgaacggaccgccctagcaagaagctcgatgcccagcacgcgaagttcacagtactggaagctattggatcacatgcttaccgact

SEQ ID NO: 3301 - DNA, 96 bp, Aspergillus thermomutatus
  misc_feature: 284
cagcatgtcgcgcggtgaattgcttgtcttacgaaagatgttgacagagctgctggagaagaactttatccgcattagtagctcttccgccgcggc

SEQ ID NO: 3302 - DNA, 96 bp, Aspergillus thermomutatus
  misc_feature: 284
ccgcctacaactgcgcgagaagataatgattcacccgagcaagctactcacaaaggatcccccaccctcagtggtgagccgactgatgctcgctag

SEQ ID NO: 3303 - DNA, 96 bp, Aspergillus thermomutatus
  misc_feature: 284
cgcctacaactgcgcgagaagataatgattcacccgagcaagctactcacaaaggatcccccaccctcagtggtgagccgactgatgctcgctagg

SEQ ID NO: 3304 - DNA, 96 bp, Aspergillus thermomutatus
  misc_feature: 284
cgaacttctatcggcgctttatacggaacttctctgacatagtacgaccgttgacggcgcttacacagaaaggaaccccattcacatggacggagg

SEQ ID NO: 3305 - DNA, 96 bp, Aspergillus thermomutatus
  misc_feature: 284
agataagtacatcgtcgatgtacgcggaggcgaattcatccaggaagtctcgaagggcccagttgatataccgttggaaggtactcggtgcgttcg

SEQ ID NO: 3306 - DNA, 96 bp, Aspergillus thermomutatus
  misc_feature: 283
gcagtggaacgggttgagaatgagccgaagttagtggtcagacagataagcgcacaggggttcgctatacatactcaacaacgccggagaggtaaa

SEQ ID NO: 3307 - DNA, 96 bp, Aspergillus thermomutatus
  misc_feature: 283
ttgatgtaccgttggaaggtgctaggtgcgttcgccataccgaaaggggtaactagccactcgtacagaccaaatcgggtgcgaaacgcagtcaac

SEQ ID NO: 3308 - DNA, 96 bp, Aspergillus thermomutatus
  misc_feature: 283
cggcaagagagcagagcccccatggggcccgttgtacagcatgtcgcgcgaagaactgcttgtactgcgtaagacgcttacagagctgctagagaa

SEQ ID NO: 3309 - DNA, 96 bp, Aspergillus thermomutatus
  misc_feature: 283
tgtaaccgctctagcacctgccgtacgtggctacggtgcttcgccagcgacccatcagtgaagataagtacatcgtcgatgtacgcggaggcgaat

SEQ ID NO: 3310 - DNA, 96 bp, Aspergillus thermomutatus
  misc_feature: 283
catcgacgatgtacttatcttcactgatgggtcgctggcgaagcaccgtagccacgtacggcaggtgctagagcggttacaggccgctgggttgca

SEQ ID NO: 3311 - DNA, 96 bp, Aspergillus thermomutatus
  misc_feature: 283
tcaaatggacaggttacgatcgtcctacgtgggaaccagctgtcaacctcgtcaatacggccgcgctggacgcttgggagcagcgagcgggccaga

SEQ ID NO: 3312 - DNA, 96 bp, Aspergillus thermomutatus
  misc_feature: 283
acggcaagagagcagagcccccatggggcccgttgtacagcatgtcgcgcgaagaactgcttgtactgcgtaagacgcttacagagctgctagaga

SEQ ID NO: 3313 - DNA, 96 bp, Aspergillus thermomutatus
  misc_feature: 283
tcgcgcagttgtaggcggtcatcgtcatcgtcaggcatatcttgttctcttcgcgatagtgcgtcaggtctcgcagctaatttaccaggccgatag

SEQ ID NO: 3314 - DNA, 96 bp, Aspergillus thermomutatus
  misc_feature: 283
tcagctgctcgaaccgctgcgtgtgctcatacgtccatttaaatggtgtacctttgtgcgtgagggctgtaagcgggcgtactatctctgagaagt

SEQ ID NO: 3315 - DNA, 96 bp, Aspergillus thermomutatus
  misc_feature: 283
agaggccgccgcaaggagtatctcgtcaaatggacaggttacgatcgtcctacgtgggaaccagctgtcaacctcgtcaatacggccgcgctggac

SEQ ID NO: 3316 - DNA, 96 bp, Aspergillus thermomutatus
  misc_feature: 283
atcggaagaaagccgacgaactgcccccgcatcgccctggggtcgatcaccgaattgagttgactaagggcgaagacgggaagccgttagaacccc

SEQ ID NO: 3317 - DNA, 96 bp, Aspergillus thermomutatus
  misc_feature: 283
ggaaaggatcgttcgccgcaggacgcaacagactaacatggaacacattatgcacccctggtggagtatctagtcggtaagcatgtgatccaatag

SEQ ID NO: 3318 - DNA, 96 bp, Aspergillus thermomutatus
  misc_feature: 283
gctttctcaatatccttgatgctggctgcgaagatctgcactgctttacctctccggcgttgttgagtatgtatagcgaacccctgtgcgcttatc

SEQ ID NO: 3319 - DNA, 96 bp, Aspergillus thermomutatus
  misc_feature: 283
gccgcctttcataagattcgtatcgcaccgggtgacgaatggttgactgcgtttcgcacccgatttggtctgtacgagtggctagttacccctttc

SEQ ID NO: 3320 - DNA, 96 bp, Aspergillus thermomutatus
  misc_feature: 283
gcatcaaggatattgagaaagcactgcaggtaaagacacatacagaccctgccgataagctaccagcgcactaccacgagttcctaggggcgttcg

SEQ ID NO: 3321 - DNA, 96 bp, Aspergillus thermomutatus
  misc_feature: 283
agccacgtacggcaggtgctagagcggttacaggccgctgggttgcagctagacatcgacaagtgcgagttcgaggtcaagagcacgaaatacctc

SEQ ID NO: 3322 - DNA, 96 bp, Aspergillus thermomutatus
  misc_feature: 283
cggtatggcgaacgcacctagcaccttccaacggtacatcaactggacactaagagactttctggatgaatttgcatctgcgtacgttgatgatat

SEQ ID NO: 3323 - DNA, 96 bp, Aspergillus thermomutatus
  misc_feature: 283
cgagacacggtcgtggagacggatgcttccaactgggctacgggtgcggtgatgtcccaatacgacgatgacggcctgctgaggccctgcgcatat

SEQ ID NO: 3324 - DNA, 96 bp, Aspergillus thermomutatus
  misc_feature: 283
atcgagacacggtcgtggagacggatgcttccaactgggctacgggtgcggtgatgtcccaatacgacgatgacggcctgctgaggccctgcgcat

SEQ ID NO: 3325 - DNA, 96 bp, Aspergillus thermomutatus
  misc_feature: 283
aggcaaagtggttcaccaagctggatgtcatcgccgcctttcataagattcgtatcgcaccgggtgacgaatggttgactgcgtttcgcacccgat

SEQ ID NO: 3326 - DNA, 96 bp, Aspergillus thermomutatus
  misc_feature: 282
tcgtcgatgtacgcggaggcgaattcatccaggaagtctcgaagggcccagttgatataccgttggaaggtactcggtgcgttcgccatgccaaaa

SEQ ID NO: 3327 - DNA, 96 bp, Aspergillus thermomutatus
  misc_feature: 282
tgtaccgttggaaggtgctaggtgcgttcgccataccgaaaggggtaactagccactcgtacagaccaaatcgggtgcgaaacgcagtcaaccatt

SEQ ID NO: 3328 - DNA, 96 bp, Aspergillus thermomutatus
  misc_feature: 282
atgtgatccaatagcttccagtactgtgaacttcgcgtgctgggcatcgagcttcttgctagggcggtccgttcgtatgttgcgcaggtccaacca

SEQ ID NO: 3329 - DNA, 96 bp, Aspergillus thermomutatus
  misc_feature: 282
tgctagaaggtccggacggcaagagagcagagcccccatggggcccgttgtacagcatgtcgcgcgaagaactgcttgtactgcgtaagacgctta

SEQ ID NO: 3330 - DNA, 96 bp, Aspergillus thermomutatus
  misc_feature: 282
cgcacccgatttggtctgtacgagtggctagttacccctttcggtatggcgaacgcacctagcaccttccaacggtacatcaactggacactaaga

SEQ ID NO: 3331 - DNA, 96 bp, Aspergillus thermomutatus
  misc_feature: 282
caacatacgaacggaccgccctagcaagaagctcgatgcccagcacgcgaagttcacagtactggaagctattggatcacatgcttaccgactaga

SEQ ID NO: 3332 - DNA, 96 bp, Aspergillus thermomutatus
  misc_feature: 282
tcctttgtgagtagcttgctcgggtgaatcattatcttctcgcgcagttgtaggcggtcatcgtcatcgtcaggcatatcttgttctcttcgcgat

SEQ ID NO: 3333 - DNA, 96 bp, Aspergillus thermomutatus
  misc_feature: 282
gtctttcttcgtaatggcattcaatgctcggtaatcaacacagaaacgtagacctccaccaggtttgcgcacgagcagcaccggggctgcagctga

SEQ ID NO: 3334 - DNA, 96 bp, Aspergillus thermomutatus
  misc_feature: 282
tagcttgctcgggtgaatcattatcttctcgcgcagttgtaggcggtcatcgtcatcgtcaggcatatcttgttctcttcgcgatagtgcgtcagg

SEQ ID NO: 3335 - DNA, 96 bp, Aspergillus thermomutatus
  misc_feature: 282
gtaacggtctttcttcgtaatggcattcaatgctcggtaatcaacacagaaacgtagacctccaccaggtttgcgcacgagcagcaccggggctgc

SEQ ID NO: 3336 - DNA, 96 bp, Aspergillus thermomutatus
  misc_feature: 282
gcgcagtagtgaacatcttcttcagctgctcgaaccgctgcgtgtgctcatacgtccatttaaatggtgtacctttgtgcgtgagggctgtaagcg

SEQ ID NO: 3337 - DNA, 96 bp, Aspergillus thermomutatus
  misc_feature: 282
gcgacccatcagtgaagataagtacatcgtcgatgtacgcggaggcgaattcatccaggaagtctcgaagggcccagttgatataccgttggaagg

SEQ ID NO: 3338 - DNA, 96 bp, Aspergillus thermomutatus
  misc_feature: 282
gcacccgatttggtctgtacgagtggctagttacccctttcggtatggcgaacgcacctagcaccttccaacggtacatcaactggacactaagag

SEQ ID NO: 3339 - DNA, 96 bp, Aspergillus thermomutatus
  misc_feature: 282
gaggtcggggtctgccattccaatatagcctttaccttctcagggtccatgcatactcccttgcctgcttcgacgatgaagcccaagtacttggtg

SEQ ID NO: 3340 - DNA, 96 bp, Aspergillus thermomutatus
  misc_feature: 282
agcgacccatcagtgaagataagtacatcgtcgatgtacgcggaggcgaattcatccaggaagtctcgaagggcccagttgatataccgttggaag

SEQ ID NO: 3341 - DNA, 96 bp, Aspergillus thermomutatus
  misc_feature: 282
aacggtctttcttcgtaatggcattcaatgctcggtaatcaacacagaaacgtagacctccaccaggtttgcgcacgagcagcaccggggctgcag

SEQ ID NO: 3342 - DNA, 96 bp, Aspergillus thermomutatus
  misc_feature: 282
acagaaaggaaccccattcacatggacggaggagcacaccaatcggttcgagcagctaaagaagatgtttactaccgcgccgattctcatgcagtt

SEQ ID NO: 3343 - DNA, 96 bp, Aspergillus thermomutatus
  misc_feature: 281
gttgatgtaccgttggaaggtgctaggtgcgttcgccataccgaaaggggtaactagccactcgtacagaccaaatcgggtgcgaaacgcagtcaa

SEQ ID NO: 3344 - DNA, 96 bp, Aspergillus thermomutatus
  misc_feature: 281
ttcgctatacatactcaacaacgccggagaggtaaagcagtgcagatcttcgcagccagcatcaaggatattgagaaagcactgcaggtaaagaca

SEQ ID NO: 3345 - DNA, 96 bp, Aspergillus thermomutatus
  misc_feature: 281
ttcctctatgcctactcttggtctgccttactgcctctctccctgtcttacatggtgccttcctccctaccttatattatacattcttcgctacct

SEQ ID NO: 3346 - DNA, 96 bp, Aspergillus thermomutatus
  misc_feature: 281
tggacgcttgggagcagcgagcgggccagaacacccccgacccgcgaggggagggggagtagtgtagcgggcaaggcccgctgaatgctcgagctc

SEQ ID NO: 3347 - DNA, 96 bp, Aspergillus thermomutatus
  misc_feature: 281
tgcgccgatacttgcgcagtttgaccctgatcgagacacggtcgtggagacggatgcttccaactgggctacgggtgcggtgatgtcccaatacga

SEQ ID NO: 3348 - DNA, 96 bp, Aspergillus thermomutatus
  misc_feature: 281
taacggtctttcttcgtaatggcattcaatgctcggtaatcaacacagaaacgtagacctccaccaggtttgcgcacgagcagcaccggggctgca

SEQ ID NO: 3349 - DNA, 96 bp, Aspergillus thermomutatus
  misc_feature: 281
tcgcggcaggctgactaactccgactcccattccctaagggcgttgatgatcgcgagcagctccttatcgtggatctcgtagttgcattccgcagg

SEQ ID NO: 3350 - DNA, 96 bp, Aspergillus thermomutatus
  misc_feature: 281
tcgccagcgacccatcagtgaagataagtacatcgtcgatgtacgcggaggcgaattcatccaggaagtctcgaagggcccagttgatataccgtt

SEQ ID NO: 3351 - DNA, 96 bp, Aspergillus thermomutatus
  misc_feature: 281
accgcctacaactgcgcgagaagataatgattcacccgagcaagctactcacaaaggatcccccaccctcagtggtgagccgactgatgctcgcta

SEQ ID NO: 3352 - DNA, 96 bp, Aspergillus thermomutatus
  misc_feature: 281
atacttgcgcagtttgaccctgatcgagacacggtcgtggagacggatgcttccaactgggctacgggtgcggtgatgtcccaatacgacgatgac

SEQ ID NO: 3353 - DNA, 96 bp, Aspergillus thermomutatus
  misc_feature: 281
gtacggcaggtgctagagcggttacaggccgctgggttgcagctagacatcgacaagtgcgagttcgaggtcaagagcacgaaatacctcgggttt

SEQ ID NO: 3354 - DNA, 96 bp, Aspergillus thermomutatus
  misc_feature: 281
gaccctgatcgagacacggtcgtggagacggatgcttccaactgggctacgggtgcggtgatgtcccaatacgacgatgacggcctgctgaggccc

SEQ ID NO: 3355 - DNA, 96 bp, Aspergillus thermomutatus
  misc_feature: 281
acggtctttcttcgtaatggcattcaatgctcggtaatcaacacagaaacgtagacctccaccaggtttgcgcacgagcagcaccggggctgcagc

SEQ ID NO: 3356 - DNA, 96 bp, Aspergillus thermomutatus
  misc_feature: 281
gcgaatgaatgctacgttggaagcgtacctgcggaacttctgcaactacgcccagtctaattggaagtcgctgctgccgatggcccagcttgcgat

SEQ ID NO: 3357 - DNA, 96 bp, Aspergillus thermomutatus
  misc_feature: 281
gcaacatacgaacggaccgccctagcaagaagctcgatgcccagcacgcgaagttcacagtactggaagctattggatcacatgcttaccgactag

SEQ ID NO: 3358 - DNA, 96 bp, Aspergillus thermomutatus
  misc_feature: 281
gaagataagtacatcgtcgatgtacgcggaggcgaattcatccaggaagtctcgaagggcccagttgatataccgttggaaggtactcggtgcgtt

SEQ ID NO: 3359 - DNA, 96 bp, Aspergillus thermomutatus
  misc_feature: 281
atcgcggcaggctgactaactccgactcccattccctaagggcgttgatgatcgcgagcagctccttatcgtggatctcgtagttgcattccgcag

SEQ ID NO: 3360 - DNA, 96 bp, Aspergillus thermomutatus
  misc_feature: 281
aacatacgaacggaccgccctagcaagaagctcgatgcccagcacgcgaagttcacagtactggaagctattggatcacatgcttaccgactagat

SEQ ID NO: 3361 - DNA, 96 bp, Aspergillus thermomutatus
  misc_feature: 280
caaggactgaccgctatgagagcctaagggaaagacgcagcagaagtaccatgacacgtgaccatcggcagagcagcggtatgctcggcagagcaa

SEQ ID NO: 3362 - DNA, 96 bp, Aspergillus thermomutatus
  misc_feature: 280
taagtacatcgtcgatgtacgcggaggcgaattcatccaggaagtctcgaagggcccagttgatataccgttggaaggtactcggtgcgttcgcca

SEQ ID NO: 3363 - DNA, 96 bp, Aspergillus thermomutatus
  misc_feature: 280
aaccgctctagcacctgccgtacgtggctacggtgcttcgccagcgacccatcagtgaagataagtacatcgtcgatgtacgcggaggcgaattca

SEQ ID NO: 3364 - DNA, 96 bp, Aspergillus thermomutatus
  misc_feature: 280
tgaacaacgcgccaactcacataaattgactaaagctgaagaggaatcgcttatacagtggatattatctatggatcagcgtggagcagctccccg

SEQ ID NO: 3365 - DNA, 96 bp, Aspergillus thermomutatus
  misc_feature: 280
agaggaagtacccgagagttctgaggatgagggacatcgctctgaaggatcgcgagagttagcggcaacttctacggatcagatctcattgccaga

SEQ ID NO: 3366 - DNA, 96 bp, Aspergillus thermomutatus
  misc_feature: 280
gcagatattcgcagtcaccctcaaggatatcaataaggccttgcaagcgaagcagtacaccgaccccaagaccaagctgcccgcgcactaccacga

SEQ ID NO: 3367 - DNA, 96 bp, Aspergillus thermomutatus
  misc_feature: 280
gccgatacttgcgcagtttgaccctgatcgagacacggtcgtggagacggatgcttccaactgggctacgggtgcggtgatgtcccaatacgacga

SEQ ID NO: 3368 - DNA, 96 bp, Aspergillus thermomutatus
  misc_feature: 280
tcggcctgtgccgcggcagcccaatgctcttccaatggtagttggctagggtcgtcgggtgctaccctagcgagcatcagtcggctcaccactgag

SEQ ID NO: 3369 - DNA, 96 bp, Aspergillus thermomutatus
  misc_feature: 280
cagaggccgccgcaaggagtatctcgtcaaatggacaggttacgatcgtcctacgtgggaaccagctgtcaacctcgtcaatacggccgcgctgga

SEQ ID NO: 3370 - DNA, 96 bp, Aspergillus thermomutatus
  misc_feature: 280
gagcaagctactcacaaaggatcccccaccctcagtggtgagccgactgatgctcgctagggtagcacccgacgaccctagccaactaccattgga

SEQ ID NO: 3371 - DNA, 96 bp, Aspergillus thermomutatus
  misc_feature: 280
ggtcatcgtcatcgtcaggcatatcttgttctcttcgcgatagtgcgtcaggtctcgcagctaatttaccaggccgatagactagctggtagttga

SEQ ID NO: 3372 - DNA, 96 bp, Aspergillus thermomutatus
  misc_feature: 280
aggccgccgcaaggagtatctcgtcaaatggacaggttacgatcgtcctacgtgggaaccagctgtcaacctcgtcaatacggccgcgctggacgc

SEQ ID NO: 3373 - DNA, 96 bp, Aspergillus thermomutatus
  misc_feature: 280
gcctgtaaccgctctagcacctgccgtacgtggctacggtgcttcgccagcgacccatcagtgaagataagtacatcgtcgatgtacgcggaggcg

SEQ ID NO: 3374 - DNA, 96 bp, Aspergillus thermomutatus
  misc_feature: 280
gagtatgcatggaccctgagaaggtaaaggctatattggaatggcagaccccgacctcagcgcgcggcgtgcggtcattcctaggcttcgcaaact

SEQ ID NO: 3375 - DNA, 96 bp, Aspergillus thermomutatus
  misc_feature: 280
ccgacgaactgcccccgcatcgccctggggtcgatcaccgaattgagttgactaagggcgaagacgggaagccgttagaacccccatggggccctc

SEQ ID NO: 3376 - DNA, 96 bp, Aspergillus thermomutatus
  misc_feature: 280
cgccgatacttgcgcagtttgaccctgatcgagacacggtcgtggagacggatgcttccaactgggctacgggtgcggtgatgtcccaatacgacg

SEQ ID NO: 3377 - DNA, 96 bp, Aspergillus thermomutatus
  misc_feature: 280
cggcctgtgccgcggcagcccaatgctcttccaatggtagttggctagggtcgtcgggtgctaccctagcgagcatcagtcggctcaccactgagg

SEQ ID NO: 3378 - DNA, 96 bp, Aspergillus thermomutatus
  misc_feature: 280
agtacatcgtcgatgtacgcggaggcgaattcatccaggaagtctcgaagggcccagttgatataccgttggaaggtactcggtgcgttcgccatg

SEQ ID NO: 3379 - DNA, 96 bp, Aspergillus thermomutatus
  misc_feature: 280
catacagaccctgccgataagctaccagcgcactaccacgagttcctaggggcgttcgatcggaagaaagccgacgaactgcccccgcatcgccct

SEQ ID NO: 3380 - DNA, 96 bp, Aspergillus thermomutatus
  misc_feature: 280
cagctgctcgaaccgctgcgtgtgctcatacgtccatttaaatggtgtacctttgtgcgtgagggctgtaagcgggcgtactatctctgagaagtt

SEQ ID NO: 3381 - DNA, 96 bp, Aspergillus thermomutatus
  misc_feature: 280
accttggagcgtatatcaaaggcgaagtggtttaccaaacttgatgtgatcgccgcattccacaagattcgcattgcacccggagatgaatggctg

SEQ ID NO: 3382 - DNA, 96 bp, Aspergillus thermomutatus
  misc_feature: 280
cagcatcaaggatattgagaaagcactgcaggtaaagacacatacagaccctgccgataagctaccagcgcactaccacgagttcctaggggcgtt

SEQ ID NO: 3383 - DNA, 96 bp, Aspergillus thermomutatus
  misc_feature: 280
aagtacatcgtcgatgtacgcggaggcgaattcatccaggaagtctcgaagggcccagttgatataccgttggaaggtactcggtgcgttcgccat

SEQ ID NO: 3384 - DNA, 96 bp, Aspergillus thermomutatus
  misc_feature: 279
gaggaagtacccgagagttctgaggatgagggacatcgctctgaaggatcgcgagagttagcggcaacttctacggatcagatctcattgccagaa

SEQ ID NO: 3385 - DNA, 96 bp, Aspergillus thermomutatus
  misc_feature: 279
tcgcaccgggtgacgaatggttgactgcgtttcgcacccgatttggtctgtacgagtggctagttacccctttcggtatggcgaacgcacctagca

SEQ ID NO: 3386 - DNA, 96 bp, Aspergillus thermomutatus
  misc_feature: 279
tgccgagcataccgctgctctgccgatggtcacgtgtcatggtacttctgctgcgtctttcccttaggctctcatagcggtcagtccttgtctgat

SEQ ID NO: 3387 - DNA, 96 bp, Aspergillus thermomutatus
  misc_feature: 279
cgttggaaggtgctaggtgcgttcgccataccgaaaggggtaactagccactcgtacagaccaaatcgggtgcgaaacgcagtcaaccattcgtca

SEQ ID NO: 3388 - DNA, 96 bp, Aspergillus thermomutatus
  misc_feature: 279
tcggctttcttccgatcgaacgcccctaggaactcgtggtagtgcgctggtagcttatcggcagggtctgtatgtgtctttacctgcagtgctttc

SEQ ID NO: 3389 - DNA, 96 bp, Aspergillus thermomutatus
  misc_feature: 279
cgcaacatacgaacggaccgccctagcaagaagctcgatgcccagcacgcgaagttcacagtactggaagctattggatcacatgcttaccgacta

SEQ ID NO: 3390 - DNA, 96 bp, Aspergillus thermomutatus
  misc_feature: 279
gtcggctttcttccgatcgaacgcccctaggaactcgtggtagtgcgctggtagcttatcggcagggtctgtatgtgtctttacctgcagtgcttt

SEQ ID NO: 3391 - DNA, 96 bp, Aspergillus thermomutatus
  misc_feature: 279
accattgaatgtatcaatacttctggatgggctctaccacctatgatcatctttactggcaaagtccatcaatcccaatggtatcaagatataccc

SEQ ID NO: 3392 - DNA, 96 bp, Aspergillus thermomutatus
  misc_feature: 279
gctgaagaggaatcgcttatacagtggatattatctatggatcagcgtggagcagctccccgaccatctcatgttcaagatatggccaatattttg

SEQ ID NO: 3393 - DNA, 96 bp, Aspergillus thermomutatus
  misc_feature: 279
atcgcaccgggtgacgaatggttgactgcgtttcgcacccgatttggtctgtacgagtggctagttacccctttcggtatggcgaacgcacctagc

SEQ ID NO: 3394 - DNA, 96 bp, Aspergillus thermomutatus
  misc_feature: 279
aggtcggggtctgccattccaatatagcctttaccttctcagggtccatgcatactcccttgcctgcttcgacgatgaagcccaagtacttggtgc

SEQ ID NO: 3395 - DNA, 96 bp, Aspergillus thermomutatus
  misc_feature: 279
acaagatatgcctgacgatgacgatgaccgcctacaactgcgcgagaagataatgattcacccgagcaagctactcacaaaggatcccccaccctc

SEQ ID NO: 3396 - DNA, 96 bp, Aspergillus thermomutatus
  misc_feature: 279
aagataagtacatcgtcgatgtacgcggaggcgaattcatccaggaagtctcgaagggcccagttgatataccgttggaaggtactcggtgcgttc

SEQ ID NO: 3397 - DNA, 96 bp, Aspergillus thermomutatus
  misc_feature: 279
cgtcgatgtacgcggaggcgaattcatccaggaagtctcgaagggcccagttgatataccgttggaaggtactcggtgcgttcgccatgccaaaag

SEQ ID NO: 3398 - DNA, 96 bp, Aspergillus thermomutatus
  misc_feature: 279
actgatgggtcgctggcgaagcaccgtagccacgtacggcaggtgctagagcggttacaggccgctgggttgcagctagacatcgacaagtgcgag

SEQ ID NO: 3399 - DNA, 96 bp, Aspergillus thermomutatus
  misc_feature: 279
cgcctttcataagattcgtatcgcaccgggtgacgaatggttgactgcgtttcgcacccgatttggtctgtacgagtggctagttacccctttcgg

SEQ ID NO: 3400 - DNA, 96 bp, Aspergillus thermomutatus
  misc_feature: 279
cctaacaagctacgcgtgcgtatatcgatcgccgagtgttcggtctctccggatggtcatctgctgtaccgaggccgcaaatgggcccccgactct

SEQ ID NO: 3401 - DNA, 96 bp, Aspergillus thermomutatus
  misc_feature: 279
acattggaaacattggaaacgcacattggtagatacattggattggaagacgcacctaatgattgtgtagcgcacattggaacagacagatgcact

SEQ ID NO: 3402 - DNA, 96 bp, Aspergillus thermomutatus
  misc_feature: 279
aacaagatatgcctgacgatgacgatgaccgcctacaactgcgcgagaagataatgattcacccgagcaagctactcacaaaggatcccccaccct

SEQ ID NO: 3403 - DNA, 96 bp, Aspergillus thermomutatus
  misc_feature: 279
acgcacgactcagtgcttacaggccaccccgggaagaacacattgtacgcgatgatagcgcggaacttctactggccggagctttctgcagatgct

SEQ ID NO: 3404 - DNA, 96 bp, Aspergillus thermomutatus
  misc_feature: 278
ctgtaaccgctctagcacctgccgtacgtggctacggtgcttcgccagcgacccatcagtgaagataagtacatcgtcgatgtacgcggaggcgaa

SEQ ID NO: 3405 - DNA, 96 bp, Aspergillus thermomutatus
  misc_feature: 278
ccaatatatcatcaacgtacgcagatgcaaattcatccagaaagtctcttagtgtccagttgatgtaccgttggaaggtgctaggtgcgttcgcca

SEQ ID NO: 3406 - DNA, 96 bp, Aspergillus thermomutatus
  misc_feature: 278
caagatatgcctgacgatgacgatgaccgcctacaactgcgcgagaagataatgattcacccgagcaagctactcacaaaggatcccccaccctca

SEQ ID NO: 3407 - DNA, 96 bp, Aspergillus thermomutatus
  misc_feature: 278
tgaagataagtacatcgtcgatgtacgcggaggcgaattcatccaggaagtctcgaagggcccagttgatataccgttggaaggtactcggtgcgt

SEQ ID NO: 3408 - DNA, 96 bp, Aspergillus thermomutatus
  misc_feature: 278
tctgtacgagtggctagttacccctttcggtatggcgaacgcacctagcaccttccaacggtacatcaactggacactaagagactttctggatga

SEQ ID NO: 3409 - DNA, 96 bp, Aspergillus thermomutatus
  misc_feature: 278
cgagcataccgctgctctgccgatggtcacgtgtcatggtacttctgctgcgtctttcccttaggctctcatagcggtcagtccttgtctgatcga

SEQ ID NO: 3410 - DNA, 96 bp, Aspergillus thermomutatus
  misc_feature: 278
gccattctagtatagcttttaccttgtcggggtccatgcgtacgcccttgccagcttcaatgataaacccgaggtatttcgtgctcttgacctcga

SEQ ID NO: 3411 - DNA, 96 bp, Aspergillus thermomutatus
  misc_feature: 278
ggactgaccgctatgagagcctaagggaaagacgcagcagaagtaccatgacacgtgaccatcggcagagcagcggtatgctcggcagagcaatga

SEQ ID NO: 3412 - DNA, 96 bp, Aspergillus thermomutatus
  misc_feature: 278
gcagagcccccatggggcccgttgtacagcatgtcgcgcgaagaactgcttgtactgcgtaagacgcttacagagctgctagagaagaacttcata

SEQ ID NO: 3413 - DNA, 96 bp, Aspergillus thermomutatus
  misc_feature: 278
gacccatcagtgaagataagtacatcgtcgatgtacgcggaggcgaattcatccaggaagtctcgaagggcccagttgatataccgttggaaggta

SEQ ID NO: 3414 - DNA, 96 bp, Aspergillus thermomutatus
  misc_feature: 278
gttcctctatgcctactcttggtctgccttactgcctctctccctgtcttacatggtgccttcctccctaccttatattatacattcttcgctacc

SEQ ID NO: 3415 - DNA, 96 bp, Aspergillus thermomutatus
  misc_feature: 278
gggcagcgggtatcggtctttctttgtgatcgcgttcaacgcgcggtagtcgacacagaatcgtaaccctccacctggcttgcgggcgaacagcac

SEQ ID NO: 3416 - DNA, 96 bp, Aspergillus thermomutatus
  misc_feature: 278
gtctgtacgagtggctagttacccctttcggtatggcgaacgcacctagcaccttccaacggtacatcaactggacactaagagactttctggatg

SEQ ID NO: 3417 - DNA, 96 bp, Aspergillus thermomutatus
  misc_feature: 278
ggtctgccattctagtatagcttttaccttgtcggggtccatgcgtacgcccttgccagcttcaatgataaacccgaggtatttcgtgctcttgac

SEQ ID NO: 3418 - DNA, 96 bp, Aspergillus thermomutatus
  misc_feature: 278
gggaatcggagctgatcagcctaccgaagtttgatatcgtcactgaccataagaatctggagtacttcacagttcgcaggcgactaaacgagcggc

SEQ ID NO: 3419 - DNA, 96 bp, Aspergillus thermomutatus
  misc_feature: 278
gctcgggtgaatcattatcttctcgcgcagttgtaggcggtcatcgtcatcgtcaggcatatcttgttctcttcgcgatagtgcgtcaggtctcgc

SEQ ID NO: 3420 - DNA, 96 bp, Aspergillus thermomutatus
  misc_feature: 278
gcgtacatcgacgatgtacttatcttcactgatgggtcgctggcgaagcaccgtagccacgtacggcaggtgctagagcggttacaggccgctggg

SEQ ID NO: 3421 - DNA, 96 bp, Aspergillus thermomutatus
  misc_feature: 278
cgacgatgacggcctgctgaggccctgcgcatattactcccggaaaaacacaccagccgaatgcaactacgagatccatgacaaggagctgctcgc

SEQ ID NO: 3422 - DNA, 96 bp, Aspergillus thermomutatus
  misc_feature: 278
gcagaggccgccgcaaggagtatctcgtcaaatggacaggttacgatcgtcctacgtgggaaccagctgtcaacctcgtcaatacggccgcgctgg

SEQ ID NO: 3423 - DNA, 96 bp, Aspergillus thermomutatus
  misc_feature: 278
ctgcgccgatacttgcgcagtttgaccctgatcgagacacggtcgtggagacggatgcttccaactgggctacgggtgcggtgatgtcccaatacg

SEQ ID NO: 3424 - DNA, 96 bp, Aspergillus thermomutatus
  misc_feature: 278
actaaagctgaagaggaatcgcttatacagtggatattatctatggatcagcgtggagcagctccccgaccatctcatgttcaagatatggccaat

SEQ ID NO: 3425 - DNA, 96 bp, Aspergillus thermomutatus
  misc_feature: 278
agcagagcccccatggggcccgttgtacagcatgtcgcgcgaagaactgcttgtactgcgtaagacgcttacagagctgctagagaagaacttcat

SEQ ID NO: 3426 - DNA, 96 bp, Aspergillus thermomutatus
  misc_feature: 277
ctgtacgagtggctagttacccctttcggtatggcgaacgcacctagcaccttccaacggtacatcaactggacactaagagactttctggatgaa

SEQ ID NO: 3427 - DNA, 96 bp, Aspergillus thermomutatus
  misc_feature: 277
tgtacgagtggctagttacccctttcggtatggcgaacgcacctagcaccttccaacggtacatcaactggacactaagagactttctggatgaat

SEQ ID NO: 3428 - DNA, 96 bp, Aspergillus thermomutatus
  misc_feature: 277
acaaggactgaccgctatgagagcctaagggaaagacgcagcagaagtaccatgacacgtgaccatcggcagagcagcggtatgctcggcagagca

SEQ ID NO: 3429 - DNA, 96 bp, Aspergillus thermomutatus
  misc_feature: 277
tgactgcgtttcgcacccgatttggtctgtacgagtggctagttacccctttcggtatggcgaacgcacctagcaccttccaacggtacatcaact

SEQ ID NO: 3430 - DNA, 96 bp, Aspergillus thermomutatus
  misc_feature: 277
cgggtgcggtgatgtcccaatacgacgatgacggcctgctgaggccctgcgcatattactcccggaaaaacacaccagccgaatgcaactacgaga

SEQ ID NO: 3431 - DNA, 96 bp, Aspergillus thermomutatus
  misc_feature: 277
tcagtgaaaaccaatatatcatcaacgtacgcagatgcaaattcatccagaaagtctcttagtgtccagttgatgtaccgttggaaggtgctaggt

SEQ ID NO: 3432 - DNA, 96 bp, Aspergillus thermomutatus
  misc_feature: 277
tattcgcagtcaccctcaaggatatcaataaggccttgcaagcgaagcagtacaccgaccccaagaccaagctgcccgcgcactaccacgagcacc

SEQ ID NO: 3433 - DNA, 96 bp, Aspergillus thermomutatus
  misc_feature: 277
gcgccgatacttgcgcagtttgaccctgatcgagacacggtcgtggagacggatgcttccaactgggctacgggtgcggtgatgtcccaatacgac

SEQ ID NO: 3434 - DNA, 96 bp, Aspergillus thermomutatus
  misc_feature: 277
cagagcccccatggggcccgttgtacagcatgtcgcgcgaagaactgcttgtactgcgtaagacgcttacagagctgctagagaagaacttcatac

SEQ ID NO: 3435 - DNA, 96 bp, Aspergillus thermomutatus
  misc_feature: 277
ggtctgtacgagtggctagttacccctttcggtatggcgaacgcacctagcaccttccaacggtacatcaactggacactaagagactttctggat

SEQ ID NO: 3436 - DNA, 96 bp, Aspergillus thermomutatus
  misc_feature: 277
ggtaacggtctttcttcgtaatggcattcaatgctcggtaatcaacacagaaacgtagacctccaccaggtttgcgcacgagcagcaccggggctg

SEQ ID NO: 3437 - DNA, 96 bp, Aspergillus thermomutatus
  misc_feature: 277
gggcagttcgtcggctttcttccgatcgaacgcccctaggaactcgtggtagtgcgctggtagcttatcggcagggtctgtatgtgtctttacctg

SEQ ID NO: 3438 - DNA, 96 bp, Aspergillus thermomutatus
  misc_feature: 277
aagccgacgaactgcccccgcatcgccctggggtcgatcaccgaattgagttgactaagggcgaagacgggaagccgttagaacccccatggggcc

SEQ ID NO: 3439 - DNA, 96 bp, Aspergillus thermomutatus
  misc_feature: 277
ggcaagagagcagagcccccatggggcccgttgtacagcatgtcgcgcgaagaactgcttgtactgcgtaagacgcttacagagctgctagagaag

SEQ ID NO: 3440 - DNA, 96 bp, Aspergillus thermomutatus
  misc_feature: 277
acgatgaccgcctacaactgcgcgagaagataatgattcacccgagcaagctactcacaaaggatcccccaccctcagtggtgagccgactgatgc

SEQ ID NO: 3441 - DNA, 96 bp, Aspergillus thermomutatus
  misc_feature: 277
acatcgacgatgtacttatcttcactgatgggtcgctggcgaagcaccgtagccacgtacggcaggtgctagagcggttacaggccgctgggttgc

SEQ ID NO: 3442 - DNA, 96 bp, Aspergillus thermomutatus
  misc_feature: 277
gatacgaatcttatgaaaggcggcgatgacatccagcttggtgaaccactttgccttcgcgatgcgctctagtgtctcgttgatcagcggaagggg

SEQ ID NO: 3443 - DNA, 96 bp, Aspergillus thermomutatus
  misc_feature: 277
aagatatgcctgacgatgacgatgaccgcctacaactgcgcgagaagataatgattcacccgagcaagctactcacaaaggatcccccaccctcag

SEQ ID NO: 3444 - DNA, 96 bp, Aspergillus thermomutatus
  misc_feature: 277
acgggtgcggtgatgtcccaatacgacgatgacggcctgctgaggccctgcgcatattactcccggaaaaacacaccagccgaatgcaactacgag

SEQ ID NO: 3445 - DNA, 96 bp, Aspergillus thermomutatus
  misc_feature: 277
aagcaggcaagggagtatgcatggaccctgagaaggtaaaggctatattggaatggcagaccccgacctcagcgcgcggcgtgcggtcattcctag

SEQ ID NO: 3446 - DNA, 96 bp, Aspergillus thermomutatus
  misc_feature: 277
ccgagcataccgctgctctgccgatggtcacgtgtcatggtacttctgctgcgtctttcccttaggctctcatagcggtcagtccttgtctgatcg

SEQ ID NO: 3447 - DNA, 96 bp, Aspergillus thermomutatus
  misc_feature: 277
agcaggcaagggagtatgcatggaccctgagaaggtaaaggctatattggaatggcagaccccgacctcagcgcgcggcgtgcggtcattcctagg

SEQ ID NO: 3448 - DNA, 96 bp, Aspergillus thermomutatus
  misc_feature: 277
cacagaaaggaaccccattcacatggacggaggagcacaccaatcggttcgagcagctaaagaagatgtttactaccgcgccgattctcatgcagt

SEQ ID NO: 3449 - DNA, 96 bp, Aspergillus thermomutatus
  misc_feature: 277
caatatatcatcaacgtacgcagatgcaaattcatccagaaagtctcttagtgtccagttgatgtaccgttggaaggtgctaggtgcgttcgccat

SEQ ID NO: 3450 - DNA, 96 bp, Aspergillus thermomutatus
  misc_feature: 277
aacctctagaggctccaggttgtatccgtggtccaggaagaacggacttacccccgtgctcgtagcgtccctgccatttatcgcaagctgggccat

SEQ ID NO: 3451 - DNA, 96 bp, Aspergillus thermomutatus
  misc_feature: 277
agttcgtcggctttcttccgatcgaacgcccctaggaactcgtggtagtgcgctggtagcttatcggcagggtctgtatgtgtctttacctgcagt

SEQ ID NO: 3452 - DNA, 96 bp, Aspergillus thermomutatus
  misc_feature: 276
ttaggggcagcgggtatcggtctttctttgtgatcgcgttcaacgcgcggtagtcgacacagaatcgtaaccctccacctggcttgcgggcgaaca

SEQ ID NO: 3453 - DNA, 96 bp, Aspergillus thermomutatus
  misc_feature: 276
ttaaactagtccttacccttaaaagaaaggacaaggagacagggaaggacaaggcaacagaaaaggacaaggtgacaggaaagaacaaaatgacag

SEQ ID NO: 3454 - DNA, 96 bp, Aspergillus thermomutatus
  misc_feature: 276
cactgatgggtcgctggcgaagcaccgtagccacgtacggcaggtgctagagcggttacaggccgctgggttgcagctagacatcgacaagtgcga

SEQ ID NO: 3455 - DNA, 96 bp, Aspergillus thermomutatus
  misc_feature: 276
tcaactggcttgggaaaggatcgttcgccgcaggacgcaacagactaacatggaacacattatgcacccctggtggagtatctagtcggtaagcat

SEQ ID NO: 3456 - DNA, 96 bp, Aspergillus thermomutatus
  misc_feature: 276
gggaaaggatcgttcgccgcaggacgcaacagactaacatggaacacattatgcacccctggtggagtatctagtcggtaagcatgtgatccaata

SEQ ID NO: 3457 - DNA, 96 bp, Aspergillus thermomutatus
  misc_feature: 276
aatatatcatcaacgtacgcagatgcaaattcatccagaaagtctcttagtgtccagttgatgtaccgttggaaggtgctaggtgcgttcgccata

SEQ ID NO: 3458 - DNA, 96 bp, Aspergillus thermomutatus
  misc_feature: 276
taaactagtccttacccttaaaagaaaggacaaggagacagggaaggacaaggcaacagaaaaggacaaggtgacaggaaagaacaaaatgacagg

SEQ ID NO: 3459 - DNA, 96 bp, Aspergillus thermomutatus
  misc_feature: 276
attaggggcagcgggtatcggtctttctttgtgatcgcgttcaacgcgcggtagtcgacacagaatcgtaaccctccacctggcttgcgggcgaac

SEQ ID NO: 3460 - DNA, 96 bp, Aspergillus thermomutatus
  misc_feature: 276
gattgtgctaggtacgccatggtagccgatgaatcggtcgattagcagctgcgctacggtctcggcatcagttcgctcacagggcactaatatcac

SEQ ID NO: 3461 - DNA, 96 bp, Aspergillus thermomutatus
  misc_feature: 276
acgatgacgatgaccgcctacaactgcgcgagaagataatgattcacccgagcaagctactcacaaaggatcccccaccctcagtggtgagccgac

SEQ ID NO: 3462 - DNA, 96 bp, Aspergillus thermomutatus
  misc_feature: 276
gcttcgccagcgacccatcagtgaagataagtacatcgtcgatgtacgcggaggcgaattcatccaggaagtctcgaagggcccagttgatatacc

SEQ ID NO: 3463 - DNA, 96 bp, Aspergillus thermomutatus
  misc_feature: 276
gggctacgggtgcggtgatgtcccaatacgacgatgacggcctgctgaggccctgcgcatattactcccggaaaaacacaccagccgaatgcaact

SEQ ID NO: 3464 - DNA, 96 bp, Aspergillus thermomutatus
  misc_feature: 276
agccgacgaactgcccccgcatcgccctggggtcgatcaccgaattgagttgactaagggcgaagacgggaagccgttagaacccccatggggccc

SEQ ID NO: 3465 - DNA, 96 bp, Aspergillus thermomutatus
  misc_feature: 276
ggcctgtgccgcggcagcccaatgctcttccaatggtagttggctagggtcgtcgggtgctaccctagcgagcatcagtcggctcaccactgaggg

SEQ ID NO: 3466 - DNA, 96 bp, Aspergillus thermomutatus
  misc_feature: 276
gccgacgaactgcccccgcatcgccctggggtcgatcaccgaattgagttgactaagggcgaagacgggaagccgttagaacccccatggggccct

SEQ ID NO: 3467 - DNA, 96 bp, Aspergillus thermomutatus
  misc_feature: 276
gccacgtacggcaggtgctagagcggttacaggccgctgggttgcagctagacatcgacaagtgcgagttcgaggtcaagagcacgaaatacctcg

SEQ ID NO: 3468 - DNA, 96 bp, Aspergillus thermomutatus
  misc_feature: 276
gacgcacgactcagtgcttacaggccaccccgggaagaacacattgtacgcgatgatagcgcggaacttctactggccggagctttctgcagatgc

SEQ ID NO: 3469 - DNA, 96 bp, Aspergillus thermomutatus
  misc_feature: 276
ccgctctagcacctgccgtacgtggctacggtgcttcgccagcgacccatcagtgaagataagtacatcgtcgatgtacgcggaggcgaattcatc

SEQ ID NO: 3470 - DNA, 96 bp, Aspergillus thermomutatus
  misc_feature: 276
gatcctttgtgagtagcttgctcgggtgaatcattatcttctcgcgcagttgtaggcggtcatcgtcatcgtcaggcatatcttgttctcttcgcg

SEQ ID NO: 3471 - DNA, 96 bp, Aspergillus thermomutatus
  misc_feature: 276
gactgaccgctatgagagcctaagggaaagacgcagcagaagtaccatgacacgtgaccatcggcagagcagcggtatgctcggcagagcaatgat

SEQ ID NO: 3472 - DNA, 96 bp, Aspergillus thermomutatus
  misc_feature: 276
cttcgccagcgacccatcagtgaagataagtacatcgtcgatgtacgcggaggcgaattcatccaggaagtctcgaagggcccagttgatataccg

SEQ ID NO: 3473 - DNA, 96 bp, Aspergillus thermomutatus
  misc_feature: 276
acacagaaaggaaccccattcacatggacggaggagcacaccaatcggttcgagcagctaaagaagatgtttactaccgcgccgattctcatgcag

SEQ ID NO: 3474 - DNA, 96 bp, Aspergillus thermomutatus
  misc_feature: 276
cggtctttctttgtgatcgcgttcaacgcgcggtagtcgacacagaatcgtaaccctccacctggcttgcgggcgaacagcaccggagccgcggcg

SEQ ID NO: 3475 - DNA, 96 bp, Aspergillus thermomutatus
  misc_feature: 276
ccgatacttgcgcagtttgaccctgatcgagacacggtcgtggagacggatgcttccaactgggctacgggtgcggtgatgtcccaatacgacgat

SEQ ID NO: 3476 - DNA, 96 bp, Aspergillus thermomutatus
  misc_feature: 276
agtatgcatggaccctgagaaggtaaaggctatattggaatggcagaccccgacctcagcgcgcggcgtgcggtcattcctaggcttcgcaaactt

SEQ ID NO: 3477 - DNA, 96 bp, Aspergillus thermomutatus
  misc_feature: 275
actgatgggtcactctcggagcacagacgacaggtaaaacaggtacttgcgcgcctacaggaagcaggcctacagctagatattgacaagtgcgaa

SEQ ID NO: 3478 - DNA, 96 bp, Aspergillus thermomutatus
  misc_feature: 275
attaaactagtccttacccttaaaagaaaggacaaggagacagggaaggacaaggcaacagaaaaggacaaggtgacaggaaagaacaaaatgaca

SEQ ID NO: 3479 - DNA, 96 bp, Aspergillus thermomutatus
  misc_feature: 275
tcttatgaaaggcggcgatgacatccagcttggtgaaccactttgccttcgcgatgcgctctagtgtctcgttgatcagcggaagggggtaacggt

SEQ ID NO: 3480 - DNA, 96 bp, Aspergillus thermomutatus
  misc_feature: 275
tcggtctttctttgtgatcgcgttcaacgcgcggtagtcgacacagaatcgtaaccctccacctggcttgcgggcgaacagcaccggagccgcggc

SEQ ID NO: 3481 - DNA, 96 bp, Aspergillus thermomutatus
  misc_feature: 275
cctgtaaccgctctagcacctgccgtacgtggctacggtgcttcgccagcgacccatcagtgaagataagtacatcgtcgatgtacgcggaggcga

SEQ ID NO: 3482 - DNA, 96 bp, Aspergillus thermomutatus
  misc_feature: 275
aggatattgagaaagcactgcaggtaaagacacatacagaccctgccgataagctaccagcgcactaccacgagttcctaggggcgttcgatcgga

SEQ ID NO: 3483 - DNA, 96 bp, Aspergillus thermomutatus
  misc_feature: 275
gggttcctctatgcctactcttggtctgccttactgcctctctccctgtcttacatggtgccttcctccctaccttatattatacattcttcgcta

SEQ ID NO: 3484 - DNA, 96 bp, Aspergillus thermomutatus
  misc_feature: 275
tacgcgatgatagcgcggaacttctactggccggagctttctgcagatgctcgacgattcgttaagaattgcgataagtgtggggccaaccgtgtg

SEQ ID NO: 3485 - DNA, 96 bp, Aspergillus thermomutatus
  misc_feature: 275
tacgacgatgacggcctgctgaggccctgcgcatattactcccggaaaaacacaccagccgaatgcaactacgagatccatgacaaggagctgctc

SEQ ID NO: 3486 - DNA, 96 bp, Aspergillus thermomutatus
  misc_feature: 275
taccgaaaggggtaactagccactcgtacagaccaaatcgggtgcgaaacgcagtcaaccattcgtcacccggtgcgatacgaatcttatgaaagg

SEQ ID NO: 3487 - DNA, 96 bp, Aspergillus thermomutatus
  misc_feature: 275
gtctgccattctagtatagcttttaccttgtcggggtccatgcgtacgcccttgccagcttcaatgataaacccgaggtatttcgtgctcttgacc

SEQ ID NO: 3488 - DNA, 96 bp, Aspergillus thermomutatus
  misc_feature: 275
aattaaactagtccttacccttaaaagaaaggacaaggagacagggaaggacaaggcaacagaaaaggacaaggtgacaggaaagaacaaaatgac

SEQ ID NO: 3489 - DNA, 96 bp, Aspergillus thermomutatus
  misc_feature: 275
gtcacgtgtcatggtacttctgctgcgtctttcccttaggctctcatagcggtcagtccttgtctgatcgactggttgtcattgctccttggttct

SEQ ID NO: 3490 - DNA, 96 bp, Aspergillus thermomutatus
  misc_feature: 275
ggttcctctatgcctactcttggtctgccttactgcctctctccctgtcttacatggtgccttcctccctaccttatattatacattcttcgctac

SEQ ID NO: 3491 - DNA, 96 bp, Aspergillus thermomutatus
  misc_feature: 275
ggtctttctttgtgatcgcgttcaacgcgcggtagtcgacacagaatcgtaaccctccacctggcttgcgggcgaacagcaccggagccgcggcgg

SEQ ID NO: 3492 - DNA, 96 bp, Aspergillus thermomutatus
  misc_feature: 275
agcatcaaggatattgagaaagcactgcaggtaaagacacatacagaccctgccgataagctaccagcgcactaccacgagttcctaggggcgttc

SEQ ID NO: 3493 - DNA, 96 bp, Aspergillus thermomutatus
  misc_feature: 275
atcgacgatgtacttatcttcactgatgggtcgctggcgaagcaccgtagccacgtacggcaggtgctagagcggttacaggccgctgggttgcag

SEQ ID NO: 3494 - DNA, 96 bp, Aspergillus thermomutatus
  misc_feature: 275
ctgaagaggaatcgcttatacagtggatattatctatggatcagcgtggagcagctccccgaccatctcatgttcaagatatggccaatattttgt

SEQ ID NO: 3495 - DNA, 96 bp, Aspergillus thermomutatus
  misc_feature: 275
cggtctttcttcgtaatggcattcaatgctcggtaatcaacacagaaacgtagacctccaccaggtttgcgcacgagcagcaccggggctgcagct

SEQ ID NO: 3496 - DNA, 96 bp, Aspergillus thermomutatus
  misc_feature: 275
cgatggtcacgtgtcatggtacttctgctgcgtctttcccttaggctctcatagcggtcagtccttgtctgatcgactggttgtcattgctccttg

SEQ ID NO: 3497 - DNA, 96 bp, Aspergillus thermomutatus
  misc_feature: 275
cgacccatcagtgaagataagtacatcgtcgatgtacgcggaggcgaattcatccaggaagtctcgaagggcccagttgatataccgttggaaggt

SEQ ID NO: 3498 - DNA, 96 bp, Aspergillus thermomutatus
  misc_feature: 275
atcggtctttctttgtgatcgcgttcaacgcgcggtagtcgacacagaatcgtaaccctccacctggcttgcgggcgaacagcaccggagccgcgg

SEQ ID NO: 3499 - DNA, 96 bp, Aspergillus thermomutatus
  misc_feature: 275
caactggcttgggaaaggatcgttcgccgcaggacgcaacagactaacatggaacacattatgcacccctggtggagtatctagtcggtaagcatg

SEQ ID NO: 3500 - DNA, 96 bp, Aspergillus thermomutatus
  misc_feature: 275
aagctgaagaggaatcgcttatacagtggatattatctatggatcagcgtggagcagctccccgaccatctcatgttcaagatatggccaatattt

SEQ ID NO: 3501 - DNA, 96 bp, Aspergillus thermomutatus
  misc_feature: 274
ttgggaaaggatcgttcgccgcaggacgcaacagactaacatggaacacattatgcacccctggtggagtatctagtcggtaagcatgtgatccaa

SEQ ID NO: 3502 - DNA, 96 bp, Aspergillus thermomutatus
  misc_feature: 274
ttcgtcggctttcttccgatcgaacgcccctaggaactcgtggtagtgcgctggtagcttatcggcagggtctgtatgtgtctttacctgcagtgc

SEQ ID NO: 3503 - DNA, 96 bp, Aspergillus thermomutatus
  misc_feature: 274
ttcgcacccgatttggtctgtacgagtggctagttacccctttcggtatggcgaacgcacctagcaccttccaacggtacatcaactggacactaa

SEQ ID NO: 3504 - DNA, 96 bp, Aspergillus thermomutatus
  misc_feature: 274
aatcgcggcaggctgactaactccgactcccattccctaagggcgttgatgatcgcgagcagctccttatcgtggatctcgtagttgcattccgca

SEQ ID NO: 3505 - DNA, 96 bp, Aspergillus thermomutatus
  misc_feature: 274
tacacagaaaggaaccccattcacatggacggaggagcacaccaatcggttcgagcagctaaagaagatgtttactaccgcgccgattctcatgca

SEQ ID NO: 3506 - DNA, 96 bp, Aspergillus thermomutatus
  misc_feature: 274
atcctttgtgagtagcttgctcgggtgaatcattatcttctcgcgcagttgtaggcggtcatcgtcatcgtcaggcatatcttgttctcttcgcga

SEQ ID NO: 3507 - DNA, 96 bp, Aspergillus thermomutatus
  misc_feature: 274
tcactgatgggtcgctggcgaagcaccgtagccacgtacggcaggtgctagagcggttacaggccgctgggttgcagctagacatcgacaagtgcg

SEQ ID NO: 3508 - DNA, 96 bp, Aspergillus thermomutatus
  misc_feature: 274
gttcgtcggctttcttccgatcgaacgcccctaggaactcgtggtagtgcgctggtagcttatcggcagggtctgtatgtgtctttacctgcagtg

SEQ ID NO: 3509 - DNA, 96 bp, Aspergillus thermomutatus
  misc_feature: 274
gaatcttatgaaaggcggcgatgacatccagcttggtgaaccactttgccttcgcgatgcgctctagtgtctcgttgatcagcggaagggggtaac

SEQ ID NO: 3510 - DNA, 96 bp, Aspergillus thermomutatus
  misc_feature: 274
atattcgcagtcaccctcaaggatatcaataaggccttgcaagcgaagcagtacaccgaccccaagaccaagctgcccgcgcactaccacgagcac

SEQ ID NO: 3511 - DNA, 96 bp, Aspergillus thermomutatus
  misc_feature: 274
acccgatttggtctgtacgagtggctagttacccctttcggtatggcgaacgcacctagcaccttccaacggtacatcaactggacactaagagac

SEQ ID NO: 3512 - DNA, 96 bp, Aspergillus thermomutatus
  misc_feature: 274
gtcattcctaggcttcgcaaacttctatcggcgctttatacggaacttctcagagatagtacgcccgcttacagccctcacgcacaaaggtacacc

SEQ ID NO: 3513 - DNA, 96 bp, Aspergillus thermomutatus
  misc_feature: 274
gcagtagtgaacatcttcttcagctgctcgaaccgctgcgtgtgctcatacgtccatttaaatggtgtacctttgtgcgtgagggctgtaagcggg

SEQ ID NO: 3514 - DNA, 96 bp, Aspergillus thermomutatus
  misc_feature: 274
gatttggtctgtacgagtggctagttacccctttcggtatggcgaacgcacctagcaccttccaacggtacatcaactggacactaagagactttc

SEQ ID NO: 3515 - DNA, 96 bp, Aspergillus thermomutatus
  misc_feature: 274
cttcactgatgggtcgctggcgaagcaccgtagccacgtacggcaggtgctagagcggttacaggccgctgggttgcagctagacatcgacaagtg

SEQ ID NO: 3516 - DNA, 96 bp, Aspergillus thermomutatus
  misc_feature: 274
cgtcggctttcttccgatcgaacgcccctaggaactcgtggtagtgcgctggtagcttatcggcagggtctgtatgtgtctttacctgcagtgctt

SEQ ID NO: 3517 - DNA, 96 bp, Aspergillus thermomutatus
  misc_feature: 274
cggtgcgatacgaatcttatgaaaggcggcgatgacatccagcttggtgaaccactttgccttcgcgatgcgctctagtgtctcgttgatcagcgg

SEQ ID NO: 3518 - DNA, 96 bp, Aspergillus thermomutatus
  misc_feature: 274
ccggtgcgatacgaatcttatgaaaggcggcgatgacatccagcttggtgaaccactttgccttcgcgatgcgctctagtgtctcgttgatcagcg

SEQ ID NO: 3519 - DNA, 96 bp, Aspergillus thermomutatus
  misc_feature: 274
atgggaatcggagctgatcagcctaccgaagtttgatatcgtcactgaccataagaatctggagtacttcacagttcgcaggcgactaaacgagcg

SEQ ID NO: 3520 - DNA, 96 bp, Aspergillus thermomutatus
  misc_feature: 274
atagaagttcgcaaagccgagaaacgatcgtacgcctcgagtggatgtaggggtctgccattctagtatagcttttaccttgtcggggtccatgcg

SEQ ID NO: 3521 - DNA, 96 bp, Aspergillus thermomutatus
  misc_feature: 274
cgacgaactgcccccgcatcgccctggggtcgatcaccgaattgagttgactaagggcgaagacgggaagccgttagaacccccatggggccctct

SEQ ID NO: 3522 - DNA, 96 bp, Aspergillus thermomutatus
  misc_feature: 274
cgaagcaggcaagggagtatgcatggaccctgagaaggtaaaggctatattggaatggcagaccccgacctcagcgcgcggcgtgcggtcattcct

SEQ ID NO: 3523 - DNA, 96 bp, Aspergillus thermomutatus
  misc_feature: 273
ttcactgatgggtcgctggcgaagcaccgtagccacgtacggcaggtgctagagcggttacaggccgctgggttgcagctagacatcgacaagtgc

SEQ ID NO: 3524 - DNA, 96 bp, Aspergillus thermomutatus
  misc_feature: 273
gatattcgcagtcaccctcaaggatatcaataaggccttgcaagcgaagcagtacaccgaccccaagaccaagctgcccgcgcactaccacgagca

SEQ ID NO: 3525 - DNA, 96 bp, Aspergillus thermomutatus
  misc_feature: 273
gatcgagacacggtcgtggagacggatgcttccaactgggctacgggtgcggtgatgtcccaatacgacgatgacggcctgctgaggccctgcgca

SEQ ID NO: 3526 - DNA, 96 bp, Aspergillus thermomutatus
  misc_feature: 273
actgggctacgggtgcggtgatgtcccaatacgacgatgacggcctgctgaggccctgcgcatattactcccggaaaaacacaccagccgaatgca

SEQ ID NO: 3527 - DNA, 96 bp, Aspergillus thermomutatus
  misc_feature: 273
cacccgatttggtctgtacgagtggctagttacccctttcggtatggcgaacgcacctagcaccttccaacggtacatcaactggacactaagaga

SEQ ID NO: 3528 - DNA, 96 bp, Aspergillus thermomutatus
  misc_feature: 273
tctataatgtgccttataccaccctccaacggcgcctgaaggggcatacttttcgagctgaagcacgcgcaaatagtcataaaatgactcaaagtg

SEQ ID NO: 3529 - DNA, 96 bp, Aspergillus thermomutatus
  misc_feature: 273
gaacttctatcggcgctttatacggaacttctctgacatagtacgaccgttgacggcgcttacacagaaaggaaccccattcacatggacggagga

SEQ ID NO: 3530 - DNA, 96 bp, Aspergillus thermomutatus
  misc_feature: 273
cctttgtgagtagcttgctcgggtgaatcattatcttctcgcgcagttgtaggcggtcatcgtcatcgtcaggcatatcttgttctcttcgcgata

SEQ ID NO: 3531 - DNA, 96 bp, Aspergillus thermomutatus
  misc_feature: 273
gtgaagataagtacatcgtcgatgtacgcggaggcgaattcatccaggaagtctcgaagggcccagttgatataccgttggaaggtactcggtgcg

SEQ ID NO: 3532 - DNA, 96 bp, Aspergillus thermomutatus
  misc_feature: 273
gtacgaccgttgacggcgcttacacagaaaggaaccccattcacatggacggaggagcacaccaatcggttcgagcagctaaagaagatgtttact

SEQ ID NO: 3533 - DNA, 96 bp, Aspergillus thermomutatus
  misc_feature: 273
ggcgcagtagtgaacatcttcttcagctgctcgaaccgctgcgtgtgctcatacgtccatttaaatggtgtacctttgtgcgtgagggctgtaagc

SEQ ID NO: 3534 - DNA, 96 bp, Aspergillus thermomutatus
  misc_feature: 273
gcgtttctcacgctcatccagtatccattcaacctcatattcggcctcgccgtcgactagcacagcgggcggctggtagtcagtgctcaactggct

SEQ ID NO: 3535 - DNA, 96 bp, Aspergillus thermomutatus
  misc_feature: 273
gcgataaatggcagggacgctacgagcacgggggtaagtccgttcttcctggaccacggatacaacctggagcctctagaggttgaggggctagag

SEQ ID NO: 3536 - DNA, 96 bp, Aspergillus thermomutatus
  misc_feature: 273
gactgcgtttcgcacccgatttggtctgtacgagtggctagttacccctttcggtatggcgaacgcacctagcaccttccaacggtacatcaactg

SEQ ID NO: 3537 - DNA, 96 bp, Aspergillus thermomutatus
  misc_feature: 273
gacgatgaccgcctacaactgcgcgagaagataatgattcacccgagcaagctactcacaaaggatcccccaccctcagtggtgagccgactgatg

SEQ ID NO: 3538 - DNA, 96 bp, Aspergillus thermomutatus
  misc_feature: 273
attcttatggtcagtgacgatatcaaacttcggtaggctgatcagctccgattcccattctttaagtgcgttgatgatagcgagcagctccttgtc

SEQ ID NO: 3539 - DNA, 96 bp, Aspergillus thermomutatus
  misc_feature: 273
ctttgtgagtagcttgctcgggtgaatcattatcttctcgcgcagttgtaggcggtcatcgtcatcgtcaggcatatcttgttctcttcgcgatag

SEQ ID NO: 3540 - DNA, 96 bp, Aspergillus thermomutatus
  misc_feature: 273
cagaggaagtacccgagagttctgaggatgagggacatcgctctgaaggatcgcgagagttagcggcaacttctacggatcagatctcattgccag

SEQ ID NO: 3541 - DNA, 96 bp, Aspergillus thermomutatus
  misc_feature: 273
cgcagtagtgaacatcttcttcagctgctcgaaccgctgcgtgtgctcatacgtccatttaaatggtgtacctttgtgcgtgagggctgtaagcgg

SEQ ID NO: 3542 - DNA, 96 bp, Aspergillus thermomutatus
  misc_feature: 273
cgatacttgcgcagtttgaccctgatcgagacacggtcgtggagacggatgcttccaactgggctacgggtgcggtgatgtcccaatacgacgatg

SEQ ID NO: 3543 - DNA, 96 bp, Aspergillus thermomutatus
  misc_feature: 273
aggactgaccgctatgagagcctaagggaaagacgcagcagaagtaccatgacacgtgaccatcggcagagcagcggtatgctcggcagagcaatg

SEQ ID NO: 3544 - DNA, 96 bp, Aspergillus thermomutatus
  misc_feature: 273
aagaagctcgatgcccagcacgcgaagttcacagtactggaagctattggatcacatgcttaccgactagatactccaccaggggtgcataatgtg

SEQ ID NO: 3545 - DNA, 96 bp, Aspergillus thermomutatus
  misc_feature: 273
accgctctagcacctgccgtacgtggctacggtgcttcgccagcgacccatcagtgaagataagtacatcgtcgatgtacgcggaggcgaattcat

SEQ ID NO: 3546 - DNA, 96 bp, Aspergillus thermomutatus
  misc_feature: 273
atacgacgatgacggcctgctgaggccctgcgcatattactcccggaaaaacacaccagccgaatgcaactacgagatccatgacaaggagctgct

SEQ ID NO: 3547 - DNA, 96 bp, Aspergillus thermomutatus
  misc_feature: 272
cgaatcttatgaaaggcggcgatgacatccagcttggtgaaccactttgccttcgcgatgcgctctagtgtctcgttgatcagcggaagggggtaa

SEQ ID NO: 3548 - DNA, 96 bp, Aspergillus thermomutatus
  misc_feature: 272
tgtgatcgcgttcaacgcgcggtagtcgacacagaatcgtaaccctccacctggcttgcgggcgaacagcaccggagccgcggcggaagagctact

SEQ ID NO: 3549 - DNA, 96 bp, Aspergillus thermomutatus
  misc_feature: 272
tgggaatcggagctgatcagcctaccgaagtttgatatcgtcactgaccataagaatctggagtacttcacagttcgcaggcgactaaacgagcgg

SEQ ID NO: 3550 - DNA, 96 bp, Aspergillus thermomutatus
  misc_feature: 272
tgggaaaggatcgttcgccgcaggacgcaacagactaacatggaacacattatgcacccctggtggagtatctagtcggtaagcatgtgatccaat

SEQ ID NO: 3551 - DNA, 96 bp, Aspergillus thermomutatus
  misc_feature: 272
ccagaggaagtacccgagagttctgaggatgagggacatcgctctgaaggatcgcgagagttagcggcaacttctacggatcagatctcattgcca

SEQ ID NO: 3552 - DNA, 96 bp, Aspergillus thermomutatus
  misc_feature: 272
tcgtcggctttcttccgatcgaacgcccctaggaactcgtggtagtgcgctggtagcttatcggcagggtctgtatgtgtctttacctgcagtgct

SEQ ID NO: 3553 - DNA, 96 bp, Aspergillus thermomutatus
  misc_feature: 272
cactgatgggtcactctcggagcacagacgacaggtaaaacaggtacttgcgcgcctacaggaagcaggcctacagctagatattgacaagtgcga

SEQ ID NO: 3554 - DNA, 96 bp, Aspergillus thermomutatus
  misc_feature: 272
gcgcgcgcgcgcgagcattaggcggcagcggtccggggcaggccagcaggcaggggggcgcgcgcgcggcggtgaccagttggccggggccctcga

SEQ ID NO: 3555 - DNA, 96 bp, Aspergillus thermomutatus
  misc_feature: 272
tccagaggaagtacccgagagttctgaggatgagggacatcgctctgaaggatcgcgagagttagcggcaacttctacggatcagatctcattgcc

SEQ ID NO: 3556 - DNA, 96 bp, Aspergillus thermomutatus
  misc_feature: 272
gatacttgcgcagtttgaccctgatcgagacacggtcgtggagacggatgcttccaactgggctacgggtgcggtgatgtcccaatacgacgatga

SEQ ID NO: 3557 - DNA, 96 bp, Aspergillus thermomutatus
  misc_feature: 272
tatcgcaccgggtgacgaatggttgactgcgtttcgcacccgatttggtctgtacgagtggctagttacccctttcggtatggcgaacgcacctag

SEQ ID NO: 3558 - DNA, 96 bp, Aspergillus thermomutatus
  misc_feature: 272
cggaagggggtaacggtctttcttcgtaatggcattcaatgctcggtaatcaacacagaaacgtagacctccaccaggtttgcgcacgagcagcac

SEQ ID NO: 3559 - DNA, 96 bp, Aspergillus thermomutatus
  misc_feature: 272
ggtctttcttcgtaatggcattcaatgctcggtaatcaacacagaaacgtagacctccaccaggtttgcgcacgagcagcaccggggctgcagctg

SEQ ID NO: 3560 - DNA, 96 bp, Aspergillus thermomutatus
  misc_feature: 272
ggggttcctctatgcctactcttggtctgccttactgcctctctccctgtcttacatggtgccttcctccctaccttatattatacattcttcgct

SEQ ID NO: 3561 - DNA, 96 bp, Aspergillus thermomutatus
  misc_feature: 272
aatgggaatcggagctgatcagcctaccgaagtttgatatcgtcactgaccataagaatctggagtacttcacagttcgcaggcgactaaacgagc

SEQ ID NO: 3562 - DNA, 96 bp, Aspergillus thermomutatus
  misc_feature: 272
gcaggcaagggagtatgcatggaccctgagaaggtaaaggctatattggaatggcagaccccgacctcagcgcgcggcgtgcggtcattcctaggc

SEQ ID NO: 3563 - DNA, 96 bp, Aspergillus thermomutatus
  misc_feature: 272
gcatatcttgttctcttcgcgatagtgcgtcaggtctcgcagctaatttaccaggccgatagactagctggtagttgaaccgactgagcaaatctg

SEQ ID NO: 3564 - DNA, 96 bp, Aspergillus thermomutatus
  misc_feature: 272
gatgaatggctgacggccttccgtacgcggtttggtctgtacgaatggttggtgaccccttttggcatggcgaacgcaccgagtaccttccaacgg

SEQ ID NO: 3565 - DNA, 96 bp, Aspergillus thermomutatus
  misc_feature: 272
ctccagattcttatggtcagtgacgatatcaaacttcggtaggctgatcagctccgattcccattctttaagtgcgttgatgatagcgagcagctc

SEQ ID NO: 3566 - DNA, 96 bp, Aspergillus thermomutatus
  misc_feature: 272
agctgctcgaaccgctgcgtgtgctcatacgtccatttaaatggtgtacctttgtgcgtgagggctgtaagcgggcgtactatctctgagaagttc

SEQ ID NO: 3567 - DNA, 96 bp, Aspergillus thermomutatus
  misc_feature: 272
aagctcgatgcccagcacgcgaagttcacagtactggaagctattggatcacatgcttaccgactagatactccaccaggggtgcataatgtgttc

SEQ ID NO: 3568 - DNA, 96 bp, Aspergillus thermomutatus
  misc_feature: 272
aacttctatcggcgctttatacggaacttctctgacatagtacgaccgttgacggcgcttacacagaaaggaaccccattcacatggacggaggag

SEQ ID NO: 3569 - DNA, 96 bp, Aspergillus thermomutatus
  misc_feature: 272
catcagtgaagataagtacatcgtcgatgtacgcggaggcgaattcatccaggaagtctcgaagggcccagttgatataccgttggaaggtactcg

SEQ ID NO: 3570 - DNA, 96 bp, Aspergillus thermomutatus
  misc_feature: 272
ccgcgtacatcgacgatgtacttatcttcactgatgggtcgctggcgaagcaccgtagccacgtacggcaggtgctagagcggttacaggccgctg

SEQ ID NO: 3571 - DNA, 96 bp, Aspergillus thermomutatus
  misc_feature: 272
atcagtgaagataagtacatcgtcgatgtacgcggaggcgaattcatccaggaagtctcgaagggcccagttgatataccgttggaaggtactcgg

SEQ ID NO: 3572 - DNA, 96 bp, Aspergillus thermomutatus
  misc_feature: 272
caactgggctacgggtgcggtgatgtcccaatacgacgatgacggcctgctgaggccctgcgcatattactcccggaaaaacacaccagccgaatg

SEQ ID NO: 3573 - DNA, 96 bp, Aspergillus thermomutatus
  misc_feature: 272
atggtcacgtgtcatggtacttctgctgcgtctttcccttaggctctcatagcggtcagtccttgtctgatcgactggttgtcattgctccttggt

SEQ ID NO: 3574 - DNA, 96 bp, Aspergillus thermomutatus
  misc_feature: 272
agaagctcgatgcccagcacgcgaagttcacagtactggaagctattggatcacatgcttaccgactagatactccaccaggggtgcataatgtgt

SEQ ID NO: 3575 - DNA, 96 bp, Aspergillus thermomutatus
  misc_feature: 271
tttggtctgtacgagtggctagttacccctttcggtatggcgaacgcacctagcaccttccaacggtacatcaactggacactaagagactttctg

SEQ ID NO: 3576 - DNA, 96 bp, Aspergillus thermomutatus
  misc_feature: 271
ttcggtgatcgaccccagggcgatgcgggggcagttcgtcggctttcttccgatcgaacgcccctaggaactcgtggtagtgcgctggtagcttat

SEQ ID NO: 3577 - DNA, 96 bp, Aspergillus thermomutatus
  misc_feature: 271
ttcgaagcatccgtctcgacgactgtctcccggtcatagtcaaactgcatgagaatcggcgcggtagtaaacatcttctttagctgctcgaaccga

SEQ ID NO: 3578 - DNA, 96 bp, Aspergillus thermomutatus
  misc_feature: 271
attgtgctaggtacgccatggtagccgatgaatcggtcgattagcagctgcgctacggtctcggcatcagttcgctcacagggcactaatatcaca

SEQ ID NO: 3579 - DNA, 96 bp, Aspergillus thermomutatus
  misc_feature: 271
tcattcctaggcttcgcaaacttctatcggcgctttatacggaacttctcagagatagtacgcccgcttacagccctcacgcacaaaggtacacca

SEQ ID NO: 3580 - DNA, 96 bp, Aspergillus thermomutatus
  misc_feature: 271
tgggctacgggtgcggtgatgtcccaatacgacgatgacggcctgctgaggccctgcgcatattactcccggaaaaacacaccagccgaatgcaac

SEQ ID NO: 3581 - DNA, 96 bp, Aspergillus thermomutatus
  misc_feature: 271
ggggcagcgggtatcggtctttctttgtgatcgcgttcaacgcgcggtagtcgacacagaatcgtaaccctccacctggcttgcgggcgaacagca

SEQ ID NO: 3582 - DNA, 96 bp, Aspergillus thermomutatus
  misc_feature: 271
tctgccgagcataccgctgctctgccgatggtcacgtgtcatggtacttctgctgcgtctttcccttaggctctcatagcggtcagtccttgtctg

SEQ ID NO: 3583 - DNA, 96 bp, Aspergillus thermomutatus
  misc_feature: 271
atgacgatgaccgcctacaactgcgcgagaagataatgattcacccgagcaagctactcacaaaggatcccccaccctcagtggtgagccgactga

SEQ ID NO: 3584 - DNA, 96 bp, Aspergillus thermomutatus
  misc_feature: 271
tatcggtctttctttgtgatcgcgttcaacgcgcggtagtcgacacagaatcgtaaccctccacctggcttgcgggcgaacagcaccggagccgcg

SEQ ID NO: 3585 - DNA, 96 bp, Aspergillus thermomutatus
  misc_feature: 271
gagatgaatggctgacggccttccgtacgcggtttggtctgtacgaatggttggtgaccccttttggcatggcgaacgcaccgagtaccttccaac

SEQ ID NO: 3586 - DNA, 96 bp, Aspergillus thermomutatus
  misc_feature: 271
ggcagcgggtatcggtctttctttgtgatcgcgttcaacgcgcggtagtcgacacagaatcgtaaccctccacctggcttgcgggcgaacagcacc

SEQ ID NO: 3587 - DNA, 96 bp, Aspergillus thermomutatus
  misc_feature: 271
ggtcacgtgtcatggtacttctgctgcgtctttcccttaggctctcatagcggtcagtccttgtctgatcgactggttgtcattgctccttggttc

SEQ ID NO: 3588 - DNA, 96 bp, Aspergillus thermomutatus
  misc_feature: 271
ggggtaacggtctttcttcgtaatggcattcaatgctcggtaatcaacacagaaacgtagacctccaccaggtttgcgcacgagcagcaccggggc

SEQ ID NO: 3589 - DNA, 96 bp, Aspergillus thermomutatus
  misc_feature: 271
ggatcctttgtgagtagcttgctcgggtgaatcattatcttctcgcgcagttgtaggcggtcatcgtcatcgtcaggcatatcttgttctcttcgc

SEQ ID NO: 3590 - DNA, 96 bp, Aspergillus thermomutatus
  misc_feature: 271
cagtagtgaacatcttcttcagctgctcgaaccgctgcgtgtgctcatacgtccatttaaatggtgtacctttgtgcgtgagggctgtaagcgggc

SEQ ID NO: 3591 - DNA, 96 bp, Aspergillus thermomutatus
  misc_feature: 271
cttccgatcgaacgcccctaggaactcgtggtagtgcgctggtagcttatcggcagggtctgtatgtgtctttacctgcagtgctttctcaatatc

SEQ ID NO: 3592 - DNA, 96 bp, Aspergillus thermomutatus
  misc_feature: 271
gaatggctgacggccttccgtacgcggtttggtctgtacgaatggttggtgaccccttttggcatggcgaacgcaccgagtaccttccaacggtat

SEQ ID NO: 3593 - DNA, 96 bp, Aspergillus thermomutatus
  misc_feature: 271
gaagctcgatgcccagcacgcgaagttcacagtactggaagctattggatcacatgcttaccgactagatactccaccaggggtgcataatgtgtt

SEQ ID NO: 3594 - DNA, 96 bp, Aspergillus thermomutatus
  misc_feature: 271
gaaccagctgtcaacctcgtcaatacggccgcgctggacgcttgggagcagcgagcgggccagaacacccccgacccgcgaggggagggggagtag

SEQ ID NO: 3595 - DNA, 96 bp, Aspergillus thermomutatus
  misc_feature: 271
cgtgggaaccagctgtcaacctcgtcaatacggccgcgctggacgcttgggagcagcgagcgggccagaacacccccgacccgcgaggggaggggg

SEQ ID NO: 3596 - DNA, 96 bp, Aspergillus thermomutatus
  misc_feature: 271
cgacgatgtacttatcttcactgatgggtcgctggcgaagcaccgtagccacgtacggcaggtgctagagcggttacaggccgctgggttgcagct

SEQ ID NO: 3597 - DNA, 96 bp, Aspergillus thermomutatus
  misc_feature: 271
actgcgtttcgcacccgatttggtctgtacgagtggctagttacccctttcggtatggcgaacgcacctagcaccttccaacggtacatcaactgg

SEQ ID NO: 3598 - DNA, 96 bp, Aspergillus thermomutatus
  misc_feature: 271
caatacggccgcgctggacgcttgggagcagcgagcgggccagaacacccccgacccgcgaggggagggggagtagtgtagcgggcaaggcccgct

SEQ ID NO: 3599 - DNA, 96 bp, Aspergillus thermomutatus
  misc_feature: 271
aaggactgaccgctatgagagcctaagggaaagacgcagcagaagtaccatgacacgtgaccatcggcagagcagcggtatgctcggcagagcaat

SEQ ID NO: 3600 - DNA, 96 bp, Aspergillus thermomutatus
  misc_feature: 270
cgtggagacggatgcttccaactgggctacgggtgcggtgatgtcccaatacgacgatgacggcctgctgaggccctgcgcatattactcccggaa

SEQ ID NO: 3601 - DNA, 96 bp, Aspergillus thermomutatus
  misc_feature: 270
ttccagaggaagtacccgagagttctgaggatgagggacatcgctctgaaggatcgcgagagttagcggcaacttctacggatcagatctcattgc

SEQ ID NO: 3602 - DNA, 96 bp, Aspergillus thermomutatus
  misc_feature: 270
ttaaaagaaaggacaaggagacagggaaggacaaggcaacagaaaaggacaaggtgacaggaaagaacaaaatgacaggaggagcaaggtagagag

SEQ ID NO: 3603 - DNA, 96 bp, Aspergillus thermomutatus
  misc_feature: 270
tgggaaccagctgtcaacctcgtcaatacggccgcgctggacgcttgggagcagcgagcgggccagaacacccccgacccgcgaggggagggggag

SEQ ID NO: 3604 - DNA, 96 bp, Aspergillus thermomutatus
  misc_feature: 270
gcggaagggggtaacggtctttcttcgtaatggcattcaatgctcggtaatcaacacagaaacgtagacctccaccaggtttgcgcacgagcagca

SEQ ID NO: 3605 - DNA, 96 bp, Aspergillus thermomutatus
  misc_feature: 270
ctcgggtgaatcattatcttctcgcgcagttgtaggcggtcatcgtcatcgtcaggcatatcttgttctcttcgcgatagtgcgtcaggtctcgca

SEQ ID NO: 3606 - DNA, 96 bp, Aspergillus thermomutatus
  misc_feature: 270
tgatcgagacacggtcgtggagacggatgcttccaactgggctacgggtgcggtgatgtcccaatacgacgatgacggcctgctgaggccctgcgc

SEQ ID NO: 3607 - DNA, 96 bp, Aspergillus thermomutatus
  misc_feature: 270
tcttcactgatgggtcgctggcgaagcaccgtagccacgtacggcaggtgctagagcggttacaggccgctgggttgcagctagacatcgacaagt

SEQ ID NO: 3608 - DNA, 96 bp, Aspergillus thermomutatus
  misc_feature: 270
tcgggtgaatcattatcttctcgcgcagttgtaggcggtcatcgtcatcgtcaggcatatcttgttctcttcgcgatagtgcgtcaggtctcgcag

SEQ ID NO: 3609 - DNA, 96 bp, Aspergillus thermomutatus
  misc_feature: 270
tcgacgatgtacttatcttcactgatgggtcgctggcgaagcaccgtagccacgtacggcaggtgctagagcggttacaggccgctgggttgcagc

SEQ ID NO: 3610 - DNA, 96 bp, Aspergillus thermomutatus
  misc_feature: 270
agcggcctgtaaccgctctagcacctgccgtacgtggctacggtgcttcgccagcgacccatcagtgaagataagtacatcgtcgatgtacgcgga

SEQ ID NO: 3611 - DNA, 96 bp, Aspergillus thermomutatus
  misc_feature: 270
gtatcgcaccgggtgacgaatggttgactgcgtttcgcacccgatttggtctgtacgagtggctagttacccctttcggtatggcgaacgcaccta

SEQ ID NO: 3612 - DNA, 96 bp, Aspergillus thermomutatus
  misc_feature: 270
taggggcagcgggtatcggtctttctttgtgatcgcgttcaacgcgcggtagtcgacacagaatcgtaaccctccacctggcttgcgggcgaacag

SEQ ID NO: 3613 - DNA, 96 bp, Aspergillus thermomutatus
  misc_feature: 270
gctcgaaccgctgcgtgtgctcatacgtccatttaaatggtgtacctttgtgcgtgagggctgtaagcgggcgtactatctctgagaagttccgta

SEQ ID NO: 3614 - DNA, 96 bp, Aspergillus thermomutatus
  misc_feature: 270
gtgccgcggcagcccaatgctcttccaatggtagttggctagggtcgtcgggtgctaccctagcgagcatcagtcggctcaccactgagggtgggg

SEQ ID NO: 3615 - DNA, 96 bp, Aspergillus thermomutatus
  misc_feature: 270
gggtgcggtgatgtcccaatacgacgatgacggcctgctgaggccctgcgcatattactcccggaaaaacacaccagccgaatgcaactacgagat

SEQ ID NO: 3616 - DNA, 96 bp, Aspergillus thermomutatus
  misc_feature: 270
cgctctagcacctgccgtacgtggctacggtgcttcgccagcgacccatcagtgaagataagtacatcgtcgatgtacgcggaggcgaattcatcc

SEQ ID NO: 3617 - DNA, 96 bp, Aspergillus thermomutatus
  misc_feature: 270
cgggtgaatcattatcttctcgcgcagttgtaggcggtcatcgtcatcgtcaggcatatcttgttctcttcgcgatagtgcgtcaggtctcgcagc

SEQ ID NO: 3618 - DNA, 96 bp, Aspergillus thermomutatus
  misc_feature: 270
aactgctagaaggtccggacggcaagagagcagagcccccatggggcccgttgtacagcatgtcgcgcgaagaactgcttgtactgcgtaagacgc

SEQ ID NO: 3619 - DNA, 96 bp, Aspergillus thermomutatus
  misc_feature: 270
cttgcgcagtttgaccctgatcgagacacggtcgtggagacggatgcttccaactgggctacgggtgcggtgatgtcccaatacgacgatgacggc

SEQ ID NO: 3620 - DNA, 96 bp, Aspergillus thermomutatus
  misc_feature: 270
cacgtgtcatggtacttctgctgcgtctttcccttaggctctcatagcggtcagtccttgtctgatcgactggttgtcattgctccttggttctgc

SEQ ID NO: 3621 - DNA, 96 bp, Aspergillus thermomutatus
  misc_feature: 270
gaatgggaatcggagctgatcagcctaccgaagtttgatatcgtcactgaccataagaatctggagtacttcacagttcgcaggcgactaaacgag

SEQ ID NO: 3622 - DNA, 96 bp, Aspergillus thermomutatus
  misc_feature: 270
gaactgctagaaggtccggacggcaagagagcagagcccccatggggcccgttgtacagcatgtcgcgcgaagaactgcttgtactgcgtaagacg

SEQ ID NO: 3623 - DNA, 96 bp, Aspergillus thermomutatus
  misc_feature: 270
acccggtgcgatacgaatcttatgaaaggcggcgatgacatccagcttggtgaaccactttgccttcgcgatgcgctctagtgtctcgttgatcag

SEQ ID NO: 3624 - DNA, 96 bp, Aspergillus thermomutatus
  misc_feature: 270
cgcgtacatcgacgatgtacttatcttcactgatgggtcgctggcgaagcaccgtagccacgtacggcaggtgctagagcggttacaggccgctgg

SEQ ID NO: 3625 - DNA, 96 bp, Aspergillus thermomutatus
  misc_feature: 270
acgacgatgacggcctgctgaggccctgcgcatattactcccggaaaaacacaccagccgaatgcaactacgagatccatgacaaggagctgctcg

SEQ ID NO: 3626 - DNA, 96 bp, Aspergillus thermomutatus
  misc_feature: 270
atttggtctgtacgagtggctagttacccctttcggtatggcgaacgcacctagcaccttccaacggtacatcaactggacactaagagactttct

SEQ ID NO: 3627 - DNA, 96 bp, Aspergillus thermomutatus
  misc_feature: 270
agctgaagaggaatcgcttatacagtggatattatctatggatcagcgtggagcagctccccgaccatctcatgttcaagatatggccaatatttt

SEQ ID NO: 3628 - DNA, 96 bp, Aspergillus thermomutatus
  misc_feature: 270
acgcgatgatagcgcggaacttctactggccggagctttctgcagatgctcgacgattcgttaagaattgcgataagtgtggggccaaccgtgtgt

SEQ ID NO: 3629 - DNA, 96 bp, Aspergillus thermomutatus
  misc_feature: 269
ttggtctgtacgagtggctagttacccctttcggtatggcgaacgcacctagcaccttccaacggtacatcaactggacactaagagactttctgg

SEQ ID NO: 3630 - DNA, 96 bp, Aspergillus thermomutatus
  misc_feature: 269
ttggaaacgcacattggaaacattggaaacgcacattggtagatacattggattggaagacgcacctaatgattgtgtagcgcacattggaacaga

SEQ ID NO: 3631 - DNA, 96 bp, Aspergillus thermomutatus
  misc_feature: 269
ctgggctacgggtgcggtgatgtcccaatacgacgatgacggcctgctgaggccctgcgcatattactcccggaaaaacacaccagccgaatgcaa

SEQ ID NO: 3632 - DNA, 96 bp, Aspergillus thermomutatus
  misc_feature: 269
tggtctgtacgagtggctagttacccctttcggtatggcgaacgcacctagcaccttccaacggtacatcaactggacactaagagactttctgga

SEQ ID NO: 3633 - DNA, 96 bp, Aspergillus thermomutatus
  misc_feature: 269
cggagatgaatggctgacggccttccgtacgcggtttggtctgtacgaatggttggtgaccccttttggcatggcgaacgcaccgagtaccttcca

SEQ ID NO: 3634 - DNA, 96 bp, Aspergillus thermomutatus
  misc_feature: 269
tcacgtgtcatggtacttctgctgcgtctttcccttaggctctcatagcggtcagtccttgtctgatcgactggttgtcattgctccttggttctg

SEQ ID NO: 3635 - DNA, 96 bp, Aspergillus thermomutatus
  misc_feature: 269
cttaaagaatgggaatcggagctgatcagcctaccgaagtttgatatcgtcactgaccataagaatctggagtacttcacagttcgcaggcgacta

SEQ ID NO: 3636 - DNA, 96 bp, Aspergillus thermomutatus
  misc_feature: 269
gaagcaggcaagggagtatgcatggaccctgagaaggtaaaggctatattggaatggcagaccccgacctcagcgcgcggcgtgcggtcattccta

SEQ ID NO: 3637 - DNA, 96 bp, Aspergillus thermomutatus
  misc_feature: 269
tacttgcgcagtttgaccctgatcgagacacggtcgtggagacggatgcttccaactgggctacgggtgcggtgatgtcccaatacgacgatgacg

SEQ ID NO: 3638 - DNA, 96 bp, Aspergillus thermomutatus
  misc_feature: 269
ggaaccagctgtcaacctcgtcaatacggccgcgctggacgcttgggagcagcgagcgggccagaacacccccgacccgcgaggggagggggagta

SEQ ID NO: 3639 - DNA, 96 bp, Aspergillus thermomutatus
  misc_feature: 269
tacatcgacgatgtacttatcttcactgatgggtcgctggcgaagcaccgtagccacgtacggcaggtgctagagcggttacaggccgctgggttg

SEQ ID NO: 3640 - DNA, 96 bp, Aspergillus thermomutatus
  misc_feature: 269
ggggatcctttgtgagtagcttgctcgggtgaatcattatcttctcgcgcagttgtaggcggtcatcgtcatcgtcaggcatatcttgttctcttc

SEQ ID NO: 3641 - DNA, 96 bp, Aspergillus thermomutatus
  misc_feature: 269
aggggcagcgggtatcggtctttctttgtgatcgcgttcaacgcgcggtagtcgacacagaatcgtaaccctccacctggcttgcgggcgaacagc

SEQ ID NO: 3642 - DNA, 96 bp, Aspergillus thermomutatus
  misc_feature: 269
gcagcgggtatcggtctttctttgtgatcgcgttcaacgcgcggtagtcgacacagaatcgtaaccctccacctggcttgcgggcgaacagcaccg

SEQ ID NO: 3643 - DNA, 96 bp, Aspergillus thermomutatus
  misc_feature: 269
gatgacgatgaccgcctacaactgcgcgagaagataatgattcacccgagcaagctactcacaaaggatcccccaccctcagtggtgagccgactg

SEQ ID NO: 3644 - DNA, 96 bp, Aspergillus thermomutatus
  misc_feature: 269
ctgccattctagtatagcttttaccttgtcggggtccatgcgtacgcccttgccagcttcaatgataaacccgaggtatttcgtgctcttgacctc

SEQ ID NO: 3645 - DNA, 96 bp, Aspergillus thermomutatus
  misc_feature: 269
ctgatcgagacacggtcgtggagacggatgcttccaactgggctacgggtgcggtgatgtcccaatacgacgatgacggcctgctgaggccctgcg

SEQ ID NO: 3646 - DNA, 96 bp, Aspergillus thermomutatus
  misc_feature: 269
ctcgaaccgctgcgtgtgctcatacgtccatttaaatggtgtacctttgtgcgtgagggctgtaagcgggcgtactatctctgagaagttccgtat

SEQ ID NO: 3647 - DNA, 96 bp, Aspergillus thermomutatus
  misc_feature: 269
ctagctggtagttgaaccgactgagcaaatctgaccagcgcgcttgccgctcgtttagtcgcctgcgaactgtgaagtactccagattcttatggt

SEQ ID NO: 3648 - DNA, 96 bp, Aspergillus thermomutatus
  misc_feature: 269
acgtgggaaccagctgtcaacctcgtcaatacggccgcgctggacgcttgggagcagcgagcgggccagaacacccccgacccgcgaggggagggg

SEQ ID NO: 3649 - DNA, 96 bp, Aspergillus thermomutatus
  misc_feature: 269
atgaatggctgacggccttccgtacgcggtttggtctgtacgaatggttggtgaccccttttggcatggcgaacgcaccgagtaccttccaacggt

SEQ ID NO: 3650 - DNA, 96 bp, Aspergillus thermomutatus
  misc_feature: 269
aaagaccgttacccccttccgctgatcaacgagacactagagcgcatcgcgaaggcaaagtggttcaccaagctggatgtcatcgccgcctttcat

SEQ ID NO: 3651 - DNA, 96 bp, Aspergillus thermomutatus
  misc_feature: 268
tttcttccgatcgaacgcccctaggaactcgtggtagtgcgctggtagcttatcggcagggtctgtatgtgtctttacctgcagtgctttctcaat

SEQ ID NO: 3652 - DNA, 96 bp, Aspergillus thermomutatus
  misc_feature: 268
ttgaatgccattacgaagaaagaccgttacccccttccgctgatcaacgagacactagagcgcatcgcgaaggcaaagtggttcaccaagctggat

SEQ ID NO: 3653 - DNA, 96 bp, Aspergillus thermomutatus
  misc_feature: 268
gctctagcacctgccgtacgtggctacggtgcttcgccagcgacccatcagtgaagataagtacatcgtcgatgtacgcggaggcgaattcatcca

SEQ ID NO: 3654 - DNA, 96 bp, Aspergillus thermomutatus
  misc_feature: 268
tggaaacgcacattggaaacattggaaacgcacattggtagatacattggattggaagacgcacctaatgattgtgtagcgcacattggaacagac

SEQ ID NO: 3655 - DNA, 96 bp, Aspergillus thermomutatus
  misc_feature: 268
tgaggtcggggtctgccattccaatatagcctttaccttctcagggtccatgcatactcccttgcctgcttcgacgatgaagcccaagtacttggt

SEQ ID NO: 3656 - DNA, 96 bp, Aspergillus thermomutatus
  misc_feature: 268
tgaggagatcatggtgattgccgataggttagggaagggtgtgatattagtgccctgtgagcgaactgatgccgagaccgtagcgcagctgctaat

SEQ ID NO: 3657 - DNA, 96 bp, Aspergillus thermomutatus
  misc_feature: 268
tgaagaggaatcgcttatacagtggatattatctatggatcagcgtggagcagctccccgaccatctcatgttcaagatatggccaatattttgtt

SEQ ID NO: 3658 - DNA, 96 bp, Aspergillus thermomutatus
  misc_feature: 268
acaacgccggagaggtaaagcagtgcagatcttcgcagccagcatcaaggatattgagaaagcactgcaggtaaagacacatacagaccctgccga

SEQ ID NO: 3659 - DNA, 96 bp, Aspergillus thermomutatus
  misc_feature: 268
cgtcacccggtgcgatacgaatcttatgaaaggcggcgatgacatccagcttggtgaaccactttgccttcgcgatgcgctctagtgtctcgttga

SEQ ID NO: 3660 - DNA, 96 bp, Aspergillus thermomutatus
  misc_feature: 268
gttggaaggtgctaggtgcgttcgccataccgaaaggggtaactagccactcgtacagaccaaatcgggtgcgaaacgcagtcaaccattcgtcac

SEQ ID NO: 3661 - DNA, 96 bp, Aspergillus thermomutatus
  misc_feature: 268
gtgctaggtacgccatggtagccgatgaatcggtcgattagcagctgcgctacggtctcggcatcagttcgctcacagggcactaatatcacaccc

SEQ ID NO: 3662 - DNA, 96 bp, Aspergillus thermomutatus
  misc_feature: 268
gtgcgtatatcgatcgccgagtgttcggtctctccggatggtcatctgctgtaccgaggccgcaaatgggcccccgactctgagccgctacggacg

SEQ ID NO: 3663 - DNA, 96 bp, Aspergillus thermomutatus
  misc_feature: 268
cctacctcctggggttcctctatgcctactcttggtctgccttactgcctctctccctgtcttacatggtgccttcctccctaccttatattatac

SEQ ID NO: 3664 - DNA, 96 bp, Aspergillus thermomutatus
  misc_feature: 268
ggcagaggccgccgcaaggagtatctcgtcaaatggacaggttacgatcgtcctacgtgggaaccagctgtcaacctcgtcaatacggccgcgctg

SEQ ID NO: 3665 - DNA, 96 bp, Aspergillus thermomutatus
  misc_feature: 268
agctcgatgcccagcacgcgaagttcacagtactggaagctattggatcacatgcttaccgactagatactccaccaggggtgcataatgtgttcc

SEQ ID NO: 3666 - DNA, 96 bp, Aspergillus thermomutatus
  misc_feature: 268
cccggtgcgatacgaatcttatgaaaggcggcgatgacatccagcttggtgaaccactttgccttcgcgatgcgctctagtgtctcgttgatcagc

SEQ ID NO: 3667 - DNA, 96 bp, Aspergillus thermomutatus
  misc_feature: 268
gcagtttgaccctgatcgagacacggtcgtggagacggatgcttccaactgggctacgggtgcggtgatgtcccaatacgacgatgacggcctgct

SEQ ID NO: 3668 - DNA, 96 bp, Aspergillus thermomutatus
  misc_feature: 268
aatacgacgatgacggcctgctgaggccctgcgcatattactcccggaaaaacacaccagccgaatgcaactacgagatccatgacaaggagctgc

SEQ ID NO: 3669 - DNA, 96 bp, Aspergillus thermomutatus
  misc_feature: 268
ctctgccgagcataccgctgctctgccgatggtcacgtgtcatggtacttctgctgcgtctttcccttaggctctcatagcggtcagtccttgtct

SEQ ID NO: 3670 - DNA, 96 bp, Aspergillus thermomutatus
  misc_feature: 268
cggcctgtaaccgctctagcacctgccgtacgtggctacggtgcttcgccagcgacccatcagtgaagataagtacatcgtcgatgtacgcggagg

SEQ ID NO: 3671 - DNA, 96 bp, Aspergillus thermomutatus
  misc_feature: 268
agtagtgaacatcttcttcagctgctcgaaccgctgcgtgtgctcatacgtccatttaaatggtgtacctttgtgcgtgagggctgtaagcgggcg

SEQ ID NO: 3672 - DNA, 96 bp, Aspergillus thermomutatus
  misc_feature: 268
ccagattcttatggtcagtgacgatatcaaacttcggtaggctgatcagctccgattcccattctttaagtgcgttgatgatagcgagcagctcct

SEQ ID NO: 3673 - DNA, 96 bp, Aspergillus thermomutatus
  misc_feature: 268
ccaactgggctacgggtgcggtgatgtcccaatacgacgatgacggcctgctgaggccctgcgcatattactcccggaaaaacacaccagccgaat

SEQ ID NO: 3674 - DNA, 96 bp, Aspergillus thermomutatus
  misc_feature: 268
accattcgtcacccggtgcgatacgaatcttatgaaaggcggcgatgacatccagcttggtgaaccactttgccttcgcgatgcgctctagtgtct

SEQ ID NO: 3675 - DNA, 96 bp, Aspergillus thermomutatus
  misc_feature: 268
aaagctgaagaggaatcgcttatacagtggatattatctatggatcagcgtggagcagctccccgaccatctcatgttcaagatatggccaatatt

SEQ ID NO: 3676 - DNA, 96 bp, Aspergillus thermomutatus
  misc_feature: 267
ttgtgctaggtacgccatggtagccgatgaatcggtcgattagcagctgcgctacggtctcggcatcagttcgctcacagggcactaatatcacac

SEQ ID NO: 3677 - DNA, 96 bp, Aspergillus thermomutatus
  misc_feature: 267
caagagagcagagcccccatggggcccgttgtacagcatgtcgcgcgaagaactgcttgtactgcgtaagacgcttacagagctgctagagaagaa

SEQ ID NO: 3678 - DNA, 96 bp, Aspergillus thermomutatus
  misc_feature: 267
caaatggacaggttacgatcgtcctacgtgggaaccagctgtcaacctcgtcaatacggccgcgctggacgcttgggagcagcgagcgggccagaa

SEQ ID NO: 3679 - DNA, 96 bp, Aspergillus thermomutatus
  misc_feature: 267
cccaagccagttgagcactgactaccagccgcccgctgtgctagtcgacggcgaggccgaatatgaggttgaatggatactggatgagcgtgagaa

SEQ ID NO: 3680 - DNA, 96 bp, Aspergillus thermomutatus
  misc_feature: 267
ttcgtcacccggtgcgatacgaatcttatgaaaggcggcgatgacatccagcttggtgaaccactttgccttcgcgatgcgctctagtgtctcgtt

SEQ ID NO: 3681 - DNA, 96 bp, Aspergillus thermomutatus
  misc_feature: 267
tgagccgctacggacgaggatcctgcaagagacgcacgactcagtgcttacaggccaccccgggaagaacacattgtacgcgatgatagcgcggaa

SEQ ID NO: 3682 - DNA, 96 bp, Aspergillus thermomutatus
  misc_feature: 267
gtgaggagatcatggtgattgccgataggttagggaagggtgtgatattagtgccctgtgagcgaactgatgccgagaccgtagcgcagctgctaa

SEQ ID NO: 3683 - DNA, 96 bp, Aspergillus thermomutatus
  misc_feature: 267
tggctgacggccttccgtacgcggtttggtctgtacgaatggttggtgaccccttttggcatggcgaacgcaccgagtaccttccaacggtatatc

SEQ ID NO: 3684 - DNA, 96 bp, Aspergillus thermomutatus
  misc_feature: 267
tgccgcggcagcccaatgctcttccaatggtagttggctagggtcgtcgggtgctaccctagcgagcatcagtcggctcaccactgagggtggggg

SEQ ID NO: 3685 - DNA, 96 bp, Aspergillus thermomutatus
  misc_feature: 267
tgccattctagtatagcttttaccttgtcggggtccatgcgtacgcccttgccagcttcaatgataaacccgaggtatttcgtgctcttgacctcg

SEQ ID NO: 3686 - DNA, 96 bp, Aspergillus thermomutatus
  misc_feature: 267
gctttcttccgatcgaacgcccctaggaactcgtggtagtgcgctggtagcttatcggcagggtctgtatgtgtctttacctgcagtgctttctca

SEQ ID NO: 3687 - DNA, 96 bp, Aspergillus thermomutatus
  misc_feature: 267
tcttccgatcgaacgcccctaggaactcgtggtagtgcgctggtagcttatcggcagggtctgtatgtgtctttacctgcagtgctttctcaatat

SEQ ID NO: 3688 - DNA, 96 bp, Aspergillus thermomutatus
  misc_feature: 267
tctgccattctagtatagcttttaccttgtcggggtccatgcgtacgcccttgccagcttcaatgataaacccgaggtatttcgtgctcttgacct

SEQ ID NO: 3689 - DNA, 96 bp, Aspergillus thermomutatus
  misc_feature: 267
cgcgcagttgtaggcggtcatcgtcatcgtcaggcatatcttgttctcttcgcgatagtgcgtcaggtctcgcagctaatttaccaggccgataga

SEQ ID NO: 3690 - DNA, 96 bp, Aspergillus thermomutatus
  misc_feature: 267
gccgcggcagcccaatgctcttccaatggtagttggctagggtcgtcgggtgctaccctagcgagcatcagtcggctcaccactgagggtggggga

SEQ ID NO: 3691 - DNA, 96 bp, Aspergillus thermomutatus
  misc_feature: 267
tcagtgaagataagtacatcgtcgatgtacgcggaggcgaattcatccaggaagtctcgaagggcccagttgatataccgttggaaggtactcggt

SEQ ID NO: 3692 - DNA, 96 bp, Aspergillus thermomutatus
  misc_feature: 267
caatatccttgatgctggctgcgaagatctgcactgctttacctctccggcgttgttgagtatgtatagcgaacccctgtgcgcttatctgtctga

SEQ ID NO: 3693 - DNA, 96 bp, Aspergillus thermomutatus
  misc_feature: 267
aaatggacaggttacgatcgtcctacgtgggaaccagctgtcaacctcgtcaatacggccgcgctggacgcttgggagcagcgagcgggccagaac

SEQ ID NO: 3694 - DNA, 96 bp, Aspergillus thermomutatus
  misc_feature: 267
gcgcagttgtaggcggtcatcgtcatcgtcaggcatatcttgttctcttcgcgatagtgcgtcaggtctcgcagctaatttaccaggccgatagac

SEQ ID NO: 3695 - DNA, 96 bp, Aspergillus thermomutatus
  misc_feature: 267
gggtgaatcattatcttctcgcgcagttgtaggcggtcatcgtcatcgtcaggcatatcttgttctcttcgcgatagtgcgtcaggtctcgcagct

SEQ ID NO: 3696 - DNA, 96 bp, Aspergillus thermomutatus
  misc_feature: 267
gggtaacggtctttcttcgtaatggcattcaatgctcggtaatcaacacagaaacgtagacctccaccaggtttgcgcacgagcagcaccggggct

SEQ ID NO: 3697 - DNA, 96 bp, Aspergillus thermomutatus
  misc_feature: 267
gggggatcctttgtgagtagcttgctcgggtgaatcattatcttctcgcgcagttgtaggcggtcatcgtcatcgtcaggcatatcttgttctctt

SEQ ID NO: 3698 - DNA, 96 bp, Aspergillus thermomutatus
  misc_feature: 267
gggaaccagctgtcaacctcgtcaatacggccgcgctggacgcttgggagcagcgagcgggccagaacacccccgacccgcgaggggagggggagt

SEQ ID NO: 3699 - DNA, 96 bp, Aspergillus thermomutatus
  misc_feature: 267
ataagtacatcgtcgatgtacgcggaggcgaattcatccaggaagtctcgaagggcccagttgatataccgttggaaggtactcggtgcgttcgcc

SEQ ID NO: 3700 - DNA, 96 bp, Aspergillus thermomutatus
  misc_feature: 267
gcttgctcgggtgaatcattatcttctcgcgcagttgtaggcggtcatcgtcatcgtcaggcatatcttgttctcttcgcgatagtgcgtcaggtc

SEQ ID NO: 3701 - DNA, 96 bp, Aspergillus thermomutatus
  misc_feature: 267
gccgatggtcacgtgtcatggtacttctgctgcgtctttcccttaggctctcatagcggtcagtccttgtctgatcgactggttgtcattgctcct

SEQ ID NO: 3702 - DNA, 96 bp, Aspergillus thermomutatus
  misc_feature: 267
cctgatcgagacacggtcgtggagacggatgcttccaactgggctacgggtgcggtgatgtcccaatacgacgatgacggcctgctgaggccctgc

SEQ ID NO: 3703 - DNA, 96 bp, Aspergillus thermomutatus
  misc_feature: 267
aacgggttgagaatgagccgaagttagtggtcagacagataagcgcacaggggttcgctatacatactcaacaacgccggagaggtaaagcagtgc

SEQ ID NO: 3704 - DNA, 96 bp, Aspergillus thermomutatus
  misc_feature: 267
cagatattcgcagtcaccctcaaggatatcaataaggccttgcaagcgaagcagtacaccgaccccaagaccaagctgcccgcgcactaccacgag

SEQ ID NO: 3705 - DNA, 96 bp, Aspergillus thermomutatus
  misc_feature: 267
cgatgacgatgaccgcctacaactgcgcgagaagataatgattcacccgagcaagctactcacaaaggatcccccaccctcagtggtgagccgact

SEQ ID NO: 3706 - DNA, 96 bp, Aspergillus thermomutatus
  misc_feature: 267
cagcgggtatcggtctttctttgtgatcgcgttcaacgcgcggtagtcgacacagaatcgtaaccctccacctggcttgcgggcgaacagcaccgg

SEQ ID NO: 3707 - DNA, 96 bp, Aspergillus thermomutatus
  misc_feature: 267
caattcggtgatcgaccccagggcgatgcgggggcagttcgtcggctttcttccgatcgaacgcccctaggaactcgtggtagtgcgctggtagct

SEQ ID NO: 3708 - DNA, 96 bp, Aspergillus thermomutatus
  misc_feature: 267
attcctaggcttcgcaaacttctatcggcgctttatacggaacttctcagagatagtacgcccgcttacagccctcacgcacaaaggtacaccatt

SEQ ID NO: 3709 - DNA, 96 bp, Aspergillus thermomutatus
  misc_feature: 267
atggctgacggccttccgtacgcggtttggtctgtacgaatggttggtgaccccttttggcatggcgaacgcaccgagtaccttccaacggtatat

SEQ ID NO: 3710 - DNA, 96 bp, Aspergillus thermomutatus
  misc_feature: 266
tctagtgcatctgtctgttccaatgtgcgctacacaatcattaggtgcgtcttccaatccaatgtatctaccaatgtgcgtttccaatgtttccaa

SEQ ID NO: 3711 - DNA, 96 bp, Aspergillus thermomutatus
  misc_feature: 266
ttctagtgcatctgtctgttccaatgtgcgctacacaatcattaggtgcgtcttccaatccaatgtatctaccaatgtgcgtttccaatgtttcca

SEQ ID NO: 3712 - DNA, 96 bp, Aspergillus thermomutatus
  misc_feature: 266
tgtacgcggaggcgaattcatccaggaagtctcgaagggcccagttgatataccgttggaaggtactcggtgcgttcgccatgccaaaaggggtca

SEQ ID NO: 3713 - DNA, 96 bp, Aspergillus thermomutatus
  misc_feature: 266
tggtcacgtgtcatggtacttctgctgcgtctttcccttaggctctcatagcggtcagtccttgtctgatcgactggttgtcattgctccttggtt

SEQ ID NO: 3714 - DNA, 96 bp, Aspergillus thermomutatus
  misc_feature: 266
tcggtgatcgaccccagggcgatgcgggggcagttcgtcggctttcttccgatcgaacgcccctaggaactcgtggtagtgcgctggtagcttatc

SEQ ID NO: 3715 - DNA, 96 bp, Aspergillus thermomutatus
  misc_feature: 266
tcgaagcatccgtctcgacgactgtctcccggtcatagtcaaactgcatgagaatcggcgcggtagtaaacatcttctttagctgctcgaaccgat

SEQ ID NO: 3716 - DNA, 96 bp, Aspergillus thermomutatus
  misc_feature: 266
tccagattcttatggtcagtgacgatatcaaacttcggtaggctgatcagctccgattcccattctttaagtgcgttgatgatagcgagcagctcc

SEQ ID NO: 3717 - DNA, 96 bp, Aspergillus thermomutatus
  misc_feature: 266
tcacctacctcttcacctacctcttcacctacctcttcacctacctcttcacctacctcttcacctacctcttcacctacctcttcacctacctct

SEQ ID NO: 3718 - DNA, 96 bp, Aspergillus thermomutatus
  misc_feature: 266
tcacccggtgcgatacgaatcttatgaaaggcggcgatgacatccagcttggtgaaccactttgccttcgcgatgcgctctagtgtctcgttgatc

SEQ ID NO: 3719 - DNA, 96 bp, Aspergillus thermomutatus
  misc_feature: 266
tcaattcggtgatcgaccccagggcgatgcgggggcagttcgtcggctttcttccgatcgaacgcccctaggaactcgtggtagtgcgctggtagc

SEQ ID NO: 3720 - DNA, 96 bp, Aspergillus thermomutatus
  misc_feature: 266
tcaatacggccgcgctggacgcttgggagcagcgagcgggccagaacacccccgacccgcgaggggagggggagtagtgtagcgggcaaggcccgc

SEQ ID NO: 3721 - DNA, 96 bp, Aspergillus thermomutatus
  misc_feature: 266
gggtctgccattctagtatagcttttaccttgtcggggtccatgcgtacgcccttgccagcttcaatgataaacccgaggtatttcgtgctcttga

SEQ ID NO: 3722 - DNA, 96 bp, Aspergillus thermomutatus
  misc_feature: 266
taccgagcattgaatgccattacgaagaaagaccgttacccccttccgctgatcaacgagacactagagcgcatcgcgaaggcaaagtggttcacc

SEQ ID NO: 3723 - DNA, 96 bp, Aspergillus thermomutatus
  misc_feature: 266
gttctagtgcatctgtctgttccaatgtgcgctacacaatcattaggtgcgtcttccaatccaatgtatctaccaatgtgcgtttccaatgtttcc

SEQ ID NO: 3724 - DNA, 96 bp, Aspergillus thermomutatus
  misc_feature: 266
gtgatcgaccccagggcgatgcgggggcagttcgtcggctttcttccgatcgaacgcccctaggaactcgtggtagtgcgctggtagcttatcggc

SEQ ID NO: 3725 - DNA, 96 bp, Aspergillus thermomutatus
  misc_feature: 266
gtcgatgtacgcggaggcgaattcatccaggaagtctcgaagggcccagttgatataccgttggaaggtactcggtgcgttcgccatgccaaaagg

SEQ ID NO: 3726 - DNA, 96 bp, Aspergillus thermomutatus
  misc_feature: 266
gtcaatacggccgcgctggacgcttgggagcagcgagcgggccagaacacccccgacccgcgaggggagggggagtagtgtagcgggcaaggcccg

SEQ ID NO: 3727 - DNA, 96 bp, Aspergillus thermomutatus
  misc_feature: 266
gggatcctttgtgagtagcttgctcgggtgaatcattatcttctcgcgcagttgtaggcggtcatcgtcatcgtcaggcatatcttgttctcttcg

SEQ ID NO: 3728 - DNA, 96 bp, Aspergillus thermomutatus
  misc_feature: 266
ggcgttgttgagtatgtatagcgaacccctgtgcgcttatctgtctgaccactaacttcggctcattctcaacccgttccactgcgaatccgtctg

SEQ ID NO: 3729 - DNA, 96 bp, Aspergillus thermomutatus
  misc_feature: 266
ggcatatcttgttctcttcgcgatagtgcgtcaggtctcgcagctaatttaccaggccgatagactagctggtagttgaaccgactgagcaaatct

SEQ ID NO: 3730 - DNA, 96 bp, Aspergillus thermomutatus
  misc_feature: 266
gctgctcgaaccgctgcgtgtgctcatacgtccatttaaatggtgtacctttgtgcgtgagggctgtaagcgggcgtactatctctgagaagttcc

SEQ ID NO: 3731 - DNA, 96 bp, Aspergillus thermomutatus
  misc_feature: 266
atcagcggaagggggtaacggtctttcttcgtaatggcattcaatgctcggtaatcaacacagaaacgtagacctccaccaggtttgcgcacgagc

SEQ ID NO: 3732 - DNA, 96 bp, Aspergillus thermomutatus
  misc_feature: 266
gcggcctgtaaccgctctagcacctgccgtacgtggctacggtgcttcgccagcgacccatcagtgaagataagtacatcgtcgatgtacgcggag

SEQ ID NO: 3733 - DNA, 96 bp, Aspergillus thermomutatus
  misc_feature: 266
aggcatatcttgttctcttcgcgatagtgcgtcaggtctcgcagctaatttaccaggccgatagactagctggtagttgaaccgactgagcaaatc

SEQ ID NO: 3734 - DNA, 96 bp, Aspergillus thermomutatus
  misc_feature: 266
ctgctcgaaccgctgcgtgtgctcatacgtccatttaaatggtgtacctttgtgcgtgagggctgtaagcgggcgtactatctctgagaagttccg

SEQ ID NO: 3735 - DNA, 96 bp, Aspergillus thermomutatus
  misc_feature: 266
ctacgtgggaaccagctgtcaacctcgtcaatacggccgcgctggacgcttgggagcagcgagcgggccagaacacccccgacccgcgaggggagg

SEQ ID NO: 3736 - DNA, 96 bp, Aspergillus thermomutatus
  misc_feature: 266
agatgaatggctgacggccttccgtacgcggtttggtctgtacgaatggttggtgaccccttttggcatggcgaacgcaccgagtaccttccaacg

SEQ ID NO: 3737 - DNA, 96 bp, Aspergillus thermomutatus
  misc_feature: 266
cgtacatcgacgatgtacttatcttcactgatgggtcgctggcgaagcaccgtagccacgtacggcaggtgctagagcggttacaggccgctgggt

SEQ ID NO: 3738 - DNA, 96 bp, Aspergillus thermomutatus
  misc_feature: 266
cggtgatcgaccccagggcgatgcgggggcagttcgtcggctttcttccgatcgaacgcccctaggaactcgtggtagtgcgctggtagcttatcg

SEQ ID NO: 3739 - DNA, 96 bp, Aspergillus thermomutatus
  misc_feature: 266
caacgccggagaggtaaagcagtgcagatcttcgcagccagcatcaaggatattgagaaagcactgcaggtaaagacacatacagaccctgccgat

SEQ ID NO: 3740 - DNA, 96 bp, Aspergillus thermomutatus
  misc_feature: 265
gtggagacggatgcttccaactgggctacgggtgcggtgatgtcccaatacgacgatgacggcctgctgaggccctgcgcatattactcccggaaa

SEQ ID NO: 3741 - DNA, 96 bp, Aspergillus thermomutatus
  misc_feature: 265
ttgcgcagtttgaccctgatcgagacacggtcgtggagacggatgcttccaactgggctacgggtgcggtgatgtcccaatacgacgatgacggcc

SEQ ID NO: 3742 - DNA, 96 bp, Aspergillus thermomutatus
  misc_feature: 265
ttccgtaccatatcctgggttggagggagaccacgctcatccatatcaagaatccacttcttaagagaagcttcttccaaaactgtaagcttctgg

SEQ ID NO: 3743 - DNA, 96 bp, Aspergillus thermomutatus
  misc_feature: 265
ggatattgagaaagcactgcaggtaaagacacatacagaccctgccgataagctaccagcgcactaccacgagttcctaggggcgttcgatcggaa

SEQ ID NO: 3744 - DNA, 96 bp, Aspergillus thermomutatus
  misc_feature: 265
tgaatggctgacggccttccgtacgcggtttggtctgtacgaatggttggtgaccccttttggcatggcgaacgcaccgagtaccttccaacggta

SEQ ID NO: 3745 - DNA, 96 bp, Aspergillus thermomutatus
  misc_feature: 265
taattaaactagtccttacccttaaaagaaaggacaaggagacagggaaggacaaggcaacagaaaaggacaaggtgacaggaaagaacaaaatga

SEQ ID NO: 3746 - DNA, 96 bp, Aspergillus thermomutatus
  misc_feature: 265
agtttgaccctgatcgagacacggtcgtggagacggatgcttccaactgggctacgggtgcggtgatgtcccaatacgacgatgacggcctgctga

SEQ ID NO: 3747 - DNA, 96 bp, Aspergillus thermomutatus
  misc_feature: 265
tacgtgggaaccagctgtcaacctcgtcaatacggccgcgctggacgcttgggagcagcgagcgggccagaacacccccgacccgcgaggggaggg

SEQ ID NO: 3748 - DNA, 96 bp, Aspergillus thermomutatus
  misc_feature: 265
gatgagaacagatcagtgatctgttgtgaacagatcagtgatctgttacagacatatcagtgatatgttcgaagggctatataaggacactcatta

SEQ ID NO: 3749 - DNA, 96 bp, Aspergillus thermomutatus
  misc_feature: 265
gtacgcggaggcgaattcatccaggaagtctcgaagggcccagttgatataccgttggaaggtactcggtgcgttcgccatgccaaaaggggtcac

SEQ ID NO: 3750 - DNA, 96 bp, Aspergillus thermomutatus
  misc_feature: 265
gtcacccggtgcgatacgaatcttatgaaaggcggcgatgacatccagcttggtgaaccactttgccttcgcgatgcgctctagtgtctcgttgat

SEQ ID NO: 3751 - DNA, 96 bp, Aspergillus thermomutatus
  misc_feature: 265
gggggtaacggtctttcttcgtaatggcattcaatgctcggtaatcaacacagaaacgtagacctccaccaggtttgcgcacgagcagcaccgggg

SEQ ID NO: 3752 - DNA, 96 bp, Aspergillus thermomutatus
  misc_feature: 265
gcgggtatcggtctttctttgtgatcgcgttcaacgcgcggtagtcgacacagaatcgtaaccctccacctggcttgcgggcgaacagcaccggag

SEQ ID NO: 3753 - DNA, 96 bp, Aspergillus thermomutatus
  misc_feature: 265
gacactagagcgcatcgcgaaggcaaagtggttcaccaagctggatgtcatcgccgcctttcataagattcgtatcgcaccgggtgacgaatggtt

SEQ ID NO: 3754 - DNA, 96 bp, Aspergillus thermomutatus
  misc_feature: 265
gaagggggtaacggtctttcttcgtaatggcattcaatgctcggtaatcaacacagaaacgtagacctccaccaggtttgcgcacgagcagcaccg

SEQ ID NO: 3755 - DNA, 96 bp, Aspergillus thermomutatus
  misc_feature: 265
acctacctcttcacctacctcttcacctacctcttcacctacctcttcacctacctcttcacctacctcttcacctacctcttcacctacctcttc

SEQ ID NO: 3756 - DNA, 96 bp, Aspergillus thermomutatus
  misc_feature: 265
atcttcactgatgggtcgctggcgaagcaccgtagccacgtacggcaggtgctagagcggttacaggccgctgggttgcagctagacatcgacaag

SEQ ID NO: 3757 - DNA, 96 bp, Aspergillus thermomutatus
  misc_feature: 265
cgggtgcaatgcgaatcttgtggaatgcggcgatcacatcaagtttggtaaaccacttcgcctttgatatacgctccaaggtctcgttgattaggg

SEQ ID NO: 3758 - DNA, 96 bp, Aspergillus thermomutatus
  misc_feature: 265
aacaacgccggagaggtaaagcagtgcagatcttcgcagccagcatcaaggatattgagaaagcactgcaggtaaagacacatacagaccctgccg

SEQ ID NO: 3759 - DNA, 96 bp, Aspergillus thermomutatus
  misc_feature: 265
acttgcgcagtttgaccctgatcgagacacggtcgtggagacggatgcttccaactgggctacgggtgcggtgatgtcccaatacgacgatgacgg

SEQ ID NO: 3760 - DNA, 96 bp, Aspergillus thermomutatus
  misc_feature: 265
ccgatggtcacgtgtcatggtacttctgctgcgtctttcccttaggctctcatagcggtcagtccttgtctgatcgactggttgtcattgctcctt

SEQ ID NO: 3761 - DNA, 96 bp, Aspergillus thermomutatus
  misc_feature: 265
cagtttgaccctgatcgagacacggtcgtggagacggatgcttccaactgggctacgggtgcggtgatgtcccaatacgacgatgacggcctgctg

SEQ ID NO: 3762 - DNA, 96 bp, Aspergillus thermomutatus
  misc_feature: 265
cagtgaagataagtacatcgtcgatgtacgcggaggcgaattcatccaggaagtctcgaagggcccagttgatataccgttggaaggtactcggtg

SEQ ID NO: 3763 - DNA, 96 bp, Aspergillus thermomutatus
  misc_feature: 265
aatacggccgcgctggacgcttgggagcagcgagcgggccagaacacccccgacccgcgaggggagggggagtagtgtagcgggcaaggcccgctg

SEQ ID NO: 3764 - DNA, 96 bp, Aspergillus thermomutatus
  misc_feature: 265
actgctagaaggtccggacggcaagagagcagagcccccatggggcccgttgtacagcatgtcgcgcgaagaactgcttgtactgcgtaagacgct

SEQ ID NO: 3765 - DNA, 96 bp, Aspergillus thermomutatus
  misc_feature: 264
ggagacggatgcttccaactgggctacgggtgcggtgatgtcccaatacgacgatgacggcctgctgaggccctgcgcatattactcccggaaaaa

SEQ ID NO: 3766 - DNA, 96 bp, Aspergillus thermomutatus
  misc_feature: 264
ggagatgaatggctgacggccttccgtacgcggtttggtctgtacgaatggttggtgaccccttttggcatggcgaacgcaccgagtaccttccaa

SEQ ID NO: 3767 - DNA, 96 bp, Aspergillus thermomutatus
  misc_feature: 264
ctttcttccgatcgaacgcccctaggaactcgtggtagtgcgctggtagcttatcggcagggtctgtatgtgtctttacctgcagtgctttctcaa

SEQ ID NO: 3768 - DNA, 96 bp, Aspergillus thermomutatus
  misc_feature: 264
ggaaacgcacattggaaacattggaaacgcacattggtagatacattggattggaagacgcacctaatgattgtgtagcgcacattggaacagaca

SEQ ID NO: 3769 - DNA, 96 bp, Aspergillus thermomutatus
  misc_feature: 264
tgggggatcctttgtgagtagcttgctcgggtgaatcattatcttctcgcgcagttgtaggcggtcatcgtcatcgtcaggcatatcttgttctct

SEQ ID NO: 3770 - DNA, 96 bp, Aspergillus thermomutatus
  misc_feature: 264
tggcagaggccgccgcaaggagtatctcgtcaaatggacaggttacgatcgtcctacgtgggaaccagctgtcaacctcgtcaatacggccgcgct

SEQ ID NO: 3771 - DNA, 96 bp, Aspergillus thermomutatus
  misc_feature: 264
tggaaggtgctaggtgcgttcgccataccgaaaggggtaactagccactcgtacagaccaaatcgggtgcgaaacgcagtcaaccattcgtcaccc

SEQ ID NO: 3772 - DNA, 96 bp, Aspergillus thermomutatus
  misc_feature: 264
tgctcgaaccgctgcgtgtgctcatacgtccatttaaatggtgtacctttgtgcgtgagggctgtaagcgggcgtactatctctgagaagttccgt

SEQ ID NO: 3773 - DNA, 96 bp, Aspergillus thermomutatus
  misc_feature: 264
cttctatcggcgctttatacggaacttctctgacatagtacgaccgttgacggcgcttacacagaaaggaaccccattcacatggacggaggagca

SEQ ID NO: 3774 - DNA, 96 bp, Aspergillus thermomutatus
  misc_feature: 264
tgagaacagatcagtgatctgttgtgaacagatcagtgatctgttacagacatatcagtgatatgttcgaagggctatataaggacactcattacc

SEQ ID NO: 3775 - DNA, 96 bp, Aspergillus thermomutatus
  misc_feature: 264
gcaagagagcagagcccccatggggcccgttgtacagcatgtcgcgcgaagaactgcttgtactgcgtaagacgcttacagagctgctagagaaga

SEQ ID NO: 3776 - DNA, 96 bp, Aspergillus thermomutatus
  misc_feature: 264
agcgggtatcggtctttctttgtgatcgcgttcaacgcgcggtagtcgacacagaatcgtaaccctccacctggcttgcgggcgaacagcaccgga

SEQ ID NO: 3777 - DNA, 96 bp, Aspergillus thermomutatus
  misc_feature: 264
gtgggaaccagctgtcaacctcgtcaatacggccgcgctggacgcttgggagcagcgagcgggccagaacacccccgacccgcgaggggaggggga

SEQ ID NO: 3778 - DNA, 96 bp, Aspergillus thermomutatus
  misc_feature: 264
aatggctgacggccttccgtacgcggtttggtctgtacgaatggttggtgaccccttttggcatggcgaacgcaccgagtaccttccaacggtata

SEQ ID NO: 3779 - DNA, 96 bp, Aspergillus thermomutatus
  misc_feature: 264
gcctacctcctggggttcctctatgcctactcttggtctgccttactgcctctctccctgtcttacatggtgccttcctccctaccttatattata

SEQ ID NO: 3780 - DNA, 96 bp, Aspergillus thermomutatus
  misc_feature: 264
agacacggtcgtggagacggatgcttccaactgggctacgggtgcggtgatgtcccaatacgacgatgacggcctgctgaggccctgcgcatatta

SEQ ID NO: 3781 - DNA, 96 bp, Aspergillus thermomutatus
  misc_feature: 264
gcgggggcagttcgtcggctttcttccgatcgaacgcccctaggaactcgtggtagtgcgctggtagcttatcggcagggtctgtatgtgtcttta

SEQ ID NO: 3782 - DNA, 96 bp, Aspergillus thermomutatus
  misc_feature: 264
ggagtatgcatggaccctgagaaggtaaaggctatattggaatggcagaccccgacctcagcgcgcggcgtgcggtcattcctaggcttcgcaaac

SEQ ID NO: 3783 - DNA, 96 bp, Aspergillus thermomutatus
  misc_feature: 264
ctctactatttcccttctttacttctcctaaactaactaacccttactcatctacttctcctctcccttctcttaaaccaacccctacttatttac

SEQ ID NO: 3784 - DNA, 96 bp, Aspergillus thermomutatus
  misc_feature: 264
cgtcaatacggccgcgctggacgcttgggagcagcgagcgggccagaacacccccgacccgcgaggggagggggagtagtgtagcgggcaaggccc

SEQ ID NO: 3785 - DNA, 96 bp, Aspergillus thermomutatus
  misc_feature: 264
attacgaagaaagaccgttacccccttccgctgatcaacgagacactagagcgcatcgcgaaggcaaagtggttcaccaagctggatgtcatcgcc

SEQ ID NO: 3786 - DNA, 96 bp, Aspergillus thermomutatus
  misc_feature: 264
caacaacgccggagaggtaaagcagtgcagatcttcgcagccagcatcaaggatattgagaaagcactgcaggtaaagacacatacagaccctgcc

SEQ ID NO: 3787 - DNA, 96 bp, Aspergillus thermomutatus
  misc_feature: 264
gcattgaatgccattacgaagaaagaccgttacccccttccgctgatcaacgagacactagagcgcatcgcgaaggcaaagtggttcaccaagctg

SEQ ID NO: 3788 - DNA, 96 bp, Aspergillus thermomutatus
  misc_feature: 264
gatggtcacgtgtcatggtacttctgctgcgtctttcccttaggctctcatagcggtcagtccttgtctgatcgactggttgtcattgctccttgg

SEQ ID NO: 3789 - DNA, 96 bp, Aspergillus thermomutatus
  misc_feature: 264
acctctagaggctccaggttgtatccgtggtccaggaagaacggacttacccccgtgctcgtagcgtccctgccatttatcgcaagctgggccatc

SEQ ID NO: 3790 - DNA, 96 bp, Aspergillus thermomutatus
  misc_feature: 264
ctgccgatggtcacgtgtcatggtacttctgctgcgtctttcccttaggctctcatagcggtcagtccttgtctgatcgactggttgtcattgctc

SEQ ID NO: 3791 - DNA, 96 bp, Aspergillus thermomutatus
  misc_feature: 264
gaacgggttgagaatgagccgaagttagtggtcagacagataagcgcacaggggttcgctatacatactcaacaacgccggagaggtaaagcagtg

SEQ ID NO: 3792 - DNA, 96 bp, Aspergillus thermomutatus
  misc_feature: 264
gaaacgcacattggaaacattggaaacgcacattggtagatacattggattggaagacgcacctaatgattgtgtagcgcacattggaacagacag

SEQ ID NO: 3793 - DNA, 96 bp, Aspergillus thermomutatus
  misc_feature: 264
cttgctcgggtgaatcattatcttctcgcgcagttgtaggcggtcatcgtcatcgtcaggcatatcttgttctcttcgcgatagtgcgtcaggtct

SEQ ID NO: 3794 - DNA, 96 bp, Aspergillus thermomutatus
  misc_feature: 264
aaggatattgagaaagcactgcaggtaaagacacatacagaccctgccgataagctaccagcgcactaccacgagttcctaggggcgttcgatcgg

SEQ ID NO: 3795 - DNA, 96 bp, Aspergillus thermomutatus
  misc_feature: 264
cattcctaggcttcgcaaacttctatcggcgctttatacggaacttctcagagatagtacgcccgcttacagccctcacgcacaaaggtacaccat

SEQ ID NO: 3796 - DNA, 96 bp, Aspergillus thermomutatus
  misc_feature: 264
agattcttatggtcagtgacgatatcaaacttcggtaggctgatcagctccgattcccattctttaagtgcgttgatgatagcgagcagctccttg

SEQ ID NO: 3797 - DNA, 96 bp, Aspergillus thermomutatus
  misc_feature: 263
taaagaatgggaatcggagctgatcagcctaccgaagtttgatatcgtcactgaccataagaatctggagtacttcacagttcgcaggcgactaaa

SEQ ID NO: 3798 - DNA, 96 bp, Aspergillus thermomutatus
  misc_feature: 263
ttggaaggtgctaggtgcgttcgccataccgaaaggggtaactagccactcgtacagaccaaatcgggtgcgaaacgcagtcaaccattcgtcacc

SEQ ID NO: 3799 - DNA, 96 bp, Aspergillus thermomutatus
  misc_feature: 263
tgctcgggtgaatcattatcttctcgcgcagttgtaggcggtcatcgtcatcgtcaggcatatcttgttctcttcgcgatagtgcgtcaggtctcg

SEQ ID NO: 3800 - DNA, 96 bp, Aspergillus thermomutatus
  misc_feature: 263
tgcgggggcagttcgtcggctttcttccgatcgaacgcccctaggaactcgtggtagtgcgctggtagcttatcggcagggtctgtatgtgtcttt

SEQ ID NO: 3801 - DNA, 96 bp, Aspergillus thermomutatus
  misc_feature: 263
tgacgatgaccgcctacaactgcgcgagaagataatgattcacccgagcaagctactcacaaaggatcccccaccctcagtggtgagccgactgat

SEQ ID NO: 3802 - DNA, 96 bp, Aspergillus thermomutatus
  misc_feature: 263
catcaaggatattgagaaagcactgcaggtaaagacacatacagaccctgccgataagctaccagcgcactaccacgagttcctaggggcgttcga

SEQ ID NO: 3803 - DNA, 96 bp, Aspergillus thermomutatus
  misc_feature: 263
atacggccgcgctggacgcttgggagcagcgagcgggccagaacacccccgacccgcgaggggagggggagtagtgtagcgggcaaggcccgctga

SEQ ID NO: 3804 - DNA, 96 bp, Aspergillus thermomutatus
  misc_feature: 263
tacgcggaggcgaattcatccaggaagtctcgaagggcccagttgatataccgttggaaggtactcggtgcgttcgccatgccaaaaggggtcacc

SEQ ID NO: 3805 - DNA, 96 bp, Aspergillus thermomutatus
  misc_feature: 263
taaaagaaaggacaaggagacagggaaggacaaggcaacagaaaaggacaaggtgacaggaaagaacaaaatgacaggaggagcaaggtagagagg

SEQ ID NO: 3806 - DNA, 96 bp, Aspergillus thermomutatus
  misc_feature: 263
atgagaacagatcagtgatctgttgtgaacagatcagtgatctgttacagacatatcagtgatatgttcgaagggctatataaggacactcattac

SEQ ID NO: 3807 - DNA, 96 bp, Aspergillus thermomutatus
  misc_feature: 263
ggtgatcgaccccagggcgatgcgggggcagttcgtcggctttcttccgatcgaacgcccctaggaactcgtggtagtgcgctggtagcttatcgg

SEQ ID NO: 3808 - DNA, 96 bp, Aspergillus thermomutatus
  misc_feature: 263
atactcaacaacgccggagaggtaaagcagtgcagatcttcgcagccagcatcaaggatattgagaaagcactgcaggtaaagacacatacagacc

SEQ ID NO: 3809 - DNA, 96 bp, Aspergillus thermomutatus
  misc_feature: 263
ggccgcgctggacgcttgggagcagcgagcgggccagaacacccccgacccgcgaggggagggggagtagtgtagcgggcaaggcccgctgaatgc

SEQ ID NO: 3810 - DNA, 96 bp, Aspergillus thermomutatus
  misc_feature: 263
gccgcgctggacgcttgggagcagcgagcgggccagaacacccccgacccgcgaggggagggggagtagtgtagcgggcaaggcccgctgaatgct

SEQ ID NO: 3811 - DNA, 96 bp, Aspergillus thermomutatus
  misc_feature: 263
gatcagcggaagggggtaacggtctttcttcgtaatggcattcaatgctcggtaatcaacacagaaacgtagacctccaccaggtttgcgcacgag

SEQ ID NO: 3812 - DNA, 96 bp, Aspergillus thermomutatus
  misc_feature: 263
ccgcgctggacgcttgggagcagcgagcgggccagaacacccccgacccgcgaggggagggggagtagtgtagcgggcaaggcccgctgaatgctc

SEQ ID NO: 3813 - DNA, 96 bp, Aspergillus thermomutatus
  misc_feature: 263
cttacgaaagatgttgacagagctgctggagaagaactttatccgcattagtagctcttccgccgcggctccggtgctgttcgcccgcaagccagg

SEQ ID NO: 3814 - DNA, 96 bp, Aspergillus thermomutatus
  misc_feature: 263
cagcggaagggggtaacggtctttcttcgtaatggcattcaatgctcggtaatcaacacagaaacgtagacctccaccaggtttgcgcacgagcag

SEQ ID NO: 3815 - DNA, 96 bp, Aspergillus thermomutatus
  misc_feature: 263
cctacgtgggaaccagctgtcaacctcgtcaatacggccgcgctggacgcttgggagcagcgagcgggccagaacacccccgacccgcgaggggag

SEQ ID NO: 3816 - DNA, 96 bp, Aspergillus thermomutatus
  misc_feature: 263
cgatttggtctgtacgagtggctagttacccctttcggtatggcgaacgcacctagcaccttccaacggtacatcaactggacactaagagacttt

SEQ ID NO: 3817 - DNA, 96 bp, Aspergillus thermomutatus
  misc_feature: 263
cgaagaaagaccgttacccccttccgctgatcaacgagacactagagcgcatcgcgaaggcaaagtggttcaccaagctggatgtcatcgccgcct

SEQ ID NO: 3818 - DNA, 96 bp, Aspergillus thermomutatus
  misc_feature: 263
agcccccatggggcccgttgtacagcatgtcgcgcgaagaactgcttgtactgcgtaagacgcttacagagctgctagagaagaacttcatacgtg

SEQ ID NO: 3819 - DNA, 96 bp, Aspergillus thermomutatus
  misc_feature: 263
attcgtcacccggtgcgatacgaatcttatgaaaggcggcgatgacatccagcttggtgaaccactttgccttcgcgatgcgctctagtgtctcgt

SEQ ID NO: 3820 - DNA, 96 bp, Aspergillus thermomutatus
  misc_feature: 263
aggggtctgccattctagtatagcttttaccttgtcggggtccatgcgtacgcccttgccagcttcaatgataaacccgaggtatttcgtgctctt

SEQ ID NO: 3821 - DNA, 96 bp, Aspergillus thermomutatus
  misc_feature: 263
accctgatcgagacacggtcgtggagacggatgcttccaactgggctacgggtgcggtgatgtcccaatacgacgatgacggcctgctgaggccct

SEQ ID NO: 3822 - DNA, 96 bp, Aspergillus thermomutatus
  misc_feature: 262
tggagacggatgcttccaactgggctacgggtgcggtgatgtcccaatacgacgatgacggcctgctgaggccctgcgcatattactcccggaaaa

SEQ ID NO: 3823 - DNA, 96 bp, Aspergillus thermomutatus
  misc_feature: 262
ttgtcttacgaaagatgttgacagagctgctggagaagaactttatccgcattagtagctcttccgccgcggctccggtgctgttcgcccgcaagc

SEQ ID NO: 3824 - DNA, 96 bp, Aspergillus thermomutatus
  misc_feature: 262
tatcttcactgatgggtcgctggcgaagcaccgtagccacgtacggcaggtgctagagcggttacaggccgctgggttgcagctagacatcgacaa

SEQ ID NO: 3825 - DNA, 96 bp, Aspergillus thermomutatus
  misc_feature: 262
ttgctcgggtgaatcattatcttctcgcgcagttgtaggcggtcatcgtcatcgtcaggcatatcttgttctcttcgcgatagtgcgtcaggtctc

SEQ ID NO: 3826 - DNA, 96 bp, Aspergillus thermomutatus
  misc_feature: 262
ttctatcggcgctttatacggaacttctctgacatagtacgaccgttgacggcgcttacacagaaaggaaccccattcacatggacggaggagcac

SEQ ID NO: 3827 - DNA, 96 bp, Aspergillus thermomutatus
  misc_feature: 262
gattaggggcagcgggtatcggtctttctttgtgatcgcgttcaacgcgcggtagtcgacacagaatcgtaaccctccacctggcttgcgggcgaa

SEQ ID NO: 3828 - DNA, 96 bp, Aspergillus thermomutatus
  misc_feature: 262
tacggccgcgctggacgcttgggagcagcgagcgggccagaacacccccgacccgcgaggggagggggagtagtgtagcgggcaaggcccgctgaa

SEQ ID NO: 3829 - DNA, 96 bp, Aspergillus thermomutatus
  misc_feature: 262
ttacgaagaaagaccgttacccccttccgctgatcaacgagacactagagcgcatcgcgaaggcaaagtggttcaccaagctggatgtcatcgccg

SEQ ID NO: 3830 - DNA, 96 bp, Aspergillus thermomutatus
  misc_feature: 262
cttgggaaaggatcgttcgccgcaggacgcaacagactaacatggaacacattatgcacccctggtggagtatctagtcggtaagcatgtgatcca

SEQ ID NO: 3831 - DNA, 96 bp, Aspergillus thermomutatus
  misc_feature: 262
aaacgcacattggaaacattggaaacgcacattggtagatacattggattggaagacgcacctaatgattgtgtagcgcacattggaacagacaga

SEQ ID NO: 3832 - DNA, 96 bp, Aspergillus thermomutatus
  misc_feature: 262
tcgatgtacgcggaggcgaattcatccaggaagtctcgaagggcccagttgatataccgttggaaggtactcggtgcgttcgccatgccaaaaggg

SEQ ID NO: 3833 - DNA, 96 bp, Aspergillus thermomutatus
  misc_feature: 262
tacgaagaaagaccgttacccccttccgctgatcaacgagacactagagcgcatcgcgaaggcaaagtggttcaccaagctggatgtcatcgccgc

SEQ ID NO: 3834 - DNA, 96 bp, Aspergillus thermomutatus
  misc_feature: 262
aaagaatgggaatcggagctgatcagcctaccgaagtttgatatcgtcactgaccataagaatctggagtacttcacagttcgcaggcgactaaac

SEQ ID NO: 3835 - DNA, 96 bp, Aspergillus thermomutatus
  misc_feature: 262
gttgatcagcggaagggggtaacggtctttcttcgtaatggcattcaatgctcggtaatcaacacagaaacgtagacctccaccaggtttgcgcac

SEQ ID NO: 3836 - DNA, 96 bp, Aspergillus thermomutatus
  misc_feature: 262
gtcgtggagacggatgcttccaactgggctacgggtgcggtgatgtcccaatacgacgatgacggcctgctgaggccctgcgcatattactcccgg

SEQ ID NO: 3837 - DNA, 96 bp, Aspergillus thermomutatus
  misc_feature: 262
cgggggcagttcgtcggctttcttccgatcgaacgcccctaggaactcgtggtagtgcgctggtagcttatcggcagggtctgtatgtgtctttac

SEQ ID NO: 3838 - DNA, 96 bp, Aspergillus thermomutatus
  misc_feature: 262
ggggtctgccattctagtatagcttttaccttgtcggggtccatgcgtacgcccttgccagcttcaatgataaacccgaggtatttcgtgctcttg

SEQ ID NO: 3839 - DNA, 96 bp, Aspergillus thermomutatus
  misc_feature: 262
acgaagaaagaccgttacccccttccgctgatcaacgagacactagagcgcatcgcgaaggcaaagtggttcaccaagctggatgtcatcgccgcc

SEQ ID NO: 3840 - DNA, 96 bp, Aspergillus thermomutatus
  misc_feature: 262
ggaacgggttgagaatgagccgaagttagtggtcagacagataagcgcacaggggttcgctatacatactcaacaacgccggagaggtaaagcagt

SEQ ID NO: 3841 - DNA, 96 bp, Aspergillus thermomutatus
  misc_feature: 262
cccaatacgacgatgacggcctgctgaggccctgcgcatattactcccggaaaaacacaccagccgaatgcaactacgagatccatgacaaggagc

SEQ ID NO: 3842 - DNA, 96 bp, Aspergillus thermomutatus
  misc_feature: 262
gcgatgcgggggcagttcgtcggctttcttccgatcgaacgcccctaggaactcgtggtagtgcgctggtagcttatcggcagggtctgtatgtgt

SEQ ID NO: 3843 - DNA, 96 bp, Aspergillus thermomutatus
  misc_feature: 262
agtgaagataagtacatcgtcgatgtacgcggaggcgaattcatccaggaagtctcgaagggcccagttgatataccgttggaaggtactcggtgc

SEQ ID NO: 3844 - DNA, 96 bp, Aspergillus thermomutatus
  misc_feature: 262
gagcccccatggggcccgttgtacagcatgtcgcgcgaagaactgcttgtactgcgtaagacgcttacagagctgctagagaagaacttcatacgt

SEQ ID NO: 3845 - DNA, 96 bp, Aspergillus thermomutatus
  misc_feature: 262
cgatgcgggggcagttcgtcggctttcttccgatcgaacgcccctaggaactcgtggtagtgcgctggtagcttatcggcagggtctgtatgtgtc

SEQ ID NO: 3846 - DNA, 96 bp, Aspergillus thermomutatus
  misc_feature: 262
atggaacacattatgcacccctggtggagtatctagtcggtaagcatgtgatccaatagcttccagtactgtgaacttcgcgtgctgggcatcgag

SEQ ID NO: 3847 - DNA, 96 bp, Aspergillus thermomutatus
  misc_feature: 262
cggctttcttccgatcgaacgcccctaggaactcgtggtagtgcgctggtagcttatcggcagggtctgtatgtgtctttacctgcagtgctttct

SEQ ID NO: 3848 - DNA, 96 bp, Aspergillus thermomutatus
  misc_feature: 262
cgatgtacgcggaggcgaattcatccaggaagtctcgaagggcccagttgatataccgttggaaggtactcggtgcgttcgccatgccaaaagggg

SEQ ID NO: 3849 - DNA, 96 bp, Aspergillus thermomutatus
  misc_feature: 262
accagctgtcaacctcgtcaatacggccgcgctggacgcttgggagcagcgagcgggccagaacacccccgacccgcgaggggagggggagtagtg

SEQ ID NO: 3850 - DNA, 96 bp, Aspergillus thermomutatus
  misc_feature: 262
cacctacctcttcacctacctcttcacctacctcttcacctacctcttcacctacctcttcacctacctcttcacctacctcttcacctacctctt

SEQ ID NO: 3851 - DNA, 96 bp, Aspergillus thermomutatus
  misc_feature: 262
atcaaggatattgagaaagcactgcaggtaaagacacatacagaccctgccgataagctaccagcgcactaccacgagttcctaggggcgttcgat

SEQ ID NO: 3852 - DNA, 96 bp, Aspergillus thermomutatus
  misc_feature: 262
aaccagctgtcaacctcgtcaatacggccgcgctggacgcttgggagcagcgagcgggccagaacacccccgacccgcgaggggagggggagtagt

SEQ ID NO: 3853 - DNA, 96 bp, Aspergillus thermomutatus
  misc_feature: 262
aaggatcgttcgccgcaggacgcaacagactaacatggaacacattatgcacccctggtggagtatctagtcggtaagcatgtgatccaatagctt

SEQ ID NO: 3854 - DNA, 96 bp, Aspergillus thermomutatus
  misc_feature: 261
cgaaccgctgcgtgtgctcatacgtccatttaaatggtgtacctttgtgcgtgagggctgtaagcgggcgtactatctctgagaagttccgtataa

SEQ ID NO: 3855 - DNA, 96 bp, Aspergillus thermomutatus
  misc_feature: 261
ttactctactatttcccttctttacttctcctaaactaactaacccttactcatctacttctcctctcccttctcttaaaccaacccctacttatt

SEQ ID NO: 3856 - DNA, 96 bp, Aspergillus thermomutatus
  misc_feature: 261
ttaccgagcattgaatgccattacgaagaaagaccgttacccccttccgctgatcaacgagacactagagcgcatcgcgaaggcaaagtggttcac

SEQ ID NO: 3857 - DNA, 96 bp, Aspergillus thermomutatus
  misc_feature: 261
tgtgaggagatcatggtgattgccgataggttagggaagggtgtgatattagtgccctgtgagcgaactgatgccgagaccgtagcgcagctgcta

SEQ ID NO: 3858 - DNA, 96 bp, Aspergillus thermomutatus
  misc_feature: 261
tggaacacattatgcacccctggtggagtatctagtcggtaagcatgtgatccaatagcttccagtactgtgaacttcgcgtgctgggcatcgagc

SEQ ID NO: 3859 - DNA, 96 bp, Aspergillus thermomutatus
  misc_feature: 261
tgcttactctactatttcccttctttacttctcctaaactaactaacccttactcatctacttctcctctcccttctcttaaaccaacccctactt

SEQ ID NO: 3860 - DNA, 96 bp, Aspergillus thermomutatus
  misc_feature: 261
tgccattacgaagaaagaccgttacccccttccgctgatcaacgagacactagagcgcatcgcgaaggcaaagtggttcaccaagctggatgtcat

SEQ ID NO: 3861 - DNA, 96 bp, Aspergillus thermomutatus
  misc_feature: 261
tctgagccgctacggacgaggatcctgcaagagacgcacgactcagtgcttacaggccaccccgggaagaacacattgtacgcgatgatagcgcgg

SEQ ID NO: 3862 - DNA, 96 bp, Aspergillus thermomutatus
  misc_feature: 261
tcctacgtgggaaccagctgtcaacctcgtcaatacggccgcgctggacgcttgggagcagcgagcgggccagaacacccccgacccgcgagggga

SEQ ID NO: 3863 - DNA, 96 bp, Aspergillus thermomutatus
  misc_feature: 261
attgaatgccattacgaagaaagaccgttacccccttccgctgatcaacgagacactagagcgcatcgcgaaggcaaagtggttcaccaagctgga

SEQ ID NO: 3864 - DNA, 96 bp, Aspergillus thermomutatus
  misc_feature: 261
tatgcttactctactatttcccttctttacttctcctaaactaactaacccttactcatctacttctcctctcccttctcttaaaccaacccctac

SEQ ID NO: 3865 - DNA, 96 bp, Aspergillus thermomutatus
  misc_feature: 261
ggaagggggtaacggtctttcttcgtaatggcattcaatgctcggtaatcaacacagaaacgtagacctccaccaggtttgcgcacgagcagcacc

SEQ ID NO: 3866 - DNA, 96 bp, Aspergillus thermomutatus
  misc_feature: 261
ggctttcttccgatcgaacgcccctaggaactcgtggtagtgcgctggtagcttatcggcagggtctgtatgtgtctttacctgcagtgctttctc

SEQ ID NO: 3867 - DNA, 96 bp, Aspergillus thermomutatus
  misc_feature: 261
gagcattgaatgccattacgaagaaagaccgttacccccttccgctgatcaacgagacactagagcgcatcgcgaaggcaaagtggttcaccaagc

SEQ ID NO: 3868 - DNA, 96 bp, Aspergillus thermomutatus
  misc_feature: 261
agcggaagggggtaacggtctttcttcgtaatggcattcaatgctcggtaatcaacacagaaacgtagacctccaccaggtttgcgcacgagcagc

SEQ ID NO: 3869 - DNA, 96 bp, Aspergillus thermomutatus
  misc_feature: 261
acttctatcggcgctttatacggaacttctctgacatagtacgaccgttgacggcgcttacacagaaaggaaccccattcacatggacggaggagc

SEQ ID NO: 3870 - DNA, 96 bp, Aspergillus thermomutatus
  misc_feature: 261
gaaaggatcgttcgccgcaggacgcaacagactaacatggaacacattatgcacccctggtggagtatctagtcggtaagcatgtgatccaatagc

SEQ ID NO: 3871 - DNA, 96 bp, Aspergillus thermomutatus
  misc_feature: 261
gcctgtgccgcggcagcccaatgctcttccaatggtagttggctagggtcgtcgggtgctaccctagcgagcatcagtcggctcaccactgagggt

SEQ ID NO: 3872 - DNA, 96 bp, Aspergillus thermomutatus
  misc_feature: 261
ctcaatatccttgatgctggctgcgaagatctgcactgctttacctctccggcgttgttgagtatgtatagcgaacccctgtgcgcttatctgtct

SEQ ID NO: 3873 - DNA, 96 bp, Aspergillus thermomutatus
  misc_feature: 261
aagaatgggaatcggagctgatcagcctaccgaagtttgatatcgtcactgaccataagaatctggagtacttcacagttcgcaggcgactaaacg

SEQ ID NO: 3874 - DNA, 96 bp, Aspergillus thermomutatus
  misc_feature: 261
attgcttgtcttacgaaagatgttgacagagctgctggagaagaactttatccgcattagtagctcttccgccgcggctccggtgctgttcgcccg

SEQ ID NO: 3875 - DNA, 96 bp, Aspergillus thermomutatus
  misc_feature: 261
cattcgtcacccggtgcgatacgaatcttatgaaaggcggcgatgacatccagcttggtgaaccactttgccttcgcgatgcgctctagtgtctcg

SEQ ID NO: 3876 - DNA, 96 bp, Aspergillus thermomutatus
  misc_feature: 261
ccagctgtcaacctcgtcaatacggccgcgctggacgcttgggagcagcgagcgggccagaacacccccgacccgcgaggggagggggagtagtgt

SEQ ID NO: 3877 - DNA, 96 bp, Aspergillus thermomutatus
  misc_feature: 261
atgcttactctactatttcccttctttacttctcctaaactaactaacccttactcatctacttctcctctcccttctcttaaaccaacccctact

SEQ ID NO: 3878 - DNA, 96 bp, Aspergillus thermomutatus
  misc_feature: 261
aacgcacattggaaacattggaaacgcacattggtagatacattggattggaagacgcacctaatgattgtgtagcgcacattggaacagacagat

SEQ ID NO: 3879 - DNA, 96 bp, Aspergillus thermomutatus
  misc_feature: 261
aaaggatcgttcgccgcaggacgcaacagactaacatggaacacattatgcacccctggtggagtatctagtcggtaagcatgtgatccaatagct

SEQ ID NO: 3880 - DNA, 96 bp, Aspergillus thermomutatus
  misc_feature: 260
ttggcagaggccgccgcaaggagtatctcgtcaaatggacaggttacgatcgtcctacgtgggaaccagctgtcaacctcgtcaatacggccgcgc

SEQ ID NO: 3881 - DNA, 96 bp, Aspergillus thermomutatus
  misc_feature: 260
gcttgtcttacgaaagatgttgacagagctgctggagaagaactttatccgcattagtagctcttccgccgcggctccggtgctgttcgcccgcaa

SEQ ID NO: 3882 - DNA, 96 bp, Aspergillus thermomutatus
  misc_feature: 260
ttgatcagcggaagggggtaacggtctttcttcgtaatggcattcaatgctcggtaatcaacacagaaacgtagacctccaccaggtttgcgcacg

SEQ ID NO: 3883 - DNA, 96 bp, Aspergillus thermomutatus
  misc_feature: 260
ttaaagaatgggaatcggagctgatcagcctaccgaagtttgatatcgtcactgaccataagaatctggagtacttcacagttcgcaggcgactaa

SEQ ID NO: 3884 - DNA, 96 bp, Aspergillus thermomutatus
  misc_feature: 260
tctatcggcgctttatacggaacttctctgacatagtacgaccgttgacggcgcttacacagaaaggaaccccattcacatggacggaggagcaca

SEQ ID NO: 3885 - DNA, 96 bp, Aspergillus thermomutatus
  misc_feature: 260
tgtcttacgaaagatgttgacagagctgctggagaagaactttatccgcattagtagctcttccgccgcggctccggtgctgttcgcccgcaagcc

SEQ ID NO: 3886 - DNA, 96 bp, Aspergillus thermomutatus
  misc_feature: 260
acgcggaggcgaattcatccaggaagtctcgaagggcccagttgatataccgttggaaggtactcggtgcgttcgccatgccaaaaggggtcacca

SEQ ID NO: 3887 - DNA, 96 bp, Aspergillus thermomutatus
  misc_feature: 260
accgagcattgaatgccattacgaagaaagaccgttacccccttccgctgatcaacgagacactagagcgcatcgcgaaggcaaagtggttcacca

SEQ ID NO: 3888 - DNA, 96 bp, Aspergillus thermomutatus
  misc_feature: 260
tcagcggaagggggtaacggtctttcttcgtaatggcattcaatgctcggtaatcaacacagaaacgtagacctccaccaggtttgcgcacgagca

SEQ ID NO: 3889 - DNA, 96 bp, Aspergillus thermomutatus
  misc_feature: 260
tctccgggtgcaatgcgaatcttgtggaatgcggcgatcacatcaagtttggtaaaccacttcgcctttgatatacgctccaaggtctcgttgatt

SEQ ID NO: 3890 - DNA, 96 bp, Aspergillus thermomutatus
  misc_feature: 260
tcgtggagacggatgcttccaactgggctacgggtgcggtgatgtcccaatacgacgatgacggcctgctgaggccctgcgcatattactcccgga

SEQ ID NO: 3891 - DNA, 96 bp, Aspergillus thermomutatus
  misc_feature: 260
catggaacacattatgcacccctggtggagtatctagtcggtaagcatgtgatccaatagcttccagtactgtgaacttcgcgtgctgggcatcga

SEQ ID NO: 3892 - DNA, 96 bp, Aspergillus thermomutatus
  misc_feature: 260
ctgagccgctacggacgaggatcctgcaagagacgcacgactcagtgcttacaggccaccccgggaagaacacattgtacgcgatgatagcgcgga

SEQ ID NO: 3893 - DNA, 96 bp, Aspergillus thermomutatus
  misc_feature: 260
tcatctccgggtgcaatgcgaatcttgtggaatgcggcgatcacatcaagtttggtaaaccacttcgcctttgatatacgctccaaggtctcgttg

SEQ ID NO: 3894 - DNA, 96 bp, Aspergillus thermomutatus
  misc_feature: 260
ctggcttgggaaaggatcgttcgccgcaggacgcaacagactaacatggaacacattatgcacccctggtggagtatctagtcggtaagcatgtga

SEQ ID NO: 3895 - DNA, 96 bp, Aspergillus thermomutatus
  misc_feature: 260
tcaacaacgccggagaggtaaagcagtgcagatcttcgcagccagcatcaaggatattgagaaagcactgcaggtaaagacacatacagaccctgc

SEQ ID NO: 3896 - DNA, 96 bp, Aspergillus thermomutatus
  misc_feature: 260
aagaccgttacccccttccgctgatcaacgagacactagagcgcatcgcgaaggcaaagtggttcaccaagctggatgtcatcgccgcctttcata

SEQ ID NO: 3897 - DNA, 96 bp, Aspergillus thermomutatus
  misc_feature: 260
taggggtctgccattctagtatagcttttaccttgtcggggtccatgcgtacgcccttgccagcttcaatgataaacccgaggtatttcgtgctct

SEQ ID NO: 3898 - DNA, 96 bp, Aspergillus thermomutatus
  misc_feature: 260
acctccggcgactgtgaggagatcatggtgattgccgataggttagggaagggtgtgatattagtgccctgtgagcgaactgatgccgagaccgta

SEQ ID NO: 3899 - DNA, 96 bp, Aspergillus thermomutatus
  misc_feature: 260
gcttactctactatttcccttctttacttctcctaaactaactaacccttactcatctacttctcctctcccttctcttaaaccaacccctactta

SEQ ID NO: 3900 - DNA, 96 bp, Aspergillus thermomutatus
  misc_feature: 260
gtaggggtctgccattctagtatagcttttaccttgtcggggtccatgcgtacgcccttgccagcttcaatgataaacccgaggtatttcgtgctc

SEQ ID NO: 3901 - DNA, 96 bp, Aspergillus thermomutatus
  misc_feature: 260
gggtgcaatgcgaatcttgtggaatgcggcgatcacatcaagtttggtaaaccacttcgcctttgatatacgctccaaggtctcgttgattagggg

SEQ ID NO: 3902 - DNA, 96 bp, Aspergillus thermomutatus
  misc_feature: 260
agatattcgcagtcaccctcaaggatatcaataaggccttgcaagcgaagcagtacaccgaccccaagaccaagctgcccgcgcactaccacgagc

SEQ ID NO: 3903 - DNA, 96 bp, Aspergillus thermomutatus
  misc_feature: 260
gcgcagtttgaccctgatcgagacacggtcgtggagacggatgcttccaactgggctacgggtgcggtgatgtcccaatacgacgatgacggcctg

SEQ ID NO: 3904 - DNA, 96 bp, Aspergillus thermomutatus
  misc_feature: 260
aaccaatatatcatcaacgtacgcagatgcaaattcatccagaaagtctcttagtgtccagttgatgtaccgttggaaggtgctaggtgcgttcgc

SEQ ID NO: 3905 - DNA, 96 bp, Aspergillus thermomutatus
  misc_feature: 260
cgcacattggaaacattggaaacgcacattggtagatacattggattggaagacgcacctaatgattgtgtagcgcacattggaacagacagatgc

SEQ ID NO: 3906 - DNA, 96 bp, Aspergillus thermomutatus
  misc_feature: 260
cgcagtttgaccctgatcgagacacggtcgtggagacggatgcttccaactgggctacgggtgcggtgatgtcccaatacgacgatgacggcctgc

SEQ ID NO: 3907 - DNA, 96 bp, Aspergillus thermomutatus
  misc_feature: 260
ccattcgtcacccggtgcgatacgaatcttatgaaaggcggcgatgacatccagcttggtgaaccactttgccttcgcgatgcgctctagtgtctc

SEQ ID NO: 3908 - DNA, 96 bp, Aspergillus thermomutatus
  misc_feature: 260
cttatgaaaggcggcgatgacatccagcttggtgaaccactttgccttcgcgatgcgctctagtgtctcgttgatcagcggaagggggtaacggtc

SEQ ID NO: 3909 - DNA, 96 bp, Aspergillus thermomutatus
  misc_feature: 260
gaagaaagaccgttacccccttccgctgatcaacgagacactagagcgcatcgcgaaggcaaagtggttcaccaagctggatgtcatcgccgcctt

SEQ ID NO: 3910 - DNA, 96 bp, Aspergillus thermomutatus
  misc_feature: 260
cttactctactatttcccttctttacttctcctaaactaactaacccttactcatctacttctcctctcccttctcttaaaccaacccctacttat

SEQ ID NO: 3911 - DNA, 96 bp, Aspergillus thermomutatus
  misc_feature: 260
ctcaacaacgccggagaggtaaagcagtgcagatcttcgcagccagcatcaaggatattgagaaagcactgcaggtaaagacacatacagaccctg

SEQ ID NO: 3912 - DNA, 96 bp, Aspergillus thermomutatus
  misc_feature: 260
cggcgttgttgagtatgtatagcgaacccctgtgcgcttatctgtctgaccactaacttcggctcattctcaacccgttccactgcgaatccgtct

SEQ ID NO: 3913 - DNA, 96 bp, Aspergillus thermomutatus
  misc_feature: 260
cgcgctggacgcttgggagcagcgagcgggccagaacacccccgacccgcgaggggagggggagtagtgtagcgggcaaggcccgctgaatgctcg

SEQ ID NO: 3914 - DNA, 96 bp, Aspergillus thermomutatus
  misc_feature: 260
acatggaacacattatgcacccctggtggagtatctagtcggtaagcatgtgatccaatagcttccagtactgtgaacttcgcgtgctgggcatcg

SEQ ID NO: 3915 - DNA, 96 bp, Aspergillus thermomutatus
  misc_feature: 260
aagggggtaacggtctttcttcgtaatggcattcaatgctcggtaatcaacacagaaacgtagacctccaccaggtttgcgcacgagcagcaccgg

SEQ ID NO: 3916 - DNA, 96 bp, Aspergillus thermomutatus
  misc_feature: 260
agggggtaacggtctttcttcgtaatggcattcaatgctcggtaatcaacacagaaacgtagacctccaccaggtttgcgcacgagcagcaccggg

SEQ ID NO: 3917 - DNA, 96 bp, Aspergillus thermomutatus
  misc_feature: 260
cccgatttggtctgtacgagtggctagttacccctttcggtatggcgaacgcacctagcaccttccaacggtacatcaactggacactaagagact

SEQ ID NO: 3918 - DNA, 96 bp, Aspergillus thermomutatus
  misc_feature: 260
acgcacattggaaacattggaaacgcacattggtagatacattggattggaagacgcacctaatgattgtgtagcgcacattggaacagacagatg

SEQ ID NO: 3919 - DNA, 96 bp, Aspergillus thermomutatus
  misc_feature: 259
ttatgaaaggcggcgatgacatccagcttggtgaaccactttgccttcgcgatgcgctctagtgtctcgttgatcagcggaagggggtaacggtct

SEQ ID NO: 3920 - DNA, 96 bp, Aspergillus thermomutatus
  misc_feature: 259
gtcttacgaaagatgttgacagagctgctggagaagaactttatccgcattagtagctcttccgccgcggctccggtgctgttcgcccgcaagcca

SEQ ID NO: 3921 - DNA, 96 bp, Aspergillus thermomutatus
  misc_feature: 259
tgcgcagtttgaccctgatcgagacacggtcgtggagacggatgcttccaactgggctacgggtgcggtgatgtcccaatacgacgatgacggcct

SEQ ID NO: 3922 - DNA, 96 bp, Aspergillus thermomutatus
  misc_feature: 259
tgccgatggtcacgtgtcatggtacttctgctgcgtctttcccttaggctctcatagcggtcagtccttgtctgatcgactggttgtcattgctcc

SEQ ID NO: 3923 - DNA, 96 bp, Aspergillus thermomutatus
  misc_feature: 259
atgccattacgaagaaagaccgttacccccttccgctgatcaacgagacactagagcgcatcgcgaaggcaaagtggttcaccaagctggatgtca

SEQ ID NO: 3924 - DNA, 96 bp, Aspergillus thermomutatus
  misc_feature: 259
tccgggtgcaatgcgaatcttgtggaatgcggcgatcacatcaagtttggtaaaccacttcgcctttgatatacgctccaaggtctcgttgattag

SEQ ID NO: 3925 - DNA, 96 bp, Aspergillus thermomutatus
  misc_feature: 259
tcccaatacgacgatgacggcctgctgaggccctgcgcatattactcccggaaaaacacaccagccgaatgcaactacgagatccatgacaaggag

SEQ ID NO: 3926 - DNA, 96 bp, Aspergillus thermomutatus
  misc_feature: 259
cgaaagatgttgacagagctgctggagaagaactttatccgcattagtagctcttccgccgcggctccggtgctgttcgcccgcaagccaggtgga

SEQ ID NO: 3927 - DNA, 96 bp, Aspergillus thermomutatus
  misc_feature: 259
tcaatatccttgatgctggctgcgaagatctgcactgctttacctctccggcgttgttgagtatgtatagcgaacccctgtgcgcttatctgtctg

SEQ ID NO: 3928 - DNA, 96 bp, Aspergillus thermomutatus
  misc_feature: 259
tactctactatttcccttctttacttctcctaaactaactaacccttactcatctacttctcctctcccttctcttaaaccaacccctacttattt

SEQ ID NO: 3929 - DNA, 96 bp, Aspergillus thermomutatus
  misc_feature: 259
tacgaaagatgttgacagagctgctggagaagaactttatccgcattagtagctcttccgccgcggctccggtgctgttcgcccgcaagccaggtg

SEQ ID NO: 3930 - DNA, 96 bp, Aspergillus thermomutatus
  misc_feature: 259
tacctcctggggttcctctatgcctactcttggtctgccttactgcctctctccctgtcttacatggtgccttcctccctaccttatattatacat

SEQ ID NO: 3931 - DNA, 96 bp, Aspergillus thermomutatus
  misc_feature: 259
attcggtgatcgaccccagggcgatgcgggggcagttcgtcggctttcttccgatcgaacgcccctaggaactcgtggtagtgcgctggtagctta

SEQ ID NO: 3932 - DNA, 96 bp, Aspergillus thermomutatus
  misc_feature: 259
aattgcttgtcttacgaaagatgttgacagagctgctggagaagaactttatccgcattagtagctcttccgccgcggctccggtgctgttcgccc

SEQ ID NO: 3933 - DNA, 96 bp, Aspergillus thermomutatus
  misc_feature: 259
gaattgcttgtcttacgaaagatgttgacagagctgctggagaagaactttatccgcattagtagctcttccgccgcggctccggtgctgttcgcc

SEQ ID NO: 3934 - DNA, 96 bp, Aspergillus thermomutatus
  misc_feature: 259
ggcctgtaaccgctctagcacctgccgtacgtggctacggtgcttcgccagcgacccatcagtgaagataagtacatcgtcgatgtacgcggaggc

SEQ ID NO: 3935 - DNA, 96 bp, Aspergillus thermomutatus
  misc_feature: 259
cattacgaagaaagaccgttacccccttccgctgatcaacgagacactagagcgcatcgcgaaggcaaagtggttcaccaagctggatgtcatcgc

SEQ ID NO: 3936 - DNA, 96 bp, Aspergillus thermomutatus
  misc_feature: 259
aggatcgttcgccgcaggacgcaacagactaacatggaacacattatgcacccctggtggagtatctagtcggtaagcatgtgatccaatagcttc

SEQ ID NO: 3937 - DNA, 96 bp, Aspergillus thermomutatus
  misc_feature: 259
cttgtcttacgaaagatgttgacagagctgctggagaagaactttatccgcattagtagctcttccgccgcggctccggtgctgttcgcccgcaag

SEQ ID NO: 3938 - DNA, 96 bp, Aspergillus thermomutatus
  misc_feature: 259
atcgttcgccgcaggacgcaacagactaacatggaacacattatgcacccctggtggagtatctagtcggtaagcatgtgatccaatagcttccag

SEQ ID NO: 3939 - DNA, 96 bp, Aspergillus thermomutatus
  misc_feature: 259
ctccggcgttgttgagtatgtatagcgaacccctgtgcgcttatctgtctgaccactaacttcggctcattctcaacccgttccactgcgaatccg

SEQ ID NO: 3940 - DNA, 96 bp, Aspergillus thermomutatus
  misc_feature: 259
cggccgcgctggacgcttgggagcagcgagcgggccagaacacccccgacccgcgaggggagggggagtagtgtagcgggcaaggcccgctgaatg

SEQ ID NO: 3941 - DNA, 96 bp, Aspergillus thermomutatus
  misc_feature: 259
actggcttgggaaaggatcgttcgccgcaggacgcaacagactaacatggaacacattatgcacccctggtggagtatctagtcggtaagcatgtg

SEQ ID NO: 3942 - DNA, 96 bp, Aspergillus thermomutatus
  misc_feature: 259
acggccgcgctggacgcttgggagcagcgagcgggccagaacacccccgacccgcgaggggagggggagtagtgtagcgggcaaggcccgctgaat

SEQ ID NO: 3943 - DNA, 96 bp, Aspergillus thermomutatus
  misc_feature: 259
atctccgggtgcaatgcgaatcttgtggaatgcggcgatcacatcaagtttggtaaaccacttcgcctttgatatacgctccaaggtctcgttgat

SEQ ID NO: 3944 - DNA, 96 bp, Aspergillus thermomutatus
  misc_feature: 258
ttcatctccgggtgcaatgcgaatcttgtggaatgcggcgatcacatcaagtttggtaaaccacttcgcctttgatatacgctccaaggtctcgtt

SEQ ID NO: 3945 - DNA, 96 bp, Aspergillus thermomutatus
  misc_feature: 258
tataaaggcacccacagaggccccatgtaaggcagggttaaggcaggcagagaggtaaggagataggtagagagggacccaagtagcaggccataa

SEQ ID NO: 3946 - DNA, 96 bp, Aspergillus thermomutatus
  misc_feature: 258
ctacctcctggggttcctctatgcctactcttggtctgccttactgcctctctccctgtcttacatggtgccttcctccctaccttatattataca

SEQ ID NO: 3947 - DNA, 96 bp, Aspergillus thermomutatus
  misc_feature: 258
tggggttcctctatgcctactcttggtctgccttactgcctctctccctgtcttacatggtgccttcctccctaccttatattatacattcttcgc

SEQ ID NO: 3948 - DNA, 96 bp, Aspergillus thermomutatus
  misc_feature: 258
tgcttgtcttacgaaagatgttgacagagctgctggagaagaactttatccgcattagtagctcttccgccgcggctccggtgctgttcgcccgca

SEQ ID NO: 3949 - DNA, 96 bp, Aspergillus thermomutatus
  misc_feature: 258
tgctaggtacgccatggtagccgatgaatcggtcgattagcagctgcgctacggtctcggcatcagttcgctcacagggcactaatatcacaccct

SEQ ID NO: 3950 - DNA, 96 bp, Aspergillus thermomutatus
  misc_feature: 258
cgttgatcagcggaagggggtaacggtctttcttcgtaatggcattcaatgctcggtaatcaacacagaaacgtagacctccaccaggtttgcgca

SEQ ID NO: 3951 - DNA, 96 bp, Aspergillus thermomutatus
  misc_feature: 258
ggctgacggccttccgtacgcggtttggtctgtacgaatggttggtgaccccttttggcatggcgaacgcaccgagtaccttccaacggtatatca

SEQ ID NO: 3952 - DNA, 96 bp, Aspergillus thermomutatus
  misc_feature: 258
gggttgagaatgagccgaagttagtggtcagacagataagcgcacaggggttcgctatacatactcaacaacgccggagaggtaaagcagtgcaga

SEQ ID NO: 3953 - DNA, 96 bp, Aspergillus thermomutatus
  misc_feature: 258
tcgttcgccgcaggacgcaacagactaacatggaacacattatgcacccctggtggagtatctagtcggtaagcatgtgatccaatagcttccagt

SEQ ID NO: 3954 - DNA, 96 bp, Aspergillus thermomutatus
  misc_feature: 258
tcgcagtggaacgggttgagaatgagccgaagttagtggtcagacagataagcgcacaggggttcgctatacatactcaacaacgccggagaggta

SEQ ID NO: 3955 - DNA, 96 bp, Aspergillus thermomutatus
  misc_feature: 258
ctatcggcgctttatacggaacttctctgacatagtacgaccgttgacggcgcttacacagaaaggaaccccattcacatggacggaggagcacac

SEQ ID NO: 3956 - DNA, 96 bp, Aspergillus thermomutatus
  misc_feature: 258
accaatatatcatcaacgtacgcagatgcaaattcatccagaaagtctcttagtgtccagttgatgtaccgttggaaggtgctaggtgcgttcgcc

SEQ ID NO: 3957 - DNA, 96 bp, Aspergillus thermomutatus
  misc_feature: 258
ggatcgttcgccgcaggacgcaacagactaacatggaacacattatgcacccctggtggagtatctagtcggtaagcatgtgatccaatagcttcc

SEQ ID NO: 3958 - DNA, 96 bp, Aspergillus thermomutatus
  misc_feature: 258
ccggcgttgttgagtatgtatagcgaacccctgtgcgcttatctgtctgaccactaacttcggctcattctcaacccgttccactgcgaatccgtc

SEQ ID NO: 3959 - DNA, 96 bp, Aspergillus thermomutatus
  misc_feature: 258
gaaggtgctaggtgcgttcgccataccgaaaggggtaactagccactcgtacagaccaaatcgggtgcgaaacgcagtcaaccattcgtcacccgg

SEQ ID NO: 3960 - DNA, 96 bp, Aspergillus thermomutatus
  misc_feature: 258
ataaaggcacccacagaggccccatgtaaggcagggttaaggcaggcagagaggtaaggagataggtagagagggacccaagtagcaggccataag

SEQ ID NO: 3961 - DNA, 96 bp, Aspergillus thermomutatus
  misc_feature: 258
ctggggttcctctatgcctactcttggtctgccttactgcctctctccctgtcttacatggtgccttcctccctaccttatattatacattcttcg

SEQ ID NO: 3962 - DNA, 96 bp, Aspergillus thermomutatus
  misc_feature: 258
ctgctctgccgatggtcacgtgtcatggtacttctgctgcgtctttcccttaggctctcatagcggtcagtccttgtctgatcgactggttgtcat

SEQ ID NO: 3963 - DNA, 96 bp, Aspergillus thermomutatus
  misc_feature: 258
attcgcagtggaacgggttgagaatgagccgaagttagtggtcagacagataagcgcacaggggttcgctatacatactcaacaacgccggagagg

SEQ ID NO: 3964 - DNA, 96 bp, Aspergillus thermomutatus
  misc_feature: 258
attcatctccgggtgcaatgcgaatcttgtggaatgcggcgatcacatcaagtttggtaaaccacttcgcctttgatatacgctccaaggtctcgt

SEQ ID NO: 3965 - DNA, 96 bp, Aspergillus thermomutatus
  misc_feature: 258
atgcgggggcagttcgtcggctttcttccgatcgaacgcccctaggaactcgtggtagtgcgctggtagcttatcggcagggtctgtatgtgtctt

SEQ ID NO: 3966 - DNA, 96 bp, Aspergillus thermomutatus
  misc_feature: 257
tcaggcatatcttgttctcttcgcgatagtgcgtcaggtctcgcagctaatttaccaggccgatagactagctggtagttgaaccgactgagcaaa

SEQ ID NO: 3967 - DNA, 96 bp, Aspergillus thermomutatus
  misc_feature: 257
tttctcaatatccttgatgctggctgcgaagatctgcactgctttacctctccggcgttgttgagtatgtatagcgaacccctgtgcgcttatctg

SEQ ID NO: 3968 - DNA, 96 bp, Aspergillus thermomutatus
  misc_feature: 257
ttgcttgtcttacgaaagatgttgacagagctgctggagaagaactttatccgcattagtagctcttccgccgcggctccggtgctgttcgcccgc

SEQ ID NO: 3969 - DNA, 96 bp, Aspergillus thermomutatus
  misc_feature: 257
atgaagtcgatagctatctcgcgccatttgcggtctggaatcagcaacggtttcagcaggccttgacgccgctcacgccacacacggttggcccca

SEQ ID NO: 3970 - DNA, 96 bp, Aspergillus thermomutatus
  misc_feature: 257
cacccggtgcgatacgaatcttatgaaaggcggcgatgacatccagcttggtgaaccactttgccttcgcgatgcgctctagtgtctcgttgatca

SEQ ID NO: 3971 - DNA, 96 bp, Aspergillus thermomutatus
  misc_feature: 257
tgaagtcgatagctatctcgcgccatttgcggtctggaatcagcaacggtttcagcaggccttgacgccgctcacgccacacacggttggccccac

SEQ ID NO: 3972 - DNA, 96 bp, Aspergillus thermomutatus
  misc_feature: 257
tcttacgaaagatgttgacagagctgctggagaagaactttatccgcattagtagctcttccgccgcggctccggtgctgttcgcccgcaagccag

SEQ ID NO: 3973 - DNA, 96 bp, Aspergillus thermomutatus
  misc_feature: 257
tcgttgatcagcggaagggggtaacggtctttcttcgtaatggcattcaatgctcggtaatcaacacagaaacgtagacctccaccaggtttgcgc

SEQ ID NO: 3974 - DNA, 96 bp, Aspergillus thermomutatus
  misc_feature: 257
tcgaaccgctgcgtgtgctcatacgtccatttaaatggtgtacctttgtgcgtgagggctgtaagcgggcgtactatctctgagaagttccgtata

SEQ ID NO: 3975 - DNA, 96 bp, Aspergillus thermomutatus
  misc_feature: 257
tcactgcctacctcctggggttcctctatgcctactcttggtctgccttactgcctctctccctgtcttacatggtgccttcctccctaccttata

SEQ ID NO: 3976 - DNA, 96 bp, Aspergillus thermomutatus
  misc_feature: 257
gtataaaggcacccacagaggccccatgtaaggcagggttaaggcaggcagagaggtaaggagataggtagagagggacccaagtagcaggccata

SEQ ID NO: 3977 - DNA, 96 bp, Aspergillus thermomutatus
  misc_feature: 257
ctatgcttactctactatttcccttctttacttctcctaaactaactaacccttactcatctacttctcctctcccttctcttaaaccaaccccta

SEQ ID NO: 3978 - DNA, 96 bp, Aspergillus thermomutatus
  misc_feature: 257
tactcaacaacgccggagaggtaaagcagtgcagatcttcgcagccagcatcaaggatattgagaaagcactgcaggtaaagacacatacagaccc

SEQ ID NO: 3979 - DNA, 96 bp, Aspergillus thermomutatus
  misc_feature: 257
taaaggcacccacagaggccccatgtaaggcagggttaaggcaggcagagaggtaaggagataggtagagagggacccaagtagcaggccataagg

SEQ ID NO: 3980 - DNA, 96 bp, Aspergillus thermomutatus
  misc_feature: 257
gtgatgtcccaatacgacgatgacggcctgctgaggccctgcgcatattactcccggaaaaacacaccagccgaatgcaactacgagatccatgac

SEQ ID NO: 3981 - DNA, 96 bp, Aspergillus thermomutatus
  misc_feature: 257
gtatcggtctttctttgtgatcgcgttcaacgcgcggtagtcgacacagaatcgtaaccctccacctggcttgcgggcgaacagcaccggagccgc

SEQ ID NO: 3982 - DNA, 96 bp, Aspergillus thermomutatus
  misc_feature: 257
gggggcagttcgtcggctttcttccgatcgaacgcccctaggaactcgtggtagtgcgctggtagcttatcggcagggtctgtatgtgtctttacc

SEQ ID NO: 3983 - DNA, 96 bp, Aspergillus thermomutatus
  misc_feature: 257
ggaaggtgctaggtgcgttcgccataccgaaaggggtaactagccactcgtacagaccaaatcgggtgcgaaacgcagtcaaccattcgtcacccg

SEQ ID NO: 3984 - DNA, 96 bp, Aspergillus thermomutatus
  misc_feature: 257
gattcgtatcgcaccgggtgacgaatggttgactgcgtttcgcacccgatttggtctgtacgagtggctagttacccctttcggtatggcgaacgc

SEQ ID NO: 3985 - DNA, 96 bp, Aspergillus thermomutatus
  misc_feature: 257
aaaggcacccacagaggccccatgtaaggcagggttaaggcaggcagagaggtaaggagataggtagagagggacccaagtagcaggccataaggc

SEQ ID NO: 3986 - DNA, 96 bp, Aspergillus thermomutatus
  misc_feature: 257
gccattacgaagaaagaccgttacccccttccgctgatcaacgagacactagagcgcatcgcgaaggcaaagtggttcaccaagctggatgtcatc

SEQ ID NO: 3987 - DNA, 96 bp, Aspergillus thermomutatus
  misc_feature: 257
atgtacgcggaggcgaattcatccaggaagtctcgaagggcccagttgatataccgttggaaggtactcggtgcgttcgccatgccaaaaggggtc

SEQ ID NO: 3988 - DNA, 96 bp, Aspergillus thermomutatus
  misc_feature: 257
aatgccattacgaagaaagaccgttacccccttccgctgatcaacgagacactagagcgcatcgcgaaggcaaagtggttcaccaagctggatgtc

SEQ ID NO: 3989 - DNA, 96 bp, Aspergillus thermomutatus
  misc_feature: 257
ataccgaaaggggtaactagccactcgtacagaccaaatcgggtgcgaaacgcagtcaaccattcgtcacccggtgcgatacgaatcttatgaaag

SEQ ID NO: 3990 - DNA, 96 bp, Aspergillus thermomutatus
  misc_feature: 257
cgtatcgcaccgggtgacgaatggttgactgcgtttcgcacccgatttggtctgtacgagtggctagttacccctttcggtatggcgaacgcacct

SEQ ID NO: 3991 - DNA, 96 bp, Aspergillus thermomutatus
  misc_feature: 257
cgcagttgtaggcggtcatcgtcatcgtcaggcatatcttgttctcttcgcgatagtgcgtcaggtctcgcagctaatttaccaggccgatagact

SEQ ID NO: 3992 - DNA, 96 bp, Aspergillus thermomutatus
  misc_feature: 257
ccattacgaagaaagaccgttacccccttccgctgatcaacgagacactagagcgcatcgcgaaggcaaagtggttcaccaagctggatgtcatcg

SEQ ID NO: 3993 - DNA, 96 bp, Aspergillus thermomutatus
  misc_feature: 257
ccgatttggtctgtacgagtggctagttacccctttcggtatggcgaacgcacctagcaccttccaacggtacatcaactggacactaagagactt

SEQ ID NO: 3994 - DNA, 96 bp, Aspergillus thermomutatus
  misc_feature: 257
caggcatatcttgttctcttcgcgatagtgcgtcaggtctcgcagctaatttaccaggccgatagactagctggtagttgaaccgactgagcaaat

SEQ ID NO: 3995 - DNA, 96 bp, Aspergillus thermomutatus
  misc_feature: 257
cactgcctacctcctggggttcctctatgcctactcttggtctgccttactgcctctctccctgtcttacatggtgccttcctccctaccttatat

SEQ ID NO: 3996 - DNA, 96 bp, Aspergillus thermomutatus
  misc_feature: 257
caaggagacagggaaggacaaggcaacagaaaaggacaaggtgacaggaaagaacaaaatgacaggaggagcaaggtagagaggtagaggttaatt

SEQ ID NO: 3997 - DNA, 96 bp, Aspergillus thermomutatus
  misc_feature: 257
actatgcttactctactatttcccttctttacttctcctaaactaactaacccttactcatctacttctcctctcccttctcttaaaccaacccct

SEQ ID NO: 3998 - DNA, 96 bp, Aspergillus thermomutatus
  misc_feature: 257
agcattgaatgccattacgaagaaagaccgttacccccttccgctgatcaacgagacactagagcgcatcgcgaaggcaaagtggttcaccaagct

SEQ ID NO: 3999 - DNA, 96 bp, Aspergillus thermomutatus
  misc_feature: 257
aactggcttgggaaaggatcgttcgccgcaggacgcaacagactaacatggaacacattatgcacccctggtggagtatctagtcggtaagcatgt

SEQ ID NO: 4000 - DNA, 96 bp, Aspergillus thermomutatus
  misc_feature: 256
cataccgaaaggggtaactagccactcgtacagaccaaatcgggtgcgaaacgcagtcaaccattcgtcacccggtgcgatacgaatcttatgaaa

SEQ ID NO: 4001 - DNA, 96 bp, Aspergillus thermomutatus
  misc_feature: 256
gtcaggcatatcttgttctcttcgcgatagtgcgtcaggtctcgcagctaatttaccaggccgatagactagctggtagttgaaccgactgagcaa

SEQ ID NO: 4002 - DNA, 96 bp, Aspergillus thermomutatus
  misc_feature: 256
ttcttccgatcgaacgcccctaggaactcgtggtagtgcgctggtagcttatcggcagggtctgtatgtgtctttacctgcagtgctttctcaata

SEQ ID NO: 4003 - DNA, 96 bp, Aspergillus thermomutatus
  misc_feature: 256
ttacgaaagatgttgacagagctgctggagaagaactttatccgcattagtagctcttccgccgcggctccggtgctgttcgcccgcaagccaggt

SEQ ID NO: 4004 - DNA, 96 bp, Aspergillus thermomutatus
  misc_feature: 256
gaagtcgatagctatctcgcgccatttgcggtctggaatcagcaacggtttcagcaggccttgacgccgctcacgccacacacggttggccccaca

SEQ ID NO: 4005 - DNA, 96 bp, Aspergillus thermomutatus
  misc_feature: 256
gatcgttcgccgcaggacgcaacagactaacatggaacacattatgcacccctggtggagtatctagtcggtaagcatgtgatccaatagcttcca

SEQ ID NO: 4006 - DNA, 96 bp, Aspergillus thermomutatus
  misc_feature: 256
tctgccgatggtcacgtgtcatggtacttctgctgcgtctttcccttaggctctcatagcggtcagtccttgtctgatcgactggttgtcattgct

SEQ ID NO: 4007 - DNA, 96 bp, Aspergillus thermomutatus
  misc_feature: 256
agaatgggaatcggagctgatcagcctaccgaagtttgatatcgtcactgaccataagaatctggagtacttcacagttcgcaggcgactaaacga

SEQ ID NO: 4008 - DNA, 96 bp, Aspergillus thermomutatus
  misc_feature: 256
tcgtcaggcatatcttgttctcttcgcgatagtgcgtcaggtctcgcagctaatttaccaggccgatagactagctggtagttgaaccgactgagc

SEQ ID NO: 4009 - DNA, 96 bp, Aspergillus thermomutatus
  misc_feature: 256
tccggcgttgttgagtatgtatagcgaacccctgtgcgcttatctgtctgaccactaacttcggctcattctcaacccgttccactgcgaatccgt

SEQ ID NO: 4010 - DNA, 96 bp, Aspergillus thermomutatus
  misc_feature: 256
tagaagttcgcaaagccgagaaacgatcgtacgcctcgagtggatgtaggggtctgccattctagtatagcttttaccttgtcggggtccatgcgt

SEQ ID NO: 4011 - DNA, 96 bp, Aspergillus thermomutatus
  misc_feature: 256
agaagttcgcaaagccgagaaacgatcgtacgcctcgagtggatgtaggggtctgccattctagtatagcttttaccttgtcggggtccatgcgta

SEQ ID NO: 4012 - DNA, 96 bp, Aspergillus thermomutatus
  misc_feature: 256
tacctccggcgactgtgaggagatcatggtgattgccgataggttagggaagggtgtgatattagtgccctgtgagcgaactgatgccgagaccgt

SEQ ID NO: 4013 - DNA, 96 bp, Aspergillus thermomutatus
  misc_feature: 256
actctactatttcccttctttacttctcctaaactaactaacccttactcatctacttctcctctcccttctcttaaaccaacccctacttattta

SEQ ID NO: 4014 - DNA, 96 bp, Aspergillus thermomutatus
  misc_feature: 256
gacacggtcgtggagacggatgcttccaactgggctacgggtgcggtgatgtcccaatacgacgatgacggcctgctgaggccctgcgcatattac

SEQ ID NO: 4015 - DNA, 96 bp, Aspergillus thermomutatus
  misc_feature: 256
ctactatgcttactctactatttcccttctttacttctcctaaactaactaacccttactcatctacttctcctctcccttctcttaaaccaaccc

SEQ ID NO: 4016 - DNA, 96 bp, Aspergillus thermomutatus
  misc_feature: 256
gctctgccgatggtcacgtgtcatggtacttctgctgcgtctttcccttaggctctcatagcggtcagtccttgtctgatcgactggttgtcattg

SEQ ID NO: 4017 - DNA, 96 bp, Aspergillus thermomutatus
  misc_feature: 256
gcccccatggggcccgttgtacagcatgtcgcgcgaagaactgcttgtactgcgtaagacgcttacagagctgctagagaagaacttcatacgtgt

SEQ ID NO: 4018 - DNA, 96 bp, Aspergillus thermomutatus
  misc_feature: 256
gattcgcagtggaacgggttgagaatgagccgaagttagtggtcagacagataagcgcacaggggttcgctatacatactcaacaacgccggagag

SEQ ID NO: 4019 - DNA, 96 bp, Aspergillus thermomutatus
  misc_feature: 256
cctggggttcctctatgcctactcttggtctgccttactgcctctctccctgtcttacatggtgccttcctccctaccttatattatacattcttc

SEQ ID NO: 4020 - DNA, 96 bp, Aspergillus thermomutatus
  misc_feature: 256
cgagcattgaatgccattacgaagaaagaccgttacccccttccgctgatcaacgagacactagagcgcatcgcgaaggcaaagtggttcaccaag

SEQ ID NO: 4021 - DNA, 96 bp, Aspergillus thermomutatus
  misc_feature: 256
cgcgatgatagcgcggaacttctactggccggagctttctgcagatgctcgacgattcgttaagaattgcgataagtgtggggccaaccgtgtgtg

SEQ ID NO: 4022 - DNA, 96 bp, Aspergillus thermomutatus
  misc_feature: 256
ccgggtgcaatgcgaatcttgtggaatgcggcgatcacatcaagtttggtaaaccacttcgcctttgatatacgctccaaggtctcgttgattagg

SEQ ID NO: 4023 - DNA, 96 bp, Aspergillus thermomutatus
  misc_feature: 256
aggtgctaggtgcgttcgccataccgaaaggggtaactagccactcgtacagaccaaatcgggtgcgaaacgcagtcaaccattcgtcacccggtg

SEQ ID NO: 4024 - DNA, 96 bp, Aspergillus thermomutatus
  misc_feature: 256
aaggtgctaggtgcgttcgccataccgaaaggggtaactagccactcgtacagaccaaatcgggtgcgaaacgcagtcaaccattcgtcacccggt

SEQ ID NO: 4025 - DNA, 96 bp, Aspergillus thermomutatus
  misc_feature: 256
aattcggtgatcgaccccagggcgatgcgggggcagttcgtcggctttcttccgatcgaacgcccctaggaactcgtggtagtgcgctggtagctt

SEQ ID NO: 4026 - DNA, 96 bp, Aspergillus thermomutatus
  misc_feature: 256
aaggagacagggaaggacaaggcaacagaaaaggacaaggtgacaggaaagaacaaaatgacaggaggagcaaggtagagaggtagaggttaattt

SEQ ID NO: 4027 - DNA, 96 bp, Aspergillus thermomutatus
  misc_feature: 255
cgcggaggcgaattcatccaggaagtctcgaagggcccagttgatataccgttggaaggtactcggtgcgttcgccatgccaaaaggggtcaccaa

SEQ ID NO: 4028 - DNA, 96 bp, Aspergillus thermomutatus
  misc_feature: 255
taagagtgctagatacaatggtaatgagtgtccttatatagcccttcgaacatatcactgatatgtctgtaacagatcactgatctgttcacaaca

SEQ ID NO: 4029 - DNA, 96 bp, Aspergillus thermomutatus
  misc_feature: 255
tgaattgcttgtcttacgaaagatgttgacagagctgctggagaagaactttatccgcattagtagctcttccgccgcggctccggtgctgttcgc

SEQ ID NO: 4030 - DNA, 96 bp, Aspergillus thermomutatus
  misc_feature: 255
tcgtatcgcaccgggtgacgaatggttgactgcgtttcgcacccgatttggtctgtacgagtggctagttacccctttcggtatggcgaacgcacc

SEQ ID NO: 4031 - DNA, 96 bp, Aspergillus thermomutatus
  misc_feature: 255
tatatatgtttagtttagatatatggtcagcagaaattaatctagataatactcttaatatgactagtggtgatggaggaaattcttattttggag

SEQ ID NO: 4032 - DNA, 96 bp, Aspergillus thermomutatus
  misc_feature: 255
tactatgcttactctactatttcccttctttacttctcctaaactaactaacccttactcatctacttctcctctcccttctcttaaaccaacccc

SEQ ID NO: 4033 - DNA, 96 bp, Aspergillus thermomutatus
  misc_feature: 255
gtacatcgacgatgtacttatcttcactgatgggtcgctggcgaagcaccgtagccacgtacggcaggtgctagagcggttacaggccgctgggtt

SEQ ID NO: 4034 - DNA, 96 bp, Aspergillus thermomutatus
  misc_feature: 255
agttcgcaaagccgagaaacgatcgtacgcctcgagtggatgtaggggtctgccattctagtatagcttttaccttgtcggggtccatgcgtacgc

SEQ ID NO: 4035 - DNA, 96 bp, Aspergillus thermomutatus
  misc_feature: 255
ctctgccgatggtcacgtgtcatggtacttctgctgcgtctttcccttaggctctcatagcggtcagtccttgtctgatcgactggttgtcattgc

SEQ ID NO: 4036 - DNA, 96 bp, Aspergillus thermomutatus
  misc_feature: 255
ctttctcaatatccttgatgctggctgcgaagatctgcactgctttacctctccggcgttgttgagtatgtatagcgaacccctgtgcgcttatct

SEQ ID NO: 4037 - DNA, 96 bp, Aspergillus thermomutatus
  misc_feature: 255
aagttcgcaaagccgagaaacgatcgtacgcctcgagtggatgtaggggtctgccattctagtatagcttttaccttgtcggggtccatgcgtacg

SEQ ID NO: 4038 - DNA, 96 bp, Aspergillus thermomutatus
  misc_feature: 255
ccctgatcgagacacggtcgtggagacggatgcttccaactgggctacgggtgcggtgatgtcccaatacgacgatgacggcctgctgaggccctg

SEQ ID NO: 4039 - DNA, 96 bp, Aspergillus thermomutatus
  misc_feature: 255
cagtgaaaaccaatatatcatcaacgtacgcagatgcaaattcatccagaaagtctcttagtgtccagttgatgtaccgttggaaggtgctaggtg

SEQ ID NO: 4040 - DNA, 96 bp, Aspergillus thermomutatus
  misc_feature: 255
cagattcttatggtcagtgacgatatcaaacttcggtaggctgatcagctccgattcccattctttaagtgcgttgatgatagcgagcagctcctt

SEQ ID NO: 4041 - DNA, 96 bp, Aspergillus thermomutatus
  misc_feature: 254
tcggcgctttatacggaacttctctgacatagtacgaccgttgacggcgcttacacagaaaggaaccccattcacatggacggaggagcacaccaa

SEQ ID NO: 4042 - DNA, 96 bp, Aspergillus thermomutatus
  misc_feature: 254
ttcgtatcgcaccgggtgacgaatggttgactgcgtttcgcacccgatttggtctgtacgagtggctagttacccctttcggtatggcgaacgcac

SEQ ID NO: 4043 - DNA, 96 bp, Aspergillus thermomutatus
  misc_feature: 254
ttcgcagtggaacgggttgagaatgagccgaagttagtggtcagacagataagcgcacaggggttcgctatacatactcaacaacgccggagaggt

SEQ ID NO: 4044 - DNA, 96 bp, Aspergillus thermomutatus
  misc_feature: 254
cgcagtggaacgggttgagaatgagccgaagttagtggtcagacagataagcgcacaggggttcgctatacatactcaacaacgccggagaggtaa

SEQ ID NO: 4045 - DNA, 96 bp, Aspergillus thermomutatus
  misc_feature: 254
acggatgcttccaactgggctacgggtgcggtgatgtcccaatacgacgatgacggcctgctgaggccctgcgcatattactcccggaaaaacaca

SEQ ID NO: 4046 - DNA, 96 bp, Aspergillus thermomutatus
  misc_feature: 254
atcggcgctttatacggaacttctctgacatagtacgaccgttgacggcgcttacacagaaaggaaccccattcacatggacggaggagcacacca

SEQ ID NO: 4047 - DNA, 96 bp, Aspergillus thermomutatus
  misc_feature: 254
attcgtatcgcaccgggtgacgaatggttgactgcgtttcgcacccgatttggtctgtacgagtggctagttacccctttcggtatggcgaacgca

SEQ ID NO: 4048 - DNA, 96 bp, Aspergillus thermomutatus
  misc_feature: 254
gctgctctgccgatggtcacgtgtcatggtacttctgctgcgtctttcccttaggctctcatagcggtcagtccttgtctgatcgactggttgtca

SEQ ID NO: 4049 - DNA, 96 bp, Aspergillus thermomutatus
  misc_feature: 254
catctccgggtgcaatgcgaatcttgtggaatgcggcgatcacatcaagtttggtaaaccacttcgcctttgatatacgctccaaggtctcgttga

SEQ ID NO: 4050 - DNA, 96 bp, Aspergillus thermomutatus
  misc_feature: 254
tacgaccgttgacggcgcttacacagaaaggaaccccattcacatggacggaggagcacaccaatcggttcgagcagctaaagaagatgtttacta

SEQ ID NO: 4051 - DNA, 96 bp, Aspergillus thermomutatus
  misc_feature: 254
gttcgcaaagccgagaaacgatcgtacgcctcgagtggatgtaggggtctgccattctagtatagcttttaccttgtcggggtccatgcgtacgcc

SEQ ID NO: 4052 - DNA, 96 bp, Aspergillus thermomutatus
  misc_feature: 254
cggatgcttccaactgggctacgggtgcggtgatgtcccaatacgacgatgacggcctgctgaggccctgcgcatattactcccggaaaaacacac

SEQ ID NO: 4053 - DNA, 96 bp, Aspergillus thermomutatus
  misc_feature: 254
gtgtctcgttgatcagcggaagggggtaacggtctttcttcgtaatggcattcaatgctcggtaatcaacacagaaacgtagacctccaccaggtt

SEQ ID NO: 4054 - DNA, 96 bp, Aspergillus thermomutatus
  misc_feature: 254
gtgaattgcttgtcttacgaaagatgttgacagagctgctggagaagaactttatccgcattagtagctcttccgccgcggctccggtgctgttcg

SEQ ID NO: 4055 - DNA, 96 bp, Aspergillus thermomutatus
  misc_feature: 254
gtctcgttgatcagcggaagggggtaacggtctttcttcgtaatggcattcaatgctcggtaatcaacacagaaacgtagacctccaccaggtttg

SEQ ID NO: 4056 - DNA, 96 bp, Aspergillus thermomutatus
  misc_feature: 254
cttatcttcactgatgggtcgctggcgaagcaccgtagccacgtacggcaggtgctagagcggttacaggccgctgggttgcagctagacatcgac

SEQ ID NO: 4057 - DNA, 96 bp, Aspergillus thermomutatus
  misc_feature: 254
gaagttcgcaaagccgagaaacgatcgtacgcctcgagtggatgtaggggtctgccattctagtatagcttttaccttgtcggggtccatgcgtac

SEQ ID NO: 4058 - DNA, 96 bp, Aspergillus thermomutatus
  misc_feature: 254
agtacgaccgttgacggcgcttacacagaaaggaaccccattcacatggacggaggagcacaccaatcggttcgagcagctaaagaagatgtttac

SEQ ID NO: 4059 - DNA, 96 bp, Aspergillus thermomutatus
  misc_feature: 254
gatgtacgcggaggcgaattcatccaggaagtctcgaagggcccagttgatataccgttggaaggtactcggtgcgttcgccatgccaaaaggggt

SEQ ID NO: 4060 - DNA, 96 bp, Aspergillus thermomutatus
  misc_feature: 254
cgggttgagaatgagccgaagttagtggtcagacagataagcgcacaggggttcgctatacatactcaacaacgccggagaggtaaagcagtgcag

SEQ ID NO: 4061 - DNA, 96 bp, Aspergillus thermomutatus
  misc_feature: 254
ctcgttgatcagcggaagggggtaacggtctttcttcgtaatggcattcaatgctcggtaatcaacacagaaacgtagacctccaccaggtttgcg

SEQ ID NO: 4062 - DNA, 96 bp, Aspergillus thermomutatus
  misc_feature: 254
cctccggcgactgtgaggagatcatggtgattgccgataggttagggaagggtgtgatattagtgccctgtgagcgaactgatgccgagaccgtag

SEQ ID NO: 4063 - DNA, 96 bp, Aspergillus thermomutatus
  misc_feature: 254
cattgaatgccattacgaagaaagaccgttacccccttccgctgatcaacgagacactagagcgcatcgcgaaggcaaagtggttcaccaagctgg

SEQ ID NO: 4064 - DNA, 96 bp, Aspergillus thermomutatus
  misc_feature: 254
acacggtcgtggagacggatgcttccaactgggctacgggtgcggtgatgtcccaatacgacgatgacggcctgctgaggccctgcgcatattact

SEQ ID NO: 4065 - DNA, 96 bp, Aspergillus thermomutatus
  misc_feature: 253
ccgagcattgaatgccattacgaagaaagaccgttacccccttccgctgatcaacgagacactagagcgcatcgcgaaggcaaagtggttcaccaa

SEQ ID NO: 4066 - DNA, 96 bp, Aspergillus thermomutatus
  misc_feature: 253
ttatcttcactgatgggtcgctggcgaagcaccgtagccacgtacggcaggtgctagagcggttacaggccgctgggttgcagctagacatcgaca

SEQ ID NO: 4067 - DNA, 96 bp, Aspergillus thermomutatus
  misc_feature: 253
agacggatgcttccaactgggctacgggtgcggtgatgtcccaatacgacgatgacggcctgctgaggccctgcgcatattactcccggaaaaaca

SEQ ID NO: 4068 - DNA, 96 bp, Aspergillus thermomutatus
  misc_feature: 253
tgtgccgcggcagcccaatgctcttccaatggtagttggctagggtcgtcgggtgctaccctagcgagcatcagtcggctcaccactgagggtggg

SEQ ID NO: 4069 - DNA, 96 bp, Aspergillus thermomutatus
  misc_feature: 253
tgctctgccgatggtcacgtgtcatggtacttctgctgcgtctttcccttaggctctcatagcggtcagtccttgtctgatcgactggttgtcatt

SEQ ID NO: 4070 - DNA, 96 bp, Aspergillus thermomutatus
  misc_feature: 253
tgatcagcggaagggggtaacggtctttcttcgtaatggcattcaatgctcggtaatcaacacagaaacgtagacctccaccaggtttgcgcacga

SEQ ID NO: 4071 - DNA, 96 bp, Aspergillus thermomutatus
  misc_feature: 253
tctcgttgatcagcggaagggggtaacggtctttcttcgtaatggcattcaatgctcggtaatcaacacagaaacgtagacctccaccaggtttgc

SEQ ID NO: 4072 - DNA, 96 bp, Aspergillus thermomutatus
  misc_feature: 253
tcctggggttcctctatgcctactcttggtctgccttactgcctctctccctgtcttacatggtgccttcctccctaccttatattatacattctt

SEQ ID NO: 4073 - DNA, 96 bp, Aspergillus thermomutatus
  misc_feature: 253
aaacttctatcggcgctttatacggaacttctcagagatagtacgcccgcttacagccctcacgcacaaaggtacaccatttaaatggacgtatga

SEQ ID NO: 4074 - DNA, 96 bp, Aspergillus thermomutatus
  misc_feature: 253
tatcggcgctttatacggaacttctctgacatagtacgaccgttgacggcgcttacacagaaaggaaccccattcacatggacggaggagcacacc

SEQ ID NO: 4075 - DNA, 96 bp, Aspergillus thermomutatus
  misc_feature: 253
cctcactgcctacctcctggggttcctctatgcctactcttggtctgccttactgcctctctccctgtcttacatggtgccttcctccctacctta

SEQ ID NO: 4076 - DNA, 96 bp, Aspergillus thermomutatus
  misc_feature: 253
gcggaggcgaattcatccaggaagtctcgaagggcccagttgatataccgttggaaggtactcggtgcgttcgccatgccaaaaggggtcaccaac

SEQ ID NO: 4077 - DNA, 96 bp, Aspergillus thermomutatus
  misc_feature: 253
acgaccgttgacggcgcttacacagaaaggaaccccattcacatggacggaggagcacaccaatcggttcgagcagctaaagaagatgtttactac

SEQ ID NO: 4078 - DNA, 96 bp, Aspergillus thermomutatus
  misc_feature: 253
ggcggaagagctactaatgcggataaagttcttctccagcagctctgtcaacatctttcgtaagacaagcaattcaccgcgcgacatgctgtacag

SEQ ID NO: 4079 - DNA, 96 bp, Aspergillus thermomutatus
  misc_feature: 253
cgggtatcggtctttctttgtgatcgcgttcaacgcgcggtagtcgacacagaatcgtaaccctccacctggcttgcgggcgaacagcaccggagc

SEQ ID NO: 4080 - DNA, 96 bp, Aspergillus thermomutatus
  misc_feature: 253
gcaaacttctatcggcgctttatacggaacttctcagagatagtacgcccgcttacagccctcacgcacaaaggtacaccatttaaatggacgtat

SEQ ID NO: 4081 - DNA, 96 bp, Aspergillus thermomutatus
  misc_feature: 253
ctgtgccgcggcagcccaatgctcttccaatggtagttggctagggtcgtcgggtgctaccctagcgagcatcagtcggctcaccactgagggtgg

SEQ ID NO: 4082 - DNA, 96 bp, Aspergillus thermomutatus
  misc_feature: 253
ctcactgcctacctcctggggttcctctatgcctactcttggtctgccttactgcctctctccctgtcttacatggtgccttcctccctaccttat

SEQ ID NO: 4083 - DNA, 96 bp, Aspergillus thermomutatus
  misc_feature: 253
cgcgcgcgcgcgcgagcattaggcggcagcggtccggggcaggccagcaggcaggggggcgcgcgcgcggcggtgaccagttggccggggccctcg

SEQ ID NO: 4084 - DNA, 96 bp, Aspergillus thermomutatus
  misc_feature: 253
cctgtgccgcggcagcccaatgctcttccaatggtagttggctagggtcgtcgggtgctaccctagcgagcatcagtcggctcaccactgagggtg

SEQ ID NO: 4085 - DNA, 96 bp, Aspergillus thermomutatus
  misc_feature: 253
acgaaagatgttgacagagctgctggagaagaactttatccgcattagtagctcttccgccgcggctccggtgctgttcgcccgcaagccaggtgg

SEQ ID NO: 4086 - DNA, 96 bp, Aspergillus thermomutatus
  misc_feature: 253
ccaatacgacgatgacggcctgctgaggccctgcgcatattactcccggaaaaacacaccagccgaatgcaactacgagatccatgacaaggagct

SEQ ID NO: 4087 - DNA, 96 bp, Aspergillus thermomutatus
  misc_feature: 252
tttcccttctttacttctcctaaactaactaacccttactcatctacttctcctctcccttctcttaaaccaacccctacttatttactgcttcct

SEQ ID NO: 4088 - DNA, 96 bp, Aspergillus thermomutatus
  misc_feature: 252
ttcccttctttacttctcctaaactaactaacccttactcatctacttctcctctcccttctcttaaaccaacccctacttatttactgcttccta

SEQ ID NO: 4089 - DNA, 96 bp, Aspergillus thermomutatus
  misc_feature: 252
cggcggaagagctactaatgcggataaagttcttctccagcagctctgtcaacatctttcgtaagacaagcaattcaccgcgcgacatgctgtaca

SEQ ID NO: 4090 - DNA, 96 bp, Aspergillus thermomutatus
  misc_feature: 252
tgatcgaccccagggcgatgcgggggcagttcgtcggctttcttccgatcgaacgcccctaggaactcgtggtagtgcgctggtagcttatcggca

SEQ ID NO: 4091 - DNA, 96 bp, Aspergillus thermomutatus
  misc_feature: 252
acgggttgagaatgagccgaagttagtggtcagacagataagcgcacaggggttcgctatacatactcaacaacgccggagaggtaaagcagtgca

SEQ ID NO: 4092 - DNA, 96 bp, Aspergillus thermomutatus
  misc_feature: 252
ggattcgcagtggaacgggttgagaatgagccgaagttagtggtcagacagataagcgcacaggggttcgctatacatactcaacaacgccggaga

SEQ ID NO: 4093 - DNA, 96 bp, Aspergillus thermomutatus
  misc_feature: 252
tcccttctttacttctcctaaactaactaacccttactcatctacttctcctctcccttctcttaaaccaacccctacttatttactgcttcctac

SEQ ID NO: 4094 - DNA, 96 bp, Aspergillus thermomutatus
  misc_feature: 252
ctatatatgtttagtttagatatatggtcagcagaaattaatctagataatactcttaatatgactagtggtgatggaggaaattcttattttgga

SEQ ID NO: 4095 - DNA, 96 bp, Aspergillus thermomutatus
  misc_feature: 252
tacttatcttcactgatgggtcgctggcgaagcaccgtagccacgtacggcaggtgctagagcggttacaggccgctgggttgcagctagacatcg

SEQ ID NO: 4096 - DNA, 96 bp, Aspergillus thermomutatus
  misc_feature: 252
gagacggatgcttccaactgggctacgggtgcggtgatgtcccaatacgacgatgacggcctgctgaggccctgcgcatattactcccggaaaaac

SEQ ID NO: 4097 - DNA, 96 bp, Aspergillus thermomutatus
  misc_feature: 252
gtctataatgtgccttataccaccctccaacggcgcctgaaggggcatacttttcgagctgaagcacgcgcaaatagtcataaaatgactcaaagt

SEQ ID NO: 4098 - DNA, 96 bp, Aspergillus thermomutatus
  misc_feature: 252
ggtatcggtctttctttgtgatcgcgttcaacgcgcggtagtcgacacagaatcgtaaccctccacctggcttgcgggcgaacagcaccggagccg

SEQ ID NO: 4099 - DNA, 96 bp, Aspergillus thermomutatus
  misc_feature: 252
ggagacagggaaggacaaggcaacagaaaaggacaaggtgacaggaaagaacaaaatgacaggaggagcaaggtagagaggtagaggttaattttt

SEQ ID NO: 4100 - DNA, 96 bp, Aspergillus thermomutatus
  misc_feature: 252
cgataaatggcagggacgctacgagcacgggggtaagtccgttcttcctggaccacggatacaacctggagcctctagaggttgaggggctagagc

SEQ ID NO: 4101 - DNA, 96 bp, Aspergillus thermomutatus
  misc_feature: 252
cgctgctctgccgatggtcacgtgtcatggtacttctgctgcgtctttcccttaggctctcatagcggtcagtccttgtctgatcgactggttgtc

SEQ ID NO: 4102 - DNA, 96 bp, Aspergillus thermomutatus
  misc_feature: 252
ctcctggggttcctctatgcctactcttggtctgccttactgcctctctccctgtcttacatggtgccttcctccctaccttatattatacattct

SEQ ID NO: 4103 - DNA, 96 bp, Aspergillus thermomutatus
  misc_feature: 252
aacttctatcggcgctttatacggaacttctcagagatagtacgcccgcttacagccctcacgcacaaaggtacaccatttaaatggacgtatgag

SEQ ID NO: 4104 - DNA, 96 bp, Aspergillus thermomutatus
  misc_feature: 252
caaacttctatcggcgctttatacggaacttctcagagatagtacgcccgcttacagccctcacgcacaaaggtacaccatttaaatggacgtatg

SEQ ID NO: 4105 - DNA, 96 bp, Aspergillus thermomutatus
  misc_feature: 252
aggagacagggaaggacaaggcaacagaaaaggacaaggtgacaggaaagaacaaaatgacaggaggagcaaggtagagaggtagaggttaatttt

SEQ ID NO: 4106 - DNA, 96 bp, Aspergillus thermomutatus
  misc_feature: 251
cgtcaggcatatcttgttctcttcgcgatagtgcgtcaggtctcgcagctaatttaccaggccgatagactagctggtagttgaaccgactgagca

SEQ ID NO: 4107 - DNA, 96 bp, Aspergillus thermomutatus
  misc_feature: 251
tgcctacctcctggggttcctctatgcctactcttggtctgccttactgcctctctccctgtcttacatggtgccttcctccctaccttatattat

SEQ ID NO: 4108 - DNA, 96 bp, Aspergillus thermomutatus
  misc_feature: 251
acttatcttcactgatgggtcgctggcgaagcaccgtagccacgtacggcaggtgctagagcggttacaggccgctgggttgcagctagacatcga

SEQ ID NO: 4109 - DNA, 96 bp, Aspergillus thermomutatus
  misc_feature: 251
gtcccaatacgacgatgacggcctgctgaggccctgcgcatattactcccggaaaaacacaccagccgaatgcaactacgagatccatgacaagga

SEQ ID NO: 4110 - DNA, 96 bp, Aspergillus thermomutatus
  misc_feature: 251
gacggatgcttccaactgggctacgggtgcggtgatgtcccaatacgacgatgacggcctgctgaggccctgcgcatattactcccggaaaaacac

SEQ ID NO: 4111 - DNA, 96 bp, Aspergillus thermomutatus
  misc_feature: 251
ggggcagttcgtcggctttcttccgatcgaacgcccctaggaactcgtggtagtgcgctggtagcttatcggcagggtctgtatgtgtctttacct

SEQ ID NO: 4112 - DNA, 96 bp, Aspergillus thermomutatus
  misc_feature: 251
ccttctttacttctcctaaactaactaacccttactcatctacttctcctctcccttctcttaaaccaacccctacttatttactgcttcctactc

SEQ ID NO: 4113 - DNA, 96 bp, Aspergillus thermomutatus
  misc_feature: 251
cagttgtaggcggtcatcgtcatcgtcaggcatatcttgttctcttcgcgatagtgcgtcaggtctcgcagctaatttaccaggccgatagactag

SEQ ID NO: 4114 - DNA, 96 bp, Aspergillus thermomutatus
  misc_feature: 251
cgttcgccataccgaaaggggtaactagccactcgtacagaccaaatcgggtgcgaaacgcagtcaaccattcgtcacccggtgcgatacgaatct

SEQ ID NO: 4115 - DNA, 96 bp, Aspergillus thermomutatus
  misc_feature: 251
cggcgctttatacggaacttctctgacatagtacgaccgttgacggcgcttacacagaaaggaaccccattcacatggacggaggagcacaccaat

SEQ ID NO: 4116 - DNA, 96 bp, Aspergillus thermomutatus
  misc_feature: 251
acaaggagacagggaaggacaaggcaacagaaaaggacaaggtgacaggaaagaacaaaatgacaggaggagcaaggtagagaggtagaggttaat

SEQ ID NO: 4117 - DNA, 96 bp, Aspergillus thermomutatus
  misc_feature: 250
gacaaggagacagggaaggacaaggcaacagaaaaggacaaggtgacaggaaagaacaaaatgacaggaggagcaaggtagagaggtagaggttaa

SEQ ID NO: 4118 - DNA, 96 bp, Aspergillus thermomutatus
  misc_feature: 250
tgttgacagagctgctggagaagaactttatccgcattagtagctcttccgccgcggctccggtgctgttcgcccgcaagccaggtggagggttac

SEQ ID NO: 4119 - DNA, 96 bp, Aspergillus thermomutatus
  misc_feature: 250
tagtacgaccgttgacggcgcttacacagaaaggaaccccattcacatggacggaggagcacaccaatcggttcgagcagctaaagaagatgttta

SEQ ID NO: 4120 - DNA, 96 bp, Aspergillus thermomutatus
  misc_feature: 250
ctccgggtgcaatgcgaatcttgtggaatgcggcgatcacatcaagtttggtaaaccacttcgcctttgatatacgctccaaggtctcgttgatta

SEQ ID NO: 4121 - DNA, 96 bp, Aspergillus thermomutatus
  misc_feature: 250
ctgcctacctcctggggttcctctatgcctactcttggtctgccttactgcctctctccctgtcttacatggtgccttcctccctaccttatatta

SEQ ID NO: 4122 - DNA, 96 bp, Aspergillus thermomutatus
  misc_feature: 250
gtcgcgcggtgaattgcttgtcttacgaaagatgttgacagagctgctggagaagaactttatccgcattagtagctcttccgccgcggctccggt

SEQ ID NO: 4123 - DNA, 96 bp, Aspergillus thermomutatus
  misc_feature: 250
gagatcatggtgattgccgataggttagggaagggtgtgatattagtgccctgtgagcgaactgatgccgagaccgtagcgcagctgctaatcgac

SEQ ID NO: 4124 - DNA, 96 bp, Aspergillus thermomutatus
  misc_feature: 250
atgcctcactgcctacctcctggggttcctctatgcctactcttggtctgccttactgcctctctccctgtcttacatggtgccttcctccctacc

SEQ ID NO: 4125 - DNA, 96 bp, Aspergillus thermomutatus
  misc_feature: 250
gatgcgggggcagttcgtcggctttcttccgatcgaacgcccctaggaactcgtggtagtgcgctggtagcttatcggcagggtctgtatgtgtct

SEQ ID NO: 4126 - DNA, 96 bp, Aspergillus thermomutatus
  misc_feature: 250
cgaagcatccgtctcgacgactgtctcccggtcatagtcaaactgcatgagaatcggcgcggtagtaaacatcttctttagctgctcgaaccgatt

SEQ ID NO: 4127 - DNA, 96 bp, Aspergillus thermomutatus
  misc_feature: 250
cccttctttacttctcctaaactaactaacccttactcatctacttctcctctcccttctcttaaaccaacccctacttatttactgcttcctact

SEQ ID NO: 4128 - DNA, 96 bp, Aspergillus thermomutatus
  misc_feature: 250
actcaacaacgccggagaggtaaagcagtgcagatcttcgcagccagcatcaaggatattgagaaagcactgcaggtaaagacacatacagaccct

SEQ ID NO: 4129 - DNA, 96 bp, Aspergillus thermomutatus
  misc_feature: 249
acgatatggtacatcatacgctgcggctgctgcgcggatgctcttaaattggccatttttaaatgcttgaattgcgagctgtattcggtcctctaa

SEQ ID NO: 4130 - DNA, 96 bp, Aspergillus thermomutatus
  misc_feature: 249
tgtctcgttgatcagcggaagggggtaacggtctttcttcgtaatggcattcaatgctcggtaatcaacacagaaacgtagacctccaccaggttt

SEQ ID NO: 4131 - DNA, 96 bp, Aspergillus thermomutatus
  misc_feature: 249
ggaggcgaattcatccaggaagtctcgaagggcccagttgatataccgttggaaggtactcggtgcgttcgccatgccaaaaggggtcaccaacca

SEQ ID NO: 4132 - DNA, 96 bp, Aspergillus thermomutatus
  misc_feature: 249
tggcttgggaaaggatcgttcgccgcaggacgcaacagactaacatggaacacattatgcacccctggtggagtatctagtcggtaagcatgtgat

SEQ ID NO: 4133 - DNA, 96 bp, Aspergillus thermomutatus
  misc_feature: 249
tcgcgcggtgaattgcttgtcttacgaaagatgttgacagagctgctggagaagaactttatccgcattagtagctcttccgccgcggctccggtg

SEQ ID NO: 4134 - DNA, 96 bp, Aspergillus thermomutatus
  misc_feature: 249
tcgcaaacttctatcggcgctttatacggaacttctcagagatagtacgcccgcttacagccctcacgcacaaaggtacaccatttaaatggacgt

SEQ ID NO: 4135 - DNA, 96 bp, Aspergillus thermomutatus
  misc_feature: 249
catcgtcaggcatatcttgttctcttcgcgatagtgcgtcaggtctcgcagctaatttaccaggccgatagactagctggtagttgaaccgactga

SEQ ID NO: 4136 - DNA, 96 bp, Aspergillus thermomutatus
  misc_feature: 249
cgcaaacttctatcggcgctttatacggaacttctcagagatagtacgcccgcttacagccctcacgcacaaaggtacaccatttaaatggacgta

SEQ ID NO: 4137 - DNA, 96 bp, Aspergillus thermomutatus
  misc_feature: 249
gtcctacgtgggaaccagctgtcaacctcgtcaatacggccgcgctggacgcttgggagcagcgagcgggccagaacacccccgacccgcgagggg

SEQ ID NO: 4138 - DNA, 96 bp, Aspergillus thermomutatus
  misc_feature: 249
ggtgcaatgcgaatcttgtggaatgcggcgatcacatcaagtttggtaaaccacttcgcctttgatatacgctccaaggtctcgttgattaggggc

SEQ ID NO: 4139 - DNA, 96 bp, Aspergillus thermomutatus
  misc_feature: 249
cacggtcgtggagacggatgcttccaactgggctacgggtgcggtgatgtcccaatacgacgatgacggcctgctgaggccctgcgcatattactc

SEQ ID NO: 4140 - DNA, 96 bp, Aspergillus thermomutatus
  misc_feature: 249
gaccccagggcgatgcgggggcagttcgtcggctttcttccgatcgaacgcccctaggaactcgtggtagtgcgctggtagcttatcggcagggtc

SEQ ID NO: 4141 - DNA, 96 bp, Aspergillus thermomutatus
  misc_feature: 249
gacagggaaggacaaggcaacagaaaaggacaaggtgacaggaaagaacaaaatgacaggaggagcaaggtagagaggtagaggttaatttttaat

SEQ ID NO: 4142 - DNA, 96 bp, Aspergillus thermomutatus
  misc_feature: 249
atcgtcaggcatatcttgttctcttcgcgatagtgcgtcaggtctcgcagctaatttaccaggccgatagactagctggtagttgaaccgactgag

SEQ ID NO: 4143 - DNA, 96 bp, Aspergillus thermomutatus
  misc_feature: 249
atcgaccccagggcgatgcgggggcagttcgtcggctttcttccgatcgaacgcccctaggaactcgtggtagtgcgctggtagcttatcggcagg

SEQ ID NO: 4144 - DNA, 96 bp, Aspergillus thermomutatus
  misc_feature: 248
ccataccgaaaggggtaactagccactcgtacagaccaaatcgggtgcgaaacgcagtcaaccattcgtcacccggtgcgatacgaatcttatgaa

SEQ ID NO: 4145 - DNA, 96 bp, Aspergillus thermomutatus
  misc_feature: 248
agacagggaaggacaaggcaacagaaaaggacaaggtgacaggaaagaacaaaatgacaggaggagcaaggtagagaggtagaggttaatttttaa

SEQ ID NO: 4146 - DNA, 96 bp, Aspergillus thermomutatus
  misc_feature: 248
tgtcgcgcggtgaattgcttgtcttacgaaagatgttgacagagctgctggagaagaactttatccgcattagtagctcttccgccgcggctccgg

SEQ ID NO: 4147 - DNA, 96 bp, Aspergillus thermomutatus
  misc_feature: 248
tgcctcactgcctacctcctggggttcctctatgcctactcttggtctgccttactgcctctctccctgtcttacatggtgccttcctccctacct

SEQ ID NO: 4148 - DNA, 96 bp, Aspergillus thermomutatus
  misc_feature: 248
gccataccgaaaggggtaactagccactcgtacagaccaaatcgggtgcgaaacgcagtcaaccattcgtcacccggtgcgatacgaatcttatga

SEQ ID NO: 4149 - DNA, 96 bp, Aspergillus thermomutatus
  misc_feature: 248
gcagttgtaggcggtcatcgtcatcgtcaggcatatcttgttctcttcgcgatagtgcgtcaggtctcgcagctaatttaccaggccgatagacta

SEQ ID NO: 4150 - DNA, 96 bp, Aspergillus thermomutatus
  misc_feature: 248
gttgacagagctgctggagaagaactttatccgcattagtagctcttccgccgcggctccggtgctgttcgcccgcaagccaggtggagggttacg

SEQ ID NO: 4151 - DNA, 96 bp, Aspergillus thermomutatus
  misc_feature: 248
gttcgccataccgaaaggggtaactagccactcgtacagaccaaatcgggtgcgaaacgcagtcaaccattcgtcacccggtgcgatacgaatctt

SEQ ID NO: 4152 - DNA, 96 bp, Aspergillus thermomutatus
  misc_feature: 248
ggtataaaggcacccacagaggccccatgtaaggcagggttaaggcaggcagagaggtaaggagataggtagagagggacccaagtagcaggccat

SEQ ID NO: 4153 - DNA, 96 bp, Aspergillus thermomutatus
  misc_feature: 248
gggtatcggtctttctttgtgatcgcgttcaacgcgcggtagtcgacacagaatcgtaaccctccacctggcttgcgggcgaacagcaccggagcc

SEQ ID NO: 4154 - DNA, 96 bp, Aspergillus thermomutatus
  misc_feature: 248
acatacagaccctgccgataagctaccagcgcactaccacgagttcctaggggcgttcgatcggaagaaagccgacgaactgcccccgcatcgccc

SEQ ID NO: 4155 - DNA, 96 bp, Aspergillus thermomutatus
  misc_feature: 248
cacatacagaccctgccgataagctaccagcgcactaccacgagttcctaggggcgttcgatcggaagaaagccgacgaactgcccccgcatcgcc

SEQ ID NO: 4156 - DNA, 96 bp, Aspergillus thermomutatus
  misc_feature: 248
gcctcactgcctacctcctggggttcctctatgcctactcttggtctgccttactgcctctctccctgtcttacatggtgccttcctccctacctt

SEQ ID NO: 4157 - DNA, 96 bp, Aspergillus thermomutatus
  misc_feature: 248
gatcgaccccagggcgatgcgggggcagttcgtcggctttcttccgatcgaacgcccctaggaactcgtggtagtgcgctggtagcttatcggcag

SEQ ID NO: 4158 - DNA, 96 bp, Aspergillus thermomutatus
  misc_feature: 248
gaaaaccaatatatcatcaacgtacgcagatgcaaattcatccagaaagtctcttagtgtccagttgatgtaccgttggaaggtgctaggtgcgtt

SEQ ID NO: 4159 - DNA, 96 bp, Aspergillus thermomutatus
  misc_feature: 248
cttccaactgggctacgggtgcggtgatgtcccaatacgacgatgacggcctgctgaggccctgcgcatattactcccggaaaaacacaccagccg

SEQ ID NO: 4160 - DNA, 96 bp, Aspergillus thermomutatus
  misc_feature: 248
agtgtctcgttgatcagcggaagggggtaacggtctttcttcgtaatggcattcaatgctcggtaatcaacacagaaacgtagacctccaccaggt

SEQ ID NO: 4161 - DNA, 96 bp, Aspergillus thermomutatus
  misc_feature: 247
gaaccgctgcgtgtgctcatacgtccatttaaatggtgtacctttgtgcgtgagggctgtaagcgggcgtactatctctgagaagttccgtataaa

SEQ ID NO: 4162 - DNA, 96 bp, Aspergillus thermomutatus
  misc_feature: 247
gtggaacgggttgagaatgagccgaagttagtggtcagacagataagcgcacaggggttcgctatacatactcaacaacgccggagaggtaaagca

SEQ ID NO: 4163 - DNA, 96 bp, Aspergillus thermomutatus
  misc_feature: 247
tccctatactgctcatgctcttctggcaatgagatctgatccgtagaagttgccgctaactctcgcgatccttcagagcgatgtccctcatcctca

SEQ ID NO: 4164 - DNA, 96 bp, Aspergillus thermomutatus
  misc_feature: 247
ccgttgtacagcatgtcgcgcgaagaactgcttgtactgcgtaagacgcttacagagctgctagagaagaacttcatacgtgtcagcagctcgtca

SEQ ID NO: 4165 - DNA, 96 bp, Aspergillus thermomutatus
  misc_feature: 247
cgttcgccgcaggacgcaacagactaacatggaacacattatgcacccctggtggagtatctagtcggtaagcatgtgatccaatagcttccagta

SEQ ID NO: 4166 - DNA, 96 bp, Aspergillus thermomutatus
  misc_feature: 247
aaagaaaggacaaggagacagggaaggacaaggcaacagaaaaggacaaggtgacaggaaagaacaaaatgacaggaggagcaaggtagagaggta

SEQ ID NO: 4167 - DNA, 96 bp, Aspergillus thermomutatus
  misc_feature: 247
gagacagggaaggacaaggcaacagaaaaggacaaggtgacaggaaagaacaaaatgacaggaggagcaaggtagagaggtagaggttaattttta

SEQ ID NO: 4168 - DNA, 96 bp, Aspergillus thermomutatus
  misc_feature: 247
ggcgaattcatccaggaagtctcgaagggcccagttgatataccgttggaaggtactcggtgcgttcgccatgccaaaaggggtcaccaaccattc

SEQ ID NO: 4169 - DNA, 96 bp, Aspergillus thermomutatus
  misc_feature: 247
cctcctggggttcctctatgcctactcttggtctgccttactgcctctctccctgtcttacatggtgccttcctccctaccttatattatacattc

SEQ ID NO: 4170 - DNA, 96 bp, Aspergillus thermomutatus
  misc_feature: 247
aaaaccaatatatcatcaacgtacgcagatgcaaattcatccagaaagtctcttagtgtccagttgatgtaccgttggaaggtgctaggtgcgttc

SEQ ID NO: 4171 - DNA, 96 bp, Aspergillus thermomutatus
  misc_feature: 247
aaccgctgcgtgtgctcatacgtccatttaaatggtgtacctttgtgcgtgagggctgtaagcgggcgtactatctctgagaagttccgtataaag

SEQ ID NO: 4172 - DNA, 96 bp, Aspergillus thermomutatus
  misc_feature: 247
cgttgtacagcatgtcgcgcgaagaactgcttgtactgcgtaagacgcttacagagctgctagagaagaacttcatacgtgtcagcagctcgtcag

SEQ ID NO: 4173 - DNA, 96 bp, Aspergillus thermomutatus
  misc_feature: 247
aagaaaggacaaggagacagggaaggacaaggcaacagaaaaggacaaggtgacaggaaagaacaaaatgacaggaggagcaaggtagagaggtag

SEQ ID NO: 4174 - DNA, 96 bp, Aspergillus thermomutatus
  misc_feature: 247
atgtcgcgcggtgaattgcttgtcttacgaaagatgttgacagagctgctggagaagaactttatccgcattagtagctcttccgccgcggctccg

SEQ ID NO: 4175 - DNA, 96 bp, Aspergillus thermomutatus
  misc_feature: 247
cgccataccgaaaggggtaactagccactcgtacagaccaaatcgggtgcgaaacgcagtcaaccattcgtcacccggtgcgatacgaatcttatg

SEQ ID NO: 4176 - DNA, 96 bp, Aspergillus thermomutatus
  misc_feature: 247
aaaccaatatatcatcaacgtacgcagatgcaaattcatccagaaagtctcttagtgtccagttgatgtaccgttggaaggtgctaggtgcgttcg

SEQ ID NO: 4177 - DNA, 96 bp, Aspergillus thermomutatus
  misc_feature: 246
ctctgacatagtacgaccgttgacggcgcttacacagaaaggaaccccattcacatggacggaggagcacaccaatcggttcgagcagctaaagaa

SEQ ID NO: 4178 - DNA, 96 bp, Aspergillus thermomutatus
  misc_feature: 246
ttctcaatatccttgatgctggctgcgaagatctgcactgctttacctctccggcgttgttgagtatgtatagcgaacccctgtgcgcttatctgt

SEQ ID NO: 4179 - DNA, 96 bp, Aspergillus thermomutatus
  misc_feature: 246
ttcgccataccgaaaggggtaactagccactcgtacagaccaaatcgggtgcgaaacgcagtcaaccattcgtcacccggtgcgatacgaatctta

SEQ ID NO: 4180 - DNA, 96 bp, Aspergillus thermomutatus
  misc_feature: 246
tgatgtcccaatacgacgatgacggcctgctgaggccctgcgcatattactcccggaaaaacacaccagccgaatgcaactacgagatccatgaca

SEQ ID NO: 4181 - DNA, 96 bp, Aspergillus thermomutatus
  misc_feature: 246
tctcaatatccttgatgctggctgcgaagatctgcactgctttacctctccggcgttgttgagtatgtatagcgaacccctgtgcgcttatctgtc

SEQ ID NO: 4182 - DNA, 96 bp, Aspergillus thermomutatus
  misc_feature: 246
tcgaccccagggcgatgcgggggcagttcgtcggctttcttccgatcgaacgcccctaggaactcgtggtagtgcgctggtagcttatcggcaggg

SEQ ID NO: 4183 - DNA, 96 bp, Aspergillus thermomutatus
  misc_feature: 246
gtaattaaactagtccttacccttaaaagaaaggacaaggagacagggaaggacaaggcaacagaaaaggacaaggtgacaggaaagaacaaaatg

SEQ ID NO: 4184 - DNA, 96 bp, Aspergillus thermomutatus
  misc_feature: 246
ggcttgggaaaggatcgttcgccgcaggacgcaacagactaacatggaacacattatgcacccctggtggagtatctagtcggtaagcatgtgatc

SEQ ID NO: 4185 - DNA, 96 bp, Aspergillus thermomutatus
  misc_feature: 246
cgcgcggtgaattgcttgtcttacgaaagatgttgacagagctgctggagaagaactttatccgcattagtagctcttccgccgcggctccggtgc

SEQ ID NO: 4186 - DNA, 96 bp, Aspergillus thermomutatus
  misc_feature: 246
cccgttgtacagcatgtcgcgcgaagaactgcttgtactgcgtaagacgcttacagagctgctagagaagaacttcatacgtgtcagcagctcgtc

SEQ ID NO: 4187 - DNA, 96 bp, Aspergillus thermomutatus
  misc_feature: 246
cgctacgagcacgggggtaagtccgttcttcctggaccacggatacaacctggagcctctagaggttgaggggctagagcgaggggctaccgccat

SEQ ID NO: 4188 - DNA, 96 bp, Aspergillus thermomutatus
  misc_feature: 246
cgaccccagggcgatgcgggggcagttcgtcggctttcttccgatcgaacgcccctaggaactcgtggtagtgcgctggtagcttatcggcagggt

SEQ ID NO: 4189 - DNA, 96 bp, Aspergillus thermomutatus
  misc_feature: 246
caatacgacgatgacggcctgctgaggccctgcgcatattactcccggaaaaacacaccagccgaatgcaactacgagatccatgacaaggagctg

SEQ ID NO: 4190 - DNA, 96 bp, Aspergillus thermomutatus
  misc_feature: 246
acttaaagaatgggaatcggagctgatcagcctaccgaagtttgatatcgtcactgaccataagaatctggagtacttcacagttcgcaggcgact

SEQ ID NO: 4191 - DNA, 96 bp, Aspergillus thermomutatus
  misc_feature: 246
actatttcccttctttacttctcctaaactaactaacccttactcatctacttctcctctcccttctcttaaaccaacccctacttatttactgct

SEQ ID NO: 4192 - DNA, 96 bp, Aspergillus thermomutatus
  misc_feature: 245
tgtaattaaactagtccttacccttaaaagaaaggacaaggagacagggaaggacaaggcaacagaaaaggacaaggtgacaggaaagaacaaaat

SEQ ID NO: 4193 - DNA, 96 bp, Aspergillus thermomutatus
  misc_feature: 245
agaaaggacaaggagacagggaaggacaaggcaacagaaaaggacaaggtgacaggaaagaacaaaatgacaggaggagcaaggtagagaggtaga

SEQ ID NO: 4194 - DNA, 96 bp, Aspergillus thermomutatus
  misc_feature: 245
tatgcctcactgcctacctcctggggttcctctatgcctactcttggtctgccttactgcctctctccctgtcttacatggtgccttcctccctac

SEQ ID NO: 4195 - DNA, 96 bp, Aspergillus thermomutatus
  misc_feature: 245
tacgaatggttggtgaccccttttggcatggcgaacgcaccgagtaccttccaacggtatatcaactgggcccttcgagacttcctggatgaattc

SEQ ID NO: 4196 - DNA, 96 bp, Aspergillus thermomutatus
  misc_feature: 245
gttcgccgcaggacgcaacagactaacatggaacacattatgcacccctggtggagtatctagtcggtaagcatgtgatccaatagcttccagtac

SEQ ID NO: 4197 - DNA, 96 bp, Aspergillus thermomutatus
  misc_feature: 245
gtacgaatggttggtgaccccttttggcatggcgaacgcaccgagtaccttccaacggtatatcaactgggcccttcgagacttcctggatgaatt

SEQ ID NO: 4198 - DNA, 96 bp, Aspergillus thermomutatus
  misc_feature: 245
gcttgggaaaggatcgttcgccgcaggacgcaacagactaacatggaacacattatgcacccctggtggagtatctagtcggtaagcatgtgatcc

SEQ ID NO: 4199 - DNA, 96 bp, Aspergillus thermomutatus
  misc_feature: 245
atttcccttctttacttctcctaaactaactaacccttactcatctacttctcctctcccttctcttaaaccaacccctacttatttactgcttcc

SEQ ID NO: 4200 - DNA, 96 bp, Aspergillus thermomutatus
  misc_feature: 245
cattacgaagatgaaggaggctacagagatggcgcagtcagagctggccgccgcgcagcaacgtcaggaggagtattcgaaccgctttcgcgcggc

SEQ ID NO: 4201 - DNA, 96 bp, Aspergillus thermomutatus
  misc_feature: 245
gccattcatctccgggtgcaatgcgaatcttgtggaatgcggcgatcacatcaagtttggtaaaccacttcgcctttgatatacgctccaaggtct

SEQ ID NO: 4202 - DNA, 96 bp, Aspergillus thermomutatus
  misc_feature: 245
gatcatcaacgcccttagggaatgggagtcggagttagtcagcctgccgcgatttaagctcatcacggaccaccgcaacctggaatacttcaagat

SEQ ID NO: 4203 - DNA, 96 bp, Aspergillus thermomutatus
  misc_feature: 245
acgaatggttggtgaccccttttggcatggcgaacgcaccgagtaccttccaacggtatatcaactgggcccttcgagacttcctggatgaattcg

SEQ ID NO: 4204 - DNA, 96 bp, Aspergillus thermomutatus
  misc_feature: 245
actccagattcttatggtcagtgacgatatcaaacttcggtaggctgatcagctccgattcccattctttaagtgcgttgatgatagcgagcagct

SEQ ID NO: 4205 - DNA, 96 bp, Aspergillus thermomutatus
  misc_feature: 245
actgcctacctcctggggttcctctatgcctactcttggtctgccttactgcctctctccctgtcttacatggtgccttcctccctaccttatatt

SEQ ID NO: 4206 - DNA, 96 bp, Aspergillus thermomutatus
  misc_feature: 244
atgtaattaaactagtccttacccttaaaagaaaggacaaggagacagggaaggacaaggcaacagaaaaggacaaggtgacaggaaagaacaaaa

SEQ ID NO: 4207 - DNA, 96 bp, Aspergillus thermomutatus
  misc_feature: 244
gatgtcccaatacgacgatgacggcctgctgaggccctgcgcatattactcccggaaaaacacaccagccgaatgcaactacgagatccatgacaa

SEQ ID NO: 4208 - DNA, 96 bp, Aspergillus thermomutatus
  misc_feature: 244
tgcggtgatgtcccaatacgacgatgacggcctgctgaggccctgcgcatattactcccggaaaaacacaccagccgaatgcaactacgagatcca

SEQ ID NO: 4209 - DNA, 96 bp, Aspergillus thermomutatus
  misc_feature: 244
attaccgagcattgaatgccattacgaagaaagaccgttacccccttccgctgatcaacgagacactagagcgcatcgcgaaggcaaagtggttca

SEQ ID NO: 4210 - DNA, 96 bp, Aspergillus thermomutatus
  misc_feature: 244
tatttcccttctttacttctcctaaactaactaacccttactcatctacttctcctctcccttctcttaaaccaacccctacttatttactgcttc

SEQ ID NO: 4211 - DNA, 96 bp, Aspergillus thermomutatus
  misc_feature: 244
gtcaacctcgtcaatacggccgcgctggacgcttgggagcagcgagcgggccagaacacccccgacccgcgaggggagggggagtagtgtagcggg

SEQ ID NO: 4212 - DNA, 96 bp, Aspergillus thermomutatus
  misc_feature: 244
gtactccagattcttatggtcagtgacgatatcaaacttcggtaggctgatcagctccgattcccattctttaagtgcgttgatgatagcgagcag

SEQ ID NO: 4213 - DNA, 96 bp, Aspergillus thermomutatus
  misc_feature: 244
ggcccgttgtacagcatgtcgcgcgaagaactgcttgtactgcgtaagacgcttacagagctgctagagaagaacttcatacgtgtcagcagctcg

SEQ ID NO: 4214 - DNA, 96 bp, Aspergillus thermomutatus
  misc_feature: 244
gcggtgatgtcccaatacgacgatgacggcctgctgaggccctgcgcatattactcccggaaaaacacaccagccgaatgcaactacgagatccat

SEQ ID NO: 4215 - DNA, 96 bp, Aspergillus thermomutatus
  misc_feature: 244
gcccgttgtacagcatgtcgcgcgaagaactgcttgtactgcgtaagacgcttacagagctgctagagaagaacttcatacgtgtcagcagctcgt

SEQ ID NO: 4216 - DNA, 96 bp, Aspergillus thermomutatus
  misc_feature: 244
gaggcgaattcatccaggaagtctcgaagggcccagttgatataccgttggaaggtactcggtgcgttcgccatgccaaaaggggtcaccaaccat

SEQ ID NO: 4217 - DNA, 96 bp, Aspergillus thermomutatus
  misc_feature: 244
ctatttcccttctttacttctcctaaactaactaacccttactcatctacttctcctctcccttctcttaaaccaacccctacttatttactgctt

SEQ ID NO: 4218 - DNA, 96 bp, Aspergillus thermomutatus
  misc_feature: 244
aggcgaattcatccaggaagtctcgaagggcccagttgatataccgttggaaggtactcggtgcgttcgccatgccaaaaggggtcaccaaccatt

SEQ ID NO: 4219 - DNA, 96 bp, Aspergillus thermomutatus
  misc_feature: 243
ttgatataccgttggaaggtactcggtgcgttcgccatgccaaaaggggtcaccaaccattcgtacagaccaaaccgcgtacggaaggccgtcagc

SEQ ID NO: 4220 - DNA, 96 bp, Aspergillus thermomutatus
  misc_feature: 243
tgtctataatgtgccttataccaccctccaacggcgcctgaaggggcatacttttcgagctgaagcacgcgcaaatagtcataaaatgactcaaag

SEQ ID NO: 4221 - DNA, 96 bp, Aspergillus thermomutatus
  misc_feature: 243
cttctatcggcgctttatacggaacttctcagagatagtacgcccgcttacagccctcacgcacaaaggtacaccatttaaatggacgtatgagca

SEQ ID NO: 4222 - DNA, 96 bp, Aspergillus thermomutatus
  misc_feature: 243
tgaaaaccaatatatcatcaacgtacgcagatgcaaattcatccagaaagtctcttagtgtccagttgatgtaccgttggaaggtgctaggtgcgt

SEQ ID NO: 4223 - DNA, 96 bp, Aspergillus thermomutatus
  misc_feature: 243
tcgccataccgaaaggggtaactagccactcgtacagaccaaatcgggtgcgaaacgcagtcaaccattcgtcacccggtgcgatacgaatcttat

SEQ ID NO: 4224 - DNA, 96 bp, Aspergillus thermomutatus
  misc_feature: 243
tagatacaatggtaatgagtgtccttatatagcccttcgaacatatcactgatatgtctgtaacagatcactgatctgttcacaacagatcactga

SEQ ID NO: 4225 - DNA, 96 bp, Aspergillus thermomutatus
  misc_feature: 243
gtgatcgcgttcaacgcgcggtagtcgacacagaatcgtaaccctccacctggcttgcgggcgaacagcaccggagccgcggcggaagagctacta

SEQ ID NO: 4226 - DNA, 96 bp, Aspergillus thermomutatus
  misc_feature: 243
ctatgcctcactgcctacctcctggggttcctctatgcctactcttggtctgccttactgcctctctccctgtcttacatggtgccttcctcccta

SEQ ID NO: 4227 - DNA, 96 bp, Aspergillus thermomutatus
  misc_feature: 243
gtgcggtgatgtcccaatacgacgatgacggcctgctgaggccctgcgcatattactcccggaaaaacacaccagccgaatgcaactacgagatcc

SEQ ID NO: 4228 - DNA, 96 bp, Aspergillus thermomutatus
  misc_feature: 243
gtgaaaaccaatatatcatcaacgtacgcagatgcaaattcatccagaaagtctcttagtgtccagttgatgtaccgttggaaggtgctaggtgcg

SEQ ID NO: 4229 - DNA, 96 bp, Aspergillus thermomutatus
  misc_feature: 243
cggaggcgaattcatccaggaagtctcgaagggcccagttgatataccgttggaaggtactcggtgcgttcgccatgccaaaaggggtcaccaacc

SEQ ID NO: 4230 - DNA, 96 bp, Aspergillus thermomutatus
  misc_feature: 243
ggtgctaggtgcgttcgccataccgaaaggggtaactagccactcgtacagaccaaatcgggtgcgaaacgcagtcaaccattcgtcacccggtgc

SEQ ID NO: 4231 - DNA, 96 bp, Aspergillus thermomutatus
  misc_feature: 243
acggtcgtggagacggatgcttccaactgggctacgggtgcggtgatgtcccaatacgacgatgacggcctgctgaggccctgcgcatattactcc

SEQ ID NO: 4232 - DNA, 96 bp, Aspergillus thermomutatus
  misc_feature: 243
cgaatggttggtgaccccttttggcatggcgaacgcaccgagtaccttccaacggtatatcaactgggcccttcgagacttcctggatgaattcgc

SEQ ID NO: 4233 - DNA, 96 bp, Aspergillus thermomutatus
  misc_feature: 243
gattaccgagcattgaatgccattacgaagaaagaccgttacccccttccgctgatcaacgagacactagagcgcatcgcgaaggcaaagtggttc

SEQ ID NO: 4234 - DNA, 96 bp, Aspergillus thermomutatus
  misc_feature: 243
agccattcatctccgggtgcaatgcgaatcttgtggaatgcggcgatcacatcaagtttggtaaaccacttcgcctttgatatacgctccaaggtc

SEQ ID NO: 4235 - DNA, 96 bp, Aspergillus thermomutatus
  misc_feature: 243
cattccgcaggcgaattctttttcgagaagtaggcacagggtcgtagcaccccgttatcatcatactgcgatagggttcctccagtagcccaattc

SEQ ID NO: 4236 - DNA, 96 bp, Aspergillus thermomutatus
  misc_feature: 243
gaaaggacaaggagacagggaaggacaaggcaacagaaaaggacaaggtgacaggaaagaacaaaatgacaggaggagcaaggtagagaggtagag

SEQ ID NO: 4237 - DNA, 96 bp, Aspergillus thermomutatus
  misc_feature: 243
atgtcccaatacgacgatgacggcctgctgaggccctgcgcatattactcccggaaaaacacaccagccgaatgcaactacgagatccatgacaag

SEQ ID NO: 4238 - DNA, 96 bp, Aspergillus thermomutatus
  misc_feature: 243
cgttgattaggggcagcgggtatcggtctttctttgtgatcgcgttcaacgcgcggtagtcgacacagaatcgtaaccctccacctggcttgcggg

SEQ ID NO: 4239 - DNA, 96 bp, Aspergillus thermomutatus
  misc_feature: 243
cggtgatgtcccaatacgacgatgacggcctgctgaggccctgcgcatattactcccggaaaaacacaccagccgaatgcaactacgagatccatg

SEQ ID NO: 4240 - DNA, 96 bp, Aspergillus thermomutatus
  misc_feature: 243
actatgcctcactgcctacctcctggggttcctctatgcctactcttggtctgccttactgcctctctccctgtcttacatggtgccttcctccct

SEQ ID NO: 4241 - DNA, 96 bp, Aspergillus thermomutatus
  misc_feature: 243
aaaagaaaggacaaggagacagggaaggacaaggcaacagaaaaggacaaggtgacaggaaagaacaaaatgacaggaggagcaaggtagagaggt

SEQ ID NO: 4242 - DNA, 96 bp, Aspergillus thermomutatus
  misc_feature: 242
gggagtatgcatggaccctgagaaggtaaaggctatattggaatggcagaccccgacctcagcgcgcggcgtgcggtcattcctaggcttcgcaaa

SEQ ID NO: 4243 - DNA, 96 bp, Aspergillus thermomutatus
  misc_feature: 242
tccaactgggctacgggtgcggtgatgtcccaatacgacgatgacggcctgctgaggccctgcgcatattactcccggaaaaacacaccagccgaa

SEQ ID NO: 4244 - DNA, 96 bp, Aspergillus thermomutatus
  misc_feature: 242
ttccaactgggctacgggtgcggtgatgtcccaatacgacgatgacggcctgctgaggccctgcgcatattactcccggaaaaacacaccagccga

SEQ ID NO: 4245 - DNA, 96 bp, Aspergillus thermomutatus
  misc_feature: 242
tggaacgggttgagaatgagccgaagttagtggtcagacagataagcgcacaggggttcgctatacatactcaacaacgccggagaggtaaagcag

SEQ ID NO: 4246 - DNA, 96 bp, Aspergillus thermomutatus
  misc_feature: 242
tgcttccaactgggctacgggtgcggtgatgtcccaatacgacgatgacggcctgctgaggccctgcgcatattactcccggaaaaacacaccagc

SEQ ID NO: 4247 - DNA, 96 bp, Aspergillus thermomutatus
  misc_feature: 242
ggtgatgtcccaatacgacgatgacggcctgctgaggccctgcgcatattactcccggaaaaacacaccagccgaatgcaactacgagatccatga

SEQ ID NO: 4248 - DNA, 96 bp, Aspergillus thermomutatus
  misc_feature: 242
gggaaggacaaggcaacagaaaaggacaaggtgacaggaaagaacaaaatgacaggaggagcaaggtagagaggtagaggttaatttttaatagta

SEQ ID NO: 4249 - DNA, 96 bp, Aspergillus thermomutatus
  misc_feature: 242
gtacttatcttcactgatgggtcgctggcgaagcaccgtagccacgtacggcaggtgctagagcggttacaggccgctgggttgcagctagacatc

SEQ ID NO: 4250 - DNA, 96 bp, Aspergillus thermomutatus
  misc_feature: 242
ggtcgtggagacggatgcttccaactgggctacgggtgcggtgatgtcccaatacgacgatgacggcctgctgaggccctgcgcatattactcccg

SEQ ID NO: 4251 - DNA, 96 bp, Aspergillus thermomutatus
  misc_feature: 242
acttctatcggcgctttatacggaacttctcagagatagtacgcccgcttacagccctcacgcacaaaggtacaccatttaaatggacgtatgagc

SEQ ID NO: 4252 - DNA, 96 bp, Aspergillus thermomutatus
  misc_feature: 242
cagggaaggacaaggcaacagaaaaggacaaggtgacaggaaagaacaaaatgacaggaggagcaaggtagagaggtagaggttaatttttaatag

SEQ ID NO: 4253 - DNA, 96 bp, Aspergillus thermomutatus
  misc_feature: 242
cgtcctacgtgggaaccagctgtcaacctcgtcaatacggccgcgctggacgcttgggagcagcgagcgggccagaacacccccgacccgcgaggg

SEQ ID NO: 4254 - DNA, 96 bp, Aspergillus thermomutatus
  misc_feature: 242
acctcctggggttcctctatgcctactcttggtctgccttactgcctctctccctgtcttacatggtgccttcctccctaccttatattatacatt

SEQ ID NO: 4255 - DNA, 96 bp, Aspergillus thermomutatus
  misc_feature: 241
ttgattaggggcagcgggtatcggtctttctttgtgatcgcgttcaacgcgcggtagtcgacacagaatcgtaaccctccacctggcttgcgggcg

SEQ ID NO: 4256 - DNA, 96 bp, Aspergillus thermomutatus
  misc_feature: 241
ttgacagagctgctggagaagaactttatccgcattagtagctcttccgccgcggctccggtgctgttcgcccgcaagccaggtggagggttacga

SEQ ID NO: 4257 - DNA, 96 bp, Aspergillus thermomutatus
  misc_feature: 241
gacaaggcaacagaaaaggacaaggtgacaggaaagaacaaaatgacaggaggagcaaggtagagaggtagaggttaatttttaatagtattagaa

SEQ ID NO: 4258 - DNA, 96 bp, Aspergillus thermomutatus
  misc_feature: 241
tgtcaacctcgtcaatacggccgcgctggacgcttgggagcagcgagcgggccagaacacccccgacccgcgaggggagggggagtagtgtagcgg

SEQ ID NO: 4259 - DNA, 96 bp, Aspergillus thermomutatus
  misc_feature: 241
aactgcccccgcatcgccctggggtcgatcaccgaattgagttgactaagggcgaagacgggaagccgttagaacccccatggggccctctgtaca

SEQ ID NO: 4260 - DNA, 96 bp, Aspergillus thermomutatus
  misc_feature: 241
tctttagctgctcgaaccgattggtgtgctcctccgtccatgtgaatggggttcctttctgtgtaagcgccgtcaacggtcgtactatgtcagaga

SEQ ID NO: 4261 - DNA, 96 bp, Aspergillus thermomutatus
  misc_feature: 241
tagtgtctcgttgatcagcggaagggggtaacggtctttcttcgtaatggcattcaatgctcggtaatcaacacagaaacgtagacctccaccagg

SEQ ID NO: 4262 - DNA, 96 bp, Aspergillus thermomutatus
  misc_feature: 241
cggtcgtggagacggatgcttccaactgggctacgggtgcggtgatgtcccaatacgacgatgacggcctgctgaggccctgcgcatattactccc

SEQ ID NO: 4263 - DNA, 96 bp, Aspergillus thermomutatus
  misc_feature: 241
gcttccaactgggctacgggtgcggtgatgtcccaatacgacgatgacggcctgctgaggccctgcgcatattactcccggaaaaacacaccagcc

SEQ ID NO: 4264 - DNA, 96 bp, Aspergillus thermomutatus
  misc_feature: 241
ctgcccccgcatcgccctggggtcgatcaccgaattgagttgactaagggcgaagacgggaagccgttagaacccccatggggccctctgtacagc

SEQ ID NO: 4265 - DNA, 96 bp, Aspergillus thermomutatus
  misc_feature: 241
gcgcggtgaattgcttgtcttacgaaagatgttgacagagctgctggagaagaactttatccgcattagtagctcttccgccgcggctccggtgct

SEQ ID NO: 4266 - DNA, 96 bp, Aspergillus thermomutatus
  misc_feature: 241
gaacagatcagtgatctgttgtgaacagatcagtgatctgttacagacatatcagtgatatgttcgaagggctatataaggacactcattaccatt

SEQ ID NO: 4267 - DNA, 96 bp, Aspergillus thermomutatus
  misc_feature: 241
actgcccccgcatcgccctggggtcgatcaccgaattgagttgactaagggcgaagacgggaagccgttagaacccccatggggccctctgtacag

SEQ ID NO: 4268 - DNA, 96 bp, Aspergillus thermomutatus
  misc_feature: 241
ctactatttcccttctttacttctcctaaactaactaacccttactcatctacttctcctctcccttctcttaaaccaacccctacttatttactg

SEQ ID NO: 4269 - DNA, 96 bp, Aspergillus thermomutatus
  misc_feature: 241
cccacagaggccccatgtaaggcagggttaaggcaggcagagaggtaaggagataggtagagagggacccaagtagcaggccataaggcaggccat

SEQ ID NO: 4270 - DNA, 96 bp, Aspergillus thermomutatus
  misc_feature: 241
agatacaatggtaatgagtgtccttatatagcccttcgaacatatcactgatatgtctgtaacagatcactgatctgttcacaacagatcactgat

SEQ ID NO: 4271 - DNA, 96 bp, Aspergillus thermomutatus
  misc_feature: 240
agggagtatgcatggaccctgagaaggtaaaggctatattggaatggcagaccccgacctcagcgcgcggcgtgcggtcattcctaggcttcgcaa

SEQ ID NO: 4272 - DNA, 96 bp, Aspergillus thermomutatus
  misc_feature: 240
tgtgctaggtacgccatggtagccgatgaatcggtcgattagcagctgcgctacggtctcggcatcagttcgctcacagggcactaatatcacacc

SEQ ID NO: 4273 - DNA, 96 bp, Aspergillus thermomutatus
  misc_feature: 240
tgattaggggcagcgggtatcggtctttctttgtgatcgcgttcaacgcgcggtagtcgacacagaatcgtaaccctccacctggcttgcgggcga

SEQ ID NO: 4274 - DNA, 96 bp, Aspergillus thermomutatus
  misc_feature: 240
tgacagagctgctggagaagaactttatccgcattagtagctcttccgccgcggctccggtgctgttcgcccgcaagccaggtggagggttacgat

SEQ ID NO: 4275 - DNA, 96 bp, Aspergillus thermomutatus
  misc_feature: 240
tcaacctcgtcaatacggccgcgctggacgcttgggagcagcgagcgggccagaacacccccgacccgcgaggggagggggagtagtgtagcgggc

SEQ ID NO: 4276 - DNA, 96 bp, Aspergillus thermomutatus
  misc_feature: 240
acagggaaggacaaggcaacagaaaaggacaaggtgacaggaaagaacaaaatgacaggaggagcaaggtagagaggtagaggttaatttttaata

SEQ ID NO: 4277 - DNA, 96 bp, Aspergillus thermomutatus
  misc_feature: 240
gttgattaggggcagcgggtatcggtctttctttgtgatcgcgttcaacgcgcggtagtcgacacagaatcgtaaccctccacctggcttgcgggc

SEQ ID NO: 4278 - DNA, 96 bp, Aspergillus thermomutatus
  misc_feature: 240
ggtgcggtgatgtcccaatacgacgatgacggcctgctgaggccctgcgcatattactcccggaaaaacacaccagccgaatgcaactacgagatc

SEQ ID NO: 4279 - DNA, 96 bp, Aspergillus thermomutatus
  misc_feature: 240
gatacaatggtaatgagtgtccttatatagcccttcgaacatatcactgatatgtctgtaacagatcactgatctgttcacaacagatcactgatc

SEQ ID NO: 4280 - DNA, 96 bp, Aspergillus thermomutatus
  misc_feature: 240
ccattcatctccgggtgcaatgcgaatcttgtggaatgcggcgatcacatcaagtttggtaaaccacttcgcctttgatatacgctccaaggtctc

SEQ ID NO: 4281 - DNA, 96 bp, Aspergillus thermomutatus
  misc_feature: 240
cttctaatccctactatgcttactctactatttcccttctttacttctcctaaactaactaacccttactcatctacttctcctctcccttctctt

SEQ ID NO: 4282 - DNA, 96 bp, Aspergillus thermomutatus
  misc_feature: 240
atgcttccaactgggctacgggtgcggtgatgtcccaatacgacgatgacggcctgctgaggccctgcgcatattactcccggaaaaacacaccag

SEQ ID NO: 4283 - DNA, 96 bp, Aspergillus thermomutatus
  misc_feature: 240
ctagtgtctcgttgatcagcggaagggggtaacggtctttcttcgtaatggcattcaatgctcggtaatcaacacagaaacgtagacctccaccag

SEQ ID NO: 4284 - DNA, 96 bp, Aspergillus thermomutatus
  misc_feature: 240
cattcatctccgggtgcaatgcgaatcttgtggaatgcggcgatcacatcaagtttggtaaaccacttcgcctttgatatacgctccaaggtctcg

SEQ ID NO: 4285 - DNA, 96 bp, Aspergillus thermomutatus
  misc_feature: 239
gatgcttccaactgggctacgggtgcggtgatgtcccaatacgacgatgacggcctgctgaggccctgcgcatattactcccggaaaaacacacca

SEQ ID NO: 4286 - DNA, 96 bp, Aspergillus thermomutatus
  misc_feature: 239
tcaaggatattgagaaagcactgcaggtaaagacacatacagaccctgccgataagctaccagcgcactaccacgagttcctaggggcgttcgatc

SEQ ID NO: 4287 - DNA, 96 bp, Aspergillus thermomutatus
  misc_feature: 239
tacgatatggtacatcatacgctgcggctgctgcgcggatgctcttaaattggccatttttaaatgcttgaattgcgagctgtattcggtcctcta

SEQ ID NO: 4288 - DNA, 96 bp, Aspergillus thermomutatus
  misc_feature: 239
tactatttcccttctttacttctcctaaactaactaacccttactcatctacttctcctctcccttctcttaaaccaacccctacttatttactgc

SEQ ID NO: 4289 - DNA, 96 bp, Aspergillus thermomutatus
  misc_feature: 239
gttgatataccgttggaaggtactcggtgcgttcgccatgccaaaaggggtcaccaaccattcgtacagaccaaaccgcgtacggaaggccgtcag

SEQ ID NO: 4290 - DNA, 96 bp, Aspergillus thermomutatus
  misc_feature: 239
gtgaagtactccagattcttatggtcagtgacgatatcaaacttcggtaggctgatcagctccgattcccattctttaagtgcgttgatgatagcg

SEQ ID NO: 4291 - DNA, 96 bp, Aspergillus thermomutatus
  misc_feature: 239
ggatgcttccaactgggctacgggtgcggtgatgtcccaatacgacgatgacggcctgctgaggccctgcgcatattactcccggaaaaacacacc

SEQ ID NO: 4292 - DNA, 96 bp, Aspergillus thermomutatus
  misc_feature: 239
ggaaggacaaggcaacagaaaaggacaaggtgacaggaaagaacaaaatgacaggaggagcaaggtagagaggtagaggttaatttttaatagtat

SEQ ID NO: 4293 - DNA, 96 bp, Aspergillus thermomutatus
  misc_feature: 239
gataaatggcagggacgctacgagcacgggggtaagtccgttcttcctggaccacggatacaacctggagcctctagaggttgaggggctagagcg

SEQ ID NO: 4294 - DNA, 96 bp, Aspergillus thermomutatus
  misc_feature: 239
ctgtcaacctcgtcaatacggccgcgctggacgcttgggagcagcgagcgggccagaacacccccgacccgcgaggggagggggagtagtgtagcg

SEQ ID NO: 4295 - DNA, 96 bp, Aspergillus thermomutatus
  misc_feature: 239
cgcggtgaattgcttgtcttacgaaagatgttgacagagctgctggagaagaactttatccgcattagtagctcttccgccgcggctccggtgctg

SEQ ID NO: 4296 - DNA, 96 bp, Aspergillus thermomutatus
  misc_feature: 239
aaaggacaaggagacagggaaggacaaggcaacagaaaaggacaaggtgacaggaaagaacaaaatgacaggaggagcaaggtagagaggtagagg

SEQ ID NO: 4297 - DNA, 96 bp, Aspergillus thermomutatus
  misc_feature: 238
tactccagattcttatggtcagtgacgatatcaaacttcggtaggctgatcagctccgattcccattctttaagtgcgttgatgatagcgagcagc

SEQ ID NO: 4298 - DNA, 96 bp, Aspergillus thermomutatus
  misc_feature: 238
gttacgatcgtcctacgtgggaaccagctgtcaacctcgtcaatacggccgcgctggacgcttgggagcagcgagcgggccagaacacccccgacc

SEQ ID NO: 4299 - DNA, 96 bp, Aspergillus thermomutatus
  misc_feature: 238
ggttacgatcgtcctacgtgggaaccagctgtcaacctcgtcaatacggccgcgctggacgcttgggagcagcgagcgggccagaacacccccgac

SEQ ID NO: 4300 - DNA, 96 bp, Aspergillus thermomutatus
  misc_feature: 238
gcggtgaattgcttgtcttacgaaagatgttgacagagctgctggagaagaactttatccgcattagtagctcttccgccgcggctccggtgctgt

SEQ ID NO: 4301 - DNA, 96 bp, Aspergillus thermomutatus
  misc_feature: 238
gcggtcattacgaagatgaaggaggctacagagatggcgcagtcagagctggccgccgcgcagcaacgtcaggaggagtattcgaaccgctttcgc

SEQ ID NO: 4302 - DNA, 96 bp, Aspergillus thermomutatus
  misc_feature: 238
cggtgaattgcttgtcttacgaaagatgttgacagagctgctggagaagaactttatccgcattagtagctcttccgccgcggctccggtgctgtt

SEQ ID NO: 4303 - DNA, 96 bp, Aspergillus thermomutatus
  misc_feature: 238
aacagatcagtgatctgttgtgaacagatcagtgatctgttacagacatatcagtgatatgttcgaagggctatataaggacactcattaccattg

SEQ ID NO: 4304 - DNA, 96 bp, Aspergillus thermomutatus
  misc_feature: 237
ttctatcggcgctttatacggaacttctcagagatagtacgcccgcttacagccctcacgcacaaaggtacaccatttaaatggacgtatgagcac

SEQ ID NO: 4305 - DNA, 96 bp, Aspergillus thermomutatus
  misc_feature: 237
ttctaatcctcccactaatcctccctcttttctttttctttccttcctctttcctctctctttccttcctctttccttcctccttacctccccttt

SEQ ID NO: 4306 - DNA, 96 bp, Aspergillus thermomutatus
  misc_feature: 237
ttctaatccctactatgcttactctactatttcccttctttacttctcctaaactaactaacccttactcatctacttctcctctcccttctctta

SEQ ID NO: 4307 - DNA, 96 bp, Aspergillus thermomutatus
  misc_feature: 237
ttcgcaaagccgagaaacgatcgtacgcctcgagtggatgtaggggtctgccattctagtatagcttttaccttgtcggggtccatgcgtacgccc

SEQ ID NO: 4308 - DNA, 96 bp, Aspergillus thermomutatus
  misc_feature: 237
acgctacgagcacgggggtaagtccgttcttcctggaccacggatacaacctggagcctctagaggttgaggggctagagcgaggggctaccgcca

SEQ ID NO: 4309 - DNA, 96 bp, Aspergillus thermomutatus
  misc_feature: 237
aggtataaaggcacccacagaggccccatgtaaggcagggttaaggcaggcagagaggtaaggagataggtagagagggacccaagtagcaggcca

SEQ ID NO: 4310 - DNA, 96 bp, Aspergillus thermomutatus
  misc_feature: 237
tgattaccgagcattgaatgccattacgaagaaagaccgttacccccttccgctgatcaacgagacactagagcgcatcgcgaaggcaaagtggtt

SEQ ID NO: 4311 - DNA, 96 bp, Aspergillus thermomutatus
  misc_feature: 237
tctactatttcccttctttacttctcctaaactaactaacccttactcatctacttctcctctcccttctcttaaaccaacccctacttatttact

SEQ ID NO: 4312 - DNA, 96 bp, Aspergillus thermomutatus
  misc_feature: 237
taggtataaaggcacccacagaggccccatgtaaggcagggttaaggcaggcagagaggtaaggagataggtagagagggacccaagtagcaggcc

SEQ ID NO: 4313 - DNA, 96 bp, Aspergillus thermomutatus
  misc_feature: 237
ggacaaggagacagggaaggacaaggcaacagaaaaggacaaggtgacaggaaagaacaaaatgacaggaggagcaaggtagagaggtagaggtta

SEQ ID NO: 4314 - DNA, 96 bp, Aspergillus thermomutatus
  misc_feature: 237
gttgattaccgagcattgaatgccattacgaagaaagaccgttacccccttccgctgatcaacgagacactagagcgcatcgcgaaggcaaagtgg

SEQ ID NO: 4315 - DNA, 96 bp, Aspergillus thermomutatus
  misc_feature: 237
ggtgaattgcttgtcttacgaaagatgttgacagagctgctggagaagaactttatccgcattagtagctcttccgccgcggctccggtgctgttc

SEQ ID NO: 4316 - DNA, 96 bp, Aspergillus thermomutatus
  misc_feature: 237
gcaaagccgagaaacgatcgtacgcctcgagtggatgtaggggtctgccattctagtatagcttttaccttgtcggggtccatgcgtacgcccttg

SEQ ID NO: 4317 - DNA, 96 bp, Aspergillus thermomutatus
  misc_feature: 237
caaggatattgagaaagcactgcaggtaaagacacatacagaccctgccgataagctaccagcgcactaccacgagttcctaggggcgttcgatcg

SEQ ID NO: 4318 - DNA, 96 bp, Aspergillus thermomutatus
  misc_feature: 237
agatggcgaatctattactatctcacaagggagagcctgaggctgttggcttgaactgggtttctcgctttatcaaacgacatgatgagatcatat

SEQ ID NO: 4319 - DNA, 96 bp, Aspergillus thermomutatus
  misc_feature: 236
tccctactatgcttactctactatttcccttctttacttctcctaaactaactaacccttactcatctacttctcctctcccttctcttaaaccaa

SEQ ID NO: 4320 - DNA, 96 bp, Aspergillus thermomutatus
  misc_feature: 236
tctatcggcgctttatacggaacttctcagagatagtacgcccgcttacagccctcacgcacaaaggtacaccatttaaatggacgtatgagcaca

SEQ ID NO: 4321 - DNA, 96 bp, Aspergillus thermomutatus
  misc_feature: 236
tctgatgagaacagatcagtgatctgttgtgaacagatcagtgatctgttacagacatatcagtgatatgttcgaagggctatataaggacactca

SEQ ID NO: 4322 - DNA, 96 bp, Aspergillus thermomutatus
  misc_feature: 236
ggacaaggcaacagaaaaggacaaggtgacaggaaagaacaaaatgacaggaggagcaaggtagagaggtagaggttaatttttaatagtattaga

SEQ ID NO: 4323 - DNA, 96 bp, Aspergillus thermomutatus
  misc_feature: 236
tcgttgattaggggcagcgggtatcggtctttctttgtgatcgcgttcaacgcgcggtagtcgacacagaatcgtaaccctccacctggcttgcgg

SEQ ID NO: 4324 - DNA, 96 bp, Aspergillus thermomutatus
  misc_feature: 236
ccctggggtcgatcaccgaattgagttgactaagggcgaagacgggaagccgttagaacccccatggggccctctgtacagcatgtcgcgcggtga

SEQ ID NO: 4325 - DNA, 96 bp, Aspergillus thermomutatus
  misc_feature: 236
tactatgcctcactgcctacctcctggggttcctctatgcctactcttggtctgccttactgcctctctccctgtcttacatggtgccttcctccc

SEQ ID NO: 4326 - DNA, 96 bp, Aspergillus thermomutatus
  misc_feature: 236
cagctgtcaacctcgtcaatacggccgcgctggacgcttgggagcagcgagcgggccagaacacccccgacccgcgaggggagggggagtagtgta

SEQ ID NO: 4327 - DNA, 96 bp, Aspergillus thermomutatus
  misc_feature: 236
cacttaaagaatgggaatcggagctgatcagcctaccgaagtttgatatcgtcactgaccataagaatctggagtacttcacagttcgcaggcgac

SEQ ID NO: 4328 - DNA, 96 bp, Aspergillus thermomutatus
  misc_feature: 236
atctgatgagaacagatcagtgatctgttgtgaacagatcagtgatctgttacagacatatcagtgatatgttcgaagggctatataaggacactc

SEQ ID NO: 4329 - DNA, 96 bp, Aspergillus thermomutatus
  misc_feature: 236
gactaacatggaacacattatgcacccctggtggagtatctagtcggtaagcatgtgatccaatagcttccagtactgtgaacttcgcgtgctggg

SEQ ID NO: 4330 - DNA, 96 bp, Aspergillus thermomutatus
  misc_feature: 235
ctttagctgctcgaaccgattggtgtgctcctccgtccatgtgaatggggttcctttctgtgtaagcgccgtcaacggtcgtactatgtcagagaa

SEQ ID NO: 4331 - DNA, 96 bp, Aspergillus thermomutatus
  misc_feature: 235
cctggggtcgatcaccgaattgagttgactaagggcgaagacgggaagccgttagaacccccatggggccctctgtacagcatgtcgcgcggtgaa

SEQ ID NO: 4332 - DNA, 96 bp, Aspergillus thermomutatus
  misc_feature: 235
ttaggtataaaggcacccacagaggccccatgtaaggcagggttaaggcaggcagagaggtaaggagataggtagagagggacccaagtagcaggc

SEQ ID NO: 4333 - DNA, 96 bp, Aspergillus thermomutatus
  misc_feature: 235
tctaatccctactatgcttactctactatttcccttctttacttctcctaaactaactaacccttactcatctacttctcctctcccttctcttaa

SEQ ID NO: 4334 - DNA, 96 bp, Aspergillus thermomutatus
  misc_feature: 235
tgtcccaatacgacgatgacggcctgctgaggccctgcgcatattactcccggaaaaacacaccagccgaatgcaactacgagatccatgacaagg

SEQ ID NO: 4335 - DNA, 96 bp, Aspergillus thermomutatus
  misc_feature: 235
gagaacagatcagtgatctgttgtgaacagatcagtgatctgttacagacatatcagtgatatgttcgaagggctatataaggacactcattacca

SEQ ID NO: 4336 - DNA, 96 bp, Aspergillus thermomutatus
  misc_feature: 235
acccacagaggccccatgtaaggcagggttaaggcaggcagagaggtaaggagataggtagagagggacccaagtagcaggccataaggcaggcca

SEQ ID NO: 4337 - DNA, 96 bp, Aspergillus thermomutatus
  misc_feature: 235
aaggcacccacagaggccccatgtaaggcagggttaaggcaggcagagaggtaaggagataggtagagagggacccaagtagcaggccataaggca

SEQ ID NO: 4338 - DNA, 96 bp, Aspergillus thermomutatus
  misc_feature: 235
tcgtcatcgtcaggcatatcttgttctcttcgcgatagtgcgtcaggtctcgcagctaatttaccaggccgatagactagctggtagttgaaccga

SEQ ID NO: 4339 - DNA, 96 bp, Aspergillus thermomutatus
  misc_feature: 235
tcgcaaagccgagaaacgatcgtacgcctcgagtggatgtaggggtctgccattctagtatagcttttaccttgtcggggtccatgcgtacgccct

SEQ ID NO: 4340 - DNA, 96 bp, Aspergillus thermomutatus
  misc_feature: 235
cacccacagaggccccatgtaaggcagggttaaggcaggcagagaggtaaggagataggtagagagggacccaagtagcaggccataaggcaggcc

SEQ ID NO: 4341 - DNA, 96 bp, Aspergillus thermomutatus
  misc_feature: 235
aagtactccagattcttatggtcagtgacgatatcaaacttcggtaggctgatcagctccgattcccattctttaagtgcgttgatgatagcgagc

SEQ ID NO: 4342 - DNA, 96 bp, Aspergillus thermomutatus
  misc_feature: 235
caagggagtatgcatggaccctgagaaggtaaaggctatattggaatggcagaccccgacctcagcgcgcggcgtgcggtcattcctaggcttcgc

SEQ ID NO: 4343 - DNA, 96 bp, Aspergillus thermomutatus
  misc_feature: 235
agtgaaaaccaatatatcatcaacgtacgcagatgcaaattcatccagaaagtctcttagtgtccagttgatgtaccgttggaaggtgctaggtgc

SEQ ID NO: 4344 - DNA, 96 bp, Aspergillus thermomutatus
  misc_feature: 235
ctggggtcgatcaccgaattgagttgactaagggcgaagacgggaagccgttagaacccccatggggccctctgtacagcatgtcgcgcggtgaat

SEQ ID NO: 4345 - DNA, 96 bp, Aspergillus thermomutatus
  misc_feature: 235
cgatatggtacatcatacgctgcggctgctgcgcggatgctcttaaattggccatttttaaatgcttgaattgcgagctgtattcggtcctctaat

SEQ ID NO: 4346 - DNA, 96 bp, Aspergillus thermomutatus
  misc_feature: 235
attccgcaggcgaattctttttcgagaagtaggcacagggtcgtagcaccccgttatcatcatactgcgatagggttcctccagtagcccaattcg

SEQ ID NO: 4347 - DNA, 96 bp, Aspergillus thermomutatus
  misc_feature: 235
aaggacaaggagacagggaaggacaaggcaacagaaaaggacaaggtgacaggaaagaacaaaatgacaggaggagcaaggtagagaggtagaggt

SEQ ID NO: 4348 - DNA, 96 bp, Aspergillus thermomutatus
  misc_feature: 234
ctaatccctactatgcttactctactatttcccttctttacttctcctaaactaactaacccttactcatctacttctcctctcccttctcttaaa

SEQ ID NO: 4349 - DNA, 96 bp, Aspergillus thermomutatus
  misc_feature: 234
tggggtcgatcaccgaattgagttgactaagggcgaagacgggaagccgttagaacccccatggggccctctgtacagcatgtcgcgcggtgaatt

SEQ ID NO: 4350 - DNA, 96 bp, Aspergillus thermomutatus
  misc_feature: 234
tagccgatgaatcggtcgattagcagctgcgctacggtctcggcatcagttcgctcacagggcactaatatcacacccttccctaacctatcggca

SEQ ID NO: 4351 - DNA, 96 bp, Aspergillus thermomutatus
  misc_feature: 234
tgaagtactccagattcttatggtcagtgacgatatcaaacttcggtaggctgatcagctccgattcccattctttaagtgcgttgatgatagcga

SEQ ID NO: 4352 - DNA, 96 bp, Aspergillus thermomutatus
  misc_feature: 234
tcgtcaatacggccgcgctggacgcttgggagcagcgagcgggccagaacacccccgacccgcgaggggagggggagtagtgtagcgggcaaggcc

SEQ ID NO: 4353 - DNA, 96 bp, Aspergillus thermomutatus
  misc_feature: 234
tcattacgaagatgaaggaggctacagagatggcgcagtcagagctggccgccgcgcagcaacgtcaggaggagtattcgaaccgctttcgcgcgg

SEQ ID NO: 4354 - DNA, 96 bp, Aspergillus thermomutatus
  misc_feature: 234
cgtgtgctcatacgtccatttaaatggtgtacctttgtgcgtgagggctgtaagcgggcgtactatctctgagaagttccgtataaagcgccgata

SEQ ID NO: 4355 - DNA, 96 bp, Aspergillus thermomutatus
  misc_feature: 234
aaggacaaggcaacagaaaaggacaaggtgacaggaaagaacaaaatgacaggaggagcaaggtagagaggtagaggttaatttttaatagtatta

SEQ ID NO: 4356 - DNA, 96 bp, Aspergillus thermomutatus
  misc_feature: 234
gttaggtataaaggcacccacagaggccccatgtaaggcagggttaaggcaggcagagaggtaaggagataggtagagagggacccaagtagcagg

SEQ ID NO: 4357 - DNA, 96 bp, Aspergillus thermomutatus
  misc_feature: 234
gtcattacgaagatgaaggaggctacagagatggcgcagtcagagctggccgccgcgcagcaacgtcaggaggagtattcgaaccgctttcgcgcg

SEQ ID NO: 4358 - DNA, 96 bp, Aspergillus thermomutatus
  misc_feature: 234
catcgtcatcgtcaggcatatcttgttctcttcgcgatagtgcgtcaggtctcgcagctaatttaccaggccgatagactagctggtagttgaacc

SEQ ID NO: 4359 - DNA, 96 bp, Aspergillus thermomutatus
  misc_feature: 234
gccacgcagggttaggtataaaggcacccacagaggccccatgtaaggcagggttaaggcaggcagagaggtaaggagataggtagagagggaccc

SEQ ID NO: 4360 - DNA, 96 bp, Aspergillus thermomutatus
  misc_feature: 234
ctactatgcctcactgcctacctcctggggttcctctatgcctactcttggtctgccttactgcctctctccctgtcttacatggtgccttcctcc

SEQ ID NO: 4361 - DNA, 96 bp, Aspergillus thermomutatus
  misc_feature: 234
gcgtgtgctcatacgtccatttaaatggtgtacctttgtgcgtgagggctgtaagcgggcgtactatctctgagaagttccgtataaagcgccgat

SEQ ID NO: 4362 - DNA, 96 bp, Aspergillus thermomutatus
  misc_feature: 234
gaagtactccagattcttatggtcagtgacgatatcaaacttcggtaggctgatcagctccgattcccattctttaagtgcgttgatgatagcgag

SEQ ID NO: 4363 - DNA, 96 bp, Aspergillus thermomutatus
  misc_feature: 234
gaaggacaaggcaacagaaaaggacaaggtgacaggaaagaacaaaatgacaggaggagcaaggtagagaggtagaggttaatttttaatagtatt

SEQ ID NO: 4364 - DNA, 96 bp, Aspergillus thermomutatus
  misc_feature: 234
aggacaaggcaacagaaaaggacaaggtgacaggaaagaacaaaatgacaggaggagcaaggtagagaggtagaggttaatttttaatagtattag

SEQ ID NO: 4365 - DNA, 96 bp, Aspergillus thermomutatus
  misc_feature: 234
cgcaaagccgagaaacgatcgtacgcctcgagtggatgtaggggtctgccattctagtatagcttttaccttgtcggggtccatgcgtacgccctt

SEQ ID NO: 4366 - DNA, 96 bp, Aspergillus thermomutatus
  misc_feature: 234
agcggtcattacgaagatgaaggaggctacagagatggcgcagtcagagctggccgccgcgcagcaacgtcaggaggagtattcgaaccgctttcg

SEQ ID NO: 4367 - DNA, 96 bp, Aspergillus thermomutatus
  misc_feature: 234
agggaaggacaaggcaacagaaaaggacaaggtgacaggaaagaacaaaatgacaggaggagcaaggtagagaggtagaggttaatttttaatagt

SEQ ID NO: 4368 - DNA, 96 bp, Aspergillus thermomutatus
  misc_feature: 233
aacctcgtcaatacggccgcgctggacgcttgggagcagcgagcgggccagaacacccccgacccgcgaggggagggggagtagtgtagcgggcaa

SEQ ID NO: 4369 - DNA, 96 bp, Aspergillus thermomutatus
  misc_feature: 233
ttgattaccgagcattgaatgccattacgaagaaagaccgttacccccttccgctgatcaacgagacactagagcgcatcgcgaaggcaaagtggt

SEQ ID NO: 4370 - DNA, 96 bp, Aspergillus thermomutatus
  misc_feature: 233
gggttaggtataaaggcacccacagaggccccatgtaaggcagggttaaggcaggcagagaggtaaggagataggtagagagggacccaagtagca

SEQ ID NO: 4371 - DNA, 96 bp, Aspergillus thermomutatus
  misc_feature: 233
gtgcaatgcgaatcttgtggaatgcggcgatcacatcaagtttggtaaaccacttcgcctttgatatacgctccaaggtctcgttgattaggggca

SEQ ID NO: 4372 - DNA, 96 bp, Aspergillus thermomutatus
  misc_feature: 233
ccctactatgcttactctactatttcccttctttacttctcctaaactaactaacccttactcatctacttctcctctcccttctcttaaaccaac

SEQ ID NO: 4373 - DNA, 96 bp, Aspergillus thermomutatus
  misc_feature: 233
cctactatgcttactctactatttcccttctttacttctcctaaactaactaacccttactcatctacttctcctctcccttctcttaaaccaacc

SEQ ID NO: 4374 - DNA, 96 bp, Aspergillus thermomutatus
  misc_feature: 233
agggttaggtataaaggcacccacagaggccccatgtaaggcagggttaaggcaggcagagaggtaaggagataggtagagagggacccaagtagc

SEQ ID NO: 4375 - DNA, 96 bp, Aspergillus thermomutatus
  misc_feature: 233
gacagagctgctggagaagaactttatccgcattagtagctcttccgccgcggctccggtgctgttcgcccgcaagccaggtggagggttacgatt

SEQ ID NO: 4376 - DNA, 96 bp, Aspergillus thermomutatus
  misc_feature: 233
ctgtgaagtactccagattcttatggtcagtgacgatatcaaacttcggtaggctgatcagctccgattcccattctttaagtgcgttgatgatag

SEQ ID NO: 4377 - DNA, 96 bp, Aspergillus thermomutatus
  misc_feature: 233
ctgatgagaacagatcagtgatctgttgtgaacagatcagtgatctgttacagacatatcagtgatatgttcgaagggctatataaggacactcat

SEQ ID NO: 4378 - DNA, 96 bp, Aspergillus thermomutatus
  misc_feature: 233
acagaggccccatgtaaggcagggttaaggcaggcagagaggtaaggagataggtagagagggacccaagtagcaggccataaggcaggccatgag

SEQ ID NO: 4379 - DNA, 96 bp, Aspergillus thermomutatus
  misc_feature: 233
cagggttaggtataaaggcacccacagaggccccatgtaaggcagggttaaggcaggcagagaggtaaggagataggtagagagggacccaagtag

SEQ ID NO: 4380 - DNA, 96 bp, Aspergillus thermomutatus
  misc_feature: 233
agctgtcaacctcgtcaatacggccgcgctggacgcttgggagcagcgagcgggccagaacacccccgacccgcgaggggagggggagtagtgtag

SEQ ID NO: 4381 - DNA, 96 bp, Aspergillus thermomutatus
  misc_feature: 233
cggtcattacgaagatgaaggaggctacagagatggcgcagtcagagctggccgccgcgcagcaacgtcaggaggagtattcgaaccgctttcgcg

SEQ ID NO: 4382 - DNA, 96 bp, Aspergillus thermomutatus
  misc_feature: 233
cctcgtcaatacggccgcgctggacgcttgggagcagcgagcgggccagaacacccccgacccgcgaggggagggggagtagtgtagcgggcaagg

SEQ ID NO: 4383 - DNA, 96 bp, Aspergillus thermomutatus
  misc_feature: 233
agaacagatcagtgatctgttgtgaacagatcagtgatctgttacagacatatcagtgatatgttcgaagggctatataaggacactcattaccat

SEQ ID NO: 4384 - DNA, 96 bp, Aspergillus thermomutatus
  misc_feature: 233
acatagtacgaccgttgacggcgcttacacagaaaggaaccccattcacatggacggaggagcacaccaatcggttcgagcagctaaagaagatgt

SEQ ID NO: 4385 - DNA, 96 bp, Aspergillus thermomutatus
  misc_feature: 232
agccgatgaatcggtcgattagcagctgcgctacggtctcggcatcagttcgctcacagggcactaatatcacacccttccctaacctatcggcaa

SEQ ID NO: 4386 - DNA, 96 bp, Aspergillus thermomutatus
  misc_feature: 232
agtactccagattcttatggtcagtgacgatatcaaacttcggtaggctgatcagctccgattcccattctttaagtgcgttgatgatagcgagca

SEQ ID NO: 4387 - DNA, 96 bp, Aspergillus thermomutatus
  misc_feature: 232
caacctcgtcaatacggccgcgctggacgcttgggagcagcgagcgggccagaacacccccgacccgcgaggggagggggagtagtgtagcgggca

SEQ ID NO: 4388 - DNA, 96 bp, Aspergillus thermomutatus
  misc_feature: 232
ctaacatggaacacattatgcacccctggtggagtatctagtcggtaagcatgtgatccaatagcttccagtactgtgaacttcgcgtgctgggca

SEQ ID NO: 4389 - DNA, 96 bp, Aspergillus thermomutatus
  misc_feature: 232
tgcaatgcgaatcttgtggaatgcggcgatcacatcaagtttggtaaaccacttcgcctttgatatacgctccaaggtctcgttgattaggggcag

SEQ ID NO: 4390 - DNA, 96 bp, Aspergillus thermomutatus
  misc_feature: 232
tcttttgttccagggcggcaaattcacgctgaagttccaggaatctggcctcagaatgctcggttcgctggttcgcttcgttgatggtcgattcgg

SEQ ID NO: 4391 - DNA, 96 bp, Aspergillus thermomutatus
  misc_feature: 232
gcagggttaggtataaaggcacccacagaggccccatgtaaggcagggttaaggcaggcagagaggtaaggagataggtagagagggacccaagta

SEQ ID NO: 4392 - DNA, 96 bp, Aspergillus thermomutatus
  misc_feature: 232
taatccctactatgcttactctactatttcccttctttacttctcctaaactaactaacccttactcatctacttctcctctcccttctcttaaac

SEQ ID NO: 4393 - DNA, 96 bp, Aspergillus thermomutatus
  misc_feature: 232
gtgtgctcatacgtccatttaaatggtgtacctttgtgcgtgagggctgtaagcgggcgtactatctctgagaagttccgtataaagcgccgatag

SEQ ID NO: 4394 - DNA, 96 bp, Aspergillus thermomutatus
  misc_feature: 232
ggggtcgatcaccgaattgagttgactaagggcgaagacgggaagccgttagaacccccatggggccctctgtacagcatgtcgcgcggtgaattg

SEQ ID NO: 4395 - DNA, 96 bp, Aspergillus thermomutatus
  misc_feature: 232
gggcccgttgtacagcatgtcgcgcgaagaactgcttgtactgcgtaagacgcttacagagctgctagagaagaacttcatacgtgtcagcagctc

SEQ ID NO: 4396 - DNA, 96 bp, Aspergillus thermomutatus
  misc_feature: 232
aacatggaacacattatgcacccctggtggagtatctagtcggtaagcatgtgatccaatagcttccagtactgtgaacttcgcgtgctgggcatc

SEQ ID NO: 4397 - DNA, 96 bp, Aspergillus thermomutatus
  misc_feature: 232
acagagctgctggagaagaactttatccgcattagtagctcttccgccgcggctccggtgctgttcgcccgcaagccaggtggagggttacgattc

SEQ ID NO: 4398 - DNA, 96 bp, Aspergillus thermomutatus
  misc_feature: 232
acctcgtcaatacggccgcgctggacgcttgggagcagcgagcgggccagaacacccccgacccgcgaggggagggggagtagtgtagcgggcaag

SEQ ID NO: 4399 - DNA, 96 bp, Aspergillus thermomutatus
  misc_feature: 232
atcgtcatcgtcaggcatatcttgttctcttcgcgatagtgcgtcaggtctcgcagctaatttaccaggccgatagactagctggtagttgaaccg

SEQ ID NO: 4400 - DNA, 96 bp, Aspergillus thermomutatus
  misc_feature: 232
cgcagggttaggtataaaggcacccacagaggccccatgtaaggcagggttaaggcaggcagagaggtaaggagataggtagagagggacccaagt

SEQ ID NO: 4401 - DNA, 96 bp, Aspergillus thermomutatus
  misc_feature: 232
catagtacgaccgttgacggcgcttacacagaaaggaaccccattcacatggacggaggagcacaccaatcggttcgagcagctaaagaagatgtt

SEQ ID NO: 4402 - DNA, 96 bp, Aspergillus thermomutatus
  misc_feature: 232
aggacaaggagacagggaaggacaaggcaacagaaaaggacaaggtgacaggaaagaacaaaatgacaggaggagcaaggtagagaggtagaggtt

SEQ ID NO: 4403 - DNA, 96 bp, Aspergillus thermomutatus
  misc_feature: 231
gatgtaattaaactagtccttacccttaaaagaaaggacaaggagacagggaaggacaaggcaacagaaaaggacaaggtgacaggaaagaacaaa

SEQ ID NO: 4404 - DNA, 96 bp, Aspergillus thermomutatus
  misc_feature: 231
tgtgaagtactccagattcttatggtcagtgacgatatcaaacttcggtaggctgatcagctccgattcccattctttaagtgcgttgatgatagc

SEQ ID NO: 4405 - DNA, 96 bp, Aspergillus thermomutatus
  misc_feature: 231
ccacgcagggttaggtataaaggcacccacagaggccccatgtaaggcagggttaaggcaggcagagaggtaaggagataggtagagagggaccca

SEQ ID NO: 4406 - DNA, 96 bp, Aspergillus thermomutatus
  misc_feature: 231
tgatgagaacagatcagtgatctgttgtgaacagatcagtgatctgttacagacatatcagtgatatgttcgaagggctatataaggacactcatt

SEQ ID NO: 4407 - DNA, 96 bp, Aspergillus thermomutatus
  misc_feature: 231
tctgacatagtacgaccgttgacggcgcttacacagaaaggaaccccattcacatggacggaggagcacaccaatcggttcgagcagctaaagaag

SEQ ID NO: 4408 - DNA, 96 bp, Aspergillus thermomutatus
  misc_feature: 231
tcgtcctacgtgggaaccagctgtcaacctcgtcaatacggccgcgctggacgcttgggagcagcgagcgggccagaacacccccgacccgcgagg

SEQ ID NO: 4409 - DNA, 96 bp, Aspergillus thermomutatus
  misc_feature: 231
cacagaggccccatgtaaggcagggttaaggcaggcagagaggtaaggagataggtagagagggacccaagtagcaggccataaggcaggccatga

SEQ ID NO: 4410 - DNA, 96 bp, Aspergillus thermomutatus
  misc_feature: 231
taacatggaacacattatgcacccctggtggagtatctagtcggtaagcatgtgatccaatagcttccagtactgtgaacttcgcgtgctgggcat

SEQ ID NO: 4411 - DNA, 96 bp, Aspergillus thermomutatus
  misc_feature: 231
cgtcatcgtcaggcatatcttgttctcttcgcgatagtgcgtcaggtctcgcagctaatttaccaggccgatagactagctggtagttgaaccgac

SEQ ID NO: 4412 - DNA, 96 bp, Aspergillus thermomutatus
  misc_feature: 231
ggttaggtataaaggcacccacagaggccccatgtaaggcagggttaaggcaggcagagaggtaaggagataggtagagagggacccaagtagcag

SEQ ID NO: 4413 - DNA, 96 bp, Aspergillus thermomutatus
  misc_feature: 231
gggggtaagtccgttcttcctggaccacggatacaacctggagcctctagaggttgaggggctagagcgaggggctaccgccattgatggggtccg

SEQ ID NO: 4414 - DNA, 96 bp, Aspergillus thermomutatus
  misc_feature: 231
ggggcccgttgtacagcatgtcgcgcgaagaactgcttgtactgcgtaagacgcttacagagctgctagagaagaacttcatacgtgtcagcagct

SEQ ID NO: 4415 - DNA, 96 bp, Aspergillus thermomutatus
  misc_feature: 231
ggcacccacagaggccccatgtaaggcagggttaaggcaggcagagaggtaaggagataggtagagagggacccaagtagcaggccataaggcagg

SEQ ID NO: 4416 - DNA, 96 bp, Aspergillus thermomutatus
  misc_feature: 231
aagatagagaggcaggcagacaggtaggtagaatggtagggagtaaggcaccgtataagcaccaaatcagatagagagatatagagagaggtatcc

SEQ ID NO: 4417 - DNA, 96 bp, Aspergillus thermomutatus
  misc_feature: 231
gcacccacagaggccccatgtaaggcagggttaaggcaggcagagaggtaaggagataggtagagagggacccaagtagcaggccataaggcaggc

SEQ ID NO: 4418 - DNA, 96 bp, Aspergillus thermomutatus
  misc_feature: 231
gacatagtacgaccgttgacggcgcttacacagaaaggaaccccattcacatggacggaggagcacaccaatcggttcgagcagctaaagaagatg

SEQ ID NO: 4419 - DNA, 96 bp, Aspergillus thermomutatus
  misc_feature: 231
acgcagggttaggtataaaggcacccacagaggccccatgtaaggcagggttaaggcaggcagagaggtaaggagataggtagagagggacccaag

SEQ ID NO: 4420 - DNA, 96 bp, Aspergillus thermomutatus
  misc_feature: 231
ctcgttgattaggggcagcgggtatcggtctttctttgtgatcgcgttcaacgcgcggtagtcgacacagaatcgtaaccctccacctggcttgcg

SEQ ID NO: 4421 - DNA, 96 bp, Aspergillus thermomutatus
  misc_feature: 231
atcgtcctacgtgggaaccagctgtcaacctcgtcaatacggccgcgctggacgcttgggagcagcgagcgggccagaacacccccgacccgcgag

SEQ ID NO: 4422 - DNA, 96 bp, Aspergillus thermomutatus
  misc_feature: 231
attctaatcctcccactaatcctccctcttttctttttctttccttcctctttcctctctctttccttcctctttccttcctccttacctcccctt

SEQ ID NO: 4423 - DNA, 96 bp, Aspergillus thermomutatus
  misc_feature: 231
atagtacgaccgttgacggcgcttacacagaaaggaaccccattcacatggacggaggagcacaccaatcggttcgagcagctaaagaagatgttt

SEQ ID NO: 4424 - DNA, 96 bp, Aspergillus thermomutatus
  misc_feature: 230
tttagctgctcgaaccgattggtgtgctcctccgtccatgtgaatggggttcctttctgtgtaagcgccgtcaacggtcgtactatgtcagagaag

SEQ ID NO: 4425 - DNA, 96 bp, Aspergillus thermomutatus
  misc_feature: 230
cacgcagggttaggtataaaggcacccacagaggccccatgtaaggcagggttaaggcaggcagagaggtaaggagataggtagagagggacccaa

SEQ ID NO: 4426 - DNA, 96 bp, Aspergillus thermomutatus
  misc_feature: 230
ttcttttgttccagggcggcaaattcacgctgaagttccaggaatctggcctcagaatgctcggttcgctggttcgcttcgttgatggtcgattcg

SEQ ID NO: 4427 - DNA, 96 bp, Aspergillus thermomutatus
  misc_feature: 230
ttctttacttctcctaaactaactaacccttactcatctacttctcctctcccttctcttaaaccaacccctacttatttactgcttcctactctc

SEQ ID NO: 4428 - DNA, 96 bp, Aspergillus thermomutatus
  misc_feature: 230
tctttacttctcctaaactaactaacccttactcatctacttctcctctcccttctcttaaaccaacccctacttatttactgcttcctactctct

SEQ ID NO: 4429 - DNA, 96 bp, Aspergillus thermomutatus
  misc_feature: 230
tcttctctctctttttcttctctctctttttcttctctctctttttcttctctctctctcttttccttttcttctttcttttcttatcctcttttt

SEQ ID NO: 4430 - DNA, 96 bp, Aspergillus thermomutatus
  misc_feature: 230
cagcaacggtttcagcaggccttgacgccgctcacgccacacacggttggccccacacttatcgcaattcttaacgaatcgtcgagcatctgcaga

SEQ ID NO: 4431 - DNA, 96 bp, Aspergillus thermomutatus
  misc_feature: 230
gatcgtcctacgtgggaaccagctgtcaacctcgtcaatacggccgcgctggacgcttgggagcagcgagcgggccagaacacccccgacccgcga

SEQ ID NO: 4432 - DNA, 96 bp, Aspergillus thermomutatus
  misc_feature: 230
aagatggcgaatctattactatctcacaagggagagcctgaggctgttggcttgaactgggtttctcgctttatcaaacgacatgatgagatcata

SEQ ID NO: 4433 - DNA, 96 bp, Aspergillus thermomutatus
  misc_feature: 230
gtctcgttgattaggggcagcgggtatcggtctttctttgtgatcgcgttcaacgcgcggtagtcgacacagaatcgtaaccctccacctggcttg

SEQ ID NO: 4434 - DNA, 96 bp, Aspergillus thermomutatus
  misc_feature: 230
aaagccgagaaacgatcgtacgcctcgagtggatgtaggggtctgccattctagtatagcttttaccttgtcggggtccatgcgtacgcccttgcc

SEQ ID NO: 4435 - DNA, 96 bp, Aspergillus thermomutatus
  misc_feature: 230
ctcgtcaatacggccgcgctggacgcttgggagcagcgagcgggccagaacacccccgacccgcgaggggagggggagtagtgtagcgggcaaggc

SEQ ID NO: 4436 - DNA, 96 bp, Aspergillus thermomutatus
  misc_feature: 230
gcactgtttccagaggaagtacccgagagttctgaggatgagggacatcgctctgaaggatcgcgagagttagcggcaacttctacggatcagatc

SEQ ID NO: 4437 - DNA, 96 bp, Aspergillus thermomutatus
  misc_feature: 230
caaagccgagaaacgatcgtacgcctcgagtggatgtaggggtctgccattctagtatagcttttaccttgtcggggtccatgcgtacgcccttgc

SEQ ID NO: 4438 - DNA, 96 bp, Aspergillus thermomutatus
  misc_feature: 230
gatctgatgagaacagatcagtgatctgttgtgaacagatcagtgatctgttacagacatatcagtgatatgttcgaagggctatataaggacact

SEQ ID NO: 4439 - DNA, 96 bp, Aspergillus thermomutatus
  misc_feature: 230
ctaatcctcccactaatcctccctcttttctttttctttccttcctctttcctctctctttccttcctctttccttcctccttacctcccctttat

SEQ ID NO: 4440 - DNA, 96 bp, Aspergillus thermomutatus
  misc_feature: 230
cgatcgtcctacgtgggaaccagctgtcaacctcgtcaatacggccgcgctggacgcttgggagcagcgagcgggccagaacacccccgacccgcg

SEQ ID NO: 4441 - DNA, 96 bp, Aspergillus thermomutatus
  misc_feature: 229
atccctactatgcttactctactatttcccttctttacttctcctaaactaactaacccttactcatctacttctcctctcccttctcttaaacca

SEQ ID NO: 4442 - DNA, 96 bp, Aspergillus thermomutatus
  misc_feature: 229
aagggagtatgcatggaccctgagaaggtaaaggctatattggaatggcagaccccgacctcagcgcgcggcgtgcggtcattcctaggcttcgca

SEQ ID NO: 4443 - DNA, 96 bp, Aspergillus thermomutatus
  misc_feature: 229
tctctctttttcttctctctctttttcttctctctctttttcttctctctctctcttttccttttcttctttcttttcttatcctcttttttaacc

SEQ ID NO: 4444 - DNA, 96 bp, Aspergillus thermomutatus
  misc_feature: 229
tctcgttgattaggggcagcgggtatcggtctttctttgtgatcgcgttcaacgcgcggtagtcgacacagaatcgtaaccctccacctggcttgc

SEQ ID NO: 4445 - DNA, 96 bp, Aspergillus thermomutatus
  misc_feature: 229
gtgttgattaccgagcattgaatgccattacgaagaaagaccgttacccccttccgctgatcaacgagacactagagcgcatcgcgaaggcaaagt

SEQ ID NO: 4446 - DNA, 96 bp, Aspergillus thermomutatus
  misc_feature: 229
gtcatcgtcaggcatatcttgttctcttcgcgatagtgcgtcaggtctcgcagctaatttaccaggccgatagactagctggtagttgaaccgact

SEQ ID NO: 4447 - DNA, 96 bp, Aspergillus thermomutatus
  misc_feature: 229
actaacatggaacacattatgcacccctggtggagtatctagtcggtaagcatgtgatccaatagcttccagtactgtgaacttcgcgtgctgggc

SEQ ID NO: 4448 - DNA, 96 bp, Aspergillus thermomutatus
  misc_feature: 229
gagctgctggagaagaactttatccgcattagtagctcttccgccgcggctccggtgctgttcgcccgcaagccaggtggagggttacgattctgt

SEQ ID NO: 4449 - DNA, 96 bp, Aspergillus thermomutatus
  misc_feature: 229
cttctttacttctcctaaactaactaacccttactcatctacttctcctctcccttctcttaaaccaacccctacttatttactgcttcctactct

SEQ ID NO: 4450 - DNA, 96 bp, Aspergillus thermomutatus
  misc_feature: 229
aggcacccacagaggccccatgtaaggcagggttaaggcaggcagagaggtaaggagataggtagagagggacccaagtagcaggccataaggcag

SEQ ID NO: 4451 - DNA, 96 bp, Aspergillus thermomutatus
  misc_feature: 228
ttctctctctttttcttctctctctttttcttctctctctttttcttctctctctctcttttccttttcttctttcttttcttatcctctttttta

SEQ ID NO: 4452 - DNA, 96 bp, Aspergillus thermomutatus
  misc_feature: 228
tctaatcctcccactaatcctccctcttttctttttctttccttcctctttcctctctctttccttcctctttccttcctccttacctccccttta

SEQ ID NO: 4453 - DNA, 96 bp, Aspergillus thermomutatus
  misc_feature: 228
tcatcgtcaggcatatcttgttctcttcgcgatagtgcgtcaggtctcgcagctaatttaccaggccgatagactagctggtagttgaaccgactg

SEQ ID NO: 4454 - DNA, 96 bp, Aspergillus thermomutatus
  misc_feature: 228
taaaagccacgcagggttaggtataaaggcacccacagaggccccatgtaaggcagggttaaggcaggcagagaggtaaggagataggtagagagg

SEQ ID NO: 4455 - DNA, 96 bp, Aspergillus thermomutatus
  misc_feature: 228
aagccacgcagggttaggtataaaggcacccacagaggccccatgtaaggcagggttaaggcaggcagagaggtaaggagataggtagagagggac

SEQ ID NO: 4456 - DNA, 96 bp, Aspergillus thermomutatus
  misc_feature: 228
aatccctactatgcttactctactatttcccttctttacttctcctaaactaactaacccttactcatctacttctcctctcccttctcttaaacc

SEQ ID NO: 4457 - DNA, 96 bp, Aspergillus thermomutatus
  misc_feature: 228
gcaagggagtatgcatggaccctgagaaggtaaaggctatattggaatggcagaccccgacctcagcgcgcggcgtgcggtcattcctaggcttcg

SEQ ID NO: 4458 - DNA, 96 bp, Aspergillus thermomutatus
  misc_feature: 228
cttctctctctttttcttctctctctttttcttctctctctttttcttctctctctctcttttccttttcttctttcttttcttatcctctttttt

SEQ ID NO: 4459 - DNA, 96 bp, Aspergillus thermomutatus
  misc_feature: 228
aaaagccacgcagggttaggtataaaggcacccacagaggccccatgtaaggcagggttaaggcaggcagagaggtaaggagataggtagagaggg

SEQ ID NO: 4460 - DNA, 96 bp, Aspergillus thermomutatus
  misc_feature: 228
ccacagaggccccatgtaaggcagggttaaggcaggcagagaggtaaggagataggtagagagggacccaagtagcaggccataaggcaggccatg

SEQ ID NO: 4461 - DNA, 96 bp, Aspergillus thermomutatus
  misc_feature: 227
ttcgccatcttccgtaccatatcctgggttggagggagaccacgctcatccatatcaagaatccacttcttaagagaagcttcttccaaaactgta

SEQ ID NO: 4462 - DNA, 96 bp, Aspergillus thermomutatus
  misc_feature: 227
tgttgattaccgagcattgaatgccattacgaagaaagaccgttacccccttccgctgatcaacgagacactagagcgcatcgcgaaggcaaagtg

SEQ ID NO: 4463 - DNA, 96 bp, Aspergillus thermomutatus
  misc_feature: 227
tggggcccgttgtacagcatgtcgcgcgaagaactgcttgtactgcgtaagacgcttacagagctgctagagaagaacttcatacgtgtcagcagc

SEQ ID NO: 4464 - DNA, 96 bp, Aspergillus thermomutatus
  misc_feature: 227
cacgagcctgtcgctgagaagcctgtagttgctccagtgggagcgcctgcgtcggctactaccccatcttccgaagccgccggactatcagaacga

SEQ ID NO: 4465 - DNA, 96 bp, Aspergillus thermomutatus
  misc_feature: 227
aaagccacgcagggttaggtataaaggcacccacagaggccccatgtaaggcagggttaaggcaggcagagaggtaaggagataggtagagaggga

SEQ ID NO: 4466 - DNA, 96 bp, Aspergillus thermomutatus
  misc_feature: 227
taatcctcccactaatcctccctcttttctttttctttccttcctctttcctctctctttccttcctctttccttcctccttacctcccctttatt

SEQ ID NO: 4467 - DNA, 96 bp, Aspergillus thermomutatus
  misc_feature: 227
acgagcctgtcgctgagaagcctgtagttgctccagtgggagcgcctgcgtcggctactaccccatcttccgaagccgccggactatcagaacgac

SEQ ID NO: 4468 - DNA, 96 bp, Aspergillus thermomutatus
  misc_feature: 227
agccacgcagggttaggtataaaggcacccacagaggccccatgtaaggcagggttaaggcaggcagagaggtaaggagataggtagagagggacc

SEQ ID NO: 4469 - DNA, 96 bp, Aspergillus thermomutatus
  misc_feature: 227
ctctctttttcttctctctctttttcttctctctctttttcttctctctctctcttttccttttcttctttcttttcttatcctcttttttaaccc

SEQ ID NO: 4470 - DNA, 96 bp, Aspergillus thermomutatus
  misc_feature: 227
cgggggtaagtccgttcttcctggaccacggatacaacctggagcctctagaggttgaggggctagagcgaggggctaccgccattgatggggtcc

SEQ ID NO: 4471 - DNA, 96 bp, Aspergillus thermomutatus
  misc_feature: 227
gccgatgaatcggtcgattagcagctgcgctacggtctcggcatcagttcgctcacagggcactaatatcacacccttccctaacctatcggcaat

SEQ ID NO: 4472 - DNA, 96 bp, Aspergillus thermomutatus
  misc_feature: 227
caacgcacttaaagaatgggaatcggagctgatcagcctaccgaagtttgatatcgtcactgaccataagaatctggagtacttcacagttcgcag

SEQ ID NO: 4473 - DNA, 96 bp, Aspergillus thermomutatus
  misc_feature: 227
acagatcagtgatctgttgtgaacagatcagtgatctgttacagacatatcagtgatatgttcgaagggctatataaggacactcattaccattgt

SEQ ID NO: 4474 - DNA, 96 bp, Aspergillus thermomutatus
  misc_feature: 226
tctgtgttgattaccgagcattgaatgccattacgaagaaagaccgttacccccttccgctgatcaacgagacactagagcgcatcgcgaaggcaa

SEQ ID NO: 4475 - DNA, 96 bp, Aspergillus thermomutatus
  misc_feature: 226
tctctctctttttcttctctctctttttcttctctctctttttcttctctctctctcttttccttttcttctttcttttcttatcctcttttttaa

SEQ ID NO: 4476 - DNA, 96 bp, Aspergillus thermomutatus
  misc_feature: 226
ctgtttccagaggaagtacccgagagttctgaggatgagggacatcgctctgaaggatcgcgagagttagcggcaacttctacggatcagatctca

SEQ ID NO: 4477 - DNA, 96 bp, Aspergillus thermomutatus
  misc_feature: 226
tcaggctcgccgcgcgaaagcggttcgaatactcctcctgacgttgctgcgcggcggccagctctgactgcgccatctctgtagcctccttcatct

SEQ ID NO: 4478 - DNA, 96 bp, Aspergillus thermomutatus
  misc_feature: 226
ctctctctttttcttctctctctttttcttctctctctttttcttctctctctctcttttccttttcttctttcttttcttatcctcttttttaac

SEQ ID NO: 4479 - DNA, 96 bp, Aspergillus thermomutatus
  misc_feature: 226
gtctgtacgaatggttggtgaccccttttggcatggcgaacgcaccgagtaccttccaacggtatatcaactgggcccttcgagacttcctggatg

SEQ ID NO: 4480 - DNA, 96 bp, Aspergillus thermomutatus
  misc_feature: 226
gccgagaaacgatcgtacgcctcgagtggatgtaggggtctgccattctagtatagcttttaccttgtcggggtccatgcgtacgcccttgccagc

SEQ ID NO: 4481 - DNA, 96 bp, Aspergillus thermomutatus
  misc_feature: 226
agttgtaggcggtcatcgtcatcgtcaggcatatcttgttctcttcgcgatagtgcgtcaggtctcgcagctaatttaccaggccgatagactagc

SEQ ID NO: 4482 - DNA, 96 bp, Aspergillus thermomutatus
  misc_feature: 226
aatcctcccactaatcctccctcttttctttttctttccttcctctttcctctctctttccttcctctttccttcctccttacctcccctttattc

SEQ ID NO: 4483 - DNA, 96 bp, Aspergillus thermomutatus
  misc_feature: 226
atagagaggcaggcagacaggtaggtagaatggtagggagtaaggcaccgtataagcaccaaatcagatagagagatatagagagaggtatccaag

SEQ ID NO: 4484 - DNA, 96 bp, Aspergillus thermomutatus
  misc_feature: 226
atggggcccgttgtacagcatgtcgcgcgaagaactgcttgtactgcgtaagacgcttacagagctgctagagaagaacttcatacgtgtcagcag

SEQ ID NO: 4485 - DNA, 96 bp, Aspergillus thermomutatus
  misc_feature: 226
aacgcacttaaagaatgggaatcggagctgatcagcctaccgaagtttgatatcgtcactgaccataagaatctggagtacttcacagttcgcagg

SEQ ID NO: 4486 - DNA, 96 bp, Aspergillus thermomutatus
  misc_feature: 226
caggctcgccgcgcgaaagcggttcgaatactcctcctgacgttgctgcgcggcggccagctctgactgcgccatctctgtagcctccttcatctt

SEQ ID NO: 4487 - DNA, 96 bp, Aspergillus thermomutatus
  misc_feature: 225
gatagagaggcaggcagacaggtaggtagaatggtagggagtaaggcaccgtataagcaccaaatcagatagagagatatagagagaggtatccaa

SEQ ID NO: 4488 - DNA, 96 bp, Aspergillus thermomutatus
  misc_feature: 225
agcaacggtttcagcaggccttgacgccgctcacgccacacacggttggccccacacttatcgcaattcttaacgaatcgtcgagcatctgcagaa

SEQ ID NO: 4489 - DNA, 96 bp, Aspergillus thermomutatus
  misc_feature: 225
agatagagaggcaggcagacaggtaggtagaatggtagggagtaaggcaccgtataagcaccaaatcagatagagagatatagagagaggtatcca

SEQ ID NO: 4490 - DNA, 96 bp, Aspergillus thermomutatus
  misc_feature: 225
tctgtacgaatggttggtgaccccttttggcatggcgaacgcaccgagtaccttccaacggtatatcaactgggcccttcgagacttcctggatga

SEQ ID NO: 4491 - DNA, 96 bp, Aspergillus thermomutatus
  misc_feature: 225
cagcactgtttccagaggaagtacccgagagttctgaggatgagggacatcgctctgaaggatcgcgagagttagcggcaacttctacggatcaga

SEQ ID NO: 4492 - DNA, 96 bp, Aspergillus thermomutatus
  misc_feature: 225
gggtcgatcaccgaattgagttgactaagggcgaagacgggaagccgttagaacccccatggggccctctgtacagcatgtcgcgcggtgaattgc

SEQ ID NO: 4493 - DNA, 96 bp, Aspergillus thermomutatus
  misc_feature: 225
aggctcgccgcgcgaaagcggttcgaatactcctcctgacgttgctgcgcggcggccagctctgactgcgccatctctgtagcctccttcatcttc

SEQ ID NO: 4494 - DNA, 96 bp, Aspergillus thermomutatus
  misc_feature: 225
cagactaacatggaacacattatgcacccctggtggagtatctagtcggtaagcatgtgatccaatagcttccagtactgtgaacttcgcgtgctg

SEQ ID NO: 4495 - DNA, 96 bp, Aspergillus thermomutatus
  misc_feature: 225
agcactgtttccagaggaagtacccgagagttctgaggatgagggacatcgctctgaaggatcgcgagagttagcggcaacttctacggatcagat

SEQ ID NO: 4496 - DNA, 96 bp, Aspergillus thermomutatus
  misc_feature: 224
ttccagtactgtgaacttcgcgtgctgggcatcgagcttcttgctagggcggtccgttcgtatgttgcgcaggtccaaccacacttttgaaccgac

SEQ ID NO: 4497 - DNA, 96 bp, Aspergillus thermomutatus
  misc_feature: 224
ttattctaatcctcccactaatcctccctcttttctttttctttccttcctctttcctctctctttccttcctctttccttcctccttacctcccc

SEQ ID NO: 4498 - DNA, 96 bp, Aspergillus thermomutatus
  misc_feature: 224
tgcgtgtgctcatacgtccatttaaatggtgtacctttgtgcgtgagggctgtaagcgggcgtactatctctgagaagttccgtataaagcgccga

SEQ ID NO: 4499 - DNA, 96 bp, Aspergillus thermomutatus
  misc_feature: 224
gtttggtctgtacgaatggttggtgaccccttttggcatggcgaacgcaccgagtaccttccaacggtatatcaactgggcccttcgagacttcct

SEQ ID NO: 4500 - DNA, 96 bp, Aspergillus thermomutatus
  misc_feature: 224
ggtctgtacgaatggttggtgaccccttttggcatggcgaacgcaccgagtaccttccaacggtatatcaactgggcccttcgagacttcctggat

SEQ ID NO: 4501 - DNA, 96 bp, Aspergillus thermomutatus
  misc_feature: 224
gcaatgcgaatcttgtggaatgcggcgatcacatcaagtttggtaaaccacttcgcctttgatatacgctccaaggtctcgttgattaggggcagc

SEQ ID NO: 4502 - DNA, 96 bp, Aspergillus thermomutatus
  misc_feature: 224
gaagatagagaggcaggcagacaggtaggtagaatggtagggagtaaggcaccgtataagcaccaaatcagatagagagatatagagagaggtatc

SEQ ID NO: 4503 - DNA, 96 bp, Aspergillus thermomutatus
  misc_feature: 224
cggcgcttacacagaaaggaaccccattcacatggacggaggagcacaccaatcggttcgagcagctaaagaagatgtttactaccgcgccgattc

SEQ ID NO: 4504 - DNA, 96 bp, Aspergillus thermomutatus
  misc_feature: 224
gaagatggcgaatctattactatctcacaagggagagcctgaggctgttggcttgaactgggtttctcgctttatcaaacgacatgatgagatcat

SEQ ID NO: 4505 - DNA, 96 bp, Aspergillus thermomutatus
  misc_feature: 224
acgatgtacttatcttcactgatgggtcgctggcgaagcaccgtagccacgtacggcaggtgctagagcggttacaggccgctgggttgcagctag

SEQ ID NO: 4506 - DNA, 96 bp, Aspergillus thermomutatus
  misc_feature: 224
ccgagaaacgatcgtacgcctcgagtggatgtaggggtctgccattctagtatagcttttaccttgtcggggtccatgcgtacgcccttgccagct

SEQ ID NO: 4507 - DNA, 96 bp, Aspergillus thermomutatus
  misc_feature: 224
cagagctgctggagaagaactttatccgcattagtagctcttccgccgcggctccggtgctgttcgcccgcaagccaggtggagggttacgattct

SEQ ID NO: 4508 - DNA, 96 bp, Aspergillus thermomutatus
  misc_feature: 224
acagactaacatggaacacattatgcacccctggtggagtatctagtcggtaagcatgtgatccaatagcttccagtactgtgaacttcgcgtgct

SEQ ID NO: 4509 - DNA, 96 bp, Aspergillus thermomutatus
  misc_feature: 224
acggcgcttacacagaaaggaaccccattcacatggacggaggagcacaccaatcggttcgagcagctaaagaagatgtttactaccgcgccgatt

SEQ ID NO: 4510 - DNA, 96 bp, Aspergillus thermomutatus
  misc_feature: 223
ctgtgttgattaccgagcattgaatgccattacgaagaaagaccgttacccccttccgctgatcaacgagacactagagcgcatcgcgaaggcaaa

SEQ ID NO: 4511 - DNA, 96 bp, Aspergillus thermomutatus
  misc_feature: 223
ttacgatcgtcctacgtgggaaccagctgtcaacctcgtcaatacggccgcgctggacgcttgggagcagcgagcgggccagaacacccccgaccc

SEQ ID NO: 4512 - DNA, 96 bp, Aspergillus thermomutatus
  misc_feature: 223
tccagtactgtgaacttcgcgtgctgggcatcgagcttcttgctagggcggtccgttcgtatgttgcgcaggtccaaccacacttttgaaccgaca

SEQ ID NO: 4513 - DNA, 96 bp, Aspergillus thermomutatus
  misc_feature: 223
tgtacgaatggttggtgaccccttttggcatggcgaacgcaccgagtaccttccaacggtatatcaactgggcccttcgagacttcctggatgaat

SEQ ID NO: 4514 - DNA, 96 bp, Aspergillus thermomutatus
  misc_feature: 223
tcgccgcaggacgcaacagactaacatggaacacattatgcacccctggtggagtatctagtcggtaagcatgtgatccaatagcttccagtactg

SEQ ID NO: 4515 - DNA, 96 bp, Aspergillus thermomutatus
  misc_feature: 223
ctatatctctctatctgatttggtgcttatacggtgccttactccctaccattctacctacctgtctgcctgcctctctatcttcctctctatcta

SEQ ID NO: 4516 - DNA, 96 bp, Aspergillus thermomutatus
  misc_feature: 223
tacgatcgtcctacgtgggaaccagctgtcaacctcgtcaatacggccgcgctggacgcttgggagcagcgagcgggccagaacacccccgacccg

SEQ ID NO: 4517 - DNA, 96 bp, Aspergillus thermomutatus
  misc_feature: 223
ggcgcttacacagaaaggaaccccattcacatggacggaggagcacaccaatcggttcgagcagctaaagaagatgtttactaccgcgccgattct

SEQ ID NO: 4518 - DNA, 96 bp, Aspergillus thermomutatus
  misc_feature: 223
acttattctaatcctcccactaatcctccctcttttctttttctttccttcctctttcctctctctttccttcctctttccttcctccttacctcc

SEQ ID NO: 4519 - DNA, 96 bp, Aspergillus thermomutatus
  misc_feature: 223
ggaagatagagaggcaggcagacaggtaggtagaatggtagggagtaaggcaccgtataagcaccaaatcagatagagagatatagagagaggtat

SEQ ID NO: 4520 - DNA, 96 bp, Aspergillus thermomutatus
  misc_feature: 223
gctgctggagaagaactttatccgcattagtagctcttccgccgcggctccggtgctgttcgcccgcaagccaggtggagggttacgattctgtgt

SEQ ID NO: 4521 - DNA, 96 bp, Aspergillus thermomutatus
  misc_feature: 223
acgatcgtcctacgtgggaaccagctgtcaacctcgtcaatacggccgcgctggacgcttgggagcagcgagcgggccagaacacccccgacccgc

SEQ ID NO: 4522 - DNA, 96 bp, Aspergillus thermomutatus
  misc_feature: 223
gcgcttacacagaaaggaaccccattcacatggacggaggagcacaccaatcggttcgagcagctaaagaagatgtttactaccgcgccgattctc

SEQ ID NO: 4523 - DNA, 96 bp, Aspergillus thermomutatus
  misc_feature: 223
ctcgaaccgattggtgtgctcctccgtccatgtgaatggggttcctttctgtgtaagcgccgtcaacggtcgtactatgtcagagaagttccgtat

SEQ ID NO: 4524 - DNA, 96 bp, Aspergillus thermomutatus
  misc_feature: 223
cgagaaacgatcgtacgcctcgagtggatgtaggggtctgccattctagtatagcttttaccttgtcggggtccatgcgtacgcccttgccagctt

SEQ ID NO: 4525 - DNA, 96 bp, Aspergillus thermomutatus
  misc_feature: 223
atcttgtggaatgcggcgatcacatcaagtttggtaaaccacttcgcctttgatatacgctccaaggtctcgttgattaggggcagcgggtatcgg

SEQ ID NO: 4526 - DNA, 96 bp, Aspergillus thermomutatus
  misc_feature: 223
agagctgctggagaagaactttatccgcattagtagctcttccgccgcggctccggtgctgttcgcccgcaagccaggtggagggttacgattctg

SEQ ID NO: 4527 - DNA, 96 bp, Aspergillus thermomutatus
  misc_feature: 223
agctgctggagaagaactttatccgcattagtagctcttccgccgcggctccggtgctgttcgcccgcaagccaggtggagggttacgattctgtg

SEQ ID NO: 4528 - DNA, 96 bp, Aspergillus thermomutatus
  misc_feature: 222
tttttcttctctctctttttcttctctctctttttcttctctctctctcttttccttttcttctttcttttcttatcctcttttttaaccctatcc

SEQ ID NO: 4529 - DNA, 96 bp, Aspergillus thermomutatus
  misc_feature: 222
ctgtacgaatggttggtgaccccttttggcatggcgaacgcaccgagtaccttccaacggtatatcaactgggcccttcgagacttcctggatgaa

SEQ ID NO: 4530 - DNA, 96 bp, Aspergillus thermomutatus
  misc_feature: 222
tgtgttgattaccgagcattgaatgccattacgaagaaagaccgttacccccttccgctgatcaacgagacactagagcgcatcgcgaaggcaaag

SEQ ID NO: 4531 - DNA, 96 bp, Aspergillus thermomutatus
  misc_feature: 222
tcttctaatccctactatgcttactctactatttcccttctttacttctcctaaactaactaacccttactcatctacttctcctctcccttctct

SEQ ID NO: 4532 - DNA, 96 bp, Aspergillus thermomutatus
  misc_feature: 222
agaaaggagataagatttaagaatgaagatagtaagaaaaaggagagagggagtaaaggggaggtaaggaggaagtaaagaggaaggagagaggga

SEQ ID NO: 4533 - DNA, 96 bp, Aspergillus thermomutatus
  misc_feature: 222
tcagcaacggtttcagcaggccttgacgccgctcacgccacacacggttggccccacacttatcgcaattcttaacgaatcgtcgagcatctgcag

SEQ ID NO: 4534 - DNA, 96 bp, Aspergillus thermomutatus
  misc_feature: 222
ctctttttcttctctctctttttcttctctctctttttcttctctctctctcttttccttttcttctttcttttcttatcctcttttttaacccta

SEQ ID NO: 4535 - DNA, 96 bp, Aspergillus thermomutatus
  misc_feature: 222
ctttacttctcctaaactaactaacccttactcatctacttctcctctcccttctcttaaaccaacccctacttatttactgcttcctactctcta

SEQ ID NO: 4536 - DNA, 96 bp, Aspergillus thermomutatus
  misc_feature: 222
gctcgaaccgattggtgtgctcctccgtccatgtgaatggggttcctttctgtgtaagcgccgtcaacggtcgtactatgtcagagaagttccgta

SEQ ID NO: 4537 - DNA, 96 bp, Aspergillus thermomutatus
  misc_feature: 222
ataaagttcttctccagcagctctgtcaacatctttcgtaagacaagcaattcaccgcgcgacatgctgtacagagggccccatgggggttctaac

SEQ ID NO: 4538 - DNA, 96 bp, Aspergillus thermomutatus
  misc_feature: 222
cttattctaatcctcccactaatcctccctcttttctttttctttccttcctctttcctctctctttccttcctctttccttcctccttacctccc

SEQ ID NO: 4539 - DNA, 96 bp, Aspergillus thermomutatus
  misc_feature: 222
acagcgtatctcaggctcgccgcgcgaaagcggttcgaatactcctcctgacgttgctgcgcggcggccagctctgactgcgccatctctgtagcc

SEQ ID NO: 4540 - DNA, 96 bp, Aspergillus thermomutatus
  misc_feature: 222
ggcgctttatacggaacttctctgacatagtacgaccgttgacggcgcttacacagaaaggaaccccattcacatggacggaggagcacaccaatc

SEQ ID NO: 4541 - DNA, 96 bp, Aspergillus thermomutatus
  misc_feature: 222
ggcaagggagtatgcatggaccctgagaaggtaaaggctatattggaatggcagaccccgacctcagcgcgcggcgtgcggtcattcctaggcttc

SEQ ID NO: 4542 - DNA, 96 bp, Aspergillus thermomutatus
  misc_feature: 222
ctttttcttctctctctttttcttctctctctttttcttctctctctctcttttccttttcttctttcttttcttatcctcttttttaaccctatc

SEQ ID NO: 4543 - DNA, 96 bp, Aspergillus thermomutatus
  misc_feature: 222
actgtttccagaggaagtacccgagagttctgaggatgagggacatcgctctgaaggatcgcgagagttagcggcaacttctacggatcagatctc

SEQ ID NO: 4544 - DNA, 96 bp, Aspergillus thermomutatus
  misc_feature: 222
ctgcgtgtgctcatacgtccatttaaatggtgtacctttgtgcgtgagggctgtaagcgggcgtactatctctgagaagttccgtataaagcgccg

SEQ ID NO: 4545 - DNA, 96 bp, Aspergillus thermomutatus
  misc_feature: 222
aagaaaggagataagatttaagaatgaagatagtaagaaaaaggagagagggagtaaaggggaggtaaggaggaagtaaagaggaaggagagaggg

SEQ ID NO: 4546 - DNA, 96 bp, Aspergillus thermomutatus
  misc_feature: 222
cactgtttccagaggaagtacccgagagttctgaggatgagggacatcgctctgaaggatcgcgagagttagcggcaacttctacggatcagatct

SEQ ID NO: 4547 - DNA, 96 bp, Aspergillus thermomutatus
  misc_feature: 221
tttacttctcctaaactaactaacccttactcatctacttctcctctcccttctcttaaaccaacccctacttatttactgcttcctactctctaa

SEQ ID NO: 4548 - DNA, 96 bp, Aspergillus thermomutatus
  misc_feature: 221
gataaagttcttctccagcagctctgtcaacatctttcgtaagacaagcaattcaccgcgcgacatgctgtacagagggccccatgggggttctaa

SEQ ID NO: 4549 - DNA, 96 bp, Aspergillus thermomutatus
  misc_feature: 221
aagccgagaaacgatcgtacgcctcgagtggatgtaggggtctgccattctagtatagcttttaccttgtcggggtccatgcgtacgcccttgcca

SEQ ID NO: 4550 - DNA, 96 bp, Aspergillus thermomutatus
  misc_feature: 221
tctctttttcttctctctctttttcttctctctctttttcttctctctctctcttttccttttcttctttcttttcttatcctcttttttaaccct

SEQ ID NO: 4551 - DNA, 96 bp, Aspergillus thermomutatus
  misc_feature: 221
cgatgtacttatcttcactgatgggtcgctggcgaagcaccgtagccacgtacggcaggtgctagagcggttacaggccgctgggttgcagctaga

SEQ ID NO: 4552 - DNA, 96 bp, Aspergillus thermomutatus
  misc_feature: 221
aatgatctgatgagaacagatcagtgatctgttgtgaacagatcagtgatctgttacagacatatcagtgatatgttcgaagggctatataaggac

SEQ ID NO: 4553 - DNA, 96 bp, Aspergillus thermomutatus
  misc_feature: 221
ctcttctaatccctactatgcttactctactatttcccttctttacttctcctaaactaactaacccttactcatctacttctcctctcccttctc

SEQ ID NO: 4554 - DNA, 96 bp, Aspergillus thermomutatus
  misc_feature: 221
aaagaaaggagataagatttaagaatgaagatagtaagaaaaaggagagagggagtaaaggggaggtaaggaggaagtaaagaggaaggagagagg

SEQ ID NO: 4555 - DNA, 96 bp, Aspergillus thermomutatus
  misc_feature: 221
agactaacatggaacacattatgcacccctggtggagtatctagtcggtaagcatgtgatccaatagcttccagtactgtgaacttcgcgtgctgg

SEQ ID NO: 4556 - DNA, 96 bp, Aspergillus thermomutatus
  misc_feature: 221
atcatcaacgcacttaaagaatgggaatcggagctgatcagcctaccgaagtttgatatcgtcactgaccataagaatctggagtacttcacagtt

SEQ ID NO: 4557 - DNA, 96 bp, Aspergillus thermomutatus
  misc_feature: 220
gaaaggagataagatttaagaatgaagatagtaagaaaaaggagagagggagtaaaggggaggtaaggaggaagtaaagaggaaggagagagggaa

SEQ ID NO: 4558 - DNA, 96 bp, Aspergillus thermomutatus
  misc_feature: 220
tgctcgaaccgattggtgtgctcctccgtccatgtgaatggggttcctttctgtgtaagcgccgtcaacggtcgtactatgtcagagaagttccgt

SEQ ID NO: 4559 - DNA, 96 bp, Aspergillus thermomutatus
  misc_feature: 220
tcaacgcacttaaagaatgggaatcggagctgatcagcctaccgaagtttgatatcgtcactgaccataagaatctggagtacttcacagttcgca

SEQ ID NO: 4560 - DNA, 96 bp, Aspergillus thermomutatus
  misc_feature: 220
tgacggcgcttacacagaaaggaaccccattcacatggacggaggagcacaccaatcggttcgagcagctaaagaagatgtttactaccgcgccga

SEQ ID NO: 4561 - DNA, 96 bp, Aspergillus thermomutatus
  misc_feature: 220
ggtctcgttgattaggggcagcgggtatcggtctttctttgtgatcgcgttcaacgcgcggtagtcgacacagaatcgtaaccctccacctggctt

SEQ ID NO: 4562 - DNA, 96 bp, Aspergillus thermomutatus
  misc_feature: 220
cgttgacggcgcttacacagaaaggaaccccattcacatggacggaggagcacaccaatcggttcgagcagctaaagaagatgtttactaccgcgc

SEQ ID NO: 4563 - DNA, 96 bp, Aspergillus thermomutatus
  misc_feature: 220
gcaaattcacgctgaagttccaggaatctggcctcagaatgctcggttcgctggttcgcttcgttgatggtcgattcggctttctggatgtattcg

SEQ ID NO: 4564 - DNA, 96 bp, Aspergillus thermomutatus
  misc_feature: 220
gaatgcggcgatcacatcaagtttggtaaaccacttcgcctttgatatacgctccaaggtctcgttgattaggggcagcgggtatcggtctttctt

SEQ ID NO: 4565 - DNA, 96 bp, Aspergillus thermomutatus
  misc_feature: 220
ataaaagccacgcagggttaggtataaaggcacccacagaggccccatgtaaggcagggttaaggcaggcagagaggtaaggagataggtagagag

SEQ ID NO: 4566 - DNA, 96 bp, Aspergillus thermomutatus
  misc_feature: 219
gggatagggttaaaaaagaggataagaaaagaaagaagaaaaggaaaagagagagagagaagaaaaagagagagaagaaaaagagagagaagaaaa

SEQ ID NO: 4567 - DNA, 96 bp, Aspergillus thermomutatus
  misc_feature: 219
agggatagggttaaaaaagaggataagaaaagaaagaagaaaaggaaaagagagagagagaagaaaaagagagagaagaaaaagagagagaagaaa

SEQ ID NO: 4568 - DNA, 96 bp, Aspergillus thermomutatus
  misc_feature: 219
ttgacggcgcttacacagaaaggaaccccattcacatggacggaggagcacaccaatcggttcgagcagctaaagaagatgtttactaccgcgccg

SEQ ID NO: 4569 - DNA, 96 bp, Aspergillus thermomutatus
  misc_feature: 219
tctttttcttctctctctttttcttctctctctttttcttctctctctctcttttccttttcttctttcttttcttatcctcttttttaaccctat

SEQ ID NO: 4570 - DNA, 96 bp, Aspergillus thermomutatus
  misc_feature: 219
gttgacggcgcttacacagaaaggaaccccattcacatggacggaggagcacaccaatcggttcgagcagctaaagaagatgtttactaccgcgcc

SEQ ID NO: 4571 - DNA, 96 bp, Aspergillus thermomutatus
  misc_feature: 219
ggtttggtctgtacgaatggttggtgaccccttttggcatggcgaacgcaccgagtaccttccaacggtatatcaactgggcccttcgagacttcc

SEQ ID NO: 4572 - DNA, 96 bp, Aspergillus thermomutatus
  misc_feature: 219
accgctgcgtgtgctcatacgtccatttaaatggtgtacctttgtgcgtgagggctgtaagcgggcgtactatctctgagaagttccgtataaagc

SEQ ID NO: 4573 - DNA, 96 bp, Aspergillus thermomutatus
  misc_feature: 219
gatcatggtgattgccgataggttagggaagggtgtgatattagtgccctgtgagcgaactgatgccgagaccgtagcgcagctgctaatcgaccg

SEQ ID NO: 4574 - DNA, 96 bp, Aspergillus thermomutatus
  misc_feature: 219
agccgagaaacgatcgtacgcctcgagtggatgtaggggtctgccattctagtatagcttttaccttgtcggggtccatgcgtacgcccttgccag

SEQ ID NO: 4575 - DNA, 96 bp, Aspergillus thermomutatus
  misc_feature: 219
cctcttctaatccctactatgcttactctactatttcccttctttacttctcctaaactaactaacccttactcatctacttctcctctcccttct

SEQ ID NO: 4576 - DNA, 96 bp, Aspergillus thermomutatus
  misc_feature: 219
ccaatagcttccagtactgtgaacttcgcgtgctgggcatcgagcttcttgctagggcggtccgttcgtatgttgcgcaggtccaaccacactttt

SEQ ID NO: 4577 - DNA, 96 bp, Aspergillus thermomutatus
  misc_feature: 219
caaattcacgctgaagttccaggaatctggcctcagaatgctcggttcgctggttcgcttcgttgatggtcgattcggctttctggatgtattcgt

SEQ ID NO: 4578 - DNA, 96 bp, Aspergillus thermomutatus
  misc_feature: 218
tggaatgcggcgatcacatcaagtttggtaaaccacttcgcctttgatatacgctccaaggtctcgttgattaggggcagcgggtatcggtctttc

SEQ ID NO: 4579 - DNA, 96 bp, Aspergillus thermomutatus
  misc_feature: 218
tctggaatcagcaacggtttcagcaggccttgacgccgctcacgccacacacggttggccccacacttatcgcaattcttaacgaatcgtcgagca

SEQ ID NO: 4580 - DNA, 96 bp, Aspergillus thermomutatus
  misc_feature: 218
tgatctgatgagaacagatcagtgatctgttgtgaacagatcagtgatctgttacagacatatcagtgatatgttcgaagggctatataaggacac

SEQ ID NO: 4581 - DNA, 96 bp, Aspergillus thermomutatus
  misc_feature: 218
tataaaagccacgcagggttaggtataaaggcacccacagaggccccatgtaaggcagggttaaggcaggcagagaggtaaggagataggtagaga

SEQ ID NO: 4582 - DNA, 96 bp, Aspergillus thermomutatus
  misc_feature: 218
tctatatatgtttagtttagatatatggtcagcagaaattaatctagataatactcttaatatgactagtggtgatggaggaaattcttattttgg

SEQ ID NO: 4583 - DNA, 96 bp, Aspergillus thermomutatus
  misc_feature: 218
tcctcttctaatccctactatgcttactctactatttcccttctttacttctcctaaactaactaacccttactcatctacttctcctctcccttc

SEQ ID NO: 4584 - DNA, 96 bp, Aspergillus thermomutatus
  misc_feature: 218
tccaatagcttccagtactgtgaacttcgcgtgctgggcatcgagcttcttgctagggcggtccgttcgtatgttgcgcaggtccaaccacacttt

SEQ ID NO: 4585 - DNA, 96 bp, Aspergillus thermomutatus
  misc_feature: 218
atggacaggttacgatcgtcctacgtgggaaccagctgtcaacctcgtcaatacggccgcgctggacgcttgggagcagcgagcgggccagaacac

SEQ ID NO: 4586 - DNA, 96 bp, Aspergillus thermomutatus
  misc_feature: 218
gtctggaatcagcaacggtttcagcaggccttgacgccgctcacgccacacacggttggccccacacttatcgcaattcttaacgaatcgtcgagc

SEQ ID NO: 4587 - DNA, 96 bp, Aspergillus thermomutatus
  misc_feature: 218
gtacgcggtttggtctgtacgaatggttggtgaccccttttggcatggcgaacgcaccgagtaccttccaacggtatatcaactgggcccttcgag

SEQ ID NO: 4588 - DNA, 96 bp, Aspergillus thermomutatus
  misc_feature: 218
ggaatgcggcgatcacatcaagtttggtaaaccacttcgcctttgatatacgctccaaggtctcgttgattaggggcagcgggtatcggtctttct

SEQ ID NO: 4589 - DNA, 96 bp, Aspergillus thermomutatus
  misc_feature: 218
acgcacttaaagaatgggaatcggagctgatcagcctaccgaagtttgatatcgtcactgaccataagaatctggagtacttcacagttcgcaggc

SEQ ID NO: 4590 - DNA, 96 bp, Aspergillus thermomutatus
  misc_feature: 218
gacggcgcttacacagaaaggaaccccattcacatggacggaggagcacaccaatcggttcgagcagctaaagaagatgtttactaccgcgccgat

SEQ ID NO: 4591 - DNA, 96 bp, Aspergillus thermomutatus
  misc_feature: 218
cggtttggtctgtacgaatggttggtgaccccttttggcatggcgaacgcaccgagtaccttccaacggtatatcaactgggcccttcgagacttc

SEQ ID NO: 4592 - DNA, 96 bp, Aspergillus thermomutatus
  misc_feature: 218
ctcctcttctaatccctactatgcttactctactatttcccttctttacttctcctaaactaactaacccttactcatctacttctcctctccctt

SEQ ID NO: 4593 - DNA, 96 bp, Aspergillus thermomutatus
  misc_feature: 218
aatcttgtggaatgcggcgatcacatcaagtttggtaaaccacttcgcctttgatatacgctccaaggtctcgttgattaggggcagcgggtatcg

SEQ ID NO: 4594 - DNA, 96 bp, Aspergillus thermomutatus
  misc_feature: 218
aggtctcgttgattaggggcagcgggtatcggtctttctttgtgatcgcgttcaacgcgcggtagtcgacacagaatcgtaaccctccacctggct

SEQ ID NO: 4595 - DNA, 96 bp, Aspergillus thermomutatus
  misc_feature: 217
tttggtctgtacgaatggttggtgaccccttttggcatggcgaacgcaccgagtaccttccaacggtatatcaactgggcccttcgagacttcctg

SEQ ID NO: 4596 - DNA, 96 bp, Aspergillus thermomutatus
  misc_feature: 217
ttggtctgtacgaatggttggtgaccccttttggcatggcgaacgcaccgagtaccttccaacggtatatcaactgggcccttcgagacttcctgg

SEQ ID NO: 4597 - DNA, 96 bp, Aspergillus thermomutatus
  misc_feature: 217
tgatcgcgttcaacgcgcggtagtcgacacagaatcgtaaccctccacctggcttgcgggcgaacagcaccggagccgcggcggaagagctactaa

SEQ ID NO: 4598 - DNA, 96 bp, Aspergillus thermomutatus
  misc_feature: 217
atgtacttatcttcactgatgggtcgctggcgaagcaccgtagccacgtacggcaggtgctagagcggttacaggccgctgggttgcagctagaca

SEQ ID NO: 4599 - DNA, 96 bp, Aspergillus thermomutatus
  misc_feature: 217
tgtacttatcttcactgatgggtcgctggcgaagcaccgtagccacgtacggcaggtgctagagcggttacaggccgctgggttgcagctagacat

SEQ ID NO: 4600 - DNA, 96 bp, Aspergillus thermomutatus
  misc_feature: 217
tggtctgtacgaatggttggtgaccccttttggcatggcgaacgcaccgagtaccttccaacggtatatcaactgggcccttcgagacttcctgga

SEQ ID NO: 4601 - DNA, 96 bp, Aspergillus thermomutatus
  misc_feature: 217
tgacatagtacgaccgttgacggcgcttacacagaaaggaaccccattcacatggacggaggagcacaccaatcggttcgagcagctaaagaagat

SEQ ID NO: 4602 - DNA, 96 bp, Aspergillus thermomutatus
  misc_feature: 217
tagagaggcaggcagacaggtaggtagaatggtagggagtaaggcaccgtataagcaccaaatcagatagagagatatagagagaggtatccaaga

SEQ ID NO: 4603 - DNA, 96 bp, Aspergillus thermomutatus
  misc_feature: 217
ctgacatagtacgaccgttgacggcgcttacacagaaaggaaccccattcacatggacggaggagcacaccaatcggttcgagcagctaaagaaga

SEQ ID NO: 4604 - DNA, 96 bp, Aspergillus thermomutatus
  misc_feature: 217
tctcctcttctaatccctactatgcttactctactatttcccttctttacttctcctaaactaactaacccttactcatctacttctcctctccct

SEQ ID NO: 4605 - DNA, 96 bp, Aspergillus thermomutatus
  misc_feature: 217
tcccactaatcctccctcttttctttttctttccttcctctttcctctctctttccttcctctttccttcctccttacctcccctttattccctct

SEQ ID NO: 4606 - DNA, 96 bp, Aspergillus thermomutatus
  misc_feature: 217
tcatcaacgcccttagggaatgggagtcggagttagtcagcctgccgcgatttaagctcatcacggaccaccgcaacctggaatacttcaagatgg

SEQ ID NO: 4607 - DNA, 96 bp, Aspergillus thermomutatus
  misc_feature: 217
tattctaatcctcccactaatcctccctcttttctttttctttccttcctctttcctctctctttccttcctctttccttcctccttacctcccct

SEQ ID NO: 4608 - DNA, 96 bp, Aspergillus thermomutatus
  misc_feature: 217
gaggtaaggaggaaggaaagaggaaggaaagagagaggaaagaggaaggaaagaaaaagaaaagagggaggattagtgggaggattagaataagta

SEQ ID NO: 4609 - DNA, 96 bp, Aspergillus thermomutatus
  misc_feature: 217
gtggaatgcggcgatcacatcaagtttggtaaaccacttcgcctttgatatacgctccaaggtctcgttgattaggggcagcgggtatcggtcttt

SEQ ID NO: 4610 - DNA, 96 bp, Aspergillus thermomutatus
  misc_feature: 217
gctgcgtgtgctcatacgtccatttaaatggtgtacctttgtgcgtgagggctgtaagcgggcgtactatctctgagaagttccgtataaagcgcc

SEQ ID NO: 4611 - DNA, 96 bp, Aspergillus thermomutatus
  misc_feature: 217
ggagaggagaagtagatgagtaagggttagttagtttaggagaagtaaagaagggaaatagtagagtaagcatagtagggattagaagaggagaat

SEQ ID NO: 4612 - DNA, 96 bp, Aspergillus thermomutatus
  misc_feature: 217
accgttgacggcgcttacacagaaaggaaccccattcacatggacggaggagcacaccaatcggttcgagcagctaaagaagatgtttactaccgc

SEQ ID NO: 4613 - DNA, 96 bp, Aspergillus thermomutatus
  misc_feature: 217
gcccccgcatcgccctggggtcgatcaccgaattgagttgactaagggcgaagacgggaagccgttagaacccccatggggccctctgtacagcat

SEQ ID NO: 4614 - DNA, 96 bp, Aspergillus thermomutatus
  misc_feature: 217
ctctatatctctctatctgatttggtgcttatacggtgccttactccctaccattctacctacctgtctgcctgcctctctatcttcctctctatc

SEQ ID NO: 4615 - DNA, 96 bp, Aspergillus thermomutatus
  misc_feature: 217
gaaagaaaggagataagatttaagaatgaagatagtaagaaaaaggagagagggagtaaaggggaggtaaggaggaagtaaagaggaaggagagag

SEQ ID NO: 4616 - DNA, 96 bp, Aspergillus thermomutatus
  misc_feature: 217
ccgttgacggcgcttacacagaaaggaaccccattcacatggacggaggagcacaccaatcggttcgagcagctaaagaagatgtttactaccgcg

SEQ ID NO: 4617 - DNA, 96 bp, Aspergillus thermomutatus
  misc_feature: 217
ccaaggtctcgttgattaggggcagcgggtatcggtctttctttgtgatcgcgttcaacgcgcggtagtcgacacagaatcgtaaccctccacctg

SEQ ID NO: 4618 - DNA, 96 bp, Aspergillus thermomutatus
  misc_feature: 217
atcatcaacgcccttagggaatgggagtcggagttagtcagcctgccgcgatttaagctcatcacggaccaccgcaacctggaatacttcaagatg

SEQ ID NO: 4619 - DNA, 96 bp, Aspergillus thermomutatus
  misc_feature: 216
tcttgtggaatgcggcgatcacatcaagtttggtaaaccacttcgcctttgatatacgctccaaggtctcgttgattaggggcagcgggtatcggt

SEQ ID NO: 4620 - DNA, 96 bp, Aspergillus thermomutatus
  misc_feature: 216
tctctctatatctctctatctgatttggtgcttatacggtgccttactccctaccattctacctacctgtctgcctgcctctctatcttcctctct

SEQ ID NO: 4621 - DNA, 96 bp, Aspergillus thermomutatus
  misc_feature: 216
cgtacgcggtttggtctgtacgaatggttggtgaccccttttggcatggcgaacgcaccgagtaccttccaacggtatatcaactgggcccttcga

SEQ ID NO: 4622 - DNA, 96 bp, Aspergillus thermomutatus
  misc_feature: 216
ccgcaggacgcaacagactaacatggaacacattatgcacccctggtggagtatctagtcggtaagcatgtgatccaatagcttccagtactgtga

SEQ ID NO: 4623 - DNA, 96 bp, Aspergillus thermomutatus
  misc_feature: 216
tacctctctctatatctctctatctgatttggtgcttatacggtgccttactccctaccattctacctacctgtctgcctgcctctctatcttcct

SEQ ID NO: 4624 - DNA, 96 bp, Aspergillus thermomutatus
  misc_feature: 216
gatgtacttatcttcactgatgggtcgctggcgaagcaccgtagccacgtacggcaggtgctagagcggttacaggccgctgggttgcagctagac

SEQ ID NO: 4625 - DNA, 96 bp, Aspergillus thermomutatus
  misc_feature: 216
gtaagggatagggttaaaaaagaggataagaaaagaaagaagaaaaggaaaagagagagagagaagaaaaagagagagaagaaaaagagagagaag

SEQ ID NO: 4626 - DNA, 96 bp, Aspergillus thermomutatus
  misc_feature: 216
gctgtcaacctcgtcaatacggccgcgctggacgcttgggagcagcgagcgggccagaacacccccgacccgcgaggggagggggagtagtgtagc

SEQ ID NO: 4627 - DNA, 96 bp, Aspergillus thermomutatus
  misc_feature: 216
cctctctctatatctctctatctgatttggtgcttatacggtgccttactccctaccattctacctacctgtctgcctgcctctctatcttcctct

SEQ ID NO: 4628 - DNA, 96 bp, Aspergillus thermomutatus
  misc_feature: 216
aaaggagataagatttaagaatgaagatagtaagaaaaaggagagagggagtaaaggggaggtaaggaggaagtaaagaggaaggagagagggaat

SEQ ID NO: 4629 - DNA, 96 bp, Aspergillus thermomutatus
  misc_feature: 215
acaaggcaacagaaaaggacaaggtgacaggaaagaacaaaatgacaggaggagcaaggtagagaggtagaggttaatttttaatagtattagaaa

SEQ ID NO: 4630 - DNA, 96 bp, Aspergillus thermomutatus
  misc_feature: 215
aagggatagggttaaaaaagaggataagaaaagaaagaagaaaaggaaaagagagagagagaagaaaaagagagagaagaaaaagagagagaagaa

SEQ ID NO: 4631 - DNA, 96 bp, Aspergillus thermomutatus
  misc_feature: 215
ttctcctcttctaatccctactatgcttactctactatttcccttctttacttctcctaaactaactaacccttactcatctacttctcctctccc

SEQ ID NO: 4632 - DNA, 96 bp, Aspergillus thermomutatus
  misc_feature: 215
ttagctgctcgaaccgattggtgtgctcctccgtccatgtgaatggggttcctttctgtgtaagcgccgtcaacggtcgtactatgtcagagaagt

SEQ ID NO: 4633 - DNA, 96 bp, Aspergillus thermomutatus
  misc_feature: 215
tacgcggtttggtctgtacgaatggttggtgaccccttttggcatggcgaacgcaccgagtaccttccaacggtatatcaactgggcccttcgaga

SEQ ID NO: 4634 - DNA, 96 bp, Aspergillus thermomutatus
  misc_feature: 215
cagaggccccatgtaaggcagggttaaggcaggcagagaggtaaggagataggtagagagggacccaagtagcaggccataaggcaggccatgaga

SEQ ID NO: 4635 - DNA, 96 bp, Aspergillus thermomutatus
  misc_feature: 215
tctatatctctctatctgatttggtgcttatacggtgccttactccctaccattctacctacctgtctgcctgcctctctatcttcctctctatct

SEQ ID NO: 4636 - DNA, 96 bp, Aspergillus thermomutatus
  misc_feature: 215
tccaaggtctcgttgattaggggcagcgggtatcggtctttctttgtgatcgcgttcaacgcgcggtagtcgacacagaatcgtaaccctccacct

SEQ ID NO: 4637 - DNA, 96 bp, Aspergillus thermomutatus
  misc_feature: 215
acgcggtttggtctgtacgaatggttggtgaccccttttggcatggcgaacgcaccgagtaccttccaacggtatatcaactgggcccttcgagac

SEQ ID NO: 4638 - DNA, 96 bp, Aspergillus thermomutatus
  misc_feature: 215
gacaggttacgatcgtcctacgtgggaaccagctgtcaacctcgtcaatacggccgcgctggacgcttgggagcagcgagcgggccagaacacccc

SEQ ID NO: 4639 - DNA, 96 bp, Aspergillus thermomutatus
  misc_feature: 215
cgctgcgtgtgctcatacgtccatttaaatggtgtacctttgtgcgtgagggctgtaagcgggcgtactatctctgagaagttccgtataaagcgc

SEQ ID NO: 4640 - DNA, 96 bp, Aspergillus thermomutatus
  misc_feature: 215
acctctctctatatctctctatctgatttggtgcttatacggtgccttactccctaccattctacctacctgtctgcctgcctctctatcttcctc

SEQ ID NO: 4641 - DNA, 96 bp, Aspergillus thermomutatus
  misc_feature: 215
aatgcgaatcttgtggaatgcggcgatcacatcaagtttggtaaaccacttcgcctttgatatacgctccaaggtctcgttgattaggggcagcgg

SEQ ID NO: 4642 - DNA, 96 bp, Aspergillus thermomutatus
  misc_feature: 215
atccaatagcttccagtactgtgaacttcgcgtgctgggcatcgagcttcttgctagggcggtccgttcgtatgttgcgcaggtccaaccacactt

SEQ ID NO: 4643 - DNA, 96 bp, Aspergillus thermomutatus
  misc_feature: 214
cccaagcttggcaatggtagatggtatacaactaccagcaacaactaccatgtaatggtagtccgaatggtagacgaggaaggaactatataaaga

SEQ ID NO: 4644 - DNA, 96 bp, Aspergillus thermomutatus
  misc_feature: 214
taagggatagggttaaaaaagaggataagaaaagaaagaagaaaaggaaaagagagagagagaagaaaaagagagagaagaaaaagagagagaaga

SEQ ID NO: 4645 - DNA, 96 bp, Aspergillus thermomutatus
  misc_feature: 214
gcggaagagctactaatgcggataaagttcttctccagcagctctgtcaacatctttcgtaagacaagcaattcaccgcgcgacatgctgtacaga

SEQ ID NO: 4646 - DNA, 96 bp, Aspergillus thermomutatus
  misc_feature: 214
gagaggagaagtagatgagtaagggttagttagtttaggagaagtaaagaagggaaatagtagagtaagcatagtagggattagaagaggagaata

SEQ ID NO: 4647 - DNA, 96 bp, Aspergillus thermomutatus
  misc_feature: 214
aaggagataagatttaagaatgaagatagtaagaaaaaggagagagggagtaaaggggaggtaaggaggaagtaaagaggaaggagagagggaata

SEQ ID NO: 4648 - DNA, 96 bp, Aspergillus thermomutatus
  misc_feature: 214
tagctgctcgaaccgattggtgtgctcctccgtccatgtgaatggggttcctttctgtgtaagcgccgtcaacggtcgtactatgtcagagaagtt

SEQ ID NO: 4649 - DNA, 96 bp, Aspergillus thermomutatus
  misc_feature: 214
ctctagtgtctcgttgatcagcggaagggggtaacggtctttcttcgtaatggcattcaatgctcggtaatcaacacagaaacgtagacctccacc

SEQ ID NO: 4650 - DNA, 96 bp, Aspergillus thermomutatus
  misc_feature: 214
actaatcctccctcttttctttttctttccttcctctttcctctctctttccttcctctttccttcctccttacctcccctttattccctctctcc

SEQ ID NO: 4651 - DNA, 96 bp, Aspergillus thermomutatus
  misc_feature: 214
atcaacgcacttaaagaatgggaatcggagctgatcagcctaccgaagtttgatatcgtcactgaccataagaatctggagtacttcacagttcgc

SEQ ID NO: 4652 - DNA, 96 bp, Aspergillus thermomutatus
  misc_feature: 214
gccgcaggacgcaacagactaacatggaacacattatgcacccctggtggagtatctagtcggtaagcatgtgatccaatagcttccagtactgtg

SEQ ID NO: 4653 - DNA, 96 bp, Aspergillus thermomutatus
  misc_feature: 214
gagataagatttaagaatgaagatagtaagaaaaaggagagagggagtaaaggggaggtaaggaggaagtaaagaggaaggagagagggaataaag

SEQ ID NO: 4654 - DNA, 96 bp, Aspergillus thermomutatus
  misc_feature: 214
ccgctgcgtgtgctcatacgtccatttaaatggtgtacctttgtgcgtgagggctgtaagcgggcgtactatctctgagaagttccgtataaagcg

SEQ ID NO: 4655 - DNA, 96 bp, Aspergillus thermomutatus
  misc_feature: 214
caatgcgaatcttgtggaatgcggcgatcacatcaagtttggtaaaccacttcgcctttgatatacgctccaaggtctcgttgattaggggcagcg

SEQ ID NO: 4656 - DNA, 96 bp, Aspergillus thermomutatus
  misc_feature: 214
ccgtacgcggtttggtctgtacgaatggttggtgaccccttttggcatggcgaacgcaccgagtaccttccaacggtatatcaactgggcccttcg

SEQ ID NO: 4657 - DNA, 96 bp, Aspergillus thermomutatus
  misc_feature: 213
tttctgtgttgattaccgagcattgaatgccattacgaagaaagaccgttacccccttccgctgatcaacgagacactagagcgcatcgcgaaggc

SEQ ID NO: 4658 - DNA, 96 bp, Aspergillus thermomutatus
  misc_feature: 213
tgagaaacgcgttggcagaggccgccgcaaggagtatctcgtcaaatggacaggttacgatcgtcctacgtgggaaccagctgtcaacctcgtcaa

SEQ ID NO: 4659 - DNA, 96 bp, Aspergillus thermomutatus
  misc_feature: 213
aatggacaggttacgatcgtcctacgtgggaaccagctgtcaacctcgtcaatacggccgcgctggacgcttgggagcagcgagcgggccagaaca

SEQ ID NO: 4660 - DNA, 96 bp, Aspergillus thermomutatus
  misc_feature: 213
gtgagaaacgcgttggcagaggccgccgcaaggagtatctcgtcaaatggacaggttacgatcgtcctacgtgggaaccagctgtcaacctcgtca

SEQ ID NO: 4661 - DNA, 96 bp, Aspergillus thermomutatus
  misc_feature: 213
agaaagaaaggagataagatttaagaatgaagatagtaagaaaaaggagagagggagtaaaggggaggtaaggaggaagtaaagaggaaggagaga

SEQ ID NO: 4662 - DNA, 96 bp, Aspergillus thermomutatus
  misc_feature: 213
gacgatgtacttatcttcactgatgggtcgctggcgaagcaccgtagccacgtacggcaggtgctagagcggttacaggccgctgggttgcagcta

SEQ ID NO: 4663 - DNA, 96 bp, Aspergillus thermomutatus
  misc_feature: 213
agaggccccatgtaaggcagggttaaggcaggcagagaggtaaggagataggtagagagggacccaagtagcaggccataaggcaggccatgagac

SEQ ID NO: 4664 - DNA, 96 bp, Aspergillus thermomutatus
  misc_feature: 213
ggtaaggaggaaggaaagaggaaggaaagagagaggaaagaggaaggaaagaaaaagaaaagagggaggattagtgggaggattagaataagtatt

SEQ ID NO: 4665 - DNA, 96 bp, Aspergillus thermomutatus
  misc_feature: 213
ggacaggttacgatcgtcctacgtgggaaccagctgtcaacctcgtcaatacggccgcgctggacgcttgggagcagcgagcgggccagaacaccc

SEQ ID NO: 4666 - DNA, 96 bp, Aspergillus thermomutatus
  misc_feature: 213
gctgctcgaaccgattggtgtgctcctccgtccatgtgaatggggttcctttctgtgtaagcgccgtcaacggtcgtactatgtcagagaagttcc

SEQ ID NO: 4667 - DNA, 96 bp, Aspergillus thermomutatus
  misc_feature: 213
ctgctcgaaccgattggtgtgctcctccgtccatgtgaatggggttcctttctgtgtaagcgccgtcaacggtcgtactatgtcagagaagttccg

SEQ ID NO: 4668 - DNA, 96 bp, Aspergillus thermomutatus
  misc_feature: 213
cgcacttaaagaatgggaatcggagctgatcagcctaccgaagtttgatatcgtcactgaccataagaatctggagtacttcacagttcgcaggcg

SEQ ID NO: 4669 - DNA, 96 bp, Aspergillus thermomutatus
  misc_feature: 213
agaggagaagtagatgagtaagggttagttagtttaggagaagtaaagaagggaaatagtagagtaagcatagtagggattagaagaggagaatat

SEQ ID NO: 4670 - DNA, 96 bp, Aspergillus thermomutatus
  misc_feature: 212
tcagatcgcggcccgcagttcgttagccagttctggggccacttctgcagccgcttgggtatacaacgacgactatctactgccttccacccgcaa

SEQ ID NO: 4671 - DNA, 96 bp, Aspergillus thermomutatus
  misc_feature: 212
gaagagaagaaagaaaggagataagatttaagaatgaagatagtaagaaaaaggagagagggagtaaaggggaggtaaggaggaagtaaagaggaa

SEQ ID NO: 4672 - DNA, 96 bp, Aspergillus thermomutatus
  misc_feature: 212
gaagaaagaaaggagataagatttaagaatgaagatagtaagaaaaaggagagagggagtaaaggggaggtaaggaggaagtaaagaggaaggaga

SEQ ID NO: 4673 - DNA, 96 bp, Aspergillus thermomutatus
  misc_feature: 212
tagcttccagtactgtgaacttcgcgtgctgggcatcgagcttcttgctagggcggtccgttcgtatgttgcgcaggtccaaccacacttttgaac

SEQ ID NO: 4674 - DNA, 96 bp, Aspergillus thermomutatus
  misc_feature: 212
gcgaatcttgtggaatgcggcgatcacatcaagtttggtaaaccacttcgcctttgatatacgctccaaggtctcgttgattaggggcagcgggta

SEQ ID NO: 4675 - DNA, 96 bp, Aspergillus thermomutatus
  misc_feature: 212
taatcctccctcttttctttttctttccttcctctttcctctctctttccttcctctttccttcctccttacctcccctttattccctctctcctt

SEQ ID NO: 4676 - DNA, 96 bp, Aspergillus thermomutatus
  misc_feature: 212
agatcgcggcccgcagttcgttagccagttctggggccacttctgcagccgcttgggtatacaacgacgactatctactgccttccacccgcaaac

SEQ ID NO: 4677 - DNA, 96 bp, Aspergillus thermomutatus
  misc_feature: 212
aaggtctcgttgattaggggcagcgggtatcggtctttctttgtgatcgcgttcaacgcgcggtagtcgacacagaatcgtaaccctccacctggc

SEQ ID NO: 4678 - DNA, 96 bp, Aspergillus thermomutatus
  misc_feature: 212
gatttaagaatgaagatagtaagaaaaaggagagagggagtaaaggggaggtaaggaggaagtaaagaggaaggagagagggaataaaggggaggt

SEQ ID NO: 4679 - DNA, 96 bp, Aspergillus thermomutatus
  misc_feature: 212
cctactatgcctcactgcctacctcctggggttcctctatgcctactcttggtctgccttactgcctctctccctgtcttacatggtgccttcctc

SEQ ID NO: 4680 - DNA, 96 bp, Aspergillus thermomutatus
  misc_feature: 212
cactaatcctccctcttttctttttctttccttcctctttcctctctctttccttcctctttccttcctccttacctcccctttattccctctctc

SEQ ID NO: 4681 - DNA, 96 bp, Aspergillus thermomutatus
  misc_feature: 212
gagaaacgcgttggcagaggccgccgcaaggagtatctcgtcaaatggacaggttacgatcgtcctacgtgggaaccagctgtcaacctcgtcaat

SEQ ID NO: 4682 - DNA, 96 bp, Aspergillus thermomutatus
  misc_feature: 212
ctgctggagaagaactttatccgcattagtagctcttccgccgcggctccggtgctgttcgcccgcaagccaggtggagggttacgattctgtgtc

SEQ ID NO: 4683 - DNA, 96 bp, Aspergillus thermomutatus
  misc_feature: 212
aatcctccctcttttctttttctttccttcctctttcctctctctttccttcctctttccttcctccttacctcccctttattccctctctccttc

SEQ ID NO: 4684 - DNA, 96 bp, Aspergillus thermomutatus
  misc_feature: 212
agctgctcgaaccgattggtgtgctcctccgtccatgtgaatggggttcctttctgtgtaagcgccgtcaacggtcgtactatgtcagagaagttc

SEQ ID NO: 4685 - DNA, 96 bp, Aspergillus thermomutatus
  misc_feature: 212
acccaagcttggcaatggtagatggtatacaactaccagcaacaactaccatgtaatggtagtccgaatggtagacgaggaaggaactatataaag

SEQ ID NO: 4686 - DNA, 96 bp, Aspergillus thermomutatus
  misc_feature: 212
aagaaagaaaggagataagatttaagaatgaagatagtaagaaaaaggagagagggagtaaaggggaggtaaggaggaagtaaagaggaaggagag

SEQ ID NO: 4687 - DNA, 96 bp, Aspergillus thermomutatus
  misc_feature: 212
agaagaaagaaaggagataagatttaagaatgaagatagtaagaaaaaggagagagggagtaaaggggaggtaaggaggaagtaaagaggaaggag

SEQ ID NO: 4688 - DNA, 96 bp, Aspergillus thermomutatus
  misc_feature: 212
agataagatttaagaatgaagatagtaagaaaaaggagagagggagtaaaggggaggtaaggaggaagtaaagaggaaggagagagggaataaagg

SEQ ID NO: 4689 - DNA, 96 bp, Aspergillus thermomutatus
  misc_feature: 212
caaggtctcgttgattaggggcagcgggtatcggtctttctttgtgatcgcgttcaacgcgcggtagtcgacacagaatcgtaaccctccacctgg

SEQ ID NO: 4690 - DNA, 96 bp, Aspergillus thermomutatus
  misc_feature: 212
aggcaagggagtatgcatggaccctgagaaggtaaaggctatattggaatggcagaccccgacctcagcgcgcggcgtgcggtcattcctaggctt

SEQ ID NO: 4691 - DNA, 96 bp, Aspergillus thermomutatus
  misc_feature: 211
cagatcgcggcccgcagttcgttagccagttctggggccacttctgcagccgcttgggtatacaacgacgactatctactgccttccacccgcaaa

SEQ ID NO: 4692 - DNA, 96 bp, Aspergillus thermomutatus
  misc_feature: 211
ggagataagatttaagaatgaagatagtaagaaaaaggagagagggagtaaaggggaggtaaggaggaagtaaagaggaaggagagagggaataaa

SEQ ID NO: 4693 - DNA, 96 bp, Aspergillus thermomutatus
  misc_feature: 211
tgtgatccaatagcttccagtactgtgaacttcgcgtgctgggcatcgagcttcttgctagggcggtccgttcgtatgttgcgcaggtccaaccac

SEQ ID NO: 4694 - DNA, 96 bp, Aspergillus thermomutatus
  misc_feature: 211
tgcccccgcatcgccctggggtcgatcaccgaattgagttgactaagggcgaagacgggaagccgttagaacccccatggggccctctgtacagca

SEQ ID NO: 4695 - DNA, 96 bp, Aspergillus thermomutatus
  misc_feature: 211
gcacttaaagaatgggaatcggagctgatcagcctaccgaagtttgatatcgtcactgaccataagaatctggagtacttcacagttcgcaggcga

SEQ ID NO: 4696 - DNA, 96 bp, Aspergillus thermomutatus
  misc_feature: 211
gagaagaaagaaaggagataagatttaagaatgaagatagtaagaaaaaggagagagggagtaaaggggaggtaaggaggaagtaaagaggaagga

SEQ ID NO: 4697 - DNA, 96 bp, Aspergillus thermomutatus
  misc_feature: 211
atcctcccactaatcctccctcttttctttttctttccttcctctttcctctctctttccttcctctttccttcctccttacctcccctttattcc

SEQ ID NO: 4698 - DNA, 96 bp, Aspergillus thermomutatus
  misc_feature: 211
caatcacgtcagatcgcggcccgcagttcgttagccagttctggggccacttctgcagccgcttgggtatacaacgacgactatctactgccttcc

SEQ ID NO: 4699 - DNA, 96 bp, Aspergillus thermomutatus
  misc_feature: 211
gatccaatagcttccagtactgtgaacttcgcgtgctgggcatcgagcttcttgctagggcggtccgttcgtatgttgcgcaggtccaaccacact

SEQ ID NO: 4700 - DNA, 96 bp, Aspergillus thermomutatus
  misc_feature: 211
cccactaatcctccctcttttctttttctttccttcctctttcctctctctttccttcctctttccttcctccttacctcccctttattccctctc

SEQ ID NO: 4701 - DNA, 96 bp, Aspergillus thermomutatus
  misc_feature: 211
ctctctctatatctctctatctgatttggtgcttatacggtgccttactccctaccattctacctacctgtctgcctgcctctctatcttcctctc

SEQ ID NO: 4702 - DNA, 96 bp, Aspergillus thermomutatus
  misc_feature: 211
aaccgattggtgtgctcctccgtccatgtgaatggggttcctttctgtgtaagcgccgtcaacggtcgtactatgtcagagaagttccgtataaag

SEQ ID NO: 4703 - DNA, 96 bp, Aspergillus thermomutatus
  misc_feature: 211
aagagaagaaagaaaggagataagatttaagaatgaagatagtaagaaaaaggagagagggagtaaaggggaggtaaggaggaagtaaagaggaag

SEQ ID NO: 4704 - DNA, 96 bp, Aspergillus thermomutatus
  misc_feature: 211
agagaggcaggcagacaggtaggtagaatggtagggagtaaggcaccgtataagcaccaaatcagatagagagatatagagagaggtatccaagag

SEQ ID NO: 4705 - DNA, 96 bp, Aspergillus thermomutatus
  misc_feature: 211
ctaatcctccctcttttctttttctttccttcctctttcctctctctttccttcctctttccttcctccttacctcccctttattccctctctcct

SEQ ID NO: 4706 - DNA, 96 bp, Aspergillus thermomutatus
  misc_feature: 211
cgccgcaggacgcaacagactaacatggaacacattatgcacccctggtggagtatctagtcggtaagcatgtgatccaatagcttccagtactgt

SEQ ID NO: 4707 - DNA, 96 bp, Aspergillus thermomutatus
  misc_feature: 211
agagaagaaagaaaggagataagatttaagaatgaagatagtaagaaaaaggagagagggagtaaaggggaggtaaggaggaagtaaagaggaagg

SEQ ID NO: 4708 - DNA, 96 bp, Aspergillus thermomutatus
  misc_feature: 211
atcgcgttcaacgcgcggtagtcgacacagaatcgtaaccctccacctggcttgcgggcgaacagcaccggagccgcggcggaagagctactaatg

SEQ ID NO: 4709 - DNA, 96 bp, Aspergillus thermomutatus
  misc_feature: 210
tacccaagcttggcaatggtagatggtatacaactaccagcaacaactaccatgtaatggtagtccgaatggtagacgaggaaggaactatataaa

SEQ ID NO: 4710 - DNA, 96 bp, Aspergillus thermomutatus
  misc_feature: 210
tgtaagggatagggttaaaaaagaggataagaaaagaaagaagaaaaggaaaagagagagagagaagaaaaagagagagaagaaaaagagagagaa

SEQ ID NO: 4711 - DNA, 96 bp, Aspergillus thermomutatus
  misc_feature: 210
cgaaccgattggtgtgctcctccgtccatgtgaatggggttcctttctgtgtaagcgccgtcaacggtcgtactatgtcagagaagttccgtataa

SEQ ID NO: 4712 - DNA, 96 bp, Aspergillus thermomutatus
  misc_feature: 210
ttacttctcctaaactaactaacccttactcatctacttctcctctcccttctcttaaaccaacccctacttatttactgcttcctactctctaac

SEQ ID NO: 4713 - DNA, 96 bp, Aspergillus thermomutatus
  misc_feature: 210
gtgatccaatagcttccagtactgtgaacttcgcgtgctgggcatcgagcttcttgctagggcggtccgttcgtatgttgcgcaggtccaaccaca

SEQ ID NO: 4714 - DNA, 96 bp, Aspergillus thermomutatus
  misc_feature: 210
gtgtaagggatagggttaaaaaagaggataagaaaagaaagaagaaaaggaaaagagagagagagaagaaaaagagagagaagaaaaagagagaga

SEQ ID NO: 4715 - DNA, 96 bp, Aspergillus thermomutatus
  misc_feature: 210
tacctactatgcctcactgcctacctcctggggttcctctatgcctactcttggtctgccttactgcctctctccctgtcttacatggtgccttcc

SEQ ID NO: 4716 - DNA, 96 bp, Aspergillus thermomutatus
  misc_feature: 210
gtaagcccaaatggcataaccaaatattcgaagtgaccatatttcgttctgaatgccgttttccattcttcgccttctgcgattcgaatgtggtta

SEQ ID NO: 4717 - DNA, 96 bp, Aspergillus thermomutatus
  misc_feature: 210
gggaagagaagaaagaaaggagataagatttaagaatgaagatagtaagaaaaaggagagagggagtaaaggggaggtaaggaggaagtaaagagg

SEQ ID NO: 4718 - DNA, 96 bp, Aspergillus thermomutatus
  misc_feature: 210
gataagatttaagaatgaagatagtaagaaaaaggagagagggagtaaaggggaggtaaggaggaagtaaagaggaaggagagagggaataaaggg

SEQ ID NO: 4719 - DNA, 96 bp, Aspergillus thermomutatus
  misc_feature: 210
atacctactatgcctcactgcctacctcctggggttcctctatgcctactcttggtctgccttactgcctctctccctgtcttacatggtgccttc

SEQ ID NO: 4720 - DNA, 96 bp, Aspergillus thermomutatus
  misc_feature: 210
ccagtactgtgaacttcgcgtgctgggcatcgagcttcttgctagggcggtccgttcgtatgttgcgcaggtccaaccacacttttgaaccgacag

SEQ ID NO: 4721 - DNA, 96 bp, Aspergillus thermomutatus
  misc_feature: 210
catcaacgcacttaaagaatgggaatcggagctgatcagcctaccgaagtttgatatcgtcactgaccataagaatctggagtacttcacagttcg

SEQ ID NO: 4722 - DNA, 96 bp, Aspergillus thermomutatus
  misc_feature: 210
caggcaagggagtatgcatggaccctgagaaggtaaaggctatattggaatggcagaccccgacctcagcgcgcggcgtgcggtcattcctaggct

SEQ ID NO: 4723 - DNA, 96 bp, Aspergillus thermomutatus
  misc_feature: 209
aggagataagatttaagaatgaagatagtaagaaaaaggagagagggagtaaaggggaggtaaggaggaagtaaagaggaaggagagagggaataa

SEQ ID NO: 4724 - DNA, 96 bp, Aspergillus thermomutatus
  misc_feature: 209
atgatctgatgagaacagatcagtgatctgttgtgaacagatcagtgatctgttacagacatatcagtgatatgttcgaagggctatataaggaca

SEQ ID NO: 4725 - DNA, 96 bp, Aspergillus thermomutatus
  misc_feature: 209
tggacaggttacgatcgtcctacgtgggaaccagctgtcaacctcgtcaatacggccgcgctggacgcttgggagcagcgagcgggccagaacacc

SEQ ID NO: 4726 - DNA, 96 bp, Aspergillus thermomutatus
  misc_feature: 209
tctctatctgatttggtgcttatacggtgccttactccctaccattctacctacctgtctgcctgcctctctatcttcctctctatctacctctct

SEQ ID NO: 4727 - DNA, 96 bp, Aspergillus thermomutatus
  misc_feature: 209
ggtctggaatcagcaacggtttcagcaggccttgacgccgctcacgccacacacggttggccccacacttatcgcaattcttaacgaatcgtcgag

SEQ ID NO: 4728 - DNA, 96 bp, Aspergillus thermomutatus
  misc_feature: 209
agatcatggtgattgccgataggttagggaagggtgtgatattagtgccctgtgagcgaactgatgccgagaccgtagcgcagctgctaatcgacc

SEQ ID NO: 4729 - DNA, 96 bp, Aspergillus thermomutatus
  misc_feature: 209
gctacgagcacgggggtaagtccgttcttcctggaccacggatacaacctggagcctctagaggttgaggggctagagcgaggggctaccgccatt

SEQ ID NO: 4730 - DNA, 96 bp, Aspergillus thermomutatus
  misc_feature: 209
aacagactaacatggaacacattatgcacccctggtggagtatctagtcggtaagcatgtgatccaatagcttccagtactgtgaacttcgcgtgc

SEQ ID NO: 4731 - DNA, 96 bp, Aspergillus thermomutatus
  misc_feature: 209
gcacaatcacgtcagatcgcggcccgcagttcgttagccagttctggggccacttctgcagccgcttgggtatacaacgacgactatctactgcct

SEQ ID NO: 4732 - DNA, 96 bp, Aspergillus thermomutatus
  misc_feature: 209
ccttgcatggcatatctgggggtgcctcacgcggtgcattgctccatacctcctatggtgcctctctacctatctccctacctcttcacctacctc

SEQ ID NO: 4733 - DNA, 96 bp, Aspergillus thermomutatus
  misc_feature: 209
cggaagagctactaatgcggataaagttcttctccagcagctctgtcaacatctttcgtaagacaagcaattcaccgcgcgacatgctgtacagag

SEQ ID NO: 4734 - DNA, 96 bp, Aspergillus thermomutatus
  misc_feature: 209
atgcgaatcttgtggaatgcggcgatcacatcaagtttggtaaaccacttcgcctttgatatacgctccaaggtctcgttgattaggggcagcggg

SEQ ID NO: 4735 - DNA, 96 bp, Aspergillus thermomutatus
  misc_feature: 209
ccactaatcctccctcttttctttttctttccttcctctttcctctctctttccttcctctttccttcctccttacctcccctttattccctctct

SEQ ID NO: 4736 - DNA, 96 bp, Aspergillus thermomutatus
  misc_feature: 209
acctactatgcctcactgcctacctcctggggttcctctatgcctactcttggtctgccttactgcctctctccctgtcttacatggtgccttcct

SEQ ID NO: 4737 - DNA, 96 bp, Aspergillus thermomutatus
  misc_feature: 208
gaaccgattggtgtgctcctccgtccatgtgaatggggttcctttctgtgtaagcgccgtcaacggtcgtactatgtcagagaagttccgtataaa

SEQ ID NO: 4738 - DNA, 96 bp, Aspergillus thermomutatus
  misc_feature: 208
ggatgagcgtgagaaacgcgttggcagaggccgccgcaaggagtatctcgtcaaatggacaggttacgatcgtcctacgtgggaaccagctgtcaa

SEQ ID NO: 4739 - DNA, 96 bp, Aspergillus thermomutatus
  misc_feature: 208
ttctgtgttgattaccgagcattgaatgccattacgaagaaagaccgttacccccttccgctgatcaacgagacactagagcgcatcgcgaaggca

SEQ ID NO: 4740 - DNA, 96 bp, Aspergillus thermomutatus
  misc_feature: 208
tgatgctggtgcattggtaagcccaaatggcataaccaaatattcgaagtgaccatatttcgttctgaatgccgttttccattcttcgccttctgc

SEQ ID NO: 4741 - DNA, 96 bp, Aspergillus thermomutatus
  misc_feature: 208
ggaagagaagaaagaaaggagataagatttaagaatgaagatagtaagaaaaaggagagagggagtaaaggggaggtaaggaggaagtaaagagga

SEQ ID NO: 4742 - DNA, 96 bp, Aspergillus thermomutatus
  misc_feature: 208
tatcatcaacgcacttaaagaatgggaatcggagctgatcagcctaccgaagtttgatatcgtcactgaccataagaatctggagtacttcacagt

SEQ ID NO: 4743 - DNA, 96 bp, Aspergillus thermomutatus
  misc_feature: 208
gatagtccaccagtggtcccagcagagccatagtggccgtgtgagccagaaagaaaaggctaggggtgaggcagagctacagcggtcattccagta

SEQ ID NO: 4744 - DNA, 96 bp, Aspergillus thermomutatus
  misc_feature: 208
taagaatgaagatagtaagaaaaaggagagagggagtaaaggggaggtaaggaggaagtaaagaggaaggagagagggaataaaggggaggtaagg

SEQ ID NO: 4745 - DNA, 96 bp, Aspergillus thermomutatus
  misc_feature: 208
gatgagcgtgagaaacgcgttggcagaggccgccgcaaggagtatctcgtcaaatggacaggttacgatcgtcctacgtgggaaccagctgtcaac

SEQ ID NO: 4746 - DNA, 96 bp, Aspergillus thermomutatus
  misc_feature: 208
gtccacacagagtcgtagacttccatcctttttgggtacaaagagtacaccatgacctgctggcgaggttgatggtcgtatctttcccattttgag

SEQ ID NO: 4747 - DNA, 96 bp, Aspergillus thermomutatus
  misc_feature: 208
gctacctctcttgctacctctcttgctacctctcttgctacctctcttgctacctctcttgctacctctcttgctacctctcttgctacctctctt

SEQ ID NO: 4748 - DNA, 96 bp, Aspergillus thermomutatus
  misc_feature: 208
gatcgcgttcaacgcgcggtagtcgacacagaatcgtaaccctccacctggcttgcgggcgaacagcaccggagccgcggcggaagagctactaat

SEQ ID NO: 4749 - DNA, 96 bp, Aspergillus thermomutatus
  misc_feature: 208
gaagggaagagaagaaagaaaggagataagatttaagaatgaagatagtaagaaaaaggagagagggagtaaaggggaggtaaggaggaagtaaag

SEQ ID NO: 4750 - DNA, 96 bp, Aspergillus thermomutatus
  misc_feature: 208
atataaaagccacgcagggttaggtataaaggcacccacagaggccccatgtaaggcagggttaaggcaggcagagaggtaaggagataggtagag

SEQ ID NO: 4751 - DNA, 96 bp, Aspergillus thermomutatus
  misc_feature: 208
cgcggtttggtctgtacgaatggttggtgaccccttttggcatggcgaacgcaccgagtaccttccaacggtatatcaactgggcccttcgagact

SEQ ID NO: 4752 - DNA, 96 bp, Aspergillus thermomutatus
  misc_feature: 208
caacagactaacatggaacacattatgcacccctggtggagtatctagtcggtaagcatgtgatccaatagcttccagtactgtgaacttcgcgtg

SEQ ID NO: 4753 - DNA, 96 bp, Aspergillus thermomutatus
  misc_feature: 208
atgcggcgatcacatcaagtttggtaaaccacttcgcctttgatatacgctccaaggtctcgttgattaggggcagcgggtatcggtctttctttg

SEQ ID NO: 4754 - DNA, 96 bp, Aspergillus thermomutatus
  misc_feature: 208
agatagtccaccagtggtcccagcagagccatagtggccgtgtgagccagaaagaaaaggctaggggtgaggcagagctacagcggtcattccagt

SEQ ID NO: 4755 - DNA, 96 bp, Aspergillus thermomutatus
  misc_feature: 207
tatagatgtaattaaactagtccttacccttaaaagaaaggacaaggagacagggaaggacaaggcaacagaaaaggacaaggtgacaggaaagaa

SEQ ID NO: 4756 - DNA, 96 bp, Aspergillus thermomutatus
  misc_feature: 207
atagcttccagtactgtgaacttcgcgtgctgggcatcgagcttcttgctagggcggtccgttcgtatgttgcgcaggtccaaccacacttttgaa

SEQ ID NO: 4757 - DNA, 96 bp, Aspergillus thermomutatus
  misc_feature: 207
ttatagatgtaattaaactagtccttacccttaaaagaaaggacaaggagacagggaaggacaaggcaacagaaaaggacaaggtgacaggaaaga

SEQ ID NO: 4758 - DNA, 96 bp, Aspergillus thermomutatus
  misc_feature: 207
ttaagaatgaagatagtaagaaaaaggagagagggagtaaaggggaggtaaggaggaagtaaagaggaaggagagagggaataaaggggaggtaag

SEQ ID NO: 4759 - DNA, 96 bp, Aspergillus thermomutatus
  misc_feature: 207
tagatgtaattaaactagtccttacccttaaaagaaaggacaaggagacagggaaggacaaggcaacagaaaaggacaaggtgacaggaaagaaca

SEQ ID NO: 4760 - DNA, 96 bp, Aspergillus thermomutatus
  misc_feature: 207
tgcgaatcttgtggaatgcggcgatcacatcaagtttggtaaaccacttcgcctttgatatacgctccaaggtctcgttgattaggggcagcgggt

SEQ ID NO: 4761 - DNA, 96 bp, Aspergillus thermomutatus
  misc_feature: 207
aagggaagagaagaaagaaaggagataagatttaagaatgaagatagtaagaaaaaggagagagggagtaaaggggaggtaaggaggaagtaaaga

SEQ ID NO: 4762 - DNA, 96 bp, Aspergillus thermomutatus
  misc_feature: 207
caaaacacaccgttatcgtgaaaacagaccacaagaatctcacgttcttcacgaccacgaaagaattgacacgacgacaagccagatgggctgaga

SEQ ID NO: 4763 - DNA, 96 bp, Aspergillus thermomutatus
  misc_feature: 207
aagaatgaagatagtaagaaaaaggagagagggagtaaaggggaggtaaggaggaagtaaagaggaaggagagagggaataaaggggaggtaagga

SEQ ID NO: 4764 - DNA, 96 bp, Aspergillus thermomutatus
  misc_feature: 207
aatagcttccagtactgtgaacttcgcgtgctgggcatcgagcttcttgctagggcggtccgttcgtatgttgcgcaggtccaaccacacttttga

SEQ ID NO: 4765 - DNA, 96 bp, Aspergillus thermomutatus
  misc_feature: 207
gaggagaagtagatgagtaagggttagttagtttaggagaagtaaagaagggaaatagtagagtaagcatagtagggattagaagaggagaatata

SEQ ID NO: 4766 - DNA, 96 bp, Aspergillus thermomutatus
  misc_feature: 207
atagatgtaattaaactagtccttacccttaaaagaaaggacaaggagacagggaaggacaaggcaacagaaaaggacaaggtgacaggaaagaac

SEQ ID NO: 4767 - DNA, 96 bp, Aspergillus thermomutatus
  misc_feature: 207
aaaacacaccgttatcgtgaaaacagaccacaagaatctcacgttcttcacgaccacgaaagaattgacacgacgacaagccagatgggctgagac

SEQ ID NO: 4768 - DNA, 96 bp, Aspergillus thermomutatus
  misc_feature: 207
ggaagagctactaatgcggataaagttcttctccagcagctctgtcaacatctttcgtaagacaagcaattcaccgcgcgacatgctgtacagagg

SEQ ID NO: 4769 - DNA, 96 bp, Aspergillus thermomutatus
  misc_feature: 207
gaatcttgtggaatgcggcgatcacatcaagtttggtaaaccacttcgcctttgatatacgctccaaggtctcgttgattaggggcagcgggtatc

SEQ ID NO: 4770 - DNA, 96 bp, Aspergillus thermomutatus
  misc_feature: 207
gaccgttgacggcgcttacacagaaaggaaccccattcacatggacggaggagcacaccaatcggttcgagcagctaaagaagatgtttactaccg

SEQ ID NO: 4771 - DNA, 96 bp, Aspergillus thermomutatus
  misc_feature: 207
cttgtggaatgcggcgatcacatcaagtttggtaaaccacttcgcctttgatatacgctccaaggtctcgttgattaggggcagcgggtatcggtc

SEQ ID NO: 4772 - DNA, 96 bp, Aspergillus thermomutatus
  misc_feature: 207
acaatcacgtcagatcgcggcccgcagttcgttagccagttctggggccacttctgcagccgcttgggtatacaacgacgactatctactgccttc

SEQ ID NO: 4773 - DNA, 96 bp, Aspergillus thermomutatus
  misc_feature: 207
agggaagagaagaaagaaaggagataagatttaagaatgaagatagtaagaaaaaggagagagggagtaaaggggaggtaaggaggaagtaaagag

SEQ ID NO: 4774 - DNA, 96 bp, Aspergillus thermomutatus
  misc_feature: 207
caggttacgatcgtcctacgtgggaaccagctgtcaacctcgtcaatacggccgcgctggacgcttgggagcagcgagcgggccagaacacccccg

SEQ ID NO: 4775 - DNA, 96 bp, Aspergillus thermomutatus
  misc_feature: 207
cacaatcacgtcagatcgcggcccgcagttcgttagccagttctggggccacttctgcagccgcttgggtatacaacgacgactatctactgcctt

SEQ ID NO: 4776 - DNA, 96 bp, Aspergillus thermomutatus
  misc_feature: 207
aatacctactatgcctcactgcctacctcctggggttcctctatgcctactcttggtctgccttactgcctctctccctgtcttacatggtgcctt

SEQ ID NO: 4777 - DNA, 96 bp, Aspergillus thermomutatus
  misc_feature: 206
tttaagaatgaagatagtaagaaaaaggagagagggagtaaaggggaggtaaggaggaagtaaagaggaaggagagagggaataaaggggaggtaa

SEQ ID NO: 4778 - DNA, 96 bp, Aspergillus thermomutatus
  misc_feature: 206
acgtttctgtgttgattaccgagcattgaatgccattacgaagaaagaccgttacccccttccgctgatcaacgagacactagagcgcatcgcgaa

SEQ ID NO: 4779 - DNA, 96 bp, Aspergillus thermomutatus
  misc_feature: 206
tatataaaagccacgcagggttaggtataaaggcacccacagaggccccatgtaaggcagggttaaggcaggcagagaggtaaggagataggtaga

SEQ ID NO: 4780 - DNA, 96 bp, Aspergillus thermomutatus
  misc_feature: 206
tcgaaccgattggtgtgctcctccgtccatgtgaatggggttcctttctgtgtaagcgccgtcaacggtcgtactatgtcagagaagttccgtata

SEQ ID NO: 4781 - DNA, 96 bp, Aspergillus thermomutatus
  misc_feature: 206
tatatctctctatctgatttggtgcttatacggtgccttactccctaccattctacctacctgtctgcctgcctctctatcttcctctctatctac

SEQ ID NO: 4782 - DNA, 96 bp, Aspergillus thermomutatus
  misc_feature: 206
atatctctctatctgatttggtgcttatacggtgccttactccctaccattctacctacctgtctgcctgcctctctatcttcctctctatctacc

SEQ ID NO: 4783 - DNA, 96 bp, Aspergillus thermomutatus
  misc_feature: 206
acaggttacgatcgtcctacgtgggaaccagctgtcaacctcgtcaatacggccgcgctggacgcttgggagcagcgagcgggccagaacaccccc

SEQ ID NO: 4784 - DNA, 96 bp, Aspergillus thermomutatus
  misc_feature: 206
gcttccagtactgtgaacttcgcgtgctgggcatcgagcttcttgctagggcggtccgttcgtatgttgcgcaggtccaaccacacttttgaaccg

SEQ ID NO: 4785 - DNA, 96 bp, Aspergillus thermomutatus
  misc_feature: 206
gcggtttggtctgtacgaatggttggtgaccccttttggcatggcgaacgcaccgagtaccttccaacggtatatcaactgggcccttcgagactt

SEQ ID NO: 4786 - DNA, 96 bp, Aspergillus thermomutatus
  misc_feature: 206
gcgcgcgcgcgcgcgagcattaggcggcagcggtccggggcaggccagcaggcaggggggcgcgcgcgcggcggtgaccagttggccggggccctc

SEQ ID NO: 4787 - DNA, 96 bp, Aspergillus thermomutatus
  misc_feature: 206
ctcccactaatcctccctcttttctttttctttccttcctctttcctctctctttccttcctctttccttcctccttacctcccctttattccctc

SEQ ID NO: 4788 - DNA, 96 bp, Aspergillus thermomutatus
  misc_feature: 206
gagaggcaggcagacaggtaggtagaatggtagggagtaaggcaccgtataagcaccaaatcagatagagagatatagagagaggtatccaagagg

SEQ ID NO: 4789 - DNA, 96 bp, Aspergillus thermomutatus
  misc_feature: 206
acgggggtaagtccgttcttcctggaccacggatacaacctggagcctctagaggttgaggggctagagcgaggggctaccgccattgatggggtc

SEQ ID NO: 4790 - DNA, 96 bp, Aspergillus thermomutatus
  misc_feature: 206
ctaccagcaacaactaccatgtaatggtagtccgaatggtagacgaggaaggaactatataaagacactcattatcactgtatctagcattcttag

SEQ ID NO: 4791 - DNA, 96 bp, Aspergillus thermomutatus
  misc_feature: 206
cagcgtatctcaggctcgccgcgcgaaagcggttcgaatactcctcctgacgttgctgcgcggcggccagctctgactgcgccatctctgtagcct

SEQ ID NO: 4792 - DNA, 96 bp, Aspergillus thermomutatus
  misc_feature: 206
aggagaagtagatgagtaagggttagttagtttaggagaagtaaagaagggaaatagtagagtaagcatagtagggattagaagaggagaatatat

SEQ ID NO: 4793 - DNA, 96 bp, Aspergillus thermomutatus
  misc_feature: 206
accttgcatggcatatctgggggtgcctcacgcggtgcattgctccatacctcctatggtgcctctctacctatctccctacctcttcacctacct

SEQ ID NO: 4794 - DNA, 96 bp, Aspergillus thermomutatus
  misc_feature: 205
agatgtaattaaactagtccttacccttaaaagaaaggacaaggagacagggaaggacaaggcaacagaaaaggacaaggtgacaggaaagaacaa

SEQ ID NO: 4795 - DNA, 96 bp, Aspergillus thermomutatus
  misc_feature: 205
ttatactaaccttactcctattcttcttccaactcttatcattttccttttcttaaatcctacttcttctctttttttcttctttcttttcttaac

SEQ ID NO: 4796 - DNA, 96 bp, Aspergillus thermomutatus
  misc_feature: 205
gagaagggaagagaagaaagaaaggagataagatttaagaatgaagatagtaagaaaaaggagagagggagtaaaggggaggtaaggaggaagtaa

SEQ ID NO: 4797 - DNA, 96 bp, Aspergillus thermomutatus
  misc_feature: 205
cttatactaaccttactcctattcttcttccaactcttatcattttccttttcttaaatcctacttcttctctttttttcttctttcttttcttaa

SEQ ID NO: 4798 - DNA, 96 bp, Aspergillus thermomutatus
  misc_feature: 205
tctagtgtctcgttgatcagcggaagggggtaacggtctttcttcgtaatggcattcaatgctcggtaatcaacacagaaacgtagacctccacca

SEQ ID NO: 4799 - DNA, 96 bp, Aspergillus thermomutatus
  misc_feature: 205
aatcacgtcagatcgcggcccgcagttcgttagccagttctggggccacttctgcagccgcttgggtatacaacgacgactatctactgccttcca

SEQ ID NO: 4800 - DNA, 96 bp, Aspergillus thermomutatus
  misc_feature: 205
cttccagtactgtgaacttcgcgtgctgggcatcgagcttcttgctagggcggtccgttcgtatgttgcgcaggtccaaccacacttttgaaccga

SEQ ID NO: 4801 - DNA, 96 bp, Aspergillus thermomutatus
  misc_feature: 205
aggttacgatcgtcctacgtgggaaccagctgtcaacctcgtcaatacggccgcgctggacgcttgggagcagcgagcgggccagaacacccccga

SEQ ID NO: 4802 - DNA, 96 bp, Aspergillus thermomutatus
  misc_feature: 205
tccacacagagtcgtagacttccatcctttttgggtacaaagagtacaccatgacctgctggcgaggttgatggtcgtatctttcccattttgagt

SEQ ID NO: 4803 - DNA, 96 bp, Aspergillus thermomutatus
  misc_feature: 205
ctctatctgatttggtgcttatacggtgccttactccctaccattctacctacctgtctgcctgcctctctatcttcctctctatctacctctcta

SEQ ID NO: 4804 - DNA, 96 bp, Aspergillus thermomutatus
  misc_feature: 205
atttaagaatgaagatagtaagaaaaaggagagagggagtaaaggggaggtaaggaggaagtaaagaggaaggagagagggaataaaggggaggta

SEQ ID NO: 4805 - DNA, 96 bp, Aspergillus thermomutatus
  misc_feature: 205
ctaaattcgtatttaattatagatgtaattaaactagtccttacccttaaaagaaaggacaaggagacagggaaggacaaggcaacagaaaaggac

SEQ ID NO: 4806 - DNA, 96 bp, Aspergillus thermomutatus
  misc_feature: 205
ctctctatctgatttggtgcttatacggtgccttactccctaccattctacctacctgtctgcctgcctctctatcttcctctctatctacctctc

SEQ ID NO: 4807 - DNA, 96 bp, Aspergillus thermomutatus
  misc_feature: 205
ccagttgagcactgactaccagccgcccgctgtgctagtcgacggcgaggccgaatatgaggttgaatggatactggatgagcgtgagaaacgcgt

SEQ ID NO: 4808 - DNA, 96 bp, Aspergillus thermomutatus
  misc_feature: 205
atgatgctggtgcattggtaagcccaaatggcataaccaaatattcgaagtgaccatatttcgttctgaatgccgttttccattcttcgccttctg

SEQ ID NO: 4809 - DNA, 96 bp, Aspergillus thermomutatus
  misc_feature: 205
aatgatgctggtgcattggtaagcccaaatggcataaccaaatattcgaagtgaccatatttcgttctgaatgccgttttccattcttcgccttct

SEQ ID NO: 4810 - DNA, 96 bp, Aspergillus thermomutatus
  misc_feature: 205
aatgcggcgatcacatcaagtttggtaaaccacttcgcctttgatatacgctccaaggtctcgttgattaggggcagcgggtatcggtctttcttt

SEQ ID NO: 4811 - DNA, 96 bp, Aspergillus thermomutatus
  misc_feature: 204
agaagggaagagaagaaagaaaggagataagatttaagaatgaagatagtaagaaaaaggagagagggagtaaaggggaggtaaggaggaagtaaa

SEQ ID NO: 4812 - DNA, 96 bp, Aspergillus thermomutatus
  misc_feature: 204
tcattaattaattctctaaaaaatagcccattttaatatacaagacccaaagattccctagattaaataacattagtttctgattgttagtaccaa

SEQ ID NO: 4813 - DNA, 96 bp, Aspergillus thermomutatus
  misc_feature: 204
taattatagatgtaattaaactagtccttacccttaaaagaaaggacaaggagacagggaaggacaaggcaacagaaaaggacaaggtgacaggaa

SEQ ID NO: 4814 - DNA, 96 bp, Aspergillus thermomutatus
  misc_feature: 204
atacccaagcttggcaatggtagatggtatacaactaccagcaacaactaccatgtaatggtagtccgaatggtagacgaggaaggaactatataa

SEQ ID NO: 4815 - DNA, 96 bp, Aspergillus thermomutatus
  misc_feature: 204
tgtggaatgcggcgatcacatcaagtttggtaaaccacttcgcctttgatatacgctccaaggtctcgttgattaggggcagcgggtatcggtctt

SEQ ID NO: 4816 - DNA, 96 bp, Aspergillus thermomutatus
  misc_feature: 204
tgatccaatagcttccagtactgtgaacttcgcgtgctgggcatcgagcttcttgctagggcggtccgttcgtatgttgcgcaggtccaaccacac

SEQ ID NO: 4817 - DNA, 96 bp, Aspergillus thermomutatus
  misc_feature: 204
tcctcccactaatcctccctcttttctttttctttccttcctctttcctctctctttccttcctctttccttcctccttacctcccctttattccc

SEQ ID NO: 4818 - DNA, 96 bp, Aspergillus thermomutatus
  misc_feature: 204
tacttcggtcgcattgtcacgtgaccaactaccatatacccaagcttggcaatggtagatggtatacaactaccagcaacaactaccatgtaatgg

SEQ ID NO: 4819 - DNA, 96 bp, Aspergillus thermomutatus
  misc_feature: 204
tacctgccccatatggtcgctctctggctaccttggtccctaccttgcatggcatatctgggggtgcctcacgcggtgcattgctccatacctcct

SEQ ID NO: 4820 - DNA, 96 bp, Aspergillus thermomutatus
  misc_feature: 204
taccagcaacaactaccatgtaatggtagtccgaatggtagacgaggaaggaactatataaagacactcattatcactgtatctagcattcttagt

SEQ ID NO: 4821 - DNA, 96 bp, Aspergillus thermomutatus
  misc_feature: 204
gtaaggaggaaggaaagaggaaggaaagagagaggaaagaggaaggaaagaaaaagaaaagagggaggattagtgggaggattagaataagtatta

SEQ ID NO: 4822 - DNA, 96 bp, Aspergillus thermomutatus
  misc_feature: 204
gtgaggcacccccagatatgccatgcaaggtagggaccaaggtagccagagagcgaccatatggggcaggtagtatagtagggatcaacacacccc

SEQ ID NO: 4823 - DNA, 96 bp, Aspergillus thermomutatus
  misc_feature: 204
gtatataaaagccacgcagggttaggtataaaggcacccacagaggccccatgtaaggcagggttaaggcaggcagagaggtaaggagataggtag

SEQ ID NO: 4824 - DNA, 96 bp, Aspergillus thermomutatus
  misc_feature: 204
agcttccagtactgtgaacttcgcgtgctgggcatcgagcttcttgctagggcggtccgttcgtatgttgcgcaggtccaaccacacttttgaacc

SEQ ID NO: 4825 - DNA, 96 bp, Aspergillus thermomutatus
  misc_feature: 204
cgaccgttgacggcgcttacacagaaaggaaccccattcacatggacggaggagcacaccaatcggttcgagcagctaaagaagatgtttactacc

SEQ ID NO: 4826 - DNA, 96 bp, Aspergillus thermomutatus
  misc_feature: 204
gccctggggtcgatcaccgaattgagttgactaagggcgaagacgggaagccgttagaacccccatggggccctctgtacagcatgtcgcgcggtg

SEQ ID NO: 4827 - DNA, 96 bp, Aspergillus thermomutatus
  misc_feature: 204
attatagatgtaattaaactagtccttacccttaaaagaaaggacaaggagacagggaaggacaaggcaacagaaaaggacaaggtgacaggaaag

SEQ ID NO: 4828 - DNA, 96 bp, Aspergillus thermomutatus
  misc_feature: 204
ctacttcggtcgcattgtcacgtgaccaactaccatatacccaagcttggcaatggtagatggtatacaactaccagcaacaactaccatgtaatg

SEQ ID NO: 4829 - DNA, 96 bp, Aspergillus thermomutatus
  misc_feature: 204
cagttgagcactgactaccagccgcccgctgtgctagtcgacggcgaggccgaatatgaggttgaatggatactggatgagcgtgagaaacgcgtt

SEQ ID NO: 4830 - DNA, 96 bp, Aspergillus thermomutatus
  misc_feature: 204
caatagcttccagtactgtgaacttcgcgtgctgggcatcgagcttcttgctagggcggtccgttcgtatgttgcgcaggtccaaccacacttttg

SEQ ID NO: 4831 - DNA, 96 bp, Aspergillus thermomutatus
  misc_feature: 204
agaggcaggcagacaggtaggtagaatggtagggagtaaggcaccgtataagcaccaaatcagatagagagatatagagagaggtatccaagaggt

SEQ ID NO: 4832 - DNA, 96 bp, Aspergillus thermomutatus
  misc_feature: 203
ttcgccgcaggacgcaacagactaacatggaacacattatgcacccctggtggagtatctagtcggtaagcatgtgatccaatagcttccagtact

SEQ ID NO: 4833 - DNA, 96 bp, Aspergillus thermomutatus
  misc_feature: 203
tctctatatctctctatctgatttggtgcttatacggtgccttactccctaccattctacctacctgtctgcctgcctctctatcttcctctctat

SEQ ID NO: 4834 - DNA, 96 bp, Aspergillus thermomutatus
  misc_feature: 203
tctatctgatttggtgcttatacggtgccttactccctaccattctacctacctgtctgcctgcctctctatcttcctctctatctacctctctat

SEQ ID NO: 4835 - DNA, 96 bp, Aspergillus thermomutatus
  misc_feature: 203
tctaaattcgtatttaattatagatgtaattaaactagtccttacccttaaaagaaaggacaaggagacagggaaggacaaggcaacagaaaagga

SEQ ID NO: 4836 - DNA, 96 bp, Aspergillus thermomutatus
  misc_feature: 203
cgttcaacgcgcggtagtcgacacagaatcgtaaccctccacctggcttgcgggcgaacagcaccggagccgcggcggaagagctactaatgcgga

SEQ ID NO: 4837 - DNA, 96 bp, Aspergillus thermomutatus
  misc_feature: 203
ccttatactaaccttactcctattcttcttccaactcttatcattttccttttcttaaatcctacttcttctctttttttcttctttcttttctta

SEQ ID NO: 4838 - DNA, 96 bp, Aspergillus thermomutatus
  misc_feature: 203
gtttctgtgttgattaccgagcattgaatgccattacgaagaaagaccgttacccccttccgctgatcaacgagacactagagcgcatcgcgaagg

SEQ ID NO: 4839 - DNA, 96 bp, Aspergillus thermomutatus
  misc_feature: 203
gcaggacgcaacagactaacatggaacacattatgcacccctggtggagtatctagtcggtaagcatgtgatccaatagcttccagtactgtgaac

SEQ ID NO: 4840 - DNA, 96 bp, Aspergillus thermomutatus
  misc_feature: 203
gttcaacgcgcggtagtcgacacagaatcgtaaccctccacctggcttgcgggcgaacagcaccggagccgcggcggaagagctactaatgcggat

SEQ ID NO: 4841 - DNA, 96 bp, Aspergillus thermomutatus
  misc_feature: 203
gtccaccagtggtcccagcagagccatagtggccgtgtgagccagaaagaaaaggctaggggtgaggcagagctacagcggtcattccagtatgtg

SEQ ID NO: 4842 - DNA, 96 bp, Aspergillus thermomutatus
  misc_feature: 203
ggctacgtggggtgtgttgatccctactatactacctgccccatatggtcgctctctggctaccttggtccctaccttgcatggcatatctggggg

SEQ ID NO: 4843 - DNA, 96 bp, Aspergillus thermomutatus
  misc_feature: 203
atcctccctcttttctttttctttccttcctctttcctctctctttccttcctctttccttcctccttacctcccctttattccctctctccttcc

SEQ ID NO: 4844 - DNA, 96 bp, Aspergillus thermomutatus
  misc_feature: 203
ctgtgaacttcgcgtgctgggcatcgagcttcttgctagggcggtccgttcgtatgttgcgcaggtccaaccacacttttgaaccgacagcgtatc

SEQ ID NO: 4845 - DNA, 96 bp, Aspergillus thermomutatus
  misc_feature: 203
atctctctatctgatttggtgcttatacggtgccttactccctaccattctacctacctgtctgcctgcctctctatcttcctctctatctacctc

SEQ ID NO: 4846 - DNA, 96 bp, Aspergillus thermomutatus
  misc_feature: 203
gaaggagcaaaacacaccgttatcgtgaaaacagaccacaagaatctcacgttcttcacgaccacgaaagaattgacacgacgacaagccagatgg

SEQ ID NO: 4847 - DNA, 96 bp, Aspergillus thermomutatus
  misc_feature: 203
cattaattaattctctaaaaaatagcccattttaatatacaagacccaaagattccctagattaaataacattagtttctgattgttagtaccaag

SEQ ID NO: 4848 - DNA, 96 bp, Aspergillus thermomutatus
  misc_feature: 203
cgtttctgtgttgattaccgagcattgaatgccattacgaagaaagaccgttacccccttccgctgatcaacgagacactagagcgcatcgcgaag

SEQ ID NO: 4849 - DNA, 96 bp, Aspergillus thermomutatus
  misc_feature: 203
ctggggctacgtggggtgtgttgatccctactatactacctgccccatatggtcgctctctggctaccttggtccctaccttgcatggcatatctg

SEQ ID NO: 4850 - DNA, 96 bp, Aspergillus thermomutatus
  misc_feature: 203
cgaatcttgtggaatgcggcgatcacatcaagtttggtaaaccacttcgcctttgatatacgctccaaggtctcgttgattaggggcagcgggtat

SEQ ID NO: 4851 - DNA, 96 bp, Aspergillus thermomutatus
  misc_feature: 203
aggtatataaaagccacgcagggttaggtataaaggcacccacagaggccccatgtaaggcagggttaaggcaggcagagaggtaaggagataggt

SEQ ID NO: 4852 - DNA, 96 bp, Aspergillus thermomutatus
  misc_feature: 202
aattatagatgtaattaaactagtccttacccttaaaagaaaggacaaggagacagggaaggacaaggcaacagaaaaggacaaggtgacaggaaa

SEQ ID NO: 4853 - DNA, 96 bp, Aspergillus thermomutatus
  misc_feature: 202
aaattcgtatttaattatagatgtaattaaactagtccttacccttaaaagaaaggacaaggagacagggaaggacaaggcaacagaaaaggacaa

SEQ ID NO: 4854 - DNA, 96 bp, Aspergillus thermomutatus
  misc_feature: 202
gcctacttcggtcgcattgtcacgtgaccaactaccatatacccaagcttggcaatggtagatggtatacaactaccagcaacaactaccatgtaa

SEQ ID NO: 4855 - DNA, 96 bp, Aspergillus thermomutatus
  misc_feature: 202
tgtgaacttcgcgtgctgggcatcgagcttcttgctagggcggtccgttcgtatgttgcgcaggtccaaccacacttttgaaccgacagcgtatct

SEQ ID NO: 4856 - DNA, 96 bp, Aspergillus thermomutatus
  misc_feature: 202
taaattcgtatttaattatagatgtaattaaactagtccttacccttaaaagaaaggacaaggagacagggaaggacaaggcaacagaaaaggaca

SEQ ID NO: 4857 - DNA, 96 bp, Aspergillus thermomutatus
  misc_feature: 202
tccgtacgcggtttggtctgtacgaatggttggtgaccccttttggcatggcgaacgcaccgagtaccttccaacggtatatcaactgggcccttc

SEQ ID NO: 4858 - DNA, 96 bp, Aspergillus thermomutatus
  misc_feature: 202
agaaacgcgttggcagaggccgccgcaaggagtatctcgtcaaatggacaggttacgatcgtcctacgtgggaaccagctgtcaacctcgtcaata

SEQ ID NO: 4859 - DNA, 96 bp, Aspergillus thermomutatus
  misc_feature: 202
tatctctctatctgatttggtgcttatacggtgccttactccctaccattctacctacctgtctgcctgcctctctatcttcctctctatctacct

SEQ ID NO: 4860 - DNA, 96 bp, Aspergillus thermomutatus
  misc_feature: 202
tatactaaccttactcctattcttcttccaactcttatcattttccttttcttaaatcctacttcttctctttttttcttctttcttttcttaact

SEQ ID NO: 4861 - DNA, 96 bp, Aspergillus thermomutatus
  misc_feature: 202
aagcccaaatggcataaccaaatattcgaagtgaccatatttcgttctgaatgccgttttccattcttcgccttctgcgattcgaatgtggttata

SEQ ID NO: 4862 - DNA, 96 bp, Aspergillus thermomutatus
  misc_feature: 202
tagggaggtagggagggaggtagggagagaggtaggcgaagaggtaggcgacgaggtaggcgacgaggtaggtgaagaggtaggtgaagaggtagg

SEQ ID NO: 4863 - DNA, 96 bp, Aspergillus thermomutatus
  misc_feature: 202
ctctctatatctctctatctgatttggtgcttatacggtgccttactccctaccattctacctacctgtctgcctgcctctctatcttcctctcta

SEQ ID NO: 4864 - DNA, 96 bp, Aspergillus thermomutatus
  misc_feature: 202
tacttctcctaaactaactaacccttactcatctacttctcctctcccttctcttaaaccaacccctacttatttactgcttcctactctctaacc

SEQ ID NO: 4865 - DNA, 96 bp, Aspergillus thermomutatus
  misc_feature: 202
tacctctcttgctacctctcttgctacctctcttgctacctctcttgctacctctcttgctacctctcttgctacctctcttgctacctctcttgc

SEQ ID NO: 4866 - DNA, 96 bp, Aspergillus thermomutatus
  misc_feature: 202
ggtatataaaagccacgcagggttaggtataaaggcacccacagaggccccatgtaaggcagggttaaggcaggcagagaggtaaggagataggta

SEQ ID NO: 4867 - DNA, 96 bp, Aspergillus thermomutatus
  misc_feature: 202
taagcccaaatggcataaccaaatattcgaagtgaccatatttcgttctgaatgccgttttccattcttcgccttctgcgattcgaatgtggttat

SEQ ID NO: 4868 - DNA, 96 bp, Aspergillus thermomutatus
  misc_feature: 202
gaaacgcgttggcagaggccgccgcaaggagtatctcgtcaaatggacaggttacgatcgtcctacgtgggaaccagctgtcaacctcgtcaatac

SEQ ID NO: 4869 - DNA, 96 bp, Aspergillus thermomutatus
  misc_feature: 202
gtagggaggtagggagggaggtagggagagaggtaggcgaagaggtaggcgacgaggtaggcgacgaggtaggtgaagaggtaggtgaagaggtag

SEQ ID NO: 4870 - DNA, 96 bp, Aspergillus thermomutatus
  misc_feature: 202
agcacaatcacgtcagatcgcggcccgcagttcgttagccagttctggggccacttctgcagccgcttgggtatacaacgacgactatctactgcc

SEQ ID NO: 4871 - DNA, 96 bp, Aspergillus thermomutatus
  misc_feature: 202
ggcagatagtccaccagtggtcccagcagagccatagtggccgtgtgagccagaaagaaaaggctaggggtgaggcagagctacagcggtcattcc

SEQ ID NO: 4872 - DNA, 96 bp, Aspergillus thermomutatus
  misc_feature: 202
ctacctgccccatatggtcgctctctggctaccttggtccctaccttgcatggcatatctgggggtgcctcacgcggtgcattgctccatacctcc

SEQ ID NO: 4873 - DNA, 96 bp, Aspergillus thermomutatus
  misc_feature: 202
actacctgccccatatggtcgctctctggctaccttggtccctaccttgcatggcatatctgggggtgcctcacgcggtgcattgctccatacctc

SEQ ID NO: 4874 - DNA, 96 bp, Aspergillus thermomutatus
  misc_feature: 202
gaggtagggaggtagggagggaggtagggagagaggtaggcgaagaggtaggcgacgaggtaggcgacgaggtaggtgaagaggtaggtgaagagg

SEQ ID NO: 4875 - DNA, 96 bp, Aspergillus thermomutatus
  misc_feature: 202
gagcactgactaccagccgcccgctgtgctagtcgacggcgaggccgaatatgaggttgaatggatactggatgagcgtgagaaacgcgttggcag

SEQ ID NO: 4876 - DNA, 96 bp, Aspergillus thermomutatus
  misc_feature: 202
aggcaggcagacaggtaggtagaatggtagggagtaaggcaccgtataagcaccaaatcagatagagagatatagagagaggtatccaagaggtag

SEQ ID NO: 4877 - DNA, 96 bp, Aspergillus thermomutatus
  misc_feature: 202
cctcccactaatcctccctcttttctttttctttccttcctctttcctctctctttccttcctctttccttcctccttacctcccctttattccct

SEQ ID NO: 4878 - DNA, 96 bp, Aspergillus thermomutatus
  misc_feature: 202
cctacttcggtcgcattgtcacgtgaccaactaccatatacccaagcttggcaatggtagatggtatacaactaccagcaacaactaccatgtaat

SEQ ID NO: 4879 - DNA, 96 bp, Aspergillus thermomutatus
  misc_feature: 202
actgtgaacttcgcgtgctgggcatcgagcttcttgctagggcggtccgttcgtatgttgcgcaggtccaaccacacttttgaaccgacagcgtat

SEQ ID NO: 4880 - DNA, 96 bp, Aspergillus thermomutatus
  misc_feature: 201
ttgtggaatgcggcgatcacatcaagtttggtaaaccacttcgcctttgatatacgctccaaggtctcgttgattaggggcagcgggtatcggtct

SEQ ID NO: 4881 - DNA, 96 bp, Aspergillus thermomutatus
  misc_feature: 201
ttgagcactgactaccagccgcccgctgtgctagtcgacggcgaggccgaatatgaggttgaatggatactggatgagcgtgagaaacgcgttggc

SEQ ID NO: 4882 - DNA, 96 bp, Aspergillus thermomutatus
  misc_feature: 201
tcatcaacgcacttaaagaatgggaatcggagctgatcagcctaccgaagtttgatatcgtcactgaccataagaatctggagtacttcacagttc

SEQ ID NO: 4883 - DNA, 96 bp, Aspergillus thermomutatus
  misc_feature: 201
ggaggtagggagggaggtagggagagaggtaggcgaagaggtaggcgacgaggtaggcgacgaggtaggtgaagaggtaggtgaagaggtaggtga

SEQ ID NO: 4884 - DNA, 96 bp, Aspergillus thermomutatus
  misc_feature: 201
gaggcaggcagacaggtaggtagaatggtagggagtaaggcaccgtataagcaccaaatcagatagagagatatagagagaggtatccaagaggta

SEQ ID NO: 4885 - DNA, 96 bp, Aspergillus thermomutatus
  misc_feature: 201
gtgaacttcgcgtgctgggcatcgagcttcttgctagggcggtccgttcgtatgttgcgcaggtccaaccacacttttgaaccgacagcgtatctc

SEQ ID NO: 4886 - DNA, 96 bp, Aspergillus thermomutatus
  misc_feature: 201
gctagggcggtccgttcgtatgttgcgcaggtccaaccacacttttgaaccgacagcgtatctcaggctcgccgcgcgaaagcggttcgaatactc

SEQ ID NO: 4887 - DNA, 96 bp, Aspergillus thermomutatus
  misc_feature: 201
gcgtgagaaacgcgttggcagaggccgccgcaaggagtatctcgtcaaatggacaggttacgatcgtcctacgtgggaaccagctgtcaacctcgt

SEQ ID NO: 4888 - DNA, 96 bp, Aspergillus thermomutatus
  misc_feature: 201
gccagttgagcactgactaccagccgcccgctgtgctagtcgacggcgaggccgaatatgaggttgaatggatactggatgagcgtgagaaacgcg

SEQ ID NO: 4889 - DNA, 96 bp, Aspergillus thermomutatus
  misc_feature: 201
atatggtcgctctctggctaccttggtccctaccttgcatggcatatctgggggtgcctcacgcggtgcattgctccatacctcctatggtgcctc

SEQ ID NO: 4890 - DNA, 96 bp, Aspergillus thermomutatus
  misc_feature: 201
ctggatgagcgtgagaaacgcgttggcagaggccgccgcaaggagtatctcgtcaaatggacaggttacgatcgtcctacgtgggaaccagctgtc

SEQ ID NO: 4891 - DNA, 96 bp, Aspergillus thermomutatus
  misc_feature: 201
gaagagctactaatgcggataaagttcttctccagcagctctgtcaacatctttcgtaagacaagcaattcaccgcgcgacatgctgtacagaggg

SEQ ID NO: 4892 - DNA, 96 bp, Aspergillus thermomutatus
  misc_feature: 201
aattcgtatttaattatagatgtaattaaactagtccttacccttaaaagaaaggacaaggagacagggaaggacaaggcaacagaaaaggacaag

SEQ ID NO: 4893 - DNA, 96 bp, Aspergillus thermomutatus
  misc_feature: 200
ttgcatggcatatctgggggtgcctcacgcggtgcattgctccatacctcctatggtgcctctctacctatctccctacctcttcacctacctctt

SEQ ID NO: 4894 - DNA, 96 bp, Aspergillus thermomutatus
  misc_feature: 200
gaaacgatcgtacgcctcgagtggatgtaggggtctgccattctagtatagcttttaccttgtcggggtccatgcgtacgcccttgccagcttcaa

SEQ ID NO: 4895 - DNA, 96 bp, Aspergillus thermomutatus
  misc_feature: 200
tggatgagcgtgagaaacgcgttggcagaggccgccgcaaggagtatctcgtcaaatggacaggttacgatcgtcctacgtgggaaccagctgtca

SEQ ID NO: 4896 - DNA, 96 bp, Aspergillus thermomutatus
  misc_feature: 200
tgctagggcggtccgttcgtatgttgcgcaggtccaaccacacttttgaaccgacagcgtatctcaggctcgccgcgcgaaagcggttcgaatact

SEQ ID NO: 4897 - DNA, 96 bp, Aspergillus thermomutatus
  misc_feature: 200
tgagcactgactaccagccgcccgctgtgctagtcgacggcgaggccgaatatgaggttgaatggatactggatgagcgtgagaaacgcgttggca

SEQ ID NO: 4898 - DNA, 96 bp, Aspergillus thermomutatus
  misc_feature: 200
ggcaggcagacaggtaggtagaatggtagggagtaaggcaccgtataagcaccaaatcagatagagagatatagagagaggtatccaagaggtaga

SEQ ID NO: 4899 - DNA, 96 bp, Aspergillus thermomutatus
  misc_feature: 200
tcatccatggtaaggttttcattgtctgctgagttttcgagcatttcttggatgattttgtccctttttgttgcttcaataattttttgaatcagt

SEQ ID NO: 4900 - DNA, 96 bp, Aspergillus thermomutatus
  misc_feature: 200
tattaatacctactatgcctcactgcctacctcctggggttcctctatgcctactcttggtctgccttactgcctctctccctgtcttacatggtg

SEQ ID NO: 4901 - DNA, 96 bp, Aspergillus thermomutatus
  misc_feature: 200
tatactacctgccccatatggtcgctctctggctaccttggtccctaccttgcatggcatatctgggggtgcctcacgcggtgcattgctccatac

SEQ ID NO: 4902 - DNA, 96 bp, Aspergillus thermomutatus
  misc_feature: 200
acctgccccatatggtcgctctctggctaccttggtccctaccttgcatggcatatctgggggtgcctcacgcggtgcattgctccatacctccta

SEQ ID NO: 4903 - DNA, 96 bp, Aspergillus thermomutatus
  misc_feature: 200
gtcatccatggtaaggttttcattgtctgctgagttttcgagcatttcttggatgattttgtccctttttgttgcttcaataattttttgaatcag

SEQ ID NO: 4904 - DNA, 96 bp, Aspergillus thermomutatus
  misc_feature: 200
gggaggtagggagggaggtagggagagaggtaggcgaagaggtaggcgacgaggtaggcgacgaggtaggtgaagaggtaggtgaagaggtaggtg

SEQ ID NO: 4905 - DNA, 96 bp, Aspergillus thermomutatus
  misc_feature: 200
gctacgtggggtgtgttgatccctactatactacctgccccatatggtcgctctctggctaccttggtccctaccttgcatggcatatctgggggt

SEQ ID NO: 4906 - DNA, 96 bp, Aspergillus thermomutatus
  misc_feature: 200
aagagctactaatgcggataaagttcttctccagcagctctgtcaacatctttcgtaagacaagcaattcaccgcgcgacatgctgtacagagggc

SEQ ID NO: 4907 - DNA, 96 bp, Aspergillus thermomutatus
  misc_feature: 200
gcaggcagacaggtaggtagaatggtagggagtaaggcaccgtataagcaccaaatcagatagagagatatagagagaggtatccaagaggtagat

SEQ ID NO: 4908 - DNA, 96 bp, Aspergillus thermomutatus
  misc_feature: 200
gatattgcccgggcagctacattactcgcacagtataatactcggcccacaccaaagtgtgtcgcgctttggaaacgggtgcttgcatacctccag

SEQ ID NO: 4909 - DNA, 96 bp, Aspergillus thermomutatus
  misc_feature: 200
cttgcatggcatatctgggggtgcctcacgcggtgcattgctccatacctcctatggtgcctctctacctatctccctacctcttcacctacctct

SEQ ID NO: 4910 - DNA, 96 bp, Aspergillus thermomutatus
  misc_feature: 200
caaggcaacagaaaaggacaaggtgacaggaaagaacaaaatgacaggaggagcaaggtagagaggtagaggttaatttttaatagtattagaaat

SEQ ID NO: 4911 - DNA, 96 bp, Aspergillus thermomutatus
  misc_feature: 200
acctctcttgctacctctcttgctacctctcttgctacctctcttgctacctctcttgctacctctcttgctacctctcttgctacctctcttgct

SEQ ID NO: 4912 - DNA, 96 bp, Aspergillus thermomutatus
  misc_feature: 199
acatctaaattcgtatttaattatagatgtaattaaactagtccttacccttaaaagaaaggacaaggagacagggaaggacaaggcaacagaaaa

SEQ ID NO: 4913 - DNA, 96 bp, Aspergillus thermomutatus
  misc_feature: 199
aacatctaaattcgtatttaattatagatgtaattaaactagtccttacccttaaaagaaaggacaaggagacagggaaggacaaggcaacagaaa

SEQ ID NO: 4914 - DNA, 96 bp, Aspergillus thermomutatus
  misc_feature: 199
tttaattatagatgtaattaaactagtccttacccttaaaagaaaggacaaggagacagggaaggacaaggcaacagaaaaggacaaggtgacagg

SEQ ID NO: 4915 - DNA, 96 bp, Aspergillus thermomutatus
  misc_feature: 199
taacatctaaattcgtatttaattatagatgtaattaaactagtccttacccttaaaagaaaggacaaggagacagggaaggacaaggcaacagaa

SEQ ID NO: 4916 - DNA, 96 bp, Aspergillus thermomutatus
  misc_feature: 199
gaggtagggagggaggtagggagagaggtaggcgaagaggtaggcgacgaggtaggcgacgaggtaggtgaagaggtaggtgaagaggtaggtgaa

SEQ ID NO: 4917 - DNA, 96 bp, Aspergillus thermomutatus
  misc_feature: 199
ttaacatctaaattcgtatttaattatagatgtaattaaactagtccttacccttaaaagaaaggacaaggagacagggaaggacaaggcaacaga

SEQ ID NO: 4918 - DNA, 96 bp, Aspergillus thermomutatus
  misc_feature: 199
gcagatagtccaccagtggtcccagcagagccatagtggccgtgtgagccagaaagaaaaggctaggggtgaggcagagctacagcggtcattcca

SEQ ID NO: 4919 - DNA, 96 bp, Aspergillus thermomutatus
  misc_feature: 199
tgcatggcatatctgggggtgcctcacgcggtgcattgctccatacctcctatggtgcctctctacctatctccctacctcttcacctacctcttc

SEQ ID NO: 4920 - DNA, 96 bp, Aspergillus thermomutatus
  misc_feature: 199
tgagcgtgagaaacgcgttggcagaggccgccgcaaggagtatctcgtcaaatggacaggttacgatcgtcctacgtgggaaccagctgtcaacct

SEQ ID NO: 4921 - DNA, 96 bp, Aspergillus thermomutatus
  misc_feature: 199
tcgcgttcaacgcgcggtagtcgacacagaatcgtaaccctccacctggcttgcgggcgaacagcaccggagccgcggcggaagagctactaatgc

SEQ ID NO: 4922 - DNA, 96 bp, Aspergillus thermomutatus
  misc_feature: 199
ctatactacctgccccatatggtcgctctctggctaccttggtccctaccttgcatggcatatctgggggtgcctcacgcggtgcattgctccata

SEQ ID NO: 4923 - DNA, 96 bp, Aspergillus thermomutatus
  misc_feature: 199
taggtatataaaagccacgcagggttaggtataaaggcacccacagaggccccatgtaaggcagggttaaggcaggcagagaggtaaggagatagg

SEQ ID NO: 4924 - DNA, 96 bp, Aspergillus thermomutatus
  misc_feature: 199
cctctcttgctacctctcttgctacctctcttgctacctctcttgctacctctcttgctacctctcttgctacctctcttgctacctctcttgcta

SEQ ID NO: 4925 - DNA, 96 bp, Aspergillus thermomutatus
  misc_feature: 199
actaccagcaacaactaccatgtaatggtagtccgaatggtagacgaggaaggaactatataaagacactcattatcactgtatctagcattctta

SEQ ID NO: 4926 - DNA, 96 bp, Aspergillus thermomutatus
  misc_feature: 199
gaggcacccccagatatgccatgcaaggtagggaccaaggtagccagagagcgaccatatggggcaggtagtatagtagggatcaacacaccccac

SEQ ID NO: 4927 - DNA, 96 bp, Aspergillus thermomutatus
  misc_feature: 199
gtaggtatataaaagccacgcagggttaggtataaaggcacccacagaggccccatgtaaggcagggttaaggcaggcagagaggtaaggagatag

SEQ ID NO: 4928 - DNA, 96 bp, Aspergillus thermomutatus
  misc_feature: 199
atactacctgccccatatggtcgctctctggctaccttggtccctaccttgcatggcatatctgggggtgcctcacgcggtgcattgctccatacc

SEQ ID NO: 4929 - DNA, 96 bp, Aspergillus thermomutatus
  misc_feature: 199
agagctactaatgcggataaagttcttctccagcagctctgtcaacatctttcgtaagacaagcaattcaccgcgcgacatgctgtacagagggcc

SEQ ID NO: 4930 - DNA, 96 bp, Aspergillus thermomutatus
  misc_feature: 199
ggcacccccagatatgccatgcaaggtagggaccaaggtagccagagagcgaccatatggggcaggtagtatagtagggatcaacacaccccacgt

SEQ ID NO: 4931 - DNA, 96 bp, Aspergillus thermomutatus
  misc_feature: 199
ctagggcggtccgttcgtatgttgcgcaggtccaaccacacttttgaaccgacagcgtatctcaggctcgccgcgcgaaagcggttcgaatactcc

SEQ ID NO: 4932 - DNA, 96 bp, Aspergillus thermomutatus
  misc_feature: 199
acgcaacagactaacatggaacacattatgcacccctggtggagtatctagtcggtaagcatgtgatccaatagcttccagtactgtgaacttcgc

SEQ ID NO: 4933 - DNA, 96 bp, Aspergillus thermomutatus
  misc_feature: 199
cgtgagaaacgcgttggcagaggccgccgcaaggagtatctcgtcaaatggacaggttacgatcgtcctacgtgggaaccagctgtcaacctcgtc

SEQ ID NO: 4934 - DNA, 96 bp, Aspergillus thermomutatus
  misc_feature: 199
aggtagggagggaggtagggagagaggtaggcgaagaggtaggcgacgaggtaggcgacgaggtaggtgaagaggtaggtgaagaggtaggtgaag

SEQ ID NO: 4935 - DNA, 96 bp, Aspergillus thermomutatus
  misc_feature: 199
cagatagtccaccagtggtcccagcagagccatagtggccgtgtgagccagaaagaaaaggctaggggtgaggcagagctacagcggtcattccag

SEQ ID NO: 4936 - DNA, 96 bp, Aspergillus thermomutatus
  misc_feature: 199
agcgtgagaaacgcgttggcagaggccgccgcaaggagtatctcgtcaaatggacaggttacgatcgtcctacgtgggaaccagctgtcaacctcg

SEQ ID NO: 4937 - DNA, 96 bp, Aspergillus thermomutatus
  misc_feature: 199
ccccatatggtcgctctctggctaccttggtccctaccttgcatggcatatctgggggtgcctcacgcggtgcattgctccatacctcctatggtg

SEQ ID NO: 4938 - DNA, 96 bp, Aspergillus thermomutatus
  misc_feature: 199
aaggcaacagaaaaggacaaggtgacaggaaagaacaaaatgacaggaggagcaaggtagagaggtagaggttaatttttaatagtattagaaatg

SEQ ID NO: 4939 - DNA, 96 bp, Aspergillus thermomutatus
  misc_feature: 199
aaacgatcgtacgcctcgagtggatgtaggggtctgccattctagtatagcttttaccttgtcggggtccatgcgtacgcccttgccagcttcaat

SEQ ID NO: 4940 - DNA, 96 bp, Aspergillus thermomutatus
  misc_feature: 199
aggtagggaggtagggagggaggtagggagagaggtaggcgaagaggtaggcgacgaggtaggcgacgaggtaggtgaagaggtaggtgaagaggt

SEQ ID NO: 4941 - DNA, 96 bp, Aspergillus thermomutatus
  misc_feature: 198
tgtaggtatataaaagccacgcagggttaggtataaaggcacccacagaggccccatgtaaggcagggttaaggcaggcagagaggtaaggagata

SEQ ID NO: 4942 - DNA, 96 bp, Aspergillus thermomutatus
  misc_feature: 198
tgaggcacccccagatatgccatgcaaggtagggaccaaggtagccagagagcgaccatatggggcaggtagtatagtagggatcaacacacccca

SEQ ID NO: 4943 - DNA, 96 bp, Aspergillus thermomutatus
  misc_feature: 198
tgaatacgtcacagcactgtttccagaggaagtacccgagagttctgaggatgagggacatcgctctgaaggatcgcgagagttagcggcaacttc

SEQ ID NO: 4944 - DNA, 96 bp, Aspergillus thermomutatus
  misc_feature: 198
tctggggctacgtggggtgtgttgatccctactatactacctgccccatatggtcgctctctggctaccttggtccctaccttgcatggcatatct

SEQ ID NO: 4945 - DNA, 96 bp, Aspergillus thermomutatus
  misc_feature: 198
tctctctatctgatttggtgcttatacggtgccttactccctaccattctacctacctgtctgcctgcctctctatcttcctctctatctacctct

SEQ ID NO: 4946 - DNA, 96 bp, Aspergillus thermomutatus
  misc_feature: 198
tccttatactaaccttactcctattcttcttccaactcttatcattttccttttcttaaatcctacttcttctctttttttcttctttcttttctt

SEQ ID NO: 4947 - DNA, 96 bp, Aspergillus thermomutatus
  misc_feature: 198
tccatggtaaggttttcattgtctgctgagttttcgagcatttcttggatgattttgtccctttttgttgcttcaataattttttgaatcagtgga

SEQ ID NO: 4948 - DNA, 96 bp, Aspergillus thermomutatus
  misc_feature: 198
ggagaagtagatgagtaagggttagttagtttaggagaagtaaagaagggaaatagtagagtaagcatagtagggattagaagaggagaatatata

SEQ ID NO: 4949 - DNA, 96 bp, Aspergillus thermomutatus
  misc_feature: 198
tacttcttcattaattaattctctaaaaaatagcccattttaatatacaagacccaaagattccctagattaaataacattagtttctgattgtta

SEQ ID NO: 4950 - DNA, 96 bp, Aspergillus thermomutatus
  misc_feature: 198
tactacctgccccatatggtcgctctctggctaccttggtccctaccttgcatggcatatctgggggtgcctcacgcggtgcattgctccatacct

SEQ ID NO: 4951 - DNA, 96 bp, Aspergillus thermomutatus
  misc_feature: 198
gcacccccagatatgccatgcaaggtagggaccaaggtagccagagagcgaccatatggggcaggtagtatagtagggatcaacacaccccacgta

SEQ ID NO: 4952 - DNA, 96 bp, Aspergillus thermomutatus
  misc_feature: 198
gttgagcactgactaccagccgcccgctgtgctagtcgacggcgaggccgaatatgaggttgaatggatactggatgagcgtgagaaacgcgttgg

SEQ ID NO: 4953 - DNA, 96 bp, Aspergillus thermomutatus
  misc_feature: 198
ggggctacgtggggtgtgttgatccctactatactacctgccccatatggtcgctctctggctaccttggtccctaccttgcatggcatatctggg

SEQ ID NO: 4954 - DNA, 96 bp, Aspergillus thermomutatus
  misc_feature: 198
gggctacgtggggtgtgttgatccctactatactacctgccccatatggtcgctctctggctaccttggtccctaccttgcatggcatatctgggg

SEQ ID NO: 4955 - DNA, 96 bp, Aspergillus thermomutatus
  misc_feature: 198
gcgttggcagaggccgccgcaaggagtatctcgtcaaatggacaggttacgatcgtcctacgtgggaaccagctgtcaacctcgtcaatacggccg

SEQ ID NO: 4956 - DNA, 96 bp, Aspergillus thermomutatus
  misc_feature: 198
gcaacagactaacatggaacacattatgcacccctggtggagtatctagtcggtaagcatgtgatccaatagcttccagtactgtgaacttcgcgt

SEQ ID NO: 4957 - DNA, 96 bp, Aspergillus thermomutatus
  misc_feature: 198
ccctctctctcttaaattctttcttaaactattaattcctctctctttctcactccctcttcctcctttcttgcatttctttattctcttaacatc

SEQ ID NO: 4958 - DNA, 96 bp, Aspergillus thermomutatus
  misc_feature: 198
cgcaacagactaacatggaacacattatgcacccctggtggagtatctagtcggtaagcatgtgatccaatagcttccagtactgtgaacttcgcg

SEQ ID NO: 4959 - DNA, 96 bp, Aspergillus thermomutatus
  misc_feature: 198
cctgccccatatggtcgctctctggctaccttggtccctaccttgcatggcatatctgggggtgcctcacgcggtgcattgctccatacctcctat

SEQ ID NO: 4960 - DNA, 96 bp, Aspergillus thermomutatus
  misc_feature: 198
ataagatttaagaatgaagatagtaagaaaaaggagagagggagtaaaggggaggtaaggaggaagtaaagaggaaggagagagggaataaagggg

SEQ ID NO: 4961 - DNA, 96 bp, Aspergillus thermomutatus
  misc_feature: 198
agttgagcactgactaccagccgcccgctgtgctagtcgacggcgaggccgaatatgaggttgaatggatactggatgagcgtgagaaacgcgttg

SEQ ID NO: 4962 - DNA, 96 bp, Aspergillus thermomutatus
  misc_feature: 198
atgaatacgtcacagcactgtttccagaggaagtacccgagagttctgaggatgagggacatcgctctgaaggatcgcgagagttagcggcaactt

SEQ ID NO: 4963 - DNA, 96 bp, Aspergillus thermomutatus
  misc_feature: 197
ttaaagggaatttaaagtaggaaagaaaagagagagtaagggttagttagtttagaaggagaaaggacggaaagcagaagagatagagggatggtt

SEQ ID NO: 4964 - DNA, 96 bp, Aspergillus thermomutatus
  misc_feature: 197
tggggctacgtggggtgtgttgatccctactatactacctgccccatatggtcgctctctggctaccttggtccctaccttgcatggcatatctgg

SEQ ID NO: 4965 - DNA, 96 bp, Aspergillus thermomutatus
  misc_feature: 197
tccaccagtggtcccagcagagccatagtggccgtgtgagccagaaagaaaaggctaggggtgaggcagagctacagcggtcattccagtatgtgt

SEQ ID NO: 4966 - DNA, 96 bp, Aspergillus thermomutatus
  misc_feature: 197
ggataaagttcttctccagcagctctgtcaacatctttcgtaagacaagcaattcaccgcgcgacatgctgtacagagggccccatgggggttcta

SEQ ID NO: 4967 - DNA, 96 bp, Aspergillus thermomutatus
  misc_feature: 197
gggagggaggtagggagagaggtaggcgaagaggtaggcgacgaggtaggcgacgaggtaggtgaagaggtaggtgaagaggtaggtgaagaggta

SEQ ID NO: 4968 - DNA, 96 bp, Aspergillus thermomutatus
  misc_feature: 197
gttggcagaggccgccgcaaggagtatctcgtcaaatggacaggttacgatcgtcctacgtgggaaccagctgtcaacctcgtcaatacggccgcg

SEQ ID NO: 4969 - DNA, 96 bp, Aspergillus thermomutatus
  misc_feature: 197
ctttttatcctctctttcttttctatcccttcttttctttctatccctctactcctcctcctattccttacttacccctctttacctctcttaacc

SEQ ID NO: 4970 - DNA, 96 bp, Aspergillus thermomutatus
  misc_feature: 197
ctttactccttcttctactctttacttcactttttatcctctctttcttttctatcccttcttttctttctatccctctactcctcctcctattcc

SEQ ID NO: 4971 - DNA, 96 bp, Aspergillus thermomutatus
  misc_feature: 197
accgattggtgtgctcctccgtccatgtgaatggggttcctttctgtgtaagcgccgtcaacggtcgtactatgtcagagaagttccgtataaagc

SEQ ID NO: 4972 - DNA, 96 bp, Aspergillus thermomutatus
  misc_feature: 197
cgttggcagaggccgccgcaaggagtatctcgtcaaatggacaggttacgatcgtcctacgtgggaaccagctgtcaacctcgtcaatacggccgc

SEQ ID NO: 4973 - DNA, 96 bp, Aspergillus thermomutatus
  misc_feature: 197
gccccatatggtcgctctctggctaccttggtccctaccttgcatggcatatctgggggtgcctcacgcggtgcattgctccatacctcctatggt

SEQ ID NO: 4974 - DNA, 96 bp, Aspergillus thermomutatus
  misc_feature: 197
cccatatggtcgctctctggctaccttggtccctaccttgcatggcatatctgggggtgcctcacgcggtgcattgctccatacctcctatggtgc

SEQ ID NO: 4975 - DNA, 96 bp, Aspergillus thermomutatus
  misc_feature: 197
gcaaaacacaccgttatcgtgaaaacagaccacaagaatctcacgttcttcacgaccacgaaagaattgacacgacgacaagccagatgggctgag

SEQ ID NO: 4976 - DNA, 96 bp, Aspergillus thermomutatus
  misc_feature: 197
gagcgtgagaaacgcgttggcagaggccgccgcaaggagtatctcgtcaaatggacaggttacgatcgtcctacgtgggaaccagctgtcaacctc

SEQ ID NO: 4977 - DNA, 96 bp, Aspergillus thermomutatus
  misc_feature: 197
cagcagctctgtcaacatctttcgtaagacaagcaattcaccgcgcgacatgctgtacagagggccccatgggggttctaacggcttcccgtcttc

SEQ ID NO: 4978 - DNA, 96 bp, Aspergillus thermomutatus
  misc_feature: 197
cttcttcattaattaattctctaaaaaatagcccattttaatatacaagacccaaagattccctagattaaataacattagtttctgattgttagt

SEQ ID NO: 4979 - DNA, 96 bp, Aspergillus thermomutatus
  misc_feature: 197
agaggtagggaggtagggagggaggtagggagagaggtaggcgaagaggtaggcgacgaggtaggcgacgaggtaggtgaagaggtaggtgaagag

SEQ ID NO: 4980 - DNA, 96 bp, Aspergillus thermomutatus
  misc_feature: 197
ctactaatgcggataaagttcttctccagcagctctgtcaacatctttcgtaagacaagcaattcaccgcgcgacatgctgtacagagggccccat

SEQ ID NO: 4981 - DNA, 96 bp, Aspergillus thermomutatus
  misc_feature: 197
acttcttcattaattaattctctaaaaaatagcccattttaatatacaagacccaaagattccctagattaaataacattagtttctgattgttag

SEQ ID NO: 4982 - DNA, 96 bp, Aspergillus thermomutatus
  misc_feature: 197
atgtaggtatataaaagccacgcagggttaggtataaaggcacccacagaggccccatgtaaggcagggttaaggcaggcagagaggtaaggagat

SEQ ID NO: 4983 - DNA, 96 bp, Aspergillus thermomutatus
  misc_feature: 197
aggcaacagaaaaggacaaggtgacaggaaagaacaaaatgacaggaggagcaaggtagagaggtagaggttaatttttaatagtattagaaatgt

SEQ ID NO: 4984 - DNA, 96 bp, Aspergillus thermomutatus
  misc_feature: 196
ttcttcattaattaattctctaaaaaatagcccattttaatatacaagacccaaagattccctagattaaataacattagtttctgattgttagta

SEQ ID NO: 4985 - DNA, 96 bp, Aspergillus thermomutatus
  misc_feature: 196
ttctccagcagctctgtcaacatctttcgtaagacaagcaattcaccgcgcgacatgctgtacagagggccccatgggggttctaacggcttcccg

SEQ ID NO: 4986 - DNA, 96 bp, Aspergillus thermomutatus
  misc_feature: 196
cgcaggacgcaacagactaacatggaacacattatgcacccctggtggagtatctagtcggtaagcatgtgatccaatagcttccagtactgtgaa

SEQ ID NO: 4987 - DNA, 96 bp, Aspergillus thermomutatus
  misc_feature: 196
ttacttcttcattaattaattctctaaaaaatagcccattttaatatacaagacccaaagattccctagattaaataacattagtttctgattgtt

SEQ ID NO: 4988 - DNA, 96 bp, Aspergillus thermomutatus
  misc_feature: 196
ttaattatagatgtaattaaactagtccttacccttaaaagaaaggacaaggagacagggaaggacaaggcaacagaaaaggacaaggtgacagga

SEQ ID NO: 4989 - DNA, 96 bp, Aspergillus thermomutatus
  misc_feature: 196
aaacacaccgttatcgtgaaaacagaccacaagaatctcacgttcttcacgaccacgaaagaattgacacgacgacaagccagatgggctgagaca

SEQ ID NO: 4990 - DNA, 96 bp, Aspergillus thermomutatus
  misc_feature: 196
tatttaattatagatgtaattaaactagtccttacccttaaaagaaaggacaaggagacagggaaggacaaggcaacagaaaaggacaaggtgaca

SEQ ID NO: 4991 - DNA, 96 bp, Aspergillus thermomutatus
  misc_feature: 196
tgctacctctcttgctacctctcttgctacctctcttgctacctctcttgctacctctcttgctacctctcttgctacctctcttgctacctctct

SEQ ID NO: 4992 - DNA, 96 bp, Aspergillus thermomutatus
  misc_feature: 196
tcttcattaattaattctctaaaaaatagcccattttaatatacaagacccaaagattccctagattaaataacattagtttctgattgttagtac

SEQ ID NO: 4993 - DNA, 96 bp, Aspergillus thermomutatus
  misc_feature: 196
tatggtcgctctctggctaccttggtccctaccttgcatggcatatctgggggtgcctcacgcggtgcattgctccatacctcctatggtgcctct

SEQ ID NO: 4994 - DNA, 96 bp, Aspergillus thermomutatus
  misc_feature: 196
ggtagggaggtagggagggaggtagggagagaggtaggcgaagaggtaggcgacgaggtaggcgacgaggtaggtgaagaggtaggtgaagaggta

SEQ ID NO: 4995 - DNA, 96 bp, Aspergillus thermomutatus
  misc_feature: 196
atcttccctctctctcttaaattctttcttaaactattaattcctctctctttctcactccctcttcctcctttcttgcatttctttattctctta

SEQ ID NO: 4996 - DNA, 96 bp, Aspergillus thermomutatus
  misc_feature: 196
taaagggaatttaaagtaggaaagaaaagagagagtaagggttagttagtttagaaggagaaaggacggaaagcagaagagatagagggatggtta

SEQ ID NO: 4997 - DNA, 96 bp, Aspergillus thermomutatus
  misc_feature: 196
taaagttcttctccagcagctctgtcaacatctttcgtaagacaagcaattcaccgcgcgacatgctgtacagagggccccatgggggttctaacg

SEQ ID NO: 4998 - DNA, 96 bp, Aspergillus thermomutatus
  misc_feature: 196
gttaaagggaatttaaagtaggaaagaaaagagagagtaagggttagttagtttagaaggagaaaggacggaaagcagaagagatagagggatggt

SEQ ID NO: 4999 - DNA, 96 bp, Aspergillus thermomutatus
  misc_feature: 196
gtcgctctctggctaccttggtccctaccttgcatggcatatctgggggtgcctcacgcggtgcattgctccatacctcctatggtgcctctctac

SEQ ID NO: 5000 - DNA, 96 bp, Aspergillus thermomutatus
  misc_feature: 196
gtatttaattatagatgtaattaaactagtccttacccttaaaagaaaggacaaggagacagggaaggacaaggcaacagaaaaggacaaggtgac

SEQ ID NO: 5001 - DNA, 96 bp, Aspergillus thermomutatus
  misc_feature: 196
atgagcgtgagaaacgcgttggcagaggccgccgcaaggagtatctcgtcaaatggacaggttacgatcgtcctacgtgggaaccagctgtcaacc

SEQ ID NO: 5002 - DNA, 96 bp, Aspergillus thermomutatus
  misc_feature: 196
agctactaatgcggataaagttcttctccagcagctctgtcaacatctttcgtaagacaagcaattcaccgcgcgacatgctgtacagagggcccc

SEQ ID NO: 5003 - DNA, 96 bp, Aspergillus thermomutatus
  misc_feature: 196
ccatatggtcgctctctggctaccttggtccctaccttgcatggcatatctgggggtgcctcacgcggtgcattgctccatacctcctatggtgcc

SEQ ID NO: 5004 - DNA, 96 bp, Aspergillus thermomutatus
  misc_feature: 196
attaatacctactatgcctcactgcctacctcctggggttcctctatgcctactcttggtctgccttactgcctctctccctgtcttacatggtgc

SEQ ID NO: 5005 - DNA, 96 bp, Aspergillus thermomutatus
  misc_feature: 196
gattacttcttcattaattaattctctaaaaaatagcccattttaatatacaagacccaaagattccctagattaaataacattagtttctgattg

SEQ ID NO: 5006 - DNA, 96 bp, Aspergillus thermomutatus
  misc_feature: 196
atggtcgctctctggctaccttggtccctaccttgcatggcatatctgggggtgcctcacgcggtgcattgctccatacctcctatggtgcctctc

SEQ ID NO: 5007 - DNA, 96 bp, Aspergillus thermomutatus
  misc_feature: 196
agggcccagttgatataccgttggaaggtactcggtgcgttcgccatgccaaaaggggtcaccaaccattcgtacagaccaaaccgcgtacggaag

SEQ ID NO: 5008 - DNA, 96 bp, Aspergillus thermomutatus
  misc_feature: 196
atttaattatagatgtaattaaactagtccttacccttaaaagaaaggacaaggagacagggaaggacaaggcaacagaaaaggacaaggtgacag

SEQ ID NO: 5009 - DNA, 96 bp, Aspergillus thermomutatus
  misc_feature: 196
ctgccccatatggtcgctctctggctaccttggtccctaccttgcatggcatatctgggggtgcctcacgcggtgcattgctccatacctcctatg

SEQ ID NO: 5010 - DNA, 96 bp, Aspergillus thermomutatus
  misc_feature: 196
aggcacccccagatatgccatgcaaggtagggaccaaggtagccagagagcgaccatatggggcaggtagtatagtagggatcaacacaccccacg

SEQ ID NO: 5011 - DNA, 96 bp, Aspergillus thermomutatus
  misc_feature: 196
ccgattggtgtgctcctccgtccatgtgaatggggttcctttctgtgtaagcgccgtcaacggtcgtactatgtcagagaagttccgtataaagcg

SEQ ID NO: 5012 - DNA, 96 bp, Aspergillus thermomutatus
  misc_feature: 196
agatttaagaatgaagatagtaagaaaaaggagagagggagtaaaggggaggtaaggaggaagtaaagaggaaggagagagggaataaaggggagg

SEQ ID NO: 5013 - DNA, 96 bp, Aspergillus thermomutatus
  misc_feature: 196
atccatggtaaggttttcattgtctgctgagttttcgagcatttcttggatgattttgtccctttttgttgcttcaataattttttgaatcagtgg

SEQ ID NO: 5014 - DNA, 96 bp, Aspergillus thermomutatus
  misc_feature: 196
agtcgacggcgaggccgaatatgaggttgaatggatactggatgagcgtgagaaacgcgttggcagaggccgccgcaaggagtatctcgtcaaatg

SEQ ID NO: 5015 - DNA, 96 bp, Aspergillus thermomutatus
  misc_feature: 196
catcttccctctctctcttaaattctttcttaaactattaattcctctctctttctcactccctcttcctcctttcttgcatttctttattctctt

SEQ ID NO: 5016 - DNA, 96 bp, Aspergillus thermomutatus
  misc_feature: 196
catccatggtaaggttttcattgtctgctgagttttcgagcatttcttggatgattttgtccctttttgttgcttcaataattttttgaatcagtg

SEQ ID NO: 5017 - DNA, 96 bp, Aspergillus thermomutatus
  misc_feature: 196
agggaggtagggagggaggtagggagagaggtaggcgaagaggtaggcgacgaggtaggcgacgaggtaggtgaagaggtaggtgaagaggtaggt

SEQ ID NO: 5018 - DNA, 96 bp, Aspergillus thermomutatus
  misc_feature: 196
accattacatggtagttgttgctggtagttgtataccatctaccattgccaagcttgggtatatggtagttggtcacgtgacaatgcgaccgaagt

SEQ ID NO: 5019 - DNA, 96 bp, Aspergillus thermomutatus
  misc_feature: 195
aagggcccagttgatataccgttggaaggtactcggtgcgttcgccatgccaaaaggggtcaccaaccattcgtacagaccaaaccgcgtacggaa

SEQ ID NO: 5020 - DNA, 96 bp, Aspergillus thermomutatus
  misc_feature: 195
ttcattaattaattctctaaaaaatagcccattttaatatacaagacccaaagattccctagattaaataacattagtttctgattgttagtacca

SEQ ID NO: 5021 - DNA, 96 bp, Aspergillus thermomutatus
  misc_feature: 195
tcttccctctctctcttaaattctttcttaaactattaattcctctctctttctcactccctcttcctcctttcttgcatttctttattctcttaa

SEQ ID NO: 5022 - DNA, 96 bp, Aspergillus thermomutatus
  misc_feature: 195
agaaacgatcgtacgcctcgagtggatgtaggggtctgccattctagtatagcttttaccttgtcggggtccatgcgtacgcccttgccagcttca

SEQ ID NO: 5023 - DNA, 96 bp, Aspergillus thermomutatus
  misc_feature: 195
gagaggtagggaggtagggagggaggtagggagagaggtaggcgaagaggtaggcgacgaggtaggcgacgaggtaggtgaagaggtaggtgaaga

SEQ ID NO: 5024 - DNA, 96 bp, Aspergillus thermomutatus
  misc_feature: 195
tctcatcttccctctctctcttaaattctttcttaaactattaattcctctctctttctcactccctcttcctcctttcttgcatttctttattct

SEQ ID NO: 5025 - DNA, 96 bp, Aspergillus thermomutatus
  misc_feature: 195
actaccattacatggtagttgttgctggtagttgtataccatctaccattgccaagcttgggtatatggtagttggtcacgtgacaatgcgaccga

SEQ ID NO: 5026 - DNA, 96 bp, Aspergillus thermomutatus
  misc_feature: 195
taagatttaagaatgaagatagtaagaaaaaggagagagggagtaaaggggaggtaaggaggaagtaaagaggaaggagagagggaataaagggga

SEQ ID NO: 5027 - DNA, 96 bp, Aspergillus thermomutatus
  misc_feature: 195
tagggagggaggtagggagagaggtaggcgaagaggtaggcgacgaggtaggcgacgaggtaggtgaagaggtaggtgaagaggtaggtgaagagg

SEQ ID NO: 5028 - DNA, 96 bp, Aspergillus thermomutatus
  misc_feature: 195
taatacctactatgcctcactgcctacctcctggggttcctctatgcctactcttggtctgccttactgcctctctccctgtcttacatggtgcct

SEQ ID NO: 5029 - DNA, 96 bp, Aspergillus thermomutatus
  misc_feature: 195
gtagggagggaggtagggagagaggtaggcgaagaggtaggcgacgaggtaggcgacgaggtaggtgaagaggtaggtgaagaggtaggtgaagag

SEQ ID NO: 5030 - DNA, 96 bp, Aspergillus thermomutatus
  misc_feature: 195
gggcccagttgatataccgttggaaggtactcggtgcgttcgccatgccaaaaggggtcaccaaccattcgtacagaccaaaccgcgtacggaagg

SEQ ID NO: 5031 - DNA, 96 bp, Aspergillus thermomutatus
  misc_feature: 195
ggacgcaacagactaacatggaacacattatgcacccctggtggagtatctagtcggtaagcatgtgatccaatagcttccagtactgtgaacttc

SEQ ID NO: 5032 - DNA, 96 bp, Aspergillus thermomutatus
  misc_feature: 195
aagttcttctccagcagctctgtcaacatctttcgtaagacaagcaattcaccgcgcgacatgctgtacagagggccccatgggggttctaacggc

SEQ ID NO: 5033 - DNA, 96 bp, Aspergillus thermomutatus
  misc_feature: 195
attcggactaccattacatggtagttgttgctggtagttgtataccatctaccattgccaagcttgggtatatggtagttggtcacgtgacaatgc

SEQ ID NO: 5034 - DNA, 96 bp, Aspergillus thermomutatus
  misc_feature: 195
ctatttactttactccttcttctactctttacttcactttttatcctctctttcttttctatcccttcttttctttctatccctctactcctcctc

SEQ ID NO: 5035 - DNA, 96 bp, Aspergillus thermomutatus
  misc_feature: 195
ctcatcttccctctctctcttaaattctttcttaaactattaattcctctctctttctcactccctcttcctcctttcttgcatttctttattctc

SEQ ID NO: 5036 - DNA, 96 bp, Aspergillus thermomutatus
  misc_feature: 195
ctccagcagctctgtcaacatctttcgtaagacaagcaattcaccgcgcgacatgctgtacagagggccccatgggggttctaacggcttcccgtc

SEQ ID NO: 5037 - DNA, 96 bp, Aspergillus thermomutatus
  misc_feature: 195
actttactccttcttctactctttacttcactttttatcctctctttcttttctatcccttcttttctttctatccctctactcctcctcctattc

SEQ ID NO: 5038 - DNA, 96 bp, Aspergillus thermomutatus
  misc_feature: 195
aagatttaagaatgaagatagtaagaaaaaggagagagggagtaaaggggaggtaaggaggaagtaaagaggaaggagagagggaataaaggggag

SEQ ID NO: 5039 - DNA, 96 bp, Aspergillus thermomutatus
  misc_feature: 195
cacccccagatatgccatgcaaggtagggaccaaggtagccagagagcgaccatatggggcaggtagtatagtagggatcaacacaccccacgtag

SEQ ID NO: 5040 - DNA, 96 bp, Aspergillus thermomutatus
  misc_feature: 195
aaagttcttctccagcagctctgtcaacatctttcgtaagacaagcaattcaccgcgcgacatgctgtacagagggccccatgggggttctaacgg

SEQ ID NO: 5041 - DNA, 96 bp, Aspergillus thermomutatus
  misc_feature: 195
cccccgcatcgccctggggtcgatcaccgaattgagttgactaagggcgaagacgggaagccgttagaacccccatggggccctctgtacagcatg

SEQ ID NO: 5042 - DNA, 96 bp, Aspergillus thermomutatus
  misc_feature: 195
ccagcagctctgtcaacatctttcgtaagacaagcaattcaccgcgcgacatgctgtacagagggccccatgggggttctaacggcttcccgtctt

SEQ ID NO: 5043 - DNA, 96 bp, Aspergillus thermomutatus
  misc_feature: 195
caagaagggaagtcaccagcatgcaagaagttgtatcagatgtcagaaaaagaatcaacgacactaaaagaatacatcgatgaacaactcaaaatg

SEQ ID NO: 5044 - DNA, 96 bp, Aspergillus thermomutatus
  misc_feature: 195
agaaggagcaaaacacaccgttatcgtgaaaacagaccacaagaatctcacgttcttcacgaccacgaaagaattgacacgacgacaagccagatg

SEQ ID NO: 5045 - DNA, 96 bp, Aspergillus thermomutatus
  misc_feature: 195
atctatatatgtttagtttagatatatggtcagcagaaattaatctagataatactcttaatatgactagtggtgatggaggaaattcttattttg

SEQ ID NO: 5046 - DNA, 96 bp, Aspergillus thermomutatus
  misc_feature: 195
aggtaaggaggaaggaaagaggaaggaaagagagaggaaagaggaaggaaagaaaaagaaaagagggaggattagtgggaggattagaataagtat

SEQ ID NO: 5047 - DNA, 96 bp, Aspergillus thermomutatus
  misc_feature: 195
aatgaatacgtcacagcactgtttccagaggaagtacccgagagttctgaggatgagggacatcgctctgaaggatcgcgagagttagcggcaact

SEQ ID NO: 5048 - DNA, 96 bp, Aspergillus thermomutatus
  misc_feature: 195
agggagggaggtagggagagaggtaggcgaagaggtaggcgacgaggtaggcgacgaggtaggtgaagaggtaggtgaagaggtaggtgaagaggt

SEQ ID NO: 5049 - DNA, 96 bp, Aspergillus thermomutatus
  misc_feature: 194
ttcggactaccattacatggtagttgttgctggtagttgtataccatctaccattgccaagcttgggtatatggtagttggtcacgtgacaatgcg

SEQ ID NO: 5050 - DNA, 96 bp, Aspergillus thermomutatus
  misc_feature: 194
ttaatacctactatgcctcactgcctacctcctggggttcctctatgcctactcttggtctgccttactgcctctctccctgtcttacatggtgcc

SEQ ID NO: 5051 - DNA, 96 bp, Aspergillus thermomutatus
  misc_feature: 194
tggtcgctctctggctaccttggtccctaccttgcatggcatatctgggggtgcctcacgcggtgcattgctccatacctcctatggtgcctctct

SEQ ID NO: 5052 - DNA, 96 bp, Aspergillus thermomutatus
  misc_feature: 194
tgccccatatggtcgctctctggctaccttggtccctaccttgcatggcatatctgggggtgcctcacgcggtgcattgctccatacctcctatgg

SEQ ID NO: 5053 - DNA, 96 bp, Aspergillus thermomutatus
  misc_feature: 194
ggtagggagggaggtagggagagaggtaggcgaagaggtaggcgacgaggtaggcgacgaggtaggtgaagaggtaggtgaagaggtaggtgaaga

SEQ ID NO: 5054 - DNA, 96 bp, Aspergillus thermomutatus
  misc_feature: 194
tcctccctcttttctttttctttccttcctctttcctctctctttccttcctctttccttcctccttacctcccctttattccctctctccttcct

SEQ ID NO: 5055 - DNA, 96 bp, Aspergillus thermomutatus
  misc_feature: 194
caggcagacaggtaggtagaatggtagggagtaaggcaccgtataagcaccaaatcagatagagagatatagagagaggtatccaagaggtagata

SEQ ID NO: 5056 - DNA, 96 bp, Aspergillus thermomutatus
  misc_feature: 194
taggcagagaggtagggaggtagggagggaggtagggagagaggtaggcgaagaggtaggcgacgaggtaggcgacgaggtaggtgaagaggtagg

SEQ ID NO: 5057 - DNA, 96 bp, Aspergillus thermomutatus
  misc_feature: 194
ggtcgctctctggctaccttggtccctaccttgcatggcatatctgggggtgcctcacgcggtgcattgctccatacctcctatggtgcctctcta

SEQ ID NO: 5058 - DNA, 96 bp, Aspergillus thermomutatus
  misc_feature: 194
tagaaggagcaaaacacaccgttatcgtgaaaacagaccacaagaatctcacgttcttcacgaccacgaaagaattgacacgacgacaagccagat

SEQ ID NO: 5059 - DNA, 96 bp, Aspergillus thermomutatus
  misc_feature: 194
taccagccgcccgctgtgctagtcgacggcgaggccgaatatgaggttgaatggatactggatgagcgtgagaaacgcgttggcagaggccgccgc

SEQ ID NO: 5060 - DNA, 96 bp, Aspergillus thermomutatus
  misc_feature: 194
cttccctctctctcttaaattctttcttaaactattaattcctctctctttctcactccctcttcctcctttcttgcatttctttattctcttaac

SEQ ID NO: 5061 - DNA, 96 bp, Aspergillus thermomutatus
  misc_feature: 194
gctctagtgtctcgttgatcagcggaagggggtaacggtctttcttcgtaatggcattcaatgctcggtaatcaacacagaaacgtagacctccac

SEQ ID NO: 5062 - DNA, 96 bp, Aspergillus thermomutatus
  misc_feature: 194
cggactaccattacatggtagttgttgctggtagttgtataccatctaccattgccaagcttgggtatatggtagttggtcacgtgacaatgcgac

SEQ ID NO: 5063 - DNA, 96 bp, Aspergillus thermomutatus
  misc_feature: 194
gtaggcagagaggtagggaggtagggagggaggtagggagagaggtaggcgaagaggtaggcgacgaggtaggcgacgaggtaggtgaagaggtag

SEQ ID NO: 5064 - DNA, 96 bp, Aspergillus thermomutatus
  misc_feature: 194
cttcattaattaattctctaaaaaatagcccattttaatatacaagacccaaagattccctagattaaataacattagtttctgattgttagtacc

SEQ ID NO: 5065 - DNA, 96 bp, Aspergillus thermomutatus
  misc_feature: 194
cctctctctcttaaattctttcttaaactattaattcctctctctttctcactccctcttcctcctttcttgcatttctttattctcttaacatcc

SEQ ID NO: 5066 - DNA, 96 bp, Aspergillus thermomutatus
  misc_feature: 194
ctgatattgcccgggcagctacattactcgcacagtataatactcggcccacaccaaagtgtgtcgcgctttggaaacgggtgcttgcatacctcc

SEQ ID NO: 5067 - DNA, 96 bp, Aspergillus thermomutatus
  misc_feature: 194
ctctggggctacgtggggtgtgttgatccctactatactacctgccccatatggtcgctctctggctaccttggtccctaccttgcatggcatatc

SEQ ID NO: 5068 - DNA, 96 bp, Aspergillus thermomutatus
  misc_feature: 194
cccatacaagaagggaagtcaccagcatgcaagaagttgtatcagatgtcagaaaaagaatcaacgacactaaaagaatacatcgatgaacaactc

SEQ ID NO: 5069 - DNA, 96 bp, Aspergillus thermomutatus
  misc_feature: 194
cctaaactaactaacccttactcatctacttctcctctcccttctcttaaaccaacccctacttatttactgcttcctactctctaaccatccctc

SEQ ID NO: 5070 - DNA, 96 bp, Aspergillus thermomutatus
  misc_feature: 194
gagaaacgatcgtacgcctcgagtggatgtaggggtctgccattctagtatagcttttaccttgtcggggtccatgcgtacgcccttgccagcttc

SEQ ID NO: 5071 - DNA, 96 bp, Aspergillus thermomutatus
  misc_feature: 194
ccaccagtggtcccagcagagccatagtggccgtgtgagccagaaagaaaaggctaggggtgaggcagagctacagcggtcattccagtatgtgtc

SEQ ID NO: 5072 - DNA, 96 bp, Aspergillus thermomutatus
  misc_feature: 194
agagaggtagggaggtagggagggaggtagggagagaggtaggcgaagaggtaggcgacgaggtaggcgacgaggtaggtgaagaggtaggtgaag

SEQ ID NO: 5073 - DNA, 96 bp, Aspergillus thermomutatus
  misc_feature: 194
cctagaaggagcaaaacacaccgttatcgtgaaaacagaccacaagaatctcacgttcttcacgaccacgaaagaattgacacgacgacaagccag

SEQ ID NO: 5074 - DNA, 96 bp, Aspergillus thermomutatus
  misc_feature: 194
ctaccagccgcccgctgtgctagtcgacggcgaggccgaatatgaggttgaatggatactggatgagcgtgagaaacgcgttggcagaggccgccg

SEQ ID NO: 5075 - DNA, 96 bp, Aspergillus thermomutatus
  misc_feature: 194
catctatatatgtttagtttagatatatggtcagcagaaattaatctagataatactcttaatatgactagtggtgatggaggaaattcttatttt

SEQ ID NO: 5076 - DNA, 96 bp, Aspergillus thermomutatus
  misc_feature: 194
catatggtcgctctctggctaccttggtccctaccttgcatggcatatctgggggtgcctcacgcggtgcattgctccatacctcctatggtgcct

SEQ ID NO: 5077 - DNA, 96 bp, Aspergillus thermomutatus
  misc_feature: 194
attacttcttcattaattaattctctaaaaaatagcccattttaatatacaagacccaaagattccctagattaaataacattagtttctgattgt

SEQ ID NO: 5078 - DNA, 96 bp, Aspergillus thermomutatus
  misc_feature: 194
aggcagacaggtaggtagaatggtagggagtaaggcaccgtataagcaccaaatcagatagagagatatagagagaggtatccaagaggtagatat

SEQ ID NO: 5079 - DNA, 96 bp, Aspergillus thermomutatus
  misc_feature: 193
atacaagaagggaagtcaccagcatgcaagaagttgtatcagatgtcagaaaaagaatcaacgacactaaaagaatacatcgatgaacaactcaaa

SEQ ID NO: 5080 - DNA, 96 bp, Aspergillus thermomutatus
  misc_feature: 193
ttgctagggcggtccgttcgtatgttgcgcaggtccaaccacacttttgaaccgacagcgtatctcaggctcgccgcgcgaaagcggttcgaatac

SEQ ID NO: 5081 - DNA, 96 bp, Aspergillus thermomutatus
  misc_feature: 193
tggcagatagtccaccagtggtcccagcagagccatagtggccgtgtgagccagaaagaaaaggctaggggtgaggcagagctacagcggtcattc

SEQ ID NO: 5082 - DNA, 96 bp, Aspergillus thermomutatus
  misc_feature: 193
tgctgggcatcgagcttcttgctagggcggtccgttcgtatgttgcgcaggtccaaccacacttttgaaccgacagcgtatctcaggctcgccgcg

SEQ ID NO: 5083 - DNA, 96 bp, Aspergillus thermomutatus
  misc_feature: 193
ccatacaagaagggaagtcaccagcatgcaagaagttgtatcagatgtcagaaaaagaatcaacgacactaaaagaatacatcgatgaacaactca

SEQ ID NO: 5084 - DNA, 96 bp, Aspergillus thermomutatus
  misc_feature: 193
ctagaaggagcaaaacacaccgttatcgtgaaaacagaccacaagaatctcacgttcttcacgaccacgaaagaattgacacgacgacaagccaga

SEQ ID NO: 5085 - DNA, 96 bp, Aspergillus thermomutatus
  misc_feature: 193
agcactgactaccagccgcccgctgtgctagtcgacggcgaggccgaatatgaggttgaatggatactggatgagcgtgagaaacgcgttggcaga

SEQ ID NO: 5086 - DNA, 96 bp, Aspergillus thermomutatus
  misc_feature: 193
tcctaaactaactaacccttactcatctacttctcctctcccttctcttaaaccaacccctacttatttactgcttcctactctctaaccatccct

SEQ ID NO: 5087 - DNA, 96 bp, Aspergillus thermomutatus
  misc_feature: 193
tcatcttccctctctctcttaaattctttcttaaactattaattcctctctctttctcactccctcttcctcctttcttgcatttctttattctct

SEQ ID NO: 5088 - DNA, 96 bp, Aspergillus thermomutatus
  misc_feature: 193
gcagagaggtagggaggtagggagggaggtagggagagaggtaggcgaagaggtaggcgacgaggtaggcgacgaggtaggtgaagaggtaggtga

SEQ ID NO: 5089 - DNA, 96 bp, Aspergillus thermomutatus
  misc_feature: 193
gtcgacggcgaggccgaatatgaggttgaatggatactggatgagcgtgagaaacgcgttggcagaggccgccgcaaggagtatctcgtcaaatgg

SEQ ID NO: 5090 - DNA, 96 bp, Aspergillus thermomutatus
  misc_feature: 193
gagctactaatgcggataaagttcttctccagcagctctgtcaacatctttcgtaagacaagcaattcaccgcgcgacatgctgtacagagggccc

SEQ ID NO: 5091 - DNA, 96 bp, Aspergillus thermomutatus
  misc_feature: 193
gcgctctagtgtctcgttgatcagcggaagggggtaacggtctttcttcgtaatggcattcaatgctcggtaatcaacacagaaacgtagacctcc

SEQ ID NO: 5092 - DNA, 96 bp, Aspergillus thermomutatus
  misc_feature: 193
cgattggtgtgctcctccgtccatgtgaatggggttcctttctgtgtaagcgccgtcaacggtcgtactatgtcagagaagttccgtataaagcgc

SEQ ID NO: 5093 - DNA, 96 bp, Aspergillus thermomutatus
  misc_feature: 193
acgcgttggcagaggccgccgcaaggagtatctcgtcaaatggacaggttacgatcgtcctacgtgggaaccagctgtcaacctcgtcaatacggc

SEQ ID NO: 5094 - DNA, 96 bp, Aspergillus thermomutatus
  misc_feature: 193
agcgtatctcaggctcgccgcgcgaaagcggttcgaatactcctcctgacgttgctgcgcggcggccagctctgactgcgccatctctgtagcctc

SEQ ID NO: 5095 - DNA, 96 bp, Aspergillus thermomutatus
  misc_feature: 193
gacgcaacagactaacatggaacacattatgcacccctggtggagtatctagtcggtaagcatgtgatccaatagcttccagtactgtgaacttcg

SEQ ID NO: 5096 - DNA, 96 bp, Aspergillus thermomutatus
  misc_feature: 193
ctcttggtctgccttactgcctctctccctgtcttacatggtgccttcctccctaccttatattatacattcttcgctacctcacgcggtgcatct

SEQ ID NO: 5097 - DNA, 96 bp, Aspergillus thermomutatus
  misc_feature: 193
ctcttgctacctctcttgctacctctcttgctacctctcttgctacctctcttgctacctctcttgctacctctcttgctacctctcttgctacct

SEQ ID NO: 5098 - DNA, 96 bp, Aspergillus thermomutatus
  misc_feature: 193
atatgtaggtatataaaagccacgcagggttaggtataaaggcacccacagaggccccatgtaaggcagggttaaggcaggcagagaggtaaggag

SEQ ID NO: 5099 - DNA, 96 bp, Aspergillus thermomutatus
  misc_feature: 193
aaagggaatttaaagtaggaaagaaaagagagagtaagggttagttagtttagaaggagaaaggacggaaagcagaagagatagagggatggttag

SEQ ID NO: 5100 - DNA, 96 bp, Aspergillus thermomutatus
  misc_feature: 193
cacaccgttatcgtgaaaacagaccacaagaatctcacgttcttcacgaccacgaaagaattgacacgacgacaagccagatgggctgagacattg

SEQ ID NO: 5101 - DNA, 96 bp, Aspergillus thermomutatus
  misc_feature: 193
aaactaactaacccttactcatctacttctcctctcccttctcttaaaccaacccctacttatttactgcttcctactctctaaccatccctctat

SEQ ID NO: 5102 - DNA, 96 bp, Aspergillus thermomutatus
  misc_feature: 193
actatttactttactccttcttctactctttacttcactttttatcctctctttcttttctatcccttcttttctttctatccctctactcctcct

SEQ ID NO: 5103 - DNA, 96 bp, Aspergillus thermomutatus
  misc_feature: 193
acaccgttatcgtgaaaacagaccacaagaatctcacgttcttcacgaccacgaaagaattgacacgacgacaagccagatgggctgagacattgt

SEQ ID NO: 5104 - DNA, 96 bp, Aspergillus thermomutatus
  misc_feature: 192
tacaagaagggaagtcaccagcatgcaagaagttgtatcagatgtcagaaaaagaatcaacgacactaaaagaatacatcgatgaacaactcaaaa

SEQ ID NO: 5105 - DNA, 96 bp, Aspergillus thermomutatus
  misc_feature: 192
ctagtcgacggcgaggccgaatatgaggttgaatggatactggatgagcgtgagaaacgcgttggcagaggccgccgcaaggagtatctcgtcaaa

SEQ ID NO: 5106 - DNA, 96 bp, Aspergillus thermomutatus
  misc_feature: 192
gcgcgctgacgagatataggtgtgggctcatcaacctgctcaacaagtggcatatcaagctgctgaacacgattctggccttcttgtacagataaa

SEQ ID NO: 5107 - DNA, 96 bp, Aspergillus thermomutatus
  misc_feature: 192
gctagtcgacggcgaggccgaatatgaggttgaatggatactggatgagcgtgagaaacgcgttggcagaggccgccgcaaggagtatctcgtcaa

SEQ ID NO: 5108 - DNA, 96 bp, Aspergillus thermomutatus
  misc_feature: 192
ctaccattacatggtagttgttgctggtagttgtataccatctaccattgccaagcttgggtatatggtagttggtcacgtgacaatgcgaccgaa

SEQ ID NO: 5109 - DNA, 96 bp, Aspergillus thermomutatus
  misc_feature: 192
cagagaggtagggaggtagggagggaggtagggagagaggtaggcgaagaggtaggcgacgaggtaggcgacgaggtaggtgaagaggtaggtgaa

SEQ ID NO: 5110 - DNA, 96 bp, Aspergillus thermomutatus
  misc_feature: 192
ttaagcatgtagtggctcaacagatcacccaggcagtgtctcaatggcatgatattcaccatgatagcagtgccatccagatcccacatgcatttg

SEQ ID NO: 5111 - DNA, 96 bp, Aspergillus thermomutatus
  misc_feature: 192
tgtcatccatggtaaggttttcattgtctgctgagttttcgagcatttcttggatgattttgtccctttttgttgcttcaataattttttgaatca

SEQ ID NO: 5112 - DNA, 96 bp, Aspergillus thermomutatus
  misc_feature: 192
tgaacttcgcgtgctgggcatcgagcttcttgctagggcggtccgttcgtatgttgcgcaggtccaaccacacttttgaaccgacagcgtatctca

SEQ ID NO: 5113 - DNA, 96 bp, Aspergillus thermomutatus
  misc_feature: 192
tcttaagcatgtagtggctcaacagatcacccaggcagtgtctcaatggcatgatattcaccatgatagcagtgccatccagatcccacatgcatt

SEQ ID NO: 5114 - DNA, 96 bp, Aspergillus thermomutatus
  misc_feature: 192
tatgtaggtatataaaagccacgcagggttaggtataaaggcacccacagaggccccatgtaaggcagggttaaggcaggcagagaggtaaggaga

SEQ ID NO: 5115 - DNA, 96 bp, Aspergillus thermomutatus
  misc_feature: 192
tctccagcagctctgtcaacatctttcgtaagacaagcaattcaccgcgcgacatgctgtacagagggccccatgggggttctaacggcttcccgt

SEQ ID NO: 5116 - DNA, 96 bp, Aspergillus thermomutatus
  misc_feature: 192
tctactctttacttcactttttatcctctctttcttttctatcccttcttttctttctatccctctactcctcctcctattccttacttacccctc

SEQ ID NO: 5117 - DNA, 96 bp, Aspergillus thermomutatus
  misc_feature: 192
tcgacggcgaggccgaatatgaggttgaatggatactggatgagcgtgagaaacgcgttggcagaggccgccgcaaggagtatctcgtcaaatgga

SEQ ID NO: 5118 - DNA, 96 bp, Aspergillus thermomutatus
  misc_feature: 192
tccctctctctcttaaattctttcttaaactattaattcctctctctttctcactccctcttcctcctttcttgcatttctttattctcttaacat

SEQ ID NO: 5119 - DNA, 96 bp, Aspergillus thermomutatus
  misc_feature: 192
tcactttttatcctctctttcttttctatcccttcttttctttctatccctctactcctcctcctattccttacttacccctctttacctctctta

SEQ ID NO: 5120 - DNA, 96 bp, Aspergillus thermomutatus
  misc_feature: 192
cgtatttaattatagatgtaattaaactagtccttacccttaaaagaaaggacaaggagacagggaaggacaaggcaacagaaaaggacaaggtga

SEQ ID NO: 5121 - DNA, 96 bp, Aspergillus thermomutatus
  misc_feature: 192
tagtcgacggcgaggccgaatatgaggttgaatggatactggatgagcgtgagaaacgcgttggcagaggccgccgcaaggagtatctcgtcaaat

SEQ ID NO: 5122 - DNA, 96 bp, Aspergillus thermomutatus
  misc_feature: 192
agagaagggaagagaagaaagaaaggagataagatttaagaatgaagatagtaagaaaaaggagagagggagtaaaggggaggtaaggaggaagta

SEQ ID NO: 5123 - DNA, 96 bp, Aspergillus thermomutatus
  misc_feature: 192
ggtaggcagagaggtagggaggtagggagggaggtagggagagaggtaggcgaagaggtaggcgacgaggtaggcgacgaggtaggtgaagaggta

SEQ ID NO: 5124 - DNA, 96 bp, Aspergillus thermomutatus
  misc_feature: 192
taccattacatggtagttgttgctggtagttgtataccatctaccattgccaagcttgggtatatggtagttggtcacgtgacaatgcgaccgaag

SEQ ID NO: 5125 - DNA, 96 bp, Aspergillus thermomutatus
  misc_feature: 192
cgacggcgaggccgaatatgaggttgaatggatactggatgagcgtgagaaacgcgttggcagaggccgccgcaaggagtatctcgtcaaatggac

SEQ ID NO: 5126 - DNA, 96 bp, Aspergillus thermomutatus
  misc_feature: 192
ctctcttgctacctctcttgctacctctcttgctacctctcttgctacctctcttgctacctctcttgctacctctcttgctacctctcttgctac

SEQ ID NO: 5127 - DNA, 96 bp, Aspergillus thermomutatus
  misc_feature: 192
ggcccagttgatataccgttggaaggtactcggtgcgttcgccatgccaaaaggggtcaccaaccattcgtacagaccaaaccgcgtacggaaggc

SEQ ID NO: 5128 - DNA, 96 bp, Aspergillus thermomutatus
  misc_feature: 192
caaatcaatgcgaaagcattggcagatagtccaccagtggtcccagcagagccatagtggccgtgtgagccagaaagaaaaggctaggggtgaggc

SEQ ID NO: 5129 - DNA, 96 bp, Aspergillus thermomutatus
  misc_feature: 192
gcactgactaccagccgcccgctgtgctagtcgacggcgaggccgaatatgaggttgaatggatactggatgagcgtgagaaacgcgttggcagag

SEQ ID NO: 5130 - DNA, 96 bp, Aspergillus thermomutatus
  misc_feature: 192
ctgtcatccatggtaaggttttcattgtctgctgagttttcgagcatttcttggatgattttgtccctttttgttgcttcaataattttttgaatc

SEQ ID NO: 5131 - DNA, 96 bp, Aspergillus thermomutatus
  misc_feature: 192
gagagaagggaagagaagaaagaaaggagataagatttaagaatgaagatagtaagaaaaaggagagagggagtaaaggggaggtaaggaggaagt

SEQ ID NO: 5132 - DNA, 96 bp, Aspergillus thermomutatus
  misc_feature: 192
caccgttatcgtgaaaacagaccacaagaatctcacgttcttcacgaccacgaaagaattgacacgacgacaagccagatgggctgagacattgtc

SEQ ID NO: 5133 - DNA, 96 bp, Aspergillus thermomutatus
  misc_feature: 192
ctaaactaactaacccttactcatctacttctcctctcccttctcttaaaccaacccctacttatttactgcttcctactctctaaccatccctct

SEQ ID NO: 5134 - DNA, 96 bp, Aspergillus thermomutatus
  misc_feature: 192
atctaaattcgtatttaattatagatgtaattaaactagtccttacccttaaaagaaaggacaaggagacagggaaggacaaggcaacagaaaagg

SEQ ID NO: 5135 - DNA, 96 bp, Aspergillus thermomutatus
  misc_feature: 192
attcgtatttaattatagatgtaattaaactagtccttacccttaaaagaaaggacaaggagacagggaaggacaaggcaacagaaaaggacaagg

SEQ ID NO: 5136 - DNA, 96 bp, Aspergillus thermomutatus
  misc_feature: 192
cactgactaccagccgcccgctgtgctagtcgacggcgaggccgaatatgaggttgaatggatactggatgagcgtgagaaacgcgttggcagagg

SEQ ID NO: 5137 - DNA, 96 bp, Aspergillus thermomutatus
  misc_feature: 192
acaagaagggaagtcaccagcatgcaagaagttgtatcagatgtcagaaaaagaatcaacgacactaaaagaatacatcgatgaacaactcaaaat

SEQ ID NO: 5138 - DNA, 96 bp, Aspergillus thermomutatus
  misc_feature: 192
aggtaggcagagaggtagggaggtagggagggaggtagggagagaggtaggcgaagaggtaggcgacgaggtaggcgacgaggtaggtgaagaggt

SEQ ID NO: 5139 - DNA, 96 bp, Aspergillus thermomutatus
  misc_feature: 192
acacaccgttatcgtgaaaacagaccacaagaatctcacgttcttcacgaccacgaaagaattgacacgacgacaagccagatgggctgagacatt

SEQ ID NO: 5140 - DNA, 96 bp, Aspergillus thermomutatus
  misc_feature: 191
ttgctacctctcttgctacctctcttgctacctctcttgctacctctcttgctacctctcttgctacctctcttgctacctctcttgctacctctc

SEQ ID NO: 5141 - DNA, 96 bp, Aspergillus thermomutatus
  misc_feature: 191
ttcactttttatcctctctttcttttctatcccttcttttctttctatccctctactcctcctcctattccttacttacccctctttacctctctt

SEQ ID NO: 5142 - DNA, 96 bp, Aspergillus thermomutatus
  misc_feature: 191
ggcgataccccctccatccacggtgctggcgcatcccatccagccggttgaatgatgatcgcctcgctctgctggccatcccatcctgctcagcca

SEQ ID NO: 5143 - DNA, 96 bp, Aspergillus thermomutatus
  misc_feature: 191
tcttgctacctctcttgctacctctcttgctacctctcttgctacctctcttgctacctctcttgctacctctcttgctacctctcttgctacctc

SEQ ID NO: 5144 - DNA, 96 bp, Aspergillus thermomutatus
  misc_feature: 191
aagggaatttaaagtaggaaagaaaagagagagtaagggttagttagtttagaaggagaaaggacggaaagcagaagagatagagggatggttaga

SEQ ID NO: 5145 - DNA, 96 bp, Aspergillus thermomutatus
  misc_feature: 191
tcgtatttaattatagatgtaattaaactagtccttacccttaaaagaaaggacaaggagacagggaaggacaaggcaacagaaaaggacaaggtg

SEQ ID NO: 5146 - DNA, 96 bp, Aspergillus thermomutatus
  misc_feature: 191
tccagcagctctgtcaacatctttcgtaagacaagcaattcaccgcgcgacatgctgtacagagggccccatgggggttctaacggcttcccgtct

SEQ ID NO: 5147 - DNA, 96 bp, Aspergillus thermomutatus
  misc_feature: 191
aaagattacttcttcattaattaattctctaaaaaatagcccattttaatatacaagacccaaagattccctagattaaataacattagtttctga

SEQ ID NO: 5148 - DNA, 96 bp, Aspergillus thermomutatus
  misc_feature: 191
tcaaatcaatgcgaaagcattggcagatagtccaccagtggtcccagcagagccatagtggccgtgtgagccagaaagaaaaggctaggggtgagg

SEQ ID NO: 5149 - DNA, 96 bp, Aspergillus thermomutatus
  misc_feature: 191
tagggcggtccgttcgtatgttgcgcaggtccaaccacacttttgaaccgacagcgtatctcaggctcgccgcgcgaaagcggttcgaatactcct

SEQ ID NO: 5150 - DNA, 96 bp, Aspergillus thermomutatus
  misc_feature: 191
tactaatgcggataaagttcttctccagcagctctgtcaacatctttcgtaagacaagcaattcaccgcgcgacatgctgtacagagggccccatg

SEQ ID NO: 5151 - DNA, 96 bp, Aspergillus thermomutatus
  misc_feature: 191
gtcaacatctttcgtaagacaagcaattcaccgcgcgacatgctgtacagagggccccatgggggttctaacggcttcccgtcttcgcccttagtc

SEQ ID NO: 5152 - DNA, 96 bp, Aspergillus thermomutatus
  misc_feature: 191
ccttactctttcattcatcctttgctcctttttctactactctaaattatttctttctctccttttcttctctcctcttaacaaactatcccttac

SEQ ID NO: 5153 - DNA, 96 bp, Aspergillus thermomutatus
  misc_feature: 191
ggttaaagggaatttaaagtaggaaagaaaagagagagtaagggttagttagtttagaaggagaaaggacggaaagcagaagagatagagggatgg

SEQ ID NO: 5154 - DNA, 96 bp, Aspergillus thermomutatus
  misc_feature: 191
ctgactaccagccgcccgctgtgctagtcgacggcgaggccgaatatgaggttgaatggatactggatgagcgtgagaaacgcgttggcagaggcc

SEQ ID NO: 5155 - DNA, 96 bp, Aspergillus thermomutatus
  misc_feature: 191
cgcgttggcagaggccgccgcaaggagtatctcgtcaaatggacaggttacgatcgtcctacgtgggaaccagctgtcaacctcgtcaatacggcc

SEQ ID NO: 5156 - DNA, 96 bp, Aspergillus thermomutatus
  misc_feature: 191
ggcagagaggtagggaggtagggagggaggtagggagagaggtaggcgaagaggtaggcgacgaggtaggcgacgaggtaggtgaagaggtaggtg

SEQ ID NO: 5157 - DNA, 96 bp, Aspergillus thermomutatus
  misc_feature: 191
gcggctgcagaagtggccccagaactggctaacgaactgcgggccgcgatctgacgtgattgtgctaggtacgccatggtagccgatgaatcggtc

SEQ ID NO: 5158 - DNA, 96 bp, Aspergillus thermomutatus
  misc_feature: 191
actgactaccagccgcccgctgtgctagtcgacggcgaggccgaatatgaggttgaatggatactggatgagcgtgagaaacgcgttggcagaggc

SEQ ID NO: 5159 - DNA, 96 bp, Aspergillus thermomutatus
  misc_feature: 191
gactaccattacatggtagttgttgctggtagttgtataccatctaccattgccaagcttgggtatatggtagttggtcacgtgacaatgcgaccg

SEQ ID NO: 5160 - DNA, 96 bp, Aspergillus thermomutatus
  misc_feature: 191
cttgctacctctcttgctacctctcttgctacctctcttgctacctctcttgctacctctcttgctacctctcttgctacctctcttgctacctct

SEQ ID NO: 5161 - DNA, 96 bp, Aspergillus thermomutatus
  misc_feature: 191
cttaagcatgtagtggctcaacagatcacccaggcagtgtctcaatggcatgatattcaccatgatagcagtgccatccagatcccacatgcattt

SEQ ID NO: 5162 - DNA, 96 bp, Aspergillus thermomutatus
  misc_feature: 191
atcaaatcaatgcgaaagcattggcagatagtccaccagtggtcccagcagagccatagtggccgtgtgagccagaaagaaaaggctaggggtgag

SEQ ID NO: 5163 - DNA, 96 bp, Aspergillus thermomutatus
  misc_feature: 191
ctactctttacttcactttttatcctctctttcttttctatcccttcttttctttctatccctctactcctcctcctattccttacttacccctct

SEQ ID NO: 5164 - DNA, 96 bp, Aspergillus thermomutatus
  misc_feature: 191
aacgcgttggcagaggccgccgcaaggagtatctcgtcaaatggacaggttacgatcgtcctacgtgggaaccagctgtcaacctcgtcaatacgg

SEQ ID NO: 5165 - DNA, 96 bp, Aspergillus thermomutatus
  misc_feature: 191
ccccgcatcgccctggggtcgatcaccgaattgagttgactaagggcgaagacgggaagccgttagaacccccatggggccctctgtacagcatgt

SEQ ID NO: 5166 - DNA, 96 bp, Aspergillus thermomutatus
  misc_feature: 191
agaagggaagtcaccagcatgcaagaagttgtatcagatgtcagaaaaagaatcaacgacactaaaagaatacatcgatgaacaactcaaaatggg

SEQ ID NO: 5167 - DNA, 96 bp, Aspergillus thermomutatus
  misc_feature: 191
aagaagggaagtcaccagcatgcaagaagttgtatcagatgtcagaaaaagaatcaacgacactaaaagaatacatcgatgaacaactcaaaatgg

SEQ ID NO: 5168 - DNA, 96 bp, Aspergillus thermomutatus
  misc_feature: 191
atcttaagcatgtagtggctcaacagatcacccaggcagtgtctcaatggcatgatattcaccatgatagcagtgccatccagatcccacatgcat

SEQ ID NO: 5169 - DNA, 96 bp, Aspergillus thermomutatus
  misc_feature: 191
actctttacttcactttttatcctctctttcttttctatcccttcttttctttctatccctctactcctcctcctattccttacttacccctcttt

SEQ ID NO: 5170 - DNA, 96 bp, Aspergillus thermomutatus
  misc_feature: 190
ttcgtatttaattatagatgtaattaaactagtccttacccttaaaagaaaggacaaggagacagggaaggacaaggcaacagaaaaggacaaggt

SEQ ID NO: 5171 - DNA, 96 bp, Aspergillus thermomutatus
  misc_feature: 190
ttccctctctctcttaaattctttcttaaactattaattcctctctctttctcactccctcttcctcctttcttgcatttctttattctcttaaca

SEQ ID NO: 5172 - DNA, 96 bp, Aspergillus thermomutatus
  misc_feature: 190
tggctcaacagatcacccaggcagtgtctcaatggcatgatattcaccatgatagcagtgccatccagatcccacatgcatttgatgagcctctgc

SEQ ID NO: 5173 - DNA, 96 bp, Aspergillus thermomutatus
  misc_feature: 190
tctctctcttaaattctttcttaaactattaattcctctctctttctcactccctcttcctcctttcttgcatttctttattctcttaacatcctc

SEQ ID NO: 5174 - DNA, 96 bp, Aspergillus thermomutatus
  misc_feature: 190
tacgtttctgtgttgattaccgagcattgaatgccattacgaagaaagaccgttacccccttccgctgatcaacgagacactagagcgcatcgcga

SEQ ID NO: 5175 - DNA, 96 bp, Aspergillus thermomutatus
  misc_feature: 190
cggtctggaatcagcaacggtttcagcaggccttgacgccgctcacgccacacacggttggccccacacttatcgcaattcttaacgaatcgtcga

SEQ ID NO: 5176 - DNA, 96 bp, Aspergillus thermomutatus
  misc_feature: 190
catcaaatcaatgcgaaagcattggcagatagtccaccagtggtcccagcagagccatagtggccgtgtgagccagaaagaaaaggctaggggtga

SEQ ID NO: 5177 - DNA, 96 bp, Aspergillus thermomutatus
  misc_feature: 190
taaactaactaacccttactcatctacttctcctctcccttctcttaaaccaacccctacttatttactgcttcctactctctaaccatccctcta

SEQ ID NO: 5178 - DNA, 96 bp, Aspergillus thermomutatus
  misc_feature: 190
tactctttacttcactttttatcctctctttcttttctatcccttcttttctttctatccctctactcctcctcctattccttacttacccctctt

SEQ ID NO: 5179 - DNA, 96 bp, Aspergillus thermomutatus
  misc_feature: 190
actttttatcctctctttcttttctatcccttcttttctttctatccctctactcctcctcctattccttacttacccctctttacctctcttaac

SEQ ID NO: 5180 - DNA, 96 bp, Aspergillus thermomutatus
  misc_feature: 190
gtggctcaacagatcacccaggcagtgtctcaatggcatgatattcaccatgatagcagtgccatccagatcccacatgcatttgatgagcctctg

SEQ ID NO: 5181 - DNA, 96 bp, Aspergillus thermomutatus
  misc_feature: 190
gggcggtccgttcgtatgttgcgcaggtccaaccacacttttgaaccgacagcgtatctcaggctcgccgcgcgaaagcggttcgaatactcctcc

SEQ ID NO: 5182 - DNA, 96 bp, Aspergillus thermomutatus
  misc_feature: 190
ctcctaaactaactaacccttactcatctacttctcctctcccttctcttaaaccaacccctacttatttactgcttcctactctctaaccatccc

SEQ ID NO: 5183 - DNA, 96 bp, Aspergillus thermomutatus
  misc_feature: 190
gcatcgccctggggtcgatcaccgaattgagttgactaagggcgaagacgggaagccgttagaacccccatggggccctctgtacagcatgtcgcg

SEQ ID NO: 5184 - DNA, 96 bp, Aspergillus thermomutatus
  misc_feature: 190
aactaactaacccttactcatctacttctcctctcccttctcttaaaccaacccctacttatttactgcttcctactctctaaccatccctctatc

SEQ ID NO: 5185 - DNA, 96 bp, Aspergillus thermomutatus
  misc_feature: 190
gaggtaggcagagaggtagggaggtagggagggaggtagggagagaggtaggcgaagaggtaggcgacgaggtaggcgacgaggtaggtgaagagg

SEQ ID NO: 5186 - DNA, 96 bp, Aspergillus thermomutatus
  misc_feature: 190
cctccctcttttctttttctttccttcctctttcctctctctttccttcctctttccttcctccttacctcccctttattccctctctccttcctc

SEQ ID NO: 5187 - DNA, 96 bp, Aspergillus thermomutatus
  misc_feature: 190
cttactctttcattcatcctttgctcctttttctactactctaaattatttctttctctccttttcttctctcctcttaacaaactatcccttact

SEQ ID NO: 5188 - DNA, 96 bp, Aspergillus thermomutatus
  misc_feature: 190
ctctctctcttaaattctttcttaaactattaattcctctctctttctcactccctcttcctcctttcttgcatttctttattctcttaacatcct

SEQ ID NO: 5189 - DNA, 96 bp, Aspergillus thermomutatus
  misc_feature: 190
aaacgcgttggcagaggccgccgcaaggagtatctcgtcaaatggacaggttacgatcgtcctacgtgggaaccagctgtcaacctcgtcaatacg

SEQ ID NO: 5190 - DNA, 96 bp, Aspergillus thermomutatus
  misc_feature: 190
cgccctggggtcgatcaccgaattgagttgactaagggcgaagacgggaagccgttagaacccccatggggccctctgtacagcatgtcgcgcggt

SEQ ID NO: 5191 - DNA, 96 bp, Aspergillus thermomutatus
  misc_feature: 190
ccgcatcgccctggggtcgatcaccgaattgagttgactaagggcgaagacgggaagccgttagaacccccatggggccctctgtacagcatgtcg

SEQ ID NO: 5192 - DNA, 96 bp, Aspergillus thermomutatus
  misc_feature: 190
aagattacttcttcattaattaattctctaaaaaatagcccattttaatatacaagacccaaagattccctagattaaataacattagtttctgat

SEQ ID NO: 5193 - DNA, 96 bp, Aspergillus thermomutatus
  misc_feature: 189
ttcgtatgttgcgcaggtccaaccacacttttgaaccgacagcgtatctcaggctcgccgcgcgaaagcggttcgaatactcctcctgacgttgct

SEQ ID NO: 5194 - DNA, 96 bp, Aspergillus thermomutatus
  misc_feature: 189
ttactctttcattcatcctttgctcctttttctactactctaaattatttctttctctccttttcttctctcctcttaacaaactatcccttactt

SEQ ID NO: 5195 - DNA, 96 bp, Aspergillus thermomutatus
  misc_feature: 189
cgctctagtgtctcgttgatcagcggaagggggtaacggtctttcttcgtaatggcattcaatgctcggtaatcaacacagaaacgtagacctcca

SEQ ID NO: 5196 - DNA, 96 bp, Aspergillus thermomutatus
  misc_feature: 189
agttgatataccgttggaaggtactcggtgcgttcgccatgccaaaaggggtcaccaaccattcgtacagaccaaaccgcgtacggaaggccgtca

SEQ ID NO: 5197 - DNA, 96 bp, Aspergillus thermomutatus
  misc_feature: 189
gctggagaagaactttatccgcattagtagctcttccgccgcggctccggtgctgttcgcccgcaagccaggtggagggttacgattctgtgtcga

SEQ ID NO: 5198 - DNA, 96 bp, Aspergillus thermomutatus
  misc_feature: 189
tatttactttactccttcttctactctttacttcactttttatcctctctttcttttctatcccttcttttctttctatccctctactcctcctcc

SEQ ID NO: 5199 - DNA, 96 bp, Aspergillus thermomutatus
  misc_feature: 189
caacagatcacccaggcagtgtctcaatggcatgatattcaccatgatagcagtgccatccagatcccacatgcatttgatgagcctctgcctata

SEQ ID NO: 5200 - DNA, 96 bp, Aspergillus thermomutatus
  misc_feature: 189
ccaagcttggcaatggtagatggtatacaactaccagcaacaactaccatgtaatggtagtccgaatggtagacgaggaaggaactatataaagac

SEQ ID NO: 5201 - DNA, 96 bp, Aspergillus thermomutatus
  misc_feature: 189
gggttaaagggaatttaaagtaggaaagaaaagagagagtaagggttagttagtttagaaggagaaaggacggaaagcagaagagatagagggatg

SEQ ID NO: 5202 - DNA, 96 bp, Aspergillus thermomutatus
  misc_feature: 189
cttctccagcagctctgtcaacatctttcgtaagacaagcaattcaccgcgcgacatgctgtacagagggccccatgggggttctaacggcttccc

SEQ ID NO: 5203 - DNA, 96 bp, Aspergillus thermomutatus
  misc_feature: 189
ggcggtccgttcgtatgttgcgcaggtccaaccacacttttgaaccgacagcgtatctcaggctcgccgcgcgaaagcggttcgaatactcctcct

SEQ ID NO: 5204 - DNA, 96 bp, Aspergillus thermomutatus
  misc_feature: 189
actaccagccgcccgctgtgctagtcgacggcgaggccgaatatgaggttgaatggatactggatgagcgtgagaaacgcgttggcagaggccgcc

SEQ ID NO: 5205 - DNA, 96 bp, Aspergillus thermomutatus
  misc_feature: 189
ctggcgataccccctccatccacggtgctggcgcatcccatccagccggttgaatgatgatcgcctcgctctgctggccatcccatcctgctcagc

SEQ ID NO: 5206 - DNA, 96 bp, Aspergillus thermomutatus
  misc_feature: 189
gcatcgagcttcttgctagggcggtccgttcgtatgttgcgcaggtccaaccacacttttgaaccgacagcgtatctcaggctcgccgcgcgaaag

SEQ ID NO: 5207 - DNA, 96 bp, Aspergillus thermomutatus
  misc_feature: 189
cctgatcctctggcgataccccctccatccacggtgctggcgcatcccatccagccggttgaatgatgatcgcctcgctctgctggccatcccatc

SEQ ID NO: 5208 - DNA, 96 bp, Aspergillus thermomutatus
  misc_feature: 189
catctaaattcgtatttaattatagatgtaattaaactagtccttacccttaaaagaaaggacaaggagacagggaaggacaaggcaacagaaaag

SEQ ID NO: 5209 - DNA, 96 bp, Aspergillus thermomutatus
  misc_feature: 189
agagagaagggaagagaagaaagaaaggagataagatttaagaatgaagatagtaagaaaaaggagagagggagtaaaggggaggtaaggaggaag

SEQ ID NO: 5210 - DNA, 96 bp, Aspergillus thermomutatus
  misc_feature: 189
agggaatttaaagtaggaaagaaaagagagagtaagggttagttagtttagaaggagaaaggacggaaagcagaagagatagagggatggttagag

SEQ ID NO: 5211 - DNA, 96 bp, Aspergillus thermomutatus
  misc_feature: 189
ctacgtttctgtgttgattaccgagcattgaatgccattacgaagaaagaccgttacccccttccgctgatcaacgagacactagagcgcatcgcg

SEQ ID NO: 5212 - DNA, 96 bp, Aspergillus thermomutatus
  misc_feature: 189
agcagctctgtcaacatctttcgtaagacaagcaattcaccgcgcgacatgctgtacagagggccccatgggggttctaacggcttcccgtcttcg

SEQ ID NO: 5213 - DNA, 96 bp, Aspergillus thermomutatus
  misc_feature: 189
aaggtgtttcgaggacgaaacgctaagagagggggaggtgatgttacgacaccaacactactaggcggacctgacaggcagaaccaaggagcaatg

SEQ ID NO: 5214 - DNA, 96 bp, Aspergillus thermomutatus
  misc_feature: 189
aacacaccgttatcgtgaaaacagaccacaagaatctcacgttcttcacgaccacgaaagaattgacacgacgacaagccagatgggctgagacat

SEQ ID NO: 5215 - DNA, 96 bp, Aspergillus thermomutatus
  misc_feature: 189
aggcagagaggtagggaggtagggagggaggtagggagagaggtaggcgaagaggtaggcgacgaggtaggcgacgaggtaggtgaagaggtaggt

SEQ ID NO: 5216 - DNA, 96 bp, Aspergillus thermomutatus
  misc_feature: 188
gagagagaagggaagagaagaaagaaaggagataagatttaagaatgaagatagtaagaaaaaggagagagggagtaaaggggaggtaaggaggaa

SEQ ID NO: 5217 - DNA, 96 bp, Aspergillus thermomutatus
  misc_feature: 188
ttagaagggaggatgttaagagaataaagaaatgcaagaaaggaggaagagggagtgagaaagagagaggaattaatagtttaagaaagaatttaa

SEQ ID NO: 5218 - DNA, 96 bp, Aspergillus thermomutatus
  misc_feature: 188
ttactttactccttcttctactctttacttcactttttatcctctctttcttttctatcccttcttttctttctatccctctactcctcctcctat

SEQ ID NO: 5219 - DNA, 96 bp, Aspergillus thermomutatus
  misc_feature: 188
cactttttatcctctctttcttttctatcccttcttttctttctatccctctactcctcctcctattccttacttacccctctttacctctcttaa

SEQ ID NO: 5220 - DNA, 96 bp, Aspergillus thermomutatus
  misc_feature: 188
gctactaatgcggataaagttcttctccagcagctctgtcaacatctttcgtaagacaagcaattcaccgcgcgacatgctgtacagagggcccca

SEQ ID NO: 5221 - DNA, 96 bp, Aspergillus thermomutatus
  misc_feature: 188
aaatcaatgcgaaagcattggcagatagtccaccagtggtcccagcagagccatagtggccgtgtgagccagaaagaaaaggctaggggtgaggca

SEQ ID NO: 5222 - DNA, 96 bp, Aspergillus thermomutatus
  misc_feature: 188
tcgtatgttgcgcaggtccaaccacacttttgaaccgacagcgtatctcaggctcgccgcgcgaaagcggttcgaatactcctcctgacgttgctg

SEQ ID NO: 5223 - DNA, 96 bp, Aspergillus thermomutatus
  misc_feature: 188
tcggactaccattacatggtagttgttgctggtagttgtataccatctaccattgccaagcttgggtatatggtagttggtcacgtgacaatgcga

SEQ ID NO: 5224 - DNA, 96 bp, Aspergillus thermomutatus
  misc_feature: 188
ggagagagaagggaagagaagaaagaaaggagataagatttaagaatgaagatagtaagaaaaaggagagagggagtaaaggggaggtaaggagga

SEQ ID NO: 5225 - DNA, 96 bp, Aspergillus thermomutatus
  misc_feature: 188
aggtgtttcgaggacgaaacgctaagagagggggaggtgatgttacgacaccaacactactaggcggacctgacaggcagaaccaaggagcaatga

SEQ ID NO: 5226 - DNA, 96 bp, Aspergillus thermomutatus
  misc_feature: 188
tcaacagatcacccaggcagtgtctcaatggcatgatattcaccatgatagcagtgccatccagatcccacatgcatttgatgagcctctgcctat

SEQ ID NO: 5227 - DNA, 96 bp, Aspergillus thermomutatus
  misc_feature: 188
taagcatgtagtggctcaacagatcacccaggcagtgtctcaatggcatgatattcaccatgatagcagtgccatccagatcccacatgcatttga

SEQ ID NO: 5228 - DNA, 96 bp, Aspergillus thermomutatus
  misc_feature: 188
tagtggctcaacagatcacccaggcagtgtctcaatggcatgatattcaccatgatagcagtgccatccagatcccacatgcatttgatgagcctc

SEQ ID NO: 5229 - DNA, 96 bp, Aspergillus thermomutatus
  misc_feature: 188
ctcaacagatcacccaggcagtgtctcaatggcatgatattcaccatgatagcagtgccatccagatcccacatgcatttgatgagcctctgccta

SEQ ID NO: 5230 - DNA, 96 bp, Aspergillus thermomutatus
  misc_feature: 188
tagaagggaggatgttaagagaataaagaaatgcaagaaaggaggaagagggagtgagaaagagagaggaattaatagtttaagaaagaatttaag

SEQ ID NO: 5231 - DNA, 96 bp, Aspergillus thermomutatus
  misc_feature: 188
tactttactccttcttctactctttacttcactttttatcctctctttcttttctatcccttcttttctttctatccctctactcctcctcctatt

SEQ ID NO: 5232 - DNA, 96 bp, Aspergillus thermomutatus
  misc_feature: 188
taaggtgtttcgaggacgaaacgctaagagagggggaggtgatgttacgacaccaacactactaggcggacctgacaggcagaaccaaggagcaat

SEQ ID NO: 5233 - DNA, 96 bp, Aspergillus thermomutatus
  misc_feature: 188
gtaagggttaaagggaatttaaagtaggaaagaaaagagagagtaagggttagttagtttagaaggagaaaggacggaaagcagaagagatagagg

SEQ ID NO: 5234 - DNA, 96 bp, Aspergillus thermomutatus
  misc_feature: 188
ggctcaacagatcacccaggcagtgtctcaatggcatgatattcaccatgatagcagtgccatccagatcccacatgcatttgatgagcctctgcc

SEQ ID NO: 5235 - DNA, 96 bp, Aspergillus thermomutatus
  misc_feature: 188
ctctctcttaaattctttcttaaactattaattcctctctctttctcactccctcttcctcctttcttgcatttctttattctcttaacatcctcc

SEQ ID NO: 5236 - DNA, 96 bp, Aspergillus thermomutatus
  misc_feature: 188
cagtactgtgaacttcgcgtgctgggcatcgagcttcttgctagggcggtccgttcgtatgttgcgcaggtccaaccacacttttgaaccgacagc

SEQ ID NO: 5237 - DNA, 96 bp, Aspergillus thermomutatus
  misc_feature: 188
gcgctgacgagatataggtgtgggctcatcaacctgctcaacaagtggcatatcaagctgctgaacacgattctggccttcttgtacagataaaat

SEQ ID NO: 5238 - DNA, 96 bp, Aspergillus thermomutatus
  misc_feature: 188
cttttactatttactttactccttcttctactctttacttcactttttatcctctctttcttttctatcccttcttttctttctatccctctactc

SEQ ID NO: 5239 - DNA, 96 bp, Aspergillus thermomutatus
  misc_feature: 188
cttctcatcttccctctctctcttaaattctttcttaaactattaattcctctctctttctcactccctcttcctcctttcttgcatttctttatt

SEQ ID NO: 5240 - DNA, 96 bp, Aspergillus thermomutatus
  misc_feature: 188
ctgggcatcgagcttcttgctagggcggtccgttcgtatgttgcgcaggtccaaccacacttttgaaccgacagcgtatctcaggctcgccgcgcg

SEQ ID NO: 5241 - DNA, 96 bp, Aspergillus thermomutatus
  misc_feature: 188
actaatgcggataaagttcttctccagcagctctgtcaacatctttcgtaagacaagcaattcaccgcgcgacatgctgtacagagggccccatgg

SEQ ID NO: 5242 - DNA, 96 bp, Aspergillus thermomutatus
  misc_feature: 188
agttcttctccagcagctctgtcaacatctttcgtaagacaagcaattcaccgcgcgacatgctgtacagagggccccatgggggttctaacggct

SEQ ID NO: 5243 - DNA, 96 bp, Aspergillus thermomutatus
  misc_feature: 188
agtggctcaacagatcacccaggcagtgtctcaatggcatgatattcaccatgatagcagtgccatccagatcccacatgcatttgatgagcctct

SEQ ID NO: 5244 - DNA, 96 bp, Aspergillus thermomutatus
  misc_feature: 188
actaactaacccttactcatctacttctcctctcccttctcttaaaccaacccctacttatttactgcttcctactctctaaccatccctctatct

SEQ ID NO: 5245 - DNA, 96 bp, Aspergillus thermomutatus
  misc_feature: 188
acagatcacccaggcagtgtctcaatggcatgatattcaccatgatagcagtgccatccagatcccacatgcatttgatgagcctctgcctatatt

SEQ ID NO: 5246 - DNA, 96 bp, Aspergillus thermomutatus
  misc_feature: 187
cgcgctgacgagatataggtgtgggctcatcaacctgctcaacaagtggcatatcaagctgctgaacacgattctggccttcttgtacagataaaa

SEQ ID NO: 5247 - DNA, 96 bp, Aspergillus thermomutatus
  misc_feature: 187
tttctcatctatatatgtttagtttagatatatggtcagcagaaattaatctagataatactcttaatatgactagtggtgatggaggaaattctt

SEQ ID NO: 5248 - DNA, 96 bp, Aspergillus thermomutatus
  misc_feature: 187
tttactttactccttcttctactctttacttcactttttatcctctctttcttttctatcccttcttttctttctatccctctactcctcctccta

SEQ ID NO: 5249 - DNA, 96 bp, Aspergillus thermomutatus
  misc_feature: 187
tggcgataccccctccatccacggtgctggcgcatcccatccagccggttgaatgatgatcgcctcgctctgctggccatcccatcctgctcagcc

SEQ ID NO: 5250 - DNA, 96 bp, Aspergillus thermomutatus
  misc_feature: 187
gggatagtgtaagggatagggttaaaaaagaggataagaaaagaaagaagaaaaggaaaagagagagagagaagaaaaagagagagaagaaaaaga

SEQ ID NO: 5251 - DNA, 96 bp, Aspergillus thermomutatus
  misc_feature: 187
tagtgtaagggatagggttaaaaaagaggataagaaaagaaagaagaaaaggaaaagagagagagagaagaaaaagagagagaagaaaaagagaga

SEQ ID NO: 5252 - DNA, 96 bp, Aspergillus thermomutatus
  misc_feature: 187
tccttactctttcattcatcctttgctcctttttctactactctaaattatttctttctctccttttcttctctcctcttaacaaactatccctta

SEQ ID NO: 5253 - DNA, 96 bp, Aspergillus thermomutatus
  misc_feature: 187
gggtacaaagagtacaccatgacctgctggcgaggttgatggtcgtatctttcccattttgagttgttcatcgatgtattcttttagtgtcgttga

SEQ ID NO: 5254 - DNA, 96 bp, Aspergillus thermomutatus
  misc_feature: 187
taacccttactcatctacttctcctctcccttctcttaaaccaacccctacttatttactgcttcctactctctaaccatccctctatctcttctg

SEQ ID NO: 5255 - DNA, 96 bp, Aspergillus thermomutatus
  misc_feature: 187
attagaagggaggatgttaagagaataaagaaatgcaagaaaggaggaagagggagtgagaaagagagaggaattaatagtttaagaaagaattta

SEQ ID NO: 5256 - DNA, 96 bp, Aspergillus thermomutatus
  misc_feature: 187
cctcttttctttttctttccttcctctttcctctctctttccttcctctttccttcctccttacctcccctttattccctctctccttcctcttta

SEQ ID NO: 5257 - DNA, 96 bp, Aspergillus thermomutatus
  misc_feature: 187
gttcttctccagcagctctgtcaacatctttcgtaagacaagcaattcaccgcgcgacatgctgtacagagggccccatgggggttctaacggctt

SEQ ID NO: 5258 - DNA, 96 bp, Aspergillus thermomutatus
  misc_feature: 187
gtcacgtgaccaactaccatatacccaagcttggcaatggtagatggtatacaactaccagcaacaactaccatgtaatggtagtccgaatggtag

SEQ ID NO: 5259 - DNA, 96 bp, Aspergillus thermomutatus
  misc_feature: 187
cagctctgtcaacatctttcgtaagacaagcaattcaccgcgcgacatgctgtacagagggccccatgggggttctaacggcttcccgtcttcgcc

SEQ ID NO: 5260 - DNA, 96 bp, Aspergillus thermomutatus
  misc_feature: 187
atggtaaggttttcattgtctgctgagttttcgagcatttcttggatgattttgtccctttttgttgcttcaataattttttgaatcagtggatcc

SEQ ID NO: 5261 - DNA, 96 bp, Aspergillus thermomutatus
  misc_feature: 187
gctgggcatcgagcttcttgctagggcggtccgttcgtatgttgcgcaggtccaaccacacttttgaaccgacagcgtatctcaggctcgccgcgc

SEQ ID NO: 5262 - DNA, 96 bp, Aspergillus thermomutatus
  misc_feature: 187
cgcatcgccctggggtcgatcaccgaattgagttgactaagggcgaagacgggaagccgttagaacccccatggggccctctgtacagcatgtcgc

SEQ ID NO: 5263 - DNA, 96 bp, Aspergillus thermomutatus
  misc_feature: 187
gcagctctgtcaacatctttcgtaagacaagcaattcaccgcgcgacatgctgtacagagggccccatgggggttctaacggcttcccgtcttcgc

SEQ ID NO: 5264 - DNA, 96 bp, Aspergillus thermomutatus
  misc_feature: 187
actcttggtctgccttactgcctctctccctgtcttacatggtgccttcctccctaccttatattatacattcttcgctacctcacgcggtgcatc

SEQ ID NO: 5265 - DNA, 96 bp, Aspergillus thermomutatus
  misc_feature: 187
agggcggtccgttcgtatgttgcgcaggtccaaccacacttttgaaccgacagcgtatctcaggctcgccgcgcgaaagcggttcgaatactcctc

SEQ ID NO: 5266 - DNA, 96 bp, Aspergillus thermomutatus
  misc_feature: 187
ctaactaacccttactcatctacttctcctctcccttctcttaaaccaacccctacttatttactgcttcctactctctaaccatccctctatctc

SEQ ID NO: 5267 - DNA, 96 bp, Aspergillus thermomutatus
  misc_feature: 187
cccgcatcgccctggggtcgatcaccgaattgagttgactaagggcgaagacgggaagccgttagaacccccatggggccctctgtacagcatgtc

SEQ ID NO: 5268 - DNA, 96 bp, Aspergillus thermomutatus
  misc_feature: 187
acggcgaggccgaatatgaggttgaatggatactggatgagcgtgagaaacgcgttggcagaggccgccgcaaggagtatctcgtcaaatggacag

SEQ ID NO: 5269 - DNA, 96 bp, Aspergillus thermomutatus
  misc_feature: 187
atagtgtaagggatagggttaaaaaagaggataagaaaagaaagaagaaaaggaaaagagagagagagaagaaaaagagagagaagaaaaagagag

SEQ ID NO: 5270 - DNA, 96 bp, Aspergillus thermomutatus
  misc_feature: 187
aagcggctgcagaagtggccccagaactggctaacgaactgcgggccgcgatctgacgtgattgtgctaggtacgccatggtagccgatgaatcgg

SEQ ID NO: 5271 - DNA, 96 bp, Aspergillus thermomutatus
  misc_feature: 187
caggacgcaacagactaacatggaacacattatgcacccctggtggagtatctagtcggtaagcatgtgatccaatagcttccagtactgtgaact

SEQ ID NO: 5272 - DNA, 96 bp, Aspergillus thermomutatus
  misc_feature: 187
aacagatcacccaggcagtgtctcaatggcatgatattcaccatgatagcagtgccatccagatcccacatgcatttgatgagcctctgcctatat

SEQ ID NO: 5273 - DNA, 96 bp, Aspergillus thermomutatus
  misc_feature: 187
aggacgcaacagactaacatggaacacattatgcacccctggtggagtatctagtcggtaagcatgtgatccaatagcttccagtactgtgaactt

SEQ ID NO: 5274 - DNA, 96 bp, Aspergillus thermomutatus
  misc_feature: 187
agattacttcttcattaattaattctctaaaaaatagcccattttaatatacaagacccaaagattccctagattaaataacattagtttctgatt

SEQ ID NO: 5275 - DNA, 96 bp, Aspergillus thermomutatus
  misc_feature: 186
ggcatcgagcttcttgctagggcggtccgttcgtatgttgcgcaggtccaaccacacttttgaaccgacagcgtatctcaggctcgccgcgcgaaa

SEQ ID NO: 5276 - DNA, 96 bp, Aspergillus thermomutatus
  misc_feature: 186
ataaggtgtttcgaggacgaaacgctaagagagggggaggtgatgttacgacaccaacactactaggcggacctgacaggcagaaccaaggagcaa

SEQ ID NO: 5277 - DNA, 96 bp, Aspergillus thermomutatus
  misc_feature: 186
ttcttctccagcagctctgtcaacatctttcgtaagacaagcaattcaccgcgcgacatgctgtacagagggccccatgggggttctaacggcttc

SEQ ID NO: 5278 - DNA, 96 bp, Aspergillus thermomutatus
  misc_feature: 186
ttctcatcttccctctctctcttaaattctttcttaaactattaattcctctctctttctcactccctcttcctcctttcttgcatttctttattc

SEQ ID NO: 5279 - DNA, 96 bp, Aspergillus thermomutatus
  misc_feature: 186
gacggcgaggccgaatatgaggttgaatggatactggatgagcgtgagaaacgcgttggcagaggccgccgcaaggagtatctcgtcaaatggaca

SEQ ID NO: 5280 - DNA, 96 bp, Aspergillus thermomutatus
  misc_feature: 186
tggtaaggttttcattgtctgctgagttttcgagcatttcttggatgattttgtccctttttgttgcttcaataattttttgaatcagtggatcct

SEQ ID NO: 5281 - DNA, 96 bp, Aspergillus thermomutatus
  misc_feature: 186
tgatattgcccgggcagctacattactcgcacagtataatactcggcccacaccaaagtgtgtcgcgctttggaaacgggtgcttgcatacctcca

SEQ ID NO: 5282 - DNA, 96 bp, Aspergillus thermomutatus
  misc_feature: 186
tctctcttaaattctttcttaaactattaattcctctctctttctcactccctcttcctcctttcttgcatttctttattctcttaacatcctccc

SEQ ID NO: 5283 - DNA, 96 bp, Aspergillus thermomutatus
  misc_feature: 186
tcctgatcctctggcgataccccctccatccacggtgctggcgcatcccatccagccggttgaatgatgatcgcctcgctctgctggccatcccat

SEQ ID NO: 5284 - DNA, 96 bp, Aspergillus thermomutatus
  misc_feature: 186
tactcttggtctgccttactgcctctctccctgtcttacatggtgccttcctccctaccttatattatacattcttcgctacctcacgcggtgcat

SEQ ID NO: 5285 - DNA, 96 bp, Aspergillus thermomutatus
  misc_feature: 186
ctctttacttcactttttatcctctctttcttttctatcccttcttttctttctatccctctactcctcctcctattccttacttacccctcttta

SEQ ID NO: 5286 - DNA, 96 bp, Aspergillus thermomutatus
  misc_feature: 186
ggatagtgtaagggatagggttaaaaaagaggataagaaaagaaagaagaaaaggaaaagagagagagagaagaaaaagagagagaagaaaaagag

SEQ ID NO: 5287 - DNA, 96 bp, Aspergillus thermomutatus
  misc_feature: 186
caatgcgaaagcattggcagatagtccaccagtggtcccagcagagccatagtggccgtgtgagccagaaagaaaaggctaggggtgaggcagagc

SEQ ID NO: 5288 - DNA, 96 bp, Aspergillus thermomutatus
  misc_feature: 186
gctcatcaaatgcatgtgggatctggatggcactgctatcatggtgaatatcatgccattgagacactgcctgggtgatctgttgagccactacat

SEQ ID NO: 5289 - DNA, 96 bp, Aspergillus thermomutatus
  misc_feature: 186
gactaccagccgcccgctgtgctagtcgacggcgaggccgaatatgaggttgaatggatactggatgagcgtgagaaacgcgttggcagaggccgc

SEQ ID NO: 5290 - DNA, 96 bp, Aspergillus thermomutatus
  misc_feature: 186
agtgtaagggatagggttaaaaaagaggataagaaaagaaagaagaaaaggaaaagagagagagagaagaaaaagagagagaagaaaaagagagag

SEQ ID NO: 5291 - DNA, 96 bp, Aspergillus thermomutatus
  misc_feature: 186
ctcatcaaatgcatgtgggatctggatggcactgctatcatggtgaatatcatgccattgagacactgcctgggtgatctgttgagccactacatg

SEQ ID NO: 5292 - DNA, 96 bp, Aspergillus thermomutatus
  misc_feature: 186
acgtgaccaactaccatatacccaagcttggcaatggtagatggtatacaactaccagcaacaactaccatgtaatggtagtccgaatggtagacg

SEQ ID NO: 5293 - DNA, 96 bp, Aspergillus thermomutatus
  misc_feature: 186
aagcatgtagtggctcaacagatcacccaggcagtgtctcaatggcatgatattcaccatgatagcagtgccatccagatcccacatgcatttgat

SEQ ID NO: 5294 - DNA, 96 bp, Aspergillus thermomutatus
  misc_feature: 186
agcggctgcagaagtggccccagaactggctaacgaactgcgggccgcgatctgacgtgattgtgctaggtacgccatggtagccgatgaatcggt

SEQ ID NO: 5295 - DNA, 96 bp, Aspergillus thermomutatus
  misc_feature: 185
ttctatcccttcttttctttctatccctctactcctcctcctattccttacttacccctctttacctctcttaacctatcccttactctactcttt

SEQ ID NO: 5296 - DNA, 96 bp, Aspergillus thermomutatus
  misc_feature: 185
gggcatcgagcttcttgctagggcggtccgttcgtatgttgcgcaggtccaaccacacttttgaaccgacagcgtatctcaggctcgccgcgcgaa

SEQ ID NO: 5297 - DNA, 96 bp, Aspergillus thermomutatus
  misc_feature: 185
accaactaccatatacccaagcttggcaatggtagatggtatacaactaccagcaacaactaccatgtaatggtagtccgaatggtagacgaggaa

SEQ ID NO: 5298 - DNA, 96 bp, Aspergillus thermomutatus
  misc_feature: 185
tgggcatcgagcttcttgctagggcggtccgttcgtatgttgcgcaggtccaaccacacttttgaaccgacagcgtatctcaggctcgccgcgcga

SEQ ID NO: 5299 - DNA, 96 bp, Aspergillus thermomutatus
  misc_feature: 185
tcttctccagcagctctgtcaacatctttcgtaagacaagcaattcaccgcgcgacatgctgtacagagggccccatgggggttctaacggcttcc

SEQ ID NO: 5300 - DNA, 96 bp, Aspergillus thermomutatus
  misc_feature: 185
tctgtcatccatggtaaggttttcattgtctgctgagttttcgagcatttcttggatgattttgtccctttttgttgcttcaataattttttgaat

SEQ ID NO: 5301 - DNA, 96 bp, Aspergillus thermomutatus
  misc_feature: 185
tctcttgctacctctcttgctacctctcttgctacctctcttgctacctctcttgctacctctcttgctacctctcttgctacctctcttgctacc

SEQ ID NO: 5302 - DNA, 96 bp, Aspergillus thermomutatus
  misc_feature: 185
tccttcttttactatttactttactccttcttctactctttacttcactttttatcctctctttcttttctatcccttcttttctttctatccctc

SEQ ID NO: 5303 - DNA, 96 bp, Aspergillus thermomutatus
  misc_feature: 185
tcatcaaatgcatgtgggatctggatggcactgctatcatggtgaatatcatgccattgagacactgcctgggtgatctgttgagccactacatgc

SEQ ID NO: 5304 - DNA, 96 bp, Aspergillus thermomutatus
  misc_feature: 185
taagggttaaagggaatttaaagtaggaaagaaaagagagagtaagggttagttagtttagaaggagaaaggacggaaagcagaagagatagaggg

SEQ ID NO: 5305 - DNA, 96 bp, Aspergillus thermomutatus
  misc_feature: 185
gtgttgatccctactatactacctgccccatatggtcgctctctggctaccttggtccctaccttgcatggcatatctgggggtgcctcacgcggt

SEQ ID NO: 5306 - DNA, 96 bp, Aspergillus thermomutatus
  misc_feature: 185
ggtgtttcgaggacgaaacgctaagagagggggaggtgatgttacgacaccaacactactaggcggacctgacaggcagaaccaaggagcaatgac

SEQ ID NO: 5307 - DNA, 96 bp, Aspergillus thermomutatus
  misc_feature: 185
ctcttttctttttctttccttcctctttcctctctctttccttcctctttccttcctccttacctcccctttattccctctctccttcctctttac

SEQ ID NO: 5308 - DNA, 96 bp, Aspergillus thermomutatus
  misc_feature: 185
ggactaccattacatggtagttgttgctggtagttgtataccatctaccattgccaagcttgggtatatggtagttggtcacgtgacaatgcgacc

SEQ ID NO: 5309 - DNA, 96 bp, Aspergillus thermomutatus
  misc_feature: 185
ggtaaggttttcattgtctgctgagttttcgagcatttcttggatgattttgtccctttttgttgcttcaataattttttgaatcagtggatcctc

SEQ ID NO: 5310 - DNA, 96 bp, Aspergillus thermomutatus
  misc_feature: 185
cttctactctttacttcactttttatcctctctttcttttctatcccttcttttctttctatccctctactcctcctcctattccttacttacccc

SEQ ID NO: 5311 - DNA, 96 bp, Aspergillus thermomutatus
  misc_feature: 185
gctcaacagatcacccaggcagtgtctcaatggcatgatattcaccatgatagcagtgccatccagatcccacatgcatttgatgagcctctgcct

SEQ ID NO: 5312 - DNA, 96 bp, Aspergillus thermomutatus
  misc_feature: 185
cctactcttggtctgccttactgcctctctccctgtcttacatggtgccttcctccctaccttatattatacattcttcgctacctcacgcggtgc

SEQ ID NO: 5313 - DNA, 96 bp, Aspergillus thermomutatus
  misc_feature: 185
gattagaagggaggatgttaagagaataaagaaatgcaagaaaggaggaagagggagtgagaaagagagaggaattaatagtttaagaaagaattt

SEQ ID NO: 5314 - DNA, 96 bp, Aspergillus thermomutatus
  misc_feature: 185
catggtaaggttttcattgtctgctgagttttcgagcatttcttggatgattttgtccctttttgttgcttcaataattttttgaatcagtggatc

SEQ ID NO: 5315 - DNA, 96 bp, Aspergillus thermomutatus
  misc_feature: 185
actaacccttactcatctacttctcctctcccttctcttaaaccaacccctacttatttactgcttcctactctctaaccatccctctatctcttc

SEQ ID NO: 5316 - DNA, 96 bp, Aspergillus thermomutatus
  misc_feature: 185
ctccctcttttctttttctttccttcctctttcctctctctttccttcctctttccttcctccttacctcccctttattccctctctccttcctct

SEQ ID NO: 5317 - DNA, 96 bp, Aspergillus thermomutatus
  misc_feature: 185
ctacctctcttgctacctctcttgctacctctcttgctacctctcttgctacctctcttgctacctctcttgctacctctcttgctacctctcttg

SEQ ID NO: 5318 - DNA, 96 bp, Aspergillus thermomutatus
  misc_feature: 185
cggataaagttcttctccagcagctctgtcaacatctttcgtaagacaagcaattcaccgcgcgacatgctgtacagagggccccatgggggttct

SEQ ID NO: 5319 - DNA, 96 bp, Aspergillus thermomutatus
  misc_feature: 185
caactaccatatacccaagcttggcaatggtagatggtatacaactaccagcaacaactaccatgtaatggtagtccgaatggtagacgaggaagg

SEQ ID NO: 5320 - DNA, 96 bp, Aspergillus thermomutatus
  misc_feature: 185
ccatggtaaggttttcattgtctgctgagttttcgagcatttcttggatgattttgtccctttttgttgcttcaataattttttgaatcagtggat

SEQ ID NO: 5321 - DNA, 96 bp, Aspergillus thermomutatus
  misc_feature: 185
atttactttactccttcttctactctttacttcactttttatcctctctttcttttctatcccttcttttctttctatccctctactcctcctcct

SEQ ID NO: 5322 - DNA, 96 bp, Aspergillus thermomutatus
  misc_feature: 185
aactaacccttactcatctacttctcctctcccttctcttaaaccaacccctacttatttactgcttcctactctctaaccatccctctatctctt

SEQ ID NO: 5323 - DNA, 96 bp, Aspergillus thermomutatus
  misc_feature: 184
aagggatagtgtaagggatagggttaaaaaagaggataagaaaagaaagaagaaaaggaaaagagagagagagaagaaaaagagagagaagaaaaa

SEQ ID NO: 5324 - DNA, 96 bp, Aspergillus thermomutatus
  misc_feature: 184
taagggatagtgtaagggatagggttaaaaaagaggataagaaaagaaagaagaaaaggaaaagagagagagagaagaaaaagagagagaagaaaa

SEQ ID NO: 5325 - DNA, 96 bp, Aspergillus thermomutatus
  misc_feature: 184
ttttactatttactttactccttcttctactctttacttcactttttatcctctctttcttttctatcccttcttttctttctatccctctactcc

SEQ ID NO: 5326 - DNA, 96 bp, Aspergillus thermomutatus
  misc_feature: 184
tttactccttcttctactctttacttcactttttatcctctctttcttttctatcccttcttttctttctatccctctactcctcctcctattcct

SEQ ID NO: 5327 - DNA, 96 bp, Aspergillus thermomutatus
  misc_feature: 184
ttgtcacgtgaccaactaccatatacccaagcttggcaatggtagatggtatacaactaccagcaacaactaccatgtaatggtagtccgaatggt

SEQ ID NO: 5328 - DNA, 96 bp, Aspergillus thermomutatus
  misc_feature: 184
ccagccgcccgctgtgctagtcgacggcgaggccgaatatgaggttgaatggatactggatgagcgtgagaaacgcgttggcagaggccgccgcaa

SEQ ID NO: 5329 - DNA, 96 bp, Aspergillus thermomutatus
  misc_feature: 184
ttctactctttacttcactttttatcctctctttcttttctatcccttcttttctttctatccctctactcctcctcctattccttacttacccct

SEQ ID NO: 5330 - DNA, 96 bp, Aspergillus thermomutatus
  misc_feature: 184
ttactccttcttctactctttacttcactttttatcctctctttcttttctatcccttcttttctttctatccctctactcctcctcctattcctt

SEQ ID NO: 5331 - DNA, 96 bp, Aspergillus thermomutatus
  misc_feature: 184
tgtcacgtgaccaactaccatatacccaagcttggcaatggtagatggtatacaactaccagcaacaactaccatgtaatggtagtccgaatggta

SEQ ID NO: 5332 - DNA, 96 bp, Aspergillus thermomutatus
  misc_feature: 184
ctactcttggtctgccttactgcctctctccctgtcttacatggtgccttcctccctaccttatattatacattcttcgctacctcacgcggtgca

SEQ ID NO: 5333 - DNA, 96 bp, Aspergillus thermomutatus
  misc_feature: 184
ctctggcgataccccctccatccacggtgctggcgcatcccatccagccggttgaatgatgatcgcctcgctctgctggccatcccatcctgctca

SEQ ID NO: 5334 - DNA, 96 bp, Aspergillus thermomutatus
  misc_feature: 184
tctggcgataccccctccatccacggtgctggcgcatcccatccagccggttgaatgatgatcgcctcgctctgctggccatcccatcctgctcag

SEQ ID NO: 5335 - DNA, 96 bp, Aspergillus thermomutatus
  misc_feature: 184
gatagtgtaagggatagggttaaaaaagaggataagaaaagaaagaagaaaaggaaaagagagagagagaagaaaaagagagagaagaaaaagaga

SEQ ID NO: 5336 - DNA, 96 bp, Aspergillus thermomutatus
  misc_feature: 184
tctctttcttttctatcccttcttttctttctatccctctactcctcctcctattccttacttacccctctttacctctcttaacctatcccttac

SEQ ID NO: 5337 - DNA, 96 bp, Aspergillus thermomutatus
  misc_feature: 184
tcgctctctggctaccttggtccctaccttgcatggcatatctgggggtgcctcacgcggtgcattgctccatacctcctatggtgcctctctacc

SEQ ID NO: 5338 - DNA, 96 bp, Aspergillus thermomutatus
  misc_feature: 184
aagggttaaagggaatttaaagtaggaaagaaaagagagagtaagggttagttagtttagaaggagaaaggacggaaagcagaagagatagaggga

SEQ ID NO: 5339 - DNA, 96 bp, Aspergillus thermomutatus
  misc_feature: 184
aagacaagcaattcaccgcgcgacatgctgtacagagggccccatgggggttctaacggcttcccgtcttcgcccttagtcaactcaattcggtga

SEQ ID NO: 5340 - DNA, 96 bp, Aspergillus thermomutatus
  misc_feature: 184
tactctttcattcatcctttgctcctttttctactactctaaattatttctttctctccttttcttctctcctcttaacaaactatcccttacttc

SEQ ID NO: 5341 - DNA, 96 bp, Aspergillus thermomutatus
  misc_feature: 184
taagacaagcaattcaccgcgcgacatgctgtacagagggccccatgggggttctaacggcttcccgtcttcgcccttagtcaactcaattcggtg

SEQ ID NO: 5342 - DNA, 96 bp, Aspergillus thermomutatus
  misc_feature: 184
gtatacaactaccagcaacaactaccatgtaatggtagtccgaatggtagacgaggaaggaactatataaagacactcattatcactgtatctagc

SEQ ID NO: 5343 - DNA, 96 bp, Aspergillus thermomutatus
  misc_feature: 184
catcgagcttcttgctagggcggtccgttcgtatgttgcgcaggtccaaccacacttttgaaccgacagcgtatctcaggctcgccgcgcgaaagc

SEQ ID NO: 5344 - DNA, 96 bp, Aspergillus thermomutatus
  misc_feature: 184
gctgctaccatcaaatcaatgcgaaagcattggcagatagtccaccagtggtcccagcagagccatagtggccgtgtgagccagaaagaaaaggct

SEQ ID NO: 5345 - DNA, 96 bp, Aspergillus thermomutatus
  misc_feature: 184
gctctgtcaacatctttcgtaagacaagcaattcaccgcgcgacatgctgtacagagggccccatgggggttctaacggcttcccgtcttcgccct

SEQ ID NO: 5346 - DNA, 96 bp, Aspergillus thermomutatus
  misc_feature: 184
gcggtccgttcgtatgttgcgcaggtccaaccacacttttgaaccgacagcgtatctcaggctcgccgcgcgaaagcggttcgaatactcctcctg

SEQ ID NO: 5347 - DNA, 96 bp, Aspergillus thermomutatus
  misc_feature: 184
cagttgatataccgttggaaggtactcggtgcgttcgccatgccaaaaggggtcaccaaccattcgtacagaccaaaccgcgtacggaaggccgtc

SEQ ID NO: 5348 - DNA, 96 bp, Aspergillus thermomutatus
  misc_feature: 184
gaacttcgcgtgctgggcatcgagcttcttgctagggcggtccgttcgtatgttgcgcaggtccaaccacacttttgaaccgacagcgtatctcag

SEQ ID NO: 5349 - DNA, 96 bp, Aspergillus thermomutatus
  misc_feature: 184
agggatagtgtaagggatagggttaaaaaagaggataagaaaagaaagaagaaaaggaaaagagagagagagaagaaaaagagagagaagaaaaag

SEQ ID NO: 5350 - DNA, 96 bp, Aspergillus thermomutatus
  misc_feature: 184
cagccgcccgctgtgctagtcgacggcgaggccgaatatgaggttgaatggatactggatgagcgtgagaaacgcgttggcagaggccgccgcaag

SEQ ID NO: 5351 - DNA, 96 bp, Aspergillus thermomutatus
  misc_feature: 184
ccaactaccatatacccaagcttggcaatggtagatggtatacaactaccagcaacaactaccatgtaatggtagtccgaatggtagacgaggaag

SEQ ID NO: 5352 - DNA, 96 bp, Aspergillus thermomutatus
  misc_feature: 184
agtaagggttaaagggaatttaaagtaggaaagaaaagagagagtaagggttagttagtttagaaggagaaaggacggaaagcagaagagatagag

SEQ ID NO: 5353 - DNA, 96 bp, Aspergillus thermomutatus
  misc_feature: 184
ctccttcttttactatttactttactccttcttctactctttacttcactttttatcctctctttcttttctatcccttcttttctttctatccct

SEQ ID NO: 5354 - DNA, 96 bp, Aspergillus thermomutatus
  misc_feature: 184
ctaacccttactcatctacttctcctctcccttctcttaaaccaacccctacttatttactgcttcctactctctaaccatccctctatctcttct

SEQ ID NO: 5355 - DNA, 96 bp, Aspergillus thermomutatus
  misc_feature: 184
agtactgtgaacttcgcgtgctgggcatcgagcttcttgctagggcggtccgttcgtatgttgcgcaggtccaaccacacttttgaaccgacagcg

SEQ ID NO: 5356 - DNA, 96 bp, Aspergillus thermomutatus
  misc_feature: 184
aacttcgcgtgctgggcatcgagcttcttgctagggcggtccgttcgtatgttgcgcaggtccaaccacacttttgaaccgacagcgtatctcagg

SEQ ID NO: 5357 - DNA, 96 bp, Aspergillus thermomutatus
  misc_feature: 184
attgtcacgtgaccaactaccatatacccaagcttggcaatggtagatggtatacaactaccagcaacaactaccatgtaatggtagtccgaatgg

SEQ ID NO: 5358 - DNA, 96 bp, Aspergillus thermomutatus
  misc_feature: 184
actatactacctgccccatatggtcgctctctggctaccttggtccctaccttgcatggcatatctgggggtgcctcacgcggtgcattgctccat

SEQ ID NO: 5359 - DNA, 96 bp, Aspergillus thermomutatus
  misc_feature: 183
ttccttactctttcattcatcctttgctcctttttctactactctaaattatttctttctctccttttcttctctcctcttaacaaactatccctt

SEQ ID NO: 5360 - DNA, 96 bp, Aspergillus thermomutatus
  misc_feature: 183
tcaacgcgcggtagtcgacacagaatcgtaaccctccacctggcttgcgggcgaacagcaccggagccgcggcggaagagctactaatgcggataa

SEQ ID NO: 5361 - DNA, 96 bp, Aspergillus thermomutatus
  misc_feature: 183
gcaggcgaattctttttcgagaagtaggcacagggtcgtagcaccccgttatcatcatactgcgatagggttcctccagtagcccaattcgaagca

SEQ ID NO: 5362 - DNA, 96 bp, Aspergillus thermomutatus
  misc_feature: 183
tgctaccatcaaatcaatgcgaaagcattggcagatagtccaccagtggtcccagcagagccatagtggccgtgtgagccagaaagaaaaggctag

SEQ ID NO: 5363 - DNA, 96 bp, Aspergillus thermomutatus
  misc_feature: 183
accagccgcccgctgtgctagtcgacggcgaggccgaatatgaggttgaatggatactggatgagcgtgagaaacgcgttggcagaggccgccgca

SEQ ID NO: 5364 - DNA, 96 bp, Aspergillus thermomutatus
  misc_feature: 183
tcttggtctgccttactgcctctctccctgtcttacatggtgccttcctccctaccttatattatacattcttcgctacctcacgcggtgcatctc

SEQ ID NO: 5365 - DNA, 96 bp, Aspergillus thermomutatus
  misc_feature: 183
tctcatctatatatgtttagtttagatatatggtcagcagaaattaatctagataatactcttaatatgactagtggtgatggaggaaattcttat

SEQ ID NO: 5366 - DNA, 96 bp, Aspergillus thermomutatus
  misc_feature: 183
tccctcttttctttttctttccttcctctttcctctctctttccttcctctttccttcctccttacctcccctttattccctctctccttcctctt

SEQ ID NO: 5367 - DNA, 96 bp, Aspergillus thermomutatus
  misc_feature: 183
ctgctaccatcaaatcaatgcgaaagcattggcagatagtccaccagtggtcccagcagagccatagtggccgtgtgagccagaaagaaaaggcta

SEQ ID NO: 5368 - DNA, 96 bp, Aspergillus thermomutatus
  misc_feature: 183
agctctgtcaacatctttcgtaagacaagcaattcaccgcgcgacatgctgtacagagggccccatgggggttctaacggcttcccgtcttcgccc

SEQ ID NO: 5369 - DNA, 96 bp, Aspergillus thermomutatus
  misc_feature: 183
gggagagagaagggaagagaagaaagaaaggagataagatttaagaatgaagatagtaagaaaaaggagagagggagtaaaggggaggtaaggagg

SEQ ID NO: 5370 - DNA, 96 bp, Aspergillus thermomutatus
  misc_feature: 183
agctgctaccatcaaatcaatgcgaaagcattggcagatagtccaccagtggtcccagcagagccatagtggccgtgtgagccagaaagaaaaggc

SEQ ID NO: 5371 - DNA, 96 bp, Aspergillus thermomutatus
  misc_feature: 183
cttataaggtgtttcgaggacgaaacgctaagagagggggaggtgatgttacgacaccaacactactaggcggacctgacaggcagaaccaaggag

SEQ ID NO: 5372 - DNA, 96 bp, Aspergillus thermomutatus
  misc_feature: 183
aatcaatgcgaaagcattggcagatagtccaccagtggtcccagcagagccatagtggccgtgtgagccagaaagaaaaggctaggggtgaggcag

SEQ ID NO: 5373 - DNA, 96 bp, Aspergillus thermomutatus
  misc_feature: 183
ctcttcacctacctcgtcgcctacctcgtcgcctacctcttcgcctacctctctccctacctccctccctacctccctacctctctgcctacctct

SEQ ID NO: 5374 - DNA, 96 bp, Aspergillus thermomutatus
  misc_feature: 183
ctcatctatatatgtttagtttagatatatggtcagcagaaattaatctagataatactcttaatatgactagtggtgatggaggaaattcttatt

SEQ ID NO: 5375 - DNA, 96 bp, Aspergillus thermomutatus
  misc_feature: 183
aggccgaatatgaggttgaatggatactggatgagcgtgagaaacgcgttggcagaggccgccgcaaggagtatctcgtcaaatggacaggttacg

SEQ ID NO: 5376 - DNA, 96 bp, Aspergillus thermomutatus
  misc_feature: 183
cccaagtagcaggccataaggcaggccatgagacacacagagaggtgtacacaaggcaggcagaacagtaggcagaacggcaggcagaacggcagg

SEQ ID NO: 5377 - DNA, 96 bp, Aspergillus thermomutatus
  misc_feature: 183
ccctcttttctttttctttccttcctctttcctctctctttccttcctctttccttcctccttacctcccctttattccctctctccttcctcttt

SEQ ID NO: 5378 - DNA, 96 bp, Aspergillus thermomutatus
  misc_feature: 183
cattgtcacgtgaccaactaccatatacccaagcttggcaatggtagatggtatacaactaccagcaacaactaccatgtaatggtagtccgaatg

SEQ ID NO: 5379 - DNA, 96 bp, Aspergillus thermomutatus
  misc_feature: 183
catcaaatgcatgtgggatctggatggcactgctatcatggtgaatatcatgccattgagacactgcctgggtgatctgttgagccactacatgct

SEQ ID NO: 5380 - DNA, 96 bp, Aspergillus thermomutatus
  misc_feature: 183
agaagtagatgagtaagggttagttagtttaggagaagtaaagaagggaaatagtagagtaagcatagtagggattagaagaggagaatatatatt

SEQ ID NO: 5381 - DNA, 96 bp, Aspergillus thermomutatus
  misc_feature: 183
aaagtaaatagtaaaagaaggagtagagagagagttaggagaaggagtagagtaagggttaggaggaggattagagggagggatagaaagaggatt

SEQ ID NO: 5382 - DNA, 96 bp, Aspergillus thermomutatus
  misc_feature: 182
caagcttggcaatggtagatggtatacaactaccagcaacaactaccatgtaatggtagtccgaatggtagacgaggaaggaactatataaagaca

SEQ ID NO: 5383 - DNA, 96 bp, Aspergillus thermomutatus
  misc_feature: 182
acttctcctaaactaactaacccttactcatctacttctcctctcccttctcttaaaccaacccctacttatttactgcttcctactctctaacca

SEQ ID NO: 5384 - DNA, 96 bp, Aspergillus thermomutatus
  misc_feature: 182
tagagagggacccaagtagcaggccataaggcaggccatgagacacacagagaggtgtacacaaggcaggcagaacagtaggcagaacggcaggca

SEQ ID NO: 5385 - DNA, 96 bp, Aspergillus thermomutatus
  misc_feature: 182
atcaatgcgaaagcattggcagatagtccaccagtggtcccagcagagccatagtggccgtgtgagccagaaagaaaaggctaggggtgaggcaga

SEQ ID NO: 5386 - DNA, 96 bp, Aspergillus thermomutatus
  misc_feature: 182
tctctggggctacgtggggtgtgttgatccctactatactacctgccccatatggtcgctctctggctaccttggtccctaccttgcatggcatat

SEQ ID NO: 5387 - DNA, 96 bp, Aspergillus thermomutatus
  misc_feature: 182
tctatcccttcttttctttctatccctctactcctcctcctattccttacttacccctctttacctctcttaacctatcccttactctactctttc

SEQ ID NO: 5388 - DNA, 96 bp, Aspergillus thermomutatus
  misc_feature: 182
tcacgtgaccaactaccatatacccaagcttggcaatggtagatggtatacaactaccagcaacaactaccatgtaatggtagtccgaatggtaga

SEQ ID NO: 5389 - DNA, 96 bp, Aspergillus thermomutatus
  misc_feature: 182
tcatctatatatgtttagtttagatatatggtcagcagaaattaatctagataatactcttaatatgactagtggtgatggaggaaattcttattt

SEQ ID NO: 5390 - DNA, 96 bp, Aspergillus thermomutatus
  misc_feature: 182
tcaatgcgaaagcattggcagatagtccaccagtggtcccagcagagccatagtggccgtgtgagccagaaagaaaaggctaggggtgaggcagag

SEQ ID NO: 5391 - DNA, 96 bp, Aspergillus thermomutatus
  misc_feature: 182
cttgctagggcggtccgttcgtatgttgcgcaggtccaaccacacttttgaaccgacagcgtatctcaggctcgccgcgcgaaagcggttcgaata

SEQ ID NO: 5392 - DNA, 96 bp, Aspergillus thermomutatus
  misc_feature: 182
tataaagaaggttgaagattagaagggaggatgttaagagaataaagaaatgcaagaaaggaggaagagggagtgagaaagagagaggaattaata

SEQ ID NO: 5393 - DNA, 96 bp, Aspergillus thermomutatus
  misc_feature: 182
tactccttcttctactctttacttcactttttatcctctctttcttttctatcccttcttttctttctatccctctactcctcctcctattcctta

SEQ ID NO: 5394 - DNA, 96 bp, Aspergillus thermomutatus
  misc_feature: 182
cgcctacttcggtcgcattgtcacgtgaccaactaccatatacccaagcttggcaatggtagatggtatacaactaccagcaacaactaccatgta

SEQ ID NO: 5395 - DNA, 96 bp, Aspergillus thermomutatus
  misc_feature: 182
cacgtgaccaactaccatatacccaagcttggcaatggtagatggtatacaactaccagcaacaactaccatgtaatggtagtccgaatggtagac

SEQ ID NO: 5396 - DNA, 96 bp, Aspergillus thermomutatus
  misc_feature: 182
gtactgtgaacttcgcgtgctgggcatcgagcttcttgctagggcggtccgttcgtatgttgcgcaggtccaaccacacttttgaaccgacagcgt

SEQ ID NO: 5397 - DNA, 96 bp, Aspergillus thermomutatus
  misc_feature: 182
ctttacttcactttttatcctctctttcttttctatcccttcttttctttctatccctctactcctcctcctattccttacttacccctctttacc

SEQ ID NO: 5398 - DNA, 96 bp, Aspergillus thermomutatus
  misc_feature: 182
cgtgaggcacccccagatatgccatgcaaggtagggaccaaggtagccagagagcgaccatatggggcaggtagtatagtagggatcaacacaccc

SEQ ID NO: 5399 - DNA, 96 bp, Aspergillus thermomutatus
  misc_feature: 182
ggcgaggccgaatatgaggttgaatggatactggatgagcgtgagaaacgcgttggcagaggccgccgcaaggagtatctcgtcaaatggacaggt

SEQ ID NO: 5400 - DNA, 96 bp, Aspergillus thermomutatus
  misc_feature: 182
ggcaacagaaaaggacaaggtgacaggaaagaacaaaatgacaggaggagcaaggtagagaggtagaggttaatttttaatagtattagaaatgtt

SEQ ID NO: 5401 - DNA, 96 bp, Aspergillus thermomutatus
  misc_feature: 182
gcgttcaacgcgcggtagtcgacacagaatcgtaaccctccacctggcttgcgggcgaacagcaccggagccgcggcggaagagctactaatgcgg

SEQ ID NO: 5402 - DNA, 96 bp, Aspergillus thermomutatus
  misc_feature: 182
aacccttactcatctacttctcctctcccttctcttaaaccaacccctacttatttactgcttcctactctctaaccatccctctatctcttctgc

SEQ ID NO: 5403 - DNA, 96 bp, Aspergillus thermomutatus
  misc_feature: 182
agggacccaagtagcaggccataaggcaggccatgagacacacagagaggtgtacacaaggcaggcagaacagtaggcagaacggcaggcagaacg

SEQ ID NO: 5404 - DNA, 96 bp, Aspergillus thermomutatus
  misc_feature: 182
cggcgaggccgaatatgaggttgaatggatactggatgagcgtgagaaacgcgttggcagaggccgccgcaaggagtatctcgtcaaatggacagg

SEQ ID NO: 5405 - DNA, 96 bp, Aspergillus thermomutatus
  misc_feature: 182
ccagttgatataccgttggaaggtactcggtgcgttcgccatgccaaaaggggtcaccaaccattcgtacagaccaaaccgcgtacggaaggccgt

SEQ ID NO: 5406 - DNA, 96 bp, Aspergillus thermomutatus
  misc_feature: 182
aacgatcgtacgcctcgagtggatgtaggggtctgccattctagtatagcttttaccttgtcggggtccatgcgtacgcccttgccagcttcaatg

SEQ ID NO: 5407 - DNA, 96 bp, Aspergillus thermomutatus
  misc_feature: 182
agggttaaagggaatttaaagtaggaaagaaaagagagagtaagggttagttagtttagaaggagaaaggacggaaagcagaagagatagagggat

SEQ ID NO: 5408 - DNA, 96 bp, Aspergillus thermomutatus
  misc_feature: 181
ttctttctatccctctactcctcctcctattccttacttacccctctttacctctcttaacctatcccttactctactctttcttttaatccttaa

SEQ ID NO: 5409 - DNA, 96 bp, Aspergillus thermomutatus
  misc_feature: 181
ttctcatctatatatgtttagtttagatatatggtcagcagaaattaatctagataatactcttaatatgactagtggtgatggaggaaattctta

SEQ ID NO: 5410 - DNA, 96 bp, Aspergillus thermomutatus
  misc_feature: 181
ttcaacgcgcggtagtcgacacagaatcgtaaccctccacctggcttgcgggcgaacagcaccggagccgcggcggaagagctactaatgcggata

SEQ ID NO: 5411 - DNA, 96 bp, Aspergillus thermomutatus
  misc_feature: 181
ctctgtcatccatggtaaggttttcattgtctgctgagttttcgagcatttcttggatgattttgtccctttttgttgcttcaataattttttgaa

SEQ ID NO: 5412 - DNA, 96 bp, Aspergillus thermomutatus
  misc_feature: 181
ggctcatcaaatgcatgtgggatctggatggcactgctatcatggtgaatatcatgccattgagacactgcctgggtgatctgttgagccactaca

SEQ ID NO: 5413 - DNA, 96 bp, Aspergillus thermomutatus
  misc_feature: 181
tctttacttcactttttatcctctctttcttttctatcccttcttttctttctatccctctactcctcctcctattccttacttacccctctttac

SEQ ID NO: 5414 - DNA, 96 bp, Aspergillus thermomutatus
  misc_feature: 181
agaagggaggatgttaagagaataaagaaatgcaagaaaggaggaagagggagtgagaaagagagaggaattaatagtttaagaaagaatttaaga

SEQ ID NO: 5415 - DNA, 96 bp, Aspergillus thermomutatus
  misc_feature: 181
gtaaatagtaaaagaaggagtagagagagagttaggagaaggagtagagtaagggttaggaggaggattagagggagggatagaaagaggattaga

SEQ ID NO: 5416 - DNA, 96 bp, Aspergillus thermomutatus
  misc_feature: 181
ggcagacaggtaggtagaatggtagggagtaaggcaccgtataagcaccaaatcagatagagagatatagagagaggtatccaagaggtagatata

SEQ ID NO: 5417 - DNA, 96 bp, Aspergillus thermomutatus
  misc_feature: 181
tactgtgaacttcgcgtgctgggcatcgagcttcttgctagggcggtccgttcgtatgttgcgcaggtccaaccacacttttgaaccgacagcgta

SEQ ID NO: 5418 - DNA, 96 bp, Aspergillus thermomutatus
  misc_feature: 181
taaggttttcattgtctgctgagttttcgagcatttcttggatgattttgtccctttttgttgcttcaataattttttgaatcagtggatcctctg

SEQ ID NO: 5419 - DNA, 96 bp, Aspergillus thermomutatus
  misc_feature: 181
aggctcatcaaatgcatgtgggatctggatggcactgctatcatggtgaatatcatgccattgagacactgcctgggtgatctgttgagccactac

SEQ ID NO: 5420 - DNA, 96 bp, Aspergillus thermomutatus
  misc_feature: 181
actccttcttctactctttacttcactttttatcctctctttcttttctatcccttcttttctttctatccctctactcctcctcctattccttac

SEQ ID NO: 5421 - DNA, 96 bp, Aspergillus thermomutatus
  misc_feature: 181
gcgtgaggcacccccagatatgccatgcaaggtagggaccaaggtagccagagagcgaccatatggggcaggtagtatagtagggatcaacacacc

SEQ ID NO: 5422 - DNA, 96 bp, Aspergillus thermomutatus
  misc_feature: 181
ggtcgatcaccgaattgagttgactaagggcgaagacgggaagccgttagaacccccatggggccctctgtacagcatgtcgcgcggtgaattgct

SEQ ID NO: 5423 - DNA, 96 bp, Aspergillus thermomutatus
  misc_feature: 181
gctaccatcaaatcaatgcgaaagcattggcagatagtccaccagtggtcccagcagagccatagtggccgtgtgagccagaaagaaaaggctagg

SEQ ID NO: 5424 - DNA, 96 bp, Aspergillus thermomutatus
  misc_feature: 181
gcgaggccgaatatgaggttgaatggatactggatgagcgtgagaaacgcgttggcagaggccgccgcaaggagtatctcgtcaaatggacaggtt

SEQ ID NO: 5425 - DNA, 96 bp, Aspergillus thermomutatus
  misc_feature: 181
atgtaggggtctgccattctagtatagcttttaccttgtcggggtccatgcgtacgcccttgccagcttcaatgataaacccgaggtatttcgtgc

SEQ ID NO: 5426 - DNA, 96 bp, Aspergillus thermomutatus
  misc_feature: 181
gagaagtagatgagtaagggttagttagtttaggagaagtaaagaagggaaatagtagagtaagcatagtagggattagaagaggagaatatatat

SEQ ID NO: 5427 - DNA, 96 bp, Aspergillus thermomutatus
  misc_feature: 181
cttactcatctacttctcctctcccttctcttaaaccaacccctacttatttactgcttcctactctctaaccatccctctatctcttctgctttc

SEQ ID NO: 5428 - DNA, 96 bp, Aspergillus thermomutatus
  misc_feature: 181
ataaagaaggttgaagattagaagggaggatgttaagagaataaagaaatgcaagaaaggaggaagagggagtgagaaagagagaggaattaatag

SEQ ID NO: 5429 - DNA, 96 bp, Aspergillus thermomutatus
  misc_feature: 181
ctatcccttcttttctttctatccctctactcctcctcctattccttacttacccctctttacctctcttaacctatcccttactctactctttct

SEQ ID NO: 5430 - DNA, 96 bp, Aspergillus thermomutatus
  misc_feature: 181
cgcgttcaacgcgcggtagtcgacacagaatcgtaaccctccacctggcttgcgggcgaacagcaccggagccgcggcggaagagctactaatgcg

SEQ ID NO: 5431 - DNA, 96 bp, Aspergillus thermomutatus
  misc_feature: 181
acaagcaattcaccgcgcgacatgctgtacagagggccccatgggggttctaacggcttcccgtcttcgcccttagtcaactcaattcggtgatcg

SEQ ID NO: 5432 - DNA, 96 bp, Aspergillus thermomutatus
  misc_feature: 181
ccttactcatctacttctcctctcccttctcttaaaccaacccctacttatttactgcttcctactctctaaccatccctctatctcttctgcttt

SEQ ID NO: 5433 - DNA, 96 bp, Aspergillus thermomutatus
  misc_feature: 181
cccttactcatctacttctcctctcccttctcttaaaccaacccctacttatttactgcttcctactctctaaccatccctctatctcttctgctt

SEQ ID NO: 5434 - DNA, 96 bp, Aspergillus thermomutatus
  misc_feature: 181
atataaagaaggttgaagattagaagggaggatgttaagagaataaagaaatgcaagaaaggaggaagagggagtgagaaagagagaggaattaat

SEQ ID NO: 5435 - DNA, 96 bp, Aspergillus thermomutatus
  misc_feature: 180
ttttctttctatccctctactcctcctcctattccttacttacccctctttacctctcttaacctatcccttactctactctttcttttaatcctt

SEQ ID NO: 5436 - DNA, 96 bp, Aspergillus thermomutatus
  misc_feature: 180
ttttcattgtctgctgagttttcgagcatttcttggatgattttgtccctttttgttgcttcaataattttttgaatcagtggatcctctgtcagt

SEQ ID NO: 5437 - DNA, 96 bp, Aspergillus thermomutatus
  misc_feature: 180
tttctttctatccctctactcctcctcctattccttacttacccctctttacctctcttaacctatcccttactctactctttcttttaatcctta

SEQ ID NO: 5438 - DNA, 96 bp, Aspergillus thermomutatus
  misc_feature: 180
ttcttttactatttactttactccttcttctactctttacttcactttttatcctctctttcttttctatcccttcttttctttctatccctctac

SEQ ID NO: 5439 - DNA, 96 bp, Aspergillus thermomutatus
  misc_feature: 180
agagggacccaagtagcaggccataaggcaggccatgagacacacagagaggtgtacacaaggcaggcagaacagtaggcagaacggcaggcagaa

SEQ ID NO: 5440 - DNA, 96 bp, Aspergillus thermomutatus
  misc_feature: 180
ttccgcaggcgaattctttttcgagaagtaggcacagggtcgtagcaccccgttatcatcatactgcgatagggttcctccagtagcccaattcga

SEQ ID NO: 5441 - DNA, 96 bp, Aspergillus thermomutatus
  misc_feature: 180
ttactatttactttactccttcttctactctttacttcactttttatcctctctttcttttctatcccttcttttctttctatccctctactcctc

SEQ ID NO: 5442 - DNA, 96 bp, Aspergillus thermomutatus
  misc_feature: 180
ccgcgtgaggcacccccagatatgccatgcaaggtagggaccaaggtagccagagagcgaccatatggggcaggtagtatagtagggatcaacaca

SEQ ID NO: 5443 - DNA, 96 bp, Aspergillus thermomutatus
  misc_feature: 180
tgtaggggtctgccattctagtatagcttttaccttgtcggggtccatgcgtacgcccttgccagcttcaatgataaacccgaggtatttcgtgct

SEQ ID NO: 5444 - DNA, 96 bp, Aspergillus thermomutatus
  misc_feature: 180
cgtgaccaactaccatatacccaagcttggcaatggtagatggtatacaactaccagcaacaactaccatgtaatggtagtccgaatggtagacga

SEQ ID NO: 5445 - DNA, 96 bp, Aspergillus thermomutatus
  misc_feature: 180
tcgccctggggtcgatcaccgaattgagttgactaagggcgaagacgggaagccgttagaacccccatggggccctctgtacagcatgtcgcgcgg

SEQ ID NO: 5446 - DNA, 96 bp, Aspergillus thermomutatus
  misc_feature: 180
tagaaagaaaagaagggatagaaaagaaagagaggataaaaagtgaagtaaagagtagaagaaggagtaaagtaaatagtaaaagaaggagtagag

SEQ ID NO: 5447 - DNA, 96 bp, Aspergillus thermomutatus
  misc_feature: 180
aagtaaatagtaaaagaaggagtagagagagagttaggagaaggagtagagtaagggttaggaggaggattagagggagggatagaaagaggatta

SEQ ID NO: 5448 - DNA, 96 bp, Aspergillus thermomutatus
  misc_feature: 180
taatataggcagaggctcatcaaatgcatgtgggatctggatggcactgctatcatggtgaatatcatgccattgagacactgcctgggtgatctg

SEQ ID NO: 5449 - DNA, 96 bp, Aspergillus thermomutatus
  misc_feature: 180
cgaggccgaatatgaggttgaatggatactggatgagcgtgagaaacgcgttggcagaggccgccgcaaggagtatctcgtcaaatggacaggtta

SEQ ID NO: 5450 - DNA, 96 bp, Aspergillus thermomutatus
  misc_feature: 180
taaagaaggttgaagattagaagggaggatgttaagagaataaagaaatgcaagaaaggaggaagagggagtgagaaagagagaggaattaatagt

SEQ ID NO: 5451 - DNA, 96 bp, Aspergillus thermomutatus
  misc_feature: 180
gagggacccaagtagcaggccataaggcaggccatgagacacacagagaggtgtacacaaggcaggcagaacagtaggcagaacggcaggcagaac

SEQ ID NO: 5452 - DNA, 96 bp, Aspergillus thermomutatus
  misc_feature: 180
cgcgtgaggcacccccagatatgccatgcaaggtagggaccaaggtagccagagagcgaccatatggggcaggtagtatagtagggatcaacacac

SEQ ID NO: 5453 - DNA, 96 bp, Aspergillus thermomutatus
  misc_feature: 180
gaggccgaatatgaggttgaatggatactggatgagcgtgagaaacgcgttggcagaggccgccgcaaggagtatctcgtcaaatggacaggttac

SEQ ID NO: 5454 - DNA, 96 bp, Aspergillus thermomutatus
  misc_feature: 180
actccttcttttactatttactttactccttcttctactctttacttcactttttatcctctctttcttttctatcccttcttttctttctatccc

SEQ ID NO: 5455 - DNA, 96 bp, Aspergillus thermomutatus
  misc_feature: 180
ctatgcctactcttggtctgccttactgcctctctccctgtcttacatggtgccttcctccctaccttatattatacattcttcgctacctcacgc

SEQ ID NO: 5456 - DNA, 96 bp, Aspergillus thermomutatus
  misc_feature: 180
acttcgcgtgctgggcatcgagcttcttgctagggcggtccgttcgtatgttgcgcaggtccaaccacacttttgaaccgacagcgtatctcaggc

SEQ ID NO: 5457 - DNA, 96 bp, Aspergillus thermomutatus
  misc_feature: 180
gccgaatatgaggttgaatggatactggatgagcgtgagaaacgcgttggcagaggccgccgcaaggagtatctcgtcaaatggacaggttacgat

SEQ ID NO: 5458 - DNA, 96 bp, Aspergillus thermomutatus
  misc_feature: 180
gcagacaggtaggtagaatggtagggagtaaggcaccgtataagcaccaaatcagatagagagatatagagagaggtatccaagaggtagatatag

SEQ ID NO: 5459 - DNA, 96 bp, Aspergillus thermomutatus
  misc_feature: 180
gacaagcaattcaccgcgcgacatgctgtacagagggccccatgggggttctaacggcttcccgtcttcgcccttagtcaactcaattcggtgatc

SEQ ID NO: 5460 - DNA, 96 bp, Aspergillus thermomutatus
  misc_feature: 180
ctactccttcttttactatttactttactccttcttctactctttacttcactttttatcctctctttcttttctatcccttcttttctttctatc

SEQ ID NO: 5461 - DNA, 96 bp, Aspergillus thermomutatus
  misc_feature: 180
caatggtagatggtatacaactaccagcaacaactaccatgtaatggtagtccgaatggtagacgaggaaggaactatataaagacactcattatc

SEQ ID NO: 5462 - DNA, 96 bp, Aspergillus thermomutatus
  misc_feature: 180
agagagggacccaagtagcaggccataaggcaggccatgagacacacagagaggtgtacacaaggcaggcagaacagtaggcagaacggcaggcag

SEQ ID NO: 5463 - DNA, 96 bp, Aspergillus thermomutatus
  misc_feature: 180
agggagagagaagggaagagaagaaagaaaggagataagatttaagaatgaagatagtaagaaaaaggagagagggagtaaaggggaggtaaggag

SEQ ID NO: 5464 - DNA, 96 bp, Aspergillus thermomutatus
  misc_feature: 180
agccgcccgctgtgctagtcgacggcgaggccgaatatgaggttgaatggatactggatgagcgtgagaaacgcgttggcagaggccgccgcaagg

SEQ ID NO: 5465 - DNA, 96 bp, Aspergillus thermomutatus
  misc_feature: 180
ccgcctacttcggtcgcattgtcacgtgaccaactaccatatacccaagcttggcaatggtagatggtatacaactaccagcaacaactaccatgt

SEQ ID NO: 5466 - DNA, 96 bp, Aspergillus thermomutatus
  misc_feature: 180
ccatcaaatcaatgcgaaagcattggcagatagtccaccagtggtcccagcagagccatagtggccgtgtgagccagaaagaaaaggctaggggtg

SEQ ID NO: 5467 - DNA, 96 bp, Aspergillus thermomutatus
  misc_feature: 180
attccttactctttcattcatcctttgctcctttttctactactctaaattatttctttctctccttttcttctctcctcttaacaaactatccct

SEQ ID NO: 5468 - DNA, 96 bp, Aspergillus thermomutatus
  misc_feature: 180
aatgcgaaagcattggcagatagtccaccagtggtcccagcagagccatagtggccgtgtgagccagaaagaaaaggctaggggtgaggcagagct

SEQ ID NO: 5469 - DNA, 96 bp, Aspergillus thermomutatus
  misc_feature: 179
acctagctgctaccatcaaatcaatgcgaaagcattggcagatagtccaccagtggtcccagcagagccatagtggccgtgtgagccagaaagaaa

SEQ ID NO: 5470 - DNA, 96 bp, Aspergillus thermomutatus
  misc_feature: 179
caacgcgcggtagtcgacacagaatcgtaaccctccacctggcttgcgggcgaacagcaccggagccgcggcggaagagctactaatgcggataaa

SEQ ID NO: 5471 - DNA, 96 bp, Aspergillus thermomutatus
  misc_feature: 179
ttcttttctatcccttcttttctttctatccctctactcctcctcctattccttacttacccctctttacctctcttaacctatcccttactctac

SEQ ID NO: 5472 - DNA, 96 bp, Aspergillus thermomutatus
  misc_feature: 179
ttcctgatcctctggcgataccccctccatccacggtgctggcgcatcccatccagccggttgaatgatgatcgcctcgctctgctggccatccca

SEQ ID NO: 5473 - DNA, 96 bp, Aspergillus thermomutatus
  misc_feature: 179
gtgtttcgaggacgaaacgctaagagagggggaggtgatgttacgacaccaacactactaggcggacctgacaggcagaaccaaggagcaatgaca

SEQ ID NO: 5474 - DNA, 96 bp, Aspergillus thermomutatus
  misc_feature: 179
tgtcaacatctttcgtaagacaagcaattcaccgcgcgacatgctgtacagagggccccatgggggttctaacggcttcccgtcttcgcccttagt

SEQ ID NO: 5475 - DNA, 96 bp, Aspergillus thermomutatus
  misc_feature: 179
agtcgacacagaatcgtaaccctccacctggcttgcgggcgaacagcaccggagccgcggcggaagagctactaatgcggataaagttcttctcca

SEQ ID NO: 5476 - DNA, 96 bp, Aspergillus thermomutatus
  misc_feature: 179
gcatggcatatctgggggtgcctcacgcggtgcattgctccatacctcctatggtgcctctctacctatctccctacctcttcacctacctcttca

SEQ ID NO: 5477 - DNA, 96 bp, Aspergillus thermomutatus
  misc_feature: 179
aagggaggatgttaagagaataaagaaatgcaagaaaggaggaagagggagtgagaaagagagaggaattaatagtttaagaaagaatttaagaga

SEQ ID NO: 5478 - DNA, 96 bp, Aspergillus thermomutatus
  misc_feature: 179
atagaaagaaaagaagggatagaaaagaaagagaggataaaaagtgaagtaaagagtagaagaaggagtaaagtaaatagtaaaagaaggagtaga

SEQ ID NO: 5479 - DNA, 96 bp, Aspergillus thermomutatus
  misc_feature: 179
ggccgaatatgaggttgaatggatactggatgagcgtgagaaacgcgttggcagaggccgccgcaaggagtatctcgtcaaatggacaggttacga

SEQ ID NO: 5480 - DNA, 96 bp, Aspergillus thermomutatus
  misc_feature: 179
tcgagcttcttgctagggcggtccgttcgtatgttgcgcaggtccaaccacacttttgaaccgacagcgtatctcaggctcgccgcgcgaaagcgg

SEQ ID NO: 5481 - DNA, 96 bp, Aspergillus thermomutatus
  misc_feature: 179
tagggagagagaagggaagagaagaaagaaaggagataagatttaagaatgaagatagtaagaaaaaggagagagggagtaaaggggaggtaagga

SEQ ID NO: 5482 - DNA, 96 bp, Aspergillus thermomutatus
  misc_feature: 179
acgatcgtacgcctcgagtggatgtaggggtctgccattctagtatagcttttaccttgtcggggtccatgcgtacgcccttgccagcttcaatga

SEQ ID NO: 5483 - DNA, 96 bp, Aspergillus thermomutatus
  misc_feature: 179
tagctgctaccatcaaatcaatgcgaaagcattggcagatagtccaccagtggtcccagcagagccatagtggccgtgtgagccagaaagaaaagg

SEQ ID NO: 5484 - DNA, 96 bp, Aspergillus thermomutatus
  misc_feature: 179
ctctctttcttttctatcccttcttttctttctatccctctactcctcctcctattccttacttacccctctttacctctcttaacctatccctta

SEQ ID NO: 5485 - DNA, 96 bp, Aspergillus thermomutatus
  misc_feature: 179
aagcttggcaatggtagatggtatacaactaccagcaacaactaccatgtaatggtagtccgaatggtagacgaggaaggaactatataaagacac

SEQ ID NO: 5486 - DNA, 96 bp, Aspergillus thermomutatus
  misc_feature: 179
gtgctgggcatcgagcttcttgctagggcggtccgttcgtatgttgcgcaggtccaaccacacttttgaaccgacagcgtatctcaggctcgccgc

SEQ ID NO: 5487 - DNA, 96 bp, Aspergillus thermomutatus
  misc_feature: 179
gtgctagtcgacggcgaggccgaatatgaggttgaatggatactggatgagcgtgagaaacgcgttggcagaggccgccgcaaggagtatctcgtc

SEQ ID NO: 5488 - DNA, 96 bp, Aspergillus thermomutatus
  misc_feature: 179
gtaatataggcagaggctcatcaaatgcatgtgggatctggatggcactgctatcatggtgaatatcatgccattgagacactgcctgggtgatct

SEQ ID NO: 5489 - DNA, 96 bp, Aspergillus thermomutatus
  misc_feature: 179
aattccttactctttcattcatcctttgctcctttttctactactctaaattatttctttctctccttttcttctctcctcttaacaaactatccc

SEQ ID NO: 5490 - DNA, 96 bp, Aspergillus thermomutatus
  misc_feature: 179
catcgccctggggtcgatcaccgaattgagttgactaagggcgaagacgggaagccgttagaacccccatggggccctctgtacagcatgtcgcgc

SEQ ID NO: 5491 - DNA, 96 bp, Aspergillus thermomutatus
  misc_feature: 179
gcaatggtagatggtatacaactaccagcaacaactaccatgtaatggtagtccgaatggtagacgaggaaggaactatataaagacactcattat

SEQ ID NO: 5492 - DNA, 96 bp, Aspergillus thermomutatus
  misc_feature: 179
aacgcgcggtagtcgacacagaatcgtaaccctccacctggcttgcgggcgaacagcaccggagccgcggcggaagagctactaatgcggataaag

SEQ ID NO: 5493 - DNA, 96 bp, Aspergillus thermomutatus
  misc_feature: 179
ctctgtcaacatctttcgtaagacaagcaattcaccgcgcgacatgctgtacagagggccccatgggggttctaacggcttcccgtcttcgccctt

SEQ ID NO: 5494 - DNA, 96 bp, Aspergillus thermomutatus
  misc_feature: 179
agggaggatgttaagagaataaagaaatgcaagaaaggaggaagagggagtgagaaagagagaggaattaatagtttaagaaagaatttaagagag

SEQ ID NO: 5495 - DNA, 96 bp, Aspergillus thermomutatus
  misc_feature: 179
atcgccctggggtcgatcaccgaattgagttgactaagggcgaagacgggaagccgttagaacccccatggggccctctgtacagcatgtcgcgcg

SEQ ID NO: 5496 - DNA, 96 bp, Aspergillus thermomutatus
  misc_feature: 179
atgcctactcttggtctgccttactgcctctctccctgtcttacatggtgccttcctccctaccttatattatacattcttcgctacctcacgcgg

SEQ ID NO: 5497 - DNA, 96 bp, Aspergillus thermomutatus
  misc_feature: 179
cagacaggtaggtagaatggtagggagtaaggcaccgtataagcaccaaatcagatagagagatatagagagaggtatccaagaggtagatatagt

SEQ ID NO: 5498 - DNA, 96 bp, Aspergillus thermomutatus
  misc_feature: 179
atcccttcttttctttctatccctctactcctcctcctattccttacttacccctctttacctctcttaacctatcccttactctactctttcttt

SEQ ID NO: 5499 - DNA, 96 bp, Aspergillus thermomutatus
  misc_feature: 179
aaagaaggttgaagattagaagggaggatgttaagagaataaagaaatgcaagaaaggaggaagagggagtgagaaagagagaggaattaatagtt

SEQ ID NO: 5500 - DNA, 96 bp, Aspergillus thermomutatus
  misc_feature: 178
cctagctgctaccatcaaatcaatgcgaaagcattggcagatagtccaccagtggtcccagcagagccatagtggccgtgtgagccagaaagaaaa

SEQ ID NO: 5501 - DNA, 96 bp, Aspergillus thermomutatus
  misc_feature: 178
tttcttttctatcccttcttttctttctatccctctactcctcctcctattccttacttacccctctttacctctcttaacctatcccttactcta

SEQ ID NO: 5502 - DNA, 96 bp, Aspergillus thermomutatus
  misc_feature: 178
tttctatcccttcttttctttctatccctctactcctcctcctattccttacttacccctctttacctctcttaacctatcccttactctactctt

SEQ ID NO: 5503 - DNA, 96 bp, Aspergillus thermomutatus
  misc_feature: 178
tttaacatctaaattcgtatttaattatagatgtaattaaactagtccttacccttaaaagaaaggacaaggagacagggaaggacaaggcaacag

SEQ ID NO: 5504 - DNA, 96 bp, Aspergillus thermomutatus
  misc_feature: 178
gaggccccatgtaaggcagggttaaggcaggcagagaggtaaggagataggtagagagggacccaagtagcaggccataaggcaggccatgagaca

SEQ ID NO: 5505 - DNA, 96 bp, Aspergillus thermomutatus
  misc_feature: 178
tgggtacaaagagtacaccatgacctgctggcgaggttgatggtcgtatctttcccattttgagttgttcatcgatgtattcttttagtgtcgttg

SEQ ID NO: 5506 - DNA, 96 bp, Aspergillus thermomutatus
  misc_feature: 178
acctagaaggagcaaaacacaccgttatcgtgaaaacagaccacaagaatctcacgttcttcacgaccacgaaagaattgacacgacgacaagcca

SEQ ID NO: 5507 - DNA, 96 bp, Aspergillus thermomutatus
  misc_feature: 178
tgctggagaagaactttatccgcattagtagctcttccgccgcggctccggtgctgttcgcccgcaagccaggtggagggttacgattctgtgtcg

SEQ ID NO: 5508 - DNA, 96 bp, Aspergillus thermomutatus
  misc_feature: 178
tcttttctttttctttccttcctctttcctctctctttccttcctctttccttcctccttacctcccctttattccctctctccttcctctttact

SEQ ID NO: 5509 - DNA, 96 bp, Aspergillus thermomutatus
  misc_feature: 178
tcttttactatttactttactccttcttctactctttacttcactttttatcctctctttcttttctatcccttcttttctttctatccctctact

SEQ ID NO: 5510 - DNA, 96 bp, Aspergillus thermomutatus
  misc_feature: 178
tctttcttttctatcccttcttttctttctatccctctactcctcctcctattccttacttacccctctttacctctcttaacctatcccttactc

SEQ ID NO: 5511 - DNA, 96 bp, Aspergillus thermomutatus
  misc_feature: 178
cctctgtcatccatggtaaggttttcattgtctgctgagttttcgagcatttcttggatgattttgtccctttttgttgcttcaataattttttga

SEQ ID NO: 5512 - DNA, 96 bp, Aspergillus thermomutatus
  misc_feature: 178
tatcccttcttttctttctatccctctactcctcctcctattccttacttacccctctttacctctcttaacctatcccttactctactctttctt

SEQ ID NO: 5513 - DNA, 96 bp, Aspergillus thermomutatus
  misc_feature: 178
gcccgctgtgctagtcgacggcgaggccgaatatgaggttgaatggatactggatgagcgtgagaaacgcgttggcagaggccgccgcaaggagta

SEQ ID NO: 5514 - DNA, 96 bp, Aspergillus thermomutatus
  misc_feature: 178
tacctagaaggagcaaaacacaccgttatcgtgaaaacagaccacaagaatctcacgttcttcacgaccacgaaagaattgacacgacgacaagcc

SEQ ID NO: 5515 - DNA, 96 bp, Aspergillus thermomutatus
  misc_feature: 178
atggtagatggtatacaactaccagcaacaactaccatgtaatggtagtccgaatggtagacgaggaaggaactatataaagacactcattatcac

SEQ ID NO: 5516 - DNA, 96 bp, Aspergillus thermomutatus
  misc_feature: 178
catggcatatctgggggtgcctcacgcggtgcattgctccatacctcctatggtgcctctctacctatctccctacctcttcacctacctcttcac

SEQ ID NO: 5517 - DNA, 96 bp, Aspergillus thermomutatus
  misc_feature: 178
gtctacgtttctgtgttgattaccgagcattgaatgccattacgaagaaagaccgttacccccttccgctgatcaacgagacactagagcgcatcg

SEQ ID NO: 5518 - DNA, 96 bp, Aspergillus thermomutatus
  misc_feature: 178
gcgtgctgggcatcgagcttcttgctagggcggtccgttcgtatgttgcgcaggtccaaccacacttttgaaccgacagcgtatctcaggctcgcc

SEQ ID NO: 5519 - DNA, 96 bp, Aspergillus thermomutatus
  misc_feature: 178
ccgctgtgctagtcgacggcgaggccgaatatgaggttgaatggatactggatgagcgtgagaaacgcgttggcagaggccgccgcaaggagtatc

SEQ ID NO: 5520 - DNA, 96 bp, Aspergillus thermomutatus
  misc_feature: 178
cttcactttttatcctctctttcttttctatcccttcttttctttctatccctctactcctcctcctattccttacttacccctctttacctctct

SEQ ID NO: 5521 - DNA, 96 bp, Aspergillus thermomutatus
  misc_feature: 178
ctgtcaacatctttcgtaagacaagcaattcaccgcgcgacatgctgtacagagggccccatgggggttctaacggcttcccgtcttcgcccttag

SEQ ID NO: 5522 - DNA, 96 bp, Aspergillus thermomutatus
  misc_feature: 178
ctctttcttttctatcccttcttttctttctatccctctactcctcctcctattccttacttacccctctttacctctcttaacctatcccttact

SEQ ID NO: 5523 - DNA, 96 bp, Aspergillus thermomutatus
  misc_feature: 178
ctaatccttatactaaccttactcctattcttcttccaactcttatcattttccttttcttaaatcctacttcttctctttttttcttctttcttt

SEQ ID NO: 5524 - DNA, 96 bp, Aspergillus thermomutatus
  misc_feature: 178
agtaaatagtaaaagaaggagtagagagagagttaggagaaggagtagagtaagggttaggaggaggattagagggagggatagaaagaggattag

SEQ ID NO: 5525 - DNA, 96 bp, Aspergillus thermomutatus
  misc_feature: 178
cgtgctgggcatcgagcttcttgctagggcggtccgttcgtatgttgcgcaggtccaaccacacttttgaaccgacagcgtatctcaggctcgccg

SEQ ID NO: 5526 - DNA, 96 bp, Aspergillus thermomutatus
  misc_feature: 178
atcgagcttcttgctagggcggtccgttcgtatgttgcgcaggtccaaccacacttttgaaccgacagcgtatctcaggctcgccgcgcgaaagcg

SEQ ID NO: 5527 - DNA, 96 bp, Aspergillus thermomutatus
  misc_feature: 178
aggtagagaggcaccataggaggtatggagcaatgcaccgcgtgaggcacccccagatatgccatgcaaggtagggaccaaggtagccagagagcg

SEQ ID NO: 5528 - DNA, 96 bp, Aspergillus thermomutatus
  misc_feature: 178
cgcccgctgtgctagtcgacggcgaggccgaatatgaggttgaatggatactggatgagcgtgagaaacgcgttggcagaggccgccgcaaggagt

SEQ ID NO: 5529 - DNA, 96 bp, Aspergillus thermomutatus
  misc_feature: 178
cctctctttcttttctatcccttcttttctttctatccctctactcctcctcctattccttacttacccctctttacctctcttaacctatccctt

SEQ ID NO: 5530 - DNA, 96 bp, Aspergillus thermomutatus
  misc_feature: 178
ccctctgtcatccatggtaaggttttcattgtctgctgagttttcgagcatttcttggatgattttgtccctttttgttgcttcaataattttttg

SEQ ID NO: 5531 - DNA, 96 bp, Aspergillus thermomutatus
  misc_feature: 178
ccctaatccttatactaaccttactcctattcttcttccaactcttatcattttccttttcttaaatcctacttcttctctttttttcttctttct

SEQ ID NO: 5532 - DNA, 96 bp, Aspergillus thermomutatus
  misc_feature: 178
cccgctgtgctagtcgacggcgaggccgaatatgaggttgaatggatactggatgagcgtgagaaacgcgttggcagaggccgccgcaaggagtat

SEQ ID NO: 5533 - DNA, 96 bp, Aspergillus thermomutatus
  misc_feature: 178
agacaagcaattcaccgcgcgacatgctgtacagagggccccatgggggttctaacggcttcccgtcttcgcccttagtcaactcaattcggtgat

SEQ ID NO: 5534 - DNA, 96 bp, Aspergillus thermomutatus
  misc_feature: 178
acccttactcatctacttctcctctcccttctcttaaaccaacccctacttatttactgcttcctactctctaaccatccctctatctcttctgct

SEQ ID NO: 5535 - DNA, 96 bp, Aspergillus thermomutatus
  misc_feature: 178
acgcgcggtagtcgacacagaatcgtaaccctccacctggcttgcgggcgaacagcaccggagccgcggcggaagagctactaatgcggataaagt

SEQ ID NO: 5536 - DNA, 96 bp, Aspergillus thermomutatus
  misc_feature: 178
accatcaaatcaatgcgaaagcattggcagatagtccaccagtggtcccagcagagccatagtggccgtgtgagccagaaagaaaaggctaggggt

SEQ ID NO: 5537 - DNA, 96 bp, Aspergillus thermomutatus
  misc_feature: 177
tttttatcctctctttcttttctatcccttcttttctttctatccctctactcctcctcctattccttacttacccctctttacctctcttaacct

SEQ ID NO: 5538 - DNA, 96 bp, Aspergillus thermomutatus
  misc_feature: 177
tttactatttactttactccttcttctactctttacttcactttttatcctctctttcttttctatcccttcttttctttctatccctctactcct

SEQ ID NO: 5539 - DNA, 96 bp, Aspergillus thermomutatus
  misc_feature: 177
tactatactacctgccccatatggtcgctctctggctaccttggtccctaccttgcatggcatatctgggggtgcctcacgcggtgcattgctcca

SEQ ID NO: 5540 - DNA, 96 bp, Aspergillus thermomutatus
  misc_feature: 177
aagtaagggttaaagggaatttaaagtaggaaagaaaagagagagtaagggttagttagtttagaaggagaaaggacggaaagcagaagagataga

SEQ ID NO: 5541 - DNA, 96 bp, Aspergillus thermomutatus
  misc_feature: 177
tctacgtttctgtgttgattaccgagcattgaatgccattacgaagaaagaccgttacccccttccgctgatcaacgagacactagagcgcatcgc

SEQ ID NO: 5542 - DNA, 96 bp, Aspergillus thermomutatus
  misc_feature: 177
gtaaagtaaatagtaaaagaaggagtagagagagagttaggagaaggagtagagtaagggttaggaggaggattagagggagggatagaaagagga

SEQ ID NO: 5543 - DNA, 96 bp, Aspergillus thermomutatus
  misc_feature: 177
tatgcctactcttggtctgccttactgcctctctccctgtcttacatggtgccttcctccctaccttatattatacattcttcgctacctcacgcg

SEQ ID NO: 5544 - DNA, 96 bp, Aspergillus thermomutatus
  misc_feature: 177
tactccttcttttactatttactttactccttcttctactctttacttcactttttatcctctctttcttttctatcccttcttttctttctatcc

SEQ ID NO: 5545 - DNA, 96 bp, Aspergillus thermomutatus
  misc_feature: 177
tactatttactttactccttcttctactctttacttcactttttatcctctctttcttttctatcccttcttttctttctatccctctactcctcc

SEQ ID NO: 5546 - DNA, 96 bp, Aspergillus thermomutatus
  misc_feature: 177
aggccccatgtaaggcagggttaaggcaggcagagaggtaaggagataggtagagagggacccaagtagcaggccataaggcaggccatgagacac

SEQ ID NO: 5547 - DNA, 96 bp, Aspergillus thermomutatus
  misc_feature: 177
gtcgacacagaatcgtaaccctccacctggcttgcgggcgaacagcaccggagccgcggcggaagagctactaatgcggataaagttcttctccag

SEQ ID NO: 5548 - DNA, 96 bp, Aspergillus thermomutatus
  misc_feature: 177
gtagagagggacccaagtagcaggccataaggcaggccatgagacacacagagaggtgtacacaaggcaggcagaacagtaggcagaacggcaggc

SEQ ID NO: 5549 - DNA, 96 bp, Aspergillus thermomutatus
  misc_feature: 177
gtaaggttttcattgtctgctgagttttcgagcatttcttggatgattttgtccctttttgttgcttcaataattttttgaatcagtggatcctct

SEQ ID NO: 5550 - DNA, 96 bp, Aspergillus thermomutatus
  misc_feature: 177
acagatttgactgctagtcgtccactcagagtctcattctgtcgctctaatcgttgaatatgctcctggagctgttcaatcatgcccatcagaccc

SEQ ID NO: 5551 - DNA, 96 bp, Aspergillus thermomutatus
  misc_feature: 177
caattccttactctttcattcatcctttgctcctttttctactactctaaattatttctttctctccttttcttctctcctcttaacaaactatcc

SEQ ID NO: 5552 - DNA, 96 bp, Aspergillus thermomutatus
  misc_feature: 177
ctactatactacctgccccatatggtcgctctctggctaccttggtccctaccttgcatggcatatctgggggtgcctcacgcggtgcattgctcc

SEQ ID NO: 5553 - DNA, 96 bp, Aspergillus thermomutatus
  misc_feature: 177
gcttggcaatggtagatggtatacaactaccagcaacaactaccatgtaatggtagtccgaatggtagacgaggaaggaactatataaagacactc

SEQ ID NO: 5554 - DNA, 96 bp, Aspergillus thermomutatus
  misc_feature: 177
gcctactcttggtctgccttactgcctctctccctgtcttacatggtgccttcctccctaccttatattatacattcttcgctacctcacgcggtg

SEQ ID NO: 5555 - DNA, 96 bp, Aspergillus thermomutatus
  misc_feature: 177
ctctgctgtgatctgaggctgcgcagtaaccgtttgctgctgagttcctgcccgaccaacattcgagctggttggggtacgtggcgtgtcatttgc

SEQ ID NO: 5556 - DNA, 96 bp, Aspergillus thermomutatus
  misc_feature: 177
gatagggagagagaagggaagagaagaaagaaaggagataagatttaagaatgaagatagtaagaaaaaggagagagggagtaaaggggaggtaag

SEQ ID NO: 5557 - DNA, 96 bp, Aspergillus thermomutatus
  misc_feature: 177
atactaaccttactcctattcttcttccaactcttatcattttccttttcttaaatcctacttcttctctttttttcttctttcttttcttaactc

SEQ ID NO: 5558 - DNA, 96 bp, Aspergillus thermomutatus
  misc_feature: 177
cttttctatcccttcttttctttctatccctctactcctcctcctattccttacttacccctctttacctctcttaacctatcccttactctactc

SEQ ID NO: 5559 - DNA, 96 bp, Aspergillus thermomutatus
  misc_feature: 177
agatttgactgctagtcgtccactcagagtctcattctgtcgctctaatcgttgaatatgctcctggagctgttcaatcatgcccatcagaccctc

SEQ ID NO: 5560 - DNA, 96 bp, Aspergillus thermomutatus
  misc_feature: 177
gagcttcttgctagggcggtccgttcgtatgttgcgcaggtccaaccacacttttgaaccgacagcgtatctcaggctcgccgcgcgaaagcggtt

SEQ ID NO: 5561 - DNA, 96 bp, Aspergillus thermomutatus
  misc_feature: 177
aatccttatactaaccttactcctattcttcttccaactcttatcattttccttttcttaaatcctacttcttctctttttttcttctttcttttc

SEQ ID NO: 5562 - DNA, 96 bp, Aspergillus thermomutatus
  misc_feature: 177
ctagctgctaccatcaaatcaatgcgaaagcattggcagatagtccaccagtggtcccagcagagccatagtggccgtgtgagccagaaagaaaag

SEQ ID NO: 5563 - DNA, 96 bp, Aspergillus thermomutatus
  misc_feature: 177
ctgccatcctagatggcggaaacccatcatggtttggtattaggtgatccaccacctcctgtgcctcccaatcagcatcacacccatcacacgcct

SEQ ID NO: 5564 - DNA, 96 bp, Aspergillus thermomutatus
  misc_feature: 177
cgagcttcttgctagggcggtccgttcgtatgttgcgcaggtccaaccacacttttgaaccgacagcgtatctcaggctcgccgcgcgaaagcggt

SEQ ID NO: 5565 - DNA, 96 bp, Aspergillus thermomutatus
  misc_feature: 177
ccttcttttactatttactttactccttcttctactctttacttcactttttatcctctctttcttttctatcccttcttttctttctatccctct

SEQ ID NO: 5566 - DNA, 96 bp, Aspergillus thermomutatus
  misc_feature: 177
atagggagagagaagggaagagaagaaagaaaggagataagatttaagaatgaagatagtaagaaaaaggagagagggagtaaaggggaggtaagg

SEQ ID NO: 5567 - DNA, 96 bp, Aspergillus thermomutatus
  misc_feature: 177
cctaatccttatactaaccttactcctattcttcttccaactcttatcattttccttttcttaaatcctacttcttctctttttttcttctttctt

SEQ ID NO: 5568 - DNA, 96 bp, Aspergillus thermomutatus
  misc_feature: 177
acagggcactaatatcacacccttccctaacctatcggcaatcaccatgatctcctcacagtcgccggaggtaggtagcttggtgatgaagtcgat

SEQ ID NO: 5569 - DNA, 96 bp, Aspergillus thermomutatus
  misc_feature: 177
aaggttttcattgtctgctgagttttcgagcatttcttggatgattttgtccctttttgttgcttcaataattttttgaatcagtggatcctctgt

SEQ ID NO: 5570 - DNA, 96 bp, Aspergillus thermomutatus
  misc_feature: 176
tgtttcgaggacgaaacgctaagagagggggaggtgatgttacgacaccaacactactaggcggacctgacaggcagaaccaaggagcaatgacaa

SEQ ID NO: 5571 - DNA, 96 bp, Aspergillus thermomutatus
  misc_feature: 176
ttcgcgtgctgggcatcgagcttcttgctagggcggtccgttcgtatgttgcgcaggtccaaccacacttttgaaccgacagcgtatctcaggctc

SEQ ID NO: 5572 - DNA, 96 bp, Aspergillus thermomutatus
  misc_feature: 176
ttacctagaaggagcaaaacacaccgttatcgtgaaaacagaccacaagaatctcacgttcttcacgaccacgaaagaattgacacgacgacaagc

SEQ ID NO: 5573 - DNA, 96 bp, Aspergillus thermomutatus
  misc_feature: 176
gcgaaagcattggcagatagtccaccagtggtcccagcagagccatagtggccgtgtgagccagaaagaaaaggctaggggtgaggcagagctaca

SEQ ID NO: 5574 - DNA, 96 bp, Aspergillus thermomutatus
  misc_feature: 176
tgctagtcgacggcgaggccgaatatgaggttgaatggatactggatgagcgtgagaaacgcgttggcagaggccgccgcaaggagtatctcgtca

SEQ ID NO: 5575 - DNA, 96 bp, Aspergillus thermomutatus
  misc_feature: 176
tatacaactaccagcaacaactaccatgtaatggtagtccgaatggtagacgaggaaggaactatataaagacactcattatcactgtatctagca

SEQ ID NO: 5576 - DNA, 96 bp, Aspergillus thermomutatus
  misc_feature: 176
gacccaagtagcaggccataaggcaggccatgagacacacagagaggtgtacacaaggcaggcagaacagtaggcagaacggcaggcagaacggca

SEQ ID NO: 5577 - DNA, 96 bp, Aspergillus thermomutatus
  misc_feature: 176
aatggtagatggtatacaactaccagcaacaactaccatgtaatggtagtccgaatggtagacgaggaaggaactatataaagacactcattatca

SEQ ID NO: 5578 - DNA, 96 bp, Aspergillus thermomutatus
  misc_feature: 176
accgttatcgtgaaaacagaccacaagaatctcacgttcttcacgaccacgaaagaattgacacgacgacaagccagatgggctgagacattgtca

SEQ ID NO: 5579 - DNA, 96 bp, Aspergillus thermomutatus
  misc_feature: 176
tcttttctatcccttcttttctttctatccctctactcctcctcctattccttacttacccctctttacctctcttaacctatcccttactctact

SEQ ID NO: 5580 - DNA, 96 bp, Aspergillus thermomutatus
  misc_feature: 176
gagataggtagagaggcaccataggaggtatggagcaatgcaccgcgtgaggcacccccagatatgccatgcaaggtagggaccaaggtagccaga

SEQ ID NO: 5581 - DNA, 96 bp, Aspergillus thermomutatus
  misc_feature: 176
gagagggacccaagtagcaggccataaggcaggccatgagacacacagagaggtgtacacaaggcaggcagaacagtaggcagaacggcaggcaga

SEQ ID NO: 5582 - DNA, 96 bp, Aspergillus thermomutatus
  misc_feature: 176
cacagggcactaatatcacacccttccctaacctatcggcaatcaccatgatctcctcacagtcgccggaggtaggtagcttggtgatgaagtcga

SEQ ID NO: 5583 - DNA, 96 bp, Aspergillus thermomutatus
  misc_feature: 176
tccttactctcatccttactctcatccttactctcatccttatccctaatccttatactaaccttactcctattcttcttccaactcttatcattt

SEQ ID NO: 5584 - DNA, 96 bp, Aspergillus thermomutatus
  misc_feature: 176
tcacagggcactaatatcacacccttccctaacctatcggcaatcaccatgatctcctcacagtcgccggaggtaggtagcttggtgatgaagtcg

SEQ ID NO: 5585 - DNA, 96 bp, Aspergillus thermomutatus
  misc_feature: 176
ggtatactaatatctctattaggtgaaggtttagggggaaatttatctattctttccaaatatgcctcatgagtatttttacattctttccaaata

SEQ ID NO: 5586 - DNA, 96 bp, Aspergillus thermomutatus
  misc_feature: 176
ctacaattccttactctttcattcatcctttgctcctttttctactactctaaattatttctttctctccttttcttctctcctcttaacaaacta

SEQ ID NO: 5587 - DNA, 96 bp, Aspergillus thermomutatus
  misc_feature: 176
taatccttatactaaccttactcctattcttcttccaactcttatcattttccttttcttaaatcctacttcttctctttttttcttctttctttt

SEQ ID NO: 5588 - DNA, 96 bp, Aspergillus thermomutatus
  misc_feature: 176
taaagtaaatagtaaaagaaggagtagagagagagttaggagaaggagtagagtaagggttaggaggaggattagagggagggatagaaagaggat

SEQ ID NO: 5589 - DNA, 96 bp, Aspergillus thermomutatus
  misc_feature: 176
gtttcgaggacgaaacgctaagagagggggaggtgatgttacgacaccaacactactaggcggacctgacaggcagaaccaaggagcaatgacaac

SEQ ID NO: 5590 - DNA, 96 bp, Aspergillus thermomutatus
  misc_feature: 176
ccgttatcgtgaaaacagaccacaagaatctcacgttcttcacgaccacgaaagaattgacacgacgacaagccagatgggctgagacattgtcac

SEQ ID NO: 5591 - DNA, 96 bp, Aspergillus thermomutatus
  misc_feature: 176
ggtctacgtttctgtgttgattaccgagcattgaatgccattacgaagaaagaccgttacccccttccgctgatcaacgagacactagagcgcatc

SEQ ID NO: 5592 - DNA, 96 bp, Aspergillus thermomutatus
  misc_feature: 176
gggacccaagtagcaggccataaggcaggccatgagacacacagagaggtgtacacaaggcaggcagaacagtaggcagaacggcaggcagaacgg

SEQ ID NO: 5593 - DNA, 96 bp, Aspergillus thermomutatus
  misc_feature: 176
ggagggaggtagggagagaggtaggcgaagaggtaggcgacgaggtaggcgacgaggtaggtgaagaggtaggtgaagaggtaggtgaagaggtag

SEQ ID NO: 5594 - DNA, 96 bp, Aspergillus thermomutatus
  misc_feature: 176
acttcactttttatcctctctttcttttctatcccttcttttctttctatccctctactcctcctcctattccttacttacccctctttacctctc

SEQ ID NO: 5595 - DNA, 96 bp, Aspergillus thermomutatus
  misc_feature: 176
gaagggaggatgttaagagaataaagaaatgcaagaaaggaggaagagggagtgagaaagagagaggaattaatagtttaagaaagaatttaagag

SEQ ID NO: 5596 - DNA, 96 bp, Aspergillus thermomutatus
  misc_feature: 176
cttactcctattcttcttccaactcttatcattttccttttcttaaatcctacttcttctctttttttcttctttcttttcttaactcttactttc

SEQ ID NO: 5597 - DNA, 96 bp, Aspergillus thermomutatus
  misc_feature: 176
cttcgcgtgctgggcatcgagcttcttgctagggcggtccgttcgtatgttgcgcaggtccaaccacacttttgaaccgacagcgtatctcaggct

SEQ ID NO: 5598 - DNA, 96 bp, Aspergillus thermomutatus
  misc_feature: 176
ccgcccgctgtgctagtcgacggcgaggccgaatatgaggttgaatggatactggatgagcgtgagaaacgcgttggcagaggccgccgcaaggag

SEQ ID NO: 5599 - DNA, 96 bp, Aspergillus thermomutatus
  misc_feature: 176
ctaatgcggataaagttcttctccagcagctctgtcaacatctttcgtaagacaagcaattcaccgcgcgacatgctgtacagagggccccatggg

SEQ ID NO: 5600 - DNA, 96 bp, Aspergillus thermomutatus
  misc_feature: 176
cgctgtgctagtcgacggcgaggccgaatatgaggttgaatggatactggatgagcgtgagaaacgcgttggcagaggccgccgcaaggagtatct

SEQ ID NO: 5601 - DNA, 96 bp, Aspergillus thermomutatus
  misc_feature: 176
ccttactcctattcttcttccaactcttatcattttccttttcttaaatcctacttcttctctttttttcttctttcttttcttaactcttacttt

SEQ ID NO: 5602 - DNA, 96 bp, Aspergillus thermomutatus
  misc_feature: 176
cctctgctgtgatctgaggctgcgcagtaaccgtttgctgctgagttcctgcccgaccaacattcgagctggttggggtacgtggcgtgtcatttg

SEQ ID NO: 5603 - DNA, 96 bp, Aspergillus thermomutatus
  misc_feature: 176
atacaactaccagcaacaactaccatgtaatggtagtccgaatggtagacgaggaaggaactatataaagacactcattatcactgtatctagcat

SEQ ID NO: 5604 - DNA, 96 bp, Aspergillus thermomutatus
  misc_feature: 176
atccttatactaaccttactcctattcttcttccaactcttatcattttccttttcttaaatcctacttcttctctttttttcttctttcttttct

SEQ ID NO: 5605 - DNA, 96 bp, Aspergillus thermomutatus
  misc_feature: 175
ttttctttttctttccttcctctttcctctctctttccttcctctttccttcctccttacctcccctttattccctctctccttcctctttacttc

SEQ ID NO: 5606 - DNA, 96 bp, Aspergillus thermomutatus
  misc_feature: 175
taggtatactaatatctctattaggtgaaggtttagggggaaatttatctattctttccaaatatgcctcatgagtatttttacattctttccaaa

SEQ ID NO: 5607 - DNA, 96 bp, Aspergillus thermomutatus
  misc_feature: 175
ttcttgctagggcggtccgttcgtatgttgcgcaggtccaaccacacttttgaaccgacagcgtatctcaggctcgccgcgcgaaagcggttcgaa

SEQ ID NO: 5608 - DNA, 96 bp, Aspergillus thermomutatus
  misc_feature: 175
gagagaggtaggcagagaggtagggaggtagggagggaggtagggagagaggtaggcgaagaggtaggcgacgaggtaggcgacgaggtaggtgaa

SEQ ID NO: 5609 - DNA, 96 bp, Aspergillus thermomutatus
  misc_feature: 175
ttacttcactttttatcctctctttcttttctatcccttcttttctttctatccctctactcctcctcctattccttacttacccctctttacctc

SEQ ID NO: 5610 - DNA, 96 bp, Aspergillus thermomutatus
  misc_feature: 175
tgcgaaagcattggcagatagtccaccagtggtcccagcagagccatagtggccgtgtgagccagaaagaaaaggctaggggtgaggcagagctac

SEQ ID NO: 5611 - DNA, 96 bp, Aspergillus thermomutatus
  misc_feature: 175
tgcctactcttggtctgccttactgcctctctccctgtcttacatggtgccttcctccctaccttatattatacattcttcgctacctcacgcggt

SEQ ID NO: 5612 - DNA, 96 bp, Aspergillus thermomutatus
  misc_feature: 175
tcttgctagggcggtccgttcgtatgttgcgcaggtccaaccacacttttgaaccgacagcgtatctcaggctcgccgcgcgaaagcggttcgaat

SEQ ID NO: 5613 - DNA, 96 bp, Aspergillus thermomutatus
  misc_feature: 175
cttcttgctagggcggtccgttcgtatgttgcgcaggtccaaccacacttttgaaccgacagcgtatctcaggctcgccgcgcgaaagcggttcga

SEQ ID NO: 5614 - DNA, 96 bp, Aspergillus thermomutatus
  misc_feature: 175
gatcgtacgcctcgagtggatgtaggggtctgccattctagtatagcttttaccttgtcggggtccatgcgtacgcccttgccagcttcaatgata

SEQ ID NO: 5615 - DNA, 96 bp, Aspergillus thermomutatus
  misc_feature: 175
tacaattccttactctttcattcatcctttgctcctttttctactactctaaattatttctttctctccttttcttctctcctcttaacaaactat

SEQ ID NO: 5616 - DNA, 96 bp, Aspergillus thermomutatus
  misc_feature: 175
aatcacatgccccataagtagggttgcaagttgtgatgccgtcatgttcgttgtggttgggattaaatggatgaacttcgtaagtctgtcagtaac

SEQ ID NO: 5617 - DNA, 96 bp, Aspergillus thermomutatus
  misc_feature: 175
gccccatgtaaggcagggttaaggcaggcagagaggtaaggagataggtagagagggacccaagtagcaggccataaggcaggccatgagacacac

SEQ ID NO: 5618 - DNA, 96 bp, Aspergillus thermomutatus
  misc_feature: 175
acgaccgcctacttcggtcgcattgtcacgtgaccaactaccatatacccaagcttggcaatggtagatggtatacaactaccagcaacaactacc

SEQ ID NO: 5619 - DNA, 96 bp, Aspergillus thermomutatus
  misc_feature: 175
ggctaccttggtccctaccttgcatggcatatctgggggtgcctcacgcggtgcattgctccatacctcctatggtgcctctctacctatctccct

SEQ ID NO: 5620 - DNA, 96 bp, Aspergillus thermomutatus
  misc_feature: 175
acaattccttactctttcattcatcctttgctcctttttctactactctaaattatttctttctctccttttcttctctcctcttaacaaactatc

SEQ ID NO: 5621 - DNA, 96 bp, Aspergillus thermomutatus
  misc_feature: 175
gagggaggtagggagagaggtaggcgaagaggtaggcgacgaggtaggcgacgaggtaggtgaagaggtaggtgaagaggtaggtgaagaggtagg

SEQ ID NO: 5622 - DNA, 96 bp, Aspergillus thermomutatus
  misc_feature: 175
cttttctttttctttccttcctctttcctctctctttccttcctctttccttcctccttacctcccctttattccctctctccttcctctttactt

SEQ ID NO: 5623 - DNA, 96 bp, Aspergillus thermomutatus
  misc_feature: 175
agagaggtaggcagagaggtagggaggtagggagggaggtagggagagaggtaggcgaagaggtaggcgacgaggtaggcgacgaggtaggtgaag

SEQ ID NO: 5624 - DNA, 96 bp, Aspergillus thermomutatus
  misc_feature: 175
acccaagtagcaggccataaggcaggccatgagacacacagagaggtgtacacaaggcaggcagaacagtaggcagaacggcaggcagaacggcag

SEQ ID NO: 5625 - DNA, 96 bp, Aspergillus thermomutatus
  misc_feature: 175
accgcctacttcggtcgcattgtcacgtgaccaactaccatatacccaagcttggcaatggtagatggtatacaactaccagcaacaactaccatg

SEQ ID NO: 5626 - DNA, 96 bp, Aspergillus thermomutatus
  misc_feature: 175
cagatttgactgctagtcgtccactcagagtctcattctgtcgctctaatcgttgaatatgctcctggagctgttcaatcatgcccatcagaccct

SEQ ID NO: 5627 - DNA, 96 bp, Aspergillus thermomutatus
  misc_feature: 175
agcttggcaatggtagatggtatacaactaccagcaacaactaccatgtaatggtagtccgaatggtagacgaggaaggaactatataaagacact

SEQ ID NO: 5628 - DNA, 96 bp, Aspergillus thermomutatus
  misc_feature: 175
agattagaagggaggatgttaagagaataaagaaatgcaagaaaggaggaagagggagtgagaaagagagaggaattaatagtttaagaaagaatt

SEQ ID NO: 5629 - DNA, 96 bp, Aspergillus thermomutatus
  misc_feature: 175
aagaaggttgaagattagaagggaggatgttaagagaataaagaaatgcaagaaaggaggaagagggagtgagaaagagagaggaattaatagttt

SEQ ID NO: 5630 - DNA, 96 bp, Aspergillus thermomutatus
  misc_feature: 174
ccgaaatcatcgcgaaacaccacgatgacccaatgcatggtcatatgggaacagaaaaaacggcagaagcgatttcacgaaattactatttcccaa

SEQ ID NO: 5631 - DNA, 96 bp, Aspergillus thermomutatus
  misc_feature: 174
ttaggtatactaatatctctattaggtgaaggtttagggggaaatttatctattctttccaaatatgcctcatgagtatttttacattctttccaa

SEQ ID NO: 5632 - DNA, 96 bp, Aspergillus thermomutatus
  misc_feature: 174
ggccccatgtaaggcagggttaaggcaggcagagaggtaaggagataggtagagagggacccaagtagcaggccataaggcaggccatgagacaca

SEQ ID NO: 5633 - DNA, 96 bp, Aspergillus thermomutatus
  misc_feature: 174
cgaccgcctacttcggtcgcattgtcacgtgaccaactaccatatacccaagcttggcaatggtagatggtatacaactaccagcaacaactacca

SEQ ID NO: 5634 - DNA, 96 bp, Aspergillus thermomutatus
  misc_feature: 174
attaggtatactaatatctctattaggtgaaggtttagggggaaatttatctattctttccaaatatgcctcatgagtatttttacattctttcca

SEQ ID NO: 5635 - DNA, 96 bp, Aspergillus thermomutatus
  misc_feature: 174
tgactaccagccgcccgctgtgctagtcgacggcgaggccgaatatgaggttgaatggatactggatgagcgtgagaaacgcgttggcagaggccg

SEQ ID NO: 5636 - DNA, 96 bp, Aspergillus thermomutatus
  misc_feature: 174
gagaggtaggcagagaggtagggaggtagggagggaggtagggagagaggtaggcgaagaggtaggcgacgaggtaggcgacgaggtaggtgaaga

SEQ ID NO: 5637 - DNA, 96 bp, Aspergillus thermomutatus
  misc_feature: 174
tctgtcaacatctttcgtaagacaagcaattcaccgcgcgacatgctgtacagagggccccatgggggttctaacggcttcccgtcttcgccctta

SEQ ID NO: 5638 - DNA, 96 bp, Aspergillus thermomutatus
  misc_feature: 174
tcgcgtgctgggcatcgagcttcttgctagggcggtccgttcgtatgttgcgcaggtccaaccacacttttgaaccgacagcgtatctcaggctcg

SEQ ID NO: 5639 - DNA, 96 bp, Aspergillus thermomutatus
  misc_feature: 174
aactacaattccttactctttcattcatcctttgctcctttttctactactctaaattatttctttctctccttttcttctctcctcttaacaaac

SEQ ID NO: 5640 - DNA, 96 bp, Aspergillus thermomutatus
  misc_feature: 174
gtccctaccttgcatggcatatctgggggtgcctcacgcggtgcattgctccatacctcctatggtgcctctctacctatctccctacctcttcac

SEQ ID NO: 5641 - DNA, 96 bp, Aspergillus thermomutatus
  misc_feature: 174
ggacccaagtagcaggccataaggcaggccatgagacacacagagaggtgtacacaaggcaggcagaacagtaggcagaacggcaggcagaacggc

SEQ ID NO: 5642 - DNA, 96 bp, Aspergillus thermomutatus
  misc_feature: 174
cgcgtgctgggcatcgagcttcttgctagggcggtccgttcgtatgttgcgcaggtccaaccacacttttgaaccgacagcgtatctcaggctcgc

SEQ ID NO: 5643 - DNA, 96 bp, Aspergillus thermomutatus
  misc_feature: 174
gcacggagagaggtaggcagagaggtagggaggtagggagggaggtagggagagaggtaggcgaagaggtaggcgacgaggtaggcgacgaggtag

SEQ ID NO: 5644 - DNA, 96 bp, Aspergillus thermomutatus
  misc_feature: 174
ccttggtccctaccttgcatggcatatctgggggtgcctcacgcggtgcattgctccatacctcctatggtgcctctctacctatctccctacctc

SEQ ID NO: 5645 - DNA, 96 bp, Aspergillus thermomutatus
  misc_feature: 174
gaccgcctacttcggtcgcattgtcacgtgaccaactaccatatacccaagcttggcaatggtagatggtatacaactaccagcaacaactaccat

SEQ ID NO: 5646 - DNA, 96 bp, Aspergillus thermomutatus
  misc_feature: 174
cgaaagcattggcagatagtccaccagtggtcccagcagagccatagtggccgtgtgagccagaaagaaaaggctaggggtgaggcagagctacag

SEQ ID NO: 5647 - DNA, 96 bp, Aspergillus thermomutatus
  misc_feature: 174
ctccttcttctactctttacttcactttttatcctctctttcttttctatcccttcttttctttctatccctctactcctcctcctattccttact

SEQ ID NO: 5648 - DNA, 96 bp, Aspergillus thermomutatus
  misc_feature: 174
aagtagatgagtaagggttagttagtttaggagaagtaaagaagggaaatagtagagtaagcatagtagggattagaagaggagaatatatattag

SEQ ID NO: 5649 - DNA, 96 bp, Aspergillus thermomutatus
  misc_feature: 174
acagaaaaggacaaggtgacaggaaagaacaaaatgacaggaggagcaaggtagagaggtagaggttaatttttaatagtattagaaatgttatat

SEQ ID NO: 5650 - DNA, 96 bp, Aspergillus thermomutatus
  misc_feature: 174
accctctgtcatccatggtaaggttttcattgtctgctgagttttcgagcatttcttggatgattttgtccctttttgttgcttcaataatttttt

SEQ ID NO: 5651 - DNA, 96 bp, Aspergillus thermomutatus
  misc_feature: 173
cgaaatcatcgcgaaacaccacgatgacccaatgcatggtcatatgggaacagaaaaaacggcagaagcgatttcacgaaattactatttcccaaa

SEQ ID NO: 5652 - DNA, 96 bp, Aspergillus thermomutatus
  misc_feature: 173
gtaagggatagtgtaagggatagggttaaaaaagaggataagaaaagaaagaagaaaaggaaaagagagagagagaagaaaaagagagagaagaaa

SEQ ID NO: 5653 - DNA, 96 bp, Aspergillus thermomutatus
  misc_feature: 173
tttacttcactttttatcctctctttcttttctatcccttcttttctttctatccctctactcctcctcctattccttacttacccctctttacct

SEQ ID NO: 5654 - DNA, 96 bp, Aspergillus thermomutatus
  misc_feature: 173
caatcacatgccccataagtagggttgcaagttgtgatgccgtcatgttcgttgtggttgggattaaatggatgaacttcgtaagtctgtcagtaa

SEQ ID NO: 5655 - DNA, 96 bp, Aspergillus thermomutatus
  misc_feature: 173
accgaaatcatcgcgaaacaccacgatgacccaatgcatggtcatatgggaacagaaaaaacggcagaagcgatttcacgaaattactatttccca

SEQ ID NO: 5656 - DNA, 96 bp, Aspergillus thermomutatus
  misc_feature: 173
tgcatctctggggctacgtggggtgtgttgatccctactatactacctgccccatatggtcgctctctggctaccttggtccctaccttgcatggc

SEQ ID NO: 5657 - DNA, 96 bp, Aspergillus thermomutatus
  misc_feature: 173
gccgcccgctgtgctagtcgacggcgaggccgaatatgaggttgaatggatactggatgagcgtgagaaacgcgttggcagaggccgccgcaagga

SEQ ID NO: 5658 - DNA, 96 bp, Aspergillus thermomutatus
  misc_feature: 173
tccctaatccttatactaaccttactcctattcttcttccaactcttatcattttccttttcttaaatcctacttcttctctttttttcttctttc

SEQ ID NO: 5659 - DNA, 96 bp, Aspergillus thermomutatus
  misc_feature: 173
taggtagagaggcaccataggaggtatggagcaatgcaccgcgtgaggcacccccagatatgccatgcaaggtagggaccaaggtagccagagagc

SEQ ID NO: 5660 - DNA, 96 bp, Aspergillus thermomutatus
  misc_feature: 173
atgcgaaagcattggcagatagtccaccagtggtcccagcagagccatagtggccgtgtgagccagaaagaaaaggctaggggtgaggcagagcta

SEQ ID NO: 5661 - DNA, 96 bp, Aspergillus thermomutatus
  misc_feature: 173
cttcttttactatttactttactccttcttctactctttacttcactttttatcctctctttcttttctatcccttcttttctttctatccctcta

SEQ ID NO: 5662 - DNA, 96 bp, Aspergillus thermomutatus
  misc_feature: 173
ggcacggagagaggtaggcagagaggtagggaggtagggagggaggtagggagagaggtaggcgaagaggtaggcgacgaggtaggcgacgaggta

SEQ ID NO: 5663 - DNA, 96 bp, Aspergillus thermomutatus
  misc_feature: 173
gaagtagatgagtaagggttagttagtttaggagaagtaaagaagggaaatagtagagtaagcatagtagggattagaagaggagaatatatatta

SEQ ID NO: 5664 - DNA, 96 bp, Aspergillus thermomutatus
  misc_feature: 173
atcgactcttgacatcagacatcatggcaaatgacacgccacgtaccccaaccagctcgaatgttggtcgggcaggaactcagcagcaaacggtta

SEQ ID NO: 5665 - DNA, 96 bp, Aspergillus thermomutatus
  misc_feature: 173
gtttaaggattaaaagaaagagtagagtaagggataggttaagagaggtaaagaggggtaagtaaggaataggaggaggagtagagggatagaaag

SEQ ID NO: 5666 - DNA, 96 bp, Aspergillus thermomutatus
  misc_feature: 173
gtgcatctctggggctacgtggggtgtgttgatccctactatactacctgccccatatggtcgctctctggctaccttggtccctaccttgcatgg

SEQ ID NO: 5667 - DNA, 96 bp, Aspergillus thermomutatus
  misc_feature: 173
gtcgatcaccgaattgagttgactaagggcgaagacgggaagccgttagaacccccatggggccctctgtacagcatgtcgcgcggtgaattgctt

SEQ ID NO: 5668 - DNA, 96 bp, Aspergillus thermomutatus
  misc_feature: 173
ggtagatggtatacaactaccagcaacaactaccatgtaatggtagtccgaatggtagacgaggaaggaactatataaagacactcattatcactg

SEQ ID NO: 5669 - DNA, 96 bp, Aspergillus thermomutatus
  misc_feature: 173
ggtagagagggacccaagtagcaggccataaggcaggccatgagacacacagagaggtgtacacaaggcaggcagaacagtaggcagaacggcagg

SEQ ID NO: 5670 - DNA, 96 bp, Aspergillus thermomutatus
  misc_feature: 173
ggagataggtagagaggcaccataggaggtatggagcaatgcaccgcgtgaggcacccccagatatgccatgcaaggtagggaccaaggtagccag

SEQ ID NO: 5671 - DNA, 96 bp, Aspergillus thermomutatus
  misc_feature: 173
gcttcttgctagggcggtccgttcgtatgttgcgcaggtccaaccacacttttgaaccgacagcgtatctcaggctcgccgcgcgaaagcggttcg

SEQ ID NO: 5672 - DNA, 96 bp, Aspergillus thermomutatus
  misc_feature: 173
agcttcttgctagggcggtccgttcgtatgttgcgcaggtccaaccacacttttgaaccgacagcgtatctcaggctcgccgcgcgaaagcggttc

SEQ ID NO: 5673 - DNA, 96 bp, Aspergillus thermomutatus
  misc_feature: 173
ctttcttttctatcccttcttttctttctatccctctactcctcctcctattccttacttacccctctttacctctcttaacctatcccttactct

SEQ ID NO: 5674 - DNA, 96 bp, Aspergillus thermomutatus
  misc_feature: 173
cgcgcggtagtcgacacagaatcgtaaccctccacctggcttgcgggcgaacagcaccggagccgcggcggaagagctactaatgcggataaagtt

SEQ ID NO: 5675 - DNA, 96 bp, Aspergillus thermomutatus
  misc_feature: 173
cgatcgtacgcctcgagtggatgtaggggtctgccattctagtatagcttttaccttgtcggggtccatgcgtacgcccttgccagcttcaatgat

SEQ ID NO: 5676 - DNA, 96 bp, Aspergillus thermomutatus
  misc_feature: 173
cacggagagaggtaggcagagaggtagggaggtagggagggaggtagggagagaggtaggcgaagaggtaggcgacgaggtaggcgacgaggtagg

SEQ ID NO: 5677 - DNA, 96 bp, Aspergillus thermomutatus
  misc_feature: 173
ccctctgctgtgatctgaggctgcgcagtaaccgtttgctgctgagttcctgcccgaccaacattcgagctggttggggtacgtggcgtgtcattt

SEQ ID NO: 5678 - DNA, 96 bp, Aspergillus thermomutatus
  misc_feature: 173
ataacatttctaatactattaaaaattaacctctacctctctaccttgctcctcctgtcattttgttctttcctgtcaccttgtccttttctgttg

SEQ ID NO: 5679 - DNA, 96 bp, Aspergillus thermomutatus
  misc_feature: 172
ttttctttccttcctctttcctctctctttccttcctctttccttcctccttacctcccctttattccctctctccttcctctttacttcctcctt

SEQ ID NO: 5680 - DNA, 96 bp, Aspergillus thermomutatus
  misc_feature: 172
tttatcctctctttcttttctatcccttcttttctttctatccctctactcctcctcctattccttacttacccctctttacctctcttaacctat

SEQ ID NO: 5681 - DNA, 96 bp, Aspergillus thermomutatus
  misc_feature: 172
ttcttctactctttacttcactttttatcctctctttcttttctatcccttcttttctttctatccctctactcctcctcctattccttacttacc

SEQ ID NO: 5682 - DNA, 96 bp, Aspergillus thermomutatus
  misc_feature: 172
ttctcctaaactaactaacccttactcatctacttctcctctcccttctcttaaaccaacccctacttatttactgcttcctactctctaaccatc

SEQ ID NO: 5683 - DNA, 96 bp, Aspergillus thermomutatus
  misc_feature: 172
gaaggagtaaagtaaatagtaaaagaaggagtagagagagagttaggagaaggagtagagtaagggttaggaggaggattagagggagggatagaa

SEQ ID NO: 5684 - DNA, 96 bp, Aspergillus thermomutatus
  misc_feature: 172
gtttaacatctaaattcgtatttaattatagatgtaattaaactagtccttacccttaaaagaaaggacaaggagacagggaaggacaaggcaaca

SEQ ID NO: 5685 - DNA, 96 bp, Aspergillus thermomutatus
  misc_feature: 172
ccccatgtaaggcagggttaaggcaggcagagaggtaaggagataggtagagagggacccaagtagcaggccataaggcaggccatgagacacaca

SEQ ID NO: 5686 - DNA, 96 bp, Aspergillus thermomutatus
  misc_feature: 172
gaggtctacgtttctgtgttgattaccgagcattgaatgccattacgaagaaagaccgttacccccttccgctgatcaacgagacactagagcgca

SEQ ID NO: 5687 - DNA, 96 bp, Aspergillus thermomutatus
  misc_feature: 172
ccgcgtacgagctgtacagccagggaatcgcgaatgggttactgttgttgaatgtatcaatgcttctgggtggtctctgccccccataatcaatca

SEQ ID NO: 5688 - DNA, 96 bp, Aspergillus thermomutatus
  misc_feature: 172
taagcaaggcacggagagaggtaggcagagaggtagggaggtagggagggaggtagggagagaggtaggcgaagaggtaggcgacgaggtaggcga

SEQ ID NO: 5689 - DNA, 96 bp, Aspergillus thermomutatus
  misc_feature: 172
tcgactcttgacatcagacatcatggcaaatgacacgccacgtaccccaaccagctcgaatgttggtcgggcaggaactcagcagcaaacggttac

SEQ ID NO: 5690 - DNA, 96 bp, Aspergillus thermomutatus
  misc_feature: 172
tcagcgtcagcattgccaggatcaagatggtgcggagcaggcgtgtgatgggtgtgatgctgattgggaggcacaggaggtggtggatcacctaat

SEQ ID NO: 5691 - DNA, 96 bp, Aspergillus thermomutatus
  misc_feature: 172
tattaagcaaggcacggagagaggtaggcagagaggtagggaggtagggagggaggtagggagagaggtaggcgaagaggtaggcgacgaggtagg

SEQ ID NO: 5692 - DNA, 96 bp, Aspergillus thermomutatus
  misc_feature: 172
tataacatttctaatactattaaaaattaacctctacctctctaccttgctcctcctgtcattttgttctttcctgtcaccttgtccttttctgtt

SEQ ID NO: 5693 - DNA, 96 bp, Aspergillus thermomutatus
  misc_feature: 172
tagtcgacacagaatcgtaaccctccacctggcttgcgggcgaacagcaccggagccgcggcggaagagctactaatgcggataaagttcttctcc

SEQ ID NO: 5694 - DNA, 96 bp, Aspergillus thermomutatus
  misc_feature: 172
ctctttcattcatcctttgctcctttttctactactctaaattatttctttctctccttttcttctctcctcttaacaaactatcccttacttcta

SEQ ID NO: 5695 - DNA, 96 bp, Aspergillus thermomutatus
  misc_feature: 172
tacaactaccagcaacaactaccatgtaatggtagtccgaatggtagacgaggaaggaactatataaagacactcattatcactgtatctagcatt

SEQ ID NO: 5696 - DNA, 96 bp, Aspergillus thermomutatus
  misc_feature: 172
gaaatcatcgcgaaacaccacgatgacccaatgcatggtcatatgggaacagaaaaaacggcagaagcgatttcacgaaattactatttcccaaac

SEQ ID NO: 5697 - DNA, 96 bp, Aspergillus thermomutatus
  misc_feature: 172
gtagtcgacacagaatcgtaaccctccacctggcttgcgggcgaacagcaccggagccgcggcggaagagctactaatgcggataaagttcttctc

SEQ ID NO: 5698 - DNA, 96 bp, Aspergillus thermomutatus
  misc_feature: 172
gcccagttgatataccgttggaaggtactcggtgcgttcgccatgccaaaaggggtcaccaaccattcgtacagaccaaaccgcgtacggaaggcc

SEQ ID NO: 5699 - DNA, 96 bp, Aspergillus thermomutatus
  misc_feature: 172
gcgtacgagctgtacagccagggaatcgcgaatgggttactgttgttgaatgtatcaatgcttctgggtggtctctgccccccataatcaatcatc

SEQ ID NO: 5700 - DNA, 96 bp, Aspergillus thermomutatus
  misc_feature: 172
gcgcggtagtcgacacagaatcgtaaccctccacctggcttgcgggcgaacagcaccggagccgcggcggaagagctactaatgcggataaagttc

SEQ ID NO: 5701 - DNA, 96 bp, Aspergillus thermomutatus
  misc_feature: 172
acaactaccagcaacaactaccatgtaatggtagtccgaatggtagacgaggaaggaactatataaagacactcattatcactgtatctagcattc

SEQ ID NO: 5702 - DNA, 96 bp, Aspergillus thermomutatus
  misc_feature: 172
cttctcctaaactaactaacccttactcatctacttctcctctcccttctcttaaaccaacccctacttatttactgcttcctactctctaaccat

SEQ ID NO: 5703 - DNA, 96 bp, Aspergillus thermomutatus
  misc_feature: 172
agataggtagagaggcaccataggaggtatggagcaatgcaccgcgtgaggcacccccagatatgccatgcaaggtagggaccaaggtagccagag

SEQ ID NO: 5704 - DNA, 96 bp, Aspergillus thermomutatus
  misc_feature: 172
aagaaggagtaaagtaaatagtaaaagaaggagtagagagagagttaggagaaggagtagagtaagggttaggaggaggattagagggagggatag

SEQ ID NO: 5705 - DNA, 96 bp, Aspergillus thermomutatus
  misc_feature: 172
atattaagcaaggcacggagagaggtaggcagagaggtagggaggtagggagggaggtagggagagaggtaggcgaagaggtaggcgacgaggtag

SEQ ID NO: 5706 - DNA, 96 bp, Aspergillus thermomutatus
  misc_feature: 172
cccagttgatataccgttggaaggtactcggtgcgttcgccatgccaaaaggggtcaccaaccattcgtacagaccaaaccgcgtacggaaggccg

SEQ ID NO: 5707 - DNA, 96 bp, Aspergillus thermomutatus
  misc_feature: 172
cgcgtacgagctgtacagccagggaatcgcgaatgggttactgttgttgaatgtatcaatgcttctgggtggtctctgccccccataatcaatcat

SEQ ID NO: 5708 - DNA, 96 bp, Aspergillus thermomutatus
  misc_feature: 172
aggtatactaatatctctattaggtgaaggtttagggggaaatttatctattctttccaaatatgcctcatgagtatttttacattctttccaaat

SEQ ID NO: 5709 - DNA, 96 bp, Aspergillus thermomutatus
  misc_feature: 172
aagattagaagggaggatgttaagagaataaagaaatgcaagaaaggaggaagagggagtgagaaagagagaggaattaatagtttaagaaagaat

SEQ ID NO: 5710 - DNA, 96 bp, Aspergillus thermomutatus
  misc_feature: 172
agaagaaggagtaaagtaaatagtaaaagaaggagtagagagagagttaggagaaggagtagagtaagggttaggaggaggattagagggagggat

SEQ ID NO: 5711 - DNA, 96 bp, Aspergillus thermomutatus
  misc_feature: 172
accttggtccctaccttgcatggcatatctgggggtgcctcacgcggtgcattgctccatacctcctatggtgcctctctacctatctccctacct

SEQ ID NO: 5712 - DNA, 96 bp, Aspergillus thermomutatus
  misc_feature: 171
ttttatcctctctttcttttctatcccttcttttctttctatccctctactcctcctcctattccttacttacccctctttacctctcttaaccta

SEQ ID NO: 5713 - DNA, 96 bp, Aspergillus thermomutatus
  misc_feature: 171
tttcattcatcctttgctcctttttctactactctaaattatttctttctctccttttcttctctcctcttaacaaactatcccttacttctatcc

SEQ ID NO: 5714 - DNA, 96 bp, Aspergillus thermomutatus
  misc_feature: 171
gtttacctagaaggagcaaaacacaccgttatcgtgaaaacagaccacaagaatctcacgttcttcacgaccacgaaagaattgacacgacgacaa

SEQ ID NO: 5715 - DNA, 96 bp, Aspergillus thermomutatus
  misc_feature: 171
ggttgaagattagaagggaggatgttaagagaataaagaaatgcaagaaaggaggaagagggagtgagaaagagagaggaattaatagtttaagaa

SEQ ID NO: 5716 - DNA, 96 bp, Aspergillus thermomutatus
  misc_feature: 171
ttatcctctctttcttttctatcccttcttttctttctatccctctactcctcctcctattccttacttacccctctttacctctcttaacctatc

SEQ ID NO: 5717 - DNA, 96 bp, Aspergillus thermomutatus
  misc_feature: 171
ttaagcaaggcacggagagaggtaggcagagaggtagggaggtagggagggaggtagggagagaggtaggcgaagaggtaggcgacgaggtaggcg

SEQ ID NO: 5718 - DNA, 96 bp, Aspergillus thermomutatus
  misc_feature: 171
gggagataggtagagaggcaccataggaggtatggagcaatgcaccgcgtgaggcacccccagatatgccatgcaaggtagggaccaaggtagcca

SEQ ID NO: 5719 - DNA, 96 bp, Aspergillus thermomutatus
  misc_feature: 171
gcatctctggggctacgtggggtgtgttgatccctactatactacctgccccatatggtcgctctctggctaccttggtccctaccttgcatggca

SEQ ID NO: 5720 - DNA, 96 bp, Aspergillus thermomutatus
  misc_feature: 171
tcttctactctttacttcactttttatcctctctttcttttctatcccttcttttctttctatccctctactcctcctcctattccttacttaccc

SEQ ID NO: 5721 - DNA, 96 bp, Aspergillus thermomutatus
  misc_feature: 171
aggttgaagattagaagggaggatgttaagagaataaagaaatgcaagaaaggaggaagagggagtgagaaagagagaggaattaatagtttaaga

SEQ ID NO: 5722 - DNA, 96 bp, Aspergillus thermomutatus
  misc_feature: 171
agaaagaaaagaagggatagaaaagaaagagaggataaaaagtgaagtaaagagtagaagaaggagtaaagtaaatagtaaaagaaggagtagaga

SEQ ID NO: 5723 - DNA, 96 bp, Aspergillus thermomutatus
  misc_feature: 171
cagtgtctcaatggcatgatattcaccatgatagcagtgccatccagatcccacatgcatttgatgagcctctgcctatattaccatgtcactcga

SEQ ID NO: 5724 - DNA, 96 bp, Aspergillus thermomutatus
  misc_feature: 171
cagcgtcagcattgccaggatcaagatggtgcggagcaggcgtgtgatgggtgtgatgctgattgggaggcacaggaggtggtggatcacctaata

SEQ ID NO: 5725 - DNA, 96 bp, Aspergillus thermomutatus
  misc_feature: 171
gctaccttggtccctaccttgcatggcatatctgggggtgcctcacgcggtgcattgctccatacctcctatggtgcctctctacctatctcccta

SEQ ID NO: 5726 - DNA, 96 bp, Aspergillus thermomutatus
  misc_feature: 171
acaatcacatgccccataagtagggttgcaagttgtgatgccgtcatgttcgttgtggttgggattaaatggatgaacttcgtaagtctgtcagta

SEQ ID NO: 5727 - DNA, 96 bp, Aspergillus thermomutatus
  misc_feature: 171
taactaacccttactcatctacttctcctctcccttctcttaaaccaacccctacttatttactgcttcctactctctaaccatccctctatctct

SEQ ID NO: 5728 - DNA, 96 bp, Aspergillus thermomutatus
  misc_feature: 171
agcgtcagcattgccaggatcaagatggtgcggagcaggcgtgtgatgggtgtgatgctgattgggaggcacaggaggtggtggatcacctaatac

SEQ ID NO: 5729 - DNA, 96 bp, Aspergillus thermomutatus
  misc_feature: 171
gtatcagcgtcagcattgccaggatcaagatggtgcggagcaggcgtgtgatgggtgtgatgctgattgggaggcacaggaggtggtggatcacct

SEQ ID NO: 5730 - DNA, 96 bp, Aspergillus thermomutatus
  misc_feature: 171
atggcatatctgggggtgcctcacgcggtgcattgctccatacctcctatggtgcctctctacctatctccctacctcttcacctacctcttcacc

SEQ ID NO: 5731 - DNA, 96 bp, Aspergillus thermomutatus
  misc_feature: 171
ggtaatataggcagaggctcatcaaatgcatgtgggatctggatggcactgctatcatggtgaatatcatgccattgagacactgcctgggtgatc

SEQ ID NO: 5732 - DNA, 96 bp, Aspergillus thermomutatus
  misc_feature: 171
aaccgaaatcatcgcgaaacaccacgatgacccaatgcatggtcatatgggaacagaaaaaacggcagaagcgatttcacgaaattactatttccc

SEQ ID NO: 5733 - DNA, 96 bp, Aspergillus thermomutatus
  misc_feature: 171
ggcagtgtctcaatggcatgatattcaccatgatagcagtgccatccagatcccacatgcatttgatgagcctctgcctatattaccatgtcactc

SEQ ID NO: 5734 - DNA, 96 bp, Aspergillus thermomutatus
  misc_feature: 171
ctttttctttccttcctctttcctctctctttccttcctctttccttcctccttacctcccctttattccctctctccttcctctttacttcctcc

SEQ ID NO: 5735 - DNA, 96 bp, Aspergillus thermomutatus
  misc_feature: 171
gcagtgtctcaatggcatgatattcaccatgatagcagtgccatccagatcccacatgcatttgatgagcctctgcctatattaccatgtcactcg

SEQ ID NO: 5736 - DNA, 96 bp, Aspergillus thermomutatus
  misc_feature: 171
catctttcgtaagacaagcaattcaccgcgcgacatgctgtacagagggccccatgggggttctaacggcttcccgtcttcgcccttagtcaactc

SEQ ID NO: 5737 - DNA, 96 bp, Aspergillus thermomutatus
  misc_feature: 171
aaattaggtatactaatatctctattaggtgaaggtttagggggaaatttatctattctttccaaatatgcctcatgagtatttttacattctttc

SEQ ID NO: 5738 - DNA, 96 bp, Aspergillus thermomutatus
  misc_feature: 171
cttttctttctatccctctactcctcctcctattccttacttacccctctttacctctcttaacctatcccttactctactctttcttttaatcct

SEQ ID NO: 5739 - DNA, 96 bp, Aspergillus thermomutatus
  misc_feature: 171
aaggttgaagattagaagggaggatgttaagagaataaagaaatgcaagaaaggaggaagagggagtgagaaagagagaggaattaatagtttaag

SEQ ID NO: 5740 - DNA, 96 bp, Aspergillus thermomutatus
  misc_feature: 171
cggagagaggtaggcagagaggtagggaggtagggagggaggtagggagagaggtaggcgaagaggtaggcgacgaggtaggcgacgaggtaggtg

SEQ ID NO: 5741 - DNA, 96 bp, Aspergillus thermomutatus
  misc_feature: 171
aaagtctggagggtttacctagaaggagcaaaacacaccgttatcgtgaaaacagaccacaagaatctcacgttcttcacgaccacgaaagaattg

SEQ ID NO: 5742 - DNA, 96 bp, Aspergillus thermomutatus
  misc_feature: 171
caactaccagcaacaactaccatgtaatggtagtccgaatggtagacgaggaaggaactatataaagacactcattatcactgtatctagcattct

SEQ ID NO: 5743 - DNA, 96 bp, Aspergillus thermomutatus
  misc_feature: 171
caaagtctggagggtttacctagaaggagcaaaacacaccgttatcgtgaaaacagaccacaagaatctcacgttcttcacgaccacgaaagaatt

SEQ ID NO: 5744 - DNA, 96 bp, Aspergillus thermomutatus
  misc_feature: 171
aggtctacgtttctgtgttgattaccgagcattgaatgccattacgaagaaagaccgttacccccttccgctgatcaacgagacactagagcgcat

SEQ ID NO: 5745 - DNA, 96 bp, Aspergillus thermomutatus
  misc_feature: 171
aactaccagcaacaactaccatgtaatggtagtccgaatggtagacgaggaaggaactatataaagacactcattatcactgtatctagcattctt

SEQ ID NO: 5746 - DNA, 96 bp, Aspergillus thermomutatus
  misc_feature: 170
tttttctttccttcctctttcctctctctttccttcctctttccttcctccttacctcccctttattccctctctccttcctctttacttcctcct

SEQ ID NO: 5747 - DNA, 96 bp, Aspergillus thermomutatus
  misc_feature: 170
gcattcaaagtctggagggtttacctagaaggagcaaaacacaccgttatcgtgaaaacagaccacaagaatctcacgttcttcacgaccacgaaa

SEQ ID NO: 5748 - DNA, 96 bp, Aspergillus thermomutatus
  misc_feature: 170
tttacctagaaggagcaaaacacaccgttatcgtgaaaacagaccacaagaatctcacgttcttcacgaccacgaaagaattgacacgacgacaag

SEQ ID NO: 5749 - DNA, 96 bp, Aspergillus thermomutatus
  misc_feature: 170
tttaaggattaaaagaaagagtagagtaagggataggttaagagaggtaaagaggggtaagtaaggaataggaggaggagtagagggatagaaaga

SEQ ID NO: 5750 - DNA, 96 bp, Aspergillus thermomutatus
  misc_feature: 170
gcagagaggtaaggagataggtagagagggacccaagtagcaggccataaggcaggccatgagacacacagagaggtgtacacaaggcaggcagaa

SEQ ID NO: 5751 - DNA, 96 bp, Aspergillus thermomutatus
  misc_feature: 170
ggtttacctagaaggagcaaaacacaccgttatcgtgaaaacagaccacaagaatctcacgttcttcacgaccacgaaagaattgacacgacgaca

SEQ ID NO: 5752 - DNA, 96 bp, Aspergillus thermomutatus
  misc_feature: 170
tctttcattcatcctttgctcctttttctactactctaaattatttctttctctccttttcttctctcctcttaacaaactatcccttacttctat

SEQ ID NO: 5753 - DNA, 96 bp, Aspergillus thermomutatus
  misc_feature: 170
tagtaagggatagtgtaagggatagggttaaaaaagaggataagaaaagaaagaagaaaaggaaaagagagagagagaagaaaaagagagagaaga

SEQ ID NO: 5754 - DNA, 96 bp, Aspergillus thermomutatus
  misc_feature: 170
catgatgggtttccgccatctaggatggcagcaggcatgttaggcagcacggcagactacacatcattgagagaggcgtctagagagacaggcaga

SEQ ID NO: 5755 - DNA, 96 bp, Aspergillus thermomutatus
  misc_feature: 170
gataggtagagaggcaccataggaggtatggagcaatgcaccgcgtgaggcacccccagatatgccatgcaaggtagggaccaaggtagccagaga

SEQ ID NO: 5756 - DNA, 96 bp, Aspergillus thermomutatus
  misc_feature: 170
agaaggagtaaagtaaatagtaaaagaaggagtagagagagagttaggagaaggagtagagtaagggttaggaggaggattagagggagggataga

SEQ ID NO: 5757 - DNA, 96 bp, Aspergillus thermomutatus
  misc_feature: 170
gcaaggcacggagagaggtaggcagagaggtagggaggtagggagggaggtagggagagaggtaggcgaagaggtaggcgacgaggtaggcgacga

SEQ ID NO: 5758 - DNA, 96 bp, Aspergillus thermomutatus
  misc_feature: 170
caagcaattcaccgcgcgacatgctgtacagagggccccatgggggttctaacggcttcccgtcttcgcccttagtcaactcaattcggtgatcga

SEQ ID NO: 5759 - DNA, 96 bp, Aspergillus thermomutatus
  misc_feature: 170
tccgccatctaggatggcagcaggcatgttaggcagcacggcagactacacatcattgagagaggcgtctagagagacaggcagacaggcagacag

SEQ ID NO: 5760 - DNA, 96 bp, Aspergillus thermomutatus
  misc_feature: 170
ggagagaggtaggcagagaggtagggaggtagggagggaggtagggagagaggtaggcgaagaggtaggcgacgaggtaggcgacgaggtaggtga

SEQ ID NO: 5761 - DNA, 96 bp, Aspergillus thermomutatus
  misc_feature: 170
tatcctctctttcttttctatcccttcttttctttctatccctctactcctcctcctattccttacttacccctctttacctctcttaacctatcc

SEQ ID NO: 5762 - DNA, 96 bp, Aspergillus thermomutatus
  misc_feature: 170
gaagaaggagtaaagtaaatagtaaaagaaggagtagagagagagttaggagaaggagtagagtaagggttaggaggaggattagagggagggata

SEQ ID NO: 5763 - DNA, 96 bp, Aspergillus thermomutatus
  misc_feature: 170
gttcgtatgttgcgcaggtccaaccacacttttgaaccgacagcgtatctcaggctcgccgcgcgaaagcggttcgaatactcctcctgacgttgc

SEQ ID NO: 5764 - DNA, 96 bp, Aspergillus thermomutatus
  misc_feature: 170
gcatcccatccagccggttgaatgatgatcgcctcgctctgctggccatcccatcctgctcagccactttcttgcgcataatctaacaacgtccac

SEQ ID NO: 5765 - DNA, 96 bp, Aspergillus thermomutatus
  misc_feature: 170
aagcaaggcacggagagaggtaggcagagaggtagggaggtagggagggaggtagggagagaggtaggcgaagaggtaggcgacgaggtaggcgac

SEQ ID NO: 5766 - DNA, 96 bp, Aspergillus thermomutatus
  misc_feature: 170
gtacgagctgtacagccagggaatcgcgaatgggttactgttgttgaatgtatcaatgcttctgggtggtctctgccccccataatcaatcatctt

SEQ ID NO: 5767 - DNA, 96 bp, Aspergillus thermomutatus
  misc_feature: 170
ggtttccgccatctaggatggcagcaggcatgttaggcagcacggcagactacacatcattgagagaggcgtctagagagacaggcagacaggcag

SEQ ID NO: 5768 - DNA, 96 bp, Aspergillus thermomutatus
  misc_feature: 170
aattaggtatactaatatctctattaggtgaaggtttagggggaaatttatctattctttccaaatatgcctcatgagtatttttacattctttcc

SEQ ID NO: 5769 - DNA, 96 bp, Aspergillus thermomutatus
  misc_feature: 170
attaagcaaggcacggagagaggtaggcagagaggtagggaggtagggagggaggtagggagagaggtaggcgaagaggtaggcgacgaggtaggc

SEQ ID NO: 5770 - DNA, 96 bp, Aspergillus thermomutatus
  misc_feature: 170
ctttcattcatcctttgctcctttttctactactctaaattatttctttctctccttttcttctctcctcttaacaaactatcccttacttctatc

SEQ ID NO: 5771 - DNA, 96 bp, Aspergillus thermomutatus
  misc_feature: 170
cattcaaagtctggagggtttacctagaaggagcaaaacacaccgttatcgtgaaaacagaccacaagaatctcacgttcttcacgaccacgaaag

SEQ ID NO: 5772 - DNA, 96 bp, Aspergillus thermomutatus
  misc_feature: 170
caaggcacggagagaggtaggcagagaggtagggaggtagggagggaggtagggagagaggtaggcgaagaggtaggcgacgaggtaggcgacgag

SEQ ID NO: 5773 - DNA, 96 bp, Aspergillus thermomutatus
  misc_feature: 170
agcaaggcacggagagaggtaggcagagaggtagggaggtagggagggaggtagggagagaggtaggcgaagaggtaggcgacgaggtaggcgacg

SEQ ID NO: 5774 - DNA, 96 bp, Aspergillus thermomutatus
  misc_feature: 170
aaggcacggagagaggtaggcagagaggtagggaggtagggagggaggtagggagagaggtaggcgaagaggtaggcgacgaggtaggcgacgagg

SEQ ID NO: 5775 - DNA, 96 bp, Aspergillus thermomutatus
  misc_feature: 170
catctctggggctacgtggggtgtgttgatccctactatactacctgccccatatggtcgctctctggctaccttggtccctaccttgcatggcat

SEQ ID NO: 5776 - DNA, 96 bp, Aspergillus thermomutatus
  misc_feature: 170
aggcacggagagaggtaggcagagaggtagggaggtagggagggaggtagggagagaggtaggcgaagaggtaggcgacgaggtaggcgacgaggt

SEQ ID NO: 5777 - DNA, 96 bp, Aspergillus thermomutatus
  misc_feature: 169
tttctttttctttccttcctctttcctctctctttccttcctctttccttcctccttacctcccctttattccctctctccttcctctttacttcc

SEQ ID NO: 5778 - DNA, 96 bp, Aspergillus thermomutatus
  misc_feature: 169
tttcgtaagacaagcaattcaccgcgcgacatgctgtacagagggccccatgggggttctaacggcttcccgtcttcgcccttagtcaactcaatt

SEQ ID NO: 5779 - DNA, 96 bp, Aspergillus thermomutatus
  misc_feature: 169
tttcgaggacgaaacgctaagagagggggaggtgatgttacgacaccaacactactaggcggacctgacaggcagaaccaaggagcaatgacaacc

SEQ ID NO: 5780 - DNA, 96 bp, Aspergillus thermomutatus
  misc_feature: 169
atcagcgtcagcattgccaggatcaagatggtgcggagcaggcgtgtgatgggtgtgatgctgattgggaggcacaggaggtggtggatcacctaa

SEQ ID NO: 5781 - DNA, 96 bp, Aspergillus thermomutatus
  misc_feature: 169
tcttttctttctatccctctactcctcctcctattccttacttacccctctttacctctcttaacctatcccttactctactctttcttttaatcc

SEQ ID NO: 5782 - DNA, 96 bp, Aspergillus thermomutatus
  misc_feature: 169
tcttctcatcttccctctctctcttaaattctttcttaaactattaattcctctctctttctcactccctcttcctcctttcttgcatttctttat

SEQ ID NO: 5783 - DNA, 96 bp, Aspergillus thermomutatus
  misc_feature: 169
agtagatgagtaagggttagttagtttaggagaagtaaagaagggaaatagtagagtaagcatagtagggattagaagaggagaatatatattaga

SEQ ID NO: 5784 - DNA, 96 bp, Aspergillus thermomutatus
  misc_feature: 169
tcccttcttttctttctatccctctactcctcctcctattccttacttacccctctttacctctcttaacctatcccttactctactctttctttt

SEQ ID NO: 5785 - DNA, 96 bp, Aspergillus thermomutatus
  misc_feature: 169
tccctaccttgcatggcatatctgggggtgcctcacgcggtgcattgctccatacctcctatggtgcctctctacctatctccctacctcttcacc

SEQ ID NO: 5786 - DNA, 96 bp, Aspergillus thermomutatus
  misc_feature: 169
atctctggggctacgtggggtgtgttgatccctactatactacctgccccatatggtcgctctctggctaccttggtccctaccttgcatggcata

SEQ ID NO: 5787 - DNA, 96 bp, Aspergillus thermomutatus
  misc_feature: 169
tatcagcgtcagcattgccaggatcaagatggtgcggagcaggcgtgtgatgggtgtgatgctgattgggaggcacaggaggtggtggatcaccta

SEQ ID NO: 5788 - DNA, 96 bp, Aspergillus thermomutatus
  misc_feature: 169
tatactgtaaagattacttcttcattaattaattctctaaaaaatagcccattttaatatacaagacccaaagattccctagattaaataacatta

SEQ ID NO: 5789 - DNA, 96 bp, Aspergillus thermomutatus
  misc_feature: 169
tacttcactttttatcctctctttcttttctatcccttcttttctttctatccctctactcctcctcctattccttacttacccctctttacctct

SEQ ID NO: 5790 - DNA, 96 bp, Aspergillus thermomutatus
  misc_feature: 169
agacaggtaggtagaatggtagggagtaaggcaccgtataagcaccaaatcagatagagagatatagagagaggtatccaagaggtagatatagta

SEQ ID NO: 5791 - DNA, 96 bp, Aspergillus thermomutatus
  misc_feature: 169
aacatctttcgtaagacaagcaattcaccgcgcgacatgctgtacagagggccccatgggggttctaacggcttcccgtcttcgcccttagtcaac

SEQ ID NO: 5792 - DNA, 96 bp, Aspergillus thermomutatus
  misc_feature: 169
gtagcattcaaagtctggagggtttacctagaaggagcaaaacacaccgttatcgtgaaaacagaccacaagaatctcacgttcttcacgaccacg

SEQ ID NO: 5793 - DNA, 96 bp, Aspergillus thermomutatus
  misc_feature: 169
gccgcgtacgagctgtacagccagggaatcgcgaatgggttactgttgttgaatgtatcaatgcttctgggtggtctctgccccccataatcaatc

SEQ ID NO: 5794 - DNA, 96 bp, Aspergillus thermomutatus
  misc_feature: 169
gcacttcttgagcttcagcttgatgctagctttttgaagcttctccagaaccttgttgacatgttcaacatgttcttccttctctttcgagaaaat

SEQ ID NO: 5795 - DNA, 96 bp, Aspergillus thermomutatus
  misc_feature: 169
cccaggcagtgtctcaatggcatgatattcaccatgatagcagtgccatccagatcccacatgcatttgatgagcctctgcctatattaccatgtc

SEQ ID NO: 5796 - DNA, 96 bp, Aspergillus thermomutatus
  misc_feature: 169
gacaggtaggtagaatggtagggagtaaggcaccgtataagcaccaaatcagatagagagatatagagagaggtatccaagaggtagatatagtag

SEQ ID NO: 5797 - DNA, 96 bp, Aspergillus thermomutatus
  misc_feature: 169
atcccatccagccggttgaatgatgatcgcctcgctctgctggccatcccatcctgctcagccactttcttgcgcataatctaacaacgtccacag

SEQ ID NO: 5798 - DNA, 96 bp, Aspergillus thermomutatus
  misc_feature: 169
cgtaagacaagcaattcaccgcgcgacatgctgtacagagggccccatgggggttctaacggcttcccgtcttcgcccttagtcaactcaattcgg

SEQ ID NO: 5799 - DNA, 96 bp, Aspergillus thermomutatus
  misc_feature: 169
actacaattccttactctttcattcatcctttgctcctttttctactactctaaattatttctttctctccttttcttctctcctcttaacaaact

SEQ ID NO: 5800 - DNA, 96 bp, Aspergillus thermomutatus
  misc_feature: 169
acatctttcgtaagacaagcaattcaccgcgcgacatgctgtacagagggccccatgggggttctaacggcttcccgtcttcgcccttagtcaact

SEQ ID NO: 5801 - DNA, 96 bp, Aspergillus thermomutatus
  misc_feature: 169
aaccctctgtcatccatggtaaggttttcattgtctgctgagttttcgagcatttcttggatgattttgtccctttttgttgcttcaataattttt

SEQ ID NO: 5802 - DNA, 96 bp, Aspergillus thermomutatus
  misc_feature: 168
tttccgccatctaggatggcagcaggcatgttaggcagcacggcagactacacatcattgagagaggcgtctagagagacaggcagacaggcagac

SEQ ID NO: 5803 - DNA, 96 bp, Aspergillus thermomutatus
  misc_feature: 168
tctttcgtaagacaagcaattcaccgcgcgacatgctgtacagagggccccatgggggttctaacggcttcccgtcttcgcccttagtcaactcaa

SEQ ID NO: 5804 - DNA, 96 bp, Aspergillus thermomutatus
  misc_feature: 168
ttcttttctttctatccctctactcctcctcctattccttacttacccctctttacctctcttaacctatcccttactctactctttcttttaatc

SEQ ID NO: 5805 - DNA, 96 bp, Aspergillus thermomutatus
  misc_feature: 168
gaagattagaagggaggatgttaagagaataaagaaatgcaagaaaggaggaagagggagtgagaaagagagaggaattaatagtttaagaaagaa

SEQ ID NO: 5806 - DNA, 96 bp, Aspergillus thermomutatus
  misc_feature: 168
agtaagggatagtgtaagggatagggttaaaaaagaggataagaaaagaaagaagaaaaggaaaagagagagagagaagaaaaagagagagaagaa

SEQ ID NO: 5807 - DNA, 96 bp, Aspergillus thermomutatus
  misc_feature: 168
ttcgtaagacaagcaattcaccgcgcgacatgctgtacagagggccccatgggggttctaacggcttcccgtcttcgcccttagtcaactcaattc

SEQ ID NO: 5808 - DNA, 96 bp, Aspergillus thermomutatus
  misc_feature: 168
agtgtctcaatggcatgatattcaccatgatagcagtgccatccagatcccacatgcatttgatgagcctctgcctatattaccatgtcactcgaa

SEQ ID NO: 5809 - DNA, 96 bp, Aspergillus thermomutatus
  misc_feature: 168
aaatcatcgcgaaacaccacgatgacccaatgcatggtcatatgggaacagaaaaaacggcagaagcgatttcacgaaattactatttcccaaaca

SEQ ID NO: 5810 - DNA, 96 bp, Aspergillus thermomutatus
  misc_feature: 168
tggtaatataggcagaggctcatcaaatgcatgtgggatctggatggcactgctatcatggtgaatatcatgccattgagacactgcctgggtgat

SEQ ID NO: 5811 - DNA, 96 bp, Aspergillus thermomutatus
  misc_feature: 168
gggtttccgccatctaggatggcagcaggcatgttaggcagcacggcagactacacatcattgagagaggcgtctagagagacaggcagacaggca

SEQ ID NO: 5812 - DNA, 96 bp, Aspergillus thermomutatus
  misc_feature: 168
ggtccctaccttgcatggcatatctgggggtgcctcacgcggtgcattgctccatacctcctatggtgcctctctacctatctccctacctcttca

SEQ ID NO: 5813 - DNA, 96 bp, Aspergillus thermomutatus
  misc_feature: 168
gtttccgccatctaggatggcagcaggcatgttaggcagcacggcagactacacatcattgagagaggcgtctagagagacaggcagacaggcaga

SEQ ID NO: 5814 - DNA, 96 bp, Aspergillus thermomutatus
  misc_feature: 168
tagcattcaaagtctggagggtttacctagaaggagcaaaacacaccgttatcgtgaaaacagaccacaagaatctcacgttcttcacgaccacga

SEQ ID NO: 5815 - DNA, 96 bp, Aspergillus thermomutatus
  misc_feature: 168
tcgtaagacaagcaattcaccgcgcgacatgctgtacagagggccccatgggggttctaacggcttcccgtcttcgcccttagtcaactcaattcg

SEQ ID NO: 5816 - DNA, 96 bp, Aspergillus thermomutatus
  misc_feature: 168
tactaaccttactcctattcttcttccaactcttatcattttccttttcttaaatcctacttcttctctttttttcttctttcttttcttaactct

SEQ ID NO: 5817 - DNA, 96 bp, Aspergillus thermomutatus
  misc_feature: 168
taagtaagggttaaagggaatttaaagtaggaaagaaaagagagagtaagggttagttagtttagaaggagaaaggacggaaagcagaagagatag

SEQ ID NO: 5818 - DNA, 96 bp, Aspergillus thermomutatus
  misc_feature: 168
taaattaggtatactaatatctctattaggtgaaggtttagggggaaatttatctattctttccaaatatgcctcatgagtatttttacattcttt

SEQ ID NO: 5819 - DNA, 96 bp, Aspergillus thermomutatus
  misc_feature: 168
atgatgggtttccgccatctaggatggcagcaggcatgttaggcagcacggcagactacacatcattgagagaggcgtctagagagacaggcagac

SEQ ID NO: 5820 - DNA, 96 bp, Aspergillus thermomutatus
  misc_feature: 168
agtctggagggtttacctagaaggagcaaaacacaccgttatcgtgaaaacagaccacaagaatctcacgttcttcacgaccacgaaagaattgac

SEQ ID NO: 5821 - DNA, 96 bp, Aspergillus thermomutatus
  misc_feature: 168
ctaccttggtccctaccttgcatggcatatctgggggtgcctcacgcggtgcattgctccatacctcctatggtgcctctctacctatctccctac

SEQ ID NO: 5822 - DNA, 96 bp, Aspergillus thermomutatus
  misc_feature: 168
gtaaattaggtatactaatatctctattaggtgaaggtttagggggaaatttatctattctttccaaatatgcctcatgagtatttttacattctt

SEQ ID NO: 5823 - DNA, 96 bp, Aspergillus thermomutatus
  misc_feature: 168
acttactcactctcttaatttctcctcttttctccttcttattctcttcttattttcctcttgttcttattctcttctctttctctttgattctcc

SEQ ID NO: 5824 - DNA, 96 bp, Aspergillus thermomutatus
  misc_feature: 168
gaaccgaaatcatcgcgaaacaccacgatgacccaatgcatggtcatatgggaacagaaaaaacggcagaagcgatttcacgaaattactatttcc

SEQ ID NO: 5825 - DNA, 96 bp, Aspergillus thermomutatus
  misc_feature: 168
cggtagtcgacacagaatcgtaaccctccacctggcttgcgggcgaacagcaccggagccgcggcggaagagctactaatgcggataaagttcttc

SEQ ID NO: 5826 - DNA, 96 bp, Aspergillus thermomutatus
  misc_feature: 168
ctttcgtaagacaagcaattcaccgcgcgacatgctgtacagagggccccatgggggttctaacggcttcccgtcttcgcccttagtcaactcaat

SEQ ID NO: 5827 - DNA, 96 bp, Aspergillus thermomutatus
  misc_feature: 168
cttggtccctaccttgcatggcatatctgggggtgcctcacgcggtgcattgctccatacctcctatggtgcctctctacctatctccctacctct

SEQ ID NO: 5828 - DNA, 96 bp, Aspergillus thermomutatus
  misc_feature: 168
atagtaagggatagtgtaagggatagggttaaaaaagaggataagaaaagaaagaagaaaaggaaaagagagagagagaagaaaaagagagagaag

SEQ ID NO: 5829 - DNA, 96 bp, Aspergillus thermomutatus
  misc_feature: 168
ctggagggtttacctagaaggagcaaaacacaccgttatcgtgaaaacagaccacaagaatctcacgttcttcacgaccacgaaagaattgacacg

SEQ ID NO: 5830 - DNA, 96 bp, Aspergillus thermomutatus
  misc_feature: 168
cctcttctcatcttccctctctctcttaaattctttcttaaactattaattcctctctctttctcactccctcttcctcctttcttgcatttcttt

SEQ ID NO: 5831 - DNA, 96 bp, Aspergillus thermomutatus
  misc_feature: 168
atatactgtaaagattacttcttcattaattaattctctaaaaaatagcccattttaatatacaagacccaaagattccctagattaaataacatt

SEQ ID NO: 5832 - DNA, 96 bp, Aspergillus thermomutatus
  misc_feature: 167
gatagtaagggatagtgtaagggatagggttaaaaaagaggataagaaaagaaagaagaaaaggaaaagagagagagagaagaaaaagagagagaa

SEQ ID NO: 5833 - DNA, 96 bp, Aspergillus thermomutatus
  misc_feature: 167
agcattcaaagtctggagggtttacctagaaggagcaaaacacaccgttatcgtgaaaacagaccacaagaatctcacgttcttcacgaccacgaa

SEQ ID NO: 5834 - DNA, 96 bp, Aspergillus thermomutatus
  misc_feature: 167
ttcgaggacgaaacgctaagagagggggaggtgatgttacgacaccaacactactaggcggacctgacaggcagaaccaaggagcaatgacaacca

SEQ ID NO: 5835 - DNA, 96 bp, Aspergillus thermomutatus
  misc_feature: 167
gaaggttgaagattagaagggaggatgttaagagaataaagaaatgcaagaaaggaggaagagggagtgagaaagagagaggaattaatagtttaa

SEQ ID NO: 5836 - DNA, 96 bp, Aspergillus thermomutatus
  misc_feature: 167
tgtgctagtcgacggcgaggccgaatatgaggttgaatggatactggatgagcgtgagaaacgcgttggcagaggccgccgcaaggagtatctcgt

SEQ ID NO: 5837 - DNA, 96 bp, Aspergillus thermomutatus
  misc_feature: 167
tgatgggtttccgccatctaggatggcagcaggcatgttaggcagcacggcagactacacatcattgagagaggcgtctagagagacaggcagaca

SEQ ID NO: 5838 - DNA, 96 bp, Aspergillus thermomutatus
  misc_feature: 167
cgcatcccatccagccggttgaatgatgatcgcctcgctctgctggccatcccatcctgctcagccactttcttgcgcataatctaacaacgtcca

SEQ ID NO: 5839 - DNA, 96 bp, Aspergillus thermomutatus
  misc_feature: 167
ccaggcagtgtctcaatggcatgatattcaccatgatagcagtgccatccagatcccacatgcatttgatgagcctctgcctatattaccatgtca

SEQ ID NO: 5840 - DNA, 96 bp, Aspergillus thermomutatus
  misc_feature: 167
tgaagattagaagggaggatgttaagagaataaagaaatgcaagaaaggaggaagagggagtgagaaagagagaggaattaatagtttaagaaaga

SEQ ID NO: 5841 - DNA, 96 bp, Aspergillus thermomutatus
  misc_feature: 167
tctggagggtttacctagaaggagcaaaacacaccgttatcgtgaaaacagaccacaagaatctcacgttcttcacgaccacgaaagaattgacac

SEQ ID NO: 5842 - DNA, 96 bp, Aspergillus thermomutatus
  misc_feature: 167
aagtctggagggtttacctagaaggagcaaaacacaccgttatcgtgaaaacagaccacaagaatctcacgttcttcacgaccacgaaagaattga

SEQ ID NO: 5843 - DNA, 96 bp, Aspergillus thermomutatus
  misc_feature: 167
tatttagtaaattaggtatactaatatctctattaggtgaaggtttagggggaaatttatctattctttccaaatatgcctcatgagtatttttac

SEQ ID NO: 5844 - DNA, 96 bp, Aspergillus thermomutatus
  misc_feature: 167
ctaaccttactcctattcttcttccaactcttatcattttccttttcttaaatcctacttcttctctttttttcttctttcttttcttaactctta

SEQ ID NO: 5845 - DNA, 96 bp, Aspergillus thermomutatus
  misc_feature: 167
taaccttactcctattcttcttccaactcttatcattttccttttcttaaatcctacttcttctctttttttcttctttcttttcttaactcttac

SEQ ID NO: 5846 - DNA, 96 bp, Aspergillus thermomutatus
  misc_feature: 167
ctcttctcatcttccctctctctcttaaattctttcttaaactattaattcctctctctttctcactccctcttcctcctttcttgcatttcttta

SEQ ID NO: 5847 - DNA, 96 bp, Aspergillus thermomutatus
  misc_feature: 167
caggcagtgtctcaatggcatgatattcaccatgatagcagtgccatccagatcccacatgcatttgatgagcctctgcctatattaccatgtcac

SEQ ID NO: 5848 - DNA, 96 bp, Aspergillus thermomutatus
  misc_feature: 167
gggtttacctagaaggagcaaaacacaccgttatcgtgaaaacagaccacaagaatctcacgttcttcacgaccacgaaagaattgacacgacgac

SEQ ID NO: 5849 - DNA, 96 bp, Aspergillus thermomutatus
  misc_feature: 167
ctaccttgcatggcatatctgggggtgcctcacgcggtgcattgctccatacctcctatggtgcctctctacctatctccctacctcttcacctac

SEQ ID NO: 5850 - DNA, 96 bp, Aspergillus thermomutatus
  misc_feature: 167
gtaagacaagcaattcaccgcgcgacatgctgtacagagggccccatgggggttctaacggcttcccgtcttcgcccttagtcaactcaattcggt

SEQ ID NO: 5851 - DNA, 96 bp, Aspergillus thermomutatus
  misc_feature: 167
ggtgcatctctggggctacgtggggtgtgttgatccctactatactacctgccccatatggtcgctctctggctaccttggtccctaccttgcatg

SEQ ID NO: 5852 - DNA, 96 bp, Aspergillus thermomutatus
  misc_feature: 167
gagtaaagtaaatagtaaaagaaggagtagagagagagttaggagaaggagtagagtaagggttaggaggaggattagagggagggatagaaagag

SEQ ID NO: 5853 - DNA, 96 bp, Aspergillus thermomutatus
  misc_feature: 167
agaaccgaaatcatcgcgaaacaccacgatgacccaatgcatggtcatatgggaacagaaaaaacggcagaagcgatttcacgaaattactatttc

SEQ ID NO: 5854 - DNA, 96 bp, Aspergillus thermomutatus
  misc_feature: 167
ataggtagagaggcaccataggaggtatggagcaatgcaccgcgtgaggcacccccagatatgccatgcaaggtagggaccaaggtagccagagag

SEQ ID NO: 5855 - DNA, 96 bp, Aspergillus thermomutatus
  misc_feature: 167
cgaggacgaaacgctaagagagggggaggtgatgttacgacaccaacactactaggcggacctgacaggcagaaccaaggagcaatgacaaccagt

SEQ ID NO: 5856 - DNA, 96 bp, Aspergillus thermomutatus
  misc_feature: 167
atatatgtaggtatataaaagccacgcagggttaggtataaaggcacccacagaggccccatgtaaggcagggttaaggcaggcagagaggtaagg

SEQ ID NO: 5857 - DNA, 96 bp, Aspergillus thermomutatus
  misc_feature: 167
agtaaagtaaatagtaaaagaaggagtagagagagagttaggagaaggagtagagtaagggttaggaggaggattagagggagggatagaaagagg

SEQ ID NO: 5858 - DNA, 96 bp, Aspergillus thermomutatus
  misc_feature: 167
ccctaccttgcatggcatatctgggggtgcctcacgcggtgcattgctccatacctcctatggtgcctctctacctatctccctacctcttcacct

SEQ ID NO: 5859 - DNA, 96 bp, Aspergillus thermomutatus
  misc_feature: 167
aataagtaagggttaaagggaatttaaagtaggaaagaaaagagagagtaagggttagttagtttagaaggagaaaggacggaaagcagaagagat

SEQ ID NO: 5860 - DNA, 96 bp, Aspergillus thermomutatus
  misc_feature: 167
aggcagtgtctcaatggcatgatattcaccatgatagcagtgccatccagatcccacatgcatttgatgagcctctgcctatattaccatgtcact

SEQ ID NO: 5861 - DNA, 96 bp, Aspergillus thermomutatus
  misc_feature: 167
actctttcattcatcctttgctcctttttctactactctaaattatttctttctctccttttcttctctcctcttaacaaactatcccttacttct

SEQ ID NO: 5862 - DNA, 96 bp, Aspergillus thermomutatus
  misc_feature: 167
actaaccttactcctattcttcttccaactcttatcattttccttttcttaaatcctacttcttctctttttttcttctttcttttcttaactctt

SEQ ID NO: 5863 - DNA, 96 bp, Aspergillus thermomutatus
  misc_feature: 167
accttactcctattcttcttccaactcttatcattttccttttcttaaatcctacttcttctctttttttcttctttcttttcttaactcttactt

SEQ ID NO: 5864 - DNA, 96 bp, Aspergillus thermomutatus
  misc_feature: 166
gttgaagattagaagggaggatgttaagagaataaagaaatgcaagaaaggaggaagagggagtgagaaagagagaggaattaatagtttaagaaa

SEQ ID NO: 5865 - DNA, 96 bp, Aspergillus thermomutatus
  misc_feature: 166
aactgacagaggatccactgattcaaaaaattattgaagcaacaaaaagggacaaaatcatccaagaaatgctcgaaaactcagcagacaatgaaa

SEQ ID NO: 5866 - DNA, 96 bp, Aspergillus thermomutatus
  misc_feature: 166
tttagtaaattaggtatactaatatctctattaggtgaaggtttagggggaaatttatctattctttccaaatatgcctcatgagtatttttacat

SEQ ID NO: 5867 - DNA, 96 bp, Aspergillus thermomutatus
  misc_feature: 166
cgctaagagagggggaggtgatgttacgacaccaacactactaggcggacctgacaggcagaaccaaggagcaatgacaaccagtcgatcagacaa

SEQ ID NO: 5868 - DNA, 96 bp, Aspergillus thermomutatus
  misc_feature: 166
caacatctttcgtaagacaagcaattcaccgcgcgacatgctgtacagagggccccatgggggttctaacggcttcccgtcttcgcccttagtcaa

SEQ ID NO: 5869 - DNA, 96 bp, Aspergillus thermomutatus
  misc_feature: 166
ttatttagtaaattaggtatactaatatctctattaggtgaaggtttagggggaaatttatctattctttccaaatatgcctcatgagtattttta

SEQ ID NO: 5870 - DNA, 96 bp, Aspergillus thermomutatus
  misc_feature: 166
ttagtaaattaggtatactaatatctctattaggtgaaggtttagggggaaatttatctattctttccaaatatgcctcatgagtatttttacatt

SEQ ID NO: 5871 - DNA, 96 bp, Aspergillus thermomutatus
  misc_feature: 166
ccttcttttctttctatccctctactcctcctcctattccttacttacccctctttacctctcttaacctatcccttactctactctttcttttaa

SEQ ID NO: 5872 - DNA, 96 bp, Aspergillus thermomutatus
  misc_feature: 166
catcccatccagccggttgaatgatgatcgcctcgctctgctggccatcccatcctgctcagccactttcttgcgcataatctaacaacgtccaca

SEQ ID NO: 5873 - DNA, 96 bp, Aspergillus thermomutatus
  misc_feature: 166
tctttttctttccttcctctttcctctctctttccttcctctttccttcctccttacctcccctttattccctctctccttcctctttacttcctc

SEQ ID NO: 5874 - DNA, 96 bp, Aspergillus thermomutatus
  misc_feature: 166
ccttataaggtgtttcgaggacgaaacgctaagagagggggaggtgatgttacgacaccaacactactaggcggacctgacaggcagaaccaagga

SEQ ID NO: 5875 - DNA, 96 bp, Aspergillus thermomutatus
  misc_feature: 166
tccttcttctactctttacttcactttttatcctctctttcttttctatcccttcttttctttctatccctctactcctcctcctattccttactt

SEQ ID NO: 5876 - DNA, 96 bp, Aspergillus thermomutatus
  misc_feature: 166
tatatgtaggtatataaaagccacgcagggttaggtataaaggcacccacagaggccccatgtaaggcagggttaaggcaggcagagaggtaagga

SEQ ID NO: 5877 - DNA, 96 bp, Aspergillus thermomutatus
  misc_feature: 166
tagaagaaggagtaaagtaaatagtaaaagaaggagtagagagagagttaggagaaggagtagagtaagggttaggaggaggattagagggaggga

SEQ ID NO: 5878 - DNA, 96 bp, Aspergillus thermomutatus
  misc_feature: 166
ataagtaagggttaaagggaatttaaagtaggaaagaaaagagagagtaagggttagttagtttagaaggagaaaggacggaaagcagaagagata

SEQ ID NO: 5879 - DNA, 96 bp, Aspergillus thermomutatus
  misc_feature: 166
tagtaaattaggtatactaatatctctattaggtgaaggtttagggggaaatttatctattctttccaaatatgcctcatgagtatttttacattc

SEQ ID NO: 5880 - DNA, 96 bp, Aspergillus thermomutatus
  misc_feature: 166
tagggagagtgtttaaggattaaaagaaagagtagagtaagggataggttaagagaggtaaagaggggtaagtaaggaataggaggaggagtagag

SEQ ID NO: 5881 - DNA, 96 bp, Aspergillus thermomutatus
  misc_feature: 166
taccttggtccctaccttgcatggcatatctgggggtgcctcacgcggtgcattgctccatacctcctatggtgcctctctacctatctccctacc

SEQ ID NO: 5882 - DNA, 96 bp, Aspergillus thermomutatus
  misc_feature: 166
agaaggttgaagattagaagggaggatgttaagagaataaagaaatgcaagaaaggaggaagagggagtgagaaagagagaggaattaatagttta

SEQ ID NO: 5883 - DNA, 96 bp, Aspergillus thermomutatus
  misc_feature: 166
gttagggagagtgtttaaggattaaaagaaagagtagagtaagggataggttaagagaggtaaagaggggtaagtaaggaataggaggaggagtag

SEQ ID NO: 5884 - DNA, 96 bp, Aspergillus thermomutatus
  misc_feature: 166
gtagaagaaggagtaaagtaaatagtaaaagaaggagtagagagagagttaggagaaggagtagagtaagggttaggaggaggattagagggaggg

SEQ ID NO: 5885 - DNA, 96 bp, Aspergillus thermomutatus
  misc_feature: 166
ggtagtcgacacagaatcgtaaccctccacctggcttgcgggcgaacagcaccggagccgcggcggaagagctactaatgcggataaagttcttct

SEQ ID NO: 5886 - DNA, 96 bp, Aspergillus thermomutatus
  misc_feature: 166
atcctctctttcttttctatcccttcttttctttctatccctctactcctcctcctattccttacttacccctctttacctctcttaacctatccc

SEQ ID NO: 5887 - DNA, 96 bp, Aspergillus thermomutatus
  misc_feature: 166
gctgtgctagtcgacggcgaggccgaatatgaggttgaatggatactggatgagcgtgagaaacgcgttggcagaggccgccgcaaggagtatctc

SEQ ID NO: 5888 - DNA, 96 bp, Aspergillus thermomutatus
  misc_feature: 166
gcggtagtcgacacagaatcgtaaccctccacctggcttgcgggcgaacagcaccggagccgcggcggaagagctactaatgcggataaagttctt

SEQ ID NO: 5889 - DNA, 96 bp, Aspergillus thermomutatus
  misc_feature: 166
gccttataaggtgtttcgaggacgaaacgctaagagagggggaggtgatgttacgacaccaacactactaggcggacctgacaggcagaaccaagg

SEQ ID NO: 5890 - DNA, 96 bp, Aspergillus thermomutatus
  misc_feature: 166
gatttggtgcttatacggtgccttactccctaccattctacctacctgtctgcctgcctctctatcttcctctctatctacctctctattcacctc

SEQ ID NO: 5891 - DNA, 96 bp, Aspergillus thermomutatus
  misc_feature: 166
cttcttttctttctatccctctactcctcctcctattccttacttacccctctttacctctcttaacctatcccttactctactctttcttttaat

SEQ ID NO: 5892 - DNA, 96 bp, Aspergillus thermomutatus
  misc_feature: 166
cttatttagtaaattaggtatactaatatctctattaggtgaaggtttagggggaaatttatctattctttccaaatatgcctcatgagtattttt

SEQ ID NO: 5893 - DNA, 96 bp, Aspergillus thermomutatus
  misc_feature: 166
aatatatgtaggtatataaaagccacgcagggttaggtataaaggcacccacagaggccccatgtaaggcagggttaaggcaggcagagaggtaag

SEQ ID NO: 5894 - DNA, 96 bp, Aspergillus thermomutatus
  misc_feature: 166
atttggtgcttatacggtgccttactccctaccattctacctacctgtctgcctgcctctctatcttcctctctatctacctctctattcacctct

SEQ ID NO: 5895 - DNA, 96 bp, Aspergillus thermomutatus
  misc_feature: 166
atctacttctcctctcccttctcttaaaccaacccctacttatttactgcttcctactctctaaccatccctctatctcttctgctttccgtcctt

SEQ ID NO: 5896 - DNA, 96 bp, Aspergillus thermomutatus
  misc_feature: 166
ataatatatattaatacctactatgcctcactgcctacctcctggggttcctctatgcctactcttggtctgccttactgcctctctccctgtctt

SEQ ID NO: 5897 - DNA, 96 bp, Aspergillus thermomutatus
  misc_feature: 166
aaccttactcctattcttcttccaactcttatcattttccttttcttaaatcctacttcttctctttttttcttctttcttttcttaactcttact

SEQ ID NO: 5898 - DNA, 96 bp, Aspergillus thermomutatus
  misc_feature: 166
agtaaattaggtatactaatatctctattaggtgaaggtttagggggaaatttatctattctttccaaatatgcctcatgagtatttttacattct

SEQ ID NO: 5899 - DNA, 96 bp, Aspergillus thermomutatus
  misc_feature: 166
acggagagaggtaggcagagaggtagggaggtagggagggaggtagggagagaggtaggcgaagaggtaggcgacgaggtaggcgacgaggtaggt

SEQ ID NO: 5900 - DNA, 96 bp, Aspergillus thermomutatus
  misc_feature: 165
tttctttccttcctctttcctctctctttccttcctctttccttcctccttacctcccctttattccctctctccttcctctttacttcctcctta

SEQ ID NO: 5901 - DNA, 96 bp, Aspergillus thermomutatus
  misc_feature: 165
gtataagagtaaggattagtgattttagaaataaaggagtaaaaagtcgatgagagtagagaagatgagatgatataagggaaagagaagattaaa

SEQ ID NO: 5902 - DNA, 96 bp, Aspergillus thermomutatus
  misc_feature: 165
ttggtgcttatacggtgccttactccctaccattctacctacctgtctgcctgcctctctatcttcctctctatctacctctctattcacctctct

SEQ ID NO: 5903 - DNA, 96 bp, Aspergillus thermomutatus
  misc_feature: 165
ttggtccctaccttgcatggcatatctgggggtgcctcacgcggtgcattgctccatacctcctatggtgcctctctacctatctccctacctctt

SEQ ID NO: 5904 - DNA, 96 bp, Aspergillus thermomutatus
  misc_feature: 165
ttgaagattagaagggaggatgttaagagaataaagaaatgcaagaaaggaggaagagggagtgagaaagagagaggaattaatagtttaagaaag

SEQ ID NO: 5905 - DNA, 96 bp, Aspergillus thermomutatus
  misc_feature: 165
ttcaaagtctggagggtttacctagaaggagcaaaacacaccgttatcgtgaaaacagaccacaagaatctcacgttcttcacgaccacgaaagaa

SEQ ID NO: 5906 - DNA, 96 bp, Aspergillus thermomutatus
  misc_feature: 165
ttccgccatctaggatggcagcaggcatgttaggcagcacggcagactacacatcattgagagaggcgtctagagagacaggcagacaggcagaca

SEQ ID NO: 5907 - DNA, 96 bp, Aspergillus thermomutatus
  misc_feature: 165
ttactcatctacttctcctctcccttctcttaaaccaacccctacttatttactgcttcctactctctaaccatccctctatctcttctgctttcc

SEQ ID NO: 5908 - DNA, 96 bp, Aspergillus thermomutatus
  misc_feature: 165
gtctggagggtttacctagaaggagcaaaacacaccgttatcgtgaaaacagaccacaagaatctcacgttcttcacgaccacgaaagaattgaca

SEQ ID NO: 5909 - DNA, 96 bp, Aspergillus thermomutatus
  misc_feature: 165
atttagtaaattaggtatactaatatctctattaggtgaaggtttagggggaaatttatctattctttccaaatatgcctcatgagtatttttaca

SEQ ID NO: 5910 - DNA, 96 bp, Aspergillus thermomutatus
  misc_feature: 165
tcaacatctttcgtaagacaagcaattcaccgcgcgacatgctgtacagagggccccatgggggttctaacggcttcccgtcttcgcccttagtca

SEQ ID NO: 5911 - DNA, 96 bp, Aspergillus thermomutatus
  misc_feature: 165
atctgatttggtgcttatacggtgccttactccctaccattctacctacctgtctgcctgcctctctatcttcctctctatctacctctctattca

SEQ ID NO: 5912 - DNA, 96 bp, Aspergillus thermomutatus
  misc_feature: 165
attcaaagtctggagggtttacctagaaggagcaaaacacaccgttatcgtgaaaacagaccacaagaatctcacgttcttcacgaccacgaaaga

SEQ ID NO: 5913 - DNA, 96 bp, Aspergillus thermomutatus
  misc_feature: 165
tcaaagtctggagggtttacctagaaggagcaaaacacaccgttatcgtgaaaacagaccacaagaatctcacgttcttcacgaccacgaaagaat

SEQ ID NO: 5914 - DNA, 96 bp, Aspergillus thermomutatus
  misc_feature: 165
tatctgatttggtgcttatacggtgccttactccctaccattctacctacctgtctgcctgcctctctatcttcctctctatctacctctctattc

SEQ ID NO: 5915 - DNA, 96 bp, Aspergillus thermomutatus
  misc_feature: 165
tatactaatatctctattaggtgaaggtttagggggaaatttatctattctttccaaatatgcctcatgagtatttttacattctttccaaatatg

SEQ ID NO: 5916 - DNA, 96 bp, Aspergillus thermomutatus
  misc_feature: 165
tactcatctacttctcctctcccttctcttaaaccaacccctacttatttactgcttcctactctctaaccatccctctatctcttctgctttccg

SEQ ID NO: 5917 - DNA, 96 bp, Aspergillus thermomutatus
  misc_feature: 165
taccttgcatggcatatctgggggtgcctcacgcggtgcattgctccatacctcctatggtgcctctctacctatctccctacctcttcacctacc

SEQ ID NO: 5918 - DNA, 96 bp, Aspergillus thermomutatus
  misc_feature: 165
aagaagggatagaaaagaaagagaggataaaaagtgaagtaaagagtagaagaaggagtaaagtaaatagtaaaagaaggagtagagagagagtta

SEQ ID NO: 5919 - DNA, 96 bp, Aspergillus thermomutatus
  misc_feature: 165
taacatttctaatactattaaaaattaacctctacctctctaccttgctcctcctgtcattttgttctttcctgtcaccttgtccttttctgttgc

SEQ ID NO: 5920 - DNA, 96 bp, Aspergillus thermomutatus
  misc_feature: 165
cccttcttttctttctatccctctactcctcctcctattccttacttacccctctttacctctcttaacctatcccttactctactctttctttta

SEQ ID NO: 5921 - DNA, 96 bp, Aspergillus thermomutatus
  misc_feature: 165
aagagagggggaggtgatgttacgacaccaacactactaggcggacctgacaggcagaaccaaggagcaatgacaaccagtcgatcagacaaggac

SEQ ID NO: 5922 - DNA, 96 bp, Aspergillus thermomutatus
  misc_feature: 165
gcgtcagcattgccaggatcaagatggtgcggagcaggcgtgtgatgggtgtgatgctgattgggaggcacaggaggtggtggatcacctaatacc

SEQ ID NO: 5923 - DNA, 96 bp, Aspergillus thermomutatus
  misc_feature: 165
cttactcactctcttaatttctcctcttttctccttcttattctcttcttattttcctcttgttcttattctcttctctttctctttgattctccc

SEQ ID NO: 5924 - DNA, 96 bp, Aspergillus thermomutatus
  misc_feature: 165
gcttatttagtaaattaggtatactaatatctctattaggtgaaggtttagggggaaatttatctattctttccaaatatgcctcatgagtatttt

SEQ ID NO: 5925 - DNA, 96 bp, Aspergillus thermomutatus
  misc_feature: 165
ctcatctacttctcctctcccttctcttaaaccaacccctacttatttactgcttcctactctctaaccatccctctatctcttctgctttccgtc

SEQ ID NO: 5926 - DNA, 96 bp, Aspergillus thermomutatus
  misc_feature: 165
ctgtgctagtcgacggcgaggccgaatatgaggttgaatggatactggatgagcgtgagaaacgcgttggcagaggccgccgcaaggagtatctcg

SEQ ID NO: 5927 - DNA, 96 bp, Aspergillus thermomutatus
  misc_feature: 165
ccatgatgggtttccgccatctaggatggcagcaggcatgttaggcagcacggcagactacacatcattgagagaggcgtctagagagacaggcag

SEQ ID NO: 5928 - DNA, 96 bp, Aspergillus thermomutatus
  misc_feature: 165
ctatctgatttggtgcttatacggtgccttactccctaccattctacctacctgtctgcctgcctctctatcttcctctctatctacctctctatt

SEQ ID NO: 5929 - DNA, 96 bp, Aspergillus thermomutatus
  misc_feature: 165
ccaaccctctgtcatccatggtaaggttttcattgtctgctgagttttcgagcatttcttggatgattttgtccctttttgttgcttcaataattt

SEQ ID NO: 5930 - DNA, 96 bp, Aspergillus thermomutatus
  misc_feature: 165
agccgcgtacgagctgtacagccagggaatcgcgaatgggttactgttgttgaatgtatcaatgcttctgggtggtctctgccccccataatcaat

SEQ ID NO: 5931 - DNA, 96 bp, Aspergillus thermomutatus
  misc_feature: 165
aatcatcgcgaaacaccacgatgacccaatgcatggtcatatgggaacagaaaaaacggcagaagcgatttcacgaaattactatttcccaaacat

SEQ ID NO: 5932 - DNA, 96 bp, Aspergillus thermomutatus
  misc_feature: 164
ttttctatcccttcttttctttctatccctctactcctcctcctattccttacttacccctctttacctctcttaacctatcccttactctactct

SEQ ID NO: 5933 - DNA, 96 bp, Aspergillus thermomutatus
  misc_feature: 164
ttttagaaataaaggagtaaaaagtcgatgagagtagagaagatgagatgatataagggaaagagaagattaaagcgaagagagtgaaggaaggga

SEQ ID NO: 5934 - DNA, 96 bp, Aspergillus thermomutatus
  misc_feature: 164
tttggtgcttatacggtgccttactccctaccattctacctacctgtctgcctgcctctctatcttcctctctatctacctctctattcacctctc

SEQ ID NO: 5935 - DNA, 96 bp, Aspergillus thermomutatus
  misc_feature: 164
tttctccttctaaactaactaacccttactctctcttttctttcctactttaaattccctttaacccttacttattctcttcttttctttactatc

SEQ ID NO: 5936 - DNA, 96 bp, Aspergillus thermomutatus
  misc_feature: 164
aagccgcgtacgagctgtacagccagggaatcgcgaatgggttactgttgttgaatgtatcaatgcttctgggtggtctctgccccccataatcaa

SEQ ID NO: 5937 - DNA, 96 bp, Aspergillus thermomutatus
  misc_feature: 164
ttctttttctttccttcctctttcctctctctttccttcctctttccttcctccttacctcccctttattccctctctccttcctctttacttcct

SEQ ID NO: 5938 - DNA, 96 bp, Aspergillus thermomutatus
  misc_feature: 164
ttctttccttcctctttcctctctctttccttcctctttccttcctccttacctcccctttattccctctctccttcctctttacttcctccttac

SEQ ID NO: 5939 - DNA, 96 bp, Aspergillus thermomutatus
  misc_feature: 164
ttataatatatattaatacctactatgcctcactgcctacctcctggggttcctctatgcctactcttggtctgccttactgcctctctccctgtc

SEQ ID NO: 5940 - DNA, 96 bp, Aspergillus thermomutatus
  misc_feature: 164
gggttagttagtttagaaggagaaaggacggaaagcagaagagatagagggatggttagagagtaggaagcagtaaataagtaggggttggtttaa

SEQ ID NO: 5941 - DNA, 96 bp, Aspergillus thermomutatus
  misc_feature: 164
atatatattaatacctactatgcctcactgcctacctcctggggttcctctatgcctactcttggtctgccttactgcctctctccctgtcttaca

SEQ ID NO: 5942 - DNA, 96 bp, Aspergillus thermomutatus
  misc_feature: 164
tggtccctaccttgcatggcatatctgggggtgcctcacgcggtgcattgctccatacctcctatggtgcctctctacctatctccctacctcttc

SEQ ID NO: 5943 - DNA, 96 bp, Aspergillus thermomutatus
  misc_feature: 164
atctttcgtaagacaagcaattcaccgcgcgacatgctgtacagagggccccatgggggttctaacggcttcccgtcttcgcccttagtcaactca

SEQ ID NO: 5944 - DNA, 96 bp, Aspergillus thermomutatus
  misc_feature: 164
taatatctctattaggtgaaggtttagggggaaatttatctattctttccaaatatgcctcatgagtatttttacattctttccaaatatgcctca

SEQ ID NO: 5945 - DNA, 96 bp, Aspergillus thermomutatus
  misc_feature: 164
tctttccttcctctttcctctctctttccttcctctttccttcctccttacctcccctttattccctctctccttcctctttacttcctccttacc

SEQ ID NO: 5946 - DNA, 96 bp, Aspergillus thermomutatus
  misc_feature: 164
tctcctaaactaactaacccttactcatctacttctcctctcccttctcttaaaccaacccctacttatttactgcttcctactctctaaccatcc

SEQ ID NO: 5947 - DNA, 96 bp, Aspergillus thermomutatus
  misc_feature: 164
tctacttctcctctcccttctcttaaaccaacccctacttatttactgcttcctactctctaaccatccctctatctcttctgctttccgtccttt

SEQ ID NO: 5948 - DNA, 96 bp, Aspergillus thermomutatus
  misc_feature: 164
tcgaggacgaaacgctaagagagggggaggtgatgttacgacaccaacactactaggcggacctgacaggcagaaccaaggagcaatgacaaccag

SEQ ID NO: 5949 - DNA, 96 bp, Aspergillus thermomutatus
  misc_feature: 164
agtgattttagaaataaaggagtaaaaagtcgatgagagtagagaagatgagatgatataagggaaagagaagattaaagcgaagagagtgaagga

SEQ ID NO: 5950 - DNA, 96 bp, Aspergillus thermomutatus
  misc_feature: 164
tagtgattttagaaataaaggagtaaaaagtcgatgagagtagagaagatgagatgatataagggaaagagaagattaaagcgaagagagtgaagg

SEQ ID NO: 5951 - DNA, 96 bp, Aspergillus thermomutatus
  misc_feature: 164
taatgcggataaagttcttctccagcagctctgtcaacatctttcgtaagacaagcaattcaccgcgcgacatgctgtacagagggccccatgggg

SEQ ID NO: 5952 - DNA, 96 bp, Aspergillus thermomutatus
  misc_feature: 164
aagtaaagagtagaagaaggagtaaagtaaatagtaaaagaaggagtagagagagagttaggagaaggagtagagtaagggttaggaggaggatta

SEQ ID NO: 5953 - DNA, 96 bp, Aspergillus thermomutatus
  misc_feature: 164
ggtagcattcaaagtctggagggtttacctagaaggagcaaaacacaccgttatcgtgaaaacagaccacaagaatctcacgttcttcacgaccac

SEQ ID NO: 5954 - DNA, 96 bp, Aspergillus thermomutatus
  misc_feature: 164
ctgatttggtgcttatacggtgccttactccctaccattctacctacctgtctgcctgcctctctatcttcctctctatctacctctctattcacc

SEQ ID NO: 5955 - DNA, 96 bp, Aspergillus thermomutatus
  misc_feature: 164
ggcttatttagtaaattaggtatactaatatctctattaggtgaaggtttagggggaaatttatctattctttccaaatatgcctcatgagtattt

SEQ ID NO: 5956 - DNA, 96 bp, Aspergillus thermomutatus
  misc_feature: 164
gctaagagagggggaggtgatgttacgacaccaacactactaggcggacctgacaggcagaaccaaggagcaatgacaaccagtcgatcagacaag

SEQ ID NO: 5957 - DNA, 96 bp, Aspergillus thermomutatus
  misc_feature: 164
atactaatatctctattaggtgaaggtttagggggaaatttatctattctttccaaatatgcctcatgagtatttttacattctttccaaatatgc

SEQ ID NO: 5958 - DNA, 96 bp, Aspergillus thermomutatus
  misc_feature: 164
cgcggtagtcgacacagaatcgtaaccctccacctggcttgcgggcgaacagcaccggagccgcggcggaagagctactaatgcggataaagttct

SEQ ID NO: 5959 - DNA, 96 bp, Aspergillus thermomutatus
  misc_feature: 164
aatgcggataaagttcttctccagcagctctgtcaacatctttcgtaagacaagcaattcaccgcgcgacatgctgtacagagggccccatggggg

SEQ ID NO: 5960 - DNA, 96 bp, Aspergillus thermomutatus
  misc_feature: 164
caaccctctgtcatccatggtaaggttttcattgtctgctgagttttcgagcatttcttggatgattttgtccctttttgttgcttcaataatttt

SEQ ID NO: 5961 - DNA, 96 bp, Aspergillus thermomutatus
  misc_feature: 164
agcattggcagatagtccaccagtggtcccagcagagccatagtggccgtgtgagccagaaagaaaaggctaggggtgaggcagagctacagcggt

SEQ ID NO: 5962 - DNA, 96 bp, Aspergillus thermomutatus
  misc_feature: 164
aataagaacaagaggaaaataagaagagaataagaaggagaaaagaggagaaattaagagagtgagtaagtagacaggtaggaagtttagtaaggt

SEQ ID NO: 5963 - DNA, 96 bp, Aspergillus thermomutatus
  misc_feature: 164
aaagaagggatagaaaagaaagagaggataaaaagtgaagtaaagagtagaagaaggagtaaagtaaatagtaaaagaaggagtagagagagagtt

SEQ ID NO: 5964 - DNA, 96 bp, Aspergillus thermomutatus
  misc_feature: 163
gtgattttagaaataaaggagtaaaaagtcgatgagagtagagaagatgagatgatataagggaaagagaagattaaagcgaagagagtgaaggaa

SEQ ID NO: 5965 - DNA, 96 bp, Aspergillus thermomutatus
  misc_feature: 163
ttatatactgtaaagattacttcttcattaattaattctctaaaaaatagcccattttaatatacaagacccaaagattccctagattaaataaca

SEQ ID NO: 5966 - DNA, 96 bp, Aspergillus thermomutatus
  misc_feature: 163
ttagggagagtgtttaaggattaaaagaaagagtagagtaagggataggttaagagaggtaaagaggggtaagtaaggaataggaggaggagtaga

SEQ ID NO: 5967 - DNA, 96 bp, Aspergillus thermomutatus
  misc_feature: 163
tggtagcattcaaagtctggagggtttacctagaaggagcaaaacacaccgttatcgtgaaaacagaccacaagaatctcacgttcttcacgacca

SEQ ID NO: 5968 - DNA, 96 bp, Aspergillus thermomutatus
  misc_feature: 163
tgggtttccgccatctaggatggcagcaggcatgttaggcagcacggcagactacacatcattgagagaggcgtctagagagacaggcagacaggc

SEQ ID NO: 5969 - DNA, 96 bp, Aspergillus thermomutatus
  misc_feature: 163
tgcaatgcacaattttgaaatcatgctgtgacaatgtctcagcccatctggcttgtcgtcgtgtcaattctttcgtggtcgtgaagaacgtgagat

SEQ ID NO: 5970 - DNA, 96 bp, Aspergillus thermomutatus
  misc_feature: 163
ggatagtaagggatagtgtaagggatagggttaaaaaagaggataagaaaagaaagaagaaaaggaaaagagagagagagaagaaaaagagagaga

SEQ ID NO: 5971 - DNA, 96 bp, Aspergillus thermomutatus
  misc_feature: 163
tctctaaccatccctctatctcttctgctttccgtcctttctccttctaaactaactaacccttactctctcttttctttcctactttaaattccc

SEQ ID NO: 5972 - DNA, 96 bp, Aspergillus thermomutatus
  misc_feature: 163
taagagagggggaggtgatgttacgacaccaacactactaggcggacctgacaggcagaaccaaggagcaatgacaaccagtcgatcagacaagga

SEQ ID NO: 5973 - DNA, 96 bp, Aspergillus thermomutatus
  misc_feature: 163
cctaccttgcatggcatatctgggggtgcctcacgcggtgcattgctccatacctcctatggtgcctctctacctatctccctacctcttcaccta

SEQ ID NO: 5974 - DNA, 96 bp, Aspergillus thermomutatus
  misc_feature: 163
ataagaacaagaggaaaataagaagagaataagaaggagaaaagaggagaaattaagagagtgagtaagtagacaggtaggaagtttagtaaggta

SEQ ID NO: 5975 - DNA, 96 bp, Aspergillus thermomutatus
  misc_feature: 163
gttgatccctactatactacctgccccatatggtcgctctctggctaccttggtccctaccttgcatggcatatctgggggtgcctcacgcggtgc

SEQ ID NO: 5976 - DNA, 96 bp, Aspergillus thermomutatus
  misc_feature: 163
gtggtagcattcaaagtctggagggtttacctagaaggagcaaaacacaccgttatcgtgaaaacagaccacaagaatctcacgttcttcacgacc

SEQ ID NO: 5977 - DNA, 96 bp, Aspergillus thermomutatus
  misc_feature: 163
gtataaccaccctaacttataatatatattaatacctactatgcctcactgcctacctcctggggttcctctatgcctactcttggtctgccttac

SEQ ID NO: 5978 - DNA, 96 bp, Aspergillus thermomutatus
  misc_feature: 163
gtaaggcagggttaaggcaggcagagaggtaaggagataggtagagagggacccaagtagcaggccataaggcaggccatgagacacacagagagg

SEQ ID NO: 5979 - DNA, 96 bp, Aspergillus thermomutatus
  misc_feature: 163
gctgccatcctagatggcggaaacccatcatggtttggtattaggtgatccaccacctcctgtgcctcccaatcagcatcacacccatcacacgcc

SEQ ID NO: 5980 - DNA, 96 bp, Aspergillus thermomutatus
  misc_feature: 163
atgctgctgatcttatgccctacctttctgctggccttgctccctactatgctgcctgcctctctacctaccatggtgcctacctcatgcggtgcc

SEQ ID NO: 5981 - DNA, 96 bp, Aspergillus thermomutatus
  misc_feature: 163
ctaatatctctattaggtgaaggtttagggggaaatttatctattctttccaaatatgcctcatgagtatttttacattctttccaaatatgcctc

SEQ ID NO: 5982 - DNA, 96 bp, Aspergillus thermomutatus
  misc_feature: 163
gaataagaacaagaggaaaataagaagagaataagaaggagaaaagaggagaaattaagagagtgagtaagtagacaggtaggaagtttagtaagg

SEQ ID NO: 5983 - DNA, 96 bp, Aspergillus thermomutatus
  misc_feature: 163
catgtaggatgcacatagaatagcacgcggaggcaggcagataggcccacagagaggtccgacatgaggtaggcagtgaggtagagagacaggcag

SEQ ID NO: 5984 - DNA, 96 bp, Aspergillus thermomutatus
  misc_feature: 163
cgactcttgacatcagacatcatggcaaatgacacgccacgtaccccaaccagctcgaatgttggtcgggcaggaactcagcagcaaacggttact

SEQ ID NO: 5985 - DNA, 96 bp, Aspergillus thermomutatus
  misc_feature: 163
atgggtttccgccatctaggatggcagcaggcatgttaggcagcacggcagactacacatcattgagagaggcgtctagagagacaggcagacagg

SEQ ID NO: 5986 - DNA, 96 bp, Aspergillus thermomutatus
  misc_feature: 163
aatatctctattaggtgaaggtttagggggaaatttatctattctttccaaatatgcctcatgagtatttttacattctttccaaatatgcctcat

SEQ ID NO: 5987 - DNA, 96 bp, Aspergillus thermomutatus
  misc_feature: 163
atattcgaagtgaccatatttcgttctgaatgccgttttccattcttcgccttctgcgattcgaatgtggttatatgcgtccgtgatgtctagctt

SEQ ID NO: 5988 - DNA, 96 bp, Aspergillus thermomutatus
  misc_feature: 162
tttagaaataaaggagtaaaaagtcgatgagagtagagaagatgagatgatataagggaaagagaagattaaagcgaagagagtgaaggaagggat

SEQ ID NO: 5989 - DNA, 96 bp, Aspergillus thermomutatus
  misc_feature: 162
gaactgacagaggatccactgattcaaaaaattattgaagcaacaaaaagggacaaaatcatccaagaaatgctcgaaaactcagcagacaatgaa

SEQ ID NO: 5990 - DNA, 96 bp, Aspergillus thermomutatus
  misc_feature: 162
ttagaaataaaggagtaaaaagtcgatgagagtagagaagatgagatgatataagggaaagagaagattaaagcgaagagagtgaaggaagggatg

SEQ ID NO: 5991 - DNA, 96 bp, Aspergillus thermomutatus
  misc_feature: 162
tgttgatccctactatactacctgccccatatggtcgctctctggctaccttggtccctaccttgcatggcatatctgggggtgcctcacgcggtg

SEQ ID NO: 5992 - DNA, 96 bp, Aspergillus thermomutatus
  misc_feature: 162
tgcttatacggtgccttactccctaccattctacctacctgtctgcctgcctctctatcttcctctctatctacctctctattcacctctctattc

SEQ ID NO: 5993 - DNA, 96 bp, Aspergillus thermomutatus
  misc_feature: 162
tgctgctgatcttatgccctacctttctgctggccttgctccctactatgctgcctgcctctctacctaccatggtgcctacctcatgcggtgcct

SEQ ID NO: 5994 - DNA, 96 bp, Aspergillus thermomutatus
  misc_feature: 162
tgctgccatcctagatggcggaaacccatcatggtttggtattaggtgatccaccacctcctgtgcctcccaatcagcatcacacccatcacacgc

SEQ ID NO: 5995 - DNA, 96 bp, Aspergillus thermomutatus
  misc_feature: 162
tgattttagaaataaaggagtaaaaagtcgatgagagtagagaagatgagatgatataagggaaagagaagattaaagcgaagagagtgaaggaag

SEQ ID NO: 5996 - DNA, 96 bp, Aspergillus thermomutatus
  misc_feature: 162
gcttatacggtgccttactccctaccattctacctacctgtctgcctgcctctctatcttcctctctatctacctctctattcacctctctattca

SEQ ID NO: 5997 - DNA, 96 bp, Aspergillus thermomutatus
  misc_feature: 162
tcatctacttctcctctcccttctcttaaaccaacccctacttatttactgcttcctactctctaaccatccctctatctcttctgctttccgtcc

SEQ ID NO: 5998 - DNA, 96 bp, Aspergillus thermomutatus
  misc_feature: 162
aaataaaggagtaaaaagtcgatgagagtagagaagatgagatgatataagggaaagagaagattaaagcgaagagagtgaaggaagggatgttga

SEQ ID NO: 5999 - DNA, 96 bp, Aspergillus thermomutatus
  misc_feature: 162
tatatactgtaaagattacttcttcattaattaattctctaaaaaatagcccattttaatatacaagacccaaagattccctagattaaataacat

SEQ ID NO: 6000 - DNA, 96 bp, Aspergillus thermomutatus
  misc_feature: 162
taggacgatcgtaacctgtccatttgacgagatactccttgcggcggcctctgccaacgcgtttctcacgctcatccagtatccattcaacctcat

SEQ ID NO: 6001 - DNA, 96 bp, Aspergillus thermomutatus
  misc_feature: 162
ccttcttctactctttacttcactttttatcctctctttcttttctatcccttcttttctttctatccctctactcctcctcctattccttactta

SEQ ID NO: 6002 - DNA, 96 bp, Aspergillus thermomutatus
  misc_feature: 162
ggtataaccaccctaacttataatatatattaatacctactatgcctcactgcctacctcctggggttcctctatgcctactcttggtctgcctta

SEQ ID NO: 6003 - DNA, 96 bp, Aspergillus thermomutatus
  misc_feature: 162
taaagagtagaagaaggagtaaagtaaatagtaaaagaaggagtagagagagagttaggagaaggagtagagtaagggttaggaggaggattagag

SEQ ID NO: 6004 - DNA, 96 bp, Aspergillus thermomutatus
  misc_feature: 162
ctctctaaccatccctctatctcttctgctttccgtcctttctccttctaaactaactaacccttactctctcttttctttcctactttaaattcc

SEQ ID NO: 6005 - DNA, 96 bp, Aspergillus thermomutatus
  misc_feature: 162
gctgctgatcttatgccctacctttctgctggccttgctccctactatgctgcctgcctctctacctaccatggtgcctacctcatgcggtgcctc

SEQ ID NO: 6006 - DNA, 96 bp, Aspergillus thermomutatus
  misc_feature: 162
gcaatgcacaattttgaaatcatgctgtgacaatgtctcagcccatctggcttgtcgtcgtgtcaattctttcgtggtcgtgaagaacgtgagatt

SEQ ID NO: 6007 - DNA, 96 bp, Aspergillus thermomutatus
  misc_feature: 162
gatgggtttccgccatctaggatggcagcaggcatgttaggcagcacggcagactacacatcattgagagaggcgtctagagagacaggcagacag

SEQ ID NO: 6008 - DNA, 96 bp, Aspergillus thermomutatus
  misc_feature: 162
gaggacgaaacgctaagagagggggaggtgatgttacgacaccaacactactaggcggacctgacaggcagaaccaaggagcaatgacaaccagtc

SEQ ID NO: 6009 - DNA, 96 bp, Aspergillus thermomutatus
  misc_feature: 162
cttctaaactaactaacccttactctctcttttctttcctactttaaattccctttaacccttacttattctcttcttttctttactatctctctc

SEQ ID NO: 6010 - DNA, 96 bp, Aspergillus thermomutatus
  misc_feature: 162
aggagtaaagtaaatagtaaaagaaggagtagagagagagttaggagaaggagtagagtaagggttaggaggaggattagagggagggatagaaag

SEQ ID NO: 6011 - DNA, 96 bp, Aspergillus thermomutatus
  misc_feature: 162
ctgccgtgctgcctaacatgcctgctgccatcctagatggcggaaacccatcatggtttggtattaggtgatccaccacctcctgtgcctcccaat

SEQ ID NO: 6012 - DNA, 96 bp, Aspergillus thermomutatus
  misc_feature: 162
ctaagagagggggaggtgatgttacgacaccaacactactaggcggacctgacaggcagaaccaaggagcaatgacaaccagtcgatcagacaagg

SEQ ID NO: 6013 - DNA, 96 bp, Aspergillus thermomutatus
  misc_feature: 162
aagcattggcagatagtccaccagtggtcccagcagagccatagtggccgtgtgagccagaaagaaaaggctaggggtgaggcagagctacagcgg

SEQ ID NO: 6014 - DNA, 96 bp, Aspergillus thermomutatus
  misc_feature: 162
catggtaatataggcagaggctcatcaaatgcatgtgggatctggatggcactgctatcatggtgaatatcatgccattgagacactgcctgggtg

SEQ ID NO: 6015 - DNA, 96 bp, Aspergillus thermomutatus
  misc_feature: 162
catctacttctcctctcccttctcttaaaccaacccctacttatttactgcttcctactctctaaccatccctctatctcttctgctttccgtcct

SEQ ID NO: 6016 - DNA, 96 bp, Aspergillus thermomutatus
  misc_feature: 162
actcatctacttctcctctcccttctcttaaaccaacccctacttatttactgcttcctactctctaaccatccctctatctcttctgctttccgt

SEQ ID NO: 6017 - DNA, 96 bp, Aspergillus thermomutatus
  misc_feature: 162
acatggtaatataggcagaggctcatcaaatgcatgtgggatctggatggcactgctatcatggtgaatatcatgccattgagacactgcctgggt

SEQ ID NO: 6018 - DNA, 96 bp, Aspergillus thermomutatus
  misc_feature: 162
accatatttcgttctgaatgccgttttccattcttcgccttctgcgattcgaatgtggttatatgcgtccgtgatgtctagcttcgtgaaccattt

SEQ ID NO: 6019 - DNA, 96 bp, Aspergillus thermomutatus
  misc_feature: 162
accaaccctctgtcatccatggtaaggttttcattgtctgctgagttttcgagcatttcttggatgattttgtccctttttgttgcttcaataatt

SEQ ID NO: 6020 - DNA, 96 bp, Aspergillus thermomutatus
  misc_feature: 161
aaggagtaaagtaaatagtaaaagaaggagtagagagagagttaggagaaggagtagagtaagggttaggaggaggattagagggagggatagaaa

SEQ ID NO: 6021 - DNA, 96 bp, Aspergillus thermomutatus
  misc_feature: 161
tttatcattgaagctggcaagggcgtacgcatggaccccgacaaggtaaaagctatactagaatggcagacccctacatccactcgaggcgtacga

SEQ ID NO: 6022 - DNA, 96 bp, Aspergillus thermomutatus
  misc_feature: 161
ttctccttctaaactaactaacccttactctctcttttctttcctactttaaattccctttaacccttacttattctcttcttttctttactatct

SEQ ID NO: 6023 - DNA, 96 bp, Aspergillus thermomutatus
  misc_feature: 161
ttcattcatcctttgctcctttttctactactctaaattatttctttctctccttttcttctctcctcttaacaaactatcccttacttctatcct

SEQ ID NO: 6024 - DNA, 96 bp, Aspergillus thermomutatus
  misc_feature: 161
ttatcattgaagctggcaagggcgtacgcatggaccccgacaaggtaaaagctatactagaatggcagacccctacatccactcgaggcgtacgat

SEQ ID NO: 6025 - DNA, 96 bp, Aspergillus thermomutatus
  misc_feature: 161
ggatagggagagagaagggaagagaagaaagaaaggagataagatttaagaatgaagatagtaagaaaaaggagagagggagtaaaggggaggtaa

SEQ ID NO: 6026 - DNA, 96 bp, Aspergillus thermomutatus
  misc_feature: 161
tgtaaggcagggttaaggcaggcagagaggtaaggagataggtagagagggacccaagtagcaggccataaggcaggccatgagacacacagagag

SEQ ID NO: 6027 - DNA, 96 bp, Aspergillus thermomutatus
  misc_feature: 161
tggtagatggtatacaactaccagcaacaactaccatgtaatggtagtccgaatggtagacgaggaaggaactatataaagacactcattatcact

SEQ ID NO: 6028 - DNA, 96 bp, Aspergillus thermomutatus
  misc_feature: 161
tggagggtttacctagaaggagcaaaacacaccgttatcgtgaaaacagaccacaagaatctcacgttcttcacgaccacgaaagaattgacacga

SEQ ID NO: 6029 - DNA, 96 bp, Aspergillus thermomutatus
  misc_feature: 161
taggtagagagggacccaagtagcaggccataaggcaggccatgagacacacagagaggtgtacacaaggcaggcagaacagtaggcagaacggca

SEQ ID NO: 6030 - DNA, 96 bp, Aspergillus thermomutatus
  misc_feature: 161
tgatttggtgcttatacggtgccttactccctaccattctacctacctgtctgcctgcctctctatcttcctctctatctacctctctattcacct

SEQ ID NO: 6031 - DNA, 96 bp, Aspergillus thermomutatus
  misc_feature: 161
ggagtaaagtaaatagtaaaagaaggagtagagagagagttaggagaaggagtagagtaagggttaggaggaggattagagggagggatagaaaga

SEQ ID NO: 6032 - DNA, 96 bp, Aspergillus thermomutatus
  misc_feature: 161
tctgatttggtgcttatacggtgccttactccctaccattctacctacctgtctgcctgcctctctatcttcctctctatctacctctctattcac

SEQ ID NO: 6033 - DNA, 96 bp, Aspergillus thermomutatus
  misc_feature: 161
aaggatagtaagggatagtgtaagggatagggttaaaaaagaggataagaaaagaaagaagaaaaggaaaagagagagagagaagaaaaagagaga

SEQ ID NO: 6034 - DNA, 96 bp, Aspergillus thermomutatus
  misc_feature: 161
gtaaagagtagaagaaggagtaaagtaaatagtaaaagaaggagtagagagagagttaggagaaggagtagagtaagggttaggaggaggattaga

SEQ ID NO: 6035 - DNA, 96 bp, Aspergillus thermomutatus
  misc_feature: 161
agggtttacctagaaggagcaaaacacaccgttatcgtgaaaacagaccacaagaatctcacgttcttcacgaccacgaaagaattgacacgacga

SEQ ID NO: 6036 - DNA, 96 bp, Aspergillus thermomutatus
  misc_feature: 161
tccttctaaactaactaacccttactctctcttttctttcctactttaaattccctttaacccttacttattctcttcttttctttactatctctc

SEQ ID NO: 6037 - DNA, 96 bp, Aspergillus thermomutatus
  misc_feature: 161
tcctctctttcttttctatcccttcttttctttctatccctctactcctcctcctattccttacttacccctctttacctctcttaacctatccct

SEQ ID NO: 6038 - DNA, 96 bp, Aspergillus thermomutatus
  misc_feature: 161
tccctactatactacctgccccatatggtcgctctctggctaccttggtccctaccttgcatggcatatctgggggtgcctcacgcggtgcattgc

SEQ ID NO: 6039 - DNA, 96 bp, Aspergillus thermomutatus
  misc_feature: 161
tcattcatcctttgctcctttttctactactctaaattatttctttctctccttttcttctctcctcttaacaaactatcccttacttctatcctt

SEQ ID NO: 6040 - DNA, 96 bp, Aspergillus thermomutatus
  misc_feature: 161
tagaaataaaggagtaaaaagtcgatgagagtagagaagatgagatgatataagggaaagagaagattaaagcgaagagagtgaaggaagggatgt

SEQ ID NO: 6041 - DNA, 96 bp, Aspergillus thermomutatus
  misc_feature: 161
gggaccaaggtagggagtaaagccagtagagaggcaccatgtcaggtagcaagagaggtagcaagagaggtagcaagagaggtagcaagagaggta

SEQ ID NO: 6042 - DNA, 96 bp, Aspergillus thermomutatus
  misc_feature: 161
taatatatattaatacctactatgcctcactgcctacctcctggggttcctctatgcctactcttggtctgccttactgcctctctccctgtctta

SEQ ID NO: 6043 - DNA, 96 bp, Aspergillus thermomutatus
  misc_feature: 161
attatatactgtaaagattacttcttcattaattaattctctaaaaaatagcccattttaatatacaagacccaaagattccctagattaaataac

SEQ ID NO: 6044 - DNA, 96 bp, Aspergillus thermomutatus
  misc_feature: 161
ggagggtttacctagaaggagcaaaacacaccgttatcgtgaaaacagaccacaagaatctcacgttcttcacgaccacgaaagaattgacacgac

SEQ ID NO: 6045 - DNA, 96 bp, Aspergillus thermomutatus
  misc_feature: 161
cttcttctactctttacttcactttttatcctctctttcttttctatcccttcttttctttctatccctctactcctcctcctattccttacttac

SEQ ID NO: 6046 - DNA, 96 bp, Aspergillus thermomutatus
  misc_feature: 161
gccttactccctaccattctacctacctgtctgcctgcctctctatcttcctctctatctacctctctattcacctctctattcacctctctattc

SEQ ID NO: 6047 - DNA, 96 bp, Aspergillus thermomutatus
  misc_feature: 161
gagggtttacctagaaggagcaaaacacaccgttatcgtgaaaacagaccacaagaatctcacgttcttcacgaccacgaaagaattgacacgacg

SEQ ID NO: 6048 - DNA, 96 bp, Aspergillus thermomutatus
  misc_feature: 161
gaaataaaggagtaaaaagtcgatgagagtagagaagatgagatgatataagggaaagagaagattaaagcgaagagagtgaaggaagggatgttg

SEQ ID NO: 6049 - DNA, 96 bp, Aspergillus thermomutatus
  misc_feature: 161
aggatagtaagggatagtgtaagggatagggttaaaaaagaggataagaaaagaaagaagaaaaggaaaagagagagagagaagaaaaagagagag

SEQ ID NO: 6050 - DNA, 96 bp, Aspergillus thermomutatus
  misc_feature: 161
cgatgacccaatgcatggtcatatgggaacagaaaaaacggcagaagcgatttcacgaaattactatttcccaaacatgagacgaaaggtgcaagg

SEQ ID NO: 6051 - DNA, 96 bp, Aspergillus thermomutatus
  misc_feature: 161
actaatatctctattaggtgaaggtttagggggaaatttatctattctttccaaatatgcctcatgagtatttttacattctttccaaatatgcct

SEQ ID NO: 6052 - DNA, 96 bp, Aspergillus thermomutatus
  misc_feature: 161
agaaataaaggagtaaaaagtcgatgagagtagagaagatgagatgatataagggaaagagaagattaaagcgaagagagtgaaggaagggatgtt

SEQ ID NO: 6053 - DNA, 96 bp, Aspergillus thermomutatus
  misc_feature: 161
aagaacaagaggaaaataagaagagaataagaaggagaaaagaggagaaattaagagagtgagtaagtagacaggtaggaagtttagtaaggtagt

SEQ ID NO: 6054 - DNA, 96 bp, Aspergillus thermomutatus
  misc_feature: 160
tctgccgtgctgcctaacatgcctgctgccatcctagatggcggaaacccatcatggtttggtattaggtgatccaccacctcctgtgcctcccaa

SEQ ID NO: 6055 - DNA, 96 bp, Aspergillus thermomutatus
  misc_feature: 160
ttatacggtgccttactccctaccattctacctacctgtctgcctgcctctctatcttcctctctatctacctctctattcacctctctattcacc

SEQ ID NO: 6056 - DNA, 96 bp, Aspergillus thermomutatus
  misc_feature: 160
tatataaagaaggttgaagattagaagggaggatgttaagagaataaagaaatgcaagaaaggaggaagagggagtgagaaagagagaggaattaa

SEQ ID NO: 6057 - DNA, 96 bp, Aspergillus thermomutatus
  misc_feature: 160
tggtgcttatacggtgccttactccctaccattctacctacctgtctgcctgcctctctatcttcctctctatctacctctctattcacctctcta

SEQ ID NO: 6058 - DNA, 96 bp, Aspergillus thermomutatus
  misc_feature: 160
tgctattctacgtgctattctacgtgctattctacatgctattcgacgtgctattctatgtgctattcaacctgccgttctgcctgccgttctgcc

SEQ ID NO: 6059 - DNA, 96 bp, Aspergillus thermomutatus
  misc_feature: 160
tgccgtgctgcctaacatgcctgctgccatcctagatggcggaaacccatcatggtttggtattaggtgatccaccacctcctgtgcctcccaatc

SEQ ID NO: 6060 - DNA, 96 bp, Aspergillus thermomutatus
  misc_feature: 160
gtaggacgatcgtaacctgtccatttgacgagatactccttgcggcggcctctgccaacgcgtttctcacgctcatccagtatccattcaacctca

SEQ ID NO: 6061 - DNA, 96 bp, Aspergillus thermomutatus
  misc_feature: 160
gttagttagtttagaaggagaaaggacggaaagcagaagagatagagggatggttagagagtaggaagcagtaaataagtaggggttggtttaaga

SEQ ID NO: 6062 - DNA, 96 bp, Aspergillus thermomutatus
  misc_feature: 160
atgtaaggcagggttaaggcaggcagagaggtaaggagataggtagagagggacccaagtagcaggccataaggcaggccatgagacacacagaga

SEQ ID NO: 6063 - DNA, 96 bp, Aspergillus thermomutatus
  misc_feature: 160
tctattcacctctctattcacctctctatctacctctctatctccctaccccactgtctgcctgtctgcctgtctgcctgtctgcctgtctctcta

SEQ ID NO: 6064 - DNA, 96 bp, Aspergillus thermomutatus
  misc_feature: 160
tccttcctctttcctctctctttccttcctctttccttcctccttacctcccctttattccctctctccttcctctttacttcctccttacctccc

SEQ ID NO: 6065 - DNA, 96 bp, Aspergillus thermomutatus
  misc_feature: 160
tacttactcactctcttaatttctcctcttttctccttcttattctcttcttattttcctcttgttcttattctcttctctttctctttgattctc

SEQ ID NO: 6066 - DNA, 96 bp, Aspergillus thermomutatus
  misc_feature: 160
agttagggagagtgtttaaggattaaaagaaagagtagagtaagggataggttaagagaggtaaagaggggtaagtaaggaataggaggaggagta

SEQ ID NO: 6067 - DNA, 96 bp, Aspergillus thermomutatus
  misc_feature: 160
taccaaccctctgtcatccatggtaaggttttcattgtctgctgagttttcgagcatttcttggatgattttgtccctttttgttgcttcaataat

SEQ ID NO: 6068 - DNA, 96 bp, Aspergillus thermomutatus
  misc_feature: 160
atatataaagaaggttgaagattagaagggaggatgttaagagaataaagaaatgcaagaaaggaggaagagggagtgagaaagagagaggaatta

SEQ ID NO: 6069 - DNA, 96 bp, Aspergillus thermomutatus
  misc_feature: 160
cctaacatgcctgctgccatcctagatggcggaaacccatcatggtttggtattaggtgatccaccacctcctgtgcctcccaatcagcatcacac

SEQ ID NO: 6070 - DNA, 96 bp, Aspergillus thermomutatus
  misc_feature: 160
gtgcttatacggtgccttactccctaccattctacctacctgtctgcctgcctctctatcttcctctctatctacctctctattcacctctctatt

SEQ ID NO: 6071 - DNA, 96 bp, Aspergillus thermomutatus
  misc_feature: 160
gtgctattctacgtgctattctacgtgctattctacatgctattcgacgtgctattctatgtgctattcaacctgccgttctgcctgccgttctgc

SEQ ID NO: 6072 - DNA, 96 bp, Aspergillus thermomutatus
  misc_feature: 160
cttatacggtgccttactccctaccattctacctacctgtctgcctgcctctctatcttcctctctatctacctctctattcacctctctattcac

SEQ ID NO: 6073 - DNA, 96 bp, Aspergillus thermomutatus
  misc_feature: 160
accaacccctacttatttactgcttcctactctctaaccatccctctatctcttctgctttccgtcctttctccttctaaactaactaacccttac

SEQ ID NO: 6074 - DNA, 96 bp, Aspergillus thermomutatus
  misc_feature: 160
ggttagttagtttagaaggagaaaggacggaaagcagaagagatagagggatggttagagagtaggaagcagtaaataagtaggggttggtttaag

SEQ ID NO: 6075 - DNA, 96 bp, Aspergillus thermomutatus
  misc_feature: 160
ggtgcttatacggtgccttactccctaccattctacctacctgtctgcctgcctctctatcttcctctctatctacctctctattcacctctctat

SEQ ID NO: 6076 - DNA, 96 bp, Aspergillus thermomutatus
  misc_feature: 160
gctattctacgtgctattctacgtgctattctacatgctattcgacgtgctattctatgtgctattcaacctgccgttctgcctgccgttctgcct

SEQ ID NO: 6077 - DNA, 96 bp, Aspergillus thermomutatus
  misc_feature: 160
gattttagaaataaaggagtaaaaagtcgatgagagtagagaagatgagatgatataagggaaagagaagattaaagcgaagagagtgaaggaagg

SEQ ID NO: 6078 - DNA, 96 bp, Aspergillus thermomutatus
  misc_feature: 160
caacccctacttatttactgcttcctactctctaaccatccctctatctcttctgctttccgtcctttctccttctaaactaactaacccttactc

SEQ ID NO: 6079 - DNA, 96 bp, Aspergillus thermomutatus
  misc_feature: 160
gaccatatttcgttctgaatgccgttttccattcttcgccttctgcgattcgaatgtggttatatgcgtccgtgatgtctagcttcgtgaaccatt

SEQ ID NO: 6080 - DNA, 96 bp, Aspergillus thermomutatus
  misc_feature: 160
gaaggatagtaagggatagtgtaagggatagggttaaaaaagaggataagaaaagaaagaagaaaaggaaaagagagagagagaagaaaaagagag

SEQ ID NO: 6081 - DNA, 96 bp, Aspergillus thermomutatus
  misc_feature: 160
gaaacgctaagagagggggaggtgatgttacgacaccaacactactaggcggacctgacaggcagaaccaaggagcaatgacaaccagtcgatcag

SEQ ID NO: 6082 - DNA, 96 bp, Aspergillus thermomutatus
  misc_feature: 160
gaaaagaagggatagaaaagaaagagaggataaaaagtgaagtaaagagtagaagaaggagtaaagtaaatagtaaaagaaggagtagagagagag

SEQ ID NO: 6083 - DNA, 96 bp, Aspergillus thermomutatus
  misc_feature: 160
aggtagagagggacccaagtagcaggccataaggcaggccatgagacacacagagaggtgtacacaaggcaggcagaacagtaggcagaacggcag

SEQ ID NO: 6084 - DNA, 96 bp, Aspergillus thermomutatus
  misc_feature: 160
ctctattcacctctctattcacctctctatctacctctctatctccctaccccactgtctgcctgtctgcctgtctgcctgtctgcctgtctctct

SEQ ID NO: 6085 - DNA, 96 bp, Aspergillus thermomutatus
  misc_feature: 160
aggacgaaacgctaagagagggggaggtgatgttacgacaccaacactactaggcggacctgacaggcagaaccaaggagcaatgacaaccagtcg

SEQ ID NO: 6086 - DNA, 96 bp, Aspergillus thermomutatus
  misc_feature: 160
attttagaaataaaggagtaaaaagtcgatgagagtagagaagatgagatgatataagggaaagagaagattaaagcgaagagagtgaaggaaggg

SEQ ID NO: 6087 - DNA, 96 bp, Aspergillus thermomutatus
  misc_feature: 160
acttataatatatattaatacctactatgcctcactgcctacctcctggggttcctctatgcctactcttggtctgccttactgcctctctccctg

SEQ ID NO: 6088 - DNA, 96 bp, Aspergillus thermomutatus
  misc_feature: 160
aatactcatgaggcatatttggaaagaatagataaatttccccctaaaccttcacctaatagagatattagtatacctaatttactaaataagcct

SEQ ID NO: 6089 - DNA, 96 bp, Aspergillus thermomutatus
  misc_feature: 159
gtcagcattgccaggatcaagatggtgcggagcaggcgtgtgatgggtgtgatgctgattgggaggcacaggaggtggtggatcacctaataccaa

SEQ ID NO: 6090 - DNA, 96 bp, Aspergillus thermomutatus
  misc_feature: 159
ttgccaggatcaagatggtgcggagcaggcgtgtgatgggtgtgatgctgattgggaggcacaggaggtggtggatcacctaataccaaaccatga

SEQ ID NO: 6091 - DNA, 96 bp, Aspergillus thermomutatus
  misc_feature: 159
atttagtttattaagagagagggaaggaattgagaagagaataaggtgaataaggagagaggagaagagaggagatgagaagagaggagatgagaa

SEQ ID NO: 6092 - DNA, 96 bp, Aspergillus thermomutatus
  misc_feature: 159
gtgtttaaggattaaaagaaagagtagagtaagggataggttaagagaggtaaagaggggtaagtaaggaataggaggaggagtagagggatagaa

SEQ ID NO: 6093 - DNA, 96 bp, Aspergillus thermomutatus
  misc_feature: 159
ttccttcctctttcctctctctttccttcctctttccttcctccttacctcccctttattccctctctccttcctctttacttcctccttacctcc

SEQ ID NO: 6094 - DNA, 96 bp, Aspergillus thermomutatus
  misc_feature: 159
ttactccctaccattctacctacctgtctgcctgcctctctatcttcctctctatctacctctctattcacctctctattcacctctctattcacc

SEQ ID NO: 6095 - DNA, 96 bp, Aspergillus thermomutatus
  misc_feature: 159
agagaggtaaggagataggtagagagggacccaagtagcaggccataaggcaggccatgagacacacagagaggtgtacacaaggcaggcagaaca

SEQ ID NO: 6096 - DNA, 96 bp, Aspergillus thermomutatus
  misc_feature: 159
gcctgctgccatcctagatggcggaaacccatcatggtttggtattaggtgatccaccacctcctgtgcctcccaatcagcatcacacccatcaca

SEQ ID NO: 6097 - DNA, 96 bp, Aspergillus thermomutatus
  misc_feature: 159
acgctaagagagggggaggtgatgttacgacaccaacactactaggcggacctgacaggcagaaccaaggagcaatgacaaccagtcgatcagaca

SEQ ID NO: 6098 - DNA, 96 bp, Aspergillus thermomutatus
  misc_feature: 159
cgtcagcattgccaggatcaagatggtgcggagcaggcgtgtgatgggtgtgatgctgattgggaggcacaggaggtggtggatcacctaatacca

SEQ ID NO: 6099 - DNA, 96 bp, Aspergillus thermomutatus
  misc_feature: 159
gtctgccgtgctgcctaacatgcctgctgccatcctagatggcggaaacccatcatggtttggtattaggtgatccaccacctcctgtgcctccca

SEQ ID NO: 6100 - DNA, 96 bp, Aspergillus thermomutatus
  misc_feature: 159
ctagatggcggaaacccatcatggtttggtattaggtgatccaccacctcctgtgcctcccaatcagcatcacacccatcacacgcctgctccgca

SEQ ID NO: 6101 - DNA, 96 bp, Aspergillus thermomutatus
  misc_feature: 159
caggcagagaggtaaggagataggtagagagggacccaagtagcaggccataaggcaggccatgagacacacagagaggtgtacacaaggcaggca

SEQ ID NO: 6102 - DNA, 96 bp, Aspergillus thermomutatus
  misc_feature: 159
cgaaacgctaagagagggggaggtgatgttacgacaccaacactactaggcggacctgacaggcagaaccaaggagcaatgacaaccagtcgatca

SEQ ID NO: 6103 - DNA, 96 bp, Aspergillus thermomutatus
  misc_feature: 159
tgaccatatttcgttctgaatgccgttttccattcttcgccttctgcgattcgaatgtggttatatgcgtccgtgatgtctagcttcgtgaaccat

SEQ ID NO: 6104 - DNA, 96 bp, Aspergillus thermomutatus
  misc_feature: 159
aaacgctaagagagggggaggtgatgttacgacaccaacactactaggcggacctgacaggcagaaccaaggagcaatgacaaccagtcgatcaga

SEQ ID NO: 6105 - DNA, 96 bp, Aspergillus thermomutatus
  misc_feature: 159
tcctcttctcatcttccctctctctcttaaattctttcttaaactattaattcctctctctttctcactccctcttcctcctttcttgcatttctt

SEQ ID NO: 6106 - DNA, 96 bp, Aspergillus thermomutatus
  misc_feature: 159
tataatatatattaatacctactatgcctcactgcctacctcctggggttcctctatgcctactcttggtctgccttactgcctctctccctgtct

SEQ ID NO: 6107 - DNA, 96 bp, Aspergillus thermomutatus
  misc_feature: 159
tataaccaccctaacttataatatatattaatacctactatgcctcactgcctacctcctggggttcctctatgcctactcttggtctgccttact

SEQ ID NO: 6108 - DNA, 96 bp, Aspergillus thermomutatus
  misc_feature: 159
tagatggcggaaacccatcatggtttggtattaggtgatccaccacctcctgtgcctcccaatcagcatcacacccatcacacgcctgctccgcac

SEQ ID NO: 6109 - DNA, 96 bp, Aspergillus thermomutatus
  misc_feature: 159
tacgagctgtacagccagggaatcgcgaatgggttactgttgttgaatgtatcaatgcttctgggtggtctctgccccccataatcaatcatcttc

SEQ ID NO: 6110 - DNA, 96 bp, Aspergillus thermomutatus
  misc_feature: 159
taagaacaagaggaaaataagaagagaataagaaggagaaaagaggagaaattaagagagtgagtaagtagacaggtaggaagtttagtaaggtag

SEQ ID NO: 6111 - DNA, 96 bp, Aspergillus thermomutatus
  misc_feature: 159
cagagaggtaaggagataggtagagagggacccaagtagcaggccataaggcaggccatgagacacacagagaggtgtacacaaggcaggcagaac

SEQ ID NO: 6112 - DNA, 96 bp, Aspergillus thermomutatus
  misc_feature: 159
gtatactaatatctctattaggtgaaggtttagggggaaatttatctattctttccaaatatgcctcatgagtatttttacattctttccaaatat

SEQ ID NO: 6113 - DNA, 96 bp, Aspergillus thermomutatus
  misc_feature: 159
acgaaacgctaagagagggggaggtgatgttacgacaccaacactactaggcggacctgacaggcagaaccaaggagcaatgacaaccagtcgatc

SEQ ID NO: 6114 - DNA, 96 bp, Aspergillus thermomutatus
  misc_feature: 159
gatatataaagaaggttgaagattagaagggaggatgttaagagaataaagaaatgcaagaaaggaggaagagggagtgagaaagagagaggaatt

SEQ ID NO: 6115 - DNA, 96 bp, Aspergillus thermomutatus
  misc_feature: 159
cctacctgtctacttactcactctcttaatttctcctcttttctccttcttattctcttcttattttcctcttgttcttattctcttctctttctc

SEQ ID NO: 6116 - DNA, 96 bp, Aspergillus thermomutatus
  misc_feature: 159
gaagggatagaaaagaaagagaggataaaaagtgaagtaaagagtagaagaaggagtaaagtaaatagtaaaagaaggagtagagagagagttagg

SEQ ID NO: 6117 - DNA, 96 bp, Aspergillus thermomutatus
  misc_feature: 159
cttataatatatattaatacctactatgcctcactgcctacctcctggggttcctctatgcctactcttggtctgccttactgcctctctccctgt

SEQ ID NO: 6118 - DNA, 96 bp, Aspergillus thermomutatus
  misc_feature: 159
aggcagagaggtaaggagataggtagagagggacccaagtagcaggccataaggcaggccatgagacacacagagaggtgtacacaaggcaggcag

SEQ ID NO: 6119 - DNA, 96 bp, Aspergillus thermomutatus
  misc_feature: 159
ctacttactcactctcttaatttctcctcttttctccttcttattctcttcttattttcctcttgttcttattctcttctctttctctttgattct

SEQ ID NO: 6120 - DNA, 96 bp, Aspergillus thermomutatus
  misc_feature: 159
agaagggatagaaaagaaagagaggataaaaagtgaagtaaagagtagaagaaggagtaaagtaaatagtaaaagaaggagtagagagagagttag

SEQ ID NO: 6121 - DNA, 96 bp, Aspergillus thermomutatus
  misc_feature: 159
ccaacccctacttatttactgcttcctactctctaaccatccctctatctcttctgctttccgtcctttctccttctaaactaactaacccttact

SEQ ID NO: 6122 - DNA, 96 bp, Aspergillus thermomutatus
  misc_feature: 159
attgccaggatcaagatggtgcggagcaggcgtgtgatgggtgtgatgctgattgggaggcacaggaggtggtggatcacctaataccaaaccatg

SEQ ID NO: 6123 - DNA, 96 bp, Aspergillus thermomutatus
  misc_feature: 159
agggaccaaggtagggagtaaagccagtagagaggcaccatgtcaggtagcaagagaggtagcaagagaggtagcaagagaggtagcaagagaggt

SEQ ID NO: 6124 - DNA, 96 bp, Aspergillus thermomutatus
  misc_feature: 159
aaatcgcttctgccgttttttctgttcccatatgaccatgcattgggtcatcgtggtgtttcgcgatgatttcggttctcatacactcaggtatgt

SEQ ID NO: 6125 - DNA, 96 bp, Aspergillus thermomutatus
  misc_feature: 158
ttgcaatgcacaattttgaaatcatgctgtgacaatgtctcagcccatctggcttgtcgtcgtgtcaattctttcgtggtcgtgaagaacgtgaga

SEQ ID NO: 6126 - DNA, 96 bp, Aspergillus thermomutatus
  misc_feature: 158
tacctagctgctaccatcaaatcaatgcgaaagcattggcagatagtccaccagtggtcccagcagagccatagtggccgtgtgagccagaaagaa

SEQ ID NO: 6127 - DNA, 96 bp, Aspergillus thermomutatus
  misc_feature: 158
taatatatgtaggtatataaaagccacgcagggttaggtataaaggcacccacagaggccccatgtaaggcagggttaaggcaggcagagaggtaa

SEQ ID NO: 6128 - DNA, 96 bp, Aspergillus thermomutatus
  misc_feature: 158
gcatgtaggatgcacatagaatagcacgcggaggcaggcagataggcccacagagaggtccgacatgaggtaggcagtgaggtagagagacaggca

SEQ ID NO: 6129 - DNA, 96 bp, Aspergillus thermomutatus
  misc_feature: 158
ggcagagaggtaaggagataggtagagagggacccaagtagcaggccataaggcaggccatgagacacacagagaggtgtacacaaggcaggcaga

SEQ ID NO: 6130 - DNA, 96 bp, Aspergillus thermomutatus
  misc_feature: 158
agaaggatagtaagggatagtgtaagggatagggttaaaaaagaggataagaaaagaaagaagaaaaggaaaagagagagagagaagaaaaagaga

SEQ ID NO: 6131 - DNA, 96 bp, Aspergillus thermomutatus
  misc_feature: 158
gaataagtaagggttaaagggaatttaaagtaggaaagaaaagagagagtaagggttagttagtttagaaggagaaaggacggaaagcagaagaga

SEQ ID NO: 6132 - DNA, 96 bp, Aspergillus thermomutatus
  misc_feature: 158
tctacttactcactctcttaatttctcctcttttctccttcttattctcttcttattttcctcttgttcttattctcttctctttctctttgattc

SEQ ID NO: 6133 - DNA, 96 bp, Aspergillus thermomutatus
  misc_feature: 158
tatgaggttgaatggatactggatgagcgtgagaaacgcgttggcagaggccgccgcaaggagtatctcgtcaaatggacaggttacgatcgtcct

SEQ ID NO: 6134 - DNA, 96 bp, Aspergillus thermomutatus
  misc_feature: 158
tatccctaatccttatactaaccttactcctattcttcttccaactcttatcattttccttttcttaaatcctacttcttctctttttttcttctt

SEQ ID NO: 6135 - DNA, 96 bp, Aspergillus thermomutatus
  misc_feature: 158
ccattctacctacctgtctgcctgcctctctatcttcctctctatctacctctctattcacctctctattcacctctctattcacctctctatcta

SEQ ID NO: 6136 - DNA, 96 bp, Aspergillus thermomutatus
  misc_feature: 158
tactggatgagcgtgagaaacgcgttggcagaggccgccgcaaggagtatctcgtcaaatggacaggttacgatcgtcctacgtgggaaccagctg

SEQ ID NO: 6137 - DNA, 96 bp, Aspergillus thermomutatus
  misc_feature: 158
tactaatatctctattaggtgaaggtttagggggaaatttatctattctttccaaatatgcctcatgagtatttttacattctttccaaatatgcc

SEQ ID NO: 6138 - DNA, 96 bp, Aspergillus thermomutatus
  misc_feature: 158
aaccaacccctacttatttactgcttcctactctctaaccatccctctatctcttctgctttccgtcctttctccttctaaactaactaaccctta

SEQ ID NO: 6139 - DNA, 96 bp, Aspergillus thermomutatus
  misc_feature: 158
taaggcagggttaaggcaggcagagaggtaaggagataggtagagagggacccaagtagcaggccataaggcaggccatgagacacacagagaggt

SEQ ID NO: 6140 - DNA, 96 bp, Aspergillus thermomutatus
  misc_feature: 158
cctgctgccatcctagatggcggaaacccatcatggtttggtattaggtgatccaccacctcctgtgcctcccaatcagcatcacacccatcacac

SEQ ID NO: 6141 - DNA, 96 bp, Aspergillus thermomutatus
  misc_feature: 158
gtctacttactcactctcttaatttctcctcttttctccttcttattctcttcttattttcctcttgttcttattctcttctctttctctttgatt

SEQ ID NO: 6142 - DNA, 96 bp, Aspergillus thermomutatus
  misc_feature: 158
cattctacctacctgtctgcctgcctctctatcttcctctctatctacctctctattcacctctctattcacctctctattcacctctctatctac

SEQ ID NO: 6143 - DNA, 96 bp, Aspergillus thermomutatus
  misc_feature: 158
ccttcctctttcctctctctttccttcctctttccttcctccttacctcccctttattccctctctccttcctctttacttcctccttacctcccc

SEQ ID NO: 6144 - DNA, 96 bp, Aspergillus thermomutatus
  misc_feature: 158
agtctgccgtgctgcctaacatgcctgctgccatcctagatggcggaaacccatcatggtttggtattaggtgatccaccacctcctgtgcctccc

SEQ ID NO: 6145 - DNA, 96 bp, Aspergillus thermomutatus
  misc_feature: 158
ggcaggcagagaggtaaggagataggtagagagggacccaagtagcaggccataaggcaggccatgagacacacagagaggtgtacacaaggcagg

SEQ ID NO: 6146 - DNA, 96 bp, Aspergillus thermomutatus
  misc_feature: 158
atatgaggttgaatggatactggatgagcgtgagaaacgcgttggcagaggccgccgcaaggagtatctcgtcaaatggacaggttacgatcgtcc

SEQ ID NO: 6147 - DNA, 96 bp, Aspergillus thermomutatus
  misc_feature: 158
gagttagggagagtgtttaaggattaaaagaaagagtagagtaagggataggttaagagaggtaaagaggggtaagtaaggaataggaggaggagt

SEQ ID NO: 6148 - DNA, 96 bp, Aspergillus thermomutatus
  misc_feature: 158
cctactatactacctgccccatatggtcgctctctggctaccttggtccctaccttgcatggcatatctgggggtgcctcacgcggtgcattgctc

SEQ ID NO: 6149 - DNA, 96 bp, Aspergillus thermomutatus
  misc_feature: 158
ctcactctcttaatttctcctcttttctccttcttattctcttcttattttcctcttgttcttattctcttctctttctctttgattctccctctt

SEQ ID NO: 6150 - DNA, 96 bp, Aspergillus thermomutatus
  misc_feature: 158
ccttctaaactaactaacccttactctctcttttctttcctactttaaattccctttaacccttacttattctcttcttttctttactatctctct

SEQ ID NO: 6151 - DNA, 96 bp, Aspergillus thermomutatus
  misc_feature: 158
ataaccaccctaacttataatatatattaatacctactatgcctcactgcctacctcctggggttcctctatgcctactcttggtctgccttactg

SEQ ID NO: 6152 - DNA, 96 bp, Aspergillus thermomutatus
  misc_feature: 158
atccctaatccttatactaaccttactcctattcttcttccaactcttatcattttccttttcttaaatcctacttcttctctttttttcttcttt

SEQ ID NO: 6153 - DNA, 96 bp, Aspergillus thermomutatus
  misc_feature: 158
aacttataatatatattaatacctactatgcctcactgcctacctcctggggttcctctatgcctactcttggtctgccttactgcctctctccct

SEQ ID NO: 6154 - DNA, 96 bp, Aspergillus thermomutatus
  misc_feature: 158
acgtgctattctacgtgctattctacgtgctattctacatgctattcgacgtgctattctatgtgctattcaacctgccgttctgcctgccgttct

SEQ ID NO: 6155 - DNA, 96 bp, Aspergillus thermomutatus
  misc_feature: 158
aaaagaagggatagaaaagaaagagaggataaaaagtgaagtaaagagtagaagaaggagtaaagtaaatagtaaaagaaggagtagagagagagt

SEQ ID NO: 6156 - DNA, 96 bp, Aspergillus thermomutatus
  misc_feature: 157
tttagtttattaagagagagggaaggaattgagaagagaataaggtgaataaggagagaggagaagagaggagatgagaagagaggagatgagaag

SEQ ID NO: 6157 - DNA, 96 bp, Aspergillus thermomutatus
  misc_feature: 157
actcatgaggcatatttggaaagaatagataaatttccccctaaaccttcacctaatagagatattagtatacctaatttactaaataagcctaaa

SEQ ID NO: 6158 - DNA, 96 bp, Aspergillus thermomutatus
  misc_feature: 157
tactcatgaggcatatttggaaagaatagataaatttccccctaaaccttcacctaatagagatattagtatacctaatttactaaataagcctaa

SEQ ID NO: 6159 - DNA, 96 bp, Aspergillus thermomutatus
  misc_feature: 157
ttactcactctcttaatttctcctcttttctccttcttattctcttcttattttcctcttgttcttattctcttctctttctctttgattctccct

SEQ ID NO: 6160 - DNA, 96 bp, Aspergillus thermomutatus
  misc_feature: 157
tccttactctcatccttactctcatccttatccctaatccttatactaaccttactcctattcttcttccaactcttatcattttccttttcttaa

SEQ ID NO: 6161 - DNA, 96 bp, Aspergillus thermomutatus
  misc_feature: 157
gtgaccatatttcgttctgaatgccgttttccattcttcgccttctgcgattcgaatgtggttatatgcgtccgtgatgtctagcttcgtgaacca

SEQ ID NO: 6162 - DNA, 96 bp, Aspergillus thermomutatus
  misc_feature: 157
tgcggataaagttcttctccagcagctctgtcaacatctttcgtaagacaagcaattcaccgcgcgacatgctgtacagagggccccatgggggtt

SEQ ID NO: 6163 - DNA, 96 bp, Aspergillus thermomutatus
  misc_feature: 157
accatgatgggtttccgccatctaggatggcagcaggcatgttaggcagcacggcagactacacatcattgagagaggcgtctagagagacaggca

SEQ ID NO: 6164 - DNA, 96 bp, Aspergillus thermomutatus
  misc_feature: 157
ccttactccctaccattctacctacctgtctgcctgcctctctatcttcctctctatctacctctctattcacctctctattcacctctctattca

SEQ ID NO: 6165 - DNA, 96 bp, Aspergillus thermomutatus
  misc_feature: 157
tctccttctaaactaactaacccttactctctcttttctttcctactttaaattccctttaacccttacttattctcttcttttctttactatctc

SEQ ID NO: 6166 - DNA, 96 bp, Aspergillus thermomutatus
  misc_feature: 157
aaaggagtaaaaagtcgatgagagtagagaagatgagatgatataagggaaagagaagattaaagcgaagagagtgaaggaagggatgttgatgga

SEQ ID NO: 6167 - DNA, 96 bp, Aspergillus thermomutatus
  misc_feature: 157
atactcatgaggcatatttggaaagaatagataaatttccccctaaaccttcacctaatagagatattagtatacctaatttactaaataagccta

SEQ ID NO: 6168 - DNA, 96 bp, Aspergillus thermomutatus
  misc_feature: 157
tactcactctcttaatttctcctcttttctccttcttattctcttcttattttcctcttgttcttattctcttctctttctctttgattctccctc

SEQ ID NO: 6169 - DNA, 96 bp, Aspergillus thermomutatus
  misc_feature: 157
gtaatatatgtaggtatataaaagccacgcagggttaggtataaaggcacccacagaggccccatgtaaggcagggttaaggcaggcagagaggta

SEQ ID NO: 6170 - DNA, 96 bp, Aspergillus thermomutatus
  misc_feature: 157
taaaggagtaaaaagtcgatgagagtagagaagatgagatgatataagggaaagagaagattaaagcgaagagagtgaaggaagggatgttgatgg

SEQ ID NO: 6171 - DNA, 96 bp, Aspergillus thermomutatus
  misc_feature: 157
gttccctatactgctcatgctcttctggcaatgagatctgatccgtagaagttgccgctaactctcgcgatccttcagagcgatgtccctcatcct

SEQ ID NO: 6172 - DNA, 96 bp, Aspergillus thermomutatus
  misc_feature: 157
cttactccctaccattctacctacctgtctgcctgcctctctatcttcctctctatctacctctctattcacctctctattcacctctctattcac

SEQ ID NO: 6173 - DNA, 96 bp, Aspergillus thermomutatus
  misc_feature: 157
aacgctaagagagggggaggtgatgttacgacaccaacactactaggcggacctgacaggcagaaccaaggagcaatgacaaccagtcgatcagac

SEQ ID NO: 6174 - DNA, 96 bp, Aspergillus thermomutatus
  misc_feature: 157
gcgcagggcgatgagcacctacaggagatgatacggtcggtacaggcaggggctatacggttccctaacaagctacgcgtgcgtatatcgatcgcc

SEQ ID NO: 6175 - DNA, 96 bp, Aspergillus thermomutatus
  misc_feature: 157
gcggataaagttcttctccagcagctctgtcaacatctttcgtaagacaagcaattcaccgcgcgacatgctgtacagagggccccatgggggttc

SEQ ID NO: 6176 - DNA, 96 bp, Aspergillus thermomutatus
  misc_feature: 157
gcaggcagagaggtaaggagataggtagagagggacccaagtagcaggccataaggcaggccatgagacacacagagaggtgtacacaaggcaggc

SEQ ID NO: 6177 - DNA, 96 bp, Aspergillus thermomutatus
  misc_feature: 157
ctgctgccatcctagatggcggaaacccatcatggtttggtattaggtgatccaccacctcctgtgcctcccaatcagcatcacacccatcacacg

SEQ ID NO: 6178 - DNA, 96 bp, Aspergillus thermomutatus
  misc_feature: 157
ctccttctaaactaactaacccttactctctcttttctttcctactttaaattccctttaacccttacttattctcttcttttctttactatctct

SEQ ID NO: 6179 - DNA, 96 bp, Aspergillus thermomutatus
  misc_feature: 157
aggtaaggagataggtagagagggacccaagtagcaggccataaggcaggccatgagacacacagagaggtgtacacaaggcaggcagaacagtag

SEQ ID NO: 6180 - DNA, 96 bp, Aspergillus thermomutatus
  misc_feature: 157
agtaaagagtagaagaaggagtaaagtaaatagtaaaagaaggagtagagagagagttaggagaaggagtagagtaagggttaggaggaggattag

SEQ ID NO: 6181 - DNA, 96 bp, Aspergillus thermomutatus
  misc_feature: 157
cgtgctattctacgtgctattctacgtgctattctacatgctattcgacgtgctattctatgtgctattcaacctgccgttctgcctgccgttctg

SEQ ID NO: 6182 - DNA, 96 bp, Aspergillus thermomutatus
  misc_feature: 157
cgcagggcgatgagcacctacaggagatgatacggtcggtacaggcaggggctatacggttccctaacaagctacgcgtgcgtatatcgatcgccg

SEQ ID NO: 6183 - DNA, 96 bp, Aspergillus thermomutatus
  misc_feature: 157
aaagcattggcagatagtccaccagtggtcccagcagagccatagtggccgtgtgagccagaaagaaaaggctaggggtgaggcagagctacagcg

SEQ ID NO: 6184 - DNA, 96 bp, Aspergillus thermomutatus
  misc_feature: 157
atgcggataaagttcttctccagcagctctgtcaacatctttcgtaagacaagcaattcaccgcgcgacatgctgtacagagggccccatgggggt

SEQ ID NO: 6185 - DNA, 96 bp, Aspergillus thermomutatus
  misc_feature: 157
atcctcttctcatcttccctctctctcttaaattctttcttaaactattaattcctctctctttctcactccctcttcctcctttcttgcatttct

SEQ ID NO: 6186 - DNA, 96 bp, Aspergillus thermomutatus
  misc_feature: 157
actggatgagcgtgagaaacgcgttggcagaggccgccgcaaggagtatctcgtcaaatggacaggttacgatcgtcctacgtgggaaccagctgt

SEQ ID NO: 6187 - DNA, 96 bp, Aspergillus thermomutatus
  misc_feature: 156
cgcacttcttgagcttcagcttgatgctagctttttgaagcttctccagaaccttgttgacatgttcaacatgttcttccttctctttcgagaaaa

SEQ ID NO: 6188 - DNA, 96 bp, Aspergillus thermomutatus
  misc_feature: 156
ttcctacctgtctacttactcactctcttaatttctcctcttttctccttcttattctcttcttattttcctcttgttcttattctcttctctttc

SEQ ID NO: 6189 - DNA, 96 bp, Aspergillus thermomutatus
  misc_feature: 156
ttatccctaatccttatactaaccttactcctattcttcttccaactcttatcattttccttttcttaaatcctacttcttctctttttttcttct

SEQ ID NO: 6190 - DNA, 96 bp, Aspergillus thermomutatus
  misc_feature: 156
gaacaagaggaaaataagaagagaataagaaggagaaaagaggagaaattaagagagtgagtaagtagacaggtaggaagtttagtaaggtagtaa

SEQ ID NO: 6191 - DNA, 96 bp, Aspergillus thermomutatus
  misc_feature: 156
tgccaggatcaagatggtgcggagcaggcgtgtgatgggtgtgatgctgattgggaggcacaggaggtggtggatcacctaataccaaaccatgat

SEQ ID NO: 6192 - DNA, 96 bp, Aspergillus thermomutatus
  misc_feature: 156
tctaatcctccctctaatcctccctctaatcctccctctaatcctctttctaatcctccctctaatcctctttctatccctccctctaatcctcct

SEQ ID NO: 6193 - DNA, 96 bp, Aspergillus thermomutatus
  misc_feature: 156
tcctacctgtctacttactcactctcttaatttctcctcttttctccttcttattctcttcttattttcctcttgttcttattctcttctctttct

SEQ ID NO: 6194 - DNA, 96 bp, Aspergillus thermomutatus
  misc_feature: 156
acgcccctccccaatcggcatcggtataggcaattggacgaggaagaggtcctactcctatatgaaaattgatgccaacatctcgtgtaccctgga

SEQ ID NO: 6195 - DNA, 96 bp, Aspergillus thermomutatus
  misc_feature: 156
aatagcacgtcgaatagcatgtaggatgcacatagaatagcacgcggaggcaggcagataggcccacagagaggtccgacatgaggtaggcagtga

SEQ ID NO: 6196 - DNA, 96 bp, Aspergillus thermomutatus
  misc_feature: 156
tcactctcttaatttctcctcttttctccttcttattctcttcttattttcctcttgttcttattctcttctctttctctttgattctccctcttc

SEQ ID NO: 6197 - DNA, 96 bp, Aspergillus thermomutatus
  misc_feature: 156
gccaatgctttcgcattgatttgatggtagcagctaggtagtggcattgagtttgacctcgcaggcagagcaggccattcgagtgacatggtaata

SEQ ID NO: 6198 - DNA, 96 bp, Aspergillus thermomutatus
  misc_feature: 156
ctgtctgcctgtctgcctgtctgcctgtctctctacctcactgcctacctcatgtcggacctctctgtgggcctatctgcctgcctccgcgtgcta

SEQ ID NO: 6199 - DNA, 96 bp, Aspergillus thermomutatus
  misc_feature: 156
gaggtaaggagataggtagagagggacccaagtagcaggccataaggcaggccatgagacacacagagaggtgtacacaaggcaggcagaacagta

SEQ ID NO: 6200 - DNA, 96 bp, Aspergillus thermomutatus
  misc_feature: 156
taaaccaacccctacttatttactgcttcctactctctaaccatccctctatctcttctgctttccgtcctttctccttctaaactaactaaccct

SEQ ID NO: 6201 - DNA, 96 bp, Aspergillus thermomutatus
  misc_feature: 156
aaggagtaaaaagtcgatgagagtagagaagatgagatgatataagggaaagagaagattaaagcgaagagagtgaaggaagggatgttgatggac

SEQ ID NO: 6202 - DNA, 96 bp, Aspergillus thermomutatus
  misc_feature: 156
ctctaatcctccctctaatcctccctctaatcctccctctaatcctctttctaatcctccctctaatcctctttctatccctccctctaatcctcc

SEQ ID NO: 6203 - DNA, 96 bp, Aspergillus thermomutatus
  misc_feature: 156
gatccctactatactacctgccccatatggtcgctctctggctaccttggtccctaccttgcatggcatatctgggggtgcctcacgcggtgcatt

SEQ ID NO: 6204 - DNA, 96 bp, Aspergillus thermomutatus
  misc_feature: 156
ccaccctaacttataatatatattaatacctactatgcctcactgcctacctcctggggttcctctatgcctactcttggtctgccttactgcctc

SEQ ID NO: 6205 - DNA, 96 bp, Aspergillus thermomutatus
  misc_feature: 156
gagagggggaggtgatgttacgacaccaacactactaggcggacctgacaggcagaaccaaggagcaatgacaaccagtcgatcagacaaggactg

SEQ ID NO: 6206 - DNA, 96 bp, Aspergillus thermomutatus
  misc_feature: 156
gaaagaaaagaagggatagaaaagaaagagaggataaaaagtgaagtaaagagtagaagaaggagtaaagtaaatagtaaaagaaggagtagagag

SEQ ID NO: 6207 - DNA, 96 bp, Aspergillus thermomutatus
  misc_feature: 156
agaatgaagatagtaagaaaaaggagagagggagtaaaggggaggtaaggaggaagtaaagaggaaggagagagggaataaaggggaggtaaggag

SEQ ID NO: 6208 - DNA, 96 bp, Aspergillus thermomutatus
  misc_feature: 156
catcgcgaaacaccacgatgacccaatgcatggtcatatgggaacagaaaaaacggcagaagcgatttcacgaaattactatttcccaaacatgag

SEQ ID NO: 6209 - DNA, 96 bp, Aspergillus thermomutatus
  misc_feature: 156
ccctactatactacctgccccatatggtcgctctctggctaccttggtccctaccttgcatggcatatctgggggtgcctcacgcggtgcattgct

SEQ ID NO: 6210 - DNA, 96 bp, Aspergillus thermomutatus
  misc_feature: 156
ataaaggagtaaaaagtcgatgagagtagagaagatgagatgatataagggaaagagaagattaaagcgaagagagtgaaggaagggatgttgatg

SEQ ID NO: 6211 - DNA, 96 bp, Aspergillus thermomutatus
  misc_feature: 156
atccttactctcatccttactctcatccttactctcatccttatccctaatccttatactaaccttactcctattcttcttccaactcttatcatt

SEQ ID NO: 6212 - DNA, 96 bp, Aspergillus thermomutatus
  misc_feature: 156
atattaatacctactatgcctcactgcctacctcctggggttcctctatgcctactcttggtctgccttactgcctctctccctgtcttacatggt

SEQ ID NO: 6213 - DNA, 96 bp, Aspergillus thermomutatus
  misc_feature: 156
aggcagggttaaggcaggcagagaggtaaggagataggtagagagggacccaagtagcaggccataaggcaggccatgagacacacagagaggtgt

SEQ ID NO: 6214 - DNA, 96 bp, Aspergillus thermomutatus
  misc_feature: 156
aaaccaacccctacttatttactgcttcctactctctaaccatccctctatctcttctgctttccgtcctttctccttctaaactaactaaccctt

SEQ ID NO: 6215 - DNA, 96 bp, Aspergillus thermomutatus
  misc_feature: 155
tgtttaaggattaaaagaaagagtagagtaagggataggttaagagaggtaaagaggggtaagtaaggaataggaggaggagtagagggatagaaa

SEQ ID NO: 6216 - DNA, 96 bp, Aspergillus thermomutatus
  misc_feature: 155
ttgatccctactatactacctgccccatatggtcgctctctggctaccttggtccctaccttgcatggcatatctgggggtgcctcacgcggtgca

SEQ ID NO: 6217 - DNA, 96 bp, Aspergillus thermomutatus
  misc_feature: 155
ttctaaactaactaacccttactctctcttttctttcctactttaaattccctttaacccttacttattctcttcttttctttactatctctctct

SEQ ID NO: 6218 - DNA, 96 bp, Aspergillus thermomutatus
  misc_feature: 155
ttcctactctctaaccatccctctatctcttctgctttccgtcctttctccttctaaactaactaacccttactctctcttttctttcctacttta

SEQ ID NO: 6219 - DNA, 96 bp, Aspergillus thermomutatus
  misc_feature: 155
ttccctatactgctcatgctcttctggcaatgagatctgatccgtagaagttgccgctaactctcgcgatccttcagagcgatgtccctcatcctc

SEQ ID NO: 6220 - DNA, 96 bp, Aspergillus thermomutatus
  misc_feature: 155
attagtgattttagaaataaaggagtaaaaagtcgatgagagtagagaagatgagatgatataagggaaagagaagattaaagcgaagagagtgaa

SEQ ID NO: 6221 - DNA, 96 bp, Aspergillus thermomutatus
  misc_feature: 155
ttagtgattttagaaataaaggagtaaaaagtcgatgagagtagagaagatgagatgatataagggaaagagaagattaaagcgaagagagtgaag

SEQ ID NO: 6222 - DNA, 96 bp, Aspergillus thermomutatus
  misc_feature: 155
tcctactctctaaccatccctctatctcttctgctttccgtcctttctccttctaaactaactaacccttactctctcttttctttcctactttaa

SEQ ID NO: 6223 - DNA, 96 bp, Aspergillus thermomutatus
  misc_feature: 155
tgcctgctgccatcctagatggcggaaacccatcatggtttggtattaggtgatccaccacctcctgtgcctcccaatcagcatcacacccatcac

SEQ ID NO: 6224 - DNA, 96 bp, Aspergillus thermomutatus
  misc_feature: 155
tgatccctactatactacctgccccatatggtcgctctctggctaccttggtccctaccttgcatggcatatctgggggtgcctcacgcggtgcat

SEQ ID NO: 6225 - DNA, 96 bp, Aspergillus thermomutatus
  misc_feature: 155
tctctattcacctctctattcacctctctatctacctctctatctccctaccccactgtctgcctgtctgcctgtctgcctgtctgcctgtctctc

SEQ ID NO: 6226 - DNA, 96 bp, Aspergillus thermomutatus
  misc_feature: 155
tatttagtttattaagagagagggaaggaattgagaagagaataaggtgaataaggagagaggagaagagaggagatgagaagagaggagatgaga

SEQ ID NO: 6227 - DNA, 96 bp, Aspergillus thermomutatus
  misc_feature: 155
gcagggcgatgagcacctacaggagatgatacggtcggtacaggcaggggctatacggttccctaacaagctacgcgtgcgtatatcgatcgccga

SEQ ID NO: 6228 - DNA, 96 bp, Aspergillus thermomutatus
  misc_feature: 155
ggacgaaacgctaagagagggggaggtgatgttacgacaccaacactactaggcggacctgacaggcagaaccaaggagcaatgacaaccagtcga

SEQ ID NO: 6229 - DNA, 96 bp, Aspergillus thermomutatus
  misc_feature: 155
ggagagtgtttaaggattaaaagaaagagtagagtaagggataggttaagagaggtaaagaggggtaagtaaggaataggaggaggagtagaggga

SEQ ID NO: 6230 - DNA, 96 bp, Aspergillus thermomutatus
  misc_feature: 155
tcatcgcgaaacaccacgatgacccaatgcatggtcatatgggaacagaaaaaacggcagaagcgatttcacgaaattactatttcccaaacatga

SEQ ID NO: 6231 - DNA, 96 bp, Aspergillus thermomutatus
  misc_feature: 155
tactctctaaccatccctctatctcttctgctttccgtcctttctccttctaaactaactaacccttactctctcttttctttcctactttaaatt

SEQ ID NO: 6232 - DNA, 96 bp, Aspergillus thermomutatus
  misc_feature: 155
taaccaccctaacttataatatatattaatacctactatgcctcactgcctacctcctggggttcctctatgcctactcttggtctgccttactgc

SEQ ID NO: 6233 - DNA, 96 bp, Aspergillus thermomutatus
  misc_feature: 155
aatatatattaatacctactatgcctcactgcctacctcctggggttcctctatgcctactcttggtctgccttactgcctctctccctgtcttac

SEQ ID NO: 6234 - DNA, 96 bp, Aspergillus thermomutatus
  misc_feature: 155
attctacctacctgtctgcctgcctctctatcttcctctctatctacctctctattcacctctctattcacctctctattcacctctctatctacc

SEQ ID NO: 6235 - DNA, 96 bp, Aspergillus thermomutatus
  misc_feature: 155
gggagagtgtttaaggattaaaagaaagagtagagtaagggataggttaagagaggtaaagaggggtaagtaaggaataggaggaggagtagaggg

SEQ ID NO: 6236 - DNA, 96 bp, Aspergillus thermomutatus
  misc_feature: 155
aaccaccctaacttataatatatattaatacctactatgcctcactgcctacctcctggggttcctctatgcctactcttggtctgccttactgcc

SEQ ID NO: 6237 - DNA, 96 bp, Aspergillus thermomutatus
  misc_feature: 155
aaccatgatgggtttccgccatctaggatggcagcaggcatgttaggcagcacggcagactacacatcattgagagaggcgtctagagagacaggc

SEQ ID NO: 6238 - DNA, 96 bp, Aspergillus thermomutatus
  misc_feature: 155
ctaatcctccctctaatcctccctctaatcctccctctaatcctctttctaatcctccctctaatcctctttctatccctccctctaatcctcctc

SEQ ID NO: 6239 - DNA, 96 bp, Aspergillus thermomutatus
  misc_feature: 155
cgagctgtacagccagggaatcgcgaatgggttactgttgttgaatgtatcaatgcttctgggtggtctctgccccccataatcaatcatcttctc

SEQ ID NO: 6240 - DNA, 96 bp, Aspergillus thermomutatus
  misc_feature: 155
gacgaaacgctaagagagggggaggtgatgttacgacaccaacactactaggcggacctgacaggcagaaccaaggagcaatgacaaccagtcgat

SEQ ID NO: 6241 - DNA, 96 bp, Aspergillus thermomutatus
  misc_feature: 155
gaatagcacgtcgaatagcatgtaggatgcacatagaatagcacgcggaggcaggcagataggcccacagagaggtccgacatgaggtaggcagtg

SEQ ID NO: 6242 - DNA, 96 bp, Aspergillus thermomutatus
  misc_feature: 155
cttatccctaatccttatactaaccttactcctattcttcttccaactcttatcattttccttttcttaaatcctacttcttctctttttttcttc

SEQ ID NO: 6243 - DNA, 96 bp, Aspergillus thermomutatus
  misc_feature: 155
ctctcatccttatccctaatccttatactaaccttactcctattcttcttccaactcttatcattttccttttcttaaatcctacttcttctcttt

SEQ ID NO: 6244 - DNA, 96 bp, Aspergillus thermomutatus
  misc_feature: 155
atagcacgtcgaatagcatgtaggatgcacatagaatagcacgcggaggcaggcagataggcccacagagaggtccgacatgaggtaggcagtgag

SEQ ID NO: 6245 - DNA, 96 bp, Aspergillus thermomutatus
  misc_feature: 155
ctactctctaaccatccctctatctcttctgctttccgtcctttctccttctaaactaactaacccttactctctcttttctttcctactttaaat

SEQ ID NO: 6246 - DNA, 96 bp, Aspergillus thermomutatus
  misc_feature: 155
ccctaacttataatatatattaatacctactatgcctcactgcctacctcctggggttcctctatgcctactcttggtctgccttactgcctctct

SEQ ID NO: 6247 - DNA, 96 bp, Aspergillus thermomutatus
  misc_feature: 155
aacgcccctccccaatcggcatcggtataggcaattggacgaggaagaggtcctactcctatatgaaaattgatgccaacatctcgtgtaccctgg

SEQ ID NO: 6248 - DNA, 96 bp, Aspergillus thermomutatus
  misc_feature: 155
aataaaggagtaaaaagtcgatgagagtagagaagatgagatgatataagggaaagagaagattaaagcgaagagagtgaaggaagggatgttgat

SEQ ID NO: 6249 - DNA, 96 bp, Aspergillus thermomutatus
  misc_feature: 155
agagagggggaggtgatgttacgacaccaacactactaggcggacctgacaggcagaaccaaggagcaatgacaaccagtcgatcagacaaggact

SEQ ID NO: 6250 - DNA, 96 bp, Aspergillus thermomutatus
  misc_feature: 155
accaccctaacttataatatatattaatacctactatgcctcactgcctacctcctggggttcctctatgcctactcttggtctgccttactgcct

SEQ ID NO: 6251 - DNA, 96 bp, Aspergillus thermomutatus
  misc_feature: 154
tttccttcctctttcctctctctttccttcctctttccttcctccttacctcccctttattccctctctccttcctctttacttcctccttacctc

SEQ ID NO: 6252 - DNA, 96 bp, Aspergillus thermomutatus
  misc_feature: 154
ttatttagtttattaagagagagggaaggaattgagaagagaataaggtgaataaggagagaggagaagagaggagatgagaagagaggagatgag

SEQ ID NO: 6253 - DNA, 96 bp, Aspergillus thermomutatus
  misc_feature: 154
gagaataagaacaagaggaaaataagaagagaataagaaggagaaaagaggagaaattaagagagtgagtaagtagacaggtaggaagtttagtaa

SEQ ID NO: 6254 - DNA, 96 bp, Aspergillus thermomutatus
  misc_feature: 154
tggcatatctgggggtgcctcacgcggtgcattgctccatacctcctatggtgcctctctacctatctccctacctcttcacctacctcttcacct

SEQ ID NO: 6255 - DNA, 96 bp, Aspergillus thermomutatus
  misc_feature: 154
aaagaaaagaagggatagaaaagaaagagaggataaaaagtgaagtaaagagtagaagaaggagtaaagtaaatagtaaaagaaggagtagagaga

SEQ ID NO: 6256 - DNA, 96 bp, Aspergillus thermomutatus
  misc_feature: 154
tcgcgaaacaccacgatgacccaatgcatggtcatatgggaacagaaaaaacggcagaagcgatttcacgaaattactatttcccaaacatgagac

SEQ ID NO: 6257 - DNA, 96 bp, Aspergillus thermomutatus
  misc_feature: 154
tccttatccctaatccttatactaaccttactcctattcttcttccaactcttatcattttccttttcttaaatcctacttcttctctttttttct

SEQ ID NO: 6258 - DNA, 96 bp, Aspergillus thermomutatus
  misc_feature: 154
tccttactctcatccttatccctaatccttatactaaccttactcctattcttcttccaactcttatcattttccttttcttaaatcctacttctt

SEQ ID NO: 6259 - DNA, 96 bp, Aspergillus thermomutatus
  misc_feature: 154
agagggggaggtgatgttacgacaccaacactactaggcggacctgacaggcagaaccaaggagcaatgacaaccagtcgatcagacaaggactga

SEQ ID NO: 6260 - DNA, 96 bp, Aspergillus thermomutatus
  misc_feature: 154
atggtaatataggcagaggctcatcaaatgcatgtgggatctggatggcactgctatcatggtgaatatcatgccattgagacactgcctgggtga

SEQ ID NO: 6261 - DNA, 96 bp, Aspergillus thermomutatus
  misc_feature: 154
agagaataagaacaagaggaaaataagaagagaataagaaggagaaaagaggagaaattaagagagtgagtaagtagacaggtaggaagtttagta

SEQ ID NO: 6262 - DNA, 96 bp, Aspergillus thermomutatus
  misc_feature: 154
ggcagggttaaggcaggcagagaggtaaggagataggtagagagggacccaagtagcaggccataaggcaggccatgagacacacagagaggtgta

SEQ ID NO: 6263 - DNA, 96 bp, Aspergillus thermomutatus
  misc_feature: 154
gtttatcattgaagctggcaagggcgtacgcatggaccccgacaaggtaaaagctatactagaatggcagacccctacatccactcgaggcgtacg

SEQ ID NO: 6264 - DNA, 96 bp, Aspergillus thermomutatus
  misc_feature: 154
gttatcgtgaaaacagaccacaagaatctcacgttcttcacgaccacgaaagaattgacacgacgacaagccagatgggctgagacattgtcacag

SEQ ID NO: 6265 - DNA, 96 bp, Aspergillus thermomutatus
  misc_feature: 154
gggggtgcctcacgcggtgcattgctccatacctcctatggtgcctctctacctatctccctacctcttcacctacctcttcacctacctcttcac

SEQ ID NO: 6266 - DNA, 96 bp, Aspergillus thermomutatus
  misc_feature: 154
ggttatttagtttattaagagagagggaaggaattgagaagagaataaggtgaataaggagagaggagaagagaggagatgagaagagaggagatg

SEQ ID NO: 6267 - DNA, 96 bp, Aspergillus thermomutatus
  misc_feature: 154
accacgatgacccaatgcatggtcatatgggaacagaaaaaacggcagaagcgatttcacgaaattactatttcccaaacatgagacgaaaggtgc

SEQ ID NO: 6268 - DNA, 96 bp, Aspergillus thermomutatus
  misc_feature: 154
gatgtaggggtctgccattctagtatagcttttaccttgtcggggtccatgcgtacgcccttgccagcttcaatgataaacccgaggtatttcgtg

SEQ ID NO: 6269 - DNA, 96 bp, Aspergillus thermomutatus
  misc_feature: 154
gagagtgtttaaggattaaaagaaagagtagagtaagggataggttaagagaggtaaagaggggtaagtaaggaataggaggaggagtagagggat

SEQ ID NO: 6270 - DNA, 96 bp, Aspergillus thermomutatus
  misc_feature: 154
accctaacttataatatatattaatacctactatgcctcactgcctacctcctggggttcctctatgcctactcttggtctgccttactgcctctc

SEQ ID NO: 6271 - DNA, 96 bp, Aspergillus thermomutatus
  misc_feature: 154
gaaatcgcttctgccgttttttctgttcccatatgaccatgcattgggtcatcgtggtgtttcgcgatgatttcggttctcatacactcaggtatg

SEQ ID NO: 6272 - DNA, 96 bp, Aspergillus thermomutatus
  misc_feature: 154
acgatgacccaatgcatggtcatatgggaacagaaaaaacggcagaagcgatttcacgaaattactatttcccaaacatgagacgaaaggtgcaag

SEQ ID NO: 6273 - DNA, 96 bp, Aspergillus thermomutatus
  misc_feature: 154
cttcctacctgtctacttactcactctcttaatttctcctcttttctccttcttattctcttcttattttcctcttgttcttattctcttctcttt

SEQ ID NO: 6274 - DNA, 96 bp, Aspergillus thermomutatus
  misc_feature: 154
caaaccatgatgggtttccgccatctaggatggcagcaggcatgttaggcagcacggcagactacacatcattgagagaggcgtctagagagacag

SEQ ID NO: 6275 - DNA, 96 bp, Aspergillus thermomutatus
  misc_feature: 154
aagaaaagaagggatagaaaagaaagagaggataaaaagtgaagtaaagagtagaagaaggagtaaagtaaatagtaaaagaaggagtagagagag

SEQ ID NO: 6276 - DNA, 96 bp, Aspergillus thermomutatus
  misc_feature: 154
ctcatgaggcatatttggaaagaatagataaatttccccctaaaccttcacctaatagagatattagtatacctaatttactaaataagcctaaat

SEQ ID NO: 6277 - DNA, 96 bp, Aspergillus thermomutatus
  misc_feature: 154
ctacctgtctacttactcactctcttaatttctcctcttttctccttcttattctcttcttattttcctcttgttcttattctcttctctttctct

SEQ ID NO: 6278 - DNA, 96 bp, Aspergillus thermomutatus
  misc_feature: 154
ctaccattctacctacctgtctgcctgcctctctatcttcctctctatctacctctctattcacctctctattcacctctctattcacctctctat

SEQ ID NO: 6279 - DNA, 96 bp, Aspergillus thermomutatus
  misc_feature: 154
ccttatccctaatccttatactaaccttactcctattcttcttccaactcttatcattttccttttcttaaatcctacttcttctctttttttctt

SEQ ID NO: 6280 - DNA, 96 bp, Aspergillus thermomutatus
  misc_feature: 154
cctgtctgcctgtctgcctgtctgcctgtctctctacctcactgcctacctcatgtcggacctctctgtgggcctatctgcctgcctccgcgtgct

SEQ ID NO: 6281 - DNA, 96 bp, Aspergillus thermomutatus
  misc_feature: 154
agggagagtgtttaaggattaaaagaaagagtagagtaagggataggttaagagaggtaaagaggggtaagtaaggaataggaggaggagtagagg

SEQ ID NO: 6282 - DNA, 96 bp, Aspergillus thermomutatus
  misc_feature: 154
caacgcccctccccaatcggcatcggtataggcaattggacgaggaagaggtcctactcctatatgaaaattgatgccaacatctcgtgtaccctg

SEQ ID NO: 6283 - DNA, 96 bp, Aspergillus thermomutatus
  misc_feature: 154
atccctactatactacctgccccatatggtcgctctctggctaccttggtccctaccttgcatggcatatctgggggtgcctcacgcggtgcattg

SEQ ID NO: 6284 - DNA, 96 bp, Aspergillus thermomutatus
  misc_feature: 154
acgagctgtacagccagggaatcgcgaatgggttactgttgttgaatgtatcaatgcttctgggtggtctctgccccccataatcaatcatcttct

SEQ ID NO: 6285 - DNA, 96 bp, Aspergillus thermomutatus
  misc_feature: 153
cctactctctaaccatccctctatctcttctgctttccgtcctttctccttctaaactaactaacccttactctctcttttctttcctactttaaa

SEQ ID NO: 6286 - DNA, 96 bp, Aspergillus thermomutatus
  misc_feature: 153
aaaaagaagaggagaaattaaagaacaagaaagaatgagaagagagaaaagaacaagaatagaaaagaatgagaagggaacgaggtgagaaggtaa

SEQ ID NO: 6287 - DNA, 96 bp, Aspergillus thermomutatus
  misc_feature: 153
tgtctacttactcactctcttaatttctcctcttttctccttcttattctcttcttattttcctcttgttcttattctcttctctttctctttgat

SEQ ID NO: 6288 - DNA, 96 bp, Aspergillus thermomutatus
  misc_feature: 153
ccacgatgacccaatgcatggtcatatgggaacagaaaaaacggcagaagcgatttcacgaaattactatttcccaaacatgagacgaaaggtgca

SEQ ID NO: 6289 - DNA, 96 bp, Aspergillus thermomutatus
  misc_feature: 153
atgcctgctgccatcctagatggcggaaacccatcatggtttggtattaggtgatccaccacctcctgtgcctcccaatcagcatcacacccatca

SEQ ID NO: 6290 - DNA, 96 bp, Aspergillus thermomutatus
  misc_feature: 153
aagaagaggagaaattaaagaacaagaaagaatgagaagagagaaaagaacaagaatagaaaagaatgagaagggaacgaggtgagaaggtaaaga

SEQ ID NO: 6291 - DNA, 96 bp, Aspergillus thermomutatus
  misc_feature: 153
tctgcctgtctgcctgtctgcctgtctctctacctcactgcctacctcatgtcggacctctctgtgggcctatctgcctgcctccgcgtgctattc

SEQ ID NO: 6292 - DNA, 96 bp, Aspergillus thermomutatus
  misc_feature: 153
taccaaaccatgatgggtttccgccatctaggatggcagcaggcatgttaggcagcacggcagactacacatcattgagagaggcgtctagagaga

SEQ ID NO: 6293 - DNA, 96 bp, Aspergillus thermomutatus
  misc_feature: 153
tctaaactaactaacccttactctctcttttctttcctactttaaattccctttaacccttacttattctcttcttttctttactatctctctctc

SEQ ID NO: 6294 - DNA, 96 bp, Aspergillus thermomutatus
  misc_feature: 153
gttatttagtttattaagagagagggaaggaattgagaagagaataaggtgaataaggagagaggagaagagaggagatgagaagagaggagatga

SEQ ID NO: 6295 - DNA, 96 bp, Aspergillus thermomutatus
  misc_feature: 153
agagtgtttaaggattaaaagaaagagtagagtaagggataggttaagagaggtaaagaggggtaagtaaggaataggaggaggagtagagggata

SEQ ID NO: 6296 - DNA, 96 bp, Aspergillus thermomutatus
  misc_feature: 153
tagcacgtcgaatagcatgtaggatgcacatagaatagcacgcggaggcaggcagataggcccacagagaggtccgacatgaggtaggcagtgagg

SEQ ID NO: 6297 - DNA, 96 bp, Aspergillus thermomutatus
  misc_feature: 153
tactccctaccattctacctacctgtctgcctgcctctctatcttcctctctatctacctctctattcacctctctattcacctctctattcacct

SEQ ID NO: 6298 - DNA, 96 bp, Aspergillus thermomutatus
  misc_feature: 153
tacggtgccttactccctaccattctacctacctgtctgcctgcctctctatcttcctctctatctacctctctattcacctctctattcacctct

SEQ ID NO: 6299 - DNA, 96 bp, Aspergillus thermomutatus
  misc_feature: 153
ggtttaacatctaaattcgtatttaattatagatgtaattaaactagtccttacccttaaaagaaaggacaaggagacagggaaggacaaggcaac

SEQ ID NO: 6300 - DNA, 96 bp, Aspergillus thermomutatus
  misc_feature: 153
gtaaggattagtgattttagaaataaaggagtaaaaagtcgatgagagtagagaagatgagatgatataagggaaagagaagattaaagcgaagag

SEQ ID NO: 6301 - DNA, 96 bp, Aspergillus thermomutatus
  misc_feature: 153
ggtaaggagataggtagagagggacccaagtagcaggccataaggcaggccatgagacacacagagaggtgtacacaaggcaggcagaacagtagg

SEQ ID NO: 6302 - DNA, 96 bp, Aspergillus thermomutatus
  misc_feature: 153
gggttatttagtttattaagagagagggaaggaattgagaagagaataaggtgaataaggagagaggagaagagaggagatgagaagagaggagat

SEQ ID NO: 6303 - DNA, 96 bp, Aspergillus thermomutatus
  misc_feature: 153
ataggtagagagggacccaagtagcaggccataaggcaggccatgagacacacagagaggtgtacacaaggcaggcagaacagtaggcagaacggc

SEQ ID NO: 6304 - DNA, 96 bp, Aspergillus thermomutatus
  misc_feature: 153
gagtgtttaaggattaaaagaaagagtagagtaagggataggttaagagaggtaaagaggggtaagtaaggaataggaggaggagtagagggatag

SEQ ID NO: 6305 - DNA, 96 bp, Aspergillus thermomutatus
  misc_feature: 153
gagtagaagaaggagtaaagtaaatagtaaaagaaggagtagagagagagttaggagaaggagtagagtaagggttaggaggaggattagagggag

SEQ ID NO: 6306 - DNA, 96 bp, Aspergillus thermomutatus
  misc_feature: 153
atacggtgccttactccctaccattctacctacctgtctgcctgcctctctatcttcctctctatctacctctctattcacctctctattcacctc

SEQ ID NO: 6307 - DNA, 96 bp, Aspergillus thermomutatus
  misc_feature: 153
gaggatagggagagagaagggaagagaagaaagaaaggagataagatttaagaatgaagatagtaagaaaaaggagagagggagtaaaggggaggt

SEQ ID NO: 6308 - DNA, 96 bp, Aspergillus thermomutatus
  misc_feature: 153
aatcctcttctcatcttccctctctctcttaaattctttcttaaactattaattcctctctctttctcactccctcttcctcctttcttgcatttc

SEQ ID NO: 6309 - DNA, 96 bp, Aspergillus thermomutatus
  misc_feature: 153
aaagaagaggagaaattaaagaacaagaaagaatgagaagagagaaaagaacaagaatagaaaagaatgagaagggaacgaggtgagaaggtaaag

SEQ ID NO: 6310 - DNA, 96 bp, Aspergillus thermomutatus
  misc_feature: 153
cttcctctttcctctctctttccttcctctttccttcctccttacctcccctttattccctctctccttcctctttacttcctccttacctcccct

SEQ ID NO: 6311 - DNA, 96 bp, Aspergillus thermomutatus
  misc_feature: 153
ctctttaccttctcacctcgttcccttctcattcttttctattcttgttcttttctctcttctcattctttcttgttctttaatttctcctcttct

SEQ ID NO: 6312 - DNA, 96 bp, Aspergillus thermomutatus
  misc_feature: 153
ctctcttaatttctcctcttttctccttcttattctcttcttattttcctcttgttcttattctcttctctttctctttgattctccctcttctct

SEQ ID NO: 6313 - DNA, 96 bp, Aspergillus thermomutatus
  misc_feature: 153
aaaccatgatgggtttccgccatctaggatggcagcaggcatgttaggcagcacggcagactacacatcattgagagaggcgtctagagagacagg

SEQ ID NO: 6314 - DNA, 96 bp, Aspergillus thermomutatus
  misc_feature: 153
cctgtctacttactcactctcttaatttctcctcttttctccttcttattctcttcttattttcctcttgttcttattctcttctctttctctttg

SEQ ID NO: 6315 - DNA, 96 bp, Aspergillus thermomutatus
  misc_feature: 153
agaggatagggagagagaagggaagagaagaaagaaaggagataagatttaagaatgaagatagtaagaaaaaggagagagggagtaaaggggagg

SEQ ID NO: 6316 - DNA, 96 bp, Aspergillus thermomutatus
  misc_feature: 153
cactctcttaatttctcctcttttctccttcttattctcttcttattttcctcttgttcttattctcttctctttctctttgattctccctcttct

SEQ ID NO: 6317 - DNA, 96 bp, Aspergillus thermomutatus
  misc_feature: 153
caccacgatgacccaatgcatggtcatatgggaacagaaaaaacggcagaagcgatttcacgaaattactatttcccaaacatgagacgaaaggtg

SEQ ID NO: 6318 - DNA, 96 bp, Aspergillus thermomutatus
  misc_feature: 153
caccctaacttataatatatattaatacctactatgcctcactgcctacctcctggggttcctctatgcctactcttggtctgccttactgcctct

SEQ ID NO: 6319 - DNA, 96 bp, Aspergillus thermomutatus
  misc_feature: 153
actcactctcttaatttctcctcttttctccttcttattctcttcttattttcctcttgttcttattctcttctctttctctttgattctccctct

SEQ ID NO: 6320 - DNA, 96 bp, Aspergillus thermomutatus
  misc_feature: 152
tcgcacttcttgagcttcagcttgatgctagctttttgaagcttctccagaaccttgttgacatgttcaacatgttcttccttctctttcgagaaa

SEQ ID NO: 6321 - DNA, 96 bp, Aspergillus thermomutatus
  misc_feature: 152
aaaagaagaggagaaattaaagaacaagaaagaatgagaagagagaaaagaacaagaatagaaaagaatgagaagggaacgaggtgagaaggtaaa

SEQ ID NO: 6322 - DNA, 96 bp, Aspergillus thermomutatus
  misc_feature: 152
cacgatgacccaatgcatggtcatatgggaacagaaaaaacggcagaagcgatttcacgaaattactatttcccaaacatgagacgaaaggtgcaa

SEQ ID NO: 6323 - DNA, 96 bp, Aspergillus thermomutatus
  misc_feature: 152
ttatttactgcttcctactctctaaccatccctctatctcttctgctttccgtcctttctccttctaaactaactaacccttactctctcttttct

SEQ ID NO: 6324 - DNA, 96 bp, Aspergillus thermomutatus
  misc_feature: 152
ttagtttattaagagagagggaaggaattgagaagagaataaggtgaataaggagagaggagaagagaggagatgagaagagaggagatgagaaga

SEQ ID NO: 6325 - DNA, 96 bp, Aspergillus thermomutatus
  misc_feature: 152
ttagaggatagggagagagaagggaagagaagaaagaaaggagataagatttaagaatgaagatagtaagaaaaaggagagagggagtaaagggga

SEQ ID NO: 6326 - DNA, 96 bp, Aspergillus thermomutatus
  misc_feature: 152
tgtctgcctgtctgcctgtctgcctgtctctctacctcactgcctacctcatgtcggacctctctgtgggcctatctgcctgcctccgcgtgctat

SEQ ID NO: 6327 - DNA, 96 bp, Aspergillus thermomutatus
  misc_feature: 152
tgccaatgctttcgcattgatttgatggtagcagctaggtagtggcattgagtttgacctcgcaggcagagcaggccattcgagtgacatggtaat

SEQ ID NO: 6328 - DNA, 96 bp, Aspergillus thermomutatus
  misc_feature: 152
taaggattagtgattttagaaataaaggagtaaaaagtcgatgagagtagagaagatgagatgatataagggaaagagaagattaaagcgaagaga

SEQ ID NO: 6329 - DNA, 96 bp, Aspergillus thermomutatus
  misc_feature: 152
agtgtttaaggattaaaagaaagagtagagtaagggataggttaagagaggtaaagaggggtaagtaaggaataggaggaggagtagagggataga

SEQ ID NO: 6330 - DNA, 96 bp, Aspergillus thermomutatus
  misc_feature: 152
ctgtctacttactcactctcttaatttctcctcttttctccttcttattctcttcttattttcctcttgttcttattctcttctctttctctttga

SEQ ID NO: 6331 - DNA, 96 bp, Aspergillus thermomutatus
  misc_feature: 152
tagtttattaagagagagggaaggaattgagaagagaataaggtgaataaggagagaggagaagagaggagatgagaagagaggagatgagaagag

SEQ ID NO: 6332 - DNA, 96 bp, Aspergillus thermomutatus
  misc_feature: 152
tagaggatagggagagagaagggaagagaagaaagaaaggagataagatttaagaatgaagatagtaagaaaaaggagagagggagtaaaggggag

SEQ ID NO: 6333 - DNA, 96 bp, Aspergillus thermomutatus
  misc_feature: 152
aaaaaagaagaggagaaattaaagaacaagaaagaatgagaagagagaaaagaacaagaatagaaaagaatgagaagggaacgaggtgagaaggta

SEQ ID NO: 6334 - DNA, 96 bp, Aspergillus thermomutatus
  misc_feature: 152
taatcctccctctaatcctccctctaatcctccctctaatcctctttctaatcctccctctaatcctctttctatccctccctctaatcctcctcc

SEQ ID NO: 6335 - DNA, 96 bp, Aspergillus thermomutatus
  misc_feature: 152
taacatgcctgctgccatcctagatggcggaaacccatcatggtttggtattaggtgatccaccacctcctgtgcctcccaatcagcatcacaccc

SEQ ID NO: 6336 - DNA, 96 bp, Aspergillus thermomutatus
  misc_feature: 152
taaatcctcttctcatcttccctctctctcttaaattctttcttaaactattaattcctctctctttctcactccctcttcctcctttcttgcatt

SEQ ID NO: 6337 - DNA, 96 bp, Aspergillus thermomutatus
  misc_feature: 152
gtctgcctgtctgcctgtctgcctgtctctctacctcactgcctacctcatgtcggacctctctgtgggcctatctgcctgcctccgcgtgctatt

SEQ ID NO: 6338 - DNA, 96 bp, Aspergillus thermomutatus
  misc_feature: 152
accaaaccatgatgggtttccgccatctaggatggcagcaggcatgttaggcagcacggcagactacacatcattgagagaggcgtctagagagac

SEQ ID NO: 6339 - DNA, 96 bp, Aspergillus thermomutatus
  misc_feature: 152
ctaacatgcctgctgccatcctagatggcggaaacccatcatggtttggtattaggtgatccaccacctcctgtgcctcccaatcagcatcacacc

SEQ ID NO: 6340 - DNA, 96 bp, Aspergillus thermomutatus
  misc_feature: 152
aaatattcgaagtgaccatatttcgttctgaatgccgttttccattcttcgccttctgcgattcgaatgtggttatatgcgtccgtgatgtctagc

SEQ ID NO: 6341 - DNA, 96 bp, Aspergillus thermomutatus
  misc_feature: 152
catgcctgctgccatcctagatggcggaaacccatcatggtttggtattaggtgatccaccacctcctgtgcctcccaatcagcatcacacccatc

SEQ ID NO: 6342 - DNA, 96 bp, Aspergillus thermomutatus
  misc_feature: 152
gataggtagagagggacccaagtagcaggccataaggcaggccatgagacacacagagaggtgtacacaaggcaggcagaacagtaggcagaacgg

SEQ ID NO: 6343 - DNA, 96 bp, Aspergillus thermomutatus
  misc_feature: 152
gagaggtaaggagataggtagagagggacccaagtagcaggccataaggcaggccatgagacacacagagaggtgtacacaaggcaggcagaacag

SEQ ID NO: 6344 - DNA, 96 bp, Aspergillus thermomutatus
  misc_feature: 152
actctcttaatttctcctcttttctccttcttattctcttcttattttcctcttgttcttattctcttctctttctctttgattctccctcttctc

SEQ ID NO: 6345 - DNA, 96 bp, Aspergillus thermomutatus
  misc_feature: 152
actctctaaccatccctctatctcttctgctttccgtcctttctccttctaaactaactaacccttactctctcttttctttcctactttaaattc

SEQ ID NO: 6346 - DNA, 96 bp, Aspergillus thermomutatus
  misc_feature: 152
gaatgaagatagtaagaaaaaggagagagggagtaaaggggaggtaaggaggaagtaaagaggaaggagagagggaataaaggggaggtaaggagg

SEQ ID NO: 6347 - DNA, 96 bp, Aspergillus thermomutatus
  misc_feature: 152
cttatttactgcttcctactctctaaccatccctctatctcttctgctttccgtcctttctccttctaaactaactaacccttactctctcttttc

SEQ ID NO: 6348 - DNA, 96 bp, Aspergillus thermomutatus
  misc_feature: 152
aagaaggatagtaagggatagtgtaagggatagggttaaaaaagaggataagaaaagaaagaagaaaaggaaaagagagagagagaagaaaaagag

SEQ ID NO: 6349 - DNA, 96 bp, Aspergillus thermomutatus
  misc_feature: 152
aaggattagtgattttagaaataaaggagtaaaaagtcgatgagagtagagaagatgagatgatataagggaaagagaagattaaagcgaagagag

SEQ ID NO: 6350 - DNA, 96 bp, Aspergillus thermomutatus
  misc_feature: 152
caaatattcgaagtgaccatatttcgttctgaatgccgttttccattcttcgccttctgcgattcgaatgtggttatatgcgtccgtgatgtctag

SEQ ID NO: 6351 - DNA, 96 bp, Aspergillus thermomutatus
  misc_feature: 152
cacgtcgaatagcatgtaggatgcacatagaatagcacgcggaggcaggcagataggcccacagagaggtccgacatgaggtaggcagtgaggtag

SEQ ID NO: 6352 - DNA, 96 bp, Aspergillus thermomutatus
  misc_feature: 152
acaccacgatgacccaatgcatggtcatatgggaacagaaaaaacggcagaagcgatttcacgaaattactatttcccaaacatgagacgaaaggt

SEQ ID NO: 6353 - DNA, 96 bp, Aspergillus thermomutatus
  misc_feature: 152
aaatcctcttctcatcttccctctctctcttaaattctttcttaaactattaattcctctctctttctcactccctcttcctcctttcttgcattt

SEQ ID NO: 6354 - DNA, 96 bp, Aspergillus thermomutatus
  misc_feature: 151
ttatcgtgaaaacagaccacaagaatctcacgttcttcacgaccacgaaagaattgacacgacgacaagccagatgggctgagacattgtcacagc

SEQ ID NO: 6355 - DNA, 96 bp, Aspergillus thermomutatus
  misc_feature: 151
cgttatcgtgaaaacagaccacaagaatctcacgttcttcacgaccacgaaagaattgacacgacgacaagccagatgggctgagacattgtcaca

SEQ ID NO: 6356 - DNA, 96 bp, Aspergillus thermomutatus
  misc_feature: 151
ccaaaccatgatgggtttccgccatctaggatggcagcaggcatgttaggcagcacggcagactacacatcattgagagaggcgtctagagagaca

SEQ ID NO: 6357 - DNA, 96 bp, Aspergillus thermomutatus
  misc_feature: 151
tgggggtgcctcacgcggtgcattgctccatacctcctatggtgcctctctacctatctccctacctcttcacctacctcttcacctacctcttca

SEQ ID NO: 6358 - DNA, 96 bp, Aspergillus thermomutatus
  misc_feature: 151
agtaaggattagtgattttagaaataaaggagtaaaaagtcgatgagagtagagaagatgagatgatataagggaaagagaagattaaagcgaaga

SEQ ID NO: 6359 - DNA, 96 bp, Aspergillus thermomutatus
  misc_feature: 151
agtttattaagagagagggaaggaattgagaagagaataaggtgaataaggagagaggagaagagaggagatgagaagagaggagatgagaagaga

SEQ ID NO: 6360 - DNA, 96 bp, Aspergillus thermomutatus
  misc_feature: 151
agaaaagaagggatagaaaagaaagagaggataaaaagtgaagtaaagagtagaagaaggagtaaagtaaatagtaaaagaaggagtagagagaga

SEQ ID NO: 6361 - DNA, 96 bp, Aspergillus thermomutatus
  misc_feature: 151
taagggttatttagtttattaagagagagggaaggaattgagaagagaataaggtgaataaggagagaggagaagagaggagatgagaagagagga

SEQ ID NO: 6362 - DNA, 96 bp, Aspergillus thermomutatus
  misc_feature: 151
aagggatagaaaagaaagagaggataaaaagtgaagtaaagagtagaagaaggagtaaagtaaatagtaaaagaaggagtagagagagagttagga

SEQ ID NO: 6363 - DNA, 96 bp, Aspergillus thermomutatus
  misc_feature: 151
tccctaccattctacctacctgtctgcctgcctctctatcttcctctctatctacctctctattcacctctctattcacctctctattcacctctc

SEQ ID NO: 6364 - DNA, 96 bp, Aspergillus thermomutatus
  misc_feature: 151
tatacggtgccttactccctaccattctacctacctgtctgcctgcctctctatcttcctctctatctacctctctattcacctctctattcacct

SEQ ID NO: 6365 - DNA, 96 bp, Aspergillus thermomutatus
  misc_feature: 151
tataagagtaaggattagtgattttagaaataaaggagtaaaaagtcgatgagagtagagaagatgagatgatataagggaaagagaagattaaag

SEQ ID NO: 6366 - DNA, 96 bp, Aspergillus thermomutatus
  misc_feature: 151
taatcctccctctaatcctccctctaatcctctttctaatcctccctctaatcctctttctatccctccctctaatcctcctcctaacccttactc

SEQ ID NO: 6367 - DNA, 96 bp, Aspergillus thermomutatus
  misc_feature: 151
gtccagccttataaggtgtttcgaggacgaaacgctaagagagggggaggtgatgttacgacaccaacactactaggcggacctgacaggcagaac

SEQ ID NO: 6368 - DNA, 96 bp, Aspergillus thermomutatus
  misc_feature: 151
gcatatctgggggtgcctcacgcggtgcattgctccatacctcctatggtgcctctctacctatctccctacctcttcacctacctcttcacctac

SEQ ID NO: 6369 - DNA, 96 bp, Aspergillus thermomutatus
  misc_feature: 151
ggtttatcattgaagctggcaagggcgtacgcatggaccccgacaaggtaaaagctatactagaatggcagacccctacatccactcgaggcgtac

SEQ ID NO: 6370 - DNA, 96 bp, Aspergillus thermomutatus
  misc_feature: 151
gcagggttaaggcaggcagagaggtaaggagataggtagagagggacccaagtagcaggccataaggcaggccatgagacacacagagaggtgtac

SEQ ID NO: 6371 - DNA, 96 bp, Aspergillus thermomutatus
  misc_feature: 151
ggattagtgattttagaaataaaggagtaaaaagtcgatgagagtagagaagatgagatgatataagggaaagagaagattaaagcgaagagagtg

SEQ ID NO: 6372 - DNA, 96 bp, Aspergillus thermomutatus
  misc_feature: 151
ctaacttataatatatattaatacctactatgcctcactgcctacctcctggggttcctctatgcctactcttggtctgccttactgcctctctcc

SEQ ID NO: 6373 - DNA, 96 bp, Aspergillus thermomutatus
  misc_feature: 151
gagtaaggattagtgattttagaaataaaggagtaaaaagtcgatgagagtagagaagatgagatgatataagggaaagagaagattaaagcgaag

SEQ ID NO: 6374 - DNA, 96 bp, Aspergillus thermomutatus
  misc_feature: 151
cctaacttataatatatattaatacctactatgcctcactgcctacctcctggggttcctctatgcctactcttggtctgccttactgcctctctc

SEQ ID NO: 6375 - DNA, 96 bp, Aspergillus thermomutatus
  misc_feature: 151
aaacaccacgatgacccaatgcatggtcatatgggaacagaaaaaacggcagaagcgatttcacgaaattactatttcccaaacatgagacgaaag

SEQ ID NO: 6376 - DNA, 96 bp, Aspergillus thermomutatus
  misc_feature: 151
ctttccttcctctttcctctctctttccttcctctttccttcctccttacctcccctttattccctctctccttcctctttacttcctccttacct

SEQ ID NO: 6377 - DNA, 96 bp, Aspergillus thermomutatus
  misc_feature: 151
agaataagaacaagaggaaaataagaagagaataagaaggagaaaagaggagaaattaagagagtgagtaagtagacaggtaggaagtttagtaag

SEQ ID NO: 6378 - DNA, 96 bp, Aspergillus thermomutatus
  misc_feature: 151
ctgtctgcctgtctgcctgtctctctacctcactgcctacctcatgtcggacctctctgtgggcctatctgcctgcctccgcgtgctattctatgt

SEQ ID NO: 6379 - DNA, 96 bp, Aspergillus thermomutatus
  misc_feature: 151
ataccaaaccatgatgggtttccgccatctaggatggcagcaggcatgttaggcagcacggcagactacacatcattgagagaggcgtctagagag

SEQ ID NO: 6380 - DNA, 96 bp, Aspergillus thermomutatus
  misc_feature: 151
aacaccacgatgacccaatgcatggtcatatgggaacagaaaaaacggcagaagcgatttcacgaaattactatttcccaaacatgagacgaaagg

SEQ ID NO: 6381 - DNA, 96 bp, Aspergillus thermomutatus
  misc_feature: 151
aaggcagggttaaggcaggcagagaggtaaggagataggtagagagggacccaagtagcaggccataaggcaggccatgagacacacagagaggtg

SEQ ID NO: 6382 - DNA, 96 bp, Aspergillus thermomutatus
  misc_feature: 151
agaggtaaggagataggtagagagggacccaagtagcaggccataaggcaggccatgagacacacagagaggtgtacacaaggcaggcagaacagt

SEQ ID NO: 6383 - DNA, 96 bp, Aspergillus thermomutatus
  misc_feature: 151
accaaatattcgaagtgaccatatttcgttctgaatgccgttttccattcttcgccttctgcgattcgaatgtggttatatgcgtccgtgatgtct

SEQ ID NO: 6384 - DNA, 96 bp, Aspergillus thermomutatus
  misc_feature: 150
ttctacctacctgtctgcctgcctctctatcttcctctctatctacctctctattcacctctctattcacctctctattcacctctctatctacct

SEQ ID NO: 6385 - DNA, 96 bp, Aspergillus thermomutatus
  misc_feature: 150
tcctccctctaatcctccctctaatcctccctctaatcctctttctaatcctccctctaatcctctttctatccctccctctaatcctcctcctaa

SEQ ID NO: 6386 - DNA, 96 bp, Aspergillus thermomutatus
  misc_feature: 150
aaggtttaacatctaaattcgtatttaattatagatgtaattaaactagtccttacccttaaaagaaaggacaaggagacagggaaggacaaggca

SEQ ID NO: 6387 - DNA, 96 bp, Aspergillus thermomutatus
  misc_feature: 150
gccgtgctgcctaacatgcctgctgccatcctagatggcggaaacccatcatggtttggtattaggtgatccaccacctcctgtgcctcccaatca

SEQ ID NO: 6388 - DNA, 96 bp, Aspergillus thermomutatus
  misc_feature: 150
atcgcgaaacaccacgatgacccaatgcatggtcatatgggaacagaaaaaacggcagaagcgatttcacgaaattactatttcccaaacatgaga

SEQ ID NO: 6389 - DNA, 96 bp, Aspergillus thermomutatus
  misc_feature: 150
tccagccttataaggtgtttcgaggacgaaacgctaagagagggggaggtgatgttacgacaccaacactactaggcggacctgacaggcagaacc

SEQ ID NO: 6390 - DNA, 96 bp, Aspergillus thermomutatus
  misc_feature: 150
tcatgaggcatatttggaaagaatagataaatttccccctaaaccttcacctaatagagatattagtatacctaatttactaaataagcctaaatt

SEQ ID NO: 6391 - DNA, 96 bp, Aspergillus thermomutatus
  misc_feature: 150
gattagtgattttagaaataaaggagtaaaaagtcgatgagagtagagaagatgagatgatataagggaaagagaagattaaagcgaagagagtga

SEQ ID NO: 6392 - DNA, 96 bp, Aspergillus thermomutatus
  misc_feature: 150
ggcatatctgggggtgcctcacgcggtgcattgctccatacctcctatggtgcctctctacctatctccctacctcttcacctacctcttcaccta

SEQ ID NO: 6393 - DNA, 96 bp, Aspergillus thermomutatus
  misc_feature: 150
taggatgcacatagaatagcacgcggaggcaggcagataggcccacagagaggtccgacatgaggtaggcagtgaggtagagagacaggcagacag

SEQ ID NO: 6394 - DNA, 96 bp, Aspergillus thermomutatus
  misc_feature: 150
atcctccctctaatcctccctctaatcctccctctaatcctctttctaatcctccctctaatcctctttctatccctccctctaatcctcctccta

SEQ ID NO: 6395 - DNA, 96 bp, Aspergillus thermomutatus
  misc_feature: 150
cctaccattctacctacctgtctgcctgcctctctatcttcctctctatctacctctctattcacctctctattcacctctctattcacctctcta

SEQ ID NO: 6396 - DNA, 96 bp, Aspergillus thermomutatus
  misc_feature: 150
tacctgtctacttactcactctcttaatttctcctcttttctccttcttattctcttcttattttcctcttgttcttattctcttctctttctctt

SEQ ID NO: 6397 - DNA, 96 bp, Aspergillus thermomutatus
  misc_feature: 150
cctccctctaatcctccctctaatcctccctctaatcctctttctaatcctccctctaatcctctttctatccctccctctaatcctcctcctaac

SEQ ID NO: 6398 - DNA, 96 bp, Aspergillus thermomutatus
  misc_feature: 150
gaatagcatgtaggatgcacatagaatagcacgcggaggcaggcagataggcccacagagaggtccgacatgaggtaggcagtgaggtagagagac

SEQ ID NO: 6399 - DNA, 96 bp, Aspergillus thermomutatus
  misc_feature: 150
gtaagggttatttagtttattaagagagagggaaggaattgagaagagaataaggtgaataaggagagaggagaagagaggagatgagaagagagg

SEQ ID NO: 6400 - DNA, 96 bp, Aspergillus thermomutatus
  misc_feature: 150
gtaaaaagtcgatgagagtagagaagatgagatgatataagggaaagagaagattaaagcgaagagagtgaaggaagggatgttgatggacagtgt

SEQ ID NO: 6401 - DNA, 96 bp, Aspergillus thermomutatus
  misc_feature: 150
cgtgctgcctaacatgcctgctgccatcctagatggcggaaacccatcatggtttggtattaggtgatccaccacctcctgtgcctcccaatcagc

SEQ ID NO: 6402 - DNA, 96 bp, Aspergillus thermomutatus
  misc_feature: 150
gcctgtctgcctgtctgcctgtctgcctgtctctctacctcactgcctacctcatgtcggacctctctgtgggcctatctgcctgcctccgcgtgc

SEQ ID NO: 6403 - DNA, 96 bp, Aspergillus thermomutatus
  misc_feature: 150
ctgggggtgcctcacgcggtgcattgctccatacctcctatggtgcctctctacctatctccctacctcttcacctacctcttcacctacctcttc

SEQ ID NO: 6404 - DNA, 96 bp, Aspergillus thermomutatus
  misc_feature: 150
ctctactccttctcctaactctctctctactccttcttttactatttactttactccttcttctactctttacttcactttttatcctctctttct

SEQ ID NO: 6405 - DNA, 96 bp, Aspergillus thermomutatus
  misc_feature: 150
aagggttatttagtttattaagagagagggaaggaattgagaagagaataaggtgaataaggagagaggagaagagaggagatgagaagagaggag

SEQ ID NO: 6406 - DNA, 96 bp, Aspergillus thermomutatus
  misc_feature: 150
ctaatcctccctctaatcctccctctaatcctctttctaatcctccctctaatcctctttctatccctccctctaatcctcctcctaacccttact

SEQ ID NO: 6407 - DNA, 96 bp, Aspergillus thermomutatus
  misc_feature: 150
cgcgaaacaccacgatgacccaatgcatggtcatatgggaacagaaaaaacggcagaagcgatttcacgaaattactatttcccaaacatgagacg

SEQ ID NO: 6408 - DNA, 96 bp, Aspergillus thermomutatus
  misc_feature: 150
aaagagtagaagaaggagtaaagtaaatagtaaaagaaggagtagagagagagttaggagaaggagtagagtaagggttaggaggaggattagagg

SEQ ID NO: 6409 - DNA, 96 bp, Aspergillus thermomutatus
  misc_feature: 150
atttagaaatagaagattaaaggtaaagaggaagggatagagagaggattagagtaagggttggaatgaggattaggaagaggaagaggaataggg

SEQ ID NO: 6410 - DNA, 96 bp, Aspergillus thermomutatus
  misc_feature: 150
acttatttactgcttcctactctctaaccatccctctatctcttctgctttccgtcctttctccttctaaactaactaacccttactctctctttt

SEQ ID NO: 6411 - DNA, 96 bp, Aspergillus thermomutatus
  misc_feature: 150
aagagaataagaacaagaggaaaataagaagagaataagaaggagaaaagaggagaaattaagagagtgagtaagtagacaggtaggaagtttagt

SEQ ID NO: 6412 - DNA, 96 bp, Aspergillus thermomutatus
  misc_feature: 150
aaaaaaagaagaggagaaattaaagaacaagaaagaatgagaagagagaaaagaacaagaatagaaaagaatgagaagggaacgaggtgagaaggt

SEQ ID NO: 6413 - DNA, 96 bp, Aspergillus thermomutatus
  misc_feature: 149
gaaacaccacgatgacccaatgcatggtcatatgggaacagaaaaaacggcagaagcgatttcacgaaattactatttcccaaacatgagacgaaa

SEQ ID NO: 6414 - DNA, 96 bp, Aspergillus thermomutatus
  misc_feature: 149
ccttattcttcctttctgatccattattccttcctttttccttttgaaatccttctatctttctttccaccttccttctcttctttctctcttaaa

SEQ ID NO: 6415 - DNA, 96 bp, Aspergillus thermomutatus
  misc_feature: 149
cccttattcttcctttctgatccattattccttcctttttccttttgaaatccttctatctttctttccaccttccttctcttctttctctcttaa

SEQ ID NO: 6416 - DNA, 96 bp, Aspergillus thermomutatus
  misc_feature: 149
gcctaacatgcctgctgccatcctagatggcggaaacccatcatggtttggtattaggtgatccaccacctcctgtgcctcccaatcagcatcaca

SEQ ID NO: 6417 - DNA, 96 bp, Aspergillus thermomutatus
  misc_feature: 149
gtaggatgcacatagaatagcacgcggaggcaggcagataggcccacagagaggtccgacatgaggtaggcagtgaggtagagagacaggcagaca

SEQ ID NO: 6418 - DNA, 96 bp, Aspergillus thermomutatus
  misc_feature: 149
aatagcatgtaggatgcacatagaatagcacgcggaggcaggcagataggcccacagagaggtccgacatgaggtaggcagtgaggtagagagaca

SEQ ID NO: 6419 - DNA, 96 bp, Aspergillus thermomutatus
  misc_feature: 149
tgtaggatgcacatagaatagcacgcggaggcaggcagataggcccacagagaggtccgacatgaggtaggcagtgaggtagagagacaggcagac

SEQ ID NO: 6420 - DNA, 96 bp, Aspergillus thermomutatus
  misc_feature: 149
ccagccttataaggtgtttcgaggacgaaacgctaagagagggggaggtgatgttacgacaccaacactactaggcggacctgacaggcagaacca

SEQ ID NO: 6421 - DNA, 96 bp, Aspergillus thermomutatus
  misc_feature: 149
ccatgtaaggcagggttaaggcaggcagagaggtaaggagataggtagagagggacccaagtagcaggccataaggcaggccatgagacacacaga

SEQ ID NO: 6422 - DNA, 96 bp, Aspergillus thermomutatus
  misc_feature: 149
atgtaggatgcacatagaatagcacgcggaggcaggcagataggcccacagagaggtccgacatgaggtaggcagtgaggtagagagacaggcaga

SEQ ID NO: 6423 - DNA, 96 bp, Aspergillus thermomutatus
  misc_feature: 149
ctaataccaaaccatgatgggtttccgccatctaggatggcagcaggcatgttaggcagcacggcagactacacatcattgagagaggcgtctaga

SEQ ID NO: 6424 - DNA, 96 bp, Aspergillus thermomutatus
  misc_feature: 149
tctacctacctgtctgcctgcctctctatcttcctctctatctacctctctattcacctctctattcacctctctattcacctctctatctacctc

SEQ ID NO: 6425 - DNA, 96 bp, Aspergillus thermomutatus
  misc_feature: 149
gcgaaacaccacgatgacccaatgcatggtcatatgggaacagaaaaaacggcagaagcgatttcacgaaattactatttcccaaacatgagacga

SEQ ID NO: 6426 - DNA, 96 bp, Aspergillus thermomutatus
  misc_feature: 149
tattcttcctttctgatccattattccttcctttttccttttgaaatccttctatctttctttccaccttccttctcttctttctctcttaaatct

SEQ ID NO: 6427 - DNA, 96 bp, Aspergillus thermomutatus
  misc_feature: 149
agaacaagaggaaaataagaagagaataagaaggagaaaagaggagaaattaagagagtgagtaagtagacaggtaggaagtttagtaaggtagta

SEQ ID NO: 6428 - DNA, 96 bp, Aspergillus thermomutatus
  misc_feature: 149
gcacgtcgaatagcatgtaggatgcacatagaatagcacgcggaggcaggcagataggcccacagagaggtccgacatgaggtaggcagtgaggta

SEQ ID NO: 6429 - DNA, 96 bp, Aspergillus thermomutatus
  misc_feature: 149
taataccaaaccatgatgggtttccgccatctaggatggcagcaggcatgttaggcagcacggcagactacacatcattgagagaggcgtctagag

SEQ ID NO: 6430 - DNA, 96 bp, Aspergillus thermomutatus
  misc_feature: 149
taacttataatatatattaatacctactatgcctcactgcctacctcctggggttcctctatgcctactcttggtctgccttactgcctctctccc

SEQ ID NO: 6431 - DNA, 96 bp, Aspergillus thermomutatus
  misc_feature: 149
taaaaagtcgatgagagtagagaagatgagatgatataagggaaagagaagattaaagcgaagagagtgaaggaagggatgttgatggacagtgtg

SEQ ID NO: 6432 - DNA, 96 bp, Aspergillus thermomutatus
  misc_feature: 149
gcttcctactctctaaccatccctctatctcttctgctttccgtcctttctccttctaaactaactaacccttactctctcttttctttcctactt

SEQ ID NO: 6433 - DNA, 96 bp, Aspergillus thermomutatus
  misc_feature: 149
gatttagaaatagaagattaaaggtaaagaggaagggatagagagaggattagagtaagggttggaatgaggattaggaagaggaagaggaatagg

SEQ ID NO: 6434 - DNA, 96 bp, Aspergillus thermomutatus
  misc_feature: 149
actccctaccattctacctacctgtctgcctgcctctctatcttcctctctatctacctctctattcacctctctattcacctctctattcacctc

SEQ ID NO: 6435 - DNA, 96 bp, Aspergillus thermomutatus
  misc_feature: 149
cttggtctgccttactgcctctctccctgtcttacatggtgccttcctccctaccttatattatacattcttcgctacctcacgcggtgcatctct

SEQ ID NO: 6436 - DNA, 96 bp, Aspergillus thermomutatus
  misc_feature: 149
cttattcttcctttctgatccattattccttcctttttccttttgaaatccttctatctttctttccaccttccttctcttctttctctcttaaat

SEQ ID NO: 6437 - DNA, 96 bp, Aspergillus thermomutatus
  misc_feature: 149
ctctcatccttactctcatccttactctcatccttatccctaatccttatactaaccttactcctattcttcttccaactcttatcattttccttt

SEQ ID NO: 6438 - DNA, 96 bp, Aspergillus thermomutatus
  misc_feature: 149
ctccctaccattctacctacctgtctgcctgcctctctatcttcctctctatctacctctctattcacctctctattcacctctctattcacctct

SEQ ID NO: 6439 - DNA, 96 bp, Aspergillus thermomutatus
  misc_feature: 149
cctgtctgcctgtctctctacctcactgcctacctcatgtcggacctctctgtgggcctatctgcctgcctccgcgtgctattctatgtgcatcct

SEQ ID NO: 6440 - DNA, 96 bp, Aspergillus thermomutatus
  misc_feature: 149
agtagaagaaggagtaaagtaaatagtaaaagaaggagtagagagagagttaggagaaggagtagagtaagggttaggaggaggattagagggagg

SEQ ID NO: 6441 - DNA, 96 bp, Aspergillus thermomutatus
  misc_feature: 149
ccctaccattctacctacctgtctgcctgcctctctatcttcctctctatctacctctctattcacctctctattcacctctctattcacctctct

SEQ ID NO: 6442 - DNA, 96 bp, Aspergillus thermomutatus
  misc_feature: 149
acatgcctgctgccatcctagatggcggaaacccatcatggtttggtattaggtgatccaccacctcctgtgcctcccaatcagcatcacacccat

SEQ ID NO: 6443 - DNA, 96 bp, Aspergillus thermomutatus
  misc_feature: 149
atctgggggtgcctcacgcggtgcattgctccatacctcctatggtgcctctctacctatctccctacctcttcacctacctcttcacctacctct

SEQ ID NO: 6444 - DNA, 96 bp, Aspergillus thermomutatus
  misc_feature: 149
aaaagtcgatgagagtagagaagatgagatgatataagggaaagagaagattaaagcgaagagagtgaaggaagggatgttgatggacagtgtgat

SEQ ID NO: 6445 - DNA, 96 bp, Aspergillus thermomutatus
  misc_feature: 149
aatcctccctctaatcctccctctaatcctccctctaatcctctttctaatcctccctctaatcctctttctatccctccctctaatcctcctcct

SEQ ID NO: 6446 - DNA, 96 bp, Aspergillus thermomutatus
  misc_feature: 149
aatattcgaagtgaccatatttcgttctgaatgccgttttccattcttcgccttctgcgattcgaatgtggttatatgcgtccgtgatgtctagct

SEQ ID NO: 6447 - DNA, 96 bp, Aspergillus thermomutatus
  misc_feature: 149
agcacgtcgaatagcatgtaggatgcacatagaatagcacgcggaggcaggcagataggcccacagagaggtccgacatgaggtaggcagtgaggt

SEQ ID NO: 6448 - DNA, 96 bp, Aspergillus thermomutatus
  misc_feature: 149
accattctacctacctgtctgcctgcctctctatcttcctctctatctacctctctattcacctctctattcacctctctattcacctctctatct

SEQ ID NO: 6449 - DNA, 96 bp, Aspergillus thermomutatus
  misc_feature: 149
agagaagagaataagaacaagaggaaaataagaagagaataagaaggagaaaagaggagaaattaagagagtgagtaagtagacaggtaggaagtt

SEQ ID NO: 6450 - DNA, 96 bp, Aspergillus thermomutatus
  misc_feature: 149
aagagaagagaataagaacaagaggaaaataagaagagaataagaaggagaaaagaggagaaattaagagagtgagtaagtagacaggtaggaagt

SEQ ID NO: 6451 - DNA, 96 bp, Aspergillus thermomutatus
  misc_feature: 149
acctgtctacttactcactctcttaatttctcctcttttctccttcttattctcttcttattttcctcttgttcttattctcttctctttctcttt

SEQ ID NO: 6452 - DNA, 96 bp, Aspergillus thermomutatus
  misc_feature: 148
tttagaaatagaagattaaaggtaaagaggaagggatagagagaggattagagtaagggttggaatgaggattaggaagaggaagaggaataggga

SEQ ID NO: 6453 - DNA, 96 bp, Aspergillus thermomutatus
  misc_feature: 148
caataaggtttaacatctaaattcgtatttaattatagatgtaattaaactagtccttacccttaaaagaaaggacaaggagacagggaaggacaa

SEQ ID NO: 6454 - DNA, 96 bp, Aspergillus thermomutatus
  misc_feature: 148
ttggtctgccttactgcctctctccctgtcttacatggtgccttcctccctaccttatattatacattcttcgctacctcacgcggtgcatctctg

SEQ ID NO: 6455 - DNA, 96 bp, Aspergillus thermomutatus
  misc_feature: 148
cgaaacaccacgatgacccaatgcatggtcatatgggaacagaaaaaacggcagaagcgatttcacgaaattactatttcccaaacatgagacgaa

SEQ ID NO: 6456 - DNA, 96 bp, Aspergillus thermomutatus
  misc_feature: 148
taagaaggatagtaagggatagtgtaagggatagggttaaaaaagaggataagaaaagaaagaagaaaaggaaaagagagagagagaagaaaaaga

SEQ ID NO: 6457 - DNA, 96 bp, Aspergillus thermomutatus
  misc_feature: 148
tctgggggtgcctcacgcggtgcattgctccatacctcctatggtgcctctctacctatctccctacctcttcacctacctcttcacctacctctt

SEQ ID NO: 6458 - DNA, 96 bp, Aspergillus thermomutatus
  misc_feature: 148
agggttatttagtttattaagagagagggaaggaattgagaagagaataaggtgaataaggagagaggagaagagaggagatgagaagagaggaga

SEQ ID NO: 6459 - DNA, 96 bp, Aspergillus thermomutatus
  misc_feature: 148
aaaaagtcgatgagagtagagaagatgagatgatataagggaaagagaagattaaagcgaagagagtgaaggaagggatgttgatggacagtgtga

SEQ ID NO: 6460 - DNA, 96 bp, Aspergillus thermomutatus
  misc_feature: 148
aaagtcgatgagagtagagaagatgagatgatataagggaaagagaagattaaagcgaagagagtgaaggaagggatgttgatggacagtgtgata

SEQ ID NO: 6461 - DNA, 96 bp, Aspergillus thermomutatus
  misc_feature: 148
attcttcctttctgatccattattccttcctttttccttttgaaatccttctatctttctttccaccttccttctcttctttctctcttaaatcta

SEQ ID NO: 6462 - DNA, 96 bp, Aspergillus thermomutatus
  misc_feature: 148
tacttatttactgcttcctactctctaaccatccctctatctcttctgctttccgtcctttctccttctaaactaactaacccttactctctcttt

SEQ ID NO: 6463 - DNA, 96 bp, Aspergillus thermomutatus
  misc_feature: 148
aggatagggagagagaagggaagagaagaaagaaaggagataagatttaagaatgaagatagtaagaaaaaggagagagggagtaaaggggaggta

SEQ ID NO: 6464 - DNA, 96 bp, Aspergillus thermomutatus
  misc_feature: 148
taccattctacctacctgtctgcctgcctctctatcttcctctctatctacctctctattcacctctctattcacctctctattcacctctctatc

SEQ ID NO: 6465 - DNA, 96 bp, Aspergillus thermomutatus
  misc_feature: 148
catatctgggggtgcctcacgcggtgcattgctccatacctcctatggtgcctctctacctatctccctacctcttcacctacctcttcacctacc

SEQ ID NO: 6466 - DNA, 96 bp, Aspergillus thermomutatus
  misc_feature: 148
ggtaagggttatttagtttattaagagagagggaaggaattgagaagagaataaggtgaataaggagagaggagaagagaggagatgagaagagag

SEQ ID NO: 6467 - DNA, 96 bp, Aspergillus thermomutatus
  misc_feature: 148
agcatgtaggatgcacatagaatagcacgcggaggcaggcagataggcccacagagaggtccgacatgaggtaggcagtgaggtagagagacaggc

SEQ ID NO: 6468 - DNA, 96 bp, Aspergillus thermomutatus
  misc_feature: 148
gagtaaaaagtcgatgagagtagagaagatgagatgatataagggaaagagaagattaaagcgaagagagtgaaggaagggatgttgatggacagt

SEQ ID NO: 6469 - DNA, 96 bp, Aspergillus thermomutatus
  misc_feature: 148
gagaagagaataagaacaagaggaaaataagaagagaataagaaggagaaaagaggagaaattaagagagtgagtaagtagacaggtaggaagttt

SEQ ID NO: 6470 - DNA, 96 bp, Aspergillus thermomutatus
  misc_feature: 148
aatatgaggttgaatggatactggatgagcgtgagaaacgcgttggcagaggccgccgcaaggagtatctcgtcaaatggacaggttacgatcgtc

SEQ ID NO: 6471 - DNA, 96 bp, Aspergillus thermomutatus
  misc_feature: 148
cacctctctattcacctctctattcacctctctatctacctctctatctccctaccccactgtctgcctgtctgcctgtctgcctgtctgcctgtc

SEQ ID NO: 6472 - DNA, 96 bp, Aspergillus thermomutatus
  misc_feature: 148
gaagagaataagaacaagaggaaaataagaagagaataagaaggagaaaagaggagaaattaagagagtgagtaagtagacaggtaggaagtttag

SEQ ID NO: 6473 - DNA, 96 bp, Aspergillus thermomutatus
  misc_feature: 148
aataaggtttaacatctaaattcgtatttaattatagatgtaattaaactagtccttacccttaaaagaaaggacaaggagacagggaaggacaag

SEQ ID NO: 6474 - DNA, 96 bp, Aspergillus thermomutatus
  misc_feature: 148
cttcctactctctaaccatccctctatctcttctgctttccgtcctttctccttctaaactaactaacccttactctctcttttctttcctacttt

SEQ ID NO: 6475 - DNA, 96 bp, Aspergillus thermomutatus
  misc_feature: 148
atagcatgtaggatgcacatagaatagcacgcggaggcaggcagataggcccacagagaggtccgacatgaggtaggcagtgaggtagagagacag

SEQ ID NO: 6476 - DNA, 96 bp, Aspergillus thermomutatus
  misc_feature: 148
ctgcctgtctgcctgtctgcctgtctgcctgtctctctacctcactgcctacctcatgtcggacctctctgtgggcctatctgcctgcctccgcgt

SEQ ID NO: 6477 - DNA, 96 bp, Aspergillus thermomutatus
  misc_feature: 148
ccgtgctgcctaacatgcctgctgccatcctagatggcggaaacccatcatggtttggtattaggtgatccaccacctcctgtgcctcccaatcag

SEQ ID NO: 6478 - DNA, 96 bp, Aspergillus thermomutatus
  misc_feature: 148
ctataattccccttattcttcctttctgatccattattccttcctttttccttttgaaatccttctatctttctttccaccttccttctcttcttt

SEQ ID NO: 6479 - DNA, 96 bp, Aspergillus thermomutatus
  misc_feature: 147
ggataagaaggatagtaagggatagtgtaagggatagggttaaaaaagaggataagaaaagaaagaagaaaaggaaaagagagagagagaagaaaa

SEQ ID NO: 6480 - DNA, 96 bp, Aspergillus thermomutatus
  misc_feature: 147
ataccaaccctctgtcatccatggtaaggttttcattgtctgctgagttttcgagcatttcttggatgattttgtccctttttgttgcttcaataa

SEQ ID NO: 6481 - DNA, 96 bp, Aspergillus thermomutatus
  misc_feature: 147
aagtcgatgagagtagagaagatgagatgatataagggaaagagaagattaaagcgaagagagtgaaggaagggatgttgatggacagtgtgataa

SEQ ID NO: 6482 - DNA, 96 bp, Aspergillus thermomutatus
  misc_feature: 147
aacatgcctgctgccatcctagatggcggaaacccatcatggtttggtattaggtgatccaccacctcctgtgcctcccaatcagcatcacaccca

SEQ ID NO: 6483 - DNA, 96 bp, Aspergillus thermomutatus
  misc_feature: 147
tgccttactccctaccattctacctacctgtctgcctgcctctctatcttcctctctatctacctctctattcacctctctattcacctctctatt

SEQ ID NO: 6484 - DNA, 96 bp, Aspergillus thermomutatus
  misc_feature: 147
tgcctgtctgcctgtctgcctgtctgcctgtctctctacctcactgcctacctcatgtcggacctctctgtgggcctatctgcctgcctccgcgtg

SEQ ID NO: 6485 - DNA, 96 bp, Aspergillus thermomutatus
  misc_feature: 147
tgcctgtctgcctgtctctctacctcactgcctacctcatgtcggacctctctgtgggcctatctgcctgcctccgcgtgctattctatgtgcatc

SEQ ID NO: 6486 - DNA, 96 bp, Aspergillus thermomutatus
  misc_feature: 147
cgaatagcatgtaggatgcacatagaatagcacgcggaggcaggcagataggcccacagagaggtccgacatgaggtaggcagtgaggtagagaga

SEQ ID NO: 6487 - DNA, 96 bp, Aspergillus thermomutatus
  misc_feature: 147
tcagtatttggacggggtggtagatgggtatcagcgtcagcattgccaggatcaagatggtgcggagcaggcgtgtgatgggtgtgatgctgattg

SEQ ID NO: 6488 - DNA, 96 bp, Aspergillus thermomutatus
  misc_feature: 147
tataattccccttattcttcctttctgatccattattccttcctttttccttttgaaatccttctatctttctttccaccttccttctcttctttc

SEQ ID NO: 6489 - DNA, 96 bp, Aspergillus thermomutatus
  misc_feature: 147
tagcatgtaggatgcacatagaatagcacgcggaggcaggcagataggcccacagagaggtccgacatgaggtaggcagtgaggtagagagacagg

SEQ ID NO: 6490 - DNA, 96 bp, Aspergillus thermomutatus
  misc_feature: 147
ccccttattcttcctttctgatccattattccttcctttttccttttgaaatccttctatctttctttccaccttccttctcttctttctctctta

SEQ ID NO: 6491 - DNA, 96 bp, Aspergillus thermomutatus
  misc_feature: 147
agaagagaataagaacaagaggaaaataagaagagaataagaaggagaaaagaggagaaattaagagagtgagtaagtagacaggtaggaagttta

SEQ ID NO: 6492 - DNA, 96 bp, Aspergillus thermomutatus
  misc_feature: 147
gtattagaggaagagttagggagagtgtttaaggattaaaagaaagagtagagtaagggataggttaagagaggtaaagaggggtaagtaaggaat

SEQ ID NO: 6493 - DNA, 96 bp, Aspergillus thermomutatus
  misc_feature: 147
ctccctctaatcctccctctaatcctccctctaatcctctttctaatcctccctctaatcctctttctatccctccctctaatcctcctcctaacc

SEQ ID NO: 6494 - DNA, 96 bp, Aspergillus thermomutatus
  misc_feature: 147
cctctctattcacctctctattcacctctctatctacctctctatctccctaccccactgtctgcctgtctgcctgtctgcctgtctgcctgtctc

SEQ ID NO: 6495 - DNA, 96 bp, Aspergillus thermomutatus
  misc_feature: 147
actctactccttctcctaactctctctctactccttcttttactatttactttactccttcttctactctttacttcactttttatcctctctttc

SEQ ID NO: 6496 - DNA, 96 bp, Aspergillus thermomutatus
  misc_feature: 147
ataagaaggatagtaagggatagtgtaagggatagggttaaaaaagaggataagaaaagaaagaagaaaaggaaaagagagagagagaagaaaaag

SEQ ID NO: 6497 - DNA, 96 bp, Aspergillus thermomutatus
  misc_feature: 147
cccatgtaaggcagggttaaggcaggcagagaggtaaggagataggtagagagggacccaagtagcaggccataaggcaggccatgagacacacag

SEQ ID NO: 6498 - DNA, 96 bp, Aspergillus thermomutatus
  misc_feature: 147
ctcttaatttctcctcttttctccttcttattctcttcttattttcctcttgttcttattctcttctctttctctttgattctccctcttctctct

SEQ ID NO: 6499 - DNA, 96 bp, Aspergillus thermomutatus
  misc_feature: 147
agggatagaaaagaaagagaggataaaaagtgaagtaaagagtagaagaaggagtaaagtaaatagtaaaagaaggagtagagagagagttaggag

SEQ ID NO: 6500 - DNA, 96 bp, Aspergillus thermomutatus
  misc_feature: 147
aagagtagaagaaggagtaaagtaaatagtaaaagaaggagtagagagagagttaggagaaggagtagagtaagggttaggaggaggattagaggg

SEQ ID NO: 6501 - DNA, 96 bp, Aspergillus thermomutatus
  misc_feature: 147
agtaaaaagtcgatgagagtagagaagatgagatgatataagggaaagagaagattaaagcgaagagagtgaaggaagggatgttgatggacagtg

SEQ ID NO: 6502 - DNA, 96 bp, Aspergillus thermomutatus
  misc_feature: 147
ataattccccttattcttcctttctgatccattattccttcctttttccttttgaaatccttctatctttctttccaccttccttctcttctttct

SEQ ID NO: 6503 - DNA, 96 bp, Aspergillus thermomutatus
  misc_feature: 147
aggattagtgattttagaaataaaggagtaaaaagtcgatgagagtagagaagatgagatgatataagggaaagagaagattaaagcgaagagagt

SEQ ID NO: 6504 - DNA, 96 bp, Aspergillus thermomutatus
  misc_feature: 147
actctcatccttactctcatccttactctcatccttatccctaatccttatactaaccttactcctattcttcttccaactcttatcattttcctt

SEQ ID NO: 6505 - DNA, 96 bp, Aspergillus thermomutatus
  misc_feature: 146
gaagattaaaggtaaagaggaagggatagagagaggattagagtaagggttggaatgaggattaggaagaggaagaggaatagggatagaagtaaa

SEQ ID NO: 6506 - DNA, 96 bp, Aspergillus thermomutatus
  misc_feature: 146
ttcctctttcctctctctttccttcctctttccttcctccttacctcccctttattccctctctccttcctctttacttcctccttacctcccctt

SEQ ID NO: 6507 - DNA, 96 bp, Aspergillus thermomutatus
  misc_feature: 146
ttattcttcctttctgatccattattccttcctttttccttttgaaatccttctatctttctttccaccttccttctcttctttctctcttaaatc

SEQ ID NO: 6508 - DNA, 96 bp, Aspergillus thermomutatus
  misc_feature: 146
ttagaaatagaagattaaaggtaaagaggaagggatagagagaggattagagtaagggttggaatgaggattaggaagaggaagaggaatagggat

SEQ ID NO: 6509 - DNA, 96 bp, Aspergillus thermomutatus
  misc_feature: 146
gagtctcattctgtcgctctaatcgttgaatatgctcctggagctgttcaatcatgcccatcagaccctctgctgtgatctgaggctgcgcagtaa

SEQ ID NO: 6510 - DNA, 96 bp, Aspergillus thermomutatus
  misc_feature: 146
ttacggagcagcgataaccaatcgatcaccagcaatacagctcctgcgcggcacggttaggattgctccacgaccgcctacttcggtcgcattgtc

SEQ ID NO: 6511 - DNA, 96 bp, Aspergillus thermomutatus
  misc_feature: 146
aggagtaaaaagtcgatgagagtagagaagatgagatgatataagggaaagagaagattaaagcgaagagagtgaaggaagggatgttgatggaca

SEQ ID NO: 6512 - DNA, 96 bp, Aspergillus thermomutatus
  misc_feature: 146
tggtctgccttactgcctctctccctgtcttacatggtgccttcctccctaccttatattatacattcttcgctacctcacgcggtgcatctctgg

SEQ ID NO: 6513 - DNA, 96 bp, Aspergillus thermomutatus
  misc_feature: 146
ctgcctaacatgcctgctgccatcctagatggcggaaacccatcatggtttggtattaggtgatccaccacctcctgtgcctcccaatcagcatca

SEQ ID NO: 6514 - DNA, 96 bp, Aspergillus thermomutatus
  misc_feature: 146
tctactccttctcctaactctctctctactccttcttttactatttactttactccttcttctactctttacttcactttttatcctctctttctt

SEQ ID NO: 6515 - DNA, 96 bp, Aspergillus thermomutatus
  misc_feature: 146
tcgaatagcatgtaggatgcacatagaatagcacgcggaggcaggcagataggcccacagagaggtccgacatgaggtaggcagtgaggtagagag

SEQ ID NO: 6516 - DNA, 96 bp, Aspergillus thermomutatus
  misc_feature: 146
tcctctttcctctctctttccttcctctttccttcctccttacctcccctttattccctctctccttcctctttacttcctccttacctccccttt

SEQ ID NO: 6517 - DNA, 96 bp, Aspergillus thermomutatus
  misc_feature: 146
aagagttagggagagtgtttaaggattaaaagaaagagtagagtaagggataggttaagagaggtaaagaggggtaagtaaggaataggaggagga

SEQ ID NO: 6518 - DNA, 96 bp, Aspergillus thermomutatus
  misc_feature: 146
tagaaatagaagattaaaggtaaagaggaagggatagagagaggattagagtaagggttggaatgaggattaggaagaggaagaggaatagggata

SEQ ID NO: 6519 - DNA, 96 bp, Aspergillus thermomutatus
  misc_feature: 146
tactctcatccttactctcatccttactctcatccttatccctaatccttatactaaccttactcctattcttcttccaactcttatcattttcct

SEQ ID NO: 6520 - DNA, 96 bp, Aspergillus thermomutatus
  misc_feature: 146
taattccccttattcttcctttctgatccattattccttcctttttccttttgaaatccttctatctttctttccaccttccttctcttctttctc

SEQ ID NO: 6521 - DNA, 96 bp, Aspergillus thermomutatus
  misc_feature: 146
ctctaatcctccctctaatcctccctctaatcctctttctaatcctccctctaatcctctttctatccctccctctaatcctcctcctaaccctta

SEQ ID NO: 6522 - DNA, 96 bp, Aspergillus thermomutatus
  misc_feature: 146
gtgccttactccctaccattctacctacctgtctgcctgcctctctatcttcctctctatctacctctctattcacctctctattcacctctctat

SEQ ID NO: 6523 - DNA, 96 bp, Aspergillus thermomutatus
  misc_feature: 146
ggagtaaaaagtcgatgagagtagagaagatgagatgatataagggaaagagaagattaaagcgaagagagtgaaggaagggatgttgatggacag

SEQ ID NO: 6524 - DNA, 96 bp, Aspergillus thermomutatus
  misc_feature: 146
ggagaggagaaggaaagaaaagagaaacagaggagggaaagaagggaagagatgagaagagaggagaaggaggagagaggccaagagaagagaggt

SEQ ID NO: 6525 - DNA, 96 bp, Aspergillus thermomutatus
  misc_feature: 146
gaagagttagggagagtgtttaaggattaaaagaaagagtagagtaagggataggttaagagaggtaaagaggggtaagtaaggaataggaggagg

SEQ ID NO: 6526 - DNA, 96 bp, Aspergillus thermomutatus
  misc_feature: 146
gaaaagaaagagaggataaaaagtgaagtaaagagtagaagaaggagtaaagtaaatagtaaaagaaggagtagagagagagttaggagaaggagt

SEQ ID NO: 6527 - DNA, 96 bp, Aspergillus thermomutatus
  misc_feature: 146
atccttatccctaatccttatactaaccttactcctattcttcttccaactcttatcattttccttttcttaaatcctacttcttctctttttttc

SEQ ID NO: 6528 - DNA, 96 bp, Aspergillus thermomutatus
  misc_feature: 146
aagattaaaggtaaagaggaagggatagagagaggattagagtaagggttggaatgaggattaggaagaggaagaggaatagggatagaagtaaag

SEQ ID NO: 6529 - DNA, 96 bp, Aspergillus thermomutatus
  misc_feature: 146
catgtaaggcagggttaaggcaggcagagaggtaaggagataggtagagagggacccaagtagcaggccataaggcaggccatgagacacacagag

SEQ ID NO: 6530 - DNA, 96 bp, Aspergillus thermomutatus
  misc_feature: 146
ctctctattcacctctctattcacctctctatctacctctctatctccctaccccactgtctgcctgtctgcctgtctgcctgtctgcctgtctct

SEQ ID NO: 6531 - DNA, 96 bp, Aspergillus thermomutatus
  misc_feature: 146
cgtcgaatagcatgtaggatgcacatagaatagcacgcggaggcaggcagataggcccacagagaggtccgacatgaggtaggcagtgaggtagag

SEQ ID NO: 6532 - DNA, 96 bp, Aspergillus thermomutatus
  misc_feature: 146
agaaaagaaagagaggataaaaagtgaagtaaagagtagaagaaggagtaaagtaaatagtaaaagaaggagtagagagagagttaggagaaggag

SEQ ID NO: 6533 - DNA, 96 bp, Aspergillus thermomutatus
  misc_feature: 146
cctaataccaaaccatgatgggtttccgccatctaggatggcagcaggcatgttaggcagcacggcagactacacatcattgagagaggcgtctag

SEQ ID NO: 6534 - DNA, 96 bp, Aspergillus thermomutatus
  misc_feature: 146
ctaaatcctcttctcatcttccctctctctcttaaattctttcttaaactattaattcctctctctttctcactccctcttcctcctttcttgcat

SEQ ID NO: 6535 - DNA, 96 bp, Aspergillus thermomutatus
  misc_feature: 146
ctaaactaactaacccttactctctcttttctttcctactttaaattccctttaacccttacttattctcttcttttctttactatctctctctct

SEQ ID NO: 6536 - DNA, 96 bp, Aspergillus thermomutatus
  misc_feature: 146
ataaggtttaacatctaaattcgtatttaattatagatgtaattaaactagtccttacccttaaaagaaaggacaaggagacagggaaggacaagg

SEQ ID NO: 6537 - DNA, 96 bp, Aspergillus thermomutatus
  misc_feature: 146
cattgggtcatcgtggtgtttcgcgatgatttcggttctcatacactcaggtatgtagatgagattccgcaaatataccaaccctctgtcatccat

SEQ ID NO: 6538 - DNA, 96 bp, Aspergillus thermomutatus
  misc_feature: 146
atggtatacaactaccagcaacaactaccatgtaatggtagtccgaatggtagacgaggaaggaactatataaagacactcattatcactgtatct

SEQ ID NO: 6539 - DNA, 96 bp, Aspergillus thermomutatus
  misc_feature: 146
atatctgggggtgcctcacgcggtgcattgctccatacctcctatggtgcctctctacctatctccctacctcttcacctacctcttcacctacct

SEQ ID NO: 6540 - DNA, 96 bp, Aspergillus thermomutatus
  misc_feature: 146
acctctctattcacctctctattcacctctctatctacctctctatctccctaccccactgtctgcctgtctgcctgtctgcctgtctgcctgtct

SEQ ID NO: 6541 - DNA, 96 bp, Aspergillus thermomutatus
  misc_feature: 145
gataagaaggatagtaagggatagtgtaagggatagggttaaaaaagaggataagaaaagaaagaagaaaaggaaaagagagagagagaagaaaaa

SEQ ID NO: 6542 - DNA, 96 bp, Aspergillus thermomutatus
  misc_feature: 145
tttctattcttaaaataaactatccctccctccttttcttcttctctcttaatatttcctcccttcctttctcctcaacttctttgattcttctat

SEQ ID NO: 6543 - DNA, 96 bp, Aspergillus thermomutatus
  misc_feature: 145
gatagaagaatcaaagaagttgaggagaaaggaagggaggaaatattaagagagaagaagaaaaggagggagggatagtttattttaagaatagaa

SEQ ID NO: 6544 - DNA, 96 bp, Aspergillus thermomutatus
  misc_feature: 145
ctgccaatgctttcgcattgatttgatggtagcagctaggtagtggcattgagtttgacctcgcaggcagagcaggccattcgagtgacatggtaa

SEQ ID NO: 6545 - DNA, 96 bp, Aspergillus thermomutatus
  misc_feature: 145
tatcgtgaaaacagaccacaagaatctcacgttcttcacgaccacgaaagaattgacacgacgacaagccagatgggctgagacattgtcacagca

SEQ ID NO: 6546 - DNA, 96 bp, Aspergillus thermomutatus
  misc_feature: 145
tgcctaacatgcctgctgccatcctagatggcggaaacccatcatggtttggtattaggtgatccaccacctcctgtgcctcccaatcagcatcac

SEQ ID NO: 6547 - DNA, 96 bp, Aspergillus thermomutatus
  misc_feature: 145
actaaatcctcttctcatcttccctctctctcttaaattctttcttaaactattaattcctctctctttctcactccctcttcctcctttcttgca

SEQ ID NO: 6548 - DNA, 96 bp, Aspergillus thermomutatus
  misc_feature: 145
tctcttaatttctcctcttttctccttcttattctcttcttattttcctcttgttcttattctcttctctttctctttgattctccctcttctctc

SEQ ID NO: 6549 - DNA, 96 bp, Aspergillus thermomutatus
  misc_feature: 145
tctaatcctccctctaatcctccctctaatcctctttctaatcctccctctaatcctctttctatccctccctctaatcctcctcctaacccttac

SEQ ID NO: 6550 - DNA, 96 bp, Aspergillus thermomutatus
  misc_feature: 145
tagaaaagaaagagaggataaaaagtgaagtaaagagtagaagaaggagtaaagtaaatagtaaaagaaggagtagagagagagttaggagaagga

SEQ ID NO: 6551 - DNA, 96 bp, Aspergillus thermomutatus
  misc_feature: 145
tccctctaatcctccctctaatcctccctctaatcctctttctaatcctccctctaatcctctttctatccctccctctaatcctcctcctaaccc

SEQ ID NO: 6552 - DNA, 96 bp, Aspergillus thermomutatus
  misc_feature: 145
tcccatccagccggttgaatgatgatcgcctcgctctgctggccatcccatcctgctcagccactttcttgcgcataatctaacaacgtccacagt

SEQ ID NO: 6553 - DNA, 96 bp, Aspergillus thermomutatus
  misc_feature: 145
tagcacgtagaatagcacgtcgaatagcatgtaggatgcacatagaatagcacgcggaggcaggcagataggcccacagagaggtccgacatgagg

SEQ ID NO: 6554 - DNA, 96 bp, Aspergillus thermomutatus
  misc_feature: 145
aatcgcttctgccgttttttctgttcccatatgaccatgcattgggtcatcgtggtgtttcgcgatgatttcggttctcatacactcaggtatgta

SEQ ID NO: 6555 - DNA, 96 bp, Aspergillus thermomutatus
  misc_feature: 145
taaactaactaacccttactctctcttttctttcctactttaaattccctttaacccttacttattctcttcttttctttactatctctctctctc

SEQ ID NO: 6556 - DNA, 96 bp, Aspergillus thermomutatus
  misc_feature: 145
ctctttcctctctctttccttcctctttccttcctccttacctcccctttattccctctctccttcctctttacttcctccttacctcccctttac

SEQ ID NO: 6557 - DNA, 96 bp, Aspergillus thermomutatus
  misc_feature: 145
agatggcggaaacccatcatggtttggtattaggtgatccaccacctcctgtgcctcccaatcagcatcacacccatcacacgcctgctccgcacc

SEQ ID NO: 6558 - DNA, 96 bp, Aspergillus thermomutatus
  misc_feature: 145
ggtctgccttactgcctctctccctgtcttacatggtgccttcctccctaccttatattatacattcttcgctacctcacgcggtgcatctctggg

SEQ ID NO: 6559 - DNA, 96 bp, Aspergillus thermomutatus
  misc_feature: 145
ggtatacaactaccagcaacaactaccatgtaatggtagtccgaatggtagacgaggaaggaactatataaagacactcattatcactgtatctag

SEQ ID NO: 6560 - DNA, 96 bp, Aspergillus thermomutatus
  misc_feature: 145
gcctgtctgcctgtctctctacctcactgcctacctcatgtcggacctctctgtgggcctatctgcctgcctccgcgtgctattctatgtgcatcc

SEQ ID NO: 6561 - DNA, 96 bp, Aspergillus thermomutatus
  misc_feature: 145
ccgaatatgaggttgaatggatactggatgagcgtgagaaacgcgttggcagaggccgccgcaaggagtatctcgtcaaatggacaggttacgatc

SEQ ID NO: 6562 - DNA, 96 bp, Aspergillus thermomutatus
  misc_feature: 145
acccctacttatttactgcttcctactctctaaccatccctctatctcttctgctttccgtcctttctccttctaaactaactaacccttactctc

SEQ ID NO: 6563 - DNA, 96 bp, Aspergillus thermomutatus
  misc_feature: 145
ccctacttatttactgcttcctactctctaaccatccctctatctcttctgctttccgtcctttctccttctaaactaactaacccttactctctc

SEQ ID NO: 6564 - DNA, 96 bp, Aspergillus thermomutatus
  misc_feature: 145
attccccttattcttcctttctgatccattattccttcctttttccttttgaaatccttctatctttctttccaccttccttctcttctttctctc

SEQ ID NO: 6565 - DNA, 96 bp, Aspergillus thermomutatus
  misc_feature: 145
cttactctcatccttactctcatccttactctcatccttatccctaatccttatactaaccttactcctattcttcttccaactcttatcattttc

SEQ ID NO: 6566 - DNA, 96 bp, Aspergillus thermomutatus
  misc_feature: 145
agagttagggagagtgtttaaggattaaaagaaagagtagagtaagggataggttaagagaggtaaagaggggtaagtaaggaataggaggaggag

SEQ ID NO: 6567 - DNA, 96 bp, Aspergillus thermomutatus
  misc_feature: 145
ccttactctcatccttactctcatccttactctcatccttatccctaatccttatactaaccttactcctattcttcttccaactcttatcatttt

SEQ ID NO: 6568 - DNA, 96 bp, Aspergillus thermomutatus
  misc_feature: 145
aggagaggagaaggaaagaaaagagaaacagaggagggaaagaagggaagagatgagaagagaggagaaggaggagagaggccaagagaagagagg

SEQ ID NO: 6569 - DNA, 96 bp, Aspergillus thermomutatus
  misc_feature: 145
cccctacttatttactgcttcctactctctaaccatccctctatctcttctgctttccgtcctttctccttctaaactaactaacccttactctct

SEQ ID NO: 6570 - DNA, 96 bp, Aspergillus thermomutatus
  misc_feature: 145
catccttactctcatccttactctcatccttatccctaatccttatactaaccttactcctattcttcttccaactcttatcattttccttttctt

SEQ ID NO: 6571 - DNA, 96 bp, Aspergillus thermomutatus
  misc_feature: 145
atttactgcttcctactctctaaccatccctctatctcttctgctttccgtcctttctccttctaaactaactaacccttactctctcttttcttt

SEQ ID NO: 6572 - DNA, 96 bp, Aspergillus thermomutatus
  misc_feature: 145
aattccccttattcttcctttctgatccattattccttcctttttccttttgaaatccttctatctttctttccaccttccttctcttctttctct

SEQ ID NO: 6573 - DNA, 96 bp, Aspergillus thermomutatus
  misc_feature: 144
ttcttcctttctgatccattattccttcctttttccttttgaaatccttctatctttctttccaccttccttctcttctttctctcttaaatctat

SEQ ID NO: 6574 - DNA, 96 bp, Aspergillus thermomutatus
  misc_feature: 144
ttccccttattcttcctttctgatccattattccttcctttttccttttgaaatccttctatctttctttccaccttccttctcttctttctctct

SEQ ID NO: 6575 - DNA, 96 bp, Aspergillus thermomutatus
  misc_feature: 144
ttactctcatccttactctcatccttactctcatccttatccctaatccttatactaaccttactcctattcttcttccaactcttatcattttcc

SEQ ID NO: 6576 - DNA, 96 bp, Aspergillus thermomutatus
  misc_feature: 144
tggtatacaactaccagcaacaactaccatgtaatggtagtccgaatggtagacgaggaaggaactatataaagacactcattatcactgtatcta

SEQ ID NO: 6577 - DNA, 96 bp, Aspergillus thermomutatus
  misc_feature: 144
aaggcaggcagagaggtaaggagataggtagagagggacccaagtagcaggccataaggcaggccatgagacacacagagaggtgtacacaaggca

SEQ ID NO: 6578 - DNA, 96 bp, Aspergillus thermomutatus
  misc_feature: 144
tacggagcagcgataaccaatcgatcaccagcaatacagctcctgcgcggcacggttaggattgctccacgaccgcctacttcggtcgcattgtca

SEQ ID NO: 6579 - DNA, 96 bp, Aspergillus thermomutatus
  misc_feature: 144
gggatagaaaagaaagagaggataaaaagtgaagtaaagagtagaagaaggagtaaagtaaatagtaaaagaaggagtagagagagagttaggaga

SEQ ID NO: 6580 - DNA, 96 bp, Aspergillus thermomutatus
  misc_feature: 144
tctcatccttactctcatccttactctcatccttatccctaatccttatactaaccttactcctattcttcttccaactcttatcattttcctttt

SEQ ID NO: 6581 - DNA, 96 bp, Aspergillus thermomutatus
  misc_feature: 144
gtagagtaagggttaggaggaggattagagggagggatagaaagaggattagagggaggattagaaagaggattagagggaggattagagggagga

SEQ ID NO: 6582 - DNA, 96 bp, Aspergillus thermomutatus
  misc_feature: 144
tccccttattcttcctttctgatccattattccttcctttttccttttgaaatccttctatctttctttccaccttccttctcttctttctctctt

SEQ ID NO: 6583 - DNA, 96 bp, Aspergillus thermomutatus
  misc_feature: 144
tcatccttactctcatccttactctcatccttatccctaatccttatactaaccttactcctattcttcttccaactcttatcattttccttttct

SEQ ID NO: 6584 - DNA, 96 bp, Aspergillus thermomutatus
  misc_feature: 144
tatctgggggtgcctcacgcggtgcattgctccatacctcctatggtgcctctctacctatctccctacctcttcacctacctcttcacctacctc

SEQ ID NO: 6585 - DNA, 96 bp, Aspergillus thermomutatus
  misc_feature: 144
tatatattaatacctactatgcctcactgcctacctcctggggttcctctatgcctactcttggtctgccttactgcctctctccctgtcttacat

SEQ ID NO: 6586 - DNA, 96 bp, Aspergillus thermomutatus
  misc_feature: 144
ccaaatattcgaagtgaccatatttcgttctgaatgccgttttccattcttcgccttctgcgattcgaatgtggttatatgcgtccgtgatgtcta

SEQ ID NO: 6587 - DNA, 96 bp, Aspergillus thermomutatus
  misc_feature: 144
tactccttctcctaactctctctctactccttcttttactatttactttactccttcttctactctttacttcactttttatcctctctttctttt

SEQ ID NO: 6588 - DNA, 96 bp, Aspergillus thermomutatus
  misc_feature: 144
gggtttatcattgaagctggcaagggcgtacgcatggaccccgacaaggtaaaagctatactagaatggcagacccctacatccactcgaggcgta

SEQ ID NO: 6589 - DNA, 96 bp, Aspergillus thermomutatus
  misc_feature: 144
taaggtttaacatctaaattcgtatttaattatagatgtaattaaactagtccttacccttaaaagaaaggacaaggagacagggaaggacaaggc

SEQ ID NO: 6590 - DNA, 96 bp, Aspergillus thermomutatus
  misc_feature: 144
atccttactctcatccttactctcatccttatccctaatccttatactaaccttactcctattcttcttccaactcttatcattttccttttctta

SEQ ID NO: 6591 - DNA, 96 bp, Aspergillus thermomutatus
  misc_feature: 144
ggaagagttagggagagtgtttaaggattaaaagaaagagtagagtaagggataggttaagagaggtaaagaggggtaagtaaggaataggaggag

SEQ ID NO: 6592 - DNA, 96 bp, Aspergillus thermomutatus
  misc_feature: 144
gatagaaaagaaagagaggataaaaagtgaagtaaagagtagaagaaggagtaaagtaaatagtaaaagaaggagtagagagagagttaggagaag

SEQ ID NO: 6593 - DNA, 96 bp, Aspergillus thermomutatus
  misc_feature: 144
gaggagaggagaaggaaagaaaagagaaacagaggagggaaagaagggaagagatgagaagagaggagaaggaggagagaggccaagagaagagag

SEQ ID NO: 6594 - DNA, 96 bp, Aspergillus thermomutatus
  misc_feature: 144
gaatatgaggttgaatggatactggatgagcgtgagaaacgcgttggcagaggccgccgcaaggagtatctcgtcaaatggacaggttacgatcgt

SEQ ID NO: 6595 - DNA, 96 bp, Aspergillus thermomutatus
  misc_feature: 144
ctcatccttactctcatccttactctcatccttatccctaatccttatactaaccttactcctattcttcttccaactcttatcattttccttttc

SEQ ID NO: 6596 - DNA, 96 bp, Aspergillus thermomutatus
  misc_feature: 144
aggcaggcagagaggtaaggagataggtagagagggacccaagtagcaggccataaggcaggccatgagacacacagagaggtgtacacaaggcag

SEQ ID NO: 6597 - DNA, 96 bp, Aspergillus thermomutatus
  misc_feature: 144
acctcgggtttatcattgaagctggcaagggcgtacgcatggaccccgacaaggtaaaagctatactagaatggcagacccctacatccactcgag

SEQ ID NO: 6598 - DNA, 96 bp, Aspergillus thermomutatus
  misc_feature: 144
atagcacgtagaatagcacgtcgaatagcatgtaggatgcacatagaatagcacgcggaggcaggcagataggcccacagagaggtccgacatgag

SEQ ID NO: 6599 - DNA, 96 bp, Aspergillus thermomutatus
  misc_feature: 144
attagaggaagagttagggagagtgtttaaggattaaaagaaagagtagagtaagggataggttaagagaggtaaagaggggtaagtaaggaatag

SEQ ID NO: 6600 - DNA, 96 bp, Aspergillus thermomutatus
  misc_feature: 144
ctactccttctcctaactctctctctactccttcttttactatttactttactccttcttctactctttacttcactttttatcctctctttcttt

SEQ ID NO: 6601 - DNA, 96 bp, Aspergillus thermomutatus
  misc_feature: 144
agataggtagagagggacccaagtagcaggccataaggcaggccatgagacacacagagaggtgtacacaaggcaggcagaacagtaggcagaacg

SEQ ID NO: 6602 - DNA, 96 bp, Aspergillus thermomutatus
  misc_feature: 144
cctcgggtttatcattgaagctggcaagggcgtacgcatggaccccgacaaggtaaaagctatactagaatggcagacccctacatccactcgagg

SEQ ID NO: 6603 - DNA, 96 bp, Aspergillus thermomutatus
  misc_feature: 144
cctacttatttactgcttcctactctctaaccatccctctatctcttctgctttccgtcctttctccttctaaactaactaacccttactctctct

SEQ ID NO: 6604 - DNA, 96 bp, Aspergillus thermomutatus
  misc_feature: 144
cccatccagccggttgaatgatgatcgcctcgctctgctggccatcccatcctgctcagccactttcttgcgcataatctaacaacgtccacagtg

SEQ ID NO: 6605 - DNA, 96 bp, Aspergillus thermomutatus
  misc_feature: 144
atgtagatgagattccgcaaatataccaaccctctgtcatccatggtaaggttttcattgtctgctgagttttcgagcatttcttggatgattttg

SEQ ID NO: 6606 - DNA, 96 bp, Aspergillus thermomutatus
  misc_feature: 144
agatatataaagaaggttgaagattagaagggaggatgttaagagaataaagaaatgcaagaaaggaggaagagggagtgagaaagagagaggaat

SEQ ID NO: 6607 - DNA, 96 bp, Aspergillus thermomutatus
  misc_feature: 144
aatcctccctctaatcctccctctaatcctctttctaatcctccctctaatcctctttctatccctccctctaatcctcctcctaacccttactct

SEQ ID NO: 6608 - DNA, 96 bp, Aspergillus thermomutatus
  misc_feature: 143
tttactgcttcctactctctaaccatccctctatctcttctgctttccgtcctttctccttctaaactaactaacccttactctctcttttctttc

SEQ ID NO: 6609 - DNA, 96 bp, Aspergillus thermomutatus
  misc_feature: 143
gagatatataaagaaggttgaagattagaagggaggatgttaagagaataaagaaatgcaagaaaggaggaagagggagtgagaaagagagaggaa

SEQ ID NO: 6610 - DNA, 96 bp, Aspergillus thermomutatus
  misc_feature: 143
tgtctgcctgtctgcctgtctctctacctcactgcctacctcatgtcggacctctctgtgggcctatctgcctgcctccgcgtgctattctatgtg

SEQ ID NO: 6611 - DNA, 96 bp, Aspergillus thermomutatus
  misc_feature: 143
tggtataaccaccctaacttataatatatattaatacctactatgcctcactgcctacctcctggggttcctctatgcctactcttggtctgcctt

SEQ ID NO: 6612 - DNA, 96 bp, Aspergillus thermomutatus
  misc_feature: 143
tggctctgctgggaccactggtggactatctgccaatgctttcgcattgatttgatggtagcagctaggtagtggcattgagtttgacctcgcagg

SEQ ID NO: 6613 - DNA, 96 bp, Aspergillus thermomutatus
  misc_feature: 143
tgcttcctactctctaaccatccctctatctcttctgctttccgtcctttctccttctaaactaactaacccttactctctcttttctttcctact

SEQ ID NO: 6614 - DNA, 96 bp, Aspergillus thermomutatus
  misc_feature: 143
acgtcgaatagcatgtaggatgcacatagaatagcacgcggaggcaggcagataggcccacagagaggtccgacatgaggtaggcagtgaggtaga

SEQ ID NO: 6615 - DNA, 96 bp, Aspergillus thermomutatus
  misc_feature: 143
tattagaggaagagttagggagagtgtttaaggattaaaagaaagagtagagtaagggataggttaagagaggtaaagaggggtaagtaaggaata

SEQ ID NO: 6616 - DNA, 96 bp, Aspergillus thermomutatus
  misc_feature: 143
atcctccctctaatcctccctctaatcctctttctaatcctccctctaatcctctttctatccctccctctaatcctcctcctaacccttactcta

SEQ ID NO: 6617 - DNA, 96 bp, Aspergillus thermomutatus
  misc_feature: 143
gagataggtagagagggacccaagtagcaggccataaggcaggccatgagacacacagagaggtgtacacaaggcaggcagaacagtaggcagaac

SEQ ID NO: 6618 - DNA, 96 bp, Aspergillus thermomutatus
  misc_feature: 143
gttaaggcaggcagagaggtaaggagataggtagagagggacccaagtagcaggccataaggcaggccatgagacacacagagaggtgtacacaag

SEQ ID NO: 6619 - DNA, 96 bp, Aspergillus thermomutatus
  misc_feature: 143
ccgattcttcagtacttacaaaatacttagattttgatcatattcagggacctggtagattagaacatcttaaatgtgatgttacttttactgcac

SEQ ID NO: 6620 - DNA, 96 bp, Aspergillus thermomutatus
  misc_feature: 143
gtctgcctgtctgcctgtctctctacctcactgcctacctcatgtcggacctctctgtgggcctatctgcctgcctccgcgtgctattctatgtgc

SEQ ID NO: 6621 - DNA, 96 bp, Aspergillus thermomutatus
  misc_feature: 143
ctgcttcctactctctaaccatccctctatctcttctgctttccgtcctttctccttctaaactaactaacccttactctctcttttctttcctac

SEQ ID NO: 6622 - DNA, 96 bp, Aspergillus thermomutatus
  misc_feature: 143
gctgcctaacatgcctgctgccatcctagatggcggaaacccatcatggtttggtattaggtgatccaccacctcctgtgcctcccaatcagcatc

SEQ ID NO: 6623 - DNA, 96 bp, Aspergillus thermomutatus
  misc_feature: 143
ctatcttaagcatgtagtggctcaacagatcacccaggcagtgtctcaatggcatgatattcaccatgatagcagtgccatccagatcccacatgc

SEQ ID NO: 6624 - DNA, 96 bp, Aspergillus thermomutatus
  misc_feature: 143
acggtgccttactccctaccattctacctacctgtctgcctgcctctctatcttcctctctatctacctctctattcacctctctattcacctctc

SEQ ID NO: 6625 - DNA, 96 bp, Aspergillus thermomutatus
  misc_feature: 143
ctggtataaccaccctaacttataatatatattaatacctactatgcctcactgcctacctcctggggttcctctatgcctactcttggtctgcct

SEQ ID NO: 6626 - DNA, 96 bp, Aspergillus thermomutatus
  misc_feature: 143
atctctattaggtgaaggtttagggggaaatttatctattctttccaaatatgcctcatgagtatttttacattctttccaaatatgcctcatgag

SEQ ID NO: 6627 - DNA, 96 bp, Aspergillus thermomutatus
  misc_feature: 143
ctacttatttactgcttcctactctctaaccatccctctatctcttctgctttccgtcctttctccttctaaactaactaacccttactctctctt

SEQ ID NO: 6628 - DNA, 96 bp, Aspergillus thermomutatus
  misc_feature: 143
cctttctattcttaaaataaactatccctccctccttttcttcttctctcttaatatttcctcccttcctttctcctcaacttctttgattcttct

SEQ ID NO: 6629 - DNA, 96 bp, Aspergillus thermomutatus
  misc_feature: 143
cctctaatcctccctctaatcctccctctaatcctctttctaatcctccctctaatcctctttctatccctccctctaatcctcctcctaaccctt

SEQ ID NO: 6630 - DNA, 96 bp, Aspergillus thermomutatus
  misc_feature: 143
atatctctattaggtgaaggtttagggggaaatttatctattctttccaaatatgcctcatgagtatttttacattctttccaaatatgcctcatg

SEQ ID NO: 6631 - DNA, 96 bp, Aspergillus thermomutatus
  misc_feature: 143
acaggtaggtagaatggtagggagtaaggcaccgtataagcaccaaatcagatagagagatatagagagaggtatccaagaggtagatatagtagt

SEQ ID NO: 6632 - DNA, 96 bp, Aspergillus thermomutatus
  misc_feature: 142
ggttaaggcaggcagagaggtaaggagataggtagagagggacccaagtagcaggccataaggcaggccatgagacacacagagaggtgtacacaa

SEQ ID NO: 6633 - DNA, 96 bp, Aspergillus thermomutatus
  misc_feature: 142
ggatagaaaagaaagagaggataaaaagtgaagtaaagagtagaagaaggagtaaagtaaatagtaaaagaaggagtagagagagagttaggagaa

SEQ ID NO: 6634 - DNA, 96 bp, Aspergillus thermomutatus
  misc_feature: 142
atgaagatagtaagaaaaaggagagagggagtaaaggggaggtaaggaggaagtaaagaggaaggagagagggaataaaggggaggtaaggaggaa

SEQ ID NO: 6635 - DNA, 96 bp, Aspergillus thermomutatus
  misc_feature: 142
agaagattaaaggtaaagaggaagggatagagagaggattagagtaagggttggaatgaggattaggaagaggaagaggaatagggatagaagtaa

SEQ ID NO: 6636 - DNA, 96 bp, Aspergillus thermomutatus
  misc_feature: 142
tatggctctgctgggaccactggtggactatctgccaatgctttcgcattgatttgatggtagcagctaggtagtggcattgagtttgacctcgca

SEQ ID NO: 6637 - DNA, 96 bp, Aspergillus thermomutatus
  misc_feature: 142
tgaagatagtaagaaaaaggagagagggagtaaaggggaggtaaggaggaagtaaagaggaaggagagagggaataaaggggaggtaaggaggaag

SEQ ID NO: 6638 - DNA, 96 bp, Aspergillus thermomutatus
  misc_feature: 142
gtcgaatagcatgtaggatgcacatagaatagcacgcggaggcaggcagataggcccacagagaggtccgacatgaggtaggcagtgaggtagaga

SEQ ID NO: 6639 - DNA, 96 bp, Aspergillus thermomutatus
  misc_feature: 142
aatgaagatagtaagaaaaaggagagagggagtaaaggggaggtaaggaggaagtaaagaggaaggagagagggaataaaggggaggtaaggagga

SEQ ID NO: 6640 - DNA, 96 bp, Aspergillus thermomutatus
  misc_feature: 142
gataggaaaaaagaaaagatttagaaatagaagattaaaggtaaagaggaagggatagagagaggattagagtaagggttggaatgaggattagga

SEQ ID NO: 6641 - DNA, 96 bp, Aspergillus thermomutatus
  misc_feature: 142
aatagcacgtagaatagcacgtcgaatagcatgtaggatgcacatagaatagcacgcggaggcaggcagataggcccacagagaggtccgacatga

SEQ ID NO: 6642 - DNA, 96 bp, Aspergillus thermomutatus
  misc_feature: 142
tatttactgcttcctactctctaaccatccctctatctcttctgctttccgtcctttctccttctaaactaactaacccttactctctcttttctt

SEQ ID NO: 6643 - DNA, 96 bp, Aspergillus thermomutatus
  misc_feature: 142
ctttctattcttaaaataaactatccctccctccttttcttcttctctcttaatatttcctcccttcctttctcctcaacttctttgattcttcta

SEQ ID NO: 6644 - DNA, 96 bp, Aspergillus thermomutatus
  misc_feature: 142
aatggatactggatgagcgtgagaaacgcgttggcagaggccgccgcaaggagtatctcgtcaaatggacaggttacgatcgtcctacgtgggaac

SEQ ID NO: 6645 - DNA, 96 bp, Aspergillus thermomutatus
  misc_feature: 142
gtgctaatctaggtggtgataccattttatctgtacaagaaggccagaatcgtgttcagcagcttgatatgccacttgttgagcaggttgatgagc

SEQ ID NO: 6646 - DNA, 96 bp, Aspergillus thermomutatus
  misc_feature: 142
acggagcagcgataaccaatcgatcaccagcaatacagctcctgcgcggcacggttaggattgctccacgaccgcctacttcggtcgcattgtcac

SEQ ID NO: 6647 - DNA, 96 bp, Aspergillus thermomutatus
  misc_feature: 142
gtcgatgagagtagagaagatgagatgatataagggaaagagaagattaaagcgaagagagtgaaggaagggatgttgatggacagtgtgataagg

SEQ ID NO: 6648 - DNA, 96 bp, Aspergillus thermomutatus
  misc_feature: 142
ggataggaaaaaagaaaagatttagaaatagaagattaaaggtaaagaggaagggatagagagaggattagagtaagggttggaatgaggattagg

SEQ ID NO: 6649 - DNA, 96 bp, Aspergillus thermomutatus
  misc_feature: 142
gatctatcgaaggttcagttactaatccatgttttacgtctatactcattaaatttgtatttatctcctgaagtaatttctttaaataatctaaat

SEQ ID NO: 6650 - DNA, 96 bp, Aspergillus thermomutatus
  misc_feature: 142
aatctctggtataaccaccctaacttataatatatattaatacctactatgcctcactgcctacctcctggggttcctctatgcctactcttggtc

SEQ ID NO: 6651 - DNA, 96 bp, Aspergillus thermomutatus
  misc_feature: 142
gaatagcacgtagaatagcacgtcgaatagcatgtaggatgcacatagaatagcacgcggaggcaggcagataggcccacagagaggtccgacatg

SEQ ID NO: 6652 - DNA, 96 bp, Aspergillus thermomutatus
  misc_feature: 142
gaatagcacgtagaatagcacgtagaatagcacgtcgaatagcatgtaggatgcacatagaatagcacgcggaggcaggcagataggcccacagag

SEQ ID NO: 6653 - DNA, 96 bp, Aspergillus thermomutatus
  misc_feature: 142
atggctctgctgggaccactggtggactatctgccaatgctttcgcattgatttgatggtagcagctaggtagtggcattgagtttgacctcgcag

SEQ ID NO: 6654 - DNA, 96 bp, Aspergillus thermomutatus
  misc_feature: 142
agatttagaaatagaagattaaaggtaaagaggaagggatagagagaggattagagtaagggttggaatgaggattaggaagaggaagaggaatag

SEQ ID NO: 6655 - DNA, 96 bp, Aspergillus thermomutatus
  misc_feature: 142
cggtgccttactccctaccattctacctacctgtctgcctgcctctctatcttcctctctatctacctctctattcacctctctattcacctctct

SEQ ID NO: 6656 - DNA, 96 bp, Aspergillus thermomutatus
  misc_feature: 142
atagaaaagaaagagaggataaaaagtgaagtaaagagtagaagaaggagtaaagtaaatagtaaaagaaggagtagagagagagttaggagaagg

SEQ ID NO: 6657 - DNA, 96 bp, Aspergillus thermomutatus
  misc_feature: 142
cctgtctgcctgtctgcctgtctctctacctcactgcctacctcatgtcggacctctctgtgggcctatctgcctgcctccgcgtgctattctatg

SEQ ID NO: 6658 - DNA, 96 bp, Aspergillus thermomutatus
  misc_feature: 142
agtagagtaagggttaggaggaggattagagggagggatagaaagaggattagagggaggattagaaagaggattagagggaggattagagggagg

SEQ ID NO: 6659 - DNA, 96 bp, Aspergillus thermomutatus
  misc_feature: 142
ccctctaatcctccctctaatcctccctctaatcctctttctaatcctccctctaatcctctttctatccctccctctaatcctcctcctaaccct

SEQ ID NO: 6660 - DNA, 96 bp, Aspergillus thermomutatus
  misc_feature: 142
atctatcgaaggttcagttactaatccatgttttacgtctatactcattaaatttgtatttatctcctgaagtaatttctttaaataatctaaatg

SEQ ID NO: 6661 - DNA, 96 bp, Aspergillus thermomutatus
  misc_feature: 142
attgggtcatcgtggtgtttcgcgatgatttcggttctcatacactcaggtatgtagatgagattccgcaaatataccaaccctctgtcatccatg

SEQ ID NO: 6662 - DNA, 96 bp, Aspergillus thermomutatus
  misc_feature: 141
tttcttctctctctttttcttctctctctttttcttctctctctttttcttctctctctctcttttccttttcttctttcttttcttatcctcttt

SEQ ID NO: 6663 - DNA, 96 bp, Aspergillus thermomutatus
  misc_feature: 141
taaaagagaggaaagtaagagttaagaaaagaaagaagaaaaaaagagaagaagtaggatttaagaaaaggaaaatgataagagttggaagaagaa

SEQ ID NO: 6664 - DNA, 96 bp, Aspergillus thermomutatus
  misc_feature: 141
ttcttctctctctttttcttctctctctttttcttctctctctttttcttctctctctctcttttccttttcttctttcttttcttatcctctttt

SEQ ID NO: 6665 - DNA, 96 bp, Aspergillus thermomutatus
  misc_feature: 141
ggagataggtagagagggacccaagtagcaggccataaggcaggccatgagacacacagagaggtgtacacaaggcaggcagaacagtaggcagaa

SEQ ID NO: 6666 - DNA, 96 bp, Aspergillus thermomutatus
  misc_feature: 141
gataaggataagaaggatagtaagggatagtgtaagggatagggttaaaaaagaggataagaaaagaaagaagaaaaggaaaagagagagagagaa

SEQ ID NO: 6667 - DNA, 96 bp, Aspergillus thermomutatus
  misc_feature: 141
aaatagaagattaaaggtaaagaggaagggatagagagaggattagagtaagggttggaatgaggattaggaagaggaagaggaatagggatagaa

SEQ ID NO: 6668 - DNA, 96 bp, Aspergillus thermomutatus
  misc_feature: 141
ttagttagtttagaaggagaaaggacggaaagcagaagagatagagggatggttagagagtaggaagcagtaaataagtaggggttggtttaagag

SEQ ID NO: 6669 - DNA, 96 bp, Aspergillus thermomutatus
  misc_feature: 141
ttactgcttcctactctctaaccatccctctatctcttctgctttccgtcctttctccttctaaactaactaacccttactctctcttttctttcc

SEQ ID NO: 6670 - DNA, 96 bp, Aspergillus thermomutatus
  misc_feature: 141
gtagaatagcacgtagaatagcacgtagaatagcacgtcgaatagcatgtaggatgcacatagaatagcacgcggaggcaggcagataggcccaca

SEQ ID NO: 6671 - DNA, 96 bp, Aspergillus thermomutatus
  misc_feature: 141
aggagggagtccagccttataaggtgtttcgaggacgaaacgctaagagagggggaggtgatgttacgacaccaacactactaggcggacctgaca

SEQ ID NO: 6672 - DNA, 96 bp, Aspergillus thermomutatus
  misc_feature: 141
tgtagatgagattccgcaaatataccaaccctctgtcatccatggtaaggttttcattgtctgctgagttttcgagcatttcttggatgattttgt

SEQ ID NO: 6673 - DNA, 96 bp, Aspergillus thermomutatus
  misc_feature: 141
cagggttaaggcaggcagagaggtaaggagataggtagagagggacccaagtagcaggccataaggcaggccatgagacacacagagaggtgtaca

SEQ ID NO: 6674 - DNA, 96 bp, Aspergillus thermomutatus
  misc_feature: 141
tgcctgtctgcctgtctgcctgtctctctacctcactgcctacctcatgtcggacctctctgtgggcctatctgcctgcctccgcgtgctattcta

SEQ ID NO: 6675 - DNA, 96 bp, Aspergillus thermomutatus
  misc_feature: 141
gctttcgcattgatttgatggtagcagctaggtagtggcattgagtttgacctcgcaggcagagcaggccattcgagtgacatggtaatataggca

SEQ ID NO: 6676 - DNA, 96 bp, Aspergillus thermomutatus
  misc_feature: 141
tctgcctgtctgcctgtctctctacctcactgcctacctcatgtcggacctctctgtgggcctatctgcctgcctccgcgtgctattctatgtgca

SEQ ID NO: 6677 - DNA, 96 bp, Aspergillus thermomutatus
  misc_feature: 141
agaggagaggagaaggaaagaaaagagaaacagaggagggaaagaagggaagagatgagaagagaggagaaggaggagagaggccaagagaagaga

SEQ ID NO: 6678 - DNA, 96 bp, Aspergillus thermomutatus
  misc_feature: 141
aataccaaaccatgatgggtttccgccatctaggatggcagcaggcatgttaggcagcacggcagactacacatcattgagagaggcgtctagaga

SEQ ID NO: 6679 - DNA, 96 bp, Aspergillus thermomutatus
  misc_feature: 141
tacctcgggtttatcattgaagctggcaagggcgtacgcatggaccccgacaaggtaaaagctatactagaatggcagacccctacatccactcga

SEQ ID NO: 6680 - DNA, 96 bp, Aspergillus thermomutatus
  misc_feature: 141
ccaggagggagtccagccttataaggtgtttcgaggacgaaacgctaagagagggggaggtgatgttacgacaccaacactactaggcggacctga

SEQ ID NO: 6681 - DNA, 96 bp, Aspergillus thermomutatus
  misc_feature: 141
tataaggataaggataagaaggatagtaagggatagtgtaagggatagggttaaaaaagaggataagaaaagaaagaagaaaaggaaaagagagag

SEQ ID NO: 6682 - DNA, 96 bp, Aspergillus thermomutatus
  misc_feature: 141
actgcttcctactctctaaccatccctctatctcttctgctttccgtcctttctccttctaaactaactaacccttactctctcttttctttccta

SEQ ID NO: 6683 - DNA, 96 bp, Aspergillus thermomutatus
  misc_feature: 141
tagaatagcacgtagaatagcacgtagaatagcacgtcgaatagcatgtaggatgcacatagaatagcacgcggaggcaggcagataggcccacag

SEQ ID NO: 6684 - DNA, 96 bp, Aspergillus thermomutatus
  misc_feature: 141
tactgcttcctactctctaaccatccctctatctcttctgctttccgtcctttctccttctaaactaactaacccttactctctcttttctttcct

SEQ ID NO: 6685 - DNA, 96 bp, Aspergillus thermomutatus
  misc_feature: 141
taaggcaggcagagaggtaaggagataggtagagagggacccaagtagcaggccataaggcaggccatgagacacacagagaggtgtacacaaggc

SEQ ID NO: 6686 - DNA, 96 bp, Aspergillus thermomutatus
  misc_feature: 141
cctctttcctctctctttccttcctctttccttcctccttacctcccctttattccctctctccttcctctttacttcctccttacctccccttta

SEQ ID NO: 6687 - DNA, 96 bp, Aspergillus thermomutatus
  misc_feature: 141
caggagggagtccagccttataaggtgtttcgaggacgaaacgctaagagagggggaggtgatgttacgacaccaacactactaggcggacctgac

SEQ ID NO: 6688 - DNA, 96 bp, Aspergillus thermomutatus
  misc_feature: 141
atggatactggatgagcgtgagaaacgcgttggcagaggccgccgcaaggagtatctcgtcaaatggacaggttacgatcgtcctacgtgggaacc

SEQ ID NO: 6689 - DNA, 96 bp, Aspergillus thermomutatus
  misc_feature: 141
ggagggagtccagccttataaggtgtttcgaggacgaaacgctaagagagggggaggtgatgttacgacaccaacactactaggcggacctgacag

SEQ ID NO: 6690 - DNA, 96 bp, Aspergillus thermomutatus
  misc_feature: 141
gcctgtctgcctgtctgcctgtctctctacctcactgcctacctcatgtcggacctctctgtgggcctatctgcctgcctccgcgtgctattctat

SEQ ID NO: 6691 - DNA, 96 bp, Aspergillus thermomutatus
  misc_feature: 141
gaagatagtaagaaaaaggagagagggagtaaaggggaggtaaggaggaagtaaagaggaaggagagagggaataaaggggaggtaaggaggaagg

SEQ ID NO: 6692 - DNA, 96 bp, Aspergillus thermomutatus
  misc_feature: 141
ataaggataagaaggatagtaagggatagtgtaagggatagggttaaaaaagaggataagaaaagaaagaagaaaaggaaaagagagagagagaag

SEQ ID NO: 6693 - DNA, 96 bp, Aspergillus thermomutatus
  misc_feature: 141
ctgcctgtctgcctgtctgcctgtctctctacctcactgcctacctcatgtcggacctctctgtgggcctatctgcctgcctccgcgtgctattct

SEQ ID NO: 6694 - DNA, 96 bp, Aspergillus thermomutatus
  misc_feature: 141
aagaggagaggagaaggaaagaaaagagaaacagaggagggaaagaagggaagagatgagaagagaggagaaggaggagagaggccaagagaagag

SEQ ID NO: 6695 - DNA, 96 bp, Aspergillus thermomutatus
  misc_feature: 141
agaaatagaagattaaaggtaaagaggaagggatagagagaggattagagtaagggttggaatgaggattaggaagaggaagaggaatagggatag

SEQ ID NO: 6696 - DNA, 96 bp, Aspergillus thermomutatus
  misc_feature: 141
catcaagaatcagaagccgatatttcccaagtgtacgcgtcgcagtatgcttctcaaagactttatccaaccatggcaagccaagcccattattag

SEQ ID NO: 6697 - DNA, 96 bp, Aspergillus thermomutatus
  misc_feature: 141
cgattcttcagtacttacaaaatacttagattttgatcatattcagggacctggtagattagaacatcttaaatgtgatgttacttttactgcact

SEQ ID NO: 6698 - DNA, 96 bp, Aspergillus thermomutatus
  misc_feature: 141
aattacggagcagcgataaccaatcgatcaccagcaatacagctcctgcgcggcacggttaggattgctccacgaccgcctacttcggtcgcattg

SEQ ID NO: 6699 - DNA, 96 bp, Aspergillus thermomutatus
  misc_feature: 141
atcgtgaaaacagaccacaagaatctcacgttcttcacgaccacgaaagaattgacacgacgacaagccagatgggctgagacattgtcacagcat

SEQ ID NO: 6700 - DNA, 96 bp, Aspergillus thermomutatus
  misc_feature: 140
tttttcttctctctctttttcttctctctctttttcttctctctctttttcttctctctctctcttttccttttcttctttcttttcttatcctct

SEQ ID NO: 6701 - DNA, 96 bp, Aspergillus thermomutatus
  misc_feature: 140
ttttcttctctctctttttcttctctctctttttcttctctctctttttcttctctctctctcttttccttttcttctttcttttcttatcctctt

SEQ ID NO: 6702 - DNA, 96 bp, Aspergillus thermomutatus
  misc_feature: 140
tttctctttaccttctcacctcgttcccttctcattcttttctattcttgttcttttctctcttctcattctttcttgttctttaatttctcctct

SEQ ID NO: 6703 - DNA, 96 bp, Aspergillus thermomutatus
  misc_feature: 140
gtataaaagagaggaaagtaagagttaagaaaagaaagaagaaaaaaagagaagaagtaggatttaagaaaaggaaaatgataagagttggaagaa

SEQ ID NO: 6704 - DNA, 96 bp, Aspergillus thermomutatus
  misc_feature: 140
ttaaggcaggcagagaggtaaggagataggtagagagggacccaagtagcaggccataaggcaggccatgagacacacagagaggtgtacacaagg

SEQ ID NO: 6705 - DNA, 96 bp, Aspergillus thermomutatus
  misc_feature: 140
tatcttaagcatgtagtggctcaacagatcacccaggcagtgtctcaatggcatgatattcaccatgatagcagtgccatccagatcccacatgca

SEQ ID NO: 6706 - DNA, 96 bp, Aspergillus thermomutatus
  misc_feature: 140
agattaaaggtaaagaggaagggatagagagaggattagagtaagggttggaatgaggattaggaagaggaagaggaatagggatagaagtaaaga

SEQ ID NO: 6707 - DNA, 96 bp, Aspergillus thermomutatus
  misc_feature: 140
gaagaggagaggagaaggaaagaaaagagaaacagaggagggaaagaagggaagagatgagaagagaggagaaggaggagagaggccaagagaaga

SEQ ID NO: 6708 - DNA, 96 bp, Aspergillus thermomutatus
  misc_feature: 140
tcttaatttctcctcttttctccttcttattctcttcttattttcctcttgttcttattctcttctctttctctttgattctccctcttctctctt

SEQ ID NO: 6709 - DNA, 96 bp, Aspergillus thermomutatus
  misc_feature: 140
tctctttaccttctcacctcgttcccttctcattcttttctattcttgttcttttctctcttctcattctttcttgttctttaatttctcctcttc

SEQ ID NO: 6710 - DNA, 96 bp, Aspergillus thermomutatus
  misc_feature: 140
gaaatagaagattaaaggtaaagaggaagggatagagagaggattagagtaagggttggaatgaggattaggaagaggaagaggaatagggataga

SEQ ID NO: 6711 - DNA, 96 bp, Aspergillus thermomutatus
  misc_feature: 140
acgtgctaatctaggtggtgataccattttatctgtacaagaaggccagaatcgtgttcagcagcttgatatgccacttgttgagcaggttgatga

SEQ ID NO: 6712 - DNA, 96 bp, Aspergillus thermomutatus
  misc_feature: 140
taggataggaaaaaagaaaagatttagaaatagaagattaaaggtaaagaggaagggatagagagaggattagagtaagggttggaatgaggatta

SEQ ID NO: 6713 - DNA, 96 bp, Aspergillus thermomutatus
  misc_feature: 140
actgatctatcgaaggttcagttactaatccatgttttacgtctatactcattaaatttgtatttatctcctgaagtaatttctttaaataatcta

SEQ ID NO: 6714 - DNA, 96 bp, Aspergillus thermomutatus
  misc_feature: 140
caggtaggtagaatggtagggagtaaggcaccgtataagcaccaaatcagatagagagatatagagagaggtatccaagaggtagatatagtagta

SEQ ID NO: 6715 - DNA, 96 bp, Aspergillus thermomutatus
  misc_feature: 140
gtatgtagatgagattccgcaaatataccaaccctctgtcatccatggtaaggttttcattgtctgctgagttttcgagcatttcttggatgattt

SEQ ID NO: 6716 - DNA, 96 bp, Aspergillus thermomutatus
  misc_feature: 140
ctcaatgatgtgtagtctgccgtgctgcctaacatgcctgctgccatcctagatggcggaaacccatcatggtttggtattaggtgatccaccacc

SEQ ID NO: 6717 - DNA, 96 bp, Aspergillus thermomutatus
  misc_feature: 140
ggcctgctcccaggcctgcatcacctcatcgaccgcagcctggacatggtgggtcgatggggccggtggacacccgtctggaacgcgaatatggat

SEQ ID NO: 6718 - DNA, 96 bp, Aspergillus thermomutatus
  misc_feature: 140
ctttctctttaccttctcacctcgttcccttctcattcttttctattcttgttcttttctctcttctcattctttcttgttctttaatttctcctc

SEQ ID NO: 6719 - DNA, 96 bp, Aspergillus thermomutatus
  misc_feature: 140
aatagaagattaaaggtaaagaggaagggatagagagaggattagagtaagggttggaatgaggattaggaagaggaagaggaatagggatagaag

SEQ ID NO: 6720 - DNA, 96 bp, Aspergillus thermomutatus
  misc_feature: 140
agtcgatgagagtagagaagatgagatgatataagggaaagagaagattaaagcgaagagagtgaaggaagggatgttgatggacagtgtgataag

SEQ ID NO: 6721 - DNA, 96 bp, Aspergillus thermomutatus
  misc_feature: 140
cgtgctaatctaggtggtgataccattttatctgtacaagaaggccagaatcgtgttcagcagcttgatatgccacttgttgagcaggttgatgag

SEQ ID NO: 6722 - DNA, 96 bp, Aspergillus thermomutatus
  misc_feature: 140
aggtaggtagaatggtagggagtaaggcaccgtataagcaccaaatcagatagagagatatagagagaggtatccaagaggtagatatagtagtag

SEQ ID NO: 6723 - DNA, 96 bp, Aspergillus thermomutatus
  misc_feature: 140
cgaatatgaggttgaatggatactggatgagcgtgagaaacgcgttggcagaggccgccgcaaggagtatctcgtcaaatggacaggttacgatcg

SEQ ID NO: 6724 - DNA, 96 bp, Aspergillus thermomutatus
  misc_feature: 140
catccttatccctaatccttatactaaccttactcctattcttcttccaactcttatcattttccttttcttaaatcctacttcttctcttttttt

SEQ ID NO: 6725 - DNA, 96 bp, Aspergillus thermomutatus
  misc_feature: 140
cagagtctcattctgtcgctctaatcgttgaatatgctcctggagctgttcaatcatgcccatcagaccctctgctgtgatctgaggctgcgcagt

SEQ ID NO: 6726 - DNA, 96 bp, Aspergillus thermomutatus
  misc_feature: 140
aaaagagaggaaagtaagagttaagaaaagaaagaagaaaaaaagagaagaagtaggatttaagaaaaggaaaatgataagagttggaagaagaat

SEQ ID NO: 6727 - DNA, 96 bp, Aspergillus thermomutatus
  misc_feature: 140
attacggagcagcgataaccaatcgatcaccagcaatacagctcctgcgcggcacggttaggattgctccacgaccgcctacttcggtcgcattgt

SEQ ID NO: 6728 - DNA, 96 bp, Aspergillus thermomutatus
  misc_feature: 140
actttctctttaccttctcacctcgttcccttctcattcttttctattcttgttcttttctctcttctcattctttcttgttctttaatttctcct

SEQ ID NO: 6729 - DNA, 96 bp, Aspergillus thermomutatus
  misc_feature: 139
aggtttaacatctaaattcgtatttaattatagatgtaattaaactagtccttacccttaaaagaaaggacaaggagacagggaaggacaaggcaa

SEQ ID NO: 6730 - DNA, 96 bp, Aspergillus thermomutatus
  misc_feature: 139
aagaagaggagaggagaaggaaagaaaagagaaacagaggagggaaagaagggaagagatgagaagagaggagaaggaggagagaggccaagagaa

SEQ ID NO: 6731 - DNA, 96 bp, Aspergillus thermomutatus
  misc_feature: 139
gaggtagggagagaggtaggcgaagaggtaggcgacgaggtaggcgacgaggtaggtgaagaggtaggtgaagaggtaggtgaagaggtaggtgaa

SEQ ID NO: 6732 - DNA, 96 bp, Aspergillus thermomutatus
  misc_feature: 139
ttagaggaagagttagggagagtgtttaaggattaaaagaaagagtagagtaagggataggttaagagaggtaaagaggggtaagtaaggaatagg

SEQ ID NO: 6733 - DNA, 96 bp, Aspergillus thermomutatus
  misc_feature: 139
ttactttctctttaccttctcacctcgttcccttctcattcttttctattcttgttcttttctctcttctcattctttcttgttctttaatttctc

SEQ ID NO: 6734 - DNA, 96 bp, Aspergillus thermomutatus
  misc_feature: 139
gcattgggtcatcgtggtgtttcgcgatgatttcggttctcatacactcaggtatgtagatgagattccgcaaatataccaaccctctgtcatcca

SEQ ID NO: 6735 - DNA, 96 bp, Aspergillus thermomutatus
  misc_feature: 139
tgctttcgcattgatttgatggtagcagctaggtagtggcattgagtttgacctcgcaggcagagcaggccattcgagtgacatggtaatataggc

SEQ ID NO: 6736 - DNA, 96 bp, Aspergillus thermomutatus
  misc_feature: 139
ataaaagagaggaaagtaagagttaagaaaagaaagaagaaaaaaagagaagaagtaggatttaagaaaaggaaaatgataagagttggaagaaga

SEQ ID NO: 6737 - DNA, 96 bp, Aspergillus thermomutatus
  misc_feature: 139
gtataaggataaggataagaaggatagtaagggatagtgtaagggatagggttaaaaaagaggataagaaaagaaagaagaaaaggaaaagagaga

SEQ ID NO: 6738 - DNA, 96 bp, Aspergillus thermomutatus
  misc_feature: 139
ggatagaagaatcaaagaagttgaggagaaaggaagggaggaaatattaagagagaagaagaaaaggagggagggatagtttattttaagaataga

SEQ ID NO: 6739 - DNA, 96 bp, Aspergillus thermomutatus
  misc_feature: 139
tctatcgaaggttcagttactaatccatgttttacgtctatactcattaaatttgtatttatctcctgaagtaatttctttaaataatctaaatgc

SEQ ID NO: 6740 - DNA, 96 bp, Aspergillus thermomutatus
  misc_feature: 139
tcgagcatttcttggatgattttgtccctttttgttgcttcaataattttttgaatcagtggatcctctgtcagttcgattgtggctgcaagtact

SEQ ID NO: 6741 - DNA, 96 bp, Aspergillus thermomutatus
  misc_feature: 139
aatacgtgctaatctaggtggtgataccattttatctgtacaagaaggccagaatcgtgttcagcagcttgatatgccacttgttgagcaggttga

SEQ ID NO: 6742 - DNA, 96 bp, Aspergillus thermomutatus
  misc_feature: 139
aaagagaggaaagtaagagttaagaaaagaaagaagaaaaaaagagaagaagtaggatttaagaaaaggaaaatgataagagttggaagaagaata

SEQ ID NO: 6743 - DNA, 96 bp, Aspergillus thermomutatus
  misc_feature: 139
tataaaagagaggaaagtaagagttaagaaaagaaagaagaaaaaaagagaagaagtaggatttaagaaaaggaaaatgataagagttggaagaag

SEQ ID NO: 6744 - DNA, 96 bp, Aspergillus thermomutatus
  misc_feature: 139
tagatggtatacaactaccagcaacaactaccatgtaatggtagtccgaatggtagacgaggaaggaactatataaagacactcattatcactgta

SEQ ID NO: 6745 - DNA, 96 bp, Aspergillus thermomutatus
  misc_feature: 139
ggtgccttactccctaccattctacctacctgtctgcctgcctctctatcttcctctctatctacctctctattcacctctctattcacctctcta

SEQ ID NO: 6746 - DNA, 96 bp, Aspergillus thermomutatus
  misc_feature: 139
tactttctctttaccttctcacctcgttcccttctcattcttttctattcttgttcttttctctcttctcattctttcttgttctttaatttctcc

SEQ ID NO: 6747 - DNA, 96 bp, Aspergillus thermomutatus
  misc_feature: 139
aaagagaggataaaaagtgaagtaaagagtagaagaaggagtaaagtaaatagtaaaagaaggagtagagagagagttaggagaaggagtagagta

SEQ ID NO: 6748 - DNA, 96 bp, Aspergillus thermomutatus
  misc_feature: 139
catgaggcatatttggaaagaatagataaatttccccctaaaccttcacctaatagagatattagtatacctaatttactaaataagcctaaatta

SEQ ID NO: 6749 - DNA, 96 bp, Aspergillus thermomutatus
  misc_feature: 139
gtctgccttactgcctctctccctgtcttacatggtgccttcctccctaccttatattatacattcttcgctacctcacgcggtgcatctctgggg

SEQ ID NO: 6750 - DNA, 96 bp, Aspergillus thermomutatus
  misc_feature: 139
gtagatggtatacaactaccagcaacaactaccatgtaatggtagtccgaatggtagacgaggaaggaactatataaagacactcattatcactgt

SEQ ID NO: 6751 - DNA, 96 bp, Aspergillus thermomutatus
  misc_feature: 139
ggttgaatggatactggatgagcgtgagaaacgcgttggcagaggccgccgcaaggagtatctcgtcaaatggacaggttacgatcgtcctacgtg

SEQ ID NO: 6752 - DNA, 96 bp, Aspergillus thermomutatus
  misc_feature: 139
ggtatgtagatgagattccgcaaatataccaaccctctgtcatccatggtaaggttttcattgtctgctgagttttcgagcatttcttggatgatt

SEQ ID NO: 6753 - DNA, 96 bp, Aspergillus thermomutatus
  misc_feature: 139
ctcgggtttatcattgaagctggcaagggcgtacgcatggaccccgacaaggtaaaagctatactagaatggcagacccctacatccactcgaggc

SEQ ID NO: 6754 - DNA, 96 bp, Aspergillus thermomutatus
  misc_feature: 139
ataacgtaatccacaagcgagcgggccacccaagcgagcgggccacctcccacatcttttcggtcgcggatgaaacatgaaggcaatttacaactc

SEQ ID NO: 6755 - DNA, 96 bp, Aspergillus thermomutatus
  misc_feature: 139
gagtaaaggggaggtaaggaggaagtaaagaggaaggagagagggaataaaggggaggtaaggaggaaggaaagaggaaggaaagagagaggaaag

SEQ ID NO: 6756 - DNA, 96 bp, Aspergillus thermomutatus
  misc_feature: 139
ccctttcatttctttcgttctattttctcttctctctctttctatccttcttttccaccctcctccttttacaacctataatttctactaaccctc

SEQ ID NO: 6757 - DNA, 96 bp, Aspergillus thermomutatus
  misc_feature: 139
gagggagtccagccttataaggtgtttcgaggacgaaacgctaagagagggggaggtgatgttacgacaccaacactactaggcggacctgacagg

SEQ ID NO: 6758 - DNA, 96 bp, Aspergillus thermomutatus
  misc_feature: 139
ctttttcttctctctctttttcttctctctctttttcttctctctctttttcttctctctctctcttttccttttcttctttcttttcttatcctc

SEQ ID NO: 6759 - DNA, 96 bp, Aspergillus thermomutatus
  misc_feature: 139
ccatctctttttcttctcattctcttctcttcttgttcccttctctccttatcctcttcccgttttctcctcgttgtctcttctcattctcctctc

SEQ ID NO: 6760 - DNA, 96 bp, Aspergillus thermomutatus
  misc_feature: 139
ctttcgcattgatttgatggtagcagctaggtagtggcattgagtttgacctcgcaggcagagcaggccattcgagtgacatggtaatataggcag

SEQ ID NO: 6761 - DNA, 96 bp, Aspergillus thermomutatus
  misc_feature: 139
agaagaggagaggagaaggaaagaaaagagaaacagaggagggaaagaagggaagagatgagaagagaggagaaggaggagagaggccaagagaag

SEQ ID NO: 6762 - DNA, 96 bp, Aspergillus thermomutatus
  misc_feature: 139
aggtagggagagaggtaggcgaagaggtaggcgacgaggtaggcgacgaggtaggtgaagaggtaggtgaagaggtaggtgaagaggtaggtgaag

SEQ ID NO: 6763 - DNA, 96 bp, Aspergillus thermomutatus
  misc_feature: 139
ctgcctgtctgcctgtctctctacctcactgcctacctcatgtcggacctctctgtgggcctatctgcctgcctccgcgtgctattctatgtgcat

SEQ ID NO: 6764 - DNA, 96 bp, Aspergillus thermomutatus
  misc_feature: 139
ctattaggtgaaggtttagggggaaatttatctattctttccaaatatgcctcatgagtatttttacattctttccaaatatgcctcatgagtatt

SEQ ID NO: 6765 - DNA, 96 bp, Aspergillus thermomutatus
  misc_feature: 139
aggataggaaaaaagaaaagatttagaaatagaagattaaaggtaaagaggaagggatagagagaggattagagtaagggttggaatgaggattag

SEQ ID NO: 6766 - DNA, 96 bp, Aspergillus thermomutatus
  misc_feature: 139
atgctttcgcattgatttgatggtagcagctaggtagtggcattgagtttgacctcgcaggcagagcaggccattcgagtgacatggtaatatagg

SEQ ID NO: 6767 - DNA, 96 bp, Aspergillus thermomutatus
  misc_feature: 139
ccctactatcttcggttcctcaccccctaccatactacctacctcctgcagtacctctcttgctacctctcttgctacctctcttgctacctctct

SEQ ID NO: 6768 - DNA, 96 bp, Aspergillus thermomutatus
  misc_feature: 139
atgaggcatatttggaaagaatagataaatttccccctaaaccttcacctaatagagatattagtatacctaatttactaaataagcctaaattat

SEQ ID NO: 6769 - DNA, 96 bp, Aspergillus thermomutatus
  misc_feature: 139
ataggataggaaaaaagaaaagatttagaaatagaagattaaaggtaaagaggaagggatagagagaggattagagtaagggttggaatgaggatt

SEQ ID NO: 6770 - DNA, 96 bp, Aspergillus thermomutatus
  misc_feature: 139
agatggtatacaactaccagcaacaactaccatgtaatggtagtccgaatggtagacgaggaaggaactatataaagacactcattatcactgtat

SEQ ID NO: 6771 - DNA, 96 bp, Aspergillus thermomutatus
  misc_feature: 138
aggataagaaggatagtaagggatagtgtaagggatagggttaaaaaagaggataagaaaagaaagaagaaaaggaaaagagagagagagaagaaa

SEQ ID NO: 6772 - DNA, 96 bp, Aspergillus thermomutatus
  misc_feature: 138
aaggataagaaggatagtaagggatagtgtaagggatagggttaaaaaagaggataagaaaagaaagaagaaaaggaaaagagagagagagaagaa

SEQ ID NO: 6773 - DNA, 96 bp, Aspergillus thermomutatus
  misc_feature: 138
ttctctttaccttctcacctcgttcccttctcattcttttctattcttgttcttttctctcttctcattctttcttgttctttaatttctcctctt

SEQ ID NO: 6774 - DNA, 96 bp, Aspergillus thermomutatus
  misc_feature: 138
ttctacgtgctattctacgtgctattctacatgctattcgacgtgctattctatgtgctattcaacctgccgttctgcctgccgttctgcctactg

SEQ ID NO: 6775 - DNA, 96 bp, Aspergillus thermomutatus
  misc_feature: 138
gaatggatactggatgagcgtgagaaacgcgttggcagaggccgccgcaaggagtatctcgtcaaatggacaggttacgatcgtcctacgtgggaa

SEQ ID NO: 6776 - DNA, 96 bp, Aspergillus thermomutatus
  misc_feature: 138
gggttaaggcaggcagagaggtaaggagataggtagagagggacccaagtagcaggccataaggcaggccatgagacacacagagaggtgtacaca

SEQ ID NO: 6777 - DNA, 96 bp, Aspergillus thermomutatus
  misc_feature: 138
tctttcctctctctttccttcctctttccttcctccttacctcccctttattccctctctccttcctctttacttcctccttacctcccctttact

SEQ ID NO: 6778 - DNA, 96 bp, Aspergillus thermomutatus
  misc_feature: 138
gagaataagtaagggttaaagggaatttaaagtaggaaagaaaagagagagtaagggttagttagtttagaaggagaaaggacggaaagcagaaga

SEQ ID NO: 6779 - DNA, 96 bp, Aspergillus thermomutatus
  misc_feature: 138
taaggataagaaggatagtaagggatagtgtaagggatagggttaaaaaagaggataagaaaagaaagaagaaaaggaaaagagagagagagaaga

SEQ ID NO: 6780 - DNA, 96 bp, Aspergillus thermomutatus
  misc_feature: 138
tctcatccttatccctaatccttatactaaccttactcctattcttcttccaactcttatcattttccttttcttaaatcctacttcttctctttt

SEQ ID NO: 6781 - DNA, 96 bp, Aspergillus thermomutatus
  misc_feature: 138
tcctttctattcttaaaataaactatccctccctccttttcttcttctctcttaatatttcctcccttcctttctcctcaacttctttgattcttc

SEQ ID NO: 6782 - DNA, 96 bp, Aspergillus thermomutatus
  misc_feature: 138
aagatagtaagaaaaaggagagagggagtaaaggggaggtaaggaggaagtaaagaggaaggagagagggaataaaggggaggtaaggaggaagga

SEQ ID NO: 6783 - DNA, 96 bp, Aspergillus thermomutatus
  misc_feature: 138
tagaggaagagttagggagagtgtttaaggattaaaagaaagagtagagtaagggataggttaagagaggtaaagaggggtaagtaaggaatagga

SEQ ID NO: 6784 - DNA, 96 bp, Aspergillus thermomutatus
  misc_feature: 138
tcatccttatccctaatccttatactaaccttactcctattcttcttccaactcttatcattttccttttcttaaatcctacttcttctctttttt

SEQ ID NO: 6785 - DNA, 96 bp, Aspergillus thermomutatus
  misc_feature: 138
tataccaaccctctgtcatccatggtaaggttttcattgtctgctgagttttcgagcatttcttggatgattttgtccctttttgttgcttcaata

SEQ ID NO: 6786 - DNA, 96 bp, Aspergillus thermomutatus
  misc_feature: 138
tatgtagatgagattccgcaaatataccaaccctctgtcatccatggtaaggttttcattgtctgctgagttttcgagcatttcttggatgatttt

SEQ ID NO: 6787 - DNA, 96 bp, Aspergillus thermomutatus
  misc_feature: 138
agagtctcattctgtcgctctaatcgttgaatatgctcctggagctgttcaatcatgcccatcagaccctctgctgtgatctgaggctgcgcagta

SEQ ID NO: 6788 - DNA, 96 bp, Aspergillus thermomutatus
  misc_feature: 138
tacgtgctaatctaggtggtgataccattttatctgtacaagaaggccagaatcgtgttcagcagcttgatatgccacttgttgagcaggttgatg

SEQ ID NO: 6789 - DNA, 96 bp, Aspergillus thermomutatus
  misc_feature: 138
gttgaatggatactggatgagcgtgagaaacgcgttggcagaggccgccgcaaggagtatctcgtcaaatggacaggttacgatcgtcctacgtgg

SEQ ID NO: 6790 - DNA, 96 bp, Aspergillus thermomutatus
  misc_feature: 138
agggttaaggcaggcagagaggtaaggagataggtagagagggacccaagtagcaggccataaggcaggccatgagacacacagagaggtgtacac

SEQ ID NO: 6791 - DNA, 96 bp, Aspergillus thermomutatus
  misc_feature: 138
cgcattgatttgatggtagcagctaggtagtggcattgagtttgacctcgcaggcagagcaggccattcgagtgacatggtaatataggcagaggc

SEQ ID NO: 6792 - DNA, 96 bp, Aspergillus thermomutatus
  misc_feature: 138
cagaaaaggacaaggtgacaggaaagaacaaaatgacaggaggagcaaggtagagaggtagaggttaatttttaatagtattagaaatgttatatc

SEQ ID NO: 6793 - DNA, 96 bp, Aspergillus thermomutatus
  misc_feature: 138
gataggataggaaaaaagaaaagatttagaaatagaagattaaaggtaaagaggaagggatagagagaggattagagtaagggttggaatgaggat

SEQ ID NO: 6794 - DNA, 96 bp, Aspergillus thermomutatus
  misc_feature: 138
gagtagagtaagggttaggaggaggattagagggagggatagaaagaggattagagggaggattagaaagaggattagagggaggattagagggag

SEQ ID NO: 6795 - DNA, 96 bp, Aspergillus thermomutatus
  misc_feature: 138
ctcctataattccccttattcttcctttctgatccattattccttcctttttccttttgaaatccttctatctttctttccaccttccttctcttc

SEQ ID NO: 6796 - DNA, 96 bp, Aspergillus thermomutatus
  misc_feature: 138
agaggaaagtaagagttaagaaaagaaagaagaaaaaaagagaagaagtaggatttaagaaaaggaaaatgataagagttggaagaagaataggag

SEQ ID NO: 6797 - DNA, 96 bp, Aspergillus thermomutatus
  misc_feature: 138
ctcatccttatccctaatccttatactaaccttactcctattcttcttccaactcttatcattttccttttcttaaatcctacttcttctcttttt

SEQ ID NO: 6798 - DNA, 96 bp, Aspergillus thermomutatus
  misc_feature: 138
cggagcagcgataaccaatcgatcaccagcaatacagctcctgcgcggcacggttaggattgctccacgaccgcctacttcggtcgcattgtcacg

SEQ ID NO: 6799 - DNA, 96 bp, Aspergillus thermomutatus
  misc_feature: 138
atcctttctattcttaaaataaactatccctccctccttttcttcttctctcttaatatttcctcccttcctttctcctcaacttctttgattctt

SEQ ID NO: 6800 - DNA, 96 bp, Aspergillus thermomutatus
  misc_feature: 138
atacgtgctaatctaggtggtgataccattttatctgtacaagaaggccagaatcgtgttcagcagcttgatatgccacttgttgagcaggttgat

SEQ ID NO: 6801 - DNA, 96 bp, Aspergillus thermomutatus
  misc_feature: 138
atactggatgagcgtgagaaacgcgttggcagaggccgccgcaaggagtatctcgtcaaatggacaggttacgatcgtcctacgtgggaaccagct

SEQ ID NO: 6802 - DNA, 96 bp, Aspergillus thermomutatus
  misc_feature: 138
accatctctttttcttctcattctcttctcttcttgttcccttctctccttatcctcttcccgttttctcctcgttgtctcttctcattctcctct

SEQ ID NO: 6803 - DNA, 96 bp, Aspergillus thermomutatus
  misc_feature: 137
tttcgcattgatttgatggtagcagctaggtagtggcattgagtttgacctcgcaggcagagcaggccattcgagtgacatggtaatataggcaga

SEQ ID NO: 6804 - DNA, 96 bp, Aspergillus thermomutatus
  misc_feature: 137
tgatctatcgaaggttcagttactaatccatgttttacgtctatactcattaaatttgtatttatctcctgaagtaatttctttaaataatctaaa

SEQ ID NO: 6805 - DNA, 96 bp, Aspergillus thermomutatus
  misc_feature: 137
ggcatatttggaaagaatagataaatttccccctaaaccttcacctaatagagatattagtatacctaatttactaaataagcctaaattattaaa

SEQ ID NO: 6806 - DNA, 96 bp, Aspergillus thermomutatus
  misc_feature: 137
ttgaatggatactggatgagcgtgagaaacgcgttggcagaggccgccgcaaggagtatctcgtcaaatggacaggttacgatcgtcctacgtggg

SEQ ID NO: 6807 - DNA, 96 bp, Aspergillus thermomutatus
  misc_feature: 137
ttccctttcatttctttcgttctattttctcttctctctctttctatccttcttttccaccctcctccttttacaacctataatttctactaaccc

SEQ ID NO: 6808 - DNA, 96 bp, Aspergillus thermomutatus
  misc_feature: 137
ctgatctatcgaaggttcagttactaatccatgttttacgtctatactcattaaatttgtatttatctcctgaagtaatttctttaaataatctaa

SEQ ID NO: 6809 - DNA, 96 bp, Aspergillus thermomutatus
  misc_feature: 137
ttactctcatccttatccctaatccttatactaaccttactcctattcttcttccaactcttatcattttccttttcttaaatcctacttcttctc

SEQ ID NO: 6810 - DNA, 96 bp, Aspergillus thermomutatus
  misc_feature: 137
ggaaagtaagagttaagaaaagaaagaagaaaaaaagagaagaagtaggatttaagaaaaggaaaatgataagagttggaagaagaataggagtaa

SEQ ID NO: 6811 - DNA, 96 bp, Aspergillus thermomutatus
  misc_feature: 137
aggcatatttggaaagaatagataaatttccccctaaaccttcacctaatagagatattagtatacctaatttactaaataagcctaaattattaa

SEQ ID NO: 6812 - DNA, 96 bp, Aspergillus thermomutatus
  misc_feature: 137
tggatactggatgagcgtgagaaacgcgttggcagaggccgccgcaaggagtatctcgtcaaatggacaggttacgatcgtcctacgtgggaacca

SEQ ID NO: 6813 - DNA, 96 bp, Aspergillus thermomutatus
  misc_feature: 137
tgataaggtaagggttatttagtttattaagagagagggaaggaattgagaagagaataaggtgaataaggagagaggagaagagaggagatgaga

SEQ ID NO: 6814 - DNA, 96 bp, Aspergillus thermomutatus
  misc_feature: 137
cctttcatttctttcgttctattttctcttctctctctttctatccttcttttccaccctcctccttttacaacctataatttctactaaccctca

SEQ ID NO: 6815 - DNA, 96 bp, Aspergillus thermomutatus
  misc_feature: 137
tctttttcttctctctctttttcttctctctctttttcttctctctctttttcttctctctctctcttttccttttcttctttcttttcttatcct

SEQ ID NO: 6816 - DNA, 96 bp, Aspergillus thermomutatus
  misc_feature: 137
ggtataaaagagaggaaagtaagagttaagaaaagaaagaagaaaaaaagagaagaagtaggatttaagaaaaggaaaatgataagagttggaaga

SEQ ID NO: 6817 - DNA, 96 bp, Aspergillus thermomutatus
  misc_feature: 137
tctggtataaccaccctaacttataatatatattaatacctactatgcctcactgcctacctcctggggttcctctatgcctactcttggtctgcc

SEQ ID NO: 6818 - DNA, 96 bp, Aspergillus thermomutatus
  misc_feature: 137
aatagcacgtagaatagcacgtagaatagcacgtcgaatagcatgtaggatgcacatagaatagcacgcggaggcaggcagataggcccacagaga

SEQ ID NO: 6819 - DNA, 96 bp, Aspergillus thermomutatus
  misc_feature: 137
tctctggtataaccaccctaacttataatatatattaatacctactatgcctcactgcctacctcctggggttcctctatgcctactcttggtctg

SEQ ID NO: 6820 - DNA, 96 bp, Aspergillus thermomutatus
  misc_feature: 137
ataaggataaggataagaaggatagtaagggatagtgtaagggatagggttaaaaaagaggataagaaaagaaagaagaaaaggaaaagagagaga

SEQ ID NO: 6821 - DNA, 96 bp, Aspergillus thermomutatus
  misc_feature: 137
tcgcattgatttgatggtagcagctaggtagtggcattgagtttgacctcgcaggcagagcaggccattcgagtgacatggtaatataggcagagg

SEQ ID NO: 6822 - DNA, 96 bp, Aspergillus thermomutatus
  misc_feature: 137
tcgaaggttcagttactaatccatgttttacgtctatactcattaaatttgtatttatctcctgaagtaatttctttaaataatctaaatgcttac

SEQ ID NO: 6823 - DNA, 96 bp, Aspergillus thermomutatus
  misc_feature: 137
aggaagagttagggagagtgtttaaggattaaaagaaagagtagagtaagggataggttaagagaggtaaagaggggtaagtaaggaataggagga

SEQ ID NO: 6824 - DNA, 96 bp, Aspergillus thermomutatus
  misc_feature: 137
tccctttcatttctttcgttctattttctcttctctctctttctatccttcttttccaccctcctccttttacaacctataatttctactaaccct

SEQ ID NO: 6825 - DNA, 96 bp, Aspergillus thermomutatus
  misc_feature: 137
agagtagaagaaggagtaaagtaaatagtaaaagaaggagtagagagagagttaggagaaggagtagagtaagggttaggaggaggattagaggga

SEQ ID NO: 6826 - DNA, 96 bp, Aspergillus thermomutatus
  misc_feature: 137
ctctcatccttactctcatccttatccctaatccttatactaaccttactcctattcttcttccaactcttatcattttccttttcttaaatccta

SEQ ID NO: 6827 - DNA, 96 bp, Aspergillus thermomutatus
  misc_feature: 137
atcgaaggttcagttactaatccatgttttacgtctatactcattaaatttgtatttatctcctgaagtaatttctttaaataatctaaatgctta

SEQ ID NO: 6828 - DNA, 96 bp, Aspergillus thermomutatus
  misc_feature: 137
gcatatttggaaagaatagataaatttccccctaaaccttcacctaatagagatattagtatacctaatttactaaataagcctaaattattaaac

SEQ ID NO: 6829 - DNA, 96 bp, Aspergillus thermomutatus
  misc_feature: 137
gtggactatctgccaatgctttcgcattgatttgatggtagcagctaggtagtggcattgagtttgacctcgcaggcagagcaggccattcgagtg

SEQ ID NO: 6830 - DNA, 96 bp, Aspergillus thermomutatus
  misc_feature: 137
gtgataaggtaagggttatttagtttattaagagagagggaaggaattgagaagagaataaggtgaataaggagagaggagaagagaggagatgag

SEQ ID NO: 6831 - DNA, 96 bp, Aspergillus thermomutatus
  misc_feature: 137
ggtggactatctgccaatgctttcgcattgatttgatggtagcagctaggtagtggcattgagtttgacctcgcaggcagagcaggccattcgagt

SEQ ID NO: 6832 - DNA, 96 bp, Aspergillus thermomutatus
  misc_feature: 137
ggggtgcctcacgcggtgcattgctccatacctcctatggtgcctctctacctatctccctacctcttcacctacctcttcacctacctcttcacc

SEQ ID NO: 6833 - DNA, 96 bp, Aspergillus thermomutatus
  misc_feature: 137
gctggttcccacgtaggacgatcgtaacctgtccatttgacgagatactccttgcggcggcctctgccaacgcgtttctcacgctcatccagtatc

SEQ ID NO: 6834 - DNA, 96 bp, Aspergillus thermomutatus
  misc_feature: 137
ctctggtataaccaccctaacttataatatatattaatacctactatgcctcactgcctacctcctggggttcctctatgcctactcttggtctgc

SEQ ID NO: 6835 - DNA, 96 bp, Aspergillus thermomutatus
  misc_feature: 137
gattaaaggtaaagaggaagggatagagagaggattagagtaagggttggaatgaggattaggaagaggaagaggaatagggatagaagtaaagag

SEQ ID NO: 6836 - DNA, 96 bp, Aspergillus thermomutatus
  misc_feature: 137
gaggaagagttagggagagtgtttaaggattaaaagaaagagtagagtaagggataggttaagagaggtaaagaggggtaagtaaggaataggagg

SEQ ID NO: 6837 - DNA, 96 bp, Aspergillus thermomutatus
  misc_feature: 137
gagcagcgataaccaatcgatcaccagcaatacagctcctgcgcggcacggttaggattgctccacgaccgcctacttcggtcgcattgtcacgtg

SEQ ID NO: 6838 - DNA, 96 bp, Aspergillus thermomutatus
  misc_feature: 137
gagagatatataaagaaggttgaagattagaagggaggatgttaagagaataaagaaatgcaagaaaggaggaagagggagtgagaaagagagagg

SEQ ID NO: 6839 - DNA, 96 bp, Aspergillus thermomutatus
  misc_feature: 137
catccttactctcatccttatccctaatccttatactaaccttactcctattcttcttccaactcttatcattttccttttcttaaatcctacttc

SEQ ID NO: 6840 - DNA, 96 bp, Aspergillus thermomutatus
  misc_feature: 137
ccttactctcatccttatccctaatccttatactaaccttactcctattcttcttccaactcttatcattttccttttcttaaatcctacttcttc

SEQ ID NO: 6841 - DNA, 96 bp, Aspergillus thermomutatus
  misc_feature: 137
cttactctcatccttatccctaatccttatactaaccttactcctattcttcttccaactcttatcattttccttttcttaaatcctacttcttct

SEQ ID NO: 6842 - DNA, 96 bp, Aspergillus thermomutatus
  misc_feature: 137
cttactctcatccttactctcatccttatccctaatccttatactaaccttactcctattcttcttccaactcttatcattttccttttcttaaat

SEQ ID NO: 6843 - DNA, 96 bp, Aspergillus thermomutatus
  misc_feature: 137
agaataagtaagggttaaagggaatttaaagtaggaaagaaaagagagagtaagggttagttagtttagaaggagaaaggacggaaagcagaagag

SEQ ID NO: 6844 - DNA, 96 bp, Aspergillus thermomutatus
  misc_feature: 137
agaggaagagttagggagagtgtttaaggattaaaagaaagagtagagtaagggataggttaagagaggtaaagaggggtaagtaaggaataggag

SEQ ID NO: 6845 - DNA, 96 bp, Aspergillus thermomutatus
  misc_feature: 137
cgtggtgtttcgcgatgatttcggttctcatacactcaggtatgtagatgagattccgcaaatataccaaccctctgtcatccatggtaaggtttt

SEQ ID NO: 6846 - DNA, 96 bp, Aspergillus thermomutatus
  misc_feature: 137
cgagcatttcttggatgattttgtccctttttgttgcttcaataattttttgaatcagtggatcctctgtcagttcgattgtggctgcaagtactt

SEQ ID NO: 6847 - DNA, 96 bp, Aspergillus thermomutatus
  misc_feature: 137
cccttactctactccttctcctaactctctctctactccttcttttactatttactttactccttcttctactctttacttcactttttatcctct

SEQ ID NO: 6848 - DNA, 96 bp, Aspergillus thermomutatus
  misc_feature: 137
attagaggatagggagagagaagggaagagaagaaagaaaggagataagatttaagaatgaagatagtaagaaaaaggagagagggagtaaagggg

SEQ ID NO: 6849 - DNA, 96 bp, Aspergillus thermomutatus
  misc_feature: 137
accaggagggagtccagccttataaggtgtttcgaggacgaaacgctaagagagggggaggtgatgttacgacaccaacactactaggcggacctg

SEQ ID NO: 6850 - DNA, 96 bp, Aspergillus thermomutatus
  misc_feature: 137
caaaccttctgctacaacaagaaatcagggttctacgggcagagaatgaacggaaaagaaagaagaaggcaagaatacgtgctaatctaggtggtg

SEQ ID NO: 6851 - DNA, 96 bp, Aspergillus thermomutatus
  misc_feature: 137
actatctgccaatgctttcgcattgatttgatggtagcagctaggtagtggcattgagtttgacctcgcaggcagagcaggccattcgagtgacat

SEQ ID NO: 6852 - DNA, 96 bp, Aspergillus thermomutatus
  misc_feature: 137
atctctggtataaccaccctaacttataatatatattaatacctactatgcctcactgcctacctcctggggttcctctatgcctactcttggtct

SEQ ID NO: 6853 - DNA, 96 bp, Aspergillus thermomutatus
  misc_feature: 137
atccttactctcatccttatccctaatccttatactaaccttactcctattcttcttccaactcttatcattttccttttcttaaatcctacttct

SEQ ID NO: 6854 - DNA, 96 bp, Aspergillus thermomutatus
  misc_feature: 137
aacccctacttatttactgcttcctactctctaaccatccctctatctcttctgctttccgtcctttctccttctaaactaactaacccttactct

SEQ ID NO: 6855 - DNA, 96 bp, Aspergillus thermomutatus
  misc_feature: 136
gcgataaccaatcgatcaccagcaatacagctcctgcgcggcacggttaggattgctccacgaccgcctacttcggtcgcattgtcacgtgaccaa

SEQ ID NO: 6856 - DNA, 96 bp, Aspergillus thermomutatus
  misc_feature: 136
ttcgcattgatttgatggtagcagctaggtagtggcattgagtttgacctcgcaggcagagcaggccattcgagtgacatggtaatataggcagag

SEQ ID NO: 6857 - DNA, 96 bp, Aspergillus thermomutatus
  misc_feature: 136
gatgagagtagagaagatgagatgatataagggaaagagaagattaaagcgaagagagtgaaggaagggatgttgatggacagtgtgataaggtaa

SEQ ID NO: 6858 - DNA, 96 bp, Aspergillus thermomutatus
  misc_feature: 136
tggactatctgccaatgctttcgcattgatttgatggtagcagctaggtagtggcattgagtttgacctcgcaggcagagcaggccattcgagtga

SEQ ID NO: 6859 - DNA, 96 bp, Aspergillus thermomutatus
  misc_feature: 136
tgaggcatatttggaaagaatagataaatttccccctaaaccttcacctaatagagatattagtatacctaatttactaaataagcctaaattatt

SEQ ID NO: 6860 - DNA, 96 bp, Aspergillus thermomutatus
  misc_feature: 136
tgagagtagagaagatgagatgatataagggaaagagaagattaaagcgaagagagtgaaggaagggatgttgatggacagtgtgataaggtaagg

SEQ ID NO: 6861 - DNA, 96 bp, Aspergillus thermomutatus
  misc_feature: 136
tgaatggatactggatgagcgtgagaaacgcgttggcagaggccgccgcaaggagtatctcgtcaaatggacaggttacgatcgtcctacgtggga

SEQ ID NO: 6862 - DNA, 96 bp, Aspergillus thermomutatus
  misc_feature: 136
ataggggaaagaggaatgataagggatagagtaagggatagatagtttagggagaggagggggtagaaaggtttagagataaagagaggaataaga

SEQ ID NO: 6863 - DNA, 96 bp, Aspergillus thermomutatus
  misc_feature: 136
gaagagaataagtaagggttaaagggaatttaaagtaggaaagaaaagagagagtaagggttagttagtttagaaggagaaaggacggaaagcaga

SEQ ID NO: 6864 - DNA, 96 bp, Aspergillus thermomutatus
  misc_feature: 136
tctgccttactgcctctctccctgtcttacatggtgccttcctccctaccttatattatacattcttcgctacctcacgcggtgcatctctggggc

SEQ ID NO: 6865 - DNA, 96 bp, Aspergillus thermomutatus
  misc_feature: 136
tcgatgagagtagagaagatgagatgatataagggaaagagaagattaaagcgaagagagtgaaggaagggatgttgatggacagtgtgataaggt

SEQ ID NO: 6866 - DNA, 96 bp, Aspergillus thermomutatus
  misc_feature: 136
ctggtggactatctgccaatgctttcgcattgatttgatggtagcagctaggtagtggcattgagtttgacctcgcaggcagagcaggccattcga

SEQ ID NO: 6867 - DNA, 96 bp, Aspergillus thermomutatus
  misc_feature: 136
agagatatataaagaaggttgaagattagaagggaggatgttaagagaataaagaaatgcaagaaaggaggaagagggagtgagaaagagagagga

SEQ ID NO: 6868 - DNA, 96 bp, Aspergillus thermomutatus
  misc_feature: 136
tcctataattccccttattcttcctttctgatccattattccttcctttttccttttgaaatccttctatctttctttccaccttccttctcttct

SEQ ID NO: 6869 - DNA, 96 bp, Aspergillus thermomutatus
  misc_feature: 136
tatctctattaggtgaaggtttagggggaaatttatctattctttccaaatatgcctcatgagtatttttacattctttccaaatatgcctcatga

SEQ ID NO: 6870 - DNA, 96 bp, Aspergillus thermomutatus
  misc_feature: 136
gtataaaggcacccacagaggccccatgtaaggcaggcagagaggtagagataggtagagagggacccaagtagcaggccataaggcaggccgtga

SEQ ID NO: 6871 - DNA, 96 bp, Aspergillus thermomutatus
  misc_feature: 136
gcaggttgaatagcaggttgaatagcaggttgaatagcaggttgaatagcaggttgaatagcaggttgaatagcaggttgaatagcaggttgaata

SEQ ID NO: 6872 - DNA, 96 bp, Aspergillus thermomutatus
  misc_feature: 136
tatcctttctattcttaaaataaactatccctccctccttttcttcttctctcttaatatttcctcccttcctttctcctcaacttctttgattct

SEQ ID NO: 6873 - DNA, 96 bp, Aspergillus thermomutatus
  misc_feature: 136
tataaaggcacccacagaggccccatgtaaggcaggcagagaggtagagataggtagagagggacccaagtagcaggccataaggcaggccgtgag

SEQ ID NO: 6874 - DNA, 96 bp, Aspergillus thermomutatus
  misc_feature: 136
tactctcatccttatccctaatccttatactaaccttactcctattcttcttccaactcttatcattttccttttcttaaatcctacttcttctct

SEQ ID NO: 6875 - DNA, 96 bp, Aspergillus thermomutatus
  misc_feature: 136
ctctattaggtgaaggtttagggggaaatttatctattctttccaaatatgcctcatgagtatttttacattctttccaaatatgcctcatgagta

SEQ ID NO: 6876 - DNA, 96 bp, Aspergillus thermomutatus
  misc_feature: 136
cgatgagagtagagaagatgagatgatataagggaaagagaagattaaagcgaagagagtgaaggaagggatgttgatggacagtgtgataaggta

SEQ ID NO: 6877 - DNA, 96 bp, Aspergillus thermomutatus
  misc_feature: 136
gaggcatatttggaaagaatagataaatttccccctaaaccttcacctaatagagatattagtatacctaatttactaaataagcctaaattatta

SEQ ID NO: 6878 - DNA, 96 bp, Aspergillus thermomutatus
  misc_feature: 136
agtagagaagatgagatgatataagggaaagagaagattaaagcgaagagagtgaaggaagggatgttgatggacagtgtgataaggtaagggtta

SEQ ID NO: 6879 - DNA, 96 bp, Aspergillus thermomutatus
  misc_feature: 136
gtggtgtttcgcgatgatttcggttctcatacactcaggtatgtagatgagattccgcaaatataccaaccctctgtcatccatggtaaggttttc

SEQ ID NO: 6880 - DNA, 96 bp, Aspergillus thermomutatus
  misc_feature: 136
gtaggtagaatggtagggagtaaggcaccgtataagcaccaaatcagatagagagatatagagagaggtatccaagaggtagatatagtagtaggc

SEQ ID NO: 6881 - DNA, 96 bp, Aspergillus thermomutatus
  misc_feature: 136
gggaggtagggagagaggtaggcgaagaggtaggcgacgaggtaggcgacgaggtaggtgaagaggtaggtgaagaggtaggtgaagaggtaggtg

SEQ ID NO: 6882 - DNA, 96 bp, Aspergillus thermomutatus
  misc_feature: 136
gcattgatttgatggtagcagctaggtagtggcattgagtttgacctcgcaggcagagcaggccattcgagtgacatggtaatataggcagaggct

SEQ ID NO: 6883 - DNA, 96 bp, Aspergillus thermomutatus
  misc_feature: 136
gatggtatacaactaccagcaacaactaccatgtaatggtagtccgaatggtagacgaggaaggaactatataaagacactcattatcactgtatc

SEQ ID NO: 6884 - DNA, 96 bp, Aspergillus thermomutatus
  misc_feature: 136
gataggggaaagaggaatgataagggatagagtaagggatagatagtttagggagaggagggggtagaaaggtttagagataaagagaggaataag

SEQ ID NO: 6885 - DNA, 96 bp, Aspergillus thermomutatus
  misc_feature: 136
gagcatttcttggatgattttgtccctttttgttgcttcaataattttttgaatcagtggatcctctgtcagttcgattgtggctgcaagtacttg

SEQ ID NO: 6886 - DNA, 96 bp, Aspergillus thermomutatus
  misc_feature: 136
agagagatatataaagaaggttgaagattagaagggaggatgttaagagaataaagaaatgcaagaaaggaggaagagggagtgagaaagagagag

SEQ ID NO: 6887 - DNA, 96 bp, Aspergillus thermomutatus
  misc_feature: 136
cacgtagaatagcacgtcgaatagcatgtaggatgcacatagaatagcacgcggaggcaggcagataggcccacagagaggtccgacatgaggtag

SEQ ID NO: 6888 - DNA, 96 bp, Aspergillus thermomutatus
  misc_feature: 136
cgggtttatcattgaagctggcaagggcgtacgcatggaccccgacaaggtaaaagctatactagaatggcagacccctacatccactcgaggcgt

SEQ ID NO: 6889 - DNA, 96 bp, Aspergillus thermomutatus
  misc_feature: 136
ccttatcctcttcccgttttctcctcgttgtctcttctcattctcctctcttatcattctctttactttctctttaccttctcacctcgttccctt

SEQ ID NO: 6890 - DNA, 96 bp, Aspergillus thermomutatus
  misc_feature: 136
attctacgtgctattctacgtgctattctacatgctattcgacgtgctattctatgtgctattcaacctgccgttctgcctgccgttctgcctact

SEQ ID NO: 6891 - DNA, 96 bp, Aspergillus thermomutatus
  misc_feature: 136
atctctttttcttctcattctcttctcttcttgttcccttctctccttatcctcttcccgttttctcctcgttgtctcttctcattctcctctctt

SEQ ID NO: 6892 - DNA, 96 bp, Aspergillus thermomutatus
  misc_feature: 136
aggtatgtagatgagattccgcaaatataccaaccctctgtcatccatggtaaggttttcattgtctgctgagttttcgagcatttcttggatgat

SEQ ID NO: 6893 - DNA, 96 bp, Aspergillus thermomutatus
  misc_feature: 136
agcacgtagaatagcacgtcgaatagcatgtaggatgcacatagaatagcacgcggaggcaggcagataggcccacagagaggtccgacatgaggt

SEQ ID NO: 6894 - DNA, 96 bp, Aspergillus thermomutatus
  misc_feature: 135
tttactttctctttaccttctcacctcgttcccttctcattcttttctattcttgttcttttctctcttctcattctttcttgttctttaatttct

SEQ ID NO: 6895 - DNA, 96 bp, Aspergillus thermomutatus
  misc_feature: 135
ccttactctcatccttactctcatccttatccctaatccttatactaaccttactcctattcttcttccaactcttatcattttccttttcttaaa

SEQ ID NO: 6896 - DNA, 96 bp, Aspergillus thermomutatus
  misc_feature: 135
aagagaataagtaagggttaaagggaatttaaagtaggaaagaaaagagagagtaagggttagttagtttagaaggagaaaggacggaaagcagaa

SEQ ID NO: 6897 - DNA, 96 bp, Aspergillus thermomutatus
  misc_feature: 135
agttagtttagaaggagaaaggacggaaagcagaagagatagagggatggttagagagtaggaagcagtaaataagtaggggttggtttaagagaa

SEQ ID NO: 6898 - DNA, 96 bp, Aspergillus thermomutatus
  misc_feature: 135
ttactctcatccttactctcatccttatccctaatccttatactaaccttactcctattcttcttccaactcttatcattttccttttcttaaatc

SEQ ID NO: 6899 - DNA, 96 bp, Aspergillus thermomutatus
  misc_feature: 135
catatttggaaagaatagataaatttccccctaaaccttcacctaatagagatattagtatacctaatttactaaataagcctaaattattaaaca

SEQ ID NO: 6900 - DNA, 96 bp, Aspergillus thermomutatus
  misc_feature: 135
tggtgtttcgcgatgatttcggttctcatacactcaggtatgtagatgagattccgcaaatataccaaccctctgtcatccatggtaaggttttca

SEQ ID NO: 6901 - DNA, 96 bp, Aspergillus thermomutatus
  misc_feature: 135
tgggaccactggtggactatctgccaatgctttcgcattgatttgatggtagcagctaggtagtggcattgagtttgacctcgcaggcagagcagg

SEQ ID NO: 6902 - DNA, 96 bp, Aspergillus thermomutatus
  misc_feature: 135
aggagataggtagagagggacccaagtagcaggccataaggcaggccatgagacacacagagaggtgtacacaaggcaggcagaacagtaggcaga

SEQ ID NO: 6903 - DNA, 96 bp, Aspergillus thermomutatus
  misc_feature: 135
aaagaagaggagaggagaaggaaagaaaagagaaacagaggagggaaagaagggaagagatgagaagagaggagaaggaggagagaggccaagaga

SEQ ID NO: 6904 - DNA, 96 bp, Aspergillus thermomutatus
  misc_feature: 135
ccacagaggccccatgtaaggcaggcagagaggtagagataggtagagagggacccaagtagcaggccataaggcaggccgtgagacacacagaga

SEQ ID NO: 6905 - DNA, 96 bp, Aspergillus thermomutatus
  misc_feature: 135
tctctctctttttcttctctctctttttcttctctctctttttcttctctctctttttcttctctctctctcttttccttttcttctttcttttct

SEQ ID NO: 6906 - DNA, 96 bp, Aspergillus thermomutatus
  misc_feature: 135
tcgtggtgtttcgcgatgatttcggttctcatacactcaggtatgtagatgagattccgcaaatataccaaccctctgtcatccatggtaaggttt

SEQ ID NO: 6907 - DNA, 96 bp, Aspergillus thermomutatus
  misc_feature: 135
caggtatgtagatgagattccgcaaatataccaaccctctgtcatccatggtaaggttttcattgtctgctgagttttcgagcatttcttggatga

SEQ ID NO: 6908 - DNA, 96 bp, Aspergillus thermomutatus
  misc_feature: 135
agcagcgataaccaatcgatcaccagcaatacagctcctgcgcggcacggttaggattgctccacgaccgcctacttcggtcgcattgtcacgtga

SEQ ID NO: 6909 - DNA, 96 bp, Aspergillus thermomutatus
  misc_feature: 135
ggaggtagggagagaggtaggcgaagaggtaggcgacgaggtaggcgacgaggtaggtgaagaggtaggtgaagaggtaggtgaagaggtaggtga

SEQ ID NO: 6910 - DNA, 96 bp, Aspergillus thermomutatus
  misc_feature: 135
tattaggtgaaggtttagggggaaatttatctattctttccaaatatgcctcatgagtatttttacattctttccaaatatgcctcatgagtattt

SEQ ID NO: 6911 - DNA, 96 bp, Aspergillus thermomutatus
  misc_feature: 135
tagaatagcacgtcgaatagcatgtaggatgcacatagaatagcacgcggaggcaggcagataggcccacagagaggtccgacatgaggtaggcag

SEQ ID NO: 6912 - DNA, 96 bp, Aspergillus thermomutatus
  misc_feature: 135
aggaaagtaagagttaagaaaagaaagaagaaaaaaagagaagaagtaggatttaagaaaaggaaaatgataagagttggaagaagaataggagta

SEQ ID NO: 6913 - DNA, 96 bp, Aspergillus thermomutatus
  misc_feature: 135
gcacgtagaatagcacgtcgaatagcatgtaggatgcacatagaatagcacgcggaggcaggcagataggcccacagagaggtccgacatgaggta

SEQ ID NO: 6914 - DNA, 96 bp, Aspergillus thermomutatus
  misc_feature: 135
ccatcaagaatcagaagccgatatttcccaagtgtacgcgtcgcagtatgcttctcaaagactttatccaaccatggcaagccaagcccattatta

SEQ ID NO: 6915 - DNA, 96 bp, Aspergillus thermomutatus
  misc_feature: 135
attaggtgaaggtttagggggaaatttatctattctttccaaatatgcctcatgagtatttttacattctttccaaatatgcctcatgagtattta

SEQ ID NO: 6916 - DNA, 96 bp, Aspergillus thermomutatus
  misc_feature: 135
gtgctgtgacgtattcattgtcatccgtgggtgcccatcccatctgttcaactaacagttgtcgctgtaacggtgctactgccgccagaactgttg

SEQ ID NO: 6917 - DNA, 96 bp, Aspergillus thermomutatus
  misc_feature: 135
ggactatctgccaatgctttcgcattgatttgatggtagcagctaggtagtggcattgagtttgacctcgcaggcagagcaggccattcgagtgac

SEQ ID NO: 6918 - DNA, 96 bp, Aspergillus thermomutatus
  misc_feature: 135
gtagagagatatataaagaaggttgaagattagaagggaggatgttaagagaataaagaaatgcaagaaaggaggaagagggagtgagaaagagag

SEQ ID NO: 6919 - DNA, 96 bp, Aspergillus thermomutatus
  misc_feature: 135
ggtgtttcgcgatgatttcggttctcatacactcaggtatgtagatgagattccgcaaatataccaaccctctgtcatccatggtaaggttttcat

SEQ ID NO: 6920 - DNA, 96 bp, Aspergillus thermomutatus
  misc_feature: 135
ggtaggtagaatggtagggagtaaggcaccgtataagcaccaaatcagatagagagatatagagagaggtatccaagaggtagatatagtagtagg

SEQ ID NO: 6921 - DNA, 96 bp, Aspergillus thermomutatus
  misc_feature: 135
gggaccactggtggactatctgccaatgctttcgcattgatttgatggtagcagctaggtagtggcattgagtttgacctcgcaggcagagcaggc

SEQ ID NO: 6922 - DNA, 96 bp, Aspergillus thermomutatus
  misc_feature: 135
ctctttttcttctctctctttttcttctctctctttttcttctctctctttttcttctctctctctcttttccttttcttctttcttttcttatcc

SEQ ID NO: 6923 - DNA, 96 bp, Aspergillus thermomutatus
  misc_feature: 135
aaagaagagaataagtaagggttaaagggaatttaaagtaggaaagaaaagagagagtaagggttagttagtttagaaggagaaaggacggaaagc

SEQ ID NO: 6924 - DNA, 96 bp, Aspergillus thermomutatus
  misc_feature: 135
gagagtagagaagatgagatgatataagggaaagagaagattaaagcgaagagagtgaaggaagggatgttgatggacagtgtgataaggtaaggg

SEQ ID NO: 6925 - DNA, 96 bp, Aspergillus thermomutatus
  misc_feature: 135
gaaggagtagagtaagggttaggaggaggattagagggagggatagaaagaggattagagggaggattagaaagaggattagagggaggattagag

SEQ ID NO: 6926 - DNA, 96 bp, Aspergillus thermomutatus
  misc_feature: 135
agagaataagtaagggttaaagggaatttaaagtaggaaagaaaagagagagtaagggttagttagtttagaaggagaaaggacggaaagcagaag

SEQ ID NO: 6927 - DNA, 96 bp, Aspergillus thermomutatus
  misc_feature: 135
atgagagtagagaagatgagatgatataagggaaagagaagattaaagcgaagagagtgaaggaagggatgttgatggacagtgtgataaggtaag

SEQ ID NO: 6928 - DNA, 96 bp, Aspergillus thermomutatus
  misc_feature: 135
ctctctctttttcttctctctctttttcttctctctctttttcttctctctctttttcttctctctctctcttttccttttcttctttcttttctt

SEQ ID NO: 6929 - DNA, 96 bp, Aspergillus thermomutatus
  misc_feature: 135
caggttgaatagcaggttgaatagcaggttgaatagcaggttgaatagcaggttgaatagcaggttgaatagcaggttgaatagcaggttgaatag

SEQ ID NO: 6930 - DNA, 96 bp, Aspergillus thermomutatus
  misc_feature: 135
ctatctacctctctattcacctctctattcacctctctattcacctctctatctacctctctatctccctaccccactgtctgcctgtctgcctgt

SEQ ID NO: 6931 - DNA, 96 bp, Aspergillus thermomutatus
  misc_feature: 135
attaaaggtaaagaggaagggatagagagaggattagagtaagggttggaatgaggattaggaagaggaagaggaatagggatagaagtaaagagg

SEQ ID NO: 6932 - DNA, 96 bp, Aspergillus thermomutatus
  misc_feature: 135
agagaggaaagtaagagttaagaaaagaaagaagaaaaaaagagaagaagtaggatttaagaaaaggaaaatgataagagttggaagaagaatagg

SEQ ID NO: 6933 - DNA, 96 bp, Aspergillus thermomutatus
  misc_feature: 135
cctataattccccttattcttcctttctgatccattattccttcctttttccttttgaaatccttctatctttctttccaccttccttctcttctt

SEQ ID NO: 6934 - DNA, 96 bp, Aspergillus thermomutatus
  misc_feature: 135
catctctttttcttctcattctcttctcttcttgttcccttctctccttatcctcttcccgttttctcctcgttgtctcttctcattctcctctct

SEQ ID NO: 6935 - DNA, 96 bp, Aspergillus thermomutatus
  misc_feature: 135
agacgcctctctcaatgatgtgtagtctgccgtgctgcctaacatgcctgctgccatcctagatggcggaaacccatcatggtttggtattaggtg

SEQ ID NO: 6936 - DNA, 96 bp, Aspergillus thermomutatus
  misc_feature: 135
atcaagaatcagaagccgatatttcccaagtgtacgcgtcgcagtatgcttctcaaagactttatccaaccatggcaagccaagcccattattagt

SEQ ID NO: 6937 - DNA, 96 bp, Aspergillus thermomutatus
  misc_feature: 135
agaatagcacgtcgaatagcatgtaggatgcacatagaatagcacgcggaggcaggcagataggcccacagagaggtccgacatgaggtaggcagt

SEQ ID NO: 6938 - DNA, 96 bp, Aspergillus thermomutatus
  misc_feature: 134
tatttggaaagaatagataaatttccccctaaaccttcacctaatagagatattagtatacctaatttactaaataagcctaaattattaaacaaa

SEQ ID NO: 6939 - DNA, 96 bp, Aspergillus thermomutatus
  misc_feature: 134
tttaatctctggtataaccaccctaacttataatatatattaatacctactatgcctcactgcctacctcctggggttcctctatgcctactcttg

SEQ ID NO: 6940 - DNA, 96 bp, Aspergillus thermomutatus
  misc_feature: 134
gataaggtaagggttatttagtttattaagagagagggaaggaattgagaagagaataaggtgaataaggagagaggagaagagaggagatgagaa

SEQ ID NO: 6941 - DNA, 96 bp, Aspergillus thermomutatus
  misc_feature: 134
agagtaaggattagtgattttagaaataaaggagtaaaaagtcgatgagagtagagaagatgagatgatataagggaaagagaagattaaagcgaa

SEQ ID NO: 6942 - DNA, 96 bp, Aspergillus thermomutatus
  misc_feature: 134
ataggaaaaaagaaaagatttagaaatagaagattaaaggtaaagaggaagggatagagagaggattagagtaagggttggaatgaggattaggaa

SEQ ID NO: 6943 - DNA, 96 bp, Aspergillus thermomutatus
  misc_feature: 134
agataggggaaagaggaatgataagggatagagtaagggatagatagtttagggagaggagggggtagaaaggtttagagataaagagaggaataa

SEQ ID NO: 6944 - DNA, 96 bp, Aspergillus thermomutatus
  misc_feature: 134
gactatctgccaatgctttcgcattgatttgatggtagcagctaggtagtggcattgagtttgacctcgcaggcagagcaggccattcgagtgaca

SEQ ID NO: 6945 - DNA, 96 bp, Aspergillus thermomutatus
  misc_feature: 134
aagaagagaataagtaagggttaaagggaatttaaagtaggaaagaaaagagagagtaagggttagttagtttagaaggagaaaggacggaaagca

SEQ ID NO: 6946 - DNA, 96 bp, Aspergillus thermomutatus
  misc_feature: 134
taaggagataggtagagagggacccaagtagcaggccataaggcaggccatgagacacacagagaggtgtacacaaggcaggcagaacagtaggca

SEQ ID NO: 6947 - DNA, 96 bp, Aspergillus thermomutatus
  misc_feature: 134
attgatttgatggtagcagctaggtagtggcattgagtttgacctcgcaggcagagcaggccattcgagtgacatggtaatataggcagaggctca

SEQ ID NO: 6948 - DNA, 96 bp, Aspergillus thermomutatus
  misc_feature: 134
ggataaggataagaaggatagtaagggatagtgtaagggatagggttaaaaaagaggataagaaaagaaagaagaaaaggaaaagagagagagaga

SEQ ID NO: 6949 - DNA, 96 bp, Aspergillus thermomutatus
  misc_feature: 134
tctctattaggtgaaggtttagggggaaatttatctattctttccaaatatgcctcatgagtatttttacattctttccaaatatgcctcatgagt

SEQ ID NO: 6950 - DNA, 96 bp, Aspergillus thermomutatus
  misc_feature: 134
tctattaggtgaaggtttagggggaaatttatctattctttccaaatatgcctcatgagtatttttacattctttccaaatatgcctcatgagtat

SEQ ID NO: 6951 - DNA, 96 bp, Aspergillus thermomutatus
  misc_feature: 134
ggagtagagtaagggttaggaggaggattagagggagggatagaaagaggattagagggaggattagaaagaggattagagggaggattagaggga

SEQ ID NO: 6952 - DNA, 96 bp, Aspergillus thermomutatus
  misc_feature: 134
tcaatgatgtgtagtctgccgtgctgcctaacatgcctgctgccatcctagatggcggaaacccatcatggtttggtattaggtgatccaccacct

SEQ ID NO: 6953 - DNA, 96 bp, Aspergillus thermomutatus
  misc_feature: 134
tactcctataattccccttattcttcctttctgatccattattccttcctttttccttttgaaatccttctatctttctttccaccttccttctct

SEQ ID NO: 6954 - DNA, 96 bp, Aspergillus thermomutatus
  misc_feature: 134
taccaggagggagtccagccttataaggtgtttcgaggacgaaacgctaagagagggggaggtgatgttacgacaccaacactactaggcggacct

SEQ ID NO: 6955 - DNA, 96 bp, Aspergillus thermomutatus
  misc_feature: 134
taaaggtaaagaggaagggatagagagaggattagagtaagggttggaatgaggattaggaagaggaagaggaatagggatagaagtaaagagggg

SEQ ID NO: 6956 - DNA, 96 bp, Aspergillus thermomutatus
  misc_feature: 134
ctccatacctcctatggtgcctctctacctatctccctacctcttcacctacctcttcacctacctcttcacctacctcttcacctacctcttcac

SEQ ID NO: 6957 - DNA, 96 bp, Aspergillus thermomutatus
  misc_feature: 134
ggaccactggtggactatctgccaatgctttcgcattgatttgatggtagcagctaggtagtggcattgagtttgacctcgcaggcagagcaggcc

SEQ ID NO: 6958 - DNA, 96 bp, Aspergillus thermomutatus
  misc_feature: 134
ggagcagcgataaccaatcgatcaccagcaatacagctcctgcgcggcacggttaggattgctccacgaccgcctacttcggtcgcattgtcacgt

SEQ ID NO: 6959 - DNA, 96 bp, Aspergillus thermomutatus
  misc_feature: 134
gagtagagaagatgagatgatataagggaaagagaagattaaagcgaagagagtgaaggaagggatgttgatggacagtgtgataaggtaagggtt

SEQ ID NO: 6960 - DNA, 96 bp, Aspergillus thermomutatus
  misc_feature: 134
gaggttgaatggatactggatgagcgtgagaaacgcgttggcagaggccgccgcaaggagtatctcgtcaaatggacaggttacgatcgtcctacg

SEQ ID NO: 6961 - DNA, 96 bp, Aspergillus thermomutatus
  misc_feature: 134
cattgatttgatggtagcagctaggtagtggcattgagtttgacctcgcaggcagagcaggccattcgagtgacatggtaatataggcagaggctc

SEQ ID NO: 6962 - DNA, 96 bp, Aspergillus thermomutatus
  misc_feature: 134
gagaaggagtagagtaagggttaggaggaggattagagggagggatagaaagaggattagagggaggattagaaagaggattagagggaggattag

SEQ ID NO: 6963 - DNA, 96 bp, Aspergillus thermomutatus
  misc_feature: 134
ctttactttctctttaccttctcacctcgttcccttctcattcttttctattcttgttcttttctctcttctcattctttcttgttctttaatttc

SEQ ID NO: 6964 - DNA, 96 bp, Aspergillus thermomutatus
  misc_feature: 134
ctttaatctctggtataaccaccctaacttataatatatattaatacctactatgcctcactgcctacctcctggggttcctctatgcctactctt

SEQ ID NO: 6965 - DNA, 96 bp, Aspergillus thermomutatus
  misc_feature: 134
agaagagaataagtaagggttaaagggaatttaaagtaggaaagaaaagagagagtaagggttagttagtttagaaggagaaaggacggaaagcag

SEQ ID NO: 6966 - DNA, 96 bp, Aspergillus thermomutatus
  misc_feature: 134
aaggagataggtagagagggacccaagtagcaggccataaggcaggccatgagacacacagagaggtgtacacaaggcaggcagaacagtaggcag

SEQ ID NO: 6967 - DNA, 96 bp, Aspergillus thermomutatus
  misc_feature: 134
cacagaggccccatgtaaggcaggcagagaggtagagataggtagagagggacccaagtagcaggccataaggcaggccgtgagacacacagagag

SEQ ID NO: 6968 - DNA, 96 bp, Aspergillus thermomutatus
  misc_feature: 134
aagagaggaaagtaagagttaagaaaagaaagaagaaaaaaagagaagaagtaggatttaagaaaaggaaaatgataagagttggaagaagaatag

SEQ ID NO: 6969 - DNA, 96 bp, Aspergillus thermomutatus
  misc_feature: 134
cctgctcccaggcctgcatcacctcatcgaccgcagcctggacatggtgggtcgatggggccggtggacacccgtctggaacgcgaatatggatat

SEQ ID NO: 6970 - DNA, 96 bp, Aspergillus thermomutatus
  misc_feature: 134
caggcaaaattacggagcagcgataaccaatcgatcaccagcaatacagctcctgcgcggcacggttaggattgctccacgaccgcctacttcggt

SEQ ID NO: 6971 - DNA, 96 bp, Aspergillus thermomutatus
  misc_feature: 134
atagaagattaaaggtaaagaggaagggatagagagaggattagagtaagggttggaatgaggattaggaagaggaagaggaatagggatagaagt

SEQ ID NO: 6972 - DNA, 96 bp, Aspergillus thermomutatus
  misc_feature: 134
aaatacctcgggtttatcattgaagctggcaagggcgtacgcatggaccccgacaaggtaaaagctatactagaatggcagacccctacatccact

SEQ ID NO: 6973 - DNA, 96 bp, Aspergillus thermomutatus
  misc_feature: 134
actctcatccttatccctaatccttatactaaccttactcctattcttcttccaactcttatcattttccttttcttaaatcctacttcttctctt

SEQ ID NO: 6974 - DNA, 96 bp, Aspergillus thermomutatus
  misc_feature: 133
gaaaagaagagaataagtaagggttaaagggaatttaaagtaggaaagaaaagagagagtaagggttagttagtttagaaggagaaaggacggaaa

SEQ ID NO: 6975 - DNA, 96 bp, Aspergillus thermomutatus
  misc_feature: 133
atatttggaaagaatagataaatttccccctaaaccttcacctaatagagatattagtatacctaatttactaaataagcctaaattattaaacaa

SEQ ID NO: 6976 - DNA, 96 bp, Aspergillus thermomutatus
  misc_feature: 133
ttgggtcatcgtggtgtttcgcgatgatttcggttctcatacactcaggtatgtagatgagattccgcaaatataccaaccctctgtcatccatgg

SEQ ID NO: 6977 - DNA, 96 bp, Aspergillus thermomutatus
  misc_feature: 133
gtagcaggccataaggcaggccatgagacacacagagaggtgtacacaaggcaggcagaacagtaggcagaacggcaggcagaacggcaggttgaa

SEQ ID NO: 6978 - DNA, 96 bp, Aspergillus thermomutatus
  misc_feature: 133
ttaaaggtaaagaggaagggatagagagaggattagagtaagggttggaatgaggattaggaagaggaagaggaatagggatagaagtaaagaggg

SEQ ID NO: 6979 - DNA, 96 bp, Aspergillus thermomutatus
  misc_feature: 133
tgggtcatcgtggtgtttcgcgatgatttcggttctcatacactcaggtatgtagatgagattccgcaaatataccaaccctctgtcatccatggt

SEQ ID NO: 6980 - DNA, 96 bp, Aspergillus thermomutatus
  misc_feature: 133
caaaattacggagcagcgataaccaatcgatcaccagcaatacagctcctgcgcggcacggttaggattgctccacgaccgcctacttcggtcgca

SEQ ID NO: 6981 - DNA, 96 bp, Aspergillus thermomutatus
  misc_feature: 133
cccttcttgatgtaagggaggatctgggcgtagggcgcacccttcaggcggttgttcacgtaggccattcggctctgcggcgttgggaagcggtca

SEQ ID NO: 6982 - DNA, 96 bp, Aspergillus thermomutatus
  misc_feature: 133
tctttaatctctggtataaccaccctaacttataatatatattaatacctactatgcctcactgcctacctcctggggttcctctatgcctactct

SEQ ID NO: 6983 - DNA, 96 bp, Aspergillus thermomutatus
  misc_feature: 133
ggtaggcgaagaggtaggcgacgaggtaggcgacgaggtaggtgaagaggtaggtgaagaggtaggtgaagaggtaggtgaagaggtaggtgaaga

SEQ ID NO: 6984 - DNA, 96 bp, Aspergillus thermomutatus
  misc_feature: 133
agaatagcacgtagaatagcacgtagaatagcacgtcgaatagcatgtaggatgcacatagaatagcacgcggaggcaggcagataggcccacaga

SEQ ID NO: 6985 - DNA, 96 bp, Aspergillus thermomutatus
  misc_feature: 133
tctgcctgtctgcctgtctgcctgtctgcctgtctctctacctcactgcctacctcatgtcggacctctctgtgggcctatctgcctgcctccgcg

SEQ ID NO: 6986 - DNA, 96 bp, Aspergillus thermomutatus
  misc_feature: 133
tagagagatatataaagaaggttgaagattagaagggaggatgttaagagaataaagaaatgcaagaaaggaggaagagggagtgagaaagagaga

SEQ ID NO: 6987 - DNA, 96 bp, Aspergillus thermomutatus
  misc_feature: 133
taaggcaggccatgagacacacagagaggtgtacacaaggcaggcagaacagtaggcagaacggcaggcagaacggcaggttgaatagcacataga

SEQ ID NO: 6988 - DNA, 96 bp, Aspergillus thermomutatus
  misc_feature: 133
ggataggataggaaaaaagaaaagatttagaaatagaagattaaaggtaaagaggaagggatagagagaggattagagtaagggttggaatgagga

SEQ ID NO: 6989 - DNA, 96 bp, Aspergillus thermomutatus
  misc_feature: 133
tcctaacccttactctactccttctcctaactctctctctactccttcttttactatttactttactccttcttctactctttacttcacttttta

SEQ ID NO: 6990 - DNA, 96 bp, Aspergillus thermomutatus
  misc_feature: 133
tcatcgtggtgtttcgcgatgatttcggttctcatacactcaggtatgtagatgagattccgcaaatataccaaccctctgtcatccatggtaagg

SEQ ID NO: 6991 - DNA, 96 bp, Aspergillus thermomutatus
  misc_feature: 133
gcctgctcccaggcctgcatcacctcatcgaccgcagcctggacatggtgggtcgatggggccggtggacacccgtctggaacgcgaatatggata

SEQ ID NO: 6992 - DNA, 96 bp, Aspergillus thermomutatus
  misc_feature: 133
tatattaatacctactatgcctcactgcctacctcctggggttcctctatgcctactcttggtctgccttactgcctctctccctgtcttacatgg

SEQ ID NO: 6993 - DNA, 96 bp, Aspergillus thermomutatus
  misc_feature: 133
taggcgaagaggtaggcgacgaggtaggcgacgaggtaggtgaagaggtaggtgaagaggtaggtgaagaggtaggtgaagaggtaggtgaagagg

SEQ ID NO: 6994 - DNA, 96 bp, Aspergillus thermomutatus
  misc_feature: 133
tagcaggccataaggcaggccatgagacacacagagaggtgtacacaaggcaggcagaacagtaggcagaacggcaggcagaacggcaggttgaat

SEQ ID NO: 6995 - DNA, 96 bp, Aspergillus thermomutatus
  misc_feature: 133
acctaataccaaaccatgatgggtttccgccatctaggatggcagcaggcatgttaggcagcacggcagactacacatcattgagagaggcgtcta

SEQ ID NO: 6996 - DNA, 96 bp, Aspergillus thermomutatus
  misc_feature: 133
tagaagattaaaggtaaagaggaagggatagagagaggattagagtaagggttggaatgaggattaggaagaggaagaggaatagggatagaagta

SEQ ID NO: 6997 - DNA, 96 bp, Aspergillus thermomutatus
  misc_feature: 133
tactctcatccttactctcatccttatccctaatccttatactaaccttactcctattcttcttccaactcttatcattttccttttcttaaatcc

SEQ ID NO: 6998 - DNA, 96 bp, Aspergillus thermomutatus
  misc_feature: 133
aatattaagcaaggcacggagagaggtaggcagagaggtagggaggtagggagggaggtagggagagaggtaggcgaagaggtaggcgacgaggta

SEQ ID NO: 6999 - DNA, 96 bp, Aspergillus thermomutatus
  misc_feature: 133
gttagtttagaaggagaaaggacggaaagcagaagagatagagggatggttagagagtaggaagcagtaaataagtaggggttggtttaagagaag

SEQ ID NO: 7000 - DNA, 96 bp, Aspergillus thermomutatus
  misc_feature: 133
gtcatcgtggtgtttcgcgatgatttcggttctcatacactcaggtatgtagatgagattccgcaaatataccaaccctctgtcatccatggtaag

SEQ ID NO: 7001 - DNA, 96 bp, Aspergillus thermomutatus
  misc_feature: 133
aggtgaaggtttagggggaaatttatctattctttccaaatatgcctcatgagtatttttacattctttccaaatatgcctcatgagtatttatac

SEQ ID NO: 7002 - DNA, 96 bp, Aspergillus thermomutatus
  misc_feature: 133
gtaaggagataggtagagagggacccaagtagcaggccataaggcaggccatgagacacacagagaggtgtacacaaggcaggcagaacagtaggc

SEQ ID NO: 7003 - DNA, 96 bp, Aspergillus thermomutatus
  misc_feature: 133
ggcaaaattacggagcagcgataaccaatcgatcaccagcaatacagctcctgcgcggcacggttaggattgctccacgaccgcctacttcggtcg

SEQ ID NO: 7004 - DNA, 96 bp, Aspergillus thermomutatus
  misc_feature: 133
aaactaactaacccttactctctcttttctttcctactttaaattccctttaacccttacttattctcttcttttctttactatctctctctctcc

SEQ ID NO: 7005 - DNA, 96 bp, Aspergillus thermomutatus
  misc_feature: 133
gattagaggatagggagagagaagggaagagaagaaagaaaggagataagatttaagaatgaagatagtaagaaaaaggagagagggagtaaaggg

SEQ ID NO: 7006 - DNA, 96 bp, Aspergillus thermomutatus
  misc_feature: 133
gaggaaagtaagagttaagaaaagaaagaagaaaaaaagagaagaagtaggatttaagaaaaggaaaatgataagagttggaagaagaataggagt

SEQ ID NO: 7007 - DNA, 96 bp, Aspergillus thermomutatus
  misc_feature: 133
gaaagaagaggagaggagaaggaaagaaaagagaaacagaggagggaaagaagggaagagatgagaagagaggagaaggaggagagaggccaagag

SEQ ID NO: 7008 - DNA, 96 bp, Aspergillus thermomutatus
  misc_feature: 133
aaaagaagagaataagtaagggttaaagggaatttaaagtaggaaagaaaagagagagtaagggttagttagtttagaaggagaaaggacggaaag

SEQ ID NO: 7009 - DNA, 96 bp, Aspergillus thermomutatus
  misc_feature: 133
ataaggtaagggttatttagtttattaagagagagggaaggaattgagaagagaataaggtgaataaggagagaggagaagagaggagatgagaag

SEQ ID NO: 7010 - DNA, 96 bp, Aspergillus thermomutatus
  misc_feature: 133
ctgccttactgcctctctccctgtcttacatggtgccttcctccctaccttatattatacattcttcgctacctcacgcggtgcatctctggggct

SEQ ID NO: 7011 - DNA, 96 bp, Aspergillus thermomutatus
  misc_feature: 133
atagcacgtagaatagcacgtagaatagcacgtcgaatagcatgtaggatgcacatagaatagcacgcggaggcaggcagataggcccacagagag

SEQ ID NO: 7012 - DNA, 96 bp, Aspergillus thermomutatus
  misc_feature: 133
ataaggcaggccatgagacacacagagaggtgtacacaaggcaggcagaacagtaggcagaacggcaggcagaacggcaggttgaatagcacatag

SEQ ID NO: 7013 - DNA, 96 bp, Aspergillus thermomutatus
  misc_feature: 133
ctaactaacccttactctctcttttctttcctactttaaattccctttaacccttacttattctcttcttttctttactatctctctctctcctct

SEQ ID NO: 7014 - DNA, 96 bp, Aspergillus thermomutatus
  misc_feature: 133
aatagagataggggaaagaggaatgataagggatagagtaagggatagatagtttagggagaggagggggtagaaaggtttagagataaagagagg

SEQ ID NO: 7015 - DNA, 96 bp, Aspergillus thermomutatus
  misc_feature: 133
ccaagtagcaggccataaggcaggccatgagacacacagagaggtgtacacaaggcaggcagaacagtaggcagaacggcaggcagaacggcaggt

SEQ ID NO: 7016 - DNA, 96 bp, Aspergillus thermomutatus
  misc_feature: 133
cacgtggtgcatctctggggctacgtggggtgtgttgatccctactatactacctgccccatatggtcgctctctggctaccttggtccctacctt

SEQ ID NO: 7017 - DNA, 96 bp, Aspergillus thermomutatus
  misc_feature: 133
atacactcaggtatgtagatgagattccgcaaatataccaaccctctgtcatccatggtaaggttttcattgtctgctgagttttcgagcatttct

SEQ ID NO: 7018 - DNA, 96 bp, Aspergillus thermomutatus
  misc_feature: 133
aggttgaatggatactggatgagcgtgagaaacgcgttggcagaggccgccgcaaggagtatctcgtcaaatggacaggttacgatcgtcctacgt

SEQ ID NO: 7019 - DNA, 96 bp, Aspergillus thermomutatus
  misc_feature: 133
agggaggtagggagagaggtaggcgaagaggtaggcgacgaggtaggcgacgaggtaggtgaagaggtaggtgaagaggtaggtgaagaggtaggt

SEQ ID NO: 7020 - DNA, 96 bp, Aspergillus thermomutatus
  misc_feature: 133
agagtagagaagatgagatgatataagggaaagagaagattaaagcgaagagagtgaaggaagggatgttgatggacagtgtgataaggtaagggt

SEQ ID NO: 7021 - DNA, 96 bp, Aspergillus thermomutatus
  misc_feature: 133
actcctataattccccttattcttcctttctgatccattattccttcctttttccttttgaaatccttctatctttctttccaccttccttctctt

SEQ ID NO: 7022 - DNA, 96 bp, Aspergillus thermomutatus
  misc_feature: 133
aaattacggagcagcgataaccaatcgatcaccagcaatacagctcctgcgcggcacggttaggattgctccacgaccgcctacttcggtcgcatt

SEQ ID NO: 7023 - DNA, 96 bp, Aspergillus thermomutatus
  misc_feature: 132
gaaaaggacaaggtgacaggaaagaacaaaatgacaggaggagcaaggtagagaggtagaggttaatttttaatagtattagaaatgttatatcaa

SEQ ID NO: 7024 - DNA, 96 bp, Aspergillus thermomutatus
  misc_feature: 132
ccttcttgatgtaagggaggatctgggcgtagggcgcacccttcaggcggttgttcacgtaggccattcggctctgcggcgttgggaagcggtcaa

SEQ ID NO: 7025 - DNA, 96 bp, Aspergillus thermomutatus
  misc_feature: 132
ttccaactcttatcattttccttttcttaaatcctacttcttctctttttttcttctttcttttcttaactcttactttcctctcttttatacccc

SEQ ID NO: 7026 - DNA, 96 bp, Aspergillus thermomutatus
  misc_feature: 132
ttaggtgaaggtttagggggaaatttatctattctttccaaatatgcctcatgagtatttttacattctttccaaatatgcctcatgagtatttat

SEQ ID NO: 7027 - DNA, 96 bp, Aspergillus thermomutatus
  misc_feature: 132
ttaatctctggtataaccaccctaacttataatatatattaatacctactatgcctcactgcctacctcctggggttcctctatgcctactcttgg

SEQ ID NO: 7028 - DNA, 96 bp, Aspergillus thermomutatus
  misc_feature: 132
gatttgatggtagcagctaggtagtggcattgagtttgacctcgcaggcagagcaggccattcgagtgacatggtaatataggcagaggctcatca

SEQ ID NO: 7029 - DNA, 96 bp, Aspergillus thermomutatus
  misc_feature: 132
tctttactttctctttaccttctcacctcgttcccttctcattcttttctattcttgttcttttctctcttctcattctttcttgttctttaattt

SEQ ID NO: 7030 - DNA, 96 bp, Aspergillus thermomutatus
  misc_feature: 132
agaaagaagaggagaggagaaggaaagaaaagagaaacagaggagggaaagaagggaagagatgagaagagaggagaaggaggagagaggccaaga

SEQ ID NO: 7031 - DNA, 96 bp, Aspergillus thermomutatus
  misc_feature: 132
tctgatccttactctcatccttactctcatccttactctcatccttatccctaatccttatactaaccttactcctattcttcttccaactcttat

SEQ ID NO: 7032 - DNA, 96 bp, Aspergillus thermomutatus
  misc_feature: 132
tagttagtttagaaggagaaaggacggaaagcagaagagatagagggatggttagagagtaggaagcagtaaataagtaggggttggtttaagaga

SEQ ID NO: 7033 - DNA, 96 bp, Aspergillus thermomutatus
  misc_feature: 132
tctacgtgctattctacgtgctattctacatgctattcgacgtgctattctatgtgctattcaacctgccgttctgcctgccgttctgcctactgt

SEQ ID NO: 7034 - DNA, 96 bp, Aspergillus thermomutatus
  misc_feature: 132
tcgggtttatcattgaagctggcaagggcgtacgcatggaccccgacaaggtaaaagctatactagaatggcagacccctacatccactcgaggcg

SEQ ID NO: 7035 - DNA, 96 bp, Aspergillus thermomutatus
  misc_feature: 132
aagagtaaggattagtgattttagaaataaaggagtaaaaagtcgatgagagtagagaagatgagatgatataagggaaagagaagattaaagcga

SEQ ID NO: 7036 - DNA, 96 bp, Aspergillus thermomutatus
  misc_feature: 132
gagaggaaagtaagagttaagaaaagaaagaagaaaaaaagagaagaagtaggatttaagaaaaggaaaatgataagagttggaagaagaatagga

SEQ ID NO: 7037 - DNA, 96 bp, Aspergillus thermomutatus
  misc_feature: 132
gacgcctctctcaatgatgtgtagtctgccgtgctgcctaacatgcctgctgccatcctagatggcggaaacccatcatggtttggtattaggtga

SEQ ID NO: 7038 - DNA, 96 bp, Aspergillus thermomutatus
  misc_feature: 132
tattctacgtgctattctacgtgctattctacatgctattcgacgtgctattctatgtgctattcaacctgccgttctgcctgccgttctgcctac

SEQ ID NO: 7039 - DNA, 96 bp, Aspergillus thermomutatus
  misc_feature: 132
cataaggcaggccatgagacacacagagaggtgtacacaaggcaggcagaacagtaggcagaacggcaggcagaacggcaggttgaatagcacata

SEQ ID NO: 7040 - DNA, 96 bp, Aspergillus thermomutatus
  misc_feature: 132
taggggaaagaggaatgataagggatagagtaagggatagatagtttagggagaggagggggtagaaaggtttagagataaagagaggaataagag

SEQ ID NO: 7041 - DNA, 96 bp, Aspergillus thermomutatus
  misc_feature: 132
taggaaaaaagaaaagatttagaaatagaagattaaaggtaaagaggaagggatagagagaggattagagtaagggttggaatgaggattaggaag

SEQ ID NO: 7042 - DNA, 96 bp, Aspergillus thermomutatus
  misc_feature: 132
gggtcatcgtggtgtttcgcgatgatttcggttctcatacactcaggtatgtagatgagattccgcaaatataccaaccctctgtcatccatggta

SEQ ID NO: 7043 - DNA, 96 bp, Aspergillus thermomutatus
  misc_feature: 132
ggagaaggagtagagtaagggttaggaggaggattagagggagggatagaaagaggattagagggaggattagaaagaggattagagggaggatta

SEQ ID NO: 7044 - DNA, 96 bp, Aspergillus thermomutatus
  misc_feature: 132
taatattaagcaaggcacggagagaggtaggcagagaggtagggaggtagggagggaggtagggagagaggtaggcgaagaggtaggcgacgaggt

SEQ ID NO: 7045 - DNA, 96 bp, Aspergillus thermomutatus
  misc_feature: 132
ctctgatccttactctcatccttactctcatccttactctcatccttatccctaatccttatactaaccttactcctattcttcttccaactctta

SEQ ID NO: 7046 - DNA, 96 bp, Aspergillus thermomutatus
  misc_feature: 132
ggccataaggcaggccatgagacacacagagaggtgtacacaaggcaggcagaacagtaggcagaacggcaggcagaacggcaggttgaatagcac

SEQ ID NO: 7047 - DNA, 96 bp, Aspergillus thermomutatus
  misc_feature: 132
cgcggtgcattgctccatacctcctatggtgcctctctacctatctccctacctcttcacctacctcttcacctacctcttcacctacctcttcac

SEQ ID NO: 7048 - DNA, 96 bp, Aspergillus thermomutatus
  misc_feature: 132
gtctgcctgtctgcctgtctgcctgtctgcctgtctctctacctcactgcctacctcatgtcggacctctctgtgggcctatctgcctgcctccgc

SEQ ID NO: 7049 - DNA, 96 bp, Aspergillus thermomutatus
  misc_feature: 132
gtaggcgaagaggtaggcgacgaggtaggcgacgaggtaggtgaagaggtaggtgaagaggtaggtgaagaggtaggtgaagaggtaggtgaagag

SEQ ID NO: 7050 - DNA, 96 bp, Aspergillus thermomutatus
  misc_feature: 132
gggtataaaagagaggaaagtaagagttaagaaaagaaagaagaaaaaaagagaagaagtaggatttaagaaaaggaaaatgataagagttggaag

SEQ ID NO: 7051 - DNA, 96 bp, Aspergillus thermomutatus
  misc_feature: 132
aatacctcgggtttatcattgaagctggcaagggcgtacgcatggaccccgacaaggtaaaagctatactagaatggcagacccctacatccactc

SEQ ID NO: 7052 - DNA, 96 bp, Aspergillus thermomutatus
  misc_feature: 132
caatgatgtgtagtctgccgtgctgcctaacatgcctgctgccatcctagatggcggaaacccatcatggtttggtattaggtgatccaccacctc

SEQ ID NO: 7053 - DNA, 96 bp, Aspergillus thermomutatus
  misc_feature: 132
catacactcaggtatgtagatgagattccgcaaatataccaaccctctgtcatccatggtaaggttttcattgtctgctgagttttcgagcatttc

SEQ ID NO: 7054 - DNA, 96 bp, Aspergillus thermomutatus
  misc_feature: 132
ctgtgacgtattcattgtcatccgtgggtgcccatcccatctgttcaactaacagttgtcgctgtaacggtgctactgccgccagaactgttgttg

SEQ ID NO: 7055 - DNA, 96 bp, Aspergillus thermomutatus
  misc_feature: 132
cccacagaggccccatgtaaggcaggcagagaggtagagataggtagagagggacccaagtagcaggccataaggcaggccgtgagacacacagag

SEQ ID NO: 7056 - DNA, 96 bp, Aspergillus thermomutatus
  misc_feature: 132
ctctatctacctctctattcacctctctattcacctctctattcacctctctatctacctctctatctccctaccccactgtctgcctgtctgcct

SEQ ID NO: 7057 - DNA, 96 bp, Aspergillus thermomutatus
  misc_feature: 132
ctcatacactcaggtatgtagatgagattccgcaaatataccaaccctctgtcatccatggtaaggttttcattgtctgctgagttttcgagcatt

SEQ ID NO: 7058 - DNA, 96 bp, Aspergillus thermomutatus
  misc_feature: 132
atacctcgggtttatcattgaagctggcaagggcgtacgcatggaccccgacaaggtaaaagctatactagaatggcagacccctacatccactcg

SEQ ID NO: 7059 - DNA, 96 bp, Aspergillus thermomutatus
  misc_feature: 132
ataatattaagcaaggcacggagagaggtaggcagagaggtagggaggtagggagggaggtagggagagaggtaggcgaagaggtaggcgacgagg

SEQ ID NO: 7060 - DNA, 96 bp, Aspergillus thermomutatus
  misc_feature: 132
acaggcaaaattacggagcagcgataaccaatcgatcaccagcaatacagctcctgcgcggcacggttaggattgctccacgaccgcctacttcgg

SEQ ID NO: 7061 - DNA, 96 bp, Aspergillus thermomutatus
  misc_feature: 132
atatattaatacctactatgcctcactgcctacctcctggggttcctctatgcctactcttggtctgccttactgcctctctccctgtcttacatg

SEQ ID NO: 7062 - DNA, 96 bp, Aspergillus thermomutatus
  misc_feature: 132
aaaaggacaaggtgacaggaaagaacaaaatgacaggaggagcaaggtagagaggtagaggttaatttttaatagtattagaaatgttatatcaat

SEQ ID NO: 7063 - DNA, 96 bp, Aspergillus thermomutatus
  misc_feature: 132
aaaattacggagcagcgataaccaatcgatcaccagcaatacagctcctgcgcggcacggttaggattgctccacgaccgcctacttcggtcgcat

SEQ ID NO: 7064 - DNA, 96 bp, Aspergillus thermomutatus
  misc_feature: 132
atcgtggtgtttcgcgatgatttcggttctcatacactcaggtatgtagatgagattccgcaaatataccaaccctctgtcatccatggtaaggtt

SEQ ID NO: 7065 - DNA, 96 bp, Aspergillus thermomutatus
  misc_feature: 132
aggagaaggagtagagtaagggttaggaggaggattagagggagggatagaaagaggattagagggaggattagaaagaggattagagggaggatt

SEQ ID NO: 7066 - DNA, 96 bp, Aspergillus thermomutatus
  misc_feature: 131
ttgatttgatggtagcagctaggtagtggcattgagtttgacctcgcaggcagagcaggccattcgagtgacatggtaatataggcagaggctcat

SEQ ID NO: 7067 - DNA, 96 bp, Aspergillus thermomutatus
  misc_feature: 131
ttcatttctttcgttctattttctcttctctctctttctatccttcttttccaccctcctccttttacaacctataatttctactaaccctcactc

SEQ ID NO: 7068 - DNA, 96 bp, Aspergillus thermomutatus
  misc_feature: 131
gaggtaggcgaagaggtaggcgacgaggtaggcgacgaggtaggtgaagaggtaggtgaagaggtaggtgaagaggtaggtgaagaggtaggtgaa

SEQ ID NO: 7069 - DNA, 96 bp, Aspergillus thermomutatus
  misc_feature: 131
ttagaggagagagagagatagtaaagaaaagaagagaataagtaagggttaaagggaatttaaagtaggaaagaaaagagagagtaagggttagtt

SEQ ID NO: 7070 - DNA, 96 bp, Aspergillus thermomutatus
  misc_feature: 131
ttactcctataattccccttattcttcctttctgatccattattccttcctttttccttttgaaatccttctatctttctttccaccttccttctc

SEQ ID NO: 7071 - DNA, 96 bp, Aspergillus thermomutatus
  misc_feature: 131
ttaatagagataggggaaagaggaatgataagggatagagtaagggatagatagtttagggagaggagggggtagaaaggtttagagataaagaga

SEQ ID NO: 7072 - DNA, 96 bp, Aspergillus thermomutatus
  misc_feature: 131
tgctccacgaccgcctacttcggtcgcattgtcacgtgaccaactaccatatacccaagcttggcaatggtagatggtatacaactaccagcaaca

SEQ ID NO: 7073 - DNA, 96 bp, Aspergillus thermomutatus
  misc_feature: 131
aggcacccacagaggccccatgtaaggcaggcagagaggtagagataggtagagagggacccaagtagcaggccataaggcaggccgtgagacaca

SEQ ID NO: 7074 - DNA, 96 bp, Aspergillus thermomutatus
  misc_feature: 131
aggtagagaggcaccataggaggtatggagcaatgcaccgcgtgaggcacccccagatatgccatgcaaggtttggaccaaggtagccagagagca

SEQ ID NO: 7075 - DNA, 96 bp, Aspergillus thermomutatus
  misc_feature: 131
gctccatacctcctatggtgcctctctacctatctccctacctcttcacctacctcttcacctacctcttcacctacctcttcacctacctcttca

SEQ ID NO: 7076 - DNA, 96 bp, Aspergillus thermomutatus
  misc_feature: 131
acgcggtgcattgctccatacctcctatggtgcctctctacctatctccctacctcttcacctacctcttcacctacctcttcacctacctcttca

SEQ ID NO: 7077 - DNA, 96 bp, Aspergillus thermomutatus
  misc_feature: 131
aggaaaaaagaaaagatttagaaatagaagattaaaggtaaagaggaagggatagagagaggattagagtaagggttggaatgaggattaggaaga

SEQ ID NO: 7078 - DNA, 96 bp, Aspergillus thermomutatus
  misc_feature: 131
aggtaagggttatttagtttattaagagagagggaaggaattgagaagagaataaggtgaataaggagagaggagaagagaggagatgagaagaga

SEQ ID NO: 7079 - DNA, 96 bp, Aspergillus thermomutatus
  misc_feature: 131
tctctatctacctctctattcacctctctattcacctctctattcacctctctatctacctctctatctccctaccccactgtctgcctgtctgcc

SEQ ID NO: 7080 - DNA, 96 bp, Aspergillus thermomutatus
  misc_feature: 131
atataatattaagcaaggcacggagagaggtaggcagagaggtagggaggtagggagggaggtagggagagaggtaggcgaagaggtaggcgacga

SEQ ID NO: 7081 - DNA, 96 bp, Aspergillus thermomutatus
  misc_feature: 131
atagagataggggaaagaggaatgataagggatagagtaagggatagatagtttagggagaggagggggtagaaaggtttagagataaagagagga

SEQ ID NO: 7082 - DNA, 96 bp, Aspergillus thermomutatus
  misc_feature: 131
tcatccttactctcatccttatccctaatccttatactaaccttactcctattcttcttccaactcttatcattttccttttcttaaatcctactt

SEQ ID NO: 7083 - DNA, 96 bp, Aspergillus thermomutatus
  misc_feature: 131
acactatatgcctcctttaggggtgcaaagcaaccaacatcaagaggctgtaaatgatttgatgaatgagaaggcatgtataaaggaatgatctga

SEQ ID NO: 7084 - DNA, 96 bp, Aspergillus thermomutatus
  misc_feature: 131
tattactcctataattccccttattcttcctttctgatccattattccttcctttttccttttgaaatccttctatctttctttccaccttccttc

SEQ ID NO: 7085 - DNA, 96 bp, Aspergillus thermomutatus
  misc_feature: 131
tatcgaaggttcagttactaatccatgttttacgtctatactcattaaatttgtatttatctcctgaagtaatttctttaaataatctaaatgctt

SEQ ID NO: 7086 - DNA, 96 bp, Aspergillus thermomutatus
  misc_feature: 131
tataatattaagcaaggcacggagagaggtaggcagagaggtagggaggtagggagggaggtagggagagaggtaggcgaagaggtaggcgacgag

SEQ ID NO: 7087 - DNA, 96 bp, Aspergillus thermomutatus
  misc_feature: 131
taggtgaaggtttagggggaaatttatctattctttccaaatatgcctcatgagtatttttacattctttccaaatatgcctcatgagtatttata

SEQ ID NO: 7088 - DNA, 96 bp, Aspergillus thermomutatus
  misc_feature: 131
ggtgcctcacgcggtgcattgctccatacctcctatggtgcctctctacctatctccctacctcttcacctacctcttcacctacctcttcaccta

SEQ ID NO: 7089 - DNA, 96 bp, Aspergillus thermomutatus
  misc_feature: 131
acctcacgtggtgcatctctggggctacgtggggtgtgttgatccctactatactacctgccccatatggtcgctctctggctaccttggtcccta

SEQ ID NO: 7090 - DNA, 96 bp, Aspergillus thermomutatus
  misc_feature: 131
tagcacgtagaatagcacgtagaatagcacgtcgaatagcatgtaggatgcacatagaatagcacgcggaggcaggcagataggcccacagagagg

SEQ ID NO: 7091 - DNA, 96 bp, Aspergillus thermomutatus
  misc_feature: 131
tacgtgctattctacgtgctattctacatgctattcgacgtgctattctatgtgctattcaacctgccgttctgcctgccgttctgcctactgttc

SEQ ID NO: 7092 - DNA, 96 bp, Aspergillus thermomutatus
  misc_feature: 131
taatagagataggggaaagaggaatgataagggatagagtaagggatagatagtttagggagaggagggggtagaaaggtttagagataaagagag

SEQ ID NO: 7093 - DNA, 96 bp, Aspergillus thermomutatus
  misc_feature: 131
taagagtaaggattagtgattttagaaataaaggagtaaaaagtcgatgagagtagagaagatgagatgatataagggaaagagaagattaaagcg

SEQ ID NO: 7094 - DNA, 96 bp, Aspergillus thermomutatus
  misc_feature: 131
aaggcacccacagaggccccatgtaaggcaggcagagaggtagagataggtagagagggacccaagtagcaggccataaggcaggccgtgagacac

SEQ ID NO: 7095 - DNA, 96 bp, Aspergillus thermomutatus
  misc_feature: 131
gggtgcctcacgcggtgcattgctccatacctcctatggtgcctctctacctatctccctacctcttcacctacctcttcacctacctcttcacct

SEQ ID NO: 7096 - DNA, 96 bp, Aspergillus thermomutatus
  misc_feature: 131
gcaaaattacggagcagcgataaccaatcgatcaccagcaatacagctcctgcgcggcacggttaggattgctccacgaccgcctacttcggtcgc

SEQ ID NO: 7097 - DNA, 96 bp, Aspergillus thermomutatus
  misc_feature: 131
cgtggtgcatctctggggctacgtggggtgtgttgatccctactatactacctgccccatatggtcgctctctggctaccttggtccctaccttgc

SEQ ID NO: 7098 - DNA, 96 bp, Aspergillus thermomutatus
  misc_feature: 131
aaaggacaaggtgacaggaaagaacaaaatgacaggaggagcaaggtagagaggtagaggttaatttttaatagtattagaaatgttatatcaatc

SEQ ID NO: 7099 - DNA, 96 bp, Aspergillus thermomutatus
  misc_feature: 131
gatggacagtgtgataaggtaagggttatttagtttattaagagagagggaaggaattgagaagagaataaggtgaataaggagagaggagaagag

SEQ ID NO: 7100 - DNA, 96 bp, Aspergillus thermomutatus
  misc_feature: 131
gatccttactctcatccttactctcatccttactctcatccttatccctaatccttatactaaccttactcctattcttcttccaactcttatcat

SEQ ID NO: 7101 - DNA, 96 bp, Aspergillus thermomutatus
  misc_feature: 131
ctgatccttactctcatccttactctcatccttactctcatccttatccctaatccttatactaaccttactcctattcttcttccaactcttatc

SEQ ID NO: 7102 - DNA, 96 bp, Aspergillus thermomutatus
  misc_feature: 131
ctaacccttactctactccttctcctaactctctctctactccttcttttactatttactttactccttcttctactctttacttcactttttatc

SEQ ID NO: 7103 - DNA, 96 bp, Aspergillus thermomutatus
  misc_feature: 131
aggcaaaattacggagcagcgataaccaatcgatcaccagcaatacagctcctgcgcggcacggttaggattgctccacgaccgcctacttcggtc

SEQ ID NO: 7104 - DNA, 96 bp, Aspergillus thermomutatus
  misc_feature: 131
ctctttactttctctttaccttctcacctcgttcccttctcattcttttctattcttgttcttttctctcttctcattctttcttgttctttaatt

SEQ ID NO: 7105 - DNA, 96 bp, Aspergillus thermomutatus
  misc_feature: 131
ctctctttttcttctctctctttttcttctctctctttttcttctctctctttttcttctctctctctcttttccttttcttctttcttttcttat

SEQ ID NO: 7106 - DNA, 96 bp, Aspergillus thermomutatus
  misc_feature: 131
ctattactcctataattccccttattcttcctttctgatccattattccttcctttttccttttgaaatccttctatctttctttccaccttcctt

SEQ ID NO: 7107 - DNA, 96 bp, Aspergillus thermomutatus
  misc_feature: 131
acgtggtgcatctctggggctacgtggggtgtgttgatccctactatactacctgccccatatggtcgctctctggctaccttggtccctaccttg

SEQ ID NO: 7108 - DNA, 96 bp, Aspergillus thermomutatus
  misc_feature: 131
attactcctataattccccttattcttcctttctgatccattattccttcctttttccttttgaaatccttctatctttctttccaccttccttct

SEQ ID NO: 7109 - DNA, 96 bp, Aspergillus thermomutatus
  misc_feature: 131
acgcctctctcaatgatgtgtagtctgccgtgctgcctaacatgcctgctgccatcctagatggcggaaacccatcatggtttggtattaggtgat

SEQ ID NO: 7110 - DNA, 96 bp, Aspergillus thermomutatus
  misc_feature: 131
actctcatccttactctcatccttatccctaatccttatactaaccttactcctattcttcttccaactcttatcattttccttttcttaaatcct

SEQ ID NO: 7111 - DNA, 96 bp, Aspergillus thermomutatus
  misc_feature: 131
aactaactaacccttactctctcttttctttcctactttaaattccctttaacccttacttattctcttcttttctttactatctctctctctcct

SEQ ID NO: 7112 - DNA, 96 bp, Aspergillus thermomutatus
  misc_feature: 131
aaaggtaaagaggaagggatagagagaggattagagtaagggttggaatgaggattaggaagaggaagaggaatagggatagaagtaaagaggggt

SEQ ID NO: 7113 - DNA, 96 bp, Aspergillus thermomutatus
  misc_feature: 130
aatataccaaccctctgtcatccatggtaaggttttcattgtctgctgagttttcgagcatttcttggatgattttgtccctttttgttgcttcaa

SEQ ID NO: 7114 - DNA, 96 bp, Aspergillus thermomutatus
  misc_feature: 130
ttctaaaacctaactcttaccctcctttttcttctctttcctttactctctttcccttctaaattccatcttccttcttctctttctctttcttat

SEQ ID NO: 7115 - DNA, 96 bp, Aspergillus thermomutatus
  misc_feature: 130
aagagaggataaaaagtgaagtaaagagtagaagaaggagtaaagtaaatagtaaaagaaggagtagagagagagttaggagaaggagtagagtaa

SEQ ID NO: 7116 - DNA, 96 bp, Aspergillus thermomutatus
  misc_feature: 130
ggtcatcgtggtgtttcgcgatgatttcggttctcatacactcaggtatgtagatgagattccgcaaatataccaaccctctgtcatccatggtaa

SEQ ID NO: 7117 - DNA, 96 bp, Aspergillus thermomutatus
  misc_feature: 130
tgtctgcctgtctgcctgtctgcctgtctgcctgtctctctacctcactgcctacctcatgtcggacctctctgtgggcctatctgcctgcctccg

SEQ ID NO: 7118 - DNA, 96 bp, Aspergillus thermomutatus
  misc_feature: 130
tagaatagcacgtagaatagcacgtcgaatagcatgtaggatgcacatagaatagcacgcggaggcaggcagataggcccacagagaggtccgaca

SEQ ID NO: 7119 - DNA, 96 bp, Aspergillus thermomutatus
  misc_feature: 130
agcgataaccaatcgatcaccagcaatacagctcctgcgcggcacggttaggattgctccacgaccgcctacttcggtcgcattgtcacgtgacca

SEQ ID NO: 7120 - DNA, 96 bp, Aspergillus thermomutatus
  misc_feature: 130
tgccttactgcctctctccctgtcttacatggtgccttcctccctaccttatattatacattcttcgctacctcacgcggtgcatctctggggcta

SEQ ID NO: 7121 - DNA, 96 bp, Aspergillus thermomutatus
  misc_feature: 130
tgcattgggtcatcgtggtgtttcgcgatgatttcggttctcatacactcaggtatgtagatgagattccgcaaatataccaaccctctgtcatcc

SEQ ID NO: 7122 - DNA, 96 bp, Aspergillus thermomutatus
  misc_feature: 130
aaggacaaggtgacaggaaagaacaaaatgacaggaggagcaaggtagagaggtagaggttaatttttaatagtattagaaatgttatatcaatca

SEQ ID NO: 7123 - DNA, 96 bp, Aspergillus thermomutatus
  misc_feature: 130
tctttctcactccctcttcctcctttcttgcatttctttattctcttaacatcctcccttctaatcttcaaccttctttatatatctctctactac

SEQ ID NO: 7124 - DNA, 96 bp, Aspergillus thermomutatus
  misc_feature: 130
taaggtaagggttatttagtttattaagagagagggaaggaattgagaagagaataaggtgaataaggagagaggagaagagaggagatgagaaga

SEQ ID NO: 7125 - DNA, 96 bp, Aspergillus thermomutatus
  misc_feature: 130
tctctttactttctctttaccttctcacctcgttcccttctcattcttttctattcttgttcttttctctcttctcattctttcttgttctttaat

SEQ ID NO: 7126 - DNA, 96 bp, Aspergillus thermomutatus
  misc_feature: 130
tctctctttttcttctctctctttttcttctctctctttttcttctctctctttttcttctctctctctcttttccttttcttctttcttttctta

SEQ ID NO: 7127 - DNA, 96 bp, Aspergillus thermomutatus
  misc_feature: 130
agaaggagtagagtaagggttaggaggaggattagagggagggatagaaagaggattagagggaggattagaaagaggattagagggaggattaga

SEQ ID NO: 7128 - DNA, 96 bp, Aspergillus thermomutatus
  misc_feature: 130
tcccttcttgatgtaagggaggatctgggcgtagggcgcacccttcaggcggttgttcacgtaggccattcggctctgcggcgttgggaagcggtc

SEQ ID NO: 7129 - DNA, 96 bp, Aspergillus thermomutatus
  misc_feature: 130
tccctactatcttcggttcctcaccccctaccatactacctacctcctgcagtacctctcttgctacctctcttgctacctctcttgctacctctc

SEQ ID NO: 7130 - DNA, 96 bp, Aspergillus thermomutatus
  misc_feature: 130
tcatttctttcgttctattttctcttctctctctttctatccttcttttccaccctcctccttttacaacctataatttctactaaccctcactct

SEQ ID NO: 7131 - DNA, 96 bp, Aspergillus thermomutatus
  misc_feature: 130
tcatacactcaggtatgtagatgagattccgcaaatataccaaccctctgtcatccatggtaaggttttcattgtctgctgagttttcgagcattt

SEQ ID NO: 7132 - DNA, 96 bp, Aspergillus thermomutatus
  misc_feature: 130
tcacacggccactatggctctgctgggaccactggtggactatctgccaatgctttcgcattgatttgatggtagcagctaggtagtggcattgag

SEQ ID NO: 7133 - DNA, 96 bp, Aspergillus thermomutatus
  misc_feature: 130
ctcacacggccactatggctctgctgggaccactggtggactatctgccaatgctttcgcattgatttgatggtagcagctaggtagtggcattga

SEQ ID NO: 7134 - DNA, 96 bp, Aspergillus thermomutatus
  misc_feature: 130
ctctttctcactccctcttcctcctttcttgcatttctttattctcttaacatcctcccttctaatcttcaaccttctttatatatctctctacta

SEQ ID NO: 7135 - DNA, 96 bp, Aspergillus thermomutatus
  misc_feature: 130
taggagaaggagtagagtaagggttaggaggaggattagagggagggatagaaagaggattagagggaggattagaaagaggattagagggaggat

SEQ ID NO: 7136 - DNA, 96 bp, Aspergillus thermomutatus
  misc_feature: 130
tagaatggtagggagtaaggcaccgtataagcaccaaatcagatagagagatatagagagaggtatccaagaggtagatatagtagtaggcatagt

SEQ ID NO: 7137 - DNA, 96 bp, Aspergillus thermomutatus
  misc_feature: 130
tacctacctgtctgcctgcctctctatcttcctctctatctacctctctattcacctctctattcacctctctattcacctctctatctacctctc

SEQ ID NO: 7138 - DNA, 96 bp, Aspergillus thermomutatus
  misc_feature: 130
taatctctggtataaccaccctaacttataatatatattaatacctactatgcctcactgcctacctcctggggttcctctatgcctactcttggt

SEQ ID NO: 7139 - DNA, 96 bp, Aspergillus thermomutatus
  misc_feature: 130
ggtaagagataattaatagagataggggaaagaggaatgataagggatagagtaagggatagatagtttagggagaggagggggtagaaaggttta

SEQ ID NO: 7140 - DNA, 96 bp, Aspergillus thermomutatus
  misc_feature: 130
gttaggagaaggagtagagtaagggttaggaggaggattagagggagggatagaaagaggattagagggaggattagaaagaggattagagggagg

SEQ ID NO: 7141 - DNA, 96 bp, Aspergillus thermomutatus
  misc_feature: 130
gtaaagaaaagaagagaataagtaagggttaaagggaatttaaagtaggaaagaaaagagagagtaagggttagttagtttagaaggagaaaggac

SEQ ID NO: 7142 - DNA, 96 bp, Aspergillus thermomutatus
  misc_feature: 130
gtagatgagattccgcaaatataccaaccctctgtcatccatggtaaggttttcattgtctgctgagttttcgagcatttcttggatgattttgtc

SEQ ID NO: 7143 - DNA, 96 bp, Aspergillus thermomutatus
  misc_feature: 130
ctacctcacgtggtgcatctctggggctacgtggggtgtgttgatccctactatactacctgccccatatggtcgctctctggctaccttggtccc

SEQ ID NO: 7144 - DNA, 96 bp, Aspergillus thermomutatus
  misc_feature: 130
attctacgtgctattctacatgctattcgacgtgctattctatgtgctattcaacctgccgttctgcctgccgttctgcctactgttctgcctgcc

SEQ ID NO: 7145 - DNA, 96 bp, Aspergillus thermomutatus
  misc_feature: 130
ctggttcccacgtaggacgatcgtaacctgtccatttgacgagatactccttgcggcggcctctgccaacgcgtttctcacgctcatccagtatcc

SEQ ID NO: 7146 - DNA, 96 bp, Aspergillus thermomutatus
  misc_feature: 130
gctgtgacgtattcattgtcatccgtgggtgcccatcccatctgttcaactaacagttgtcgctgtaacggtgctactgccgccagaactgttgtt

SEQ ID NO: 7147 - DNA, 96 bp, Aspergillus thermomutatus
  misc_feature: 130
actaactaacccttactctctcttttctttcctactttaaattccctttaacccttacttattctcttcttttctttactatctctctctctcctc

SEQ ID NO: 7148 - DNA, 96 bp, Aspergillus thermomutatus
  misc_feature: 130
aaccatctctttttcttctcattctcttctcttcttgttcccttctctccttatcctcttcccgttttctcctcgttgtctcttctcattctcctc

SEQ ID NO: 7149 - DNA, 96 bp, Aspergillus thermomutatus
  misc_feature: 130
aaggtaagggttatttagtttattaagagagagggaaggaattgagaagagaataaggtgaataaggagagaggagaagagaggagatgagaagag

SEQ ID NO: 7150 - DNA, 96 bp, Aspergillus thermomutatus
  misc_feature: 130
ctacgtgctattctacgtgctattctacatgctattcgacgtgctattctatgtgctattcaacctgccgttctgcctgccgttctgcctactgtt

SEQ ID NO: 7151 - DNA, 96 bp, Aspergillus thermomutatus
  misc_feature: 130
acagaggccccatgtaaggcaggcagagaggtagagataggtagagagggacccaagtagcaggccataaggcaggccgtgagacacacagagagg

SEQ ID NO: 7152 - DNA, 96 bp, Aspergillus thermomutatus
  misc_feature: 130
aggagtagagtaagggttaggaggaggattagagggagggatagaaagaggattagagggaggattagaaagaggattagagggaggattagaggg

SEQ ID NO: 7153 - DNA, 96 bp, Aspergillus thermomutatus
  misc_feature: 130
acgagccagacagatcaagccagccagacgaagcagatgagccggagcccccgcccagtatcaaggagctactagatactgcctaccagtctgatg

SEQ ID NO: 7154 - DNA, 96 bp, Aspergillus thermomutatus
  misc_feature: 130
cagaggccccatgtaaggcaggcagagaggtagagataggtagagagggacccaagtagcaggccataaggcaggccgtgagacacacagagaggt

SEQ ID NO: 7155 - DNA, 96 bp, Aspergillus thermomutatus
  misc_feature: 130
agaggccccatgtaaggcaggcagagaggtagagataggtagagagggacccaagtagcaggccataaggcaggccgtgagacacacagagaggtg

SEQ ID NO: 7156 - DNA, 96 bp, Aspergillus thermomutatus
  misc_feature: 130
atataccaaccctctgtcatccatggtaaggttttcattgtctgctgagttttcgagcatttcttggatgattttgtccctttttgttgcttcaat

SEQ ID NO: 7157 - DNA, 96 bp, Aspergillus thermomutatus
  misc_feature: 130
agtgctgtgacgtattcattgtcatccgtgggtgcccatcccatctgttcaactaacagttgtcgctgtaacggtgctactgccgccagaactgtt

SEQ ID NO: 7158 - DNA, 96 bp, Aspergillus thermomutatus
  misc_feature: 129
gaagaaagaagaggagaggagaaggaaagaaaagagaaacagaggagggaaagaagggaagagatgagaagagaggagaaggaggagagaggccaa

SEQ ID NO: 7159 - DNA, 96 bp, Aspergillus thermomutatus
  misc_feature: 129
ttctacgtgctattctacatgctattcgacgtgctattctatgtgctattcaacctgccgttctgcctgccgttctgcctactgttctgcctgcct

SEQ ID NO: 7160 - DNA, 96 bp, Aspergillus thermomutatus
  misc_feature: 129
tagagataggggaaagaggaatgataagggatagagtaagggatagatagtttagggagaggagggggtagaaaggtttagagataaagagaggaa

SEQ ID NO: 7161 - DNA, 96 bp, Aspergillus thermomutatus
  misc_feature: 129
aaaggcacccacagaggccccatgtaaggcaggcagagaggtagagataggtagagagggacccaagtagcaggccataaggcaggccgtgagaca

SEQ ID NO: 7162 - DNA, 96 bp, Aspergillus thermomutatus
  misc_feature: 129
aggcacaggaggtggtggatcacctaataccaaaccatgatgggtttccgccatctaggatggcagcaggcatgttaggcagcacggcagactaca

SEQ ID NO: 7163 - DNA, 96 bp, Aspergillus thermomutatus
  misc_feature: 129
tggtagggagtaaggcaccgtataagcaccaaatcagatagagagatatagagagaggtatccaagaggtagatatagtagtaggcatagtttcca

SEQ ID NO: 7164 - DNA, 96 bp, Aspergillus thermomutatus
  misc_feature: 129
aggccataaggcaggccatgagacacacagagaggtgtacacaaggcaggcagaacagtaggcagaacggcaggcagaacggcaggttgaatagca

SEQ ID NO: 7165 - DNA, 96 bp, Aspergillus thermomutatus
  misc_feature: 129
tgatttgatggtagcagctaggtagtggcattgagtttgacctcgcaggcagagcaggccattcgagtgacatggtaatataggcagaggctcatc

SEQ ID NO: 7166 - DNA, 96 bp, Aspergillus thermomutatus
  misc_feature: 129
tgatggacagtgtgataaggtaagggttatttagtttattaagagagagggaaggaattgagaagagaataaggtgaataaggagagaggagaaga

SEQ ID NO: 7167 - DNA, 96 bp, Aspergillus thermomutatus
  misc_feature: 129
aaatataccaaccctctgtcatccatggtaaggttttcattgtctgctgagttttcgagcatttcttggatgattttgtccctttttgttgcttca

SEQ ID NO: 7168 - DNA, 96 bp, Aspergillus thermomutatus
  misc_feature: 129
aattaatagagataggggaaagaggaatgataagggatagagtaagggatagatagtttagggagaggagggggtagaaaggtttagagataaaga

SEQ ID NO: 7169 - DNA, 96 bp, Aspergillus thermomutatus
  misc_feature: 129
tctctttttcttctctctctttttcttctctctctttttcttctctctctttttcttctctctctctcttttccttttcttctttcttttcttatc

SEQ ID NO: 7170 - DNA, 96 bp, Aspergillus thermomutatus
  misc_feature: 129
atggacagtgtgataaggtaagggttatttagtttattaagagagagggaaggaattgagaagagaataaggtgaataaggagagaggagaagaga

SEQ ID NO: 7171 - DNA, 96 bp, Aspergillus thermomutatus
  misc_feature: 129
ataaaggcacccacagaggccccatgtaaggcaggcagagaggtagagataggtagagagggacccaagtagcaggccataaggcaggccgtgaga

SEQ ID NO: 7172 - DNA, 96 bp, Aspergillus thermomutatus
  misc_feature: 129
taagagataattaatagagataggggaaagaggaatgataagggatagagtaagggatagatagtttagggagaggagggggtagaaaggtttaga

SEQ ID NO: 7173 - DNA, 96 bp, Aspergillus thermomutatus
  misc_feature: 129
aaaccttctgctacaacaagaaatcagggttctacgggcagagaatgaacggaaaagaaagaagaaggcaagaatacgtgctaatctaggtggtga

SEQ ID NO: 7174 - DNA, 96 bp, Aspergillus thermomutatus
  misc_feature: 129
gagataggggaaagaggaatgataagggatagagtaagggatagatagtttagggagaggagggggtagaaaggtttagagataaagagaggaata

SEQ ID NO: 7175 - DNA, 96 bp, Aspergillus thermomutatus
  misc_feature: 129
ataagggaaaggaagagaggatagaagaatcaaagaagttgaggagaaaggaagggaggaaatattaagagagaagaagaaaaggagggagggata

SEQ ID NO: 7176 - DNA, 96 bp, Aspergillus thermomutatus
  misc_feature: 129
ataaccaatcgatcaccagcaatacagctcctgcgcggcacggttaggattgctccacgaccgcctacttcggtcgcattgtcacgtgaccaacta

SEQ ID NO: 7177 - DNA, 96 bp, Aspergillus thermomutatus
  misc_feature: 129
taactaacccttactctctcttttctttcctactttaaattccctttaacccttacttattctcttcttttctttactatctctctctctcctcta

SEQ ID NO: 7178 - DNA, 96 bp, Aspergillus thermomutatus
  misc_feature: 129
taaaggcacccacagaggccccatgtaaggcaggcagagaggtagagataggtagagagggacccaagtagcaggccataaggcaggccgtgagac

SEQ ID NO: 7179 - DNA, 96 bp, Aspergillus thermomutatus
  misc_feature: 129
ggaagagaggatagaagaatcaaagaagttgaggagaaaggaagggaggaaatattaagagagaagaagaaaaggagggagggatagtttatttta

SEQ ID NO: 7180 - DNA, 96 bp, Aspergillus thermomutatus
  misc_feature: 129
cgataaccaatcgatcaccagcaatacagctcctgcgcggcacggttaggattgctccacgaccgcctacttcggtcgcattgtcacgtgaccaac

SEQ ID NO: 7181 - DNA, 96 bp, Aspergillus thermomutatus
  misc_feature: 129
gtgcctcacgcggtgcattgctccatacctcctatggtgcctctctacctatctccctacctcttcacctacctcttcacctacctcttcacctac

SEQ ID NO: 7182 - DNA, 96 bp, Aspergillus thermomutatus
  misc_feature: 129
gcagcgataaccaatcgatcaccagcaatacagctcctgcgcggcacggttaggattgctccacgaccgcctacttcggtcgcattgtcacgtgac

SEQ ID NO: 7183 - DNA, 96 bp, Aspergillus thermomutatus
  misc_feature: 129
gtagggagtaaggcaccgtataagcaccaaatcagatagagagatatagagagaggtatccaagaggtagatatagtagtaggcatagtttccagc

SEQ ID NO: 7184 - DNA, 96 bp, Aspergillus thermomutatus
  misc_feature: 129
gtagaatggtagggagtaaggcaccgtataagcaccaaatcagatagagagatatagagagaggtatccaagaggtagatatagtagtaggcatag

SEQ ID NO: 7185 - DNA, 96 bp, Aspergillus thermomutatus
  misc_feature: 129
cagcgataaccaatcgatcaccagcaatacagctcctgcgcggcacggttaggattgctccacgaccgcctacttcggtcgcattgtcacgtgacc

SEQ ID NO: 7186 - DNA, 96 bp, Aspergillus thermomutatus
  misc_feature: 129
aggttgaatagcaggttgaatagcaggttgaatagcaggttgaatagcaggttgaatagcaggttgaatagcaggttgaatagcaggttgaatagc

SEQ ID NO: 7187 - DNA, 96 bp, Aspergillus thermomutatus
  misc_feature: 129
gcctcacgcggtgcattgctccatacctcctatggtgcctctctacctatctccctacctcttcacctacctcttcacctacctcttcacctacct

SEQ ID NO: 7188 - DNA, 96 bp, Aspergillus thermomutatus
  misc_feature: 129
gcaggccataaggcaggccatgagacacacagagaggtgtacacaaggcaggcagaacagtaggcagaacggcaggcagaacggcaggttgaatag

SEQ ID NO: 7189 - DNA, 96 bp, Aspergillus thermomutatus
  misc_feature: 129
cgcctctctcaatgatgtgtagtctgccgtgctgcctaacatgcctgctgccatcctagatggcggaaacccatcatggtttggtattaggtgatc

SEQ ID NO: 7190 - DNA, 96 bp, Aspergillus thermomutatus
  misc_feature: 129
gataagggaaaggaagagaggatagaagaatcaaagaagttgaggagaaaggaagggaggaaatattaagagagaagaagaaaaggagggagggat

SEQ ID NO: 7191 - DNA, 96 bp, Aspergillus thermomutatus
  misc_feature: 129
aagaaagaagaggagaggagaaggaaagaaaagagaaacagaggagggaaagaagggaagagatgagaagagaggagaaggaggagagaggccaag

SEQ ID NO: 7192 - DNA, 96 bp, Aspergillus thermomutatus
  misc_feature: 129
aggtaggcgaagaggtaggcgacgaggtaggcgacgaggtaggtgaagaggtaggtgaagaggtaggtgaagaggtaggtgaagaggtaggtgaag

SEQ ID NO: 7193 - DNA, 96 bp, Aspergillus thermomutatus
  misc_feature: 129
attaatagagataggggaaagaggaatgataagggatagagtaagggatagatagtttagggagaggagggggtagaaaggtttagagataaagag

SEQ ID NO: 7194 - DNA, 96 bp, Aspergillus thermomutatus
  misc_feature: 129
ctccctactatcttcggttcctcaccccctaccatactacctacctcctgcagtacctctcttgctacctctcttgctacctctcttgctacctct

SEQ ID NO: 7195 - DNA, 96 bp, Aspergillus thermomutatus
  misc_feature: 129
ctcacgcggtgcattgctccatacctcctatggtgcctctctacctatctccctacctcttcacctacctcttcacctacctcttcacctacctct

SEQ ID NO: 7196 - DNA, 96 bp, Aspergillus thermomutatus
  misc_feature: 129
ctatcgaaggttcagttactaatccatgttttacgtctatactcattaaatttgtatttatctcctgaagtaatttctttaaataatctaaatgct

SEQ ID NO: 7197 - DNA, 96 bp, Aspergillus thermomutatus
  misc_feature: 129
ctacctacctgtctgcctgcctctctatcttcctctctatctacctctctattcacctctctattcacctctctattcacctctctatctacctct

SEQ ID NO: 7198 - DNA, 96 bp, Aspergillus thermomutatus
  misc_feature: 129
aaggagtagagtaagggttaggaggaggattagagggagggatagaaagaggattagagggaggattagaaagaggattagagggaggattagagg

SEQ ID NO: 7199 - DNA, 96 bp, Aspergillus thermomutatus
  misc_feature: 129
cctaacccttactctactccttctcctaactctctctctactccttcttttactatttactttactccttcttctactctttacttcactttttat

SEQ ID NO: 7200 - DNA, 96 bp, Aspergillus thermomutatus
  misc_feature: 129
catttctttcgttctattttctcttctctctctttctatccttcttttccaccctcctccttttacaacctataatttctactaaccctcactctt

SEQ ID NO: 7201 - DNA, 96 bp, Aspergillus thermomutatus
  misc_feature: 129
atctacctcttggatacctctctctatatctctctatctgatttggtggcttatacggtgccttactccccaccattctacctacctgtctgcctg

SEQ ID NO: 7202 - DNA, 96 bp, Aspergillus thermomutatus
  misc_feature: 129
aagtagcaggccataaggcaggccatgagacacacagagaggtgtacacaaggcaggcagaacagtaggcagaacggcaggcagaacggcaggttg

SEQ ID NO: 7203 - DNA, 96 bp, Aspergillus thermomutatus
  misc_feature: 129
agagataggggaaagaggaatgataagggatagagtaagggatagatagtttagggagaggagggggtagaaaggtttagagataaagagaggaat

SEQ ID NO: 7204 - DNA, 96 bp, Aspergillus thermomutatus
  misc_feature: 129
aggtgacaggaaagaacaaaatgacaggaggagcaaggtagagaggtagaggttaatttttaatagtattagaaatgttatatcaatcaattattt

SEQ ID NO: 7205 - DNA, 96 bp, Aspergillus thermomutatus
  misc_feature: 129
aaaccatctctttttcttctcattctcttctcttcttgttcccttctctccttatcctcttcccgttttctcctcgttgtctcttctcattctcct

SEQ ID NO: 7206 - DNA, 96 bp, Aspergillus thermomutatus
  misc_feature: 129
aggaagagaggatagaagaatcaaagaagttgaggagaaaggaagggaggaaatattaagagagaagaagaaaaggagggagggatagtttatttt

SEQ ID NO: 7207 - DNA, 96 bp, Aspergillus thermomutatus
  misc_feature: 129
agcacgtagaatagcacgtagaatagcacgtcgaatagcatgtaggatgcacatagaatagcacgcggaggcaggcagataggcccacagagaggt

SEQ ID NO: 7208 - DNA, 96 bp, Aspergillus thermomutatus
  misc_feature: 129
actctgatccttactctcatccttactctcatccttactctcatccttatccctaatccttatactaaccttactcctattcttcttccaactctt

SEQ ID NO: 7209 - DNA, 96 bp, Aspergillus thermomutatus
  misc_feature: 128
ttgatggacagtgtgataaggtaagggttatttagtttattaagagagagggaaggaattgagaagagaataaggtgaataaggagagaggagaag

SEQ ID NO: 7210 - DNA, 96 bp, Aspergillus thermomutatus
  misc_feature: 128
ttctctttactttctctttaccttctcacctcgttcccttctcattcttttctattcttgttcttttctctcttctcattctttcttgttctttaa

SEQ ID NO: 7211 - DNA, 96 bp, Aspergillus thermomutatus
  misc_feature: 128
aaggcaggccatgagacacacagagaggtgtacacaaggcaggcagaacagtaggcagaacggcaggcagaacggcaggttgaatagcacatagaa

SEQ ID NO: 7212 - DNA, 96 bp, Aspergillus thermomutatus
  misc_feature: 128
agtattagaggaagagttagggagagtgtttaaggattaaaagaaagagtagagtaagggataggttaagagaggtaaagaggggtaagtaaggaa

SEQ ID NO: 7213 - DNA, 96 bp, Aspergillus thermomutatus
  misc_feature: 128
ttaggagaaggagtagagtaagggttaggaggaggattagagggagggatagaaagaggattagagggaggattagaaagaggattagagggagga

SEQ ID NO: 7214 - DNA, 96 bp, Aspergillus thermomutatus
  misc_feature: 128
gccataaggcaggccatgagacacacagagaggtgtacacaaggcaggcagaacagtaggcagaacggcaggcagaacggcaggttgaatagcaca

SEQ ID NO: 7215 - DNA, 96 bp, Aspergillus thermomutatus
  misc_feature: 128
tggacagtgtgataaggtaagggttatttagtttattaagagagagggaaggaattgagaagagaataaggtgaataaggagagaggagaagagag

SEQ ID NO: 7216 - DNA, 96 bp, Aspergillus thermomutatus
  misc_feature: 128
gagttggaagaagaataggagtaaggttagtataaggattagggataaggatgagagtaaggatgagagtaaggatgagagtaaggatcagagtca

SEQ ID NO: 7217 - DNA, 96 bp, Aspergillus thermomutatus
  misc_feature: 128
gacagtgtgataaggtaagggttatttagtttattaagagagagggaaggaattgagaagagaataaggtgaataaggagagaggagaagagagga

SEQ ID NO: 7218 - DNA, 96 bp, Aspergillus thermomutatus
  misc_feature: 128
tcaggtatgtagatgagattccgcaaatataccaaccctctgtcatccatggtaaggttttcattgtctgctgagttttcgagcatttcttggatg

SEQ ID NO: 7219 - DNA, 96 bp, Aspergillus thermomutatus
  misc_feature: 128
agtagcaggccataaggcaggccatgagacacacagagaggtgtacacaaggcaggcagaacagtaggcagaacggcaggcagaacggcaggttga

SEQ ID NO: 7220 - DNA, 96 bp, Aspergillus thermomutatus
  misc_feature: 128
tatctacctcttggatacctctctctatatctctctatctgatttggtggcttatacggtgccttactccccaccattctacctacctgtctgcct

SEQ ID NO: 7221 - DNA, 96 bp, Aspergillus thermomutatus
  misc_feature: 128
ctattctacgtgctattctacgtgctattctacatgctattcgacgtgctattctatgtgctattcaacctgccgttctgcctgccgttctgccta

SEQ ID NO: 7222 - DNA, 96 bp, Aspergillus thermomutatus
  misc_feature: 128
tacctcacgtggtgcatctctggggctacgtggggtgtgttgatccctactatactacctgccccatatggtcgctctctggctaccttggtccct

SEQ ID NO: 7223 - DNA, 96 bp, Aspergillus thermomutatus
  misc_feature: 128
aataagtaagggtaagagataattaatagagataggggaaagaggaatgataagggatagagtaagggatagatagtttagggagaggagggggta

SEQ ID NO: 7224 - DNA, 96 bp, Aspergillus thermomutatus
  misc_feature: 128
taataagtaagggtaagagataattaatagagataggggaaagaggaatgataagggatagagtaagggatagatagtttagggagaggagggggt

SEQ ID NO: 7225 - DNA, 96 bp, Aspergillus thermomutatus
  misc_feature: 128
taaaccatctctttttcttctcattctcttctcttcttgttcccttctctccttatcctcttcccgttttctcctcgttgtctcttctcattctcc

SEQ ID NO: 7226 - DNA, 96 bp, Aspergillus thermomutatus
  misc_feature: 128
gtgctattctacgtgctattctacatgctattcgacgtgctattctatgtgctattcaacctgccgttctgcctgccgttctgcctactgttctgc

SEQ ID NO: 7227 - DNA, 96 bp, Aspergillus thermomutatus
  misc_feature: 128
gtgcattgctccatacctcctatggtgcctctctacctatctccctacctcttcacctacctcttcacctacctcttcacctacctcttcacctac

SEQ ID NO: 7228 - DNA, 96 bp, Aspergillus thermomutatus
  misc_feature: 128
ctttcatttctttcgttctattttctcttctctctctttctatccttcttttccaccctcctccttttacaacctataatttctactaaccctcac

SEQ ID NO: 7229 - DNA, 96 bp, Aspergillus thermomutatus
  misc_feature: 128
gtagaatagcacgtagaatagcacgtcgaatagcatgtaggatgcacatagaatagcacgcggaggcaggcagataggcccacagagaggtccgac

SEQ ID NO: 7230 - DNA, 96 bp, Aspergillus thermomutatus
  misc_feature: 128
gcggtgcattgctccatacctcctatggtgcctctctacctatctccctacctcttcacctacctcttcacctacctcttcacctacctcttcacc

SEQ ID NO: 7231 - DNA, 96 bp, Aspergillus thermomutatus
  misc_feature: 128
acgaaatacctcgggtttatcattgaagctggcaagggcgtacgcatggaccccgacaaggtaaaagctatactagaatggcagacccctacatcc

SEQ ID NO: 7232 - DNA, 96 bp, Aspergillus thermomutatus
  misc_feature: 128
ctgtctgcctgtctgcctgtctgcctgtctgcctgtctctctacctcactgcctacctcatgtcggacctctctgtgggcctatctgcctgcctcc

SEQ ID NO: 7233 - DNA, 96 bp, Aspergillus thermomutatus
  misc_feature: 128
ggacagtgtgataaggtaagggttatttagtttattaagagagagggaaggaattgagaagagaataaggtgaataaggagagaggagaagagagg

SEQ ID NO: 7234 - DNA, 96 bp, Aspergillus thermomutatus
  misc_feature: 128
caggccataaggcaggccatgagacacacagagaggtgtacacaaggcaggcagaacagtaggcagaacggcaggcagaacggcaggttgaatagc

SEQ ID NO: 7235 - DNA, 96 bp, Aspergillus thermomutatus
  misc_feature: 128
ctgcctgtctgcctgtctgcctgtctgcctgtctgcctgtctctctacctcactgcctacctcatgtcggacctctctgtgggcctatctgcctgc

SEQ ID NO: 7236 - DNA, 96 bp, Aspergillus thermomutatus
  misc_feature: 128
atctttaatctctggtataaccaccctaacttataatatatattaatacctactatgcctcactgcctacctcctggggttcctctatgcctactc

SEQ ID NO: 7237 - DNA, 96 bp, Aspergillus thermomutatus
  misc_feature: 128
cctgtctgcctgtctgcctgtctgcctgtctgcctgtctctctacctcactgcctacctcatgtcggacctctctgtgggcctatctgcctgcctc

SEQ ID NO: 7238 - DNA, 96 bp, Aspergillus thermomutatus
  misc_feature: 128
gagattccgcaaatataccaaccctctgtcatccatggtaaggttttcattgtctgctgagttttcgagcatttcttggatgattttgtccctttt

SEQ ID NO: 7239 - DNA, 96 bp, Aspergillus thermomutatus
  misc_feature: 128
ctaaaccatctctttttcttctcattctcttctcttcttgttcccttctctccttatcctcttcccgttttctcctcgttgtctcttctcattctc

SEQ ID NO: 7240 - DNA, 96 bp, Aspergillus thermomutatus
  misc_feature: 128
cgctacctcacgtggtgcatctctggggctacgtggggtgtgttgatccctactatactacctgccccatatggtcgctctctggctaccttggtc

SEQ ID NO: 7241 - DNA, 96 bp, Aspergillus thermomutatus
  misc_feature: 128
cttctctctctttttcttctctctctttttcttctctctctttttcttctctctctttttcttctctctctctcttttccttttcttctttctttt

SEQ ID NO: 7242 - DNA, 96 bp, Aspergillus thermomutatus
  misc_feature: 128
agagaggataaaaagtgaagtaaagagtagaagaaggagtaaagtaaatagtaaaagaaggagtagagagagagttaggagaaggagtagagtaag

SEQ ID NO: 7243 - DNA, 96 bp, Aspergillus thermomutatus
  misc_feature: 128
aagagataattaatagagataggggaaagaggaatgataagggatagagtaagggatagatagtttagggagaggagggggtagaaaggtttagag

SEQ ID NO: 7244 - DNA, 96 bp, Aspergillus thermomutatus
  misc_feature: 128
aggatagaagaatcaaagaagttgaggagaaaggaagggaggaaatattaagagagaagaagaaaaggagggagggatagtttattttaagaatag

SEQ ID NO: 7245 - DNA, 96 bp, Aspergillus thermomutatus
  misc_feature: 128
ccataaggcaggccatgagacacacagagaggtgtacacaaggcaggcagaacagtaggcagaacggcaggcagaacggcaggttgaatagcacat

SEQ ID NO: 7246 - DNA, 96 bp, Aspergillus thermomutatus
  misc_feature: 128
catcgtggtgtttcgcgatgatttcggttctcatacactcaggtatgtagatgagattccgcaaatataccaaccctctgtcatccatggtaaggt

SEQ ID NO: 7247 - DNA, 96 bp, Aspergillus thermomutatus
  misc_feature: 128
caagtagcaggccataaggcaggccatgagacacacagagaggtgtacacaaggcaggcagaacagtaggcagaacggcaggcagaacggcaggtt

SEQ ID NO: 7248 - DNA, 96 bp, Aspergillus thermomutatus
  misc_feature: 128
aggcaggccatgagacacacagagaggtgtacacaaggcaggcagaacagtaggcagaacggcaggcagaacggcaggttgaatagcacatagaat

SEQ ID NO: 7249 - DNA, 96 bp, Aspergillus thermomutatus
  misc_feature: 128
atctacctctctattcacctctctattcacctctctattcacctctctatctacctctctatctccctaccccactgtctgcctgtctgcctgtct

SEQ ID NO: 7250 - DNA, 96 bp, Aspergillus thermomutatus
  misc_feature: 128
aaccttctgctacaacaagaaatcagggttctacgggcagagaatgaacggaaaagaaagaagaaggcaagaatacgtgctaatctaggtggtgat

SEQ ID NO: 7251 - DNA, 96 bp, Aspergillus thermomutatus
  misc_feature: 128
aaggaagagaggatagaagaatcaaagaagttgaggagaaaggaagggaggaaatattaagagagaagaagaaaaggagggagggatagtttattt

SEQ ID NO: 7252 - DNA, 96 bp, Aspergillus thermomutatus
  misc_feature: 127
tttcatttctttcgttctattttctcttctctctctttctatccttcttttccaccctcctccttttacaacctataatttctactaaccctcact

SEQ ID NO: 7253 - DNA, 96 bp, Aspergillus thermomutatus
  misc_feature: 127
atttgatggtagcagctaggtagtggcattgagtttgacctcgcaggcagagcaggccattcgagtgacatggtaatataggcagaggctcatcaa

SEQ ID NO: 7254 - DNA, 96 bp, Aspergillus thermomutatus
  misc_feature: 127
gattatatactgtaaagattacttcttcattaattaattctctaaaaaatagcccattttaatatacaagacccaaagattccctagattaaataa

SEQ ID NO: 7255 - DNA, 96 bp, Aspergillus thermomutatus
  misc_feature: 127
cgaaatacctcgggtttatcattgaagctggcaagggcgtacgcatggaccccgacaaggtaaaagctatactagaatggcagacccctacatcca

SEQ ID NO: 7256 - DNA, 96 bp, Aspergillus thermomutatus
  misc_feature: 127
tgctcccaggcctgcatcacctcatcgaccgcagcctggacatggtgggtcgatggggccggtggacacccgtctggaacgcgaatatggatatag

SEQ ID NO: 7257 - DNA, 96 bp, Aspergillus thermomutatus
  misc_feature: 127
tgcctcacgcggtgcattgctccatacctcctatggtgcctctctacctatctccctacctcttcacctacctcttcacctacctcttcacctacc

SEQ ID NO: 7258 - DNA, 96 bp, Aspergillus thermomutatus
  misc_feature: 127
taggtagaatggtagggagtaaggcaccgtataagcaccaaatcagatagagagatatagagagaggtatccaagaggtagatatagtagtaggca

SEQ ID NO: 7259 - DNA, 96 bp, Aspergillus thermomutatus
  misc_feature: 127
tgatccttactctcatccttactctcatccttactctcatccttatccctaatccttatactaaccttactcctattcttcttccaactcttatca

SEQ ID NO: 7260 - DNA, 96 bp, Aspergillus thermomutatus
  misc_feature: 127
tgagattccgcaaatataccaaccctctgtcatccatggtaaggttttcattgtctgctgagttttcgagcatttcttggatgattttgtcccttt

SEQ ID NO: 7261 - DNA, 96 bp, Aspergillus thermomutatus
  misc_feature: 127
tctctccttatcctcttcccgttttctcctcgttgtctcttctcattctcctctcttatcattctctttactttctctttaccttctcacctcgtt

SEQ ID NO: 7262 - DNA, 96 bp, Aspergillus thermomutatus
  misc_feature: 127
cgtagaatagcacgtagaatagcacgtcgaatagcatgtaggatgcacatagaatagcacgcggaggcaggcagataggcccacagagaggtccga

SEQ ID NO: 7263 - DNA, 96 bp, Aspergillus thermomutatus
  misc_feature: 127
agtaaagaaaagaagagaataagtaagggttaaagggaatttaaagtaggaaagaaaagagagagtaagggttagttagtttagaaggagaaagga

SEQ ID NO: 7264 - DNA, 96 bp, Aspergillus thermomutatus
  misc_feature: 127
aagatagaggttaagtaatcaaagagattagagaaggagatgagatttttaggattagaaaagaaaaaaaaaagaaaggatgaataagaagaagga

SEQ ID NO: 7265 - DNA, 96 bp, Aspergillus thermomutatus
  misc_feature: 127
gtaaaagaaggagtagagagagagttaggagaaggagtagagtaagggttaggaggaggattagagggagggatagaaagaggattagagggagga

SEQ ID NO: 7266 - DNA, 96 bp, Aspergillus thermomutatus
  misc_feature: 127
agataagggaaaggaagagaggatagaagaatcaaagaagttgaggagaaaggaagggaggaaatattaagagagaagaagaaaaggagggaggga

SEQ ID NO: 7267 - DNA, 96 bp, Aspergillus thermomutatus
  misc_feature: 127
tcacgcggtgcattgctccatacctcctatggtgcctctctacctatctccctacctcttcacctacctcttcacctacctcttcacctacctctt

SEQ ID NO: 7268 - DNA, 96 bp, Aspergillus thermomutatus
  misc_feature: 127
agcaggccataaggcaggccatgagacacacagagaggtgtacacaaggcaggcagaacagtaggcagaacggcaggcagaacggcaggttgaata

SEQ ID NO: 7269 - DNA, 96 bp, Aspergillus thermomutatus
  misc_feature: 127
ctgctcccaggcctgcatcacctcatcgaccgcagcctggacatggtgggtcgatggggccggtggacacccgtctggaacgcgaatatggatata

SEQ ID NO: 7270 - DNA, 96 bp, Aspergillus thermomutatus
  misc_feature: 127
acgagcacctaccaggagggagtccagccttataaggtgtttcgaggacgaaacgctaagagagggggaggtgatgttacgacaccaacactacta

SEQ ID NO: 7271 - DNA, 96 bp, Aspergillus thermomutatus
  misc_feature: 127
tagtaatatatgtaggtatataaaagccacgcagggttaggtataaaggcacccacagaggccccatgtaaggcagggttaaggcaggcagagagg

SEQ ID NO: 7272 - DNA, 96 bp, Aspergillus thermomutatus
  misc_feature: 127
tagtaaagaaaagaagagaataagtaagggttaaagggaatttaaagtaggaaagaaaagagagagtaagggttagttagtttagaaggagaaagg

SEQ ID NO: 7273 - DNA, 96 bp, Aspergillus thermomutatus
  misc_feature: 127
atttctttcgttctattttctcttctctctctttctatccttcttttccaccctcctccttttacaacctataatttctactaaccctcactctta

SEQ ID NO: 7274 - DNA, 96 bp, Aspergillus thermomutatus
  misc_feature: 127
taaagaaaagaagagaataagtaagggttaaagggaatttaaagtaggaaagaaaagagagagtaagggttagttagtttagaaggagaaaggacg

SEQ ID NO: 7275 - DNA, 96 bp, Aspergillus thermomutatus
  misc_feature: 127
gttggaagaagaataggagtaaggttagtataaggattagggataaggatgagagtaaggatgagagtaaggatgagagtaaggatcagagtcagg

SEQ ID NO: 7276 - DNA, 96 bp, Aspergillus thermomutatus
  misc_feature: 127
gtgtgataaggtaagggttatttagtttattaagagagagggaaggaattgagaagagaataaggtgaataaggagagaggagaagagaggagatg

SEQ ID NO: 7277 - DNA, 96 bp, Aspergillus thermomutatus
  misc_feature: 127
gaaatacctcgggtttatcattgaagctggcaagggcgtacgcatggaccccgacaaggtaaaagctatactagaatggcagacccctacatccac

SEQ ID NO: 7278 - DNA, 96 bp, Aspergillus thermomutatus
  misc_feature: 127
caacgagcacctaccaggagggagtccagccttataaggtgtttcgaggacgaaacgctaagagagggggaggtgatgttacgacaccaacactac

SEQ ID NO: 7279 - DNA, 96 bp, Aspergillus thermomutatus
  misc_feature: 127
gtaagagataattaatagagataggggaaagaggaatgataagggatagagtaagggatagatagtttagggagaggagggggtagaaaggtttag

SEQ ID NO: 7280 - DNA, 96 bp, Aspergillus thermomutatus
  misc_feature: 127
ggtagggagtaaggcaccgtataagcaccaaatcagatagagagatatagagagaggtatccaagaggtagatatagtagtaggcatagtttccag

SEQ ID NO: 7281 - DNA, 96 bp, Aspergillus thermomutatus
  misc_feature: 127
gggtaagagataattaatagagataggggaaagaggaatgataagggatagagtaagggatagatagtttagggagaggagggggtagaaaggttt

SEQ ID NO: 7282 - DNA, 96 bp, Aspergillus thermomutatus
  misc_feature: 127
agatgagattccgcaaatataccaaccctctgtcatccatggtaaggttttcattgtctgctgagttttcgagcatttcttggatgattttgtccc

SEQ ID NO: 7283 - DNA, 96 bp, Aspergillus thermomutatus
  misc_feature: 127
cacgtagaatagcacgtagaatagcacgtcgaatagcatgtaggatgcacatagaatagcacgcggaggcaggcagataggcccacagagaggtcc

SEQ ID NO: 7284 - DNA, 96 bp, Aspergillus thermomutatus
  misc_feature: 127
gctacctcacgtggtgcatctctggggctacgtggggtgtgttgatccctactatactacctgccccatatggtcgctctctggctaccttggtcc

SEQ ID NO: 7285 - DNA, 96 bp, Aspergillus thermomutatus
  misc_feature: 127
gcctgtctgcctgtctgcctgtctgcctgtctgcctgtctctctacctcactgcctacctcatgtcggacctctctgtgggcctatctgcctgcct

SEQ ID NO: 7286 - DNA, 96 bp, Aspergillus thermomutatus
  misc_feature: 127
gcagcaggtgtttcctagtggtcaggggtcccactatatccatattcgcgttccagacgggtgtccaccggccccatcgacccaccatgtccaggc

SEQ ID NO: 7287 - DNA, 96 bp, Aspergillus thermomutatus
  misc_feature: 127
ctctctatctacctctctattcacctctctattcacctctctattcacctctctatctacctctctatctccctaccccactgtctgcctgtctgc

SEQ ID NO: 7288 - DNA, 96 bp, Aspergillus thermomutatus
  misc_feature: 127
gcacgtagaatagcacgtagaatagcacgtcgaatagcatgtaggatgcacatagaatagcacgcggaggcaggcagataggcccacagagaggtc

SEQ ID NO: 7289 - DNA, 96 bp, Aspergillus thermomutatus
  misc_feature: 127
gatgagattccgcaaatataccaaccctctgtcatccatggtaaggttttcattgtctgctgagttttcgagcatttcttggatgattttgtccct

SEQ ID NO: 7290 - DNA, 96 bp, Aspergillus thermomutatus
  misc_feature: 127
cctcacgcggtgcattgctccatacctcctatggtgcctctctacctatctccctacctcttcacctacctcttcacctacctcttcacctacctc

SEQ ID NO: 7291 - DNA, 96 bp, Aspergillus thermomutatus
  misc_feature: 127
gagaggtaggcgaagaggtaggcgacgaggtaggcgacgaggtaggtgaagaggtaggtgaagaggtaggtgaagaggtaggtgaagaggtaggtg

SEQ ID NO: 7292 - DNA, 96 bp, Aspergillus thermomutatus
  misc_feature: 127
gagaggataaaaagtgaagtaaagagtagaagaaggagtaaagtaaatagtaaaagaaggagtagagagagagttaggagaaggagtagagtaagg

SEQ ID NO: 7293 - DNA, 96 bp, Aspergillus thermomutatus
  misc_feature: 127
gagaatgagaagaaaaagagatggtttagggttaaagagaggaaagtggaaagagaggagaaggataaagtgaagtgacgggaaggaagaattaat

SEQ ID NO: 7294 - DNA, 96 bp, Aspergillus thermomutatus
  misc_feature: 127
agagttggaagaagaataggagtaaggttagtataaggattagggataaggatgagagtaaggatgagagtaaggatgagagtaaggatcagagtc

SEQ ID NO: 7295 - DNA, 96 bp, Aspergillus thermomutatus
  misc_feature: 127
cactggtggactatctgccaatgctttcgcattgatttgatggtagcagctaggtagtggcattgagtttgacctcgcaggcagagcaggccattc

SEQ ID NO: 7296 - DNA, 96 bp, Aspergillus thermomutatus
  misc_feature: 127
ccctaaaccatctctttttcttctcattctcttctcttcttgttcccttctctccttatcctcttcccgttttctcctcgttgtctcttctcattc

SEQ ID NO: 7297 - DNA, 96 bp, Aspergillus thermomutatus
  misc_feature: 127
caaatataccaaccctctgtcatccatggtaaggttttcattgtctgctgagttttcgagcatttcttggatgattttgtccctttttgttgcttc

SEQ ID NO: 7298 - DNA, 96 bp, Aspergillus thermomutatus
  misc_feature: 127
cacgcggtgcattgctccatacctcctatggtgcctctctacctatctccctacctcttcacctacctcttcacctacctcttcacctacctcttc

SEQ ID NO: 7299 - DNA, 96 bp, Aspergillus thermomutatus
  misc_feature: 127
aggagaaggaaagaaaagagaaacagaggagggaaagaagggaagagatgagaagagaggagaaggaggagagaggccaagagaagagaggtcaag

SEQ ID NO: 7300 - DNA, 96 bp, Aspergillus thermomutatus
  misc_feature: 127
agttggaagaagaataggagtaaggttagtataaggattagggataaggatgagagtaaggatgagagtaaggatgagagtaaggatcagagtcag

SEQ ID NO: 7301 - DNA, 96 bp, Aspergillus thermomutatus
  misc_feature: 127
aggataaggataagaaggatagtaagggatagtgtaagggatagggttaaaaaagaggataagaaaagaaagaagaaaaggaaaagagagagagag

SEQ ID NO: 7302 - DNA, 96 bp, Aspergillus thermomutatus
  misc_feature: 127
cgagcacctaccaggagggagtccagccttataaggtgtttcgaggacgaaacgctaagagagggggaggtgatgttacgacaccaacactactag

SEQ ID NO: 7303 - DNA, 96 bp, Aspergillus thermomutatus
  misc_feature: 127
cgtgctattctacgtgctattctacatgctattcgacgtgctattctatgtgctattcaacctgccgttctgcctgccgttctgcctactgttctg

SEQ ID NO: 7304 - DNA, 96 bp, Aspergillus thermomutatus
  misc_feature: 127
actggtggactatctgccaatgctttcgcattgatttgatggtagcagctaggtagtggcattgagtttgacctcgcaggcagagcaggccattcg

SEQ ID NO: 7305 - DNA, 96 bp, Aspergillus thermomutatus
  misc_feature: 127
cctaaaccatctctttttcttctcattctcttctcttcttgttcccttctctccttatcctcttcccgttttctcctcgttgtctcttctcattct

SEQ ID NO: 7306 - DNA, 96 bp, Aspergillus thermomutatus
  misc_feature: 127
caggtggtgttagatcagtatttggacggggtggtagatgggtatcagcgtcagcattgccaggatcaagatggtgcggagcaggcgtgtgatggg

SEQ ID NO: 7307 - DNA, 96 bp, Aspergillus thermomutatus
  misc_feature: 127
agaatagcacgtagaatagcacgtcgaatagcatgtaggatgcacatagaatagcacgcggaggcaggcagataggcccacagagaggtccgacat

SEQ ID NO: 7308 - DNA, 96 bp, Aspergillus thermomutatus
  misc_feature: 127
aggtagaatggtagggagtaaggcaccgtataagcaccaaatcagatagagagatatagagagaggtatccaagaggtagatatagtagtaggcat

SEQ ID NO: 7309 - DNA, 96 bp, Aspergillus thermomutatus
  misc_feature: 127
atgagattccgcaaatataccaaccctctgtcatccatggtaaggttttcattgtctgctgagttttcgagcatttcttggatgattttgtccctt

SEQ ID NO: 7310 - DNA, 96 bp, Aspergillus thermomutatus
  misc_feature: 127
acctacctgtctgcctgcctctctatcttcctctctatctacctctctattcacctctctattcacctctctattcacctctctatctacctctct

SEQ ID NO: 7311 - DNA, 96 bp, Aspergillus thermomutatus
  misc_feature: 127
agaatggtagggagtaaggcaccgtataagcaccaaatcagatagagagatatagagagaggtatccaagaggtagatatagtagtaggcatagtt

SEQ ID NO: 7312 - DNA, 96 bp, Aspergillus thermomutatus
  misc_feature: 127
acgtgctattctacgtgctattctacatgctattcgacgtgctattctatgtgctattcaacctgccgttctgcctgccgttctgcctactgttct

SEQ ID NO: 7313 - DNA, 96 bp, Aspergillus thermomutatus
  misc_feature: 126
gagaagagaggagatgagaagagaggagatgagaagagatgagaagagaggagaggagatgagaagagaagagaacaagaataaatgggaatgaaa

SEQ ID NO: 7314 - DNA, 96 bp, Aspergillus thermomutatus
  misc_feature: 126
tttagaaggagaaaggacggaaagcagaagagatagagggatggttagagagtaggaagcagtaaataagtaggggttggtttaagagaagggaga

SEQ ID NO: 7315 - DNA, 96 bp, Aspergillus thermomutatus
  misc_feature: 126
ttggaagaagaataggagtaaggttagtataaggattagggataaggatgagagtaaggatgagagtaaggatgagagtaaggatcagagtcagga

SEQ ID NO: 7316 - DNA, 96 bp, Aspergillus thermomutatus
  misc_feature: 126
ttgatggtagcagctaggtagtggcattgagtttgacctcgcaggcagagcaggccattcgagtgacatggtaatataggcagaggctcatcaaat

SEQ ID NO: 7317 - DNA, 96 bp, Aspergillus thermomutatus
  misc_feature: 126
gaggagaaggaaagaaaagagaaacagaggagggaaagaagggaagagatgagaagagaggagaaggaggagagaggccaagagaagagaggtcaa

SEQ ID NO: 7318 - DNA, 96 bp, Aspergillus thermomutatus
  misc_feature: 126
ttctctctctttttcttctctctctttttcttctctctctttttcttctctctctttttcttctctctctctcttttccttttcttctttcttttc

SEQ ID NO: 7319 - DNA, 96 bp, Aspergillus thermomutatus
  misc_feature: 126
tgaaggaagggatgttgatggacagtgtgataaggtaagggttatttagtttattaagagagagggaaggaattgagaagagaataaggtgaataa

SEQ ID NO: 7320 - DNA, 96 bp, Aspergillus thermomutatus
  misc_feature: 126
ttagtttagaaggagaaaggacggaaagcagaagagatagagggatggttagagagtaggaagcagtaaataagtaggggttggtttaagagaagg

SEQ ID NO: 7321 - DNA, 96 bp, Aspergillus thermomutatus
  misc_feature: 126
ttactctttctaaaacctaactcttaccctcctttttcttctctttcctttactctctttcccttctaaattccatcttccttcttctctttctct

SEQ ID NO: 7322 - DNA, 96 bp, Aspergillus thermomutatus
  misc_feature: 126
tgctgtgacgtattcattgtcatccgtgggtgcccatcccatctgttcaactaacagttgtcgctgtaacggtgctactgccgccagaactgttgt

SEQ ID NO: 7323 - DNA, 96 bp, Aspergillus thermomutatus
  misc_feature: 126
tgctattctacgtgctattctacatgctattcgacgtgctattctatgtgctattcaacctgccgttctgcctgccgttctgcctactgttctgcc

SEQ ID NO: 7324 - DNA, 96 bp, Aspergillus thermomutatus
  misc_feature: 126
ggttgaatagcaggttgaatagcaggttgaatagcaggttgaatagcaggttgaatagcaggttgaatagcaggttgaatagcaggttgaatagca

SEQ ID NO: 7325 - DNA, 96 bp, Aspergillus thermomutatus
  misc_feature: 126
tgcctgtctgcctgtctgcctgtctgcctgtctgcctgtctctctacctcactgcctacctcatgtcggacctctctgtgggcctatctgcctgcc

SEQ ID NO: 7326 - DNA, 96 bp, Aspergillus thermomutatus
  misc_feature: 126
gtagaatagcacgtcgaatagcatgtaggatgcacatagaatagcacgcggaggcaggcagataggcccacagagaggtccgacatgaggtaggca

SEQ ID NO: 7327 - DNA, 96 bp, Aspergillus thermomutatus
  misc_feature: 126
tgatcctgactctgatccttactctcatccttactctcatccttactctcatccttatccctaatccttatactaaccttactcctattcttcttc

SEQ ID NO: 7328 - DNA, 96 bp, Aspergillus thermomutatus
  misc_feature: 126
aaggaagatagaggttaagtaatcaaagagattagagaaggagatgagatttttaggattagaaaagaaaaaaaaaagaaaggatgaataagaaga

SEQ ID NO: 7329 - DNA, 96 bp, Aspergillus thermomutatus
  misc_feature: 126
tcttctctctctttttcttctctctctttttcttctctctctttttcttctctctctttttcttctctctctctcttttccttttcttctttcttt

SEQ ID NO: 7330 - DNA, 96 bp, Aspergillus thermomutatus
  misc_feature: 126
acccacagaggccccatgtaaggcaggcagagaggtagagataggtagagagggacccaagtagcaggccataaggcaggccgtgagacacacaga

SEQ ID NO: 7331 - DNA, 96 bp, Aspergillus thermomutatus
  misc_feature: 126
tctgatcctgactctgatccttactctcatccttactctcatccttactctcatccttatccctaatccttatactaaccttactcctattcttct

SEQ ID NO: 7332 - DNA, 96 bp, Aspergillus thermomutatus
  misc_feature: 126
tctaaaacctaactcttaccctcctttttcttctctttcctttactctctttcccttctaaattccatcttccttcttctctttctctttcttatc

SEQ ID NO: 7333 - DNA, 96 bp, Aspergillus thermomutatus
  misc_feature: 126
tcgctacctcacgtggtgcatctctggggctacgtggggtgtgttgatccctactatactacctgccccatatggtcgctctctggctaccttggt

SEQ ID NO: 7334 - DNA, 96 bp, Aspergillus thermomutatus
  misc_feature: 126
aagtattagaggaagagttagggagagtgtttaaggattaaaagaaagagtagagtaagggataggttaagagaggtaaagaggggtaagtaagga

SEQ ID NO: 7335 - DNA, 96 bp, Aspergillus thermomutatus
  misc_feature: 126
tccatacctcctatggtgcctctctacctatctccctacctcttcacctacctcttcacctacctcttcacctacctcttcacctacctcttcacc

SEQ ID NO: 7336 - DNA, 96 bp, Aspergillus thermomutatus
  misc_feature: 126
cgagccagacagatcaagccagccagacgaagcagatgagccggagcccccgcccagtatcaaggagctactagatactgcctaccagtctgatga

SEQ ID NO: 7337 - DNA, 96 bp, Aspergillus thermomutatus
  misc_feature: 126
gaggatagaagaatcaaagaagttgaggagaaaggaagggaggaaatattaagagagaagaagaaaaggagggagggatagtttattttaagaata

SEQ ID NO: 7338 - DNA, 96 bp, Aspergillus thermomutatus
  misc_feature: 126
ggtagaatggtagggagtaaggcaccgtataagcaccaaatcagatagagagatatagagagaggtatccaagaggtagatatagtagtaggcata

SEQ ID NO: 7339 - DNA, 96 bp, Aspergillus thermomutatus
  misc_feature: 126
tatctttaatctctggtataaccaccctaacttataatatatattaatacctactatgcctcactgcctacctcctggggttcctctatgcctact

SEQ ID NO: 7340 - DNA, 96 bp, Aspergillus thermomutatus
  misc_feature: 126
ggtgcattgctccatacctcctatggtgcctctctacctatctccctacctcttcacctacctcttcacctacctcttcacctacctcttcaccta

SEQ ID NO: 7341 - DNA, 96 bp, Aspergillus thermomutatus
  misc_feature: 126
cctacctgtctgcctgcctctctatcttcctctctatctacctctctattcacctctctattcacctctctattcacctctctatctacctctcta

SEQ ID NO: 7342 - DNA, 96 bp, Aspergillus thermomutatus
  misc_feature: 126
taagggaaaggaagagaggatagaagaatcaaagaagttgaggagaaaggaagggaggaaatattaagagagaagaagaaaaggagggagggatag

SEQ ID NO: 7343 - DNA, 96 bp, Aspergillus thermomutatus
  misc_feature: 126
cctcacgtggtgcatctctggggctacgtggggtgtgttgatccctactatactacctgccccatatggtcgctctctggctaccttggtccctac

SEQ ID NO: 7344 - DNA, 96 bp, Aspergillus thermomutatus
  misc_feature: 126
ctcacgtggtgcatctctggggctacgtggggtgtgttgatccctactatactacctgccccatatggtcgctctctggctaccttggtccctacc

SEQ ID NO: 7345 - DNA, 96 bp, Aspergillus thermomutatus
  misc_feature: 126
ctccttatcctcttcccgttttctcctcgttgtctcttctcattctcctctcttatcattctctttactttctctttaccttctcacctcgttccc

SEQ ID NO: 7346 - DNA, 96 bp, Aspergillus thermomutatus
  misc_feature: 126
atatctacctcttggatacctctctctatatctctctatctgatttggtggcttatacggtgccttactccccaccattctacctacctgtctgcc

SEQ ID NO: 7347 - DNA, 96 bp, Aspergillus thermomutatus
  misc_feature: 126
cttctcctctcccttctcttaaaccaacccctacttatttactgcttcctactctctaaccatccctctatctcttctgctttccgtcctttctcc

SEQ ID NO: 7348 - DNA, 96 bp, Aspergillus thermomutatus
  misc_feature: 126
gatcctgactctgatccttactctcatccttactctcatccttactctcatccttatccctaatccttatactaaccttactcctattcttcttcc

SEQ ID NO: 7349 - DNA, 96 bp, Aspergillus thermomutatus
  misc_feature: 126
gctcccaggcctgcatcacctcatcgaccgcagcctggacatggtgggtcgatggggccggtggacacccgtctggaacgcgaatatggatatagt

SEQ ID NO: 7350 - DNA, 96 bp, Aspergillus thermomutatus
  misc_feature: 126
cgtagaatagcacgtcgaatagcatgtaggatgcacatagaatagcacgcggaggcaggcagataggcccacagagaggtccgacatgaggtaggc

SEQ ID NO: 7351 - DNA, 96 bp, Aspergillus thermomutatus
  misc_feature: 126
gagcacctaccaggagggagtccagccttataaggtgtttcgaggacgaaacgctaagagagggggaggtgatgttacgacaccaacactactagg

SEQ ID NO: 7352 - DNA, 96 bp, Aspergillus thermomutatus
  misc_feature: 126
gagataattaatagagataggggaaagaggaatgataagggatagagtaagggatagatagtttagggagaggagggggtagaaaggtttagagat

SEQ ID NO: 7353 - DNA, 96 bp, Aspergillus thermomutatus
  misc_feature: 126
gagagaggtaggcgaagaggtaggcgacgaggtaggcgacgaggtaggtgaagaggtaggtgaagaggtaggtgaagaggtaggtgaagaggtagg

SEQ ID NO: 7354 - DNA, 96 bp, Aspergillus thermomutatus
  misc_feature: 126
acttctcctctcccttctcttaaaccaacccctacttatttactgcttcctactctctaaccatccctctatctcttctgctttccgtcctttctc

SEQ ID NO: 7355 - DNA, 96 bp, Aspergillus thermomutatus
  misc_feature: 126
cttactctttctaaaacctaactcttaccctcctttttcttctctttcctttactctctttcccttctaaattccatcttccttcttctctttctc

SEQ ID NO: 7356 - DNA, 96 bp, Aspergillus thermomutatus
  misc_feature: 126
gaaggaagggatgttgatggacagtgtgataaggtaagggttatttagtttattaagagagagggaaggaattgagaagagaataaggtgaataag

SEQ ID NO: 7357 - DNA, 96 bp, Aspergillus thermomutatus
  misc_feature: 126
ctctgatcctgactctgatccttactctcatccttactctcatccttactctcatccttatccctaatccttatactaaccttactcctattcttc

SEQ ID NO: 7358 - DNA, 96 bp, Aspergillus thermomutatus
  misc_feature: 126
ctacttctcctctcccttctcttaaaccaacccctacttatttactgcttcctactctctaaccatccctctatctcttctgctttccgtcctttc

SEQ ID NO: 7359 - DNA, 96 bp, Aspergillus thermomutatus
  misc_feature: 126
agaagagaggagatgagaagagaggagatgagaagagatgagaagagaggagaggagatgagaagagaagagaacaagaataaatgggaatgaaag

SEQ ID NO: 7360 - DNA, 96 bp, Aspergillus thermomutatus
  misc_feature: 126
ctgatcctgactctgatccttactctcatccttactctcatccttactctcatccttatccctaatccttatactaaccttactcctattcttctt

SEQ ID NO: 7361 - DNA, 96 bp, Aspergillus thermomutatus
  misc_feature: 126
ataagtaagggtaagagataattaatagagataggggaaagaggaatgataagggatagagtaagggatagatagtttagggagaggagggggtag

SEQ ID NO: 7362 - DNA, 96 bp, Aspergillus thermomutatus
  misc_feature: 126
cggtgcattgctccatacctcctatggtgcctctctacctatctccctacctcttcacctacctcttcacctacctcttcacctacctcttcacct

SEQ ID NO: 7363 - DNA, 96 bp, Aspergillus thermomutatus
  misc_feature: 126
ccttactctttctaaaacctaactcttaccctcctttttcttctctttcctttactctctttcccttctaaattccatcttccttcttctctttct

SEQ ID NO: 7364 - DNA, 96 bp, Aspergillus thermomutatus
  misc_feature: 126
cctctctatctacctctctattcacctctctattcacctctctattcacctctctatctacctctctatctccctaccccactgtctgcctgtctg

SEQ ID NO: 7365 - DNA, 96 bp, Aspergillus thermomutatus
  misc_feature: 126
acgtagaatagcacgtcgaatagcatgtaggatgcacatagaatagcacgcggaggcaggcagataggcccacagagaggtccgacatgaggtagg

SEQ ID NO: 7366 - DNA, 96 bp, Aspergillus thermomutatus
  misc_feature: 126
ccatacctcctatggtgcctctctacctatctccctacctcttcacctacctcttcacctacctcttcacctacctcttcacctacctcttcacct

SEQ ID NO: 7367 - DNA, 96 bp, Aspergillus thermomutatus
  misc_feature: 126
cagtgctgtgacgtattcattgtcatccgtgggtgcccatcccatctgttcaactaacagttgtcgctgtaacggtgctactgccgccagaactgt

SEQ ID NO: 7368 - DNA, 96 bp, Aspergillus thermomutatus
  misc_feature: 126
agatagaggttaagtaatcaaagagattagagaaggagatgagatttttaggattagaaaagaaaaaaaaaagaaaggatgaataagaagaaggat

SEQ ID NO: 7369 - DNA, 96 bp, Aspergillus thermomutatus
  misc_feature: 126
acctgtctgcctgcctctctatcttcctctctatctacctctctattcacctctctattcacctctctattcacctctctatctacctctctatct

SEQ ID NO: 7370 - DNA, 96 bp, Aspergillus thermomutatus
  misc_feature: 126
agaatgagaagaaaaagagatggtttagggttaaagagaggaaagtggaaagagaggagaaggataaagtgaagtgacgggaaggaagaattaatt

SEQ ID NO: 7371 - DNA, 96 bp, Aspergillus thermomutatus
  misc_feature: 126
aaaggaagagaggatagaagaatcaaagaagttgaggagaaaggaagggaggaaatattaagagagaagaagaaaaggagggagggatagtttatt

SEQ ID NO: 7372 - DNA, 96 bp, Aspergillus thermomutatus
  misc_feature: 125
tttgatggtagcagctaggtagtggcattgagtttgacctcgcaggcagagcaggccattcgagtgacatggtaatataggcagaggctcatcaaa

SEQ ID NO: 7373 - DNA, 96 bp, Aspergillus thermomutatus
  misc_feature: 125
gtaagggatagatagtttagggagaggagggggtagaaaggtttagagataaagagaggaataagagatagtattaggggtataaaagagaggaaa

SEQ ID NO: 7374 - DNA, 96 bp, Aspergillus thermomutatus
  misc_feature: 125
ttgctccacgaccgcctacttcggtcgcattgtcacgtgaccaactaccatatacccaagcttggcaatggtagatggtatacaactaccagcaac

SEQ ID NO: 7375 - DNA, 96 bp, Aspergillus thermomutatus
  misc_feature: 125
ttctacgtgctattctacgtgctattctacgtgctattctacatgctattcgacgtgctattctatgtgctattcaacctgccgttctgcctgccg

SEQ ID NO: 7376 - DNA, 96 bp, Aspergillus thermomutatus
  misc_feature: 125
aagtaagggtaagagataattaatagagataggggaaagaggaatgataagggatagagtaagggatagatagtttagggagaggagggggtagaa

SEQ ID NO: 7377 - DNA, 96 bp, Aspergillus thermomutatus
  misc_feature: 125
agaaaagaagagaataagtaagggttaaagggaatttaaagtaggaaagaaaagagagagtaagggttagttagtttagaaggagaaaggacggaa

SEQ ID NO: 7378 - DNA, 96 bp, Aspergillus thermomutatus
  misc_feature: 125
ttatctttaatctctggtataaccaccctaacttataatatatattaatacctactatgcctcactgcctacctcctggggttcctctatgcctac

SEQ ID NO: 7379 - DNA, 96 bp, Aspergillus thermomutatus
  misc_feature: 125
gataattaatagagataggggaaagaggaatgataagggatagagtaagggatagatagtttagggagaggagggggtagaaaggtttagagataa

SEQ ID NO: 7380 - DNA, 96 bp, Aspergillus thermomutatus
  misc_feature: 125
ttagaaggagaaaggacggaaagcagaagagatagagggatggttagagagtaggaagcagtaaataagtaggggttggtttaagagaagggagag

SEQ ID NO: 7381 - DNA, 96 bp, Aspergillus thermomutatus
  misc_feature: 125
ttagaagaaagaagaggagaggagaaggaaagaaaagagaaacagaggagggaaagaagggaagagatgagaagagaggagaaggaggagagaggc

SEQ ID NO: 7382 - DNA, 96 bp, Aspergillus thermomutatus
  misc_feature: 125
agtataagagtaaggattagtgattttagaaataaaggagtaaaaagtcgatgagagtagagaagatgagatgatataagggaaagagaagattaa

SEQ ID NO: 7383 - DNA, 96 bp, Aspergillus thermomutatus
  misc_feature: 125
agaagaaagaagaggagaggagaaggaaagaaaagagaaacagaggagggaaagaagggaagagatgagaagagaggagaaggaggagagaggcca

SEQ ID NO: 7384 - DNA, 96 bp, Aspergillus thermomutatus
  misc_feature: 125
tggaagaagaataggagtaaggttagtataaggattagggataaggatgagagtaaggatgagagtaaggatgagagtaaggatcagagtcaggat

SEQ ID NO: 7385 - DNA, 96 bp, Aspergillus thermomutatus
  misc_feature: 125
tgcattgctccatacctcctatggtgcctctctacctatctccctacctcttcacctacctcttcacctacctcttcacctacctcttcacctacc

SEQ ID NO: 7386 - DNA, 96 bp, Aspergillus thermomutatus
  misc_feature: 125
ggagaaggaaagaaaagagaaacagaggagggaaagaagggaagagatgagaagagaggagaaggaggagagaggccaagagaagagaggtcaaga

SEQ ID NO: 7387 - DNA, 96 bp, Aspergillus thermomutatus
  misc_feature: 125
agagaagagaatgagaagaaaaagagatggtttagggttaaagagaggaaagtggaaagagaggagaaggataaagtgaagtgacgggaaggaaga

SEQ ID NO: 7388 - DNA, 96 bp, Aspergillus thermomutatus
  misc_feature: 125
tcttaccctcctttttcttctctttcctttactctctttcccttctaaattccatcttccttcttctctttctctttcttatcctttctattctta

SEQ ID NO: 7389 - DNA, 96 bp, Aspergillus thermomutatus
  misc_feature: 125
aaggataaggataagaaggatagtaagggatagtgtaagggatagggttaaaaaagaggataagaaaagaaagaagaaaaggaaaagagagagaga

SEQ ID NO: 7390 - DNA, 96 bp, Aspergillus thermomutatus
  misc_feature: 125
taagtaagggtaagagataattaatagagataggggaaagaggaatgataagggatagagtaagggatagatagtttagggagaggagggggtaga

SEQ ID NO: 7391 - DNA, 96 bp, Aspergillus thermomutatus
  misc_feature: 125
tccttatcctcttcccgttttctcctcgttgtctcttctcattctcctctcttatcattctctttactttctctttaccttctcacctcgttccct

SEQ ID NO: 7392 - DNA, 96 bp, Aspergillus thermomutatus
  misc_feature: 125
aagaaaagaagagaataagtaagggttaaagggaatttaaagtaggaaagaaaagagagagtaagggttagttagtttagaaggagaaaggacgga

SEQ ID NO: 7393 - DNA, 96 bp, Aspergillus thermomutatus
  misc_feature: 125
agaggtaggcgaagaggtaggcgacgaggtaggcgacgaggtaggtgaagaggtaggtgaagaggtaggtgaagaggtaggtgaagaggtaggtga

SEQ ID NO: 7394 - DNA, 96 bp, Aspergillus thermomutatus
  misc_feature: 125
gtgaaggaagggatgttgatggacagtgtgataaggtaagggttatttagtttattaagagagagggaaggaattgagaagagaataaggtgaata

SEQ ID NO: 7395 - DNA, 96 bp, Aspergillus thermomutatus
  misc_feature: 125
accttctgctacaacaagaaatcagggttctacgggcagagaatgaacggaaaagaaagaagaaggcaagaatacgtgctaatctaggtggtgata

SEQ ID NO: 7396 - DNA, 96 bp, Aspergillus thermomutatus
  misc_feature: 125
attatctttaatctctggtataaccaccctaacttataatatatattaatacctactatgcctcactgcctacctcctggggttcctctatgccta

SEQ ID NO: 7397 - DNA, 96 bp, Aspergillus thermomutatus
  misc_feature: 125
tagaagaaagaagaggagaggagaaggaaagaaaagagaaacagaggagggaaagaagggaagagatgagaagagaggagaaggaggagagaggcc

SEQ ID NO: 7398 - DNA, 96 bp, Aspergillus thermomutatus
  misc_feature: 125
tacttctcctctcccttctcttaaaccaacccctacttatttactgcttcctactctctaaccatccctctatctcttctgctttccgtcctttct

SEQ ID NO: 7399 - DNA, 96 bp, Aspergillus thermomutatus
  misc_feature: 125
tactctttctaaaacctaactcttaccctcctttttcttctctttcctttactctctttcccttctaaattccatcttccttcttctctttctctt

SEQ ID NO: 7400 - DNA, 96 bp, Aspergillus thermomutatus
  misc_feature: 125
tacctgtctgcctgcctctctatcttcctctctatctacctctctattcacctctctattcacctctctattcacctctctatctacctctctatc

SEQ ID NO: 7401 - DNA, 96 bp, Aspergillus thermomutatus
  misc_feature: 125
ggcgaagaggtaggcgacgaggtaggcgacgaggtaggtgaagaggtaggtgaagaggtaggtgaagaggtaggtgaagaggtaggtgaagaggta

SEQ ID NO: 7402 - DNA, 96 bp, Aspergillus thermomutatus
  misc_feature: 125
aagtataagagtaaggattagtgattttagaaataaaggagtaaaaagtcgatgagagtagagaagatgagatgatataagggaaagagaagatta

SEQ ID NO: 7403 - DNA, 96 bp, Aspergillus thermomutatus
  misc_feature: 125
taagggatagatagtttagggagaggagggggtagaaaggtttagagataaagagaggaataagagatagtattaggggtataaaagagaggaaag

SEQ ID NO: 7404 - DNA, 96 bp, Aspergillus thermomutatus
  misc_feature: 125
attctctttactttctctttaccttctcacctcgttcccttctcattcttttctattcttgttcttttctctcttctcattctttcttgttcttta

SEQ ID NO: 7405 - DNA, 96 bp, Aspergillus thermomutatus
  misc_feature: 125
gtgtttcgcgatgatttcggttctcatacactcaggtatgtagatgagattccgcaaatataccaaccctctgtcatccatggtaaggttttcatt

SEQ ID NO: 7406 - DNA, 96 bp, Aspergillus thermomutatus
  misc_feature: 125
ggcacccacagaggccccatgtaaggcaggcagagaggtagagataggtagagagggacccaagtagcaggccataaggcaggccgtgagacacac

SEQ ID NO: 7407 - DNA, 96 bp, Aspergillus thermomutatus
  misc_feature: 125
ccttctgctacaacaagaaatcagggttctacgggcagagaatgaacggaaaagaaagaagaaggcaagaatacgtgctaatctaggtggtgatac

SEQ ID NO: 7408 - DNA, 96 bp, Aspergillus thermomutatus
  misc_feature: 125
gaggcacaggaggtggtggatcacctaataccaaaccatgatgggtttccgccatctaggatggcagcaggcatgttaggcagcacggcagactac

SEQ ID NO: 7409 - DNA, 96 bp, Aspergillus thermomutatus
  misc_feature: 125
gggaaaggaagagaggatagaagaatcaaagaagttgaggagaaaggaagggaggaaatattaagagagaagaagaaaaggagggagggatagttt

SEQ ID NO: 7410 - DNA, 96 bp, Aspergillus thermomutatus
  misc_feature: 125
ggagagaggtaggcgaagaggtaggcgacgaggtaggcgacgaggtaggtgaagaggtaggtgaagaggtaggtgaagaggtaggtgaagaggtag

SEQ ID NO: 7411 - DNA, 96 bp, Aspergillus thermomutatus
  misc_feature: 125
ggaagatagaggttaagtaatcaaagagattagagaaggagatgagatttttaggattagaaaagaaaaaaaaaagaaaggatgaataagaagaag

SEQ ID NO: 7412 - DNA, 96 bp, Aspergillus thermomutatus
  misc_feature: 125
gattccgcaaatataccaaccctctgtcatccatggtaaggttttcattgtctgctgagttttcgagcatttcttggatgattttgtccctttttg

SEQ ID NO: 7413 - DNA, 96 bp, Aspergillus thermomutatus
  misc_feature: 125
gataaccaatcgatcaccagcaatacagctcctgcgcggcacggttaggattgctccacgaccgcctacttcggtcgcattgtcacgtgaccaact

SEQ ID NO: 7414 - DNA, 96 bp, Aspergillus thermomutatus
  misc_feature: 125
gagtaaggcaccgtataagcaccaaatcagatagagagatatagagagaggtatccaagaggtagatatagtagtaggcatagtttccagcattat

SEQ ID NO: 7415 - DNA, 96 bp, Aspergillus thermomutatus
  misc_feature: 125
gaggccccatgtaaggcaggcagagaggtagagataggtagagagggacccaagtagcaggccataaggcaggccgtgagacacacagagaggtgt

SEQ ID NO: 7416 - DNA, 96 bp, Aspergillus thermomutatus
  misc_feature: 125
cctgtctgcctgcctctctatcttcctctctatctacctctctattcacctctctattcacctctctattcacctctctatctacctctctatctc

SEQ ID NO: 7417 - DNA, 96 bp, Aspergillus thermomutatus
  misc_feature: 125
gaatggtagggagtaaggcaccgtataagcaccaaatcagatagagagatatagagagaggtatccaagaggtagatatagtagtaggcatagttt

SEQ ID NO: 7418 - DNA, 96 bp, Aspergillus thermomutatus
  misc_feature: 125
gaagatagaggttaagtaatcaaagagattagagaaggagatgagatttttaggattagaaaagaaaaaaaaaagaaaggatgaataagaagaagg

SEQ ID NO: 7419 - DNA, 96 bp, Aspergillus thermomutatus
  misc_feature: 125
gaaattagaagaaagaagaggagaggagaaggaaagaaaagagaaacagaggagggaaagaagggaagagatgagaagagaggagaaggaggagag

SEQ ID NO: 7420 - DNA, 96 bp, Aspergillus thermomutatus
  misc_feature: 125
cccttactctttctaaaacctaactcttaccctcctttttcttctctttcctttactctctttcccttctaaattccatcttccttcttctctttc

SEQ ID NO: 7421 - DNA, 96 bp, Aspergillus thermomutatus
  misc_feature: 125
ctctttctaaaacctaactcttaccctcctttttcttctctttcctttactctctttcccttctaaattccatcttccttcttctctttctctttc

SEQ ID NO: 7422 - DNA, 96 bp, Aspergillus thermomutatus
  misc_feature: 125
cttctctccttatcctcttcccgttttctcctcgttgtctcttctcattctcctctcttatcattctctttactttctctttaccttctcacctcg

SEQ ID NO: 7423 - DNA, 96 bp, Aspergillus thermomutatus
  misc_feature: 125
ctcttaccctcctttttcttctctttcctttactctctttcccttctaaattccatcttccttcttctctttctctttcttatcctttctattctt

SEQ ID NO: 7424 - DNA, 96 bp, Aspergillus thermomutatus
  misc_feature: 125
ctacgtgctattctacgtgctattctacgtgctattctacatgctattcgacgtgctattctatgtgctattcaacctgccgttctgcctgccgtt

SEQ ID NO: 7425 - DNA, 96 bp, Aspergillus thermomutatus
  misc_feature: 125
aagaaggagtagagagagagttaggagaaggagtagagtaagggttaggaggaggattagagggagggatagaaagaggattagagggaggattag

SEQ ID NO: 7426 - DNA, 96 bp, Aspergillus thermomutatus
  misc_feature: 125
attagaagaaagaagaggagaggagaaggaaagaaaagagaaacagaggagggaaagaagggaagagatgagaagagaggagaaggaggagagagg

SEQ ID NO: 7427 - DNA, 96 bp, Aspergillus thermomutatus
  misc_feature: 125
aaagaaaagaagagaataagtaagggttaaagggaatttaaagtaggaaagaaaagagagagtaagggttagttagtttagaaggagaaaggacgg

SEQ ID NO: 7428 - DNA, 96 bp, Aspergillus thermomutatus
  misc_feature: 125
cacacggccactatggctctgctgggaccactggtggactatctgccaatgctttcgcattgatttgatggtagcagctaggtagtggcattgagt

SEQ ID NO: 7429 - DNA, 96 bp, Aspergillus thermomutatus
  misc_feature: 125
attccgcaaatataccaaccctctgtcatccatggtaaggttttcattgtctgctgagttttcgagcatttcttggatgattttgtccctttttgt

SEQ ID NO: 7430 - DNA, 96 bp, Aspergillus thermomutatus
  misc_feature: 125
agtgaaggaagggatgttgatggacagtgtgataaggtaagggttatttagtttattaagagagagggaaggaattgagaagagaataaggtgaat

SEQ ID NO: 7431 - DNA, 96 bp, Aspergillus thermomutatus
  misc_feature: 125
aacgagcacctaccaggagggagtccagccttataaggtgtttcgaggacgaaacgctaagagagggggaggtgatgttacgacaccaacactact

SEQ ID NO: 7432 - DNA, 96 bp, Aspergillus thermomutatus
  misc_feature: 125
agggaaaggaagagaggatagaagaatcaaagaagttgaggagaaaggaagggaggaaatattaagagagaagaagaaaaggagggagggatagtt

SEQ ID NO: 7433 - DNA, 96 bp, Aspergillus thermomutatus
  misc_feature: 125
aggcgaagaggtaggcgacgaggtaggcgacgaggtaggtgaagaggtaggtgaagaggtaggtgaagaggtaggtgaagaggtaggtgaagaggt

SEQ ID NO: 7434 - DNA, 96 bp, Aspergillus thermomutatus
  misc_feature: 125
agagaggtaggcgaagaggtaggcgacgaggtaggcgacgaggtaggtgaagaggtaggtgaagaggtaggtgaagaggtaggtgaagaggtaggt

SEQ ID NO: 7435 - DNA, 96 bp, Aspergillus thermomutatus
  misc_feature: 125
aagggaaaggaagagaggatagaagaatcaaagaagttgaggagaaaggaagggaggaaatattaagagagaagaagaaaaggagggagggatagt

SEQ ID NO: 7436 - DNA, 96 bp, Aspergillus thermomutatus
  misc_feature: 124
caggagctggtcttaagccacttaatcaagacagggttcttgaaaagattacttttcagcttcgtacgccaacaccaccacttcttgaaggttcaa

SEQ ID NO: 7437 - DNA, 96 bp, Aspergillus thermomutatus
  misc_feature: 124
gaaggagtagagagagagttaggagaaggagtagagtaagggttaggaggaggattagagggagggatagaaagaggattagagggaggattagaa

SEQ ID NO: 7438 - DNA, 96 bp, Aspergillus thermomutatus
  misc_feature: 124
gagtgaaggaagggatgttgatggacagtgtgataaggtaagggttatttagtttattaagagagagggaaggaattgagaagagaataaggtgaa

SEQ ID NO: 7439 - DNA, 96 bp, Aspergillus thermomutatus
  misc_feature: 124
ttactctgatcctgactctgatccttactctcatccttactctcatccttactctcatccttatccctaatccttatactaaccttactcctattc

SEQ ID NO: 7440 - DNA, 96 bp, Aspergillus thermomutatus
  misc_feature: 124
tgtttcgcgatgatttcggttctcatacactcaggtatgtagatgagattccgcaaatataccaaccctctgtcatccatggtaaggttttcattg

SEQ ID NO: 7441 - DNA, 96 bp, Aspergillus thermomutatus
  misc_feature: 124
gcacccacagaggccccatgtaaggcaggcagagaggtagagataggtagagagggacccaagtagcaggccataaggcaggccgtgagacacaca

SEQ ID NO: 7442 - DNA, 96 bp, Aspergillus thermomutatus
  misc_feature: 124
tgtgataaggtaagggttatttagtttattaagagagagggaaggaattgagaagagaataaggtgaataaggagagaggagaagagaggagatga

SEQ ID NO: 7443 - DNA, 96 bp, Aspergillus thermomutatus
  misc_feature: 124
agaggagaaggaaagaaaagagaaacagaggagggaaagaagggaagagatgagaagagaggagaaggaggagagaggccaagagaagagaggtca

SEQ ID NO: 7444 - DNA, 96 bp, Aspergillus thermomutatus
  misc_feature: 124
tcaagaggatcaagaggatcaagaggatcaagaggatcaagaggatcaagaggatcaagaggatcaagaggatcaagaggatcaagaggatcaaga

SEQ ID NO: 7445 - DNA, 96 bp, Aspergillus thermomutatus
  misc_feature: 124
aaattagaagaaagaagaggagaggagaaggaaagaaaagagaaacagaggagggaaagaagggaagagatgagaagagaggagaaggaggagaga

SEQ ID NO: 7446 - DNA, 96 bp, Aspergillus thermomutatus
  misc_feature: 124
agagataattaatagagataggggaaagaggaatgataagggatagagtaagggatagatagtttagggagaggagggggtagaaaggtttagaga

SEQ ID NO: 7447 - DNA, 96 bp, Aspergillus thermomutatus
  misc_feature: 124
tctatctacctctctattcacctctctattcacctctctattcacctctctatctacctctctatctccctaccccactgtctgcctgtctgcctg

SEQ ID NO: 7448 - DNA, 96 bp, Aspergillus thermomutatus
  misc_feature: 124
tctacgtgctattctacgtgctattctacgtgctattctacatgctattcgacgtgctattctatgtgctattcaacctgccgttctgcctgccgt

SEQ ID NO: 7449 - DNA, 96 bp, Aspergillus thermomutatus
  misc_feature: 124
agaaggagtagagagagagttaggagaaggagtagagtaagggttaggaggaggattagagggagggatagaaagaggattagagggaggattaga

SEQ ID NO: 7450 - DNA, 96 bp, Aspergillus thermomutatus
  misc_feature: 124
tcctagtggtcaggggtcccactatatccatattcgcgttccagacgggtgtccaccggccccatcgacccaccatgtccaggctgcggtcgatga

SEQ ID NO: 7451 - DNA, 96 bp, Aspergillus thermomutatus
  misc_feature: 124
tattctacgtgctattctacatgctattcgacgtgctattctatgtgctattcaacctgccgttctgcctgccgttctgcctactgttctgcctgc

SEQ ID NO: 7452 - DNA, 96 bp, Aspergillus thermomutatus
  misc_feature: 124
agataattaatagagataggggaaagaggaatgataagggatagagtaagggatagatagtttagggagaggagggggtagaaaggtttagagata

SEQ ID NO: 7453 - DNA, 96 bp, Aspergillus thermomutatus
  misc_feature: 124
tatctacctctctattcacctctctattcacctctctattcacctctctatctacctctctatctccctaccccactgtctgcctgtctgcctgtc

SEQ ID NO: 7454 - DNA, 96 bp, Aspergillus thermomutatus
  misc_feature: 124
ggaggcacaggaggtggtggatcacctaataccaaaccatgatgggtttccgccatctaggatggcagcaggcatgttaggcagcacggcagacta

SEQ ID NO: 7455 - DNA, 96 bp, Aspergillus thermomutatus
  misc_feature: 124
cttctaatatatattctcctcttctaatccctactatgcttactctactatttcccttctttacttctcctaaactaactaacccttactcatcta

SEQ ID NO: 7456 - DNA, 96 bp, Aspergillus thermomutatus
  misc_feature: 124
tagatgagattccgcaaatataccaaccctctgtcatccatggtaaggttttcattgtctgctgagttttcgagcatttcttggatgattttgtcc

SEQ ID NO: 7457 - DNA, 96 bp, Aspergillus thermomutatus
  misc_feature: 124
tacgtgctattctacgtgctattctacgtgctattctacatgctattcgacgtgctattctatgtgctattcaacctgccgttctgcctgccgttc

SEQ ID NO: 7458 - DNA, 96 bp, Aspergillus thermomutatus
  misc_feature: 124
tacactcaggtatgtagatgagattccgcaaatataccaaccctctgtcatccatggtaaggttttcattgtctgctgagttttcgagcatttctt

SEQ ID NO: 7459 - DNA, 96 bp, Aspergillus thermomutatus
  misc_feature: 124
aggccccatgtaaggcaggcagagaggtagagataggtagagagggacccaagtagcaggccataaggcaggccgtgagacacacagagaggtgta

SEQ ID NO: 7460 - DNA, 96 bp, Aspergillus thermomutatus
  misc_feature: 124
taaaacctaactcttaccctcctttttcttctctttcctttactctctttcccttctaaattccatcttccttcttctctttctctttcttatcct

SEQ ID NO: 7461 - DNA, 96 bp, Aspergillus thermomutatus
  misc_feature: 124
gttttgtcgaagaattgctggctcgactgtttttccttgtaattcatagtctggtcgtcgactaagtgcgtcggcttgtccattctcagttccttt

SEQ ID NO: 7462 - DNA, 96 bp, Aspergillus thermomutatus
  misc_feature: 124
gtttagaaggagaaaggacggaaagcagaagagatagagggatggttagagagtaggaagcagtaaataagtaggggttggtttaagagaagggag

SEQ ID NO: 7463 - DNA, 96 bp, Aspergillus thermomutatus
  misc_feature: 124
ggttaataagtaagggtaagagataattaatagagataggggaaagaggaatgataagggatagagtaagggatagatagtttagggagaggaggg

SEQ ID NO: 7464 - DNA, 96 bp, Aspergillus thermomutatus
  misc_feature: 124
ggtgagggcaacgagcacctaccaggagggagtccagccttataaggtgtttcgaggacgaaacgctaagagagggggaggtgatgttacgacacc

SEQ ID NO: 7465 - DNA, 96 bp, Aspergillus thermomutatus
  misc_feature: 124
ggtataaaggcacccacagaggccccatgtaaggcaggcagagaggtagagataggtagagagggacccaagtagcaggccataaggcaggccgtg

SEQ ID NO: 7466 - DNA, 96 bp, Aspergillus thermomutatus
  misc_feature: 124
gctattctacgtgctattctacatgctattcgacgtgctattctatgtgctattcaacctgccgttctgcctgccgttctgcctactgttctgcct

SEQ ID NO: 7467 - DNA, 96 bp, Aspergillus thermomutatus
  misc_feature: 124
gcattgctccatacctcctatggtgcctctctacctatctccctacctcttcacctacctcttcacctacctcttcacctacctcttcacctacct

SEQ ID NO: 7468 - DNA, 96 bp, Aspergillus thermomutatus
  misc_feature: 124
atgcattgggtcatcgtggtgtttcgcgatgatttcggttctcatacactcaggtatgtagatgagattccgcaaatataccaaccctctgtcatc

SEQ ID NO: 7469 - DNA, 96 bp, Aspergillus thermomutatus
  misc_feature: 124
gagccagacagatcaagccagccagacgaagcagatgagccggagcccccgcccagtatcaaggagctactagatactgcctaccagtctgatgat

SEQ ID NO: 7470 - DNA, 96 bp, Aspergillus thermomutatus
  misc_feature: 124
gagaggagaaggaaagaaaagagaaacagaggagggaaagaagggaagagatgagaagagaggagaaggaggagagaggccaagagaagagaggtc

SEQ ID NO: 7471 - DNA, 96 bp, Aspergillus thermomutatus
  misc_feature: 124
gaagggaacgaggtgagaaggtaaagagaaagtaaagagaatgataagagaggagaatgagaagagacaacgaggagaaaacgggaagaggataag

SEQ ID NO: 7472 - DNA, 96 bp, Aspergillus thermomutatus
  misc_feature: 124
gaaggaagatagaggttaagtaatcaaagagattagagaaggagatgagatttttaggattagaaaagaaaaaaaaaagaaaggatgaataagaag

SEQ ID NO: 7473 - DNA, 96 bp, Aspergillus thermomutatus
  misc_feature: 124
gaaaggaagagaggatagaagaatcaaagaagttgaggagaaaggaagggaggaaatattaagagagaagaagaaaaggagggagggatagtttat

SEQ ID NO: 7474 - DNA, 96 bp, Aspergillus thermomutatus
  misc_feature: 124
atcaagaggatcaagaggatcaagaggatcaagaggatcaagaggatcaagaggatcaagaggatcaagaggatcaagaggatcaagaggatcaag

SEQ ID NO: 7475 - DNA, 96 bp, Aspergillus thermomutatus
  misc_feature: 124
cttactctgatcctgactctgatccttactctcatccttactctcatccttactctcatccttatccctaatccttatactaaccttactcctatt

SEQ ID NO: 7476 - DNA, 96 bp, Aspergillus thermomutatus
  misc_feature: 124
cacccacagaggccccatgtaaggcaggcagagaggtagagataggtagagagggacccaagtagcaggccataaggcaggccgtgagacacacag

SEQ ID NO: 7477 - DNA, 96 bp, Aspergillus thermomutatus
  misc_feature: 124
aattagaagaaagaagaggagaggagaaggaaagaaaagagaaacagaggagggaaagaagggaagagatgagaagagaggagaaggaggagagag

SEQ ID NO: 7478 - DNA, 96 bp, Aspergillus thermomutatus
  misc_feature: 124
agttaggagaaggagtagagtaagggttaggaggaggattagagggagggatagaaagaggattagagggaggattagaaagaggattagagggag

SEQ ID NO: 7479 - DNA, 96 bp, Aspergillus thermomutatus
  misc_feature: 124
ctattctacgtgctattctacatgctattcgacgtgctattctatgtgctattcaacctgccgttctgcctgccgttctgcctactgttctgcctg

SEQ ID NO: 7480 - DNA, 96 bp, Aspergillus thermomutatus
  misc_feature: 124
ctacctgtctgcctgcctctctatcttcctctctatctacctctctattcacctctctattcacctctctattcacctctctatctacctctctat

SEQ ID NO: 7481 - DNA, 96 bp, Aspergillus thermomutatus
  misc_feature: 124
acgtagaatagcacgtagaatagcacgtcgaatagcatgtaggatgcacatagaatagcacgcggaggcaggcagataggcccacagagaggtccg

SEQ ID NO: 7482 - DNA, 96 bp, Aspergillus thermomutatus
  misc_feature: 124
ccttactctgatcctgactctgatccttactctcatccttactctcatccttactctcatccttatccctaatccttatactaaccttactcctat

SEQ ID NO: 7483 - DNA, 96 bp, Aspergillus thermomutatus
  misc_feature: 124
agaggatagaagaatcaaagaagttgaggagaaaggaagggaggaaatattaagagagaagaagaaaaggagggagggatagtttattttaagaat

SEQ ID NO: 7484 - DNA, 96 bp, Aspergillus thermomutatus
  misc_feature: 124
aggtggtgttagatcagtatttggacggggtggtagatgggtatcagcgtcagcattgccaggatcaagatggtgcggagcaggcgtgtgatgggt

SEQ ID NO: 7485 - DNA, 96 bp, Aspergillus thermomutatus
  misc_feature: 124
aattatctttaatctctggtataaccaccctaacttataatatatattaatacctactatgcctcactgcctacctcctggggttcctctatgcct

SEQ ID NO: 7486 - DNA, 96 bp, Aspergillus thermomutatus
  misc_feature: 124
agattccgcaaatataccaaccctctgtcatccatggtaaggttttcattgtctgctgagttttcgagcatttcttggatgattttgtcccttttt

SEQ ID NO: 7487 - DNA, 96 bp, Aspergillus thermomutatus
  misc_feature: 124
aagggatagatagtttagggagaggagggggtagaaaggtttagagataaagagaggaataagagatagtattaggggtataaaagagaggaaagt

SEQ ID NO: 7488 - DNA, 96 bp, Aspergillus thermomutatus
  misc_feature: 124
actctgatcctgactctgatccttactctcatccttactctcatccttactctcatccttatccctaatccttatactaaccttactcctattctt

SEQ ID NO: 7489 - DNA, 96 bp, Aspergillus thermomutatus
  misc_feature: 123
ataattaatagagataggggaaagaggaatgataagggatagagtaagggatagatagtttagggagaggagggggtagaaaggtttagagataaa

SEQ ID NO: 7490 - DNA, 96 bp, Aspergillus thermomutatus
  misc_feature: 123
aggaagatagaggttaagtaatcaaagagattagagaaggagatgagatttttaggattagaaaagaaaaaaaaaagaaaggatgaataagaagaa

SEQ ID NO: 7491 - DNA, 96 bp, Aspergillus thermomutatus
  misc_feature: 123
ttcctagtggtcaggggtcccactatatccatattcgcgttccagacgggtgtccaccggccccatcgacccaccatgtccaggctgcggtcgatg

SEQ ID NO: 7492 - DNA, 96 bp, Aspergillus thermomutatus
  misc_feature: 123
gtaaggcaccgtataagcaccaaatcagatagagagatatagagagaggtatccaagaggtagatatagtagtaggcatagtttccagcattataa

SEQ ID NO: 7493 - DNA, 96 bp, Aspergillus thermomutatus
  misc_feature: 123
cttaccctcctttttcttctctttcctttactctctttcccttctaaattccatcttccttcttctctttctctttcttatcctttctattcttaa

SEQ ID NO: 7494 - DNA, 96 bp, Aspergillus thermomutatus
  misc_feature: 123
tgttttgtcgaagaattgctggctcgactgtttttccttgtaattcatagtctggtcgtcgactaagtgcgtcggcttgtccattctcagttcctt

SEQ ID NO: 7495 - DNA, 96 bp, Aspergillus thermomutatus
  misc_feature: 123
agagaggatagaagaatcaaagaagttgaggagaaaggaagggaggaaatattaagagagaagaagaaaaggagggagggatagtttattttaaga

SEQ ID NO: 7496 - DNA, 96 bp, Aspergillus thermomutatus
  misc_feature: 123
tctgcctgtctgcctgtctgcctgtctgcctgtctgcctgtctctctacctcactgcctacctcatgtcggacctctctgtgggcctatctgcctg

SEQ ID NO: 7497 - DNA, 96 bp, Aspergillus thermomutatus
  misc_feature: 123
tctctttctcactccctcttcctcctttcttgcatttctttattctcttaacatcctcccttctaatcttcaaccttctttatatatctctctact

SEQ ID NO: 7498 - DNA, 96 bp, Aspergillus thermomutatus
  misc_feature: 123
tctcatccttactctcatccttatccctaatccttatactaaccttactcctattcttcttccaactcttatcattttccttttcttaaatcctac

SEQ ID NO: 7499 - DNA, 96 bp, Aspergillus thermomutatus
  misc_feature: 123
tctacgtgctattctacatgctattcgacgtgctattctatgtgctattcaacctgccgttctgcctgccgttctgcctactgttctgcctgcctt

SEQ ID NO: 7500 - DNA, 96 bp, Aspergillus thermomutatus
  misc_feature: 123
tccttactctgatcctgactctgatccttactctcatccttactctcatccttactctcatccttatccctaatccttatactaaccttactccta

SEQ ID NO: 7501 - DNA, 96 bp, Aspergillus thermomutatus
  misc_feature: 123
gagttaggagaaggagtagagtaagggttaggaggaggattagagggagggatagaaagaggattagagggaggattagaaagaggattagaggga

SEQ ID NO: 7502 - DNA, 96 bp, Aspergillus thermomutatus
  misc_feature: 123
tcacgtggtgcatctctggggctacgtggggtgtgttgatccctactatactacctgccccatatggtcgctctctggctaccttggtccctacct

SEQ ID NO: 7503 - DNA, 96 bp, Aspergillus thermomutatus
  misc_feature: 123
gcaacgagcacctaccaggagggagtccagccttataaggtgtttcgaggacgaaacgctaagagagggggaggtgatgttacgacaccaacacta

SEQ ID NO: 7504 - DNA, 96 bp, Aspergillus thermomutatus
  misc_feature: 123
catacctcctatggtgcctctctacctatctccctacctcttcacctacctcttcacctacctcttcacctacctcttcacctacctcttcaccta

SEQ ID NO: 7505 - DNA, 96 bp, Aspergillus thermomutatus
  misc_feature: 123
tacgtgctattctacatgctattcgacgtgctattctatgtgctattcaacctgccgttctgcctgccgttctgcctactgttctgcctgccttgt

SEQ ID NO: 7506 - DNA, 96 bp, Aspergillus thermomutatus
  misc_feature: 123
agagaggtgtacacaaggcaggcagaacagtaggcagaacggcaggcagaacggcaggttgaatagcacatagaatagcacgtcgaatagcatgta

SEQ ID NO: 7507 - DNA, 96 bp, Aspergillus thermomutatus
  misc_feature: 123
aaagaaggagtagagagagagttaggagaaggagtagagtaagggttaggaggaggattagagggagggatagaaagaggattagagggaggatta

SEQ ID NO: 7508 - DNA, 96 bp, Aspergillus thermomutatus
  misc_feature: 123
taaggataaggataagaaggatagtaagggatagtgtaagggatagggttaaaaaagaggataagaaaagaaagaagaaaaggaaaagagagagag

SEQ ID NO: 7509 - DNA, 96 bp, Aspergillus thermomutatus
  misc_feature: 123
taacccttactctactccttctcctaactctctctctactccttcttttactatttactttactccttcttctactctttacttcactttttatcc

SEQ ID NO: 7510 - DNA, 96 bp, Aspergillus thermomutatus
  misc_feature: 123
taaccaatcgatcaccagcaatacagctcctgcgcggcacggttaggattgctccacgaccgcctacttcggtcgcattgtcacgtgaccaactac

SEQ ID NO: 7511 - DNA, 96 bp, Aspergillus thermomutatus
  misc_feature: 123
taaaagaaggagtagagagagagttaggagaaggagtagagtaagggttaggaggaggattagagggagggatagaaagaggattagagggaggat

SEQ ID NO: 7512 - DNA, 96 bp, Aspergillus thermomutatus
  misc_feature: 123
gggcaacgagcacctaccaggagggagtccagccttataaggtgtttcgaggacgaaacgctaagagagggggaggtgatgttacgacaccaacac

SEQ ID NO: 7513 - DNA, 96 bp, Aspergillus thermomutatus
  misc_feature: 123
cttctgctacaacaagaaatcagggttctacgggcagagaatgaacggaaaagaaagaagaaggcaagaatacgtgctaatctaggtggtgatacc

SEQ ID NO: 7514 - DNA, 96 bp, Aspergillus thermomutatus
  misc_feature: 123
attctacgtgctattctacgtgctattctacgtgctattctacatgctattcgacgtgctattctatgtgctattcaacctgccgttctgcctgcc

SEQ ID NO: 7515 - DNA, 96 bp, Aspergillus thermomutatus
  misc_feature: 123
ggcaacgagcacctaccaggagggagtccagccttataaggtgtttcgaggacgaaacgctaagagagggggaggtgatgttacgacaccaacact

SEQ ID NO: 7516 - DNA, 96 bp, Aspergillus thermomutatus
  misc_feature: 123
ctaaaacctaactcttaccctcctttttcttctctttcctttactctctttcccttctaaattccatcttccttcttctctttctctttcttatcc

SEQ ID NO: 7517 - DNA, 96 bp, Aspergillus thermomutatus
  misc_feature: 123
cctcctatggtgcctctctacctatctccctacctcttcacctacctcttcacctacctcttcacctacctcttcacctacctcttcacctacctc

SEQ ID NO: 7518 - DNA, 96 bp, Aspergillus thermomutatus
  misc_feature: 123
ctgttttgtcgaagaattgctggctcgactgtttttccttgtaattcatagtctggtcgtcgactaagtgcgtcggcttgtccattctcagttcct

SEQ ID NO: 7519 - DNA, 96 bp, Aspergillus thermomutatus
  misc_feature: 123
ctcctaacccttactctactccttctcctaactctctctctactccttcttttactatttactttactccttcttctactctttacttcacttttt

SEQ ID NO: 7520 - DNA, 96 bp, Aspergillus thermomutatus
  misc_feature: 123
ctcatccttactctcatccttatccctaatccttatactaaccttactcctattcttcttccaactcttatcattttccttttcttaaatcctact

SEQ ID NO: 7521 - DNA, 96 bp, Aspergillus thermomutatus
  misc_feature: 123
ctcaggtatgtagatgagattccgcaaatataccaaccctctgtcatccatggtaaggttttcattgtctgctgagttttcgagcatttcttggat

SEQ ID NO: 7522 - DNA, 96 bp, Aspergillus thermomutatus
  misc_feature: 123
ctacgtgctattctacatgctattcgacgtgctattctatgtgctattcaacctgccgttctgcctgccgttctgcctactgttctgcctgccttg

SEQ ID NO: 7523 - DNA, 96 bp, Aspergillus thermomutatus
  misc_feature: 123
agtaatatatgtaggtatataaaagccacgcagggttaggtataaaggcacccacagaggccccatgtaaggcagggttaaggcaggcagagaggt

SEQ ID NO: 7524 - DNA, 96 bp, Aspergillus thermomutatus
  misc_feature: 123
actctttctaaaacctaactcttaccctcctttttcttctctttcctttactctctttcccttctaaattccatcttccttcttctctttctcttt

SEQ ID NO: 7525 - DNA, 96 bp, Aspergillus thermomutatus
  misc_feature: 123
aaaagaaggagtagagagagagttaggagaaggagtagagtaagggttaggaggaggattagagggagggatagaaagaggattagagggaggatt

SEQ ID NO: 7526 - DNA, 96 bp, Aspergillus thermomutatus
  misc_feature: 122
taccctcctttttcttctctttcctttactctctttcccttctaaattccatcttccttcttctctttctctttcttatcctttctattcttaaaa

SEQ ID NO: 7527 - DNA, 96 bp, Aspergillus thermomutatus
  misc_feature: 122
ggagtaaaggggaggtaaggaggaagtaaagaggaaggagagagggaataaaggggaggtaaggaggaaggaaagaggaaggaaagagagaggaaa

SEQ ID NO: 7528 - DNA, 96 bp, Aspergillus thermomutatus
  misc_feature: 122
tttcctagtggtcaggggtcccactatatccatattcgcgttccagacgggtgtccaccggccccatcgacccaccatgtccaggctgcggtcgat

SEQ ID NO: 7529 - DNA, 96 bp, Aspergillus thermomutatus
  misc_feature: 122
ttaccctcctttttcttctctttcctttactctctttcccttctaaattccatcttccttcttctctttctctttcttatcctttctattcttaaa

SEQ ID NO: 7530 - DNA, 96 bp, Aspergillus thermomutatus
  misc_feature: 122
gagaggatagaagaatcaaagaagttgaggagaaaggaagggaggaaatattaagagagaagaagaaaaggagggagggatagtttattttaagaa

SEQ ID NO: 7531 - DNA, 96 bp, Aspergillus thermomutatus
  misc_feature: 122
ttctctccttatcctcttcccgttttctcctcgttgtctcttctcattctcctctcttatcattctctttactttctctttaccttctcacctcgt

SEQ ID NO: 7532 - DNA, 96 bp, Aspergillus thermomutatus
  misc_feature: 122
ttctaatatatattctcctcttctaatccctactatgcttactctactatttcccttctttacttctcctaaactaactaacccttactcatctac

SEQ ID NO: 7533 - DNA, 96 bp, Aspergillus thermomutatus
  misc_feature: 122
agatagtaagaaaaaggagagagggagtaaaggggaggtaaggaggaagtaaagaggaaggagagagggaataaaggggaggtaaggaggaaggaa

SEQ ID NO: 7534 - DNA, 96 bp, Aspergillus thermomutatus
  misc_feature: 122
gaagagaggatagaagaatcaaagaagttgaggagaaaggaagggaggaaatattaagagagaagaagaaaaggagggagggatagtttattttaa

SEQ ID NO: 7535 - DNA, 96 bp, Aspergillus thermomutatus
  misc_feature: 122
tagggagtaaggcaccgtataagcaccaaatcagatagagagatatagagagaggtatccaagaggtagatatagtagtaggcatagtttccagca

SEQ ID NO: 7536 - DNA, 96 bp, Aspergillus thermomutatus
  misc_feature: 122
ccatgcattgggtcatcgtggtgtttcgcgatgatttcggttctcatacactcaggtatgtagatgagattccgcaaatataccaaccctctgtca

SEQ ID NO: 7537 - DNA, 96 bp, Aspergillus thermomutatus
  misc_feature: 122
gagaaggaagatagaggttaagtaatcaaagagattagagaaggagatgagatttttaggattagaaaagaaaaaaaaaagaaaggatgaataaga

SEQ ID NO: 7538 - DNA, 96 bp, Aspergillus thermomutatus
  misc_feature: 122
agaaattagaagaaagaagaggagaggagaaggaaagaaaagagaaacagaggagggaaagaagggaagagatgagaagagaggagaaggaggaga

SEQ ID NO: 7539 - DNA, 96 bp, Aspergillus thermomutatus
  misc_feature: 122
gtttcctagtggtcaggggtcccactatatccatattcgcgttccagacgggtgtccaccggccccatcgacccaccatgtccaggctgcggtcga

SEQ ID NO: 7540 - DNA, 96 bp, Aspergillus thermomutatus
  misc_feature: 122
gtatagataagggaaaggaagagaggatagaagaatcaaagaagttgaggagaaaggaagggaggaaatattaagagagaagaagaaaaggaggga

SEQ ID NO: 7541 - DNA, 96 bp, Aspergillus thermomutatus
  misc_feature: 122
agtaaggcaccgtataagcaccaaatcagatagagagatatagagagaggtatccaagaggtagatatagtagtaggcatagtttccagcattata

SEQ ID NO: 7542 - DNA, 96 bp, Aspergillus thermomutatus
  misc_feature: 122
taggttaataagtaagggtaagagataattaatagagataggggaaagaggaatgataagggatagagtaagggatagatagtttagggagaggag

SEQ ID NO: 7543 - DNA, 96 bp, Aspergillus thermomutatus
  misc_feature: 122
gaataagtattagaggaagagttagggagagtgtttaaggattaaaagaaagagtagagtaagggataggttaagagaggtaaagaggggtaagta

SEQ ID NO: 7544 - DNA, 96 bp, Aspergillus thermomutatus
  misc_feature: 122
tactctgatcctgactctgatccttactctcatccttactctcatccttactctcatccttatccctaatccttatactaaccttactcctattct

SEQ ID NO: 7545 - DNA, 96 bp, Aspergillus thermomutatus
  misc_feature: 122
tacctcctatggtgcctctctacctatctccctacctcttcacctacctcttcacctacctcttcacctacctcttcacctacctcttcacctacc

SEQ ID NO: 7546 - DNA, 96 bp, Aspergillus thermomutatus
  misc_feature: 122
ggaaaggaagagaggatagaagaatcaaagaagttgaggagaaaggaagggaggaaatattaagagagaagaagaaaaggagggagggatagttta

SEQ ID NO: 7547 - DNA, 96 bp, Aspergillus thermomutatus
  misc_feature: 122
gtagagaggcaccataggaggtatggagcaatgcaccgcgtgaggcacccccagatatgccatgcaaggtttggaccaaggtagccagagagcaac

SEQ ID NO: 7548 - DNA, 96 bp, Aspergillus thermomutatus
  misc_feature: 122
ggccatgagacacacagagaggtgtacacaaggcaggcagaacagtaggcagaacggcaggcagaacggcaggttgaatagcacatagaatagcac

SEQ ID NO: 7549 - DNA, 96 bp, Aspergillus thermomutatus
  misc_feature: 122
atacctcctatggtgcctctctacctatctccctacctcttcacctacctcttcacctacctcttcacctacctcttcacctacctcttcacctac

SEQ ID NO: 7550 - DNA, 96 bp, Aspergillus thermomutatus
  misc_feature: 122
catatgaccatgcattgggtcatcgtggtgtttcgcgatgatttcggttctcatacactcaggtatgtagatgagattccgcaaatataccaaccc

SEQ ID NO: 7551 - DNA, 96 bp, Aspergillus thermomutatus
  misc_feature: 122
ggaaagaggaatgataagggatagagtaagggatagatagtttagggagaggagggggtagaaaggtttagagataaagagaggaataagagatag

SEQ ID NO: 7552 - DNA, 96 bp, Aspergillus thermomutatus
  misc_feature: 122
gcgaagaggtaggcgacgaggtaggcgacgaggtaggtgaagaggtaggtgaagaggtaggtgaagaggtaggtgaagaggtaggtgaagaggtag

SEQ ID NO: 7553 - DNA, 96 bp, Aspergillus thermomutatus
  misc_feature: 122
cattgctccatacctcctatggtgcctctctacctatctccctacctcttcacctacctcttcacctacctcttcacctacctcttcacctacctc

SEQ ID NO: 7554 - DNA, 96 bp, Aspergillus thermomutatus
  misc_feature: 122
acccttactctactccttctcctaactctctctctactccttcttttactatttactttactccttcttctactctttacttcactttttatcctc

SEQ ID NO: 7555 - DNA, 96 bp, Aspergillus thermomutatus
  misc_feature: 122
gagaaattagaagaaagaagaggagaggagaaggaaagaaaagagaaacagaggagggaaagaagggaagagatgagaagagaggagaaggaggag

SEQ ID NO: 7556 - DNA, 96 bp, Aspergillus thermomutatus
  misc_feature: 122
gaagagaatgagaagaaaaagagatggtttagggttaaagagaggaaagtggaaagagaggagaaggataaagtgaagtgacgggaaggaagaatt

SEQ ID NO: 7557 - DNA, 96 bp, Aspergillus thermomutatus
  misc_feature: 122
gaaagaggaatgataagggatagagtaagggatagatagtttagggagaggagggggtagaaaggtttagagataaagagaggaataagagatagt

SEQ ID NO: 7558 - DNA, 96 bp, Aspergillus thermomutatus
  misc_feature: 122
aagagaggatagaagaatcaaagaagttgaggagaaaggaagggaggaaatattaagagagaagaagaaaaggagggagggatagtttattttaag

SEQ ID NO: 7559 - DNA, 96 bp, Aspergillus thermomutatus
  misc_feature: 122
caagaggatcaagaggatcaagaggatcaagaggatcaagaggatcaagaggatcaagaggatcaagaggatcaagaggatcaagaggatcaagag

SEQ ID NO: 7560 - DNA, 96 bp, Aspergillus thermomutatus
  misc_feature: 122
ctaactcttaccctcctttttcttctctttcctttactctctttcccttctaaattccatcttccttcttctctttctctttcttatcctttctat

SEQ ID NO: 7561 - DNA, 96 bp, Aspergillus thermomutatus
  misc_feature: 122
cgaagaggtaggcgacgaggtaggcgacgaggtaggtgaagaggtaggtgaagaggtaggtgaagaggtaggtgaagaggtaggtgaagaggtagg

SEQ ID NO: 7562 - DNA, 96 bp, Aspergillus thermomutatus
  misc_feature: 122
catgcattgggtcatcgtggtgtttcgcgatgatttcggttctcatacactcaggtatgtagatgagattccgcaaatataccaaccctctgtcat

SEQ ID NO: 7563 - DNA, 96 bp, Aspergillus thermomutatus
  misc_feature: 122
cagcaggtgtttcctagtggtcaggggtcccactatatccatattcgcgttccagacgggtgtccaccggccccatcgacccaccatgtccaggct

SEQ ID NO: 7564 - DNA, 96 bp, Aspergillus thermomutatus
  misc_feature: 122
agggagtaaggcaccgtataagcaccaaatcagatagagagatatagagagaggtatccaagaggtagatatagtagtaggcatagtttccagcat

SEQ ID NO: 7565 - DNA, 96 bp, Aspergillus thermomutatus
  misc_feature: 122
aacccttactctactccttctcctaactctctctctactccttcttttactatttactttactccttcttctactctttacttcactttttatcct

SEQ ID NO: 7566 - DNA, 96 bp, Aspergillus thermomutatus
  misc_feature: 122
aaaacctaactcttaccctcctttttcttctctttcctttactctctttcccttctaaattccatcttccttcttctctttctctttcttatcctt

SEQ ID NO: 7567 - DNA, 96 bp, Aspergillus thermomutatus
  misc_feature: 121
caaaggaactgagaatggacaagccgacgcacttagtcgacgaccagactatgaattacaaggaaaaacagtcgagccagcaattcttcgacaaaa

SEQ ID NO: 7568 - DNA, 96 bp, Aspergillus thermomutatus
  misc_feature: 121
gcaaaggaactgagaatggacaagccgacgcacttagtcgacgaccagactatgaattacaaggaaaaacagtcgagccagcaattcttcgacaaa

SEQ ID NO: 7569 - DNA, 96 bp, Aspergillus thermomutatus
  misc_feature: 121
gatcaagaggatcaagaggatcaagaggatcaagaggatcaagaggatcaagaggatcaagaggatcaagaggatcaagaggatcaagaggatcaa

SEQ ID NO: 7570 - DNA, 96 bp, Aspergillus thermomutatus
  misc_feature: 121
agaaggaagatagaggttaagtaatcaaagagattagagaaggagatgagatttttaggattagaaaagaaaaaaaaaagaaaggatgaataagaa

SEQ ID NO: 7571 - DNA, 96 bp, Aspergillus thermomutatus
  misc_feature: 121
ttcgctacctcacgtggtgcatctctggggctacgtggggtgtgttgatccctactatactacctgccccatatggtcgctctctggctaccttgg

SEQ ID NO: 7572 - DNA, 96 bp, Aspergillus thermomutatus
  misc_feature: 121
gagacacacagagaggtgtacacaaggcaggcagaacagtaggcagaacggcaggcagaacggcaggttgaatagcacatagaatagcacgtcgaa

SEQ ID NO: 7573 - DNA, 96 bp, Aspergillus thermomutatus
  misc_feature: 121
agtaagggatagatagtttagggagaggagggggtagaaaggtttagagataaagagaggaataagagatagtattaggggtataaaagagaggaa

SEQ ID NO: 7574 - DNA, 96 bp, Aspergillus thermomutatus
  misc_feature: 121
tggtgcatctctggggctacgtggggtgtgttgatccctactatactacctgccccatatggtcgctctctggctaccttggtccctaccttgcat

SEQ ID NO: 7575 - DNA, 96 bp, Aspergillus thermomutatus
  misc_feature: 121
accaatcgatcaccagcaatacagctcctgcgcggcacggttaggattgctccacgaccgcctacttcggtcgcattgtcacgtgaccaactacca

SEQ ID NO: 7576 - DNA, 96 bp, Aspergillus thermomutatus
  misc_feature: 121
tggcagcaggtgtttcctagtggtcaggggtcccactatatccatattcgcgttccagacgggtgtccaccggccccatcgacccaccatgtccag

SEQ ID NO: 7577 - DNA, 96 bp, Aspergillus thermomutatus
  misc_feature: 121
atggtagcagctaggtagtggcattgagtttgacctcgcaggcagagcaggccattcgagtgacatggtaatataggcagaggctcatcaaatgca

SEQ ID NO: 7578 - DNA, 96 bp, Aspergillus thermomutatus
  misc_feature: 121
agaaaaggacaaggtgacaggaaagaacaaaatgacaggaggagcaaggtagagaggtagaggttaatttttaatagtattagaaatgttatatca

SEQ ID NO: 7579 - DNA, 96 bp, Aspergillus thermomutatus
  misc_feature: 121
tgagaaattagaagaaagaagaggagaggagaaggaaagaaaagagaaacagaggagggaaagaagggaagagatgagaagagaggagaaggagga

SEQ ID NO: 7580 - DNA, 96 bp, Aspergillus thermomutatus
  misc_feature: 121
tcttctctttctctttcttatcctttctattcttaaaataaactatccctccctccttttcttcttctctcttaatatttcctcccttcctttctc

SEQ ID NO: 7581 - DNA, 96 bp, Aspergillus thermomutatus
  misc_feature: 121
gtaggttaataagtaagggtaagagataattaatagagataggggaaagaggaatgataagggatagagtaagggatagatagtttagggagagga

SEQ ID NO: 7582 - DNA, 96 bp, Aspergillus thermomutatus
  misc_feature: 121
tcctcctcctaacccttactctactccttctcctaactctctctctactccttcttttactatttactttactccttcttctactctttacttcac

SEQ ID NO: 7583 - DNA, 96 bp, Aspergillus thermomutatus
  misc_feature: 121
gggaaagaggaatgataagggatagagtaagggatagatagtttagggagaggagggggtagaaaggtttagagataaagagaggaataagagata

SEQ ID NO: 7584 - DNA, 96 bp, Aspergillus thermomutatus
  misc_feature: 121
tatagataagggaaaggaagagaggatagaagaatcaaagaagttgaggagaaaggaagggaggaaatattaagagagaagaagaaaaggagggag

SEQ ID NO: 7585 - DNA, 96 bp, Aspergillus thermomutatus
  misc_feature: 121
gtgaaggtttagggggaaatttatctattctttccaaatatgcctcatgagtatttttacattctttccaaatatgcctcatgagtatttatacta

SEQ ID NO: 7586 - DNA, 96 bp, Aspergillus thermomutatus
  misc_feature: 121
taatttctcctcttttctccttcttattctcttcttattttcctcttgttcttattctcttctctttctctttgattctccctcttctctcttgac

SEQ ID NO: 7587 - DNA, 96 bp, Aspergillus thermomutatus
  misc_feature: 121
aagagaatgagaagaaaaagagatggtttagggttaaagagaggaaagtggaaagagaggagaaggataaagtgaagtgacgggaaggaagaatta

SEQ ID NO: 7588 - DNA, 96 bp, Aspergillus thermomutatus
  misc_feature: 121
taattaatagagataggggaaagaggaatgataagggatagagtaagggatagatagtttagggagaggagggggtagaaaggtttagagataaag

SEQ ID NO: 7589 - DNA, 96 bp, Aspergillus thermomutatus
  misc_feature: 121
ggagtaaggcaccgtataagcaccaaatcagatagagagatatagagagaggtatccaagaggtagatatagtagtaggcatagtttccagcatta

SEQ ID NO: 7590 - DNA, 96 bp, Aspergillus thermomutatus
  misc_feature: 121
taagtattagaggaagagttagggagagtgtttaaggattaaaagaaagagtagagtaagggataggttaagagaggtaaagaggggtaagtaagg

SEQ ID NO: 7591 - DNA, 96 bp, Aspergillus thermomutatus
  misc_feature: 121
gttaataagtaagggtaagagataattaatagagataggggaaagaggaatgataagggatagagtaagggatagatagtttagggagaggagggg

SEQ ID NO: 7592 - DNA, 96 bp, Aspergillus thermomutatus
  misc_feature: 121
gtctgcctgtctgcctgtctgcctgtctgcctgtctgcctgtctctctacctcactgcctacctcatgtcggacctctctgtgggcctatctgcct

SEQ ID NO: 7593 - DNA, 96 bp, Aspergillus thermomutatus
  misc_feature: 121
ggccactatggctctgctgggaccactggtggactatctgccaatgctttcgcattgatttgatggtagcagctaggtagtggcattgagtttgac

SEQ ID NO: 7594 - DNA, 96 bp, Aspergillus thermomutatus
  misc_feature: 121
aatttctcctcttttctccttcttattctcttcttattttcctcttgttcttattctcttctctttctctttgattctccctcttctctcttgacc

SEQ ID NO: 7595 - DNA, 96 bp, Aspergillus thermomutatus
  misc_feature: 121
attcttcgctacctcacgtggtgcatctctggggctacgtggggtgtgttgatccctactatactacctgccccatatggtcgctctctggctacc

SEQ ID NO: 7596 - DNA, 96 bp, Aspergillus thermomutatus
  misc_feature: 121
ggggaaagaggaatgataagggatagagtaagggatagatagtttagggagaggagggggtagaaaggtttagagataaagagaggaataagagat

SEQ ID NO: 7597 - DNA, 96 bp, Aspergillus thermomutatus
  misc_feature: 121
ggcagcaggtgtttcctagtggtcaggggtcccactatatccatattcgcgttccagacgggtgtccaccggccccatcgacccaccatgtccagg

SEQ ID NO: 7598 - DNA, 96 bp, Aspergillus thermomutatus
  misc_feature: 121
ataagagtaaggattagtgattttagaaataaaggagtaaaaagtcgatgagagtagagaagatgagatgatataagggaaagagaagattaaagc

SEQ ID NO: 7599 - DNA, 96 bp, Aspergillus thermomutatus
  misc_feature: 121
accatgcattgggtcatcgtggtgtttcgcgatgatttcggttctcatacactcaggtatgtagatgagattccgcaaatataccaaccctctgtc

SEQ ID NO: 7600 - DNA, 96 bp, Aspergillus thermomutatus
  misc_feature: 121
aactcttaccctcctttttcttctctttcctttactctctttcccttctaaattccatcttccttcttctctttctctttcttatcctttctattc

SEQ ID NO: 7601 - DNA, 96 bp, Aspergillus thermomutatus
  misc_feature: 121
atagtaaagaaaagaagagaataagtaagggttaaagggaatttaaagtaggaaagaaaagagagagtaagggttagttagtttagaaggagaaag

SEQ ID NO: 7602 - DNA, 96 bp, Aspergillus thermomutatus
  misc_feature: 121
ctttctaaaacctaactcttaccctcctttttcttctctttcctttactctctttcccttctaaattccatcttccttcttctctttctctttctt

SEQ ID NO: 7603 - DNA, 96 bp, Aspergillus thermomutatus
  misc_feature: 121
cttcgctacctcacgtggtgcatctctggggctacgtggggtgtgttgatccctactatactacctgccccatatggtcgctctctggctaccttg

SEQ ID NO: 7604 - DNA, 96 bp, Aspergillus thermomutatus
  misc_feature: 121
agagagttaggagaaggagtagagtaagggttaggaggaggattagagggagggatagaaagaggattagagggaggattagaaagaggattagag

SEQ ID NO: 7605 - DNA, 96 bp, Aspergillus thermomutatus
  misc_feature: 121
acacaaggcaggcagaacagtaggcagaacggcaggcagaacggcaggttgaatagcacatagaatagcacgtcgaatagcatgtagaatagcacg

SEQ ID NO: 7606 - DNA, 96 bp, Aspergillus thermomutatus
  misc_feature: 121
atgagacacacagagaggtgtacacaaggcaggcagaacagtaggcagaacggcaggcagaacggcaggttgaatagcacatagaatagcacgtcg

SEQ ID NO: 7607 - DNA, 96 bp, Aspergillus thermomutatus
  misc_feature: 121
aagagagtgaaggaagggatgttgatggacagtgtgataaggtaagggttatttagtttattaagagagagggaaggaattgagaagagaataagg

SEQ ID NO: 7608 - DNA, 96 bp, Aspergillus thermomutatus
  misc_feature: 121
acagagaggtgtacacaaggcaggcagaacagtaggcagaacggcaggcagaacggcaggttgaatagcacatagaatagcacgtcgaatagcatg

SEQ ID NO: 7609 - DNA, 96 bp, Aspergillus thermomutatus
  misc_feature: 121
cagagaggtgtacacaaggcaggcagaacagtaggcagaacggcaggcagaacggcaggttgaatagcacatagaatagcacgtcgaatagcatgt

SEQ ID NO: 7610 - DNA, 96 bp, Aspergillus thermomutatus
  misc_feature: 121
attgctccatacctcctatggtgcctctctacctatctccctacctcttcacctacctcttcacctacctcttcacctacctcttcacctacctct

SEQ ID NO: 7611 - DNA, 96 bp, Aspergillus thermomutatus
  misc_feature: 121
agacacacagagaggtgtacacaaggcaggcagaacagtaggcagaacggcaggcagaacggcaggttgaatagcacatagaatagcacgtcgaat

SEQ ID NO: 7612 - DNA, 96 bp, Aspergillus thermomutatus
  misc_feature: 120
tttcttctctttcctttactctctttcccttctaaattccatcttccttcttctctttctctttcttatcctttctattcttaaaataaactatcc

SEQ ID NO: 7613 - DNA, 96 bp, Aspergillus thermomutatus
  misc_feature: 120
agtaagggtaagagataattaatagagataggggaaagaggaatgataagggatagagtaagggatagatagtttagggagaggagggggtagaaa

SEQ ID NO: 7614 - DNA, 96 bp, Aspergillus thermomutatus
  misc_feature: 120
tttcgcgatgatttcggttctcatacactcaggtatgtagatgagattccgcaaatataccaaccctctgtcatccatggtaaggttttcattgtc

SEQ ID NO: 7615 - DNA, 96 bp, Aspergillus thermomutatus
  misc_feature: 120
cagtcattttaaaagtgtacgagcggcagcagcagcatatgatgtcccacattccactctagcccatcgcatcaatggtcgaaaggcgcgaagcaa

SEQ ID NO: 7616 - DNA, 96 bp, Aspergillus thermomutatus
  misc_feature: 120
ttcttcgctacctcacgtggtgcatctctggggctacgtggggtgtgttgatccctactatactacctgccccatatggtcgctctctggctacct

SEQ ID NO: 7617 - DNA, 96 bp, Aspergillus thermomutatus
  misc_feature: 120
gaagagaagagaatgagaagaaaaagagatggtttagggttaaagagaggaaagtggaaagagaggagaaggataaagtgaagtgacgggaaggaa

SEQ ID NO: 7618 - DNA, 96 bp, Aspergillus thermomutatus
  misc_feature: 120
ttccgcaaatataccaaccctctgtcatccatggtaaggttttcattgtctgctgagttttcgagcatttcttggatgattttgtccctttttgtt

SEQ ID NO: 7619 - DNA, 96 bp, Aspergillus thermomutatus
  misc_feature: 120
ttatagtaatggttaaagagagaataagaaaagaagagaagataaaagagagagagatttttagttaggattaaagatagtaaaaagagagaaagg

SEQ ID NO: 7620 - DNA, 96 bp, Aspergillus thermomutatus
  misc_feature: 120
agagaatgagaagaaaaagagatggtttagggttaaagagaggaaagtggaaagagaggagaaggataaagtgaagtgacgggaaggaagaattaa

SEQ ID NO: 7621 - DNA, 96 bp, Aspergillus thermomutatus
  misc_feature: 120
ttaatgagaaattagaagaaagaagaggagaggagaaggaaagaaaagagaaacagaggagggaaagaagggaagagatgagaagagaggagaagg

SEQ ID NO: 7622 - DNA, 96 bp, Aspergillus thermomutatus
  misc_feature: 120
tggtagcagctaggtagtggcattgagtttgacctcgcaggcagagcaggccattcgagtgacatggtaatataggcagaggctcatcaaatgcat

SEQ ID NO: 7623 - DNA, 96 bp, Aspergillus thermomutatus
  misc_feature: 120
atggcagcaggtgtttcctagtggtcaggggtcccactatatccatattcgcgttccagacgggtgtccaccggccccatcgacccaccatgtcca

SEQ ID NO: 7624 - DNA, 96 bp, Aspergillus thermomutatus
  misc_feature: 120
acagtcattttaaaagtgtacgagcggcagcagcagcatatgatgtcccacattccactctagcccatcgcatcaatggtcgaaaggcgcgaagca

SEQ ID NO: 7625 - DNA, 96 bp, Aspergillus thermomutatus
  misc_feature: 120
tgagacacacagagaggtgtacacaaggcaggcagaacagtaggcagaacggcaggcagaacggcaggttgaatagcacatagaatagcacgtcga

SEQ ID NO: 7626 - DNA, 96 bp, Aspergillus thermomutatus
  misc_feature: 120
gttcccttctctccttatcctcttcccgttttctcctcgttgtctcttctcattctcctctcttatcattctctttactttctctttaccttctca

SEQ ID NO: 7627 - DNA, 96 bp, Aspergillus thermomutatus
  misc_feature: 120
tgaaggtttagggggaaatttatctattctttccaaatatgcctcatgagtatttttacattctttccaaatatgcctcatgagtatttatactat

SEQ ID NO: 7628 - DNA, 96 bp, Aspergillus thermomutatus
  misc_feature: 120
tctttctaaaacctaactcttaccctcctttttcttctctttcctttactctctttcccttctaaattccatcttccttcttctctttctctttct

SEQ ID NO: 7629 - DNA, 96 bp, Aspergillus thermomutatus
  misc_feature: 120
tctttcgttctattttctcttctctctctttctatccttcttttccaccctcctccttttacaacctataatttctactaaccctcactcttatcc

SEQ ID NO: 7630 - DNA, 96 bp, Aspergillus thermomutatus
  misc_feature: 120
tcttcgctacctcacgtggtgcatctctggggctacgtggggtgtgttgatccctactatactacctgccccatatggtcgctctctggctacctt

SEQ ID NO: 7631 - DNA, 96 bp, Aspergillus thermomutatus
  misc_feature: 120
tctgctgggccttagcctgcacctgggcctgctcccaggcctgcatcacctcatcgaccgcagcctggacatggtgggtcgatggggccggtggac

SEQ ID NO: 7632 - DNA, 96 bp, Aspergillus thermomutatus
  misc_feature: 120
tcgcgatgatttcggttctcatacactcaggtatgtagatgagattccgcaaatataccaaccctctgtcatccatggtaaggttttcattgtctg

SEQ ID NO: 7633 - DNA, 96 bp, Aspergillus thermomutatus
  misc_feature: 120
taatgagaaattagaagaaagaagaggagaggagaaggaaagaaaagagaaacagaggagggaaagaagggaagagatgagaagagaggagaagga

SEQ ID NO: 7634 - DNA, 96 bp, Aspergillus thermomutatus
  misc_feature: 120
tcctctcccttctcttaaaccaacccctacttatttactgcttcctactctctaaccatccctctatctcttctgctttccgtcctttctccttct

SEQ ID NO: 7635 - DNA, 96 bp, Aspergillus thermomutatus
  misc_feature: 120
tccactttcctctctttaaccctaaaccatctctttttcttctcattctcttctcttcttgttcccttctctccttatcctcttcccgttttctcc

SEQ ID NO: 7636 - DNA, 96 bp, Aspergillus thermomutatus
  misc_feature: 120
gtctgctgggccttagcctgcacctgggcctgctcccaggcctgcatcacctcatcgaccgcagcctggacatggtgggtcgatggggccggtgga

SEQ ID NO: 7637 - DNA, 96 bp, Aspergillus thermomutatus
  misc_feature: 120
actcaggtatgtagatgagattccgcaaatataccaaccctctgtcatccatggtaaggttttcattgtctgctgagttttcgagcatttcttgga

SEQ ID NO: 7638 - DNA, 96 bp, Aspergillus thermomutatus
  misc_feature: 120
tattctacgtgctattctacgtgctattctacgtgctattctacatgctattcgacgtgctattctatgtgctattcaacctgccgttctgcctgc

SEQ ID NO: 7639 - DNA, 96 bp, Aspergillus thermomutatus
  misc_feature: 120
taggtataaaggcacccacagaggccccatgtaaggcaggcagagaggtagagataggtagagagggacccaagtagcaggccataaggcaggccg

SEQ ID NO: 7640 - DNA, 96 bp, Aspergillus thermomutatus
  misc_feature: 120
tagcagctaggtagtggcattgagtttgacctcgcaggcagagcaggccattcgagtgacatggtaatataggcagaggctcatcaaatgcatgtg

SEQ ID NO: 7641 - DNA, 96 bp, Aspergillus thermomutatus
  misc_feature: 120
cctaactcttaccctcctttttcttctctttcctttactctctttcccttctaaattccatcttccttcttctctttctctttcttatcctttcta

SEQ ID NO: 7642 - DNA, 96 bp, Aspergillus thermomutatus
  misc_feature: 120
tacacaaggcaggcagaacagtaggcagaacggcaggcagaacggcaggttgaatagcacatagaatagcacgtcgaatagcatgtagaatagcac

SEQ ID NO: 7643 - DNA, 96 bp, Aspergillus thermomutatus
  misc_feature: 120
acaaggtgacaggaaagaacaaaatgacaggaggagcaaggtagagaggtagaggttaatttttaatagtattagaaatgttatatcaatcaatta

SEQ ID NO: 7644 - DNA, 96 bp, Aspergillus thermomutatus
  misc_feature: 120
taagggtaagagataattaatagagataggggaaagaggaatgataagggatagagtaagggatagatagtttagggagaggagggggtagaaagg

SEQ ID NO: 7645 - DNA, 96 bp, Aspergillus thermomutatus
  misc_feature: 120
taaatagtaaaagaaggagtagagagagagttaggagaaggagtagagtaagggttaggaggaggattagagggagggatagaaagaggattagag

SEQ ID NO: 7646 - DNA, 96 bp, Aspergillus thermomutatus
  misc_feature: 120
gtagcagctaggtagtggcattgagtttgacctcgcaggcagagcaggccattcgagtgacatggtaatataggcagaggctcatcaaatgcatgt

SEQ ID NO: 7647 - DNA, 96 bp, Aspergillus thermomutatus
  misc_feature: 120
gtaagggtaagagataattaatagagataggggaaagaggaatgataagggatagagtaagggatagatagtttagggagaggagggggtagaaag

SEQ ID NO: 7648 - DNA, 96 bp, Aspergillus thermomutatus
  misc_feature: 120
ccatatgaccatgcattgggtcatcgtggtgtttcgcgatgatttcggttctcatacactcaggtatgtagatgagattccgcaaatataccaacc

SEQ ID NO: 7649 - DNA, 96 bp, Aspergillus thermomutatus
  misc_feature: 120
ctaccaggagggagtccagccttataaggtgtttcgaggacgaaacgctaagagagggggaggtgatgttacgacaccaacactactaggcggacc

SEQ ID NO: 7650 - DNA, 96 bp, Aspergillus thermomutatus
  misc_feature: 120
ggtagcagctaggtagtggcattgagtttgacctcgcaggcagagcaggccattcgagtgacatggtaatataggcagaggctcatcaaatgcatg

SEQ ID NO: 7651 - DNA, 96 bp, Aspergillus thermomutatus
  misc_feature: 120
gggagtaaggcaccgtataagcaccaaatcagatagagagatatagagagaggtatccaagaggtagatatagtagtaggcatagtttccagcatt

SEQ ID NO: 7652 - DNA, 96 bp, Aspergillus thermomutatus
  misc_feature: 120
cttctctttctctttcttatcctttctattcttaaaataaactatccctccctccttttcttcttctctcttaatatttcctcccttcctttctcc

SEQ ID NO: 7653 - DNA, 96 bp, Aspergillus thermomutatus
  misc_feature: 120
gatggtagcagctaggtagtggcattgagtttgacctcgcaggcagagcaggccattcgagtgacatggtaatataggcagaggctcatcaaatgc

SEQ ID NO: 7654 - DNA, 96 bp, Aspergillus thermomutatus
  misc_feature: 120
ccgcaaatataccaaccctctgtcatccatggtaaggttttcattgtctgctgagttttcgagcatttcttggatgattttgtccctttttgttgc

SEQ ID NO: 7655 - DNA, 96 bp, Aspergillus thermomutatus
  misc_feature: 120
catgagacacacagagaggtgtacacaaggcaggcagaacagtaggcagaacggcaggcagaacggcaggttgaatagcacatagaatagcacgtc

SEQ ID NO: 7656 - DNA, 96 bp, Aspergillus thermomutatus
  misc_feature: 120
ctcttaatatttcctcccttcctttctcctcaacttctttgattcttctatcctctcttcctttcccttatctatacttctcataaactacaattc

SEQ ID NO: 7657 - DNA, 96 bp, Aspergillus thermomutatus
  misc_feature: 120
aatggtagggagtaaggcaccgtataagcaccaaatcagatagagagatatagagagaggtatccaagaggtagatatagtagtaggcatagtttc

SEQ ID NO: 7658 - DNA, 96 bp, Aspergillus thermomutatus
  misc_feature: 120
aagagaagagaatgagaagaaaaagagatggtttagggttaaagagaggaaagtggaaagagaggagaaggataaagtgaagtgacgggaaggaag

SEQ ID NO: 7659 - DNA, 96 bp, Aspergillus thermomutatus
  misc_feature: 120
agagaaggaagatagaggttaagtaatcaaagagattagagaaggagatgagatttttaggattagaaaagaaaaaaaaaagaaaggatgaataag

SEQ ID NO: 7660 - DNA, 96 bp, Aspergillus thermomutatus
  misc_feature: 120
cttaatttctcctcttttctccttcttattctcttcttattttcctcttgttcttattctcttctctttctctttgattctccctcttctctcttg

SEQ ID NO: 7661 - DNA, 96 bp, Aspergillus thermomutatus
  misc_feature: 120
aatgagaaattagaagaaagaagaggagaggagaaggaaagaaaagagaaacagaggagggaaagaagggaagagatgagaagagaggagaaggag

SEQ ID NO: 7662 - DNA, 96 bp, Aspergillus thermomutatus
  misc_feature: 120
ctattctacgtgctattctacgtgctattctacgtgctattctacatgctattcgacgtgctattctatgtgctattcaacctgccgttctgcctg

SEQ ID NO: 7663 - DNA, 96 bp, Aspergillus thermomutatus
  misc_feature: 120
cgcaaatataccaaccctctgtcatccatggtaaggttttcattgtctgctgagttttcgagcatttcttggatgattttgtccctttttgttgct

SEQ ID NO: 7664 - DNA, 96 bp, Aspergillus thermomutatus
  misc_feature: 120
atgagaaattagaagaaagaagaggagaggagaaggaaagaaaagagaaacagaggagggaaagaagggaagagatgagaagagaggagaaggagg

SEQ ID NO: 7665 - DNA, 96 bp, Aspergillus thermomutatus
  misc_feature: 120
aggttaataagtaagggtaagagataattaatagagataggggaaagaggaatgataagggatagagtaagggatagatagtttagggagaggagg

SEQ ID NO: 7666 - DNA, 96 bp, Aspergillus thermomutatus
  misc_feature: 120
cccttctctccttatcctcttcccgttttctcctcgttgtctcttctcattctcctctcttatcattctctttactttctctttaccttctcacct

SEQ ID NO: 7667 - DNA, 96 bp, Aspergillus thermomutatus
  misc_feature: 120
acgtgctattctacatgctattcgacgtgctattctatgtgctattcaacctgccgttctgcctgccgttctgcctactgttctgcctgccttgtg

SEQ ID NO: 7668 - DNA, 96 bp, Aspergillus thermomutatus
  misc_feature: 120
caaggtgacaggaaagaacaaaatgacaggaggagcaaggtagagaggtagaggttaatttttaatagtattagaaatgttatatcaatcaattat

SEQ ID NO: 7669 - DNA, 96 bp, Aspergillus thermomutatus
  misc_feature: 120
agtcattttaaaagtgtacgagcggcagcagcagcatatgatgtcccacattccactctagcccatcgcatcaatggtcgaaaggcgcgaagcaat

SEQ ID NO: 7670 - DNA, 96 bp, Aspergillus thermomutatus
  misc_feature: 120
aggtataaaggcacccacagaggccccatgtaaggcaggcagagaggtagagataggtagagagggacccaagtagcaggccataaggcaggccgt

SEQ ID NO: 7671 - DNA, 96 bp, Aspergillus thermomutatus
  misc_feature: 120
agggtaagagataattaatagagataggggaaagaggaatgataagggatagagtaagggatagatagtttagggagaggagggggtagaaaggtt

SEQ ID NO: 7672 - DNA, 96 bp, Aspergillus thermomutatus
  misc_feature: 120
acctaactcttaccctcctttttcttctctttcctttactctctttcccttctaaattccatcttccttcttctctttctctttcttatcctttct

SEQ ID NO: 7673 - DNA, 96 bp, Aspergillus thermomutatus
  misc_feature: 119
tttttcttctctttcctttactctctttcccttctaaattccatcttccttcttctctttctctttcttatcctttctattcttaaaataaactat

SEQ ID NO: 7674 - DNA, 96 bp, Aspergillus thermomutatus
  misc_feature: 119
tttctttcgttctattttctcttctctctctttctatccttcttttccaccctcctccttttacaacctataatttctactaaccctcactcttat

SEQ ID NO: 7675 - DNA, 96 bp, Aspergillus thermomutatus
  misc_feature: 119
gtaatggttaaagagagaataagaaaagaagagaagataaaagagagagagatttttagttaggattaaagatagtaaaaagagagaaaggggaaa

SEQ ID NO: 7676 - DNA, 96 bp, Aspergillus thermomutatus
  misc_feature: 119
ttctttcgttctattttctcttctctctctttctatccttcttttccaccctcctccttttacaacctataatttctactaaccctcactcttatc

SEQ ID NO: 7677 - DNA, 96 bp, Aspergillus thermomutatus
  misc_feature: 119
aagagaagattaaagcgaagagagtgaaggaagggatgttgatggacagtgtgataaggtaagggttatttagtttattaagagagagggaaggaa

SEQ ID NO: 7678 - DNA, 96 bp, Aspergillus thermomutatus
  misc_feature: 119
agtaatggttaaagagagaataagaaaagaagagaagataaaagagagagagatttttagttaggattaaagatagtaaaaagagagaaaggggaa

SEQ ID NO: 7679 - DNA, 96 bp, Aspergillus thermomutatus
  misc_feature: 119
aagagaaggaagatagaggttaagtaatcaaagagattagagaaggagatgagatttttaggattagaaaagaaaaaaaaaagaaaggatgaataa

SEQ ID NO: 7680 - DNA, 96 bp, Aspergillus thermomutatus
  misc_feature: 119
ttaggtataaaggcacccacagaggccccatgtaaggcaggcagagaggtagagataggtagagagggacccaagtagcaggccataaggcaggcc

SEQ ID NO: 7681 - DNA, 96 bp, Aspergillus thermomutatus
  misc_feature: 119
ttaatttctcctcttttctccttcttattctcttcttattttcctcttgttcttattctcttctctttctctttgattctccctcttctctcttga

SEQ ID NO: 7682 - DNA, 96 bp, Aspergillus thermomutatus
  misc_feature: 119
ttaataagtaagggtaagagataattaatagagataggggaaagaggaatgataagggatagagtaagggatagatagtttagggagaggaggggg

SEQ ID NO: 7683 - DNA, 96 bp, Aspergillus thermomutatus
  misc_feature: 119
aggccatgagacacacagagaggtgtacacaaggcaggcagaacagtaggcagaacggcaggcagaacggcaggttgaatagcacatagaatagca

SEQ ID NO: 7684 - DNA, 96 bp, Aspergillus thermomutatus
  misc_feature: 119
gtacacaaggcaggcagaacagtaggcagaacggcaggcagaacggcaggttgaatagcacatagaatagcacgtcgaatagcatgtagaatagca

SEQ ID NO: 7685 - DNA, 96 bp, Aspergillus thermomutatus
  misc_feature: 119
gtggtgcatctctggggctacgtggggtgtgttgatccctactatactacctgccccatatggtcgctctctggctaccttggtccctaccttgca

SEQ ID NO: 7686 - DNA, 96 bp, Aspergillus thermomutatus
  misc_feature: 119
tgatggtagcagctaggtagtggcattgagtttgacctcgcaggcagagcaggccattcgagtgacatggtaatataggcagaggctcatcaaatg

SEQ ID NO: 7687 - DNA, 96 bp, Aspergillus thermomutatus
  misc_feature: 119
tcttctattactcctataattccccttattcttcctttctgatccattattccttcctttttccttttgaaatccttctatctttctttccacctt

SEQ ID NO: 7688 - DNA, 96 bp, Aspergillus thermomutatus
  misc_feature: 119
tctccttatcctcttcccgttttctcctcgttgtctcttctcattctcctctcttatcattctctttactttctctttaccttctcacctcgttcc

SEQ ID NO: 7689 - DNA, 96 bp, Aspergillus thermomutatus
  misc_feature: 119
gagagagttaggagaaggagtagagtaagggttaggaggaggattagagggagggatagaaagaggattagagggaggattagaaagaggattaga

SEQ ID NO: 7690 - DNA, 96 bp, Aspergillus thermomutatus
  misc_feature: 119
aaagagaagattaaagcgaagagagtgaaggaagggatgttgatggacagtgtgataaggtaagggttatttagtttattaagagagagggaagga

SEQ ID NO: 7691 - DNA, 96 bp, Aspergillus thermomutatus
  misc_feature: 119
gagtaagggatagatagtttagggagaggagggggtagaaaggtttagagataaagagaggaataagagatagtattaggggtataaaagagagga

SEQ ID NO: 7692 - DNA, 96 bp, Aspergillus thermomutatus
  misc_feature: 119
tccaactcttatcattttccttttcttaaatcctacttcttctctttttttcttctttcttttcttaactcttactttcctctcttttatacccct

SEQ ID NO: 7693 - DNA, 96 bp, Aspergillus thermomutatus
  misc_feature: 119
cggccactatggctctgctgggaccactggtggactatctgccaatgctttcgcattgatttgatggtagcagctaggtagtggcattgagtttga

SEQ ID NO: 7694 - DNA, 96 bp, Aspergillus thermomutatus
  misc_feature: 119
gacacacagagaggtgtacacaaggcaggcagaacagtaggcagaacggcaggcagaacggcaggttgaatagcacatagaatagcacgtcgaata

SEQ ID NO: 7695 - DNA, 96 bp, Aspergillus thermomutatus
  misc_feature: 119
gaagagaaggaagatagaggttaagtaatcaaagagattagagaaggagatgagatttttaggattagaaaagaaaaaaaaaagaaaggatgaata

SEQ ID NO: 7696 - DNA, 96 bp, Aspergillus thermomutatus
  misc_feature: 119
gatagaggttaagtaatcaaagagattagagaaggagatgagatttttaggattagaaaagaaaaaaaaaagaaaggatgaataagaagaaggata

SEQ ID NO: 7697 - DNA, 96 bp, Aspergillus thermomutatus
  misc_feature: 119
ctttttcttctctttcctttactctctttcccttctaaattccatcttccttcttctctttctctttcttatcctttctattcttaaaataaacta

SEQ ID NO: 7698 - DNA, 96 bp, Aspergillus thermomutatus
  misc_feature: 119
ccaactcttatcattttccttttcttaaatcctacttcttctctttttttcttctttcttttcttaactcttactttcctctcttttataccccta

SEQ ID NO: 7699 - DNA, 96 bp, Aspergillus thermomutatus
  misc_feature: 119
tacactatatgcctcctttaggggtgcaaagcaaccaacatcaagaggctgtaaatgatttgatgaatgagaaggcatgtataaaggaatgatctg

SEQ ID NO: 7700 - DNA, 96 bp, Aspergillus thermomutatus
  misc_feature: 119
gtttcgcgatgatttcggttctcatacactcaggtatgtagatgagattccgcaaatataccaaccctctgtcatccatggtaaggttttcattgt

SEQ ID NO: 7701 - DNA, 96 bp, Aspergillus thermomutatus
  misc_feature: 119
gttaggtataaaggcacccacagaggccccatgtaaggcaggcagagaggtagagataggtagagagggacccaagtagcaggccataaggcaggc

SEQ ID NO: 7702 - DNA, 96 bp, Aspergillus thermomutatus
  misc_feature: 119
gttaatgagaaattagaagaaagaagaggagaggagaaggaaagaaaagagaaacagaggagggaaagaagggaagagatgagaagagaggagaag

SEQ ID NO: 7703 - DNA, 96 bp, Aspergillus thermomutatus
  misc_feature: 119
cattcttcgctacctcacgtggtgcatctctggggctacgtggggtgtgttgatccctactatactacctgccccatatggtcgctctctggctac

SEQ ID NO: 7704 - DNA, 96 bp, Aspergillus thermomutatus
  misc_feature: 119
ggtgaaggtttagggggaaatttatctattctttccaaatatgcctcatgagtatttttacattctttccaaatatgcctcatgagtatttatact

SEQ ID NO: 7705 - DNA, 96 bp, Aspergillus thermomutatus
  misc_feature: 119
ggtcaggggtcccactatatccatattcgcgttccagacgggtgtccaccggccccatcgacccaccatgtccaggctgcggtcgatgaggtgatg

SEQ ID NO: 7706 - DNA, 96 bp, Aspergillus thermomutatus
  misc_feature: 119
aaccaatcgatcaccagcaatacagctcctgcgcggcacggttaggattgctccacgaccgcctacttcggtcgcattgtcacgtgaccaactacc

SEQ ID NO: 7707 - DNA, 96 bp, Aspergillus thermomutatus
  misc_feature: 119
actgttttgtcgaagaattgctggctcgactgtttttccttgtaattcatagtctggtcgtcgactaagtgcgtcggcttgtccattctcagttcc

SEQ ID NO: 7708 - DNA, 96 bp, Aspergillus thermomutatus
  misc_feature: 119
atggtagggagtaaggcaccgtataagcaccaaatcagatagagagatatagagagaggtatccaagaggtagatatagtagtaggcatagtttcc

SEQ ID NO: 7709 - DNA, 96 bp, Aspergillus thermomutatus
  misc_feature: 119
gcaaatataccaaccctctgtcatccatggtaaggttttcattgtctgctgagttttcgagcatttcttggatgattttgtccctttttgttgctt

SEQ ID NO: 7710 - DNA, 96 bp, Aspergillus thermomutatus
  misc_feature: 119
gagtaggttaataagtaagggtaagagataattaatagagataggggaaagaggaatgataagggatagagtaagggatagatagtttagggagag

SEQ ID NO: 7711 - DNA, 96 bp, Aspergillus thermomutatus
  misc_feature: 119
ccttctctccttatcctcttcccgttttctcctcgttgtctcttctcattctcctctcttatcattctctttactttctctttaccttctcacctc

SEQ ID NO: 7712 - DNA, 96 bp, Aspergillus thermomutatus
  misc_feature: 119
gacaaggtgacaggaaagaacaaaatgacaggaggagcaaggtagagaggtagaggttaatttttaatagtattagaaatgttatatcaatcaatt

SEQ ID NO: 7713 - DNA, 96 bp, Aspergillus thermomutatus
  misc_feature: 119
gaagagagtgaaggaagggatgttgatggacagtgtgataaggtaagggttatttagtttattaagagagagggaaggaattgagaagagaataag

SEQ ID NO: 7714 - DNA, 96 bp, Aspergillus thermomutatus
  misc_feature: 119
atagaggttaagtaatcaaagagattagagaaggagatgagatttttaggattagaaaagaaaaaaaaaagaaaggatgaataagaagaaggatag

SEQ ID NO: 7715 - DNA, 96 bp, Aspergillus thermomutatus
  misc_feature: 119
agagagagttaggagaaggagtagagtaagggttaggaggaggattagagggagggatagaaagaggattagagggaggattagaaagaggattag

SEQ ID NO: 7716 - DNA, 96 bp, Aspergillus thermomutatus
  misc_feature: 119
cggaaaagaaagaagaaggcaagaatacgtgctaatctaggtggtgataccattttatctgtacaagaaggccagaatcgtgttcagcagcttgat

SEQ ID NO: 7717 - DNA, 96 bp, Aspergillus thermomutatus
  misc_feature: 119
agtaggttaataagtaagggtaagagataattaatagagataggggaaagaggaatgataagggatagagtaagggatagatagtttagggagagg

SEQ ID NO: 7718 - DNA, 96 bp, Aspergillus thermomutatus
  misc_feature: 119
atagataagggaaaggaagagaggatagaagaatcaaagaagttgaggagaaaggaagggaggaaatattaagagagaagaagaaaaggagggagg

SEQ ID NO: 7719 - DNA, 96 bp, Aspergillus thermomutatus
  misc_feature: 119
ccaatcgatcaccagcaatacagctcctgcgcggcacggttaggattgctccacgaccgcctacttcggtcgcattgtcacgtgaccaactaccat

SEQ ID NO: 7720 - DNA, 96 bp, Aspergillus thermomutatus
  misc_feature: 119
acactcaggtatgtagatgagattccgcaaatataccaaccctctgtcatccatggtaaggttttcattgtctgctgagttttcgagcatttcttg

SEQ ID NO: 7721 - DNA, 96 bp, Aspergillus thermomutatus
  misc_feature: 119
aggagctggtcttaagccacttaatcaagacagggttcttgaaaagattacttttcagcttcgtacgccaacaccaccacttcttgaaggttcaat

SEQ ID NO: 7722 - DNA, 96 bp, Aspergillus thermomutatus
  misc_feature: 119
agaagagaatgagaagaaaaagagatggtttagggttaaagagaggaaagtggaaagagaggagaaggataaagtgaagtgacgggaaggaagaat

SEQ ID NO: 7723 - DNA, 96 bp, Aspergillus thermomutatus
  misc_feature: 119
atcttctattactcctataattccccttattcttcctttctgatccattattccttcctttttccttttgaaatccttctatctttctttccacct

SEQ ID NO: 7724 - DNA, 96 bp, Aspergillus thermomutatus
  misc_feature: 119
actcttaccctcctttttcttctctttcctttactctctttcccttctaaattccatcttccttcttctctttctctttcttatcctttctattct

SEQ ID NO: 7725 - DNA, 96 bp, Aspergillus thermomutatus
  misc_feature: 119
agaataagtattagaggaagagttagggagagtgtttaaggattaaaagaaagagtagagtaagggataggttaagagaggtaaagaggggtaagt

SEQ ID NO: 7726 - DNA, 96 bp, Aspergillus thermomutatus
  misc_feature: 119
aagggtaagagataattaatagagataggggaaagaggaatgataagggatagagtaagggatagatagtttagggagaggagggggtagaaaggt

SEQ ID NO: 7727 - DNA, 96 bp, Aspergillus thermomutatus
  misc_feature: 119
acacggccactatggctctgctgggaccactggtggactatctgccaatgctttcgcattgatttgatggtagcagctaggtagtggcattgagtt

SEQ ID NO: 7728 - DNA, 96 bp, Aspergillus thermomutatus
  misc_feature: 119
aaggtgacaggaaagaacaaaatgacaggaggagcaaggtagagaggtagaggttaatttttaatagtattagaaatgttatatcaatcaattatt

SEQ ID NO: 7729 - DNA, 96 bp, Aspergillus thermomutatus
  misc_feature: 118
aattatagtaatggttaaagagagaataagaaaagaagagaagataaaagagagagagatttttagttaggattaaagatagtaaaaagagagaaa

SEQ ID NO: 7730 - DNA, 96 bp, Aspergillus thermomutatus
  misc_feature: 118
tttctaaaacctaactcttaccctcctttttcttctctttcctttactctctttcccttctaaattccatcttccttcttctctttctctttctta

SEQ ID NO: 7731 - DNA, 96 bp, Aspergillus thermomutatus
  misc_feature: 118
tttcgttctattttctcttctctctctttctatccttcttttccaccctcctccttttacaacctataatttctactaaccctcactcttatcctc

SEQ ID NO: 7732 - DNA, 96 bp, Aspergillus thermomutatus
  misc_feature: 118
ttgctccatacctcctatggtgcctctctacctatctccctacctcttcacctacctcttcacctacctcttcacctacctcttcacctacctctt

SEQ ID NO: 7733 - DNA, 96 bp, Aspergillus thermomutatus
  misc_feature: 118
gagaagagaatgagaagaaaaagagatggtttagggttaaagagaggaaagtggaaagagaggagaaggataaagtgaagtgacgggaaggaagaa

SEQ ID NO: 7734 - DNA, 96 bp, Aspergillus thermomutatus
  misc_feature: 118
ttcgcgatgatttcggttctcatacactcaggtatgtagatgagattccgcaaatataccaaccctctgtcatccatggtaaggttttcattgtct

SEQ ID NO: 7735 - DNA, 96 bp, Aspergillus thermomutatus
  misc_feature: 118
ttcccttctctccttatcctcttcccgttttctcctcgttgtctcttctcattctcctctcttatcattctctttactttctctttaccttctcac

SEQ ID NO: 7736 - DNA, 96 bp, Aspergillus thermomutatus
  misc_feature: 118
cgaagagagtgaaggaagggatgttgatggacagtgtgataaggtaagggttatttagtttattaagagagagggaaggaattgagaagagaataa

SEQ ID NO: 7737 - DNA, 96 bp, Aspergillus thermomutatus
  misc_feature: 118
caactcttatcattttccttttcttaaatcctacttcttctctttttttcttctttcttttcttaactcttactttcctctcttttatacccctaa

SEQ ID NO: 7738 - DNA, 96 bp, Aspergillus thermomutatus
  misc_feature: 118
aataagtattagaggaagagttagggagagtgtttaaggattaaaagaaagagtagagtaagggataggttaagagaggtaaagaggggtaagtaa

SEQ ID NO: 7739 - DNA, 96 bp, Aspergillus thermomutatus
  misc_feature: 118
tgctccatacctcctatggtgcctctctacctatctccctacctcttcacctacctcttcacctacctcttcacctacctcttcacctacctcttc

SEQ ID NO: 7740 - DNA, 96 bp, Aspergillus thermomutatus
  misc_feature: 118
tgataagagaggagaatgagaagagacaacgaggagaaaacgggaagaggataaggagagaagggaacaagaagagaagagaatgagaagaaaaag

SEQ ID NO: 7741 - DNA, 96 bp, Aspergillus thermomutatus
  misc_feature: 118
tcttctctttcctttactctctttcccttctaaattccatcttccttcttctctttctctttcttatcctttctattcttaaaataaactatccct

SEQ ID NO: 7742 - DNA, 96 bp, Aspergillus thermomutatus
  misc_feature: 118
agattaaagcgaagagagtgaaggaagggatgttgatggacagtgtgataaggtaagggttatttagtttattaagagagagggaaggaattgaga

SEQ ID NO: 7743 - DNA, 96 bp, Aspergillus thermomutatus
  misc_feature: 118
agaggtgtacacaaggcaggcagaacagtaggcagaacggcaggcagaacggcaggttgaatagcacatagaatagcacgtcgaatagcatgtaga

SEQ ID NO: 7744 - DNA, 96 bp, Aspergillus thermomutatus
  misc_feature: 118
accgaggcgagcacaacggatgcaaggaaaggccattaggaaaccttgatcttcgatttttcgggccaaacttttctttcgaacggatgctttaga

SEQ ID NO: 7745 - DNA, 96 bp, Aspergillus thermomutatus
  misc_feature: 118
tccttcttctctttctctttcttatcctttctattcttaaaataaactatccctccctccttttcttcttctctcttaatatttcctcccttcctt

SEQ ID NO: 7746 - DNA, 96 bp, Aspergillus thermomutatus
  misc_feature: 118
tccgcaaatataccaaccctctgtcatccatggtaaggttttcattgtctgctgagttttcgagcatttcttggatgattttgtccctttttgttg

SEQ ID NO: 7747 - DNA, 96 bp, Aspergillus thermomutatus
  misc_feature: 118
tcccttctctccttatcctcttcccgttttctcctcgttgtctcttctcattctcctctcttatcattctctttactttctctttaccttctcacc

SEQ ID NO: 7748 - DNA, 96 bp, Aspergillus thermomutatus
  misc_feature: 118
tagtaatggttaaagagagaataagaaaagaagagaagataaaagagagagagatttttagttaggattaaagatagtaaaaagagagaaagggga

SEQ ID NO: 7749 - DNA, 96 bp, Aspergillus thermomutatus
  misc_feature: 118
tcattctctttactttctctttaccttctcacctcgttcccttctcattcttttctattcttgttcttttctctcttctcattctttcttgttctt

SEQ ID NO: 7750 - DNA, 96 bp, Aspergillus thermomutatus
  misc_feature: 118
gcgaagagagtgaaggaagggatgttgatggacagtgtgataaggtaagggttatttagtttattaagagagagggaaggaattgagaagagaata

SEQ ID NO: 7751 - DNA, 96 bp, Aspergillus thermomutatus
  misc_feature: 118
caatcgatcaccagcaatacagctcctgcgcggcacggttaggattgctccacgaccgcctacttcggtcgcattgtcacgtgaccaactaccata

SEQ ID NO: 7752 - DNA, 96 bp, Aspergillus thermomutatus
  misc_feature: 118
acattcttcgctacctcacgtggtgcatctctggggctacgtggggtgtgttgatccctactatactacctgccccatatggtcgctctctggcta

SEQ ID NO: 7753 - DNA, 96 bp, Aspergillus thermomutatus
  misc_feature: 118
tagataagggaaaggaagagaggatagaagaatcaaagaagttgaggagaaaggaagggaggaaatattaagagagaagaagaaaaggagggaggg

SEQ ID NO: 7754 - DNA, 96 bp, Aspergillus thermomutatus
  misc_feature: 118
taactcttaccctcctttttcttctctttcctttactctctttcccttctaaattccatcttccttcttctctttctctttcttatcctttctatt

SEQ ID NO: 7755 - DNA, 96 bp, Aspergillus thermomutatus
  misc_feature: 118
gtttagggggaaatttatctattctttccaaatatgcctcatgagtatttttacattctttccaaatatgcctcatgagtatttatactattaatt

SEQ ID NO: 7756 - DNA, 96 bp, Aspergillus thermomutatus
  misc_feature: 118
gtcaggggtcccactatatccatattcgcgttccagacgggtgtccaccggccccatcgacccaccatgtccaggctgcggtcgatgaggtgatgc

SEQ ID NO: 7757 - DNA, 96 bp, Aspergillus thermomutatus
  misc_feature: 118
ggtttagggggaaatttatctattctttccaaatatgcctcatgagtatttttacattctttccaaatatgcctcatgagtatttatactattaat

SEQ ID NO: 7758 - DNA, 96 bp, Aspergillus thermomutatus
  misc_feature: 118
ggtgtttcctagtggtcaggggtcccactatatccatattcgcgttccagacgggtgtccaccggccccatcgacccaccatgtccaggctgcggt

SEQ ID NO: 7759 - DNA, 96 bp, Aspergillus thermomutatus
  misc_feature: 118
cgaaggttcagttactaatccatgttttacgtctatactcattaaatttgtatttatctcctgaagtaatttctttaaataatctaaatgcttacc

SEQ ID NO: 7760 - DNA, 96 bp, Aspergillus thermomutatus
  misc_feature: 118
cttcttgttcccttctctccttatcctcttcccgttttctcctcgttgtctcttctcattctcctctcttatcattctctttactttctctttacc

SEQ ID NO: 7761 - DNA, 96 bp, Aspergillus thermomutatus
  misc_feature: 118
ggataggataggataggaaaaaagaaaagatttagaaatagaagattaaaggtaaagaggaagggatagagagaggattagagtaagggttggaat

SEQ ID NO: 7762 - DNA, 96 bp, Aspergillus thermomutatus
  misc_feature: 118
atacattcttcgctacctcacgtggtgcatctctggggctacgtggggtgtgttgatccctactatactacctgccccatatggtcgctctctggc

SEQ ID NO: 7763 - DNA, 96 bp, Aspergillus thermomutatus
  misc_feature: 118
gataggataggataggaaaaaagaaaagatttagaaatagaagattaaaggtaaagaggaagggatagagagaggattagagtaagggttggaatg

SEQ ID NO: 7764 - DNA, 96 bp, Aspergillus thermomutatus
  misc_feature: 118
cttctctttcctttactctctttcccttctaaattccatcttccttcttctctttctctttcttatcctttctattcttaaaataaactatccctc

SEQ ID NO: 7765 - DNA, 96 bp, Aspergillus thermomutatus
  misc_feature: 118
gagagtgaaggaagggatgttgatggacagtgtgataaggtaagggttatttagtttattaagagagagggaaggaattgagaagagaataaggtg

SEQ ID NO: 7766 - DNA, 96 bp, Aspergillus thermomutatus
  misc_feature: 118
gagaggtgtacacaaggcaggcagaacagtaggcagaacggcaggcagaacggcaggttgaatagcacatagaatagcacgtcgaatagcatgtag

SEQ ID NO: 7767 - DNA, 96 bp, Aspergillus thermomutatus
  misc_feature: 118
gaaggtttagggggaaatttatctattctttccaaatatgcctcatgagtatttttacattctttccaaatatgcctcatgagtatttatactatt

SEQ ID NO: 7768 - DNA, 96 bp, Aspergillus thermomutatus
  misc_feature: 118
cttcttctctttctctttcttatcctttctattcttaaaataaactatccctccctccttttcttcttctctcttaatatttcctcccttcctttc

SEQ ID NO: 7769 - DNA, 96 bp, Aspergillus thermomutatus
  misc_feature: 118
ataagtattagaggaagagttagggagagtgtttaaggattaaaagaaagagtagagtaagggataggttaagagaggtaaagaggggtaagtaag

SEQ ID NO: 7770 - DNA, 96 bp, Aspergillus thermomutatus
  misc_feature: 118
cgatgatttcggttctcatacactcaggtatgtagatgagattccgcaaatataccaaccctctgtcatccatggtaaggttttcattgtctgctg

SEQ ID NO: 7771 - DNA, 96 bp, Aspergillus thermomutatus
  misc_feature: 118
cctttttcttctctttcctttactctctttcccttctaaattccatcttccttcttctctttctctttcttatcctttctattcttaaaataaact

SEQ ID NO: 7772 - DNA, 96 bp, Aspergillus thermomutatus
  misc_feature: 118
aagaggatcaagaggatcaagaggatcaagaggatcaagaggatcaagaggatcaagaggatcaagaggatcaagaggatcaagaggatcaagagg

SEQ ID NO: 7773 - DNA, 96 bp, Aspergillus thermomutatus
  misc_feature: 118
aactcttatcattttccttttcttaaatcctacttcttctctttttttcttctttcttttcttaactcttactttcctctcttttatacccctaat

SEQ ID NO: 7774 - DNA, 96 bp, Aspergillus thermomutatus
  misc_feature: 118
acctcctatggtgcctctctacctatctccctacctcttcacctacctcttcacctacctcttcacctacctcttcacctacctcttcacctacct

SEQ ID NO: 7775 - DNA, 96 bp, Aspergillus thermomutatus
  misc_feature: 117
ttcttctctttctctttcttatcctttctattcttaaaataaactatccctccctccttttcttcttctctcttaatatttcctcccttcctttct

SEQ ID NO: 7776 - DNA, 96 bp, Aspergillus thermomutatus
  misc_feature: 117
ttcttctctttcctttactctctttcccttctaaattccatcttccttcttctctttctctttcttatcctttctattcttaaaataaactatccc

SEQ ID NO: 7777 - DNA, 96 bp, Aspergillus thermomutatus
  misc_feature: 117
ttctctttctctttcttatcctttctattcttaaaataaactatccctccctccttttcttcttctctcttaatatttcctcccttcctttctcct

SEQ ID NO: 7778 - DNA, 96 bp, Aspergillus thermomutatus
  misc_feature: 117
agttaatgagaaattagaagaaagaagaggagaggagaaggaaagaaaagagaaacagaggagggaaagaagggaagagatgagaagagaggagaa

SEQ ID NO: 7779 - DNA, 96 bp, Aspergillus thermomutatus
  misc_feature: 117
ttctcctctcccttctcttaaaccaacccctacttatttactgcttcctactctctaaccatccctctatctcttctgctttccgtcctttctcct

SEQ ID NO: 7780 - DNA, 96 bp, Aspergillus thermomutatus
  misc_feature: 117
gattaaagcgaagagagtgaaggaagggatgttgatggacagtgtgataaggtaagggttatttagtttattaagagagagggaaggaattgagaa

SEQ ID NO: 7781 - DNA, 96 bp, Aspergillus thermomutatus
  misc_feature: 117
ttatcattctctttactttctctttaccttctcacctcgttcccttctcattcttttctattcttgttcttttctctcttctcattctttcttgtt

SEQ ID NO: 7782 - DNA, 96 bp, Aspergillus thermomutatus
  misc_feature: 117
aggtttagggggaaatttatctattctttccaaatatgcctcatgagtatttttacattctttccaaatatgcctcatgagtatttatactattaa

SEQ ID NO: 7783 - DNA, 96 bp, Aspergillus thermomutatus
  misc_feature: 117
tgacaggaaagaacaaaatgacaggaggagcaaggtagagaggtagaggttaatttttaatagtattagaaatgttatatcaatcaattattttaa

SEQ ID NO: 7784 - DNA, 96 bp, Aspergillus thermomutatus
  misc_feature: 117
tgttcccttctctccttatcctcttcccgttttctcctcgttgtctcttctcattctcctctcttatcattctctttactttctctttaccttctc

SEQ ID NO: 7785 - DNA, 96 bp, Aspergillus thermomutatus
  misc_feature: 117
tggtgagggcaacgagcacctaccaggagggagtccagccttataaggtgtttcgaggacgaaacgctaagagagggggaggtgatgttacgacac

SEQ ID NO: 7786 - DNA, 96 bp, Aspergillus thermomutatus
  misc_feature: 117
tgctattctacgtgctattctacgtgctattctacgtgctattctacatgctattcgacgtgctattctatgtgctattcaacctgccgttctgcc

SEQ ID NO: 7787 - DNA, 96 bp, Aspergillus thermomutatus
  misc_feature: 117
gataagagaggagaatgagaagagacaacgaggagaaaacgggaagaggataaggagagaagggaacaagaagagaagagaatgagaagaaaaaga

SEQ ID NO: 7788 - DNA, 96 bp, Aspergillus thermomutatus
  misc_feature: 117
aggggaaagaggaatgataagggatagagtaagggatagatagtttagggagaggagggggtagaaaggtttagagataaagagaggaataagaga

SEQ ID NO: 7789 - DNA, 96 bp, Aspergillus thermomutatus
  misc_feature: 117
tctctaccttgatcctctatcgcacctacatctatatgattatgatatacattagattctgataatatatctctaatagttattgaagtattatgg

SEQ ID NO: 7790 - DNA, 96 bp, Aspergillus thermomutatus
  misc_feature: 117
tctcctctcccttctcttaaaccaacccctacttatttactgcttcctactctctaaccatccctctatctcttctgctttccgtcctttctcctt

SEQ ID NO: 7791 - DNA, 96 bp, Aspergillus thermomutatus
  misc_feature: 117
tctattactcctataattccccttattcttcctttctgatccattattccttcctttttccttttgaaatccttctatctttctttccaccttcct

SEQ ID NO: 7792 - DNA, 96 bp, Aspergillus thermomutatus
  misc_feature: 117
agaagagaagagaatgagaagaaaaagagatggtttagggttaaagagaggaaagtggaaagagaggagaaggataaagtgaagtgacgggaagga

SEQ ID NO: 7793 - DNA, 96 bp, Aspergillus thermomutatus
  misc_feature: 117
agaggatcaagaggatcaagaggatcaagaggatcaagaggatcaagaggatcaagaggatcaagaggatcaagaggatcaagaggatcaagagga

SEQ ID NO: 7794 - DNA, 96 bp, Aspergillus thermomutatus
  misc_feature: 117
gatgatttcggttctcatacactcaggtatgtagatgagattccgcaaatataccaaccctctgtcatccatggtaaggttttcattgtctgctga

SEQ ID NO: 7795 - DNA, 96 bp, Aspergillus thermomutatus
  misc_feature: 117
agagtgaaggaagggatgttgatggacagtgtgataaggtaagggttatttagtttattaagagagagggaaggaattgagaagagaataaggtga

SEQ ID NO: 7796 - DNA, 96 bp, Aspergillus thermomutatus
  misc_feature: 117
ccctcctttttcttctctttcctttactctctttcccttctaaattccatcttccttcttctctttctctttcttatcctttctattcttaaaata

SEQ ID NO: 7797 - DNA, 96 bp, Aspergillus thermomutatus
  misc_feature: 117
ggtgtacacaaggcaggcagaacagtaggcagaacggcaggcagaacggcaggttgaatagcacatagaatagcacgtcgaatagcatgtagaata

SEQ ID NO: 7798 - DNA, 96 bp, Aspergillus thermomutatus
  misc_feature: 117
actcttatcattttccttttcttaaatcctacttcttctctttttttcttctttcttttcttaactcttactttcctctcttttatacccctaata

SEQ ID NO: 7799 - DNA, 96 bp, Aspergillus thermomutatus
  misc_feature: 117
tatgaccatgcattgggtcatcgtggtgtttcgcgatgatttcggttctcatacactcaggtatgtagatgagattccgcaaatataccaaccctc

SEQ ID NO: 7800 - DNA, 96 bp, Aspergillus thermomutatus
  misc_feature: 117
tatcattctctttactttctctttaccttctcacctcgttcccttctcattcttttctattcttgttcttttctctcttctcattctttcttgttc

SEQ ID NO: 7801 - DNA, 96 bp, Aspergillus thermomutatus
  misc_feature: 117
ggaaaagaaagaagaaggcaagaatacgtgctaatctaggtggtgataccattttatctgtacaagaaggccagaatcgtgttcagcagcttgata

SEQ ID NO: 7802 - DNA, 96 bp, Aspergillus thermomutatus
  misc_feature: 117
tatacattcttcgctacctcacgtggtgcatctctggggctacgtggggtgtgttgatccctactatactacctgccccatatggtcgctctctgg

SEQ ID NO: 7803 - DNA, 96 bp, Aspergillus thermomutatus
  misc_feature: 117
tagtttagaaggagaaaggacggaaagcagaagagatagagggatggttagagagtaggaagcagtaaataagtaggggttggtttaagagaaggg

SEQ ID NO: 7804 - DNA, 96 bp, Aspergillus thermomutatus
  misc_feature: 117
tagaataagtattagaggaagagttagggagagtgtttaaggattaaaagaaagagtagagtaagggataggttaagagaggtaaagaggggtaag

SEQ ID NO: 7805 - DNA, 96 bp, Aspergillus thermomutatus
  misc_feature: 117
gagagagagttaggagaaggagtagagtaagggttaggaggaggattagagggagggatagaaagaggattagagggaggattagaaagaggatta

SEQ ID NO: 7806 - DNA, 96 bp, Aspergillus thermomutatus
  misc_feature: 117
aaggtttagggggaaatttatctattctttccaaatatgcctcatgagtatttttacattctttccaaatatgcctcatgagtatttatactatta

SEQ ID NO: 7807 - DNA, 96 bp, Aspergillus thermomutatus
  misc_feature: 117
gtgacaggaaagaacaaaatgacaggaggagcaaggtagagaggtagaggttaatttttaatagtattagaaatgttatatcaatcaattatttta

SEQ ID NO: 7808 - DNA, 96 bp, Aspergillus thermomutatus
  misc_feature: 117
acaagccgacgcacttagtcgacgaccagactatgaattacaaggaaaaacagtcgagccagcaattcttcgacaaaacagtgatggatcattgac

SEQ ID NO: 7809 - DNA, 96 bp, Aspergillus thermomutatus
  misc_feature: 117
ctcttatcattttccttttcttaaatcctacttcttctctttttttcttctttcttttcttaactcttactttcctctcttttatacccctaatac

SEQ ID NO: 7810 - DNA, 96 bp, Aspergillus thermomutatus
  misc_feature: 117
ggttcagttactaatccatgttttacgtctatactcattaaatttgtatttatctcctgaagtaatttctttaaataatctaaatgcttaccagtt

SEQ ID NO: 7811 - DNA, 96 bp, Aspergillus thermomutatus
  misc_feature: 117
ggttaggtataaaggcacccacagaggccccatgtaaggcaggcagagaggtagagataggtagagagggacccaagtagcaggccataaggcagg

SEQ ID NO: 7812 - DNA, 96 bp, Aspergillus thermomutatus
  misc_feature: 117
ggacaaggtgacaggaaagaacaaaatgacaggaggagcaaggtagagaggtagaggttaatttttaatagtattagaaatgttatatcaatcaat

SEQ ID NO: 7813 - DNA, 96 bp, Aspergillus thermomutatus
  misc_feature: 117
caggccatgagacacacagagaggtgtacacaaggcaggcagaacagtaggcagaacggcaggcagaacggcaggttgaatagcacatagaatagc

SEQ ID NO: 7814 - DNA, 96 bp, Aspergillus thermomutatus
  misc_feature: 117
gcgatgatttcggttctcatacactcaggtatgtagatgagattccgcaaatataccaaccctctgtcatccatggtaaggttttcattgtctgct

SEQ ID NO: 7815 - DNA, 96 bp, Aspergillus thermomutatus
  misc_feature: 117
gcaggccatgagacacacagagaggtgtacacaaggcaggcagaacagtaggcagaacggcaggcagaacggcaggttgaatagcacatagaatag

SEQ ID NO: 7816 - DNA, 96 bp, Aspergillus thermomutatus
  misc_feature: 117
cgcgatgatttcggttctcatacactcaggtatgtagatgagattccgcaaatataccaaccctctgtcatccatggtaaggttttcattgtctgc

SEQ ID NO: 7817 - DNA, 96 bp, Aspergillus thermomutatus
  misc_feature: 117
gaggatcaagaggatcaagaggatcaagaggatcaagaggatcaagaggatcaagaggatcaagaggatcaagaggatcaagaggatcaagaggat

SEQ ID NO: 7818 - DNA, 96 bp, Aspergillus thermomutatus
  misc_feature: 117
gagcacaacggatgcaaggaaaggccattaggaaaccttgatcttcgatttttcgggccaaacttttctttcgaacggatgctttagacgccatgg

SEQ ID NO: 7819 - DNA, 96 bp, Aspergillus thermomutatus
  misc_feature: 117
gaaaagaaagaagaaggcaagaatacgtgctaatctaggtggtgataccattttatctgtacaagaaggccagaatcgtgttcagcagcttgatat

SEQ ID NO: 7820 - DNA, 96 bp, Aspergillus thermomutatus
  misc_feature: 117
attaaagcgaagagagtgaaggaagggatgttgatggacagtgtgataaggtaagggttatttagtttattaagagagagggaaggaattgagaag

SEQ ID NO: 7821 - DNA, 96 bp, Aspergillus thermomutatus
  misc_feature: 117
cttatcattctctttactttctctttaccttctcacctcgttcccttctcattcttttctattcttgttcttttctctcttctcattctttcttgt

SEQ ID NO: 7822 - DNA, 96 bp, Aspergillus thermomutatus
  misc_feature: 117
aaggttcagttactaatccatgttttacgtctatactcattaaatttgtatttatctcctgaagtaatttctttaaataatctaaatgcttaccag

SEQ ID NO: 7823 - DNA, 96 bp, Aspergillus thermomutatus
  misc_feature: 117
ataagagaggagaatgagaagagacaacgaggagaaaacgggaagaggataaggagagaagggaacaagaagagaagagaatgagaagaaaaagag

SEQ ID NO: 7824 - DNA, 96 bp, Aspergillus thermomutatus
  misc_feature: 117
ctctaccttgatcctctatcgcacctacatctatatgattatgatatacattagattctgataatatatctctaatagttattgaagtattatggt

SEQ ID NO: 7825 - DNA, 96 bp, Aspergillus thermomutatus
  misc_feature: 117
ctcccaggcctgcatcacctcatcgaccgcagcctggacatggtgggtcgatggggccggtggacacccgtctggaacgcgaatatggatatagtg

SEQ ID NO: 7826 - DNA, 96 bp, Aspergillus thermomutatus
  misc_feature: 117
cctagtggtcaggggtcccactatatccatattcgcgttccagacgggtgtccaccggccccatcgacccaccatgtccaggctgcggtcgatgag

SEQ ID NO: 7827 - DNA, 96 bp, Aspergillus thermomutatus
  misc_feature: 117
atgatttcggttctcatacactcaggtatgtagatgagattccgcaaatataccaaccctctgtcatccatggtaaggttttcattgtctgctgag

SEQ ID NO: 7828 - DNA, 96 bp, Aspergillus thermomutatus
  misc_feature: 117
ctagtggtcaggggtcccactatatccatattcgcgttccagacgggtgtccaccggccccatcgacccaccatgtccaggctgcggtcgatgagg

SEQ ID NO: 7829 - DNA, 96 bp, Aspergillus thermomutatus
  misc_feature: 117
cctcctaacccttactctactccttctcctaactctctctctactccttcttttactatttactttactccttcttctactctttacttcactttt

SEQ ID NO: 7830 - DNA, 96 bp, Aspergillus thermomutatus
  misc_feature: 117
cattctctttactttctctttaccttctcacctcgttcccttctcattcttttctattcttgttcttttctctcttctcattctttcttgttcttt

SEQ ID NO: 7831 - DNA, 96 bp, Aspergillus thermomutatus
  misc_feature: 117
cacagagaggtgtacacaaggcaggcagaacagtaggcagaacggcaggcagaacggcaggttgaatagcacatagaatagcacgtcgaatagcat

SEQ ID NO: 7832 - DNA, 96 bp, Aspergillus thermomutatus
  misc_feature: 117
acggccactatggctctgctgggaccactggtggactatctgccaatgctttcgcattgatttgatggtagcagctaggtagtggcattgagtttg

SEQ ID NO: 7833 - DNA, 96 bp, Aspergillus thermomutatus
  misc_feature: 117
accctcctttttcttctctttcctttactctctttcccttctaaattccatcttccttcttctctttctctttcttatcctttctattcttaaaat

SEQ ID NO: 7834 - DNA, 96 bp, Aspergillus thermomutatus
  misc_feature: 117
aatcgatcaccagcaatacagctcctgcgcggcacggttaggattgctccacgaccgcctacttcggtcgcattgtcacgtgaccaactaccatat

SEQ ID NO: 7835 - DNA, 96 bp, Aspergillus thermomutatus
  misc_feature: 116
ttttcttctctttcctttactctctttcccttctaaattccatcttccttcttctctttctctttcttatcctttctattcttaaaataaactatc

SEQ ID NO: 7836 - DNA, 96 bp, Aspergillus thermomutatus
  misc_feature: 116
tttggaaagaatagataaatttccccctaaaccttcacctaatagagatattagtatacctaatttactaaataagcctaaattattaaacaaata

SEQ ID NO: 7837 - DNA, 96 bp, Aspergillus thermomutatus
  misc_feature: 116
ttgttcccttctctccttatcctcttcccgttttctcctcgttgtctcttctcattctcctctcttatcattctctttactttctctttaccttct

SEQ ID NO: 7838 - DNA, 96 bp, Aspergillus thermomutatus
  misc_feature: 116
ttctgctacaacaagaaatcagggttctacgggcagagaatgaacggaaaagaaagaagaaggcaagaatacgtgctaatctaggtggtgatacca

SEQ ID NO: 7839 - DNA, 96 bp, Aspergillus thermomutatus
  misc_feature: 116
ttctatccttcttcttattcatcctttcttttttttttcttttctaatcctaaaaatctcatctccttctctaatctctttgattacttaacctct

SEQ ID NO: 7840 - DNA, 96 bp, Aspergillus thermomutatus
  misc_feature: 116
ttagaataagtattagaggaagagttagggagagtgtttaaggattaaaagaaagagtagagtaagggataggttaagagaggtaaagaggggtaa

SEQ ID NO: 7841 - DNA, 96 bp, Aspergillus thermomutatus
  misc_feature: 116
ttaccgaggcgagcacaacggatgcaaggaaaggccattaggaaaccttgatcttcgatttttcgggccaaacttttctttcgaacggatgcttta

SEQ ID NO: 7842 - DNA, 96 bp, Aspergillus thermomutatus
  misc_feature: 116
ttaaagcgaagagagtgaaggaagggatgttgatggacagtgtgataaggtaagggttatttagtttattaagagagagggaaggaattgagaaga

SEQ ID NO: 7843 - DNA, 96 bp, Aspergillus thermomutatus
  misc_feature: 116
ggatcaagaggatcaagaggatcaagaggatcaagaggatcaagaggatcaagaggatcaagaggatcaagaggatcaagaggatcaagaggatca

SEQ ID NO: 7844 - DNA, 96 bp, Aspergillus thermomutatus
  misc_feature: 116
ctctttctctttcttatcctttctattcttaaaataaactatccctccctccttttcttcttctctcttaatatttcctcccttcctttctcctca

SEQ ID NO: 7845 - DNA, 96 bp, Aspergillus thermomutatus
  misc_feature: 116
ggagtagagagagagttaggagaaggagtagagtaagggttaggaggaggattagagggagggatagaaagaggattagagggaggattagaaaga

SEQ ID NO: 7846 - DNA, 96 bp, Aspergillus thermomutatus
  misc_feature: 116
taagagaggagaatgagaagagacaacgaggagaaaacgggaagaggataaggagagaagggaacaagaagagaagagaatgagaagaaaaagaga

SEQ ID NO: 7847 - DNA, 96 bp, Aspergillus thermomutatus
  misc_feature: 116
tctctttctctttcttatcctttctattcttaaaataaactatccctccctccttttcttcttctctcttaatatttcctcccttcctttctcctc

SEQ ID NO: 7848 - DNA, 96 bp, Aspergillus thermomutatus
  misc_feature: 116
aagttaatgagaaattagaagaaagaagaggagaggagaaggaaagaaaagagaaacagaggagggaaagaagggaagagatgagaagagaggaga

SEQ ID NO: 7849 - DNA, 96 bp, Aspergillus thermomutatus
  misc_feature: 116
taggcagcacggcagactacacatcattgagagaggcgtctagagagacaggcagacaggcagacaggcagacaggcagacagtggggtagggaga

SEQ ID NO: 7850 - DNA, 96 bp, Aspergillus thermomutatus
  misc_feature: 116
tcctttttcttctctttcctttactctctttcccttctaaattccatcttccttcttctctttctctttcttatcctttctattcttaaaataaac

SEQ ID NO: 7851 - DNA, 96 bp, Aspergillus thermomutatus
  misc_feature: 116
gtagagagagagttaggagaaggagtagagtaagggttaggaggaggattagagggagggatagaaagaggattagagggaggattagaaagagga

SEQ ID NO: 7852 - DNA, 96 bp, Aspergillus thermomutatus
  misc_feature: 116
gaagattaaagcgaagagagtgaaggaagggatgttgatggacagtgtgataaggtaagggttatttagtttattaagagagagggaaggaattga

SEQ ID NO: 7853 - DNA, 96 bp, Aspergillus thermomutatus
  misc_feature: 116
ggcaggccatgagacacacagagaggtgtacacaaggcaggcagaacagtaggcagaacggcaggcagaacggcaggttgaatagcacatagaata

SEQ ID NO: 7854 - DNA, 96 bp, Aspergillus thermomutatus
  misc_feature: 116
acaggaaagaacaaaatgacaggaggagcaaggtagagaggtagaggttaatttttaatagtattagaaatgttatatcaatcaattattttaata

SEQ ID NO: 7855 - DNA, 96 bp, Aspergillus thermomutatus
  misc_feature: 116
tatcattttccttttcttaaatcctacttcttctctttttttcttctttcttttcttaactcttactttcctctcttttatacccctaatactatc

SEQ ID NO: 7856 - DNA, 96 bp, Aspergillus thermomutatus
  misc_feature: 116
tatatctacctcttggatacctctctctatatctctctatctgatttggtggcttatacggtgccttactccccaccattctacctacctgtctgc

SEQ ID NO: 7857 - DNA, 96 bp, Aspergillus thermomutatus
  misc_feature: 116
taccgaggcgagcacaacggatgcaaggaaaggccattaggaaaccttgatcttcgatttttcgggccaaacttttctttcgaacggatgctttag

SEQ ID NO: 7858 - DNA, 96 bp, Aspergillus thermomutatus
  misc_feature: 116
attagaataagtattagaggaagagttagggagagtgtttaaggattaaaagaaagagtagagtaagggataggttaagagaggtaaagaggggta

SEQ ID NO: 7859 - DNA, 96 bp, Aspergillus thermomutatus
  misc_feature: 116
taaagcgaagagagtgaaggaagggatgttgatggacagtgtgataaggtaagggttatttagtttattaagagagagggaaggaattgagaagag

SEQ ID NO: 7860 - DNA, 96 bp, Aspergillus thermomutatus
  misc_feature: 116
ctttctctttcttatcctttctattcttaaaataaactatccctccctccttttcttcttctctcttaatatttcctcccttcctttctcctcaac

SEQ ID NO: 7861 - DNA, 96 bp, Aspergillus thermomutatus
  misc_feature: 116
gttctcatacactcaggtatgtagatgagattccgcaaatataccaaccctctgtcatccatggtaaggttttcattgtctgctgagttttcgagc

SEQ ID NO: 7862 - DNA, 96 bp, Aspergillus thermomutatus
  misc_feature: 116
gtgctattctacgtgctattctacgtgctattctacgtgctattctacatgctattcgacgtgctattctatgtgctattcaacctgccgttctgc

SEQ ID NO: 7863 - DNA, 96 bp, Aspergillus thermomutatus
  misc_feature: 116
cctaccaggagggagtccagccttataaggtgtttcgaggacgaaacgctaagagagggggaggtgatgttacgacaccaacactactaggcggac

SEQ ID NO: 7864 - DNA, 96 bp, Aspergillus thermomutatus
  misc_feature: 116
caggaaagaacaaaatgacaggaggagcaaggtagagaggtagaggttaatttttaatagtattagaaatgttatatcaatcaattattttaatac

SEQ ID NO: 7865 - DNA, 96 bp, Aspergillus thermomutatus
  misc_feature: 116
gggttaggtataaaggcacccacagaggccccatgtaaggcaggcagagaggtagagataggtagagagggacccaagtagcaggccataaggcag

SEQ ID NO: 7866 - DNA, 96 bp, Aspergillus thermomutatus
  misc_feature: 116
gagtagagagagagttaggagaaggagtagagtaagggttaggaggaggattagagggagggatagaaagaggattagagggaggattagaaagag

SEQ ID NO: 7867 - DNA, 96 bp, Aspergillus thermomutatus
  misc_feature: 116
cttctatccttcttcttattcatcctttcttttttttttcttttctaatcctaaaaatctcatctccttctctaatctctttgattacttaacctc

SEQ ID NO: 7868 - DNA, 96 bp, Aspergillus thermomutatus
  misc_feature: 116
gagaagattaaagcgaagagagtgaaggaagggatgttgatggacagtgtgataaggtaagggttatttagtttattaagagagagggaaggaatt

SEQ ID NO: 7869 - DNA, 96 bp, Aspergillus thermomutatus
  misc_feature: 116
gacaggaaagaacaaaatgacaggaggagcaaggtagagaggtagaggttaatttttaatagtattagaaatgttatatcaatcaattattttaat

SEQ ID NO: 7870 - DNA, 96 bp, Aspergillus thermomutatus
  misc_feature: 116
ctctccttatcctcttcccgttttctcctcgttgtctcttctcattctcctctcttatcattctctttactttctctttaccttctcacctcgttc

SEQ ID NO: 7871 - DNA, 96 bp, Aspergillus thermomutatus
  misc_feature: 116
ctcttatcattctctttactttctctttaccttctcacctcgttcccttctcattcttttctattcttgttcttttctctcttctcattctttctt

SEQ ID NO: 7872 - DNA, 96 bp, Aspergillus thermomutatus
  misc_feature: 116
ctcctcctaacccttactctactccttctcctaactctctctctactccttcttttactatttactttactccttcttctactctttacttcactt

SEQ ID NO: 7873 - DNA, 96 bp, Aspergillus thermomutatus
  misc_feature: 116
aagattaaagcgaagagagtgaaggaagggatgttgatggacagtgtgataaggtaagggttatttagtttattaagagagagggaaggaattgag

SEQ ID NO: 7874 - DNA, 96 bp, Aspergillus thermomutatus
  misc_feature: 116
acacacagagaggtgtacacaaggcaggcagaacagtaggcagaacggcaggcagaacggcaggttgaatagcacatagaatagcacgtcgaatag

SEQ ID NO: 7875 - DNA, 96 bp, Aspergillus thermomutatus
  misc_feature: 116
cgagcacaacggatgcaaggaaaggccattaggaaaccttgatcttcgatttttcgggccaaacttttctttcgaacggatgctttagacgccatg

SEQ ID NO: 7876 - DNA, 96 bp, Aspergillus thermomutatus
  misc_feature: 116
ccttcttctctttctctttcttatcctttctattcttaaaataaactatccctccctccttttcttcttctctcttaatatttcctcccttccttt

SEQ ID NO: 7877 - DNA, 96 bp, Aspergillus thermomutatus
  misc_feature: 116
aaatagtaaaagaaggagtagagagagagttaggagaaggagtagagtaagggttaggaggaggattagagggagggatagaaagaggattagagg

SEQ ID NO: 7878 - DNA, 96 bp, Aspergillus thermomutatus
  misc_feature: 116
aatagtaaaagaaggagtagagagagagttaggagaaggagtagagtaagggttaggaggaggattagagggagggatagaaagaggattagaggg

SEQ ID NO: 7879 - DNA, 96 bp, Aspergillus thermomutatus
  misc_feature: 116
atagtaatggttaaagagagaataagaaaagaagagaagataaaagagagagagatttttagttaggattaaagatagtaaaaagagagaaagggg

SEQ ID NO: 7880 - DNA, 96 bp, Aspergillus thermomutatus
  misc_feature: 116
cactcaggtatgtagatgagattccgcaaatataccaaccctctgtcatccatggtaaggttttcattgtctgctgagttttcgagcatttcttgg

SEQ ID NO: 7881 - DNA, 96 bp, Aspergillus thermomutatus
  misc_feature: 116
agcaggtgtttcctagtggtcaggggtcccactatatccatattcgcgttccagacgggtgtccaccggccccatcgacccaccatgtccaggctg

SEQ ID NO: 7882 - DNA, 96 bp, Aspergillus thermomutatus
  misc_feature: 116
agagaagattaaagcgaagagagtgaaggaagggatgttgatggacagtgtgataaggtaagggttatttagtttattaagagagagggaaggaat

SEQ ID NO: 7883 - DNA, 96 bp, Aspergillus thermomutatus
  misc_feature: 116
atcattctctttactttctctttaccttctcacctcgttcccttctcattcttttctattcttgttcttttctctcttctcattctttcttgttct

SEQ ID NO: 7884 - DNA, 96 bp, Aspergillus thermomutatus
  misc_feature: 116
aggttcagttactaatccatgttttacgtctatactcattaaatttgtatttatctcctgaagtaatttctttaaataatctaaatgcttaccagt

SEQ ID NO: 7885 - DNA, 96 bp, Aspergillus thermomutatus
  misc_feature: 116
agagagtgaaggaagggatgttgatggacagtgtgataaggtaagggttatttagtttattaagagagagggaaggaattgagaagagaataaggt

SEQ ID NO: 7886 - DNA, 96 bp, Aspergillus thermomutatus
  misc_feature: 116
accctaaaccatctctttttcttctcattctcttctcttcttgttcccttctctccttatcctcttcccgttttctcctcgttgtctcttctcatt

SEQ ID NO: 7887 - DNA, 96 bp, Aspergillus thermomutatus
  misc_feature: 115
tttccactttcctctctttaaccctaaaccatctctttttcttctcattctcttctcttcttgttcccttctctccttatcctcttcccgttttct

SEQ ID NO: 7888 - DNA, 96 bp, Aspergillus thermomutatus
  misc_feature: 115
taaggagagaagggaacaagaagagaagagaatgagaagaaaaagagatggtttagggttaaagagaggaaagtggaaagagaggagaaggataaa

SEQ ID NO: 7889 - DNA, 96 bp, Aspergillus thermomutatus
  misc_feature: 115
ttggaaagaatagataaatttccccctaaaccttcacctaatagagatattagtatacctaatttactaaataagcctaaattattaaacaaatag

SEQ ID NO: 7890 - DNA, 96 bp, Aspergillus thermomutatus
  misc_feature: 115
ggtagagaggcaccataggaggtatggagcaatgcaccgcgtgaggcacccccagatatgccatgcaaggtttggaccaaggtagccagagagcaa

SEQ ID NO: 7891 - DNA, 96 bp, Aspergillus thermomutatus
  misc_feature: 115
aggacaaggtgacaggaaagaacaaaatgacaggaggagcaaggtagagaggtagaggttaatttttaatagtattagaaatgttatatcaatcaa

SEQ ID NO: 7892 - DNA, 96 bp, Aspergillus thermomutatus
  misc_feature: 115
tctttctctttcttatcctttctattcttaaaataaactatccctccctccttttcttcttctctcttaatatttcctcccttcctttctcctcaa

SEQ ID NO: 7893 - DNA, 96 bp, Aspergillus thermomutatus
  misc_feature: 115
ttctctttcctttactctctttcccttctaaattccatcttccttcttctctttctctttcttatcctttctattcttaaaataaactatccctcc

SEQ ID NO: 7894 - DNA, 96 bp, Aspergillus thermomutatus
  misc_feature: 115
taattatagtaatggttaaagagagaataagaaaagaagagaagataaaagagagagagatttttagttaggattaaagatagtaaaaagagagaa

SEQ ID NO: 7895 - DNA, 96 bp, Aspergillus thermomutatus
  misc_feature: 115
ttctcatacactcaggtatgtagatgagattccgcaaatataccaaccctctgtcatccatggtaaggttttcattgtctgctgagttttcgagca

SEQ ID NO: 7896 - DNA, 96 bp, Aspergillus thermomutatus
  misc_feature: 115
attagagggaggattagagggaggattagagggaggattagagggaggaaggagtgagggttagaatgaggataagagagaggagtagagtgagaa

SEQ ID NO: 7897 - DNA, 96 bp, Aspergillus thermomutatus
  misc_feature: 115
ttctattactcctataattccccttattcttcctttctgatccattattccttcctttttccttttgaaatccttctatctttctttccaccttcc

SEQ ID NO: 7898 - DNA, 96 bp, Aspergillus thermomutatus
  misc_feature: 115
gggagtaaaggggaggtaaggaggaagtaaagaggaaggagagagggaataaaggggaggtaaggaggaaggaaagaggaaggaaagagagaggaa

SEQ ID NO: 7899 - DNA, 96 bp, Aspergillus thermomutatus
  misc_feature: 115
gagaagagaaggaagatagaggttaagtaatcaaagagattagagaaggagatgagatttttaggattagaaaagaaaaaaaaaagaaaggatgaa

SEQ ID NO: 7900 - DNA, 96 bp, Aspergillus thermomutatus
  misc_feature: 115
gctgagacattgtcacagcatgatttcaaaattgtgcattgcaaaggaactgagaatggacaagccgacgcacttagtcgacgaccagactatgaa

SEQ ID NO: 7901 - DNA, 96 bp, Aspergillus thermomutatus
  misc_feature: 115
cctcctttttcttctctttcctttactctctttcccttctaaattccatcttccttcttctctttctctttcttatcctttctattcttaaaataa

SEQ ID NO: 7902 - DNA, 96 bp, Aspergillus thermomutatus
  misc_feature: 115
ttatacattcttcgctacctcacgtggtgcatctctggggctacgtggggtgtgttgatccctactatactacctgccccatatggtcgctctctg

SEQ ID NO: 7903 - DNA, 96 bp, Aspergillus thermomutatus
  misc_feature: 115
tgtctgcctgcctctctatcttcctctctatctacctctctattcacctctctattcacctctctattcacctctctatctacctctctatctccc

SEQ ID NO: 7904 - DNA, 96 bp, Aspergillus thermomutatus
  misc_feature: 115
ctgctgggccttagcctgcacctgggcctgctcccaggcctgcatcacctcatcgaccgcagcctggacatggtgggtcgatggggccggtggaca

SEQ ID NO: 7905 - DNA, 96 bp, Aspergillus thermomutatus
  misc_feature: 115
tggtcaggggtcccactatatccatattcgcgttccagacgggtgtccaccggccccatcgacccaccatgtccaggctgcggtcgatgaggtgat

SEQ ID NO: 7906 - DNA, 96 bp, Aspergillus thermomutatus
  misc_feature: 115
gaaggttcagttactaatccatgttttacgtctatactcattaaatttgtatttatctcctgaagtaatttctttaaataatctaaatgcttacca

SEQ ID NO: 7907 - DNA, 96 bp, Aspergillus thermomutatus
  misc_feature: 115
tgctgggccttagcctgcacctgggcctgctcccaggcctgcatcacctcatcgaccgcagcctggacatggtgggtcgatggggccggtggacac

SEQ ID NO: 7908 - DNA, 96 bp, Aspergillus thermomutatus
  misc_feature: 115
acacagagaggtgtacacaaggcaggcagaacagtaggcagaacggcaggcagaacggcaggttgaatagcacatagaatagcacgtcgaatagca

SEQ ID NO: 7909 - DNA, 96 bp, Aspergillus thermomutatus
  misc_feature: 115
tcaggggtcccactatatccatattcgcgttccagacgggtgtccaccggccccatcgacccaccatgtccaggctgcggtcgatgaggtgatgca

SEQ ID NO: 7910 - DNA, 96 bp, Aspergillus thermomutatus
  misc_feature: 115
tcttgttcccttctctccttatcctcttcccgttttctcctcgttgtctcttctcattctcctctcttatcattctctttactttctctttacctt

SEQ ID NO: 7911 - DNA, 96 bp, Aspergillus thermomutatus
  misc_feature: 115
tctgctacaacaagaaatcagggttctacgggcagagaatgaacggaaaagaaagaagaaggcaagaatacgtgctaatctaggtggtgataccat

SEQ ID NO: 7912 - DNA, 96 bp, Aspergillus thermomutatus
  misc_feature: 115
tctctttccactttcctctctttaaccctaaaccatctctttttcttctcattctcttctcttcttgttcccttctctccttatcctcttcccgtt

SEQ ID NO: 7913 - DNA, 96 bp, Aspergillus thermomutatus
  misc_feature: 115
tctcctcttttctccttcttattctcttcttattttcctcttgttcttattctcttctctttctctttgattctccctcttctctcttgacctctc

SEQ ID NO: 7914 - DNA, 96 bp, Aspergillus thermomutatus
  misc_feature: 115
tctcatacactcaggtatgtagatgagattccgcaaatataccaaccctctgtcatccatggtaaggttttcattgtctgctgagttttcgagcat

SEQ ID NO: 7915 - DNA, 96 bp, Aspergillus thermomutatus
  misc_feature: 115
gattagagggaggattagagggaggattagagggaggattagagggaggaaggagtgagggttagaatgaggataagagagaggagtagagtgaga

SEQ ID NO: 7916 - DNA, 96 bp, Aspergillus thermomutatus
  misc_feature: 115
tctatccttcttcttattcatcctttcttttttttttcttttctaatcctaaaaatctcatctccttctctaatctctttgattacttaacctcta

SEQ ID NO: 7917 - DNA, 96 bp, Aspergillus thermomutatus
  misc_feature: 115
tctaccttgatcctctatcgcacctacatctatatgattatgatatacattagattctgataatatatctctaatagttattgaagtattatggta

SEQ ID NO: 7918 - DNA, 96 bp, Aspergillus thermomutatus
  misc_feature: 115
agaagagaagagaaggaagatagaggttaagtaatcaaagagattagagaaggagatgagatttttaggattagaaaagaaaaaaaaaagaaagga

SEQ ID NO: 7919 - DNA, 96 bp, Aspergillus thermomutatus
  misc_feature: 115
tcctcctaacccttactctactccttctcctaactctctctctactccttcttttactatttactttactccttcttctactctttacttcacttt

SEQ ID NO: 7920 - DNA, 96 bp, Aspergillus thermomutatus
  misc_feature: 115
ggggaaattggagagaggcaagagaataaggagaataataagggataggatagaaaaaagaaacaaaagaaagagaagattttaaggaagatagga

SEQ ID NO: 7921 - DNA, 96 bp, Aspergillus thermomutatus
  misc_feature: 115
gtggtcaggggtcccactatatccatattcgcgttccagacgggtgtccaccggccccatcgacccaccatgtccaggctgcggtcgatgaggtga

SEQ ID NO: 7922 - DNA, 96 bp, Aspergillus thermomutatus
  misc_feature: 115
atcgatcaccagcaatacagctcctgcgcggcacggttaggattgctccacgaccgcctacttcggtcgcattgtcacgtgaccaactaccatata

SEQ ID NO: 7923 - DNA, 96 bp, Aspergillus thermomutatus
  misc_feature: 115
tatagtaatggttaaagagagaataagaaaagaagagaagataaaagagagagagatttttagttaggattaaagatagtaaaaagagagaaaggg

SEQ ID NO: 7924 - DNA, 96 bp, Aspergillus thermomutatus
  misc_feature: 115
taggataggataggaaaaaagaaaagatttagaaatagaagattaaaggtaaagaggaagggatagagagaggattagagtaagggttggaatgag

SEQ ID NO: 7925 - DNA, 96 bp, Aspergillus thermomutatus
  misc_feature: 115
tagaaggagaaaggacggaaagcagaagagatagagggatggttagagagtaggaagcagtaaataagtaggggttggtttaagagaagggagagg

SEQ ID NO: 7926 - DNA, 96 bp, Aspergillus thermomutatus
  misc_feature: 115
gggagtaaagccagtagagaggcaccatgtcaggtagcaagagaggtagcaagagaggtagcaagagaggtagcaagagaggtagcaagagaggta

SEQ ID NO: 7927 - DNA, 96 bp, Aspergillus thermomutatus
  misc_feature: 115
tacattcttcgctacctcacgtggtgcatctctggggctacgtggggtgtgttgatccctactatactacctgccccatatggtcgctctctggct

SEQ ID NO: 7928 - DNA, 96 bp, Aspergillus thermomutatus
  misc_feature: 115
gtgtacacaaggcaggcagaacagtaggcagaacggcaggcagaacggcaggttgaatagcacatagaatagcacgtcgaatagcatgtagaatag

SEQ ID NO: 7929 - DNA, 96 bp, Aspergillus thermomutatus
  misc_feature: 115
ccgaggcgagcacaacggatgcaaggaaaggccattaggaaaccttgatcttcgatttttcgggccaaacttttctttcgaacggatgctttagac

SEQ ID NO: 7930 - DNA, 96 bp, Aspergillus thermomutatus
  misc_feature: 115
gccgacgcacttagtcgacgaccagactatgaattacaaggaaaaacagtcgagccagcaattcttcgacaaaacagtgatggatcattgacatac

SEQ ID NO: 7931 - DNA, 96 bp, Aspergillus thermomutatus
  misc_feature: 115
gtagggagagaggtaggcgaagaggtaggcgacgaggtaggcgacgaggtaggtgaagaggtaggtgaagaggtaggtgaagaggtaggtgaagag

SEQ ID NO: 7932 - DNA, 96 bp, Aspergillus thermomutatus
  misc_feature: 115
ggattagagggaggattagagggaggattagagggaggattagagggaggaaggagtgagggttagaatgaggataagagagaggagtagagtgag

SEQ ID NO: 7933 - DNA, 96 bp, Aspergillus thermomutatus
  misc_feature: 115
ctgtctgcctgcctctctatcttcctctctatctacctctctattcacctctctattcacctctctattcacctctctatctacctctctatctcc

SEQ ID NO: 7934 - DNA, 96 bp, Aspergillus thermomutatus
  misc_feature: 115
gctattctacgtgctattctacgtgctattctacgtgctattctacatgctattcgacgtgctattctatgtgctattcaacctgccgttctgcct

SEQ ID NO: 7935 - DNA, 96 bp, Aspergillus thermomutatus
  misc_feature: 115
gcgagcacaacggatgcaaggaaaggccattaggaaaccttgatcttcgatttttcgggccaaacttttctttcgaacggatgctttagacgccat

SEQ ID NO: 7936 - DNA, 96 bp, Aspergillus thermomutatus
  misc_feature: 115
atagcggcctcgttcatgtatgccagcagcggccggtatggggtctgcccccgctcagaccgcacggcttccacctggatggcctggccgcaatgc

SEQ ID NO: 7937 - DNA, 96 bp, Aspergillus thermomutatus
  misc_feature: 115
ctatcttcctctctatctacctctctattcacctctctattcacctctctattcacctctctatctacctctctatctccctaccccactgtctgc

SEQ ID NO: 7938 - DNA, 96 bp, Aspergillus thermomutatus
  misc_feature: 115
gattagagggagggatagaaagaggattagagggaggattagaaagaggattagagggaggattagagggaggattagagggaggattagagggag

SEQ ID NO: 7939 - DNA, 96 bp, Aspergillus thermomutatus
  misc_feature: 115
gattagaataagtattagaggaagagttagggagagtgtttaaggattaaaagaaagagtagagtaagggataggttaagagaggtaaagaggggt

SEQ ID NO: 7940 - DNA, 96 bp, Aspergillus thermomutatus
  misc_feature: 115
gagggagtaaaggggaggtaaggaggaagtaaagaggaaggagagagggaataaaggggaggtaaggaggaaggaaagaggaaggaaagagagagg

SEQ ID NO: 7941 - DNA, 96 bp, Aspergillus thermomutatus
  misc_feature: 115
ctcattctcactctactcctctctcttatcctcattctaaccctcactccttcctccctctaatcctccctctaatcctccctctaatcctccctc

SEQ ID NO: 7942 - DNA, 96 bp, Aspergillus thermomutatus
  misc_feature: 115
gagaaggaaagaaaagagaaacagaggagggaaagaagggaagagatgagaagagaggagaaggaggagagaggccaagagaagagaggtcaagag

SEQ ID NO: 7943 - DNA, 96 bp, Aspergillus thermomutatus
  misc_feature: 115
gagaagagaagagaaggaagatagaggttaagtaatcaaagagattagagaaggagatgagatttttaggattagaaaagaaaaaaaaaagaaagg

SEQ ID NO: 7944 - DNA, 96 bp, Aspergillus thermomutatus
  misc_feature: 115
cttctattactcctataattccccttattcttcctttctgatccattattccttcctttttccttttgaaatccttctatctttctttccaccttc

SEQ ID NO: 7945 - DNA, 96 bp, Aspergillus thermomutatus
  misc_feature: 115
ctcctctcccttctcttaaaccaacccctacttatttactgcttcctactctctaaccatccctctatctcttctgctttccgtcctttctccttc

SEQ ID NO: 7946 - DNA, 96 bp, Aspergillus thermomutatus
  misc_feature: 115
gaaaggggaaattggagagaggcaagagaataaggagaataataagggataggatagaaaaaagaaacaaaagaaagagaagattttaaggaagat

SEQ ID NO: 7947 - DNA, 96 bp, Aspergillus thermomutatus
  misc_feature: 115
aacctaactcttaccctcctttttcttctctttcctttactctctttcccttctaaattccatcttccttcttctctttctctttcttatcctttc

SEQ ID NO: 7948 - DNA, 96 bp, Aspergillus thermomutatus
  misc_feature: 115
ctttccactttcctctctttaaccctaaaccatctctttttcttctcattctcttctcttcttgttcccttctctccttatcctcttcccgttttc

SEQ ID NO: 7949 - DNA, 96 bp, Aspergillus thermomutatus
  misc_feature: 115
ctttcgttctattttctcttctctctctttctatccttcttttccaccctcctccttttacaacctataatttctactaaccctcactcttatcct

SEQ ID NO: 7950 - DNA, 96 bp, Aspergillus thermomutatus
  misc_feature: 115
ctctctaccttgatcctctatcgcacctacatctatatgattatgatatacattagattctgataatatatctctaatagttattgaagtattatg

SEQ ID NO: 7951 - DNA, 96 bp, Aspergillus thermomutatus
  misc_feature: 115
cctctctttccactttcctctctttaaccctaaaccatctctttttcttctcattctcttctcttcttgttcccttctctccttatcctcttcccg

SEQ ID NO: 7952 - DNA, 96 bp, Aspergillus thermomutatus
  misc_feature: 115
aagaagagaagagaatgagaagaaaaagagatggtttagggttaaagagaggaaagtggaaagagaggagaaggataaagtgaagtgacgggaagg

SEQ ID NO: 7953 - DNA, 96 bp, Aspergillus thermomutatus
  misc_feature: 115
aggtgtttcctagtggtcaggggtcccactatatccatattcgcgttccagacgggtgtccaccggccccatcgacccaccatgtccaggctgcgg

SEQ ID NO: 7954 - DNA, 96 bp, Aspergillus thermomutatus
  misc_feature: 115
ccatgagacacacagagaggtgtacacaaggcaggcagaacagtaggcagaacggcaggcagaacggcaggttgaatagcacatagaatagcacgt

SEQ ID NO: 7955 - DNA, 96 bp, Aspergillus thermomutatus
  misc_feature: 115
agaagattaaagcgaagagagtgaaggaagggatgttgatggacagtgtgataaggtaagggttatttagtttattaagagagagggaaggaattg

SEQ ID NO: 7956 - DNA, 96 bp, Aspergillus thermomutatus
  misc_feature: 115
atttggaaagaatagataaatttccccctaaaccttcacctaatagagatattagtatacctaatttactaaataagcctaaattattaaacaaat

SEQ ID NO: 7957 - DNA, 96 bp, Aspergillus thermomutatus
  misc_feature: 115
agaagagaaggaagatagaggttaagtaatcaaagagattagagaaggagatgagatttttaggattagaaaagaaaaaaaaaagaaaggatgaat

SEQ ID NO: 7958 - DNA, 96 bp, Aspergillus thermomutatus
  misc_feature: 115
aagccgacgcacttagtcgacgaccagactatgaattacaaggaaaaacagtcgagccagcaattcttcgacaaaacagtgatggatcattgacat

SEQ ID NO: 7959 - DNA, 96 bp, Aspergillus thermomutatus
  misc_feature: 115
atgaccatgcattgggtcatcgtggtgtttcgcgatgatttcggttctcatacactcaggtatgtagatgagattccgcaaatataccaaccctct

SEQ ID NO: 7960 - DNA, 96 bp, Aspergillus thermomutatus
  misc_feature: 115
agcacaacggatgcaaggaaaggccattaggaaaccttgatcttcgatttttcgggccaaacttttctttcgaacggatgctttagacgccatggt

SEQ ID NO: 7961 - DNA, 96 bp, Aspergillus thermomutatus
  misc_feature: 114
tttctcctcttttctccttcttattctcttcttattttcctcttgttcttattctcttctctttctctttgattctccctcttctctcttgacctc

SEQ ID NO: 7962 - DNA, 96 bp, Aspergillus thermomutatus
  misc_feature: 114
tttcggttctcatacactcaggtatgtagatgagattccgcaaatataccaaccctctgtcatccatggtaaggttttcattgtctgctgagtttt

SEQ ID NO: 7963 - DNA, 96 bp, Aspergillus thermomutatus
  misc_feature: 114
ttgcaaaggaactgagaatggacaagccgacgcacttagtcgacgaccagactatgaattacaaggaaaaacagtcgagccagcaattcttcgaca

SEQ ID NO: 7964 - DNA, 96 bp, Aspergillus thermomutatus
  misc_feature: 114
ttctcctcttttctccttcttattctcttcttattttcctcttgttcttattctcttctctttctctttgattctccctcttctctcttgacctct

SEQ ID NO: 7965 - DNA, 96 bp, Aspergillus thermomutatus
  misc_feature: 114
ttagggggaaatttatctattctttccaaatatgcctcatgagtatttttacattctttccaaatatgcctcatgagtatttatactattaattat

SEQ ID NO: 7966 - DNA, 96 bp, Aspergillus thermomutatus
  misc_feature: 114
ttaggcagcacggcagactacacatcattgagagaggcgtctagagagacaggcagacaggcagacaggcagacaggcagacagtggggtagggag

SEQ ID NO: 7967 - DNA, 96 bp, Aspergillus thermomutatus
  misc_feature: 114
ttagagggagggatagaaagaggattagagggaggattagaaagaggattagagggaggattagagggaggattagagggaggattagagggagga

SEQ ID NO: 7968 - DNA, 96 bp, Aspergillus thermomutatus
  misc_feature: 114
tgtttcctagtggtcaggggtcccactatatccatattcgcgttccagacgggtgtccaccggccccatcgacccaccatgtccaggctgcggtcg

SEQ ID NO: 7969 - DNA, 96 bp, Aspergillus thermomutatus
  misc_feature: 114
caagccgacgcacttagtcgacgaccagactatgaattacaaggaaaaacagtcgagccagcaattcttcgacaaaacagtgatggatcattgaca

SEQ ID NO: 7970 - DNA, 96 bp, Aspergillus thermomutatus
  misc_feature: 114
tgatttcggttctcatacactcaggtatgtagatgagattccgcaaatataccaaccctctgtcatccatggtaaggttttcattgtctgctgagt

SEQ ID NO: 7971 - DNA, 96 bp, Aspergillus thermomutatus
  misc_feature: 114
tctttccactttcctctctttaaccctaaaccatctctttttcttctcattctcttctcttcttgttcccttctctccttatcctcttcccgtttt

SEQ ID NO: 7972 - DNA, 96 bp, Aspergillus thermomutatus
  misc_feature: 114
gaagagaggagatgagaagagaggagatgagaagagatgagaagagaggagaggagatgagaagagaagagaacaagaataaatgggaatgaaaga

SEQ ID NO: 7973 - DNA, 96 bp, Aspergillus thermomutatus
  misc_feature: 114
tcttcttgttcccttctctccttatcctcttcccgttttctcctcgttgtctcttctcattctcctctcttatcattctctttactttctctttac

SEQ ID NO: 7974 - DNA, 96 bp, Aspergillus thermomutatus
  misc_feature: 114
agaaaggggaaattggagagaggcaagagaataaggagaataataagggataggatagaaaaaagaaacaaaagaaagagaagattttaaggaaga

SEQ ID NO: 7975 - DNA, 96 bp, Aspergillus thermomutatus
  misc_feature: 114
tctctttcctttactctctttcccttctaaattccatcttccttcttctctttctctttcttatcctttctattcttaaaataaactatccctccc

SEQ ID NO: 7976 - DNA, 96 bp, Aspergillus thermomutatus
  misc_feature: 114
agagaggagatgagaagagaggagatgagaagagatgagaagagaggagaggagatgagaagagaagagaacaagaataaatgggaatgaaagaga

SEQ ID NO: 7977 - DNA, 96 bp, Aspergillus thermomutatus
  misc_feature: 114
cggttctcatacactcaggtatgtagatgagattccgcaaatataccaaccctctgtcatccatggtaaggttttcattgtctgctgagttttcga

SEQ ID NO: 7978 - DNA, 96 bp, Aspergillus thermomutatus
  misc_feature: 114
aaaaaggagagagggagtaaaggggaggtaaggaggaagtaaagaggaaggagagagggaataaaggggaggtaaggaggaaggaaagaggaagga

SEQ ID NO: 7979 - DNA, 96 bp, Aspergillus thermomutatus
  misc_feature: 114
agggagtaaaggggaggtaaggaggaagtaaagaggaaggagagagggaataaaggggaggtaaggaggaaggaaagaggaaggaaagagagagga

SEQ ID NO: 7980 - DNA, 96 bp, Aspergillus thermomutatus
  misc_feature: 114
agtttagaaggagaaaggacggaaagcagaagagatagagggatggttagagagtaggaagcagtaaataagtaggggttggtttaagagaaggga

SEQ ID NO: 7981 - DNA, 96 bp, Aspergillus thermomutatus
  misc_feature: 114
atagtaaaagaaggagtagagagagagttaggagaaggagtagagtaagggttaggaggaggattagagggagggatagaaagaggattagaggga

SEQ ID NO: 7982 - DNA, 96 bp, Aspergillus thermomutatus
  misc_feature: 114
ggattagagggagggatagaaagaggattagagggaggattagaaagaggattagagggaggattagagggaggattagagggaggattagaggga

SEQ ID NO: 7983 - DNA, 96 bp, Aspergillus thermomutatus
  misc_feature: 114
tcccaggcctgcatcacctcatcgaccgcagcctggacatggtgggtcgatggggccggtggacacccgtctggaacgcgaatatggatatagtgg

SEQ ID NO: 7984 - DNA, 96 bp, Aspergillus thermomutatus
  misc_feature: 114
ataggataggataggaaaaaagaaaagatttagaaatagaagattaaaggtaaagaggaagggatagagagaggattagagtaagggttggaatga

SEQ ID NO: 7985 - DNA, 96 bp, Aspergillus thermomutatus
  misc_feature: 114
agagaagagaaggaagatagaggttaagtaatcaaagagattagagaaggagatgagatttttaggattagaaaagaaaaaaaaaagaaaggatga

SEQ ID NO: 7986 - DNA, 96 bp, Aspergillus thermomutatus
  misc_feature: 114
aaaggggaaattggagagaggcaagagaataaggagaataataagggataggatagaaaaaagaaacaaaagaaagagaagattttaaggaagata

SEQ ID NO: 7987 - DNA, 96 bp, Aspergillus thermomutatus
  misc_feature: 114
tatcttcctctctatctacctctctattcacctctctattcacctctctattcacctctctatctacctctctatctccctaccccactgtctgcc

SEQ ID NO: 7988 - DNA, 96 bp, Aspergillus thermomutatus
  misc_feature: 114
gagaagggaacgaggtgagaaggtaaagagaaagtaaagagaatgataagagaggagaatgagaagagacaacgaggagaaaacgggaagaggata

SEQ ID NO: 7989 - DNA, 96 bp, Aspergillus thermomutatus
  misc_feature: 114
tagtggtcaggggtcccactatatccatattcgcgttccagacgggtgtccaccggccccatcgacccaccatgtccaggctgcggtcgatgaggt

SEQ ID NO: 7990 - DNA, 96 bp, Aspergillus thermomutatus
  misc_feature: 114
ggaaagaacaaaatgacaggaggagcaaggtagagaggtagaggttaatttttaatagtattagaaatgttatatcaatcaattattttaatacta

SEQ ID NO: 7991 - DNA, 96 bp, Aspergillus thermomutatus
  misc_feature: 114
tagtaagggataggataggataggaaaaaagaaaagatttagaaatagaagattaaaggtaaagaggaagggatagagagaggattagagtaaggg

SEQ ID NO: 7992 - DNA, 96 bp, Aspergillus thermomutatus
  misc_feature: 114
tagtaaaagaaggagtagagagagagttaggagaaggagtagagtaagggttaggaggaggattagagggagggatagaaagaggattagagggag

SEQ ID NO: 7993 - DNA, 96 bp, Aspergillus thermomutatus
  misc_feature: 114
tagggagagaggtaggcgaagaggtaggcgacgaggtaggcgacgaggtaggtgaagaggtaggtgaagaggtaggtgaagaggtaggtgaagagg

SEQ ID NO: 7994 - DNA, 96 bp, Aspergillus thermomutatus
  misc_feature: 114
gggagagaggtaggcgaagaggtaggcgacgaggtaggcgacgaggtaggtgaagaggtaggtgaagaggtaggtgaagaggtaggtgaagaggta

SEQ ID NO: 7995 - DNA, 96 bp, Aspergillus thermomutatus
  misc_feature: 114
gttactaatccatgttttacgtctatactcattaaatttgtatttatctcctgaagtaatttctttaaataatctaaatgcttaccagtttcatat

SEQ ID NO: 7996 - DNA, 96 bp, Aspergillus thermomutatus
  misc_feature: 114
gtgtttcctagtggtcaggggtcccactatatccatattcgcgttccagacgggtgtccaccggccccatcgacccaccatgtccaggctgcggtc

SEQ ID NO: 7997 - DNA, 96 bp, Aspergillus thermomutatus
  misc_feature: 114
ggttctcatacactcaggtatgtagatgagattccgcaaatataccaaccctctgtcatccatggtaaggttttcattgtctgctgagttttcgag

SEQ ID NO: 7998 - DNA, 96 bp, Aspergillus thermomutatus
  misc_feature: 114
gctgggccttagcctgcacctgggcctgctcccaggcctgcatcacctcatcgaccgcagcctggacatggtgggtcgatggggccggtggacacc

SEQ ID NO: 7999 - DNA, 96 bp, Aspergillus thermomutatus
  misc_feature: 114
ggcgcgcgcgcgcgcgagcattaggcggcagcggtccggggcaggccagcaggcaggggggcgcgcgcgcggcggtgaccagttggccggggccct

SEQ ID NO: 8000 - DNA, 96 bp, Aspergillus thermomutatus
  misc_feature: 114
ggaaagagaagattaaagcgaagagagtgaaggaagggatgttgatggacagtgtgataaggtaagggttatttagtttattaagagagagggaag

SEQ ID NO: 8001 - DNA, 96 bp, Aspergillus thermomutatus
  misc_feature: 114
gccttagcctgcacctgggcctgctcccaggcctgcatcacctcatcgaccgcagcctggacatggtgggtcgatggggccggtggacacccgtct

SEQ ID NO: 8002 - DNA, 96 bp, Aspergillus thermomutatus
  misc_feature: 114
gccatgagacacacagagaggtgtacacaaggcaggcagaacagtaggcagaacggcaggcagaacggcaggttgaatagcacatagaatagcacg

SEQ ID NO: 8003 - DNA, 96 bp, Aspergillus thermomutatus
  misc_feature: 114
gcaggtgtttcctagtggtcaggggtcccactatatccatattcgcgttccagacgggtgtccaccggccccatcgacccaccatgtccaggctgc

SEQ ID NO: 8004 - DNA, 96 bp, Aspergillus thermomutatus
  misc_feature: 114
gcacaacggatgcaaggaaaggccattaggaaaccttgatcttcgatttttcgggccaaacttttctttcgaacggatgctttagacgccatggtc

SEQ ID NO: 8005 - DNA, 96 bp, Aspergillus thermomutatus
  misc_feature: 114
gagaaaggggaaattggagagaggcaagagaataaggagaataataagggataggatagaaaaaagaaacaaaagaaagagaagattttaaggaag

SEQ ID NO: 8006 - DNA, 96 bp, Aspergillus thermomutatus
  misc_feature: 114
cttgttcccttctctccttatcctcttcccgttttctcctcgttgtctcttctcattctcctctcttatcattctctttactttctctttaccttc

SEQ ID NO: 8007 - DNA, 96 bp, Aspergillus thermomutatus
  misc_feature: 114
gaagagaagagaaggaagatagaggttaagtaatcaaagagattagagaaggagatgagatttttaggattagaaaagaaaaaaaaaagaaaggat

SEQ ID NO: 8008 - DNA, 96 bp, Aspergillus thermomutatus
  misc_feature: 114
gaaagagaagattaaagcgaagagagtgaaggaagggatgttgatggacagtgtgataaggtaagggttatttagtttattaagagagagggaagg

SEQ ID NO: 8009 - DNA, 96 bp, Aspergillus thermomutatus
  misc_feature: 114
ctctttccactttcctctctttaaccctaaaccatctctttttcttctcattctcttctcttcttgttcccttctctccttatcctcttcccgttt

SEQ ID NO: 8010 - DNA, 96 bp, Aspergillus thermomutatus
  misc_feature: 114
aagagaggagatgagaagagaggagatgagaagagatgagaagagaggagaggagatgagaagagaagagaacaagaataaatgggaatgaaagag

SEQ ID NO: 8011 - DNA, 96 bp, Aspergillus thermomutatus
  misc_feature: 114
aggtagggagtaaagccagtagagaggcaccatgtcaggtagcaagagaggtagcaagagaggtagcaagagaggtagcaagagaggtagcaagag

SEQ ID NO: 8012 - DNA, 96 bp, Aspergillus thermomutatus
  misc_feature: 114
ctctctttccactttcctctctttaaccctaaaccatctctttttcttctcattctcttctcttcttgttcccttctctccttatcctcttcccgt

SEQ ID NO: 8013 - DNA, 96 bp, Aspergillus thermomutatus
  misc_feature: 114
agagggagtaaaggggaggtaaggaggaagtaaagaggaaggagagagggaataaaggggaggtaaggaggaaggaaagaggaaggaaagagagag

SEQ ID NO: 8014 - DNA, 96 bp, Aspergillus thermomutatus
  misc_feature: 114
aaggggaaattggagagaggcaagagaataaggagaataataagggataggatagaaaaaagaaacaaaagaaagagaagattttaaggaagatag

SEQ ID NO: 8015 - DNA, 96 bp, Aspergillus thermomutatus
  misc_feature: 114
caggtgtttcctagtggtcaggggtcccactatatccatattcgcgttccagacgggtgtccaccggccccatcgacccaccatgtccaggctgcg

SEQ ID NO: 8016 - DNA, 96 bp, Aspergillus thermomutatus
  misc_feature: 114
aggggaaattggagagaggcaagagaataaggagaataataagggataggatagaaaaaagaaacaaaagaaagagaagattttaaggaagatagg

SEQ ID NO: 8017 - DNA, 96 bp, Aspergillus thermomutatus
  misc_feature: 114
attgttgcgagcaaggcccgcgatatgctcgtgccgcctagcaggcactcgcgaagccgtacagctctgggtcacgtgacaccttgctagctgcgg

SEQ ID NO: 8018 - DNA, 96 bp, Aspergillus thermomutatus
  misc_feature: 114
cccaggcctgcatcacctcatcgaccgcagcctggacatggtgggtcgatggggccggtggacacccgtctggaacgcgaatatggatatagtggg

SEQ ID NO: 8019 - DNA, 96 bp, Aspergillus thermomutatus
  misc_feature: 114
aagagaagagaaggaagatagaggttaagtaatcaaagagattagagaaggagatgagatttttaggattagaaaagaaaaaaaaaagaaaggatg

SEQ ID NO: 8020 - DNA, 96 bp, Aspergillus thermomutatus
  misc_feature: 114
agtggtcaggggtcccactatatccatattcgcgttccagacgggtgtccaccggccccatcgacccaccatgtccaggctgcggtcgatgaggtg

SEQ ID NO: 8021 - DNA, 96 bp, Aspergillus thermomutatus
  misc_feature: 114
atttctcctcttttctccttcttattctcttcttattttcctcttgttcttattctcttctctttctctttgattctccctcttctctcttgacct

SEQ ID NO: 8022 - DNA, 96 bp, Aspergillus thermomutatus
  misc_feature: 114
agcgaagagagtgaaggaagggatgttgatggacagtgtgataaggtaagggttatttagtttattaagagagagggaaggaattgagaagagaat

SEQ ID NO: 8023 - DNA, 96 bp, Aspergillus thermomutatus
  misc_feature: 114
attagaggagagagagagatagtaaagaaaagaagagaataagtaagggttaaagggaatttaaagtaggaaagaaaagagagagtaagggttagt

SEQ ID NO: 8024 - DNA, 96 bp, Aspergillus thermomutatus
  misc_feature: 114
atcattttccttttcttaaatcctacttcttctctttttttcttctttcttttcttaactcttactttcctctcttttatacccctaatactatct

SEQ ID NO: 8025 - DNA, 96 bp, Aspergillus thermomutatus
  misc_feature: 114
atatgaccatgcattgggtcatcgtggtgtttcgcgatgatttcggttctcatacactcaggtatgtagatgagattccgcaaatataccaaccct

SEQ ID NO: 8026 - DNA, 96 bp, Aspergillus thermomutatus
  misc_feature: 113
aagagaagagaagagaaggaagatagaggttaagtaatcaaagagattagagaaggagatgagatttttaggattagaaaagaaaaaaaaaagaaa

SEQ ID NO: 8027 - DNA, 96 bp, Aspergillus thermomutatus
  misc_feature: 113
aaggagtagagagagagttaggagaaggagtagagtaagggttaggaggaggattagagggagggatagaaagaggattagagggaggattagaaa

SEQ ID NO: 8028 - DNA, 96 bp, Aspergillus thermomutatus
  misc_feature: 113
ctcctttttcttctctttcctttactctctttcccttctaaattccatcttccttcttctctttctctttcttatcctttctattcttaaaataaa

SEQ ID NO: 8029 - DNA, 96 bp, Aspergillus thermomutatus
  misc_feature: 113
tttagggggaaatttatctattctttccaaatatgcctcatgagtatttttacattctttccaaatatgcctcatgagtatttatactattaatta

SEQ ID NO: 8030 - DNA, 96 bp, Aspergillus thermomutatus
  misc_feature: 113
tttaccgaggcgagcacaacggatgcaaggaaaggccattaggaaaccttgatcttcgatttttcgggccaaacttttctttcgaacggatgcttt

SEQ ID NO: 8031 - DNA, 96 bp, Aspergillus thermomutatus
  misc_feature: 113
ttgctacctctcttgctacctctcttactacctctcttgctacctctctactggctttactccctaccttggtccctacgtatttgcctacctctt

SEQ ID NO: 8032 - DNA, 96 bp, Aspergillus thermomutatus
  misc_feature: 113
ttcttgttcccttctctccttatcctcttcccgttttctcctcgttgtctcttctcattctcctctcttatcattctctttactttctctttacct

SEQ ID NO: 8033 - DNA, 96 bp, Aspergillus thermomutatus
  misc_feature: 113
ttctcttcttgttcccttctctccttatcctcttcccgttttctcctcgttgtctcttctcattctcctctcttatcattctctttactttctctt

SEQ ID NO: 8034 - DNA, 96 bp, Aspergillus thermomutatus
  misc_feature: 113
gaggtgtacacaaggcaggcagaacagtaggcagaacggcaggcagaacggcaggttgaatagcacatagaatagcacgtcgaatagcatgtagaa

SEQ ID NO: 8035 - DNA, 96 bp, Aspergillus thermomutatus
  misc_feature: 113
ttcggttctcatacactcaggtatgtagatgagattccgcaaatataccaaccctctgtcatccatggtaaggttttcattgtctgctgagttttc

SEQ ID NO: 8036 - DNA, 96 bp, Aspergillus thermomutatus
  misc_feature: 113
ttccttcttctctttctctttcttatcctttctattcttaaaataaactatccctccctccttttcttcttctctcttaatatttcctcccttcct

SEQ ID NO: 8037 - DNA, 96 bp, Aspergillus thermomutatus
  misc_feature: 113
ttccactttcctctctttaaccctaaaccatctctttttcttctcattctcttctcttcttgttcccttctctccttatcctcttcccgttttctc

SEQ ID NO: 8038 - DNA, 96 bp, Aspergillus thermomutatus
  misc_feature: 113
ataaggagagaagggaacaagaagagaagagaatgagaagaaaaagagatggtttagggttaaagagaggaaagtggaaagagaggagaaggataa

SEQ ID NO: 8039 - DNA, 96 bp, Aspergillus thermomutatus
  misc_feature: 113
agaagggaacgaggtgagaaggtaaagagaaagtaaagagaatgataagagaggagaatgagaagagacaacgaggagaaaacgggaagaggataa

SEQ ID NO: 8040 - DNA, 96 bp, Aspergillus thermomutatus
  misc_feature: 113
ttagagggaggattagagggaggattagagggaggattagagggaggaaggagtgagggttagaatgaggataagagagaggagtagagtgagaat

SEQ ID NO: 8041 - DNA, 96 bp, Aspergillus thermomutatus
  misc_feature: 113
ttaactctctaccttgatcctctatcgcacctacatctatatgattatgatatacattagattctgataatatatctctaatagttattgaagtat

SEQ ID NO: 8042 - DNA, 96 bp, Aspergillus thermomutatus
  misc_feature: 113
tggttaaagagagaataagaaaagaagagaagataaaagagagagagatttttagttaggattaaagatagtaaaaagagagaaaggggaaattgg

SEQ ID NO: 8043 - DNA, 96 bp, Aspergillus thermomutatus
  misc_feature: 113
tgctacctctcttgctacctctcttactacctctcttgctacctctctactggctttactccctaccttggtccctacgtatttgcctacctcttg

SEQ ID NO: 8044 - DNA, 96 bp, Aspergillus thermomutatus
  misc_feature: 113
tgagaagggaacgaggtgagaaggtaaagagaaagtaaagagaatgataagagaggagaatgagaagagacaacgaggagaaaacgggaagaggat

SEQ ID NO: 8045 - DNA, 96 bp, Aspergillus thermomutatus
  misc_feature: 113
atcctcctcctaacccttactctactccttctcctaactctctctctactccttcttttactatttactttactccttcttctactctttacttca

SEQ ID NO: 8046 - DNA, 96 bp, Aspergillus thermomutatus
  misc_feature: 113
tctgtagttcttctaaccggtaggtaggatggtatatcctgagtatgaagatggtagatcacatactctcagttggtagtcttggcataccatccg

SEQ ID NO: 8047 - DNA, 96 bp, Aspergillus thermomutatus
  misc_feature: 113
tctcttcttgttcccttctctccttatcctcttcccgttttctcctcgttgtctcttctcattctcctctcttatcattctctttactttctcttt

SEQ ID NO: 8048 - DNA, 96 bp, Aspergillus thermomutatus
  misc_feature: 113
gagagagggaaggaattgagaagagaataaggtgaataaggagagaggagaagagaggagatgagaagagaggagatgagaagagatgagaagaga

SEQ ID NO: 8049 - DNA, 96 bp, Aspergillus thermomutatus
  misc_feature: 113
tctcttattaatcctaccccttctatccttcttcttattcatcctttcttttttttttcttttctaatcctaaaaatctcatctccttctctaatc

SEQ ID NO: 8050 - DNA, 96 bp, Aspergillus thermomutatus
  misc_feature: 113
tctatcttcctctctatctacctctctattcacctctctattcacctctctattcacctctctatctacctctctatctccctaccccactgtctg

SEQ ID NO: 8051 - DNA, 96 bp, Aspergillus thermomutatus
  misc_feature: 113
tcggttctcatacactcaggtatgtagatgagattccgcaaatataccaaccctctgtcatccatggtaaggttttcattgtctgctgagttttcg

SEQ ID NO: 8052 - DNA, 96 bp, Aspergillus thermomutatus
  misc_feature: 113
agagggaaggaattgagaagagaataaggtgaataaggagagaggagaagagaggagatgagaagagaggagatgagaagagatgagaagagagga

SEQ ID NO: 8053 - DNA, 96 bp, Aspergillus thermomutatus
  misc_feature: 113
ccaggcctgcatcacctcatcgaccgcagcctggacatggtgggtcgatggggccggtggacacccgtctggaacgcgaatatggatatagtggga

SEQ ID NO: 8054 - DNA, 96 bp, Aspergillus thermomutatus
  misc_feature: 113
ggttaaagagagaataagaaaagaagagaagataaaagagagagagatttttagttaggattaaagatagtaaaaagagagaaaggggaaattgga

SEQ ID NO: 8055 - DNA, 96 bp, Aspergillus thermomutatus
  misc_feature: 113
tcattttccttttcttaaatcctacttcttctctttttttcttctttcttttcttaactcttactttcctctcttttatacccctaatactatctc

SEQ ID NO: 8056 - DNA, 96 bp, Aspergillus thermomutatus
  misc_feature: 113
tattagaggagagagagagatagtaaagaaaagaagagaataagtaagggttaaagggaatttaaagtaggaaagaaaagagagagtaagggttag

SEQ ID NO: 8057 - DNA, 96 bp, Aspergillus thermomutatus
  misc_feature: 113
tattaagagagagggaaggaattgagaagagaataaggtgaataaggagagaggagaagagaggagatgagaagagaggagatgagaagagatgag

SEQ ID NO: 8058 - DNA, 96 bp, Aspergillus thermomutatus
  misc_feature: 113
tatctgctgccatggctgcacatacttcttgatagcggcctcgttcatgtatgccagcagcggccggtatggggtctgcccccgctcagaccgcac

SEQ ID NO: 8059 - DNA, 96 bp, Aspergillus thermomutatus
  misc_feature: 113
tagggagtaaagccagtagagaggcaccatgtcaggtagcaagagaggtagcaagagaggtagcaagagaggtagcaagagaggtagcaagagagg

SEQ ID NO: 8060 - DNA, 96 bp, Aspergillus thermomutatus
  misc_feature: 113
tagagggaggattagagggaggattagagggaggattagagggaggaaggagtgagggttagaatgaggataagagagaggagtagagtgagaatg

SEQ ID NO: 8061 - DNA, 96 bp, Aspergillus thermomutatus
  misc_feature: 113
tagagagagagttaggagaaggagtagagtaagggttaggaggaggattagagggagggatagaaagaggattagagggaggattagaaagaggat

SEQ ID NO: 8062 - DNA, 96 bp, Aspergillus thermomutatus
  misc_feature: 113
aaagaggaatgataagggatagagtaagggatagatagtttagggagaggagggggtagaaaggtttagagataaagagaggaataagagatagta

SEQ ID NO: 8063 - DNA, 96 bp, Aspergillus thermomutatus
  misc_feature: 113
taatggttaaagagagaataagaaaagaagagaagataaaagagagagagatttttagttaggattaaagatagtaaaaagagagaaaggggaaat

SEQ ID NO: 8064 - DNA, 96 bp, Aspergillus thermomutatus
  misc_feature: 113
gatcctctatcgcacctacatctatatgattatgatatacattagattctgataatatatctctaatagttattgaagtattatggtattctatta

SEQ ID NO: 8065 - DNA, 96 bp, Aspergillus thermomutatus
  misc_feature: 113
aactctctaccttgatcctctatcgcacctacatctatatgattatgatatacattagattctgataatatatctctaatagttattgaagtatta

SEQ ID NO: 8066 - DNA, 96 bp, Aspergillus thermomutatus
  misc_feature: 113
taactctctaccttgatcctctatcgcacctacatctatatgattatgatatacattagattctgataatatatctctaatagttattgaagtatt

SEQ ID NO: 8067 - DNA, 96 bp, Aspergillus thermomutatus
  misc_feature: 113
catggtgagggcaacgagcacctaccaggagggagtccagccttataaggtgtttcgaggacgaaacgctaagagagggggaggtgatgttacgac

SEQ ID NO: 8068 - DNA, 96 bp, Aspergillus thermomutatus
  misc_feature: 113
gtagggagtaaagccagtagagaggcaccatgtcaggtagcaagagaggtagcaagagaggtagcaagagaggtagcaagagaggtagcaagagag

SEQ ID NO: 8069 - DNA, 96 bp, Aspergillus thermomutatus
  misc_feature: 113
ggggaagttaatgagaaattagaagaaagaagaggagaggagaaggaaagaaaagagaaacagaggagggaaagaagggaagagatgagaagagag

SEQ ID NO: 8070 - DNA, 96 bp, Aspergillus thermomutatus
  misc_feature: 113
gggaagttaatgagaaattagaagaaagaagaggagaggagaaggaaagaaaagagaaacagaggagggaaagaagggaagagatgagaagagagg

SEQ ID NO: 8071 - DNA, 96 bp, Aspergillus thermomutatus
  misc_feature: 113
gaccaaggtagggagtaaagccagtagagaggcaccatgtcaggtagcaagagaggtagcaagagaggtagcaagagaggtagcaagagaggtagc

SEQ ID NO: 8072 - DNA, 96 bp, Aspergillus thermomutatus
  misc_feature: 113
ctgtagttcttctaaccggtaggtaggatggtatatcctgagtatgaagatggtagatcacatactctcagttggtagtcttggcataccatccgc

SEQ ID NO: 8073 - DNA, 96 bp, Aspergillus thermomutatus
  misc_feature: 113
gatttcggttctcatacactcaggtatgtagatgagattccgcaaatataccaaccctctgtcatccatggtaaggttttcattgtctgctgagtt

SEQ ID NO: 8074 - DNA, 96 bp, Aspergillus thermomutatus
  misc_feature: 113
aggatcaagaggatcaagaggatcaagaggatcaagaggatcaagaggatcaagaggatcaagaggatcaagaggatcaagaggatcaagaggatc

SEQ ID NO: 8075 - DNA, 96 bp, Aspergillus thermomutatus
  misc_feature: 113
gagggaaggaattgagaagagaataaggtgaataaggagagaggagaagagaggagatgagaagagaggagatgagaagagatgagaagagaggag

SEQ ID NO: 8076 - DNA, 96 bp, Aspergillus thermomutatus
  misc_feature: 113
gagagttaggagaaggagtagagtaagggttaggaggaggattagagggagggatagaaagaggattagagggaggattagaaagaggattagagg

SEQ ID NO: 8077 - DNA, 96 bp, Aspergillus thermomutatus
  misc_feature: 113
gagagggaaggaattgagaagagaataaggtgaataaggagagaggagaagagaggagatgagaagagaggagatgagaagagatgagaagagagg

SEQ ID NO: 8078 - DNA, 96 bp, Aspergillus thermomutatus
  misc_feature: 113
agagaagagaagagaaggaagatagaggttaagtaatcaaagagattagagaaggagatgagatttttaggattagaaaagaaaaaaaaaagaaag

SEQ ID NO: 8079 - DNA, 96 bp, Aspergillus thermomutatus
  misc_feature: 113
aggagtagagagagagttaggagaaggagtagagtaagggttaggaggaggattagagggagggatagaaagaggattagagggaggattagaaag

SEQ ID NO: 8080 - DNA, 96 bp, Aspergillus thermomutatus
  misc_feature: 113
aaggagagaagggaacaagaagagaagagaatgagaagaaaaagagatggtttagggttaaagagaggaaagtggaaagagaggagaaggataaag

SEQ ID NO: 8081 - DNA, 96 bp, Aspergillus thermomutatus
  misc_feature: 113
ctttaccgaggcgagcacaacggatgcaaggaaaggccattaggaaaccttgatcttcgatttttcgggccaaacttttctttcgaacggatgctt

SEQ ID NO: 8082 - DNA, 96 bp, Aspergillus thermomutatus
  misc_feature: 113
ctaggatggcagcaggcatgttaggcagcacggcagactacacatcattgagagaggcgtctagagagacaggcagacaggcagacaggcagacag

SEQ ID NO: 8083 - DNA, 96 bp, Aspergillus thermomutatus
  misc_feature: 113
ctctatcttcctctctatctacctctctattcacctctctattcacctctctattcacctctctatctacctctctatctccctaccccactgtct

SEQ ID NO: 8084 - DNA, 96 bp, Aspergillus thermomutatus
  misc_feature: 113
ctatatctacctcttggatacctctctctatatctctctatctgatttggtggcttatacggtgccttactccccaccattctacctacctgtctg

SEQ ID NO: 8085 - DNA, 96 bp, Aspergillus thermomutatus
  misc_feature: 113
cgtgctattctacgtgctattctacgtgctattctacgtgctattctacatgctattcgacgtgctattctatgtgctattcaacctgccgttctg

SEQ ID NO: 8086 - DNA, 96 bp, Aspergillus thermomutatus
  misc_feature: 113
attagagggagggatagaaagaggattagagggaggattagaaagaggattagagggaggattagagggaggattagagggaggattagagggagg

SEQ ID NO: 8087 - DNA, 96 bp, Aspergillus thermomutatus
  misc_feature: 113
agagttaggagaaggagtagagtaagggttaggaggaggattagagggagggatagaaagaggattagagggaggattagaaagaggattagaggg

SEQ ID NO: 8088 - DNA, 96 bp, Aspergillus thermomutatus
  misc_feature: 113
atttcggttctcatacactcaggtatgtagatgagattccgcaaatataccaaccctctgtcatccatggtaaggttttcattgtctgctgagttt

SEQ ID NO: 8089 - DNA, 96 bp, Aspergillus thermomutatus
  misc_feature: 113
attatacattcttcgctacctcacgtggtgcatctctggggctacgtggggtgtgttgatccctactatactacctgccccatatggtcgctctct

SEQ ID NO: 8090 - DNA, 96 bp, Aspergillus thermomutatus
  misc_feature: 113
actctctaccttgatcctctatcgcacctacatctatatgattatgatatacattagattctgataatatatctctaatagttattgaagtattat

SEQ ID NO: 8091 - DNA, 96 bp, Aspergillus thermomutatus
  misc_feature: 113
aggaaagaacaaaatgacaggaggagcaaggtagagaggtagaggttaatttttaatagtattagaaatgttatatcaatcaattattttaatact

SEQ ID NO: 8092 - DNA, 96 bp, Aspergillus thermomutatus
  misc_feature: 113
agggagtaaagccagtagagaggcaccatgtcaggtagcaagagaggtagcaagagaggtagcaagagaggtagcaagagaggtagcaagagaggt

SEQ ID NO: 8093 - DNA, 96 bp, Aspergillus thermomutatus
  misc_feature: 113
agggagagaggtaggcgaagaggtaggcgacgaggtaggcgacgaggtaggtgaagaggtaggtgaagaggtaggtgaagaggtaggtgaagaggt

SEQ ID NO: 8094 - DNA, 96 bp, Aspergillus thermomutatus
  misc_feature: 113
agagagagagttaggagaaggagtagagtaagggttaggaggaggattagagggagggatagaaagaggattagagggaggattagaaagaggatt

SEQ ID NO: 8095 - DNA, 96 bp, Aspergillus thermomutatus
  misc_feature: 113
acgtgctattctacgtgctattctacgtgctattctacgtgctattctacatgctattcgacgtgctattctatgtgctattcaacctgccgttct

SEQ ID NO: 8096 - DNA, 96 bp, Aspergillus thermomutatus
  misc_feature: 112
tttctcactccctcttcctcctttcttgcatttctttattctcttaacatcctcccttctaatcttcaaccttctttatatatctctctactacat

SEQ ID NO: 8097 - DNA, 96 bp, Aspergillus thermomutatus
  misc_feature: 112
cgacgcacttagtcgacgaccagactatgaattacaaggaaaaacagtcgagccagcaattcttcgacaaaacagtgatggatcattgacatacaa

SEQ ID NO: 8098 - DNA, 96 bp, Aspergillus thermomutatus
  misc_feature: 112
aagcgaagagagtgaaggaagggatgttgatggacagtgtgataaggtaagggttatttagtttattaagagagagggaaggaattgagaagagaa

SEQ ID NO: 8099 - DNA, 96 bp, Aspergillus thermomutatus
  misc_feature: 112
ttaagagagagggaaggaattgagaagagaataaggtgaataaggagagaggagaagagaggagatgagaagagaggagatgagaagagatgagaa

SEQ ID NO: 8100 - DNA, 96 bp, Aspergillus thermomutatus
  misc_feature: 112
ttcgttctattttctcttctctctctttctatccttcttttccaccctcctccttttacaacctataatttctactaaccctcactcttatcctca

SEQ ID NO: 8101 - DNA, 96 bp, Aspergillus thermomutatus
  misc_feature: 112
gggataggataggataggaaaaaagaaaagatttagaaatagaagattaaaggtaaagaggaagggatagagagaggattagagtaagggttggaa

SEQ ID NO: 8102 - DNA, 96 bp, Aspergillus thermomutatus
  misc_feature: 112
ttatcattttccttttcttaaatcctacttcttctctttttttcttctttcttttcttaactcttactttcctctcttttatacccctaatactat

SEQ ID NO: 8103 - DNA, 96 bp, Aspergillus thermomutatus
  misc_feature: 112
tgttaggcagcacggcagactacacatcattgagagaggcgtctagagagacaggcagacaggcagacaggcagacaggcagacagtggggtaggg

SEQ ID NO: 8104 - DNA, 96 bp, Aspergillus thermomutatus
  misc_feature: 112
tgtctgcctgtctgcctgtctgcctgtctgcctgtctgcctgtctctctacctcactgcctacctcatgtcggacctctctgtgggcctatctgcc

SEQ ID NO: 8105 - DNA, 96 bp, Aspergillus thermomutatus
  misc_feature: 112
tctaggatggcagcaggcatgttaggcagcacggcagactacacatcattgagagaggcgtctagagagacaggcagacaggcagacaggcagaca

SEQ ID NO: 8106 - DNA, 96 bp, Aspergillus thermomutatus
  misc_feature: 112
acaataaggtttaacatctaaattcgtatttaattatagatgtaattaaactagtccttacccttaaaagaaaggacaaggagacagggaaggaca

SEQ ID NO: 8107 - DNA, 96 bp, Aspergillus thermomutatus
  misc_feature: 112
ccgacgcacttagtcgacgaccagactatgaattacaaggaaaaacagtcgagccagcaattcttcgacaaaacagtgatggatcattgacataca

SEQ ID NO: 8108 - DNA, 96 bp, Aspergillus thermomutatus
  misc_feature: 112
ctttctcactccctcttcctcctttcttgcatttctttattctcttaacatcctcccttctaatcttcaaccttctttatatatctctctactaca

SEQ ID NO: 8109 - DNA, 96 bp, Aspergillus thermomutatus
  misc_feature: 112
tggaaagaatagataaatttccccctaaaccttcacctaatagagatattagtatacctaatttactaaataagcctaaattattaaacaaatagg

SEQ ID NO: 8110 - DNA, 96 bp, Aspergillus thermomutatus
  misc_feature: 112
tagtcatccgcagccaggggttcgcatcagtcagctggctggcctggacggtctgctgggccttagcctgcacctgggcctgctcccaggcctgca

SEQ ID NO: 8111 - DNA, 96 bp, Aspergillus thermomutatus
  misc_feature: 112
tgagaagagaggagatgagaagagatgagaagagaggagaggagatgagaagagaagagaacaagaataaatgggaatgaaagagacgaattaatg

SEQ ID NO: 8112 - DNA, 96 bp, Aspergillus thermomutatus
  misc_feature: 112
tctgcctgcctctctatcttcctctctatctacctctctattcacctctctattcacctctctattcacctctctatctacctctctatctcccta

SEQ ID NO: 8113 - DNA, 96 bp, Aspergillus thermomutatus
  misc_feature: 112
aaagcgaagagagtgaaggaagggatgttgatggacagtgtgataaggtaagggttatttagtttattaagagagagggaaggaattgagaagaga

SEQ ID NO: 8114 - DNA, 96 bp, Aspergillus thermomutatus
  misc_feature: 112
attaagagagagggaaggaattgagaagagaataaggtgaataaggagagaggagaagagaggagatgagaagagaggagatgagaagagatgaga

SEQ ID NO: 8115 - DNA, 96 bp, Aspergillus thermomutatus
  misc_feature: 112
acatggtgagggcaacgagcacctaccaggagggagtccagccttataaggtgtttcgaggacgaaacgctaagagagggggaggtgatgttacga

SEQ ID NO: 8116 - DNA, 96 bp, Aspergillus thermomutatus
  misc_feature: 112
atgagaagggaacgaggtgagaaggtaaagagaaagtaaagagaatgataagagaggagaatgagaagagacaacgaggagaaaacgggaagagga

SEQ ID NO: 8117 - DNA, 96 bp, Aspergillus thermomutatus
  misc_feature: 112
ggaagttaatgagaaattagaagaaagaagaggagaggagaaggaaagaaaagagaaacagaggagggaaagaagggaagagatgagaagagagga

SEQ ID NO: 8118 - DNA, 96 bp, Aspergillus thermomutatus
  misc_feature: 112
gttaggcagcacggcagactacacatcattgagagaggcgtctagagagacaggcagacaggcagacaggcagacaggcagacagtggggtaggga

SEQ ID NO: 8119 - DNA, 96 bp, Aspergillus thermomutatus
  misc_feature: 112
tagcggcctcgttcatgtatgccagcagcggccggtatggggtctgcccccgctcagaccgcacggcttccacctggatggcctggccgcaatgct

SEQ ID NO: 8120 - DNA, 96 bp, Aspergillus thermomutatus
  misc_feature: 112
cttgatcctctatcgcacctacatctatatgattatgatatacattagattctgataatatatctctaatagttattgaagtattatggtattcta

SEQ ID NO: 8121 - DNA, 96 bp, Aspergillus thermomutatus
  misc_feature: 112
gttaactctctaccttgatcctctatcgcacctacatctatatgattatgatatacattagattctgataatatatctctaatagttattgaagta

SEQ ID NO: 8122 - DNA, 96 bp, Aspergillus thermomutatus
  misc_feature: 112
ctcttcttgttcccttctctccttatcctcttcccgttttctcctcgttgtctcttctcattctcctctcttatcattctctttactttctcttta

SEQ ID NO: 8123 - DNA, 96 bp, Aspergillus thermomutatus
  misc_feature: 112
ccccttctatccttcttcttattcatcctttcttttttttttcttttctaatcctaaaaatctcatctccttctctaatctctttgattacttaac

SEQ ID NO: 8124 - DNA, 96 bp, Aspergillus thermomutatus
  misc_feature: 112
gtctgcctgcctctctatcttcctctctatctacctctctattcacctctctattcacctctctattcacctctctatctacctctctatctccct

SEQ ID NO: 8125 - DNA, 96 bp, Aspergillus thermomutatus
  misc_feature: 112
gagaggagatgagaagagaggagatgagaagagatgagaagagaggagaggagatgagaagagaagagaacaagaataaatgggaatgaaagagac

SEQ ID NO: 8126 - DNA, 96 bp, Aspergillus thermomutatus
  misc_feature: 112
cccttctatccttcttcttattcatcctttcttttttttttcttttctaatcctaaaaatctcatctccttctctaatctctttgattacttaacc

SEQ ID NO: 8127 - DNA, 96 bp, Aspergillus thermomutatus
  misc_feature: 112
ggtctgctgggccttagcctgcacctgggcctgctcccaggcctgcatcacctcatcgaccgcagcctggacatggtgggtcgatggggccggtgg

SEQ ID NO: 8128 - DNA, 96 bp, Aspergillus thermomutatus
  misc_feature: 112
cacacagagaggtgtacacaaggcaggcagaacagtaggcagaacggcaggcagaacggcaggttgaatagcacatagaatagcacgtcgaatagc

SEQ ID NO: 8129 - DNA, 96 bp, Aspergillus thermomutatus
  misc_feature: 112
gcatgatttcaaaattgtgcattgcaaaggaactgagaatggacaagccgacgcacttagtcgacgaccagactatgaattacaaggaaaaacagt

SEQ ID NO: 8130 - DNA, 96 bp, Aspergillus thermomutatus
  misc_feature: 112
ctgtctgcctgtctgcctgtctgcctgtctgcctgtctgcctgtctctctacctcactgcctacctcatgtcggacctctctgtgggcctatctgc

SEQ ID NO: 8131 - DNA, 96 bp, Aspergillus thermomutatus
  misc_feature: 112
catgatttcaaaattgtgcattgcaaaggaactgagaatggacaagccgacgcacttagtcgacgaccagactatgaattacaaggaaaaacagtc

SEQ ID NO: 8132 - DNA, 96 bp, Aspergillus thermomutatus
  misc_feature: 112
gaatgagaagggaacgaggtgagaaggtaaagagaaagtaaagagaatgataagagaggagaatgagaagagacaacgaggagaaaacgggaagag

SEQ ID NO: 8133 - DNA, 96 bp, Aspergillus thermomutatus
  misc_feature: 112
accttgatcctctatcgcacctacatctatatgattatgatatacattagattctgataatatatctctaatagttattgaagtattatggtattc

SEQ ID NO: 8134 - DNA, 96 bp, Aspergillus thermomutatus
  misc_feature: 112
gaagttaatgagaaattagaagaaagaagaggagaggagaaggaaagaaaagagaaacagaggagggaaagaagggaagagatgagaagagaggag

SEQ ID NO: 8135 - DNA, 96 bp, Aspergillus thermomutatus
  misc_feature: 112
aagaacaaaatgacaggaggagcaaggtagagaggtagaggttaatttttaatagtattagaaatgttatatcaatcaattattttaatactaaag

SEQ ID NO: 8136 - DNA, 96 bp, Aspergillus thermomutatus
  misc_feature: 112
cttggatgattttgtccctttttgttgcttcaataattttttgaatcagtggatcctctgtcagttcgattgtggctgcaagtacttggtggttgt

SEQ ID NO: 8137 - DNA, 96 bp, Aspergillus thermomutatus
  misc_feature: 112
caggggtcccactatatccatattcgcgttccagacgggtgtccaccggccccatcgacccaccatgtccaggctgcggtcgatgaggtgatgcag

SEQ ID NO: 8138 - DNA, 96 bp, Aspergillus thermomutatus
  misc_feature: 112
ctcttgctacctctcttgctacctctcttactacctctcttgctacctctctactggctttactccctaccttggtccctacgtatttgcctacct

SEQ ID NO: 8139 - DNA, 96 bp, Aspergillus thermomutatus
  misc_feature: 112
cggtctgctgggccttagcctgcacctgggcctgctcccaggcctgcatcacctcatcgaccgcagcctggacatggtgggtcgatggggccggtg

SEQ ID NO: 8140 - DNA, 96 bp, Aspergillus thermomutatus
  misc_feature: 112
atgatttcaaaattgtgcattgcaaaggaactgagaatggacaagccgacgcacttagtcgacgaccagactatgaattacaaggaaaaacagtcg

SEQ ID NO: 8141 - DNA, 96 bp, Aspergillus thermomutatus
  misc_feature: 112
ccttagcctgcacctgggcctgctcccaggcctgcatcacctcatcgaccgcagcctggacatggtgggtcgatggggccggtggacacccgtctg

SEQ ID NO: 8142 - DNA, 96 bp, Aspergillus thermomutatus
  misc_feature: 112
cctcctcctaacccttactctactccttctcctaactctctctctactccttcttttactatttactttactccttcttctactctttacttcact

SEQ ID NO: 8143 - DNA, 96 bp, Aspergillus thermomutatus
  misc_feature: 112
agtaaaagaaggagtagagagagagttaggagaaggagtagagtaagggttaggaggaggattagagggagggatagaaagaggattagagggagg

SEQ ID NO: 8144 - DNA, 96 bp, Aspergillus thermomutatus
  misc_feature: 112
agcggcctcgttcatgtatgccagcagcggccggtatggggtctgcccccgctcagaccgcacggcttccacctggatggcctggccgcaatgctg

SEQ ID NO: 8145 - DNA, 96 bp, Aspergillus thermomutatus
  misc_feature: 112
aggtgtacacaaggcaggcagaacagtaggcagaacggcaggcagaacggcaggttgaatagcacatagaatagcacgtcgaatagcatgtagaat

SEQ ID NO: 8146 - DNA, 96 bp, Aspergillus thermomutatus
  misc_feature: 112
agtcatccgcagccaggggttcgcatcagtcagctggctggcctggacggtctgctgggccttagcctgcacctgggcctgctcccaggcctgcat

SEQ ID NO: 8147 - DNA, 96 bp, Aspergillus thermomutatus
  misc_feature: 112
aatggttaaagagagaataagaaaagaagagaagataaaagagagagagatttttagttaggattaaagatagtaaaaagagagaaaggggaaatt

SEQ ID NO: 8148 - DNA, 96 bp, Aspergillus thermomutatus
  misc_feature: 112
aaaaagagagaaaggggaaattggagagaggcaagagaataaggagaataataagggataggatagaaaaaagaaacaaaagaaagagaagatttt

SEQ ID NO: 8149 - DNA, 96 bp, Aspergillus thermomutatus
  misc_feature: 111
tttctctttcttatcctttctattcttaaaataaactatccctccctccttttcttcttctctcttaatatttcctcccttcctttctcctcaact

SEQ ID NO: 8150 - DNA, 96 bp, Aspergillus thermomutatus
  misc_feature: 111
gctccacgaccgcctacttcggtcgcattgtcacgtgaccaactaccatatacccaagcttggcaatggtagatggtatacaactaccagcaacaa

SEQ ID NO: 8151 - DNA, 96 bp, Aspergillus thermomutatus
  misc_feature: 111
ttgatcctctatcgcacctacatctatatgattatgatatacattagattctgataatatatctctaatagttattgaagtattatggtattctat

SEQ ID NO: 8152 - DNA, 96 bp, Aspergillus thermomutatus
  misc_feature: 111
ttctctttcttatcctttctattcttaaaataaactatccctccctccttttcttcttctctcttaatatttcctcccttcctttctcctcaactt

SEQ ID NO: 8153 - DNA, 96 bp, Aspergillus thermomutatus
  misc_feature: 111
gttgatggacagtgtgataaggtaagggttatttagtttattaagagagagggaaggaattgagaagagaataaggtgaataaggagagaggagaa

SEQ ID NO: 8154 - DNA, 96 bp, Aspergillus thermomutatus
  misc_feature: 111
agagaaaggggaaattggagagaggcaagagaataaggagaataataagggataggatagaaaaaagaaacaaaagaaagagaagattttaaggaa

SEQ ID NO: 8155 - DNA, 96 bp, Aspergillus thermomutatus
  misc_feature: 111
ttattgaagaggaagaggataagatagagagatgaatagaataagaaggaagaataaggaatagagagtaggttaataagtaagggtaagagataa

SEQ ID NO: 8156 - DNA, 96 bp, Aspergillus thermomutatus
  misc_feature: 111
gaaagaacaaaatgacaggaggagcaaggtagagaggtagaggttaatttttaatagtattagaaatgttatatcaatcaattattttaatactaa

SEQ ID NO: 8157 - DNA, 96 bp, Aspergillus thermomutatus
  misc_feature: 111
ttagcctgcacctgggcctgctcccaggcctgcatcacctcatcgaccgcagcctggacatggtgggtcgatggggccggtggacacccgtctgga

SEQ ID NO: 8158 - DNA, 96 bp, Aspergillus thermomutatus
  misc_feature: 111
aaagagagaaaggggaaattggagagaggcaagagaataaggagaataataagggataggatagaaaaaagaaacaaaagaaagagaagattttaa

SEQ ID NO: 8159 - DNA, 96 bp, Aspergillus thermomutatus
  misc_feature: 111
tgtagttcttctaaccggtaggtaggatggtatatcctgagtatgaagatggtagatcacatactctcagttggtagtcttggcataccatccgca

SEQ ID NO: 8160 - DNA, 96 bp, Aspergillus thermomutatus
  misc_feature: 111
tgtacacaaggcaggcagaacagtaggcagaacggcaggcagaacggcaggttgaatagcacatagaatagcacgtcgaatagcatgtagaatagc

SEQ ID NO: 8161 - DNA, 96 bp, Aspergillus thermomutatus
  misc_feature: 111
tgatcctctatcgcacctacatctatatgattatgatatacattagattctgataatatatctctaatagttattgaagtattatggtattctatt

SEQ ID NO: 8162 - DNA, 96 bp, Aspergillus thermomutatus
  misc_feature: 111
tgaccatgcattgggtcatcgtggtgtttcgcgatgatttcggttctcatacactcaggtatgtagatgagattccgcaaatataccaaccctctg

SEQ ID NO: 8163 - DNA, 96 bp, Aspergillus thermomutatus
  misc_feature: 111
tcttggatgattttgtccctttttgttgcttcaataattttttgaatcagtggatcctctgtcagttcgattgtggctgcaagtacttggtggttg

SEQ ID NO: 8164 - DNA, 96 bp, Aspergillus thermomutatus
  misc_feature: 111
tcttgctacctctcttgctacctctcttactacctctcttgctacctctctactggctttactccctaccttggtccctacgtatttgcctacctc

SEQ ID NO: 8165 - DNA, 96 bp, Aspergillus thermomutatus
  misc_feature: 111
aagagagagggaaggaattgagaagagaataaggtgaataaggagagaggagaagagaggagatgagaagagaggagatgagaagagatgagaaga

SEQ ID NO: 8166 - DNA, 96 bp, Aspergillus thermomutatus
  misc_feature: 111
tctcttgctacctctcttgctacctctcttactacctctcttgctacctctctactggctttactccctaccttggtccctacgtatttgcctacc

SEQ ID NO: 8167 - DNA, 96 bp, Aspergillus thermomutatus
  misc_feature: 111
gtaattatagtaatggttaaagagagaataagaaaagaagagaagataaaagagagagagatttttagttaggattaaagatagtaaaaagagaga

SEQ ID NO: 8168 - DNA, 96 bp, Aspergillus thermomutatus
  misc_feature: 111
tctatatctacctcttggatacctctctctatatctctctatctgatttggtggcttatacggtgccttactccccaccattctacctacctgtct

SEQ ID NO: 8169 - DNA, 96 bp, Aspergillus thermomutatus
  misc_feature: 111
tctacgtgctattctacgtgctattctacgtgctattctacgtgctattctacatgctattcgacgtgctattctatgtgctattcaacctgccgt

SEQ ID NO: 8170 - DNA, 96 bp, Aspergillus thermomutatus
  misc_feature: 111
gagagaaaggggaaattggagagaggcaagagaataaggagaataataagggataggatagaaaaaagaaacaaaagaaagagaagattttaagga

SEQ ID NO: 8171 - DNA, 96 bp, Aspergillus thermomutatus
  misc_feature: 111
tcctctctttccactttcctctctttaaccctaaaccatctctttttcttctcattctcttctcttcttgttcccttctctccttatcctcttccc

SEQ ID NO: 8172 - DNA, 96 bp, Aspergillus thermomutatus
  misc_feature: 111
tcccttactctttctaaaacctaactcttaccctcctttttcttctctttcctttactctctttcccttctaaattccatcttccttcttctcttt

SEQ ID NO: 8173 - DNA, 96 bp, Aspergillus thermomutatus
  misc_feature: 111
agggataggataggataggaaaaaagaaaagatttagaaatagaagattaaaggtaaagaggaagggatagagagaggattagagtaagggttgga

SEQ ID NO: 8174 - DNA, 96 bp, Aspergillus thermomutatus
  misc_feature: 111
tcattctcactctactcctctctcttatcctcattctaaccctcactccttcctccctctaatcctccctctaatcctccctctaatcctccctct

SEQ ID NO: 8175 - DNA, 96 bp, Aspergillus thermomutatus
  misc_feature: 111
tatttcctcccttcctttctcctcaacttctttgattcttctatcctctcttcctttcccttatctatacttctcataaactacaattccttactc

SEQ ID NO: 8176 - DNA, 96 bp, Aspergillus thermomutatus
  misc_feature: 111
tatattccctttactttactaaatcctcttctcatcttccctctctctcttaaattctttcttaaactattaattcctctctctttctcactccct

SEQ ID NO: 8177 - DNA, 96 bp, Aspergillus thermomutatus
  misc_feature: 111
tacgtgctattctacgtgctattctacgtgctattctacgtgctattctacatgctattcgacgtgctattctatgtgctattcaacctgccgttc

SEQ ID NO: 8178 - DNA, 96 bp, Aspergillus thermomutatus
  misc_feature: 111
gctcctgcgcggcacggttaggattgctccacgaccgcctacttcggtcgcattgtcacgtgaccaactaccatatacccaagcttggcaatggta

SEQ ID NO: 8179 - DNA, 96 bp, Aspergillus thermomutatus
  misc_feature: 111
taagagagagggaaggaattgagaagagaataaggtgaataaggagagaggagaagagaggagatgagaagagaggagatgagaagagatgagaag

SEQ ID NO: 8180 - DNA, 96 bp, Aspergillus thermomutatus
  misc_feature: 111
gttcagttactaatccatgttttacgtctatactcattaaatttgtatttatctcctgaagtaatttctttaaataatctaaatgcttaccagttt

SEQ ID NO: 8181 - DNA, 96 bp, Aspergillus thermomutatus
  misc_feature: 111
caggcctgcatcacctcatcgaccgcagcctggacatggtgggtcgatggggccggtggacacccgtctggaacgcgaatatggatatagtgggac

SEQ ID NO: 8182 - DNA, 96 bp, Aspergillus thermomutatus
  misc_feature: 111
ctatattccctttactttactaaatcctcttctcatcttccctctctctcttaaattctttcttaaactattaattcctctctctttctcactccc

SEQ ID NO: 8183 - DNA, 96 bp, Aspergillus thermomutatus
  misc_feature: 111
ggattgctccacgaccgcctacttcggtcgcattgtcacgtgaccaactaccatatacccaagcttggcaatggtagatggtatacaactaccagc

SEQ ID NO: 8184 - DNA, 96 bp, Aspergillus thermomutatus
  misc_feature: 111
ggaatgataagggatagagtaagggatagatagtttagggagaggagggggtagaaaggtttagagataaagagaggaataagagatagtattagg

SEQ ID NO: 8185 - DNA, 96 bp, Aspergillus thermomutatus
  misc_feature: 111
gaggtagggagggaggtagagaggcaccataggaggtatggagcaatgcaccgcgtgaggcacccccagatatgccatgcaaggtttggaccaagg

SEQ ID NO: 8186 - DNA, 96 bp, Aspergillus thermomutatus
  misc_feature: 111
cactttcctctctttaaccctaaaccatctctttttcttctcattctcttctcttcttgttcccttctctccttatcctcttcccgttttctcctc

SEQ ID NO: 8187 - DNA, 96 bp, Aspergillus thermomutatus
  misc_feature: 111
gaccatgcattgggtcatcgtggtgtttcgcgatgatttcggttctcatacactcaggtatgtagatgagattccgcaaatataccaaccctctgt

SEQ ID NO: 8188 - DNA, 96 bp, Aspergillus thermomutatus
  misc_feature: 111
attatagtaatggttaaagagagaataagaaaagaagagaagataaaagagagagagatttttagttaggattaaagatagtaaaaagagagaaag

SEQ ID NO: 8189 - DNA, 96 bp, Aspergillus thermomutatus
  misc_feature: 111
cttagcctgcacctgggcctgctcccaggcctgcatcacctcatcgaccgcagcctggacatggtgggtcgatggggccggtggacacccgtctgg

SEQ ID NO: 8190 - DNA, 96 bp, Aspergillus thermomutatus
  misc_feature: 111
aagagagaaaggggaaattggagagaggcaagagaataaggagaataataagggataggatagaaaaaagaaacaaaagaaagagaagattttaag

SEQ ID NO: 8191 - DNA, 96 bp, Aspergillus thermomutatus
  misc_feature: 111
agcatgatttcaaaattgtgcattgcaaaggaactgagaatggacaagccgacgcacttagtcgacgaccagactatgaattacaaggaaaaacag

SEQ ID NO: 8192 - DNA, 96 bp, Aspergillus thermomutatus
  misc_feature: 111
ctctttcctttactctctttcccttctaaattccatcttccttcttctctttctctttcttatcctttctattcttaaaataaactatccctccct

SEQ ID NO: 8193 - DNA, 96 bp, Aspergillus thermomutatus
  misc_feature: 111
agagagagggaaggaattgagaagagaataaggtgaataaggagagaggagaagagaggagatgagaagagaggagatgagaagagatgagaagag

SEQ ID NO: 8194 - DNA, 96 bp, Aspergillus thermomutatus
  misc_feature: 111
agtaattatagtaatggttaaagagagaataagaaaagaagagaagataaaagagagagagatttttagttaggattaaagatagtaaaaagagag

SEQ ID NO: 8195 - DNA, 96 bp, Aspergillus thermomutatus
  misc_feature: 111
agagagggaaggaattgagaagagaataaggtgaataaggagagaggagaagagaggagatgagaagagaggagatgagaagagatgagaagagag

SEQ ID NO: 8196 - DNA, 96 bp, Aspergillus thermomutatus
  misc_feature: 111
ctcctgcgcggcacggttaggattgctccacgaccgcctacttcggtcgcattgtcacgtgaccaactaccatatacccaagcttggcaatggtag

SEQ ID NO: 8197 - DNA, 96 bp, Aspergillus thermomutatus
  misc_feature: 111
ctcccttcctttctcctcaacttctttgattcttctatcctctcttcctttcccttatctatacttctcataaactacaattccttactctttcat

SEQ ID NO: 8198 - DNA, 96 bp, Aspergillus thermomutatus
  misc_feature: 111
ctacgtgctattctacgtgctattctacgtgctattctacgtgctattctacatgctattcgacgtgctattctatgtgctattcaacctgccgtt

SEQ ID NO: 8199 - DNA, 96 bp, Aspergillus thermomutatus
  misc_feature: 111
ctaccttgatcctctatcgcacctacatctatatgattatgatatacattagattctgataatatatctctaatagttattgaagtattatggtat

SEQ ID NO: 8200 - DNA, 96 bp, Aspergillus thermomutatus
  misc_feature: 111
aggaatgataagggatagagtaagggatagatagtttagggagaggagggggtagaaaggtttagagataaagagaggaataagagatagtattag

SEQ ID NO: 8201 - DNA, 96 bp, Aspergillus thermomutatus
  misc_feature: 111
agaggagatgagaagagaggagatgagaagagatgagaagagaggagaggagatgagaagagaagagaacaagaataaatgggaatgaaagagacg

SEQ ID NO: 8202 - DNA, 96 bp, Aspergillus thermomutatus
  misc_feature: 111
ccttgatcctctatcgcacctacatctatatgattatgatatacattagattctgataatatatctctaatagttattgaagtattatggtattct

SEQ ID NO: 8203 - DNA, 96 bp, Aspergillus thermomutatus
  misc_feature: 111
ccttctatccttcttcttattcatcctttcttttttttttcttttctaatcctaaaaatctcatctccttctctaatctctttgattacttaacct

SEQ ID NO: 8204 - DNA, 96 bp, Aspergillus thermomutatus
  misc_feature: 111
cctgcgcggcacggttaggattgctccacgaccgcctacttcggtcgcattgtcacgtgaccaactaccatatacccaagcttggcaatggtagat

SEQ ID NO: 8205 - DNA, 96 bp, Aspergillus thermomutatus
  misc_feature: 111
agtagagagagagttaggagaaggagtagagtaagggttaggaggaggattagagggagggatagaaagaggattagagggaggattagaaagagg

SEQ ID NO: 8206 - DNA, 96 bp, Aspergillus thermomutatus
  misc_feature: 111
aatgagaagggaacgaggtgagaaggtaaagagaaagtaaagagaatgataagagaggagaatgagaagagacaacgaggagaaaacgggaagagg

SEQ ID NO: 8207 - DNA, 96 bp, Aspergillus thermomutatus
  misc_feature: 111
aggataggataggaaaaaagaaaagatttagaaatagaagattaaaggtaaagaggaagggatagagagaggattagagtaagggttggaatgagg

SEQ ID NO: 8208 - DNA, 96 bp, Aspergillus thermomutatus
  misc_feature: 111
aagggaaagagaagattaaagcgaagagagtgaaggaagggatgttgatggacagtgtgataaggtaagggttatttagtttattaagagagaggg

SEQ ID NO: 8209 - DNA, 96 bp, Aspergillus thermomutatus
  misc_feature: 111
cagctcctgcgcggcacggttaggattgctccacgaccgcctacttcggtcgcattgtcacgtgaccaactaccatatacccaagcttggcaatgg

SEQ ID NO: 8210 - DNA, 96 bp, Aspergillus thermomutatus
  misc_feature: 111
acagctcctgcgcggcacggttaggattgctccacgaccgcctacttcggtcgcattgtcacgtgaccaactaccatatacccaagcttggcaatg

SEQ ID NO: 8211 - DNA, 96 bp, Aspergillus thermomutatus
  misc_feature: 111
cagcaggcatgttaggcagcacggcagactacacatcattgagagaggcgtctagagagacaggcagacaggcagacaggcagacaggcagacagt

SEQ ID NO: 8212 - DNA, 96 bp, Aspergillus thermomutatus
  misc_feature: 111
atggttaaagagagaataagaaaagaagagaagataaaagagagagagatttttagttaggattaaagatagtaaaaagagagaaaggggaaattg

SEQ ID NO: 8213 - DNA, 96 bp, Aspergillus thermomutatus
  misc_feature: 111
atcttcctctctatctacctctctattcacctctctattcacctctctattcacctctctatctacctctctatctccctaccccactgtctgcct

SEQ ID NO: 8214 - DNA, 96 bp, Aspergillus thermomutatus
  misc_feature: 111
agttaactctctaccttgatcctctatcgcacctacatctatatgattatgatatacattagattctgataatatatctctaatagttattgaagt

SEQ ID NO: 8215 - DNA, 96 bp, Aspergillus thermomutatus
  misc_feature: 110
tttcttggatgattttgtccctttttgttgcttcaataattttttgaatcagtggatcctctgtcagttcgattgtggctgcaagtacttggtggt

SEQ ID NO: 8216 - DNA, 96 bp, Aspergillus thermomutatus
  misc_feature: 110
aaagaacaaaatgacaggaggagcaaggtagagaggtagaggttaatttttaatagtattagaaatgttatatcaatcaattattttaatactaaa

SEQ ID NO: 8217 - DNA, 96 bp, Aspergillus thermomutatus
  misc_feature: 110
attgctccacgaccgcctacttcggtcgcattgtcacgtgaccaactaccatatacccaagcttggcaatggtagatggtatacaactaccagcaa

SEQ ID NO: 8218 - DNA, 96 bp, Aspergillus thermomutatus
  misc_feature: 110
ttcagttactaatccatgttttacgtctatactcattaaatttgtatttatctcctgaagtaatttctttaaataatctaaatgcttaccagtttc

SEQ ID NO: 8219 - DNA, 96 bp, Aspergillus thermomutatus
  misc_feature: 110
ttactaatccatgttttacgtctatactcattaaatttgtatttatctcctgaagtaatttctttaaataatctaaatgcttaccagtttcatata

SEQ ID NO: 8220 - DNA, 96 bp, Aspergillus thermomutatus
  misc_feature: 110
gatgagaagagaggagatgagaagagatgagaagagaggagaggagatgagaagagaagagaacaagaataaatgggaatgaaagagacgaattaa

SEQ ID NO: 8221 - DNA, 96 bp, Aspergillus thermomutatus
  misc_feature: 110
tgggccttagcctgcacctgggcctgctcccaggcctgcatcacctcatcgaccgcagcctggacatggtgggtcgatggggccggtggacacccg

SEQ ID NO: 8222 - DNA, 96 bp, Aspergillus thermomutatus
  misc_feature: 110
tggcagcaggcatgttaggcagcacggcagactacacatcattgagagaggcgtctagagagacaggcagacaggcagacaggcagacaggcagac

SEQ ID NO: 8223 - DNA, 96 bp, Aspergillus thermomutatus
  misc_feature: 110
tgatttcaaaattgtgcattgcaaaggaactgagaatggacaagccgacgcacttagtcgacgaccagactatgaattacaaggaaaaacagtcga

SEQ ID NO: 8224 - DNA, 96 bp, Aspergillus thermomutatus
  misc_feature: 110
cctcccttcctttctcctcaacttctttgattcttctatcctctcttcctttcccttatctatacttctcataaactacaattccttactctttca

SEQ ID NO: 8225 - DNA, 96 bp, Aspergillus thermomutatus
  misc_feature: 110
tctttcctttactctctttcccttctaaattccatcttccttcttctctttctctttcttatcctttctattcttaaaataaactatccctccctc

SEQ ID NO: 8226 - DNA, 96 bp, Aspergillus thermomutatus
  misc_feature: 110
aaggtagggagtaaagccagtagagaggcaccatgtcaggtagcaagagaggtagcaagagaggtagcaagagaggtagcaagagaggtagcaaga

SEQ ID NO: 8227 - DNA, 96 bp, Aspergillus thermomutatus
  misc_feature: 110
ggtagggagagaggtaggcgaagaggtaggcgacgaggtaggcgacgaggtaggtgaagaggtaggtgaagaggtaggtgaagaggtaggtgaaga

SEQ ID NO: 8228 - DNA, 96 bp, Aspergillus thermomutatus
  misc_feature: 110
tctctttcttatcctttctattcttaaaataaactatccctccctccttttcttcttctctcttaatatttcctcccttcctttctcctcaacttc

SEQ ID NO: 8229 - DNA, 96 bp, Aspergillus thermomutatus
  misc_feature: 110
cagtgtgataaggtaagggttatttagtttattaagagagagggaaggaattgagaagagaataaggtgaataaggagagaggagaagagaggaga

SEQ ID NO: 8230 - DNA, 96 bp, Aspergillus thermomutatus
  misc_feature: 110
tatcttctattactcctataattccccttattcttcctttctgatccattattccttcctttttccttttgaaatccttctatctttctttccacc

SEQ ID NO: 8231 - DNA, 96 bp, Aspergillus thermomutatus
  misc_feature: 110
gataaggagagaagggaacaagaagagaagagaatgagaagaaaaagagatggtttagggttaaagagaggaaagtggaaagagaggagaaggata

SEQ ID NO: 8232 - DNA, 96 bp, Aspergillus thermomutatus
  misc_feature: 110
cctctcttgctacctctcttgctacctctcttactacctctcttgctacctctctactggctttactccctaccttggtccctacgtatttgccta

SEQ ID NO: 8233 - DNA, 96 bp, Aspergillus thermomutatus
  misc_feature: 110
taggatggcagcaggcatgttaggcagcacggcagactacacatcattgagagaggcgtctagagagacaggcagacaggcagacaggcagacagg

SEQ ID NO: 8234 - DNA, 96 bp, Aspergillus thermomutatus
  misc_feature: 110
tagagagtaggttaataagtaagggtaagagataattaatagagataggggaaagaggaatgataagggatagagtaagggatagatagtttaggg

SEQ ID NO: 8235 - DNA, 96 bp, Aspergillus thermomutatus
  misc_feature: 110
taccttgatcctctatcgcacctacatctatatgattatgatatacattagattctgataatatatctctaatagttattgaagtattatggtatt

SEQ ID NO: 8236 - DNA, 96 bp, Aspergillus thermomutatus
  misc_feature: 110
gaggaatgataagggatagagtaagggatagatagtttagggagaggagggggtagaaaggtttagagataaagagaggaataagagatagtatta

SEQ ID NO: 8237 - DNA, 96 bp, Aspergillus thermomutatus
  misc_feature: 110
aaaagagagaaaggggaaattggagagaggcaagagaataaggagaataataagggataggatagaaaaaagaaacaaaagaaagagaagatttta

SEQ ID NO: 8238 - DNA, 96 bp, Aspergillus thermomutatus
  misc_feature: 110
cccatatgaccatgcattgggtcatcgtggtgtttcgcgatgatttcggttctcatacactcaggtatgtagatgagattccgcaaatataccaac

SEQ ID NO: 8239 - DNA, 96 bp, Aspergillus thermomutatus
  misc_feature: 110
ctatcttctattactcctataattccccttattcttcctttctgatccattattccttcctttttccttttgaaatccttctatctttctttccac

SEQ ID NO: 8240 - DNA, 96 bp, Aspergillus thermomutatus
  misc_feature: 110
atctaggatggcagcaggcatgttaggcagcacggcagactacacatcattgagagaggcgtctagagagacaggcagacaggcagacaggcagac

SEQ ID NO: 8241 - DNA, 96 bp, Aspergillus thermomutatus
  misc_feature: 110
ctctcttgctacctctcttgctacctctcttactacctctcttgctacctctctactggctttactccctaccttggtccctacgtatttgcctac

SEQ ID NO: 8242 - DNA, 96 bp, Aspergillus thermomutatus
  misc_feature: 110
ctgggccttagcctgcacctgggcctgctcccaggcctgcatcacctcatcgaccgcagcctggacatggtgggtcgatggggccggtggacaccc

SEQ ID NO: 8243 - DNA, 96 bp, Aspergillus thermomutatus
  misc_feature: 110
gggcgcgcgcgcgcgcgagcattaggcggcagcggtccggggcaggccagcaggcaggggggcgcgcgcgcggcggtgaccagttggccggggccc

SEQ ID NO: 8244 - DNA, 96 bp, Aspergillus thermomutatus
  misc_feature: 110
ggaaagaatagataaatttccccctaaaccttcacctaatagagatattagtatacctaatttactaaataagcctaaattattaaacaaataggt

SEQ ID NO: 8245 - DNA, 96 bp, Aspergillus thermomutatus
  misc_feature: 110
gcctggacggtctgctgggccttagcctgcacctgggcctgctcccaggcctgcatcacctcatcgaccgcagcctggacatggtgggtcgatggg

SEQ ID NO: 8246 - DNA, 96 bp, Aspergillus thermomutatus
  misc_feature: 110
gcaggcatgttaggcagcacggcagactacacatcattgagagaggcgtctagagagacaggcagacaggcagacaggcagacaggcagacagtgg

SEQ ID NO: 8247 - DNA, 96 bp, Aspergillus thermomutatus
  misc_feature: 110
cctactcttggtctgccttactgcctctctccctgtcttacatggtgccttcctccctaccttatattatacattcttcgctacctcacgtggtgc

SEQ ID NO: 8248 - DNA, 96 bp, Aspergillus thermomutatus
  misc_feature: 110
gatggcagcaggcatgttaggcagcacggcagactacacatcattgagagaggcgtctagagagacaggcagacaggcagacaggcagacaggcag

SEQ ID NO: 8249 - DNA, 96 bp, Aspergillus thermomutatus
  misc_feature: 110
gaatgataagggatagagtaagggatagatagtttagggagaggagggggtagaaaggtttagagataaagagaggaataagagatagtattaggg

SEQ ID NO: 8250 - DNA, 96 bp, Aspergillus thermomutatus
  misc_feature: 110
aatcctcctcctaacccttactctactccttctcctaactctctctctactccttcttttactatttactttactccttcttctactctttacttc

SEQ ID NO: 8251 - DNA, 96 bp, Aspergillus thermomutatus
  misc_feature: 110
caaggtagggagtaaagccagtagagaggcaccatgtcaggtagcaagagaggtagcaagagaggtagcaagagaggtagcaagagaggtagcaag

SEQ ID NO: 8252 - DNA, 96 bp, Aspergillus thermomutatus
  misc_feature: 110
cttctcttcttgttcccttctctccttatcctcttcccgttttctcctcgttgtctcttctcattctcctctcttatcattctctttactttctct

SEQ ID NO: 8253 - DNA, 96 bp, Aspergillus thermomutatus
  misc_feature: 110
agtaagaaaaaggagagagggagtaaaggggaggtaaggaggaagtaaagaggaaggagagagggaataaaggggaggtaaggaggaaggaaagag

SEQ ID NO: 8254 - DNA, 96 bp, Aspergillus thermomutatus
  misc_feature: 110
agggggaaatttatctattctttccaaatatgcctcatgagtatttttacattctttccaaatatgcctcatgagtatttatactattaattatag

SEQ ID NO: 8255 - DNA, 96 bp, Aspergillus thermomutatus
  misc_feature: 110
cgaggcgagcacaacggatgcaaggaaaggccattaggaaaccttgatcttcgatttttcgggccaaacttttctttcgaacggatgctttagacg

SEQ ID NO: 8256 - DNA, 96 bp, Aspergillus thermomutatus
  misc_feature: 110
aacatggtgagggcaacgagcacctaccaggagggagtccagccttataaggtgtttcgaggacgaaacgctaagagagggggaggtgatgttacg

SEQ ID NO: 8257 - DNA, 96 bp, Aspergillus thermomutatus
  misc_feature: 110
atagtaagggataggataggataggaaaaaagaaaagatttagaaatagaagattaaaggtaaagaggaagggatagagagaggattagagtaagg

SEQ ID NO: 8258 - DNA, 96 bp, Aspergillus thermomutatus
  misc_feature: 110
agagagaaaggggaaattggagagaggcaagagaataaggagaataataagggataggatagaaaaaagaaacaaaagaaagagaagattttaagg

SEQ ID NO: 8259 - DNA, 96 bp, Aspergillus thermomutatus
  misc_feature: 110
atagagagtaggttaataagtaagggtaagagataattaatagagataggggaaagaggaatgataagggatagagtaagggatagatagtttagg

SEQ ID NO: 8260 - DNA, 96 bp, Aspergillus thermomutatus
  misc_feature: 110
ccactttcctctctttaaccctaaaccatctctttttcttctcattctcttctcttcttgttcccttctctccttatcctcttcccgttttctcct

SEQ ID NO: 8261 - DNA, 96 bp, Aspergillus thermomutatus
  misc_feature: 110
cagctggctggcctggacggtctgctgggccttagcctgcacctgggcctgctcccaggcctgcatcacctcatcgaccgcagcctggacatggtg

SEQ ID NO: 8262 - DNA, 96 bp, Aspergillus thermomutatus
  misc_feature: 110
atgagaagagaggagatgagaagagatgagaagagaggagaggagatgagaagagaagagaacaagaataaatgggaatgaaagagacgaattaat

SEQ ID NO: 8263 - DNA, 96 bp, Aspergillus thermomutatus
  misc_feature: 110
agtgtgataaggtaagggttatttagtttattaagagagagggaaggaattgagaagagaataaggtgaataaggagagaggagaagagaggagat

SEQ ID NO: 8264 - DNA, 96 bp, Aspergillus thermomutatus
  misc_feature: 110
aggtagggagggaggtagagaggcaccataggaggtatggagcaatgcaccgcgtgaggcacccccagatatgccatgcaaggtttggaccaaggt

SEQ ID NO: 8265 - DNA, 96 bp, Aspergillus thermomutatus
  misc_feature: 110
accttgcacggcgcctctctccctactatctgcggttcctcactccctaccatactacctacctcctgcagtacctctcttgctacctctcttgct

SEQ ID NO: 8266 - DNA, 96 bp, Aspergillus thermomutatus
  misc_feature: 110
acggtctgctgggccttagcctgcacctgggcctgctcccaggcctgcatcacctcatcgaccgcagcctggacatggtgggtcgatggggccggt

SEQ ID NO: 8267 - DNA, 96 bp, Aspergillus thermomutatus
  misc_feature: 110
aaacctaactcttaccctcctttttcttctctttcctttactctctttcccttctaaattccatcttccttcttctctttctctttcttatccttt

SEQ ID NO: 8268 - DNA, 96 bp, Aspergillus thermomutatus
  misc_feature: 109
atgataagagaggagaatgagaagagacaacgaggagaaaacgggaagaggataaggagagaagggaacaagaagagaagagaatgagaagaaaaa

SEQ ID NO: 8269 - DNA, 96 bp, Aspergillus thermomutatus
  misc_feature: 109
gatagtaagaaaaaggagagagggagtaaaggggaggtaaggaggaagtaaagaggaaggagagagggaataaaggggaggtaaggaggaaggaaa

SEQ ID NO: 8270 - DNA, 96 bp, Aspergillus thermomutatus
  misc_feature: 109
tttcctcccttcctttctcctcaacttctttgattcttctatcctctcttcctttcccttatctatacttctcataaactacaattccttactctt

SEQ ID NO: 8271 - DNA, 96 bp, Aspergillus thermomutatus
  misc_feature: 109
atacagctcctgcgcggcacggttaggattgctccacgaccgcctacttcggtcgcattgtcacgtgaccaactaccatatacccaagcttggcaa

SEQ ID NO: 8272 - DNA, 96 bp, Aspergillus thermomutatus
  misc_feature: 109
ttctatcttctattactcctataattccccttattcttcctttctgatccattattccttcctttttccttttgaaatccttctatctttctttcc

SEQ ID NO: 8273 - DNA, 96 bp, Aspergillus thermomutatus
  misc_feature: 109
gggaaagagaagattaaagcgaagagagtgaaggaagggatgttgatggacagtgtgataaggtaagggttatttagtttattaagagagagggaa

SEQ ID NO: 8274 - DNA, 96 bp, Aspergillus thermomutatus
  misc_feature: 109
tactaatccatgttttacgtctatactcattaaatttgtatttatctcctgaagtaatttctttaaataatctaaatgcttaccagtttcatataa

SEQ ID NO: 8275 - DNA, 96 bp, Aspergillus thermomutatus
  misc_feature: 109
accccttctatccttcttcttattcatcctttcttttttttttcttttctaatcctaaaaatctcatctccttctctaatctctttgattacttaa

SEQ ID NO: 8276 - DNA, 96 bp, Aspergillus thermomutatus
  misc_feature: 109
ccttctaaattccatcttccttcttctctttctctttcttatcctttctattcttaaaataaactatccctccctccttttcttcttctctcttaa

SEQ ID NO: 8277 - DNA, 96 bp, Aspergillus thermomutatus
  misc_feature: 109
taggattgctccacgaccgcctacttcggtcgcattgtcacgtgaccaactaccatatacccaagcttggcaatggtagatggtatacaactacca

SEQ ID NO: 8278 - DNA, 96 bp, Aspergillus thermomutatus
  misc_feature: 109
gattgctccacgaccgcctacttcggtcgcattgtcacgtgaccaactaccatatacccaagcttggcaatggtagatggtatacaactaccagca

SEQ ID NO: 8279 - DNA, 96 bp, Aspergillus thermomutatus
  misc_feature: 109
tgcgcggcacggttaggattgctccacgaccgcctacttcggtcgcattgtcacgtgaccaactaccatatacccaagcttggcaatggtagatgg

SEQ ID NO: 8280 - DNA, 96 bp, Aspergillus thermomutatus
  misc_feature: 109
tcagttactaatccatgttttacgtctatactcattaaatttgtatttatctcctgaagtaatttctttaaataatctaaatgcttaccagtttca

SEQ ID NO: 8281 - DNA, 96 bp, Aspergillus thermomutatus
  misc_feature: 109
tagtaagaaaaaggagagagggagtaaaggggaggtaaggaggaagtaaagaggaaggagagagggaataaaggggaggtaaggaggaaggaaaga

SEQ ID NO: 8282 - DNA, 96 bp, Aspergillus thermomutatus
  misc_feature: 109
tctttaccgaggcgagcacaacggatgcaaggaaaggccattaggaaaccttgatcttcgatttttcgggccaaacttttctttcgaacggatgct

SEQ ID NO: 8283 - DNA, 96 bp, Aspergillus thermomutatus
  misc_feature: 109
tcttatcattctctttactttctctttaccttctcacctcgttcccttctcattcttttctattcttgttcttttctctcttctcattctttcttg

SEQ ID NO: 8284 - DNA, 96 bp, Aspergillus thermomutatus
  misc_feature: 109
atggcagcaggcatgttaggcagcacggcagactacacatcattgagagaggcgtctagagagacaggcagacaggcagacaggcagacaggcaga

SEQ ID NO: 8285 - DNA, 96 bp, Aspergillus thermomutatus
  misc_feature: 109
agggaaggaattgagaagagaataaggtgaataaggagagaggagaagagaggagatgagaagagaggagatgagaagagatgagaagagaggaga

SEQ ID NO: 8286 - DNA, 96 bp, Aspergillus thermomutatus
  misc_feature: 109
aataagaaggaagaataaggaatagagagtaggttaataagtaagggtaagagataattaatagagataggggaaagaggaatgataagggataga

SEQ ID NO: 8287 - DNA, 96 bp, Aspergillus thermomutatus
  misc_feature: 109
tcctgcgcggcacggttaggattgctccacgaccgcctacttcggtcgcattgtcacgtgaccaactaccatatacccaagcttggcaatggtaga

SEQ ID NO: 8288 - DNA, 96 bp, Aspergillus thermomutatus
  misc_feature: 109
gaggagatgagaagagaggagatgagaagagatgagaagagaggagaggagatgagaagagaagagaacaagaataaatgggaatgaaagagacga

SEQ ID NO: 8289 - DNA, 96 bp, Aspergillus thermomutatus
  misc_feature: 109
agaagccattgcaaagcgagttcgcacgcgcgtatcaggcgcctgcaaggtcgtgtcccgaccggacatgaggtcagcacctccgccattagacga

SEQ ID NO: 8290 - DNA, 96 bp, Aspergillus thermomutatus
  misc_feature: 109
tcagctggctggcctggacggtctgctgggccttagcctgcacctgggcctgctcccaggcctgcatcacctcatcgaccgcagcctggacatggt

SEQ ID NO: 8291 - DNA, 96 bp, Aspergillus thermomutatus
  misc_feature: 109
agattatatactgtaaagattacttcttcattaattaattctctaaaaaatagcccattttaatatacaagacccaaagattccctagattaaata

SEQ ID NO: 8292 - DNA, 96 bp, Aspergillus thermomutatus
  misc_feature: 109
agttactaatccatgttttacgtctatactcattaaatttgtatttatctcctgaagtaatttctttaaataatctaaatgcttaccagtttcata

SEQ ID NO: 8293 - DNA, 96 bp, Aspergillus thermomutatus
  misc_feature: 109
cttatcattttccttttcttaaatcctacttcttctctttttttcttctttcttttcttaactcttactttcctctcttttatacccctaatacta

SEQ ID NO: 8294 - DNA, 96 bp, Aspergillus thermomutatus
  misc_feature: 109
tacccttacttattaacctactctctattccttattcttccttcttattctattcatctctctatcttatcctcttcctcttcaataatccttatc

SEQ ID NO: 8295 - DNA, 96 bp, Aspergillus thermomutatus
  misc_feature: 109
taccccttctatccttcttcttattcatcctttcttttttttttcttttctaatcctaaaaatctcatctccttctctaatctctttgattactta

SEQ ID NO: 8296 - DNA, 96 bp, Aspergillus thermomutatus
  misc_feature: 109
tacagctcctgcgcggcacggttaggattgctccacgaccgcctacttcggtcgcattgtcacgtgaccaactaccatatacccaagcttggcaat

SEQ ID NO: 8297 - DNA, 96 bp, Aspergillus thermomutatus
  misc_feature: 109
aacaataaggtttaacatctaaattcgtatttaattatagatgtaattaaactagtccttacccttaaaagaaaggacaaggagacagggaaggac

SEQ ID NO: 8298 - DNA, 96 bp, Aspergillus thermomutatus
  misc_feature: 109
gtcagctggctggcctggacggtctgctgggccttagcctgcacctgggcctgctcccaggcctgcatcacctcatcgaccgcagcctggacatgg

SEQ ID NO: 8299 - DNA, 96 bp, Aspergillus thermomutatus
  misc_feature: 109
ggtaggcagtatctagtagctccttgatactgggcgggggctccggctcatctgcttcgtctggctggcttgatctgtctggctcgtctggctcgt

SEQ ID NO: 8300 - DNA, 96 bp, Aspergillus thermomutatus
  misc_feature: 109
gggccttagcctgcacctgggcctgctcccaggcctgcatcacctcatcgaccgcagcctggacatggtgggtcgatggggccggtggacacccgt

SEQ ID NO: 8301 - DNA, 96 bp, Aspergillus thermomutatus
  misc_feature: 109
ggcttgtccattctcagttcctttgcaatgcacaattttgaaatcatgctgtgacaatgtctcagcccatctggcttgtcgtcgtgtcaattcttt

SEQ ID NO: 8302 - DNA, 96 bp, Aspergillus thermomutatus
  misc_feature: 109
ggccttagcctgcacctgggcctgctcccaggcctgcatcacctcatcgaccgcagcctggacatggtgggtcgatggggccggtggacacccgtc

SEQ ID NO: 8303 - DNA, 96 bp, Aspergillus thermomutatus
  misc_feature: 109
ggcctggacggtctgctgggccttagcctgcacctgggcctgctcccaggcctgcatcacctcatcgaccgcagcctggacatggtgggtcgatgg

SEQ ID NO: 8304 - DNA, 96 bp, Aspergillus thermomutatus
  misc_feature: 109
ggaaggaattgagaagagaataaggtgaataaggagagaggagaagagaggagatgagaagagaggagatgagaagagatgagaagagaggagagg

SEQ ID NO: 8305 - DNA, 96 bp, Aspergillus thermomutatus
  misc_feature: 109
gaggcgagcacaacggatgcaaggaaaggccattaggaaaccttgatcttcgatttttcgggccaaacttttctttcgaacggatgctttagacgc

SEQ ID NO: 8306 - DNA, 96 bp, Aspergillus thermomutatus
  misc_feature: 109
gcgcggcacggttaggattgctccacgaccgcctacttcggtcgcattgtcacgtgaccaactaccatatacccaagcttggcaatggtagatggt

SEQ ID NO: 8307 - DNA, 96 bp, Aspergillus thermomutatus
  misc_feature: 109
aggatggcagcaggcatgttaggcagcacggcagactacacatcattgagagaggcgtctagagagacaggcagacaggcagacaggcagacaggc

SEQ ID NO: 8308 - DNA, 96 bp, Aspergillus thermomutatus
  misc_feature: 109
ctctttaccgaggcgagcacaacggatgcaaggaaaggccattaggaaaccttgatcttcgatttttcgggccaaacttttctttcgaacggatgc

SEQ ID NO: 8309 - DNA, 96 bp, Aspergillus thermomutatus
  misc_feature: 109
gcagcaggcatgttaggcagcacggcagactacacatcattgagagaggcgtctagagagacaggcagacaggcagacaggcagacaggcagacag

SEQ ID NO: 8310 - DNA, 96 bp, Aspergillus thermomutatus
  misc_feature: 109
gagaagtatagataagggaaaggaagagaggatagaagaatcaaagaagttgaggagaaaggaagggaggaaatattaagagagaagaagaaaagg

SEQ ID NO: 8311 - DNA, 96 bp, Aspergillus thermomutatus
  misc_feature: 109
gaataagaaggaagaataaggaatagagagtaggttaataagtaagggtaagagataattaatagagataggggaaagaggaatgataagggatag

SEQ ID NO: 8312 - DNA, 96 bp, Aspergillus thermomutatus
  misc_feature: 109
ctttaaccctaaaccatctctttttcttctcattctcttctcttcttgttcccttctctccttatcctcttcccgttttctcctcgttgtctcttc

SEQ ID NO: 8313 - DNA, 96 bp, Aspergillus thermomutatus
  misc_feature: 109
atagtaagaaaaaggagagagggagtaaaggggaggtaaggaggaagtaaagaggaaggagagagggaataaaggggaggtaaggaggaaggaaag

SEQ ID NO: 8314 - DNA, 96 bp, Aspergillus thermomutatus
  misc_feature: 109
aggattgctccacgaccgcctacttcggtcgcattgtcacgtgaccaactaccatatacccaagcttggcaatggtagatggtatacaactaccag

SEQ ID NO: 8315 - DNA, 96 bp, Aspergillus thermomutatus
  misc_feature: 109
ctggctggcctggacggtctgctgggccttagcctgcacctgggcctgctcccaggcctgcatcacctcatcgaccgcagcctggacatggtgggt

SEQ ID NO: 8316 - DNA, 96 bp, Aspergillus thermomutatus
  misc_feature: 109
cagttactaatccatgttttacgtctatactcattaaatttgtatttatctcctgaagtaatttctttaaataatctaaatgcttaccagtttcat

SEQ ID NO: 8317 - DNA, 96 bp, Aspergillus thermomutatus
  misc_feature: 109
attgaagaggaagaggataagatagagagatgaatagaataagaaggaagaataaggaatagagagtaggttaataagtaagggtaagagataatt

SEQ ID NO: 8318 - DNA, 96 bp, Aspergillus thermomutatus
  misc_feature: 109
agctcctgcgcggcacggttaggattgctccacgaccgcctacttcggtcgcattgtcacgtgaccaactaccatatacccaagcttggcaatggt

SEQ ID NO: 8319 - DNA, 96 bp, Aspergillus thermomutatus
  misc_feature: 108
tttaaccctaaaccatctctttttcttctcattctcttctcttcttgttcccttctctccttatcctcttcccgttttctcctcgttgtctcttct

SEQ ID NO: 8320 - DNA, 96 bp, Aspergillus thermomutatus
  misc_feature: 108
ttgtcacagcatgatttcaaaattgtgcattgcaaaggaactgagaatggacaagccgacgcacttagtcgacgaccagactatgaattacaagga

SEQ ID NO: 8321 - DNA, 96 bp, Aspergillus thermomutatus
  misc_feature: 108
tacaaccaccaagtacttgcagccacaatcgaactgacagaggatccactgattcaaaaaattattgaagcaacaaaaagggacaaaatcatccaa

SEQ ID NO: 8322 - DNA, 96 bp, Aspergillus thermomutatus
  misc_feature: 108
ttgaagaggaagaggataagatagagagatgaatagaataagaaggaagaataaggaatagagagtaggttaataagtaagggtaagagataatta

SEQ ID NO: 8323 - DNA, 96 bp, Aspergillus thermomutatus
  misc_feature: 108
acgcagggttaggtataaaggcacccacagaggccccatgtaaggcaggcagagaggtagagataggtagagagggacccaagtagcaggccataa

SEQ ID NO: 8324 - DNA, 96 bp, Aspergillus thermomutatus
  misc_feature: 108
ttacccttacttattaacctactctctattccttattcttccttcttattctattcatctctctatcttatcctcttcctcttcaataatccttat

SEQ ID NO: 8325 - DNA, 96 bp, Aspergillus thermomutatus
  misc_feature: 108
ggcagcaggcatgttaggcagcacggcagactacacatcattgagagaggcgtctagagagacaggcagacaggcagacaggcagacaggcagaca

SEQ ID NO: 8326 - DNA, 96 bp, Aspergillus thermomutatus
  misc_feature: 108
tggctggcctggacggtctgctgggccttagcctgcacctgggcctgctcccaggcctgcatcacctcatcgaccgcagcctggacatggtgggtc

SEQ ID NO: 8327 - DNA, 96 bp, Aspergillus thermomutatus
  misc_feature: 108
tctatcttctattactcctataattccccttattcttcctttctgatccattattccttcctttttccttttgaaatccttctatctttctttcca

SEQ ID NO: 8328 - DNA, 96 bp, Aspergillus thermomutatus
  misc_feature: 108
ggatggcagcaggcatgttaggcagcacggcagactacacatcattgagagaggcgtctagagagacaggcagacaggcagacaggcagacaggca

SEQ ID NO: 8329 - DNA, 96 bp, Aspergillus thermomutatus
  misc_feature: 108
tgcctgcctctctatcttcctctctatctacctctctattcacctctctattcacctctctattcacctctctatctacctctctatctccctacc

SEQ ID NO: 8330 - DNA, 96 bp, Aspergillus thermomutatus
  misc_feature: 108
ctactcttggtctgccttactgcctctctccctgtcttacatggtgccttcctccctaccttatattatacattcttcgctacctcacgtggtgca

SEQ ID NO: 8331 - DNA, 96 bp, Aspergillus thermomutatus
  misc_feature: 108
gggggaagttaatgagaaattagaagaaagaagaggagaggagaaggaaagaaaagagaaacagaggagggaaagaagggaagagatgagaagaga

SEQ ID NO: 8332 - DNA, 96 bp, Aspergillus thermomutatus
  misc_feature: 108
ggattattgaagaggaagaggataagatagagagatgaatagaataagaaggaagaataaggaatagagagtaggttaataagtaagggtaagaga

SEQ ID NO: 8333 - DNA, 96 bp, Aspergillus thermomutatus
  misc_feature: 108
aggaattgagaagagaataaggtgaataaggagagaggagaagagaggagatgagaagagaggagatgagaagagatgagaagagaggagaggaga

SEQ ID NO: 8334 - DNA, 96 bp, Aspergillus thermomutatus
  misc_feature: 108
agagtaggttaataagtaagggtaagagataattaatagagataggggaaagaggaatgataagggatagagtaagggatagatagtttagggaga

SEQ ID NO: 8335 - DNA, 96 bp, Aspergillus thermomutatus
  misc_feature: 108
tccttttcttaaatcctacttcttctctttttttcttctttcttttcttaactcttactttcctctcttttatacccctaatactatctcttattc

SEQ ID NO: 8336 - DNA, 96 bp, Aspergillus thermomutatus
  misc_feature: 108
taacaataaggtttaacatctaaattcgtatttaattatagatgtaattaaactagtccttacccttaaaagaaaggacaaggagacagggaagga

SEQ ID NO: 8337 - DNA, 96 bp, Aspergillus thermomutatus
  misc_feature: 108
aggaagggatgttgatggacagtgtgataaggtaagggttatttagtttattaagagagagggaaggaattgagaagagaataaggtgaataagga

SEQ ID NO: 8338 - DNA, 96 bp, Aspergillus thermomutatus
  misc_feature: 108
gaaggaattgagaagagaataaggtgaataaggagagaggagaagagaggagatgagaagagaggagatgagaagagatgagaagagaggagagga

SEQ ID NO: 8339 - DNA, 96 bp, Aspergillus thermomutatus
  misc_feature: 108
agggaaagagaagattaaagcgaagagagtgaaggaagggatgttgatggacagtgtgataaggtaagggttatttagtttattaagagagaggga

SEQ ID NO: 8340 - DNA, 96 bp, Aspergillus thermomutatus
  misc_feature: 108
tccacgaccgcctacttcggtcgcattgtcacgtgaccaactaccatatacccaagcttggcaatggtagatggtatacaactaccagcaacaact

SEQ ID NO: 8341 - DNA, 96 bp, Aspergillus thermomutatus
  misc_feature: 108
tattgaagaggaagaggataagatagagagatgaatagaataagaaggaagaataaggaatagagagtaggttaataagtaagggtaagagataat

SEQ ID NO: 8342 - DNA, 96 bp, Aspergillus thermomutatus
  misc_feature: 108
tattcacctctctattcacctctctattcacctctctatctacctctctatctccctaccccactgtctgcctgtctgcctgtctgcctgtctgcc

SEQ ID NO: 8343 - DNA, 96 bp, Aspergillus thermomutatus
  misc_feature: 108
tattatacattcttcgctacctcacgtggtgcatctctggggctacgtggggtgtgttgatccctactatactacctgccccatatggtcgctctc

SEQ ID NO: 8344 - DNA, 96 bp, Aspergillus thermomutatus
  misc_feature: 108
tatgccataagggatatataactgaatgagaaggtatgtaatagttaaaagttgagcatattccagagagaaaaaggataagggagcagaaggata

SEQ ID NO: 8345 - DNA, 96 bp, Aspergillus thermomutatus
  misc_feature: 108
attattgaagaggaagaggataagatagagagatgaatagaataagaaggaagaataaggaatagagagtaggttaataagtaagggtaagagata

SEQ ID NO: 8346 - DNA, 96 bp, Aspergillus thermomutatus
  misc_feature: 108
ccacgaccgcctacttcggtcgcattgtcacgtgaccaactaccatatacccaagcttggcaatggtagatggtatacaactaccagcaacaacta

SEQ ID NO: 8347 - DNA, 96 bp, Aspergillus thermomutatus
  misc_feature: 108
ggtagggagggaggtagagaggcaccataggaggtatggagcaatgcaccgcgtgaggcacccccagatatgccatgcaaggtttggaccaaggta

SEQ ID NO: 8348 - DNA, 96 bp, Aspergillus thermomutatus
  misc_feature: 108
cgcggcacggttaggattgctccacgaccgcctacttcggtcgcattgtcacgtgaccaactaccatatacccaagcttggcaatggtagatggta

SEQ ID NO: 8349 - DNA, 96 bp, Aspergillus thermomutatus
  misc_feature: 108
taatatttcctcccttcctttctcctcaacttctttgattcttctatcctctcttcctttcccttatctatacttctcataaactacaattcctta

SEQ ID NO: 8350 - DNA, 96 bp, Aspergillus thermomutatus
  misc_feature: 108
ctccacgaccgcctacttcggtcgcattgtcacgtgaccaactaccatatacccaagcttggcaatggtagatggtatacaactaccagcaacaac

SEQ ID NO: 8351 - DNA, 96 bp, Aspergillus thermomutatus
  misc_feature: 108
ggcacggttaggattgctccacgaccgcctacttcggtcgcattgtcacgtgaccaactaccatatacccaagcttggcaatggtagatggtatac

SEQ ID NO: 8352 - DNA, 96 bp, Aspergillus thermomutatus
  misc_feature: 108
ctgcctgcctctctatcttcctctctatctacctctctattcacctctctattcacctctctattcacctctctatctacctctctatctccctac

SEQ ID NO: 8353 - DNA, 96 bp, Aspergillus thermomutatus
  misc_feature: 108
aatatttcctcccttcctttctcctcaacttctttgattcttctatcctctcttcctttcccttatctatacttctcataaactacaattccttac

SEQ ID NO: 8354 - DNA, 96 bp, Aspergillus thermomutatus
  misc_feature: 108
ggtgacaggaaagaacaaaatgacaggaggagcaaggtagagaggtagaggttaatttttaatagtattagaaatgttatatcaatcaattatttt

SEQ ID NO: 8355 - DNA, 96 bp, Aspergillus thermomutatus
  misc_feature: 108
gggtcccactatatccatattcgcgttccagacgggtgtccaccggccccatcgacccaccatgtccaggctgcggtcgatgaggtgatgcaggcc

SEQ ID NO: 8356 - DNA, 96 bp, Aspergillus thermomutatus
  misc_feature: 108
gggaaggaattgagaagagaataaggtgaataaggagagaggagaagagaggagatgagaagagaggagatgagaagagatgagaagagaggagag

SEQ ID NO: 8357 - DNA, 96 bp, Aspergillus thermomutatus
  misc_feature: 108
ggcatgttaggcagcacggcagactacacatcattgagagaggcgtctagagagacaggcagacaggcagacaggcagacaggcagacagtggggt

SEQ ID NO: 8358 - DNA, 96 bp, Aspergillus thermomutatus
  misc_feature: 108
atccttctcctctctttccactttcctctctttaaccctaaaccatctctttttcttctcattctcttctcttcttgttcccttctctccttatcc

SEQ ID NO: 8359 - DNA, 96 bp, Aspergillus thermomutatus
  misc_feature: 108
ggaggtagggagggaggtagagaggcaccataggaggtatggagcaatgcaccgcgtgaggcacccccagatatgccatgcaaggtttggaccaag

SEQ ID NO: 8360 - DNA, 96 bp, Aspergillus thermomutatus
  misc_feature: 108
ctcctctctttccactttcctctctttaaccctaaaccatctctttttcttctcattctcttctcttcttgttcccttctctccttatcctcttcc

SEQ ID NO: 8361 - DNA, 96 bp, Aspergillus thermomutatus
  misc_feature: 108
gcggcacggttaggattgctccacgaccgcctacttcggtcgcattgtcacgtgaccaactaccatatacccaagcttggcaatggtagatggtat

SEQ ID NO: 8362 - DNA, 96 bp, Aspergillus thermomutatus
  misc_feature: 108
gcgatgtccctcatcctcagaactctcgggtacttcctctggaaacagtgctgtgacgtattcattgtcatccgtgggtgcccatcccatctgttc

SEQ ID NO: 8363 - DNA, 96 bp, Aspergillus thermomutatus
  misc_feature: 108
ctagtcatccgcagccaggggttcgcatcagtcagctggctggcctggacggtctgctgggccttagcctgcacctgggcctgctcccaggcctgc

SEQ ID NO: 8364 - DNA, 96 bp, Aspergillus thermomutatus
  misc_feature: 108
gattattgaagaggaagaggataagatagagagatgaatagaataagaaggaagaataaggaatagagagtaggttaataagtaagggtaagagat

SEQ ID NO: 8365 - DNA, 96 bp, Aspergillus thermomutatus
  misc_feature: 108
ctggcgacacccaaccccttccaccacccccatataatctgcgactcgttcctgatcctctggcgataccccctccatccacggtgctggcgcatc

SEQ ID NO: 8366 - DNA, 96 bp, Aspergillus thermomutatus
  misc_feature: 108
gagaagagaggagatgagaagagatgagaagagaggagaggagatgagaagagaagagaacaagaataaatgggaatgaaagagacgaattaatgg

SEQ ID NO: 8367 - DNA, 96 bp, Aspergillus thermomutatus
  misc_feature: 108
gaactttctggatctctacaagggagcacgaaaagcactatcaccttctaatatcagcagcggatttagggcttctggcctggttccattgaattg

SEQ ID NO: 8368 - DNA, 96 bp, Aspergillus thermomutatus
  misc_feature: 108
gaacaaaatgacaggaggagcaaggtagagaggtagaggttaatttttaatagtattagaaatgttatatcaatcaattattttaatactaaagag

SEQ ID NO: 8369 - DNA, 96 bp, Aspergillus thermomutatus
  misc_feature: 108
cttctatcttctattactcctataattccccttattcttcctttctgatccattattccttcctttttccttttgaaatccttctatctttctttc

SEQ ID NO: 8370 - DNA, 96 bp, Aspergillus thermomutatus
  misc_feature: 108
cttgctacctctcttgctacctctcttactacctctcttgctacctctctactggctttactccctaccttggtccctacgtatttgcctacctct

SEQ ID NO: 8371 - DNA, 96 bp, Aspergillus thermomutatus
  misc_feature: 108
aaaagccacgcagggttaggtataaaggcacccacagaggccccatgtaaggcaggcagagaggtagagataggtagagagggacccaagtagcag

SEQ ID NO: 8372 - DNA, 96 bp, Aspergillus thermomutatus
  misc_feature: 108
ctgctacaacaagaaatcagggttctacgggcagagaatgaacggaaaagaaagaagaaggcaagaatacgtgctaatctaggtggtgataccatt

SEQ ID NO: 8373 - DNA, 96 bp, Aspergillus thermomutatus
  misc_feature: 108
ctgcgcggcacggttaggattgctccacgaccgcctacttcggtcgcattgtcacgtgaccaactaccatatacccaagcttggcaatggtagatg

SEQ ID NO: 8374 - DNA, 96 bp, Aspergillus thermomutatus
  misc_feature: 108
aaggaattgagaagagaataaggtgaataaggagagaggagaagagaggagatgagaagagaggagatgagaagagatgagaagagaggagaggag

SEQ ID NO: 8375 - DNA, 96 bp, Aspergillus thermomutatus
  misc_feature: 108
ctccctactatctgcggttcctcactccctaccatactacctacctcctgcagtacctctcttgctacctctcttgctacctctcttgctacctct

SEQ ID NO: 8376 - DNA, 96 bp, Aspergillus thermomutatus
  misc_feature: 108
ctaccccttctatccttcttcttattcatcctttcttttttttttcttttctaatcctaaaaatctcatctccttctctaatctctttgattactt

SEQ ID NO: 8377 - DNA, 96 bp, Aspergillus thermomutatus
  misc_feature: 108
aatagagagtaggttaataagtaagggtaagagataattaatagagataggggaaagaggaatgataagggatagagtaagggatagatagtttag

SEQ ID NO: 8378 - DNA, 96 bp, Aspergillus thermomutatus
  misc_feature: 108
cagaagccattgcaaagcgagttcgcacgcgcgtatcaggcgcctgcaaggtcgtgtcccgaccggacatgaggtcagcacctccgccattagacg

SEQ ID NO: 8379 - DNA, 96 bp, Aspergillus thermomutatus
  misc_feature: 108
aaggaagggatgttgatggacagtgtgataaggtaagggttatttagtttattaagagagagggaaggaattgagaagagaataaggtgaataagg

SEQ ID NO: 8380 - DNA, 96 bp, Aspergillus thermomutatus
  misc_feature: 108
cctggcgacacccaaccccttccaccacccccatataatctgcgactcgttcctgatcctctggcgataccccctccatccacggtgctggcgcat

SEQ ID NO: 8381 - DNA, 96 bp, Aspergillus thermomutatus
  misc_feature: 108
atttcttggatgattttgtccctttttgttgcttcaataattttttgaatcagtggatcctctgtcagttcgattgtggctgcaagtacttggtgg

SEQ ID NO: 8382 - DNA, 96 bp, Aspergillus thermomutatus
  misc_feature: 108
cattttccttttcttaaatcctacttcttctctttttttcttctttcttttcttaactcttactttcctctcttttatacccctaatactatctct

SEQ ID NO: 8383 - DNA, 96 bp, Aspergillus thermomutatus
  misc_feature: 108
agcaggcatgttaggcagcacggcagactacacatcattgagagaggcgtctagagagacaggcagacaggcagacaggcagacaggcagacagtg

SEQ ID NO: 8384 - DNA, 96 bp, Aspergillus thermomutatus
  misc_feature: 108
atttcctcccttcctttctcctcaacttctttgattcttctatcctctcttcctttcccttatctatacttctcataaactacaattccttactct

SEQ ID NO: 8385 - DNA, 96 bp, Aspergillus thermomutatus
  misc_feature: 108
aagaggaatgataagggatagagtaagggatagatagtttagggagaggagggggtagaaaggtttagagataaagagaggaataagagatagtat

SEQ ID NO: 8386 - DNA, 96 bp, Aspergillus thermomutatus
  misc_feature: 108
agagaagatgagatgatataagggaaagagaagattaaagcgaagagagtgaaggaagggatgttgatggacagtgtgataaggtaagggttattt

SEQ ID NO: 8387 - DNA, 96 bp, Aspergillus thermomutatus
  misc_feature: 108
aactttctggatctctacaagggagcacgaaaagcactatcaccttctaatatcagcagcggatttagggcttctggcctggttccattgaattgt

SEQ ID NO: 8388 - DNA, 96 bp, Aspergillus thermomutatus
  misc_feature: 107
tttcttcttctctcttaatatttcctcccttcctttctcctcaacttctttgattcttctatcctctcttcctttcccttatctatacttctcata

SEQ ID NO: 8389 - DNA, 96 bp, Aspergillus thermomutatus
  misc_feature: 107
tttcctttactctctttcccttctaaattccatcttccttcttctctttctctttcttatcctttctattcttaaaataaactatccctccctcct

SEQ ID NO: 8390 - DNA, 96 bp, Aspergillus thermomutatus
  misc_feature: 107
ccaaggtagggagtaaagccagtagagaggcaccatgtcaggtagcaagagaggtagcaagagaggtagcaagagaggtagcaagagaggtagcaa

SEQ ID NO: 8391 - DNA, 96 bp, Aspergillus thermomutatus
  misc_feature: 107
ttcttggatgattttgtccctttttgttgcttcaataattttttgaatcagtggatcctctgtcagttcgattgtggctgcaagtacttggtggtt

SEQ ID NO: 8392 - DNA, 96 bp, Aspergillus thermomutatus
  misc_feature: 107
ttctctcttaatatttcctcccttcctttctcctcaacttctttgattcttctatcctctcttcctttcccttatctatacttctcataaactaca

SEQ ID NO: 8393 - DNA, 96 bp, Aspergillus thermomutatus
  misc_feature: 107
ttctacgtgctattctacgtgctattctacgtgctattctacgtgctattctacatgctattcgacgtgctattctatgtgctattcaacctgccg

SEQ ID NO: 8394 - DNA, 96 bp, Aspergillus thermomutatus
  misc_feature: 107
ttcctttactctctttcccttctaaattccatcttccttcttctctttctctttcttatcctttctattcttaaaataaactatccctccctcctt

SEQ ID NO: 8395 - DNA, 96 bp, Aspergillus thermomutatus
  misc_feature: 107
ttcctcccttcctttctcctcaacttctttgattcttctatcctctcttcctttcccttatctatacttctcataaactacaattccttactcttt

SEQ ID NO: 8396 - DNA, 96 bp, Aspergillus thermomutatus
  misc_feature: 107
aaagaatgagaagggaacgaggtgagaaggtaaagagaaagtaaagagaatgataagagaggagaatgagaagagacaacgaggagaaaacgggaa

SEQ ID NO: 8397 - DNA, 96 bp, Aspergillus thermomutatus
  misc_feature: 107
acaagaagagaagagaatgagaagaaaaagagatggtttagggttaaagagaggaaagtggaaagagaggagaaggataaagtgaagtgacgggaa

SEQ ID NO: 8398 - DNA, 96 bp, Aspergillus thermomutatus
  misc_feature: 107
tggcgacacccaaccccttccaccacccccatataatctgcgactcgttcctgatcctctggcgataccccctccatccacggtgctggcgcatcc

SEQ ID NO: 8399 - DNA, 96 bp, Aspergillus thermomutatus
  misc_feature: 107
gccacgcagggttaggtataaaggcacccacagaggccccatgtaaggcaggcagagaggtagagataggtagagagggacccaagtagcaggcca

SEQ ID NO: 8400 - DNA, 96 bp, Aspergillus thermomutatus
  misc_feature: 107
taaaagccacgcagggttaggtataaaggcacccacagaggccccatgtaaggcaggcagagaggtagagataggtagagagggacccaagtagca

SEQ ID NO: 8401 - DNA, 96 bp, Aspergillus thermomutatus
  misc_feature: 107
tgctacaacaagaaatcagggttctacgggcagagaatgaacggaaaagaaagaagaaggcaagaatacgtgctaatctaggtggtgataccattt

SEQ ID NO: 8402 - DNA, 96 bp, Aspergillus thermomutatus
  misc_feature: 107
agaacaaaatgacaggaggagcaaggtagagaggtagaggttaatttttaatagtattagaaatgttatatcaatcaattattttaatactaaaga

SEQ ID NO: 8403 - DNA, 96 bp, Aspergillus thermomutatus
  misc_feature: 107
tcttctctcttaatatttcctcccttcctttctcctcaacttctttgattcttctatcctctcttcctttcccttatctatacttctcataaacta

SEQ ID NO: 8404 - DNA, 96 bp, Aspergillus thermomutatus
  misc_feature: 107
agaagtaagtataagagtaaggattagtgattttagaaataaaggagtaaaaagtcgatgagagtagagaagatgagatgatataagggaaagaga

SEQ ID NO: 8405 - DNA, 96 bp, Aspergillus thermomutatus
  misc_feature: 107
ggtagggagtaaagccagtagagaggcaccatgtcaggtagcaagagaggtagcaagagaggtagcaagagaggtagcaagagaggtagcaagaga

SEQ ID NO: 8406 - DNA, 96 bp, Aspergillus thermomutatus
  misc_feature: 107
catagtaatatatgtaggtatataaaagccacgcagggttaggtataaaggcacccacagaggccccatgtaaggcagggttaaggcaggcagaga

SEQ ID NO: 8407 - DNA, 96 bp, Aspergillus thermomutatus
  misc_feature: 107
gacagtggggtagggagatagagaggtagatagagaggtgaatagagaggtgaatagagaggtgaatagagaggtagatagagaggaagatagaga

SEQ ID NO: 8408 - DNA, 96 bp, Aspergillus thermomutatus
  misc_feature: 107
tctcctctctttccactttcctctctttaaccctaaaccatctctttttcttctcattctcttctcttcttgttcccttctctccttatcctcttc

SEQ ID NO: 8409 - DNA, 96 bp, Aspergillus thermomutatus
  misc_feature: 107
tctatattccctttactttactaaatcctcttctcatcttccctctctctcttaaattctttcttaaactattaattcctctctctttctcactcc

SEQ ID NO: 8410 - DNA, 96 bp, Aspergillus thermomutatus
  misc_feature: 107
tcgttctattttctcttctctctctttctatccttcttttccaccctcctccttttacaacctataatttctactaaccctcactcttatcctcat

SEQ ID NO: 8411 - DNA, 96 bp, Aspergillus thermomutatus
  misc_feature: 107
tcggcttgtccattctcagttcctttgcaatgcacaattttgaaatcatgctgtgacaatgtctcagcccatctggcttgtcgtcgtgtcaattct

SEQ ID NO: 8412 - DNA, 96 bp, Aspergillus thermomutatus
  misc_feature: 107
agaagtatagataagggaaaggaagagaggatagaagaatcaaagaagttgaggagaaaggaagggaggaaatattaagagagaagaagaaaagga

SEQ ID NO: 8413 - DNA, 96 bp, Aspergillus thermomutatus
  misc_feature: 107
tcctcccttcctttctcctcaacttctttgattcttctatcctctcttcctttcccttatctatacttctcataaactacaattccttactctttc

SEQ ID NO: 8414 - DNA, 96 bp, Aspergillus thermomutatus
  misc_feature: 107
tcctcattctcactctactcctctctcttatcctcattctaaccctcactccttcctccctctaatcctccctctaatcctccctctaatcctccc

SEQ ID NO: 8415 - DNA, 96 bp, Aspergillus thermomutatus
  misc_feature: 107
aacaagaagagaagagaatgagaagaaaaagagatggtttagggttaaagagaggaaagtggaaagagaggagaaggataaagtgaagtgacggga

SEQ ID NO: 8416 - DNA, 96 bp, Aspergillus thermomutatus
  misc_feature: 107
aaggcaccgtataagcaccaaatcagatagagagatatagagagaggtatccaagaggtagatatagtagtaggcatagtttccagcattataata

SEQ ID NO: 8417 - DNA, 96 bp, Aspergillus thermomutatus
  misc_feature: 107
cacgcagggttaggtataaaggcacccacagaggccccatgtaaggcaggcagagaggtagagataggtagagagggacccaagtagcaggccata

SEQ ID NO: 8418 - DNA, 96 bp, Aspergillus thermomutatus
  misc_feature: 107
cggcacggttaggattgctccacgaccgcctacttcggtcgcattgtcacgtgaccaactaccatatacccaagcttggcaatggtagatggtata

SEQ ID NO: 8419 - DNA, 96 bp, Aspergillus thermomutatus
  misc_feature: 107
tagagaagatgagatgatataagggaaagagaagattaaagcgaagagagtgaaggaagggatgttgatggacagtgtgataaggtaagggttatt

SEQ ID NO: 8420 - DNA, 96 bp, Aspergillus thermomutatus
  misc_feature: 107
tactcttggtctgccttactgcctctctccctgtcttacatggtgccttcctccctaccttatattatacattcttcgctacctcacgtggtgcat

SEQ ID NO: 8421 - DNA, 96 bp, Aspergillus thermomutatus
  misc_feature: 107
gaaagaatagataaatttccccctaaaccttcacctaatagagatattagtatacctaatttactaaataagcctaaattattaaacaaataggta

SEQ ID NO: 8422 - DNA, 96 bp, Aspergillus thermomutatus
  misc_feature: 107
taatccttactctgatcctgactctgatccttactctcatccttactctcatccttactctcatccttatccctaatccttatactaaccttactc

SEQ ID NO: 8423 - DNA, 96 bp, Aspergillus thermomutatus
  misc_feature: 107
taagtataagagtaaggattagtgattttagaaataaaggagtaaaaagtcgatgagagtagagaagatgagatgatataagggaaagagaagatt

SEQ ID NO: 8424 - DNA, 96 bp, Aspergillus thermomutatus
  misc_feature: 107
taagggaaagagaagattaaagcgaagagagtgaaggaagggatgttgatggacagtgtgataaggtaagggttatttagtttattaagagagagg

SEQ ID NO: 8425 - DNA, 96 bp, Aspergillus thermomutatus
  misc_feature: 107
cttacccttacttattaacctactctctattccttattcttccttcttattctattcatctctctatcttatcctcttcctcttcaataatcctta

SEQ ID NO: 8426 - DNA, 96 bp, Aspergillus thermomutatus
  misc_feature: 107
gaatagagagtaggttaataagtaagggtaagagataattaatagagataggggaaagaggaatgataagggatagagtaagggatagatagttta

SEQ ID NO: 8427 - DNA, 96 bp, Aspergillus thermomutatus
  misc_feature: 107
gttctattttctcttctctctctttctatccttcttttccaccctcctccttttacaacctataatttctactaaccctcactcttatcctcattc

SEQ ID NO: 8428 - DNA, 96 bp, Aspergillus thermomutatus
  misc_feature: 107
gtctatattccctttactttactaaatcctcttctcatcttccctctctctcttaaattctttcttaaactattaattcctctctctttctcactc

SEQ ID NO: 8429 - DNA, 96 bp, Aspergillus thermomutatus
  misc_feature: 107
ccagaagccattgcaaagcgagttcgcacgcgcgtatcaggcgcctgcaaggtcgtgtcccgaccggacatgaggtcagcacctccgccattagac

SEQ ID NO: 8430 - DNA, 96 bp, Aspergillus thermomutatus
  misc_feature: 107
cttctctcttaatatttcctcccttcctttctcctcaacttctttgattcttctatcctctcttcctttcccttatctatacttctcataaactac

SEQ ID NO: 8431 - DNA, 96 bp, Aspergillus thermomutatus
  misc_feature: 107
gtagggagggaggtagagaggcaccataggaggtatggagcaatgcaccgcgtgaggcacccccagatatgccatgcaaggtttggaccaaggtag

SEQ ID NO: 8432 - DNA, 96 bp, Aspergillus thermomutatus
  misc_feature: 107
gtaagggataggataggataggaaaaaagaaaagatttagaaatagaagattaaaggtaaagaggaagggatagagagaggattagagtaagggtt

SEQ ID NO: 8433 - DNA, 96 bp, Aspergillus thermomutatus
  misc_feature: 107
ggggtcccactatatccatattcgcgttccagacgggtgtccaccggccccatcgacccaccatgtccaggctgcggtcgatgaggtgatgcaggc

SEQ ID NO: 8434 - DNA, 96 bp, Aspergillus thermomutatus
  misc_feature: 107
gggaaatttatctattctttccaaatatgcctcatgagtatttttacattctttccaaatatgcctcatgagtatttatactattaattatagtat

SEQ ID NO: 8435 - DNA, 96 bp, Aspergillus thermomutatus
  misc_feature: 107
ggctggcctggacggtctgctgggccttagcctgcacctgggcctgctcccaggcctgcatcacctcatcgaccgcagcctggacatggtgggtcg

SEQ ID NO: 8436 - DNA, 96 bp, Aspergillus thermomutatus
  misc_feature: 107
agccacgcagggttaggtataaaggcacccacagaggccccatgtaaggcaggcagagaggtagagataggtagagagggacccaagtagcaggcc

SEQ ID NO: 8437 - DNA, 96 bp, Aspergillus thermomutatus
  misc_feature: 107
cgggcgcgcgcgcgcgcgagcattaggcggcagcggtccggggcaggccagcaggcaggggggcgcgcgcgcggcggtgaccagttggccggggcc

SEQ ID NO: 8438 - DNA, 96 bp, Aspergillus thermomutatus
  misc_feature: 107
aatccttactctgatcctgactctgatccttactctcatccttactctcatccttactctcatccttatccctaatccttatactaaccttactcc

SEQ ID NO: 8439 - DNA, 96 bp, Aspergillus thermomutatus
  misc_feature: 107
ctttcctttactctctttcccttctaaattccatcttccttcttctctttctctttcttatcctttctattcttaaaataaactatccctccctcc

SEQ ID NO: 8440 - DNA, 96 bp, Aspergillus thermomutatus
  misc_feature: 107
ggagatgagaagagaggagatgagaagagatgagaagagaggagaggagatgagaagagaagagaacaagaataaatgggaatgaaagagacgaat

SEQ ID NO: 8441 - DNA, 96 bp, Aspergillus thermomutatus
  misc_feature: 107
ggagagaggcaagagaataaggagaataataagggataggatagaaaaaagaaacaaaagaaagagaagattttaaggaagataggataggagtag

SEQ ID NO: 8442 - DNA, 96 bp, Aspergillus thermomutatus
  misc_feature: 107
ggaccaaggtagggagtaaagccagtagagaggcaccatgtcaggtagcaagagaggtagcaagagaggtagcaagagaggtagcaagagaggtag

SEQ ID NO: 8443 - DNA, 96 bp, Aspergillus thermomutatus
  misc_feature: 107
ataaaagccacgcagggttaggtataaaggcacccacagaggccccatgtaaggcaggcagagaggtagagataggtagagagggacccaagtagc

SEQ ID NO: 8444 - DNA, 96 bp, Aspergillus thermomutatus
  misc_feature: 107
gcgggcgcgcgcgcgcgcgagcattaggcggcagcggtccggggcaggccagcaggcaggggggcgcgcgcgcggcggtgaccagttggccggggc

SEQ ID NO: 8445 - DNA, 96 bp, Aspergillus thermomutatus
  misc_feature: 107
aagccacgcagggttaggtataaaggcacccacagaggccccatgtaaggcaggcagagaggtagagataggtagagagggacccaagtagcaggc

SEQ ID NO: 8446 - DNA, 96 bp, Aspergillus thermomutatus
  misc_feature: 107
gcatagtaatatatgtaggtatataaaagccacgcagggttaggtataaaggcacccacagaggccccatgtaaggcagggttaaggcaggcagag

SEQ ID NO: 8447 - DNA, 96 bp, Aspergillus thermomutatus
  misc_feature: 107
gatagtaagggataggataggataggaaaaaagaaaagatttagaaatagaagattaaaggtaaagaggaagggatagagagaggattagagtaag

SEQ ID NO: 8448 - DNA, 96 bp, Aspergillus thermomutatus
  misc_feature: 107
gaggattagagggaggattagagggaggattagagggaggattagagggaggaaggagtgagggttagaatgaggataagagagaggagtagagtg

SEQ ID NO: 8449 - DNA, 96 bp, Aspergillus thermomutatus
  misc_feature: 107
ccttctcctctctttccactttcctctctttaaccctaaaccatctctttttcttctcattctcttctcttcttgttcccttctctccttatcctc

SEQ ID NO: 8450 - DNA, 96 bp, Aspergillus thermomutatus
  misc_feature: 107
gagatgagaagagaggagatgagaagagatgagaagagaggagaggagatgagaagagaagagaacaagaataaatgggaatgaaagagacgaatt

SEQ ID NO: 8451 - DNA, 96 bp, Aspergillus thermomutatus
  misc_feature: 107
cctcttttctccttcttattctcttcttattttcctcttgttcttattctcttctctttctctttgattctccctcttctctcttgacctctcttc

SEQ ID NO: 8452 - DNA, 96 bp, Aspergillus thermomutatus
  misc_feature: 107
gaaaaaggagagagggagtaaaggggaggtaaggaggaagtaaagaggaaggagagagggaataaaggggaggtaaggaggaaggaaagaggaagg

SEQ ID NO: 8453 - DNA, 96 bp, Aspergillus thermomutatus
  misc_feature: 107
aagaatgagaagggaacgaggtgagaaggtaaagagaaagtaaagagaatgataagagaggagaatgagaagagacaacgaggagaaaacgggaag

SEQ ID NO: 8454 - DNA, 96 bp, Aspergillus thermomutatus
  misc_feature: 107
caagaagagaagagaatgagaagaaaaagagatggtttagggttaaagagaggaaagtggaaagagaggagaaggataaagtgaagtgacgggaag

SEQ ID NO: 8455 - DNA, 96 bp, Aspergillus thermomutatus
  misc_feature: 107
cgcagggttaggtataaaggcacccacagaggccccatgtaaggcaggcagagaggtagagataggtagagagggacccaagtagcaggccataag

SEQ ID NO: 8456 - DNA, 96 bp, Aspergillus thermomutatus
  misc_feature: 107
atagtaatatatgtaggtatataaaagccacgcagggttaggtataaaggcacccacagaggccccatgtaaggcagggttaaggcaggcagagag

SEQ ID NO: 8457 - DNA, 96 bp, Aspergillus thermomutatus
  misc_feature: 107
ataagggaaagagaagattaaagcgaagagagtgaaggaagggatgttgatggacagtgtgataaggtaagggttatttagtttattaagagagag

SEQ ID NO: 8458 - DNA, 96 bp, Aspergillus thermomutatus
  misc_feature: 107
ctcctcttttctccttcttattctcttcttattttcctcttgttcttattctcttctctttctctttgattctccctcttctctcttgacctctct

SEQ ID NO: 8459 - DNA, 96 bp, Aspergillus thermomutatus
  misc_feature: 107
acagtgtgataaggtaagggttatttagtttattaagagagagggaaggaattgagaagagaataaggtgaataaggagagaggagaagagaggag

SEQ ID NO: 8460 - DNA, 96 bp, Aspergillus thermomutatus
  misc_feature: 107
cgttctattttctcttctctctctttctatccttcttttccaccctcctccttttacaacctataatttctactaaccctcactcttatcctcatt

SEQ ID NO: 8461 - DNA, 96 bp, Aspergillus thermomutatus
  misc_feature: 107
cctggacggtctgctgggccttagcctgcacctgggcctgctcccaggcctgcatcacctcatcgaccgcagcctggacatggtgggtcgatgggg

SEQ ID NO: 8462 - DNA, 96 bp, Aspergillus thermomutatus
  misc_feature: 107
aaagccacgcagggttaggtataaaggcacccacagaggccccatgtaaggcaggcagagaggtagagataggtagagagggacccaagtagcagg

SEQ ID NO: 8463 - DNA, 96 bp, Aspergillus thermomutatus
  misc_feature: 107
cctcattctcactctactcctctctcttatcctcattctaaccctcactccttcctccctctaatcctccctctaatcctccctctaatcctccct

SEQ ID NO: 8464 - DNA, 96 bp, Aspergillus thermomutatus
  misc_feature: 107
cctaccccttctatccttcttcttattcatcctttcttttttttttcttttctaatcctaaaaatctcatctccttctctaatctctttgattact

SEQ ID NO: 8465 - DNA, 96 bp, Aspergillus thermomutatus
  misc_feature: 107
atgttaggcagcacggcagactacacatcattgagagaggcgtctagagagacaggcagacaggcagacaggcagacaggcagacagtggggtagg

SEQ ID NO: 8466 - DNA, 96 bp, Aspergillus thermomutatus
  misc_feature: 107
acctgtgaccctggaaaaggaagagaagaagataaagttaccgacttacgccctgttagacaccggagctgaaggacgaggatttattgaccaggg

SEQ ID NO: 8467 - DNA, 96 bp, Aspergillus thermomutatus
  misc_feature: 107
aatgataagggatagagtaagggatagatagtttagggagaggagggggtagaaaggtttagagataaagagaggaataagagatagtattagggg

SEQ ID NO: 8468 - DNA, 96 bp, Aspergillus thermomutatus
  misc_feature: 107
ccacgcagggttaggtataaaggcacccacagaggccccatgtaaggcaggcagagaggtagagataggtagagagggacccaagtagcaggccat

SEQ ID NO: 8469 - DNA, 96 bp, Aspergillus thermomutatus
  misc_feature: 107
aggcagcacggcagactacacatcattgagagaggcgtctagagagacaggcagacaggcagacaggcagacaggcagacagtggggtagggagat

SEQ ID NO: 8470 - DNA, 96 bp, Aspergillus thermomutatus
  misc_feature: 107
atcccttactctttctaaaacctaactcttaccctcctttttcttctctttcctttactctctttcccttctaaattccatcttccttcttctctt

SEQ ID NO: 8471 - DNA, 96 bp, Aspergillus thermomutatus
  misc_feature: 107
atatttcctcccttcctttctcctcaacttctttgattcttctatcctctcttcctttcccttatctatacttctcataaactacaattccttact

SEQ ID NO: 8472 - DNA, 96 bp, Aspergillus thermomutatus
  misc_feature: 107
atattatacattcttcgctacctcacgtggtgcatctctggggctacgtggggtgtgttgatccctactatactacctgccccatatggtcgctct

SEQ ID NO: 8473 - DNA, 96 bp, Aspergillus thermomutatus
  misc_feature: 107
aggagagaagggaacaagaagagaagagaatgagaagaaaaagagatggtttagggttaaagagaggaaagtggaaagagaggagaaggataaagt

SEQ ID NO: 8474 - DNA, 96 bp, Aspergillus thermomutatus
  misc_feature: 107
agaggaatgataagggatagagtaagggatagatagtttagggagaggagggggtagaaaggtttagagataaagagaggaataagagatagtatt

SEQ ID NO: 8475 - DNA, 96 bp, Aspergillus thermomutatus
  misc_feature: 107
agaactttctggatctctacaagggagcacgaaaagcactatcaccttctaatatcagcagcggatttagggcttctggcctggttccattgaatt

SEQ ID NO: 8476 - DNA, 96 bp, Aspergillus thermomutatus
  misc_feature: 107
aataagctgcatctgcttttgtacctcagcagtagtatagggagtctttgctgtccattccccatctgaaggcccatgagcagtagaggggggtgt

SEQ ID NO: 8477 - DNA, 96 bp, Aspergillus thermomutatus
  misc_feature: 106
ttttcttcttctctcttaatatttcctcccttcctttctcctcaacttctttgattcttctatcctctcttcctttcccttatctatacttctcat

SEQ ID NO: 8478 - DNA, 96 bp, Aspergillus thermomutatus
  misc_feature: 106
ttttccttttcttaaatcctacttcttctctttttttcttctttcttttcttaactcttactttcctctcttttatacccctaatactatctctta

SEQ ID NO: 8479 - DNA, 96 bp, Aspergillus thermomutatus
  misc_feature: 106
tttctaccttgcacggcgcctctctccctactatctgcggttcctcactccctaccatactacctacctcctgcagtacctctcttgctacctctc

SEQ ID NO: 8480 - DNA, 96 bp, Aspergillus thermomutatus
  misc_feature: 106
tttcccttctaaattccatcttccttcttctctttctctttcttatcctttctattcttaaaataaactatccctccctccttttcttcttctctc

SEQ ID NO: 8481 - DNA, 96 bp, Aspergillus thermomutatus
  misc_feature: 106
tctctcttaatatttcctcccttcctttctcctcaacttctttgattcttctatcctctcttcctttcccttatctatacttctcataaactacaa

SEQ ID NO: 8482 - DNA, 96 bp, Aspergillus thermomutatus
  misc_feature: 106
ttctcattctcctctcttatcattctctttactttctctttaccttctcacctcgttcccttctcattcttttctattcttgttcttttctctctt

SEQ ID NO: 8483 - DNA, 96 bp, Aspergillus thermomutatus
  misc_feature: 106
ttctatatctacctcttggatacctctctctatatctctctatctgatttggtggcttatacggtgccttactccccaccattctacctacctgtc

SEQ ID NO: 8484 - DNA, 96 bp, Aspergillus thermomutatus
  misc_feature: 106
aggagatgagaagagaggagatgagaagagatgagaagagaggagaggagatgagaagagaagagaacaagaataaatgggaatgaaagagacgaa

SEQ ID NO: 8485 - DNA, 96 bp, Aspergillus thermomutatus
  misc_feature: 106
ttccttttcttaaatcctacttcttctctttttttcttctttcttttcttaactcttactttcctctcttttatacccctaatactatctcttatt

SEQ ID NO: 8486 - DNA, 96 bp, Aspergillus thermomutatus
  misc_feature: 106
ttatctcctttctttcttctcttcccttctctctccctatcctctaatctatccttattttatctcctttttaattttaaattcctatttcctaat

SEQ ID NO: 8487 - DNA, 96 bp, Aspergillus thermomutatus
  misc_feature: 106
agatagtaagggataggataggataggaaaaaagaaaagatttagaaatagaagattaaaggtaaagaggaagggatagagagaggattagagtaa

SEQ ID NO: 8488 - DNA, 96 bp, Aspergillus thermomutatus
  misc_feature: 106
tgaagaggaagaggataagatagagagatgaatagaataagaaggaagaataaggaatagagagtaggttaataagtaagggtaagagataattaa

SEQ ID NO: 8489 - DNA, 96 bp, Aspergillus thermomutatus
  misc_feature: 106
gggagggaggtagagaggcaccataggaggtatggagcaatgcaccgcgtgaggcacccccagatatgccatgcaaggtttggaccaaggtagcca

SEQ ID NO: 8490 - DNA, 96 bp, Aspergillus thermomutatus
  misc_feature: 106
ctttttgttgcttcaataattttttgaatcagtggatcctctgtcagttcgattgtggctgcaagtacttggtggttgtatgtcaatgatccatca

SEQ ID NO: 8491 - DNA, 96 bp, Aspergillus thermomutatus
  misc_feature: 106
cttttcttcttctctcttaatatttcctcccttcctttctcctcaacttctttgattcttctatcctctcttcctttcccttatctatacttctca

SEQ ID NO: 8492 - DNA, 96 bp, Aspergillus thermomutatus
  misc_feature: 106
gaggagatgagaagagatgagaagagaggagaggagatgagaagagaagagaacaagaataaatgggaatgaaagagacgaattaatggttaaaga

SEQ ID NO: 8493 - DNA, 96 bp, Aspergillus thermomutatus
  misc_feature: 106
agaatgagaagggaacgaggtgagaaggtaaagagaaagtaaagagaatgataagagaggagaatgagaagagacaacgaggagaaaacgggaaga

SEQ ID NO: 8494 - DNA, 96 bp, Aspergillus thermomutatus
  misc_feature: 106
aaggattattgaagaggaagaggataagatagagagatgaatagaataagaaggaagaataaggaatagagagtaggttaataagtaagggtaaga

SEQ ID NO: 8495 - DNA, 96 bp, Aspergillus thermomutatus
  misc_feature: 106
tctcattctcctctcttatcattctctttactttctctttaccttctcacctcgttcccttctcattcttttctattcttgttcttttctctcttc

SEQ ID NO: 8496 - DNA, 96 bp, Aspergillus thermomutatus
  misc_feature: 106
gagagaggcaagagaataaggagaataataagggataggatagaaaaaagaaacaaaagaaagagaagattttaaggaagataggataggagtaga

SEQ ID NO: 8497 - DNA, 96 bp, Aspergillus thermomutatus
  misc_feature: 106
tcgatcaccagcaatacagctcctgcgcggcacggttaggattgctccacgaccgcctacttcggtcgcattgtcacgtgaccaactaccatatac

SEQ ID NO: 8498 - DNA, 96 bp, Aspergillus thermomutatus
  misc_feature: 106
tccttctcctctctttccactttcctctctttaaccctaaaccatctctttttcttctcattctcttctcttcttgttcccttctctccttatcct

SEQ ID NO: 8499 - DNA, 96 bp, Aspergillus thermomutatus
  misc_feature: 106
gatgttgatggacagtgtgataaggtaagggttatttagtttattaagagagagggaaggaattgagaagagaataaggtgaataaggagagagga

SEQ ID NO: 8500 - DNA, 96 bp, Aspergillus thermomutatus
  misc_feature: 106
aaaagaatgagaagggaacgaggtgagaaggtaaagagaaagtaaagagaatgataagagaggagaatgagaagagacaacgaggagaaaacggga

SEQ ID NO: 8501 - DNA, 96 bp, Aspergillus thermomutatus
  misc_feature: 106
aggattagagggaggattagagggaggattagagggaggattagagggaggaaggagtgagggttagaatgaggataagagagaggagtagagtga

SEQ ID NO: 8502 - DNA, 96 bp, Aspergillus thermomutatus
  misc_feature: 106
tcacctctctattcacctctctattcacctctctatctacctctctatctccctaccccactgtctgcctgtctgcctgtctgcctgtctgcctgt

SEQ ID NO: 8503 - DNA, 96 bp, Aspergillus thermomutatus
  misc_feature: 106
tatctcctttctttcttctcttcccttctctctccctatcctctaatctatccttattttatctcctttttaattttaaattcctatttcctaatc

SEQ ID NO: 8504 - DNA, 96 bp, Aspergillus thermomutatus
  misc_feature: 106
tagggggaaatttatctattctttccaaatatgcctcatgagtatttttacattctttccaaatatgcctcatgagtatttatactattaattata

SEQ ID NO: 8505 - DNA, 96 bp, Aspergillus thermomutatus
  misc_feature: 106
tagggaggtagggagggaggtagagaggcaccataggaggtatggagcaatgcaccgcgtgaggcacccccagatatgccatgcaaggtttggacc

SEQ ID NO: 8506 - DNA, 96 bp, Aspergillus thermomutatus
  misc_feature: 106
ccttgcacggcgcctctctccctactatctgcggttcctcactccctaccatactacctacctcctgcagtacctctcttgctacctctcttgcta

SEQ ID NO: 8507 - DNA, 96 bp, Aspergillus thermomutatus
  misc_feature: 106
ggggaaatttatctattctttccaaatatgcctcatgagtatttttacattctttccaaatatgcctcatgagtatttatactattaattatagta

SEQ ID NO: 8508 - DNA, 96 bp, Aspergillus thermomutatus
  misc_feature: 106
agatgagaagagaggagatgagaagagatgagaagagaggagaggagatgagaagagaagagaacaagaataaatgggaatgaaagagacgaatta

SEQ ID NO: 8509 - DNA, 96 bp, Aspergillus thermomutatus
  misc_feature: 106
taagggataggataggataggaaaaaagaaaagatttagaaatagaagattaaaggtaaagaggaagggatagagagaggattagagtaagggttg

SEQ ID NO: 8510 - DNA, 96 bp, Aspergillus thermomutatus
  misc_feature: 106
taaggcaccgtataagcaccaaatcagatagagagatatagagagaggtatccaagaggtagatatagtagtaggcatagtttccagcattataat

SEQ ID NO: 8511 - DNA, 96 bp, Aspergillus thermomutatus
  misc_feature: 106
cccttctaaattccatcttccttcttctctttctctttcttatcctttctattcttaaaataaactatccctccctccttttcttcttctctctta

SEQ ID NO: 8512 - DNA, 96 bp, Aspergillus thermomutatus
  misc_feature: 106
cttcttctctcttaatatttcctcccttcctttctcctcaacttctttgattcttctatcctctcttcctttcccttatctatacttctcataaac

SEQ ID NO: 8513 - DNA, 96 bp, Aspergillus thermomutatus
  misc_feature: 106
gtagggaggtagggagggaggtagagaggcaccataggaggtatggagcaatgcaccgcgtgaggcacccccagatatgccatgcaaggtttggac

SEQ ID NO: 8514 - DNA, 96 bp, Aspergillus thermomutatus
  misc_feature: 106
cacgaccgcctacttcggtcgcattgtcacgtgaccaactaccatatacccaagcttggcaatggtagatggtatacaactaccagcaacaactac

SEQ ID NO: 8515 - DNA, 96 bp, Aspergillus thermomutatus
  misc_feature: 106
gcctgcctctctatcttcctctctatctacctctctattcacctctctattcacctctctattcacctctctatctacctctctatctccctaccc

SEQ ID NO: 8516 - DNA, 96 bp, Aspergillus thermomutatus
  misc_feature: 106
gggggagccagggagcataccgaagaggattaatctgctcagatttcgggagtgatagcacgcggcgtgcgaaccggctagttgggcggcctgtct

SEQ ID NO: 8517 - DNA, 96 bp, Aspergillus thermomutatus
  misc_feature: 106
gggggaaatttatctattctttccaaatatgcctcatgagtatttttacattctttccaaatatgcctcatgagtatttatactattaattatagt

SEQ ID NO: 8518 - DNA, 96 bp, Aspergillus thermomutatus
  misc_feature: 106
ggacggtctgctgggccttagcctgcacctgggcctgctcccaggcctgcatcacctcatcgaccgcagcctggacatggtgggtcgatggggccg

SEQ ID NO: 8519 - DNA, 96 bp, Aspergillus thermomutatus
  misc_feature: 106
gctttctaccttgcacggcgcctctctccctactatctgcggttcctcactccctaccatactacctacctcctgcagtacctctcttgctacctc

SEQ ID NO: 8520 - DNA, 96 bp, Aspergillus thermomutatus
  misc_feature: 106
caatacagctcctgcgcggcacggttaggattgctccacgaccgcctacttcggtcgcattgtcacgtgaccaactaccatatacccaagcttggc

SEQ ID NO: 8521 - DNA, 96 bp, Aspergillus thermomutatus
  misc_feature: 106
gcaatacagctcctgcgcggcacggttaggattgctccacgaccgcctacttcggtcgcattgtcacgtgaccaactaccatatacccaagcttgg

SEQ ID NO: 8522 - DNA, 96 bp, Aspergillus thermomutatus
  misc_feature: 106
cctttttgttgcttcaataattttttgaatcagtggatcctctgtcagttcgattgtggctgcaagtacttggtggttgtatgtcaatgatccatc

SEQ ID NO: 8523 - DNA, 96 bp, Aspergillus thermomutatus
  misc_feature: 106
cctctaatcctccctctaatcctccctctaatcctccctctaatcctctttctaatcctccctctaatcctctttctatccctccctctaatcctc

SEQ ID NO: 8524 - DNA, 96 bp, Aspergillus thermomutatus
  misc_feature: 106
ctggtaggcagtatctagtagctccttgatactgggcgggggctccggctcatctgcttcgtctggctggcttgatctgtctggctcgtctggctc

SEQ ID NO: 8525 - DNA, 96 bp, Aspergillus thermomutatus
  misc_feature: 106
gacggtctgctgggccttagcctgcacctgggcctgctcccaggcctgcatcacctcatcgaccgcagcctggacatggtgggtcgatggggccgg

SEQ ID NO: 8526 - DNA, 96 bp, Aspergillus thermomutatus
  misc_feature: 106
ctgtgttggttgttcaaacagttccctatactgctcatgctcttctggcaatgagatctgatccgtagaagttgccgctaactctcgcgatccttc

SEQ ID NO: 8527 - DNA, 96 bp, Aspergillus thermomutatus
  misc_feature: 106
gaagaggaagaggataagatagagagatgaatagaataagaaggaagaataaggaatagagagtaggttaataagtaagggtaagagataattaat

SEQ ID NO: 8528 - DNA, 96 bp, Aspergillus thermomutatus
  misc_feature: 106
gaaaagaatgagaagggaacgaggtgagaaggtaaagagaaagtaaagagaatgataagagaggagaatgagaagagacaacgaggagaaaacggg

SEQ ID NO: 8529 - DNA, 96 bp, Aspergillus thermomutatus
  misc_feature: 106
ctttctaccttgcacggcgcctctctccctactatctgcggttcctcactccctaccatactacctacctcctgcagtacctctcttgctacctct

SEQ ID NO: 8530 - DNA, 96 bp, Aspergillus thermomutatus
  misc_feature: 106
ctttcccttctaaattccatcttccttcttctctttctctttcttatcctttctattcttaaaataaactatccctccctccttttcttcttctct

SEQ ID NO: 8531 - DNA, 96 bp, Aspergillus thermomutatus
  misc_feature: 106
agaggagatgagaagagatgagaagagaggagaggagatgagaagagaagagaacaagaataaatgggaatgaaagagacgaattaatggttaaag

SEQ ID NO: 8532 - DNA, 96 bp, Aspergillus thermomutatus
  misc_feature: 106
aagtaagtataagagtaaggattagtgattttagaaataaaggagtaaaaagtcgatgagagtagagaagatgagatgatataagggaaagagaag

SEQ ID NO: 8533 - DNA, 96 bp, Aspergillus thermomutatus
  misc_feature: 106
ctcttggtctgccttactgcctctctccctgtcttacatggtgccttcctccctaccttatattatacattcttcgctacctcacgtggtgcatct

SEQ ID NO: 8534 - DNA, 96 bp, Aspergillus thermomutatus
  misc_feature: 106
aggattattgaagaggaagaggataagatagagagatgaatagaataagaaggaagaataaggaatagagagtaggttaataagtaagggtaagag

SEQ ID NO: 8535 - DNA, 96 bp, Aspergillus thermomutatus
  misc_feature: 106
atataagggaaagagaagattaaagcgaagagagtgaaggaagggatgttgatggacagtgtgataaggtaagggttatttagtttattaagagag

SEQ ID NO: 8536 - DNA, 96 bp, Aspergillus thermomutatus
  misc_feature: 106
atgttgatggacagtgtgataaggtaagggttatttagtttattaagagagagggaaggaattgagaagagaataaggtgaataaggagagaggag

SEQ ID NO: 8537 - DNA, 96 bp, Aspergillus thermomutatus
  misc_feature: 106
agaggaagaggataagatagagagatgaatagaataagaaggaagaataaggaatagagagtaggttaataagtaagggtaagagataattaatag

SEQ ID NO: 8538 - DNA, 96 bp, Aspergillus thermomutatus
  misc_feature: 106
catgttaggcagcacggcagactacacatcattgagagaggcgtctagagagacaggcagacaggcagacaggcagacaggcagacagtggggtag

SEQ ID NO: 8539 - DNA, 96 bp, Aspergillus thermomutatus
  misc_feature: 106
cggcttgtccattctcagttcctttgcaatgcacaattttgaaatcatgctgtgacaatgtctcagcccatctggcttgtcgtcgtgtcaattctt

SEQ ID NO: 8540 - DNA, 96 bp, Aspergillus thermomutatus
  misc_feature: 106
aggggtcccactatatccatattcgcgttccagacgggtgtccaccggccccatcgacccaccatgtccaggctgcggtcgatgaggtgatgcagg

SEQ ID NO: 8541 - DNA, 96 bp, Aspergillus thermomutatus
  misc_feature: 106
cctagtcatccgcagccaggggttcgcatcagtcagctggctggcctggacggtctgctgggccttagcctgcacctgggcctgctcccaggcctg

SEQ ID NO: 8542 - DNA, 96 bp, Aspergillus thermomutatus
  misc_feature: 106
agtatagataagggaaaggaagagaggatagaagaatcaaagaagttgaggagaaaggaagggaggaaatattaagagagaagaagaaaaggaggg

SEQ ID NO: 8543 - DNA, 96 bp, Aspergillus thermomutatus
  misc_feature: 106
ccctactatctgcggttcctcactccctaccatactacctacctcctgcagtacctctcttgctacctctcttgctacctctcttgctacctctct

SEQ ID NO: 8544 - DNA, 96 bp, Aspergillus thermomutatus
  misc_feature: 106
aggcatgttaggcagcacggcagactacacatcattgagagaggcgtctagagagacaggcagacaggcagacaggcagacaggcagacagtgggg

SEQ ID NO: 8545 - DNA, 96 bp, Aspergillus thermomutatus
  misc_feature: 106
caggcatgttaggcagcacggcagactacacatcattgagagaggcgtctagagagacaggcagacaggcagacaggcagacaggcagacagtggg

SEQ ID NO: 8546 - DNA, 96 bp, Aspergillus thermomutatus
  misc_feature: 106
aagggataggataggataggaaaaaagaaaagatttagaaatagaagattaaaggtaaagaggaagggatagagagaggattagagtaagggttgg

SEQ ID NO: 8547 - DNA, 96 bp, Aspergillus thermomutatus
  misc_feature: 106
agtcagctggctggcctggacggtctgctgggccttagcctgcacctgggcctgctcccaggcctgcatcacctcatcgaccgcagcctggacatg

SEQ ID NO: 8548 - DNA, 96 bp, Aspergillus thermomutatus
  misc_feature: 106
attttccttttcttaaatcctacttcttctctttttttcttctttcttttcttaactcttactttcctctcttttatacccctaatactatctctt

SEQ ID NO: 8549 - DNA, 96 bp, Aspergillus thermomutatus
  misc_feature: 106
atccttactctgatcctgactctgatccttactctcatccttactctcatccttactctcatccttatccctaatccttatactaaccttactcct

SEQ ID NO: 8550 - DNA, 96 bp, Aspergillus thermomutatus
  misc_feature: 106
agcgatgtccctcatcctcagaactctcgggtacttcctctggaaacagtgctgtgacgtattcattgtcatccgtgggtgcccatcccatctgtt

SEQ ID NO: 8551 - DNA, 96 bp, Aspergillus thermomutatus
  misc_feature: 105
tttccttttcttaaatcctacttcttctctttttttcttctttcttttcttaactcttactttcctctcttttatacccctaatactatctcttat

SEQ ID NO: 8552 - DNA, 96 bp, Aspergillus thermomutatus
  misc_feature: 105
cacggttaggattgctccacgaccgcctacttcggtcgcattgtcacgtgaccaactaccatatacccaagcttggcaatggtagatggtatacaa

SEQ ID NO: 8553 - DNA, 96 bp, Aspergillus thermomutatus
  misc_feature: 105
gggaggtagggagggaggtagagaggcaccataggaggtatggagcaatgcaccgcgtgaggcacccccagatatgccatgcaaggtttggaccaa

SEQ ID NO: 8554 - DNA, 96 bp, Aspergillus thermomutatus
  misc_feature: 105
ttgggggagccagggagcataccgaagaggattaatctgctcagatttcgggagtgatagcacgcggcgtgcgaaccggctagttgggcggcctgt

SEQ ID NO: 8555 - DNA, 96 bp, Aspergillus thermomutatus
  misc_feature: 105
ttgataaaatatactataattaatagtataaatactcatgaggcatatttggaaagaatgtaaaaatactcatgaggcatatttggaaagaataga

SEQ ID NO: 8556 - DNA, 96 bp, Aspergillus thermomutatus
  misc_feature: 105
ttcttcttctctcttaatatttcctcccttcctttctcctcaacttctttgattcttctatcctctcttcctttcccttatctatacttctcataa

SEQ ID NO: 8557 - DNA, 96 bp, Aspergillus thermomutatus
  misc_feature: 105
ttcttctctcttaatatttcctcccttcctttctcctcaacttctttgattcttctatcctctcttcctttcccttatctatacttctcataaact

SEQ ID NO: 8558 - DNA, 96 bp, Aspergillus thermomutatus
  misc_feature: 105
ttctcctctctttccactttcctctctttaaccctaaaccatctctttttcttctcattctcttctcttcttgttcccttctctccttatcctctt

SEQ ID NO: 8559 - DNA, 96 bp, Aspergillus thermomutatus
  misc_feature: 105
caacgaggagaaaacgggaagaggataaggagagaagggaacaagaagagaagagaatgagaagaaaaagagatggtttagggttaaagagaggaa

SEQ ID NO: 8560 - DNA, 96 bp, Aspergillus thermomutatus
  misc_feature: 105
ttcccttctaaattccatcttccttcttctctttctctttcttatcctttctattcttaaaataaactatccctccctccttttcttcttctctct

SEQ ID NO: 8561 - DNA, 96 bp, Aspergillus thermomutatus
  misc_feature: 105
ttcatgtctatattccctttactttactaaatcctcttctcatcttccctctctctcttaaattctttcttaaactattaattcctctctctttct

SEQ ID NO: 8562 - DNA, 96 bp, Aspergillus thermomutatus
  misc_feature: 105
gcacggttaggattgctccacgaccgcctacttcggtcgcattgtcacgtgaccaactaccatatacccaagcttggcaatggtagatggtataca

SEQ ID NO: 8563 - DNA, 96 bp, Aspergillus thermomutatus
  misc_feature: 105
agggaggtagggagggaggtagagaggcaccataggaggtatggagcaatgcaccgcgtgaggcacccccagatatgccatgcaaggtttggacca

SEQ ID NO: 8564 - DNA, 96 bp, Aspergillus thermomutatus
  misc_feature: 105
tggtaggcagtatctagtagctccttgatactgggcgggggctccggctcatctgcttcgtctggctggcttgatctgtctggctcgtctggctcg

SEQ ID NO: 8565 - DNA, 96 bp, Aspergillus thermomutatus
  misc_feature: 105
tgggggagccagggagcataccgaagaggattaatctgctcagatttcgggagtgatagcacgcggcgtgcgaaccggctagttgggcggcctgtc

SEQ ID NO: 8566 - DNA, 96 bp, Aspergillus thermomutatus
  misc_feature: 105
tggcctggacggtctgctgggccttagcctgcacctgggcctgctcccaggcctgcatcacctcatcgaccgcagcctggacatggtgggtcgatg

SEQ ID NO: 8567 - DNA, 96 bp, Aspergillus thermomutatus
  misc_feature: 105
tggagagaggcaagagaataaggagaataataagggataggatagaaaaaagaaacaaaagaaagagaagattttaaggaagataggataggagta

SEQ ID NO: 8568 - DNA, 96 bp, Aspergillus thermomutatus
  misc_feature: 105
tgataaaatatactataattaatagtataaatactcatgaggcatatttggaaagaatgtaaaaatactcatgaggcatatttggaaagaatagat

SEQ ID NO: 8569 - DNA, 96 bp, Aspergillus thermomutatus
  misc_feature: 105
ctattttctcttctctctctttctatccttcttttccaccctcctccttttacaacctataatttctactaaccctcactcttatcctcattctca

SEQ ID NO: 8570 - DNA, 96 bp, Aspergillus thermomutatus
  misc_feature: 105
cacaacggatgcaaggaaaggccattaggaaaccttgatcttcgatttttcgggccaaacttttctttcgaacggatgctttagacgccatggtca

SEQ ID NO: 8571 - DNA, 96 bp, Aspergillus thermomutatus
  misc_feature: 105
gagtaattatagtaatggttaaagagagaataagaaaagaagagaagataaaagagagagagatttttagttaggattaaagatagtaaaaagaga

SEQ ID NO: 8572 - DNA, 96 bp, Aspergillus thermomutatus
  misc_feature: 105
tataagggaaagagaagattaaagcgaagagagtgaaggaagggatgttgatggacagtgtgataaggtaagggttatttagtttattaagagaga

SEQ ID NO: 8573 - DNA, 96 bp, Aspergillus thermomutatus
  misc_feature: 105
gaagggatgttgatggacagtgtgataaggtaagggttatttagtttattaagagagagggaaggaattgagaagagaataaggtgaataaggaga

SEQ ID NO: 8574 - DNA, 96 bp, Aspergillus thermomutatus
  misc_feature: 105
tctattttctcttctctctctttctatccttcttttccaccctcctccttttacaacctataatttctactaaccctcactcttatcctcattctc

SEQ ID NO: 8575 - DNA, 96 bp, Aspergillus thermomutatus
  misc_feature: 105
tcctttactctctttcccttctaaattccatcttccttcttctctttctctttcttatcctttctattcttaaaataaactatccctccctccttt

SEQ ID NO: 8576 - DNA, 96 bp, Aspergillus thermomutatus
  misc_feature: 105
tcctcttttctccttcttattctcttcttattttcctcttgttcttattctcttctctttctctttgattctccctcttctctcttgacctctctt

SEQ ID NO: 8577 - DNA, 96 bp, Aspergillus thermomutatus
  misc_feature: 105
tcccttctaaattccatcttccttcttctctttctctttcttatcctttctattcttaaaataaactatccctccctccttttcttcttctctctt

SEQ ID NO: 8578 - DNA, 96 bp, Aspergillus thermomutatus
  misc_feature: 105
tattaatcctaccccttctatccttcttcttattcatcctttcttttttttttcttttctaatcctaaaaatctcatctccttctctaatctcttt

SEQ ID NO: 8579 - DNA, 96 bp, Aspergillus thermomutatus
  misc_feature: 105
tataaaagccacgcagggttaggtataaaggcacccacagaggccccatgtaaggcaggcagagaggtagagataggtagagagggacccaagtag

SEQ ID NO: 8580 - DNA, 96 bp, Aspergillus thermomutatus
  misc_feature: 105
tagggagggaggtagagaggcaccataggaggtatggagcaatgcaccgcgtgaggcacccccagatatgccatgcaaggtttggaccaaggtagc

SEQ ID NO: 8581 - DNA, 96 bp, Aspergillus thermomutatus
  misc_feature: 105
ctctaatccttactctgatcctgactctgatccttactctcatccttactctcatccttactctcatccttatccctaatccttatactaacctta

SEQ ID NO: 8582 - DNA, 96 bp, Aspergillus thermomutatus
  misc_feature: 105
acggttaggattgctccacgaccgcctacttcggtcgcattgtcacgtgaccaactaccatatacccaagcttggcaatggtagatggtatacaac

SEQ ID NO: 8583 - DNA, 96 bp, Aspergillus thermomutatus
  misc_feature: 105
gcacttagtcgacgaccagactatgaattacaaggaaaaacagtcgagccagcaattcttcgacaaaacagtgatggatcattgacatacaaccac

SEQ ID NO: 8584 - DNA, 96 bp, Aspergillus thermomutatus
  misc_feature: 105
gtagatagtaagggataggataggataggaaaaaagaaaagatttagaaatagaagattaaaggtaaagaggaagggatagagagaggattagagt

SEQ ID NO: 8585 - DNA, 96 bp, Aspergillus thermomutatus
  misc_feature: 105
gtaagaaaaaggagagagggagtaaaggggaggtaaggaggaagtaaagaggaaggagagagggaataaaggggaggtaaggaggaaggaaagagg

SEQ ID NO: 8586 - DNA, 96 bp, Aspergillus thermomutatus
  misc_feature: 105
aggcctgcatcacctcatcgaccgcagcctggacatggtgggtcgatggggccggtggacacccgtctggaacgcgaatatggatatagtgggacc

SEQ ID NO: 8587 - DNA, 96 bp, Aspergillus thermomutatus
  misc_feature: 105
agggagggaggtagagaggcaccataggaggtatggagcaatgcaccgcgtgaggcacccccagatatgccatgcaaggtttggaccaaggtagcc

SEQ ID NO: 8588 - DNA, 96 bp, Aspergillus thermomutatus
  misc_feature: 105
acgaatcaccctgctgccagagatgccgaagcctttgctaagaaaatgcaagatgtcattgactatgtacgcgcccagatccgcgttgcccaggcc

SEQ ID NO: 8589 - DNA, 96 bp, Aspergillus thermomutatus
  misc_feature: 105
ggaatctcatctacatacctgagtgtatgagaaccgaaatcatcgcgaaacaccacgatgacccaatgcatggtcatatgggaacagaaaaaacgg

SEQ ID NO: 8590 - DNA, 96 bp, Aspergillus thermomutatus
  misc_feature: 105
aggtctccggtggcggttcgtctgttcttcataacgggcctgggcaacgcggatctgggcgcgtacatagtcaatgacatcttgcattttcttagc

SEQ ID NO: 8591 - DNA, 96 bp, Aspergillus thermomutatus
  misc_feature: 105
gccgttttttctgttcccatatgaccatgcattgggtcatcgtggtgtttcgcgatgatttcggttctcatacactcaggtatgtagatgagattc

SEQ ID NO: 8592 - DNA, 96 bp, Aspergillus thermomutatus
  misc_feature: 105
ctggacggtctgctgggccttagcctgcacctgggcctgctcccaggcctgcatcacctcatcgaccgcagcctggacatggtgggtcgatggggc

SEQ ID NO: 8593 - DNA, 96 bp, Aspergillus thermomutatus
  misc_feature: 105
atgttgtgtttcttcattgctgaccatggcgtctaaagcatccgttcgaaagaaaagtttggcccgaaaaatcgaagatcaaggtttcctaatggc

SEQ ID NO: 8594 - DNA, 96 bp, Aspergillus thermomutatus
  misc_feature: 105
gcagggttaggtataaaggcacccacagaggccccatgtaaggcaggcagagaggtagagataggtagagagggacccaagtagcaggccataagg

SEQ ID NO: 8595 - DNA, 96 bp, Aspergillus thermomutatus
  misc_feature: 105
gaagagaggagatgagaagagatgagaagagaggagaggagatgagaagagaagagaacaagaataaatgggaatgaaagagacgaattaatggtt

SEQ ID NO: 8596 - DNA, 96 bp, Aspergillus thermomutatus
  misc_feature: 105
aactatcccttactctttctaaaacctaactcttaccctcctttttcttctctttcctttactctctttcccttctaaattccatcttccttcttc

SEQ ID NO: 8597 - DNA, 96 bp, Aspergillus thermomutatus
  misc_feature: 105
gaacaagaagagaagagaatgagaagaaaaagagatggtttagggttaaagagaggaaagtggaaagagaggagaaggataaagtgaagtgacggg

SEQ ID NO: 8598 - DNA, 96 bp, Aspergillus thermomutatus
  misc_feature: 105
cttcatgtctatattccctttactttactaaatcctcttctcatcttccctctctctcttaaattctttcttaaactattaattcctctctctttc

SEQ ID NO: 8599 - DNA, 96 bp, Aspergillus thermomutatus
  misc_feature: 105
cttctcctctctttccactttcctctctttaaccctaaaccatctctttttcttctcattctcttctcttcttgttcccttctctccttatcctct

SEQ ID NO: 8600 - DNA, 96 bp, Aspergillus thermomutatus
  misc_feature: 105
cttctatatctacctcttggatacctctctctatatctctctatctgatttggtggcttatacggtgccttactccccaccattctacctacctgt

SEQ ID NO: 8601 - DNA, 96 bp, Aspergillus thermomutatus
  misc_feature: 105
cttaaatcctacttcttctctttttttcttctttcttttcttaactcttactttcctctcttttatacccctaatactatctcttattcctctctt

SEQ ID NO: 8602 - DNA, 96 bp, Aspergillus thermomutatus
  misc_feature: 105
ctcttattaatcctaccccttctatccttcttcttattcatcctttcttttttttttcttttctaatcctaaaaatctcatctccttctctaatct

SEQ ID NO: 8603 - DNA, 96 bp, Aspergillus thermomutatus
  misc_feature: 105
agtagatagtaagggataggataggataggaaaaaagaaaagatttagaaatagaagattaaaggtaaagaggaagggatagagagaggattagag

SEQ ID NO: 8604 - DNA, 96 bp, Aspergillus thermomutatus
  misc_feature: 105
attggagagaggcaagagaataaggagaataataagggataggatagaaaaaagaaacaaaagaaagagaagattttaaggaagataggataggag

SEQ ID NO: 8605 - DNA, 96 bp, Aspergillus thermomutatus
  misc_feature: 105
ctaatccttactctgatcctgactctgatccttactctcatccttactctcatccttactctcatccttatccctaatccttatactaaccttact

SEQ ID NO: 8606 - DNA, 96 bp, Aspergillus thermomutatus
  misc_feature: 105
cggaatctcatctacatacctgagtgtatgagaaccgaaatcatcgcgaaacaccacgatgacccaatgcatggtcatatgggaacagaaaaaacg

SEQ ID NO: 8607 - DNA, 96 bp, Aspergillus thermomutatus
  misc_feature: 105
ccctctaatcctccctctaatcctccctctaatcctccctctaatcctctttctaatcctccctctaatcctctttctatccctccctctaatcct

SEQ ID NO: 8608 - DNA, 96 bp, Aspergillus thermomutatus
  misc_feature: 105
aggcaccgtataagcaccaaatcagatagagagatatagagagaggtatccaagaggtagatatagtagtaggcatagtttccagcattataatat

SEQ ID NO: 8609 - DNA, 96 bp, Aspergillus thermomutatus
  misc_feature: 104
tttgcggaatctcatctacatacctgagtgtatgagaaccgaaatcatcgcgaaacaccacgatgacccaatgcatggtcatatgggaacagaaaa

SEQ ID NO: 8610 - DNA, 96 bp, Aspergillus thermomutatus
  misc_feature: 104
ttttctcttctctctctttctatccttcttttccaccctcctccttttacaacctataatttctactaaccctcactcttatcctcattctcactc

SEQ ID NO: 8611 - DNA, 96 bp, Aspergillus thermomutatus
  misc_feature: 104
tttgataaaatatactataattaatagtataaatactcatgaggcatatttggaaagaatgtaaaaatactcatgaggcatatttggaaagaatag

SEQ ID NO: 8612 - DNA, 96 bp, Aspergillus thermomutatus
  misc_feature: 104
atttgcggaatctcatctacatacctgagtgtatgagaaccgaaatcatcgcgaaacaccacgatgacccaatgcatggtcatatgggaacagaaa

SEQ ID NO: 8613 - DNA, 96 bp, Aspergillus thermomutatus
  misc_feature: 104
tttctcctcgttgtctcttctcattctcctctcttatcattctctttactttctctttaccttctcacctcgttcccttctcattcttttctattc

SEQ ID NO: 8614 - DNA, 96 bp, Aspergillus thermomutatus
  misc_feature: 104
gagaggagatgagaagagatgagaagagaggagaggagatgagaagagaagagaacaagaataaatgggaatgaaagagacgaattaatggttaaa

SEQ ID NO: 8615 - DNA, 96 bp, Aspergillus thermomutatus
  misc_feature: 104
ttggagagaggcaagagaataaggagaataataagggataggatagaaaaaagaaacaaaagaaagagaagattttaaggaagataggataggagt

SEQ ID NO: 8616 - DNA, 96 bp, Aspergillus thermomutatus
  misc_feature: 104
tgcgtcggcttgtccattctcagttcctttgcaatgcacaattttgaaatcatgctgtgacaatgtctcagcccatctggcttgtcgtcgtgtcaa

SEQ ID NO: 8617 - DNA, 96 bp, Aspergillus thermomutatus
  misc_feature: 104
tatttgcggaatctcatctacatacctgagtgtatgagaaccgaaatcatcgcgaaacaccacgatgacccaatgcatggtcatatgggaacagaa

SEQ ID NO: 8618 - DNA, 96 bp, Aspergillus thermomutatus
  misc_feature: 104
gaagtaagtataagagtaaggattagtgattttagaaataaaggagtaaaaagtcgatgagagtagagaagatgagatgatataagggaaagagaa

SEQ ID NO: 8619 - DNA, 96 bp, Aspergillus thermomutatus
  misc_feature: 104
ttcacctctctattcacctctctattcacctctctatctacctctctatctccctaccccactgtctgcctgtctgcctgtctgcctgtctgcctg

SEQ ID NO: 8620 - DNA, 96 bp, Aspergillus thermomutatus
  misc_feature: 104
cagcaggcaaaacagcaggcagaacggtaggcagaacggcaggcagaacggtaggcagaacggcaggcagaacggcaggttgaatagcaggttgaa

SEQ ID NO: 8621 - DNA, 96 bp, Aspergillus thermomutatus
  misc_feature: 104
taagggatagagtaagggatagatagtttagggagaggagggggtagaaaggtttagagataaagagaggaataagagatagtattaggggtataa

SEQ ID NO: 8622 - DNA, 96 bp, Aspergillus thermomutatus
  misc_feature: 104
ttaatatttcctcccttcctttctcctcaacttctttgattcttctatcctctcttcctttcccttatctatacttctcataaactacaattcctt

SEQ ID NO: 8623 - DNA, 96 bp, Aspergillus thermomutatus
  misc_feature: 104
ttaaccctaaaccatctctttttcttctcattctcttctcttcttgttcccttctctccttatcctcttcccgttttctcctcgttgtctcttctc

SEQ ID NO: 8624 - DNA, 96 bp, Aspergillus thermomutatus
  misc_feature: 104
agagaggagatgagaagagatgagaagagaggagaggagatgagaagagaagagaacaagaataaatgggaatgaaagagacgaattaatggttaa

SEQ ID NO: 8625 - DNA, 96 bp, Aspergillus thermomutatus
  misc_feature: 104
tgttgtgtttcttcattgctgaccatggcgtctaaagcatccgttcgaaagaaaagtttggcccgaaaaatcgaagatcaaggtttcctaatggcc

SEQ ID NO: 8626 - DNA, 96 bp, Aspergillus thermomutatus
  misc_feature: 104
tggctgcacatacttcttgatagcggcctcgttcatgtatgccagcagcggccggtatggggtctgcccccgctcagaccgcacggcttccacctg

SEQ ID NO: 8627 - DNA, 96 bp, Aspergillus thermomutatus
  misc_feature: 104
tggacggtctgctgggccttagcctgcacctgggcctgctcccaggcctgcatcacctcatcgaccgcagcctggacatggtgggtcgatggggcc

SEQ ID NO: 8628 - DNA, 96 bp, Aspergillus thermomutatus
  misc_feature: 104
aatacagctcctgcgcggcacggttaggattgctccacgaccgcctacttcggtcgcattgtcacgtgaccaactaccatatacccaagcttggca

SEQ ID NO: 8629 - DNA, 96 bp, Aspergillus thermomutatus
  misc_feature: 104
gtgcgtcggcttgtccattctcagttcctttgcaatgcacaattttgaaatcatgctgtgacaatgtctcagcccatctggcttgtcgtcgtgtca

SEQ ID NO: 8630 - DNA, 96 bp, Aspergillus thermomutatus
  misc_feature: 104
tctttcccttctaaattccatcttccttcttctctttctctttcttatcctttctattcttaaaataaactatccctccctccttttcttcttctc

SEQ ID NO: 8631 - DNA, 96 bp, Aspergillus thermomutatus
  misc_feature: 104
agatagagagatgaatagaataagaaggaagaataaggaatagagagtaggttaataagtaagggtaagagataattaatagagataggggaaaga

SEQ ID NO: 8632 - DNA, 96 bp, Aspergillus thermomutatus
  misc_feature: 104
tcttattaatcctaccccttctatccttcttcttattcatcctttcttttttttttcttttctaatcctaaaaatctcatctccttctctaatctc

SEQ ID NO: 8633 - DNA, 96 bp, Aspergillus thermomutatus
  misc_feature: 104
agaaggaaagaaaagagaaacagaggagggaaagaagggaagagatgagaagagaggagaaggaggagagaggccaagagaagagaggtcaagaga

SEQ ID NO: 8634 - DNA, 96 bp, Aspergillus thermomutatus
  misc_feature: 104
gagagggagtaaaggggaggtaaggaggaagtaaagaggaaggagagagggaataaaggggaggtaaggaggaaggaaagaggaaggaaagagaga

SEQ ID NO: 8635 - DNA, 96 bp, Aspergillus thermomutatus
  misc_feature: 104
tctaatccttactctgatcctgactctgatccttactctcatccttactctcatccttactctcatccttatccctaatccttatactaaccttac

SEQ ID NO: 8636 - DNA, 96 bp, Aspergillus thermomutatus
  misc_feature: 104
acaacgaggagaaaacgggaagaggataaggagagaagggaacaagaagagaagagaatgagaagaaaaagagatggtttagggttaaagagagga

SEQ ID NO: 8637 - DNA, 96 bp, Aspergillus thermomutatus
  misc_feature: 104
agagagtaggttaataagtaagggtaagagataattaatagagataggggaaagaggaatgataagggatagagtaagggatagatagtttaggga

SEQ ID NO: 8638 - DNA, 96 bp, Aspergillus thermomutatus
  misc_feature: 104
tcatgtctatattccctttactttactaaatcctcttctcatcttccctctctctcttaaattctttcttaaactattaattcctctctctttctc

SEQ ID NO: 8639 - DNA, 96 bp, Aspergillus thermomutatus
  misc_feature: 104
ggaaatttatctattctttccaaatatgcctcatgagtatttttacattctttccaaatatgcctcatgagtatttatactattaattatagtata

SEQ ID NO: 8640 - DNA, 96 bp, Aspergillus thermomutatus
  misc_feature: 104
ataagggatagagtaagggatagatagtttagggagaggagggggtagaaaggtttagagataaagagaggaataagagatagtattaggggtata

SEQ ID NO: 8641 - DNA, 96 bp, Aspergillus thermomutatus
  misc_feature: 104
taccttgcacggcgcctctctccctactatctgcggttcctcactccctaccatactacctacctcctgcagtacctctcttgctacctctcttgc

SEQ ID NO: 8642 - DNA, 96 bp, Aspergillus thermomutatus
  misc_feature: 104
aagagaggagatgagaagagatgagaagagaggagaggagatgagaagagaagagaacaagaataaatgggaatgaaagagacgaattaatggtta

SEQ ID NO: 8643 - DNA, 96 bp, Aspergillus thermomutatus
  misc_feature: 104
gtgtttcttcattgctgaccatggcgtctaaagcatccgttcgaaagaaaagtttggcccgaaaaatcgaagatcaaggtttcctaatggcctttc

SEQ ID NO: 8644 - DNA, 96 bp, Aspergillus thermomutatus
  misc_feature: 104
gtagagaagatgagatgatataagggaaagagaagattaaagcgaagagagtgaaggaagggatgttgatggacagtgtgataaggtaagggttat

SEQ ID NO: 8645 - DNA, 96 bp, Aspergillus thermomutatus
  misc_feature: 104
aaagaatagataaatttccccctaaaccttcacctaatagagatattagtatacctaatttactaaataagcctaaattattaaacaaataggtac

SEQ ID NO: 8646 - DNA, 96 bp, Aspergillus thermomutatus
  misc_feature: 104
gggcgggggccccggctcatctgcttcgtctggctggcttgatctggctggcttgatctgtctggctggtctggctgaactctctgagctggtcgg

SEQ ID NO: 8647 - DNA, 96 bp, Aspergillus thermomutatus
  misc_feature: 104
gggatgttgatggacagtgtgataaggtaagggttatttagtttattaagagagagggaaggaattgagaagagaataaggtgaataaggagagag

SEQ ID NO: 8648 - DNA, 96 bp, Aspergillus thermomutatus
  misc_feature: 104
gggaaattggagagaggcaagagaataaggagaataataagggataggatagaaaaaagaaacaaaagaaagagaagattttaaggaagataggat

SEQ ID NO: 8649 - DNA, 96 bp, Aspergillus thermomutatus
  misc_feature: 104
ggcgggcgcgcgcgcgcgcgagcattaggcggcagcggtccggggcaggccagcaggcaggggggcgcgcgcgcggcggtgaccagttggccgggg

SEQ ID NO: 8650 - DNA, 96 bp, Aspergillus thermomutatus
  misc_feature: 104
attctacgtgctattctacgtgctattctacgtgctattctacgtgctattctacatgctattcgacgtgctattctatgtgctattcaacctgcc

SEQ ID NO: 8651 - DNA, 96 bp, Aspergillus thermomutatus
  misc_feature: 104
ggatgttgatggacagtgtgataaggtaagggttatttagtttattaagagagagggaaggaattgagaagagaataaggtgaataaggagagagg

SEQ ID NO: 8652 - DNA, 96 bp, Aspergillus thermomutatus
  misc_feature: 104
ggagagaagggaacaagaagagaagagaatgagaagaaaaagagatggtttagggttaaagagaggaaagtggaaagagaggagaaggataaagtg

SEQ ID NO: 8653 - DNA, 96 bp, Aspergillus thermomutatus
  misc_feature: 104
ggaagggatgttgatggacagtgtgataaggtaagggttatttagtttattaagagagagggaaggaattgagaagagaataaggtgaataaggag

SEQ ID NO: 8654 - DNA, 96 bp, Aspergillus thermomutatus
  misc_feature: 104
cagggttaggtataaaggcacccacagaggccccatgtaaggcaggcagagaggtagagataggtagagagggacccaagtagcaggccataaggc

SEQ ID NO: 8655 - DNA, 96 bp, Aspergillus thermomutatus
  misc_feature: 104
ctattcacctctctattcacctctctattcacctctctatctacctctctatctccctaccccactgtctgcctgtctgcctgtctgcctgtctgc

SEQ ID NO: 8656 - DNA, 96 bp, Aspergillus thermomutatus
  misc_feature: 104
actcttggtctgccttactgcctctctccctgtcttacatggtgccttcctccctaccttatattatacattcttcgctacctcacgtggtgcatc

SEQ ID NO: 8657 - DNA, 96 bp, Aspergillus thermomutatus
  misc_feature: 104
gagagtaggttaataagtaagggtaagagataattaatagagataggggaaagaggaatgataagggatagagtaagggatagatagtttagggag

SEQ ID NO: 8658 - DNA, 96 bp, Aspergillus thermomutatus
  misc_feature: 104
ctatcccttactctttctaaaacctaactcttaccctcctttttcttctctttcctttactctctttcccttctaaattccatcttccttcttctc

SEQ ID NO: 8659 - DNA, 96 bp, Aspergillus thermomutatus
  misc_feature: 104
cctcagaactctcgggtacttcctctggaaacagtgctgtgacgtattcattgtcatccgtgggtgcccatcccatctgttcaactaacagttgtc

SEQ ID NO: 8660 - DNA, 96 bp, Aspergillus thermomutatus
  misc_feature: 104
gaagtatagataagggaaaggaagagaggatagaagaatcaaagaagttgaggagaaaggaagggaggaaatattaagagagaagaagaaaaggag

SEQ ID NO: 8661 - DNA, 96 bp, Aspergillus thermomutatus
  misc_feature: 104
ctctcttatcattctctttactttctctttaccttctcacctcgttcccttctcattcttttctattcttgttcttttctctcttctcattctttc

SEQ ID NO: 8662 - DNA, 96 bp, Aspergillus thermomutatus
  misc_feature: 104
cttgatactgggcgggggctccggctcatctgcttcgtctggctggcttgatctgtctggctcgtctggctcgtctggctcgtctggctggtctgg

SEQ ID NO: 8663 - DNA, 96 bp, Aspergillus thermomutatus
  misc_feature: 104
cttaatatttcctcccttcctttctcctcaacttctttgattcttctatcctctcttcctttcccttatctatacttctcataaactacaattcct

SEQ ID NO: 8664 - DNA, 96 bp, Aspergillus thermomutatus
  misc_feature: 104
ctggcctggacggtctgctgggccttagcctgcacctgggcctgctcccaggcctgcatcacctcatcgaccgcagcctggacatggtgggtcgat

SEQ ID NO: 8665 - DNA, 96 bp, Aspergillus thermomutatus
  misc_feature: 104
ctcttctcattctcctctcttatcattctctttactttctctttaccttctcacctcgttcccttctcattcttttctattcttgttcttttctct

SEQ ID NO: 8666 - DNA, 96 bp, Aspergillus thermomutatus
  misc_feature: 104
ctctcttaatatttcctcccttcctttctcctcaacttctttgattcttctatcctctcttcctttcccttatctatacttctcataaactacaat

SEQ ID NO: 8667 - DNA, 96 bp, Aspergillus thermomutatus
  misc_feature: 104
ctcattctcctctcttatcattctctttactttctctttaccttctcacctcgttcccttctcattcttttctattcttgttcttttctctcttct

SEQ ID NO: 8668 - DNA, 96 bp, Aspergillus thermomutatus
  misc_feature: 104
cgcatcagtcagctggctggcctggacggtctgctgggccttagcctgcacctgggcctgctcccaggcctgcatcacctcatcgaccgcagcctg

SEQ ID NO: 8669 - DNA, 96 bp, Aspergillus thermomutatus
  misc_feature: 104
ccttgatactgggcgggggctccggctcatctgcttcgtctggctggcttgatctgtctggctcgtctggctcgtctggctcgtctggctggtctg

SEQ ID NO: 8670 - DNA, 96 bp, Aspergillus thermomutatus
  misc_feature: 104
atgcctactcttggtctgccttactgcctctctccctgtcttacatggtgccttcctccctaccttatattatacattcttcgctacctcacgtgg

SEQ ID NO: 8671 - DNA, 96 bp, Aspergillus thermomutatus
  misc_feature: 104
attttctcttctctctctttctatccttcttttccaccctcctccttttacaacctataatttctactaaccctcactcttatcctcattctcact

SEQ ID NO: 8672 - DNA, 96 bp, Aspergillus thermomutatus
  misc_feature: 104
accatgctttctaccttgcacggcgcctctctccctactatctgcggttcctcactccctaccatactacctacctcctgcagtacctctcttgct

SEQ ID NO: 8673 - DNA, 96 bp, Aspergillus thermomutatus
  misc_feature: 104
actatcccttactctttctaaaacctaactcttaccctcctttttcttctctttcctttactctctttcccttctaaattccatcttccttcttct

SEQ ID NO: 8674 - DNA, 96 bp, Aspergillus thermomutatus
  misc_feature: 103
aatgataagagaggagaatgagaagagacaacgaggagaaaacgggaagaggataaggagagaagggaacaagaagagaagagaatgagaagaaaa

SEQ ID NO: 8675 - DNA, 96 bp, Aspergillus thermomutatus
  misc_feature: 103
gaatgataagagaggagaatgagaagagacaacgaggagaaaacgggaagaggataaggagagaagggaacaagaagagaagagaatgagaagaaa

SEQ ID NO: 8676 - DNA, 96 bp, Aspergillus thermomutatus
  misc_feature: 103
aaaggagagagggagtaaaggggaggtaaggaggaagtaaagaggaaggagagagggaataaaggggaggtaaggaggaaggaaagaggaaggaaa

SEQ ID NO: 8677 - DNA, 96 bp, Aspergillus thermomutatus
  misc_feature: 103
aacgaggagaaaacgggaagaggataaggagagaagggaacaagaagagaagagaatgagaagaaaaagagatggtttagggttaaagagaggaaa

SEQ ID NO: 8678 - DNA, 96 bp, Aspergillus thermomutatus
  misc_feature: 103
catctcttctcatctcctctcttctcatctcctctcttctcctctctccttattcaccttattctcttctcaattccttccctctctcttaataaa

SEQ ID NO: 8679 - DNA, 96 bp, Aspergillus thermomutatus
  misc_feature: 103
tcttcttctctcttaatatttcctcccttcctttctcctcaacttctttgattcttctatcctctcttcctttcccttatctatacttctcataaa

SEQ ID NO: 8680 - DNA, 96 bp, Aspergillus thermomutatus
  misc_feature: 103
tagggagagtaattatagtaatggttaaagagagaataagaaaagaagagaagataaaagagagagagatttttagttaggattaaagatagtaaa

SEQ ID NO: 8681 - DNA, 96 bp, Aspergillus thermomutatus
  misc_feature: 103
gtgggaggattagaataagtattagaggaagagttagggagagtgtttaaggattaaaagaaagagtagagtaagggataggttaagagaggtaaa

SEQ ID NO: 8682 - DNA, 96 bp, Aspergillus thermomutatus
  misc_feature: 103
ttgtgtttcttcattgctgaccatggcgtctaaagcatccgttcgaaagaaaagtttggcccgaaaaatcgaagatcaaggtttcctaatggcctt

SEQ ID NO: 8683 - DNA, 96 bp, Aspergillus thermomutatus
  misc_feature: 103
ttgtctcttctcattctcctctcttatcattctctttactttctctttaccttctcacctcgttcccttctcattcttttctattcttgttctttt

SEQ ID NO: 8684 - DNA, 96 bp, Aspergillus thermomutatus
  misc_feature: 103
tcaccagcaatacagctcctgcgcggcacggttaggattgctccacgaccgcctacttcggtcgcattgtcacgtgaccaactaccatatacccaa

SEQ ID NO: 8685 - DNA, 96 bp, Aspergillus thermomutatus
  misc_feature: 103
ttctattttctcttctctctctttctatccttcttttccaccctcctccttttacaacctataatttctactaaccctcactcttatcctcattct

SEQ ID NO: 8686 - DNA, 96 bp, Aspergillus thermomutatus
  misc_feature: 103
ttcctctctatctacctctctattcacctctctattcacctctctattcacctctctatctacctctctatctccctaccccactgtctgcctgtc

SEQ ID NO: 8687 - DNA, 96 bp, Aspergillus thermomutatus
  misc_feature: 103
atcctctatcgcacctacatctatatgattatgatatacattagattctgataatatatctctaatagttattgaagtattatggtattctattaa

SEQ ID NO: 8688 - DNA, 96 bp, Aspergillus thermomutatus
  misc_feature: 103
tgtgtttcttcattgctgaccatggcgtctaaagcatccgttcgaaagaaaagtttggcccgaaaaatcgaagatcaaggtttcctaatggccttt

SEQ ID NO: 8689 - DNA, 96 bp, Aspergillus thermomutatus
  misc_feature: 103
gactatgaattacaaggaaaaacagtcgagccagcaattcttcgacaaaacagtgatggatcattgacatacaaccaccaagtacttgcagccaca

SEQ ID NO: 8690 - DNA, 96 bp, Aspergillus thermomutatus
  misc_feature: 103
tgtctcttctcattctcctctcttatcattctctttactttctctttaccttctcacctcgttcccttctcattcttttctattcttgttcttttc

SEQ ID NO: 8691 - DNA, 96 bp, Aspergillus thermomutatus
  misc_feature: 103
aacggatgcaaggaaaggccattaggaaaccttgatcttcgatttttcgggccaaacttttctttcgaacggatgctttagacgccatggtcagca

SEQ ID NO: 8692 - DNA, 96 bp, Aspergillus thermomutatus
  misc_feature: 103
agggttaggtataaaggcacccacagaggccccatgtaaggcaggcagagaggtagagataggtagagagggacccaagtagcaggccataaggca

SEQ ID NO: 8693 - DNA, 96 bp, Aspergillus thermomutatus
  misc_feature: 103
tcttctcttcttgttcccttctctccttatcctcttcccgttttctcctcgttgtctcttctcattctcctctcttatcattctctttactttctc

SEQ ID NO: 8694 - DNA, 96 bp, Aspergillus thermomutatus
  misc_feature: 103
tcttaaatcctacttcttctctttttttcttctttcttttcttaactcttactttcctctcttttatacccctaatactatctcttattcctctct

SEQ ID NO: 8695 - DNA, 96 bp, Aspergillus thermomutatus
  misc_feature: 103
agggatgttgatggacagtgtgataaggtaagggttatttagtttattaagagagagggaaggaattgagaagagaataaggtgaataaggagaga

SEQ ID NO: 8696 - DNA, 96 bp, Aspergillus thermomutatus
  misc_feature: 103
tctaccttgcacggcgcctctctccctactatctgcggttcctcactccctaccatactacctacctcctgcagtacctctcttgctacctctctt

SEQ ID NO: 8697 - DNA, 96 bp, Aspergillus thermomutatus
  misc_feature: 103
gctggcctggacggtctgctgggccttagcctgcacctgggcctgctcccaggcctgcatcacctcatcgaccgcagcctggacatggtgggtcga

SEQ ID NO: 8698 - DNA, 96 bp, Aspergillus thermomutatus
  misc_feature: 103
tatatgccataagggatatataactgaatgagaaggtatgtaatagttaaaagttgagcatattccagagagaaaaaggataagggagcagaagga

SEQ ID NO: 8699 - DNA, 96 bp, Aspergillus thermomutatus
  misc_feature: 103
tccctactatctgcggttcctcactccctaccatactacctacctcctgcagtacctctcttgctacctctcttgctacctctcttgctacctctc

SEQ ID NO: 8700 - DNA, 96 bp, Aspergillus thermomutatus
  misc_feature: 103
gtaaagagaatgataagagaggagaatgagaagagacaacgaggagaaaacgggaagaggataaggagagaagggaacaagaagagaagagaatga

SEQ ID NO: 8701 - DNA, 96 bp, Aspergillus thermomutatus
  misc_feature: 103
tcagaactctcgggtacttcctctggaaacagtgctgtgacgtattcattgtcatccgtgggtgcccatcccatctgttcaactaacagttgtcgc

SEQ ID NO: 8702 - DNA, 96 bp, Aspergillus thermomutatus
  misc_feature: 103
tatgcctactcttggtctgccttactgcctctctccctgtcttacatggtgccttcctccctaccttatattatacattcttcgctacctcacgtg

SEQ ID NO: 8703 - DNA, 96 bp, Aspergillus thermomutatus
  misc_feature: 103
tatcccttactctttctaaaacctaactcttaccctcctttttcttctctttcctttactctctttcccttctaaattccatcttccttcttctct

SEQ ID NO: 8704 - DNA, 96 bp, Aspergillus thermomutatus
  misc_feature: 103
ggttaggattgctccacgaccgcctacttcggtcgcattgtcacgtgaccaactaccatatacccaagcttggcaatggtagatggtatacaacta

SEQ ID NO: 8705 - DNA, 96 bp, Aspergillus thermomutatus
  misc_feature: 103
agaatagataaatttccccctaaaccttcacctaatagagatattagtatacctaatttactaaataagcctaaattattaaacaaataggtacta

SEQ ID NO: 8706 - DNA, 96 bp, Aspergillus thermomutatus
  misc_feature: 103
ccatgctttctaccttgcacggcgcctctctccctactatctgcggttcctcactccctaccatactacctacctcctgcagtacctctcttgcta

SEQ ID NO: 8707 - DNA, 96 bp, Aspergillus thermomutatus
  misc_feature: 103
atataaaagccacgcagggttaggtataaaggcacccacagaggccccatgtaaggcaggcagagaggtagagataggtagagagggacccaagta

SEQ ID NO: 8708 - DNA, 96 bp, Aspergillus thermomutatus
  misc_feature: 103
gcatgttaggcagcacggcagactacacatcattgagagaggcgtctagagagacaggcagacaggcagacaggcagacaggcagacagtggggta

SEQ ID NO: 8709 - DNA, 96 bp, Aspergillus thermomutatus
  misc_feature: 103
atcctaccccttctatccttcttcttattcatcctttcttttttttttcttttctaatcctaaaaatctcatctccttctctaatctctttgatta

SEQ ID NO: 8710 - DNA, 96 bp, Aspergillus thermomutatus
  misc_feature: 103
gagaagatgagatgatataagggaaagagaagattaaagcgaagagagtgaaggaagggatgttgatggacagtgtgataaggtaagggttattta

SEQ ID NO: 8711 - DNA, 96 bp, Aspergillus thermomutatus
  misc_feature: 103
taaagagaatgataagagaggagaatgagaagagacaacgaggagaaaacgggaagaggataaggagagaagggaacaagaagagaagagaatgag

SEQ ID NO: 8712 - DNA, 96 bp, Aspergillus thermomutatus
  misc_feature: 103
gttttctcctcgttgtctcttctcattctcctctcttatcattctctttactttctctttaccttctcacctcgttcccttctcattcttttctat

SEQ ID NO: 8713 - DNA, 96 bp, Aspergillus thermomutatus
  misc_feature: 103
gtttcttcattgctgaccatggcgtctaaagcatccgttcgaaagaaaagtttggcccgaaaaatcgaagatcaaggtttcctaatggcctttcct

SEQ ID NO: 8714 - DNA, 96 bp, Aspergillus thermomutatus
  misc_feature: 103
gtgaggcacccccagatatgccatgcaaggtttggaccaaggtagccagagagcaaccatatggggcaggtagtatagtagggatcaacacacccc

SEQ ID NO: 8715 - DNA, 96 bp, Aspergillus thermomutatus
  misc_feature: 103
atgtctatattccctttactttactaaatcctcttctcatcttccctctctctcttaaattctttcttaaactattaattcctctctctttctcac

SEQ ID NO: 8716 - DNA, 96 bp, Aspergillus thermomutatus
  misc_feature: 103
gtctcttctcattctcctctcttatcattctctttactttctctttaccttctcacctcgttcccttctcattcttttctattcttgttcttttct

SEQ ID NO: 8717 - DNA, 96 bp, Aspergillus thermomutatus
  misc_feature: 103
gtatataaaagccacgcagggttaggtataaaggcacccacagaggccccatgtaaggcaggcagagaggtagagataggtagagagggacccaag

SEQ ID NO: 8718 - DNA, 96 bp, Aspergillus thermomutatus
  misc_feature: 103
gtaagtataagagtaaggattagtgattttagaaataaaggagtaaaaagtcgatgagagtagagaagatgagatgatataagggaaagagaagat

SEQ ID NO: 8719 - DNA, 96 bp, Aspergillus thermomutatus
  misc_feature: 103
atctcctttctttcttctcttcccttctctctccctatcctctaatctatccttattttatctcctttttaattttaaattcctatttcctaatcc

SEQ ID NO: 8720 - DNA, 96 bp, Aspergillus thermomutatus
  misc_feature: 103
catacaaccaccaagtacttgcagccacaatcgaactgacagaggatccactgattcaaaaaattattgaagcaacaaaaagggacaaaatcatcc

SEQ ID NO: 8721 - DNA, 96 bp, Aspergillus thermomutatus
  misc_feature: 103
acccttacttattaacctactctctattccttattcttccttcttattctattcatctctctatcttatcctcttcctcttcaataatccttatcc

SEQ ID NO: 8722 - DNA, 96 bp, Aspergillus thermomutatus
  misc_feature: 103
caacggatgcaaggaaaggccattaggaaaccttgatcttcgatttttcgggccaaacttttctttcgaacggatgctttagacgccatggtcagc

SEQ ID NO: 8723 - DNA, 96 bp, Aspergillus thermomutatus
  misc_feature: 103
gcctactcttggtctgccttactgcctctctccctgtcttacatggtgccttcctccctaccttatattatacattcttcgctacctcacgtggtg

SEQ ID NO: 8724 - DNA, 96 bp, Aspergillus thermomutatus
  misc_feature: 103
gataagggatagagtaagggatagatagtttagggagaggagggggtagaaaggtttagagataaagagaggaataagagatagtattaggggtat

SEQ ID NO: 8725 - DNA, 96 bp, Aspergillus thermomutatus
  misc_feature: 103
gagtaagcatagtaatatatgtaggtatataaaagccacgcagggttaggtataaaggcacccacagaggccccatgtaaggcagggttaaggcag

SEQ ID NO: 8726 - DNA, 96 bp, Aspergillus thermomutatus
  misc_feature: 103
aagatagagagatgaatagaataagaaggaagaataaggaatagagagtaggttaataagtaagggtaagagataattaatagagataggggaaag

SEQ ID NO: 8727 - DNA, 96 bp, Aspergillus thermomutatus
  misc_feature: 103
cttctcattctcctctcttatcattctctttactttctctttaccttctcacctcgttcccttctcattcttttctattcttgttcttttctctct

SEQ ID NO: 8728 - DNA, 96 bp, Aspergillus thermomutatus
  misc_feature: 103
agagtaattatagtaatggttaaagagagaataagaaaagaagagaagataaaagagagagagatttttagttaggattaaagatagtaaaaagag

SEQ ID NO: 8729 - DNA, 96 bp, Aspergillus thermomutatus
  misc_feature: 103
acagtggggtagggagatagagaggtagatagagaggtgaatagagaggtgaatagagaggtgaatagagaggtagatagagaggaagatagagag

SEQ ID NO: 8730 - DNA, 96 bp, Aspergillus thermomutatus
  misc_feature: 103
aagggatgttgatggacagtgtgataaggtaagggttatttagtttattaagagagagggaaggaattgagaagagaataaggtgaataaggagag

SEQ ID NO: 8731 - DNA, 96 bp, Aspergillus thermomutatus
  misc_feature: 103
ctcctatggtgcctctctacctatctccctacctcttcacctacctcttcacctacctcttcacctacctcttcacctacctcttcacctacctct

SEQ ID NO: 8732 - DNA, 96 bp, Aspergillus thermomutatus
  misc_feature: 103
ctatgcctactcttggtctgccttactgcctctctccctgtcttacatggtgccttcctccctaccttatattatacattcttcgctacctcacgt

SEQ ID NO: 8733 - DNA, 96 bp, Aspergillus thermomutatus
  misc_feature: 103
ctatgaattacaaggaaaaacagtcgagccagcaattcttcgacaaaacagtgatggatcattgacatacaaccaccaagtacttgcagccacaat

SEQ ID NO: 8734 - DNA, 96 bp, Aspergillus thermomutatus
  misc_feature: 103
agaagatgagatgatataagggaaagagaagattaaagcgaagagagtgaaggaagggatgttgatggacagtgtgataaggtaagggttatttag

SEQ ID NO: 8735 - DNA, 96 bp, Aspergillus thermomutatus
  misc_feature: 103
atatatgccataagggatatataactgaatgagaaggtatgtaatagttaaaagttgagcatattccagagagaaaaaggataagggagcagaagg

SEQ ID NO: 8736 - DNA, 96 bp, Aspergillus thermomutatus
  misc_feature: 103
aacaaaatgacaggaggagcaaggtagagaggtagaggttaatttttaatagtattagaaatgttatatcaatcaattattttaatactaaagagg

SEQ ID NO: 8737 - DNA, 96 bp, Aspergillus thermomutatus
  misc_feature: 103
ccagcaatacagctcctgcgcggcacggttaggattgctccacgaccgcctacttcggtcgcattgtcacgtgaccaactaccatatacccaagct

SEQ ID NO: 8738 - DNA, 96 bp, Aspergillus thermomutatus
  misc_feature: 103
attaatcctaccccttctatccttcttcttattcatcctttcttttttttttcttttctaatcctaaaaatctcatctccttctctaatctctttg

SEQ ID NO: 8739 - DNA, 96 bp, Aspergillus thermomutatus
  misc_feature: 103
attccctttactttactaaatcctcttctcatcttccctctctctcttaaattctttcttaaactattaattcctctctctttctcactccctctt

SEQ ID NO: 8740 - DNA, 96 bp, Aspergillus thermomutatus
  misc_feature: 103
attcacctctctattcacctctctattcacctctctatctacctctctatctccctaccccactgtctgcctgtctgcctgtctgcctgtctgcct

SEQ ID NO: 8741 - DNA, 96 bp, Aspergillus thermomutatus
  misc_feature: 103
atgccataagggatatataactgaatgagaaggtatgtaatagttaaaagttgagcatattccagagagaaaaaggataagggagcagaaggatat

SEQ ID NO: 8742 - DNA, 96 bp, Aspergillus thermomutatus
  misc_feature: 103
agtaagggataggataggataggaaaaaagaaaagatttagaaatagaagattaaaggtaaagaggaagggatagagagaggattagagtaagggt

SEQ ID NO: 8743 - DNA, 96 bp, Aspergillus thermomutatus
  misc_feature: 102
ttttctcctcgttgtctcttctcattctcctctcttatcattctctttactttctctttaccttctcacctcgttcccttctcattcttttctatt

SEQ ID NO: 8744 - DNA, 96 bp, Aspergillus thermomutatus
  misc_feature: 102
tttctcttctctctctttctatccttcttttccaccctcctccttttacaacctataatttctactaaccctcactcttatcctcattctcactct

SEQ ID NO: 8745 - DNA, 96 bp, Aspergillus thermomutatus
  misc_feature: 102
actatgaattacaaggaaaaacagtcgagccagcaattcttcgacaaaacagtgatggatcattgacatacaaccaccaagtacttgcagccacaa

SEQ ID NO: 8746 - DNA, 96 bp, Aspergillus thermomutatus
  misc_feature: 102
ggtatataaaagccacgcagggttaggtataaaggcacccacagaggccccatgtaaggcaggcagagaggtagagataggtagagagggacccaa

SEQ ID NO: 8747 - DNA, 96 bp, Aspergillus thermomutatus
  misc_feature: 102
ttcttaaatcttatctcctttctttcttctcttcccttctctctccctatcctctaatctatccttattttatctcctttttaattttaaattcct

SEQ ID NO: 8748 - DNA, 96 bp, Aspergillus thermomutatus
  misc_feature: 102
ttctcttctctctctttctatccttcttttccaccctcctccttttacaacctataatttctactaaccctcactcttatcctcattctcactcta

SEQ ID NO: 8749 - DNA, 96 bp, Aspergillus thermomutatus
  misc_feature: 102
ttaggattgctccacgaccgcctacttcggtcgcattgtcacgtgaccaactaccatatacccaagcttggcaatggtagatggtatacaactacc

SEQ ID NO: 8750 - DNA, 96 bp, Aspergillus thermomutatus
  misc_feature: 102
caccatgttgtgtttcttcattgctgaccatggcgtctaaagcatccgttcgaaagaaaagtttggcccgaaaaatcgaagatcaaggtttcctaa

SEQ ID NO: 8751 - DNA, 96 bp, Aspergillus thermomutatus
  misc_feature: 102
ttactctctttcccttctaaattccatcttccttcttctctttctctttcttatcctttctattcttaaaataaactatccctccctccttttctt

SEQ ID NO: 8752 - DNA, 96 bp, Aspergillus thermomutatus
  misc_feature: 102
agtgggaggattagaataagtattagaggaagagttagggagagtgtttaaggattaaaagaaagagtagagtaagggataggttaagagaggtaa

SEQ ID NO: 8753 - DNA, 96 bp, Aspergillus thermomutatus
  misc_feature: 102
ttaatcctaccccttctatccttcttcttattcatcctttcttttttttttcttttctaatcctaaaaatctcatctccttctctaatctctttga

SEQ ID NO: 8754 - DNA, 96 bp, Aspergillus thermomutatus
  misc_feature: 102
tgtttcttcattgctgaccatggcgtctaaagcatccgttcgaaagaaaagtttggcccgaaaaatcgaagatcaaggtttcctaatggcctttcc

SEQ ID NO: 8755 - DNA, 96 bp, Aspergillus thermomutatus
  misc_feature: 102
tgttgatggacagtgtgataaggtaagggttatttagtttattaagagagagggaaggaattgagaagagaataaggtgaataaggagagaggaga

SEQ ID NO: 8756 - DNA, 96 bp, Aspergillus thermomutatus
  misc_feature: 102
acttagtcgacgaccagactatgaattacaaggaaaaacagtcgagccagcaattcttcgacaaaacagtgatggatcattgacatacaaccacca

SEQ ID NO: 8757 - DNA, 96 bp, Aspergillus thermomutatus
  misc_feature: 102
tgggggaagttaatgagaaattagaagaaagaagaggagaggagaaggaaagaaaagagaaacagaggagggaaagaagggaagagatgagaagag

SEQ ID NO: 8758 - DNA, 96 bp, Aspergillus thermomutatus
  misc_feature: 102
tgggaggattagaataagtattagaggaagagttagggagagtgtttaaggattaaaagaaagagtagagtaagggataggttaagagaggtaaag

SEQ ID NO: 8759 - DNA, 96 bp, Aspergillus thermomutatus
  misc_feature: 102
tgctttctaccttgcacggcgcctctctccctactatctgcggttcctcactccctaccatactacctacctcctgcagtacctctcttgctacct

SEQ ID NO: 8760 - DNA, 96 bp, Aspergillus thermomutatus
  misc_feature: 102
accaaggtagggagtaaagccagtagagaggcaccatgtcaggtagcaagagaggtagcaagagaggtagcaagagaggtagcaagagaggtagca

SEQ ID NO: 8761 - DNA, 96 bp, Aspergillus thermomutatus
  misc_feature: 102
tgcctactcttggtctgccttactgcctctctccctgtcttacatggtgccttcctccctaccttatattatacattcttcgctacctcacgtggt

SEQ ID NO: 8762 - DNA, 96 bp, Aspergillus thermomutatus
  misc_feature: 102
tgccataagggatatataactgaatgagaaggtatgtaatagttaaaagttgagcatattccagagagaaaaaggataagggagcagaaggatata

SEQ ID NO: 8763 - DNA, 96 bp, Aspergillus thermomutatus
  misc_feature: 102
tgattgagcgtattccgcatttgcctccacgcagtggatcttgcgcgttgggtagcccaagctggtggatccggctgagctcccttctgggtggca

SEQ ID NO: 8764 - DNA, 96 bp, Aspergillus thermomutatus
  misc_feature: 102
gagagtaattatagtaatggttaaagagagaataagaaaagaagagaagataaaagagagagagatttttagttaggattaaagatagtaaaaaga

SEQ ID NO: 8765 - DNA, 96 bp, Aspergillus thermomutatus
  misc_feature: 102
tcttcatgtctatattccctttactttactaaatcctcttctcatcttccctctctctcttaaattctttcttaaactattaattcctctctcttt

SEQ ID NO: 8766 - DNA, 96 bp, Aspergillus thermomutatus
  misc_feature: 102
tcttaatatttcctcccttcctttctcctcaacttctttgattcttctatcctctcttcctttcccttatctatacttctcataaactacaattcc

SEQ ID NO: 8767 - DNA, 96 bp, Aspergillus thermomutatus
  misc_feature: 102
catctaggatggcagcaggcatgttaggcagcacggcagactacacatcattgagagaggcgtctagagagacaggcagacaggcagacaggcaga

SEQ ID NO: 8768 - DNA, 96 bp, Aspergillus thermomutatus
  misc_feature: 102
gagagagggagtaaaggggaggtaaggaggaagtaaagaggaaggagagagggaataaaggggaggtaaggaggaaggaaagaggaaggaaagaga

SEQ ID NO: 8769 - DNA, 96 bp, Aspergillus thermomutatus
  misc_feature: 102
tctcttatcattctctttactttctctttaccttctcacctcgttcccttctcattcttttctattcttgttcttttctctcttctcattctttct

SEQ ID NO: 8770 - DNA, 96 bp, Aspergillus thermomutatus
  misc_feature: 102
gaggaagaggataagatagagagatgaatagaataagaaggaagaataaggaatagagagtaggttaataagtaagggtaagagataattaataga

SEQ ID NO: 8771 - DNA, 96 bp, Aspergillus thermomutatus
  misc_feature: 102
tcctaccccttctatccttcttcttattcatcctttcttttttttttcttttctaatcctaaaaatctcatctccttctctaatctctttgattac

SEQ ID NO: 8772 - DNA, 96 bp, Aspergillus thermomutatus
  misc_feature: 102
tatttgataaaatatactataattaatagtataaatactcatgaggcatatttggaaagaatgtaaaaatactcatgaggcatatttggaaagaat

SEQ ID NO: 8773 - DNA, 96 bp, Aspergillus thermomutatus
  misc_feature: 102
atttgataaaatatactataattaatagtataaatactcatgaggcatatttggaaagaatgtaaaaatactcatgaggcatatttggaaagaata

SEQ ID NO: 8774 - DNA, 96 bp, Aspergillus thermomutatus
  misc_feature: 102
tattccctttactttactaaatcctcttctcatcttccctctctctcttaaattctttcttaaactattaattcctctctctttctcactccctct

SEQ ID NO: 8775 - DNA, 96 bp, Aspergillus thermomutatus
  misc_feature: 102
ccataagggatatataactgaatgagaaggtatgtaatagttaaaagttgagcatattccagagagaaaaaggataagggagcagaaggatatata

SEQ ID NO: 8776 - DNA, 96 bp, Aspergillus thermomutatus
  misc_feature: 102
tagtgggaggattagaataagtattagaggaagagttagggagagtgtttaaggattaaaagaaagagtagagtaagggataggttaagagaggta

SEQ ID NO: 8777 - DNA, 96 bp, Aspergillus thermomutatus
  misc_feature: 102
tagaaaagaatgagaagggaacgaggtgagaaggtaaagagaaagtaaagagaatgataagagaggagaatgagaagagacaacgaggagaaaacg

SEQ ID NO: 8778 - DNA, 96 bp, Aspergillus thermomutatus
  misc_feature: 102
tactggaatgttcaggcgtgcttttcgacctttgattcggtaagtgagcgtacgatatggtacatcatacgctgcggctgctgcgcggatgctctt

SEQ ID NO: 8779 - DNA, 96 bp, Aspergillus thermomutatus
  misc_feature: 102
taccatgctttctaccttgcacggcgcctctctccctactatctgcggttcctcactccctaccatactacctacctcctgcagtacctctcttgc

SEQ ID NO: 8780 - DNA, 96 bp, Aspergillus thermomutatus
  misc_feature: 102
tacaacaagaaatcagggttctacgggcagagaatgaacggaaaagaaagaagaaggcaagaatacgtgctaatctaggtggtgataccattttat

SEQ ID NO: 8781 - DNA, 96 bp, Aspergillus thermomutatus
  misc_feature: 102
actggaatgttcaggcgtgcttttcgacctttgattcggtaagtgagcgtacgatatggtacatcatacgctgcggctgctgcgcggatgctctta

SEQ ID NO: 8782 - DNA, 96 bp, Aspergillus thermomutatus
  misc_feature: 102
taactatcccttactctttctaaaacctaactcttaccctcctttttcttctctttcctttactctctttcccttctaaattccatcttccttctt

SEQ ID NO: 8783 - DNA, 96 bp, Aspergillus thermomutatus
  misc_feature: 102
atctcttctcatctcctctcttctcatctcctctcttctcctctctccttattcaccttattctcttctcaattccttccctctctcttaataaac

SEQ ID NO: 8784 - DNA, 96 bp, Aspergillus thermomutatus
  misc_feature: 102
gttgtgtttcttcattgctgaccatggcgtctaaagcatccgttcgaaagaaaagtttggcccgaaaaatcgaagatcaaggtttcctaatggcct

SEQ ID NO: 8785 - DNA, 96 bp, Aspergillus thermomutatus
  misc_feature: 102
gttgtctcttctcattctcctctcttatcattctctttactttctctttaccttctcacctcgttcccttctcattcttttctattcttgttcttt

SEQ ID NO: 8786 - DNA, 96 bp, Aspergillus thermomutatus
  misc_feature: 102
gttaggattgctccacgaccgcctacttcggtcgcattgtcacgtgaccaactaccatatacccaagcttggcaatggtagatggtatacaactac

SEQ ID NO: 8787 - DNA, 96 bp, Aspergillus thermomutatus
  misc_feature: 102
catgctttctaccttgcacggcgcctctctccctactatctgcggttcctcactccctaccatactacctacctcctgcagtacctctcttgctac

SEQ ID NO: 8788 - DNA, 96 bp, Aspergillus thermomutatus
  misc_feature: 102
cacttagtcgacgaccagactatgaattacaaggaaaaacagtcgagccagcaattcttcgacaaaacagtgatggatcattgacatacaaccacc

SEQ ID NO: 8789 - DNA, 96 bp, Aspergillus thermomutatus
  misc_feature: 102
atgctttctaccttgcacggcgcctctctccctactatctgcggttcctcactccctaccatactacctacctcctgcagtacctctcttgctacc

SEQ ID NO: 8790 - DNA, 96 bp, Aspergillus thermomutatus
  misc_feature: 102
cctgcctctctatcttcctctctatctacctctctattcacctctctattcacctctctattcacctctctatctacctctctatctccctacccc

SEQ ID NO: 8791 - DNA, 96 bp, Aspergillus thermomutatus
  misc_feature: 102
gggggccccggctcatctgcttcgtctggctggcttgatctggctggcttgatctgtctggctggtctggctgaactctctgagctggtcgggcag

SEQ ID NO: 8792 - DNA, 96 bp, Aspergillus thermomutatus
  misc_feature: 102
ggggccccggctcatctgcttcgtctggctggcttgatctggctggcttgatctgtctggctggtctggctgaactctctgagctggtcgggcagg

SEQ ID NO: 8793 - DNA, 96 bp, Aspergillus thermomutatus
  misc_feature: 102
gggaacaagaagagaagagaatgagaagaaaaagagatggtttagggttaaagagaggaaagtggaaagagaggagaaggataaagtgaagtgacg

SEQ ID NO: 8794 - DNA, 96 bp, Aspergillus thermomutatus
  misc_feature: 102
ggataagatagagagatgaatagaataagaaggaagaataaggaatagagagtaggttaataagtaagggtaagagataattaatagagatagggg

SEQ ID NO: 8795 - DNA, 96 bp, Aspergillus thermomutatus
  misc_feature: 102
ggagagagggagtaaaggggaggtaaggaggaagtaaagaggaaggagagagggaataaaggggaggtaaggaggaaggaaagaggaaggaaagag

SEQ ID NO: 8796 - DNA, 96 bp, Aspergillus thermomutatus
  misc_feature: 102
ggaatagagagtaggttaataagtaagggtaagagataattaatagagataggggaaagaggaatgataagggatagagtaagggatagatagttt

SEQ ID NO: 8797 - DNA, 96 bp, Aspergillus thermomutatus
  misc_feature: 102
gccataagggatatataactgaatgagaaggtatgtaatagttaaaagttgagcatattccagagagaaaaaggataagggagcagaaggatatat

SEQ ID NO: 8798 - DNA, 96 bp, Aspergillus thermomutatus
  misc_feature: 102
gattgagcgtattccgcatttgcctccacgcagtggatcttgcgcgttgggtagcccaagctggtggatccggctgagctcccttctgggtggcat

SEQ ID NO: 8799 - DNA, 96 bp, Aspergillus thermomutatus
  misc_feature: 102
atattccctttactttactaaatcctcttctcatcttccctctctctcttaaattctttcttaaactattaattcctctctctttctcactccctc

SEQ ID NO: 8800 - DNA, 96 bp, Aspergillus thermomutatus
  misc_feature: 102
gagaagggaacaagaagagaagagaatgagaagaaaaagagatggtttagggttaaagagaggaaagtggaaagagaggagaaggataaagtgaag

SEQ ID NO: 8801 - DNA, 96 bp, Aspergillus thermomutatus
  misc_feature: 102
cctatggtgcctctctacctatctccctacctcttcacctacctcttcacctacctcttcacctacctcttcacctacctcttcacctacctcttc

SEQ ID NO: 8802 - DNA, 96 bp, Aspergillus thermomutatus
  misc_feature: 102
ctcgttgtctcttctcattctcctctcttatcattctctttactttctctttaccttctcacctcgttcccttctcattcttttctattcttgttc

SEQ ID NO: 8803 - DNA, 96 bp, Aspergillus thermomutatus
  misc_feature: 102
aaatcttatctcctttctttcttctcttcccttctctctccctatcctctaatctatccttattttatctcctttttaattttaaattcctatttc

SEQ ID NO: 8804 - DNA, 96 bp, Aspergillus thermomutatus
  misc_feature: 102
ctttactctctttcccttctaaattccatcttccttcttctctttctctttcttatcctttctattcttaaaataaactatccctccctccttttc

SEQ ID NO: 8805 - DNA, 96 bp, Aspergillus thermomutatus
  misc_feature: 102
acgaggagaaaacgggaagaggataaggagagaagggaacaagaagagaagagaatgagaagaaaaagagatggtttagggttaaagagaggaaag

SEQ ID NO: 8806 - DNA, 96 bp, Aspergillus thermomutatus
  misc_feature: 102
cttgtacagataaaatggtatcaccacctagattagcacgtattcttgccttcttctttcttttccgttcattctctgcccgtagaaccctgattt

SEQ ID NO: 8807 - DNA, 96 bp, Aspergillus thermomutatus
  misc_feature: 102
cttaaatcttatctcctttctttcttctcttcccttctctctccctatcctctaatctatccttattttatctcctttttaattttaaattcctat

SEQ ID NO: 8808 - DNA, 96 bp, Aspergillus thermomutatus
  misc_feature: 102
acaacggatgcaaggaaaggccattaggaaaccttgatcttcgatttttcgggccaaacttttctttcgaacggatgctttagacgccatggtcag

SEQ ID NO: 8809 - DNA, 96 bp, Aspergillus thermomutatus
  misc_feature: 102
ctctttcccttctaaattccatcttccttcttctctttctctttcttatcctttctattcttaaaataaactatccctccctccttttcttcttct

SEQ ID NO: 8810 - DNA, 96 bp, Aspergillus thermomutatus
  misc_feature: 102
ctcttctcttcttgttcccttctctccttatcctcttcccgttttctcctcgttgtctcttctcattctcctctcttatcattctctttactttct

SEQ ID NO: 8811 - DNA, 96 bp, Aspergillus thermomutatus
  misc_feature: 102
ctcttcatgtctatattccctttactttactaaatcctcttctcatcttccctctctctcttaaattctttcttaaactattaattcctctctctt

SEQ ID NO: 8812 - DNA, 96 bp, Aspergillus thermomutatus
  misc_feature: 102
ctcttatcctcattctcactctactcctctctcttatcctcattctaaccctcactccttcctccctctaatcctccctctaatcctccctctaat

SEQ ID NO: 8813 - DNA, 96 bp, Aspergillus thermomutatus
  misc_feature: 102
agagagggagtaaaggggaggtaaggaggaagtaaagaggaaggagagagggaataaaggggaggtaaggaggaaggaaagaggaaggaaagagag

SEQ ID NO: 8814 - DNA, 96 bp, Aspergillus thermomutatus
  misc_feature: 102
aggaagaggataagatagagagatgaatagaataagaaggaagaataaggaatagagagtaggttaataagtaagggtaagagataattaatagag

SEQ ID NO: 8815 - DNA, 96 bp, Aspergillus thermomutatus
  misc_feature: 102
ataagaaggaagaataaggaatagagagtaggttaataagtaagggtaagagataattaatagagataggggaaagaggaatgataagggatagag

SEQ ID NO: 8816 - DNA, 96 bp, Aspergillus thermomutatus
  misc_feature: 102
ctcagaactctcgggtacttcctctggaaacagtgctgtgacgtattcattgtcatccgtgggtgcccatcccatctgttcaactaacagttgtcg

SEQ ID NO: 8817 - DNA, 96 bp, Aspergillus thermomutatus
  misc_feature: 102
cataagggatatataactgaatgagaaggtatgtaatagttaaaagttgagcatattccagagagaaaaaggataagggagcagaaggatatatag

SEQ ID NO: 8818 - DNA, 96 bp, Aspergillus thermomutatus
  misc_feature: 102
cgttgtctcttctcattctcctctcttatcattctctttactttctctttaccttctcacctcgttcccttctcattcttttctattcttgttctt

SEQ ID NO: 8819 - DNA, 96 bp, Aspergillus thermomutatus
  misc_feature: 102
cggcgggcgcgcgcgcgcgcgagcattaggcggcagcggtccggggcaggccagcaggcaggggggcgcgcgcgcggcggtgaccagttggccggg

SEQ ID NO: 8820 - DNA, 96 bp, Aspergillus thermomutatus
  misc_feature: 102
cctttactctctttcccttctaaattccatcttccttcttctctttctctttcttatcctttctattcttaaaataaactatccctccctcctttt

SEQ ID NO: 8821 - DNA, 96 bp, Aspergillus thermomutatus
  misc_feature: 102
atagagagatgaatagaataagaaggaagaataaggaatagagagtaggttaataagtaagggtaagagataattaatagagataggggaaagagg

SEQ ID NO: 8822 - DNA, 96 bp, Aspergillus thermomutatus
  misc_feature: 102
cctcgttgtctcttctcattctcctctcttatcattctctttactttctctttaccttctcacctcgttcccttctcattcttttctattcttgtt

SEQ ID NO: 8823 - DNA, 96 bp, Aspergillus thermomutatus
  misc_feature: 102
aagtatagataagggaaaggaagagaggatagaagaatcaaagaagttgaggagaaaggaagggaggaaatattaagagagaagaagaaaaggagg

SEQ ID NO: 8824 - DNA, 96 bp, Aspergillus thermomutatus
  misc_feature: 102
aaattggagagaggcaagagaataaggagaataataagggataggatagaaaaaagaaacaaaagaaagagaagattttaaggaagataggatagg

SEQ ID NO: 8825 - DNA, 96 bp, Aspergillus thermomutatus
  misc_feature: 102
agaaaagaatgagaagggaacgaggtgagaaggtaaagagaaagtaaagagaatgataagagaggagaatgagaagagacaacgaggagaaaacgg

SEQ ID NO: 8826 - DNA, 96 bp, Aspergillus thermomutatus
  misc_feature: 102
agtaaagagaatgataagagaggagaatgagaagagacaacgaggagaaaacgggaagaggataaggagagaagggaacaagaagagaagagaatg

SEQ ID NO: 8827 - DNA, 96 bp, Aspergillus thermomutatus
  misc_feature: 102
attctcctctcttatcattctctttactttctctttaccttctcacctcgttcccttctcattcttttctattcttgttcttttctctcttctcat

SEQ ID NO: 8828 - DNA, 96 bp, Aspergillus thermomutatus
  misc_feature: 102
agcaggcaaaacagcaggcagaacggtaggcagaacggcaggcagaacggtaggcagaacggcaggcagaacggcaggttgaatagcaggttgaat

SEQ ID NO: 8829 - DNA, 96 bp, Aspergillus thermomutatus
  misc_feature: 102
atatgccataagggatatataactgaatgagaaggtatgtaatagttaaaagttgagcatattccagagagaaaaaggataagggagcagaaggat

SEQ ID NO: 8830 - DNA, 96 bp, Aspergillus thermomutatus
  misc_feature: 102
agaagagaggagatgagaagagatgagaagagaggagaggagatgagaagagaagagaacaagaataaatgggaatgaaagagacgaattaatggt

SEQ ID NO: 8831 - DNA, 96 bp, Aspergillus thermomutatus
  misc_feature: 101
taagatagagagatgaatagaataagaaggaagaataaggaatagagagtaggttaataagtaagggtaagagataattaatagagataggggaaa

SEQ ID NO: 8832 - DNA, 96 bp, Aspergillus thermomutatus
  misc_feature: 101
tcctctatcgcacctacatctatatgattatgatatacattagattctgataatatatctctaatagttattgaagtattatggtattctattaaa

SEQ ID NO: 8833 - DNA, 96 bp, Aspergillus thermomutatus
  misc_feature: 101
ttctcctctcttatcattctctttactttctctttaccttctcacctcgttcccttctcattcttttctattcttgttcttttctctcttctcatt

SEQ ID NO: 8834 - DNA, 96 bp, Aspergillus thermomutatus
  misc_feature: 101
ttctaccttgcacggcgcctctctccctactatctgcggttcctcactccctaccatactacctacctcctgcagtacctctcttgctacctctct

SEQ ID NO: 8835 - DNA, 96 bp, Aspergillus thermomutatus
  misc_feature: 101
ttctaaattccatcttccttcttctctttctctttcttatcctttctattcttaaaataaactatccctccctccttttcttcttctctcttaata

SEQ ID NO: 8836 - DNA, 96 bp, Aspergillus thermomutatus
  misc_feature: 101
aaaaggagagagggagtaaaggggaggtaaggaggaagtaaagaggaaggagagagggaataaaggggaggtaaggaggaaggaaagaggaaggaa

SEQ ID NO: 8837 - DNA, 96 bp, Aspergillus thermomutatus
  misc_feature: 101
ataagatagagagatgaatagaataagaaggaagaataaggaatagagagtaggttaataagtaagggtaagagataattaatagagataggggaa

SEQ ID NO: 8838 - DNA, 96 bp, Aspergillus thermomutatus
  misc_feature: 101
ttattaatcctaccccttctatccttcttcttattcatcctttcttttttttttcttttctaatcctaaaaatctcatctccttctctaatctctt

SEQ ID NO: 8839 - DNA, 96 bp, Aspergillus thermomutatus
  misc_feature: 101
ttattaagagagagggaaggaattgagaagagaataaggtgaataaggagagaggagaagagaggagatgagaagagaggagatgagaagagatga

SEQ ID NO: 8840 - DNA, 96 bp, Aspergillus thermomutatus
  misc_feature: 101
gagatgagaagagatgagaagagaggagaggagatgagaagagaagagaacaagaataaatgggaatgaaagagacgaattaatggttaaagataa

SEQ ID NO: 8841 - DNA, 96 bp, Aspergillus thermomutatus
  misc_feature: 101
ataaaatatactataattaatagtataaatactcatgaggcatatttggaaagaatgtaaaaatactcatgaggcatatttggaaagaatagataa

SEQ ID NO: 8842 - DNA, 96 bp, Aspergillus thermomutatus
  misc_feature: 101
ttaaatcttatctcctttctttcttctcttcccttctctctccctatcctctaatctatccttattttatctcctttttaattttaaattcctatt

SEQ ID NO: 8843 - DNA, 96 bp, Aspergillus thermomutatus
  misc_feature: 101
tgggcgggggccccggctcatctgcttcgtctggctggcttgatctggctggcttgatctgtctggctggtctggctgaactctctgagctggtcg

SEQ ID NO: 8844 - DNA, 96 bp, Aspergillus thermomutatus
  misc_feature: 101
ctattcacctctctatctacctctctatctccctaccccactgtctgcctgtctgcctgtctgcctgtctgcctgtctctctagacgcctctctca

SEQ ID NO: 8845 - DNA, 96 bp, Aspergillus thermomutatus
  misc_feature: 101
taaccctaaaccatctctttttcttctcattctcttctcttcttgttcccttctctccttatcctcttcccgttttctcctcgttgtctcttctca

SEQ ID NO: 8846 - DNA, 96 bp, Aspergillus thermomutatus
  misc_feature: 101
catgtctatattccctttactttactaaatcctcttctcatcttccctctctctcttaaattctttcttaaactattaattcctctctctttctca

SEQ ID NO: 8847 - DNA, 96 bp, Aspergillus thermomutatus
  misc_feature: 101
ggatagagtaagggatagatagtttagggagaggagggggtagaaaggtttagagataaagagaggaataagagatagtattaggggtataaaaga

SEQ ID NO: 8848 - DNA, 96 bp, Aspergillus thermomutatus
  misc_feature: 101
gggaggattagaataagtattagaggaagagttagggagagtgtttaaggattaaaagaaagagtagagtaagggataggttaagagaggtaaaga

SEQ ID NO: 8849 - DNA, 96 bp, Aspergillus thermomutatus
  misc_feature: 101
agtaagtataagagtaaggattagtgattttagaaataaaggagtaaaaagtcgatgagagtagagaagatgagatgatataagggaaagagaaga

SEQ ID NO: 8850 - DNA, 96 bp, Aspergillus thermomutatus
  misc_feature: 101
tcttatcctcattctcactctactcctctctcttatcctcattctaaccctcactccttcctccctctaatcctccctctaatcctccctctaatc

SEQ ID NO: 8851 - DNA, 96 bp, Aspergillus thermomutatus
  misc_feature: 101
tcttatcattttccttttcttaaatcctacttcttctctttttttcttctttcttttcttaactcttactttcctctcttttatacccctaatact

SEQ ID NO: 8852 - DNA, 96 bp, Aspergillus thermomutatus
  misc_feature: 101
tcttaaatcttatctcctttctttcttctcttcccttctctctccctatcctctaatctatccttattttatctcctttttaattttaaattccta

SEQ ID NO: 8853 - DNA, 96 bp, Aspergillus thermomutatus
  misc_feature: 101
tctcttctcttcttgttcccttctctccttatcctcttcccgttttctcctcgttgtctcttctcattctcctctcttatcattctctttactttc

SEQ ID NO: 8854 - DNA, 96 bp, Aspergillus thermomutatus
  misc_feature: 101
tctcttctcattctcctctcttatcattctctttactttctctttaccttctcacctcgttcccttctcattcttttctattcttgttcttttctc

SEQ ID NO: 8855 - DNA, 96 bp, Aspergillus thermomutatus
  misc_feature: 101
ggaagaggataagatagagagatgaatagaataagaaggaagaataaggaatagagagtaggttaataagtaagggtaagagataattaatagaga

SEQ ID NO: 8856 - DNA, 96 bp, Aspergillus thermomutatus
  misc_feature: 101
tctacctctctatctccctaccccactgtctgcctgtctgcctgtctgcctgtctgcctgtctctctacctcactgcctacctcatgtcggacctc

SEQ ID NO: 8857 - DNA, 96 bp, Aspergillus thermomutatus
  misc_feature: 101
atgagaagagatgagaagagaggagaggagatgagaagagaagagaacaagaataaatgggaatgaaagagacgaattaatggttaaagataagga

SEQ ID NO: 8858 - DNA, 96 bp, Aspergillus thermomutatus
  misc_feature: 101
tcctctctatctacctctctattcacctctctattcacctctctattcacctctctatctacctctctatctccctaccccactgtctgcctgtct

SEQ ID NO: 8859 - DNA, 96 bp, Aspergillus thermomutatus
  misc_feature: 101
tcctatggtgcctctctacctatctccctacctcttcacctacctcttcacctacctcttcacctacctcttcacctacctcttcacctacctctt

SEQ ID NO: 8860 - DNA, 96 bp, Aspergillus thermomutatus
  misc_feature: 101
aattggagagaggcaagagaataaggagaataataagggataggatagaaaaaagaaacaaaagaaagagaagattttaaggaagataggatagga

SEQ ID NO: 8861 - DNA, 96 bp, Aspergillus thermomutatus
  misc_feature: 101
tccctcttctaatatatattctcctcttctaatccctactatgcttactctactatttcccttctttacttctcctaaactaactaacccttactc

SEQ ID NO: 8862 - DNA, 96 bp, Aspergillus thermomutatus
  misc_feature: 101
gataagatagagagatgaatagaataagaaggaagaataaggaatagagagtaggttaataagtaagggtaagagataattaatagagatagggga

SEQ ID NO: 8863 - DNA, 96 bp, Aspergillus thermomutatus
  misc_feature: 101
ggtagggaggtagggagggaggtagagaggcaccataggaggtatggagcaatgcaccgcgtgaggcacccccagatatgccatgcaaggtttgga

SEQ ID NO: 8864 - DNA, 96 bp, Aspergillus thermomutatus
  misc_feature: 101
aagaggaagaggataagatagagagatgaatagaataagaaggaagaataaggaatagagagtaggttaataagtaagggtaagagataattaata

SEQ ID NO: 8865 - DNA, 96 bp, Aspergillus thermomutatus
  misc_feature: 101
gataaaatatactataattaatagtataaatactcatgaggcatatttggaaagaatgtaaaaatactcatgaggcatatttggaaagaatagata

SEQ ID NO: 8866 - DNA, 96 bp, Aspergillus thermomutatus
  misc_feature: 101
tatataaaagccacgcagggttaggtataaaggcacccacagaggccccatgtaaggcaggcagagaggtagagataggtagagagggacccaagt

SEQ ID NO: 8867 - DNA, 96 bp, Aspergillus thermomutatus
  misc_feature: 101
tagatagtaagggataggataggataggaaaaaagaaaagatttagaaatagaagattaaaggtaaagaggaagggatagagagaggattagagta

SEQ ID NO: 8868 - DNA, 96 bp, Aspergillus thermomutatus
  misc_feature: 101
tagagtaagggatagatagtttagggagaggagggggtagaaaggtttagagataaagagaggaataagagatagtattaggggtataaaagagag

SEQ ID NO: 8869 - DNA, 96 bp, Aspergillus thermomutatus
  misc_feature: 101
tacctctctatctccctaccccactgtctgcctgtctgcctgtctgcctgtctgcctgtctctctacctcactgcctacctcatgtcggacctctt

SEQ ID NO: 8870 - DNA, 96 bp, Aspergillus thermomutatus
  misc_feature: 101
gagacattgtcacagcatgatttcaaaattgtgcattgcaaaggaactgagaatggacaagccgacgcacttagtcgacgaccagactatgaatta

SEQ ID NO: 8871 - DNA, 96 bp, Aspergillus thermomutatus
  misc_feature: 101
taatcctaccccttctatccttcttcttattcatcctttcttttttttttcttttctaatcctaaaaatctcatctccttctctaatctctttgat

SEQ ID NO: 8872 - DNA, 96 bp, Aspergillus thermomutatus
  misc_feature: 101
taaatcttatctcctttctttcttctcttcccttctctctccctatcctctaatctatccttattttatctcctttttaattttaaattcctattt

SEQ ID NO: 8873 - DNA, 96 bp, Aspergillus thermomutatus
  misc_feature: 101
ctatctacctctctatctccctaccccactgtctgcctgtctgcctgtctgcctgtctgcctgtctctctacctcactgcctacctcatgtcggac

SEQ ID NO: 8874 - DNA, 96 bp, Aspergillus thermomutatus
  misc_feature: 101
atcagtcagctggctggcctggacggtctgctgggccttagcctgcacctgggcctgctcccaggcctgcatcacctcatcgaccgcagcctggac

SEQ ID NO: 8875 - DNA, 96 bp, Aspergillus thermomutatus
  misc_feature: 101
ccccagatatgccatgcaaggtttggaccaaggtagccagagagcaaccatatggggcaggtagtatagtagggatcaacacaccccacatagccc

SEQ ID NO: 8876 - DNA, 96 bp, Aspergillus thermomutatus
  misc_feature: 101
gggatagagtaagggatagatagtttagggagaggagggggtagaaaggtttagagataaagagaggaataagagatagtattaggggtataaaag

SEQ ID NO: 8877 - DNA, 96 bp, Aspergillus thermomutatus
  misc_feature: 101
cttatcctcattctcactctactcctctctcttatcctcattctaaccctcactccttcctccctctaatcctccctctaatcctccctctaatcc

SEQ ID NO: 8878 - DNA, 96 bp, Aspergillus thermomutatus
  misc_feature: 101
attcttaaatcttatctcctttctttcttctcttcccttctctctccctatcctctaatctatccttattttatctcctttttaattttaaattcc

SEQ ID NO: 8879 - DNA, 96 bp, Aspergillus thermomutatus
  misc_feature: 101
ggaacaagaagagaagagaatgagaagaaaaagagatggtttagggttaaagagaggaaagtggaaagagaggagaaggataaagtgaagtgacgg

SEQ ID NO: 8880 - DNA, 96 bp, Aspergillus thermomutatus
  misc_feature: 101
aatcttatctcctttctttcttctcttcccttctctctccctatcctctaatctatccttattttatctcctttttaattttaaattcctatttcc

SEQ ID NO: 8881 - DNA, 96 bp, Aspergillus thermomutatus
  misc_feature: 101
accagcaatacagctcctgcgcggcacggttaggattgctccacgaccgcctacttcggtcgcattgtcacgtgaccaactaccatatacccaagc

SEQ ID NO: 8882 - DNA, 96 bp, Aspergillus thermomutatus
  misc_feature: 101
acatacaaccaccaagtacttgcagccacaatcgaactgacagaggatccactgattcaaaaaattattgaagcaacaaaaagggacaaaatcatc

SEQ ID NO: 8883 - DNA, 96 bp, Aspergillus thermomutatus
  misc_feature: 101
gatgagaagagatgagaagagaggagaggagatgagaagagaagagaacaagaataaatgggaatgaaagagacgaattaatggttaaagataagg

SEQ ID NO: 8884 - DNA, 96 bp, Aspergillus thermomutatus
  misc_feature: 101
gatagagtaagggatagatagtttagggagaggagggggtagaaaggtttagagataaagagaggaataagagatagtattaggggtataaaagag

SEQ ID NO: 8885 - DNA, 96 bp, Aspergillus thermomutatus
  misc_feature: 101
gatagagagatgaatagaataagaaggaagaataaggaatagagagtaggttaataagtaagggtaagagataattaatagagataggggaaagag

SEQ ID NO: 8886 - DNA, 96 bp, Aspergillus thermomutatus
  misc_feature: 101
gagttaactctctaccttgatcctctatcgcacctacatctatatgattatgatatacattagattctgataatatatctctaatagttattgaag

SEQ ID NO: 8887 - DNA, 96 bp, Aspergillus thermomutatus
  misc_feature: 101
agtgcgtcggcttgtccattctcagttcctttgcaatgcacaattttgaaatcatgctgtgacaatgtctcagcccatctggcttgtcgtcgtgtc

SEQ ID NO: 8888 - DNA, 96 bp, Aspergillus thermomutatus
  misc_feature: 101
gaatagaataagaaggaagaataaggaatagagagtaggttaataagtaagggtaagagataattaatagagataggggaaagaggaatgataagg

SEQ ID NO: 8889 - DNA, 96 bp, Aspergillus thermomutatus
  misc_feature: 101
gaagatgagatgatataagggaaagagaagattaaagcgaagagagtgaaggaagggatgttgatggacagtgtgataaggtaagggttatttagt

SEQ ID NO: 8890 - DNA, 96 bp, Aspergillus thermomutatus
  misc_feature: 101
gaagaggataagatagagagatgaatagaataagaaggaagaataaggaatagagagtaggttaataagtaagggtaagagataattaatagagat

SEQ ID NO: 8891 - DNA, 96 bp, Aspergillus thermomutatus
  misc_feature: 101
atatactataattaatagtataaatactcatgaggcatatttggaaagaatgtaaaaatactcatgaggcatatttggaaagaatagataaatttc

SEQ ID NO: 8892 - DNA, 96 bp, Aspergillus thermomutatus
  misc_feature: 101
caccagcaatacagctcctgcgcggcacggttaggattgctccacgaccgcctacttcggtcgcattgtcacgtgaccaactaccatatacccaag

SEQ ID NO: 8893 - DNA, 96 bp, Aspergillus thermomutatus
  misc_feature: 101
cttctaaattccatcttccttcttctctttctctttcttatcctttctattcttaaaataaactatccctccctccttttcttcttctctcttaat

SEQ ID NO: 8894 - DNA, 96 bp, Aspergillus thermomutatus
  misc_feature: 101
agatgagaagagatgagaagagaggagaggagatgagaagagaagagaacaagaataaatgggaatgaaagagacgaattaatggttaaagataag

SEQ ID NO: 8895 - DNA, 96 bp, Aspergillus thermomutatus
  misc_feature: 101
ctgagacattgtcacagcatgatttcaaaattgtgcattgcaaaggaactgagaatggacaagccgacgcacttagtcgacgaccagactatgaat

SEQ ID NO: 8896 - DNA, 96 bp, Aspergillus thermomutatus
  misc_feature: 101
ctctattcacctctctatctacctctctatctccctaccccactgtctgcctgtctgcctgtctgcctgtctgcctgtctctctagacgcctctct

SEQ ID NO: 8897 - DNA, 96 bp, Aspergillus thermomutatus
  misc_feature: 101
ctacctctctatctccctaccccactgtctgcctgtctgcctgtctgcctgtctgcctgtctctctacctcactgcctacctcatgtcggacctct

SEQ ID NO: 8898 - DNA, 96 bp, Aspergillus thermomutatus
  misc_feature: 101
ccggcgggcgcgcgcgcgcgcgagcattaggcggcagcggtccggggcaggccagcaggcaggggggcgcgcgcgcggcggtgaccagttggccgg

SEQ ID NO: 8899 - DNA, 96 bp, Aspergillus thermomutatus
  misc_feature: 101
ccatgttgtgtttcttcattgctgaccatggcgtctaaagcatccgttcgaaagaaaagtttggcccgaaaaatcgaagatcaaggtttcctaatg

SEQ ID NO: 8900 - DNA, 96 bp, Aspergillus thermomutatus
  misc_feature: 101
cataccatgctttctaccttgcacggcgcctctctccctactatctgcggttcctcactccctaccatactacctacctcctgcagtacctctctt

SEQ ID NO: 8901 - DNA, 96 bp, Aspergillus thermomutatus
  misc_feature: 101
cagtcagctggctggcctggacggtctgctgggccttagcctgcacctgggcctgctcccaggcctgcatcacctcatcgaccgcagcctggacat

SEQ ID NO: 8902 - DNA, 96 bp, Aspergillus thermomutatus
  misc_feature: 101
attcacctctctatctacctctctatctccctaccccactgtctgcctgtctgcctgtctgcctgtctgcctgtctctctagacgcctctctcaat

SEQ ID NO: 8903 - DNA, 96 bp, Aspergillus thermomutatus
  misc_feature: 101
aaccctaaaccatctctttttcttctcattctcttctcttcttgttcccttctctccttatcctcttcccgttttctcctcgttgtctcttctcat

SEQ ID NO: 8904 - DNA, 96 bp, Aspergillus thermomutatus
  misc_feature: 101
atctacctctctatctccctaccccactgtctgcctgtctgcctgtctgcctgtctgcctgtctctctacctcactgcctacctcatgtcggacct

SEQ ID NO: 8905 - DNA, 96 bp, Aspergillus thermomutatus
  misc_feature: 101
aagaatagataaatttccccctaaaccttcacctaatagagatattagtatacctaatttactaaataagcctaaattattaaacaaataggtact

SEQ ID NO: 8906 - DNA, 96 bp, Aspergillus thermomutatus
  misc_feature: 101
acctctctatctccctaccccactgtctgcctgtctgcctgtctgcctgtctgcctgtctctctacctcactgcctacctcatgtcggacctcttt

SEQ ID NO: 8907 - DNA, 96 bp, Aspergillus thermomutatus
  misc_feature: 100
aagagaatgataagagaggagaatgagaagagacaacgaggagaaaacgggaagaggataaggagagaagggaacaagaagagaagagaatgagaa

SEQ ID NO: 8908 - DNA, 96 bp, Aspergillus thermomutatus
  misc_feature: 100
ttccctttactttactaaatcctcttctcatcttccctctctctcttaaattctttcttaaactattaattcctctctctttctcactccctcttc

SEQ ID NO: 8909 - DNA, 96 bp, Aspergillus thermomutatus
  misc_feature: 100
ttatcctcattctcactctactcctctctcttatcctcattctaaccctcactccttcctccctctaatcctccctctaatcctccctctaatcct

SEQ ID NO: 8910 - DNA, 96 bp, Aspergillus thermomutatus
  misc_feature: 100
ttagtgggaggattagaataagtattagaggaagagttagggagagtgtttaaggattaaaagaaagagtagagtaagggataggttaagagaggt

SEQ ID NO: 8911 - DNA, 96 bp, Aspergillus thermomutatus
  misc_feature: 100
ttagggagagtaattatagtaatggttaaagagagaataagaaaagaagagaagataaaagagagagagatttttagttaggattaaagatagtaa

SEQ ID NO: 8912 - DNA, 96 bp, Aspergillus thermomutatus
  misc_feature: 100
cttatctcctttctttcttctcttcccttctctctccctatcctctaatctatccttattttatctcctttttaattttaaattcctatttcctaa

SEQ ID NO: 8913 - DNA, 96 bp, Aspergillus thermomutatus
  misc_feature: 100
ctactaaccctcactcttatcctcattctcactctactcctctctcttatcctcattctaaccctcactccttcctccctctaatcctccctctaa

SEQ ID NO: 8914 - DNA, 96 bp, Aspergillus thermomutatus
  misc_feature: 100
tcagtcagctggctggcctggacggtctgctgggccttagcctgcacctgggcctgctcccaggcctgcatcacctcatcgaccgcagcctggaca

SEQ ID NO: 8915 - DNA, 96 bp, Aspergillus thermomutatus
  misc_feature: 100
atcaccagcaatacagctcctgcgcggcacggttaggattgctccacgaccgcctacttcggtcgcattgtcacgtgaccaactaccatataccca

SEQ ID NO: 8916 - DNA, 96 bp, Aspergillus thermomutatus
  misc_feature: 100
ctgcctctctatcttcctctctatctacctctctattcacctctctattcacctctctattcacctctctatctacctctctatctccctacccca

SEQ ID NO: 8917 - DNA, 96 bp, Aspergillus thermomutatus
  misc_feature: 100
actaaggagaactttctggatctctacaagggagcacgaaaagcactatcaccttctaatatcagcagcggatttagggcttctggcctggttcca

SEQ ID NO: 8918 - DNA, 96 bp, Aspergillus thermomutatus
  misc_feature: 100
tgcctctctatcttcctctctatctacctctctattcacctctctattcacctctctattcacctctctatctacctctctatctccctaccccac

SEQ ID NO: 8919 - DNA, 96 bp, Aspergillus thermomutatus
  misc_feature: 100
cattctcctctcttatcattctctttactttctctttaccttctcacctcgttcccttctcattcttttctattcttgttcttttctctcttctca

SEQ ID NO: 8920 - DNA, 96 bp, Aspergillus thermomutatus
  misc_feature: 100
tcttctaatatatattctcctcttctaatccctactatgcttactctactatttcccttctttacttctcctaaactaactaacccttactcatct

SEQ ID NO: 8921 - DNA, 96 bp, Aspergillus thermomutatus
  misc_feature: 100
tcttcctctctatctacctctctattcacctctctattcacctctctattcacctctctatctacctctctatctccctaccccactgtctgcctg

SEQ ID NO: 8922 - DNA, 96 bp, Aspergillus thermomutatus
  misc_feature: 100
atagagtaagggatagatagtttagggagaggagggggtagaaaggtttagagataaagagaggaataagagatagtattaggggtataaaagaga

SEQ ID NO: 8923 - DNA, 96 bp, Aspergillus thermomutatus
  misc_feature: 100
tctcttaatatttcctcccttcctttctcctcaacttctttgattcttctatcctctcttcctttcccttatctatacttctcataaactacaatt

SEQ ID NO: 8924 - DNA, 96 bp, Aspergillus thermomutatus
  misc_feature: 100
tctcctctcttatcattctctttactttctctttaccttctcacctcgttcccttctcattcttttctattcttgttcttttctctcttctcattc

SEQ ID NO: 8925 - DNA, 96 bp, Aspergillus thermomutatus
  misc_feature: 100
aaagagaatgataagagaggagaatgagaagagacaacgaggagaaaacgggaagaggataaggagagaagggaacaagaagagaagagaatgaga

SEQ ID NO: 8926 - DNA, 96 bp, Aspergillus thermomutatus
  misc_feature: 100
cagcacggcagactacacatcattgagagaggcgtctagagagacaggcagacaggcagacaggcagacaggcagacagtggggtagggagataga

SEQ ID NO: 8927 - DNA, 96 bp, Aspergillus thermomutatus
  misc_feature: 100
tcattctcctctcttatcattctctttactttctctttaccttctcacctcgttcccttctcattcttttctattcttgttcttttctctcttctc

SEQ ID NO: 8928 - DNA, 96 bp, Aspergillus thermomutatus
  misc_feature: 100
acagcaggcaaaacagcaggcagaacggtaggcagaacggcaggcagaacggtaggcagaacggcaggcagaacggcaggttgaatagcaggttga

SEQ ID NO: 8929 - DNA, 96 bp, Aspergillus thermomutatus
  misc_feature: 100
acagagtccttgcgctctatcagagttgccttcgaactagctatcatccgaagtgctttcgacatgcagttctgacaataatccaaaaaccaaata

SEQ ID NO: 8930 - DNA, 96 bp, Aspergillus thermomutatus
  misc_feature: 100
ggcagcacggcagactacacatcattgagagaggcgtctagagagacaggcagacaggcagacaggcagacaggcagacagtggggtagggagata

SEQ ID NO: 8931 - DNA, 96 bp, Aspergillus thermomutatus
  misc_feature: 100
tatctacctctctatctccctaccccactgtctgcctgtctgcctgtctgcctgtctgcctgtctctctacctcactgcctacctcatgtcggacc

SEQ ID NO: 8932 - DNA, 96 bp, Aspergillus thermomutatus
  misc_feature: 100
gtgctattctacgtgctattctacgtgctattctacgtgctattctacgtgctattctacatgctattcgacgtgctattctatgtgctattcaac

SEQ ID NO: 8933 - DNA, 96 bp, Aspergillus thermomutatus
  misc_feature: 100
gaggcacccccagatatgccatgcaaggtttggaccaaggtagccagagagcaaccatatggggcaggtagtatagtagggatcaacacaccccac

SEQ ID NO: 8934 - DNA, 96 bp, Aspergillus thermomutatus
  misc_feature: 100
gtaagcatagtaatatatgtaggtatataaaagccacgcagggttaggtataaaggcacccacagaggccccatgtaaggcagggttaaggcaggc

SEQ ID NO: 8935 - DNA, 96 bp, Aspergillus thermomutatus
  misc_feature: 100
ggctgcacatacttcttgatagcggcctcgttcatgtatgccagcagcggccggtatggggtctgcccccgctcagaccgcacggcttccacctgg

SEQ ID NO: 8936 - DNA, 96 bp, Aspergillus thermomutatus
  misc_feature: 100
cccccagatatgccatgcaaggtttggaccaaggtagccagagagcaaccatatggggcaggtagtatagtagggatcaacacaccccacatagcc

SEQ ID NO: 8937 - DNA, 96 bp, Aspergillus thermomutatus
  misc_feature: 100
atcctcattctcactctactcctctctcttatcctcattctaaccctcactccttcctccctctaatcctccctctaatcctccctctaatcctcc

SEQ ID NO: 8938 - DNA, 96 bp, Aspergillus thermomutatus
  misc_feature: 100
ggaggattagaataagtattagaggaagagttagggagagtgtttaaggattaaaagaaagagtagagtaagggataggttaagagaggtaaagag

SEQ ID NO: 8939 - DNA, 96 bp, Aspergillus thermomutatus
  misc_feature: 100
gccggcgggcgcgcgcgcgcgcgagcattaggcggcagcggtccggggcaggccagcaggcaggggggcgcgcgcgcggcggtgaccagttggccg

SEQ ID NO: 8940 - DNA, 96 bp, Aspergillus thermomutatus
  misc_feature: 100
ctaattatctttaatctctggtataaccaccctaacttataatatatattaatacctactatgcctcactgcctacctcctggggttcctctatgc

SEQ ID NO: 8941 - DNA, 96 bp, Aspergillus thermomutatus
  misc_feature: 100
gcagcacggcagactacacatcattgagagaggcgtctagagagacaggcagacaggcagacaggcagacaggcagacagtggggtagggagatag

SEQ ID NO: 8942 - DNA, 96 bp, Aspergillus thermomutatus
  misc_feature: 100
ctcttctaatatatattctcctcttctaatccctactatgcttactctactatttcccttctttacttctcctaaactaactaacccttactcatc

SEQ ID NO: 8943 - DNA, 96 bp, Aspergillus thermomutatus
  misc_feature: 100
acaacaagaaatcagggttctacgggcagagaatgaacggaaaagaaagaagaaggcaagaatacgtgctaatctaggtggtgataccattttatc

SEQ ID NO: 8944 - DNA, 96 bp, Aspergillus thermomutatus
  misc_feature: 100
ctctctcttcatgtctatattccctttactttactaaatcctcttctcatcttccctctctctcttaaattctttcttaaactattaattcctctc

SEQ ID NO: 8945 - DNA, 96 bp, Aspergillus thermomutatus
  misc_feature: 100
atctgcctgcctccgcgtgctattctatgtgcatcctacatgctattcgacgtgctattctacgtgctattctacgtgctattctacgtgctattc

SEQ ID NO: 8946 - DNA, 96 bp, Aspergillus thermomutatus
  misc_feature: 100
aataactatcccttactctttctaaaacctaactcttaccctcctttttcttctctttcctttactctctttcccttctaaattccatcttccttc

SEQ ID NO: 8947 - DNA, 96 bp, Aspergillus thermomutatus
  misc_feature: 100
agagaatgataagagaggagaatgagaagagacaacgaggagaaaacgggaagaggataaggagagaagggaacaagaagagaagagaatgagaag

SEQ ID NO: 8948 - DNA, 96 bp, Aspergillus thermomutatus
  misc_feature: 100
cttcctctctatctacctctctattcacctctctattcacctctctattcacctctctatctacctctctatctccctaccccactgtctgcctgt

SEQ ID NO: 8949 - DNA, 96 bp, Aspergillus thermomutatus
  misc_feature: 100
cttattaatcctaccccttctatccttcttcttattcatcctttcttttttttttcttttctaatcctaaaaatctcatctccttctctaatctct

SEQ ID NO: 8950 - DNA, 96 bp, Aspergillus thermomutatus
  misc_feature: 100
cagatatgccatgcaaggtttggaccaaggtagccagagagcaaccatatggggcaggtagtatagtagggatcaacacaccccacatagccccag

SEQ ID NO: 8951 - DNA, 96 bp, Aspergillus thermomutatus
  misc_feature: 100
ccatctaggatggcagcaggcatgttaggcagcacggcagactacacatcattgagagaggcgtctagagagacaggcagacaggcagacaggcag

SEQ ID NO: 8952 - DNA, 96 bp, Aspergillus thermomutatus
  misc_feature: 100
ctcttttctccttcttattctcttcttattttcctcttgttcttattctcttctctttctctttgattctccctcttctctcttgacctctcttct

SEQ ID NO: 8953 - DNA, 96 bp, Aspergillus thermomutatus
  misc_feature: 100
ctctcttattaatcctaccccttctatccttcttcttattcatcctttcttttttttttcttttctaatcctaaaaatctcatctccttctctaat

SEQ ID NO: 8954 - DNA, 96 bp, Aspergillus thermomutatus
  misc_feature: 100
agcacggcagactacacatcattgagagaggcgtctagagagacaggcagacaggcagacaggcagacaggcagacagtggggtagggagatagag

SEQ ID NO: 8955 - DNA, 96 bp, Aspergillus thermomutatus
  misc_feature: 100
ctcctcgttgtctcttctcattctcctctcttatcattctctttactttctctttaccttctcacctcgttcccttctcattcttttctattcttg

SEQ ID NO: 8956 - DNA, 96 bp, Aspergillus thermomutatus
  misc_feature: 100
ctcaccatgttgtgtttcttcattgctgaccatggcgtctaaagcatccgttcgaaagaaaagtttggcccgaaaaatcgaagatcaaggtttcct

SEQ ID NO: 8957 - DNA, 96 bp, Aspergillus thermomutatus
  misc_feature: 100
ctaaggagaactttctggatctctacaagggagcacgaaaagcactatcaccttctaatatcagcagcggatttagggcttctggcctggttccat

SEQ ID NO: 8958 - DNA, 96 bp, Aspergillus thermomutatus
  misc_feature: 100
cggttaggattgctccacgaccgcctacttcggtcgcattgtcacgtgaccaactaccatatacccaagcttggcaatggtagatggtatacaact

SEQ ID NO: 8959 - DNA, 96 bp, Aspergillus thermomutatus
  misc_feature: 100
cgaggagaaaacgggaagaggataaggagagaagggaacaagaagagaagagaatgagaagaaaaagagatggtttagggttaaagagaggaaagt

SEQ ID NO: 8960 - DNA, 96 bp, Aspergillus thermomutatus
  misc_feature: 100
ccgccatctaggatggcagcaggcatgttaggcagcacggcagactacacatcattgagagaggcgtctagagagacaggcagacaggcagacagg

SEQ ID NO: 8961 - DNA, 96 bp, Aspergillus thermomutatus
  misc_feature: 100
agtaagcatagtaatatatgtaggtatataaaagccacgcagggttaggtataaaggcacccacagaggccccatgtaaggcagggttaaggcagg

SEQ ID NO: 8962 - DNA, 96 bp, Aspergillus thermomutatus
  misc_feature: 100
agagtaagggatagatagtttagggagaggagggggtagaaaggtttagagataaagagaggaataagagatagtattaggggtataaaagagagg

SEQ ID NO: 8963 - DNA, 96 bp, Aspergillus thermomutatus
  misc_feature: 100
cagtggggtagggagatagagaggtagatagagaggtgaatagagaggtgaatagagaggtgaatagagaggtagatagagaggaagatagagagg

SEQ ID NO: 8964 - DNA, 96 bp, Aspergillus thermomutatus
  misc_feature: 100
catgttgtgtttcttcattgctgaccatggcgtctaaagcatccgttcgaaagaaaagtttggcccgaaaaatcgaagatcaaggtttcctaatgg

SEQ ID NO: 8965 - DNA, 96 bp, Aspergillus thermomutatus
  misc_feature: 100
aacagcaggcaaaacagcaggcagaacggtaggcagaacggcaggcagaacggtaggcagaacggcaggcagaacggcaggttgaatagcaggttg

SEQ ID NO: 8966 - DNA, 96 bp, Aspergillus thermomutatus
  misc_feature: 100
accatgttgtgtttcttcattgctgaccatggcgtctaaagcatccgttcgaaagaaaagtttggcccgaaaaatcgaagatcaaggtttcctaat

SEQ ID NO: 8967 - DNA, 96 bp, Aspergillus thermomutatus
  misc_feature: 100
atggctgcacatacttcttgatagcggcctcgttcatgtatgccagcagcggccggtatggggtctgcccccgctcagaccgcacggcttccacct

SEQ ID NO: 8968 - DNA, 96 bp, Aspergillus thermomutatus
  misc_feature: 100
aggagatgagaagagatgagaagagaggagaggagatgagaagagaagagaacaagaataaatgggaatgaaagagacgaattaatggttaaagat

SEQ ID NO: 8969 - DNA, 96 bp, Aspergillus thermomutatus
  misc_feature: 100
actttcagatcctgtcaaaacacccccagtagcaataaaagatcttggggctgtacgcttccgcttctgcttttctttcgctgcgcgaagctcagt

SEQ ID NO: 8970 - DNA, 96 bp, Aspergillus thermomutatus
  misc_feature: 99
aagggatagagtaagggatagatagtttagggagaggagggggtagaaaggtttagagataaagagaggaataagagatagtattaggggtataaa

SEQ ID NO: 8971 - DNA, 96 bp, Aspergillus thermomutatus
  misc_feature: 99
ttggtatatttgcggaatctcatctacatacctgagtgtatgagaaccgaaatcatcgcgaaacaccacgatgacccaatgcatggtcatatggga

SEQ ID NO: 8972 - DNA, 96 bp, Aspergillus thermomutatus
  misc_feature: 99
atatttgataaaatatactataattaatagtataaatactcatgaggcatatttggaaagaatgtaaaaatactcatgaggcatatttggaaagaa

SEQ ID NO: 8973 - DNA, 96 bp, Aspergillus thermomutatus
  misc_feature: 99
agaatgataagagaggagaatgagaagagacaacgaggagaaaacgggaagaggataaggagagaagggaacaagaagagaagagaatgagaagaa

SEQ ID NO: 8974 - DNA, 96 bp, Aspergillus thermomutatus
  misc_feature: 99
ttctgctcccttatcctttttctctctggaatatgctcaacttttaactattacataccttctcattcagttatatatcccttatggcatatattc

SEQ ID NO: 8975 - DNA, 96 bp, Aspergillus thermomutatus
  misc_feature: 99
aaagtaaagagaatgataagagaggagaatgagaagagacaacgaggagaaaacgggaagaggataaggagagaagggaacaagaagagaagagaa

SEQ ID NO: 8976 - DNA, 96 bp, Aspergillus thermomutatus
  misc_feature: 99
ttctcctcgttgtctcttctcattctcctctcttatcattctctttactttctctttaccttctcacctcgttcccttctcattcttttctattct

SEQ ID NO: 8977 - DNA, 96 bp, Aspergillus thermomutatus
  misc_feature: 99
ttcgcatcagtcagctggctggcctggacggtctgctgggccttagcctgcacctgggcctgctcccaggcctgcatcacctcatcgaccgcagcc

SEQ ID NO: 8978 - DNA, 96 bp, Aspergillus thermomutatus
  misc_feature: 99
aagaaaaaggagagagggagtaaaggggaggtaaggaggaagtaaagaggaaggagagagggaataaaggggaggtaaggaggaaggaaagaggaa

SEQ ID NO: 8979 - DNA, 96 bp, Aspergillus thermomutatus
  misc_feature: 99
atgaatagaataagaaggaagaataaggaatagagagtaggttaataagtaagggtaagagataattaatagagataggggaaagaggaatgataa

SEQ ID NO: 8980 - DNA, 96 bp, Aspergillus thermomutatus
  misc_feature: 99
acacaatcattaggtgcgtcttccaatccaatgtatctaccaatgtgcgtttccaatgtttctaatgtgctcagtaagatgaggagcgagttctaa

SEQ ID NO: 8981 - DNA, 96 bp, Aspergillus thermomutatus
  misc_feature: 99
aggcacccccagatatgccatgcaaggtttggaccaaggtagccagagagcaaccatatggggcaggtagtatagtagggatcaacacaccccaca

SEQ ID NO: 8982 - DNA, 96 bp, Aspergillus thermomutatus
  misc_feature: 99
tgtctatattccctttactttactaaatcctcttctcatcttccctctctctcttaaattctttcttaaactattaattcctctctctttctcact

SEQ ID NO: 8983 - DNA, 96 bp, Aspergillus thermomutatus
  misc_feature: 99
gccccatgtaaggcaggcagagaggtagagataggtagagagggacccaagtagcaggccataaggcaggccgtgagacacacagagaggtgtaca

SEQ ID NO: 8984 - DNA, 96 bp, Aspergillus thermomutatus
  misc_feature: 99
tgaggcacccccagatatgccatgcaaggtttggaccaaggtagccagagagcaaccatatggggcaggtagtatagtagggatcaacacacccca

SEQ ID NO: 8985 - DNA, 96 bp, Aspergillus thermomutatus
  misc_feature: 99
ccaaaagcgcgctccaggatatccagaatgtcttgatagtcattaagggtgcagattcccttcttgatgtaagggaggatctgggcgtagggcgca

SEQ ID NO: 8986 - DNA, 96 bp, Aspergillus thermomutatus
  misc_feature: 99
ggagtaagcatagtaatatatgtaggtatataaaagccacgcagggttaggtataaaggcacccacagaggccccatgtaaggcagggttaaggca

SEQ ID NO: 8987 - DNA, 96 bp, Aspergillus thermomutatus
  misc_feature: 99
taagcatagtaatatatgtaggtatataaaagccacgcagggttaggtataaaggcacccacagaggccccatgtaaggcagggttaaggcaggca

SEQ ID NO: 8988 - DNA, 96 bp, Aspergillus thermomutatus
  misc_feature: 99
cgggggccccggctcatctgcttcgtctggctggcttgatctggctggcttgatctgtctggctggtctggctgaactctctgagctggtcgggca

SEQ ID NO: 8989 - DNA, 96 bp, Aspergillus thermomutatus
  misc_feature: 99
tgagacattgtcacagcatgatttcaaaattgtgcattgcaaaggaactgagaatggacaagccgacgcacttagtcgacgaccagactatgaatt

SEQ ID NO: 8990 - DNA, 96 bp, Aspergillus thermomutatus
  misc_feature: 99
tgagaagagatgagaagagaggagaggagatgagaagagaagagaacaagaataaatgggaatgaaagagacgaattaatggttaaagataaggac

SEQ ID NO: 8991 - DNA, 96 bp, Aspergillus thermomutatus
  misc_feature: 99
catatttgataaaatatactataattaatagtataaatactcatgaggcatatttggaaagaatgtaaaaatactcatgaggcatatttggaaaga

SEQ ID NO: 8992 - DNA, 96 bp, Aspergillus thermomutatus
  misc_feature: 99
tcttgtacagataaaatggtatcaccacctagattagcacgtattcttgccttcttctttcttttccgttcattctctgcccgtagaaccctgatt

SEQ ID NO: 8993 - DNA, 96 bp, Aspergillus thermomutatus
  misc_feature: 99
tcttatctcctttctttcttctcttcccttctctctccctatcctctaatctatccttattttatctcctttttaattttaaattcctatttccta

SEQ ID NO: 8994 - DNA, 96 bp, Aspergillus thermomutatus
  misc_feature: 99
tctcttctctctctttctatccttcttttccaccctcctccttttacaacctataatttctactaaccctcactcttatcctcattctcactctac

SEQ ID NO: 8995 - DNA, 96 bp, Aspergillus thermomutatus
  misc_feature: 99
tctctattcacctctctatctacctctctatctccctaccccactgtctgcctgtctgcctgtctgcctgtctgcctgtctctctagacgcctctc

SEQ ID NO: 8996 - DNA, 96 bp, Aspergillus thermomutatus
  misc_feature: 99
tctcctcgttgtctcttctcattctcctctcttatcattctctttactttctctttaccttctcacctcgttcccttctcattcttttctattctt

SEQ ID NO: 8997 - DNA, 96 bp, Aspergillus thermomutatus
  misc_feature: 99
tctattcacctctctatctacctctctatctccctaccccactgtctgcctgtctgcctgtctgcctgtctgcctgtctctctagacgcctctctc

SEQ ID NO: 8998 - DNA, 96 bp, Aspergillus thermomutatus
  misc_feature: 99
gagtagatagtaagggataggataggataggaaaaaagaaaagatttagaaatagaagattaaaggtaaagaggaagggatagagagaggattaga

SEQ ID NO: 8999 - DNA, 96 bp, Aspergillus thermomutatus
  misc_feature: 99
tcgttgtctcttctcattctcctctcttatcattctctttactttctctttaccttctcacctcgttcccttctcattcttttctattcttgttct

SEQ ID NO: 9000 - DNA, 96 bp, Aspergillus thermomutatus
  misc_feature: 99
cggagaccccgaagagttctctgaacatgtcgccagccatggtactgagtggtatgagtactgccgactagcatacgaatacatccagaaagccga

SEQ ID NO: 9001 - DNA, 96 bp, Aspergillus thermomutatus
  misc_feature: 99
tcctcgttgtctcttctcattctcctctcttatcattctctttactttctctttaccttctcacctcgttcccttctcattcttttctattcttgt

SEQ ID NO: 9002 - DNA, 96 bp, Aspergillus thermomutatus
  misc_feature: 99
gagatgaatagaataagaaggaagaataaggaatagagagtaggttaataagtaagggtaagagataattaatagagataggggaaagaggaatga

SEQ ID NO: 9003 - DNA, 96 bp, Aspergillus thermomutatus
  misc_feature: 99
tcaccatgttgtgtttcttcattgctgaccatggcgtctaaagcatccgttcgaaagaaaagtttggcccgaaaaatcgaagatcaaggtttccta

SEQ ID NO: 9004 - DNA, 96 bp, Aspergillus thermomutatus
  misc_feature: 99
gcaggcaaaacagcaggcagaacggtaggcagaacggcaggcagaacggtaggcagaacggcaggcagaacggcaggttgaatagcaggttgaata

SEQ ID NO: 9005 - DNA, 96 bp, Aspergillus thermomutatus
  misc_feature: 99
tatcctcattctcactctactcctctctcttatcctcattctaaccctcactccttcctccctctaatcctccctctaatcctccctctaatcctc

SEQ ID NO: 9006 - DNA, 96 bp, Aspergillus thermomutatus
  misc_feature: 99
ggaaattggagagaggcaagagaataaggagaataataagggataggatagaaaaaagaaacaaaagaaagagaagattttaaggaagataggata

SEQ ID NO: 9007 - DNA, 96 bp, Aspergillus thermomutatus
  misc_feature: 99
gatgaatagaataagaaggaagaataaggaatagagagtaggttaataagtaagggtaagagataattaatagagataggggaaagaggaatgata

SEQ ID NO: 9008 - DNA, 96 bp, Aspergillus thermomutatus
  misc_feature: 99
taggtatataaaagccacgcagggttaggtataaaggcacccacagaggccccatgtaaggcaggcagagaggtagagataggtagagagggaccc

SEQ ID NO: 9009 - DNA, 96 bp, Aspergillus thermomutatus
  misc_feature: 99
tactgggcgggggccccggctcatctgcttcgtctggctggcttgatctggctggcttgatctgtctggctggtctggctgaactctctgagctgg

SEQ ID NO: 9010 - DNA, 96 bp, Aspergillus thermomutatus
  misc_feature: 99
aggtatggagcaatgcaccgcgtgaggcacccccagatatgccatgcaaggtttggaccaaggtagccagagagcaaccatatggggcaggtagta

SEQ ID NO: 9011 - DNA, 96 bp, Aspergillus thermomutatus
  misc_feature: 99
tacctctcttgctacctctcttgctacctctcttactacctctcttgctacctctctactggctttactccctaccttggtccctacgtatttgcc

SEQ ID NO: 9012 - DNA, 96 bp, Aspergillus thermomutatus
  misc_feature: 99
atatccctcttctaatatatattctcctcttctaatccctactatgcttactctactatttcccttctttacttctcctaaactaactaaccctta

SEQ ID NO: 9013 - DNA, 96 bp, Aspergillus thermomutatus
  misc_feature: 99
ctacaacaagaaatcagggttctacgggcagagaatgaacggaaaagaaagaagaaggcaagaatacgtgctaatctaggtggtgataccatttta

SEQ ID NO: 9014 - DNA, 96 bp, Aspergillus thermomutatus
  misc_feature: 99
taaaaagagagaaaggggaaattggagagaggcaagagaataaggagaataataagggataggatagaaaaaagaaacaaaagaaagagaagattt

SEQ ID NO: 9015 - DNA, 96 bp, Aspergillus thermomutatus
  misc_feature: 99
gttaaagagagaataagaaaagaagagaagataaaagagagagagatttttagttaggattaaagatagtaaaaagagagaaaggggaaattggag

SEQ ID NO: 9016 - DNA, 96 bp, Aspergillus thermomutatus
  misc_feature: 99
ccccatgtaaggcaggcagagaggtagagataggtagagagggacccaagtagcaggccataaggcaggccgtgagacacacagagaggtgtacac

SEQ ID NO: 9017 - DNA, 96 bp, Aspergillus thermomutatus
  misc_feature: 99
ggccccatgtaaggcaggcagagaggtagagataggtagagagggacccaagtagcaggccataaggcaggccgtgagacacacagagaggtgtac

SEQ ID NO: 9018 - DNA, 96 bp, Aspergillus thermomutatus
  misc_feature: 99
gtaaaaagagagaaaggggaaattggagagaggcaagagaataaggagaataataagggataggatagaaaaaagaaacaaaagaaagagaagatt

SEQ ID NO: 9019 - DNA, 96 bp, Aspergillus thermomutatus
  misc_feature: 99
ggtatggagcaatgcaccgcgtgaggcacccccagatatgccatgcaaggtttggaccaaggtagccagagagcaaccatatggggcaggtagtat

SEQ ID NO: 9020 - DNA, 96 bp, Aspergillus thermomutatus
  misc_feature: 99
ggcacccccagatatgccatgcaaggtttggaccaaggtagccagagagcaaccatatggggcaggtagtatagtagggatcaacacaccccacat

SEQ ID NO: 9021 - DNA, 96 bp, Aspergillus thermomutatus
  misc_feature: 99
ctataatttctactaaccctcactcttatcctcattctcactctactcctctctcttatcctcattctaaccctcactccttcctccctctaatcc

SEQ ID NO: 9022 - DNA, 96 bp, Aspergillus thermomutatus
  misc_feature: 99
ggaattgagaagagaataaggtgaataaggagagaggagaagagaggagatgagaagagaggagatgagaagagatgagaagagaggagaggagat

SEQ ID NO: 9023 - DNA, 96 bp, Aspergillus thermomutatus
  misc_feature: 99
gctacaacaagaaatcagggttctacgggcagagaatgaacggaaaagaaagaagaaggcaagaatacgtgctaatctaggtggtgataccatttt

SEQ ID NO: 9024 - DNA, 96 bp, Aspergillus thermomutatus
  misc_feature: 99
ctacctctcttgctacctctcttgctacctctcttactacctctcttgctacctctctactggctttactccctaccttggtccctacgtatttgc

SEQ ID NO: 9025 - DNA, 96 bp, Aspergillus thermomutatus
  misc_feature: 99
gatatgccatgcaaggtttggaccaaggtagccagagagcaaccatatggggcaggtagtatagtagggatcaacacaccccacatagccccagag

SEQ ID NO: 9026 - DNA, 96 bp, Aspergillus thermomutatus
  misc_feature: 99
gaggtatggagcaatgcaccgcgtgaggcacccccagatatgccatgcaaggtttggaccaaggtagccagagagcaaccatatggggcaggtagt

SEQ ID NO: 9027 - DNA, 96 bp, Aspergillus thermomutatus
  misc_feature: 99
ctgggcgggggccccggctcatctgcttcgtctggctggcttgatctggctggcttgatctgtctggctggtctggctgaactctctgagctggtc

SEQ ID NO: 9028 - DNA, 96 bp, Aspergillus thermomutatus
  misc_feature: 99
gaacagcaggcaaaacagcaggcagaacggtaggcagaacggcaggcagaacggtaggcagaacggcaggcagaacggcaggttgaatagcaggtt

SEQ ID NO: 9029 - DNA, 96 bp, Aspergillus thermomutatus
  misc_feature: 99
gaaattggagagaggcaagagaataaggagaataataagggataggatagaaaaaagaaacaaaagaaagagaagattttaaggaagataggatag

SEQ ID NO: 9030 - DNA, 96 bp, Aspergillus thermomutatus
  misc_feature: 99
aaaagagaaggattaggaaataggaatttaaaattaaaaaggagataaaataaggatagattagaggatagggagagagaagggaagagaagaaag

SEQ ID NO: 9031 - DNA, 96 bp, Aspergillus thermomutatus
  misc_feature: 99
aaggagagagggagtaaaggggaggtaaggaggaagtaaagaggaaggagagagggaataaaggggaggtaaggaggaaggaaagaggaaggaaag

SEQ ID NO: 9032 - DNA, 96 bp, Aspergillus thermomutatus
  misc_feature: 99
agaaaaaggagagagggagtaaaggggaggtaaggaggaagtaaagaggaaggagagagggaataaaggggaggtaaggaggaaggaaagaggaag

SEQ ID NO: 9033 - DNA, 96 bp, Aspergillus thermomutatus
  misc_feature: 99
agagacaacgaggagaaaacgggaagaggataaggagagaagggaacaagaagagaagagaatgagaagaaaaagagatggtttagggttaaagag

SEQ ID NO: 9034 - DNA, 96 bp, Aspergillus thermomutatus
  misc_feature: 99
ccggagaccccgaagagttctctgaacatgtcgccagccatggtactgagtggtatgagtactgccgactagcatacgaatacatccagaaagccg

SEQ ID NO: 9035 - DNA, 96 bp, Aspergillus thermomutatus
  misc_feature: 99
aggtagggaggtagggagggaggtagagaggcaccataggaggtatggagcaatgcaccgcgtgaggcacccccagatatgccatgcaaggtttgg

SEQ ID NO: 9036 - DNA, 96 bp, Aspergillus thermomutatus
  misc_feature: 99
cacaatcattaggtgcgtcttccaatccaatgtatctaccaatgtgcgtttccaatgtttctaatgtgctcagtaagatgaggagcgagttctaat

SEQ ID NO: 9037 - DNA, 96 bp, Aspergillus thermomutatus
  misc_feature: 99
agcaatacagctcctgcgcggcacggttaggattgctccacgaccgcctacttcggtcgcattgtcacgtgaccaactaccatatacccaagcttg

SEQ ID NO: 9038 - DNA, 96 bp, Aspergillus thermomutatus
  misc_feature: 99
ataccatgctttctaccttgcacggcgcctctctccctactatctgcggttcctcactccctaccatactacctacctcctgcagtacctctcttg

SEQ ID NO: 9039 - DNA, 96 bp, Aspergillus thermomutatus
  misc_feature: 99
aagtaaagagaatgataagagaggagaatgagaagagacaacgaggagaaaacgggaagaggataaggagagaagggaacaagaagagaagagaat

SEQ ID NO: 9040 - DNA, 96 bp, Aspergillus thermomutatus
  misc_feature: 99
agaagggaacaagaagagaagagaatgagaagaaaaagagatggtttagggttaaagagaggaaagtggaaagagaggagaaggataaagtgaagt

SEQ ID NO: 9041 - DNA, 96 bp, Aspergillus thermomutatus
  misc_feature: 99
aagattacaaaaaaagaagaggagaaattaaagaacaagaaagaatgagaagagagaaaagaacaagaatagaaaagaatgagaagggaacgaggt

SEQ ID NO: 9042 - DNA, 96 bp, Aspergillus thermomutatus
  misc_feature: 99
aatcctaccccttctatccttcttcttattcatcctttcttttttttttcttttctaatcctaaaaatctcatctccttctctaatctctttgatt

SEQ ID NO: 9043 - DNA, 96 bp, Aspergillus thermomutatus
  misc_feature: 99
aatatactataattaatagtataaatactcatgaggcatatttggaaagaatgtaaaaatactcatgaggcatatttggaaagaatagataaattt

SEQ ID NO: 9044 - DNA, 96 bp, Aspergillus thermomutatus
  misc_feature: 99
aaataactatcccttactctttctaaaacctaactcttaccctcctttttcttctctttcctttactctctttcccttctaaattccatcttcctt

SEQ ID NO: 9045 - DNA, 96 bp, Aspergillus thermomutatus
  misc_feature: 98
taaaagagaaggattaggaaataggaatttaaaattaaaaaggagataaaataaggatagattagaggatagggagagagaagggaagagaagaaa

SEQ ID NO: 9046 - DNA, 96 bp, Aspergillus thermomutatus
  misc_feature: 98
tattcacctctctatctacctctctatctccctaccccactgtctgcctgtctgcctgtctgcctgtctgcctgtctctctagacgcctctctcaa

SEQ ID NO: 9047 - DNA, 96 bp, Aspergillus thermomutatus
  misc_feature: 98
tctacgggcagagaatgaacggaaaagaaagaagaaggcaagaatacgtgctaatctaggtggtgataccattttatctgtacaagaaggccagaa

SEQ ID NO: 9048 - DNA, 96 bp, Aspergillus thermomutatus
  misc_feature: 98
ggatgggggaagttaatgagaaattagaagaaagaagaggagaggagaaggaaagaaaagagaaacagaggagggaaagaagggaagagatgagaa

SEQ ID NO: 9049 - DNA, 96 bp, Aspergillus thermomutatus
  misc_feature: 98
ttctcactccctcttcctcctttcttgcatttctttattctcttaacatcctcccttctaatcttcaaccttctttatatatctctctactacatc

SEQ ID NO: 9050 - DNA, 96 bp, Aspergillus thermomutatus
  misc_feature: 98
ttctatgtgcatcctacatgctattcgacgtgctattctacgtgctattctacgtgctattctacgtgctattctacgtgctattctacgtgctat

SEQ ID NO: 9051 - DNA, 96 bp, Aspergillus thermomutatus
  misc_feature: 98
agagaagggaacaagaagagaagagaatgagaagaaaaagagatggtttagggttaaagagaggaaagtggaaagagaggagaaggataaagtgaa

SEQ ID NO: 9052 - DNA, 96 bp, Aspergillus thermomutatus
  misc_feature: 98
ttcacctctctatctacctctctatctccctaccccactgtctgcctgtctgcctgtctgcctgtctgcctgtctctctagacgcctctctcaatg

SEQ ID NO: 9053 - DNA, 96 bp, Aspergillus thermomutatus
  misc_feature: 98
cagagtccttgcgctctatcagagttgccttcgaactagctatcatccgaagtgctttcgacatgcagttctgacaataatccaaaaaccaaataa

SEQ ID NO: 9054 - DNA, 96 bp, Aspergillus thermomutatus
  misc_feature: 98
ttacaaaaaaagaagaggagaaattaaagaacaagaaagaatgagaagagagaaaagaacaagaatagaaaagaatgagaagggaacgaggtgaga

SEQ ID NO: 9055 - DNA, 96 bp, Aspergillus thermomutatus
  misc_feature: 98
ttaaagagagaataagaaaagaagagaagataaaagagagagagatttttagttaggattaaagatagtaaaaagagagaaaggggaaattggaga

SEQ ID NO: 9056 - DNA, 96 bp, Aspergillus thermomutatus
  misc_feature: 98
aggtatataaaagccacgcagggttaggtataaaggcacccacagaggccccatgtaaggcaggcagagaggtagagataggtagagagggaccca

SEQ ID NO: 9057 - DNA, 96 bp, Aspergillus thermomutatus
  misc_feature: 98
ccagatatgccatgcaaggtttggaccaaggtagccagagagcaaccatatggggcaggtagtatagtagggatcaacacaccccacatagcccca

SEQ ID NO: 9058 - DNA, 96 bp, Aspergillus thermomutatus
  misc_feature: 98
tgctattctacgtgctattctacgtgctattctacgtgctattctacgtgctattctacatgctattcgacgtgctattctatgtgctattcaacc

SEQ ID NO: 9059 - DNA, 96 bp, Aspergillus thermomutatus
  misc_feature: 98
gccatctaggatggcagcaggcatgttaggcagcacggcagactacacatcattgagagaggcgtctagagagacaggcagacaggcagacaggca

SEQ ID NO: 9060 - DNA, 96 bp, Aspergillus thermomutatus
  misc_feature: 98
tgataagggatagagtaagggatagatagtttagggagaggagggggtagaaaggtttagagataaagagaggaataagagatagtattaggggta

SEQ ID NO: 9061 - DNA, 96 bp, Aspergillus thermomutatus
  misc_feature: 98
ccctcttctaatatatattctcctcttctaatccctactatgcttactctactatttcccttctttacttctcctaaactaactaacccttactca

SEQ ID NO: 9062 - DNA, 96 bp, Aspergillus thermomutatus
  misc_feature: 98
acgtgctattctacgtgctattctacgtgctattctacgtgctattctacgtgctattctacatgctattcgacgtgctattctatgtgctattca

SEQ ID NO: 9063 - DNA, 96 bp, Aspergillus thermomutatus
  misc_feature: 98
tcttttctccttcttattctcttcttattttcctcttgttcttattctcttctctttctctttgattctccctcttctctcttgacctctcttctc

SEQ ID NO: 9064 - DNA, 96 bp, Aspergillus thermomutatus
  misc_feature: 98
aggagagagggagtaaaggggaggtaaggaggaagtaaagaggaaggagagagggaataaaggggaggtaaggaggaaggaaagaggaaggaaaga

SEQ ID NO: 9065 - DNA, 96 bp, Aspergillus thermomutatus
  misc_feature: 98
aagagacaacgaggagaaaacgggaagaggataaggagagaagggaacaagaagagaagagaatgagaagaaaaagagatggtttagggttaaaga

SEQ ID NO: 9066 - DNA, 96 bp, Aspergillus thermomutatus
  misc_feature: 98
tcttctctctctttctatccttcttttccaccctcctccttttacaacctataatttctactaaccctcactcttatcctcattctcactctactc

SEQ ID NO: 9067 - DNA, 96 bp, Aspergillus thermomutatus
  misc_feature: 98
gagaatgataagagaggagaatgagaagagacaacgaggagaaaacgggaagaggataaggagagaagggaacaagaagagaagagaatgagaaga

SEQ ID NO: 9068 - DNA, 96 bp, Aspergillus thermomutatus
  misc_feature: 98
ggtcagcaatgaagaaacacaacatggtgagggcaacgagcacctaccaggagggagtccagccttataaggtgtttcgaggacgaaacgctaaga

SEQ ID NO: 9069 - DNA, 96 bp, Aspergillus thermomutatus
  misc_feature: 98
tctctctatatctctctatctgatttggtggcttatacggtgccttactccccaccattctacctacctgtctgcctgtctgcctgtctgcctgtc

SEQ ID NO: 9070 - DNA, 96 bp, Aspergillus thermomutatus
  misc_feature: 98
tctacctctctattcacctctctattcacctctctattcacctctctatctacctctctatctccctaccccactgtctgcctgtctgcctgtctg

SEQ ID NO: 9071 - DNA, 96 bp, Aspergillus thermomutatus
  misc_feature: 98
tcgcatcagtcagctggctggcctggacggtctgctgggccttagcctgcacctgggcctgctcccaggcctgcatcacctcatcgaccgcagcct

SEQ ID NO: 9072 - DNA, 96 bp, Aspergillus thermomutatus
  misc_feature: 98
taagaaaaaggagagagggagtaaaggggaggtaaggaggaagtaaagaggaaggagagagggaataaaggggaggtaaggaggaaggaaagagga

SEQ ID NO: 9073 - DNA, 96 bp, Aspergillus thermomutatus
  misc_feature: 98
tccctttactttactaaatcctcttctcatcttccctctctctcttaaattctttcttaaactattaattcctctctctttctcactccctcttcc

SEQ ID NO: 9074 - DNA, 96 bp, Aspergillus thermomutatus
  misc_feature: 98
gagagaagggaacaagaagagaagagaatgagaagaaaaagagatggtttagggttaaagagaggaaagtggaaagagaggagaaggataaagtga

SEQ ID NO: 9075 - DNA, 96 bp, Aspergillus thermomutatus
  misc_feature: 98
aagggaacaagaagagaagagaatgagaagaaaaagagatggtttagggttaaagagaggaaagtggaaagagaggagaaggataaagtgaagtga

SEQ ID NO: 9076 - DNA, 96 bp, Aspergillus thermomutatus
  misc_feature: 98
gcacccccagatatgccatgcaaggtttggaccaaggtagccagagagcaaccatatggggcaggtagtatagtagggatcaacacaccccacata

SEQ ID NO: 9077 - DNA, 96 bp, Aspergillus thermomutatus
  misc_feature: 98
tatctgcctgcctccgcgtgctattctatgtgcatcctacatgctattcgacgtgctattctacgtgctattctacgtgctattctacgtgctatt

SEQ ID NO: 9078 - DNA, 96 bp, Aspergillus thermomutatus
  misc_feature: 98
tatatccctcttctaatatatattctcctcttctaatccctactatgcttactctactatttcccttctttacttctcctaaactaactaaccctt

SEQ ID NO: 9079 - DNA, 96 bp, Aspergillus thermomutatus
  misc_feature: 98
attctatgtgcatcctacatgctattcgacgtgctattctacgtgctattctacgtgctattctacgtgctattctacgtgctattctacgtgcta

SEQ ID NO: 9080 - DNA, 96 bp, Aspergillus thermomutatus
  misc_feature: 98
taattatctttaatctctggtataaccaccctaacttataatatatattaatacctactatgcctcactgcctacctcctggggttcctctatgcc

SEQ ID NO: 9081 - DNA, 96 bp, Aspergillus thermomutatus
  misc_feature: 98
gttcgcatcagtcagctggctggcctggacggtctgctgggccttagcctgcacctgggcctgctcccaggcctgcatcacctcatcgaccgcagc

SEQ ID NO: 9082 - DNA, 96 bp, Aspergillus thermomutatus
  misc_feature: 98
gtcagcaatgaagaaacacaacatggtgagggcaacgagcacctaccaggagggagtccagccttataaggtgtttcgaggacgaaacgctaagag

SEQ ID NO: 9083 - DNA, 96 bp, Aspergillus thermomutatus
  misc_feature: 98
ggtgttgcgagcaaggcccgcgatatgctcgtgccgcctagcaggcactcgcgaagccgtacagctctgggtcacgtgacaccttgctagctgcgg

SEQ ID NO: 9084 - DNA, 96 bp, Aspergillus thermomutatus
  misc_feature: 98
cgatcaccagcaatacagctcctgcgcggcacggttaggattgctccacgaccgcctacttcggtcgcattgtcacgtgaccaactaccatatacc

SEQ ID NO: 9085 - DNA, 96 bp, Aspergillus thermomutatus
  misc_feature: 98
cccagatatgccatgcaaggtttggaccaaggtagccagagagcaaccatatggggcaggtagtatagtagggatcaacacaccccacatagcccc

SEQ ID NO: 9086 - DNA, 96 bp, Aspergillus thermomutatus
  misc_feature: 98
accaaaagcgcgctccaggatatccagaatgtcttgatagtcattaagggtgcagattcccttcttgatgtaagggaggatctgggcgtagggcgc

SEQ ID NO: 9087 - DNA, 96 bp, Aspergillus thermomutatus
  misc_feature: 98
cgccatctaggatggcagcaggcatgttaggcagcacggcagactacacatcattgagagaggcgtctagagagacaggcagacaggcagacaggc

SEQ ID NO: 9088 - DNA, 96 bp, Aspergillus thermomutatus
  misc_feature: 98
gatgggggaagttaatgagaaattagaagaaagaagaggagaggagaaggaaagaaaagagaaacagaggagggaaagaagggaagagatgagaag

SEQ ID NO: 9089 - DNA, 96 bp, Aspergillus thermomutatus
  misc_feature: 98
gaggtagggaggtagggagggaggtagagaggcaccataggaggtatggagcaatgcaccgcgtgaggcacccccagatatgccatgcaaggtttg

SEQ ID NO: 9090 - DNA, 96 bp, Aspergillus thermomutatus
  misc_feature: 98
gaggattagaataagtattagaggaagagttagggagagtgtttaaggattaaaagaaagagtagagtaagggataggttaagagaggtaaagagg

SEQ ID NO: 9091 - DNA, 96 bp, Aspergillus thermomutatus
  misc_feature: 98
gagaggtagggaggtagggagggaggtagagaggcaccataggaggtatggagcaatgcaccgcgtgaggcacccccagatatgccatgcaaggtt

SEQ ID NO: 9092 - DNA, 96 bp, Aspergillus thermomutatus
  misc_feature: 98
gagagatgaatagaataagaaggaagaataaggaatagagagtaggttaataagtaagggtaagagataattaatagagataggggaaagaggaat

SEQ ID NO: 9093 - DNA, 96 bp, Aspergillus thermomutatus
  misc_feature: 98
gacaacgaggagaaaacgggaagaggataaggagagaagggaacaagaagagaagagaatgagaagaaaaagagatggtttagggttaaagagagg

SEQ ID NO: 9094 - DNA, 96 bp, Aspergillus thermomutatus
  misc_feature: 98
gaagggaacaagaagagaagagaatgagaagaaaaagagatggtttagggttaaagagaggaaagtggaaagagaggagaaggataaagtgaagtg

SEQ ID NO: 9095 - DNA, 96 bp, Aspergillus thermomutatus
  misc_feature: 98
cttttctccttcttattctcttcttattttcctcttgttcttattctcttctctttctctttgattctccctcttctctcttgacctctcttctct

SEQ ID NO: 9096 - DNA, 96 bp, Aspergillus thermomutatus
  misc_feature: 98
aagcatagtaatatatgtaggtatataaaagccacgcagggttaggtataaaggcacccacagaggccccatgtaaggcagggttaaggcaggcag

SEQ ID NO: 9097 - DNA, 96 bp, Aspergillus thermomutatus
  misc_feature: 98
ctcttctctctctttttcttctctctctttttcttctctctctttttcttctctctctttttcttctctctctctcttttccttttcttctttctt

SEQ ID NO: 9098 - DNA, 96 bp, Aspergillus thermomutatus
  misc_feature: 98
ctcttctctctctttctatccttcttttccaccctcctccttttacaacctataatttctactaaccctcactcttatcctcattctcactctact

SEQ ID NO: 9099 - DNA, 96 bp, Aspergillus thermomutatus
  misc_feature: 98
ctctctattcacctctctatctacctctctatctccctaccccactgtctgcctgtctgcctgtctgcctgtctgcctgtctctctagacgcctct

SEQ ID NO: 9100 - DNA, 96 bp, Aspergillus thermomutatus
  misc_feature: 98
ctctattcacctctctattcacctctctattcacctctctatctacctctctatctccctaccccactgtctgcctgtctgcctgtctgcctgtct

SEQ ID NO: 9101 - DNA, 96 bp, Aspergillus thermomutatus
  misc_feature: 98
ctcctctcttatcattctctttactttctctttaccttctcacctcgttcccttctcattcttttctattcttgttcttttctctcttctcattct

SEQ ID NO: 9102 - DNA, 96 bp, Aspergillus thermomutatus
  misc_feature: 98
ctatctgcctgcctccgcgtgctattctatgtgcatcctacatgctattcgacgtgctattctacgtgctattctacgtgctattctacgtgctat

SEQ ID NO: 9103 - DNA, 96 bp, Aspergillus thermomutatus
  misc_feature: 98
ctacgggcagagaatgaacggaaaagaaagaagaaggcaagaatacgtgctaatctaggtggtgataccattttatctgtacaagaaggccagaat

SEQ ID NO: 9104 - DNA, 96 bp, Aspergillus thermomutatus
  misc_feature: 98
agagtagatagtaagggataggataggataggaaaaaagaaaagatttagaaatagaagattaaaggtaaagaggaagggatagagagaggattag

SEQ ID NO: 9105 - DNA, 96 bp, Aspergillus thermomutatus
  misc_feature: 98
cctcttctaatatatattctcctcttctaatccctactatgcttactctactatttcccttctttacttctcctaaactaactaacccttactcat

SEQ ID NO: 9106 - DNA, 96 bp, Aspergillus thermomutatus
  misc_feature: 98
cctctcttatcattctctttactttctctttaccttctcacctcgttcccttctcattcttttctattcttgttcttttctctcttctcattcttt

SEQ ID NO: 9107 - DNA, 96 bp, Aspergillus thermomutatus
  misc_feature: 98
attagtgggaggattagaataagtattagaggaagagttagggagagtgtttaaggattaaaagaaagagtagagtaagggataggttaagagagg

SEQ ID NO: 9108 - DNA, 96 bp, Aspergillus thermomutatus
  misc_feature: 98
attaggtgcgtcttccaatccaatgtatctaccaatgtgcgtttccaatgtttctaatgtgctcagtaagatgaggagcgagttctaatgttacgg

SEQ ID NO: 9109 - DNA, 96 bp, Aspergillus thermomutatus
  misc_feature: 98
agagatgaatagaataagaaggaagaataaggaatagagagtaggttaataagtaagggtaagagataattaatagagataggggaaagaggaatg

SEQ ID NO: 9110 - DNA, 96 bp, Aspergillus thermomutatus
  misc_feature: 98
atactgggcgggggccccggctcatctgcttcgtctggctggcttgatctggctggcttgatctgtctggctggtctggctgaactctctgagctg

SEQ ID NO: 9111 - DNA, 96 bp, Aspergillus thermomutatus
  misc_feature: 98
cagcaatacagctcctgcgcggcacggttaggattgctccacgaccgcctacttcggtcgcattgtcacgtgaccaactaccatatacccaagctt

SEQ ID NO: 9112 - DNA, 96 bp, Aspergillus thermomutatus
  misc_feature: 98
aaaatatactataattaatagtataaatactcatgaggcatatttggaaagaatgtaaaaatactcatgaggcatatttggaaagaatagataaat

SEQ ID NO: 9113 - DNA, 96 bp, Aspergillus thermomutatus
  misc_feature: 98
atatatccctcttctaatatatattctcctcttctaatccctactatgcttactctactatttcccttctttacttctcctaaactaactaaccct

SEQ ID NO: 9114 - DNA, 96 bp, Aspergillus thermomutatus
  misc_feature: 98
ataactatcccttactctttctaaaacctaactcttaccctcctttttcttctctttcctttactctctttcccttctaaattccatcttccttct

SEQ ID NO: 9115 - DNA, 96 bp, Aspergillus thermomutatus
  misc_feature: 98
agaggtagggaggtagggagggaggtagagaggcaccataggaggtatggagcaatgcaccgcgtgaggcacccccagatatgccatgcaaggttt

SEQ ID NO: 9116 - DNA, 96 bp, Aspergillus thermomutatus
  misc_feature: 98
aaatatactataattaatagtataaatactcatgaggcatatttggaaagaatgtaaaaatactcatgaggcatatttggaaagaatagataaatt

SEQ ID NO: 9117 - DNA, 96 bp, Aspergillus thermomutatus
  misc_feature: 97
agggatagagtaagggatagatagtttagggagaggagggggtagaaaggtttagagataaagagaggaataagagatagtattaggggtataaaa

SEQ ID NO: 9118 - DNA, 96 bp, Aspergillus thermomutatus
  misc_feature: 97
tttctttcttctcttcccttctctctccctatcctctaatctatccttattttatctcctttttaattttaaattcctatttcctaatccttctct

SEQ ID NO: 9119 - DNA, 96 bp, Aspergillus thermomutatus
  misc_feature: 97
tacatatttgataaaatatactataattaatagtataaatactcatgaggcatatttggaaagaatgtaaaaatactcatgaggcatatttggaaa

SEQ ID NO: 9120 - DNA, 96 bp, Aspergillus thermomutatus
  misc_feature: 97
taaaatatactataattaatagtataaatactcatgaggcatatttggaaagaatgtaaaaatactcatgaggcatatttggaaagaatagataaa

SEQ ID NO: 9121 - DNA, 96 bp, Aspergillus thermomutatus
  misc_feature: 97
atagattatatactgtaaagattacttcttcattaattaattctctaaaaaatagcccattttaatatacaagacccaaagattccctagattaaa

SEQ ID NO: 9122 - DNA, 96 bp, Aspergillus thermomutatus
  misc_feature: 97
ttctttcttctcttcccttctctctccctatcctctaatctatccttattttatctcctttttaattttaaattcctatttcctaatccttctctt

SEQ ID NO: 9123 - DNA, 96 bp, Aspergillus thermomutatus
  misc_feature: 97
gtaaaagagaaggattaggaaataggaatttaaaattaaaaaggagataaaataaggatagattagaggatagggagagagaagggaagagaagaa

SEQ ID NO: 9124 - DNA, 96 bp, Aspergillus thermomutatus
  misc_feature: 97
agagagatgaatagaataagaaggaagaataaggaatagagagtaggttaataagtaagggtaagagataattaatagagataggggaaagaggaa

SEQ ID NO: 9125 - DNA, 96 bp, Aspergillus thermomutatus
  misc_feature: 97
atacatatttgataaaatatactataattaatagtataaatactcatgaggcatatttggaaagaatgtaaaaatactcatgaggcatatttggaa

SEQ ID NO: 9126 - DNA, 96 bp, Aspergillus thermomutatus
  misc_feature: 97
agagttaactctctaccttgatcctctatcgcacctacatctatatgattatgatatacattagattctgataatatatctctaatagttattgaa

SEQ ID NO: 9127 - DNA, 96 bp, Aspergillus thermomutatus
  misc_feature: 97
ttacaaggaaaaacagtcgagccagcaattcttcgacaaaacagtgatggatcattgacatacaaccaccaagtacttgcagccacaatcgaactg

SEQ ID NO: 9128 - DNA, 96 bp, Aspergillus thermomutatus
  misc_feature: 97
catagattatatactgtaaagattacttcttcattaattaattctctaaaaaatagcccattttaatatacaagacccaaagattccctagattaa

SEQ ID NO: 9129 - DNA, 96 bp, Aspergillus thermomutatus
  misc_feature: 97
ttaacctactctctattccttattcttccttcttattctattcatctctctatcttatcctcttcctcttcaataatccttatccttattctaata

SEQ ID NO: 9130 - DNA, 96 bp, Aspergillus thermomutatus
  misc_feature: 97
tggtcagcaatgaagaaacacaacatggtgagggcaacgagcacctaccaggagggagtccagccttataaggtgtttcgaggacgaaacgctaag

SEQ ID NO: 9131 - DNA, 96 bp, Aspergillus thermomutatus
  misc_feature: 97
tctcactccctcttcctcctttcttgcatttctttattctcttaacatcctcccttctaatcttcaaccttctttatatatctctctactacatca

SEQ ID NO: 9132 - DNA, 96 bp, Aspergillus thermomutatus
  misc_feature: 97
ctatggtgcctctctacctatctccctacctcttcacctacctcttcacctacctcttcacctacctcttcacctacctcttcacctacctcttca

SEQ ID NO: 9133 - DNA, 96 bp, Aspergillus thermomutatus
  misc_feature: 97
tctttcttctcttcccttctctctccctatcctctaatctatccttattttatctcctttttaattttaaattcctatttcctaatccttctcttt

SEQ ID NO: 9134 - DNA, 96 bp, Aspergillus thermomutatus
  misc_feature: 97
tcttggtctgccttactgcctctctccctgtcttacatggtgccttcctccctaccttatattatacattcttcgctacctcacgtggtgcatctc

SEQ ID NO: 9135 - DNA, 96 bp, Aspergillus thermomutatus
  misc_feature: 97
tcttctcattctcctctcttatcattctctttactttctctttaccttctcacctcgttcccttctcattcttttctattcttgttcttttctctc

SEQ ID NO: 9136 - DNA, 96 bp, Aspergillus thermomutatus
  misc_feature: 97
atgggggaagttaatgagaaattagaagaaagaagaggagaggagaaggaaagaaaagagaaacagaggagggaaagaagggaagagatgagaaga

SEQ ID NO: 9137 - DNA, 96 bp, Aspergillus thermomutatus
  misc_feature: 97
tctctttcccttctaaattccatcttccttcttctctttctctttcttatcctttctattcttaaaataaactatccctccctccttttcttcttc

SEQ ID NO: 9138 - DNA, 96 bp, Aspergillus thermomutatus
  misc_feature: 97
gagacaacgaggagaaaacgggaagaggataaggagagaagggaacaagaagagaagagaatgagaagaaaaagagatggtttagggttaaagaga

SEQ ID NO: 9139 - DNA, 96 bp, Aspergillus thermomutatus
  misc_feature: 97
tctctctcttcatgtctatattccctttactttactaaatcctcttctcatcttccctctctctcttaaattctttcttaaactattaattcctct

SEQ ID NO: 9140 - DNA, 96 bp, Aspergillus thermomutatus
  misc_feature: 97
tctctctcttattaatcctaccccttctatccttcttcttattcatcctttcttttttttttcttttctaatcctaaaaatctcatctccttctct

SEQ ID NO: 9141 - DNA, 96 bp, Aspergillus thermomutatus
  misc_feature: 97
gggatgggggaagttaatgagaaattagaagaaagaagaggagaggagaaggaaagaaaagagaaacagaggagggaaagaagggaagagatgaga

SEQ ID NO: 9142 - DNA, 96 bp, Aspergillus thermomutatus
  misc_feature: 97
tctattccttattcttccttcttattctattcatctctctatcttatcctcttcctcttcaataatccttatccttattctaatactatctcttac

SEQ ID NO: 9143 - DNA, 96 bp, Aspergillus thermomutatus
  misc_feature: 97
tctacctctctatctccctaccccactgtctgcctgtctgcctgtctgcctgtctgcctgtctctctagacgcctctctcaatgatgtgtagtctg

SEQ ID NO: 9144 - DNA, 96 bp, Aspergillus thermomutatus
  misc_feature: 97
tagagagatgaatagaataagaaggaagaataaggaatagagagtaggttaataagtaagggtaagagataattaatagagataggggaaagagga

SEQ ID NO: 9145 - DNA, 96 bp, Aspergillus thermomutatus
  misc_feature: 97
atataggtatataaaagccacgcagggttaggtataaaggcacccacagaggccccatgtaaggcaggcagagaggtagagataggtagagaggga

SEQ ID NO: 9146 - DNA, 96 bp, Aspergillus thermomutatus
  misc_feature: 97
tccaatccaatgtatctaccaatgtgcgtttccaatgtttctaatgtgctcagtaagatgaggagcgagttctaatgttacgggctagaccgtagg

SEQ ID NO: 9147 - DNA, 96 bp, Aspergillus thermomutatus
  misc_feature: 97
tcatagattatatactgtaaagattacttcttcattaattaattctctaaaaaatagcccattttaatatacaagacccaaagattccctagatta

SEQ ID NO: 9148 - DNA, 96 bp, Aspergillus thermomutatus
  misc_feature: 97
tatggtgcctctctacctatctccctacctcttcacctacctcttcacctacctcttcacctacctcttcacctacctcttcacctacctcttcac

SEQ ID NO: 9149 - DNA, 96 bp, Aspergillus thermomutatus
  misc_feature: 97
ggagatgagaagagatgagaagagaggagaggagatgagaagagaagagaacaagaataaatgggaatgaaagagacgaattaatggttaaagata

SEQ ID NO: 9150 - DNA, 96 bp, Aspergillus thermomutatus
  misc_feature: 97
tatccctcttctaatatatattctcctcttctaatccctactatgcttactctactatttcccttctttacttctcctaaactaactaacccttac

SEQ ID NO: 9151 - DNA, 96 bp, Aspergillus thermomutatus
  misc_feature: 97
tataggtatataaaagccacgcagggttaggtataaaggcacccacagaggccccatgtaaggcaggcagagaggtagagataggtagagagggac

SEQ ID NO: 9152 - DNA, 96 bp, Aspergillus thermomutatus
  misc_feature: 97
cctatctgcctgcctccgcgtgctattctatgtgcatcctacatgctattcgacgtgctattctacgtgctattctacgtgctattctacgtgcta

SEQ ID NO: 9153 - DNA, 96 bp, Aspergillus thermomutatus
  misc_feature: 97
tagattatatactgtaaagattacttcttcattaattaattctctaaaaaatagcccattttaatatacaagacccaaagattccctagattaaat

SEQ ID NO: 9154 - DNA, 96 bp, Aspergillus thermomutatus
  misc_feature: 97
ctctctcttattaatcctaccccttctatccttcttcttattcatcctttcttttttttttcttttctaatcctaaaaatctcatctccttctcta

SEQ ID NO: 9155 - DNA, 96 bp, Aspergillus thermomutatus
  misc_feature: 97
tagaagagttaactctctaccttgatcctctatcgcacctacatctatatgattatgatatacattagattctgataatatatctctaatagttat

SEQ ID NO: 9156 - DNA, 96 bp, Aspergillus thermomutatus
  misc_feature: 97
tacacaatcattaggtgcgtcttccaatccaatgtatctaccaatgtgcgtttccaatgtttctaatgtgctcagtaagatgaggagcgagttcta

SEQ ID NO: 9157 - DNA, 96 bp, Aspergillus thermomutatus
  misc_feature: 97
tactctctttcccttctaaattccatcttccttcttctctttctctttcttatcctttctattcttaaaataaactatccctccctccttttcttc

SEQ ID NO: 9158 - DNA, 96 bp, Aspergillus thermomutatus
  misc_feature: 97
tactaattatctttaatctctggtataaccaccctaacttataatatatattaatacctactatgcctcactgcctacctcctggggttcctctat

SEQ ID NO: 9159 - DNA, 96 bp, Aspergillus thermomutatus
  misc_feature: 97
tactaaccctcactcttatcctcattctcactctactcctctctcttatcctcattctaaccctcactccttcctccctctaatcctccctctaat

SEQ ID NO: 9160 - DNA, 96 bp, Aspergillus thermomutatus
  misc_feature: 97
tacactctttaccgaggcgagcacaacggatgcaaggaaaggccattaggaaaccttgatcttcgatttttcgggccaaacttttctttcgaacgg

SEQ ID NO: 9161 - DNA, 96 bp, Aspergillus thermomutatus
  misc_feature: 97
aagagtagatagtaagggataggataggataggaaaaaagaaaagatttagaaatagaagattaaaggtaaagaggaagggatagagagaggatta

SEQ ID NO: 9162 - DNA, 96 bp, Aspergillus thermomutatus
  misc_feature: 97
cttacttattaacctactctctattccttattcttccttcttattctattcatctctctatcttatcctcttcctcttcaataatccttatcctta

SEQ ID NO: 9163 - DNA, 96 bp, Aspergillus thermomutatus
  misc_feature: 97
taacctactctctattccttattcttccttcttattctattcatctctctatcttatcctcttcctcttcaataatccttatccttattctaatac

SEQ ID NO: 9164 - DNA, 96 bp, Aspergillus thermomutatus
  misc_feature: 97
ccttaatcccttctctctctctattcctcttctactcttatctcctttctttcttcttctctctcttcctatcttcaaatctatccttattttaac

SEQ ID NO: 9165 - DNA, 96 bp, Aspergillus thermomutatus
  misc_feature: 97
caaaagcgcgctccaggatatccagaatgtcttgatagtcattaagggtgcagattcccttcttgatgtaagggaggatctgggcgtagggcgcac

SEQ ID NO: 9166 - DNA, 96 bp, Aspergillus thermomutatus
  misc_feature: 97
ctcactccctcttcctcctttcttgcatttctttattctcttaacatcctcccttctaatcttcaaccttctttatatatctctctactacatcac

SEQ ID NO: 9167 - DNA, 96 bp, Aspergillus thermomutatus
  misc_feature: 97
caggggttcgcatcagtcagctggctggcctggacggtctgctgggccttagcctgcacctgggcctgctcccaggcctgcatcacctcatcgacc

SEQ ID NO: 9168 - DNA, 96 bp, Aspergillus thermomutatus
  misc_feature: 97
ataggtatataaaagccacgcagggttaggtataaaggcacccacagaggccccatgtaaggcaggcagagaggtagagataggtagagagggacc

SEQ ID NO: 9169 - DNA, 96 bp, Aspergillus thermomutatus
  misc_feature: 97
cgtgaggcacccccagatatgccatgcaaggtttggaccaaggtagccagagagcaaccatatggggcaggtagtatagtagggatcaacacaccc

SEQ ID NO: 9170 - DNA, 96 bp, Aspergillus thermomutatus
  misc_feature: 97
ggcgggggccccggctcatctgcttcgtctggctggcttgatctggctggcttgatctgtctggctggtctggctgaactctctgagctggtcggg

SEQ ID NO: 9171 - DNA, 96 bp, Aspergillus thermomutatus
  misc_feature: 97
ggattagaataagtattagaggaagagttagggagagtgtttaaggattaaaagaaagagtagagtaagggataggttaagagaggtaaagagggg

SEQ ID NO: 9172 - DNA, 96 bp, Aspergillus thermomutatus
  misc_feature: 97
cttctctctctttctatccttcttttccaccctcctccttttacaacctataatttctactaaccctcactcttatcctcattctcactctactcc

SEQ ID NO: 9173 - DNA, 96 bp, Aspergillus thermomutatus
  misc_feature: 97
ggagggaggtagagaggcaccataggaggtatggagcaatgcaccgcgtgaggcacccccagatatgccatgcaaggtttggaccaaggtagccag

SEQ ID NO: 9174 - DNA, 96 bp, Aspergillus thermomutatus
  misc_feature: 97
acccccagatatgccatgcaaggtttggaccaaggtagccagagagcaaccatatggggcaggtagtatagtagggatcaacacaccccacatagc

SEQ ID NO: 9175 - DNA, 96 bp, Aspergillus thermomutatus
  misc_feature: 97
gcgggggccccggctcatctgcttcgtctggctggcttgatctggctggcttgatctgtctggctggtctggctgaactctctgagctggtcgggc

SEQ ID NO: 9176 - DNA, 96 bp, Aspergillus thermomutatus
  misc_feature: 97
agtggggtagggagatagagaggtagatagagaggtgaatagagaggtgaatagagaggtgaatagagaggtagatagagaggaagatagagaggc

SEQ ID NO: 9177 - DNA, 96 bp, Aspergillus thermomutatus
  misc_feature: 97
gcaagccaagcccattattagtccatccattatcgctcacaccaatcagccagtcagggtctatgtcttgataccattgagattgatggaccttgc

SEQ ID NO: 9178 - DNA, 96 bp, Aspergillus thermomutatus
  misc_feature: 97
ctttctttcttctcttcccttctctctccctatcctctaatctatccttattttatctcctttttaattttaaattcctatttcctaatccttctc

SEQ ID NO: 9179 - DNA, 96 bp, Aspergillus thermomutatus
  misc_feature: 97
accttatattatacattcttcgctacctcacgtggtgcatctctggggctacgtggggtgtgttgatccctactatactacctgccccatatggtc

SEQ ID NO: 9180 - DNA, 96 bp, Aspergillus thermomutatus
  misc_feature: 97
gaagattacaaaaaaagaagaggagaaattaaagaacaagaaagaatgagaagagagaaaagaacaagaatagaaaagaatgagaagggaacgagg

SEQ ID NO: 9181 - DNA, 96 bp, Aspergillus thermomutatus
  misc_feature: 97
gaagagttaactctctaccttgatcctctatcgcacctacatctatatgattatgatatacattagattctgataatatatctctaatagttattg

SEQ ID NO: 9182 - DNA, 96 bp, Aspergillus thermomutatus
  misc_feature: 97
gaagagtagatagtaagggataggataggataggaaaaaagaaaagatttagaaatagaagattaaaggtaaagaggaagggatagagagaggatt

SEQ ID NO: 9183 - DNA, 96 bp, Aspergillus thermomutatus
  misc_feature: 97
cttctgctcccttatcctttttctctctggaatatgctcaacttttaactattacataccttctcattcagttatatatcccttatggcatatatt

SEQ ID NO: 9184 - DNA, 96 bp, Aspergillus thermomutatus
  misc_feature: 97
cttaatcccttctctctctctattcctcttctactcttatctcctttctttcttcttctctctcttcctatcttcaaatctatccttattttaact

SEQ ID NO: 9185 - DNA, 96 bp, Aspergillus thermomutatus
  misc_feature: 97
agacaacgaggagaaaacgggaagaggataaggagagaagggaacaagaagagaagagaatgagaagaaaaagagatggtttagggttaaagagag

SEQ ID NO: 9186 - DNA, 96 bp, Aspergillus thermomutatus
  misc_feature: 97
aggggttcgcatcagtcagctggctggcctggacggtctgctgggccttagcctgcacctgggcctgctcccaggcctgcatcacctcatcgaccg

SEQ ID NO: 9187 - DNA, 96 bp, Aspergillus thermomutatus
  misc_feature: 97
cgctacacaatcattaggtgcgtcttccaatccaatgtatctaccaatgtgcgtttccaatgtttctaatgtgctcagtaagatgaggagcgagtt

SEQ ID NO: 9188 - DNA, 96 bp, Aspergillus thermomutatus
  misc_feature: 97
cctttctttcttctcttcccttctctctccctatcctctaatctatccttattttatctcctttttaattttaaattcctatttcctaatccttct

SEQ ID NO: 9189 - DNA, 96 bp, Aspergillus thermomutatus
  misc_feature: 97
cagagaggtagggaggtagggagggaggtagagaggcaccataggaggtatggagcaatgcaccgcgtgaggcacccccagatatgccatgcaagg

SEQ ID NO: 9190 - DNA, 96 bp, Aspergillus thermomutatus
  misc_feature: 97
actgaccgtatcatctcctgtaggtgctcatcgccttgcgcagcctcctgccattgctcgtctaatggcggaggtgctgacctcatgtccggtcgg

SEQ ID NO: 9191 - DNA, 96 bp, Aspergillus thermomutatus
  misc_feature: 97
catcttccttcttctctttctctttcttatcctttctattcttaaaataaactatccctccctccttttcttcttctctcttaatatttcctccct

SEQ ID NO: 9192 - DNA, 96 bp, Aspergillus thermomutatus
  misc_feature: 97
actaattatctttaatctctggtataaccaccctaacttataatatatattaatacctactatgcctcactgcctacctcctggggttcctctatg

SEQ ID NO: 9193 - DNA, 96 bp, Aspergillus thermomutatus
  misc_feature: 97
acctataatttctactaaccctcactcttatcctcattctcactctactcctctctcttatcctcattctaaccctcactccttcctccctctaat

SEQ ID NO: 9194 - DNA, 96 bp, Aspergillus thermomutatus
  misc_feature: 97
attaacctactctctattccttattcttccttcttattctattcatctctctatcttatcctcttcctcttcaataatccttatccttattctaat

SEQ ID NO: 9195 - DNA, 96 bp, Aspergillus thermomutatus
  misc_feature: 97
atcttccttcttctctttctctttcttatcctttctattcttaaaataaactatccctccctccttttcttcttctctcttaatatttcctccctt

SEQ ID NO: 9196 - DNA, 96 bp, Aspergillus thermomutatus
  misc_feature: 97
atcttccttaatcccttctctctctctattcctcttctactcttatctcctttctttcttcttctctctcttcctatcttcaaatctatccttatt

SEQ ID NO: 9197 - DNA, 96 bp, Aspergillus thermomutatus
  misc_feature: 97
atcttatctcctttctttcttctcttcccttctctctccctatcctctaatctatccttattttatctcctttttaattttaaattcctatttcct

SEQ ID NO: 9198 - DNA, 96 bp, Aspergillus thermomutatus
  misc_feature: 97
atccctcttctaatatatattctcctcttctaatccctactatgcttactctactatttcccttctttacttctcctaaactaactaacccttact

SEQ ID NO: 9199 - DNA, 96 bp, Aspergillus thermomutatus
  misc_feature: 97
agaagagttaactctctaccttgatcctctatcgcacctacatctatatgattatgatatacattagattctgataatatatctctaatagttatt

SEQ ID NO: 9200 - DNA, 96 bp, Aspergillus thermomutatus
  misc_feature: 97
actgtgttggttgttcaaacagttccctatactgctcatgctcttctggcaatgagatctgatccgtagaagttgccgctaactctcgcgatcctt

SEQ ID NO: 9201 - DNA, 96 bp, Aspergillus thermomutatus
  misc_feature: 97
actgggcgggggccccggctcatctgcttcgtctggctggcttgatctggctggcttgatctgtctggctggtctggctgaactctctgagctggt

SEQ ID NO: 9202 - DNA, 96 bp, Aspergillus thermomutatus
  misc_feature: 96
ttgtacagataaaatggtatcaccacctagattagcacgtattcttgccttcttctttcttttccgttcattctctgcccgtagaaccctgatttc

SEQ ID NO: 9203 - DNA, 96 bp, Aspergillus thermomutatus
  misc_feature: 96
cgtgctattctacgtgctattctacgtgctattctacgtgctattctacgtgctattctacatgctattcgacgtgctattctatgtgctattcaa

SEQ ID NO: 9204 - DNA, 96 bp, Aspergillus thermomutatus
  misc_feature: 96
ttagtacctatttgtttaataatttaggcttatttagtaaattaggtatactaatatctctattaggtgaaggtttagggggaaatttatctattc

SEQ ID NO: 9205 - DNA, 96 bp, Aspergillus thermomutatus
  misc_feature: 96
atggtcagcaatgaagaaacacaacatggtgagggcaacgagcacctaccaggagggagtccagccttataaggtgtttcgaggacgaaacgctaa

SEQ ID NO: 9206 - DNA, 96 bp, Aspergillus thermomutatus
  misc_feature: 96
tctctcttattaatcctaccccttctatccttcttcttattcatcctttcttttttttttcttttctaatcctaaaaatctcatctccttctctaa

SEQ ID NO: 9207 - DNA, 96 bp, Aspergillus thermomutatus
  misc_feature: 96
ttacttattaacctactctctattccttattcttccttcttattctattcatctctctatcttatcctcttcctcttcaataatccttatccttat

SEQ ID NO: 9208 - DNA, 96 bp, Aspergillus thermomutatus
  misc_feature: 96
ttaatcccttctctctctctattcctcttctactcttatctcctttctttcttcttctctctcttcctatcttcaaatctatccttattttaactc

SEQ ID NO: 9209 - DNA, 96 bp, Aspergillus thermomutatus
  misc_feature: 96
aggcagagaggtagggaggtagggagggaggtagagaggcaccataggaggtatggagcaatgcaccgcgtgaggcacccccagatatgccatgca

SEQ ID NO: 9210 - DNA, 96 bp, Aspergillus thermomutatus
  misc_feature: 96
tgaatagaataagaaggaagaataaggaatagagagtaggttaataagtaagggtaagagataattaatagagataggggaaagaggaatgataag

SEQ ID NO: 9211 - DNA, 96 bp, Aspergillus thermomutatus
  misc_feature: 96
agatatgccatgcaaggtttggaccaaggtagccagagagcaaccatatggggcaggtagtatagtagggatcaacacaccccacatagccccaga

SEQ ID NO: 9212 - DNA, 96 bp, Aspergillus thermomutatus
  misc_feature: 96
gagggaggtagagaggcaccataggaggtatggagcaatgcaccgcgtgaggcacccccagatatgccatgcaaggtttggaccaaggtagccaga

SEQ ID NO: 9213 - DNA, 96 bp, Aspergillus thermomutatus
  misc_feature: 96
tctcttcatgtctatattccctttactttactaaatcctcttctcatcttccctctctctcttaaattctttcttaaactattaattcctctctct

SEQ ID NO: 9214 - DNA, 96 bp, Aspergillus thermomutatus
  misc_feature: 96
tctctctctctattcctcttctactcttatctcctttctttcttcttctctctcttcctatcttcaaatctatccttattttaactcctatttaat

SEQ ID NO: 9215 - DNA, 96 bp, Aspergillus thermomutatus
  misc_feature: 96
tctattcacctctctattcacctctctattcacctctctatctacctctctatctccctaccccactgtctgcctgtctgcctgtctgcctgtctg

SEQ ID NO: 9216 - DNA, 96 bp, Aspergillus thermomutatus
  misc_feature: 96
tctatgtgcatcctacatgctattcgacgtgctattctacgtgctattctacgtgctattctacgtgctattctacgtgctattctacgtgctatt

SEQ ID NO: 9217 - DNA, 96 bp, Aspergillus thermomutatus
  misc_feature: 96
tcctttctttcttctcttcccttctctctccctatcctctaatctatccttattttatctcctttttaattttaaattcctatttcctaatccttc

SEQ ID NO: 9218 - DNA, 96 bp, Aspergillus thermomutatus
  misc_feature: 96
acactctttaccgaggcgagcacaacggatgcaaggaaaggccattaggaaaccttgatcttcgatttttcgggccaaacttttctttcgaacgga

SEQ ID NO: 9219 - DNA, 96 bp, Aspergillus thermomutatus
  misc_feature: 96
tcccttctctctctctattcctcttctactcttatctcctttctttcttcttctctctcttcctatcttcaaatctatccttattttaactcctat

SEQ ID NO: 9220 - DNA, 96 bp, Aspergillus thermomutatus
  misc_feature: 96
gattacaaaaaaagaagaggagaaattaaagaacaagaaagaatgagaagagagaaaagaacaagaatagaaaagaatgagaagggaacgaggtga

SEQ ID NO: 9221 - DNA, 96 bp, Aspergillus thermomutatus
  misc_feature: 96
tattctacgtgctattctacgtgctattctacgtgctattctacgtgctattctacatgctattcgacgtgctattctatgtgctattcaacctgc

SEQ ID NO: 9222 - DNA, 96 bp, Aspergillus thermomutatus
  misc_feature: 96
tatggagcaatgcaccgcgtgaggcacccccagatatgccatgcaaggtttggaccaaggtagccagagagcaaccatatggggcaggtagtatag

SEQ ID NO: 9223 - DNA, 96 bp, Aspergillus thermomutatus
  misc_feature: 96
aagaggataagatagagagatgaatagaataagaaggaagaataaggaatagagagtaggttaataagtaagggtaagagataattaatagagata

SEQ ID NO: 9224 - DNA, 96 bp, Aspergillus thermomutatus
  misc_feature: 96
tatatatccctcttctaatatatattctcctcttctaatccctactatgcttactctactatttcccttctttacttctcctaaactaactaaccc

SEQ ID NO: 9225 - DNA, 96 bp, Aspergillus thermomutatus
  misc_feature: 96
gtatggagcaatgcaccgcgtgaggcacccccagatatgccatgcaaggtttggaccaaggtagccagagagcaaccatatggggcaggtagtata

SEQ ID NO: 9226 - DNA, 96 bp, Aspergillus thermomutatus
  misc_feature: 96
aggaggtatggagcaatgcaccgcgtgaggcacccccagatatgccatgcaaggtttggaccaaggtagccagagagcaaccatatggggcaggta

SEQ ID NO: 9227 - DNA, 96 bp, Aspergillus thermomutatus
  misc_feature: 96
taagaaggaagaataaggaatagagagtaggttaataagtaagggtaagagataattaatagagataggggaaagaggaatgataagggatagagt

SEQ ID NO: 9228 - DNA, 96 bp, Aspergillus thermomutatus
  misc_feature: 96
gtagaagagttaactctctaccttgatcctctatcgcacctacatctatatgattatgatatacattagattctgataatatatctctaatagtta

SEQ ID NO: 9229 - DNA, 96 bp, Aspergillus thermomutatus
  misc_feature: 96
atcattaggtgcgtcttccaatccaatgtatctaccaatgtgcgtttccaatgtttctaatgtgctcagtaagatgaggagcgagttctaatgtta

SEQ ID NO: 9230 - DNA, 96 bp, Aspergillus thermomutatus
  misc_feature: 96
taaagagagaataagaaaagaagagaagataaaagagagagagatttttagttaggattaaagatagtaaaaagagagaaaggggaaattggagag

SEQ ID NO: 9231 - DNA, 96 bp, Aspergillus thermomutatus
  misc_feature: 96
gatacactctttaccgaggcgagcacaacggatgcaaggaaaggccattaggaaaccttgatcttcgatttttcgggccaaacttttctttcgaac

SEQ ID NO: 9232 - DNA, 96 bp, Aspergillus thermomutatus
  misc_feature: 96
accgcgtgaggcacccccagatatgccatgcaaggtttggaccaaggtagccagagagcaaccatatggggcaggtagtatagtagggatcaacac

SEQ ID NO: 9233 - DNA, 96 bp, Aspergillus thermomutatus
  misc_feature: 96
gcgtgaggcacccccagatatgccatgcaaggtttggaccaaggtagccagagagcaaccatatggggcaggtagtatagtagggatcaacacacc

SEQ ID NO: 9234 - DNA, 96 bp, Aspergillus thermomutatus
  misc_feature: 96
cgaatcaccctgctgccagagatgccgaagcctttgctaagaaaatgcaagatgtcattgactatgtacgcgcccagatccgcgttgcccaggccc

SEQ ID NO: 9235 - DNA, 96 bp, Aspergillus thermomutatus
  misc_feature: 96
ggaggtatggagcaatgcaccgcgtgaggcacccccagatatgccatgcaaggtttggaccaaggtagccagagagcaaccatatggggcaggtag

SEQ ID NO: 9236 - DNA, 96 bp, Aspergillus thermomutatus
  misc_feature: 96
cctcaccatgttgtgtttcttcattgctgaccatggcgtctaaagcatccgttcgaaagaaaagtttggcccgaaaaatcgaagatcaaggtttcc

SEQ ID NO: 9237 - DNA, 96 bp, Aspergillus thermomutatus
  misc_feature: 96
gcagagaggtagggaggtagggagggaggtagagaggcaccataggaggtatggagcaatgcaccgcgtgaggcacccccagatatgccatgcaag

SEQ ID NO: 9238 - DNA, 96 bp, Aspergillus thermomutatus
  misc_feature: 96
ctacctctctattcacctctctattcacctctctattcacctctctatctacctctctatctccctaccccactgtctgcctgtctgcctgtctgc

SEQ ID NO: 9239 - DNA, 96 bp, Aspergillus thermomutatus
  misc_feature: 96
cctataatttctactaaccctcactcttatcctcattctcactctactcctctctcttatcctcattctaaccctcactccttcctccctctaatc

SEQ ID NO: 9240 - DNA, 96 bp, Aspergillus thermomutatus
  misc_feature: 96
gagtccttgcgctctatcagagttgccttcgaactagctatcatccgaagtgctttcgacatgcagttctgacaataatccaaaaaccaaataagt

SEQ ID NO: 9241 - DNA, 96 bp, Aspergillus thermomutatus
  misc_feature: 96
agtccttgcgctctatcagagttgccttcgaactagctatcatccgaagtgctttcgacatgcagttctgacaataatccaaaaaccaaataagtc

SEQ ID NO: 9242 - DNA, 96 bp, Aspergillus thermomutatus
  misc_feature: 96
ctatgtgcatcctacatgctattcgacgtgctattctacgtgctattctacgtgctattctacgtgctattctacgtgctattctacgtgctattc

SEQ ID NO: 9243 - DNA, 96 bp, Aspergillus thermomutatus
  misc_feature: 96
aaattccatcttccttcttctctttctctttcttatcctttctattcttaaaataaactatccctccctccttttcttcttctctcttaatatttc

SEQ ID NO: 9244 - DNA, 96 bp, Aspergillus thermomutatus
  misc_feature: 96
agagtccttgcgctctatcagagttgccttcgaactagctatcatccgaagtgctttcgacatgcagttctgacaataatccaaaaaccaaataag

SEQ ID NO: 9245 - DNA, 96 bp, Aspergillus thermomutatus
  misc_feature: 96
ctgaccgtatcatctcctgtaggtgctcatcgccttgcgcagcctcctgccattgctcgtctaatggcggaggtgctgacctcatgtccggtcggg

SEQ ID NO: 9246 - DNA, 96 bp, Aspergillus thermomutatus
  misc_feature: 96
ctctctatctccctaccccactgtctgcctgtctgcctgtctgcctgtctgcctgtctctctacctcactgcctacctcatgtcggacctctttgt

SEQ ID NO: 9247 - DNA, 96 bp, Aspergillus thermomutatus
  misc_feature: 96
ctctatctccctaccccactgtctgcctgtctgcctgtctgcctgtctgcctgtctctctacctcactgcctacctcatgtcggacctctttgtgg

SEQ ID NO: 9248 - DNA, 96 bp, Aspergillus thermomutatus
  misc_feature: 96
attacaaaaaaagaagaggagaaattaaagaacaagaaagaatgagaagagagaaaagaacaagaatagaaaagaatgagaagggaacgaggtgag

SEQ ID NO: 9249 - DNA, 96 bp, Aspergillus thermomutatus
  misc_feature: 96
cacccccagatatgccatgcaaggtttggaccaaggtagccagagagcaaccatatggggcaggtagtatagtagggatcaacacaccccacatag

SEQ ID NO: 9250 - DNA, 96 bp, Aspergillus thermomutatus
  misc_feature: 96
ctacacaatcattaggtgcgtcttccaatccaatgtatctaccaatgtgcgtttccaatgtttctaatgtgctcagtaagatgaggagcgagttct

SEQ ID NO: 9251 - DNA, 96 bp, Aspergillus thermomutatus
  misc_feature: 96
atacactctttaccgaggcgagcacaacggatgcaaggaaaggccattaggaaaccttgatcttcgatttttcgggccaaacttttctttcgaacg

SEQ ID NO: 9252 - DNA, 96 bp, Aspergillus thermomutatus
  misc_feature: 96
acctctctatctccctaccccactgtctgcctgtctgcctgtctgcctgtctgcctgtctctctagacgcctctctcaatgatgtgtagtctgccg

SEQ ID NO: 9253 - DNA, 96 bp, Aspergillus thermomutatus
  misc_feature: 96
ccttctctctctctattcctcttctactcttatctcctttctttcttcttctctctcttcctatcttcaaatctatccttattttaactcctattt

SEQ ID NO: 9254 - DNA, 96 bp, Aspergillus thermomutatus
  misc_feature: 96
cctctctatctccctaccccactgtctgcctgtctgcctgtctgcctgtctgcctgtctctctacctcactgcctacctcatgtcggacctctttg

SEQ ID NO: 9255 - DNA, 96 bp, Aspergillus thermomutatus
  misc_feature: 96
cccttctctctctctattcctcttctactcttatctcctttctttcttcttctctctcttcctatcttcaaatctatccttattttaactcctatt

SEQ ID NO: 9256 - DNA, 96 bp, Aspergillus thermomutatus
  misc_feature: 96
cccttacttattaacctactctctattccttattcttccttcttattctattcatctctctatcttatcctcttcctcttcaataatccttatcct

SEQ ID NO: 9257 - DNA, 96 bp, Aspergillus thermomutatus
  misc_feature: 96
atgataagggatagagtaagggatagatagtttagggagaggagggggtagaaaggtttagagataaagagaggaataagagatagtattaggggt

SEQ ID NO: 9258 - DNA, 96 bp, Aspergillus thermomutatus
  misc_feature: 96
atctacctctctatctccctaccccactgtctgcctgtctgcctgtctgcctgtctgcctgtctctctagacgcctctctcaatgatgtgtagtct

SEQ ID NO: 9259 - DNA, 96 bp, Aspergillus thermomutatus
  misc_feature: 96
agaagagtagatagtaagggataggataggataggaaaaaagaaaagatttagaaatagaagattaaaggtaaagaggaagggatagagagaggat

SEQ ID NO: 9260 - DNA, 96 bp, Aspergillus thermomutatus
  misc_feature: 96
agatgaatagaataagaaggaagaataaggaatagagagtaggttaataagtaagggtaagagataattaatagagataggggaaagaggaatgat

SEQ ID NO: 9261 - DNA, 96 bp, Aspergillus thermomutatus
  misc_feature: 96
atcatagattatatactgtaaagattacttcttcattaattaattctctaaaaaatagcccattttaatatacaagacccaaagattccctagatt

SEQ ID NO: 9262 - DNA, 96 bp, Aspergillus thermomutatus
  misc_feature: 96
agagaggtagggaggtagggagggaggtagagaggcaccataggaggtatggagcaatgcaccgcgtgaggcacccccagatatgccatgcaaggt

SEQ ID NO: 9263 - DNA, 96 bp, Aspergillus thermomutatus
  misc_feature: 96
actcttctctctctttttcttctctctctttttcttctctctctttttcttctctctctttttcttctctctctctcttttccttttcttctttct

SEQ ID NO: 9264 - DNA, 96 bp, Aspergillus thermomutatus
  misc_feature: 95
ggcagagaggtagggaggtagggagggaggtagagaggcaccataggaggtatggagcaatgcaccgcgtgaggcacccccagatatgccatgcaa

SEQ ID NO: 9265 - DNA, 96 bp, Aspergillus thermomutatus
  misc_feature: 95
ttcttgtacagataaaatggtatcaccacctagattagcacgtattcttgccttcttctttcttttccgttcattctctgcccgtagaaccctgat

SEQ ID NO: 9266 - DNA, 96 bp, Aspergillus thermomutatus
  misc_feature: 95
tgagaagagaataaggtgaataaggagagaggagaagagaggagatgagaagagaggagatgagaagagatgagaagagaggagaggagatgagaa

SEQ ID NO: 9267 - DNA, 96 bp, Aspergillus thermomutatus
  misc_feature: 95
ttccttaatcccttctctctctctattcctcttctactcttatctcctttctttcttcttctctctcttcctatcttcaaatctatccttatttta

SEQ ID NO: 9268 - DNA, 96 bp, Aspergillus thermomutatus
  misc_feature: 95
agaaggttagttagtagagaagggagaaggtaagggtgagtaaggagaagaagaaggtaagggttagtaagaaggagatagtaagggatagtataa

SEQ ID NO: 9269 - DNA, 96 bp, Aspergillus thermomutatus
  misc_feature: 95
tccttaatcccttctctctctctattcctcttctactcttatctcctttctttcttcttctctctcttcctatcttcaaatctatccttattttaa

SEQ ID NO: 9270 - DNA, 96 bp, Aspergillus thermomutatus
  misc_feature: 95
tgtacagataaaatggtatcaccacctagattagcacgtattcttgccttcttctttcttttccgttcattctctgcccgtagaaccctgatttct

SEQ ID NO: 9271 - DNA, 96 bp, Aspergillus thermomutatus
  misc_feature: 95
tggcaagccaagcccattattagtccatccattatcgctcacaccaatcagccagtcagggtctatgtcttgataccattgagattgatggacctt

SEQ ID NO: 9272 - DNA, 96 bp, Aspergillus thermomutatus
  misc_feature: 95
tgcgctctatcagagttgccttcgaactagctatcatccgaagtgctttcgacatgcagttctgacaataatccaaaaaccaaataagtctgactg

SEQ ID NO: 9273 - DNA, 96 bp, Aspergillus thermomutatus
  misc_feature: 95
tgaccgtatcatctcctgtaggtgctcatcgccttgcgcagcctcctgccattgctcgtctaatggcggaggtgctgacctcatgtccggtcggga

SEQ ID NO: 9274 - DNA, 96 bp, Aspergillus thermomutatus
  misc_feature: 95
agtaaaagagaaggattaggaaataggaatttaaaattaaaaaggagataaaataaggatagattagaggatagggagagagaagggaagagaaga

SEQ ID NO: 9275 - DNA, 96 bp, Aspergillus thermomutatus
  misc_feature: 95
tcttccttaatcccttctctctctctattcctcttctactcttatctcctttctttcttcttctctctcttcctatcttcaaatctatccttattt

SEQ ID NO: 9276 - DNA, 96 bp, Aspergillus thermomutatus
  misc_feature: 95
atatgccatgcaaggtttggaccaaggtagccagagagcaaccatatggggcaggtagtatagtagggatcaacacaccccacatagccccagaga

SEQ ID NO: 9277 - DNA, 96 bp, Aspergillus thermomutatus
  misc_feature: 95
aaagagagaataagaaaagaagagaagataaaagagagagagatttttagttaggattaaagatagtaaaaagagagaaaggggaaattggagaga

SEQ ID NO: 9278 - DNA, 96 bp, Aspergillus thermomutatus
  misc_feature: 95
tctctattcacctctctattcacctctctattcacctctctatctacctctctatctccctaccccactgtctgcctgtctgcctgtctgcctgtc

SEQ ID NO: 9279 - DNA, 96 bp, Aspergillus thermomutatus
  misc_feature: 95
tctaaattccatcttccttcttctctttctctttcttatcctttctattcttaaaataaactatccctccctccttttcttcttctctcttaatat

SEQ ID NO: 9280 - DNA, 96 bp, Aspergillus thermomutatus
  misc_feature: 95
tcctctcttatcattctctttactttctctttaccttctcacctcgttcccttctcattcttttctattcttgttcttttctctcttctcattctt

SEQ ID NO: 9281 - DNA, 96 bp, Aspergillus thermomutatus
  misc_feature: 95
tcacctctctatctacctctctatctccctaccccactgtctgcctgtctgcctgtctgcctgtctgcctgtctctctagacgcctctctcaatga

SEQ ID NO: 9282 - DNA, 96 bp, Aspergillus thermomutatus
  misc_feature: 95
tcattcttaaatcttatctcctttctttcttctcttcccttctctctccctatcctctaatctatccttattttatctcctttttaattttaaatt

SEQ ID NO: 9283 - DNA, 96 bp, Aspergillus thermomutatus
  misc_feature: 95
gagtaagggttagtagtaataggaaagagagtaagagatagtattagaataaggataaggattattgaagaggaagaggataagatagagagatga

SEQ ID NO: 9284 - DNA, 96 bp, Aspergillus thermomutatus
  misc_feature: 95
tcactccctcttcctcctttcttgcatttctttattctcttaacatcctcccttctaatcttcaaccttctttatatatctctctactacatcact

SEQ ID NO: 9285 - DNA, 96 bp, Aspergillus thermomutatus
  misc_feature: 95
aagagttaactctctaccttgatcctctatcgcacctacatctatatgattatgatatacattagattctgataatatatctctaatagttattga

SEQ ID NO: 9286 - DNA, 96 bp, Aspergillus thermomutatus
  misc_feature: 95
tattttctcttctctctctttctatccttcttttccaccctcctccttttacaacctataatttctactaaccctcactcttatcctcattctcac

SEQ ID NO: 9287 - DNA, 96 bp, Aspergillus thermomutatus
  misc_feature: 95
tattcacctctctatctacctctctatctccctaccccactgtctgcctgtctgcctgtctgcctgtctgcctgtctctctacctcactgcctacc

SEQ ID NO: 9288 - DNA, 96 bp, Aspergillus thermomutatus
  misc_feature: 95
acatggtgccttcctccctaccttatattatacattcttcgctacctcacgcggtgcatctctggggctatgtggggtgtgttgatccctactata

SEQ ID NO: 9289 - DNA, 96 bp, Aspergillus thermomutatus
  misc_feature: 95
tagtaaaagagaaggattaggaaataggaatttaaaattaaaaaggagataaaataaggatagattagaggatagggagagagaagggaagagaag

SEQ ID NO: 9290 - DNA, 96 bp, Aspergillus thermomutatus
  misc_feature: 95
gtcttacatggtgccttcctccctaccttatattatacattcttcgctacctcacgcggtgcatctctggggctatgtggggtgtgttgatcccta

SEQ ID NO: 9291 - DNA, 96 bp, Aspergillus thermomutatus
  misc_feature: 95
atcccttctctctctctattcctcttctactcttatctcctttctttcttcttctctctcttcctatcttcaaatctatccttattttaactccta

SEQ ID NO: 9292 - DNA, 96 bp, Aspergillus thermomutatus
  misc_feature: 95
tacttatatttattactgtatctctcattgtactcatcattgtaaattataataaattaataacctcagtaatatacagaaatgtataagaataat

SEQ ID NO: 9293 - DNA, 96 bp, Aspergillus thermomutatus
  misc_feature: 95
tacctctctattcacctctctattcacctctctattcacctctctatctacctctctatctccctaccccactgtctgcctgtctgcctgtctgcc

SEQ ID NO: 9294 - DNA, 96 bp, Aspergillus thermomutatus
  misc_feature: 95
tacctctctatctccctaccccactgtctgcctgtctgcctgtctgcctgtctgcctgtctctctagacgcctctctcaatgatgtgtagtctgcc

SEQ ID NO: 9295 - DNA, 96 bp, Aspergillus thermomutatus
  misc_feature: 95
agggaacaagaagagaagagaatgagaagaaaaagagatggtttagggttaaagagaggaaagtggaaagagaggagaaggataaagtgaagtgac

SEQ ID NO: 9296 - DNA, 96 bp, Aspergillus thermomutatus
  misc_feature: 95
catggtgccttcctccctaccttatattatacattcttcgctacctcacgcggtgcatctctggggctatgtggggtgtgttgatccctactatac

SEQ ID NO: 9297 - DNA, 96 bp, Aspergillus thermomutatus
  misc_feature: 95
atatatatccctcttctaatatatattctcctcttctaatccctactatgcttactctactatttcccttctttacttctcctaaactaactaacc

SEQ ID NO: 9298 - DNA, 96 bp, Aspergillus thermomutatus
  misc_feature: 95
atggtgcctctctacctatctccctacctcttcacctacctcttcacctacctcttcacctacctcttcacctacctcttcacctacctcttcacc

SEQ ID NO: 9299 - DNA, 96 bp, Aspergillus thermomutatus
  misc_feature: 95
ccttttcttaaatcctacttcttctctttttttcttctttcttttcttaactcttactttcctctcttttatacccctaatactatctcttattcc

SEQ ID NO: 9300 - DNA, 96 bp, Aspergillus thermomutatus
  misc_feature: 95
gcgctctatcagagttgccttcgaactagctatcatccgaagtgctttcgacatgcagttctgacaataatccaaaaaccaaataagtctgactgg

SEQ ID NO: 9301 - DNA, 96 bp, Aspergillus thermomutatus
  misc_feature: 95
gcctctctacctatctccctacctcttcacctacctcttcacctacctcttcacctacctcttcacctacctcttcacctacctcttcacctacct

SEQ ID NO: 9302 - DNA, 96 bp, Aspergillus thermomutatus
  misc_feature: 95
ctacctctctatctccctaccccactgtctgcctgtctgcctgtctgcctgtctgcctgtctctctagacgcctctctcaatgatgtgtagtctgc

SEQ ID NO: 9303 - DNA, 96 bp, Aspergillus thermomutatus
  misc_feature: 95
actaaccctcactcttatcctcattctcactctactcctctctcttatcctcattctaaccctcactccttcctccctctaatcctccctctaatc

SEQ ID NO: 9304 - DNA, 96 bp, Aspergillus thermomutatus
  misc_feature: 95
cctctctacctatctccctacctcttcacctacctcttcacctacctcttcacctacctcttcacctacctcttcacctacctcttcacctacctc

SEQ ID NO: 9305 - DNA, 96 bp, Aspergillus thermomutatus
  misc_feature: 95
actgtctgcctgtctgcctgtctgcctgtctgcctgtctctctacctcactgcctacctcatgtcggacctctttgtgggcctatctgcctgcctc

SEQ ID NO: 9306 - DNA, 96 bp, Aspergillus thermomutatus
  misc_feature: 95
gaggataagatagagagatgaatagaataagaaggaagaataaggaatagagagtaggttaataagtaagggtaagagataattaatagagatagg

SEQ ID NO: 9307 - DNA, 96 bp, Aspergillus thermomutatus
  misc_feature: 95
ctctcttcatgtctatattccctttactttactaaatcctcttctcatcttccctctctctcttaaattctttcttaaactattaattcctctctc

SEQ ID NO: 9308 - DNA, 96 bp, Aspergillus thermomutatus
  misc_feature: 95
gagaagagaataaggtgaataaggagagaggagaagagaggagatgagaagagaggagatgagaagagatgagaagagaggagaggagatgagaag

SEQ ID NO: 9309 - DNA, 96 bp, Aspergillus thermomutatus
  misc_feature: 95
acatatttgataaaatatactataattaatagtataaatactcatgaggcatatttggaaagaatgtaaaaatactcatgaggcatatttggaaag

SEQ ID NO: 9310 - DNA, 96 bp, Aspergillus thermomutatus
  misc_feature: 95
cttccttaatcccttctctctctctattcctcttctactcttatctcctttctttcttcttctctctcttcctatcttcaaatctatccttatttt

SEQ ID NO: 9311 - DNA, 96 bp, Aspergillus thermomutatus
  misc_feature: 95
cttacatggtgccttcctccctaccttatattatacattcttcgctacctcacgcggtgcatctctggggctatgtggggtgtgttgatccctact

SEQ ID NO: 9312 - DNA, 96 bp, Aspergillus thermomutatus
  misc_feature: 95
agagaggagtagagtgagaatgaggataagagtgagggttagtagaaattataggttgtaaaaggaggagggtggaaaagaaggatagaaagagag

SEQ ID NO: 9313 - DNA, 96 bp, Aspergillus thermomutatus
  misc_feature: 95
agaagattacaaaaaaagaagaggagaaattaaagaacaagaaagaatgagaagagagaaaagaacaagaatagaaaagaatgagaagggaacgag

SEQ ID NO: 9314 - DNA, 96 bp, Aspergillus thermomutatus
  misc_feature: 95
agaggataagatagagagatgaatagaataagaaggaagaataaggaatagagagtaggttaataagtaagggtaagagataattaatagagatag

SEQ ID NO: 9315 - DNA, 96 bp, Aspergillus thermomutatus
  misc_feature: 95
ccttacttattaacctactctctattccttattcttccttcttattctattcatctctctatcttatcctcttcctcttcaataatccttatcctt

SEQ ID NO: 9316 - DNA, 96 bp, Aspergillus thermomutatus
  misc_feature: 95
cactgtctgcctgtctgcctgtctgcctgtctgcctgtctctctacctcactgcctacctcatgtcggacctctttgtgggcctatctgcctgcct

SEQ ID NO: 9317 - DNA, 96 bp, Aspergillus thermomutatus
  misc_feature: 95
cactctttaccgaggcgagcacaacggatgcaaggaaaggccattaggaaaccttgatcttcgatttttcgggccaaacttttctttcgaacggat

SEQ ID NO: 9318 - DNA, 96 bp, Aspergillus thermomutatus
  misc_feature: 95
agattacaaaaaaagaagaggagaaattaaagaacaagaaagaatgagaagagagaaaagaacaagaatagaaaagaatgagaagggaacgaggtg

SEQ ID NO: 9319 - DNA, 96 bp, Aspergillus thermomutatus
  misc_feature: 95
attagtacctatttgtttaataatttaggcttatttagtaaattaggtatactaatatctctattaggtgaaggtttagggggaaatttatctatt

SEQ ID NO: 9320 - DNA, 96 bp, Aspergillus thermomutatus
  misc_feature: 95
acctctcttgctacctctcttgctacctctcttactacctctcttgctacctctctactggctttactccctaccttggtccctacgtatttgcct

SEQ ID NO: 9321 - DNA, 96 bp, Aspergillus thermomutatus
  misc_feature: 95
aatcccttctctctctctattcctcttctactcttatctcctttctttcttcttctctctcttcctatcttcaaatctatccttattttaactcct

SEQ ID NO: 9322 - DNA, 96 bp, Aspergillus thermomutatus
  misc_feature: 95
aaaataactatcccttactctttctaaaacctaactcttaccctcctttttcttctctttcctttactctctttcccttctaaattccatcttcct

SEQ ID NO: 9323 - DNA, 96 bp, Aspergillus thermomutatus
  misc_feature: 94
ttgcgctctatcagagttgccttcgaactagctatcatccgaagtgctttcgacatgcagttctgacaataatccaaaaaccaaataagtctgact

SEQ ID NO: 9324 - DNA, 96 bp, Aspergillus thermomutatus
  misc_feature: 94
ttctcacctcgttcccttctcattcttttctattcttgttcttttctctcttctcattctttcttgttctttaatttctcctcttctttttttgta

SEQ ID NO: 9325 - DNA, 96 bp, Aspergillus thermomutatus
  misc_feature: 94
agtaagggttagtagtaataggaaagagagtaagagatagtattagaataaggataaggattattgaagaggaagaggataagatagagagatgaa

SEQ ID NO: 9326 - DNA, 96 bp, Aspergillus thermomutatus
  misc_feature: 94
gtacttatatttattactgtatctctcattgtactcatcattgtaaattataataaattaataacctcagtaatatacagaaatgtataagaataa

SEQ ID NO: 9327 - DNA, 96 bp, Aspergillus thermomutatus
  misc_feature: 94
ttaggtgcgtcttccaatccaatgtatctaccaatgtgcgtttccaatgtttctaatgtgctcagtaagatgaggagcgagttctaatgttacggg

SEQ ID NO: 9328 - DNA, 96 bp, Aspergillus thermomutatus
  misc_feature: 94
aacctataatttctactaaccctcactcttatcctcattctcactctactcctctctcttatcctcattctaaccctcactccttcctccctctaa

SEQ ID NO: 9329 - DNA, 96 bp, Aspergillus thermomutatus
  misc_feature: 94
tattaacctactctctattccttattcttccttcttattctattcatctctctatcttatcctcttcctcttcaataatccttatccttattctaa

SEQ ID NO: 9330 - DNA, 96 bp, Aspergillus thermomutatus
  misc_feature: 94
ttactggaatgttcaggcgtgcttttcgacctttgattcggtaagtgagcgtacgatatggtacatcatacgctgcggctgctgcgcggatgctct

SEQ ID NO: 9331 - DNA, 96 bp, Aspergillus thermomutatus
  misc_feature: 94
ttacatggtgccttcctccctaccttatattatacattcttcgctacctcacgcggtgcatctctggggctatgtggggtgtgttgatccctacta

SEQ ID NO: 9332 - DNA, 96 bp, Aspergillus thermomutatus
  misc_feature: 94
ggccccggctcatctgcttcgtctggctggcttgatctggctggcttgatctgtctggctggtctggctgaactctctgagctggtcgggcaggca

SEQ ID NO: 9333 - DNA, 96 bp, Aspergillus thermomutatus
  misc_feature: 94
agagaataagaaaagaagagaagataaaagagagagagatttttagttaggattaaagatagtaaaaagagagaaaggggaaattggagagaggca

SEQ ID NO: 9334 - DNA, 96 bp, Aspergillus thermomutatus
  misc_feature: 94
tgcctctctacctatctccctacctcttcacctacctcttcacctacctcttcacctacctcttcacctacctcttcacctacctcttcacctacc

SEQ ID NO: 9335 - DNA, 96 bp, Aspergillus thermomutatus
  misc_feature: 94
taataaaagtcatctgtacttatatttattactgtatctctcattgtactcatcattgtaaattataataaattaataacctcagtaatatacaga

SEQ ID NO: 9336 - DNA, 96 bp, Aspergillus thermomutatus
  misc_feature: 94
agcatagtaatatatgtaggtatataaaagccacgcagggttaggtataaaggcacccacagaggccccatgtaaggcagggttaaggcaggcaga

SEQ ID NO: 9337 - DNA, 96 bp, Aspergillus thermomutatus
  misc_feature: 94
tctctcttcatgtctatattccctttactttactaaatcctcttctcatcttccctctctctcttaaattctttcttaaactattaattcctctct

SEQ ID NO: 9338 - DNA, 96 bp, Aspergillus thermomutatus
  misc_feature: 94
tctcctttctttcttctcttcccttctctctccctatcctctaatctatccttattttatctcctttttaattttaaattcctatttcctaatcct

SEQ ID NO: 9339 - DNA, 96 bp, Aspergillus thermomutatus
  misc_feature: 94
tccttgcgctctatcagagttgccttcgaactagctatcatccgaagtgctttcgacatgcagttctgacaataatccaaaaaccaaataagtctg

SEQ ID NO: 9340 - DNA, 96 bp, Aspergillus thermomutatus
  misc_feature: 94
tatacatatttgataaaatatactataattaatagtataaatactcatgaggcatatttggaaagaatgtaaaaatactcatgaggcatatttgga

SEQ ID NO: 9341 - DNA, 96 bp, Aspergillus thermomutatus
  misc_feature: 94
ccttgcgctctatcagagttgccttcgaactagctatcatccgaagtgctttcgacatgcagttctgacaataatccaaaaaccaaataagtctga

SEQ ID NO: 9342 - DNA, 96 bp, Aspergillus thermomutatus
  misc_feature: 94
attgagcgtattccgcatttgcctccacgcagtggatcttgcgcgttgggtagcccaagctggtggatccggctgagctcccttctgggtggcata

SEQ ID NO: 9343 - DNA, 96 bp, Aspergillus thermomutatus
  misc_feature: 94
tatattatacattcttcgctacctcacgtggtgcatctctggggctacgtggggtgtgttgatccctactatactacctgccccatatggtcgctc

SEQ ID NO: 9344 - DNA, 96 bp, Aspergillus thermomutatus
  misc_feature: 94
tatataggtatataaaagccacgcagggttaggtataaaggcacccacagaggccccatgtaaggcaggcagagaggtagagataggtagagaggg

SEQ ID NO: 9345 - DNA, 96 bp, Aspergillus thermomutatus
  misc_feature: 94
aagaaggttagttagtagagaagggagaaggtaagggtgagtaaggagaagaagaaggtaagggttagtaagaaggagatagtaagggatagtata

SEQ ID NO: 9346 - DNA, 96 bp, Aspergillus thermomutatus
  misc_feature: 94
taggtgcgtcttccaatccaatgtatctaccaatgtgcgtttccaatgtttctaatgtgctcagtaagatgaggagcgagttctaatgttacgggc

SEQ ID NO: 9347 - DNA, 96 bp, Aspergillus thermomutatus
  misc_feature: 94
ggtgcctctctacctatctccctacctcttcacctacctcttcacctacctcttcacctacctcttcacctacctcttcacctacctcttcaccta

SEQ ID NO: 9348 - DNA, 96 bp, Aspergillus thermomutatus
  misc_feature: 94
atactaattatctttaatctctggtataaccaccctaacttataatatatattaatacctactatgcctcactgcctacctcctggggttcctcta

SEQ ID NO: 9349 - DNA, 96 bp, Aspergillus thermomutatus
  misc_feature: 94
tacttattaacctactctctattccttattcttccttcttattctattcatctctctatcttatcctcttcctcttcaataatccttatccttatt

SEQ ID NO: 9350 - DNA, 96 bp, Aspergillus thermomutatus
  misc_feature: 94
tacatggtgccttcctccctaccttatattatacattcttcgctacctcacgcggtgcatctctggggctatgtggggtgtgttgatccctactat

SEQ ID NO: 9351 - DNA, 96 bp, Aspergillus thermomutatus
  misc_feature: 94
taatcccttctctctctctattcctcttctactcttatctcctttctttcttcttctctctcttcctatcttcaaatctatccttattttaactcc

SEQ ID NO: 9352 - DNA, 96 bp, Aspergillus thermomutatus
  misc_feature: 94
taaggaatagagagtaggttaataagtaagggtaagagataattaatagagataggggaaagaggaatgataagggatagagtaagggatagatag

SEQ ID NO: 9353 - DNA, 96 bp, Aspergillus thermomutatus
  misc_feature: 94
taagaaggttagttagtagagaagggagaaggtaagggtgagtaaggagaagaagaaggtaagggttagtaagaaggagatagtaagggatagtat

SEQ ID NO: 9354 - DNA, 96 bp, Aspergillus thermomutatus
  misc_feature: 94
taaattccatcttccttcttctctttctctttcttatcctttctattcttaaaataaactatccctccctccttttcttcttctctcttaatattt

SEQ ID NO: 9355 - DNA, 96 bp, Aspergillus thermomutatus
  misc_feature: 94
gcaccgcgtgaggcacccccagatatgccatgcaaggtttggaccaaggtagccagagagcaaccatatggggcaggtagtatagtagggatcaac

SEQ ID NO: 9356 - DNA, 96 bp, Aspergillus thermomutatus
  misc_feature: 94
gccccggctcatctgcttcgtctggctggcttgatctggctggcttgatctgtctggctggtctggctgaactctctgagctggtcgggcaggcac

SEQ ID NO: 9357 - DNA, 96 bp, Aspergillus thermomutatus
  misc_feature: 94
gtgcctctctacctatctccctacctcttcacctacctcttcacctacctcttcacctacctcttcacctacctcttcacctacctcttcacctac

SEQ ID NO: 9358 - DNA, 96 bp, Aspergillus thermomutatus
  misc_feature: 94
ctattcacctctctatctacctctctatctccctaccccactgtctgcctgtctgcctgtctgcctgtctgcctgtctctctacctcactgcctac

SEQ ID NO: 9359 - DNA, 96 bp, Aspergillus thermomutatus
  misc_feature: 94
gtaagggttagtagtaataggaaagagagtaagagatagtattagaataaggataaggattattgaagaggaagaggataagatagagagatgaat

SEQ ID NO: 9360 - DNA, 96 bp, Aspergillus thermomutatus
  misc_feature: 94
gatcaccagcaatacagctcctgcgcggcacggttaggattgctccacgaccgcctacttcggtcgcattgtcacgtgaccaactaccatataccc

SEQ ID NO: 9361 - DNA, 96 bp, Aspergillus thermomutatus
  misc_feature: 94
ggggttcgcatcagtcagctggctggcctggacggtctgctgggccttagcctgcacctgggcctgctcccaggcctgcatcacctcatcgaccgc

SEQ ID NO: 9362 - DNA, 96 bp, Aspergillus thermomutatus
  misc_feature: 94
ggggatgggggaagttaatgagaaattagaagaaagaagaggagaggagaaggaaagaaaagagaaacagaggagggaaagaagggaagagatgag

SEQ ID NO: 9363 - DNA, 96 bp, Aspergillus thermomutatus
  misc_feature: 94
ggccggcgggcgcgcgcgcgcgcgagcattaggcggcagcggtccggggcaggccagcaggcaggggggcgcgcgcgcggcggtgaccagttggcc

SEQ ID NO: 9364 - DNA, 96 bp, Aspergillus thermomutatus
  misc_feature: 94
ccactgtctgcctgtctgcctgtctgcctgtctgcctgtctctctacctcactgcctacctcatgtcggacctctttgtgggcctatctgcctgcc

SEQ ID NO: 9365 - DNA, 96 bp, Aspergillus thermomutatus
  misc_feature: 94
ggaggaagttgacgagaagattacaaaaaaagaagaggagaaattaaagaacaagaaagaatgagaagagagaaaagaacaagaatagaaaagaat

SEQ ID NO: 9366 - DNA, 96 bp, Aspergillus thermomutatus
  misc_feature: 94
caaaataactatcccttactctttctaaaacctaactcttaccctcctttttcttctctttcctttactctctttcccttctaaattccatcttcc

SEQ ID NO: 9367 - DNA, 96 bp, Aspergillus thermomutatus
  misc_feature: 94
cttatattatacattcttcgctacctcacgtggtgcatctctggggctacgtggggtgtgttgatccctactatactacctgccccatatggtcgc

SEQ ID NO: 9368 - DNA, 96 bp, Aspergillus thermomutatus
  misc_feature: 94
gagagaataagaaaagaagagaagataaaagagagagagatttttagttaggattaaagatagtaaaaagagagaaaggggaaattggagagaggc

SEQ ID NO: 9369 - DNA, 96 bp, Aspergillus thermomutatus
  misc_feature: 94
gcaaggtttggaccaaggtagccagagagcaaccatatggggcaggtagtatagtagggatcaacacaccccacatagccccagagatgcaccgcg

SEQ ID NO: 9370 - DNA, 96 bp, Aspergillus thermomutatus
  misc_feature: 94
cccggctcatctgcttcgtctggctggcttgatctggctggcttgatctgtctggctggtctggctgaactctctgagctggtcgggcaggcactc

SEQ ID NO: 9371 - DNA, 96 bp, Aspergillus thermomutatus
  misc_feature: 94
gacatacaaccaccaagtacttgcagccacaatcgaactgacagaggatccactgattcaaaaaattattgaagcaacaaaaagggacaaaatcat

SEQ ID NO: 9372 - DNA, 96 bp, Aspergillus thermomutatus
  misc_feature: 94
gaaggttagttagtagagaagggagaaggtaagggtgagtaaggagaagaagaaggtaagggttagtaagaaggagatagtaagggatagtataag

SEQ ID NO: 9373 - DNA, 96 bp, Aspergillus thermomutatus
  misc_feature: 94
actcctttatcatcatactgggacatcacaccagcagacacgtaatcggaagagtcagtctcaataataacgtctctcgtccagtcgaatggtttc

SEQ ID NO: 9374 - DNA, 96 bp, Aspergillus thermomutatus
  misc_feature: 94
ctctctctatatctctctatctgatttggtggcttatacggtgccttactccccaccattctacctacctgtctgcctgtctgcctgtctgcctgt

SEQ ID NO: 9375 - DNA, 96 bp, Aspergillus thermomutatus
  misc_feature: 94
aagagagaataagaaaagaagagaagataaaagagagagagatttttagttaggattaaagatagtaaaaagagagaaaggggaaattggagagag

SEQ ID NO: 9376 - DNA, 96 bp, Aspergillus thermomutatus
  misc_feature: 94
ctattctacgtgctattctacgtgctattctacgtgctattctacgtgctattctacatgctattcgacgtgctattctatgtgctattcaacctg

SEQ ID NO: 9377 - DNA, 96 bp, Aspergillus thermomutatus
  misc_feature: 94
ctaaattccatcttccttcttctctttctctttcttatcctttctattcttaaaataaactatccctccctccttttcttcttctctcttaatatt

SEQ ID NO: 9378 - DNA, 96 bp, Aspergillus thermomutatus
  misc_feature: 94
ccttatattatacattcttcgctacctcacgtggtgcatctctggggctacgtggggtgtgttgatccctactatactacctgccccatatggtcg

SEQ ID NO: 9379 - DNA, 96 bp, Aspergillus thermomutatus
  misc_feature: 94
ccttctcacctcgttcccttctcattcttttctattcttgttcttttctctcttctcattctttcttgttctttaatttctcctcttctttttttg

SEQ ID NO: 9380 - DNA, 96 bp, Aspergillus thermomutatus
  misc_feature: 94
aaggttagttagtagagaagggagaaggtaagggtgagtaaggagaagaagaaggtaagggttagtaagaaggagatagtaagggatagtataagg

SEQ ID NO: 9381 - DNA, 96 bp, Aspergillus thermomutatus
  misc_feature: 94
aaggaagaataaggaatagagagtaggttaataagtaagggtaagagataattaatagagataggggaaagaggaatgataagggatagagtaagg

SEQ ID NO: 9382 - DNA, 96 bp, Aspergillus thermomutatus
  misc_feature: 94
cagaacagcaggcaaaacagcaggcagaacggtaggcagaacggcaggcagaacggtaggcagaacggcaggcagaacggcaggttgaatagcagg

SEQ ID NO: 9383 - DNA, 96 bp, Aspergillus thermomutatus
  misc_feature: 94
agagagaataagaaaagaagagaagataaaagagagagagatttttagttaggattaaagatagtaaaaagagagaaaggggaaattggagagagg

SEQ ID NO: 9384 - DNA, 96 bp, Aspergillus thermomutatus
  misc_feature: 94
aggataagatagagagatgaatagaataagaaggaagaataaggaatagagagtaggttaataagtaagggtaagagataattaatagagataggg

SEQ ID NO: 9385 - DNA, 96 bp, Aspergillus thermomutatus
  misc_feature: 94
ccccggctcatctgcttcgtctggctggcttgatctggctggcttgatctgtctggctggtctggctgaactctctgagctggtcgggcaggcact

SEQ ID NO: 9386 - DNA, 96 bp, Aspergillus thermomutatus
  misc_feature: 94
actctttaccgaggcgagcacaacggatgcaaggaaaggccattaggaaaccttgatcttcgatttttcgggccaaacttttctttcgaacggatg

SEQ ID NO: 9387 - DNA, 96 bp, Aspergillus thermomutatus
  misc_feature: 94
aaggtttggaccaaggtagccagagagcaaccatatggggcaggtagtatagtagggatcaacacaccccacatagccccagagatgcaccgcgtg

SEQ ID NO: 9388 - DNA, 96 bp, Aspergillus thermomutatus
  misc_feature: 94
caaggtttggaccaaggtagccagagagcaaccatatggggcaggtagtatagtagggatcaacacaccccacatagccccagagatgcaccgcgt

SEQ ID NO: 9389 - DNA, 96 bp, Aspergillus thermomutatus
  misc_feature: 94
aataaggaatagagagtaggttaataagtaagggtaagagataattaatagagataggggaaagaggaatgataagggatagagtaagggatagat

SEQ ID NO: 9390 - DNA, 96 bp, Aspergillus thermomutatus
  misc_feature: 94
acctctctattcacctctctattcacctctctattcacctctctatctacctctctatctccctaccccactgtctgcctgtctgcctgtctgcct

SEQ ID NO: 9391 - DNA, 96 bp, Aspergillus thermomutatus
  misc_feature: 94
agaacagcaggcaaaacagcaggcagaacggtaggcagaacggcaggcagaacggtaggcagaacggcaggcagaacggcaggttgaatagcaggt

SEQ ID NO: 9392 - DNA, 96 bp, Aspergillus thermomutatus
  misc_feature: 93
tctactcttctaatcttccttaatcccttctctctctctattcctcttctactcttatctcctttctttcttcttctctctcttcctatcttcaaa

SEQ ID NO: 9393 - DNA, 96 bp, Aspergillus thermomutatus
  misc_feature: 93
aaggaaaggccattaggaaaccttgatcttcgatttttcgggccaaacttttctttcgaacggatgctttagacgccatggtcagcaatgaagaaa

SEQ ID NO: 9394 - DNA, 96 bp, Aspergillus thermomutatus
  misc_feature: 93
cccttgttatggaacatctacagtcaacacgaaatggttggatgaggcttacgagaaaagacagcgcagtctgacggacaaccaggctcgagacaa

SEQ ID NO: 9395 - DNA, 96 bp, Aspergillus thermomutatus
  misc_feature: 93
acggatgcaaggaaaggccattaggaaaccttgatcttcgatttttcgggccaaacttttctttcgaacggatgctttagacgccatggtcagcaa

SEQ ID NO: 9396 - DNA, 96 bp, Aspergillus thermomutatus
  misc_feature: 93
ttgccctcaccatgttgtgtttcttcattgctgaccatggcgtctaaagcatccgttcgaaagaaaagtttggcccgaaaaatcgaagatcaaggt

SEQ ID NO: 9397 - DNA, 96 bp, Aspergillus thermomutatus
  misc_feature: 93
aataaaagtcatctgtacttatatttattactgtatctctcattgtactcatcattgtaaattataataaattaataacctcagtaatatacagaa

SEQ ID NO: 9398 - DNA, 96 bp, Aspergillus thermomutatus
  misc_feature: 93
ttctctctctctattcctcttctactcttatctcctttctttcttcttctctctcttcctatcttcaaatctatccttattttaactcctatttaa

SEQ ID NO: 9399 - DNA, 96 bp, Aspergillus thermomutatus
  misc_feature: 93
ttccaatgtgcgctacacaatcattaggtgcgtcttccaatccaatgtatctaccaatgtgcgtttccaatgtttctaatgtgctcagtaagatga

SEQ ID NO: 9400 - DNA, 96 bp, Aspergillus thermomutatus
  misc_feature: 93
ttatattatacattcttcgctacctcacgtggtgcatctctggggctacgtggggtgtgttgatccctactatactacctgccccatatggtcgct

SEQ ID NO: 9401 - DNA, 96 bp, Aspergillus thermomutatus
  misc_feature: 93
agaaggaagaataaggaatagagagtaggttaataagtaagggtaagagataattaatagagataggggaaagaggaatgataagggatagagtaa

SEQ ID NO: 9402 - DNA, 96 bp, Aspergillus thermomutatus
  misc_feature: 93
ttaatgtaagatcatcatgccgtttaatgaagttgctgacccagttctttccaatgccagtagatggacctgatttccgctgagataatagtaaat

SEQ ID NO: 9403 - DNA, 96 bp, Aspergillus thermomutatus
  misc_feature: 93
ttaagaaggttagttagtagagaagggagaaggtaagggtgagtaaggagaagaagaaggtaagggttagtaagaaggagatagtaagggatagta

SEQ ID NO: 9404 - DNA, 96 bp, Aspergillus thermomutatus
  misc_feature: 93
caccgcgtgaggcacccccagatatgccatgcaaggtttggaccaaggtagccagagagcaaccatatggggcaggtagtatagtagggatcaaca

SEQ ID NO: 9405 - DNA, 96 bp, Aspergillus thermomutatus
  misc_feature: 93
ccccttgttatggaacatctacagtcaacacgaaatggttggatgaggcttacgagaaaagacagcgcagtctgacggacaaccaggctcgagaca

SEQ ID NO: 9406 - DNA, 96 bp, Aspergillus thermomutatus
  misc_feature: 93
tggtgcctctctacctatctccctacctcttcacctacctcttcacctacctcttcacctacctcttcacctacctcttcacctacctcttcacct

SEQ ID NO: 9407 - DNA, 96 bp, Aspergillus thermomutatus
  misc_feature: 93
tgatactgggcgggggccccggctcatctgcttcgtctggctggcttgatctggctggcttgatctgtctggctggtctggctgaactctctgagc

SEQ ID NO: 9408 - DNA, 96 bp, Aspergillus thermomutatus
  misc_feature: 93
tcttacatggtgccttcctccctaccttatattatacattcttcgctacctcacgcggtgcatctctggggctatgtggggtgtgttgatccctac

SEQ ID NO: 9409 - DNA, 96 bp, Aspergillus thermomutatus
  misc_feature: 93
gagagaggagtagagtgagaatgaggataagagtgagggttagtagaaattataggttgtaaaaggaggagggtggaaaagaaggatagaaagaga

SEQ ID NO: 9410 - DNA, 96 bp, Aspergillus thermomutatus
  misc_feature: 93
gattagaagagtagatagtaagggataggataggataggaaaaaagaaaagatttagaaatagaagattaaaggtaaagaggaagggatagagaga

SEQ ID NO: 9411 - DNA, 96 bp, Aspergillus thermomutatus
  misc_feature: 93
tctctatctccctaccccactgtctgcctgtctgcctgtctgcctgtctgcctgtctctctacctcactgcctacctcatgtcggacctctttgtg

SEQ ID NO: 9412 - DNA, 96 bp, Aspergillus thermomutatus
  misc_feature: 93
aaccccttgttatggaacatctacagtcaacacgaaatggttggatgaggcttacgagaaaagacagcgcagtctgacggacaaccaggctcgaga

SEQ ID NO: 9413 - DNA, 96 bp, Aspergillus thermomutatus
  misc_feature: 93
tctatctacctctctatctccctaccccactgtctgcctgtctgcctgtctgcctgtctgcctgtctctctagacgcctctctcaatgatgtgtag

SEQ ID NO: 9414 - DNA, 96 bp, Aspergillus thermomutatus
  misc_feature: 93
tccatactaattatctttaatctctggtataaccaccctaacttataatatatattaatacctactatgcctcactgcctacctcctggggttcct

SEQ ID NO: 9415 - DNA, 96 bp, Aspergillus thermomutatus
  misc_feature: 93
tacaaggaaaaacagtcgagccagcaattcttcgacaaaacagtgatggatcattgacatacaaccaccaagtacttgcagccacaatcgaactga

SEQ ID NO: 9416 - DNA, 96 bp, Aspergillus thermomutatus
  misc_feature: 93
ataaggaatagagagtaggttaataagtaagggtaagagataattaatagagataggggaaagaggaatgataagggatagagtaagggatagata

SEQ ID NO: 9417 - DNA, 96 bp, Aspergillus thermomutatus
  misc_feature: 93
caacctataatttctactaaccctcactcttatcctcattctcactctactcctctctcttatcctcattctaaccctcactccttcctccctcta

SEQ ID NO: 9418 - DNA, 96 bp, Aspergillus thermomutatus
  misc_feature: 93
tacctgtgaccctggaaaaggaagagaagaagataaagttaccgacttacgccctgttagacaccggagctgaaggacgaggatttattgaccagg

SEQ ID NO: 9419 - DNA, 96 bp, Aspergillus thermomutatus
  misc_feature: 93
taaccccttgttatggaacatctacagtcaacacgaaatggttggatgaggcttacgagaaaagacagcgcagtctgacggacaaccaggctcgag

SEQ ID NO: 9420 - DNA, 96 bp, Aspergillus thermomutatus
  misc_feature: 93
cttctctctctctattcctcttctactcttatctcctttctttcttcttctctctcttcctatcttcaaatctatccttattttaactcctattta

SEQ ID NO: 9421 - DNA, 96 bp, Aspergillus thermomutatus
  misc_feature: 93
gttccaatgtgcgctacacaatcattaggtgcgtcttccaatccaatgtatctaccaatgtgcgtttccaatgtttctaatgtgctcagtaagatg

SEQ ID NO: 9422 - DNA, 96 bp, Aspergillus thermomutatus
  misc_feature: 93
gtccttgcgctctatcagagttgccttcgaactagctatcatccgaagtgctttcgacatgcagttctgacaataatccaaaaaccaaataagtct

SEQ ID NO: 9423 - DNA, 96 bp, Aspergillus thermomutatus
  misc_feature: 93
acaaggaaaaacagtcgagccagcaattcttcgacaaaacagtgatggatcattgacatacaaccaccaagtacttgcagccacaatcgaactgac

SEQ ID NO: 9424 - DNA, 96 bp, Aspergillus thermomutatus
  misc_feature: 93
caacacttcagcggcgattaaatggacactgttttcgagctgaacaacgcgccaactcacataaattgactaaagctgaagaggaattgcttatac

SEQ ID NO: 9425 - DNA, 96 bp, Aspergillus thermomutatus
  misc_feature: 93
ggcctatctgcctgcctccgcgtgctattctatgtgcatcctacatgctattcgacgtgctattctacgtgctattctacgtgctattctacgtgc

SEQ ID NO: 9426 - DNA, 96 bp, Aspergillus thermomutatus
  misc_feature: 93
ggcaagccaagcccattattagtccatccattatcgctcacaccaatcagccagtcagggtctatgtcttgataccattgagattgatggaccttg

SEQ ID NO: 9427 - DNA, 96 bp, Aspergillus thermomutatus
  misc_feature: 93
gctccttgatactgggcgggggctccggctcatctgcttcgtctggctggcttgatctgtctggctcgtctggctcgtctggctcgtctggctggt

SEQ ID NO: 9428 - DNA, 96 bp, Aspergillus thermomutatus
  misc_feature: 93
gctattctacgtgctattctacgtgctattctacgtgctattctacgtgctattctacatgctattcgacgtgctattctatgtgctattcaacct

SEQ ID NO: 9429 - DNA, 96 bp, Aspergillus thermomutatus
  misc_feature: 93
gccttactgcctctctccctgtcttacatggtgccttcctccctaccttatattatacattcttcgctacctcacgcggtgcatctctggggctat

SEQ ID NO: 9430 - DNA, 96 bp, Aspergillus thermomutatus
  misc_feature: 93
ctatctccctaccccactgtctgcctgtctgcctgtctgcctgtctgcctgtctctctacctcactgcctacctcatgtcggacctctttgtgggc

SEQ ID NO: 9431 - DNA, 96 bp, Aspergillus thermomutatus
  misc_feature: 93
gatactgggcgggggccccggctcatctgcttcgtctggctggcttgatctggctggcttgatctgtctggctggtctggctgaactctctgagct

SEQ ID NO: 9432 - DNA, 96 bp, Aspergillus thermomutatus
  misc_feature: 93
gaggaagttgacgagaagattacaaaaaaagaagaggagaaattaaagaacaagaaagaatgagaagagagaaaagaacaagaatagaaaagaatg

SEQ ID NO: 9433 - DNA, 96 bp, Aspergillus thermomutatus
  misc_feature: 93
ccatactaattatctttaatctctggtataaccaccctaacttataatatatattaatacctactatgcctcactgcctacctcctggggttcctc

SEQ ID NO: 9434 - DNA, 96 bp, Aspergillus thermomutatus
  misc_feature: 93
cattcttaaatcttatctcctttctttcttctcttcccttctctctccctatcctctaatctatccttattttatctcctttttaattttaaattc

SEQ ID NO: 9435 - DNA, 96 bp, Aspergillus thermomutatus
  misc_feature: 93
gaaggaagaataaggaatagagagtaggttaataagtaagggtaagagataattaatagagataggggaaagaggaatgataagggatagagtaag

SEQ ID NO: 9436 - DNA, 96 bp, Aspergillus thermomutatus
  misc_feature: 93
cctctatcgcacctacatctatatgattatgatatacattagattctgataatatatctctaatagttattgaagtattatggtattctattaaag

SEQ ID NO: 9437 - DNA, 96 bp, Aspergillus thermomutatus
  misc_feature: 93
cttgtctgcgccgtcataggagggagggttcggcatgatctgcttcacttgcgctctgggggttccttgcggctgagggtcagtttgttgctcttg

SEQ ID NO: 9438 - DNA, 96 bp, Aspergillus thermomutatus
  misc_feature: 93
ccttgttatggaacatctacagtcaacacgaaatggttggatgaggcttacgagaaaagacagcgcagtctgacggacaaccaggctcgagacaag

SEQ ID NO: 9439 - DNA, 96 bp, Aspergillus thermomutatus
  misc_feature: 93
cttctcacctcgttcccttctcattcttttctattcttgttcttttctctcttctcattctttcttgttctttaatttctcctcttctttttttgt

SEQ ID NO: 9440 - DNA, 96 bp, Aspergillus thermomutatus
  misc_feature: 93
attagaagagtagatagtaagggataggataggataggaaaaaagaaaagatttagaaatagaagattaaaggtaaagaggaagggatagagagag

SEQ ID NO: 9441 - DNA, 96 bp, Aspergillus thermomutatus
  misc_feature: 93
ctcctttctttcttctcttcccttctctctccctatcctctaatctatccttattttatctcctttttaattttaaattcctatttcctaatcctt

SEQ ID NO: 9442 - DNA, 96 bp, Aspergillus thermomutatus
  misc_feature: 93
aatgtgcgctacacaatcattaggtgcgtcttccaatccaatgtatctaccaatgtgcgtttccaatgtttctaatgtgctcagtaagatgaggag

SEQ ID NO: 9443 - DNA, 96 bp, Aspergillus thermomutatus
  misc_feature: 93
ctattccttattcttccttcttattctattcatctctctatcttatcctcttcctcttcaataatccttatccttattctaatactatctcttact

SEQ ID NO: 9444 - DNA, 96 bp, Aspergillus thermomutatus
  misc_feature: 93
caggcaaaacagcaggcagaacggtaggcagaacggcaggcagaacggtaggcagaacggcaggcagaacggcaggttgaatagcaggttgaatag

SEQ ID NO: 9445 - DNA, 96 bp, Aspergillus thermomutatus
  misc_feature: 93
ctactcttctaatcttccttaatcccttctctctctctattcctcttctactcttatctcctttctttcttcttctctctcttcctatcttcaaat

SEQ ID NO: 9446 - DNA, 96 bp, Aspergillus thermomutatus
  misc_feature: 93
cgagaagattacaaaaaaagaagaggagaaattaaagaacaagaaagaatgagaagagagaaaagaacaagaatagaaaagaatgagaagggaacg

SEQ ID NO: 9447 - DNA, 96 bp, Aspergillus thermomutatus
  misc_feature: 93
cctctctctatatctctctatctgatttggtggcttatacggtgccttactccccaccattctacctacctgtctgcctgtctgcctgtctgcctg

SEQ ID NO: 9448 - DNA, 96 bp, Aspergillus thermomutatus
  misc_feature: 93
cctctctattcacctctctattcacctctctattcacctctctatctacctctctatctccctaccccactgtctgcctgtctgcctgtctgcctg

SEQ ID NO: 9449 - DNA, 96 bp, Aspergillus thermomutatus
  misc_feature: 93
atatataggtatataaaagccacgcagggttaggtataaaggcacccacagaggccccatgtaaggcaggcagagaggtagagataggtagagagg

SEQ ID NO: 9450 - DNA, 96 bp, Aspergillus thermomutatus
  misc_feature: 93
ccgccatgaccatttaccgggcccagaccagtcgtctgaacatggcataccgggtatggcgccccatgttgacaggggttggccggggtccgtact

SEQ ID NO: 9451 - DNA, 96 bp, Aspergillus thermomutatus
  misc_feature: 93
aggattagaataagtattagaggaagagttagggagagtgtttaaggattaaaagaaagagtagagtaagggataggttaagagaggtaaagaggg

SEQ ID NO: 9452 - DNA, 96 bp, Aspergillus thermomutatus
  misc_feature: 93
agtaaaaagagagaaaggggaaattggagagaggcaagagaataaggagaataataagggataggatagaaaaaagaaacaaaagaaagagaagat

SEQ ID NO: 9453 - DNA, 96 bp, Aspergillus thermomutatus
  misc_feature: 93
aggaatagagagtaggttaataagtaagggtaagagataattaatagagataggggaaagaggaatgataagggatagagtaagggatagatagtt

SEQ ID NO: 9454 - DNA, 96 bp, Aspergillus thermomutatus
  misc_feature: 93
actctctttcccttctaaattccatcttccttcttctctttctctttcttatcctttctattcttaaaataaactatccctccctccttttcttct

SEQ ID NO: 9455 - DNA, 96 bp, Aspergillus thermomutatus
  misc_feature: 93
aaggaatagagagtaggttaataagtaagggtaagagataattaatagagataggggaaagaggaatgataagggatagagtaagggatagatagt

SEQ ID NO: 9456 - DNA, 96 bp, Aspergillus thermomutatus
  misc_feature: 92
tttctactaaccctcactcttatcctcattctcactctactcctctctcttatcctcattctaaccctcactccttcctccctctaatcctccctc

SEQ ID NO: 9457 - DNA, 96 bp, Aspergillus thermomutatus
  misc_feature: 92
ttgatacactctttaccgaggcgagcacaacggatgcaaggaaaggccattaggaaaccttgatcttcgatttttcgggccaaacttttctttcga

SEQ ID NO: 9458 - DNA, 96 bp, Aspergillus thermomutatus
  misc_feature: 92
gatgagaagagaggagaggagatgagaagagaagagaacaagaataaatgggaatgaaagagacgaattaatggttaaagataaggacaggaggaa

SEQ ID NO: 9459 - DNA, 96 bp, Aspergillus thermomutatus
  misc_feature: 92
ctccttcttaatcaaaataactatcccttactctttctaaaacctaactcttaccctcctttttcttctctttcctttactctctttcccttctaa

SEQ ID NO: 9460 - DNA, 96 bp, Aspergillus thermomutatus
  misc_feature: 92
ttagaagagtagatagtaagggataggataggataggaaaaaagaaaagatttagaaatagaagattaaaggtaaagaggaagggatagagagagg

SEQ ID NO: 9461 - DNA, 96 bp, Aspergillus thermomutatus
  misc_feature: 92
tgtagaagagttaactctctaccttgatcctctatcgcacctacatctatatgattatgatatacattagattctgataatatatctctaatagtt

SEQ ID NO: 9462 - DNA, 96 bp, Aspergillus thermomutatus
  misc_feature: 92
cctccctaccttatattatacattcttcgctacctcacgcggtgcatctctggggctatgtggggtgtgttgatccctactatactacctgcccca

SEQ ID NO: 9463 - DNA, 96 bp, Aspergillus thermomutatus
  misc_feature: 92
tgcgtcttccaatccaatgtatctaccaatgtgcgtttccaatgtttctaatgtgctcagtaagatgaggagcgagttctaatgttacgggctaga

SEQ ID NO: 9464 - DNA, 96 bp, Aspergillus thermomutatus
  misc_feature: 92
tgagatgatataagggaaagagaagattaaagcgaagagagtgaaggaagggatgttgatggacagtgtgataaggtaagggttatttagtttatt

SEQ ID NO: 9465 - DNA, 96 bp, Aspergillus thermomutatus
  misc_feature: 92
tagtaaaaagagagaaaggggaaattggagagaggcaagagaataaggagaataataagggataggatagaaaaaagaaacaaaagaaagagaaga

SEQ ID NO: 9466 - DNA, 96 bp, Aspergillus thermomutatus
  misc_feature: 92
agaagagaataaggtgaataaggagagaggagaagagaggagatgagaagagaggagatgagaagagatgagaagagaggagaggagatgagaaga

SEQ ID NO: 9467 - DNA, 96 bp, Aspergillus thermomutatus
  misc_feature: 92
tcttctatcttctattactcctataattccccttattcttcctttctgatccattattccttcctttttccttttgaaatccttctatctttcttt

SEQ ID NO: 9468 - DNA, 96 bp, Aspergillus thermomutatus
  misc_feature: 92
tctctatctacctctctatctccctaccccactgtctgcctgtctgcctgtctgcctgtctgcctgtctctctagacgcctctctcaatgatgtgt

SEQ ID NO: 9469 - DNA, 96 bp, Aspergillus thermomutatus
  misc_feature: 92
gaagttgacgagaagattacaaaaaaagaagaggagaaattaaagaacaagaaagaatgagaagagagaaaagaacaagaatagaaaagaatgaga

SEQ ID NO: 9470 - DNA, 96 bp, Aspergillus thermomutatus
  misc_feature: 92
gagaagattacaaaaaaagaagaggagaaattaaagaacaagaaagaatgagaagagagaaaagaacaagaatagaaaagaatgagaagggaacga

SEQ ID NO: 9471 - DNA, 96 bp, Aspergillus thermomutatus
  misc_feature: 92
ataaccccttgttatggaacatctacagtcaacacgaaatggttggatgaggcttacgagaaaagacagcgcagtctgacggacaaccaggctcga

SEQ ID NO: 9472 - DNA, 96 bp, Aspergillus thermomutatus
  misc_feature: 92
tccttgatactgggcgggggctccggctcatctgcttcgtctggctggcttgatctgtctggctcgtctggctcgtctggctcgtctggctggtct

SEQ ID NO: 9473 - DNA, 96 bp, Aspergillus thermomutatus
  misc_feature: 92
aggttagttagtagagaagggagaaggtaagggtgagtaaggagaagaagaaggtaagggttagtaagaaggagatagtaagggatagtataagga

SEQ ID NO: 9474 - DNA, 96 bp, Aspergillus thermomutatus
  misc_feature: 92
tccctaccttatattatacattcttcgctacctcacgcggtgcatctctggggctatgtggggtgtgttgatccctactatactacctgccccata

SEQ ID NO: 9475 - DNA, 96 bp, Aspergillus thermomutatus
  misc_feature: 92
aggaagttgacgagaagattacaaaaaaagaagaggagaaattaaagaacaagaaagaatgagaagagagaaaagaacaagaatagaaaagaatga

SEQ ID NO: 9476 - DNA, 96 bp, Aspergillus thermomutatus
  misc_feature: 92
gggggatgggggaagttaatgagaaattagaagaaagaagaggagaggagaaggaaagaaaagagaaacagaggagggaaagaagggaagagatga

SEQ ID NO: 9477 - DNA, 96 bp, Aspergillus thermomutatus
  misc_feature: 92
taagggttagtagtaataggaaagagagtaagagatagtattagaataaggataaggattattgaagaggaagaggataagatagagagatgaata

SEQ ID NO: 9478 - DNA, 96 bp, Aspergillus thermomutatus
  misc_feature: 92
tatctccctaccccactgtctgcctgtctgcctgtctgcctgtctgcctgtctctctacctcactgcctacctcatgtcggacctctttgtgggcc

SEQ ID NO: 9479 - DNA, 96 bp, Aspergillus thermomutatus
  misc_feature: 92
gactacacatcattgagagaggcgtctagagagacaggcagacaggcagacaggcagacaggcagacagtggggtagggagatagagaggtagata

SEQ ID NO: 9480 - DNA, 96 bp, Aspergillus thermomutatus
  misc_feature: 92
tataaccccttgttatggaacatctacagtcaacacgaaatggttggatgaggcttacgagaaaagacagcgcagtctgacggacaaccaggctcg

SEQ ID NO: 9481 - DNA, 96 bp, Aspergillus thermomutatus
  misc_feature: 92
taggaggtatggagcaatgcaccgcgtgaggcacccccagatatgccatgcaaggtttggaccaaggtagccagagagcaaccatatggggcaggt

SEQ ID NO: 9482 - DNA, 96 bp, Aspergillus thermomutatus
  misc_feature: 92
tactcttctaatcttccttaatcccttctctctctctattcctcttctactcttatctcctttctttcttcttctctctcttcctatcttcaaatc

SEQ ID NO: 9483 - DNA, 96 bp, Aspergillus thermomutatus
  misc_feature: 92
aagaaggaagaataaggaatagagagtaggttaataagtaagggtaagagataattaatagagataggggaaagaggaatgataagggatagagta

SEQ ID NO: 9484 - DNA, 96 bp, Aspergillus thermomutatus
  misc_feature: 92
tacaacctataatttctactaaccctcactcttatcctcattctcactctactcctctctcttatcctcattctaaccctcactccttcctccctc

SEQ ID NO: 9485 - DNA, 96 bp, Aspergillus thermomutatus
  misc_feature: 92
taatgtaagatcatcatgccgtttaatgaagttgctgacccagttctttccaatgccagtagatggacctgatttccgctgagataatagtaaatc

SEQ ID NO: 9486 - DNA, 96 bp, Aspergillus thermomutatus
  misc_feature: 92
gagatgatataagggaaagagaagattaaagcgaagagagtgaaggaagggatgttgatggacagtgtgataaggtaagggttatttagtttatta

SEQ ID NO: 9487 - DNA, 96 bp, Aspergillus thermomutatus
  misc_feature: 92
ctttggtgcttctggcgattgtaacttcccgtaaggttgatgtcttgctggcttgtctctgatgcaagtctcgcattgttgaatgtaaccttgcac

SEQ ID NO: 9488 - DNA, 96 bp, Aspergillus thermomutatus
  misc_feature: 92
gtctggtcgtcgactaagtgcgtcggcttgtccattctcagttcctttgcaatgcacaattttgaaatcatgctgtgacaatgtctcagcccatct

SEQ ID NO: 9489 - DNA, 96 bp, Aspergillus thermomutatus
  misc_feature: 92
accccttgttatggaacatctacagtcaacacgaaatggttggatgaggcttacgagaaaagacagcgcagtctgacggacaaccaggctcgagac

SEQ ID NO: 9490 - DNA, 96 bp, Aspergillus thermomutatus
  misc_feature: 92
gggccccggctcatctgcttcgtctggctggcttgatctggctggcttgatctgtctggctggtctggctgaactctctgagctggtcgggcaggc

SEQ ID NO: 9491 - DNA, 96 bp, Aspergillus thermomutatus
  misc_feature: 92
ctgtctgcctgtctgcctgtctgcctgtctgcctgtctctctacctcactgcctacctcatgtcggacctctttgtgggcctatctgcctgcctcc

SEQ ID NO: 9492 - DNA, 96 bp, Aspergillus thermomutatus
  misc_feature: 92
ggaagttgacgagaagattacaaaaaaagaagaggagaaattaaagaacaagaaagaatgagaagagagaaaagaacaagaatagaaaagaatgag

SEQ ID NO: 9493 - DNA, 96 bp, Aspergillus thermomutatus
  misc_feature: 92
atccatactaattatctttaatctctggtataaccaccctaacttataatatatattaatacctactatgcctcactgcctacctcctggggttcc

SEQ ID NO: 9494 - DNA, 96 bp, Aspergillus thermomutatus
  misc_feature: 92
aattccatcttccttcttctctttctctttcttatcctttctattcttaaaataaactatccctccctccttttcttcttctctcttaatatttcc

SEQ ID NO: 9495 - DNA, 96 bp, Aspergillus thermomutatus
  misc_feature: 92
gctacacaatcattaggtgcgtcttccaatccaatgtatctaccaatgtgcgtttccaatgtttctaatgtgctcagtaagatgaggagcgagttc

SEQ ID NO: 9496 - DNA, 96 bp, Aspergillus thermomutatus
  misc_feature: 92
gcctatctgcctgcctccgcgtgctattctatgtgcatcctacatgctattcgacgtgctattctacgtgctattctacgtgctattctacgtgct

SEQ ID NO: 9497 - DNA, 96 bp, Aspergillus thermomutatus
  misc_feature: 92
cccactgtctgcctgtctgcctgtctgcctgtctgcctgtctctctacctcactgcctacctcatgtcggacctctttgtgggcctatctgcctgc

SEQ ID NO: 9498 - DNA, 96 bp, Aspergillus thermomutatus
  misc_feature: 92
aatcctacttcttctctttttttcttctttcttttcttaactcttactttcctctcttttatacccctaatactatctcttattcctctctttatc

SEQ ID NO: 9499 - DNA, 96 bp, Aspergillus thermomutatus
  misc_feature: 92
atataaccccttgttatggaacatctacagtcaacacgaaatggttggatgaggcttacgagaaaagacagcgcagtctgacggacaaccaggctc

SEQ ID NO: 9500 - DNA, 96 bp, Aspergillus thermomutatus
  misc_feature: 92
gagatgagaagagaggagaggagatgagaagagaagagaacaagaataaatgggaatgaaagagacgaattaatggttaaagataaggacaggagg

SEQ ID NO: 9501 - DNA, 96 bp, Aspergillus thermomutatus
  misc_feature: 92
ctccttgatactgggcgggggctccggctcatctgcttcgtctggctggcttgatctgtctggctcgtctggctcgtctggctcgtctggctggtc

SEQ ID NO: 9502 - DNA, 96 bp, Aspergillus thermomutatus
  misc_feature: 92
acttattaacctactctctattccttattcttccttcttattctattcatctctctatcttatcctcttcctcttcaataatccttatccttattc

SEQ ID NO: 9503 - DNA, 96 bp, Aspergillus thermomutatus
  misc_feature: 92
gaagagaataaggtgaataaggagagaggagaagagaggagatgagaagagaggagatgagaagagatgagaagagaggagaggagatgagaagag

SEQ ID NO: 9504 - DNA, 96 bp, Aspergillus thermomutatus
  misc_feature: 92
ctacctgtgaccctggaaaaggaagagaagaagataaagttaccgacttacgccctgttagacaccggagctgaaggacgaggatttattgaccag

SEQ ID NO: 9505 - DNA, 96 bp, Aspergillus thermomutatus
  misc_feature: 92
ctctctattcacctctctattcacctctctattcacctctctatctacctctctatctccctaccccactgtctgcctgtctgcctgtctgcctgt

SEQ ID NO: 9506 - DNA, 96 bp, Aspergillus thermomutatus
  misc_feature: 92
aagggttagtagtaataggaaagagagtaagagatagtattagaataaggataaggattattgaagaggaagaggataagatagagagatgaatag

SEQ ID NO: 9507 - DNA, 96 bp, Aspergillus thermomutatus
  misc_feature: 92
ctatctacctctctatctccctaccccactgtctgcctgtctgcctgtctgcctgtctgcctgtctctctagacgcctctctcaatgatgtgtagt

SEQ ID NO: 9508 - DNA, 96 bp, Aspergillus thermomutatus
  misc_feature: 92
cggatgcaaggaaaggccattaggaaaccttgatcttcgatttttcgggccaaacttttctttcgaacggatgctttagacgccatggtcagcaat

SEQ ID NO: 9509 - DNA, 96 bp, Aspergillus thermomutatus
  misc_feature: 92
ccttgtctgcgccgtcataggagggagggttcggcatgatctgcttcacttgcgctctgggggttccttgcggctgagggtcagtttgttgctctt

SEQ ID NO: 9510 - DNA, 96 bp, Aspergillus thermomutatus
  misc_feature: 92
ccttcttaatcaaaataactatcccttactctttctaaaacctaactcttaccctcctttttcttctctttcctttactctctttcccttctaaat

SEQ ID NO: 9511 - DNA, 96 bp, Aspergillus thermomutatus
  misc_feature: 92
cctctctatctacctctctatctccctaccccactgtctgcctgtctgcctgtctgcctgtctgcctgtctctctagacgcctctctcaatgatgt

SEQ ID NO: 9512 - DNA, 96 bp, Aspergillus thermomutatus
  misc_feature: 92
ccccactgtctgcctgtctgcctgtctgcctgtctgcctgtctctctacctcactgcctacctcatgtcggacctctttgtgggcctatctgcctg

SEQ ID NO: 9513 - DNA, 96 bp, Aspergillus thermomutatus
  misc_feature: 92
catactaattatctttaatctctggtataaccaccctaacttataatatatattaatacctactatgcctcactgcctacctcctggggttcctct

SEQ ID NO: 9514 - DNA, 96 bp, Aspergillus thermomutatus
  misc_feature: 92
attcacctctctatctacctctctatctccctaccccactgtctgcctgtctgcctgtctgcctgtctgcctgtctctctacctcactgcctacct

SEQ ID NO: 9515 - DNA, 96 bp, Aspergillus thermomutatus
  misc_feature: 92
atgtagaagagttaactctctaccttgatcctctatcgcacctacatctatatgattatgatatacattagattctgataatatatctctaatagt

SEQ ID NO: 9516 - DNA, 96 bp, Aspergillus thermomutatus
  misc_feature: 92
atgagatgatataagggaaagagaagattaaagcgaagagagtgaaggaagggatgttgatggacagtgtgataaggtaagggttatttagtttat

SEQ ID NO: 9517 - DNA, 96 bp, Aspergillus thermomutatus
  misc_feature: 92
atcctacttcttctctttttttcttctttcttttcttaactcttactttcctctcttttatacccctaatactatctcttattcctctctttatct

SEQ ID NO: 9518 - DNA, 96 bp, Aspergillus thermomutatus
  misc_feature: 92
atcaaaataactatcccttactctttctaaaacctaactcttaccctcctttttcttctctttcctttactctctttcccttctaaattccatctt

SEQ ID NO: 9519 - DNA, 96 bp, Aspergillus thermomutatus
  misc_feature: 92
aatgtaagatcatcatgccgtttaatgaagttgctgacccagttctttccaatgccagtagatggacctgatttccgctgagataatagtaaatct

SEQ ID NO: 9520 - DNA, 96 bp, Aspergillus thermomutatus
  misc_feature: 92
acaacctataatttctactaaccctcactcttatcctcattctcactctactcctctctcttatcctcattctaaccctcactccttcctccctct

SEQ ID NO: 9521 - DNA, 96 bp, Aspergillus thermomutatus
  misc_feature: 92
agaccgccatgaccatttaccgggcccagaccagtcgtctgaacatggcataccgggtatggcgccccatgttgacaggggttggccggggtccgt

SEQ ID NO: 9522 - DNA, 96 bp, Aspergillus thermomutatus
  misc_feature: 91
tccttcttaatcaaaataactatcccttactctttctaaaacctaactcttaccctcctttttcttctctttcctttactctctttcccttctaaa

SEQ ID NO: 9523 - DNA, 96 bp, Aspergillus thermomutatus
  misc_feature: 91
ttgtctgcgccgtcataggagggagggttcggcatgatctgcttcacttgcgctctgggggttccttgcggctgagggtcagtttgttgctcttga

SEQ ID NO: 9524 - DNA, 96 bp, Aspergillus thermomutatus
  misc_feature: 91
ttgagaagagaataaggtgaataaggagagaggagaagagaggagatgagaagagaggagatgagaagagatgagaagagaggagaggagatgaga

SEQ ID NO: 9525 - DNA, 96 bp, Aspergillus thermomutatus
  misc_feature: 91
ttctctctctttctatccttcttttccaccctcctccttttacaacctataatttctactaaccctcactcttatcctcattctcactctactcct

SEQ ID NO: 9526 - DNA, 96 bp, Aspergillus thermomutatus
  misc_feature: 91
ttctctctcttcatgtctatattccctttactttactaaatcctcttctcatcttccctctctctcttaaattctttcttaaactattaattcctc

SEQ ID NO: 9527 - DNA, 96 bp, Aspergillus thermomutatus
  misc_feature: 91
aagttgacgagaagattacaaaaaaagaagaggagaaattaaagaacaagaaagaatgagaagagagaaaagaacaagaatagaaaagaatgagaa

SEQ ID NO: 9528 - DNA, 96 bp, Aspergillus thermomutatus
  misc_feature: 91
ttctactaaccctcactcttatcctcattctcactctactcctctctcttatcctcattctaaccctcactccttcctccctctaatcctccctct

SEQ ID NO: 9529 - DNA, 96 bp, Aspergillus thermomutatus
  misc_feature: 91
ttctaatcttccttaatcccttctctctctctattcctcttctactcttatctcctttctttcttcttctctctcttcctatcttcaaatctatcc

SEQ ID NO: 9530 - DNA, 96 bp, Aspergillus thermomutatus
  misc_feature: 91
tgatacactctttaccgaggcgagcacaacggatgcaaggaaaggccattaggaaaccttgatcttcgatttttcgggccaaacttttctttcgaa

SEQ ID NO: 9531 - DNA, 96 bp, Aspergillus thermomutatus
  misc_feature: 91
ttcacctctctatctacctctctatctccctaccccactgtctgcctgtctgcctgtctgcctgtctgcctgtctctctacctcactgcctacctc

SEQ ID NO: 9532 - DNA, 96 bp, Aspergillus thermomutatus
  misc_feature: 91
aggcaggcagaacagcaggcaaaacagcaggcagaacggtaggcagaacggcaggcagaacggtaggcagaacggcaggcagaacggcaggttgaa

SEQ ID NO: 9533 - DNA, 96 bp, Aspergillus thermomutatus
  misc_feature: 91
ttattcttccttcttattctattcatctctctatcttatcctcttcctcttcaataatccttatccttattctaatactatctcttactctctttc

SEQ ID NO: 9534 - DNA, 96 bp, Aspergillus thermomutatus
  misc_feature: 91
ccgcgtgaggcacccccagatatgccatgcaaggtttggaccaaggtagccagagagcaaccatatggggcaggtagtatagtagggatcaacaca

SEQ ID NO: 9535 - DNA, 96 bp, Aspergillus thermomutatus
  misc_feature: 91
gagaagagatgagaagagaggagaggagatgagaagagaagagaacaagaataaatgggaatgaaagagacgaattaatggttaaagataaggaca

SEQ ID NO: 9536 - DNA, 96 bp, Aspergillus thermomutatus
  misc_feature: 91
tgggcctatctgcctgcctccgcgtgctattctatgtgcatcctacatgctattcgacgtgctattctacgtgctattctacgtgctattctacgt

SEQ ID NO: 9537 - DNA, 96 bp, Aspergillus thermomutatus
  misc_feature: 91
tgccctcaccatgttgtgtttcttcattgctgaccatggcgtctaaagcatccgttcgaaagaaaagtttggcccgaaaaatcgaagatcaaggtt

SEQ ID NO: 9538 - DNA, 96 bp, Aspergillus thermomutatus
  misc_feature: 91
tctgctcccttatcctttttctctctggaatatgctcaacttttaactattacataccttctcattcagttatatatcccttatggcatatattcc

SEQ ID NO: 9539 - DNA, 96 bp, Aspergillus thermomutatus
  misc_feature: 91
tctccttcttaatcaaaataactatcccttactctttctaaaacctaactcttaccctcctttttcttctctttcctttactctctttcccttcta

SEQ ID NO: 9540 - DNA, 96 bp, Aspergillus thermomutatus
  misc_feature: 91
tctatctccctaccccactgtctgcctgtctgcctgtctgcctgtctgcctgtctctctacctcactgcctacctcatgtcggacctctttgtggg

SEQ ID NO: 9541 - DNA, 96 bp, Aspergillus thermomutatus
  misc_feature: 91
tctatctacctctctatctccctaccccactgtctgcctgtctgcctgtctgcctgtctgcctgtctctctacctcactgcctacctcatgtcgga

SEQ ID NO: 9542 - DNA, 96 bp, Aspergillus thermomutatus
  misc_feature: 91
tctactaaccctcactcttatcctcattctcactctactcctctctcttatcctcattctaaccctcactccttcctccctctaatcctccctcta

SEQ ID NO: 9543 - DNA, 96 bp, Aspergillus thermomutatus
  misc_feature: 91
tagaagagtagatagtaagggataggataggataggaaaaaagaaaagatttagaaatagaagattaaaggtaaagaggaagggatagagagagga

SEQ ID NO: 9544 - DNA, 96 bp, Aspergillus thermomutatus
  misc_feature: 91
agatgagaagagaggagaggagatgagaagagaagagaacaagaataaatgggaatgaaagagacgaattaatggttaaagataaggacaggagga

SEQ ID NO: 9545 - DNA, 96 bp, Aspergillus thermomutatus
  misc_feature: 91
aattgagaagagaataaggtgaataaggagagaggagaagagaggagatgagaagagaggagatgagaagagatgagaagagaggagaggagatga

SEQ ID NO: 9546 - DNA, 96 bp, Aspergillus thermomutatus
  misc_feature: 91
ctagatctgttatttcatagcatcgctctgaaatatcagatcggttgctctgcggaccagatcacttgctatgccgatgatcacgtgacatagtga

SEQ ID NO: 9547 - DNA, 96 bp, Aspergillus thermomutatus
  misc_feature: 91
tattcttccttcttattctattcatctctctatcttatcctcttcctcttcaataatccttatccttattctaatactatctcttactctctttcc

SEQ ID NO: 9548 - DNA, 96 bp, Aspergillus thermomutatus
  misc_feature: 91
tattccttattcttccttcttattctattcatctctctatcttatcctcttcctcttcaataatccttatccttattctaatactatctcttactc

SEQ ID NO: 9549 - DNA, 96 bp, Aspergillus thermomutatus
  misc_feature: 91
gcaggcagaacagcaggcaaaacagcaggcagaacggtaggcagaacggcaggcagaacggtaggcagaacggcaggcagaacggcaggttgaata

SEQ ID NO: 9550 - DNA, 96 bp, Aspergillus thermomutatus
  misc_feature: 91
tatccatactaattatctttaatctctggtataaccaccctaacttataatatatattaatacctactatgcctcactgcctacctcctggggttc

SEQ ID NO: 9551 - DNA, 96 bp, Aspergillus thermomutatus
  misc_feature: 91
tataagaatttaaagaagagagaagaaagagggataagagaaagtagattaagaaggttagttagtagagaagggagaaggtaagggtgagtaagg

SEQ ID NO: 9552 - DNA, 96 bp, Aspergillus thermomutatus
  misc_feature: 91
taggggcatgatttctagggctagcatagtctactaaagataagctcctaggagcagctattttagtattatagactgattctatgtcacgggcta

SEQ ID NO: 9553 - DNA, 96 bp, Aspergillus thermomutatus
  misc_feature: 91
taggcagagaggtagggaggtagggagggaggtagagaggcaccataggaggtatggagcaatgcaccgcgtgaggcacccccagatatgccatgc

SEQ ID NO: 9554 - DNA, 96 bp, Aspergillus thermomutatus
  misc_feature: 91
taggaagagagagaagaagaaagaaaggagataagagtagaagaggaatagagagagagaagggattaaggaagattagaagagtagatagtaagg

SEQ ID NO: 9555 - DNA, 96 bp, Aspergillus thermomutatus
  misc_feature: 91
tacagataaaatggtatcaccacctagattagcacgtattcttgccttcttctttcttttccgttcattctctgcccgtagaaccctgatttcttg

SEQ ID NO: 9556 - DNA, 96 bp, Aspergillus thermomutatus
  misc_feature: 91
ctctatctacctctctatctccctaccccactgtctgcctgtctgcctgtctgcctgtctgcctgtctctctagacgcctctctcaatgatgtgta

SEQ ID NO: 9557 - DNA, 96 bp, Aspergillus thermomutatus
  misc_feature: 91
aggtaaagaggaagggatagagagaggattagagtaagggttggaatgaggattaggaagaggaagaggaatagggatagaagtaaagaggggtta

SEQ ID NO: 9558 - DNA, 96 bp, Aspergillus thermomutatus
  misc_feature: 91
gatgagatgatataagggaaagagaagattaaagcgaagagagtgaaggaagggatgttgatggacagtgtgataaggtaagggttatttagttta

SEQ ID NO: 9559 - DNA, 96 bp, Aspergillus thermomutatus
  misc_feature: 91
cgcgtgaggcacccccagatatgccatgcaaggtttggaccaaggtagccagagagcaaccatatggggcaggtagtatagtagggatcaacacac

SEQ ID NO: 9560 - DNA, 96 bp, Aspergillus thermomutatus
  misc_feature: 91
gtgggcctatctgcctgcctccgcgtgctattctatgtgcatcctacatgctattcgacgtgctattctacgtgctattctacgtgctattctacg

SEQ ID NO: 9561 - DNA, 96 bp, Aspergillus thermomutatus
  misc_feature: 91
gcgtcttccaatccaatgtatctaccaatgtgcgtttccaatgtttctaatgtgctcagtaagatgaggagcgagttctaatgttacgggctagac

SEQ ID NO: 9562 - DNA, 96 bp, Aspergillus thermomutatus
  misc_feature: 91
gtaggggcatgatttctagggctagcatagtctactaaagataagctcctaggagcagctattttagtattatagactgattctatgtcacgggct

SEQ ID NO: 9563 - DNA, 96 bp, Aspergillus thermomutatus
  misc_feature: 91
gtaggcagagaggtagggaggtagggagggaggtagagaggcaccataggaggtatggagcaatgcaccgcgtgaggcacccccagatatgccatg

SEQ ID NO: 9564 - DNA, 96 bp, Aspergillus thermomutatus
  misc_feature: 91
gtacagataaaatggtatcaccacctagattagcacgtattcttgccttcttctttcttttccgttcattctctgcccgtagaaccctgatttctt

SEQ ID NO: 9565 - DNA, 96 bp, Aspergillus thermomutatus
  misc_feature: 91
gtaaagaggaagggatagagagaggattagagtaagggttggaatgaggattaggaagaggaagaggaatagggatagaagtaaagaggggttaag

SEQ ID NO: 9566 - DNA, 96 bp, Aspergillus thermomutatus
  misc_feature: 91
ggtaggcagagaggtagggaggtagggagggaggtagagaggcaccataggaggtatggagcaatgcaccgcgtgaggcacccccagatatgccat

SEQ ID NO: 9567 - DNA, 96 bp, Aspergillus thermomutatus
  misc_feature: 91
gggcctatctgcctgcctccgcgtgctattctatgtgcatcctacatgctattcgacgtgctattctacgtgctattctacgtgctattctacgtg

SEQ ID NO: 9568 - DNA, 96 bp, Aspergillus thermomutatus
  misc_feature: 91
ccctcactcttatcctcattctcactctactcctctctcttatcctcattctaaccctcactccttcctccctctaatcctccctctaatcctccc

SEQ ID NO: 9569 - DNA, 96 bp, Aspergillus thermomutatus
  misc_feature: 91
ggctcatctgcttcgtctggctggcttgatctggctggcttgatctgtctggctggtctggctgaactctctgagctggtcgggcaggcactccgg

SEQ ID NO: 9570 - DNA, 96 bp, Aspergillus thermomutatus
  misc_feature: 91
ggcaggcagaacagcaggcaaaacagcaggcagaacggtaggcagaacggcaggcagaacggtaggcagaacggcaggcagaacggcaggttgaat

SEQ ID NO: 9571 - DNA, 96 bp, Aspergillus thermomutatus
  misc_feature: 91
ctaaccctcactcttatcctcattctcactctactcctctctcttatcctcattctaaccctcactccttcctccctctaatcctccctctaatcc

SEQ ID NO: 9572 - DNA, 96 bp, Aspergillus thermomutatus
  misc_feature: 91
ccggctcatctgcttcgtctggctggcttgatctggctggcttgatctgtctggctggtctggctgaactctctgagctggtcgggcaggcactcc

SEQ ID NO: 9573 - DNA, 96 bp, Aspergillus thermomutatus
  misc_feature: 91
gctcatctgcttcgtctggctggcttgatctggctggcttgatctgtctggctggtctggctgaactctctgagctggtcgggcaggcactccggt

SEQ ID NO: 9574 - DNA, 96 bp, Aspergillus thermomutatus
  misc_feature: 91
aggcagaacagcaggcaaaacagcaggcagaacggtaggcagaacggcaggcagaacggtaggcagaacggcaggcagaacggcaggttgaatagc

SEQ ID NO: 9575 - DNA, 96 bp, Aspergillus thermomutatus
  misc_feature: 91
ctaccccactgtctgcctgtctgcctgtctgcctgtctgcctgtctctctacctcactgcctacctcatgtcggacctctttgtgggcctatctgc

SEQ ID NO: 9576 - DNA, 96 bp, Aspergillus thermomutatus
  misc_feature: 91
gcagaacagcaggcaaaacagcaggcagaacggtaggcagaacggcaggcagaacggtaggcagaacggcaggcagaacggcaggttgaatagcag

SEQ ID NO: 9577 - DNA, 96 bp, Aspergillus thermomutatus
  misc_feature: 91
ctctttggtgcttctggcgattgtaacttcccgtaaggttgatgtcttgctggcttgtctctgatgcaagtctcgcattgttgaatgtaaccttgc

SEQ ID NO: 9578 - DNA, 96 bp, Aspergillus thermomutatus
  misc_feature: 91
gatgatataagggaaagagaagattaaagcgaagagagtgaaggaagggatgttgatggacagtgtgataaggtaagggttatttagtttattaag

SEQ ID NO: 9579 - DNA, 96 bp, Aspergillus thermomutatus
  misc_feature: 91
gagagtaagggttagtagtaataggaaagagagtaagagatagtattagaataaggataaggattattgaagaggaagaggataagatagagagat

SEQ ID NO: 9580 - DNA, 96 bp, Aspergillus thermomutatus
  misc_feature: 91
gaattgagaagagaataaggtgaataaggagagaggagaagagaggagatgagaagagaggagatgagaagagatgagaagagaggagaggagatg

SEQ ID NO: 9581 - DNA, 96 bp, Aspergillus thermomutatus
  misc_feature: 91
cttctctctcttcatgtctatattccctttactttactaaatcctcttctcatcttccctctctctcttaaattctttcttaaactattaattcct

SEQ ID NO: 9582 - DNA, 96 bp, Aspergillus thermomutatus
  misc_feature: 91
agaagagatgagaagagaggagaggagatgagaagagaagagaacaagaataaatgggaatgaaagagacgaattaatggttaaagataaggacag

SEQ ID NO: 9583 - DNA, 96 bp, Aspergillus thermomutatus
  misc_feature: 91
ctctctatctacctctctatctccctaccccactgtctgcctgtctgcctgtctgcctgtctgcctgtctctctagacgcctctctcaatgatgtg

SEQ ID NO: 9584 - DNA, 96 bp, Aspergillus thermomutatus
  misc_feature: 91
ctctctatatctctctatctgatttggtggcttatacggtgccttactccccaccattctacctacctgtctgcctgtctgcctgtctgcctgtct

SEQ ID NO: 9585 - DNA, 96 bp, Aspergillus thermomutatus
  misc_feature: 91
caggcagaacagcaggcaaaacagcaggcagaacggtaggcagaacggcaggcagaacggtaggcagaacggcaggcagaacggcaggttgaatag

SEQ ID NO: 9586 - DNA, 96 bp, Aspergillus thermomutatus
  misc_feature: 91
cggctcatctgcttcgtctggctggcttgatctggctggcttgatctgtctggctggtctggctgaactctctgagctggtcgggcaggcactccg

SEQ ID NO: 9587 - DNA, 96 bp, Aspergillus thermomutatus
  misc_feature: 91
ataggaggtatggagcaatgcaccgcgtgaggcacccccagatatgccatgcaaggtttggaccaaggtagccagagagcaaccatatggggcagg

SEQ ID NO: 9588 - DNA, 96 bp, Aspergillus thermomutatus
  misc_feature: 91
ccctaccttatattatacattcttcgctacctcacgcggtgcatctctggggctatgtggggtgtgttgatccctactatactacctgccccatat

SEQ ID NO: 9589 - DNA, 96 bp, Aspergillus thermomutatus
  misc_feature: 91
ccctaccccactgtctgcctgtctgcctgtctgcctgtctgcctgtctctctacctcactgcctacctcatgtcggacctctttgtgggcctatct

SEQ ID NO: 9590 - DNA, 96 bp, Aspergillus thermomutatus
  misc_feature: 91
agctccttgatactgggcgggggctccggctcatctgcttcgtctggctggcttgatctgtctggctcgtctggctcgtctggctcgtctggctgg

SEQ ID NO: 9591 - DNA, 96 bp, Aspergillus thermomutatus
  misc_feature: 91
agggggatgggggaagttaatgagaaattagaagaaagaagaggagaggagaaggaaagaaaagagaaacagaggagggaaagaagggaagagatg

SEQ ID NO: 9592 - DNA, 96 bp, Aspergillus thermomutatus
  misc_feature: 91
agagtaagggttagtagtaataggaaagagagtaagagatagtattagaataaggataaggattattgaagaggaagaggataagatagagagatg

SEQ ID NO: 9593 - DNA, 96 bp, Aspergillus thermomutatus
  misc_feature: 91
aagggggatgggggaagttaatgagaaattagaagaaagaagaggagaggagaaggaaagaaaagagaaacagaggagggaaagaagggaagagat

SEQ ID NO: 9594 - DNA, 96 bp, Aspergillus thermomutatus
  misc_feature: 91
accccactgtctgcctgtctgcctgtctgcctgtctgcctgtctctctacctcactgcctacctcatgtcggacctctttgtgggcctatctgcct

SEQ ID NO: 9595 - DNA, 96 bp, Aspergillus thermomutatus
  misc_feature: 91
aaggtaaagaggaagggatagagagaggattagagtaagggttggaatgaggattaggaagaggaagaggaatagggatagaagtaaagaggggtt

SEQ ID NO: 9596 - DNA, 96 bp, Aspergillus thermomutatus
  misc_feature: 90
tttgatacactctttaccgaggcgagcacaacggatgcaaggaaaggccattaggaaaccttgatcttcgatttttcgggccaaacttttctttcg

SEQ ID NO: 9597 - DNA, 96 bp, Aspergillus thermomutatus
  misc_feature: 90
ataaaagtcatctgtacttatatttattactgtatctctcattgtactcatcattgtaaattataataaattaataacctcagtaatatacagaaa

SEQ ID NO: 9598 - DNA, 96 bp, Aspergillus thermomutatus
  misc_feature: 90
tttctccttcttattctcttcttattttcctcttgttcttattctcttctctttctctttgattctccctcttctctcttgacctctcttctcttg

SEQ ID NO: 9599 - DNA, 96 bp, Aspergillus thermomutatus
  misc_feature: 90
tttctatccttcttttccaccctcctccttttacaacctataatttctactaaccctcactcttatcctcattctcactctactcctctctcttat

SEQ ID NO: 9600 - DNA, 96 bp, Aspergillus thermomutatus
  misc_feature: 90
ttgatactgggcgggggccccggctcatctgcttcgtctggctggcttgatctggctggcttgatctgtctggctggtctggctgaactctctgag

SEQ ID NO: 9601 - DNA, 96 bp, Aspergillus thermomutatus
  misc_feature: 90
taagagaagagaagagaaggaagatagaggttaagtaatcaaagagattagagaaggagatgagatttttaggattagaaaagaaaaaaaaaagaa

SEQ ID NO: 9602 - DNA, 96 bp, Aspergillus thermomutatus
  misc_feature: 90
caaggaaaggccattaggaaaccttgatcttcgatttttcgggccaaacttttctttcgaacggatgctttagacgccatggtcagcaatgaagaa

SEQ ID NO: 9603 - DNA, 96 bp, Aspergillus thermomutatus
  misc_feature: 90
ttcttaaatcctacttcttctctttttttcttctttcttttcttaactcttactttcctctcttttatacccctaatactatctcttattcctctc

SEQ ID NO: 9604 - DNA, 96 bp, Aspergillus thermomutatus
  misc_feature: 90
agagaataaggtgaataaggagagaggagaagagaggagatgagaagagaggagatgagaagagatgagaagagaggagaggagatgagaagagaa

SEQ ID NO: 9605 - DNA, 96 bp, Aspergillus thermomutatus
  misc_feature: 90
ttctccttcttaatcaaaataactatcccttactctttctaaaacctaactcttaccctcctttttcttctctttcctttactctctttcccttct

SEQ ID NO: 9606 - DNA, 96 bp, Aspergillus thermomutatus
  misc_feature: 90
cagcaggcagaacggtaggcagaacggcaggcagaacggtaggcagaacggcaggcagaacggcaggttgaatagcaggttgaatagcaggttgaa

SEQ ID NO: 9607 - DNA, 96 bp, Aspergillus thermomutatus
  misc_feature: 90
ttatacatatttgataaaatatactataattaatagtataaatactcatgaggcatatttggaaagaatgtaaaaatactcatgaggcatatttgg

SEQ ID NO: 9608 - DNA, 96 bp, Aspergillus thermomutatus
  misc_feature: 90
ttactatctactcttctaatcttccttaatcccttctctctctctattcctcttctactcttatctcctttctttcttcttctctctcttcctatc

SEQ ID NO: 9609 - DNA, 96 bp, Aspergillus thermomutatus
  misc_feature: 90
ttaatcaaaataactatcccttactctttctaaaacctaactcttaccctcctttttcttctctttcctttactctctttcccttctaaattccat

SEQ ID NO: 9610 - DNA, 96 bp, Aspergillus thermomutatus
  misc_feature: 90
ggtaaagaggaagggatagagagaggattagagtaagggttggaatgaggattaggaagaggaagaggaatagggatagaagtaaagaggggttaa

SEQ ID NO: 9611 - DNA, 96 bp, Aspergillus thermomutatus
  misc_feature: 90
tcttcattcttaaatcttatctcctttctttcttctcttcccttctctctccctatcctctaatctatccttattttatctcctttttaattttaa

SEQ ID NO: 9612 - DNA, 96 bp, Aspergillus thermomutatus
  misc_feature: 90
tgttccaatgtgcgctacacaatcattaggtgcgtcttccaatccaatgtatctaccaatgtgcgtttccaatgtttctaatgtgctcagtaagat

SEQ ID NO: 9613 - DNA, 96 bp, Aspergillus thermomutatus
  misc_feature: 90
tgtctgcctgtctgcctgtctgcctgtctgcctgtctctctacctcactgcctacctcatgtcggacctctttgtgggcctatctgcctgcctccg

SEQ ID NO: 9614 - DNA, 96 bp, Aspergillus thermomutatus
  misc_feature: 90
ggcagaacagcaggcaaaacagcaggcagaacggtaggcagaacggcaggcagaacggtaggcagaacggcaggcagaacggcaggttgaatagca

SEQ ID NO: 9615 - DNA, 96 bp, Aspergillus thermomutatus
  misc_feature: 90
tgagaagagaggagaggagatgagaagagaagagaacaagaataaatgggaatgaaagagacgaattaatggttaaagataaggacaggaggaagt

SEQ ID NO: 9616 - DNA, 96 bp, Aspergillus thermomutatus
  misc_feature: 90
gtaagagaagagaagagaaggaagatagaggttaagtaatcaaagagattagagaaggagatgagatttttaggattagaaaagaaaaaaaaaaga

SEQ ID NO: 9617 - DNA, 96 bp, Aspergillus thermomutatus
  misc_feature: 90
aagagaataaggtgaataaggagagaggagaagagaggagatgagaagagaggagatgagaagagatgagaagagaggagaggagatgagaagaga

SEQ ID NO: 9618 - DNA, 96 bp, Aspergillus thermomutatus
  misc_feature: 90
agagagtaagggttagtagtaataggaaagagagtaagagatagtattagaataaggataaggattattgaagaggaagaggataagatagagaga

SEQ ID NO: 9619 - DNA, 96 bp, Aspergillus thermomutatus
  misc_feature: 90
ataagaatttaaagaagagagaagaaagagggataagagaaagtagattaagaaggttagttagtagagaagggagaaggtaagggtgagtaagga

SEQ ID NO: 9620 - DNA, 96 bp, Aspergillus thermomutatus
  misc_feature: 90
tcctctgtcagttcgattgtggctgcaagtacttggtggttgtatgtcaatgatccatcactgttttgtcgaagaattgctggctcgactgttttt

SEQ ID NO: 9621 - DNA, 96 bp, Aspergillus thermomutatus
  misc_feature: 90
tcccttactatctccttcttactaacccttaccttcttcttctccttactcacccttaccttctcccttctctactaactaaccttcttaatctac

SEQ ID NO: 9622 - DNA, 96 bp, Aspergillus thermomutatus
  misc_feature: 90
tccctaccccactgtctgcctgtctgcctgtctgcctgtctgcctgtctctctacctcactgcctacctcatgtcggacctctttgtgggcctatc

SEQ ID NO: 9623 - DNA, 96 bp, Aspergillus thermomutatus
  misc_feature: 90
gggcctgctcccaggcctgcatcacctcatcgaccgcagcctggacatggtgggtcgatggggccggtggacacccgtctggaacgcgaatatgga

SEQ ID NO: 9624 - DNA, 96 bp, Aspergillus thermomutatus
  misc_feature: 90
cttgatactgggcgggggccccggctcatctgcttcgtctggctggcttgatctggctggcttgatctgtctggctggtctggctgaactctctga

SEQ ID NO: 9625 - DNA, 96 bp, Aspergillus thermomutatus
  misc_feature: 90
tcagaccgccatgaccatttaccgggcccagaccagtcgtctgaacatggcataccgggtatggcgccccatgttgacaggggttggccggggtcc

SEQ ID NO: 9626 - DNA, 96 bp, Aspergillus thermomutatus
  misc_feature: 90
aaggcaggcagaacagcaggcaaaacagcaggcagaacggtaggcagaacggcaggcagaacggtaggcagaacggcaggcagaacggcaggttga

SEQ ID NO: 9627 - DNA, 96 bp, Aspergillus thermomutatus
  misc_feature: 90
atcgcacctacatctatatgattatgatatacattagattctgataatatatctctaatagttattgaagtattatggtattctattaaagtttga

SEQ ID NO: 9628 - DNA, 96 bp, Aspergillus thermomutatus
  misc_feature: 90
tcaaaataactatcccttactctttctaaaacctaactcttaccctcctttttcttctctttcctttactctctttcccttctaaattccatcttc

SEQ ID NO: 9629 - DNA, 96 bp, Aspergillus thermomutatus
  misc_feature: 90
acctgggcctgctcccaggcctgcatcacctcatcgaccgcagcctggacatggtgggtcgatggggccggtggacacccgtctggaacgcgaata

SEQ ID NO: 9630 - DNA, 96 bp, Aspergillus thermomutatus
  misc_feature: 90
tatcgcacctacatctatatgattatgatatacattagattctgataatatatctctaatagttattgaagtattatggtattctattaaagtttg

SEQ ID NO: 9631 - DNA, 96 bp, Aspergillus thermomutatus
  misc_feature: 90
tatcatagattatatactgtaaagattacttcttcattaattaattctctaaaaaatagcccattttaatatacaagacccaaagattccctagat

SEQ ID NO: 9632 - DNA, 96 bp, Aspergillus thermomutatus
  misc_feature: 90
ggcaccgtataagcaccaaatcagatagagagatatagagagaggtatccaagaggtagatatagtagtaggcatagtttccagcattataatata

SEQ ID NO: 9633 - DNA, 96 bp, Aspergillus thermomutatus
  misc_feature: 90
acaacacttcagcggcgattaaatggacactgttttcgagctgaacaacgcgccaactcacataaattgactaaagctgaagaggaattgcttata

SEQ ID NO: 9634 - DNA, 96 bp, Aspergillus thermomutatus
  misc_feature: 90
tagtctggtcgtcgactaagtgcgtcggcttgtccattctcagttcctttgcaatgcacaattttgaaatcatgctgtgacaatgtctcagcccat

SEQ ID NO: 9635 - DNA, 96 bp, Aspergillus thermomutatus
  misc_feature: 90
aaacattcactgatatgctcgtaacagatcaccactctgttctcaccagatcaatgaatgaatgaatgaattattcctccggctgtgcgcagccta

SEQ ID NO: 9636 - DNA, 96 bp, Aspergillus thermomutatus
  misc_feature: 90
atcccttactatctccttcttactaacccttaccttcttcttctccttactcacccttaccttctcccttctctactaactaaccttcttaatcta

SEQ ID NO: 9637 - DNA, 96 bp, Aspergillus thermomutatus
  misc_feature: 90
atataactgaatgagaaggtatgtaatagttaaaagttgagcatattccagagagaaaaaggataagggagcagaaggatatatagagaagaagta

SEQ ID NO: 9638 - DNA, 96 bp, Aspergillus thermomutatus
  misc_feature: 90
tactcttctctctctttttcttctctctctttttcttctctctctttttcttctctctctttttcttctctctctctcttttccttttcttctttc

SEQ ID NO: 9639 - DNA, 96 bp, Aspergillus thermomutatus
  misc_feature: 90
tactatctccttcttactaacccttaccttcttcttctccttactcacccttaccttctcccttctctactaactaaccttcttaatctactttct

SEQ ID NO: 9640 - DNA, 96 bp, Aspergillus thermomutatus
  misc_feature: 90
taatcaaaataactatcccttactctttctaaaacctaactcttaccctcctttttcttctctttcctttactctctttcccttctaaattccatc

SEQ ID NO: 9641 - DNA, 96 bp, Aspergillus thermomutatus
  misc_feature: 90
acgagaagattacaaaaaaagaagaggagaaattaaagaacaagaaagaatgagaagagagaaaagaacaagaatagaaaagaatgagaagggaac

SEQ ID NO: 9642 - DNA, 96 bp, Aspergillus thermomutatus
  misc_feature: 90
gtctgcctgtctgcctgtctgcctgtctgcctgtctctctacctcactgcctacctcatgtcggacctctttgtgggcctatctgcctgcctccgc

SEQ ID NO: 9643 - DNA, 96 bp, Aspergillus thermomutatus
  misc_feature: 90
gtagaagatagtaaaagagaaggattaggaaataggaatttaaaattaaaaaggagataaaataaggatagattagaggatagggagagagaaggg

SEQ ID NO: 9644 - DNA, 96 bp, Aspergillus thermomutatus
  misc_feature: 90
gggcgtctttacgtgcttcttgggggagccagggagcataccgaagaggattaatctgctcagatttcgggagtgatagcacgcggcgtgcgaacc

SEQ ID NO: 9645 - DNA, 96 bp, Aspergillus thermomutatus
  misc_feature: 90
aatttctactaaccctcactcttatcctcattctcactctactcctctctcttatcctcattctaaccctcactccttcctccctctaatcctccc

SEQ ID NO: 9646 - DNA, 96 bp, Aspergillus thermomutatus
  misc_feature: 90
ggcgtctttacgtgcttcttgggggagccagggagcataccgaagaggattaatctgctcagatttcgggagtgatagcacgcggcgtgcgaaccg

SEQ ID NO: 9647 - DNA, 96 bp, Aspergillus thermomutatus
  misc_feature: 90
ggatacctctctctatatctctctatctgatttggtggcttatacggtgccttactccccaccattctacctacctgtctgcctgtctgcctgtct

SEQ ID NO: 9648 - DNA, 96 bp, Aspergillus thermomutatus
  misc_feature: 90
atgtgcgctacacaatcattaggtgcgtcttccaatccaatgtatctaccaatgtgcgtttccaatgtttctaatgtgctcagtaagatgaggagc

SEQ ID NO: 9649 - DNA, 96 bp, Aspergillus thermomutatus
  misc_feature: 90
gccttcctccctaccttatattatacattcttcgctacctcacgcggtgcatctctggggctatgtggggtgtgttgatccctactatactacctg

SEQ ID NO: 9650 - DNA, 96 bp, Aspergillus thermomutatus
  misc_feature: 90
gcaccgtataagcaccaaatcagatagagagatatagagagaggtatccaagaggtagatatagtagtaggcatagtttccagcattataatatat

SEQ ID NO: 9651 - DNA, 96 bp, Aspergillus thermomutatus
  misc_feature: 90
agtctggtcgtcgactaagtgcgtcggcttgtccattctcagttcctttgcaatgcacaattttgaaatcatgctgtgacaatgtctcagcccatc

SEQ ID NO: 9652 - DNA, 96 bp, Aspergillus thermomutatus
  misc_feature: 90
cttctaatcttccttaatcccttctctctctctattcctcttctactcttatctcctttctttcttcttctctctcttcctatcttcaaatctatc

SEQ ID NO: 9653 - DNA, 96 bp, Aspergillus thermomutatus
  misc_feature: 90
cctctctattcacctctctatctacctctctatctccctaccccactgtctgcctgtctgcctgtctgcctgtctgcctgtctctctagacgcctc

SEQ ID NO: 9654 - DNA, 96 bp, Aspergillus thermomutatus
  misc_feature: 90
gacaacacttcagcggcgattaaatggacactgttttcgagctgaacaacgcgccaactcacataaattgactaaagctgaagaggaattgcttat

SEQ ID NO: 9655 - DNA, 96 bp, Aspergillus thermomutatus
  misc_feature: 90
agttgacgagaagattacaaaaaaagaagaggagaaattaaagaacaagaaagaatgagaagagagaaaagaacaagaatagaaaagaatgagaag

SEQ ID NO: 9656 - DNA, 96 bp, Aspergillus thermomutatus
  misc_feature: 90
cataggaggtatggagcaatgcaccgcgtgaggcacccccagatatgccatgcaaggtttggaccaaggtagccagagagcaaccatatggggcag

SEQ ID NO: 9657 - DNA, 96 bp, Aspergillus thermomutatus
  misc_feature: 90
ctcttctatcttctattactcctataattccccttattcttcctttctgatccattattccttcctttttccttttgaaatccttctatctttctt

SEQ ID NO: 9658 - DNA, 96 bp, Aspergillus thermomutatus
  misc_feature: 90
ctctatctacctctctatctccctaccccactgtctgcctgtctgcctgtctgcctgtctgcctgtctctctacctcactgcctacctcatgtcgg

SEQ ID NO: 9659 - DNA, 96 bp, Aspergillus thermomutatus
  misc_feature: 90
agagatgagaagagaggagaggagatgagaagagaagagaacaagaataaatgggaatgaaagagacgaattaatggttaaagataaggacaggag

SEQ ID NO: 9660 - DNA, 96 bp, Aspergillus thermomutatus
  misc_feature: 90
ctccctaccttatattatacattcttcgctacctcacgcggtgcatctctggggctatgtggggtgtgttgatccctactatactacctgccccat

SEQ ID NO: 9661 - DNA, 96 bp, Aspergillus thermomutatus
  misc_feature: 90
ctccctaccccactgtctgcctgtctgcctgtctgcctgtctgcctgtctctctacctcactgcctacctcatgtcggacctctttgtgggcctat

SEQ ID NO: 9662 - DNA, 96 bp, Aspergillus thermomutatus
  misc_feature: 90
ctcatctgcttcgtctggctggcttgatctggctggcttgatctgtctggctggtctggctgaactctctgagctggtcgggcaggcactccggtg

SEQ ID NO: 9663 - DNA, 96 bp, Aspergillus thermomutatus
  misc_feature: 90
ctatcgcacctacatctatatgattatgatatacattagattctgataatatatctctaatagttattgaagtattatggtattctattaaagttt

SEQ ID NO: 9664 - DNA, 96 bp, Aspergillus thermomutatus
  misc_feature: 90
aggggcatgatttctagggctagcatagtctactaaagataagctcctaggagcagctattttagtattatagactgattctatgtcacgggctag

SEQ ID NO: 9665 - DNA, 96 bp, Aspergillus thermomutatus
  misc_feature: 90
ctactcttctctctctttttcttctctctctttttcttctctctctttttcttctctctctttttcttctctctctctcttttccttttcttcttt

SEQ ID NO: 9666 - DNA, 96 bp, Aspergillus thermomutatus
  misc_feature: 90
cagaccgccatgaccatttaccgggcccagaccagtcgtctgaacatggcataccgggtatggcgccccatgttgacaggggttggccggggtccg

SEQ ID NO: 9667 - DNA, 96 bp, Aspergillus thermomutatus
  misc_feature: 90
ccttgatactgggcgggggccccggctcatctgcttcgtctggctggcttgatctggctggcttgatctgtctggctggtctggctgaactctctg

SEQ ID NO: 9668 - DNA, 96 bp, Aspergillus thermomutatus
  misc_feature: 90
cattcactgatatgctcgtaacagatcaccactctgttctcaccagatcaatgaatgaatgaatgaattattcctccggctgtgcgcagcctaagg

SEQ ID NO: 9669 - DNA, 96 bp, Aspergillus thermomutatus
  misc_feature: 90
cccttactatctccttcttactaacccttaccttcttcttctccttactcacccttaccttctcccttctctactaactaaccttcttaatctact

SEQ ID NO: 9670 - DNA, 96 bp, Aspergillus thermomutatus
  misc_feature: 90
cacctctctatctacctctctatctccctaccccactgtctgcctgtctgcctgtctgcctgtctgcctgtctctctagacgcctctctcaatgat

SEQ ID NO: 9671 - DNA, 96 bp, Aspergillus thermomutatus
  misc_feature: 90
caaggcaggcagaacagcaggcaaaacagcaggcagaacggtaggcagaacggcaggcagaacggtaggcagaacggcaggcagaacggcaggttg

SEQ ID NO: 9672 - DNA, 96 bp, Aspergillus thermomutatus
  misc_feature: 90
agataaaatggtatcaccacctagattagcacgtattcttgccttcttctttcttttccgttcattctctgcccgtagaaccctgatttcttgttg

SEQ ID NO: 9673 - DNA, 96 bp, Aspergillus thermomutatus
  misc_feature: 90
attcttccttcttattctattcatctctctatcttatcctcttcctcttcaataatccttatccttattctaatactatctcttactctctttcct

SEQ ID NO: 9674 - DNA, 96 bp, Aspergillus thermomutatus
  misc_feature: 90
agcaggcagaacggtaggcagaacggcaggcagaacggtaggcagaacggcaggcagaacggcaggttgaatagcaggttgaatagcaggttgaat

SEQ ID NO: 9675 - DNA, 96 bp, Aspergillus thermomutatus
  misc_feature: 90
atgaagcatgatcagaccgccatgaccatttaccgggcccagaccagtcgtctgaacatggcataccgggtatggcgccccatgttgacaggggtt

SEQ ID NO: 9676 - DNA, 96 bp, Aspergillus thermomutatus
  misc_feature: 90
atctccctaccccactgtctgcctgtctgcctgtctgcctgtctgcctgtctctctacctcactgcctacctcatgtcggacctctttgtgggcct

SEQ ID NO: 9677 - DNA, 96 bp, Aspergillus thermomutatus
  misc_feature: 90
acaaaatgacaggaggagcaaggtagagaggtagaggttaatttttaatagtattagaaatgttatatcaatcaattattttaatactaaagaggt

SEQ ID NO: 9678 - DNA, 96 bp, Aspergillus thermomutatus
  misc_feature: 89
ttttacaacctataatttctactaaccctcactcttatcctcattctcactctactcctctctcttatcctcattctaaccctcactccttcctcc

SEQ ID NO: 9679 - DNA, 96 bp, Aspergillus thermomutatus
  misc_feature: 89
agacagagtccttgcgctctatcagagttgccttcgaactagctatcatccgaagtgctttcgacatgcagttctgacaataatccaaaaaccaaa

SEQ ID NO: 9680 - DNA, 96 bp, Aspergillus thermomutatus
  misc_feature: 89
tttcttaaatcctacttcttctctttttttcttctttcttttcttaactcttactttcctctcttttatacccctaatactatctcttattcctct

SEQ ID NO: 9681 - DNA, 96 bp, Aspergillus thermomutatus
  misc_feature: 89
tttcatgtagaagagttaactctctaccttgatcctctatcgcacctacatctatatgattatgatatacattagattctgataatatatctctaa

SEQ ID NO: 9682 - DNA, 96 bp, Aspergillus thermomutatus
  misc_feature: 89
tgcaccgcgtgaggcacccccagatatgccatgcaaggtttggaccaaggtagccagagagcaaccatatggggcaggtagtatagtagggatcaa

SEQ ID NO: 9683 - DNA, 96 bp, Aspergillus thermomutatus
  misc_feature: 89
ttcttccttcttattctattcatctctctatcttatcctcttcctcttcaataatccttatccttattctaatactatctcttactctctttccta

SEQ ID NO: 9684 - DNA, 96 bp, Aspergillus thermomutatus
  misc_feature: 89
ttcttaatcaaaataactatcccttactctttctaaaacctaactcttaccctcctttttcttctctttcctttactctctttcccttctaaattc

SEQ ID NO: 9685 - DNA, 96 bp, Aspergillus thermomutatus
  misc_feature: 89
tagcctgcacctgggcctgctcccaggcctgcatcacctcatcgaccgcagcctggacatggtgggtcgatggggccggtggacacccgtctggaa

SEQ ID NO: 9686 - DNA, 96 bp, Aspergillus thermomutatus
  misc_feature: 89
ttcacctctctattcacctctctatctacctctctatctccctaccccactgtctgcctgtctgcctgtctgcctgtctgcctgtctctctagacg

SEQ ID NO: 9687 - DNA, 96 bp, Aspergillus thermomutatus
  misc_feature: 89
ttattaacctactctctattccttattcttccttcttattctattcatctctctatcttatcctcttcctcttcaataatccttatccttattcta

SEQ ID NO: 9688 - DNA, 96 bp, Aspergillus thermomutatus
  misc_feature: 89
ttactatctccttcttactaacccttaccttcttcttctccttactcacccttaccttctcccttctctactaactaaccttcttaatctactttc

SEQ ID NO: 9689 - DNA, 96 bp, Aspergillus thermomutatus
  misc_feature: 89
ttaaatcctacttcttctctttttttcttctttcttttcttaactcttactttcctctcttttatacccctaatactatctcttattcctctcttt

SEQ ID NO: 9690 - DNA, 96 bp, Aspergillus thermomutatus
  misc_feature: 89
tgtctgcctgtctgcctgtctgcctgtctctctacctcactgcctacctcatgtcggacctctttgtgggcctatctgcctgcctccgcgtgctat

SEQ ID NO: 9691 - DNA, 96 bp, Aspergillus thermomutatus
  misc_feature: 89
tgctcccttatcctttttctctctggaatatgctcaacttttaactattacataccttctcattcagttatatatcccttatggcatatattccct

SEQ ID NO: 9692 - DNA, 96 bp, Aspergillus thermomutatus
  misc_feature: 89
tcttccttcttctctttctctttcttatcctttctattcttaaaataaactatccctccctccttttcttcttctctcttaatatttcctcccttc

SEQ ID NO: 9693 - DNA, 96 bp, Aspergillus thermomutatus
  misc_feature: 89
tcttaatcaaaataactatcccttactctttctaaaacctaactcttaccctcctttttcttctctttcctttactctctttcccttctaaattcc

SEQ ID NO: 9694 - DNA, 96 bp, Aspergillus thermomutatus
  misc_feature: 89
tctgcctgtctgcctgtctgcctgtctctctacctcactgcctacctcatgtcggacctctttgtgggcctatctgcctgcctccgcgtgctattc

SEQ ID NO: 9695 - DNA, 96 bp, Aspergillus thermomutatus
  misc_feature: 89
taagggggatgggggaagttaatgagaaattagaagaaagaagaggagaggagaaggaaagaaaagagaaacagaggagggaaagaagggaagaga

SEQ ID NO: 9696 - DNA, 96 bp, Aspergillus thermomutatus
  misc_feature: 89
tctctatctccctaccccactgtctgcctgtctgcctgtctgcctgtctgcctgtctctctagacgcctctctcaatgatgtgtagtctgccgtgc

SEQ ID NO: 9697 - DNA, 96 bp, Aspergillus thermomutatus
  misc_feature: 89
aagggatatataactgaatgagaaggtatgtaatagttaaaagttgagcatattccagagagaaaaaggataagggagcagaaggatatatagaga

SEQ ID NO: 9698 - DNA, 96 bp, Aspergillus thermomutatus
  misc_feature: 89
tctccctaccccactgtctgcctgtctgcctgtctgcctgtctgcctgtctctctacctcactgcctacctcatgtcggacctctttgtgggccta

SEQ ID NO: 9699 - DNA, 96 bp, Aspergillus thermomutatus
  misc_feature: 89
tctatcgcacctacatctatatgattatgatatacattagattctgataatatatctctaatagttattgaagtattatggtattctattaaagtt

SEQ ID NO: 9700 - DNA, 96 bp, Aspergillus thermomutatus
  misc_feature: 89
ataagggatatataactgaatgagaaggtatgtaatagttaaaagttgagcatattccagagagaaaaaggataagggagcagaaggatatataga

SEQ ID NO: 9701 - DNA, 96 bp, Aspergillus thermomutatus
  misc_feature: 89
aagagatgagaagagaggagaggagatgagaagagaagagaacaagaataaatgggaatgaaagagacgaattaatggttaaagataaggacagga

SEQ ID NO: 9702 - DNA, 96 bp, Aspergillus thermomutatus
  misc_feature: 89
tcctccctaccttatattatacattcttcgctacctcacgcggtgcatctctggggctatgtggggtgtgttgatccctactatactacctgcccc

SEQ ID NO: 9703 - DNA, 96 bp, Aspergillus thermomutatus
  misc_feature: 89
tcctacttcttctctttttttcttctttcttttcttaactcttactttcctctcttttatacccctaatactatctcttattcctctctttatctc

SEQ ID NO: 9704 - DNA, 96 bp, Aspergillus thermomutatus
  misc_feature: 89
atagaataagaaggaagaataaggaatagagagtaggttaataagtaagggtaagagataattaatagagataggggaaagaggaatgataaggga

SEQ ID NO: 9705 - DNA, 96 bp, Aspergillus thermomutatus
  misc_feature: 89
ggaagagagagaagaagaaagaaaggagataagagtagaagaggaatagagagagagaagggattaaggaagattagaagagtagatagtaaggga

SEQ ID NO: 9706 - DNA, 96 bp, Aspergillus thermomutatus
  misc_feature: 89
tcatctgcttcgtctggctggcttgatctggctggcttgatctgtctggctggtctggctgaactctctgagctggtcgggcaggcactccggtgg

SEQ ID NO: 9707 - DNA, 96 bp, Aspergillus thermomutatus
  misc_feature: 89
acagcaggcagaacggtaggcagaacggcaggcagaacggtaggcagaacggcaggcagaacggcaggttgaatagcaggttgaatagcaggttga

SEQ ID NO: 9708 - DNA, 96 bp, Aspergillus thermomutatus
  misc_feature: 89
agattaagaaggttagttagtagagaagggagaaggtaagggtgagtaaggagaagaagaaggtaagggttagtaagaaggagatagtaagggata

SEQ ID NO: 9709 - DNA, 96 bp, Aspergillus thermomutatus
  misc_feature: 89
cgcacctacatctatatgattatgatatacattagattctgataatatatctctaatagttattgaagtattatggtattctattaaagtttgata

SEQ ID NO: 9710 - DNA, 96 bp, Aspergillus thermomutatus
  misc_feature: 89
ctttcatgtagaagagttaactctctaccttgatcctctatcgcacctacatctatatgattatgatatacattagattctgataatatatctcta

SEQ ID NO: 9711 - DNA, 96 bp, Aspergillus thermomutatus
  misc_feature: 89
ctgcctgcctccgcgtgctattctatgtgcatcctacatgctattcgacgtgctattctacgtgctattctacgtgctattctacgtgctattcta

SEQ ID NO: 9712 - DNA, 96 bp, Aspergillus thermomutatus
  misc_feature: 89
tagaataagaaggaagaataaggaatagagagtaggttaataagtaagggtaagagataattaatagagataggggaaagaggaatgataagggat

SEQ ID NO: 9713 - DNA, 96 bp, Aspergillus thermomutatus
  misc_feature: 89
tactctaatccttactctgatcctgactctgatccttactctcatccttactctcatccttactctcatccttatccctaatccttatactaacct

SEQ ID NO: 9714 - DNA, 96 bp, Aspergillus thermomutatus
  misc_feature: 89
taccccactgtctgcctgtctgcctgtctgcctgtctgcctgtctctctacctcactgcctacctcatgtcggacctctttgtgggcctatctgcc

SEQ ID NO: 9715 - DNA, 96 bp, Aspergillus thermomutatus
  misc_feature: 89
taagggatatataactgaatgagaaggtatgtaatagttaaaagttgagcatattccagagagaaaaaggataagggagcagaaggatatatagag

SEQ ID NO: 9716 - DNA, 96 bp, Aspergillus thermomutatus
  misc_feature: 89
ggacaacacttcagcggcgattaaatggacactgttttcgagctgaacaacgcgccaactcacataaattgactaaagctgaagaggaattgctta

SEQ ID NO: 9717 - DNA, 96 bp, Aspergillus thermomutatus
  misc_feature: 89
atcttcattcttaaatcttatctcctttctttcttctcttcccttctctctccctatcctctaatctatccttattttatctcctttttaatttta

SEQ ID NO: 9718 - DNA, 96 bp, Aspergillus thermomutatus
  misc_feature: 89
cttcttctctttttttcttctttcttttcttaactcttactttcctctcttttatacccctaatactatctcttattcctctctttatctctaaac

SEQ ID NO: 9719 - DNA, 96 bp, Aspergillus thermomutatus
  misc_feature: 89
gtcttccaatccaatgtatctaccaatgtgcgtttccaatgtttctaatgtgctcagtaagatgaggagcgagttctaatgttacgggctagaccg

SEQ ID NO: 9720 - DNA, 96 bp, Aspergillus thermomutatus
  misc_feature: 89
gtctgcctgtctgcctgtctgcctgtctctctacctcactgcctacctcatgtcggacctctttgtgggcctatctgcctgcctccgcgtgctatt

SEQ ID NO: 9721 - DNA, 96 bp, Aspergillus thermomutatus
  misc_feature: 89
attcacctctctattcacctctctatctacctctctatctccctaccccactgtctgcctgtctgcctgtctgcctgtctgcctgtctctctagac

SEQ ID NO: 9722 - DNA, 96 bp, Aspergillus thermomutatus
  misc_feature: 89
gcacggagagaggtaggcagagaggtagggaggtagggagggaggtagagaggcaccataggaggtatggagcaatgcaccgcgtgaggcaccccc

SEQ ID NO: 9723 - DNA, 96 bp, Aspergillus thermomutatus
  misc_feature: 89
ccatcttccttcttctctttctctttcttatcctttctattcttaaaataaactatccctccctccttttcttcttctctcttaatatttcctccc

SEQ ID NO: 9724 - DNA, 96 bp, Aspergillus thermomutatus
  misc_feature: 89
ctgctcccttatcctttttctctctggaatatgctcaacttttaactattacataccttctcattcagttatatatcccttatggcatatattccc

SEQ ID NO: 9725 - DNA, 96 bp, Aspergillus thermomutatus
  misc_feature: 89
catgatttctagggctagcatagtctactaaagataagctcctaggagcagctattttagtattatagactgattctatgtcacgggctagaagcc

SEQ ID NO: 9726 - DNA, 96 bp, Aspergillus thermomutatus
  misc_feature: 89
ccttctctctcttcatgtctatattccctttactttactaaatcctcttctcatcttccctctctctcttaaattctttcttaaactattaattcc

SEQ ID NO: 9727 - DNA, 96 bp, Aspergillus thermomutatus
  misc_feature: 89
cttccttcttctctttctctttcttatcctttctattcttaaaataaactatccctccctccttttcttcttctctcttaatatttcctcccttcc

SEQ ID NO: 9728 - DNA, 96 bp, Aspergillus thermomutatus
  misc_feature: 89
ctcaaacattcactgatatgctcgtaacagatcaccactctgttctcaccagatcaatgaatgaatgaatgaattattcctccggctgtgcgcagc

SEQ ID NO: 9729 - DNA, 96 bp, Aspergillus thermomutatus
  misc_feature: 89
gcacctacatctatatgattatgatatacattagattctgataatatatctctaatagttattgaagtattatggtattctattaaagtttgatat

SEQ ID NO: 9730 - DNA, 96 bp, Aspergillus thermomutatus
  misc_feature: 89
gatttgatacactctttaccgaggcgagcacaacggatgcaaggaaaggccattaggaaaccttgatcttcgatttttcgggccaaacttttcttt

SEQ ID NO: 9731 - DNA, 96 bp, Aspergillus thermomutatus
  misc_feature: 89
gattaagaaggttagttagtagagaagggagaaggtaagggtgagtaaggagaagaagaaggtaagggttagtaagaaggagatagtaagggatag

SEQ ID NO: 9732 - DNA, 96 bp, Aspergillus thermomutatus
  misc_feature: 89
gacagagtccttgcgctctatcagagttgccttcgaactagctatcatccgaagtgctttcgacatgcagttctgacaataatccaaaaaccaaat

SEQ ID NO: 9733 - DNA, 96 bp, Aspergillus thermomutatus
  misc_feature: 89
gaagagagagaagaagaaagaaaggagataagagtagaagaggaatagagagagagaagggattaaggaagattagaagagtagatagtaagggat

SEQ ID NO: 9734 - DNA, 96 bp, Aspergillus thermomutatus
  misc_feature: 89
atttgatacactctttaccgaggcgagcacaacggatgcaaggaaaggccattaggaaaccttgatcttcgatttttcgggccaaacttttctttc

SEQ ID NO: 9735 - DNA, 96 bp, Aspergillus thermomutatus
  misc_feature: 89
atatataactgaatgagaaggtatgtaatagttaaaagttgagcatattccagagagaaaaaggataagggagcagaaggatatatagagaagaag

SEQ ID NO: 9736 - DNA, 96 bp, Aspergillus thermomutatus
  misc_feature: 89
cttcttaatcaaaataactatcccttactctttctaaaacctaactcttaccctcctttttcttctctttcctttactctctttcccttctaaatt

SEQ ID NO: 9737 - DNA, 96 bp, Aspergillus thermomutatus
  misc_feature: 89
atgagaagagaggagaggagatgagaagagaagagaacaagaataaatgggaatgaaagagacgaattaatggttaaagataaggacaggaggaag

SEQ ID NO: 9738 - DNA, 96 bp, Aspergillus thermomutatus
  misc_feature: 89
cttattcttccttcttattctattcatctctctatcttatcctcttcctcttcaataatccttatccttattctaatactatctcttactctcttt

SEQ ID NO: 9739 - DNA, 96 bp, Aspergillus thermomutatus
  misc_feature: 89
cttactatctccttcttactaacccttaccttcttcttctccttactcacccttaccttctcccttctctactaactaaccttcttaatctacttt

SEQ ID NO: 9740 - DNA, 96 bp, Aspergillus thermomutatus
  misc_feature: 89
cttactatctactcttctaatcttccttaatcccttctctctctctattcctcttctactcttatctcctttctttcttcttctctctcttcctat

SEQ ID NO: 9741 - DNA, 96 bp, Aspergillus thermomutatus
  misc_feature: 89
ctctatcgcacctacatctatatgattatgatatacattagattctgataatatatctctaatagttattgaagtattatggtattctattaaagt

SEQ ID NO: 9742 - DNA, 96 bp, Aspergillus thermomutatus
  misc_feature: 89
attgagaagagaataaggtgaataaggagagaggagaagagaggagatgagaagagaggagatgagaagagatgagaagagaggagaggagatgag

SEQ ID NO: 9743 - DNA, 96 bp, Aspergillus thermomutatus
  misc_feature: 89
ctattcacctctctattcacctctctatctacctctctatctccctaccccactgtctgcctgtctgcctgtctgcctgtctgcctgtctctctag

SEQ ID NO: 9744 - DNA, 96 bp, Aspergillus thermomutatus
  misc_feature: 89
ctataggagcctactagcttacagtaggggcatgatttctagggctagcatagtctactaaagataagctcctaggagcagctattttagtattat

SEQ ID NO: 9745 - DNA, 96 bp, Aspergillus thermomutatus
  misc_feature: 89
ccttattcttccttcttattctattcatctctctatcttatcctcttcctcttcaataatccttatccttattctaatactatctcttactctctt

SEQ ID NO: 9746 - DNA, 96 bp, Aspergillus thermomutatus
  misc_feature: 89
ccttactatctccttcttactaacccttaccttcttcttctccttactcacccttaccttctcccttctctactaactaaccttcttaatctactt

SEQ ID NO: 9747 - DNA, 96 bp, Aspergillus thermomutatus
  misc_feature: 89
cctaccttatattatacattcttcgctacctcacgcggtgcatctctggggctatgtggggtgtgttgatccctactatactacctgccccatatg

SEQ ID NO: 9748 - DNA, 96 bp, Aspergillus thermomutatus
  misc_feature: 89
cctaccccactgtctgcctgtctgcctgtctgcctgtctgcctgtctctctacctcactgcctacctcatgtcggacctctttgtgggcctatctg

SEQ ID NO: 9749 - DNA, 96 bp, Aspergillus thermomutatus
  misc_feature: 89
catctgcttcgtctggctggcttgatctggctggcttgatctgtctggctggtctggctgaactctctgagctggtcgggcaggcactccggtggg

SEQ ID NO: 9750 - DNA, 96 bp, Aspergillus thermomutatus
  misc_feature: 89
acctctctatctacctctctatctccctaccccactgtctgcctgtctgcctgtctgcctgtctgcctgtctctctagacgcctctctcaatgatg

SEQ ID NO: 9751 - DNA, 96 bp, Aspergillus thermomutatus
  misc_feature: 89
caaaatgacaggaggagcaaggtagagaggtagaggttaatttttaatagtattagaaatgttatatcaatcaattattttaatactaaagaggtt

SEQ ID NO: 9752 - DNA, 96 bp, Aspergillus thermomutatus
  misc_feature: 89
atttctactaaccctcactcttatcctcattctcactctactcctctctcttatcctcattctaaccctcactccttcctccctctaatcctccct

SEQ ID NO: 9753 - DNA, 96 bp, Aspergillus thermomutatus
  misc_feature: 89
agcaggttgaatagcaggttgaatagcaggttgaatagcaggttgaatagcaggttgaatagcaggttgaatagcaggttgaatagcaggttgaat

SEQ ID NO: 9754 - DNA, 96 bp, Aspergillus thermomutatus
  misc_feature: 89
attaagaaggttagttagtagagaagggagaaggtaagggtgagtaaggagaagaagaaggtaagggttagtaagaaggagatagtaagggatagt

SEQ ID NO: 9755 - DNA, 96 bp, Aspergillus thermomutatus
  misc_feature: 89
aatcttccttaatcccttctctctctctattcctcttctactcttatctcctttctttcttcttctctctcttcctatcttcaaatctatccttat

SEQ ID NO: 9756 - DNA, 96 bp, Aspergillus thermomutatus
  misc_feature: 89
aatcaaaataactatcccttactctttctaaaacctaactcttaccctcctttttcttctctttcctttactctctttcccttctaaattccatct

SEQ ID NO: 9757 - DNA, 96 bp, Aspergillus thermomutatus
  misc_feature: 89
actctaatccttactctgatcctgactctgatccttactctcatccttactctcatccttactctcatccttatccctaatccttatactaacctt

SEQ ID NO: 9758 - DNA, 96 bp, Aspergillus thermomutatus
  misc_feature: 89
acaaggcaggcagaacagcaggcaaaacagcaggcagaacggtaggcagaacggcaggcagaacggtaggcagaacggcaggcagaacggcaggtt

SEQ ID NO: 9759 - DNA, 96 bp, Aspergillus thermomutatus
  misc_feature: 88
ttttctccttcttattctcttcttattttcctcttgttcttattctcttctctttctctttgattctccctcttctctcttgacctctcttctctt

SEQ ID NO: 9760 - DNA, 96 bp, Aspergillus thermomutatus
  misc_feature: 88
atccaatgtatctaccaatgtgcgtttccaatgtttctaatgtgctcagtaagatgaggagcgagttctaatgttacgggctagaccgtaggaaaa

SEQ ID NO: 9761 - DNA, 96 bp, Aspergillus thermomutatus
  misc_feature: 88
acttcttctctttttttcttctttcttttcttaactcttactttcctctcttttatacccctaatactatctcttattcctctctttatctctaaa

SEQ ID NO: 9762 - DNA, 96 bp, Aspergillus thermomutatus
  misc_feature: 88
ttgacgagaagattacaaaaaaagaagaggagaaattaaagaacaagaaagaatgagaagagagaaaagaacaagaatagaaaagaatgagaaggg

SEQ ID NO: 9763 - DNA, 96 bp, Aspergillus thermomutatus
  misc_feature: 88
atctactcttctaatcttccttaatcccttctctctctctattcctcttctactcttatctcctttctttcttcttctctctcttcctatcttcaa

SEQ ID NO: 9764 - DNA, 96 bp, Aspergillus thermomutatus
  misc_feature: 88
aggaggaagttgacgagaagattacaaaaaaagaagaggagaaattaaagaacaagaaagaatgagaagagagaaaagaacaagaatagaaaagaa

SEQ ID NO: 9765 - DNA, 96 bp, Aspergillus thermomutatus
  misc_feature: 88
ttcttctctttttttcttctttcttttcttaactcttactttcctctcttttatacccctaatactatctcttattcctctctttatctctaaacc

SEQ ID NO: 9766 - DNA, 96 bp, Aspergillus thermomutatus
  misc_feature: 88
ttctccttcttattctcttcttattttcctcttgttcttattctcttctctttctctttgattctccctcttctctcttgacctctcttctcttgg

SEQ ID NO: 9767 - DNA, 96 bp, Aspergillus thermomutatus
  misc_feature: 88
ttccttctctctcttcatgtctatattccctttactttactaaatcctcttctcatcttccctctctctcttaaattctttcttaaactattaatt

SEQ ID NO: 9768 - DNA, 96 bp, Aspergillus thermomutatus
  misc_feature: 88
gacgagaagattacaaaaaaagaagaggagaaattaaagaacaagaaagaatgagaagagagaaaagaacaagaatagaaaagaatgagaagggaa

SEQ ID NO: 9769 - DNA, 96 bp, Aspergillus thermomutatus
  misc_feature: 88
ttcatgtagaagagttaactctctaccttgatcctctatcgcacctacatctatatgattatgatatacattagattctgataatatatctctaat

SEQ ID NO: 9770 - DNA, 96 bp, Aspergillus thermomutatus
  misc_feature: 88
ccttactctaatccttactctgatcctgactctgatccttactctcatccttactctcatccttactctcatccttatccctaatccttatactaa

SEQ ID NO: 9771 - DNA, 96 bp, Aspergillus thermomutatus
  misc_feature: 88
aacattcactgatatgctcgtaacagatcaccactctgttctcaccagatcaatgaatgaatgaatgaattattcctccggctgtgcgcagcctaa

SEQ ID NO: 9772 - DNA, 96 bp, Aspergillus thermomutatus
  misc_feature: 88
ttactgagcacattagaaacattggaaacgcacattggtagatacattggattggaagacgcacctaatgattgtgtagcgcacattggaacagac

SEQ ID NO: 9773 - DNA, 96 bp, Aspergillus thermomutatus
  misc_feature: 88
ttactctaatccttactctgatcctgactctgatccttactctcatccttactctcatccttactctcatccttatccctaatccttatactaacc

SEQ ID NO: 9774 - DNA, 96 bp, Aspergillus thermomutatus
  misc_feature: 88
agatgatataagggaaagagaagattaaagcgaagagagtgaaggaagggatgttgatggacagtgtgataaggtaagggttatttagtttattaa

SEQ ID NO: 9775 - DNA, 96 bp, Aspergillus thermomutatus
  misc_feature: 88
tgtgcatcctacatgctattcgacgtgctattctacgtgctattctacgtgctattctacgtgctattctacgtgctattctacgtgctattctac

SEQ ID NO: 9776 - DNA, 96 bp, Aspergillus thermomutatus
  misc_feature: 88
tggtctgccttactgcctctctccctgtcttacatggtgccttcctccctaccttatattatacattcttcgctacctcacgtggtgcatctctgg

SEQ ID NO: 9777 - DNA, 96 bp, Aspergillus thermomutatus
  misc_feature: 88
tgggcctgctcccaggcctgcatcacctcatcgaccgcagcctggacatggtgggtcgatggggccggtggacacccgtctggaacgcgaatatgg

SEQ ID NO: 9778 - DNA, 96 bp, Aspergillus thermomutatus
  misc_feature: 88
tggagcaatgcaccgcgtgaggcacccccagatatgccatgcaaggtttggaccaaggtagccagagagcaaccatatggggcaggtagtatagta

SEQ ID NO: 9779 - DNA, 96 bp, Aspergillus thermomutatus
  misc_feature: 88
cttaatcaaaataactatcccttactctttctaaaacctaactcttaccctcctttttcttctctttcctttactctctttcccttctaaattcca

SEQ ID NO: 9780 - DNA, 96 bp, Aspergillus thermomutatus
  misc_feature: 88
tgccttcctccctaccttatattatacattcttcgctacctcacgcggtgcatctctggggctatgtggggtgtgttgatccctactatactacct

SEQ ID NO: 9781 - DNA, 96 bp, Aspergillus thermomutatus
  misc_feature: 88
tgcctccgcgtgctattctatgtgcatcctacatgctattcgacgtgctattctacgtgctattctacgtgctattctacgtgctattctacgtgc

SEQ ID NO: 9782 - DNA, 96 bp, Aspergillus thermomutatus
  misc_feature: 88
tgccatgcaaggtttggaccaaggtagccagagagcaaccatatggggcaggtagtatagtagggatcaacacaccccacatagccccagagatgc

SEQ ID NO: 9783 - DNA, 96 bp, Aspergillus thermomutatus
  misc_feature: 88
tctttggtgcttctggcgattgtaacttcccgtaaggttgatgtcttgctggcttgtctctgatgcaagtctcgcattgttgaatgtaaccttgca

SEQ ID NO: 9784 - DNA, 96 bp, Aspergillus thermomutatus
  misc_feature: 88
atgcaccgcgtgaggcacccccagatatgccatgcaaggtttggaccaaggtagccagagagcaaccatatggggcaggtagtatagtagggatca

SEQ ID NO: 9785 - DNA, 96 bp, Aspergillus thermomutatus
  misc_feature: 88
tgatataagggaaagagaagattaaagcgaagagagtgaaggaagggatgttgatggacagtgtgataaggtaagggttatttagtttattaagag

SEQ ID NO: 9786 - DNA, 96 bp, Aspergillus thermomutatus
  misc_feature: 88
tcttccttcttattctattcatctctctatcttatcctcttcctcttcaataatccttatccttattctaatactatctcttactctctttcctat

SEQ ID NO: 9787 - DNA, 96 bp, Aspergillus thermomutatus
  misc_feature: 88
ctgttccaatgtgcgctacacaatcattaggtgcgtcttccaatccaatgtatctaccaatgtgcgtttccaatgtttctaatgtgctcagtaaga

SEQ ID NO: 9788 - DNA, 96 bp, Aspergillus thermomutatus
  misc_feature: 88
tctgcttcgtctggctggcttgatctggctggcttgatctgtctggctggtctggctgaactctctgagctggtcgggcaggcactccggtgggtt

SEQ ID NO: 9789 - DNA, 96 bp, Aspergillus thermomutatus
  misc_feature: 88
tctgcctgcctccgcgtgctattctatgtgcatcctacatgctattcgacgtgctattctacgtgctattctacgtgctattctacgtgctattct

SEQ ID NO: 9790 - DNA, 96 bp, Aspergillus thermomutatus
  misc_feature: 88
atatcatagattatatactgtaaagattacttcttcattaattaattctctaaaaaatagcccattttaatatacaagacccaaagattccctaga

SEQ ID NO: 9791 - DNA, 96 bp, Aspergillus thermomutatus
  misc_feature: 88
tctaatcttccttaatcccttctctctctctattcctcttctactcttatctcctttctttcttcttctctctcttcctatcttcaaatctatcct

SEQ ID NO: 9792 - DNA, 96 bp, Aspergillus thermomutatus
  misc_feature: 88
tcgcacctacatctatatgattatgatatacattagattctgataatatatctctaatagttattgaagtattatggtattctattaaagtttgat

SEQ ID NO: 9793 - DNA, 96 bp, Aspergillus thermomutatus
  misc_feature: 88
tccttctctctcttcatgtctatattccctttactttactaaatcctcttctcatcttccctctctctcttaaattctttcttaaactattaattc

SEQ ID NO: 9794 - DNA, 96 bp, Aspergillus thermomutatus
  misc_feature: 88
tccttactctaatccttactctgatcctgactctgatccttactctcatccttactctcatccttactctcatccttatccctaatccttatacta

SEQ ID NO: 9795 - DNA, 96 bp, Aspergillus thermomutatus
  misc_feature: 88
ccaatccaatgtatctaccaatgtgcgtttccaatgtttctaatgtgctcagtaagatgaggagcgagttctaatgttacgggctagaccgtagga

SEQ ID NO: 9796 - DNA, 96 bp, Aspergillus thermomutatus
  misc_feature: 88
tccgcggacaacacttcagcggcgattaaatggacactgttttcgagctgaacaacgcgccaactcacataaattgactaaagctgaagaggaatt

SEQ ID NO: 9797 - DNA, 96 bp, Aspergillus thermomutatus
  misc_feature: 88
tagaagatagtaaaagagaaggattaggaaataggaatttaaaattaaaaaggagataaaataaggatagattagaggatagggagagagaaggga

SEQ ID NO: 9798 - DNA, 96 bp, Aspergillus thermomutatus
  misc_feature: 88
gcaatgcaccgcgtgaggcacccccagatatgccatgcaaggtttggaccaaggtagccagagagcaaccatatggggcaggtagtatagtaggga

SEQ ID NO: 9799 - DNA, 96 bp, Aspergillus thermomutatus
  misc_feature: 88
tccaatgtatctaccaatgtgcgtttccaatgtttctaatgtgctcagtaagatgaggagcgagttctaatgttacgggctagaccgtaggaaaac

SEQ ID NO: 9800 - DNA, 96 bp, Aspergillus thermomutatus
  misc_feature: 88
tccaatagcttccagtactgtgaacttcgcgtgctgggcatcgagcttcttgctagggcggtccgttcgtatgttgcgcaggtccaaccatacttt

SEQ ID NO: 9801 - DNA, 96 bp, Aspergillus thermomutatus
  misc_feature: 88
tcatgtagaagagttaactctctaccttgatcctctatcgcacctacatctatatgattatgatatacattagattctgataatatatctctaata

SEQ ID NO: 9802 - DNA, 96 bp, Aspergillus thermomutatus
  misc_feature: 88
tcaaacattcactgatatgctcgtaacagatcaccactctgttctcaccagatcaatgaatgaatgaatgaattattcctccggctgtgcgcagcc

SEQ ID NO: 9803 - DNA, 96 bp, Aspergillus thermomutatus
  misc_feature: 88
tatgccatgcaaggtttggaccaaggtagccagagagcaaccatatggggcaggtagtatagtagggatcaacacaccccacatagccccagagat

SEQ ID NO: 9804 - DNA, 96 bp, Aspergillus thermomutatus
  misc_feature: 88
agaataagaaggaagaataaggaatagagagtaggttaataagtaagggtaagagataattaatagagataggggaaagaggaatgataagggata

SEQ ID NO: 9805 - DNA, 96 bp, Aspergillus thermomutatus
  misc_feature: 88
tatatatccatactaattatctttaatctctggtataaccaccctaacttataatatatattaatacctactatgcctcactgcctacctcctggg

SEQ ID NO: 9806 - DNA, 96 bp, Aspergillus thermomutatus
  misc_feature: 88
tatataatattaagcaaggcacggagagaggtaggcagagaggtagggaggtagggagggaggtagggagagaggtaggcgaagaggtaggcgacg

SEQ ID NO: 9807 - DNA, 96 bp, Aspergillus thermomutatus
  misc_feature: 88
tatataactgaatgagaaggtatgtaatagttaaaagttgagcatattccagagagaaaaaggataagggagcagaaggatatatagagaagaagt

SEQ ID NO: 9808 - DNA, 96 bp, Aspergillus thermomutatus
  misc_feature: 88
tataatttctactaaccctcactcttatcctcattctcactctactcctctctcttatcctcattctaaccctcactccttcctccctctaatcct

SEQ ID NO: 9809 - DNA, 96 bp, Aspergillus thermomutatus
  misc_feature: 88
ctgtctgcctgtctgcctgtctgcctgtctctctacctcactgcctacctcatgtcggacctctttgtgggcctatctgcctgcctccgcgtgcta

SEQ ID NO: 9810 - DNA, 96 bp, Aspergillus thermomutatus
  misc_feature: 88
tagatctgttatttcatagcatcgctctgaaatatcagatcggttgctctgcggaccagatcacttgctatgccgatgatcacgtgacatagtgat

SEQ ID NO: 9811 - DNA, 96 bp, Aspergillus thermomutatus
  misc_feature: 88
cactcttatcctcattctcactctactcctctctcttatcctcattctaaccctcactccttcctccctctaatcctccctctaatcctccctcta

SEQ ID NO: 9812 - DNA, 96 bp, Aspergillus thermomutatus
  misc_feature: 88
tacttctatatctacctcttggatacctctctctatatctctctatctgatttggtggcttatacggtgccttactccccaccattctacctacct

SEQ ID NO: 9813 - DNA, 96 bp, Aspergillus thermomutatus
  misc_feature: 88
tacctctctctatatctctctatctgatttggtggcttatacggtgccttactccccaccattctacctacctgtctgcctgtctgcctgtctgcc

SEQ ID NO: 9814 - DNA, 96 bp, Aspergillus thermomutatus
  misc_feature: 88
tacatgctattcgacgtgctattctacgtgctattctacgtgctattctacgtgctattctacgtgctattctacgtgctattctacgtgctattc

SEQ ID NO: 9815 - DNA, 96 bp, Aspergillus thermomutatus
  misc_feature: 88
taatgttacggcaccaacacagccgcactagcctaaggcggatgagacaggcagaattacggaatgcggacatccaatcactctaaggaacatgcg

SEQ ID NO: 9816 - DNA, 96 bp, Aspergillus thermomutatus
  misc_feature: 88
gctataggagcctactagcttacagtaggggcatgatttctagggctagcatagtctactaaagataagctcctaggagcagctattttagtatta

SEQ ID NO: 9817 - DNA, 96 bp, Aspergillus thermomutatus
  misc_feature: 88
ctttctatccttcttttccaccctcctccttttacaacctataatttctactaaccctcactcttatcctcattctcactctactcctctctctta

SEQ ID NO: 9818 - DNA, 96 bp, Aspergillus thermomutatus
  misc_feature: 88
taagaatttaaagaagagagaagaaagagggataagagaaagtagattaagaaggttagttagtagagaagggagaaggtaagggtgagtaaggag

SEQ ID NO: 9819 - DNA, 96 bp, Aspergillus thermomutatus
  misc_feature: 88
taaatcctacttcttctctttttttcttctttcttttcttaactcttactttcctctcttttatacccctaatactatctcttattcctctcttta

SEQ ID NO: 9820 - DNA, 96 bp, Aspergillus thermomutatus
  misc_feature: 88
gttgacgagaagattacaaaaaaagaagaggagaaattaaagaacaagaaagaatgagaagagagaaaagaacaagaatagaaaagaatgagaagg

SEQ ID NO: 9821 - DNA, 96 bp, Aspergillus thermomutatus
  misc_feature: 88
gttgaatagcaggttgaatagcaggttgaatagcaggttgaatagcaggttgaatagcaggttgaatagcaggttgaatagcaggttgaatagcag

SEQ ID NO: 9822 - DNA, 96 bp, Aspergillus thermomutatus
  misc_feature: 88
cttactctaatccttactctgatcctgactctgatccttactctcatccttactctcatccttactctcatccttatccctaatccttatactaac

SEQ ID NO: 9823 - DNA, 96 bp, Aspergillus thermomutatus
  misc_feature: 88
gtgccttcctccctaccttatattatacattcttcgctacctcacgcggtgcatctctggggctatgtggggtgtgttgatccctactatactacc

SEQ ID NO: 9824 - DNA, 96 bp, Aspergillus thermomutatus
  misc_feature: 88
cgtcttccaatccaatgtatctaccaatgtgcgtttccaatgtttctaatgtgctcagtaagatgaggagcgagttctaatgttacgggctagacc

SEQ ID NO: 9825 - DNA, 96 bp, Aspergillus thermomutatus
  misc_feature: 88
ggcacggagagaggtaggcagagaggtagggaggtagggagggaggtagagaggcaccataggaggtatggagcaatgcaccgcgtgaggcacccc

SEQ ID NO: 9826 - DNA, 96 bp, Aspergillus thermomutatus
  misc_feature: 88
ggatgcaaggaaaggccattaggaaaccttgatcttcgatttttcgggccaaacttttctttcgaacggatgctttagacgccatggtcagcaatg

SEQ ID NO: 9827 - DNA, 96 bp, Aspergillus thermomutatus
  misc_feature: 88
ggagcaatgcaccgcgtgaggcacccccagatatgccatgcaaggtttggaccaaggtagccagagagcaaccatatggggcaggtagtatagtag

SEQ ID NO: 9828 - DNA, 96 bp, Aspergillus thermomutatus
  misc_feature: 88
actggatatcatagattatatactgtaaagattacttcttcattaattaattctctaaaaaatagcccattttaatatacaagacccaaagattcc

SEQ ID NO: 9829 - DNA, 96 bp, Aspergillus thermomutatus
  misc_feature: 88
gcggacaacacttcagcggcgattaaatggacactgttttcgagctgaacaacgcgccaactcacataaattgactaaagctgaagaggaattgct

SEQ ID NO: 9830 - DNA, 96 bp, Aspergillus thermomutatus
  misc_feature: 88
gcctccgcgtgctattctatgtgcatcctacatgctattcgacgtgctattctacgtgctattctacgtgctattctacgtgctattctacgtgct

SEQ ID NO: 9831 - DNA, 96 bp, Aspergillus thermomutatus
  misc_feature: 88
agtaggggcatgatttctagggctagcatagtctactaaagataagctcctaggagcagctattttagtattatagactgattctatgtcacgggc

SEQ ID NO: 9832 - DNA, 96 bp, Aspergillus thermomutatus
  misc_feature: 88
atacctctctctatatctctctatctgatttggtggcttatacggtgccttactccccaccattctacctacctgtctgcctgtctgcctgtctgc

SEQ ID NO: 9833 - DNA, 96 bp, Aspergillus thermomutatus
  misc_feature: 88
aatgcaccgcgtgaggcacccccagatatgccatgcaaggtttggaccaaggtagccagagagcaaccatatggggcaggtagtatagtagggatc

SEQ ID NO: 9834 - DNA, 96 bp, Aspergillus thermomutatus
  misc_feature: 88
ctctatcttatccaaaactaactaacccttactctatcttatctaaaactaactaaccctgactctatcctatttaaaactaccccttactctatc

SEQ ID NO: 9835 - DNA, 96 bp, Aspergillus thermomutatus
  misc_feature: 88
gatacctctctctatatctctctatctgatttggtggcttatacggtgccttactccccaccattctacctacctgtctgcctgtctgcctgtctg

SEQ ID NO: 9836 - DNA, 96 bp, Aspergillus thermomutatus
  misc_feature: 88
ataatttctactaaccctcactcttatcctcattctcactctactcctctctcttatcctcattctaaccctcactccttcctccctctaatcctc

SEQ ID NO: 9837 - DNA, 96 bp, Aspergillus thermomutatus
  misc_feature: 88
atctttcatgtagaagagttaactctctaccttgatcctctatcgcacctacatctatatgattatgatatacattagattctgataatatatctc

SEQ ID NO: 9838 - DNA, 96 bp, Aspergillus thermomutatus
  misc_feature: 88
actatctccttcttactaacccttaccttcttcttctccttactcacccttaccttctcccttctctactaactaaccttcttaatctactttctc

SEQ ID NO: 9839 - DNA, 96 bp, Aspergillus thermomutatus
  misc_feature: 88
aactggatatcatagattatatactgtaaagattacttcttcattaattaattctctaaaaaatagcccattttaatatacaagacccaaagattc

SEQ ID NO: 9840 - DNA, 96 bp, Aspergillus thermomutatus
  misc_feature: 88
ctctcttctatcttctattactcctataattccccttattcttcctttctgatccattattccttcctttttccttttgaaatccttctatctttc

SEQ ID NO: 9841 - DNA, 96 bp, Aspergillus thermomutatus
  misc_feature: 88
gaaactggatatcatagattatatactgtaaagattacttcttcattaattaattctctaaaaaatagcccattttaatatacaagacccaaagat

SEQ ID NO: 9842 - DNA, 96 bp, Aspergillus thermomutatus
  misc_feature: 88
cctctgtcagttcgattgtggctgcaagtacttggtggttgtatgtcaatgatccatcactgttttgtcgaagaattgctggctcgactgtttttc

SEQ ID NO: 9843 - DNA, 96 bp, Aspergillus thermomutatus
  misc_feature: 88
cttggatacctctctctatatctctctatctgatttggtggcttatacggtgccttactccccaccattctacctacctgtctgcctgtctgcctg

SEQ ID NO: 9844 - DNA, 96 bp, Aspergillus thermomutatus
  misc_feature: 88
acattcactgatatgctcgtaacagatcaccactctgttctcaccagatcaatgaatgaatgaatgaattattcctccggctgtgcgcagcctaag

SEQ ID NO: 9845 - DNA, 96 bp, Aspergillus thermomutatus
  misc_feature: 88
cctcaaacattcactgatatgctcgtaacagatcaccactctgttctcaccagatcaatgaatgaatgaatgaattattcctccggctgtgcgcag

SEQ ID NO: 9846 - DNA, 96 bp, Aspergillus thermomutatus
  misc_feature: 88
ctgcctccgcgtgctattctatgtgcatcctacatgctattcgacgtgctattctacgtgctattctacgtgctattctacgtgctattctacgtg

SEQ ID NO: 9847 - DNA, 96 bp, Aspergillus thermomutatus
  misc_feature: 88
ctctctatctccctaccccactgtctgcctgtctgcctgtctgcctgtctgcctgtctctctagacgcctctctcaatgatgtgtagtctgccgtg

SEQ ID NO: 9848 - DNA, 96 bp, Aspergillus thermomutatus
  misc_feature: 88
catgtagaagagttaactctctaccttgatcctctatcgcacctacatctatatgattatgatatacattagattctgataatatatctctaatag

SEQ ID NO: 9849 - DNA, 96 bp, Aspergillus thermomutatus
  misc_feature: 88
ctatctccttcttactaacccttaccttcttcttctccttactcacccttaccttctcccttctctactaactaaccttcttaatctactttctct

SEQ ID NO: 9850 - DNA, 96 bp, Aspergillus thermomutatus
  misc_feature: 88
ctacatgctattcgacgtgctattctacgtgctattctacgtgctattctacgtgctattctacgtgctattctacgtgctattctacgtgctatt

SEQ ID NO: 9851 - DNA, 96 bp, Aspergillus thermomutatus
  misc_feature: 88
atgatttctagggctagcatagtctactaaagataagctcctaggagcagctattttagtattatagactgattctatgtcacgggctagaagccg

SEQ ID NO: 9852 - DNA, 96 bp, Aspergillus thermomutatus
  misc_feature: 88
cggatttgatacactctttaccgaggcgagcacaacggatgcaaggaaaggccattaggaaaccttgatcttcgatttttcgggccaaacttttct

SEQ ID NO: 9853 - DNA, 96 bp, Aspergillus thermomutatus
  misc_feature: 88
caaaacagcaggcagaacggtaggcagaacggcaggcagaacggtaggcagaacggcaggcagaacggcaggttgaatagcaggttgaatagcagg

SEQ ID NO: 9854 - DNA, 96 bp, Aspergillus thermomutatus
  misc_feature: 88
ccaatgtgcgctacacaatcattaggtgcgtcttccaatccaatgtatctaccaatgtgcgtttccaatgtttctaatgtgctcagtaagatgagg

SEQ ID NO: 9855 - DNA, 96 bp, Aspergillus thermomutatus
  misc_feature: 88
cctacatgctattcgacgtgctattctacgtgctattctacgtgctattctacgtgctattctacgtgctattctacgtgctattctacgtgctat

SEQ ID NO: 9856 - DNA, 96 bp, Aspergillus thermomutatus
  misc_feature: 88
ccgcggacaacacttcagcggcgattaaatggacactgttttcgagctgaacaacgcgccaactcacataaattgactaaagctgaagaggaattg

SEQ ID NO: 9857 - DNA, 96 bp, Aspergillus thermomutatus
  misc_feature: 88
aggaagagagagaagaagaaagaaaggagataagagtagaagaggaatagagagagagaagggattaaggaagattagaagagtagatagtaaggg

SEQ ID NO: 9858 - DNA, 96 bp, Aspergillus thermomutatus
  misc_feature: 88
ccctcctccttttacaacctataatttctactaaccctcactcttatcctcattctcactctactcctctctcttatcctcattctaaccctcact

SEQ ID NO: 9859 - DNA, 96 bp, Aspergillus thermomutatus
  misc_feature: 88
atgccatgcaaggtttggaccaaggtagccagagagcaaccatatggggcaggtagtatagtagggatcaacacaccccacatagccccagagatg

SEQ ID NO: 9860 - DNA, 96 bp, Aspergillus thermomutatus
  misc_feature: 88
acttctatatctacctcttggatacctctctctatatctctctatctgatttggtggcttatacggtgccttactccccaccattctacctacctg

SEQ ID NO: 9861 - DNA, 96 bp, Aspergillus thermomutatus
  misc_feature: 88
cacaaggcaggcagaacagcaggcaaaacagcaggcagaacggtaggcagaacggcaggcagaacggtaggcagaacggcaggcagaacggcaggt

SEQ ID NO: 9862 - DNA, 96 bp, Aspergillus thermomutatus
  misc_feature: 88
caatcattaggtgcgtcttccaatccaatgtatctaccaatgtgcgtttccaatgtttctaatgtgctcagtaagatgaggagcgagttctaatgt

SEQ ID NO: 9863 - DNA, 96 bp, Aspergillus thermomutatus
  misc_feature: 88
aacagcaggcagaacggtaggcagaacggcaggcagaacggtaggcagaacggcaggcagaacggcaggttgaatagcaggttgaatagcaggttg

SEQ ID NO: 9864 - DNA, 96 bp, Aspergillus thermomutatus
  misc_feature: 88
caaacattcactgatatgctcgtaacagatcaccactctgttctcaccagatcaatgaatgaatgaatgaattattcctccggctgtgcgcagcct

SEQ ID NO: 9865 - DNA, 96 bp, Aspergillus thermomutatus
  misc_feature: 88
atggagcaatgcaccgcgtgaggcacccccagatatgccatgcaaggtttggaccaaggtagccagagagcaaccatatggggcaggtagtatagt

SEQ ID NO: 9866 - DNA, 96 bp, Aspergillus thermomutatus
  misc_feature: 88
atctgcttcgtctggctggcttgatctggctggcttgatctgtctggctggtctggctgaactctctgagctggtcgggcaggcactccggtgggt

SEQ ID NO: 9867 - DNA, 96 bp, Aspergillus thermomutatus
  misc_feature: 88
actctatcttatccaaaactaactaacccttactctatcttatctaaaactaactaaccctgactctatcctatttaaaactaccccttactctat

SEQ ID NO: 9868 - DNA, 96 bp, Aspergillus thermomutatus
  misc_feature: 88
acctctctctatatctctctatctgatttggtggcttatacggtgccttactccccaccattctacctacctgtctgcctgtctgcctgtctgcct

SEQ ID NO: 9869 - DNA, 96 bp, Aspergillus thermomutatus
  misc_feature: 88
agatctgttatttcatagcatcgctctgaaatatcagatcggttgctctgcggaccagatcacttgctatgccgatgatcacgtgacatagtgatt

SEQ ID NO: 9870 - DNA, 96 bp, Aspergillus thermomutatus
  misc_feature: 88
actctcttctatcttctattactcctataattccccttattcttcctttctgatccattattccttcctttttccttttgaaatccttctatcttt

SEQ ID NO: 9871 - DNA, 96 bp, Aspergillus thermomutatus
  misc_feature: 88
acagataaaatggtatcaccacctagattagcacgtattcttgccttcttctttcttttccgttcattctctgcccgtagaaccctgatttcttgt

SEQ ID NO: 9872 - DNA, 96 bp, Aspergillus thermomutatus
  misc_feature: 88
aaactggatatcatagattatatactgtaaagattacttcttcattaattaattctctaaaaaatagcccattttaatatacaagacccaaagatt

SEQ ID NO: 9873 - DNA, 96 bp, Aspergillus thermomutatus
  misc_feature: 88
aatcattaggtgcgtcttccaatccaatgtatctaccaatgtgcgtttccaatgtttctaatgtgctcagtaagatgaggagcgagttctaatgtt

SEQ ID NO: 9874 - DNA, 96 bp, Aspergillus thermomutatus
  misc_feature: 88
aaacagcaggcagaacggtaggcagaacggcaggcagaacggtaggcagaacggcaggcagaacggcaggttgaatagcaggttgaatagcaggtt

SEQ ID NO: 9875 - DNA, 96 bp, Aspergillus thermomutatus
  misc_feature: 87
gagtaagagaagagaagagaaggaagatagaggttaagtaatcaaagagattagagaaggagatgagatttttaggattagaaaagaaaaaaaaaa

SEQ ID NO: 9876 - DNA, 96 bp, Aspergillus thermomutatus
  misc_feature: 87
ttttcttaaatcctacttcttctctttttttcttctttcttttcttaactcttactttcctctcttttatacccctaatactatctcttattcctc

SEQ ID NO: 9877 - DNA, 96 bp, Aspergillus thermomutatus
  misc_feature: 87
tttactaaatcctcttctcatcttccctctctctcttaaattctttcttaaactattaattcctctctctttctcactccctcttcctcctttctt

SEQ ID NO: 9878 - DNA, 96 bp, Aspergillus thermomutatus
  misc_feature: 87
tttacaacctataatttctactaaccctcactcttatcctcattctcactctactcctctctcttatcctcattctaaccctcactccttcctccc

SEQ ID NO: 9879 - DNA, 96 bp, Aspergillus thermomutatus
  misc_feature: 87
cttcattcttaaatcttatctcctttctttcttctcttcccttctctctccctatcctctaatctatccttattttatctcctttttaattttaaa

SEQ ID NO: 9880 - DNA, 96 bp, Aspergillus thermomutatus
  misc_feature: 87
ttggatacctctctctatatctctctatctgatttggtggcttatacggtgccttactccccaccattctacctacctgtctgcctgtctgcctgt

SEQ ID NO: 9881 - DNA, 96 bp, Aspergillus thermomutatus
  misc_feature: 87
atcaaccaaatggagcagtcttacacccgattggaatccgaagtggctcgccagcagaacgctccccctaacccagcaccagcgagcccacctcaa

SEQ ID NO: 9882 - DNA, 96 bp, Aspergillus thermomutatus
  misc_feature: 87
gggcatgatttctagggctagcatagtctactaaagataagctcctaggagcagctattttagtattatagactgattctatgtcacgggctagaa

SEQ ID NO: 9883 - DNA, 96 bp, Aspergillus thermomutatus
  misc_feature: 87
ttctacgggcagagaatgaacggaaaagaaagaagaaggcaagaatacgtgctaatctaggtggtgataccattttatctgtacaagaaggccaga

SEQ ID NO: 9884 - DNA, 96 bp, Aspergillus thermomutatus
  misc_feature: 87
ttccatcttccttcttctctttctctttcttatcctttctattcttaaaataaactatccctccctccttttcttcttctctcttaatatttcctc

SEQ ID NO: 9885 - DNA, 96 bp, Aspergillus thermomutatus
  misc_feature: 87
ttcattcttaaatcttatctcctttctttcttctcttcccttctctctccctatcctctaatctatccttattttatctcctttttaattttaaat

SEQ ID NO: 9886 - DNA, 96 bp, Aspergillus thermomutatus
  misc_feature: 87
gtgttagagcggttacaggccgctgggttgcagctagacatcgacaagtgcgagttcgaggtcaagagcacgaaatacctcgggtttatcattgaa

SEQ ID NO: 9887 - DNA, 96 bp, Aspergillus thermomutatus
  misc_feature: 87
ctgaatgagaaggtatgtaatagttaaaagttgagcatattccagagagaaaaaggataagggagcagaaggatatatagagaagaagtataataa

SEQ ID NO: 9888 - DNA, 96 bp, Aspergillus thermomutatus
  misc_feature: 87
gggatagatagtttagggagaggagggggtagaaaggtttagagataaagagaggaataagagatagtattaggggtataaaagagaggaaagtaa

SEQ ID NO: 9889 - DNA, 96 bp, Aspergillus thermomutatus
  misc_feature: 87
gagataaggaggataaagggatgtgaaggaaaggaagatgttaataagaagtaagtataagagtaaggattagtgattttagaaataaaggagtaa

SEQ ID NO: 9890 - DNA, 96 bp, Aspergillus thermomutatus
  misc_feature: 87
ttactaaatcctcttctcatcttccctctctctcttaaattctttcttaaactattaattcctctctctttctcactccctcttcctcctttcttg

SEQ ID NO: 9891 - DNA, 96 bp, Aspergillus thermomutatus
  misc_feature: 87
ttacaacctataatttctactaaccctcactcttatcctcattctcactctactcctctctcttatcctcattctaaccctcactccttcctccct

SEQ ID NO: 9892 - DNA, 96 bp, Aspergillus thermomutatus
  misc_feature: 87
caggaggagcaaggtagagaggtagaggttaatttttaatagtattagaaatgttatatcaatcaattattttaatactaaagaggttttgattaa

SEQ ID NO: 9893 - DNA, 96 bp, Aspergillus thermomutatus
  misc_feature: 87
tggtgccttcctccctaccttatattatacattcttcgctacctcacgcggtgcatctctggggctatgtggggtgtgttgatccctactatacta

SEQ ID NO: 9894 - DNA, 96 bp, Aspergillus thermomutatus
  misc_feature: 87
cacggagagaggtaggcagagaggtagggaggtagggagggaggtagagaggcaccataggaggtatggagcaatgcaccgcgtgaggcaccccca

SEQ ID NO: 9895 - DNA, 96 bp, Aspergillus thermomutatus
  misc_feature: 87
tggatatcatagattatatactgtaaagattacttcttcattaattaattctctaaaaaatagcccattttaatatacaagacccaaagattccct

SEQ ID NO: 9896 - DNA, 96 bp, Aspergillus thermomutatus
  misc_feature: 87
tggatacctctctctatatctctctatctgatttggtggcttatacggtgccttactccccaccattctacctacctgtctgcctgtctgcctgtc

SEQ ID NO: 9897 - DNA, 96 bp, Aspergillus thermomutatus
  misc_feature: 87
tgctattcgacgtgctattctacgtgctattctacgtgctattctacgtgctattctacgtgctattctacgtgctattctacgtgctattctacg

SEQ ID NO: 9898 - DNA, 96 bp, Aspergillus thermomutatus
  misc_feature: 87
tgcctgcctccgcgtgctattctatgtgcatcctacatgctattcgacgtgctattctacgtgctattctacgtgctattctacgtgctattctac

SEQ ID NO: 9899 - DNA, 96 bp, Aspergillus thermomutatus
  misc_feature: 87
ccataggaggtatggagcaatgcaccgcgtgaggcacccccagatatgccatgcaaggtttggaccaaggtagccagagagcaaccatatggggca

SEQ ID NO: 9900 - DNA, 96 bp, Aspergillus thermomutatus
  misc_feature: 87
tgatttctagggctagcatagtctactaaagataagctcctaggagcagctattttagtattatagactgattctatgtcacgggctagaagccgg

SEQ ID NO: 9901 - DNA, 96 bp, Aspergillus thermomutatus
  misc_feature: 87
tgaggtgggctcgctggtgctgggttagggggagcgttctgctggcgagccacttcggattccaatcgggtgtaagactgctccatttggttgatt

SEQ ID NO: 9902 - DNA, 96 bp, Aspergillus thermomutatus
  misc_feature: 87
tgacgagaagattacaaaaaaagaagaggagaaattaaagaacaagaaagaatgagaagagagaaaagaacaagaatagaaaagaatgagaaggga

SEQ ID NO: 9903 - DNA, 96 bp, Aspergillus thermomutatus
  misc_feature: 87
caggaggaagttgacgagaagattacaaaaaaagaagaggagaaattaaagaacaagaaagaatgagaagagagaaaagaacaagaatagaaaaga

SEQ ID NO: 9904 - DNA, 96 bp, Aspergillus thermomutatus
  misc_feature: 87
tctttcatgtagaagagttaactctctaccttgatcctctatcgcacctacatctatatgattatgatatacattagattctgataatatatctct

SEQ ID NO: 9905 - DNA, 96 bp, Aspergillus thermomutatus
  misc_feature: 87
agaataaggtgaataaggagagaggagaagagaggagatgagaagagaggagatgagaagagatgagaagagaggagaggagatgagaagagaaga

SEQ ID NO: 9906 - DNA, 96 bp, Aspergillus thermomutatus
  misc_feature: 87
atgatataagggaaagagaagattaaagcgaagagagtgaaggaagggatgttgatggacagtgtgataaggtaagggttatttagtttattaaga

SEQ ID NO: 9907 - DNA, 96 bp, Aspergillus thermomutatus
  misc_feature: 87
tctcttctatcttctattactcctataattccccttattcttcctttctgatccattattccttcctttttccttttgaaatccttctatctttct

SEQ ID NO: 9908 - DNA, 96 bp, Aspergillus thermomutatus
  misc_feature: 87
gatagtaaaagagaaggattaggaaataggaatttaaaattaaaaaggagataaaataaggatagattagaggatagggagagagaagggaagaga

SEQ ID NO: 9909 - DNA, 96 bp, Aspergillus thermomutatus
  misc_feature: 87
gagaggagtagagtgagaatgaggataagagtgagggttagtagaaattataggttgtaaaaggaggagggtggaaaagaaggatagaaagagaga

SEQ ID NO: 9910 - DNA, 96 bp, Aspergillus thermomutatus
  misc_feature: 87
aagaatttaaagaagagagaagaaagagggataagagaaagtagattaagaaggttagttagtagagaagggagaaggtaagggtgagtaaggaga

SEQ ID NO: 9911 - DNA, 96 bp, Aspergillus thermomutatus
  misc_feature: 87
ggggcatgatttctagggctagcatagtctactaaagataagctcctaggagcagctattttagtattatagactgattctatgtcacgggctaga

SEQ ID NO: 9912 - DNA, 96 bp, Aspergillus thermomutatus
  misc_feature: 87
tccttattcttccttcttattctattcatctctctatcttatcctcttcctcttcaataatccttatccttattctaatactatctcttactctct

SEQ ID NO: 9913 - DNA, 96 bp, Aspergillus thermomutatus
  misc_feature: 87
tccaatgtgcgctacacaatcattaggtgcgtcttccaatccaatgtatctaccaatgtgcgtttccaatgtttctaatgtgctcagtaagatgag

SEQ ID NO: 9914 - DNA, 96 bp, Aspergillus thermomutatus
  misc_feature: 87
gatgcaaggaaaggccattaggaaaccttgatcttcgatttttcgggccaaacttttctttcgaacggatgctttagacgccatggtcagcaatga

SEQ ID NO: 9915 - DNA, 96 bp, Aspergillus thermomutatus
  misc_feature: 87
tcactcttatcctcattctcactctactcctctctcttatcctcattctaaccctcactccttcctccctctaatcctccctctaatcctccctct

SEQ ID NO: 9916 - DNA, 96 bp, Aspergillus thermomutatus
  misc_feature: 87
tattagtacctatttgtttaataatttaggcttatttagtaaattaggtatactaatatctctattaggtgaaggtttagggggaaatttatctat

SEQ ID NO: 9917 - DNA, 96 bp, Aspergillus thermomutatus
  misc_feature: 87
taatcttccttaatcccttctctctctctattcctcttctactcttatctcctttctttcttcttctctctcttcctatcttcaaatctatcctta

SEQ ID NO: 9918 - DNA, 96 bp, Aspergillus thermomutatus
  misc_feature: 87
acaggaggagcaaggtagagaggtagaggttaatttttaatagtattagaaatgttatatcaatcaattattttaatactaaagaggttttgatta

SEQ ID NO: 9919 - DNA, 96 bp, Aspergillus thermomutatus
  misc_feature: 87
gtgcgatagaggatcaaggtagagagttaactcttctacatgaaagattatctaatagaggttatatagattttagataattaaaattttatatta

SEQ ID NO: 9920 - DNA, 96 bp, Aspergillus thermomutatus
  misc_feature: 87
ctctattccttattcttccttcttattctattcatctctctatcttatcctcttcctcttcaataatccttatccttattctaatactatctctta

SEQ ID NO: 9921 - DNA, 96 bp, Aspergillus thermomutatus
  misc_feature: 87
atatataatattaagcaaggcacggagagaggtaggcagagaggtagggaggtagggagggaggtagggagagaggtaggcgaagaggtaggcgac

SEQ ID NO: 9922 - DNA, 96 bp, Aspergillus thermomutatus
  misc_feature: 87
ggtgccttcctccctaccttatattatacattcttcgctacctcacgcggtgcatctctggggctatgtggggtgtgttgatccctactatactac

SEQ ID NO: 9923 - DNA, 96 bp, Aspergillus thermomutatus
  misc_feature: 87
atgctattcgacgtgctattctacgtgctattctacgtgctattctacgtgctattctacgtgctattctacgtgctattctacgtgctattctac

SEQ ID NO: 9924 - DNA, 96 bp, Aspergillus thermomutatus
  misc_feature: 87
ggtctgccttactgcctctctccctgtcttacatggtgccttcctccctaccttatattatacattcttcgctacctcacgtggtgcatctctggg

SEQ ID NO: 9925 - DNA, 96 bp, Aspergillus thermomutatus
  misc_feature: 87
ctacttctatatctacctcttggatacctctctctatatctctctatctgatttggtggcttatacggtgccttactccccaccattctacctacc

SEQ ID NO: 9926 - DNA, 96 bp, Aspergillus thermomutatus
  misc_feature: 87
ctggatatcatagattatatactgtaaagattacttcttcattaattaattctctaaaaaatagcccattttaatatacaagacccaaagattccc

SEQ ID NO: 9927 - DNA, 96 bp, Aspergillus thermomutatus
  misc_feature: 87
ggcatgatttctagggctagcatagtctactaaagataagctcctaggagcagctattttagtattatagactgattctatgtcacgggctagaag

SEQ ID NO: 9928 - DNA, 96 bp, Aspergillus thermomutatus
  misc_feature: 87
ggatttgatacactctttaccgaggcgagcacaacggatgcaaggaaaggccattaggaaaccttgatcttcgatttttcgggccaaacttttctt

SEQ ID NO: 9929 - DNA, 96 bp, Aspergillus thermomutatus
  misc_feature: 87
gcttcgtctggctggcttgatctggctggcttgatctgtctggctggtctggctgaactctctgagctggtcgggcaggcactccggtgggttcct

SEQ ID NO: 9930 - DNA, 96 bp, Aspergillus thermomutatus
  misc_feature: 87
gctcccttatcctttttctctctggaatatgctcaacttttaactattacataccttctcattcagttatatatcccttatggcatatattccctc

SEQ ID NO: 9931 - DNA, 96 bp, Aspergillus thermomutatus
  misc_feature: 87
gccatgaccatttaccgggcccagaccagtcgtctgaacatggcataccgggtatggcgccccatgttgacaggggttggccggggtccgtactag

SEQ ID NO: 9932 - DNA, 96 bp, Aspergillus thermomutatus
  misc_feature: 87
ctattctatgtgcatcctacatgctattcgacgtgctattctacgtgctattctacgtgctattctacgtgctattctacgtgctattctacgtgc

SEQ ID NO: 9933 - DNA, 96 bp, Aspergillus thermomutatus
  misc_feature: 87
cgcggacaacacttcagcggcgattaaatggacactgttttcgagctgaacaacgcgccaactcacataaattgactaaagctgaagaggaattgc

SEQ ID NO: 9934 - DNA, 96 bp, Aspergillus thermomutatus
  misc_feature: 87
cctcctccttttacaacctataatttctactaaccctcactcttatcctcattctcactctactcctctctcttatcctcattctaaccctcactc

SEQ ID NO: 9935 - DNA, 96 bp, Aspergillus thermomutatus
  misc_feature: 87
cttttacaacctataatttctactaaccctcactcttatcctcattctcactctactcctctctcttatcctcattctaaccctcactccttcctc

SEQ ID NO: 9936 - DNA, 96 bp, Aspergillus thermomutatus
  misc_feature: 87
gagaataaggtgaataaggagagaggagaagagaggagatgagaagagaggagatgagaagagatgagaagagaggagaggagatgagaagagaag

SEQ ID NO: 9937 - DNA, 96 bp, Aspergillus thermomutatus
  misc_feature: 87
gagaagagaggagaggagatgagaagagaagagaacaagaataaatgggaatgaaagagacgaattaatggttaaagataaggacaggaggaagtt

SEQ ID NO: 9938 - DNA, 96 bp, Aspergillus thermomutatus
  misc_feature: 87
gacaggaggagcaaggtagagaggtagaggttaatttttaatagtattagaaatgttatatcaatcaattattttaatactaaagaggttttgatt

SEQ ID NO: 9939 - DNA, 96 bp, Aspergillus thermomutatus
  misc_feature: 87
gaagatagtaaaagagaaggattaggaaataggaatttaaaattaaaaaggagataaaataaggatagattagaggatagggagagagaagggaag

SEQ ID NO: 9940 - DNA, 96 bp, Aspergillus thermomutatus
  misc_feature: 87
aatctactcttctctctctttttcttctctctctttttcttctctctctttttcttctctctctttttcttctctctctctcttttccttttcttc

SEQ ID NO: 9941 - DNA, 96 bp, Aspergillus thermomutatus
  misc_feature: 87
agtaagagaagagaagagaaggaagatagaggttaagtaatcaaagagattagagaaggagatgagatttttaggattagaaaagaaaaaaaaaag

SEQ ID NO: 9942 - DNA, 96 bp, Aspergillus thermomutatus
  misc_feature: 87
cttttcttaaatcctacttcttctctttttttcttctttcttttcttaactcttactttcctctcttttatacccctaatactatctcttattcct

SEQ ID NO: 9943 - DNA, 96 bp, Aspergillus thermomutatus
  misc_feature: 87
cttcgtctggctggcttgatctggctggcttgatctgtctggctggtctggctgaactctctgagctggtcgggcaggcactccggtgggttcctt

SEQ ID NO: 9944 - DNA, 96 bp, Aspergillus thermomutatus
  misc_feature: 87
cttattaacctactctctattccttattcttccttcttattctattcatctctctatcttatcctcttcctcttcaataatccttatccttattct

SEQ ID NO: 9945 - DNA, 96 bp, Aspergillus thermomutatus
  misc_feature: 87
agagagaggagtagagtgagaatgaggataagagtgagggttagtagaaattataggttgtaaaaggaggagggtggaaaagaaggatagaaagag

SEQ ID NO: 9946 - DNA, 96 bp, Aspergillus thermomutatus
  misc_feature: 87
ctccgcgtgctattctatgtgcatcctacatgctattcgacgtgctattctacgtgctattctacgtgctattctacgtgctattctacgtgctat

SEQ ID NO: 9947 - DNA, 96 bp, Aspergillus thermomutatus
  misc_feature: 87
ctacaacgatcggaactttcggatttgatacactctttaccgaggcgagcacaacggatgcaaggaaaggccattaggaaaccttgatcttcgatt

SEQ ID NO: 9948 - DNA, 96 bp, Aspergillus thermomutatus
  misc_feature: 87
ctaatcttccttaatcccttctctctctctattcctcttctactcttatctcctttctttcttcttctctctcttcctatcttcaaatctatcctt

SEQ ID NO: 9949 - DNA, 96 bp, Aspergillus thermomutatus
  misc_feature: 87
cgggcagagaatgaacggaaaagaaagaagaaggcaagaatacgtgctaatctaggtggtgataccattttatctgtacaagaaggccagaatcgt

SEQ ID NO: 9950 - DNA, 96 bp, Aspergillus thermomutatus
  misc_feature: 87
cggacaacacttcagcggcgattaaatggacactgttttcgagctgaacaacgcgccaactcacataaattgactaaagctgaagaggaattgctt

SEQ ID NO: 9951 - DNA, 96 bp, Aspergillus thermomutatus
  misc_feature: 87
acgggcagagaatgaacggaaaagaaagaagaaggcaagaatacgtgctaatctaggtggtgataccattttatctgtacaagaaggccagaatcg

SEQ ID NO: 9952 - DNA, 96 bp, Aspergillus thermomutatus
  misc_feature: 87
ccttttacaacctataatttctactaaccctcactcttatcctcattctcactctactcctctctcttatcctcattctaaccctcactccttcct

SEQ ID NO: 9953 - DNA, 96 bp, Aspergillus thermomutatus
  misc_feature: 87
acacaaggcaggcagaacagcaggcaaaacagcaggcagaacggtaggcagaacggcaggcagaacggtaggcagaacggcaggcagaacggcagg

SEQ ID NO: 9954 - DNA, 96 bp, Aspergillus thermomutatus
  misc_feature: 87
aataaggatagattagaggatagggagagagaagggaagagaagaaagaaaggagataagatttaagaatgaagatagtaagaaaaaggagagagg

SEQ ID NO: 9955 - DNA, 96 bp, Aspergillus thermomutatus
  misc_feature: 87
cctctctatctccctaccccactgtctgcctgtctgcctgtctgcctgtctgcctgtctctctagacgcctctctcaatgatgtgtagtctgccgt

SEQ ID NO: 9956 - DNA, 96 bp, Aspergillus thermomutatus
  misc_feature: 87
cctcactcttatcctcattctcactctactcctctctcttatcctcattctaaccctcactccttcctccctctaatcctccctctaatcctccct

SEQ ID NO: 9957 - DNA, 96 bp, Aspergillus thermomutatus
  misc_feature: 87
atggatcattgacatacaaccaccaagtacttgcagccacaatcgaactgacagaggatccactgattcaaaaaattattgaagcaacaaaaaggg

SEQ ID NO: 9958 - DNA, 96 bp, Aspergillus thermomutatus
  misc_feature: 87
ataaggatagattagaggatagggagagagaagggaagagaagaaagaaaggagataagatttaagaatgaagatagtaagaaaaaggagagaggg

SEQ ID NO: 9959 - DNA, 96 bp, Aspergillus thermomutatus
  misc_feature: 87
ccctaccttatattatacattcttcgctacctcacgtggtgcatctctggggctacgtggggtgtgttgatccctactatactacctgccccatat

SEQ ID NO: 9960 - DNA, 96 bp, Aspergillus thermomutatus
  misc_feature: 87
cagtaggggcatgatttctagggctagcatagtctactaaagataagctcctaggagcagctattttagtattatagactgattctatgtcacggg

SEQ ID NO: 9961 - DNA, 96 bp, Aspergillus thermomutatus
  misc_feature: 87
atatatccatactaattatctttaatctctggtataaccaccctaacttataatatatattaatacctactatgcctcactgcctacctcctgggg

SEQ ID NO: 9962 - DNA, 96 bp, Aspergillus thermomutatus
  misc_feature: 87
caatgcaccgcgtgaggcacccccagatatgccatgcaaggtttggaccaaggtagccagagagcaaccatatggggcaggtagtatagtagggat

SEQ ID NO: 9963 - DNA, 96 bp, Aspergillus thermomutatus
  misc_feature: 87
agaagagaggagaggagatgagaagagaagagaacaagaataaatgggaatgaaagagacgaattaatggttaaagataaggacaggaggaagttg

SEQ ID NO: 9964 - DNA, 96 bp, Aspergillus thermomutatus
  misc_feature: 87
aatagcaggttgaatagcaggttgaatagcaggttgaatagcaggttgaatagcaggttgaatagcaggttgaatagcaggttgaatagcaggttg

SEQ ID NO: 9965 - DNA, 96 bp, Aspergillus thermomutatus
  misc_feature: 87
attccatcttccttcttctctttctctttcttatcctttctattcttaaaataaactatccctccctccttttcttcttctctcttaatatttcct

SEQ ID NO: 9966 - DNA, 96 bp, Aspergillus thermomutatus
  misc_feature: 87
atggtgccttcctccctaccttatattatacattcttcgctacctcacgcggtgcatctctggggctatgtggggtgtgttgatccctactatact

SEQ ID NO: 9967 - DNA, 96 bp, Aspergillus thermomutatus
  misc_feature: 87
atctactcttctctctctttttcttctctctctttttcttctctctctttttcttctctctctttttcttctctctctctcttttccttttcttct

SEQ ID NO: 9968 - DNA, 96 bp, Aspergillus thermomutatus
  misc_feature: 87
atctaccaatgtgcgtttccaatgtttctaatgtgctcagtaagatgaggagcgagttctaatgttacgggctagaccgtaggaaaacctatgact

SEQ ID NO: 9969 - DNA, 96 bp, Aspergillus thermomutatus
  misc_feature: 87
atccaatagcttccagtactgtgaacttcgcgtgctgggcatcgagcttcttgctagggcggtccgttcgtatgttgcgcaggtccaaccatactt

SEQ ID NO: 9970 - DNA, 96 bp, Aspergillus thermomutatus
  misc_feature: 87
aaatcctacttcttctctttttttcttctttcttttcttaactcttactttcctctcttttatacccctaatactatctcttattcctctctttat

SEQ ID NO: 9971 - DNA, 96 bp, Aspergillus thermomutatus
  misc_feature: 87
agatgagatgatataagggaaagagaagattaaagcgaagagagtgaaggaagggatgttgatggacagtgtgataaggtaagggttatttagttt

SEQ ID NO: 9972 - DNA, 96 bp, Aspergillus thermomutatus
  misc_feature: 87
aaaacagcaggcagaacggtaggcagaacggcaggcagaacggtaggcagaacggcaggcagaacggcaggttgaatagcaggttgaatagcaggt

SEQ ID NO: 9973 - DNA, 96 bp, Aspergillus thermomutatus
  misc_feature: 87
aagatgagatgatataagggaaagagaagattaaagcgaagagagtgaaggaagggatgttgatggacagtgtgataaggtaagggttatttagtt

SEQ ID NO: 9974 - DNA, 96 bp, Aspergillus thermomutatus
  misc_feature: 86
ggacaggaggaagttgacgagaagattacaaaaaaagaagaggagaaattaaagaacaagaaagaatgagaagagagaaaagaacaagaatagaaa

SEQ ID NO: 9975 - DNA, 96 bp, Aspergillus thermomutatus
  misc_feature: 86
aagacagagtccttgcgctctatcagagttgccttcgaactagctatcatccgaagtgctttcgacatgcagttctgacaataatccaaaaaccaa

SEQ ID NO: 9976 - DNA, 96 bp, Aspergillus thermomutatus
  misc_feature: 86
atagtaaaagagaaggattaggaaataggaatttaaaattaaaaaggagataaaataaggatagattagaggatagggagagagaagggaagagaa

SEQ ID NO: 9977 - DNA, 96 bp, Aspergillus thermomutatus
  misc_feature: 86
agaatttaaagaagagagaagaaagagggataagagaaagtagattaagaaggttagttagtagagaagggagaaggtaagggtgagtaaggagaa

SEQ ID NO: 9978 - DNA, 96 bp, Aspergillus thermomutatus
  misc_feature: 86
ttctatccttcttttccaccctcctccttttacaacctataatttctactaaccctcactcttatcctcattctcactctactcctctctcttatc

SEQ ID NO: 9979 - DNA, 96 bp, Aspergillus thermomutatus
  misc_feature: 86
ttccttattcttccttcttattctattcatctctctatcttatcctcttcctcttcaataatccttatccttattctaatactatctcttactctc

SEQ ID NO: 9980 - DNA, 96 bp, Aspergillus thermomutatus
  misc_feature: 86
ttcctccctaccttatattatacattcttcgctacctcacgcggtgcatctctggggctatgtggggtgtgttgatccctactatactacctgccc

SEQ ID NO: 9981 - DNA, 96 bp, Aspergillus thermomutatus
  misc_feature: 86
agaagatagtaaaagagaaggattaggaaataggaatttaaaattaaaaaggagataaaataaggatagattagaggatagggagagagaagggaa

SEQ ID NO: 9982 - DNA, 96 bp, Aspergillus thermomutatus
  misc_feature: 86
atgcaaggaaaggccattaggaaaccttgatcttcgatttttcgggccaaacttttctttcgaacggatgctttagacgccatggtcagcaatgaa

SEQ ID NO: 9983 - DNA, 96 bp, Aspergillus thermomutatus
  misc_feature: 86
tagcaggttgaatagcaggttgaatagcaggttgaatagcaggttgaatagcaggttgaatagcaggttgaatagcaggttgaatagcaggttgaa

SEQ ID NO: 9984 - DNA, 96 bp, Aspergillus thermomutatus
  misc_feature: 86
actcttatcctcattctcactctactcctctctcttatcctcattctaaccctcactccttcctccctctaatcctccctctaatcctccctctaa

SEQ ID NO: 9985 - DNA, 96 bp, Aspergillus thermomutatus
  misc_feature: 86
tgcaaggaaaggccattaggaaaccttgatcttcgatttttcgggccaaacttttctttcgaacggatgctttagacgccatggtcagcaatgaag

SEQ ID NO: 9986 - DNA, 96 bp, Aspergillus thermomutatus
  misc_feature: 86
tcacctctctatctacctctctatctccctaccccactgtctgcctgtctgcctgtctgcctgtctgcctgtctctctacctcactgcctacctca

SEQ ID NO: 9987 - DNA, 96 bp, Aspergillus thermomutatus
  misc_feature: 86
tatctactcttctaatcttccttaatcccttctctctctctattcctcttctactcttatctcctttctttcttcttctctctcttcctatcttca

SEQ ID NO: 9988 - DNA, 96 bp, Aspergillus thermomutatus
  misc_feature: 86
tcttctaatcttccttaatcccttctctctctctattcctcttctactcttatctcctttctttcttcttctctctcttcctatcttcaaatctat

SEQ ID NO: 9989 - DNA, 96 bp, Aspergillus thermomutatus
  misc_feature: 86
aagatagtaaaagagaaggattaggaaataggaatttaaaattaaaaaggagataaaataaggatagattagaggatagggagagagaagggaaga

SEQ ID NO: 9990 - DNA, 96 bp, Aspergillus thermomutatus
  misc_feature: 86
cttactgagcacattagaaacattggaaacgcacattggtagatacattggattggaagacgcacctaatgattgtgtagcgcacattggaacaga

SEQ ID NO: 9991 - DNA, 96 bp, Aspergillus thermomutatus
  misc_feature: 86
cggagagaggtaggcagagaggtagggaggtagggagggaggtagagaggcaccataggaggtatggagcaatgcaccgcgtgaggcacccccaga

SEQ ID NO: 9992 - DNA, 96 bp, Aspergillus thermomutatus
  misc_feature: 86
tctgcctgtctgcctgtctgcctgtctgcctgtctctctacctcactgcctacctcatgtcggacctctttgtgggcctatctgcctgcctccgcg

SEQ ID NO: 9993 - DNA, 96 bp, Aspergillus thermomutatus
  misc_feature: 86
tctctctctattcctcttctactcttatctcctttctttcttcttctctctcttcctatcttcaaatctatccttattttaactcctatttaatta

SEQ ID NO: 9994 - DNA, 96 bp, Aspergillus thermomutatus
  misc_feature: 86
aagattagaagagtagatagtaagggataggataggataggaaaaaagaaaagatttagaaatagaagattaaaggtaaagaggaagggatagaga

SEQ ID NO: 9995 - DNA, 96 bp, Aspergillus thermomutatus
  misc_feature: 86
tctatccttcttttccaccctcctccttttacaacctataatttctactaaccctcactcttatcctcattctcactctactcctctctcttatcc

SEQ ID NO: 9996 - DNA, 96 bp, Aspergillus thermomutatus
  misc_feature: 86
tattcacctctctattcacctctctatctacctctctatctccctaccccactgtctgcctgtctgcctgtctgcctgtctgcctgtctctctaga

SEQ ID NO: 9997 - DNA, 96 bp, Aspergillus thermomutatus
  misc_feature: 86
tctacttctatatctacctcttggatacctctctctatatctctctatctgatttggtggcttatacggtgccttactccccaccattctacctac

SEQ ID NO: 9998 - DNA, 96 bp, Aspergillus thermomutatus
  misc_feature: 86
tctactcttctctctctttttcttctctctctttttcttctctctctttttcttctctctctttttcttctctctctctcttttccttttcttctt

SEQ ID NO: 9999 - DNA, 96 bp, Aspergillus thermomutatus
  misc_feature: 86
tctacgtgctattctacgtgctattctacgtgctattctacgtgctattctacgtgctattctacatgctattcgacgtgctattctatgtgctat

SEQ ID NO: 10000 - DNA, 96 bp, Aspergillus thermomutatus
  misc_feature: 86
caatgtgcgctacacaatcattaggtgcgtcttccaatccaatgtatctaccaatgtgcgtttccaatgtttctaatgtgctcagtaagatgagga

SEQ ID NO: 10001 - DNA, 96 bp, Aspergillus thermomutatus
  misc_feature: 86
tcacctctctattcacctctctatctacctctctatctccctaccccactgtctgcctgtctgcctgtctgcctgtctgcctgtctctctagacgc

SEQ ID NO: 10002 - DNA, 96 bp, Aspergillus thermomutatus
  misc_feature: 86
gaagagaggagaggagatgagaagagaagagaacaagaataaatgggaatgaaagagacgaattaatggttaaagataaggacaggaggaagttga

SEQ ID NO: 10003 - DNA, 96 bp, Aspergillus thermomutatus
  misc_feature: 86
atagcaggttgaatagcaggttgaatagcaggttgaatagcaggttgaatagcaggttgaatagcaggttgaatagcaggttgaatagcaggttga

SEQ ID NO: 10004 - DNA, 96 bp, Aspergillus thermomutatus
  misc_feature: 86
tattctatgtgcatcctacatgctattcgacgtgctattctacgtgctattctacgtgctattctacgtgctattctacgtgctattctacgtgct

SEQ ID NO: 10005 - DNA, 96 bp, Aspergillus thermomutatus
  misc_feature: 86
actgaatgagaaggtatgtaatagttaaaagttgagcatattccagagagaaaaaggataagggagcagaaggatatatagagaagaagtataata

SEQ ID NO: 10006 - DNA, 96 bp, Aspergillus thermomutatus
  misc_feature: 86
tatgtgcatcctacatgctattcgacgtgctattctacgtgctattctacgtgctattctacgtgctattctacgtgctattctacgtgctattct

SEQ ID NO: 10007 - DNA, 96 bp, Aspergillus thermomutatus
  misc_feature: 86
tatcttcattcttaaatcttatctcctttctttcttctcttcccttctctctccctatcctctaatctatccttattttatctcctttttaatttt

SEQ ID NO: 10008 - DNA, 96 bp, Aspergillus thermomutatus
  misc_feature: 86
gagagaggtaggcagagaggtagggaggtagggagggaggtagagaggcaccataggaggtatggagcaatgcaccgcgtgaggcacccccagata

SEQ ID NO: 10009 - DNA, 96 bp, Aspergillus thermomutatus
  misc_feature: 86
gataatctttcatgtagaagagttaactctctaccttgatcctctatcgcacctacatctatatgattatgatatacattagattctgataatata

SEQ ID NO: 10010 - DNA, 96 bp, Aspergillus thermomutatus
  misc_feature: 86
ataactgaatgagaaggtatgtaatagttaaaagttgagcatattccagagagaaaaaggataagggagcagaaggatatatagagaagaagtata

SEQ ID NO: 10011 - DNA, 96 bp, Aspergillus thermomutatus
  misc_feature: 86
tataactgaatgagaaggtatgtaatagttaaaagttgagcatattccagagagaaaaaggataagggagcagaaggatatatagagaagaagtat

SEQ ID NO: 10012 - DNA, 96 bp, Aspergillus thermomutatus
  misc_feature: 86
cgccatgaccatttaccgggcccagaccagtcgtctgaacatggcataccgggtatggcgccccatgttgacaggggttggccggggtccgtacta

SEQ ID NO: 10013 - DNA, 96 bp, Aspergillus thermomutatus
  misc_feature: 86
ctctctattcctcttctactcttatctcctttctttcttcttctctctcttcctatcttcaaatctatccttattttaactcctatttaattacta

SEQ ID NO: 10014 - DNA, 96 bp, Aspergillus thermomutatus
  misc_feature: 86
atctacttctatatctacctcttggatacctctctctatatctctctatctgatttggtggcttatacggtgccttactccccaccattctaccta

SEQ ID NO: 10015 - DNA, 96 bp, Aspergillus thermomutatus
  misc_feature: 86
cctccgcgtgctattctatgtgcatcctacatgctattcgacgtgctattctacgtgctattctacgtgctattctacgtgctattctacgtgcta

SEQ ID NO: 10016 - DNA, 96 bp, Aspergillus thermomutatus
  misc_feature: 86
ctcttctaatcttccttaatcccttctctctctctattcctcttctactcttatctcctttctttcttcttctctctcttcctatcttcaaatcta

SEQ ID NO: 10017 - DNA, 96 bp, Aspergillus thermomutatus
  misc_feature: 86
tactatctactcttctaatcttccttaatcccttctctctctctattcctcttctactcttatctcctttctttcttcttctctctcttcctatct

SEQ ID NO: 10018 - DNA, 96 bp, Aspergillus thermomutatus
  misc_feature: 86
tacgtgctattctacgtgctattctacgtgctattctacgtgctattctacgtgctattctacatgctattcgacgtgctattctatgtgctattc

SEQ ID NO: 10019 - DNA, 96 bp, Aspergillus thermomutatus
  misc_feature: 86
taatctttcatgtagaagagttaactctctaccttgatcctctatcgcacctacatctatatgattatgatatacattagattctgataatatatc

SEQ ID NO: 10020 - DNA, 96 bp, Aspergillus thermomutatus
  misc_feature: 86
gttctacgggcagagaatgaacggaaaagaaagaagaaggcaagaatacgtgctaatctaggtggtgataccattttatctgtacaagaaggccag

SEQ ID NO: 10021 - DNA, 96 bp, Aspergillus thermomutatus
  misc_feature: 86
ctctctctattcctcttctactcttatctcctttctttcttcttctctctcttcctatcttcaaatctatccttattttaactcctatttaattac

SEQ ID NO: 10022 - DNA, 96 bp, Aspergillus thermomutatus
  misc_feature: 86
ccaatgtatctaccaatgtgcgtttccaatgtttctaatgtgctcagtaagatgaggagcgagttctaatgttacgggctagaccgtaggaaaacc

SEQ ID NO: 10023 - DNA, 96 bp, Aspergillus thermomutatus
  misc_feature: 86
gggagggatagaaagaggattagagggaggattagaaagaggattagagggaggattagagggaggattagagggaggattagagggaggaaggag

SEQ ID NO: 10024 - DNA, 96 bp, Aspergillus thermomutatus
  misc_feature: 86
ggagagaggtaggcagagaggtagggaggtagggagggaggtagagaggcaccataggaggtatggagcaatgcaccgcgtgaggcacccccagat

SEQ ID NO: 10025 - DNA, 96 bp, Aspergillus thermomutatus
  misc_feature: 86
ccgcgcgcgcgagcattaggcggcagcggtccggggcaggccagcaggcaggggggcgcgcgcgcggcggtgaccagttggccggggccctcgagc

SEQ ID NO: 10026 - DNA, 96 bp, Aspergillus thermomutatus
  misc_feature: 86
aggcaaaacagcaggcagaacggtaggcagaacggcaggcagaacggtaggcagaacggcaggcagaacggcaggttgaatagcaggttgaatagc

SEQ ID NO: 10027 - DNA, 96 bp, Aspergillus thermomutatus
  misc_feature: 86
gcaaaacagcaggcagaacggtaggcagaacggcaggcagaacggtaggcagaacggcaggcagaacggcaggttgaatagcaggttgaatagcag

SEQ ID NO: 10028 - DNA, 96 bp, Aspergillus thermomutatus
  misc_feature: 86
gatggcagttactgcatcgtggtggcgcacgctttctgggaactgattccactaagtccattgcctgcatagctccttgagcaagttgctgacttt

SEQ ID NO: 10029 - DNA, 96 bp, Aspergillus thermomutatus
  misc_feature: 86
gatccaatagcttccagtactgtgaacttcgcgtgctgggcatcgagcttcttgctagggcggtccgttcgtatgttgcgcaggtccaaccatact

SEQ ID NO: 10030 - DNA, 96 bp, Aspergillus thermomutatus
  misc_feature: 86
gataaggacaggaggaagttgacgagaagattacaaaaaaagaagaggagaaattaaagaacaagaaagaatgagaagagagaaaagaacaagaat

SEQ ID NO: 10031 - DNA, 96 bp, Aspergillus thermomutatus
  misc_feature: 86
gagggagggatagaaagaggattagagggaggattagaaagaggattagagggaggattagagggaggattagagggaggattagagggaggaagg

SEQ ID NO: 10032 - DNA, 96 bp, Aspergillus thermomutatus
  misc_feature: 86
ctcactcttatcctcattctcactctactcctctctcttatcctcattctaaccctcactccttcctccctctaatcctccctctaatcctccctc

SEQ ID NO: 10033 - DNA, 96 bp, Aspergillus thermomutatus
  misc_feature: 86
gaggccaacaggaaagaaaggaacaaaagagtgatcgcagaagtgaatgaaaaggaagggaagaaaagagaaacaaaatgaaaaaagaaaatgcag

SEQ ID NO: 10034 - DNA, 96 bp, Aspergillus thermomutatus
  misc_feature: 86
gagcaatgcaccgcgtgaggcacccccagatatgccatgcaaggtttggaccaaggtagccagagagcaaccatatggggcaggtagtatagtagg

SEQ ID NO: 10035 - DNA, 96 bp, Aspergillus thermomutatus
  misc_feature: 86
gaatttaaagaagagagaagaaagagggataagagaaagtagattaagaaggttagttagtagagaagggagaaggtaagggtgagtaaggagaag

SEQ ID NO: 10036 - DNA, 96 bp, Aspergillus thermomutatus
  misc_feature: 86
gaatagcaggttgaatagcaggttgaatagcaggttgaatagcaggttgaatagcaggttgaatagcaggttgaatagcaggttgaatagcaggtt

SEQ ID NO: 10037 - DNA, 96 bp, Aspergillus thermomutatus
  misc_feature: 86
gaagattagaagagtagatagtaagggataggataggataggaaaaaagaaaagatttagaaatagaagattaaaggtaaagaggaagggatagag

SEQ ID NO: 10038 - DNA, 96 bp, Aspergillus thermomutatus
  misc_feature: 86
gaagaggtaggcgacgaggtaggcgacgaggtaggtgaagaggtaggtgaagaggtaggtgaagaggtaggtgaagaggtaggtgaagaggtaggt

SEQ ID NO: 10039 - DNA, 96 bp, Aspergillus thermomutatus
  misc_feature: 86
cttggtctgccttactgcctctctccctgtcttacatggtgccttcctccctaccttatattatacattcttcgctacctcacgtggtgcatctct

SEQ ID NO: 10040 - DNA, 96 bp, Aspergillus thermomutatus
  misc_feature: 86
acggagagaggtaggcagagaggtagggaggtagggagggaggtagagaggcaccataggaggtatggagcaatgcaccgcgtgaggcacccccag

SEQ ID NO: 10041 - DNA, 96 bp, Aspergillus thermomutatus
  misc_feature: 86
ctgcctgtctgcctgtctgcctgtctgcctgtctctctacctcactgcctacctcatgtcggacctctttgtgggcctatctgcctgcctccgcgt

SEQ ID NO: 10042 - DNA, 96 bp, Aspergillus thermomutatus
  misc_feature: 86
ataagggggatgggggaagttaatgagaaattagaagaaagaagaggagaggagaaggaaagaaaagagaaacagaggagggaaagaagggaagag

SEQ ID NO: 10043 - DNA, 96 bp, Aspergillus thermomutatus
  misc_feature: 86
ctctctttcccttctaaattccatcttccttcttctctttctctttcttatcctttctattcttaaaataaactatccctccctccttttcttctt

SEQ ID NO: 10044 - DNA, 96 bp, Aspergillus thermomutatus
  misc_feature: 86
cagcaatgaagaaacacaacatggtgagggcaacgagcacctaccaggagggagtccagccttataaggtgtttcgaggacgaaacgctaagagag

SEQ ID NO: 10045 - DNA, 96 bp, Aspergillus thermomutatus
  misc_feature: 86
ctctctctctattcctcttctactcttatctcctttctttcttcttctctctcttcctatcttcaaatctatccttattttaactcctatttaatt

SEQ ID NO: 10046 - DNA, 96 bp, Aspergillus thermomutatus
  misc_feature: 86
agattagaagagtagatagtaagggataggataggataggaaaaaagaaaagatttagaaatagaagattaaaggtaaagaggaagggatagagag

SEQ ID NO: 10047 - DNA, 96 bp, Aspergillus thermomutatus
  misc_feature: 86
ccgccgcgcgcgcgagcattaggcggcagcggtccggggcaggccagcaggcaggggggcgcgcgcgcggcggtgaccagttggccggggccctcg

SEQ ID NO: 10048 - DNA, 96 bp, Aspergillus thermomutatus
  misc_feature: 86
cctgtctgcctgtctgcctgtctgcctgtctctctacctcactgcctacctcatgtcggacctctttgtgggcctatctgcctgcctccgcgtgct

SEQ ID NO: 10049 - DNA, 96 bp, Aspergillus thermomutatus
  misc_feature: 86
cctgggcctgctcccaggcctgcatcacctcatcgaccgcagcctggacatggtgggtcgatggggccggtggacacccgtctggaacgcgaatat

SEQ ID NO: 10050 - DNA, 96 bp, Aspergillus thermomutatus
  misc_feature: 86
cctctctatctacctctctatctccctaccccactgtctgcctgtctgcctgtctgcctgtctgcctgtctctctacctcactgcctacctcatgt

SEQ ID NO: 10051 - DNA, 96 bp, Aspergillus thermomutatus
  misc_feature: 86
aatagaataagaaggaagaataaggaatagagagtaggttaataagtaagggtaagagataattaatagagataggggaaagaggaatgataaggg

SEQ ID NO: 10052 - DNA, 96 bp, Aspergillus thermomutatus
  misc_feature: 86
agcaatgcaccgcgtgaggcacccccagatatgccatgcaaggtttggaccaaggtagccagagagcaaccatatggggcaggtagtatagtaggg

SEQ ID NO: 10053 - DNA, 96 bp, Aspergillus thermomutatus
  misc_feature: 86
cagataaaatggtatcaccacctagattagcacgtattcttgccttcttctttcttttccgttcattctctgcccgtagaaccctgatttcttgtt

SEQ ID NO: 10054 - DNA, 96 bp, Aspergillus thermomutatus
  misc_feature: 86
aagaggtaggcgacgaggtaggcgacgaggtaggtgaagaggtaggtgaagaggtaggtgaagaggtaggtgaagaggtaggtgaagaggtaggtg

SEQ ID NO: 10055 - DNA, 96 bp, Aspergillus thermomutatus
  misc_feature: 86
attccttctctctcttcatgtctatattccctttactttactaaatcctcttctcatcttccctctctctcttaaattctttcttaaactattaat

SEQ ID NO: 10056 - DNA, 96 bp, Aspergillus thermomutatus
  misc_feature: 86
aactgaatgagaaggtatgtaatagttaaaagttgagcatattccagagagaaaaaggataagggagcagaaggatatatagagaagaagtataat

SEQ ID NO: 10057 - DNA, 96 bp, Aspergillus thermomutatus
  misc_feature: 86
agataatctttcatgtagaagagttaactctctaccttgatcctctatcgcacctacatctatatgattatgatatacattagattctgataatat

SEQ ID NO: 10058 - DNA, 96 bp, Aspergillus thermomutatus
  misc_feature: 86
ataatctttcatgtagaagagttaactctctaccttgatcctctatcgcacctacatctatatgattatgatatacattagattctgataatatat

SEQ ID NO: 10059 - DNA, 96 bp, Aspergillus thermomutatus
  misc_feature: 86
acctctctattcacctctctatctacctctctatctccctaccccactgtctgcctgtctgcctgtctgcctgtctgcctgtctctctagacgcct

SEQ ID NO: 10060 - DNA, 96 bp, Aspergillus thermomutatus
  misc_feature: 86
aggccaacaggaaagaaaggaacaaaagagtgatcgcagaagtgaatgaaaaggaagggaagaaaagagaaacaaaatgaaaaaagaaaatgcagt

SEQ ID NO: 10061 - DNA, 96 bp, Aspergillus thermomutatus
  misc_feature: 86
agcttacagtaggggcatgatttctagggctagcatagtctactaaagataagctcctaggagcagctattttagtattatagactgattctatgt

SEQ ID NO: 10062 - DNA, 96 bp, Aspergillus thermomutatus
  misc_feature: 86
aatctttcatgtagaagagttaactctctaccttgatcctctatcgcacctacatctatatgattatgatatacattagattctgataatatatct

SEQ ID NO: 10063 - DNA, 96 bp, Aspergillus thermomutatus
  misc_feature: 85
gataaggaggataaagggatgtgaaggaaaggaagatgttaataagaagtaagtataagagtaaggattagtgattttagaaataaaggagtaaaa

SEQ ID NO: 10064 - DNA, 96 bp, Aspergillus thermomutatus
  misc_feature: 85
tttcggatttgatacactctttaccgaggcgagcacaacggatgcaaggaaaggccattaggaaaccttgatcttcgatttttcgggccaaacttt

SEQ ID NO: 10065 - DNA, 96 bp, Aspergillus thermomutatus
  misc_feature: 85
agataaggaggataaagggatgtgaaggaaaggaagatgttaataagaagtaagtataagagtaaggattagtgattttagaaataaaggagtaaa

SEQ ID NO: 10066 - DNA, 96 bp, Aspergillus thermomutatus
  misc_feature: 85
ttggtctgccttactgcctctctccctgtcttacatggtgccttcctccctaccttatattatacattcttcgctacctcacgtggtgcatctctg

SEQ ID NO: 10067 - DNA, 96 bp, Aspergillus thermomutatus
  misc_feature: 85
ttgatggcagttactgcatcgtggtggcgcacgctttctgggaactgattccactaagtccattgcctgcatagctccttgagcaagttgctgact

SEQ ID NO: 10068 - DNA, 96 bp, Aspergillus thermomutatus
  misc_feature: 85
taactgaatgagaaggtatgtaatagttaaaagttgagcatattccagagagaaaaaggataagggagcagaaggatatatagagaagaagtataa

SEQ ID NO: 10069 - DNA, 96 bp, Aspergillus thermomutatus
  misc_feature: 85
tacttcttctctttttttcttctttcttttcttaactcttactttcctctcttttatacccctaatactatctcttattcctctctttatctctaa

SEQ ID NO: 10070 - DNA, 96 bp, Aspergillus thermomutatus
  misc_feature: 85
tactgagcacattagaaacattggaaacgcacattggtagatacattggattggaagacgcacctaatgattgtgtagcgcacattggaacagaca

SEQ ID NO: 10071 - DNA, 96 bp, Aspergillus thermomutatus
  misc_feature: 85
aggtaggcagagaggtagggaggtagggagggaggtagagaggcaccataggaggtatggagcaatgcaccgcgtgaggcacccccagatatgcca

SEQ ID NO: 10072 - DNA, 96 bp, Aspergillus thermomutatus
  misc_feature: 85
tgcctgtctgcctgtctgcctgtctgcctgtctctctacctcactgcctacctcatgtcggacctctttgtgggcctatctgcctgcctccgcgtg

SEQ ID NO: 10073 - DNA, 96 bp, Aspergillus thermomutatus
  misc_feature: 85
tgcatctctggggctatgtggggtgtgttgatccctactatactacctgccccatatggttgctctctggctaccttggtccaaaccttgcatggc

SEQ ID NO: 10074 - DNA, 96 bp, Aspergillus thermomutatus
  misc_feature: 85
tgatggcagttactgcatcgtggtggcgcacgctttctgggaactgattccactaagtccattgcctgcatagctccttgagcaagttgctgactt

SEQ ID NO: 10075 - DNA, 96 bp, Aspergillus thermomutatus
  misc_feature: 85
cttacagtaggggcatgatttctagggctagcatagtctactaaagataagctcctaggagcagctattttagtattatagactgattctatgtca

SEQ ID NO: 10076 - DNA, 96 bp, Aspergillus thermomutatus
  misc_feature: 85
tgaatagcacgcggaggcaggcagataggcccacaaagaggtccgacatgaggtaggcagtgaggtagagagacaggcagacaggcagacaggcag

SEQ ID NO: 10077 - DNA, 96 bp, Aspergillus thermomutatus
  misc_feature: 85
tataagggggatgggggaagttaatgagaaattagaagaaagaagaggagaggagaaggaaagaaaagagaaacagaggagggaaagaagggaaga

SEQ ID NO: 10078 - DNA, 96 bp, Aspergillus thermomutatus
  misc_feature: 85
gcaaggaaaggccattaggaaaccttgatcttcgatttttcgggccaaacttttctttcgaacggatgctttagacgccatggtcagcaatgaaga

SEQ ID NO: 10079 - DNA, 96 bp, Aspergillus thermomutatus
  misc_feature: 85
tcttattctcttcttattttcctcttgttcttattctcttctctttctctttgattctccctcttctctcttgacctctcttctcttggcctctct

SEQ ID NO: 10080 - DNA, 96 bp, Aspergillus thermomutatus
  misc_feature: 85
gaatgagaaggtatgtaatagttaaaagttgagcatattccagagagaaaaaggataagggagcagaaggatatatagagaagaagtataataaga

SEQ ID NO: 10081 - DNA, 96 bp, Aspergillus thermomutatus
  misc_feature: 85
tcagcaatgaagaaacacaacatggtgagggcaacgagcacctaccaggagggagtccagccttataaggtgtttcgaggacgaaacgctaagaga

SEQ ID NO: 10082 - DNA, 96 bp, Aspergillus thermomutatus
  misc_feature: 85
tctctatctacctctctatctccctaccccactgtctgcctgtctgcctgtctgcctgtctgcctgtctctctacctcactgcctacctcatgtcg

SEQ ID NO: 10083 - DNA, 96 bp, Aspergillus thermomutatus
  misc_feature: 85
tctccttcttattctcttcttattttcctcttgttcttattctcttctctttctctttgattctccctcttctctcttgacctctcttctcttggc

SEQ ID NO: 10084 - DNA, 96 bp, Aspergillus thermomutatus
  misc_feature: 85
cgccgcgcgcgcgagcattaggcggcagcggtccggggcaggccagcaggcaggggggcgcgcgcgcggcggtgaccagttggccggggccctcga

SEQ ID NO: 10085 - DNA, 96 bp, Aspergillus thermomutatus
  misc_feature: 85
agagagaagaagaaagaaaggagataagagtagaagaggaatagagagagagaagggattaaggaagattagaagagtagatagtaagggatagga

SEQ ID NO: 10086 - DNA, 96 bp, Aspergillus thermomutatus
  misc_feature: 85
tccgcgtgctattctatgtgcatcctacatgctattcgacgtgctattctacgtgctattctacgtgctattctacgtgctattctacgtgctatt

SEQ ID NO: 10087 - DNA, 96 bp, Aspergillus thermomutatus
  misc_feature: 85
taaggatagattagaggatagggagagagaagggaagagaagaaagaaaggagataagatttaagaatgaagatagtaagaaaaaggagagaggga

SEQ ID NO: 10088 - DNA, 96 bp, Aspergillus thermomutatus
  misc_feature: 85
tccatcttccttcttctctttctctttcttatcctttctattcttaaaataaactatccctccctccttttcttcttctctcttaatatttcctcc

SEQ ID NO: 10089 - DNA, 96 bp, Aspergillus thermomutatus
  misc_feature: 85
tcaaccaaatggagcagtcttacacccgattggaatccgaagtggctcgccagcagaacgctccccctaacccagcaccagcgagcccacctcaag

SEQ ID NO: 10090 - DNA, 96 bp, Aspergillus thermomutatus
  misc_feature: 85
tatctacttctatatctacctcttggatacctctctctatatctctctatctgatttggtggcttatacggtgccttactccccaccattctacct

SEQ ID NO: 10091 - DNA, 96 bp, Aspergillus thermomutatus
  misc_feature: 85
tatatccatactaattatctttaatctctggtataaccaccctaacttataatatatattaatacctactatgcctcactgcctacctcctggggt

SEQ ID NO: 10092 - DNA, 96 bp, Aspergillus thermomutatus
  misc_feature: 85
tagcttacagtaggggcatgatttctagggctagcatagtctactaaagataagctcctaggagcagctattttagtattatagactgattctatg

SEQ ID NO: 10093 - DNA, 96 bp, Aspergillus thermomutatus
  misc_feature: 85
catgctattcgacgtgctattctacgtgctattctacgtgctattctacgtgctattctacgtgctattctacgtgctattctacgtgctattcta

SEQ ID NO: 10094 - DNA, 96 bp, Aspergillus thermomutatus
  misc_feature: 85
tactgcctctctccctgtcttacatggtgccttcctccctaccttatattatacattcttcgctacctcacgcggtgcatctctggggctatgtgg

SEQ ID NO: 10095 - DNA, 96 bp, Aspergillus thermomutatus
  misc_feature: 85
tactaaatcctcttctcatcttccctctctctcttaaattctttcttaaactattaattcctctctctttctcactccctcttcctcctttcttgc

SEQ ID NO: 10096 - DNA, 96 bp, Aspergillus thermomutatus
  misc_feature: 85
tacgtgctattctacgtgctattctacgtgctattctacgtgctattctacgtgctattctacgtgctattctacatgctattcgacgtgctattc

SEQ ID NO: 10097 - DNA, 96 bp, Aspergillus thermomutatus
  misc_feature: 85
tacgggcagagaatgaacggaaaagaaagaagaaggcaagaatacgtgctaatctaggtggtgataccattttatctgtacaagaaggccagaatc

SEQ ID NO: 10098 - DNA, 96 bp, Aspergillus thermomutatus
  misc_feature: 85
taatttctactaaccctcactcttatcctcattctcactctactcctctctcttatcctcattctaaccctcactccttcctccctctaatcctcc

SEQ ID NO: 10099 - DNA, 96 bp, Aspergillus thermomutatus
  misc_feature: 85
ccattccttctctctcttcatgtctatattccctttactttactaaatcctcttctcatcttccctctctctcttaaattctttcttaaactatta

SEQ ID NO: 10100 - DNA, 96 bp, Aspergillus thermomutatus
  misc_feature: 85
gagaaggtatgtaatagttaaaagttgagcatattccagagagaaaaaggataagggagcagaaggatatatagagaagaagtataataagattta

SEQ ID NO: 10101 - DNA, 96 bp, Aspergillus thermomutatus
  misc_feature: 85
gtgcatctctggggctatgtggggtgtgttgatccctactatactacctgccccatatggttgctctctggctaccttggtccaaaccttgcatgg

SEQ ID NO: 10102 - DNA, 96 bp, Aspergillus thermomutatus
  misc_feature: 85
gtataagggggatgggggaagttaatgagaaattagaagaaagaagaggagaggagaaggaaagaaaagagaaacagaggagggaaagaagggaag

SEQ ID NO: 10103 - DNA, 96 bp, Aspergillus thermomutatus
  misc_feature: 85
gtaggtgcgatagaggatcaaggtagagagttaactcttctacatgaaagattatctaatagaggttatatagattttagataattaaaattttat

SEQ ID NO: 10104 - DNA, 96 bp, Aspergillus thermomutatus
  misc_feature: 85
cccttactctatcttatccaaaactaactaacccttactctatcttatctaaaactaactaaccctgactctatcctatttaaaactaccccttac

SEQ ID NO: 10105 - DNA, 96 bp, Aspergillus thermomutatus
  misc_feature: 85
aaggcacggagagaggtaggcagagaggtagggaggtagggagggaggtagagaggcaccataggaggtatggagcaatgcaccgcgtgaggcacc

SEQ ID NO: 10106 - DNA, 96 bp, Aspergillus thermomutatus
  misc_feature: 85
atatctacttctatatctacctcttggatacctctctctatatctctctatctgatttggtggcttatacggtgccttactccccaccattctacc

SEQ ID NO: 10107 - DNA, 96 bp, Aspergillus thermomutatus
  misc_feature: 85
aggcacggagagaggtaggcagagaggtagggaggtagggagggaggtagagaggcaccataggaggtatggagcaatgcaccgcgtgaggcaccc

SEQ ID NO: 10108 - DNA, 96 bp, Aspergillus thermomutatus
  misc_feature: 85
cacctctctattcacctctctatctacctctctatctccctaccccactgtctgcctgtctgcctgtctgcctgtctgcctgtctctctagacgcc

SEQ ID NO: 10109 - DNA, 96 bp, Aspergillus thermomutatus
  misc_feature: 85
gaggtaggcagagaggtagggaggtagggagggaggtagagaggcaccataggaggtatggagcaatgcaccgcgtgaggcacccccagatatgcc

SEQ ID NO: 10110 - DNA, 96 bp, Aspergillus thermomutatus
  misc_feature: 85
ctctgtcagttcgattgtggctgcaagtacttggtggttgtatgtcaatgatccatcactgttttgtcgaagaattgctggctcgactgtttttcc

SEQ ID NO: 10111 - DNA, 96 bp, Aspergillus thermomutatus
  misc_feature: 85
gcatgatttctagggctagcatagtctactaaagataagctcctaggagcagctattttagtattatagactgattctatgtcacgggctagaagc

SEQ ID NO: 10112 - DNA, 96 bp, Aspergillus thermomutatus
  misc_feature: 85
gctattctatgtgcatcctacatgctattcgacgtgctattctacgtgctattctacgtgctattctacgtgctattctacgtgctattctacgtg

SEQ ID NO: 10113 - DNA, 96 bp, Aspergillus thermomutatus
  misc_feature: 85
gcctgtctgcctgtctgcctgtctgcctgtctctctacctcactgcctacctcatgtcggacctctttgtgggcctatctgcctgcctccgcgtgc

SEQ ID NO: 10114 - DNA, 96 bp, Aspergillus thermomutatus
  misc_feature: 85
gcctgcctccgcgtgctattctatgtgcatcctacatgctattcgacgtgctattctacgtgctattctacgtgctattctacgtgctattctacg

SEQ ID NO: 10115 - DNA, 96 bp, Aspergillus thermomutatus
  misc_feature: 85
gccgcgcgcgcgagcattaggcggcagcggtccggggcaggccagcaggcaggggggcgcgcgcgcggcggtgaccagttggccggggccctcgag

SEQ ID NO: 10116 - DNA, 96 bp, Aspergillus thermomutatus
  misc_feature: 85
ccttcctccctaccttatattatacattcttcgctacctcacgcggtgcatctctggggctatgtggggtgtgttgatccctactatactacctgc

SEQ ID NO: 10117 - DNA, 96 bp, Aspergillus thermomutatus
  misc_feature: 85
ctctctatctacctctctatctccctaccccactgtctgcctgtctgcctgtctgcctgtctgcctgtctctctacctcactgcctacctcatgtc

SEQ ID NO: 10118 - DNA, 96 bp, Aspergillus thermomutatus
  misc_feature: 85
ccgcgtgctattctatgtgcatcctacatgctattcgacgtgctattctacgtgctattctacgtgctattctacgtgctattctacgtgctattc

SEQ ID NO: 10119 - DNA, 96 bp, Aspergillus thermomutatus
  misc_feature: 85
gaataaggtgaataaggagagaggagaagagaggagatgagaagagaggagatgagaagagatgagaagagaggagaggagatgagaagagaagag

SEQ ID NO: 10120 - DNA, 96 bp, Aspergillus thermomutatus
  misc_feature: 85
ctatctactcttctaatcttccttaatcccttctctctctctattcctcttctactcttatctcctttctttcttcttctctctcttcctatcttc

SEQ ID NO: 10121 - DNA, 96 bp, Aspergillus thermomutatus
  misc_feature: 85
ctgcttcgtctggctggcttgatctggctggcttgatctgtctggctggtctggctgaactctctgagctggtcgggcaggcactccggtgggttc

SEQ ID NO: 10122 - DNA, 96 bp, Aspergillus thermomutatus
  misc_feature: 85
ctttcggatttgatacactctttaccgaggcgagcacaacggatgcaaggaaaggccattaggaaaccttgatcttcgatttttcgggccaaactt

SEQ ID NO: 10123 - DNA, 96 bp, Aspergillus thermomutatus
  misc_feature: 85
cttatacatatttgataaaatatactataattaatagtataaatactcatgaggcatatttggaaagaatgtaaaaatactcatgaggcatatttg

SEQ ID NO: 10124 - DNA, 96 bp, Aspergillus thermomutatus
  misc_feature: 85
ctgggcctgctcccaggcctgcatcacctcatcgaccgcagcctggacatggtgggtcgatggggccggtggacacccgtctggaacgcgaatatg

SEQ ID NO: 10125 - DNA, 96 bp, Aspergillus thermomutatus
  misc_feature: 85
agatagtaaaagagaaggattaggaaataggaatttaaaattaaaaaggagataaaataaggatagattagaggatagggagagagaagggaagag

SEQ ID NO: 10126 - DNA, 96 bp, Aspergillus thermomutatus
  misc_feature: 85
ctcccttatcctttttctctctggaatatgctcaacttttaactattacataccttctcattcagttatatatcccttatggcatatattccctct

SEQ ID NO: 10127 - DNA, 96 bp, Aspergillus thermomutatus
  misc_feature: 85
ctattcgacgtgctattctacgtgctattctacgtgctattctacgtgctattctacgtgctattctacgtgctattctacgtgctattctacgtg

SEQ ID NO: 10128 - DNA, 96 bp, Aspergillus thermomutatus
  misc_feature: 85
ctagcttacagtaggggcatgatttctagggctagcatagtctactaaagataagctcctaggagcagctattttagtattatagactgattctat

SEQ ID NO: 10129 - DNA, 96 bp, Aspergillus thermomutatus
  misc_feature: 85
ctacgtgctattctacgtgctattctacgtgctattctacgtgctattctacgtgctattctacgtgctattctacatgctattcgacgtgctatt

SEQ ID NO: 10130 - DNA, 96 bp, Aspergillus thermomutatus
  misc_feature: 85
ctacgtgctattctacgtgctattctacgtgctattctacgtgctattctacgtgctattctacatgctattcgacgtgctattctatgtgctatt

SEQ ID NO: 10131 - DNA, 96 bp, Aspergillus thermomutatus
  misc_feature: 85
atgcaaggtttggaccaaggtagccagagagcaaccatatggggcaggtagtatagtagggatcaacacaccccacatagccccagagatgcaccg

SEQ ID NO: 10132 - DNA, 96 bp, Aspergillus thermomutatus
  misc_feature: 85
ccttactctatcttatccaaaactaactaacccttactctatcttatctaaaactaactaaccctgactctatcctatttaaaactaccccttact

SEQ ID NO: 10133 - DNA, 96 bp, Aspergillus thermomutatus
  misc_feature: 85
cctgcctccgcgtgctattctatgtgcatcctacatgctattcgacgtgctattctacgtgctattctacgtgctattctacgtgctattctacgt

SEQ ID NO: 10134 - DNA, 96 bp, Aspergillus thermomutatus
  misc_feature: 85
cctacttcttctctttttttcttctttcttttcttaactcttactttcctctcttttatacccctaatactatctcttattcctctctttatctct

SEQ ID NO: 10135 - DNA, 96 bp, Aspergillus thermomutatus
  misc_feature: 85
aatgttacggcaccaacacagccgcactagcctaaggcggatgagacaggcagaattacggaatgcggacatccaatcactctaaggaacatgcgg

SEQ ID NO: 10136 - DNA, 96 bp, Aspergillus thermomutatus
  misc_feature: 85
cacctgggcctgctcccaggcctgcatcacctcatcgaccgcagcctggacatggtgggtcgatggggccggtggacacccgtctggaacgcgaat

SEQ ID NO: 10137 - DNA, 96 bp, Aspergillus thermomutatus
  misc_feature: 85
attccttattcttccttcttattctattcatctctctatcttatcctcttcctcttcaataatccttatccttattctaatactatctcttactct

SEQ ID NO: 10138 - DNA, 96 bp, Aspergillus thermomutatus
  misc_feature: 85
atgagaaggtatgtaatagttaaaagttgagcatattccagagagaaaaaggataagggagcagaaggatatatagagaagaagtataataagatt

SEQ ID NO: 10139 - DNA, 96 bp, Aspergillus thermomutatus
  misc_feature: 85
agagaggtaggcagagaggtagggaggtagggagggaggtagagaggcaccataggaggtatggagcaatgcaccgcgtgaggcacccccagatat

SEQ ID NO: 10140 - DNA, 96 bp, Aspergillus thermomutatus
  misc_feature: 85
atatccatactaattatctttaatctctggtataaccaccctaacttataatatatattaatacctactatgcctcactgcctacctcctggggtt

SEQ ID NO: 10141 - DNA, 96 bp, Aspergillus thermomutatus
  misc_feature: 85
actatctactcttctaatcttccttaatcccttctctctctctattcctcttctactcttatctcctttctttcttcttctctctcttcctatctt

SEQ ID NO: 10142 - DNA, 96 bp, Aspergillus thermomutatus
  misc_feature: 84
gagtggaggccaacaggaaagaaaggaacaaaagagtgatcgcagaagtgaatgaaaaggaagggaagaaaagagaaacaaaatgaaaaaagaaaa

SEQ ID NO: 10143 - DNA, 96 bp, Aspergillus thermomutatus
  misc_feature: 84
tttggaccaaggtagccagagagcaaccatatggggcaggtagtatagtagggatcaacacaccccacatagccccagagatgcaccgcgtgaggt

SEQ ID NO: 10144 - DNA, 96 bp, Aspergillus thermomutatus
  misc_feature: 84
tttctagggctagcatagtctactaaagataagctcctaggagcagctattttagtattatagactgattctatgtcacgggctagaagccggtca

SEQ ID NO: 10145 - DNA, 96 bp, Aspergillus thermomutatus
  misc_feature: 84
ttctagggctagcatagtctactaaagataagctcctaggagcagctattttagtattatagactgattctatgtcacgggctagaagccggtcaa

SEQ ID NO: 10146 - DNA, 96 bp, Aspergillus thermomutatus
  misc_feature: 84
gatatataactgaatgagaaggtatgtaatagttaaaagttgagcatattccagagagaaaaaggataagggagcagaaggatatatagagaagaa

SEQ ID NO: 10147 - DNA, 96 bp, Aspergillus thermomutatus
  misc_feature: 84
ttcttattctcttcttattttcctcttgttcttattctcttctctttctctttgattctccctcttctctcttgacctctcttctcttggcctctc

SEQ ID NO: 10148 - DNA, 96 bp, Aspergillus thermomutatus
  misc_feature: 84
ttccttcttattctattcatctctctatcttatcctcttcctcttcaataatccttatccttattctaatactatctcttactctctttcctatta

SEQ ID NO: 10149 - DNA, 96 bp, Aspergillus thermomutatus
  misc_feature: 84
tagagggagggatagaaagaggattagagggaggattagaaagaggattagagggaggattagagggaggattagagggaggattagagggaggaa

SEQ ID NO: 10150 - DNA, 96 bp, Aspergillus thermomutatus
  misc_feature: 84
tcatctgtacttatatttattactgtatctctcattgtactcatcattgtaaattataataaattaataacctcagtaatatacagaaatgtataa

SEQ ID NO: 10151 - DNA, 96 bp, Aspergillus thermomutatus
  misc_feature: 84
ttactctcttctatcttctattactcctataattccccttattcttcctttctgatccattattccttcctttttccttttgaaatccttctatct

SEQ ID NO: 10152 - DNA, 96 bp, Aspergillus thermomutatus
  misc_feature: 84
cattccttctctctcttcatgtctatattccctttactttactaaatcctcttctcatcttccctctctctcttaaattctttcttaaactattaa

SEQ ID NO: 10153 - DNA, 96 bp, Aspergillus thermomutatus
  misc_feature: 84
tgtgatccaatagcttccagtactgtgaacttcgcgtgctgggcatcgagcttcttgctagggcggtccgttcgtatgttgcgcaggtccaaccat

SEQ ID NO: 10154 - DNA, 96 bp, Aspergillus thermomutatus
  misc_feature: 84
cctccctaccttatattatacattcttcgctacctcacgtggtgcatctctggggctacgtggggtgtgttgatccctactatactacctgcccca

SEQ ID NO: 10155 - DNA, 96 bp, Aspergillus thermomutatus
  misc_feature: 84
tggaggccaacaggaaagaaaggaacaaaagagtgatcgcagaagtgaatgaaaaggaagggaagaaaagagaaacaaaatgaaaaaagaaaatgc

SEQ ID NO: 10156 - DNA, 96 bp, Aspergillus thermomutatus
  misc_feature: 84
tgcttcgtctggctggcttgatctggctggcttgatctgtctggctggtctggctgaactctctgagctggtcgggcaggcactccggtgggttcc

SEQ ID NO: 10157 - DNA, 96 bp, Aspergillus thermomutatus
  misc_feature: 84
ggcaaaacagcaggcagaacggtaggcagaacggcaggcagaacggtaggcagaacggcaggcagaacggcaggttgaatagcaggttgaatagca

SEQ ID NO: 10158 - DNA, 96 bp, Aspergillus thermomutatus
  misc_feature: 84
tgcgatagaggatcaaggtagagagttaactcttctacatgaaagattatctaatagaggttatatagattttagataattaaaattttatattat

SEQ ID NO: 10159 - DNA, 96 bp, Aspergillus thermomutatus
  misc_feature: 84
ggaggccaacaggaaagaaaggaacaaaagagtgatcgcagaagtgaatgaaaaggaagggaagaaaagagaaacaaaatgaaaaaagaaaatgca

SEQ ID NO: 10160 - DNA, 96 bp, Aspergillus thermomutatus
  misc_feature: 84
tgagaaggtatgtaatagttaaaagttgagcatattccagagagaaaaaggataagggagcagaaggatatatagagaagaagtataataagattt

SEQ ID NO: 10161 - DNA, 96 bp, Aspergillus thermomutatus
  misc_feature: 84
tgacaggaggagcaaggtagagaggtagaggttaatttttaatagtattagaaatgttatatcaatcaattattttaatactaaagaggttttgat

SEQ ID NO: 10162 - DNA, 96 bp, Aspergillus thermomutatus
  misc_feature: 84
tgaatgagaaggtatgtaatagttaaaagttgagcatattccagagagaaaaaggataagggagcagaaggatatatagagaagaagtataataag

SEQ ID NO: 10163 - DNA, 96 bp, Aspergillus thermomutatus
  misc_feature: 84
tctttctatccttcttttccaccctcctccttttacaacctataatttctactaaccctcactcttatcctcattctcactctactcctctctctt

SEQ ID NO: 10164 - DNA, 96 bp, Aspergillus thermomutatus
  misc_feature: 84
aataaggtgaataaggagagaggagaagagaggagatgagaagagaggagatgagaagagatgagaagagaggagaggagatgagaagagaagaga

SEQ ID NO: 10165 - DNA, 96 bp, Aspergillus thermomutatus
  misc_feature: 84
gatataagggaaagagaagattaaagcgaagagagtgaaggaagggatgttgatggacagtgtgataaggtaagggttatttagtttattaagaga

SEQ ID NO: 10166 - DNA, 96 bp, Aspergillus thermomutatus
  misc_feature: 84
gaggagtagagtgagaatgaggataagagtgagggttagtagaaattataggttgtaaaaggaggagggtggaaaagaaggatagaaagagagaga

SEQ ID NO: 10167 - DNA, 96 bp, Aspergillus thermomutatus
  misc_feature: 84
tctctctattcctcttctactcttatctcctttctttcttcttctctctcttcctatcttcaaatctatccttattttaactcctatttaattact

SEQ ID NO: 10168 - DNA, 96 bp, Aspergillus thermomutatus
  misc_feature: 84
tctctattccttattcttccttcttattctattcatctctctatcttatcctcttcctcttcaataatccttatccttattctaatactatctctt

SEQ ID NO: 10169 - DNA, 96 bp, Aspergillus thermomutatus
  misc_feature: 84
taggagcctactagcttacagtaggggcatgatttctagggctagcatagtctactaaagataagctcctaggagcagctattttagtattataga

SEQ ID NO: 10170 - DNA, 96 bp, Aspergillus thermomutatus
  misc_feature: 84
tctagggctagcatagtctactaaagataagctcctaggagcagctattttagtattatagactgattctatgtcacgggctagaagccggtcaac

SEQ ID NO: 10171 - DNA, 96 bp, Aspergillus thermomutatus
  misc_feature: 84
tctaccaatgtgcgtttccaatgtttctaatgtgctcagtaagatgaggagcgagttctaatgttacgggctagaccgtaggaaaacctatgacta

SEQ ID NO: 10172 - DNA, 96 bp, Aspergillus thermomutatus
  misc_feature: 84
tcctccttttacaacctataatttctactaaccctcactcttatcctcattctcactctactcctctctcttatcctcattctaaccctcactcct

SEQ ID NO: 10173 - DNA, 96 bp, Aspergillus thermomutatus
  misc_feature: 84
tcctacatgctattcgacgtgctattctacgtgctattctacgtgctattctacgtgctattctacgtgctattctacgtgctattctacgtgcta

SEQ ID NO: 10174 - DNA, 96 bp, Aspergillus thermomutatus
  misc_feature: 84
tccctaccttatattatacattcttcgctacctcacgtggtgcatctctggggctacgtggggtgtgttgatccctactatactacctgccccata

SEQ ID NO: 10175 - DNA, 96 bp, Aspergillus thermomutatus
  misc_feature: 84
atgacaggaggagcaaggtagagaggtagaggttaatttttaatagtattagaaatgttatatcaatcaattattttaatactaaagaggttttga

SEQ ID NO: 10176 - DNA, 96 bp, Aspergillus thermomutatus
  misc_feature: 84
gcaggcagaacggtaggcagaacggcaggcagaacggtaggcagaacggcaggcagaacggcaggttgaatagcaggttgaatagcaggttgaata

SEQ ID NO: 10177 - DNA, 96 bp, Aspergillus thermomutatus
  misc_feature: 84
tattactctcttctatcttctattactcctataattccccttattcttcctttctgatccattattccttcctttttccttttgaaatccttctat

SEQ ID NO: 10178 - DNA, 96 bp, Aspergillus thermomutatus
  misc_feature: 84
tatatctacttctatatctacctcttggatacctctctctatatctctctatctgatttggtggcttatacggtgccttactccccaccattctac

SEQ ID NO: 10179 - DNA, 96 bp, Aspergillus thermomutatus
  misc_feature: 84
gcgatagaggatcaaggtagagagttaactcttctacatgaaagattatctaatagaggttatatagattttagataattaaaattttatattata

SEQ ID NO: 10180 - DNA, 96 bp, Aspergillus thermomutatus
  misc_feature: 84
acctactctctattccttattcttccttcttattctattcatctctctatcttatcctcttcctcttcaataatccttatccttattctaatacta

SEQ ID NO: 10181 - DNA, 96 bp, Aspergillus thermomutatus
  misc_feature: 84
ctacttcttctctttttttcttctttcttttcttaactcttactttcctctcttttatacccctaatactatctcttattcctctctttatctcta

SEQ ID NO: 10182 - DNA, 96 bp, Aspergillus thermomutatus
  misc_feature: 84
actagcttacagtaggggcatgatttctagggctagcatagtctactaaagataagctcctaggagcagctattttagtattatagactgattcta

SEQ ID NO: 10183 - DNA, 96 bp, Aspergillus thermomutatus
  misc_feature: 84
atgtgcatcctacatgctattcgacgtgctattctacgtgctattctacgtgctattctacgtgctattctacgtgctattctacgtgctattcta

SEQ ID NO: 10184 - DNA, 96 bp, Aspergillus thermomutatus
  misc_feature: 84
agggatagatagtttagggagaggagggggtagaaaggtttagagataaagagaggaataagagatagtattaggggtataaaagagaggaaagta

SEQ ID NO: 10185 - DNA, 96 bp, Aspergillus thermomutatus
  misc_feature: 84
tactctctattccttattcttccttcttattctattcatctctctatcttatcctcttcctcttcaataatccttatccttattctaatactatct

SEQ ID NO: 10186 - DNA, 96 bp, Aspergillus thermomutatus
  misc_feature: 84
taccattccttctctctcttcatgtctatattccctttactttactaaatcctcttctcatcttccctctctctcttaaattctttcttaaactat

SEQ ID NO: 10187 - DNA, 96 bp, Aspergillus thermomutatus
  misc_feature: 84
taaggaagattagaagagtagatagtaagggataggataggataggaaaaaagaaaagatttagaaatagaagattaaaggtaaagaggaagggat

SEQ ID NO: 10188 - DNA, 96 bp, Aspergillus thermomutatus
  misc_feature: 84
ggccaggagtaagcatagtaatatatgtaggtatataaaagccacgcagggttaggtataaaggcacccacagaggccccatgtaaggcagggtta

SEQ ID NO: 10189 - DNA, 96 bp, Aspergillus thermomutatus
  misc_feature: 84
gtgctattctatgtgcatcctacatgctattcgacgtgctattctacgtgctattctacgtgctattctacgtgctattctacgtgctattctacg

SEQ ID NO: 10190 - DNA, 96 bp, Aspergillus thermomutatus
  misc_feature: 84
aggagcctactagcttacagtaggggcatgatttctagggctagcatagtctactaaagataagctcctaggagcagctattttagtattatagac

SEQ ID NO: 10191 - DNA, 96 bp, Aspergillus thermomutatus
  misc_feature: 84
gtataagtgattcctcttcagctttagtcaatttatgtgagttggcgcgttgttcagctcgaaaacagtgtccatttaatcgccgctgaagtgttg

SEQ ID NO: 10192 - DNA, 96 bp, Aspergillus thermomutatus
  misc_feature: 84
ggtttggaccaaggtagccagagagcaaccatatggggcaggtagtatagtagggatcaacacaccccacatagccccagagatgcaccgcgtgag

SEQ ID NO: 10193 - DNA, 96 bp, Aspergillus thermomutatus
  misc_feature: 84
ggtgtacacaaggcaggcagaacagcaggcaaaacagcaggcagaacggtaggcagaacggcaggcagaacggtaggcagaacggcaggcagaacg

SEQ ID NO: 10194 - DNA, 96 bp, Aspergillus thermomutatus
  misc_feature: 84
ggtgcgatagaggatcaaggtagagagttaactcttctacatgaaagattatctaatagaggttatatagattttagataattaaaattttatatt

SEQ ID NO: 10195 - DNA, 96 bp, Aspergillus thermomutatus
  misc_feature: 84
gggatatataactgaatgagaaggtatgtaatagttaaaagttgagcatattccagagagaaaaaggataagggagcagaaggatatatagagaag

SEQ ID NO: 10196 - DNA, 96 bp, Aspergillus thermomutatus
  misc_feature: 84
cttcctccctaccttatattatacattcttcgctacctcacgcggtgcatctctggggctatgtggggtgtgttgatccctactatactacctgcc

SEQ ID NO: 10197 - DNA, 96 bp, Aspergillus thermomutatus
  misc_feature: 84
ctcctccttttacaacctataatttctactaaccctcactcttatcctcattctcactctactcctctctcttatcctcattctaaccctcactcc

SEQ ID NO: 10198 - DNA, 96 bp, Aspergillus thermomutatus
  misc_feature: 84
cccttatcctttttctctctggaatatgctcaacttttaactattacataccttctcattcagttatatatcccttatggcatatattccctctcc

SEQ ID NO: 10199 - DNA, 96 bp, Aspergillus thermomutatus
  misc_feature: 84
gcttacagtaggggcatgatttctagggctagcatagtctactaaagataagctcctaggagcagctattttagtattatagactgattctatgtc

SEQ ID NO: 10200 - DNA, 96 bp, Aspergillus thermomutatus
  misc_feature: 84
gctattcgacgtgctattctacgtgctattctacgtgctattctacgtgctattctacgtgctattctacgtgctattctacgtgctattctacgt

SEQ ID NO: 10201 - DNA, 96 bp, Aspergillus thermomutatus
  misc_feature: 84
aggcagaacggtaggcagaacggcaggcagaacggtaggcagaacggcaggcagaacggcaggttgaatagcaggttgaatagcaggttgaatagc

SEQ ID NO: 10202 - DNA, 96 bp, Aspergillus thermomutatus
  misc_feature: 84
gcctactagcttacagtaggggcatgatttctagggctagcatagtctactaaagataagctcctaggagcagctattttagtattatagactgat

SEQ ID NO: 10203 - DNA, 96 bp, Aspergillus thermomutatus
  misc_feature: 84
aggccggcgggcgcgcgcgcgcgcgagcattaggcggcagcggtccggggcaggccagcaggcaggggggcgcgcgcgcggcggtgaccagttggc

SEQ ID NO: 10204 - DNA, 96 bp, Aspergillus thermomutatus
  misc_feature: 84
attactctcttctatcttctattactcctataattccccttattcttcctttctgatccattattccttcctttttccttttgaaatccttctatc

SEQ ID NO: 10205 - DNA, 96 bp, Aspergillus thermomutatus
  misc_feature: 84
cttactctatcttatccaaaactaactaacccttactctatcttatctaaaactaactaaccctgactctatcctatttaaaactaccccttactc

SEQ ID NO: 10206 - DNA, 96 bp, Aspergillus thermomutatus
  misc_feature: 84
aaccctcactcttatcctcattctcactctactcctctctcttatcctcattctaaccctcactccttcctccctctaatcctccctctaatcctc

SEQ ID NO: 10207 - DNA, 96 bp, Aspergillus thermomutatus
  misc_feature: 84
actctctattccttattcttccttcttattctattcatctctctatcttatcctcttcctcttcaataatccttatccttattctaatactatctc

SEQ ID NO: 10208 - DNA, 96 bp, Aspergillus thermomutatus
  misc_feature: 84
gaagagatgagaagagaggagaggagatgagaagagaagagaacaagaataaatgggaatgaaagagacgaattaatggttaaagataaggacagg

SEQ ID NO: 10209 - DNA, 96 bp, Aspergillus thermomutatus
  misc_feature: 84
cttccttcttattctattcatctctctatcttatcctcttcctcttcaataatccttatccttattctaatactatctcttactctctttcctatt

SEQ ID NO: 10210 - DNA, 96 bp, Aspergillus thermomutatus
  misc_feature: 84
agagggagggatagaaagaggattagagggaggattagaaagaggattagagggaggattagagggaggattagagggaggattagagggaggaag

SEQ ID NO: 10211 - DNA, 96 bp, Aspergillus thermomutatus
  misc_feature: 84
catctgtacttatatttattactgtatctctcattgtactcatcattgtaaattataataaattaataacctcagtaatatacagaaatgtataag

SEQ ID NO: 10212 - DNA, 96 bp, Aspergillus thermomutatus
  misc_feature: 84
ataataaaagtcatctgtacttatatttattactgtatctctcattgtactcatcattgtaaattataataaattaataacctcagtaatatacag

SEQ ID NO: 10213 - DNA, 96 bp, Aspergillus thermomutatus
  misc_feature: 84
aagaagtaagtataagagtaaggattagtgattttagaaataaaggagtaaaaagtcgatgagagtagagaagatgagatgatataagggaaagag

SEQ ID NO: 10214 - DNA, 96 bp, Aspergillus thermomutatus
  misc_feature: 84
ctctctattccttattcttccttcttattctattcatctctctatcttatcctcttcctcttcaataatccttatccttattctaatactatctct

SEQ ID NO: 10215 - DNA, 96 bp, Aspergillus thermomutatus
  misc_feature: 84
ctccctaccttatattatacattcttcgctacctcacgtggtgcatctctggggctacgtggggtgtgttgatccctactatactacctgccccat

SEQ ID NO: 10216 - DNA, 96 bp, Aspergillus thermomutatus
  misc_feature: 84
caggcagaacggtaggcagaacggcaggcagaacggtaggcagaacggcaggcagaacggcaggttgaatagcaggttgaatagcaggttgaatag

SEQ ID NO: 10217 - DNA, 96 bp, Aspergillus thermomutatus
  misc_feature: 84
ctatcttcattcttaaatcttatctcctttctttcttctcttcccttctctctccctatcctctaatctatccttattttatctcctttttaattt

SEQ ID NO: 10218 - DNA, 96 bp, Aspergillus thermomutatus
  misc_feature: 84
aggaagattagaagagtagatagtaagggataggataggataggaaaaaagaaaagatttagaaatagaagattaaaggtaaagaggaagggatag

SEQ ID NO: 10219 - DNA, 96 bp, Aspergillus thermomutatus
  misc_feature: 84
ataggagcctactagcttacagtaggggcatgatttctagggctagcatagtctactaaagataagctcctaggagcagctattttagtattatag

SEQ ID NO: 10220 - DNA, 96 bp, Aspergillus thermomutatus
  misc_feature: 84
cgtgtgtgccactggtgggccatgccgacatctgtccatgcacgtgtacttgcgtgcgtgtgtgtatatgcacatgtgtatatatatatatatatg

SEQ ID NO: 10221 - DNA, 96 bp, Aspergillus thermomutatus
  misc_feature: 84
cgcgtgctattctatgtgcatcctacatgctattcgacgtgctattctacgtgctattctacgtgctattctacgtgctattctacgtgctattct

SEQ ID NO: 10222 - DNA, 96 bp, Aspergillus thermomutatus
  misc_feature: 84
cgatagaggatcaaggtagagagttaactcttctacatgaaagattatctaatagaggttatatagattttagataattaaaattttatattatat

SEQ ID NO: 10223 - DNA, 96 bp, Aspergillus thermomutatus
  misc_feature: 84
ccttcttgtacagataaaatggtatcaccacctagattagcacgtattcttgccttcttctttcttttccgttcattctctgcccgtagaaccctg

SEQ ID NO: 10224 - DNA, 96 bp, Aspergillus thermomutatus
  misc_feature: 84
cctactagcttacagtaggggcatgatttctagggctagcatagtctactaaagataagctcctaggagcagctattttagtattatagactgatt

SEQ ID NO: 10225 - DNA, 96 bp, Aspergillus thermomutatus
  misc_feature: 84
acagtaggggcatgatttctagggctagcatagtctactaaagataagctcctaggagcagctattttagtattatagactgattctatgtcacgg

SEQ ID NO: 10226 - DNA, 96 bp, Aspergillus thermomutatus
  misc_feature: 84
actgcctctctccctgtcttacatggtgccttcctccctaccttatattatacattcttcgctacctcacgcggtgcatctctggggctatgtggg

SEQ ID NO: 10227 - DNA, 96 bp, Aspergillus thermomutatus
  misc_feature: 84
acctctctatctacctctctatctccctaccccactgtctgcctgtctgcctgtctgcctgtctgcctgtctctctacctcactgcctacctcatg

SEQ ID NO: 10228 - DNA, 96 bp, Aspergillus thermomutatus
  misc_feature: 84
cacctctctatctacctctctatctccctaccccactgtctgcctgtctgcctgtctgcctgtctgcctgtctctctacctcactgcctacctcat

SEQ ID NO: 10229 - DNA, 96 bp, Aspergillus thermomutatus
  misc_feature: 84
agtggaggccaacaggaaagaaaggaacaaaagagtgatcgcagaagtgaatgaaaaggaagggaagaaaagagaaacaaaatgaaaaaagaaaat

SEQ ID NO: 10230 - DNA, 96 bp, Aspergillus thermomutatus
  misc_feature: 84
aatgagaaggtatgtaatagttaaaagttgagcatattccagagagaaaaaggataagggagcagaaggatatatagagaagaagtataataagat

SEQ ID NO: 10231 - DNA, 96 bp, Aspergillus thermomutatus
  misc_feature: 84
aggtgcgatagaggatcaaggtagagagttaactcttctacatgaaagattatctaatagaggttatatagattttagataattaaaattttatat

SEQ ID NO: 10232 - DNA, 96 bp, Aspergillus thermomutatus
  misc_feature: 84
actcttctaatcttccttaatcccttctctctctctattcctcttctactcttatctcctttctttcttcttctctctcttcctatcttcaaatct

SEQ ID NO: 10233 - DNA, 96 bp, Aspergillus thermomutatus
  misc_feature: 84
acatgctattcgacgtgctattctacgtgctattctacgtgctattctacgtgctattctacgtgctattctacgtgctattctacgtgctattct

SEQ ID NO: 10234 - DNA, 96 bp, Aspergillus thermomutatus
  misc_feature: 84
accattccttctctctcttcatgtctatattccctttactttactaaatcctcttctcatcttccctctctctcttaaattctttcttaaactatt

SEQ ID NO: 10235 - DNA, 96 bp, Aspergillus thermomutatus
  misc_feature: 84
aaatgacaggaggagcaaggtagagaggtagaggttaatttttaatagtattagaaatgttatatcaatcaattattttaatactaaagaggtttt

SEQ ID NO: 10236 - DNA, 96 bp, Aspergillus thermomutatus
  misc_feature: 84
aaaatgacaggaggagcaaggtagagaggtagaggttaatttttaatagtattagaaatgttatatcaatcaattattttaatactaaagaggttt

SEQ ID NO: 10237 - DNA, 96 bp, Aspergillus thermomutatus
  misc_feature: 83
ttgaatagcacgcggaggcaggcagataggcccacaaagaggtccgacatgaggtaggcagtgaggtagagagacaggcagacaggcagacaggca

SEQ ID NO: 10238 - DNA, 96 bp, Aspergillus thermomutatus
  misc_feature: 83
gaggtgtacacaaggcaggcagaacagcaggcaaaacagcaggcagaacggtaggcagaacggcaggcagaacggtaggcagaacggcaggcagaa

SEQ ID NO: 10239 - DNA, 96 bp, Aspergillus thermomutatus
  misc_feature: 83
ataaggtgaataaggagagaggagaagagaggagatgagaagagaggagatgagaagagatgagaagagaggagaggagatgagaagagaagagaa

SEQ ID NO: 10240 - DNA, 96 bp, Aspergillus thermomutatus
  misc_feature: 83
agggatatataactgaatgagaaggtatgtaatagttaaaagttgagcatattccagagagaaaaaggataagggagcagaaggatatatagagaa

SEQ ID NO: 10241 - DNA, 96 bp, Aspergillus thermomutatus
  misc_feature: 83
ttcctcaaacattcactgatatgctcgtaacagatcaccactctgttctcaccagatcaatgaatgaatgaatgaattattcctccggctgtgcgc

SEQ ID NO: 10242 - DNA, 96 bp, Aspergillus thermomutatus
  misc_feature: 83
ggagaagagaggagatgagaagagaggagatgagaagagatgagaagagaggagaggagatgagaagagaagagaacaagaataaatgggaatgaa

SEQ ID NO: 10243 - DNA, 96 bp, Aspergillus thermomutatus
  misc_feature: 83
ttatcctttttctctctggaatatgctcaacttttaactattacataccttctcattcagttatatatcccttatggcatatattccctctccctt

SEQ ID NO: 10244 - DNA, 96 bp, Aspergillus thermomutatus
  misc_feature: 83
ttactgcctctctccctgtcttacatggtgccttcctccctaccttatattatacattcttcgctacctcacgcggtgcatctctggggctatgtg

SEQ ID NO: 10245 - DNA, 96 bp, Aspergillus thermomutatus
  misc_feature: 83
ttacagtaggggcatgatttctagggctagcatagtctactaaagataagctcctaggagcagctattttagtattatagactgattctatgtcac

SEQ ID NO: 10246 - DNA, 96 bp, Aspergillus thermomutatus
  misc_feature: 83
ttaaggaagattagaagagtagatagtaagggataggataggataggaaaaaagaaaagatttagaaatagaagattaaaggtaaagaggaaggga

SEQ ID NO: 10247 - DNA, 96 bp, Aspergillus thermomutatus
  misc_feature: 83
ttaagcaaggcacggagagaggtaggcagagaggtagggaggtagggagggaggtagagaggcaccataggaggtatggagcaatgcaccgcgtga

SEQ ID NO: 10248 - DNA, 96 bp, Aspergillus thermomutatus
  misc_feature: 83
ttaaaccactgattaatgatctcaggatcctcacattttgcacgctgataattgtatttgcgggtatattttgatgtaagatcatcatgctgttta

SEQ ID NO: 10249 - DNA, 96 bp, Aspergillus thermomutatus
  misc_feature: 83
taaaccactgattaatgatctcaggatcctcacattttgcacgctgataattgtatttgcgggtatattttgatgtaagatcatcatgctgtttaa

SEQ ID NO: 10250 - DNA, 96 bp, Aspergillus thermomutatus
  misc_feature: 83
tgtcggttcaaaagtatggttggacctgcgcaacatacgaacggaccgccctagcaagaagctcgatgcccagcacgcgaagttcacagtactgga

SEQ ID NO: 10251 - DNA, 96 bp, Aspergillus thermomutatus
  misc_feature: 83
tgtaggtgcgatagaggatcaaggtagagagttaactcttctacatgaaagattatctaatagaggttatatagattttagataattaaaatttta

SEQ ID NO: 10252 - DNA, 96 bp, Aspergillus thermomutatus
  misc_feature: 83
tgctattctatgtgcatcctacatgctattcgacgtgctattctacgtgctattctacgtgctattctacgtgctattctacgtgctattctacgt

SEQ ID NO: 10253 - DNA, 96 bp, Aspergillus thermomutatus
  misc_feature: 83
tgctataggagcctactagcttacagtaggggcatgatttctagggctagcatagtctactaaagataagctcctaggagcagctattttagtatt

SEQ ID NO: 10254 - DNA, 96 bp, Aspergillus thermomutatus
  misc_feature: 83
tcctcaaacattcactgatatgctcgtaacagatcaccactctgttctcaccagatcaatgaatgaatgaatgaattattcctccggctgtgcgca

SEQ ID NO: 10255 - DNA, 96 bp, Aspergillus thermomutatus
  misc_feature: 83
tgcaaggtttggaccaaggtagccagagagcaaccatatggggcaggtagtatagtagggatcaacacaccccacatagccccagagatgcaccgc

SEQ ID NO: 10256 - DNA, 96 bp, Aspergillus thermomutatus
  misc_feature: 83
tgatccaatagcttccagtactgtgaacttcgcgtgctgggcatcgagcttcttgctagggcggtccgttcgtatgttgcgcaggtccaaccatac

SEQ ID NO: 10257 - DNA, 96 bp, Aspergillus thermomutatus
  misc_feature: 83
ggatatataactgaatgagaaggtatgtaatagttaaaagttgagcatattccagagagaaaaaggataagggagcagaaggatatatagagaaga

SEQ ID NO: 10258 - DNA, 96 bp, Aspergillus thermomutatus
  misc_feature: 83
aaggacaggaggaagttgacgagaagattacaaaaaaagaagaggagaaattaaagaacaagaaagaatgagaagagagaaaagaacaagaataga

SEQ ID NO: 10259 - DNA, 96 bp, Aspergillus thermomutatus
  misc_feature: 83
ggaagattagaagagtagatagtaagggataggataggataggaaaaaagaaaagatttagaaatagaagattaaaggtaaagaggaagggataga

SEQ ID NO: 10260 - DNA, 96 bp, Aspergillus thermomutatus
  misc_feature: 83
gaataaggaatagagagtaggttaataagtaagggtaagagataattaatagagataggggaaagaggaatgataagggatagagtaagggataga

SEQ ID NO: 10261 - DNA, 96 bp, Aspergillus thermomutatus
  misc_feature: 83
tcggatttgatacactctttaccgaggcgagcacaacggatgcaaggaaaggccattaggaaaccttgatcttcgatttttcgggccaaacttttc

SEQ ID NO: 10262 - DNA, 96 bp, Aspergillus thermomutatus
  misc_feature: 83
tccttcttattctcttcttattttcctcttgttcttattctcttctctttctctttgattctccctcttctctcttgacctctcttctcttggcct

SEQ ID NO: 10263 - DNA, 96 bp, Aspergillus thermomutatus
  misc_feature: 83
aggtttggaccaaggtagccagagagcaaccatatggggcaggtagtatagtagggatcaacacaccccacatagccccagagatgcaccgcgtga

SEQ ID NO: 10264 - DNA, 96 bp, Aspergillus thermomutatus
  misc_feature: 83
tattcgacgtgctattctacgtgctattctacgtgctattctacgtgctattctacgtgctattctacgtgctattctacgtgctattctacgtgc

SEQ ID NO: 10265 - DNA, 96 bp, Aspergillus thermomutatus
  misc_feature: 83
gtgatccaatagcttccagtactgtgaacttcgcgtgctgggcatcgagcttcttgctagggcggtccgttcgtatgttgcgcaggtccaaccata

SEQ ID NO: 10266 - DNA, 96 bp, Aspergillus thermomutatus
  misc_feature: 83
tatccttactctaatccttactctgatcctgactctgatccttactctcatccttactctcatccttactctcatccttatccctaatccttatac

SEQ ID NO: 10267 - DNA, 96 bp, Aspergillus thermomutatus
  misc_feature: 83
aaggaagattagaagagtagatagtaagggataggataggataggaaaaaagaaaagatttagaaatagaagattaaaggtaaagaggaagggata

SEQ ID NO: 10268 - DNA, 96 bp, Aspergillus thermomutatus
  misc_feature: 83
tataggagcctactagcttacagtaggggcatgatttctagggctagcatagtctactaaagataagctcctaggagcagctattttagtattata

SEQ ID NO: 10269 - DNA, 96 bp, Aspergillus thermomutatus
  misc_feature: 83
gtcatctgtacttatatttattactgtatctctcattgtactcatcattgtaaattataataaattaataacctcagtaatatacagaaatgtata

SEQ ID NO: 10270 - DNA, 96 bp, Aspergillus thermomutatus
  misc_feature: 83
taggtgcgatagaggatcaaggtagagagttaactcttctacatgaaagattatctaatagaggttatatagattttagataattaaaattttata

SEQ ID NO: 10271 - DNA, 96 bp, Aspergillus thermomutatus
  misc_feature: 83
ggatatcatagattatatactgtaaagattacttcttcattaattaattctctaaaaaatagcccattttaatatacaagacccaaagattcccta

SEQ ID NO: 10272 - DNA, 96 bp, Aspergillus thermomutatus
  misc_feature: 83
ctatatctacttctatatctacctcttggatacctctctctatatctctctatctgatttggtggcttatacggtgccttactccccaccattcta

SEQ ID NO: 10273 - DNA, 96 bp, Aspergillus thermomutatus
  misc_feature: 83
ctattactctcttctatcttctattactcctataattccccttattcttcctttctgatccattattccttcctttttccttttgaaatccttcta

SEQ ID NO: 10274 - DNA, 96 bp, Aspergillus thermomutatus
  misc_feature: 83
tactctcttctatcttctattactcctataattccccttattcttcctttctgatccattattccttcctttttccttttgaaatccttctatctt

SEQ ID NO: 10275 - DNA, 96 bp, Aspergillus thermomutatus
  misc_feature: 83
tacagtaggggcatgatttctagggctagcatagtctactaaagataagctcctaggagcagctattttagtattatagactgattctatgtcacg

SEQ ID NO: 10276 - DNA, 96 bp, Aspergillus thermomutatus
  misc_feature: 83
taatctactcttctctctctttttcttctctctctttttcttctctctctttttcttctctctctttttcttctctctctctcttttccttttctt

SEQ ID NO: 10277 - DNA, 96 bp, Aspergillus thermomutatus
  misc_feature: 83
taaggtgaataaggagagaggagaagagaggagatgagaagagaggagatgagaagagatgagaagagaggagaggagatgagaagagaagagaac

SEQ ID NO: 10278 - DNA, 96 bp, Aspergillus thermomutatus
  misc_feature: 83
taagcaaggcacggagagaggtaggcagagaggtagggaggtagggagggaggtagagaggcaccataggaggtatggagcaatgcaccgcgtgag

SEQ ID NO: 10279 - DNA, 96 bp, Aspergillus thermomutatus
  misc_feature: 83
ggcgcgcggcggtgaccagttggccggggccctcgagcagagaggcagggaggcgcgcgcgccattacagggaccagtgggccgcgcgcgccgtta

SEQ ID NO: 10280 - DNA, 96 bp, Aspergillus thermomutatus
  misc_feature: 83
atattagaggagagagagagatagtaaagaaaagaagagaataagtaagggttaaagggaatttaaagtaggaaagaaaagagagagtaagggtta

SEQ ID NO: 10281 - DNA, 96 bp, Aspergillus thermomutatus
  misc_feature: 83
gagataggtagagagggacccaagtagcaggccataaggcaggccgtgagacacacagagaggtgtacacaaggcaggcagaacagcaggcaaaac

SEQ ID NO: 10282 - DNA, 96 bp, Aspergillus thermomutatus
  misc_feature: 83
gtttggaccaaggtagccagagagcaaccatatggggcaggtagtatagtagggatcaacacaccccacatagccccagagatgcaccgcgtgagg

SEQ ID NO: 10283 - DNA, 96 bp, Aspergillus thermomutatus
  misc_feature: 83
gttgaatagcacgcggaggcaggcagataggcccacaaagaggtccgacatgaggtaggcagtgaggtagagagacaggcagacaggcagacaggc

SEQ ID NO: 10284 - DNA, 96 bp, Aspergillus thermomutatus
  misc_feature: 83
gttctgcctgccgttctgcctaccgttctgcctgccgttctgcctaccgttctgcctgctgttttgcctgctgttctgcctgccttgtgtacacct

SEQ ID NO: 10285 - DNA, 96 bp, Aspergillus thermomutatus
  misc_feature: 83
gttcctcaaacattcactgatatgctcgtaacagatcaccactctgttctcaccagatcaatgaatgaatgaatgaattattcctccggctgtgcg

SEQ ID NO: 10286 - DNA, 96 bp, Aspergillus thermomutatus
  misc_feature: 83
gtggaggccaacaggaaagaaaggaacaaaagagtgatcgcagaagtgaatgaaaaggaagggaagaaaagagaaacaaaatgaaaaaagaaaatg

SEQ ID NO: 10287 - DNA, 96 bp, Aspergillus thermomutatus
  misc_feature: 83
caaggcacggagagaggtaggcagagaggtagggaggtagggagggaggtagagaggcaccataggaggtatggagcaatgcaccgcgtgaggcac

SEQ ID NO: 10288 - DNA, 96 bp, Aspergillus thermomutatus
  misc_feature: 83
gtagagagggacccaagtagcaggccataaggcaggccgtgagacacacagagaggtgtacacaaggcaggcagaacagcaggcaaaacagcaggc

SEQ ID NO: 10289 - DNA, 96 bp, Aspergillus thermomutatus
  misc_feature: 83
cgtgctattctatgtgcatcctacatgctattcgacgtgctattctacgtgctattctacgtgctattctacgtgctattctacgtgctattctac

SEQ ID NO: 10290 - DNA, 96 bp, Aspergillus thermomutatus
  misc_feature: 83
ggtgaataaggagagaggagaagagaggagatgagaagagaggagatgagaagagatgagaagagaggagaggagatgagaagagaagagaacaag

SEQ ID NO: 10291 - DNA, 96 bp, Aspergillus thermomutatus
  misc_feature: 83
aactaacccttactctatcttatccaaaactaactaacccttactctatcttatctaaaactaactaaccctgactctatcctatttaaaactacc

SEQ ID NO: 10292 - DNA, 96 bp, Aspergillus thermomutatus
  misc_feature: 83
actaacccttactctatcttatccaaaactaactaacccttactctatcttatctaaaactaactaaccctgactctatcctatttaaaactaccc

SEQ ID NO: 10293 - DNA, 96 bp, Aspergillus thermomutatus
  misc_feature: 83
ccttatcctttttctctctggaatatgctcaacttttaactattacataccttctcattcagttatatatcccttatggcatatattccctctccc

SEQ ID NO: 10294 - DNA, 96 bp, Aspergillus thermomutatus
  misc_feature: 83
ctccttcttattctcttcttattttcctcttgttcttattctcttctctttctctttgattctccctcttctctcttgacctctcttctcttggcc

SEQ ID NO: 10295 - DNA, 96 bp, Aspergillus thermomutatus
  misc_feature: 83
ggccaacaggaaagaaaggaacaaaagagtgatcgcagaagtgaatgaaaaggaagggaagaaaagagaaacaaaatgaaaaaagaaaatgcagtc

SEQ ID NO: 10296 - DNA, 96 bp, Aspergillus thermomutatus
  misc_feature: 83
ggagggatagaaagaggattagagggaggattagaaagaggattagagggaggattagagggaggattagagggaggattagagggaggaaggagt

SEQ ID NO: 10297 - DNA, 96 bp, Aspergillus thermomutatus
  misc_feature: 83
accctcactcttatcctcattctcactctactcctctctcttatcctcattctaaccctcactccttcctccctctaatcctccctctaatcctcc

SEQ ID NO: 10298 - DNA, 96 bp, Aspergillus thermomutatus
  misc_feature: 83
gaggtagagaggcaccataggaggtatggagcaatgcaccgcgtgaggcacccccagatatgccatgcaaggtttggaccaaggtagccagagagc

SEQ ID NO: 10299 - DNA, 96 bp, Aspergillus thermomutatus
  misc_feature: 83
gcctaagctagaggagttctttaccaaaatccgtgttcctaaggcagcatttaagtccacctggcatgcaggccccgcctgagccgacccacatgt

SEQ ID NO: 10300 - DNA, 96 bp, Aspergillus thermomutatus
  misc_feature: 83
gcaggccggcgggcgcgcgcgcgcgcgagcattaggcggcagcggtccggggcaggccagcaggcaggggggcgcgcgcgcggcggtgaccagttg

SEQ ID NO: 10301 - DNA, 96 bp, Aspergillus thermomutatus
  misc_feature: 83
gatatcatagattatatactgtaaagattacttcttcattaattaattctctaaaaaatagcccattttaatatacaagacccaaagattccctag

SEQ ID NO: 10302 - DNA, 96 bp, Aspergillus thermomutatus
  misc_feature: 83
ctactctctattccttattcttccttcttattctattcatctctctatcttatcctcttcctcttcaataatccttatccttattctaatactatc

SEQ ID NO: 10303 - DNA, 96 bp, Aspergillus thermomutatus
  misc_feature: 83
gatagaggatcaaggtagagagttaactcttctacatgaaagattatctaatagaggttatatagattttagataattaaaattttatattatatt

SEQ ID NO: 10304 - DNA, 96 bp, Aspergillus thermomutatus
  misc_feature: 83
gatagaaagaggattagagggaggattagaaagaggattagagggaggattagagggaggattagagggaggattagagggaggaaggagtgaggg

SEQ ID NO: 10305 - DNA, 96 bp, Aspergillus thermomutatus
  misc_feature: 83
gagagagaagaagaaagaaaggagataagagtagaagaggaatagagagagagaagggattaaggaagattagaagagtagatagtaagggatagg

SEQ ID NO: 10306 - DNA, 96 bp, Aspergillus thermomutatus
  misc_feature: 83
ctccttttacaacctataatttctactaaccctcactcttatcctcattctcactctactcctctctcttatcctcattctaaccctcactccttc

SEQ ID NO: 10307 - DNA, 96 bp, Aspergillus thermomutatus
  misc_feature: 83
actgagcacattagaaacattggaaacgcacattggtagatacattggattggaagacgcacctaatgattgtgtagcgcacattggaacagacag

SEQ ID NO: 10308 - DNA, 96 bp, Aspergillus thermomutatus
  misc_feature: 83
ctctttttttcttctttcttttcttaactcttactttcctctcttttatacccctaatactatctcttattcctctctttatctctaaacctttct

SEQ ID NO: 10309 - DNA, 96 bp, Aspergillus thermomutatus
  misc_feature: 83
agaggagtagagtgagaatgaggataagagtgagggttagtagaaattataggttgtaaaaggaggagggtggaaaagaaggatagaaagagagag

SEQ ID NO: 10310 - DNA, 96 bp, Aspergillus thermomutatus
  misc_feature: 83
agagagagaagaagaaagaaaggagataagagtagaagaggaatagagagagagaagggattaaggaagattagaagagtagatagtaagggatag

SEQ ID NO: 10311 - DNA, 96 bp, Aspergillus thermomutatus
  misc_feature: 83
ctaatctactcttctctctctttttcttctctctctttttcttctctctctttttcttctctctctttttcttctctctctctcttttccttttct

SEQ ID NO: 10312 - DNA, 96 bp, Aspergillus thermomutatus
  misc_feature: 83
cgcgcgcgcgcgcgcgagcattaggcggcagcggtccggggcaggccagcaggcaggggggcgcgcgcgcggcggtgaccagttggccggggccct

SEQ ID NO: 10313 - DNA, 96 bp, Aspergillus thermomutatus
  misc_feature: 83
atgtaaggcaggcagagaggtagagataggtagagagggacccaagtagcaggccataaggcaggccgtgagacacacagagaggtgtacacaagg

SEQ ID NO: 10314 - DNA, 96 bp, Aspergillus thermomutatus
  misc_feature: 83
ccttactgcctctctccctgtcttacatggtgccttcctccctaccttatattatacattcttcgctacctcacgcggtgcatctctggggctatg

SEQ ID NO: 10315 - DNA, 96 bp, Aspergillus thermomutatus
  misc_feature: 83
cctccttttacaacctataatttctactaaccctcactcttatcctcattctcactctactcctctctcttatcctcattctaaccctcactcctt

SEQ ID NO: 10316 - DNA, 96 bp, Aspergillus thermomutatus
  misc_feature: 83
aagcaaggcacggagagaggtaggcagagaggtagggaggtagggagggaggtagagaggcaccataggaggtatggagcaatgcaccgcgtgagg

SEQ ID NO: 10317 - DNA, 96 bp, Aspergillus thermomutatus
  misc_feature: 83
aggaagaataaggaatagagagtaggttaataagtaagggtaagagataattaatagagataggggaaagaggaatgataagggatagagtaaggg

SEQ ID NO: 10318 - DNA, 96 bp, Aspergillus thermomutatus
  misc_feature: 83
ccacaacgtgttccatgtatcgctactgcgccccgcaggcaacgatcccttcccgagccaacgttgcgatgattaccagccacccgcagtgctcgt

SEQ ID NO: 10319 - DNA, 96 bp, Aspergillus thermomutatus
  misc_feature: 83
caggccggcgggcgcgcgcgcgcgcgagcattaggcggcagcggtccggggcaggccagcaggcaggggggcgcgcgcgcggcggtgaccagttgg

SEQ ID NO: 10320 - DNA, 96 bp, Aspergillus thermomutatus
  misc_feature: 83
attaagcaaggcacggagagaggtaggcagagaggtagggaggtagggagggaggtagagaggcaccataggaggtatggagcaatgcaccgcgtg

SEQ ID NO: 10321 - DNA, 96 bp, Aspergillus thermomutatus
  misc_feature: 83
aatgacaggaggagcaaggtagagaggtagaggttaatttttaatagtattagaaatgttatatcaatcaattattttaatactaaagaggttttg

SEQ ID NO: 10322 - DNA, 96 bp, Aspergillus thermomutatus
  misc_feature: 83
aacctactctctattccttattcttccttcttattctattcatctctctatcttatcctcttcctcttcaataatccttatccttattctaatact

SEQ ID NO: 10323 - DNA, 96 bp, Aspergillus thermomutatus
  misc_feature: 82
agagataggtagagagggacccaagtagcaggccataaggcaggccgtgagacacacagagaggtgtacacaaggcaggcagaacagcaggcaaaa

SEQ ID NO: 10324 - DNA, 96 bp, Aspergillus thermomutatus
  misc_feature: 82
agagtggaggccaacaggaaagaaaggaacaaaagagtgatcgcagaagtgaatgaaaaggaagggaagaaaagagaaacaaaatgaaaaaagaaa

SEQ ID NO: 10325 - DNA, 96 bp, Aspergillus thermomutatus
  misc_feature: 82
tttccaatgtttctaatgtgctcagtaagatgaggagcgagttctaatgttacgggctagaccgtaggaaaacctatgactaggtatgtacaataa

SEQ ID NO: 10326 - DNA, 96 bp, Aspergillus thermomutatus
  misc_feature: 82
gaataaatgggaatgaaagagacgaattaatggttaaagataaggacaggaggaagttgacgagaagattacaaaaaaagaagaggagaaattaaa

SEQ ID NO: 10327 - DNA, 96 bp, Aspergillus thermomutatus
  misc_feature: 82
atgggaatgaaagagacgaattaatggttaaagataaggacaggaggaagttgacgagaagattacaaaaaaagaagaggagaaattaaagaacaa

SEQ ID NO: 10328 - DNA, 96 bp, Aspergillus thermomutatus
  misc_feature: 82
aggtgaataaggagagaggagaagagaggagatgagaagagaggagatgagaagagatgagaagagaggagaggagatgagaagagaagagaacaa

SEQ ID NO: 10329 - DNA, 96 bp, Aspergillus thermomutatus
  misc_feature: 82
aagaggtaggcaaatacgtagggaccaaggtagggagtaaagccagtagagaggtagcaagagaggtagcaagagaggtagcaagagaggtagcaa

SEQ ID NO: 10330 - DNA, 96 bp, Aspergillus thermomutatus
  misc_feature: 82
gagaataagaaaagaagagaagataaaagagagagagatttttagttaggattaaagatagtaaaaagagagaaaggggaaattggagagaggcaa

SEQ ID NO: 10331 - DNA, 96 bp, Aspergillus thermomutatus
  misc_feature: 82
ttgaatagcaggttgaatagcaggttgaatagcaggttgaatagcaggttgaatagcaggttgaatagcaggttgaatagcaggttgaatagcagg

SEQ ID NO: 10332 - DNA, 96 bp, Aspergillus thermomutatus
  misc_feature: 82
gagagtggaggccaacaggaaagaaaggaacaaaagagtgatcgcagaagtgaatgaaaaggaagggaagaaaagagaaacaaaatgaaaaaagaa

SEQ ID NO: 10333 - DNA, 96 bp, Aspergillus thermomutatus
  misc_feature: 82
agataaggacaggaggaagttgacgagaagattacaaaaaaagaagaggagaaattaaagaacaagaaagaatgagaagagagaaaagaacaagaa

SEQ ID NO: 10334 - DNA, 96 bp, Aspergillus thermomutatus
  misc_feature: 82
aggacaggaggaagttgacgagaagattacaaaaaaagaagaggagaaattaaagaacaagaaagaatgagaagagagaaaagaacaagaatagaa

SEQ ID NO: 10335 - DNA, 96 bp, Aspergillus thermomutatus
  misc_feature: 82
ttctaatctactcttctctctctttttcttctctctctttttcttctctctctttttcttctctctctttttcttctctctctctcttttcctttt

SEQ ID NO: 10336 - DNA, 96 bp, Aspergillus thermomutatus
  misc_feature: 82
gtcggttcaaaagtatggttggacctgcgcaacatacgaacggaccgccctagcaagaagctcgatgcccagcacgcgaagttcacagtactggaa

SEQ ID NO: 10337 - DNA, 96 bp, Aspergillus thermomutatus
  misc_feature: 82
gccaggagtaagcatagtaatatatgtaggtatataaaagccacgcagggttaggtataaaggcacccacagaggccccatgtaaggcagggttaa

SEQ ID NO: 10338 - DNA, 96 bp, Aspergillus thermomutatus
  misc_feature: 82
aaggtgaataaggagagaggagaagagaggagatgagaagagaggagatgagaagagatgagaagagaggagaggagatgagaagagaagagaaca

SEQ ID NO: 10339 - DNA, 96 bp, Aspergillus thermomutatus
  misc_feature: 82
cccatgtaaggcaggcagagaggtagagataggtagagagggacccaagtagcaggccataaggcaggccgtgagacacacagagaggtgtacaca

SEQ ID NO: 10340 - DNA, 96 bp, Aspergillus thermomutatus
  misc_feature: 82
agatacgctgtcggttcaaaagtatggttggacctgcgcaacatacgaacggaccgccctagcaagaagctcgatgcccagcacgcgaagttcaca

SEQ ID NO: 10341 - DNA, 96 bp, Aspergillus thermomutatus
  misc_feature: 82
tgtaaggcaggcagagaggtagagataggtagagagggacccaagtagcaggccataaggcaggccgtgagacacacagagaggtgtacacaaggc

SEQ ID NO: 10342 - DNA, 96 bp, Aspergillus thermomutatus
  misc_feature: 82
tggccttcttgtacagataaaatggtatcaccacctagattagcacgtattcttgccttcttctttcttttccgttcattctctgcccgtagaacc

SEQ ID NO: 10343 - DNA, 96 bp, Aspergillus thermomutatus
  misc_feature: 82
ggcagaacggtaggcagaacggcaggcagaacggtaggcagaacggcaggcagaacggcaggttgaatagcaggttgaatagcaggttgaatagca

SEQ ID NO: 10344 - DNA, 96 bp, Aspergillus thermomutatus
  misc_feature: 82
caagaggtaggcaaatacgtagggaccaaggtagggagtaaagccagtagagaggtagcaagagaggtagcaagagaggtagcaagagaggtagca

SEQ ID NO: 10345 - DNA, 96 bp, Aspergillus thermomutatus
  misc_feature: 82
gcaaggcacggagagaggtaggcagagaggtagggaggtagggagggaggtagagaggcaccataggaggtatggagcaatgcaccgcgtgaggca

SEQ ID NO: 10346 - DNA, 96 bp, Aspergillus thermomutatus
  misc_feature: 82
gtacacaaggcaggcagaacagcaggcaaaacagcaggcagaacggtaggcagaacggcaggcagaacggtaggcagaacggcaggcagaacggca

SEQ ID NO: 10347 - DNA, 96 bp, Aspergillus thermomutatus
  misc_feature: 82
tcttggatacctctctctatatctctctatctgatttggtggcttatacggtgccttactccccaccattctacctacctgtctgcctgtctgcct

SEQ ID NO: 10348 - DNA, 96 bp, Aspergillus thermomutatus
  misc_feature: 82
atctgtacttatatttattactgtatctctcattgtactcatcattgtaaattataataaattaataacctcagtaatatacagaaatgtataaga

SEQ ID NO: 10349 - DNA, 96 bp, Aspergillus thermomutatus
  misc_feature: 82
tctacgtgctattctacgtgctattctacgtgctattctacgtgctattctacgtgctattctacgtgctattctacatgctattcgacgtgctat

SEQ ID NO: 10350 - DNA, 96 bp, Aspergillus thermomutatus
  misc_feature: 82
tcctttttctctctggaatatgctcaacttttaactattacataccttctcattcagttatatatcccttatggcatatattccctctccctttct

SEQ ID NO: 10351 - DNA, 96 bp, Aspergillus thermomutatus
  misc_feature: 82
tccttttacaacctataatttctactaaccctcactcttatcctcattctcactctactcctctctcttatcctcattctaaccctcactccttcc

SEQ ID NO: 10352 - DNA, 96 bp, Aspergillus thermomutatus
  misc_feature: 82
tccttcttattctattcatctctctatcttatcctcttcctcttcaataatccttatccttattctaatactatctcttactctctttcctattac

SEQ ID NO: 10353 - DNA, 96 bp, Aspergillus thermomutatus
  misc_feature: 82
cttcttgtacagataaaatggtatcaccacctagattagcacgtattcttgccttcttctttcttttccgttcattctctgcccgtagaaccctga

SEQ ID NO: 10354 - DNA, 96 bp, Aspergillus thermomutatus
  misc_feature: 82
atcggacaccgagcgagacacgacaccgagcgagacacctgaacatgattttaaccgaggccgaaaaccatgagatatcttactaccacgcagtga

SEQ ID NO: 10355 - DNA, 96 bp, Aspergillus thermomutatus
  misc_feature: 82
tcaccgccgcgcgcgcgagcattaggcggcagcggtccggggcaggccagcaggcaggggggcgcgcgcgcggcggtgaccagttggccggggccc

SEQ ID NO: 10356 - DNA, 96 bp, Aspergillus thermomutatus
  misc_feature: 82
tagataatctttcatgtagaagagttaactctctaccttgatcctctatcgcacctacatctatatgattatgatatacattagattctgataata

SEQ ID NO: 10357 - DNA, 96 bp, Aspergillus thermomutatus
  misc_feature: 82
tattaagcaaggcacggagagaggtaggcagagaggtagggaggtagggagggaggtagagaggcaccataggaggtatggagcaatgcaccgcgt

SEQ ID NO: 10358 - DNA, 96 bp, Aspergillus thermomutatus
  misc_feature: 82
tataagtgattcctcttcagctttagtcaatttatgtgagttggcgcgttgttcagctcgaaaacagtgtccatttaatcgccgctgaagtgttgt

SEQ ID NO: 10359 - DNA, 96 bp, Aspergillus thermomutatus
  misc_feature: 82
cattagaaacattggaaacgcacattggtagatacattggattggaagacgcacctaatgattgtgtagcgcacattggaacagacagatgcacta

SEQ ID NO: 10360 - DNA, 96 bp, Aspergillus thermomutatus
  misc_feature: 82
tagagcaatcctaaccgtgccgcgcaggagctgtattgctggtgatcgattggttatcgctgctccgtaattttgcctgtcgcatccgccttgtgg

SEQ ID NO: 10361 - DNA, 96 bp, Aspergillus thermomutatus
  misc_feature: 82
gcgtgctattctatgtgcatcctacatgctattcgacgtgctattctacgtgctattctacgtgctattctacgtgctattctacgtgctattcta

SEQ ID NO: 10362 - DNA, 96 bp, Aspergillus thermomutatus
  misc_feature: 82
tagaaagaggattagagggaggattagaaagaggattagagggaggattagagggaggattagagggaggattagagggaggaaggagtgagggtt

SEQ ID NO: 10363 - DNA, 96 bp, Aspergillus thermomutatus
  misc_feature: 82
tactagcttacagtaggggcatgatttctagggctagcatagtctactaaagataagctcctaggagcagctattttagtattatagactgattct

SEQ ID NO: 10364 - DNA, 96 bp, Aspergillus thermomutatus
  misc_feature: 82
tacctcttggatacctctctctatatctctctatctgatttggtggcttatacggtgccttactccccaccattctacctacctgtctgcctgtct

SEQ ID NO: 10365 - DNA, 96 bp, Aspergillus thermomutatus
  misc_feature: 82
aagtcatctgtacttatatttattactgtatctctcattgtactcatcattgtaaattataataaattaataacctcagtaatatacagaaatgta

SEQ ID NO: 10366 - DNA, 96 bp, Aspergillus thermomutatus
  misc_feature: 82
tacacaaggcaggcagaacagcaggcaaaacagcaggcagaacggtaggcagaacggcaggcagaacggtaggcagaacggcaggcagaacggcag

SEQ ID NO: 10367 - DNA, 96 bp, Aspergillus thermomutatus
  misc_feature: 82
taacccttactctatcttatccaaaactaactaacccttactctatcttatctaaaactaactaaccctgactctatcctatttaaaactacccct

SEQ ID NO: 10368 - DNA, 96 bp, Aspergillus thermomutatus
  misc_feature: 82
taaaagtcatctgtacttatatttattactgtatctctcattgtactcatcattgtaaattataataaattaataacctcagtaatatacagaaat

SEQ ID NO: 10369 - DNA, 96 bp, Aspergillus thermomutatus
  misc_feature: 82
agcctgcacctgggcctgctcccaggcctgcatcacctcatcgaccgcagcctggacatggtgggtcgatggggccggtggacacccgtctggaac

SEQ ID NO: 10370 - DNA, 96 bp, Aspergillus thermomutatus
  misc_feature: 82
gtgctataggagcctactagcttacagtaggggcatgatttctagggctagcatagtctactaaagataagctcctaggagcagctattttagtat

SEQ ID NO: 10371 - DNA, 96 bp, Aspergillus thermomutatus
  misc_feature: 82
gagatacgctgtcggttcaaaagtatggttggacctgcgcaacatacgaacggaccgccctagcaagaagctcgatgcccagcacgcgaagttcac

SEQ ID NO: 10372 - DNA, 96 bp, Aspergillus thermomutatus
  misc_feature: 82
atactagaatggcagacccctacgtccactcgcggtgtacgatcgtttctcggctttgcgaacttctatcggcgctttgtacggaacttctctgac

SEQ ID NO: 10373 - DNA, 96 bp, Aspergillus thermomutatus
  misc_feature: 82
cttttattatgtactaactttagtatatgataatatcatatcatgttttgatacattaatgtatggaatagaactggaatttagagtagagaatac

SEQ ID NO: 10374 - DNA, 96 bp, Aspergillus thermomutatus
  misc_feature: 82
catggtgccttcctccctaccttatattatacattcttcgctacctcacgtggtgcatctctggggctacgtggggtgtgttgatccctactatac

SEQ ID NO: 10375 - DNA, 96 bp, Aspergillus thermomutatus
  misc_feature: 82
gtagagcaatcctaaccgtgccgcgcaggagctgtattgctggtgatcgattggttatcgctgctccgtaattttgcctgtcgcatccgccttgtg

SEQ ID NO: 10376 - DNA, 96 bp, Aspergillus thermomutatus
  misc_feature: 82
catgcaaggtttggaccaaggtagccagagagcaaccatatggggcaggtagtatagtagggatcaacacaccccacatagccccagagatgcacc

SEQ ID NO: 10377 - DNA, 96 bp, Aspergillus thermomutatus
  misc_feature: 82
ggtagagagggacccaagtagcaggccataaggcaggccgtgagacacacagagaggtgtacacaaggcaggcagaacagcaggcaaaacagcagg

SEQ ID NO: 10378 - DNA, 96 bp, Aspergillus thermomutatus
  misc_feature: 82
ggtagaagatagtaaaagagaaggattaggaaataggaatttaaaattaaaaaggagataaaataaggatagattagaggatagggagagagaagg

SEQ ID NO: 10379 - DNA, 96 bp, Aspergillus thermomutatus
  misc_feature: 82
ggccttcttgtacagataaaatggtatcaccacctagattagcacgtattcttgccttcttctttcttttccgttcattctctgcccgtagaaccc

SEQ ID NO: 10380 - DNA, 96 bp, Aspergillus thermomutatus
  misc_feature: 82
ctaacccttactctatcttatccaaaactaactaacccttactctatcttatctaaaactaactaaccctgactctatcctatttaaaactacccc

SEQ ID NO: 10381 - DNA, 96 bp, Aspergillus thermomutatus
  misc_feature: 82
gggcaggccggcgggcgcgcgcgcgcgcgagcattaggcggcagcggtccggggcaggccagcaggcaggggggcgcgcgcgcggcggtgaccagt

SEQ ID NO: 10382 - DNA, 96 bp, Aspergillus thermomutatus
  misc_feature: 82
ggcaggccggcgggcgcgcgcgcgcgcgagcattaggcggcagcggtccggggcaggccagcaggcaggggggcgcgcgcgcggcggtgaccagtt

SEQ ID NO: 10383 - DNA, 96 bp, Aspergillus thermomutatus
  misc_feature: 82
ggatagtataaggataaggataagaaggatagtaagggatagtgtaagggatagggttaaaaaagaggataagaaaagaaagaagaaaaggaaaag

SEQ ID NO: 10384 - DNA, 96 bp, Aspergillus thermomutatus
  misc_feature: 82
gctattctacgtgctattctacgtgctattctacgtgctattctacgtgctattctacgtgctattctacatgctattcgacgtgctattctatgt

SEQ ID NO: 10385 - DNA, 96 bp, Aspergillus thermomutatus
  misc_feature: 82
gcctctctccctgtcttacatggtgccttcctccctaccttatattatacattcttcgctacctcacgcggtgcatctctggggctatgtggggtg

SEQ ID NO: 10386 - DNA, 96 bp, Aspergillus thermomutatus
  misc_feature: 82
agcaaggcacggagagaggtaggcagagaggtagggaggtagggagggaggtagagaggcaccataggaggtatggagcaatgcaccgcgtgaggc

SEQ ID NO: 10387 - DNA, 96 bp, Aspergillus thermomutatus
  misc_feature: 82
gcagaacggtaggcagaacggcaggcagaacggtaggcagaacggcaggcagaacggcaggttgaatagcaggttgaatagcaggttgaatagcag

SEQ ID NO: 10388 - DNA, 96 bp, Aspergillus thermomutatus
  misc_feature: 82
accgccgcgcgcgcgagcattaggcggcagcggtccggggcaggccagcaggcaggggggcgcgcgcgcggcggtgaccagttggccggggccctc

SEQ ID NO: 10389 - DNA, 96 bp, Aspergillus thermomutatus
  misc_feature: 82
cttattctcttcttattttcctcttgttcttattctcttctctttctctttgattctccctcttctctcttgacctctcttctcttggcctctctc

SEQ ID NO: 10390 - DNA, 96 bp, Aspergillus thermomutatus
  misc_feature: 82
gagagagaagggattaaggaagattagaagagtagatagtaagggataggataggataggaaaaaagaaaagatttagaaatagaagattaaaggt

SEQ ID NO: 10391 - DNA, 96 bp, Aspergillus thermomutatus
  misc_feature: 82
ctacctcttggatacctctctctatatctctctatctgatttggtggcttatacggtgccttactccccaccattctacctacctgtctgcctgtc

SEQ ID NO: 10392 - DNA, 96 bp, Aspergillus thermomutatus
  misc_feature: 82
ataagtgattcctcttcagctttagtcaatttatgtgagttggcgcgttgttcagctcgaaaacagtgtccatttaatcgccgctgaagtgttgtc

SEQ ID NO: 10393 - DNA, 96 bp, Aspergillus thermomutatus
  misc_feature: 82
aataaatgggaatgaaagagacgaattaatggttaaagataaggacaggaggaagttgacgagaagattacaaaaaaagaagaggagaaattaaag

SEQ ID NO: 10394 - DNA, 96 bp, Aspergillus thermomutatus
  misc_feature: 82
cttcttattctcttcttattttcctcttgttcttattctcttctctttctctttgattctccctcttctctcttgacctctcttctcttggcctct

SEQ ID NO: 10395 - DNA, 96 bp, Aspergillus thermomutatus
  misc_feature: 82
cttactgcctctctccctgtcttacatggtgccttcctccctaccttatattatacattcttcgctacctcacgcggtgcatctctggggctatgt

SEQ ID NO: 10396 - DNA, 96 bp, Aspergillus thermomutatus
  misc_feature: 82
ctgcctctctccctgtcttacatggtgccttcctccctaccttatattatacattcttcgctacctcacgcggtgcatctctggggctatgtgggg

SEQ ID NO: 10397 - DNA, 96 bp, Aspergillus thermomutatus
  misc_feature: 82
ctctggccgtctcgcgcgcgcgccgtaatagggaccaggcagccgcgcgcgcgagacggccagagtgacgaagtccccttgcggcccaagcaacgg

SEQ ID NO: 10398 - DNA, 96 bp, Aspergillus thermomutatus
  misc_feature: 82
ctattctacgtgctattctacgtgctattctacgtgctattctacgtgctattctacgtgctattctacatgctattcgacgtgctattctatgtg

SEQ ID NO: 10399 - DNA, 96 bp, Aspergillus thermomutatus
  misc_feature: 82
attagaaacattggaaacgcacattggtagatacattggattggaagacgcacctaatgattgtgtagcgcacattggaacagacagatgcactag

SEQ ID NO: 10400 - DNA, 96 bp, Aspergillus thermomutatus
  misc_feature: 82
ctaccaatgtgcgtttccaatgtttctaatgtgctcagtaagatgaggagcgagttctaatgttacgggctagaccgtaggaaaacctatgactag

SEQ ID NO: 10401 - DNA, 96 bp, Aspergillus thermomutatus
  misc_feature: 82
ctaccttatattatacattcttcgctacctcacgtggtgcatctctggggctacgtggggtgtgttgatccctactatactacctgccccatatgg

SEQ ID NO: 10402 - DNA, 96 bp, Aspergillus thermomutatus
  misc_feature: 82
atattaagcaaggcacggagagaggtaggcagagaggtagggaggtagggagggaggtagagaggcaccataggaggtatggagcaatgcaccgcg

SEQ ID NO: 10403 - DNA, 96 bp, Aspergillus thermomutatus
  misc_feature: 82
agattagaggatagggagagagaagggaagagaagaaagaaaggagataagatttaagaatgaagatagtaagaaaaaggagagagggagtaaagg

SEQ ID NO: 10404 - DNA, 96 bp, Aspergillus thermomutatus
  misc_feature: 82
ccttcttattctattcatctctctatcttatcctcttcctcttcaataatccttatccttattctaatactatctcttactctctttcctattact

SEQ ID NO: 10405 - DNA, 96 bp, Aspergillus thermomutatus
  misc_feature: 82
ccaatagcttccagtactgtgaacttcgcgtgctgggcatcgagcttcttgctagggcggtccgttcgtatgttgcgcaggtccaaccatactttt

SEQ ID NO: 10406 - DNA, 96 bp, Aspergillus thermomutatus
  misc_feature: 82
aaaagtcatctgtacttatatttattactgtatctctcattgtactcatcattgtaaattataataaattaataacctcagtaatatacagaaatg

SEQ ID NO: 10407 - DNA, 96 bp, Aspergillus thermomutatus
  misc_feature: 82
aaggtatgtaatagttaaaagttgagcatattccagagagaaaaaggataagggagcagaaggatatatagagaagaagtataataagatttagtg

SEQ ID NO: 10408 - DNA, 96 bp, Aspergillus thermomutatus
  misc_feature: 82
caccgccgcgcgcgcgagcattaggcggcagcggtccggggcaggccagcaggcaggggggcgcgcgcgcggcggtgaccagttggccggggccct

SEQ ID NO: 10409 - DNA, 96 bp, Aspergillus thermomutatus
  misc_feature: 82
attcgacgtgctattctacgtgctattctacgtgctattctacgtgctattctacgtgctattctacgtgctattctacgtgctattctacgtgct

SEQ ID NO: 10410 - DNA, 96 bp, Aspergillus thermomutatus
  misc_feature: 82
atgtaggtgcgatagaggatcaaggtagagagttaactcttctacatgaaagattatctaatagaggttatatagattttagataattaaaatttt

SEQ ID NO: 10411 - DNA, 96 bp, Aspergillus novofumigatus
  misc_feature: 2046
gcatggcccaccggtgccatacctacctatatagatatatagatatatagatatgtagatatgtagatatatatacggacacacggacaccggggt

SEQ ID NO: 10412 - DNA, 96 bp, Aspergillus novofumigatus
  misc_feature: 2045
catggcccaccggtgccatacctacctatatagatatatagatatatagatatgtagatatgtagatatatatacggacacacggacaccggggtc

SEQ ID NO: 10413 - DNA, 96 bp, Aspergillus novofumigatus
  misc_feature: 2023
atggcccaccggtgccatacctacctatatagatatatagatatatagatatgtagatatgtagatatatatacggacacacggacaccggggtcg

SEQ ID NO: 10414 - DNA, 96 bp, Aspergillus novofumigatus
  misc_feature: 2020
tggcccaccggtgccatacctacctatatagatatatagatatatagatatgtagatatgtagatatatatacggacacacggacaccggggtcga

SEQ ID NO: 10415 - DNA, 96 bp, Aspergillus novofumigatus
  misc_feature: 2020
ggcccaccggtgccatacctacctatatagatatatagatatatagatatgtagatatgtagatatatatacggacacacggacaccggggtcgat

SEQ ID NO: 10416 - DNA, 96 bp, Aspergillus novofumigatus
  misc_feature: 2016
gcccaccggtgccatacctacctatatagatatatagatatatagatatgtagatatgtagatatatatacggacacacggacaccggggtcgata

SEQ ID NO: 10417 - DNA, 96 bp, Aspergillus novofumigatus
  misc_feature: 2003
cccaccggtgccatacctacctatatagatatatagatatatagatatgtagatatgtagatatatatacggacacacggacaccggggtcgatat

SEQ ID NO: 10418 - DNA, 96 bp, Aspergillus novofumigatus
  misc_feature: 1985
aatcatatagacgttatatggtaaagtatgagaaataccttagagagaagaaatttgaccctagaggtaccagagaacaagtagaagatacttttc

SEQ ID NO: 10419 - DNA, 96 bp, Aspergillus novofumigatus
  misc_feature: 1983
aaatcatatagacgttatatggtaaagtatgagaaataccttagagagaagaaatttgaccctagaggtaccagagaacaagtagaagatactttt

SEQ ID NO: 10420 - DNA, 96 bp, Aspergillus novofumigatus
  misc_feature: 1982
tcatatagacgttatatggtaaagtatgagaaataccttagagagaagaaatttgaccctagaggtaccagagaacaagtagaagatacttttcct

SEQ ID NO: 10421 - DNA, 96 bp, Aspergillus novofumigatus
  misc_feature: 1978
atcatatagacgttatatggtaaagtatgagaaataccttagagagaagaaatttgaccctagaggtaccagagaacaagtagaagatacttttcc

SEQ ID NO: 10422 - DNA, 96 bp, Aspergillus novofumigatus
  misc_feature: 1954
gaggagactaaatcatatagacgttatatggtaaagtatgagaaataccttagagagaagaaatttgaccctagaggtaccagagaacaagtagaa

SEQ ID NO: 10423 - DNA, 96 bp, Aspergillus novofumigatus
  misc_feature: 1943
atatagacgttatatggtaaagtatgagaaataccttagagagaagaaatttgaccctagaggtaccagagaacaagtagaagatacttttcctag

SEQ ID NO: 10424 - DNA, 96 bp, Aspergillus novofumigatus
  misc_feature: 1939
tatagacgttatatggtaaagtatgagaaataccttagagagaagaaatttgaccctagaggtaccagagaacaagtagaagatacttttcctagt

SEQ ID NO: 10425 - DNA, 96 bp, Aspergillus novofumigatus
  misc_feature: 1934
atgaggagactaaatcatatagacgttatatggtaaagtatgagaaataccttagagagaagaaatttgaccctagaggtaccagagaacaagtag

SEQ ID NO: 10426 - DNA, 96 bp, Aspergillus novofumigatus
  misc_feature: 1933
tgaggagactaaatcatatagacgttatatggtaaagtatgagaaataccttagagagaagaaatttgaccctagaggtaccagagaacaagtaga

SEQ ID NO: 10427 - DNA, 96 bp, Aspergillus novofumigatus
  misc_feature: 1921
atagacgttatatggtaaagtatgagaaataccttagagagaagaaatttgaccctagaggtaccagagaacaagtagaagatacttttcctagtt

SEQ ID NO: 10428 - DNA, 96 bp, Aspergillus novofumigatus
  misc_feature: 1881
agatgaaatatcaagaaatttttttacctttagaaatcattacatacaaacaagtaatttcttactcttacggactatgtcttcatccattatata

SEQ ID NO: 10429 - DNA, 96 bp, Aspergillus novofumigatus
  misc_feature: 1879
gatgaaatatcaagaaatttttttacctttagaaatcattacatacaaacaagtaatttcttactcttacggactatgtcttcatccattatatat

SEQ ID NO: 10430 - DNA, 96 bp, Aspergillus novofumigatus
  misc_feature: 1843
aggccaaaacaatccatttcctttagtatcaccatcatcttgaccactatttagtaatgtttcattatttttcaatgatatatttgtaggttcaca

SEQ ID NO: 10431 - DNA, 96 bp, Aspergillus novofumigatus
  misc_feature: 1833
ggccaaaacaatccatttcctttagtatcaccatcatcttgaccactatttagtaatgtttcattatttttcaatgatatatttgtaggttcacaa

SEQ ID NO: 10432 - DNA, 96 bp, Aspergillus novofumigatus
  misc_feature: 1818
caggccaaaacaatccatttcctttagtatcaccatcatcttgaccactatttagtaatgtttcattatttttcaatgatatatttgtaggttcac

SEQ ID NO: 10433 - DNA, 96 bp, Aspergillus novofumigatus
  misc_feature: 1803
tcaggccaaaacaatccatttcctttagtatcaccatcatcttgaccactatttagtaatgtttcattatttttcaatgatatatttgtaggttca

SEQ ID NO: 10434 - DNA, 96 bp, Aspergillus novofumigatus
  misc_feature: 1803
tatttagatgctacatccttaagtttattatatgaaaaatttacttattcatttaaagaaactaatccccagtttttctctgttcatgattgtttt

SEQ ID NO: 10435 - DNA, 96 bp, Aspergillus novofumigatus
  misc_feature: 1793
agatttattattgtacatggaataagaaaccatatggtagtaaaatatatcctgatagtgatgcaggttttgctgctgcttttgattatttgaaaa

SEQ ID NO: 10436 - DNA, 96 bp, Aspergillus novofumigatus
  misc_feature: 1789
gagaaaagaacattagaaatggataatcatacttatcatattcatgatatagtatgagtaatgaataagaaacacgttagtccaataacgattaaa

SEQ ID NO: 10437 - DNA, 96 bp, Aspergillus novofumigatus
  misc_feature: 1788
attatttagatgctacatccttaagtttattatatgaaaaatttacttattcatttaaagaaactaatccccagtttttctctgttcatgattgtt

SEQ ID NO: 10438 - DNA, 96 bp, Aspergillus novofumigatus
  misc_feature: 1786
ttatttagatgctacatccttaagtttattatatgaaaaatttacttattcatttaaagaaactaatccccagtttttctctgttcatgattgttt

SEQ ID NO: 10439 - DNA, 96 bp, Aspergillus novofumigatus
  misc_feature: 1786
tatcactcaggccaaaacaatccatttcctttagtatcaccatcatcttgaccactatttagtaatgtttcattatttttcaatgatatatttgta

SEQ ID NO: 10440 - DNA, 96 bp, Aspergillus novofumigatus
  misc_feature: 1784
cactcaggccaaaacaatccatttcctttagtatcaccatcatcttgaccactatttagtaatgtttcattatttttcaatgatatatttgtaggt

SEQ ID NO: 10441 - DNA, 96 bp, Aspergillus novofumigatus
  misc_feature: 1783
actcaggccaaaacaatccatttcctttagtatcaccatcatcttgaccactatttagtaatgtttcattatttttcaatgatatatttgtaggtt

SEQ ID NO: 10442 - DNA, 96 bp, Aspergillus novofumigatus
  misc_feature: 1781
agaaaagaacattagaaatggataatcatacttatcatattcatgatatagtatgagtaatgaataagaaacacgttagtccaataacgattaaaa

SEQ ID NO: 10443 - DNA, 96 bp, Aspergillus novofumigatus
  misc_feature: 1774
ctcaggccaaaacaatccatttcctttagtatcaccatcatcttgaccactatttagtaatgtttcattatttttcaatgatatatttgtaggttc

SEQ ID NO: 10444 - DNA, 96 bp, Aspergillus novofumigatus
  misc_feature: 1771
gatttattattgtacatggaataagaaaccatatggtagtaaaatatatcctgatagtgatgcaggttttgctgctgcttttgattatttgaaaac

SEQ ID NO: 10445 - DNA, 96 bp, Aspergillus novofumigatus
  misc_feature: 1768
atgataaattttcacttaatatatttttactaactaataccataatatattatatatatttatgtacaatcatttaagtaaggtaaccttaactaa

SEQ ID NO: 10446 - DNA, 96 bp, Aspergillus novofumigatus
  misc_feature: 1768
aaaattttttttatttatttactacctatggtttagtaaattagatattctaattctaactttaggatcctctagtaaattaggcattctaattct

SEQ ID NO: 10447 - DNA, 96 bp, Aspergillus novofumigatus
  misc_feature: 1768
agaaaattttttttatttatttactacctatggtttagtaaattagatattctaattctaactttaggatcctctagtaaattaggcattctaatt

SEQ ID NO: 10448 - DNA, 96 bp, Aspergillus novofumigatus
  misc_feature: 1766
tcactcaggccaaaacaatccatttcctttagtatcaccatcatcttgaccactatttagtaatgtttcattatttttcaatgatatatttgtagg

SEQ ID NO: 10449 - DNA, 96 bp, Aspergillus novofumigatus
  misc_feature: 1765
aaattttttttatttatttactacctatggtttagtaaattagatattctaattctaactttaggatcctctagtaaattaggcattctaattcta

SEQ ID NO: 10450 - DNA, 96 bp, Aspergillus novofumigatus
  misc_feature: 1764
atcactcaggccaaaacaatccatttcctttagtatcaccatcatcttgaccactatttagtaatgtttcattatttttcaatgatatatttgtag

SEQ ID NO: 10451 - DNA, 96 bp, Aspergillus novofumigatus
  misc_feature: 1763
tagaaaattttttttatttatttactacctatggtttagtaaattagatattctaattctaactttaggatcctctagtaaattaggcattctaat

SEQ ID NO: 10452 - DNA, 96 bp, Aspergillus novofumigatus
  misc_feature: 1761
aagtatatattattttgttaaaatatatatactttacatacaactaatcattggttgattatatttataacttcagcacactgatctattgaaggt

SEQ ID NO: 10453 - DNA, 96 bp, Aspergillus novofumigatus
  misc_feature: 1760
aatgataaattttcacttaatatatttttactaactaataccataatatattatatatatttatgtacaatcatttaagtaaggtaaccttaacta

SEQ ID NO: 10454 - DNA, 96 bp, Aspergillus novofumigatus
  misc_feature: 1759
tttattattgtacatggaataagaaaccatatggtagtaaaatatatcctgatagtgatgcaggttttgctgctgcttttgattatttgaaaacaa

SEQ ID NO: 10455 - DNA, 96 bp, Aspergillus novofumigatus
  misc_feature: 1758
gttttggaactacaattgaaaaagtatttgtattaaaaacaatgttagcatctgtttatacagatatttattcaagtgatccttatctatataaat

SEQ ID NO: 10456 - DNA, 96 bp, Aspergillus novofumigatus
  misc_feature: 1757
agtatatattattttgttaaaatatatatactttacatacaactaatcattggttgattatatttataacttcagcacactgatctattgaaggtt

SEQ ID NO: 10457 - DNA, 96 bp, Aspergillus novofumigatus
  misc_feature: 1756
atttattattgtacatggaataagaaaccatatggtagtaaaatatatcctgatagtgatgcaggttttgctgctgcttttgattatttgaaaaca

SEQ ID NO: 10458 - DNA, 96 bp, Aspergillus novofumigatus
  misc_feature: 1756
gaaaattttttttatttatttactacctatggtttagtaaattagatattctaattctaactttaggatcctctagtaaattaggcattctaattc

SEQ ID NO: 10459 - DNA, 96 bp, Aspergillus novofumigatus
  misc_feature: 1756
aatatagaaaattttttttatttatttactacctatggtttagtaaattagatattctaattctaactttaggatcctctagtaaattaggcattc

SEQ ID NO: 10460 - DNA, 96 bp, Aspergillus novofumigatus
  misc_feature: 1754
atatagaaaattttttttatttatttactacctatggtttagtaaattagatattctaattctaactttaggatcctctagtaaattaggcattct

SEQ ID NO: 10461 - DNA, 96 bp, Aspergillus novofumigatus
  misc_feature: 1754
aattttttttatttatttactacctatggtttagtaaattagatattctaattctaactttaggatcctctagtaaattaggcattctaattctat

SEQ ID NO: 10462 - DNA, 96 bp, Aspergillus novofumigatus
  misc_feature: 1753
aaatgataaattttcacttaatatatttttactaactaataccataatatattatatatatttatgtacaatcatttaagtaaggtaaccttaact

SEQ ID NO: 10463 - DNA, 96 bp, Aspergillus novofumigatus
  misc_feature: 1752
agaaaaaaacagaagatcctatgaatagaattagaatgcctaatttactagaggatcctaaagttagaattagaatatctaatttactaaaccata

SEQ ID NO: 10464 - DNA, 96 bp, Aspergillus novofumigatus
  misc_feature: 1751
tattttgttaaaatatatatactttacatacaactaatcattggttgattatatttataacttcagcacactgatctattgaaggttcagttacta

SEQ ID NO: 10465 - DNA, 96 bp, Aspergillus novofumigatus
  misc_feature: 1751
caacgtgatgatgttagaaaggcgaatatagagagtgtatttcataaatattttcctagattagatggtagaaaagactacacaggattaggtctt

SEQ ID NO: 10466 - DNA, 96 bp, Aspergillus novofumigatus
  misc_feature: 1750
atagaaaattttttttatttatttactacctatggtttagtaaattagatattctaattctaactttaggatcctctagtaaattaggcattctaa

SEQ ID NO: 10467 - DNA, 96 bp, Aspergillus novofumigatus
  misc_feature: 1750
ataaatgataaattttcacttaatatatttttactaactaataccataatatattatatatatttatgtacaatcatttaagtaaggtaaccttaa

SEQ ID NO: 10468 - DNA, 96 bp, Aspergillus novofumigatus
  misc_feature: 1750
tctgttcatgattgttttggaactacaattgaaaaagtatttgtattaaaaacaatgttagcatctgtttatacagatatttattcaagtgatcct

SEQ ID NO: 10469 - DNA, 96 bp, Aspergillus novofumigatus
  misc_feature: 1750
tctatcactcaggccaaaacaatccatttcctttagtatcaccatcatcttgaccactatttagtaatgtttcattatttttcaatgatatatttg

SEQ ID NO: 10470 - DNA, 96 bp, Aspergillus novofumigatus
  misc_feature: 1748
ttattattgtacatggaataagaaaccatatggtagtaaaatatatcctgatagtgatgcaggttttgctgctgcttttgattatttgaaaacaaa

SEQ ID NO: 10471 - DNA, 96 bp, Aspergillus novofumigatus
  misc_feature: 1748
atctaagaaaaaaacagaagatcctatgaatagaattagaatgcctaatttactagaggatcctaaagttagaattagaatatctaatttactaaa

SEQ ID NO: 10472 - DNA, 96 bp, Aspergillus novofumigatus
  misc_feature: 1747
tatagaaaattttttttatttatttactacctatggtttagtaaattagatattctaattctaactttaggatcctctagtaaattaggcattcta

SEQ ID NO: 10473 - DNA, 96 bp, Aspergillus novofumigatus
  misc_feature: 1747
aacgtgatgatgttagaaaggcgaatatagagagtgtatttcataaatattttcctagattagatggtagaaaagactacacaggattaggtctta

SEQ ID NO: 10474 - DNA, 96 bp, Aspergillus novofumigatus
  misc_feature: 1746
tattattgtacatggaataagaaaccatatggtagtaaaatatatcctgatagtgatgcaggttttgctgctgcttttgattatttgaaaacaaaa

SEQ ID NO: 10475 - DNA, 96 bp, Aspergillus novofumigatus
  misc_feature: 1746
aaagtatatattattttgttaaaatatatatactttacatacaactaatcattggttgattatatttataacttcagcacactgatctattgaagg

SEQ ID NO: 10476 - DNA, 96 bp, Aspergillus novofumigatus
  misc_feature: 1746
aagaaaaaaacagaagatcctatgaatagaattagaatgcctaatttactagaggatcctaaagttagaattagaatatctaatttactaaaccat

SEQ ID NO: 10477 - DNA, 96 bp, Aspergillus novofumigatus
  misc_feature: 1745
tcaacgtgatgatgttagaaaggcgaatatagagagtgtatttcataaatattttcctagattagatggtagaaaagactacacaggattaggtct

SEQ ID NO: 10478 - DNA, 96 bp, Aspergillus novofumigatus
  misc_feature: 1745
taatctatcactcaggccaaaacaatccatttcctttagtatcaccatcatcttgaccactatttagtaatgtttcattatttttcaatgatatat

SEQ ID NO: 10479 - DNA, 96 bp, Aspergillus novofumigatus
  misc_feature: 1745
taaatgataaattttcacttaatatatttttactaactaataccataatatattatatatatttatgtacaatcatttaagtaaggtaaccttaac

SEQ ID NO: 10480 - DNA, 96 bp, Aspergillus novofumigatus
  misc_feature: 1745
attttttttatttatttactacctatggtttagtaaattagatattctaattctaactttaggatcctctagtaaattaggcattctaattctatt

SEQ ID NO: 10481 - DNA, 96 bp, Aspergillus novofumigatus
  misc_feature: 1744
gaatagaattagaatgcctaatttactagaggatcctaaagttagaattagaatatctaatttactaaaccataggtagtaaataaataaaaaaaa

SEQ ID NO: 10482 - DNA, 96 bp, Aspergillus novofumigatus
  misc_feature: 1744
ttattatcaacgtgatgatgttagaaaggcgaatatagagagtgtatttcataaatattttcctagattagatggtagaaaagactacacaggatt

SEQ ID NO: 10483 - DNA, 96 bp, Aspergillus novofumigatus
  misc_feature: 1744
tctaagaaaaaaacagaagatcctatgaatagaattagaatgcctaatttactagaggatcctaaagttagaattagaatatctaatttactaaac

SEQ ID NO: 10484 - DNA, 96 bp, Aspergillus novofumigatus
  misc_feature: 1743
taagaaaaaaacagaagatcctatgaatagaattagaatgcctaatttactagaggatcctaaagttagaattagaatatctaatttactaaacca

SEQ ID NO: 10485 - DNA, 96 bp, Aspergillus novofumigatus
  misc_feature: 1743
atcaacgtgatgatgttagaaaggcgaatatagagagtgtatttcataaatattttcctagattagatggtagaaaagactacacaggattaggtc

SEQ ID NO: 10486 - DNA, 96 bp, Aspergillus novofumigatus
  misc_feature: 1743
aaaatcaacatctttcaaagcagtttttcacaaagcactagacaccctaagaagatctgccttactatctcctttcaagattactggtttttttgt

SEQ ID NO: 10487 - DNA, 96 bp, Aspergillus novofumigatus
  misc_feature: 1742
tattatcaacgtgatgatgttagaaaggcgaatatagagagtgtatttcataaatattttcctagattagatggtagaaaagactacacaggatta

SEQ ID NO: 10488 - DNA, 96 bp, Aspergillus novofumigatus
  misc_feature: 1742
ctatcactcaggccaaaacaatccatttcctttagtatcaccatcatcttgaccactatttagtaatgtttcattatttttcaatgatatatttgt

SEQ ID NO: 10489 - DNA, 96 bp, Aspergillus novofumigatus
  misc_feature: 1742
aaatatagaaaattttttttatttatttactacctatggtttagtaaattagatattctaattctaactttaggatcctctagtaaattaggcatt

SEQ ID NO: 10490 - DNA, 96 bp, Aspergillus novofumigatus
  misc_feature: 1741
ctgttcatgattgttttggaactacaattgaaaaagtatttgtattaaaaacaatgttagcatctgtttatacagatatttattcaagtgatcctt

SEQ ID NO: 10491 - DNA, 96 bp, Aspergillus novofumigatus
  misc_feature: 1741
aaatcaacatctttcaaagcagtttttcacaaagcactagacaccctaagaagatctgccttactatctcctttcaagattactggtttttttgtt

SEQ ID NO: 10492 - DNA, 96 bp, Aspergillus novofumigatus
  misc_feature: 1740
aatctaagaaaaaaacagaagatcctatgaatagaattagaatgcctaatttactagaggatcctaaagttagaattagaatatctaatttactaa

SEQ ID NO: 10493 - DNA, 96 bp, Aspergillus novofumigatus
  misc_feature: 1740
taaagtatatattattttgttaaaatatatatactttacatacaactaatcattggttgattatatttataacttcagcacactgatctattgaag

SEQ ID NO: 10494 - DNA, 96 bp, Aspergillus novofumigatus
  misc_feature: 1740
attttgttaaaatatatatactttacatacaactaatcattggttgattatatttataacttcagcacactgatctattgaaggttcagttactag

SEQ ID NO: 10495 - DNA, 96 bp, Aspergillus novofumigatus
  misc_feature: 1739
taaaatcaacatctttcaaagcagtttttcacaaagcactagacaccctaagaagatctgccttactatctcctttcaagattactggtttttttg

SEQ ID NO: 10496 - DNA, 96 bp, Aspergillus novofumigatus
  misc_feature: 1738
ttttgttaaaatatatatactttacatacaactaatcattggttgattatatttataacttcagcacactgatctattgaaggttcagttactagt

SEQ ID NO: 10497 - DNA, 96 bp, Aspergillus novofumigatus
  misc_feature: 1738
ttttggaactacaattgaaaaagtatttgtattaaaaacaatgttagcatctgtttatacagatatttattcaagtgatccttatctatataaatt

SEQ ID NO: 10498 - DNA, 96 bp, Aspergillus novofumigatus
  misc_feature: 1738
acgtgatgatgttagaaaggcgaatatagagagtgtatttcataaatattttcctagattagatggtagaaaagactacacaggattaggtcttaa

SEQ ID NO: 10499 - DNA, 96 bp, Aspergillus novofumigatus
  misc_feature: 1738
aaggttaccttacttaaatgattgtacataaatatatataatatattatggtattagttagtaaaaatatattaagtgaaaatttatcatttatta

SEQ ID NO: 10500 - DNA, 96 bp, Aspergillus novofumigatus
  misc_feature: 1738
taaggttaccttacttaaatgattgtacataaatatatataatatattatggtattagttagtaaaaatatattaagtgaaaatttatcatttatt

SEQ ID NO: 10501 - DNA, 96 bp, Aspergillus novofumigatus
  misc_feature: 1737
ggaatctaagaaaaaaacagaagatcctatgaatagaattagaatgcctaatttactagaggatcctaaagttagaattagaatatctaatttact

SEQ ID NO: 10502 - DNA, 96 bp, Aspergillus novofumigatus
  misc_feature: 1734
tgaatagaattagaatgcctaatttactagaggatcctaaagttagaattagaatatctaatttactaaaccataggtagtaaataaataaaaaaa

SEQ ID NO: 10503 - DNA, 96 bp, Aspergillus novofumigatus
  misc_feature: 1734
ttaatctatcactcaggccaaaacaatccatttcctttagtatcaccatcatcttgaccactatttagtaatgtttcattatttttcaatgatata

SEQ ID NO: 10504 - DNA, 96 bp, Aspergillus novofumigatus
  misc_feature: 1734
tgttaaaatatatatactttacatacaactaatcattggttgattatatttataacttcagcacactgatctattgaaggttcagttactagtgta

SEQ ID NO: 10505 - DNA, 96 bp, Aspergillus novofumigatus
  misc_feature: 1734
gaaaaaaacagaagatcctatgaatagaattagaatgcctaatttactagaggatcctaaagttagaattagaatatctaatttactaaaccatag

SEQ ID NO: 10506 - DNA, 96 bp, Aspergillus novofumigatus
  misc_feature: 1733
tattattttgttaaaatatatatactttacatacaactaatcattggttgattatatttataacttcagcacactgatctattgaaggttcagtta

SEQ ID NO: 10507 - DNA, 96 bp, Aspergillus novofumigatus
  misc_feature: 1733
tatcaacgtgatgatgttagaaaggcgaatatagagagtgtatttcataaatattttcctagattagatggtagaaaagactacacaggattaggt

SEQ ID NO: 10508 - DNA, 96 bp, Aspergillus novofumigatus
  misc_feature: 1733
tatattattttgttaaaatatatatactttacatacaactaatcattggttgattatatttataacttcagcacactgatctattgaaggttcagt

SEQ ID NO: 10509 - DNA, 96 bp, Aspergillus novofumigatus
  misc_feature: 1733
gaatctaagaaaaaaacagaagatcctatgaatagaattagaatgcctaatttactagaggatcctaaagttagaattagaatatctaatttacta

SEQ ID NO: 10510 - DNA, 96 bp, Aspergillus novofumigatus
  misc_feature: 1732
ttctcacgatctaatctataattagtgttattttctattaaatctaatatattttatcaaatttatatagataaggatcacttgaataaatatctg

SEQ ID NO: 10511 - DNA, 96 bp, Aspergillus novofumigatus
  misc_feature: 1732
ttacttaaatgattgtacataaatatatataatatattatggtattagttagtaaaaatatattaagtgaaaatttatcatttattactaaaatta

SEQ ID NO: 10512 - DNA, 96 bp, Aspergillus novofumigatus
  misc_feature: 1732
tctcacgatctaatctataattagtgttattttctattaaatctaatatattttatcaaatttatatagataaggatcacttgaataaatatctgt

SEQ ID NO: 10513 - DNA, 96 bp, Aspergillus novofumigatus
  misc_feature: 1731
acttaaatgattgtacataaatatatataatatattatggtattagttagtaaaaatatattaagtgaaaatttatcatttattactaaaattaaa

SEQ ID NO: 10514 - DNA, 96 bp, Aspergillus novofumigatus
  misc_feature: 1731
attattatcaacgtgatgatgttagaaaggcgaatatagagagtgtatttcataaatattttcctagattagatggtagaaaagactacacaggat

SEQ ID NO: 10515 - DNA, 96 bp, Aspergillus novofumigatus
  misc_feature: 1730
agaaatggataatcatacttatcatattcatgatatagtatgagtaatgaataagaaacacgttagtccaataacgattaaaaaaataaatagtca

SEQ ID NO: 10516 - DNA, 96 bp, Aspergillus novofumigatus
  misc_feature: 1730
gttaaaatatatatactttacatacaactaatcattggttgattatatttataacttcagcacactgatctattgaaggttcagttactagtgtat

SEQ ID NO: 10517 - DNA, 96 bp, Aspergillus novofumigatus
  misc_feature: 1729
tacttaaatgattgtacataaatatatataatatattatggtattagttagtaaaaatatattaagtgaaaatttatcatttattactaaaattaa

SEQ ID NO: 10518 - DNA, 96 bp, Aspergillus novofumigatus
  misc_feature: 1728
ctaagaaaaaaacagaagatcctatgaatagaattagaatgcctaatttactagaggatcctaaagttagaattagaatatctaatttactaaacc

SEQ ID NO: 10519 - DNA, 96 bp, Aspergillus novofumigatus
  misc_feature: 1728
ctctgttcatgattgttttggaactacaattgaaaaagtatttgtattaaaaacaatgttagcatctgtttatacagatatttattcaagtgatcc

SEQ ID NO: 10520 - DNA, 96 bp, Aspergillus novofumigatus
  misc_feature: 1727
ttaaatgattgtacataaatatatataatatattatggtattagttagtaaaaatatattaagtgaaaatttatcatttattactaaaattaaaat

SEQ ID NO: 10521 - DNA, 96 bp, Aspergillus novofumigatus
  misc_feature: 1727
tgaaatatagaaaattttttttatttatttactacctatggtttagtaaattagatattctaattctaactttaggatcctctagtaaattaggca

SEQ ID NO: 10522 - DNA, 96 bp, Aspergillus novofumigatus
  misc_feature: 1727
aaaaacagaagatcctatgaatagaattagaatgcctaatttactagaggatcctaaagttagaattagaatatctaatttactaaaccataggta

SEQ ID NO: 10523 - DNA, 96 bp, Aspergillus novofumigatus
  misc_feature: 1727
aggaatctaagaaaaaaacagaagatcctatgaatagaattagaatgcctaatttactagaggatcctaaagttagaattagaatatctaatttac

SEQ ID NO: 10524 - DNA, 96 bp, Aspergillus novofumigatus
  misc_feature: 1727
attatcaacgtgatgatgttagaaaggcgaatatagagagtgtatttcataaatattttcctagattagatggtagaaaagactacacaggattag

SEQ ID NO: 10525 - DNA, 96 bp, Aspergillus novofumigatus
  misc_feature: 1727
aaatggataatcatacttatcatattcatgatatagtatgagtaatgaataagaaacacgttagtccaataacgattaaaaaaataaatagtcagt

SEQ ID NO: 10526 - DNA, 96 bp, Aspergillus novofumigatus
  misc_feature: 1727
aatcaacatctttcaaagcagtttttcacaaagcactagacaccctaagaagatctgccttactatctcctttcaagattactggtttttttgttt

SEQ ID NO: 10527 - DNA, 96 bp, Aspergillus novofumigatus
  misc_feature: 1726
cttacttaaatgattgtacataaatatatataatatattatggtattagttagtaaaaatatattaagtgaaaatttatcatttattactaaaatt

SEQ ID NO: 10528 - DNA, 96 bp, Aspergillus novofumigatus
  misc_feature: 1726
aatggataatcatacttatcatattcatgatatagtatgagtaatgaataagaaacacgttagtccaataacgattaaaaaaataaatagtcagtt

SEQ ID NO: 10529 - DNA, 96 bp, Aspergillus novofumigatus
  misc_feature: 1725
tttgttaaaatatatatactttacatacaactaatcattggttgattatatttataacttcagcacactgatctattgaaggttcagttactagtg

SEQ ID NO: 10530 - DNA, 96 bp, Aspergillus novofumigatus
  misc_feature: 1725
gtatatattattttgttaaaatatatatactttacatacaactaatcattggttgattatatttataacttcagcacactgatctattgaaggttc

SEQ ID NO: 10531 - DNA, 96 bp, Aspergillus novofumigatus
  misc_feature: 1725
attattttgttaaaatatatatactttacatacaactaatcattggttgattatatttataacttcagcacactgatctattgaaggttcagttac

SEQ ID NO: 10532 - DNA, 96 bp, Aspergillus novofumigatus
  misc_feature: 1724
agaggaatctaagaaaaaaacagaagatcctatgaatagaattagaatgcctaatttactagaggatcctaaagttagaattagaatatctaattt

SEQ ID NO: 10533 - DNA, 96 bp, Aspergillus novofumigatus
  misc_feature: 1723
ttgttaaaatatatatactttacatacaactaatcattggttgattatatttataacttcagcacactgatctattgaaggttcagttactagtgt

SEQ ID NO: 10534 - DNA, 96 bp, Aspergillus novofumigatus
  misc_feature: 1723
gaaatatagaaaattttttttatttatttactacctatggtttagtaaattagatattctaattctaactttaggatcctctagtaaattaggcat

SEQ ID NO: 10535 - DNA, 96 bp, Aspergillus novofumigatus
  misc_feature: 1722
gtaaagtatatattattttgttaaaatatatatactttacatacaactaatcattggttgattatatttataacttcagcacactgatctattgaa

SEQ ID NO: 10536 - DNA, 96 bp, Aspergillus novofumigatus
  misc_feature: 1722
ttatcaacgtgatgatgttagaaaggcgaatatagagagtgtatttcataaatattttcctagattagatggtagaaaagactacacaggattagg

SEQ ID NO: 10537 - DNA, 96 bp, Aspergillus novofumigatus
  misc_feature: 1722
aaaaaaacagaagatcctatgaatagaattagaatgcctaatttactagaggatcctaaagttagaattagaatatctaatttactaaaccatagg

SEQ ID NO: 10538 - DNA, 96 bp, Aspergillus novofumigatus
  misc_feature: 1721
tatatattattttgttaaaatatatatactttacatacaactaatcattggttgattatatttataacttcagcacactgatctattgaaggttca

SEQ ID NO: 10539 - DNA, 96 bp, Aspergillus novofumigatus
  misc_feature: 1721
ggttaccttacttaaatgattgtacataaatatatataatatattatggtattagttagtaaaaatatattaagtgaaaatttatcatttattact

SEQ ID NO: 10540 - DNA, 96 bp, Aspergillus novofumigatus
  misc_feature: 1721
cgtgatgatgttagaaaggcgaatatagagagtgtatttcataaatattttcctagattagatggtagaaaagactacacaggattaggtcttaag

SEQ ID NO: 10541 - DNA, 96 bp, Aspergillus novofumigatus
  misc_feature: 1721
atcaacatctttcaaagcagtttttcacaaagcactagacaccctaagaagatctgccttactatctcctttcaagattactggtttttttgtttt

SEQ ID NO: 10542 - DNA, 96 bp, Aspergillus novofumigatus
  misc_feature: 1720
tttggaactacaattgaaaaagtatttgtattaaaaacaatgttagcatctgtttatacagatatttattcaagtgatccttatctatataaattt

SEQ ID NO: 10543 - DNA, 96 bp, Aspergillus novofumigatus
  misc_feature: 1719
aaaaaacagaagatcctatgaatagaattagaatgcctaatttactagaggatcctaaagttagaattagaatatctaatttactaaaccataggt

SEQ ID NO: 10544 - DNA, 96 bp, Aspergillus novofumigatus
  misc_feature: 1718
atgaatagaattagaatgcctaatttactagaggatcctaaagttagaattagaatatctaatttactaaaccataggtagtaaataaataaaaaa

SEQ ID NO: 10545 - DNA, 96 bp, Aspergillus novofumigatus
  misc_feature: 1718
aacagaagatcctatgaatagaattagaatgcctaatttactagaggatcctaaagttagaattagaatatctaatttactaaaccataggtagta

SEQ ID NO: 10546 - DNA, 96 bp, Aspergillus novofumigatus
  misc_feature: 1717
cttaaatgattgtacataaatatatataatatattatggtattagttagtaaaaatatattaagtgaaaatttatcatttattactaaaattaaaa

SEQ ID NO: 10547 - DNA, 96 bp, Aspergillus novofumigatus
  misc_feature: 1717
tagaaatggataatcatacttatcatattcatgatatagtatgagtaatgaataagaaacacgttagtccaataacgattaaaaaaataaatagtc

SEQ ID NO: 10548 - DNA, 96 bp, Aspergillus novofumigatus
  misc_feature: 1716
tcaacatctttcaaagcagtttttcacaaagcactagacaccctaagaagatctgccttactatctcctttcaagattactggtttttttgttttc

SEQ ID NO: 10549 - DNA, 96 bp, Aspergillus novofumigatus
  misc_feature: 1715
aacatctttcaaagcagtttttcacaaagcactagacaccctaagaagatctgccttactatctcctttcaagattactggtttttttgttttcaa

SEQ ID NO: 10550 - DNA, 96 bp, Aspergillus novofumigatus
  misc_feature: 1715
caacatctttcaaagcagtttttcacaaagcactagacaccctaagaagatctgccttactatctcctttcaagattactggtttttttgttttca

SEQ ID NO: 10551 - DNA, 96 bp, Aspergillus novofumigatus
  misc_feature: 1715
gattattatcaacgtgatgatgttagaaaggcgaatatagagagtgtatttcataaatattttcctagattagatggtagaaaagactacacagga

SEQ ID NO: 10552 - DNA, 96 bp, Aspergillus novofumigatus
  misc_feature: 1715
tagaggaatctaagaaaaaaacagaagatcctatgaatagaattagaatgcctaatttactagaggatcctaaagttagaattagaatatctaatt

SEQ ID NO: 10553 - DNA, 96 bp, Aspergillus novofumigatus
  misc_feature: 1715
ccttacttaaatgattgtacataaatatatataatatattatggtattagttagtaaaaatatattaagtgaaaatttatcatttattactaaaat

SEQ ID NO: 10554 - DNA, 96 bp, Aspergillus novofumigatus
  misc_feature: 1714
atctttcaaagcagtttttcacaaagcactagacaccctaagaagatctgccttactatctcctttcaagattactggtttttttgttttcaaata

SEQ ID NO: 10555 - DNA, 96 bp, Aspergillus novofumigatus
  misc_feature: 1714
atgaaatatagaaaattttttttatttatttactacctatggtttagtaaattagatattctaattctaactttaggatcctctagtaaattaggc

SEQ ID NO: 10556 - DNA, 96 bp, Aspergillus novofumigatus
  misc_feature: 1713
ttgttaatctatcactcaggccaaaacaatccatttcctttagtatcaccatcatcttgaccactatttagtaatgtttcattatttttcaatgat

SEQ ID NO: 10557 - DNA, 96 bp, Aspergillus novofumigatus
  misc_feature: 1713
tctttcaaagcagtttttcacaaagcactagacaccctaagaagatctgccttactatctcctttcaagattactggtttttttgttttcaaataa

SEQ ID NO: 10558 - DNA, 96 bp, Aspergillus novofumigatus
  misc_feature: 1713
tgttaatctatcactcaggccaaaacaatccatttcctttagtatcaccatcatcttgaccactatttagtaatgtttcattatttttcaatgata

SEQ ID NO: 10559 - DNA, 96 bp, Aspergillus novofumigatus
  misc_feature: 1713
gttaccttacttaaatgattgtacataaatatatataatatattatggtattagttagtaaaaatatattaagtgaaaatttatcatttattacta

SEQ ID NO: 10560 - DNA, 96 bp, Aspergillus novofumigatus
  misc_feature: 1713
gaggaatctaagaaaaaaacagaagatcctatgaatagaattagaatgcctaatttactagaggatcctaaagttagaattagaatatctaattta

SEQ ID NO: 10561 - DNA, 96 bp, Aspergillus novofumigatus
  misc_feature: 1713
gttaatctatcactcaggccaaaacaatccatttcctttagtatcaccatcatcttgaccactatttagtaatgtttcattatttttcaatgatat

SEQ ID NO: 10562 - DNA, 96 bp, Aspergillus novofumigatus
  misc_feature: 1712
ctttcaaagcagtttttcacaaagcactagacaccctaagaagatctgccttactatctcctttcaagattactggtttttttgttttcaaataat

SEQ ID NO: 10563 - DNA, 96 bp, Aspergillus novofumigatus
  misc_feature: 1711
tgtaaagtatatattattttgttaaaatatatatactttacatacaactaatcattggttgattatatttataacttcagcacactgatctattga

SEQ ID NO: 10564 - DNA, 96 bp, Aspergillus novofumigatus
  misc_feature: 1710
gattgtacataaatatatataatatattatggtattagttagtaaaaatatattaagtgaaaatttatcatttattactaaaattaaaatgataat

SEQ ID NO: 10565 - DNA, 96 bp, Aspergillus novofumigatus
  misc_feature: 1710
aaaacagaagatcctatgaatagaattagaatgcctaatttactagaggatcctaaagttagaattagaatatctaatttactaaaccataggtag

SEQ ID NO: 10566 - DNA, 96 bp, Aspergillus novofumigatus
  misc_feature: 1710
aatgattgtacataaatatatataatatattatggtattagttagtaaaaatatattaagtgaaaatttatcatttattactaaaattaaaatgat

SEQ ID NO: 10567 - DNA, 96 bp, Aspergillus novofumigatus
  misc_feature: 1709
tatgaatagaattagaatgcctaatttactagaggatcctaaagttagaattagaatatctaatttactaaaccataggtagtaaataaataaaaa

SEQ ID NO: 10568 - DNA, 96 bp, Aspergillus novofumigatus
  misc_feature: 1709
aaatgattgtacataaatatatataatatattatggtattagttagtaaaaatatattaagtgaaaatttatcatttattactaaaattaaaatga

SEQ ID NO: 10569 - DNA, 96 bp, Aspergillus novofumigatus
  misc_feature: 1709
aggttaccttacttaaatgattgtacataaatatatataatatattatggtattagttagtaaaaatatattaagtgaaaatttatcatttattac

SEQ ID NO: 10570 - DNA, 96 bp, Aspergillus novofumigatus
  misc_feature: 1708
taccttacttaaatgattgtacataaatatatataatatattatggtattagttagtaaaaatatattaagtgaaaatttatcatttattactaaa

SEQ ID NO: 10571 - DNA, 96 bp, Aspergillus novofumigatus
  misc_feature: 1708
atatattattttgttaaaatatatatactttacatacaactaatcattggttgattatatttataacttcagcacactgatctattgaaggttcag

SEQ ID NO: 10572 - DNA, 96 bp, Aspergillus novofumigatus
  misc_feature: 1707
cccttaagacctaatcctgtgtagtcttttctaccatctaatctaggaaaatatttatgaaatacactctctatattcgcctttctaacatcatca

SEQ ID NO: 10573 - DNA, 96 bp, Aspergillus novofumigatus
  misc_feature: 1707
attgtagttccaaaacaatcatgaacagagaaaaactggggattagtttctttaaatgaataagtaaatttttcatataataaacttaaggatgta

SEQ ID NO: 10574 - DNA, 96 bp, Aspergillus novofumigatus
  misc_feature: 1705
gatcctctagtaaattaggcattctaattctattcataggatcttctgtttttttcttagattcctctagactattcagatatgctacattagttt

SEQ ID NO: 10575 - DNA, 96 bp, Aspergillus novofumigatus
  misc_feature: 1705
aaacagaagatcctatgaatagaattagaatgcctaatttactagaggatcctaaagttagaattagaatatctaatttactaaaccataggtagt

SEQ ID NO: 10576 - DNA, 96 bp, Aspergillus novofumigatus
  misc_feature: 1704
ctatgaatagaattagaatgcctaatttactagaggatcctaaagttagaattagaatatctaatttactaaaccataggtagtaaataaataaaa

SEQ ID NO: 10577 - DNA, 96 bp, Aspergillus novofumigatus
  misc_feature: 1704
ttataagttgtaaaatcaacatctttcaaagcagtttttcacaaagcactagacaccctaagaagatctgccttactatctcctttcaagattact

SEQ ID NO: 10578 - DNA, 96 bp, Aspergillus novofumigatus
  misc_feature: 1704
tacccttaagacctaatcctgtgtagtcttttctaccatctaatctaggaaaatatttatgaaatacactctctatattcgcctttctaacatcat

SEQ ID NO: 10579 - DNA, 96 bp, Aspergillus novofumigatus
  misc_feature: 1703
accttacttaaatgattgtacataaatatatataatatattatggtattagttagtaaaaatatattaagtgaaaatttatcatttattactaaaa

SEQ ID NO: 10580 - DNA, 96 bp, Aspergillus novofumigatus
  misc_feature: 1703
cactacccttaagacctaatcctgtgtagtcttttctaccatctaatctaggaaaatatttatgaaatacactctctatattcgcctttctaacat

SEQ ID NO: 10581 - DNA, 96 bp, Aspergillus novofumigatus
  misc_feature: 1702
tgattgtacataaatatatataatatattatggtattagttagtaaaaatatattaagtgaaaatttatcatttattactaaaattaaaatgataa

SEQ ID NO: 10582 - DNA, 96 bp, Aspergillus novofumigatus
  misc_feature: 1702
ttaccttacttaaatgattgtacataaatatatataatatattatggtattagttagtaaaaatatattaagtgaaaatttatcatttattactaa

SEQ ID NO: 10583 - DNA, 96 bp, Aspergillus novofumigatus
  misc_feature: 1702
gtgattattatcaacgtgatgatgttagaaaggcgaatatagagagtgtatttcataaatattttcctagattagatggtagaaaagactacacag

SEQ ID NO: 10584 - DNA, 96 bp, Aspergillus novofumigatus
  misc_feature: 1702
ggatcctctagtaaattaggcattctaattctattcataggatcttctgtttttttcttagattcctctagactattcagatatgctacattagtt

SEQ ID NO: 10585 - DNA, 96 bp, Aspergillus novofumigatus
  misc_feature: 1701
tgattattatcaacgtgatgatgttagaaaggcgaatatagagagtgtatttcataaatattttcctagattagatggtagaaaagactacacagg

SEQ ID NO: 10586 - DNA, 96 bp, Aspergillus novofumigatus
  misc_feature: 1701
gaaatggataatcatacttatcatattcatgatatagtatgagtaatgaataagaaacacgttagtccaataacgattaaaaaaataaatagtcag

SEQ ID NO: 10587 - DNA, 96 bp, Aspergillus novofumigatus
  misc_feature: 1701
ataataaatattataaatttattttaatagcttttaatttaaactgtgcgttattttatttttattttttaataaaaatccttggggttttatctt

SEQ ID NO: 10588 - DNA, 96 bp, Aspergillus novofumigatus
  misc_feature: 1701
aattgtagttccaaaacaatcatgaacagagaaaaactggggattagtttctttaaatgaataagtaaatttttcatataataaacttaaggatgt

SEQ ID NO: 10589 - DNA, 96 bp, Aspergillus novofumigatus
  misc_feature: 1700
atgattgtacataaatatatataatatattatggtattagttagtaaaaatatattaagtgaaaatttatcatttattactaaaattaaaatgata

SEQ ID NO: 10590 - DNA, 96 bp, Aspergillus novofumigatus
  misc_feature: 1699
acccttaagacctaatcctgtgtagtcttttctaccatctaatctaggaaaatatttatgaaatacactctctatattcgcctttctaacatcatc

SEQ ID NO: 10591 - DNA, 96 bp, Aspergillus novofumigatus
  misc_feature: 1699
agaagatcctatgaatagaattagaatgcctaatttactagaggatcctaaagttagaattagaatatctaatttactaaaccataggtagtaaat

SEQ ID NO: 10592 - DNA, 96 bp, Aspergillus novofumigatus
  misc_feature: 1698
attgttaatctatcactcaggccaaaacaatccatttcctttagtatcaccatcatcttgaccactatttagtaatgtttcattatttttcaatga

SEQ ID NO: 10593 - DNA, 96 bp, Aspergillus novofumigatus
  misc_feature: 1698
taaatgattgtacataaatatatataatatattatggtattagttagtaaaaatatattaagtgaaaatttatcatttattactaaaattaaaatg

SEQ ID NO: 10594 - DNA, 96 bp, Aspergillus novofumigatus
  misc_feature: 1698
aatttttttttgcatacatataaatttataatgaatatttaaacttcattatagtatatatatattcctatgcgtataagatttaaatcttattat

SEQ ID NO: 10595 - DNA, 96 bp, Aspergillus novofumigatus
  misc_feature: 1697
tttaggatcctctagtaaattaggcattctaattctattcataggatcttctgtttttttcttagattcctctagactattcagatatgctacatt

SEQ ID NO: 10596 - DNA, 96 bp, Aspergillus novofumigatus
  misc_feature: 1697
acagaagatcctatgaatagaattagaatgcctaatttactagaggatcctaaagttagaattagaatatctaatttactaaaccataggtagtaa

SEQ ID NO: 10597 - DNA, 96 bp, Aspergillus novofumigatus
  misc_feature: 1697
atttttttttgcatacatataaatttataatgaatatttaaacttcattatagtatatatatattcctatgcgtataagatttaaatcttattata

SEQ ID NO: 10598 - DNA, 96 bp, Aspergillus novofumigatus
  misc_feature: 1697
tataataaatattataaatttattttaatagcttttaatttaaactgtgcgttattttatttttattttttaataaaaatccttggggttttatct

SEQ ID NO: 10599 - DNA, 96 bp, Aspergillus novofumigatus
  misc_feature: 1697
ctctagtaaattaggcattctaattctattcataggatcttctgtttttttcttagattcctctagactattcagatatgctacattagtttgtat

SEQ ID NO: 10600 - DNA, 96 bp, Aspergillus novofumigatus
  misc_feature: 1695
agtgattattatcaacgtgatgatgttagaaaggcgaatatagagagtgtatttcataaatattttcctagattagatggtagaaaagactacaca

SEQ ID NO: 10601 - DNA, 96 bp, Aspergillus novofumigatus
  misc_feature: 1695
gaatttttttttgcatacatataaatttataatgaatatttaaacttcattatagtatatatatattcctatgcgtataagatttaaatcttatta

SEQ ID NO: 10602 - DNA, 96 bp, Aspergillus novofumigatus
  misc_feature: 1693
tcttataagttgtaaaatcaacatctttcaaagcagtttttcacaaagcactagacaccctaagaagatctgccttactatctcctttcaagatta

SEQ ID NO: 10603 - DNA, 96 bp, Aspergillus novofumigatus
  misc_feature: 1693
tataagttgtaaaatcaacatctttcaaagcagtttttcacaaagcactagacaccctaagaagatctgccttactatctcctttcaagattactg

SEQ ID NO: 10604 - DNA, 96 bp, Aspergillus novofumigatus
  misc_feature: 1692
cctatgaatagaattagaatgcctaatttactagaggatcctaaagttagaattagaatatctaatttactaaaccataggtagtaaataaataaa

SEQ ID NO: 10605 - DNA, 96 bp, Aspergillus novofumigatus
  misc_feature: 1692
tgtacataaatatatataatatattatggtattagttagtaaaaatatattaagtgaaaatttatcatttattactaaaattaaaatgataatgat

SEQ ID NO: 10606 - DNA, 96 bp, Aspergillus novofumigatus
  misc_feature: 1692
atttataataaatattataaatttattttaatagcttttaatttaaactgtgcgttattttatttttattttttaataaaaatccttggggtttta

SEQ ID NO: 10607 - DNA, 96 bp, Aspergillus novofumigatus
  misc_feature: 1691
ttataataaatattataaatttattttaatagcttttaatttaaactgtgcgttattttatttttattttttaataaaaatccttggggttttatc

SEQ ID NO: 10608 - DNA, 96 bp, Aspergillus novofumigatus
  misc_feature: 1691
aggatcctctagtaaattaggcattctaattctattcataggatcttctgtttttttcttagattcctctagactattcagatatgctacattagt

SEQ ID NO: 10609 - DNA, 96 bp, Aspergillus novofumigatus
  misc_feature: 1690
tcctctagtaaattaggcattctaattctattcataggatcttctgtttttttcttagattcctctagactattcagatatgctacattagtttgt

SEQ ID NO: 10610 - DNA, 96 bp, Aspergillus novofumigatus
  misc_feature: 1689
tatgaaatatagaaaattttttttatttatttactacctatggtttagtaaattagatattctaattctaactttaggatcctctagtaaattagg

SEQ ID NO: 10611 - DNA, 96 bp, Aspergillus novofumigatus
  misc_feature: 1688
tttttttttgcatacatataaatttataatgaatatttaaacttcattatagtatatatatattcctatgcgtataagatttaaatcttattataa

SEQ ID NO: 10612 - DNA, 96 bp, Aspergillus novofumigatus
  misc_feature: 1688
tttataataaatattataaatttattttaatagcttttaatttaaactgtgcgttattttatttttattttttaataaaaatccttggggttttat

SEQ ID NO: 10613 - DNA, 96 bp, Aspergillus novofumigatus
  misc_feature: 1688
ttaggatcctctagtaaattaggcattctaattctattcataggatcttctgtttttttcttagattcctctagactattcagatatgctacatta

SEQ ID NO: 10614 - DNA, 96 bp, Aspergillus novofumigatus
  misc_feature: 1687
cagaagatcctatgaatagaattagaatgcctaatttactagaggatcctaaagttagaattagaatatctaatttactaaaccataggtagtaaa

SEQ ID NO: 10615 - DNA, 96 bp, Aspergillus novofumigatus
  misc_feature: 1687
gtacataaatatatataatatattatggtattagttagtaaaaatatattaagtgaaaatttatcatttattactaaaattaaaatgataatgata

SEQ ID NO: 10616 - DNA, 96 bp, Aspergillus novofumigatus
  misc_feature: 1687
cctctagtaaattaggcattctaattctattcataggatcttctgtttttttcttagattcctctagactattcagatatgctacattagtttgta

SEQ ID NO: 10617 - DNA, 96 bp, Aspergillus novofumigatus
  misc_feature: 1687
actacccttaagacctaatcctgtgtagtcttttctaccatctaatctaggaaaatatttatgaaatacactctctatattcgcctttctaacatc

SEQ ID NO: 10618 - DNA, 96 bp, Aspergillus novofumigatus
  misc_feature: 1687
ctagaggaatctaagaaaaaaacagaagatcctatgaatagaattagaatgcctaatttactagaggatcctaaagttagaattagaatatctaat

SEQ ID NO: 10619 - DNA, 96 bp, Aspergillus novofumigatus
  misc_feature: 1686
agatcctatgaatagaattagaatgcctaatttactagaggatcctaaagttagaattagaatatctaatttactaaaccataggtagtaaataaa

SEQ ID NO: 10620 - DNA, 96 bp, Aspergillus novofumigatus
  misc_feature: 1686
gaagatcctatgaatagaattagaatgcctaatttactagaggatcctaaagttagaattagaatatctaatttactaaaccataggtagtaaata

SEQ ID NO: 10621 - DNA, 96 bp, Aspergillus novofumigatus
  misc_feature: 1685
tttttgcatacatataaatttataatgaatatttaaacttcattatagtatatatatattcctatgcgtataagatttaaatcttattataactta

SEQ ID NO: 10622 - DNA, 96 bp, Aspergillus novofumigatus
  misc_feature: 1685
tagtaaattaggcattctaattctattcataggatcttctgtttttttcttagattcctctagactattcagatatgctacattagtttgtataca

SEQ ID NO: 10623 - DNA, 96 bp, Aspergillus novofumigatus
  misc_feature: 1685
ctacccttaagacctaatcctgtgtagtcttttctaccatctaatctaggaaaatatttatgaaatacactctctatattcgcctttctaacatca

SEQ ID NO: 10624 - DNA, 96 bp, Aspergillus novofumigatus
  misc_feature: 1684
tctagtaaattaggcattctaattctattcataggatcttctgtttttttcttagattcctctagactattcagatatgctacattagtttgtata

SEQ ID NO: 10625 - DNA, 96 bp, Aspergillus novofumigatus
  misc_feature: 1684
taatatgaaatatagaaaattttttttatttatttactacctatggtttagtaaattagatattctaattctaactttaggatcctctagtaaatt

SEQ ID NO: 10626 - DNA, 96 bp, Aspergillus novofumigatus
  misc_feature: 1684
aattgttaatctatcactcaggccaaaacaatccatttcctttagtatcaccatcatcttgaccactatttagtaatgtttcattatttttcaatg

SEQ ID NO: 10627 - DNA, 96 bp, Aspergillus novofumigatus
  misc_feature: 1684
agatttataataaacactacccttaagacctaatcctgtgtagtcttttctaccatctaatctaggaaaatatttatgaaatacactctctatatt

SEQ ID NO: 10628 - DNA, 96 bp, Aspergillus novofumigatus
  misc_feature: 1684
aatttataataaatattataaatttattttaatagcttttaatttaaactgtgcgttattttatttttattttttaataaaaatccttggggtttt

SEQ ID NO: 10629 - DNA, 96 bp, Aspergillus novofumigatus
  misc_feature: 1683
ttttttgcatacatataaatttataatgaatatttaaacttcattatagtatatatatattcctatgcgtataagatttaaatcttattataactt

SEQ ID NO: 10630 - DNA, 96 bp, Aspergillus novofumigatus
  misc_feature: 1683
aatatatataatatattatggtattagttagtaaaaatatattaagtgaaaatttatcatttattactaaaattaaaatgataatgataacaagaa

SEQ ID NO: 10631 - DNA, 96 bp, Aspergillus novofumigatus
  misc_feature: 1683
taggatcttctgtttttttcttagattcctctagactattcagatatgctacattagtttgtatacattcacgtacataaccattggggtttgttt

SEQ ID NO: 10632 - DNA, 96 bp, Aspergillus novofumigatus
  misc_feature: 1683
atcctctagtaaattaggcattctaattctattcataggatcttctgtttttttcttagattcctctagactattcagatatgctacattagtttg

SEQ ID NO: 10633 - DNA, 96 bp, Aspergillus novofumigatus
  misc_feature: 1682
atcctatgaatagaattagaatgcctaatttactagaggatcctaaagttagaattagaatatctaatttactaaaccataggtagtaaataaata

SEQ ID NO: 10634 - DNA, 96 bp, Aspergillus novofumigatus
  misc_feature: 1682
attgtacataaatatatataatatattatggtattagttagtaaaaatatattaagtgaaaatttatcatttattactaaaattaaaatgataatg

SEQ ID NO: 10635 - DNA, 96 bp, Aspergillus novofumigatus
  misc_feature: 1682
ataatatgaaatatagaaaattttttttatttatttactacctatggtttagtaaattagatattctaattctaactttaggatcctctagtaaat

SEQ ID NO: 10636 - DNA, 96 bp, Aspergillus novofumigatus
  misc_feature: 1682
agaatttttttttgcatacatataaatttataatgaatatttaaacttcattatagtatatatatattcctatgcgtataagatttaaatcttatt

SEQ ID NO: 10637 - DNA, 96 bp, Aspergillus novofumigatus
  misc_feature: 1681
tttttttgcatacatataaatttataatgaatatttaaacttcattatagtatatatatattcctatgcgtataagatttaaatcttattataact

SEQ ID NO: 10638 - DNA, 96 bp, Aspergillus novofumigatus
  misc_feature: 1681
tacggctttatcaaatttataataaatattataaatttattttaatagcttttaatttaaactgtgcgttattttatttttattttttaataaaaa

SEQ ID NO: 10639 - DNA, 96 bp, Aspergillus novofumigatus
  misc_feature: 1681
ataaatatatataatatattatggtattagttagtaaaaatatattaagtgaaaatttatcatttattactaaaattaaaatgataatgataacaa

SEQ ID NO: 10640 - DNA, 96 bp, Aspergillus novofumigatus
  misc_feature: 1681
ttgtacataaatatatataatatattatggtattagttagtaaaaatatattaagtgaaaatttatcatttattactaaaattaaaatgataatga

SEQ ID NO: 10641 - DNA, 96 bp, Aspergillus novofumigatus
  misc_feature: 1681
taggatcctctagtaaattaggcattctaattctattcataggatcttctgtttttttcttagattcctctagactattcagatatgctacattag

SEQ ID NO: 10642 - DNA, 96 bp, Aspergillus novofumigatus
  misc_feature: 1681
aatatgaaatatagaaaattttttttatttatttactacctatggtttagtaaattagatattctaattctaactttaggatcctctagtaaatta

SEQ ID NO: 10643 - DNA, 96 bp, Aspergillus novofumigatus
  misc_feature: 1681
taataaatattataaatttattttaatagcttttaatttaaactgtgcgttattttatttttattttttaataaaaatccttggggttttatcttt

SEQ ID NO: 10644 - DNA, 96 bp, Aspergillus novofumigatus
  misc_feature: 1681
agtaaatttacaaacaaaccccaatggttatgtacgtgaatgtatacaaactaatgtagcatatctgaatagtctagaggaatctaagaaaaaaac

SEQ ID NO: 10645 - DNA, 96 bp, Aspergillus novofumigatus
  misc_feature: 1681
aattaggcattctaattctattcataggatcttctgtttttttcttagattcctctagactattcagatatgctacattagtttgtatacattcac

SEQ ID NO: 10646 - DNA, 96 bp, Aspergillus novofumigatus
  misc_feature: 1680
ttttcaattgtagttccaaaacaatcatgaacagagaaaaactggggattagtttctttaaatgaataagtaaatttttcatataataaacttaag

SEQ ID NO: 10647 - DNA, 96 bp, Aspergillus novofumigatus
  misc_feature: 1680
tctagaggaatctaagaaaaaaacagaagatcctatgaatagaattagaatgcctaatttactagaggatcctaaagttagaattagaatatctaa

SEQ ID NO: 10648 - DNA, 96 bp, Aspergillus novofumigatus
  misc_feature: 1679
aaatatatataatatattatggtattagttagtaaaaatatattaagtgaaaatttatcatttattactaaaattaaaatgataatgataacaaga

SEQ ID NO: 10649 - DNA, 96 bp, Aspergillus novofumigatus
  misc_feature: 1679
tacaattgaaaaagtatttgtattaaaaacaatgttagcatctgtttatacagatatttattcaagtgatccttatctatataaatttgataaaat

SEQ ID NO: 10650 - DNA, 96 bp, Aspergillus novofumigatus
  misc_feature: 1678
ttttaaattgttaatctatcactcaggccaaaacaatccatttcctttagtatcaccatcatcttgaccactatttagtaatgtttcattattttt

SEQ ID NO: 10651 - DNA, 96 bp, Aspergillus novofumigatus
  misc_feature: 1678
ttcaattgtagttccaaaacaatcatgaacagagaaaaactggggattagtttctttaaatgaataagtaaatttttcatataataaacttaagga

SEQ ID NO: 10652 - DNA, 96 bp, Aspergillus novofumigatus
  misc_feature: 1678
tacataaatatatataatatattatggtattagttagtaaaaatatattaagtgaaaatttatcatttattactaaaattaaaatgataatgataa

SEQ ID NO: 10653 - DNA, 96 bp, Aspergillus novofumigatus
  misc_feature: 1678
aattctattcataggatcttctgtttttttcttagattcctctagactattcagatatgctacattagtttgtatacattcacgtacataaccatt

SEQ ID NO: 10654 - DNA, 96 bp, Aspergillus novofumigatus
  misc_feature: 1677
cttataagttgtaaaatcaacatctttcaaagcagtttttcacaaagcactagacaccctaagaagatctgccttactatctcctttcaagattac

SEQ ID NO: 10655 - DNA, 96 bp, Aspergillus novofumigatus
  misc_feature: 1677
atatgaaatatagaaaattttttttatttatttactacctatggtttagtaaattagatattctaattctaactttaggatcctctagtaaattag

SEQ ID NO: 10656 - DNA, 96 bp, Aspergillus novofumigatus
  misc_feature: 1676
ttttttttgcatacatataaatttataatgaatatttaaacttcattatagtatatatatattcctatgcgtataagatttaaatcttattataac

SEQ ID NO: 10657 - DNA, 96 bp, Aspergillus novofumigatus
  misc_feature: 1676
tataatatgaaatatagaaaattttttttatttatttactacctatggtttagtaaattagatattctaattctaactttaggatcctctagtaaa

SEQ ID NO: 10658 - DNA, 96 bp, Aspergillus novofumigatus
  misc_feature: 1676
gtaaatttacaaacaaaccccaatggttatgtacgtgaatgtatacaaactaatgtagcatatctgaatagtctagaggaatctaagaaaaaaaca

SEQ ID NO: 10659 - DNA, 96 bp, Aspergillus novofumigatus
  misc_feature: 1676
tgtagcatatctgaatagtctagaggaatctaagaaaaaaacagaagatcctatgaatagaattagaatgcctaatttactagaggatcctaaagt

SEQ ID NO: 10660 - DNA, 96 bp, Aspergillus novofumigatus
  misc_feature: 1676
ggaataagaaaccatatggtagtaaaatatatcctgatagtgatgcaggttttgctgctgcttttgattatttgaaaacaaaaaaaccagtaatct

SEQ ID NO: 10661 - DNA, 96 bp, Aspergillus novofumigatus
  misc_feature: 1676
aaattgttaatctatcactcaggccaaaacaatccatttcctttagtatcaccatcatcttgaccactatttagtaatgtttcattatttttcaat

SEQ ID NO: 10662 - DNA, 96 bp, Aspergillus novofumigatus
  misc_feature: 1675
gtctagaggaatctaagaaaaaaacagaagatcctatgaatagaattagaatgcctaatttactagaggatcctaaagttagaattagaatatcta

SEQ ID NO: 10663 - DNA, 96 bp, Aspergillus novofumigatus
  misc_feature: 1675
ctttaggatcctctagtaaattaggcattctaattctattcataggatcttctgtttttttcttagattcctctagactattcagatatgctacat

SEQ ID NO: 10664 - DNA, 96 bp, Aspergillus novofumigatus
  misc_feature: 1675
attttaaattgttaatctatcactcaggccaaaacaatccatttcctttagtatcaccatcatcttgaccactatttagtaatgtttcattatttt

SEQ ID NO: 10665 - DNA, 96 bp, Aspergillus novofumigatus
  misc_feature: 1674
ttaaattgttaatctatcactcaggccaaaacaatccatttcctttagtatcaccatcatcttgaccactatttagtaatgtttcattatttttca

SEQ ID NO: 10666 - DNA, 96 bp, Aspergillus novofumigatus
  misc_feature: 1674
aataaatattataaatttattttaatagcttttaatttaaactgtgcgttattttatttttattttttaataaaaatccttggggttttatcttta

SEQ ID NO: 10667 - DNA, 96 bp, Aspergillus novofumigatus
  misc_feature: 1674
gatttataataaacactacccttaagacctaatcctgtgtagtcttttctaccatctaatctaggaaaatatttatgaaatacactctctatattc

SEQ ID NO: 10668 - DNA, 96 bp, Aspergillus novofumigatus
  misc_feature: 1674
gatcctatgaatagaattagaatgcctaatttactagaggatcctaaagttagaattagaatatctaatttactaaaccataggtagtaaataaat

SEQ ID NO: 10669 - DNA, 96 bp, Aspergillus novofumigatus
  misc_feature: 1674
caattgtagttccaaaacaatcatgaacagagaaaaactggggattagtttctttaaatgaataagtaaatttttcatataataaacttaaggatg

SEQ ID NO: 10670 - DNA, 96 bp, Aspergillus novofumigatus
  misc_feature: 1673
tcctatgaatagaattagaatgcctaatttactagaggatcctaaagttagaattagaatatctaatttactaaaccataggtagtaaataaataa

SEQ ID NO: 10671 - DNA, 96 bp, Aspergillus novofumigatus
  misc_feature: 1673
taattctattcataggatcttctgtttttttcttagattcctctagactattcagatatgctacattagtttgtatacattcacgtacataaccat

SEQ ID NO: 10672 - DNA, 96 bp, Aspergillus novofumigatus
  misc_feature: 1672
tttaaattgttaatctatcactcaggccaaaacaatccatttcctttagtatcaccatcatcttgaccactatttagtaatgtttcattatttttc

SEQ ID NO: 10673 - DNA, 96 bp, Aspergillus novofumigatus
  misc_feature: 1672
acaattgaaaaagtatttgtattaaaaacaatgttagcatctgtttatacagatatttattcaagtgatccttatctatataaatttgataaaata

SEQ ID NO: 10674 - DNA, 96 bp, Aspergillus novofumigatus
  misc_feature: 1671
aagatcctatgaatagaattagaatgcctaatttactagaggatcctaaagttagaattagaatatctaatttactaaaccataggtagtaaataa

SEQ ID NO: 10675 - DNA, 96 bp, Aspergillus novofumigatus
  misc_feature: 1671
tggaataagaaaccatatggtagtaaaatatatcctgatagtgatgcaggttttgctgctgcttttgattatttgaaaacaaaaaaaccagtaatc

SEQ ID NO: 10676 - DNA, 96 bp, Aspergillus novofumigatus
  misc_feature: 1671
tacagaatttttttttgcatacatataaatttataatgaatatttaaacttcattatagtatatatatattcctatgcgtataagatttaaatctt

SEQ ID NO: 10677 - DNA, 96 bp, Aspergillus novofumigatus
  misc_feature: 1671
ataggatcttctgtttttttcttagattcctctagactattcagatatgctacattagtttgtatacattcacgtacataaccattggggtttgtt

SEQ ID NO: 10678 - DNA, 96 bp, Aspergillus novofumigatus
  misc_feature: 1670
tagtaaatttacaaacaaaccccaatggttatgtacgtgaatgtatacaaactaatgtagcatatctgaatagtctagaggaatctaagaaaaaaa

SEQ ID NO: 10679 - DNA, 96 bp, Aspergillus novofumigatus
  misc_feature: 1670
ttttgcatacatataaatttataatgaatatttaaacttcattatagtatatatatattcctatgcgtataagatttaaatcttattataacttat

SEQ ID NO: 10680 - DNA, 96 bp, Aspergillus novofumigatus
  misc_feature: 1670
attaggcattctaattctattcataggatcttctgtttttttcttagattcctctagactattcagatatgctacattagtttgtatacattcacg

SEQ ID NO: 10681 - DNA, 96 bp, Aspergillus novofumigatus
  misc_feature: 1669
acataaatatatataatatattatggtattagttagtaaaaatatattaagtgaaaatttatcatttattactaaaattaaaatgataatgataac

SEQ ID NO: 10682 - DNA, 96 bp, Aspergillus novofumigatus
  misc_feature: 1668
tttatcaaatttataataaatattataaatttattttaatagcttttaatttaaactgtgcgttattttatttttattttttaataaaaatccttg

SEQ ID NO: 10683 - DNA, 96 bp, Aspergillus novofumigatus
  misc_feature: 1668
aatttataatgaatatttaaacttcattatagtatatatatattcctatgcgtataagatttaaatcttattataacttatgataatatatgtaaa

SEQ ID NO: 10684 - DNA, 96 bp, Aspergillus novofumigatus
  misc_feature: 1668
ctagtaaattaggcattctaattctattcataggatcttctgtttttttcttagattcctctagactattcagatatgctacattagtttgtatac

SEQ ID NO: 10685 - DNA, 96 bp, Aspergillus novofumigatus
  misc_feature: 1668
atgtaaagtatatattattttgttaaaatatatatactttacatacaactaatcattggttgattatatttataacttcagcacactgatctattg

SEQ ID NO: 10686 - DNA, 96 bp, Aspergillus novofumigatus
  misc_feature: 1668
atatatataatatattatggtattagttagtaaaaatatattaagtgaaaatttatcatttattactaaaattaaaatgataatgataacaagaat

SEQ ID NO: 10687 - DNA, 96 bp, Aspergillus novofumigatus
  misc_feature: 1668
aattttaaattgttaatctatcactcaggccaaaacaatccatttcctttagtatcaccatcatcttgaccactatttagtaatgtttcattattt

SEQ ID NO: 10688 - DNA, 96 bp, Aspergillus novofumigatus
  misc_feature: 1667
tagtgattattatcaacgtgatgatgttagaaaggcgaatatagagagtgtatttcataaatattttcctagattagatggtagaaaagactacac

SEQ ID NO: 10689 - DNA, 96 bp, Aspergillus novofumigatus
  misc_feature: 1666
gaataagaaaccatatggtagtaaaatatatcctgatagtgatgcaggttttgctgctgcttttgattatttgaaaacaaaaaaaccagtaatctt

SEQ ID NO: 10690 - DNA, 96 bp, Aspergillus novofumigatus
  misc_feature: 1666
acggctttatcaaatttataataaatattataaatttattttaatagcttttaatttaaactgtgcgttattttatttttattttttaataaaaat

SEQ ID NO: 10691 - DNA, 96 bp, Aspergillus novofumigatus
  misc_feature: 1666
aaatttataataaatattataaatttattttaatagcttttaatttaaactgtgcgttattttatttttattttttaataaaaatccttggggttt

SEQ ID NO: 10692 - DNA, 96 bp, Aspergillus novofumigatus
  misc_feature: 1664
tttcaattgtagttccaaaacaatcatgaacagagaaaaactggggattagtttctttaaatgaataagtaaatttttcatataataaacttaagg

SEQ ID NO: 10693 - DNA, 96 bp, Aspergillus novofumigatus
  misc_feature: 1664
atataatatgaaatatagaaaattttttttatttatttactacctatggtttagtaaattagatattctaattctaactttaggatcctctagtaa

SEQ ID NO: 10694 - DNA, 96 bp, Aspergillus novofumigatus
  misc_feature: 1664
gtagcatatctgaatagtctagaggaatctaagaaaaaaacagaagatcctatgaatagaattagaatgcctaatttactagaggatcctaaagtt

SEQ ID NO: 10695 - DNA, 96 bp, Aspergillus novofumigatus
  misc_feature: 1664
ggctttatcaaatttataataaatattataaatttattttaatagcttttaatttaaactgtgcgttattttatttttattttttaataaaaatcc

SEQ ID NO: 10696 - DNA, 96 bp, Aspergillus novofumigatus
  misc_feature: 1663
ctaattctattcataggatcttctgtttttttcttagattcctctagactattcagatatgctacattagtttgtatacattcacgtacataacca

SEQ ID NO: 10697 - DNA, 96 bp, Aspergillus novofumigatus
  misc_feature: 1663
tctaattctattcataggatcttctgtttttttcttagattcctctagactattcagatatgctacattagtttgtatacattcacgtacataacc

SEQ ID NO: 10698 - DNA, 96 bp, Aspergillus novofumigatus
  misc_feature: 1663
taaatatatataatatattatggtattagttagtaaaaatatattaagtgaaaatttatcatttattactaaaattaaaatgataatgataacaag

SEQ ID NO: 10699 - DNA, 96 bp, Aspergillus novofumigatus
  misc_feature: 1663
ctaatttaatacattatttagatgctacatccttaagtttattatatgaaaaatttacttattcatttaaagaaactaatccccagtttttctctg

SEQ ID NO: 10700 - DNA, 96 bp, Aspergillus novofumigatus
  misc_feature: 1662
taaattgttaatctatcactcaggccaaaacaatccatttcctttagtatcaccatcatcttgaccactatttagtaatgtttcattatttttcaa

SEQ ID NO: 10701 - DNA, 96 bp, Aspergillus novofumigatus
  misc_feature: 1662
tgaaaaagtatttgtattaaaaacaatgttagcatctgtttatacagatatttattcaagtgatccttatctatataaatttgataaaatatatta

SEQ ID NO: 10702 - DNA, 96 bp, Aspergillus novofumigatus
  misc_feature: 1662
tatgtaaagtatatattattttgttaaaatatatatactttacatacaactaatcattggttgattatatttataacttcagcacactgatctatt

SEQ ID NO: 10703 - DNA, 96 bp, Aspergillus novofumigatus
  misc_feature: 1662
ataaatattataaatttattttaatagcttttaatttaaactgtgcgttattttatttttattttttaataaaaatccttggggttttatctttat

SEQ ID NO: 10704 - DNA, 96 bp, Aspergillus novofumigatus
  misc_feature: 1661
atacggctttatcaaatttataataaatattataaatttattttaatagcttttaatttaaactgtgcgttattttatttttattttttaataaaa

SEQ ID NO: 10705 - DNA, 96 bp, Aspergillus novofumigatus
  misc_feature: 1661
ttaggcattctaattctattcataggatcttctgtttttttcttagattcctctagactattcagatatgctacattagtttgtatacattcacgt

SEQ ID NO: 10706 - DNA, 96 bp, Aspergillus novofumigatus
  misc_feature: 1661
attctattcataggatcttctgtttttttcttagattcctctagactattcagatatgctacattagtttgtatacattcacgtacataaccattg

SEQ ID NO: 10707 - DNA, 96 bp, Aspergillus novofumigatus
  misc_feature: 1660
cagaatttttttttgcatacatataaatttataatgaatatttaaacttcattatagtatatatatattcctatgcgtataagatttaaatcttat

SEQ ID NO: 10708 - DNA, 96 bp, Aspergillus novofumigatus
  misc_feature: 1660
atataaatttataatgaatatttaaacttcattatagtatatatatattcctatgcgtataagatttaaatcttattataacttatgataatatat

SEQ ID NO: 10709 - DNA, 96 bp, Aspergillus novofumigatus
  misc_feature: 1659
atacagaatttttttttgcatacatataaatttataatgaatatttaaacttcattatagtatatatatattcctatgcgtataagatttaaatct

SEQ ID NO: 10710 - DNA, 96 bp, Aspergillus novofumigatus
  misc_feature: 1658
atagtgattattatcaacgtgatgatgttagaaaggcgaatatagagagtgtatttcataaatattttcctagattagatggtagaaaagactaca

SEQ ID NO: 10711 - DNA, 96 bp, Aspergillus novofumigatus
  misc_feature: 1657
ggcattctaattctattcataggatcttctgtttttttcttagattcctctagactattcagatatgctacattagtttgtatacattcacgtaca

SEQ ID NO: 10712 - DNA, 96 bp, Aspergillus novofumigatus
  misc_feature: 1657
aattgaaaaagtatttgtattaaaaacaatgttagcatctgtttatacagatatttattcaagtgatccttatctatataaatttgataaaatata

SEQ ID NO: 10713 - DNA, 96 bp, Aspergillus novofumigatus
  misc_feature: 1657
tatataatatgaaatatagaaaattttttttatttatttactacctatggtttagtaaattagatattctaattctaactttaggatcctctagta

SEQ ID NO: 10714 - DNA, 96 bp, Aspergillus novofumigatus
  misc_feature: 1657
ataatgaatatttaaacttcattatagtatatatatattcctatgcgtataagatttaaatcttattataacttatgataatatatgtaaagtata

SEQ ID NO: 10715 - DNA, 96 bp, Aspergillus novofumigatus
  misc_feature: 1657
agtctagaggaatctaagaaaaaaacagaagatcctatgaatagaattagaatgcctaatttactagaggatcctaaagttagaattagaatatct

SEQ ID NO: 10716 - DNA, 96 bp, Aspergillus novofumigatus
  misc_feature: 1656
ttctaattctattcataggatcttctgtttttttcttagattcctctagactattcagatatgctacattagtttgtatacattcacgtacataac

SEQ ID NO: 10717 - DNA, 96 bp, Aspergillus novofumigatus
  misc_feature: 1656
tagtctagaggaatctaagaaaaaaacagaagatcctatgaatagaattagaatgcctaatttactagaggatcctaaagttagaattagaatatc

SEQ ID NO: 10718 - DNA, 96 bp, Aspergillus novofumigatus
  misc_feature: 1656
gctttatcaaatttataataaatattataaatttattttaatagcttttaatttaaactgtgcgttattttatttttattttttaataaaaatcct

SEQ ID NO: 10719 - DNA, 96 bp, Aspergillus novofumigatus
  misc_feature: 1656
gaatagtctagaggaatctaagaaaaaaacagaagatcctatgaatagaattagaatgcctaatttactagaggatcctaaagttagaattagaat

SEQ ID NO: 10720 - DNA, 96 bp, Aspergillus novofumigatus
  misc_feature: 1656
ctttatcaaatttataataaatattataaatttattttaatagcttttaatttaaactgtgcgttattttatttttattttttaataaaaatcctt

SEQ ID NO: 10721 - DNA, 96 bp, Aspergillus novofumigatus
  misc_feature: 1656
cctaatttaatacattatttagatgctacatccttaagtttattatatgaaaaatttacttattcatttaaagaaactaatccccagtttttctct

SEQ ID NO: 10722 - DNA, 96 bp, Aspergillus novofumigatus
  misc_feature: 1656
acatataaatttataatgaatatttaaacttcattatagtatatatatattcctatgcgtataagatttaaatcttattataacttatgataatat

SEQ ID NO: 10723 - DNA, 96 bp, Aspergillus novofumigatus
  misc_feature: 1655
tatacggctttatcaaatttataataaatattataaatttattttaatagcttttaatttaaactgtgcgttattttatttttattttttaataaa

SEQ ID NO: 10724 - DNA, 96 bp, Aspergillus novofumigatus
  misc_feature: 1655
ttgaaaaagtatttgtattaaaaacaatgttagcatctgtttatacagatatttattcaagtgatccttatctatataaatttgataaaatatatt

SEQ ID NO: 10725 - DNA, 96 bp, Aspergillus novofumigatus
  misc_feature: 1655
tagcatatctgaatagtctagaggaatctaagaaaaaaacagaagatcctatgaatagaattagaatgcctaatttactagaggatcctaaagtta

SEQ ID NO: 10726 - DNA, 96 bp, Aspergillus novofumigatus
  misc_feature: 1655
acagaatttttttttgcatacatataaatttataatgaatatttaaacttcattatagtatatatatattcctatgcgtataagatttaaatctta

SEQ ID NO: 10727 - DNA, 96 bp, Aspergillus novofumigatus
  misc_feature: 1655
atacatataaatttataatgaatatttaaacttcattatagtatatatatattcctatgcgtataagatttaaatcttattataacttatgataat

SEQ ID NO: 10728 - DNA, 96 bp, Aspergillus novofumigatus
  misc_feature: 1654
caaatttataataaatattataaatttattttaatagcttttaatttaaactgtgcgttattttatttttattttttaataaaaatccttggggtt

SEQ ID NO: 10729 - DNA, 96 bp, Aspergillus novofumigatus
  misc_feature: 1654
aaattttaaattgttaatctatcactcaggccaaaacaatccatttcctttagtatcaccatcatcttgaccactatttagtaatgtttcattatt

SEQ ID NO: 10730 - DNA, 96 bp, Aspergillus novofumigatus
  misc_feature: 1653
ataaaatatattagatttaatagaaaataacactaattatagattagatcgtgagaaaagaacattagaaatggataatcatacttatcatattca

SEQ ID NO: 10731 - DNA, 96 bp, Aspergillus novofumigatus
  misc_feature: 1653
cggctttatcaaatttataataaatattataaatttattttaatagcttttaatttaaactgtgcgttattttatttttattttttaataaaaatc

SEQ ID NO: 10732 - DNA, 96 bp, Aspergillus novofumigatus
  misc_feature: 1653
attgaaaaagtatttgtattaaaaacaatgttagcatctgtttatacagatatttattcaagtgatccttatctatataaatttgataaaatatat

SEQ ID NO: 10733 - DNA, 96 bp, Aspergillus novofumigatus
  misc_feature: 1652
cataaatatatataatatattatggtattagttagtaaaaatatattaagtgaaaatttatcatttattactaaaattaaaatgataatgataaca

SEQ ID NO: 10734 - DNA, 96 bp, Aspergillus novofumigatus
  misc_feature: 1652
tataatgaatatttaaacttcattatagtatatatatattcctatgcgtataagatttaaatcttattataacttatgataatatatgtaaagtat

SEQ ID NO: 10735 - DNA, 96 bp, Aspergillus novofumigatus
  misc_feature: 1652
tataataaacactacccttaagacctaatcctgtgtagtcttttctaccatctaatctaggaaaatatttatgaaatacactctctatattcgcct

SEQ ID NO: 10736 - DNA, 96 bp, Aspergillus novofumigatus
  misc_feature: 1652
taatgaatatttaaacttcattatagtatatatatattcctatgcgtataagatttaaatcttattataacttatgataatatatgtaaagtatat

SEQ ID NO: 10737 - DNA, 96 bp, Aspergillus novofumigatus
  misc_feature: 1652
gcctaatttaatacattatttagatgctacatccttaagtttattatatgaaaaatttacttattcatttaaagaaactaatccccagtttttctc

SEQ ID NO: 10738 - DNA, 96 bp, Aspergillus novofumigatus
  misc_feature: 1652
atagtctagaggaatctaagaaaaaaacagaagatcctatgaatagaattagaatgcctaatttactagaggatcctaaagttagaattagaatat

SEQ ID NO: 10739 - DNA, 96 bp, Aspergillus novofumigatus
  misc_feature: 1651
atcaaatttataataaatattataaatttattttaatagcttttaatttaaactgtgcgttattttatttttattttttaataaaaatccttgggg

SEQ ID NO: 10740 - DNA, 96 bp, Aspergillus novofumigatus
  misc_feature: 1650
aatagtctagaggaatctaagaaaaaaacagaagatcctatgaatagaattagaatgcctaatttactagaggatcctaaagttagaattagaata

SEQ ID NO: 10741 - DNA, 96 bp, Aspergillus novofumigatus
  misc_feature: 1650
atttataatgaatatttaaacttcattatagtatatatatattcctatgcgtataagatttaaatcttattataacttatgataatatatgtaaag

SEQ ID NO: 10742 - DNA, 96 bp, Aspergillus novofumigatus
  misc_feature: 1649
tgaatagtctagaggaatctaagaaaaaaacagaagatcctatgaatagaattagaatgcctaatttactagaggatcctaaagttagaattagaa

SEQ ID NO: 10743 - DNA, 96 bp, Aspergillus novofumigatus
  misc_feature: 1649
ttatcaaatttataataaatattataaatttattttaatagcttttaatttaaactgtgcgttattttatttttattttttaataaaaatccttgg

SEQ ID NO: 10744 - DNA, 96 bp, Aspergillus novofumigatus
  misc_feature: 1649
taaaatatattagatttaatagaaaataacactaattatagattagatcgtgagaaaagaacattagaaatggataatcatacttatcatattcat

SEQ ID NO: 10745 - DNA, 96 bp, Aspergillus novofumigatus
  misc_feature: 1648
aaatttataatgaatatttaaacttcattatagtatatatatattcctatgcgtataagatttaaatcttattataacttatgataatatatgtaa

SEQ ID NO: 10746 - DNA, 96 bp, Aspergillus novofumigatus
  misc_feature: 1648
atctgaatagtctagaggaatctaagaaaaaaacagaagatcctatgaatagaattagaatgcctaatttactagaggatcctaaagttagaatta

SEQ ID NO: 10747 - DNA, 96 bp, Aspergillus novofumigatus
  misc_feature: 1648
aatacagaatttttttttgcatacatataaatttataatgaatatttaaacttcattatagtatatatatattcctatgcgtataagatttaaatc

SEQ ID NO: 10748 - DNA, 96 bp, Aspergillus novofumigatus
  misc_feature: 1648
gaaaaagtatttgtattaaaaacaatgttagcatctgtttatacagatatttattcaagtgatccttatctatataaatttgataaaatatattag

SEQ ID NO: 10749 - DNA, 96 bp, Aspergillus novofumigatus
  misc_feature: 1648
aataagaaaccatatggtagtaaaatatatcctgatagtgatgcaggttttgctgctgcttttgattatttgaaaacaaaaaaaccagtaatcttg

SEQ ID NO: 10750 - DNA, 96 bp, Aspergillus novofumigatus
  misc_feature: 1648
ataaatttataatgaatatttaaacttcattatagtatatatatattcctatgcgtataagatttaaatcttattataacttatgataatatatgt

SEQ ID NO: 10751 - DNA, 96 bp, Aspergillus novofumigatus
  misc_feature: 1647
tcaaatttataataaatattataaatttattttaatagcttttaatttaaactgtgcgttattttatttttattttttaataaaaatccttggggt

SEQ ID NO: 10752 - DNA, 96 bp, Aspergillus novofumigatus
  misc_feature: 1647
taaatttataatgaatatttaaacttcattatagtatatatatattcctatgcgtataagatttaaatcttattataacttatgataatatatgta

SEQ ID NO: 10753 - DNA, 96 bp, Aspergillus novofumigatus
  misc_feature: 1647
aaagcattaatgcctaatttaatacattatttagatgctacatccttaagtttattatatgaaaaatttacttattcatttaaagaaactaatccc

SEQ ID NO: 10754 - DNA, 96 bp, Aspergillus novofumigatus
  misc_feature: 1646
tatatataatatattatggtattagttagtaaaaatatattaagtgaaaatttatcatttattactaaaattaaaatgataatgataacaagaata

SEQ ID NO: 10755 - DNA, 96 bp, Aspergillus novofumigatus
  misc_feature: 1646
tacatataaatttataatgaatatttaaacttcattatagtatatatatattcctatgcgtataagatttaaatcttattataacttatgataata

SEQ ID NO: 10756 - DNA, 96 bp, Aspergillus novofumigatus
  misc_feature: 1646
catataaatttataatgaatatttaaacttcattatagtatatatatattcctatgcgtataagatttaaatcttattataacttatgataatata

SEQ ID NO: 10757 - DNA, 96 bp, Aspergillus novofumigatus
  misc_feature: 1646
atttataataaacactacccttaagacctaatcctgtgtagtcttttctaccatctaatctaggaaaatatttatgaaatacactctctatattcg

SEQ ID NO: 10758 - DNA, 96 bp, Aspergillus novofumigatus
  misc_feature: 1645
tatcaaatttataataaatattataaatttattttaatagcttttaatttaaactgtgcgttattttatttttattttttaataaaaatccttggg

SEQ ID NO: 10759 - DNA, 96 bp, Aspergillus novofumigatus
  misc_feature: 1645
gcattctaattctattcataggatcttctgtttttttcttagattcctctagactattcagatatgctacattagtttgtatacattcacgtacat

SEQ ID NO: 10760 - DNA, 96 bp, Aspergillus novofumigatus
  misc_feature: 1645
cataggatcttctgtttttttcttagattcctctagactattcagatatgctacattagtttgtatacattcacgtacataaccattggggtttgt

SEQ ID NO: 10761 - DNA, 96 bp, Aspergillus novofumigatus
  misc_feature: 1643
catacatataaatttataatgaatatttaaacttcattatagtatatatatattcctatgcgtataagatttaaatcttattataacttatgataa

SEQ ID NO: 10762 - DNA, 96 bp, Aspergillus novofumigatus
  misc_feature: 1643
aagcattaatgcctaatttaatacattatttagatgctacatccttaagtttattatatgaaaaatttacttattcatttaaagaaactaatcccc

SEQ ID NO: 10763 - DNA, 96 bp, Aspergillus novofumigatus
  misc_feature: 1642
tgctaacattgtttttaatacaaatactttttcaattgtagttccaaaacaatcatgaacagagaaaaactggggattagtttctttaaatgaata

SEQ ID NO: 10764 - DNA, 96 bp, Aspergillus novofumigatus
  misc_feature: 1641
ttattatataatatgaaatatagaaaattttttttatttatttactacctatggtttagtaaattagatattctaattctaactttaggatcctct

SEQ ID NO: 10765 - DNA, 96 bp, Aspergillus novofumigatus
  misc_feature: 1641
aggttttgctgctgcttttgattatttgaaaacaaaaaaaccagtaatcttgaaaggagatagtaaggcagatcttcttagggtgtctagtgcttt

SEQ ID NO: 10766 - DNA, 96 bp, Aspergillus novofumigatus
  misc_feature: 1640
attatacggctttatcaaatttataataaatattataaatttattttaatagcttttaatttaaactgtgcgttattttatttttattttttaata

SEQ ID NO: 10767 - DNA, 96 bp, Aspergillus novofumigatus
  misc_feature: 1640
atgctaacattgtttttaatacaaatactttttcaattgtagttccaaaacaatcatgaacagagaaaaactggggattagtttctttaaatgaat

SEQ ID NO: 10768 - DNA, 96 bp, Aspergillus novofumigatus
  misc_feature: 1639
gctaacattgtttttaatacaaatactttttcaattgtagttccaaaacaatcatgaacagagaaaaactggggattagtttctttaaatgaataa

SEQ ID NO: 10769 - DNA, 96 bp, Aspergillus novofumigatus
  misc_feature: 1639
aatgaatatttaaacttcattatagtatatatatattcctatgcgtataagatttaaatcttattataacttatgataatatatgtaaagtatata

SEQ ID NO: 10770 - DNA, 96 bp, Aspergillus novofumigatus
  misc_feature: 1638
ttatacggctttatcaaatttataataaatattataaatttattttaatagcttttaatttaaactgtgcgttattttatttttattttttaataa

SEQ ID NO: 10771 - DNA, 96 bp, Aspergillus novofumigatus
  misc_feature: 1638
taatacagaatttttttttgcatacatataaatttataatgaatatttaaacttcattatagtatatatatattcctatgcgtataagatttaaat

SEQ ID NO: 10772 - DNA, 96 bp, Aspergillus novofumigatus
  misc_feature: 1637
ttataatgaatatttaaacttcattatagtatatatatattcctatgcgtataagatttaaatcttattataacttatgataatatatgtaaagta

SEQ ID NO: 10773 - DNA, 96 bp, Aspergillus novofumigatus
  misc_feature: 1637
gcatacatataaatttataatgaatatttaaacttcattatagtatatatatattcctatgcgtataagatttaaatcttattataacttatgata

SEQ ID NO: 10774 - DNA, 96 bp, Aspergillus novofumigatus
  misc_feature: 1636
tttgcatacatataaatttataatgaatatttaaacttcattatagtatatatatattcctatgcgtataagatttaaatcttattataacttatg

SEQ ID NO: 10775 - DNA, 96 bp, Aspergillus novofumigatus
  misc_feature: 1636
tattatataatatgaaatatagaaaattttttttatttatttactacctatggtttagtaaattagatattctaattctaactttaggatcctcta

SEQ ID NO: 10776 - DNA, 96 bp, Aspergillus novofumigatus
  misc_feature: 1635
ttctattcataggatcttctgtttttttcttagattcctctagactattcagatatgctacattagtttgtatacattcacgtacataaccattgg

SEQ ID NO: 10777 - DNA, 96 bp, Aspergillus novofumigatus
  misc_feature: 1634
tttataatgaatatttaaacttcattatagtatatatatattcctatgcgtataagatttaaatcttattataacttatgataatatatgtaaagt

SEQ ID NO: 10778 - DNA, 96 bp, Aspergillus novofumigatus
  misc_feature: 1634
cattctaattctattcataggatcttctgtttttttcttagattcctctagactattcagatatgctacattagtttgtatacattcacgtacata

SEQ ID NO: 10779 - DNA, 96 bp, Aspergillus novofumigatus
  misc_feature: 1634
tataaatttataatgaatatttaaacttcattatagtatatatatattcctatgcgtataagatttaaatcttattataacttatgataatatatg

SEQ ID NO: 10780 - DNA, 96 bp, Aspergillus novofumigatus
  misc_feature: 1633
gaaaccatatggtagtaaaatatatcctgatagtgatgcaggttttgctgctgcttttgattatttgaaaacaaaaaaaccagtaatcttgaaagg

SEQ ID NO: 10781 - DNA, 96 bp, Aspergillus novofumigatus
  misc_feature: 1632
aatagtgattattatcaacgtgatgatgttagaaaggcgaatatagagagtgtatttcataaatattttcctagattagatggtagaaaagactac

SEQ ID NO: 10782 - DNA, 96 bp, Aspergillus novofumigatus
  misc_feature: 1632
attattatataatatgaaatatagaaaattttttttatttatttactacctatggtttagtaaattagatattctaattctaactttaggatcctc

SEQ ID NO: 10783 - DNA, 96 bp, Aspergillus novofumigatus
  misc_feature: 1631
tatctgaatagtctagaggaatctaagaaaaaaacagaagatcctatgaatagaattagaatgcctaatttactagaggatcctaaagttagaatt

SEQ ID NO: 10784 - DNA, 96 bp, Aspergillus novofumigatus
  misc_feature: 1630
ttatataatatgaaatatagaaaattttttttatttatttactacctatggtttagtaaattagatattctaattctaactttaggatcctctagt

SEQ ID NO: 10785 - DNA, 96 bp, Aspergillus novofumigatus
  misc_feature: 1630
ttataataaacactacccttaagacctaatcctgtgtagtcttttctaccatctaatctaggaaaatatttatgaaatacactctctatattcgcc

SEQ ID NO: 10786 - DNA, 96 bp, Aspergillus novofumigatus
  misc_feature: 1629
tgcatacatataaatttataatgaatatttaaacttcattatagtatatatatattcctatgcgtataagatttaaatcttattataacttatgat

SEQ ID NO: 10787 - DNA, 96 bp, Aspergillus novofumigatus
  misc_feature: 1629
taatagtgattattatcaacgtgatgatgttagaaaggcgaatatagagagtgtatttcataaatattttcctagattagatggtagaaaagacta

SEQ ID NO: 10788 - DNA, 96 bp, Aspergillus novofumigatus
  misc_feature: 1629
atatgtaaagtatatattattttgttaaaatatatatactttacatacaactaatcattggttgattatatttataacttcagcacactgatctat

SEQ ID NO: 10789 - DNA, 96 bp, Aspergillus novofumigatus
  misc_feature: 1628
tttataataaacactacccttaagacctaatcctgtgtagtcttttctaccatctaatctaggaaaatatttatgaaatacactctctatattcgc

SEQ ID NO: 10790 - DNA, 96 bp, Aspergillus novofumigatus
  misc_feature: 1628
aaaagcattaatgcctaatttaatacattatttagatgctacatccttaagtttattatatgaaaaatttacttattcatttaaagaaactaatcc

SEQ ID NO: 10791 - DNA, 96 bp, Aspergillus novofumigatus
  misc_feature: 1627
ctgaatagtctagaggaatctaagaaaaaaacagaagatcctatgaatagaattagaatgcctaatttactagaggatcctaaagttagaattaga

SEQ ID NO: 10792 - DNA, 96 bp, Aspergillus novofumigatus
  misc_feature: 1627
ggttttgctgctgcttttgattatttgaaaacaaaaaaaccagtaatcttgaaaggagatagtaaggcagatcttcttagggtgtctagtgctttg

SEQ ID NO: 10793 - DNA, 96 bp, Aspergillus novofumigatus
  misc_feature: 1627
atttaaacttcattatagtatatatatattcctatgcgtataagatttaaatcttattataacttatgataatatatgtaaagtatatattatttt

SEQ ID NO: 10794 - DNA, 96 bp, Aspergillus novofumigatus
  misc_feature: 1626
ttgcatacatataaatttataatgaatatttaaacttcattatagtatatatatattcctatgcgtataagatttaaatcttattataacttatga

SEQ ID NO: 10795 - DNA, 96 bp, Aspergillus novofumigatus
  misc_feature: 1626
tattatacggctttatcaaatttataataaatattataaatttattttaatagcttttaatttaaactgtgcgttattttatttttattttttaat

SEQ ID NO: 10796 - DNA, 96 bp, Aspergillus novofumigatus
  misc_feature: 1626
gcaggttttgctgctgcttttgattatttgaaaacaaaaaaaccagtaatcttgaaaggagatagtaaggcagatcttcttagggtgtctagtgct

SEQ ID NO: 10797 - DNA, 96 bp, Aspergillus novofumigatus
  misc_feature: 1625
ataagaaaccatatggtagtaaaatatatcctgatagtgatgcaggttttgctgctgcttttgattatttgaaaacaaaaaaaccagtaatcttga

SEQ ID NO: 10798 - DNA, 96 bp, Aspergillus novofumigatus
  misc_feature: 1625
attatataatatgaaatatagaaaattttttttatttatttactacctatggtttagtaaattagatattctaattctaactttaggatcctctag

SEQ ID NO: 10799 - DNA, 96 bp, Aspergillus novofumigatus
  misc_feature: 1625
agcatatctgaatagtctagaggaatctaagaaaaaaacagaagatcctatgaatagaattagaatgcctaatttactagaggatcctaaagttag

SEQ ID NO: 10800 - DNA, 96 bp, Aspergillus novofumigatus
  misc_feature: 1625
atgaatatttaaacttcattatagtatatatatattcctatgcgtataagatttaaatcttattataacttatgataatatatgtaaagtatatat

SEQ ID NO: 10801 - DNA, 96 bp, Aspergillus novofumigatus
  misc_feature: 1625
acgagattctaccattgaattaacacgcctataattataatttgttattaatacaaattataattattatataatatgaaatatagaaaatttttt

SEQ ID NO: 10802 - DNA, 96 bp, Aspergillus novofumigatus
  misc_feature: 1624
tctgaatagtctagaggaatctaagaaaaaaacagaagatcctatgaatagaattagaatgcctaatttactagaggatcctaaagttagaattag

SEQ ID NO: 10803 - DNA, 96 bp, Aspergillus novofumigatus
  misc_feature: 1624
gagattctaccattgaattaacacgcctataattataatttgttattaatacaaattataattattatataatatgaaatatagaaaatttttttt

SEQ ID NO: 10804 - DNA, 96 bp, Aspergillus novofumigatus
  misc_feature: 1623
aagaaaccatatggtagtaaaatatatcctgatagtgatgcaggttttgctgctgcttttgattatttgaaaacaaaaaaaccagtaatcttgaaa

SEQ ID NO: 10805 - DNA, 96 bp, Aspergillus novofumigatus
  misc_feature: 1623
agaaaccatatggtagtaaaatatatcctgatagtgatgcaggttttgctgctgcttttgattatttgaaaacaaaaaaaccagtaatcttgaaag

SEQ ID NO: 10806 - DNA, 96 bp, Aspergillus novofumigatus
  misc_feature: 1622
tgaatatttaaacttcattatagtatatatatattcctatgcgtataagatttaaatcttattataacttatgataatatatgtaaagtatatatt

SEQ ID NO: 10807 - DNA, 96 bp, Aspergillus novofumigatus
  misc_feature: 1622
atatctgaatagtctagaggaatctaagaaaaaaacagaagatcctatgaatagaattagaatgcctaatttactagaggatcctaaagttagaat

SEQ ID NO: 10808 - DNA, 96 bp, Aspergillus novofumigatus
  misc_feature: 1619
cttcattatagtatatatatattcctatgcgtataagatttaaatcttattataacttatgataatatatgtaaagtatatattattttgttaaaa

SEQ ID NO: 10809 - DNA, 96 bp, Aspergillus novofumigatus
  misc_feature: 1619
taagaaaccatatggtagtaaaatatatcctgatagtgatgcaggttttgctgctgcttttgattatttgaaaacaaaaaaaccagtaatcttgaa

SEQ ID NO: 10810 - DNA, 96 bp, Aspergillus novofumigatus
  misc_feature: 1619
aattattatataatatgaaatatagaaaattttttttatttatttactacctatggtttagtaaattagatattctaattctaactttaggatcct

SEQ ID NO: 10811 - DNA, 96 bp, Aspergillus novofumigatus
  misc_feature: 1617
tatttaaacttcattatagtatatatatattcctatgcgtataagatttaaatcttattataacttatgataatatatgtaaagtatatattattt

SEQ ID NO: 10812 - DNA, 96 bp, Aspergillus novofumigatus
  misc_feature: 1617
cacgagattctaccattgaattaacacgcctataattataatttgttattaatacaaattataattattatataatatgaaatatagaaaattttt

SEQ ID NO: 10813 - DNA, 96 bp, Aspergillus novofumigatus
  misc_feature: 1616
gcatatctgaatagtctagaggaatctaagaaaaaaacagaagatcctatgaatagaattagaatgcctaatttactagaggatcctaaagttaga

SEQ ID NO: 10814 - DNA, 96 bp, Aspergillus novofumigatus
  misc_feature: 1616
tcattatagtatatatatattcctatgcgtataagatttaaatcttattataacttatgataatatatgtaaagtatatattattttgttaaaata

SEQ ID NO: 10815 - DNA, 96 bp, Aspergillus novofumigatus
  misc_feature: 1615
caggttttgctgctgcttttgattatttgaaaacaaaaaaaccagtaatcttgaaaggagatagtaaggcagatcttcttagggtgtctagtgctt

SEQ ID NO: 10816 - DNA, 96 bp, Aspergillus novofumigatus
  misc_feature: 1614
acttcattatagtatatatatattcctatgcgtataagatttaaatcttattataacttatgataatatatgtaaagtatatattattttgttaaa

SEQ ID NO: 10817 - DNA, 96 bp, Aspergillus novofumigatus
  misc_feature: 1614
ttcattatagtatatatatattcctatgcgtataagatttaaatcttattataacttatgataatatatgtaaagtatatattattttgttaaaat

SEQ ID NO: 10818 - DNA, 96 bp, Aspergillus novofumigatus
  misc_feature: 1614
tatatgtaaagtatatattattttgttaaaatatatatactttacatacaactaatcattggttgattatatttataacttcagcacactgatcta

SEQ ID NO: 10819 - DNA, 96 bp, Aspergillus novofumigatus
  misc_feature: 1613
ttaatagtgattattatcaacgtgatgatgttagaaaggcgaatatagagagtgtatttcataaatattttcctagattagatggtagaaaagact

SEQ ID NO: 10820 - DNA, 96 bp, Aspergillus novofumigatus
  misc_feature: 1613
taacttatgataatatatgtaaagtatatattattttgttaaaatatatatactttacatacaactaatcattggttgattatatttataacttca

SEQ ID NO: 10821 - DNA, 96 bp, Aspergillus novofumigatus
  misc_feature: 1613
gatgatggtgatactaaaggaaatggattgttttggcctgagtgatagattaacaatttaaaattttaatagataagatttccatagtaattacct

SEQ ID NO: 10822 - DNA, 96 bp, Aspergillus novofumigatus
  misc_feature: 1613
atgatggtgatactaaaggaaatggattgttttggcctgagtgatagattaacaatttaaaattttaatagataagatttccatagtaattacctt

SEQ ID NO: 10823 - DNA, 96 bp, Aspergillus novofumigatus
  misc_feature: 1613
agtttctttaaatgaataagtaaatttttcatataataaacttaaggatgtagcatctaaataatgtattaaattaggcattaatgcttttatttt

SEQ ID NO: 10824 - DNA, 96 bp, Aspergillus novofumigatus
  misc_feature: 1612
tataacttatgataatatatgtaaagtatatattattttgttaaaatatatatactttacatacaactaatcattggttgattatatttataactt

SEQ ID NO: 10825 - DNA, 96 bp, Aspergillus novofumigatus
  misc_feature: 1612
attaatagtgattattatcaacgtgatgatgttagaaaggcgaatatagagagtgtatttcataaatattttcctagattagatggtagaaaagac

SEQ ID NO: 10826 - DNA, 96 bp, Aspergillus novofumigatus
  misc_feature: 1612
aggtaaccttaactaataaagaactttatatataaacattaaaagaattatatataaacattatcatatattgcaaatacaactaaccttccattt

SEQ ID NO: 10827 - DNA, 96 bp, Aspergillus novofumigatus
  misc_feature: 1611
agattctaccattgaattaacacgcctataattataatttgttattaatacaaattataattattatataatatgaaatatagaaaatttttttta

SEQ ID NO: 10828 - DNA, 96 bp, Aspergillus novofumigatus
  misc_feature: 1610
aacttcattatagtatatatatattcctatgcgtataagatttaaatcttattataacttatgataatatatgtaaagtatatattattttgttaa

SEQ ID NO: 10829 - DNA, 96 bp, Aspergillus novofumigatus
  misc_feature: 1610
attatagtatatatatattcctatgcgtataagatttaaatcttattataacttatgataatatatgtaaagtatatattattttgttaaaatata

SEQ ID NO: 10830 - DNA, 96 bp, Aspergillus novofumigatus
  misc_feature: 1610
taattattatataatatgaaatatagaaaattttttttatttatttactacctatggtttagtaaattagatattctaattctaactttaggatcc

SEQ ID NO: 10831 - DNA, 96 bp, Aspergillus novofumigatus
  misc_feature: 1610
agatgatggtgatactaaaggaaatggattgttttggcctgagtgatagattaacaatttaaaattttaatagataagatttccatagtaattacc

SEQ ID NO: 10832 - DNA, 96 bp, Aspergillus novofumigatus
  misc_feature: 1610
atatttaaacttcattatagtatatatatattcctatgcgtataagatttaaatcttattataacttatgataatatatgtaaagtatatattatt

SEQ ID NO: 10833 - DNA, 96 bp, Aspergillus novofumigatus
  misc_feature: 1609
gaatatttaaacttcattatagtatatatatattcctatgcgtataagatttaaatcttattataacttatgataatatatgtaaagtatatatta

SEQ ID NO: 10834 - DNA, 96 bp, Aspergillus novofumigatus
  misc_feature: 1609
atagtatatatatattcctatgcgtataagatttaaatcttattataacttatgataatatatgtaaagtatatattattttgttaaaatatatat

SEQ ID NO: 10835 - DNA, 96 bp, Aspergillus novofumigatus
  misc_feature: 1608
tgatggtgatactaaaggaaatggattgttttggcctgagtgatagattaacaatttaaaattttaatagataagatttccatagtaattaccttt

SEQ ID NO: 10836 - DNA, 96 bp, Aspergillus novofumigatus
  misc_feature: 1608
taagtaaggtaaccttaactaataaagaactttatatataaacattaaaagaattatatataaacattatcatatattgcaaatacaactaacctt

SEQ ID NO: 10837 - DNA, 96 bp, Aspergillus novofumigatus
  misc_feature: 1608
taaacttcattatagtatatatatattcctatgcgtataagatttaaatcttattataacttatgataatatatgtaaagtatatattattttgtt

SEQ ID NO: 10838 - DNA, 96 bp, Aspergillus novofumigatus
  misc_feature: 1607
ttataacttatgataatatatgtaaagtatatattattttgttaaaatatatatactttacatacaactaatcattggttgattatatttataact

SEQ ID NO: 10839 - DNA, 96 bp, Aspergillus novofumigatus
  misc_feature: 1607
cattatagtatatatatattcctatgcgtataagatttaaatcttattataacttatgataatatatgtaaagtatatattattttgttaaaatat

SEQ ID NO: 10840 - DNA, 96 bp, Aspergillus novofumigatus
  misc_feature: 1606
ctaatacagaatttttttttgcatacatataaatttataatgaatatttaaacttcattatagtatatatatattcctatgcgtataagatttaaa

SEQ ID NO: 10841 - DNA, 96 bp, Aspergillus novofumigatus
  misc_feature: 1606
ttatattatacggctttatcaaatttataataaatattataaatttattttaatagcttttaatttaaactgtgcgttattttatttttatttttt

SEQ ID NO: 10842 - DNA, 96 bp, Aspergillus novofumigatus
  misc_feature: 1606
tgcaggttttgctgctgcttttgattatttgaaaacaaaaaaaccagtaatcttgaaaggagatagtaaggcagatcttcttagggtgtctagtgc

SEQ ID NO: 10843 - DNA, 96 bp, Aspergillus novofumigatus
  misc_feature: 1606
tatagtatatatatattcctatgcgtataagatttaaatcttattataacttatgataatatatgtaaagtatatattattttgttaaaatatata

SEQ ID NO: 10844 - DNA, 96 bp, Aspergillus novofumigatus
  misc_feature: 1605
tttaaacttcattatagtatatatatattcctatgcgtataagatttaaatcttattataacttatgataatatatgtaaagtatatattattttg

SEQ ID NO: 10845 - DNA, 96 bp, Aspergillus novofumigatus
  misc_feature: 1605
actaatacagaatttttttttgcatacatataaatttataatgaatatttaaacttcattatagtatatatatattcctatgcgtataagatttaa

SEQ ID NO: 10846 - DNA, 96 bp, Aspergillus novofumigatus
  misc_feature: 1604
ttatagtatatatatattcctatgcgtataagatttaaatcttattataacttatgataatatatgtaaagtatatattattttgttaaaatatat

SEQ ID NO: 10847 - DNA, 96 bp, Aspergillus novofumigatus
  misc_feature: 1604
aaacttcattatagtatatatatattcctatgcgtataagatttaaatcttattataacttatgataatatatgtaaagtatatattattttgtta

SEQ ID NO: 10848 - DNA, 96 bp, Aspergillus novofumigatus
  misc_feature: 1604
ataattattatataatatgaaatatagaaaattttttttatttatttactacctatggtttagtaaattagatattctaattctaactttaggatc

SEQ ID NO: 10849 - DNA, 96 bp, Aspergillus novofumigatus
  misc_feature: 1603
catatctgaatagtctagaggaatctaagaaaaaaacagaagatcctatgaatagaattagaatgcctaatttactagaggatcctaaagttagaa

SEQ ID NO: 10850 - DNA, 96 bp, Aspergillus novofumigatus
  misc_feature: 1603
aatcttattataacttatgataatatatgtaaagtatatattattttgttaaaatatatatactttacatacaactaatcattggttgattatatt

SEQ ID NO: 10851 - DNA, 96 bp, Aspergillus novofumigatus
  misc_feature: 1602
tttaaatgaataagtaaatttttcatataataaacttaaggatgtagcatctaaataatgtattaaattaggcattaatgcttttatttttaaatt

SEQ ID NO: 10852 - DNA, 96 bp, Aspergillus novofumigatus
  misc_feature: 1602
tagtatatatatattcctatgcgtataagatttaaatcttattataacttatgataatatatgtaaagtatatattattttgttaaaatatatata

SEQ ID NO: 10853 - DNA, 96 bp, Aspergillus novofumigatus
  misc_feature: 1602
aactaatacagaatttttttttgcatacatataaatttataatgaatatttaaacttcattatagtatatatatattcctatgcgtataagattta

SEQ ID NO: 10854 - DNA, 96 bp, Aspergillus novofumigatus
  misc_feature: 1602
gtttctttaaatgaataagtaaatttttcatataataaacttaaggatgtagcatctaaataatgtattaaattaggcattaatgcttttattttt

SEQ ID NO: 10855 - DNA, 96 bp, Aspergillus novofumigatus
  misc_feature: 1600
aaaaataaaaataaaataacgcacagtttaaattaaaagctattaaaataaatttataatatttattataaatttgataaagccgtataatataaa

SEQ ID NO: 10856 - DNA, 96 bp, Aspergillus novofumigatus
  misc_feature: 1600
agtaaggtaaccttaactaataaagaactttatatataaacattaaaagaattatatataaacattatcatatattgcaaatacaactaaccttcc

SEQ ID NO: 10857 - DNA, 96 bp, Aspergillus novofumigatus
  misc_feature: 1600
acttatgataatatatgtaaagtatatattattttgttaaaatatatatactttacatacaactaatcattggttgattatatttataacttcagc

SEQ ID NO: 10858 - DNA, 96 bp, Aspergillus novofumigatus
  misc_feature: 1600
atgcaggttttgctgctgcttttgattatttgaaaacaaaaaaaccagtaatcttgaaaggagatagtaaggcagatcttcttagggtgtctagtg

SEQ ID NO: 10859 - DNA, 96 bp, Aspergillus novofumigatus
  misc_feature: 1599
tattataacttatgataatatatgtaaagtatatattattttgttaaaatatatatactttacatacaactaatcattggttgattatatttataa

SEQ ID NO: 10860 - DNA, 96 bp, Aspergillus novofumigatus
  misc_feature: 1599
atattatacggctttatcaaatttataataaatattataaatttattttaatagcttttaatttaaactgtgcgttattttatttttattttttaa

SEQ ID NO: 10861 - DNA, 96 bp, Aspergillus novofumigatus
  misc_feature: 1599
gattctaccattgaattaacacgcctataattataatttgttattaatacaaattataattattatataatatgaaatatagaaaattttttttat

SEQ ID NO: 10862 - DNA, 96 bp, Aspergillus novofumigatus
  misc_feature: 1599
atatatgtaaagtatatattattttgttaaaatatatatactttacatacaactaatcattggttgattatatttataacttcagcacactgatct

SEQ ID NO: 10863 - DNA, 96 bp, Aspergillus novofumigatus
  misc_feature: 1599
aatatttaaacttcattatagtatatatatattcctatgcgtataagatttaaatcttattataacttatgataatatatgtaaagtatatattat

SEQ ID NO: 10864 - DNA, 96 bp, Aspergillus novofumigatus
  misc_feature: 1599
aaggtaaccttaactaataaagaactttatatataaacattaaaagaattatatataaacattatcatatattgcaaatacaactaaccttccatt

SEQ ID NO: 10865 - DNA, 96 bp, Aspergillus novofumigatus
  misc_feature: 1598
ggtaaccttaactaatacagaatttttttttgcatacatataaatttataatgaatatttaaacttcattatagtatatatatattcctatgcgta

SEQ ID NO: 10866 - DNA, 96 bp, Aspergillus novofumigatus
  misc_feature: 1598
aagatgatggtgatactaaaggaaatggattgttttggcctgagtgatagattaacaatttaaaattttaatagataagatttccatagtaattac

SEQ ID NO: 10867 - DNA, 96 bp, Aspergillus novofumigatus
  misc_feature: 1598
cttattataacttatgataatatatgtaaagtatatattattttgttaaaatatatatactttacatacaactaatcattggttgattatatttat

SEQ ID NO: 10868 - DNA, 96 bp, Aspergillus novofumigatus
  misc_feature: 1597
ttattataacttatgataatatatgtaaagtatatattattttgttaaaatatatatactttacatacaactaatcattggttgattatatttata

SEQ ID NO: 10869 - DNA, 96 bp, Aspergillus novofumigatus
  misc_feature: 1597
tcttattataacttatgataatatatgtaaagtatatattattttgttaaaatatatatactttacatacaactaatcattggttgattatattta

SEQ ID NO: 10870 - DNA, 96 bp, Aspergillus novofumigatus
  misc_feature: 1597
tatattatacggctttatcaaatttataataaatattataaatttattttaatagcttttaatttaaactgtgcgttattttatttttatttttta

SEQ ID NO: 10871 - DNA, 96 bp, Aspergillus novofumigatus
  misc_feature: 1597
atcttattataacttatgataatatatgtaaagtatatattattttgttaaaatatatatactttacatacaactaatcattggttgattatattt

SEQ ID NO: 10872 - DNA, 96 bp, Aspergillus novofumigatus
  misc_feature: 1596
attataacttatgataatatatgtaaagtatatattattttgttaaaatatatatactttacatacaactaatcattggttgattatatttataac

SEQ ID NO: 10873 - DNA, 96 bp, Aspergillus novofumigatus
  misc_feature: 1595
taaatgaataagtaaatttttcatataataaacttaaggatgtagcatctaaataatgtattaaattaggcattaatgcttttatttttaaattaa

SEQ ID NO: 10874 - DNA, 96 bp, Aspergillus novofumigatus
  misc_feature: 1595
ttaaacttcattatagtatatatatattcctatgcgtataagatttaaatcttattataacttatgataatatatgtaaagtatatattattttgt

SEQ ID NO: 10875 - DNA, 96 bp, Aspergillus novofumigatus
  misc_feature: 1595
aaatcttattataacttatgataatatatgtaaagtatatattattttgttaaaatatatatactttacatacaactaatcattggttgattatat

SEQ ID NO: 10876 - DNA, 96 bp, Aspergillus novofumigatus
  misc_feature: 1595
aggtaaccttaactaatacagaatttttttttgcatacatataaatttataatgaatatttaaacttcattatagtatatatatattcctatgcgt

SEQ ID NO: 10877 - DNA, 96 bp, Aspergillus novofumigatus
  misc_feature: 1594
ttaagtaaggtaaccttaactaataaagaactttatatataaacattaaaagaattatatataaacattatcatatattgcaaatacaactaacct

SEQ ID NO: 10878 - DNA, 96 bp, Aspergillus novofumigatus
  misc_feature: 1594
ttaaatgaataagtaaatttttcatataataaacttaaggatgtagcatctaaataatgtattaaattaggcattaatgcttttatttttaaatta

SEQ ID NO: 10879 - DNA, 96 bp, Aspergillus novofumigatus
  misc_feature: 1594
aatcatttaagtaaggtaaccttaactaataaagaactttatatataaacattaaaagaattatatataaacattatcatatattgcaaatacaac

SEQ ID NO: 10880 - DNA, 96 bp, Aspergillus novofumigatus
  misc_feature: 1594
ataacttatgataatatatgtaaagtatatattattttgttaaaatatatatactttacatacaactaatcattggttgattatatttataacttc

SEQ ID NO: 10881 - DNA, 96 bp, Aspergillus novofumigatus
  misc_feature: 1593
tataattattatataatatgaaatatagaaaattttttttatttatttactacctatggtttagtaaattagatattctaattctaactttaggat

SEQ ID NO: 10882 - DNA, 96 bp, Aspergillus novofumigatus
  misc_feature: 1593
atttaaatcttattataacttatgataatatatgtaaagtatatattattttgttaaaatatatatactttacatacaactaatcattggttgatt

SEQ ID NO: 10883 - DNA, 96 bp, Aspergillus novofumigatus
  misc_feature: 1592
aaattataattattatataatatgaaatatagaaaattttttttatttatttactacctatggtttagtaaattagatattctaattctaacttta

SEQ ID NO: 10884 - DNA, 96 bp, Aspergillus novofumigatus
  misc_feature: 1592
aacttatgataatatatgtaaagtatatattattttgttaaaatatatatactttacatacaactaatcattggttgattatatttataacttcag

SEQ ID NO: 10885 - DNA, 96 bp, Aspergillus novofumigatus
  misc_feature: 1591
tttctttaaatgaataagtaaatttttcatataataaacttaaggatgtagcatctaaataatgtattaaattaggcattaatgcttttattttta

SEQ ID NO: 10886 - DNA, 96 bp, Aspergillus novofumigatus
  misc_feature: 1591
ctgatctattgaaggttcagttactagtgtatatcctacatttatattagttaaatattcactcttattgcaaagtaataattttatagcttcgct

SEQ ID NO: 10887 - DNA, 96 bp, Aspergillus novofumigatus
  misc_feature: 1589
ctaagaagatctgccttactatctcctttcaagattactggtttttttgttttcaaataatcaaaagcagcagcaaaacctgcatcactatcagga

SEQ ID NO: 10888 - DNA, 96 bp, Aspergillus novofumigatus
  misc_feature: 1589
taagaagatctgccttactatctcctttcaagattactggtttttttgttttcaaataatcaaaagcagcagcaaaacctgcatcactatcaggat

SEQ ID NO: 10889 - DNA, 96 bp, Aspergillus novofumigatus
  misc_feature: 1589
gatggtgatactaaaggaaatggattgttttggcctgagtgatagattaacaatttaaaattttaatagataagatttccatagtaattacctttg

SEQ ID NO: 10890 - DNA, 96 bp, Aspergillus novofumigatus
  misc_feature: 1588
aatatatgtaaagtatatattattttgttaaaatatatatactttacatacaactaatcattggttgattatatttataacttcagcacactgatc

SEQ ID NO: 10891 - DNA, 96 bp, Aspergillus novofumigatus
  misc_feature: 1588
atcatttaagtaaggtaaccttaactaataaagaactttatatataaacattaaaagaattatatataaacattatcatatattgcaaatacaact

SEQ ID NO: 10892 - DNA, 96 bp, Aspergillus novofumigatus
  misc_feature: 1587
cttatctatataaatttgataaaatatattagatttaatagaaaataacactaattatagattagatcgtgagaaaagaacattagaaatggataa

SEQ ID NO: 10893 - DNA, 96 bp, Aspergillus novofumigatus
  misc_feature: 1587
gtaaccttaactaatacagaatttttttttgcatacatataaatttataatgaatatttaaacttcattatagtatatatatattcctatgcgtat

SEQ ID NO: 10894 - DNA, 96 bp, Aspergillus novofumigatus
  misc_feature: 1586
atttaagtaaggtaaccttaactaataaagaactttatatataaacattaaaagaattatatataaacattatcatatattgcaaatacaactaac

SEQ ID NO: 10895 - DNA, 96 bp, Aspergillus novofumigatus
  misc_feature: 1585
cttatgataatatatgtaaagtatatattattttgttaaaatatatatactttacatacaactaatcattggttgattatatttataacttcagca

SEQ ID NO: 10896 - DNA, 96 bp, Aspergillus novofumigatus
  misc_feature: 1585
aagtaaggtaaccttaactaataaagaactttatatataaacattaaaagaattatatataaacattatcatatattgcaaatacaactaaccttc

SEQ ID NO: 10897 - DNA, 96 bp, Aspergillus novofumigatus
  misc_feature: 1584
ttatgataatatatgtaaagtatatattattttgttaaaatatatatactttacatacaactaatcattggttgattatatttataacttcagcac

SEQ ID NO: 10898 - DNA, 96 bp, Aspergillus novofumigatus
  misc_feature: 1584
tatgataatatatgtaaagtatatattattttgttaaaatatatatactttacatacaactaatcattggttgattatatttataacttcagcaca

SEQ ID NO: 10899 - DNA, 96 bp, Aspergillus novofumigatus
  misc_feature: 1584
tattaatagtgattattatcaacgtgatgatgttagaaaggcgaatatagagagtgtatttcataaatattttcctagattagatggtagaaaaga

SEQ ID NO: 10900 - DNA, 96 bp, Aspergillus novofumigatus
  misc_feature: 1584
tcatttaagtaaggtaaccttaactaataaagaactttatatataaacattaaaagaattatatataaacattatcatatattgcaaatacaacta

SEQ ID NO: 10901 - DNA, 96 bp, Aspergillus novofumigatus
  misc_feature: 1584
taatatatgtaaagtatatattattttgttaaaatatatatactttacatacaactaatcattggttgattatatttataacttcagcacactgat

SEQ ID NO: 10902 - DNA, 96 bp, Aspergillus novofumigatus
  misc_feature: 1584
cctaagaagatctgccttactatctcctttcaagattactggtttttttgttttcaaataatcaaaagcagcagcaaaacctgcatcactatcagg

SEQ ID NO: 10903 - DNA, 96 bp, Aspergillus novofumigatus
  misc_feature: 1583
taaatcttattataacttatgataatatatgtaaagtatatattattttgttaaaatatatatactttacatacaactaatcattggttgattata

SEQ ID NO: 10904 - DNA, 96 bp, Aspergillus novofumigatus
  misc_feature: 1581
tttaagtaaggtaaccttaactaataaagaactttatatataaacattaaaagaattatatataaacattatcatatattgcaaatacaactaacc

SEQ ID NO: 10905 - DNA, 96 bp, Aspergillus novofumigatus
  misc_feature: 1581
ttctttaaatgaataagtaaatttttcatataataaacttaaggatgtagcatctaaataatgtattaaattaggcattaatgcttttatttttaa

SEQ ID NO: 10906 - DNA, 96 bp, Aspergillus novofumigatus
  misc_feature: 1581
taaggtaaccttaactaataaagaactttatatataaacattaaaagaattatatataaacattatcatatattgcaaatacaactaaccttccat

SEQ ID NO: 10907 - DNA, 96 bp, Aspergillus novofumigatus
  misc_feature: 1581
aaggtaaccttaactaatacagaatttttttttgcatacatataaatttataatgaatatttaaacttcattatagtatatatatattcctatgcg

SEQ ID NO: 10908 - DNA, 96 bp, Aspergillus novofumigatus
  misc_feature: 1580
atctatataaatttgataaaatatattagatttaatagaaaataacactaattatagattagatcgtgagaaaagaacattagaaatggataatca

SEQ ID NO: 10909 - DNA, 96 bp, Aspergillus novofumigatus
  misc_feature: 1580
tctatataaatttgataaaatatattagatttaatagaaaataacactaattatagattagatcgtgagaaaagaacattagaaatggataatcat

SEQ ID NO: 10910 - DNA, 96 bp, Aspergillus novofumigatus
  misc_feature: 1580
ataatatatgtaaagtatatattattttgttaaaatatatatactttacatacaactaatcattggttgattatatttataacttcagcacactga

SEQ ID NO: 10911 - DNA, 96 bp, Aspergillus novofumigatus
  misc_feature: 1580
aaaataaaaataaaataacgcacagtttaaattaaaagctattaaaataaatttataatatttattataaatttgataaagccgtataatataaat

SEQ ID NO: 10912 - DNA, 96 bp, Aspergillus novofumigatus
  misc_feature: 1579
gtaaggtaaccttaactaataaagaactttatatataaacattaaaagaattatatataaacattatcatatattgcaaatacaactaaccttcca

SEQ ID NO: 10913 - DNA, 96 bp, Aspergillus novofumigatus
  misc_feature: 1579
taactaatacagaatttttttttgcatacatataaatttataatgaatatttaaacttcattatagtatatatatattcctatgcgtataagattt

SEQ ID NO: 10914 - DNA, 96 bp, Aspergillus novofumigatus
  misc_feature: 1578
cttaactaatacagaatttttttttgcatacatataaatttataatgaatatttaaacttcattatagtatatatatattcctatgcgtataagat

SEQ ID NO: 10915 - DNA, 96 bp, Aspergillus novofumigatus
  misc_feature: 1577
ttaactaatacagaatttttttttgcatacatataaatttataatgaatatttaaacttcattatagtatatatatattcctatgcgtataagatt

SEQ ID NO: 10916 - DNA, 96 bp, Aspergillus novofumigatus
  misc_feature: 1577
tagtggtcaagatgatggtgatactaaaggaaatggattgttttggcctgagtgatagattaacaatttaaaattttaatagataagatttccata

SEQ ID NO: 10917 - DNA, 96 bp, Aspergillus novofumigatus
  misc_feature: 1577
atgataatatatgtaaagtatatattattttgttaaaatatatatactttacatacaactaatcattggttgattatatttataacttcagcacac

SEQ ID NO: 10918 - DNA, 96 bp, Aspergillus novofumigatus
  misc_feature: 1577
attctaccattgaattaacacgcctataattataatttgttattaatacaaattataattattatataatatgaaatatagaaaattttttttatt

SEQ ID NO: 10919 - DNA, 96 bp, Aspergillus novofumigatus
  misc_feature: 1576
taagatttaaatcttattataacttatgataatatatgtaaagtatatattattttgttaaaatatatatactttacatacaactaatcattggtt

SEQ ID NO: 10920 - DNA, 96 bp, Aspergillus novofumigatus
  misc_feature: 1576
agtatatatatattcctatgcgtataagatttaaatcttattataacttatgataatatatgtaaagtatatattattttgttaaaatatatatac

SEQ ID NO: 10921 - DNA, 96 bp, Aspergillus novofumigatus
  misc_feature: 1576
gatttaaatcttattataacttatgataatatatgtaaagtatatattattttgttaaaatatatatactttacatacaactaatcattggttgat

SEQ ID NO: 10922 - DNA, 96 bp, Aspergillus novofumigatus
  misc_feature: 1575
ttataattattatataatatgaaatatagaaaattttttttatttatttactacctatggtttagtaaattagatattctaattctaactttagga

SEQ ID NO: 10923 - DNA, 96 bp, Aspergillus novofumigatus
  misc_feature: 1575
tgataatatatgtaaagtatatattattttgttaaaatatatatactttacatacaactaatcattggttgattatatttataacttcagcacact

SEQ ID NO: 10924 - DNA, 96 bp, Aspergillus novofumigatus
  misc_feature: 1575
ctatataaatttgataaaatatattagatttaatagaaaataacactaattatagattagatcgtgagaaaagaacattagaaatggataatcata

SEQ ID NO: 10925 - DNA, 96 bp, Aspergillus novofumigatus
  misc_feature: 1574
tttaaatcttattataacttatgataatatatgtaaagtatatattattttgttaaaatatatatactttacatacaactaatcattggttgatta

SEQ ID NO: 10926 - DNA, 96 bp, Aspergillus novofumigatus
  misc_feature: 1574
taaggtaaccttaactaatacagaatttttttttgcatacatataaatttataatgaatatttaaacttcattatagtatatatatattcctatgc

SEQ ID NO: 10927 - DNA, 96 bp, Aspergillus novofumigatus
  misc_feature: 1573
aaccttaactaatacagaatttttttttgcatacatataaatttataatgaatatttaaacttcattatagtatatatatattcctatgcgtataa

SEQ ID NO: 10928 - DNA, 96 bp, Aspergillus novofumigatus
  misc_feature: 1573
tccttatctatataaatttgataaaatatattagatttaatagaaaataacactaattatagattagatcgtgagaaaagaacattagaaatggat

SEQ ID NO: 10929 - DNA, 96 bp, Aspergillus novofumigatus
  misc_feature: 1573
atagtggtcaagatgatggtgatactaaaggaaatggattgttttggcctgagtgatagattaacaatttaaaattttaatagataagatttccat

SEQ ID NO: 10930 - DNA, 96 bp, Aspergillus novofumigatus
  misc_feature: 1572
taaccttaactaataaagaactttatatataaacattaaaagaattatatataaacattatcatatattgcaaatacaactaaccttccatttgat

SEQ ID NO: 10931 - DNA, 96 bp, Aspergillus novofumigatus
  misc_feature: 1572
agtaaggtaaccttaactaatacagaatttttttttgcatacatataaatttataatgaatatttaaacttcattatagtatatatatattcctat

SEQ ID NO: 10932 - DNA, 96 bp, Aspergillus novofumigatus
  misc_feature: 1571
catttaagtaaggtaaccttaactaataaagaactttatatataaacattaaaagaattatatataaacattatcatatattgcaaatacaactaa

SEQ ID NO: 10933 - DNA, 96 bp, Aspergillus novofumigatus
  misc_feature: 1571
aatagtggtcaagatgatggtgatactaaaggaaatggattgttttggcctgagtgatagattaacaatttaaaattttaatagataagatttcca

SEQ ID NO: 10934 - DNA, 96 bp, Aspergillus novofumigatus
  misc_feature: 1571
agatttaaatcttattataacttatgataatatatgtaaagtatatattattttgttaaaatatatatactttacatacaactaatcattggttga

SEQ ID NO: 10935 - DNA, 96 bp, Aspergillus novofumigatus
  misc_feature: 1571
ggtaaccttaactaataaagaactttatatataaacattaaaagaattatatataaacattatcatatattgcaaatacaactaaccttccatttg

SEQ ID NO: 10936 - DNA, 96 bp, Aspergillus novofumigatus
  misc_feature: 1571
ataagatttaaatcttattataacttatgataatatatgtaaagtatatattattttgttaaaatatatatactttacatacaactaatcattggt

SEQ ID NO: 10937 - DNA, 96 bp, Aspergillus novofumigatus
  misc_feature: 1570
taaccttaactaatacagaatttttttttgcatacatataaatttataatgaatatttaaacttcattatagtatatatatattcctatgcgtata

SEQ ID NO: 10938 - DNA, 96 bp, Aspergillus novofumigatus
  misc_feature: 1570
aaccttaactaataaagaactttatatataaacattaaaagaattatatataaacattatcatatattgcaaatacaactaaccttccatttgatc

SEQ ID NO: 10939 - DNA, 96 bp, Aspergillus novofumigatus
  misc_feature: 1569
agaactttatatataaacattaaaagaattatatataaacattatcatatattgcaaatacaactaaccttccatttgatctcttaatcataataa

SEQ ID NO: 10940 - DNA, 96 bp, Aspergillus novofumigatus
  misc_feature: 1569
ttaaatcttattataacttatgataatatatgtaaagtatatattattttgttaaaatatatatactttacatacaactaatcattggttgattat

SEQ ID NO: 10941 - DNA, 96 bp, Aspergillus novofumigatus
  misc_feature: 1569
cttaactaataaagaactttatatataaacattaaaagaattatatataaacattatcatatattgcaaatacaactaaccttccatttgatctct

SEQ ID NO: 10942 - DNA, 96 bp, Aspergillus novofumigatus
  misc_feature: 1569
aattataattattatataatatgaaatatagaaaattttttttatttatttactacctatggtttagtaaattagatattctaattctaactttag

SEQ ID NO: 10943 - DNA, 96 bp, Aspergillus novofumigatus
  misc_feature: 1569
aagatttaaatcttattataacttatgataatatatgtaaagtatatattattttgttaaaatatatatactttacatacaactaatcattggttg

SEQ ID NO: 10944 - DNA, 96 bp, Aspergillus novofumigatus
  misc_feature: 1568
taagtaaggtaaccttaactaatacagaatttttttttgcatacatataaatttataatgaatatttaaacttcattatagtatatatatattcct

SEQ ID NO: 10945 - DNA, 96 bp, Aspergillus novofumigatus
  misc_feature: 1567
tcaagatgatggtgatactaaaggaaatggattgttttggcctgagtgatagattaacaatttaaaattttaatagataagatttccatagtaatt

SEQ ID NO: 10946 - DNA, 96 bp, Aspergillus novofumigatus
  misc_feature: 1566
tctttaaatgaataagtaaatttttcatataataaacttaaggatgtagcatctaaataatgtattaaattaggcattaatgcttttatttttaaa

SEQ ID NO: 10947 - DNA, 96 bp, Aspergillus novofumigatus
  misc_feature: 1566
attataattattatataatatgaaatatagaaaattttttttatttatttactacctatggtttagtaaattagatattctaattctaactttagg

SEQ ID NO: 10948 - DNA, 96 bp, Aspergillus novofumigatus
  misc_feature: 1565
ccttaactaatacagaatttttttttgcatacatataaatttataatgaatatttaaacttcattatagtatatatatattcctatgcgtataaga

SEQ ID NO: 10949 - DNA, 96 bp, Aspergillus novofumigatus
  misc_feature: 1565
ccttatctatataaatttgataaaatatattagatttaatagaaaataacactaattatagattagatcgtgagaaaagaacattagaaatggata

SEQ ID NO: 10950 - DNA, 96 bp, Aspergillus novofumigatus
  misc_feature: 1565
caagatgatggtgatactaaaggaaatggattgttttggcctgagtgatagattaacaatttaaaattttaatagataagatttccatagtaatta

SEQ ID NO: 10951 - DNA, 96 bp, Aspergillus novofumigatus
  misc_feature: 1565
gtatatatatattcctatgcgtataagatttaaatcttattataacttatgataatatatgtaaagtatatattattttgttaaaatatatatact

SEQ ID NO: 10952 - DNA, 96 bp, Aspergillus novofumigatus
  misc_feature: 1565
gtataagatttaaatcttattataacttatgataatatatgtaaagtatatattattttgttaaaatatatatactttacatacaactaatcattg

SEQ ID NO: 10953 - DNA, 96 bp, Aspergillus novofumigatus
  misc_feature: 1565
ctttaaatgaataagtaaatttttcatataataaacttaaggatgtagcatctaaataatgtattaaattaggcattaatgcttttatttttaaat

SEQ ID NO: 10954 - DNA, 96 bp, Aspergillus novofumigatus
  misc_feature: 1564
gtaaccttaactaataaagaactttatatataaacattaaaagaattatatataaacattatcatatattgcaaatacaactaaccttccatttga

SEQ ID NO: 10955 - DNA, 96 bp, Aspergillus novofumigatus
  misc_feature: 1564
accttaactaataaagaactttatatataaacattaaaagaattatatataaacattatcatatattgcaaatacaactaaccttccatttgatct

SEQ ID NO: 10956 - DNA, 96 bp, Aspergillus novofumigatus
  misc_feature: 1563
gtcaagatgatggtgatactaaaggaaatggattgttttggcctgagtgatagattaacaatttaaaattttaatagataagatttccatagtaat

SEQ ID NO: 10957 - DNA, 96 bp, Aspergillus novofumigatus
  misc_feature: 1561
ggtcaagatgatggtgatactaaaggaaatggattgttttggcctgagtgatagattaacaatttaaaattttaatagataagatttccatagtaa

SEQ ID NO: 10958 - DNA, 96 bp, Aspergillus novofumigatus
  misc_feature: 1561
accttaactaatacagaatttttttttgcatacatataaatttataatgaatatttaaacttcattatagtatatatatattcctatgcgtataag

SEQ ID NO: 10959 - DNA, 96 bp, Aspergillus novofumigatus
  misc_feature: 1561
aaatgaataagtaaatttttcatataataaacttaaggatgtagcatctaaataatgtattaaattaggcattaatgcttttatttttaaattaag

SEQ ID NO: 10960 - DNA, 96 bp, Aspergillus novofumigatus
  misc_feature: 1561
aatgaataagtaaatttttcatataataaacttaaggatgtagcatctaaataatgtattaaattaggcattaatgcttttatttttaaattaagt

SEQ ID NO: 10961 - DNA, 96 bp, Aspergillus novofumigatus
  misc_feature: 1560
gctattaatagtgattattatcaacgtgatgatgttagaaaggcgaatatagagagtgtatttcataaatattttcctagattagatggtagaaaa

SEQ ID NO: 10962 - DNA, 96 bp, Aspergillus novofumigatus
  misc_feature: 1560
ggaaatcttatctattaaaattttaaattgttaatctatcactcaggccaaaacaatccatttcctttagtatcaccatcatcttgaccactattt

SEQ ID NO: 10963 - DNA, 96 bp, Aspergillus novofumigatus
  misc_feature: 1559
tatatatatattcctatgcgtataagatttaaatcttattataacttatgataatatatgtaaagtatatattattttgttaaaatatatatactt

SEQ ID NO: 10964 - DNA, 96 bp, Aspergillus novofumigatus
  misc_feature: 1558
tggtcaagatgatggtgatactaaaggaaatggattgttttggcctgagtgatagattaacaatttaaaattttaatagataagatttccatagta

SEQ ID NO: 10965 - DNA, 96 bp, Aspergillus novofumigatus
  misc_feature: 1558
agttagaattagaatatctaatttactaaaccataggtagtaaataaataaaaaaaattttctatatttcatattatataataattataatttgta

SEQ ID NO: 10966 - DNA, 96 bp, Aspergillus novofumigatus
  misc_feature: 1558
atgcgtataagatttaaatcttattataacttatgataatatatgtaaagtatatattattttgttaaaatatatatactttacatacaactaatc

SEQ ID NO: 10967 - DNA, 96 bp, Aspergillus novofumigatus
  misc_feature: 1558
gataatatatgtaaagtatatattattttgttaaaatatatatactttacatacaactaatcattggttgattatatttataacttcagcacactg

SEQ ID NO: 10968 - DNA, 96 bp, Aspergillus novofumigatus
  misc_feature: 1558
caaattataattattatataatatgaaatatagaaaattttttttatttatttactacctatggtttagtaaattagatattctaattctaacttt

SEQ ID NO: 10969 - DNA, 96 bp, Aspergillus novofumigatus
  misc_feature: 1557
aaataaaaataaaataacgcacagtttaaattaaaagctattaaaataaatttataatatttattataaatttgataaagccgtataatataaatt

SEQ ID NO: 10970 - DNA, 96 bp, Aspergillus novofumigatus
  misc_feature: 1556
tatgcgtataagatttaaatcttattataacttatgataatatatgtaaagtatatattattttgttaaaatatatatactttacatacaactaat

SEQ ID NO: 10971 - DNA, 96 bp, Aspergillus novofumigatus
  misc_feature: 1556
aagttagaattagaatatctaatttactaaaccataggtagtaaataaataaaaaaaattttctatatttcatattatataataattataatttgt

SEQ ID NO: 10972 - DNA, 96 bp, Aspergillus novofumigatus
  misc_feature: 1555
aagtaaggtaaccttaactaatacagaatttttttttgcatacatataaatttataatgaatatttaaacttcattatagtatatatatattccta

SEQ ID NO: 10973 - DNA, 96 bp, Aspergillus novofumigatus
  misc_feature: 1555
gtaaggtaaccttaactaatacagaatttttttttgcatacatataaatttataatgaatatttaaacttcattatagtatatatatattcctatg

SEQ ID NO: 10974 - DNA, 96 bp, Aspergillus novofumigatus
  misc_feature: 1555
agtggtcaagatgatggtgatactaaaggaaatggattgttttggcctgagtgatagattaacaatttaaaattttaatagataagatttccatag

SEQ ID NO: 10975 - DNA, 96 bp, Aspergillus novofumigatus
  misc_feature: 1554
ttaactaataaagaactttatatataaacattaaaagaattatatataaacattatcatatattgcaaatacaactaaccttccatttgatctctt

SEQ ID NO: 10976 - DNA, 96 bp, Aspergillus novofumigatus
  misc_feature: 1553
aactttatatataaacattaaaagaattatatataaacattatcatatattgcaaatacaactaaccttccatttgatctcttaatcataataaga

SEQ ID NO: 10977 - DNA, 96 bp, Aspergillus novofumigatus
  misc_feature: 1553
tataagatttaaatcttattataacttatgataatatatgtaaagtatatattattttgttaaaatatatatactttacatacaactaatcattgg

SEQ ID NO: 10978 - DNA, 96 bp, Aspergillus novofumigatus
  misc_feature: 1552
ccttaactaataaagaactttatatataaacattaaaagaattatatataaacattatcatatattgcaaatacaactaaccttccatttgatctc

SEQ ID NO: 10979 - DNA, 96 bp, Aspergillus novofumigatus
  misc_feature: 1551
gtggtcaagatgatggtgatactaaaggaaatggattgttttggcctgagtgatagattaacaatttaaaattttaatagataagatttccatagt

SEQ ID NO: 10980 - DNA, 96 bp, Aspergillus novofumigatus
  misc_feature: 1551
gcgtataagatttaaatcttattataacttatgataatatatgtaaagtatatattattttgttaaaatatatatactttacatacaactaatcat

SEQ ID NO: 10981 - DNA, 96 bp, Aspergillus novofumigatus
  misc_feature: 1550
agctattaatagtgattattatcaacgtgatgatgttagaaaggcgaatatagagagtgtatttcataaatattttcctagattagatggtagaaa

SEQ ID NO: 10982 - DNA, 96 bp, Aspergillus novofumigatus
  misc_feature: 1550
atctaagtaaggtaaccttaactaatacagaatttttttttgcatacatataaatttataatgaatatttaaacttcattatagtatatatatatt

SEQ ID NO: 10983 - DNA, 96 bp, Aspergillus novofumigatus
  misc_feature: 1548
cgtataagatttaaatcttattataacttatgataatatatgtaaagtatatattattttgttaaaatatatatactttacatacaactaatcatt

SEQ ID NO: 10984 - DNA, 96 bp, Aspergillus novofumigatus
  misc_feature: 1546
tctaagtaaggtaaccttaactaatacagaatttttttttgcatacatataaatttataatgaatatttaaacttcattatagtatatatatattc

SEQ ID NO: 10985 - DNA, 96 bp, Aspergillus novofumigatus
  misc_feature: 1546
tattaatacaaattataattattatataatatgaaatatagaaaattttttttatttatttactacctatggtttagtaaattagatattctaatt

SEQ ID NO: 10986 - DNA, 96 bp, Aspergillus novofumigatus
  misc_feature: 1546
aataaaaataaaataacgcacagtttaaattaaaagctattaaaataaatttataatatttattataaatttgataaagccgtataatataaatta

SEQ ID NO: 10987 - DNA, 96 bp, Aspergillus novofumigatus
  misc_feature: 1546
gaactttatatataaacattaaaagaattatatataaacattatcatatattgcaaatacaactaaccttccatttgatctcttaatcataataag

SEQ ID NO: 10988 - DNA, 96 bp, Aspergillus novofumigatus
  misc_feature: 1546
ctattaatagtgattattatcaacgtgatgatgttagaaaggcgaatatagagagtgtatttcataaatattttcctagattagatggtagaaaag

SEQ ID NO: 10989 - DNA, 96 bp, Aspergillus novofumigatus
  misc_feature: 1545
tgcgtataagatttaaatcttattataacttatgataatatatgtaaagtatatattattttgttaaaatatatatactttacatacaactaatca

SEQ ID NO: 10990 - DNA, 96 bp, Aspergillus novofumigatus
  misc_feature: 1544
gaaatcttatctattaaaattttaaattgttaatctatcactcaggccaaaacaatccatttcctttagtatcaccatcatcttgaccactattta

SEQ ID NO: 10991 - DNA, 96 bp, Aspergillus novofumigatus
  misc_feature: 1543
ttctaccattgaattaacacgcctataattataatttgttattaatacaaattataattattatataatatgaaatatagaaaattttttttattt

SEQ ID NO: 10992 - DNA, 96 bp, Aspergillus novofumigatus
  misc_feature: 1543
gttagaattagaatatctaatttactaaaccataggtagtaaataaataaaaaaaattttctatatttcatattatataataattataatttgtat

SEQ ID NO: 10993 - DNA, 96 bp, Aspergillus novofumigatus
  misc_feature: 1541
ataaaaataaaataacgcacagtttaaattaaaagctattaaaataaatttataatatttattataaatttgataaagccgtataatataaattaa

SEQ ID NO: 10994 - DNA, 96 bp, Aspergillus novofumigatus
  misc_feature: 1540
ctatgcgtataagatttaaatcttattataacttatgataatatatgtaaagtatatattattttgttaaaatatatatactttacatacaactaa

SEQ ID NO: 10995 - DNA, 96 bp, Aspergillus novofumigatus
  misc_feature: 1538
ttatctattaaaattttaaattgttaatctatcactcaggccaaaacaatccatttcctttagtatcaccatcatcttgaccactatttagtaatg

SEQ ID NO: 10996 - DNA, 96 bp, Aspergillus novofumigatus
  misc_feature: 1537
tcctatgcgtataagatttaaatcttattataacttatgataatatatgtaaagtatatattattttgttaaaatatatatactttacatacaact

SEQ ID NO: 10997 - DNA, 96 bp, Aspergillus novofumigatus
  misc_feature: 1536
taactaataaagaactttatatataaacattaaaagaattatatataaacattatcatatattgcaaatacaactaaccttccatttgatctctta

SEQ ID NO: 10998 - DNA, 96 bp, Aspergillus novofumigatus
  misc_feature: 1535
attaatttatattatacggctttatcaaatttataataaatattataaatttattttaatagcttttaatttaaactgtgcgttattttattttta

SEQ ID NO: 10999 - DNA, 96 bp, Aspergillus novofumigatus
  misc_feature: 1532
tagctattaatagtgattattatcaacgtgatgatgttagaaaggcgaatatagagagtgtatttcataaatattttcctagattagatggtagaa

SEQ ID NO: 11000 - DNA, 96 bp, Aspergillus novofumigatus
  misc_feature: 1532
tgaataagtaaatttttcatataataaacttaaggatgtagcatctaaataatgtattaaattaggcattaatgcttttatttttaaattaagttt

SEQ ID NO: 11001 - DNA, 96 bp, Aspergillus novofumigatus
  misc_feature: 1532
cctatgcgtataagatttaaatcttattataacttatgataatatatgtaaagtatatattattttgttaaaatatatatactttacatacaacta

SEQ ID NO: 11002 - DNA, 96 bp, Aspergillus novofumigatus
  misc_feature: 1532
atgaataagtaaatttttcatataataaacttaaggatgtagcatctaaataatgtattaaattaggcattaatgcttttatttttaaattaagtt

SEQ ID NO: 11003 - DNA, 96 bp, Aspergillus novofumigatus
  misc_feature: 1530
catctaagtaaggtaaccttaactaatacagaatttttttttgcatacatataaatttataatgaatatttaaacttcattatagtatatatatat

SEQ ID NO: 11004 - DNA, 96 bp, Aspergillus novofumigatus
  misc_feature: 1529
atatatatattcctatgcgtataagatttaaatcttattataacttatgataatatatgtaaagtatatattattttgttaaaatatatatacttt

SEQ ID NO: 11005 - DNA, 96 bp, Aspergillus novofumigatus
  misc_feature: 1528
ttattaatacaaattataattattatataatatgaaatatagaaaattttttttatttatttactacctatggtttagtaaattagatattctaat

SEQ ID NO: 11006 - DNA, 96 bp, Aspergillus novofumigatus
  misc_feature: 1528
aactaataaagaactttatatataaacattaaaagaattatatataaacattatcatatattgcaaatacaactaaccttccatttgatctcttaa

SEQ ID NO: 11007 - DNA, 96 bp, Aspergillus novofumigatus
  misc_feature: 1528
tatatatattcctatgcgtataagatttaaatcttattataacttatgataatatatgtaaagtatatattattttgttaaaatatatatacttta

SEQ ID NO: 11008 - DNA, 96 bp, Aspergillus novofumigatus
  misc_feature: 1528
ctaagtaaggtaaccttaactaatacagaatttttttttgcatacatataaatttataatgaatatttaaacttcattatagtatatatatattcc

SEQ ID NO: 11009 - DNA, 96 bp, Aspergillus novofumigatus
  misc_feature: 1527
ttcctatgcgtataagatttaaatcttattataacttatgataatatatgtaaagtatatattattttgttaaaatatatatactttacatacaac

SEQ ID NO: 11010 - DNA, 96 bp, Aspergillus novofumigatus
  misc_feature: 1527
tattaatttatattatacggctttatcaaatttataataaatattataaatttattttaatagcttttaatttaaactgtgcgttattttattttt

SEQ ID NO: 11011 - DNA, 96 bp, Aspergillus novofumigatus
  misc_feature: 1523
attcctatgcgtataagatttaaatcttattataacttatgataatatatgtaaagtatatattattttgttaaaatatatatactttacatacaa

SEQ ID NO: 11012 - DNA, 96 bp, Aspergillus novofumigatus
  misc_feature: 1519
tctaccattgaattaacacgcctataattataatttgttattaatacaaattataattattatataatatgaaatatagaaaattttttttattta

SEQ ID NO: 11013 - DNA, 96 bp, Aspergillus novofumigatus
  misc_feature: 1519
atttagctattaatagtgattattatcaacgtgatgatgttagaaaggcgaatatagagagtgtatttcataaatattttcctagattagatggta

SEQ ID NO: 11014 - DNA, 96 bp, Aspergillus novofumigatus
  misc_feature: 1518
gttattaatacaaattataattattatataatatgaaatatagaaaattttttttatttatttactacctatggtttagtaaattagatattctaa

SEQ ID NO: 11015 - DNA, 96 bp, Aspergillus novofumigatus
  misc_feature: 1518
tatatattcctatgcgtataagatttaaatcttattataacttatgataatatatgtaaagtatatattattttgttaaaatatatatactttaca

SEQ ID NO: 11016 - DNA, 96 bp, Aspergillus novofumigatus
  misc_feature: 1516
ttattaatttatattatacggctttatcaaatttataataaatattataaatttattttaatagcttttaatttaaactgtgcgttattttatttt

SEQ ID NO: 11017 - DNA, 96 bp, Aspergillus novofumigatus
  misc_feature: 1515
ttagctattaatagtgattattatcaacgtgatgatgttagaaaggcgaatatagagagtgtatttcataaatattttcctagattagatggtaga

SEQ ID NO: 11018 - DNA, 96 bp, Aspergillus novofumigatus
  misc_feature: 1515
gagtggaataatttagacaattaaagcgaagctataaaattattactttgcaataagagtgaatatttaactaatataaatgtaggatatacacta

SEQ ID NO: 11019 - DNA, 96 bp, Aspergillus novofumigatus
  misc_feature: 1515
aaggttcagttactagtgtatatcctacatttatattagttaaatattcactcttattgcaaagtaataattttatagcttcgctttaattgtcta

SEQ ID NO: 11020 - DNA, 96 bp, Aspergillus novofumigatus
  misc_feature: 1514
atatatattcctatgcgtataagatttaaatcttattataacttatgataatatatgtaaagtatatattattttgttaaaatatatatactttac

SEQ ID NO: 11021 - DNA, 96 bp, Aspergillus novofumigatus
  misc_feature: 1513
tattcctatgcgtataagatttaaatcttattataacttatgataatatatgtaaagtatatattattttgttaaaatatatatactttacataca

SEQ ID NO: 11022 - DNA, 96 bp, Aspergillus novofumigatus
  misc_feature: 1513
aaatcttatctattaaaattttaaattgttaatctatcactcaggccaaaacaatccatttcctttagtatcaccatcatcttgaccactatttag

SEQ ID NO: 11023 - DNA, 96 bp, Aspergillus novofumigatus
  misc_feature: 1512
tatattcctatgcgtataagatttaaatcttattataacttatgataatatatgtaaagtatatattattttgttaaaatatatatactttacata

SEQ ID NO: 11024 - DNA, 96 bp, Aspergillus novofumigatus
  misc_feature: 1511
cttatctattaaaattttaaattgttaatctatcactcaggccaaaacaatccatttcctttagtatcaccatcatcttgaccactatttagtaat

SEQ ID NO: 11025 - DNA, 96 bp, Aspergillus novofumigatus
  misc_feature: 1511
attattaatttatattatacggctttatcaaatttataataaatattataaatttattttaatagcttttaatttaaactgtgcgttattttattt

SEQ ID NO: 11026 - DNA, 96 bp, Aspergillus novofumigatus
  misc_feature: 1510
aaggatgtagcatctaaataatgtattaaattaggcattaatgcttttatttttaaattaagttttattttactatagatagattctaattataaa

SEQ ID NO: 11027 - DNA, 96 bp, Aspergillus novofumigatus
  misc_feature: 1510
gaaggttcagttactagtgtatatcctacatttatattagttaaatattcactcttattgcaaagtaataattttatagcttcgctttaattgtct

SEQ ID NO: 11028 - DNA, 96 bp, Aspergillus novofumigatus
  misc_feature: 1508
atattcctatgcgtataagatttaaatcttattataacttatgataatatatgtaaagtatatattattttgttaaaatatatatactttacatac

SEQ ID NO: 11029 - DNA, 96 bp, Aspergillus novofumigatus
  misc_feature: 1507
taaggatgtagcatctaaataatgtattaaattaggcattaatgcttttatttttaaattaagttttattttactatagatagattctaattataa

SEQ ID NO: 11030 - DNA, 96 bp, Aspergillus novofumigatus
  misc_feature: 1507
aattattaatttatattatacggctttatcaaatttataataaatattataaatttattttaatagcttttaatttaaactgtgcgttattttatt

SEQ ID NO: 11031 - DNA, 96 bp, Aspergillus novofumigatus
  misc_feature: 1506
tttagctattaatagtgattattatcaacgtgatgatgttagaaaggcgaatatagagagtgtatttcataaatattttcctagattagatggtag

SEQ ID NO: 11032 - DNA, 96 bp, Aspergillus novofumigatus
  misc_feature: 1506
tgaaggttcagttactagtgtatatcctacatttatattagttaaatattcactcttattgcaaagtaataattttatagcttcgctttaattgtc

SEQ ID NO: 11033 - DNA, 96 bp, Aspergillus novofumigatus
  misc_feature: 1506
atcttatctattaaaattttaaattgttaatctatcactcaggccaaaacaatccatttcctttagtatcaccatcatcttgaccactatttagta

SEQ ID NO: 11034 - DNA, 96 bp, Aspergillus novofumigatus
  misc_feature: 1505
atatattcctatgcgtataagatttaaatcttattataacttatgataatatatgtaaagtatatattattttgttaaaatatatatactttacat

SEQ ID NO: 11035 - DNA, 96 bp, Aspergillus novofumigatus
  misc_feature: 1504
ttaaggatgtagcatctaaataatgtattaaattaggcattaatgcttttatttttaaattaagttttattttactatagatagattctaattata

SEQ ID NO: 11036 - DNA, 96 bp, Aspergillus novofumigatus
  misc_feature: 1503
aaccatctaagtaaggtaaccttaactaatacagaatttttttttgcatacatataaatttataatgaatatttaaacttcattatagtatatata

SEQ ID NO: 11037 - DNA, 96 bp, Aspergillus novofumigatus
  misc_feature: 1503
taattattaatttatattatacggctttatcaaatttataataaatattataaatttattttaatagcttttaatttaaactgtgcgttattttat

SEQ ID NO: 11038 - DNA, 96 bp, Aspergillus novofumigatus
  misc_feature: 1501
taccattgaattaacacgcctataattataatttgttattaatacaaattataattattatataatatgaaatatagaaaattttttttatttatt

SEQ ID NO: 11039 - DNA, 96 bp, Aspergillus novofumigatus
  misc_feature: 1501
cgagtggaataatttagacaattaaagcgaagctataaaattattactttgcaataagagtgaatatttaactaatataaatgtaggatatacact

SEQ ID NO: 11040 - DNA, 96 bp, Aspergillus novofumigatus
  misc_feature: 1501
aatcttatctattaaaattttaaattgttaatctatcactcaggccaaaacaatccatttcctttagtatcaccatcatcttgaccactatttagt

SEQ ID NO: 11041 - DNA, 96 bp, Aspergillus novofumigatus
  misc_feature: 1500
ctaccattgaattaacacgcctataattataatttgttattaatacaaattataattattatataatatgaaatatagaaaattttttttatttat

SEQ ID NO: 11042 - DNA, 96 bp, Aspergillus novofumigatus
  misc_feature: 1499
caaccatctaagtaaggtaaccttaactaatacagaatttttttttgcatacatataaatttataatgaatatttaaacttcattatagtatatat

SEQ ID NO: 11043 - DNA, 96 bp, Aspergillus novofumigatus
  misc_feature: 1498
taatttgttattaatacaaattataattattatataatatgaaatatagaaaattttttttatttatttactacctatggtttagtaaattagata

SEQ ID NO: 11044 - DNA, 96 bp, Aspergillus novofumigatus
  misc_feature: 1497
attaacacgcctataattataatttgttattaatacaaattataattattatataatatgaaatatagaaaattttttttatttatttactaccta

SEQ ID NO: 11045 - DNA, 96 bp, Aspergillus novofumigatus
  misc_feature: 1497
gaataagtaaatttttcatataataaacttaaggatgtagcatctaaataatgtattaaattaggcattaatgcttttatttttaaattaagtttt

SEQ ID NO: 11046 - DNA, 96 bp, Aspergillus novofumigatus
  misc_feature: 1496
acaaccatctaagtaaggtaaccttaactaatacagaatttttttttgcatacatataaatttataatgaatatttaaacttcattatagtatata

SEQ ID NO: 11047 - DNA, 96 bp, Aspergillus novofumigatus
  misc_feature: 1496
ataggcgactaaagcacccgaccttacacatgtaaaaacaacagttaaatttaaatttaaatttaaactaaacataactaatagtattaataatta

SEQ ID NO: 11048 - DNA, 96 bp, Aspergillus novofumigatus
  misc_feature: 1495
taggcgactaaagcacccgaccttacacatgtaaaaacaacagttaaatttaaatttaaatttaaactaaacataactaatagtattaataattaa

SEQ ID NO: 11049 - DNA, 96 bp, Aspergillus novofumigatus
  misc_feature: 1495
cccgagtggaataatttagacaattaaagcgaagctataaaattattactttgcaataagagtgaatatttaactaatataaatgtaggatataca

SEQ ID NO: 11050 - DNA, 96 bp, Aspergillus novofumigatus
  misc_feature: 1495
aataagtaaatttttcatataataaacttaaggatgtagcatctaaataatgtattaaattaggcattaatgcttttatttttaaattaagtttta

SEQ ID NO: 11051 - DNA, 96 bp, Aspergillus novofumigatus
  misc_feature: 1495
aataggcgactaaagcacccgaccttacacatgtaaaaacaacagttaaatttaaatttaaatttaaactaaacataactaatagtattaataatt

SEQ ID NO: 11052 - DNA, 96 bp, Aspergillus novofumigatus
  misc_feature: 1494
ccatctaagtaaggtaaccttaactaatacagaatttttttttgcatacatataaatttataatgaatatttaaacttcattatagtatatatata

SEQ ID NO: 11053 - DNA, 96 bp, Aspergillus novofumigatus
  misc_feature: 1491
aggatgtagcatctaaataatgtattaaattaggcattaatgcttttatttttaaattaagttttattttactatagatagattctaattataaaa

SEQ ID NO: 11054 - DNA, 96 bp, Aspergillus novofumigatus
  misc_feature: 1491
tcttatctattaaaattttaaattgttaatctatcactcaggccaaaacaatccatttcctttagtatcaccatcatcttgaccactatttagtaa

SEQ ID NO: 11055 - DNA, 96 bp, Aspergillus novofumigatus
  misc_feature: 1491
aacttaaggatgtagcatctaaataatgtattaaattaggcattaatgcttttatttttaaattaagttttattttactatagatagattctaatt

SEQ ID NO: 11056 - DNA, 96 bp, Aspergillus novofumigatus
  misc_feature: 1490
acttaaggatgtagcatctaaataatgtattaaattaggcattaatgcttttatttttaaattaagttttattttactatagatagattctaatta

SEQ ID NO: 11057 - DNA, 96 bp, Aspergillus novofumigatus
  misc_feature: 1490
ccgagtggaataatttagacaattaaagcgaagctataaaattattactttgcaataagagtgaatatttaactaatataaatgtaggatatacac

SEQ ID NO: 11058 - DNA, 96 bp, Aspergillus novofumigatus
  misc_feature: 1489
tacaaccatctaagtaaggtaaccttaactaatacagaatttttttttgcatacatataaatttataatgaatatttaaacttcattatagtatat

SEQ ID NO: 11059 - DNA, 96 bp, Aspergillus novofumigatus
  misc_feature: 1487
ttaacacgcctataattataatttgttattaatacaaattataattattatataatatgaaatatagaaaattttttttatttatttactacctat

SEQ ID NO: 11060 - DNA, 96 bp, Aspergillus novofumigatus
  misc_feature: 1486
aattaacacgcctataattataatttgttattaatacaaattataattattatataatatgaaatatagaaaattttttttatttatttactacct

SEQ ID NO: 11061 - DNA, 96 bp, Aspergillus novofumigatus
  misc_feature: 1485
gaataggcgactaaagcacccgaccttacacatgtaaaaacaacagttaaatttaaatttaaatttaaactaaacataactaatagtattaataat

SEQ ID NO: 11062 - DNA, 96 bp, Aspergillus novofumigatus
  misc_feature: 1483
aattataatttgttattaatacaaattataattattatataatatgaaatatagaaaattttttttatttatttactacctatggtttagtaaatt

SEQ ID NO: 11063 - DNA, 96 bp, Aspergillus novofumigatus
  misc_feature: 1482
accatctaagtaaggtaaccttaactaatacagaatttttttttgcatacatataaatttataatgaatatttaaacttcattatagtatatatat

SEQ ID NO: 11064 - DNA, 96 bp, Aspergillus novofumigatus
  misc_feature: 1482
aataaacttaaggatgtagcatctaaataatgtattaaattaggcattaatgcttttatttttaaattaagttttattttactatagatagattct

SEQ ID NO: 11065 - DNA, 96 bp, Aspergillus novofumigatus
  misc_feature: 1481
gtatatcctacatttatattagttaaatattcactcttattgcaaagtaataattttatagcttcgctttaattgtctaaattattccactcgggt

SEQ ID NO: 11066 - DNA, 96 bp, Aspergillus novofumigatus
  misc_feature: 1481
accattgaattaacacgcctataattataatttgttattaatacaaattataattattatataatatgaaatatagaaaattttttttatttattt

SEQ ID NO: 11067 - DNA, 96 bp, Aspergillus novofumigatus
  misc_feature: 1480
ataaacttaaggatgtagcatctaaataatgtattaaattaggcattaatgcttttatttttaaattaagttttattttactatagatagattcta

SEQ ID NO: 11068 - DNA, 96 bp, Aspergillus novofumigatus
  misc_feature: 1479
cttaaggatgtagcatctaaataatgtattaaattaggcattaatgcttttatttttaaattaagttttattttactatagatagattctaattat

SEQ ID NO: 11069 - DNA, 96 bp, Aspergillus novofumigatus
  misc_feature: 1476
tgaataggcgactaaagcacccgaccttacacatgtaaaaacaacagttaaatttaaatttaaatttaaactaaacataactaatagtattaataa

SEQ ID NO: 11070 - DNA, 96 bp, Aspergillus novofumigatus
  misc_feature: 1476
ataatttgttattaatacaaattataattattatataatatgaaatatagaaaattttttttatttatttactacctatggtttagtaaattagat

SEQ ID NO: 11071 - DNA, 96 bp, Aspergillus novofumigatus
  misc_feature: 1475
gtacaaccatctaagtaaggtaaccttaactaatacagaatttttttttgcatacatataaatttataatgaatatttaaacttcattatagtata

SEQ ID NO: 11072 - DNA, 96 bp, Aspergillus novofumigatus
  misc_feature: 1474
taataaacttaaggatgtagcatctaaataatgtattaaattaggcattaatgcttttatttttaaattaagttttattttactatagatagattc

SEQ ID NO: 11073 - DNA, 96 bp, Aspergillus novofumigatus
  misc_feature: 1474
ccattgaattaacacgcctataattataatttgttattaatacaaattataattattatataatatgaaatatagaaaattttttttatttattta

SEQ ID NO: 11074 - DNA, 96 bp, Aspergillus novofumigatus
  misc_feature: 1474
aggcgactaaagcacccgaccttacacatgtaaaaacaacagttaaatttaaatttaaatttaaactaaacataactaatagtattaataattaag

SEQ ID NO: 11075 - DNA, 96 bp, Aspergillus novofumigatus
  misc_feature: 1472
taaacttaaggatgtagcatctaaataatgtattaaattaggcattaatgcttttatttttaaattaagttttattttactatagatagattctaa

SEQ ID NO: 11076 - DNA, 96 bp, Aspergillus novofumigatus
  misc_feature: 1472
aaacttaaggatgtagcatctaaataatgtattaaattaggcattaatgcttttatttttaaattaagttttattttactatagatagattctaat

SEQ ID NO: 11077 - DNA, 96 bp, Aspergillus novofumigatus
  misc_feature: 1471
taattataatttgttattaatacaaattataattattatataatatgaaatatagaaaattttttttatttatttactacctatggtttagtaaat

SEQ ID NO: 11078 - DNA, 96 bp, Aspergillus novofumigatus
  misc_feature: 1469
ttataatttgttattaatacaaattataattattatataatatgaaatatagaaaattttttttatttatttactacctatggtttagtaaattag

SEQ ID NO: 11079 - DNA, 96 bp, Aspergillus novofumigatus
  misc_feature: 1469
attataatttgttattaatacaaattataattattatataatatgaaatatagaaaattttttttatttatttactacctatggtttagtaaatta

SEQ ID NO: 11080 - DNA, 96 bp, Aspergillus novofumigatus
  misc_feature: 1467
taacacgcctataattataatttgttattaatacaaattataattattatataatatgaaatatagaaaattttttttatttatttactacctatg

SEQ ID NO: 11081 - DNA, 96 bp, Aspergillus novofumigatus
  misc_feature: 1467
aacttataagaaatatatcaaaattattgataatgtagttaataaaaggtaaatagatattttctatgaacttattataaaaaaaaatttttttta

SEQ ID NO: 11082 - DNA, 96 bp, Aspergillus novofumigatus
  misc_feature: 1466
tataatttgttattaatacaaattataattattatataatatgaaatatagaaaattttttttatttatttactacctatggtttagtaaattaga

SEQ ID NO: 11083 - DNA, 96 bp, Aspergillus novofumigatus
  misc_feature: 1466
cattgaattaacacgcctataattataatttgttattaatacaaattataattattatataatatgaaatatagaaaattttttttatttatttac

SEQ ID NO: 11084 - DNA, 96 bp, Aspergillus novofumigatus
  misc_feature: 1464
ggcgactaaagcacccgaccttacacatgtaaaaacaacagttaaatttaaatttaaatttaaactaaacataactaatagtattaataattaagt

SEQ ID NO: 11085 - DNA, 96 bp, Aspergillus novofumigatus
  misc_feature: 1464
attgaattaacacgcctataattataatttgttattaatacaaattataattattatataatatgaaatatagaaaattttttttatttatttact

SEQ ID NO: 11086 - DNA, 96 bp, Aspergillus novofumigatus
  misc_feature: 1463
atgaataggcgactaaagcacccgaccttacacatgtaaaaacaacagttaaatttaaatttaaatttaaactaaacataactaatagtattaata

SEQ ID NO: 11087 - DNA, 96 bp, Aspergillus novofumigatus
  misc_feature: 1461
ataataaacttaaggatgtagcatctaaataatgtattaaattaggcattaatgcttttatttttaaattaagttttattttactatagatagatt

SEQ ID NO: 11088 - DNA, 96 bp, Aspergillus novofumigatus
  misc_feature: 1460
gaattaacacgcctataattataatttgttattaatacaaattataattattatataatatgaaatatagaaaattttttttatttatttactacc

SEQ ID NO: 11089 - DNA, 96 bp, Aspergillus novofumigatus
  misc_feature: 1460
atttttcatataataaacttaaggatgtagcatctaaataatgtattaaattaggcattaatgcttttatttttaaattaagttttattttactat

SEQ ID NO: 11090 - DNA, 96 bp, Aspergillus novofumigatus
  misc_feature: 1457
atacagctgttctaccattgaactacacccacctgacttatgtataaaaaaaatttttttttataataagttcatagaaaatatctatttaccttt

SEQ ID NO: 11091 - DNA, 96 bp, Aspergillus novofumigatus
  misc_feature: 1457
ataagtaaatttttcatataataaacttaaggatgtagcatctaaataatgtattaaattaggcattaatgcttttatttttaaattaagttttat

SEQ ID NO: 11092 - DNA, 96 bp, Aspergillus novofumigatus
  misc_feature: 1456
ataattataatttgttattaatacaaattataattattatataatatgaaatatagaaaattttttttatttatttactacctatggtttagtaaa

SEQ ID NO: 11093 - DNA, 96 bp, Aspergillus novofumigatus
  misc_feature: 1456
tatgaataggcgactaaagcacccgaccttacacatgtaaaaacaacagttaaatttaaatttaaatttaaactaaacataactaatagtattaat

SEQ ID NO: 11094 - DNA, 96 bp, Aspergillus novofumigatus
  misc_feature: 1454
cgactaaagcacccgaccttacacatgtaaaaacaacagttaaatttaaatttaaatttaaactaaacataactaatagtattaataattaagttt

SEQ ID NO: 11095 - DNA, 96 bp, Aspergillus novofumigatus
  misc_feature: 1454
aaggtaaatagatattttctatgaacttattataaaaaaaaattttttttatacataagtcaggtgggtgtagttcaatggtagaacagctgtatg

SEQ ID NO: 11096 - DNA, 96 bp, Aspergillus novofumigatus
  misc_feature: 1452
ttgaattaacacgcctataattataatttgttattaatacaaattataattattatataatatgaaatatagaaaattttttttatttatttacta

SEQ ID NO: 11097 - DNA, 96 bp, Aspergillus novofumigatus
  misc_feature: 1452
tgaattaacacgcctataattataatttgttattaatacaaattataattattatataatatgaaatatagaaaattttttttatttatttactac

SEQ ID NO: 11098 - DNA, 96 bp, Aspergillus novofumigatus
  misc_feature: 1452
gcgactaaagcacccgaccttacacatgtaaaaacaacagttaaatttaaatttaaatttaaactaaacataactaatagtattaataattaagtt

SEQ ID NO: 11099 - DNA, 96 bp, Aspergillus novofumigatus
  misc_feature: 1451
gactaaagcacccgaccttacacatgtaaaaacaacagttaaatttaaatttaaatttaaactaaacataactaatagtattaataattaagtttt

SEQ ID NO: 11100 - DNA, 96 bp, Aspergillus novofumigatus
  misc_feature: 1450
tataataaacttaaggatgtagcatctaaataatgtattaaattaggcattaatgcttttatttttaaattaagttttattttactatagatagat

SEQ ID NO: 11101 - DNA, 96 bp, Aspergillus novofumigatus
  misc_feature: 1449
taagtaaatttttcatataataaacttaaggatgtagcatctaaataatgtattaaattaggcattaatgcttttatttttaaattaagttttatt

SEQ ID NO: 11102 - DNA, 96 bp, Aspergillus novofumigatus
  misc_feature: 1449
acttataagaaatatatcaaaattattgataatgtagttaataaaaggtaaatagatattttctatgaacttattataaaaaaaaattttttttat

SEQ ID NO: 11103 - DNA, 96 bp, Aspergillus novofumigatus
  misc_feature: 1449
aaatttttcatataataaacttaaggatgtagcatctaaataatgtattaaattaggcattaatgcttttatttttaaattaagttttattttact

SEQ ID NO: 11104 - DNA, 96 bp, Aspergillus novofumigatus
  misc_feature: 1448
aatttttcatataataaacttaaggatgtagcatctaaataatgtattaaattaggcattaatgcttttatttttaaattaagttttattttacta

SEQ ID NO: 11105 - DNA, 96 bp, Aspergillus novofumigatus
  misc_feature: 1447
aagtaaatttttcatataataaacttaaggatgtagcatctaaataatgtattaaattaggcattaatgcttttatttttaaattaagttttattt

SEQ ID NO: 11106 - DNA, 96 bp, Aspergillus novofumigatus
  misc_feature: 1443
tataattataatttgttattaatacaaattataattattatataatatgaaatatagaaaattttttttatttatttactacctatggtttagtaa

SEQ ID NO: 11107 - DNA, 96 bp, Aspergillus novofumigatus
  misc_feature: 1440
atatgaataggcgactaaagcacccgaccttacacatgtaaaaacaacagttaaatttaaatttaaatttaaactaaacataactaatagtattaa

SEQ ID NO: 11108 - DNA, 96 bp, Aspergillus novofumigatus
  misc_feature: 1439
taaatttttcatataataaacttaaggatgtagcatctaaataatgtattaaattaggcattaatgcttttatttttaaattaagttttattttac

SEQ ID NO: 11109 - DNA, 96 bp, Aspergillus novofumigatus
  misc_feature: 1438
atataataaacttaaggatgtagcatctaaataatgtattaaattaggcattaatgcttttatttttaaattaagttttattttactatagataga

SEQ ID NO: 11110 - DNA, 96 bp, Aspergillus novofumigatus
  misc_feature: 1438
acacgcctataattataatttgttattaatacaaattataattattatataatatgaaatatagaaaattttttttatttatttactacctatggt

SEQ ID NO: 11111 - DNA, 96 bp, Aspergillus novofumigatus
  misc_feature: 1436
acagctgttctaccattgaactacacccacctgacttatgtataaaaaaaatttttttttataataagttcatagaaaatatctatttacctttta

SEQ ID NO: 11112 - DNA, 96 bp, Aspergillus novofumigatus
  misc_feature: 1435
ttttcatataataaacttaaggatgtagcatctaaataatgtattaaattaggcattaatgcttttatttttaaattaagttttattttactatag

SEQ ID NO: 11113 - DNA, 96 bp, Aspergillus novofumigatus
  misc_feature: 1435
catatgaataggcgactaaagcacccgaccttacacatgtaaaaacaacagttaaatttaaatttaaatttaaactaaacataactaatagtatta

SEQ ID NO: 11114 - DNA, 96 bp, Aspergillus novofumigatus
  misc_feature: 1435
agtaaatttttcatataataaacttaaggatgtagcatctaaataatgtattaaattaggcattaatgcttttatttttaaattaagttttatttt

SEQ ID NO: 11115 - DNA, 96 bp, Aspergillus novofumigatus
  misc_feature: 1434
tttttcatataataaacttaaggatgtagcatctaaataatgtattaaattaggcattaatgcttttatttttaaattaagttttattttactata

SEQ ID NO: 11116 - DNA, 96 bp, Aspergillus novofumigatus
  misc_feature: 1434
ttataagaaatatatcaaaattattgataatgtagttaataaaaggtaaatagatattttctatgaacttattataaaaaaaaattttttttatac

SEQ ID NO: 11117 - DNA, 96 bp, Aspergillus novofumigatus
  misc_feature: 1432
aacacgcctataattataatttgttattaatacaaattataattattatataatatgaaatatagaaaattttttttatttatttactacctatgg

SEQ ID NO: 11118 - DNA, 96 bp, Aspergillus novofumigatus
  misc_feature: 1431
tttcatataataaacttaaggatgtagcatctaaataatgtattaaattaggcattaatgcttttatttttaaattaagttttattttactataga

SEQ ID NO: 11119 - DNA, 96 bp, Aspergillus novofumigatus
  misc_feature: 1431
tataagaaatatatcaaaattattgataatgtagttaataaaaggtaaatagatattttctatgaacttattataaaaaaaaattttttttataca

SEQ ID NO: 11120 - DNA, 96 bp, Aspergillus novofumigatus
  misc_feature: 1430
ttcatataataaacttaaggatgtagcatctaaataatgtattaaattaggcattaatgcttttatttttaaattaagttttattttactatagat

SEQ ID NO: 11121 - DNA, 96 bp, Aspergillus novofumigatus
  misc_feature: 1428
attcatatgtaaaaaaaaaatgctgttcaatatgattaataataagttctaatattattaggtatggtaggtgcaatagttatagctataaaacaa

SEQ ID NO: 11122 - DNA, 96 bp, Aspergillus novofumigatus
  misc_feature: 1428
ctataattataatttgttattaatacaaattataattattatataatatgaaatatagaaaattttttttatttatttactacctatggtttagta

SEQ ID NO: 11123 - DNA, 96 bp, Aspergillus novofumigatus
  misc_feature: 1428
tacatatgaataggcgactaaagcacccgaccttacacatgtaaaaacaacagttaaatttaaatttaaatttaaactaaacataactaatagtat

SEQ ID NO: 11124 - DNA, 96 bp, Aspergillus novofumigatus
  misc_feature: 1426
cagctgttctaccattgaactacacccacctgacttatgtataaaaaaaatttttttttataataagttcatagaaaatatctatttaccttttat

SEQ ID NO: 11125 - DNA, 96 bp, Aspergillus novofumigatus
  misc_feature: 1425
tcatataataaacttaaggatgtagcatctaaataatgtattaaattaggcattaatgcttttatttttaaattaagttttattttactatagata

SEQ ID NO: 11126 - DNA, 96 bp, Aspergillus novofumigatus
  misc_feature: 1425
cttataagaaatatatcaaaattattgataatgtagttaataaaaggtaaatagatattttctatgaacttattataaaaaaaaattttttttata

SEQ ID NO: 11127 - DNA, 96 bp, Aspergillus novofumigatus
  misc_feature: 1425
cacgcctataattataatttgttattaatacaaattataattattatataatatgaaatatagaaaattttttttatttatttactacctatggtt

SEQ ID NO: 11128 - DNA, 96 bp, Aspergillus novofumigatus
  misc_feature: 1422
gttaataaaaggtaaatagatattttctatgaacttattataaaaaaaaattttttttatacataagtcaggtgggtgtagttcaatggtagaaca

SEQ ID NO: 11129 - DNA, 96 bp, Aspergillus novofumigatus
  misc_feature: 1421
tattcatatgtaaaaaaaaaatgctgttcaatatgattaataataagttctaatattattaggtatggtaggtgcaatagttatagctataaaaca

SEQ ID NO: 11130 - DNA, 96 bp, Aspergillus novofumigatus
  misc_feature: 1420
acatatgaataggcgactaaagcacccgaccttacacatgtaaaaacaacagttaaatttaaatttaaatttaaactaaacataactaatagtatt

SEQ ID NO: 11131 - DNA, 96 bp, Aspergillus novofumigatus
  misc_feature: 1418
acgcctataattataatttgttattaatacaaattataattattatataatatgaaatatagaaaattttttttatttatttactacctatggttt

SEQ ID NO: 11132 - DNA, 96 bp, Aspergillus novofumigatus
  misc_feature: 1416
agttaataaaaggtaaatagatattttctatgaacttattataaaaaaaaattttttttatacataagtcaggtgggtgtagttcaatggtagaac

SEQ ID NO: 11133 - DNA, 96 bp, Aspergillus novofumigatus
  misc_feature: 1415
tattgataatgtagttaataaaaggtaaatagatattttctatgaacttattataaaaaaaaattttttttatacataagtcaggtgggtgtagtt

SEQ ID NO: 11134 - DNA, 96 bp, Aspergillus novofumigatus
  misc_feature: 1415
gtaaatttttcatataataaacttaaggatgtagcatctaaataatgtattaaattaggcattaatgcttttatttttaaattaagttttatttta

SEQ ID NO: 11135 - DNA, 96 bp, Aspergillus novofumigatus
  misc_feature: 1414
attgataatgtagttaataaaaggtaaatagatattttctatgaacttattataaaaaaaaattttttttatacataagtcaggtgggtgtagttc

SEQ ID NO: 11136 - DNA, 96 bp, Aspergillus novofumigatus
  misc_feature: 1413
aggttaccttacttagatggttgtacacaaaaatttaatgtaaaatgctacaatataaattgctacaagctaaattgctacaagccgctaaaatac

SEQ ID NO: 11137 - DNA, 96 bp, Aspergillus novofumigatus
  misc_feature: 1413
catataataaacttaaggatgtagcatctaaataatgtattaaattaggcattaatgcttttatttttaaattaagttttattttactatagatag

SEQ ID NO: 11138 - DNA, 96 bp, Aspergillus novofumigatus
  misc_feature: 1412
tagttaataaaaggtaaatagatattttctatgaacttattataaaaaaaaattttttttatacataagtcaggtgggtgtagttcaatggtagaa

SEQ ID NO: 11139 - DNA, 96 bp, Aspergillus novofumigatus
  misc_feature: 1411
aagaaatatatcaaaattattgataatgtagttaataaaaggtaaatagatattttctatgaacttattataaaaaaaaattttttttatacataa

SEQ ID NO: 11140 - DNA, 96 bp, Aspergillus novofumigatus
  misc_feature: 1409
gtagttaataaaaggtaaatagatattttctatgaacttattataaaaaaaaattttttttatacataagtcaggtgggtgtagttcaatggtaga

SEQ ID NO: 11141 - DNA, 96 bp, Aspergillus novofumigatus
  misc_feature: 1409
agaaatatatcaaaattattgataatgtagttaataaaaggtaaatagatattttctatgaacttattataaaaaaaaattttttttatacataag

SEQ ID NO: 11142 - DNA, 96 bp, Aspergillus novofumigatus
  misc_feature: 1408
tgataatgtagttaataaaaggtaaatagatattttctatgaacttattataaaaaaaaattttttttatacataagtcaggtgggtgtagttcaa

SEQ ID NO: 11143 - DNA, 96 bp, Aspergillus novofumigatus
  misc_feature: 1408
cgcctataattataatttgttattaatacaaattataattattatataatatgaaatatagaaaattttttttatttatttactacctatggttta

SEQ ID NO: 11144 - DNA, 96 bp, Aspergillus novofumigatus
  misc_feature: 1408
aatataatcaatcaaatgattagttgtatgtaaggtatatattatattattaaacatgatattttacaatataataatttaataaattaattaatt

SEQ ID NO: 11145 - DNA, 96 bp, Aspergillus novofumigatus
  misc_feature: 1407
cctataattataatttgttattaatacaaattataattattatataatatgaaatatagaaaattttttttatttatttactacctatggtttagt

SEQ ID NO: 11146 - DNA, 96 bp, Aspergillus novofumigatus
  misc_feature: 1406
gaaatatatcaaaattattgataatgtagttaataaaaggtaaatagatattttctatgaacttattataaaaaaaaattttttttatacataagt

SEQ ID NO: 11147 - DNA, 96 bp, Aspergillus novofumigatus
  misc_feature: 1404
ttaataaaaggtaaatagatattttctatgaacttattataaaaaaaaattttttttatacataagtcaggtgggtgtagttcaatggtagaacag

SEQ ID NO: 11148 - DNA, 96 bp, Aspergillus novofumigatus
  misc_feature: 1404
tgtagttaataaaaggtaaatagatattttctatgaacttattataaaaaaaaattttttttatacataagtcaggtgggtgtagttcaatggtag

SEQ ID NO: 11149 - DNA, 96 bp, Aspergillus novofumigatus
  misc_feature: 1404
taagaaatatatcaaaattattgataatgtagttaataaaaggtaaatagatattttctatgaacttattataaaaaaaaattttttttatacata

SEQ ID NO: 11150 - DNA, 96 bp, Aspergillus novofumigatus
  misc_feature: 1404
atcaaatgattagttgtatgtaaggtatatattatattattaaacatgatattttacaatataataatttaataaattaattaattaattaattta

SEQ ID NO: 11151 - DNA, 96 bp, Aspergillus novofumigatus
  misc_feature: 1404
aatcaaatgattagttgtatgtaaggtatatattatattattaaacatgatattttacaatataataatttaataaattaattaattaattaattt

SEQ ID NO: 11152 - DNA, 96 bp, Aspergillus novofumigatus
  misc_feature: 1403
ttgataatgtagttaataaaaggtaaatagatattttctatgaacttattataaaaaaaaattttttttatacataagtcaggtgggtgtagttca

SEQ ID NO: 11153 - DNA, 96 bp, Aspergillus novofumigatus
  misc_feature: 1403
gcctataattataatttgttattaatacaaattataattattatataatatgaaatatagaaaattttttttatttatttactacctatggtttag

SEQ ID NO: 11154 - DNA, 96 bp, Aspergillus novofumigatus
  misc_feature: 1403
ataagaaatatatcaaaattattgataatgtagttaataaaaggtaaatagatattttctatgaacttattataaaaaaaaattttttttatacat

SEQ ID NO: 11155 - DNA, 96 bp, Aspergillus novofumigatus
  misc_feature: 1402
atgtagttaataaaaggtaaatagatattttctatgaacttattataaaaaaaaattttttttatacataagtcaggtgggtgtagttcaatggta

SEQ ID NO: 11156 - DNA, 96 bp, Aspergillus novofumigatus
  misc_feature: 1400
aatatatcaaaattattgataatgtagttaataaaaggtaaatagatattttctatgaacttattataaaaaaaaattttttttatacataagtca

SEQ ID NO: 11157 - DNA, 96 bp, Aspergillus novofumigatus
  misc_feature: 1399
gataatgtagttaataaaaggtaaatagatattttctatgaacttattataaaaaaaaattttttttatacataagtcaggtgggtgtagttcaat

SEQ ID NO: 11158 - DNA, 96 bp, Aspergillus novofumigatus
  misc_feature: 1398
aaacttcattatagtatatatattcctatgcgtataagatctaaaccttattatattttaatgtgttttacaataaatagctataaattaattaat

SEQ ID NO: 11159 - DNA, 96 bp, Aspergillus novofumigatus
  misc_feature: 1396
ataatgtagttaataaaaggtaaatagatattttctatgaacttattataaaaaaaaattttttttatacataagtcaggtgggtgtagttcaatg

SEQ ID NO: 11160 - DNA, 96 bp, Aspergillus novofumigatus
  misc_feature: 1394
ttattgataatgtagttaataaaaggtaaatagatattttctatgaacttattataaaaaaaaattttttttatacataagtcaggtgggtgtagt

SEQ ID NO: 11161 - DNA, 96 bp, Aspergillus novofumigatus
  misc_feature: 1394
taaacttcattatagtatatatattcctatgcgtataagatctaaaccttattatattttaatgtgttttacaataaatagctataaattaattaa

SEQ ID NO: 11162 - DNA, 96 bp, Aspergillus novofumigatus
  misc_feature: 1393
aatgtagttaataaaaggtaaatagatattttctatgaacttattataaaaaaaaattttttttatacataagtcaggtgggtgtagttcaatggt

SEQ ID NO: 11163 - DNA, 96 bp, Aspergillus novofumigatus
  misc_feature: 1392
taatcaatcaaatgattagttgtatgtaaggtatatattatattattaaacatgatattttacaatataataatttaataaattaattaattaatt

SEQ ID NO: 11164 - DNA, 96 bp, Aspergillus novofumigatus
  misc_feature: 1391
aaatatatcaaaattattgataatgtagttaataaaaggtaaatagatattttctatgaacttattataaaaaaaaattttttttatacataagtc

SEQ ID NO: 11165 - DNA, 96 bp, Aspergillus novofumigatus
  misc_feature: 1390
ctattcatatgtaaaaaaaaaatgctgttcaatatgattaataataagttctaatattattaggtatggtaggtgcaatagttatagctataaaac

SEQ ID NO: 11166 - DNA, 96 bp, Aspergillus novofumigatus
  misc_feature: 1389
ggttaccttacttagatggttgtacacaaaaatttaatgtaaaatgctacaatataaattgctacaagctaaattgctacaagccgctaaaatact

SEQ ID NO: 11167 - DNA, 96 bp, Aspergillus novofumigatus
  misc_feature: 1388
tttaaacttcattatagtatatatattcctatgcgtataagatctaaaccttattatattttaatgtgttttacaataaatagctataaattaatt

SEQ ID NO: 11168 - DNA, 96 bp, Aspergillus novofumigatus
  misc_feature: 1387
tcaaatgattagttgtatgtaaggtatatattatattattaaacatgatattttacaatataataatttaataaattaattaattaattaatttat

SEQ ID NO: 11169 - DNA, 96 bp, Aspergillus novofumigatus
  misc_feature: 1385
atcaatcaaatgattagttgtatgtaaggtatatattatattattaaacatgatattttacaatataataatttaataaattaattaattaattaa

SEQ ID NO: 11170 - DNA, 96 bp, Aspergillus novofumigatus
  misc_feature: 1385
tctttcatattcttttaatatgaaatatagtataaaattttttttatctatatagtataaatttttaattatctatattctaaataacccctattt

SEQ ID NO: 11171 - DNA, 96 bp, Aspergillus novofumigatus
  misc_feature: 1385
atataatcaatcaaatgattagttgtatgtaaggtatatattatattattaaacatgatattttacaatataataatttaataaattaattaatta

SEQ ID NO: 11172 - DNA, 96 bp, Aspergillus novofumigatus
  misc_feature: 1385
aaatgattagttgtatgtaaggtatatattatattattaaacatgatattttacaatataataatttaataaattaattaattaattaatttatag

SEQ ID NO: 11173 - DNA, 96 bp, Aspergillus novofumigatus
  misc_feature: 1384
ttaaacttcattatagtatatatattcctatgcgtataagatctaaaccttattatattttaatgtgttttacaataaatagctataaattaatta

SEQ ID NO: 11174 - DNA, 96 bp, Aspergillus novofumigatus
  misc_feature: 1384
tcaatcaaatgattagttgtatgtaaggtatatattatattattaaacatgatattttacaatataataatttaataaattaattaattaattaat

SEQ ID NO: 11175 - DNA, 96 bp, Aspergillus novofumigatus
  misc_feature: 1384
caaatgattagttgtatgtaaggtatatattatattattaaacatgatattttacaatataataatttaataaattaattaattaattaatttata

SEQ ID NO: 11176 - DNA, 96 bp, Aspergillus novofumigatus
  misc_feature: 1383
aattattgataatgtagttaataaaaggtaaatagatattttctatgaacttattataaaaaaaaattttttttatacataagtcaggtgggtgta

SEQ ID NO: 11177 - DNA, 96 bp, Aspergillus novofumigatus
  misc_feature: 1383
attattgataatgtagttaataaaaggtaaatagatattttctatgaacttattataaaaaaaaattttttttatacataagtcaggtgggtgtag

SEQ ID NO: 11178 - DNA, 96 bp, Aspergillus novofumigatus
  misc_feature: 1383
caatcaaatgattagttgtatgtaaggtatatattatattattaaacatgatattttacaatataataatttaataaattaattaattaattaatt

SEQ ID NO: 11179 - DNA, 96 bp, Aspergillus novofumigatus
  misc_feature: 1382
aaattattgataatgtagttaataaaaggtaaatagatattttctatgaacttattataaaaaaaaattttttttatacataagtcaggtgggtgt

SEQ ID NO: 11180 - DNA, 96 bp, Aspergillus novofumigatus
  misc_feature: 1380
aatcaatcaaatgattagttgtatgtaaggtatatattatattattaaacatgatattttacaatataataatttaataaattaattaattaatta

SEQ ID NO: 11181 - DNA, 96 bp, Aspergillus novofumigatus
  misc_feature: 1379
ttttatagctataactattgcacctaccatacctaataatattagaacttattattaatcatattgaacagcattttttttttacatatgaatagg

SEQ ID NO: 11182 - DNA, 96 bp, Aspergillus novofumigatus
  misc_feature: 1379
atttaaacttcattatagtatatatattcctatgcgtataagatctaaaccttattatattttaatgtgttttacaataaatagctataaattaat

SEQ ID NO: 11183 - DNA, 96 bp, Aspergillus novofumigatus
  misc_feature: 1379
ataatcaatcaaatgattagttgtatgtaaggtatatattatattattaaacatgatattttacaatataataatttaataaattaattaattaat

SEQ ID NO: 11184 - DNA, 96 bp, Aspergillus novofumigatus
  misc_feature: 1378
atatatcaaaattattgataatgtagttaataaaaggtaaatagatattttctatgaacttattataaaaaaaaattttttttatacataagtcag

SEQ ID NO: 11185 - DNA, 96 bp, Aspergillus novofumigatus
  misc_feature: 1377
tatttaaacttcattatagtatatatattcctatgcgtataagatctaaaccttattatattttaatgtgttttacaataaatagctataaattaa

SEQ ID NO: 11186 - DNA, 96 bp, Aspergillus novofumigatus
  misc_feature: 1377
tataatcaatcaaatgattagttgtatgtaaggtatatattatattattaaacatgatattttacaatataataatttaataaattaattaattaa

SEQ ID NO: 11187 - DNA, 96 bp, Aspergillus novofumigatus
  misc_feature: 1375
aaaattattgataatgtagttaataaaaggtaaatagatattttctatgaacttattataaaaaaaaattttttttatacataagtcaggtgggtg

SEQ ID NO: 11188 - DNA, 96 bp, Aspergillus novofumigatus
  misc_feature: 1372
tttatagctataactattgcacctaccatacctaataatattagaacttattattaatcatattgaacagcattttttttttacatatgaataggc

SEQ ID NO: 11189 - DNA, 96 bp, Aspergillus novofumigatus
  misc_feature: 1370
tatatcaaaattattgataatgtagttaataaaaggtaaatagatattttctatgaacttattataaaaaaaaattttttttatacataagtcagg

SEQ ID NO: 11190 - DNA, 96 bp, Aspergillus novofumigatus
  misc_feature: 1370
ggtttagatcttatacgcataggaatatatatactataatgaagtttaaatattcattataaatttatatgtatgcaaaaaaaaaattctttatta

SEQ ID NO: 11191 - DNA, 96 bp, Aspergillus novofumigatus
  misc_feature: 1369
taatgtagttaataaaaggtaaatagatattttctatgaacttattataaaaaaaaattttttttatacataagtcaggtgggtgtagttcaatgg

SEQ ID NO: 11192 - DNA, 96 bp, Aspergillus novofumigatus
  misc_feature: 1368
aggtttagatcttatacgcataggaatatatatactataatgaagtttaaatattcattataaatttatatgtatgcaaaaaaaaaattctttatt

SEQ ID NO: 11193 - DNA, 96 bp, Aspergillus novofumigatus
  misc_feature: 1366
atatttaaacttcattatagtatatatattcctatgcgtataagatctaaaccttattatattttaatgtgttttacaataaatagctataaatta

SEQ ID NO: 11194 - DNA, 96 bp, Aspergillus novofumigatus
  misc_feature: 1363
tgcacctaccatacctaataatattagaacttattattaatcatattgaacagcattttttttttacatatgaataggcgactaaagcacccgacc

SEQ ID NO: 11195 - DNA, 96 bp, Aspergillus novofumigatus
  misc_feature: 1363
tattgcacctaccatacctaataatattagaacttattattaatcatattgaacagcattttttttttacatatgaataggcgactaaagcacccg

SEQ ID NO: 11196 - DNA, 96 bp, Aspergillus novofumigatus
  misc_feature: 1362
gttaccttacttagatggttgtacacaaaaatttaatgtaaaatgctacaatataaattgctacaagctaaattgctacaagccgctaaaatacta

SEQ ID NO: 11197 - DNA, 96 bp, Aspergillus novofumigatus
  misc_feature: 1362
taccatacctaataatattagaacttattattaatcatattgaacagcattttttttttacatatgaataggcgactaaagcacccgaccttacac

SEQ ID NO: 11198 - DNA, 96 bp, Aspergillus novofumigatus
  misc_feature: 1361
tatagctataactattgcacctaccatacctaataatattagaacttattattaatcatattgaacagcattttttttttacatatgaataggcga

SEQ ID NO: 11199 - DNA, 96 bp, Aspergillus novofumigatus
  misc_feature: 1361
gaatatttaaacttcattatagtatatatattcctatgcgtataagatctaaaccttattatattttaatgtgttttacaataaatagctataaat

SEQ ID NO: 11200 - DNA, 96 bp, Aspergillus novofumigatus
  misc_feature: 1361
aatatttaaacttcattatagtatatatattcctatgcgtataagatctaaaccttattatattttaatgtgttttacaataaatagctataaatt

SEQ ID NO: 11201 - DNA, 96 bp, Aspergillus novofumigatus
  misc_feature: 1360
aaggtttagatcttatacgcataggaatatatatactataatgaagtttaaatattcattataaatttatatgtatgcaaaaaaaaaattctttat

SEQ ID NO: 11202 - DNA, 96 bp, Aspergillus novofumigatus
  misc_feature: 1359
cacctaccatacctaataatattagaacttattattaatcatattgaacagcattttttttttacatatgaataggcgactaaagcacccgacctt

SEQ ID NO: 11203 - DNA, 96 bp, Aspergillus novofumigatus
  misc_feature: 1358
ctattgcacctaccatacctaataatattagaacttattattaatcatattgaacagcattttttttttacatatgaataggcgactaaagcaccc

SEQ ID NO: 11204 - DNA, 96 bp, Aspergillus novofumigatus
  misc_feature: 1357
atataataaggtttagatcttatacgcataggaatatatatactataatgaagtttaaatattcattataaatttatatgtatgcaaaaaaaaaat

SEQ ID NO: 11205 - DNA, 96 bp, Aspergillus novofumigatus
  misc_feature: 1356
tataataaggtttagatcttatacgcataggaatatatatactataatgaagtttaaatattcattataaatttatatgtatgcaaaaaaaaaatt

SEQ ID NO: 11206 - DNA, 96 bp, Aspergillus novofumigatus
  misc_feature: 1355
atatcaaaattattgataatgtagttaataaaaggtaaatagatattttctatgaacttattataaaaaaaaattttttttatacataagtcaggt

SEQ ID NO: 11207 - DNA, 96 bp, Aspergillus novofumigatus
  misc_feature: 1354
gtagtattttagcggcttgtagcaatttagcttgtagcaatttatattgtagcattttacattaaatttttgtgtacaaccatctaagtaaggtaa

SEQ ID NO: 11208 - DNA, 96 bp, Aspergillus novofumigatus
  misc_feature: 1353
ttatagctataactattgcacctaccatacctaataatattagaacttattattaatcatattgaacagcattttttttttacatatgaataggcg

SEQ ID NO: 11209 - DNA, 96 bp, Aspergillus novofumigatus
  misc_feature: 1353
attgcacctaccatacctaataatattagaacttattattaatcatattgaacagcattttttttttacatatgaataggcgactaaagcacccga

SEQ ID NO: 11210 - DNA, 96 bp, Aspergillus novofumigatus
  misc_feature: 1353
tatcaaaattattgataatgtagttaataaaaggtaaatagatattttctatgaacttattataaaaaaaaattttttttatacataagtcaggtg

SEQ ID NO: 11211 - DNA, 96 bp, Aspergillus novofumigatus
  misc_feature: 1353
gcacctaccatacctaataatattagaacttattattaatcatattgaacagcattttttttttacatatgaataggcgactaaagcacccgacct

SEQ ID NO: 11212 - DNA, 96 bp, Aspergillus novofumigatus
  misc_feature: 1352
tgaatatttaaacttcattatagtatatatattcctatgcgtataagatctaaaccttattatattttaatgtgttttacaataaatagctataaa

SEQ ID NO: 11213 - DNA, 96 bp, Aspergillus novofumigatus
  misc_feature: 1352
actattgcacctaccatacctaataatattagaacttattattaatcatattgaacagcattttttttttacatatgaataggcgactaaagcacc

SEQ ID NO: 11214 - DNA, 96 bp, Aspergillus novofumigatus
  misc_feature: 1351
cctaccatacctaataatattagaacttattattaatcatattgaacagcattttttttttacatatgaataggcgactaaagcacccgaccttac

SEQ ID NO: 11215 - DNA, 96 bp, Aspergillus novofumigatus
  misc_feature: 1351
gaatatatatactataatgaagtttaaatattcattataaatttatatgtatgcaaaaaaaaaattctttattagttaaggttaccttacttaaat

SEQ ID NO: 11216 - DNA, 96 bp, Aspergillus novofumigatus
  misc_feature: 1351
caaaattattgataatgtagttaataaaaggtaaatagatattttctatgaacttattataaaaaaaaattttttttatacataagtcaggtgggt

SEQ ID NO: 11217 - DNA, 96 bp, Aspergillus novofumigatus
  misc_feature: 1350
ataaatttataatgaatatttaaacttcattatagtatatatattcctatgcgtataagatctaaaccttattatattttaatgtgttttacaata

SEQ ID NO: 11218 - DNA, 96 bp, Aspergillus novofumigatus
  misc_feature: 1349
taaggtttagatcttatacgcataggaatatatatactataatgaagtttaaatattcattataaatttatatgtatgcaaaaaaaaaattcttta

SEQ ID NO: 11219 - DNA, 96 bp, Aspergillus novofumigatus
  misc_feature: 1348
atgaatatttaaacttcattatagtatatatattcctatgcgtataagatctaaaccttattatattttaatgtgttttacaataaatagctataa

SEQ ID NO: 11220 - DNA, 96 bp, Aspergillus novofumigatus
  misc_feature: 1348
ctaccatacctaataatattagaacttattattaatcatattgaacagcattttttttttacatatgaataggcgactaaagcacccgaccttaca

SEQ ID NO: 11221 - DNA, 96 bp, Aspergillus novofumigatus
  misc_feature: 1348
aatgaatatttaaacttcattatagtatatatattcctatgcgtataagatctaaaccttattatattttaatgtgttttacaataaatagctata

SEQ ID NO: 11222 - DNA, 96 bp, Aspergillus novofumigatus
  misc_feature: 1347
attaaaatataataaggtttagatcttatacgcataggaatatatatactataatgaagtttaaatattcattataaatttatatgtatgcaaaaa

SEQ ID NO: 11223 - DNA, 96 bp, Aspergillus novofumigatus
  misc_feature: 1347
tagctataactattgcacctaccatacctaataatattagaacttattattaatcatattgaacagcattttttttttacatatgaataggcgact

SEQ ID NO: 11224 - DNA, 96 bp, Aspergillus novofumigatus
  misc_feature: 1347
ataataaggtttagatcttatacgcataggaatatatatactataatgaagtttaaatattcattataaatttatatgtatgcaaaaaaaaaattc

SEQ ID NO: 11225 - DNA, 96 bp, Aspergillus novofumigatus
  misc_feature: 1346
ttgcacctaccatacctaataatattagaacttattattaatcatattgaacagcattttttttttacatatgaataggcgactaaagcacccgac

SEQ ID NO: 11226 - DNA, 96 bp, Aspergillus novofumigatus
  misc_feature: 1346
tcaaaattattgataatgtagttaataaaaggtaaatagatattttctatgaacttattataaaaaaaaattttttttatacataagtcaggtggg

SEQ ID NO: 11227 - DNA, 96 bp, Aspergillus novofumigatus
  misc_feature: 1346
taggaatatatatactataatgaagtttaaatattcattataaatttatatgtatgcaaaaaaaaaattctttattagttaaggttaccttactta

SEQ ID NO: 11228 - DNA, 96 bp, Aspergillus novofumigatus
  misc_feature: 1346
ataactattgcacctaccatacctaataatattagaacttattattaatcatattgaacagcattttttttttacatatgaataggcgactaaagc

SEQ ID NO: 11229 - DNA, 96 bp, Aspergillus novofumigatus
  misc_feature: 1346
atcaaaattattgataatgtagttaataaaaggtaaatagatattttctatgaacttattataaaaaaaaattttttttatacataagtcaggtgg

SEQ ID NO: 11230 - DNA, 96 bp, Aspergillus novofumigatus
  misc_feature: 1346
ataggaatatatatactataatgaagtttaaatattcattataaatttatatgtatgcaaaaaaaaaattctttattagttaaggttaccttactt

SEQ ID NO: 11231 - DNA, 96 bp, Aspergillus novofumigatus
  misc_feature: 1345
aatataataaggtttagatcttatacgcataggaatatatatactataatgaagtttaaatattcattataaatttatatgtatgcaaaaaaaaaa

SEQ ID NO: 11232 - DNA, 96 bp, Aspergillus novofumigatus
  misc_feature: 1345
ggaatatatatactataatgaagtttaaatattcattataaatttatatgtatgcaaaaaaaaaattctttattagttaaggttaccttacttaaa

SEQ ID NO: 11233 - DNA, 96 bp, Aspergillus novofumigatus
  misc_feature: 1345
tataactattgcacctaccatacctaataatattagaacttattattaatcatattgaacagcattttttttttacatatgaataggcgactaaag

SEQ ID NO: 11234 - DNA, 96 bp, Aspergillus novofumigatus
  misc_feature: 1345
taataaggtttagatcttatacgcataggaatatatatactataatgaagtttaaatattcattataaatttatatgtatgcaaaaaaaaaattct

SEQ ID NO: 11235 - DNA, 96 bp, Aspergillus novofumigatus
  misc_feature: 1345
gtttagatcttatacgcataggaatatatatactataatgaagtttaaatattcattataaatttatatgtatgcaaaaaaaaaattctttattag

SEQ ID NO: 11236 - DNA, 96 bp, Aspergillus novofumigatus
  misc_feature: 1345
aactattgcacctaccatacctaataatattagaacttattattaatcatattgaacagcattttttttttacatatgaataggcgactaaagcac

SEQ ID NO: 11237 - DNA, 96 bp, Aspergillus novofumigatus
  misc_feature: 1345
aatttataatgaatatttaaacttcattatagtatatatattcctatgcgtataagatctaaaccttattatattttaatgtgttttacaataaat

SEQ ID NO: 11238 - DNA, 96 bp, Aspergillus novofumigatus
  misc_feature: 1344
aggaatatatatactataatgaagtttaaatattcattataaatttatatgtatgcaaaaaaaaaattctttattagttaaggttaccttacttaa

SEQ ID NO: 11239 - DNA, 96 bp, Aspergillus novofumigatus
  misc_feature: 1344
acctaccatacctaataatattagaacttattattaatcatattgaacagcattttttttttacatatgaataggcgactaaagcacccgacctta

SEQ ID NO: 11240 - DNA, 96 bp, Aspergillus novofumigatus
  misc_feature: 1344
atagctataactattgcacctaccatacctaataatattagaacttattattaatcatattgaacagcattttttttttacatatgaataggcgac

SEQ ID NO: 11241 - DNA, 96 bp, Aspergillus novofumigatus
  misc_feature: 1343
ttagatcttatacgcataggaatatatatactataatgaagtttaaatattcattataaatttatatgtatgcaaaaaaaaaattctttattagtt

SEQ ID NO: 11242 - DNA, 96 bp, Aspergillus novofumigatus
  misc_feature: 1343
ataaggtttagatcttatacgcataggaatatatatactataatgaagtttaaatattcattataaatttatatgtatgcaaaaaaaaaattcttt

SEQ ID NO: 11243 - DNA, 96 bp, Aspergillus novofumigatus
  misc_feature: 1341
tttagatcttatacgcataggaatatatatactataatgaagtttaaatattcattataaatttatatgtatgcaaaaaaaaaattctttattagt

SEQ ID NO: 11244 - DNA, 96 bp, Aspergillus novofumigatus
  misc_feature: 1339
aaatttataatgaatatttaaacttcattatagtatatatattcctatgcgtataagatctaaaccttattatattttaatgtgttttacaataaa

SEQ ID NO: 11245 - DNA, 96 bp, Aspergillus novofumigatus
  misc_feature: 1339
tgtagtattttagcggcttgtagcaatttagcttgtagcaatttatattgtagcattttacattaaatttttgtgtacaaccatctaagtaaggta

SEQ ID NO: 11246 - DNA, 96 bp, Aspergillus novofumigatus
  misc_feature: 1338
taactattgcacctaccatacctaataatattagaacttattattaatcatattgaacagcattttttttttacatatgaataggcgactaaagca

SEQ ID NO: 11247 - DNA, 96 bp, Aspergillus novofumigatus
  misc_feature: 1338
ataatgaatatttaaacttcattatagtatatatattcctatgcgtataagatctaaaccttattatattttaatgtgttttacaataaatagcta

SEQ ID NO: 11248 - DNA, 96 bp, Aspergillus novofumigatus
  misc_feature: 1337
atttataatgaatatttaaacttcattatagtatatatattcctatgcgtataagatctaaaccttattatattttaatgtgttttacaataaata

SEQ ID NO: 11249 - DNA, 96 bp, Aspergillus novofumigatus
  misc_feature: 1337
agctataactattgcacctaccatacctaataatattagaacttattattaatcatattgaacagcattttttttttacatatgaataggcgacta

SEQ ID NO: 11250 - DNA, 96 bp, Aspergillus novofumigatus
  misc_feature: 1336
tataaatttataatgaatatttaaacttcattatagtatatatattcctatgcgtataagatctaaaccttattatattttaatgtgttttacaat

SEQ ID NO: 11251 - DNA, 96 bp, Aspergillus novofumigatus
  misc_feature: 1335
ctataactattgcacctaccatacctaataatattagaacttattattaatcatattgaacagcattttttttttacatatgaataggcgactaaa

SEQ ID NO: 11252 - DNA, 96 bp, Aspergillus novofumigatus
  misc_feature: 1334
gatcttatacgcataggaatatatatactataatgaagtttaaatattcattataaatttatatgtatgcaaaaaaaaaattctttattagttaag

SEQ ID NO: 11253 - DNA, 96 bp, Aspergillus novofumigatus
  misc_feature: 1333
aataaggtttagatcttatacgcataggaatatatatactataatgaagtttaaatattcattataaatttatatgtatgcaaaaaaaaaattctt

SEQ ID NO: 11254 - DNA, 96 bp, Aspergillus novofumigatus
  misc_feature: 1332
atataaatttataatgaatatttaaacttcattatagtatatatattcctatgcgtataagatctaaaccttattatattttaatgtgttttacaa

SEQ ID NO: 11255 - DNA, 96 bp, Aspergillus novofumigatus
  misc_feature: 1331
agatcttatacgcataggaatatatatactataatgaagtttaaatattcattataaatttatatgtatgcaaaaaaaaaattctttattagttaa

SEQ ID NO: 11256 - DNA, 96 bp, Aspergillus novofumigatus
  misc_feature: 1331
tagatcttatacgcataggaatatatatactataatgaagtttaaatattcattataaatttatatgtatgcaaaaaaaaaattctttattagtta

SEQ ID NO: 11257 - DNA, 96 bp, Aspergillus novofumigatus
  misc_feature: 1331
atcttatacgcataggaatatatatactataatgaagtttaaatattcattataaatttatatgtatgcaaaaaaaaaattctttattagttaagg

SEQ ID NO: 11258 - DNA, 96 bp, Aspergillus novofumigatus
  misc_feature: 1330
taaatttataatgaatatttaaacttcattatagtatatatattcctatgcgtataagatctaaaccttattatattttaatgtgttttacaataa

SEQ ID NO: 11259 - DNA, 96 bp, Aspergillus novofumigatus
  misc_feature: 1330
taatgaatatttaaacttcattatagtatatatattcctatgcgtataagatctaaaccttattatattttaatgtgttttacaataaatagctat

SEQ ID NO: 11260 - DNA, 96 bp, Aspergillus novofumigatus
  misc_feature: 1328
ttaaaatataataaggtttagatcttatacgcataggaatatatatactataatgaagtttaaatattcattataaatttatatgtatgcaaaaaa

SEQ ID NO: 11261 - DNA, 96 bp, Aspergillus novofumigatus
  misc_feature: 1328
gctataactattgcacctaccatacctaataatattagaacttattattaatcatattgaacagcattttttttttacatatgaataggcgactaa

SEQ ID NO: 11262 - DNA, 96 bp, Aspergillus novofumigatus
  misc_feature: 1328
atacatataaatttataatgaatatttaaacttcattatagtatatatattcctatgcgtataagatctaaaccttattatattttaatgtgtttt

SEQ ID NO: 11263 - DNA, 96 bp, Aspergillus novofumigatus
  misc_feature: 1327
aaatataataaggtttagatcttatacgcataggaatatatatactataatgaagtttaaatattcattataaatttatatgtatgcaaaaaaaaa

SEQ ID NO: 11264 - DNA, 96 bp, Aspergillus novofumigatus
  misc_feature: 1327
ttatacgcataggaatatatatactataatgaagtttaaatattcattataaatttatatgtatgcaaaaaaaaaattctttattagttaaggtta

SEQ ID NO: 11265 - DNA, 96 bp, Aspergillus novofumigatus
  misc_feature: 1327
aatatatatactataatgaagtttaaatattcattataaatttatatgtatgcaaaaaaaaaattctttattagttaaggttaccttacttaaatg

SEQ ID NO: 11266 - DNA, 96 bp, Aspergillus novofumigatus
  misc_feature: 1326
tacatataaatttataatgaatatttaaacttcattatagtatatatattcctatgcgtataagatctaaaccttattatattttaatgtgtttta

SEQ ID NO: 11267 - DNA, 96 bp, Aspergillus novofumigatus
  misc_feature: 1325
tataatgaatatttaaacttcattatagtatatatattcctatgcgtataagatctaaaccttattatattttaatgtgttttacaataaatagct

SEQ ID NO: 11268 - DNA, 96 bp, Aspergillus novofumigatus
  misc_feature: 1324
taaaatataataaggtttagatcttatacgcataggaatatatatactataatgaagtttaaatattcattataaatttatatgtatgcaaaaaaa

SEQ ID NO: 11269 - DNA, 96 bp, Aspergillus novofumigatus
  misc_feature: 1323
ttgtagtattttagcggcttgtagcaatttagcttgtagcaatttatattgtagcattttacattaaatttttgtgtacaaccatctaagtaaggt

SEQ ID NO: 11270 - DNA, 96 bp, Aspergillus novofumigatus
  misc_feature: 1322
aaaatataataaggtttagatcttatacgcataggaatatatatactataatgaagtttaaatattcattataaatttatatgtatgcaaaaaaaa

SEQ ID NO: 11271 - DNA, 96 bp, Aspergillus novofumigatus
  misc_feature: 1319
cataggaatatatatactataatgaagtttaaatattcattataaatttatatgtatgcaaaaaaaaaattctttattagttaaggttaccttact

SEQ ID NO: 11272 - DNA, 96 bp, Aspergillus novofumigatus
  misc_feature: 1318
tcttatacgcataggaatatatatactataatgaagtttaaatattcattataaatttatatgtatgcaaaaaaaaaattctttattagttaaggt

SEQ ID NO: 11273 - DNA, 96 bp, Aspergillus novofumigatus
  misc_feature: 1317
catataaatttataatgaatatttaaacttcattatagtatatatattcctatgcgtataagatctaaaccttattatattttaatgtgttttaca

SEQ ID NO: 11274 - DNA, 96 bp, Aspergillus novofumigatus
  misc_feature: 1317
gcataggaatatatatactataatgaagtttaaatattcattataaatttatatgtatgcaaaaaaaaaattctttattagttaaggttaccttac

SEQ ID NO: 11275 - DNA, 96 bp, Aspergillus novofumigatus
  misc_feature: 1315
aacacattaaaatataataaggtttagatcttatacgcataggaatatatatactataatgaagtttaaatattcattataaatttatatgtatgc

SEQ ID NO: 11276 - DNA, 96 bp, Aspergillus novofumigatus
  misc_feature: 1315
cttatacgcataggaatatatatactataatgaagtttaaatattcattataaatttatatgtatgcaaaaaaaaaattctttattagttaaggtt

SEQ ID NO: 11277 - DNA, 96 bp, Aspergillus novofumigatus
  misc_feature: 1314
tatacgcataggaatatatatactataatgaagtttaaatattcattataaatttatatgtatgcaaaaaaaaaattctttattagttaaggttac

SEQ ID NO: 11278 - DNA, 96 bp, Aspergillus novofumigatus
  misc_feature: 1313
cgcataggaatatatatactataatgaagtttaaatattcattataaatttatatgtatgcaaaaaaaaaattctttattagttaaggttacctta

SEQ ID NO: 11279 - DNA, 96 bp, Aspergillus novofumigatus
  misc_feature: 1313
acatataaatttataatgaatatttaaacttcattatagtatatatattcctatgcgtataagatctaaaccttattatattttaatgtgttttac

SEQ ID NO: 11280 - DNA, 96 bp, Aspergillus novofumigatus
  misc_feature: 1313
aaacacattaaaatataataaggtttagatcttatacgcataggaatatatatactataatgaagtttaaatattcattataaatttatatgtatg

SEQ ID NO: 11281 - DNA, 96 bp, Aspergillus novofumigatus
  misc_feature: 1312
tacgcataggaatatatatactataatgaagtttaaatattcattataaatttatatgtatgcaaaaaaaaaattctttattagttaaggttacct

SEQ ID NO: 11282 - DNA, 96 bp, Aspergillus novofumigatus
  misc_feature: 1312
atacgcataggaatatatatactataatgaagtttaaatattcattataaatttatatgtatgcaaaaaaaaaattctttattagttaaggttacc

SEQ ID NO: 11283 - DNA, 96 bp, Aspergillus novofumigatus
  misc_feature: 1311
acgcataggaatatatatactataatgaagtttaaatattcattataaatttatatgtatgcaaaaaaaaaattctttattagttaaggttacctt

SEQ ID NO: 11284 - DNA, 96 bp, Aspergillus novofumigatus
  misc_feature: 1310
ttataatgaatatttaaacttcattatagtatatatattcctatgcgtataagatctaaaccttattatattttaatgtgttttacaataaatagc

SEQ ID NO: 11285 - DNA, 96 bp, Aspergillus novofumigatus
  misc_feature: 1310
cttgtagtattttagcggcttgtagcaatttagcttgtagcaatttatattgtagcattttacattaaatttttgtgtacaaccatctaagtaagg

SEQ ID NO: 11286 - DNA, 96 bp, Aspergillus novofumigatus
  misc_feature: 1306
atatatactataatgaagtttaaatattcattataaatttatatgtatgcaaaaaaaaaattctttattagttaaggttaccttacttaaatggtt

SEQ ID NO: 11287 - DNA, 96 bp, Aspergillus novofumigatus
  misc_feature: 1305
tttataatgaatatttaaacttcattatagtatatatattcctatgcgtataagatctaaaccttattatattttaatgtgttttacaataaatag

SEQ ID NO: 11288 - DNA, 96 bp, Aspergillus novofumigatus
  misc_feature: 1304
cattaaaatataataaggtttagatcttatacgcataggaatatatatactataatgaagtttaaatattcattataaatttatatgtatgcaaaa

SEQ ID NO: 11289 - DNA, 96 bp, Aspergillus novofumigatus
  misc_feature: 1303
tatatatactataatgaagtttaaatattcattataaatttatatgtatgcaaaaaaaaaattctttattagttaaggttaccttacttaaatggt

SEQ ID NO: 11290 - DNA, 96 bp, Aspergillus novofumigatus
  misc_feature: 1301
acattaaaatataataaggtttagatcttatacgcataggaatatatatactataatgaagtttaaatattcattataaatttatatgtatgcaaa

SEQ ID NO: 11291 - DNA, 96 bp, Aspergillus novofumigatus
  misc_feature: 1300
acacattaaaatataataaggtttagatcttatacgcataggaatatatatactataatgaagtttaaatattcattataaatttatatgtatgca

SEQ ID NO: 11292 - DNA, 96 bp, Aspergillus novofumigatus
  misc_feature: 1299
atatatatactataatgaagtttaaatattcattataaatttatatgtatgcaaaaaaaaaattctttattagttaaggttaccttacttaaatgg

SEQ ID NO: 11293 - DNA, 96 bp, Aspergillus novofumigatus
  misc_feature: 1293
cacattaaaatataataaggtttagatcttatacgcataggaatatatatactataatgaagtttaaatattcattataaatttatatgtatgcaa

SEQ ID NO: 11294 - DNA, 96 bp, Aspergillus novofumigatus
  misc_feature: 1293
gcttgtagtattttagcggcttgtagcaatttagcttgtagcaatttatattgtagcattttacattaaatttttgtgtacaaccatctaagtaag

SEQ ID NO: 11295 - DNA, 96 bp, Aspergillus novofumigatus
  misc_feature: 1292
tatatactataatgaagtttaaatattcattataaatttatatgtatgcaaaaaaaaaattctttattagttaaggttaccttacttaaatggttg

SEQ ID NO: 11296 - DNA, 96 bp, Aspergillus novofumigatus
  misc_feature: 1291
aaaatactacaagcggctaaaatgcaacaagcggctaaaatactacaagccgctaaaatccttatcctcggattatgtttaagtagtccacctaaa

SEQ ID NO: 11297 - DNA, 96 bp, Aspergillus novofumigatus
  misc_feature: 1287
cgcttgtagtattttagcggcttgtagcaatttagcttgtagcaatttatattgtagcattttacattaaatttttgtgtacaaccatctaagtaa

SEQ ID NO: 11298 - DNA, 96 bp, Aspergillus novofumigatus
  misc_feature: 1284
aaatactacaagcggctaaaatgcaacaagcggctaaaatactacaagccgctaaaatccttatcctcggattatgtttaagtagtccacctaaac

SEQ ID NO: 11299 - DNA, 96 bp, Aspergillus novofumigatus
  misc_feature: 1283
atatactataatgaagtttaaatattcattataaatttatatgtatgcaaaaaaaaaattctttattagttaaggttaccttacttaaatggttgt

SEQ ID NO: 11300 - DNA, 96 bp, Aspergillus novofumigatus
  misc_feature: 1281
tatactataatgaagtttaaatattcattataaatttatatgtatgcaaaaaaaaaattctttattagttaaggttaccttacttaaatggttgta

SEQ ID NO: 11301 - DNA, 96 bp, Aspergillus novofumigatus
  misc_feature: 1277
atactataatgaagtttaaatattcattataaatttatatgtatgcaaaaaaaaaattctttattagttaaggttaccttacttaaatggttgtac

SEQ ID NO: 11302 - DNA, 96 bp, Aspergillus novofumigatus
  misc_feature: 1263
aatactacaagcggctaaaatgcaacaagcggctaaaatactacaagccgctaaaatccttatcctcggattatgtttaagtagtccacctaaacc

SEQ ID NO: 11303 - DNA, 96 bp, Aspergillus novofumigatus
  misc_feature: 1262
ccgcttgtagtattttagcggcttgtagcaatttagcttgtagcaatttatattgtagcattttacattaaatttttgtgtacaaccatctaagta

SEQ ID NO: 11304 - DNA, 96 bp, Aspergillus novofumigatus
  misc_feature: 1255
aagccgctaaaatactacaagcggctaaaatgcaacaagcggctaaaatactacaagccgctaaaatccttatcctcggattatgtttaagtagtc

SEQ ID NO: 11305 - DNA, 96 bp, Aspergillus novofumigatus
  misc_feature: 1253
gccgcttgtagtattttagcggcttgtagcaatttagcttgtagcaatttatattgtagcattttacattaaatttttgtgtacaaccatctaagt

SEQ ID NO: 11306 - DNA, 96 bp, Aspergillus novofumigatus
  misc_feature: 1250
gcatgcaaaagcatgaggtttaggtggactacttaaacataatccgaggataaggattttagcggcttgtagtattttagccgcttgttgcatttt

SEQ ID NO: 11307 - DNA, 96 bp, Aspergillus novofumigatus
  misc_feature: 1247
agccgcttgtagtattttagcggcttgtagcaatttagcttgtagcaatttatattgtagcattttacattaaatttttgtgtacaaccatctaag

SEQ ID NO: 11308 - DNA, 96 bp, Aspergillus novofumigatus
  misc_feature: 1242
agccgctaaaatactacaagcggctaaaatgcaacaagcggctaaaatactacaagccgctaaaatccttatcctcggattatgtttaagtagtcc

SEQ ID NO: 11309 - DNA, 96 bp, Aspergillus novofumigatus
  misc_feature: 1241
atactacaagcggctaaaatgcaacaagcggctaaaatactacaagccgctaaaatccttatcctcggattatgtttaagtagtccacctaaacct

SEQ ID NO: 11310 - DNA, 96 bp, Aspergillus novofumigatus
  misc_feature: 1235
taaaatactacaagcggctaaaatgcaacaagcggctaaaatactacaagccgctaaaatccttatcctcggattatgtttaagtagtccacctaa

SEQ ID NO: 11311 - DNA, 96 bp, Aspergillus novofumigatus
  misc_feature: 1227
tagccgcttgtagtattttagcggcttgtagcaatttagcttgtagcaatttatattgtagcattttacattaaatttttgtgtacaaccatctaa

SEQ ID NO: 11312 - DNA, 96 bp, Aspergillus novofumigatus
  misc_feature: 1226
cgctaaaatactacaagcggctaaaatgcaacaagcggctaaaatactacaagccgctaaaatccttatcctcggattatgtttaagtagtccacc

SEQ ID NO: 11313 - DNA, 96 bp, Aspergillus novofumigatus
  misc_feature: 1225
tactacaagcggctaaaatgcaacaagcggctaaaatactacaagccgctaaaatccttatcctcggattatgtttaagtagtccacctaaacctc

SEQ ID NO: 11314 - DNA, 96 bp, Aspergillus novofumigatus
  misc_feature: 1222
gccgctaaaatactacaagcggctaaaatgcaacaagcggctaaaatactacaagccgctaaaatccttatcctcggattatgtttaagtagtcca

SEQ ID NO: 11315 - DNA, 96 bp, Aspergillus novofumigatus
  misc_feature: 1220
gctaaaatactacaagcggctaaaatgcaacaagcggctaaaatactacaagccgctaaaatccttatcctcggattatgtttaagtagtccacct

SEQ ID NO: 11316 - DNA, 96 bp, Aspergillus novofumigatus
  misc_feature: 1213
ccgctaaaatactacaagcggctaaaatgcaacaagcggctaaaatactacaagccgctaaaatccttatcctcggattatgtttaagtagtccac

SEQ ID NO: 11317 - DNA, 96 bp, Aspergillus novofumigatus
  misc_feature: 1212
aagcggctaaaatgcaacaagcggctaaaatactacaagccgctaaaatccttatcctcggattatgtttaagtagtccacctaaacctcatgctt

SEQ ID NO: 11318 - DNA, 96 bp, Aspergillus novofumigatus
  misc_feature: 1211
actacaagcggctaaaatgcaacaagcggctaaaatactacaagccgctaaaatccttatcctcggattatgtttaagtagtccacctaaacctca

SEQ ID NO: 11319 - DNA, 96 bp, Aspergillus novofumigatus
  misc_feature: 1206
ctaaaatactacaagcggctaaaatgcaacaagcggctaaaatactacaagccgctaaaatccttatcctcggattatgtttaagtagtccaccta

SEQ ID NO: 11320 - DNA, 96 bp, Aspergillus novofumigatus
  misc_feature: 1205
agcggctaaaatgcaacaagcggctaaaatactacaagccgctaaaatccttatcctcggattatgtttaagtagtccacctaaacctcatgcttt

SEQ ID NO: 11321 - DNA, 96 bp, Aspergillus novofumigatus
  misc_feature: 1203
ttagccgcttgtagtattttagcggcttgtagcaatttagcttgtagcaatttatattgtagcattttacattaaatttttgtgtacaaccatcta

SEQ ID NO: 11322 - DNA, 96 bp, Aspergillus novofumigatus
  misc_feature: 1200
ctacaagcggctaaaatgcaacaagcggctaaaatactacaagccgctaaaatccttatcctcggattatgtttaagtagtccacctaaacctcat

SEQ ID NO: 11323 - DNA, 96 bp, Aspergillus novofumigatus
  misc_feature: 1199
tttagccgcttgtagtattttagcggcttgtagcaatttagcttgtagcaatttatattgtagcattttacattaaatttttgtgtacaaccatct

SEQ ID NO: 11324 - DNA, 96 bp, Aspergillus novofumigatus
  misc_feature: 1188
gcggctaaaatgcaacaagcggctaaaatactacaagccgctaaaatccttatcctcggattatgtttaagtagtccacctaaacctcatgctttt

SEQ ID NO: 11325 - DNA, 96 bp, Aspergillus novofumigatus
  misc_feature: 1185
ttttagccgcttgtagtattttagcggcttgtagcaatttagcttgtagcaatttatattgtagcattttacattaaatttttgtgtacaaccatc

SEQ ID NO: 11326 - DNA, 96 bp, Aspergillus novofumigatus
  misc_feature: 1168
tacaagcggctaaaatgcaacaagcggctaaaatactacaagccgctaaaatccttatcctcggattatgtttaagtagtccacctaaacctcatg

SEQ ID NO: 11327 - DNA, 96 bp, Aspergillus novofumigatus
  misc_feature: 1168
acaagcggctaaaatgcaacaagcggctaaaatactacaagccgctaaaatccttatcctcggattatgtttaagtagtccacctaaacctcatgc

SEQ ID NO: 11328 - DNA, 96 bp, Aspergillus novofumigatus
  misc_feature: 1168
attttagccgcttgtagtattttagcggcttgtagcaatttagcttgtagcaatttatattgtagcattttacattaaatttttgtgtacaaccat

SEQ ID NO: 11329 - DNA, 96 bp, Aspergillus novofumigatus
  misc_feature: 1166
caagcggctaaaatgcaacaagcggctaaaatactacaagccgctaaaatccttatcctcggattatgtttaagtagtccacctaaacctcatgct

SEQ ID NO: 11330 - DNA, 96 bp, Aspergillus novofumigatus
  misc_feature: 1155
ggctaaaatgcaacaagcggctaaaatactacaagccgctaaaatccttatcctcggattatgtttaagtagtccacctaaacctcatgcttttgc

SEQ ID NO: 11331 - DNA, 96 bp, Aspergillus novofumigatus
  misc_feature: 1153
tatgttttaataagttaaaagtaaatatatattatatatatatatatattacctactattttataattagaatctatctatagtaaaataaaactt

SEQ ID NO: 11332 - DNA, 96 bp, Aspergillus novofumigatus
  misc_feature: 1147
cggctaaaatgcaacaagcggctaaaatactacaagccgctaaaatccttatcctcggattatgtttaagtagtccacctaaacctcatgcttttg

SEQ ID NO: 11333 - DNA, 96 bp, Aspergillus novofumigatus
  misc_feature: 1143
cattttagccgcttgtagtattttagcggcttgtagcaatttagcttgtagcaatttatattgtagcattttacattaaatttttgtgtacaacca

SEQ ID NO: 11334 - DNA, 96 bp, Aspergillus novofumigatus
  misc_feature: 1139
catgcaaaagcatgaggtttaggtggactacttaaacataatccgaggataaggattttagcggcttgtagtattttagccgcttgttgcatttta

SEQ ID NO: 11335 - DNA, 96 bp, Aspergillus novofumigatus
  misc_feature: 1138
gctaaaatgcaacaagcggctaaaatactacaagccgctaaaatccttatcctcggattatgtttaagtagtccacctaaacctcatgcttttgca

SEQ ID NO: 11336 - DNA, 96 bp, Aspergillus novofumigatus
  misc_feature: 1131
ctaaaatgcaacaagcggctaaaatactacaagccgctaaaatccttatcctcggattatgtttaagtagtccacctaaacctcatgcttttgcat

SEQ ID NO: 11337 - DNA, 96 bp, Aspergillus novofumigatus
  misc_feature: 1126
gcattttagccgcttgtagtattttagcggcttgtagcaatttagcttgtagcaatttatattgtagcattttacattaaatttttgtgtacaacc

SEQ ID NO: 11338 - DNA, 96 bp, Aspergillus novofumigatus
  misc_feature: 1120
ctatgttttaataagttaaaagtaaatatatattatatatatatatatattacctactattttataattagaatctatctatagtaaaataaaact

SEQ ID NO: 11339 - DNA, 96 bp, Aspergillus novofumigatus
  misc_feature: 1119
tctatgttttaataagttaaaagtaaatatatattatatatatatatatattacctactattttataattagaatctatctatagtaaaataaaac

SEQ ID NO: 11340 - DNA, 96 bp, Aspergillus novofumigatus
  misc_feature: 1117
gttgtacacaaaaatttaatgtaaaatgctacaatataaattgctacaagctaaattgctacaagccgctaaaatactacaagcggctaaaatgca

SEQ ID NO: 11341 - DNA, 96 bp, Aspergillus novofumigatus
  misc_feature: 1101
ttgtacacaaaaatttaatgtaaaatgctacaatataaattgctacaagctaaattgctacaagccgctaaaatactacaagcggctaaaatgcaa

SEQ ID NO: 11342 - DNA, 96 bp, Aspergillus novofumigatus
  misc_feature: 1097
tgtacacaaaaatttaatgtaaaatgctacaatataaattgctacaagctaaattgctacaagccgctaaaatactacaagcggctaaaatgcaac

SEQ ID NO: 11343 - DNA, 96 bp, Aspergillus novofumigatus
  misc_feature: 1073
gtacacaaaaatttaatgtaaaatgctacaatataaattgctacaagctaaattgctacaagccgctaaaatactacaagcggctaaaatgcaaca

SEQ ID NO: 11344 - DNA, 96 bp, Aspergillus novofumigatus
  misc_feature: 1064
tacacaaaaatttaatgtaaaatgctacaatataaattgctacaagctaaattgctacaagccgctaaaatactacaagcggctaaaatgcaacaa

SEQ ID NO: 11345 - DNA, 96 bp, Aspergillus novofumigatus
  misc_feature: 1063
aaaaatttaatgtaaaatgctacaatataaattgctacaagctaaattgctacaagccgctaaaatactacaagcggctaaaatgcaacaagcggc

SEQ ID NO: 11346 - DNA, 96 bp, Aspergillus novofumigatus
  misc_feature: 1052
acacaaaaatttaatgtaaaatgctacaatataaattgctacaagctaaattgctacaagccgctaaaatactacaagcggctaaaatgcaacaag

SEQ ID NO: 11347 - DNA, 96 bp, Aspergillus novofumigatus
  misc_feature: 1052
aaaatttaatgtaaaatgctacaatataaattgctacaagctaaattgctacaagccgctaaaatactacaagcggctaaaatgcaacaagcggct

SEQ ID NO: 11348 - DNA, 96 bp, Aspergillus novofumigatus
  misc_feature: 1043
cacaaaaatttaatgtaaaatgctacaatataaattgctacaagctaaattgctacaagccgctaaaatactacaagcggctaaaatgcaacaagc

SEQ ID NO: 11349 - DNA, 96 bp, Aspergillus novofumigatus
  misc_feature: 1042
aaatttaatgtaaaatgctacaatataaattgctacaagctaaattgctacaagccgctaaaatactacaagcggctaaaatgcaacaagcggcta

SEQ ID NO: 11350 - DNA, 96 bp, Aspergillus novofumigatus
  misc_feature: 1034
acaaaaatttaatgtaaaatgctacaatataaattgctacaagctaaattgctacaagccgctaaaatactacaagcggctaaaatgcaacaagcg

SEQ ID NO: 11351 - DNA, 96 bp, Aspergillus novofumigatus
  misc_feature: 1017
aatttaatgtaaaatgctacaatataaattgctacaagctaaattgctacaagccgctaaaatactacaagcggctaaaatgcaacaagcggctaa

SEQ ID NO: 11352 - DNA, 96 bp, Aspergillus novofumigatus
  misc_feature: 1011
caaaaatttaatgtaaaatgctacaatataaattgctacaagctaaattgctacaagccgctaaaatactacaagcggctaaaatgcaacaagcgg

SEQ ID NO: 11353 - DNA, 96 bp, Aspergillus novofumigatus
  misc_feature: 1005
atttaatgtaaaatgctacaatataaattgctacaagctaaattgctacaagccgctaaaatactacaagcggctaaaatgcaacaagcggctaaa

SEQ ID NO: 11354 - DNA, 96 bp, Aspergillus novofumigatus
  misc_feature: 998
tttaatgtaaaatgctacaatataaattgctacaagctaaattgctacaagccgctaaaatactacaagcggctaaaatgcaacaagcggctaaaa

SEQ ID NO: 11355 - DNA, 96 bp, Aspergillus novofumigatus
  misc_feature: 991
cccccccccaagggtccccgccaactggtcacccccggggcgcgcgcgcccggcttccattgaccccagtgcctgtgtgtctcgataagtggccgg

SEQ ID NO: 11356 - DNA, 96 bp, Aspergillus novofumigatus
  misc_feature: 984
ttaatgtaaaatgctacaatataaattgctacaagctaaattgctacaagccgctaaaatactacaagcggctaaaatgcaacaagcggctaaaat

SEQ ID NO: 11357 - DNA, 96 bp, Aspergillus novofumigatus
  misc_feature: 976
taatgtaaaatgctacaatataaattgctacaagctaaattgctacaagccgctaaaatactacaagcggctaaaatgcaacaagcggctaaaata

SEQ ID NO: 11358 - DNA, 96 bp, Aspergillus novofumigatus
  misc_feature: 968
aatgtaaaatgctacaatataaattgctacaagctaaattgctacaagccgctaaaatactacaagcggctaaaatgcaacaagcggctaaaatac

SEQ ID NO: 11359 - DNA, 96 bp, Aspergillus novofumigatus
  misc_feature: 967
atgtaaaatgctacaatataaattgctacaagctaaattgctacaagccgctaaaatactacaagcggctaaaatgcaacaagcggctaaaatact

SEQ ID NO: 11360 - DNA, 96 bp, Aspergillus novofumigatus
  misc_feature: 964
aaaatgctacaatataaattgctacaagctaaattgctacaagccgctaaaatactacaagcggctaaaatgcaacaagcggctaaaatactacaa

SEQ ID NO: 11361 - DNA, 96 bp, Aspergillus novofumigatus
  misc_feature: 953
tgtaaaatgctacaatataaattgctacaagctaaattgctacaagccgctaaaatactacaagcggctaaaatgcaacaagcggctaaaatacta

SEQ ID NO: 11362 - DNA, 96 bp, Aspergillus novofumigatus
  misc_feature: 950
taaaatgctacaatataaattgctacaagctaaattgctacaagccgctaaaatactacaagcggctaaaatgcaacaagcggctaaaatactaca

SEQ ID NO: 11363 - DNA, 96 bp, Aspergillus novofumigatus
  misc_feature: 942
gcccccccccaagggtccccgccaactggtcacccccggggcgcgcgcgcccggcttccattgaccccagtgcctgtgtgtctcgataagtggccg

SEQ ID NO: 11364 - DNA, 96 bp, Aspergillus novofumigatus
  misc_feature: 940
aaatgctacaatataaattgctacaagctaaattgctacaagccgctaaaatactacaagcggctaaaatgcaacaagcggctaaaatactacaag

SEQ ID NO: 11365 - DNA, 96 bp, Aspergillus novofumigatus
  misc_feature: 939
gtaaaatgctacaatataaattgctacaagctaaattgctacaagccgctaaaatactacaagcggctaaaatgcaacaagcggctaaaatactac

SEQ ID NO: 11366 - DNA, 96 bp, Aspergillus novofumigatus
  misc_feature: 923
aatgctacaatataaattgctacaagctaaattgctacaagccgctaaaatactacaagcggctaaaatgcaacaagcggctaaaatactacaagc

SEQ ID NO: 11367 - DNA, 96 bp, Aspergillus novofumigatus
  misc_feature: 915
tgcccccccccaagggtccccgccaactggtcacccccggggcgcgcgcgcccggcttccattgaccccagtgcctgtgtgtctcgataagtggcc

SEQ ID NO: 11368 - DNA, 96 bp, Aspergillus novofumigatus
  misc_feature: 910
tacaagccgctaaaatactacaagcggctaaaatgcaacaagcggctaaaatactacaagccgctaaaatccttatcctcggattatgtttaagta

SEQ ID NO: 11369 - DNA, 96 bp, Aspergillus novofumigatus
  misc_feature: 908
actacttaaacataatccgaggataaggattttagcggcttgtagtattttagccgcttgttgcattttagccgcttgtagtattttagcggcttg

SEQ ID NO: 11370 - DNA, 96 bp, Aspergillus novofumigatus
  misc_feature: 904
atgctacaatataaattgctacaagctaaattgctacaagccgctaaaatactacaagcggctaaaatgcaacaagcggctaaaatactacaagcc

SEQ ID NO: 11371 - DNA, 96 bp, Aspergillus novofumigatus
  misc_feature: 901
ctacttaaacataatccgaggataaggattttagcggcttgtagtattttagccgcttgttgcattttagccgcttgtagtattttagcggcttgt

SEQ ID NO: 11372 - DNA, 96 bp, Aspergillus novofumigatus
  misc_feature: 896
tgctacaagccgctaaaatactacaagcggctaaaatgcaacaagcggctaaaatactacaagccgctaaaatccttatcctcggattatgtttaa

SEQ ID NO: 11373 - DNA, 96 bp, Aspergillus novofumigatus
  misc_feature: 890
ctacaagccgctaaaatactacaagcggctaaaatgcaacaagcggctaaaatactacaagccgctaaaatccttatcctcggattatgtttaagt

SEQ ID NO: 11374 - DNA, 96 bp, Aspergillus novofumigatus
  misc_feature: 886
tgctacaatataaattgctacaagctaaattgctacaagccgctaaaatactacaagcggctaaaatgcaacaagcggctaaaatactacaagccg

SEQ ID NO: 11375 - DNA, 96 bp, Aspergillus novofumigatus
  misc_feature: 886
attgctacaagccgctaaaatactacaagcggctaaaatgcaacaagcggctaaaatactacaagccgctaaaatccttatcctcggattatgttt

SEQ ID NO: 11376 - DNA, 96 bp, Aspergillus novofumigatus
  misc_feature: 886
aattgctacaagccgctaaaatactacaagcggctaaaatgcaacaagcggctaaaatactacaagccgctaaaatccttatcctcggattatgtt

SEQ ID NO: 11377 - DNA, 96 bp, Aspergillus novofumigatus
  misc_feature: 884
ttgctacaagccgctaaaatactacaagcggctaaaatgcaacaagcggctaaaatactacaagccgctaaaatccttatcctcggattatgttta

SEQ ID NO: 11378 - DNA, 96 bp, Aspergillus novofumigatus
  misc_feature: 878
gctacaagccgctaaaatactacaagcggctaaaatgcaacaagcggctaaaatactacaagccgctaaaatccttatcctcggattatgtttaag

SEQ ID NO: 11379 - DNA, 96 bp, Aspergillus novofumigatus
  misc_feature: 872
aaattgctacaagccgctaaaatactacaagcggctaaaatgcaacaagcggctaaaatactacaagccgctaaaatccttatcctcggattatgt

SEQ ID NO: 11380 - DNA, 96 bp, Aspergillus novofumigatus
  misc_feature: 871
tacaatataaattgctacaagctaaattgctacaagccgctaaaatactacaagcggctaaaatgcaacaagcggctaaaatactacaagccgcta

SEQ ID NO: 11381 - DNA, 96 bp, Aspergillus novofumigatus
  misc_feature: 868
atataaattgctacaagctaaattgctacaagccgctaaaatactacaagcggctaaaatgcaacaagcggctaaaatactacaagccgctaaaat

SEQ ID NO: 11382 - DNA, 96 bp, Aspergillus novofumigatus
  misc_feature: 867
aaattgctacaagctaaattgctacaagccgctaaaatactacaagcggctaaaatgcaacaagcggctaaaatactacaagccgctaaaatcctt

SEQ ID NO: 11383 - DNA, 96 bp, Aspergillus novofumigatus
  misc_feature: 863
gctacaatataaattgctacaagctaaattgctacaagccgctaaaatactacaagcggctaaaatgcaacaagcggctaaaatactacaagccgc

SEQ ID NO: 11384 - DNA, 96 bp, Aspergillus novofumigatus
  misc_feature: 863
ctacaatataaattgctacaagctaaattgctacaagccgctaaaatactacaagcggctaaaatgcaacaagcggctaaaatactacaagccgct

SEQ ID NO: 11385 - DNA, 96 bp, Aspergillus novofumigatus
  misc_feature: 861
aatataaattgctacaagctaaattgctacaagccgctaaaatactacaagcggctaaaatgcaacaagcggctaaaatactacaagccgctaaaa

SEQ ID NO: 11386 - DNA, 96 bp, Aspergillus novofumigatus
  misc_feature: 859
aattgctacaagctaaattgctacaagccgctaaaatactacaagcggctaaaatgcaacaagcggctaaaatactacaagccgctaaaatcctta

SEQ ID NO: 11387 - DNA, 96 bp, Aspergillus novofumigatus
  misc_feature: 858
acaatataaattgctacaagctaaattgctacaagccgctaaaatactacaagcggctaaaatgcaacaagcggctaaaatactacaagccgctaa

SEQ ID NO: 11388 - DNA, 96 bp, Aspergillus novofumigatus
  misc_feature: 856
tataaattgctacaagctaaattgctacaagccgctaaaatactacaagcggctaaaatgcaacaagcggctaaaatactacaagccgctaaaatc

SEQ ID NO: 11389 - DNA, 96 bp, Aspergillus novofumigatus
  misc_feature: 854
taaattgctacaagctaaattgctacaagccgctaaaatactacaagcggctaaaatgcaacaagcggctaaaatactacaagccgctaaaatcct

SEQ ID NO: 11390 - DNA, 96 bp, Aspergillus novofumigatus
  misc_feature: 853
taaattgctacaagccgctaaaatactacaagcggctaaaatgcaacaagcggctaaaatactacaagccgctaaaatccttatcctcggattatg

SEQ ID NO: 11391 - DNA, 96 bp, Aspergillus novofumigatus
  misc_feature: 852
ataaattgctacaagctaaattgctacaagccgctaaaatactacaagcggctaaaatgcaacaagcggctaaaatactacaagccgctaaaatcc

SEQ ID NO: 11392 - DNA, 96 bp, Aspergillus novofumigatus
  misc_feature: 850
attgctacaagctaaattgctacaagccgctaaaatactacaagcggctaaaatgcaacaagcggctaaaatactacaagccgctaaaatccttat

SEQ ID NO: 11393 - DNA, 96 bp, Aspergillus novofumigatus
  misc_feature: 843
caatataaattgctacaagctaaattgctacaagccgctaaaatactacaagcggctaaaatgcaacaagcggctaaaatactacaagccgctaaa

SEQ ID NO: 11394 - DNA, 96 bp, Aspergillus novofumigatus
  misc_feature: 840
ctacaagctaaattgctacaagccgctaaaatactacaagcggctaaaatgcaacaagcggctaaaatactacaagccgctaaaatccttatcctc

SEQ ID NO: 11395 - DNA, 96 bp, Aspergillus novofumigatus
  misc_feature: 836
gctacaagctaaattgctacaagccgctaaaatactacaagcggctaaaatgcaacaagcggctaaaatactacaagccgctaaaatccttatcct

SEQ ID NO: 11396 - DNA, 96 bp, Aspergillus novofumigatus
  misc_feature: 836
agctaaattgctacaagccgctaaaatactacaagcggctaaaatgcaacaagcggctaaaatactacaagccgctaaaatccttatcctcggatt

SEQ ID NO: 11397 - DNA, 96 bp, Aspergillus novofumigatus
  misc_feature: 834
ttgctacaagctaaattgctacaagccgctaaaatactacaagcggctaaaatgcaacaagcggctaaaatactacaagccgctaaaatccttatc

SEQ ID NO: 11398 - DNA, 96 bp, Aspergillus novofumigatus
  misc_feature: 834
tacaagctaaattgctacaagccgctaaaatactacaagcggctaaaatgcaacaagcggctaaaatactacaagccgctaaaatccttatcctcg

SEQ ID NO: 11399 - DNA, 96 bp, Aspergillus novofumigatus
  misc_feature: 833
tgctacaagctaaattgctacaagccgctaaaatactacaagcggctaaaatgcaacaagcggctaaaatactacaagccgctaaaatccttatcc

SEQ ID NO: 11400 - DNA, 96 bp, Aspergillus novofumigatus
  misc_feature: 833
aagctaaattgctacaagccgctaaaatactacaagcggctaaaatgcaacaagcggctaaaatactacaagccgctaaaatccttatcctcggat

SEQ ID NO: 11401 - DNA, 96 bp, Aspergillus novofumigatus
  misc_feature: 830
gctaaattgctacaagccgctaaaatactacaagcggctaaaatgcaacaagcggctaaaatactacaagccgctaaaatccttatcctcggatta

SEQ ID NO: 11402 - DNA, 96 bp, Aspergillus novofumigatus
  misc_feature: 826
caagctaaattgctacaagccgctaaaatactacaagcggctaaaatgcaacaagcggctaaaatactacaagccgctaaaatccttatcctcgga

SEQ ID NO: 11403 - DNA, 96 bp, Aspergillus novofumigatus
  misc_feature: 823
ctaaattgctacaagccgctaaaatactacaagcggctaaaatgcaacaagcggctaaaatactacaagccgctaaaatccttatcctcggattat

SEQ ID NO: 11404 - DNA, 96 bp, Aspergillus novofumigatus
  misc_feature: 821
acaagctaaattgctacaagccgctaaaatactacaagcggctaaaatgcaacaagcggctaaaatactacaagccgctaaaatccttatcctcgg

SEQ ID NO: 11405 - DNA, 96 bp, Aspergillus novofumigatus
  misc_feature: 708
ggtgggtatgtgtaagggaagggccgtcggaggcgcgcgcgcggggggtcgaggaggtcgaggtcgaggggagttgggccggggcgcgcgcgctcg

SEQ ID NO: 11406 - DNA, 96 bp, Aspergillus novofumigatus
  misc_feature: 708
gggtatgtgtaagggaagggccgtcggaggcgcgcgcgcggggggtcgaggaggtcgaggtcgaggggagttgggccggggcgcgcgcgctcgtag

SEQ ID NO: 11407 - DNA, 96 bp, Aspergillus novofumigatus
  misc_feature: 707
tgggtatgtgtaagggaagggccgtcggaggcgcgcgcgcggggggtcgaggaggtcgaggtcgaggggagttgggccggggcgcgcgcgctcgta

SEQ ID NO: 11408 - DNA, 96 bp, Aspergillus novofumigatus
  misc_feature: 707
gtgggtatgtgtaagggaagggccgtcggaggcgcgcgcgcggggggtcgaggaggtcgaggtcgaggggagttgggccggggcgcgcgcgctcgt

SEQ ID NO: 11409 - DNA, 96 bp, Aspergillus novofumigatus
  misc_feature: 702
ggtatgtgtaagggaagggccgtcggaggcgcgcgcgcggggggtcgaggaggtcgaggtcgaggggagttgggccggggcgcgcgcgctcgtagc

SEQ ID NO: 11410 - DNA, 96 bp, Aspergillus novofumigatus
  misc_feature: 696
cggtgggtatgtgtaagggaagggccgtcggaggcgcgcgcgcggggggtcgaggaggtcgaggtcgaggggagttgggccggggcgcgcgcgctc

SEQ ID NO: 11411 - DNA, 96 bp, Aspergillus novofumigatus
  misc_feature: 693
gtatgtgtaagggaagggccgtcggaggcgcgcgcgcggggggtcgaggaggtcgaggtcgaggggagttgggccggggcgcgcgcgctcgtagcg

SEQ ID NO: 11412 - DNA, 96 bp, Aspergillus novofumigatus
  misc_feature: 684
gtgtaagggaagggccgtcggaggcgcgcgcgcggggggtcgaggaggtcgaggtcgaggggagttgggccggggcgcgcgcgctcgtagcgagca

SEQ ID NO: 11413 - DNA, 96 bp, Aspergillus novofumigatus
  misc_feature: 681
tgtgtaagggaagggccgtcggaggcgcgcgcgcggggggtcgaggaggtcgaggtcgaggggagttgggccggggcgcgcgcgctcgtagcgagc

SEQ ID NO: 11414 - DNA, 96 bp, Aspergillus novofumigatus
  misc_feature: 676
atgtgtaagggaagggccgtcggaggcgcgcgcgcggggggtcgaggaggtcgaggtcgaggggagttgggccggggcgcgcgcgctcgtagcgag

SEQ ID NO: 11415 - DNA, 96 bp, Aspergillus novofumigatus
  misc_feature: 672
tatgtgtaagggaagggccgtcggaggcgcgcgcgcggggggtcgaggaggtcgaggtcgaggggagttgggccggggcgcgcgcgctcgtagcga

SEQ ID NO: 11416 - DNA, 96 bp, Aspergillus novofumigatus
  misc_feature: 671
tcggtgggtatgtgtaagggaagggccgtcggaggcgcgcgcgcggggggtcgaggaggtcgaggtcgaggggagttgggccggggcgcgcgcgct

SEQ ID NO: 11417 - DNA, 96 bp, Aspergillus novofumigatus
  misc_feature: 662
aagggaagggccgtcggaggcgcgcgcgcggggggtcgaggaggtcgaggtcgaggggagttgggccggggcgcgcgcgctcgtagcgagcagaga

SEQ ID NO: 11418 - DNA, 96 bp, Aspergillus novofumigatus
  misc_feature: 661
tgtaagggaagggccgtcggaggcgcgcgcgcggggggtcgaggaggtcgaggtcgaggggagttgggccggggcgcgcgcgctcgtagcgagcag

SEQ ID NO: 11419 - DNA, 96 bp, Aspergillus novofumigatus
  misc_feature: 659
gtaagggaagggccgtcggaggcgcgcgcgcggggggtcgaggaggtcgaggtcgaggggagttgggccggggcgcgcgcgctcgtagcgagcaga

SEQ ID NO: 11420 - DNA, 96 bp, Aspergillus novofumigatus
  misc_feature: 659
taagggaagggccgtcggaggcgcgcgcgcggggggtcgaggaggtcgaggtcgaggggagttgggccggggcgcgcgcgctcgtagcgagcagag

SEQ ID NO: 11421 - DNA, 96 bp, Aspergillus novofumigatus
  misc_feature: 648
agggaagggccgtcggaggcgcgcgcgcggggggtcgaggaggtcgaggtcgaggggagttgggccggggcgcgcgcgctcgtagcgagcagagag

SEQ ID NO: 11422 - DNA, 96 bp, Aspergillus novofumigatus
  misc_feature: 645
ggaggcgcgcgcgcggggggtcgaggaggtcgaggtcgaggggagttgggccggggcgcgcgcgctcgtagcgagcagagagccgcgcgcgcgcgc

SEQ ID NO: 11423 - DNA, 96 bp, Aspergillus novofumigatus
  misc_feature: 637
gggaagggccgtcggaggcgcgcgcgcggggggtcgaggaggtcgaggtcgaggggagttgggccggggcgcgcgcgctcgtagcgagcagagagc

SEQ ID NO: 11424 - DNA, 96 bp, Aspergillus novofumigatus
  misc_feature: 629
ggcgcgcgcgcggggggtcgaggaggtcgaggtcgaggggagttgggccggggcgcgcgcgctcgtagcgagcagagagccgcgcgcgcgcgcacc

SEQ ID NO: 11425 - DNA, 96 bp, Aspergillus novofumigatus
  misc_feature: 627
gggccgtcggaggcgcgcgcgcggggggtcgaggaggtcgaggtcgaggggagttgggccggggcgcgcgcgctcgtagcgagcagagagccgcgc

SEQ ID NO: 11426 - DNA, 96 bp, Aspergillus novofumigatus
  misc_feature: 622
gaagggccgtcggaggcgcgcgcgcggggggtcgaggaggtcgaggtcgaggggagttgggccggggcgcgcgcgctcgtagcgagcagagagccg

SEQ ID NO: 11427 - DNA, 96 bp, Aspergillus novofumigatus
  misc_feature: 619
ggaagggccgtcggaggcgcgcgcgcggggggtcgaggaggtcgaggtcgaggggagttgggccggggcgcgcgcgctcgtagcgagcagagagcc

SEQ ID NO: 11428 - DNA, 96 bp, Aspergillus novofumigatus
  misc_feature: 618
ggccgtcggaggcgcgcgcgcggggggtcgaggaggtcgaggtcgaggggagttgggccggggcgcgcgcgctcgtagcgagcagagagccgcgcg

SEQ ID NO: 11429 - DNA, 96 bp, Aspergillus novofumigatus
  misc_feature: 617
cggaggcgcgcgcgcggggggtcgaggaggtcgaggtcgaggggagttgggccggggcgcgcgcgctcgtagcgagcagagagccgcgcgcgcgcg

SEQ ID NO: 11430 - DNA, 96 bp, Aspergillus novofumigatus
  misc_feature: 615
gcgcgcgcgcggggggtcgaggaggtcgaggtcgaggggagttgggccggggcgcgcgcgctcgtagcgagcagagagccgcgcgcgcgcgcaccg

SEQ ID NO: 11431 - DNA, 96 bp, Aspergillus novofumigatus
  misc_feature: 613
aagggccgtcggaggcgcgcgcgcggggggtcgaggaggtcgaggtcgaggggagttgggccggggcgcgcgcgctcgtagcgagcagagagccgc

SEQ ID NO: 11432 - DNA, 96 bp, Aspergillus novofumigatus
  misc_feature: 612
tatttatacgaaactatatacatgtataatttatatatatatataaatatatatatatattatttcacttgtatattaattgcattaaattattat

SEQ ID NO: 11433 - DNA, 96 bp, Aspergillus novofumigatus
  misc_feature: 611
atttatacgaaactatatacatgtataatttatatatatatataaatatatatatatattatttcacttgtatattaattgcattaaattattata

SEQ ID NO: 11434 - DNA, 96 bp, Aspergillus novofumigatus
  misc_feature: 610
agggccgtcggaggcgcgcgcgcggggggtcgaggaggtcgaggtcgaggggagttgggccggggcgcgcgcgctcgtagcgagcagagagccgcg

SEQ ID NO: 11435 - DNA, 96 bp, Aspergillus novofumigatus
  misc_feature: 609
tttatacgaaactatatacatgtataatttatatatatatataaatatatatatatattatttcacttgtatattaattgcattaaattattatat

SEQ ID NO: 11436 - DNA, 96 bp, Aspergillus novofumigatus
  misc_feature: 607
gaggcgcgcgcgcggggggtcgaggaggtcgaggtcgaggggagttgggccggggcgcgcgcgctcgtagcgagcagagagccgcgcgcgcgcgca

SEQ ID NO: 11437 - DNA, 96 bp, Aspergillus novofumigatus
  misc_feature: 607
ccgtcggaggcgcgcgcgcggggggtcgaggaggtcgaggtcgaggggagttgggccggggcgcgcgcgctcgtagcgagcagagagccgcgcgcg

SEQ ID NO: 11438 - DNA, 96 bp, Aspergillus novofumigatus
  misc_feature: 605
gccgtcggaggcgcgcgcgcggggggtcgaggaggtcgaggtcgaggggagttgggccggggcgcgcgcgctcgtagcgagcagagagccgcgcgc

SEQ ID NO: 11439 - DNA, 96 bp, Aspergillus novofumigatus
  misc_feature: 602
aggcgcgcgcgcggggggtcgaggaggtcgaggtcgaggggagttgggccggggcgcgcgcgctcgtagcgagcagagagccgcgcgcgcgcgcac

SEQ ID NO: 11440 - DNA, 96 bp, Aspergillus novofumigatus
  misc_feature: 599
gtcggaggcgcgcgcgcggggggtcgaggaggtcgaggtcgaggggagttgggccggggcgcgcgcgctcgtagcgagcagagagccgcgcgcgcg

SEQ ID NO: 11441 - DNA, 96 bp, Aspergillus novofumigatus
  misc_feature: 590
cgtcggaggcgcgcgcgcggggggtcgaggaggtcgaggtcgaggggagttgggccggggcgcgcgcgctcgtagcgagcagagagccgcgcgcgc

SEQ ID NO: 11442 - DNA, 96 bp, Aspergillus novofumigatus
  misc_feature: 582
gcgcgcgcggggggtcgaggaggtcgaggtcgaggggagttgggccggggcgcgcgcgctcgtagcgagcagagagccgcgcgcgcgcgcaccgtc

SEQ ID NO: 11443 - DNA, 96 bp, Aspergillus novofumigatus
  misc_feature: 578
cgcgcgcgcggggggtcgaggaggtcgaggtcgaggggagttgggccggggcgcgcgcgctcgtagcgagcagagagccgcgcgcgcgcgcaccgt

SEQ ID NO: 11444 - DNA, 96 bp, Aspergillus novofumigatus
  misc_feature: 575
tcggaggcgcgcgcgcggggggtcgaggaggtcgaggtcgaggggagttgggccggggcgcgcgcgctcgtagcgagcagagagccgcgcgcgcgc

SEQ ID NO: 11445 - DNA, 96 bp, Aspergillus novofumigatus
  misc_feature: 550
gcggggggccggggtccggcgcggacgggttggtggagggtgggccggtgaccagttggcggggggcccttgggggggcagaccggcaggcagggg

SEQ ID NO: 11446 - DNA, 96 bp, Aspergillus novofumigatus
  misc_feature: 537
cgcggggggccggggtccggcgcggacgggttggtggagggtgggccggtgaccagttggcggggggcccttgggggggcagaccggcaggcaggg

SEQ ID NO: 11447 - DNA, 96 bp, Aspergillus novofumigatus
  misc_feature: 532
cgccgcgcggggggccggggtccggcgcggacgggttggtggagggtgggccggtgaccagttggcggggggcccttgggggggcagaccggcagg

SEQ ID NO: 11448 - DNA, 96 bp, Aspergillus novofumigatus
  misc_feature: 528
gccgcgcggggggccggggtccggcgcggacgggttggtggagggtgggccggtgaccagttggcggggggcccttgggggggcagaccggcaggc

SEQ ID NO: 11449 - DNA, 96 bp, Aspergillus novofumigatus
  misc_feature: 526
gcgcggggggccggggtccggcgcggacgggttggtggagggtgggccggtgaccagttggcggggggcccttgggggggcagaccggcaggcagg

SEQ ID NO: 11450 - DNA, 96 bp, Aspergillus novofumigatus
  misc_feature: 519
gcgccgcgcggggggccggggtccggcgcggacgggttggtggagggtgggccggtgaccagttggcggggggcccttgggggggcagaccggcag

SEQ ID NO: 11451 - DNA, 96 bp, Aspergillus novofumigatus
  misc_feature: 514
ggcgccgcgcggggggccggggtccggcgcggacgggttggtggagggtgggccggtgaccagttggcggggggcccttgggggggcagaccggca

SEQ ID NO: 11452 - DNA, 96 bp, Aspergillus novofumigatus
  misc_feature: 513
aggcgccgcgcggggggccggggtccggcgcggacgggttggtggagggtgggccggtgaccagttggcggggggcccttgggggggcagaccggc

SEQ ID NO: 11453 - DNA, 96 bp, Aspergillus novofumigatus
  misc_feature: 510
cgcgcggggggccggggtccggcgcggacgggttggtggagggtgggccggtgaccagttggcggggggcccttgggggggcagaccggcaggcag

SEQ ID NO: 11454 - DNA, 96 bp, Aspergillus novofumigatus
  misc_feature: 503
ccgcgcggggggccggggtccggcgcggacgggttggtggagggtgggccggtgaccagttggcggggggcccttgggggggcagaccggcaggca

SEQ ID NO: 11455 - DNA, 96 bp, Aspergillus novofumigatus
  misc_feature: 502
gaggcgccgcgcggggggccggggtccggcgcggacgggttggtggagggtgggccggtgaccagttggcggggggcccttgggggggcagaccgg

SEQ ID NO: 11456 - DNA, 96 bp, Aspergillus novofumigatus
  misc_feature: 495
ggaggcgccgcgcggggggccggggtccggcgcggacgggttggtggagggtgggccggtgaccagttggcggggggcccttgggggggcagaccg

SEQ ID NO: 11457 - DNA, 96 bp, Aspergillus novofumigatus
  misc_feature: 489
tatatatatataattaggtatcagggggatatcaccatagttaggagagagatagttagtaaggtagataataagattaatagtatagtagatagt

SEQ ID NO: 11458 - DNA, 96 bp, Aspergillus novofumigatus
  misc_feature: 488
gggaggcgccgcgcggggggccggggtccggcgcggacgggttggtggagggtgggccggtgaccagttggcggggggcccttgggggggcagacc

SEQ ID NO: 11459 - DNA, 96 bp, Aspergillus novofumigatus
  misc_feature: 465
tgggaggcgccgcgcggggggccggggtccggcgcggacgggttggtggagggtgggccggtgaccagttggcggggggcccttgggggggcagac

SEQ ID NO: 11460 - DNA, 96 bp, Aspergillus novofumigatus
  misc_feature: 451
gtgggaggcgccgcgcggggggccggggtccggcgcggacgggttggtggagggtgggccggtgaccagttggcggggggcccttgggggggcaga

SEQ ID NO: 11461 - DNA, 96 bp, Aspergillus novofumigatus
  misc_feature: 451
ggtgggaggcgccgcgcggggggccggggtccggcgcggacgggttggtggagggtgggccggtgaccagttggcggggggcccttgggggggcag

SEQ ID NO: 11462 - DNA, 96 bp, Aspergillus novofumigatus
  misc_feature: 442
gcggtgggaggcgccgcgcggggggccggggtccggcgcggacgggttggtggagggtgggccggtgaccagttggcggggggcccttgggggggc

SEQ ID NO: 11463 - DNA, 96 bp, Aspergillus novofumigatus
  misc_feature: 442
cgcggtgggaggcgccgcgcggggggccggggtccggcgcggacgggttggtggagggtgggccggtgaccagttggcggggggcccttggggggg

SEQ ID NO: 11464 - DNA, 96 bp, Aspergillus novofumigatus
  misc_feature: 437
cggtgggaggcgccgcgcggggggccggggtccggcgcggacgggttggtggagggtgggccggtgaccagttggcggggggcccttgggggggca

SEQ ID NO: 11465 - DNA, 96 bp, Aspergillus novofumigatus
  misc_feature: 431
gcgcggtgggaggcgccgcgcggggggccggggtccggcgcggacgggttggtggagggtgggccggtgaccagttggcggggggcccttgggggg

SEQ ID NO: 11466 - DNA, 96 bp, Aspergillus novofumigatus
  misc_feature: 425
ggggggccggggtccggcgcggacgggttggtggagggtgggccggtgaccagttggcggggggcccttgggggggcagaccggcaggcaggggcg

SEQ ID NO: 11467 - DNA, 96 bp, Aspergillus novofumigatus
  misc_feature: 397
cggggggccggggtccggcgcggacgggttggtggagggtgggccggtgaccagttggcggggggcccttgggggggcagaccggcaggcaggggc

SEQ ID NO: 11468 - DNA, 96 bp, Aspergillus novofumigatus
  misc_feature: 366
cttactctacttactctacttactctacttactctacttactctacttactctacttactctacttactctacttactctacttactctacttact

SEQ ID NO: 11469 - DNA, 96 bp, Aspergillus novofumigatus
  misc_feature: 361
ctacttaaacataatccgaggataaggattttagcggcttgtagtattttagccgcttgttgcattttagccgcttgtagtattttagcggctttt

SEQ ID NO: 11470 - DNA, 96 bp, Aspergillus novofumigatus
  misc_feature: 356
acttactctacttactctacttactctacttactctacttactctacttactctacttactctacttactctacttactctacttactctacttac

SEQ ID NO: 11471 - DNA, 96 bp, Aspergillus novofumigatus
  misc_feature: 353
tacttactctacttactctacttactctacttactctacttactctacttactctacttactctacttactctacttactctacttactctactta

SEQ ID NO: 11472 - DNA, 96 bp, Aspergillus novofumigatus
  misc_feature: 353
tactctacttactctacttactctacttactctacttactctacttactctacttactctacttactctacttactctacttactctacttactct

SEQ ID NO: 11473 - DNA, 96 bp, Aspergillus novofumigatus
  misc_feature: 353
actacttaaacataatccgaggataaggattttagcggcttgtagtattttagccgcttgttgcattttagccgcttgtagtattttagcggcttt

SEQ ID NO: 11474 - DNA, 96 bp, Aspergillus novofumigatus
  misc_feature: 350
ctacttactctacttactctacttactctacttactctacttactctacttactctacttactctacttactctacttactctacttactctactt

SEQ ID NO: 11475 - DNA, 96 bp, Aspergillus novofumigatus
  misc_feature: 349
ttactctacttactctacttactctacttactctacttactctacttactctacttactctacttactctacttactctacttactctacttactc

SEQ ID NO: 11476 - DNA, 96 bp, Aspergillus novofumigatus
  misc_feature: 349
ctctacttactctacttactctacttactctacttactctacttactctacttactctacttactctacttactctacttactctacttactctac

SEQ ID NO: 11477 - DNA, 96 bp, Aspergillus novofumigatus
  misc_feature: 348
tctacttactctacttactctacttactctacttactctacttactctacttactctacttactctacttactctacttactctacttactctact

SEQ ID NO: 11478 - DNA, 96 bp, Aspergillus novofumigatus
  misc_feature: 347
actctacttactctacttactctacttactctacttactctacttactctacttactctacttactctacttactctacttactctacttactcta

SEQ ID NO: 11479 - DNA, 96 bp, Aspergillus novofumigatus
  misc_feature: 338
tgatatccccctgatacctaattatatatatatatatggatgtataaaccatggatttggatatttatataaactaaatatataatatatatctct

SEQ ID NO: 11480 - DNA, 96 bp, Aspergillus novofumigatus
  misc_feature: 338
atggtgatatccccctgatacctaattatatatatatatatggatgtataaaccatggatttggatatttatataaactaaatatataatatatat

SEQ ID NO: 11481 - DNA, 96 bp, Aspergillus novofumigatus
  misc_feature: 337
tggtgatatccccctgatacctaattatatatatatatatggatgtataaaccatggatttggatatttatataaactaaatatataatatatatc

SEQ ID NO: 11482 - DNA, 96 bp, Aspergillus novofumigatus
  misc_feature: 336
tatggtgatatccccctgatacctaattatatatatatatatggatgtataaaccatggatttggatatttatataaactaaatatataatatata

SEQ ID NO: 11483 - DNA, 96 bp, Aspergillus novofumigatus
  misc_feature: 335
tgttgacctcactatctactatactattaatcttattatctaccttactaactatctctctcctaactatggtgatatccccctgatacctaatta

SEQ ID NO: 11484 - DNA, 96 bp, Aspergillus novofumigatus
  misc_feature: 335
tattaatatattaaggtaagggttagaattattaaagagaataaggatttaatagagagatagatagaataagaggagagagttagagataaagag

SEQ ID NO: 11485 - DNA, 96 bp, Aspergillus novofumigatus
  misc_feature: 335
tattaaccttactgttgacctcactatctactatactattaatcttattatctaccttactaactatctctctcctaactatggtgatatccccct

SEQ ID NO: 11486 - DNA, 96 bp, Aspergillus novofumigatus
  misc_feature: 335
ggtgatatccccctgatacctaattatatatatatatatggatgtataaaccatggatttggatatttatataaactaaatatataatatatatct

SEQ ID NO: 11487 - DNA, 96 bp, Aspergillus novofumigatus
  misc_feature: 335
ctgttgacctcactatctactatactattaatcttattatctaccttactaactatctctctcctaactatggtgatatccccctgatacctaatt

SEQ ID NO: 11488 - DNA, 96 bp, Aspergillus novofumigatus
  misc_feature: 334
gtgatatccccctgatacctaattatatatatatatatggatgtataaaccatggatttggatatttatataaactaaatatataatatatatctc

SEQ ID NO: 11489 - DNA, 96 bp, Aspergillus novofumigatus
  misc_feature: 334
actgttgacctcactatctactatactattaatcttattatctaccttactaactatctctctcctaactatggtgatatccccctgatacctaat

SEQ ID NO: 11490 - DNA, 96 bp, Aspergillus novofumigatus
  misc_feature: 332
ttactgttgacctcactatctactatactattaatcttattatctaccttactaactatctctctcctaactatggtgatatccccctgataccta

SEQ ID NO: 11491 - DNA, 96 bp, Aspergillus novofumigatus
  misc_feature: 331
gttgacctcactatctactatactattaatcttattatctaccttactaactatctctctcctaactatggtgatatccccctgatacctaattat

SEQ ID NO: 11492 - DNA, 96 bp, Aspergillus novofumigatus
  misc_feature: 331
atatccccctgatacctaattatatatatatatatggatgtataaaccatggatttggatatttatataaactaaatatataatatatatctctgc

SEQ ID NO: 11493 - DNA, 96 bp, Aspergillus novofumigatus
  misc_feature: 331
gatatccccctgatacctaattatatatatatatatggatgtataaaccatggatttggatatttatataaactaaatatataatatatatctctg

SEQ ID NO: 11494 - DNA, 96 bp, Aspergillus novofumigatus
  misc_feature: 329
tactgttgacctcactatctactatactattaatcttattatctaccttactaactatctctctcctaactatggtgatatccccctgatacctaa

SEQ ID NO: 11495 - DNA, 96 bp, Aspergillus novofumigatus
  misc_feature: 329
tatccccctgatacctaattatatatatatatatggatgtataaaccatggatttggatatttatataaactaaatatataatatatatctctgct

SEQ ID NO: 11496 - DNA, 96 bp, Aspergillus novofumigatus
  misc_feature: 329
accataatagcagcagagatatatattatatatttagtttatataaatatccaaatccatggtttatacatccatatatatatatataattaggta

SEQ ID NO: 11497 - DNA, 96 bp, Aspergillus novofumigatus
  misc_feature: 328
attaatatattaaggtaagggttagaattattaaagagaataaggatttaatagagagatagatagaataagaggagagagttagagataaagagg

SEQ ID NO: 11498 - DNA, 96 bp, Aspergillus novofumigatus
  misc_feature: 327
ttattaatatattaaggtaagggttagaattattaaagagaataaggatttaatagagagatagatagaataagaggagagagttagagataaaga

SEQ ID NO: 11499 - DNA, 96 bp, Aspergillus novofumigatus
  misc_feature: 327
tgatacctaattatatatatatatatggatgtataaaccatggatttggatatttatataaactaaatatataatatatatctctgctgctattat

SEQ ID NO: 11500 - DNA, 96 bp, Aspergillus novofumigatus
  misc_feature: 327
cccctgatacctaattatatatatatatatggatgtataaaccatggatttggatatttatataaactaaatatataatatatatctctgctgcta

SEQ ID NO: 11501 - DNA, 96 bp, Aspergillus novofumigatus
  misc_feature: 326
aattattaatatattaaggtaagggttagaattattaaagagaataaggatttaatagagagatagatagaataagaggagagagttagagataaa

SEQ ID NO: 11502 - DNA, 96 bp, Aspergillus novofumigatus
  misc_feature: 326
cttactgttgacctcactatctactatactattaatcttattatctaccttactaactatctctctcctaactatggtgatatccccctgatacct

SEQ ID NO: 11503 - DNA, 96 bp, Aspergillus novofumigatus
  misc_feature: 325
tccccctgatacctaattatatatatatatatggatgtataaaccatggatttggatatttatataaactaaatatataatatatatctctgctgc

SEQ ID NO: 11504 - DNA, 96 bp, Aspergillus novofumigatus
  misc_feature: 325
ctgatacctaattatatatatatatatggatgtataaaccatggatttggatatttatataaactaaatatataatatatatctctgctgctatta

SEQ ID NO: 11505 - DNA, 96 bp, Aspergillus novofumigatus
  misc_feature: 325
attattaatatattaaggtaagggttagaattattaaagagaataaggatttaatagagagatagatagaataagaggagagagttagagataaag

SEQ ID NO: 11506 - DNA, 96 bp, Aspergillus novofumigatus
  misc_feature: 325
attaaccttactgttgacctcactatctactatactattaatcttattatctaccttactaactatctctctcctaactatggtgatatccccctg

SEQ ID NO: 11507 - DNA, 96 bp, Aspergillus novofumigatus
  misc_feature: 324
cctgatacctaattatatatatatatatggatgtataaaccatggatttggatatttatataaactaaatatataatatatatctctgctgctatt

SEQ ID NO: 11508 - DNA, 96 bp, Aspergillus novofumigatus
  misc_feature: 324
ccccctgatacctaattatatatatatatatggatgtataaaccatggatttggatatttatataaactaaatatataatatatatctctgctgct

SEQ ID NO: 11509 - DNA, 96 bp, Aspergillus novofumigatus
  misc_feature: 323
ttaatatattaaggtaagggttagaattattaaagagaataaggatttaatagagagatagatagaataagaggagagagttagagataaagaggg

SEQ ID NO: 11510 - DNA, 96 bp, Aspergillus novofumigatus
  misc_feature: 323
ccttactgttgacctcactatctactatactattaatcttattatctaccttactaactatctctctcctaactatggtgatatccccctgatacc

SEQ ID NO: 11511 - DNA, 96 bp, Aspergillus novofumigatus
  misc_feature: 323
ccctgatacctaattatatatatatatatggatgtataaaccatggatttggatatttatataaactaaatatataatatatatctctgctgctat

SEQ ID NO: 11512 - DNA, 96 bp, Aspergillus novofumigatus
  misc_feature: 322
aaccttactgttgacctcactatctactatactattaatcttattatctaccttactaactatctctctcctaactatggtgatatccccctgata

SEQ ID NO: 11513 - DNA, 96 bp, Aspergillus novofumigatus
  misc_feature: 322
taccataatagcagcagagatatatattatatatttagtttatataaatatccaaatccatggtttatacatccatatatatatatataattaggt

SEQ ID NO: 11514 - DNA, 96 bp, Aspergillus novofumigatus
  misc_feature: 322
ccataatagcagcagagatatatattatatatttagtttatataaatatccaaatccatggtttatacatccatatatatatatataattaggtat

SEQ ID NO: 11515 - DNA, 96 bp, Aspergillus novofumigatus
  misc_feature: 321
taaccttactgttgacctcactatctactatactattaatcttattatctaccttactaactatctctctcctaactatggtgatatccccctgat

SEQ ID NO: 11516 - DNA, 96 bp, Aspergillus novofumigatus
  misc_feature: 321
gataccataatagcagcagagatatatattatatatttagtttatataaatatccaaatccatggtttatacatccatatatatatatataattag

SEQ ID NO: 11517 - DNA, 96 bp, Aspergillus novofumigatus
  misc_feature: 321
atccccctgatacctaattatatatatatatatggatgtataaaccatggatttggatatttatataaactaaatatataatatatatctctgctg

SEQ ID NO: 11518 - DNA, 96 bp, Aspergillus novofumigatus
  misc_feature: 320
accttactgttgacctcactatctactatactattaatcttattatctaccttactaactatctctctcctaactatggtgatatccccctgatac

SEQ ID NO: 11519 - DNA, 96 bp, Aspergillus novofumigatus
  misc_feature: 320
gatacctaattatatatatatatatggatgtataaaccatggatttggatatttatataaactaaatatataatatatatctctgctgctattatg

SEQ ID NO: 11520 - DNA, 96 bp, Aspergillus novofumigatus
  misc_feature: 318
ttaaccttactgttgacctcactatctactatactattaatcttattatctaccttactaactatctctctcctaactatggtgatatccccctga

SEQ ID NO: 11521 - DNA, 96 bp, Aspergillus novofumigatus
  misc_feature: 318
ataccataatagcagcagagatatatattatatatttagtttatataaatatccaaatccatggtttatacatccatatatatatatataattagg

SEQ ID NO: 11522 - DNA, 96 bp, Aspergillus novofumigatus
  misc_feature: 310
taatatattaaggtaagggttagaattattaaagagaataaggatttaatagagagatagatagaataagaggagagagttagagataaagagggt

SEQ ID NO: 11523 - DNA, 96 bp, Aspergillus novofumigatus
  misc_feature: 308
tattaaggtaagggttagaattattaaagagaataaggatttaatagagagatagatagaataagaggagagagttagagataaagagggtattaa

SEQ ID NO: 11524 - DNA, 96 bp, Aspergillus novofumigatus
  misc_feature: 308
tatattaaggtaagggttagaattattaaagagaataaggatttaatagagagatagatagaataagaggagagagttagagataaagagggtatt

SEQ ID NO: 11525 - DNA, 96 bp, Aspergillus novofumigatus
  misc_feature: 308
gttagaattattaaagagaataaggatttaatagagagatagatagaataagaggagagagttagagataaagagggtattaagtaataggaattt

SEQ ID NO: 11526 - DNA, 96 bp, Aspergillus novofumigatus
  misc_feature: 307
aatatattaaggtaagggttagaattattaaagagaataaggatttaatagagagatagatagaataagaggagagagttagagataaagagggta

SEQ ID NO: 11527 - DNA, 96 bp, Aspergillus novofumigatus
  misc_feature: 307
atattaaggtaagggttagaattattaaagagaataaggatttaatagagagatagatagaataagaggagagagttagagataaagagggtatta

SEQ ID NO: 11528 - DNA, 96 bp, Aspergillus novofumigatus
  misc_feature: 307
atatattaaggtaagggttagaattattaaagagaataaggatttaatagagagatagatagaataagaggagagagttagagataaagagggtat

SEQ ID NO: 11529 - DNA, 96 bp, Aspergillus novofumigatus
  misc_feature: 306
aactttaggaagcccctatacccccctaattaagcatatttcagcttataggataggtaatatataatatttatataataagttattatattaata

SEQ ID NO: 11530 - DNA, 96 bp, Aspergillus novofumigatus
  misc_feature: 305
agggttagaattattaaagagaataaggatttaatagagagatagatagaataagaggagagagttagagataaagagggtattaagtaataggaa

SEQ ID NO: 11531 - DNA, 96 bp, Aspergillus novofumigatus
  misc_feature: 305
gggttagaattattaaagagaataaggatttaatagagagatagatagaataagaggagagagttagagataaagagggtattaagtaataggaat

SEQ ID NO: 11532 - DNA, 96 bp, Aspergillus novofumigatus
  misc_feature: 304
ggttagaattattaaagagaataaggatttaatagagagatagatagaataagaggagagagttagagataaagagggtattaagtaataggaatt

SEQ ID NO: 11533 - DNA, 96 bp, Aspergillus novofumigatus
  misc_feature: 303
ttagaattattaaagagaataaggatttaatagagagatagatagaataagaggagagagttagagataaagagggtattaagtaataggaattta

SEQ ID NO: 11534 - DNA, 96 bp, Aspergillus novofumigatus
  misc_feature: 302
ctttaggaagcccctatacccccctaattaagcatatttcagcttataggataggtaatatataatatttatataataagttattatattaataaa

SEQ ID NO: 11535 - DNA, 96 bp, Aspergillus novofumigatus
  misc_feature: 302
aaggtaagggttagaattattaaagagaataaggatttaatagagagatagatagaataagaggagagagttagagataaagagggtattaagtaa

SEQ ID NO: 11536 - DNA, 96 bp, Aspergillus novofumigatus
  misc_feature: 301
actttaggaagcccctatacccccctaattaagcatatttcagcttataggataggtaatatataatatttatataataagttattatattaataa

SEQ ID NO: 11537 - DNA, 96 bp, Aspergillus novofumigatus
  misc_feature: 301
aagggttagaattattaaagagaataaggatttaatagagagatagatagaataagaggagagagttagagataaagagggtattaagtaatagga

SEQ ID NO: 11538 - DNA, 96 bp, Aspergillus novofumigatus
  misc_feature: 301
attaaggtaagggttagaattattaaagagaataaggatttaatagagagatagatagaataagaggagagagttagagataaagagggtattaag

SEQ ID NO: 11539 - DNA, 96 bp, Aspergillus novofumigatus
  misc_feature: 300
ttaaggtaagggttagaattattaaagagaataaggatttaatagagagatagatagaataagaggagagagttagagataaagagggtattaagt

SEQ ID NO: 11540 - DNA, 96 bp, Aspergillus novofumigatus
  misc_feature: 300
tagaattattaaagagaataaggatttaatagagagatagatagaataagaggagagagttagagataaagagggtattaagtaataggaatttaa

SEQ ID NO: 11541 - DNA, 96 bp, Aspergillus novofumigatus
  misc_feature: 300
taaggtaagggttagaattattaaagagaataaggatttaatagagagatagatagaataagaggagagagttagagataaagagggtattaagta

SEQ ID NO: 11542 - DNA, 96 bp, Aspergillus novofumigatus
  misc_feature: 299
ggtaagggttagaattattaaagagaataaggatttaatagagagatagatagaataagaggagagagttagagataaagagggtattaagtaata

SEQ ID NO: 11543 - DNA, 96 bp, Aspergillus novofumigatus
  misc_feature: 298
tacttaaacataatccgaggataaggattttagcggcttgtagtattttagccgcttgttgcattttagccgcttgtagtattttagcggcttttt

SEQ ID NO: 11544 - DNA, 96 bp, Aspergillus novofumigatus
  misc_feature: 297
tttaggaagcccctatacccccctaattaagcatatttcagcttataggataggtaatatataatatttatataataagttattatattaataaat

SEQ ID NO: 11545 - DNA, 96 bp, Aspergillus novofumigatus
  misc_feature: 296
agaattattaaagagaataaggatttaatagagagatagatagaataagaggagagagttagagataaagagggtattaagtaataggaatttaag

SEQ ID NO: 11546 - DNA, 96 bp, Aspergillus novofumigatus
  misc_feature: 296
aggtaagggttagaattattaaagagaataaggatttaatagagagatagatagaataagaggagagagttagagataaagagggtattaagtaat

SEQ ID NO: 11547 - DNA, 96 bp, Aspergillus novofumigatus
  misc_feature: 295
ttaggaagcccctatacccccctaattaagcatatttcagcttataggataggtaatatataatatttatataataagttattatattaataaata

SEQ ID NO: 11548 - DNA, 96 bp, Aspergillus novofumigatus
  misc_feature: 295
atcaagtaatagatatatattaggagatcaaggttaattaggattaatatattaagtaaataaatatatatattttaggataccataatagcagca

SEQ ID NO: 11549 - DNA, 96 bp, Aspergillus novofumigatus
  misc_feature: 295
tccatatatcaagtaatagatatatattaggagatcaaggttaattaggattaatatattaagtaaataaatatatatattttaggataccataat

SEQ ID NO: 11550 - DNA, 96 bp, Aspergillus novofumigatus
  misc_feature: 295
tatcaagtaatagatatatattaggagatcaaggttaattaggattaatatattaagtaaataaatatatatattttaggataccataatagcagc

SEQ ID NO: 11551 - DNA, 96 bp, Aspergillus novofumigatus
  misc_feature: 295
atatcaagtaatagatatatattaggagatcaaggttaattaggattaatatattaagtaaataaatatatatattttaggataccataatagcag

SEQ ID NO: 11552 - DNA, 96 bp, Aspergillus novofumigatus
  misc_feature: 294
aggaagcccctatacccccctaattaagcatatttcagcttataggataggtaatatataatatttatataataagttattatattaataaataaa

SEQ ID NO: 11553 - DNA, 96 bp, Aspergillus novofumigatus
  misc_feature: 294
taggaagcccctatacccccctaattaagcatatttcagcttataggataggtaatatataatatttatataataagttattatattaataaataa

SEQ ID NO: 11554 - DNA, 96 bp, Aspergillus novofumigatus
  misc_feature: 294
atccatatatcaagtaatagatatatattaggagatcaaggttaattaggattaatatattaagtaaataaatatatatattttaggataccataa

SEQ ID NO: 11555 - DNA, 96 bp, Aspergillus novofumigatus
  misc_feature: 294
gaattattaaagagaataaggatttaatagagagatagatagaataagaggagagagttagagataaagagggtattaagtaataggaatttaaga

SEQ ID NO: 11556 - DNA, 96 bp, Aspergillus novofumigatus
  misc_feature: 294
tatatttctaccccttattcttatcttaaacttactaacccttactctattacttatccttccttactttattctccttactacctcttaccttct

SEQ ID NO: 11557 - DNA, 96 bp, Aspergillus novofumigatus
  misc_feature: 294
attattaaagagaataaggatttaatagagagatagatagaataagaggagagagttagagataaagagggtattaagtaataggaatttaagaat

SEQ ID NO: 11558 - DNA, 96 bp, Aspergillus novofumigatus
  misc_feature: 293
aattattaaagagaataaggatttaatagagagatagatagaataagaggagagagttagagataaagagggtattaagtaataggaatttaagaa

SEQ ID NO: 11559 - DNA, 96 bp, Aspergillus novofumigatus
  misc_feature: 292
tatatcaagtaatagatatatattaggagatcaaggttaattaggattaatatattaagtaaataaatatatatattttaggataccataatagca

SEQ ID NO: 11560 - DNA, 96 bp, Aspergillus novofumigatus
  misc_feature: 292
gtaagggttagaattattaaagagaataaggatttaatagagagatagatagaataagaggagagagttagagataaagagggtattaagtaatag

SEQ ID NO: 11561 - DNA, 96 bp, Aspergillus novofumigatus
  misc_feature: 292
catatatcaagtaatagatatatattaggagatcaaggttaattaggattaatatattaagtaaataaatatatatattttaggataccataatag

SEQ ID NO: 11562 - DNA, 96 bp, Aspergillus novofumigatus
  misc_feature: 291
atatatcaagtaatagatatatattaggagatcaaggttaattaggattaatatattaagtaaataaatatatatattttaggataccataatagc

SEQ ID NO: 11563 - DNA, 96 bp, Aspergillus novofumigatus
  misc_feature: 290
tctctatcttatatatttctaccccttattcttatcttaaacttactaacccttactctattacttatccttccttactttattctccttactacc

SEQ ID NO: 11564 - DNA, 96 bp, Aspergillus novofumigatus
  misc_feature: 290
atatatttctaccccttattcttatcttaaacttactaacccttactctattacttatccttccttactttattctccttactacctcttaccttc

SEQ ID NO: 11565 - DNA, 96 bp, Aspergillus novofumigatus
  misc_feature: 289
ggaagcccctatacccccctaattaagcatatttcagcttataggataggtaatatataatatttatataataagttattatattaataaataaaa

SEQ ID NO: 11566 - DNA, 96 bp, Aspergillus novofumigatus
  misc_feature: 289
taagggttagaattattaaagagaataaggatttaatagagagatagatagaataagaggagagagttagagataaagagggtattaagtaatagg

SEQ ID NO: 11567 - DNA, 96 bp, Aspergillus novofumigatus
  misc_feature: 287
tatatatttctaccccttattcttatcttaaacttactaacccttactctattacttatccttccttactttattctccttactacctcttacctt

SEQ ID NO: 11568 - DNA, 96 bp, Aspergillus novofumigatus
  misc_feature: 287
ctctatcttatatatttctaccccttattcttatcttaaacttactaacccttactctattacttatccttccttactttattctccttactacct

SEQ ID NO: 11569 - DNA, 96 bp, Aspergillus novofumigatus
  misc_feature: 286
tctatcttatatatttctaccccttattcttatcttaaacttactaacccttactctattacttatccttccttactttattctccttactacctc

SEQ ID NO: 11570 - DNA, 96 bp, Aspergillus novofumigatus
  misc_feature: 286
tcaagtaatagatatatattaggagatcaaggttaattaggattaatatattaagtaaataaatatatatattttaggataccataatagcagcag

SEQ ID NO: 11571 - DNA, 96 bp, Aspergillus novofumigatus
  misc_feature: 286
ccatatatcaagtaatagatatatattaggagatcaaggttaattaggattaatatattaagtaaataaatatatatattttaggataccataata

SEQ ID NO: 11572 - DNA, 96 bp, Aspergillus novofumigatus
  misc_feature: 285
tatcttatatatttctaccccttattcttatcttaaacttactaacccttactctattacttatccttccttactttattctccttactacctctt

SEQ ID NO: 11573 - DNA, 96 bp, Aspergillus novofumigatus
  misc_feature: 285
atcttatatatttctaccccttattcttatcttaaacttactaacccttactctattacttatccttccttactttattctccttactacctctta

SEQ ID NO: 11574 - DNA, 96 bp, Aspergillus novofumigatus
  misc_feature: 284
ttatatatttctaccccttattcttatcttaaacttactaacccttactctattacttatccttccttactttattctccttactacctcttacct

SEQ ID NO: 11575 - DNA, 96 bp, Aspergillus novofumigatus
  misc_feature: 284
tcttatatatttctaccccttattcttatcttaaacttactaacccttactctattacttatccttccttactttattctccttactacctcttac

SEQ ID NO: 11576 - DNA, 96 bp, Aspergillus novofumigatus
  misc_feature: 283
ctatcttatatatttctaccccttattcttatcttaaacttactaacccttactctattacttatccttccttactttattctccttactacctct

SEQ ID NO: 11577 - DNA, 96 bp, Aspergillus novofumigatus
  misc_feature: 282
cttatatatttctaccccttattcttatcttaaacttactaacccttactctattacttatccttccttactttattctccttactacctcttacc

SEQ ID NO: 11578 - DNA, 96 bp, Aspergillus novofumigatus
  misc_feature: 281
ctctctatcttatatatttctaccccttattcttatcttaaacttactaacccttactctattacttatccttccttactttattctccttactac

SEQ ID NO: 11579 - DNA, 96 bp, Aspergillus novofumigatus
  misc_feature: 281
ctctctctatcttatatatttctaccccttattcttatcttaaacttactaacccttactctattacttatccttccttactttattctccttact

SEQ ID NO: 11580 - DNA, 96 bp, Aspergillus novofumigatus
  misc_feature: 280
actctctctatcttatatatttctaccccttattcttatcttaaacttactaacccttactctattacttatccttccttactttattctccttac

SEQ ID NO: 11581 - DNA, 96 bp, Aspergillus novofumigatus
  misc_feature: 279
tctctctatcttatatatttctaccccttattcttatcttaaacttactaacccttactctattacttatccttccttactttattctccttacta

SEQ ID NO: 11582 - DNA, 96 bp, Aspergillus novofumigatus
  misc_feature: 278
ctattaaccttactgttgacctcactatctactatactattaatcttattatctaccttactaactatctctctcctaactatggtgatatccccc

SEQ ID NO: 11583 - DNA, 96 bp, Aspergillus novofumigatus
  misc_feature: 278
aaaattataagagattattttactaaggagaaaagaaaagaataaaagttaattaattagaaagaaaagaagaatagggagtaaaataatatagat

SEQ ID NO: 11584 - DNA, 96 bp, Aspergillus novofumigatus
  misc_feature: 278
aatctatattattttactccctattcttcttttctttctaattaattaacttttattcttttcttttctccttagtaaaataatctcttataattt

SEQ ID NO: 11585 - DNA, 96 bp, Aspergillus novofumigatus
  misc_feature: 275
taaaattataagagattattttactaaggagaaaagaaaagaataaaagttaattaattagaaagaaaagaagaatagggagtaaaataatataga

SEQ ID NO: 11586 - DNA, 96 bp, Aspergillus novofumigatus
  misc_feature: 274
taatctatattattttactccctattcttcttttctttctaattaattaacttttattcttttcttttctccttagtaaaataatctcttataatt

SEQ ID NO: 11587 - DNA, 96 bp, Aspergillus novofumigatus
  misc_feature: 274
atactattaaccttactgttgacctcactatctactatactattaatcttattatctaccttactaactatctctctcctaactatggtgatatcc

SEQ ID NO: 11588 - DNA, 96 bp, Aspergillus novofumigatus
  misc_feature: 273
tactattaaccttactgttgacctcactatctactatactattaatcttattatctaccttactaactatctctctcctaactatggtgatatccc

SEQ ID NO: 11589 - DNA, 96 bp, Aspergillus novofumigatus
  misc_feature: 273
actattaaccttactgttgacctcactatctactatactattaatcttattatctaccttactaactatctctctcctaactatggtgatatcccc

SEQ ID NO: 11590 - DNA, 96 bp, Aspergillus novofumigatus
  misc_feature: 271
gaaattattaatatattaaggtaagggttagaattattaaagagaataaggatttaatagagagatagatagaataagaggagagagttagagata

SEQ ID NO: 11591 - DNA, 96 bp, Aspergillus novofumigatus
  misc_feature: 270
tatactattaaccttactgttgacctcactatctactatactattaatcttattatctaccttactaactatctctctcctaactatggtgatatc

SEQ ID NO: 11592 - DNA, 96 bp, Aspergillus novofumigatus
  misc_feature: 269
ataatctatattattttactccctattcttcttttctttctaattaattaacttttattcttttcttttctccttagtaaaataatctcttataat

SEQ ID NO: 11593 - DNA, 96 bp, Aspergillus novofumigatus
  misc_feature: 267
agagagatatagtttaagaagagtaaggattaataagtatagaagaagagatagagttagaggaagaaatttaaagataagaggaattagaaagaa

SEQ ID NO: 11594 - DNA, 96 bp, Aspergillus novofumigatus
  misc_feature: 267
aaattattaatatattaaggtaagggttagaattattaaagagaataaggatttaatagagagatagatagaataagaggagagagttagagataa

SEQ ID NO: 11595 - DNA, 96 bp, Aspergillus novofumigatus
  misc_feature: 267
aatttaaaaagagagatatagtttaagaagagtaaggattaataagtatagaagaagagatagagttagaggaagaaatttaaagataagaggaat

SEQ ID NO: 11596 - DNA, 96 bp, Aspergillus novofumigatus
  misc_feature: 266
ataaaattataagagattattttactaaggagaaaagaaaagaataaaagttaattaattagaaagaaaagaagaatagggagtaaaataatatag

SEQ ID NO: 11597 - DNA, 96 bp, Aspergillus novofumigatus
  misc_feature: 266
atttaaaaagagagatatagtttaagaagagtaaggattaataagtatagaagaagagatagagttagaggaagaaatttaaagataagaggaatt

SEQ ID NO: 11598 - DNA, 96 bp, Aspergillus novofumigatus
  misc_feature: 265
aataaaattataagagattattttactaaggagaaaagaaaagaataaaagttaattaattagaaagaaaagaagaatagggagtaaaataatata

SEQ ID NO: 11599 - DNA, 96 bp, Aspergillus novofumigatus
  misc_feature: 264
aagagagatatagtttaagaagagtaaggattaataagtatagaagaagagatagagttagaggaagaaatttaaagataagaggaattagaaaga

SEQ ID NO: 11600 - DNA, 96 bp, Aspergillus novofumigatus
  misc_feature: 263
tttaaaaagagagatatagtttaagaagagtaaggattaataagtatagaagaagagatagagttagaggaagaaatttaaagataagaggaatta

SEQ ID NO: 11601 - DNA, 96 bp, Aspergillus novofumigatus
  misc_feature: 261
aataatctatattattttactccctattcttcttttctttctaattaattaacttttattcttttcttttctccttagtaaaataatctcttataa

SEQ ID NO: 11602 - DNA, 96 bp, Aspergillus novofumigatus
  misc_feature: 260
taaaataaaattataagagattattttactaaggagaaaagaaaagaataaaagttaattaattagaaagaaaagaagaatagggagtaaaataat

SEQ ID NO: 11603 - DNA, 96 bp, Aspergillus novofumigatus
  misc_feature: 259
taatttaaaaagagagatatagtttaagaagagtaaggattaataagtatagaagaagagatagagttagaggaagaaatttaaagataagaggaa

SEQ ID NO: 11604 - DNA, 96 bp, Aspergillus novofumigatus
  misc_feature: 259
aaaataaaattataagagattattttactaaggagaaaagaaaagaataaaagttaattaattagaaagaaaagaagaatagggagtaaaataata

SEQ ID NO: 11605 - DNA, 96 bp, Aspergillus novofumigatus
  misc_feature: 259
aaataaaattataagagattattttactaaggagaaaagaaaagaataaaagttaattaattagaaagaaaagaagaatagggagtaaaataatat

SEQ ID NO: 11606 - DNA, 96 bp, Aspergillus novofumigatus
  misc_feature: 258
agagaaaaagaaataaaataaaattataagagattattttactaaggagaaaagaaaagaataaaagttaattaattagaaagaaaagaagaatag

SEQ ID NO: 11607 - DNA, 96 bp, Aspergillus novofumigatus
  misc_feature: 258
acttaaacataatccgaggataaggattttagcggcttgtagtattttagccgcttgttgcattttagccgcttgtagtattttagcggctttttg

SEQ ID NO: 11608 - DNA, 96 bp, Aspergillus novofumigatus
  misc_feature: 257
ataatttaaaaagagagatatagtttaagaagagtaaggattaataagtatagaagaagagatagagttagaggaagaaatttaaagataagagga

SEQ ID NO: 11609 - DNA, 96 bp, Aspergillus novofumigatus
  misc_feature: 257
gataatttaaaaagagagatatagtttaagaagagtaaggattaataagtatagaagaagagatagagttagaggaagaaatttaaagataagagg

SEQ ID NO: 11610 - DNA, 96 bp, Aspergillus novofumigatus
  misc_feature: 256
ataaaataaaattataagagattattttactaaggagaaaagaaaagaataaaagttaattaattagaaagaaaagaagaatagggagtaaaataa

SEQ ID NO: 11611 - DNA, 96 bp, Aspergillus novofumigatus
  misc_feature: 256
aaataatctatattattttactccctattcttcttttctttctaattaattaacttttattcttttcttttctccttagtaaaataatctcttata

SEQ ID NO: 11612 - DNA, 96 bp, Aspergillus novofumigatus
  misc_feature: 256
gtaatagagtaagggttagtaagtttaagataagaataaggggtagaaatatataagatagagagagttttagtaaagagaagaaataaatataat

SEQ ID NO: 11613 - DNA, 96 bp, Aspergillus novofumigatus
  misc_feature: 256
agataatttaaaaagagagatatagtttaagaagagtaaggattaataagtatagaagaagagatagagttagaggaagaaatttaaagataagag

SEQ ID NO: 11614 - DNA, 96 bp, Aspergillus novofumigatus
  misc_feature: 255
aataaaataaaattataagagattattttactaaggagaaaagaaaagaataaaagttaattaattagaaagaaaagaagaatagggagtaaaata

SEQ ID NO: 11615 - DNA, 96 bp, Aspergillus novofumigatus
  misc_feature: 254
gagataatttaaaaagagagatatagtttaagaagagtaaggattaataagtatagaagaagagatagagttagaggaagaaatttaaagataaga

SEQ ID NO: 11616 - DNA, 96 bp, Aspergillus novofumigatus
  misc_feature: 254
aaggtaggtaataaggtagatagtaattataaatagcatagtagatagtaaggttaatagtaaggtaagcagtaagagaggtagtaatattagtag

SEQ ID NO: 11617 - DNA, 96 bp, Aspergillus novofumigatus
  misc_feature: 254
aaataaaataaaattataagagattattttactaaggagaaaagaaaagaataaaagttaattaattagaaagaaaagaagaatagggagtaaaat

SEQ ID NO: 11618 - DNA, 96 bp, Aspergillus novofumigatus
  misc_feature: 254
aattaaataatctatattattttactccctattcttcttttctttctaattaattaacttttattcttttcttttctccttagtaaaataatctct

SEQ ID NO: 11619 - DNA, 96 bp, Aspergillus novofumigatus
  misc_feature: 253
ttatatttatttcttctctttactaaaactctctctatcttatatatttctaccccttattcttatcttaaacttactaacccttactctattact

SEQ ID NO: 11620 - DNA, 96 bp, Aspergillus novofumigatus
  misc_feature: 253
ttaaataatctatattattttactccctattcttcttttctttctaattaattaacttttattcttttcttttctccttagtaaaataatctctta

SEQ ID NO: 11621 - DNA, 96 bp, Aspergillus novofumigatus
  misc_feature: 253
aagagaaaaagaaataaaataaaattataagagattattttactaaggagaaaagaaaagaataaaagttaattaattagaaagaaaagaagaata

SEQ ID NO: 11622 - DNA, 96 bp, Aspergillus novofumigatus
  misc_feature: 253
attaaataatctatattattttactccctattcttcttttctttctaattaattaacttttattcttttcttttctccttagtaaaataatctctt

SEQ ID NO: 11623 - DNA, 96 bp, Aspergillus novofumigatus
  misc_feature: 252
tagagtaagggttagtaagtttaagataagaataaggggtagaaatatataagatagagagagttttagtaaagagaagaaataaatataattaaa

SEQ ID NO: 11624 - DNA, 96 bp, Aspergillus novofumigatus
  misc_feature: 252
taaataatctatattattttactccctattcttcttttctttctaattaattaacttttattcttttcttttctccttagtaaaataatctcttat

SEQ ID NO: 11625 - DNA, 96 bp, Aspergillus novofumigatus
  misc_feature: 251
gagtaagggttagtaagtttaagataagaataaggggtagaaatatataagatagagagagttttagtaaagagaagaaataaatataattaaaaa

SEQ ID NO: 11626 - DNA, 96 bp, Aspergillus novofumigatus
  misc_feature: 251
agagtaagggttagtaagtttaagataagaataaggggtagaaatatataagatagagagagttttagtaaagagaagaaataaatataattaaaa

SEQ ID NO: 11627 - DNA, 96 bp, Aspergillus novofumigatus
  misc_feature: 251
agattaagagaaaaagaaataaaataaaattataagagattattttactaaggagaaaagaaaagaataaaagttaattaattagaaagaaaagaa

SEQ ID NO: 11628 - DNA, 96 bp, Aspergillus novofumigatus
  misc_feature: 251
ttattcttttttctaattaaataatctatattattttactccctattcttcttttctttctaattaattaacttttattcttttcttttctcctta

SEQ ID NO: 11629 - DNA, 96 bp, Aspergillus novofumigatus
  misc_feature: 251
attaagagaaaaagaaataaaataaaattataagagattattttactaaggagaaaagaaaagaataaaagttaattaattagaaagaaaagaaga

SEQ ID NO: 11630 - DNA, 96 bp, Aspergillus novofumigatus
  misc_feature: 251
taattaaataatctatattattttactccctattcttcttttctttctaattaattaacttttattcttttcttttctccttagtaaaataatctc

SEQ ID NO: 11631 - DNA, 96 bp, Aspergillus novofumigatus
  misc_feature: 251
taagagaaaaagaaataaaataaaattataagagattattttactaaggagaaaagaaaagaataaaagttaattaattagaaagaaaagaagaat

SEQ ID NO: 11632 - DNA, 96 bp, Aspergillus novofumigatus
  misc_feature: 251
gtaaggtaggtaataaggtagatagtaattataaatagcatagtagatagtaaggttaatagtaaggtaagcagtaagagaggtagtaatattagt

SEQ ID NO: 11633 - DNA, 96 bp, Aspergillus novofumigatus
  misc_feature: 251
gagaaaaagaaataaaataaaattataagagattattttactaaggagaaaagaaaagaataaaagttaattaattagaaagaaaagaagaatagg

SEQ ID NO: 11634 - DNA, 96 bp, Aspergillus novofumigatus
  misc_feature: 251
atagtaaggtaggtaataaggtagatagtaattataaatagcatagtagatagtaaggttaatagtaaggtaagcagtaagagaggtagtaatatt

SEQ ID NO: 11635 - DNA, 96 bp, Aspergillus novofumigatus
  misc_feature: 250
tttattcttttttctaattaaataatctatattattttactccctattcttcttttctttctaattaattaacttttattcttttcttttctcctt

SEQ ID NO: 11636 - DNA, 96 bp, Aspergillus novofumigatus
  misc_feature: 250
tttaatttatgaatatatatttacatataaatatatataataaagggaaataaatatatttaacttatactagcctagtaattctataattatcta

SEQ ID NO: 11637 - DNA, 96 bp, Aspergillus novofumigatus
  misc_feature: 250
tatatttatttcttctctttactaaaactctctctatcttatatatttctaccccttattcttatcttaaacttactaacccttactctattactt

SEQ ID NO: 11638 - DNA, 96 bp, Aspergillus novofumigatus
  misc_feature: 250
gattaagagaaaaagaaataaaataaaattataagagattattttactaaggagaaaagaaaagaataaaagttaattaattagaaagaaaagaag

SEQ ID NO: 11639 - DNA, 96 bp, Aspergillus novofumigatus
  misc_feature: 249
ttttattcttttttctaattaaataatctatattattttactccctattcttcttttctttctaattaattaacttttattcttttcttttctcct

SEQ ID NO: 11640 - DNA, 96 bp, Aspergillus novofumigatus
  misc_feature: 249
gaaataaaataaaattataagagattattttactaaggagaaaagaaaagaataaaagttaattaattagaaagaaaagaagaatagggagtaaaa

SEQ ID NO: 11641 - DNA, 96 bp, Aspergillus novofumigatus
  misc_feature: 249
ttaagagaaaaagaaataaaataaaattataagagattattttactaaggagaaaagaaaagaataaaagttaattaattagaaagaaaagaagaa

SEQ ID NO: 11642 - DNA, 96 bp, Aspergillus novofumigatus
  misc_feature: 249
taatagagtaagggttagtaagtttaagataagaataaggggtagaaatatataagatagagagagttttagtaaagagaagaaataaatataatt

SEQ ID NO: 11643 - DNA, 96 bp, Aspergillus novofumigatus
  misc_feature: 248
tttttattcttttttctaattaaataatctatattattttactccctattcttcttttctttctaattaattaacttttattcttttcttttctcc

SEQ ID NO: 11644 - DNA, 96 bp, Aspergillus novofumigatus
  misc_feature: 248
ttctaattaaataatctatattattttactccctattcttcttttctttctaattaattaacttttattcttttcttttctccttagtaaaataat

SEQ ID NO: 11645 - DNA, 96 bp, Aspergillus novofumigatus
  misc_feature: 248
atagagtaagggttagtaagtttaagataagaataaggggtagaaatatataagatagagagagttttagtaaagagaagaaataaatataattaa

SEQ ID NO: 11646 - DNA, 96 bp, Aspergillus novofumigatus
  misc_feature: 248
aagttaaatatatttatttccctttattatatatatttatatgtaaatatatattcataaattaaatatctccctagatctagatgactctactat

SEQ ID NO: 11647 - DNA, 96 bp, Aspergillus novofumigatus
  misc_feature: 247
agagaatttagggatagattaagaggagagaagaaggagtaataagagtagaaagggagataatttaaaaagagagatatagtttaagaagagtaa

SEQ ID NO: 11648 - DNA, 96 bp, Aspergillus novofumigatus
  misc_feature: 247
tctaattaaataatctatattattttactccctattcttcttttctttctaattaattaacttttattcttttcttttctccttagtaaaataatc

SEQ ID NO: 11649 - DNA, 96 bp, Aspergillus novofumigatus
  misc_feature: 247
tagtaaggtaggtaataaggtagatagtaattataaatagcatagtagatagtaaggttaatagtaaggtaagcagtaagagaggtagtaatatta

SEQ ID NO: 11650 - DNA, 96 bp, Aspergillus novofumigatus
  misc_feature: 247
ctaattaaataatctatattattttactccctattcttcttttctttctaattaattaacttttattcttttcttttctccttagtaaaataatct

SEQ ID NO: 11651 - DNA, 96 bp, Aspergillus novofumigatus
  misc_feature: 247
caactttaggaagcccctatacccccctaattaagcatatttcagcttataggataggtaatatataatatttatataataagttattatattaat

SEQ ID NO: 11652 - DNA, 96 bp, Aspergillus novofumigatus
  misc_feature: 247
atttaatttatgaatatatatttacatataaatatatataataaagggaaataaatatatttaacttatactagcctagtaattctataattatct

SEQ ID NO: 11653 - DNA, 96 bp, Aspergillus novofumigatus
  misc_feature: 246
agaaataaaataaaattataagagattattttactaaggagaaaagaaaagaataaaagttaattaattagaaagaaaagaagaatagggagtaaa

SEQ ID NO: 11654 - DNA, 96 bp, Aspergillus novofumigatus
  misc_feature: 246
aagaaataaaataaaattataagagattattttactaaggagaaaagaaaagaataaaagttaattaattagaaagaaaagaagaatagggagtaa

SEQ ID NO: 11655 - DNA, 96 bp, Aspergillus novofumigatus
  misc_feature: 246
aagagaatttagggatagattaagaggagagaagaaggagtaataagagtagaaagggagataatttaaaaagagagatatagtttaagaagagta

SEQ ID NO: 11656 - DNA, 96 bp, Aspergillus novofumigatus
  misc_feature: 246
taaggtaggtaataaggtagatagtaattataaatagcatagtagatagtaaggttaatagtaaggtaagcagtaagagaggtagtaatattagta

SEQ ID NO: 11657 - DNA, 96 bp, Aspergillus novofumigatus
  misc_feature: 245
ttttttattcttttttctaattaaataatctatattattttactccctattcttcttttctttctaattaattaacttttattcttttcttttctc

SEQ ID NO: 11658 - DNA, 96 bp, Aspergillus novofumigatus
  misc_feature: 245
tttctaattaaataatctatattattttactccctattcttcttttctttctaattaattaacttttattcttttcttttctccttagtaaaataa

SEQ ID NO: 11659 - DNA, 96 bp, Aspergillus novofumigatus
  misc_feature: 245
aatagagtaagggttagtaagtttaagataagaataaggggtagaaatatataagatagagagagttttagtaaagagaagaaataaatataatta

SEQ ID NO: 11660 - DNA, 96 bp, Aspergillus novofumigatus
  misc_feature: 245
gatataggccgggcgcgcgcgcgccatataccggccacttatcgagacacacaggcactggggtcaatggaagccgggcgcgcgcgccccgggggg

SEQ ID NO: 11661 - DNA, 96 bp, Aspergillus novofumigatus
  misc_feature: 245
aatagtaaggtaggtaataaggtagatagtaattataaatagcatagtagatagtaaggttaatagtaaggtaagcagtaagagaggtagtaatat

SEQ ID NO: 11662 - DNA, 96 bp, Aspergillus novofumigatus
  misc_feature: 244
tattctaattcttattctaattcttattctaattcttattctaattcttattctaattctctttctagcaccttattctaattctttttctaactc

SEQ ID NO: 11663 - DNA, 96 bp, Aspergillus novofumigatus
  misc_feature: 244
aaaaagaaataaaataaaattataagagattattttactaaggagaaaagaaaagaataaaagttaattaattagaaagaaaagaagaatagggag

SEQ ID NO: 11664 - DNA, 96 bp, Aspergillus novofumigatus
  misc_feature: 244
agtaaggtaggtaataaggtagatagtaattataaatagcatagtagatagtaaggttaatagtaaggtaagcagtaagagaggtagtaatattag

SEQ ID NO: 11665 - DNA, 96 bp, Aspergillus novofumigatus
  misc_feature: 244
attctaattcttattctaattcttattctaattcttattctaattcttattctaattctctttctagcaccttattctaattctttttctaactct

SEQ ID NO: 11666 - DNA, 96 bp, Aspergillus novofumigatus
  misc_feature: 243
ttattctaattcttattctaattcttattctaattcttattctaattcttattctaattctctttctagcaccttattctaattctttttctaact

SEQ ID NO: 11667 - DNA, 96 bp, Aspergillus novofumigatus
  misc_feature: 243
ttaaaacctaacttttttattcttttttctaattaaataatctatattattttactccctattcttcttttctttctaattaattaacttttattc

SEQ ID NO: 11668 - DNA, 96 bp, Aspergillus novofumigatus
  misc_feature: 243
tagattaagagaaaaagaaataaaataaaattataagagattattttactaaggagaaaagaaaagaataaaagttaattaattagaaagaaaaga

SEQ ID NO: 11669 - DNA, 96 bp, Aspergillus novofumigatus
  misc_feature: 243
tctaattcttattctaattcttattctaattcttattctaattctctttctagcaccttattctaattctttttctaactcttattttttttaatt

SEQ ID NO: 11670 - DNA, 96 bp, Aspergillus novofumigatus
  misc_feature: 243
gcccctatacccccctaattaagcatatttcagcttataggataggtaatatataatatttatataataagttattatattaataaataaaatata

SEQ ID NO: 11671 - DNA, 96 bp, Aspergillus novofumigatus
  misc_feature: 243
aaagaaataaaataaaattataagagattattttactaaggagaaaagaaaagaataaaagttaattaattagaaagaaaagaagaatagggagta

SEQ ID NO: 11672 - DNA, 96 bp, Aspergillus novofumigatus
  misc_feature: 243
taaaacctaacttttttattcttttttctaattaaataatctatattattttactccctattcttcttttctttctaattaattaacttttattct

SEQ ID NO: 11673 - DNA, 96 bp, Aspergillus novofumigatus
  misc_feature: 243
gagaatttagggatagattaagaggagagaagaaggagtaataagagtagaaagggagataatttaaaaagagagatatagtttaagaagagtaag

SEQ ID NO: 11674 - DNA, 96 bp, Aspergillus novofumigatus
  misc_feature: 243
agaaaaagaaataaaataaaattataagagattattttactaaggagaaaagaaaagaataaaagttaattaattagaaagaaaagaagaataggg

SEQ ID NO: 11675 - DNA, 96 bp, Aspergillus novofumigatus
  misc_feature: 243
cccctatacccccctaattaagcatatttcagcttataggataggtaatatataatatttatataataagttattatattaataaataaaatatat

SEQ ID NO: 11676 - DNA, 96 bp, Aspergillus novofumigatus
  misc_feature: 243
agtaagggttagtaagtttaagataagaataaggggtagaaatatataagatagagagagttttagtaaagagaagaaataaatataattaaaaat

SEQ ID NO: 11677 - DNA, 96 bp, Aspergillus novofumigatus
  misc_feature: 243
aatttagggatagattaagaggagagaagaaggagtaataagagtagaaagggagataatttaaaaagagagatatagtttaagaagagtaaggat

SEQ ID NO: 11678 - DNA, 96 bp, Aspergillus novofumigatus
  misc_feature: 242
ttttctaattaaataatctatattattttactccctattcttcttttctttctaattaattaacttttattcttttcttttctccttagtaaaata

SEQ ID NO: 11679 - DNA, 96 bp, Aspergillus novofumigatus
  misc_feature: 242
aagcccctatacccccctaattaagcatatttcagcttataggataggtaatatataatatttatataataagttattatattaataaataaaata

SEQ ID NO: 11680 - DNA, 96 bp, Aspergillus novofumigatus
  misc_feature: 242
tattaaaacctaacttttttattcttttttctaattaaataatctatattattttactccctattcttcttttctttctaattaattaacttttat

SEQ ID NO: 11681 - DNA, 96 bp, Aspergillus novofumigatus
  misc_feature: 242
ccctatacccccctaattaagcatatttcagcttataggataggtaatatataatatttatataataagttattatattaataaataaaatatata

SEQ ID NO: 11682 - DNA, 96 bp, Aspergillus novofumigatus
  misc_feature: 242
gtagagtcatctagatctagggagatatttaatttatgaatatatatttacatataaatatatataataaagggaaataaatatatttaacttata

SEQ ID NO: 11683 - DNA, 96 bp, Aspergillus novofumigatus
  misc_feature: 242
ctaattcttattctaattcttattctaattcttattctaattctctttctagcaccttattctaattctttttctaactcttattttttttaattc

SEQ ID NO: 11684 - DNA, 96 bp, Aspergillus novofumigatus
  misc_feature: 242
gaagcccctatacccccctaattaagcatatttcagcttataggataggtaatatataatatttatataataagttattatattaataaataaaat

SEQ ID NO: 11685 - DNA, 96 bp, Aspergillus novofumigatus
  misc_feature: 242
attaaaacctaacttttttattcttttttctaattaaataatctatattattttactccctattcttcttttctttctaattaattaacttttatt

SEQ ID NO: 11686 - DNA, 96 bp, Aspergillus novofumigatus
  misc_feature: 242
agtagagtcatctagatctagggagatatttaatttatgaatatatatttacatataaatatatataataaagggaaataaatatatttaacttat

SEQ ID NO: 11687 - DNA, 96 bp, Aspergillus novofumigatus
  misc_feature: 241
ttctaattcttattctaattcttattctaattcttattctaattcttattctaattctctttctagcaccttattctaattctttttctaactctt

SEQ ID NO: 11688 - DNA, 96 bp, Aspergillus novofumigatus
  misc_feature: 241
gaaaaagaaataaaataaaattataagagattattttactaaggagaaaagaaaagaataaaagttaattaattagaaagaaaagaagaataggga

SEQ ID NO: 11689 - DNA, 96 bp, Aspergillus novofumigatus
  misc_feature: 241
tagtagagtcatctagatctagggagatatttaatttatgaatatatatttacatataaatatatataataaagggaaataaatatatttaactta

SEQ ID NO: 11690 - DNA, 96 bp, Aspergillus novofumigatus
  misc_feature: 241
tagagtcatctagatctagggagatatttaatttatgaatatatatttacatataaatatatataataaagggaaataaatatatttaacttatac

SEQ ID NO: 11691 - DNA, 96 bp, Aspergillus novofumigatus
  misc_feature: 241
taacttttttattcttttttctaattaaataatctatattattttactccctattcttcttttctttctaattaattaacttttattcttttcttt

SEQ ID NO: 11692 - DNA, 96 bp, Aspergillus novofumigatus
  misc_feature: 241
atataggccgggcgcgcgcgcgccatataccggccacttatcgagacacacaggcactggggtcaatggaagccgggcgcgcgcgccccggggggg

SEQ ID NO: 11693 - DNA, 96 bp, Aspergillus novofumigatus
  misc_feature: 241
attcttattctaattcttattctaattcttattctaattcttattctaattcttattctaattctctttctagcaccttattctaattctttttct

SEQ ID NO: 11694 - DNA, 96 bp, Aspergillus novofumigatus
  misc_feature: 241
agcccctatacccccctaattaagcatatttcagcttataggataggtaatatataatatttatataataagttattatattaataaataaaatat

SEQ ID NO: 11695 - DNA, 96 bp, Aspergillus novofumigatus
  misc_feature: 240
tcttattctaattcttattctaattcttattctaattcttattctaattctctttctagcaccttattctaattctttttctaactcttatttttt

SEQ ID NO: 11696 - DNA, 96 bp, Aspergillus novofumigatus
  misc_feature: 240
tctaattcttattctaattcttattctaattcttattctaattcttattctaattctctttctagcaccttattctaattctttttctaactctta

SEQ ID NO: 11697 - DNA, 96 bp, Aspergillus novofumigatus
  misc_feature: 240
tattcttttttctaattaaataatctatattattttactccctattcttcttttctttctaattaattaacttttattcttttcttttctccttag

SEQ ID NO: 11698 - DNA, 96 bp, Aspergillus novofumigatus
  misc_feature: 240
tagggatagattaagaggagagaagaaggagtaataagagtagaaagggagataatttaaaaagagagatatagtttaagaagagtaaggattaat

SEQ ID NO: 11699 - DNA, 96 bp, Aspergillus novofumigatus
  misc_feature: 240
taattcttattctaattcttattctaattcttattctaattctctttctagcaccttattctaattctttttctaactcttattttttttaattct

SEQ ID NO: 11700 - DNA, 96 bp, Aspergillus novofumigatus
  misc_feature: 240
taacttactacccctaactcttcttttaatttttattaaaattcttattttaattctctttctaattttttattctagctcttattctaattctcc

SEQ ID NO: 11701 - DNA, 96 bp, Aspergillus novofumigatus
  misc_feature: 240
aattcttattctaattcttattctaattcttattctaattcttattctaattcttattctaattctctttctagcaccttattctaattctttttc

SEQ ID NO: 11702 - DNA, 96 bp, Aspergillus novofumigatus
  misc_feature: 240
atttagggatagattaagaggagagaagaaggagtaataagagtagaaagggagataatttaaaaagagagatatagtttaagaagagtaaggatt

SEQ ID NO: 11703 - DNA, 96 bp, Aspergillus novofumigatus
  misc_feature: 240
attcttttttctaattaaataatctatattattttactccctattcttcttttctttctaattaattaacttttattcttttcttttctccttagt

SEQ ID NO: 11704 - DNA, 96 bp, Aspergillus novofumigatus
  misc_feature: 239
ttttttctaattaaataatctatattattttactccctattcttcttttctttctaattaattaacttttattcttttcttttctccttagtaaaa

SEQ ID NO: 11705 - DNA, 96 bp, Aspergillus novofumigatus
  misc_feature: 239
tttttctaattaaataatctatattattttactccctattcttcttttctttctaattaattaacttttattcttttcttttctccttagtaaaat

SEQ ID NO: 11706 - DNA, 96 bp, Aspergillus novofumigatus
  misc_feature: 239
tttacttctttttattcttatattctatcttaattctatttaagtaattaatttctctctcttttctaaactatttcttataaaataatctctctt

SEQ ID NO: 11707 - DNA, 96 bp, Aspergillus novofumigatus
  misc_feature: 239
tattctaattcttattctaattcttattctaattcttattctaattctctttctagcaccttattctaattctttttctaactcttatttttttta

SEQ ID NO: 11708 - DNA, 96 bp, Aspergillus novofumigatus
  misc_feature: 239
taattcttattctaattcttattctaattcttattctaattcttattctaattcttattctaattctctttctagcaccttattctaattcttttt

SEQ ID NO: 11709 - DNA, 96 bp, Aspergillus novofumigatus
  misc_feature: 239
cttttttattcttttttctaattaaataatctatattattttactccctattcttcttttctttctaattaattaacttttattcttttcttttct

SEQ ID NO: 11710 - DNA, 96 bp, Aspergillus novofumigatus
  misc_feature: 239
cttattctaattcttattctaattcttattctaattcttattctaattctctttctagcaccttattctaattctttttctaactcttattttttt

SEQ ID NO: 11711 - DNA, 96 bp, Aspergillus novofumigatus
  misc_feature: 239
aaaagaaataaaataaaattataagagattattttactaaggagaaaagaaaagaataaaagttaattaattagaaagaaaagaagaatagggagt

SEQ ID NO: 11712 - DNA, 96 bp, Aspergillus novofumigatus
  misc_feature: 238
gttagattaagagaaaaagaaataaaataaaattataagagattattttactaaggagaaaagaaaagaataaaagttaattaattagaaagaaaa

SEQ ID NO: 11713 - DNA, 96 bp, Aspergillus novofumigatus
  misc_feature: 238
ttttacttctttttattcttatattctatcttaattctatttaagtaattaatttctctctcttttctaaactatttcttataaaataatctctct

SEQ ID NO: 11714 - DNA, 96 bp, Aspergillus novofumigatus
  misc_feature: 238
tttagggatagattaagaggagagaagaaggagtaataagagtagaaagggagataatttaaaaagagagatatagtttaagaagagtaaggatta

SEQ ID NO: 11715 - DNA, 96 bp, Aspergillus novofumigatus
  misc_feature: 238
ttcttttttctaattaaataatctatattattttactccctattcttcttttctttctaattaattaacttttattcttttcttttctccttagta

SEQ ID NO: 11716 - DNA, 96 bp, Aspergillus novofumigatus
  misc_feature: 238
ttcttattctaattcttattctaattcttattctaattcttattctaattcttattctaattctctttctagcaccttattctaattctttttcta

SEQ ID NO: 11717 - DNA, 96 bp, Aspergillus novofumigatus
  misc_feature: 238
ttctaattcttattctaattcttattctaattcttattctaattctctttctagcaccttattctaattctttttctaactcttattttttttaat

SEQ ID NO: 11718 - DNA, 96 bp, Aspergillus novofumigatus
  misc_feature: 238
ttattaaaacctaacttttttattcttttttctaattaaataatctatattattttactccctattcttcttttctttctaattaattaactttta

SEQ ID NO: 11719 - DNA, 96 bp, Aspergillus novofumigatus
  misc_feature: 238
tatttaatttatgaatatatatttacatataaatatatataataaagggaaataaatatatttaacttatactagcctagtaattctataattatc

SEQ ID NO: 11720 - DNA, 96 bp, Aspergillus novofumigatus
  misc_feature: 238
acccccctaattaagcatatttcagcttataggataggtaatatataatatttatataataagttattatattaataaataaaatatatagatatc

SEQ ID NO: 11721 - DNA, 96 bp, Aspergillus novofumigatus
  misc_feature: 238
acctaacttttttattcttttttctaattaaataatctatattattttactccctattcttcttttctttctaattaattaacttttattcttttc

SEQ ID NO: 11722 - DNA, 96 bp, Aspergillus novofumigatus
  misc_feature: 238
acttttttattcttttttctaattaaataatctatattattttactccctattcttcttttctttctaattaattaacttttattcttttcttttc

SEQ ID NO: 11723 - DNA, 96 bp, Aspergillus novofumigatus
  misc_feature: 238
agaatttagggatagattaagaggagagaagaaggagtaataagagtagaaagggagataatttaaaaagagagatatagtttaagaagagtaagg

SEQ ID NO: 11724 - DNA, 96 bp, Aspergillus novofumigatus
  misc_feature: 238
attattttacttctttttattcttatattctatcttaattctatttaagtaattaatttctctctcttttctaaactatttcttataaaataatct

SEQ ID NO: 11725 - DNA, 96 bp, Aspergillus novofumigatus
  misc_feature: 238
aattattaaaacctaacttttttattcttttttctaattaaataatctatattattttactccctattcttcttttctttctaattaattaacttt

SEQ ID NO: 11726 - DNA, 96 bp, Aspergillus novofumigatus
  misc_feature: 237
ttattctaattcttattctaattcttattctaattcttattctaattctctttctagcaccttattctaattctttttctaactcttatttttttt

SEQ ID NO: 11727 - DNA, 96 bp, Aspergillus novofumigatus
  misc_feature: 237
ttagggatagattaagaggagagaagaaggagtaataagagtagaaagggagataatttaaaaagagagatatagtttaagaagagtaaggattaa

SEQ ID NO: 11728 - DNA, 96 bp, Aspergillus novofumigatus
  misc_feature: 237
ttagattaagagaaaaagaaataaaataaaattataagagattattttactaaggagaaaagaaaagaataaaagttaattaattagaaagaaaag

SEQ ID NO: 11729 - DNA, 96 bp, Aspergillus novofumigatus
  misc_feature: 237
ttacttctttttattcttatattctatcttaattctatttaagtaattaatttctctctcttttctaaactatttcttataaaataatctctcttt

SEQ ID NO: 11730 - DNA, 96 bp, Aspergillus novofumigatus
  misc_feature: 237
gaatttagggatagattaagaggagagaagaaggagtaataagagtagaaagggagataatttaaaaagagagatatagtttaagaagagtaagga

SEQ ID NO: 11731 - DNA, 96 bp, Aspergillus novofumigatus
  misc_feature: 237
cccctaactcttcttttaatttttattaaaattcttattttaattctctttctaattttttattctagctcttattctaattctcctcttcttctt

SEQ ID NO: 11732 - DNA, 96 bp, Aspergillus novofumigatus
  misc_feature: 237
attcttattctaattcttattctaattcttattctaattcttattctaattctctttctagcaccttattctaattctttttctaactcttatttt

SEQ ID NO: 11733 - DNA, 96 bp, Aspergillus novofumigatus
  misc_feature: 237
aacttactacccctaactcttcttttaatttttattaaaattcttattttaattctctttctaattttttattctagctcttattctaattctcct

SEQ ID NO: 11734 - DNA, 96 bp, Aspergillus novofumigatus
  misc_feature: 237
aattcttattctaattcttattctaattcttattctaattcttattctaattctctttctagcaccttattctaattctttttctaactcttattt

SEQ ID NO: 11735 - DNA, 96 bp, Aspergillus novofumigatus
  misc_feature: 237
aattcttattctaattcttattctaattcttattctaattctctttctagcaccttattctaattctttttctaactcttattttttttaattctt

SEQ ID NO: 11736 - DNA, 96 bp, Aspergillus novofumigatus
  misc_feature: 237
aacctaacttttttattcttttttctaattaaataatctatattattttactccctattcttcttttctttctaattaattaacttttattctttt

SEQ ID NO: 11737 - DNA, 96 bp, Aspergillus novofumigatus
  misc_feature: 236
ttcttattctaattcttattctaattcttattctaattcttattctaattctctttctagcaccttattctaattctttttctaactcttattttt

SEQ ID NO: 11738 - DNA, 96 bp, Aspergillus novofumigatus
  misc_feature: 236
ttctaattcttattctaattcttattctaattcttattctaattcttattctaattcttattctaattctctttctagcaccttattctaattctt

SEQ ID NO: 11739 - DNA, 96 bp, Aspergillus novofumigatus
  misc_feature: 236
ttactacccctaactcttcttttaatttttattaaaattcttattttaattctctttctaattttttattctagctcttattctaattctcctctt

SEQ ID NO: 11740 - DNA, 96 bp, Aspergillus novofumigatus
  misc_feature: 236
attctaattcttattctaattcttattctaattcttattctaattctctttctagcaccttattctaattctttttctaactcttattttttttaa

SEQ ID NO: 11741 - DNA, 96 bp, Aspergillus novofumigatus
  misc_feature: 236
tagggatagtaagttaaaggttagaataataaataaataaagaaaaaaaagatagatatataataaaaaaagaagaagaggagaattagaataaga

SEQ ID NO: 11742 - DNA, 96 bp, Aspergillus novofumigatus
  misc_feature: 236
tacccccctaattaagcatatttcagcttataggataggtaatatataatatttatataataagttattatattaataaataaaatatatagatat

SEQ ID NO: 11743 - DNA, 96 bp, Aspergillus novofumigatus
  misc_feature: 236
cccccctaattaagcatatttcagcttataggataggtaatatataatatttatataataagttattatattaataaataaaatatatagatatcc

SEQ ID NO: 11744 - DNA, 96 bp, Aspergillus novofumigatus
  misc_feature: 236
cttactacccctaactcttcttttaatttttattaaaattcttattttaattctctttctaattttttattctagctcttattctaattctcctct

SEQ ID NO: 11745 - DNA, 96 bp, Aspergillus novofumigatus
  misc_feature: 236
cctatacccccctaattaagcatatttcagcttataggataggtaatatataatatttatataataagttattatattaataaataaaatatatag

SEQ ID NO: 11746 - DNA, 96 bp, Aspergillus novofumigatus
  misc_feature: 236
attattaaaacctaacttttttattcttttttctaattaaataatctatattattttactccctattcttcttttctttctaattaattaactttt

SEQ ID NO: 11747 - DNA, 96 bp, Aspergillus novofumigatus
  misc_feature: 236
aaattattaaaacctaacttttttattcttttttctaattaaataatctatattattttactccctattcttcttttctttctaattaattaactt

SEQ ID NO: 11748 - DNA, 96 bp, Aspergillus novofumigatus
  misc_feature: 236
aacttttttattcttttttctaattaaataatctatattattttactccctattcttcttttctttctaattaattaacttttattcttttctttt

SEQ ID NO: 11749 - DNA, 96 bp, Aspergillus novofumigatus
  misc_feature: 235
ttttaattctctttctaattttttattctagctcttattctaattctcctcttcttctttttttattatatatctatcttttttttctttatttat

SEQ ID NO: 11750 - DNA, 96 bp, Aspergillus novofumigatus
  misc_feature: 235
cttttttctaattaaataatctatattattttactccctattcttcttttctttctaattaattaacttttattcttttcttttctccttagtaaa

SEQ ID NO: 11751 - DNA, 96 bp, Aspergillus novofumigatus
  misc_feature: 235
ttattttacttctttttattcttatattctatcttaattctatttaagtaattaatttctctctcttttctaaactatttcttataaaataatctc

SEQ ID NO: 11752 - DNA, 96 bp, Aspergillus novofumigatus
  misc_feature: 235
tcttattctaattcttattctaattcttattctaattcttattctaattcttattctaattctctttctagcaccttattctaattctttttctaa

SEQ ID NO: 11753 - DNA, 96 bp, Aspergillus novofumigatus
  misc_feature: 235
tcttttttctaattaaataatctatattattttactccctattcttcttttctttctaattaattaacttttattcttttcttttctccttagtaa

SEQ ID NO: 11754 - DNA, 96 bp, Aspergillus novofumigatus
  misc_feature: 235
tactacccctaactcttcttttaatttttattaaaattcttattttaattctctttctaattttttattctagctcttattctaattctcctcttc

SEQ ID NO: 11755 - DNA, 96 bp, Aspergillus novofumigatus
  misc_feature: 235
taattcttattctaattcttattctaattcttattctaattcttattctaattctctttctagcaccttattctaattctttttctaactcttatt

SEQ ID NO: 11756 - DNA, 96 bp, Aspergillus novofumigatus
  misc_feature: 235
acttactacccctaactcttcttttaatttttattaaaattcttattttaattctctttctaattttttattctagctcttattctaattctcctc

SEQ ID NO: 11757 - DNA, 96 bp, Aspergillus novofumigatus
  misc_feature: 235
ctaacttttttattcttttttctaattaaataatctatattattttactccctattcttcttttctttctaattaattaacttttattcttttctt

SEQ ID NO: 11758 - DNA, 96 bp, Aspergillus novofumigatus
  misc_feature: 235
cctaacttttttattcttttttctaattaaataatctatattattttactccctattcttcttttctttctaattaattaacttttattcttttct

SEQ ID NO: 11759 - DNA, 96 bp, Aspergillus novofumigatus
  misc_feature: 235
attctaattcttattctaattcttattctaattcttattctaattcttattctaattcttattctaattctctttctagcaccttattctaattct

SEQ ID NO: 11760 - DNA, 96 bp, Aspergillus novofumigatus
  misc_feature: 234
agatagttagattaagagaaaaagaaataaaataaaattataagagattattttactaaggagaaaagaaaagaataaaagttaattaattagaaa

SEQ ID NO: 11761 - DNA, 96 bp, Aspergillus novofumigatus
  misc_feature: 234
tttaattctctttctaattttttattctagctcttattctaattctcctcttcttctttttttattatatatctatcttttttttctttatttatt

SEQ ID NO: 11762 - DNA, 96 bp, Aspergillus novofumigatus
  misc_feature: 234
tagttagattaagagaaaaagaaataaaataaaattataagagattattttactaaggagaaaagaaaagaataaaagttaattaattagaaagaa

SEQ ID NO: 11763 - DNA, 96 bp, Aspergillus novofumigatus
  misc_feature: 234
ttcttattctaattcttattctaattcttattctaattctctttctagcaccttattctaattctttttctaactcttattttttttaattctttt

SEQ ID NO: 11764 - DNA, 96 bp, Aspergillus novofumigatus
  misc_feature: 234
ctatacccccctaattaagcatatttcagcttataggataggtaatatataatatttatataataagttattatattaataaataaaatatataga

SEQ ID NO: 11765 - DNA, 96 bp, Aspergillus novofumigatus
  misc_feature: 234
tctaattcttattctaattcttattctaattcttattctaattcttattctaattcttattctaattctctttctagcaccttattctaattcttt

SEQ ID NO: 11766 - DNA, 96 bp, Aspergillus novofumigatus
  misc_feature: 234
cttattctaattcttattctaattcttattctaattcttattctaattcttattctaattctctttctagcaccttattctaattctttttctaac

SEQ ID NO: 11767 - DNA, 96 bp, Aspergillus novofumigatus
  misc_feature: 234
ctaattcttattctaattcttattctaattcttattctaattcttattctaattcttattctaattctctttctagcaccttattctaattctttt

SEQ ID NO: 11768 - DNA, 96 bp, Aspergillus novofumigatus
  misc_feature: 234
ctaattcttattctaattcttattctaattcttattctaattcttattctaattctctttctagcaccttattctaattctttttctaactcttat

SEQ ID NO: 11769 - DNA, 96 bp, Aspergillus novofumigatus
  misc_feature: 234
ccctaactcttcttttaatttttattaaaattcttattttaattctctttctaattttttattctagctcttattctaattctcctcttcttcttt

SEQ ID NO: 11770 - DNA, 96 bp, Aspergillus novofumigatus
  misc_feature: 234
ccccctaattaagcatatttcagcttataggataggtaatatataatatttatataataagttattatattaataaataaaatatatagatatcct

SEQ ID NO: 11771 - DNA, 96 bp, Aspergillus novofumigatus
  misc_feature: 234
aataagagatagttagattaagagaaaaagaaataaaataaaattataagagattattttactaaggagaaaagaaaagaataaaagttaattaat

SEQ ID NO: 11772 - DNA, 96 bp, Aspergillus novofumigatus
  misc_feature: 234
atatttaatttatgaatatatatttacatataaatatatataataaagggaaataaatatatttaacttatactagcctagtaattctataattat

SEQ ID NO: 11773 - DNA, 96 bp, Aspergillus novofumigatus
  misc_feature: 233
agttagattaagagaaaaagaaataaaataaaattataagagattattttactaaggagaaaagaaaagaataaaagttaattaattagaaagaaa

SEQ ID NO: 11774 - DNA, 96 bp, Aspergillus novofumigatus
  misc_feature: 233
tcttcttctttttttattatatatctatcttttttttctttatttatttattattctaacctttaacttactatccctaactcttatttatattct

SEQ ID NO: 11775 - DNA, 96 bp, Aspergillus novofumigatus
  misc_feature: 233
gagtcatctagatctagggagatatttaatttatgaatatatatttacatataaatatatataataaagggaaataaatatatttaacttatacta

SEQ ID NO: 11776 - DNA, 96 bp, Aspergillus novofumigatus
  misc_feature: 233
tacttctttttattcttatattctatcttaattctatttaagtaattaatttctctctcttttctaaactatttcttataaaataatctctctttt

SEQ ID NO: 11777 - DNA, 96 bp, Aspergillus novofumigatus
  misc_feature: 233
taagagatagttagattaagagaaaaagaaataaaataaaattataagagattattttactaaggagaaaagaaaagaataaaagttaattaatta

SEQ ID NO: 11778 - DNA, 96 bp, Aspergillus novofumigatus
  misc_feature: 233
ctcttcttctttttttattatatatctatcttttttttctttatttatttattattctaacctttaacttactatccctaactcttatttatattc

SEQ ID NO: 11779 - DNA, 96 bp, Aspergillus novofumigatus
  misc_feature: 233
ataagagatagttagattaagagaaaaagaaataaaataaaattataagagattattttactaaggagaaaagaaaagaataaaagttaattaatt

SEQ ID NO: 11780 - DNA, 96 bp, Aspergillus novofumigatus
  misc_feature: 233
agagtcatctagatctagggagatatttaatttatgaatatatatttacatataaatatatataataaagggaaataaatatatttaacttatact

SEQ ID NO: 11781 - DNA, 96 bp, Aspergillus novofumigatus
  misc_feature: 233
aaaacctaacttttttattcttttttctaattaaataatctatattattttactccctattcttcttttctttctaattaattaacttttattctt

SEQ ID NO: 11782 - DNA, 96 bp, Aspergillus novofumigatus
  misc_feature: 232
ttattttaattctctttctaattttttattctagctcttattctaattctcctcttcttctttttttattatatatctatcttttttttctttatt

SEQ ID NO: 11783 - DNA, 96 bp, Aspergillus novofumigatus
  misc_feature: 232
ttattattttacttctttttattcttatattctatcttaattctatttaagtaattaatttctctctcttttctaaactatttcttataaaataat

SEQ ID NO: 11784 - DNA, 96 bp, Aspergillus novofumigatus
  misc_feature: 232
aaataaataaagaaaaaaaagatagatatataataaaaaaagaagaagaggagaattagaataagagctagaataaaaaattagaaagagaattaa

SEQ ID NO: 11785 - DNA, 96 bp, Aspergillus novofumigatus
  misc_feature: 232
tcttattctaattcttattctaattcttattctaattctctttctagcaccttattctaattctttttctaactcttattttttttaattcttttt

SEQ ID NO: 11786 - DNA, 96 bp, Aspergillus novofumigatus
  misc_feature: 232
agagatagttagattaagagaaaaagaaataaaataaaattataagagattattttactaaggagaaaagaaaagaataaaagttaattaattaga

SEQ ID NO: 11787 - DNA, 96 bp, Aspergillus novofumigatus
  misc_feature: 232
tattttacttctttttattcttatattctatcttaattctatttaagtaattaatttctctctcttttctaaactatttcttataaaataatctct

SEQ ID NO: 11788 - DNA, 96 bp, Aspergillus novofumigatus
  misc_feature: 232
tattattttacttctttttattcttatattctatcttaattctatttaagtaattaatttctctctcttttctaaactatttcttataaaataatc

SEQ ID NO: 11789 - DNA, 96 bp, Aspergillus novofumigatus
  misc_feature: 232
atacccccctaattaagcatatttcagcttataggataggtaatatataatatttatataataagttattatattaataaataaaatatatagata

SEQ ID NO: 11790 - DNA, 96 bp, Aspergillus novofumigatus
  misc_feature: 232
tatacccccctaattaagcatatttcagcttataggataggtaatatataatatttatataataagttattatattaataaataaaatatatagat

SEQ ID NO: 11791 - DNA, 96 bp, Aspergillus novofumigatus
  misc_feature: 232
ctcctcttcttctttttttattatatatctatcttttttttctttatttatttattattctaacctttaacttactatccctaactcttatttata

SEQ ID NO: 11792 - DNA, 96 bp, Aspergillus novofumigatus
  misc_feature: 232
cttcttctttttttattatatatctatcttttttttctttatttatttattattctaacctttaacttactatccctaactcttatttatattcta

SEQ ID NO: 11793 - DNA, 96 bp, Aspergillus novofumigatus
  misc_feature: 232
tactcttacccttactactttaagttatacttattatatctatctagctattctaaggtaatattttattctaaatactttatatatattaaaacc

SEQ ID NO: 11794 - DNA, 96 bp, Aspergillus novofumigatus
  misc_feature: 232
taaattattaaaacctaacttttttattcttttttctaattaaataatctatattattttactccctattcttcttttctttctaattaattaact

SEQ ID NO: 11795 - DNA, 96 bp, Aspergillus novofumigatus
  misc_feature: 232
attttaattctctttctaattttttattctagctcttattctaattctcctcttcttctttttttattatatatctatcttttttttctttattta

SEQ ID NO: 11796 - DNA, 96 bp, Aspergillus novofumigatus
  misc_feature: 232
attttacttctttttattcttatattctatcttaattctatttaagtaattaatttctctctcttttctaaactatttcttataaaataatctctc

SEQ ID NO: 11797 - DNA, 96 bp, Aspergillus novofumigatus
  misc_feature: 232
cttattttaattctctttctaattttttattctagctcttattctaattctcctcttcttctttttttattatatatctatcttttttttctttat

SEQ ID NO: 11798 - DNA, 96 bp, Aspergillus novofumigatus
  misc_feature: 232
agggatagtaagttaaaggttagaataataaataaataaagaaaaaaaagatagatatataataaaaaaagaagaagaggagaattagaataagag

SEQ ID NO: 11799 - DNA, 96 bp, Aspergillus novofumigatus
  misc_feature: 232
cctcttcttctttttttattatatatctatcttttttttctttatttatttattattctaacctttaacttactatccctaactcttatttatatt

SEQ ID NO: 11800 - DNA, 96 bp, Aspergillus novofumigatus
  misc_feature: 232
attcttattctaattcttattctaattcttattctaattctctttctagcaccttattctaattctttttctaactcttattttttttaattcttt

SEQ ID NO: 11801 - DNA, 96 bp, Aspergillus novofumigatus
  misc_feature: 232
aataaataaataaagaaaaaaaagatagatatataataaaaaaagaagaagaggagaattagaataagagctagaataaaaaattagaaagagaat

SEQ ID NO: 11802 - DNA, 96 bp, Aspergillus novofumigatus
  misc_feature: 232
aaacctaacttttttattcttttttctaattaaataatctatattattttactccctattcttcttttctttctaattaattaacttttattcttt

SEQ ID NO: 11803 - DNA, 96 bp, Aspergillus novofumigatus
  misc_feature: 231
gagatagttagattaagagaaaaagaaataaaataaaattataagagattattttactaaggagaaaagaaaagaataaaagttaattaattagaa

SEQ ID NO: 11804 - DNA, 96 bp, Aspergillus novofumigatus
  misc_feature: 231
ttaacttactacccctaactcttcttttaatttttattaaaattcttattttaattctctttctaattttttattctagctcttattctaattctc

SEQ ID NO: 11805 - DNA, 96 bp, Aspergillus novofumigatus
  misc_feature: 231
atagttagattaagagaaaaagaaataaaataaaattataagagattattttactaaggagaaaagaaaagaataaaagttaattaattagaaaga

SEQ ID NO: 11806 - DNA, 96 bp, Aspergillus novofumigatus
  misc_feature: 231
gtaagggttagtaagtttaagataagaataaggggtagaaatatataagatagagagagttttagtaaagagaagaaataaatataattaaaaata

SEQ ID NO: 11807 - DNA, 96 bp, Aspergillus novofumigatus
  misc_feature: 231
taaataaataaagaaaaaaaagatagatatataataaaaaaagaagaagaggagaattagaataagagctagaataaaaaattagaaagagaatta

SEQ ID NO: 11808 - DNA, 96 bp, Aspergillus novofumigatus
  misc_feature: 231
aagagatagttagattaagagaaaaagaaataaaataaaattataagagattattttactaaggagaaaagaaaagaataaaagttaattaattag

SEQ ID NO: 11809 - DNA, 96 bp, Aspergillus novofumigatus
  misc_feature: 230
attactcttacccttactactttaagttatacttattatatctatctagctattctaaggtaatattttattctaaatactttatatatattaaaa

SEQ ID NO: 11810 - DNA, 96 bp, Aspergillus novofumigatus
  misc_feature: 230
ttactcttacccttactactttaagttatacttattatatctatctagctattctaaggtaatattttattctaaatactttatatatattaaaac

SEQ ID NO: 11811 - DNA, 96 bp, Aspergillus novofumigatus
  misc_feature: 230
aaataagagatagttagattaagagaaaaagaaataaaataaaattataagagattattttactaaggagaaaagaaaagaataaaagttaattaa

SEQ ID NO: 11812 - DNA, 96 bp, Aspergillus novofumigatus
  misc_feature: 230
tctcctcttcttctttttttattatatatctatcttttttttctttatttatttattattctaacctttaacttactatccctaactcttatttat

SEQ ID NO: 11813 - DNA, 96 bp, Aspergillus novofumigatus
  misc_feature: 230
ataaattattaaaacctaacttttttattcttttttctaattaaataatctatattattttactccctattcttcttttctttctaattaattaac

SEQ ID NO: 11814 - DNA, 96 bp, Aspergillus novofumigatus
  misc_feature: 230
gatagttagattaagagaaaaagaaataaaataaaattataagagattattttactaaggagaaaagaaaagaataaaagttaattaattagaaag

SEQ ID NO: 11815 - DNA, 96 bp, Aspergillus novofumigatus
  misc_feature: 230
ataaataaataaagaaaaaaaagatagatatataataaaaaaagaagaagaggagaattagaataagagctagaataaaaaattagaaagagaatt

SEQ ID NO: 11816 - DNA, 96 bp, Aspergillus novofumigatus
  misc_feature: 230
actacccctaactcttcttttaatttttattaaaattcttattttaattctctttctaattttttattctagctcttattctaattctcctcttct

SEQ ID NO: 11817 - DNA, 96 bp, Aspergillus novofumigatus
  misc_feature: 229
ttcttattttaattctctttctaattttttattctagctcttattctaattctcctcttcttctttttttattatatatctatcttttttttcttt

SEQ ID NO: 11818 - DNA, 96 bp, Aspergillus novofumigatus
  misc_feature: 229
cttattctaattctcctcttcttctttttttattatatatctatcttttttttctttatttatttattattctaacctttaacttactatccctaa

SEQ ID NO: 11819 - DNA, 96 bp, Aspergillus novofumigatus
  misc_feature: 229
gaataagagctagaataaaaaattagaaagagaattaaaataagaattttaataaaaattaaaagaagagttaggggtagtaagttaagagttaga

SEQ ID NO: 11820 - DNA, 96 bp, Aspergillus novofumigatus
  misc_feature: 229
tcctcttcttctttttttattatatatctatcttttttttctttatttatttattattctaacctttaacttactatccctaactcttatttatat

SEQ ID NO: 11821 - DNA, 96 bp, Aspergillus novofumigatus
  misc_feature: 229
tacccctaactcttcttttaatttttattaaaattcttattttaattctctttctaattttttattctagctcttattctaattctcctcttcttc

SEQ ID NO: 11822 - DNA, 96 bp, Aspergillus novofumigatus
  misc_feature: 229
gggatagtaagttaaaggttagaataataaataaataaagaaaaaaaagatagatatataataaaaaaagaagaagaggagaattagaataagagc

SEQ ID NO: 11823 - DNA, 96 bp, Aspergillus novofumigatus
  misc_feature: 229
cttaacttactacccctaactcttcttttaatttttattaaaattcttattttaattctctttctaattttttattctagctcttattctaattct

SEQ ID NO: 11824 - DNA, 96 bp, Aspergillus novofumigatus
  misc_feature: 229
attaaaattcttattttaattctctttctaattttttattctagctcttattctaattctcctcttcttctttttttattatatatctatcttttt

SEQ ID NO: 11825 - DNA, 96 bp, Aspergillus novofumigatus
  misc_feature: 229
actcttacccttactactttaagttatacttattatatctatctagctattctaaggtaatattttattctaaatactttatatatattaaaacct

SEQ ID NO: 11826 - DNA, 96 bp, Aspergillus novofumigatus
  misc_feature: 229
acccctaactcttcttttaatttttattaaaattcttattttaattctctttctaattttttattctagctcttattctaattctcctcttcttct

SEQ ID NO: 11827 - DNA, 96 bp, Aspergillus novofumigatus
  misc_feature: 228
attattattttacttctttttattcttatattctatcttaattctatttaagtaattaatttctctctcttttctaaactatttcttataaaataa

SEQ ID NO: 11828 - DNA, 96 bp, Aspergillus novofumigatus
  misc_feature: 228
ttattctaattctcctcttcttctttttttattatatatctatcttttttttctttatttatttattattctaacctttaacttactatccctaac

SEQ ID NO: 11829 - DNA, 96 bp, Aspergillus novofumigatus
  misc_feature: 228
ttattattattttacttctttttattcttatattctatcttaattctatttaagtaattaatttctctctcttttctaaactatttcttataaaat

SEQ ID NO: 11830 - DNA, 96 bp, Aspergillus novofumigatus
  misc_feature: 228
atcttaaactaatctatttattattattttacttctttttattcttatattctatcttaattctatttaagtaattaatttctctctcttttctaa

SEQ ID NO: 11831 - DNA, 96 bp, Aspergillus novofumigatus
  misc_feature: 228
tcttattttaattctctttctaattttttattctagctcttattctaattctcctcttcttctttttttattatatatctatcttttttttcttta

SEQ ID NO: 11832 - DNA, 96 bp, Aspergillus novofumigatus
  misc_feature: 228
tattattattttacttctttttattcttatattctatcttaattctatttaagtaattaatttctctctcttttctaaactatttcttataaaata

SEQ ID NO: 11833 - DNA, 96 bp, Aspergillus novofumigatus
  misc_feature: 228
tattttaattctctttctaattttttattctagctcttattctaattctcctcttcttctttttttattatatatctatcttttttttctttattt

SEQ ID NO: 11834 - DNA, 96 bp, Aspergillus novofumigatus
  misc_feature: 228
tattctaattctcctcttcttctttttttattatatatctatcttttttttctttatttatttattattctaacctttaacttactatccctaact

SEQ ID NO: 11835 - DNA, 96 bp, Aspergillus novofumigatus
  misc_feature: 228
gggagatatttaatttatgaatatatatttacatataaatatatataataaagggaaataaatatatttaacttatactagcctagtaattctata

SEQ ID NO: 11836 - DNA, 96 bp, Aspergillus novofumigatus
  misc_feature: 228
taacttcctatattatttatttatttcttttcatctttataaattattaaaacctaacttttttattcttttttctaattaaataatctatattat

SEQ ID NO: 11837 - DNA, 96 bp, Aspergillus novofumigatus
  misc_feature: 228
gtcatctagatctagggagatatttaatttatgaatatatatttacatataaatatatataataaagggaaataaatatatttaacttatactagc

SEQ ID NO: 11838 - DNA, 96 bp, Aspergillus novofumigatus
  misc_feature: 228
agtcatctagatctagggagatatttaatttatgaatatatatttacatataaatatatataataaagggaaataaatatatttaacttatactag

SEQ ID NO: 11839 - DNA, 96 bp, Aspergillus novofumigatus
  misc_feature: 228
attcttattttaattctctttctaattttttattctagctcttattctaattctcctcttcttctttttttattatatatctatcttttttttctt

SEQ ID NO: 11840 - DNA, 96 bp, Aspergillus novofumigatus
  misc_feature: 227
atttattattattttacttctttttattcttatattctatcttaattctatttaagtaattaatttctctctcttttctaaactatttcttataaa

SEQ ID NO: 11841 - DNA, 96 bp, Aspergillus novofumigatus
  misc_feature: 227
tatttattattattttacttctttttattcttatattctatcttaattctatttaagtaattaatttctctctcttttctaaactatttcttataa

SEQ ID NO: 11842 - DNA, 96 bp, Aspergillus novofumigatus
  misc_feature: 227
tctagatctagggagatatttaatttatgaatatatatttacatataaatatatataataaagggaaataaatatatttaacttatactagcctag

SEQ ID NO: 11843 - DNA, 96 bp, Aspergillus novofumigatus
  misc_feature: 227
tattaataatatatatctactctattaaacttttttactttttaatatatctctctctttatatattcttcttttctcttaaattattactcttac

SEQ ID NO: 11844 - DNA, 96 bp, Aspergillus novofumigatus
  misc_feature: 227
gatatttaatttatgaatatatatttacatataaatatatataataaagggaaataaatatatttaacttatactagcctagtaattctataatta

SEQ ID NO: 11845 - DNA, 96 bp, Aspergillus novofumigatus
  misc_feature: 227
acttctttttattcttatattctatcttaattctatttaagtaattaatttctctctcttttctaaactatttcttataaaataatctctctttta

SEQ ID NO: 11846 - DNA, 96 bp, Aspergillus novofumigatus
  misc_feature: 227
gagatatttaatttatgaatatatatttacatataaatatatataataaagggaaataaatatatttaacttatactagcctagtaattctataat

SEQ ID NO: 11847 - DNA, 96 bp, Aspergillus novofumigatus
  misc_feature: 227
cctaactcttcttttaatttttattaaaattcttattttaattctctttctaattttttattctagctcttattctaattctcctcttcttctttt

SEQ ID NO: 11848 - DNA, 96 bp, Aspergillus novofumigatus
  misc_feature: 227
aaaaaataagagatagttagattaagagaaaaagaaataaaataaaattataagagattattttactaaggagaaaagaaaagaataaaagttaat

SEQ ID NO: 11849 - DNA, 96 bp, Aspergillus novofumigatus
  misc_feature: 227
agatatttaatttatgaatatatatttacatataaatatatataataaagggaaataaatatatttaacttatactagcctagtaattctataatt

SEQ ID NO: 11850 - DNA, 96 bp, Aspergillus novofumigatus
  misc_feature: 227
aactcttcttttaatttttattaaaattcttattttaattctctttctaattttttattctagctcttattctaattctcctcttcttcttttttt

SEQ ID NO: 11851 - DNA, 96 bp, Aspergillus novofumigatus
  misc_feature: 226
tttattattattttacttctttttattcttatattctatcttaattctatttaagtaattaatttctctctcttttctaaactatttcttataaaa

SEQ ID NO: 11852 - DNA, 96 bp, Aspergillus novofumigatus
  misc_feature: 226
ttcttctttttttattatatatctatcttttttttctttatttatttattattctaacctttaacttactatccctaactcttatttatattctaa

SEQ ID NO: 11853 - DNA, 96 bp, Aspergillus novofumigatus
  misc_feature: 226
ggagatatttaatttatgaatatatatttacatataaatatatataataaagggaaataaatatatttaacttatactagcctagtaattctataa

SEQ ID NO: 11854 - DNA, 96 bp, Aspergillus novofumigatus
  misc_feature: 226
tataaattattaaaacctaacttttttattcttttttctaattaaataatctatattattttactccctattcttcttttctttctaattaattaa

SEQ ID NO: 11855 - DNA, 96 bp, Aspergillus novofumigatus
  misc_feature: 226
tcttaacttactacccctaactcttcttttaatttttattaaaattcttattttaattctctttctaattttttattctagctcttattctaattc

SEQ ID NO: 11856 - DNA, 96 bp, Aspergillus novofumigatus
  misc_feature: 226
atctagatctagggagatatttaatttatgaatatatatttacatataaatatatataataaagggaaataaatatatttaacttatactagccta

SEQ ID NO: 11857 - DNA, 96 bp, Aspergillus novofumigatus
  misc_feature: 226
tagagagagcttaggtttactttaattataatataaagaggaaaaggaggaaaaaaaggatataaagaaataaaaaaataagagatagttagatta

SEQ ID NO: 11858 - DNA, 96 bp, Aspergillus novofumigatus
  misc_feature: 226
aaaataagagatagttagattaagagaaaaagaaataaaataaaattataagagattattttactaaggagaaaagaaaagaataaaagttaatta

SEQ ID NO: 11859 - DNA, 96 bp, Aspergillus novofumigatus
  misc_feature: 226
taagggttagtaagtttaagataagaataaggggtagaaatatataagatagagagagttttagtaaagagaagaaataaatataattaaaaatag

SEQ ID NO: 11860 - DNA, 96 bp, Aspergillus novofumigatus
  misc_feature: 226
taaaattcttattttaattctctttctaattttttattctagctcttattctaattctcctcttcttctttttttattatatatctatcttttttt

SEQ ID NO: 11861 - DNA, 96 bp, Aspergillus novofumigatus
  misc_feature: 226
attaataatatatatctactctattaaacttttttactttttaatatatctctctctttatatattcttcttttctcttaaattattactcttacc

SEQ ID NO: 11862 - DNA, 96 bp, Aspergillus novofumigatus
  misc_feature: 226
aaattcttattttaattctctttctaattttttattctagctcttattctaattctcctcttcttctttttttattatatatctatcttttttttc

SEQ ID NO: 11863 - DNA, 96 bp, Aspergillus novofumigatus
  misc_feature: 226
ctcttcttttaatttttattaaaattcttattttaattctctttctaattttttattctagctcttattctaattctcctcttcttctttttttat

SEQ ID NO: 11864 - DNA, 96 bp, Aspergillus novofumigatus
  misc_feature: 226
ctcttaacttactacccctaactcttcttttaatttttattaaaattcttattttaattctctttctaattttttattctagctcttattctaatt

SEQ ID NO: 11865 - DNA, 96 bp, Aspergillus novofumigatus
  misc_feature: 226
ctagatctagggagatatttaatttatgaatatatatttacatataaatatatataataaagggaaataaatatatttaacttatactagcctagt

SEQ ID NO: 11866 - DNA, 96 bp, Aspergillus novofumigatus
  misc_feature: 226
ctacccctaactcttcttttaatttttattaaaattcttattttaattctctttctaattttttattctagctcttattctaattctcctcttctt

SEQ ID NO: 11867 - DNA, 96 bp, Aspergillus novofumigatus
  misc_feature: 226
aattcttattttaattctctttctaattttttattctagctcttattctaattctcctcttcttctttttttattatatatctatcttttttttct

SEQ ID NO: 11868 - DNA, 96 bp, Aspergillus novofumigatus
  misc_feature: 225
ttctttattttatcttaaactaatctatttattattattttacttctttttattcttatattctatcttaattctatttaagtaattaatttctct

SEQ ID NO: 11869 - DNA, 96 bp, Aspergillus novofumigatus
  misc_feature: 225
taataaataaataaagaaaaaaaagatagatatataataaaaaaagaagaagaggagaattagaataagagctagaataaaaaattagaaagagaa

SEQ ID NO: 11870 - DNA, 96 bp, Aspergillus novofumigatus
  misc_feature: 225
ttaataatatatatctactctattaaacttttttactttttaatatatctctctctttatatattcttcttttctcttaaattattactcttaccc

SEQ ID NO: 11871 - DNA, 96 bp, Aspergillus novofumigatus
  misc_feature: 225
aaaaaaataagagatagttagattaagagaaaaagaaataaaataaaattataagagattattttactaaggagaaaagaaaagaataaaagttaa

SEQ ID NO: 11872 - DNA, 96 bp, Aspergillus novofumigatus
  misc_feature: 225
ttaacttcctatattatttatttatttcttttcatctttataaattattaaaacctaacttttttattcttttttctaattaaataatctatatta

SEQ ID NO: 11873 - DNA, 96 bp, Aspergillus novofumigatus
  misc_feature: 225
ttaaaattcttattttaattctctttctaattttttattctagctcttattctaattctcctcttcttctttttttattatatatctatctttttt

SEQ ID NO: 11874 - DNA, 96 bp, Aspergillus novofumigatus
  misc_feature: 225
tcttctttttttattatatatctatcttttttttctttatttatttattattctaacctttaacttactatccctaactcttatttatattctaat

SEQ ID NO: 11875 - DNA, 96 bp, Aspergillus novofumigatus
  misc_feature: 225
ataataaataaataaagaaaaaaaagatagatatataataaaaaaagaagaagaggagaattagaataagagctagaataaaaaattagaaagaga

SEQ ID NO: 11876 - DNA, 96 bp, Aspergillus novofumigatus
  misc_feature: 225
taaactaatctatttattattattttacttctttttattcttatattctatcttaattctatttaagtaattaatttctctctcttttctaaacta

SEQ ID NO: 11877 - DNA, 96 bp, Aspergillus novofumigatus
  misc_feature: 225
tagatctagggagatatttaatttatgaatatatatttacatataaatatatataataaagggaaataaatatatttaacttatactagcctagta

SEQ ID NO: 11878 - DNA, 96 bp, Aspergillus novofumigatus
  misc_feature: 225
aatttttattaaaattcttattttaattctctttctaattttttattctagctcttattctaattctcctcttcttctttttttattatatatcta

SEQ ID NO: 11879 - DNA, 96 bp, Aspergillus novofumigatus
  misc_feature: 225
actcttcttttaatttttattaaaattcttattttaattctctttctaattttttattctagctcttattctaattctcctcttcttcttttttta

SEQ ID NO: 11880 - DNA, 96 bp, Aspergillus novofumigatus
  misc_feature: 225
cttaacttcctatattatttatttatttcttttcatctttataaattattaaaacctaacttttttattcttttttctaattaaataatctatatt

SEQ ID NO: 11881 - DNA, 96 bp, Aspergillus novofumigatus
  misc_feature: 225
catctagatctagggagatatttaatttatgaatatatatttacatataaatatatataataaagggaaataaatatatttaacttatactagcct

SEQ ID NO: 11882 - DNA, 96 bp, Aspergillus novofumigatus
  misc_feature: 225
aaactaatctatttattattattttacttctttttattcttatattctatcttaattctatttaagtaattaatttctctctcttttctaaactat

SEQ ID NO: 11883 - DNA, 96 bp, Aspergillus novofumigatus
  misc_feature: 225
aacttcctatattatttatttatttcttttcatctttataaattattaaaacctaacttttttattcttttttctaattaaataatctatattatt

SEQ ID NO: 11884 - DNA, 96 bp, Aspergillus novofumigatus
  misc_feature: 224
tagaataataaataaataaagaaaaaaaagatagatatataataaaaaaagaagaagaggagaattagaataagagctagaataaaaaattagaaa

SEQ ID NO: 11885 - DNA, 96 bp, Aspergillus novofumigatus
  misc_feature: 224
ttatttcttttcatctttataaattattaaaacctaacttttttattcttttttctaattaaataatctatattattttactccctattcttcttt

SEQ ID NO: 11886 - DNA, 96 bp, Aspergillus novofumigatus
  misc_feature: 224
ttaaactaatctatttattattattttacttctttttattcttatattctatcttaattctatttaagtaattaatttctctctcttttctaaact

SEQ ID NO: 11887 - DNA, 96 bp, Aspergillus novofumigatus
  misc_feature: 224
tcttttcatctttataaattattaaaacctaacttttttattcttttttctaattaaataatctatattattttactccctattcttcttttcttt

SEQ ID NO: 11888 - DNA, 96 bp, Aspergillus novofumigatus
  misc_feature: 224
gaataataaataaataaagaaaaaaaagatagatatataataaaaaaagaagaagaggagaattagaataagagctagaataaaaaattagaaaga

SEQ ID NO: 11889 - DNA, 96 bp, Aspergillus novofumigatus
  misc_feature: 224
tcttatattctatcttaattctatttaagtaattaatttctctctcttttctaaactatttcttataaaataatctctcttttatattattctctt

SEQ ID NO: 11890 - DNA, 96 bp, Aspergillus novofumigatus
  misc_feature: 224
tctagggagatatttaatttatgaatatatatttacatataaatatatataataaagggaaataaatatatttaacttatactagcctagtaattc

SEQ ID NO: 11891 - DNA, 96 bp, Aspergillus novofumigatus
  misc_feature: 224
tattaaaattcttattttaattctctttctaattttttattctagctcttattctaattctcctcttcttctttttttattatatatctatctttt

SEQ ID NO: 11892 - DNA, 96 bp, Aspergillus novofumigatus
  misc_feature: 224
acccttactactttaagttatacttattatatctatctagctattctaaggtaatattttattctaaatactttatatatattaaaacctaaacta

SEQ ID NO: 11893 - DNA, 96 bp, Aspergillus novofumigatus
  misc_feature: 224
attatttatttatttcttttcatctttataaattattaaaacctaacttttttattcttttttctaattaaataatctatattattttactcccta

SEQ ID NO: 11894 - DNA, 96 bp, Aspergillus novofumigatus
  misc_feature: 224
tagaataagagctagaataaaaaattagaaagagaattaaaataagaattttaataaaaattaaaagaagagttaggggtagtaagttaagagtta

SEQ ID NO: 11895 - DNA, 96 bp, Aspergillus novofumigatus
  misc_feature: 224
cttctttttattcttatattctatcttaattctatttaagtaattaatttctctctcttttctaaactatttcttataaaataatctctcttttat

SEQ ID NO: 11896 - DNA, 96 bp, Aspergillus novofumigatus
  misc_feature: 224
ctaactcttcttttaatttttattaaaattcttattttaattctctttctaattttttattctagctcttattctaattctcctcttcttcttttt

SEQ ID NO: 11897 - DNA, 96 bp, Aspergillus novofumigatus
  misc_feature: 224
attcttattctaatccttaacttcctatattatttatttatttcttttcatctttataaattattaaaacctaacttttttattcttttttctaat

SEQ ID NO: 11898 - DNA, 96 bp, Aspergillus novofumigatus
  misc_feature: 224
aaaattcttattttaattctctttctaattttttattctagctcttattctaattctcctcttcttctttttttattatatatctatctttttttt

SEQ ID NO: 11899 - DNA, 96 bp, Aspergillus novofumigatus
  misc_feature: 223
tttttattcttatattctatcttaattctatttaagtaattaatttctctctcttttctaaactatttcttataaaataatctctcttttatatta

SEQ ID NO: 11900 - DNA, 96 bp, Aspergillus novofumigatus
  misc_feature: 223
ttttcatctttataaattattaaaacctaacttttttattcttttttctaattaaataatctatattattttactccctattcttcttttctttct

SEQ ID NO: 11901 - DNA, 96 bp, Aspergillus novofumigatus
  misc_feature: 223
ttttattaaaattcttattttaattctctttctaattttttattctagctcttattctaattctcctcttcttctttttttattatatatctatct

SEQ ID NO: 11902 - DNA, 96 bp, Aspergillus novofumigatus
  misc_feature: 223
tttcttttcatctttataaattattaaaacctaacttttttattcttttttctaattaaataatctatattattttactccctattcttcttttct

SEQ ID NO: 11903 - DNA, 96 bp, Aspergillus novofumigatus
  misc_feature: 223
tcttaaactaatctatttattattattttacttctttttattcttatattctatcttaattctatttaagtaattaatttctctctcttttctaaa

SEQ ID NO: 11904 - DNA, 96 bp, Aspergillus novofumigatus
  misc_feature: 223
ttcttattctaatccttaacttcctatattatttatttatttcttttcatctttataaattattaaaacctaacttttttattcttttttctaatt

SEQ ID NO: 11905 - DNA, 96 bp, Aspergillus novofumigatus
  misc_feature: 223
agatctagggagatatttaatttatgaatatatatttacatataaatatatataataaagggaaataaatatatttaacttatactagcctagtaa

SEQ ID NO: 11906 - DNA, 96 bp, Aspergillus novofumigatus
  misc_feature: 223
tctatttattattattttacttctttttattcttatattctatcttaattctatttaagtaattaatttctctctcttttctaaactatttcttat

SEQ ID NO: 11907 - DNA, 96 bp, Aspergillus novofumigatus
  misc_feature: 223
tattatttatttatttcttttcatctttataaattattaaaacctaacttttttattcttttttctaattaaataatctatattattttactccct

SEQ ID NO: 11908 - DNA, 96 bp, Aspergillus novofumigatus
  misc_feature: 223
ctcttacccttactactttaagttatacttattatatctatctagctattctaaggtaatattttattctaaatactttatatatattaaaaccta

SEQ ID NO: 11909 - DNA, 96 bp, Aspergillus novofumigatus
  misc_feature: 223
taatttttattaaaattcttattttaattctctttctaattttttattctagctcttattctaattctcctcttcttctttttttattatatatct

SEQ ID NO: 11910 - DNA, 96 bp, Aspergillus novofumigatus
  misc_feature: 223
taataatatatatctactctattaaacttttttactttttaatatatctctctctttatatattcttcttttctcttaaattattactcttaccct

SEQ ID NO: 11911 - DNA, 96 bp, Aspergillus novofumigatus
  misc_feature: 223
cccttactactttaagttatacttattatatctatctagctattctaaggtaatattttattctaaatactttatatatattaaaacctaaactac

SEQ ID NO: 11912 - DNA, 96 bp, Aspergillus novofumigatus
  misc_feature: 223
cttctttttttattatatatctatcttttttttctttatttatttattattctaacctttaacttactatccctaactcttatttatattctaatt

SEQ ID NO: 11913 - DNA, 96 bp, Aspergillus novofumigatus
  misc_feature: 223
ctagggagatatttaatttatgaatatatatttacatataaatatatataataaagggaaataaatatatttaacttatactagcctagtaattct

SEQ ID NO: 11914 - DNA, 96 bp, Aspergillus novofumigatus
  misc_feature: 223
agaataagagctagaataaaaaattagaaagagaattaaaataagaattttaataaaaattaaaagaagagttaggggtagtaagttaagagttag

SEQ ID NO: 11915 - DNA, 96 bp, Aspergillus novofumigatus
  misc_feature: 223
attttatcttaaactaatctatttattattattttacttctttttattcttatattctatcttaattctatttaagtaattaatttctctctcttt

SEQ ID NO: 11916 - DNA, 96 bp, Aspergillus novofumigatus
  misc_feature: 223
atttattaataatatatatctactctattaaacttttttactttttaatatatctctctctttatatattcttcttttctcttaaattattactct

SEQ ID NO: 11917 - DNA, 96 bp, Aspergillus novofumigatus
  misc_feature: 223
actcttaacttactacccctaactcttcttttaatttttattaaaattcttattttaattctctttctaattttttattctagctcttattctaat

SEQ ID NO: 11918 - DNA, 96 bp, Aspergillus novofumigatus
  misc_feature: 223
aaaaataagagatagttagattaagagaaaaagaaataaaataaaattataagagattattttactaaggagaaaagaaaagaataaaagttaatt

SEQ ID NO: 11919 - DNA, 96 bp, Aspergillus novofumigatus
  misc_feature: 222
tttattaaaattcttattttaattctctttctaattttttattctagctcttattctaattctcctcttcttctttttttattatatatctatctt

SEQ ID NO: 11920 - DNA, 96 bp, Aspergillus novofumigatus
  misc_feature: 222
tttataaattattaaaacctaacttttttattcttttttctaattaaataatctatattattttactccctattcttcttttctttctaattaatt

SEQ ID NO: 11921 - DNA, 96 bp, Aspergillus novofumigatus
  misc_feature: 222
ttctttttattcttatattctatcttaattctatttaagtaattaatttctctctcttttctaaactatttcttataaaataatctctcttttata

SEQ ID NO: 11922 - DNA, 96 bp, Aspergillus novofumigatus
  misc_feature: 222
ttcttttcatctttataaattattaaaacctaacttttttattcttttttctaattaaataatctatattattttactccctattcttcttttctt

SEQ ID NO: 11923 - DNA, 96 bp, Aspergillus novofumigatus
  misc_feature: 222
ttcttttaatttttattaaaattcttattttaattctctttctaattttttattctagctcttattctaattctcctcttcttctttttttattat

SEQ ID NO: 11924 - DNA, 96 bp, Aspergillus novofumigatus
  misc_feature: 222
ttattctctctttttctttattttatcttaaactaatctatttattattattttacttctttttattcttatattctatcttaattctatttaagt

SEQ ID NO: 11925 - DNA, 96 bp, Aspergillus novofumigatus
  misc_feature: 222
ttattaaaattcttattttaattctctttctaattttttattctagctcttattctaattctcctcttcttctttttttattatatatctatcttt

SEQ ID NO: 11926 - DNA, 96 bp, Aspergillus novofumigatus
  misc_feature: 222
ttataaattattaaaacctaacttttttattcttttttctaattaaataatctatattattttactccctattcttcttttctttctaattaatta

SEQ ID NO: 11927 - DNA, 96 bp, Aspergillus novofumigatus
  misc_feature: 222
tcttttaatttttattaaaattcttattttaattctctttctaattttttattctagctcttattctaattctcctcttcttctttttttattata

SEQ ID NO: 11928 - DNA, 96 bp, Aspergillus novofumigatus
  misc_feature: 222
tcatctagatctagggagatatttaatttatgaatatatatttacatataaatatatataataaagggaaataaatatatttaacttatactagcc

SEQ ID NO: 11929 - DNA, 96 bp, Aspergillus novofumigatus
  misc_feature: 222
tattttatcttaaactaatctatttattattattttacttctttttattcttatattctatcttaattctatttaagtaattaatttctctctctt

SEQ ID NO: 11930 - DNA, 96 bp, Aspergillus novofumigatus
  misc_feature: 222
tattctctctttttctttattttatcttaaactaatctatttattattattttacttctttttattcttatattctatcttaattctatttaagta

SEQ ID NO: 11931 - DNA, 96 bp, Aspergillus novofumigatus
  misc_feature: 222
tatcttaaactaatctatttattattattttacttctttttattcttatattctatcttaattctatttaagtaattaatttctctctcttttcta

SEQ ID NO: 11932 - DNA, 96 bp, Aspergillus novofumigatus
  misc_feature: 222
aatccttaacttcctatattatttatttatttcttttcatctttataaattattaaaacctaacttttttattcttttttctaattaaataatcta

SEQ ID NO: 11933 - DNA, 96 bp, Aspergillus novofumigatus
  misc_feature: 222
tacccttactactttaagttatacttattatatctatctagctattctaaggtaatattttattctaaatactttatatatattaaaacctaaact

SEQ ID NO: 11934 - DNA, 96 bp, Aspergillus novofumigatus
  misc_feature: 222
cttcttttaatttttattaaaattcttattttaattctctttctaattttttattctagctcttattctaattctcctcttcttctttttttatta

SEQ ID NO: 11935 - DNA, 96 bp, Aspergillus novofumigatus
  misc_feature: 222
taaaaaaataagagatagttagattaagagaaaaagaaataaaataaaattataagagattattttactaaggagaaaagaaaagaataaaagtta

SEQ ID NO: 11936 - DNA, 96 bp, Aspergillus novofumigatus
  misc_feature: 222
taactcttcttttaatttttattaaaattcttattttaattctctttctaattttttattctagctcttattctaattctcctcttcttctttttt

SEQ ID NO: 11937 - DNA, 96 bp, Aspergillus novofumigatus
  misc_feature: 222
cttaaactaatctatttattattattttacttctttttattcttatattctatcttaattctatttaagtaattaatttctctctcttttctaaac

SEQ ID NO: 11938 - DNA, 96 bp, Aspergillus novofumigatus
  misc_feature: 222
atattatttatttatttcttttcatctttataaattattaaaacctaacttttttattcttttttctaattaaataatctatattattttactccc

SEQ ID NO: 11939 - DNA, 96 bp, Aspergillus novofumigatus
  misc_feature: 222
gctaacatactatataaaccaaccgtataatatatatctctgcgcattatggtatactaaaatatatattcattcccaaatatatcaatgctgatc

SEQ ID NO: 11940 - DNA, 96 bp, Aspergillus novofumigatus
  misc_feature: 222
atttcttttcatctttataaattattaaaacctaacttttttattcttttttctaattaaataatctatattattttactccctattcttcttttc

SEQ ID NO: 11941 - DNA, 96 bp, Aspergillus novofumigatus
  misc_feature: 222
agaataataaataaataaagaaaaaaaagatagatatataataaaaaaagaagaagaggagaattagaataagagctagaataaaaaattagaaag

SEQ ID NO: 11942 - DNA, 96 bp, Aspergillus novofumigatus
  misc_feature: 222
ccttaacttcctatattatttatttatttcttttcatctttataaattattaaaacctaacttttttattcttttttctaattaaataatctatat

SEQ ID NO: 11943 - DNA, 96 bp, Aspergillus novofumigatus
  misc_feature: 222
atttttattaaaattcttattttaattctctttctaattttttattctagctcttattctaattctcctcttcttctttttttattatatatctat

SEQ ID NO: 11944 - DNA, 96 bp, Aspergillus novofumigatus
  misc_feature: 222
atccttaacttcctatattatttatttatttcttttcatctttataaattattaaaacctaacttttttattcttttttctaattaaataatctat

SEQ ID NO: 11945 - DNA, 96 bp, Aspergillus novofumigatus
  misc_feature: 222
agggagatatttaatttatgaatatatatttacatataaatatatataataaagggaaataaatatatttaacttatactagcctagtaattctat

SEQ ID NO: 11946 - DNA, 96 bp, Aspergillus novofumigatus
  misc_feature: 221
tttttctttattttatcttaaactaatctatttattattattttacttctttttattcttatattctatcttaattctatttaagtaattaatttc

SEQ ID NO: 11947 - DNA, 96 bp, Aspergillus novofumigatus
  misc_feature: 221
ttttatcttaaactaatctatttattattattttacttctttttattcttatattctatcttaattctatttaagtaattaatttctctctctttt

SEQ ID NO: 11948 - DNA, 96 bp, Aspergillus novofumigatus
  misc_feature: 221
tttattaataatatatatctactctattaaacttttttactttttaatatatctctctctttatatattcttcttttctcttaaattattactctt

SEQ ID NO: 11949 - DNA, 96 bp, Aspergillus novofumigatus
  misc_feature: 221
tttatatattatttaaataatctttctctttattctctctttttctttattttatcttaaactaatctatttattattattttacttctttttatt

SEQ ID NO: 11950 - DNA, 96 bp, Aspergillus novofumigatus
  misc_feature: 221
tttaatttttattaaaattcttattttaattctctttctaattttttattctagctcttattctaattctcctcttcttctttttttattatatat

SEQ ID NO: 11951 - DNA, 96 bp, Aspergillus novofumigatus
  misc_feature: 221
ttctttaattcttattctaatccttaacttcctatattatttatttatttcttttcatctttataaattattaaaacctaacttttttattctttt

SEQ ID NO: 11952 - DNA, 96 bp, Aspergillus novofumigatus
  misc_feature: 221
ttcttatattctatcttaattctatttaagtaattaatttctctctcttttctaaactatttcttataaaataatctctcttttatattattctct

SEQ ID NO: 11953 - DNA, 96 bp, Aspergillus novofumigatus
  misc_feature: 221
ttatttatttcttttcatctttataaattattaaaacctaacttttttattcttttttctaattaaataatctatattattttactccctattctt

SEQ ID NO: 11954 - DNA, 96 bp, Aspergillus novofumigatus
  misc_feature: 221
ttatttatttatttcttttcatctttataaattattaaaacctaacttttttattcttttttctaattaaataatctatattattttactccctat

SEQ ID NO: 11955 - DNA, 96 bp, Aspergillus novofumigatus
  misc_feature: 221
ttatatattatttaaataatctttctctttattctctctttttctttattttatcttaaactaatctatttattattattttacttctttttattc

SEQ ID NO: 11956 - DNA, 96 bp, Aspergillus novofumigatus
  misc_feature: 221
aactcttaacttactacccctaactcttcttttaatttttattaaaattcttattttaattctctttctaattttttattctagctcttattctaa

SEQ ID NO: 11957 - DNA, 96 bp, Aspergillus novofumigatus
  misc_feature: 221
aattcttattctaatccttaacttcctatattatttatttatttcttttcatctttataaattattaaaacctaacttttttattcttttttctaa

SEQ ID NO: 11958 - DNA, 96 bp, Aspergillus novofumigatus
  misc_feature: 221
ttacccttactactttaagttatacttattatatctatctagctattctaaggtaatattttattctaaatactttatatatattaaaacctaaac

SEQ ID NO: 11959 - DNA, 96 bp, Aspergillus novofumigatus
  misc_feature: 221
tctttattttatcttaaactaatctatttattattattttacttctttttattcttatattctatcttaattctatttaagtaattaatttctctc

SEQ ID NO: 11960 - DNA, 96 bp, Aspergillus novofumigatus
  misc_feature: 221
tctttaattcttattctaatccttaacttcctatattatttatttatttcttttcatctttataaattattaaaacctaacttttttattcttttt

SEQ ID NO: 11961 - DNA, 96 bp, Aspergillus novofumigatus
  misc_feature: 221
tcttcttttaatttttattaaaattcttattttaattctctttctaattttttattctagctcttattctaattctcctcttcttctttttttatt

SEQ ID NO: 11962 - DNA, 96 bp, Aspergillus novofumigatus
  misc_feature: 221
tatttcttttcatctttataaattattaaaacctaacttttttattcttttttctaattaaataatctatattattttactccctattcttctttt

SEQ ID NO: 11963 - DNA, 96 bp, Aspergillus novofumigatus
  misc_feature: 221
tatatattatttaaataatctttctctttattctctctttttctttattttatcttaaactaatctatttattattattttacttctttttattct

SEQ ID NO: 11964 - DNA, 96 bp, Aspergillus novofumigatus
  misc_feature: 221
ctatttattattattttacttctttttattcttatattctatcttaattctatttaagtaattaatttctctctcttttctaaactatttcttata

SEQ ID NO: 11965 - DNA, 96 bp, Aspergillus novofumigatus
  misc_feature: 221
ctctctttttctttattttatcttaaactaatctatttattattattttacttctttttattcttatattctatcttaattctatttaagtaatta

SEQ ID NO: 11966 - DNA, 96 bp, Aspergillus novofumigatus
  misc_feature: 221
cttttcatctttataaattattaaaacctaacttttttattcttttttctaattaaataatctatattattttactccctattcttcttttctttc

SEQ ID NO: 11967 - DNA, 96 bp, Aspergillus novofumigatus
  misc_feature: 221
ctttttattcttatattctatcttaattctatttaagtaattaatttctctctcttttctaaactatttcttataaaataatctctcttttatatt

SEQ ID NO: 11968 - DNA, 96 bp, Aspergillus novofumigatus
  misc_feature: 221
ccttactactttaagttatacttattatatctatctagctattctaaggtaatattttattctaaatactttatatatattaaaacctaaactact

SEQ ID NO: 11969 - DNA, 96 bp, Aspergillus novofumigatus
  misc_feature: 221
atttatttcttttcatctttataaattattaaaacctaacttttttattcttttttctaattaaataatctatattattttactccctattcttct

SEQ ID NO: 11970 - DNA, 96 bp, Aspergillus novofumigatus
  misc_feature: 221
atctagggagatatttaatttatgaatatatatttacatataaatatatataataaagggaaataaatatatttaacttatactagcctagtaatt

SEQ ID NO: 11971 - DNA, 96 bp, Aspergillus novofumigatus
  misc_feature: 221
actaatctatttattattattttacttctttttattcttatattctatcttaattctatttaagtaattaatttctctctcttttctaaactattt

SEQ ID NO: 11972 - DNA, 96 bp, Aspergillus novofumigatus
  misc_feature: 220
tttcatctttataaattattaaaacctaacttttttattcttttttctaattaaataatctatattattttactccctattcttcttttctttcta

SEQ ID NO: 11973 - DNA, 96 bp, Aspergillus novofumigatus
  misc_feature: 220
tttatttcttttcatctttataaattattaaaacctaacttttttattcttttttctaattaaataatctatattattttactccctattcttctt

SEQ ID NO: 11974 - DNA, 96 bp, Aspergillus novofumigatus
  misc_feature: 220
tttaattcttattctaatccttaacttcctatattatttatttatttcttttcatctttataaattattaaaacctaacttttttattcttttttc

SEQ ID NO: 11975 - DNA, 96 bp, Aspergillus novofumigatus
  misc_feature: 220
ttctttttttattatatatctatcttttttttctttatttatttattattctaacctttaacttactatccctaactcttatttatattctaattc

SEQ ID NO: 11976 - DNA, 96 bp, Aspergillus novofumigatus
  misc_feature: 220
attctctctttttctttattttatcttaaactaatctatttattattattttacttctttttattcttatattctatcttaattctatttaagtaa

SEQ ID NO: 11977 - DNA, 96 bp, Aspergillus novofumigatus
  misc_feature: 220
tctctctttttctttattttatcttaaactaatctatttattattattttacttctttttattcttatattctatcttaattctatttaagtaatt

SEQ ID NO: 11978 - DNA, 96 bp, Aspergillus novofumigatus
  misc_feature: 220
tatttatttcttttcatctttataaattattaaaacctaacttttttattcttttttctaattaaataatctatattattttactccctattcttc

SEQ ID NO: 11979 - DNA, 96 bp, Aspergillus novofumigatus
  misc_feature: 220
tattctttaattcttattctaatccttaacttcctatattatttatttatttcttttcatctttataaattattaaaacctaacttttttattctt

SEQ ID NO: 11980 - DNA, 96 bp, Aspergillus novofumigatus
  misc_feature: 220
tattcttatattctatcttaattctatttaagtaattaatttctctctcttttctaaactatttcttataaaataatctctcttttatattattct

SEQ ID NO: 11981 - DNA, 96 bp, Aspergillus novofumigatus
  misc_feature: 220
ggagtaaaataatatagattatttaattagaaaaaagaataaaaaagttaggttttaataatttataaagatgaaaagaaataaataaataatata

SEQ ID NO: 11982 - DNA, 96 bp, Aspergillus novofumigatus
  misc_feature: 220
tactttaagttatacttattatatctatctagctattctaaggtaatattttattctaaatactttatatatattaaaacctaaactactaaacta

SEQ ID NO: 11983 - DNA, 96 bp, Aspergillus novofumigatus
  misc_feature: 220
taatccttaacttcctatattatttatttatttcttttcatctttataaattattaaaacctaacttttttattcttttttctaattaaataatct

SEQ ID NO: 11984 - DNA, 96 bp, Aspergillus novofumigatus
  misc_feature: 220
actactttaagttatacttattatatctatctagctattctaaggtaatattttattctaaatactttatatatattaaaacctaaactactaaac

SEQ ID NO: 11985 - DNA, 96 bp, Aspergillus novofumigatus
  misc_feature: 220
cttttaatttttattaaaattcttattttaattctctttctaattttttattctagctcttattctaattctcctcttcttctttttttattatat

SEQ ID NO: 11986 - DNA, 96 bp, Aspergillus novofumigatus
  misc_feature: 220
ctttaattcttattctaatccttaacttcctatattatttatttatttcttttcatctttataaattattaaaacctaacttttttattctttttt

SEQ ID NO: 11987 - DNA, 96 bp, Aspergillus novofumigatus
  misc_feature: 220
aataataaataaataaagaaaaaaaagatagatatataataaaaaaagaagaagaggagaattagaataagagctagaataaaaaattagaaagag

SEQ ID NO: 11988 - DNA, 96 bp, Aspergillus novofumigatus
  misc_feature: 220
ctactttaagttatacttattatatctatctagctattctaaggtaatattttattctaaatactttatatatattaaaacctaaactactaaact

SEQ ID NO: 11989 - DNA, 96 bp, Aspergillus novofumigatus
  misc_feature: 220
atatttattaataatatatatctactctattaaacttttttactttttaatatatctctctctttatatattcttcttttctcttaaattattact

SEQ ID NO: 11990 - DNA, 96 bp, Aspergillus novofumigatus
  misc_feature: 220
aataatatatatctactctattaaacttttttactttttaatatatctctctctttatatattcttcttttctcttaaattattactcttaccctt

SEQ ID NO: 11991 - DNA, 96 bp, Aspergillus novofumigatus
  misc_feature: 219
tttttattaaaattcttattttaattctctttctaattttttattctagctcttattctaattctcctcttcttctttttttattatatatctatc

SEQ ID NO: 11992 - DNA, 96 bp, Aspergillus novofumigatus
  misc_feature: 219
tttattttatcttaaactaatctatttattattattttacttctttttattcttatattctatcttaattctatttaagtaattaatttctctctc

SEQ ID NO: 11993 - DNA, 96 bp, Aspergillus novofumigatus
  misc_feature: 219
tttatttatttcttttcatctttataaattattaaaacctaacttttttattcttttttctaattaaataatctatattattttactccctattct

SEQ ID NO: 11994 - DNA, 96 bp, Aspergillus novofumigatus
  misc_feature: 219
tttattcttatattctatcttaattctatttaagtaattaatttctctctcttttctaaactatttcttataaaataatctctcttttatattatt

SEQ ID NO: 11995 - DNA, 96 bp, Aspergillus novofumigatus
  misc_feature: 219
ttattttatcttaaactaatctatttattattattttacttctttttattcttatattctatcttaattctatttaagtaattaatttctctctct

SEQ ID NO: 11996 - DNA, 96 bp, Aspergillus novofumigatus
  misc_feature: 219
ttattaataatatatatctactctattaaacttttttactttttaatatatctctctctttatatattcttcttttctcttaaattattactctta

SEQ ID NO: 11997 - DNA, 96 bp, Aspergillus novofumigatus
  misc_feature: 219
tcttacccttactactttaagttatacttattatatctatctagctattctaaggtaatattttattctaaatactttatatatattaaaacctaa

SEQ ID NO: 11998 - DNA, 96 bp, Aspergillus novofumigatus
  misc_feature: 219
agagagagcttaggtttactttaattataatataaagaggaaaaggaggaaaaaaaggatataaagaaataaaaaaataagagatagttagattaa

SEQ ID NO: 11999 - DNA, 96 bp, Aspergillus novofumigatus
  misc_feature: 219
tctttttattcttatattctatcttaattctatttaagtaattaatttctctctcttttctaaactatttcttataaaataatctctcttttatat

SEQ ID NO: 12000 - DNA, 96 bp, Aspergillus novofumigatus
  misc_feature: 219
tatttatttatttcttttcatctttataaattattaaaacctaacttttttattcttttttctaattaaataatctatattattttactccctatt

SEQ ID NO: 12001 - DNA, 96 bp, Aspergillus novofumigatus
  misc_feature: 219
tatttattaataatatatatctactctattaaacttttttactttttaatatatctctctctttatatattcttcttttctcttaaattattactc

SEQ ID NO: 12002 - DNA, 96 bp, Aspergillus novofumigatus
  misc_feature: 219
cttactactttaagttatacttattatatctatctagctattctaaggtaatattttattctaaatactttatatatattaaaacctaaactacta

SEQ ID NO: 12003 - DNA, 96 bp, Aspergillus novofumigatus
  misc_feature: 219
tagggagatatttaatttatgaatatatatttacatataaatatatataataaagggaaataaatatatttaacttatactagcctagtaattcta

SEQ ID NO: 12004 - DNA, 96 bp, Aspergillus novofumigatus
  misc_feature: 219
tagatagatataataagtataacttaaagtagtaagggtaagagtaataatttaagagaaaagaagaatatataaagagagagatatattaaaaag

SEQ ID NO: 12005 - DNA, 96 bp, Aspergillus novofumigatus
  misc_feature: 219
gatagatataataagtataacttaaagtagtaagggtaagagtaataatttaagagaaaagaagaatatataaagagagagatatattaaaaagta

SEQ ID NO: 12006 - DNA, 96 bp, Aspergillus novofumigatus
  misc_feature: 219
taattcaggttctaattcaggttctaattcaggttctaattcaggttctaattcaggttctaattcaggttctaattcaggttctaattcaggttc

SEQ ID NO: 12007 - DNA, 96 bp, Aspergillus novofumigatus
  misc_feature: 219
attattaataaatatatataagaagataaaagagaataatataaaagagagattattttataagaaatagtttagaaaagagagagaaattaatta

SEQ ID NO: 12008 - DNA, 96 bp, Aspergillus novofumigatus
  misc_feature: 219
atctatttattattattttacttctttttattcttatattctatcttaattctatttaagtaattaatttctctctcttttctaaactatttctta

SEQ ID NO: 12009 - DNA, 96 bp, Aspergillus novofumigatus
  misc_feature: 219
attcttatattctatcttaattctatttaagtaattaatttctctctcttttctaaactatttcttataaaataatctctcttttatattattctc

SEQ ID NO: 12010 - DNA, 96 bp, Aspergillus novofumigatus
  misc_feature: 219
atttatttatttcttttcatctttataaattattaaaacctaacttttttattcttttttctaattaaataatctatattattttactccctattc

SEQ ID NO: 12011 - DNA, 96 bp, Aspergillus novofumigatus
  misc_feature: 219
ctttatatatattaaaacctaaactactaaactaatctatatatattatcctgcttatatacttaaatataaagatatatatataaagtaattctt

SEQ ID NO: 12012 - DNA, 96 bp, Aspergillus novofumigatus
  misc_feature: 219
atttaagtaattaatttctctctcttttctaaactatttcttataaaataatctctcttttatattattctcttttatcttcttatatatatttat

SEQ ID NO: 12013 - DNA, 96 bp, Aspergillus novofumigatus
  misc_feature: 219
aactaatctatttattattattttacttctttttattcttatattctatcttaattctatttaagtaattaatttctctctcttttctaaactatt

SEQ ID NO: 12014 - DNA, 96 bp, Aspergillus novofumigatus
  misc_feature: 218
ttttctttattttatcttaaactaatctatttattattattttacttctttttattcttatattctatcttaattctatttaagtaattaatttct

SEQ ID NO: 12015 - DNA, 96 bp, Aspergillus novofumigatus
  misc_feature: 218
ttttattcttttcttttctccttagtaaaataatctcttataattttattttatttctttttctcttaatctaactatctcttatttttttatttc

SEQ ID NO: 12016 - DNA, 96 bp, Aspergillus novofumigatus
  misc_feature: 218
ttttattcttatattctatcttaattctatttaagtaattaatttctctctcttttctaaactatttcttataaaataatctctcttttatattat

SEQ ID NO: 12017 - DNA, 96 bp, Aspergillus novofumigatus
  misc_feature: 218
ttttaatttttattaaaattcttattttaattctctttctaattttttattctagctcttattctaattctcctcttcttctttttttattatata

SEQ ID NO: 12018 - DNA, 96 bp, Aspergillus novofumigatus
  misc_feature: 218
tttctttattttatcttaaactaatctatttattattattttacttctttttattcttatattctatcttaattctatttaagtaattaatttctc

SEQ ID NO: 12019 - DNA, 96 bp, Aspergillus novofumigatus
  misc_feature: 218
tttatcttaaactaatctatttattattattttacttctttttattcttatattctatcttaattctatttaagtaattaatttctctctcttttc

SEQ ID NO: 12020 - DNA, 96 bp, Aspergillus novofumigatus
  misc_feature: 218
tactactttaagttatacttattatatctatctagctattctaaggtaatattttattctaaatactttatatatattaaaacctaaactactaaa

SEQ ID NO: 12021 - DNA, 96 bp, Aspergillus novofumigatus
  misc_feature: 218
cttacccttactactttaagttatacttattatatctatctagctattctaaggtaatattttattctaaatactttatatatattaaaacctaaa

SEQ ID NO: 12022 - DNA, 96 bp, Aspergillus novofumigatus
  misc_feature: 218
ttattctaatccttaacttcctatattatttatttatttcttttcatctttataaattattaaaacctaacttttttattcttttttctaattaaa

SEQ ID NO: 12023 - DNA, 96 bp, Aspergillus novofumigatus
  misc_feature: 218
ttattaataaatatatataagaagataaaagagaataatataaaagagagattattttataagaaatagtttagaaaagagagagaaattaattac

SEQ ID NO: 12024 - DNA, 96 bp, Aspergillus novofumigatus
  misc_feature: 218
ttaatttttattaaaattcttattttaattctctttctaattttttattctagctcttattctaattctcctcttcttctttttttattatatatc

SEQ ID NO: 12025 - DNA, 96 bp, Aspergillus novofumigatus
  misc_feature: 218
ttaattcttattctaatccttaacttcctatattatttatttatttcttttcatctttataaattattaaaacctaacttttttattcttttttct

SEQ ID NO: 12026 - DNA, 96 bp, Aspergillus novofumigatus
  misc_feature: 218
taatctttctctttattctctctttttctttattttatcttaaactaatctatttattattattttacttctttttattcttatattctatcttaa

SEQ ID NO: 12027 - DNA, 96 bp, Aspergillus novofumigatus
  misc_feature: 218
agagagcttaggtttactttaattataatataaagaggaaaaggaggaaaaaaaggatataaagaaataaaaaaataagagatagttagattaaga

SEQ ID NO: 12028 - DNA, 96 bp, Aspergillus novofumigatus
  misc_feature: 218
gtttaatagagtagatatatattattaataaatatatataagaagataaaagagaataatataaaagagagattattttataagaaatagtttaga

SEQ ID NO: 12029 - DNA, 96 bp, Aspergillus novofumigatus
  misc_feature: 218
tccttaacttcctatattatttatttatttcttttcatctttataaattattaaaacctaacttttttattcttttttctaattaaataatctata

SEQ ID NO: 12030 - DNA, 96 bp, Aspergillus novofumigatus
  misc_feature: 218
tatttaaataatctttctctttattctctctttttctttattttatcttaaactaatctatttattattattttacttctttttattcttatattc

SEQ ID NO: 12031 - DNA, 96 bp, Aspergillus novofumigatus
  misc_feature: 218
tatattatttaaataatctttctctttattctctctttttctttattttatcttaaactaatctatttattattattttacttctttttattctta

SEQ ID NO: 12032 - DNA, 96 bp, Aspergillus novofumigatus
  misc_feature: 218
tatatatattaaaacctaaactactaaactaatctatatatattatcctgcttatatacttaaatataaagatatatatataaagtaattcttatt

SEQ ID NO: 12033 - DNA, 96 bp, Aspergillus novofumigatus
  misc_feature: 218
aagtttaatagagtagatatatattattaataaatatatataagaagataaaagagaataatataaaagagagattattttataagaaatagttta

SEQ ID NO: 12034 - DNA, 96 bp, Aspergillus novofumigatus
  misc_feature: 218
gatctagggagatatttaatttatgaatatatatttacatataaatatatataataaagggaaataaatatatttaacttatactagcctagtaat

SEQ ID NO: 12035 - DNA, 96 bp, Aspergillus novofumigatus
  misc_feature: 218
gagagagcttaggtttactttaattataatataaagaggaaaaggaggaaaaaaaggatataaagaaataaaaaaataagagatagttagattaag

SEQ ID NO: 12036 - DNA, 96 bp, Aspergillus novofumigatus
  misc_feature: 218
ctttattttatcttaaactaatctatttattattattttacttctttttattcttatattctatcttaattctatttaagtaattaatttctctct

SEQ ID NO: 12037 - DNA, 96 bp, Aspergillus novofumigatus
  misc_feature: 218
ctttaagttatacttattatatctatctagctattctaaggtaatattttattctaaatactttatatatattaaaacctaaactactaaactaat

SEQ ID NO: 12038 - DNA, 96 bp, Aspergillus novofumigatus
  misc_feature: 218
atatattatttaaataatctttctctttattctctctttttctttattttatcttaaactaatctatttattattattttacttctttttattctt

SEQ ID NO: 12039 - DNA, 96 bp, Aspergillus novofumigatus
  misc_feature: 218
ataaaaaaataagagatagttagattaagagaaaaagaaataaaataaaattataagagattattttactaaggagaaaagaaaagaataaaagtt

SEQ ID NO: 12040 - DNA, 96 bp, Aspergillus novofumigatus
  misc_feature: 218
agatagatataataagtataacttaaagtagtaagggtaagagtaataatttaagagaaaagaagaatatataaagagagagatatattaaaaagt

SEQ ID NO: 12041 - DNA, 96 bp, Aspergillus novofumigatus
  misc_feature: 218
acttcctatattatttatttatttcttttcatctttataaattattaaaacctaacttttttattcttttttctaattaaataatctatattattt

SEQ ID NO: 12042 - DNA, 96 bp, Aspergillus novofumigatus
  misc_feature: 217
tttctctttattctctctttttctttattttatcttaaactaatctatttattattattttacttctttttattcttatattctatcttaattcta

SEQ ID NO: 12043 - DNA, 96 bp, Aspergillus novofumigatus
  misc_feature: 217
tttaagttatacttattatatctatctagctattctaaggtaatattttattctaaatactttatatatattaaaacctaaactactaaactaatc

SEQ ID NO: 12044 - DNA, 96 bp, Aspergillus novofumigatus
  misc_feature: 217
ttctctttattctctctttttctttattttatcttaaactaatctatttattattattttacttctttttattcttatattctatcttaattctat

SEQ ID NO: 12045 - DNA, 96 bp, Aspergillus novofumigatus
  misc_feature: 217
ttctctctttttctttattttatcttaaactaatctatttattattattttacttctttttattcttatattctatcttaattctatttaagtaat

SEQ ID NO: 12046 - DNA, 96 bp, Aspergillus novofumigatus
  misc_feature: 217
ttctatcttaattctatttaagtaattaatttctctctcttttctaaactatttcttataaaataatctctcttttatattattctcttttatctt

SEQ ID NO: 12047 - DNA, 96 bp, Aspergillus novofumigatus
  misc_feature: 217
ttatttaaataatctttctctttattctctctttttctttattttatcttaaactaatctatttattattattttacttctttttattcttatatt

SEQ ID NO: 12048 - DNA, 96 bp, Aspergillus novofumigatus
  misc_feature: 217
ttatattctatcttaattctatttaagtaattaatttctctctcttttctaaactatttcttataaaataatctctcttttatattattctctttt

SEQ ID NO: 12049 - DNA, 96 bp, Aspergillus novofumigatus
  misc_feature: 217
actttaagttatacttattatatctatctagctattctaaggtaatattttattctaaatactttatatatattaaaacctaaactactaaactaa

SEQ ID NO: 12050 - DNA, 96 bp, Aspergillus novofumigatus
  misc_feature: 217
ttactactttaagttatacttattatatctatctagctattctaaggtaatattttattctaaatactttatatatattaaaacctaaactactaa

SEQ ID NO: 12051 - DNA, 96 bp, Aspergillus novofumigatus
  misc_feature: 217
atagatataataagtataacttaaagtagtaagggtaagagtaataatttaagagaaaagaagaatatataaagagagagatatattaaaaagtaa

SEQ ID NO: 12052 - DNA, 96 bp, Aspergillus novofumigatus
  misc_feature: 217
ttaagttatacttattatatctatctagctattctaaggtaatattttattctaaatactttatatatattaaaacctaaactactaaactaatct

SEQ ID NO: 12053 - DNA, 96 bp, Aspergillus novofumigatus
  misc_feature: 217
ctttattctctctttttctttattttatcttaaactaatctatttattattattttacttctttttattcttatattctatcttaattctatttaa

SEQ ID NO: 12054 - DNA, 96 bp, Aspergillus novofumigatus
  misc_feature: 217
tctttttttattatatatctatcttttttttctttatttatttattattctaacctttaacttactatccctaactcttatttatattctaattct

SEQ ID NO: 12055 - DNA, 96 bp, Aspergillus novofumigatus
  misc_feature: 217
tcttattctaatccttaacttcctatattatttatttatttcttttcatctttataaattattaaaacctaacttttttattcttttttctaatta

SEQ ID NO: 12056 - DNA, 96 bp, Aspergillus novofumigatus
  misc_feature: 217
tattaataaatatatataagaagataaaagagaataatataaaagagagattattttataagaaatagtttagaaaagagagagaaattaattact

SEQ ID NO: 12057 - DNA, 96 bp, Aspergillus novofumigatus
  misc_feature: 217
tatattaaaacctaaactactaaactaatctatatatattatcctgcttatatacttaaatataaagatatatatataaagtaattcttattatta

SEQ ID NO: 12058 - DNA, 96 bp, Aspergillus novofumigatus
  misc_feature: 217
attctttaattcttattctaatccttaacttcctatattatttatttatttcttttcatctttataaattattaaaacctaacttttttattcttt

SEQ ID NO: 12059 - DNA, 96 bp, Aspergillus novofumigatus
  misc_feature: 217
atctttctctttattctctctttttctttattttatcttaaactaatctatttattattattttacttctttttattcttatattctatcttaatt

SEQ ID NO: 12060 - DNA, 96 bp, Aspergillus novofumigatus
  misc_feature: 217
actttatatatattaaaacctaaactactaaactaatctatatatattatcctgcttatatacttaaatataaagatatatatataaagtaattct

SEQ ID NO: 12061 - DNA, 96 bp, Aspergillus novofumigatus
  misc_feature: 217
acttattctttaattcttattctaatccttaacttcctatattatttatttatttcttttcatctttataaattattaaaacctaacttttttatt

SEQ ID NO: 12062 - DNA, 96 bp, Aspergillus novofumigatus
  misc_feature: 217
aatctatttattattattttacttctttttattcttatattctatcttaattctatttaagtaattaatttctctctcttttctaaactatttctt

SEQ ID NO: 12063 - DNA, 96 bp, Aspergillus novofumigatus
  misc_feature: 217
aaacttttttactttttaatatatctctctctttatatattcttcttttctcttaaattattactcttacccttactactttaagttatacttatt

SEQ ID NO: 12064 - DNA, 96 bp, Aspergillus novofumigatus
  misc_feature: 216
ttaatagagtagatatatattattaataaatatatataagaagataaaagagaataatataaaagagagattattttataagaaatagtttagaaa

SEQ ID NO: 12065 - DNA, 96 bp, Aspergillus novofumigatus
  misc_feature: 216
tttattcttttcttttctccttagtaaaataatctcttataattttattttatttctttttctcttaatctaactatctcttatttttttatttct

SEQ ID NO: 12066 - DNA, 96 bp, Aspergillus novofumigatus
  misc_feature: 216
tttatatatattaaaacctaaactactaaactaatctatatatattatcctgcttatatacttaaatataaagatatatatataaagtaattctta

SEQ ID NO: 12067 - DNA, 96 bp, Aspergillus novofumigatus
  misc_feature: 216
tagatataataagtataacttaaagtagtaagggtaagagtaataatttaagagaaaagaagaatatataaagagagagatatattaaaaagtaaa

SEQ ID NO: 12068 - DNA, 96 bp, Aspergillus novofumigatus
  misc_feature: 216
agctagatagatataataagtataacttaaagtagtaagggtaagagtaataatttaagagaaaagaagaatatataaagagagagatatattaaa

SEQ ID NO: 12069 - DNA, 96 bp, Aspergillus novofumigatus
  misc_feature: 216
aataaatatatataagaagataaaagagaataatataaaagagagattattttataagaaatagtttagaaaagagagagaaattaattacttaaa

SEQ ID NO: 12070 - DNA, 96 bp, Aspergillus novofumigatus
  misc_feature: 216
ttatggtatcctaaaatatatatatttatttacttaatatattaatcctaattaaccttgatctcctaatatatatctattacttaatatatggat

SEQ ID NO: 12071 - DNA, 96 bp, Aspergillus novofumigatus
  misc_feature: 216
tctttttctttattttatcttaaactaatctatttattattattttacttctttttattcttatattctatcttaattctatttaagtaattaatt

SEQ ID NO: 12072 - DNA, 96 bp, Aspergillus novofumigatus
  misc_feature: 216
tctttattctctctttttctttattttatcttaaactaatctatttattattattttacttctttttattcttatattctatcttaattctattta

SEQ ID NO: 12073 - DNA, 96 bp, Aspergillus novofumigatus
  misc_feature: 216
tctatttaagtaattaatttctctctcttttctaaactatttcttataaaataatctctcttttatattattctcttttatcttcttatatatatt

SEQ ID NO: 12074 - DNA, 96 bp, Aspergillus novofumigatus
  misc_feature: 216
tctaattcaggttctaattcaggttctaattcaggttctaattcaggttctaattcaggttctaattcaggttctaattcaggttctaattcaggt

SEQ ID NO: 12075 - DNA, 96 bp, Aspergillus novofumigatus
  misc_feature: 216
attctaatccttaacttcctatattatttatttatttcttttcatctttataaattattaaaacctaacttttttattcttttttctaattaaata

SEQ ID NO: 12076 - DNA, 96 bp, Aspergillus novofumigatus
  misc_feature: 216
tatttaagtaattaatttctctctcttttctaaactatttcttataaaataatctctcttttatattattctcttttatcttcttatatatattta

SEQ ID NO: 12077 - DNA, 96 bp, Aspergillus novofumigatus
  misc_feature: 216
tattctaatccttaacttcctatattatttatttatttcttttcatctttataaattattaaaacctaacttttttattcttttttctaattaaat

SEQ ID NO: 12078 - DNA, 96 bp, Aspergillus novofumigatus
  misc_feature: 216
tatatttattaataatatatatctactctattaaacttttttactttttaatatatctctctctttatatattcttcttttctcttaaattattac

SEQ ID NO: 12079 - DNA, 96 bp, Aspergillus novofumigatus
  misc_feature: 216
ggtatcctaaaatatatatatttatttacttaatatattaatcctaattaaccttgatctcctaatatatatctattacttaatatatggatgcta

SEQ ID NO: 12080 - DNA, 96 bp, Aspergillus novofumigatus
  misc_feature: 216
tactttatatatattaaaacctaaactactaaactaatctatatatattatcctgcttatatacttaaatataaagatatatatataaagtaattc

SEQ ID NO: 12081 - DNA, 96 bp, Aspergillus novofumigatus
  misc_feature: 216
aggttctaattcaggttctaattcaggttctaattcaggttctaattcaggttctaattcaggttctaattcaggttctaattcaggttctaattc

SEQ ID NO: 12082 - DNA, 96 bp, Aspergillus novofumigatus
  misc_feature: 216
ctaatctatttattattattttacttctttttattcttatattctatcttaattctatttaagtaattaatttctctctcttttctaaactatttc

SEQ ID NO: 12083 - DNA, 96 bp, Aspergillus novofumigatus
  misc_feature: 216
cttttattcttttcttttctccttagtaaaataatctcttataattttattttatttctttttctcttaatctaactatctcttatttttttattt

SEQ ID NO: 12084 - DNA, 96 bp, Aspergillus novofumigatus
  misc_feature: 216
ctttctctttattctctctttttctttattttatcttaaactaatctatttattattattttacttctttttattcttatattctatcttaattct

SEQ ID NO: 12085 - DNA, 96 bp, Aspergillus novofumigatus
  misc_feature: 216
ctatttaagtaattaatttctctctcttttctaaactatttcttataaaataatctctcttttatattattctcttttatcttcttatatatattt

SEQ ID NO: 12086 - DNA, 96 bp, Aspergillus novofumigatus
  misc_feature: 216
agtttaatagagtagatatatattattaataaatatatataagaagataaaagagaataatataaaagagagattattttataagaaatagtttag

SEQ ID NO: 12087 - DNA, 96 bp, Aspergillus novofumigatus
  misc_feature: 216
attctatcttaattctatttaagtaattaatttctctctcttttctaaactatttcttataaaataatctctcttttatattattctcttttatct

SEQ ID NO: 12088 - DNA, 96 bp, Aspergillus novofumigatus
  misc_feature: 216
attatttaaataatctttctctttattctctctttttctttattttatcttaaactaatctatttattattattttacttctttttattcttatat

SEQ ID NO: 12089 - DNA, 96 bp, Aspergillus novofumigatus
  misc_feature: 216
attaataaatatatataagaagataaaagagaataatataaaagagagattattttataagaaatagtttagaaaagagagagaaattaattactt

SEQ ID NO: 12090 - DNA, 96 bp, Aspergillus novofumigatus
  misc_feature: 216
aattcaggttctaattcaggttctaattcaggttctaattcaggttctaattcaggttctaattcaggttctaattcaggttctaattcaggttct

SEQ ID NO: 12091 - DNA, 96 bp, Aspergillus novofumigatus
  misc_feature: 215
taatagagtagatatatattattaataaatatatataagaagataaaagagaataatataaaagagagattattttataagaaatagtttagaaaa

SEQ ID NO: 12092 - DNA, 96 bp, Aspergillus novofumigatus
  misc_feature: 215
tttattctctctttttctttattttatcttaaactaatctatttattattattttacttctttttattcttatattctatcttaattctatttaag

SEQ ID NO: 12093 - DNA, 96 bp, Aspergillus novofumigatus
  misc_feature: 215
tttaatagagtagatatatattattaataaatatatataagaagataaaagagaataatataaaagagagattattttataagaaatagtttagaa

SEQ ID NO: 12094 - DNA, 96 bp, Aspergillus novofumigatus
  misc_feature: 215
ttctaattcaggttctaattcaggttctaattcaggttctaattcaggttctaattcaggttctaattcaggttctaattcaggttctaattcagg

SEQ ID NO: 12095 - DNA, 96 bp, Aspergillus novofumigatus
  misc_feature: 215
ttctaatccttaacttcctatattatttatttatttcttttcatctttataaattattaaaacctaacttttttattcttttttctaattaaataa

SEQ ID NO: 12096 - DNA, 96 bp, Aspergillus novofumigatus
  misc_feature: 215
ttatcttaaactaatctatttattattattttacttctttttattcttatattctatcttaattctatttaagtaattaatttctctctcttttct

SEQ ID NO: 12097 - DNA, 96 bp, Aspergillus novofumigatus
  misc_feature: 215
cttattctaatccttaacttcctatattatttatttatttcttttcatctttataaattattaaaacctaacttttttattcttttttctaattaa

SEQ ID NO: 12098 - DNA, 96 bp, Aspergillus novofumigatus
  misc_feature: 215
tggtatcctaaaatatatatatttatttacttaatatattaatcctaattaaccttgatctcctaatatatatctattacttaatatatggatgct

SEQ ID NO: 12099 - DNA, 96 bp, Aspergillus novofumigatus
  misc_feature: 215
tctatcttaattctatttaagtaattaatttctctctcttttctaaactatttcttataaaataatctctcttttatattattctcttttatcttc

SEQ ID NO: 12100 - DNA, 96 bp, Aspergillus novofumigatus
  misc_feature: 215
tattctatcttaattctatttaagtaattaatttctctctcttttctaaactatttcttataaaataatctctcttttatattattctcttttatc

SEQ ID NO: 12101 - DNA, 96 bp, Aspergillus novofumigatus
  misc_feature: 215
tattatttaaataatctttctctttattctctctttttctttattttatcttaaactaatctatttattattattttacttctttttattcttata

SEQ ID NO: 12102 - DNA, 96 bp, Aspergillus novofumigatus
  misc_feature: 215
tatggtatcctaaaatatatatatttatttacttaatatattaatcctaattaaccttgatctcctaatatatatctattacttaatatatggatg

SEQ ID NO: 12103 - DNA, 96 bp, Aspergillus novofumigatus
  misc_feature: 215
tatcttaattctatttaagtaattaatttctctctcttttctaaactatttcttataaaataatctctcttttatattattctcttttatcttctt

SEQ ID NO: 12104 - DNA, 96 bp, Aspergillus novofumigatus
  misc_feature: 215
tagagtagatatatattattaataaatatatataagaagataaaagagaataatataaaagagagattattttataagaaatagtttagaaaagag

SEQ ID NO: 12105 - DNA, 96 bp, Aspergillus novofumigatus
  misc_feature: 215
taattcttattctaatccttaacttcctatattatttatttatttcttttcatctttataaattattaaaacctaacttttttattcttttttcta

SEQ ID NO: 12106 - DNA, 96 bp, Aspergillus novofumigatus
  misc_feature: 215
aacttttttactttttaatatatctctctctttatatattcttcttttctcttaaattattactcttacccttactactttaagttatacttatta

SEQ ID NO: 12107 - DNA, 96 bp, Aspergillus novofumigatus
  misc_feature: 215
ataatatatatctactctattaaacttttttactttttaatatatctctctctttatatattcttcttttctcttaaattattactcttaccctta

SEQ ID NO: 12108 - DNA, 96 bp, Aspergillus novofumigatus
  misc_feature: 215
ataatctttctctttattctctctttttctttattttatcttaaactaatctatttattattattttacttctttttattcttatattctatctta

SEQ ID NO: 12109 - DNA, 96 bp, Aspergillus novofumigatus
  misc_feature: 215
atcttaattctatttaagtaattaatttctctctcttttctaaactatttcttataaaataatctctcttttatattattctcttttatcttctta

SEQ ID NO: 12110 - DNA, 96 bp, Aspergillus novofumigatus
  misc_feature: 215
gttctaattcaggttctaattcaggttctaattcaggttctaattcaggttctaattcaggttctaattcaggttctaattcaggttctaattcag

SEQ ID NO: 12111 - DNA, 96 bp, Aspergillus novofumigatus
  misc_feature: 215
gagtaaaataatatagattatttaattagaaaaaagaataaaaaagttaggttttaataatttataaagatgaaaagaaataaataaataatatag

SEQ ID NO: 12112 - DNA, 96 bp, Aspergillus novofumigatus
  misc_feature: 215
gagagcttaggtttactttaattataatataaagaggaaaaggaggaaaaaaaggatataaagaaataaaaaaataagagatagttagattaagag

SEQ ID NO: 12113 - DNA, 96 bp, Aspergillus novofumigatus
  misc_feature: 215
aatagagtagatatatattattaataaatatatataagaagataaaagagaataatataaaagagagattattttataagaaatagtttagaaaag

SEQ ID NO: 12114 - DNA, 96 bp, Aspergillus novofumigatus
  misc_feature: 215
ctttataaattattaaaacctaacttttttattcttttttctaattaaataatctatattattttactccctattcttcttttctttctaattaat

SEQ ID NO: 12115 - DNA, 96 bp, Aspergillus novofumigatus
  misc_feature: 215
aataaaaaaataagagatagttagattaagagaaaaagaaataaaataaaattataagagattattttactaaggagaaaagaaaagaataaaagt

SEQ ID NO: 12116 - DNA, 96 bp, Aspergillus novofumigatus
  misc_feature: 215
aataatctttctctttattctctctttttctttattttatcttaaactaatctatttattattattttacttctttttattcttatattctatctt

SEQ ID NO: 12117 - DNA, 96 bp, Aspergillus novofumigatus
  misc_feature: 214
gctagatagatataataagtataacttaaagtagtaagggtaagagtaataatttaagagaaaagaagaatatataaagagagagatatattaaaa

SEQ ID NO: 12118 - DNA, 96 bp, Aspergillus novofumigatus
  misc_feature: 214
ttctatttaagtaattaatttctctctcttttctaaactatttcttataaaataatctctcttttatattattctcttttatcttcttatatatat

SEQ ID NO: 12119 - DNA, 96 bp, Aspergillus novofumigatus
  misc_feature: 214
ttattctttaattcttattctaatccttaacttcctatattatttatttatttcttttcatctttataaattattaaaacctaacttttttattct

SEQ ID NO: 12120 - DNA, 96 bp, Aspergillus novofumigatus
  misc_feature: 214
tctctttttctttattttatcttaaactaatctatttattattattttacttctttttattcttatattctatcttaattctatttaagtaattaa

SEQ ID NO: 12121 - DNA, 96 bp, Aspergillus novofumigatus
  misc_feature: 214
ttaataaatatatataagaagataaaagagaataatataaaagagagattattttataagaaatagtttagaaaagagagagaaattaattactta

SEQ ID NO: 12122 - DNA, 96 bp, Aspergillus novofumigatus
  misc_feature: 214
atagagtagatatatattattaataaatatatataagaagataaaagagaataatataaaagagagattattttataagaaatagtttagaaaaga

SEQ ID NO: 12123 - DNA, 96 bp, Aspergillus novofumigatus
  misc_feature: 214
tctttctctttattctctctttttctttattttatcttaaactaatctatttattattattttacttctttttattcttatattctatcttaattc

SEQ ID NO: 12124 - DNA, 96 bp, Aspergillus novofumigatus
  misc_feature: 214
tctctctatacttttaaactattctatatatatatatatttacttcttattacccttttctactttatatattatttaaataatctttctctttat

SEQ ID NO: 12125 - DNA, 96 bp, Aspergillus novofumigatus
  misc_feature: 214
attatggtatcctaaaatatatatatttatttacttaatatattaatcctaattaaccttgatctcctaatatatatctattacttaatatatgga

SEQ ID NO: 12126 - DNA, 96 bp, Aspergillus novofumigatus
  misc_feature: 214
tatattctatcttaattctatttaagtaattaatttctctctcttttctaaactatttcttataaaataatctctcttttatattattctctttta

SEQ ID NO: 12127 - DNA, 96 bp, Aspergillus novofumigatus
  misc_feature: 214
tatatattaaaacctaaactactaaactaatctatatatattatcctgcttatatacttaaatataaagatatatatataaagtaattcttattat

SEQ ID NO: 12128 - DNA, 96 bp, Aspergillus novofumigatus
  misc_feature: 214
atatatttattaataatatatatctactctattaaacttttttactttttaatatatctctctctttatatattcttcttttctcttaaattatta

SEQ ID NO: 12129 - DNA, 96 bp, Aspergillus novofumigatus
  misc_feature: 214
atatatattaaaacctaaactactaaactaatctatatatattatcctgcttatatacttaaatataaagatatatatataaagtaattcttatta

SEQ ID NO: 12130 - DNA, 96 bp, Aspergillus novofumigatus
  misc_feature: 214
taaacttttttactttttaatatatctctctctttatatattcttcttttctcttaaattattactcttacccttactactttaagttatacttat

SEQ ID NO: 12131 - DNA, 96 bp, Aspergillus novofumigatus
  misc_feature: 214
ctttttctttattttatcttaaactaatctatttattattattttacttctttttattcttatattctatcttaattctatttaagtaattaattt

SEQ ID NO: 12132 - DNA, 96 bp, Aspergillus novofumigatus
  misc_feature: 214
ctttatatattatttaaataatctttctctttattctctctttttctttattttatcttaaactaatctatttattattattttacttctttttat

SEQ ID NO: 12133 - DNA, 96 bp, Aspergillus novofumigatus
  misc_feature: 214
ctctttttctttattttatcttaaactaatctatttattattattttacttctttttattcttatattctatcttaattctatttaagtaattaat

SEQ ID NO: 12134 - DNA, 96 bp, Aspergillus novofumigatus
  misc_feature: 214
ctctctatacttttaaactattctatatatatatatatttacttcttattacccttttctactttatatattatttaaataatctttctctttatt

SEQ ID NO: 12135 - DNA, 96 bp, Aspergillus novofumigatus
  misc_feature: 214
ctatcttaattctatttaagtaattaatttctctctcttttctaaactatttcttataaaataatctctcttttatattattctcttttatcttct

SEQ ID NO: 12136 - DNA, 96 bp, Aspergillus novofumigatus
  misc_feature: 214
atattatttaaataatctttctctttattctctctttttctttattttatcttaaactaatctatttattattattttacttctttttattcttat

SEQ ID NO: 12137 - DNA, 96 bp, Aspergillus novofumigatus
  misc_feature: 214
atatattaaaacctaaactactaaactaatctatatatattatcctgcttatatacttaaatataaagatatatatataaagtaattcttattatt

SEQ ID NO: 12138 - DNA, 96 bp, Aspergillus novofumigatus
  misc_feature: 214
aacttattctttaattcttattctaatccttaacttcctatattatttatttatttcttttcatctttataaattattaaaacctaacttttttat

SEQ ID NO: 12139 - DNA, 96 bp, Aspergillus novofumigatus
  misc_feature: 214
agctctctctatacttttaaactattctatatatatatatatttacttcttattacccttttctactttatatattatttaaataatctttctctt

SEQ ID NO: 12140 - DNA, 96 bp, Aspergillus novofumigatus
  misc_feature: 214
aaataatctttctctttattctctctttttctttattttatcttaaactaatctatttattattattttacttctttttattcttatattctatct

SEQ ID NO: 12141 - DNA, 96 bp, Aspergillus novofumigatus
  misc_feature: 214
aaagtttaatagagtagatatatattattaataaatatatataagaagataaaagagaataatataaaagagagattattttataagaaatagttt

SEQ ID NO: 12142 - DNA, 96 bp, Aspergillus novofumigatus
  misc_feature: 213
agatatatattattaataaatatatataagaagataaaagagaataatataaaagagagattattttataagaaatagtttagaaaagagagagaa

SEQ ID NO: 12143 - DNA, 96 bp, Aspergillus novofumigatus
  misc_feature: 213
aagaagtaaaataataataaatagattagtttaagataaaataaagaaaaagagagaataaagagaaagattatttaaataatatataaagtagaa

SEQ ID NO: 12144 - DNA, 96 bp, Aspergillus novofumigatus
  misc_feature: 213
ttatatatattaaaacctaaactactaaactaatctatatatattatcctgcttatatacttaaatataaagatatatatataaagtaattcttat

SEQ ID NO: 12145 - DNA, 96 bp, Aspergillus novofumigatus
  misc_feature: 213
taataaatatatataagaagataaaagagaataatataaaagagagattattttataagaaatagtttagaaaagagagagaaattaattacttaa

SEQ ID NO: 12146 - DNA, 96 bp, Aspergillus novofumigatus
  misc_feature: 213
ggttctaattcaggttctaattcaggttctaattcaggttctaattcaggttctaattcaggttctaattcaggttctaattcaggttctaattca

SEQ ID NO: 12147 - DNA, 96 bp, Aspergillus novofumigatus
  misc_feature: 213
tctctttattctctctttttctttattttatcttaaactaatctatttattattattttacttctttttattcttatattctatcttaattctatt

SEQ ID NO: 12148 - DNA, 96 bp, Aspergillus novofumigatus
  misc_feature: 213
tctaatccttaacttcctatattatttatttatttcttttcatctttataaattattaaaacctaacttttttattcttttttctaattaaataat

SEQ ID NO: 12149 - DNA, 96 bp, Aspergillus novofumigatus
  misc_feature: 213
tatatatttattaataatatatatctactctattaaacttttttactttttaatatatctctctctttatatattcttcttttctcttaaattatt

SEQ ID NO: 12150 - DNA, 96 bp, Aspergillus novofumigatus
  misc_feature: 213
tatatattattaataaatatatataagaagataaaagagaataatataaaagagagattattttataagaaatagtttagaaaagagagagaaatt

SEQ ID NO: 12151 - DNA, 96 bp, Aspergillus novofumigatus
  misc_feature: 213
taatctatttattattattttacttctttttattcttatattctatcttaattctatttaagtaattaatttctctctcttttctaaactatttct

SEQ ID NO: 12152 - DNA, 96 bp, Aspergillus novofumigatus
  misc_feature: 213
taacttattctttaattcttattctaatccttaacttcctatattatttatttatttcttttcatctttataaattattaaaacctaactttttta

SEQ ID NO: 12153 - DNA, 96 bp, Aspergillus novofumigatus
  misc_feature: 213
taaataatctttctctttattctctctttttctttattttatcttaaactaatctatttattattattttacttctttttattcttatattctatc

SEQ ID NO: 12154 - DNA, 96 bp, Aspergillus novofumigatus
  misc_feature: 213
gctctctctatacttttaaactattctatatatatatatatttacttcttattacccttttctactttatatattatttaaataatctttctcttt

SEQ ID NO: 12155 - DNA, 96 bp, Aspergillus novofumigatus
  misc_feature: 213
atggtatcctaaaatatatatatttatttacttaatatattaatcctaattaaccttgatctcctaatatatatctattacttaatatatggatgc

SEQ ID NO: 12156 - DNA, 96 bp, Aspergillus novofumigatus
  misc_feature: 213
ctaatccttaacttcctatattatttatttatttcttttcatctttataaattattaaaacctaacttttttattcttttttctaattaaataatc

SEQ ID NO: 12157 - DNA, 96 bp, Aspergillus novofumigatus
  misc_feature: 213
caggttctaattcaggttctaattcaggttctaattcaggttctaattcaggttctaattcaggttctaattcaggttctaattcaggttctaatt

SEQ ID NO: 12158 - DNA, 96 bp, Aspergillus novofumigatus
  misc_feature: 213
aatctttctctttattctctctttttctttattttatcttaaactaatctatttattattattttacttctttttattcttatattctatcttaat

SEQ ID NO: 12159 - DNA, 96 bp, Aspergillus novofumigatus
  misc_feature: 213
atattctatcttaattctatttaagtaattaatttctctctcttttctaaactatttcttataaaataatctctcttttatattattctcttttat

SEQ ID NO: 12160 - DNA, 96 bp, Aspergillus novofumigatus
  misc_feature: 212
ctagatagatataataagtataacttaaagtagtaagggtaagagtaataatttaagagaaaagaagaatatataaagagagagatatattaaaaa

SEQ ID NO: 12161 - DNA, 96 bp, Aspergillus novofumigatus
  misc_feature: 212
tttaaataatctttctctttattctctctttttctttattttatcttaaactaatctatttattattattttacttctttttattcttatattcta

SEQ ID NO: 12162 - DNA, 96 bp, Aspergillus novofumigatus
  misc_feature: 212
taaaataatatagattatttaattagaaaaaagaataaaaaagttaggttttaataatttataaagatgaaaagaaataaataaataatataggaa

SEQ ID NO: 12163 - DNA, 96 bp, Aspergillus novofumigatus
  misc_feature: 212
ttaattctatttaagtaattaatttctctctcttttctaaactatttcttataaaataatctctcttttatattattctcttttatcttcttatat

SEQ ID NO: 12164 - DNA, 96 bp, Aspergillus novofumigatus
  misc_feature: 212
ttaaataatctttctctttattctctctttttctttattttatcttaaactaatctatttattattattttacttctttttattcttatattctat

SEQ ID NO: 12165 - DNA, 96 bp, Aspergillus novofumigatus
  misc_feature: 212
ttaaacttttttactttttaatatatctctctctttatatattcttcttttctcttaaattattactcttacccttactactttaagttatactta

SEQ ID NO: 12166 - DNA, 96 bp, Aspergillus novofumigatus
  misc_feature: 212
agagtagatatatattattaataaatatatataagaagataaaagagaataatataaaagagagattattttataagaaatagtttagaaaagaga

SEQ ID NO: 12167 - DNA, 96 bp, Aspergillus novofumigatus
  misc_feature: 212
agagcttaggtttactttaattataatataaagaggaaaaggaggaaaaaaaggatataaagaaataaaaaaataagagatagttagattaagaga

SEQ ID NO: 12168 - DNA, 96 bp, Aspergillus novofumigatus
  misc_feature: 212
aaagaagtaaaataataataaatagattagtttaagataaaataaagaaaaagagagaataaagagaaagattatttaaataatatataaagtaga

SEQ ID NO: 12169 - DNA, 96 bp, Aspergillus novofumigatus
  misc_feature: 212
tattattaataaatatatataagaagataaaagagaataatataaaagagagattattttataagaaatagtttagaaaagagagagaaattaatt

SEQ ID NO: 12170 - DNA, 96 bp, Aspergillus novofumigatus
  misc_feature: 212
aaaataatctctcttttatattattctcttttatcttcttatatatatttattaataatatatatctactctattaaacttttttactttttaata

SEQ ID NO: 12171 - DNA, 96 bp, Aspergillus novofumigatus
  misc_feature: 212
attctatttaagtaattaatttctctctcttttctaaactatttcttataaaataatctctcttttatattattctcttttatcttcttatatata

SEQ ID NO: 12172 - DNA, 96 bp, Aspergillus novofumigatus
  misc_feature: 212
taattctatttaagtaattaatttctctctcttttctaaactatttcttataaaataatctctcttttatattattctcttttatcttcttatata

SEQ ID NO: 12173 - DNA, 96 bp, Aspergillus novofumigatus
  misc_feature: 212
aaaaagaagtaaaataataataaatagattagtttaagataaaataaagaaaaagagagaataaagagaaagattatttaaataatatataaagta

SEQ ID NO: 12174 - DNA, 96 bp, Aspergillus novofumigatus
  misc_feature: 212
atatattattaataaatatatataagaagataaaagagaataatataaaagagagattattttataagaaatagtttagaaaagagagagaaatta

SEQ ID NO: 12175 - DNA, 96 bp, Aspergillus novofumigatus
  misc_feature: 212
aaaagaagtaaaataataataaatagattagtttaagataaaataaagaaaaagagagaataaagagaaagattatttaaataatatataaagtag

SEQ ID NO: 12176 - DNA, 96 bp, Aspergillus novofumigatus
  misc_feature: 211
gatataataagtataacttaaagtagtaagggtaagagtaataatttaagagaaaagaagaatatataaagagagagatatattaaaaagtaaaaa

SEQ ID NO: 12177 - DNA, 96 bp, Aspergillus novofumigatus
  misc_feature: 211
agatataataagtataacttaaagtagtaagggtaagagtaataatttaagagaaaagaagaatatataaagagagagatatattaaaaagtaaaa

SEQ ID NO: 12178 - DNA, 96 bp, Aspergillus novofumigatus
  misc_feature: 211
gatatatattattaataaatatatataagaagataaaagagaataatataaaagagagattattttataagaaatagtttagaaaagagagagaaa

SEQ ID NO: 12179 - DNA, 96 bp, Aspergillus novofumigatus
  misc_feature: 211
tatattattaataaatatatataagaagataaaagagaataatataaaagagagattattttataagaaatagtttagaaaagagagagaaattaa

SEQ ID NO: 12180 - DNA, 96 bp, Aspergillus novofumigatus
  misc_feature: 211
tagatatatattattaataaatatatataagaagataaaagagaataatataaaagagagattattttataagaaatagtttagaaaagagagaga

SEQ ID NO: 12181 - DNA, 96 bp, Aspergillus novofumigatus
  misc_feature: 211
tcctaaaatatatatatttatttacttaatatattaatcctaattaaccttgatctcctaatatatatctattacttaatatatggatgctaacta

SEQ ID NO: 12182 - DNA, 96 bp, Aspergillus novofumigatus
  misc_feature: 211
tcaggttctaattcaggttctaattcaggttctaattcaggttctaattcaggttctaattcaggttctaattcaggttctaattcaggttctaat

SEQ ID NO: 12183 - DNA, 96 bp, Aspergillus novofumigatus
  misc_feature: 211
tattatggtatcctaaaatatatatatttatttacttaatatattaatcctaattaaccttgatctcctaatatatatctattacttaatatatgg

SEQ ID NO: 12184 - DNA, 96 bp, Aspergillus novofumigatus
  misc_feature: 211
gctgctattatggtatcctaaaatatatatatttatttacttaatatattaatcctaattaaccttgatctcctaatatatatctattacttaata

SEQ ID NO: 12185 - DNA, 96 bp, Aspergillus novofumigatus
  misc_feature: 211
tatcctaaaatatatatatttatttacttaatatattaatcctaattaaccttgatctcctaatatatatctattacttaatatatggatgctaac

SEQ ID NO: 12186 - DNA, 96 bp, Aspergillus novofumigatus
  misc_feature: 211
atctttataaattattaaaacctaacttttttattcttttttctaattaaataatctatattattttactccctattcttcttttctttctaatta

SEQ ID NO: 12187 - DNA, 96 bp, Aspergillus novofumigatus
  misc_feature: 211
taaaatatatatatttatttacttaatatattaatcctaattaaccttgatctcctaatatatatctattacttaatatatggatgctaactaatc

SEQ ID NO: 12188 - DNA, 96 bp, Aspergillus novofumigatus
  misc_feature: 211
gctattatggtatcctaaaatatatatatttatttacttaatatattaatcctaattaaccttgatctcctaatatatatctattacttaatatat

SEQ ID NO: 12189 - DNA, 96 bp, Aspergillus novofumigatus
  misc_feature: 211
cttattctttaattcttattctaatccttaacttcctatattatttatttatttcttttcatctttataaattattaaaacctaacttttttattc

SEQ ID NO: 12190 - DNA, 96 bp, Aspergillus novofumigatus
  misc_feature: 211
ctaattcaggttctaattcaggttctaattcaggttctaattcaggttctaattcaggttctaattcaggttctaattcaggttctaattcaggtt

SEQ ID NO: 12191 - DNA, 96 bp, Aspergillus novofumigatus
  misc_feature: 211
atatatattattaataaatatatataagaagataaaagagaataatataaaagagagattattttataagaaatagtttagaaaagagagagaaat

SEQ ID NO: 12192 - DNA, 96 bp, Aspergillus novofumigatus
  misc_feature: 211
atttaaataatctttctctttattctctctttttctttattttatcttaaactaatctatttattattattttacttctttttattcttatattct

SEQ ID NO: 12193 - DNA, 96 bp, Aspergillus novofumigatus
  misc_feature: 211
aattctatttaagtaattaatttctctctcttttctaaactatttcttataaaataatctctcttttatattattctcttttatcttcttatatat

SEQ ID NO: 12194 - DNA, 96 bp, Aspergillus novofumigatus
  misc_feature: 211
atactttatatatattaaaacctaaactactaaactaatctatatatattatcctgcttatatacttaaatataaagatatatatataaagtaatt

SEQ ID NO: 12195 - DNA, 96 bp, Aspergillus novofumigatus
  misc_feature: 211
acttttttactttttaatatatctctctctttatatattcttcttttctcttaaattattactcttacccttactactttaagttatacttattat

SEQ ID NO: 12196 - DNA, 96 bp, Aspergillus novofumigatus
  misc_feature: 210
tttaacttattctttaattcttattctaatccttaacttcctatattatttatttatttcttttcatctttataaattattaaaacctaacttttt

SEQ ID NO: 12197 - DNA, 96 bp, Aspergillus novofumigatus
  misc_feature: 210
ttcatctttataaattattaaaacctaacttttttattcttttttctaattaaataatctatattattttactccctattcttcttttctttctaa

SEQ ID NO: 12198 - DNA, 96 bp, Aspergillus novofumigatus
  misc_feature: 210
ttaaaacctaaactactaaactaatctatatatattatcctgcttatatacttaaatataaagatatatatataaagtaattcttattattatctt

SEQ ID NO: 12199 - DNA, 96 bp, Aspergillus novofumigatus
  misc_feature: 210
tgctgctattatggtatcctaaaatatatatatttatttacttaatatattaatcctaattaaccttgatctcctaatatatatctattacttaat

SEQ ID NO: 12200 - DNA, 96 bp, Aspergillus novofumigatus
  misc_feature: 210
gtaaaataatatagattatttaattagaaaaaagaataaaaaagttaggttttaataatttataaagatgaaaagaaataaataaataatatagga

SEQ ID NO: 12201 - DNA, 96 bp, Aspergillus novofumigatus
  misc_feature: 210
tcatctttataaattattaaaacctaacttttttattcttttttctaattaaataatctatattattttactccctattcttcttttctttctaat

SEQ ID NO: 12202 - DNA, 96 bp, Aspergillus novofumigatus
  misc_feature: 210
tatacttttaaactattctatatatatatatatttacttcttattacccttttctactttatatattatttaaataatctttctctttattctctc

SEQ ID NO: 12203 - DNA, 96 bp, Aspergillus novofumigatus
  misc_feature: 210
taagttatacttattatatctatctagctattctaaggtaatattttattctaaatactttatatatattaaaacctaaactactaaactaatcta

SEQ ID NO: 12204 - DNA, 96 bp, Aspergillus novofumigatus
  misc_feature: 210
tacttttaaactattctatatatatatatatttacttcttattacccttttctactttatatattatttaaataatctttctctttattctctctt

SEQ ID NO: 12205 - DNA, 96 bp, Aspergillus novofumigatus
  misc_feature: 210
taatatatatctactctattaaacttttttactttttaatatatctctctctttatatattcttcttttctcttaaattattactcttacccttac

SEQ ID NO: 12206 - DNA, 96 bp, Aspergillus novofumigatus
  misc_feature: 210
aaaataatatagattatttaattagaaaaaagaataaaaaagttaggttttaataatttataaagatgaaaagaaataaataaataatataggaag

SEQ ID NO: 12207 - DNA, 96 bp, Aspergillus novofumigatus
  misc_feature: 210
ctctatacttttaaactattctatatatatatatatttacttcttattacccttttctactttatatattatttaaataatctttctctttattct

SEQ ID NO: 12208 - DNA, 96 bp, Aspergillus novofumigatus
  misc_feature: 210
ctattatggtatcctaaaatatatatatttatttacttaatatattaatcctaattaaccttgatctcctaatatatatctattacttaatatatg

SEQ ID NO: 12209 - DNA, 96 bp, Aspergillus novofumigatus
  misc_feature: 210
atattattaataaatatatataagaagataaaagagaataatataaaagagagattattttataagaaatagtttagaaaagagagagaaattaat

SEQ ID NO: 12210 - DNA, 96 bp, Aspergillus novofumigatus
  misc_feature: 210
attaaaacctaaactactaaactaatctatatatattatcctgcttatatacttaaatataaagatatatatataaagtaattcttattattatct

SEQ ID NO: 12211 - DNA, 96 bp, Aspergillus novofumigatus
  misc_feature: 210
aaataatctctcttttatattattctcttttatcttcttatatatatttattaataatatatatctactctattaaacttttttactttttaatat

SEQ ID NO: 12212 - DNA, 96 bp, Aspergillus novofumigatus
  misc_feature: 210
atacttttaaactattctatatatatatatatttacttcttattacccttttctactttatatattatttaaataatctttctctttattctctct

SEQ ID NO: 12213 - DNA, 96 bp, Aspergillus novofumigatus
  misc_feature: 210
aatatatatctactctattaaacttttttactttttaatatatctctctctttatatattcttcttttctcttaaattattactcttacccttact

SEQ ID NO: 12214 - DNA, 96 bp, Aspergillus novofumigatus
  misc_feature: 209
atataataagtataacttaaagtagtaagggtaagagtaataatttaagagaaaagaagaatatataaagagagagatatattaaaaagtaaaaaa

SEQ ID NO: 12215 - DNA, 96 bp, Aspergillus novofumigatus
  misc_feature: 209
ttttattctaaatactttatatatattaaaacctaaactactaaactaatctatatatattatcctgcttatatacttaaatataaagatatatat

SEQ ID NO: 12216 - DNA, 96 bp, Aspergillus novofumigatus
  misc_feature: 209
agcttaggtttactttaattataatataaagaggaaaaggaggaaaaaaaggatataaagaaataaaaaaataagagatagttagattaagagaaa

SEQ ID NO: 12217 - DNA, 96 bp, Aspergillus novofumigatus
  misc_feature: 209
tttattctaaatactttatatatattaaaacctaaactactaaactaatctatatatattatcctgcttatatacttaaatataaagatatatata

SEQ ID NO: 12218 - DNA, 96 bp, Aspergillus novofumigatus
  misc_feature: 209
aagtaaaaaagtttaatagagtagatatatattattaataaatatatataagaagataaaagagaataatataaaagagagattattttataagaa

SEQ ID NO: 12219 - DNA, 96 bp, Aspergillus novofumigatus
  misc_feature: 209
tctttataaattattaaaacctaacttttttattcttttttctaattaaataatctatattattttactccctattcttcttttctttctaattaa

SEQ ID NO: 12220 - DNA, 96 bp, Aspergillus novofumigatus
  misc_feature: 209
ctgctgctattatggtatcctaaaatatatatatttatttacttaatatattaatcctaattaaccttgatctcctaatatatatctattacttaa

SEQ ID NO: 12221 - DNA, 96 bp, Aspergillus novofumigatus
  misc_feature: 209
ttaacttattctttaattcttattctaatccttaacttcctatattatttatttatttcttttcatctttataaattattaaaacctaactttttt

SEQ ID NO: 12222 - DNA, 96 bp, Aspergillus novofumigatus
  misc_feature: 209
tcttaattctatttaagtaattaatttctctctcttttctaaactatttcttataaaataatctctcttttatattattctcttttatcttcttat

SEQ ID NO: 12223 - DNA, 96 bp, Aspergillus novofumigatus
  misc_feature: 209
tctctatacttttaaactattctatatatatatatatttacttcttattacccttttctactttatatattatttaaataatctttctctttattc

SEQ ID NO: 12224 - DNA, 96 bp, Aspergillus novofumigatus
  misc_feature: 209
tattctaaatactttatatatattaaaacctaaactactaaactaatctatatatattatcctgcttatatacttaaatataaagatatatatata

SEQ ID NO: 12225 - DNA, 96 bp, Aspergillus novofumigatus
  misc_feature: 209
aataatctctcttttatattattctcttttatcttcttatatatatttattaataatatatatctactctattaaacttttttactttttaatata

SEQ ID NO: 12226 - DNA, 96 bp, Aspergillus novofumigatus
  misc_feature: 209
tatatatatttattaataatatatatctactctattaaacttttttactttttaatatatctctctctttatatattcttcttttctcttaaatta

SEQ ID NO: 12227 - DNA, 96 bp, Aspergillus novofumigatus
  misc_feature: 209
taaaaagaagtaaaataataataaatagattagtttaagataaaataaagaaaaagagagaataaagagaaagattatttaaataatatataaagt

SEQ ID NO: 12228 - DNA, 96 bp, Aspergillus novofumigatus
  misc_feature: 209
gagtagatatatattattaataaatatatataagaagataaaagagaataatataaaagagagattattttataagaaatagtttagaaaagagag

SEQ ID NO: 12229 - DNA, 96 bp, Aspergillus novofumigatus
  misc_feature: 209
atctatatatattatcctgcttatatacttaaatataaagatatatatataaagtaattcttattattatcttttaaattactatcttctttattc

SEQ ID NO: 12230 - DNA, 96 bp, Aspergillus novofumigatus
  misc_feature: 209
agtaaaataatatagattatttaattagaaaaaagaataaaaaagttaggttttaataatttataaagatgaaaagaaataaataaataatatagg

SEQ ID NO: 12231 - DNA, 96 bp, Aspergillus novofumigatus
  misc_feature: 209
attaaacttttttactttttaatatatctctctctttatatattcttcttttctcttaaattattactcttacccttactactttaagttatactt

SEQ ID NO: 12232 - DNA, 96 bp, Aspergillus novofumigatus
  misc_feature: 209
atatatatttattaataatatatatctactctattaaacttttttactttttaatatatctctctctttatatattcttcttttctcttaaattat

SEQ ID NO: 12233 - DNA, 96 bp, Aspergillus novofumigatus
  misc_feature: 209
aaaagtttaatagagtagatatatattattaataaatatatataagaagataaaagagaataatataaaagagagattattttataagaaatagtt

SEQ ID NO: 12234 - DNA, 96 bp, Aspergillus novofumigatus
  misc_feature: 208
gcttaggtttactttaattataatataaagaggaaaaggaggaaaaaaaggatataaagaaataaaaaaataagagatagttagattaagagaaaa

SEQ ID NO: 12235 - DNA, 96 bp, Aspergillus novofumigatus
  misc_feature: 208
gagcttaggtttactttaattataatataaagaggaaaaggaggaaaaaaaggatataaagaaataaaaaaataagagatagttagattaagagaa

SEQ ID NO: 12236 - DNA, 96 bp, Aspergillus novofumigatus
  misc_feature: 208
gtatcctaaaatatatatatttatttacttaatatattaatcctaattaaccttgatctcctaatatatatctattacttaatatatggatgctaa

SEQ ID NO: 12237 - DNA, 96 bp, Aspergillus novofumigatus
  misc_feature: 208
tgctattatggtatcctaaaatatatatatttatttacttaatatattaatcctaattaaccttgatctcctaatatatatctattacttaatata

SEQ ID NO: 12238 - DNA, 96 bp, Aspergillus novofumigatus
  misc_feature: 208
tctatatatattatcctgcttatatacttaaatataaagatatatatataaagtaattcttattattatcttttaaattactatcttctttattct

SEQ ID NO: 12239 - DNA, 96 bp, Aspergillus novofumigatus
  misc_feature: 208
tataggccgggcgcgcgcgcgccatataccggccacttatcgagacacacaggcactggggtcaatggaagccgggcgcgcgcgccccggggggga

SEQ ID NO: 12240 - DNA, 96 bp, Aspergillus novofumigatus
  misc_feature: 208
taaaaaagtttaatagagtagatatatattattaataaatatatataagaagataaaagagaataatataaaagagagattattttataagaaata

SEQ ID NO: 12241 - DNA, 96 bp, Aspergillus novofumigatus
  misc_feature: 208
caatagtaaggtaggtaataaggtagatagtaattataaatagcatagtagatagtaaggttaatagtaaggtaagcagtaagagaggtagtaata

SEQ ID NO: 12242 - DNA, 96 bp, Aspergillus novofumigatus
  misc_feature: 208
tattaaacttttttactttttaatatatctctctctttatatattcttcttttctcttaaattattactcttacccttactactttaagttatact

SEQ ID NO: 12243 - DNA, 96 bp, Aspergillus novofumigatus
  misc_feature: 208
tataataagtataacttaaagtagtaagggtaagagtaataatttaagagaaaagaagaatatataaagagagagatatattaaaaagtaaaaaag

SEQ ID NO: 12244 - DNA, 96 bp, Aspergillus novofumigatus
  misc_feature: 208
aagtaaaataataataaatagattagtttaagataaaataaagaaaaagagagaataaagagaaagattatttaaataatatataaagtagaaaag

SEQ ID NO: 12245 - DNA, 96 bp, Aspergillus novofumigatus
  misc_feature: 208
ctctttattctctctttttctttattttatcttaaactaatctatttattattattttacttctttttattcttatattctatcttaattctattt

SEQ ID NO: 12246 - DNA, 96 bp, Aspergillus novofumigatus
  misc_feature: 208
aaaaaagtttaatagagtagatatatattattaataaatatatataagaagataaaagagaataatataaaagagagattattttataagaaatag

SEQ ID NO: 12247 - DNA, 96 bp, Aspergillus novofumigatus
  misc_feature: 208
ctaaaatatatatatttatttacttaatatattaatcctaattaaccttgatctcctaatatatatctattacttaatatatggatgctaactaat

SEQ ID NO: 12248 - DNA, 96 bp, Aspergillus novofumigatus
  misc_feature: 208
agtgtagtcaatagtaaggtaggtaataaggtagatagtaattataaatagcatagtagatagtaaggttaatagtaaggtaagcagtaagagagg

SEQ ID NO: 12249 - DNA, 96 bp, Aspergillus novofumigatus
  misc_feature: 208
aaaaagtttaatagagtagatatatattattaataaatatatataagaagataaaagagaataatataaaagagagattattttataagaaatagt

SEQ ID NO: 12250 - DNA, 96 bp, Aspergillus novofumigatus
  misc_feature: 207
gaagtaaaataataataaatagattagtttaagataaaataaagaaaaagagagaataaagagaaagattatttaaataatatataaagtagaaaa

SEQ ID NO: 12251 - DNA, 96 bp, Aspergillus novofumigatus
  misc_feature: 207
ttttaacttattctttaattcttattctaatccttaacttcctatattatttatttatttcttttcatctttataaattattaaaacctaactttt

SEQ ID NO: 12252 - DNA, 96 bp, Aspergillus novofumigatus
  misc_feature: 207
agaagtaaaataataataaatagattagtttaagataaaataaagaaaaagagagaataaagagaaagattatttaaataatatataaagtagaaa

SEQ ID NO: 12253 - DNA, 96 bp, Aspergillus novofumigatus
  misc_feature: 207
ttatatatatttattaataatatatatctactctattaaacttttttactttttaatatatctctctctttatatattcttcttttctcttaaatt

SEQ ID NO: 12254 - DNA, 96 bp, Aspergillus novofumigatus
  misc_feature: 207
cctaaaatatatatatttatttacttaatatattaatcctaattaaccttgatctcctaatatatatctattacttaatatatggatgctaactaa

SEQ ID NO: 12255 - DNA, 96 bp, Aspergillus novofumigatus
  misc_feature: 207
tattttattctaaatactttatatatattaaaacctaaactactaaactaatctatatatattatcctgcttatatacttaaatataaagatatat

SEQ ID NO: 12256 - DNA, 96 bp, Aspergillus novofumigatus
  misc_feature: 207
atattttattctaaatactttatatatattaaaacctaaactactaaactaatctatatatattatcctgcttatatacttaaatataaagatata

SEQ ID NO: 12257 - DNA, 96 bp, Aspergillus novofumigatus
  misc_feature: 207
attttattctaaatactttatatatattaaaacctaaactactaaactaatctatatatattatcctgcttatatacttaaatataaagatatata

SEQ ID NO: 12258 - DNA, 96 bp, Aspergillus novofumigatus
  misc_feature: 207
tatatatctactctattaaacttttttactttttaatatatctctctctttatatattcttcttttctcttaaattattactcttacccttactac

SEQ ID NO: 12259 - DNA, 96 bp, Aspergillus novofumigatus
  misc_feature: 207
ctctctctatacttttaaactattctatatatatatatatttacttcttattacccttttctactttatatattatttaaataatctttctcttta

SEQ ID NO: 12260 - DNA, 96 bp, Aspergillus novofumigatus
  misc_feature: 207
gtgtagtcaatagtaaggtaggtaataaggtagatagtaattataaatagcatagtagatagtaaggttaatagtaaggtaagcagtaagagaggt

SEQ ID NO: 12261 - DNA, 96 bp, Aspergillus novofumigatus
  misc_feature: 207
atcctaaaatatatatatttatttacttaatatattaatcctaattaaccttgatctcctaatatatatctattacttaatatatggatgctaact

SEQ ID NO: 12262 - DNA, 96 bp, Aspergillus novofumigatus
  misc_feature: 207
aatattttattctaaatactttatatatattaaaacctaaactactaaactaatctatatatattatcctgcttatatacttaaatataaagatat

SEQ ID NO: 12263 - DNA, 96 bp, Aspergillus novofumigatus
  misc_feature: 207
atatatctactctattaaacttttttactttttaatatatctctctctttatatattcttcttttctcttaaattattactcttacccttactact

SEQ ID NO: 12264 - DNA, 96 bp, Aspergillus novofumigatus
  misc_feature: 207
actaatctatatatattatcctgcttatatacttaaatataaagatatatatataaagtaattcttattattatcttttaaattactatcttcttt

SEQ ID NO: 12265 - DNA, 96 bp, Aspergillus novofumigatus
  misc_feature: 206
agtaaaaaagtttaatagagtagatatatattattaataaatatatataagaagataaaagagaataatataaaagagagattattttataagaaa

SEQ ID NO: 12266 - DNA, 96 bp, Aspergillus novofumigatus
  misc_feature: 206
taaggtaatattttattctaaatactttatatatattaaaacctaaactactaaactaatctatatatattatcctgcttatatacttaaatataa

SEQ ID NO: 12267 - DNA, 96 bp, Aspergillus novofumigatus
  misc_feature: 206
attctaaatactttatatatattaaaacctaaactactaaactaatctatatatattatcctgcttatatacttaaatataaagatatatatataa

SEQ ID NO: 12268 - DNA, 96 bp, Aspergillus novofumigatus
  misc_feature: 206
tcttataaaataatctctcttttatattattctcttttatcttcttatatatatttattaataatatatatctactctattaaacttttttacttt

SEQ ID NO: 12269 - DNA, 96 bp, Aspergillus novofumigatus
  misc_feature: 206
agtagatatatattattaataaatatatataagaagataaaagagaataatataaaagagagattattttataagaaatagtttagaaaagagaga

SEQ ID NO: 12270 - DNA, 96 bp, Aspergillus novofumigatus
  misc_feature: 206
tctattaaacttttttactttttaatatatctctctctttatatattcttcttttctcttaaattattactcttacccttactactttaagttata

SEQ ID NO: 12271 - DNA, 96 bp, Aspergillus novofumigatus
  misc_feature: 206
tctatacttttaaactattctatatatatatatatttacttcttattacccttttctactttatatattatttaaataatctttctctttattctc

SEQ ID NO: 12272 - DNA, 96 bp, Aspergillus novofumigatus
  misc_feature: 206
agggagataatttaaaaagagagatatagtttaagaagagtaaggattaataagtatagaagaagagatagagttagaggaagaaatttaaagata

SEQ ID NO: 12273 - DNA, 96 bp, Aspergillus novofumigatus
  misc_feature: 206
tatctactctattaaacttttttactttttaatatatctctctctttatatattcttcttttctcttaaattattactcttacccttactacttta

SEQ ID NO: 12274 - DNA, 96 bp, Aspergillus novofumigatus
  misc_feature: 206
tatatattatcctgcttatatacttaaatataaagatatatatataaagtaattcttattattatcttttaaattactatcttctttattcttatt

SEQ ID NO: 12275 - DNA, 96 bp, Aspergillus novofumigatus
  misc_feature: 206
cttaattctatttaagtaattaatttctctctcttttctaaactatttcttataaaataatctctcttttatattattctcttttatcttcttata

SEQ ID NO: 12276 - DNA, 96 bp, Aspergillus novofumigatus
  misc_feature: 206
taaaataatctctcttttatattattctcttttatcttcttatatatatttattaataatatatatctactctattaaacttttttactttttaat

SEQ ID NO: 12277 - DNA, 96 bp, Aspergillus novofumigatus
  misc_feature: 206
taaaacctaaactactaaactaatctatatatattatcctgcttatatacttaaatataaagatatatatataaagtaattcttattattatcttt

SEQ ID NO: 12278 - DNA, 96 bp, Aspergillus novofumigatus
  misc_feature: 206
ctattaaacttttttactttttaatatatctctctctttatatattcttcttttctcttaaattattactcttacccttactactttaagttatac

SEQ ID NO: 12279 - DNA, 96 bp, Aspergillus novofumigatus
  misc_feature: 206
gtaaaaaagtttaatagagtagatatatattattaataaatatatataagaagataaaagagaataatataaaagagagattattttataagaaat

SEQ ID NO: 12280 - DNA, 96 bp, Aspergillus novofumigatus
  misc_feature: 206
ctgctattatggtatcctaaaatatatatatttatttacttaatatattaatcctaattaaccttgatctcctaatatatatctattacttaatat

SEQ ID NO: 12281 - DNA, 96 bp, Aspergillus novofumigatus
  misc_feature: 206
ctatacttttaaactattctatatatatatatatttacttcttattacccttttctactttatatattatttaaataatctttctctttattctct

SEQ ID NO: 12282 - DNA, 96 bp, Aspergillus novofumigatus
  misc_feature: 206
aagaggacaatgaagaggacaatgaagaggacaatgaagaggacaatgaagaggacaatgaagaggacaatgaagaggacaatgaagaggacaatg

SEQ ID NO: 12283 - DNA, 96 bp, Aspergillus novofumigatus
  misc_feature: 206
aatactttatatatattaaaacctaaactactaaactaatctatatatattatcctgcttatatacttaaatataaagatatatatataaagtaat

SEQ ID NO: 12284 - DNA, 96 bp, Aspergillus novofumigatus
  misc_feature: 206
atctatctagctattctaaggtaatattttattctaaatactttatatatattaaaacctaaactactaaactaatctatatatattatcctgctt

SEQ ID NO: 12285 - DNA, 96 bp, Aspergillus novofumigatus
  misc_feature: 206
atatctactctattaaacttttttactttttaatatatctctctctttatatattcttcttttctcttaaattattactcttacccttactacttt

SEQ ID NO: 12286 - DNA, 96 bp, Aspergillus novofumigatus
  misc_feature: 206
acttttaaactattctatatatatatatatttacttcttattacccttttctactttatatattatttaaataatctttctctttattctctcttt

SEQ ID NO: 12287 - DNA, 96 bp, Aspergillus novofumigatus
  misc_feature: 205
cttaggtttactttaattataatataaagaggaaaaggaggaaaaaaaggatataaagaaataaaaaaataagagatagttagattaagagaaaaa

SEQ ID NO: 12288 - DNA, 96 bp, Aspergillus novofumigatus
  misc_feature: 205
ttctaaatactttatatatattaaaacctaaactactaaactaatctatatatattatcctgcttatatacttaaatataaagatatatatataaa

SEQ ID NO: 12289 - DNA, 96 bp, Aspergillus novofumigatus
  misc_feature: 205
ttattcttttcttttctccttagtaaaataatctcttataattttattttatttctttttctcttaatctaactatctcttatttttttatttctt

SEQ ID NO: 12290 - DNA, 96 bp, Aspergillus novofumigatus
  misc_feature: 205
ttattctaaatactttatatatattaaaacctaaactactaaactaatctatatatattatcctgcttatatacttaaatataaagatatatatat

SEQ ID NO: 12291 - DNA, 96 bp, Aspergillus novofumigatus
  misc_feature: 205
gggagataatttaaaaagagagatatagtttaagaagagtaaggattaataagtatagaagaagagatagagttagaggaagaaatttaaagataa

SEQ ID NO: 12292 - DNA, 96 bp, Aspergillus novofumigatus
  misc_feature: 205
tgtagtcaatagtaaggtaggtaataaggtagatagtaattataaatagcatagtagatagtaaggttaatagtaaggtaagcagtaagagaggta

SEQ ID NO: 12293 - DNA, 96 bp, Aspergillus novofumigatus
  misc_feature: 205
tctatctagctattctaaggtaatattttattctaaatactttatatatattaaaacctaaactactaaactaatctatatatattatcctgctta

SEQ ID NO: 12294 - DNA, 96 bp, Aspergillus novofumigatus
  misc_feature: 205
taatattttattctaaatactttatatatattaaaacctaaactactaaactaatctatatatattatcctgcttatatacttaaatataaagata

SEQ ID NO: 12295 - DNA, 96 bp, Aspergillus novofumigatus
  misc_feature: 205
tatatctactctattaaacttttttactttttaatatatctctctctttatatattcttcttttctcttaaattattactcttacccttactactt

SEQ ID NO: 12296 - DNA, 96 bp, Aspergillus novofumigatus
  misc_feature: 205
atatatatctactctattaaacttttttactttttaatatatctctctctttatatattcttcttttctcttaaattattactcttacccttacta

SEQ ID NO: 12297 - DNA, 96 bp, Aspergillus novofumigatus
  misc_feature: 205
aaacctaaactactaaactaatctatatatattatcctgcttatatacttaaatataaagatatatatataaagtaattcttattattatctttta

SEQ ID NO: 12298 - DNA, 96 bp, Aspergillus novofumigatus
  misc_feature: 205
gtagatatatattattaataaatatatataagaagataaaagagaataatataaaagagagattattttataagaaatagtttagaaaagagagag

SEQ ID NO: 12299 - DNA, 96 bp, Aspergillus novofumigatus
  misc_feature: 205
catctttataaattattaaaacctaacttttttattcttttttctaattaaataatctatattattttactccctattcttcttttctttctaatt

SEQ ID NO: 12300 - DNA, 96 bp, Aspergillus novofumigatus
  misc_feature: 205
aatctatatatattatcctgcttatatacttaaatataaagatatatatataaagtaattcttattattatcttttaaattactatcttctttatt

SEQ ID NO: 12301 - DNA, 96 bp, Aspergillus novofumigatus
  misc_feature: 204
tttttaacttattctttaattcttattctaatccttaacttcctatattatttatttatttcttttcatctttataaattattaaaacctaacttt

SEQ ID NO: 12302 - DNA, 96 bp, Aspergillus novofumigatus
  misc_feature: 204
aaggtaatattttattctaaatactttatatatattaaaacctaaactactaaactaatctatatatattatcctgcttatatacttaaatataaa

SEQ ID NO: 12303 - DNA, 96 bp, Aspergillus novofumigatus
  misc_feature: 204
tattctaaggtaatattttattctaaatactttatatatattaaaacctaaactactaaactaatctatatatattatcctgcttatatacttaaa

SEQ ID NO: 12304 - DNA, 96 bp, Aspergillus novofumigatus
  misc_feature: 204
tcctgcttatatacttaaatataaagatatatatataaagtaattcttattattatcttttaaattactatcttctttattcttattagtagttat

SEQ ID NO: 12305 - DNA, 96 bp, Aspergillus novofumigatus
  misc_feature: 204
tatatatattatcctgcttatatacttaaatataaagatatatatataaagtaattcttattattatcttttaaattactatcttctttattctta

SEQ ID NO: 12306 - DNA, 96 bp, Aspergillus novofumigatus
  misc_feature: 204
taagataaaataaagaaaaagagagaataaagagaaagattatttaaataatatataaagtagaaaagggtaataagaagtaaatatatatatata

SEQ ID NO: 12307 - DNA, 96 bp, Aspergillus novofumigatus
  misc_feature: 204
agatatatatataaagtaattcttattattatcttttaaattactatcttctttattcttattagtagttatatctatcctatctttaattaacta

SEQ ID NO: 12308 - DNA, 96 bp, Aspergillus novofumigatus
  misc_feature: 204
ctctcttactgcttaccttactattaaccttactatctactatgctatttataattactatctaccttattacctaccttactattgactacacta

SEQ ID NO: 12309 - DNA, 96 bp, Aspergillus novofumigatus
  misc_feature: 204
atatattatcctgcttatatacttaaatataaagatatatatataaagtaattcttattattatcttttaaattactatcttctttattcttatta

SEQ ID NO: 12310 - DNA, 96 bp, Aspergillus novofumigatus
  misc_feature: 204
gctattctaaggtaatattttattctaaatactttatatatattaaaacctaaactactaaactaatctatatatattatcctgcttatatactta

SEQ ID NO: 12311 - DNA, 96 bp, Aspergillus novofumigatus
  misc_feature: 204
taaactaatctatatatattatcctgcttatatacttaaatataaagatatatatataaagtaattcttattattatcttttaaattactatcttc

SEQ ID NO: 12312 - DNA, 96 bp, Aspergillus novofumigatus
  misc_feature: 204
cttttaaactattctatatatatatatatttacttcttattacccttttctactttatatattatttaaataatctttctctttattctctctttt

SEQ ID NO: 12313 - DNA, 96 bp, Aspergillus novofumigatus
  misc_feature: 204
aagatatatatataaagtaattcttattattatcttttaaattactatcttctttattcttattagtagttatatctatcctatctttaattaact

SEQ ID NO: 12314 - DNA, 96 bp, Aspergillus novofumigatus
  misc_feature: 204
aaaacctaaactactaaactaatctatatatattatcctgcttatatacttaaatataaagatatatatataaagtaattcttattattatctttt

SEQ ID NO: 12315 - DNA, 96 bp, Aspergillus novofumigatus
  misc_feature: 203
tttaagataaaataaagaaaaagagagaataaagagaaagattatttaaataatatataaagtagaaaagggtaataagaagtaaatatatatata

SEQ ID NO: 12316 - DNA, 96 bp, Aspergillus novofumigatus
  misc_feature: 203
tgaagaggacaatgaagaggacaatgaagaggacaatgaagaggacaatgaagaggacaatgaagaggacaatgaagaggacaatgaagaggacaa

SEQ ID NO: 12317 - DNA, 96 bp, Aspergillus novofumigatus
  misc_feature: 203
aaatactttatatatattaaaacctaaactactaaactaatctatatatattatcctgcttatatacttaaatataaagatatatatataaagtaa

SEQ ID NO: 12318 - DNA, 96 bp, Aspergillus novofumigatus
  misc_feature: 203
tgcttatatacttaaatataaagatatatatataaagtaattcttattattatcttttaaattactatcttctttattcttattagtagttatatc

SEQ ID NO: 12319 - DNA, 96 bp, Aspergillus novofumigatus
  misc_feature: 203
aaagggagataatttaaaaagagagatatagtttaagaagagtaaggattaataagtatagaagaagagatagagttagaggaagaaatttaaaga

SEQ ID NO: 12320 - DNA, 96 bp, Aspergillus novofumigatus
  misc_feature: 203
tctcttactgcttaccttactattaaccttactatctactatgctatttataattactatctaccttattacctaccttactattgactacactat

SEQ ID NO: 12321 - DNA, 96 bp, Aspergillus novofumigatus
  misc_feature: 203
tctagctattctaaggtaatattttattctaaatactttatatatattaaaacctaaactactaaactaatctatatatattatcctgcttatata

SEQ ID NO: 12322 - DNA, 96 bp, Aspergillus novofumigatus
  misc_feature: 203
tcaatagtaaggtaggtaataaggtagatagtaattataaatagcatagtagatagtaaggttaatagtaaggtaagcagtaagagaggtagtaat

SEQ ID NO: 12323 - DNA, 96 bp, Aspergillus novofumigatus
  misc_feature: 203
cctgcttatatacttaaatataaagatatatatataaagtaattcttattattatcttttaaattactatcttctttattcttattagtagttata

SEQ ID NO: 12324 - DNA, 96 bp, Aspergillus novofumigatus
  misc_feature: 203
taaatactttatatatattaaaacctaaactactaaactaatctatatatattatcctgcttatatacttaaatataaagatatatatataaagta

SEQ ID NO: 12325 - DNA, 96 bp, Aspergillus novofumigatus
  misc_feature: 203
tactctattaaacttttttactttttaatatatctctctctttatatattcttcttttctcttaaattattactcttacccttactactttaagtt

SEQ ID NO: 12326 - DNA, 96 bp, Aspergillus novofumigatus
  misc_feature: 203
agtcaatagtaaggtaggtaataaggtagatagtaattataaatagcatagtagatagtaaggttaatagtaaggtaagcagtaagagaggtagta

SEQ ID NO: 12327 - DNA, 96 bp, Aspergillus novofumigatus
  misc_feature: 203
taatctatatatattatcctgcttatatacttaaatataaagatatatatataaagtaattcttattattatcttttaaattactatcttctttat

SEQ ID NO: 12328 - DNA, 96 bp, Aspergillus novofumigatus
  misc_feature: 203
actctattaaacttttttactttttaatatatctctctctttatatattcttcttttctcttaaattattactcttacccttactactttaagtta

SEQ ID NO: 12329 - DNA, 96 bp, Aspergillus novofumigatus
  misc_feature: 203
atcctgcttatatacttaaatataaagatatatatataaagtaattcttattattatcttttaaattactatcttctttattcttattagtagtta

SEQ ID NO: 12330 - DNA, 96 bp, Aspergillus novofumigatus
  misc_feature: 203
ctaatctatatatattatcctgcttatatacttaaatataaagatatatatataaagtaattcttattattatcttttaaattactatcttcttta

SEQ ID NO: 12331 - DNA, 96 bp, Aspergillus novofumigatus
  misc_feature: 203
ggagataatttaaaaagagagatatagtttaagaagagtaaggattaataagtatagaagaagagatagagttagaggaagaaatttaaagataag

SEQ ID NO: 12332 - DNA, 96 bp, Aspergillus novofumigatus
  misc_feature: 203
ctcttactgcttaccttactattaaccttactatctactatgctatttataattactatctaccttattacctaccttactattgactacactatc

SEQ ID NO: 12333 - DNA, 96 bp, Aspergillus novofumigatus
  misc_feature: 203
gaagaggacaatgaagaggacaatgaagaggacaatgaagaggacaatgaagaggacaatgaagaggacaatgaagaggacaatgaagaggacaat

SEQ ID NO: 12334 - DNA, 96 bp, Aspergillus novofumigatus
  misc_feature: 203
cttataaaataatctctcttttatattattctcttttatcttcttatatatatttattaataatatatatctactctattaaacttttttactttt

SEQ ID NO: 12335 - DNA, 96 bp, Aspergillus novofumigatus
  misc_feature: 203
ctatatatattatcctgcttatatacttaaatataaagatatatatataaagtaattcttattattatcttttaaattactatcttctttattctt

SEQ ID NO: 12336 - DNA, 96 bp, Aspergillus novofumigatus
  misc_feature: 203
ctaaatactttatatatattaaaacctaaactactaaactaatctatatatattatcctgcttatatacttaaatataaagatatatatataaagt

SEQ ID NO: 12337 - DNA, 96 bp, Aspergillus novofumigatus
  misc_feature: 203
aagggagataatttaaaaagagagatatagtttaagaagagtaaggattaataagtatagaagaagagatagagttagaggaagaaatttaaagat

SEQ ID NO: 12338 - DNA, 96 bp, Aspergillus novofumigatus
  misc_feature: 203
atatatattatcctgcttatatacttaaatataaagatatatatataaagtaattcttattattatcttttaaattactatcttctttattcttat

SEQ ID NO: 12339 - DNA, 96 bp, Aspergillus novofumigatus
  misc_feature: 203
aaactaatctatatatattatcctgcttatatacttaaatataaagatatatatataaagtaattcttattattatcttttaaattactatcttct

SEQ ID NO: 12340 - DNA, 96 bp, Aspergillus novofumigatus
  misc_feature: 202
tttaaactattctatatatatatatatttacttcttattacccttttctactttatatattatttaaataatctttctctttattctctctttttc

SEQ ID NO: 12341 - DNA, 96 bp, Aspergillus novofumigatus
  misc_feature: 202
gtcaatagtaaggtaggtaataaggtagatagtaattataaatagcatagtagatagtaaggttaatagtaaggtaagcagtaagagaggtagtaa

SEQ ID NO: 12342 - DNA, 96 bp, Aspergillus novofumigatus
  misc_feature: 202
ctattctaaggtaatattttattctaaatactttatatatattaaaacctaaactactaaactaatctatatatattatcctgcttatatacttaa

SEQ ID NO: 12343 - DNA, 96 bp, Aspergillus novofumigatus
  misc_feature: 202
ttaagataaaataaagaaaaagagagaataaagagaaagattatttaaataatatataaagtagaaaagggtaataagaagtaaatatatatatat

SEQ ID NO: 12344 - DNA, 96 bp, Aspergillus novofumigatus
  misc_feature: 202
ttaaactattctatatatatatatatttacttcttattacccttttctactttatatattatttaaataatctttctctttattctctctttttct

SEQ ID NO: 12345 - DNA, 96 bp, Aspergillus novofumigatus
  misc_feature: 202
atgaagaggacaatgaagaggacaatgaagaggacaatgaagaggacaatgaagaggacaatgaagaggacaatgaagaggacaatgaagaggaca

SEQ ID NO: 12346 - DNA, 96 bp, Aspergillus novofumigatus
  misc_feature: 202
tcttttatattattctcttttatcttcttatatatatttattaataatatatatctactctattaaacttttttactttttaatatatctctctct

SEQ ID NO: 12347 - DNA, 96 bp, Aspergillus novofumigatus
  misc_feature: 202
tctctcttttatattattctcttttatcttcttatatatatttattaataatatatatctactctattaaacttttttactttttaatatatctct

SEQ ID NO: 12348 - DNA, 96 bp, Aspergillus novofumigatus
  misc_feature: 202
agcattaatatattagtgaatgaatatatataatttgggataccataatgctcagagatatatattatagagttaattatagagtatattagctga

SEQ ID NO: 12349 - DNA, 96 bp, Aspergillus novofumigatus
  misc_feature: 202
tattctatatatatatatatttacttcttattacccttttctactttatatattatttaaataatctttctctttattctctctttttctttattt

SEQ ID NO: 12350 - DNA, 96 bp, Aspergillus novofumigatus
  misc_feature: 202
tagtcaatagtaaggtaggtaataaggtagatagtaattataaatagcatagtagatagtaaggttaatagtaaggtaagcagtaagagaggtagt

SEQ ID NO: 12351 - DNA, 96 bp, Aspergillus novofumigatus
  misc_feature: 202
gtaatattttattctaaatactttatatatattaaaacctaaactactaaactaatctatatatattatcctgcttatatacttaaatataaagat

SEQ ID NO: 12352 - DNA, 96 bp, Aspergillus novofumigatus
  misc_feature: 202
gtaaaataataataaatagattagtttaagataaaataaagaaaaagagagaataaagagaaagattatttaaataatatataaagtagaaaaggg

SEQ ID NO: 12353 - DNA, 96 bp, Aspergillus novofumigatus
  misc_feature: 202
atctctcttttatattattctcttttatcttcttatatatatttattaataatatatatctactctattaaacttttttactttttaatatatctc

SEQ ID NO: 12354 - DNA, 96 bp, Aspergillus novofumigatus
  misc_feature: 202
ctcttttatattattctcttttatcttcttatatatatttattaataatatatatctactctattaaacttttttactttttaatatatctctctc

SEQ ID NO: 12355 - DNA, 96 bp, Aspergillus novofumigatus
  misc_feature: 202
cttatatatatttattaataatatatatctactctattaaacttttttactttttaatatatctctctctttatatattcttcttttctcttaaat

SEQ ID NO: 12356 - DNA, 96 bp, Aspergillus novofumigatus
  misc_feature: 202
ctctattaaacttttttactttttaatatatctctctctttatatattcttcttttctcttaaattattactcttacccttactactttaagttat

SEQ ID NO: 12357 - DNA, 96 bp, Aspergillus novofumigatus
  misc_feature: 202
ctactctattaaacttttttactttttaatatatctctctctttatatattcttcttttctcttaaattattactcttacccttactactttaagt

SEQ ID NO: 12358 - DNA, 96 bp, Aspergillus novofumigatus
  misc_feature: 202
agtaaaataataataaatagattagtttaagataaaataaagaaaaagagagaataaagagaaagattatttaaataatatataaagtagaaaagg

SEQ ID NO: 12359 - DNA, 96 bp, Aspergillus novofumigatus
  misc_feature: 202
ataatctctcttttatattattctcttttatcttcttatatatatttattaataatatatatctactctattaaacttttttactttttaatatat

SEQ ID NO: 12360 - DNA, 96 bp, Aspergillus novofumigatus
  misc_feature: 202
actgcttaccttactattaaccttactatctactatgctatttataattactatctaccttattacctaccttactattgactacactatctatct

SEQ ID NO: 12361 - DNA, 96 bp, Aspergillus novofumigatus
  misc_feature: 202
aactaatctatatatattatcctgcttatatacttaaatataaagatatatatataaagtaattcttattattatcttttaaattactatcttctt

SEQ ID NO: 12362 - DNA, 96 bp, Aspergillus novofumigatus
  misc_feature: 202
aaactattctatatatatatatatttacttcttattacccttttctactttatatattatttaaataatctttctctttattctctctttttcttt

SEQ ID NO: 12363 - DNA, 96 bp, Aspergillus novofumigatus
  misc_feature: 201
ttttatattattctcttttatcttcttatatatatttattaataatatatatctactctattaaacttttttactttttaatatatctctctcttt

SEQ ID NO: 12364 - DNA, 96 bp, Aspergillus novofumigatus
  misc_feature: 201
ttttaaactattctatatatatatatatttacttcttattacccttttctactttatatattatttaaataatctttctctttattctctcttttt

SEQ ID NO: 12365 - DNA, 96 bp, Aspergillus novofumigatus
  misc_feature: 201
ggtttactttaattataatataaagaggaaaaggaggaaaaaaaggatataaagaaataaaaaaataagagatagttagattaagagaaaaagaaa

SEQ ID NO: 12366 - DNA, 96 bp, Aspergillus novofumigatus
  misc_feature: 201
tcttatatatatttattaataatatatatctactctattaaacttttttactttttaatatatctctctctttatatattcttcttttctcttaaa

SEQ ID NO: 12367 - DNA, 96 bp, Aspergillus novofumigatus
  misc_feature: 201
gatatatatataaagtaattcttattattatcttttaaattactatcttctttattcttattagtagttatatctatcctatctttaattaactaa

SEQ ID NO: 12368 - DNA, 96 bp, Aspergillus novofumigatus
  misc_feature: 201
ggtaatattttattctaaatactttatatatattaaaacctaaactactaaactaatctatatatattatcctgcttatatacttaaatataaaga

SEQ ID NO: 12369 - DNA, 96 bp, Aspergillus novofumigatus
  misc_feature: 201
tcttactgcttaccttactattaaccttactatctactatgctatttataattactatctaccttattacctaccttactattgactacactatct

SEQ ID NO: 12370 - DNA, 96 bp, Aspergillus novofumigatus
  misc_feature: 201
tctcttttatattattctcttttatcttcttatatatatttattaataatatatatctactctattaaacttttttactttttaatatatctctct

SEQ ID NO: 12371 - DNA, 96 bp, Aspergillus novofumigatus
  misc_feature: 201
tctaaatactttatatatattaaaacctaaactactaaactaatctatatatattatcctgcttatatacttaaatataaagatatatatataaag

SEQ ID NO: 12372 - DNA, 96 bp, Aspergillus novofumigatus
  misc_feature: 201
tatctatctagctattctaaggtaatattttattctaaatactttatatatattaaaacctaaactactaaactaatctatatatattatcctgct

SEQ ID NO: 12373 - DNA, 96 bp, Aspergillus novofumigatus
  misc_feature: 201
tatcctgcttatatacttaaatataaagatatatatataaagtaattcttattattatcttttaaattactatcttctttattcttattagtagtt

SEQ ID NO: 12374 - DNA, 96 bp, Aspergillus novofumigatus
  misc_feature: 201
tatatatataaagtaattcttattattatcttttaaattactatcttctttattcttattagtagttatatctatcctatctttaattaactaatc

SEQ ID NO: 12375 - DNA, 96 bp, Aspergillus novofumigatus
  misc_feature: 201
tagtcagcattaatatattagtgaatgaatatatataatttgggataccataatgctcagagatatatattatagagttaattatagagtatatta

SEQ ID NO: 12376 - DNA, 96 bp, Aspergillus novofumigatus
  misc_feature: 201
tagctattctaaggtaatattttattctaaatactttatatatattaaaacctaaactactaaactaatctatatatattatcctgcttatatact

SEQ ID NO: 12377 - DNA, 96 bp, Aspergillus novofumigatus
  misc_feature: 201
taaatataaagatatatatataaagtaattcttattattatcttttaaattactatcttctttattcttattagtagttatatctatcctatcttt

SEQ ID NO: 12378 - DNA, 96 bp, Aspergillus novofumigatus
  misc_feature: 201
aggtaatattttattctaaatactttatatatattaaaacctaaactactaaactaatctatatatattatcctgcttatatacttaaatataaag

SEQ ID NO: 12379 - DNA, 96 bp, Aspergillus novofumigatus
  misc_feature: 201
ctgcttatatacttaaatataaagatatatatataaagtaattcttattattatcttttaaattactatcttctttattcttattagtagttatat

SEQ ID NO: 12380 - DNA, 96 bp, Aspergillus novofumigatus
  misc_feature: 201
ctatctagctattctaaggtaatattttattctaaatactttatatatattaaaacctaaactactaaactaatctatatatattatcctgcttat

SEQ ID NO: 12381 - DNA, 96 bp, Aspergillus novofumigatus
  misc_feature: 201
ctaaactaatctatatatattatcctgcttatatacttaaatataaagatatatatataaagtaattcttattattatcttttaaattactatctt

SEQ ID NO: 12382 - DNA, 96 bp, Aspergillus novofumigatus
  misc_feature: 201
attagttagcatccatatatcaagtaatagatatatattaggagatcaaggttaattaggattaatatattaagtaaataaatatatatattttag

SEQ ID NO: 12383 - DNA, 96 bp, Aspergillus novofumigatus
  misc_feature: 201
attctaaggtaatattttattctaaatactttatatatattaaaacctaaactactaaactaatctatatatattatcctgcttatatacttaaat

SEQ ID NO: 12384 - DNA, 96 bp, Aspergillus novofumigatus
  misc_feature: 201
attagtttaagataaaataaagaaaaagagagaataaagagaaagattatttaaataatatataaagtagaaaagggtaataagaagtaaatatat

SEQ ID NO: 12385 - DNA, 96 bp, Aspergillus novofumigatus
  misc_feature: 201
atatatataaagtaattcttattattatcttttaaattactatcttctttattcttattagtagttatatctatcctatctttaattaactaatct

SEQ ID NO: 12386 - DNA, 96 bp, Aspergillus novofumigatus
  misc_feature: 201
actattctatatatatatatatttacttcttattacccttttctactttatatattatttaaataatctttctctttattctctctttttctttat

SEQ ID NO: 12387 - DNA, 96 bp, Aspergillus novofumigatus
  misc_feature: 201
aatctctcttttatattattctcttttatcttcttatatatatttattaataatatatatctactctattaaacttttttactttttaatatatct

SEQ ID NO: 12388 - DNA, 96 bp, Aspergillus novofumigatus
  misc_feature: 201
actaaactaatctatatatattatcctgcttatatacttaaatataaagatatatatataaagtaattcttattattatcttttaaattactatct

SEQ ID NO: 12389 - DNA, 96 bp, Aspergillus novofumigatus
  misc_feature: 200
aggtttactttaattataatataaagaggaaaaggaggaaaaaaaggatataaagaaataaaaaaataagagatagttagattaagagaaaaagaa

SEQ ID NO: 12390 - DNA, 96 bp, Aspergillus novofumigatus
  misc_feature: 200
taataaatagattagtttaagataaaataaagaaaaagagagaataaagagaaagattatttaaataatatataaagtagaaaagggtaataagaa

SEQ ID NO: 12391 - DNA, 96 bp, Aspergillus novofumigatus
  misc_feature: 200
atctactctattaaacttttttactttttaatatatctctctctttatatattcttcttttctcttaaattattactcttacccttactactttaa

SEQ ID NO: 12392 - DNA, 96 bp, Aspergillus novofumigatus
  misc_feature: 200
ataaaataatctctcttttatattattctcttttatcttcttatatatatttattaataatatatatctactctattaaacttttttactttttaa

SEQ ID NO: 12393 - DNA, 96 bp, Aspergillus novofumigatus
  misc_feature: 200
aaaagaaggataagaggagaattagaaagaattagaagaagaggtagagagagaaatagaagaatagttaaggatagtaagtttagaattagaata

SEQ ID NO: 12394 - DNA, 96 bp, Aspergillus novofumigatus
  misc_feature: 200
gattagtttaagataaaataaagaaaaagagagaataaagagaaagattatttaaataatatataaagtagaaaagggtaataagaagtaaatata

SEQ ID NO: 12395 - DNA, 96 bp, Aspergillus novofumigatus
  misc_feature: 200
agataaaataaagaaaaagagagaataaagagaaagattatttaaataatatataaagtagaaaagggtaataagaagtaaatatatatatatata

SEQ ID NO: 12396 - DNA, 96 bp, Aspergillus novofumigatus
  misc_feature: 200
tataaaataatctctcttttatattattctcttttatcttcttatatatatttattaataatatatatctactctattaaacttttttacttttta

SEQ ID NO: 12397 - DNA, 96 bp, Aspergillus novofumigatus
  misc_feature: 200
tactgcttaccttactattaaccttactatctactatgctatttataattactatctaccttattacctaccttactattgactacactatctatc

SEQ ID NO: 12398 - DNA, 96 bp, Aspergillus novofumigatus
  misc_feature: 200
tactaaactaatctatatatattatcctgcttatatacttaaatataaagatatatatataaagtaattcttattattatcttttaaattactatc

SEQ ID NO: 12399 - DNA, 96 bp, Aspergillus novofumigatus
  misc_feature: 200
taaactactaaactaatctatatatattatcctgcttatatacttaaatataaagatatatatataaagtaattcttattattatcttttaaatta

SEQ ID NO: 12400 - DNA, 96 bp, Aspergillus novofumigatus
  misc_feature: 200
aaatataaagatatatatataaagtaattcttattattatcttttaaattactatcttctttattcttattagtagttatatctatcctatcttta

SEQ ID NO: 12401 - DNA, 96 bp, Aspergillus novofumigatus
  misc_feature: 200
taaactattctatatatatatatatttacttcttattacccttttctactttatatattatttaaataatctttctctttattctctctttttctt

SEQ ID NO: 12402 - DNA, 96 bp, Aspergillus novofumigatus
  misc_feature: 200
gattagttagcatccatatatcaagtaatagatatatattaggagatcaaggttaattaggattaatatattaagtaaataaatatatatatttta

SEQ ID NO: 12403 - DNA, 96 bp, Aspergillus novofumigatus
  misc_feature: 200
taaaagaaggataagaggagaattagaaagaattagaagaagaggtagagagagaaatagaagaatagttaaggatagtaagtttagaattagaat

SEQ ID NO: 12404 - DNA, 96 bp, Aspergillus novofumigatus
  misc_feature: 200
aaagatatatatataaagtaattcttattattatcttttaaattactatcttctttattcttattagtagttatatctatcctatctttaattaac

SEQ ID NO: 12405 - DNA, 96 bp, Aspergillus novofumigatus
  misc_feature: 200
aatgaagaggacaatgaagaggacaatgaagaggacaatgaagaggacaatgaagaggacaatgaagaggacaatgaagaggacaatgaagaggac

SEQ ID NO: 12406 - DNA, 96 bp, Aspergillus novofumigatus
  misc_feature: 200
ctagctattctaaggtaatattttattctaaatactttatatatattaaaacctaaactactaaactaatctatatatattatcctgcttatatac

SEQ ID NO: 12407 - DNA, 96 bp, Aspergillus novofumigatus
  misc_feature: 200
gtagtcaatagtaaggtaggtaataaggtagatagtaattataaatagcatagtagatagtaaggttaatagtaaggtaagcagtaagagaggtag

SEQ ID NO: 12408 - DNA, 96 bp, Aspergillus novofumigatus
  misc_feature: 200
ctctcttttatattattctcttttatcttcttatatatatttattaataatatatatctactctattaaacttttttactttttaatatatctctc

SEQ ID NO: 12409 - DNA, 96 bp, Aspergillus novofumigatus
  misc_feature: 200
gaaagggagataatttaaaaagagagatatagtttaagaagagtaaggattaataagtatagaagaagagatagagttagaggaagaaatttaaag

SEQ ID NO: 12410 - DNA, 96 bp, Aspergillus novofumigatus
  misc_feature: 200
cttttatattattctcttttatcttcttatatatatttattaataatatatatctactctattaaacttttttactttttaatatatctctctctt

SEQ ID NO: 12411 - DNA, 96 bp, Aspergillus novofumigatus
  misc_feature: 200
ctaaactactaaactaatctatatatattatcctgcttatatacttaaatataaagatatatatataaagtaattcttattattatcttttaaatt

SEQ ID NO: 12412 - DNA, 96 bp, Aspergillus novofumigatus
  misc_feature: 200
atatatatataaagtaattcttattattatcttttaaattactatcttctttattcttattagtagttatatctatcctatctttaattaactaat

SEQ ID NO: 12413 - DNA, 96 bp, Aspergillus novofumigatus
  misc_feature: 199
taataataaatagattagtttaagataaaataaagaaaaagagagaataaagagaaagattatttaaataatatataaagtagaaaagggtaataa

SEQ ID NO: 12414 - DNA, 96 bp, Aspergillus novofumigatus
  misc_feature: 199
ttatcctgcttatatacttaaatataaagatatatatataaagtaattcttattattatcttttaaattactatcttctttattcttattagtagt

SEQ ID NO: 12415 - DNA, 96 bp, Aspergillus novofumigatus
  misc_feature: 199
ttataaaataatctctcttttatattattctcttttatcttcttatatatatttattaataatatatatctactctattaaacttttttacttttt

SEQ ID NO: 12416 - DNA, 96 bp, Aspergillus novofumigatus
  misc_feature: 199
aaataataataaatagattagtttaagataaaataaagaaaaagagagaataaagagaaagattatttaaataatatataaagtagaaaagggtaa

SEQ ID NO: 12417 - DNA, 96 bp, Aspergillus novofumigatus
  misc_feature: 199
aacctaaactactaaactaatctatatatattatcctgcttatatacttaaatataaagatatatatataaagtaattcttattattatcttttaa

SEQ ID NO: 12418 - DNA, 96 bp, Aspergillus novofumigatus
  misc_feature: 199
taggtttactttaattataatataaagaggaaaaggaggaaaaaaaggatataaagaaataaaaaaataagagatagttagattaagagaaaaaga

SEQ ID NO: 12419 - DNA, 96 bp, Aspergillus novofumigatus
  misc_feature: 199
ataataaatagattagtttaagataaaataaagaaaaagagagaataaagagaaagattatttaaataatatataaagtagaaaagggtaataaga

SEQ ID NO: 12420 - DNA, 96 bp, Aspergillus novofumigatus
  misc_feature: 199
tattatcctgcttatatacttaaatataaagatatatatataaagtaattcttattattatcttttaaattactatcttctttattcttattagta

SEQ ID NO: 12421 - DNA, 96 bp, Aspergillus novofumigatus
  misc_feature: 199
catccatatatcaagtaatagatatatattaggagatcaaggttaattaggattaatatattaagtaaataaatatatatattttaggataccata

SEQ ID NO: 12422 - DNA, 96 bp, Aspergillus novofumigatus
  misc_feature: 199
tatctagctattctaaggtaatattttattctaaatactttatatatattaaaacctaaactactaaactaatctatatatattatcctgcttata

SEQ ID NO: 12423 - DNA, 96 bp, Aspergillus novofumigatus
  misc_feature: 199
agtttaagataaaataaagaaaaagagagaataaagagaaagattatttaaataatatataaagtagaaaagggtaataagaagtaaatatatata

SEQ ID NO: 12424 - DNA, 96 bp, Aspergillus novofumigatus
  misc_feature: 199
tatatataaagtaattcttattattatcttttaaattactatcttctttattcttattagtagttatatctatcctatctttaattaactaatcta

SEQ ID NO: 12425 - DNA, 96 bp, Aspergillus novofumigatus
  misc_feature: 199
aaaataataataaatagattagtttaagataaaataaagaaaaagagagaataaagagaaagattatttaaataatatataaagtagaaaagggta

SEQ ID NO: 12426 - DNA, 96 bp, Aspergillus novofumigatus
  misc_feature: 199
ggatctccaccctccatgggaccacgccagttggcggtccgagatggccgggcgcgcgccctgaccggcagcaggggcccgcgcgcgccgccgccc

SEQ ID NO: 12427 - DNA, 96 bp, Aspergillus novofumigatus
  misc_feature: 199
attctatatatatatatatttacttcttattacccttttctactttatatattatttaaataatctttctctttattctctctttttctttatttt

SEQ ID NO: 12428 - DNA, 96 bp, Aspergillus novofumigatus
  misc_feature: 199
atctagctattctaaggtaatattttattctaaatactttatatatattaaaacctaaactactaaactaatctatatatattatcctgcttatat

SEQ ID NO: 12429 - DNA, 96 bp, Aspergillus novofumigatus
  misc_feature: 198
aaagataataagttaagaattagaatatagattaaaaagagaaagaaaagatagataaatagatagaagagaaaaaataagaattagaaaataaaa

SEQ ID NO: 12430 - DNA, 96 bp, Aspergillus novofumigatus
  misc_feature: 198
tttatcttcttatatatatttattaataatatatatctactctattaaacttttttactttttaatatatctctctctttatatattcttcttttc

SEQ ID NO: 12431 - DNA, 96 bp, Aspergillus novofumigatus
  misc_feature: 198
acctaaactactaaactaatctatatatattatcctgcttatatacttaaatataaagatatatatataaagtaattcttattattatcttttaaa

SEQ ID NO: 12432 - DNA, 96 bp, Aspergillus novofumigatus
  misc_feature: 198
ttctaaggtaatattttattctaaatactttatatatattaaaacctaaactactaaactaatctatatatattatcctgcttatatacttaaata

SEQ ID NO: 12433 - DNA, 96 bp, Aspergillus novofumigatus
  misc_feature: 198
aaagaaggataagaggagaattagaaagaattagaagaagaggtagagagagaaatagaagaatagttaaggatagtaagtttagaattagaataa

SEQ ID NO: 12434 - DNA, 96 bp, Aspergillus novofumigatus
  misc_feature: 198
ttagttagcatccatatatcaagtaatagatatatattaggagatcaaggttaattaggattaatatattaagtaaataaatatatatattttagg

SEQ ID NO: 12435 - DNA, 96 bp, Aspergillus novofumigatus
  misc_feature: 198
ttactgcttaccttactattaaccttactatctactatgctatttataattactatctaccttattacctaccttactattgactacactatctat

SEQ ID NO: 12436 - DNA, 96 bp, Aspergillus novofumigatus
  misc_feature: 198
ttaaatataaagatatatatataaagtaattcttattattatcttttaaattactatcttctttattcttattagtagttatatctatcctatctt

SEQ ID NO: 12437 - DNA, 96 bp, Aspergillus novofumigatus
  misc_feature: 198
agataataagttaagaattagaatatagattaaaaagagaaagaaaagatagataaatagatagaagagaaaaaataagaattagaaaataaaaga

SEQ ID NO: 12438 - DNA, 96 bp, Aspergillus novofumigatus
  misc_feature: 198
tctactctattaaacttttttactttttaatatatctctctctttatatattcttcttttctcttaaattattactcttacccttactactttaag

SEQ ID NO: 12439 - DNA, 96 bp, Aspergillus novofumigatus
  misc_feature: 198
tctaaggtaatattttattctaaatactttatatatattaaaacctaaactactaaactaatctatatatattatcctgcttatatacttaaatat

SEQ ID NO: 12440 - DNA, 96 bp, Aspergillus novofumigatus
  misc_feature: 198
ctaaggtaatattttattctaaatactttatatatattaaaacctaaactactaaactaatctatatatattatcctgcttatatacttaaatata

SEQ ID NO: 12441 - DNA, 96 bp, Aspergillus novofumigatus
  misc_feature: 198
tagtttaagataaaataaagaaaaagagagaataaagagaaagattatttaaataatatataaagtagaaaagggtaataagaagtaaatatatat

SEQ ID NO: 12442 - DNA, 96 bp, Aspergillus novofumigatus
  misc_feature: 198
ataaagatatatatataaagtaattcttattattatcttttaaattactatcttctttattcttattagtagttatatctatcctatctttaatta

SEQ ID NO: 12443 - DNA, 96 bp, Aspergillus novofumigatus
  misc_feature: 198
taatctctcttttatattattctcttttatcttcttatatatatttattaataatatatatctactctattaaacttttttactttttaatatatc

SEQ ID NO: 12444 - DNA, 96 bp, Aspergillus novofumigatus
  misc_feature: 198
gcttatatacttaaatataaagatatatatataaagtaattcttattattatcttttaaattactatcttctttattcttattagtagttatatct

SEQ ID NO: 12445 - DNA, 96 bp, Aspergillus novofumigatus
  misc_feature: 198
atatctatctagctattctaaggtaatattttattctaaatactttatatatattaaaacctaaactactaaactaatctatatatattatcctgc

SEQ ID NO: 12446 - DNA, 96 bp, Aspergillus novofumigatus
  misc_feature: 198
aataataaatagattagtttaagataaaataaagaaaaagagagaataaagagaaagattatttaaataatatataaagtagaaaagggtaataag

SEQ ID NO: 12447 - DNA, 96 bp, Aspergillus novofumigatus
  misc_feature: 198
ctgcttaccttactattaaccttactatctactatgctatttataattactatctaccttattacctaccttactattgactacactatctatctt

SEQ ID NO: 12448 - DNA, 96 bp, Aspergillus novofumigatus
  misc_feature: 198
ctattctatatatatatatatttacttcttattacccttttctactttatatattatttaaataatctttctctttattctctctttttctttatt

SEQ ID NO: 12449 - DNA, 96 bp, Aspergillus novofumigatus
  misc_feature: 198
attatcctgcttatatacttaaatataaagatatatatataaagtaattcttattattatcttttaaattactatcttctttattcttattagtag

SEQ ID NO: 12450 - DNA, 96 bp, Aspergillus novofumigatus
  misc_feature: 198
agtcagcattaatatattagtgaatgaatatatataatttgggataccataatgctcagagatatatattatagagttaattatagagtatattag

SEQ ID NO: 12451 - DNA, 96 bp, Aspergillus novofumigatus
  misc_feature: 198
cctaaactactaaactaatctatatatattatcctgcttatatacttaaatataaagatatatatataaagtaattcttattattatcttttaaat

SEQ ID NO: 12452 - DNA, 96 bp, Aspergillus novofumigatus
  misc_feature: 198
cagcattaatatattagtgaatgaatatatataatttgggataccataatgctcagagatatatattatagagttaattatagagtatattagctg

SEQ ID NO: 12453 - DNA, 96 bp, Aspergillus novofumigatus
  misc_feature: 198
atattatcctgcttatatacttaaatataaagatatatatataaagtaattcttattattatcttttaaattactatcttctttattcttattagt

SEQ ID NO: 12454 - DNA, 96 bp, Aspergillus novofumigatus
  misc_feature: 198
aagataaaataaagaaaaagagagaataaagagaaagattatttaaataatatataaagtagaaaagggtaataagaagtaaatatatatatatat

SEQ ID NO: 12455 - DNA, 96 bp, Aspergillus novofumigatus
  misc_feature: 198
agctattctaaggtaatattttattctaaatactttatatatattaaaacctaaactactaaactaatctatatatattatcctgcttatatactt

SEQ ID NO: 12456 - DNA, 96 bp, Aspergillus novofumigatus
  misc_feature: 197
taaagataataagttaagaattagaatatagattaaaaagagaaagaaaagatagataaatagatagaagagaaaaaataagaattagaaaataaa

SEQ ID NO: 12457 - DNA, 96 bp, Aspergillus novofumigatus
  misc_feature: 197
aatagattagtttaagataaaataaagaaaaagagagaataaagagaaagattatttaaataatatataaagtagaaaagggtaataagaagtaaa

SEQ ID NO: 12458 - DNA, 96 bp, Aspergillus novofumigatus
  misc_feature: 197
gataataagttaagaattagaatatagattaaaaagagaaagaaaagatagataaatagatagaagagaaaaaataagaattagaaaataaaagaa

SEQ ID NO: 12459 - DNA, 96 bp, Aspergillus novofumigatus
  misc_feature: 197
ttctatatatatatatatttacttcttattacccttttctactttatatattatttaaataatctttctctttattctctctttttctttatttta

SEQ ID NO: 12460 - DNA, 96 bp, Aspergillus novofumigatus
  misc_feature: 197
ttatattattctcttttatcttcttatatatatttattaataatatatatctactctattaaacttttttactttttaatatatctctctctttat

SEQ ID NO: 12461 - DNA, 96 bp, Aspergillus novofumigatus
  misc_feature: 197
ttaggtttactttaattataatataaagaggaaaaggaggaaaaaaaggatataaagaaataaaaaaataagagatagttagattaagagaaaaag

SEQ ID NO: 12462 - DNA, 96 bp, Aspergillus novofumigatus
  misc_feature: 197
agcatccatatatcaagtaatagatatatattaggagatcaaggttaattaggattaatatattaagtaaataaatatatatattttaggatacca

SEQ ID NO: 12463 - DNA, 96 bp, Aspergillus novofumigatus
  misc_feature: 197
tctatatatatatatatttacttcttattacccttttctactttatatattatttaaataatctttctctttattctctctttttctttattttat

SEQ ID NO: 12464 - DNA, 96 bp, Aspergillus novofumigatus
  misc_feature: 197
tagttagcatccatatatcaagtaatagatatatattaggagatcaaggttaattaggattaatatattaagtaaataaatatatatattttagga

SEQ ID NO: 12465 - DNA, 96 bp, Aspergillus novofumigatus
  misc_feature: 197
tcagcattaatatattagtgaatgaatatatataatttgggataccataatgctcagagatatatattatagagttaattatagagtatattagct

SEQ ID NO: 12466 - DNA, 96 bp, Aspergillus novofumigatus
  misc_feature: 197
tatattatcctgcttatatacttaaatataaagatatatatataaagtaattcttattattatcttttaaattactatcttctttattcttattag

SEQ ID NO: 12467 - DNA, 96 bp, Aspergillus novofumigatus
  misc_feature: 197
tataaagatatatatataaagtaattcttattattatcttttaaattactatcttctttattcttattagtagttatatctatcctatctttaatt

SEQ ID NO: 12468 - DNA, 96 bp, Aspergillus novofumigatus
  misc_feature: 197
aactattctatatatatatatatttacttcttattacccttttctactttatatattatttaaataatctttctctttattctctctttttcttta

SEQ ID NO: 12469 - DNA, 96 bp, Aspergillus novofumigatus
  misc_feature: 197
gtttactttaattataatataaagaggaaaaggaggaaaaaaaggatataaagaaataaaaaaataagagatagttagattaagagaaaaagaaat

SEQ ID NO: 12470 - DNA, 96 bp, Aspergillus novofumigatus
  misc_feature: 197
gttagtcagcattaatatattagtgaatgaatatatataatttgggataccataatgctcagagatatatattatagagttaattatagagtatat

SEQ ID NO: 12471 - DNA, 96 bp, Aspergillus novofumigatus
  misc_feature: 197
gtcagcattaatatattagtgaatgaatatatataatttgggataccataatgctcagagatatatattatagagttaattatagagtatattagc

SEQ ID NO: 12472 - DNA, 96 bp, Aspergillus novofumigatus
  misc_feature: 197
aataaatagattagtttaagataaaataaagaaaaagagagaataaagagaaagattatttaaataatatataaagtagaaaagggtaataagaag

SEQ ID NO: 12473 - DNA, 96 bp, Aspergillus novofumigatus
  misc_feature: 197
ctactaaactaatctatatatattatcctgcttatatacttaaatataaagatatatatataaagtaattcttattattatcttttaaattactat

SEQ ID NO: 12474 - DNA, 96 bp, Aspergillus novofumigatus
  misc_feature: 197
agagtagaaagggagataatttaaaaagagagatatagtttaagaagagtaaggattaataagtatagaagaagagatagagttagaggaagaaat

SEQ ID NO: 12475 - DNA, 96 bp, Aspergillus novofumigatus
  misc_feature: 197
agttagcatccatatatcaagtaatagatatatattaggagatcaaggttaattaggattaatatattaagtaaataaatatatatattttaggat

SEQ ID NO: 12476 - DNA, 96 bp, Aspergillus novofumigatus
  misc_feature: 197
aactactaaactaatctatatatattatcctgcttatatacttaaatataaagatatatatataaagtaattcttattattatcttttaaattact

SEQ ID NO: 12477 - DNA, 96 bp, Aspergillus novofumigatus
  misc_feature: 196
ttttatcttcttatatatatttattaataatatatatctactctattaaacttttttactttttaatatatctctctctttatatattcttctttt

SEQ ID NO: 12478 - DNA, 96 bp, Aspergillus novofumigatus
  misc_feature: 196
tttatattattctcttttatcttcttatatatatttattaataatatatatctactctattaaacttttttactttttaatatatctctctcttta

SEQ ID NO: 12479 - DNA, 96 bp, Aspergillus novofumigatus
  misc_feature: 196
agaaagggagataatttaaaaagagagatatagtttaagaagagtaaggattaataagtatagaagaagagatagagttagaggaagaaatttaaa

SEQ ID NO: 12480 - DNA, 96 bp, Aspergillus novofumigatus
  misc_feature: 196
ttcttatatatatttattaataatatatatctactctattaaacttttttactttttaatatatctctctctttatatattcttcttttctcttaa

SEQ ID NO: 12481 - DNA, 96 bp, Aspergillus novofumigatus
  misc_feature: 196
ataaaagaaggataagaggagaattagaaagaattagaagaagaggtagagagagaaatagaagaatagttaaggatagtaagtttagaattagaa

SEQ ID NO: 12482 - DNA, 96 bp, Aspergillus novofumigatus
  misc_feature: 196
ttagtttaagataaaataaagaaaaagagagaataaagagaaagattatttaaataatatataaagtagaaaagggtaataagaagtaaatatata

SEQ ID NO: 12483 - DNA, 96 bp, Aspergillus novofumigatus
  misc_feature: 196
taaagatatatatataaagtaattcttattattatcttttaaattactatcttctttattcttattagtagttatatctatcctatctttaattaa

SEQ ID NO: 12484 - DNA, 96 bp, Aspergillus novofumigatus
  misc_feature: 196
aatataaagatatatatataaagtaattcttattattatcttttaaattactatcttctttattcttattagtagttatatctatcctatctttaa

SEQ ID NO: 12485 - DNA, 96 bp, Aspergillus novofumigatus
  misc_feature: 196
aataaaagaaggataagaggagaattagaaagaattagaagaagaggtagagagagaaatagaagaatagttaaggatagtaagtttagaattaga

SEQ ID NO: 12486 - DNA, 96 bp, Aspergillus novofumigatus
  misc_feature: 196
tattcttttcttttctccttagtaaaataatctcttataattttattttatttctttttctcttaatctaactatctcttatttttttatttcttt

SEQ ID NO: 12487 - DNA, 96 bp, Aspergillus novofumigatus
  misc_feature: 196
gttagcatccatatatcaagtaatagatatatattaggagatcaaggttaattaggattaatatattaagtaaataaatatatatattttaggata

SEQ ID NO: 12488 - DNA, 96 bp, Aspergillus novofumigatus
  misc_feature: 196
ggttagtcagcattaatatattagtgaatgaatatatataatttgggataccataatgctcagagatatatattatagagttaattatagagtata

SEQ ID NO: 12489 - DNA, 96 bp, Aspergillus novofumigatus
  misc_feature: 196
cttatatacttaaatataaagatatatatataaagtaattcttattattatcttttaaattactatcttctttattcttattagtagttatatcta

SEQ ID NO: 12490 - DNA, 96 bp, Aspergillus novofumigatus
  misc_feature: 196
cttactgcttaccttactattaaccttactatctactatgctatttataattactatctaccttattacctaccttactattgactacactatcta

SEQ ID NO: 12491 - DNA, 96 bp, Aspergillus novofumigatus
  misc_feature: 196
taaatagattagtttaagataaaataaagaaaaagagagaataaagagaaagattatttaaataatatataaagtagaaaagggtaataagaagta

SEQ ID NO: 12492 - DNA, 96 bp, Aspergillus novofumigatus
  misc_feature: 196
gtttaagataaaataaagaaaaagagagaataaagagaaagattatttaaataatatataaagtagaaaagggtaataagaagtaaatatatatat

SEQ ID NO: 12493 - DNA, 96 bp, Aspergillus novofumigatus
  misc_feature: 196
ctatatatatatatatttacttcttattacccttttctactttatatattatttaaataatctttctctttattctctctttttctttattttatc

SEQ ID NO: 12494 - DNA, 96 bp, Aspergillus novofumigatus
  misc_feature: 196
attattctcttttatcttcttatatatatttattaataatatatatctactctattaaacttttttactttttaatatatctctctctttatatat

SEQ ID NO: 12495 - DNA, 96 bp, Aspergillus novofumigatus
  misc_feature: 196
aataataataaatagattagtttaagataaaataaagaaaaagagagaataaagagaaagattatttaaataatatataaagtagaaaagggtaat

SEQ ID NO: 12496 - DNA, 96 bp, Aspergillus novofumigatus
  misc_feature: 196
agattagtttaagataaaataaagaaaaagagagaataaagagaaagattatttaaataatatataaagtagaaaagggtaataagaagtaaatat

SEQ ID NO: 12497 - DNA, 96 bp, Aspergillus novofumigatus
  misc_feature: 196
ataaatagattagtttaagataaaataaagaaaaagagagaataaagagaaagattatttaaataatatataaagtagaaaagggtaataagaagt

SEQ ID NO: 12498 - DNA, 96 bp, Aspergillus novofumigatus
  misc_feature: 195
aagagtagaaagggagataatttaaaaagagagatatagtttaagaagagtaaggattaataagtatagaagaagagatagagttagaggaagaaa

SEQ ID NO: 12499 - DNA, 96 bp, Aspergillus novofumigatus
  misc_feature: 195
ttctcttttatcttcttatatatatttattaataatatatatctactctattaaacttttttactttttaatatatctctctctttatatattctt

SEQ ID NO: 12500 - DNA, 96 bp, Aspergillus novofumigatus
  misc_feature: 195
gaggacaatgaagaggacaatgaagaggacaatgaagaggacaatgaagaggacaatgaagaggacaatgaagaggacaatgaagaggacaatgaa

SEQ ID NO: 12501 - DNA, 96 bp, Aspergillus novofumigatus
  misc_feature: 195
ttattctcttttatcttcttatatatatttattaataatatatatctactctattaaacttttttactttttaatatatctctctctttatatatt

SEQ ID NO: 12502 - DNA, 96 bp, Aspergillus novofumigatus
  misc_feature: 195
ttatcttcttatatatatttattaataatatatatctactctattaaacttttttactttttaatatatctctctctttatatattcttcttttct

SEQ ID NO: 12503 - DNA, 96 bp, Aspergillus novofumigatus
  misc_feature: 195
ttagtcagcattaatatattagtgaatgaatatatataatttgggataccataatgctcagagatatatattatagagttaattatagagtatatt

SEQ ID NO: 12504 - DNA, 96 bp, Aspergillus novofumigatus
  misc_feature: 195
tcttttatcttcttatatatatttattaataatatatatctactctattaaacttttttactttttaatatatctctctctttatatattcttctt

SEQ ID NO: 12505 - DNA, 96 bp, Aspergillus novofumigatus
  misc_feature: 195
tcttcttatatatatttattaataatatatatctactctattaaacttttttactttttaatatatctctctctttatatattcttcttttctctt

SEQ ID NO: 12506 - DNA, 96 bp, Aspergillus novofumigatus
  misc_feature: 195
aataagttaagaattagaatatagattaaaaagagaaagaaaagatagataaatagatagaagagaaaaaataagaattagaaaataaaagaagga

SEQ ID NO: 12507 - DNA, 96 bp, Aspergillus novofumigatus
  misc_feature: 195
agaggacaatgaagaggacaatgaagaggacaatgaagaggacaatgaagaggacaatgaagaggacaatgaagaggacaatgaagaggacaatga

SEQ ID NO: 12508 - DNA, 96 bp, Aspergillus novofumigatus
  misc_feature: 195
tagattagtttaagataaaataaagaaaaagagagaataaagagaaagattatttaaataatatataaagtagaaaagggtaataagaagtaaata

SEQ ID NO: 12509 - DNA, 96 bp, Aspergillus novofumigatus
  misc_feature: 195
tattctcttttatcttcttatatatatttattaataatatatatctactctattaaacttttttactttttaatatatctctctctttatatattc

SEQ ID NO: 12510 - DNA, 96 bp, Aspergillus novofumigatus
  misc_feature: 195
tattattctcttttatcttcttatatatatttattaataatatatatctactctattaaacttttttactttttaatatatctctctctttatata

SEQ ID NO: 12511 - DNA, 96 bp, Aspergillus novofumigatus
  misc_feature: 195
tattatatctatctagctattctaaggtaatattttattctaaatactttatatatattaaaacctaaactactaaactaatctatatatattatc

SEQ ID NO: 12512 - DNA, 96 bp, Aspergillus novofumigatus
  misc_feature: 195
ataataataaatagattagtttaagataaaataaagaaaaagagagaataaagagaaagattatttaaataatatataaagtagaaaagggtaata

SEQ ID NO: 12513 - DNA, 96 bp, Aspergillus novofumigatus
  misc_feature: 195
tatattattctcttttatcttcttatatatatttattaataatatatatctactctattaaacttttttactttttaatatatctctctctttata

SEQ ID NO: 12514 - DNA, 96 bp, Aspergillus novofumigatus
  misc_feature: 195
tatatctatctagctattctaaggtaatattttattctaaatactttatatatattaaaacctaaactactaaactaatctatatatattatcctg

SEQ ID NO: 12515 - DNA, 96 bp, Aspergillus novofumigatus
  misc_feature: 195
tatatacttaaatataaagatatatatataaagtaattcttattattatcttttaaattactatcttctttattcttattagtagttatatctatc

SEQ ID NO: 12516 - DNA, 96 bp, Aspergillus novofumigatus
  misc_feature: 195
actactaaactaatctatatatattatcctgcttatatacttaaatataaagatatatatataaagtaattcttattattatcttttaaattacta

SEQ ID NO: 12517 - DNA, 96 bp, Aspergillus novofumigatus
  misc_feature: 195
gagtagaaagggagataatttaaaaagagagatatagtttaagaagagtaaggattaataagtatagaagaagagatagagttagaggaagaaatt

SEQ ID NO: 12518 - DNA, 96 bp, Aspergillus novofumigatus
  misc_feature: 195
aagataataagttaagaattagaatatagattaaaaagagaaagaaaagatagataaatagatagaagagaaaaaataagaattagaaaataaaag

SEQ ID NO: 12519 - DNA, 96 bp, Aspergillus novofumigatus
  misc_feature: 195
cttttatcttcttatatatatttattaataatatatatctactctattaaacttttttactttttaatatatctctctctttatatattcttcttt

SEQ ID NO: 12520 - DNA, 96 bp, Aspergillus novofumigatus
  misc_feature: 195
ataataagttaagaattagaatatagattaaaaagagaaagaaaagatagataaatagatagaagagaaaaaataagaattagaaaataaaagaag

SEQ ID NO: 12521 - DNA, 96 bp, Aspergillus novofumigatus
  misc_feature: 195
attctcttttatcttcttatatatatttattaataatatatatctactctattaaacttttttactttttaatatatctctctctttatatattct

SEQ ID NO: 12522 - DNA, 96 bp, Aspergillus novofumigatus
  misc_feature: 195
atcttcttatatatatttattaataatatatatctactctattaaacttttttactttttaatatatctctctctttatatattcttcttttctct

SEQ ID NO: 12523 - DNA, 96 bp, Aspergillus novofumigatus
  misc_feature: 194
taagagtagaaagggagataatttaaaaagagagatatagtttaagaagagtaaggattaataagtatagaagaagagatagagttagaggaagaa

SEQ ID NO: 12524 - DNA, 96 bp, Aspergillus novofumigatus
  misc_feature: 194
ttaaagataataagttaagaattagaatatagattaaaaagagaaagaaaagatagataaatagatagaagagaaaaaataagaattagaaaataa

SEQ ID NO: 12525 - DNA, 96 bp, Aspergillus novofumigatus
  misc_feature: 194
ttatatctatctagctattctaaggtaatattttattctaaatactttatatatattaaaacctaaactactaaactaatctatatatattatcct

SEQ ID NO: 12526 - DNA, 96 bp, Aspergillus novofumigatus
  misc_feature: 194
ttatatacttaaatataaagatatatatataaagtaattcttattattatcttttaaattactatcttctttattcttattagtagttatatctat

SEQ ID NO: 12527 - DNA, 96 bp, Aspergillus novofumigatus
  misc_feature: 194
aaatagattagtttaagataaaataaagaaaaagagagaataaagagaaagattatttaaataatatataaagtagaaaagggtaataagaagtaa

SEQ ID NO: 12528 - DNA, 96 bp, Aspergillus novofumigatus
  misc_feature: 194
tctcttttatcttcttatatatatttattaataatatatatctactctattaaacttttttactttttaatatatctctctctttatatattcttc

SEQ ID NO: 12529 - DNA, 96 bp, Aspergillus novofumigatus
  misc_feature: 194
taagttaagaattagaatatagattaaaaagagaaagaaaagatagataaatagatagaagagaaaaaataagaattagaaaataaaagaaggata

SEQ ID NO: 12530 - DNA, 96 bp, Aspergillus novofumigatus
  misc_feature: 194
tagcatccatatatcaagtaatagatatatattaggagatcaaggttaattaggattaatatattaagtaaataaatatatatattttaggatacc

SEQ ID NO: 12531 - DNA, 96 bp, Aspergillus novofumigatus
  misc_feature: 194
taaaataataataaatagattagtttaagataaaataaagaaaaagagagaataaagagaaagattatttaaataatatataaagtagaaaagggt

SEQ ID NO: 12532 - DNA, 96 bp, Aspergillus novofumigatus
  misc_feature: 194
aaactactaaactaatctatatatattatcctgcttatatacttaaatataaagatatatatataaagtaattcttattattatcttttaaattac

SEQ ID NO: 12533 - DNA, 96 bp, Aspergillus novofumigatus
  misc_feature: 194
atatacttaaatataaagatatatatataaagtaattcttattattatcttttaaattactatcttctttattcttattagtagttatatctatcc

SEQ ID NO: 12534 - DNA, 96 bp, Aspergillus novofumigatus
  misc_feature: 194
gcatccatatatcaagtaatagatatatattaggagatcaaggttaattaggattaatatattaagtaaataaatatatatattttaggataccat

SEQ ID NO: 12535 - DNA, 96 bp, Aspergillus novofumigatus
  misc_feature: 194
aattctaaacttactatccttaactattcttctatttctctctctacctcttcttctaattctttctaattctcctcttatccttcttttattttc

SEQ ID NO: 12536 - DNA, 96 bp, Aspergillus novofumigatus
  misc_feature: 194
aaataaaagaaggataagaggagaattagaaagaattagaagaagaggtagagagagaaatagaagaatagttaaggatagtaagtttagaattag

SEQ ID NO: 12537 - DNA, 96 bp, Aspergillus novofumigatus
  misc_feature: 194
attctaaacttactatccttaactattcttctatttctctctctacctcttcttctaattctttctaattctcctcttatccttcttttattttct

SEQ ID NO: 12538 - DNA, 96 bp, Aspergillus novofumigatus
  misc_feature: 194
atataaagatatatatataaagtaattcttattattatcttttaaattactatcttctttattcttattagtagttatatctatcctatctttaat

SEQ ID NO: 12539 - DNA, 96 bp, Aspergillus novofumigatus
  misc_feature: 194
atattattctcttttatcttcttatatatatttattaataatatatatctactctattaaacttttttactttttaatatatctctctctttatat

SEQ ID NO: 12540 - DNA, 96 bp, Aspergillus novofumigatus
  misc_feature: 194
atatataaagtaattcttattattatcttttaaattactatcttctttattcttattagtagttatatctatcctatctttaattaactaatctat

SEQ ID NO: 12541 - DNA, 96 bp, Aspergillus novofumigatus
  misc_feature: 194
aggttagtcagcattaatatattagtgaatgaatatatataatttgggataccataatgctcagagatatatattatagagttaattatagagtat

SEQ ID NO: 12542 - DNA, 96 bp, Aspergillus novofumigatus
  misc_feature: 194
agtagaaagggagataatttaaaaagagagatatagtttaagaagagtaaggattaataagtatagaagaagagatagagttagaggaagaaattt

SEQ ID NO: 12543 - DNA, 96 bp, Aspergillus novofumigatus
  misc_feature: 193
tttactttaattataatataaagaggaaaaggaggaaaaaaaggatataaagaaataaaaaaataagagatagttagattaagagaaaaagaaata

SEQ ID NO: 12544 - DNA, 96 bp, Aspergillus novofumigatus
  misc_feature: 193
aagttaagaattagaatatagattaaaaagagaaagaaaagatagataaatagatagaagagaaaaaataagaattagaaaataaaagaaggataa

SEQ ID NO: 12545 - DNA, 96 bp, Aspergillus novofumigatus
  misc_feature: 193
tagaaagggagataatttaaaaagagagatatagtttaagaagagtaaggattaataagtatagaagaagagatagagttagaggaagaaatttaa

SEQ ID NO: 12546 - DNA, 96 bp, Aspergillus novofumigatus
  misc_feature: 193
tatcttcttatatatatttattaataatatatatctactctattaaacttttttactttttaatatatctctctctttatatattcttcttttctc

SEQ ID NO: 12547 - DNA, 96 bp, Aspergillus novofumigatus
  misc_feature: 193
tatacttaaatataaagatatatatataaagtaattcttattattatcttttaaattactatcttctttattcttattagtagttatatctatcct

SEQ ID NO: 12548 - DNA, 96 bp, Aspergillus novofumigatus
  misc_feature: 193
taattctaaacttactatccttaactattcttctatttctctctctacctcttcttctaattctttctaattctcctcttatccttcttttatttt

SEQ ID NO: 12549 - DNA, 96 bp, Aspergillus novofumigatus
  misc_feature: 193
cttcttatatatatttattaataatatatatctactctattaaacttttttactttttaatatatctctctctttatatattcttcttttctctta

SEQ ID NO: 12550 - DNA, 96 bp, Aspergillus novofumigatus
  misc_feature: 193
aggacaatgaagaggacaatgaagaggacaatgaagaggacaatgaagaggacaatgaagaggacaatgaagaggacaatgaagaggacaatgaag

SEQ ID NO: 12551 - DNA, 96 bp, Aspergillus novofumigatus
  misc_feature: 193
cttaaatataaagatatatatataaagtaattcttattattatcttttaaattactatcttctttattcttattagtagttatatctatcctatct

SEQ ID NO: 12552 - DNA, 96 bp, Aspergillus novofumigatus
  misc_feature: 193
ctcttttatcttcttatatatatttattaataatatatatctactctattaaacttttttactttttaatatatctctctctttatatattcttct

SEQ ID NO: 12553 - DNA, 96 bp, Aspergillus novofumigatus
  misc_feature: 193
ataagttaagaattagaatatagattaaaaagagaaagaaaagatagataaatagatagaagagaaaaaataagaattagaaaataaaagaaggat

SEQ ID NO: 12554 - DNA, 96 bp, Aspergillus novofumigatus
  misc_feature: 193
actattaaccttactatctactatgctatttataattactatctaccttattacctaccttactattgactacactatctatcttactgtctacct

SEQ ID NO: 12555 - DNA, 96 bp, Aspergillus novofumigatus
  misc_feature: 192
tgcttaccttactattaaccttactatctactatgctatttataattactatctaccttattacctaccttactattgactacactatctatctta

SEQ ID NO: 12556 - DNA, 96 bp, Aspergillus novofumigatus
  misc_feature: 192
ggacaatgaagaggacaatgaagaggacaatgaagaggacaatgaagaggacaatgaagaggacaatgaagaggacaatgaagaggacaatgaaga

SEQ ID NO: 12557 - DNA, 96 bp, Aspergillus novofumigatus
  misc_feature: 192
gttaaagataataagttaagaattagaatatagattaaaaagagaaagaaaagatagataaatagatagaagagaaaaaataagaattagaaaata

SEQ ID NO: 12558 - DNA, 96 bp, Aspergillus novofumigatus
  misc_feature: 192
tacttaaatataaagatatatatataaagtaattcttattattatcttttaaattactatcttctttattcttattagtagttatatctatcctat

SEQ ID NO: 12559 - DNA, 96 bp, Aspergillus novofumigatus
  misc_feature: 192
tactattaaccttactatctactatgctatttataattactatctaccttattacctaccttactattgactacactatctatcttactgtctacc

SEQ ID NO: 12560 - DNA, 96 bp, Aspergillus novofumigatus
  misc_feature: 192
taattctttttctaactcttattttttttaattcttttttaacttattctttaattcttattctaatccttaacttcctatattatttatttattt

SEQ ID NO: 12561 - DNA, 96 bp, Aspergillus novofumigatus
  misc_feature: 192
attcttttcttttctccttagtaaaataatctcttataattttattttatttctttttctcttaatctaactatctcttatttttttatttcttta

SEQ ID NO: 12562 - DNA, 96 bp, Aspergillus novofumigatus
  misc_feature: 192
attatatctatctagctattctaaggtaatattttattctaaatactttatatatattaaaacctaaactactaaactaatctatatatattatcc

SEQ ID NO: 12563 - DNA, 96 bp, Aspergillus novofumigatus
  misc_feature: 192
acttaaatataaagatatatatataaagtaattcttattattatcttttaaattactatcttctttattcttattagtagttatatctatcctatc

SEQ ID NO: 12564 - DNA, 96 bp, Aspergillus novofumigatus
  misc_feature: 191
ttactattaaccttactatctactatgctatttataattactatctaccttattacctaccttactattgactacactatctatcttactgtctac

SEQ ID NO: 12565 - DNA, 96 bp, Aspergillus novofumigatus
  misc_feature: 191
taatataaagaggaaaaggaggaaaaaaaggatataaagaaataaaaaaataagagatagttagattaagagaaaaagaaataaaataaaattata

SEQ ID NO: 12566 - DNA, 96 bp, Aspergillus novofumigatus
  misc_feature: 191
cccctaattaagcatatttcagcttataggataggtaatatataatatttatataataagttattatattaataaataaaatatatagatatccta

SEQ ID NO: 12567 - DNA, 96 bp, Aspergillus novofumigatus
  misc_feature: 191
taataagttaagaattagaatatagattaaaaagagaaagaaaagatagataaatagatagaagagaaaaaataagaattagaaaataaaagaagg

SEQ ID NO: 12568 - DNA, 96 bp, Aspergillus novofumigatus
  misc_feature: 191
taaggttagtcagcattaatatattagtgaatgaatatatataatttgggataccataatgctcagagatatatattatagagttaattatagagt

SEQ ID NO: 12569 - DNA, 96 bp, Aspergillus novofumigatus
  misc_feature: 191
gtagaaagggagataatttaaaaagagagatatagtttaagaagagtaaggattaataagtatagaagaagagatagagttagaggaagaaattta

SEQ ID NO: 12570 - DNA, 96 bp, Aspergillus novofumigatus
  misc_feature: 191
aattctttttctaactcttattttttttaattcttttttaacttattctttaattcttattctaatccttaacttcctatattatttatttatttc

SEQ ID NO: 12571 - DNA, 96 bp, Aspergillus novofumigatus
  misc_feature: 191
atataaagtaattcttattattatcttttaaattactatcttctttattcttattagtagttatatctatcctatctttaattaactaatctatct

SEQ ID NO: 12572 - DNA, 96 bp, Aspergillus novofumigatus
  misc_feature: 190
ttcttttctccttagtaaaataatctcttataattttattttatttctttttctcttaatctaactatctcttatttttttatttctttatatcct

SEQ ID NO: 12573 - DNA, 96 bp, Aspergillus novofumigatus
  misc_feature: 190
tatataaagtaattcttattattatcttttaaattactatcttctttattcttattagtagttatatctatcctatctttaattaactaatctatc

SEQ ID NO: 12574 - DNA, 96 bp, Aspergillus novofumigatus
  misc_feature: 190
aggaggaaaaaaaggatataaagaaataaaaaaataagagatagttagattaagagaaaaagaaataaaataaaattataagagattattttacta

SEQ ID NO: 12575 - DNA, 96 bp, Aspergillus novofumigatus
  misc_feature: 190
aaagtaattcttattattatcttttaaattactatcttctttattcttattagtagttatatctatcctatctttaattaactaatctatctactc

SEQ ID NO: 12576 - DNA, 96 bp, Aspergillus novofumigatus
  misc_feature: 190
ccctaattaagcatatttcagcttataggataggtaatatataatatttatataataagttattatattaataaataaaatatatagatatcctag

SEQ ID NO: 12577 - DNA, 96 bp, Aspergillus novofumigatus
  misc_feature: 190
agttaaagataataagttaagaattagaatatagattaaaaagagaaagaaaagatagataaatagatagaagagaaaaaataagaattagaaaat

SEQ ID NO: 12578 - DNA, 96 bp, Aspergillus novofumigatus
  misc_feature: 190
atagattagtttaagataaaataaagaaaaagagagaataaagagaaagattatttaaataatatataaagtagaaaagggtaataagaagtaaat

SEQ ID NO: 12579 - DNA, 96 bp, Aspergillus novofumigatus
  misc_feature: 190
attctttttctaactcttattttttttaattcttttttaacttattctttaattcttattctaatccttaacttcctatattatttatttatttct

SEQ ID NO: 12580 - DNA, 96 bp, Aspergillus novofumigatus
  misc_feature: 190
aagtaattcttattattatcttttaaattactatcttctttattcttattagtagttatatctatcctatctttaattaactaatctatctactct

SEQ ID NO: 12581 - DNA, 96 bp, Aspergillus novofumigatus
  misc_feature: 189
gagttaaagataataagttaagaattagaatatagattaaaaagagaaagaaaagatagataaatagatagaagagaaaaaataagaattagaaaa

SEQ ID NO: 12582 - DNA, 96 bp, Aspergillus novofumigatus
  misc_feature: 189
tttcttttctccttagtaaaataatctcttataattttattttatttctttttctcttaatctaactatctcttatttttttatttctttatatcc

SEQ ID NO: 12583 - DNA, 96 bp, Aspergillus novofumigatus
  misc_feature: 189
ttcttctaattctttctaattctcctcttatccttcttttattttctattttatttatttaatcttctatctatttatctatattttctttctctt

SEQ ID NO: 12584 - DNA, 96 bp, Aspergillus novofumigatus
  misc_feature: 189
ttataatataaagaggaaaaggaggaaaaaaaggatataaagaaataaaaaaataagagatagttagattaagagaaaaagaaataaaataaaatt

SEQ ID NO: 12585 - DNA, 96 bp, Aspergillus novofumigatus
  misc_feature: 189
ttagcatccatatatcaagtaatagatatatattaggagatcaaggttaattaggattaatatattaagtaaataaatatatatattttaggatac

SEQ ID NO: 12586 - DNA, 96 bp, Aspergillus novofumigatus
  misc_feature: 189
attaaggttagtcagcattaatatattagtgaatgaatatatataatttgggataccataatgctcagagatatatattatagagttaattataga

SEQ ID NO: 12587 - DNA, 96 bp, Aspergillus novofumigatus
  misc_feature: 189
tataaagtaattcttattattatcttttaaattactatcttctttattcttattagtagttatatctatcctatctttaattaactaatctatcta

SEQ ID NO: 12588 - DNA, 96 bp, Aspergillus novofumigatus
  misc_feature: 189
atacttaaatataaagatatatatataaagtaattcttattattatcttttaaattactatcttctttattcttattagtagttatatctatccta

SEQ ID NO: 12589 - DNA, 96 bp, Aspergillus novofumigatus
  misc_feature: 189
aaggttagtcagcattaatatattagtgaatgaatatatataatttgggataccataatgctcagagatatatattatagagttaattatagagta

SEQ ID NO: 12590 - DNA, 96 bp, Aspergillus novofumigatus
  misc_feature: 189
taattaagcatatttcagcttataggataggtaatatataatatttatataataagttattatattaataaataaaatatatagatatcctagtgg

SEQ ID NO: 12591 - DNA, 96 bp, Aspergillus novofumigatus
  misc_feature: 189
agagattaaggttagtcagcattaatatattagtgaatgaatatatataatttgggataccataatgctcagagatatatattatagagttaatta

SEQ ID NO: 12592 - DNA, 96 bp, Aspergillus novofumigatus
  misc_feature: 189
ataaagtaattcttattattatcttttaaattactatcttctttattcttattagtagttatatctatcctatctttaattaactaatctatctac

SEQ ID NO: 12593 - DNA, 96 bp, Aspergillus novofumigatus
  misc_feature: 189
gcttaccttactattaaccttactatctactatgctatttataattactatctaccttattacctaccttactattgactacactatctatcttac

SEQ ID NO: 12594 - DNA, 96 bp, Aspergillus novofumigatus
  misc_feature: 189
gaggaaaaaaaggatataaagaaataaaaaaataagagatagttagattaagagaaaaagaaataaaataaaattataagagattattttactaag

SEQ ID NO: 12595 - DNA, 96 bp, Aspergillus novofumigatus
  misc_feature: 189
gacaatgaagaggacaatgaagaggacaatgaagaggacaatgaagaggacaatgaagaggacaatgaagaggacaatgaagaggacaatgaagag

SEQ ID NO: 12596 - DNA, 96 bp, Aspergillus novofumigatus
  misc_feature: 189
agttaagaattagaatatagattaaaaagagaaagaaaagatagataaatagatagaagagaaaaaataagaattagaaaataaaagaaggataag

SEQ ID NO: 12597 - DNA, 96 bp, Aspergillus novofumigatus
  misc_feature: 189
ctattaaccttactatctactatgctatttataattactatctaccttattacctaccttactattgactacactatctatcttactgtctacctt

SEQ ID NO: 12598 - DNA, 96 bp, Aspergillus novofumigatus
  misc_feature: 189
ctaattaagcatatttcagcttataggataggtaatatataatatttatataataagttattatattaataaataaaatatatagatatcctagtg

SEQ ID NO: 12599 - DNA, 96 bp, Aspergillus novofumigatus
  misc_feature: 189
attataatataaagaggaaaaggaggaaaaaaaggatataaagaaataaaaaaataagagatagttagattaagagaaaaagaaataaaataaaat

SEQ ID NO: 12600 - DNA, 96 bp, Aspergillus novofumigatus
  misc_feature: 189
aattaactctataatatatatctctgagcattatggtatcccaaattatatatattcattcactaatatattaatgctgactaaccttaatctctt

SEQ ID NO: 12601 - DNA, 96 bp, Aspergillus novofumigatus
  misc_feature: 188
ttcttttcttttctccttagtaaaataatctcttataattttattttatttctttttctcttaatctaactatctcttatttttttatttctttat

SEQ ID NO: 12602 - DNA, 96 bp, Aspergillus novofumigatus
  misc_feature: 188
ggaggaaaaaaaggatataaagaaataaaaaaataagagatagttagattaagagaaaaagaaataaaataaaattataagagattattttactaa

SEQ ID NO: 12603 - DNA, 96 bp, Aspergillus novofumigatus
  misc_feature: 188
ttaactctataatatatatctctgagcattatggtatcccaaattatatatattcattcactaatatattaatgctgactaaccttaatctcttaa

SEQ ID NO: 12604 - DNA, 96 bp, Aspergillus novofumigatus
  misc_feature: 188
tataatataaagaggaaaaggaggaaaaaaaggatataaagaaataaaaaaataagagatagttagattaagagaaaaagaaataaaataaaatta

SEQ ID NO: 12605 - DNA, 96 bp, Aspergillus novofumigatus
  misc_feature: 188
attaactctataatatatatctctgagcattatggtatcccaaattatatatattcattcactaatatattaatgctgactaaccttaatctctta

SEQ ID NO: 12606 - DNA, 96 bp, Aspergillus novofumigatus
  misc_feature: 188
taaagtaattcttattattatcttttaaattactatcttctttattcttattagtagttatatctatcctatctttaattaactaatctatctact

SEQ ID NO: 12607 - DNA, 96 bp, Aspergillus novofumigatus
  misc_feature: 188
ctcttcttctaattctttctaattctcctcttatccttcttttattttctattttatttatttaatcttctatctatttatctatattttctttct

SEQ ID NO: 12608 - DNA, 96 bp, Aspergillus novofumigatus
  misc_feature: 188
acaatgaagaggacaatgaagaggacaatgaagaggacaatgaagaggacaatgaagaggacaatgaagaggacaatgaagaggacaatgaagagg

SEQ ID NO: 12609 - DNA, 96 bp, Aspergillus novofumigatus
  misc_feature: 188
cctaattaagcatatttcagcttataggataggtaatatataatatttatataataagttattatattaataaataaaatatatagatatcctagt

SEQ ID NO: 12610 - DNA, 96 bp, Aspergillus novofumigatus
  misc_feature: 188
actattcttctatttctctctctacctcttcttctaattctttctaattctcctcttatccttcttttattttctattttatttatttaatcttct

SEQ ID NO: 12611 - DNA, 96 bp, Aspergillus novofumigatus
  misc_feature: 188
aattaagcatatttcagcttataggataggtaatatataatatttatataataagttattatattaataaataaaatatatagatatcctagtggt

SEQ ID NO: 12612 - DNA, 96 bp, Aspergillus novofumigatus
  misc_feature: 187
ttttctccttagtaaaataatctcttataattttattttatttctttttctcttaatctaactatctcttatttttttatttctttatatcctttt

SEQ ID NO: 12613 - DNA, 96 bp, Aspergillus novofumigatus
  misc_feature: 187
agagttaaagataataagttaagaattagaatatagattaaaaagagaaagaaaagatagataaatagatagaagagaaaaaataagaattagaaa

SEQ ID NO: 12614 - DNA, 96 bp, Aspergillus novofumigatus
  misc_feature: 187
taattataatataaagaggaaaaggaggaaaaaaaggatataaagaaataaaaaaataagagatagttagattaagagaaaaagaaataaaataaa

SEQ ID NO: 12615 - DNA, 96 bp, Aspergillus novofumigatus
  misc_feature: 187
tttaattataatataaagaggaaaaggaggaaaaaaaggatataaagaaataaaaaaataagagatagttagattaagagaaaaagaaataaaata

SEQ ID NO: 12616 - DNA, 96 bp, Aspergillus novofumigatus
  misc_feature: 187
atagtaaattaaagattagaatcagaattaaagagagaaatagaaggagagttagaagaagagttatagagagtaagttcaggattaaaataagaa

SEQ ID NO: 12617 - DNA, 96 bp, Aspergillus novofumigatus
  misc_feature: 187
gagagttaaagataataagttaagaattagaatatagattaaaaagagaaagaaaagatagataaatagatagaagagaaaaaataagaattagaa

SEQ ID NO: 12618 - DNA, 96 bp, Aspergillus novofumigatus
  misc_feature: 187
ttattttaatcctgaacttactctctataactcttcttctaactctccttctatttctctctttaattctgattctaatctttaatttactatctt

SEQ ID NO: 12619 - DNA, 96 bp, Aspergillus novofumigatus
  misc_feature: 187
aatataaagaggaaaaggaggaaaaaaaggatataaagaaataaaaaaataagagatagttagattaagagaaaaagaaataaaataaaattataa

SEQ ID NO: 12620 - DNA, 96 bp, Aspergillus novofumigatus
  misc_feature: 187
ttaaggttagtcagcattaatatattagtgaatgaatatatataatttgggataccataatgctcagagatatatattatagagttaattatagag

SEQ ID NO: 12621 - DNA, 96 bp, Aspergillus novofumigatus
  misc_feature: 187
tcttcttctaattctttctaattctcctcttatccttcttttattttctattttatttatttaatcttctatctatttatctatattttctttctc

SEQ ID NO: 12622 - DNA, 96 bp, Aspergillus novofumigatus
  misc_feature: 187
gttaagaattagaatatagattaaaaagagaaagaaaagatagataaatagatagaagagaaaaaataagaattagaaaataaaagaaggataaga

SEQ ID NO: 12623 - DNA, 96 bp, Aspergillus novofumigatus
  misc_feature: 187
tataaagaggaaaaggaggaaaaaaaggatataaagaaataaaaaaataagagatagttagattaagagaaaaagaaataaaataaaattataaga

SEQ ID NO: 12624 - DNA, 96 bp, Aspergillus novofumigatus
  misc_feature: 187
caatgaagaggacaatgaagaggacaatgaagaggacaatgaagaggacaatgaagaggacaatgaagaggacaatgaagaggacaatgaagagga

SEQ ID NO: 12625 - DNA, 96 bp, Aspergillus novofumigatus
  misc_feature: 187
tagtaaattaaagattagaatcagaattaaagagagaaatagaaggagagttagaagaagagttatagagagtaagttcaggattaaaataagaat

SEQ ID NO: 12626 - DNA, 96 bp, Aspergillus novofumigatus
  misc_feature: 187
cttactattaaccttactatctactatgctatttataattactatctaccttattacctaccttactattgactacactatctatcttactgtcta

SEQ ID NO: 12627 - DNA, 96 bp, Aspergillus novofumigatus
  misc_feature: 187
taactctataatatatatctctgagcattatggtatcccaaattatatatattcattcactaatatattaatgctgactaaccttaatctcttaat

SEQ ID NO: 12628 - DNA, 96 bp, Aspergillus novofumigatus
  misc_feature: 187
accttactattaaccttactatctactatgctatttataattactatctaccttattacctaccttactattgactacactatctatcttactgtc

SEQ ID NO: 12629 - DNA, 96 bp, Aspergillus novofumigatus
  misc_feature: 187
cttttcttttctccttagtaaaataatctcttataattttattttatttctttttctcttaatctaactatctcttatttttttatttctttatat

SEQ ID NO: 12630 - DNA, 96 bp, Aspergillus novofumigatus
  misc_feature: 187
ccttactattaaccttactatctactatgctatttataattactatctaccttattacctaccttactattgactacactatctatcttactgtct

SEQ ID NO: 12631 - DNA, 96 bp, Aspergillus novofumigatus
  misc_feature: 187
attctaattctttttctaactcttattttttttaattcttttttaacttattctttaattcttattctaatccttaacttcctatattatttattt

SEQ ID NO: 12632 - DNA, 96 bp, Aspergillus novofumigatus
  misc_feature: 186
ttttcttttctccttagtaaaataatctcttataattttattttatttctttttctcttaatctaactatctcttatttttttatttctttatatc

SEQ ID NO: 12633 - DNA, 96 bp, Aspergillus novofumigatus
  misc_feature: 186
aattataatataaagaggaaaaggaggaaaaaaaggatataaagaaataaaaaaataagagatagttagattaagagaaaaagaaataaaataaaa

SEQ ID NO: 12634 - DNA, 96 bp, Aspergillus novofumigatus
  misc_feature: 186
ttcttattattatcttttaaattactatcttctttattcttattagtagttatatctatcctatctttaattaactaatctatctactcttataga

SEQ ID NO: 12635 - DNA, 96 bp, Aspergillus novofumigatus
  misc_feature: 186
ttctaattctttttctaactcttattttttttaattcttttttaacttattctttaattcttattctaatccttaacttcctatattatttattta

SEQ ID NO: 12636 - DNA, 96 bp, Aspergillus novofumigatus
  misc_feature: 186
ttctaaacttactatccttaactattcttctatttctctctctacctcttcttctaattctttctaattctcctcttatccttcttttattttcta

SEQ ID NO: 12637 - DNA, 96 bp, Aspergillus novofumigatus
  misc_feature: 186
ttaattataatataaagaggaaaaggaggaaaaaaaggatataaagaaataaaaaaataagagatagttagattaagagaaaaagaaataaaataa

SEQ ID NO: 12638 - DNA, 96 bp, Aspergillus novofumigatus
  misc_feature: 186
ttattctaattctttttctaactcttattttttttaattcttttttaacttattctttaattcttattctaatccttaacttcctatattatttat

SEQ ID NO: 12639 - DNA, 96 bp, Aspergillus novofumigatus
  misc_feature: 186
ttaagaattagaatatagattaaaaagagaaagaaaagatagataaatagatagaagagaaaaaataagaattagaaaataaaagaaggataagag

SEQ ID NO: 12640 - DNA, 96 bp, Aspergillus novofumigatus
  misc_feature: 186
tattaaccttactatctactatgctatttataattactatctaccttattacctaccttactattgactacactatctatcttactgtctacctta

SEQ ID NO: 12641 - DNA, 96 bp, Aspergillus novofumigatus
  misc_feature: 186
taccttactattaaccttactatctactatgctatttataattactatctaccttattacctaccttactattgactacactatctatcttactgt

SEQ ID NO: 12642 - DNA, 96 bp, Aspergillus novofumigatus
  misc_feature: 186
taactattcttctatttctctctctacctcttcttctaattctttctaattctcctcttatccttcttttattttctattttatttatttaatctt

SEQ ID NO: 12643 - DNA, 96 bp, Aspergillus novofumigatus
  misc_feature: 186
attttaatcctgaacttactctctataactcttcttctaactctccttctatttctctctttaattctgattctaatctttaatttactatcttta

SEQ ID NO: 12644 - DNA, 96 bp, Aspergillus novofumigatus
  misc_feature: 186
aattctttctaattctcctcttatccttcttttattttctaattcttattttttctcttctatctatttatctatcttttctttctctttttaatc

SEQ ID NO: 12645 - DNA, 96 bp, Aspergillus novofumigatus
  misc_feature: 186
cttcttctaattctttctaattctcctcttatccttcttttattttctattttatttatttaatcttctatctatttatctatattttctttctct

SEQ ID NO: 12646 - DNA, 96 bp, Aspergillus novofumigatus
  misc_feature: 186
atataaagaggaaaaggaggaaaaaaaggatataaagaaataaaaaaataagagatagttagattaagagaaaaagaaataaaataaaattataag

SEQ ID NO: 12647 - DNA, 96 bp, Aspergillus novofumigatus
  misc_feature: 186
attcttattattatcttttaaattactatcttctttattcttattagtagttatatctatcctatctttaattaactaatctatctactcttatag

SEQ ID NO: 12648 - DNA, 96 bp, Aspergillus novofumigatus
  misc_feature: 186
ccttagtaaaataatctcttataattttattttatttctttttctcttaatctaactatctcttatttttttatttctttatatcctttttttcct

SEQ ID NO: 12649 - DNA, 96 bp, Aspergillus novofumigatus
  misc_feature: 186
atctccaccctccatgggaccacgccagttggcggtccgagatggccgggcgcgcgccctgaccggcagcaggggcccgcgcgcgccgccgcccgg

SEQ ID NO: 12650 - DNA, 96 bp, Aspergillus novofumigatus
  misc_feature: 186
attaagcatatttcagcttataggataggtaatatataatatttatataataagttattatattaataaataaaatatatagatatcctagtggtg

SEQ ID NO: 12651 - DNA, 96 bp, Aspergillus novofumigatus
  misc_feature: 186
aaggaggaaaaaaaggatataaagaaataaaaaaataagagatagttagattaagagaaaaagaaataaaataaaattataagagattattttact

SEQ ID NO: 12652 - DNA, 96 bp, Aspergillus novofumigatus
  misc_feature: 185
tttctctctctacctcttcttctaattctttctaattctcctcttatccttcttttattttctattttatttatttaatcttctatctatttatct

SEQ ID NO: 12653 - DNA, 96 bp, Aspergillus novofumigatus
  misc_feature: 185
tttaatcctgaacttactctctataactcttcttctaactctccttctatttctctctttaattctgattctaatctttaatttactatctttaac

SEQ ID NO: 12654 - DNA, 96 bp, Aspergillus novofumigatus
  misc_feature: 185
ttctttttctaactcttattttttttaattcttttttaacttattctttaattcttattctaatccttaacttcctatattatttatttatttctt

SEQ ID NO: 12655 - DNA, 96 bp, Aspergillus novofumigatus
  misc_feature: 185
ttcttctaactctccttctatttctctctttaattctgattctaatctttaatttactatctttaactcttcttctaatctttaatttactatctg

SEQ ID NO: 12656 - DNA, 96 bp, Aspergillus novofumigatus
  misc_feature: 185
tcttttcttttctccttagtaaaataatctcttataattttattttatttctttttctcttaatctaactatctcttatttttttatttctttata

SEQ ID NO: 12657 - DNA, 96 bp, Aspergillus novofumigatus
  misc_feature: 185
tctaattctttttctaactcttattttttttaattcttttttaacttattctttaattcttattctaatccttaacttcctatattatttatttat

SEQ ID NO: 12658 - DNA, 96 bp, Aspergillus novofumigatus
  misc_feature: 185
tattttaatcctgaacttactctctataactcttcttctaactctccttctatttctctctttaattctgattctaatctttaatttactatcttt

SEQ ID NO: 12659 - DNA, 96 bp, Aspergillus novofumigatus
  misc_feature: 185
tattcttctatttctctctctacctcttcttctaattctttctaattctcctcttatccttcttttattttctattttatttatttaatcttctat

SEQ ID NO: 12660 - DNA, 96 bp, Aspergillus novofumigatus
  misc_feature: 185
tattctaattctttttctaactcttattttttttaattcttttttaacttattctttaattcttattctaatccttaacttcctatattatttatt

SEQ ID NO: 12661 - DNA, 96 bp, Aspergillus novofumigatus
  misc_feature: 185
aattcttattattatcttttaaattactatcttctttattcttattagtagttatatctatcctatctttaattaactaatctatctactcttata

SEQ ID NO: 12662 - DNA, 96 bp, Aspergillus novofumigatus
  misc_feature: 185
aaggagagttaaagataataagttaagaattagaatatagattaaaaagagaaagaaaagatagataaatagatagaagagaaaaaataagaatta

SEQ ID NO: 12663 - DNA, 96 bp, Aspergillus novofumigatus
  misc_feature: 185
gtaaattaaagattagaatcagaattaaagagagaaatagaaggagagttagaagaagagttatagagagtaagttcaggattaaaataagaatta

SEQ ID NO: 12664 - DNA, 96 bp, Aspergillus novofumigatus
  misc_feature: 185
taaattaaagattagaatcagaattaaagagagaaatagaaggagagttagaagaagagttatagagagtaagttcaggattaaaataagaattag

SEQ ID NO: 12665 - DNA, 96 bp, Aspergillus novofumigatus
  misc_feature: 185
taaacttactatccttaactattcttctatttctctctctacctcttcttctaattctttctaattctcctcttatccttcttttattttctattt

SEQ ID NO: 12666 - DNA, 96 bp, Aspergillus novofumigatus
  misc_feature: 185
attaaccttactatctactatgctatttataattactatctaccttattacctaccttactattgactacactatctatcttactgtctaccttac

SEQ ID NO: 12667 - DNA, 96 bp, Aspergillus novofumigatus
  misc_feature: 185
gagattaaggttagtcagcattaatatattagtgaatgaatatatataatttgggataccataatgctcagagatatatattatagagttaattat

SEQ ID NO: 12668 - DNA, 96 bp, Aspergillus novofumigatus
  misc_feature: 185
aactattcttctatttctctctctacctcttcttctaattctttctaattctcctcttatccttcttttattttctattttatttatttaatcttc

SEQ ID NO: 12669 - DNA, 96 bp, Aspergillus novofumigatus
  misc_feature: 185
cttaccttactattaaccttactatctactatgctatttataattactatctaccttattacctaccttactattgactacactatctatcttact

SEQ ID NO: 12670 - DNA, 96 bp, Aspergillus novofumigatus
  misc_feature: 185
atccctaactcttatttatattctaattctaattcttattctaattcttattctaattcttattctaattcttattctaattcttattctaattct

SEQ ID NO: 12671 - DNA, 96 bp, Aspergillus novofumigatus
  misc_feature: 185
ataatataaagaggaaaaggaggaaaaaaaggatataaagaaataaaaaaataagagatagttagattaagagaaaaagaaataaaataaaattat

SEQ ID NO: 12672 - DNA, 96 bp, Aspergillus novofumigatus
  misc_feature: 185
agtaaattaaagattagaatcagaattaaagagagaaatagaaggagagttagaagaagagttatagagagtaagttcaggattaaaataagaatt

SEQ ID NO: 12673 - DNA, 96 bp, Aspergillus novofumigatus
  misc_feature: 184
tttctagcaccttattctaattctttttctaactcttattttttttaattcttttttaacttattctttaattcttattctaatccttaacttcct

SEQ ID NO: 12674 - DNA, 96 bp, Aspergillus novofumigatus
  misc_feature: 184
ttactttaattataatataaagaggaaaaggaggaaaaaaaggatataaagaaataaaaaaataagagatagttagattaagagaaaaagaaataa

SEQ ID NO: 12675 - DNA, 96 bp, Aspergillus novofumigatus
  misc_feature: 184
ttaagcatatttcagcttataggataggtaatatataatatttatataataagttattatattaataaataaaatatatagatatcctagtggtgt

SEQ ID NO: 12676 - DNA, 96 bp, Aspergillus novofumigatus
  misc_feature: 184
tctccttagtaaaataatctcttataattttattttatttctttttctcttaatctaactatctcttatttttttatttctttatatccttttttt

SEQ ID NO: 12677 - DNA, 96 bp, Aspergillus novofumigatus
  misc_feature: 184
taattcttattattatcttttaaattactatcttctttattcttattagtagttatatctatcctatctttaattaactaatctatctactcttat

SEQ ID NO: 12678 - DNA, 96 bp, Aspergillus novofumigatus
  misc_feature: 184
gtaattcttattattatcttttaaattactatcttctttattcttattagtagttatatctatcctatctttaattaactaatctatctactctta

SEQ ID NO: 12679 - DNA, 96 bp, Aspergillus novofumigatus
  misc_feature: 184
gatctccaccctccatgggaccacgccagttggcggtccgagatggccgggcgcgcgccctgaccggcagcaggggcccgcgcgcgccgccgcccg

SEQ ID NO: 12680 - DNA, 96 bp, Aspergillus novofumigatus
  misc_feature: 184
cctcttcttctaattctttctaattctcctcttatccttcttttattttctattttatttatttaatcttctatctatttatctatattttctttc

SEQ ID NO: 12681 - DNA, 96 bp, Aspergillus novofumigatus
  misc_feature: 184
agtaattcttattattatcttttaaattactatcttctttattcttattagtagttatatctatcctatctttaattaactaatctatctactctt

SEQ ID NO: 12682 - DNA, 96 bp, Aspergillus novofumigatus
  misc_feature: 184
aaacttactatccttaactattcttctatttctctctctacctcttcttctaattctttctaattctcctcttatccttcttttattttctatttt

SEQ ID NO: 12683 - DNA, 96 bp, Aspergillus novofumigatus
  misc_feature: 183
tttctccttagtaaaataatctcttataattttattttatttctttttctcttaatctaactatctcttatttttttatttctttatatccttttt

SEQ ID NO: 12684 - DNA, 96 bp, Aspergillus novofumigatus
  misc_feature: 183
ttcttctatttctctctctacctcttcttctaattctttctaattctcctcttatccttcttttattttctattttatttatttaatcttctatct

SEQ ID NO: 12685 - DNA, 96 bp, Aspergillus novofumigatus
  misc_feature: 183
ttctccttagtaaaataatctcttataattttattttatttctttttctcttaatctaactatctcttatttttttatttctttatatcctttttt

SEQ ID NO: 12686 - DNA, 96 bp, Aspergillus novofumigatus
  misc_feature: 183
ttaactattcttctatttctctctctacctcttcttctaattctttctaattctcctcttatccttcttttattttctattttatttatttaatct

SEQ ID NO: 12687 - DNA, 96 bp, Aspergillus novofumigatus
  misc_feature: 183
ttaaccttactatctactatgctatttataattactatctaccttattacctaccttactattgactacactatctatcttactgtctaccttact

SEQ ID NO: 12688 - DNA, 96 bp, Aspergillus novofumigatus
  misc_feature: 183
tctttttctaactcttattttttttaattcttttttaacttattctttaattcttattctaatccttaacttcctatattatttatttatttcttt

SEQ ID NO: 12689 - DNA, 96 bp, Aspergillus novofumigatus
  misc_feature: 183
tcttttctccttagtaaaataatctcttataattttattttatttctttttctcttaatctaactatctcttatttttttatttctttatatcctt

SEQ ID NO: 12690 - DNA, 96 bp, Aspergillus novofumigatus
  misc_feature: 183
tcttctaactctccttctatttctctctttaattctgattctaatctttaatttactatctttaactcttcttctaatctttaatttactatctgt

SEQ ID NO: 12691 - DNA, 96 bp, Aspergillus novofumigatus
  misc_feature: 183
tctctctctacctcttcttctaattctttctaattctcctcttatccttcttttattttctattttatttatttaatcttctatctatttatctat

SEQ ID NO: 12692 - DNA, 96 bp, Aspergillus novofumigatus
  misc_feature: 183
ggagagttaaagataataagttaagaattagaatatagattaaaaagagaaagaaaagatagataaatagatagaagagaaaaaataagaattaga

SEQ ID NO: 12693 - DNA, 96 bp, Aspergillus novofumigatus
  misc_feature: 183
tctaaacttactatccttaactattcttctatttctctctctacctcttcttctaattctttctaattctcctcttatccttcttttattttctat

SEQ ID NO: 12694 - DNA, 96 bp, Aspergillus novofumigatus
  misc_feature: 183
tacctcttcttctaattctttctaattctcctcttatccttcttttattttctattttatttatttaatcttctatctatttatctatattttctt

SEQ ID NO: 12695 - DNA, 96 bp, Aspergillus novofumigatus
  misc_feature: 183
cttattctaattctttttctaactcttattttttttaattcttttttaacttattctttaattcttattctaatccttaacttcctatattattta

SEQ ID NO: 12696 - DNA, 96 bp, Aspergillus novofumigatus
  misc_feature: 183
aacttactatccttaactattcttctatttctctctctacctcttcttctaattctttctaattctcctcttatccttcttttattttctatttta

SEQ ID NO: 12697 - DNA, 96 bp, Aspergillus novofumigatus
  misc_feature: 183
cttaactattcttctatttctctctctacctcttcttctaattctttctaattctcctcttatccttcttttattttctattttatttatttaatc

SEQ ID NO: 12698 - DNA, 96 bp, Aspergillus novofumigatus
  misc_feature: 183
attcttctatttctctctctacctcttcttctaattctttctaattctcctcttatccttcttttattttctattttatttatttaatcttctatc

SEQ ID NO: 12699 - DNA, 96 bp, Aspergillus novofumigatus
  misc_feature: 183
cttcttctaactctccttctatttctctctttaattctgattctaatctttaatttactatctttaactcttcttctaatctttaatttactatct

SEQ ID NO: 12700 - DNA, 96 bp, Aspergillus novofumigatus
  misc_feature: 183
agatagtaaattaaagattagaatcagaattaaagagagaaatagaaggagagttagaagaagagttatagagagtaagttcaggattaaaataag

SEQ ID NO: 12701 - DNA, 96 bp, Aspergillus novofumigatus
  misc_feature: 183
ctatccctaactcttatttatattctaattctaattcttattctaattcttattctaattcttattctaattcttattctaattcttattctaatt

SEQ ID NO: 12702 - DNA, 96 bp, Aspergillus novofumigatus
  misc_feature: 183
ctaattctttttctaactcttattttttttaattcttttttaacttattctttaattcttattctaatccttaacttcctatattatttatttatt

SEQ ID NO: 12703 - DNA, 96 bp, Aspergillus novofumigatus
  misc_feature: 183
acttactatccttaactattcttctatttctctctctacctcttcttctaattctttctaattctcctcttatccttcttttattttctattttat

SEQ ID NO: 12704 - DNA, 96 bp, Aspergillus novofumigatus
  misc_feature: 182
actttaattataatataaagaggaaaaggaggaaaaaaaggatataaagaaataaaaaaataagagatagttagattaagagaaaaagaaataaaa

SEQ ID NO: 12705 - DNA, 96 bp, Aspergillus novofumigatus
  misc_feature: 182
gaaaagagttagagagagagatagaaggatagtaagaagaatagtaaaggatagtaaattaagaattagaataagaattagagggagagttagaaa

SEQ ID NO: 12706 - DNA, 96 bp, Aspergillus novofumigatus
  misc_feature: 182
ttctctctctacctcttcttctaattctttctaattctcctcttatccttcttttattttctattttatttatttaatcttctatctatttatcta

SEQ ID NO: 12707 - DNA, 96 bp, Aspergillus novofumigatus
  misc_feature: 182
ttactatccttaactattcttctatttctctctctacctcttcttctaattctttctaattctcctcttatccttcttttattttctattttattt

SEQ ID NO: 12708 - DNA, 96 bp, Aspergillus novofumigatus
  misc_feature: 182
ttaatcctgaacttactctctataactcttcttctaactctccttctatttctctctttaattctgattctaatctttaatttactatctttaact

SEQ ID NO: 12709 - DNA, 96 bp, Aspergillus novofumigatus
  misc_feature: 182
tccttaactattcttctatttctctctctacctcttcttctaattctttctaattctcctcttatccttcttttattttctattttatttatttaa

SEQ ID NO: 12710 - DNA, 96 bp, Aspergillus novofumigatus
  misc_feature: 182
gatagtaaattaaagattagaatcagaattaaagagagaaatagaaggagagttagaagaagagttatagagagtaagttcaggattaaaataaga

SEQ ID NO: 12711 - DNA, 96 bp, Aspergillus novofumigatus
  misc_feature: 182
taaagaggaaaaggaggaaaaaaaggatataaagaaataaaaaaataagagatagttagattaagagaaaaagaaataaaataaaattataagaga

SEQ ID NO: 12712 - DNA, 96 bp, Aspergillus novofumigatus
  misc_feature: 182
tatccctaactcttatttatattctaattctaattcttattctaattcttattctaattcttattctaattcttattctaattcttattctaattc

SEQ ID NO: 12713 - DNA, 96 bp, Aspergillus novofumigatus
  misc_feature: 182
ctattcttctatttctctctctacctcttcttctaattctttctaattctcctcttatccttcttttattttctattttatttatttaatcttcta

SEQ ID NO: 12714 - DNA, 96 bp, Aspergillus novofumigatus
  misc_feature: 182
cttctaactctccttctatttctctctttaattctgattctaatctttaatttactatctttaactcttcttctaatctttaatttactatctgta

SEQ ID NO: 12715 - DNA, 96 bp, Aspergillus novofumigatus
  misc_feature: 182
ctttctagcaccttattctaattctttttctaactcttattttttttaattcttttttaacttattctttaattcttattctaatccttaacttcc

SEQ ID NO: 12716 - DNA, 96 bp, Aspergillus novofumigatus
  misc_feature: 182
gattaaggttagtcagcattaatatattagtgaatgaatatatataatttgggataccataatgctcagagatatatattatagagttaattatag

SEQ ID NO: 12717 - DNA, 96 bp, Aspergillus novofumigatus
  misc_feature: 182
atttctctctctacctcttcttctaattctttctaattctcctcttatccttcttttattttctattttatttatttaatcttctatctatttatc

SEQ ID NO: 12718 - DNA, 96 bp, Aspergillus novofumigatus
  misc_feature: 182
gaaggagagttaaagataataagttaagaattagaatatagattaaaaagagaaagaaaagatagataaatagatagaagagaaaaaataagaatt

SEQ ID NO: 12719 - DNA, 96 bp, Aspergillus novofumigatus
  misc_feature: 182
cttttctccttagtaaaataatctcttataattttattttatttctttttctcttaatctaactatctcttatttttttatttctttatatccttt

SEQ ID NO: 12720 - DNA, 96 bp, Aspergillus novofumigatus
  misc_feature: 182
cttactatccttaactattcttctatttctctctctacctcttcttctaattctttctaattctcctcttatccttcttttattttctattttatt

SEQ ID NO: 12721 - DNA, 96 bp, Aspergillus novofumigatus
  misc_feature: 182
ataaagaggaaaaggaggaaaaaaaggatataaagaaataaaaaaataagagatagttagattaagagaaaaagaaataaaataaaattataagag

SEQ ID NO: 12722 - DNA, 96 bp, Aspergillus novofumigatus
  misc_feature: 182
agattaaaaagagaaagaaaagatagataaatagatagaagagaaaaaataagaattagaaaataaaagaaggataagaggagaattagaaagaat

SEQ ID NO: 12723 - DNA, 96 bp, Aspergillus novofumigatus
  misc_feature: 182
actatccctaactcttatttatattctaattctaattcttattctaattcttattctaattcttattctaattcttattctaattcttattctaat

SEQ ID NO: 12724 - DNA, 96 bp, Aspergillus novofumigatus
  misc_feature: 182
accttattctaattctttttctaactcttattttttttaattcttttttaacttattctttaattcttattctaatccttaacttcctatattatt

SEQ ID NO: 12725 - DNA, 96 bp, Aspergillus novofumigatus
  misc_feature: 181
ttttaatcctgaacttactctctataactcttcttctaactctccttctatttctctctttaattctgattctaatctttaatttactatctttaa

SEQ ID NO: 12726 - DNA, 96 bp, Aspergillus novofumigatus
  misc_feature: 181
ttctcttctatctatttatctatcttttctttctctttttaatctatattctaattcttaacttattatctttaactctccttctgactctttttt

SEQ ID NO: 12727 - DNA, 96 bp, Aspergillus novofumigatus
  misc_feature: 181
agaaaagagttagagagagagatagaaggatagtaagaagaatagtaaaggatagtaaattaagaattagaataagaattagagggagagttagaa

SEQ ID NO: 12728 - DNA, 96 bp, Aspergillus novofumigatus
  misc_feature: 181
ttaccttactattaaccttactatctactatgctatttataattactatctaccttattacctaccttactattgactacactatctatcttactg

SEQ ID NO: 12729 - DNA, 96 bp, Aspergillus novofumigatus
  misc_feature: 181
tctagcaccttattctaattctttttctaactcttattttttttaattcttttttaacttattctttaattcttattctaatccttaacttcctat

SEQ ID NO: 12730 - DNA, 96 bp, Aspergillus novofumigatus
  misc_feature: 181
tccttagtaaaataatctcttataattttattttatttctttttctcttaatctaactatctcttatttttttatttctttatatcctttttttcc

SEQ ID NO: 12731 - DNA, 96 bp, Aspergillus novofumigatus
  misc_feature: 181
tatttctctctctacctcttcttctaattctttctaattctcctcttatccttcttttattttctattttatttatttaatcttctatctatttat

SEQ ID NO: 12732 - DNA, 96 bp, Aspergillus novofumigatus
  misc_feature: 181
agattaaggttagtcagcattaatatattagtgaatgaatatatataatttgggataccataatgctcagagatatatattatagagttaattata

SEQ ID NO: 12733 - DNA, 96 bp, Aspergillus novofumigatus
  misc_feature: 181
taattctttctaattctcctcttatccttcttttattttctaattcttattttttctcttctatctatttatctatcttttctttctctttttaat

SEQ ID NO: 12734 - DNA, 96 bp, Aspergillus novofumigatus
  misc_feature: 181
aactcttttctaattctttctaattctcctcttatccttcttttattttctaattcttattttttctcttctatctatttatctatcttttctttc

SEQ ID NO: 12735 - DNA, 96 bp, Aspergillus novofumigatus
  misc_feature: 181
ctccttagtaaaataatctcttataattttattttatttctttttctcttaatctaactatctcttatttttttatttctttatatcctttttttc

SEQ ID NO: 12736 - DNA, 96 bp, Aspergillus novofumigatus
  misc_feature: 181
ctttaattataatataaagaggaaaaggaggaaaaaaaggatataaagaaataaaaaaataagagatagttagattaagagaaaaagaaataaaat

SEQ ID NO: 12737 - DNA, 96 bp, Aspergillus novofumigatus
  misc_feature: 181
aggagagttaaagataataagttaagaattagaatatagattaaaaagagaaagaaaagatagataaatagatagaagagaaaaaataagaattag

SEQ ID NO: 12738 - DNA, 96 bp, Aspergillus novofumigatus
  misc_feature: 181
ccttattctaattctttttctaactcttattttttttaattcttttttaacttattctttaattcttattctaatccttaacttcctatattattt

SEQ ID NO: 12739 - DNA, 96 bp, Aspergillus novofumigatus
  misc_feature: 181
actatccttaactattcttctatttctctctctacctcttcttctaattctttctaattctcctcttatccttcttttattttctattttatttat

SEQ ID NO: 12740 - DNA, 96 bp, Aspergillus novofumigatus
  misc_feature: 181
actcttttctaattctttctaattctcctcttatccttcttttattttctaattcttattttttctcttctatctatttatctatcttttctttct

SEQ ID NO: 12741 - DNA, 96 bp, Aspergillus novofumigatus
  misc_feature: 180
tactttaattataatataaagaggaaaaggaggaaaaaaaggatataaagaaataaaaaaataagagatagttagattaagagaaaaagaaataaa

SEQ ID NO: 12742 - DNA, 96 bp, Aspergillus novofumigatus
  misc_feature: 180
ttcttattctaattctctttctagcaccttattctaattctttttctaactcttattttttttaattcttttttaacttattctttaattcttatt

SEQ ID NO: 12743 - DNA, 96 bp, Aspergillus novofumigatus
  misc_feature: 180
ttctatttctctctctacctcttcttctaattctttctaattctcctcttatccttcttttattttctattttatttatttaatcttctatctatt

SEQ ID NO: 12744 - DNA, 96 bp, Aspergillus novofumigatus
  misc_feature: 180
ttctagcaccttattctaattctttttctaactcttattttttttaattcttttttaacttattctttaattcttattctaatccttaacttccta

SEQ ID NO: 12745 - DNA, 96 bp, Aspergillus novofumigatus
  misc_feature: 180
ttctaactctccttctatttctctctttaattctgattctaatctttaatttactatctttaactcttcttctaatctttaatttactatctgtaa

SEQ ID NO: 12746 - DNA, 96 bp, Aspergillus novofumigatus
  misc_feature: 180
ttactatccctaactcttatttatattctaattctaattcttattctaattcttattctaattcttattctaattcttattctaattcttattcta

SEQ ID NO: 12747 - DNA, 96 bp, Aspergillus novofumigatus
  misc_feature: 180
tctttctagcaccttattctaattctttttctaactcttattttttttaattcttttttaacttattctttaattcttattctaatccttaacttc

SEQ ID NO: 12748 - DNA, 96 bp, Aspergillus novofumigatus
  misc_feature: 180
tcttcttctaactctccttctatttctctctttaattctgattctaatctttaatttactatctttaactcttcttctaatctttaatttactatc

SEQ ID NO: 12749 - DNA, 96 bp, Aspergillus novofumigatus
  misc_feature: 180
tcttctatttctctctctacctcttcttctaattctttctaattctcctcttatccttcttttattttctattttatttatttaatcttctatcta

SEQ ID NO: 12750 - DNA, 96 bp, Aspergillus novofumigatus
  misc_feature: 180
tctaactcttttctaattctttctaattctcctcttatccttcttttattttctaattcttattttttctcttctatctatttatctatcttttct

SEQ ID NO: 12751 - DNA, 96 bp, Aspergillus novofumigatus
  misc_feature: 180
actcttcttctaactctccttctatttctctctttaattctgattctaatctttaatttactatctttaactcttcttctaatctttaatttacta

SEQ ID NO: 12752 - DNA, 96 bp, Aspergillus novofumigatus
  misc_feature: 180
tagcaccttattctaattctttttctaactcttattttttttaattcttttttaacttattctttaattcttattctaatccttaacttcctatat

SEQ ID NO: 12753 - DNA, 96 bp, Aspergillus novofumigatus
  misc_feature: 180
tactatccttaactattcttctatttctctctctacctcttcttctaattctttctaattctcctcttatccttcttttattttctattttattta

SEQ ID NO: 12754 - DNA, 96 bp, Aspergillus novofumigatus
  misc_feature: 180
ctcttttctaattctttctaattctcctcttatccttcttttattttctaattcttattttttctcttctatctatttatctatcttttctttctc

SEQ ID NO: 12755 - DNA, 96 bp, Aspergillus novofumigatus
  misc_feature: 180
ctcttcttctaactctccttctatttctctctttaattctgattctaatctttaatttactatctttaactcttcttctaatctttaatttactat

SEQ ID NO: 12756 - DNA, 96 bp, Aspergillus novofumigatus
  misc_feature: 180
ctctacctcttcttctaattctttctaattctcctcttatccttcttttattttctattttatttatttaatcttctatctatttatctatatttt

SEQ ID NO: 12757 - DNA, 96 bp, Aspergillus novofumigatus
  misc_feature: 180
ctaactcttttctaattctttctaattctcctcttatccttcttttattttctaattcttattttttctcttctatctatttatctatcttttctt

SEQ ID NO: 12758 - DNA, 96 bp, Aspergillus novofumigatus
  misc_feature: 180
ctaaacttactatccttaactattcttctatttctctctctacctcttcttctaattctttctaattctcctcttatccttcttttattttctatt

SEQ ID NO: 12759 - DNA, 96 bp, Aspergillus novofumigatus
  misc_feature: 180
ccttaactattcttctatttctctctctacctcttcttctaattctttctaattctcctcttatccttcttttattttctattttatttatttaat

SEQ ID NO: 12760 - DNA, 96 bp, Aspergillus novofumigatus
  misc_feature: 180
aaagaggaaaaggaggaaaaaaaggatataaagaaataaaaaaataagagatagttagattaagagaaaaagaaataaaataaaattataagagat

SEQ ID NO: 12761 - DNA, 96 bp, Aspergillus novofumigatus
  misc_feature: 180
aactcttcttctaactctccttctatttctctctttaattctgattctaatctttaatttactatctttaactcttcttctaatctttaatttact

SEQ ID NO: 12762 - DNA, 96 bp, Aspergillus novofumigatus
  misc_feature: 180
acctcttcttctaattctttctaattctcctcttatccttcttttattttctattttatttatttaatcttctatctatttatctatattttcttt

SEQ ID NO: 12763 - DNA, 96 bp, Aspergillus novofumigatus
  misc_feature: 179
tttctcttctatctatttatctatcttttctttctctttttaatctatattctaattcttaacttattatctttaactctccttctgactcttttt

SEQ ID NO: 12764 - DNA, 96 bp, Aspergillus novofumigatus
  misc_feature: 179
aatatagattaaaaagagaaagaaaagatagataaatagatagaagagaaaaaataagaattagaaaataaaagaaggataagaggagaattagaa

SEQ ID NO: 12765 - DNA, 96 bp, Aspergillus novofumigatus
  misc_feature: 179
tactatccctaactcttatttatattctaattctaattcttattctaattcttattctaattcttattctaattcttattctaattcttattctaa

SEQ ID NO: 12766 - DNA, 96 bp, Aspergillus novofumigatus
  misc_feature: 179
atagattaaaaagagaaagaaaagatagataaatagatagaagagaaaaaataagaattagaaaataaaagaaggataagaggagaattagaaaga

SEQ ID NO: 12767 - DNA, 96 bp, Aspergillus novofumigatus
  misc_feature: 179
tcttattctaattctctttctagcaccttattctaattctttttctaactcttattttttttaattcttttttaacttattctttaattcttattc

SEQ ID NO: 12768 - DNA, 96 bp, Aspergillus novofumigatus
  misc_feature: 179
tctctacctcttcttctaattctttctaattctcctcttatccttcttttattttctattttatttatttaatcttctatctatttatctatattt

SEQ ID NO: 12769 - DNA, 96 bp, Aspergillus novofumigatus
  misc_feature: 179
tctaactctccttctatttctctctttaattctgattctaatctttaatttactatctttaactcttcttctaatctttaatttactatctgtaac

SEQ ID NO: 12770 - DNA, 96 bp, Aspergillus novofumigatus
  misc_feature: 179
tatgctatttataattactatctaccttattacctaccttactattgactacactatctatcttactgtctaccttactatctatcttactatcta

SEQ ID NO: 12771 - DNA, 96 bp, Aspergillus novofumigatus
  misc_feature: 179
taacttactatccctaactcttatttatattctaattctaattcttattctaattcttattctaattcttattctaattcttattctaattcttat

SEQ ID NO: 12772 - DNA, 96 bp, Aspergillus novofumigatus
  misc_feature: 179
taactcttttctaattctttctaattctcctcttatccttcttttattttctaattcttattttttctcttctatctatttatctatcttttcttt

SEQ ID NO: 12773 - DNA, 96 bp, Aspergillus novofumigatus
  misc_feature: 179
ctatttctctctctacctcttcttctaattctttctaattctcctcttatccttcttttattttctattttatttatttaatcttctatctattta

SEQ ID NO: 12774 - DNA, 96 bp, Aspergillus novofumigatus
  misc_feature: 179
gaggaaaaggaggaaaaaaaggatataaagaaataaaaaaataagagatagttagattaagagaaaaagaaataaaataaaattataagagattat

SEQ ID NO: 12775 - DNA, 96 bp, Aspergillus novofumigatus
  misc_feature: 179
cttactatccctaactcttatttatattctaattctaattcttattctaattcttattctaattcttattctaattcttattctaattcttattct

SEQ ID NO: 12776 - DNA, 96 bp, Aspergillus novofumigatus
  misc_feature: 179
atatttctaccccttattcttatcttaaacttactaacccttactctattacttatccttccttactttattctccttactacctcttaccttctg

SEQ ID NO: 12777 - DNA, 96 bp, Aspergillus novofumigatus
  misc_feature: 179
caccttattctaattctttttctaactcttattttttttaattcttttttaacttattctttaattcttattctaatccttaacttcctatattat

SEQ ID NO: 12778 - DNA, 96 bp, Aspergillus novofumigatus
  misc_feature: 179
attcttattctaattctctttctagcaccttattctaattctttttctaactcttattttttttaattcttttttaacttattctttaattcttat

SEQ ID NO: 12779 - DNA, 96 bp, Aspergillus novofumigatus
  misc_feature: 179
agcaccttattctaattctttttctaactcttattttttttaattcttttttaacttattctttaattcttattctaatccttaacttcctatatt

SEQ ID NO: 12780 - DNA, 96 bp, Aspergillus novofumigatus
  misc_feature: 179
aatcctgaacttactctctataactcttcttctaactctccttctatttctctctttaattctgattctaatctttaatttactatctttaactct

SEQ ID NO: 12781 - DNA, 96 bp, Aspergillus novofumigatus
  misc_feature: 179
aagaggaaaaggaggaaaaaaaggatataaagaaataaaaaaataagagatagttagattaagagaaaaagaaataaaataaaattataagagatt

SEQ ID NO: 12782 - DNA, 96 bp, Aspergillus novofumigatus
  misc_feature: 178
tttaacttactatccctaactcttatttatattctaattctaattcttattctaattcttattctaattcttattctaattcttattctaattctt

SEQ ID NO: 12783 - DNA, 96 bp, Aspergillus novofumigatus
  misc_feature: 178
tagattaaaaagagaaagaaaagatagataaatagatagaagagaaaaaataagaattagaaaataaaagaaggataagaggagaattagaaagaa

SEQ ID NO: 12784 - DNA, 96 bp, Aspergillus novofumigatus
  misc_feature: 178
ttaacttactatccctaactcttatttatattctaattctaattcttattctaattcttattctaattcttattctaattcttattctaattctta

SEQ ID NO: 12785 - DNA, 96 bp, Aspergillus novofumigatus
  misc_feature: 178
tcttttctaattctttctaattctcctcttatccttcttttattttctaattcttattttttctcttctatctatttatctatcttttctttctct

SEQ ID NO: 12786 - DNA, 96 bp, Aspergillus novofumigatus
  misc_feature: 178
tctctctacctcttcttctaattctttctaattctcctcttatccttcttttattttctattttatttatttaatcttctatctatttatctatat

SEQ ID NO: 12787 - DNA, 96 bp, Aspergillus novofumigatus
  misc_feature: 178
tctatttctctctctacctcttcttctaattctttctaattctcctcttatccttcttttattttctattttatttatttaatcttctatctattt

SEQ ID NO: 12788 - DNA, 96 bp, Aspergillus novofumigatus
  misc_feature: 178
gaatatagattaaaaagagaaagaaaagatagataaatagatagaagagaaaaaataagaattagaaaataaaagaaggataagaggagaattaga

SEQ ID NO: 12789 - DNA, 96 bp, Aspergillus novofumigatus
  misc_feature: 178
tagaaaagagttagagagagagatagaaggatagtaagaagaatagtaaaggatagtaaattaagaattagaataagaattagagggagagttaga

SEQ ID NO: 12790 - DNA, 96 bp, Aspergillus novofumigatus
  misc_feature: 178
ctagcaccttattctaattctttttctaactcttattttttttaattcttttttaacttattctttaattcttattctaatccttaacttcctata

SEQ ID NO: 12791 - DNA, 96 bp, Aspergillus novofumigatus
  misc_feature: 178
tatagattaaaaagagaaagaaaagatagataaatagatagaagagaaaaaataagaattagaaaataaaagaaggataagaggagaattagaaag

SEQ ID NO: 12792 - DNA, 96 bp, Aspergillus novofumigatus
  misc_feature: 178
taaccttactatctactatgctatttataattactatctaccttattacctaccttactattgactacactatctatcttactgtctaccttacta

SEQ ID NO: 12793 - DNA, 96 bp, Aspergillus novofumigatus
  misc_feature: 178
agaggaaaaggaggaaaaaaaggatataaagaaataaaaaaataagagatagttagattaagagaaaaagaaataaaataaaattataagagatta

SEQ ID NO: 12794 - DNA, 96 bp, Aspergillus novofumigatus
  misc_feature: 178
taatcctgaacttactctctataactcttcttctaactctccttctatttctctctttaattctgattctaatctttaatttactatctttaactc

SEQ ID NO: 12795 - DNA, 96 bp, Aspergillus novofumigatus
  misc_feature: 178
taagaattagaatatagattaaaaagagaaagaaaagatagataaatagatagaagagaaaaaataagaattagaaaataaaagaaggataagagg

SEQ ID NO: 12796 - DNA, 96 bp, Aspergillus novofumigatus
  misc_feature: 178
ctttttctaactcttattttttttaattcttttttaacttattctttaattcttattctaatccttaacttcctatattatttatttatttctttt

SEQ ID NO: 12797 - DNA, 96 bp, Aspergillus novofumigatus
  misc_feature: 178
ctctctacctcttcttctaattctttctaattctcctcttatccttcttttattttctattttatttatttaatcttctatctatttatctatatt

SEQ ID NO: 12798 - DNA, 96 bp, Aspergillus novofumigatus
  misc_feature: 178
ctacctcttcttctaattctttctaattctcctcttatccttcttttattttctattttatttatttaatcttctatctatttatctatattttct

SEQ ID NO: 12799 - DNA, 96 bp, Aspergillus novofumigatus
  misc_feature: 178
attcttattttttctcttctatctatttatctatcttttctttctctttttaatctatattctaattcttaacttattatctttaactctccttct

SEQ ID NO: 12800 - DNA, 96 bp, Aspergillus novofumigatus
  misc_feature: 177
ttttttctcttctatctatttatctatcttttctttctctttttaatctatattctaattcttaacttattatctttaactctccttctgactctt

SEQ ID NO: 12801 - DNA, 96 bp, Aspergillus novofumigatus
  misc_feature: 177
atatagattaaaaagagaaagaaaagatagataaatagatagaagagaaaaaataagaattagaaaataaaagaaggataagaggagaattagaaa

SEQ ID NO: 12802 - DNA, 96 bp, Aspergillus novofumigatus
  misc_feature: 177
aaagagttagagagagagatagaaggatagtaagaagaatagtaaaggatagtaaattaagaattagaataagaattagagggagagttagaaaga

SEQ ID NO: 12803 - DNA, 96 bp, Aspergillus novofumigatus
  misc_feature: 177
aagaattagaatatagattaaaaagagaaagaaaagatagataaatagatagaagagaaaaaataagaattagaaaataaaagaaggataagagga

SEQ ID NO: 12804 - DNA, 96 bp, Aspergillus novofumigatus
  misc_feature: 177
tattttttctcttctatctatttatctatcttttctttctctttttaatctatattctaattcttaacttattatctttaactctccttctgactc

SEQ ID NO: 12805 - DNA, 96 bp, Aspergillus novofumigatus
  misc_feature: 177
aattcttattctaattctctttctagcaccttattctaattctttttctaactcttattttttttaattcttttttaacttattctttaattctta

SEQ ID NO: 12806 - DNA, 96 bp, Aspergillus novofumigatus
  misc_feature: 177
acttactatccctaactcttatttatattctaattctaattcttattctaattcttattctaattcttattctaattcttattctaattcttattc

SEQ ID NO: 12807 - DNA, 96 bp, Aspergillus novofumigatus
  misc_feature: 177
aaaagagttagagagagagatagaaggatagtaagaagaatagtaaaggatagtaaattaagaattagaataagaattagagggagagttagaaag

SEQ ID NO: 12808 - DNA, 96 bp, Aspergillus novofumigatus
  misc_feature: 177
ctctttctagcaccttattctaattctttttctaactcttattttttttaattcttttttaacttattctttaattcttattctaatccttaactt

SEQ ID NO: 12809 - DNA, 96 bp, Aspergillus novofumigatus
  misc_feature: 177
attttttctcttctatctatttatctatcttttctttctctttttaatctatattctaattcttaacttattatctttaactctccttctgactct

SEQ ID NO: 12810 - DNA, 96 bp, Aspergillus novofumigatus
  misc_feature: 177
atcctgaacttactctctataactcttcttctaactctccttctatttctctctttaattctgattctaatctttaatttactatctttaactctt

SEQ ID NO: 12811 - DNA, 96 bp, Aspergillus novofumigatus
  misc_feature: 176
tttttctcttctatctatttatctatcttttctttctctttttaatctatattctaattcttaacttattatctttaactctccttctgactcttt

SEQ ID NO: 12812 - DNA, 96 bp, Aspergillus novofumigatus
  misc_feature: 176
ttttctcttctatctatttatctatcttttctttctctttttaatctatattctaattcttaacttattatctttaactctccttctgactctttt

SEQ ID NO: 12813 - DNA, 96 bp, Aspergillus novofumigatus
  misc_feature: 176
attctctttctagcaccttattctaattctttttctaactcttattttttttaattcttttttaacttattctttaattcttattctaatccttaa

SEQ ID NO: 12814 - DNA, 96 bp, Aspergillus novofumigatus
  misc_feature: 176
gcaccttattctaattctttttctaactcttattttttttaattcttttttaacttattctttaattcttattctaatccttaacttcctatatta

SEQ ID NO: 12815 - DNA, 96 bp, Aspergillus novofumigatus
  misc_feature: 176
cctttaacttactatccctaactcttatttatattctaattctaattcttattctaattcttattctaattcttattctaattcttattctaattc

SEQ ID NO: 12816 - DNA, 96 bp, Aspergillus novofumigatus
  misc_feature: 176
ctttaacttactatccctaactcttatttatattctaattctaattcttattctaattcttattctaattcttattctaattcttattctaattct

SEQ ID NO: 12817 - DNA, 96 bp, Aspergillus novofumigatus
  misc_feature: 176
cttctatttctctctctacctcttcttctaattctttctaattctcctcttatccttcttttattttctattttatttatttaatcttctatctat

SEQ ID NO: 12818 - DNA, 96 bp, Aspergillus novofumigatus
  misc_feature: 176
cttattctaattctctttctagcaccttattctaattctttttctaactcttattttttttaattcttttttaacttattctttaattcttattct

SEQ ID NO: 12819 - DNA, 96 bp, Aspergillus novofumigatus
  misc_feature: 176
ctatccttaactattcttctatttctctctctacctcttcttctaattctttctaattctcctcttatccttcttttattttctattttatttatt

SEQ ID NO: 12820 - DNA, 96 bp, Aspergillus novofumigatus
  misc_feature: 176
acctttaacttactatccctaactcttatttatattctaattctaattcttattctaattcttattctaattcttattctaattcttattctaatt

SEQ ID NO: 12821 - DNA, 96 bp, Aspergillus novofumigatus
  misc_feature: 175
aattagaatatagattaaaaagagaaagaaaagatagataaatagatagaagagaaaaaataagaattagaaaataaaagaaggataagaggagaa

SEQ ID NO: 12822 - DNA, 96 bp, Aspergillus novofumigatus
  misc_feature: 175
ctaattctttctaattctcctcttatccttcttttattttctaattcttattttttctcttctatctatttatctatcttttctttctctttttaa

SEQ ID NO: 12823 - DNA, 96 bp, Aspergillus novofumigatus
  misc_feature: 175
tctctttctagcaccttattctaattctttttctaactcttattttttttaattcttttttaacttattctttaattcttattctaatccttaact

SEQ ID NO: 12824 - DNA, 96 bp, Aspergillus novofumigatus
  misc_feature: 175
ctctctctacctcttcttctaattctttctaattctcctcttatccttcttttattttctattttatttatttaatcttctatctatttatctata

SEQ ID NO: 12825 - DNA, 96 bp, Aspergillus novofumigatus
  misc_feature: 175
ctctaactcttttctaattctttctaattctcctcttatccttcttttattttctaattcttattttttctcttctatctatttatctatcttttc

SEQ ID NO: 12826 - DNA, 96 bp, Aspergillus novofumigatus
  misc_feature: 175
ctctctaactcttttctaattctttctaattctcctcttatccttcttttattttctaattcttattttttctcttctatctatttatctatcttt

SEQ ID NO: 12827 - DNA, 96 bp, Aspergillus novofumigatus
  misc_feature: 175
ctatgctatttataattactatctaccttattacctaccttactattgactacactatctatcttactgtctaccttactatctatcttactatct

SEQ ID NO: 12828 - DNA, 96 bp, Aspergillus novofumigatus
  misc_feature: 175
ctaactctccttctatttctctctttaattctgattctaatctttaatttactatctttaactcttcttctaatctttaatttactatctgtaact

SEQ ID NO: 12829 - DNA, 96 bp, Aspergillus novofumigatus
  misc_feature: 175
agagttagagagagagatagaaggatagtaagaagaatagtaaaggatagtaaattaagaattagaataagaattagagggagagttagaaagagg

SEQ ID NO: 12830 - DNA, 96 bp, Aspergillus novofumigatus
  misc_feature: 175
aggaaaaggaggaaaaaaaggatataaagaaataaaaaaataagagatagttagattaagagaaaaagaaataaaataaaattataagagattatt

SEQ ID NO: 12831 - DNA, 96 bp, Aspergillus novofumigatus
  misc_feature: 174
ttttctaattctttctaattctcctcttatccttcttttattttctaattcttattttttctcttctatctatttatctatcttttctttctcttt

SEQ ID NO: 12832 - DNA, 96 bp, Aspergillus novofumigatus
  misc_feature: 174
ttattctaattcttattctaattctctttctagcaccttattctaattctttttctaactcttattttttttaattcttttttaacttattcttta

SEQ ID NO: 12833 - DNA, 96 bp, Aspergillus novofumigatus
  misc_feature: 174
tctctaactcttttctaattctttctaattctcctcttatccttcttttattttctaattcttattttttctcttctatctatttatctatctttt

SEQ ID NO: 12834 - DNA, 96 bp, Aspergillus novofumigatus
  misc_feature: 174
gaattagaatatagattaaaaagagaaagaaaagatagataaatagatagaagagaaaaaataagaattagaaaataaaagaaggataagaggaga

SEQ ID NO: 12835 - DNA, 96 bp, Aspergillus novofumigatus
  misc_feature: 174
tctacctcttcttctaattctttctaattctcctcttatccttcttttattttctattttatttatttaatcttctatctatttatctatattttc

SEQ ID NO: 12836 - DNA, 96 bp, Aspergillus novofumigatus
  misc_feature: 174
tctaattctctttctagcaccttattctaattctttttctaactcttattttttttaattcttttttaacttattctttaattcttattctaatcc

SEQ ID NO: 12837 - DNA, 96 bp, Aspergillus novofumigatus
  misc_feature: 174
taagtaggtataaggttatagaaagtaatataggataaagaaggggataattattaataggataaggatattaataagggggagggttaggatgag

SEQ ID NO: 12838 - DNA, 96 bp, Aspergillus novofumigatus
  misc_feature: 174
aattctctttctagcaccttattctaattctttttctaactcttattttttttaattcttttttaacttattctttaattcttattctaatcctta

SEQ ID NO: 12839 - DNA, 96 bp, Aspergillus novofumigatus
  misc_feature: 174
taactctccttctatttctctctttaattctgattctaatctttaatttactatctttaactcttcttctaatctttaatttactatctgtaactc

SEQ ID NO: 12840 - DNA, 96 bp, Aspergillus novofumigatus
  misc_feature: 174
attagaaaagagttagagagagagatagaaggatagtaagaagaatagtaaaggatagtaaattaagaattagaataagaattagagggagagtta

SEQ ID NO: 12841 - DNA, 96 bp, Aspergillus novofumigatus
  misc_feature: 174
aagagttagagagagagatagaaggatagtaagaagaatagtaaaggatagtaaattaagaattagaataagaattagagggagagttagaaagag

SEQ ID NO: 12842 - DNA, 96 bp, Aspergillus novofumigatus
  misc_feature: 174
agaattagaatatagattaaaaagagaaagaaaagatagataaatagatagaagagaaaaaataagaattagaaaataaaagaaggataagaggag

SEQ ID NO: 12843 - DNA, 96 bp, Aspergillus novofumigatus
  misc_feature: 174
agaatatagattaaaaagagaaagaaaagatagataaatagatagaagagaaaaaataagaattagaaaataaaagaaggataagaggagaattag

SEQ ID NO: 12844 - DNA, 96 bp, Aspergillus novofumigatus
  misc_feature: 174
attagaatatagattaaaaagagaaagaaaagatagataaatagatagaagagaaaaaataagaattagaaaataaaagaaggataagaggagaat

SEQ ID NO: 12845 - DNA, 96 bp, Aspergillus novofumigatus
  misc_feature: 174
aaccttactatctactatgctatttataattactatctaccttattacctaccttactattgactacactatctatcttactgtctaccttactat

SEQ ID NO: 12846 - DNA, 96 bp, Aspergillus novofumigatus
  misc_feature: 174
actatctactatgctatttataattactatctaccttattacctaccttactattgactacactatctatcttactgtctaccttactatctatct

SEQ ID NO: 12847 - DNA, 96 bp, Aspergillus novofumigatus
  misc_feature: 174
aacttactatccctaactcttatttatattctaattctaattcttattctaattcttattctaattcttattctaattcttattctaattcttatt

SEQ ID NO: 12848 - DNA, 96 bp, Aspergillus novofumigatus
  misc_feature: 173
tttttctaactcttattttttttaattcttttttaacttattctttaattcttattctaatccttaacttcctatattatttatttatttcttttc

SEQ ID NO: 12849 - DNA, 96 bp, Aspergillus novofumigatus
  misc_feature: 173
ttctctttctagcaccttattctaattctttttctaactcttattttttttaattcttttttaacttattctttaattcttattctaatccttaac

SEQ ID NO: 12850 - DNA, 96 bp, Aspergillus novofumigatus
  misc_feature: 173
ttctaattctctttctagcaccttattctaattctttttctaactcttattttttttaattcttttttaacttattctttaattcttattctaatc

SEQ ID NO: 12851 - DNA, 96 bp, Aspergillus novofumigatus
  misc_feature: 173
ttattctaattctctttctagcaccttattctaattctttttctaactcttattttttttaattcttttttaacttattctttaattcttattcta

SEQ ID NO: 12852 - DNA, 96 bp, Aspergillus novofumigatus
  misc_feature: 173
ttagaaaagagttagagagagagatagaaggatagtaagaagaatagtaaaggatagtaaattaagaattagaataagaattagagggagagttag

SEQ ID NO: 12853 - DNA, 96 bp, Aspergillus novofumigatus
  misc_feature: 173
tctctctaactcttttctaattctttctaattctcctcttatccttcttttattttctaattcttattttttctcttctatctatttatctatctt

SEQ ID NO: 12854 - DNA, 96 bp, Aspergillus novofumigatus
  misc_feature: 173
tctctataactcttcttctaactctccttctatttctctctttaattctgattctaatctttaatttactatctttaactcttcttctaatcttta

SEQ ID NO: 12855 - DNA, 96 bp, Aspergillus novofumigatus
  misc_feature: 173
tcctgaacttactctctataactcttcttctaactctccttctatttctctctttaattctgattctaatctttaatttactatctttaactcttc

SEQ ID NO: 12856 - DNA, 96 bp, Aspergillus novofumigatus
  misc_feature: 173
tatccttaactattcttctatttctctctctacctcttcttctaattctttctaattctcctcttatccttcttttattttctattttatttattt

SEQ ID NO: 12857 - DNA, 96 bp, Aspergillus novofumigatus
  misc_feature: 173
ctactatgctatttataattactatctaccttattacctaccttactattgactacactatctatcttactgtctaccttactatctatcttacta

SEQ ID NO: 12858 - DNA, 96 bp, Aspergillus novofumigatus
  misc_feature: 173
tagaatatagattaaaaagagaaagaaaagatagataaatagatagaagagaaaaaataagaattagaaaataaaagaaggataagaggagaatta

SEQ ID NO: 12859 - DNA, 96 bp, Aspergillus novofumigatus
  misc_feature: 173
tactatgctatttataattactatctaccttattacctaccttactattgactacactatctatcttactgtctaccttactatctatcttactat

SEQ ID NO: 12860 - DNA, 96 bp, Aspergillus novofumigatus
  misc_feature: 173
taattctctttctagcaccttattctaattctttttctaactcttattttttttaattcttttttaacttattctttaattcttattctaatcctt

SEQ ID NO: 12861 - DNA, 96 bp, Aspergillus novofumigatus
  misc_feature: 173
taactcttcttctaactctccttctatttctctctttaattctgattctaatctttaatttactatctttaactcttcttctaatctttaatttac

SEQ ID NO: 12862 - DNA, 96 bp, Aspergillus novofumigatus
  misc_feature: 173
ataactcttcttctaactctccttctatttctctctttaattctgattctaatctttaatttactatctttaactcttcttctaatctttaattta

SEQ ID NO: 12863 - DNA, 96 bp, Aspergillus novofumigatus
  misc_feature: 173
atccttaactattcttctatttctctctctacctcttcttctaattctttctaattctcctcttatccttcttttattttctattttatttattta

SEQ ID NO: 12864 - DNA, 96 bp, Aspergillus novofumigatus
  misc_feature: 173
atctactatgctatttataattactatctaccttattacctaccttactattgactacactatctatcttactgtctaccttactatctatcttac

SEQ ID NO: 12865 - DNA, 96 bp, Aspergillus novofumigatus
  misc_feature: 173
aaaggaggaaaaaaaggatataaagaaataaaaaaataagagatagttagattaagagaaaaagaaataaaataaaattataagagattattttac

SEQ ID NO: 12866 - DNA, 96 bp, Aspergillus novofumigatus
  misc_feature: 173
ggaaaaggaggaaaaaaaggatataaagaaataaaaaaataagagatagttagattaagagaaaaagaaataaaataaaattataagagattattt

SEQ ID NO: 12867 - DNA, 96 bp, Aspergillus novofumigatus
  misc_feature: 173
accttactatctactatgctatttataattactatctaccttattacctaccttactattgactacactatctatcttactgtctaccttactatc

SEQ ID NO: 12868 - DNA, 96 bp, Aspergillus novofumigatus
  misc_feature: 173
actatgctatttataattactatctaccttattacctaccttactattgactacactatctatcttactgtctaccttactatctatcttactatc

SEQ ID NO: 12869 - DNA, 96 bp, Aspergillus novofumigatus
  misc_feature: 173
gaaaaggaggaaaaaaaggatataaagaaataaaaaaataagagatagttagattaagagaaaaagaaataaaataaaattataagagattatttt

SEQ ID NO: 12870 - DNA, 96 bp, Aspergillus novofumigatus
  misc_feature: 173
ctataactcttcttctaactctccttctatttctctctttaattctgattctaatctttaatttactatctttaactcttcttctaatctttaatt

SEQ ID NO: 12871 - DNA, 96 bp, Aspergillus novofumigatus
  misc_feature: 173
ctaattctctttctagcaccttattctaattctttttctaactcttattttttttaattcttttttaacttattctttaattcttattctaatcct

SEQ ID NO: 12872 - DNA, 96 bp, Aspergillus novofumigatus
  misc_feature: 173
aacctttaacttactatccctaactcttatttatattctaattctaattcttattctaattcttattctaattcttattctaattcttattctaat

SEQ ID NO: 12873 - DNA, 96 bp, Aspergillus novofumigatus
  misc_feature: 172
ttctaattctttctaattctcctcttatccttcttttattttctaattcttattttttctcttctatctatttatctatcttttctttctcttttt

SEQ ID NO: 12874 - DNA, 96 bp, Aspergillus novofumigatus
  misc_feature: 172
ttattttttctcttctatctatttatctatcttttctttctctttttaatctatattctaattcttaacttattatctttaactctccttctgact

SEQ ID NO: 12875 - DNA, 96 bp, Aspergillus novofumigatus
  misc_feature: 172
ttagaatatagattaaaaagagaaagaaaagatagataaatagatagaagagaaaaaataagaattagaaaataaaagaaggataagaggagaatt

SEQ ID NO: 12876 - DNA, 96 bp, Aspergillus novofumigatus
  misc_feature: 172
ttaagtaggtataaggttatagaaagtaatataggataaagaaggggataattattaataggataaggatattaataagggggagggttaggatga

SEQ ID NO: 12877 - DNA, 96 bp, Aspergillus novofumigatus
  misc_feature: 172
tcttattttttctcttctatctatttatctatcttttctttctctttttaatctatattctaattcttaacttattatctttaactctccttctga

SEQ ID NO: 12878 - DNA, 96 bp, Aspergillus novofumigatus
  misc_feature: 172
aagaattagaaaagagttagagagagagatagaaggatagtaagaagaatagtaaaggatagtaaattaagaattagaataagaattagagggaga

SEQ ID NO: 12879 - DNA, 96 bp, Aspergillus novofumigatus
  misc_feature: 172
tctataactcttcttctaactctccttctatttctctctttaattctgattctaatctttaatttactatctttaactcttcttctaatctttaat

SEQ ID NO: 12880 - DNA, 96 bp, Aspergillus novofumigatus
  misc_feature: 172
tctactatgctatttataattactatctaccttattacctaccttactattgactacactatctatcttactgtctaccttactatctatcttact

SEQ ID NO: 12881 - DNA, 96 bp, Aspergillus novofumigatus
  misc_feature: 172
tctaattctttctaattctcctcttatccttcttttattttctaattcttattttttctcttctatctatttatctatcttttctttctcttttta

SEQ ID NO: 12882 - DNA, 96 bp, Aspergillus novofumigatus
  misc_feature: 172
gagttagagagagagatagaaggatagtaagaagaatagtaaaggatagtaaattaagaattagaataagaattagagggagagttagaaagagga

SEQ ID NO: 12883 - DNA, 96 bp, Aspergillus novofumigatus
  misc_feature: 172
tattaaattattaatacaatattttttccttattaatacaatattaatttacttattaatactcttataatactgaatctaaccttagttagattt

SEQ ID NO: 12884 - DNA, 96 bp, Aspergillus novofumigatus
  misc_feature: 172
cttattttttctcttctatctatttatctatcttttctttctctttttaatctatattctaattcttaacttattatctttaactctccttctgac

SEQ ID NO: 12885 - DNA, 96 bp, Aspergillus novofumigatus
  misc_feature: 172
aactctccttctatttctctctttaattctgattctaatctttaatttactatctttaactcttcttctaatctttaatttactatctgtaactcc

SEQ ID NO: 12886 - DNA, 96 bp, Aspergillus novofumigatus
  misc_feature: 172
gaattagaaaagagttagagagagagatagaaggatagtaagaagaatagtaaaggatagtaaattaagaattagaataagaattagagggagagt

SEQ ID NO: 12887 - DNA, 96 bp, Aspergillus novofumigatus
  misc_feature: 172
ctctctataactcttcttctaactctccttctatttctctctttaattctgattctaatctttaatttactatctttaactcttcttctaatcttt

SEQ ID NO: 12888 - DNA, 96 bp, Aspergillus novofumigatus
  misc_feature: 172
cctgaacttactctctataactcttcttctaactctccttctatttctctctttaattctgattctaatctttaatttactatctttaactcttct

SEQ ID NO: 12889 - DNA, 96 bp, Aspergillus novofumigatus
  misc_feature: 172
ccctccctcgtccccctcgctcgcgcgcgcacccctgccggtcctcgccggcgccggccccccggtccctatgacggtgcgcgcgcgcgcggctct

SEQ ID NO: 12890 - DNA, 96 bp, Aspergillus novofumigatus
  misc_feature: 171
ttttctaactcttattttttttaattcttttttaacttattctttaattcttattctaatccttaacttcctatattatttatttatttcttttca

SEQ ID NO: 12891 - DNA, 96 bp, Aspergillus novofumigatus
  misc_feature: 171
tttctaattctttctaattctcctcttatccttcttttattttctaattcttattttttctcttctatctatttatctatcttttctttctctttt

SEQ ID NO: 12892 - DNA, 96 bp, Aspergillus novofumigatus
  misc_feature: 171
ttcttattttttctcttctatctatttatctatcttttctttctctttttaatctatattctaattcttaacttattatctttaactctccttctg

SEQ ID NO: 12893 - DNA, 96 bp, Aspergillus novofumigatus
  misc_feature: 171
tcttattctaattcttattctaattctctttctagcaccttattctaattctttttctaactcttattttttttaattcttttttaacttattctt

SEQ ID NO: 12894 - DNA, 96 bp, Aspergillus novofumigatus
  misc_feature: 171
tctccttctatttctctctttaattctgattctaatctttaatttactatctttaactcttcttctaatctttaatttactatctgtaactcccct

SEQ ID NO: 12895 - DNA, 96 bp, Aspergillus novofumigatus
  misc_feature: 171
taattcttattctaattctctttctagcaccttattctaattctttttctaactcttattttttttaattcttttttaacttattctttaattctt

SEQ ID NO: 12896 - DNA, 96 bp, Aspergillus novofumigatus
  misc_feature: 171
cttttctaattctttctaattctcctcttatccttcttttattttctaattcttattttttctcttctatctatttatctatcttttctttctctt

SEQ ID NO: 12897 - DNA, 96 bp, Aspergillus novofumigatus
  misc_feature: 171
cttattctaattcttattctaattctctttctagcaccttattctaattctttttctaactcttattttttttaattcttttttaacttattcttt

SEQ ID NO: 12898 - DNA, 96 bp, Aspergillus novofumigatus
  misc_feature: 171
agaattagaaaagagttagagagagagatagaaggatagtaagaagaatagtaaaggatagtaaattaagaattagaataagaattagagggagag

SEQ ID NO: 12899 - DNA, 96 bp, Aspergillus novofumigatus
  misc_feature: 171
ctccctctaattcttattctaattcttaatttactatcctttactattcttcttactatccttctatctctctctctaactcttttctaattcttt

SEQ ID NO: 12900 - DNA, 96 bp, Aspergillus novofumigatus
  misc_feature: 171
ccttactatctactatgctatttataattactatctaccttattacctaccttactattgactacactatctatcttactgtctaccttactatct

SEQ ID NO: 12901 - DNA, 96 bp, Aspergillus novofumigatus
  misc_feature: 171
aattagaaaagagttagagagagagatagaaggatagtaagaagaatagtaaaggatagtaaattaagaattagaataagaattagagggagagtt

SEQ ID NO: 12902 - DNA, 96 bp, Aspergillus novofumigatus
  misc_feature: 170
tttctaactcttattttttttaattcttttttaacttattctttaattcttattctaatccttaacttcctatattatttatttatttcttttcat

SEQ ID NO: 12903 - DNA, 96 bp, Aspergillus novofumigatus
  misc_feature: 170
tttaagtaggtataaggttatagaaagtaatataggataaagaaggggataattattaataggataaggatattaataagggggagggttaggatg

SEQ ID NO: 12904 - DNA, 96 bp, Aspergillus novofumigatus
  misc_feature: 170
ttattctaattcttaatttactatcctttactattcttcttactatccttctatctctctctctaactcttttctaattctttctaattctcctct

SEQ ID NO: 12905 - DNA, 96 bp, Aspergillus novofumigatus
  misc_feature: 170
tattctaattctctttctagcaccttattctaattctttttctaactcttattttttttaattcttttttaacttattctttaattcttattctaa

SEQ ID NO: 12906 - DNA, 96 bp, Aspergillus novofumigatus
  misc_feature: 170
ctctataactcttcttctaactctccttctatttctctctttaattctgattctaatctttaatttactatctttaactcttcttctaatctttaa

SEQ ID NO: 12907 - DNA, 96 bp, Aspergillus novofumigatus
  misc_feature: 170
tccttctatttctctctttaattctgattctaatctttaatttactatctttaactcttcttctaatctttaatttactatctgtaactccccttc

SEQ ID NO: 12908 - DNA, 96 bp, Aspergillus novofumigatus
  misc_feature: 170
tattctaattcttattctaattcttattctaattcttattctaattcttattctaattcttattctaattctctttctagcaccttattctaattc

SEQ ID NO: 12909 - DNA, 96 bp, Aspergillus novofumigatus
  misc_feature: 170
tatctactatgctatttataattactatctaccttattacctaccttactattgactacactatctatcttactgtctaccttactatctatctta

SEQ ID NO: 12910 - DNA, 96 bp, Aspergillus novofumigatus
  misc_feature: 170
ctctccttctatttctctctttaattctgattctaatctttaatttactatctttaactcttcttctaatctttaatttactatctgtaactcccc

SEQ ID NO: 12911 - DNA, 96 bp, Aspergillus novofumigatus
  misc_feature: 170
attcttattctaattcttaatttactatcctttactattcttcttactatccttctatctctctctctaactcttttctaattctttctaattctc

SEQ ID NO: 12912 - DNA, 96 bp, Aspergillus novofumigatus
  misc_feature: 170
ctccttctatttctctctttaattctgattctaatctttaatttactatctttaactcttcttctaatctttaatttactatctgtaactcccctt

SEQ ID NO: 12913 - DNA, 96 bp, Aspergillus novofumigatus
  misc_feature: 170
ctatctactatgctatttataattactatctaccttattacctaccttactattgactacactatctatcttactgtctaccttactatctatctt

SEQ ID NO: 12914 - DNA, 96 bp, Aspergillus novofumigatus
  misc_feature: 170
attctaattcttattctaattctctttctagcaccttattctaattctttttctaactcttattttttttaattcttttttaacttattctttaat

SEQ ID NO: 12915 - DNA, 96 bp, Aspergillus novofumigatus
  misc_feature: 170
agttagagagagagatagaaggatagtaagaagaatagtaaaggatagtaaattaagaattagaataagaattagagggagagttagaaagaggat

SEQ ID NO: 12916 - DNA, 96 bp, Aspergillus novofumigatus
  misc_feature: 170
aattcttattctaattcttaatttactatcctttactattcttcttactatccttctatctctctctctaactcttttctaattctttctaattct

SEQ ID NO: 12917 - DNA, 96 bp, Aspergillus novofumigatus
  misc_feature: 170
actctctataactcttcttctaactctccttctatttctctctttaattctgattctaatctttaatttactatctttaactcttcttctaatctt

SEQ ID NO: 12918 - DNA, 96 bp, Aspergillus novofumigatus
  misc_feature: 169
ttctaattcttattctaattctctttctagcaccttattctaattctttttctaactcttattttttttaattcttttttaacttattctttaatt

SEQ ID NO: 12919 - DNA, 96 bp, Aspergillus novofumigatus
  misc_feature: 169
ttctaactcttattttttttaattcttttttaacttattctttaattcttattctaatccttaacttcctatattatttatttatttcttttcatc

SEQ ID NO: 12920 - DNA, 96 bp, Aspergillus novofumigatus
  misc_feature: 169
tctaattcttattctaattctctttctagcaccttattctaattctttttctaactcttattttttttaattcttttttaacttattctttaattc

SEQ ID NO: 12921 - DNA, 96 bp, Aspergillus novofumigatus
  misc_feature: 169
tccctctaattcttattctaattcttaatttactatcctttactattcttcttactatccttctatctctctctctaactcttttctaattctttc

SEQ ID NO: 12922 - DNA, 96 bp, Aspergillus novofumigatus
  misc_feature: 169
tactatctactatgctatttataattactatctaccttattacctaccttactattgactacactatctatcttactgtctaccttactatctatc

SEQ ID NO: 12923 - DNA, 96 bp, Aspergillus novofumigatus
  misc_feature: 169
taattcttattctaattcttaatttactatcctttactattcttcttactatccttctatctctctctctaactcttttctaattctttctaattc

SEQ ID NO: 12924 - DNA, 96 bp, Aspergillus novofumigatus
  misc_feature: 169
cttaaacataatccgaggataaggattttagcggcttgtagtattttagccgcttgttgcattttagccgcttgtagtattttagcggctttttgc

SEQ ID NO: 12925 - DNA, 96 bp, Aspergillus novofumigatus
  misc_feature: 169
attcttattctaattcttattctaattctctttctagcaccttattctaattctttttctaactcttattttttttaattcttttttaacttattc

SEQ ID NO: 12926 - DNA, 96 bp, Aspergillus novofumigatus
  misc_feature: 169
ctgaacttactctctataactcttcttctaactctccttctatttctctctttaattctgattctaatctttaatttactatctttaactcttctt

SEQ ID NO: 12927 - DNA, 96 bp, Aspergillus novofumigatus
  misc_feature: 168
ttcttattctaattcttattctaattctctttctagcaccttattctaattctttttctaactcttattttttttaattcttttttaacttattct

SEQ ID NO: 12928 - DNA, 96 bp, Aspergillus novofumigatus
  misc_feature: 168
ttattttttttaattcttttttaacttattctttaattcttattctaatccttaacttcctatattatttatttatttcttttcatctttataaat

SEQ ID NO: 12929 - DNA, 96 bp, Aspergillus novofumigatus
  misc_feature: 168
taacctttaacttactatccctaactcttatttatattctaattctaattcttattctaattcttattctaattcttattctaattcttattctaa

SEQ ID NO: 12930 - DNA, 96 bp, Aspergillus novofumigatus
  misc_feature: 168
ttactatctactatgctatttataattactatctaccttattacctaccttactattgactacactatctatcttactgtctaccttactatctat

SEQ ID NO: 12931 - DNA, 96 bp, Aspergillus novofumigatus
  misc_feature: 168
tattctaattcttattctaattctctttctagcaccttattctaattctttttctaactcttattttttttaattcttttttaacttattctttaa

SEQ ID NO: 12932 - DNA, 96 bp, Aspergillus novofumigatus
  misc_feature: 168
cggtctcgacatacgtcggcatggcccgccaggtggcatccatccatccatagacacagacacccgtatgcatatatatatatatatatatacaca

SEQ ID NO: 12933 - DNA, 96 bp, Aspergillus novofumigatus
  misc_feature: 168
tataactcttcttctaactctccttctatttctctctttaattctgattctaatctttaatttactatctttaactcttcttctaatctttaattt

SEQ ID NO: 12934 - DNA, 96 bp, Aspergillus novofumigatus
  misc_feature: 168
cctctaattcttattctaattcttaatttactatcctttactattcttcttactatccttctatctctctctctaactcttttctaattctttcta

SEQ ID NO: 12935 - DNA, 96 bp, Aspergillus novofumigatus
  misc_feature: 168
aaaaggaggaaaaaaaggatataaagaaataaaaaaataagagatagttagattaagagaaaaagaaataaaataaaattataagagattatttta

SEQ ID NO: 12936 - DNA, 96 bp, Aspergillus novofumigatus
  misc_feature: 168
actctccttctatttctctctttaattctgattctaatctttaatttactatctttaactcttcttctaatctttaatttactatctgtaactccc

SEQ ID NO: 12937 - DNA, 96 bp, Aspergillus novofumigatus
  misc_feature: 168
cttattctaattcttaatttactatcctttactattcttcttactatccttctatctctctctctaactcttttctaattctttctaattctcctc

SEQ ID NO: 12938 - DNA, 96 bp, Aspergillus novofumigatus
  misc_feature: 168
ctctctctaactcttttctaattctttctaattctcctcttatccttcttttattttctaattcttattttttctcttctatctatttatctatct

SEQ ID NO: 12939 - DNA, 96 bp, Aspergillus novofumigatus
  misc_feature: 168
ctaattcttattctaattctctttctagcaccttattctaattctttttctaactcttattttttttaattcttttttaacttattctttaattct

SEQ ID NO: 12940 - DNA, 96 bp, Aspergillus novofumigatus
  misc_feature: 168
ccttctatttctctctttaattctgattctaatctttaatttactatctttaactcttcttctaatctttaatttactatctgtaactccccttct

SEQ ID NO: 12941 - DNA, 96 bp, Aspergillus novofumigatus
  misc_feature: 168
attctaattctctttctagcaccttattctaattctttttctaactcttattttttttaattcttttttaacttattctttaattcttattctaat

SEQ ID NO: 12942 - DNA, 96 bp, Aspergillus novofumigatus
  misc_feature: 167
ttttttattatatatctatcttttttttctttatttatttattattctaacctttaacttactatccctaactcttatttatattctaattctaat

SEQ ID NO: 12943 - DNA, 96 bp, Aspergillus novofumigatus
  misc_feature: 167
ttcttattctaattcttaatttactatcctttactattcttcttactatccttctatctctctctctaactcttttctaattctttctaattctcc

SEQ ID NO: 12944 - DNA, 96 bp, Aspergillus novofumigatus
  misc_feature: 167
tgaacttactctctataactcttcttctaactctccttctatttctctctttaattctgattctaatctttaatttactatctttaactcttcttc

SEQ ID NO: 12945 - DNA, 96 bp, Aspergillus novofumigatus
  misc_feature: 167
cttactatctactatgctatttataattactatctaccttattacctaccttactattgactacactatctatcttactgtctaccttactatcta

SEQ ID NO: 12946 - DNA, 96 bp, Aspergillus novofumigatus
  misc_feature: 167
cttctatttctctctttaattctgattctaatctttaatttactatctttaactcttcttctaatctttaatttactatctgtaactccccttcta

SEQ ID NO: 12947 - DNA, 96 bp, Aspergillus novofumigatus
  misc_feature: 167
aacttactctctataactcttcttctaactctccttctatttctctctttaattctgattctaatctttaatttactatctttaactcttcttcta

SEQ ID NO: 12948 - DNA, 96 bp, Aspergillus novofumigatus
  misc_feature: 167
attcaggttctaattcaggttctaattcaggttctaattcaggttctaattcaggttctaattcaggttctaattcaggttctaattcaggttcta

SEQ ID NO: 12949 - DNA, 96 bp, Aspergillus novofumigatus
  misc_feature: 167
tactctctataactcttcttctaactctccttctatttctctctttaattctgattctaatctttaatttactatctttaactcttcttctaatct

SEQ ID NO: 12950 - DNA, 96 bp, Aspergillus novofumigatus
  misc_feature: 167
gaacttactctctataactcttcttctaactctccttctatttctctctttaattctgattctaatctttaatttactatctttaactcttcttct

SEQ ID NO: 12951 - DNA, 96 bp, Aspergillus novofumigatus
  misc_feature: 167
ccctctaattcttattctaattcttaatttactatcctttactattcttcttactatccttctatctctctctctaactcttttctaattctttct

SEQ ID NO: 12952 - DNA, 96 bp, Aspergillus novofumigatus
  misc_feature: 167
atttactatcctttactattcttcttactatccttctatctctctctctaactcttttctaattctttctaattctcctcttatccttcttttatt

SEQ ID NO: 12953 - DNA, 96 bp, Aspergillus novofumigatus
  misc_feature: 167
atattaaattattaatacaatattttttccttattaatacaatattaatttacttattaatactcttataatactgaatctaaccttagttagatt

SEQ ID NO: 12954 - DNA, 96 bp, Aspergillus novofumigatus
  misc_feature: 167
aattcttattctaattcttattctaattctctttctagcaccttattctaattctttttctaactcttattttttttaattcttttttaacttatt

SEQ ID NO: 12955 - DNA, 96 bp, Aspergillus novofumigatus
  misc_feature: 166
ttctaattcttattctaattcttattctaattctctttctagcaccttattctaattctttttctaactcttattttttttaattcttttttaact

SEQ ID NO: 12956 - DNA, 96 bp, Aspergillus novofumigatus
  misc_feature: 166
ctctaattcttattctaattcttaatttactatcctttactattcttcttactatccttctatctctctctctaactcttttctaattctttctaa

SEQ ID NO: 12957 - DNA, 96 bp, Aspergillus novofumigatus
  misc_feature: 166
tcttattctaattcttaatttactatcctttactattcttcttactatccttctatctctctctctaactcttttctaattctttctaattctcct

SEQ ID NO: 12958 - DNA, 96 bp, Aspergillus novofumigatus
  misc_feature: 166
tctaattcttattctaattcttaatttactatcctttactattcttcttactatccttctatctctctctctaactcttttctaattctttctaat

SEQ ID NO: 12959 - DNA, 96 bp, Aspergillus novofumigatus
  misc_feature: 166
tctaactcttattttttttaattcttttttaacttattctttaattcttattctaatccttaacttcctatattatttatttatttcttttcatct

SEQ ID NO: 12960 - DNA, 96 bp, Aspergillus novofumigatus
  misc_feature: 166
ctttttttattatatatctatcttttttttctttatttatttattattctaacctttaacttactatccctaactcttatttatattctaattcta

SEQ ID NO: 12961 - DNA, 96 bp, Aspergillus novofumigatus
  misc_feature: 166
taattcttattctaattcttattctaattctctttctagcaccttattctaattctttttctaactcttattttttttaattcttttttaacttat

SEQ ID NO: 12962 - DNA, 96 bp, Aspergillus novofumigatus
  misc_feature: 166
ctaattcttattctaattcttaatttactatcctttactattcttcttactatccttctatctctctctctaactcttttctaattctttctaatt

SEQ ID NO: 12963 - DNA, 96 bp, Aspergillus novofumigatus
  misc_feature: 166
ctaactcttattttttttaattcttttttaacttattctttaattcttattctaatccttaacttcctatattatttatttatttcttttcatctt

SEQ ID NO: 12964 - DNA, 96 bp, Aspergillus novofumigatus
  misc_feature: 165
tttttttattatatatctatcttttttttctttatttatttattattctaacctttaacttactatccctaactcttatttatattctaattctaa

SEQ ID NO: 12965 - DNA, 96 bp, Aspergillus novofumigatus
  misc_feature: 165
ttactctctataactcttcttctaactctccttctatttctctctttaattctgattctaatctttaatttactatctttaactcttcttctaatc

SEQ ID NO: 12966 - DNA, 96 bp, Aspergillus novofumigatus
  misc_feature: 165
tctctctctaactcttttctaattctttctaattctcctcttatccttcttttattttctaattcttattttttctcttctatctatttatctatc

SEQ ID NO: 12967 - DNA, 96 bp, Aspergillus novofumigatus
  misc_feature: 165
taactcttattttttttaattcttttttaacttattctttaattcttattctaatccttaacttcctatattatttatttatttcttttcatcttt

SEQ ID NO: 12968 - DNA, 96 bp, Aspergillus novofumigatus
  misc_feature: 165
aactcttattttttttaattcttttttaacttattctttaattcttattctaatccttaacttcctatattatttatttatttcttttcatcttta

SEQ ID NO: 12969 - DNA, 96 bp, Aspergillus novofumigatus
  misc_feature: 165
gttagagagagagatagaaggatagtaagaagaatagtaaaggatagtaaattaagaattagaataagaattagagggagagttagaaagaggatt

SEQ ID NO: 12970 - DNA, 96 bp, Aspergillus novofumigatus
  misc_feature: 165
aaaaaagaattaaaaaaaataagagttagaaaaagaattagaataaggtgctagaaagagaattagaataagaattagaataagaattagaataag

SEQ ID NO: 12971 - DNA, 96 bp, Aspergillus novofumigatus
  misc_feature: 164
tttttttaattcttttttaacttattctttaattcttattctaatccttaacttcctatattatttatttatttcttttcatctttataaattatt

SEQ ID NO: 12972 - DNA, 96 bp, Aspergillus novofumigatus
  misc_feature: 164
ttctatttctctctttaattctgattctaatctttaatttactatctttaactcttcttctaatctttaatttactatctgtaactccccttctaa

SEQ ID NO: 12973 - DNA, 96 bp, Aspergillus novofumigatus
  misc_feature: 164
ttcaggttctaattcaggttctaattcaggttctaattcaggttctaattcaggttctaattcaggttctaattcaggttctaattcaggttctaa

SEQ ID NO: 12974 - DNA, 96 bp, Aspergillus novofumigatus
  misc_feature: 164
tccctccctcgtccccctcgctcgcgcgcgcacccctgccggtcctcgccggcgccggccccccggtccctatgacggtgcgcgcgcgcgcggctc

SEQ ID NO: 12975 - DNA, 96 bp, Aspergillus novofumigatus
  misc_feature: 164
tattctaattcttaatttactatcctttactattcttcttactatccttctatctctctctctaactcttttctaattctttctaattctcctctt

SEQ ID NO: 12976 - DNA, 96 bp, Aspergillus novofumigatus
  misc_feature: 164
ctaattcttattctaattcttattctaattctctttctagcaccttattctaattctttttctaactcttattttttttaattcttttttaactta

SEQ ID NO: 12977 - DNA, 96 bp, Aspergillus novofumigatus
  misc_feature: 164
ctaattcttaatttactatcctttactattcttcttactatccttctatctctctctctaactcttttctaattctttctaattctcctcttatcc

SEQ ID NO: 12978 - DNA, 96 bp, Aspergillus novofumigatus
  misc_feature: 164
gatattaaattattaatacaatattttttccttattaatacaatattaatttacttattaatactcttataatactgaatctaaccttagttagat

SEQ ID NO: 12979 - DNA, 96 bp, Aspergillus novofumigatus
  misc_feature: 164
attcttaatttactatcctttactattcttcttactatccttctatctctctctctaactcttttctaattctttctaattctcctcttatccttc

SEQ ID NO: 12980 - DNA, 96 bp, Aspergillus novofumigatus
  misc_feature: 164
aatttactatcctttactattcttcttactatccttctatctctctctctaactcttttctaattctttctaattctcctcttatccttcttttat

SEQ ID NO: 12981 - DNA, 96 bp, Aspergillus novofumigatus
  misc_feature: 163
ttttttaattcttttttaacttattctttaattcttattctaatccttaacttcctatattatttatttatttcttttcatctttataaattatta

SEQ ID NO: 12982 - DNA, 96 bp, Aspergillus novofumigatus
  misc_feature: 163
acttactctctataactcttcttctaactctccttctatttctctctttaattctgattctaatctttaatttactatctttaactcttcttctaa

SEQ ID NO: 12983 - DNA, 96 bp, Aspergillus novofumigatus
  misc_feature: 163
tctatttctctctttaattctgattctaatctttaatttactatctttaactcttcttctaatctttaatttactatctgtaactccccttctaat

SEQ ID NO: 12984 - DNA, 96 bp, Aspergillus novofumigatus
  misc_feature: 163
tctaattcttattctaattcttattctaattctctttctagcaccttattctaattctttttctaactcttattttttttaattcttttttaactt

SEQ ID NO: 12985 - DNA, 96 bp, Aspergillus novofumigatus
  misc_feature: 163
tctaacctttaacttactatccctaactcttatttatattctaattctaattcttattctaattcttattctaattcttattctaattcttattct

SEQ ID NO: 12986 - DNA, 96 bp, Aspergillus novofumigatus
  misc_feature: 163
caccggtgggccatgccgacctggatcggtgcagatgtctggggggtgcatgcatgcgagggggcgtgtgcgtgtatatatatatatatatatata

SEQ ID NO: 12987 - DNA, 96 bp, Aspergillus novofumigatus
  misc_feature: 163
ctaacctttaacttactatccctaactcttatttatattctaattctaattcttattctaattcttattctaattcttattctaattcttattcta

SEQ ID NO: 12988 - DNA, 96 bp, Aspergillus novofumigatus
  misc_feature: 163
ggggggccggggtccggcgcggacgggttggtggagggtgggccggtgaccagttggcggggggcccttgggggggcagaccggcaggcagggggg

SEQ ID NO: 12989 - DNA, 96 bp, Aspergillus novofumigatus
  misc_feature: 163
cggggggccggggtccggcgcggacgggttggtggagggtgggccggtgaccagttggcggggggcccttgggggggcagaccggcaggcaggggg

SEQ ID NO: 12990 - DNA, 96 bp, Aspergillus novofumigatus
  misc_feature: 162
ttttttttaattcttttttaacttattctttaattcttattctaatccttaacttcctatattatttatttatttcttttcatctttataaattat

SEQ ID NO: 12991 - DNA, 96 bp, Aspergillus novofumigatus
  misc_feature: 162
tttttattatatatctatcttttttttctttatttatttattattctaacctttaacttactatccctaactcttatttatattctaattctaatt

SEQ ID NO: 12992 - DNA, 96 bp, Aspergillus novofumigatus
  misc_feature: 162
tttttaattcttttttaacttattctttaattcttattctaatccttaacttcctatattatttatttatttcttttcatctttataaattattaa

SEQ ID NO: 12993 - DNA, 96 bp, Aspergillus novofumigatus
  misc_feature: 162
cttattttttttaattcttttttaacttattctttaattcttattctaatccttaacttcctatattatttatttatttcttttcatctttataaa

SEQ ID NO: 12994 - DNA, 96 bp, Aspergillus novofumigatus
  misc_feature: 162
ttattatatatctatcttttttttctttatttatttattattctaacctttaacttactatccctaactcttatttatattctaattctaattctt

SEQ ID NO: 12995 - DNA, 96 bp, Aspergillus novofumigatus
  misc_feature: 162
tattttttttaattcttttttaacttattctttaattcttattctaatccttaacttcctatattatttatttatttcttttcatctttataaatt

SEQ ID NO: 12996 - DNA, 96 bp, Aspergillus novofumigatus
  misc_feature: 162
taattcttaatttactatcctttactattcttcttactatccttctatctctctctctaactcttttctaattctttctaattctcctcttatcct

SEQ ID NO: 12997 - DNA, 96 bp, Aspergillus novofumigatus
  misc_feature: 162
actcttattttttttaattcttttttaacttattctttaattcttattctaatccttaacttcctatattatttatttatttcttttcatctttat

SEQ ID NO: 12998 - DNA, 96 bp, Aspergillus novofumigatus
  misc_feature: 161
tttaattcttttttaacttattctttaattcttattctaatccttaacttcctatattatttatttatttcttttcatctttataaattattaaaa

SEQ ID NO: 12999 - DNA, 96 bp, Aspergillus novofumigatus
  misc_feature: 161
tttattatatatctatcttttttttctttatttatttattattctaacctttaacttactatccctaactcttatttatattctaattctaattct

SEQ ID NO: 13000 - DNA, 96 bp, Aspergillus novofumigatus
  misc_feature: 161
taaaaaagaattaaaaaaaataagagttagaaaaagaattagaataaggtgctagaaagagaattagaataagaattagaataagaattagaataa

SEQ ID NO: 13001 - DNA, 96 bp, Aspergillus novofumigatus
  misc_feature: 161
tcttattttttttaattcttttttaacttattctttaattcttattctaatccttaacttcctatattatttatttatttcttttcatctttataa

SEQ ID NO: 13002 - DNA, 96 bp, Aspergillus novofumigatus
  misc_feature: 161
tctaattcttaatttactatcctttactattcttcttactatccttctatctctctctctaactcttttctaattctttctaattctcctcttatc

SEQ ID NO: 13003 - DNA, 96 bp, Aspergillus novofumigatus
  misc_feature: 161
tattatatatctatcttttttttctttatttatttattattctaacctttaacttactatccctaactcttatttatattctaattctaattctta

SEQ ID NO: 13004 - DNA, 96 bp, Aspergillus novofumigatus
  misc_feature: 161
ctcttattttttttaattcttttttaacttattctttaattcttattctaatccttaacttcctatattatttatttatttcttttcatctttata

SEQ ID NO: 13005 - DNA, 96 bp, Aspergillus novofumigatus
  misc_feature: 161
attttttttaattcttttttaacttattctttaattcttattctaatccttaacttcctatattatttatttatttcttttcatctttataaatta

SEQ ID NO: 13006 - DNA, 96 bp, Aspergillus novofumigatus
  misc_feature: 161
taatttactatcctttactattcttcttactatccttctatctctctctctaactcttttctaattctttctaattctcctcttatccttctttta

SEQ ID NO: 13007 - DNA, 96 bp, Aspergillus novofumigatus
  misc_feature: 161
cttactctctataactcttcttctaactctccttctatttctctctttaattctgattctaatctttaatttactatctttaactcttcttctaat

SEQ ID NO: 13008 - DNA, 96 bp, Aspergillus novofumigatus
  misc_feature: 161
ctctctctctaactcttttctaattctttctaattctcctcttatccttcttttattttctaattcttattttttctcttctatctatttatctat

SEQ ID NO: 13009 - DNA, 96 bp, Aspergillus novofumigatus
  misc_feature: 161
ctatttctctctttaattctgattctaatctttaatttactatctttaactcttcttctaatctttaatttactatctgtaactccccttctaatt

SEQ ID NO: 13010 - DNA, 96 bp, Aspergillus novofumigatus
  misc_feature: 161
aattcttaatttactatcctttactattcttcttactatccttctatctctctctctaactcttttctaattctttctaattctcctcttatcctt

SEQ ID NO: 13011 - DNA, 96 bp, Aspergillus novofumigatus
  misc_feature: 160
ttttattatatatctatcttttttttctttatttatttattattctaacctttaacttactatccctaactcttatttatattctaattctaattc

SEQ ID NO: 13012 - DNA, 96 bp, Aspergillus novofumigatus
  misc_feature: 160
tttactatcctttactattcttcttactatccttctatctctctctctaactcttttctaattctttctaattctcctcttatccttcttttattt

SEQ ID NO: 13013 - DNA, 96 bp, Aspergillus novofumigatus
  misc_feature: 160
ttaattcttttttaacttattctttaattcttattctaatccttaacttcctatattatttatttatttcttttcatctttataaattattaaaac

SEQ ID NO: 13014 - DNA, 96 bp, Aspergillus novofumigatus
  misc_feature: 159
ttttaattcttttttaacttattctttaattcttattctaatccttaacttcctatattatttatttatttcttttcatctttataaattattaaa

SEQ ID NO: 13015 - DNA, 96 bp, Aspergillus novofumigatus
  misc_feature: 159
ttatatatctatcttttttttctttatttatttattattctaacctttaacttactatccctaactcttatttatattctaattctaattcttatt

SEQ ID NO: 13016 - DNA, 96 bp, Aspergillus novofumigatus
  misc_feature: 159
ttactatcctttactattcttcttactatccttctatctctctctctaactcttttctaattctttctaattctcctcttatccttcttttatttt

SEQ ID NO: 13017 - DNA, 96 bp, Aspergillus novofumigatus
  misc_feature: 159
ggatattaaattattaatacaatattttttccttattaatacaatattaatttacttattaatactcttataatactgaatctaaccttagttaga

SEQ ID NO: 13018 - DNA, 96 bp, Aspergillus novofumigatus
  misc_feature: 159
attcttttttaacttattctttaattcttattctaatccttaacttcctatattatttatttatttcttttcatctttataaattattaaaaccta

SEQ ID NO: 13019 - DNA, 96 bp, Aspergillus novofumigatus
  misc_feature: 159
cttttttaacttattctttaattcttattctaatccttaacttcctatattatttatttatttcttttcatctttataaattattaaaacctaact

SEQ ID NO: 13020 - DNA, 96 bp, Aspergillus novofumigatus
  misc_feature: 158
agagattagatagaagaagaggtagaagagaatttagggatagattaagaggagagaagaaggagtaataagagtagaaagggagataatttaaaa

SEQ ID NO: 13021 - DNA, 96 bp, Aspergillus novofumigatus
  misc_feature: 158
tttctattttatttatttaatcttctatctatttatctatattttctttctctttttaatctatattctaatctttaacttactatctttaactct

SEQ ID NO: 13022 - DNA, 96 bp, Aspergillus novofumigatus
  misc_feature: 158
ttcttttttaacttattctttaattcttattctaatccttaacttcctatattatttatttatttcttttcatctttataaattattaaaacctaa

SEQ ID NO: 13023 - DNA, 96 bp, Aspergillus novofumigatus
  misc_feature: 158
ttcttaatttactatcctttactattcttcttactatccttctatctctctctctaactcttttctaattctttctaattctcctcttatccttct

SEQ ID NO: 13024 - DNA, 96 bp, Aspergillus novofumigatus
  misc_feature: 158
ttctaattcttaatttactatcctttactattcttcttactatccttctatctctctctctaactcttttctaattctttctaattctcctcttat

SEQ ID NO: 13025 - DNA, 96 bp, Aspergillus novofumigatus
  misc_feature: 158
taagagattagatagaagaagaggtagaagagaatttagggatagattaagaggagagaagaaggagtaataagagtagaaagggagataatttaa

SEQ ID NO: 13026 - DNA, 96 bp, Aspergillus novofumigatus
  misc_feature: 158
ttaaaaaagaattaaaaaaaataagagttagaaaaagaattagaataaggtgctagaaagagaattagaataagaattagaataagaattagaata

SEQ ID NO: 13027 - DNA, 96 bp, Aspergillus novofumigatus
  misc_feature: 158
tgaccagttggcggggggcccttgggggggcagaccggcaggcaggggcgcgcgccatagacagacacttgtagagacacacagacaccgggggcg

SEQ ID NO: 13028 - DNA, 96 bp, Aspergillus novofumigatus
  misc_feature: 158
tctcttctctctatttctctcttaattcttactctatctcttactttacctctttctctatctctctcttctatctacacttactaccccttactc

SEQ ID NO: 13029 - DNA, 96 bp, Aspergillus novofumigatus
  misc_feature: 158
tctctctctctaactcttttctaattctttctaattctcctcttatccttcttttattttctaattcttattttttctcttctatctatttatcta

SEQ ID NO: 13030 - DNA, 96 bp, Aspergillus novofumigatus
  misc_feature: 158
gggttttaagagattagatagaagaagaggtagaagagaatttagggatagattaagaggagagaagaaggagtaataagagtagaaagggagata

SEQ ID NO: 13031 - DNA, 96 bp, Aspergillus novofumigatus
  misc_feature: 158
taattcttttttaacttattctttaattcttattctaatccttaacttcctatattatttatttatttcttttcatctttataaattattaaaacc

SEQ ID NO: 13032 - DNA, 96 bp, Aspergillus novofumigatus
  misc_feature: 158
attctaattcttaatttactatcctttactattcttcttactatccttctatctctctctctaactcttttctaattctttctaattctcctctta

SEQ ID NO: 13033 - DNA, 96 bp, Aspergillus novofumigatus
  misc_feature: 158
ggggttttaagagattagatagaagaagaggtagaagagaatttagggatagattaagaggagagaagaaggagtaataagagtagaaagggagat

SEQ ID NO: 13034 - DNA, 96 bp, Aspergillus novofumigatus
  misc_feature: 158
ggataagaggagaattagaaagaattagaagaagaggtagagagagaaatagaagaatagttaaggatagtaagtttagaattagaataagaattt

SEQ ID NO: 13035 - DNA, 96 bp, Aspergillus novofumigatus
  misc_feature: 158
ctcttctctctatttctctcttaattcttactctatctcttactttacctctttctctatctctctcttctatctacacttactaccccttactct

SEQ ID NO: 13036 - DNA, 96 bp, Aspergillus novofumigatus
  misc_feature: 158
atttctctctttaattctgattctaatctttaatttactatctttaactcttcttctaatctttaatttactatctgtaactccccttctaattct

SEQ ID NO: 13037 - DNA, 96 bp, Aspergillus novofumigatus
  misc_feature: 158
atctatcttttttttctttatttatttattattctaacctttaacttactatccctaactcttatttatattctaattctaattcttattctaatt

SEQ ID NO: 13038 - DNA, 96 bp, Aspergillus novofumigatus
  misc_feature: 158
aattcttttttaacttattctttaattcttattctaatccttaacttcctatattatttatttatttcttttcatctttataaattattaaaacct

SEQ ID NO: 13039 - DNA, 96 bp, Aspergillus novofumigatus
  misc_feature: 157
ttttttaacttattctttaattcttattctaatccttaacttcctatattatttatttatttcttttcatctttataaattattaaaacctaactt

SEQ ID NO: 13040 - DNA, 96 bp, Aspergillus novofumigatus
  misc_feature: 157
ttttctttatttatttattattctaacctttaacttactatccctaactcttatttatattctaattctaattcttattctaattcttattctaat

SEQ ID NO: 13041 - DNA, 96 bp, Aspergillus novofumigatus
  misc_feature: 157
tttaagagattagatagaagaagaggtagaagagaatttagggatagattaagaggagagaagaaggagtaataagagtagaaagggagataattt

SEQ ID NO: 13042 - DNA, 96 bp, Aspergillus novofumigatus
  misc_feature: 157
aagagattagatagaagaagaggtagaagagaatttagggatagattaagaggagagaagaaggagtaataagagtagaaagggagataatttaaa

SEQ ID NO: 13043 - DNA, 96 bp, Aspergillus novofumigatus
  misc_feature: 157
ttcttttattttctattttatttatttaatcttctatctatttatctatattttctttctctttttaatctatattctaatctttaacttactatc

SEQ ID NO: 13044 - DNA, 96 bp, Aspergillus novofumigatus
  misc_feature: 157
ttaatttactatcctttactattcttcttactatccttctatctctctctctaactcttttctaattctttctaattctcctcttatccttctttt

SEQ ID NO: 13045 - DNA, 96 bp, Aspergillus novofumigatus
  misc_feature: 157
tcttttttaacttattctttaattcttattctaatccttaacttcctatattatttatttatttcttttcatctttataaattattaaaacctaac

SEQ ID NO: 13046 - DNA, 96 bp, Aspergillus novofumigatus
  misc_feature: 157
tcttaatttactatcctttactattcttcttactatccttctatctctctctctaactcttttctaattctttctaattctcctcttatccttctt

SEQ ID NO: 13047 - DNA, 96 bp, Aspergillus novofumigatus
  misc_feature: 157
tatctatcttttttttctttatttatttattattctaacctttaacttactatccctaactcttatttatattctaattctaattcttattctaat

SEQ ID NO: 13048 - DNA, 96 bp, Aspergillus novofumigatus
  misc_feature: 157
tatatatctatcttttttttctttatttatttattattctaacctttaacttactatccctaactcttatttatattctaattctaattcttattc

SEQ ID NO: 13049 - DNA, 96 bp, Aspergillus novofumigatus
  misc_feature: 157
tagatagaagaagaggtagaagagaatttagggatagattaagaggagagaagaaggagtaataagagtagaaagggagataatttaaaaagagag

SEQ ID NO: 13050 - DNA, 96 bp, Aspergillus novofumigatus
  misc_feature: 157
tactatcctttactattcttcttactatccttctatctctctctctaactcttttctaattctttctaattctcctcttatccttcttttattttc

SEQ ID NO: 13051 - DNA, 96 bp, Aspergillus novofumigatus
  misc_feature: 157
attctaattcttattctaattcttattctaattctctttctagcaccttattctaattctttttctaactcttattttttttaattcttttttaac

SEQ ID NO: 13052 - DNA, 96 bp, Aspergillus novofumigatus
  misc_feature: 157
gtgaccagttggcggggggcccttgggggggcagaccggcaggcaggggcgcgcgccatagacagacacttgtagagacacacagacaccgggggc

SEQ ID NO: 13053 - DNA, 96 bp, Aspergillus novofumigatus
  misc_feature: 157
ggtgaccagttggcggggggcccttgggggggcagaccggcaggcaggggcgcgcgccatagacagacacttgtagagacacacagacaccggggg

SEQ ID NO: 13054 - DNA, 96 bp, Aspergillus novofumigatus
  misc_feature: 157
aggatattaaattattaatacaatattttttccttattaatacaatattaatttacttattaatactcttataatactgaatctaaccttagttag

SEQ ID NO: 13055 - DNA, 96 bp, Aspergillus novofumigatus
  misc_feature: 157
attatatatctatcttttttttctttatttatttattattctaacctttaacttactatccctaactcttatttatattctaattctaattcttat

SEQ ID NO: 13056 - DNA, 96 bp, Aspergillus novofumigatus
  misc_feature: 157
atctcttctctctatttctctcttaattcttactctatctcttactttacctctttctctatctctctcttctatctacacttactaccccttact

SEQ ID NO: 13057 - DNA, 96 bp, Aspergillus novofumigatus
  misc_feature: 157
atctctctctctaactcttttctaattctttctaattctcctcttatccttcttttattttctaattcttattttttctcttctatctatttatct

SEQ ID NO: 13058 - DNA, 96 bp, Aspergillus novofumigatus
  misc_feature: 157
atccttctatctctctctctaactcttttctaattctttctaattctcctcttatccttcttttattttctaattcttattttttctcttctatct

SEQ ID NO: 13059 - DNA, 96 bp, Aspergillus novofumigatus
  misc_feature: 156
tttttctttatttatttattattctaacctttaacttactatccctaactcttatttatattctaattctaattcttattctaattcttattctaa

SEQ ID NO: 13060 - DNA, 96 bp, Aspergillus novofumigatus
  misc_feature: 156
tttctctctttaattctgattctaatctttaatttactatctttaactcttcttctaatctttaatttactatctgtaactccccttctaattctt

SEQ ID NO: 13061 - DNA, 96 bp, Aspergillus novofumigatus
  misc_feature: 156
gaaggataagaggagaattagaaagaattagaagaagaggtagagagagaaatagaagaatagttaaggatagtaagtttagaattagaataagaa

SEQ ID NO: 13062 - DNA, 96 bp, Aspergillus novofumigatus
  misc_feature: 156
ttctatctctctctctaactcttttctaattctttctaattctcctcttatccttcttttattttctaattcttattttttctcttctatctattt

SEQ ID NO: 13063 - DNA, 96 bp, Aspergillus novofumigatus
  misc_feature: 156
atatctatcttttttttctttatttatttattattctaacctttaacttactatccctaactcttatttatattctaattctaattcttattctaa

SEQ ID NO: 13064 - DNA, 96 bp, Aspergillus novofumigatus
  misc_feature: 156
tatcctttactattcttcttactatccttctatctctctctctaactcttttctaattctttctaattctcctcttatccttcttttattttctaa

SEQ ID NO: 13065 - DNA, 96 bp, Aspergillus novofumigatus
  misc_feature: 156
ttaagagattagatagaagaagaggtagaagagaatttagggatagattaagaggagagaagaaggagtaataagagtagaaagggagataattta

SEQ ID NO: 13066 - DNA, 96 bp, Aspergillus novofumigatus
  misc_feature: 156
gattagatagaagaagaggtagaagagaatttagggatagattaagaggagagaagaaggagtaataagagtagaaagggagataatttaaaaaga

SEQ ID NO: 13067 - DNA, 96 bp, Aspergillus novofumigatus
  misc_feature: 156
tcttttattttctattttatttatttaatcttctatctatttatctatattttctttctctttttaatctatattctaatctttaacttactatct

SEQ ID NO: 13068 - DNA, 96 bp, Aspergillus novofumigatus
  misc_feature: 156
aggggttttaagagattagatagaagaagaggtagaagagaatttagggatagattaagaggagagaagaaggagtaataagagtagaaagggaga

SEQ ID NO: 13069 - DNA, 96 bp, Aspergillus novofumigatus
  misc_feature: 156
ataagaggagaattagaaagaattagaagaagaggtagagagagaaatagaagaatagttaaggatagtaagtttagaattagaataagaatttga

SEQ ID NO: 13070 - DNA, 96 bp, Aspergillus novofumigatus
  misc_feature: 156
tatttctctctttaattctgattctaatctttaatttactatctttaactcttcttctaatctttaatttactatctgtaactccccttctaattc

SEQ ID NO: 13071 - DNA, 96 bp, Aspergillus novofumigatus
  misc_feature: 156
tatatctatcttttttttctttatttatttattattctaacctttaacttactatccctaactcttatttatattctaattctaattcttattcta

SEQ ID NO: 13072 - DNA, 96 bp, Aspergillus novofumigatus
  misc_feature: 156
taggatattaaattattaatataatattttttccttattaatacaatattaatttacttattaatactcttataatactgaatctaaccttagtta

SEQ ID NO: 13073 - DNA, 96 bp, Aspergillus novofumigatus
  misc_feature: 156
tagaagaagaggtagaagagaatttagggatagattaagaggagagaagaaggagtaataagagtagaaagggagataatttaaaaagagagatat

SEQ ID NO: 13074 - DNA, 96 bp, Aspergillus novofumigatus
  misc_feature: 156
cttctctctatttctctcttaattcttactctatctcttactttacctctttctctatctctctcttctatctacacttactaccccttactctta

SEQ ID NO: 13075 - DNA, 96 bp, Aspergillus novofumigatus
  misc_feature: 156
gaagaagaggtagaagagaatttagggatagattaagaggagagaagaaggagtaataagagtagaaagggagataatttaaaaagagagatatag

SEQ ID NO: 13076 - DNA, 96 bp, Aspergillus novofumigatus
  misc_feature: 156
agattagatagaagaagaggtagaagagaatttagggatagattaagaggagagaagaaggagtaataagagtagaaagggagataatttaaaaag

SEQ ID NO: 13077 - DNA, 96 bp, Aspergillus novofumigatus
  misc_feature: 156
aaagagagtgattaattatagaagataagagaatcagggatagagagaataaggataaaaagagagtagattaattataatataagagagaagaag

SEQ ID NO: 13078 - DNA, 96 bp, Aspergillus novofumigatus
  misc_feature: 156
cttctatctctctctctaactcttttctaattctttctaattctcctcttatccttcttttattttctaattcttattttttctcttctatctatt

SEQ ID NO: 13079 - DNA, 96 bp, Aspergillus novofumigatus
  misc_feature: 156
cttaatttactatcctttactattcttcttactatccttctatctctctctctaactcttttctaattctttctaattctcctcttatccttcttt

SEQ ID NO: 13080 - DNA, 96 bp, Aspergillus novofumigatus
  misc_feature: 156
ctatcttttttttctttatttatttattattctaacctttaacttactatccctaactcttatttatattctaattctaattcttattctaattct

SEQ ID NO: 13081 - DNA, 96 bp, Aspergillus novofumigatus
  misc_feature: 156
agaccggcaggcaggggcgcgcgccatagacagacacttgtagagacacacagacaccggggtcggtataggccgggcgcgcgcgccccggggggg

SEQ ID NO: 13082 - DNA, 96 bp, Aspergillus novofumigatus
  misc_feature: 156
atcctttactattcttcttactatccttctatctctctctctaactcttttctaattctttctaattctcctcttatccttcttttattttctaat

SEQ ID NO: 13083 - DNA, 96 bp, Aspergillus novofumigatus
  misc_feature: 156
agaagaggtagaagagaatttagggatagattaagaggagagaagaaggagtaataagagtagaaagggagataatttaaaaagagagatatagtt

SEQ ID NO: 13084 - DNA, 96 bp, Aspergillus novofumigatus
  misc_feature: 156
actatcctttactattcttcttactatccttctatctctctctctaactcttttctaattctttctaattctcctcttatccttcttttattttct

SEQ ID NO: 13085 - DNA, 96 bp, Aspergillus novofumigatus
  misc_feature: 156
aagaagaggtagaagagaatttagggatagattaagaggagagaagaaggagtaataagagtagaaagggagataatttaaaaagagagatatagt

SEQ ID NO: 13086 - DNA, 96 bp, Aspergillus novofumigatus
  misc_feature: 155
gagattagatagaagaagaggtagaagagaatttagggatagattaagaggagagaagaaggagtaataagagtagaaagggagataatttaaaaa

SEQ ID NO: 13087 - DNA, 96 bp, Aspergillus novofumigatus
  misc_feature: 155
ttttctattttatttatttaatcttctatctatttatctatattttctttctctttttaatctatattctaatctttaacttactatctttaactc

SEQ ID NO: 13088 - DNA, 96 bp, Aspergillus novofumigatus
  misc_feature: 155
ttttaagagattagatagaagaagaggtagaagagaatttagggatagattaagaggagagaagaaggagtaataagagtagaaagggagataatt

SEQ ID NO: 13089 - DNA, 96 bp, Aspergillus novofumigatus
  misc_feature: 155
ttcttcttttaaattcttattttaattcttaacttactctctttaatcctctttctaactctccctctaattcttattctaattcttaatttacta

SEQ ID NO: 13090 - DNA, 96 bp, Aspergillus novofumigatus
  misc_feature: 155
ggttttaagagattagatagaagaagaggtagaagagaatttagggatagattaagaggagagaagaaggagtaataagagtagaaagggagataa

SEQ ID NO: 13091 - DNA, 96 bp, Aspergillus novofumigatus
  misc_feature: 155
tcttctctctatttctctcttaattcttactctatctcttactttacctctttctctatctctctcttctatctacacttactaccccttactctt

SEQ ID NO: 13092 - DNA, 96 bp, Aspergillus novofumigatus
  misc_feature: 155
tcttatccttatcttaatcctaattctaattcttcttttaaattcttattttaattcttaacttactctctttaatcctctttctaactctccctc

SEQ ID NO: 13093 - DNA, 96 bp, Aspergillus novofumigatus
  misc_feature: 155
tctatcttttttttctttatttatttattattctaacctttaacttactatccctaactcttatttatattctaattctaattcttattctaattc

SEQ ID NO: 13094 - DNA, 96 bp, Aspergillus novofumigatus
  misc_feature: 155
tcctttactattcttcttactatccttctatctctctctctaactcttttctaattctttctaattctcctcttatccttcttttattttctaatt

SEQ ID NO: 13095 - DNA, 96 bp, Aspergillus novofumigatus
  misc_feature: 155
tccttctatctctctctctaactcttttctaattctttctaattctcctcttatccttcttttattttctaattcttattttttctcttctatcta

SEQ ID NO: 13096 - DNA, 96 bp, Aspergillus novofumigatus
  misc_feature: 155
agaagaagaggtagaagagaatttagggatagattaagaggagagaagaaggagtaataagagtagaaagggagataatttaaaaagagagatata

SEQ ID NO: 13097 - DNA, 96 bp, Aspergillus novofumigatus
  misc_feature: 155
taggatattaaattattaatacaatattttttccttattaatacaatattaatttacttattaatactcttataatactgaatctaaccttagtta

SEQ ID NO: 13098 - DNA, 96 bp, Aspergillus novofumigatus
  misc_feature: 155
taagaggagaattagaaagaattagaagaagaggtagagagagaaatagaagaatagttaaggatagtaagtttagaattagaataagaatttgag

SEQ ID NO: 13099 - DNA, 96 bp, Aspergillus novofumigatus
  misc_feature: 155
aggaagaagatattcagagttagagatataagaaagaaagagagaaagagaagagagaaagaattatagatagagattaatataagtaagagttta

SEQ ID NO: 13100 - DNA, 96 bp, Aspergillus novofumigatus
  misc_feature: 155
aagaggtagaagagaatttagggatagattaagaggagagaagaaggagtaataagagtagaaagggagataatttaaaaagagagatatagttta

SEQ ID NO: 13101 - DNA, 96 bp, Aspergillus novofumigatus
  misc_feature: 155
gatagaagaagaggtagaagagaatttagggatagattaagaggagagaagaaggagtaataagagtagaaagggagataatttaaaaagagagat

SEQ ID NO: 13102 - DNA, 96 bp, Aspergillus novofumigatus
  misc_feature: 155
gataagaggagaattagaaagaattagaagaagaggtagagagagaaatagaagaatagttaaggatagtaagtttagaattagaataagaatttg

SEQ ID NO: 13103 - DNA, 96 bp, Aspergillus novofumigatus
  misc_feature: 155
cttcttttattttctattttatttatttaatcttctatctatttatctatattttctttctctttttaatctatattctaatctttaacttactat

SEQ ID NO: 13104 - DNA, 96 bp, Aspergillus novofumigatus
  misc_feature: 155
cttatccttatcttaatcctaattctaattcttcttttaaattcttattttaattcttaacttactctctttaatcctctttctaactctccctct

SEQ ID NO: 13105 - DNA, 96 bp, Aspergillus novofumigatus
  misc_feature: 155
attaggatattaaattattaatacaatattttttccttattaatacaatattaatttacttattaatactcttataatactgaatctaaccttagt

SEQ ID NO: 13106 - DNA, 96 bp, Aspergillus novofumigatus
  misc_feature: 155
atatatctatcttttttttctttatttatttattattctaacctttaacttactatccctaactcttatttatattctaattctaattcttattct

SEQ ID NO: 13107 - DNA, 96 bp, Aspergillus novofumigatus
  misc_feature: 155
aggataagaggagaattagaaagaattagaagaagaggtagagagagaaatagaagaatagttaaggatagtaagtttagaattagaataagaatt

SEQ ID NO: 13108 - DNA, 96 bp, Aspergillus novofumigatus
  misc_feature: 154
tttattttctattttatttatttaatcttctatctatttatctatattttctttctctttttaatctatattctaatctttaacttactatcttta

SEQ ID NO: 13109 - DNA, 96 bp, Aspergillus novofumigatus
  misc_feature: 154
ttcttatccttatcttaatcctaattctaattcttcttttaaattcttattttaattcttaacttactctctttaatcctctttctaactctccct

SEQ ID NO: 13110 - DNA, 96 bp, Aspergillus novofumigatus
  misc_feature: 154
ttctctctatttctctcttaattcttactctatctcttactttacctctttctctatctctctcttctatctacacttactaccccttactcttat

SEQ ID NO: 13111 - DNA, 96 bp, Aspergillus novofumigatus
  misc_feature: 154
ttattttctattttatttatttaatcttctatctatttatctatattttctttctctttttaatctatattctaatctttaacttactatctttaa

SEQ ID NO: 13112 - DNA, 96 bp, Aspergillus novofumigatus
  misc_feature: 154
ttatccttatcttaatcctaattctaattcttcttttaaattcttattttaattcttaacttactctctttaatcctctttctaactctccctcta

SEQ ID NO: 13113 - DNA, 96 bp, Aspergillus novofumigatus
  misc_feature: 154
ttaaattaggatattaaattattaatataatattttttccttattaatacaatattaatttacttattaatactcttataatactgaatctaacct

SEQ ID NO: 13114 - DNA, 96 bp, Aspergillus novofumigatus
  misc_feature: 154
agaggtagaagagaatttagggatagattaagaggagagaagaaggagtaataagagtagaaagggagataatttaaaaagagagatatagtttaa

SEQ ID NO: 13115 - DNA, 96 bp, Aspergillus novofumigatus
  misc_feature: 154
tcttcttttaaattcttattttaattcttaacttactctctttaatcctctttctaactctccctctaattcttattctaattcttaatttactat

SEQ ID NO: 13116 - DNA, 96 bp, Aspergillus novofumigatus
  misc_feature: 154
agaaggataagaggagaattagaaagaattagaagaagaggtagagagagaaatagaagaatagttaaggatagtaagtttagaattagaataaga

SEQ ID NO: 13117 - DNA, 96 bp, Aspergillus novofumigatus
  misc_feature: 154
tctcttattctatctctctcttactccctctctcctctatctcttcttaatctcctctcttatcccttctaatctaaatccttacccttactctta

SEQ ID NO: 13118 - DNA, 96 bp, Aspergillus novofumigatus
  misc_feature: 154
agatagaagaagaggtagaagagaatttagggatagattaagaggagagaagaaggagtaataagagtagaaagggagataatttaaaaagagaga

SEQ ID NO: 13119 - DNA, 96 bp, Aspergillus novofumigatus
  misc_feature: 154
tatcttttttttctttatttatttattattctaacctttaacttactatccctaactcttatttatattctaattctaattcttattctaattctt

SEQ ID NO: 13120 - DNA, 96 bp, Aspergillus novofumigatus
  misc_feature: 154
atagaagaagaggtagaagagaatttagggatagattaagaggagagaagaaggagtaataagagtagaaagggagataatttaaaaagagagata

SEQ ID NO: 13121 - DNA, 96 bp, Aspergillus novofumigatus
  misc_feature: 154
tatccttctatctctctctctaactcttttctaattctttctaattctcctcttatccttcttttattttctaattcttattttttctcttctatc

SEQ ID NO: 13122 - DNA, 96 bp, Aspergillus novofumigatus
  misc_feature: 154
gttttaagagattagatagaagaagaggtagaagagaatttagggatagattaagaggagagaagaaggagtaataagagtagaaagggagataat

SEQ ID NO: 13123 - DNA, 96 bp, Aspergillus novofumigatus
  misc_feature: 154
attcttatccttatcttaatcctaattctaattcttcttttaaattcttattttaattcttaacttactctctttaatcctctttctaactctccc

SEQ ID NO: 13124 - DNA, 96 bp, Aspergillus novofumigatus
  misc_feature: 154
gatattaaattattaatataatattttttccttattaatacaatattaatttacttattaatactcttataatactgaatctaaccttagttagat

SEQ ID NO: 13125 - DNA, 96 bp, Aspergillus novofumigatus
  misc_feature: 154
cttcttttaaattcttattttaattcttaacttactctctttaatcctctttctaactctccctctaattcttattctaattcttaatttactatc

SEQ ID NO: 13126 - DNA, 96 bp, Aspergillus novofumigatus
  misc_feature: 154
gaggtagaagagaatttagggatagattaagaggagagaagaaggagtaataagagtagaaagggagataatttaaaaagagagatatagtttaag

SEQ ID NO: 13127 - DNA, 96 bp, Aspergillus novofumigatus
  misc_feature: 154
gaagaggtagaagagaatttagggatagattaagaggagagaagaaggagtaataagagtagaaagggagataatttaaaaagagagatatagttt

SEQ ID NO: 13128 - DNA, 96 bp, Aspergillus novofumigatus
  misc_feature: 154
aagaaggataagaggagaattagaaagaattagaagaagaggtagagagagaaatagaagaatagttaaggatagtaagtttagaattagaataag

SEQ ID NO: 13129 - DNA, 96 bp, Aspergillus novofumigatus
  misc_feature: 154
attagatagaagaagaggtagaagagaatttagggatagattaagaggagagaagaaggagtaataagagtagaaagggagataatttaaaaagag

SEQ ID NO: 13130 - DNA, 96 bp, Aspergillus novofumigatus
  misc_feature: 154
ctcttaaactcttacttatattaatctctatctataattctttctctcttctctttctctctttctttcttatatctctaactctgaatatcttct

SEQ ID NO: 13131 - DNA, 96 bp, Aspergillus novofumigatus
  misc_feature: 154
ctatccttctatctctctctctaactcttttctaattctttctaattctcctcttatccttcttttattttctaattcttattttttctcttctat

SEQ ID NO: 13132 - DNA, 96 bp, Aspergillus novofumigatus
  misc_feature: 154
aggatattaaattattaatataatattttttccttattaatacaatattaatttacttattaatactcttataatactgaatctaaccttagttag

SEQ ID NO: 13133 - DNA, 96 bp, Aspergillus novofumigatus
  misc_feature: 154
aagaggagaattagaaagaattagaagaagaggtagagagagaaatagaagaatagttaaggatagtaagtttagaattagaataagaatttgagg

SEQ ID NO: 13134 - DNA, 96 bp, Aspergillus novofumigatus
  misc_feature: 154
attttctattttatttatttaatcttctatctatttatctatattttctttctctttttaatctatattctaatctttaacttactatctttaact

SEQ ID NO: 13135 - DNA, 96 bp, Aspergillus novofumigatus
  misc_feature: 154
attcttcttttaaattcttattttaattcttaacttactctctttaatcctctttctaactctccctctaattcttattctaattcttaatttact

SEQ ID NO: 13136 - DNA, 96 bp, Aspergillus novofumigatus
  misc_feature: 154
aaggataagaggagaattagaaagaattagaagaagaggtagagagagaaatagaagaatagttaaggatagtaagtttagaattagaataagaat

SEQ ID NO: 13137 - DNA, 96 bp, Aspergillus novofumigatus
  misc_feature: 153
ttttattttctattttatttatttaatcttctatctatttatctatattttctttctctttttaatctatattctaatctttaacttactatcttt

SEQ ID NO: 13138 - DNA, 96 bp, Aspergillus novofumigatus
  misc_feature: 153
ttttatctcttctctctatttctctcttaattcttactctatctcttactttacctctttctctatctctctcttctatctacacttactacccct

SEQ ID NO: 13139 - DNA, 96 bp, Aspergillus novofumigatus
  misc_feature: 153
tttatctcttctctctatttctctcttaattcttactctatctcttactttacctctttctctatctctctcttctatctacacttactacccctt

SEQ ID NO: 13140 - DNA, 96 bp, Aspergillus novofumigatus
  misc_feature: 153
ttctattttatttatttaatcttctatctatttatctatattttctttctctttttaatctatattctaatctttaacttactatctttaactctt

SEQ ID NO: 13141 - DNA, 96 bp, Aspergillus novofumigatus
  misc_feature: 153
ttctatctcttattctatctctctcttactccctctctcctctatctcttcttaatctcctctcttatcccttctaatctaaatccttacccttac

SEQ ID NO: 13142 - DNA, 96 bp, Aspergillus novofumigatus
  misc_feature: 153
ttattcttatccttatcttaatcctaattctaattcttcttttaaattcttattttaattcttaacttactctctttaatcctctttctaactctc

SEQ ID NO: 13143 - DNA, 96 bp, Aspergillus novofumigatus
  misc_feature: 153
ttatccttcttttattttctattttatttatttaatcttctatctatttatctatattttctttctctttttaatctatattctaatctttaactt

SEQ ID NO: 13144 - DNA, 96 bp, Aspergillus novofumigatus
  misc_feature: 153
ttagatagaagaagaggtagaagagaatttagggatagattaagaggagagaagaaggagtaataagagtagaaagggagataatttaaaaagaga

SEQ ID NO: 13145 - DNA, 96 bp, Aspergillus novofumigatus
  misc_feature: 153
tcttatccttcttttattttctattttatttatttaatcttctatctatttatctatattttctttctctttttaatctatattctaatctttaac

SEQ ID NO: 13146 - DNA, 96 bp, Aspergillus novofumigatus
  misc_feature: 153
tctatctcttattctatctctctcttactccctctctcctctatctcttcttaatctcctctcttatcccttctaatctaaatccttacccttact

SEQ ID NO: 13147 - DNA, 96 bp, Aspergillus novofumigatus
  misc_feature: 153
aaaggggttttaagagattagatagaagaagaggtagaagagaatttagggatagattaagaggagagaagaaggagtaataagagtagaaaggga

SEQ ID NO: 13148 - DNA, 96 bp, Aspergillus novofumigatus
  misc_feature: 153
gaggagaattagaaagaattagaagaagaggtagagagagaaatagaagaatagttaaggatagtaagtttagaattagaataagaatttgaggga

SEQ ID NO: 13149 - DNA, 96 bp, Aspergillus novofumigatus
  misc_feature: 153
tatctcttctctctatttctctcttaattcttactctatctcttactttacctctttctctatctctctcttctatctacacttactaccccttac

SEQ ID NO: 13150 - DNA, 96 bp, Aspergillus novofumigatus
  misc_feature: 153
gaggaagggttagttagtttaataaggaagaagatattcagagttagagatataagaaagaaagagagaaagagaagagagaaagaattatagata

SEQ ID NO: 13151 - DNA, 96 bp, Aspergillus novofumigatus
  misc_feature: 153
tactatccttctatctctctctctaactcttttctaattctttctaattctcctcttatccttcttttattttctaattcttattttttctcttct

SEQ ID NO: 13152 - DNA, 96 bp, Aspergillus novofumigatus
  misc_feature: 153
cctttttatctcttctctctatttctctcttaattcttactctatctcttactttacctctttctctatctctctcttctatctacacttactacc

SEQ ID NO: 13153 - DNA, 96 bp, Aspergillus novofumigatus
  misc_feature: 153
cttttattttctattttatttatttaatcttctatctatttatctatattttctttctctttttaatctatattctaatctttaacttactatctt

SEQ ID NO: 13154 - DNA, 96 bp, Aspergillus novofumigatus
  misc_feature: 153
aaggggttttaagagattagatagaagaagaggtagaagagaatttagggatagattaagaggagagaagaaggagtaataagagtagaaagggag

SEQ ID NO: 13155 - DNA, 96 bp, Aspergillus novofumigatus
  misc_feature: 153
ccttctatctctctctctaactcttttctaattctttctaattctcctcttatccttcttttattttctaattcttattttttctcttctatctat

SEQ ID NO: 13156 - DNA, 96 bp, Aspergillus novofumigatus
  misc_feature: 153
aaaaggggttttaagagattagatagaagaagaggtagaagagaatttagggatagattaagaggagagaagaaggagtaataagagtagaaaggg

SEQ ID NO: 13157 - DNA, 96 bp, Aspergillus novofumigatus
  misc_feature: 153
agaggagaattagaaagaattagaagaagaggtagagagagaaatagaagaatagttaaggatagtaagtttagaattagaataagaatttgaggg

SEQ ID NO: 13158 - DNA, 96 bp, Aspergillus novofumigatus
  misc_feature: 153
atattaaattattaatataatattttttccttattaatacaatattaatttacttattaatactcttataatactgaatctaaccttagttagatt

SEQ ID NO: 13159 - DNA, 96 bp, Aspergillus novofumigatus
  misc_feature: 152
ttttttctttatttatttattattctaacctttaacttactatccctaactcttatttatattctaattctaattcttattctaattcttattcta

SEQ ID NO: 13160 - DNA, 96 bp, Aspergillus novofumigatus
  misc_feature: 152
ttcttttaaattcttattttaattcttaacttactctctttaatcctctttctaactctccctctaattcttattctaattcttaatttactatcc

SEQ ID NO: 13161 - DNA, 96 bp, Aspergillus novofumigatus
  misc_feature: 152
ttattttaattcttaacttactctctttaatcctctttctaactctccctctaattcttattctaattcttaatttactatcctttactattcttc

SEQ ID NO: 13162 - DNA, 96 bp, Aspergillus novofumigatus
  misc_feature: 152
ttaggatattaaattattaatataatattttttccttattaatacaatattaatttacttattaatactcttataatactgaatctaaccttagtt

SEQ ID NO: 13163 - DNA, 96 bp, Aspergillus novofumigatus
  misc_feature: 152
ttaggatattaaattattaatacaatattttttccttattaatacaatattaatttacttattaatactcttataatactgaatctaaccttagtt

SEQ ID NO: 13164 - DNA, 96 bp, Aspergillus novofumigatus
  misc_feature: 152
ggatattaaattattaatataatattttttccttattaatacaatattaatttacttattaatactcttataatactgaatctaaccttagttaga

SEQ ID NO: 13165 - DNA, 96 bp, Aspergillus novofumigatus
  misc_feature: 152
tcactcttaaactcttacttatattaatctctatctataattctttctctcttctctttctctctttctttcttatatctctaactctgaatatct

SEQ ID NO: 13166 - DNA, 96 bp, Aspergillus novofumigatus
  misc_feature: 152
tattttctattttatttatttaatcttctatctatttatctatattttctttctctttttaatctatattctaatctttaacttactatctttaac

SEQ ID NO: 13167 - DNA, 96 bp, Aspergillus novofumigatus
  misc_feature: 152
tattcttatccttatcttaatcctaattctaattcttcttttaaattcttattttaattcttaacttactctctttaatcctctttctaactctcc

SEQ ID NO: 13168 - DNA, 96 bp, Aspergillus novofumigatus
  misc_feature: 152
tattaaattattaatataatattttttccttattaatacaatattaatttacttattaatactcttataatactgaatctaaccttagttagattt

SEQ ID NO: 13169 - DNA, 96 bp, Aspergillus novofumigatus
  misc_feature: 152
tatctcttattctatctctctcttactccctctctcctctatctcttcttaatctcctctcttatcccttctaatctaaatccttacccttactct

SEQ ID NO: 13170 - DNA, 96 bp, Aspergillus novofumigatus
  misc_feature: 152
tatccttcttttattttctattttatttatttaatcttctatctatttatctatattttctttctctttttaatctatattctaatctttaactta

SEQ ID NO: 13171 - DNA, 96 bp, Aspergillus novofumigatus
  misc_feature: 152
ccttcttttattttctattttatttatttaatcttctatctatttatctatattttctttctctttttaatctatattctaatctttaacttacta

SEQ ID NO: 13172 - DNA, 96 bp, Aspergillus novofumigatus
  misc_feature: 152
ctatcctttactattcttcttactatccttctatctctctctctaactcttttctaattctttctaattctcctcttatccttcttttattttcta

SEQ ID NO: 13173 - DNA, 96 bp, Aspergillus novofumigatus
  misc_feature: 152
aaattaggatattaaattattaatataatattttttccttattaatacaatattaatttacttattaatactcttataatactgaatctaacctta

SEQ ID NO: 13174 - DNA, 96 bp, Aspergillus novofumigatus
  misc_feature: 152
attctatctcttattctatctctctcttactccctctctcctctatctcttcttaatctcctctcttatcccttctaatctaaatccttaccctta

SEQ ID NO: 13175 - DNA, 96 bp, Aspergillus novofumigatus
  misc_feature: 152
taaattaggatattaaattattaatataatattttttccttattaatacaatattaatttacttattaatactcttataatactgaatctaacctt

SEQ ID NO: 13176 - DNA, 96 bp, Aspergillus novofumigatus
  misc_feature: 152
ctttttatctcttctctctatttctctcttaattcttactctatctcttactttacctctttctctatctctctcttctatctacacttactaccc

SEQ ID NO: 13177 - DNA, 96 bp, Aspergillus novofumigatus
  misc_feature: 152
cttttaaattcttattttaattcttaacttactctctttaatcctctttctaactctccctctaattcttattctaattcttaatttactatcctt

SEQ ID NO: 13178 - DNA, 96 bp, Aspergillus novofumigatus
  misc_feature: 152
aaaaaaggggttttaagagattagatagaagaagaggtagaagagaatttagggatagattaagaggagagaagaaggagtaataagagtagaaag

SEQ ID NO: 13179 - DNA, 96 bp, Aspergillus novofumigatus
  misc_feature: 152
ctttactattcttcttactatccttctatctctctctctaactcttttctaattctttctaattctcctcttatccttcttttattttctaattct

SEQ ID NO: 13180 - DNA, 96 bp, Aspergillus novofumigatus
  misc_feature: 152
cttattcttatccttatcttaatcctaattctaattcttcttttaaattcttattttaattcttaacttactctctttaatcctctttctaactct

SEQ ID NO: 13181 - DNA, 96 bp, Aspergillus novofumigatus
  misc_feature: 152
cttatccttcttttattttctattttatttatttaatcttctatctatttatctatattttctttctctttttaatctatattctaatctttaact

SEQ ID NO: 13182 - DNA, 96 bp, Aspergillus novofumigatus
  misc_feature: 152
aaaagcaaaaaaaggggttttaagagattagatagaagaagaggtagaagagaatttagggatagattaagaggagagaagaaggagtaataagag

SEQ ID NO: 13183 - DNA, 96 bp, Aspergillus novofumigatus
  misc_feature: 152
aattaggatattaaattattaatataatattttttccttattaatacaatattaatttacttattaatactcttataatactgaatctaaccttag

SEQ ID NO: 13184 - DNA, 96 bp, Aspergillus novofumigatus
  misc_feature: 152
aagagagtgattaattatagaagataagagaatcagggatagagagaataaggataaaaagagagtagattaattataatataagagagaagaagg

SEQ ID NO: 13185 - DNA, 96 bp, Aspergillus novofumigatus
  misc_feature: 152
atccttatcttaatcctaattctaattcttcttttaaattcttattttaattcttaacttactctctttaatcctctttctaactctccctctaat

SEQ ID NO: 13186 - DNA, 96 bp, Aspergillus novofumigatus
  misc_feature: 152
atctcttattctatctctctcttactccctctctcctctatctcttcttaatctcctctcttatcccttctaatctaaatccttacccttactctt

SEQ ID NO: 13187 - DNA, 96 bp, Aspergillus novofumigatus
  misc_feature: 151
tttttatctcttctctctatttctctcttaattcttactctatctcttactttacctctttctctatctctctcttctatctacacttactacccc

SEQ ID NO: 13188 - DNA, 96 bp, Aspergillus novofumigatus
  misc_feature: 151
ttctaattcttcttttaaattcttattttaattcttaacttactctctttaatcctctttctaactctccctctaattcttattctaattcttaat

SEQ ID NO: 13189 - DNA, 96 bp, Aspergillus novofumigatus
  misc_feature: 151
ttatctcttctctctatttctctcttaattcttactctatctcttactttacctctttctctatctctctcttctatctacacttactacccctta

SEQ ID NO: 13190 - DNA, 96 bp, Aspergillus novofumigatus
  misc_feature: 151
tatccttatcttaatcctaattctaattcttcttttaaattcttattttaattcttaacttactctctttaatcctctttctaactctccctctaa

SEQ ID NO: 13191 - DNA, 96 bp, Aspergillus novofumigatus
  misc_feature: 151
ttaattcttactctatctcttactttacctctttctctatctctctcttctatctacacttactaccccttactcttattctatttcttactctcc

SEQ ID NO: 13192 - DNA, 96 bp, Aspergillus novofumigatus
  misc_feature: 151
tcttttaaattcttattttaattcttaacttactctctttaatcctctttctaactctccctctaattcttattctaattcttaatttactatcct

SEQ ID NO: 13193 - DNA, 96 bp, Aspergillus novofumigatus
  misc_feature: 151
aggtagaagagaatttagggatagattaagaggagagaagaaggagtaataagagtagaaagggagataatttaaaaagagagatatagtttaaga

SEQ ID NO: 13194 - DNA, 96 bp, Aspergillus novofumigatus
  misc_feature: 151
ggaagggttagttagtttaataaggaagaagatattcagagttagagatataagaaagaaagagagaaagagaagagagaaagaattatagataga

SEQ ID NO: 13195 - DNA, 96 bp, Aspergillus novofumigatus
  misc_feature: 151
tccttcttttattttctattttatttatttaatcttctatctatttatctatattttctttctctttttaatctatattctaatctttaacttact

SEQ ID NO: 13196 - DNA, 96 bp, Aspergillus novofumigatus
  misc_feature: 151
tccttatcttaatcctaattctaattcttcttttaaattcttattttaattcttaacttactctctttaatcctctttctaactctccctctaatt

SEQ ID NO: 13197 - DNA, 96 bp, Aspergillus novofumigatus
  misc_feature: 151
tattttatttatttaatcttctatctatttatctatattttctttctctttttaatctatattctaatctttaacttactatctttaactcttctt

SEQ ID NO: 13198 - DNA, 96 bp, Aspergillus novofumigatus
  misc_feature: 151
agggagatagtaagataggtagtaagataataagtaaatagataagtagggtagtaagatagtaatgcaggtaaaaggccccaaggagattatata

SEQ ID NO: 13199 - DNA, 96 bp, Aspergillus novofumigatus
  misc_feature: 151
gggagatagtaagataggtagtaagataataagtaaatagataagtagggtagtaagatagtaatgcaggtaaaaggccccaaggagattatatat

SEQ ID NO: 13200 - DNA, 96 bp, Aspergillus novofumigatus
  misc_feature: 151
ctcactcttaaactcttacttatattaatctctatctataattctttctctcttctctttctctctttctttcttatatctctaactctgaatatc

SEQ ID NO: 13201 - DNA, 96 bp, Aspergillus novofumigatus
  misc_feature: 151
cctttactattcttcttactatccttctatctctctctctaactcttttctaattctttctaattctcctcttatccttcttttattttctaattc

SEQ ID NO: 13202 - DNA, 96 bp, Aspergillus novofumigatus
  misc_feature: 151
actcttaaactcttacttatattaatctctatctataattctttctctcttctctttctctctttctttcttatatctctaactctgaatatcttc

SEQ ID NO: 13203 - DNA, 96 bp, Aspergillus novofumigatus
  misc_feature: 151
aggagaattagaaagaattagaagaagaggtagagagagaaatagaagaatagttaaggatagtaagtttagaattagaataagaatttgagggag

SEQ ID NO: 13204 - DNA, 96 bp, Aspergillus novofumigatus
  misc_feature: 151
cctcactcttaaactcttacttatattaatctctatctataattctttctctcttctctttctctctttctttcttatatctctaactctgaatat

SEQ ID NO: 13205 - DNA, 96 bp, Aspergillus novofumigatus
  misc_feature: 151
agagagtgattaattatagaagataagagaatcagggatagagagaataaggataaaaagagagtagattaattataatataagagagaagaaggg

SEQ ID NO: 13206 - DNA, 96 bp, Aspergillus novofumigatus
  misc_feature: 151
cactcttaaactcttacttatattaatctctatctataattctttctctcttctctttctctctttctttcttatatctctaactctgaatatctt

SEQ ID NO: 13207 - DNA, 96 bp, Aspergillus novofumigatus
  misc_feature: 151
agttagtttaataaggaagaagatattcagagttagagatataagaaagaaagagagaaagagaagagagaaagaattatagatagagattaatat

SEQ ID NO: 13208 - DNA, 96 bp, Aspergillus novofumigatus
  misc_feature: 151
aaggaagaagatattcagagttagagatataagaaagaaagagagaaagagaagagagaaagaattatagatagagattaatataagtaagagttt

SEQ ID NO: 13209 - DNA, 96 bp, Aspergillus novofumigatus
  misc_feature: 150
ttttaaattcttattttaattcttaacttactctctttaatcctctttctaactctccctctaattcttattctaattcttaatttactatccttt

SEQ ID NO: 13210 - DNA, 96 bp, Aspergillus novofumigatus
  misc_feature: 150
aaaaaaaggggttttaagagattagatagaagaagaggtagaagagaatttagggatagattaagaggagagaagaaggagtaataagagtagaaa

SEQ ID NO: 13211 - DNA, 96 bp, Aspergillus novofumigatus
  misc_feature: 150
ttactatccttctatctctctctctaactcttttctaattctttctaattctcctcttatccttcttttattttctaattcttattttttctcttc

SEQ ID NO: 13212 - DNA, 96 bp, Aspergillus novofumigatus
  misc_feature: 150
attctaattcttcttttaaattcttattttaattcttaacttactctctttaatcctctttctaactctccctctaattcttattctaattcttaa

SEQ ID NO: 13213 - DNA, 96 bp, Aspergillus novofumigatus
  misc_feature: 150
ctcttatccttcttttattttctattttatttatttaatcttctatctatttatctatattttctttctctttttaatctatattctaatctttaa

SEQ ID NO: 13214 - DNA, 96 bp, Aspergillus novofumigatus
  misc_feature: 150
tcttattttaattcttaacttactctctttaatcctctttctaactctccctctaattcttattctaattcttaatttactatcctttactattct

SEQ ID NO: 13215 - DNA, 96 bp, Aspergillus novofumigatus
  misc_feature: 150
tctattttatttatttaatcttctatctatttatctatattttctttctctttttaatctatattctaatctttaacttactatctttaactcttc

SEQ ID NO: 13216 - DNA, 96 bp, Aspergillus novofumigatus
  misc_feature: 150
tcctcttatccttcttttattttctattttatttatttaatcttctatctatttatctatattttctttctctttttaatctatattctaatcttt

SEQ ID NO: 13217 - DNA, 96 bp, Aspergillus novofumigatus
  misc_feature: 150
tattttaattcttaacttactctctttaatcctctttctaactctccctctaattcttattctaattcttaatttactatcctttactattcttct

SEQ ID NO: 13218 - DNA, 96 bp, Aspergillus novofumigatus
  misc_feature: 150
tatctctctctctaactcttttctaattctttctaattctcctcttatccttcttttattttctaattcttattttttctcttctatctatttatc

SEQ ID NO: 13219 - DNA, 96 bp, Aspergillus novofumigatus
  misc_feature: 150
tactattcttcttactatccttctatctctctctctaactcttttctaattctttctaattctcctcttatccttcttttattttctaattcttat

SEQ ID NO: 13220 - DNA, 96 bp, Aspergillus novofumigatus
  misc_feature: 150
taattcttactctatctcttactttacctctttctctatctctctcttctatctacacttactaccccttactcttattctatttcttactctcct

SEQ ID NO: 13221 - DNA, 96 bp, Aspergillus novofumigatus
  misc_feature: 150
aaattaggatattaaattattaatacaatattttttccttattaatacaatattaatttacttattaatactcttataatactgaatctaacctta

SEQ ID NO: 13222 - DNA, 96 bp, Aspergillus novofumigatus
  misc_feature: 150
atcttttttttctttatttatttattattctaacctttaacttactatccctaactcttatttatattctaattctaattcttattctaattctta

SEQ ID NO: 13223 - DNA, 96 bp, Aspergillus novofumigatus
  misc_feature: 150
taaattcttattttaattcttaacttactctctttaatcctctttctaactctccctctaattcttattctaattcttaatttactatcctttact

SEQ ID NO: 13224 - DNA, 96 bp, Aspergillus novofumigatus
  misc_feature: 150
taaattaggatattaaattattaatacaatattttttccttattaatacaatattaatttacttattaatactcttataatactgaatctaacctt

SEQ ID NO: 13225 - DNA, 96 bp, Aspergillus novofumigatus
  misc_feature: 150
atccttcttttattttctattttatttatttaatcttctatctatttatctatattttctttctctttttaatctatattctaatctttaacttac

SEQ ID NO: 13226 - DNA, 96 bp, Aspergillus novofumigatus
  misc_feature: 150
ctatctcttattctatctctctcttactccctctctcctctatctcttcttaatctcctctcttatcccttctaatctaaatccttacccttactc

SEQ ID NO: 13227 - DNA, 96 bp, Aspergillus novofumigatus
  misc_feature: 150
gagagtgattaattatagaagataagagaatcagggatagagagaataaggataaaaagagagtagattaattataatataagagagaagaagggt

SEQ ID NO: 13228 - DNA, 96 bp, Aspergillus novofumigatus
  misc_feature: 150
cttattttaattcttaacttactctctttaatcctctttctaactctccctctaattcttattctaattcttaatttactatcctttactattctt

SEQ ID NO: 13229 - DNA, 96 bp, Aspergillus novofumigatus
  misc_feature: 150
ctaattctaattcttcttttaaattcttattttaattcttaacttactctctttaatcctctttctaactctccctctaattcttattctaattct

SEQ ID NO: 13230 - DNA, 96 bp, Aspergillus novofumigatus
  misc_feature: 150
aattaggatattaaattattaatacaatattttttccttattaatacaatattaatttacttattaatactcttataatactgaatctaaccttag

SEQ ID NO: 13231 - DNA, 96 bp, Aspergillus novofumigatus
  misc_feature: 150
agggttagttagtttaataaggaagaagatattcagagttagagatataagaaagaaagagagaaagagaagagagaaagaattatagatagagat

SEQ ID NO: 13232 - DNA, 96 bp, Aspergillus novofumigatus
  misc_feature: 150
agaggaagggttagttagtttaataaggaagaagatattcagagttagagatataagaaagaaagagagaaagagaagagagaaagaattatagat

SEQ ID NO: 13233 - DNA, 96 bp, Aspergillus novofumigatus
  misc_feature: 150
aattcttactctatctcttactttacctctttctctatctctctcttctatctacacttactaccccttactcttattctatttcttactctcctt

SEQ ID NO: 13234 - DNA, 96 bp, Aspergillus novofumigatus
  misc_feature: 149
tttttttctttatttatttattattctaacctttaacttactatccctaactcttatttatattctaattctaattcttattctaattcttattct

SEQ ID NO: 13235 - DNA, 96 bp, Aspergillus novofumigatus
  misc_feature: 149
tttactattcttcttactatccttctatctctctctctaactcttttctaattctttctaattctcctcttatccttcttttattttctaattctt

SEQ ID NO: 13236 - DNA, 96 bp, Aspergillus novofumigatus
  misc_feature: 149
taaacataatccgaggataaggattttagcggcttgtagtattttagccgcttgttgcattttagccgcttgtagtattttagcggctttttgcaa

SEQ ID NO: 13237 - DNA, 96 bp, Aspergillus novofumigatus
  misc_feature: 149
ttatcttaatcctaattctaattcttcttttaaattcttattttaattcttaacttactctctttaatcctctttctaactctccctctaattctt

SEQ ID NO: 13238 - DNA, 96 bp, Aspergillus novofumigatus
  misc_feature: 149
ttaaattaggatattaaattattaatacaatattttttccttattaatacaatattaatttacttattaatactcttataatactgaatctaacct

SEQ ID NO: 13239 - DNA, 96 bp, Aspergillus novofumigatus
  misc_feature: 149
tcttattcttatccttatcttaatcctaattctaattcttcttttaaattcttattttaattcttaacttactctctttaatcctctttctaactc

SEQ ID NO: 13240 - DNA, 96 bp, Aspergillus novofumigatus
  misc_feature: 149
taaaagcaaaaaaaggggttttaagagattagatagaagaagaggtagaagagaatttagggatagattaagaggagagaagaaggagtaataaga

SEQ ID NO: 13241 - DNA, 96 bp, Aspergillus novofumigatus
  misc_feature: 149
tctatctctctctctaactcttttctaattctttctaattctcctcttatccttcttttattttctaattcttattttttctcttctatctattta

SEQ ID NO: 13242 - DNA, 96 bp, Aspergillus novofumigatus
  misc_feature: 149
ccctcactcttaaactcttacttatattaatctctatctataattctttctctcttctctttctctctttctttcttatatctctaactctgaata

SEQ ID NO: 13243 - DNA, 96 bp, Aspergillus novofumigatus
  misc_feature: 149
gttagtttaataaggaagaagatattcagagttagagatataagaaagaaagagagaaagagaagagagaaagaattatagatagagattaatata

SEQ ID NO: 13244 - DNA, 96 bp, Aspergillus novofumigatus
  misc_feature: 149
aaattcttattttaattcttaacttactctctttaatcctctttctaactctccctctaattcttattctaattcttaatttactatcctttacta

SEQ ID NO: 13245 - DNA, 96 bp, Aspergillus novofumigatus
  misc_feature: 149
actatccttctatctctctctctaactcttttctaattctttctaattctcctcttatccttcttttattttctaattcttattttttctcttcta

SEQ ID NO: 13246 - DNA, 96 bp, Aspergillus novofumigatus
  misc_feature: 149
aagcaaaaaaaggggttttaagagattagatagaagaagaggtagaagagaatttagggatagattaagaggagagaagaaggagtaataagagta

SEQ ID NO: 13247 - DNA, 96 bp, Aspergillus novofumigatus
  misc_feature: 149
taattctaattcttcttttaaattcttattttaattcttaacttactctctttaatcctctttctaactctccctctaattcttattctaattctt

SEQ ID NO: 13248 - DNA, 96 bp, Aspergillus novofumigatus
  misc_feature: 149
aattctaattcttcttttaaattcttattttaattcttaacttactctctttaatcctctttctaactctccctctaattcttattctaattctta

SEQ ID NO: 13249 - DNA, 96 bp, Aspergillus novofumigatus
  misc_feature: 149
aattcttcttttaaattcttattttaattcttaacttactctctttaatcctctttctaactctccctctaattcttattctaattcttaatttac

SEQ ID NO: 13250 - DNA, 96 bp, Aspergillus novofumigatus
  misc_feature: 149
attaaattaggatattaaattattaatataatattttttccttattaatacaatattaatttacttattaatactcttataatactgaatctaacc

SEQ ID NO: 13251 - DNA, 96 bp, Aspergillus novofumigatus
  misc_feature: 149
cttttttttctttatttatttattattctaacctttaacttactatccctaactcttatttatattctaattctaattcttattctaattcttatt

SEQ ID NO: 13252 - DNA, 96 bp, Aspergillus novofumigatus
  misc_feature: 149
ctcttattctatctctctcttactccctctctcctctatctcttcttaatctcctctcttatcccttctaatctaaatccttacccttactcttat

SEQ ID NO: 13253 - DNA, 96 bp, Aspergillus novofumigatus
  misc_feature: 149
aggaagggttagttagtttaataaggaagaagatattcagagttagagatataagaaagaaagagagaaagagaagagagaaagaattatagatag

SEQ ID NO: 13254 - DNA, 96 bp, Aspergillus novofumigatus
  misc_feature: 149
agcaaaaaaaggggttttaagagattagatagaagaagaggtagaagagaatttagggatagattaagaggagagaagaaggagtaataagagtag

SEQ ID NO: 13255 - DNA, 96 bp, Aspergillus novofumigatus
  misc_feature: 149
aaaaaggggttttaagagattagatagaagaagaggtagaagagaatttagggatagattaagaggagagaagaaggagtaataagagtagaaagg

SEQ ID NO: 13256 - DNA, 96 bp, Aspergillus novofumigatus
  misc_feature: 149
attcttattttaattcttaacttactctctttaatcctctttctaactctccctctaattcttattctaattcttaatttactatcctttactatt

SEQ ID NO: 13257 - DNA, 96 bp, Aspergillus novofumigatus
  misc_feature: 149
attaggatattaaattattaatataatattttttccttattaatacaatattaatttacttattaatactcttataatactgaatctaaccttagt

SEQ ID NO: 13258 - DNA, 96 bp, Aspergillus novofumigatus
  misc_feature: 149
aattcttattttaattcttaacttactctctttaatcctctttctaactctccctctaattcttattctaattcttaatttactatcctttactat

SEQ ID NO: 13259 - DNA, 96 bp, Aspergillus novofumigatus
  misc_feature: 148
gttagagatataagaaagaaagagagaaagagaagagagaaagaattatagatagagattaatataagtaagagtttaagagtgagggatttaaaa

SEQ ID NO: 13260 - DNA, 96 bp, Aspergillus novofumigatus
  misc_feature: 148
ttcttattttaattcttaacttactctctttaatcctctttctaactctccctctaattcttattctaattcttaatttactatcctttactattc

SEQ ID NO: 13261 - DNA, 96 bp, Aspergillus novofumigatus
  misc_feature: 148
ggtagaagagaatttagggatagattaagaggagagaagaaggagtaataagagtagaaagggagataatttaaaaagagagatatagtttaagaa

SEQ ID NO: 13262 - DNA, 96 bp, Aspergillus novofumigatus
  misc_feature: 148
caaaaaaaggggttttaagagattagatagaagaagaggtagaagagaatttagggatagattaagaggagagaagaaggagtaataagagtagaa

SEQ ID NO: 13263 - DNA, 96 bp, Aspergillus novofumigatus
  misc_feature: 148
atccctcactcttaaactcttacttatattaatctctatctataattctttctctcttctctttctctctttctttcttatatctctaactctgaa

SEQ ID NO: 13264 - DNA, 96 bp, Aspergillus novofumigatus
  misc_feature: 148
ttagtttaataaggaagaagatattcagagttagagatataagaaagaaagagagaaagagaagagagaaagaattatagatagagattaatataa

SEQ ID NO: 13265 - DNA, 96 bp, Aspergillus novofumigatus
  misc_feature: 148
tcttttttttctttatttatttattattctaacctttaacttactatccctaactcttatttatattctaattctaattcttattctaattcttat

SEQ ID NO: 13266 - DNA, 96 bp, Aspergillus novofumigatus
  misc_feature: 148
aagaagatattcagagttagagatataagaaagaaagagagaaagagaagagagaaagaattatagatagagattaatataagtaagagtttaaga

SEQ ID NO: 13267 - DNA, 96 bp, Aspergillus novofumigatus
  misc_feature: 148
tctaattcttcttttaaattcttattttaattcttaacttactctctttaatcctctttctaactctccctctaattcttattctaattcttaatt

SEQ ID NO: 13268 - DNA, 96 bp, Aspergillus novofumigatus
  misc_feature: 148
aagggtaagggtaaggattaggatgaggataaggataagtagaagggtaagggtaaggattaggatgaggataaggataagtagaagggtgaggga

SEQ ID NO: 13269 - DNA, 96 bp, Aspergillus novofumigatus
  misc_feature: 148
tattctatctcttattctatctctctcttactccctctctcctctatctcttcttaatctcctctcttatcccttctaatctaaatccttaccctt

SEQ ID NO: 13270 - DNA, 96 bp, Aspergillus novofumigatus
  misc_feature: 148
gtagaagagaatttagggatagattaagaggagagaagaaggagtaataagagtagaaagggagataatttaaaaagagagatatagtttaagaag

SEQ ID NO: 13271 - DNA, 96 bp, Aspergillus novofumigatus
  misc_feature: 148
cctcactgtctagctcactgtctagcttactgccttgcttactgctttgctcactgcctcctttgctgcctgccttgctggctaccttactatctc

SEQ ID NO: 13272 - DNA, 96 bp, Aspergillus novofumigatus
  misc_feature: 148
ccttatcttaatcctaattctaattcttcttttaaattcttattttaattcttaacttactctctttaatcctctttctaactctccctctaattc

SEQ ID NO: 13273 - DNA, 96 bp, Aspergillus novofumigatus
  misc_feature: 148
gaagggttagttagtttaataaggaagaagatattcagagttagagatataagaaagaaagagagaaagagaagagagaaagaattatagatagag

SEQ ID NO: 13274 - DNA, 96 bp, Aspergillus novofumigatus
  misc_feature: 148
cttactatccttctatctctctctctaactcttttctaattctttctaattctcctcttatccttcttttattttctaattcttattttttctctt

SEQ ID NO: 13275 - DNA, 96 bp, Aspergillus novofumigatus
  misc_feature: 147
tttaataaggaagaagatattcagagttagagatataagaaagaaagagagaaagagaagagagaaagaattatagatagagattaatataagtaa

SEQ ID NO: 13276 - DNA, 96 bp, Aspergillus novofumigatus
  misc_feature: 147
agttagagatataagaaagaaagagagaaagagaagagagaaagaattatagatagagattaatataagtaagagtttaagagtgagggatttaaa

SEQ ID NO: 13277 - DNA, 96 bp, Aspergillus novofumigatus
  misc_feature: 147
aaaaaaagagagtgattaattatagaagataagagaatcagggatagagagaataaggataaaaagagagtagattaattataatataagagagaa

SEQ ID NO: 13278 - DNA, 96 bp, Aspergillus novofumigatus
  misc_feature: 147
ttctcctcttatccttcttttattttctattttatttatttaatcttctatctatttatctatattttctttctctttttaatctatattctaatc

SEQ ID NO: 13279 - DNA, 96 bp, Aspergillus novofumigatus
  misc_feature: 147
ttctaattctttctaattctcctcttatccttcttttattttctattttatttatttaatcttctatctatttatctatattttctttctcttttt

SEQ ID NO: 13280 - DNA, 96 bp, Aspergillus novofumigatus
  misc_feature: 147
ttactattcttcttactatccttctatctctctctctaactcttttctaattctttctaattctcctcttatccttcttttattttctaattctta

SEQ ID NO: 13281 - DNA, 96 bp, Aspergillus novofumigatus
  misc_feature: 147
ggaagaagatattcagagttagagatataagaaagaaagagagaaagagaagagagaaagaattatagatagagattaatataagtaagagtttaa

SEQ ID NO: 13282 - DNA, 96 bp, Aspergillus novofumigatus
  misc_feature: 147
ttaaacataatccgaggataaggattttagcggcttgtagtattttagccgcttgttgcattttagccgcttgtagtattttagcggctttttgca

SEQ ID NO: 13283 - DNA, 96 bp, Aspergillus novofumigatus
  misc_feature: 147
ctgtctagctcactgtctagcttactgccttgcttactgctttgctcactgcctcctttgctgcctgccttgctggctaccttactatctctctca

SEQ ID NO: 13284 - DNA, 96 bp, Aspergillus novofumigatus
  misc_feature: 147
tcttaattcttactctatctcttactttacctctttctctatctctctcttctatctacacttactaccccttactcttattctatttcttactct

SEQ ID NO: 13285 - DNA, 96 bp, Aspergillus novofumigatus
  misc_feature: 147
tctctctatttctctcttaattcttactctatctcttactttacctctttctctatctctctcttctatctacacttactaccccttactcttatt

SEQ ID NO: 13286 - DNA, 96 bp, Aspergillus novofumigatus
  misc_feature: 147
tctcctcttatccttcttttattttctattttatttatttaatcttctatctatttatctatattttctttctctttttaatctatattctaatct

SEQ ID NO: 13287 - DNA, 96 bp, Aspergillus novofumigatus
  misc_feature: 147
gcaaaaaaaggggttttaagagattagatagaagaagaggtagaagagaatttagggatagattaagaggagagaagaaggagtaataagagtaga

SEQ ID NO: 13288 - DNA, 96 bp, Aspergillus novofumigatus
  misc_feature: 147
tccctcactcttaaactcttacttatattaatctctatctataattctttctctcttctctttctctctttctttcttatatctctaactctgaat

SEQ ID NO: 13289 - DNA, 96 bp, Aspergillus novofumigatus
  misc_feature: 147
taaggaagaagatattcagagttagagatataagaaagaaagagagaaagagaagagagaaagaattatagatagagattaatataagtaagagtt

SEQ ID NO: 13290 - DNA, 96 bp, Aspergillus novofumigatus
  misc_feature: 147
gggttagttagtttaataaggaagaagatattcagagttagagatataagaaagaaagagagaaagagaagagagaaagaattatagatagagatt

SEQ ID NO: 13291 - DNA, 96 bp, Aspergillus novofumigatus
  misc_feature: 147
cttaattcttactctatctcttactttacctctttctctatctctctcttctatctacacttactaccccttactcttattctatttcttactctc

SEQ ID NO: 13292 - DNA, 96 bp, Aspergillus novofumigatus
  misc_feature: 147
gaagaagatattcagagttagagatataagaaagaaagagagaaagagaagagagaaagaattatagatagagattaatataagtaagagtttaag

SEQ ID NO: 13293 - DNA, 96 bp, Aspergillus novofumigatus
  misc_feature: 147
cttatcttaatcctaattctaattcttcttttaaattcttattttaattcttaacttactctctttaatcctctttctaactctccctctaattct

SEQ ID NO: 13294 - DNA, 96 bp, Aspergillus novofumigatus
  misc_feature: 147
ctattttatttatttaatcttctatctatttatctatattttctttctctttttaatctatattctaatctttaacttactatctttaactcttct

SEQ ID NO: 13295 - DNA, 96 bp, Aspergillus novofumigatus
  misc_feature: 147
ctatctctctctctaactcttttctaattctttctaattctcctcttatccttcttttattttctaattcttattttttctcttctatctatttat

SEQ ID NO: 13296 - DNA, 96 bp, Aspergillus novofumigatus
  misc_feature: 147
aaatccctcactcttaaactcttacttatattaatctctatctataattctttctctcttctctttctctctttctttcttatatctctaactctg

SEQ ID NO: 13297 - DNA, 96 bp, Aspergillus novofumigatus
  misc_feature: 147
attctcctcttatccttcttttattttctattttatttatttaatcttctatctatttatctatattttctttctctttttaatctatattctaat

SEQ ID NO: 13298 - DNA, 96 bp, Aspergillus novofumigatus
  misc_feature: 146
tttaaattcttattttaattcttaacttactctctttaatcctctttctaactctccctctaattcttattctaattcttaatttactatccttta

SEQ ID NO: 13299 - DNA, 96 bp, Aspergillus novofumigatus
  misc_feature: 146
ttagagatataagaaagaaagagagaaagagaagagagaaagaattatagatagagattaatataagtaagagtttaagagtgagggatttaaaat

SEQ ID NO: 13300 - DNA, 96 bp, Aspergillus novofumigatus
  misc_feature: 146
tgtctagctcactgtctagcttactgccttgcttactgctttgctcactgcctcctttgctgcctgccttgctggctaccttactatctctctcac

SEQ ID NO: 13301 - DNA, 96 bp, Aspergillus novofumigatus
  misc_feature: 146
tagaagagaatttagggatagattaagaggagagaagaaggagtaataagagtagaaagggagataatttaaaaagagagatatagtttaagaaga

SEQ ID NO: 13302 - DNA, 96 bp, Aspergillus novofumigatus
  misc_feature: 146
aagggttagttagtttaataaggaagaagatattcagagttagagatataagaaagaaagagagaaagagaagagagaaagaattatagatagaga

SEQ ID NO: 13303 - DNA, 96 bp, Aspergillus novofumigatus
  misc_feature: 146
aatccctcactcttaaactcttacttatattaatctctatctataattctttctctcttctctttctctctttctttcttatatctctaactctga

SEQ ID NO: 13304 - DNA, 96 bp, Aspergillus novofumigatus
  misc_feature: 146
tagttagtttaataaggaagaagatattcagagttagagatataagaaagaaagagagaaagagaagagagaaagaattatagatagagattaata

SEQ ID NO: 13305 - DNA, 96 bp, Aspergillus novofumigatus
  misc_feature: 146
tatcttaatcctaattctaattcttcttttaaattcttattttaattcttaacttactctctttaatcctctttctaactctccctctaattctta

SEQ ID NO: 13306 - DNA, 96 bp, Aspergillus novofumigatus
  misc_feature: 146
taattctcctcttatccttcttttattttctattttatttatttaatcttctatctatttatctatattttctttctctttttaatctatattcta

SEQ ID NO: 13307 - DNA, 96 bp, Aspergillus novofumigatus
  misc_feature: 146
agagatataagaaagaaagagagaaagagaagagagaaagaattatagatagagattaatataagtaagagtttaagagtgagggatttaaaatta

SEQ ID NO: 13308 - DNA, 96 bp, Aspergillus novofumigatus
  misc_feature: 146
ggttagttagtttaataaggaagaagatattcagagttagagatataagaaagaaagagagaaagagaagagagaaagaattatagatagagatta

SEQ ID NO: 13309 - DNA, 96 bp, Aspergillus novofumigatus
  misc_feature: 146
taagggtaagggtaaggattaggatgaggataaggataagtagaagggtaagggtaaggattaggatgaggataaggataagtagaagggtgaggg

SEQ ID NO: 13310 - DNA, 96 bp, Aspergillus novofumigatus
  misc_feature: 146
aatgcttaatggaagacattaaattaggatattaaattattaatacaatattttttccttattaatacaatattaatttacttattaatactctta

SEQ ID NO: 13311 - DNA, 96 bp, Aspergillus novofumigatus
  misc_feature: 146
agagttagagatataagaaagaaagagagaaagagaagagagaaagaattatagatagagattaatataagtaagagtttaagagtgagggattta

SEQ ID NO: 13312 - DNA, 96 bp, Aspergillus novofumigatus
  misc_feature: 146
gtctagctcactgtctagcttactgccttgcttactgctttgctcactgcctcctttgctgcctgccttgctggctaccttactatctctctcact

SEQ ID NO: 13313 - DNA, 96 bp, Aspergillus novofumigatus
  misc_feature: 146
ggagaattagaaagaattagaagaagaggtagagagagaaatagaagaatagttaaggatagtaagtttagaattagaataagaatttgagggagg

SEQ ID NO: 13314 - DNA, 96 bp, Aspergillus novofumigatus
  misc_feature: 146
gagaattagaaagaattagaagaagaggtagagagagaaatagaagaatagttaaggatagtaagtttagaattagaataagaatttgagggaggg

SEQ ID NO: 13315 - DNA, 96 bp, Aspergillus novofumigatus
  misc_feature: 146
ctctctatttctctcttaattcttactctatctcttactttacctctttctctatctctctcttctatctacacttactaccccttactcttattc

SEQ ID NO: 13316 - DNA, 96 bp, Aspergillus novofumigatus
  misc_feature: 146
attcttactctatctcttactttacctctttctctatctctctcttctatctacacttactaccccttactcttattctatttcttactctccttc

SEQ ID NO: 13317 - DNA, 96 bp, Aspergillus novofumigatus
  misc_feature: 146
ctcttattcttatccttatcttaatcctaattctaattcttcttttaaattcttattttaattcttaacttactctctttaatcctctttctaact

SEQ ID NO: 13318 - DNA, 96 bp, Aspergillus novofumigatus
  misc_feature: 146
ctccctccctcgtccccctcgctcgcgcgcgcacccctgccggtcctcgccggcgccggccccccggtccctatgacggtgcgcgcgcgcgcggct

SEQ ID NO: 13319 - DNA, 96 bp, Aspergillus novofumigatus
  misc_feature: 146
ctattcttcttactatccttctatctctctctctaactcttttctaattctttctaattctcctcttatccttcttttattttctaattcttattt

SEQ ID NO: 13320 - DNA, 96 bp, Aspergillus novofumigatus
  misc_feature: 146
aagaagaatagtaaaggatagtaaattaagaattagaataagaattagagggagagttagaaagaggattaaagagagtaagttaagaattaaaat

SEQ ID NO: 13321 - DNA, 96 bp, Aspergillus novofumigatus
  misc_feature: 146
agacattaaattaggatattaaattattaatacaatattttttccttattaatacaatattaatttacttattaatactcttataatactgaatct

SEQ ID NO: 13322 - DNA, 96 bp, Aspergillus novofumigatus
  misc_feature: 146
agaattagaaagaattagaagaagaggtagagagagaaatagaagaatagttaaggatagtaagtttagaattagaataagaatttgagggagggt

SEQ ID NO: 13323 - DNA, 96 bp, Aspergillus novofumigatus
  misc_feature: 146
aaagcaaaaaaaggggttttaagagattagatagaagaagaggtagaagagaatttagggatagattaagaggagagaagaaggagtaataagagt

SEQ ID NO: 13324 - DNA, 96 bp, Aspergillus novofumigatus
  misc_feature: 146
actattcttcttactatccttctatctctctctctaactcttttctaattctttctaattctcctcttatccttcttttattttctaattcttatt

SEQ ID NO: 13325 - DNA, 96 bp, Aspergillus novofumigatus
  misc_feature: 145
taagaagaatagtaaaggatagtaaattaagaattagaataagaattagagggagagttagaaagaggattaaagagagtaagttaagaattaaaa

SEQ ID NO: 13326 - DNA, 96 bp, Aspergillus novofumigatus
  misc_feature: 145
tttctctcttaattcttactctatctcttactttacctctttctctatctctctcttctatctacacttactaccccttactcttattctatttct

SEQ ID NO: 13327 - DNA, 96 bp, Aspergillus novofumigatus
  misc_feature: 145
ttcttactatccttctatctctctctctaactcttttctaattctttctaattctcctcttatccttcttttattttctaattcttattttttctc

SEQ ID NO: 13328 - DNA, 96 bp, Aspergillus novofumigatus
  misc_feature: 145
ttctctcttaattcttactctatctcttactttacctctttctctatctctctcttctatctacacttactaccccttactcttattctatttctt

SEQ ID NO: 13329 - DNA, 96 bp, Aspergillus novofumigatus
  misc_feature: 145
ttagttagtttaataaggaagaagatattcagagttagagatataagaaagaaagagagaaagagaagagagaaagaattatagatagagattaat

SEQ ID NO: 13330 - DNA, 96 bp, Aspergillus novofumigatus
  misc_feature: 145
ttaaattcttattttaattcttaacttactctctttaatcctctttctaactctccctctaattcttattctaattcttaatttactatcctttac

SEQ ID NO: 13331 - DNA, 96 bp, Aspergillus novofumigatus
  misc_feature: 145
gagttagagatataagaaagaaagagagaaagagaagagagaaagaattatagatagagattaatataagtaagagtttaagagtgagggatttaa

SEQ ID NO: 13332 - DNA, 96 bp, Aspergillus novofumigatus
  misc_feature: 145
tctctcttaattcttactctatctcttactttacctctttctctatctctctcttctatctacacttactaccccttactcttattctatttctta

SEQ ID NO: 13333 - DNA, 96 bp, Aspergillus novofumigatus
  misc_feature: 145
tctctatttctctcttaattcttactctatctcttactttacctctttctctatctctctcttctatctacacttactaccccttactcttattct

SEQ ID NO: 13334 - DNA, 96 bp, Aspergillus novofumigatus
  misc_feature: 145
aagtaaaagcaaaaaaaggggttttaagagattagatagaagaagaggtagaagagaatttagggatagattaagaggagagaagaaggagtaata

SEQ ID NO: 13335 - DNA, 96 bp, Aspergillus novofumigatus
  misc_feature: 145
tagctcactgtctagcttactgccttgcttactgctttgctcactgcctcctttgctgcctgccttgctggctaccttactatctctctcactgcc

SEQ ID NO: 13336 - DNA, 96 bp, Aspergillus novofumigatus
  misc_feature: 145
tagagatataagaaagaaagagagaaagagaagagagaaagaattatagatagagattaatataagtaagagtttaagagtgagggatttaaaatt

SEQ ID NO: 13337 - DNA, 96 bp, Aspergillus novofumigatus
  misc_feature: 145
taattcttcttttaaattcttattttaattcttaacttactctctttaatcctctttctaactctccctctaattcttattctaattcttaattta

SEQ ID NO: 13338 - DNA, 96 bp, Aspergillus novofumigatus
  misc_feature: 145
cctcttatccttcttttattttctattttatttatttaatcttctatctatttatctatattttctttctctttttaatctatattctaatcttta

SEQ ID NO: 13339 - DNA, 96 bp, Aspergillus novofumigatus
  misc_feature: 145
gcaatgcttaatggaagacattaaattaggatattaaattattaatacaatattttttccttattaatacaatattaatttacttattaatactct

SEQ ID NO: 13340 - DNA, 96 bp, Aspergillus novofumigatus
  misc_feature: 145
agaagagaatttagggatagattaagaggagagaagaaggagtaataagagtagaaagggagataatttaaaaagagagatatagtttaagaagag

SEQ ID NO: 13341 - DNA, 96 bp, Aspergillus novofumigatus
  misc_feature: 145
ctcactgtctagctcactgtctagcttactgccttgcttactgctttgctcactgcctcctttgctgcctgccttgctggctaccttactatctct

SEQ ID NO: 13342 - DNA, 96 bp, Aspergillus novofumigatus
  misc_feature: 145
atagtaaggtagccagcaaggcaggcagcaaaggaggcagtgagcaaagcagtaagcaaggcagtaagctagacagtgagctagacagtgaggtag

SEQ ID NO: 13343 - DNA, 96 bp, Aspergillus novofumigatus
  misc_feature: 145
ctaattcttcttttaaattcttattttaattcttaacttactctctttaatcctctttctaactctccctctaattcttattctaattcttaattt

SEQ ID NO: 13344 - DNA, 96 bp, Aspergillus novofumigatus
  misc_feature: 145
atcttaatcctaattctaattcttcttttaaattcttattttaattcttaacttactctctttaatcctctttctaactctccctctaattcttat

SEQ ID NO: 13345 - DNA, 96 bp, Aspergillus novofumigatus
  misc_feature: 145
aatggaagacattaaattaggatattaaattattaatacaatattttttccttattaatacaatattaatttacttattaatactcttataatact

SEQ ID NO: 13346 - DNA, 96 bp, Aspergillus novofumigatus
  misc_feature: 145
agctcactgtctagcttactgccttgcttactgctttgctcactgcctcctttgctgcctgccttgctggctaccttactatctctctcactgcct

SEQ ID NO: 13347 - DNA, 96 bp, Aspergillus novofumigatus
  misc_feature: 144
ttttctattttttttacttatttacctcttttttcttctccctttttatctcttctctctatttctctcttaattcttactctatctcttacttta

SEQ ID NO: 13348 - DNA, 96 bp, Aspergillus novofumigatus
  misc_feature: 144
gtaagaagaatagtaaaggatagtaaattaagaattagaataagaattagagggagagttagaaagaggattaaagagagtaagttaagaattaaa

SEQ ID NO: 13349 - DNA, 96 bp, Aspergillus novofumigatus
  misc_feature: 144
ttcttactctatctcttactttacctctttctctatctctctcttctatctacacttactaccccttactcttattctatttcttactctccttct

SEQ ID NO: 13350 - DNA, 96 bp, Aspergillus novofumigatus
  misc_feature: 144
agtaaaagcaaaaaaaggggttttaagagattagatagaagaagaggtagaagagaatttagggatagattaagaggagagaagaaggagtaataa

SEQ ID NO: 13351 - DNA, 96 bp, Aspergillus novofumigatus
  misc_feature: 144
aattctcctcttatccttcttttattttctattttatttatttaatcttctatctatttatctatattttctttctctttttaatctatattctaa

SEQ ID NO: 13352 - DNA, 96 bp, Aspergillus novofumigatus
  misc_feature: 144
gagatataagaaagaaagagagaaagagaagagagaaagaattatagatagagattaatataagtaagagtttaagagtgagggatttaaaattaa

SEQ ID NO: 13353 - DNA, 96 bp, Aspergillus novofumigatus
  misc_feature: 144
tcttcttactatccttctatctctctctctaactcttttctaattctttctaattctcctcttatccttcttttattttctaattcttattttttc

SEQ ID NO: 13354 - DNA, 96 bp, Aspergillus novofumigatus
  misc_feature: 144
tcttactatccttctatctctctctctaactcttttctaattctttctaattctcctcttatccttcttttattttctaattcttattttttctct

SEQ ID NO: 13355 - DNA, 96 bp, Aspergillus novofumigatus
  misc_feature: 144
tctaattctttctaattctcctcttatccttcttttattttctattttatttatttaatcttctatctatttatctatattttctttctcttttta

SEQ ID NO: 13356 - DNA, 96 bp, Aspergillus novofumigatus
  misc_feature: 144
tcactgtctagctcactgtctagcttactgccttgcttactgctttgctcactgcctcctttgctgcctgccttgctggctaccttactatctctc

SEQ ID NO: 13357 - DNA, 96 bp, Aspergillus novofumigatus
  misc_feature: 144
tattgtccctaactcttattcttatccttatcttaatcctaattctaattcttcttttaaattcttattttaattcttaacttactctctttaatc

SEQ ID NO: 13358 - DNA, 96 bp, Aspergillus novofumigatus
  misc_feature: 144
tattcttcttactatccttctatctctctctctaactcttttctaattctttctaattctcctcttatccttcttttattttctaattcttatttt

SEQ ID NO: 13359 - DNA, 96 bp, Aspergillus novofumigatus
  misc_feature: 144
gtttaataaggaagaagatattcagagttagagatataagaaagaaagagagaaagagaagagagaaagaattatagatagagattaatataagta

SEQ ID NO: 13360 - DNA, 96 bp, Aspergillus novofumigatus
  misc_feature: 144
gtaaaagcaaaaaaaggggttttaagagattagatagaagaagaggtagaagagaatttagggatagattaagaggagagaagaaggagtaataag

SEQ ID NO: 13361 - DNA, 96 bp, Aspergillus novofumigatus
  misc_feature: 144
attaaattaggatattaaattattaatacaatattttttccttattaatacaatattaatttacttattaatactcttataatactgaatctaacc

SEQ ID NO: 13362 - DNA, 96 bp, Aspergillus novofumigatus
  misc_feature: 144
attgtccctaactcttattcttatccttatcttaatcctaattctaattcttcttttaaattcttattttaattcttaacttactctctttaatcc

SEQ ID NO: 13363 - DNA, 96 bp, Aspergillus novofumigatus
  misc_feature: 144
ctcttaattcttactctatctcttactttacctctttctctatctctctcttctatctacacttactaccccttactcttattctatttcttactc

SEQ ID NO: 13364 - DNA, 96 bp, Aspergillus novofumigatus
  misc_feature: 144
actgtctagctcactgtctagcttactgccttgcttactgctttgctcactgcctcctttgctgcctgccttgctggctaccttactatctctctc

SEQ ID NO: 13365 - DNA, 96 bp, Aspergillus novofumigatus
  misc_feature: 144
actgtctagcttactgccttgcttactgctttgctcactgcctcctttgctgcctgccttgctggctaccttactatctctctcactgcctgtctc

SEQ ID NO: 13366 - DNA, 96 bp, Aspergillus novofumigatus
  misc_feature: 144
cctaattctaattcttcttttaaattcttattttaattcttaacttactctctttaatcctctttctaactctccctctaattcttattctaattc

SEQ ID NO: 13367 - DNA, 96 bp, Aspergillus novofumigatus
  misc_feature: 144
gaagagaatttagggatagattaagaggagagaagaaggagtaataagagtagaaagggagataatttaaaaagagagatatagtttaagaagagt

SEQ ID NO: 13368 - DNA, 96 bp, Aspergillus novofumigatus
  misc_feature: 144
atttctctcttaattcttactctatctcttactttacctctttctctatctctctcttctatctacacttactaccccttactcttattctatttc

SEQ ID NO: 13369 - DNA, 96 bp, Aspergillus novofumigatus
  misc_feature: 144
gaaagaattagaagaagaggtagagagagaaatagaagaatagttaaggatagtaagtttagaattagaataagaatttgagggagggttagaagg

SEQ ID NO: 13370 - DNA, 96 bp, Aspergillus novofumigatus
  misc_feature: 144
ctcctcttatccttcttttattttctattttatttatttaatcttctatctatttatctatattttctttctctttttaatctatattctaatctt

SEQ ID NO: 13371 - DNA, 96 bp, Aspergillus novofumigatus
  misc_feature: 144
atggaagacattaaattaggatattaaattattaatacaatattttttccttattaatacaatattaatttacttattaatactcttataatactg

SEQ ID NO: 13372 - DNA, 96 bp, Aspergillus novofumigatus
  misc_feature: 144
atgcttaatggaagacattaaattaggatattaaattattaatacaatattttttccttattaatacaatattaatttacttattaatactcttat

SEQ ID NO: 13373 - DNA, 96 bp, Aspergillus novofumigatus
  misc_feature: 144
agggtaagggtaaggattaggatgaggataaggataagtagaagggtaagggtaaggattaggatgaggataaggataagtagaagggtgagggat

SEQ ID NO: 13374 - DNA, 96 bp, Aspergillus novofumigatus
  misc_feature: 143
aaagtaagagatagagtaagaattaagagagaaatagagagaagagataaaaagggagaagaaaaaagaggtaaataagtaaaaaaaatagaaaaa

SEQ ID NO: 13375 - DNA, 96 bp, Aspergillus novofumigatus
  misc_feature: 143
ggaagacattaaattaggatattaaattattaatacaatattttttccttattaatacaatattaatttacttattaatactcttataatactgaa

SEQ ID NO: 13376 - DNA, 96 bp, Aspergillus novofumigatus
  misc_feature: 143
ttattgtccctaactcttattcttatccttatcttaatcctaattctaattcttcttttaaattcttattttaattcttaacttactctctttaat

SEQ ID NO: 13377 - DNA, 96 bp, Aspergillus novofumigatus
  misc_feature: 143
gttagttagtttaataaggaagaagatattcagagttagagatataagaaagaaagagagaaagagaagagagaaagaattatagatagagattaa

SEQ ID NO: 13378 - DNA, 96 bp, Aspergillus novofumigatus
  misc_feature: 143
tggaagacattaaattaggatattaaattattaatacaatattttttccttattaatacaatattaatttacttattaatactcttataatactga

SEQ ID NO: 13379 - DNA, 96 bp, Aspergillus novofumigatus
  misc_feature: 143
tcttaatcctaattctaattcttcttttaaattcttattttaattcttaacttactctctttaatcctctttctaactctccctctaattcttatt

SEQ ID NO: 13380 - DNA, 96 bp, Aspergillus novofumigatus
  misc_feature: 143
gaaaaaaagagagtgattaattatagaagataagagaatcagggatagagagaataaggataaaaagagagtagattaattataatataagagaga

SEQ ID NO: 13381 - DNA, 96 bp, Aspergillus novofumigatus
  misc_feature: 143
tctagctcactgtctagcttactgccttgcttactgctttgctcactgcctcctttgctgcctgccttgctggctaccttactatctctctcactg

SEQ ID NO: 13382 - DNA, 96 bp, Aspergillus novofumigatus
  misc_feature: 143
tcctaattctaattcttcttttaaattcttattttaattcttaacttactctctttaatcctctttctaactctccctctaattcttattctaatt

SEQ ID NO: 13383 - DNA, 96 bp, Aspergillus novofumigatus
  misc_feature: 143
tatttctctcttaattcttactctatctcttactttacctctttctctatctctctcttctatctacacttactaccccttactcttattctattt

SEQ ID NO: 13384 - DNA, 96 bp, Aspergillus novofumigatus
  misc_feature: 143
tagtttaataaggaagaagatattcagagttagagatataagaaagaaagagagaaagagaagagagaaagaattatagatagagattaatataag

SEQ ID NO: 13385 - DNA, 96 bp, Aspergillus novofumigatus
  misc_feature: 143
ctctatttctctcttaattcttactctatctcttactttacctctttctctatctctctcttctatctacacttactaccccttactcttattcta

SEQ ID NO: 13386 - DNA, 96 bp, Aspergillus novofumigatus
  misc_feature: 143
tactctataaactaaatgtataatatatatctctgcgcattatggtatcctgaaatatatatattcattcattaatatattaatgctgattaacct

SEQ ID NO: 13387 - DNA, 96 bp, Aspergillus novofumigatus
  misc_feature: 143
gatagtaaggtagccagcaaggcaggcagcaaaggaggcagtgagcaaagcagtaagcaaggcagtaagctagacagtgagctagacagtgaggta

SEQ ID NO: 13388 - DNA, 96 bp, Aspergillus novofumigatus
  misc_feature: 143
aattagaaagaattagaagaagaggtagagagagaaatagaagaatagttaaggatagtaagtttagaattagaataagaatttgagggagggtta

SEQ ID NO: 13389 - DNA, 96 bp, Aspergillus novofumigatus
  misc_feature: 143
actcttattcttatccttatcttaatcctaattctaattcttcttttaaattcttattttaattcttaacttactctctttaatcctctttctaac

SEQ ID NO: 13390 - DNA, 96 bp, Aspergillus novofumigatus
  misc_feature: 143
ctctcttaattcttactctatctcttactttacctctttctctatctctctcttctatctacacttactaccccttactcttattctatttcttac

SEQ ID NO: 13391 - DNA, 96 bp, Aspergillus novofumigatus
  misc_feature: 143
aagacattaaattaggatattaaattattaatacaatattttttccttattaatacaatattaatttacttattaatactcttataatactgaatc

SEQ ID NO: 13392 - DNA, 96 bp, Aspergillus novofumigatus
  misc_feature: 143
gaattagaaagaattagaagaagaggtagagagagaaatagaagaatagttaaggatagtaagtttagaattagaataagaatttgagggagggtt

SEQ ID NO: 13393 - DNA, 96 bp, Aspergillus novofumigatus
  misc_feature: 143
gaagacattaaattaggatattaaattattaatacaatattttttccttattaatacaatattaatttacttattaatactcttataatactgaat

SEQ ID NO: 13394 - DNA, 96 bp, Aspergillus novofumigatus
  misc_feature: 143
cttcttactatccttctatctctctctctaactcttttctaattctttctaattctcctcttatccttcttttattttctaattcttattttttct

SEQ ID NO: 13395 - DNA, 96 bp, Aspergillus novofumigatus
  misc_feature: 143
agaaagaattagaagaagaggtagagagagaaatagaagaatagttaaggatagtaagtttagaattagaataagaatttgagggagggttagaag

SEQ ID NO: 13396 - DNA, 96 bp, Aspergillus novofumigatus
  misc_feature: 143
ctaactcttattcttatccttatcttaatcctaattctaattcttcttttaaattcttattttaattcttaacttactctctttaatcctctttct

SEQ ID NO: 13397 - DNA, 96 bp, Aspergillus novofumigatus
  misc_feature: 143
ataagggtaagggtaaggattaggatgaggataaggataagtagaagggtaagggtaaggattaggatgaggataaggataagtagaagggtgagg

SEQ ID NO: 13398 - DNA, 96 bp, Aspergillus novofumigatus
  misc_feature: 143
cactgtctagcttactgccttgcttactgctttgctcactgcctcctttgctgcctgccttgctggctaccttactatctctctcactgcctgtct

SEQ ID NO: 13399 - DNA, 96 bp, Aspergillus novofumigatus
  misc_feature: 143
aattagaagaagaggtagagagagaaatagaagaatagttaaggatagtaagtttagaattagaataagaatttgagggagggttagaaggagtat

SEQ ID NO: 13400 - DNA, 96 bp, Aspergillus novofumigatus
  misc_feature: 143
ataaggaagaagatattcagagttagagatataagaaagaaagagagaaagagaagagagaaagaattatagatagagattaatataagtaagagt

SEQ ID NO: 13401 - DNA, 96 bp, Aspergillus novofumigatus
  misc_feature: 143
agtttaataaggaagaagatattcagagttagagatataagaaagaaagagagaaagagaagagagaaagaattatagatagagattaatataagt

SEQ ID NO: 13402 - DNA, 96 bp, Aspergillus novofumigatus
  misc_feature: 143
aaattatccttcttatatacttacatataaatatatatatataaagtaattcttattattatcttttaaattactatcttctctattcttattagt

SEQ ID NO: 13403 - DNA, 96 bp, Aspergillus novofumigatus
  misc_feature: 142
ttgtccctaactcttattcttatccttatcttaatcctaattctaattcttcttttaaattcttattttaattcttaacttactctctttaatcct

SEQ ID NO: 13404 - DNA, 96 bp, Aspergillus novofumigatus
  misc_feature: 142
ttctattttttttacttatttacctcttttttcttctccctttttatctcttctctctatttctctcttaattcttactctatctcttactttacc

SEQ ID NO: 13405 - DNA, 96 bp, Aspergillus novofumigatus
  misc_feature: 142
ttagaaagaattagaagaagaggtagagagagaaatagaagaatagttaaggatagtaagtttagaattagaataagaatttgagggagggttaga

SEQ ID NO: 13406 - DNA, 96 bp, Aspergillus novofumigatus
  misc_feature: 142
ttaataaggaagaagatattcagagttagagatataagaaagaaagagagaaagagaagagagaaagaattatagatagagattaatataagtaag

SEQ ID NO: 13407 - DNA, 96 bp, Aspergillus novofumigatus
  misc_feature: 142
tgtccctaactcttattcttatccttatcttaatcctaattctaattcttcttttaaattcttattttaattcttaacttactctctttaatcctc

SEQ ID NO: 13408 - DNA, 96 bp, Aspergillus novofumigatus
  misc_feature: 142
tcttctaattctttctaattctcctcttatccttcttttattttctattttatttatttaatcttctatctatttatctatattttctttctcttt

SEQ ID NO: 13409 - DNA, 96 bp, Aspergillus novofumigatus
  misc_feature: 142
taataaggaagaagatattcagagttagagatataagaaagaaagagagaaagagaagagagaaagaattatagatagagattaatataagtaaga

SEQ ID NO: 13410 - DNA, 96 bp, Aspergillus novofumigatus
  misc_feature: 142
tcttactctatctcttactttacctctttctctatctctctcttctatctacacttactaccccttactcttattctatttcttactctccttcta

SEQ ID NO: 13411 - DNA, 96 bp, Aspergillus novofumigatus
  misc_feature: 142
ataactactaataagaatagagaagatagtaatttaaaagataataataagaattactttatatatatatatttatatgtaagtatataagaagga

SEQ ID NO: 13412 - DNA, 96 bp, Aspergillus novofumigatus
  misc_feature: 142
aaagaattagaagaagaggtagagagagaaatagaagaatagttaaggatagtaagtttagaattagaataagaatttgagggagggttagaagga

SEQ ID NO: 13413 - DNA, 96 bp, Aspergillus novofumigatus
  misc_feature: 142
tcactgtctagcttactgccttgcttactgctttgctcactgcctcctttgctgcctgccttgctggctaccttactatctctctcactgcctgtc

SEQ ID NO: 13414 - DNA, 96 bp, Aspergillus novofumigatus
  misc_feature: 142
tactaataagaatagagaagatagtaatttaaaagataataataagaattactttatatatatatatttatatgtaagtatataagaaggataatt

SEQ ID NO: 13415 - DNA, 96 bp, Aspergillus novofumigatus
  misc_feature: 142
taatatactctataaactaaatgtataatatatatctctgcgcattatggtatcctgaaatatatatattcattcattaatatattaatgctgatt

SEQ ID NO: 13416 - DNA, 96 bp, Aspergillus novofumigatus
  misc_feature: 142
gtccctaactcttattcttatccttatcttaatcctaattctaattcttcttttaaattcttattttaattcttaacttactctctttaatcctct

SEQ ID NO: 13417 - DNA, 96 bp, Aspergillus novofumigatus
  misc_feature: 142
ggcaatgcttaatggaagacattaaattaggatattaaattattaatacaatattttttccttattaatacaatattaatttacttattaatactc

SEQ ID NO: 13418 - DNA, 96 bp, Aspergillus novofumigatus
  misc_feature: 142
cctccctccctcgtccccctcgctcgcgcgcgcacccctgccggtcctcgccggcgccggccccccggtccctatgacggtgcgcgcgcgcgcggc

SEQ ID NO: 13419 - DNA, 96 bp, Aspergillus novofumigatus
  misc_feature: 142
gataagggtaagggtaaggattaggatgaggataaggataagtagaagggtaagggtaaggattaggatgaggataaggataagtagaagggtgag

SEQ ID NO: 13420 - DNA, 96 bp, Aspergillus novofumigatus
  misc_feature: 142
cttctaattctttctaattctcctcttatccttcttttattttctattttatttatttaatcttctatctatttatctatattttctttctctttt

SEQ ID NO: 13421 - DNA, 96 bp, Aspergillus novofumigatus
  misc_feature: 142
aagaattagaagaagaggtagagagagaaatagaagaatagttaaggatagtaagtttagaattagaataagaatttgagggagggttagaaggag

SEQ ID NO: 13422 - DNA, 96 bp, Aspergillus novofumigatus
  misc_feature: 142
ctcactgtctagcttactgccttgcttactgctttgctcactgcctcctttgctgcctgccttgctggctaccttactatctctctcactgcctgt

SEQ ID NO: 13423 - DNA, 96 bp, Aspergillus novofumigatus
  misc_feature: 142
attagaaagaattagaagaagaggtagagagagaaatagaagaatagttaaggatagtaagtttagaattagaataagaatttgagggagggttag

SEQ ID NO: 13424 - DNA, 96 bp, Aspergillus novofumigatus
  misc_feature: 142
actctataaactaaatgtataatatatatctctgcgcattatggtatcctgaaatatatatattcattcattaatatattaatgctgattaacctg

SEQ ID NO: 13425 - DNA, 96 bp, Aspergillus novofumigatus
  misc_feature: 142
attcttcttactatccttctatctctctctctaactcttttctaattctttctaattctcctcttatccttcttttattttctaattcttattttt

SEQ ID NO: 13426 - DNA, 96 bp, Aspergillus novofumigatus
  misc_feature: 142
attagaagaagaggtagagagagaaatagaagaatagttaaggatagtaagtttagaattagaataagaatttgagggagggttagaaggagtatt

SEQ ID NO: 13427 - DNA, 96 bp, Aspergillus novofumigatus
  misc_feature: 141
ttcttcttactatccttctatctctctctctaactcttttctaattctttctaattctcctcttatccttcttttattttctaattcttatttttt

SEQ ID NO: 13428 - DNA, 96 bp, Aspergillus novofumigatus
  misc_feature: 141
aggattaggatgaggataaggataagtagaagggtaagggtaaggattaggatgaggataaggataagtagaagggtgagggataaaggattagaa

SEQ ID NO: 13429 - DNA, 96 bp, Aspergillus novofumigatus
  misc_feature: 141
tagaaagaattagaagaagaggtagagagagaaatagaagaatagttaaggatagtaagtttagaattagaataagaatttgagggagggttagaa

SEQ ID NO: 13430 - DNA, 96 bp, Aspergillus novofumigatus
  misc_feature: 141
agtaagaagaatagtaaaggatagtaaattaagaattagaataagaattagagggagagttagaaagaggattaaagagagtaagttaagaattaa

SEQ ID NO: 13431 - DNA, 96 bp, Aspergillus novofumigatus
  misc_feature: 141
ttaatcctaattctaattcttcttttaaattcttattttaattcttaacttactctctttaatcctctttctaactctccctctaattcttattct

SEQ ID NO: 13432 - DNA, 96 bp, Aspergillus novofumigatus
  misc_feature: 141
ctgtctagcttactgccttgcttactgctttgctcactgcctcctttgctgcctgccttgctggctaccttactatctctctcactgcctgtctca

SEQ ID NO: 13433 - DNA, 96 bp, Aspergillus novofumigatus
  misc_feature: 141
tctcttaattcttactctatctcttactttacctctttctctatctctctcttctatctacacttactaccccttactcttattctatttcttact

SEQ ID NO: 13434 - DNA, 96 bp, Aspergillus novofumigatus
  misc_feature: 141
tctatttctctcttaattcttactctatctcttactttacctctttctctatctctctcttctatctacacttactaccccttactcttattctat

SEQ ID NO: 13435 - DNA, 96 bp, Aspergillus novofumigatus
  misc_feature: 141
tccctaactcttattcttatccttatcttaatcctaattctaattcttcttttaaattcttattttaattcttaacttactctctttaatcctctt

SEQ ID NO: 13436 - DNA, 96 bp, Aspergillus novofumigatus
  misc_feature: 141
taactcttattcttatccttatcttaatcctaattctaattcttcttttaaattcttattttaattcttaacttactctctttaatcctctttcta

SEQ ID NO: 13437 - DNA, 96 bp, Aspergillus novofumigatus
  misc_feature: 141
taatggaagacattaaattaggatattaaattattaatacaatattttttccttattaatacaatattaatttacttattaatactcttataatac

SEQ ID NO: 13438 - DNA, 96 bp, Aspergillus novofumigatus
  misc_feature: 141
taaggattaggatgaggataaggataagtagaagggtaagggtaaggattaggatgaggataaggataagtagaagggtgagggataaaggattag

SEQ ID NO: 13439 - DNA, 96 bp, Aspergillus novofumigatus
  misc_feature: 141
taactactaataagaatagagaagatagtaatttaaaagataataataagaattactttatatatatatatttatatgtaagtatataagaaggat

SEQ ID NO: 13440 - DNA, 96 bp, Aspergillus novofumigatus
  misc_feature: 141
atactctataaactaaatgtataatatatatctctgcgcattatggtatcctgaaatatatatattcattcattaatatattaatgctgattaacc

SEQ ID NO: 13441 - DNA, 96 bp, Aspergillus novofumigatus
  misc_feature: 141
cccggccaactggccaccgcccttcgtcaccaggcggcggcgcgcgcgggcccctgctgccggtcagggcgcgcgcccggccatctcggaccgccc

SEQ ID NO: 13442 - DNA, 96 bp, Aspergillus novofumigatus
  misc_feature: 141
ggattaggatgaggataaggataagtagaagggtaagggtaaggattaggatgaggataaggataagtagaagggtgagggataaaggattagaat

SEQ ID NO: 13443 - DNA, 96 bp, Aspergillus novofumigatus
  misc_feature: 141
gctcactgtctagcttactgccttgcttactgctttgctcactgcctcctttgctgcctgccttgctggctaccttactatctctctcactgcctg

SEQ ID NO: 13444 - DNA, 96 bp, Aspergillus novofumigatus
  misc_feature: 141
cttaatcctaattctaattcttcttttaaattcttattttaattcttaacttactctctttaatcctctttctaactctccctctaattcttattc

SEQ ID NO: 13445 - DNA, 96 bp, Aspergillus novofumigatus
  misc_feature: 141
aataaggaagaagatattcagagttagagatataagaaagaaagagagaaagagaagagagaaagaattatagatagagattaatataagtaagag

SEQ ID NO: 13446 - DNA, 96 bp, Aspergillus novofumigatus
  misc_feature: 141
ctaattctcctcttatccttcttttattttctattttatttatttaatcttctatctatttatctatattttctttctctttttaatctatattct

SEQ ID NO: 13447 - DNA, 96 bp, Aspergillus novofumigatus
  misc_feature: 141
ccctaactcttattcttatccttatcttaatcctaattctaattcttcttttaaattcttattttaattcttaacttactctctttaatcctcttt

SEQ ID NO: 13448 - DNA, 96 bp, Aspergillus novofumigatus
  misc_feature: 141
cagaccggcaggcaggggcgcgcgccatagacagacacttgtagagacacacagacaccggggtcggtataggccgggcgcgcgcgccccgggggg

SEQ ID NO: 13449 - DNA, 96 bp, Aspergillus novofumigatus
  misc_feature: 141
cactgtctagctcactgtctagcttactgccttgcttactgctttgctcactgcctcctttgctgcctgccttgctggctaccttactatctctct

SEQ ID NO: 13450 - DNA, 96 bp, Aspergillus novofumigatus
  misc_feature: 141
caatgcttaatggaagacattaaattaggatattaaattattaatacaatattttttccttattaatacaatattaatttacttattaatactctt

SEQ ID NO: 13451 - DNA, 96 bp, Aspergillus novofumigatus
  misc_feature: 141
acctcactgtctagctcactgtctagcttactgccttgcttactgctttgctcactgcctcctttgctgcctgccttgctggctaccttactatct

SEQ ID NO: 13452 - DNA, 96 bp, Aspergillus novofumigatus
  misc_feature: 140
tttctattttttttacttatttacctcttttttcttctccctttttatctcttctctctatttctctcttaattcttactctatctcttactttac

SEQ ID NO: 13453 - DNA, 96 bp, Aspergillus novofumigatus
  misc_feature: 140
ttattctatctcttattctatctctctcttactccctctctcctctatctcttcttaatctcctctcttatcccttctaatctaaatccttaccct

SEQ ID NO: 13454 - DNA, 96 bp, Aspergillus novofumigatus
  misc_feature: 140
atatactctataaactaaatgtataatatatatctctgcgcattatggtatcctgaaatatatatattcattcattaatatattaatgctgattaa

SEQ ID NO: 13455 - DNA, 96 bp, Aspergillus novofumigatus
  misc_feature: 140
tctaattctcctcttatccttcttttattttctattttatttatttaatcttctatctatttatctatattttctttctctttttaatctatattc

SEQ ID NO: 13456 - DNA, 96 bp, Aspergillus novofumigatus
  misc_feature: 140
tcgctaatatactctataaactaaatgtataatatatatctctgcgcattatggtatcctgaaatatatatattcattcattaatatattaatgct

SEQ ID NO: 13457 - DNA, 96 bp, Aspergillus novofumigatus
  misc_feature: 140
agggtaaggattaggatgaggataaggataagtagaagggtaagggtaaggattaggatgaggataaggataagtagaagggtgagggataaagga

SEQ ID NO: 13458 - DNA, 96 bp, Aspergillus novofumigatus
  misc_feature: 140
agataagggtaagggtaaggattaggatgaggataaggataagtagaagggtaagggtaaggattaggatgaggataaggataagtagaagggtga

SEQ ID NO: 13459 - DNA, 96 bp, Aspergillus novofumigatus
  misc_feature: 140
aactactaataagaatagagaagatagtaatttaaaagataataataagaattactttatatatatatatttatatgtaagtatataagaaggata

SEQ ID NO: 13460 - DNA, 96 bp, Aspergillus novofumigatus
  misc_feature: 140
tatactctataaactaaatgtataatatatatctctgcgcattatggtatcctgaaatatatatattcattcattaatatattaatgctgattaac

SEQ ID NO: 13461 - DNA, 96 bp, Aspergillus novofumigatus
  misc_feature: 140
gacattaaattaggatattaaattattaatacaatattttttccttattaatacaatattaatttacttattaatactcttataatactgaatcta

SEQ ID NO: 13462 - DNA, 96 bp, Aspergillus novofumigatus
  misc_feature: 140
gaattagaagaagaggtagagagagaaatagaagaatagttaaggatagtaagtttagaattagaataagaatttgagggagggttagaaggagta

SEQ ID NO: 13463 - DNA, 96 bp, Aspergillus novofumigatus
  misc_feature: 140
aatatactctataaactaaatgtataatatatatctctgcgcattatggtatcctgaaatatatatattcattcattaatatattaatgctgatta

SEQ ID NO: 13464 - DNA, 96 bp, Aspergillus novofumigatus
  misc_feature: 140
cattaaattaggatattaaattattaatacaatattttttccttattaatacaatattaatttacttattaatactcttataatactgaatctaac

SEQ ID NO: 13465 - DNA, 96 bp, Aspergillus novofumigatus
  misc_feature: 140
cttattctatctcttattctatctctctcttactccctctctcctctatctcttcttaatctcctctcttatcccttctaatctaaatccttaccc

SEQ ID NO: 13466 - DNA, 96 bp, Aspergillus novofumigatus
  misc_feature: 140
ctagctcactgtctagcttactgccttgcttactgctttgctcactgcctcctttgctgcctgccttgctggctaccttactatctctctcactgc

SEQ ID NO: 13467 - DNA, 96 bp, Aspergillus novofumigatus
  misc_feature: 140
aattctttctaattctcctcttatccttcttttattttctattttatttatttaatcttctatctatttatctatattttctttctctttttaatc

SEQ ID NO: 13468 - DNA, 96 bp, Aspergillus novofumigatus
  misc_feature: 140
cctaactcttattcttatccttatcttaatcctaattctaattcttcttttaaattcttattttaattcttaacttactctctttaatcctctttc

SEQ ID NO: 13469 - DNA, 96 bp, Aspergillus novofumigatus
  misc_feature: 140
atttaaagtaaaagcaaaaaaaggggttttaagagattagatagaagaagaggtagaagagaatttagggatagattaagaggagagaagaaggag

SEQ ID NO: 13470 - DNA, 96 bp, Aspergillus novofumigatus
  misc_feature: 140
ctactaataagaatagagaagatagtaatttaaaagataataataagaattactttatatatatatatttatatgtaagtatataagaaggataat

SEQ ID NO: 13471 - DNA, 96 bp, Aspergillus novofumigatus
  misc_feature: 140
aagggtaaggattaggatgaggataaggataagtagaagggtaagggtaaggattaggatgaggataaggataagtagaagggtgagggataaagg

SEQ ID NO: 13472 - DNA, 96 bp, Aspergillus novofumigatus
  misc_feature: 140
attctttctaattctcctcttatccttcttttattttctattttatttatttaatcttctatctatttatctatattttctttctctttttaatct

SEQ ID NO: 13473 - DNA, 96 bp, Aspergillus novofumigatus
  misc_feature: 140
atcctaattctaattcttcttttaaattcttattttaattcttaacttactctctttaatcctctttctaactctccctctaattcttattctaat

SEQ ID NO: 13474 - DNA, 96 bp, Aspergillus novofumigatus
  misc_feature: 140
aaagtaaaagcaaaaaaaggggttttaagagattagatagaagaagaggtagaagagaatttagggatagattaagaggagagaagaaggagtaat

SEQ ID NO: 13475 - DNA, 96 bp, Aspergillus novofumigatus
  misc_feature: 139
ttagaagaagaggtagagagagaaatagaagaatagttaaggatagtaagtttagaattagaataagaatttgagggagggttagaaggagtatta

SEQ ID NO: 13476 - DNA, 96 bp, Aspergillus novofumigatus
  misc_feature: 139
aactcttattcttatccttatcttaatcctaattctaattcttcttttaaattcttattttaattcttaacttactctctttaatcctctttctaa

SEQ ID NO: 13477 - DNA, 96 bp, Aspergillus novofumigatus
  misc_feature: 139
taaagtaaaagcaaaaaaaggggttttaagagattagatagaagaagaggtagaagagaatttagggatagattaagaggagagaagaaggagtaa

SEQ ID NO: 13478 - DNA, 96 bp, Aspergillus novofumigatus
  misc_feature: 139
tgtctagcttactgccttgcttactgctttgctcactgcctcctttgctgcctgccttgctggctaccttactatctctctcactgcctgtctcac

SEQ ID NO: 13479 - DNA, 96 bp, Aspergillus novofumigatus
  misc_feature: 139
tgcttaatggaagacattaaattaggatattaaattattaatacaatattttttccttattaatacaatattaatttacttattaatactcttata

SEQ ID NO: 13480 - DNA, 96 bp, Aspergillus novofumigatus
  misc_feature: 139
aaggattaggatgaggataaggataagtagaagggtaagggtaaggattaggatgaggataaggataagtagaagggtgagggataaaggattaga

SEQ ID NO: 13481 - DNA, 96 bp, Aspergillus novofumigatus
  misc_feature: 139
tatttctaccccttattcttatcttaaacttactaacccttactctattacttatccttccttactttattctccttactacctcttaccttctgc

SEQ ID NO: 13482 - DNA, 96 bp, Aspergillus novofumigatus
  misc_feature: 139
gattaggatgaggataaggataagtagaagggtaagggtaaggattaggatgaggataaggataagtagaagggtgagggataaaggattagaata

SEQ ID NO: 13483 - DNA, 96 bp, Aspergillus novofumigatus
  misc_feature: 139
aagaaagaaagagagaaagagaagagagaaagaattatagatagagattaatataagtaagagtttaagagtgagggatttaaaattaagttaata

SEQ ID NO: 13484 - DNA, 96 bp, Aspergillus novofumigatus
  misc_feature: 139
taatcctaattctaattcttcttttaaattcttattttaattcttaacttactctctttaatcctctttctaactctccctctaattcttattcta

SEQ ID NO: 13485 - DNA, 96 bp, Aspergillus novofumigatus
  misc_feature: 139
taattctttctaattctcctcttatccttcttttattttctattttatttatttaatcttctatctatttatctatattttctttctctttttaat

SEQ ID NO: 13486 - DNA, 96 bp, Aspergillus novofumigatus
  misc_feature: 139
taagaaagaaagagagaaagagaagagagaaagaattatagatagagattaatataagtaagagtttaagagtgagggatttaaaattaagttaat

SEQ ID NO: 13487 - DNA, 96 bp, Aspergillus novofumigatus
  misc_feature: 139
acttattgtccctaactcttattcttatccttatcttaatcctaattctaattcttcttttaaattcttattttaattcttaacttactctcttta

SEQ ID NO: 13488 - DNA, 96 bp, Aspergillus novofumigatus
  misc_feature: 139
atttctaccccttattcttatcttaaacttactaacccttactctattacttatccttccttactttattctccttactacctcttaccttctgcc

SEQ ID NO: 13489 - DNA, 96 bp, Aspergillus novofumigatus
  misc_feature: 139
gatataagaaagaaagagagaaagagaagagagaaagaattatagatagagattaatataagtaagagtttaagagtgagggatttaaaattaagt

SEQ ID NO: 13490 - DNA, 96 bp, Aspergillus novofumigatus
  misc_feature: 139
atataactactaataagaatagagaagatagtaatttaaaagataataataagaattactttatatatatatatttatatgtaagtatataagaag

SEQ ID NO: 13491 - DNA, 96 bp, Aspergillus novofumigatus
  misc_feature: 139
agatataagaaagaaagagagaaagagaagagagaaagaattatagatagagattaatataagtaagagtttaagagtgagggatttaaaattaag

SEQ ID NO: 13492 - DNA, 96 bp, Aspergillus novofumigatus
  misc_feature: 139
cttaatggaagacattaaattaggatattaaattattaatacaatattttttccttattaatacaatattaatttacttattaatactcttataat

SEQ ID NO: 13493 - DNA, 96 bp, Aspergillus novofumigatus
  misc_feature: 139
ctatttctctcttaattcttactctatctcttactttacctctttctctatctctctcttctatctacacttactaccccttactcttattctatt

SEQ ID NO: 13494 - DNA, 96 bp, Aspergillus novofumigatus
  misc_feature: 138
aagtaagagatagagtaagaattaagagagaaatagagagaagagataaaaagggagaagaaaaaagaggtaaataagtaaaaaaaatagaaaaaa

SEQ ID NO: 13495 - DNA, 96 bp, Aspergillus novofumigatus
  misc_feature: 138
attaggatgaggataaggataagtagaagggtaagggtaaggattaggatgaggataaggataagtagaagggtgagggataaaggattagaataa

SEQ ID NO: 13496 - DNA, 96 bp, Aspergillus novofumigatus
  misc_feature: 138
actactaataagaatagagaagatagtaatttaaaagataataataagaattactttatatatatatatttatatgtaagtatataagaaggataa

SEQ ID NO: 13497 - DNA, 96 bp, Aspergillus novofumigatus
  misc_feature: 138
gcttaatggaagacattaaattaggatattaaattattaatacaatattttttccttattaatacaatattaatttacttattaatactcttataa

SEQ ID NO: 13498 - DNA, 96 bp, Aspergillus novofumigatus
  misc_feature: 138
cttattctaatcctttatccctcacccttctacttatccttatcctcatcctaatccttacccttacccttctacttatccttatcctcatcctaa

SEQ ID NO: 13499 - DNA, 96 bp, Aspergillus novofumigatus
  misc_feature: 138
acattaaattaggatattaaattattaatacaatattttttccttattaatacaatattaatttacttattaatactcttataatactgaatctaa

SEQ ID NO: 13500 - DNA, 96 bp, Aspergillus novofumigatus
  misc_feature: 138
cttattgtccctaactcttattcttatccttatcttaatcctaattctaattcttcttttaaattcttattttaattcttaacttactctctttaa

SEQ ID NO: 13501 - DNA, 96 bp, Aspergillus novofumigatus
  misc_feature: 138
ctaattctttctaattctcctcttatccttcttttattttctattttatttatttaatcttctatctatttatctatattttctttctctttttaa

SEQ ID NO: 13502 - DNA, 96 bp, Aspergillus novofumigatus
  misc_feature: 138
tcttattctatctcttattctatctctctcttactccctctctcctctatctcttcttaatctcctctcttatcccttctaatctaaatccttacc

SEQ ID NO: 13503 - DNA, 96 bp, Aspergillus novofumigatus
  misc_feature: 138
tcttattctaatcctttatccctcacccttctacttatccttatcctcatcctaatccttacccttacccttctacttatccttatcctcatccta

SEQ ID NO: 13504 - DNA, 96 bp, Aspergillus novofumigatus
  misc_feature: 138
tctataaactaaatgtataatatatatctctgcgcattatggtatcctgaaatatatatattcattcattaatatattaatgctgattaacctgat

SEQ ID NO: 13505 - DNA, 96 bp, Aspergillus novofumigatus
  misc_feature: 138
ctctataaactaaatgtataatatatatctctgcgcattatggtatcctgaaatatatatattcattcattaatatattaatgctgattaacctga

SEQ ID NO: 13506 - DNA, 96 bp, Aspergillus novofumigatus
  misc_feature: 138
gggtaagggtaaggattaggatgaggataaggataagtagaagggtaagggtaaggattaggatgaggataaggataagtagaagggtgagggata

SEQ ID NO: 13507 - DNA, 96 bp, Aspergillus novofumigatus
  misc_feature: 138
tagcttactgccttgcttactgctttgctcactgcctcctttgctgcctgccttgctggctaccttactatctctctcactgcctgtctcactgcc

SEQ ID NO: 13508 - DNA, 96 bp, Aspergillus novofumigatus
  misc_feature: 138
ctaatactccttctaaccctccctcaaattcttattctaattctaaacttactatccttaactattcttctatttctctctctacctcttcttcta

SEQ ID NO: 13509 - DNA, 96 bp, Aspergillus novofumigatus
  misc_feature: 138
gtaaggattaggatgaggataaggataagtagaagggtaagggtaaggattaggatgaggataaggataagtagaagggtgagggataaaggatta

SEQ ID NO: 13510 - DNA, 96 bp, Aspergillus novofumigatus
  misc_feature: 138
gtctagcttactgccttgcttactgctttgctcactgcctcctttgctgcctgccttgctggctaccttactatctctctcactgcctgtctcact

SEQ ID NO: 13511 - DNA, 96 bp, Aspergillus novofumigatus
  misc_feature: 138
ggtaaggattaggatgaggataaggataagtagaagggtaagggtaaggattaggatgaggataaggataagtagaagggtgagggataaaggatt

SEQ ID NO: 13512 - DNA, 96 bp, Aspergillus novofumigatus
  misc_feature: 138
gggtaaggattaggatgaggataaggataagtagaagggtaagggtaaggattaggatgaggataaggataagtagaagggtgagggataaaggat

SEQ ID NO: 13513 - DNA, 96 bp, Aspergillus novofumigatus
  misc_feature: 138
ctcttattctaatcctttatccctcacccttctacttatccttatcctcatcctaatccttacccttacccttctacttatccttatcctcatcct

SEQ ID NO: 13514 - DNA, 96 bp, Aspergillus novofumigatus
  misc_feature: 138
atataagaaagaaagagagaaagagaagagagaaagaattatagatagagattaatataagtaagagtttaagagtgagggatttaaaattaagtt

SEQ ID NO: 13515 - DNA, 96 bp, Aspergillus novofumigatus
  misc_feature: 138
agaattagaagaagaggtagagagagaaatagaagaatagttaaggatagtaagtttagaattagaataagaatttgagggagggttagaaggagt

SEQ ID NO: 13516 - DNA, 96 bp, Aspergillus novofumigatus
  misc_feature: 137
ttctttctaattctcctcttatccttcttttattttctattttatttatttaatcttctatctatttatctatattttctttctctttttaatcta

SEQ ID NO: 13517 - DNA, 96 bp, Aspergillus novofumigatus
  misc_feature: 137
aatcctaattctaattcttcttttaaattcttattttaattcttaacttactctctttaatcctctttctaactctccctctaattcttattctaa

SEQ ID NO: 13518 - DNA, 96 bp, Aspergillus novofumigatus
  misc_feature: 137
ataagaaagaaagagagaaagagaagagagaaagaattatagatagagattaatataagtaagagtttaagagtgagggatttaaaattaagttaa

SEQ ID NO: 13519 - DNA, 96 bp, Aspergillus novofumigatus
  misc_feature: 137
aatttaaagtaaaagcaaaaaaaggggttttaagagattagatagaagaagaggtagaagagaatttagggatagattaagaggagagaagaagga

SEQ ID NO: 13520 - DNA, 96 bp, Aspergillus novofumigatus
  misc_feature: 137
tataagaaagaaagagagaaagagaagagagaaagaattatagatagagattaatataagtaagagtttaagagtgagggatttaaaattaagtta

SEQ ID NO: 13521 - DNA, 96 bp, Aspergillus novofumigatus
  misc_feature: 137
tacttattgtccctaactcttattcttatccttatcttaatcctaattctaattcttcttttaaattcttattttaattcttaacttactctcttt

SEQ ID NO: 13522 - DNA, 96 bp, Aspergillus novofumigatus
  misc_feature: 137
ctcttattctatctcttattctatctctctcttactccctctctcctctatctcttcttaatctcctctcttatcccttctaatctaaatccttac

SEQ ID NO: 13523 - DNA, 96 bp, Aspergillus novofumigatus
  misc_feature: 137
ctataaactaaatgtataatatatatctctgcgcattatggtatcctgaaatatatatattcattcattaatatattaatgctgattaacctgatc

SEQ ID NO: 13524 - DNA, 96 bp, Aspergillus novofumigatus
  misc_feature: 136
tttctaattctcctcttatccttcttttattttctattttatttatttaatcttctatctatttatctatattttctttctctttttaatctatat

SEQ ID NO: 13525 - DNA, 96 bp, Aspergillus novofumigatus
  misc_feature: 136
ttctaattctcctcttatccttcttttattttctattttatttatttaatcttctatctatttatctatattttctttctctttttaatctatatt

SEQ ID NO: 13526 - DNA, 96 bp, Aspergillus novofumigatus
  misc_feature: 136
ttaatggaagacattaaattaggatattaaattattaatacaatattttttccttattaatacaatattaatttacttattaatactcttataata

SEQ ID NO: 13527 - DNA, 96 bp, Aspergillus novofumigatus
  misc_feature: 136
tcttccctttcctcttccctttcttctcctatttttaattatatttatttcttctctttactaaaactctctctatcttatatatttctacccctt

SEQ ID NO: 13528 - DNA, 96 bp, Aspergillus novofumigatus
  misc_feature: 136
tctagcttactgccttgcttactgctttgctcactgcctcctttgctgcctgccttgctggctaccttactatctctctcactgcctgtctcactg

SEQ ID NO: 13529 - DNA, 96 bp, Aspergillus novofumigatus
  misc_feature: 136
tcctatacttattgtccctaactcttattcttatccttatcttaatcctaattctaattcttcttttaaattcttattttaattcttaacttactc

SEQ ID NO: 13530 - DNA, 96 bp, Aspergillus novofumigatus
  misc_feature: 136
gctaatatactctataaactaaatgtataatatatatctctgcgcattatggtatcctgaaatatatatattcattcattaatatattaatgctga

SEQ ID NO: 13531 - DNA, 96 bp, Aspergillus novofumigatus
  misc_feature: 136
tatacttattgtccctaactcttattcttatccttatcttaatcctaattctaattcttcttttaaattcttattttaattcttaacttactctct

SEQ ID NO: 13532 - DNA, 96 bp, Aspergillus novofumigatus
  misc_feature: 136
tataactactaataagaatagagaagatagtaatttaaaagataataataagaattactttatatatatatatttatatgtaagtatataagaagg

SEQ ID NO: 13533 - DNA, 96 bp, Aspergillus novofumigatus
  misc_feature: 136
taagcatatttcagcttataggataggtaatatataatatttatataataagttattatattaataaataaaatatatagatatcctagtggtgtg

SEQ ID NO: 13534 - DNA, 96 bp, Aspergillus novofumigatus
  misc_feature: 136
cggccaactggccaccgcccttcgtcaccaggcggcggcgcgcgcgggcccctgctgccggtcagggcgcgcgcccggccatctcggaccgcccac

SEQ ID NO: 13535 - DNA, 96 bp, Aspergillus novofumigatus
  misc_feature: 136
cctatacttattgtccctaactcttattcttatccttatcttaatcctaattctaattcttcttttaaattcttattttaattcttaacttactct

SEQ ID NO: 13536 - DNA, 96 bp, Aspergillus novofumigatus
  misc_feature: 136
atcctatacttattgtccctaactcttattcttatccttatcttaatcctaattctaattcttcttttaaattcttattttaattcttaacttact

SEQ ID NO: 13537 - DNA, 96 bp, Aspergillus novofumigatus
  misc_feature: 135
tttctaccccttattcttatcttaaacttactaacccttactctattacttatccttccttactttattctccttactacctcttaccttctgcct

SEQ ID NO: 13538 - DNA, 96 bp, Aspergillus novofumigatus
  misc_feature: 135
tagataagggtaagggtaaggattaggatgaggataaggataagtagaagggtaagggtaaggattaggatgaggataaggataagtagaagggtg

SEQ ID NO: 13539 - DNA, 96 bp, Aspergillus novofumigatus
  misc_feature: 135
taagggtaaggattaggatgaggataaggataagtagaagggtaagggtaaggattaggatgaggataaggataagtagaagggtgagggataaag

SEQ ID NO: 13540 - DNA, 96 bp, Aspergillus novofumigatus
  misc_feature: 135
taaactaaatgtataatatatatctctgcgcattatggtatcctgaaatatatatattcattcattaatatattaatgctgattaacctgatctcc

SEQ ID NO: 13541 - DNA, 96 bp, Aspergillus novofumigatus
  misc_feature: 135
gcatatttcagcttataggataggtaatatataatatttatataataagttattatattaataaataaaatatatagatatcctagtggtgtggct

SEQ ID NO: 13542 - DNA, 96 bp, Aspergillus novofumigatus
  misc_feature: 135
ctagcttactgccttgcttactgctttgctcactgcctcctttgctgcctgccttgctggctaccttactatctctctcactgcctgtctcactgc

SEQ ID NO: 13543 - DNA, 96 bp, Aspergillus novofumigatus
  misc_feature: 135
gatgaaatctaactaaggttagattcagtattataagagtattaataagtaaattaatattgtattaataaggaaaaaatattgtattaataattt

SEQ ID NO: 13544 - DNA, 96 bp, Aspergillus novofumigatus
  misc_feature: 135
ctatacttattgtccctaactcttattcttatccttatcttaatcctaattctaattcttcttttaaattcttattttaattcttaacttactctc

SEQ ID NO: 13545 - DNA, 96 bp, Aspergillus novofumigatus
  misc_feature: 135
aggggtagaaatatataagatagagagagttttagtaaagagaagaaataaatataattaaaaataggagaagaaagggaagaggaaagggaagag

SEQ ID NO: 13546 - DNA, 96 bp, Aspergillus novofumigatus
  misc_feature: 135
ctaatatactctataaactaaatgtataatatatatctctgcgcattatggtatcctgaaatatatatattcattcattaatatattaatgctgat

SEQ ID NO: 13547 - DNA, 96 bp, Aspergillus novofumigatus
  misc_feature: 135
cgctaatatactctataaactaaatgtataatatatatctctgcgcattatggtatcctgaaatatatatattcattcattaatatattaatgctg

SEQ ID NO: 13548 - DNA, 96 bp, Aspergillus novofumigatus
  misc_feature: 135
cctttcctcttccctttcttctcctatttttaattatatttatttcttctctttactaaaactctctctatcttatatatttctaccccttattct

SEQ ID NO: 13549 - DNA, 96 bp, Aspergillus novofumigatus
  misc_feature: 134
ttccctttcctcttccctttcttctcctatttttaattatatttatttcttctctttactaaaactctctctatcttatatatttctaccccttat

SEQ ID NO: 13550 - DNA, 96 bp, Aspergillus novofumigatus
  misc_feature: 134
ggtaagggtaaggattaggatgaggataaggataagtagaagggtaagggtaaggattaggatgaggataaggataagtagaagggtgagggataa

SEQ ID NO: 13551 - DNA, 96 bp, Aspergillus novofumigatus
  misc_feature: 134
aaatatataagatagagagagttttagtaaagagaagaaataaatataattaaaaataggagaagaaagggaagaggaaagggaagaggaaaggga

SEQ ID NO: 13552 - DNA, 96 bp, Aspergillus novofumigatus
  misc_feature: 134
agagtatacaagttaatttagaaagaaaagaatagaaggtaaagatagataagatagaaagagtttaagtaaagggtaagaaagagaagaagaata

SEQ ID NO: 13553 - DNA, 96 bp, Aspergillus novofumigatus
  misc_feature: 134
tatagataagggtaagggtaaggattaggatgaggataaggataagtagaagggtaagggtaaggattaggatgaggataaggataagtagaaggg

SEQ ID NO: 13554 - DNA, 96 bp, Aspergillus novofumigatus
  misc_feature: 134
cttccctttcctcttccctttcttctcctatttttaattatatttatttcttctctttactaaaactctctctatcttatatatttctacccctta

SEQ ID NO: 13555 - DNA, 96 bp, Aspergillus novofumigatus
  misc_feature: 134
aatcctatacttattgtccctaactcttattcttatccttatcttaatcctaattctaattcttcttttaaattcttattttaattcttaacttac

SEQ ID NO: 13556 - DNA, 96 bp, Aspergillus novofumigatus
  misc_feature: 134
ataaactaaatgtataatatatatctctgcgcattatggtatcctgaaatatatatattcattcattaatatattaatgctgattaacctgatctc

SEQ ID NO: 13557 - DNA, 96 bp, Aspergillus novofumigatus
  misc_feature: 134
gaatttaaagtaaaagcaaaaaaaggggttttaagagattagatagaagaagaggtagaagagaatttagggatagattaagaggagagaagaagg

SEQ ID NO: 13558 - DNA, 96 bp, Aspergillus novofumigatus
  misc_feature: 134
ctttcctcttccctttcttctcctatttttaattatatttatttcttctctttactaaaactctctctatcttatatatttctaccccttattctt

SEQ ID NO: 13559 - DNA, 96 bp, Aspergillus novofumigatus
  misc_feature: 134
atagataagggtaagggtaaggattaggatgaggataaggataagtagaagggtaagggtaaggattaggatgaggataaggataagtagaagggt

SEQ ID NO: 13560 - DNA, 96 bp, Aspergillus novofumigatus
  misc_feature: 134
atacttattgtccctaactcttattcttatccttatcttaatcctaattctaattcttcttttaaattcttattttaattcttaacttactctctt

SEQ ID NO: 13561 - DNA, 96 bp, Aspergillus novofumigatus
  misc_feature: 133
tagaatttaaagtaaaagcaaaaaaaggggttttaagagattagatagaagaagaggtagaagagaatttagggatagattaagaggagagaagaa

SEQ ID NO: 13562 - DNA, 96 bp, Aspergillus novofumigatus
  misc_feature: 133
ttaaagtaaaagcaaaaaaaggggttttaagagattagatagaagaagaggtagaagagaatttagggatagattaagaggagagaagaaggagta

SEQ ID NO: 13563 - DNA, 96 bp, Aspergillus novofumigatus
  misc_feature: 133
tctttctaattctcctcttatccttcttttattttctattttatttatttaatcttctatctatttatctatattttctttctctttttaatctat

SEQ ID NO: 13564 - DNA, 96 bp, Aspergillus novofumigatus
  misc_feature: 133
agattagaatttaaagtaaaagcaaaaaaaggggttttaagagattagatagaagaagaggtagaagagaatttagggatagattaagaggagaga

SEQ ID NO: 13565 - DNA, 96 bp, Aspergillus novofumigatus
  misc_feature: 133
tctaatcctatacttattgtccctaactcttattcttatccttatcttaatcctaattctaattcttcttttaaattcttattttaattcttaact

SEQ ID NO: 13566 - DNA, 96 bp, Aspergillus novofumigatus
  misc_feature: 133
gaccggcaggcaggggcgcgcgccatagacagacacttgtagagacacacagacaccggggtcggtataggccgggcgcgcgcgccccggggggga

SEQ ID NO: 13567 - DNA, 96 bp, Aspergillus novofumigatus
  misc_feature: 133
ctttctaattctcctcttatccttcttttattttctattttatttatttaatcttctatctatttatctatattttctttctctttttaatctata

SEQ ID NO: 13568 - DNA, 96 bp, Aspergillus novofumigatus
  misc_feature: 133
taatcctatacttattgtccctaactcttattcttatccttatcttaatcctaattctaattcttcttttaaattcttattttaattcttaactta

SEQ ID NO: 13569 - DNA, 96 bp, Aspergillus novofumigatus
  misc_feature: 133
atgaaatctaactaaggttagattcagtattataagagtattaataagtaaattaatattgtattaataaggaaaaaatattgtattaataattta

SEQ ID NO: 13570 - DNA, 96 bp, Aspergillus novofumigatus
  misc_feature: 133
agcatatttcagcttataggataggtaatatataatatttatataataagttattatattaataaataaaatatatagatatcctagtggtgtggc

SEQ ID NO: 13571 - DNA, 96 bp, Aspergillus novofumigatus
  misc_feature: 133
attcagctaacatactatataaaccaaccgtataatatatatctctgcgcattatggtatactaaaatatatattcattcccaaatatatcaatgc

SEQ ID NO: 13572 - DNA, 96 bp, Aspergillus novofumigatus
  misc_feature: 133
ccctttcctcttccctttcttctcctatttttaattatatttatttcttctctttactaaaactctctctatcttatatatttctaccccttattc

SEQ ID NO: 13573 - DNA, 96 bp, Aspergillus novofumigatus
  misc_feature: 133
agatagagtaagaattaagagagaaatagagagaagagataaaaagggagaagaaaaaagaggtaaataagtaaaaaaaatagaaaaaagaagaag

SEQ ID NO: 13574 - DNA, 96 bp, Aspergillus novofumigatus
  misc_feature: 133
aaactaaatgtataatatatatctctgcgcattatggtatcctgaaatatatatattcattcattaatatattaatgctgattaacctgatctcct

SEQ ID NO: 13575 - DNA, 96 bp, Aspergillus novofumigatus
  misc_feature: 132
tttcctcttccctttcttctcctatttttaattatatttatttcttctctttactaaaactctctctatcttatatatttctaccccttattctta

SEQ ID NO: 13576 - DNA, 96 bp, Aspergillus novofumigatus
  misc_feature: 132
gtaagggtaaggattaggatgaggataaggataagtagaagggtaagggtaaggattaggatgaggataaggataagtagaagggtgagggataaa

SEQ ID NO: 13577 - DNA, 96 bp, Aspergillus novofumigatus
  misc_feature: 132
tttaaagtaaaagcaaaaaaaggggttttaagagattagatagaagaagaggtagaagagaatttagggatagattaagaggagagaagaaggagt

SEQ ID NO: 13578 - DNA, 96 bp, Aspergillus novofumigatus
  misc_feature: 132
aatatataagatagagagagttttagtaaagagaagaaataaatataattaaaaataggagaagaaagggaagaggaaagggaagaggaaagggaa

SEQ ID NO: 13579 - DNA, 96 bp, Aspergillus novofumigatus
  misc_feature: 132
ttcagctaacatactatataaaccaaccgtataatatatatctctgcgcattatggtatactaaaatatatattcattcccaaatatatcaatgct

SEQ ID NO: 13580 - DNA, 96 bp, Aspergillus novofumigatus
  misc_feature: 132
gagtatacaagttaatttagaaagaaaagaatagaaggtaaagatagataagatagaaagagtttaagtaaagggtaagaaagagaagaagaataa

SEQ ID NO: 13581 - DNA, 96 bp, Aspergillus novofumigatus
  misc_feature: 132
tcttccctttcttctcctatttttaattatatttatttcttctctttactaaaactctctctatcttatatatttctaccccttattcttatctta

SEQ ID NO: 13582 - DNA, 96 bp, Aspergillus novofumigatus
  misc_feature: 132
agagattagaatttaaagtaaaagcaaaaaaaggggttttaagagattagatagaagaagaggtagaagagaatttagggatagattaagaggaga

SEQ ID NO: 13583 - DNA, 96 bp, Aspergillus novofumigatus
  misc_feature: 132
tccctttcctcttccctttcttctcctatttttaattatatttatttcttctctttactaaaactctctctatcttatatatttctaccccttatt

SEQ ID NO: 13584 - DNA, 96 bp, Aspergillus novofumigatus
  misc_feature: 132
tataaactaaatgtataatatatatctctgcgcattatggtatcctgaaatatatatattcattcattaatatattaatgctgattaacctgatct

SEQ ID NO: 13585 - DNA, 96 bp, Aspergillus novofumigatus
  misc_feature: 132
tagtagctgcctagaacactacttccttacagatataggccgggcgcgcgcgcgccatataccggccacttatcgagacacacaggcactgggggc

SEQ ID NO: 13586 - DNA, 96 bp, Aspergillus novofumigatus
  misc_feature: 132
tagaaatatataagatagagagagttttagtaaagagaagaaataaatataattaaaaataggagaagaaagggaagaggaaagggaagaggaaag

SEQ ID NO: 13587 - DNA, 96 bp, Aspergillus novofumigatus
  misc_feature: 132
agaatttaaagtaaaagcaaaaaaaggggttttaagagattagatagaagaagaggtagaagagaatttagggatagattaagaggagagaagaag

SEQ ID NO: 13588 - DNA, 96 bp, Aspergillus novofumigatus
  misc_feature: 132
atatagataagggtaagggtaaggattaggatgaggataaggataagtagaagggtaagggtaaggattaggatgaggataaggataagtagaagg

SEQ ID NO: 13589 - DNA, 96 bp, Aspergillus novofumigatus
  misc_feature: 132
ccctttcttctcctatttttaattatatttatttcttctctttactaaaactctctctatcttatatatttctaccccttattcttatcttaaact

SEQ ID NO: 13590 - DNA, 96 bp, Aspergillus novofumigatus
  misc_feature: 132
agaaagaaagagagaaagagaagagagaaagaattatagatagagattaatataagtaagagtttaagagtgagggatttaaaattaagttaatat

SEQ ID NO: 13591 - DNA, 96 bp, Aspergillus novofumigatus
  misc_feature: 131
ttcttcttctctttcttaccctttacttaaactctttctatcttatctatctttaccttctattcttttctttctaaattaacttgtatactcttt

SEQ ID NO: 13592 - DNA, 96 bp, Aspergillus novofumigatus
  misc_feature: 131
acaagttaatttagaaagaaaagaatagaaggtaaagatagataagatagaaagagtttaagtaaagggtaagaaagagaagaagaataagaagaa

SEQ ID NO: 13593 - DNA, 96 bp, Aspergillus novofumigatus
  misc_feature: 131
aagggaaaagagtatacaagttaatttagaaagaaaagaatagaaggtaaagatagataagatagaaagagtttaagtaaagggtaagaaagagaa

SEQ ID NO: 13594 - DNA, 96 bp, Aspergillus novofumigatus
  misc_feature: 131
agatatagataagggtaagggtaaggattaggatgaggataaggataagtagaagggtaagggtaaggattaggatgaggataaggataagtagaa

SEQ ID NO: 13595 - DNA, 96 bp, Aspergillus novofumigatus
  misc_feature: 131
ttagaatttaaagtaaaagcaaaaaaaggggttttaagagattagatagaagaagaggtagaagagaatttagggatagattaagaggagagaaga

SEQ ID NO: 13596 - DNA, 96 bp, Aspergillus novofumigatus
  misc_feature: 131
gatagagtaagaattaagagagaaatagagagaagagataaaaagggagaagaaaaaagaggtaaataagtaaaaaaaatagaaaaaagaagaaga

SEQ ID NO: 13597 - DNA, 96 bp, Aspergillus novofumigatus
  misc_feature: 131
tctaccccttattcttatcttaaacttactaacccttactctattacttatccttccttactttattctccttactacctcttaccttctgcctat

SEQ ID NO: 13598 - DNA, 96 bp, Aspergillus novofumigatus
  misc_feature: 131
taagagattagaatttaaagtaaaagcaaaaaaaggggttttaagagattagatagaagaagaggtagaagagaatttagggatagattaagagga

SEQ ID NO: 13599 - DNA, 96 bp, Aspergillus novofumigatus
  misc_feature: 131
tccctttcttctcctatttttaattatatttatttcttctctttactaaaactctctctatcttatatatttctaccccttattcttatcttaaac

SEQ ID NO: 13600 - DNA, 96 bp, Aspergillus novofumigatus
  misc_feature: 131
gagattagaatttaaagtaaaagcaaaaaaaggggttttaagagattagatagaagaagaggtagaagagaatttagggatagattaagaggagag

SEQ ID NO: 13601 - DNA, 96 bp, Aspergillus novofumigatus
  misc_feature: 131
gaaatatataagatagagagagttttagtaaagagaagaaataaatataattaaaaataggagaagaaagggaagaggaaagggaagaggaaaggg

SEQ ID NO: 13602 - DNA, 96 bp, Aspergillus novofumigatus
  misc_feature: 131
gaaagaaagagagaaagagaagagagaaagaattatagatagagattaatataagtaagagtttaagagtgagggatttaaaattaagttaatatt

SEQ ID NO: 13603 - DNA, 96 bp, Aspergillus novofumigatus
  misc_feature: 131
ctcttccctttcttctcctatttttaattatatttatttcttctctttactaaaactctctctatcttatatatttctaccccttattcttatctt

SEQ ID NO: 13604 - DNA, 96 bp, Aspergillus novofumigatus
  misc_feature: 131
aagagattagaatttaaagtaaaagcaaaaaaaggggttttaagagattagatagaagaagaggtagaagagaatttagggatagattaagaggag

SEQ ID NO: 13605 - DNA, 96 bp, Aspergillus novofumigatus
  misc_feature: 131
ctaatcctatacttattgtccctaactcttattcttatccttatcttaatcctaattctaattcttcttttaaattcttattttaattcttaactt

SEQ ID NO: 13606 - DNA, 96 bp, Aspergillus novofumigatus
  misc_feature: 131
cctttcttctcctatttttaattatatttatttcttctctttactaaaactctctctatcttatatatttctaccccttattcttatcttaaactt

SEQ ID NO: 13607 - DNA, 96 bp, Aspergillus novofumigatus
  misc_feature: 131
aagcatatttcagcttataggataggtaatatataatatttatataataagttattatattaataaataaaatatatagatatcctagtggtgtgg

SEQ ID NO: 13608 - DNA, 96 bp, Aspergillus novofumigatus
  misc_feature: 131
attcttcttctctttcttaccctttacttaaactctttctatcttatctatctttaccttctattcttttctttctaaattaacttgtatactctt

SEQ ID NO: 13609 - DNA, 96 bp, Aspergillus novofumigatus
  misc_feature: 130
gtagaaatatataagatagagagagttttagtaaagagaagaaataaatataattaaaaataggagaagaaagggaagaggaaagggaagaggaaa

SEQ ID NO: 13610 - DNA, 96 bp, Aspergillus novofumigatus
  misc_feature: 130
ttccctttcttctcctatttttaattatatttatttcttctctttactaaaactctctctatcttatatatttctaccccttattcttatcttaaa

SEQ ID NO: 13611 - DNA, 96 bp, Aspergillus novofumigatus
  misc_feature: 130
gagatagagtaagaattaagagagaaatagagagaagagataaaaagggagaagaaaaaagaggtaaataagtaaaaaaaatagaaaaaagaagaa

SEQ ID NO: 13612 - DNA, 96 bp, Aspergillus novofumigatus
  misc_feature: 130
tatacaagttaatttagaaagaaaagaatagaaggtaaagatagataagatagaaagagtttaagtaaagggtaagaaagagaagaagaataagaa

SEQ ID NO: 13613 - DNA, 96 bp, Aspergillus novofumigatus
  misc_feature: 130
gattagaatttaaagtaaaagcaaaaaaaggggttttaagagattagatagaagaagaggtagaagagaatttagggatagattaagaggagagaa

SEQ ID NO: 13614 - DNA, 96 bp, Aspergillus novofumigatus
  misc_feature: 130
ttctaccccttattcttatcttaaacttactaacccttactctattacttatccttccttactttattctccttactacctcttaccttctgccta

SEQ ID NO: 13615 - DNA, 96 bp, Aspergillus novofumigatus
  misc_feature: 130
tgaaatctaactaaggttagattcagtattataagagtattaataagtaaattaatattgtattaataaggaaaaaatattgtattaataatttaa

SEQ ID NO: 13616 - DNA, 96 bp, Aspergillus novofumigatus
  misc_feature: 130
agtagctgcctagaacactacttccttacagatataggccgggcgcgcgcgcgccatataccggccacttatcgagacacacaggcactgggggca

SEQ ID NO: 13617 - DNA, 96 bp, Aspergillus novofumigatus
  misc_feature: 130
tacaagttaatttagaaagaaaagaatagaaggtaaagatagataagatagaaagagtttaagtaaagggtaagaaagagaagaagaataagaaga

SEQ ID NO: 13618 - DNA, 96 bp, Aspergillus novofumigatus
  misc_feature: 130
gaagggaaaagagtatacaagttaatttagaaagaaaagaatagaaggtaaagatagataagatagaaagagtttaagtaaagggtaagaaagaga

SEQ ID NO: 13619 - DNA, 96 bp, Aspergillus novofumigatus
  misc_feature: 130
gggtagaaatatataagatagagagagttttagtaaagagaagaaataaatataattaaaaataggagaagaaagggaagaggaaagggaagagga

SEQ ID NO: 13620 - DNA, 96 bp, Aspergillus novofumigatus
  misc_feature: 130
actaaatgtataatatatatctctgcgcattatggtatcctgaaatatatatattcattcattaatatattaatgctgattaacctgatctcctga

SEQ ID NO: 13621 - DNA, 96 bp, Aspergillus novofumigatus
  misc_feature: 130
cagctaacatactatataaaccaaccgtataatatatatctctgcgcattatggtatactaaaatatatattcattcccaaatatatcaatgctga

SEQ ID NO: 13622 - DNA, 96 bp, Aspergillus novofumigatus
  misc_feature: 130
taaatgtataatatatatctctgcgcattatggtatcctgaaatatatatattcattcattaatatattaatgctgattaacctgatctcctgata

SEQ ID NO: 13623 - DNA, 96 bp, Aspergillus novofumigatus
  misc_feature: 130
ggggtagaaatatataagatagagagagttttagtaaagagaagaaataaatataattaaaaataggagaagaaagggaagaggaaagggaagagg

SEQ ID NO: 13624 - DNA, 96 bp, Aspergillus novofumigatus
  misc_feature: 130
atacaagttaatttagaaagaaaagaatagaaggtaaagatagataagatagaaagagtttaagtaaagggtaagaaagagaagaagaataagaag

SEQ ID NO: 13625 - DNA, 96 bp, Aspergillus novofumigatus
  misc_feature: 130
agtatacaagttaatttagaaagaaaagaatagaaggtaaagatagataagatagaaagagtttaagtaaagggtaagaaagagaagaagaataag

SEQ ID NO: 13626 - DNA, 96 bp, Aspergillus novofumigatus
  misc_feature: 130
ctaccccttattcttatcttaaacttactaacccttactctattacttatccttccttactttattctccttactacctcttaccttctgcctatt

SEQ ID NO: 13627 - DNA, 96 bp, Aspergillus novofumigatus
  misc_feature: 130
cctcttccctttcttctcctatttttaattatatttatttcttctctttactaaaactctctctatcttatatatttctaccccttattcttatct

SEQ ID NO: 13628 - DNA, 96 bp, Aspergillus novofumigatus
  misc_feature: 130
agtagaagggtgaggatttagatatagataagggtaagggtaaggattaggatgaggataaggataagtagaagggtaagggtaaggattaggatg

SEQ ID NO: 13629 - DNA, 96 bp, Aspergillus novofumigatus
  misc_feature: 130
aagtagaagggtgaggatttagatatagataagggtaagggtaaggattaggatgaggataaggataagtagaagggtaagggtaaggattaggat

SEQ ID NO: 13630 - DNA, 96 bp, Aspergillus novofumigatus
  misc_feature: 129
atagagtaagaattaagagagaaatagagagaagagataaaaagggagaagaaaaaagaggtaaataagtaaaaaaaatagaaaaaagaagaagaa

SEQ ID NO: 13631 - DNA, 96 bp, Aspergillus novofumigatus
  misc_feature: 129
ttcctcttccctttcttctcctatttttaattatatttatttcttctctttactaaaactctctctatcttatatatttctaccccttattcttat

SEQ ID NO: 13632 - DNA, 96 bp, Aspergillus novofumigatus
  misc_feature: 129
ggtagaaatatataagatagagagagttttagtaaagagaagaaataaatataattaaaaataggagaagaaagggaagaggaaagggaagaggaa

SEQ ID NO: 13633 - DNA, 96 bp, Aspergillus novofumigatus
  misc_feature: 129
ttagtagctgcctagaacactacttccttacagatataggccgggcgcgcgcgcgccatataccggccacttatcgagacacacaggcactggggg

SEQ ID NO: 13634 - DNA, 96 bp, Aspergillus novofumigatus
  misc_feature: 129
cttccctttcttctcctatttttaattatatttatttcttctctttactaaaactctctctatcttatatatttctaccccttattcttatcttaa

SEQ ID NO: 13635 - DNA, 96 bp, Aspergillus novofumigatus
  misc_feature: 129
agagtaagaattaagagagaaatagagagaagagataaaaagggagaagaaaaaagaggtaaataagtaaaaaaaatagaaaaaagaagaagaaga

SEQ ID NO: 13636 - DNA, 96 bp, Aspergillus novofumigatus
  misc_feature: 129
gtatacaagttaatttagaaagaaaagaatagaaggtaaagatagataagatagaaagagtttaagtaaagggtaagaaagagaagaagaataaga

SEQ ID NO: 13637 - DNA, 96 bp, Aspergillus novofumigatus
  misc_feature: 129
tagatatagataagggtaagggtaaggattaggatgaggataaggataagtagaagggtaagggtaaggattaggatgaggataaggataagtaga

SEQ ID NO: 13638 - DNA, 96 bp, Aspergillus novofumigatus
  misc_feature: 129
tcctcttccctttcttctcctatttttaattatatttatttcttctctttactaaaactctctctatcttatatatttctaccccttattcttatc

SEQ ID NO: 13639 - DNA, 96 bp, Aspergillus novofumigatus
  misc_feature: 129
tcctactatctcttctttctctaattcttttcttccctctttttatccctcttatctatacttactaactcttattcttcctctacccctccctct

SEQ ID NO: 13640 - DNA, 96 bp, Aspergillus novofumigatus
  misc_feature: 129
gaaagggaagaggaaagggaatagaaaagaaaagaaaataaaaggtaataataagagagagaataagggttaggaataaaatagaaattattaata

SEQ ID NO: 13641 - DNA, 96 bp, Aspergillus novofumigatus
  misc_feature: 129
catatttcagcttataggataggtaatatataatatttatataataagttattatattaataaataaaatatatagatatcctagtggtgtggcta

SEQ ID NO: 13642 - DNA, 96 bp, Aspergillus novofumigatus
  misc_feature: 129
ctttcttctcctatttttaattatatttatttcttctctttactaaaactctctctatcttatatatttctaccccttattcttatcttaaactta

SEQ ID NO: 13643 - DNA, 96 bp, Aspergillus novofumigatus
  misc_feature: 129
taaattattatttactttatccttttcttttaatttatctttccttaattttaatttccttcttctctttcttctctttcttctctttcttctctt

SEQ ID NO: 13644 - DNA, 96 bp, Aspergillus novofumigatus
  misc_feature: 129
cctctcctactatctcttctttctctaattcttttcttccctctttttatccctcttatctatacttactaactcttattcttcctctacccctcc

SEQ ID NO: 13645 - DNA, 96 bp, Aspergillus novofumigatus
  misc_feature: 129
gatatagataagggtaagggtaaggattaggatgaggataaggataagtagaagggtaagggtaaggattaggatgaggataaggataagtagaag

SEQ ID NO: 13646 - DNA, 96 bp, Aspergillus novofumigatus
  misc_feature: 129
ccccttattcttatcttaaacttactaacccttactctattacttatccttccttactttattctccttactacctcttaccttctgcctattctc

SEQ ID NO: 13647 - DNA, 96 bp, Aspergillus novofumigatus
  misc_feature: 129
gaaatctaactaaggttagattcagtattataagagtattaataagtaaattaatattgtattaataaggaaaaaatattgtattaataatttaat

SEQ ID NO: 13648 - DNA, 96 bp, Aspergillus novofumigatus
  misc_feature: 129
agtaagagatagagtaagaattaagagagaaatagagagaagagataaaaagggagaagaaaaaagaggtaaataagtaaaaaaaatagaaaaaag

SEQ ID NO: 13649 - DNA, 96 bp, Aspergillus novofumigatus
  misc_feature: 129
attagaatttaaagtaaaagcaaaaaaaggggttttaagagattagatagaagaagaggtagaagagaatttagggatagattaagaggagagaag

SEQ ID NO: 13650 - DNA, 96 bp, Aspergillus novofumigatus
  misc_feature: 129
ctaccctcatcctaaccctcccccttattaatatccttatcctattaataattatccccttctttatcctatattactttctataaccttatacct

SEQ ID NO: 13651 - DNA, 96 bp, Aspergillus novofumigatus
  misc_feature: 129
agaaatatataagatagagagagttttagtaaagagaagaaataaatataattaaaaataggagaagaaagggaagaggaaagggaagaggaaagg

SEQ ID NO: 13652 - DNA, 96 bp, Aspergillus novofumigatus
  misc_feature: 129
ccctccctccctcgtccccctcgctcgcgcgcgcacccctgccggtcctcgccggcgccggccccccggtccctatgacggtgcgcgcgcgcgcgg

SEQ ID NO: 13653 - DNA, 96 bp, Aspergillus novofumigatus
  misc_feature: 129
atttagatatagataagggtaagggtaaggattaggatgaggataaggataagtagaagggtaagggtaaggattaggatgaggataaggataagt

SEQ ID NO: 13654 - DNA, 96 bp, Aspergillus novofumigatus
  misc_feature: 129
agctaacatactatataaaccaaccgtataatatatatctctgcgcattatggtatactaaaatatatattcattcccaaatatatcaatgctgat

SEQ ID NO: 13655 - DNA, 96 bp, Aspergillus novofumigatus
  misc_feature: 129
aagtatagaagaagagatagagttagaggaagaaatttaaagataagaggaattagaaagaataaataagaggagaggatattaggggttagtttt

SEQ ID NO: 13656 - DNA, 96 bp, Aspergillus novofumigatus
  misc_feature: 128
ttattcttatcttaaacttactaacccttactctattacttatccttccttactttattctccttactacctcttaccttctgcctattctcctta

SEQ ID NO: 13657 - DNA, 96 bp, Aspergillus novofumigatus
  misc_feature: 128
atcctaatccctaccctcatcctaaccctcccccttattaatatccttatcctattaataattatccccttctttatcctatattactttctataa

SEQ ID NO: 13658 - DNA, 96 bp, Aspergillus novofumigatus
  misc_feature: 128
agagatagagtaagaattaagagagaaatagagagaagagataaaaagggagaagaaaaaagaggtaaataagtaaaaaaaatagaaaaaagaaga

SEQ ID NO: 13659 - DNA, 96 bp, Aspergillus novofumigatus
  misc_feature: 128
tcttcttctctttcttaccctttacttaaactctttctatcttatctatctttaccttctattcttttctttctaaattaacttgtatactctttt

SEQ ID NO: 13660 - DNA, 96 bp, Aspergillus novofumigatus
  misc_feature: 128
tctcctactatctcttctttctctaattcttttcttccctctttttatccctcttatctatacttactaactcttattcttcctctacccctccct

SEQ ID NO: 13661 - DNA, 96 bp, Aspergillus novofumigatus
  misc_feature: 128
gtagaagggtgaggatttagatatagataagggtaagggtaaggattaggatgaggataaggataagtagaagggtaagggtaaggattaggatga

SEQ ID NO: 13662 - DNA, 96 bp, Aspergillus novofumigatus
  misc_feature: 128
taccccttattcttatcttaaacttactaacccttactctattacttatccttccttactttattctccttactacctcttaccttctgcctattc

SEQ ID NO: 13663 - DNA, 96 bp, Aspergillus novofumigatus
  misc_feature: 128
ctctcctactatctcttctttctctaattcttttcttccctctttttatccctcttatctatacttactaactcttattcttcctctacccctccc

SEQ ID NO: 13664 - DNA, 96 bp, Aspergillus novofumigatus
  misc_feature: 128
ctcctactatctcttctttctctaattcttttcttccctctttttatccctcttatctatacttactaactcttattcttcctctacccctccctc

SEQ ID NO: 13665 - DNA, 96 bp, Aspergillus novofumigatus
  misc_feature: 128
agggaaaagagtatacaagttaatttagaaagaaaagaatagaaggtaaagatagataagatagaaagagtttaagtaaagggtaagaaagagaag

SEQ ID NO: 13666 - DNA, 96 bp, Aspergillus novofumigatus
  misc_feature: 128
ctaaatgtataatatatatctctgcgcattatggtatcctgaaatatatatattcattcattaatatattaatgctgattaacctgatctcctgat

SEQ ID NO: 13667 - DNA, 96 bp, Aspergillus novofumigatus
  misc_feature: 128
aagtaggtataaggttatagaaagtaatataggataaagaaggggataattattaataggataaggatattaataagggggagggttaggatgagg

SEQ ID NO: 13668 - DNA, 96 bp, Aspergillus novofumigatus
  misc_feature: 128
aactaaatgtataatatatatctctgcgcattatggtatcctgaaatatatatattcattcattaatatattaatgctgattaacctgatctcctg

SEQ ID NO: 13669 - DNA, 96 bp, Aspergillus novofumigatus
  misc_feature: 128
aaagggaagaggaaagggaatagaaaagaaaagaaaataaaaggtaataataagagagagaataagggttaggaataaaatagaaattattaatat

SEQ ID NO: 13670 - DNA, 96 bp, Aspergillus novofumigatus
  misc_feature: 128
ataattctaacccttaccttaatatattaataatttctattttattcctaacccttattctctctcttattattaccttttattttcttttctttt

SEQ ID NO: 13671 - DNA, 96 bp, Aspergillus novofumigatus
  misc_feature: 128
aagaattaagagagaaatagagagaagagataaaaagggagaagaaaaaagaggtaaataagtaaaaaaaatagaaaaaagaagaagaagaaaggt

SEQ ID NO: 13672 - DNA, 96 bp, Aspergillus novofumigatus
  misc_feature: 127
tttcttctcctatttttaattatatttatttcttctctttactaaaactctctctatcttatatatttctaccccttattcttatcttaaacttac

SEQ ID NO: 13673 - DNA, 96 bp, Aspergillus novofumigatus
  misc_feature: 127
ttctaattcttattctaattcttattctaattcttattctaattcttattctaattcttattctaattcttattctaattcttattctaattctta

SEQ ID NO: 13674 - DNA, 96 bp, Aspergillus novofumigatus
  misc_feature: 127
ttagatatagataagggtaagggtaaggattaggatgaggataaggataagtagaagggtaagggtaaggattaggatgaggataaggataagtag

SEQ ID NO: 13675 - DNA, 96 bp, Aspergillus novofumigatus
  misc_feature: 127
gtaagagatagagtaagaattaagagagaaatagagagaagagataaaaagggagaagaaaaaagaggtaaataagtaaaaaaaatagaaaaaaga

SEQ ID NO: 13676 - DNA, 96 bp, Aspergillus novofumigatus
  misc_feature: 127
gggaaaagagtatacaagttaatttagaaagaaaagaatagaaggtaaagatagataagatagaaagagtttaagtaaagggtaagaaagagaaga

SEQ ID NO: 13677 - DNA, 96 bp, Aspergillus novofumigatus
  misc_feature: 127
tcagctaacatactatataaaccaaccgtataatatatatctctgcgcattatggtatactaaaatatatattcattcccaaatatatcaatgctg

SEQ ID NO: 13678 - DNA, 96 bp, Aspergillus novofumigatus
  misc_feature: 127
tatcctaatccctaccctcatcctaaccctcccccttattaatatccttatcctattaataattatccccttctttatcctatattactttctata

SEQ ID NO: 13679 - DNA, 96 bp, Aspergillus novofumigatus
  misc_feature: 127
aagggaagaggaaagggaatagaaaagaaaagaaaataaaaggtaataataagagagagaataagggttaggaataaaatagaaattattaatata

SEQ ID NO: 13680 - DNA, 96 bp, Aspergillus novofumigatus
  misc_feature: 127
tagtaaaataaggagaataggcagaaggtaagaggtagtaaggagaataaagtaaggaaggataagtaatagagtaagggttagtaagtttaagat

SEQ ID NO: 13681 - DNA, 96 bp, Aspergillus novofumigatus
  misc_feature: 127
agtatagaagaagagatagagttagaggaagaaatttaaagataagaggaattagaaagaataaataagaggagaggatattaggggttagtttta

SEQ ID NO: 13682 - DNA, 96 bp, Aspergillus novofumigatus
  misc_feature: 127
gtaggtataaggttatagaaagtaatataggataaagaaggggataattattaataggataaggatattaataagggggagggttaggatgagggt

SEQ ID NO: 13683 - DNA, 96 bp, Aspergillus novofumigatus
  misc_feature: 127
gatttagatatagataagggtaagggtaaggattaggatgaggataaggataagtagaagggtaagggtaaggattaggatgaggataaggataag

SEQ ID NO: 13684 - DNA, 96 bp, Aspergillus novofumigatus
  misc_feature: 127
gaggatttagatatagataagggtaagggtaaggattaggatgaggataaggataagtagaagggtaagggtaaggattaggatgaggataaggat

SEQ ID NO: 13685 - DNA, 96 bp, Aspergillus novofumigatus
  misc_feature: 127
aaaagaaaataaaaggtaataataagagagagaataagggttaggaataaaatagaaattattaatatattaaggtaagggttagaattattaaag

SEQ ID NO: 13686 - DNA, 96 bp, Aspergillus novofumigatus
  misc_feature: 127
aagagatagagtaagaattaagagagaaatagagagaagagataaaaagggagaagaaaaaagaggtaaataagtaaaaaaaatagaaaaaagaag

SEQ ID NO: 13687 - DNA, 96 bp, Aspergillus novofumigatus
  misc_feature: 127
agaagggtgaggatttagatatagataagggtaagggtaaggattaggatgaggataaggataagtagaagggtaagggtaaggattaggatgagg

SEQ ID NO: 13688 - DNA, 96 bp, Aspergillus novofumigatus
  misc_feature: 127
accccttattcttatcttaaacttactaacccttactctattacttatccttccttactttattctccttactacctcttaccttctgcctattct

SEQ ID NO: 13689 - DNA, 96 bp, Aspergillus novofumigatus
  misc_feature: 126
agtaagaattaagagagaaatagagagaagagataaaaagggagaagaaaaaagaggtaaataagtaaaaaaaatagaaaaaagaagaagaagaaa

SEQ ID NO: 13690 - DNA, 96 bp, Aspergillus novofumigatus
  misc_feature: 126
tttagatatagataagggtaagggtaaggattaggatgaggataaggataagtagaagggtaagggtaaggattaggatgaggataaggataagta

SEQ ID NO: 13691 - DNA, 96 bp, Aspergillus novofumigatus
  misc_feature: 126
taagagatagagtaagaattaagagagaaatagagagaagagataaaaagggagaagaaaaaagaggtaaataagtaaaaaaaatagaaaaaagaa

SEQ ID NO: 13692 - DNA, 96 bp, Aspergillus novofumigatus
  misc_feature: 126
tattcttatcttaaacttactaacccttactctattacttatccttccttactttattctccttactacctcttaccttctgcctattctccttat

SEQ ID NO: 13693 - DNA, 96 bp, Aspergillus novofumigatus
  misc_feature: 126
aggatttagatatagataagggtaagggtaaggattaggatgaggataaggataagtagaagggtaagggtaaggattaggatgaggataaggata

SEQ ID NO: 13694 - DNA, 96 bp, Aspergillus novofumigatus
  misc_feature: 126
taccctcatcctaaccctcccccttattaatatccttatcctattaataattatccccttctttatcctatattactttctataaccttataccta

SEQ ID NO: 13695 - DNA, 96 bp, Aspergillus novofumigatus
  misc_feature: 126
tagatagtgaggttaatagtaaggtagatagtgtagtcaatagtaaggtaggtaataaggtagatagtaatataaatatcatagtagatagtaagg

SEQ ID NO: 13696 - DNA, 96 bp, Aspergillus novofumigatus
  misc_feature: 126
tagagtaagaattaagagagaaatagagagaagagataaaaagggagaagaaaaaagaggtaaataagtaaaaaaaatagaaaaaagaagaagaag

SEQ ID NO: 13697 - DNA, 96 bp, Aspergillus novofumigatus
  misc_feature: 126
tagaagggtgaggatttagatatagataagggtaagggtaaggattaggatgaggataaggataagtagaagggtaagggtaaggattaggatgag

SEQ ID NO: 13698 - DNA, 96 bp, Aspergillus novofumigatus
  misc_feature: 126
taattctaacccttaccttaatatattaataatttctattttattcctaacccttattctctctcttattattaccttttattttcttttcttttc

SEQ ID NO: 13699 - DNA, 96 bp, Aspergillus novofumigatus
  misc_feature: 126
cccttattcttatcttaaacttactaacccttactctattacttatccttccttactttattctccttactacctcttaccttctgcctattctcc

SEQ ID NO: 13700 - DNA, 96 bp, Aspergillus novofumigatus
  misc_feature: 126
ccctctcctactatctcttctttctctaattcttttcttccctctttttatccctcttatctatacttactaactcttattcttcctctacccctc

SEQ ID NO: 13701 - DNA, 96 bp, Aspergillus novofumigatus
  misc_feature: 126
cttattcttatcttaaacttactaacccttactctattacttatccttccttactttattctccttactacctcttaccttctgcctattctcctt

SEQ ID NO: 13702 - DNA, 96 bp, Aspergillus novofumigatus
  misc_feature: 126
agtaggtataaggttatagaaagtaatataggataaagaaggggataattattaataggataaggatattaataagggggagggttaggatgaggg

SEQ ID NO: 13703 - DNA, 96 bp, Aspergillus novofumigatus
  misc_feature: 126
agggaagaggaaagggaatagaaaagaaaagaaaataaaaggtaataataagagagagaataagggttaggaataaaatagaaattattaatatat

SEQ ID NO: 13704 - DNA, 96 bp, Aspergillus novofumigatus
  misc_feature: 125
gagtaagaattaagagagaaatagagagaagagataaaaagggagaagaaaaaagaggtaaataagtaaaaaaaatagaaaaaagaagaagaagaa

SEQ ID NO: 13705 - DNA, 96 bp, Aspergillus novofumigatus
  misc_feature: 125
ggatttagatatagataagggtaagggtaaggattaggatgaggataaggataagtagaagggtaagggtaaggattaggatgaggataaggataa

SEQ ID NO: 13706 - DNA, 96 bp, Aspergillus novofumigatus
  misc_feature: 125
agaaaagaaaataaaaggtaataataagagagagaataagggttaggaataaaatagaaattattaatatattaaggtaagggttagaattattaa

SEQ ID NO: 13707 - DNA, 96 bp, Aspergillus novofumigatus
  misc_feature: 125
tgaggatttagatatagataagggtaagggtaaggattaggatgaggataaggataagtagaagggtaagggtaaggattaggatgaggataagga

SEQ ID NO: 13708 - DNA, 96 bp, Aspergillus novofumigatus
  misc_feature: 125
aaaataaggagaataggcagaaggtaagaggtagtaaggagaataaagtaaggaaggataagtaatagagtaagggttagtaagtttaagataaga

SEQ ID NO: 13709 - DNA, 96 bp, Aspergillus novofumigatus
  misc_feature: 125
gtaagatagatagtgaggttaatagtaaggtagatagtgtagtcaatagtaaggtaggtaataaggtagatagtaatataaatatcatagtagata

SEQ ID NO: 13710 - DNA, 96 bp, Aspergillus novofumigatus
  misc_feature: 125
taataattctaacccttaccttaatatattaataatttctattttattcctaacccttattctctctcttattattaccttttattttcttttctt

SEQ ID NO: 13711 - DNA, 96 bp, Aspergillus novofumigatus
  misc_feature: 125
taagtatagaagaagagatagagttagaggaagaaatttaaagataagaggaattagaaagaataaataagaggagaggatattaggggttagttt

SEQ ID NO: 13712 - DNA, 96 bp, Aspergillus novofumigatus
  misc_feature: 125
atagtgaggttaatagtaaggtagatagtgtagtcaatagtaaggtaggtaataaggtagatagtaatataaatatcatagtagatagtaaggtta

SEQ ID NO: 13713 - DNA, 96 bp, Aspergillus novofumigatus
  misc_feature: 125
cctaccctcatcctaaccctcccccttattaatatccttatcctattaataattatccccttctttatcctatattactttctataaccttatacc

SEQ ID NO: 13714 - DNA, 96 bp, Aspergillus novofumigatus
  misc_feature: 125
ggaaagggaagaggaaagggaatagaaaagaaaagaaaataaaaggtaataataagagagagaataagggttaggaataaaatagaaattattaat

SEQ ID NO: 13715 - DNA, 96 bp, Aspergillus novofumigatus
  misc_feature: 125
gattatttttaagctagctagttattcttatattataataatagatattatagtaatattctattaatagctagtctacctagactactaatagtt

SEQ ID NO: 13716 - DNA, 96 bp, Aspergillus novofumigatus
  misc_feature: 125
attaaattattatttactttatccttttcttttaatttatctttccttaattttaatttccttcttctctttcttctctttcttctctttcttctc

SEQ ID NO: 13717 - DNA, 96 bp, Aspergillus novofumigatus
  misc_feature: 125
cttcttctctttcttaccctttacttaaactctttctatcttatctatctttaccttctattcttttctttctaaattaacttgtatactcttttc

SEQ ID NO: 13718 - DNA, 96 bp, Aspergillus novofumigatus
  misc_feature: 125
agaaatatataagatagagagagttttagtaaagagaagaaataaatataattaaaaatagaagaagaaagggaagaggaaagggaagaggaaagg

SEQ ID NO: 13719 - DNA, 96 bp, Aspergillus novofumigatus
  misc_feature: 125
ccttattcttatcttaaacttactaacccttactctattacttatccttccttactttattctccttactacctcttaccttctgcctattctcct

SEQ ID NO: 13720 - DNA, 96 bp, Aspergillus novofumigatus
  misc_feature: 125
agattatttttaagctagctagttattcttatattataataatagatattatagtaatattctattaatagctagtctacctagactactaatagt

SEQ ID NO: 13721 - DNA, 96 bp, Aspergillus novofumigatus
  misc_feature: 125
agatagtgaggttaatagtaaggtagatagtgtagtcaatagtaaggtaggtaataaggtagatagtaatataaatatcatagtagatagtaaggt

SEQ ID NO: 13722 - DNA, 96 bp, Aspergillus novofumigatus
  misc_feature: 125
agaggaaagggaagaggaaagggaatagaaaagaaaagaaaataaaaggtaataataagagagagaataagggttaggaataaaatagaaattatt

SEQ ID NO: 13723 - DNA, 96 bp, Aspergillus novofumigatus
  misc_feature: 125
aataattctaacccttaccttaatatattaataatttctattttattcctaacccttattctctctcttattattaccttttattttcttttcttt

SEQ ID NO: 13724 - DNA, 96 bp, Aspergillus novofumigatus
  misc_feature: 124
gtagaaatatataagatagagagagttttagtaaagagaagaaataaatataattaaaaatagaagaagaaagggaagaggaaagggaagaggaaa

SEQ ID NO: 13725 - DNA, 96 bp, Aspergillus novofumigatus
  misc_feature: 124
gaaaagaaaataaaaggtaataataagagagagaataagggttaggaataaaatagaaattattaatatattaaggtaagggttagaattattaaa

SEQ ID NO: 13726 - DNA, 96 bp, Aspergillus novofumigatus
  misc_feature: 124
ttcttctcctatttttaattatatttatttcttctctttactaaaactctctctatcttatatatttctaccccttattcttatcttaaacttact

SEQ ID NO: 13727 - DNA, 96 bp, Aspergillus novofumigatus
  misc_feature: 124
ttatcctaatccctaccctcatcctaaccctcccccttattaatatccttatcctattaataattatccccttctttatcctatattactttctat

SEQ ID NO: 13728 - DNA, 96 bp, Aspergillus novofumigatus
  misc_feature: 124
ttagtaaaataaggagaataggcagaaggtaagaggtagtaaggagaataaagtaaggaaggataagtaatagagtaagggttagtaagtttaaga

SEQ ID NO: 13729 - DNA, 96 bp, Aspergillus novofumigatus
  misc_feature: 124
tagtgaggttaatagtaaggtagatagtgtagtcaatagtaaggtaggtaataaggtagatagtaatataaatatcatagtagatagtaaggttaa

SEQ ID NO: 13730 - DNA, 96 bp, Aspergillus novofumigatus
  misc_feature: 124
aatagaaaagaaaagaaaataaaaggtaataataagagagagaataagggttaggaataaaatagaaattattaatatattaaggtaagggttaga

SEQ ID NO: 13731 - DNA, 96 bp, Aspergillus novofumigatus
  misc_feature: 124
tattaaccttactatctactatgatatttatattactatctaccttattacctaccttactattgactacactatctaccttactattaacctcac

SEQ ID NO: 13732 - DNA, 96 bp, Aspergillus novofumigatus
  misc_feature: 124
tattaaattattatttactttatccttttcttttaatttatctttccttaattttaatttccttcttctctttcttctctttcttctctttcttct

SEQ ID NO: 13733 - DNA, 96 bp, Aspergillus novofumigatus
  misc_feature: 124
agtaaaataaggagaataggcagaaggtaagaggtagtaaggagaataaagtaaggaaggataagtaatagagtaagggttagtaagtttaagata

SEQ ID NO: 13734 - DNA, 96 bp, Aspergillus novofumigatus
  misc_feature: 124
taagaattaagagagaaatagagagaagagataaaaagggagaagaaaaaagaggtaaataagtaaaaaaaatagaaaaaagaagaagaagaaagg

SEQ ID NO: 13735 - DNA, 96 bp, Aspergillus novofumigatus
  misc_feature: 124
gtgaggatttagatatagataagggtaagggtaaggattaggatgaggataaggataagtagaagggtaagggtaaggattaggatgaggataagg

SEQ ID NO: 13736 - DNA, 96 bp, Aspergillus novofumigatus
  misc_feature: 124
gtatagaagaagagatagagttagaggaagaaatttaaagataagaggaattagaaagaataaataagaggagaggatattaggggttagttttag

SEQ ID NO: 13737 - DNA, 96 bp, Aspergillus novofumigatus
  misc_feature: 124
gtaagaattaagagagaaatagagagaagagataaaaagggagaagaaaaaagaggtaaataagtaaaaaaaatagaaaaaagaagaagaagaaag

SEQ ID NO: 13738 - DNA, 96 bp, Aspergillus novofumigatus
  misc_feature: 124
ctaacccttaccctctcctactatctcttctttctctaattcttttcttccctctttttatccctcttatctatacttactaactcttattcttcc

SEQ ID NO: 13739 - DNA, 96 bp, Aspergillus novofumigatus
  misc_feature: 124
ctaatccctaccctcatcctaaccctcccccttattaatatccttatcctattaataattatccccttctttatcctatattactttctataacct

SEQ ID NO: 13740 - DNA, 96 bp, Aspergillus novofumigatus
  misc_feature: 124
aaagggaatagaaaagaaaagaaaataaaaggtaataataagagagagaataagggttaggaataaaatagaaattattaatatattaaggtaagg

SEQ ID NO: 13741 - DNA, 96 bp, Aspergillus novofumigatus
  misc_feature: 124
attaggtagaataagagataatttataggattaggatgagttaggattaggaataagttagggttaggaatgagttaggattaggaatttattagg

SEQ ID NO: 13742 - DNA, 96 bp, Aspergillus novofumigatus
  misc_feature: 124
attctaattcttattctaattcttattctaattcttattctaattcttattctaattcttattctaattcttattctaattcttattctaattctt

SEQ ID NO: 13743 - DNA, 96 bp, Aspergillus novofumigatus
  misc_feature: 124
agtgaggttaatagtaaggtagatagtgtagtcaatagtaaggtaggtaataaggtagatagtaatataaatatcatagtagatagtaaggttaat

SEQ ID NO: 13744 - DNA, 96 bp, Aspergillus novofumigatus
  misc_feature: 124
aagaggaaagggaagaggaaagggaatagaaaagaaaagaaaataaaaggtaataataagagagagaataagggttaggaataaaatagaaattat

SEQ ID NO: 13745 - DNA, 96 bp, Aspergillus novofumigatus
  misc_feature: 124
ataagtatagaagaagagatagagttagaggaagaaatttaaagataagaggaattagaaagaataaataagaggagaggatattaggggttagtt

SEQ ID NO: 13746 - DNA, 96 bp, Aspergillus novofumigatus
  misc_feature: 123
ttcttctctttcttaccctttacttaaactctttctatcttatctatctttaccttctattcttttctttctaaattaacttgtatactcttttcc

SEQ ID NO: 13747 - DNA, 96 bp, Aspergillus novofumigatus
  misc_feature: 123
aaataaggagaataggcagaaggtaagaggtagtaaggagaataaagtaaggaaggataagtaatagagtaagggttagtaagtttaagataagaa

SEQ ID NO: 13748 - DNA, 96 bp, Aspergillus novofumigatus
  misc_feature: 123
atagaaaagaaaagaaaataaaaggtaataataagagagagaataagggttaggaataaaatagaaattattaatatattaaggtaagggttagaa

SEQ ID NO: 13749 - DNA, 96 bp, Aspergillus novofumigatus
  misc_feature: 123
ggtagatagtaagatagatagtaaggtagacagtaagatagatagtgaggttaatagtaaggtagatagtgtagtcaatagtaaggtaggtaataa

SEQ ID NO: 13750 - DNA, 96 bp, Aspergillus novofumigatus
  misc_feature: 123
gtaaaataaggagaataggcagaaggtaagaggtagtaaggagaataaagtaaggaaggataagtaatagagtaagggttagtaagtttaagataa

SEQ ID NO: 13751 - DNA, 96 bp, Aspergillus novofumigatus
  misc_feature: 123
ttaccctctcctactatctcttctttctctaattcttttcttccctctttttatccctcttatctatacttactaactcttattcttcctctaccc

SEQ ID NO: 13752 - DNA, 96 bp, Aspergillus novofumigatus
  misc_feature: 123
aggaaagggaagaggaaagggaatagaaaagaaaagaaaataaaaggtaataataagagagagaataagggttaggaataaaatagaaattattaa

SEQ ID NO: 13753 - DNA, 96 bp, Aspergillus novofumigatus
  misc_feature: 123
ttaaattattatttactttatccttttcttttaatttatctttccttaattttaatttccttcttctctttcttctctttcttctctttcttctct

SEQ ID NO: 13754 - DNA, 96 bp, Aspergillus novofumigatus
  misc_feature: 123
tcctaatccctaccctcatcctaaccctcccccttattaatatccttatcctattaataattatccccttctttatcctatattactttctataac

SEQ ID NO: 13755 - DNA, 96 bp, Aspergillus novofumigatus
  misc_feature: 123
cctactatctcttctttctctaattcttttcttccctctttttatccctcttatctatacttactaactcttattcttcctctacccctccctcta

SEQ ID NO: 13756 - DNA, 96 bp, Aspergillus novofumigatus
  misc_feature: 123
cccttaccctctcctactatctcttctttctctaattcttttcttccctctttttatccctcttatctatacttactaactcttattcttcctcta

SEQ ID NO: 13757 - DNA, 96 bp, Aspergillus novofumigatus
  misc_feature: 123
tactattaaccttactatctactatgatatttatattactatctaccttattacctaccttactattgactacactatctaccttactattaacct

SEQ ID NO: 13758 - DNA, 96 bp, Aspergillus novofumigatus
  misc_feature: 123
tactaacccttaccctctcctactatctcttctttctctaattcttttcttccctctttttatccctcttatctatacttactaactcttattctt

SEQ ID NO: 13759 - DNA, 96 bp, Aspergillus novofumigatus
  misc_feature: 123
taattaggtagaataagagataatttataggattaggatgagttaggattaggaataagttagggttaggaatgagttaggattaggaatttatta

SEQ ID NO: 13760 - DNA, 96 bp, Aspergillus novofumigatus
  misc_feature: 123
gaggaaagggaagaggaaagggaatagaaaagaaaagaaaataaaaggtaataataagagagagaataagggttaggaataaaatagaaattatta

SEQ ID NO: 13761 - DNA, 96 bp, Aspergillus novofumigatus
  misc_feature: 123
aatccctaccctcatcctaaccctcccccttattaatatccttatcctattaataattatccccttctttatcctatattactttctataacctta

SEQ ID NO: 13762 - DNA, 96 bp, Aspergillus novofumigatus
  misc_feature: 123
taagatagatagtgaggttaatagtaaggtagatagtgtagtcaatagtaaggtaggtaataaggtagatagtaatataaatatcatagtagatag

SEQ ID NO: 13763 - DNA, 96 bp, Aspergillus novofumigatus
  misc_feature: 123
taacccttaccctctcctactatctcttctttctctaattcttttcttccctctttttatccctcttatctatacttactaactcttattcttcct

SEQ ID NO: 13764 - DNA, 96 bp, Aspergillus novofumigatus
  misc_feature: 123
ggttaattaggtagaataagagataatttataggattaggatgagttaggattaggaataagttagggttaggaatgagttaggattaggaattta

SEQ ID NO: 13765 - DNA, 96 bp, Aspergillus novofumigatus
  misc_feature: 123
gttaattaggtagaataagagataatttataggattaggatgagttaggattaggaataagttagggttaggaatgagttaggattaggaatttat

SEQ ID NO: 13766 - DNA, 96 bp, Aspergillus novofumigatus
  misc_feature: 123
cttaccctctcctactatctcttctttctctaattcttttcttccctctttttatccctcttatctatacttactaactcttattcttcctctacc

SEQ ID NO: 13767 - DNA, 96 bp, Aspergillus novofumigatus
  misc_feature: 123
gggaagaggaaagggaatagaaaagaaaagaaaataaaaggtaataataagagagagaataagggttaggaataaaatagaaattattaatatatt

SEQ ID NO: 13768 - DNA, 96 bp, Aspergillus novofumigatus
  misc_feature: 123
aacccttaccctctcctactatctcttctttctctaattcttttcttccctctttttatccctcttatctatacttactaactcttattcttcctc

SEQ ID NO: 13769 - DNA, 96 bp, Aspergillus novofumigatus
  misc_feature: 123
gaaagggaatagaaaagaaaagaaaataaaaggtaataataagagagagaataagggttaggaataaaatagaaattattaatatattaaggtaag

SEQ ID NO: 13770 - DNA, 96 bp, Aspergillus novofumigatus
  misc_feature: 123
aattaggtagaataagagataatttataggattaggatgagttaggattaggaataagttagggttaggaatgagttaggattaggaatttattag

SEQ ID NO: 13771 - DNA, 96 bp, Aspergillus novofumigatus
  misc_feature: 123
aagggaatagaaaagaaaagaaaataaaaggtaataataagagagagaataagggttaggaataaaatagaaattattaatatattaaggtaaggg

SEQ ID NO: 13772 - DNA, 96 bp, Aspergillus novofumigatus
  misc_feature: 123
aataaggagaataggcagaaggtaagaggtagtaaggagaataaagtaaggaaggataagtaatagagtaagggttagtaagtttaagataagaat

SEQ ID NO: 13773 - DNA, 96 bp, Aspergillus novofumigatus
  misc_feature: 123
atccctaccctcatcctaaccctcccccttattaatatccttatcctattaataattatccccttctttatcctatattactttctataaccttat

SEQ ID NO: 13774 - DNA, 96 bp, Aspergillus novofumigatus
  misc_feature: 123
aattctaacccttaccttaatatattaataatttctattttattcctaacccttattctctctcttattattaccttttattttcttttcttttct

SEQ ID NO: 13775 - DNA, 96 bp, Aspergillus novofumigatus
  misc_feature: 122
tttagtaaaataaggagaataggcagaaggtaagaggtagtaaggagaataaagtaaggaaggataagtaatagagtaagggttagtaagtttaag

SEQ ID NO: 13776 - DNA, 96 bp, Aspergillus novofumigatus
  misc_feature: 122
ttactattaaccttactatctactatgatatttatattactatctaccttattacctaccttactattgactacactatctaccttactattaacc

SEQ ID NO: 13777 - DNA, 96 bp, Aspergillus novofumigatus
  misc_feature: 122
atttagtaaaataaggagaataggcagaaggtaagaggtagtaaggagaataaagtaaggaaggataagtaatagagtaagggttagtaagtttaa

SEQ ID NO: 13778 - DNA, 96 bp, Aspergillus novofumigatus
  misc_feature: 122
ctattaaccttactatctactatgatatttatattactatctaccttattacctaccttactattgactacactatctaccttactattaacctca

SEQ ID NO: 13779 - DNA, 96 bp, Aspergillus novofumigatus
  misc_feature: 122
tcttatttatattctaattctaattcttattctaattcttattctaattcttattctaattcttattctaattcttattctaattcttattctaat

SEQ ID NO: 13780 - DNA, 96 bp, Aspergillus novofumigatus
  misc_feature: 122
tcgtcaccaggcggcggcgcgcgcgggcccctgctgccggtcagggcgcgcgcccggccatctcggaccgccaactggcgtggtcccatggagggg

SEQ ID NO: 13781 - DNA, 96 bp, Aspergillus novofumigatus
  misc_feature: 122
tccctaccctcatcctaaccctcccccttattaatatccttatcctattaataattatccccttctttatcctatattactttctataaccttata

SEQ ID NO: 13782 - DNA, 96 bp, Aspergillus novofumigatus
  misc_feature: 122
tattagtagtctaggtagactagctattaatagaatattactataatatctattattataatataagaataactagctagcttaaaaataatctct

SEQ ID NO: 13783 - DNA, 96 bp, Aspergillus novofumigatus
  misc_feature: 122
aggtagatagtaagatagatagtaaggtagacagtaagatagatagtgaggttaatagtaaggtagatagtgtagtcaatagtaaggtaggtaata

SEQ ID NO: 13784 - DNA, 96 bp, Aspergillus novofumigatus
  misc_feature: 122
tatagaagaagagatagagttagaggaagaaatttaaagataagaggaattagaaagaataaataagaggagaggatattaggggttagttttagg

SEQ ID NO: 13785 - DNA, 96 bp, Aspergillus novofumigatus
  misc_feature: 122
tagaagaagagatagagttagaggaagaaatttaaagataagaggaattagaaagaataaataagaggagaggatattaggggttagttttaggag

SEQ ID NO: 13786 - DNA, 96 bp, Aspergillus novofumigatus
  misc_feature: 122
tagaaatatataagatagagagagttttagtaaagagaagaaataaatataattaaaaatagaagaagaaagggaagaggaaagggaagaggaaag

SEQ ID NO: 13787 - DNA, 96 bp, Aspergillus novofumigatus
  misc_feature: 122
tagaaaagaaaagaaaataaaaggtaataataagagagagaataagggttaggaataaaatagaaattattaatatattaaggtaagggttagaat

SEQ ID NO: 13788 - DNA, 96 bp, Aspergillus novofumigatus
  misc_feature: 122
taaaataaggagaataggcagaaggtaagaggtagtaaggagaataaagtaaggaaggataagtaatagagtaagggttagtaagtttaagataag

SEQ ID NO: 13789 - DNA, 96 bp, Aspergillus novofumigatus
  misc_feature: 122
gtagatagtaagatagatagtaaggtagacagtaagatagatagtgaggttaatagtaaggtagatagtgtagtcaatagtaaggtaggtaataag

SEQ ID NO: 13790 - DNA, 96 bp, Aspergillus novofumigatus
  misc_feature: 122
ccttaccctctcctactatctcttctttctctaattcttttcttccctctttttatccctcttatctatacttactaactcttattcttcctctac

SEQ ID NO: 13791 - DNA, 96 bp, Aspergillus novofumigatus
  misc_feature: 122
ggtgaggatttagatatagataagggtaagggtaaggattaggatgaggataaggataagtagaagggtaagggtaaggattaggatgaggataag

SEQ ID NO: 13792 - DNA, 96 bp, Aspergillus novofumigatus
  misc_feature: 122
gatagtgaggttaatagtaaggtagatagtgtagtcaatagtaaggtaggtaataaggtagatagtaatataaatatcatagtagatagtaaggtt

SEQ ID NO: 13793 - DNA, 96 bp, Aspergillus novofumigatus
  misc_feature: 122
ctattagtagtctaggtagactagctattaatagaatattactataatatctattattataatataagaataactagctagcttaaaaataatctc

SEQ ID NO: 13794 - DNA, 96 bp, Aspergillus novofumigatus
  misc_feature: 122
gaatagaaaagaaaagaaaataaaaggtaataataagagagagaataagggttaggaataaaatagaaattattaatatattaaggtaagggttag

SEQ ID NO: 13795 - DNA, 96 bp, Aspergillus novofumigatus
  misc_feature: 122
actaacccttaccctctcctactatctcttctttctctaattcttttcttccctctttttatccctcttatctatacttactaactcttattcttc

SEQ ID NO: 13796 - DNA, 96 bp, Aspergillus novofumigatus
  misc_feature: 122
ctattaaattattatttactttatccttttcttttaatttatctttccttaattttaatttccttcttctctttcttctctttcttctctttcttc

SEQ ID NO: 13797 - DNA, 96 bp, Aspergillus novofumigatus
  misc_feature: 122
cttattctaattcttattctaattcttattctaattcttattctaattcttattctaattcttattctaattcttattctaattcttattctaatt

SEQ ID NO: 13798 - DNA, 96 bp, Aspergillus novofumigatus
  misc_feature: 122
agtaagatagatagtgaggttaatagtaaggtagatagtgtagtcaatagtaaggtaggtaataaggtagatagtaatataaatatcatagtagat

SEQ ID NO: 13799 - DNA, 96 bp, Aspergillus novofumigatus
  misc_feature: 122
acccttaccctctcctactatctcttctttctctaattcttttcttccctctttttatccctcttatctatacttactaactcttattcttcctct

SEQ ID NO: 13800 - DNA, 96 bp, Aspergillus novofumigatus
  misc_feature: 122
agacagtaagatagatagtgaggttaatagtaaggtagatagtgtagtcaatagtaaggtaggtaataaggtagatagtaatataaatatcatagt

SEQ ID NO: 13801 - DNA, 96 bp, Aspergillus novofumigatus
  misc_feature: 122
aagatagatagtgaggttaatagtaaggtagatagtgtagtcaatagtaaggtaggtaataaggtagatagtaatataaatatcatagtagatagt

SEQ ID NO: 13802 - DNA, 96 bp, Aspergillus novofumigatus
  misc_feature: 122
aataagtatagaagaagagatagagttagaggaagaaatttaaagataagaggaattagaaagaataaataagaggagaggatattaggggttagt

SEQ ID NO: 13803 - DNA, 96 bp, Aspergillus novofumigatus
  misc_feature: 121
ttcttattctaattcttattctaattcttattctaattcttattctaattcttattctaattcttattctaattcttattctaattcttattctaa

SEQ ID NO: 13804 - DNA, 96 bp, Aspergillus novofumigatus
  misc_feature: 121
ttactaacccttaccctctcctactatctcttctttctctaattcttttcttccctctttttatccctcttatctatacttactaactcttattct

SEQ ID NO: 13805 - DNA, 96 bp, Aspergillus novofumigatus
  misc_feature: 121
ggaaagggaatagaaaagaaaagaaaataaaaggtaataataagagagagaataagggttaggaataaaatagaaattattaatatattaaggtaa

SEQ ID NO: 13806 - DNA, 96 bp, Aspergillus novofumigatus
  misc_feature: 121
ccttactattaaccttactatctactatgatatttatattactatctaccttattacctaccttactattgactacactatctaccttactattaa

SEQ ID NO: 13807 - DNA, 96 bp, Aspergillus novofumigatus
  misc_feature: 121
tcttctcctatttttaattatatttatttcttctctttactaaaactctctctatcttatatatttctaccccttattcttatcttaaacttacta

SEQ ID NO: 13808 - DNA, 96 bp, Aspergillus novofumigatus
  misc_feature: 121
tcttattctaattcttattctaattcttattctaattcttattctaattcttattctaattcttattctaattcttattctaattcttattctaat

SEQ ID NO: 13809 - DNA, 96 bp, Aspergillus novofumigatus
  misc_feature: 121
agaagaagagatagagttagaggaagaaatttaaagataagaggaattagaaagaataaataagaggagaggatattaggggttagttttaggaga

SEQ ID NO: 13810 - DNA, 96 bp, Aspergillus novofumigatus
  misc_feature: 121
tctaattcttattctaattcttattctaattcttattctaattcttattctaattcttattctaattcttattctaattcttattctaattcttat

SEQ ID NO: 13811 - DNA, 96 bp, Aspergillus novofumigatus
  misc_feature: 121
gaagggtgaggatttagatatagataagggtaagggtaaggattaggatgaggataaggataagtagaagggtaagggtaaggattaggatgagga

SEQ ID NO: 13812 - DNA, 96 bp, Aspergillus novofumigatus
  misc_feature: 121
atagaagaagagatagagttagaggaagaaatttaaagataagaggaattagaaagaataaataagaggagaggatattaggggttagttttagga

SEQ ID NO: 13813 - DNA, 96 bp, Aspergillus novofumigatus
  misc_feature: 121
tatttatattctaattctaattcttattctaattcttattctaattcttattctaattcttattctaattcttattctaattcttattctaattct

SEQ ID NO: 13814 - DNA, 96 bp, Aspergillus novofumigatus
  misc_feature: 121
agatagatagtgaggttaatagtaaggtagatagtgtagtcaatagtaaggtaggtaataaggtagatagtaatataaatatcatagtagatagta

SEQ ID NO: 13815 - DNA, 96 bp, Aspergillus novofumigatus
  misc_feature: 121
aggaaagggaatagaaaagaaaagaaaataaaaggtaataataagagagagaataagggttaggaataaaatagaaattattaatatattaaggta

SEQ ID NO: 13816 - DNA, 96 bp, Aspergillus novofumigatus
  misc_feature: 121
taccctctcctactatctcttctttctctaattcttttcttccctctttttatccctcttatctatacttactaactcttattcttcctctacccc

SEQ ID NO: 13817 - DNA, 96 bp, Aspergillus novofumigatus
  misc_feature: 121
ggaatagaaaagaaaagaaaataaaaggtaataataagagagagaataagggttaggaataaaatagaaattattaatatattaaggtaagggtta

SEQ ID NO: 13818 - DNA, 96 bp, Aspergillus novofumigatus
  misc_feature: 121
cttactattaaccttactatctactatgatatttatattactatctaccttattacctaccttactattgactacactatctaccttactattaac

SEQ ID NO: 13819 - DNA, 96 bp, Aspergillus novofumigatus
  misc_feature: 121
ccctaccctcatcctaaccctcccccttattaatatccttatcctattaataattatccccttctttatcctatattactttctataaccttatac

SEQ ID NO: 13820 - DNA, 96 bp, Aspergillus novofumigatus
  misc_feature: 121
cttactacttaccttactattaaccttactatctactatgatatttatattactatctaccttattacctaccttactattgactacactatctac

SEQ ID NO: 13821 - DNA, 96 bp, Aspergillus novofumigatus
  misc_feature: 121
cctaatccctaccctcatcctaaccctcccccttattaatatccttatcctattaataattatccccttctttatcctatattactttctataacc

SEQ ID NO: 13822 - DNA, 96 bp, Aspergillus novofumigatus
  misc_feature: 121
actattaaccttactatctactatgatatttatattactatctaccttattacctaccttactattgactacactatctaccttactattaacctc

SEQ ID NO: 13823 - DNA, 96 bp, Aspergillus novofumigatus
  misc_feature: 121
atagatagtgaggttaatagtaaggtagatagtgtagtcaatagtaaggtaggtaataaggtagatagtaatataaatatcatagtagatagtaag

SEQ ID NO: 13824 - DNA, 96 bp, Aspergillus novofumigatus
  misc_feature: 121
cccttctcctctcttatcttataattaatctaatctcttttaatccttattctctctatcctaaattctcttgtcttctattattaatgactctct

SEQ ID NO: 13825 - DNA, 96 bp, Aspergillus novofumigatus
  misc_feature: 121
caggcactggggtcaatggaagccgggcgcgcgcgccccgggggtgaccagttggcggggacccttgggggggggcagaccggcaggcgggcaggg

SEQ ID NO: 13826 - DNA, 96 bp, Aspergillus novofumigatus
  misc_feature: 121
atttatattctaattctaattcttattctaattcttattctaattcttattctaattcttattctaattcttattctaattcttattctaattctt

SEQ ID NO: 13827 - DNA, 96 bp, Aspergillus novofumigatus
  misc_feature: 121
acttaccttactattaaccttactatctactatgatatttatattactatctaccttattacctaccttactattgactacactatctaccttact

SEQ ID NO: 13828 - DNA, 96 bp, Aspergillus novofumigatus
  misc_feature: 121
agggaatagaaaagaaaagaaaataaaaggtaataataagagagagaataagggttaggaataaaatagaaattattaatatattaaggtaagggt

SEQ ID NO: 13829 - DNA, 96 bp, Aspergillus novofumigatus
  misc_feature: 120
ttatttatattctaattctaattcttattctaattcttattctaattcttattctaattcttattctaattcttattctaattcttattctaattc

SEQ ID NO: 13830 - DNA, 96 bp, Aspergillus novofumigatus
  misc_feature: 120
cttctcctatttttaattatatttatttcttctctttactaaaactctctctatcttatatatttctaccccttattcttatcttaaacttactaa

SEQ ID NO: 13831 - DNA, 96 bp, Aspergillus novofumigatus
  misc_feature: 120
ttaggtagaataagagataatttataggattaggatgagttaggattaggaataagttagggttaggaatgagttaggattaggaatttattagga

SEQ ID NO: 13832 - DNA, 96 bp, Aspergillus novofumigatus
  misc_feature: 120
gatagatagtgaggttaatagtaaggtagatagtgtagtcaatagtaaggtaggtaataaggtagatagtaatataaatatcatagtagatagtaa

SEQ ID NO: 13833 - DNA, 96 bp, Aspergillus novofumigatus
  misc_feature: 120
ttaattaggtagaataagagataatttataggattaggatgagttaggattaggaataagttagggttaggaatgagttaggattaggaatttatt

SEQ ID NO: 13834 - DNA, 96 bp, Aspergillus novofumigatus
  misc_feature: 120
cagtaagatagatagtgaggttaatagtaaggtagatagtgtagtcaatagtaaggtaggtaataaggtagatagtaatataaatatcatagtaga

SEQ ID NO: 13835 - DNA, 96 bp, Aspergillus novofumigatus
  misc_feature: 120
gggtagaaatatataagatagagagagttttagtaaagagaagaaataaatataattaaaaatagaagaagaaagggaagaggaaagggaagagga

SEQ ID NO: 13836 - DNA, 96 bp, Aspergillus novofumigatus
  misc_feature: 120
agggtgaggatttagatatagataagggtaagggtaaggattaggatgaggataaggataagtagaagggtaagggtaaggattaggatgaggata

SEQ ID NO: 13837 - DNA, 96 bp, Aspergillus novofumigatus
  misc_feature: 120
tactacttaccttactattaaccttactatctactatgatatttatattactatctaccttattacctaccttactattgactacactatctacct

SEQ ID NO: 13838 - DNA, 96 bp, Aspergillus novofumigatus
  misc_feature: 120
taatccctaccctcatcctaaccctcccccttattaatatccttatcctattaataattatccccttctttatcctatattactttctataacctt

SEQ ID NO: 13839 - DNA, 96 bp, Aspergillus novofumigatus
  misc_feature: 120
ggaagaggaaagggaatagaaaagaaaagaaaataaaaggtaataataagagagagaataagggttaggaataaaatagaaattattaatatatta

SEQ ID NO: 13840 - DNA, 96 bp, Aspergillus novofumigatus
  misc_feature: 120
accttactattaaccttactatctactatgatatttatattactatctaccttattacctaccttactattgactacactatctaccttactatta

SEQ ID NO: 13841 - DNA, 96 bp, Aspergillus novofumigatus
  misc_feature: 120
agataatttataggattaggatgagttaggattaggaataagttagggttaggaatgagttaggattaggaatttattaggattaggaatttatta

SEQ ID NO: 13842 - DNA, 96 bp, Aspergillus novofumigatus
  misc_feature: 120
ctacttaccttactattaaccttactatctactatgatatttatattactatctaccttattacctaccttactattgactacactatctacctta

SEQ ID NO: 13843 - DNA, 96 bp, Aspergillus novofumigatus
  misc_feature: 120
ccctaactcttatttatattctaattctaattcttattctaattcttattctaattcttattctaattcttattctaattcttattctaattctta

SEQ ID NO: 13844 - DNA, 96 bp, Aspergillus novofumigatus
  misc_feature: 120
ggtagacagtaagatagatagtgaggttaatagtaaggtagatagtgtagtcaatagtaaggtaggtaataaggtagatagtaatataaatatcat

SEQ ID NO: 13845 - DNA, 96 bp, Aspergillus novofumigatus
  misc_feature: 120
gggaatagaaaagaaaagaaaataaaaggtaataataagagagagaataagggttaggaataaaatagaaattattaatatattaaggtaagggtt

SEQ ID NO: 13846 - DNA, 96 bp, Aspergillus novofumigatus
  misc_feature: 120
gaggtagatagtaagatagatagtaaggtagacagtaagatagatagtgaggttaatagtaaggtagatagtgtagtcaatagtaaggtaggtaat

SEQ ID NO: 13847 - DNA, 96 bp, Aspergillus novofumigatus
  misc_feature: 120
cttatttatattctaattctaattcttattctaattcttattctaattcttattctaattcttattctaattcttattctaattcttattctaatt

SEQ ID NO: 13848 - DNA, 96 bp, Aspergillus novofumigatus
  misc_feature: 120
aagaggaaagggaatagaaaagaaaagaaaataaaaggtaataataagagagagaataagggttaggaataaaatagaaattattaatatattaag

SEQ ID NO: 13849 - DNA, 96 bp, Aspergillus novofumigatus
  misc_feature: 120
ccttctcctctcttatcttataattaatctaatctcttttaatccttattctctctatcctaaattctcttgtcttctattattaatgactctctt

SEQ ID NO: 13850 - DNA, 96 bp, Aspergillus novofumigatus
  misc_feature: 120
agaagagtaaggattaataagtatagaagaagagatagagttagaggaagaaatttaaagataagaggaattagaaagaataaataagaggagagg

SEQ ID NO: 13851 - DNA, 96 bp, Aspergillus novofumigatus
  misc_feature: 120
aagggtgaggatttagatatagataagggtaagggtaaggattaggatgaggataaggataagtagaagggtaagggtaaggattaggatgaggat

SEQ ID NO: 13852 - DNA, 96 bp, Aspergillus novofumigatus
  misc_feature: 119
tttatattctaattctaattcttattctaattcttattctaattcttattctaattcttattctaattcttattctaattcttattctaattctta

SEQ ID NO: 13853 - DNA, 96 bp, Aspergillus novofumigatus
  misc_feature: 119
ggtagaaatatataagatagagagagttttagtaaagagaagaaataaatataattaaaaatagaagaagaaagggaagaggaaagggaagaggaa

SEQ ID NO: 13854 - DNA, 96 bp, Aspergillus novofumigatus
  misc_feature: 119
ttattctaattcttattctaattcttattctaattcttattctaattcttattctaattcttattctaattcttattctaattcttattctaattc

SEQ ID NO: 13855 - DNA, 96 bp, Aspergillus novofumigatus
  misc_feature: 119
gggtgaggatttagatatagataagggtaagggtaaggattaggatgaggataaggataagtagaagggtaagggtaaggattaggatgaggataa

SEQ ID NO: 13856 - DNA, 96 bp, Aspergillus novofumigatus
  misc_feature: 119
ctcttatttatattctaattctaattcttattctaattcttattctaattcttattctaattcttattctaattcttattctaattcttattctaa

SEQ ID NO: 13857 - DNA, 96 bp, Aspergillus novofumigatus
  misc_feature: 119
ttactacttaccttactattaaccttactatctactatgatatttatattactatctaccttattacctaccttactattgactacactatctacc

SEQ ID NO: 13858 - DNA, 96 bp, Aspergillus novofumigatus
  misc_feature: 119
tgaggtagatagtaagatagatagtaaggtagacagtaagatagatagtgaggttaatagtaaggtagatagtgtagtcaatagtaaggtaggtaa

SEQ ID NO: 13859 - DNA, 96 bp, Aspergillus novofumigatus
  misc_feature: 119
gaagaggaaagggaatagaaaagaaaagaaaataaaaggtaataataagagagagaataagggttaggaataaaatagaaattattaatatattaa

SEQ ID NO: 13860 - DNA, 96 bp, Aspergillus novofumigatus
  misc_feature: 119
gaagagtaaggattaataagtatagaagaagagatagagttagaggaagaaatttaaagataagaggaattagaaagaataaataagaggagagga

SEQ ID NO: 13861 - DNA, 96 bp, Aspergillus novofumigatus
  misc_feature: 119
tccctaactcttatttatattctaattctaattcttattctaattcttattctaattcttattctaattcttattctaattcttattctaattctt

SEQ ID NO: 13862 - DNA, 96 bp, Aspergillus novofumigatus
  misc_feature: 119
gttagaataagaattaaaaaaagagtcagaaggagagttaaagataataagttaagaattagaatatagattaaaaagagaaagaaaagatagata

SEQ ID NO: 13863 - DNA, 96 bp, Aspergillus novofumigatus
  misc_feature: 119
aatatatggatgctaactaatcttaatctactaatattactacctctcttactacttaccttactattaaccttactatctactatgatatttata

SEQ ID NO: 13864 - DNA, 96 bp, Aspergillus novofumigatus
  misc_feature: 119
cttaccttactattaaccttactatctactatgatatttatattactatctaccttattacctaccttactattgactacactatctaccttacta

SEQ ID NO: 13865 - DNA, 96 bp, Aspergillus novofumigatus
  misc_feature: 119
attagtagtctaggtagactagctattaatagaatattactataatatctattattataatataagaataactagctagcttaaaaataatctcta

SEQ ID NO: 13866 - DNA, 96 bp, Aspergillus novofumigatus
  misc_feature: 119
attctaattctaattcttattctaattcttattctaattcttattctaattcttattctaattcttattctaattcttattctaattcttattcta

SEQ ID NO: 13867 - DNA, 96 bp, Aspergillus novofumigatus
  misc_feature: 119
attcttattctaattcttattctaattcttattctaattcttattctaattcttattctaattcttattctaattcttattctaattcttattcta

SEQ ID NO: 13868 - DNA, 96 bp, Aspergillus novofumigatus
  misc_feature: 119
tacttaccttactattaaccttactatctactatgatatttatattactatctaccttattacctaccttactattgactacactatctaccttac

SEQ ID NO: 13869 - DNA, 96 bp, Aspergillus novofumigatus
  misc_feature: 119
gacagtaagatagatagtgaggttaatagtaaggtagatagtgtagtcaatagtaaggtaggtaataaggtagatagtaatataaatatcatagta

SEQ ID NO: 13870 - DNA, 96 bp, Aspergillus novofumigatus
  misc_feature: 119
taccttactattaaccttactatctactatgatatttatattactatctaccttattacctaccttactattgactacactatctaccttactatt

SEQ ID NO: 13871 - DNA, 96 bp, Aspergillus novofumigatus
  misc_feature: 119
taataagtatagaagaagagatagagttagaggaagaaatttaaagataagaggaattagaaagaataaataagaggagaggatattaggggttag

SEQ ID NO: 13872 - DNA, 96 bp, Aspergillus novofumigatus
  misc_feature: 119
ctatctcttctttctctaattcttttcttccctctttttatccctcttatctatacttactaactcttattcttcctctacccctccctctatccc

SEQ ID NO: 13873 - DNA, 96 bp, Aspergillus novofumigatus
  misc_feature: 119
gataatttataggattaggatgagttaggattaggaataagttagggttaggaatgagttaggattaggaatttattaggattaggaatttattag

SEQ ID NO: 13874 - DNA, 96 bp, Aspergillus novofumigatus
  misc_feature: 119
gagataatttataggattaggatgagttaggattaggaataagttagggttaggaatgagttaggattaggaatttattaggattaggaatttatt

SEQ ID NO: 13875 - DNA, 96 bp, Aspergillus novofumigatus
  misc_feature: 119
ctggggtcaatggaagccgggcgcgcgcgccccgggggtgaccagttggcggggacccttgggggggggcagaccggcaggcgggcaggagggggg

SEQ ID NO: 13876 - DNA, 96 bp, Aspergillus novofumigatus
  misc_feature: 119
acagtaagatagatagtgaggttaatagtaaggtagatagtgtagtcaatagtaaggtaggtaataaggtagatagtaatataaatatcatagtag

SEQ ID NO: 13877 - DNA, 96 bp, Aspergillus novofumigatus
  misc_feature: 119
ctaattcttattctaattcttattctaattcttattctaattcttattctaattcttattctaattcttattctaattcttattctaattcttatt

SEQ ID NO: 13878 - DNA, 96 bp, Aspergillus novofumigatus
  misc_feature: 119
aggcactggggtcaatggaagccgggcgcgcgcgccccgggggtgaccagttggcggggacccttgggggggggcagaccggcaggcgggcagggg

SEQ ID NO: 13879 - DNA, 96 bp, Aspergillus novofumigatus
  misc_feature: 119
aatagtttaaaatactttataattctaattagctaaattattatattctaatattaaatccttaattattcactagtaaggtggttaaactagggg

SEQ ID NO: 13880 - DNA, 96 bp, Aspergillus novofumigatus
  misc_feature: 119
atagtttaaaatactttataattctaattagctaaattattatattctaatattaaatccttaattattcactagtaaggtggttaaactaggggg

SEQ ID NO: 13881 - DNA, 96 bp, Aspergillus novofumigatus
  misc_feature: 119
agaataagaattaaaaaaagagtcagaaggagagttaaagataataagttaagaattagaatatagattaaaaagagaaagaaaagatagataaat

SEQ ID NO: 13882 - DNA, 96 bp, Aspergillus novofumigatus
  misc_feature: 119
agttagaataagaattaaaaaaagagtcagaaggagagttaaagataataagttaagaattagaatatagattaaaaagagaaagaaaagatagat

SEQ ID NO: 13883 - DNA, 96 bp, Aspergillus novofumigatus
  misc_feature: 119
aatttataggattaggatgagttaggattaggaataagttagggttaggaatgagttaggattaggaatttattaggattaggaatttattaggat

SEQ ID NO: 13884 - DNA, 96 bp, Aspergillus novofumigatus
  misc_feature: 119
actacttaccttactattaaccttactatctactatgatatttatattactatctaccttattacctaccttactattgactacactatctacctt

SEQ ID NO: 13885 - DNA, 96 bp, Aspergillus novofumigatus
  misc_feature: 118
tagaataagaattaaaaaaagagtcagaaggagagttaaagataataagttaagaattagaatatagattaaaaagagaaagaaaagatagataaa

SEQ ID NO: 13886 - DNA, 96 bp, Aspergillus novofumigatus
  misc_feature: 118
ttctaattctaattcttattctaattcttattctaattcttattctaattcttattctaattcttattctaattcttattctaattcttattctaa

SEQ ID NO: 13887 - DNA, 96 bp, Aspergillus novofumigatus
  misc_feature: 118
ttagaataagaattaaaaaaagagtcagaaggagagttaaagataataagttaagaattagaatatagattaaaaagagaaagaaaagatagataa

SEQ ID NO: 13888 - DNA, 96 bp, Aspergillus novofumigatus
  misc_feature: 118
ttatattctaattctaattcttattctaattcttattctaattcttattctaattcttattctaattcttattctaattcttattctaattcttat

SEQ ID NO: 13889 - DNA, 96 bp, Aspergillus novofumigatus
  misc_feature: 118
tcttttttctatatctatctcttctttcttttcttttctttcttctttcctctttcttttctatctattatcttcttactatctaacccttactcc

SEQ ID NO: 13890 - DNA, 96 bp, Aspergillus novofumigatus
  misc_feature: 118
tctcctatttttaattatatttatttcttctctttactaaaactctctctatcttatatatttctaccccttattcttatcttaaacttactaacc

SEQ ID NO: 13891 - DNA, 96 bp, Aspergillus novofumigatus
  misc_feature: 118
tctattaaattattatttactttatccttttcttttaatttatctttccttaattttaatttccttcttctctttcttctctttcttctctttctt

SEQ ID NO: 13892 - DNA, 96 bp, Aspergillus novofumigatus
  misc_feature: 118
gagttagaataagaattaaaaaaagagtcagaaggagagttaaagataataagttaagaattagaatatagattaaaaagagaaagaaaagataga

SEQ ID NO: 13893 - DNA, 96 bp, Aspergillus novofumigatus
  misc_feature: 118
tattctaattcttattctaattcttattctaattcttattctaattcttattctaattcttattctaattcttattctaattcttattctaattct

SEQ ID NO: 13894 - DNA, 96 bp, Aspergillus novofumigatus
  misc_feature: 118
tattctaattctaattcttattctaattcttattctaattcttattctaattcttattctaattcttattctaattcttattctaattcttattct

SEQ ID NO: 13895 - DNA, 96 bp, Aspergillus novofumigatus
  misc_feature: 118
tagacagtaagatagatagtgaggttaatagtaaggtagatagtgtagtcaatagtaaggtaggtaataaggtagatagtaatataaatatcatag

SEQ ID NO: 13896 - DNA, 96 bp, Aspergillus novofumigatus
  misc_feature: 118
tactatctcttctttctctaattcttttcttccctctttttatccctcttatctatacttactaactcttattcttcctctacccctccctctatc

SEQ ID NO: 13897 - DNA, 96 bp, Aspergillus novofumigatus
  misc_feature: 118
gtgaggtagatagtaagatagatagtaaggtagacagtaagatagatagtgaggttaatagtaaggtagatagtgtagtcaatagtaaggtaggta

SEQ ID NO: 13898 - DNA, 96 bp, Aspergillus novofumigatus
  misc_feature: 118
taattcttattctaattcttattctaattcttattctaattcttattctaattcttattctaattcttattctaattcttattctaattcttattc

SEQ ID NO: 13899 - DNA, 96 bp, Aspergillus novofumigatus
  misc_feature: 118
atatggatgctaactaatcttaatctactaatattactacctctcttactacttaccttactattaaccttactatctactatgatatttatatta

SEQ ID NO: 13900 - DNA, 96 bp, Aspergillus novofumigatus
  misc_feature: 118
actatctcttctttctctaattcttttcttccctctttttatccctcttatctatacttactaactcttattcttcctctacccctccctctatcc

SEQ ID NO: 13901 - DNA, 96 bp, Aspergillus novofumigatus
  misc_feature: 118
gaggaaagggaatagaaaagaaaagaaaataaaaggtaataataagagagagaataagggttaggaataaaatagaaattattaatatattaaggt

SEQ ID NO: 13902 - DNA, 96 bp, Aspergillus novofumigatus
  misc_feature: 118
atattctaattctaattcttattctaattcttattctaattcttattctaattcttattctaattcttattctaattcttattctaattcttattc

SEQ ID NO: 13903 - DNA, 96 bp, Aspergillus novofumigatus
  misc_feature: 118
ctatctatttatctatcttttctttctctttttaatctatattctaattcttaacttattatctttaactctccttctgactctttttttaattct

SEQ ID NO: 13904 - DNA, 96 bp, Aspergillus novofumigatus
  misc_feature: 118
ctactatctcttctttctctaattcttttcttccctctttttatccctcttatctatacttactaactcttattcttcctctacccctccctctat

SEQ ID NO: 13905 - DNA, 96 bp, Aspergillus novofumigatus
  misc_feature: 118
aagaagaagaaaggtcagggtggaataaggatatagggaaggataagattagggttaggagtaggattaggataaggataagggttagggtattag

SEQ ID NO: 13906 - DNA, 96 bp, Aspergillus novofumigatus
  misc_feature: 118
cctatttttaattatatttatttcttctctttactaaaactctctctatcttatatatttctaccccttattcttatcttaaacttactaaccctt

SEQ ID NO: 13907 - DNA, 96 bp, Aspergillus novofumigatus
  misc_feature: 118
cactggggtcaatggaagccgggcgcgcgcgccccgggggtgaccagttggcggggacccttgggggggggcagaccggcaggcgggcaggagggg

SEQ ID NO: 13908 - DNA, 96 bp, Aspergillus novofumigatus
  misc_feature: 118
aagagtaaggattaataagtatagaagaagagatagagttagaggaagaaatttaaagataagaggaattagaaagaataaataagaggagaggat

SEQ ID NO: 13909 - DNA, 96 bp, Aspergillus novofumigatus
  misc_feature: 118
atatatggatgctaactaatcttaatctactaatattactacctctcttactacttaccttactattaaccttactatctactatgatatttatat

SEQ ID NO: 13910 - DNA, 96 bp, Aspergillus novofumigatus
  misc_feature: 118
accctctcctactatctcttctttctctaattcttttcttccctctttttatccctcttatctatacttactaactcttattcttcctctacccct

SEQ ID NO: 13911 - DNA, 96 bp, Aspergillus novofumigatus
  misc_feature: 117
ttcttctctttcttcttctctttcttcttctctttcttcttattcttcttattcttcctctctttcttaccctttacttaaactctttctatctta

SEQ ID NO: 13912 - DNA, 96 bp, Aspergillus novofumigatus
  misc_feature: 117
ttctcctatttttaattatatttatttcttctctttactaaaactctctctatcttatatatttctaccccttattcttatcttaaacttactaac

SEQ ID NO: 13913 - DNA, 96 bp, Aspergillus novofumigatus
  misc_feature: 117
ttaccttactattaaccttactatctactatgatatttatattactatctaccttattacctaccttactattgactacactatctaccttactat

SEQ ID NO: 13914 - DNA, 96 bp, Aspergillus novofumigatus
  misc_feature: 117
aaggggtagaaatatataagatagagagagttttagtaaagagaagaaataaatataattaaaaatagaagaagaaagggaagaggaaagggaaga

SEQ ID NO: 13915 - DNA, 96 bp, Aspergillus novofumigatus
  misc_feature: 117
tcttatcttataattaatctaatctcttttaatccttattctctctatcctaaattctcttgtcttctattattaatgactctctttttttcttat

SEQ ID NO: 13916 - DNA, 96 bp, Aspergillus novofumigatus
  misc_feature: 117
tctctttttttctaatcttctctctttctaccctttctaactccctctcttctttttttaatctatctctaaatcctcttcttcctactcttctta

SEQ ID NO: 13917 - DNA, 96 bp, Aspergillus novofumigatus
  misc_feature: 117
tctcttctatctatttatctatcttttctttctctttttaatctatattctaattcttaacttattatctttaactctccttctgactcttttttt

SEQ ID NO: 13918 - DNA, 96 bp, Aspergillus novofumigatus
  misc_feature: 117
tctcttatcttataattaatctaatctcttttaatccttattctctctatcctaaattctcttgtcttctattattaatgactctctttttttctt

SEQ ID NO: 13919 - DNA, 96 bp, Aspergillus novofumigatus
  misc_feature: 117
gtagacagtaagatagatagtgaggttaatagtaaggtagatagtgtagtcaatagtaaggtaggtaataaggtagatagtaatataaatatcata

SEQ ID NO: 13920 - DNA, 96 bp, Aspergillus novofumigatus
  misc_feature: 117
tatattctaattctaattcttattctaattcttattctaattcttattctaattcttattctaattcttattctaattcttattctaattcttatt

SEQ ID NO: 13921 - DNA, 96 bp, Aspergillus novofumigatus
  misc_feature: 117
tatatggatgctaactaatcttaatctactaatattactacctctcttactacttaccttactattaaccttactatctactatgatatttatatt

SEQ ID NO: 13922 - DNA, 96 bp, Aspergillus novofumigatus
  misc_feature: 117
ggcagtgaggtagatagtaagatagatagtaaggtagacagtaagatagatagtgaggttaatagtaaggtagatagtgtagtcaatagtaaggta

SEQ ID NO: 13923 - DNA, 96 bp, Aspergillus novofumigatus
  misc_feature: 117
taattctaattcttattctaattcttattctaattcttattctaattcttattctaattcttattctaattcttattctaattcttattctaattc

SEQ ID NO: 13924 - DNA, 96 bp, Aspergillus novofumigatus
  misc_feature: 117
taaggattaataagtatagaagaagagatagagttagaggaagaaatttaaagataagaggaattagaaagaataaataagaggagaggatattag

SEQ ID NO: 13925 - DNA, 96 bp, Aspergillus novofumigatus
  misc_feature: 117
ctcttatcttataattaatctaatctcttttaatccttattctctctatcctaaattctcttgtcttctattattaatgactctctttttttctta

SEQ ID NO: 13926 - DNA, 96 bp, Aspergillus novofumigatus
  misc_feature: 117
ggggtagaaatatataagatagagagagttttagtaaagagaagaaataaatataattaaaaatagaagaagaaagggaagaggaaagggaagagg

SEQ ID NO: 13927 - DNA, 96 bp, Aspergillus novofumigatus
  misc_feature: 117
gcagtgaggtagatagtaagatagatagtaaggtagacagtaagatagatagtgaggttaatagtaaggtagatagtgtagtcaatagtaaggtag

SEQ ID NO: 13928 - DNA, 96 bp, Aspergillus novofumigatus
  misc_feature: 117
cttctcctctcttatcttataattaatctaatctcttttaatccttattctctctatcctaaattctcttgtcttctattattaatgactctcttt

SEQ ID NO: 13929 - DNA, 96 bp, Aspergillus novofumigatus
  misc_feature: 117
ctctcttatcttataattaatctaatctcttttaatccttattctctctatcctaaattctcttgtcttctattattaatgactctctttttttct

SEQ ID NO: 13930 - DNA, 96 bp, Aspergillus novofumigatus
  misc_feature: 117
aagaagagtaaggattaataagtatagaagaagagatagagttagaggaagaaatttaaagataagaggaattagaaagaataaataagaggagag

SEQ ID NO: 13931 - DNA, 96 bp, Aspergillus novofumigatus
  misc_feature: 117
agagttagaataagaattaaaaaaagagtcagaaggagagttaaagataataagttaagaattagaatatagattaaaaagagaaagaaaagatag

SEQ ID NO: 13932 - DNA, 96 bp, Aspergillus novofumigatus
  misc_feature: 117
agaggaaagggaatagaaaagaaaagaaaataaaaggtaataataagagagagaataagggttaggaataaaatagaaattattaatatattaagg

SEQ ID NO: 13933 - DNA, 96 bp, Aspergillus novofumigatus
  misc_feature: 117
cagtgaggtagatagtaagatagatagtaaggtagacagtaagatagatagtgaggttaatagtaaggtagatagtgtagtcaatagtaaggtagg

SEQ ID NO: 13934 - DNA, 96 bp, Aspergillus novofumigatus
  misc_feature: 117
aaggattaataagtatagaagaagagatagagttagaggaagaaatttaaagataagaggaattagaaagaataaataagaggagaggatattagg

SEQ ID NO: 13935 - DNA, 96 bp, Aspergillus novofumigatus
  misc_feature: 117
ataatttataggattaggatgagttaggattaggaataagttagggttaggaatgagttaggattaggaatttattaggattaggaatttattagg

SEQ ID NO: 13936 - DNA, 96 bp, Aspergillus novofumigatus
  misc_feature: 117
cctaactcttatttatattctaattctaattcttattctaattcttattctaattcttattctaattcttattctaattcttattctaattcttat

SEQ ID NO: 13937 - DNA, 96 bp, Aspergillus novofumigatus
  misc_feature: 117
agagaggtaaagggtttaagagattaaagaaagatagtagaagaaaaaagaagggattttaagagagtagattaagaagagtaggaagaagaggat

SEQ ID NO: 13938 - DNA, 96 bp, Aspergillus novofumigatus
  misc_feature: 117
agagataatttataggattaggatgagttaggattaggaataagttagggttaggaatgagttaggattaggaatttattaggattaggaatttat

SEQ ID NO: 13939 - DNA, 96 bp, Aspergillus novofumigatus
  misc_feature: 117
aggcagtgaggtagatagtaagatagatagtaaggtagacagtaagatagatagtgaggttaatagtaaggtagatagtgtagtcaatagtaaggt

SEQ ID NO: 13940 - DNA, 96 bp, Aspergillus novofumigatus
  misc_feature: 117
aattctaattcttattctaattcttattctaattcttattctaattcttattctaattcttattctaattcttattctaattcttattctaattct

SEQ ID NO: 13941 - DNA, 96 bp, Aspergillus novofumigatus
  misc_feature: 117
aattcattctattaaattattatttactttatccttttcttttaatttatctttccttaattttaatttccttcttctctttcttctctttcttct

SEQ ID NO: 13942 - DNA, 96 bp, Aspergillus novofumigatus
  misc_feature: 117
aatatcaggcaatgcttaatggaagacattaaattaggatattaaattattaatacaatattttttccttattaatacaatattaatttacttatt

SEQ ID NO: 13943 - DNA, 96 bp, Aspergillus novofumigatus
  misc_feature: 116
ttttctatatctgactcttctttcttttcttttctttcttcttttctctttcttttctatctattatcttcttactatctaacccttactccatcc

SEQ ID NO: 13944 - DNA, 96 bp, Aspergillus novofumigatus
  misc_feature: 116
tttcttcttctctttcttcttctctttcttcttattcttcttattcttcctctctttcttaccctttacttaaactctttctatcttatctatctt

SEQ ID NO: 13945 - DNA, 96 bp, Aspergillus novofumigatus
  misc_feature: 116
tttataggattaggatgagttaggattaggaataagttagggttaggaatgagttaggattaggaatttattaggattaggaatttattaggatta

SEQ ID NO: 13946 - DNA, 96 bp, Aspergillus novofumigatus
  misc_feature: 116
tttaatatatatctctactagtctactatataaaatttataaaatatttaattatatagagttttaaaaattctaggcttattattactaagtata

SEQ ID NO: 13947 - DNA, 96 bp, Aspergillus novofumigatus
  misc_feature: 116
ttctcctctcttatcttataattaatctaatctcttttaatccttattctctctatcctaaattctcttgtcttctattattaatgactctctttt

SEQ ID NO: 13948 - DNA, 96 bp, Aspergillus novofumigatus
  misc_feature: 116
ttctattaaattattatttactttatccttttcttttaatttatctttccttaattttaatttccttcttctctttcttctctttcttctctttct

SEQ ID NO: 13949 - DNA, 96 bp, Aspergillus novofumigatus
  misc_feature: 116
agctagggaataagggattaggcatataagtatataatatactctataggagtagatagattagttaattaaagataggatatatataactactaa

SEQ ID NO: 13950 - DNA, 96 bp, Aspergillus novofumigatus
  misc_feature: 116
ttactccctctctcctctatctcttcttaatctcctctcttatcccttctaatctaaatccttacccttactcttattattaccctctctattcct

SEQ ID NO: 13951 - DNA, 96 bp, Aspergillus novofumigatus
  misc_feature: 116
ttaattatgaacccttctcctctcttatcttataattaatctaatctcttttaatccttattctctctatcctaaattctcttgtcttctattatt

SEQ ID NO: 13952 - DNA, 96 bp, Aspergillus novofumigatus
  misc_feature: 116
ttaatatatggatgctaactaatcttaatctactaatattactacctctcttactacttaccttactattaaccttactatctactatgatattta

SEQ ID NO: 13953 - DNA, 96 bp, Aspergillus novofumigatus
  misc_feature: 116
ctctttttttctaatcttctctctttctaccctttctaactccctctcttctttttttaatctatctctaaatcctcttcttcctactcttcttaa

SEQ ID NO: 13954 - DNA, 96 bp, Aspergillus novofumigatus
  misc_feature: 116
tcttctctttcttcttctctttcttcttctctttcttcttattcttcttattcttcctctctttcttaccctttacttaaactctttctatcttat

SEQ ID NO: 13955 - DNA, 96 bp, Aspergillus novofumigatus
  misc_feature: 116
taagaagagtaaggattaataagtatagaagaagagatagagttagaggaagaaatttaaagataagaggaattagaaagaataaataagaggaga

SEQ ID NO: 13956 - DNA, 96 bp, Aspergillus novofumigatus
  misc_feature: 116
gagagaggtaaagggtttaagagattaaagaaagatagtagaagaaaaaagaagggattttaagagagtagattaagaagagtaggaagaagagga

SEQ ID NO: 13957 - DNA, 96 bp, Aspergillus novofumigatus
  misc_feature: 116
tcctatttttaattatatttatttcttctctttactaaaactctctctatcttatatatttctaccccttattcttatcttaaacttactaaccct

SEQ ID NO: 13958 - DNA, 96 bp, Aspergillus novofumigatus
  misc_feature: 116
taatttataggattaggatgagttaggattaggaataagttagggttaggaatgagttaggattaggaatttattaggattaggaatttattagga

SEQ ID NO: 13959 - DNA, 96 bp, Aspergillus novofumigatus
  misc_feature: 116
gaataagaattaaaaaaagagtcagaaggagagttaaagataataagttaagaattagaatatagattaaaaagagaaagaaaagatagataaata

SEQ ID NO: 13960 - DNA, 96 bp, Aspergillus novofumigatus
  misc_feature: 116
aagagttagaataagaattaaaaaaagagtcagaaggagagttaaagataataagttaagaattagaatatagattaaaaagagaaagaaaagata

SEQ ID NO: 13961 - DNA, 96 bp, Aspergillus novofumigatus
  misc_feature: 116
tatctatttatctatcttttctttctctttttaatctatattctaattcttaacttattatctttaactctccttctgactctttttttaattctt

SEQ ID NO: 13962 - DNA, 96 bp, Aspergillus novofumigatus
  misc_feature: 116
aataagcttaggattagaataagaattataagaagagttaaagatagtaagttaaagattagaatatagattaaaaagagaaagaaaatatagata

SEQ ID NO: 13963 - DNA, 96 bp, Aspergillus novofumigatus
  misc_feature: 116
ataactcttcttctatccttactaacccttaccctctcctactatctcttctttctctaattcttttcttccctctttttatccctcttatctata

SEQ ID NO: 13964 - DNA, 96 bp, Aspergillus novofumigatus
  misc_feature: 116
taggtagaataagagataatttataggattaggatgagttaggattaggaataagttagggttaggaatgagttaggattaggaatttattaggat

SEQ ID NO: 13965 - DNA, 96 bp, Aspergillus novofumigatus
  misc_feature: 116
attctaattattcttttttctatatctatctcttctttcttttcttttctttcttctttcctctttcttttctatctattatcttcttactatcta

SEQ ID NO: 13966 - DNA, 96 bp, Aspergillus novofumigatus
  misc_feature: 116
actcttatttatattctaattctaattcttattctaattcttattctaattcttattctaattcttattctaattcttattctaattcttattcta

SEQ ID NO: 13967 - DNA, 96 bp, Aspergillus novofumigatus
  misc_feature: 116
gtaaggattaataagtatagaagaagagatagagttagaggaagaaatttaaagataagaggaattagaaagaataaataagaggagaggatatta

SEQ ID NO: 13968 - DNA, 96 bp, Aspergillus novofumigatus
  misc_feature: 116
taatatatggatgctaactaatcttaatctactaatattactacctctcttactacttaccttactattaaccttactatctactatgatatttat

SEQ ID NO: 13969 - DNA, 96 bp, Aspergillus novofumigatus
  misc_feature: 116
taatatatatctctactagtctactatataaaatttataaaatatttaattatatagagttttaaaaattctaggcttattattactaagtatact

SEQ ID NO: 13970 - DNA, 96 bp, Aspergillus novofumigatus
  misc_feature: 116
taataccctaacccttatccttatcctaatcctactcctaaccctaatcttatccttccctatatccttattccaccctgacctttcttcttcttc

SEQ ID NO: 13971 - DNA, 96 bp, Aspergillus novofumigatus
  misc_feature: 116
taagagataatttataggattaggatgagttaggattaggaataagttagggttaggaatgagttaggattaggaatttattaggattaggaattt

SEQ ID NO: 13972 - DNA, 96 bp, Aspergillus novofumigatus
  misc_feature: 116
ctcttctatctatttatctatcttttctttctctttttaatctatattctaattcttaacttattatctttaactctccttctgactcttttttta

SEQ ID NO: 13973 - DNA, 96 bp, Aspergillus novofumigatus
  misc_feature: 116
gggggccggggtccggcgcggacgggttggtggagggtgggccggtgaccagttggcggggggcccttgggggggcagaccggcaggcaggggggc

SEQ ID NO: 13974 - DNA, 96 bp, Aspergillus novofumigatus
  misc_feature: 116
cttctctttcttcttctctttcttcttctctttcttcttattcttcttattcttcctctctttcttaccctttacttaaactctttctatcttatc

SEQ ID NO: 13975 - DNA, 96 bp, Aspergillus novofumigatus
  misc_feature: 116
cttactaacccttaccctctcctactatctcttctttctctaattcttttcttccctctttttatccctcttatctatacttactaactcttattc

SEQ ID NO: 13976 - DNA, 96 bp, Aspergillus novofumigatus
  misc_feature: 116
attctattaaattattatttactttatccttttcttttaatttatctttccttaattttaatttccttcttctctttcttctctttcttctctttc

SEQ ID NO: 13977 - DNA, 96 bp, Aspergillus novofumigatus
  misc_feature: 116
ctccctctctcctctatctcttcttaatctcctctcttatcccttctaatctaaatccttacccttactcttattattaccctctctattcctttt

SEQ ID NO: 13978 - DNA, 96 bp, Aspergillus novofumigatus
  misc_feature: 116
agggtttaagagattaaagaaagatagtagaagaaaaaagaagggattttaagagagtagattaagaagagtaggaagaagaggatttagagatag

SEQ ID NO: 13979 - DNA, 96 bp, Aspergillus novofumigatus
  misc_feature: 116
ctaactcttatttatattctaattctaattcttattctaattcttattctaattcttattctaattcttattctaattcttattctaattcttatt

SEQ ID NO: 13980 - DNA, 96 bp, Aspergillus novofumigatus
  misc_feature: 116
cgtcaccaggcggcggcgcgcgcgggcccctgctgccggtcagggcgcgcgcccggccatctcggaccgccaactggcgtggtcccatggaggggg

SEQ ID NO: 13981 - DNA, 96 bp, Aspergillus novofumigatus
  misc_feature: 116
actggggtcaatggaagccgggcgcgcgcgccccgggggtgaccagttggcggggacccttgggggggggcagaccggcaggcgggcaggaggggg

SEQ ID NO: 13982 - DNA, 96 bp, Aspergillus novofumigatus
  misc_feature: 116
aggtgctagaaagagaattagaataagaattagaataagaattagaataagaattagaataagaattagaataagaattagaataagaattagaat

SEQ ID NO: 13983 - DNA, 96 bp, Aspergillus novofumigatus
  misc_feature: 116
aaagggtttaagagattaaagaaagatagtagaagaaaaaagaagggattttaagagagtagattaagaagagtaggaagaagaggatttagagat

SEQ ID NO: 13984 - DNA, 96 bp, Aspergillus novofumigatus
  misc_feature: 116
ataccctaacccttatccttatcctaatcctactcctaaccctaatcttatccttccctatatccttattccaccctgacctttcttcttcttctt

SEQ ID NO: 13985 - DNA, 96 bp, Aspergillus novofumigatus
  misc_feature: 116
agtgaggtagatagtaagatagatagtaaggtagacagtaagatagatagtgaggttaatagtaaggtagatagtgtagtcaatagtaaggtaggt

SEQ ID NO: 13986 - DNA, 96 bp, Aspergillus novofumigatus
  misc_feature: 116
agagctagggaataagggattaggcatataagtatataatatactctataggagtagatagattagttaattaaagataggatatatataactact

SEQ ID NO: 13987 - DNA, 96 bp, Aspergillus novofumigatus
  misc_feature: 116
aattctaattattcttttttctatatctatctcttctttcttttcttttctttcttctttcctctttcttttctatctattatcttcttactatct

SEQ ID NO: 13988 - DNA, 96 bp, Aspergillus novofumigatus
  misc_feature: 116
aattcttattctaattcttattctaattcttattctaattcttattctaattcttattctaattcttattctaattcttattctaattcttattct

SEQ ID NO: 13989 - DNA, 96 bp, Aspergillus novofumigatus
  misc_feature: 116
agaagaagaaaggtcagggtggaataaggatatagggaaggataagattagggttaggagtaggattaggataaggataagggttagggtattagt

SEQ ID NO: 13990 - DNA, 96 bp, Aspergillus novofumigatus
  misc_feature: 116
aatatttttaaatagtttaaaatactttataattctaattagctaaattattatattctaatattaaatccttaattattcactagtaaggtggtt

SEQ ID NO: 13991 - DNA, 96 bp, Aspergillus novofumigatus
  misc_feature: 115
tttttctatatctatctcttctttcttttcttttctttcttctttcctctttcttttctatctattatcttcttactatctaacccttactccatc

SEQ ID NO: 13992 - DNA, 96 bp, Aspergillus novofumigatus
  misc_feature: 115
ttttctatatctatctcttctttcttttcttttctttcttctttcctctttcttttctatctattatcttcttactatctaacccttactccatcc

SEQ ID NO: 13993 - DNA, 96 bp, Aspergillus novofumigatus
  misc_feature: 115
ttcttttttctatatctatctcttctttcttttcttttctttcttctttcctctttcttttctatctattatcttcttactatctaacccttactc

SEQ ID NO: 13994 - DNA, 96 bp, Aspergillus novofumigatus
  misc_feature: 115
ttcttcttctctttcttcttctctttcttcttctctttcttcttattcttcttattcttcctctctttcttaccctttacttaaactctttctatc

SEQ ID NO: 13995 - DNA, 96 bp, Aspergillus novofumigatus
  misc_feature: 115
gaataagagataatttataggattaggatgagttaggattaggaataagttagggttaggaatgagttaggattaggaatttattaggattaggaa

SEQ ID NO: 13996 - DNA, 96 bp, Aspergillus novofumigatus
  misc_feature: 115
gtgctagaaagagaattagaataagaattagaataagaattagaataagaattagaataagaattagaataagaattagaataagaattagaataa

SEQ ID NO: 13997 - DNA, 96 bp, Aspergillus novofumigatus
  misc_feature: 115
ataagcttaggattagaataagaattataagaagagttaaagatagtaagttaaagattagaatatagattaaaaagagaaagaaaatatagataa

SEQ ID NO: 13998 - DNA, 96 bp, Aspergillus novofumigatus
  misc_feature: 115
ttacttaatatatggatgctaactaatcttaatctactaatattactacctctcttactacttaccttactattaaccttactatctactatgata

SEQ ID NO: 13999 - DNA, 96 bp, Aspergillus novofumigatus
  misc_feature: 115
aagaagaaaggtcagggtggaataaggatatagggaaggataagattagggttaggagtaggattaggataaggataagggttagggtattagtaa

SEQ ID NO: 14000 - DNA, 96 bp, Aspergillus novofumigatus
  misc_feature: 115
ttaatatatatctctactagtctactatataaaatttataaaatatttaattatatagagttttaaaaattctaggcttattattactaagtatac

SEQ ID NO: 14001 - DNA, 96 bp, Aspergillus novofumigatus
  misc_feature: 115
ttaagaagagtaaggattaataagtatagaagaagagatagagttagaggaagaaatttaaagataagaggaattagaaagaataaataagaggag

SEQ ID NO: 14002 - DNA, 96 bp, Aspergillus novofumigatus
  misc_feature: 115
tctttttttctaatcttctctctttctaccctttctaactccctctcttctttttttaatctatctctaaatcctcttcttcctactcttcttaat

SEQ ID NO: 14003 - DNA, 96 bp, Aspergillus novofumigatus
  misc_feature: 115
tcttcttctctttcttcttctctttcttcttctctttcttcttattcttcttattcttcctctctttcttaccctttacttaaactctttctatct

SEQ ID NO: 14004 - DNA, 96 bp, Aspergillus novofumigatus
  misc_feature: 115
tcttactccctctctcctctatctcttcttaatctcctctcttatcccttctaatctaaatccttacccttactcttattattaccctctctattc

SEQ ID NO: 14005 - DNA, 96 bp, Aspergillus novofumigatus
  misc_feature: 115
aagaagagatagagttagaggaagaaatttaaagataagaggaattagaaagaataaataagaggagaggatattaggggttagttttaggagaga

SEQ ID NO: 14006 - DNA, 96 bp, Aspergillus novofumigatus
  misc_feature: 115
taaagggtttaagagattaaagaaagatagtagaagaaaaaagaagggattttaagagagtagattaagaagagtaggaagaagaggatttagaga

SEQ ID NO: 14007 - DNA, 96 bp, Aspergillus novofumigatus
  misc_feature: 115
tctaattctaattcttattctaattcttattctaattcttattctaattcttattctaattcttattctaattcttattctaattcttattctaat

SEQ ID NO: 14008 - DNA, 96 bp, Aspergillus novofumigatus
  misc_feature: 115
tccttactaacccttaccctctcctactatctcttctttctctaattcttttcttccctctttttatccctcttatctatacttactaactcttat

SEQ ID NO: 14009 - DNA, 96 bp, Aspergillus novofumigatus
  misc_feature: 115
tcctctcttatcttataattaatctaatctcttttaatccttattctctctatcctaaattctcttgtcttctattattaatgactctcttttttt

SEQ ID NO: 14010 - DNA, 96 bp, Aspergillus novofumigatus
  misc_feature: 115
agaataagagataatttataggattaggatgagttaggattaggaataagttagggttaggaatgagttaggattaggaatttattaggattagga

SEQ ID NO: 14011 - DNA, 96 bp, Aspergillus novofumigatus
  misc_feature: 115
tatttaattatgaacccttctcctctcttatcttataattaatctaatctcttttaatccttattctctctatcctaaattctcttgtcttctatt

SEQ ID NO: 14012 - DNA, 96 bp, Aspergillus novofumigatus
  misc_feature: 115
aatatatatctctactagtctactatataaaatttataaaatatttaattatatagagttttaaaaattctaggcttattattactaagtatacta

SEQ ID NO: 14013 - DNA, 96 bp, Aspergillus novofumigatus
  misc_feature: 115
tagaataagagataatttataggattaggatgagttaggattaggaataagttagggttaggaatgagttaggattaggaatttattaggattagg

SEQ ID NO: 14014 - DNA, 96 bp, Aspergillus novofumigatus
  misc_feature: 115
tactccctctctcctctatctcttcttaatctcctctcttatcccttctaatctaaatccttacccttactcttattattaccctctctattcctt

SEQ ID NO: 14015 - DNA, 96 bp, Aspergillus novofumigatus
  misc_feature: 115
taattcattctattaaattattatttactttatccttttcttttaatttatctttccttaattttaatttccttcttctctttcttctctttcttc

SEQ ID NO: 14016 - DNA, 96 bp, Aspergillus novofumigatus
  misc_feature: 115
taatctactctcttaaaatcccttcttttttcttctactatctttctttaatctcttaaaccctttacctctctctactctaaattactaattctt

SEQ ID NO: 14017 - DNA, 96 bp, Aspergillus novofumigatus
  misc_feature: 115
taactcttcttctatccttactaacccttaccctctcctactatctcttctttctctaattcttttcttccctctttttatccctcttatctatac

SEQ ID NO: 14018 - DNA, 96 bp, Aspergillus novofumigatus
  misc_feature: 115
atatttttaaatagtttaaaatactttataattctaattagctaaattattatattctaatattaaatccttaattattcactagtaaggtggtta

SEQ ID NO: 14019 - DNA, 96 bp, Aspergillus novofumigatus
  misc_feature: 115
aagagataatttataggattaggatgagttaggattaggaataagttagggttaggaatgagttaggattaggaatttattaggattaggaattta

SEQ ID NO: 14020 - DNA, 96 bp, Aspergillus novofumigatus
  misc_feature: 115
cagcaggaagaacccagtaagataggtagtatagtagatagtaaggcaggcagtgaagcaggtagtaaggcaggtagtaaggcaggcagcaagacc

SEQ ID NO: 14021 - DNA, 96 bp, Aspergillus novofumigatus
  misc_feature: 115
ctcctatttttaattatatttatttcttctctttactaaaactctctctatcttatatatttctaccccttattcttatcttaaacttactaaccc

SEQ ID NO: 14022 - DNA, 96 bp, Aspergillus novofumigatus
  misc_feature: 115
gctagggaataagggattaggcatataagtatataatatactctataggagtagatagattagttaattaaagataggatatatataactactaat

SEQ ID NO: 14023 - DNA, 96 bp, Aspergillus novofumigatus
  misc_feature: 115
acccttctcctctcttatcttataattaatctaatctcttttaatccttattctctctatcctaaattctcttgtcttctattattaatgactctc

SEQ ID NO: 14024 - DNA, 96 bp, Aspergillus novofumigatus
  misc_feature: 115
gagaggtaaagggtttaagagattaaagaaagatagtagaagaaaaaagaagggattttaagagagtagattaagaagagtaggaagaagaggatt

SEQ ID NO: 14025 - DNA, 96 bp, Aspergillus novofumigatus
  misc_feature: 115
gaagaagagatagagttagaggaagaaatttaaagataagaggaattagaaagaataaataagaggagaggatattaggggttagttttaggagag

SEQ ID NO: 14026 - DNA, 96 bp, Aspergillus novofumigatus
  misc_feature: 115
cttcttctatccttactaacccttaccctctcctactatctcttctttctctaattcttttcttccctctttttatccctcttatctatacttact

SEQ ID NO: 14027 - DNA, 96 bp, Aspergillus novofumigatus
  misc_feature: 115
cttaatatttttaaatagtttaaaatactttataattctaattagctaaattattatattctaatattaaatccttaattattcactagtaaggtg

SEQ ID NO: 14028 - DNA, 96 bp, Aspergillus novofumigatus
  misc_feature: 115
cttaatatatggatgctaactaatcttaatctactaatattactacctctcttactacttaccttactattaaccttactatctactatgatattt

SEQ ID NO: 14029 - DNA, 96 bp, Aspergillus novofumigatus
  misc_feature: 115
aggggtagaaatatataagatagagagagttttagtaaagagaagaaataaatataattaaaaatagaagaagaaagggaagaggaaagggaagag

SEQ ID NO: 14030 - DNA, 96 bp, Aspergillus novofumigatus
  misc_feature: 115
ctaattctaattcttattctaattcttattctaattcttattctaattcttattctaattcttattctaattcttattctaattcttattctaatt

SEQ ID NO: 14031 - DNA, 96 bp, Aspergillus novofumigatus
  misc_feature: 115
ctaattcattctattaaattattatttactttatccttttcttttaatttatctttccttaattttaatttccttcttctctttcttctctttctt

SEQ ID NO: 14032 - DNA, 96 bp, Aspergillus novofumigatus
  misc_feature: 115
ccttacttttgctaataccctctatctcttttactaactctccttcttcttctaactcttatctctaactctttctctctctcttcccctccctct

SEQ ID NO: 14033 - DNA, 96 bp, Aspergillus novofumigatus
  misc_feature: 115
atttataggattaggatgagttaggattaggaataagttagggttaggaatgagttaggattaggaatttattaggattaggaatttattaggatt

SEQ ID NO: 14034 - DNA, 96 bp, Aspergillus novofumigatus
  misc_feature: 115
attcttttttctatatctatctcttctttcttttcttttctttcttctttcctctttcttttctatctattatcttcttactatctaacccttact

SEQ ID NO: 14035 - DNA, 96 bp, Aspergillus novofumigatus
  misc_feature: 115
attattcttttttctatatctatctcttctttcttttcttttctttcttctttcctctttcttttctatctattatcttcttactatctaaccctt

SEQ ID NO: 14036 - DNA, 96 bp, Aspergillus novofumigatus
  misc_feature: 115
attaataagtatagaagaagagatagagttagaggaagaaatttaaagataagaggaattagaaagaataaataagaggagaggatattaggggtt

SEQ ID NO: 14037 - DNA, 96 bp, Aspergillus novofumigatus
  misc_feature: 115
atatatctctactagtctactatataaaatttataaaatatttaattatatagagttttaaaaattctaggcttattattactaagtatactatat

SEQ ID NO: 14038 - DNA, 96 bp, Aspergillus novofumigatus
  misc_feature: 115
ataagagataatttataggattaggatgagttaggattaggaataagttagggttaggaatgagttaggattaggaatttattaggattaggaatt

SEQ ID NO: 14039 - DNA, 96 bp, Aspergillus novofumigatus
  misc_feature: 115
agtaaggattaataagtatagaagaagagatagagttagaggaagaaatttaaagataagaggaattagaaagaataaataagaggagaggatatt

SEQ ID NO: 14040 - DNA, 96 bp, Aspergillus novofumigatus
  misc_feature: 115
aggtagaataagagataatttataggattaggatgagttaggattaggaataagttagggttaggaatgagttaggattaggaatttattaggatt

SEQ ID NO: 14041 - DNA, 96 bp, Aspergillus novofumigatus
  misc_feature: 115
aattattcttttttctatatctatctcttctttcttttcttttctttcttctttcctctttcttttctatctattatcttcttactatctaaccct

SEQ ID NO: 14042 - DNA, 96 bp, Aspergillus novofumigatus
  misc_feature: 114
ttttgctaataccctctatctcttttactaactctccttcttcttctaactcttatctctaactctttctctctctcttcccctccctcttcctct

SEQ ID NO: 14043 - DNA, 96 bp, Aspergillus novofumigatus
  misc_feature: 114
tttaattatgaacccttctcctctcttatcttataattaatctaatctcttttaatccttattctctctatcctaaattctcttgtcttctattat

SEQ ID NO: 14044 - DNA, 96 bp, Aspergillus novofumigatus
  misc_feature: 114
tttaagaagagtaaggattaataagtatagaagaagagatagagttagaggaagaaatttaaagataagaggaattagaaagaataaataagagga

SEQ ID NO: 14045 - DNA, 96 bp, Aspergillus novofumigatus
  misc_feature: 114
ttcattctattaaattattatttactttatccttttcttttaatttatctttccttaattttaatttccttcttctctttcttctctttcttctct

SEQ ID NO: 14046 - DNA, 96 bp, Aspergillus novofumigatus
  misc_feature: 114
taaaatcccttcttttttcttctactatctttctttaatctcttaaaccctttacctctctctactctaaattactaattcttactaataccctaa

SEQ ID NO: 14047 - DNA, 96 bp, Aspergillus novofumigatus
  misc_feature: 114
ttaggattagaataagaattataagaagagttaaagatagtaagttaaagattagaatatagattaaaaagagaaagaaaatatagataaatagat

SEQ ID NO: 14048 - DNA, 96 bp, Aspergillus novofumigatus
  misc_feature: 114
ttaataagtatagaagaagagatagagttagaggaagaaatttaaagataagaggaattagaaagaataaataagaggagaggatattaggggtta

SEQ ID NO: 14049 - DNA, 96 bp, Aspergillus novofumigatus
  misc_feature: 114
tatttttaaatagtttaaaatactttataattctaattagctaaattattatattctaatattaaatccttaattattcactagtaaggtggttaa

SEQ ID NO: 14050 - DNA, 96 bp, Aspergillus novofumigatus
  misc_feature: 114
tcttctatctatttatctatcttttctttctctttttaatctatattctaattcttaacttattatctttaactctccttctgactctttttttaa

SEQ ID NO: 14051 - DNA, 96 bp, Aspergillus novofumigatus
  misc_feature: 114
tcttcttctatccttactaacccttaccctctcctactatctcttctttctctaattcttttcttccctctttttatccctcttatctatacttac

SEQ ID NO: 14052 - DNA, 96 bp, Aspergillus novofumigatus
  misc_feature: 114
taagataagaataaggggtagaaatatataagatagagagagttttagtaaagagaagaaataaatataattaaaaatagaagaagaaagggaaga

SEQ ID NO: 14053 - DNA, 96 bp, Aspergillus novofumigatus
  misc_feature: 114
tctctttcttcttctctttcttcttctctttcttcttattcttcttattcttcctctctttcttaccctttacttaaactctttctatcttatcta

SEQ ID NO: 14054 - DNA, 96 bp, Aspergillus novofumigatus
  misc_feature: 114
tctctcttactccctctctcctctatctcttcttaatctcctctcttatcccttctaatctaaatccttacccttactcttattattaccctctct

SEQ ID NO: 14055 - DNA, 96 bp, Aspergillus novofumigatus
  misc_feature: 114
tctctactagtctactatataaaatttataaaatatttaattatatagagttttaaaaattctaggcttattattactaagtatactatatattat

SEQ ID NO: 14056 - DNA, 96 bp, Aspergillus novofumigatus
  misc_feature: 114
gggtttaagagattaaagaaagatagtagaagaaaaaagaagggattttaagagagtagattaagaagagtaggaagaagaggatttagagataga

SEQ ID NO: 14057 - DNA, 96 bp, Aspergillus novofumigatus
  misc_feature: 114
tctatctatttatctatcttttctttctctttttaatctatattctaattcttaacttattatctttaactctccttctgactctttttttaattc

SEQ ID NO: 14058 - DNA, 96 bp, Aspergillus novofumigatus
  misc_feature: 114
tctaccttactgtctaccttactgtctaccttactatctaccttactgtctaccttactgcctgactcacttactatcttacttactgcctgtctt

SEQ ID NO: 14059 - DNA, 96 bp, Aspergillus novofumigatus
  misc_feature: 114
ggtaaagggtttaagagattaaagaaagatagtagaagaaaaaagaagggattttaagagagtagattaagaagagtaggaagaagaggatttaga

SEQ ID NO: 14060 - DNA, 96 bp, Aspergillus novofumigatus
  misc_feature: 114
tcattctattaaattattatttactttatccttttcttttaatttatctttccttaattttaatttccttcttctctttcttctctttcttctctt

SEQ ID NO: 14061 - DNA, 96 bp, Aspergillus novofumigatus
  misc_feature: 114
tattcttttttctatatctatctcttctttcttttcttttctttcttctttcctctttcttttctatctattatcttcttactatctaacccttac

SEQ ID NO: 14062 - DNA, 96 bp, Aspergillus novofumigatus
  misc_feature: 114
ggtgctagaaagagaattagaataagaattagaataagaattagaataagaattagaataagaattagaataagaattagaataagaattagaata

SEQ ID NO: 14063 - DNA, 96 bp, Aspergillus novofumigatus
  misc_feature: 114
tatggatgctaactaatcttaatctactaatattactacctctcttactacttaccttactattaaccttactatctactatgatatttatattac

SEQ ID NO: 14064 - DNA, 96 bp, Aspergillus novofumigatus
  misc_feature: 114
aagggtttaagagattaaagaaagatagtagaagaaaaaagaagggattttaagagagtagattaagaagagtaggaagaagaggatttagagata

SEQ ID NO: 14065 - DNA, 96 bp, Aspergillus novofumigatus
  misc_feature: 114
agagtaaggattaataagtatagaagaagagatagagttagaggaagaaatttaaagataagaggaattagaaagaataaataagaggagaggata

SEQ ID NO: 14066 - DNA, 96 bp, Aspergillus novofumigatus
  misc_feature: 114
tatatatctctactagtctactatataaaatttataaaatatttaattatatagagttttaaaaattctaggcttattattactaagtatactata

SEQ ID NO: 14067 - DNA, 96 bp, Aspergillus novofumigatus
  misc_feature: 114
tatataatattattcttatttttcttatagtaaattaattactatactatatttacctagtatatttatatctactaataagttagcttttaatct

SEQ ID NO: 14068 - DNA, 96 bp, Aspergillus novofumigatus
  misc_feature: 114
cctctctttaatatatatctctactagtctactatataaaatttataaaatatttaattatatagagttttaaaaattctaggcttattattacta

SEQ ID NO: 14069 - DNA, 96 bp, Aspergillus novofumigatus
  misc_feature: 114
atataatattattcttatttttcttatagtaaattaattactatactatatttacctagtatatttatatctactaataagttagcttttaatcta

SEQ ID NO: 14070 - DNA, 96 bp, Aspergillus novofumigatus
  misc_feature: 114
tagagctagggaataagggattaggcatataagtatataatatactctataggagtagatagattagttaattaaagataggatatatataactac

SEQ ID NO: 14071 - DNA, 96 bp, Aspergillus novofumigatus
  misc_feature: 114
gaagaagaaaggtcagggtggaataaggatatagggaaggataagattagggttaggagtaggattaggataaggataagggttagggtattagta

SEQ ID NO: 14072 - DNA, 96 bp, Aspergillus novofumigatus
  misc_feature: 114
taccctaacccttatccttatcctaatcctactcctaaccctaatcttatccttccctatatccttattccaccctgacctttcttcttcttcttt

SEQ ID NO: 14073 - DNA, 96 bp, Aspergillus novofumigatus
  misc_feature: 114
taattatgaacccttctcctctcttatcttataattaatctaatctcttttaatccttattctctctatcctaaattctcttgtcttctattatta

SEQ ID NO: 14074 - DNA, 96 bp, Aspergillus novofumigatus
  misc_feature: 114
taatatttttaaatagtttaaaatactttataattctaattagctaaattattatattctaatattaaatccttaattattcactagtaaggtggt

SEQ ID NO: 14075 - DNA, 96 bp, Aspergillus novofumigatus
  misc_feature: 114
atatcaggcaatgcttaatggaagacattaaattaggatattaaattattaatacaatattttttccttattaatacaatattaatttacttatta

SEQ ID NO: 14076 - DNA, 96 bp, Aspergillus novofumigatus
  misc_feature: 114
taataagcttaggattagaataagaattataagaagagttaaagatagtaagttaaagattagaatatagattaaaaagagaaagaaaatatagat

SEQ ID NO: 14077 - DNA, 96 bp, Aspergillus novofumigatus
  misc_feature: 114
ctcttcttctatccttactaacccttaccctctcctactatctcttctttctctaattcttttcttccctctttttatccctcttatctatactta

SEQ ID NO: 14078 - DNA, 96 bp, Aspergillus novofumigatus
  misc_feature: 114
taaggggtagaaatatataagatagagagagttttagtaaagagaagaaataaatataattaaaaatagaagaagaaagggaagaggaaagggaag

SEQ ID NO: 14079 - DNA, 96 bp, Aspergillus novofumigatus
  misc_feature: 114
taaatagtttaaaatactttataattctaattagctaaattattatattctaatattaaatccttaattattcactagtaaggtggttaaactagg

SEQ ID NO: 14080 - DNA, 96 bp, Aspergillus novofumigatus
  misc_feature: 114
gtttaagaagagtaaggattaataagtatagaagaagagatagagttagaggaagaaatttaaagataagaggaattagaaagaataaataagagg

SEQ ID NO: 14081 - DNA, 96 bp, Aspergillus novofumigatus
  misc_feature: 114
gtctaccttactgtctaccttactgtctaccttactatctaccttactgtctaccttactgcctgactcacttactatcttacttactgcctgtct

SEQ ID NO: 14082 - DNA, 96 bp, Aspergillus novofumigatus
  misc_feature: 114
gtcaccaggcggcggcgcgcgcgggcccctgctgccggtcagggcgcgcgcccggccatctcggaccgccaactggcgtggtcccatggagggggg

SEQ ID NO: 14083 - DNA, 96 bp, Aspergillus novofumigatus
  misc_feature: 114
gctatttataattactatctaccttattacctaccttactattgactacactatctatcttactgtctaccttactatctatcttactatctacct

SEQ ID NO: 14084 - DNA, 96 bp, Aspergillus novofumigatus
  misc_feature: 114
gattaataagtatagaagaagagatagagttagaggaagaaatttaaagataagaggaattagaaagaataaataagaggagaggatattaggggt

SEQ ID NO: 14085 - DNA, 96 bp, Aspergillus novofumigatus
  misc_feature: 114
atatctatctcttctttcttttcttttctttcttctttcctctttcttttctatctattatcttcttactatctaacccttactccatccttaatc

SEQ ID NO: 14086 - DNA, 96 bp, Aspergillus novofumigatus
  misc_feature: 114
gagtaaggattaataagtatagaagaagagatagagttagaggaagaaatttaaagataagaggaattagaaagaataaataagaggagaggatat

SEQ ID NO: 14087 - DNA, 96 bp, Aspergillus novofumigatus
  misc_feature: 114
cccttacttttgctaataccctctatctcttttactaactctccttcttcttctaactcttatctctaactctttctctctctcttcccctccctc

SEQ ID NO: 14088 - DNA, 96 bp, Aspergillus novofumigatus
  misc_feature: 114
attcattctattaaattattatttactttatccttttcttttaatttatctttccttaattttaatttccttcttctctttcttctctttcttctc

SEQ ID NO: 14089 - DNA, 96 bp, Aspergillus novofumigatus
  misc_feature: 114
cttctatctatttatctatcttttctttctctttttaatctatattctaattcttaacttattatctttaactctccttctgactctttttttaat

SEQ ID NO: 14090 - DNA, 96 bp, Aspergillus novofumigatus
  misc_feature: 114
ctcttactccctctctcctctatctcttcttaatctcctctcttatcccttctaatctaaatccttacccttactcttattattaccctctctatt

SEQ ID NO: 14091 - DNA, 96 bp, Aspergillus novofumigatus
  misc_feature: 114
ccttctattcttaactctctctttctctttcttctcctttctatccctaactcttattctaacccttcttctatctcttcctctaatcctccttct

SEQ ID NO: 14092 - DNA, 96 bp, Aspergillus novofumigatus
  misc_feature: 114
agagagaggtaaagggtttaagagattaaagaaagatagtagaagaaaaaagaagggattttaagagagtagattaagaagagtaggaagaagagg

SEQ ID NO: 14093 - DNA, 96 bp, Aspergillus novofumigatus
  misc_feature: 114
aaatagtttaaaatactttataattctaattagctaaattattatattctaatattaaatccttaattattcactagtaaggtggttaaactaggg

SEQ ID NO: 14094 - DNA, 96 bp, Aspergillus novofumigatus
  misc_feature: 114
cattctattaaattattatttactttatccttttcttttaatttatctttccttaattttaatttccttcttctctttcttctctttcttctcttt

SEQ ID NO: 14095 - DNA, 96 bp, Aspergillus novofumigatus
  misc_feature: 114
aagcttaggattagaataagaattataagaagagttaaagatagtaagttaaagattagaatatagattaaaaagagaaagaaaatatagataaat

SEQ ID NO: 14096 - DNA, 96 bp, Aspergillus novofumigatus
  misc_feature: 114
atctctttttttctaatcttctctctttctaccctttctaactccctctcttctttttttaatctatctctaaatcctcttcttcctactcttctt

SEQ ID NO: 14097 - DNA, 96 bp, Aspergillus novofumigatus
  misc_feature: 114
atatctctactagtctactatataaaatttataaaatatttaattatatagagttttaaaaattctaggcttattattactaagtatactatatat

SEQ ID NO: 14098 - DNA, 96 bp, Aspergillus novofumigatus
  misc_feature: 114
atatatatctctactagtctactatataaaatttataaaatatttaattatatagagttttaaaaattctaggcttattattactaagtatactat

SEQ ID NO: 14099 - DNA, 96 bp, Aspergillus novofumigatus
  misc_feature: 114
acccttacttttgctaataccctctatctcttttactaactctccttcttcttctaactcttatctctaactctttctctctctcttcccctccct

SEQ ID NO: 14100 - DNA, 96 bp, Aspergillus novofumigatus
  misc_feature: 114
aataccctaacccttatccttatcctaatcctactcctaaccctaatcttatccttccctatatccttattccaccctgacctttcttcttcttct

SEQ ID NO: 14101 - DNA, 96 bp, Aspergillus novofumigatus
  misc_feature: 114
actcttcttctatccttactaacccttaccctctcctactatctcttctttctctaattcttttcttccctctttttatccctcttatctatactt

SEQ ID NO: 14102 - DNA, 96 bp, Aspergillus novofumigatus
  misc_feature: 114
actccctctctcctctatctcttcttaatctcctctcttatcccttctaatctaaatccttacccttactcttattattaccctctctattccttt

SEQ ID NO: 14103 - DNA, 96 bp, Aspergillus novofumigatus
  misc_feature: 113
ttttttctatatctatctcttctttcttttcttttctttcttctttcctctttcttttctatctattatcttcttactatctaacccttactccat

SEQ ID NO: 14104 - DNA, 96 bp, Aspergillus novofumigatus
  misc_feature: 113
tttttctatatctgactcttctttcttttcttttctttcttcttttctctttcttttctatctattatcttcttactatctaacccttactccatc

SEQ ID NO: 14105 - DNA, 96 bp, Aspergillus novofumigatus
  misc_feature: 113
tttcttcttctctttcttcttctctttcttcttctctttcttcttattcttcttattcttcctctctttcttaccctttacttaaactctttctat

SEQ ID NO: 14106 - DNA, 96 bp, Aspergillus novofumigatus
  misc_feature: 113
tttctatatctgactcttctttcttttcttttctttcttcttttctctttcttttctatctattatcttcttactatctaacccttactccatcct

SEQ ID NO: 14107 - DNA, 96 bp, Aspergillus novofumigatus
  misc_feature: 113
tttctatatctatctcttctttcttttcttttctttcttctttcctctttcttttctatctattatcttcttactatctaacccttactccatcct

SEQ ID NO: 14108 - DNA, 96 bp, Aspergillus novofumigatus
  misc_feature: 113
taagcttaggattagaataagaattataagaagagttaaagatagtaagttaaagattagaatatagattaaaaagagaaagaaaatatagataaa

SEQ ID NO: 14109 - DNA, 96 bp, Aspergillus novofumigatus
  misc_feature: 113
ttcttcttctctttcttcttctctttcttcttattcttcttattcttcctctctttcttaccctttacttaaactctttctatcttatctatcttt

SEQ ID NO: 14110 - DNA, 96 bp, Aspergillus novofumigatus
  misc_feature: 113
ttcttctatccttactaacccttaccctctcctactatctcttctttctctaattcttttcttccctctttttatccctcttatctatacttacta

SEQ ID NO: 14111 - DNA, 96 bp, Aspergillus novofumigatus
  misc_feature: 113
ctagaaagagaattagaataagaattagaataagaattagaataagaattagaataagaattagaataagaattagaataagaattagaataagaa

SEQ ID NO: 14112 - DNA, 96 bp, Aspergillus novofumigatus
  misc_feature: 113
ttctctttcttcttctctttcttcttctctttcttcttattcttcttattcttcctctctttcttaccctttacttaaactctttctatcttatct

SEQ ID NO: 14113 - DNA, 96 bp, Aspergillus novofumigatus
  misc_feature: 113
ttctctttcttcttctctttcttcttattcttcttattcttcctctctttcttaccctttacttaaactctttctatcttatctatctttaccttc

SEQ ID NO: 14114 - DNA, 96 bp, Aspergillus novofumigatus
  misc_feature: 113
ttctattttattcctaacccttattctctctcttattattatcttttattttcttttcttttctattccctttcctcttccctttcctcttccctt

SEQ ID NO: 14115 - DNA, 96 bp, Aspergillus novofumigatus
  misc_feature: 113
ttctatctatttatctatcttttctttctctttttaatctatattctaattcttaacttattatctttaactctccttctgactctttttttaatt

SEQ ID NO: 14116 - DNA, 96 bp, Aspergillus novofumigatus
  misc_feature: 113
ttctatccttactaacccttaccctctcctactatctcttctttctctaattcttttcttccctctttttatccctcttatctatacttactaact

SEQ ID NO: 14117 - DNA, 96 bp, Aspergillus novofumigatus
  misc_feature: 113
ttctatatctatctcttctttcttttcttttctttcttctttcctctttcttttctatctattatcttcttactatctaacccttactccatcctt

SEQ ID NO: 14118 - DNA, 96 bp, Aspergillus novofumigatus
  misc_feature: 113
ttctaattattcttttttctatatctatctcttctttcttttcttttctttcttctttcctctttcttttctatctattatcttcttactatctaa

SEQ ID NO: 14119 - DNA, 96 bp, Aspergillus novofumigatus
  misc_feature: 113
ataagaataaggggtagaaatatataagatagagagagttttagtaaagagaagaaataaatataattaaaaatagaagaagaaagggaagaggaa

SEQ ID NO: 14120 - DNA, 96 bp, Aspergillus novofumigatus
  misc_feature: 113
ttcccttctattcttaactctctctttctctttcttctcctttctatccctaactcttattctaacccttcttctatctcttcctctaatcctcct

SEQ ID NO: 14121 - DNA, 96 bp, Aspergillus novofumigatus
  misc_feature: 113
ttattcttttttctatatctatctcttctttcttttcttttctttcttctttcctctttcttttctatctattatcttcttactatctaaccctta

SEQ ID NO: 14122 - DNA, 96 bp, Aspergillus novofumigatus
  misc_feature: 113
ttaaatagtttaaaatactttataattctaattagctaaattattatattctaatattaaatccttaattattcactagtaaggtggttaaactag

SEQ ID NO: 14123 - DNA, 96 bp, Aspergillus novofumigatus
  misc_feature: 113
ttaaaatcccttcttttttcttctactatctttctttaatctcttaaaccctttacctctctctactctaaattactaattcttactaatacccta

SEQ ID NO: 14124 - DNA, 96 bp, Aspergillus novofumigatus
  misc_feature: 113
tgtctaccttactgtctaccttactgtctaccttactatctaccttactgtctaccttactgcctgactcacttactatcttacttactgcctgtc

SEQ ID NO: 14125 - DNA, 96 bp, Aspergillus novofumigatus
  misc_feature: 113
cttttttctatatctatctcttctttcttttcttttctttcttctttcctctttcttttctatctattatcttcttactatctaacccttactcca

SEQ ID NO: 14126 - DNA, 96 bp, Aspergillus novofumigatus
  misc_feature: 113
tcttcccttctattcttaactctctctttctctttcttctcctttctatccctaactcttattctaacccttcttctatctcttcctctaatcctc

SEQ ID NO: 14127 - DNA, 96 bp, Aspergillus novofumigatus
  misc_feature: 113
tcttaatatttttaaatagtttaaaatactttataattctaattagctaaattattatattctaatattaaatccttaattattcactagtaaggt

SEQ ID NO: 14128 - DNA, 96 bp, Aspergillus novofumigatus
  misc_feature: 113
tctcttactccctctctcctctatctcttcttaatctcctctcttatcccttctaatctaaatccttacccttactcttattattaccctctctat

SEQ ID NO: 14129 - DNA, 96 bp, Aspergillus novofumigatus
  misc_feature: 113
tctctctcttactccctctctcctctatctcttcttaatctcctctcttatcccttctaatctaaatccttacccttactcttattattaccctct

SEQ ID NO: 14130 - DNA, 96 bp, Aspergillus novofumigatus
  misc_feature: 113
gataagaataaggggtagaaatatataagatagagagagttttagtaaagagaagaaataaatataattaaaaatagaagaagaaagggaagagga

SEQ ID NO: 14131 - DNA, 96 bp, Aspergillus novofumigatus
  misc_feature: 113
tccctttttatctcttctctctatttctctcttaattcttactctatctcttactttacctctttctctatctctctcttctatctacacttacta

SEQ ID NO: 14132 - DNA, 96 bp, Aspergillus novofumigatus
  misc_feature: 113
tcccttctattcttaactctctctttctctttcttctcctttctatccctaactcttattctaacccttcttctatctcttcctctaatcctcctt

SEQ ID NO: 14133 - DNA, 96 bp, Aspergillus novofumigatus
  misc_feature: 113
tatctctttttttctaatcttctctctttctaccctttctaactccctctcttctttttttaatctatctctaaatcctcttcttcctactcttct

SEQ ID NO: 14134 - DNA, 96 bp, Aspergillus novofumigatus
  misc_feature: 113
tatctctactagtctactatataaaatttataaaatatttaattatatagagttttaaaaattctaggcttattattactaagtatactatatatt

SEQ ID NO: 14135 - DNA, 96 bp, Aspergillus novofumigatus
  misc_feature: 113
tatctatctcttctttcttttcttttctttcttctttcctctttcttttctatctattatcttcttactatctaacccttactccatccttaatct

SEQ ID NO: 14136 - DNA, 96 bp, Aspergillus novofumigatus
  misc_feature: 113
tatatctctactagtctactatataaaatttataaaatatttaattatatagagttttaaaaattctaggcttattattactaagtatactatata

SEQ ID NO: 14137 - DNA, 96 bp, Aspergillus novofumigatus
  misc_feature: 113
gagctagggaataagggattaggcatataagtatataatatactctataggagtagatagattagttaattaaagataggatatatataactacta

SEQ ID NO: 14138 - DNA, 96 bp, Aspergillus novofumigatus
  misc_feature: 113
tacttaatatatggatgctaactaatcttaatctactaatattactacctctcttactacttaccttactattaaccttactatctactatgatat

SEQ ID NO: 14139 - DNA, 96 bp, Aspergillus novofumigatus
  misc_feature: 113
taattattcttttttctatatctatctcttctttcttttcttttctttcttctttcctctttcttttctatctattatcttcttactatctaaccc

SEQ ID NO: 14140 - DNA, 96 bp, Aspergillus novofumigatus
  misc_feature: 113
ggtagaataagagataatttataggattaggatgagttaggattaggaataagttagggttaggaatgagttaggattaggaatttattaggatta

SEQ ID NO: 14141 - DNA, 96 bp, Aspergillus novofumigatus
  misc_feature: 113
agttaggattaggaatttattaggattaggaatttattaggattaggaatgagttaggattaggaattggttaggattaggaataagttaggatta

SEQ ID NO: 14142 - DNA, 96 bp, Aspergillus novofumigatus
  misc_feature: 113
atctctactagtctactatataaaatttataaaatatttaattatatagagttttaaaaattctaggcttattattactaagtatactatatatta

SEQ ID NO: 14143 - DNA, 96 bp, Aspergillus novofumigatus
  misc_feature: 113
atctatttatctatcttttctttctctttttaatctatattctaattcttaacttattatctttaactctccttctgactctttttttaattctta

SEQ ID NO: 14144 - DNA, 96 bp, Aspergillus novofumigatus
  misc_feature: 113
taactcttatttatattctaattctaattcttattctaattcttattctaattcttattctaattcttattctaattcttattctaattcttattc

SEQ ID NO: 14145 - DNA, 96 bp, Aspergillus novofumigatus
  misc_feature: 113
gttaggattaggaatttattaggattaggaatttattaggattaggaatgagttaggattaggaattggttaggattaggaataagttaggattag

SEQ ID NO: 14146 - DNA, 96 bp, Aspergillus novofumigatus
  misc_feature: 113
ccctttttatctcttctctctatttctctcttaattcttactctatctcttactttacctctttctctatctctctcttctatctacacttactac

SEQ ID NO: 14147 - DNA, 96 bp, Aspergillus novofumigatus
  misc_feature: 113
gtaaagggtttaagagattaaagaaagatagtagaagaaaaaagaagggattttaagagagtagattaagaagagtaggaagaagaggatttagag

SEQ ID NO: 14148 - DNA, 96 bp, Aspergillus novofumigatus
  misc_feature: 113
ggattaggaatttattaggattaggaatttattaggattaggaatgagttaggattaggaattggttaggattaggaataagttaggattaggaat

SEQ ID NO: 14149 - DNA, 96 bp, Aspergillus novofumigatus
  misc_feature: 113
ggattaataagtatagaagaagagatagagttagaggaagaaatttaaagataagaggaattagaaagaataaataagaggagaggatattagggg

SEQ ID NO: 14150 - DNA, 96 bp, Aspergillus novofumigatus
  misc_feature: 113
gcttaggattagaataagaattataagaagagttaaagatagtaagttaaagattagaatatagattaaaaagagaaagaaaatatagataaatag

SEQ ID NO: 14151 - DNA, 96 bp, Aspergillus novofumigatus
  misc_feature: 113
gattaggaatttattaggattaggaatttattaggattaggaatgagttaggattaggaattggttaggattaggaataagttaggattaggaatg

SEQ ID NO: 14152 - DNA, 96 bp, Aspergillus novofumigatus
  misc_feature: 113
aaattctaattattcttttttctatatctatctcttctttcttttcttttctttcttctttcctctttcttttctatctattatcttcttactatc

SEQ ID NO: 14153 - DNA, 96 bp, Aspergillus novofumigatus
  misc_feature: 113
ctctctcttactccctctctcctctatctcttcttaatctcctctcttatcccttctaatctaaatccttacccttactcttattattaccctctc

SEQ ID NO: 14154 - DNA, 96 bp, Aspergillus novofumigatus
  misc_feature: 113
ctttcttcttctctttcttcttctctttcttcttattcttcttattcttcctctctttcttaccctttacttaaactctttctatcttatctatct

SEQ ID NO: 14155 - DNA, 96 bp, Aspergillus novofumigatus
  misc_feature: 113
cttacttttgctaataccctctatctcttttactaactctccttcttcttctaactcttatctctaactctttctctctctcttcccctccctctt

SEQ ID NO: 14156 - DNA, 96 bp, Aspergillus novofumigatus
  misc_feature: 113
aagataagaataaggggtagaaatatataagatagagagagttttagtaaagagaagaaataaatataattaaaaatagaagaagaaagggaagag

SEQ ID NO: 14157 - DNA, 96 bp, Aspergillus novofumigatus
  misc_feature: 113
aggattagaataagaattataagaagagttaaagatagtaagttaaagattagaatatagattaaaaagagaaagaaaatatagataaatagatag

SEQ ID NO: 14158 - DNA, 96 bp, Aspergillus novofumigatus
  misc_feature: 113
ccttactaacccttaccctctcctactatctcttctttctctaattcttttcttccctctttttatccctcttatctatacttactaactcttatt

SEQ ID NO: 14159 - DNA, 96 bp, Aspergillus novofumigatus
  misc_feature: 113
cctaattcattctattaaattattatttactttatccttttcttttaatttatctttccttaattttaatttccttcttctctttcttctctttct

SEQ ID NO: 14160 - DNA, 96 bp, Aspergillus novofumigatus
  misc_feature: 113
aggattaataagtatagaagaagagatagagttagaggaagaaatttaaagataagaggaattagaaagaataaataagaggagaggatattaggg

SEQ ID NO: 14161 - DNA, 96 bp, Aspergillus novofumigatus
  misc_feature: 113
aataagagataatttataggattaggatgagttaggattaggaataagttagggttaggaatgagttaggattaggaatttattaggattaggaat

SEQ ID NO: 14162 - DNA, 96 bp, Aspergillus novofumigatus
  misc_feature: 113
aacccttctcctctcttatcttataattaatctaatctcttttaatccttattctctctatcctaaattctcttgtcttctattattaatgactct

SEQ ID NO: 14163 - DNA, 96 bp, Aspergillus novofumigatus
  misc_feature: 113
agaggtaaagggtttaagagattaaagaaagatagtagaagaaaaaagaagggattttaagagagtagattaagaagagtaggaagaagaggattt

SEQ ID NO: 14164 - DNA, 96 bp, Aspergillus novofumigatus
  misc_feature: 113
aactcttatttatattctaattctaattcttattctaattcttattctaattcttattctaattcttattctaattcttattctaattcttattct

SEQ ID NO: 14165 - DNA, 96 bp, Aspergillus novofumigatus
  misc_feature: 113
acttaatatatggatgctaactaatcttaatctactaatattactacctctcttactacttaccttactattaaccttactatctactatgatatt

SEQ ID NO: 14166 - DNA, 96 bp, Aspergillus novofumigatus
  misc_feature: 112
tttttaaatagtttaaaatactttataattctaattagctaaattattatattctaatattaaatccttaattattcactagtaaggtggttaaac

SEQ ID NO: 14167 - DNA, 96 bp, Aspergillus novofumigatus
  misc_feature: 112
ttttaaatagtttaaaatactttataattctaattagctaaattattatattctaatattaaatccttaattattcactagtaaggtggttaaact

SEQ ID NO: 14168 - DNA, 96 bp, Aspergillus novofumigatus
  misc_feature: 112
atttttaaatagtttaaaatactttataattctaattagctaaattattatattctaatattaaatccttaattattcactagtaaggtggttaaa

SEQ ID NO: 14169 - DNA, 96 bp, Aspergillus novofumigatus
  misc_feature: 112
tttaaatagtttaaaatactttataattctaattagctaaattattatattctaatattaaatccttaattattcactagtaaggtggttaaacta

SEQ ID NO: 14170 - DNA, 96 bp, Aspergillus novofumigatus
  misc_feature: 112
aagaaaggtcagggtggaataaggatatagggaaggataagattagggttaggagtaggattaggataaggataagggttagggtattagtaagaa

SEQ ID NO: 14171 - DNA, 96 bp, Aspergillus novofumigatus
  misc_feature: 112
ttcttaatatttttaaatagtttaaaatactttataattctaattagctaaattattatattctaatattaaatccttaattattcactagtaagg

SEQ ID NO: 14172 - DNA, 96 bp, Aspergillus novofumigatus
  misc_feature: 112
aaggtgctagaaagagaattagaataagaattagaataagaattagaataagaattagaataagaattagaataagaattagaataagaattagaa

SEQ ID NO: 14173 - DNA, 96 bp, Aspergillus novofumigatus
  misc_feature: 112
aggattaggaataagttagggttaggaatgagttaggattaggaatttattaggattaggaatttattaggattaggaatgagttaggattaggaa

SEQ ID NO: 14174 - DNA, 96 bp, Aspergillus novofumigatus
  misc_feature: 112
ttatttaattatgaacccttctcctctcttatcttataattaatctaatctcttttaatccttattctctctatcctaaattctcttgtcttctat

SEQ ID NO: 14175 - DNA, 96 bp, Aspergillus novofumigatus
  misc_feature: 112
ttatataatattattcttatttttcttatagtaaattaattactatactatatttacctagtatatttatatctactaataagttagcttttaatc

SEQ ID NO: 14176 - DNA, 96 bp, Aspergillus novofumigatus
  misc_feature: 112
ctctctttaatatatatctctactagtctactatataaaatttataaaatatttaattatatagagttttaaaaattctaggcttattattactaa

SEQ ID NO: 14177 - DNA, 96 bp, Aspergillus novofumigatus
  misc_feature: 112
ttaattaaagataggatatatataactactaataagaatagagaagatagtaatttaaaagataataataagaattactttatatatatatattta

SEQ ID NO: 14178 - DNA, 96 bp, Aspergillus novofumigatus
  misc_feature: 112
ttaacctcttactaaatccctaatcctaacttattcctaatcctaataaattcctaatcctataaattatctcttattctacctaattaacctact

SEQ ID NO: 14179 - DNA, 96 bp, Aspergillus novofumigatus
  misc_feature: 112
tgctatttataattactatctaccttattacctaccttactattgactacactatctatcttactgtctaccttactatctatcttactatctacc

SEQ ID NO: 14180 - DNA, 96 bp, Aspergillus novofumigatus
  misc_feature: 112
tgctagaaagagaattagaataagaattagaataagaattagaataagaattagaataagaattagaataagaattagaataagaattagaataag

SEQ ID NO: 14181 - DNA, 96 bp, Aspergillus novofumigatus
  misc_feature: 112
tctttcttcttctctttcttcttctctttcttcttattcttcttattcttcctctctttcttaccctttacttaaactctttctatcttatctatc

SEQ ID NO: 14182 - DNA, 96 bp, Aspergillus novofumigatus
  misc_feature: 112
tctttaatatatatctctactagtctactatataaaatttataaaatatttaattatatagagttttaaaaattctaggcttattattactaagta

SEQ ID NO: 14183 - DNA, 96 bp, Aspergillus novofumigatus
  misc_feature: 112
tcttcttctctttcttcttctctttcttcttattcttcttattcttcctctctttcttaccctttacttaaactctttctatcttatctatcttta

SEQ ID NO: 14184 - DNA, 96 bp, Aspergillus novofumigatus
  misc_feature: 112
gctagaaagagaattagaataagaattagaataagaattagaataagaattagaataagaattagaataagaattagaataagaattagaataaga

SEQ ID NO: 14185 - DNA, 96 bp, Aspergillus novofumigatus
  misc_feature: 112
tctctttcttcttctctttcttcttattcttcttattcttcctctctttcttaccctttacttaaactctttctatcttatctatctttaccttct

SEQ ID NO: 14186 - DNA, 96 bp, Aspergillus novofumigatus
  misc_feature: 112
tctatttatctatcttttctttctctttttaatctatattctaattcttaacttattatctttaactctccttctgactctttttttaattcttat

SEQ ID NO: 14187 - DNA, 96 bp, Aspergillus novofumigatus
  misc_feature: 112
tctatctcttctttcttttcttttctttcttctttcctctttcttttctatctattatcttcttactatctaacccttactccatccttaatcttt

SEQ ID NO: 14188 - DNA, 96 bp, Aspergillus novofumigatus
  misc_feature: 112
ggattagaataagaattataagaagagttaaagatagtaagttaaagattagaatatagattaaaaagagaaagaaaatatagataaatagataga

SEQ ID NO: 14189 - DNA, 96 bp, Aspergillus novofumigatus
  misc_feature: 112
tctatccttactaacccttaccctctcctactatctcttctttctctaattcttttcttccctctttttatccctcttatctatacttactaactc

SEQ ID NO: 14190 - DNA, 96 bp, Aspergillus novofumigatus
  misc_feature: 112
taaggtgctagaaagagaattagaataagaattagaataagaattagaataagaattagaataagaattagaataagaattagaataagaattaga

SEQ ID NO: 14191 - DNA, 96 bp, Aspergillus novofumigatus
  misc_feature: 112
tctaattattcttttttctatatctatctcttctttcttttcttttctttcttctttcctctttcttttctatctattatcttcttactatctaac

SEQ ID NO: 14192 - DNA, 96 bp, Aspergillus novofumigatus
  misc_feature: 112
tccttcttcccttctattcttaactctctctttctctttcttctcctttctatccctaactcttattctaacccttcttctatctcttcctctaat

SEQ ID NO: 14193 - DNA, 96 bp, Aspergillus novofumigatus
  misc_feature: 112
aataaggggtagaaatatataagatagagagagttttagtaaagagaagaaataaatataattaaaaatagaagaagaaagggaagaggaaaggga

SEQ ID NO: 14194 - DNA, 96 bp, Aspergillus novofumigatus
  misc_feature: 112
tccctctctcctctatctcttcttaatctcctctcttatcccttctaatctaaatccttacccttactcttattattaccctctctattcctttta

SEQ ID NO: 14195 - DNA, 96 bp, Aspergillus novofumigatus
  misc_feature: 112
taggattagaataagaattataagaagagttaaagatagtaagttaaagattagaatatagattaaaaagagaaagaaaatatagataaatagata

SEQ ID NO: 14196 - DNA, 96 bp, Aspergillus novofumigatus
  misc_feature: 112
aattaaagataggatatatataactactaataagaatagagaagatagtaatttaaaagataataataagaattactttatatatatatatttata

SEQ ID NO: 14197 - DNA, 96 bp, Aspergillus novofumigatus
  misc_feature: 112
ctctcttactccctctctcctctatctcttcttaatctcctctcttatcccttctaatctaaatccttacccttactcttattattaccctctcta

SEQ ID NO: 14198 - DNA, 96 bp, Aspergillus novofumigatus
  misc_feature: 112
tagagagaggtaaagggtttaagagattaaagaaagatagtagaagaaaaaagaagggattttaagagagtagattaagaagagtaggaagaagag

SEQ ID NO: 14199 - DNA, 96 bp, Aspergillus novofumigatus
  misc_feature: 112
cttctattcttaactctctctttctctttcttctcctttctatccctaactcttattctaacccttcttctatctcttcctctaatcctccttcta

SEQ ID NO: 14200 - DNA, 96 bp, Aspergillus novofumigatus
  misc_feature: 112
tagaaagagaattagaataagaattagaataagaattagaataagaattagaataagaattagaataagaattagaataagaattagaataagaat

SEQ ID NO: 14201 - DNA, 96 bp, Aspergillus novofumigatus
  misc_feature: 112
taagagttagaataagaattaaaaaaagagtcagaaggagagttaaagataataagttaagaattagaatatagattaaaaagagaaagaaaagat

SEQ ID NO: 14202 - DNA, 96 bp, Aspergillus novofumigatus
  misc_feature: 112
gaggtaaagggtttaagagattaaagaaagatagtagaagaaaaaagaagggattttaagagagtagattaagaagagtaggaagaagaggattta

SEQ ID NO: 14203 - DNA, 96 bp, Aspergillus novofumigatus
  misc_feature: 112
gtagaataagagataatttataggattaggatgagttaggattaggaataagttagggttaggaatgagttaggattaggaatttattaggattag

SEQ ID NO: 14204 - DNA, 96 bp, Aspergillus novofumigatus
  misc_feature: 112
cttcccttctattcttaactctctctttctctttcttctcctttctatccctaactcttattctaacccttcttctatctcttcctctaatcctcc

SEQ ID NO: 14205 - DNA, 96 bp, Aspergillus novofumigatus
  misc_feature: 112
cttactccctctctcctctatctcttcttaatctcctctcttatcccttctaatctaaatccttacccttactcttattattaccctctctattcc

SEQ ID NO: 14206 - DNA, 96 bp, Aspergillus novofumigatus
  misc_feature: 112
atctctctcttactccctctctcctctatctcttcttaatctcctctcttatcccttctaatctaaatccttacccttactcttattattaccctc

SEQ ID NO: 14207 - DNA, 96 bp, Aspergillus novofumigatus
  misc_feature: 112
cctctcttatcttataattaatctaatctcttttaatccttattctctctatcctaaattctcttgtcttctattattaatgactctctttttttc

SEQ ID NO: 14208 - DNA, 96 bp, Aspergillus novofumigatus
  misc_feature: 112
ctttctctttttaatctatattctaatctttaacttactatctttaactcttcttataattcttattctaatcctaagcttattaaccctaactct

SEQ ID NO: 14209 - DNA, 96 bp, Aspergillus novofumigatus
  misc_feature: 112
ctttaatatatatctctactagtctactatataaaatttataaaatatttaattatatagagttttaaaaattctaggcttattattactaagtat

SEQ ID NO: 14210 - DNA, 96 bp, Aspergillus novofumigatus
  misc_feature: 112
cttcttctctttcttcttctctttcttcttctctttcttcttattcttcttattcttcctctctttcttaccctttacttaaactctttctatctt

SEQ ID NO: 14211 - DNA, 96 bp, Aspergillus novofumigatus
  misc_feature: 112
cttaaaatcccttcttttttcttctactatctttctttaatctcttaaaccctttacctctctctactctaaattactaattcttactaataccct

SEQ ID NO: 14212 - DNA, 96 bp, Aspergillus novofumigatus
  misc_feature: 112
ctctttcttcttctctttcttcttctctttcttcttattcttcttattcttcctctctttcttaccctttacttaaactctttctatcttatctat

SEQ ID NO: 14213 - DNA, 96 bp, Aspergillus novofumigatus
  misc_feature: 112
ctctactagtctactatataaaatttataaaatatttaattatatagagttttaaaaattctaggcttattattactaagtatactatatattatt

SEQ ID NO: 14214 - DNA, 96 bp, Aspergillus novofumigatus
  misc_feature: 112
ctatttatctatcttttctttctctttttaatctatattctaattcttaacttattatctttaactctccttctgactctttttttaattcttatt

SEQ ID NO: 14215 - DNA, 96 bp, Aspergillus novofumigatus
  misc_feature: 112
ctatccttactaacccttaccctctcctactatctcttctttctctaattcttttcttccctctttttatccctcttatctatacttactaactct

SEQ ID NO: 14216 - DNA, 96 bp, Aspergillus novofumigatus
  misc_feature: 112
aggtaaagggtttaagagattaaagaaagatagtagaagaaaaaagaagggattttaagagagtagattaagaagagtaggaagaagaggatttag

SEQ ID NO: 14217 - DNA, 96 bp, Aspergillus novofumigatus
  misc_feature: 112
agaataaggggtagaaatatataagatagagagagttttagtaaagagaagaaataaatataattaaaaatagaagaagaaagggaagaggaaagg

SEQ ID NO: 14218 - DNA, 96 bp, Aspergillus novofumigatus
  misc_feature: 112
agataagaataaggggtagaaatatataagatagagagagttttagtaaagagaagaaataaatataattaaaaatagaagaagaaagggaagagg

SEQ ID NO: 14219 - DNA, 96 bp, Aspergillus novofumigatus
  misc_feature: 112
attacttaatatatggatgctaactaatcttaatctactaatattactacctctcttactacttaccttactattaaccttactatctactatgat

SEQ ID NO: 14220 - DNA, 96 bp, Aspergillus novofumigatus
  misc_feature: 112
atctatctcttctttcttttcttttctttcttctttcctctttcttttctatctattatcttcttactatctaacccttactccatccttaatctt

SEQ ID NO: 14221 - DNA, 96 bp, Aspergillus novofumigatus
  misc_feature: 112
atatatctattacttaatatatggatgctaactaatcttaatctactaatattactacctctcttactacttaccttactattaaccttactatct

SEQ ID NO: 14222 - DNA, 96 bp, Aspergillus novofumigatus
  misc_feature: 112
agttaattaaagataggatatatataactactaataagaatagagaagatagtaatttaaaagataataataagaattactttatatatatatatt

SEQ ID NO: 14223 - DNA, 96 bp, Aspergillus novofumigatus
  misc_feature: 112
agtattacctctctttaatatatatctctactagtctactatataaaatttataaaatatttaattatatagagttttaaaaattctaggcttatt

SEQ ID NO: 14224 - DNA, 96 bp, Aspergillus novofumigatus
  misc_feature: 112
aactcttcttctatccttactaacccttaccctctcctactatctcttctttctctaattcttttcttccctctttttatccctcttatctatact

SEQ ID NO: 14225 - DNA, 96 bp, Aspergillus novofumigatus
  misc_feature: 112
acctctctttaatatatatctctactagtctactatataaaatttataaaatatttaattatatagagttttaaaaattctaggcttattattact

SEQ ID NO: 14226 - DNA, 96 bp, Aspergillus novofumigatus
  misc_feature: 112
agaaagagaattagaataagaattagaataagaattagaataagaattagaataagaattagaataagaattagaataagaattagaataagaatt

SEQ ID NO: 14227 - DNA, 96 bp, Aspergillus novofumigatus
  misc_feature: 111
ttttttctatatctgactcttctttcttttcttttctttcttcttttctctttcttttctatctattatcttcttactatctaacccttactccat

SEQ ID NO: 14228 - DNA, 96 bp, Aspergillus novofumigatus
  misc_feature: 111
ttagggttaataagcttaggattagaataagaattataagaagagttaaagatagtaagttaaagattagaatatagattaaaaagagaaagaaaa

SEQ ID NO: 14229 - DNA, 96 bp, Aspergillus novofumigatus
  misc_feature: 111
tttcttctttccttttttaatcttctctcttattctattaaaaatatacccttcttctctcttatattataattaatctactctctttttatcctt

SEQ ID NO: 14230 - DNA, 96 bp, Aspergillus novofumigatus
  misc_feature: 111
tttcttcttctctttcttcttctctttcttcttctctttcttcttctctttcttcttattcttcttattcttcctctctttcttaccctttactta

SEQ ID NO: 14231 - DNA, 96 bp, Aspergillus novofumigatus
  misc_feature: 111
tcttcttctctttcttcttctctttcttcttctctttcttcttctctttcttcttattcttcttattcttcctctctttcttaccctttacttaaa

SEQ ID NO: 14232 - DNA, 96 bp, Aspergillus novofumigatus
  misc_feature: 111
agttagggttaataagcttaggattagaataagaattataagaagagttaaagatagtaagttaaagattagaatatagattaaaaagagaaagaa

SEQ ID NO: 14233 - DNA, 96 bp, Aspergillus novofumigatus
  misc_feature: 111
ttcttcccttctattcttaactctctctttctctttcttctcctttctatccctaactcttattctaacccttcttctatctcttcctctaatcct

SEQ ID NO: 14234 - DNA, 96 bp, Aspergillus novofumigatus
  misc_feature: 111
agggttagtaagtttaagataagaataaggggtagaaatatataagatagagagagttttagtaaagagaagaaataaatataattaaaaatagaa

SEQ ID NO: 14235 - DNA, 96 bp, Aspergillus novofumigatus
  misc_feature: 111
ttctatatctgactcttctttcttttcttttctttcttcttttctctttcttttctatctattatcttcttactatctaacccttactccatcctt

SEQ ID NO: 14236 - DNA, 96 bp, Aspergillus novofumigatus
  misc_feature: 111
ttccttcttcccttctattcttaactctctctttctctttcttctcctttctatccctaactcttattctaacccttcttctatctcttcctctaa

SEQ ID NO: 14237 - DNA, 96 bp, Aspergillus novofumigatus
  misc_feature: 111
aggattaggaatttattaggattaggaatttattaggattaggaatgagttaggattaggaattggttaggattaggaataagttaggattaggaa

SEQ ID NO: 14238 - DNA, 96 bp, Aspergillus novofumigatus
  misc_feature: 111
ataaggggtagaaatatataagatagagagagttttagtaaagagaagaaataaatataattaaaaatagaagaagaaagggaagaggaaagggaa

SEQ ID NO: 14239 - DNA, 96 bp, Aspergillus novofumigatus
  misc_feature: 111
ttataggattaggatgagttaggattaggaataagttagggttaggaatgagttaggattaggaatttattaggattaggaatttattaggattag

SEQ ID NO: 14240 - DNA, 96 bp, Aspergillus novofumigatus
  misc_feature: 111
tcttctatccttactaacccttaccctctcctactatctcttctttctctaattcttttcttccctctttttatccctcttatctatacttactaa

SEQ ID NO: 14241 - DNA, 96 bp, Aspergillus novofumigatus
  misc_feature: 111
ttaggaataagttagggttaggaatgagttaggattaggaatttattaggattaggaatttattaggattaggaatgagttaggattaggaattgg

SEQ ID NO: 14242 - DNA, 96 bp, Aspergillus novofumigatus
  misc_feature: 111
aattcttaatatttttaaatagtttaaaatactttataattctaattagctaaattattatattctaatattaaatccttaattattcactagtaa

SEQ ID NO: 14243 - DNA, 96 bp, Aspergillus novofumigatus
  misc_feature: 111
ttaatatttttaaatagtttaaaatactttataattctaattagctaaattattatattctaatattaaatccttaattattcactagtaaggtgg

SEQ ID NO: 14244 - DNA, 96 bp, Aspergillus novofumigatus
  misc_feature: 111
tatcaggcaatgcttaatggaagacattaaattaggatattaaattattaatacaatattttttccttattaatacaatattaatttacttattaa

SEQ ID NO: 14245 - DNA, 96 bp, Aspergillus novofumigatus
  misc_feature: 111
ttaataagcttaggattagaataagaattataagaagagttaaagatagtaagttaaagattagaatatagattaaaaagagaaagaaaatataga

SEQ ID NO: 14246 - DNA, 96 bp, Aspergillus novofumigatus
  misc_feature: 111
ctatatctatctcttctttcttttcttttctttcttctttcctctttcttttctatctattatcttcttactatctaacccttactccatccttaa

SEQ ID NO: 14247 - DNA, 96 bp, Aspergillus novofumigatus
  misc_feature: 111
ttaaccctaactcttattcttattcttatctaaatcctatccctatccctatccctatccctatatgacctgaaacctaatatccctaatagtagt

SEQ ID NO: 14248 - DNA, 96 bp, Aspergillus novofumigatus
  misc_feature: 111
tgaacccttctcctctcttatcttataattaatctaatctcttttaatccttattctctctatcctaaattctcttgtcttctattattaatgact

SEQ ID NO: 14249 - DNA, 96 bp, Aspergillus novofumigatus
  misc_feature: 111
gagttagggttaataagcttaggattagaataagaattataagaagagttaaagatagtaagttaaagattagaatatagattaaaaagagaaaga

SEQ ID NO: 14250 - DNA, 96 bp, Aspergillus novofumigatus
  misc_feature: 111
agagtagagagaggtaaagggtttaagagattaaagaaagatagtagaagaaaaaagaagggattttaagagagtagattaagaagagtaggaaga

SEQ ID NO: 14251 - DNA, 96 bp, Aspergillus novofumigatus
  misc_feature: 111
gaagaaaggtcagggtggaataaggatatagggaaggataagattagggttaggagtaggattaggataaggataagggttagggtattagtaaga

SEQ ID NO: 14252 - DNA, 96 bp, Aspergillus novofumigatus
  misc_feature: 111
tctccaccctccatgggaccacgccagttggcggtccgagatggccgggcgcgcgccctgaccggcagcaggggcccgcgcgcgccgccgcctggg

SEQ ID NO: 14253 - DNA, 96 bp, Aspergillus novofumigatus
  misc_feature: 111
cttaggattagaataagaattataagaagagttaaagatagtaagttaaagattagaatatagattaaaaagagaaagaaaatatagataaataga

SEQ ID NO: 14254 - DNA, 96 bp, Aspergillus novofumigatus
  misc_feature: 111
tctatatctatctcttctttcttttcttttctttcttctttcctctttcttttctatctattatcttcttactatctaacccttactccatcctta

SEQ ID NO: 14255 - DNA, 96 bp, Aspergillus novofumigatus
  misc_feature: 111
tctactagtctactatataaaatttataaaatatttaattatatagagttttaaaaattctaggcttattattactaagtatactatatattatta

SEQ ID NO: 14256 - DNA, 96 bp, Aspergillus novofumigatus
  misc_feature: 111
tcctaattcattctattaaattattatttactttatccttttcttttaatttatctttccttaattttaatttccttcttctctttcttctctttc

SEQ ID NO: 14257 - DNA, 96 bp, Aspergillus novofumigatus
  misc_feature: 111
taggattaggaatttattaggattaggaatttattaggattaggaatgagttaggattaggaattggttaggattaggaataagttaggattagga

SEQ ID NO: 14258 - DNA, 96 bp, Aspergillus novofumigatus
  misc_feature: 111
tccctccctccctcgtccccctcgctcgcgcgcgcacccctgccggtcctcgccggcgccggccccccggtccctatgacggtgcgcgcgcgcgcg

SEQ ID NO: 14259 - DNA, 96 bp, Aspergillus novofumigatus
  misc_feature: 111
attaggaatttattaggattaggaatttattaggattaggaatgagttaggattaggaattggttaggattaggaataagttaggattaggaatga

SEQ ID NO: 14260 - DNA, 96 bp, Aspergillus novofumigatus
  misc_feature: 111
agcttaggattagaataagaattataagaagagttaaagatagtaagttaaagattagaatatagattaaaaagagaaagaaaatatagataaata

SEQ ID NO: 14261 - DNA, 96 bp, Aspergillus novofumigatus
  misc_feature: 111
tattacctctctttaatatatatctctactagtctactatataaaatttataaaatatttaattatatagagttttaaaaattctaggcttattat

SEQ ID NO: 14262 - DNA, 96 bp, Aspergillus novofumigatus
  misc_feature: 111
tatctcttctttcttttcttttctttcttctttcctctttcttttctatctattatcttcttactatctaacccttactccatccttaatctttcc

SEQ ID NO: 14263 - DNA, 96 bp, Aspergillus novofumigatus
  misc_feature: 111
tatatctatctcttctttcttttcttttctttcttctttcctctttcttttctatctattatcttcttactatctaacccttactccatccttaat

SEQ ID NO: 14264 - DNA, 96 bp, Aspergillus novofumigatus
  misc_feature: 111
taggaatttattaggattaggaatttattaggattaggaatgagttaggattaggaattggttaggattaggaataagttaggattaggaatgagt

SEQ ID NO: 14265 - DNA, 96 bp, Aspergillus novofumigatus
  misc_feature: 111
tagattaattataagataagagaggagaagggttcataattaaataaataagagagaagaataagaaagaaaagaagaaagagtagagaagagaag

SEQ ID NO: 14266 - DNA, 96 bp, Aspergillus novofumigatus
  misc_feature: 111
ctctttcttcttctctttcttcttattcttcttattcttcctctctttcttaccctttacttaaactctttctatcttatctatctttaccttcta

SEQ ID NO: 14267 - DNA, 96 bp, Aspergillus novofumigatus
  misc_feature: 111
taattaaagataggatatatataactactaataagaatagagaagatagtaatttaaaagataataataagaattactttatatatatatatttat

SEQ ID NO: 14268 - DNA, 96 bp, Aspergillus novofumigatus
  misc_feature: 111
gaatagtaagggtaaggataagagtaagggtttagtttaggggagagttagggagagatagaaggggagatagagggagagatagaagaaggatta

SEQ ID NO: 14269 - DNA, 96 bp, Aspergillus novofumigatus
  misc_feature: 111
atttaattatgaacccttctcctctcttatcttataattaatctaatctcttttaatccttattctctctatcctaaattctcttgtcttctatta

SEQ ID NO: 14270 - DNA, 96 bp, Aspergillus novofumigatus
  misc_feature: 111
gtattacctctctttaatatatatctctactagtctactatataaaatttataaaatatttaattatatagagttttaaaaattctaggcttatta

SEQ ID NO: 14271 - DNA, 96 bp, Aspergillus novofumigatus
  misc_feature: 111
aatctactctcttaaaatcccttcttttttcttctactatctttctttaatctcttaaaccctttacctctctctactctaaattactaattctta

SEQ ID NO: 14272 - DNA, 96 bp, Aspergillus novofumigatus
  misc_feature: 111
ggaatttattaggattaggaatttattaggattaggaatgagttaggattaggaattggttaggattaggaataagttaggattaggaatgagtta

SEQ ID NO: 14273 - DNA, 96 bp, Aspergillus novofumigatus
  misc_feature: 111
taacctcttactaaatccctaatcctaacttattcctaatcctaataaattcctaatcctataaattatctcttattctacctaattaacctactc

SEQ ID NO: 14274 - DNA, 96 bp, Aspergillus novofumigatus
  misc_feature: 111
taaccctaactcttattcttattcttatctaaatcctatccctatccctatccctatccctatatgacctgaaacctaatatccctaatagtagtt

SEQ ID NO: 14275 - DNA, 96 bp, Aspergillus novofumigatus
  misc_feature: 111
cttcttctctttcttcttctctttcttcttctctttcttcttctctttcttcttattcttcttattcttcctctctttcttaccctttacttaaac

SEQ ID NO: 14276 - DNA, 96 bp, Aspergillus novofumigatus
  misc_feature: 111
gttaattaaagataggatatatataactactaataagaatagagaagatagtaatttaaaagataataataagaattactttatatatatatattt

SEQ ID NO: 14277 - DNA, 96 bp, Aspergillus novofumigatus
  misc_feature: 111
ccagcaggaagaacccagtaagataggtagtatagtagatagtaaggcaggcagtgaagcaggtagtaaggcaggtagtaaggcaggcagcaagac

SEQ ID NO: 14278 - DNA, 96 bp, Aspergillus novofumigatus
  misc_feature: 111
atgaacccttctcctctcttatcttataattaatctaatctcttttaatccttattctctctatcctaaattctcttgtcttctattattaatgac

SEQ ID NO: 14279 - DNA, 96 bp, Aspergillus novofumigatus
  misc_feature: 111
ctatctctctcttactccctctctcctctatctcttcttaatctcctctcttatcccttctaatctaaatccttacccttactcttattattaccc

SEQ ID NO: 14280 - DNA, 96 bp, Aspergillus novofumigatus
  misc_feature: 111
aatttctattttattcctaacccttattctctctcttattattatcttttattttcttttcttttctattccctttcctcttccctttcctcttcc

SEQ ID NO: 14281 - DNA, 96 bp, Aspergillus novofumigatus
  misc_feature: 111
gagttaggattaggaatttattaggattaggaatttattaggattaggaatgagttaggattaggaattggttaggattaggaataagttaggatt

SEQ ID NO: 14282 - DNA, 96 bp, Aspergillus novofumigatus
  misc_feature: 111
agaagaaaggtcagggtggaataaggatatagggaaggataagattagggttaggagtaggattaggataaggataagggttagggtattagtaag

SEQ ID NO: 14283 - DNA, 96 bp, Aspergillus novofumigatus
  misc_feature: 111
ctgtctaccttactgtctaccttactgtctaccttactatctaccttactgtctaccttactgcctgactcacttactatcttacttactgcctgt

SEQ ID NO: 14284 - DNA, 96 bp, Aspergillus novofumigatus
  misc_feature: 111
ctccaccctccatgggaccacgccagttggcggtccgagatggccgggcgcgcgccctgaccggcagcaggggcccgcgcgcgccgccgcctgggg

SEQ ID NO: 14285 - DNA, 96 bp, Aspergillus novofumigatus
  misc_feature: 111
attaaccctaactcttattcttattcttatctaaatcctatccctatccctatccctatccctatatgacctgaaacctaatatccctaatagtag

SEQ ID NO: 14286 - DNA, 96 bp, Aspergillus novofumigatus
  misc_feature: 111
catgcaaaagcatgaggtttaggtggactacttaaacataatccgaggataaggattttagcggcttgtagtattttagccgcttgttgcattttt

SEQ ID NO: 14287 - DNA, 96 bp, Aspergillus novofumigatus
  misc_feature: 111
agaaaggtcagggtggaataaggatatagggaaggataagattagggttaggagtaggattaggataaggataagggttagggtattagtaagaat

SEQ ID NO: 14288 - DNA, 96 bp, Aspergillus novofumigatus
  misc_feature: 111
attatgaacccttctcctctcttatcttataattaatctaatctcttttaatccttattctctctatcctaaattctcttgtcttctattattaat

SEQ ID NO: 14289 - DNA, 96 bp, Aspergillus novofumigatus
  misc_feature: 111
atggatgctaactaatcttaatctactaatattactacctctcttactacttaccttactattaaccttactatctactatgatatttatattact

SEQ ID NO: 14290 - DNA, 96 bp, Aspergillus novofumigatus
  misc_feature: 111
ataatttctattttattcctaacccttattctctctcttattattatcttttattttcttttcttttctattccctttcctcttccctttcctctt

SEQ ID NO: 14291 - DNA, 96 bp, Aspergillus novofumigatus
  misc_feature: 111
aggcaatgcttaatggaagacattaaattaggatattaaattattaatacaatattttttccttattaatacaatattaatttacttattaatact

SEQ ID NO: 14292 - DNA, 96 bp, Aspergillus novofumigatus
  misc_feature: 111
aggaataagttagggttaggaatgagttaggattaggaatttattaggattaggaatttattaggattaggaatgagttaggattaggaattggtt

SEQ ID NO: 14293 - DNA, 96 bp, Aspergillus novofumigatus
  misc_feature: 110
tttttttctaatcttctctctttctaccctttctaactccctctcttctttttttaatctatctctaaatcctcttcttcctactcttcttaatct

SEQ ID NO: 14294 - DNA, 96 bp, Aspergillus novofumigatus
  misc_feature: 110
gttagggttaataagcttaggattagaataagaattataagaagagttaaagatagtaagttaaagattagaatatagattaaaaagagaaagaaa

SEQ ID NO: 14295 - DNA, 96 bp, Aspergillus novofumigatus
  misc_feature: 110
tttctattttattcctaacccttattctctctcttattattatcttttattttcttttcttttctattccctttcctcttccctttcctcttccct

SEQ ID NO: 14296 - DNA, 96 bp, Aspergillus novofumigatus
  misc_feature: 110
tttccttcttcccttctattcttaactctctctttctctttcttctcctttctatccctaactcttattctaacccttcttctatctcttcctcta

SEQ ID NO: 14297 - DNA, 96 bp, Aspergillus novofumigatus
  misc_feature: 110
taagaataaggggtagaaatatataagatagagagagttttagtaaagagaagaaataaatataattaaaaatagaagaagaaagggaagaggaaa

SEQ ID NO: 14298 - DNA, 96 bp, Aspergillus novofumigatus
  misc_feature: 110
ttctttttttaatctatctctaaatcctcttcttcctactcttcttaatctactctcttaaaatcccttcttttttcttctactatctttctttaa

SEQ ID NO: 14299 - DNA, 96 bp, Aspergillus novofumigatus
  misc_feature: 110
ttctttccttttttaatcttctctcttattctattaaaaatatacccttcttctctcttatattataattaatctactctctttttatccttattc

SEQ ID NO: 14300 - DNA, 96 bp, Aspergillus novofumigatus
  misc_feature: 110
ttcttctccctttttatctcttctctctatttctctcttaattcttactctatctcttactttacctctttctctatctctctcttctatctacac

SEQ ID NO: 14301 - DNA, 96 bp, Aspergillus novofumigatus
  misc_feature: 110
gagtagagagaggtaaagggtttaagagattaaagaaagatagtagaagaaaaaagaagggattttaagagagtagattaagaagagtaggaagaa

SEQ ID NO: 14302 - DNA, 96 bp, Aspergillus novofumigatus
  misc_feature: 110
ttagattaattataagataagagaggagaagggttcataattaaataaataagagagaagaataagaaagaaaagaagaaagagtagagaagagaa

SEQ ID NO: 14303 - DNA, 96 bp, Aspergillus novofumigatus
  misc_feature: 110
ttctccctttttatctcttctctctatttctctcttaattcttactctatctcttactttacctctttctctatctctctcttctatctacactta

SEQ ID NO: 14304 - DNA, 96 bp, Aspergillus novofumigatus
  misc_feature: 110
ttctatctctctcttactccctctctcctctatctcttcttaatctcctctcttatcccttctaatctaaatccttacccttactcttattattac

SEQ ID NO: 14305 - DNA, 96 bp, Aspergillus novofumigatus
  misc_feature: 110
gattagaataagaattataagaagagttaaagatagtaagttaaagattagaatatagattaaaaagagaaagaaaatatagataaatagatagaa

SEQ ID NO: 14306 - DNA, 96 bp, Aspergillus novofumigatus
  misc_feature: 110
agggttaggaatgagttaggattaggaatttattaggattaggaatttattaggattaggaatgagttaggattaggaattggttaggattaggaa

SEQ ID NO: 14307 - DNA, 96 bp, Aspergillus novofumigatus
  misc_feature: 110
tagggaataagggattaggcatataagtatataatatactctataggagtagatagattagttaattaaagataggatatatataactactaataa

SEQ ID NO: 14308 - DNA, 96 bp, Aspergillus novofumigatus
  misc_feature: 110
ttagttaattaaagataggatatatataactactaataagaatagagaagatagtaatttaaaagataataataagaattactttatatatatata

SEQ ID NO: 14309 - DNA, 96 bp, Aspergillus novofumigatus
  misc_feature: 110
ttaggatgagttaggattaggaataagttagggttaggaatgagttaggattaggaatttattaggattaggaatttattaggattaggaatgagt

SEQ ID NO: 14310 - DNA, 96 bp, Aspergillus novofumigatus
  misc_feature: 110
ttaggaatttattaggattaggaatttattaggattaggaatgagttaggattaggaattggttaggattaggaataagttaggattaggaatgag

SEQ ID NO: 14311 - DNA, 96 bp, Aspergillus novofumigatus
  misc_feature: 110
ttagagctagggaataagggattaggcatataagtatataatatactctataggagtagatagattagttaattaaagataggatatatataacta

SEQ ID NO: 14312 - DNA, 96 bp, Aspergillus novofumigatus
  misc_feature: 110
ttacttttgctaataccctctatctcttttactaactctccttcttcttctaactcttatctctaactctttctctctctcttcccctccctcttc

SEQ ID NO: 14313 - DNA, 96 bp, Aspergillus novofumigatus
  misc_feature: 110
ttaattcttaatatttttaaatagtttaaaatactttataattctaattagctaaattattatattctaatattaaatccttaattattcactagt

SEQ ID NO: 14314 - DNA, 96 bp, Aspergillus novofumigatus
  misc_feature: 110
ttaatctactctcttaaaatcccttcttttttcttctactatctttctttaatctcttaaaccctttacctctctctactctaaattactaattct

SEQ ID NO: 14315 - DNA, 96 bp, Aspergillus novofumigatus
  misc_feature: 110
aattatgaacccttctcctctcttatcttataattaatctaatctcttttaatccttattctctctatcctaaattctcttgtcttctattattaa

SEQ ID NO: 14316 - DNA, 96 bp, Aspergillus novofumigatus
  misc_feature: 110
ctatatctgactcttctttcttttcttttctttcttcttttctctttcttttctatctattatcttcttactatctaacccttactccatccttaa

SEQ ID NO: 14317 - DNA, 96 bp, Aspergillus novofumigatus
  misc_feature: 110
cttttttctatatctgactcttctttcttttcttttctttcttcttttctctttcttttctatctattatcttcttactatctaacccttactcca

SEQ ID NO: 14318 - DNA, 96 bp, Aspergillus novofumigatus
  misc_feature: 110
tctttcttctttccttttttaatcttctctcttattctattaaaaatatacccttcttctctcttatattataattaatctactctctttttatcc

SEQ ID NO: 14319 - DNA, 96 bp, Aspergillus novofumigatus
  misc_feature: 110
gtagagagaggtaaagggtttaagagattaaagaaagatagtagaagaaaaaagaagggattttaagagagtagattaagaagagtaggaagaaga

SEQ ID NO: 14320 - DNA, 96 bp, Aspergillus novofumigatus
  misc_feature: 110
tctctttaatatatatctctactagtctactatataaaatttataaaatatttaattatatagagttttaaaaattctaggcttattattactaag

SEQ ID NO: 14321 - DNA, 96 bp, Aspergillus novofumigatus
  misc_feature: 110
attagattaattataagataagagaggagaagggttcataattaaataaataagagagaagaataagaaagaaaagaagaaagagtagagaagaga

SEQ ID NO: 14322 - DNA, 96 bp, Aspergillus novofumigatus
  misc_feature: 110
tctccctttttatctcttctctctatttctctcttaattcttactctatctcttactttacctctttctctatctctctcttctatctacacttac

SEQ ID NO: 14323 - DNA, 96 bp, Aspergillus novofumigatus
  misc_feature: 110
aagggttagtaagtttaagataagaataaggggtagaaatatataagatagagagagttttagtaaagagaagaaataaatataattaaaaataga

SEQ ID NO: 14324 - DNA, 96 bp, Aspergillus novofumigatus
  misc_feature: 110
tctattttattcctaacccttattctctctcttattattatcttttattttcttttcttttctattccctttcctcttccctttcctcttcccttt

SEQ ID NO: 14325 - DNA, 96 bp, Aspergillus novofumigatus
  misc_feature: 110
tctatctctctcttactccctctctcctctatctcttcttaatctcctctcttatcccttctaatctaaatccttacccttactcttattattacc

SEQ ID NO: 14326 - DNA, 96 bp, Aspergillus novofumigatus
  misc_feature: 110
ataggattaggatgagttaggattaggaataagttagggttaggaatgagttaggattaggaatttattaggattaggaatttattaggattagga

SEQ ID NO: 14327 - DNA, 96 bp, Aspergillus novofumigatus
  misc_feature: 110
taggattaggaataagttagggttaggaatgagttaggattaggaatttattaggattaggaatttattaggattaggaatgagttaggattagga

SEQ ID NO: 14328 - DNA, 96 bp, Aspergillus novofumigatus
  misc_feature: 110
tatgaacccttctcctctcttatcttataattaatctaatctcttttaatccttattctctctatcctaaattctcttgtcttctattattaatga

SEQ ID NO: 14329 - DNA, 96 bp, Aspergillus novofumigatus
  misc_feature: 110
tattacttaatatatggatgctaactaatcttaatctactaatattactacctctcttactacttaccttactattaaccttactatctactatga

SEQ ID NO: 14330 - DNA, 96 bp, Aspergillus novofumigatus
  misc_feature: 110
tattttattcctaacccttattctctctcttattattatcttttattttcttttcttttctattccctttcctcttccctttcctcttccctttct

SEQ ID NO: 14331 - DNA, 96 bp, Aspergillus novofumigatus
  misc_feature: 110
tattcctaacccttattctctctcttattattatcttttattttcttttcttttctattccctttcctcttccctttcctcttccctttcttctcc

SEQ ID NO: 14332 - DNA, 96 bp, Aspergillus novofumigatus
  misc_feature: 110
ctagggaataagggattaggcatataagtatataatatactctataggagtagatagattagttaattaaagataggatatatataactactaata

SEQ ID NO: 14333 - DNA, 96 bp, Aspergillus novofumigatus
  misc_feature: 110
tatccttactaacccttaccctctcctactatctcttctttctctaattcttttcttccctctttttatccctcttatctatacttactaactctt

SEQ ID NO: 14334 - DNA, 96 bp, Aspergillus novofumigatus
  misc_feature: 110
ggttaataagcttaggattagaataagaattataagaagagttaaagatagtaagttaaagattagaatatagattaaaaagagaaagaaaatata

SEQ ID NO: 14335 - DNA, 96 bp, Aspergillus novofumigatus
  misc_feature: 110
tataggattaggatgagttaggattaggaataagttagggttaggaatgagttaggattaggaatttattaggattaggaatttattaggattagg

SEQ ID NO: 14336 - DNA, 96 bp, Aspergillus novofumigatus
  misc_feature: 110
tagttaattaaagataggatatatataactactaataagaatagagaagatagtaatttaaaagataataataagaattactttatatatatatat

SEQ ID NO: 14337 - DNA, 96 bp, Aspergillus novofumigatus
  misc_feature: 110
taggaataagttagggttaggaatgagttaggattaggaatttattaggattaggaatttattaggattaggaatgagttaggattaggaattggt

SEQ ID NO: 14338 - DNA, 96 bp, Aspergillus novofumigatus
  misc_feature: 110
ctttcttcttctctttcttcttctctttcttcttctctttcttcttattcttcttattcttcctctctttcttaccctttacttaaactctttcta

SEQ ID NO: 14339 - DNA, 96 bp, Aspergillus novofumigatus
  misc_feature: 110
tacttttgctaataccctctatctcttttactaactctccttcttcttctaactcttatctctaactctttctctctctcttcccctccctcttcc

SEQ ID NO: 14340 - DNA, 96 bp, Aspergillus novofumigatus
  misc_feature: 110
tactgtctaccttactgtctaccttactgtctaccttactatctaccttactgtctaccttactgcctgactcacttactatcttacttactgcct

SEQ ID NO: 14341 - DNA, 96 bp, Aspergillus novofumigatus
  misc_feature: 110
taattcttaatatttttaaatagtttaaaatactttataattctaattagctaaattattatattctaatattaaatccttaattattcactagta

SEQ ID NO: 14342 - DNA, 96 bp, Aspergillus novofumigatus
  misc_feature: 110
tacctctctttaatatatatctctactagtctactatataaaatttataaaatatttaattatatagagttttaaaaattctaggcttattattac

SEQ ID NO: 14343 - DNA, 96 bp, Aspergillus novofumigatus
  misc_feature: 110
atccttactaacccttaccctctcctactatctcttctttctctaattcttttcttccctctttttatccctcttatctatacttactaactctta

SEQ ID NO: 14344 - DNA, 96 bp, Aspergillus novofumigatus
  misc_feature: 110
aggatgagttaggattaggaataagttagggttaggaatgagttaggattaggaatttattaggattaggaatttattaggattaggaatgagtta

SEQ ID NO: 14345 - DNA, 96 bp, Aspergillus novofumigatus
  misc_feature: 110
aaccctaactcttattcttattcttatctaaatcctatccctatccctatccctatccctatatgacctgaaacctaatatccctaatagtagtta

SEQ ID NO: 14346 - DNA, 96 bp, Aspergillus novofumigatus
  misc_feature: 110
gttaataagcttaggattagaataagaattataagaagagttaaagatagtaagttaaagattagaatatagattaaaaagagaaagaaaatatag

SEQ ID NO: 14347 - DNA, 96 bp, Aspergillus novofumigatus
  misc_feature: 110
gtctcgcgcgcgcgcgcagggccggtcctggccaacggcgccggccccctggcctccctcctgcccgcctgccggtctgcccccccccaaggggcc

SEQ ID NO: 14348 - DNA, 96 bp, Aspergillus novofumigatus
  misc_feature: 110
caggcaatgcttaatggaagacattaaattaggatattaaattattaatacaatattttttccttattaatacaatattaatttacttattaatac

SEQ ID NO: 14349 - DNA, 96 bp, Aspergillus novofumigatus
  misc_feature: 110
atgctatttataattactatctaccttattacctaccttactattgactacactatctatcttactgtctaccttactatctatcttactatctac

SEQ ID NO: 14350 - DNA, 96 bp, Aspergillus novofumigatus
  misc_feature: 110
cttcttctctttcttcttctctttcttcttattcttcttattcttcctctctttcttaccctttacttaaactctttctatcttatctatctttac

SEQ ID NO: 14351 - DNA, 96 bp, Aspergillus novofumigatus
  misc_feature: 110
ctaattattcttttttctatatctatctcttctttcttttcttttctttcttctttcctctttcttttctatctattatcttcttactatctaacc

SEQ ID NO: 14352 - DNA, 96 bp, Aspergillus novofumigatus
  misc_feature: 110
gggttaggaatgagttaggattaggaatttattaggattaggaatttattaggattaggaatgagttaggattaggaattggttaggattaggaat

SEQ ID NO: 14353 - DNA, 96 bp, Aspergillus novofumigatus
  misc_feature: 110
atttctattttattcctaacccttattctctctcttattattatcttttattttcttttcttttctattccctttcctcttccctttcctcttccc

SEQ ID NO: 14354 - DNA, 96 bp, Aspergillus novofumigatus
  misc_feature: 110
cttcttcccttctattcttaactctctctttctctttcttctcctttctatccctaactcttattctaacccttcttctatctcttcctctaatcc

SEQ ID NO: 14355 - DNA, 96 bp, Aspergillus novofumigatus
  misc_feature: 110
ccttcttcccttctattcttaactctctctttctctttcttctcctttctatccctaactcttattctaacccttcttctatctcttcctctaatc

SEQ ID NO: 14356 - DNA, 96 bp, Aspergillus novofumigatus
  misc_feature: 110
ctttttttctaatcttctctctttctaccctttctaactccctctcttctttttttaatctatctctaaatcctcttcttcctactcttcttaatc

SEQ ID NO: 14357 - DNA, 96 bp, Aspergillus novofumigatus
  misc_feature: 110
gaacccttctcctctcttatcttataattaatctaatctcttttaatccttattctctctatcctaaattctcttgtcttctattattaatgactc

SEQ ID NO: 14358 - DNA, 96 bp, Aspergillus novofumigatus
  misc_feature: 110
cttttgctaataccctctatctcttttactaactctccttcttcttctaactcttatctctaactctttctctctctcttcccctccctcttcctc

SEQ ID NO: 14359 - DNA, 96 bp, Aspergillus novofumigatus
  misc_feature: 110
cccttctattcttaactctctctttctctttcttctcctttctatccctaactcttattctaacccttcttctatctcttcctctaatcctccttc

SEQ ID NO: 14360 - DNA, 96 bp, Aspergillus novofumigatus
  misc_feature: 110
ctatctcttctttcttttcttttctttcttctttcctctttcttttctatctattatcttcttactatctaacccttactccatccttaatctttc

SEQ ID NO: 14361 - DNA, 96 bp, Aspergillus novofumigatus
  misc_feature: 110
cttctccctttttatctcttctctctatttctctcttaattcttactctatctcttactttacctctttctctatctctctcttctatctacactt

SEQ ID NO: 14362 - DNA, 96 bp, Aspergillus novofumigatus
  misc_feature: 110
attcttaatatttttaaatagtttaaaatactttataattctaattagctaaattattatattctaatattaaatccttaattattcactagtaag

SEQ ID NO: 14363 - DNA, 96 bp, Aspergillus novofumigatus
  misc_feature: 110
ctctttaatatatatctctactagtctactatataaaatttataaaatatttaattatatagagttttaaaaattctaggcttattattactaagt

SEQ ID NO: 14364 - DNA, 96 bp, Aspergillus novofumigatus
  misc_feature: 110
ctccctttttatctcttctctctatttctctcttaattcttactctatctcttactttacctctttctctatctctctcttctatctacacttact

SEQ ID NO: 14365 - DNA, 96 bp, Aspergillus novofumigatus
  misc_feature: 110
atttatttaattatgaacccttctcctctcttatcttataattaatctaatctcttttaatccttattctctctatcctaaattctcttgtcttct

SEQ ID NO: 14366 - DNA, 96 bp, Aspergillus novofumigatus
  misc_feature: 110
attaaagataggatatatataactactaataagaatagagaagatagtaatttaaaagataataataagaattactttatatatatatatttatat

SEQ ID NO: 14367 - DNA, 96 bp, Aspergillus novofumigatus
  misc_feature: 110
atctcttctttcttttcttttctttcttctttcctctttcttttctatctattatcttcttactatctaacccttactccatccttaatctttcct

SEQ ID NO: 14368 - DNA, 96 bp, Aspergillus novofumigatus
  misc_feature: 110
aggaatttattaggattaggaatttattaggattaggaatgagttaggattaggaattggttaggattaggaataagttaggattaggaatgagtt

SEQ ID NO: 14369 - DNA, 96 bp, Aspergillus novofumigatus
  misc_feature: 110
agataagagaggagaagggttcataattaaataaataagagagaagaataagaaagaaaagaagaaagagtagagaagagaagaaaggattaaagt

SEQ ID NO: 14370 - DNA, 96 bp, Aspergillus novofumigatus
  misc_feature: 110
accctaacccttatccttatcctaatcctactcctaaccctaatcttatccttccctatatccttattccaccctgacctttcttcttcttctttt

SEQ ID NO: 14371 - DNA, 96 bp, Aspergillus novofumigatus
  misc_feature: 109
tttatttaattatgaacccttctcctctcttatcttataattaatctaatctcttttaatccttattctctctatcctaaattctcttgtcttcta

SEQ ID NO: 14372 - DNA, 96 bp, Aspergillus novofumigatus
  misc_feature: 109
tttagagtagagagaggtaaagggtttaagagattaaagaaagatagtagaagaaaaaagaagggattttaagagagtagattaagaagagtagga

SEQ ID NO: 14373 - DNA, 96 bp, Aspergillus novofumigatus
  misc_feature: 109
ttcttcttctctttcttcttctctttcttcttctctttcttcttctctttcttcttattcttcttattcttcctctctttcttaccctttacttaa

SEQ ID NO: 14374 - DNA, 96 bp, Aspergillus novofumigatus
  misc_feature: 109
ttcttctctttcttcttctctttcttcttctctttcttcttctctttcttcttattcttcttattcttcctctctttcttaccctttacttaaact

SEQ ID NO: 14375 - DNA, 96 bp, Aspergillus novofumigatus
  misc_feature: 109
ttcttctctttcttcttctctttcttcttattcttcttattcttcctctctttcttaccctttacttaaactctttctatcttatctatctttacc

SEQ ID NO: 14376 - DNA, 96 bp, Aspergillus novofumigatus
  misc_feature: 109
ttctctactctttcttcttttctttcttattcttctctcttatttatttaattatgaacccttctcctctcttatcttataattaatctaatctct

SEQ ID NO: 14377 - DNA, 96 bp, Aspergillus novofumigatus
  misc_feature: 109
ttctattcttaactctctctttctctttcttctcctttctatccctaactcttattctaacccttcttctatctcttcctctaatcctccttctaa

SEQ ID NO: 14378 - DNA, 96 bp, Aspergillus novofumigatus
  misc_feature: 109
ttagagtagagagaggtaaagggtttaagagattaaagaaagatagtagaagaaaaaagaagggattttaagagagtagattaagaagagtaggaa

SEQ ID NO: 14379 - DNA, 96 bp, Aspergillus novofumigatus
  misc_feature: 109
ttattcctaacccttattctctctcttattattatcttttattttcttttcttttctattccctttcctcttccctttcctcttccctttcttctc

SEQ ID NO: 14380 - DNA, 96 bp, Aspergillus novofumigatus
  misc_feature: 109
tactctcttaaaatcccttcttttttcttctactatctttctttaatctcttaaaccctttacctctctctactctaaattactaattcttactaa

SEQ ID NO: 14381 - DNA, 96 bp, Aspergillus novofumigatus
  misc_feature: 109
aagactaatatatatattaagatttataatatttactagaaacttaatctttataattattataagcttatcctctatagctattatactaagtaa

SEQ ID NO: 14382 - DNA, 96 bp, Aspergillus novofumigatus
  misc_feature: 109
ttactgtctaccttactgtctaccttactgtctaccttactatctaccttactgtctaccttactgcctgactcacttactatcttacttactgcc

SEQ ID NO: 14383 - DNA, 96 bp, Aspergillus novofumigatus
  misc_feature: 109
ttacctctctttaatatatatctctactagtctactatataaaatttataaaatatttaattatatagagttttaaaaattctaggcttattatta

SEQ ID NO: 14384 - DNA, 96 bp, Aspergillus novofumigatus
  misc_feature: 109
ttaagataagaataaggggtagaaatatataagatagagagagttttagtaaagagaagaaataaatataattaaaaatagaagaagaaagggaag

SEQ ID NO: 14385 - DNA, 96 bp, Aspergillus novofumigatus
  misc_feature: 109
ttaagagttagaataagaattaaaaaaagagtcagaaggagagttaaagataataagttaagaattagaatatagattaaaaagagaaagaaaaga

SEQ ID NO: 14386 - DNA, 96 bp, Aspergillus novofumigatus
  misc_feature: 109
ttaaagataggatatatataactactaataagaatagagaagatagtaatttaaaagataataataagaattactttatatatatatatttatatg

SEQ ID NO: 14387 - DNA, 96 bp, Aspergillus novofumigatus
  misc_feature: 109
tgagttaggattaggaatttattaggattaggaatttattaggattaggaatgagttaggattaggaattggttaggattaggaataagttaggat

SEQ ID NO: 14388 - DNA, 96 bp, Aspergillus novofumigatus
  misc_feature: 109
tctttttttaatctatctctaaatcctcttcttcctactcttcttaatctactctcttaaaatcccttcttttttcttctactatctttctttaat

SEQ ID NO: 14389 - DNA, 96 bp, Aspergillus novofumigatus
  misc_feature: 109
tctttcttcttctctttcttcttctctttcttcttctctttcttcttattcttcttattcttcctctctttcttaccctttacttaaactctttct

SEQ ID NO: 14390 - DNA, 96 bp, Aspergillus novofumigatus
  misc_feature: 109
accagcaggaagaacccagtaagataggtagtatagtagatagtaaggcaggcagtgaagcaggtagtaaggcaggtagtaaggcaggcagcaaga

SEQ ID NO: 14391 - DNA, 96 bp, Aspergillus novofumigatus
  misc_feature: 109
agattaattataagataagagaggagaagggttcataattaaataaataagagagaagaataagaaagaaaagaagaaagagtagagaagagaaga

SEQ ID NO: 14392 - DNA, 96 bp, Aspergillus novofumigatus
  misc_feature: 109
tcttaatctactctcttaaaatcccttcttttttcttctactatctttctttaatctcttaaaccctttacctctctctactctaaattactaatt

SEQ ID NO: 14393 - DNA, 96 bp, Aspergillus novofumigatus
  misc_feature: 109
tctatatctgactcttctttcttttcttttctttcttcttttctctttcttttctatctattatcttcttactatctaacccttactccatcctta

SEQ ID NO: 14394 - DNA, 96 bp, Aspergillus novofumigatus
  misc_feature: 109
tcaggcaatgcttaatggaagacattaaattaggatattaaattattaatacaatattttttccttattaatacaatattaatttacttattaata

SEQ ID NO: 14395 - DNA, 96 bp, Aspergillus novofumigatus
  misc_feature: 109
tattaacctcttactaaatccctaatcctaacttattcctaatcctaataaattcctaatcctataaattatctcttattctacctaattaaccta

SEQ ID NO: 14396 - DNA, 96 bp, Aspergillus novofumigatus
  misc_feature: 109
tatctctctcttactccctctctcctctatctcttcttaatctcctctcttatcccttctaatctaaatccttacccttactcttattattaccct

SEQ ID NO: 14397 - DNA, 96 bp, Aspergillus novofumigatus
  misc_feature: 109
tatatctgactcttctttcttttcttttctttcttcttttctctttcttttctatctattatcttcttactatctaacccttactccatccttaat

SEQ ID NO: 14398 - DNA, 96 bp, Aspergillus novofumigatus
  misc_feature: 109
tagtattacctctctttaatatatatctctactagtctactatataaaatttataaaatatttaattatatagagttttaaaaattctaggcttat

SEQ ID NO: 14399 - DNA, 96 bp, Aspergillus novofumigatus
  misc_feature: 109
tagtatactctatatcctactatttaggtatttactaaagtctatctctttattataattataagtattattattttatttattactataataaat

SEQ ID NO: 14400 - DNA, 96 bp, Aspergillus novofumigatus
  misc_feature: 109
taggatgagttaggattaggaataagttagggttaggaatgagttaggattaggaatttattaggattaggaatttattaggattaggaatgagtt

SEQ ID NO: 14401 - DNA, 96 bp, Aspergillus novofumigatus
  misc_feature: 109
taatttctattttattcctaacccttattctctctcttattattatcttttattttcttttcttttctattccctttcctcttccctttcctcttc

SEQ ID NO: 14402 - DNA, 96 bp, Aspergillus novofumigatus
  misc_feature: 109
taattcttattctaattcttattctaattcttattctaattcttattctaattcttattctaattcttattctaattcttattctaattctctttc

SEQ ID NO: 14403 - DNA, 96 bp, Aspergillus novofumigatus
  misc_feature: 109
aataaggtgctagaaagagaattagaataagaattagaataagaattagaataagaattagaataagaattagaataagaattagaataagaatta

SEQ ID NO: 14404 - DNA, 96 bp, Aspergillus novofumigatus
  misc_feature: 109
taatcttaatctactaatattactacctctcttactacttaccttactattaaccttactatctactatgatatttatattactatctaccttatt

SEQ ID NO: 14405 - DNA, 96 bp, Aspergillus novofumigatus
  misc_feature: 109
taacccttatccttatcctaatcctactcctaaccctaatcttatccttccctatatccttattccaccctgacctttcttcttcttcttttttct

SEQ ID NO: 14406 - DNA, 96 bp, Aspergillus novofumigatus
  misc_feature: 109
aggagaagggttcataattaaataaataagagagaagaataagaaagaaaagaagaaagagtagagaagagaagaaaggattaaagttaggattta

SEQ ID NO: 14407 - DNA, 96 bp, Aspergillus novofumigatus
  misc_feature: 109
gtttaagagattaaagaaagatagtagaagaaaaaagaagggattttaagagagtagattaagaagagtaggaagaagaggatttagagatagatt

SEQ ID NO: 14408 - DNA, 96 bp, Aspergillus novofumigatus
  misc_feature: 109
cttctatccttactaacccttaccctctcctactatctcttctttctctaattcttttcttccctctttttatccctcttatctatacttactaac

SEQ ID NO: 14409 - DNA, 96 bp, Aspergillus novofumigatus
  misc_feature: 109
gttagggttaggaatgagttaggattaggaatttattaggattaggaatttattaggattaggaatgagttaggattaggaattggttaggattag

SEQ ID NO: 14410 - DNA, 96 bp, Aspergillus novofumigatus
  misc_feature: 109
attaacctcttactaaatccctaatcctaacttattcctaatcctaataaattcctaatcctataaattatctcttattctacctaattaacctac

SEQ ID NO: 14411 - DNA, 96 bp, Aspergillus novofumigatus
  misc_feature: 109
ggtttaagagattaaagaaagatagtagaagaaaaaagaagggattttaagagagtagattaagaagagtaggaagaagaggatttagagatagat

SEQ ID NO: 14412 - DNA, 96 bp, Aspergillus novofumigatus
  misc_feature: 109
ggattaggaataagttagggttaggaatgagttaggattaggaatttattaggattaggaatttattaggattaggaatgagttaggattaggaat

SEQ ID NO: 14413 - DNA, 96 bp, Aspergillus novofumigatus
  misc_feature: 109
cgtctcgcgcgcgcgcgcagggccggtcctggccaacggcgccggccccctggcctccctcctgcccgcctgccggtctgcccccccccaaggggc

SEQ ID NO: 14414 - DNA, 96 bp, Aspergillus novofumigatus
  misc_feature: 109
cttactgtctaccttactgtctaccttactgtctaccttactatctaccttactgtctaccttactgcctgactcacttactatcttacttactgc

SEQ ID NO: 14415 - DNA, 96 bp, Aspergillus novofumigatus
  misc_feature: 109
gataagagaggagaagggttcataattaaataaataagagagaagaataagaaagaaaagaagaaagagtagagaagagaagaaaggattaaagtt

SEQ ID NO: 14416 - DNA, 96 bp, Aspergillus novofumigatus
  misc_feature: 109
ctctttcttctttccttttttaatcttctctcttattctattaaaaatatacccttcttctctcttatattataattaatctactctctttttatc

SEQ ID NO: 14417 - DNA, 96 bp, Aspergillus novofumigatus
  misc_feature: 109
gaggagaagggttcataattaaataaataagagagaagaataagaaagaaaagaagaaagagtagagaagagaagaaaggattaaagttaggattt

SEQ ID NO: 14418 - DNA, 96 bp, Aspergillus novofumigatus
  misc_feature: 109
gaataaggggtagaaatatataagatagagagagttttagtaaagagaagaaataaatataattaaaaatagaagaagaaagggaagaggaaaggg

SEQ ID NO: 14419 - DNA, 96 bp, Aspergillus novofumigatus
  misc_feature: 109
ctatctctttttttctaatcttctctctttctaccctttctaactccctctcttctttttttaatctatctctaaatcctcttcttcctactcttc

SEQ ID NO: 14420 - DNA, 96 bp, Aspergillus novofumigatus
  misc_feature: 109
gaaaggtcagggtggaataaggatatagggaaggataagattagggttaggagtaggattaggataaggataagggttagggtattagtaagaatt

SEQ ID NO: 14421 - DNA, 96 bp, Aspergillus novofumigatus
  misc_feature: 109
ctttcttctttccttttttaatcttctctcttattctattaaaaatatacccttcttctctcttatattataattaatctactctctttttatcct

SEQ ID NO: 14422 - DNA, 96 bp, Aspergillus novofumigatus
  misc_feature: 109
aagaataaggggtagaaatatataagatagagagagttttagtaaagagaagaaataaatataattaaaaatagaagaagaaagggaagaggaaag

SEQ ID NO: 14423 - DNA, 96 bp, Aspergillus novofumigatus
  misc_feature: 109
agtagagagaggtaaagggtttaagagattaaagaaagatagtagaagaaaaaagaagggattttaagagagtagattaagaagagtaggaagaag

SEQ ID NO: 14424 - DNA, 96 bp, Aspergillus novofumigatus
  misc_feature: 109
cttctctttcttcttctctttcttcttattcttcttattcttcctctctttcttaccctttacttaaactctttctatcttatctatctttacctt

SEQ ID NO: 14425 - DNA, 96 bp, Aspergillus novofumigatus
  misc_feature: 109
ctctcttatttatttaattatgaacccttctcctctcttatcttataattaatctaatctcttttaatccttattctctctatcctaaattctctt

SEQ ID NO: 14426 - DNA, 96 bp, Aspergillus novofumigatus
  misc_feature: 109
ctctcctgaatgtggttaatattatatgtattctctgatgtcttatttatatatatatgcctgcatataaaccacagattcagccaacatactctt

SEQ ID NO: 14427 - DNA, 96 bp, Aspergillus novofumigatus
  misc_feature: 109
attaggatgagttaggattaggaataagttagggttaggaatgagttaggattaggaatttattaggattaggaatttattaggattaggaatgag

SEQ ID NO: 14428 - DNA, 96 bp, Aspergillus novofumigatus
  misc_feature: 109
aatttagagtagagagaggtaaagggtttaagagattaaagaaagatagtagaagaaaaaagaagggattttaagagagtagattaagaagagtag

SEQ ID NO: 14429 - DNA, 96 bp, Aspergillus novofumigatus
  misc_feature: 109
aaggtcagggtggaataaggatatagggaaggataagattagggttaggagtaggattaggataaggataagggttagggtattagtaagaattag

SEQ ID NO: 14430 - DNA, 96 bp, Aspergillus novofumigatus
  misc_feature: 109
ctaatcttaatctactaatattactacctctcttactacttaccttactattaaccttactatctactatgatatttatattactatctaccttat

SEQ ID NO: 14431 - DNA, 96 bp, Aspergillus novofumigatus
  misc_feature: 109
atttagagtagagagaggtaaagggtttaagagattaaagaaagatagtagaagaaaaaagaagggattttaagagagtagattaagaagagtagg

SEQ ID NO: 14432 - DNA, 96 bp, Aspergillus novofumigatus
  misc_feature: 109
aataagttagggttaggaatgagttaggattaggaatttattaggattaggaatttattaggattaggaatgagttaggattaggaattggttagg

SEQ ID NO: 14433 - DNA, 96 bp, Aspergillus novofumigatus
  misc_feature: 109
attttattcctaacccttattctctctcttattattatcttttattttcttttcttttctattccctttcctcttccctttcctcttccctttctt

SEQ ID NO: 14434 - DNA, 96 bp, Aspergillus novofumigatus
  misc_feature: 109
attatataatattattcttatttttcttatagtaaattaattactatactatatttacctagtatatttatatctactaataagttagcttttaat

SEQ ID NO: 14435 - DNA, 96 bp, Aspergillus novofumigatus
  misc_feature: 109
attagatatattttattaatagagtttaagaagtatagtatactttaatatatattatttttagaatttcttctaaagtttagtatatactagtat

SEQ ID NO: 14436 - DNA, 96 bp, Aspergillus novofumigatus
  misc_feature: 109
aaaattctaattattcttttttctatatctatctcttctttcttttcttttctttcttctttcctctttcttttctatctattatcttcttactat

SEQ ID NO: 14437 - DNA, 96 bp, Aspergillus novofumigatus
  misc_feature: 109
agggtggaataaggatatagggaaggataagattagggttaggagtaggattaggataaggataagggttagggtattagtaagaattagtaattt

SEQ ID NO: 14438 - DNA, 96 bp, Aspergillus novofumigatus
  misc_feature: 109
accttactgtctaccttactgtctaccttactatctaccttactgtctaccttactgcctgactcacttactatcttacttactgcctgtcttgct

SEQ ID NO: 14439 - DNA, 96 bp, Aspergillus novofumigatus
  misc_feature: 109
aacctcttactaaatccctaatcctaacttattcctaatcctaataaattcctaatcctataaattatctcttattctacctaattaacctactct

SEQ ID NO: 14440 - DNA, 96 bp, Aspergillus novofumigatus
  misc_feature: 109
aataatttctattttattcctaacccttattctctctcttattattatcttttattttcttttcttttctattccctttcctcttccctttcctct

SEQ ID NO: 14441 - DNA, 96 bp, Aspergillus novofumigatus
  misc_feature: 109
agaatagtaagggtaaggataagagtaagggtttagtttaggggagagttagggagagatagaaggggagatagagggagagatagaagaaggatt

SEQ ID NO: 14442 - DNA, 96 bp, Aspergillus novofumigatus
  misc_feature: 108
tttcttcttttctttcttattcttctctcttatttatttaattatgaacccttctcctctcttatcttataattaatctaatctcttttaatcctt

SEQ ID NO: 14443 - DNA, 96 bp, Aspergillus novofumigatus
  misc_feature: 108
attaattataagataagagaggagaagggttcataattaaataaataagagagaagaataagaaagaaaagaagaaagagtagagaagagaagaaa

SEQ ID NO: 14444 - DNA, 96 bp, Aspergillus novofumigatus
  misc_feature: 108
ttagtatactctatatcctactatttaggtatttactaaagtctatctctttattataattataagtattattattttatttattactataataaa

SEQ ID NO: 14445 - DNA, 96 bp, Aspergillus novofumigatus
  misc_feature: 108
tagtaagggtaaggataagagtaagggtttagtttaggggagagttagggagagatagaaggggagatagagggagagatagaagaaggattagaa

SEQ ID NO: 14446 - DNA, 96 bp, Aspergillus novofumigatus
  misc_feature: 108
ttcctaattcattctattaaattattatttactttatccttttcttttaatttatctttccttaattttaatttccttcttctctttcttctcttt

SEQ ID NO: 14447 - DNA, 96 bp, Aspergillus novofumigatus
  misc_feature: 108
taggattaggatgagttaggattaggaataagttagggttaggaatgagttaggattaggaatttattaggattaggaatttattaggattaggaa

SEQ ID NO: 14448 - DNA, 96 bp, Aspergillus novofumigatus
  misc_feature: 108
ttagtattacctctctttaatatatatctctactagtctactatataaaatttataaaatatttaattatatagagttttaaaaattctaggctta

SEQ ID NO: 14449 - DNA, 96 bp, Aspergillus novofumigatus
  misc_feature: 108
ttagaataaggtgctagaaagagaattagaataagaattagaataagaattagaataagaattagaataagaattagaataagaattagaataaga

SEQ ID NO: 14450 - DNA, 96 bp, Aspergillus novofumigatus
  misc_feature: 108
ttaattataagataagagaggagaagggttcataattaaataaataagagagaagaataagaaagaaaagaagaaagagtagagaagagaagaaag

SEQ ID NO: 14451 - DNA, 96 bp, Aspergillus novofumigatus
  misc_feature: 108
ataagataagagaggagaagggttcataattaaataaataagagagaagaataagaaagaaaagaagaaagagtagagaagagaagaaaggattaa

SEQ ID NO: 14452 - DNA, 96 bp, Aspergillus novofumigatus
  misc_feature: 108
ttaataatttctattttattcctaacccttattctctctcttattattatcttttattttcttttcttttctattccctttcctcttccctttcct

SEQ ID NO: 14453 - DNA, 96 bp, Aspergillus novofumigatus
  misc_feature: 108
gaatgagttaggattaggaattggttaggattaggaataagttaggattaggaatgagttaggattagggatttagtaagaggttaataggtttaa

SEQ ID NO: 14454 - DNA, 96 bp, Aspergillus novofumigatus
  misc_feature: 108
tggatgctaactaatcttaatctactaatattactacctctcttactacttaccttactattaaccttactatctactatgatatttatattacta

SEQ ID NO: 14455 - DNA, 96 bp, Aspergillus novofumigatus
  misc_feature: 108
agggtaaggataagagtaagggtttagtttaggggagagttagggagagatagaaggggagatagagggagagatagaagaaggattagaagaaga

SEQ ID NO: 14456 - DNA, 96 bp, Aspergillus novofumigatus
  misc_feature: 108
tcttctctttcttcttctctttcttcttctctttcttcttctctttcttcttattcttcttattcttcctctctttcttaccctttacttaaactc

SEQ ID NO: 14457 - DNA, 96 bp, Aspergillus novofumigatus
  misc_feature: 108
tcttctctttcttcttctctttcttcttattcttcttattcttcctctctttcttaccctttacttaaactctttctatcttatctatctttacct

SEQ ID NO: 14458 - DNA, 96 bp, Aspergillus novofumigatus
  misc_feature: 108
tcttctccctttttatctcttctctctatttctctcttaattcttactctatctcttactttacctctttctctatctctctcttctatctacact

SEQ ID NO: 14459 - DNA, 96 bp, Aspergillus novofumigatus
  misc_feature: 108
tcttatttatttaattatgaacccttctcctctcttatcttataattaatctaatctcttttaatccttattctctctatcctaaattctcttgtc

SEQ ID NO: 14460 - DNA, 96 bp, Aspergillus novofumigatus
  misc_feature: 108
gggaataagggattaggcatataagtatataatatactctataggagtagatagattagttaattaaagataggatatatataactactaataaga

SEQ ID NO: 14461 - DNA, 96 bp, Aspergillus novofumigatus
  misc_feature: 108
tcttagtattacctctctttaatatatatctctactagtctactatataaaatttataaaatatttaattatatagagttttaaaaattctaggct

SEQ ID NO: 14462 - DNA, 96 bp, Aspergillus novofumigatus
  misc_feature: 108
tcttaaaatcccttcttttttcttctactatctttctttaatctcttaaaccctttacctctctctactctaaattactaattcttactaataccc

SEQ ID NO: 14463 - DNA, 96 bp, Aspergillus novofumigatus
  misc_feature: 108
tctctcctctatctcttcttaatctcctctcttatcccttctaatctaaatccttacccttactcttattattaccctctctattccttttaatat

SEQ ID NO: 14464 - DNA, 96 bp, Aspergillus novofumigatus
  misc_feature: 108
agggggtatataaattatagctaagattatataatataagcttgctatattaattagtatattattatataactataagctagtgtctaatttaga

SEQ ID NO: 14465 - DNA, 96 bp, Aspergillus novofumigatus
  misc_feature: 108
tagggttaggaatgagttaggattaggaatttattaggattaggaatttattaggattaggaatgagttaggattaggaattggttaggattagga

SEQ ID NO: 14466 - DNA, 96 bp, Aspergillus novofumigatus
  misc_feature: 108
agggttaataagcttaggattagaataagaattataagaagagttaaagatagtaagttaaagattagaatatagattaaaaagagaaagaaaata

SEQ ID NO: 14467 - DNA, 96 bp, Aspergillus novofumigatus
  misc_feature: 108
agtatactctatatcctactatttaggtatttactaaagtctatctctttattataattataagtattattattttatttattactataataaata

SEQ ID NO: 14468 - DNA, 96 bp, Aspergillus novofumigatus
  misc_feature: 108
ggttaggaatgagttaggattaggaatttattaggattaggaatttattaggattaggaatgagttaggattaggaattggttaggattaggaata

SEQ ID NO: 14469 - DNA, 96 bp, Aspergillus novofumigatus
  misc_feature: 108
ctctctcctctatctcttcttaatctcctctcttatcccttctaatctaaatccttacccttactcttattattaccctctctattccttttaata

SEQ ID NO: 14470 - DNA, 96 bp, Aspergillus novofumigatus
  misc_feature: 108
gattagttaattaaagataggatatatataactactaataagaatagagaagatagtaatttaaaagataataataagaattactttatatatata

SEQ ID NO: 14471 - DNA, 96 bp, Aspergillus novofumigatus
  misc_feature: 108
tatatataactactaataagaatagagaagatagtaatttaaaagataataataagaattactttatatatatatatttatatgtaagtatataag

SEQ ID NO: 14472 - DNA, 96 bp, Aspergillus novofumigatus
  misc_feature: 108
aggatatatataactactaataagaatagagaagatagtaatttaaaagataataataagaattactttatatatatatatttatatgtaagtata

SEQ ID NO: 14473 - DNA, 96 bp, Aspergillus novofumigatus
  misc_feature: 108
tataagataagagaggagaagggttcataattaaataaataagagagaagaataagaaagaaaagaagaaagagtagagaagagaagaaaggatta

SEQ ID NO: 14474 - DNA, 96 bp, Aspergillus novofumigatus
  misc_feature: 108
taggaatgagttaggattaggaatttattaggattaggaatttattaggattaggaatgagttaggattaggaattggttaggattaggaataagt

SEQ ID NO: 14475 - DNA, 96 bp, Aspergillus novofumigatus
  misc_feature: 108
tagagtagagagaggtaaagggtttaagagattaaagaaagatagtagaagaaaaaagaagggattttaagagagtagattaagaagagtaggaag

SEQ ID NO: 14476 - DNA, 96 bp, Aspergillus novofumigatus
  misc_feature: 108
cctaactcttattcttattcttatctaaatcctatccctatccctatccctatccctatatgacctgaaacctaatatccctaatagtagttagta

SEQ ID NO: 14477 - DNA, 96 bp, Aspergillus novofumigatus
  misc_feature: 108
aaaggtcagggtggaataaggatatagggaaggataagattagggttaggagtaggattaggataaggataagggttagggtattagtaagaatta

SEQ ID NO: 14478 - DNA, 96 bp, Aspergillus novofumigatus
  misc_feature: 108
attctatctctctcttactccctctctcctctatctcttcttaatctcctctcttatcccttctaatctaaatccttacccttactcttattatta

SEQ ID NO: 14479 - DNA, 96 bp, Aspergillus novofumigatus
  misc_feature: 108
ggaataagttagggttaggaatgagttaggattaggaatttattaggattaggaatttattaggattaggaatgagttaggattaggaattggtta

SEQ ID NO: 14480 - DNA, 96 bp, Aspergillus novofumigatus
  misc_feature: 108
gggtggaataaggatatagggaaggataagattagggttaggagtaggattaggataaggataagggttagggtattagtaagaattagtaattta

SEQ ID NO: 14481 - DNA, 96 bp, Aspergillus novofumigatus
  misc_feature: 108
cttctttttttaatctatctctaaatcctcttcttcctactcttcttaatctactctcttaaaatcccttcttttttcttctactatctttcttta

SEQ ID NO: 14482 - DNA, 96 bp, Aspergillus novofumigatus
  misc_feature: 108
gggggtatataaattatagctaagattatataatataagcttgctatattaattagtatattattatataactataagctagtgtctaatttagac

SEQ ID NO: 14483 - DNA, 96 bp, Aspergillus novofumigatus
  misc_feature: 108
atctactctcttaaaatcccttcttttttcttctactatctttctttaatctcttaaaccctttacctctctctactctaaattactaattcttac

SEQ ID NO: 14484 - DNA, 96 bp, Aspergillus novofumigatus
  misc_feature: 108
gggttaataagcttaggattagaataagaattataagaagagttaaagatagtaagttaaagattagaatatagattaaaaagagaaagaaaatat

SEQ ID NO: 14485 - DNA, 96 bp, Aspergillus novofumigatus
  misc_feature: 108
acgaccggttccctcggatctccaccctccatgggaccacgccagttggcggtccgagatggccgggcgcgcgccctgaccggcagcaggggcccc

SEQ ID NO: 14486 - DNA, 96 bp, Aspergillus novofumigatus
  misc_feature: 108
ggattaggcatataagtatataatatactctataggagtagatagattagttaattaaagataggatatatataactactaataagaatagagaag

SEQ ID NO: 14487 - DNA, 96 bp, Aspergillus novofumigatus
  misc_feature: 108
ggatgctaactaatcttaatctactaatattactacctctcttactacttaccttactattaaccttactatctactatgatatttatattactat

SEQ ID NO: 14488 - DNA, 96 bp, Aspergillus novofumigatus
  misc_feature: 108
gattaggaataagttagggttaggaatgagttaggattaggaatttattaggattaggaatttattaggattaggaatgagttaggattaggaatt

SEQ ID NO: 14489 - DNA, 96 bp, Aspergillus novofumigatus
  misc_feature: 108
gattagattaattataagataagagaggagaagggttcataattaaataaataagagagaagaataagaaagaaaagaagaaagagtagagaagag

SEQ ID NO: 14490 - DNA, 96 bp, Aspergillus novofumigatus
  misc_feature: 108
atatctgactcttctttcttttcttttctttcttcttttctctttcttttctatctattatcttcttactatctaacccttactccatccttaatc

SEQ ID NO: 14491 - DNA, 96 bp, Aspergillus novofumigatus
  misc_feature: 108
attctaattcttattctaattcttattctaattcttattctaattcttattctaattcttattctaattcttattctaattcttattctaattctc

SEQ ID NO: 14492 - DNA, 96 bp, Aspergillus novofumigatus
  misc_feature: 108
gaataagttagggttaggaatgagttaggattaggaatttattaggattaggaatttattaggattaggaatgagttaggattaggaattggttag

SEQ ID NO: 14493 - DNA, 96 bp, Aspergillus novofumigatus
  misc_feature: 108
ctattttattcctaacccttattctctctcttattattatcttttattttcttttcttttctattccctttcctcttccctttcctcttccctttc

SEQ ID NO: 14494 - DNA, 96 bp, Aspergillus novofumigatus
  misc_feature: 108
ctctttcttcttctctttcttcttctctttcttcttctctttcttcttattcttcttattcttcctctctttcttaccctttacttaaactctttc

SEQ ID NO: 14495 - DNA, 96 bp, Aspergillus novofumigatus
  misc_feature: 108
aagataagagaggagaagggttcataattaaataaataagagagaagaataagaaagaaaagaagaaagagtagagaagagaagaaaggattaaag

SEQ ID NO: 14496 - DNA, 96 bp, Aspergillus novofumigatus
  misc_feature: 108
cttctttccttttttaatcttctctcttattctattaaaaatatacccttcttctctcttatattataattaatctactctctttttatccttatt

SEQ ID NO: 14497 - DNA, 96 bp, Aspergillus novofumigatus
  misc_feature: 108
attagaataagaattataagaagagttaaagatagtaagttaaagattagaatatagattaaaaagagaaagaaaatatagataaatagatagaag

SEQ ID NO: 14498 - DNA, 96 bp, Aspergillus novofumigatus
  misc_feature: 108
attagaataaggtgctagaaagagaattagaataagaattagaataagaattagaataagaattagaataagaattagaataagaattagaataag

SEQ ID NO: 14499 - DNA, 96 bp, Aspergillus novofumigatus
  misc_feature: 108
agggaataagggattaggcatataagtatataatatactctataggagtagatagattagttaattaaagataggatatatataactactaataag

SEQ ID NO: 14500 - DNA, 96 bp, Aspergillus novofumigatus
  misc_feature: 108
ctactagtctactatataaaatttataaaatatttaattatatagagttttaaaaattctaggcttattattactaagtatactatatattattag

SEQ ID NO: 14501 - DNA, 96 bp, Aspergillus novofumigatus
  misc_feature: 108
ataaggtgctagaaagagaattagaataagaattagaataagaattagaataagaattagaataagaattagaataagaattagaataagaattag

SEQ ID NO: 14502 - DNA, 96 bp, Aspergillus novofumigatus
  misc_feature: 108
aagggggtatataaattatagctaagattatataatataagcttgctatattaattagtatattattatataactataagctagtgtctaatttag

SEQ ID NO: 14503 - DNA, 96 bp, Aspergillus novofumigatus
  misc_feature: 108
ccctaacccttatccttatcctaatcctactcctaaccctaatcttatccttccctatatccttattccaccctgacctttcttcttcttcttttt

SEQ ID NO: 14504 - DNA, 96 bp, Aspergillus novofumigatus
  misc_feature: 108
actgtctaccttactgtctaccttactgtctaccttactatctaccttactgtctaccttactgcctgactcacttactatcttacttactgcctg

SEQ ID NO: 14505 - DNA, 96 bp, Aspergillus novofumigatus
  misc_feature: 108
attaggaataagttagggttaggaatgagttaggattaggaatttattaggattaggaatttattaggattaggaatgagttaggattaggaattg

SEQ ID NO: 14506 - DNA, 96 bp, Aspergillus novofumigatus
  misc_feature: 108
attagttaattaaagataggatatatataactactaataagaatagagaagatagtaatttaaaagataataataagaattactttatatatatat

SEQ ID NO: 14507 - DNA, 96 bp, Aspergillus novofumigatus
  misc_feature: 108
atcaggcaatgcttaatggaagacattaaattaggatattaaattattaatacaatattttttccttattaatacaatattaatttacttattaat

SEQ ID NO: 14508 - DNA, 96 bp, Aspergillus novofumigatus
  misc_feature: 108
aaagaaagaagagatagatatagaaaaaagaataattagaattttagtaagagattagataagggatagagtaagggttagtataattaagaatat

SEQ ID NO: 14509 - DNA, 96 bp, Aspergillus novofumigatus
  misc_feature: 107
tttttcttctccctttttatctcttctctctatttctctcttaattcttactctatctcttactttacctctttctctatctctctcttctatcta

SEQ ID NO: 14510 - DNA, 96 bp, Aspergillus novofumigatus
  misc_feature: 107
tactagatctcttagtattacctctctttaatatatatctctactagtctactatataaaatttataaaatatttaattatatagagttttaaaaa

SEQ ID NO: 14511 - DNA, 96 bp, Aspergillus novofumigatus
  misc_feature: 107
ttttcttctccctttttatctcttctctctatttctctcttaattcttactctatctcttactttacctctttctctatctctctcttctatctac

SEQ ID NO: 14512 - DNA, 96 bp, Aspergillus novofumigatus
  misc_feature: 107
tttcttctccctttttatctcttctctctatttctctcttaattcttactctatctcttactttacctctttctctatctctctcttctatctaca

SEQ ID NO: 14513 - DNA, 96 bp, Aspergillus novofumigatus
  misc_feature: 107
tttattcctaacccttattctctctcttattattatcttttattttcttttcttttctattccctttcctcttccctttcctcttccctttcttct

SEQ ID NO: 14514 - DNA, 96 bp, Aspergillus novofumigatus
  misc_feature: 107
taagataagagaggagaagggttcataattaaataaataagagagaagaataagaaagaaaagaagaaagagtagagaagagaagaaaggattaaa

SEQ ID NO: 14515 - DNA, 96 bp, Aspergillus novofumigatus
  misc_feature: 107
tcttctctctttctaccctttctaactccctctcttctttttttaatctatctctaaatcctcttcttcctactcttcttaatctactctcttaaa

SEQ ID NO: 14516 - DNA, 96 bp, Aspergillus novofumigatus
  misc_feature: 107
gattaattataagataagagaggagaagggttcataattaaataaataagagagaagaataagaaagaaaagaagaaagagtagagaagagaagaa

SEQ ID NO: 14517 - DNA, 96 bp, Aspergillus novofumigatus
  misc_feature: 107
ggaataagggattaggcatataagtatataatatactctataggagtagatagattagttaattaaagataggatatatataactactaataagaa

SEQ ID NO: 14518 - DNA, 96 bp, Aspergillus novofumigatus
  misc_feature: 107
ttctaccctttctaactccctctcttctttttttaatctatctctaaatcctcttcttcctactcttcttaatctactctcttaaaatcccttctt

SEQ ID NO: 14519 - DNA, 96 bp, Aspergillus novofumigatus
  misc_feature: 107
ttctaattcttattctaattcttattctaattcttattctaattcttattctaattcttattctaattcttattctaattcttattctaattctct

SEQ ID NO: 14520 - DNA, 96 bp, Aspergillus novofumigatus
  misc_feature: 107
ttatttatttaattatgaacccttctcctctcttatcttataattaatctaatctcttttaatccttattctctctatcctaaattctcttgtctt

SEQ ID NO: 14521 - DNA, 96 bp, Aspergillus novofumigatus
  misc_feature: 107
gttaggaatgagttaggattaggaatttattaggattaggaatttattaggattaggaatgagttaggattaggaattggttaggattaggaataa

SEQ ID NO: 14522 - DNA, 96 bp, Aspergillus novofumigatus
  misc_feature: 107
agtaagggtttagtttaggggagagttagggagagatagaaggggagatagagggagagatagaagaaggattagaagaagagtaaggaataataa

SEQ ID NO: 14523 - DNA, 96 bp, Aspergillus novofumigatus
  misc_feature: 107
cttagtatactctatatcctactatttaggtatttactaaagtctatctctttattataattataagtattattattttatttattactataataa

SEQ ID NO: 14524 - DNA, 96 bp, Aspergillus novofumigatus
  misc_feature: 107
ttatgaacccttctcctctcttatcttataattaatctaatctcttttaatccttattctctctatcctaaattctcttgtcttctattattaatg

SEQ ID NO: 14525 - DNA, 96 bp, Aspergillus novofumigatus
  misc_feature: 107
ttaggattaggaatttattaggattaggaatttattaggattaggaatgagttaggattaggaattggttaggattaggaataagttaggattagg

SEQ ID NO: 14526 - DNA, 96 bp, Aspergillus novofumigatus
  misc_feature: 107
ttagaataagaattataagaagagttaaagatagtaagttaaagattagaatatagattaaaaagagaaagaaaatatagataaatagatagaaga

SEQ ID NO: 14527 - DNA, 96 bp, Aspergillus novofumigatus
  misc_feature: 107
aagataggatatatataactactaataagaatagagaagatagtaatttaaaagataataataagaattactttatatatatatatttatatgtaa

SEQ ID NO: 14528 - DNA, 96 bp, Aspergillus novofumigatus
  misc_feature: 107
atcttctctctttctaccctttctaactccctctcttctttttttaatctatctctaaatcctcttcttcctactcttcttaatctactctcttaa

SEQ ID NO: 14529 - DNA, 96 bp, Aspergillus novofumigatus
  misc_feature: 107
aagggttcgtaagtttagagaagggaaaagagtatataagttaatttagaaagaaaagaatagaaggtaaagatagataagatagaaagagtttaa

SEQ ID NO: 14530 - DNA, 96 bp, Aspergillus novofumigatus
  misc_feature: 107
tattatataatattattcttatttttcttatagtaaattaattactatactatatttacctagtatatttatatctactaataagttagcttttaa

SEQ ID NO: 14531 - DNA, 96 bp, Aspergillus novofumigatus
  misc_feature: 107
tgactcttctttcttttcttttctttcttcttttctctttcttttctatctattatcttcttactatctaacccttactccatccttaatctttcc

SEQ ID NO: 14532 - DNA, 96 bp, Aspergillus novofumigatus
  misc_feature: 107
tcttttttctatatctgactcttctttcttttcttttctttcttcttttctctttcttttctatctattatcttcttactatctaacccttactcc

SEQ ID NO: 14533 - DNA, 96 bp, Aspergillus novofumigatus
  misc_feature: 107
tctttcttcttctctttcttcttattcttcttattcttcctctctttcttaccctttacttaaactctttctatcttatctatctttaccttctat

SEQ ID NO: 14534 - DNA, 96 bp, Aspergillus novofumigatus
  misc_feature: 107
tctttcttattcttctctcttatttatttaattatgaacccttctcctctcttatcttataattaatctaatctcttttaatccttattctctcta

SEQ ID NO: 14535 - DNA, 96 bp, Aspergillus novofumigatus
  misc_feature: 107
aggaagggttaataagagtagagatagatagatataggaaaataaggatttagaaggatttaggaagagagaggatttagaatgaagatagaaaga

SEQ ID NO: 14536 - DNA, 96 bp, Aspergillus novofumigatus
  misc_feature: 107
tcttctttccttttttaatcttctctcttattctattaaaaatatacccttcttctctcttatattataattaatctactctctttttatccttat

SEQ ID NO: 14537 - DNA, 96 bp, Aspergillus novofumigatus
  misc_feature: 107
gattaggcatataagtatataatatactctataggagtagatagattagttaattaaagataggatatatataactactaataagaatagagaaga

SEQ ID NO: 14538 - DNA, 96 bp, Aspergillus novofumigatus
  misc_feature: 107
agattagattaattataagataagagaggagaagggttcataattaaataaataagagagaagaataagaaagaaaagaagaaagagtagagaaga

SEQ ID NO: 14539 - DNA, 96 bp, Aspergillus novofumigatus
  misc_feature: 107
gtaagggtaaggataagagtaagggtttagtttaggggagagttagggagagatagaaggggagatagagggagagatagaagaaggattagaaga

SEQ ID NO: 14540 - DNA, 96 bp, Aspergillus novofumigatus
  misc_feature: 107
tctgactcttctttcttttcttttctttcttcttttctctttcttttctatctattatcttcttactatctaacccttactccatccttaatcttt

SEQ ID NO: 14541 - DNA, 96 bp, Aspergillus novofumigatus
  misc_feature: 107
tctctttcttcttctctttcttcttctctttcttcttctctttcttcttattcttcttattcttcctctctttcttaccctttacttaaactcttt

SEQ ID NO: 14542 - DNA, 96 bp, Aspergillus novofumigatus
  misc_feature: 107
tctcttatttatttaattatgaacccttctcctctcttatcttataattaatctaatctcttttaatccttattctctctatcctaaattctcttg

SEQ ID NO: 14543 - DNA, 96 bp, Aspergillus novofumigatus
  misc_feature: 107
tctctcttatttatttaattatgaacccttctcctctcttatcttataattaatctaatctcttttaatccttattctctctatcctaaattctct

SEQ ID NO: 14544 - DNA, 96 bp, Aspergillus novofumigatus
  misc_feature: 107
agagtatgttggctgaatctgtggtttatatgcaggcatatatatataaataagacatcagagaatacatataatattaaccacattcaggagaga

SEQ ID NO: 14545 - DNA, 96 bp, Aspergillus novofumigatus
  misc_feature: 107
tctctactctttcttcttttctttcttattcttctctcttatttatttaattatgaacccttctcctctcttatcttataattaatctaatctctt

SEQ ID NO: 14546 - DNA, 96 bp, Aspergillus novofumigatus
  misc_feature: 107
tctccctttttttacttcttatatatcttatattcttcttctaatctacttattaaatcctaactttaatcctttcttctcttctctactctttct

SEQ ID NO: 14547 - DNA, 96 bp, Aspergillus novofumigatus
  misc_feature: 107
tctattcttaactctctctttctctttcttctcctttctatccctaactcttattctaacccttcttctatctcttcctctaatcctccttctaat

SEQ ID NO: 14548 - DNA, 96 bp, Aspergillus novofumigatus
  misc_feature: 107
tctattacttaatatatggatgctaactaatcttaatctactaatattactacctctcttactacttaccttactattaaccttactatctactat

SEQ ID NO: 14549 - DNA, 96 bp, Aspergillus novofumigatus
  misc_feature: 107
tctaacccttaccttaatatattaataatttctattttattcctaacccttattctctctcttattattatcttttattttcttttcttttctatt

SEQ ID NO: 14550 - DNA, 96 bp, Aspergillus novofumigatus
  misc_feature: 107
ataagttagggttaggaatgagttaggattaggaatttattaggattaggaatttattaggattaggaatgagttaggattaggaattggttagga

SEQ ID NO: 14551 - DNA, 96 bp, Aspergillus novofumigatus
  misc_feature: 107
tccctttttttacttcttatatatcttatattcttcttctaatctacttattaaatcctaactttaatcctttcttctcttctctactctttcttc

SEQ ID NO: 14552 - DNA, 96 bp, Aspergillus novofumigatus
  misc_feature: 107
tatttatttaattatgaacccttctcctctcttatcttataattaatctaatctcttttaatccttattctctctatcctaaattctcttgtcttc

SEQ ID NO: 14553 - DNA, 96 bp, Aspergillus novofumigatus
  misc_feature: 107
tattaataatttctattttattcctaacccttattctctctcttattattatcttttattttcttttcttttctattccctttcctcttccctttc

SEQ ID NO: 14554 - DNA, 96 bp, Aspergillus novofumigatus
  misc_feature: 107
agaagggttcataattaaataaataagagagaagaataagaaagaaaagaagaaagagtagagaagagaagaaaggattaaagttaggatttaata

SEQ ID NO: 14555 - DNA, 96 bp, Aspergillus novofumigatus
  misc_feature: 107
tatgttggctgaatctgtggtttatatgcaggcatatatatataaataagacatcagagaatacatataatattaaccacattcaggagagaagta

SEQ ID NO: 14556 - DNA, 96 bp, Aspergillus novofumigatus
  misc_feature: 107
aagaaagaagagatagatatagaaaaaagaataattagaattttagtaagagattagataagggatagagtaagggttagtataattaagaatata

SEQ ID NO: 14557 - DNA, 96 bp, Aspergillus novofumigatus
  misc_feature: 107
tagattagttaattaaagataggatatatataactactaataagaatagagaagatagtaatttaaaagataataataagaattactttatatata

SEQ ID NO: 14558 - DNA, 96 bp, Aspergillus novofumigatus
  misc_feature: 107
ctagattaaaagctaacttattagtagatataaatatactaggtaaatatagtatagtaattaatttactataagaaaaataagaataatattata

SEQ ID NO: 14559 - DNA, 96 bp, Aspergillus novofumigatus
  misc_feature: 107
agttaattcttaatatttttaaatagtttaaaatactttataattctaattagctaaattattatattctaatattaaatccttaattattcacta

SEQ ID NO: 14560 - DNA, 96 bp, Aspergillus novofumigatus
  misc_feature: 107
tagtctactatataaaatttataaaatatttaattatatagagttttaaaaattctaggcttattattactaagtatactatatattattagatta

SEQ ID NO: 14561 - DNA, 96 bp, Aspergillus novofumigatus
  misc_feature: 107
ctactctcttaaaatcccttcttttttcttctactatctttctttaatctcttaaaccctttacctctctctactctaaattactaattcttacta

SEQ ID NO: 14562 - DNA, 96 bp, Aspergillus novofumigatus
  misc_feature: 107
atctaatctcttactaaaattctaattattcttttttctatatctatctcttctttcttttcttttctttcttctttcctctttcttttctatcta

SEQ ID NO: 14563 - DNA, 96 bp, Aspergillus novofumigatus
  misc_feature: 107
tagaatagtaagggtaaggataagagtaagggtttagtttaggggagagttagggagagatagaaggggagatagagggagagatagaagaaggat

SEQ ID NO: 14564 - DNA, 96 bp, Aspergillus novofumigatus
  misc_feature: 107
tacttagtatactctatatcctactatttaggtatttactaaagtctatctctttattataattataagtattattattttatttattactataat

SEQ ID NO: 14565 - DNA, 96 bp, Aspergillus novofumigatus
  misc_feature: 107
taagactaatatatatattaagatttataatatttactagaaacttaatctttataattattataagcttatcctctatagctattatactaagta

SEQ ID NO: 14566 - DNA, 96 bp, Aspergillus novofumigatus
  misc_feature: 107
taccttactgtctaccttactgtctaccttactatctaccttactgtctaccttactgcctgactcacttactatcttacttactgcctgtcttgc

SEQ ID NO: 14567 - DNA, 96 bp, Aspergillus novofumigatus
  misc_feature: 107
aaagataggatatatataactactaataagaatagagaagatagtaatttaaaagataataataagaattactttatatatatatatttatatgta

SEQ ID NO: 14568 - DNA, 96 bp, Aspergillus novofumigatus
  misc_feature: 107
taataatttctattttattcctaacccttattctctctcttattattatcttttattttcttttcttttctattccctttcctcttccctttcctc

SEQ ID NO: 14569 - DNA, 96 bp, Aspergillus novofumigatus
  misc_feature: 107
aatcttaatctactaatattactacctctcttactacttaccttactattaaccttactatctactatgatatttatattactatctaccttatta

SEQ ID NO: 14570 - DNA, 96 bp, Aspergillus novofumigatus
  misc_feature: 107
taagagaggagaagggttcataattaaataaataagagagaagaataagaaagaaaagaagaaagagtagagaagagaagaaaggattaaagttag

SEQ ID NO: 14571 - DNA, 96 bp, Aspergillus novofumigatus
  misc_feature: 107
taaattagacactagcttatagttatataataatatactaattaatatagcaagcttatattatataatcttagctataatttatatacccccttt

SEQ ID NO: 14572 - DNA, 96 bp, Aspergillus novofumigatus
  misc_feature: 107
gttaattcttaatatttttaaatagtttaaaatactttataattctaattagctaaattattatattctaatattaaatccttaattattcactag

SEQ ID NO: 14573 - DNA, 96 bp, Aspergillus novofumigatus
  misc_feature: 107
gttaagagttagaataagaattaaaaaaagagtcagaaggagagttaaagataataagttaagaattagaatatagattaaaaagagaaagaaaag

SEQ ID NO: 14574 - DNA, 96 bp, Aspergillus novofumigatus
  misc_feature: 107
gggtaaggataagagtaagggtttagtttaggggagagttagggagagatagaaggggagatagagggagagatagaagaaggattagaagaagag

SEQ ID NO: 14575 - DNA, 96 bp, Aspergillus novofumigatus
  misc_feature: 107
ctcttattcttattcttatctaaatcctatccctatccctatccctatccctatatgacctgaaacctaatatccctaatagtagttagtagttcc

SEQ ID NO: 14576 - DNA, 96 bp, Aspergillus novofumigatus
  misc_feature: 107
gatgagttaggattaggaataagttagggttaggaatgagttaggattaggaatttattaggattaggaatttattaggattaggaatgagttagg

SEQ ID NO: 14577 - DNA, 96 bp, Aspergillus novofumigatus
  misc_feature: 107
cttctctactctttcttcttttctttcttattcttctctcttatttatttaattatgaacccttctcctctcttatcttataattaatctaatctc

SEQ ID NO: 14578 - DNA, 96 bp, Aspergillus novofumigatus
  misc_feature: 107
ctttccttttttaatcttctctcttattctattaaaaatatacccttcttctctcttatattataattaatctactctctttttatccttattctc

SEQ ID NO: 14579 - DNA, 96 bp, Aspergillus novofumigatus
  misc_feature: 107
gaatttattaggattaggaatttattaggattaggaatgagttaggattaggaattggttaggattaggaataagttaggattaggaatgagttag

SEQ ID NO: 14580 - DNA, 96 bp, Aspergillus novofumigatus
  misc_feature: 107
cttaatctactctcttaaaatcccttcttttttcttctactatctttctttaatctcttaaaccctttacctctctctactctaaattactaattc

SEQ ID NO: 14581 - DNA, 96 bp, Aspergillus novofumigatus
  misc_feature: 107
gaatgagttaggattaggaatttattaggattaggaatttattaggattaggaatgagttaggattaggaattggttaggattaggaataagttag

SEQ ID NO: 14582 - DNA, 96 bp, Aspergillus novofumigatus
  misc_feature: 107
gaataaggtgctagaaagagaattagaataagaattagaataagaattagaataagaattagaataagaattagaataagaattagaataagaatt

SEQ ID NO: 14583 - DNA, 96 bp, Aspergillus novofumigatus
  misc_feature: 107
aagggtaaggataagagtaagggtttagtttaggggagagttagggagagatagaaggggagatagagggagagatagaagaaggattagaagaag

SEQ ID NO: 14584 - DNA, 96 bp, Aspergillus novofumigatus
  misc_feature: 107
cttatttatttaattatgaacccttctcctctcttatcttataattaatctaatctcttttaatccttattctctctatcctaaattctcttgtct

SEQ ID NO: 14585 - DNA, 96 bp, Aspergillus novofumigatus
  misc_feature: 107
cttatccttatcctaatcctactcctaaccctaatcttatccttccctatatccttattccaccctgacctttcttcttcttcttttttctatttt

SEQ ID NO: 14586 - DNA, 96 bp, Aspergillus novofumigatus
  misc_feature: 107
agggttcgtaagtttagagaagggaaaagagtatataagttaatttagaaagaaaagaatagaaggtaaagatagataagatagaaagagtttaag

SEQ ID NO: 14587 - DNA, 96 bp, Aspergillus novofumigatus
  misc_feature: 107
ctcttcttaaactatatctctctttttaaattatctccctttctactcttattactccttcttctctcctcttaatctatccctaaattctctttt

SEQ ID NO: 14588 - DNA, 96 bp, Aspergillus novofumigatus
  misc_feature: 107
ctccctttttttacttcttatatatcttatattcttcttctaatctacttattaaatcctaactttaatcctttcttctcttctctactctttctt

SEQ ID NO: 14589 - DNA, 96 bp, Aspergillus novofumigatus
  misc_feature: 107
ctattacttaatatatggatgctaactaatcttaatctactaatattactacctctcttactacttaccttactattaaccttactatctactatg

SEQ ID NO: 14590 - DNA, 96 bp, Aspergillus novofumigatus
  misc_feature: 107
ctattaacctcttactaaatccctaatcctaacttattcctaatcctaataaattcctaatcctataaattatctcttattctacctaattaacct

SEQ ID NO: 14591 - DNA, 96 bp, Aspergillus novofumigatus
  misc_feature: 107
aatagtaagggtaaggataagagtaagggtttagtttaggggagagttagggagagatagaaggggagatagagggagagatagaagaaggattag

SEQ ID NO: 14592 - DNA, 96 bp, Aspergillus novofumigatus
  misc_feature: 107
aatgagttaggattaggaatttattaggattaggaatttattaggattaggaatgagttaggattaggaattggttaggattaggaataagttagg

SEQ ID NO: 14593 - DNA, 96 bp, Aspergillus novofumigatus
  misc_feature: 107
aatttattaggattaggaatttattaggattaggaatgagttaggattaggaattggttaggattaggaataagttaggattaggaatgagttagg

SEQ ID NO: 14594 - DNA, 96 bp, Aspergillus novofumigatus
  misc_feature: 107
cccttatccttatcctaatcctactcctaaccctaatcttatccttccctatatccttattccaccctgacctttcttcttcttcttttttctatt

SEQ ID NO: 14595 - DNA, 96 bp, Aspergillus novofumigatus
  misc_feature: 107
actagatctcttagtattacctctctttaatatatatctctactagtctactatataaaatttataaaatatttaattatatagagttttaaaaat

SEQ ID NO: 14596 - DNA, 96 bp, Aspergillus novofumigatus
  misc_feature: 107
agaataaggtgctagaaagagaattagaataagaattagaataagaattagaataagaattagaataagaattagaataagaattagaataagaat

SEQ ID NO: 14597 - DNA, 96 bp, Aspergillus novofumigatus
  misc_feature: 107
attcctaacccttattctctctcttattattatcttttattttcttttcttttctattccctttcctcttccctttcctcttccctttcttctcct

SEQ ID NO: 14598 - DNA, 96 bp, Aspergillus novofumigatus
  misc_feature: 107
attataagataagagaggagaagggttcataattaaataaataagagagaagaataagaaagaaaagaagaaagagtagagaagagaagaaaggat

SEQ ID NO: 14599 - DNA, 96 bp, Aspergillus novofumigatus
  misc_feature: 107
actctcttaaaatcccttcttttttcttctactatctttctttaatctcttaaaccctttacctctctctactctaaattactaattcttactaat

SEQ ID NO: 14600 - DNA, 96 bp, Aspergillus novofumigatus
  misc_feature: 107
agactaatatatatattaagatttataatatttactagaaacttaatctttataattattataagcttatcctctatagctattatactaagtaat

SEQ ID NO: 14601 - DNA, 96 bp, Aspergillus novofumigatus
  misc_feature: 107
atctgactcttctttcttttcttttctttcttcttttctctttcttttctatctattatcttcttactatctaacccttactccatccttaatctt

SEQ ID NO: 14602 - DNA, 96 bp, Aspergillus novofumigatus
  misc_feature: 107
atattaataatttctattttattcctaacccttattctctctcttattattatcttttattttcttttcttttctattccctttcctcttcccttt

SEQ ID NO: 14603 - DNA, 96 bp, Aspergillus novofumigatus
  misc_feature: 107
aggtcagggtggaataaggatatagggaaggataagattagggttaggagtaggattaggataaggataagggttagggtattagtaagaattagt

SEQ ID NO: 14604 - DNA, 96 bp, Aspergillus novofumigatus
  misc_feature: 107
aggaatgagttaggattaggaatttattaggattaggaatttattaggattaggaatgagttaggattaggaattggttaggattaggaataagtt

SEQ ID NO: 14605 - DNA, 96 bp, Aspergillus novofumigatus
  misc_feature: 107
actatctctttttttctaatcttctctctttctaccctttctaactccctctcttctttttttaatctatctctaaatcctcttcttcctactctt

SEQ ID NO: 14606 - DNA, 96 bp, Aspergillus novofumigatus
  misc_feature: 106
ttttttcttctccctttttatctcttctctctatttctctcttaattcttactctatctcttactttacctctttctctatctctctcttctatct

SEQ ID NO: 14607 - DNA, 96 bp, Aspergillus novofumigatus
  misc_feature: 106
ttttattcctaacccttattctctctcttattattatcttttattttcttttcttttctattccctttcctcttccctttcctcttccctttcttc

SEQ ID NO: 14608 - DNA, 96 bp, Aspergillus novofumigatus
  misc_feature: 106
tttccttttttaatcttctctcttattctattaaaaatatacccttcttctctcttatattataattaatctactctctttttatccttattctct

SEQ ID NO: 14609 - DNA, 96 bp, Aspergillus novofumigatus
  misc_feature: 106
ttcttctttccttttttaatcttctctcttattctattaaaaatatacccttcttctctcttatattataattaatctactctctttttatcctta

SEQ ID NO: 14610 - DNA, 96 bp, Aspergillus novofumigatus
  misc_feature: 106
tagaataaggtgctagaaagagaattagaataagaattagaataagaattagaataagaattagaataagaattagaataagaattagaataagaa

SEQ ID NO: 14611 - DNA, 96 bp, Aspergillus novofumigatus
  misc_feature: 106
agaaaagaaagaagagatagatatagaaaaaagaataattagaattttagtaagagattagataagggatagagtaagggttagtataattaagaa

SEQ ID NO: 14612 - DNA, 96 bp, Aspergillus novofumigatus
  misc_feature: 106
ttctctttcttcttctctttcttcttctctttcttcttctctttcttcttattcttcttattcttcctctctttcttaccctttacttaaactctt

SEQ ID NO: 14613 - DNA, 96 bp, Aspergillus novofumigatus
  misc_feature: 106
ttctccctttttttacttcttatatatcttatattcttcttctaatctacttattaaatcctaactttaatcctttcttctcttctctactctttc

SEQ ID NO: 14614 - DNA, 96 bp, Aspergillus novofumigatus
  misc_feature: 106
gataagagtaagggtttagtttaggggagagttagggagagatagaaggggagatagagggagagatagaagaaggattagaagaagagtaaggaa

SEQ ID NO: 14615 - DNA, 96 bp, Aspergillus novofumigatus
  misc_feature: 106
aattagaataaggtgctagaaagagaattagaataagaattagaataagaattagaataagaattagaataagaattagaataagaattagaataa

SEQ ID NO: 14616 - DNA, 96 bp, Aspergillus novofumigatus
  misc_feature: 106
ttattatataatattattcttatttttcttatagtaaattaattactatactatatttacctagtatatttatatctactaataagttagctttta

SEQ ID NO: 14617 - DNA, 96 bp, Aspergillus novofumigatus
  misc_feature: 106
gaagggttcataattaaataaataagagagaagaataagaaagaaaagaagaaagagtagagaagagaagaaaggattaaagttaggatttaataa

SEQ ID NO: 14618 - DNA, 96 bp, Aspergillus novofumigatus
  misc_feature: 106
atacttagtatactctatatcctactatttaggtatttactaaagtctatctctttattataattataagtattattattttatttattactataa

SEQ ID NO: 14619 - DNA, 96 bp, Aspergillus novofumigatus
  misc_feature: 106
ttagggttaggaatgagttaggattaggaatttattaggattaggaatttattaggattaggaatgagttaggattaggaattggttaggattagg

SEQ ID NO: 14620 - DNA, 96 bp, Aspergillus novofumigatus
  misc_feature: 106
ggagaagggttcataattaaataaataagagagaagaataagaaagaaaagaagaaagagtagagaagagaagaaaggattaaagttaggatttaa

SEQ ID NO: 14621 - DNA, 96 bp, Aspergillus novofumigatus
  misc_feature: 106
ccctctctcctctatctcttcttaatctcctctcttatcccttctaatctaaatccttacccttactcttattattaccctctctattccttttaa

SEQ ID NO: 14622 - DNA, 96 bp, Aspergillus novofumigatus
  misc_feature: 106
tctttccttttttaatcttctctcttattctattaaaaatatacccttcttctctcttatattataattaatctactctctttttatccttattct

SEQ ID NO: 14623 - DNA, 96 bp, Aspergillus novofumigatus
  misc_feature: 106
tcttctttttttaatctatctctaaatcctcttcttcctactcttcttaatctactctcttaaaatcccttcttttttcttctactatctttcttt

SEQ ID NO: 14624 - DNA, 96 bp, Aspergillus novofumigatus
  misc_feature: 106
tctcttaaaatcccttcttttttcttctactatctttctttaatctcttaaaccctttacctctctctactctaaattactaattcttactaatac

SEQ ID NO: 14625 - DNA, 96 bp, Aspergillus novofumigatus
  misc_feature: 106
tctattctataagactaatatatatattaagatttataatatttactagaaacttaatctttataattattataagcttatcctctatagctatta

SEQ ID NO: 14626 - DNA, 96 bp, Aspergillus novofumigatus
  misc_feature: 106
atagtaagggtaaggataagagtaagggtttagtttaggggagagttagggagagatagaaggggagatagagggagagatagaagaaggattaga

SEQ ID NO: 14627 - DNA, 96 bp, Aspergillus novofumigatus
  misc_feature: 106
tactagtctactatataaaatttataaaatatttaattatatagagttttaaaaattctaggcttattattactaagtatactatatattattaga

SEQ ID NO: 14628 - DNA, 96 bp, Aspergillus novofumigatus
  misc_feature: 106
atgagttaggattaggaatttattaggattaggaatttattaggattaggaatgagttaggattaggaattggttaggattaggaataagttagga

SEQ ID NO: 14629 - DNA, 96 bp, Aspergillus novofumigatus
  misc_feature: 106
atttattaggattaggaatttattaggattaggaatgagttaggattaggaattggttaggattaggaataagttaggattaggaatgagttagga

SEQ ID NO: 14630 - DNA, 96 bp, Aspergillus novofumigatus
  misc_feature: 106
tcagggtggaataaggatatagggaaggataagattagggttaggagtaggattaggataaggataagggttagggtattagtaagaattagtaat

SEQ ID NO: 14631 - DNA, 96 bp, Aspergillus novofumigatus
  misc_feature: 106
acttagtatactctatatcctactatttaggtatttactaaagtctatctctttattataattataagtattattattttatttattactataata

SEQ ID NO: 14632 - DNA, 96 bp, Aspergillus novofumigatus
  misc_feature: 106
gactaatatatatattaagatttataatatttactagaaacttaatctttataattattataagcttatcctctatagctattatactaagtaata

SEQ ID NO: 14633 - DNA, 96 bp, Aspergillus novofumigatus
  misc_feature: 106
tattaacttaattttaaatccctcactcttaaactcttacttatattaatctctatctataattctttctctttcttctctttctctctttctttc

SEQ ID NO: 14634 - DNA, 96 bp, Aspergillus novofumigatus
  misc_feature: 106
tatctgactcttctttcttttcttttctttcttcttttctctttcttttctatctattatcttcttactatctaacccttactccatccttaatct

SEQ ID NO: 14635 - DNA, 96 bp, Aspergillus novofumigatus
  misc_feature: 106
tatctattacttaatatatggatgctaactaatcttaatctactaatattactacctctcttactacttaccttactattaaccttactatctact

SEQ ID NO: 14636 - DNA, 96 bp, Aspergillus novofumigatus
  misc_feature: 106
tatatctattacttaatatatggatgctaactaatcttaatctactaatattactacctctcttactacttaccttactattaaccttactatcta

SEQ ID NO: 14637 - DNA, 96 bp, Aspergillus novofumigatus
  misc_feature: 106
aactctttctatcttatctatctttaccttctattcttttctttctaaattaacttatatactcttttcccttctctaaacttacgaacccttata

SEQ ID NO: 14638 - DNA, 96 bp, Aspergillus novofumigatus
  misc_feature: 106
tagtattagatatattttattaatagagtttaagaagtatagtatactttaatatatattatttttagaatttcttctaaagtttagtatatacta

SEQ ID NO: 14639 - DNA, 96 bp, Aspergillus novofumigatus
  misc_feature: 106
atctattacttaatatatggatgctaactaatcttaatctactaatattactacctctcttactacttaccttactattaaccttactatctacta

SEQ ID NO: 14640 - DNA, 96 bp, Aspergillus novofumigatus
  misc_feature: 106
tagggttaataagcttaggattagaataagaattataagaagagttaaagatagtaagttaaagattagaatatagattaaaaagagaaagaaaat

SEQ ID NO: 14641 - DNA, 96 bp, Aspergillus novofumigatus
  misc_feature: 106
tacttcttatatatcttatattcttcttctaatctacttattaaatcctaactttaatcctttcttctcttctctactctttcttcttttctttct

SEQ ID NO: 14642 - DNA, 96 bp, Aspergillus novofumigatus
  misc_feature: 106
ataggatatatataactactaataagaatagagaagatagtaatttaaaagataataataagaattactttatatatatatatttatatgtaagta

SEQ ID NO: 14643 - DNA, 96 bp, Aspergillus novofumigatus
  misc_feature: 106
tactctttcttctttccttttttaatcttctctcttattctattaaaaatatacccttcttctctcttatattataattaatctactctcttttta

SEQ ID NO: 14644 - DNA, 96 bp, Aspergillus novofumigatus
  misc_feature: 106
taatttagagtagagagaggtaaagggtttaagagattaaagaaagatagtagaagaaaaaagaagggattttaagagagtagattaagaagagta

SEQ ID NO: 14645 - DNA, 96 bp, Aspergillus novofumigatus
  misc_feature: 106
ggtcagggtggaataaggatatagggaaggataagattagggttaggagtaggattaggataaggataagggttagggtattagtaagaattagta

SEQ ID NO: 14646 - DNA, 96 bp, Aspergillus novofumigatus
  misc_feature: 106
taaactctttctatcttatctatctttaccttctattcttttctttctaaattaacttatatactcttttcccttctctaaacttacgaaccctta

SEQ ID NO: 14647 - DNA, 96 bp, Aspergillus novofumigatus
  misc_feature: 106
ggaatgagttaggattaggaatttattaggattaggaatttattaggattaggaatgagttaggattaggaattggttaggattaggaataagtta

SEQ ID NO: 14648 - DNA, 96 bp, Aspergillus novofumigatus
  misc_feature: 106
taaagataggatatatataactactaataagaatagagaagatagtaatttaaaagataataataagaattactttatatatatatatttatatgt

SEQ ID NO: 14649 - DNA, 96 bp, Aspergillus novofumigatus
  misc_feature: 106
ggaatgagttaggattaggaattggttaggattaggaataagttaggattaggaatgagttaggattagggatttagtaagaggttaataggttta

SEQ ID NO: 14650 - DNA, 96 bp, Aspergillus novofumigatus
  misc_feature: 106
gtattattatataatattattcttatttttcttatagtaaattaattactatactatatttacctagtatatttatatctactaataagttagctt

SEQ ID NO: 14651 - DNA, 96 bp, Aspergillus novofumigatus
  misc_feature: 106
atatctattacttaatatatggatgctaactaatcttaatctactaatattactacctctcttactacttaccttactattaaccttactatctac

SEQ ID NO: 14652 - DNA, 96 bp, Aspergillus novofumigatus
  misc_feature: 106
atcttaatctactaatattactacctctcttactacttaccttactattaaccttactatctactatgatatttatattactatctaccttattac

SEQ ID NO: 14653 - DNA, 96 bp, Aspergillus novofumigatus
  misc_feature: 106
cctattaacctcttactaaatccctaatcctaacttattcctaatcctaataaattcctaatcctataaattatctcttattctacctaattaacc

SEQ ID NO: 14654 - DNA, 96 bp, Aspergillus novofumigatus
  misc_feature: 106
ctcttaaaatcccttcttttttcttctactatctttctttaatctcttaaaccctttacctctctctactctaaattactaattcttactaatacc

SEQ ID NO: 14655 - DNA, 96 bp, Aspergillus novofumigatus
  misc_feature: 106
gggttcgtaagtttagagaagggaaaagagtatataagttaatttagaaagaaaagaatagaaggtaaagatagataagatagaaagagtttaagt

SEQ ID NO: 14656 - DNA, 96 bp, Aspergillus novofumigatus
  misc_feature: 106
ggggtatataaattatagctaagattatataatataagcttgctatattaattagtatattattatataactataagctagtgtctaatttagact

SEQ ID NO: 14657 - DNA, 96 bp, Aspergillus novofumigatus
  misc_feature: 106
cccctaatatcctctccccttattcattctttctaattcctcttatctttaaatttcttcctctaactctatctcttcttctatacttattaatcc

SEQ ID NO: 14658 - DNA, 96 bp, Aspergillus novofumigatus
  misc_feature: 106
ctcttagtattacctctctttaatatatatctctactagtctactatataaaatttataaaatatttaattatatagagttttaaaaattctaggc

SEQ ID NO: 14659 - DNA, 96 bp, Aspergillus novofumigatus
  misc_feature: 106
acccctaatatcctctccccttattcattctttctaattcctcttatctttaaatttcttcctctaactctatctcttcttctatacttattaatc

SEQ ID NO: 14660 - DNA, 96 bp, Aspergillus novofumigatus
  misc_feature: 106
gagaagggttcataattaaataaataagagagaagaataagaaagaaaagaagaaagagtagagaagagaagaaaggattaaagttaggatttaat

SEQ ID NO: 14661 - DNA, 96 bp, Aspergillus novofumigatus
  misc_feature: 106
actcttattcttattcttatctaaatcctatccctatccctatccctatccctatatgacctgaaacctaatatccctaatagtagttagtagttc

SEQ ID NO: 14662 - DNA, 96 bp, Aspergillus novofumigatus
  misc_feature: 106
gaaaagaaagaagagatagatatagaaaaaagaataattagaattttagtaagagattagataagggatagagtaagggttagtataattaagaat

SEQ ID NO: 14663 - DNA, 96 bp, Aspergillus novofumigatus
  misc_feature: 106
cttctctttcttcttctctttcttcttctctttcttcttctctttcttcttattcttcttattcttcctctctttcttaccctttacttaaactct

SEQ ID NO: 14664 - DNA, 96 bp, Aspergillus novofumigatus
  misc_feature: 106
aagggttcataattaaataaataagagagaagaataagaaagaaaagaagaaagagtagagaagagaagaaaggattaaagttaggatttaataag

SEQ ID NO: 14665 - DNA, 96 bp, Aspergillus novofumigatus
  misc_feature: 106
cttagtattacctctctttaatatatatctctactagtctactatataaaatttataaaatatttaattatatagagttttaaaaattctaggctt

SEQ ID NO: 14666 - DNA, 96 bp, Aspergillus novofumigatus
  misc_feature: 106
aaagaaaagaaagaagagatagatatagaaaaaagaataattagaattttagtaagagattagataagggatagagtaagggttagtataattaag

SEQ ID NO: 14667 - DNA, 96 bp, Aspergillus novofumigatus
  misc_feature: 106
ctcttatttatttaattatgaacccttctcctctcttatcttataattaatctaatctcttttaatccttattctctctatcctaaattctcttgt

SEQ ID NO: 14668 - DNA, 96 bp, Aspergillus novofumigatus
  misc_feature: 106
ctcttacttatattaatctctatctataattctttctctttcttctctttctctctttctttcttatctctctaactctaaatatcctcttcctat

SEQ ID NO: 14669 - DNA, 96 bp, Aspergillus novofumigatus
  misc_feature: 106
ctctccccttattcattctttctaattcctcttatctttaaatttcttcctctaactctatctcttcttctatacttattaatccttactcttctt

SEQ ID NO: 14670 - DNA, 96 bp, Aspergillus novofumigatus
  misc_feature: 106
ctagtctactatataaaatttataaaatatttaattatatagagttttaaaaattctaggcttattattactaagtatactatatattattagatt

SEQ ID NO: 14671 - DNA, 96 bp, Aspergillus novofumigatus
  misc_feature: 106
ctaccttactgtctaccttactgtctaccttactatctaccttactgtctaccttactgcctgactcacttactatcttacttactgcctgtcttg

SEQ ID NO: 14672 - DNA, 96 bp, Aspergillus novofumigatus
  misc_feature: 106
attaggattaggaatttattaggattaggaatgagttaggattaggaattggttaggattaggaataagttaggattaggaatgagttaggattag

SEQ ID NO: 14673 - DNA, 96 bp, Aspergillus novofumigatus
  misc_feature: 106
accctaactcttattcttattcttatctaaatcctatccctatccctatccctatccctatatgacctgaaacctaatatccctaatagtagttag

SEQ ID NO: 14674 - DNA, 96 bp, Aspergillus novofumigatus
  misc_feature: 106
cctctctcctctatctcttcttaatctcctctcttatcccttctaatctaaatccttacccttactcttattattaccctctctattccttttaat

SEQ ID NO: 14675 - DNA, 96 bp, Aspergillus novofumigatus
  misc_feature: 106
cctaatatcctctccccttattcattctttctaattcctcttatctttaaatttcttcctctaactctatctcttcttctatacttattaatcctt

SEQ ID NO: 14676 - DNA, 96 bp, Aspergillus novofumigatus
  misc_feature: 106
aagagaggagaagggttcataattaaataaataagagagaagaataagaaagaaaagaagaaagagtagagaagagaagaaaggattaaagttagg

SEQ ID NO: 14677 - DNA, 96 bp, Aspergillus novofumigatus
  misc_feature: 106
ccctttttatctcttcttctaactcttattcttaactcctattcttattccttctctcctaaaaacttttcttctaactcttattctaactctcct

SEQ ID NO: 14678 - DNA, 96 bp, Aspergillus novofumigatus
  misc_feature: 106
attttaaatccctcactcttaaactcttacttatattaatctctatctataattctttctctttcttctctttctctctttctttcttatctctct

SEQ ID NO: 14679 - DNA, 96 bp, Aspergillus novofumigatus
  misc_feature: 106
aggattaggatgagttaggattaggaataagttagggttaggaatgagttaggattaggaatttattaggattaggaatttattaggattaggaat

SEQ ID NO: 14680 - DNA, 96 bp, Aspergillus novofumigatus
  misc_feature: 106
attattatataatattattcttatttttcttatagtaaattaattactatactatatttacctagtatatttatatctactaataagttagctttt

SEQ ID NO: 14681 - DNA, 96 bp, Aspergillus novofumigatus
  misc_feature: 106
attaggcatataagtatataatatactctataggagtagatagattagttaattaaagataggatatatataactactaataagaatagagaagat

SEQ ID NO: 14682 - DNA, 96 bp, Aspergillus novofumigatus
  misc_feature: 106
aagtatataagaaggataatttatatagattagtttagtagtttagattttaatatatataaagggtttataattaaatattaccttagaagagat

SEQ ID NO: 14683 - DNA, 96 bp, Aspergillus novofumigatus
  misc_feature: 106
agattagttaattaaagataggatatatataactactaataagaatagagaagatagtaatttaaaagataataataagaattactttatatatat

SEQ ID NO: 14684 - DNA, 96 bp, Aspergillus novofumigatus
  misc_feature: 106
atagattagttaattaaagataggatatatataactactaataagaatagagaagatagtaatttaaaagataataataagaattactttatatat

SEQ ID NO: 14685 - DNA, 96 bp, Aspergillus novofumigatus
  misc_feature: 106
actctttcttctttccttttttaatcttctctcttattctattaaaaatatacccttcttctctcttatattataattaatctactctctttttat

SEQ ID NO: 14686 - DNA, 96 bp, Aspergillus novofumigatus
  misc_feature: 106
acttttgctaataccctctatctcttttactaactctccttcttcttctaactcttatctctaactctttctctctctcttcccctccctcttcct

SEQ ID NO: 14687 - DNA, 96 bp, Aspergillus novofumigatus
  misc_feature: 106
agaggagaagggttcataattaaataaataagagagaagaataagaaagaaaagaagaaagagtagagaagagaagaaaggattaaagttaggatt

SEQ ID NO: 14688 - DNA, 96 bp, Aspergillus novofumigatus
  misc_feature: 106
acttcttatatatcttatattcttcttctaatctacttattaaatcctaactttaatcctttcttctcttctctactctttcttcttttctttctt

SEQ ID NO: 14689 - DNA, 96 bp, Aspergillus novofumigatus
  misc_feature: 106
aactcttattcttattcttatctaaatcctatccctatccctatccctatccctatatgacctgaaacctaatatccctaatagtagttagtagtt

SEQ ID NO: 14690 - DNA, 96 bp, Aspergillus novofumigatus
  misc_feature: 105
ttttttctaatcttctctctttctaccctttctaactccctctcttctttttttaatctatctctaaatcctcttcttcctactcttcttaatcta

SEQ ID NO: 14691 - DNA, 96 bp, Aspergillus novofumigatus
  misc_feature: 105
tttttacttcttatatatcttatattcttcttctaatctacttattaaatcctaactttaatcctttcttctcttctctactctttcttcttttct

SEQ ID NO: 14692 - DNA, 96 bp, Aspergillus novofumigatus
  misc_feature: 105
cttctctctttctaccctttctaactccctctcttctttttttaatctatctctaaatcctcttcttcctactcttcttaatctactctcttaaaa

SEQ ID NO: 14693 - DNA, 96 bp, Aspergillus novofumigatus
  misc_feature: 105
tttcttcttctctttcttcttattcttcttattcttcctctctttcttaccctttacttaaactctttctatcttatctatctttaccttctattc

SEQ ID NO: 14694 - DNA, 96 bp, Aspergillus novofumigatus
  misc_feature: 105
tttctaccctttctaactccctctcttctttttttaatctatctctaaatcctcttcttcctactcttcttaatctactctcttaaaatcccttct

SEQ ID NO: 14695 - DNA, 96 bp, Aspergillus novofumigatus
  misc_feature: 105
tttctaatcttctctctttctaccctttctaactccctctcttctttttttaatctatctctaaatcctcttcttcctactcttcttaatctactc

SEQ ID NO: 14696 - DNA, 96 bp, Aspergillus novofumigatus
  misc_feature: 105
ttcgtaagtttagagaagggaaaagagtatataagttaatttagaaagaaaagaatagaaggtaaagatagataagatagaaagagtttaagtaaa

SEQ ID NO: 14697 - DNA, 96 bp, Aspergillus novofumigatus
  misc_feature: 105
tttaaacctattaacctcttactaaatccctaatcctaacttattcctaatcctaataaattcctaatcctataaattatctcttattctacctaa

SEQ ID NO: 14698 - DNA, 96 bp, Aspergillus novofumigatus
  misc_feature: 105
ggaagggttaataagagtagagatagatagatataggaaaataaggatttagaaggatttaggaagagagaggatttagaatgaagatagaaagaa

SEQ ID NO: 14699 - DNA, 96 bp, Aspergillus novofumigatus
  misc_feature: 105
ttcttcttttctttcttattcttctctcttatttatttaattatgaacccttctcctctcttatcttataattaatctaatctcttttaatcctta

SEQ ID NO: 14700 - DNA, 96 bp, Aspergillus novofumigatus
  misc_feature: 105
taagggtaaggataagagtaagggtttagtttaggggagagttagggagagatagaaggggagatagagggagagatagaagaaggattagaagaa

SEQ ID NO: 14701 - DNA, 96 bp, Aspergillus novofumigatus
  misc_feature: 105
ttcttattcttctctcttatttatttaattatgaacccttctcctctcttatcttataattaatctaatctcttttaatccttattctctctatcc

SEQ ID NO: 14702 - DNA, 96 bp, Aspergillus novofumigatus
  misc_feature: 105
ttagtgggaactactaactactattagggatattaggtttcaggtcatatagggatagggatagggatagggataggatttagataagaataagaa

SEQ ID NO: 14703 - DNA, 96 bp, Aspergillus novofumigatus
  misc_feature: 105
ttcttaatctactctcttaaaatcccttcttttttcttctactatctttctttaatctcttaaaccctttacctctctctactctaaattactaat

SEQ ID NO: 14704 - DNA, 96 bp, Aspergillus novofumigatus
  misc_feature: 105
ttctctcttatttatttaattatgaacccttctcctctcttatcttataattaatctaatctcttttaatccttattctctctatcctaaattctc

SEQ ID NO: 14705 - DNA, 96 bp, Aspergillus novofumigatus
  misc_feature: 105
gagtatgttggctgaatctgtggtttatatgcaggcatatatatataaataagacatcagagaatacatataatattaaccacattcaggagagaa

SEQ ID NO: 14706 - DNA, 96 bp, Aspergillus novofumigatus
  misc_feature: 105
ttcctaacccttattctctctcttattattatcttttattttcttttcttttctattccctttcctcttccctttcctcttccctttcttctccta

SEQ ID NO: 14707 - DNA, 96 bp, Aspergillus novofumigatus
  misc_feature: 105
ttataagataagagaggagaagggttcataattaaataaataagagagaagaataagaaagaaaagaagaaagagtagagaagagaagaaaggatt

SEQ ID NO: 14708 - DNA, 96 bp, Aspergillus novofumigatus
  misc_feature: 105
ttaggattaggaataagttagggttaggaatgagttaggattaggaatttattaggattaggaatttattaggattaggaatgagttaggattagg

SEQ ID NO: 14709 - DNA, 96 bp, Aspergillus novofumigatus
  misc_feature: 105
ttaggaatgagttaggattaggaatttattaggattaggaatttattaggattaggaatgagttaggattaggaattggttaggattaggaataag

SEQ ID NO: 14710 - DNA, 96 bp, Aspergillus novofumigatus
  misc_feature: 105
ttagaatagtaagggtaaggataagagtaagggtttagtttaggggagagttagggagagatagaaggggagatagagggagagatagaagaagga

SEQ ID NO: 14711 - DNA, 96 bp, Aspergillus novofumigatus
  misc_feature: 105
gttcgtaagtttagagaagggaaaagagtatataagttaatttagaaagaaaagaatagaaggtaaagatagataagatagaaagagtttaagtaa

SEQ ID NO: 14712 - DNA, 96 bp, Aspergillus novofumigatus
  misc_feature: 105
gtcagggtggaataaggatatagggaaggataagattagggttaggagtaggattaggataaggataagggttagggtattagtaagaattagtaa

SEQ ID NO: 14713 - DNA, 96 bp, Aspergillus novofumigatus
  misc_feature: 105
aaaagaaaagaaagaagagatagatatagaaaaaagaataattagaattttagtaagagattagataagggatagagtaagggttagtataattaa

SEQ ID NO: 14714 - DNA, 96 bp, Aspergillus novofumigatus
  misc_feature: 105
tcttttctttcttattcttctctcttatttatttaattatgaacccttctcctctcttatcttataattaatctaatctcttttaatccttattct

SEQ ID NO: 14715 - DNA, 96 bp, Aspergillus novofumigatus
  misc_feature: 105
tctttcttcttttctttcttattcttctctcttatttatttaattatgaacccttctcctctcttatcttataattaatctaatctcttttaatcc

SEQ ID NO: 14716 - DNA, 96 bp, Aspergillus novofumigatus
  misc_feature: 105
tcttattcttctctcttatttatttaattatgaacccttctcctctcttatcttataattaatctaatctcttttaatccttattctctctatcct

SEQ ID NO: 14717 - DNA, 96 bp, Aspergillus novofumigatus
  misc_feature: 105
tcttattcttattcttatctaaatcctatccctatccctatccctatccctatatgacctgaaacctaatatccctaatagtagttagtagttccc

SEQ ID NO: 14718 - DNA, 96 bp, Aspergillus novofumigatus
  misc_feature: 105
aagaaaagaaagaagagatagatatagaaaaaagaataattagaattttagtaagagattagataagggatagagtaagggttagtataattaaga

SEQ ID NO: 14719 - DNA, 96 bp, Aspergillus novofumigatus
  misc_feature: 105
tctcttagtattacctctctttaatatatatctctactagtctactatataaaatttataaaatatttaattatatagagttttaaaaattctagg

SEQ ID NO: 14720 - DNA, 96 bp, Aspergillus novofumigatus
  misc_feature: 105
agggattaggcatataagtatataatatactctataggagtagatagattagttaattaaagataggatatatataactactaataagaatagaga

SEQ ID NO: 14721 - DNA, 96 bp, Aspergillus novofumigatus
  misc_feature: 105
taagggattaggcatataagtatataatatactctataggagtagatagattagttaattaaagataggatatatataactactaataagaataga

SEQ ID NO: 14722 - DNA, 96 bp, Aspergillus novofumigatus
  misc_feature: 105
tctactctcttaaaatcccttcttttttcttctactatctttctttaatctcttaaaccctttacctctctctactctaaattactaattcttact

SEQ ID NO: 14723 - DNA, 96 bp, Aspergillus novofumigatus
  misc_feature: 105
tcgtaagtttagagaagggaaaagagtatataagttaatttagaaagaaaagaatagaaggtaaagatagataagatagaaagagtttaagtaaag

SEQ ID NO: 14724 - DNA, 96 bp, Aspergillus novofumigatus
  misc_feature: 105
ggataagagtaagggtttagtttaggggagagttagggagagatagaaggggagatagagggagagatagaagaaggattagaagaagagtaagga

SEQ ID NO: 14725 - DNA, 96 bp, Aspergillus novofumigatus
  misc_feature: 105
agagaggagaagggttcataattaaataaataagagagaagaataagaaagaaaagaagaaagagtagagaagagaagaaaggattaaagttagga

SEQ ID NO: 14726 - DNA, 96 bp, Aspergillus novofumigatus
  misc_feature: 105
gattaggatgagttaggattaggaataagttagggttaggaatgagttaggattaggaatttattaggattaggaatttattaggattaggaatga

SEQ ID NO: 14727 - DNA, 96 bp, Aspergillus novofumigatus
  misc_feature: 105
agtgggaactactaactactattagggatattaggtttcaggtcatatagggatagggatagggatagggataggatttagataagaataagaata

SEQ ID NO: 14728 - DNA, 96 bp, Aspergillus novofumigatus
  misc_feature: 105
aaaagaaagaagagatagatatagaaaaaagaataattagaattttagtaagagattagataagggatagagtaagggttagtataattaagaata

SEQ ID NO: 14729 - DNA, 96 bp, Aspergillus novofumigatus
  misc_feature: 105
tattattatataatattattcttatttttcttatagtaaattaattactatactatatttacctagtatatttatatctactaataagttagcttt

SEQ ID NO: 14730 - DNA, 96 bp, Aspergillus novofumigatus
  misc_feature: 105
aaattctaaaaataatatatattaaagtatactatacttcttaaactctattaataaaatatatctaatactaaactagaaatatattaagatata

SEQ ID NO: 14731 - DNA, 96 bp, Aspergillus novofumigatus
  misc_feature: 105
tagatagattagttaattaaagataggatatatataactactaataagaatagagaagatagtaatttaaaagataataataagaattactttata

SEQ ID NO: 14732 - DNA, 96 bp, Aspergillus novofumigatus
  misc_feature: 105
tagtgggaactactaactactattagggatattaggtttcaggtcatatagggatagggatagggatagggataggatttagataagaataagaat

SEQ ID NO: 14733 - DNA, 96 bp, Aspergillus novofumigatus
  misc_feature: 105
gggtatataaattatagctaagattatataatataagcttgctatattaattagtatattattatataactataagctagtgtctaatttagacta

SEQ ID NO: 14734 - DNA, 96 bp, Aspergillus novofumigatus
  misc_feature: 105
tagctggtttatttaatttactactactatatttaaaaagtttatatcttatatataggagatagtatctataaattatattattataatcctcta

SEQ ID NO: 14735 - DNA, 96 bp, Aspergillus novofumigatus
  misc_feature: 105
tagatctcttagtattacctctctttaatatatatctctactagtctactatataaaatttataaaatatttaattatatagagttttaaaaattc

SEQ ID NO: 14736 - DNA, 96 bp, Aspergillus novofumigatus
  misc_feature: 105
tagaataagaattataagaagagttaaagatagtaagttaaagattagaatatagattaaaaagagaaagaaaatatagataaatagatagaagat

SEQ ID NO: 14737 - DNA, 96 bp, Aspergillus novofumigatus
  misc_feature: 105
ggttcgtaagtttagagaagggaaaagagtatataagttaatttagaaagaaaagaatagaaggtaaagatagataagatagaaagagtttaagta

SEQ ID NO: 14738 - DNA, 96 bp, Aspergillus novofumigatus
  misc_feature: 105
taatcttctctctttctaccctttctaactccctctcttctttttttaatctatctctaaatcctcttcttcctactcttcttaatctactctctt

SEQ ID NO: 14739 - DNA, 96 bp, Aspergillus novofumigatus
  misc_feature: 105
agttagggttaggaatgagttaggattaggaatttattaggattaggaatttattaggattaggaatgagttaggattaggaattggttaggatta

SEQ ID NO: 14740 - DNA, 96 bp, Aspergillus novofumigatus
  misc_feature: 105
taatccctcttatcttgaaatttcttactctaatactatctctttttttctaatcttctctctttctaccctttctaactccctctcttctttttt

SEQ ID NO: 14741 - DNA, 96 bp, Aspergillus novofumigatus
  misc_feature: 105
actaatcttaatctactaatattactacctctcttactacttaccttactattaaccttactatctactatgatatttatattactatctacctta

SEQ ID NO: 14742 - DNA, 96 bp, Aspergillus novofumigatus
  misc_feature: 105
aatcttctctctttctaccctttctaactccctctcttctttttttaatctatctctaaatcctcttcttcctactcttcttaatctactctctta

SEQ ID NO: 14743 - DNA, 96 bp, Aspergillus novofumigatus
  misc_feature: 105
ataagagaggagaagggttcataattaaataaataagagagaagaataagaaagaaaagaagaaagagtagagaagagaagaaaggattaaagtta

SEQ ID NO: 14744 - DNA, 96 bp, Aspergillus novofumigatus
  misc_feature: 105
taactcttattcttattcttatctaaatcctatccctatccctatccctatccctatatgacctgaaacctaatatccctaatagtagttagtagt

SEQ ID NO: 14745 - DNA, 96 bp, Aspergillus novofumigatus
  misc_feature: 105
gttaggattaggaataagttagggttaggaatgagttaggattaggaatttattaggattaggaatttattaggattaggaatgagttaggattag

SEQ ID NO: 14746 - DNA, 96 bp, Aspergillus novofumigatus
  misc_feature: 105
gtatgttggctgaatctgtggtttatatgcaggcatatatatataaataagacatcagagaatacatataatattaaccacattcaggagagaagt

SEQ ID NO: 14747 - DNA, 96 bp, Aspergillus novofumigatus
  misc_feature: 105
gtatactctatatcctactatttaggtatttactaaagtctatctctttattataattataagtattattattttatttattactataataaatat

SEQ ID NO: 14748 - DNA, 96 bp, Aspergillus novofumigatus
  misc_feature: 105
gtaatttagagtagagagaggtaaagggtttaagagattaaagaaagatagtagaagaaaaaagaagggattttaagagagtagattaagaagagt

SEQ ID NO: 14749 - DNA, 96 bp, Aspergillus novofumigatus
  misc_feature: 105
ggattaggatgagttaggattaggaataagttagggttaggaatgagttaggattaggaatttattaggattaggaatttattaggattaggaatg

SEQ ID NO: 14750 - DNA, 96 bp, Aspergillus novofumigatus
  misc_feature: 105
ggatgagttaggattaggaataagttagggttaggaatgagttaggattaggaatttattaggattaggaatttattaggattaggaatgagttag

SEQ ID NO: 14751 - DNA, 96 bp, Aspergillus novofumigatus
  misc_feature: 105
ggatatatataactactaataagaatagagaagatagtaatttaaaagataataataagaattactttatatatatatatttatatgtaagtatat

SEQ ID NO: 14752 - DNA, 96 bp, Aspergillus novofumigatus
  misc_feature: 105
attaataatttctattttattcctaacccttattctctctcttattattatcttttattttcttttcttttctattccctttcctcttccctttcc

SEQ ID NO: 14753 - DNA, 96 bp, Aspergillus novofumigatus
  misc_feature: 105
ctctttcttcttttctttcttattcttctctcttatttatttaattatgaacccttctcctctcttatcttataattaatctaatctcttttaatc

SEQ ID NO: 14754 - DNA, 96 bp, Aspergillus novofumigatus
  misc_feature: 105
gatgctaactaatcttaatctactaatattactacctctcttactacttaccttactattaaccttactatctactatgatatttatattactatc

SEQ ID NO: 14755 - DNA, 96 bp, Aspergillus novofumigatus
  misc_feature: 105
gataggatatatataactactaataagaatagagaagatagtaatttaaaagataataataagaattactttatatatatatatttatatgtaagt

SEQ ID NO: 14756 - DNA, 96 bp, Aspergillus novofumigatus
  misc_feature: 105
gagaggagaagggttcataattaaataaataagagagaagaataagaaagaaaagaagaaagagtagagaagagaagaaaggattaaagttaggat

SEQ ID NO: 14757 - DNA, 96 bp, Aspergillus novofumigatus
  misc_feature: 105
gaccagcaggaagaacccagtaagataggtagtatagtagatagtaaggcaggcagtgaagcaggtagtaaggcaggtagtaaggcaggcagcaag

SEQ ID NO: 14758 - DNA, 96 bp, Aspergillus novofumigatus
  misc_feature: 105
gaagaaagaaaagaaaagaaagaagagttagatatagaaaaaagaataattagaattttagtaagagattatataagggatagagtaagggttagt

SEQ ID NO: 14759 - DNA, 96 bp, Aspergillus novofumigatus
  misc_feature: 105
ctttcttcttctctttcttcttattcttcttattcttcctctctttcttaccctttacttaaactctttctatcttatctatctttaccttctatt

SEQ ID NO: 14760 - DNA, 96 bp, Aspergillus novofumigatus
  misc_feature: 105
agtatgttggctgaatctgtggtttatatgcaggcatatatatataaataagacatcagagaatacatataatattaaccacattcaggagagaag

SEQ ID NO: 14761 - DNA, 96 bp, Aspergillus novofumigatus
  misc_feature: 105
cttctccctttttttacttcttatatatcttatattcttcttctaatctacttattaaatcctaactttaatcctttcttctcttctctactcttt

SEQ ID NO: 14762 - DNA, 96 bp, Aspergillus novofumigatus
  misc_feature: 105
agtaagggtaaggataagagtaagggtttagtttaggggagagttagggagagatagaaggggagatagagggagagatagaagaaggattagaag

SEQ ID NO: 14763 - DNA, 96 bp, Aspergillus novofumigatus
  misc_feature: 105
aaggataagagtaagggtttagtttaggggagagttagggagagatagaaggggagatagagggagagatagaagaaggattagaagaagagtaag

SEQ ID NO: 14764 - DNA, 96 bp, Aspergillus novofumigatus
  misc_feature: 105
agataggatatatataactactaataagaatagagaagatagtaatttaaaagataataataagaattactttatatatatatatttatatgtaag

SEQ ID NO: 14765 - DNA, 96 bp, Aspergillus novofumigatus
  misc_feature: 105
ctcttcttaatctactctcttaaaatcccttcttttttcttctactatctttctttaatctcttaaaccctttacctctctctactctaaattact

SEQ ID NO: 14766 - DNA, 96 bp, Aspergillus novofumigatus
  misc_feature: 105
ctctcctctatctcttcttaatctcctctcttatcccttctaatctaaatccttacccttactcttattattaccctctctattccttttaatatt

SEQ ID NO: 14767 - DNA, 96 bp, Aspergillus novofumigatus
  misc_feature: 105
aagggattaggcatataagtatataatatactctataggagtagatagattagttaattaaagataggatatatataactactaataagaatagag

SEQ ID NO: 14768 - DNA, 96 bp, Aspergillus novofumigatus
  misc_feature: 105
ctattctataagactaatatatatattaagatttataatatttactagaaacttaatctttataattattataagcttatcctctatagctattat

SEQ ID NO: 14769 - DNA, 96 bp, Aspergillus novofumigatus
  misc_feature: 105
ctagatctcttagtattacctctctttaatatatatctctactagtctactatataaaatttataaaatatttaattatatagagttttaaaaatt

SEQ ID NO: 14770 - DNA, 96 bp, Aspergillus novofumigatus
  misc_feature: 105
atctcttagtattacctctctttaatatatatctctactagtctactatataaaatttataaaatatttaattatatagagttttaaaaattctag

SEQ ID NO: 14771 - DNA, 96 bp, Aspergillus novofumigatus
  misc_feature: 105
atgttggctgaatctgtggtttatatgcaggcatatatatataaataagacatcagagaatacatataatattaaccacattcaggagagaagtag

SEQ ID NO: 14772 - DNA, 96 bp, Aspergillus novofumigatus
  misc_feature: 105
ctactctttcttctttccttttttaatcttctctcttattctattaaaaatatacccttcttctctcttatattataattaatctactctcttttt

SEQ ID NO: 14773 - DNA, 96 bp, Aspergillus novofumigatus
  misc_feature: 105
ctaattcttattctaattcttattctaattcttattctaattcttattctaattcttattctaattcttattctaattcttattctaattctcttt

SEQ ID NO: 14774 - DNA, 96 bp, Aspergillus novofumigatus
  misc_feature: 105
ctaatcttctctctttctaccctttctaactccctctcttctttttttaatctatctctaaatcctcttcttcctactcttcttaatctactctct

SEQ ID NO: 14775 - DNA, 96 bp, Aspergillus novofumigatus
  misc_feature: 105
ccttatccttatcctaatcctactcctaaccctaatcttatccttccctatatccttattccaccctgacctttcttcttcttcttttttctattt

SEQ ID NO: 14776 - DNA, 96 bp, Aspergillus novofumigatus
  misc_feature: 105
aggataagagtaagggtttagtttaggggagagttagggagagatagaaggggagatagagggagagatagaagaaggattagaagaagagtaagg

SEQ ID NO: 14777 - DNA, 96 bp, Aspergillus novofumigatus
  misc_feature: 105
ccctaatatcctctccccttattcattctttctaattcctcttatctttaaatttcttcctctaactctatctcttcttctatacttattaatcct

SEQ ID NO: 14778 - DNA, 96 bp, Aspergillus novofumigatus
  misc_feature: 105
ccctaactcttattcttattcttatctaaatcctatccctatccctatccctatccctatatgacctgaaacctaatatccctaatagtagttagt

SEQ ID NO: 14779 - DNA, 96 bp, Aspergillus novofumigatus
  misc_feature: 105
cagggtggaataaggatatagggaaggataagattagggttaggagtaggattaggataaggataagggttagggtattagtaagaattagtaatt

SEQ ID NO: 14780 - DNA, 96 bp, Aspergillus novofumigatus
  misc_feature: 105
aacccctaatatcctctccccttattcattctttctaattcctcttatctttaaatttcttcctctaactctatctcttcttctatacttattaat

SEQ ID NO: 14781 - DNA, 96 bp, Aspergillus novofumigatus
  misc_feature: 105
attaacttaattttaaatccctcactcttaaactcttacttatattaatctctatctataattctttctctttcttctctttctctctttctttct

SEQ ID NO: 14782 - DNA, 96 bp, Aspergillus novofumigatus
  misc_feature: 105
aagaaattctaaaaataatatatattaaagtatactatacttcttaaactctattaataaaatatatctaatactaaactagaaatatattaagat

SEQ ID NO: 14783 - DNA, 96 bp, Aspergillus novofumigatus
  misc_feature: 105
atctattctataagactaatatatatattaagatttataatatttactagaaacttaatctttataattattataagcttatcctctatagctatt

SEQ ID NO: 14784 - DNA, 96 bp, Aspergillus novofumigatus
  misc_feature: 105
actagtctactatataaaatttataaaatatttaattatatagagttttaaaaattctaggcttattattactaagtatactatatattattagat

SEQ ID NO: 14785 - DNA, 96 bp, Aspergillus novofumigatus
  misc_feature: 105
agatagattagttaattaaagataggatatatataactactaataagaatagagaagatagtaatttaaaagataataataagaattactttatat

SEQ ID NO: 14786 - DNA, 96 bp, Aspergillus novofumigatus
  misc_feature: 105
acccttatccttatcctaatcctactcctaaccctaatcttatccttccctatatccttattccaccctgacctttcttcttcttcttttttctat

SEQ ID NO: 14787 - DNA, 96 bp, Aspergillus novofumigatus
  misc_feature: 105
aactaacccctaatatcctctccccttattcattctttctaattcctcttatctttaaatttcttcctctaactctatctcttcttctatacttat

SEQ ID NO: 14788 - DNA, 96 bp, Aspergillus novofumigatus
  misc_feature: 105
aaactctttctatcttatctatctttaccttctattcttttctttctaaattaacttatatactcttttcccttctctaaacttacgaacccttat

SEQ ID NO: 14789 - DNA, 96 bp, Aspergillus novofumigatus
  misc_feature: 105
aatactatctctttttttctaatcttctctctttctaccctttctaactccctctcttctttttttaatctatctctaaatcctcttcttcctact

SEQ ID NO: 14790 - DNA, 96 bp, Aspergillus novofumigatus
  misc_feature: 105
agggttcataattaaataaataagagagaagaataagaaagaaaagaagaaagagtagagaagagaagaaaggattaaagttaggatttaataagt

SEQ ID NO: 14791 - DNA, 96 bp, Aspergillus novofumigatus
  misc_feature: 105
agaataagaattataagaagagttaaagatagtaagttaaagattagaatatagattaaaaagagaaagaaaatatagataaatagatagaagatt

SEQ ID NO: 14792 - DNA, 96 bp, Aspergillus novofumigatus
  misc_feature: 105
actaacccctaatatcctctccccttattcattctttctaattcctcttatctttaaatttcttcctctaactctatctcttcttctatacttatt

SEQ ID NO: 14793 - DNA, 96 bp, Aspergillus novofumigatus
  misc_feature: 105
aaaactaacccctaatatcctctccccttattcattctttctaattcctcttatctttaaatttcttcctctaactctatctcttcttctatactt

SEQ ID NO: 14794 - DNA, 96 bp, Aspergillus novofumigatus
  misc_feature: 105
aaagaagaaagaaaagaaaagaaagaagagttagatatagaaaaaagaataattagaattttagtaagagattatataagggatagagtaagggtt

SEQ ID NO: 14795 - DNA, 96 bp, Aspergillus novofumigatus
  misc_feature: 104
tttttctaatcttctctctttctaccctttctaactccctctcttctttttttaatctatctctaaatcctcttcttcctactcttcttaatctac

SEQ ID NO: 14796 - DNA, 96 bp, Aspergillus novofumigatus
  misc_feature: 104
ttttctttcttattcttctctcttatttatttaattatgaacccttctcctctcttatcttataattaatctaatctcttttaatccttattctct

SEQ ID NO: 14797 - DNA, 96 bp, Aspergillus novofumigatus
  misc_feature: 104
tttctttcttattcttctctcttatttatttaattatgaacccttctcctctcttatcttataattaatctaatctcttttaatccttattctctc

SEQ ID NO: 14798 - DNA, 96 bp, Aspergillus novofumigatus
  misc_feature: 104
tttcttattcttctctcttatttatttaattatgaacccttctcctctcttatcttataattaatctaatctcttttaatccttattctctctatc

SEQ ID NO: 14799 - DNA, 96 bp, Aspergillus novofumigatus
  misc_feature: 104
tttctatcttcattctaaatcctctctcttcctaaatccttctaaatccttattttcctatatctatctatctctactcttattaacccttcctcc

SEQ ID NO: 14800 - DNA, 96 bp, Aspergillus novofumigatus
  misc_feature: 104
tttattaggattaggaatttattaggattaggaatgagttaggattaggaattggttaggattaggaataagttaggattaggaatgagttaggat

SEQ ID NO: 14801 - DNA, 96 bp, Aspergillus novofumigatus
  misc_feature: 104
tttagaatagtaagggtaaggataagagtaagggtttagtttaggggagagttagggagagatagaaggggagatagagggagagatagaagaagg

SEQ ID NO: 14802 - DNA, 96 bp, Aspergillus novofumigatus
  misc_feature: 104
tttaagagattaaagaaagatagtagaagaaaaaagaagggattttaagagagtagattaagaagagtaggaagaagaggatttagagatagatta

SEQ ID NO: 14803 - DNA, 96 bp, Aspergillus novofumigatus
  misc_feature: 104
ttcttttttctatatctgactcttctttcttttcttttctttcttcttttctctttcttttctatctattatcttcttactatctaacccttactc

SEQ ID NO: 14804 - DNA, 96 bp, Aspergillus novofumigatus
  misc_feature: 104
ttcttttctttcttattcttctctcttatttatttaattatgaacccttctcctctcttatcttataattaatctaatctcttttaatccttattc

SEQ ID NO: 14805 - DNA, 96 bp, Aspergillus novofumigatus
  misc_feature: 104
ttctttcttattcttctctcttatttatttaattatgaacccttctcctctcttatcttataattaatctaatctcttttaatccttattctctct

SEQ ID NO: 14806 - DNA, 96 bp, Aspergillus novofumigatus
  misc_feature: 104
gttagtaagtttaagataagaataaggggtagaaatatataagatagagagagttttagtaaagagaagaaataaatataattaaaaatagaagaa

SEQ ID NO: 14807 - DNA, 96 bp, Aspergillus novofumigatus
  misc_feature: 104
aagggtttagtttaggggagagttagggagagatagaaggggagatagagggagagatagaagaaggattagaagaagagtaaggaataataagaa

SEQ ID NO: 14808 - DNA, 96 bp, Aspergillus novofumigatus
  misc_feature: 104
tatataactactaataagaatagagaagatagtaatttaaaagataataataagaattactttatatatatatatttatatgtaagtatataagaa

SEQ ID NO: 14809 - DNA, 96 bp, Aspergillus novofumigatus
  misc_feature: 104
gggattaggcatataagtatataatatactctataggagtagatagattagttaattaaagataggatatatataactactaataagaatagagaa

SEQ ID NO: 14810 - DNA, 96 bp, Aspergillus novofumigatus
  misc_feature: 104
ttctatcttcattctaaatcctctctcttcctaaatccttctaaatccttattttcctatatctatctatctctactcttattaacccttcctcct

SEQ ID NO: 14811 - DNA, 96 bp, Aspergillus novofumigatus
  misc_feature: 104
ttctatatctattctataagactaatatatatattaagatttataatatttactagaaacttaatctttataattattataagcttatcctctata

SEQ ID NO: 14812 - DNA, 96 bp, Aspergillus novofumigatus
  misc_feature: 104
ttattaggattaggaatttattaggattaggaatgagttaggattaggaattggttaggattaggaataagttaggattaggaatgagttaggatt

SEQ ID NO: 14813 - DNA, 96 bp, Aspergillus novofumigatus
  misc_feature: 104
atatatataactactaataagaatagagaagatagtaatttaaaagataataataagaattactttatatatatatatttatatgtaagtatataa

SEQ ID NO: 14814 - DNA, 96 bp, Aspergillus novofumigatus
  misc_feature: 104
ttagtaagtttaagataagaataaggggtagaaatatataagatagagagagttttagtaaagagaagaaataaatataattaaaaatagaagaag

SEQ ID NO: 14815 - DNA, 96 bp, Aspergillus novofumigatus
  misc_feature: 104
ttaggcatataagtatataatatactctataggagtagatagattagttaattaaagataggatatatataactactaataagaatagagaagata

SEQ ID NO: 14816 - DNA, 96 bp, Aspergillus novofumigatus
  misc_feature: 104
ttaggattaggaatttattaggattaggaatgagttaggattaggaattggttaggattaggaataagttaggattaggaatgagttaggattagg

SEQ ID NO: 14817 - DNA, 96 bp, Aspergillus novofumigatus
  misc_feature: 104
taaggataagagtaagggtttagtttaggggagagttagggagagatagaaggggagatagagggagagatagaagaaggattagaagaagagtaa

SEQ ID NO: 14818 - DNA, 96 bp, Aspergillus novofumigatus
  misc_feature: 104
ttaattttaaatccctcactcttaaactcttacttatattaatctctatctataattctttctctttcttctctttctctctttctttcttatctc

SEQ ID NO: 14819 - DNA, 96 bp, Aspergillus novofumigatus
  misc_feature: 104
ttaactttatccttttcttttaattttatctttccttaattttaatttcttcttctctttcttcttctctttcttcttctctttcttcttctcttt

SEQ ID NO: 14820 - DNA, 96 bp, Aspergillus novofumigatus
  misc_feature: 104
ttaacttaattttaaatccctcactcttaaactcttacttatattaatctctatctataattctttctctttcttctctttctctctttctttctt

SEQ ID NO: 14821 - DNA, 96 bp, Aspergillus novofumigatus
  misc_feature: 104
tgttggctgaatctgtggtttatatgcaggcatatatatataaataagacatcagagaatacatataatattaaccacattcaggagagaagtagg

SEQ ID NO: 14822 - DNA, 96 bp, Aspergillus novofumigatus
  misc_feature: 104
aagaccagcaggaagaacccagtaagataggtagtatagtagatagtaaggcaggcagtgaagcaggtagtaaggcaggtagtaaggcaggcagca

SEQ ID NO: 14823 - DNA, 96 bp, Aspergillus novofumigatus
  misc_feature: 104
tctttctaccctttctaactccctctcttctttttttaatctatctctaaatcctcttcttcctactcttcttaatctactctcttaaaatccctt

SEQ ID NO: 14824 - DNA, 96 bp, Aspergillus novofumigatus
  misc_feature: 104
ggttagtaagtttaagataagaataaggggtagaaatatataagatagagagagttttagtaaagagaagaaataaatataattaaaaatagaaga

SEQ ID NO: 14825 - DNA, 96 bp, Aspergillus novofumigatus
  misc_feature: 104
attagtgggaactactaactactattagggatattaggtttcaggtcatatagggatagggatagggatagggataggatttagataagaataaga

SEQ ID NO: 14826 - DNA, 96 bp, Aspergillus novofumigatus
  misc_feature: 104
tctcctctatctcttcttaatctcctctcttatcccttctaatctaaatccttacccttactcttattattaccctctctattccttttaatatta

SEQ ID NO: 14827 - DNA, 96 bp, Aspergillus novofumigatus
  misc_feature: 104
tctccaccctccatgggaccacgccagttggcggtccgagatggccgggcgcgcgccctgaccggcagcaggggcccgcgcgcgccgccgcccggg

SEQ ID NO: 14828 - DNA, 96 bp, Aspergillus novofumigatus
  misc_feature: 104
tctatcccttatataatctcttactaaaattctaattattcttttttctatatctgactcttctttcttttcttttctttcttcttttctctttct

SEQ ID NO: 14829 - DNA, 96 bp, Aspergillus novofumigatus
  misc_feature: 104
tctaattcttattctaattcttattctaattcttattctaattcttattctaattcttattctaattcttattctaattcttattctaattctctt

SEQ ID NO: 14830 - DNA, 96 bp, Aspergillus novofumigatus
  misc_feature: 104
tctaatactatctctttttttctaatcttctctctttctaccctttctaactccctctcttctttttttaatctatctctaaatcctcttcttcct

SEQ ID NO: 14831 - DNA, 96 bp, Aspergillus novofumigatus
  misc_feature: 104
tcctctccccttattcattctttctaattcctcttatctttaaatttcttcctctaactctatctcttcttctatacttattaatccttactcttc

SEQ ID NO: 14832 - DNA, 96 bp, Aspergillus novofumigatus
  misc_feature: 104
gtttaagataagaataaggggtagaaatatataagatagagagagttttagtaaagagaagaaataaatataattaaaaatagaagaagaaaggga

SEQ ID NO: 14833 - DNA, 96 bp, Aspergillus novofumigatus
  misc_feature: 104
aggattaggaatttattaggattaggaatgagttaggattaggaattggttaggattaggaataagttaggattaggaatgagttaggattaggga

SEQ ID NO: 14834 - DNA, 96 bp, Aspergillus novofumigatus
  misc_feature: 104
tattcttaactctctctttctctttcttctcctttctatccctaactcttattctaacccttcttctatctcttcctctaatcctccttctaattc

SEQ ID NO: 14835 - DNA, 96 bp, Aspergillus novofumigatus
  misc_feature: 104
tattctatctctctcttactccctctctcctctatctcttcttaatctcctctcttatcccttctaatctaaatccttacccttactcttattatt

SEQ ID NO: 14836 - DNA, 96 bp, Aspergillus novofumigatus
  misc_feature: 104
taagagtaagggtttagtttaggggagagttagggagagatagaaggggagatagagggagagatagaagaaggattagaagaagagtaaggaata

SEQ ID NO: 14837 - DNA, 96 bp, Aspergillus novofumigatus
  misc_feature: 104
gagtaagggtttagtttaggggagagttagggagagatagaaggggagatagagggagagatagaagaaggattagaagaagagtaaggaataata

SEQ ID NO: 14838 - DNA, 96 bp, Aspergillus novofumigatus
  misc_feature: 104
ctctcttaaaatcccttcttttttcttctactatctttctttaatctcttaaaccctttacctctctctactctaaattactaattcttactaata

SEQ ID NO: 14839 - DNA, 96 bp, Aspergillus novofumigatus
  misc_feature: 104
agaaattctaaaaataatatatattaaagtatactatacttcttaaactctattaataaaatatatctaatactaaactagaaatatattaagata

SEQ ID NO: 14840 - DNA, 96 bp, Aspergillus novofumigatus
  misc_feature: 104
tatctaatctcttactaaaattctaattattcttttttctatatctatctcttctttcttttcttttctttcttctttcctctttcttttctatct

SEQ ID NO: 14841 - DNA, 96 bp, Aspergillus novofumigatus
  misc_feature: 104
tatattaataatttctattttattcctaacccttattctctctcttattattatcttttattttcttttcttttctattccctttcctcttccctt

SEQ ID NO: 14842 - DNA, 96 bp, Aspergillus novofumigatus
  misc_feature: 104
tagttctatatctattctataagactaatatatatattaagatttataatatttactagaaacttaatctttataattattataagcttatcctct

SEQ ID NO: 14843 - DNA, 96 bp, Aspergillus novofumigatus
  misc_feature: 104
taggattaggaatttattaggattaggaatgagttaggattaggaattggttaggattaggaataagttaggattaggaatgagttaggattaggg

SEQ ID NO: 14844 - DNA, 96 bp, Aspergillus novofumigatus
  misc_feature: 104
gatctcttagtattacctctctttaatatatatctctactagtctactatataaaatttataaaatatttaattatatagagttttaaaaattcta

SEQ ID NO: 14845 - DNA, 96 bp, Aspergillus novofumigatus
  misc_feature: 104
aacccttatccttatcctaatcctactcctaaccctaatcttatccttccctatatccttattccaccctgacctttcttcttcttcttttttcta

SEQ ID NO: 14846 - DNA, 96 bp, Aspergillus novofumigatus
  misc_feature: 104
gtaaggataagagtaagggtttagtttaggggagagttagggagagatagaaggggagatagagggagagatagaagaaggattagaagaagagta

SEQ ID NO: 14847 - DNA, 96 bp, Aspergillus novofumigatus
  misc_feature: 104
aagaaagaaaagaaaagaaagaagagttagatatagaaaaaagaataattagaattttagtaagagattatataagggatagagtaagggttagta

SEQ ID NO: 14848 - DNA, 96 bp, Aspergillus novofumigatus
  misc_feature: 104
ggaatttattaggattaggaatgagttaggattaggaattggttaggattaggaataagttaggattaggaatgagttaggattagggatttagta

SEQ ID NO: 14849 - DNA, 96 bp, Aspergillus novofumigatus
  misc_feature: 104
taattttaaatccctcactcttaaactcttacttatattaatctctatctataattctttctctttcttctctttctctctttctttcttatctct

SEQ ID NO: 14850 - DNA, 96 bp, Aspergillus novofumigatus
  misc_feature: 104
taatacttagtatactctatatcctactatttaggtatttactaaagtctatctctttattataattataagtattattattttatttattactat

SEQ ID NO: 14851 - DNA, 96 bp, Aspergillus novofumigatus
  misc_feature: 104
cttattctatctctctcttactccctctctcctctatctcttcttaatctcctctcttatcccttctaatctaaatccttacccttactcttatta

SEQ ID NO: 14852 - DNA, 96 bp, Aspergillus novofumigatus
  misc_feature: 104
aaactaacccctaatatcctctccccttattcattctttctaattcctcttatctttaaatttcttcctctaactctatctcttcttctatactta

SEQ ID NO: 14853 - DNA, 96 bp, Aspergillus novofumigatus
  misc_feature: 104
ctaatatcctctccccttattcattctttctaattcctcttatctttaaatttcttcctctaactctatctcttcttctatacttattaatcctta

SEQ ID NO: 14854 - DNA, 96 bp, Aspergillus novofumigatus
  misc_feature: 104
taactttatccttttcttttaattttatctttccttaattttaatttcttcttctctttcttcttctctttcttcttctctttcttcttctctttc

SEQ ID NO: 14855 - DNA, 96 bp, Aspergillus novofumigatus
  misc_feature: 104
taacccttattctctctcttattattatcttttattttcttttcttttctattccctttcctcttccctttcctcttccctttcttctcctatttt

SEQ ID NO: 14856 - DNA, 96 bp, Aspergillus novofumigatus
  misc_feature: 104
aagaagaaagaaaagaaaagaaagaagagttagatatagaaaaaagaataattagaattttagtaagagattatataagggatagagtaagggtta

SEQ ID NO: 14857 - DNA, 96 bp, Aspergillus novofumigatus
  misc_feature: 104
ctgccggtcctcgccggcgccggccccccggtccctatgacggtgcgcgcgcgcgcggctctctgctcgctacgagcgcgcgcgccccggccccac

SEQ ID NO: 14858 - DNA, 96 bp, Aspergillus novofumigatus
  misc_feature: 104
gtagatagattagttaattaaagataggatatatataactactaataagaatagagaagatagtaatttaaaagataataataagaattactttat

SEQ ID NO: 14859 - DNA, 96 bp, Aspergillus novofumigatus
  misc_feature: 104
gtaagtttagagaagggaaaagagtatataagttaatttagaaagaaaagaatagaaggtaaagatagataagatagaaagagtttaagtaaaggg

SEQ ID NO: 14860 - DNA, 96 bp, Aspergillus novofumigatus
  misc_feature: 104
ggtatataaattatagctaagattatataatataagcttgctatattaattagtatattattatataactataagctagtgtctaatttagactag

SEQ ID NO: 14861 - DNA, 96 bp, Aspergillus novofumigatus
  misc_feature: 104
ggtaaggataagagtaagggtttagtttaggggagagttagggagagatagaaggggagatagagggagagatagaagaaggattagaagaagagt

SEQ ID NO: 14862 - DNA, 96 bp, Aspergillus novofumigatus
  misc_feature: 104
cgaggggaatcatcattggaacctttttggtcttggggttagtagctgcctagaacactacttccttacagatataggccgggcgcgcgcgcgccc

SEQ ID NO: 14863 - DNA, 96 bp, Aspergillus novofumigatus
  misc_feature: 104
ggagtagatagattagttaattaaagataggatatatataactactaataagaatagagaagatagtaatttaaaagataataataagaattactt

SEQ ID NO: 14864 - DNA, 96 bp, Aspergillus novofumigatus
  misc_feature: 104
ctttttttaatctatctctaaatcctcttcttcctactcttcttaatctactctcttaaaatcccttcttttttcttctactatctttctttaatc

SEQ ID NO: 14865 - DNA, 96 bp, Aspergillus novofumigatus
  misc_feature: 104
gactcttctttcttttcttttctttcttcttttctctttcttttctatctattatcttcttactatctaacccttactccatccttaatctttcct

SEQ ID NO: 14866 - DNA, 96 bp, Aspergillus novofumigatus
  misc_feature: 104
gaataagggattaggcatataagtatataatatactctataggagtagatagattagttaattaaagataggatatatataactactaataagaat

SEQ ID NO: 14867 - DNA, 96 bp, Aspergillus novofumigatus
  misc_feature: 104
ctttctaccctttctaactccctctcttctttttttaatctatctctaaatcctcttcttcctactcttcttaatctactctcttaaaatcccttc

SEQ ID NO: 14868 - DNA, 96 bp, Aspergillus novofumigatus
  misc_feature: 104
gaaattctaaaaataatatatattaaagtatactatacttcttaaactctattaataaaatatatctaatactaaactagaaatatattaagatat

SEQ ID NO: 14869 - DNA, 96 bp, Aspergillus novofumigatus
  misc_feature: 104
ctctcttctttttttaatctatctctaaatcctcttcttcctactcttcttaatctactctcttaaaatcccttcttttttcttctactatctttc

SEQ ID NO: 14870 - DNA, 96 bp, Aspergillus novofumigatus
  misc_feature: 104
ctttcttcttttctttcttattcttctctcttatttatttaattatgaacccttctcctctcttatcttataattaatctaatctcttttaatcct

SEQ ID NO: 14871 - DNA, 96 bp, Aspergillus novofumigatus
  misc_feature: 104
ctttccttcttcccttctattcttaactctctctttctctttcttctcctttctatccctaactcttattctaacccttcttctatctcttcctct

SEQ ID NO: 14872 - DNA, 96 bp, Aspergillus novofumigatus
  misc_feature: 104
cttcttttctttcttattcttctctcttatttatttaattatgaacccttctcctctcttatcttataattaatctaatctcttttaatccttatt

SEQ ID NO: 14873 - DNA, 96 bp, Aspergillus novofumigatus
  misc_feature: 104
cttctctcttattctattaaaaatatacccttcttctctcttatattataattaatctactctctttttatccttattctctctatccctgattct

SEQ ID NO: 14874 - DNA, 96 bp, Aspergillus novofumigatus
  misc_feature: 104
cttaattttaaatccctcactcttaaactcttacttatattaatctctatctataattctttctctttcttctctttctctctttctttcttatct

SEQ ID NO: 14875 - DNA, 96 bp, Aspergillus novofumigatus
  misc_feature: 104
ctaactcttattcttattcttatctaaatcctatccctatccctatccctatccctatatgacctgaaacctaatatccctaatagtagttagtag

SEQ ID NO: 14876 - DNA, 96 bp, Aspergillus novofumigatus
  misc_feature: 104
ctaacccttattctctctcttattattatcttttattttcttttcttttctattccctttcctcttccctttcctcttccctttcttctcctattt

SEQ ID NO: 14877 - DNA, 96 bp, Aspergillus novofumigatus
  misc_feature: 104
agaagaaagaaaagaaaagaaagaagagttagatatagaaaaaagaataattagaattttagtaagagattatataagggatagagtaagggttag

SEQ ID NO: 14878 - DNA, 96 bp, Aspergillus novofumigatus
  misc_feature: 104
cctttttatctcttcttctaactcttattcttaactcctattcttattccttctctcctaaaaacttttcttctaactcttattctaactctcctt

SEQ ID NO: 14879 - DNA, 96 bp, Aspergillus novofumigatus
  misc_feature: 104
aagtttaagataagaataaggggtagaaatatataagatagagagagttttagtaaagagaagaaataaatataattaaaaatagaagaagaaagg

SEQ ID NO: 14880 - DNA, 96 bp, Aspergillus novofumigatus
  misc_feature: 104
cctctccccttattcattctttctaattcctcttatctttaaatttcttcctctaactctatctcttcttctatacttattaatccttactcttct

SEQ ID NO: 14881 - DNA, 96 bp, Aspergillus novofumigatus
  misc_feature: 104
ccctctcttctttttttaatctatctctaaatcctcttcttcctactcttcttaatctactctcttaaaatcccttcttttttcttctactatctt

SEQ ID NO: 14882 - DNA, 96 bp, Aspergillus novofumigatus
  misc_feature: 104
actctttcttcttttctttcttattcttctctcttatttatttaattatgaacccttctcctctcttatcttataattaatctaatctcttttaat

SEQ ID NO: 14883 - DNA, 96 bp, Aspergillus novofumigatus
  misc_feature: 104
atattcttcttctaatctacttattaaatcctaactttaatcctttcttctcttctctactctttcttcttttctttcttattcttctctcttatt

SEQ ID NO: 14884 - DNA, 96 bp, Aspergillus novofumigatus
  misc_feature: 104
agttaggattaggaattggttaggattaggaataagttaggattaggaatgagttaggattagggatttagtaagaggttaataggtttaaagagt

SEQ ID NO: 14885 - DNA, 96 bp, Aspergillus novofumigatus
  misc_feature: 104
aggagtagatagattagttaattaaagataggatatatataactactaataagaatagagaagatagtaatttaaaagataataataagaattact

SEQ ID NO: 14886 - DNA, 96 bp, Aspergillus novofumigatus
  misc_feature: 104
aatatcctctccccttattcattctttctaattcctcttatctttaaatttcttcctctaactctatctcttcttctatacttattaatccttact

SEQ ID NO: 14887 - DNA, 96 bp, Aspergillus novofumigatus
  misc_feature: 104
agatctcttagtattacctctctttaatatatatctctactagtctactatataaaatttataaaatatttaattatatagagttttaaaaattct

SEQ ID NO: 14888 - DNA, 96 bp, Aspergillus novofumigatus
  misc_feature: 104
aactttatccttttcttttaattttatctttccttaattttaatttcttcttctctttcttcttctctttcttcttctctttcttcttctctttct

SEQ ID NO: 14889 - DNA, 96 bp, Aspergillus novofumigatus
  misc_feature: 104
aagttagggttaggaatgagttaggattaggaatttattaggattaggaatttattaggattaggaatgagttaggattaggaattggttaggatt

SEQ ID NO: 14890 - DNA, 96 bp, Aspergillus novofumigatus
  misc_feature: 104
aatccctcttatcttgaaatttcttactctaatactatctctttttttctaatcttctctctttctaccctttctaactccctctcttcttttttt

SEQ ID NO: 14891 - DNA, 96 bp, Aspergillus novofumigatus
  misc_feature: 103
tttttttacttcttatatatcttatattcttcttctaatctacttattaaatcctaactttaatcctttcttctcttctctactctttcttctttt

SEQ ID NO: 14892 - DNA, 96 bp, Aspergillus novofumigatus
  misc_feature: 103
tttttttaatctatctctaaatcctcttcttcctactcttcttaatctactctcttaaaatcccttcttttttcttctactatctttctttaatct

SEQ ID NO: 14893 - DNA, 96 bp, Aspergillus novofumigatus
  misc_feature: 103
ttttctaatcttctctctttctaccctttctaactccctctcttctttttttaatctatctctaaatcctcttcttcctactcttcttaatctact

SEQ ID NO: 14894 - DNA, 96 bp, Aspergillus novofumigatus
  misc_feature: 103
ttttacttcttatatatcttatattcttcttctaatctacttattaaatcctaactttaatcctttcttctcttctctactctttcttcttttctt

SEQ ID NO: 14895 - DNA, 96 bp, Aspergillus novofumigatus
  misc_feature: 103
ttttaaataatcctattctataaaagaagctagattatcctattatatatagaatattatagctctatagctataatattttaataagtctatatt

SEQ ID NO: 14896 - DNA, 96 bp, Aspergillus novofumigatus
  misc_feature: 103
gtaagtttaagataagaataaggggtagaaatatataagatagagagagttttagtaaagagaagaaataaatataattaaaaatagaagaagaaa

SEQ ID NO: 14897 - DNA, 96 bp, Aspergillus novofumigatus
  misc_feature: 103
gagaagaaataaatataattaaaaatagaagaagaaagggaagaggaaagggaagaggaaaggaaagaggaaagggaagaggaaagggaatagaaa

SEQ ID NO: 14898 - DNA, 96 bp, Aspergillus novofumigatus
  misc_feature: 103
tttaagataagaataaggggtagaaatatataagatagagagagttttagtaaagagaagaaataaatataattaaaaatagaagaagaaagggaa

SEQ ID NO: 14899 - DNA, 96 bp, Aspergillus novofumigatus
  misc_feature: 103
tttaactttatccttttcttttaattttatctttccttaattttaatttcttcttctctttcttcttctctttcttcttctctttcttcttctctt

SEQ ID NO: 14900 - DNA, 96 bp, Aspergillus novofumigatus
  misc_feature: 103
aatgagttaggattaggaattggttaggattaggaataagttaggattaggaatgagttaggattagggatttagtaagaggttaataggtttaaa

SEQ ID NO: 14901 - DNA, 96 bp, Aspergillus novofumigatus
  misc_feature: 103
agaccagcaggaagaacccagtaagataggtagtatagtagatagtaaggcaggcagtgaagcaggtagtaaggcaggtagtaaggcaggcagcaa

SEQ ID NO: 14902 - DNA, 96 bp, Aspergillus novofumigatus
  misc_feature: 103
ttcttcttctctttcttcttattcttcttattcttcctctctttcttaccctttacttaaactctttctatcttatctatctttaccttctattct

SEQ ID NO: 14903 - DNA, 96 bp, Aspergillus novofumigatus
  misc_feature: 103
agagaagaaataaatataattaaaaatagaagaagaaagggaagaggaaagggaagaggaaaggaaagaggaaagggaagaggaaagggaatagaa

SEQ ID NO: 14904 - DNA, 96 bp, Aspergillus novofumigatus
  misc_feature: 103
ttattctatctctctcttactccctctctcctctatctcttcttaatctcctctcttatcccttctaatctaaatccttacccttactcttattat

SEQ ID NO: 14905 - DNA, 96 bp, Aspergillus novofumigatus
  misc_feature: 103
ttatatatcttatattcttcttctaatctacttattaaatcctaactttaatcctttcttctcttctctactctttcttcttttctttcttattct

SEQ ID NO: 14906 - DNA, 96 bp, Aspergillus novofumigatus
  misc_feature: 103
ttagtattagatatattttattaatagagtttaagaagtatagtatactttaatatatattatttttagaatttcttctaaagtttagtatatact

SEQ ID NO: 14907 - DNA, 96 bp, Aspergillus novofumigatus
  misc_feature: 103
cttcttaatctactctcttaaaatcccttcttttttcttctactatctttctttaatctcttaaaccctttacctctctctactctaaattactaa

SEQ ID NO: 14908 - DNA, 96 bp, Aspergillus novofumigatus
  misc_feature: 103
taacccctaatatcctctccccttattcattctttctaattcctcttatctttaaatttcttcctctaactctatctcttcttctatacttattaa

SEQ ID NO: 14909 - DNA, 96 bp, Aspergillus novofumigatus
  misc_feature: 103
ttaaacctattaacctcttactaaatccctaatcctaacttattcctaatcctaataaattcctaatcctataaattatctcttattctacctaat

SEQ ID NO: 14910 - DNA, 96 bp, Aspergillus novofumigatus
  misc_feature: 103
aagataataataagaattactttatatatatatatttatatgtaagtatataagaaggataatttatatagattagtttagtagtttagattttaa

SEQ ID NO: 14911 - DNA, 96 bp, Aspergillus novofumigatus
  misc_feature: 103
ttaaaagataataataagaattactttatatatatatatttatatgtaagtatataagaaggataatttatatagattagtttagtagtttagatt

SEQ ID NO: 14912 - DNA, 96 bp, Aspergillus novofumigatus
  misc_feature: 103
tgggaactactaactactattagggatattaggtttcaggtcatatagggatagggatagggatagggataggatttagataagaataagaataag

SEQ ID NO: 14913 - DNA, 96 bp, Aspergillus novofumigatus
  misc_feature: 103
agtaagaccagcaggaagaacccagtaagataggtagtatagtagatagtaaggcaggcagtgaagcaggtagtaaggcaggtagtaaggcaggca

SEQ ID NO: 14914 - DNA, 96 bp, Aspergillus novofumigatus
  misc_feature: 103
tgagttaggattaggaattggttaggattaggaataagttaggattaggaatgagttaggattagggatttagtaagaggttaataggtttaaaga

SEQ ID NO: 14915 - DNA, 96 bp, Aspergillus novofumigatus
  misc_feature: 103
tcttcttttctttcttattcttctctcttatttatttaattatgaacccttctcctctcttatcttataattaatctaatctcttttaatccttat

SEQ ID NO: 14916 - DNA, 96 bp, Aspergillus novofumigatus
  misc_feature: 103
tagtaagtttaagataagaataaggggtagaaatatataagatagagagagttttagtaaagagaagaaataaatataattaaaaatagaagaaga

SEQ ID NO: 14917 - DNA, 96 bp, Aspergillus novofumigatus
  misc_feature: 103
tcttcttaatctactctcttaaaatcccttcttttttcttctactatctttctttaatctcttaaaccctttacctctctctactctaaattacta

SEQ ID NO: 14918 - DNA, 96 bp, Aspergillus novofumigatus
  misc_feature: 103
tcttcttaaactatatctctctttttaaattatctccctttctactcttattactccttcttctctcctcttaatctatccctaaattctctttta

SEQ ID NO: 14919 - DNA, 96 bp, Aspergillus novofumigatus
  misc_feature: 103
tcttctctcttattctattaaaaatatacccttcttctctcttatattataattaatctactctctttttatccttattctctctatccctgattc

SEQ ID NO: 14920 - DNA, 96 bp, Aspergillus novofumigatus
  misc_feature: 103
tcttctatctacacttactaccccttactcttattctatttcttactctccttctaactatcctaacctctcctaatctcttcttctatctcttct

SEQ ID NO: 14921 - DNA, 96 bp, Aspergillus novofumigatus
  misc_feature: 103
tcttatatatcttatattcttcttctaatctacttattaaatcctaactttaatcctttcttctcttctctactctttcttcttttctttcttatt

SEQ ID NO: 14922 - DNA, 96 bp, Aspergillus novofumigatus
  misc_feature: 103
atatataactactaataagaatagagaagatagtaatttaaaagataataataagaattactttatatatatatatttatatgtaagtatataaga

SEQ ID NO: 14923 - DNA, 96 bp, Aspergillus novofumigatus
  misc_feature: 103
tcttaatctactaatattactacctctcttactacttaccttactattaaccttactatctactatgatatttatattactatctaccttattacc

SEQ ID NO: 14924 - DNA, 96 bp, Aspergillus novofumigatus
  misc_feature: 103
gaagaaattctaaaaataatatatattaaagtatactatacttcttaaactctattaataaaatatatctaatactaaactagaaatatattaaga

SEQ ID NO: 14925 - DNA, 96 bp, Aspergillus novofumigatus
  misc_feature: 103
tctctttctaccctttctaactccctctcttctttttttaatctatctctaaatcctcttcttcctactcttcttaatctactctcttaaaatccc

SEQ ID NO: 14926 - DNA, 96 bp, Aspergillus novofumigatus
  misc_feature: 103
tctcttctttttttaatctatctctaaatcctcttcttcctactcttcttaatctactctcttaaaatcccttcttttttcttctactatctttct

SEQ ID NO: 14927 - DNA, 96 bp, Aspergillus novofumigatus
  misc_feature: 103
tctccccttattcattctttctaattcctcttatctttaaatttcttcctctaactctatctcttcttctatacttattaatccttactcttctta

SEQ ID NO: 14928 - DNA, 96 bp, Aspergillus novofumigatus
  misc_feature: 103
gtatataaattatagctaagattatataatataagcttgctatattaattagtatattattatataactataagctagtgtctaatttagactaga

SEQ ID NO: 14929 - DNA, 96 bp, Aspergillus novofumigatus
  misc_feature: 103
tctaatcttctctctttctaccctttctaactccctctcttctttttttaatctatctctaaatcctcttcttcctactcttcttaatctactctc

SEQ ID NO: 14930 - DNA, 96 bp, Aspergillus novofumigatus
  misc_feature: 103
gtggaataaggatatagggaaggataagattagggttaggagtaggattaggataaggataagggttagggtattagtaagaattagtaatttaga

SEQ ID NO: 14931 - DNA, 96 bp, Aspergillus novofumigatus
  misc_feature: 103
aattataagataagagaggagaagggttcataattaaataaataagagagaagaataagaaagaaaagaagaaagagtagagaagagaagaaagga

SEQ ID NO: 14932 - DNA, 96 bp, Aspergillus novofumigatus
  misc_feature: 103
atgagttaggattaggaataagttagggttaggaatgagttaggattaggaatttattaggattaggaatttattaggattaggaatgagttagga

SEQ ID NO: 14933 - DNA, 96 bp, Aspergillus novofumigatus
  misc_feature: 103
tatttctaccccttattcttatcttaaacttactaacccttactctattacttatccttccttactttattctccttactacctcttaccttctat

SEQ ID NO: 14934 - DNA, 96 bp, Aspergillus novofumigatus
  misc_feature: 103
tattcttttttctatatctgactcttctttcttttcttttctttcttcttttctctttcttttctatctattatcttcttactatctaacccttac

SEQ ID NO: 14935 - DNA, 96 bp, Aspergillus novofumigatus
  misc_feature: 103
tattctataagactaatatatatattaagatttataatatttactagaaacttaatctttataattattataagcttatcctctatagctattata

SEQ ID NO: 14936 - DNA, 96 bp, Aspergillus novofumigatus
  misc_feature: 103
tattaggattaggaatttattaggattaggaatgagttaggattaggaattggttaggattaggaataagttaggattaggaatgagttaggatta

SEQ ID NO: 14937 - DNA, 96 bp, Aspergillus novofumigatus
  misc_feature: 103
agtatataagaaggataatttatatagattagtttagtagtttagattttaatatatataaagggtttataattaaatattaccttagaagagata

SEQ ID NO: 14938 - DNA, 96 bp, Aspergillus novofumigatus
  misc_feature: 103
tatcctctccccttattcattctttctaattcctcttatctttaaatttcttcctctaactctatctcttcttctatacttattaatccttactct

SEQ ID NO: 14939 - DNA, 96 bp, Aspergillus novofumigatus
  misc_feature: 103
tatactctatatcctactatttaggtatttactaaagtctatctctttattataattataagtattattattttatttattactataataaatata

SEQ ID NO: 14940 - DNA, 96 bp, Aspergillus novofumigatus
  misc_feature: 103
tatatatcttatattcttcttctaatctacttattaaatcctaactttaatcctttcttctcttctctactctttcttcttttctttcttattctt

SEQ ID NO: 14941 - DNA, 96 bp, Aspergillus novofumigatus
  misc_feature: 103
gatatatataactactaataagaatagagaagatagtaatttaaaagataataataagaattactttatatatatatatttatatgtaagtatata

SEQ ID NO: 14942 - DNA, 96 bp, Aspergillus novofumigatus
  misc_feature: 103
tatataaattatagctaagattatataatataagcttgctatattaattagtatattattatataactataagctagtgtctaatttagactagag

SEQ ID NO: 14943 - DNA, 96 bp, Aspergillus novofumigatus
  misc_feature: 103
gatagattagttaattaaagataggatatatataactactaataagaatagagaagatagtaatttaaaagataataataagaattactttatata

SEQ ID NO: 14944 - DNA, 96 bp, Aspergillus novofumigatus
  misc_feature: 103
aatacttagtatactctatatcctactatttaggtatttactaaagtctatctctttattataattataagtattattattttatttattactata

SEQ ID NO: 14945 - DNA, 96 bp, Aspergillus novofumigatus
  misc_feature: 103
tagtattattatataatattattcttatttttcttatagtaaattaattactatactatatttacctagtatatttatatctactaataagttagc

SEQ ID NO: 14946 - DNA, 96 bp, Aspergillus novofumigatus
  misc_feature: 103
ctttaaacctattaacctcttactaaatccctaatcctaacttattcctaatcctaataaattcctaatcctataaattatctcttattctaccta

SEQ ID NO: 14947 - DNA, 96 bp, Aspergillus novofumigatus
  misc_feature: 103
taggatatatataactactaataagaatagagaagatagtaatttaaaagataataataagaattactttatatatatatatttatatgtaagtat

SEQ ID NO: 14948 - DNA, 96 bp, Aspergillus novofumigatus
  misc_feature: 103
cttattcttctctcttatttatttaattatgaacccttctcctctcttatcttataattaatctaatctcttttaatccttattctctctatccta

SEQ ID NO: 14949 - DNA, 96 bp, Aspergillus novofumigatus
  misc_feature: 103
actcttacttatattaatctctatctataattctttctctttcttctctttctctctttctttcttatctctctaactctaaatatcctcttccta

SEQ ID NO: 14950 - DNA, 96 bp, Aspergillus novofumigatus
  misc_feature: 103
agttctatatctattctataagactaatatatatattaagatttataatatttactagaaacttaatctttataattattataagcttatcctcta

SEQ ID NO: 14951 - DNA, 96 bp, Aspergillus novofumigatus
  misc_feature: 103
atatttctaccccttattcttatcttaaacttactaacccttactctattacttatccttccttactttattctccttactacctcttaccttcta

SEQ ID NO: 14952 - DNA, 96 bp, Aspergillus novofumigatus
  misc_feature: 103
ctcttttttcttctccctttttatctcttctctctatttctctcttaattcttactctatctcttactttacctctttctctatctctctcttcta

SEQ ID NO: 14953 - DNA, 96 bp, Aspergillus novofumigatus
  misc_feature: 103
attctaacccttaccttaatatattaataatttctattttattcctaacccttattctctctcttattattatcttttattttcttttcttttcta

SEQ ID NO: 14954 - DNA, 96 bp, Aspergillus novofumigatus
  misc_feature: 103
gttaggattaggaattggttaggattaggaataagttaggattaggaatgagttaggattagggatttagtaagaggttaataggtttaaagagta

SEQ ID NO: 14955 - DNA, 96 bp, Aspergillus novofumigatus
  misc_feature: 103
tactctatctcttactttacctctttctctatctctctcttctatctacacttactaccccttactcttattctatttcttactctccttctaact

SEQ ID NO: 14956 - DNA, 96 bp, Aspergillus novofumigatus
  misc_feature: 103
tactatctctttttttctaatcttctctctttctaccctttctaactccctctcttctttttttaatctatctctaaatcctcttcttcctactct

SEQ ID NO: 14957 - DNA, 96 bp, Aspergillus novofumigatus
  misc_feature: 103
taattcttcttctaaccctttttatctcttcttctaactcttattcttaactcctattcttattccttctctcctaaaaacttttcttctaactct

SEQ ID NO: 14958 - DNA, 96 bp, Aspergillus novofumigatus
  misc_feature: 103
gaaaagaaaagaaagaagagatagatatagaaaaaagaataattagaattttagtaagagattagataagggatagagtaagggttagtataatta

SEQ ID NO: 14959 - DNA, 96 bp, Aspergillus novofumigatus
  misc_feature: 103
taattataagataagagaggagaagggttcataattaaataaataagagagaagaataagaaagaaaagaagaaagagtagagaagagaagaaagg

SEQ ID NO: 14960 - DNA, 96 bp, Aspergillus novofumigatus
  misc_feature: 103
taatctcttactaaaattctaattattcttttttctatatctatctcttctttcttttcttttctttcttctttcctctttcttttctatctatta

SEQ ID NO: 14961 - DNA, 96 bp, Aspergillus novofumigatus
  misc_feature: 103
agttaggattaggaataagttagggttaggaatgagttaggattaggaatttattaggattaggaatttattaggattaggaatgagttaggatta

SEQ ID NO: 14962 - DNA, 96 bp, Aspergillus novofumigatus
  misc_feature: 103
taagtttaagataagaataaggggtagaaatatataagatagagagagttttagtaaagagaagaaataaatataattaaaaatagaagaagaaag

SEQ ID NO: 14963 - DNA, 96 bp, Aspergillus novofumigatus
  misc_feature: 103
taacttaattttaaatccctcactcttaaactcttacttatattaatctctatctataattctttctctttcttctctttctctctttctttctta

SEQ ID NO: 14964 - DNA, 96 bp, Aspergillus novofumigatus
  misc_feature: 103
taactcttattcttaactcctattcttattccttctctcctaaaaacttttcttctaactcttattctaactctccttcttattattccttactct

SEQ ID NO: 14965 - DNA, 96 bp, Aspergillus novofumigatus
  misc_feature: 103
agtagatagattagttaattaaagataggatatatataactactaataagaatagagaagatagtaatttaaaagataataataagaattacttta

SEQ ID NO: 14966 - DNA, 96 bp, Aspergillus novofumigatus
  misc_feature: 103
taaaactaacccctaatatcctctccccttattcattctttctaattcctcttatctttaaatttcttcctctaactctatctcttcttctatact

SEQ ID NO: 14967 - DNA, 96 bp, Aspergillus novofumigatus
  misc_feature: 103
atccctcttatcttgaaatttcttactctaatactatctctttttttctaatcttctctctttctaccctttctaactccctctcttcttttttta

SEQ ID NO: 14968 - DNA, 96 bp, Aspergillus novofumigatus
  misc_feature: 103
gttggctgaatctgtggtttatatgcaggcatatatatataaataagacatcagagaatacatataatattaaccacattcaggagagaagtaggc

SEQ ID NO: 14969 - DNA, 96 bp, Aspergillus novofumigatus
  misc_feature: 103
aattctaaaaataatatatattaaagtatactatacttcttaaactctattaataaaatatatctaatactaaactagaaatatattaagatatac

SEQ ID NO: 14970 - DNA, 96 bp, Aspergillus novofumigatus
  misc_feature: 103
gtaaagagaagaaataaatataattaaaaatagaagaagaaagggaagaggaaagggaagaggaaaggaaagaggaaagggaagaggaaagggaat

SEQ ID NO: 14971 - DNA, 96 bp, Aspergillus novofumigatus
  misc_feature: 103
gggttagtaagtttaagataagaataaggggtagaaatatataagatagagagagttttagtaaagagaagaaataaatataattaaaaatagaag

SEQ ID NO: 14972 - DNA, 96 bp, Aspergillus novofumigatus
  misc_feature: 103
ggcccttttaaataatcctattctataaaagaagctagattatcctattatatatagaatattatagctctatagctataatattttaataagtct

SEQ ID NO: 14973 - DNA, 96 bp, Aspergillus novofumigatus
  misc_feature: 103
ctctaatactatctctttttttctaatcttctctctttctaccctttctaactccctctcttctttttttaatctatctctaaatcctcttcttcc

SEQ ID NO: 14974 - DNA, 96 bp, Aspergillus novofumigatus
  misc_feature: 103
gattaggaatttattaggattaggaatgagttaggattaggaattggttaggattaggaataagttaggattaggaatgagttaggattagggatt

SEQ ID NO: 14975 - DNA, 96 bp, Aspergillus novofumigatus
  misc_feature: 103
atactatctctttttttctaatcttctctctttctaccctttctaactccctctcttctttttttaatctatctctaaatcctcttcttcctactc

SEQ ID NO: 14976 - DNA, 96 bp, Aspergillus novofumigatus
  misc_feature: 103
gagtagatagattagttaattaaagataggatatatataactactaataagaatagagaagatagtaatttaaaagataataataagaattacttt

SEQ ID NO: 14977 - DNA, 96 bp, Aspergillus novofumigatus
  misc_feature: 103
atagttctatatctattctataagactaatatatatattaagatttataatatttactagaaacttaatctttataattattataagcttatcctc

SEQ ID NO: 14978 - DNA, 96 bp, Aspergillus novofumigatus
  misc_feature: 103
ctttctatcttcattctaaatcctctctcttcctaaatccttctaaatccttattttcctatatctatctatctctactcttattaacccttcctc

SEQ ID NO: 14979 - DNA, 96 bp, Aspergillus novofumigatus
  misc_feature: 103
ctttttatctcttcttctaactcttattcttaactcctattcttattccttctctcctaaaaacttttcttctaactcttattctaactctccttc

SEQ ID NO: 14980 - DNA, 96 bp, Aspergillus novofumigatus
  misc_feature: 103
ctctatcccttatataatctcttactaaaattctaattattcttttttctatatctgactcttctttcttttcttttctttcttcttttctctttc

SEQ ID NO: 14981 - DNA, 96 bp, Aspergillus novofumigatus
  misc_feature: 103
ctttttttacttcttatatatcttatattcttcttctaatctacttattaaatcctaactttaatcctttcttctcttctctactctttcttcttt

SEQ ID NO: 14982 - DNA, 96 bp, Aspergillus novofumigatus
  misc_feature: 103
cttttaaataatcctattctataaaagaagctagattatcctattatatatagaatattatagctctatagctataatattttaataagtctatat

SEQ ID NO: 14983 - DNA, 96 bp, Aspergillus novofumigatus
  misc_feature: 103
ctttcttattcttctctcttatttatttaattatgaacccttctcctctcttatcttataattaatctaatctcttttaatccttattctctctat

SEQ ID NO: 14984 - DNA, 96 bp, Aspergillus novofumigatus
  misc_feature: 103
cttcttctctttcttcttattcttcttattcttcctctctttcttaccctttacttaaactctttctatcttatctatctttaccttctattcttt

SEQ ID NO: 14985 - DNA, 96 bp, Aspergillus novofumigatus
  misc_feature: 103
cttaatctactaatattactacctctcttactacttaccttactattaaccttactatctactatgatatttatattactatctaccttattacct

SEQ ID NO: 14986 - DNA, 96 bp, Aspergillus novofumigatus
  misc_feature: 103
agaagaaattctaaaaataatatatattaaagtatactatacttcttaaactctattaataaaatatatctaatactaaactagaaatatattaag

SEQ ID NO: 14987 - DNA, 96 bp, Aspergillus novofumigatus
  misc_feature: 103
ctctttctaccctttctaactccctctcttctttttttaatctatctctaaatcctcttcttcctactcttcttaatctactctcttaaaatccct

SEQ ID NO: 14988 - DNA, 96 bp, Aspergillus novofumigatus
  misc_feature: 103
ctctactctttcttcttttctttcttattcttctctcttatttatttaattatgaacccttctcctctcttatcttataattaatctaatctcttt

SEQ ID NO: 14989 - DNA, 96 bp, Aspergillus novofumigatus
  misc_feature: 103
ctctactctttcttctttccttttttaatcttctctcttattctattaaaaatatacccttcttctctcttatattataattaatctactctcttt

SEQ ID NO: 14990 - DNA, 96 bp, Aspergillus novofumigatus
  misc_feature: 103
ctattcttaactctctctttctctttcttctcctttctatccctaactcttattctaacccttcttctatctcttcctctaatcctccttctaatt

SEQ ID NO: 14991 - DNA, 96 bp, Aspergillus novofumigatus
  misc_feature: 103
ctatcttcattctaaatcctctctcttcctaaatccttctaaatccttattttcctatatctatctatctctactcttattaacccttcctcctct

SEQ ID NO: 14992 - DNA, 96 bp, Aspergillus novofumigatus
  misc_feature: 103
ctatcccttatataatctcttactaaaattctaattattcttttttctatatctgactcttctttcttttcttttctttcttcttttctctttctt

SEQ ID NO: 14993 - DNA, 96 bp, Aspergillus novofumigatus
  misc_feature: 103
ccttctccctttttttacttcttatatatcttatattcttcttctaatctacttattaaatcctaactttaatcctttcttctcttctctactctt

SEQ ID NO: 14994 - DNA, 96 bp, Aspergillus novofumigatus
  misc_feature: 103
cctctcttctttttttaatctatctctaaatcctcttcttcctactcttcttaatctactctcttaaaatcccttcttttttcttctactatcttt

SEQ ID NO: 14995 - DNA, 96 bp, Aspergillus novofumigatus
  misc_feature: 103
attctaaaaataatatatattaaagtatactatacttcttaaactctattaataaaatatatctaatactaaactagaaatatattaagatatact

SEQ ID NO: 14996 - DNA, 96 bp, Aspergillus novofumigatus
  misc_feature: 103
ataagagtaagggtttagtttaggggagagttagggagagatagaaggggagatagagggagagatagaagaaggattagaagaagagtaaggaat

SEQ ID NO: 14997 - DNA, 96 bp, Aspergillus novofumigatus
  misc_feature: 103
atataagaaggataatttatatagattagtttagtagtttagattttaatatatataaagggtttataattaaatattaccttagaagagatagat

SEQ ID NO: 14998 - DNA, 96 bp, Aspergillus novofumigatus
  misc_feature: 103
atattaacttaattttaaatccctcactcttaaactcttacttatattaatctctatctataattctttctctttcttctctttctctctttcttt

SEQ ID NO: 14999 - DNA, 96 bp, Aspergillus novofumigatus
  misc_feature: 103
atataaattatagctaagattatataatataagcttgctatattaattagtatattattatataactataagctagtgtctaatttagactagagt

SEQ ID NO: 15000 - DNA, 96 bp, Aspergillus novofumigatus
  misc_feature: 103
agctggtttatttaatttactactactatatttaaaaagtttatatcttatatataggagatagtatctataaattatattattataatcctctat

SEQ ID NO: 15001 - DNA, 96 bp, Aspergillus novofumigatus
  misc_feature: 103
ataagactaatatatatattaagatttataatatttactagaaacttaatctttataattattataagcttatcctctatagctattatactaagt

SEQ ID NO: 15002 - DNA, 96 bp, Aspergillus novofumigatus
  misc_feature: 103
aacttaattttaaatccctcactcttaaactcttacttatattaatctctatctataattctttctctttcttctctttctctctttctttcttat

SEQ ID NO: 15003 - DNA, 96 bp, Aspergillus novofumigatus
  misc_feature: 103
agtattattatataatattattcttatttttcttatagtaaattaattactatactatatttacctagtatatttatatctactaataagttagct

SEQ ID NO: 15004 - DNA, 96 bp, Aspergillus novofumigatus
  misc_feature: 103
aggaatttattaggattaggaatgagttaggattaggaattggttaggattaggaataagttaggattaggaatgagttaggattagggatttagt

SEQ ID NO: 15005 - DNA, 96 bp, Aspergillus novofumigatus
  misc_feature: 103
aggaatgagttaggattaggaattggttaggattaggaataagttaggattaggaatgagttaggattagggatttagtaagaggttaataggttt

SEQ ID NO: 15006 - DNA, 96 bp, Aspergillus novofumigatus
  misc_feature: 103
actcttcttaaactatatctctctttttaaattatctccctttctactcttattactccttcttctctcctcttaatctatccctaaattctcttt

SEQ ID NO: 15007 - DNA, 96 bp, Aspergillus novofumigatus
  misc_feature: 103
aaaagaagaaagaaaagaaaagaaagaagagttagatatagaaaaaagaataattagaattttagtaagagattatataagggatagagtaagggt

SEQ ID NO: 15008 - DNA, 96 bp, Aspergillus novofumigatus
  misc_feature: 103
aattcttcttctaaccctttttatctcttcttctaactcttattcttaactcctattcttattccttctctcctaaaaacttttcttctaactctt

SEQ ID NO: 15009 - DNA, 96 bp, Aspergillus novofumigatus
  misc_feature: 103
aacccttattctctctcttattattatcttttattttcttttcttttctattccctttcctcttccctttcctcttccctttcttctcctattttt

SEQ ID NO: 15010 - DNA, 96 bp, Aspergillus novofumigatus
  misc_feature: 103
aaattagacactagcttatagttatataataatatactaattaatatagcaagcttatattatataatcttagctataatttatataccccctttt

SEQ ID NO: 15011 - DNA, 96 bp, Aspergillus novofumigatus
  misc_feature: 102
ttttttacttcttatatatcttatattcttcttctaatctacttattaaatcctaactttaatcctttcttctcttctctactctttcttcttttc

SEQ ID NO: 15012 - DNA, 96 bp, Aspergillus novofumigatus
  misc_feature: 102
agaagaaataaatataattaaaaatagaagaagaaagggaagaggaaagggaagaggaaaggaaagaggaaagggaagaggaaagggaatagaaaa

SEQ ID NO: 15013 - DNA, 96 bp, Aspergillus novofumigatus
  misc_feature: 102
tttattaggattaggaatgagttaggattaggaattggttaggattaggaataagttaggattaggaatgagttaggattagggatttagtaagag

SEQ ID NO: 15014 - DNA, 96 bp, Aspergillus novofumigatus
  misc_feature: 102
tttagtattagatatattttattaatagagtttaagaagtatagtatactttaatatatattatttttagaatttcttctaaagtttagtatatac

SEQ ID NO: 15015 - DNA, 96 bp, Aspergillus novofumigatus
  misc_feature: 102
tttacttcttatatatcttatattcttcttctaatctacttattaaatcctaactttaatcctttcttctcttctctactctttcttcttttcttt

SEQ ID NO: 15016 - DNA, 96 bp, Aspergillus novofumigatus
  misc_feature: 102
tttaaaagataataataagaattactttatatatatatatttatatgtaagtatataagaaggataatttatatagattagtttagtagtttagat

SEQ ID NO: 15017 - DNA, 96 bp, Aspergillus novofumigatus
  misc_feature: 102
ttggctgaatctgtggtttatatgcaggcatatatatataaataagacatcagagaatacatataatattaaccacattcaggagagaagtaggca

SEQ ID NO: 15018 - DNA, 96 bp, Aspergillus novofumigatus
  misc_feature: 102
agtaagtttaagataagaataaggggtagaaatatataagatagagagagttttagtaaagagaagaaataaatataattaaaaatagaagaagaa

SEQ ID NO: 15019 - DNA, 96 bp, Aspergillus novofumigatus
  misc_feature: 102
ttcttcttctaatctacttattaaatcctaactttaatcctttcttctcttctctactctttcttcttttctttcttattcttctctcttatttat

SEQ ID NO: 15020 - DNA, 96 bp, Aspergillus novofumigatus
  misc_feature: 102
ttcttatatatcttatattcttcttctaatctacttattaaatcctaactttaatcctttcttctcttctctactctttcttcttttctttcttat

SEQ ID NO: 15021 - DNA, 96 bp, Aspergillus novofumigatus
  misc_feature: 102
ttcttaaactatatctctctttttaaattatctccctttctactcttattactccttcttctctcctcttaatctatccctaaattctcttttacc

SEQ ID NO: 15022 - DNA, 96 bp, Aspergillus novofumigatus
  misc_feature: 102
ttctctcttattctattaaaaatatacccttcttctctcttatattataattaatctactctctttttatccttattctctctatccctgattctc

SEQ ID NO: 15023 - DNA, 96 bp, Aspergillus novofumigatus
  misc_feature: 102
ttctatctacacttactaccccttactcttattctatttcttactctccttctaactatcctaacctctcctaatctcttcttctatctcttcttc

SEQ ID NO: 15024 - DNA, 96 bp, Aspergillus novofumigatus
  misc_feature: 102
ttctaactccctctcttctttttttaatctatctctaaatcctcttcttcctactcttcttaatctactctcttaaaatcccttcttttttcttct

SEQ ID NO: 15025 - DNA, 96 bp, Aspergillus novofumigatus
  misc_feature: 102
gtgggaactactaactactattagggatattaggtttcaggtcatatagggatagggatagggatagggataggatttagataagaataagaataa

SEQ ID NO: 15026 - DNA, 96 bp, Aspergillus novofumigatus
  misc_feature: 102
atattagtgggaactactaactactattagggatattaggtttcaggtcatatagggatagggatagggatagggataggatttagataagaataa

SEQ ID NO: 15027 - DNA, 96 bp, Aspergillus novofumigatus
  misc_feature: 102
aagagtaagggtttagtttaggggagagttagggagagatagaaggggagatagagggagagatagaagaaggattagaagaagagtaaggaataa

SEQ ID NO: 15028 - DNA, 96 bp, Aspergillus novofumigatus
  misc_feature: 102
ttaggtaaaggcccttttaaataatcctattctataaaagaagctagattatcctattatatatagaatattatagctctatagctataatatttt

SEQ ID NO: 15029 - DNA, 96 bp, Aspergillus novofumigatus
  misc_feature: 102
ttaggattaggaattggttaggattaggaataagttaggattaggaatgagttaggattagggatttagtaagaggttaataggtttaaagagtat

SEQ ID NO: 15030 - DNA, 96 bp, Aspergillus novofumigatus
  misc_feature: 102
ttaggattaggaatgagttaggattaggaattggttaggattaggaataagttaggattaggaatgagttaggattagggatttagtaagaggtta

SEQ ID NO: 15031 - DNA, 96 bp, Aspergillus novofumigatus
  misc_feature: 102
ttaggaatgagttaggattaggaattggttaggattaggaataagttaggattaggaatgagttaggattagggatttagtaagaggttaataggt

SEQ ID NO: 15032 - DNA, 96 bp, Aspergillus novofumigatus
  misc_feature: 102
agagaaaagaagaaagaaaagaaaagaaagaagagttagatatagaaaaaagaataattagaattttagtaagagattatataagggatagagtaa

SEQ ID NO: 15033 - DNA, 96 bp, Aspergillus novofumigatus
  misc_feature: 102
ttactctaatactatctctttttttctaatcttctctctttctaccctttctaactccctctcttctttttttaatctatctctaaatcctcttct

SEQ ID NO: 15034 - DNA, 96 bp, Aspergillus novofumigatus
  misc_feature: 102
tagaagaaattctaaaaataatatatattaaagtatactatacttcttaaactctattaataaaatatatctaatactaaactagaaatatattaa

SEQ ID NO: 15035 - DNA, 96 bp, Aspergillus novofumigatus
  misc_feature: 102
taggattaggaatgagttaggattaggaattggttaggattaggaataagttaggattaggaatgagttaggattagggatttagtaagaggttaa

SEQ ID NO: 15036 - DNA, 96 bp, Aspergillus novofumigatus
  misc_feature: 102
tactctttcttcttttctttcttattcttctctcttatttatttaattatgaacccttctcctctcttatcttataattaatctaatctcttttaa

SEQ ID NO: 15037 - DNA, 96 bp, Aspergillus novofumigatus
  misc_feature: 102
cctgccggtcctcgccggcgccggccccccggtccctatgacggtgcgcgcgcgcgcggctctctgctcgctacgagcgcgcgcgccccggcccca

SEQ ID NO: 15038 - DNA, 96 bp, Aspergillus novofumigatus
  misc_feature: 102
tcttctctcttatttatttaattatgaacccttctcctctcttatcttataattaatctaatctcttttaatccttattctctctatcctaaattc

SEQ ID NO: 15039 - DNA, 96 bp, Aspergillus novofumigatus
  misc_feature: 102
taagggtttagtttaggggagagttagggagagatagaaggggagatagagggagagatagaagaaggattagaagaagagtaaggaataataaga

SEQ ID NO: 15040 - DNA, 96 bp, Aspergillus novofumigatus
  misc_feature: 102
taagagtaagggtaaggatttagattagaagggataagagaggagattaagaagagatagaataagagatagataagagatagaataagagtaaga

SEQ ID NO: 15041 - DNA, 96 bp, Aspergillus novofumigatus
  misc_feature: 102
atttattaggattaggaatgagttaggattaggaattggttaggattaggaataagttaggattaggaatgagttaggattagggatttagtaaga

SEQ ID NO: 15042 - DNA, 96 bp, Aspergillus novofumigatus
  misc_feature: 102
tcttaaactatatctctctttttaaattatctccctttctactcttattactccttcttctctcctcttaatctatccctaaattctcttttacct

SEQ ID NO: 15043 - DNA, 96 bp, Aspergillus novofumigatus
  misc_feature: 102
tctctctttctaccctttctaactccctctcttctttttttaatctatctctaaatcctcttcttcctactcttcttaatctactctcttaaaatc

SEQ ID NO: 15044 - DNA, 96 bp, Aspergillus novofumigatus
  misc_feature: 102
tctctactctttcttctttccttttttaatcttctctcttattctattaaaaatatacccttcttctctcttatattataattaatctactctctt

SEQ ID NO: 15045 - DNA, 96 bp, Aspergillus novofumigatus
  misc_feature: 102
tatataagaaggataatttatatagattagtttagtagtttagattttaatatatataaagggtttataattaaatattaccttagaagagataga

SEQ ID NO: 15046 - DNA, 96 bp, Aspergillus novofumigatus
  misc_feature: 102
tctatctacacttactaccccttactcttattctatttcttactctccttctaactatcctaacctctcctaatctcttcttctatctcttcttct

SEQ ID NO: 15047 - DNA, 96 bp, Aspergillus novofumigatus
  misc_feature: 102
tctatcccttatctaatctcttactaaaattctaattattcttttttctatatctatctcttctttcttttcttttctttcttctttcctctttct

SEQ ID NO: 15048 - DNA, 96 bp, Aspergillus novofumigatus
  misc_feature: 102
tctactctttcttctttccttttttaatcttctctcttattctattaaaaatatacccttcttctctcttatattataattaatctactctctttt

SEQ ID NO: 15049 - DNA, 96 bp, Aspergillus novofumigatus
  misc_feature: 102
tctaatctcttactaaaattctaattattcttttttctatatctatctcttctttcttttcttttctttcttctttcctctttcttttctatctat

SEQ ID NO: 15050 - DNA, 96 bp, Aspergillus novofumigatus
  misc_feature: 102
tcctaacccttattctctctcttattattatcttttattttcttttcttttctattccctttcctcttccctttcctcttccctttcttctcctat

SEQ ID NO: 15051 - DNA, 96 bp, Aspergillus novofumigatus
  misc_feature: 102
tattcttcttctaatctacttattaaatcctaactttaatcctttcttctcttctctactctttcttcttttctttcttattcttctctcttattt

SEQ ID NO: 15052 - DNA, 96 bp, Aspergillus novofumigatus
  misc_feature: 102
aataagggattaggcatataagtatataatatactctataggagtagatagattagttaattaaagataggatatatataactactaataagaata

SEQ ID NO: 15053 - DNA, 96 bp, Aspergillus novofumigatus
  misc_feature: 102
tattatcttttattttcttttcttttctattccctttcctcttccctttcctcttccctttcttctcctatttttaattatatttatttcttctct

SEQ ID NO: 15054 - DNA, 96 bp, Aspergillus novofumigatus
  misc_feature: 102
tattagatatattttattaatagagtttaagaagtatagtatactttaatatatattatttttagaatttcttctaaagtttagtatatactagta

SEQ ID NO: 15055 - DNA, 96 bp, Aspergillus novofumigatus
  misc_feature: 102
aactatataatatatatctctgcgcattatggtatactaaaatatatattcattcctaaatatattaatgctgattaaccttaatctcctaacata

SEQ ID NO: 15056 - DNA, 96 bp, Aspergillus novofumigatus
  misc_feature: 102
tatcttttattttcttttcttttctattccctttcctcttccctttcctcttccctttcttctcctatttttaattatatttatttcttctcttta

SEQ ID NO: 15057 - DNA, 96 bp, Aspergillus novofumigatus
  misc_feature: 102
tatcttcattctaaatcctctctcttcctaaatccttctaaatccttattttcctatatctatctatctctactcttattaacccttcctcctctc

SEQ ID NO: 15058 - DNA, 96 bp, Aspergillus novofumigatus
  misc_feature: 102
tatctattctataagactaatatatatattaagatttataatatttactagaaacttaatctttataattattataagcttatcctctatagctat

SEQ ID NO: 15059 - DNA, 96 bp, Aspergillus novofumigatus
  misc_feature: 102
tatcccttatctaatctcttactaaaattctaattattcttttttctatatctatctcttctttcttttcttttctttcttctttcctctttcttt

SEQ ID NO: 15060 - DNA, 96 bp, Aspergillus novofumigatus
  misc_feature: 102
actttagaagaaattctaaaaataatatatattaaagtatactatacttcttaaactctattaataaaatatatctaatactaaactagaaatata

SEQ ID NO: 15061 - DNA, 96 bp, Aspergillus novofumigatus
  misc_feature: 102
tatattcttcttctaatctacttattaaatcctaactttaatcctttcttctcttctctactctttcttcttttctttcttattcttctctcttat

SEQ ID NO: 15062 - DNA, 96 bp, Aspergillus novofumigatus
  misc_feature: 102
tataagactaatatatatattaagatttataatatttactagaaacttaatctttataattattataagcttatcctctatagctattatactaag

SEQ ID NO: 15063 - DNA, 96 bp, Aspergillus novofumigatus
  misc_feature: 102
taggcatataagtatataatatactctataggagtagatagattagttaattaaagataggatatatataactactaataagaatagagaagatag

SEQ ID NO: 15064 - DNA, 96 bp, Aspergillus novofumigatus
  misc_feature: 102
taggaatgagttaggattaggaattggttaggattaggaataagttaggattaggaatgagttaggattagggatttagtaagaggttaataggtt

SEQ ID NO: 15065 - DNA, 96 bp, Aspergillus novofumigatus
  misc_feature: 102
ctaatactatctctttttttctaatcttctctctttctaccctttctaactccctctcttctttttttaatctatctctaaatcctcttcttccta

SEQ ID NO: 15066 - DNA, 96 bp, Aspergillus novofumigatus
  misc_feature: 102
tacttattaaatcctaactttaatcctttcttctcttctctactctttcttcttttctttcttattcttctctcttatttatttaattatgaaccc

SEQ ID NO: 15067 - DNA, 96 bp, Aspergillus novofumigatus
  misc_feature: 102
tactctatcccttatctaatctcttactaaaattctaattattcttttttctatatctatctcttctttcttttcttttctttcttctttcctctt

SEQ ID NO: 15068 - DNA, 96 bp, Aspergillus novofumigatus
  misc_feature: 102
tactctaatactatctctttttttctaatcttctctctttctaccctttctaactccctctcttctttttttaatctatctctaaatcctcttctt

SEQ ID NO: 15069 - DNA, 96 bp, Aspergillus novofumigatus
  misc_feature: 102
gaataagaattataagaagagttaaagatagtaagttaaagattagaatatagattaaaaagagaaagaaaatatagataaatagatagaagatta

SEQ ID NO: 15070 - DNA, 96 bp, Aspergillus novofumigatus
  misc_feature: 102
taatatcctctccccttattcattctttctaattcctcttatctttaaatttcttcctctaactctatctcttcttctatacttattaatccttac

SEQ ID NO: 15071 - DNA, 96 bp, Aspergillus novofumigatus
  misc_feature: 102
taatagaaaggtaataaatatcttcttaagacttaatataatctatatctctatatattatctaagaaatctagaaagatattacttatattcttt

SEQ ID NO: 15072 - DNA, 96 bp, Aspergillus novofumigatus
  misc_feature: 102
taatactatctctttttttctaatcttctctctttctaccctttctaactccctctcttctttttttaatctatctctaaatcctcttcttcctac

SEQ ID NO: 15073 - DNA, 96 bp, Aspergillus novofumigatus
  misc_feature: 102
ctaacccctaatatcctctccccttattcattctttctaattcctcttatctttaaatttcttcctctaactctatctcttcttctatacttatta

SEQ ID NO: 15074 - DNA, 96 bp, Aspergillus novofumigatus
  misc_feature: 102
taagttagggttaggaatgagttaggattaggaatttattaggattaggaatttattaggattaggaatgagttaggattaggaattggttaggat

SEQ ID NO: 15075 - DNA, 96 bp, Aspergillus novofumigatus
  misc_feature: 102
cttcttatatatcttatattcttcttctaatctacttattaaatcctaactttaatcctttcttctcttctctactctttcttcttttctttctta

SEQ ID NO: 15076 - DNA, 96 bp, Aspergillus novofumigatus
  misc_feature: 102
taactaatcttaatctactaatattactacctctcttactacttaccttactattaaccttactatctactatgatatttatattactatctacct

SEQ ID NO: 15077 - DNA, 96 bp, Aspergillus novofumigatus
  misc_feature: 102
attcttcttctaatctacttattaaatcctaactttaatcctttcttctcttctctactctttcttcttttctttcttattcttctctcttattta

SEQ ID NO: 15078 - DNA, 96 bp, Aspergillus novofumigatus
  misc_feature: 102
taaaagataataataagaattactttatatatatatatttatatgtaagtatataagaaggataatttatatagattagtttagtagtttagattt

SEQ ID NO: 15079 - DNA, 96 bp, Aspergillus novofumigatus
  misc_feature: 102
acccttattctctctcttattattatcttttattttcttttcttttctattccctttcctcttccctttcctcttccctttcttctcctattttta

SEQ ID NO: 15080 - DNA, 96 bp, Aspergillus novofumigatus
  misc_feature: 102
gttctatatctattctataagactaatatatatattaagatttataatatttactagaaacttaatctttataattattataagcttatcctctat

SEQ ID NO: 15081 - DNA, 96 bp, Aspergillus novofumigatus
  misc_feature: 102
gtatataagaaggataatttatatagattagtttagtagtttagattttaatatatataaagggtttataattaaatattaccttagaagagatag

SEQ ID NO: 15082 - DNA, 96 bp, Aspergillus novofumigatus
  misc_feature: 102
cttcttaaactatatctctctttttaaattatctccctttctactcttattactccttcttctctcctcttaatctatccctaaattctcttttac

SEQ ID NO: 15083 - DNA, 96 bp, Aspergillus novofumigatus
  misc_feature: 102
ggtggaataaggatatagggaaggataagattagggttaggagtaggattaggataaggataagggttagggtattagtaagaattagtaatttag

SEQ ID NO: 15084 - DNA, 96 bp, Aspergillus novofumigatus
  misc_feature: 102
ctaactaatcttaatctactaatattactacctctcttactacttaccttactattaaccttactatctactatgatatttatattactatctacc

SEQ ID NO: 15085 - DNA, 96 bp, Aspergillus novofumigatus
  misc_feature: 102
ctccctccctccctcgtccccctcgctcgcgcgcgcacccctgccggtcctcgccggcgccggccccccggtccctatgacggtgcgcgcgcgcgc

SEQ ID NO: 15086 - DNA, 96 bp, Aspergillus novofumigatus
  misc_feature: 102
atttctaccccttattcttatcttaaacttactaacccttactctattacttatccttccttactttattctccttactacctcttaccttctatc

SEQ ID NO: 15087 - DNA, 96 bp, Aspergillus novofumigatus
  misc_feature: 102
cttttttcttctccctttttatctcttctctctatttctctcttaattcttactctatctcttactttacctctttctctatctctctcttctatc

SEQ ID NO: 15088 - DNA, 96 bp, Aspergillus novofumigatus
  misc_feature: 102
acttaattttaaatccctcactcttaaactcttacttatattaatctctatctataattctttctctttcttctctttctctctttctttcttatc

SEQ ID NO: 15089 - DNA, 96 bp, Aspergillus novofumigatus
  misc_feature: 102
gagttaggattaggaattggttaggattaggaataagttaggattaggaatgagttaggattagggatttagtaagaggttaataggtttaaagag

SEQ ID NO: 15090 - DNA, 96 bp, Aspergillus novofumigatus
  misc_feature: 102
gagttaggattaggaataagttagggttaggaatgagttaggattaggaatttattaggattaggaatttattaggattaggaatgagttaggatt

SEQ ID NO: 15091 - DNA, 96 bp, Aspergillus novofumigatus
  misc_feature: 102
gagttagaagaaaagtttttaggagagaaggaataagaataggagttaagaataagagttagaagaagagataaaaagggttagaagaagaattag

SEQ ID NO: 15092 - DNA, 96 bp, Aspergillus novofumigatus
  misc_feature: 102
ctaactcttattcttaactcctattcttattccttctctcctaaaaacttttcttctaactcttattctaactctccttcttattattccttactc

SEQ ID NO: 15093 - DNA, 96 bp, Aspergillus novofumigatus
  misc_feature: 102
aattttaaatccctcactcttaaactcttacttatattaatctctatctataattctttctctttcttctctttctctctttctttcttatctctc

SEQ ID NO: 15094 - DNA, 96 bp, Aspergillus novofumigatus
  misc_feature: 102
cttttctttcttattcttctctcttatttatttaattatgaacccttctcctctcttatcttataattaatctaatctcttttaatccttattctc

SEQ ID NO: 15095 - DNA, 96 bp, Aspergillus novofumigatus
  misc_feature: 102
aggcccttttaaataatcctattctataaaagaagctagattatcctattatatatagaatattatagctctatagctataatattttaataagtc

SEQ ID NO: 15096 - DNA, 96 bp, Aspergillus novofumigatus
  misc_feature: 102
actctaatactatctctttttttctaatcttctctctttctaccctttctaactccctctcttctttttttaatctatctctaaatcctcttcttc

SEQ ID NO: 15097 - DNA, 96 bp, Aspergillus novofumigatus
  misc_feature: 102
ctgactcttctttcttttcttttctttcttcttttctctttcttttctatctattatcttcttactatctaacccttactccatccttaatctttc

SEQ ID NO: 15098 - DNA, 96 bp, Aspergillus novofumigatus
  misc_feature: 102
gaaaagaagaaagaaaagaaaagaaagaagagttagatatagaaaaaagaataattagaattttagtaagagattatataagggatagagtaaggg

SEQ ID NO: 15099 - DNA, 96 bp, Aspergillus novofumigatus
  misc_feature: 102
agggtttagtttaggggagagttagggagagatagaaggggagatagagggagagatagaagaaggattagaagaagagtaaggaataataagaag

SEQ ID NO: 15100 - DNA, 96 bp, Aspergillus novofumigatus
  misc_feature: 102
cttctatctacacttactaccccttactcttattctatttcttactctccttctaactatcctaacctctcctaatctcttcttctatctcttctt

SEQ ID NO: 15101 - DNA, 96 bp, Aspergillus novofumigatus
  misc_feature: 102
ctcttctttttttaatctatctctaaatcctcttcttcctactcttcttaatctactctcttaaaatcccttcttttttcttctactatctttctt

SEQ ID NO: 15102 - DNA, 96 bp, Aspergillus novofumigatus
  misc_feature: 102
atactctatatcctactatttaggtatttactaaagtctatctctttattataattataagtattattattttatttattactataataaatatag

SEQ ID NO: 15103 - DNA, 96 bp, Aspergillus novofumigatus
  misc_feature: 102
ctaatctcttactaaaattctaattattcttttttctatatctatctcttctttcttttcttttctttcttctttcctctttcttttctatctatt

SEQ ID NO: 15104 - DNA, 96 bp, Aspergillus novofumigatus
  misc_feature: 102
cctttttttacttcttatatatcttatattcttcttctaatctacttattaaatcctaactttaatcctttcttctcttctctactctttcttctt

SEQ ID NO: 15105 - DNA, 96 bp, Aspergillus novofumigatus
  misc_feature: 102
attaggaatgagttaggattaggaattggttaggattaggaataagttaggattaggaatgagttaggattagggatttagtaagaggttaatagg

SEQ ID NO: 15106 - DNA, 96 bp, Aspergillus novofumigatus
  misc_feature: 102
agttagaagaaaagtttttaggagagaaggaataagaataggagttaagaataagagttagaagaagagataaaaagggttagaagaagaattagg

SEQ ID NO: 15107 - DNA, 96 bp, Aspergillus novofumigatus
  misc_feature: 102
cctaacccttattctctctcttattattatcttttattttcttttcttttctattccctttcctcttccctttcctcttccctttcttctcctatt

SEQ ID NO: 15108 - DNA, 96 bp, Aspergillus novofumigatus
  misc_feature: 102
attcttttttctatatctgactcttctttcttttcttttctttcttcttttctctttcttttctatctattatcttcttactatctaacccttact

SEQ ID NO: 15109 - DNA, 96 bp, Aspergillus novofumigatus
  misc_feature: 102
agagtaagggtttagtttaggggagagttagggagagatagaaggggagatagagggagagatagaagaaggattagaagaagagtaaggaataat

SEQ ID NO: 15110 - DNA, 96 bp, Aspergillus novofumigatus
  misc_feature: 102
aagaaaagaaaagaaagaagagatagatatagaaaaaagaataattagaattttagtaagagattagataagggatagagtaagggttagtataat

SEQ ID NO: 15111 - DNA, 96 bp, Aspergillus novofumigatus
  misc_feature: 102
aagaaaagaaaagaaagaagagttagatatagaaaaaagaataattagaattttagtaagagattatataagggatagagtaagggttagtataat

SEQ ID NO: 15112 - DNA, 96 bp, Aspergillus novofumigatus
  misc_feature: 102
attagacactagcttatagttatataataatatactaattaatatagcaagcttatattatataatcttagctataatttatatacccccttttat

SEQ ID NO: 15113 - DNA, 96 bp, Aspergillus novofumigatus
  misc_feature: 102
atcctctccccttattcattctttctaattcctcttatctttaaatttcttcctctaactctatctcttcttctatacttattaatccttactctt

SEQ ID NO: 15114 - DNA, 96 bp, Aspergillus novofumigatus
  misc_feature: 102
atcccttatctaatctcttactaaaattctaattattcttttttctatatctatctcttctttcttttcttttctttcttctttcctctttctttt

SEQ ID NO: 15115 - DNA, 96 bp, Aspergillus novofumigatus
  misc_feature: 102
atatttctagtttagtattagatatattttattaatagagtttaagaagtatagtatactttaatatatattatttttagaatttcttctaaagtt

SEQ ID NO: 15116 - DNA, 96 bp, Aspergillus novofumigatus
  misc_feature: 102
aactatatctctctttttaaattatctccctttctactcttattactccttcttctctcctcttaatctatccctaaattctcttttacctcttct

SEQ ID NO: 15117 - DNA, 96 bp, Aspergillus novofumigatus
  misc_feature: 102
agaaaagaaaagaaagaagagatagatatagaaaaaagaataattagaattttagtaagagattagataagggatagagtaagggttagtataatt

SEQ ID NO: 15118 - DNA, 96 bp, Aspergillus novofumigatus
  misc_feature: 102
aattctaacccttaccttaatatattaataatttctattttattcctaacccttattctctctcttattattatcttttattttcttttcttttct

SEQ ID NO: 15119 - DNA, 96 bp, Aspergillus novofumigatus
  misc_feature: 102
actttatccttttcttttaattttatctttccttaattttaatttcttcttctctttcttcttctctttcttcttctctttcttcttctctttctt

SEQ ID NO: 15120 - DNA, 96 bp, Aspergillus novofumigatus
  misc_feature: 102
actctatcccttatataatctcttactaaaattctaattattcttttttctatatctgactcttctttcttttcttttctttcttcttttctcttt

SEQ ID NO: 15121 - DNA, 96 bp, Aspergillus novofumigatus
  misc_feature: 102
aatattaacttaattttaaatccctcactcttaaactcttacttatattaatctctatctataattctttctctttcttctctttctctctttctt

SEQ ID NO: 15122 - DNA, 96 bp, Aspergillus novofumigatus
  misc_feature: 101
ttttttaatctatctctaaatcctcttcttcctactcttcttaatctactctcttaaaatcccttcttttttcttctactatctttctttaatctc

SEQ ID NO: 15123 - DNA, 96 bp, Aspergillus novofumigatus
  misc_feature: 101
tttttaatctatctctaaatcctcttcttcctactcttcttaatctactctcttaaaatcccttcttttttcttctactatctttctttaatctct

SEQ ID NO: 15124 - DNA, 96 bp, Aspergillus novofumigatus
  misc_feature: 101
gattagatagagaagaagaggtaaaagagaatttagggatagattaagaggagagaagaaggagtaataagagtagaaagggagataatttaaaaa

SEQ ID NO: 15125 - DNA, 96 bp, Aspergillus novofumigatus
  misc_feature: 101
ttttaatctatctctaaatcctcttcttcctactcttcttaatctactctcttaaaatcccttcttttttcttctactatctttctttaatctctt

SEQ ID NO: 15126 - DNA, 96 bp, Aspergillus novofumigatus
  misc_feature: 101
ttttaaatccctcactcttaaactcttacttatattaatctctatctataattctttctctttcttctctttctctctttctttcttatctctcta

SEQ ID NO: 15127 - DNA, 96 bp, Aspergillus novofumigatus
  misc_feature: 101
tttctaactccctctcttctttttttaatctatctctaaatcctcttcttcctactcttcttaatctactctcttaaaatcccttcttttttcttc

SEQ ID NO: 15128 - DNA, 96 bp, Aspergillus novofumigatus
  misc_feature: 101
taagagattaaagaaagatagtagaagaaaaaagaagggattttaagagagtagattaagaagagtaggaagaagaggatttagagatagattaaa

SEQ ID NO: 15129 - DNA, 96 bp, Aspergillus novofumigatus
  misc_feature: 101
tttaaataatcctattctataaaagaagctagattatcctattatatatagaatattatagctctatagctataatattttaataagtctatatta

SEQ ID NO: 15130 - DNA, 96 bp, Aspergillus novofumigatus
  misc_feature: 101
ttcttcttctaaccctttttatctcttcttctaactcttattcttaactcctattcttattccttctctcctaaaaacttttcttctaactcttat

SEQ ID NO: 15131 - DNA, 96 bp, Aspergillus novofumigatus
  misc_feature: 101
ttcttctctcttatttatttaattatgaacccttctcctctcttatcttataattaatctaatctcttttaatccttattctctctatcctaaatt

SEQ ID NO: 15132 - DNA, 96 bp, Aspergillus novofumigatus
  misc_feature: 101
ttctaatcttctctctttctaccctttctaactccctctcttctttttttaatctatctctaaatcctcttcttcctactcttcttaatctactct

SEQ ID NO: 15133 - DNA, 96 bp, Aspergillus novofumigatus
  misc_feature: 101
ttccttttttaatcttctctcttattctattaaaaatatacccttcttctctcttatattataattaatctactctctttttatccttattctctc

SEQ ID NO: 15134 - DNA, 96 bp, Aspergillus novofumigatus
  misc_feature: 101
ttagaagaaaagtttttaggagagaaggaataagaataggagttaagaataagagttagaagaagagataaaaagggttagaagaagaattaggaa

SEQ ID NO: 15135 - DNA, 96 bp, Aspergillus novofumigatus
  misc_feature: 101
agtaaagagaagaaataaatataattaaaaatagaagaagaaagggaagaggaaagggaagaggaaaggaaagaggaaagggaagaggaaagggaa

SEQ ID NO: 15136 - DNA, 96 bp, Aspergillus novofumigatus
  misc_feature: 101
taaaggcccttttaaataatcctattctataaaagaagctagattatcctattatatatagaatattatagctctatagctataatattttaataa

SEQ ID NO: 15137 - DNA, 96 bp, Aspergillus novofumigatus
  misc_feature: 101
aaagaaaagaaaagaaagaagagatagatatagaaaaaagaataattagaattttagtaagagattagataagggatagagtaagggttagtataa

SEQ ID NO: 15138 - DNA, 96 bp, Aspergillus novofumigatus
  misc_feature: 101
ttacttcttatatatcttatattcttcttctaatctacttattaaatcctaactttaatcctttcttctcttctctactctttcttcttttctttc

SEQ ID NO: 15139 - DNA, 96 bp, Aspergillus novofumigatus
  misc_feature: 101
gataagagtaagggtaaggatttagattagaagggataagagaggagattaagaagagatagaataagagatagataagagatagaataagagtaa

SEQ ID NO: 15140 - DNA, 96 bp, Aspergillus novofumigatus
  misc_feature: 101
ttactctatctcttactttacctctttctctatctctctcttctatctacacttactaccccttactcttattctatttcttactctccttctaac

SEQ ID NO: 15141 - DNA, 96 bp, Aspergillus novofumigatus
  misc_feature: 101
ttactctatcccttatctaatctcttactaaaattctaattattcttttttctatatctatctcttctttcttttcttttctttcttctttcctct

SEQ ID NO: 15142 - DNA, 96 bp, Aspergillus novofumigatus
  misc_feature: 101
tctctatagatcttatacttactatagtaataaataaagtaataatacttataattataatatagaaatagactttagtaaatatctaaatagtaa

SEQ ID NO: 15143 - DNA, 96 bp, Aspergillus novofumigatus
  misc_feature: 101
aacctattaacctcttactaaatccctaatcctaacttattcctaatcctaataaattcctaatcctataaattatctcttattctacctaattaa

SEQ ID NO: 15144 - DNA, 96 bp, Aspergillus novofumigatus
  misc_feature: 101
ttaagagattaaagaaagatagtagaagaaaaaagaagggattttaagagagtagattaagaagagtaggaagaagaggatttagagatagattaa

SEQ ID NO: 15145 - DNA, 96 bp, Aspergillus novofumigatus
  misc_feature: 101
attattataggctgcccctataatatatactatcttatatatatagctatataatcacctaattagttatataattataactagttattatattaa

SEQ ID NO: 15146 - DNA, 96 bp, Aspergillus novofumigatus
  misc_feature: 101
ctccccttattcattctttctaattcctcttatctttaaatttcttcctctaactctatctcttcttctatacttattaatccttactcttcttaa

SEQ ID NO: 15147 - DNA, 96 bp, Aspergillus novofumigatus
  misc_feature: 101
ttaaactcttacttatattaatctctatctataattctttctctttcttctctttctctctttctttcttatctctctaactctaaatatcctctt

SEQ ID NO: 15148 - DNA, 96 bp, Aspergillus novofumigatus
  misc_feature: 101
ttaaactatatctctctttttaaattatctccctttctactcttattactccttcttctctcctcttaatctatccctaaattctcttttacctct

SEQ ID NO: 15149 - DNA, 96 bp, Aspergillus novofumigatus
  misc_feature: 101
tggaataaggatatagggaaggataagattagggttaggagtaggattaggataaggataagggttagggtattagtaagaattagtaatttagag

SEQ ID NO: 15150 - DNA, 96 bp, Aspergillus novofumigatus
  misc_feature: 101
tgctaactaatcttaatctactaatattactacctctcttactacttaccttactattaaccttactatctactatgatatttatattactatcta

SEQ ID NO: 15151 - DNA, 96 bp, Aspergillus novofumigatus
  misc_feature: 101
tgagttaggattaggaataagttagggttaggaatgagttaggattaggaatttattaggattaggaatttattaggattaggaatgagttaggat

SEQ ID NO: 15152 - DNA, 96 bp, Aspergillus novofumigatus
  misc_feature: 101
tctttccttcttcccttctattcttaactctctctttctctttcttctcctttctatccctaactcttattctaacccttcttctatctcttcctc

SEQ ID NO: 15153 - DNA, 96 bp, Aspergillus novofumigatus
  misc_feature: 101
tctttaaacctattaacctcttactaaatccctaatcctaacttattcctaatcctaataaattcctaatcctataaattatctcttattctacct

SEQ ID NO: 15154 - DNA, 96 bp, Aspergillus novofumigatus
  misc_feature: 101
aagggttaataagagtagagatagatagatataggaaaataaggatttagaaggatttaggaagagagaggatttagaatgaagatagaaagaaga

SEQ ID NO: 15155 - DNA, 96 bp, Aspergillus novofumigatus
  misc_feature: 101
tcttcttctctttcttcttattcttcttattcttcctctctttcttaccctttacttaaactctttctatcttatctatctttaccttctattctt

SEQ ID NO: 15156 - DNA, 96 bp, Aspergillus novofumigatus
  misc_feature: 101
gggtttagaatagtaagggtaaggataagagtaagggtttagtttaggggagagttagggagagatagaaggggagatagagggagagatagaaga

SEQ ID NO: 15157 - DNA, 96 bp, Aspergillus novofumigatus
  misc_feature: 101
tcttattctatctctctcttactccctctctcctctatctcttcttaatctcctctcttatcccttctaatctaaatccttacccttactcttatt

SEQ ID NO: 15158 - DNA, 96 bp, Aspergillus novofumigatus
  misc_feature: 101
taagtatataagaaggataatttatatagattagtttagtagtttagattttaatatatataaagggtttataattaaatattaccttagaagaga

SEQ ID NO: 15159 - DNA, 96 bp, Aspergillus novofumigatus
  misc_feature: 101
tctctcttattctattaaaaatatacccttcttctctcttatattataattaatctactctctttttatccttattctctctatccctgattctct

SEQ ID NO: 15160 - DNA, 96 bp, Aspergillus novofumigatus
  misc_feature: 101
tctatcttcattctaaatcctctctcttcctaaatccttctaaatccttattttcctatatctatctatctctactcttattaacccttcctcctc

SEQ ID NO: 15161 - DNA, 96 bp, Aspergillus novofumigatus
  misc_feature: 101
tctacttattaaatcctaactttaatcctttcttctcttctctactctttcttcttttctttcttattcttctctcttatttatttaattatgaac

SEQ ID NO: 15162 - DNA, 96 bp, Aspergillus novofumigatus
  misc_feature: 101
tctaccctttctaactccctctcttctttttttaatctatctctaaatcctcttcttcctactcttcttaatctactctcttaaaatcccttcttt

SEQ ID NO: 15163 - DNA, 96 bp, Aspergillus novofumigatus
  misc_feature: 101
tctaactcttattcttaactcctattcttattccttctctcctaaaaacttttcttctaactcttattctaactctccttcttattattccttact

SEQ ID NO: 15164 - DNA, 96 bp, Aspergillus novofumigatus
  misc_feature: 101
cccccccaagggtccccgccaactggtcacccccggggcgcgcgcgcccggcttccattgaccccagtgcctgtgtgtctcgataagtggccggga

SEQ ID NO: 15165 - DNA, 96 bp, Aspergillus novofumigatus
  misc_feature: 101
tatttaagtagagggataagaggagtataagattaagtaaattatagtaaagtaaatatatataataaaggcaggtaaaactaaaaactaatacct

SEQ ID NO: 15166 - DNA, 96 bp, Aspergillus novofumigatus
  misc_feature: 101
taaagagaagaaataaatataattaaaaatagaagaagaaagggaagaggaaagggaagaggaaaggaaagaggaaagggaagaggaaagggaata

SEQ ID NO: 15167 - DNA, 96 bp, Aspergillus novofumigatus
  misc_feature: 101
tattagtgggaactactaactactattagggatattaggtttcaggtcatatagggatagggatagggatagggataggatttagataagaataag

SEQ ID NO: 15168 - DNA, 96 bp, Aspergillus novofumigatus
  misc_feature: 101
aaataatcctattctataaaagaagctagattatcctattatatatagaatattatagctctatagctataatattttaataagtctatattaata

SEQ ID NO: 15169 - DNA, 96 bp, Aspergillus novofumigatus
  misc_feature: 101
gtaaaggcccttttaaataatcctattctataaaagaagctagattatcctattatatatagaatattatagctctatagctataatattttaata

SEQ ID NO: 15170 - DNA, 96 bp, Aspergillus novofumigatus
  misc_feature: 101
gtttagtattagatatattttattaatagagtttaagaagtatagtatactttaatatatattatttttagaatttcttctaaagtttagtatata

SEQ ID NO: 15171 - DNA, 96 bp, Aspergillus novofumigatus
  misc_feature: 101
gaaagaaaagaaaagaaagaagagatagatatagaaaaaagaataattagaattttagtaagagattagataagggatagagtaagggttagtata

SEQ ID NO: 15172 - DNA, 96 bp, Aspergillus novofumigatus
  misc_feature: 101
tataaattatagctaagattatataatataagcttgctatattaattagtatattattatataactataagctagtgtctaatttagactagagtt

SEQ ID NO: 15173 - DNA, 96 bp, Aspergillus novofumigatus
  misc_feature: 101
actctatctcttactttacctctttctctatctctctcttctatctacacttactaccccttactcttattctatttcttactctccttctaacta

SEQ ID NO: 15174 - DNA, 96 bp, Aspergillus novofumigatus
  misc_feature: 101
taaaattctaattattcttttttctatatctatctcttctttcttttcttttctttcttctttcctctttcttttctatctattatcttcttacta

SEQ ID NO: 15175 - DNA, 96 bp, Aspergillus novofumigatus
  misc_feature: 101
taggtaaaggcccttttaaataatcctattctataaaagaagctagattatcctattatatatagaatattatagctctatagctataatatttta

SEQ ID NO: 15176 - DNA, 96 bp, Aspergillus novofumigatus
  misc_feature: 101
taggaatttattaggattaggaatgagttaggattaggaattggttaggattaggaataagttaggattaggaatgagttaggattagggatttag

SEQ ID NO: 15177 - DNA, 96 bp, Aspergillus novofumigatus
  misc_feature: 101
atatctattctataagactaatatatatattaagatttataatatttactagaaacttaatctttataattattataagcttatcctctatagcta

SEQ ID NO: 15178 - DNA, 96 bp, Aspergillus novofumigatus
  misc_feature: 101
ctatctacacttactaccccttactcttattctatttcttactctccttctaactatcctaacctctcctaatctcttcttctatctcttcttcta

SEQ ID NO: 15179 - DNA, 96 bp, Aspergillus novofumigatus
  misc_feature: 101
tagaagaaaagtttttaggagagaaggaataagaataggagttaagaataagagttagaagaagagataaaaagggttagaagaagaattaggaat

SEQ ID NO: 15180 - DNA, 96 bp, Aspergillus novofumigatus
  misc_feature: 101
aagagaaaagaagaaagaaaagaaaagaaagaagagttagatatagaaaaaagaataattagaattttagtaagagattatataagggatagagta

SEQ ID NO: 15181 - DNA, 96 bp, Aspergillus novofumigatus
  misc_feature: 101
ggcatataagtatataatatactctataggagtagatagattagttaattaaagataggatatatataactactaataagaatagagaagatagta

SEQ ID NO: 15182 - DNA, 96 bp, Aspergillus novofumigatus
  misc_feature: 101
ctggtttatttaatttactactactatatttaaaaagtttatatcttatatataggagatagtatctataaattatattattataatcctctatta

SEQ ID NO: 15183 - DNA, 96 bp, Aspergillus novofumigatus
  misc_feature: 101
taagtttagagaagggaaaagagtatataagttaatttagaaagaaaagaatagaaggtaaagatagataagatagaaagagtttaagtaaagggt

SEQ ID NO: 15184 - DNA, 96 bp, Aspergillus novofumigatus
  misc_feature: 101
taagaccagcaggaagaacccagtaagataggtagtatagtagatagtaaggcaggcagtgaagcaggtagtaaggcaggtagtaaggcaggcagc

SEQ ID NO: 15185 - DNA, 96 bp, Aspergillus novofumigatus
  misc_feature: 101
taactctctctttctctttcttctcctttctatccctaactcttattctaacccttcttctatctcttcctctaatcctccttctaattcttattc

SEQ ID NO: 15186 - DNA, 96 bp, Aspergillus novofumigatus
  misc_feature: 101
taaataatcctattctataaaagaagctagattatcctattatatatagaatattatagctctatagctataatattttaataagtctatattaat

SEQ ID NO: 15187 - DNA, 96 bp, Aspergillus novofumigatus
  misc_feature: 101
taaagagggtgaggataagagtaagggtaaggatttagattagaagggataagagaggagattaagaagagatagaataagagatagataagagat

SEQ ID NO: 15188 - DNA, 96 bp, Aspergillus novofumigatus
  misc_feature: 101
aatagaaaggtaataaatatcttcttaagacttaatataatctatatctctatatattatctaagaaatctagaaagatattacttatattcttta

SEQ ID NO: 15189 - DNA, 96 bp, Aspergillus novofumigatus
  misc_feature: 101
taaactatatctctctttttaaattatctccctttctactcttattactccttcttctctcctcttaatctatccctaaattctcttttacctctt

SEQ ID NO: 15190 - DNA, 96 bp, Aspergillus novofumigatus
  misc_feature: 101
taaacctattaacctcttactaaatccctaatcctaacttattcctaatcctaataaattcctaatcctataaattatctcttattctacctaatt

SEQ ID NO: 15191 - DNA, 96 bp, Aspergillus novofumigatus
  misc_feature: 101
aaagataataataagaattactttatatatatatatttatatgtaagtatataagaaggataatttatatagattagtttagtagtttagatttta

SEQ ID NO: 15192 - DNA, 96 bp, Aspergillus novofumigatus
  misc_feature: 101
aattagacactagcttatagttatataataatatactaattaatatagcaagcttatattatataatcttagctataatttatataccccctttta

SEQ ID NO: 15193 - DNA, 96 bp, Aspergillus novofumigatus
  misc_feature: 101
gtttagaatagtaagggtaaggataagagtaagggtttagtttaggggagagttagggagagatagaaggggagatagagggagagatagaagaag

SEQ ID NO: 15194 - DNA, 96 bp, Aspergillus novofumigatus
  misc_feature: 101
acctattaacctcttactaaatccctaatcctaacttattcctaatcctaataaattcctaatcctataaattatctcttattctacctaattaac

SEQ ID NO: 15195 - DNA, 96 bp, Aspergillus novofumigatus
  misc_feature: 101
gtattagatatattttattaatagagtttaagaagtatagtatactttaatatatattatttttagaatttcttctaaagtttagtatatactagt

SEQ ID NO: 15196 - DNA, 96 bp, Aspergillus novofumigatus
  misc_feature: 101
gctaactaatcttaatctactaatattactacctctcttactacttaccttactattaaccttactatctactatgatatttatattactatctac

SEQ ID NO: 15197 - DNA, 96 bp, Aspergillus novofumigatus
  misc_feature: 101
gtaagggtttagtttaggggagagttagggagagatagaaggggagatagagggagagatagaagaaggattagaagaagagtaaggaataataag

SEQ ID NO: 15198 - DNA, 96 bp, Aspergillus novofumigatus
  misc_feature: 101
gtaagaccagcaggaagaacccagtaagataggtagtatagtagatagtaaggcaggcagtgaagcaggtagtaaggcaggtagtaaggcaggcag

SEQ ID NO: 15199 - DNA, 96 bp, Aspergillus novofumigatus
  misc_feature: 101
ctacttattaaatcctaactttaatcctttcttctcttctctactctttcttcttttctttcttattcttctctcttatttatttaattatgaacc

SEQ ID NO: 15200 - DNA, 96 bp, Aspergillus novofumigatus
  misc_feature: 101
ggttaataagagtagagatagatagatataggaaaataaggatttagaaggatttaggaagagagaggatttagaatgaagatagaaagaagagag

SEQ ID NO: 15201 - DNA, 96 bp, Aspergillus novofumigatus
  misc_feature: 101
ctctctttctaccctttctaactccctctcttctttttttaatctatctctaaatcctcttcttcctactcttcttaatctactctcttaaaatcc

SEQ ID NO: 15202 - DNA, 96 bp, Aspergillus novofumigatus
  misc_feature: 101
ggattaggaatttattaggattaggaatgagttaggattaggaattggttaggattaggaataagttaggattaggaatgagttaggattagggat

SEQ ID NO: 15203 - DNA, 96 bp, Aspergillus novofumigatus
  misc_feature: 101
atcttcattctaaatcctctctcttcctaaatccttctaaatccttattttcctatatctatctatctctactcttattaacccttcctcctctcc

SEQ ID NO: 15204 - DNA, 96 bp, Aspergillus novofumigatus
  misc_feature: 101
ggaataaggatatagggaaggataagattagggttaggagtaggattaggataaggataagggttagggtattagtaagaattagtaatttagagt

SEQ ID NO: 15205 - DNA, 96 bp, Aspergillus novofumigatus
  misc_feature: 101
gctggtttatttaatttactactactatatttaaaaagtttatatcttatatataggagatagtatctataaattatattattataatcctctatt

SEQ ID NO: 15206 - DNA, 96 bp, Aspergillus novofumigatus
  misc_feature: 101
cagtaagaccagcaggaagaacccagtaagataggtagtatagtagatagtaaggcaggcagtgaagcaggtagtaaggcaggtagtaaggcaggc

SEQ ID NO: 15207 - DNA, 96 bp, Aspergillus novofumigatus
  misc_feature: 101
atatcctctccccttattcattctttctaattcctcttatctttaaatttcttcctctaactctatctcttcttctatacttattaatccttactc

SEQ ID NO: 15208 - DNA, 96 bp, Aspergillus novofumigatus
  misc_feature: 101
cttaaactatatctctctttttaaattatctccctttctactcttattactccttcttctctcctcttaatctatccctaaattctcttttacctc

SEQ ID NO: 15209 - DNA, 96 bp, Aspergillus novofumigatus
  misc_feature: 101
gaggggaatcatcattggaacctttttggtcttggggttagtagctgcctagaacactacttccttacagatataggccgggcgcgcgcgcgccct

SEQ ID NO: 15210 - DNA, 96 bp, Aspergillus novofumigatus
  misc_feature: 101
gagaaaagaagaaagaaaagaaaagaaagaagagttagatatagaaaaaagaataattagaattttagtaagagattatataagggatagagtaag

SEQ ID NO: 15211 - DNA, 96 bp, Aspergillus novofumigatus
  misc_feature: 101
ctaacccttaccttaatatattaataatttctattttattcctaacccttattctctctcttattattatcttttattttcttttcttttctattc

SEQ ID NO: 15212 - DNA, 96 bp, Aspergillus novofumigatus
  misc_feature: 101
cttatatatcttatattcttcttctaatctacttattaaatcctaactttaatcctttcttctcttctctactctttcttcttttctttcttattc

SEQ ID NO: 15213 - DNA, 96 bp, Aspergillus novofumigatus
  misc_feature: 101
ctctatcccttatctaatctcttactaaaattctaattattcttttttctatatctatctcttctttcttttcttttctttcttctttcctctttc

SEQ ID NO: 15214 - DNA, 96 bp, Aspergillus novofumigatus
  misc_feature: 101
cttctctcttatttatttaattatgaacccttctcctctcttatcttataattaatctaatctcttttaatccttattctctctatcctaaattct

SEQ ID NO: 15215 - DNA, 96 bp, Aspergillus novofumigatus
  misc_feature: 101
ataagagtaagggtaaggatttagattagaagggataagagaggagattaagaagagatagaataagagatagataagagatagaataagagtaag

SEQ ID NO: 15216 - DNA, 96 bp, Aspergillus novofumigatus
  misc_feature: 101
cttaaactcttacttatattaatctctatctataattctttctctttcttctctttctctctttctttcttatctctctaactctaaatatcctct

SEQ ID NO: 15217 - DNA, 96 bp, Aspergillus novofumigatus
  misc_feature: 101
ctctttccttcttcccttctattcttaactctctctttctctttcttctcctttctatccctaactcttattctaacccttcttctatctcttcct

SEQ ID NO: 15218 - DNA, 96 bp, Aspergillus novofumigatus
  misc_feature: 101
ctctctcttctatctacacttactaccccttactcttattctatttcttactctccttctaactatcctaacctctcctaatctcttcttctatct

SEQ ID NO: 15219 - DNA, 96 bp, Aspergillus novofumigatus
  misc_feature: 101
ataagggattaggcatataagtatataatatactctataggagtagatagattagttaattaaagataggatatatataactactaataagaatag

SEQ ID NO: 15220 - DNA, 96 bp, Aspergillus novofumigatus
  misc_feature: 101
aaagagaagaaataaatataattaaaaatagaagaagaaagggaagaggaaagggaagaggaaaggaaagaggaaagggaagaggaaagggaatag

SEQ ID NO: 15221 - DNA, 96 bp, Aspergillus novofumigatus
  misc_feature: 101
agtattagatatattttattaatagagtttaagaagtatagtatactttaatatatattatttttagaatttcttctaaagtttagtatatactag

SEQ ID NO: 15222 - DNA, 96 bp, Aspergillus novofumigatus
  misc_feature: 101
ctaatagaaaggtaataaatatcttcttaagacttaatataatctatatctctatatattatctaagaaatctagaaagatattacttatattctt

SEQ ID NO: 15223 - DNA, 96 bp, Aspergillus novofumigatus
  misc_feature: 101
ccttattctctctcttattattatcttttattttcttttcttttctattccctttcctcttccctttcctcttccctttcttctcctatttttaat

SEQ ID NO: 15224 - DNA, 96 bp, Aspergillus novofumigatus
  misc_feature: 101
atttagattagaagggataagagaggagattaagaagagatagaataagagatagataagagatagaataagagtaagagtagagtaagagtaagg

SEQ ID NO: 15225 - DNA, 96 bp, Aspergillus novofumigatus
  misc_feature: 101
cctcttttttcttctccctttttatctcttctctctatttctctcttaattcttactctatctcttactttacctctttctctatctctctcttct

SEQ ID NO: 15226 - DNA, 96 bp, Aspergillus novofumigatus
  misc_feature: 101
cctcactcttaaactcttacttatattaatctctatctataattctttctctttcttctctttctctctttctttcttatctctctaactctaaat

SEQ ID NO: 15227 - DNA, 96 bp, Aspergillus novofumigatus
  misc_feature: 101
ccctttttttacttcttatatatcttatattcttcttctaatctacttattaaatcctaactttaatcctttcttctcttctctactctttcttct

SEQ ID NO: 15228 - DNA, 96 bp, Aspergillus novofumigatus
  misc_feature: 101
agtttaagataagaataaggggtagaaatatataagatagagagagttttagtaaagagaagaaataaatataattaaaaatagaagaagaaaggg

SEQ ID NO: 15229 - DNA, 96 bp, Aspergillus novofumigatus
  misc_feature: 101
ccccccaagggtccccgccaactggtcacccccggggcgcgcgcgcccggcttccattgaccccagtgcctgtgtgtctcgataagtggccgggat

SEQ ID NO: 15230 - DNA, 96 bp, Aspergillus novofumigatus
  misc_feature: 101
atttactactactatatttaaaaagtttatatcttatatataggagatagtatctataaattatattattataatcctctattagctataattatt

SEQ ID NO: 15231 - DNA, 96 bp, Aspergillus novofumigatus
  misc_feature: 101
atttaagtagagggataagaggagtataagattaagtaaattatagtaaagtaaatatatataataaaggcaggtaaaactaaaaactaatacctt

SEQ ID NO: 15232 - DNA, 96 bp, Aspergillus novofumigatus
  misc_feature: 101
attcctgatcctattcctgatcctattcctgatcctattcctgatcctattcctgatcctattcctgatcctattcctgatcctattcctgatcct

SEQ ID NO: 15233 - DNA, 96 bp, Aspergillus novofumigatus
  misc_feature: 101
agataataataagaattactttatatatatatatttatatgtaagtatataagaaggataatttatatagattagtttagtagtttagattttaat

SEQ ID NO: 15234 - DNA, 96 bp, Aspergillus novofumigatus
  misc_feature: 101
atgctaactaatcttaatctactaatattactacctctcttactacttaccttactattaaccttactatctactatgatatttatattactatct

SEQ ID NO: 15235 - DNA, 96 bp, Aspergillus novofumigatus
  misc_feature: 101
atcttctctcttattctattaaaaatatacccttcttctctcttatattataattaatctactctctttttatccttattctctctatccctgatt

SEQ ID NO: 15236 - DNA, 96 bp, Aspergillus novofumigatus
  misc_feature: 101
agtttagtattagatatattttattaatagagtttaagaagtatagtatactttaatatatattatttttagaatttcttctaaagtttagtatat

SEQ ID NO: 15237 - DNA, 96 bp, Aspergillus novofumigatus
  misc_feature: 101
aggcatataagtatataatatactctataggagtagatagattagttaattaaagataggatatatataactactaataagaatagagaagatagt

SEQ ID NO: 15238 - DNA, 96 bp, Aspergillus novofumigatus
  misc_feature: 101
aactcttacttatattaatctctatctataattctttctctttcttctctttctctctttctttcttatctctctaactctaaatatcctcttcct

SEQ ID NO: 15239 - DNA, 96 bp, Aspergillus novofumigatus
  misc_feature: 101
aaagagaaaagaagaaagaaaagaaaagaaagaagagttagatatagaaaaaagaataattagaattttagtaagagattatataagggatagagt

SEQ ID NO: 15240 - DNA, 96 bp, Aspergillus novofumigatus
  misc_feature: 101
aactcttattcttaactcctattcttattccttctctcctaaaaacttttcttctaactcttattctaactctccttcttattattccttactctt

SEQ ID NO: 15241 - DNA, 96 bp, Aspergillus novofumigatus
  misc_feature: 101
aaaagataataataagaattactttatatatatatatttatatgtaagtatataagaaggataatttatatagattagtttagtagtttagatttt

SEQ ID NO: 15242 - DNA, 96 bp, Aspergillus novofumigatus
  misc_feature: 100
ttttttaatcttctctcttattctattaaaaatatacccttcttctctcttatattataattaatctactctctttttatccttattctctctatc

SEQ ID NO: 15243 - DNA, 96 bp, Aspergillus novofumigatus
  misc_feature: 100
agaaaagtttttaggagagaaggaataagaataggagttaagaataagagttagaagaagagataaaaagggttagaagaagaattaggaataaaa

SEQ ID NO: 15244 - DNA, 96 bp, Aspergillus novofumigatus
  misc_feature: 100
agattagatagagaagaagaggtaaaagagaatttagggatagattaagaggagagaagaaggagtaataagagtagaaagggagataatttaaaa

SEQ ID NO: 15245 - DNA, 96 bp, Aspergillus novofumigatus
  misc_feature: 100
ccctcactcttaaactcttacttatattaatctctatctataattctttctctttcttctctttctctctttctttcttatctctctaactctaaa

SEQ ID NO: 15246 - DNA, 96 bp, Aspergillus novofumigatus
  misc_feature: 100
aggagaggttaggatagttagaaggagagtaagaaatagaataagagtaaggggtagtaagtgtagatagaagagagagatagagaaagaggtaaa

SEQ ID NO: 15247 - DNA, 96 bp, Aspergillus novofumigatus
  misc_feature: 100
tccccttattcattctttctaattcctcttatctttaaatttcttcctctaactctatctcttcttctatacttattaatccttactcttcttaaa

SEQ ID NO: 15248 - DNA, 96 bp, Aspergillus novofumigatus
  misc_feature: 100
ttcttctctttcttcttattcttcttattcttcctctctttcttaccctttacttaaactctttctatcttatctatctttaccttctattctttt

SEQ ID NO: 15249 - DNA, 96 bp, Aspergillus novofumigatus
  misc_feature: 100
ggtttagaatagtaagggtaaggataagagtaagggtttagtttaggggagagttagggagagatagaaggggagatagagggagagatagaagaa

SEQ ID NO: 15250 - DNA, 96 bp, Aspergillus novofumigatus
  misc_feature: 100
ttcttctaatctacttattaaatcctaactttaatcctttcttctcttctctactctttcttcttttctttcttattcttctctcttatttattta

SEQ ID NO: 15251 - DNA, 96 bp, Aspergillus novofumigatus
  misc_feature: 100
ttctctctttctaccctttctaactccctctcttctttttttaatctatctctaaatcctcttcttcctactcttcttaatctactctcttaaaat

SEQ ID NO: 15252 - DNA, 96 bp, Aspergillus novofumigatus
  misc_feature: 100
ttctctatagatcttatacttactatagtaataaataaagtaataatacttataattataatatagaaatagactttagtaaatatctaaatagta

SEQ ID NO: 15253 - DNA, 96 bp, Aspergillus novofumigatus
  misc_feature: 100
ttctataagactaatatatatattaagatttataatatttactagaaacttaatctttataattattataagcttatcctctatagctattatact

SEQ ID NO: 15254 - DNA, 96 bp, Aspergillus novofumigatus
  misc_feature: 100
ttctaattattcttttttctatatctgactcttctttcttttcttttctttcttcttttctctttcttttctatctattatcttcttactatctaa

SEQ ID NO: 15255 - DNA, 96 bp, Aspergillus novofumigatus
  misc_feature: 100
ttctaactcttattcttaactcctattcttattccttctctcctaaaaacttttcttctaactcttattctaactctccttcttattattccttac

SEQ ID NO: 15256 - DNA, 96 bp, Aspergillus novofumigatus
  misc_feature: 100
ttctaacccttaccttaatatattaataatttctattttattcctaacccttattctctctcttattattatcttttattttcttttcttttctat

SEQ ID NO: 15257 - DNA, 96 bp, Aspergillus novofumigatus
  misc_feature: 100
agttttagtaaagagaagaaataaatataattaaaaatagaagaagaaagggaagaggaaagggaagaggaaaggaaagaggaaagggaagaggaa

SEQ ID NO: 15258 - DNA, 96 bp, Aspergillus novofumigatus
  misc_feature: 100
ttattcttttttctatatctgactcttctttcttttcttttctttcttcttttctctttcttttctatctattatcttcttactatctaaccctta

SEQ ID NO: 15259 - DNA, 96 bp, Aspergillus novofumigatus
  misc_feature: 100
ttattcttctctcttatttatttaattatgaacccttctcctctcttatcttataattaatctaatctcttttaatccttattctctctatcctaa

SEQ ID NO: 15260 - DNA, 96 bp, Aspergillus novofumigatus
  misc_feature: 100
ttattatcttttattttcttttcttttctattccctttcctcttccctttcctcttccctttcttctcctatttttaattatatttatttcttctc

SEQ ID NO: 15261 - DNA, 96 bp, Aspergillus novofumigatus
  misc_feature: 100
ttattataggctgcccctataatatatactatcttatatatatagctatataatcacctaattagttatataattataactagttattatattaat

SEQ ID NO: 15262 - DNA, 96 bp, Aspergillus novofumigatus
  misc_feature: 100
ttatcttgaaatttcttactctaatactatctctttttttctaatcttctctctttctaccctttctaactccctctcttctttttttaatctatc

SEQ ID NO: 15263 - DNA, 96 bp, Aspergillus novofumigatus
  misc_feature: 100
ttatctaatctcttactaaaattctaattattcttttttctatatctatctcttctttcttttcttttctttcttctttcctctttcttttctatc

SEQ ID NO: 15264 - DNA, 96 bp, Aspergillus novofumigatus
  misc_feature: 100
aaagaaaagaaaagaaagaagagttagatatagaaaaaagaataattagaattttagtaagagattatataagggatagagtaagggttagtataa

SEQ ID NO: 15265 - DNA, 96 bp, Aspergillus novofumigatus
  misc_feature: 100
ttagtattattatataatattattcttatttttcttatagtaaattaattactatactatatttacctagtatatttatatctactaataagttag

SEQ ID NO: 15266 - DNA, 96 bp, Aspergillus novofumigatus
  misc_feature: 100
ttagattagaagggataagagaggagattaagaagagatagaggagagagggagtaagagagagatagaataagagatagaataagagatagaata

SEQ ID NO: 15267 - DNA, 96 bp, Aspergillus novofumigatus
  misc_feature: 100
ttagacactagcttatagttatataataatatactaattaatatagcaagcttatattatataatcttagctataatttatatacccccttttata

SEQ ID NO: 15268 - DNA, 96 bp, Aspergillus novofumigatus
  misc_feature: 100
ttagaagaaattctaaaaataatatatattaaagtatactatacttcttaaactctattaataaaatatatctaatactaaactagaaatatatta

SEQ ID NO: 15269 - DNA, 96 bp, Aspergillus novofumigatus
  misc_feature: 100
ttactctatcccttatataatctcttactaaaattctaattattcttttttctatatctgactcttctttcttttcttttctttcttcttttctct

SEQ ID NO: 15270 - DNA, 96 bp, Aspergillus novofumigatus
  misc_feature: 100
taaataattatagctaatagaggattataataatataatttatagatactatctcctatatataagatataaactttttaaatatagtagtagtaa

SEQ ID NO: 15271 - DNA, 96 bp, Aspergillus novofumigatus
  misc_feature: 100
aataagaattataagaagagttaaagatagtaagttaaagattagaatatagattaaaaagagaaagaaaatatagataaatagatagaagattaa

SEQ ID NO: 15272 - DNA, 96 bp, Aspergillus novofumigatus
  misc_feature: 100
ttaatctactaatattactacctctcttactacttaccttactattaaccttactatctactatgatatttatattactatctaccttattaccta

SEQ ID NO: 15273 - DNA, 96 bp, Aspergillus novofumigatus
  misc_feature: 100
ttaaataatcctattctataaaagaagctagattatcctattatatatagaatattatagctctatagctataatattttaataagtctatattaa

SEQ ID NO: 15274 - DNA, 96 bp, Aspergillus novofumigatus
  misc_feature: 100
ttaaataattatagctaatagaggattataataatataatttatagatactatctcctatatataagatataaactttttaaatatagtagtagta

SEQ ID NO: 15275 - DNA, 96 bp, Aspergillus novofumigatus
  misc_feature: 100
aggtaaaggcccttttaaataatcctattctataaaagaagctagattatcctattatatatagaatattatagctctatagctataatattttaa

SEQ ID NO: 15276 - DNA, 96 bp, Aspergillus novofumigatus
  misc_feature: 100
cccttattctctctcttattattatcttttattttcttttcttttctattccctttcctcttccctttcctcttccctttcttctcctatttttaa

SEQ ID NO: 15277 - DNA, 96 bp, Aspergillus novofumigatus
  misc_feature: 100
gtataaaccactgattcagctaacatactatataaaccaaccgtataatatatatctctgcgcattatggtatactaaaatatatattcattccca

SEQ ID NO: 15278 - DNA, 96 bp, Aspergillus novofumigatus
  misc_feature: 100
tcttttttcttctccctttttatctcttctctctatttctctcttaattcttactctatctcttactttacctctttctctatctctctcttctat

SEQ ID NO: 15279 - DNA, 96 bp, Aspergillus novofumigatus
  misc_feature: 100
agagagttttagtaaagagaagaaataaatataattaaaaatagaagaagaaagggaagaggaaagggaagaggaaaggaaagaggaaagggaaga

SEQ ID NO: 15280 - DNA, 96 bp, Aspergillus novofumigatus
  misc_feature: 100
tcttcattctaaatcctctctcttcctaaatccttctaaatccttattttcctatatctatctatctctactcttattaacccttcctcctctccc

SEQ ID NO: 15281 - DNA, 96 bp, Aspergillus novofumigatus
  misc_feature: 100
tcttattcttaactcctattcttattccttctctcctaaaaacttttcttctaactcttattctaactctccttcttattattccttactcttctt

SEQ ID NO: 15282 - DNA, 96 bp, Aspergillus novofumigatus
  misc_feature: 100
gattagaagggataagagaggagattaagaagagatagaggagagagggagtaagagagagatagaataagagatagaataagagatagaataaga

SEQ ID NO: 15283 - DNA, 96 bp, Aspergillus novofumigatus
  misc_feature: 100
tcttatattcttcttctaatctacttattaaatcctaactttaatcctttcttctcttctctactctttcttcttttctttcttattcttctctct

SEQ ID NO: 15284 - DNA, 96 bp, Aspergillus novofumigatus
  misc_feature: 100
gggttaataagagtagagatagatagatataggaaaataaggatttagaaggatttaggaagagagaggatttagaatgaagatagaaagaagaga

SEQ ID NO: 15285 - DNA, 96 bp, Aspergillus novofumigatus
  misc_feature: 100
ataaagagggtgaggataagagtaagggtaaggatttagattagaagggataagagaggagattaagaagagatagaataagagatagataagaga

SEQ ID NO: 15286 - DNA, 96 bp, Aspergillus novofumigatus
  misc_feature: 100
tctctcttctatctacacttactaccccttactcttattctatttcttactctccttctaactatcctaacctctcctaatctcttcttctatctc

SEQ ID NO: 15287 - DNA, 96 bp, Aspergillus novofumigatus
  misc_feature: 100
aagagaagaaataaatataattaaaaatagaagaagaaagggaagaggaaagggaagaggaaaggaaagaggaaagggaagaggaaagggaataga

SEQ ID NO: 15288 - DNA, 96 bp, Aspergillus novofumigatus
  misc_feature: 100
tctaactccctctcttctttttttaatctatctctaaatcctcttcttcctactcttcttaatctactctcttaaaatcccttcttttttcttcta

SEQ ID NO: 15289 - DNA, 96 bp, Aspergillus novofumigatus
  misc_feature: 100
gttagaagaaaagtttttaggagagaaggaataagaataggagttaagaataagagttagaagaagagataaaaagggttagaagaagaattagga

SEQ ID NO: 15290 - DNA, 96 bp, Aspergillus novofumigatus
  misc_feature: 100
tagtaaagagaagaaataaatataattaaaaatagaagaagaaagggaagaggaaagggaagaggaaaggaaagaggaaagggaagaggaaaggga

SEQ ID NO: 15291 - DNA, 96 bp, Aspergillus novofumigatus
  misc_feature: 100
tccctctcttctttttttaatctatctctaaatcctcttcttcctactcttcttaatctactctcttaaaatcccttcttttttcttctactatct

SEQ ID NO: 15292 - DNA, 96 bp, Aspergillus novofumigatus
  misc_feature: 100
tatttatttaatcttctatctatttatctatattttctttctctttttaatctatattctaatctttaacttactatctttaactcttcttataat

SEQ ID NO: 15293 - DNA, 96 bp, Aspergillus novofumigatus
  misc_feature: 100
ctcactcttaaactcttacttatattaatctctatctataattctttctctttcttctctttctctctttctttcttatctctctaactctaaata

SEQ ID NO: 15294 - DNA, 96 bp, Aspergillus novofumigatus
  misc_feature: 100
tattataggctgcccctataatatatactatcttatatatatagctatataatcacctaattagttatataattataactagttattatattaatt

SEQ ID NO: 15295 - DNA, 96 bp, Aspergillus novofumigatus
  misc_feature: 100
tatcttgaaatttcttactctaatactatctctttttttctaatcttctctctttctaccctttctaactccctctcttctttttttaatctatct

SEQ ID NO: 15296 - DNA, 96 bp, Aspergillus novofumigatus
  misc_feature: 100
tatcccttatataatctcttactaaaattctaattattcttttttctatatctgactcttctttcttttcttttctttcttcttttctctttcttt

SEQ ID NO: 15297 - DNA, 96 bp, Aspergillus novofumigatus
  misc_feature: 100
tatatctattctataagactaatatatatattaagatttataatatttactagaaacttaatctttataattattataagcttatcctctatagct

SEQ ID NO: 15298 - DNA, 96 bp, Aspergillus novofumigatus
  misc_feature: 100
tatagttctatatctattctataagactaatatatatattaagatttataatatttactagaaacttaatctttataattattataagcttatcct

SEQ ID NO: 15299 - DNA, 96 bp, Aspergillus novofumigatus
  misc_feature: 100
ccttttaaataatcctattctataaaagaagctagattatcctattatatatagaatattatagctctatagctataatattttaataagtctata

SEQ ID NO: 15300 - DNA, 96 bp, Aspergillus novofumigatus
  misc_feature: 100
tataagaaggataatttatatagattagtttagtagtttagattttaatatatataaagggtttataattaaatattaccttagaagagatagatc

SEQ ID NO: 15301 - DNA, 96 bp, Aspergillus novofumigatus
  misc_feature: 100
tactctatcccttatataatctcttactaaaattctaattattcttttttctatatctgactcttctttcttttcttttctttcttcttttctctt

SEQ ID NO: 15302 - DNA, 96 bp, Aspergillus novofumigatus
  misc_feature: 100
aagaaagaaaagaaaagaaagaagagatagatatagaaaaaagaataattagaattttagtaagagattagataagggatagagtaagggttagta

SEQ ID NO: 15303 - DNA, 96 bp, Aspergillus novofumigatus
  misc_feature: 100
taattattcttttttctatatctgactcttctttcttttcttttctttcttcttttctctttcttttctatctattatcttcttactatctaaccc

SEQ ID NO: 15304 - DNA, 96 bp, Aspergillus novofumigatus
  misc_feature: 100
taattataaagattaagtttctagtaaatattataaatcttaatatatatattagtcttatagaatagatatagaactatattctatattacttag

SEQ ID NO: 15305 - DNA, 96 bp, Aspergillus novofumigatus
  misc_feature: 100
taatctactaatattactacctctcttactacttaccttactattaaccttactatctactatgatatttatattactatctaccttattacctac

SEQ ID NO: 15306 - DNA, 96 bp, Aspergillus novofumigatus
  misc_feature: 100
attcttcttctaaccctttttatctcttcttctaactcttattcttaactcctattcttattccttctctcctaaaaacttttcttctaactctta

SEQ ID NO: 15307 - DNA, 96 bp, Aspergillus novofumigatus
  misc_feature: 100
taactccctctcttctttttttaatctatctctaaatcctcttcttcctactcttcttaatctactctcttaaaatcccttcttttttcttctact

SEQ ID NO: 15308 - DNA, 96 bp, Aspergillus novofumigatus
  misc_feature: 100
taaccctttttatctcttcttctaactcttattcttaactcctattcttattccttctctcctaaaaacttttcttctaactcttattctaactct

SEQ ID NO: 15309 - DNA, 96 bp, Aspergillus novofumigatus
  misc_feature: 100
taaactcttacttatattaatctctatctataattctttctctttcttctctttctctctttctttcttatctctctaactctaaatatcctcttc

SEQ ID NO: 15310 - DNA, 96 bp, Aspergillus novofumigatus
  misc_feature: 100
cctatttaagtagagggataagaggagtataagattaagtaaattatagtaaagtaaatatatataataaaggcaggtaaaactaaaaactaatac

SEQ ID NO: 15311 - DNA, 96 bp, Aspergillus novofumigatus
  misc_feature: 100
attctataagactaatatatatattaagatttataatatttactagaaacttaatctttataattattataagcttatcctctatagctattatac

SEQ ID NO: 15312 - DNA, 96 bp, Aspergillus novofumigatus
  misc_feature: 100
ggtaaaggcccttttaaataatcctattctataaaagaagctagattatcctattatatatagaatattatagctctatagctataatattttaat

SEQ ID NO: 15313 - DNA, 96 bp, Aspergillus novofumigatus
  misc_feature: 100
aaactcttacttatattaatctctatctataattctttctctttcttctctttctctctttctttcttatctctctaactctaaatatcctcttcc

SEQ ID NO: 15314 - DNA, 96 bp, Aspergillus novofumigatus
  misc_feature: 100
gcagtaagaccagcaggaagaacccagtaagataggtagtatagtagatagtaaggcaggcagtgaagcaggtagtaaggcaggtagtaaggcagg

SEQ ID NO: 15315 - DNA, 96 bp, Aspergillus novofumigatus
  misc_feature: 100
gattaggagaggttaggatagttagaaggagagtaagaaatagaataagagtaaggggtagtaagtgtagatagaagagagagatagagaaagagg

SEQ ID NO: 15316 - DNA, 96 bp, Aspergillus novofumigatus
  misc_feature: 100
gattaggaatgagttaggattaggaattggttaggattaggaataagttaggattaggaatgagttaggattagggatttagtaagaggttaatag

SEQ ID NO: 15317 - DNA, 96 bp, Aspergillus novofumigatus
  misc_feature: 100
gataaagagggtgaggataagagtaagggtaaggatttagattagaagggataagagaggagattaagaagagatagaataagagatagataagag

SEQ ID NO: 15318 - DNA, 96 bp, Aspergillus novofumigatus
  misc_feature: 100
cttactctatcccttatctaatctcttactaaaattctaattattcttttttctatatctatctcttctttcttttcttttctttcttctttcctc

SEQ ID NO: 15319 - DNA, 96 bp, Aspergillus novofumigatus
  misc_feature: 100
aaccctttttatctcttcttctaactcttattcttaactcctattcttattccttctctcctaaaaacttttcttctaactcttattctaactctc

SEQ ID NO: 15320 - DNA, 96 bp, Aspergillus novofumigatus
  misc_feature: 100
gagagagttttagtaaagagaagaaataaatataattaaaaatagaagaagaaagggaagaggaaagggaagaggaaaggaaagaggaaagggaag

SEQ ID NO: 15321 - DNA, 96 bp, Aspergillus novofumigatus
  misc_feature: 100
gacagggactgaggagggaggcagtgagataggcagtaaggcaggcagcaagcaaagcagtgagcaaggcagtgagtaaggcagtcagcaagatag

SEQ ID NO: 15322 - DNA, 96 bp, Aspergillus novofumigatus
  misc_feature: 100
gaagggttaataagagtagagatagatagatataggaaaataaggatttagaaggatttaggaagagagaggatttagaatgaagatagaaagaag

SEQ ID NO: 15323 - DNA, 96 bp, Aspergillus novofumigatus
  misc_feature: 100
aaactatatctctctttttaaattatctccctttctactcttattactccttcttctctcctcttaatctatccctaaattctcttttacctcttc

SEQ ID NO: 15324 - DNA, 96 bp, Aspergillus novofumigatus
  misc_feature: 100
atatatcttatattcttcttctaatctacttattaaatcctaactttaatcctttcttctcttctctactctttcttcttttctttcttattcttc

SEQ ID NO: 15325 - DNA, 96 bp, Aspergillus novofumigatus
  misc_feature: 100
attagatagagaagaagaggtaaaagagaatttagggatagattaagaggagagaagaaggagtaataagagtagaaagggagataatttaaaaag

SEQ ID NO: 15326 - DNA, 96 bp, Aspergillus novofumigatus
  misc_feature: 100
atgagttaggattaggaattggttaggattaggaataagttaggattaggaatgagttaggattagggatttagtaagaggttaataggtttaaag

SEQ ID NO: 15327 - DNA, 96 bp, Aspergillus novofumigatus
  misc_feature: 100
cttcattctaaatcctctctcttcctaaatccttctaaatccttattttcctatatctatctatctctactcttattaacccttcctcctctccct

SEQ ID NO: 15328 - DNA, 96 bp, Aspergillus novofumigatus
  misc_feature: 100
aaaggcccttttaaataatcctattctataaaagaagctagattatcctattatatatagaatattatagctctatagctataatattttaataag

SEQ ID NO: 15329 - DNA, 96 bp, Aspergillus novofumigatus
  misc_feature: 100
cttatattcttcttctaatctacttattaaatcctaactttaatcctttcttctcttctctactctttcttcttttctttcttattcttctctctt

SEQ ID NO: 15330 - DNA, 96 bp, Aspergillus novofumigatus
  misc_feature: 100
aatttattaggattaggaatgagttaggattaggaattggttaggattaggaataagttaggattaggaatgagttaggattagggatttagtaag

SEQ ID NO: 15331 - DNA, 96 bp, Aspergillus novofumigatus
  misc_feature: 100
agggttaataagagtagagatagatagatataggaaaataaggatttagaaggatttaggaagagagaggatttagaatgaagatagaaagaagag

SEQ ID NO: 15332 - DNA, 96 bp, Aspergillus novofumigatus
  misc_feature: 100
aagagtaagggtaaggatttagattagaagggataagagaggagattaagaagagatagaataagagatagataagagatagaataagagtaagag

SEQ ID NO: 15333 - DNA, 96 bp, Aspergillus novofumigatus
  misc_feature: 100
ctcttaaactcttacttatattaatctctatctataattctttctctttcttctctttctctctttctttcttatctctctaactctaaatatcct

SEQ ID NO: 15334 - DNA, 96 bp, Aspergillus novofumigatus
  misc_feature: 100
ctccaccctccatgggaccacgccagttggcggtccgagatggccgggcgcgcgccctgaccggcagcaggggcccgcgcgcgccgccgcccgggg

SEQ ID NO: 15335 - DNA, 96 bp, Aspergillus novofumigatus
  misc_feature: 100
ctatcccttatctaatctcttactaaaattctaattattcttttttctatatctatctcttctttcttttcttttctttcttctttcctctttctt

SEQ ID NO: 15336 - DNA, 96 bp, Aspergillus novofumigatus
  misc_feature: 100
ctaaaattctaattattcttttttctatatctatctcttctttcttttcttttctttcttctttcctctttcttttctatctattatcttcttact

SEQ ID NO: 15337 - DNA, 96 bp, Aspergillus novofumigatus
  misc_feature: 100
agaaaagaagaaagaaaagaaaagaaagaagagttagatatagaaaaaagaataattagaattttagtaagagattatataagggatagagtaagg

SEQ ID NO: 15338 - DNA, 96 bp, Aspergillus novofumigatus
  misc_feature: 100
ccctcttatcttgaaatttcttactctaatactatctctttttttctaatcttctctctttctaccctttctaactccctctcttctttttttaat

SEQ ID NO: 15339 - DNA, 96 bp, Aspergillus novofumigatus
  misc_feature: 100
ccccccccaagggtccccgccaactggtcacccccggggcgcgcgcgcccggcttccattgaccccagtgcctgtgtgtctcgataagtggccggg

SEQ ID NO: 15340 - DNA, 96 bp, Aspergillus novofumigatus
  misc_feature: 100
atttaactttatccttttcttttaattttatctttccttaattttaatttcttcttctctttcttcttctctttcttcttctctttcttcttctct

SEQ ID NO: 15341 - DNA, 96 bp, Aspergillus novofumigatus
  misc_feature: 100
attcttaactctctctttctctttcttctcctttctatccctaactcttattctaacccttcttctatctcttcctctaatcctccttctaattct

SEQ ID NO: 15342 - DNA, 96 bp, Aspergillus novofumigatus
  misc_feature: 100
atatataagatagagagagttttagtaaagagaagaaataaatataattaaaaataggagaagaaagggaagaggaaagggaagaggaaagggaat

SEQ ID NO: 15343 - DNA, 96 bp, Aspergillus novofumigatus
  misc_feature: 100
attattcttttttctatatctgactcttctttcttttcttttctttcttcttttctctttcttttctatctattatcttcttactatctaaccctt

SEQ ID NO: 15344 - DNA, 96 bp, Aspergillus novofumigatus
  misc_feature: 100
aggattaggaatgagttaggattaggaattggttaggattaggaataagttaggattaggaatgagttaggattagggatttagtaagaggttaat

SEQ ID NO: 15345 - DNA, 96 bp, Aspergillus novofumigatus
  misc_feature: 100
attaaataattatagctaatagaggattataataatataatttatagatactatctcctatatataagatataaactttttaaatatagtagtagt

SEQ ID NO: 15346 - DNA, 96 bp, Aspergillus novofumigatus
  misc_feature: 100
atatattaataatttctattttattcctaacccttattctctctcttattattatcttttattttcttttcttttctattccctttcctcttccct

SEQ ID NO: 15347 - DNA, 96 bp, Aspergillus novofumigatus
  misc_feature: 100
agaaagaaaagaaaagaaagaagagatagatatagaaaaaagaataattagaattttagtaagagattagataagggatagagtaagggttagtat

SEQ ID NO: 15348 - DNA, 96 bp, Aspergillus novofumigatus
  misc_feature: 100
agaaagaaaagaaaagaaagaagagttagatatagaaaaaagaataattagaattttagtaagagattatataagggatagagtaagggttagtat

SEQ ID NO: 15349 - DNA, 96 bp, Aspergillus novofumigatus
  misc_feature: 100
actaatagaaaggtaataaatatcttcttaagacttaatataatctatatctctatatattatctaagaaatctagaaagatattacttatattct

SEQ ID NO: 15350 - DNA, 96 bp, Aspergillus novofumigatus
  misc_feature: 100
agaaaagaaaagaaagaagagttagatatagaaaaaagaataattagaattttagtaagagattatataagggatagagtaagggttagtataatt

SEQ ID NO: 15351 - DNA, 96 bp, Aspergillus novofumigatus
  misc_feature: 100
aaggcccttttaaataatcctattctataaaagaagctagattatcctattatatatagaatattatagctctatagctataatattttaataagt

SEQ ID NO: 15352 - DNA, 96 bp, Aspergillus novofumigatus
  misc_feature: 100
actctatcccttatctaatctcttactaaaattctaattattcttttttctatatctatctcttctttcttttcttttctttcttctttcctcttt

SEQ ID NO: 15353 - DNA, 96 bp, Aspergillus novofumigatus
  misc_feature: 100
aactaatcttaatctactaatattactacctctcttactacttaccttactattaaccttactatctactatgatatttatattactatctacctt

SEQ ID NO: 15354 - DNA, 96 bp, Aspergillus novofumigatus
  misc_feature: 100
aacccttactctatcccttatctaatctcttactaaaattctaattattcttttttctatatctatctcttctttcttttcttttctttcttcttt

SEQ ID NO: 15355 - DNA, 96 bp, Aspergillus novofumigatus
  misc_feature: 99
tttttatctcttcttctaactcttattcttaactcctattcttattccttctctcctaaaaacttttcttctaactcttattctaactctccttct

SEQ ID NO: 15356 - DNA, 96 bp, Aspergillus novofumigatus
  misc_feature: 99
tttttaatcttctctcttattctattaaaaatatacccttcttctctcttatattataattaatctactctctttttatccttattctctctatcc

SEQ ID NO: 15357 - DNA, 96 bp, Aspergillus novofumigatus
  misc_feature: 99
ttttatctcttcttctaactcttattcttaactcctattcttattccttctctcctaaaaacttttcttctaactcttattctaactctccttctt

SEQ ID NO: 15358 - DNA, 96 bp, Aspergillus novofumigatus
  misc_feature: 99
ttttaatcttctctcttattctattaaaaatatacccttcttctctcttatattataattaatctactctctttttatccttattctctctatccc

SEQ ID NO: 15359 - DNA, 96 bp, Aspergillus novofumigatus
  misc_feature: 99
tttctaccccttattcttatcttaaacttactaacccttactctattacttatccttccttactttattctccttactacctcttaccttctatct

SEQ ID NO: 15360 - DNA, 96 bp, Aspergillus novofumigatus
  misc_feature: 99
gttttagtaaagagaagaaataaatataattaaaaatagaagaagaaagggaagaggaaagggaagaggaaaggaaagaggaaagggaagaggaaa

SEQ ID NO: 15361 - DNA, 96 bp, Aspergillus novofumigatus
  misc_feature: 99
tttatttaatttactactactatatttaaaaagtttatatcttatatataggagatagtatctataaattatattattataatcctctattagcta

SEQ ID NO: 15362 - DNA, 96 bp, Aspergillus novofumigatus
  misc_feature: 99
aagaaaagtttttaggagagaaggaataagaataggagttaagaataagagttagaagaagagataaaaagggttagaagaagaattaggaataaa

SEQ ID NO: 15363 - DNA, 96 bp, Aspergillus novofumigatus
  misc_feature: 99
tttagtattattatataatattattcttatttttcttatagtaaattaattactatactatatttacctagtatatttatatctactaataagtta

SEQ ID NO: 15364 - DNA, 96 bp, Aspergillus novofumigatus
  misc_feature: 99
tttagaagaaattctaaaaataatatatattaaagtatactatacttcttaaactctattaataaaatatatctaatactaaactagaaatatatt

SEQ ID NO: 15365 - DNA, 96 bp, Aspergillus novofumigatus
  misc_feature: 99
aaataattatagctaatagaggattataataatataatttatagatactatctcctatatataagatataaactttttaaatatagtagtagtaaa

SEQ ID NO: 15366 - DNA, 96 bp, Aspergillus novofumigatus
  misc_feature: 99
tttaatcttctctcttattctattaaaaatatacccttcttctctcttatattataattaatctactctctttttatccttattctctctatccct

SEQ ID NO: 15367 - DNA, 96 bp, Aspergillus novofumigatus
  misc_feature: 99
ttctctactctttcttctttccttttttaatcttctctcttattctattaaaaatatacccttcttctctcttatattataattaatctactctct

SEQ ID NO: 15368 - DNA, 96 bp, Aspergillus novofumigatus
  misc_feature: 99
tatgtaagtatataagaaggataatttatatagattagtttagtagtttagattttaatatatataaagggtttataattaaatattaccttagaa

SEQ ID NO: 15369 - DNA, 96 bp, Aspergillus novofumigatus
  misc_feature: 99
ttattcttaactcctattcttattccttctctcctaaaaacttttcttctaactcttattctaactctccttcttattattccttactcttcttct

SEQ ID NO: 15370 - DNA, 96 bp, Aspergillus novofumigatus
  misc_feature: 99
agggataaagagggtgaggataagagtaagggtaaggatttagattagaagggataagagaggagattaagaagagatagaataagagatagataa

SEQ ID NO: 15371 - DNA, 96 bp, Aspergillus novofumigatus
  misc_feature: 99
ttatatatcttatattcttcttctaatctacttattaaatcctaactttaatcctttcttcttttctctactctttcttctcttctctactctttc

SEQ ID NO: 15372 - DNA, 96 bp, Aspergillus novofumigatus
  misc_feature: 99
tccctcactcttaaactcttacttatattaatctctatctataattctttctctttcttctctttctctctttctttcttatctctctaactctaa

SEQ ID NO: 15373 - DNA, 96 bp, Aspergillus novofumigatus
  misc_feature: 99
cttactctatctcttactttacctctttctctatctctctcttctatctacacttactaccccttactcttattctatttcttactctccttctaa

SEQ ID NO: 15374 - DNA, 96 bp, Aspergillus novofumigatus
  misc_feature: 99
tatctacacttactaccccttactcttattctatttcttactctccttctaactatcctaacctctcctaatctcttcttctatctcttcttctaa

SEQ ID NO: 15375 - DNA, 96 bp, Aspergillus novofumigatus
  misc_feature: 99
gaatttattaggattaggaatgagttaggattaggaattggttaggattaggaataagttaggattaggaatgagttaggattagggatttagtaa

SEQ ID NO: 15376 - DNA, 96 bp, Aspergillus novofumigatus
  misc_feature: 99
aggttagattcagtattataagagtattaataagtaaattaatattatattaataaggaaaaaatattatattaataatttaatatcctaatttaa

SEQ ID NO: 15377 - DNA, 96 bp, Aspergillus novofumigatus
  misc_feature: 99
tccctcttatcttgaaatttcttactctaatactatctctttttttctaatcttctctctttctaccctttctaactccctctcttctttttttaa

SEQ ID NO: 15378 - DNA, 96 bp, Aspergillus novofumigatus
  misc_feature: 99
tgtaagtatataagaaggataatttatatagattagtttagtagtttagattttaatatatataaagggtttataattaaatattaccttagaaga

SEQ ID NO: 15379 - DNA, 96 bp, Aspergillus novofumigatus
  misc_feature: 99
aggcagtaagaccagcaggaagaacccagtaagataggtagtatagtagatagtaaggcaggcagtgaagcaggtagtaaggcaggtagtaaggca

SEQ ID NO: 15380 - DNA, 96 bp, Aspergillus novofumigatus
  misc_feature: 99
actgattcggctaacatactatataaaccaaccgtataatatatatctctgcgcattatggtatactaaaatatatattcattcccaaatatatca

SEQ ID NO: 15381 - DNA, 96 bp, Aspergillus novofumigatus
  misc_feature: 99
tcttttattttcttttcttttctattccctttcctcttccctttcctcttccctttcttctcctatttttaattatatttatttcttctctttact

SEQ ID NO: 15382 - DNA, 96 bp, Aspergillus novofumigatus
  misc_feature: 99
tcttgaaatttcttactctaatactatctctttttttctaatcttctctctttctaccctttctaactccctctcttctttttttaatctatctct

SEQ ID NO: 15383 - DNA, 96 bp, Aspergillus novofumigatus
  misc_feature: 99
tcttcttctaatctacttattaaatcctaactttaatcctttcttctcttctctactctttcttcttttctttcttattcttctctcttatttatt

SEQ ID NO: 15384 - DNA, 96 bp, Aspergillus novofumigatus
  misc_feature: 99
agaagggataagagaggagattaagaagagatagaataagagatagataagagatagaataagagtaagagtagagtaagagtaagggttagaaga

SEQ ID NO: 15385 - DNA, 96 bp, Aspergillus novofumigatus
  misc_feature: 99
ggataaagagggtgaggataagagtaagggtaaggatttagattagaagggataagagaggagattaagaagagatagaataagagatagataaga

SEQ ID NO: 15386 - DNA, 96 bp, Aspergillus novofumigatus
  misc_feature: 99
tcttaactcctattcttattccttctctcctaaaaacttttcttctaactcttattctaactctccttcttattattccttactcttcttctaatc

SEQ ID NO: 15387 - DNA, 96 bp, Aspergillus novofumigatus
  misc_feature: 99
agaaaggtaataaatatcttcttaagacttaatataatctatatctctatatattatctaagaaatctagaaagatattacttatattctttaaga

SEQ ID NO: 15388 - DNA, 96 bp, Aspergillus novofumigatus
  misc_feature: 99
tcttaaactcttacttatattaatctctatctataattctttctctttcttctctttctctctttctttcttatctctctaactctaaatatcctc

SEQ ID NO: 15389 - DNA, 96 bp, Aspergillus novofumigatus
  misc_feature: 99
agatagagaagaagaggtaaaagagaatttagggatagattaagaggagagaagaaggagtaataagagtagaaagggagataatttaaaaagaga

SEQ ID NO: 15390 - DNA, 96 bp, Aspergillus novofumigatus
  misc_feature: 99
gatagaaggagagatagaaggagagatagaaggagagatagaaggagagatagaaggagagatagaaggagagatagaaggagagttagaaggaga

SEQ ID NO: 15391 - DNA, 96 bp, Aspergillus novofumigatus
  misc_feature: 99
tctattccctttcctcttccctttcctcttccctttcttctcctatttttaattatatttatttcttctctttactaaaactctctctatcttata

SEQ ID NO: 15392 - DNA, 96 bp, Aspergillus novofumigatus
  misc_feature: 99
tctatctcttactttacctctttctctatctctctcttctatctacacttactaccccttactcttattctatttcttactctccttctaactatc

SEQ ID NO: 15393 - DNA, 96 bp, Aspergillus novofumigatus
  misc_feature: 99
tctatatctattctataagactaatatatatattaagatttataatatttactagaaacttaatctttataattattataagcttatcctctatag

SEQ ID NO: 15394 - DNA, 96 bp, Aspergillus novofumigatus
  misc_feature: 99
tctataagactaatatatatattaagatttataatatttactagaaacttaatctttataattattataagcttatcctctatagctattatacta

SEQ ID NO: 15395 - DNA, 96 bp, Aspergillus novofumigatus
  misc_feature: 99
tctactctttcttcttttctttcttattcttctctcttatttatttaattatgaacccttctcctctcttatcttataattaatctaatctctttt

SEQ ID NO: 15396 - DNA, 96 bp, Aspergillus novofumigatus
  misc_feature: 99
gagttttagtaaagagaagaaataaatataattaaaaatagaagaagaaagggaagaggaaagggaagaggaaaggaaagaggaaagggaagagga

SEQ ID NO: 15397 - DNA, 96 bp, Aspergillus novofumigatus
  misc_feature: 99
tatttaactttatccttttcttttaattttatctttccttaattttaatttcttcttctctttcttcttctctttcttcttctctttcttcttctc

SEQ ID NO: 15398 - DNA, 96 bp, Aspergillus novofumigatus
  misc_feature: 99
tattctctctcttattattatcttttattttcttttcttttctattccctttcctcttccctttcctcttccctttcttctcctatttttaattat

SEQ ID NO: 15399 - DNA, 96 bp, Aspergillus novofumigatus
  misc_feature: 99
tatataagatagagagagttttagtaaagagaagaaataaatataattaaaaataggagaagaaagggaagaggaaagggaagaggaaagggaata

SEQ ID NO: 15400 - DNA, 96 bp, Aspergillus novofumigatus
  misc_feature: 99
agacagggactgaggagggaggcagtgagataggcagtaaggcaggcagcaagcaaagcagtgagcaaggcagtgagtaaggcagtcagcaagata

SEQ ID NO: 15401 - DNA, 96 bp, Aspergillus novofumigatus
  misc_feature: 99
tatctcttcttctaactcttattcttaactcctattcttattccttctctcctaaaaacttttcttctaactcttattctaactctccttcttatt

SEQ ID NO: 15402 - DNA, 96 bp, Aspergillus novofumigatus
  misc_feature: 99
aaagagggtgaggataagagtaagggtaaggatttagattagaagggataagagaggagattaagaagagatagaataagagatagataagagata

SEQ ID NO: 15403 - DNA, 96 bp, Aspergillus novofumigatus
  misc_feature: 99
tatattcttcttctaatctacttattaaatcctaactttaatcctttcttcttttctctactctttcttctcttctctactctttcttctttcctt

SEQ ID NO: 15404 - DNA, 96 bp, Aspergillus novofumigatus
  misc_feature: 99
tatatcttatattcttcttctaatctacttattaaatcctaactttaatcctttcttctcttctctactctttcttcttttctttcttattcttct

SEQ ID NO: 15405 - DNA, 96 bp, Aspergillus novofumigatus
  misc_feature: 99
tatatatcttatattcttcttctaatctacttattaaatcctaactttaatcctttcttcttttctctactctttcttctcttctctactctttct

SEQ ID NO: 15406 - DNA, 96 bp, Aspergillus novofumigatus
  misc_feature: 99
gaaagaaaagaaaagaaagaagagttagatatagaaaaaagaataattagaattttagtaagagattatataagggatagagtaagggttagtata

SEQ ID NO: 15407 - DNA, 96 bp, Aspergillus novofumigatus
  misc_feature: 99
tagattatcctattatatatagaatattatagctctatagctataatattttaataagtctatattaatatatagcagctattctatattcttata

SEQ ID NO: 15408 - DNA, 96 bp, Aspergillus novofumigatus
  misc_feature: 99
taggagtagatagattagttaattaaagataggatatatataactactaataagaatagagaagatagtaatttaaaagataataataagaattac

SEQ ID NO: 15409 - DNA, 96 bp, Aspergillus novofumigatus
  misc_feature: 99
tagattagaagggataagagaggagattaagaagagatagaataagagatagataagagatagaataagagtaagagtagagtaagagtaagggtt

SEQ ID NO: 15410 - DNA, 96 bp, Aspergillus novofumigatus
  misc_feature: 99
attctaattattcttttttctatatctgactcttctttcttttcttttctttcttcttttctctttcttttctatctattatcttcttactatcta

SEQ ID NO: 15411 - DNA, 96 bp, Aspergillus novofumigatus
  misc_feature: 99
tagatagagaagaagaggtaaaagagaatttagggatagattaagaggagagaagaaggagtaataagagtagaaagggagataatttaaaaagag

SEQ ID NO: 15412 - DNA, 96 bp, Aspergillus novofumigatus
  misc_feature: 99
cctatatttattatagtaataaataaaataataatacttataattataataaagagatagactttagtaaatacctaaatagtaggatatagagta

SEQ ID NO: 15413 - DNA, 96 bp, Aspergillus novofumigatus
  misc_feature: 99
tactaatattactacctctcttactacttaccttactattaaccttactatctactatgatatttatattactatctaccttattacctaccttac

SEQ ID NO: 15414 - DNA, 96 bp, Aspergillus novofumigatus
  misc_feature: 99
aagtttagagaagggaaaagagtatataagttaatttagaaagaaaagaatagaaggtaaagatagataagatagaaagagtttaagtaaagggta

SEQ ID NO: 15415 - DNA, 96 bp, Aspergillus novofumigatus
  misc_feature: 99
ataggagtagatagattagttaattaaagataggatatatataactactaataagaatagagaagatagtaatttaaaagataataataagaatta

SEQ ID NO: 15416 - DNA, 96 bp, Aspergillus novofumigatus
  misc_feature: 99
aaacctattaacctcttactaaatccctaatcctaacttattcctaatcctaataaattcctaatcctataaattatctcttattctacctaatta

SEQ ID NO: 15417 - DNA, 96 bp, Aspergillus novofumigatus
  misc_feature: 99
taagtaatatagaatatagttctatatctattctataagactaatatatatattaagatttataatatttactagaaacttaatctttataattat

SEQ ID NO: 15418 - DNA, 96 bp, Aspergillus novofumigatus
  misc_feature: 99
cttctaactcttattcttaactcctattcttattccttctctcctaaaaacttttcttctaactcttattctaactctccttcttattattcctta

SEQ ID NO: 15419 - DNA, 96 bp, Aspergillus novofumigatus
  misc_feature: 99
taactcctattcttattccttctctcctaaaaacttttcttctaactcttattctaactctccttcttattattccttactcttcttctaatcctt

SEQ ID NO: 15420 - DNA, 96 bp, Aspergillus novofumigatus
  misc_feature: 99
taacccttaccttaatatattaataatttctattttattcctaacccttattctctctcttattattatcttttattttcttttcttttctattcc

SEQ ID NO: 15421 - DNA, 96 bp, Aspergillus novofumigatus
  misc_feature: 99
ctactctttcttcttttctttcttattcttctctcttatttatttaattatgaacccttctcctctcttatcttataattaatctaatctctttta

SEQ ID NO: 15422 - DNA, 96 bp, Aspergillus novofumigatus
  misc_feature: 99
gtttagtattattatataatattattcttatttttcttatagtaaattaattactatactatatttacctagtatatttatatctactaataagtt

SEQ ID NO: 15423 - DNA, 96 bp, Aspergillus novofumigatus
  misc_feature: 99
atctacacttactaccccttactcttattctatttcttactctccttctaactatcctaacctctcctaatctcttcttctatctcttcttctaac

SEQ ID NO: 15424 - DNA, 96 bp, Aspergillus novofumigatus
  misc_feature: 99
ctaactccctctcttctttttttaatctatctctaaatcctcttcttcctactcttcttaatctactctcttaaaatcccttcttttttcttctac

SEQ ID NO: 15425 - DNA, 96 bp, Aspergillus novofumigatus
  misc_feature: 99
gtaagtatataagaaggataatttatatagattagtttagtagtttagattttaatatatataaagggtttataattaaatattaccttagaagag

SEQ ID NO: 15426 - DNA, 96 bp, Aspergillus novofumigatus
  misc_feature: 99
ggttagattcagtattataagagtattaataagtaaattaatattatattaataaggaaaaaatattatattaataatttaatatcctaatttaat

SEQ ID NO: 15427 - DNA, 96 bp, Aspergillus novofumigatus
  misc_feature: 99
ctaattattcttttttctatatctgactcttctttcttttcttttctttcttcttttctctttcttttctatctattatcttcttactatctaacc

SEQ ID NO: 15428 - DNA, 96 bp, Aspergillus novofumigatus
  misc_feature: 99
ctatttaagtagagggataagaggagtataagattaagtaaattatagtaaagtaaatatatataataaaggcaggtaaaactaaaaactaatacc

SEQ ID NO: 15429 - DNA, 96 bp, Aspergillus novofumigatus
  misc_feature: 99
aatctactaatattactacctctcttactacttaccttactattaaccttactatctactatgatatttatattactatctaccttattacctacc

SEQ ID NO: 15430 - DNA, 96 bp, Aspergillus novofumigatus
  misc_feature: 99
gggataaagagggtgaggataagagtaagggtaaggatttagattagaagggataagagaggagattaagaagagatagaataagagatagataag

SEQ ID NO: 15431 - DNA, 96 bp, Aspergillus novofumigatus
  misc_feature: 99
aatatattaataatttctattttattcctaacccttattctctctcttattattatcttttattttcttttcttttctattccctttcctcttccc

SEQ ID NO: 15432 - DNA, 96 bp, Aspergillus novofumigatus
  misc_feature: 99
actcttaaactcttacttatattaatctctatctataattctttctctttcttctctttctctctttctttcttatctctctaactctaaatatcc

SEQ ID NO: 15433 - DNA, 96 bp, Aspergillus novofumigatus
  misc_feature: 99
ctatctcttactttacctctttctctatctctctcttctatctacacttactaccccttactcttattctatttcttactctccttctaactatcc

SEQ ID NO: 15434 - DNA, 96 bp, Aspergillus novofumigatus
  misc_feature: 99
cctcttatcttgaaatttcttactctaatactatctctttttttctaatcttctctctttctaccctttctaactccctctcttctttttttaatc

SEQ ID NO: 15435 - DNA, 96 bp, Aspergillus novofumigatus
  misc_feature: 99
gagagttttagtaaagagaagaaataaatataattaaaaatagaagaagaaagggaagaggaaagggaagaggaaaggaaagaggaaagggaagag

SEQ ID NO: 15436 - DNA, 96 bp, Aspergillus novofumigatus
  misc_feature: 99
atcttatattcttcttctaatctacttattaaatcctaactttaatcctttcttctcttctctactctttcttcttttctttcttattcttctctc

SEQ ID NO: 15437 - DNA, 96 bp, Aspergillus novofumigatus
  misc_feature: 99
aactcctattcttattccttctctcctaaaaacttttcttctaactcttattctaactctccttcttattattccttactcttcttctaatccttc

SEQ ID NO: 15438 - DNA, 96 bp, Aspergillus novofumigatus
  misc_feature: 99
actcttattcttaactcctattcttattccttctctcctaaaaacttttcttctaactcttattctaactctccttcttattattccttactcttc

SEQ ID NO: 15439 - DNA, 96 bp, Aspergillus novofumigatus
  misc_feature: 99
gaaagagaaaagaagaaagaaaagaaaagaaagaagagttagatatagaaaaaagaataattagaattttagtaagagattatataagggatagag

SEQ ID NO: 15440 - DNA, 96 bp, Aspergillus novofumigatus
  misc_feature: 99
ctttagaagaaattctaaaaataatatatattaaagtatactatacttcttaaactctattaataaaatatatctaatactaaactagaaatatat

SEQ ID NO: 15441 - DNA, 96 bp, Aspergillus novofumigatus
  misc_feature: 99
cttcttctaatctacttattaaatcctaactttaatcctttcttctcttctctactctttcttcttttctttcttattcttctctcttatttattt

SEQ ID NO: 15442 - DNA, 96 bp, Aspergillus novofumigatus
  misc_feature: 99
agattagaagggataagagaggagattaagaagagatagaggagagagggagtaagagagagatagaataagagatagaataagagatagaataag

SEQ ID NO: 15443 - DNA, 96 bp, Aspergillus novofumigatus
  misc_feature: 99
attagaagggataagagaggagattaagaagagatagaggagagagggagtaagagagagatagaataagagatagaataagagatagaataagag

SEQ ID NO: 15444 - DNA, 96 bp, Aspergillus novofumigatus
  misc_feature: 99
ctctcttattctattaaaaatatacccttcttctctcttatattataattaatctactctctttttatccttattctctctatccctgattctctt

SEQ ID NO: 15445 - DNA, 96 bp, Aspergillus novofumigatus
  misc_feature: 99
atagaaggagagatagaaggagagatagaaggagagatagaaggagagatagaaggagagatagaaggagagatagaaggagagttagaaggagag

SEQ ID NO: 15446 - DNA, 96 bp, Aspergillus novofumigatus
  misc_feature: 99
agaactatcttaaaagtcctagaatactagtatataagaatatagaatagctgctatatattaatatagacttattaaaatattatagctatagag

SEQ ID NO: 15447 - DNA, 96 bp, Aspergillus novofumigatus
  misc_feature: 99
agatagaaggagagatagaaggagagatagaaggagagatagaaggagagatagaaggagagatagaaggagagatagaaggagagttagaaggag

SEQ ID NO: 15448 - DNA, 96 bp, Aspergillus novofumigatus
  misc_feature: 99
ctatagatcttatacttactatagtaataaataaagtaataatacttataattataatatagaaatagactttagtaaatatctaaatagtaagat

SEQ ID NO: 15449 - DNA, 96 bp, Aspergillus novofumigatus
  misc_feature: 99
cgtaagtttagagaagggaaaagagtatataagttaatttagaaagaaaagaatagaaggtaaagatagataagatagaaagagtttaagtaaagg

SEQ ID NO: 15450 - DNA, 96 bp, Aspergillus novofumigatus
  misc_feature: 99
agagttttagtaaagagaagaaataaatataattaaaaatagaagaagaaagggaagaggaaagggaagaggaaaggaaagaggaaagggaagagg

SEQ ID NO: 15451 - DNA, 96 bp, Aspergillus novofumigatus
  misc_feature: 99
cccttttaaataatcctattctataaaagaagctagattatcctattatatatagaatattatagctctatagctataatattttaataagtctat

SEQ ID NO: 15452 - DNA, 96 bp, Aspergillus novofumigatus
  misc_feature: 99
cccttatataatctcttactaaaattctaattattcttttttctatatctgactcttctttcttttcttttctttcttcttttctctttcttttct

SEQ ID NO: 15453 - DNA, 96 bp, Aspergillus novofumigatus
  misc_feature: 99
attaggtaaaggcccttttaaataatcctattctataaaagaagctagattatcctattatatatagaatattatagctctatagctataatattt

SEQ ID NO: 15454 - DNA, 96 bp, Aspergillus novofumigatus
  misc_feature: 99
attaggattaggaatgagttaggattaggaattggttaggattaggaataagttaggattaggaatgagttaggattagggatttagtaagaggtt

SEQ ID NO: 15455 - DNA, 96 bp, Aspergillus novofumigatus
  misc_feature: 99
attaggaatttattaggattaggaatgagttaggattaggaattggttaggattaggaataagttaggattaggaatgagttaggattagggattt

SEQ ID NO: 15456 - DNA, 96 bp, Aspergillus novofumigatus
  misc_feature: 99
atctactaatattactacctctcttactacttaccttactattaaccttactatctactatgatatttatattactatctaccttattacctacct

SEQ ID NO: 15457 - DNA, 96 bp, Aspergillus novofumigatus
  misc_feature: 99
aatcttctctcttattctattaaaaatatacccttcttctctcttatattataattaatctactctctttttatccttattctctctatccctgat

SEQ ID NO: 15458 - DNA, 96 bp, Aspergillus novofumigatus
  misc_feature: 99
atataagaatatagaatagctgctatatattaatatagacttattaaaatattatagctatagagctataatattctatatataataggataatct

SEQ ID NO: 15459 - DNA, 96 bp, Aspergillus novofumigatus
  misc_feature: 99
actccctctcttctttttttaatctatctctaaatcctcttcttcctactcttcttaatctactctcttaaaatcccttcttttttcttctactat

SEQ ID NO: 15460 - DNA, 96 bp, Aspergillus novofumigatus
  misc_feature: 99
aatttactactactatatttaaaaagtttatatcttatatataggagatagtatctataaattatattattataatcctctattagctataattat

SEQ ID NO: 15461 - DNA, 96 bp, Aspergillus novofumigatus
  misc_feature: 99
aaagattaagtttctagtaaatattataaatcttaatatatatattagtcttatagaatagatatagaactatattctatattacttagctattat

SEQ ID NO: 15462 - DNA, 96 bp, Aspergillus novofumigatus
  misc_feature: 99
ataaattatagctaagattatataatataagcttgctatattaattagtatattattatataactataagctagtgtctaatttagactagagttt

SEQ ID NO: 15463 - DNA, 96 bp, Aspergillus novofumigatus
  misc_feature: 99
actaatattactacctctcttactacttaccttactattaaccttactatctactatgatatttatattactatctaccttattacctaccttact

SEQ ID NO: 15464 - DNA, 96 bp, Aspergillus novofumigatus
  misc_feature: 99
aattattcttttttctatatctgactcttctttcttttcttttctttcttcttttctctttcttttctatctattatcttcttactatctaaccct

SEQ ID NO: 15465 - DNA, 96 bp, Aspergillus novofumigatus
  misc_feature: 99
agctagattatcctattatatatagaatattatagctctatagctataatattttaataagtctatattaatatatagcagctattctatattctt

SEQ ID NO: 15466 - DNA, 96 bp, Aspergillus novofumigatus
  misc_feature: 99
aattctaattattcttttttctatatctgactcttctttcttttcttttctttcttcttttctctttcttttctatctattatcttcttactatct

SEQ ID NO: 15467 - DNA, 96 bp, Aspergillus novofumigatus
  misc_feature: 99
aactctctctttctctttcttctcctttctatccctaactcttattctaacccttcttctatctcttcctctaatcctccttctaattcttattct

SEQ ID NO: 15468 - DNA, 96 bp, Aspergillus novofumigatus
  misc_feature: 99
actcctattcttattccttctctcctaaaaacttttcttctaactcttattctaactctccttcttattattccttactcttcttctaatccttct

SEQ ID NO: 15469 - DNA, 96 bp, Aspergillus novofumigatus
  misc_feature: 98
tttttttacttcttatatatcttatattcttcttctaatctacttattaaatcctaactttaatcctttcttcttttctctactctttcttctctt

SEQ ID NO: 15470 - DNA, 96 bp, Aspergillus novofumigatus
  misc_feature: 98
gaaaagtttttaggagagaaggaataagaataggagttaagaataagagttagaagaagagataaaaagggttagaagaagaattaggaataaaaa

SEQ ID NO: 15471 - DNA, 96 bp, Aspergillus novofumigatus
  misc_feature: 98
ttttctattccctttcctcttccctttcctcttccctttcttctcctatttttaattatatttatttcttctctttactaaaactctctctatctt

SEQ ID NO: 15472 - DNA, 96 bp, Aspergillus novofumigatus
  misc_feature: 98
ttttagtaaagagaagaaataaatataattaaaaatagaagaagaaagggaagaggaaagggaagaggaaaggaaagaggaaagggaagaggaaag

SEQ ID NO: 15473 - DNA, 96 bp, Aspergillus novofumigatus
  misc_feature: 98
tttatctcttcttctaactcttattcttaactcctattcttattccttctctcctaaaaacttttcttctaactcttattctaactctccttctta

SEQ ID NO: 15474 - DNA, 96 bp, Aspergillus novofumigatus
  misc_feature: 98
tattcttctctcttatttatttaattatgaacccttctcctctcttatcttataattaatctaatctcttttaatccttattctctctatcctaaa

SEQ ID NO: 15475 - DNA, 96 bp, Aspergillus novofumigatus
  misc_feature: 98
tttagattagaagggataagagaggagattaagaagagatagaggagagagggagtaagagagagatagaataagagatagaataagagatagaat

SEQ ID NO: 15476 - DNA, 96 bp, Aspergillus novofumigatus
  misc_feature: 98
gggaactagagtcttccctataggacctatatttattatagtaataaataaaataataatacttataattataataaagagatagactttagtaaa

SEQ ID NO: 15477 - DNA, 96 bp, Aspergillus novofumigatus
  misc_feature: 98
ataagaattataagaagagttaaagatagtaagttaaagattagaatatagattaaaaagagaaagaaaatatagataaatagatagaagattaaa

SEQ ID NO: 15478 - DNA, 96 bp, Aspergillus novofumigatus
  misc_feature: 98
tttaagtagagggataagaggagtataagattaagtaaattatagtaaagtaaatatatataataaaggcaggtaaaactaaaaactaatacctta

SEQ ID NO: 15479 - DNA, 96 bp, Aspergillus novofumigatus
  misc_feature: 98
tataaaccactgattcagctaacatactatataaaccaaccgtataatatatatctctgcgcattatggtatactaaaatatatattcattcccaa

SEQ ID NO: 15480 - DNA, 96 bp, Aspergillus novofumigatus
  misc_feature: 98
aaaagaatagaaggtaaagatagataagatagaaagagtttaagtaaagggtaagaaagagaagaagaataagaagaaagagaagaaagagaagaa

SEQ ID NO: 15481 - DNA, 96 bp, Aspergillus novofumigatus
  misc_feature: 98
taagagtaagagtagagtaagagtaagggttagaagaagagttagaataagagttaaggaaagagataaaagaaggattaagaagaggtagaagaa

SEQ ID NO: 15482 - DNA, 96 bp, Aspergillus novofumigatus
  misc_feature: 98
ttcttctaactcttattcttaactcctattcttattccttctctcctaaaaacttttcttctaactcttattctaactctccttcttattattcct

SEQ ID NO: 15483 - DNA, 96 bp, Aspergillus novofumigatus
  misc_feature: 98
ttcttactctaatactatctctttttttctaatcttctctctttctaccctttctaactccctctcttctttttttaatctatctctaaatcctct

SEQ ID NO: 15484 - DNA, 96 bp, Aspergillus novofumigatus
  misc_feature: 98
ttcttaactctctctttctctttcttctcctttctatccctaactcttattctaacccttcttctatctcttcctctaatcctccttctaattctt

SEQ ID NO: 15485 - DNA, 96 bp, Aspergillus novofumigatus
  misc_feature: 98
ttctctttaataattctaacccttaccttaatatattaataatttctattttattcctaacccttattctctctcttattattatcttttattttc

SEQ ID NO: 15486 - DNA, 96 bp, Aspergillus novofumigatus
  misc_feature: 98
ttctattccctttcctcttccctttcctcttccctttcttctcctatttttaattatatttatttcttctctttactaaaactctctctatcttat

SEQ ID NO: 15487 - DNA, 96 bp, Aspergillus novofumigatus
  misc_feature: 98
gagggtgaggataagagtaagggtaaggatttagattagaagggataagagaggagattaagaagagatagaataagagatagataagagatagaa

SEQ ID NO: 15488 - DNA, 96 bp, Aspergillus novofumigatus
  misc_feature: 98
agagagagttttagtaaagagaagaaataaatataattaaaaatagaagaagaaagggaagaggaaagggaagaggaaaggaaagaggaaagggaa

SEQ ID NO: 15489 - DNA, 96 bp, Aspergillus novofumigatus
  misc_feature: 98
ttatttaatttactactactatatttaaaaagtttatatcttatatataggagatagtatctataaattatattattataatcctctattagctat

SEQ ID NO: 15490 - DNA, 96 bp, Aspergillus novofumigatus
  misc_feature: 98
ttatttaatcttctatctatttatctatattttctttctctttttaatctatattctaatctttaacttactatctttaactcttcttataattct

SEQ ID NO: 15491 - DNA, 96 bp, Aspergillus novofumigatus
  misc_feature: 98
ttatttaactttatccttttcttttaattttatctttccttaattttaatttcttcttctctttcttcttctctttcttcttctctttcttcttct

SEQ ID NO: 15492 - DNA, 96 bp, Aspergillus novofumigatus
  misc_feature: 98
tagattagaagggataagagaggagattaagaagagatagaggagagagggagtaagagagagatagaataagagatagaataagagatagaataa

SEQ ID NO: 15493 - DNA, 96 bp, Aspergillus novofumigatus
  misc_feature: 98
ttatcttttattttcttttcttttctattccctttcctcttccctttcctcttccctttcttctcctatttttaattatatttatttcttctcttt

SEQ ID NO: 15494 - DNA, 96 bp, Aspergillus novofumigatus
  misc_feature: 98
ttatctcttcttctaactcttattcttaactcctattcttattccttctctcctaaaaacttttcttctaactcttattctaactctccttcttat

SEQ ID NO: 15495 - DNA, 96 bp, Aspergillus novofumigatus
  misc_feature: 98
atttaatttactactactatatttaaaaagtttatatcttatatataggagatagtatctataaattatattattataatcctctattagctataa

SEQ ID NO: 15496 - DNA, 96 bp, Aspergillus novofumigatus
  misc_feature: 98
ctataagactaatatatatattaagatttataatatttactagaaacttaatctttataattattataagcttatcctctatagctattatactaa

SEQ ID NO: 15497 - DNA, 96 bp, Aspergillus novofumigatus
  misc_feature: 98
ttagtaaagagaagaaataaatataattaaaaatagaagaagaaagggaagaggaaagggaagaggaaaggaaagaggaaagggaagaggaaaggg

SEQ ID NO: 15498 - DNA, 96 bp, Aspergillus novofumigatus
  misc_feature: 98
ttagattagaagggataagagaggagattaagaagagatagaataagagatagataagagatagaataagagtaagagtagagtaagagtaagggt

SEQ ID NO: 15499 - DNA, 96 bp, Aspergillus novofumigatus
  misc_feature: 98
ttagatagagaagaagaggtaaaagagaatttagggatagattaagaggagagaagaaggagtaataagagtagaaagggagataatttaaaaaga

SEQ ID NO: 15500 - DNA, 96 bp, Aspergillus novofumigatus
  misc_feature: 98
agtttagagaagggaaaagagtatataagttaatttagaaagaaaagaatagaaggtaaagatagataagatagaaagagtttaagtaaagggtaa

SEQ ID NO: 15501 - DNA, 96 bp, Aspergillus novofumigatus
  misc_feature: 98
ttaactctctctttctctttcttctcctttctatccctaactcttattctaacccttcttctatctcttcctctaatcctccttctaattcttatt

SEQ ID NO: 15502 - DNA, 96 bp, Aspergillus novofumigatus
  misc_feature: 98
tgtataaaccactgattcagctaacatactatataaaccaaccgtataatatatatctctgcgcattatggtatactaaaatatatattcattccc

SEQ ID NO: 15503 - DNA, 96 bp, Aspergillus novofumigatus
  misc_feature: 98
agagtaagagtagagtaagagtaagggttagaagaagagttagaataagagttaaggaaagagataaaagaaggattaagaagaggtagaagaaga

SEQ ID NO: 15504 - DNA, 96 bp, Aspergillus novofumigatus
  misc_feature: 98
tcttctctttcttcttattcttcttattcttcctctctttcttaccctttacttaaactctttctatcttatctatctttaccttctattcttttc

SEQ ID NO: 15505 - DNA, 96 bp, Aspergillus novofumigatus
  misc_feature: 98
tcttctaactcttattcttaactcctattcttattccttctctcctaaaaacttttcttctaactcttattctaactctccttcttattattcctt

SEQ ID NO: 15506 - DNA, 96 bp, Aspergillus novofumigatus
  misc_feature: 98
atactctatcttactatttagatatttactaaagtctatttctatattataattataagtattattactttatttattactatagtaagtataaga

SEQ ID NO: 15507 - DNA, 96 bp, Aspergillus novofumigatus
  misc_feature: 98
tctatagatcttatacttactatagtaataaataaagtaataatacttataattataatatagaaatagactttagtaaatatctaaatagtaaga

SEQ ID NO: 15508 - DNA, 96 bp, Aspergillus novofumigatus
  misc_feature: 98
tcttaactctctctttctctttcttctcctttctatccctaactcttattctaacccttcttctatctcttcctctaatcctccttctaattctta

SEQ ID NO: 15509 - DNA, 96 bp, Aspergillus novofumigatus
  misc_feature: 98
agaaagagaaaagaagaaagaaaagaaaagaaagaagagttagatatagaaaaaagaataattagaattttagtaagagattatataagggataga

SEQ ID NO: 15510 - DNA, 96 bp, Aspergillus novofumigatus
  misc_feature: 98
tctactaatattactacctctcttactacttaccttactattaaccttactatctactatgatatttatattactatctaccttattacctacctt

SEQ ID NO: 15511 - DNA, 96 bp, Aspergillus novofumigatus
  misc_feature: 98
tctacacttactaccccttactcttattctatttcttactctccttctaactatcctaacctctcctaatctcttcttctatctcttcttctaact

SEQ ID NO: 15512 - DNA, 96 bp, Aspergillus novofumigatus
  misc_feature: 98
tctaattattcttttttctatatctgactcttctttcttttcttttctttcttcttttctctttcttttctatctattatcttcttactatctaac

SEQ ID NO: 15513 - DNA, 96 bp, Aspergillus novofumigatus
  misc_feature: 98
atttaaaagataataataagaattactttatatatatatatttatatgtaagtatataagaaggataatttatatagattagtttagtagtttaga

SEQ ID NO: 15514 - DNA, 96 bp, Aspergillus novofumigatus
  misc_feature: 98
tagagagagttttagtaaagagaagaaataaatataattaaaaatagaagaagaaagggaagaggaaagggaagaggaaaggaaagaggaaaggga

SEQ ID NO: 15515 - DNA, 96 bp, Aspergillus novofumigatus
  misc_feature: 98
tcccttactatcttacttactacctcccttactgttaaccttactatctacctcactacttatcttactacctccctcactgcctccctcactacc

SEQ ID NO: 15516 - DNA, 96 bp, Aspergillus novofumigatus
  misc_feature: 98
taatcttctctcttattctattaaaaatatacccttcttctctcttatattataattaatctactctctttttatccttattctctctatccctga

SEQ ID NO: 15517 - DNA, 96 bp, Aspergillus novofumigatus
  misc_feature: 98
tcactcttaaactcttacttatattaatctctatctataattctttctctttcttctctttctctctttctttcttatctctctaactctaaatat

SEQ ID NO: 15518 - DNA, 96 bp, Aspergillus novofumigatus
  misc_feature: 98
tatttctagtttagtattagatatattttattaatagagtttaagaagtatagtatactttaatatatattatttttagaatttcttctaaagttt

SEQ ID NO: 15519 - DNA, 96 bp, Aspergillus novofumigatus
  misc_feature: 98
gaactagagtcttccctataggacctatatttattatagtaataaataaaataataatacttataattataataaagagatagactttagtaaata

SEQ ID NO: 15520 - DNA, 96 bp, Aspergillus novofumigatus
  misc_feature: 98
tattcttaactcctattcttattccttctctcctaaaaacttttcttctaactcttattctaactctccttcttattattccttactcttcttcta

SEQ ID NO: 15521 - DNA, 96 bp, Aspergillus novofumigatus
  misc_feature: 98
agaagaaaagtttttaggagagaaggaataagaataggagttaagaataagagttagaagaagagataaaaagggttagaagaagaattaggaata

SEQ ID NO: 15522 - DNA, 96 bp, Aspergillus novofumigatus
  misc_feature: 98
tattatttaactttatccttttcttttaattttatctttccttaattttaatttcttcttctctttcttcttctctttcttcttctctttcttctt

SEQ ID NO: 15523 - DNA, 96 bp, Aspergillus novofumigatus
  misc_feature: 98
tattattatcttttattttcttttcttttctattccctttcctcttccctttcctcttccctttcttctcctatttttaattatatttatttcttc

SEQ ID NO: 15524 - DNA, 96 bp, Aspergillus novofumigatus
  misc_feature: 98
ccctatttaagtagagggataagaggagtataagattaagtaaattatagtaaagtaaatatatataataaaggcaggtaaaactaaaaactaata

SEQ ID NO: 15525 - DNA, 96 bp, Aspergillus novofumigatus
  misc_feature: 98
tattaggattaggaatgagttaggattaggaattggttaggattaggaataagttaggattaggaatgagttaggattagggatttagtaagaggt

SEQ ID NO: 15526 - DNA, 96 bp, Aspergillus novofumigatus
  misc_feature: 98
tatcttatattcttcttctaatctacttattaaatcctaactttaatcctttcttctcttctctactctttcttcttttctttcttattcttctct

SEQ ID NO: 15527 - DNA, 96 bp, Aspergillus novofumigatus
  misc_feature: 98
tatagatcttatacttactatagtaataaataaagtaataatacttataattataatatagaaatagactttagtaaatatctaaatagtaagata

SEQ ID NO: 15528 - DNA, 96 bp, Aspergillus novofumigatus
  misc_feature: 98
tatctcttactttacctctttctctatctctctcttctatctacacttactaccccttactcttattctatttcttactctccttctaactatcct

SEQ ID NO: 15529 - DNA, 96 bp, Aspergillus novofumigatus
  misc_feature: 98
agagaagaagaggtaaaagagaatttagggatagattaagaggagagaagaaggagtaataagagtagaaagggagataatttaaaaagagagata

SEQ ID NO: 15530 - DNA, 96 bp, Aspergillus novofumigatus
  misc_feature: 98
tatataagaatatagaatagctgctatatattaatatagacttattaaaatattatagctatagagctataatattctatatataataggataatc

SEQ ID NO: 15531 - DNA, 96 bp, Aspergillus novofumigatus
  misc_feature: 98
tataggagtagatagattagttaattaaagataggatatatataactactaataagaatagagaagatagtaatttaaaagataataataagaatt

SEQ ID NO: 15532 - DNA, 96 bp, Aspergillus novofumigatus
  misc_feature: 98
tagtttagtattagatatattttattaatagagtttaagaagtatagtatactttaatatatattatttttagaatttcttctaaagtttagtata

SEQ ID NO: 15533 - DNA, 96 bp, Aspergillus novofumigatus
  misc_feature: 98
taatatagaatatagttctatatctattctataagactaatatatatattaagatttataatatttactagaaacttaatctttataattattata

SEQ ID NO: 15534 - DNA, 96 bp, Aspergillus novofumigatus
  misc_feature: 98
aactccctctcttctttttttaatctatctctaaatcctcttcttcctactcttcttaatctactctcttaaaatcccttcttttttcttctacta

SEQ ID NO: 15535 - DNA, 96 bp, Aspergillus novofumigatus
  misc_feature: 98
taaaattctaattattcttttttctatatctgactcttctttcttttcttttctttcttcttttctctttcttttctatctattatcttcttacta

SEQ ID NO: 15536 - DNA, 96 bp, Aspergillus novofumigatus
  misc_feature: 98
cttttattttcttttcttttctattccctttcctcttccctttcctcttccctttcttctcctatttttaattatatttatttcttctctttacta

SEQ ID NO: 15537 - DNA, 96 bp, Aspergillus novofumigatus
  misc_feature: 98
gcccttttaaataatcctattctataaaagaagctagattatcctattatatatagaatattatagctctatagctataatattttaataagtcta

SEQ ID NO: 15538 - DNA, 96 bp, Aspergillus novofumigatus
  misc_feature: 98
actctctctttctctttcttctcctttctatccctaactcttattctaacccttcttctatctcttcctctaatcctccttctaattcttattcta

SEQ ID NO: 15539 - DNA, 96 bp, Aspergillus novofumigatus
  misc_feature: 98
tagaaaggtaataaatatcttcttaagacttaatataatctatatctctatatattatctaagaaatctagaaagatattacttatattctttaag

SEQ ID NO: 15540 - DNA, 96 bp, Aspergillus novofumigatus
  misc_feature: 98
ggataagagtaagggtaaggatttagattagaagggataagagaggagattaagaagagatagaataagagatagataagagatagaataagagta

SEQ ID NO: 15541 - DNA, 96 bp, Aspergillus novofumigatus
  misc_feature: 98
agattaaataattatagctaatagaggattataataatataatttatagatactatctcctatatataagatataaactttttaaatatagtagta

SEQ ID NO: 15542 - DNA, 96 bp, Aspergillus novofumigatus
  misc_feature: 98
tactaatagaaaggtaataaatatcttcttaagacttaatataatctatatctctatatattatctaagaaatctagaaagatattacttatattc

SEQ ID NO: 15543 - DNA, 96 bp, Aspergillus novofumigatus
  misc_feature: 98
agagtgattaattatagaagataagagaatcagggatagagagaataaggataaaaagagagtagattaattataatataagagagaagaagggta

SEQ ID NO: 15544 - DNA, 96 bp, Aspergillus novofumigatus
  misc_feature: 98
taatttactactactatatttaaaaagtttatatcttatatataggagatagtatctataaattatattattataatcctctattagctataatta

SEQ ID NO: 15545 - DNA, 96 bp, Aspergillus novofumigatus
  misc_feature: 98
attataggctgcccctataatatatactatcttatatatatagctatataatcacctaattagttatataattataactagttattatattaatta

SEQ ID NO: 15546 - DNA, 96 bp, Aspergillus novofumigatus
  misc_feature: 98
taatatattaataatttctattttattcctaacccttattctctctcttattattatcttttattttcttttcttttctattccctttcctcttcc

SEQ ID NO: 15547 - DNA, 96 bp, Aspergillus novofumigatus
  misc_feature: 98
taataagagtagagatagatagatataggaaaataaggatttagaaggatttaggaagagagaggatttagaatgaagatagaaagaagagaggag

SEQ ID NO: 15548 - DNA, 96 bp, Aspergillus novofumigatus
  misc_feature: 98
taagaattataagaagagttaaagatagtaagttaaagattagaatatagattaaaaagagaaagaaaatatagataaatagatagaagattaaat

SEQ ID NO: 15549 - DNA, 96 bp, Aspergillus novofumigatus
  misc_feature: 98
gctagattatcctattatatatagaatattatagctctatagctataatattttaataagtctatattaatatatagcagctattctatattctta

SEQ ID NO: 15550 - DNA, 96 bp, Aspergillus novofumigatus
  misc_feature: 98
gtttatttaatttactactactatatttaaaaagtttatatcttatatataggagatagtatctataaattatattattataatcctctattagct

SEQ ID NO: 15551 - DNA, 96 bp, Aspergillus novofumigatus
  misc_feature: 98
gttaataagagtagagatagatagatataggaaaataaggatttagaaggatttaggaagagagaggatttagaatgaagatagaaagaagagagg

SEQ ID NO: 15552 - DNA, 96 bp, Aspergillus novofumigatus
  misc_feature: 98
gtatataagaatatagaatagctgctatatattaatatagacttattaaaatattatagctatagagctataatattctatatataataggataat

SEQ ID NO: 15553 - DNA, 96 bp, Aspergillus novofumigatus
  misc_feature: 98
actaaaattctaattattcttttttctatatctatctcttctttcttttcttttctttcttctttcctctttcttttctatctattatcttcttac

SEQ ID NO: 15554 - DNA, 96 bp, Aspergillus novofumigatus
  misc_feature: 98
ggtttatttaatttactactactatatttaaaaagtttatatcttatatataggagatagtatctataaattatattattataatcctctattagc

SEQ ID NO: 15555 - DNA, 96 bp, Aspergillus novofumigatus
  misc_feature: 98
aacccttaccttaatatattaataatttctattttattcctaacccttattctctctcttattattatcttttattttcttttcttttctattccc

SEQ ID NO: 15556 - DNA, 96 bp, Aspergillus novofumigatus
  misc_feature: 98
ggcagtaagaccagcaggaagaacccagtaagataggtagtatagtagatagtaaggcaggcagtgaagcaggtagtaaggcaggtagtaaggcag

SEQ ID NO: 15557 - DNA, 96 bp, Aspergillus novofumigatus
  misc_feature: 98
accctttttatctcttcttctaactcttattcttaactcctattcttattccttctctcctaaaaacttttcttctaactcttattctaactctcc

SEQ ID NO: 15558 - DNA, 96 bp, Aspergillus novofumigatus
  misc_feature: 98
actctttccttcttcccttctattcttaactctctctttctctttcttctcctttctatccctaactcttattctaacccttcttctatctcttcc

SEQ ID NO: 15559 - DNA, 96 bp, Aspergillus novofumigatus
  misc_feature: 98
gaactatcttaaaagtcctagaatactagtatataagaatatagaatagctgctatatattaatatagacttattaaaatattatagctatagagc

SEQ ID NO: 15560 - DNA, 96 bp, Aspergillus novofumigatus
  misc_feature: 98
gcaagacagggactgaggagggaggcagtgagataggcagtaaggcaggcagcaagcaaagcagtgagcaaggcagtgagtaaggcagtcagcaag

SEQ ID NO: 15561 - DNA, 96 bp, Aspergillus novofumigatus
  misc_feature: 98
cactcttaaactcttacttatattaatctctatctataattctttctctttcttctctttctctctttctttcttatctctctaactctaaatatc

SEQ ID NO: 15562 - DNA, 96 bp, Aspergillus novofumigatus
  misc_feature: 98
aaattctaattattcttttttctatatctgactcttctttcttttcttttctttcttcttttctctttcttttctatctattatcttcttactatc

SEQ ID NO: 15563 - DNA, 96 bp, Aspergillus novofumigatus
  misc_feature: 98
gagaagaagaggtaaaagagaatttagggatagattaagaggagagaagaaggagtaataagagtagaaagggagataatttaaaaagagagatat

SEQ ID NO: 15564 - DNA, 96 bp, Aspergillus novofumigatus
  misc_feature: 98
aactctttccttcttcccttctattcttaactctctctttctctttcttctcctttctatccctaactcttattctaacccttcttctatctcttc

SEQ ID NO: 15565 - DNA, 96 bp, Aspergillus novofumigatus
  misc_feature: 98
cttattcttaactcctattcttattccttctctcctaaaaacttttcttctaactcttattctaactctccttcttattattccttactcttcttc

SEQ ID NO: 15566 - DNA, 96 bp, Aspergillus novofumigatus
  misc_feature: 98
cttaccttaatatattaataatttctattttattcctaacccttattctctctcttattattatcttttattttcttttcttttctattccctttc

SEQ ID NO: 15567 - DNA, 96 bp, Aspergillus novofumigatus
  misc_feature: 98
ctttctaactccctctcttctttttttaatctatctctaaatcctcttcttcctactcttcttaatctactctcttaaaatcccttcttttttctt

SEQ ID NO: 15568 - DNA, 96 bp, Aspergillus novofumigatus
  misc_feature: 98
cttctctttcttcttattcttcttattcttcctctctttcttaccctttacttaaactctttctatcttatctatctttaccttctattcttttct

SEQ ID NO: 15569 - DNA, 96 bp, Aspergillus novofumigatus
  misc_feature: 98
cttctctatagatcttatacttactatagtaataaataaagtaataatacttataattataatatagaaatagactttagtaaatatctaaatagt

SEQ ID NO: 15570 - DNA, 96 bp, Aspergillus novofumigatus
  misc_feature: 98
atgtaagtatataagaaggataatttatatagattagtttagtagtttagattttaatatatataaagggtttataattaaatattaccttagaag

SEQ ID NO: 15571 - DNA, 96 bp, Aspergillus novofumigatus
  misc_feature: 98
cttattctctctcttattattatcttttattttcttttcttttctattccctttcctcttccctttcctcttccctttcttctcctatttttaatt

SEQ ID NO: 15572 - DNA, 96 bp, Aspergillus novofumigatus
  misc_feature: 98
cttatctaatctcttactaaaattctaattattcttttttctatatctatctcttctttcttttcttttctttcttctttcctctttcttttctat

SEQ ID NO: 15573 - DNA, 96 bp, Aspergillus novofumigatus
  misc_feature: 98
ctcttattcttaactcctattcttattccttctctcctaaaaacttttcttctaactcttattctaactctccttcttattattccttactcttct

SEQ ID NO: 15574 - DNA, 96 bp, Aspergillus novofumigatus
  misc_feature: 98
ctcttatcttgaaatttcttactctaatactatctctttttttctaatcttctctctttctaccctttctaactccctctcttctttttttaatct

SEQ ID NO: 15575 - DNA, 96 bp, Aspergillus novofumigatus
  misc_feature: 98
ctctatctcttactttacctctttctctatctctctcttctatctacacttactaccccttactcttattctatttcttactctccttctaactat

SEQ ID NO: 15576 - DNA, 96 bp, Aspergillus novofumigatus
  misc_feature: 98
ctcctattcttattccttctctcctaaaaacttttcttctaactcttattctaactctccttcttattattccttactcttcttctaatccttctt

SEQ ID NO: 15577 - DNA, 96 bp, Aspergillus novofumigatus
  misc_feature: 98
atataagatagagagagttttagtaaagagaagaaataaatataattaaaaataggagaagaaagggaagaggaaagggaagaggaaagggaatag

SEQ ID NO: 15578 - DNA, 96 bp, Aspergillus novofumigatus
  misc_feature: 98
ctaccctttctaactccctctcttctttttttaatctatctctaaatcctcttcttcctactcttcttaatctactctcttaaaatcccttctttt

SEQ ID NO: 15579 - DNA, 96 bp, Aspergillus novofumigatus
  misc_feature: 98
ctaacccttactctatcccttatctaatctcttactaaaattctaattattcttttttctatatctatctcttctttcttttcttttctttcttct

SEQ ID NO: 15580 - DNA, 96 bp, Aspergillus novofumigatus
  misc_feature: 98
attcttctctcttatttatttaattatgaacccttctcctctcttatcttataattaatctaatctcttttaatccttattctctctatcctaaat

SEQ ID NO: 15581 - DNA, 96 bp, Aspergillus novofumigatus
  misc_feature: 98
agggtgaggataagagtaagggtaaggatttagattagaagggataagagaggagattaagaagagatagaataagagatagataagagatagaat

SEQ ID NO: 15582 - DNA, 96 bp, Aspergillus novofumigatus
  misc_feature: 98
attattatcttttattttcttttcttttctattccctttcctcttccctttcctcttccctttcttctcctatttttaattatatttatttcttct

SEQ ID NO: 15583 - DNA, 96 bp, Aspergillus novofumigatus
  misc_feature: 98
attatcttttattttcttttcttttctattccctttcctcttccctttcctcttccctttcttctcctatttttaattatatttatttcttctctt

SEQ ID NO: 15584 - DNA, 96 bp, Aspergillus novofumigatus
  misc_feature: 98
attaaattattaatataatattttttccttattaatacaatattaatttacttattaatactcttataatactgaatctaaccttagttagatttt

SEQ ID NO: 15585 - DNA, 96 bp, Aspergillus novofumigatus
  misc_feature: 98
aagacagggactgaggagggaggcagtgagataggcagtaaggcaggcagcaagcaaagcagtgagcaaggcagtgagtaaggcagtcagcaagat

SEQ ID NO: 15586 - DNA, 96 bp, Aspergillus novofumigatus
  misc_feature: 98
atcccttatataatctcttactaaaattctaattattcttttttctatatctgactcttctttcttttcttttctttcttcttttctctttctttt

SEQ ID NO: 15587 - DNA, 96 bp, Aspergillus novofumigatus
  misc_feature: 98
ataagaaggataatttatatagattagtttagtagtttagattttaatatatataaagggtttataattaaatattaccttagaagagatagatct

SEQ ID NO: 15588 - DNA, 96 bp, Aspergillus novofumigatus
  misc_feature: 98
agtttagtattattatataatattattcttatttttcttatagtaaattaattactatactatatttacctagtatatttatatctactaataagt

SEQ ID NO: 15589 - DNA, 96 bp, Aspergillus novofumigatus
  misc_feature: 98
aatccctcactcttaaactcttacttatattaatctctatctataattctttctctttcttctctttctctctttctttcttatctctctaactct

SEQ ID NO: 15590 - DNA, 96 bp, Aspergillus novofumigatus
  misc_feature: 98
agagtaagggtaaggatttagattagaagggataagagaggagattaagaagagatagaataagagatagataagagatagaataagagtaagagt

SEQ ID NO: 15591 - DNA, 96 bp, Aspergillus novofumigatus
  misc_feature: 98
acagggactgaggagggaggcagtgagataggcagtaaggcaggcagcaagcaaagcagtgagcaaggcagtgagtaaggcagtcagcaagatagt

SEQ ID NO: 15592 - DNA, 96 bp, Aspergillus novofumigatus
  misc_feature: 98
actatatctctctttttaaattatctccctttctactcttattactccttcttctctcctcttaatctatccctaaattctcttttacctcttctt

SEQ ID NO: 15593 - DNA, 96 bp, Aspergillus novofumigatus
  misc_feature: 97
ttttttacttcttatatatcttatattcttcttctaatctacttattaaatcctaactttaatcctttcttcttttctctactctttcttctcttc

SEQ ID NO: 15594 - DNA, 96 bp, Aspergillus novofumigatus
  misc_feature: 97
ttttatttatttaatcttctatctatttatctatattttctttctctttttaatctatattctaatctttaacttactatctttaactcttcttat

SEQ ID NO: 15595 - DNA, 96 bp, Aspergillus novofumigatus
  misc_feature: 97
tttcttactctaatactatctctttttttctaatcttctctctttctaccctttctaactccctctcttctttttttaatctatctctaaatcctc

SEQ ID NO: 15596 - DNA, 96 bp, Aspergillus novofumigatus
  misc_feature: 97
tttctattccctttcctcttccctttcctcttccctttcttctcctatttttaattatatttatttcttctctttactaaaactctctctatctta

SEQ ID NO: 15597 - DNA, 96 bp, Aspergillus novofumigatus
  misc_feature: 97
tttccttaactcttattctaactcttcttctaacccttactcttactctactcttactcttattctatctcttattctatctcttattctatctct

SEQ ID NO: 15598 - DNA, 96 bp, Aspergillus novofumigatus
  misc_feature: 97
tttagtaaagagaagaaataaatataattaaaaatagaagaagaaagggaagaggaaagggaagaggaaaggaaagaggaaagggaagaggaaagg

SEQ ID NO: 15599 - DNA, 96 bp, Aspergillus novofumigatus
  misc_feature: 97
tttaatttactactactatatttaaaaagtttatatcttatatataggagatagtatctataaattatattattataatcctctattagctataat

SEQ ID NO: 15600 - DNA, 96 bp, Aspergillus novofumigatus
  misc_feature: 97
gagattagatagagaagaagaggtaaaagagaatttagggatagattaagaggagagaagaaggagtaataagagtagaaagggagataatttaaa

SEQ ID NO: 15601 - DNA, 96 bp, Aspergillus novofumigatus
  misc_feature: 97
tttaaatccctcactcttaaactcttacttatattaatctctatctataattctttctctttcttctctttctctctttctttcttatctctctaa

SEQ ID NO: 15602 - DNA, 96 bp, Aspergillus novofumigatus
  misc_feature: 97
agcaagacagggactgaggagggaggcagtgagataggcagtaaggcaggcagcaagcaaagcagtgagcaaggcagtgagtaaggcagtcagcaa

SEQ ID NO: 15603 - DNA, 96 bp, Aspergillus novofumigatus
  misc_feature: 97
ctgattcggctaacatactatataaaccaaccgtataatatatatctctgcgcattatggtatactaaaatatatattcattcccaaatatatcaa

SEQ ID NO: 15604 - DNA, 96 bp, Aspergillus novofumigatus
  misc_feature: 97
ttcttctaaccctttttatctcttcttctaactcttattcttaactcctattcttattccttctctcctaaaaacttttcttctaactcttattct

SEQ ID NO: 15605 - DNA, 96 bp, Aspergillus novofumigatus
  misc_feature: 97
ttctacctcttcttaatccttcttttatctctttccttaactcttattctaactcttcttctaacccttactcttactctactcttactcttattc

SEQ ID NO: 15606 - DNA, 96 bp, Aspergillus novofumigatus
  misc_feature: 97
ttatttatttaatcttctatctatttatctatattttctttctctttttaatctatattctaatctttaacttactatctttaactcttcttataa

SEQ ID NO: 15607 - DNA, 96 bp, Aspergillus novofumigatus
  misc_feature: 97
ttattctctctcttattattatcttttattttcttttcttttctattccctttcctcttccctttcctcttccctttcttctcctatttttaatta

SEQ ID NO: 15608 - DNA, 96 bp, Aspergillus novofumigatus
  misc_feature: 97
gaagaaaagtttttaggagagaaggaataagaataggagttaagaataagagttagaagaagagataaaaagggttagaagaagaattaggaataa

SEQ ID NO: 15609 - DNA, 96 bp, Aspergillus novofumigatus
  misc_feature: 97
ttattattatcttttattttcttttcttttctattccctttcctcttccctttcctcttccctttcttctcctatttttaattatatttatttctt

SEQ ID NO: 15610 - DNA, 96 bp, Aspergillus novofumigatus
  misc_feature: 97
agtatataagaatatagaatagctgctatatattaatatagacttattaaaatattatagctatagagctataatattctatatataataggataa

SEQ ID NO: 15611 - DNA, 96 bp, Aspergillus novofumigatus
  misc_feature: 97
ttatattcttcttctaatctacttattaaatcctaactttaatcctttcttctcttctctactctttcttcttttctttcttattcttctctctta

SEQ ID NO: 15612 - DNA, 96 bp, Aspergillus novofumigatus
  misc_feature: 97
gtatactctatcttactatttagatatttactaaagtctatttctatattataattataagtattattactttatttattactatagtaagtataa

SEQ ID NO: 15613 - DNA, 96 bp, Aspergillus novofumigatus
  misc_feature: 97
ttaggaatttattaggattaggaatgagttaggattaggaattggttaggattaggaataagttaggattaggaatgagttaggattagggattta

SEQ ID NO: 15614 - DNA, 96 bp, Aspergillus novofumigatus
  misc_feature: 97
attcttaactcctattcttattccttctctcctaaaaacttttcttctaactcttattctaactctccttcttattattccttactcttcttctaa

SEQ ID NO: 15615 - DNA, 96 bp, Aspergillus novofumigatus
  misc_feature: 97
ttaccttaatatattaataatttctattttattcctaacccttattctctctcttattattatcttttattttcttttcttttctattccctttcc

SEQ ID NO: 15616 - DNA, 96 bp, Aspergillus novofumigatus
  misc_feature: 97
ttaatttactactactatatttaaaaagtttatatcttatatataggagatagtatctataaattatattattataatcctctattagctataatt

SEQ ID NO: 15617 - DNA, 96 bp, Aspergillus novofumigatus
  misc_feature: 97
ttaatcttctctcttattctattaaaaatatacccttcttctctcttatattataattaatctactctctttttatccttattctctctatccctg

SEQ ID NO: 15618 - DNA, 96 bp, Aspergillus novofumigatus
  misc_feature: 97
ttaaccatagttaggagagaggtaggtagcaaggtagacagtaaggtagatagtaaggtagatagtgagataggcagtgaggtaggcagtaaggca

SEQ ID NO: 15619 - DNA, 96 bp, Aspergillus novofumigatus
  misc_feature: 97
tcttctaatctacttattaaatcctaactttaatcctttcttctcttctctactctttcttcttttctttcttattcttctctcttatttatttaa

SEQ ID NO: 15620 - DNA, 96 bp, Aspergillus novofumigatus
  misc_feature: 97
atagaaaggtaataaatatcttcttaagacttaatataatctatatctctatatattatctaagaaatctagaaagatattacttatattctttaa

SEQ ID NO: 15621 - DNA, 96 bp, Aspergillus novofumigatus
  misc_feature: 97
tgattcggctaacatactatataaaccaaccgtataatatatatctctgcgcattatggtatactaaaatatatattcattcccaaatatatcaat

SEQ ID NO: 15622 - DNA, 96 bp, Aspergillus novofumigatus
  misc_feature: 97
tctttccttaactcttattctaactcttcttctaacccttactcttactctactcttactcttattctatctcttattctatctcttattctatct

SEQ ID NO: 15623 - DNA, 96 bp, Aspergillus novofumigatus
  misc_feature: 97
tctttaataattctaacccttaccttaatatattaataatttctattttattcctaacccttattctctctcttattattatcttttattttcttt

SEQ ID NO: 15624 - DNA, 96 bp, Aspergillus novofumigatus
  misc_feature: 97
tcttctctactctttcttctttccttttttaatcttctctcttattctattaaaaatatacccttcttctctcttatattataattaatctactct

SEQ ID NO: 15625 - DNA, 96 bp, Aspergillus novofumigatus
  misc_feature: 97
tcttctaaccctttttatctcttcttctaactcttattcttaactcctattcttattccttctctcctaaaaacttttcttctaactcttattcta

SEQ ID NO: 15626 - DNA, 96 bp, Aspergillus novofumigatus
  misc_feature: 97
ggttaggatagttagaaggagagtaagaaatagaataagagtaaggggtagtaagtgtagatagaagagagagatagagaaagaggtaaagtaaga

SEQ ID NO: 15627 - DNA, 96 bp, Aspergillus novofumigatus
  misc_feature: 97
taaagatagataagatagaaagagtttaagtaaagggtaagaaagagaagaagaataagaagaaagagaagaaagagaagaaagagaagaaagaga

SEQ ID NO: 15628 - DNA, 96 bp, Aspergillus novofumigatus
  misc_feature: 97
tctctttaataattctaacccttaccttaatatattaataatttctattttattcctaacccttattctctctcttattattatcttttattttct

SEQ ID NO: 15629 - DNA, 96 bp, Aspergillus novofumigatus
  misc_feature: 97
tctagtttagtattagatatattttattaatagagtttaagaagtatagtatactttaatatatattatttttagaatttcttctaaagtttagta

SEQ ID NO: 15630 - DNA, 96 bp, Aspergillus novofumigatus
  misc_feature: 97
tccttttttaatcttctctcttattctattaaaaatatacccttcttctctcttatattataattaatctactctctttttatccttattctctct

SEQ ID NO: 15631 - DNA, 96 bp, Aspergillus novofumigatus
  misc_feature: 97
gagatagaaggagagatagaaggagagatagaaggagagatagaaggagagatagaaggagagatagaaggagagatagaaggagagttagaagga

SEQ ID NO: 15632 - DNA, 96 bp, Aspergillus novofumigatus
  misc_feature: 97
ataagatagagagagttttagtaaagagaagaaataaatataattaaaaatagaagaagaaagggaagaggaaagggaagaggaaaggaaagagga

SEQ ID NO: 15633 - DNA, 96 bp, Aspergillus novofumigatus
  misc_feature: 97
agaggttttaagagattagatagagaagaagaggtaaaagagaatttagggatagattaagaggagagaagaaggagtaataagagtagaaaggga

SEQ ID NO: 15634 - DNA, 96 bp, Aspergillus novofumigatus
  misc_feature: 97
tcccttatataatctcttactaaaattctaattattcttttttctatatctgactcttctttcttttcttttctttcttcttttctctttcttttc

SEQ ID NO: 15635 - DNA, 96 bp, Aspergillus novofumigatus
  misc_feature: 97
agggactgaggagggaggcagtgagataggcagtaaggcaggcagcaagcaaagcagtgagcaaggcagtgagtaaggcagtcagcaagatagtga

SEQ ID NO: 15636 - DNA, 96 bp, Aspergillus novofumigatus
  misc_feature: 97
tatttaatttactactactatatttaaaaagtttatatcttatatataggagatagtatctataaattatattattataatcctctattagctata

SEQ ID NO: 15637 - DNA, 96 bp, Aspergillus novofumigatus
  misc_feature: 97
tattcttcttctaatctacttattaaatcctaactttaatcctttcttcttttctctactctttcttctcttctctactctttcttctttcctttt

SEQ ID NO: 15638 - DNA, 96 bp, Aspergillus novofumigatus
  misc_feature: 97
gggtgaggataagagtaagggtaaggatttagattagaagggataagagaggagattaagaagagatagaataagagatagataagagatagaata

SEQ ID NO: 15639 - DNA, 96 bp, Aspergillus novofumigatus
  misc_feature: 97
ggattaggaatgagttaggattaggaattggttaggattaggaataagttaggattaggaatgagttaggattagggatttagtaagaggttaata

SEQ ID NO: 15640 - DNA, 96 bp, Aspergillus novofumigatus
  misc_feature: 97
tatgtataaaccactgattcagctaacatactatataaaccaaccgtataatatatatctctgcgcattatggtatactaaaatatatattcattc

SEQ ID NO: 15641 - DNA, 96 bp, Aspergillus novofumigatus
  misc_feature: 97
tatcttatattcttcttctaatctacttattaaatcctaactttaatcctttcttcttttctctactctttcttctcttctctactctttcttctt

SEQ ID NO: 15642 - DNA, 96 bp, Aspergillus novofumigatus
  misc_feature: 97
aagggataaagagggtgaggataagagtaagggtaaggatttagattagaagggataagagaggagattaagaagagatagaataagagatagata

SEQ ID NO: 15643 - DNA, 96 bp, Aspergillus novofumigatus
  misc_feature: 97
tatatgtaagtatataagaaggataatttatatagattagtttagtagtttagattttaatatatataaagggtttataattaaatattaccttag

SEQ ID NO: 15644 - DNA, 96 bp, Aspergillus novofumigatus
  misc_feature: 97
tatatcttatattcttcttctaatctacttattaaatcctaactttaatcctttcttcttttctctactctttcttctcttctctactctttcttc

SEQ ID NO: 15645 - DNA, 96 bp, Aspergillus novofumigatus
  misc_feature: 97
agaagaagaggtaaaagagaatttagggatagattaagaggagagaagaaggagtaataagagtagaaagggagataatttaaaaagagagatata

SEQ ID NO: 15646 - DNA, 96 bp, Aspergillus novofumigatus
  misc_feature: 97
attctctctcttattattatcttttattttcttttcttttctattccctttcctcttccctttcctcttccctttcttctcctatttttaattata

SEQ ID NO: 15647 - DNA, 96 bp, Aspergillus novofumigatus
  misc_feature: 97
aggggaatcatcattggaacctttttggtcttggggttagtagctgcctagaacactacttccttacagatataggccgggcgcgcgcgcgcccta

SEQ ID NO: 15648 - DNA, 96 bp, Aspergillus novofumigatus
  misc_feature: 97
taggctgcccctataatatatactatcttatatatatagctatataatcacctaattagttatataattataactagttattatattaattagtat

SEQ ID NO: 15649 - DNA, 96 bp, Aspergillus novofumigatus
  misc_feature: 97
atctcttactttacctctttctctatctctctcttctatctacacttactaccccttactcttattctatttcttactctccttctaactatccta

SEQ ID NO: 15650 - DNA, 96 bp, Aspergillus novofumigatus
  misc_feature: 97
taagaaggataatttatatagattagtttagtagtttagattttaatatatataaagggtttataattaaatattaccttagaagagatagatcta

SEQ ID NO: 15651 - DNA, 96 bp, Aspergillus novofumigatus
  misc_feature: 97
tagataattatagaatcataaggctagtataagttaaatatatttatttcactttaatatacatatttttatatatatatatattaaaatctgcct

SEQ ID NO: 15652 - DNA, 96 bp, Aspergillus novofumigatus
  misc_feature: 97
atccctcactcttaaactcttacttatattaatctctatctataattctttctctttcttctctttctctctttctttcttatctctctaactcta

SEQ ID NO: 15653 - DNA, 96 bp, Aspergillus novofumigatus
  misc_feature: 97
atctcttattctatctcttattctatctcttattctatctctctcttactccctctctcctctatctcttcttaatctcctctcttatcccttcta

SEQ ID NO: 15654 - DNA, 96 bp, Aspergillus novofumigatus
  misc_feature: 97
agaggttaggatagttagaaggagagtaagaaatagaataagagtaaggggtagtaagtgtagatagaagagagagatagagaaagaggtaaagta

SEQ ID NO: 15655 - DNA, 96 bp, Aspergillus novofumigatus
  misc_feature: 97
gagtaagggtaaggatttagattagaagggataagagaggagattaagaagagatagaataagagatagataagagatagaataagagtaagagta

SEQ ID NO: 15656 - DNA, 96 bp, Aspergillus novofumigatus
  misc_feature: 97
tactctatcttactatttagatatttactaaagtctatttctatattataattataagtattattactttatttattactatagtaagtataagat

SEQ ID NO: 15657 - DNA, 96 bp, Aspergillus novofumigatus
  misc_feature: 97
tactaaaattctaattattcttttttctatatctatctcttctttcttttcttttctttcttctttcctctttcttttctatctattatcttctta

SEQ ID NO: 15658 - DNA, 96 bp, Aspergillus novofumigatus
  misc_feature: 97
taccctttctaactccctctcttctttttttaatctatctctaaatcctcttcttcctactcttcttaatctactctcttaaaatcccttcttttt

SEQ ID NO: 15659 - DNA, 96 bp, Aspergillus novofumigatus
  misc_feature: 97
ctactaatattactacctctcttactacttaccttactattaaccttactatctactatgatatttatattactatctaccttattacctacctta

SEQ ID NO: 15660 - DNA, 96 bp, Aspergillus novofumigatus
  misc_feature: 97
taacccttactctatcccttatctaatctcttactaaaattctaattattcttttttctatatctatctcttctttcttttcttttctttcttctt

SEQ ID NO: 15661 - DNA, 96 bp, Aspergillus novofumigatus
  misc_feature: 97
aaggttagattcagtattataagagtattaataagtaaattaatattatattaataaggaaaaaatattatattaataatttaatatcctaattta

SEQ ID NO: 15662 - DNA, 96 bp, Aspergillus novofumigatus
  misc_feature: 97
atttctagtttagtattagatatattttattaatagagtttaagaagtatagtatactttaatatatattatttttagaatttcttctaaagttta

SEQ ID NO: 15663 - DNA, 96 bp, Aspergillus novofumigatus
  misc_feature: 97
taaaagtcctagaatactagtatataagaatatagaatagctgctatatattaatatagacttattaaaatattatagctatagagctataatatt

SEQ ID NO: 15664 - DNA, 96 bp, Aspergillus novofumigatus
  misc_feature: 97
ccccttattcattctttctaattcctcttatctttaaatttcttcctctaactctatctcttcttctatacttattaatccttactcttcttaaac

SEQ ID NO: 15665 - DNA, 96 bp, Aspergillus novofumigatus
  misc_feature: 97
aactagagtcttccctataggacctatatttattatagtaataaataaaataataatacttataattataataaagagatagactttagtaaatac

SEQ ID NO: 15666 - DNA, 96 bp, Aspergillus novofumigatus
  misc_feature: 97
atcttttattttcttttcttttctattccctttcctcttccctttcctcttccctttcttctcctatttttaattatatttatttcttctctttac

SEQ ID NO: 15667 - DNA, 96 bp, Aspergillus novofumigatus
  misc_feature: 97
gggactgaggagggaggcagtgagataggcagtaaggcaggcagcaagcaaagcagtgagcaaggcagtgagtaaggcagtcagcaagatagtgag

SEQ ID NO: 15668 - DNA, 96 bp, Aspergillus novofumigatus
  misc_feature: 97
atatagttctatatctattctataagactaatatatatattaagatttataatatttactagaaacttaatctttataattattataagcttatcc

SEQ ID NO: 15669 - DNA, 96 bp, Aspergillus novofumigatus
  misc_feature: 97
ggagaggttaggatagttagaaggagagtaagaaatagaataagagtaaggggtagtaagtgtagatagaagagagagatagagaaagaggtaaag

SEQ ID NO: 15670 - DNA, 96 bp, Aspergillus novofumigatus
  misc_feature: 97
atgtataaaccactgattcagctaacatactatataaaccaaccgtataatatatatctctgcgcattatggtatactaaaatatatattcattcc

SEQ ID NO: 15671 - DNA, 96 bp, Aspergillus novofumigatus
  misc_feature: 97
cttcttctaactcttattcttaactcctattcttattccttctctcctaaaaacttttcttctaactcttattctaactctccttcttattattcc

SEQ ID NO: 15672 - DNA, 96 bp, Aspergillus novofumigatus
  misc_feature: 97
ggaactagagtcttccctataggacctatatttattatagtaataaataaaataataatacttataattataataaagagatagactttagtaaat

SEQ ID NO: 15673 - DNA, 96 bp, Aspergillus novofumigatus
  misc_feature: 97
cccttactctatcccttatctaatctcttactaaaattctaattattcttttttctatatctatctcttctttcttttcttttctttcttctttcc

SEQ ID NO: 15674 - DNA, 96 bp, Aspergillus novofumigatus
  misc_feature: 97
ctatatctattctataagactaatatatatattaagatttataatatttactagaaacttaatctttataattattataagcttatcctctatagc

SEQ ID NO: 15675 - DNA, 96 bp, Aspergillus novofumigatus
  misc_feature: 97
ataagctattagaatatctactaatttattaactacttctaaccctctatatatctatatactattattaagctttattattattaaattattagc

SEQ ID NO: 15676 - DNA, 96 bp, Aspergillus novofumigatus
  misc_feature: 97
aattataaagattaagtttctagtaaatattataaatcttaatatatatattagtcttatagaatagatatagaactatattctatattacttagc

SEQ ID NO: 15677 - DNA, 96 bp, Aspergillus novofumigatus
  misc_feature: 97
gccctatttaagtagagggataagaggagtataagattaagtaaattatagtaaagtaaatatatataataaaggcaggtaaaactaaaaactaat

SEQ ID NO: 15678 - DNA, 96 bp, Aspergillus novofumigatus
  misc_feature: 97
attcggctaacatactatataaaccaaccgtataatatatatctctgcgcattatggtatactaaaatatatattcattcccaaatatatcaatgc

SEQ ID NO: 15679 - DNA, 96 bp, Aspergillus novofumigatus
  misc_feature: 97
gatttagattagaagggataagagaggagattaagaagagatagaataagagatagataagagatagaataagagtaagagtagagtaagagtaag

SEQ ID NO: 15680 - DNA, 96 bp, Aspergillus novofumigatus
  misc_feature: 97
gattaaataattatagctaatagaggattataataatataatttatagatactatctcctatatataagatataaactttttaaatatagtagtag

SEQ ID NO: 15681 - DNA, 96 bp, Aspergillus novofumigatus
  misc_feature: 97
ctccctctcttctttttttaatctatctctaaatcctcttcttcctactcttcttaatctactctcttaaaatcccttcttttttcttctactatc

SEQ ID NO: 15682 - DNA, 96 bp, Aspergillus novofumigatus
  misc_feature: 97
aagattaagtttctagtaaatattataaatcttaatatatatattagtcttatagaatagatatagaactatattctatattacttagctattatc

SEQ ID NO: 15683 - DNA, 96 bp, Aspergillus novofumigatus
  misc_feature: 97
atctcttactaaaattctaattattcttttttctatatctatctcttctttcttttcttttctttcttctttcctctttcttttctatctattatc

SEQ ID NO: 15684 - DNA, 96 bp, Aspergillus novofumigatus
  misc_feature: 97
aaattattaatataatattttttccttattaatacaatattaatttacttattaatactcttataatactgaatctaaccttagttagattttatc

SEQ ID NO: 15685 - DNA, 96 bp, Aspergillus novofumigatus
  misc_feature: 97
aaatccctcactcttaaactcttacttatattaatctctatctataattctttctctttcttctctttctctctttctttcttatctctctaactc

SEQ ID NO: 15686 - DNA, 96 bp, Aspergillus novofumigatus
  misc_feature: 97
ctaaccctttttatctcttcttctaactcttattcttaactcctattcttattccttctctcctaaaaacttttcttctaactcttattctaactc

SEQ ID NO: 15687 - DNA, 96 bp, Aspergillus novofumigatus
  misc_feature: 97
ctcttctctactctttcttctttccttttttaatcttctctcttattctattaaaaatatacccttcttctctcttatattataattaatctactc

SEQ ID NO: 15688 - DNA, 96 bp, Aspergillus novofumigatus
  misc_feature: 97
gagtaagagtagagtaagagtaagggttagaagaagagttagaataagagttaaggaaagagataaaagaaggattaagaagaggtagaagaagag

SEQ ID NO: 15689 - DNA, 96 bp, Aspergillus novofumigatus
  misc_feature: 97
atcttgaaatttcttactctaatactatctctttttttctaatcttctctctttctaccctttctaactccctctcttctttttttaatctatctc

SEQ ID NO: 15690 - DNA, 96 bp, Aspergillus novofumigatus
  misc_feature: 97
ctttccttaactcttattctaactcttcttctaacccttactcttactctactcttactcttattctatctcttattctatctcttattctatctc

SEQ ID NO: 15691 - DNA, 96 bp, Aspergillus novofumigatus
  misc_feature: 97
cttctctactctttcttctttccttttttaatcttctctcttattctattaaaaatatacccttcttctctcttatattataattaatctactctc

SEQ ID NO: 15692 - DNA, 96 bp, Aspergillus novofumigatus
  misc_feature: 97
gagaggttaggatagttagaaggagagtaagaaatagaataagagtaaggggtagtaagtgtagatagaagagagagatagagaaagaggtaaagt

SEQ ID NO: 15693 - DNA, 96 bp, Aspergillus novofumigatus
  misc_feature: 97
atatcttatattcttcttctaatctacttattaaatcctaactttaatcctttcttctcttctctactctttcttcttttctttcttattcttctc

SEQ ID NO: 15694 - DNA, 96 bp, Aspergillus novofumigatus
  misc_feature: 97
gaatatagttctatatctattctataagactaatatatatattaagatttataatatttactagaaacttaatctttataattattataagcttat

SEQ ID NO: 15695 - DNA, 96 bp, Aspergillus novofumigatus
  misc_feature: 97
cttcttctaaccctttttatctcttcttctaactcttattcttaactcctattcttattccttctctcctaaaaacttttcttctaactcttattc

SEQ ID NO: 15696 - DNA, 96 bp, Aspergillus novofumigatus
  misc_feature: 97
cttactctaatactatctctttttttctaatcttctctctttctaccctttctaactccctctcttctttttttaatctatctctaaatcctcttc

SEQ ID NO: 15697 - DNA, 96 bp, Aspergillus novofumigatus
  misc_feature: 97
ctatatctctctttttaaattatctccctttctactcttattactccttcttctctcctcttaatctatccctaaattctcttttacctcttcttc

SEQ ID NO: 15698 - DNA, 96 bp, Aspergillus novofumigatus
  misc_feature: 97
attatttaactttatccttttcttttaattttatctttccttaattttaatttcttcttctctttcttcttctctttcttcttctctttcttcttc

SEQ ID NO: 15699 - DNA, 96 bp, Aspergillus novofumigatus
  misc_feature: 97
cttttttaatcttctctcttattctattaaaaatatacccttcttctctcttatattataattaatctactctctttttatccttattctctctat

SEQ ID NO: 15700 - DNA, 96 bp, Aspergillus novofumigatus
  misc_feature: 97
aagagtaagagtagagtaagagtaagggttagaagaagagttagaataagagttaaggaaagagataaaagaaggattaagaagaggtagaagaag

SEQ ID NO: 15701 - DNA, 96 bp, Aspergillus novofumigatus
  misc_feature: 97
cttatcttgaaatttcttactctaatactatctctttttttctaatcttctctctttctaccctttctaactccctctcttctttttttaatctat

SEQ ID NO: 15702 - DNA, 96 bp, Aspergillus novofumigatus
  misc_feature: 97
ctctatagatcttatacttactatagtaataaataaagtaataatacttataattataatatagaaatagactttagtaaatatctaaatagtaag

SEQ ID NO: 15703 - DNA, 96 bp, Aspergillus novofumigatus
  misc_feature: 97
cttaactctctctttctctttcttctcctttctatccctaactcttattctaacccttcttctatctcttcctctaatcctccttctaattcttat

SEQ ID NO: 15704 - DNA, 96 bp, Aspergillus novofumigatus
  misc_feature: 97
agattaggagaggttaggatagttagaaggagagtaagaaatagaataagagtaaggggtagtaagtgtagatagaagagagagatagagaaagag

SEQ ID NO: 15705 - DNA, 96 bp, Aspergillus novofumigatus
  misc_feature: 97
ctctttaataattctaacccttaccttaatatattaataatttctattttattcctaacccttattctctctcttattattatcttttattttctt

SEQ ID NO: 15706 - DNA, 96 bp, Aspergillus novofumigatus
  misc_feature: 97
ctccctttttttacttcttatatatcttatattcttcttctaatctacttattaaatcctaactttaatcctttcttcttttctctactctttctt

SEQ ID NO: 15707 - DNA, 96 bp, Aspergillus novofumigatus
  misc_feature: 97
ctagtttagtattagatatattttattaatagagtttaagaagtatagtatactttaatatatattatttttagaatttcttctaaagtttagtat

SEQ ID NO: 15708 - DNA, 96 bp, Aspergillus novofumigatus
  misc_feature: 97
ctagtatataagaatatagaatagctgctatatattaatatagacttattaaaatattatagctatagagctataatattctatatataataggat

SEQ ID NO: 15709 - DNA, 96 bp, Aspergillus novofumigatus
  misc_feature: 97
ctagattatcctattatatatagaatattatagctctatagctataatattttaataagtctatattaatatatagcagctattctatattcttat

SEQ ID NO: 15710 - DNA, 96 bp, Aspergillus novofumigatus
  misc_feature: 97
ctaaaattctaattattcttttttctatatctgactcttctttcttttcttttctttcttcttttctctttcttttctatctattatcttcttact

SEQ ID NO: 15711 - DNA, 96 bp, Aspergillus novofumigatus
  misc_feature: 97
ccttactctatcccttatctaatctcttactaaaattctaattattcttttttctatatctatctcttctttcttttcttttctttcttctttcct

SEQ ID NO: 15712 - DNA, 96 bp, Aspergillus novofumigatus
  misc_feature: 97
ccttaccttaatatattaataatttctattttattcctaacccttattctctctcttattattatcttttattttcttttcttttctattcccttt

SEQ ID NO: 15713 - DNA, 96 bp, Aspergillus novofumigatus
  misc_feature: 97
cccttactatcttacttactacctcccttactgttaaccttactatctacctcactacttatcttactacctccctcactgcctccctcactacct

SEQ ID NO: 15714 - DNA, 96 bp, Aspergillus novofumigatus
  misc_feature: 97
cagggactgaggagggaggcagtgagataggcagtaaggcaggcagcaagcaaagcagtgagcaaggcagtgagtaaggcagtcagcaagatagtg

SEQ ID NO: 15715 - DNA, 96 bp, Aspergillus novofumigatus
  misc_feature: 97
atttcttactctaatactatctctttttttctaatcttctctctttctaccctttctaactccctctcttctttttttaatctatctctaaatcct

SEQ ID NO: 15716 - DNA, 96 bp, Aspergillus novofumigatus
  misc_feature: 97
atttatttaatcttctatctatttatctatattttctttctctttttaatctatattctaatctttaacttactatctttaactcttcttataatt

SEQ ID NO: 15717 - DNA, 96 bp, Aspergillus novofumigatus
  misc_feature: 97
agatagaggggttaaataagagatagaaggagagatagaaggagagatagaaggagagatagaaggagagatagaaggagagatagaaggagagat

SEQ ID NO: 15718 - DNA, 96 bp, Aspergillus novofumigatus
  misc_feature: 97
aaccactgattcggctaacatactatataaaccaaccgtataatatatatctctgcgcattatggtatactaaaatatatattcattcccaaatat

SEQ ID NO: 15719 - DNA, 96 bp, Aspergillus novofumigatus
  misc_feature: 97
atattcttcttctaatctacttattaaatcctaactttaatcctttcttcttttctctactctttcttctcttctctactctttcttctttccttt

SEQ ID NO: 15720 - DNA, 96 bp, Aspergillus novofumigatus
  misc_feature: 97
atatatcttatattcttcttctaatctacttattaaatcctaactttaatcctttcttcttttctctactctttcttctcttctctactctttctt

SEQ ID NO: 15721 - DNA, 96 bp, Aspergillus novofumigatus
  misc_feature: 97
aatctcttactaaaattctaattattcttttttctatatctatctcttctttcttttcttttctttcttctttcctctttcttttctatctattat

SEQ ID NO: 15722 - DNA, 96 bp, Aspergillus novofumigatus
  misc_feature: 97
aggttaattagtagtaatatatgaatgaatatatatattttaggataccataatgcgcagagatatatattatacagttagtttgaagagtatgtt

SEQ ID NO: 15723 - DNA, 96 bp, Aspergillus novofumigatus
  misc_feature: 97
aggataagagtaagggtaaggatttagattagaagggataagagaggagattaagaagagatagaataagagatagataagagatagaataagagt

SEQ ID NO: 15724 - DNA, 96 bp, Aspergillus novofumigatus
  misc_feature: 97
aaactaactgtataatatatatctctgcgcattatggtatcctaaaatatatatattcattcattaatatatcaatgctgatcgacctgatctcct

SEQ ID NO: 15725 - DNA, 96 bp, Aspergillus novofumigatus
  misc_feature: 97
accttctccctttttttacttcttatatatcttatattcttcttctaatctacttattaaatcctaactttaatcctttcttctcttctctactct

SEQ ID NO: 15726 - DNA, 96 bp, Aspergillus novofumigatus
  misc_feature: 96
gagtaagaaagaggtaaggagagatagaataagaattagaaggaggattagaggaagagatagaagaagggttagaataagagttagggatagaaa

SEQ ID NO: 15727 - DNA, 96 bp, Aspergillus novofumigatus
  misc_feature: 96
aagatagagagagttttagtaaagagaagaaataaatataattaaaaatagaagaagaaagggaagaggaaagggaagaggaaaggaaagaggaaa

SEQ ID NO: 15728 - DNA, 96 bp, Aspergillus novofumigatus
  misc_feature: 96
tttatttatttaatcttctatctatttatctatattttctttctctttttaatctatattctaatctttaacttactatctttaactcttcttata

SEQ ID NO: 15729 - DNA, 96 bp, Aspergillus novofumigatus
  misc_feature: 96
tttatttaatcttctatctatttatctatattttctttctctttttaatctatattctaatctttaacttactatctttaactcttcttataattc

SEQ ID NO: 15730 - DNA, 96 bp, Aspergillus novofumigatus
  misc_feature: 96
tttatatgtaagtatataagaaggataatttatatagattagtttagtagtttagattttaatatatataaagggtttataattaaatattacctt

SEQ ID NO: 15731 - DNA, 96 bp, Aspergillus novofumigatus
  misc_feature: 96
agaaataaatataattaaaaatagaagaagaaagggaagaggaaagggaagaggaaaggaaagaggaaagggaagaggaaagggaatagaaaagaa

SEQ ID NO: 15732 - DNA, 96 bp, Aspergillus novofumigatus
  misc_feature: 96
gaagggataagagaggagattaagaagagatagaataagagatagataagagatagaataagagtaagagtagagtaagagtaagggttagaagaa

SEQ ID NO: 15733 - DNA, 96 bp, Aspergillus novofumigatus
  misc_feature: 96
ttcttaactcctattcttattccttctctcctaaaaacttttcttctaactcttattctaactctccttcttattattccttactcttcttctaat

SEQ ID NO: 15734 - DNA, 96 bp, Aspergillus novofumigatus
  misc_feature: 96
ttctcttctctactctttcttctttccttttttaatcttctctcttattctattaaaaatatacccttcttctctcttatattataattaatctac

SEQ ID NO: 15735 - DNA, 96 bp, Aspergillus novofumigatus
  misc_feature: 96
ttctctctcttattattatcttttattttcttttcttttctattccctttcctcttccctttcctcttccctttcttctcctatttttaattatat

SEQ ID NO: 15736 - DNA, 96 bp, Aspergillus novofumigatus
  misc_feature: 96
tagaagataagagaatcagggatagagagaataaggataaaaagagagtagattaattataatataagagagaagaagggtatatttttaatagaa

SEQ ID NO: 15737 - DNA, 96 bp, Aspergillus novofumigatus
  misc_feature: 96
atttagattagaagggataagagaggagattaagaagagatagaggagagagggagtaagagagagatagaataagagatagaataagagatagaa

SEQ ID NO: 15738 - DNA, 96 bp, Aspergillus novofumigatus
  misc_feature: 96
ttctaaaaataatatatattaaagtatactatacttcttaaactctattaataaaatatatctaatactaaactagaaatatattaagatatacta

SEQ ID NO: 15739 - DNA, 96 bp, Aspergillus novofumigatus
  misc_feature: 96
ttcggctaacatactatataaaccaaccgtataatatatatctctgcgcattatggtatactaaaatatatattcattcccaaatatatcaatgct

SEQ ID NO: 15740 - DNA, 96 bp, Aspergillus novofumigatus
  misc_feature: 96
ttccttctctcctaaaaacttttcttctaactcttattctaactctccttcttattattccttactcttcttctaatccttcttctatctctccct

SEQ ID NO: 15741 - DNA, 96 bp, Aspergillus novofumigatus
  misc_feature: 96
taagatagagagagttttagtaaagagaagaaataaatataattaaaaatagaagaagaaagggaagaggaaagggaagaggaaaggaaagaggaa

SEQ ID NO: 15742 - DNA, 96 bp, Aspergillus novofumigatus
  misc_feature: 96
ttattaggattaggaatgagttaggattaggaattggttaggattaggaataagttaggattaggaatgagttaggattagggatttagtaagagg

SEQ ID NO: 15743 - DNA, 96 bp, Aspergillus novofumigatus
  misc_feature: 96
ttatattcttcttctaatctacttattaaatcctaactttaatcctttcttcttttctctactctttcttctcttctctactctttcttctttcct

SEQ ID NO: 15744 - DNA, 96 bp, Aspergillus novofumigatus
  misc_feature: 96
ttatatgtaagtatataagaaggataatttatatagattagtttagtagtttagattttaatatatataaagggtttataattaaatattacctta

SEQ ID NO: 15745 - DNA, 96 bp, Aspergillus novofumigatus
  misc_feature: 96
ttatactaatagaaaggtaataaatatcttcttaagacttaatataatctatatctctatatattatctaagaaatctagaaagatattacttata

SEQ ID NO: 15746 - DNA, 96 bp, Aspergillus novofumigatus
  misc_feature: 96
aatatagaatatagttctatatctattctataagactaatatatatattaagatttataatatttactagaaacttaatctttataattattataa

SEQ ID NO: 15747 - DNA, 96 bp, Aspergillus novofumigatus
  misc_feature: 96
ttataaagattaagtttctagtaaatattataaatcttaatatatatattagtcttatagaatagatatagaactatattctatattacttagcta

SEQ ID NO: 15748 - DNA, 96 bp, Aspergillus novofumigatus
  misc_feature: 96
aactaaggttagattcagtattataagagtattaataagtaaattaatattatattaataaggaaaaaatattatattaataatttaatatcctaa

SEQ ID NO: 15749 - DNA, 96 bp, Aspergillus novofumigatus
  misc_feature: 96
ttagatatttactaaagtctatttctatattataattataagtattattactttatttattactatagtaagtataagatctatagagaagactat

SEQ ID NO: 15750 - DNA, 96 bp, Aspergillus novofumigatus
  misc_feature: 96
cttctaaccctttttatctcttcttctaactcttattcttaactcctattcttattccttctctcctaaaaacttttcttctaactcttattctaa

SEQ ID NO: 15751 - DNA, 96 bp, Aspergillus novofumigatus
  misc_feature: 96
ttagaagggataagagaggagattaagaagagatagaggagagagggagtaagagagagatagaataagagatagaataagagatagaataagaga

SEQ ID NO: 15752 - DNA, 96 bp, Aspergillus novofumigatus
  misc_feature: 96
gaggttaggatagttagaaggagagtaagaaatagaataagagtaaggggtagtaagtgtagatagaagagagagatagagaaagaggtaaagtaa

SEQ ID NO: 15753 - DNA, 96 bp, Aspergillus novofumigatus
  misc_feature: 96
ttacctcttttttcttctccctttttatctcttctctctatttctctcttaattcttactctatctcttactttacctctttctctatctctctct

SEQ ID NO: 15754 - DNA, 96 bp, Aspergillus novofumigatus
  misc_feature: 96
taggagaggttaggatagttagaaggagagtaagaaatagaataagagtaaggggtagtaagtgtagatagaagagagagatagagaaagaggtaa

SEQ ID NO: 15755 - DNA, 96 bp, Aspergillus novofumigatus
  misc_feature: 96
ttaataagagtagagatagatagatataggaaaataaggatttagaaggatttaggaagagagaggatttagaatgaagatagaaagaagagagga

SEQ ID NO: 15756 - DNA, 96 bp, Aspergillus novofumigatus
  misc_feature: 96
ttaagtagagggataagaggagtataagattaagtaaattatagtaaagtaaatatatataataaaggcaggtaaaactaaaaactaataccttat

SEQ ID NO: 15757 - DNA, 96 bp, Aspergillus novofumigatus
  misc_feature: 96
ttaaatccctcactcttaaactcttacttatattaatctctatctataattctttctctttcttctctttctctctttctttcttatctctctaac

SEQ ID NO: 15758 - DNA, 96 bp, Aspergillus novofumigatus
  misc_feature: 96
tggtttatttaatttactactactatatttaaaaagtttatatcttatatataggagatagtatctataaattatattattataatcctctattag

SEQ ID NO: 15759 - DNA, 96 bp, Aspergillus novofumigatus
  misc_feature: 96
tgaggataagagtaagggtaaggatttagattagaagggataagagaggagattaagaagagatagaataagagatagataagagatagaataaga

SEQ ID NO: 15760 - DNA, 96 bp, Aspergillus novofumigatus
  misc_feature: 96
caagacagggactgaggagggaggcagtgagataggcagtaaggcaggcagcaagcaaagcagtgagcaaggcagtgagtaaggcagtcagcaaga

SEQ ID NO: 15761 - DNA, 96 bp, Aspergillus novofumigatus
  misc_feature: 96
tcttcttctaaccctttttatctcttcttctaactcttattcttaactcctattcttattccttctctcctaaaaacttttcttctaactcttatt

SEQ ID NO: 15762 - DNA, 96 bp, Aspergillus novofumigatus
  misc_feature: 96
tcttctacctcttcttaatccttcttttatctctttccttaactcttattctaactcttcttctaacccttactcttactctactcttactcttat

SEQ ID NO: 15763 - DNA, 96 bp, Aspergillus novofumigatus
  misc_feature: 96
tcttactctaatactatctctttttttctaatcttctctctttctaccctttctaactccctctcttctttttttaatctatctctaaatcctctt

SEQ ID NO: 15764 - DNA, 96 bp, Aspergillus novofumigatus
  misc_feature: 96
tcttactaaaattctaattattcttttttctatatctatctcttctttcttttcttttctttcttctttcctctttcttttctatctattatcttc

SEQ ID NO: 15765 - DNA, 96 bp, Aspergillus novofumigatus
  misc_feature: 96
tctctttccttaactcttattctaactcttcttctaacccttactcttactctactcttactcttattctatctcttattctatctcttattctat

SEQ ID NO: 15766 - DNA, 96 bp, Aspergillus novofumigatus
  misc_feature: 96
tctcttctctactctttcttctttccttttttaatcttctctcttattctattaaaaatatacccttcttctctcttatattataattaatctact

SEQ ID NO: 15767 - DNA, 96 bp, Aspergillus novofumigatus
  misc_feature: 96
tctctctcttattattatcttttattttcttttcttttctattccctttcctcttccctttcctcttccctttcttctcctatttttaattatatt

SEQ ID NO: 15768 - DNA, 96 bp, Aspergillus novofumigatus
  misc_feature: 96
aataagagtagagatagatagatataggaaaataaggatttagaaggatttaggaagagagaggatttagaatgaagatagaaagaagagaggaga

SEQ ID NO: 15769 - DNA, 96 bp, Aspergillus novofumigatus
  misc_feature: 96
tagatcttatacttactatagtaataaataaagtaataatacttataattataatatagaaatagactttagtaaatatctaaatagtaagataga

SEQ ID NO: 15770 - DNA, 96 bp, Aspergillus novofumigatus
  misc_feature: 96
atatgtaagtatataagaaggataatttatatagattagtttagtagtttagattttaatatatataaagggtttataattaaatattaccttaga

SEQ ID NO: 15771 - DNA, 96 bp, Aspergillus novofumigatus
  misc_feature: 96
tctaactaaggttagattcagtattataagagtattaataagtaaattaatattatattaataaggaaaaaatattatattaataatttaatatcc

SEQ ID NO: 15772 - DNA, 96 bp, Aspergillus novofumigatus
  misc_feature: 96
tctaaccctttttatctcttcttctaactcttattcttaactcctattcttattccttctctcctaaaaacttttcttctaactcttattctaact

SEQ ID NO: 15773 - DNA, 96 bp, Aspergillus novofumigatus
  misc_feature: 96
tctaaaaataatatatattaaagtatactatacttcttaaactctattaataaaatatatctaatactaaactagaaatatattaagatatactat

SEQ ID NO: 15774 - DNA, 96 bp, Aspergillus novofumigatus
  misc_feature: 96
tcctttctatccctaactcttattctaacccttcttctatctcttcctctaatcctccttctaattcttattctatctctccttacctctttctta

SEQ ID NO: 15775 - DNA, 96 bp, Aspergillus novofumigatus
  misc_feature: 96
tccttctctcctaaaaacttttcttctaactcttattctaactctccttcttattattccttactcttcttctaatccttcttctatctctccctc

SEQ ID NO: 15776 - DNA, 96 bp, Aspergillus novofumigatus
  misc_feature: 96
actagtatataagaatatagaatagctgctatatattaatatagacttattaaaatattatagctatagagctataatattctatatataatagga

SEQ ID NO: 15777 - DNA, 96 bp, Aspergillus novofumigatus
  misc_feature: 96
tcccttatctaatctcttactaaaattctaattattcttttttctatatctatctcttctttcttttcttttctttcttctttcctctttcttttc

SEQ ID NO: 15778 - DNA, 96 bp, Aspergillus novofumigatus
  misc_feature: 96
taaactaactgtataatatatatctctgcgtattatggtatcctaaaatgtatatattcatttatatattactactgattaaccttaatctcctga

SEQ ID NO: 15779 - DNA, 96 bp, Aspergillus novofumigatus
  misc_feature: 96
aagaattataagaagagttaaagatagtaagttaaagattagaatatagattaaaaagagaaagaaaatatagataaatagatagaagattaaata

SEQ ID NO: 15780 - DNA, 96 bp, Aspergillus novofumigatus
  misc_feature: 96
tatcttaaaagtcctagaatactagtatataagaatatagaatagctgctatatattaatatagacttattaaaatattatagctatagagctata

SEQ ID NO: 15781 - DNA, 96 bp, Aspergillus novofumigatus
  misc_feature: 96
tatctcttattctatctcttattctatctcttattctatctctctcttactccctctctcctctatctcttcttaatctcctctcttatcccttct

SEQ ID NO: 15782 - DNA, 96 bp, Aspergillus novofumigatus
  misc_feature: 96
tagtatataagaatatagaatagctgctatatattaatatagacttattaaaatattatagctatagagctataatattctatatataataggata

SEQ ID NO: 15783 - DNA, 96 bp, Aspergillus novofumigatus
  misc_feature: 96
tatactctatcttactatttagatatttactaaagtctatttctatattataattataagtattattactttatttattactatagtaagtataag

SEQ ID NO: 15784 - DNA, 96 bp, Aspergillus novofumigatus
  misc_feature: 96
agtgattaattatagaagataagagaatcagggatagagagaataaggataaaaagagagtagattaattataatataagagagaagaagggtata

SEQ ID NO: 15785 - DNA, 96 bp, Aspergillus novofumigatus
  misc_feature: 96
ctaatattactacctctcttactacttaccttactattaaccttactatctactatgatatttatattactatctaccttattacctaccttacta

SEQ ID NO: 15786 - DNA, 96 bp, Aspergillus novofumigatus
  misc_feature: 96
taactaaggttagattcagtattataagagtattaataagtaaattaatattatattaataaggaaaaaatattatattaataatttaatatccta

SEQ ID NO: 15787 - DNA, 96 bp, Aspergillus novofumigatus
  misc_feature: 96
ccttttttaatcttctctcttattctattaaaaatatacccttcttctctcttatattataattaatctactctctttttatccttattctctcta

SEQ ID NO: 15788 - DNA, 96 bp, Aspergillus novofumigatus
  misc_feature: 96
tagacactagcttatagttatataataatatactaattaatatagcaagcttatattatataatcttagctataatttatatacccccttttatat

SEQ ID NO: 15789 - DNA, 96 bp, Aspergillus novofumigatus
  misc_feature: 96
actctccttctaactctccttctatctctccttctatctctccttctatctctccttctatctctccttctatctctccttctatctctccttcta

SEQ ID NO: 15790 - DNA, 96 bp, Aspergillus novofumigatus
  misc_feature: 96
taccttaatatattaataatttctattttattcctaacccttattctctctcttattattatcttttattttcttttcttttctattccctttcct

SEQ ID NO: 15791 - DNA, 96 bp, Aspergillus novofumigatus
  misc_feature: 96
tacctcttttttcttctccctttttatctcttctctctatttctctcttaattcttactctatctcttactttacctctttctctatctctctctt

SEQ ID NO: 15792 - DNA, 96 bp, Aspergillus novofumigatus
  misc_feature: 96
taattctaacccttaccttaatatattaataatttctattttattcctaacccttattctctctcttattattatcttttattttcttttcttttc

SEQ ID NO: 15793 - DNA, 96 bp, Aspergillus novofumigatus
  misc_feature: 96
taagtagagggataagaggagtataagattaagtaaattatagtaaagtaaatatatataataaaggcaggtaaaactaaaaactaataccttatt

SEQ ID NO: 15794 - DNA, 96 bp, Aspergillus novofumigatus
  misc_feature: 96
agaatatagttctatatctattctataagactaatatatatattaagatttataatatttactagaaacttaatctttataattattataagctta

SEQ ID NO: 15795 - DNA, 96 bp, Aspergillus novofumigatus
  misc_feature: 96
attttatttatttaatcttctatctatttatctatattttctttctctttttaatctatattctaatctttaacttactatctttaactcttctta

SEQ ID NO: 15796 - DNA, 96 bp, Aspergillus novofumigatus
  misc_feature: 96
taaattattaatataatattttttccttattaatacaatattaatttacttattaatactcttataatactgaatctaaccttagttagattttat

SEQ ID NO: 15797 - DNA, 96 bp, Aspergillus novofumigatus
  misc_feature: 96
taaaccactgattcggctaacatactatataaaccaaccgtataatatatatctctgcgcattatggtatactaaaatatatattcattcccaaat

SEQ ID NO: 15798 - DNA, 96 bp, Aspergillus novofumigatus
  misc_feature: 96
gttaggatagttagaaggagagtaagaaatagaataagagtaaggggtagtaagtgtagatagaagagagagatagagaaagaggtaaagtaagag

SEQ ID NO: 15799 - DNA, 96 bp, Aspergillus novofumigatus
  misc_feature: 96
gtgaggataagagtaagggtaaggatttagattagaagggataagagaggagattaagaagagatagaataagagatagataagagatagaataag

SEQ ID NO: 15800 - DNA, 96 bp, Aspergillus novofumigatus
  misc_feature: 96
gtcttgcttgctgcctccctcactatctcactcactatctcactcactgccttacttactatctcactcactgtcttactcactacctccctcact

SEQ ID NO: 15801 - DNA, 96 bp, Aspergillus novofumigatus
  misc_feature: 96
gtagcaagacagggactgaggagggaggcagtgagataggcagtaaggcaggcagcaagcaaagcagtgagcaaggcagtgagtaaggcagtcagc

SEQ ID NO: 15802 - DNA, 96 bp, Aspergillus novofumigatus
  misc_feature: 96
actaaaattctaattattcttttttctatatctgactcttctttcttttcttttctttcttcttttctctttcttttctatctattatcttcttac

SEQ ID NO: 15803 - DNA, 96 bp, Aspergillus novofumigatus
  misc_feature: 96
ggttttaagagattagatagagaagaagaggtaaaagagaatttagggatagattaagaggagagaagaaggagtaataagagtagaaagggagat

SEQ ID NO: 15804 - DNA, 96 bp, Aspergillus novofumigatus
  misc_feature: 96
ggtagcaagacagggactgaggagggaggcagtgagataggcagtaaggcaggcagcaagcaaagcagtgagcaaggcagtgagtaaggcagtcag

SEQ ID NO: 15805 - DNA, 96 bp, Aspergillus novofumigatus
  misc_feature: 96
ctctttccttaactcttattctaactcttcttctaacccttactcttactctactcttactcttattctatctcttattctatctcttattctatc

SEQ ID NO: 15806 - DNA, 96 bp, Aspergillus novofumigatus
  misc_feature: 96
gagtgattaattatagaagataagagaatcagggatagagagaataaggataaaaagagagtagattaattataatataagagagaagaagggtat

SEQ ID NO: 15807 - DNA, 96 bp, Aspergillus novofumigatus
  misc_feature: 96
ccttactatcttacttactacctcccttactgttaaccttactatctacctcactacttatcttactacctccctcactgcctccctcactacctc

SEQ ID NO: 15808 - DNA, 96 bp, Aspergillus novofumigatus
  misc_feature: 96
gaggataagagtaagggtaaggatttagattagaagggataagagaggagattaagaagagatagaataagagatagataagagatagaataagag

SEQ ID NO: 15809 - DNA, 96 bp, Aspergillus novofumigatus
  misc_feature: 96
cctttttttacttcttatatatcttatattcttcttctaatctacttattaaatcctaactttaatcctttcttcttttctctactctttcttctc

SEQ ID NO: 15810 - DNA, 96 bp, Aspergillus novofumigatus
  misc_feature: 96
cttactctatcccttatataatctcttactaaaattctaattattcttttttctatatctgactcttctttcttttcttttctttcttcttttctc

SEQ ID NO: 15811 - DNA, 96 bp, Aspergillus novofumigatus
  misc_feature: 96
acctcttttttcttctccctttttatctcttctctctatttctctcttaattcttactctatctcttactttacctctttctctatctctctcttc

SEQ ID NO: 15812 - DNA, 96 bp, Aspergillus novofumigatus
  misc_feature: 96
gaagaaataaatataattaaaaatagaagaagaaagggaagaggaaagggaagaggaaaggaaagaggaaagggaagaggaaagggaatagaaaag

SEQ ID NO: 15813 - DNA, 96 bp, Aspergillus novofumigatus
  misc_feature: 96
actaacccttactctatcccttatctaatctcttactaaaattctaattattcttttttctatatctatctcttctttcttttcttttctttcttc

SEQ ID NO: 15814 - DNA, 96 bp, Aspergillus novofumigatus
  misc_feature: 96
acccttactctatcccttatctaatctcttactaaaattctaattattcttttttctatatctatctcttctttcttttcttttctttcttctttc

SEQ ID NO: 15815 - DNA, 96 bp, Aspergillus novofumigatus
  misc_feature: 96
ccctttctaactccctctcttctttttttaatctatctctaaatcctcttcttcctactcttcttaatctactctcttaaaatcccttcttttttc

SEQ ID NO: 15816 - DNA, 96 bp, Aspergillus novofumigatus
  misc_feature: 96
ctttttttacttcttatatatcttatattcttcttctaatctacttattaaatcctaactttaatcctttcttcttttctctactctttcttctct

SEQ ID NO: 15817 - DNA, 96 bp, Aspergillus novofumigatus
  misc_feature: 96
agagattaggagaggttaggatagttagaaggagagtaagaaatagaataagagtaaggggtagtaagtgtagatagaagagagagatagagaaag

SEQ ID NO: 15818 - DNA, 96 bp, Aspergillus novofumigatus
  misc_feature: 96
cttctacctcttcttaatccttcttttatctctttccttaactcttattctaactcttcttctaacccttactcttactctactcttactcttatt

SEQ ID NO: 15819 - DNA, 96 bp, Aspergillus novofumigatus
  misc_feature: 96
aagtttagtattattatataatattattcttatttttcttatagtaaattaattactatactatatttacctagtatatttatatctactaataag

SEQ ID NO: 15820 - DNA, 96 bp, Aspergillus novofumigatus
  misc_feature: 96
cttaatatattaataatttctattttattcctaacccttattctctctcttattattatcttttattttcttttcttttctattccctttcctctt

SEQ ID NO: 15821 - DNA, 96 bp, Aspergillus novofumigatus
  misc_feature: 96
ctctctcttattattatcttttattttcttttcttttctattccctttcctcttccctttcctcttccctttcttctcctatttttaattatattt

SEQ ID NO: 15822 - DNA, 96 bp, Aspergillus novofumigatus
  misc_feature: 96
agattaaggttaatcagtagtaatatataaatgaatatatacattttaggataccataatacgcagagatatatattatacagttagtttatagag

SEQ ID NO: 15823 - DNA, 96 bp, Aspergillus novofumigatus
  misc_feature: 96
atagatcttatacttactatagtaataaataaagtaataatacttataattataatatagaaatagactttagtaaatatctaaatagtaagatag

SEQ ID NO: 15824 - DNA, 96 bp, Aspergillus novofumigatus
  misc_feature: 96
aagagggtgaggataagagtaagggtaaggatttagattagaagggataagagaggagattaagaagagatagaataagagatagataagagatag

SEQ ID NO: 15825 - DNA, 96 bp, Aspergillus novofumigatus
  misc_feature: 96
ctagagtcttccctataggacctatatttattatagtaataaataaaataataatacttataattataataaagagatagactttagtaaatacct

SEQ ID NO: 15826 - DNA, 96 bp, Aspergillus novofumigatus
  misc_feature: 96
ctaccttctccctttttttacttcttatatatcttatattcttcttctaatctacttattaaatcctaactttaatcctttcttctcttctctact

SEQ ID NO: 15827 - DNA, 96 bp, Aspergillus novofumigatus
  misc_feature: 96
ctaactaaggttagattcagtattataagagtattaataagtaaattaatattatattaataaggaaaaaatattatattaataatttaatatcct

SEQ ID NO: 15828 - DNA, 96 bp, Aspergillus novofumigatus
  misc_feature: 96
ccctttttttacttcttatatatcttatattcttcttctaatctacttattaaatcctaactttaatcctttcttcttttctctactctttcttct

SEQ ID NO: 15829 - DNA, 96 bp, Aspergillus novofumigatus
  misc_feature: 96
cccttatctaatctcttactaaaattctaattattcttttttctatatctatctcttctttcttttcttttctttcttctttcctctttcttttct

SEQ ID NO: 15830 - DNA, 96 bp, Aspergillus novofumigatus
  misc_feature: 96
cccttaccttaatatattaataatttctattttattcctaacccttattctctctcttattattatcttttattttcttttcttttctattccctt

SEQ ID NO: 15831 - DNA, 96 bp, Aspergillus novofumigatus
  misc_feature: 96
ccactgattcggctaacatactatataaaccaaccgtataatatatatctctgcgcattatggtatactaaaatatatattcattcccaaatatat

SEQ ID NO: 15832 - DNA, 96 bp, Aspergillus novofumigatus
  misc_feature: 96
ataaactaactgtataatatatatctctgcgtattatggtatcctaaaatgtatatattcatttatatattactactgattaaccttaatctcctg

SEQ ID NO: 15833 - DNA, 96 bp, Aspergillus novofumigatus
  misc_feature: 96
agtcttctctatagatcttatacttactatagtaataaataaagtaataatacttataattataatatagaaatagactttagtaaatatctaaat

SEQ ID NO: 15834 - DNA, 96 bp, Aspergillus novofumigatus
  misc_feature: 96
attcttcttctaatctacttattaaatcctaactttaatcctttcttcttttctctactctttcttctcttctctactctttcttctttccttttt

SEQ ID NO: 15835 - DNA, 96 bp, Aspergillus novofumigatus
  misc_feature: 96
actaaggttagattcagtattataagagtattaataagtaaattaatattatattaataaggaaaaaatattatattaataatttaatatcctaat

SEQ ID NO: 15836 - DNA, 96 bp, Aspergillus novofumigatus
  misc_feature: 96
aaactaactgtataatatatatctctgcgtattatggtatcctaaaatgtatatattcatttatatattactactgattaaccttaatctcctgat

SEQ ID NO: 15837 - DNA, 96 bp, Aspergillus novofumigatus
  misc_feature: 96
aagaagctagattatcctattatatatagaatattatagctctatagctataatattttaataagtctatattaatatatagcagctattctatat

SEQ ID NO: 15838 - DNA, 96 bp, Aspergillus novofumigatus
  misc_feature: 96
atactaatagaaaggtaataaatatcttcttaagacttaatataatctatatctctatatattatctaagaaatctagaaagatattacttatatt

SEQ ID NO: 15839 - DNA, 96 bp, Aspergillus novofumigatus
  misc_feature: 96
acccttaccttaatatattaataatttctattttattcctaacccttattctctctcttattattatcttttattttcttttcttttctattccct

SEQ ID NO: 15840 - DNA, 96 bp, Aspergillus novofumigatus
  misc_feature: 96
aactatcttaaaagtcctagaatactagtatataagaatatagaatagctgctatatattaatatagacttattaaaatattatagctatagagct

SEQ ID NO: 15841 - DNA, 96 bp, Aspergillus novofumigatus
  misc_feature: 96
aagctagattatcctattatatatagaatattatagctctatagctataatattttaataagtctatattaatatatagcagctattctatattct

SEQ ID NO: 15842 - DNA, 96 bp, Aspergillus novofumigatus
  misc_feature: 96
acctatatttattatagtaataaataaaataataatacttataattataataaagagatagactttagtaaatacctaaatagtaggatatagagt

SEQ ID NO: 15843 - DNA, 96 bp, Aspergillus novofumigatus
  misc_feature: 96
acataatccgaggataaggattttagcggcttgtagtattttagccgcttgttgcattttagccgcttgtagtattttagcggctttttgcaattt

SEQ ID NO: 15844 - DNA, 96 bp, Aspergillus novofumigatus
  misc_feature: 95
tttttacttcttatatatcttatattcttcttctaatctacttattaaatcctaactttaatcctttcttcttttctctactctttcttctcttct

SEQ ID NO: 15845 - DNA, 96 bp, Aspergillus novofumigatus
  misc_feature: 95
ttttcttttctattccctttcctcttccctttcctctttcctttcctcttccctttcctcttccctttcttcttctatttttaattatatttattt

SEQ ID NO: 15846 - DNA, 96 bp, Aspergillus novofumigatus
  misc_feature: 95
ataaaccactgattcagctaacatactatataaaccaaccgtataatatatatctctgcgcattatggtatactaaaatatatattcattcccaaa

SEQ ID NO: 15847 - DNA, 96 bp, Aspergillus novofumigatus
  misc_feature: 95
tttcttttctattccctttcctcttccctttcctctttcctttcctcttccctttcctcttccctttcttcttctatttttaattatatttatttc

SEQ ID NO: 15848 - DNA, 96 bp, Aspergillus novofumigatus
  misc_feature: 95
tttcttttctattccctttcctcttccctttcctcttccctttcttctcctatttttaattatatttatttcttctctttactaaaactctctcta

SEQ ID NO: 15849 - DNA, 96 bp, Aspergillus novofumigatus
  misc_feature: 95
tttagattagaagggataagagaggagattaagaagagatagaataagagatagataagagatagaataagagtaagagtagagtaagagtaaggg

SEQ ID NO: 15850 - DNA, 96 bp, Aspergillus novofumigatus
  misc_feature: 95
tgaaatttcttactctaatactatctctttttttctaatcttctctctttctaccctttctaactccctctcttctttttttaatctatctctaaa

SEQ ID NO: 15851 - DNA, 96 bp, Aspergillus novofumigatus
  misc_feature: 95
ataaagatttagattaaataattatagctaatagaggattataataatataatttatagatactatctcctatatataagatataaactttttaaa

SEQ ID NO: 15852 - DNA, 96 bp, Aspergillus novofumigatus
  misc_feature: 95
ttgctgcctccctcactatctcactcactatctcactcactgccttacttactatctcactcactgtcttactcactacctccctcactatcttac

SEQ ID NO: 15853 - DNA, 96 bp, Aspergillus novofumigatus
  misc_feature: 95
ttgaaatttcttactctaatactatctctttttttctaatcttctctctttctaccctttctaactccctctcttctttttttaatctatctctaa

SEQ ID NO: 15854 - DNA, 96 bp, Aspergillus novofumigatus
  misc_feature: 95
ttcttatatatcttatattcttcttctaatctacttattaaatcctaactttaatcctttcttcttttctctactctttcttctcttctctactct

SEQ ID NO: 15855 - DNA, 96 bp, Aspergillus novofumigatus
  misc_feature: 95
ttctctttcttcttattcttcttattcttcctctctttcttaccctttacttaaactctttctatcttatctatctttaccttctattcttttctt

SEQ ID NO: 15856 - DNA, 96 bp, Aspergillus novofumigatus
  misc_feature: 95
ttctctcctaaaaacttttcttctaactcttattctaactctccttcttattattccttactcttcttctaatccttcttctatctctccctctat

SEQ ID NO: 15857 - DNA, 96 bp, Aspergillus novofumigatus
  misc_feature: 95
gaagagattaggagaggttaggatagttagaaggagagtaagaaatagaataagagtaaggggtagtaagtgtagatagaagagagagatagagaa

SEQ ID NO: 15858 - DNA, 96 bp, Aspergillus novofumigatus
  misc_feature: 95
ataagagtagagatagatagatataggaaaataaggatttagaaggatttaggaagagagaggatttagaatgaagatagaaagaagagaggagaa

SEQ ID NO: 15859 - DNA, 96 bp, Aspergillus novofumigatus
  misc_feature: 95
ttctatctctccttctatctctccttctatctctccttctatctctccttctatctctccttctatctctccttctatctcttatttaacccctct

SEQ ID NO: 15860 - DNA, 96 bp, Aspergillus novofumigatus
  misc_feature: 95
ttctagtttagtattagatatattttattaatagagtttaagaagtatagtatactttaatatatattatttttagaatttcttctaaagtttagt

SEQ ID NO: 15861 - DNA, 96 bp, Aspergillus novofumigatus
  misc_feature: 95
ttctaaccctttttatctcttcttctaactcttattcttaactcctattcttattccttctctcctaaaaacttttcttctaactcttattctaac

SEQ ID NO: 15862 - DNA, 96 bp, Aspergillus novofumigatus
  misc_feature: 95
ttccctataggacctatatttattatagtaataaataaaataataatacttataattataataaagagatagactttagtaaatacctaaatagta

SEQ ID NO: 15863 - DNA, 96 bp, Aspergillus novofumigatus
  misc_feature: 95
ggtgaggataagagtaagggtaaggatttagattagaagggataagagaggagattaagaagagatagaataagagatagataagagatagaataa

SEQ ID NO: 15864 - DNA, 96 bp, Aspergillus novofumigatus
  misc_feature: 95
ttattatttaactttatccttttcttttaattttatctttccttaattttaatttcttcttctctttcttcttctctttcttcttctctttcttct

SEQ ID NO: 15865 - DNA, 96 bp, Aspergillus novofumigatus
  misc_feature: 95
gaagtttagtattattatataatattattcttatttttcttatagtaaattaattactatactatatttacctagtatatttatatctactaataa

SEQ ID NO: 15866 - DNA, 96 bp, Aspergillus novofumigatus
  misc_feature: 95
ttaggagaggttaggatagttagaaggagagtaagaaatagaataagagtaaggggtagtaagtgtagatagaagagagagatagagaaagaggta

SEQ ID NO: 15867 - DNA, 96 bp, Aspergillus novofumigatus
  misc_feature: 95
ttactatcttacttactacctcccttactgttaaccttactatctacctcactacttatcttactacctccctcactgcctccctcactacctctc

SEQ ID NO: 15868 - DNA, 96 bp, Aspergillus novofumigatus
  misc_feature: 95
agtagagggataagaggagtataagattaagtaaattatagtaaagtaaatatatataataaaggcaggtaaaactaaaaactaataccttattaa

SEQ ID NO: 15869 - DNA, 96 bp, Aspergillus novofumigatus
  misc_feature: 95
ttaagagattagatagagaagaagaggtaaaagagaatttagggatagattaagaggagagaagaaggagtaataagagtagaaagggagataatt

SEQ ID NO: 15870 - DNA, 96 bp, Aspergillus novofumigatus
  misc_feature: 95
ttaaaagtcctagaatactagtatataagaatatagaatagctgctatatattaatatagacttattaaaatattatagctatagagctataatat

SEQ ID NO: 15871 - DNA, 96 bp, Aspergillus novofumigatus
  misc_feature: 95
tataaagatttagattaaataattatagctaatagaggattataataatataatttatagatactatctcctatatataagatataaactttttaa

SEQ ID NO: 15872 - DNA, 96 bp, Aspergillus novofumigatus
  misc_feature: 95
tgtcttgcttgctgcctccctcactatctcactcactatctcactcactgccttacttactatctcactcactgtcttactcactacctccctcac

SEQ ID NO: 15873 - DNA, 96 bp, Aspergillus novofumigatus
  misc_feature: 95
tgctgcctccctcactatctcactcactatctcactcactgccttacttactatctcactcactgtcttactcactacctccctcactatcttact

SEQ ID NO: 15874 - DNA, 96 bp, Aspergillus novofumigatus
  misc_feature: 95
tagcaagacagggactgaggagggaggcagtgagataggcagtaaggcaggcagcaagcaaagcagtgagcaaggcagtgagtaaggcagtcagca

SEQ ID NO: 15875 - DNA, 96 bp, Aspergillus novofumigatus
  misc_feature: 95
tgattcagctaacatactatataaaccaaccgtataatatatatctctgcgcattatggtatactaaaatatatattcattcccaaatatatcaat

SEQ ID NO: 15876 - DNA, 96 bp, Aspergillus novofumigatus
  misc_feature: 95
agaatagaaggtaaagatagataagatagaaagagtttaagtaaagggtaagaaagagaagaagaataagaagaaagagaagaaagagaagaaaga

SEQ ID NO: 15877 - DNA, 96 bp, Aspergillus novofumigatus
  misc_feature: 95
gagattaggagaggttaggatagttagaaggagagtaagaaatagaataagagtaaggggtagtaagtgtagatagaagagagagatagagaaaga

SEQ ID NO: 15878 - DNA, 96 bp, Aspergillus novofumigatus
  misc_feature: 95
tcttcttctaactcttattcttaactcctattcttattccttctctcctaaaaacttttcttctaactcttattctaactctccttcttattattc

SEQ ID NO: 15879 - DNA, 96 bp, Aspergillus novofumigatus
  misc_feature: 95
tcttatcttgaaatttcttactctaatactatctctttttttctaatcttctctctttctaccctttctaactccctctcttctttttttaatcta

SEQ ID NO: 15880 - DNA, 96 bp, Aspergillus novofumigatus
  misc_feature: 95
tcttatatatcttatattcttcttctaatctacttattaaatcctaactttaatcctttcttcttttctctactctttcttctcttctctactctt

SEQ ID NO: 15881 - DNA, 96 bp, Aspergillus novofumigatus
  misc_feature: 95
tctctttcttcttattcttcttattcttcctctctttcttaccctttacttaaactctttctatcttatctatctttaccttctattcttttcttt

SEQ ID NO: 15882 - DNA, 96 bp, Aspergillus novofumigatus
  misc_feature: 95
aaagaaaagaatagaaggtaaagatagataagatagaaagagtttaagtaaagggtaagaaagagaagaagaataagaagaaagagaagaaagaga

SEQ ID NO: 15883 - DNA, 96 bp, Aspergillus novofumigatus
  misc_feature: 95
tctcttattctattaaaaatatacccttcttctctcttatattataattaatctactctctttttatccttattctctctatccctgattctctta

SEQ ID NO: 15884 - DNA, 96 bp, Aspergillus novofumigatus
  misc_feature: 95
tctcttattctatctcttattctatctctctcttactccctctctcctctatctcttcttaatctcctctcttatcccttctaatctaaatcctta

SEQ ID NO: 15885 - DNA, 96 bp, Aspergillus novofumigatus
  misc_feature: 95
tctcttattattatcttttattttcttttcttttctattccctttcctcttccctttcctcttccctttcttctcctatttttaattatatttatt

SEQ ID NO: 15886 - DNA, 96 bp, Aspergillus novofumigatus
  misc_feature: 95
tctcttactaaaattctaattattcttttttctatatctatctcttctttcttttcttttctttcttctttcctctttcttttctatctattatct

SEQ ID NO: 15887 - DNA, 96 bp, Aspergillus novofumigatus
  misc_feature: 95
atagagaagaagaggtaaaagagaatttagggatagattaagaggagagaagaaggagtaataagagtagaaagggagataatttaaaaagagaga

SEQ ID NO: 15888 - DNA, 96 bp, Aspergillus novofumigatus
  misc_feature: 95
agatagataagagatagaataagagtaagagtagagtaagagtaagggttagaagaagagttagaataagagttaataaaagaaggattaaggaga

SEQ ID NO: 15889 - DNA, 96 bp, Aspergillus novofumigatus
  misc_feature: 95
tctccctttttttacttcttatatatcttatattcttcttctaatctacttattaaatcctaactttaatcctttcttcttttctctactctttct

SEQ ID NO: 15890 - DNA, 96 bp, Aspergillus novofumigatus
  misc_feature: 95
aggttttaagagattagatagagaagaagaggtaaaagagaatttagggatagattaagaggagagaagaaggagtaataagagtagaaagggaga

SEQ ID NO: 15891 - DNA, 96 bp, Aspergillus novofumigatus
  misc_feature: 95
agagggtgaggataagagtaagggtaaggatttagattagaagggataagagaggagattaagaagagatagaataagagatagataagagataga

SEQ ID NO: 15892 - DNA, 96 bp, Aspergillus novofumigatus
  misc_feature: 95
gagattaaggttaatcagtagtaatatataaatgaatatatacattttaggataccataatacgcagagatatatattatacagttagtttataga

SEQ ID NO: 15893 - DNA, 96 bp, Aspergillus novofumigatus
  misc_feature: 95
tctaccttctccctttttttacttcttatatatcttatattcttcttctaatctacttattaaatcctaactttaatcctttcttctcttctctac

SEQ ID NO: 15894 - DNA, 96 bp, Aspergillus novofumigatus
  misc_feature: 95
tcctattcttattccttctctcctaaaaacttttcttctaactcttattctaactctccttcttattattccttactcttcttctaatccttcttc

SEQ ID NO: 15895 - DNA, 96 bp, Aspergillus novofumigatus
  misc_feature: 95
tccctttttttacttcttatatatcttatattcttcttctaatctacttattaaatcctaactttaatcctttcttcttttctctactctttcttc

SEQ ID NO: 15896 - DNA, 96 bp, Aspergillus novofumigatus
  misc_feature: 95
cggctaacatactatataaaccaaccgtataatatatatctctgcgcattatggtatactaaaatatatattcattcccaaatatatcaatgctga

SEQ ID NO: 15897 - DNA, 96 bp, Aspergillus novofumigatus
  misc_feature: 95
aaagtttttaggagagaaggaataagaataggagttaagaataagagttagaagaagagataaaaagggttagaagaagaattaggaataaaaata

SEQ ID NO: 15898 - DNA, 96 bp, Aspergillus novofumigatus
  misc_feature: 95
aaaccactgattcggctaacatactatataaaccaaccgtataatatatatctctgcgcattatggtatactaaaatatatattcattcccaaata

SEQ ID NO: 15899 - DNA, 96 bp, Aspergillus novofumigatus
  misc_feature: 95
tatttataaaccactgattcggctaacatactatataaaccaaccgtataatatatatctctgcgcattatggtatactaaaatatatattcattc

SEQ ID NO: 15900 - DNA, 96 bp, Aspergillus novofumigatus
  misc_feature: 95
gtcttctctatagatcttatacttactatagtaataaataaagtaataatacttataattataatatagaaatagactttagtaaatatctaaata

SEQ ID NO: 15901 - DNA, 96 bp, Aspergillus novofumigatus
  misc_feature: 95
aaagatttagattaaataattatagctaatagaggattataataatataatttatagatactatctcctatatataagatataaactttttaaata

SEQ ID NO: 15902 - DNA, 96 bp, Aspergillus novofumigatus
  misc_feature: 95
gttagattcagtattataagagtattaataagtaaattaatattatattaataaggaaaaaatattatattaataatttaatatcctaatttaata

SEQ ID NO: 15903 - DNA, 96 bp, Aspergillus novofumigatus
  misc_feature: 95
accactgattcggctaacatactatataaaccaaccgtataatatatatctctgcgcattatggtatactaaaatatatattcattcccaaatata

SEQ ID NO: 15904 - DNA, 96 bp, Aspergillus novofumigatus
  misc_feature: 95
taggacctatatttattatagtaataaataaaataataatacttataattataataaagagatagactttagtaaatacctaaatagtaggatata

SEQ ID NO: 15905 - DNA, 96 bp, Aspergillus novofumigatus
  misc_feature: 95
aatcctattctataaaagaagctagattatcctattatatatagaatattatagctctatagctataatattttaataagtctatattaatatata

SEQ ID NO: 15906 - DNA, 96 bp, Aspergillus novofumigatus
  misc_feature: 95
tatataatctcttactaaaattctaattattcttttttctatatctgactcttctttcttttcttttctttcttcttttctctttcttttctatct

SEQ ID NO: 15907 - DNA, 96 bp, Aspergillus novofumigatus
  misc_feature: 95
aaagaagctagattatcctattatatatagaatattatagctctatagctataatattttaataagtctatattaatatatagcagctattctata

SEQ ID NO: 15908 - DNA, 96 bp, Aspergillus novofumigatus
  misc_feature: 95
tatactaatagaaaggtaataaatatcttcttaagacttaatataatctatatctctatatattatctaagaaatctagaaagatattacttatat

SEQ ID NO: 15909 - DNA, 96 bp, Aspergillus novofumigatus
  misc_feature: 95
tataagatagagagagttttagtaaagagaagaaataaatataattaaaaatagaagaagaaagggaagaggaaagggaagaggaaaggaaagagg

SEQ ID NO: 15910 - DNA, 96 bp, Aspergillus novofumigatus
  misc_feature: 95
agataattatagaatcataaggctagtataagttaaatatatttatttcactttaatatacatatttttatatatatatatattaaaatctgccta

SEQ ID NO: 15911 - DNA, 96 bp, Aspergillus novofumigatus
  misc_feature: 95
gattaagtttctagtaaatattataaatcttaatatatatattagtcttatagaatagatatagaactatattctatattacttagctattatcta

SEQ ID NO: 15912 - DNA, 96 bp, Aspergillus novofumigatus
  misc_feature: 95
cttctctcctaaaaacttttcttctaactcttattctaactctccttcttattattccttactcttcttctaatccttcttctatctctccctcta

SEQ ID NO: 15913 - DNA, 96 bp, Aspergillus novofumigatus
  misc_feature: 95
tagagaagaagaggtaaaagagaatttagggatagattaagaggagagaagaaggagtaataagagtagaaagggagataatttaaaaagagagat

SEQ ID NO: 15914 - DNA, 96 bp, Aspergillus novofumigatus
  misc_feature: 95
tagaatatagttctatatctattctataagactaatatatatattaagatttataatatttactagaaacttaatctttataattattataagctt

SEQ ID NO: 15915 - DNA, 96 bp, Aspergillus novofumigatus
  misc_feature: 95
aatccttcttttatctctttccttaactcttattctaactcttcttctaacccttactcttactctactcttactcttattctatctcttattcta

SEQ ID NO: 15916 - DNA, 96 bp, Aspergillus novofumigatus
  misc_feature: 95
atctctttccttaactcttattctaactcttcttctaacccttactcttactctactcttactcttattctatctcttattctatctcttattcta

SEQ ID NO: 15917 - DNA, 96 bp, Aspergillus novofumigatus
  misc_feature: 95
tagaagggataagagaggagattaagaagagatagaataagagatagataagagatagaataagagtaagagtagagtaagagtaagggttagaag

SEQ ID NO: 15918 - DNA, 96 bp, Aspergillus novofumigatus
  misc_feature: 95
ccttatctaatctcttactaaaattctaattattcttttttctatatctatctcttctttcttttcttttctttcttctttcctctttcttttcta

SEQ ID NO: 15919 - DNA, 96 bp, Aspergillus novofumigatus
  misc_feature: 95
tactaaaattctaattattcttttttctatatctgactcttctttcttttcttttctttcttcttttctctttcttttctatctattatcttctta

SEQ ID NO: 15920 - DNA, 96 bp, Aspergillus novofumigatus
  misc_feature: 95
taccttctccctttttttacttcttatatatcttatattcttcttctaatctacttattaaatcctaactttaatcctttcttctcttctctactc

SEQ ID NO: 15921 - DNA, 96 bp, Aspergillus novofumigatus
  misc_feature: 95
tacacttactaccccttactcttattctatttcttactctccttctaactatcctaacctctcctaatctcttcttctatctcttcttctaactct

SEQ ID NO: 15922 - DNA, 96 bp, Aspergillus novofumigatus
  misc_feature: 95
taaagattaagtttctagtaaatattataaatcttaatatatatattagtcttatagaatagatatagaactatattctatattacttagctatta

SEQ ID NO: 15923 - DNA, 96 bp, Aspergillus novofumigatus
  misc_feature: 95
agataagctattagaatatctactaatttattaactacttctaaccctctatatatctatatactattattaagctttattattattaaattatta

SEQ ID NO: 15924 - DNA, 96 bp, Aspergillus novofumigatus
  misc_feature: 95
aagtagagggataagaggagtataagattaagtaaattatagtaaagtaaatatatataataaaggcaggtaaaactaaaaactaataccttatta

SEQ ID NO: 15925 - DNA, 96 bp, Aspergillus novofumigatus
  misc_feature: 95
atctcttcttctaactcttattcttaactcctattcttattccttctctcctaaaaacttttcttctaactcttattctaactctccttcttatta

SEQ ID NO: 15926 - DNA, 96 bp, Aspergillus novofumigatus
  misc_feature: 95
taaggttagattcagtattataagagtattaataagtaaattaatattatattaataaggaaaaaatattatattaataatttaatatcctaattt

SEQ ID NO: 15927 - DNA, 96 bp, Aspergillus novofumigatus
  misc_feature: 95
cttgctgcctccctcactatctcactcactatctcactcactgccttacttactatctcactcactgtcttactcactacctccctcactatctta

SEQ ID NO: 15928 - DNA, 96 bp, Aspergillus novofumigatus
  misc_feature: 95
taagagattagatagagaagaagaggtaaaagagaatttagggatagattaagaggagagaagaaggagtaataagagtagaaagggagataattt

SEQ ID NO: 15929 - DNA, 96 bp, Aspergillus novofumigatus
  misc_feature: 95
taactctttccttcttcccttctattcttaactctctctttctctttcttctcctttctatccctaactcttattctaacccttcttctatctctt

SEQ ID NO: 15930 - DNA, 96 bp, Aspergillus novofumigatus
  misc_feature: 95
agattagaagggataagagaggagattaagaagagatagaataagagatagataagagatagaataagagtaagagtagagtaagagtaagggtta

SEQ ID NO: 15931 - DNA, 96 bp, Aspergillus novofumigatus
  misc_feature: 95
taaccatagttaggagagaggtaggtagcaaggtagacagtaaggtagatagtaaggtagatagtgagataggcagtgaggtaggcagtaaggcag

SEQ ID NO: 15932 - DNA, 96 bp, Aspergillus novofumigatus
  misc_feature: 95
aagagattagatagagaagaagaggtaaaagagaatttagggatagattaagaggagagaagaaggagtaataagagtagaaagggagataattta

SEQ ID NO: 15933 - DNA, 96 bp, Aspergillus novofumigatus
  misc_feature: 95
taaatccctcactcttaaactcttacttatattaatctctatctataattctttctctttcttctctttctctctttctttcttatctctctaact

SEQ ID NO: 15934 - DNA, 96 bp, Aspergillus novofumigatus
  misc_feature: 95
taaaccactgattcagctaacatactatataaaccaaccgtataatatatatctctgcgcattatggtatactaaaatatatattcattcccaaat

SEQ ID NO: 15935 - DNA, 96 bp, Aspergillus novofumigatus
  misc_feature: 95
gtttctagtaaatattataaatcttaatatatatattagtcttatagaatagatatagaactatattctatattacttagctattatctagctatt

SEQ ID NO: 15936 - DNA, 96 bp, Aspergillus novofumigatus
  misc_feature: 95
gtgattaattatagaagataagagaatcagggatagagagaataaggataaaaagagagtagattaattataatataagagagaagaagggtatat

SEQ ID NO: 15937 - DNA, 96 bp, Aspergillus novofumigatus
  misc_feature: 95
actagagtcttccctataggacctatatttattatagtaataaataaaataataatacttataattataataaagagatagactttagtaaatacc

SEQ ID NO: 15938 - DNA, 96 bp, Aspergillus novofumigatus
  misc_feature: 95
ctctttaaacctattaacctcttactaaatccctaatcctaacttattcctaatcctaataaattcctaatcctataaattatctcttattctacc

SEQ ID NO: 15939 - DNA, 96 bp, Aspergillus novofumigatus
  misc_feature: 95
gggtttagtttaggggagagttagggagagatagaaggggagatagagggagagatagaagaaggattagaagaagagtaaggaataataagaagg

SEQ ID NO: 15940 - DNA, 96 bp, Aspergillus novofumigatus
  misc_feature: 95
cggggtccggcgcggacgggttggtggagggtgggccggtgaccagttggcggggggcccttgggggggcagaccggcaggcaggggcgcgcgccc

SEQ ID NO: 15941 - DNA, 96 bp, Aspergillus novofumigatus
  misc_feature: 95
gggaagtttagtattattatataatattattcttatttttcttatagtaaattaattactatactatatttacctagtatatttatatctactaat

SEQ ID NO: 15942 - DNA, 96 bp, Aspergillus novofumigatus
  misc_feature: 95
ggctaacatactatataaaccaaccgtataatatatatctctgcgcattatggtatactaaaatatatattcattcccaaatatatcaatgctgat

SEQ ID NO: 15943 - DNA, 96 bp, Aspergillus novofumigatus
  misc_feature: 95
aatttcttactctaatactatctctttttttctaatcttctctctttctaccctttctaactccctctcttctttttttaatctatctctaaatcc

SEQ ID NO: 15944 - DNA, 96 bp, Aspergillus novofumigatus
  misc_feature: 95
ggagggaggcagtgagataggcagtaaggcaggcagcaagcaaagcagtgagcaaggcagtgagtaaggcagtcagcaagatagtgagtgagatag

SEQ ID NO: 15945 - DNA, 96 bp, Aspergillus novofumigatus
  misc_feature: 95
ggactgaggagggaggcagtgagataggcagtaaggcaggcagcaagcaaagcagtgagcaaggcagtgagtaaggcagtcagcaagatagtgagt

SEQ ID NO: 15946 - DNA, 96 bp, Aspergillus novofumigatus
  misc_feature: 95
actctatcttactatttagatatttactaaagtctatttctatattataattataagtattattactttatttattactatagtaagtataagatc

SEQ ID NO: 15947 - DNA, 96 bp, Aspergillus novofumigatus
  misc_feature: 95
gatcctattcctgatcctattcctgatcctattcctgatcctattcctgatcctattcctgatcctattcctgatcctattcctgatcctattcct

SEQ ID NO: 15948 - DNA, 96 bp, Aspergillus novofumigatus
  misc_feature: 95
cactgattcggctaacatactatataaaccaaccgtataatatatatctctgcgcattatggtatactaaaatatatattcattcccaaatatatc

SEQ ID NO: 15949 - DNA, 96 bp, Aspergillus novofumigatus
  misc_feature: 95
gatagataagagatagaataagagtaagagtagagtaagagtaagggttagaagaagagttagaataagagttaataaaagaaggattaaggagag

SEQ ID NO: 15950 - DNA, 96 bp, Aspergillus novofumigatus
  misc_feature: 95
gataattatagaatcataaggctagtataagttaaatatatttatttcactttaatatacatatttttatatatatatatattaaaatctgcctag

SEQ ID NO: 15951 - DNA, 96 bp, Aspergillus novofumigatus
  misc_feature: 95
aatatagttctatatctattctataagactaatatatatattaagatttataatatttactagaaacttaatctttataattattataagcttatc

SEQ ID NO: 15952 - DNA, 96 bp, Aspergillus novofumigatus
  misc_feature: 95
ctacacttactaccccttactcttattctatttcttactctccttctaactatcctaacctctcctaatctcttcttctatctcttcttctaactc

SEQ ID NO: 15953 - DNA, 96 bp, Aspergillus novofumigatus
  misc_feature: 95
gaagctagattatcctattatatatagaatattatagctctatagctataatattttaataagtctatattaatatatagcagctattctatattc

SEQ ID NO: 15954 - DNA, 96 bp, Aspergillus novofumigatus
  misc_feature: 95
attattatttaactttatccttttcttttaattttatctttccttaattttaatttcttcttctctttcttcttctctttcttcttctctttcttc

SEQ ID NO: 15955 - DNA, 96 bp, Aspergillus novofumigatus
  misc_feature: 95
gaaatttcttactctaatactatctctttttttctaatcttctctctttctaccctttctaactccctctcttctttttttaatctatctctaaat

SEQ ID NO: 15956 - DNA, 96 bp, Aspergillus novofumigatus
  misc_feature: 95
agtaagaaagaggtaaggagagatagaataagaattagaaggaggattagaggaagagatagaagaagggttagaataagagttagggatagaaag

SEQ ID NO: 15957 - DNA, 96 bp, Aspergillus novofumigatus
  misc_feature: 95
agatagagagagttttagtaaagagaagaaataaatataattaaaaatagaagaagaaagggaagaggaaagggaagaggaaaggaaagaggaaag

SEQ ID NO: 15958 - DNA, 96 bp, Aspergillus novofumigatus
  misc_feature: 95
cttgcttgctgcctccctcactatctcactcactatctcactcactgccttacttactatctcactcactgtcttactcactacctccctcactat

SEQ ID NO: 15959 - DNA, 96 bp, Aspergillus novofumigatus
  misc_feature: 95
cttatatatcttatattcttcttctaatctacttattaaatcctaactttaatcctttcttcttttctctactctttcttctcttctctactcttt

SEQ ID NO: 15960 - DNA, 96 bp, Aspergillus novofumigatus
  misc_feature: 95
cttactatcttacttactacctcccttactgttaaccttactatctacctcactacttatcttactacctccctcactgcctccctcactacctct

SEQ ID NO: 15961 - DNA, 96 bp, Aspergillus novofumigatus
  misc_feature: 95
cttactaaaattctaattattcttttttctatatctatctcttctttcttttcttttctttcttctttcctctttcttttctatctattatcttct

SEQ ID NO: 15962 - DNA, 96 bp, Aspergillus novofumigatus
  misc_feature: 95
ctcttattattatcttttattttcttttcttttctattccctttcctcttccctttcctcttccctttcttctcctatttttaattatatttattt

SEQ ID NO: 15963 - DNA, 96 bp, Aspergillus novofumigatus
  misc_feature: 95
ctcttactaaaattctaattattcttttttctatatctatctcttctttcttttcttttctttcttctttcctctttcttttctatctattatctt

SEQ ID NO: 15964 - DNA, 96 bp, Aspergillus novofumigatus
  misc_feature: 95
ctctatcttactatttagatatttactaaagtctatttctatattataattataagtattattactttatttattactatagtaagtataagatct

SEQ ID NO: 15965 - DNA, 96 bp, Aspergillus novofumigatus
  misc_feature: 95
aggacctatatttattatagtaataaataaaataataatacttataattataataaagagatagactttagtaaatacctaaatagtaggatatag

SEQ ID NO: 15966 - DNA, 96 bp, Aspergillus novofumigatus
  misc_feature: 95
atcctattctataaaagaagctagattatcctattatatatagaatattatagctctatagctataatattttaataagtctatattaatatatag

SEQ ID NO: 15967 - DNA, 96 bp, Aspergillus novofumigatus
  misc_feature: 95
ccttcttttatctctttccttaactcttattctaactcttcttctaacccttactcttactctactcttactcttattctatctcttattctatct

SEQ ID NO: 15968 - DNA, 96 bp, Aspergillus novofumigatus
  misc_feature: 95
ccttctctcctaaaaacttttcttctaactcttattctaactctccttcttattattccttactcttcttctaatccttcttctatctctccctct

SEQ ID NO: 15969 - DNA, 96 bp, Aspergillus novofumigatus
  misc_feature: 95
atagataagagatagaataagagtaagagtagagtaagagtaagggttagaagaagagttagaataagagttaataaaagaaggattaaggagagg

SEQ ID NO: 15970 - DNA, 96 bp, Aspergillus novofumigatus
  misc_feature: 95
aagaggttttaagagattagatagagaagaagaggtaaaagagaatttagggatagattaagaggagagaagaaggagtaataagagtagaaaggg

SEQ ID NO: 15971 - DNA, 96 bp, Aspergillus novofumigatus
  misc_feature: 95
atagagagagttttagtaaagagaagaaataaatataattaaaaatagaagaagaaagggaagaggaaagggaagaggaaaggaaagaggaaaggg

SEQ ID NO: 15972 - DNA, 96 bp, Aspergillus novofumigatus
  misc_feature: 95
atgcaaaagcatgaggtttaggtggactacttaaacataatccgaggataaggattttagcggcttgtagtattttagccgcttgttgcatttttg

SEQ ID NO: 15973 - DNA, 96 bp, Aspergillus novofumigatus
  misc_feature: 95
aaaagtttttaggagagaaggaataagaataggagttaagaataagagttagaagaagagataaaaagggttagaagaagaattaggaataaaaat

SEQ ID NO: 15974 - DNA, 96 bp, Aspergillus novofumigatus
  misc_feature: 95
atttacctcttttttcttctccctttttatctcttctctctatttctctcttaattcttactctatctcttactttacctctttctctatctctct

SEQ ID NO: 15975 - DNA, 96 bp, Aspergillus novofumigatus
  misc_feature: 95
attatagaatcataaggctagtataagttaaatatatttatttcactttaatatacatatttttatatatatatatattaaaatctgcctagatct

SEQ ID NO: 15976 - DNA, 96 bp, Aspergillus novofumigatus
  misc_feature: 95
attaggagaggttaggatagttagaaggagagtaagaaatagaataagagtaaggggtagtaagtgtagatagaagagagagatagagaaagaggt

SEQ ID NO: 15977 - DNA, 96 bp, Aspergillus novofumigatus
  misc_feature: 95
atcttatattcttcttctaatctacttattaaatcctaactttaatcctttcttcttttctctactctttcttctcttctctactctttcttcttt

SEQ ID NO: 15978 - DNA, 96 bp, Aspergillus novofumigatus
  misc_feature: 95
atctcttattctatctcttattctatctctctcttactccctctctcctctatctcttcttaatctcctctcttatcccttctaatctaaatcctt

SEQ ID NO: 15979 - DNA, 96 bp, Aspergillus novofumigatus
  misc_feature: 95
aagatttagattaaataattatagctaatagaggattataataatataatttatagatactatctcctatatataagatataaactttttaaatat

SEQ ID NO: 15980 - DNA, 96 bp, Aspergillus novofumigatus
  misc_feature: 95
aaaattctaattattcttttttctatatctgactcttctttcttttcttttctttcttcttttctctttcttttctatctattatcttcttactat

SEQ ID NO: 15981 - DNA, 96 bp, Aspergillus novofumigatus
  misc_feature: 95
atagaatatagttctatatctattctataagactaatatatatattaagatttataatatttactagaaacttaatctttataattattataagct

SEQ ID NO: 15982 - DNA, 96 bp, Aspergillus novofumigatus
  misc_feature: 95
aaaagaagctagattatcctattatatatagaatattatagctctatagctataatattttaataagtctatattaatatatagcagctattctat

SEQ ID NO: 15983 - DNA, 96 bp, Aspergillus novofumigatus
  misc_feature: 95
ataattctaacccttaccttaatatattaataatttctattttattcctaacccttattctctctcttattattatcttttattttcttttctttt

SEQ ID NO: 15984 - DNA, 96 bp, Aspergillus novofumigatus
  misc_feature: 95
agattaagtttctagtaaatattataaatcttaatatatatattagtcttatagaatagatatagaactatattctatattacttagctattatct

SEQ ID NO: 15985 - DNA, 96 bp, Aspergillus novofumigatus
  misc_feature: 95
agacactagcttatagttatataataatatactaattaatatagcaagcttatattatataatcttagctataatttatatacccccttttatatt

SEQ ID NO: 15986 - DNA, 96 bp, Aspergillus novofumigatus
  misc_feature: 95
agaagctagattatcctattatatatagaatattatagctctatagctataatattttaataagtctatattaatatatagcagctattctatatt

SEQ ID NO: 15987 - DNA, 96 bp, Aspergillus novofumigatus
  misc_feature: 95
aacataatccgaggataaggattttagcggcttgtagtattttagccgcttgttgcattttagccgcttgtagtattttagcggctttttgcaatt

SEQ ID NO: 15988 - DNA, 96 bp, Aspergillus novofumigatus
  misc_feature: 95
aattattatttaactttatccttttcttttaattttatctttccttaattttaatttcttcttctctttcttcttctctttcttcttctctttctt

SEQ ID NO: 15989 - DNA, 96 bp, Aspergillus novofumigatus
  misc_feature: 94
ttttattttcttttcttttctattccctttcctcttccctttcctcttccctttcttctcctatttttaattatatttatttcttctctttactaa

SEQ ID NO: 15990 - DNA, 96 bp, Aspergillus novofumigatus
  misc_feature: 94
aaagaatagaaggtaaagatagataagatagaaagagtttaagtaaagggtaagaaagagaagaagaataagaagaaagagaagaaagagaagaaa

SEQ ID NO: 15991 - DNA, 96 bp, Aspergillus novofumigatus
  misc_feature: 94
aagagattaggagaggttaggatagttagaaggagagtaagaaatagaataagagtaaggggtagtaagtgtagatagaagagagagatagagaaa

SEQ ID NO: 15992 - DNA, 96 bp, Aspergillus novofumigatus
  misc_feature: 94
tttctagtttagtattagatatattttattaatagagtttaagaagtatagtatactttaatatatattatttttagaatttcttctaaagtttag

SEQ ID NO: 15993 - DNA, 96 bp, Aspergillus novofumigatus
  misc_feature: 94
tagtcttctctatagatcttatacttactatagtaataaataaagtaataatacttataattataatatagaaatagactttagtaaatatctaaa

SEQ ID NO: 15994 - DNA, 96 bp, Aspergillus novofumigatus
  misc_feature: 94
tttacctcttttttcttctccctttttatctcttctctctatttctctcttaattcttactctatctcttactttacctctttctctatctctctc

SEQ ID NO: 15995 - DNA, 96 bp, Aspergillus novofumigatus
  misc_feature: 94
tttaagagattagatagagaagaagaggtaaaagagaatttagggatagattaagaggagagaagaaggagtaataagagtagaaagggagataat

SEQ ID NO: 15996 - DNA, 96 bp, Aspergillus novofumigatus
  misc_feature: 94
taaatataattaaaaatagaagaagaaagggaagaggaaagggaagaggaaaggaaagaggaaagggaagaggaaagggaatagaaaagaaaagaa

SEQ ID NO: 15997 - DNA, 96 bp, Aspergillus novofumigatus
  misc_feature: 94
ttcttcttctaatctacttattaaatcctaactttaatcctttcttcttttctctactctttcttctcttctctactctttcttctttcctttttt

SEQ ID NO: 15998 - DNA, 96 bp, Aspergillus novofumigatus
  misc_feature: 94
gaaggtaaagatagataagatagaaagagtttaagtaaagggtaagaaagagaagaagaataagaagaaagagaagaaagagaagaaagagaagaa

SEQ ID NO: 15999 - DNA, 96 bp, Aspergillus novofumigatus
  misc_feature: 94
ttcttctaatctacttattaaatcctaactttaatcctttcttcttttctctactctttcttctcttctctactctttcttctttccttttttaat

SEQ ID NO: 16000 - DNA, 96 bp, Aspergillus novofumigatus
  misc_feature: 94
gtaaatattataaatcttaatatatatattagtcttatagaatagatatagaactatattctatattacttagctattatctagctattataagaa

SEQ ID NO: 16001 - DNA, 96 bp, Aspergillus novofumigatus
  misc_feature: 94
ttattccttctctcctaaaaacttttcttctaactcttattctaactctccttcttattattccttactcttcttctaatccttcttctatctctc

SEQ ID NO: 16002 - DNA, 96 bp, Aspergillus novofumigatus
  misc_feature: 94
ttatagaagataagagaatcagggatagagagaataaggataaaaagagagtagattaattataatataagagagaagaagggtatatttttaata

SEQ ID NO: 16003 - DNA, 96 bp, Aspergillus novofumigatus
  misc_feature: 94
atatatatattagtcttatagaatagatatagaactatattctatattacttagctattatctagctattataagaatagaaaatatagctactaa

SEQ ID NO: 16004 - DNA, 96 bp, Aspergillus novofumigatus
  misc_feature: 94
tctcttactttacctctttctctatctctctcttctatctacacttactaccccttactcttattctatttcttactctccttctaactatcctaa

SEQ ID NO: 16005 - DNA, 96 bp, Aspergillus novofumigatus
  misc_feature: 94
ttactaaaattctaattattcttttttctatatctgactcttctttcttttcttttctttcttcttttctctttcttttctatctattatcttctt

SEQ ID NO: 16006 - DNA, 96 bp, Aspergillus novofumigatus
  misc_feature: 94
ttactaaaattctaattattcttttttctatatctatctcttctttcttttcttttctttcttctttcctctttcttttctatctattatcttctt

SEQ ID NO: 16007 - DNA, 96 bp, Aspergillus novofumigatus
  misc_feature: 94
ttaactcctattcttattccttctctcctaaaaacttttcttctaactcttattctaactctccttcttattattccttactcttcttctaatcct

SEQ ID NO: 16008 - DNA, 96 bp, Aspergillus novofumigatus
  misc_feature: 94
ttaaattattaatataatattttttccttattaatacaatattaatttacttattaatactcttataatactgaatctaaccttagttagatttta

SEQ ID NO: 16009 - DNA, 96 bp, Aspergillus novofumigatus
  misc_feature: 94
agagattagatagagaagaagaggtaaaagagaatttagggatagattaagaggagagaagaaggagtaataagagtagaaagggagataatttaa

SEQ ID NO: 16010 - DNA, 96 bp, Aspergillus novofumigatus
  misc_feature: 94
ttaaaattaaggaaagataaaattaaaagaaaaggataaagttaaataataatttaatagaatgaattaggaatgtagtaaggattaatagaaata

SEQ ID NO: 16011 - DNA, 96 bp, Aspergillus novofumigatus
  misc_feature: 94
cctattctataaaagaagctagattatcctattatatatagaatattatagctctatagctataatattttaataagtctatattaatatatagca

SEQ ID NO: 16012 - DNA, 96 bp, Aspergillus novofumigatus
  misc_feature: 94
ataaatataattaaaaatagaagaagaaagggaagaggaaagggaagaggaaaggaaagaggaaagggaagaggaaagggaatagaaaagaaaaga

SEQ ID NO: 16013 - DNA, 96 bp, Aspergillus novofumigatus
  misc_feature: 94
tcttgcttgctgcctccctcactatctcactcactatctcactcactgccttacttactatctcactcactgtcttactcactacctccctcacta

SEQ ID NO: 16014 - DNA, 96 bp, Aspergillus novofumigatus
  misc_feature: 94
gaaaagaatagaaggtaaagatagataagatagaaagagtttaagtaaagggtaagaaagagaagaagaataagaagaaagagaagaaagagaaga

SEQ ID NO: 16015 - DNA, 96 bp, Aspergillus novofumigatus
  misc_feature: 94
tcttctctatagatcttatacttactatagtaataaataaagtaataatacttataattataatatagaaatagactttagtaaatatctaaatag

SEQ ID NO: 16016 - DNA, 96 bp, Aspergillus novofumigatus
  misc_feature: 94
tcttctaatctacttattaaatcctaactttaatcctttcttcttttctctactctttcttctcttctctactctttcttctttccttttttaatc

SEQ ID NO: 16017 - DNA, 96 bp, Aspergillus novofumigatus
  misc_feature: 94
tcttattattatcttttattttcttttcttttctattccctttcctcttccctttcctcttccctttcttctcctatttttaattatatttatttc

SEQ ID NO: 16018 - DNA, 96 bp, Aspergillus novofumigatus
  misc_feature: 94
tcttatattcttcttctaatctacttattaaatcctaactttaatcctttcttcttttctctactctttcttctcttctctactctttcttctttc

SEQ ID NO: 16019 - DNA, 96 bp, Aspergillus novofumigatus
  misc_feature: 94
tctatctcttattctatctcttattctatctcttattctatctctctcttactccctctctcctctatctcttcttaatctcctctcttatccctt

SEQ ID NO: 16020 - DNA, 96 bp, Aspergillus novofumigatus
  misc_feature: 94
gatttagattagaagggataagagaggagattaagaagagatagaggagagagggagtaagagagagatagaataagagatagaataagagataga

SEQ ID NO: 16021 - DNA, 96 bp, Aspergillus novofumigatus
  misc_feature: 94
tagaggggttaaataagagatagaaggagagatagaaggagagatagaaggagagatagaaggagagatagaaggagagatagaaggagagataga

SEQ ID NO: 16022 - DNA, 96 bp, Aspergillus novofumigatus
  misc_feature: 94
agaagggtatatttttaatagaataagagagaagattaaaaaaggaaagaagaaagagtagagaagagaagaaagagtagagaaaagaagaaagga

SEQ ID NO: 16023 - DNA, 96 bp, Aspergillus novofumigatus
  misc_feature: 94
tccttcttttatctctttccttaactcttattctaactcttcttctaacccttactcttactctactcttactcttattctatctcttattctatc

SEQ ID NO: 16024 - DNA, 96 bp, Aspergillus novofumigatus
  misc_feature: 94
tcctattctataaaagaagctagattatcctattatatatagaatattatagctctatagctataatattttaataagtctatattaatatatagc

SEQ ID NO: 16025 - DNA, 96 bp, Aspergillus novofumigatus
  misc_feature: 94
aaaccactgattcagctaacatactatataaaccaaccgtataatatatatctctgcgcattatggtatactaaaatatatattcattcccaaata

SEQ ID NO: 16026 - DNA, 96 bp, Aspergillus novofumigatus
  misc_feature: 94
tattcctgatcctattcctgatcctattcctgatcctattcctgatcctattcctgatcctattcctgatcctattcctgatcctattcctgatcc

SEQ ID NO: 16027 - DNA, 96 bp, Aspergillus novofumigatus
  misc_feature: 94
tatctcttattctatctcttattctatctctctcttactccctctctcctctatctcttcttaatctcctctcttatcccttctaatctaaatcct

SEQ ID NO: 16028 - DNA, 96 bp, Aspergillus novofumigatus
  misc_feature: 94
gatagaggggttaaataagagatagaaggagagatagaaggagagatagaaggagagatagaaggagagatagaaggagagatagaaggagagata

SEQ ID NO: 16029 - DNA, 96 bp, Aspergillus novofumigatus
  misc_feature: 94
gttttaagagattagatagagaagaagaggtaaaagagaatttagggatagattaagaggagagaagaaggagtaataagagtagaaagggagata

SEQ ID NO: 16030 - DNA, 96 bp, Aspergillus novofumigatus
  misc_feature: 94
tataggacctatatttattatagtaataaataaaataataatacttataattataataaagagatagactttagtaaatacctaaatagtaggata

SEQ ID NO: 16031 - DNA, 96 bp, Aspergillus novofumigatus
  misc_feature: 94
agatttagattaaataattatagctaatagaggattataataatataatttatagatactatctcctatatataagatataaactttttaaatata

SEQ ID NO: 16032 - DNA, 96 bp, Aspergillus novofumigatus
  misc_feature: 94
tatagaatatagttctatatctattctataagactaatatatatattaagatttataatatttactagaaacttaatctttataattattataagc

SEQ ID NO: 16033 - DNA, 96 bp, Aspergillus novofumigatus
  misc_feature: 94
tataaagattaagtttctagtaaatattataaatcttaatatatatattagtcttatagaatagatatagaactatattctatattacttagctat

SEQ ID NO: 16034 - DNA, 96 bp, Aspergillus novofumigatus
  misc_feature: 94
tataaactaactgtataatatatatctctgcgtattatggtatcctaaaatgtatatattcatttatatattactactgattaaccttaatctcct

SEQ ID NO: 16035 - DNA, 96 bp, Aspergillus novofumigatus
  misc_feature: 94
cttctcttctctactctttcttctttccttttttaatcttctctcttattctattaaaaatatacccttcttctctcttatattataattaatcta

SEQ ID NO: 16036 - DNA, 96 bp, Aspergillus novofumigatus
  misc_feature: 94
tagattaaataattatagctaatagaggattataataatataatttatagatactatctcctatatataagatataaactttttaaatatagtagt

SEQ ID NO: 16037 - DNA, 96 bp, Aspergillus novofumigatus
  misc_feature: 94
cttgaaatttcttactctaatactatctctttttttctaatcttctctctttctaccctttctaactccctctcttctttttttaatctatctcta

SEQ ID NO: 16038 - DNA, 96 bp, Aspergillus novofumigatus
  misc_feature: 94
tagagaagatagtaatttaaaagataataataagaattactttatatatatatatttatatgtaagtatataagaaggataatttatatagattag

SEQ ID NO: 16039 - DNA, 96 bp, Aspergillus novofumigatus
  misc_feature: 94
tactctttaaacctattaacctcttactaaatccctaatcctaacttattcctaatcctaataaattcctaatcctataaattatctcttattcta

SEQ ID NO: 16040 - DNA, 96 bp, Aspergillus novofumigatus
  misc_feature: 94
ccttatataatctcttactaaaattctaattattcttttttctatatctgactcttctttcttttcttttctttcttcttttctctttcttttcta

SEQ ID NO: 16041 - DNA, 96 bp, Aspergillus novofumigatus
  misc_feature: 94
ataggctgcccctataatatatactatcttatatatatagctatataatcacctaattagttatataattataactagttattatattaattagta

SEQ ID NO: 16042 - DNA, 96 bp, Aspergillus novofumigatus
  misc_feature: 94
tacctcttcttaatccttcttttatctctttccttaactcttattctaactcttcttctaacccttactcttactctactcttactcttattctat

SEQ ID NO: 16043 - DNA, 96 bp, Aspergillus novofumigatus
  misc_feature: 94
atagagaagatagtaatttaaaagataataataagaattactttatatatatatatttatatgtaagtatataagaaggataatttatatagatta

SEQ ID NO: 16044 - DNA, 96 bp, Aspergillus novofumigatus
  misc_feature: 94
agggtatatttttaatagaataagagagaagattaaaaaaggaaagaagaaagagtagagaagagaagaaagagtagagaaaagaagaaaggatta

SEQ ID NO: 16045 - DNA, 96 bp, Aspergillus novofumigatus
  misc_feature: 94
ataaaagtaagggttattaagtttagataggaggaagggatagagggagggataaagggagggatagaggaagggatagaataaaagtaaggatta

SEQ ID NO: 16046 - DNA, 96 bp, Aspergillus novofumigatus
  misc_feature: 94
taatattactacctctcttactacttaccttactattaaccttactatctactatgatatttatattactatctaccttattacctaccttactat

SEQ ID NO: 16047 - DNA, 96 bp, Aspergillus novofumigatus
  misc_feature: 94
taataattctaacccttaccttaatatattaataatttctattttattcctaacccttattctctctcttattattatcttttattttcttttctt

SEQ ID NO: 16048 - DNA, 96 bp, Aspergillus novofumigatus
  misc_feature: 94
taagagtagagtaagagtaagggttagaagaagagttagaataagagttaaggaaagagataaaagaaggattaagaagaggtagaagaagagtta

SEQ ID NO: 16049 - DNA, 96 bp, Aspergillus novofumigatus
  misc_feature: 94
cttaatctaataaatataaatatatatatctattatctagactaaatcttttctagtaactaaatctaattattatctagcttactagatctctta

SEQ ID NO: 16050 - DNA, 96 bp, Aspergillus novofumigatus
  misc_feature: 94
agcttatagttatataataatatactaattaatatagcaagcttatattatataatcttagctataatttatatacccccttttatattcagccac

SEQ ID NO: 16051 - DNA, 96 bp, Aspergillus novofumigatus
  misc_feature: 94
ctcccttactatcttacttactacctcccttactgttaaccttactatctacctcactacttatcttactacctccctcactgcctccctcactac

SEQ ID NO: 16052 - DNA, 96 bp, Aspergillus novofumigatus
  misc_feature: 94
actctttaaacctattaacctcttactaaatccctaatcctaacttattcctaatcctaataaattcctaatcctataaattatctcttattctac

SEQ ID NO: 16053 - DNA, 96 bp, Aspergillus novofumigatus
  misc_feature: 94
gtaaagatagataagatagaaagagtttaagtaaagggtaagaaagagaagaagaataagaagaaagagaagaaagagaagaaagagaagaaagag

SEQ ID NO: 16054 - DNA, 96 bp, Aspergillus novofumigatus
  misc_feature: 94
attccttctctcctaaaaacttttcttctaactcttattctaactctccttcttattattccttactcttcttctaatccttcttctatctctccc

SEQ ID NO: 16055 - DNA, 96 bp, Aspergillus novofumigatus
  misc_feature: 94
ggagattaaggttaatcagtagtaatatataaatgaatatatacattttaggataccataatacgcagagatatatattatacagttagtttatag

SEQ ID NO: 16056 - DNA, 96 bp, Aspergillus novofumigatus
  misc_feature: 94
cacttactaccccttactcttattctatttcttactctccttctaactatcctaacctctcctaatctcttcttctatctcttcttctaactctcc

SEQ ID NO: 16057 - DNA, 96 bp, Aspergillus novofumigatus
  misc_feature: 94
cttatattcttcttctaatctacttattaaatcctaactttaatcctttcttcttttctctactctttcttctcttctctactctttcttctttcc

SEQ ID NO: 16058 - DNA, 96 bp, Aspergillus novofumigatus
  misc_feature: 94
aaatttcttactctaatactatctctttttttctaatcttctctctttctaccctttctaactccctctcttctttttttaatctatctctaaatc

SEQ ID NO: 16059 - DNA, 96 bp, Aspergillus novofumigatus
  misc_feature: 94
gattagaagggataagagaggagattaagaagagatagaataagagatagataagagatagaataagagtaagagtagagtaagagtaagggttag

SEQ ID NO: 16060 - DNA, 96 bp, Aspergillus novofumigatus
  misc_feature: 94
gattaaggttaatcagtagtaatatataaatgaatatatacattttaggataccataatacgcagagatatatattatacagttagtttatagagt

SEQ ID NO: 16061 - DNA, 96 bp, Aspergillus novofumigatus
  misc_feature: 94
aattatagaatcataaggctagtataagttaaatatatttatttcactttaatatacatatttttatatatatatatattaaaatctgcctagatc

SEQ ID NO: 16062 - DNA, 96 bp, Aspergillus novofumigatus
  misc_feature: 94
gatagagagagttttagtaaagagaagaaataaatataattaaaaatagaagaagaaagggaagaggaaagggaagaggaaaggaaagaggaaagg

SEQ ID NO: 16063 - DNA, 96 bp, Aspergillus novofumigatus
  misc_feature: 94
gatagagaagaagaggtaaaagagaatttagggatagattaagaggagagaagaaggagtaataagagtagaaagggagataatttaaaaagagag

SEQ ID NO: 16064 - DNA, 96 bp, Aspergillus novofumigatus
  misc_feature: 94
gataagctattagaatatctactaatttattaactacttctaaccctctatatatctatatactattattaagctttattattattaaattattag

SEQ ID NO: 16065 - DNA, 96 bp, Aspergillus novofumigatus
  misc_feature: 94
gaggttttaagagattagatagagaagaagaggtaaaagagaatttagggatagattaagaggagagaagaaggagtaataagagtagaaagggag

SEQ ID NO: 16066 - DNA, 96 bp, Aspergillus novofumigatus
  misc_feature: 94
ccccttactcttattctatttcttactctccttctaactatcctaacctctcctaatctcttcttctatctcttcttctaactctccttctacctc

SEQ ID NO: 16067 - DNA, 96 bp, Aspergillus novofumigatus
  misc_feature: 94
gagggaggcagtgagataggcagtaaggcaggcagcaagcaaagcagtgagcaaggcagtgagtaaggcagtcagcaagatagtgagtgagatagt

SEQ ID NO: 16068 - DNA, 96 bp, Aspergillus novofumigatus
  misc_feature: 94
gacttatactaatagaaaggtaataaatatcttcttaagacttaatataatctatatctctatatattatctaagaaatctagaaagatattactt

SEQ ID NO: 16069 - DNA, 96 bp, Aspergillus novofumigatus
  misc_feature: 94
gacactagcttatagttatataataatatactaattaatatagcaagcttatattatataatcttagctataatttatatacccccttttatattc

SEQ ID NO: 16070 - DNA, 96 bp, Aspergillus novofumigatus
  misc_feature: 94
gaagggtatatttttaatagaataagagagaagattaaaaaaggaaagaagaaagagtagagaagagaagaaagagtagagaaaagaagaaaggat

SEQ ID NO: 16071 - DNA, 96 bp, Aspergillus novofumigatus
  misc_feature: 94
cttttctattccctttcctcttccctttcctcttccctttcttctcctatttttaattatatttatttcttctctttactaaaactctctctatct

SEQ ID NO: 16072 - DNA, 96 bp, Aspergillus novofumigatus
  misc_feature: 94
aagaatagaaggtaaagatagataagatagaaagagtttaagtaaagggtaagaaagagaagaagaataagaagaaagagaagaaagagaagaaag

SEQ ID NO: 16073 - DNA, 96 bp, Aspergillus novofumigatus
  misc_feature: 94
agaaaagaatagaaggtaaagatagataagatagaaagagtttaagtaaagggtaagaaagagaagaagaataagaagaaagagaagaaagagaag

SEQ ID NO: 16074 - DNA, 96 bp, Aspergillus novofumigatus
  misc_feature: 94
cttattattatcttttattttcttttcttttctattccctttcctcttccctttcctcttccctttcttctcctatttttaattatatttatttct

SEQ ID NO: 16075 - DNA, 96 bp, Aspergillus novofumigatus
  misc_feature: 94
atatagaatatagttctatatctattctataagactaatatatatattaagatttataatatttactagaaacttaatctttataattattataag

SEQ ID NO: 16076 - DNA, 96 bp, Aspergillus novofumigatus
  misc_feature: 94
cttactaccccttactcttattctatttcttactctccttctaactatcctaacctctcctaatctcttcttctatctcttcttctaactctcctt

SEQ ID NO: 16077 - DNA, 96 bp, Aspergillus novofumigatus
  misc_feature: 94
ctatcttaaaagtcctagaatactagtatataagaatatagaatagctgctatatattaatatagacttattaaaatattatagctatagagctat

SEQ ID NO: 16078 - DNA, 96 bp, Aspergillus novofumigatus
  misc_feature: 94
aagaaagagaaaagaagaaagaaaagaaaagaaagaagagttagatatagaaaaaagaataattagaattttagtaagagattatataagggatag

SEQ ID NO: 16079 - DNA, 96 bp, Aspergillus novofumigatus
  misc_feature: 94
ctataggacctatatttattatagtaataaataaaataataatacttataattataataaagagatagactttagtaaatacctaaatagtaggat

SEQ ID NO: 16080 - DNA, 96 bp, Aspergillus novofumigatus
  misc_feature: 94
ctacttatagaactatcttaaaagtcctagaatactagtatataagaatatagaatagctgctatatattaatatagacttattaaaatattatag

SEQ ID NO: 16081 - DNA, 96 bp, Aspergillus novofumigatus
  misc_feature: 94
agtaagggtaaggatttagattagaagggataagagaggagattaagaagagatagaataagagatagataagagatagaataagagtaagagtag

SEQ ID NO: 16082 - DNA, 96 bp, Aspergillus novofumigatus
  misc_feature: 94
ctaactctttccttcttcccttctattcttaactctctctttctctttcttctcctttctatccctaactcttattctaacccttcttctatctct

SEQ ID NO: 16083 - DNA, 96 bp, Aspergillus novofumigatus
  misc_feature: 94
aatttaaaagataataataagaattactttatatatatatatttatatgtaagtatataagaaggataatttatatagattagtttagtagtttag

SEQ ID NO: 16084 - DNA, 96 bp, Aspergillus novofumigatus
  misc_feature: 94
cctttctaactccctctcttctttttttaatctatctctaaatcctcttcttcctactcttcttaatctactctcttaaaatcccttcttttttct

SEQ ID NO: 16085 - DNA, 96 bp, Aspergillus novofumigatus
  misc_feature: 94
aagagtattgaagagagttagggtttgagtaagaaagaggtaaggagagatagaataagaattagaaggaggattagaggaagagatagaagaagg

SEQ ID NO: 16086 - DNA, 96 bp, Aspergillus novofumigatus
  misc_feature: 94
agagatagaaggagagatagaaggagagatagaaggagagatagaaggagagatagaaggagagatagaaggagagatagaaggagagttagaagg

SEQ ID NO: 16087 - DNA, 96 bp, Aspergillus novofumigatus
  misc_feature: 94
ccttaatatattaataatttctattttattcctaacccttattctctctcttattattatcttttattttcttttcttttctattccctttcctct

SEQ ID NO: 16088 - DNA, 96 bp, Aspergillus novofumigatus
  misc_feature: 94
agagtattgaagagagttagggtttgagtaagaaagaggtaaggagagatagaataagaattagaaggaggattagaggaagagatagaagaaggg

SEQ ID NO: 16089 - DNA, 96 bp, Aspergillus novofumigatus
  misc_feature: 94
ccactgattcagctaacatactatataaaccaaccgtataatatatatctctgcgcattatggtatactaaaatatatattcattcccaaatatat

SEQ ID NO: 16090 - DNA, 96 bp, Aspergillus novofumigatus
  misc_feature: 94
aactaactgtataatatatatctctgcgcattatggtatcctaaaatatatatattcattcattaatatatcaatgctgatcgacctgatctcctg

SEQ ID NO: 16091 - DNA, 96 bp, Aspergillus novofumigatus
  misc_feature: 94
agggaggcagtgagataggcagtaaggcaggcagcaagcaaagcagtgagcaaggcagtgagtaaggcagtcagcaagatagtgagtgagatagtg

SEQ ID NO: 16092 - DNA, 96 bp, Aspergillus novofumigatus
  misc_feature: 94
agaagataagagaatcagggatagagagaataaggataaaaagagagtagattaattataatataagagagaagaagggtatatttttaatagaat

SEQ ID NO: 16093 - DNA, 96 bp, Aspergillus novofumigatus
  misc_feature: 94
attatagaagataagagaatcagggatagagagaataaggataaaaagagagtagattaattataatataagagagaagaagggtatatttttaat

SEQ ID NO: 16094 - DNA, 96 bp, Aspergillus novofumigatus
  misc_feature: 94
attataaagattaagtttctagtaaatattataaatcttaatatatatattagtcttatagaatagatatagaactatattctatattacttagct

SEQ ID NO: 16095 - DNA, 96 bp, Aspergillus novofumigatus
  misc_feature: 94
atccttcttttatctctttccttaactcttattctaactcttcttctaacccttactcttactctactcttactcttattctatctcttattctat

SEQ ID NO: 16096 - DNA, 96 bp, Aspergillus novofumigatus
  misc_feature: 94
aataatcctattctataaaagaagctagattatcctattatatatagaatattatagctctatagctataatattttaataagtctatattaatat

SEQ ID NO: 16097 - DNA, 96 bp, Aspergillus novofumigatus
  misc_feature: 94
atatcttatattcttcttctaatctacttattaaatcctaactttaatcctttcttcttttctctactctttcttctcttctctactctttcttct

SEQ ID NO: 16098 - DNA, 96 bp, Aspergillus novofumigatus
  misc_feature: 94
ataggacctatatttattatagtaataaataaaataataatacttataattataataaagagatagactttagtaaatacctaaatagtaggatat

SEQ ID NO: 16099 - DNA, 96 bp, Aspergillus novofumigatus
  misc_feature: 94
ataaagattaagtttctagtaaatattataaatcttaatatatatattagtcttatagaatagatatagaactatattctatattacttagctatt

SEQ ID NO: 16100 - DNA, 96 bp, Aspergillus novofumigatus
  misc_feature: 94
agtaagagtagagtaagagtaagggttagaagaagagttagaataagagttaaggaaagagataaaagaaggattaagaagaggtagaagaagagt

SEQ ID NO: 16101 - DNA, 96 bp, Aspergillus novofumigatus
  misc_feature: 94
aggttaatcagtagtaatatataaatgaatatatacattttaggataccataatacgcagagatatatattatacagttagtttatagagtatgtt

SEQ ID NO: 16102 - DNA, 96 bp, Aspergillus novofumigatus
  misc_feature: 94
aactctccttctaactctccttctatctctccttctatctctccttctatctctccttctatctctccttctatctctccttctatctctccttct

SEQ ID NO: 16103 - DNA, 96 bp, Aspergillus novofumigatus
  misc_feature: 94
accctttctaactccctctcttctttttttaatctatctctaaatcctcttcttcctactcttcttaatctactctcttaaaatcccttctttttt

SEQ ID NO: 16104 - DNA, 96 bp, Aspergillus novofumigatus
  misc_feature: 94
aagggtatatttttaatagaataagagagaagattaaaaaaggaaagaagaaagagtagagaagagaagaaagagtagagaaaagaagaaaggatt

SEQ ID NO: 16105 - DNA, 96 bp, Aspergillus novofumigatus
  misc_feature: 94
aatattactacctctcttactacttaccttactattaaccttactatctactatgatatttatattactatctaccttattacctaccttactatt

SEQ ID NO: 16106 - DNA, 96 bp, Aspergillus novofumigatus
  misc_feature: 94
aataattctaacccttaccttaatatattaataatttctattttattcctaacccttattctctctcttattattatcttttattttcttttcttt

SEQ ID NO: 16107 - DNA, 96 bp, Aspergillus novofumigatus
  misc_feature: 93
ttttaagagattagatagagaagaagaggtaaaagagaatttagggatagattaagaggagagaagaaggagtaataagagtagaaagggagataa

SEQ ID NO: 16108 - DNA, 96 bp, Aspergillus novofumigatus
  misc_feature: 93
ataaaccactgattcggctaacatactatataaaccaaccgtataatatatatctctgcgcattatggtatactaaaatatatattcattcccaaa

SEQ ID NO: 16109 - DNA, 96 bp, Aspergillus novofumigatus
  misc_feature: 93
tttctagtaaatattataaatcttaatatatatattagtcttatagaatagatatagaactatattctatattacttagctattatctagctatta

SEQ ID NO: 16110 - DNA, 96 bp, Aspergillus novofumigatus
  misc_feature: 93
tttatccttttcttttaattttatctttccttaattttaatttcttcttctctttcttcttctctttcttcttctctttcttcttctctttcttct

SEQ ID NO: 16111 - DNA, 96 bp, Aspergillus novofumigatus
  misc_feature: 93
tttagattaaataattatagctaatagaggattataataatataatttatagatactatctcctatatataagatataaactttttaaatatagta

SEQ ID NO: 16112 - DNA, 96 bp, Aspergillus novofumigatus
  misc_feature: 93
tttacttcttatatatcttatattcttcttctaatctacttattaaatcctaactttaatcctttcttcttttctctactctttcttctcttctct

SEQ ID NO: 16113 - DNA, 96 bp, Aspergillus novofumigatus
  misc_feature: 93
tttaataattctaacccttaccttaatatattaataatttctattttattcctaacccttattctctctcttattattatcttttattttcttttc

SEQ ID NO: 16114 - DNA, 96 bp, Aspergillus novofumigatus
  misc_feature: 93
ttgcttgctgcctccctcactatctcactcactatctcactcactgccttacttactatctcactcactgtcttactcactacctccctcactatc

SEQ ID NO: 16115 - DNA, 96 bp, Aspergillus novofumigatus
  misc_feature: 93
ttcttttctattccctttcctcttccctttcctcttccctttcttctcctatttttaattatatttatttcttctctttactaaaactctctctat

SEQ ID NO: 16116 - DNA, 96 bp, Aspergillus novofumigatus
  misc_feature: 93
aagaaaagaatagaaggtaaagatagataagatagaaagagtttaagtaaagggtaagaaagagaagaagaataagaagaaagagaagaaagagaa

SEQ ID NO: 16117 - DNA, 96 bp, Aspergillus novofumigatus
  misc_feature: 93
ttctatctcttattctatctcttattctatctcttattctatctctctcttactccctctctcctctatctcttcttaatctcctctcttatccct

SEQ ID NO: 16118 - DNA, 96 bp, Aspergillus novofumigatus
  misc_feature: 93
tgagtaagaaagaggtaaggagagatagaataagaattagaaggaggattagaggaagagatagaagaagggttagaataagagttagggatagaa

SEQ ID NO: 16119 - DNA, 96 bp, Aspergillus novofumigatus
  misc_feature: 93
ttagaagggataagagaggagattaagaagagatagaataagagatagataagagatagaataagagtaagagtagagtaagagtaagggttagaa

SEQ ID NO: 16120 - DNA, 96 bp, Aspergillus novofumigatus
  misc_feature: 93
ttatcttaatctaataaatataaatatatatatctattatctagactaaatcttttctagtaactaaatctaattattatctagcttactagatct

SEQ ID NO: 16121 - DNA, 96 bp, Aspergillus novofumigatus
  misc_feature: 93
ttatataatctcttactaaaattctaattattcttttttctatatctgactcttctttcttttcttttctttcttcttttctctttcttttctatc

SEQ ID NO: 16122 - DNA, 96 bp, Aspergillus novofumigatus
  misc_feature: 93
atcttaaaagtcctagaatactagtatataagaatatagaatagctgctatatattaatatagacttattaaaatattatagctatagagctataa

SEQ ID NO: 16123 - DNA, 96 bp, Aspergillus novofumigatus
  misc_feature: 93
ttactaccccttactcttattctatttcttactctccttctaactatcctaacctctcctaatctcttcttctatctcttcttctaactctccttc

SEQ ID NO: 16124 - DNA, 96 bp, Aspergillus novofumigatus
  misc_feature: 93
ttaatatattaataatttctattttattcctaacccttattctctctcttattattatcttttattttcttttcttttctattccctttcctcttc

SEQ ID NO: 16125 - DNA, 96 bp, Aspergillus novofumigatus
  misc_feature: 93
ttaaggttaatcagtagtaatatataaatgaatatatacattttaggataccataatacgcagagatatatattatacagttagtttatagagtat

SEQ ID NO: 16126 - DNA, 96 bp, Aspergillus novofumigatus
  misc_feature: 93
aattatagaagataagagaatcagggatagagagaataaggataaaaagagagtagattaattataatataagagagaagaagggtatatttttaa

SEQ ID NO: 16127 - DNA, 96 bp, Aspergillus novofumigatus
  misc_feature: 93
tgcttgctgcctccctcactatctcactcactatctcactcactgccttacttactatctcactcactgtcttactcactacctccctcactatct

SEQ ID NO: 16128 - DNA, 96 bp, Aspergillus novofumigatus
  misc_feature: 93
tgcctccctcactatctcactcactatctcactcactgccttacttactatctcactcactgtcttactcactacctccctcactatcttacttac

SEQ ID NO: 16129 - DNA, 96 bp, Aspergillus novofumigatus
  misc_feature: 93
tgattaattatagaagataagagaatcagggatagagagaataaggataaaaagagagtagattaattataatataagagagaagaagggtatatt

SEQ ID NO: 16130 - DNA, 96 bp, Aspergillus novofumigatus
  misc_feature: 93
tgatcctattcctgatcctattcctgatcctattcctgatcctattcctgatcctattcctgatcctattcctgatcctattcctgatcctattcc

SEQ ID NO: 16131 - DNA, 96 bp, Aspergillus novofumigatus
  misc_feature: 93
acactagcttatagttatataataatatactaattaatatagcaagcttatattatataatcttagctataatttatatacccccttttatattca

SEQ ID NO: 16132 - DNA, 96 bp, Aspergillus novofumigatus
  misc_feature: 93
aagaaataaatataattaaaaatagaagaagaaagggaagaggaaagggaagaggaaaggaaagaggaaagggaagaggaaagggaatagaaaaga

SEQ ID NO: 16133 - DNA, 96 bp, Aspergillus novofumigatus
  misc_feature: 93
tcttttctattccctttcctcttccctttcctcttccctttcttctcctatttttaattatatttatttcttctctttactaaaactctctctatc

SEQ ID NO: 16134 - DNA, 96 bp, Aspergillus novofumigatus
  misc_feature: 93
tctttcttctcttctctactctttcttctttccttttttaatcttctctcttattctattaaaaatatacccttcttctctcttatattataatta

SEQ ID NO: 16135 - DNA, 96 bp, Aspergillus novofumigatus
  misc_feature: 93
tcttcttctaatctacttattaaatcctaactttaatcctttcttcttttctctactctttcttctcttctctactctttcttctttcctttttta

SEQ ID NO: 16136 - DNA, 96 bp, Aspergillus novofumigatus
  misc_feature: 93
tcttattccttctctcctaaaaacttttcttctaactcttattctaactctccttcttattattccttactcttcttctaatccttcttctatctc

SEQ ID NO: 16137 - DNA, 96 bp, Aspergillus novofumigatus
  misc_feature: 93
agtaaatattataaatcttaatatatatattagtcttatagaatagatatagaactatattctatattacttagctattatctagctattataaga

SEQ ID NO: 16138 - DNA, 96 bp, Aspergillus novofumigatus
  misc_feature: 93
gtaagggttattaagtttagataggaggaagggatagagggagggataaagggagggatagaggaagggatagaataaaagtaaggattagtaaga

SEQ ID NO: 16139 - DNA, 96 bp, Aspergillus novofumigatus
  misc_feature: 93
tcttaaaagtcctagaatactagtatataagaatatagaatagctgctatatattaatatagacttattaaaatattatagctatagagctataat

SEQ ID NO: 16140 - DNA, 96 bp, Aspergillus novofumigatus
  misc_feature: 93
tctcttcttctaactcttattcttaactcctattcttattccttctctcctaaaaacttttcttctaactcttattctaactctccttcttattat

SEQ ID NO: 16141 - DNA, 96 bp, Aspergillus novofumigatus
  misc_feature: 93
tctctcttattattatcttttattttcttttcttttctattccctttcctcttccctttcctcttccctttcttctcctatttttaattatattta

SEQ ID NO: 16142 - DNA, 96 bp, Aspergillus novofumigatus
  misc_feature: 93
tagatagaggggttaaataagagatagaaggagagatagaaggagagatagaaggagagatagaaggagagatagaaggagagatagaaggagaga

SEQ ID NO: 16143 - DNA, 96 bp, Aspergillus novofumigatus
  misc_feature: 93
agaagagattaggagaggttaggatagttagaaggagagtaagaaatagaataagagtaaggggtagtaagtgtagatagaagagagagatagaga

SEQ ID NO: 16144 - DNA, 96 bp, Aspergillus novofumigatus
  misc_feature: 93
tctctaccttctccctttttttacttcttatatatcttatattcttcttctaatctacttattaaatcctaactttaatcctttcttctcttctct

SEQ ID NO: 16145 - DNA, 96 bp, Aspergillus novofumigatus
  misc_feature: 93
tctcctttctatccctaactcttattctaacccttcttctatctcttcctctaatcctccttctaattcttattctatctctccttacctctttct

SEQ ID NO: 16146 - DNA, 96 bp, Aspergillus novofumigatus
  misc_feature: 93
gaagaagagattaggagaggttaggatagttagaaggagagtaagaaatagaataagagtaaggggtagtaagtgtagatagaagagagagataga

SEQ ID NO: 16147 - DNA, 96 bp, Aspergillus novofumigatus
  misc_feature: 93
ggacctatatttattatagtaataaataaaataataatacttataattataataaagagatagactttagtaaatacctaaatagtaggatataga

SEQ ID NO: 16148 - DNA, 96 bp, Aspergillus novofumigatus
  misc_feature: 93
tagaactatcttaaaagtcctagaatactagtatataagaatatagaatagctgctatatattaatatagacttattaaaatattatagctataga

SEQ ID NO: 16149 - DNA, 96 bp, Aspergillus novofumigatus
  misc_feature: 93
ataattatagaatcataaggctagtataagttaaatatatttatttcactttaatatacatatttttatatatatatatattaaaatctgcctaga

SEQ ID NO: 16150 - DNA, 96 bp, Aspergillus novofumigatus
  misc_feature: 93
tctacctcttcttaatccttcttttatctctttccttaactcttattctaactcttcttctaacccttactcttactctactcttactcttattct

SEQ ID NO: 16151 - DNA, 96 bp, Aspergillus novofumigatus
  misc_feature: 93
agagtagagtaagagtaagggttagaagaagagttagaataagagttaaggaaagagataaaagaaggattaagaagaggtagaagaagagttaga

SEQ ID NO: 16152 - DNA, 96 bp, Aspergillus novofumigatus
  misc_feature: 93
tcggctaacatactatataaaccaaccgtataatatatatctctgcgcattatggtatactaaaatatatattcattcccaaatatatcaatgctg

SEQ ID NO: 16153 - DNA, 96 bp, Aspergillus novofumigatus
  misc_feature: 93
tccctataggacctatatttattatagtaataaataaaataataatacttataattataataaagagatagactttagtaaatacctaaatagtag

SEQ ID NO: 16154 - DNA, 96 bp, Aspergillus novofumigatus
  misc_feature: 93
actaactgtataatatatatctctgcgcattatggtatcctaaaatatatatattcattcattaatatatcaatgctgatcgacctgatctcctga

SEQ ID NO: 16155 - DNA, 96 bp, Aspergillus novofumigatus
  misc_feature: 93
tattttcttttcttttctattccctttcctcttccctttcctcttccctttcttctcctatttttaattatatttatttcttctctttactaaaac

SEQ ID NO: 16156 - DNA, 96 bp, Aspergillus novofumigatus
  misc_feature: 93
gtcttccctataggacctatatttattatagtaataaataaaataataatacttataattataataaagagatagactttagtaaatacctaaata

SEQ ID NO: 16157 - DNA, 96 bp, Aspergillus novofumigatus
  misc_feature: 93
ataagaataggagttaagaataagagttagaagaagagataaaaagggttagaagaagaattaggaataaaaataagaataaaaagtggaagaata

SEQ ID NO: 16158 - DNA, 96 bp, Aspergillus novofumigatus
  misc_feature: 93
aaatattataaatcttaatatatatattagtcttatagaatagatatagaactatattctatattacttagctattatctagctattataagaata

SEQ ID NO: 16159 - DNA, 96 bp, Aspergillus novofumigatus
  misc_feature: 93
tattccttctctcctaaaaacttttcttctaactcttattctaactctccttcttattattccttactcttcttctaatccttcttctatctctcc

SEQ ID NO: 16160 - DNA, 96 bp, Aspergillus novofumigatus
  misc_feature: 93
cttaaaagtcctagaatactagtatataagaatatagaatagctgctatatattaatatagacttattaaaatattatagctatagagctataata

SEQ ID NO: 16161 - DNA, 96 bp, Aspergillus novofumigatus
  misc_feature: 93
ggaagtttagtattattatataatattattcttatttttcttatagtaaattaattactatactatatttacctagtatatttatatctactaata

SEQ ID NO: 16162 - DNA, 96 bp, Aspergillus novofumigatus
  misc_feature: 93
tattagataagctattagaatatctactaatttattaactacttctaaccctctatatatctatatactattattaagctttattattattaaatt

SEQ ID NO: 16163 - DNA, 96 bp, Aspergillus novofumigatus
  misc_feature: 93
agagatagtaggagagggtaagggttagtaaggatagaagaagagttataagaagaggaagagggaggggaagagagagagaaagagttagagata

SEQ ID NO: 16164 - DNA, 96 bp, Aspergillus novofumigatus
  misc_feature: 93
aggagggaggcagtgagataggcagtaaggcaggcagcaagcaaagcagtgagcaaggcagtgagtaaggcagtcagcaagatagtgagtgagata

SEQ ID NO: 16165 - DNA, 96 bp, Aspergillus novofumigatus
  misc_feature: 93
tatcatattaaccatagttaggagagaggtaggtagcaaggtagacagtaaggtagatagtaaggtagatagtgagataggcagtgaggtaggcag

SEQ ID NO: 16166 - DNA, 96 bp, Aspergillus novofumigatus
  misc_feature: 93
accactgattcagctaacatactatataaaccaaccgtataatatatatctctgcgcattatggtatactaaaatatatattcattcccaaatata

SEQ ID NO: 16167 - DNA, 96 bp, Aspergillus novofumigatus
  misc_feature: 93
tatagaactatcttaaaagtcctagaatactagtatataagaatatagaatagctgctatatattaatatagacttattaaaatattatagctata

SEQ ID NO: 16168 - DNA, 96 bp, Aspergillus novofumigatus
  misc_feature: 93
tagtcttatagaatagatatagaactatattctatattacttagctattatctagctattataagaatagaaaatatagctactaagttagagccc

SEQ ID NO: 16169 - DNA, 96 bp, Aspergillus novofumigatus
  misc_feature: 93
tagagtcttccctataggacctatatttattatagtaataaataaaataataatacttataattataataaagagatagactttagtaaataccta

SEQ ID NO: 16170 - DNA, 96 bp, Aspergillus novofumigatus
  misc_feature: 93
actatcttaaaagtcctagaatactagtatataagaatatagaatagctgctatatattaatatagacttattaaaatattatagctatagagcta

SEQ ID NO: 16171 - DNA, 96 bp, Aspergillus novofumigatus
  misc_feature: 93
atataatctcttactaaaattctaattattcttttttctatatctgactcttctttcttttcttttctttcttcttttctctttcttttctatcta

SEQ ID NO: 16172 - DNA, 96 bp, Aspergillus novofumigatus
  misc_feature: 93
tagataagctattagaatatctactaatttattaactacttctaaccctctatatatctatatactattattaagctttattattattaaattatt

SEQ ID NO: 16173 - DNA, 96 bp, Aspergillus novofumigatus
  misc_feature: 93
ctctaccttctccctttttttacttcttatatatcttatattcttcttctaatctacttattaaatcctaactttaatcctttcttctcttctcta

SEQ ID NO: 16174 - DNA, 96 bp, Aspergillus novofumigatus
  misc_feature: 93
tagaatcataaggctagtataagttaaatatatttatttcactttaatatacatatttttatatatatatatattaaaatctgcctagatctagat

SEQ ID NO: 16175 - DNA, 96 bp, Aspergillus novofumigatus
  misc_feature: 93
ctacctcttcttaatccttcttttatctctttccttaactcttattctaactcttcttctaacccttactcttactctactcttactcttattcta

SEQ ID NO: 16176 - DNA, 96 bp, Aspergillus novofumigatus
  misc_feature: 93
tacttatagaactatcttaaaagtcctagaatactagtatataagaatatagaatagctgctatatattaatatagacttattaaaatattatagc

SEQ ID NO: 16177 - DNA, 96 bp, Aspergillus novofumigatus
  misc_feature: 93
attaaggttaatcagtagtaatatataaatgaatatatacattttaggataccataatacgcagagatatatattatacagttagtttatagagta

SEQ ID NO: 16178 - DNA, 96 bp, Aspergillus novofumigatus
  misc_feature: 93
attagataagctattagaatatctactaatttattaactacttctaaccctctatatatctatatactattattaagctttattattattaaatta

SEQ ID NO: 16179 - DNA, 96 bp, Aspergillus novofumigatus
  misc_feature: 93
taatttaaaagataataataagaattactttatatatatatatttatatgtaagtatataagaaggataatttatatagattagtttagtagttta

SEQ ID NO: 16180 - DNA, 96 bp, Aspergillus novofumigatus
  misc_feature: 93
taattatagaatcataaggctagtataagttaaatatatttatttcactttaatatacatatttttatatatatatatattaaaatctgcctagat

SEQ ID NO: 16181 - DNA, 96 bp, Aspergillus novofumigatus
  misc_feature: 93
taatccttcttttatctctttccttaactcttattctaactcttcttctaacccttactcttactctactcttactcttattctatctcttattct

SEQ ID NO: 16182 - DNA, 96 bp, Aspergillus novofumigatus
  misc_feature: 93
ctatctaaatttaaaataataagtatatactatataaatatttaatatatttataacttagctattatactacctagggatgctataaagatatta

SEQ ID NO: 16183 - DNA, 96 bp, Aspergillus novofumigatus
  misc_feature: 93
taagtttctagtaaatattataaatcttaatatatatattagtcttatagaatagatatagaactatattctatattacttagctattatctagct

SEQ ID NO: 16184 - DNA, 96 bp, Aspergillus novofumigatus
  misc_feature: 93
acttatactaatagaaaggtaataaatatcttcttaagacttaatataatctatatctctatatattatctaagaaatctagaaagatattactta

SEQ ID NO: 16185 - DNA, 96 bp, Aspergillus novofumigatus
  misc_feature: 93
ctgcctccctcactatctcactcactatctcactcactgccttacttactatctcactcactgtcttactcactacctccctcactatcttactta

SEQ ID NO: 16186 - DNA, 96 bp, Aspergillus novofumigatus
  misc_feature: 93
taaggttaatcagtagtaatatataaatgaatatatacattttaggataccataatacgcagagatatatattatacagttagtttatagagtatg

SEQ ID NO: 16187 - DNA, 96 bp, Aspergillus novofumigatus
  misc_feature: 93
taagagtagagatagatagatataggaaaataaggatttagaaggatttaggaagagagaggatttagaatgaagatagaaagaagagaggagaag

SEQ ID NO: 16188 - DNA, 96 bp, Aspergillus novofumigatus
  misc_feature: 93
taagaataggagttaagaataagagttagaagaagagataaaaagggttagaagaagaattaggaataaaaataagaataaaaagtggaagaatag

SEQ ID NO: 16189 - DNA, 96 bp, Aspergillus novofumigatus
  misc_feature: 93
taacctctcctaatctcttcttctatctcttcttctaactctccttctacctctccttaatccttcttttattaactcttattctaactcttcttc

SEQ ID NO: 16190 - DNA, 96 bp, Aspergillus novofumigatus
  misc_feature: 93
taaagatttagattaaataattatagctaatagaggattataataatataatttatagatactatctcctatatataagatataaactttttaaat

SEQ ID NO: 16191 - DNA, 96 bp, Aspergillus novofumigatus
  misc_feature: 93
taaaagtaagggttattaagtttagataggaggaagggatagagggagggataaagggagggatagaggaagggatagaataaaagtaaggattag

SEQ ID NO: 16192 - DNA, 96 bp, Aspergillus novofumigatus
  misc_feature: 93
gtttagagaagggaaaagagtatataagttaatttagaaagaaaagaatagaaggtaaagatagataagatagaaagagtttaagtaaagggtaag

SEQ ID NO: 16193 - DNA, 96 bp, Aspergillus novofumigatus
  misc_feature: 93
ctaactgtataatatatatctctgcgcattatggtatcctaaaatatatatattcattcattaatatatcaatgctgatcgacctgatctcctgac

SEQ ID NO: 16194 - DNA, 96 bp, Aspergillus novofumigatus
  misc_feature: 93
gtatccatatatcaagtaatagatatatattaggagatcaaggttaattaggattaatatattaagtaaataaatatatatattttaggataccat

SEQ ID NO: 16195 - DNA, 96 bp, Aspergillus novofumigatus
  misc_feature: 93
cctttctatccctaactcttattctaacccttcttctatctcttcctctaatcctccttctaattcttattctatctctccttacctctttcttac

SEQ ID NO: 16196 - DNA, 96 bp, Aspergillus novofumigatus
  misc_feature: 93
ggatttagattagaagggataagagaggagattaagaagagatagaggagagagggagtaagagagagatagaataagagatagaataagagatag

SEQ ID NO: 16197 - DNA, 96 bp, Aspergillus novofumigatus
  misc_feature: 93
cttaactcctattcttattccttctctcctaaaaacttttcttctaactcttattctaactctccttcttattattccttactcttcttctaatcc

SEQ ID NO: 16198 - DNA, 96 bp, Aspergillus novofumigatus
  misc_feature: 93
gcttgctgcctccctcactatctcactcactatctcactcactgccttacttactatctcactcactgtcttactcactacctccctcactatctt

SEQ ID NO: 16199 - DNA, 96 bp, Aspergillus novofumigatus
  misc_feature: 93
gctgcctccctcactatctcactcactatctcactcactgccttacttactatctcactcactgtcttactcactacctccctcactatcttactt

SEQ ID NO: 16200 - DNA, 96 bp, Aspergillus novofumigatus
  misc_feature: 93
attaaccatagttaggagagaggtaggtagcaaggtagacagtaaggtagatagtaaggtagatagtgagataggcagtgaggtaggcagtaaggc

SEQ ID NO: 16201 - DNA, 96 bp, Aspergillus novofumigatus
  misc_feature: 93
gattcggctaacatactatataaaccaaccgtataatatatatctctgcgcattatggtatactaaaatatatattcattcccaaatatatcaatg

SEQ ID NO: 16202 - DNA, 96 bp, Aspergillus novofumigatus
  misc_feature: 93
gattaattatagaagataagagaatcagggatagagagaataaggataaaaagagagtagattaattataatataagagagaagaagggtatattt

SEQ ID NO: 16203 - DNA, 96 bp, Aspergillus novofumigatus
  misc_feature: 93
cactgattcagctaacatactatataaaccaaccgtataatatatatctctgcgcattatggtatactaaaatatatattcattcccaaatatatc

SEQ ID NO: 16204 - DNA, 96 bp, Aspergillus novofumigatus
  misc_feature: 93
accttaatatattaataatttctattttattcctaacccttattctctctcttattattatcttttattttcttttcttttctattccctttcctc

SEQ ID NO: 16205 - DNA, 96 bp, Aspergillus novofumigatus
  misc_feature: 93
ctcttcttaatccttcttttatctctttccttaactcttattctaactcttcttctaacccttactcttactctactcttactcttattctatctc

SEQ ID NO: 16206 - DNA, 96 bp, Aspergillus novofumigatus
  misc_feature: 93
cttcttttatctctttccttaactcttattctaactcttcttctaacccttactcttactctactcttactcttattctatctcttattctatctc

SEQ ID NO: 16207 - DNA, 96 bp, Aspergillus novofumigatus
  misc_feature: 93
gacctatatttattatagtaataaataaaataataatacttataattataataaagagatagactttagtaaatacctaaatagtaggatatagag

SEQ ID NO: 16208 - DNA, 96 bp, Aspergillus novofumigatus
  misc_feature: 93
gaatagaaggtaaagatagataagatagaaagagtttaagtaaagggtaagaaagagaagaagaataagaagaaagagaagaaagagaagaaagag

SEQ ID NO: 16209 - DNA, 96 bp, Aspergillus novofumigatus
  misc_feature: 93
ctatctcttattctatctcttattctatctcttattctatctctctcttactccctctctcctctatctcttcttaatctcctctcttatcccttc

SEQ ID NO: 16210 - DNA, 96 bp, Aspergillus novofumigatus
  misc_feature: 93
ctttatccttttcttttaattttatctttccttaattttaatttcttcttctctttcttcttctctttcttcttctctttcttcttctctttcttc

SEQ ID NO: 16211 - DNA, 96 bp, Aspergillus novofumigatus
  misc_feature: 93
ctctttcttcttattcttcttattcttcctctctttcttaccctttacttaaactctttctatcttatctatctttaccttctattcttttctttc

SEQ ID NO: 16212 - DNA, 96 bp, Aspergillus novofumigatus
  misc_feature: 93
cttttcttttctattccctttcctcttccctttcctctttcctttcctcttccctttcctcttccctttcttcttctatttttaattatatttatt

SEQ ID NO: 16213 - DNA, 96 bp, Aspergillus novofumigatus
  misc_feature: 93
caagagtattgaagagagttagggtttgagtaagaaagaggtaaggagagatagaataagaattagaaggaggattagaggaagagatagaagaag

SEQ ID NO: 16214 - DNA, 96 bp, Aspergillus novofumigatus
  misc_feature: 93
cttcttaatccttcttttatctctttccttaactcttattctaactcttcttctaacccttactcttactctactcttactcttattctatctctt

SEQ ID NO: 16215 - DNA, 96 bp, Aspergillus novofumigatus
  misc_feature: 93
aggttaggatagttagaaggagagtaagaaatagaataagagtaaggggtagtaagtgtagatagaagagagagatagagaaagaggtaaagtaag

SEQ ID NO: 16216 - DNA, 96 bp, Aspergillus novofumigatus
  misc_feature: 93
cttaatccttcttttatctctttccttaactcttattctaactcttcttctaacccttactcttactctactcttactcttattctatctcttatt

SEQ ID NO: 16217 - DNA, 96 bp, Aspergillus novofumigatus
  misc_feature: 93
atataagatagagagagttttagtaaagagaagaaataaatataattaaaaatagaagaagaaagggaagaggaaagggaagaggaaaggaaagag

SEQ ID NO: 16218 - DNA, 96 bp, Aspergillus novofumigatus
  misc_feature: 93
agagtagagatagatagatataggaaaataaggatttagaaggatttaggaagagagaggatttagaatgaagatagaaagaagagaggagaagag

SEQ ID NO: 16219 - DNA, 96 bp, Aspergillus novofumigatus
  misc_feature: 93
ctcttattctattaaaaatatacccttcttctctcttatattataattaatctactctctttttatccttattctctctatccctgattctcttat

SEQ ID NO: 16220 - DNA, 96 bp, Aspergillus novofumigatus
  misc_feature: 93
atagaggggttaaataagagatagaaggagagatagaaggagagatagaaggagagatagaaggagagatagaaggagagatagaaggagagatag

SEQ ID NO: 16221 - DNA, 96 bp, Aspergillus novofumigatus
  misc_feature: 93
atagaactatcttaaaagtcctagaatactagtatataagaatatagaatagctgctatatattaatatagacttattaaaatattatagctatag

SEQ ID NO: 16222 - DNA, 96 bp, Aspergillus novofumigatus
  misc_feature: 93
attaagtttctagtaaatattataaatcttaatatatatattagtcttatagaatagatatagaactatattctatattacttagctattatctag

SEQ ID NO: 16223 - DNA, 96 bp, Aspergillus novofumigatus
  misc_feature: 93
ctaaggttagattcagtattataagagtattaataagtaaattaatattatattaataaggaaaaaatattatattaataatttaatatcctaatt

SEQ ID NO: 16224 - DNA, 96 bp, Aspergillus novofumigatus
  misc_feature: 93
aaagaggttttaagagattagatagagaagaagaggtaaaagagaatttagggatagattaagaggagagaagaaggagtaataagagtagaaagg

SEQ ID NO: 16225 - DNA, 96 bp, Aspergillus novofumigatus
  misc_feature: 93
ccttaactcttattctaactcttcttctaacccttactcttactctactcttactcttattctatctcttattctatctcttattctatctcttat

SEQ ID NO: 16226 - DNA, 96 bp, Aspergillus novofumigatus
  misc_feature: 93
cctattcttattccttctctcctaaaaacttttcttctaactcttattctaactctccttcttattattccttactcttcttctaatccttcttct

SEQ ID NO: 16227 - DNA, 96 bp, Aspergillus novofumigatus
  misc_feature: 93
atattactacctctcttactacttaccttactattaaccttactatctactatgatatttatattactatctaccttattacctaccttactattg

SEQ ID NO: 16228 - DNA, 96 bp, Aspergillus novofumigatus
  misc_feature: 93
attaaaattaaggaaagataaaattaaaagaaaaggataaagttaaataataatttaatagaatgaattaggaatgtagtaaggattaatagaaat

SEQ ID NO: 16229 - DNA, 96 bp, Aspergillus novofumigatus
  misc_feature: 93
agtcttccctataggacctatatttattatagtaataaataaaataataatacttataattataataaagagatagactttagtaaatacctaaat

SEQ ID NO: 16230 - DNA, 96 bp, Aspergillus novofumigatus
  misc_feature: 93
atttagattaaataattatagctaatagaggattataataatataatttatagatactatctcctatatataagatataaactttttaaatatagt

SEQ ID NO: 16231 - DNA, 96 bp, Aspergillus novofumigatus
  misc_feature: 93
aaacataatccgaggataaggattttagcggcttgtagtattttagccgcttgttgcattttagccgcttgtagtattttagcggctttttgcaat

SEQ ID NO: 16232 - DNA, 96 bp, Aspergillus novofumigatus
  misc_feature: 93
aagagatagtaggagagggtaagggttagtaaggatagaagaagagttataagaagaggaagagggaggggaagagagagagaaagagttagagat

SEQ ID NO: 16233 - DNA, 96 bp, Aspergillus novofumigatus
  misc_feature: 93
aaccactgattcagctaacatactatataaaccaaccgtataatatatatctctgcgcattatggtatactaaaatatatattcattcccaaatat

SEQ ID NO: 16234 - DNA, 96 bp, Aspergillus novofumigatus
  misc_feature: 93
atactctttaaacctattaacctcttactaaatccctaatcctaacttattcctaatcctaataaattcctaatcctataaattatctcttattct

SEQ ID NO: 16235 - DNA, 96 bp, Aspergillus novofumigatus
  misc_feature: 93
acttcttatatatcttatattcttcttctaatctacttattaaatcctaactttaatcctttcttcttttctctactctttcttctcttctctact

SEQ ID NO: 16236 - DNA, 96 bp, Aspergillus novofumigatus
  misc_feature: 93
acttactaccccttactcttattctatttcttactctccttctaactatcctaacctctcctaatctcttcttctatctcttcttctaactctcct

SEQ ID NO: 16237 - DNA, 96 bp, Aspergillus novofumigatus
  misc_feature: 93
agagaagatagtaatttaaaagataataataagaattactttatatatatatatttatatgtaagtatataagaaggataatttatatagattagt

SEQ ID NO: 16238 - DNA, 96 bp, Aspergillus novofumigatus
  misc_feature: 93
aacctctcctaatctcttcttctatctcttcttctaactctccttctacctctccttaatccttcttttattaactcttattctaactcttcttct

SEQ ID NO: 16239 - DNA, 96 bp, Aspergillus novofumigatus
  misc_feature: 93
aaattattatttaactttatccttttcttttaattttatctttccttaattttaatttcttcttctctttcttcttctctttcttcttctctttct

SEQ ID NO: 16240 - DNA, 96 bp, Aspergillus novofumigatus
  misc_feature: 93
aagaataggagttaagaataagagttagaagaagagataaaaagggttagaagaagaattaggaataaaaataagaataaaaagtggaagaatagt

SEQ ID NO: 16241 - DNA, 96 bp, Aspergillus novofumigatus
  misc_feature: 93
aaaagtaagggttattaagtttagataggaggaagggatagagggagggataaagggagggatagaggaagggatagaataaaagtaaggattagt

SEQ ID NO: 16242 - DNA, 96 bp, Aspergillus novofumigatus
  misc_feature: 93
aaggttaatcagtagtaatatataaatgaatatatacattttaggataccataatacgcagagatatatattatacagttagtttatagagtatgt

SEQ ID NO: 16243 - DNA, 96 bp, Aspergillus novofumigatus
  misc_feature: 93
aatagagaagatagtaatttaaaagataataataagaattactttatatatatatatttatatgtaagtatataagaaggataatttatatagatt

SEQ ID NO: 16244 - DNA, 96 bp, Aspergillus novofumigatus
  misc_feature: 92
aatataattaaaaatagaagaagaaagggaagaggaaagggaagaggaaaggaaagaggaaagggaagaggaaagggaatagaaaagaaaagaaaa

SEQ ID NO: 16245 - DNA, 96 bp, Aspergillus novofumigatus
  misc_feature: 92
ttttcttttctattccctttcctcttccctttcctcttccctttcttctcctatttttaattatatttatttcttctctttactaaaactctctct

SEQ ID NO: 16246 - DNA, 96 bp, Aspergillus novofumigatus
  misc_feature: 92
tttcttttcttttctattccctttcctcttccctttcctcttccctttcttctcctatttttaattatatttatttcttctctttactaaaactct

SEQ ID NO: 16247 - DNA, 96 bp, Aspergillus novofumigatus
  misc_feature: 92
aaggtaaagatagataagatagaaagagtttaagtaaagggtaagaaagagaagaagaataagaagaaagagaagaaagagaagaaagagaagaaa

SEQ ID NO: 16248 - DNA, 96 bp, Aspergillus novofumigatus
  misc_feature: 92
gagtcttccctataggacctatatttattatagtaataaataaaataataatacttataattataataaagagatagactttagtaaatacctaaa

SEQ ID NO: 16249 - DNA, 96 bp, Aspergillus novofumigatus
  misc_feature: 92
tttagagaagggaaaagagtatataagttaatttagaaagaaaagaatagaaggtaaagatagataagatagaaagagtttaagtaaagggtaaga

SEQ ID NO: 16250 - DNA, 96 bp, Aspergillus novofumigatus
  misc_feature: 92
ggtatatttttaatagaataagagagaagattaaaaaaggaaagaagaaagagtagagaagagaagaaagagtagagaaaagaagaaaggattaaa

SEQ ID NO: 16251 - DNA, 96 bp, Aspergillus novofumigatus
  misc_feature: 92
tataaaccactgattcggctaacatactatataaaccaaccgtataatatatatctctgcgcattatggtatactaaaatatatattcattcccaa

SEQ ID NO: 16252 - DNA, 96 bp, Aspergillus novofumigatus
  misc_feature: 92
catagttaggagagaggtaggtagcaaggtagacagtaaggtagatagtaaggtagatagtgagataggcagtgaggtaggcagtaaggcaggcaa

SEQ ID NO: 16253 - DNA, 96 bp, Aspergillus novofumigatus
  misc_feature: 92
aagataagagaatcagggatagagagaataaggataaaaagagagtagattaattataatataagagagaagaagggtatatttttaatagaataa

SEQ ID NO: 16254 - DNA, 96 bp, Aspergillus novofumigatus
  misc_feature: 92
gagatagtaggagagggtaagggttagtaaggatagaagaagagttataagaagaggaagagggaggggaagagagagagaaagagttagagataa

SEQ ID NO: 16255 - DNA, 96 bp, Aspergillus novofumigatus
  misc_feature: 92
ttatccttttcttttaattttatctttccttaattttaatttcttcttctctttcttcttctctttcttcttctctttcttcttctctttcttctt

SEQ ID NO: 16256 - DNA, 96 bp, Aspergillus novofumigatus
  misc_feature: 92
ttataggctgcccctataatatatactatcttatatatatagctatataatcacctaattagttatataattataactagttattatattaattag

SEQ ID NO: 16257 - DNA, 96 bp, Aspergillus novofumigatus
  misc_feature: 92
ttatagaatcataaggctagtataagttaaatatatttatttcactttaatatacatatttttatatatatatatattaaaatctgcctagatcta

SEQ ID NO: 16258 - DNA, 96 bp, Aspergillus novofumigatus
  misc_feature: 92
ttatagaactatcttaaaagtcctagaatactagtatataagaatatagaatagctgctatatattaatatagacttattaaaatattatagctat

SEQ ID NO: 16259 - DNA, 96 bp, Aspergillus novofumigatus
  misc_feature: 92
agggaagtttagtattattatataatattattcttatttttcttatagtaaattaattactatactatatttacctagtatatttatatctactaa

SEQ ID NO: 16260 - DNA, 96 bp, Aspergillus novofumigatus
  misc_feature: 92
ttagattcagtattataagagtattaataagtaaattaatattatattaataaggaaaaaatattatattaataatttaatatcctaatttaatat

SEQ ID NO: 16261 - DNA, 96 bp, Aspergillus novofumigatus
  misc_feature: 92
ttagattaaataattatagctaatagaggattataataatataatttatagatactatctcctatatataagatataaactttttaaatatagtag

SEQ ID NO: 16262 - DNA, 96 bp, Aspergillus novofumigatus
  misc_feature: 92
cctctcctaatctcttcttctatctcttcttctaactctccttctacctctccttaatccttcttttattaactcttattctaactcttcttctaa

SEQ ID NO: 16263 - DNA, 96 bp, Aspergillus novofumigatus
  misc_feature: 92
ttacttcttatatatcttatattcttcttctaatctacttattaaatcctaactttaatcctttcttcttttctctactctttcttctcttctcta

SEQ ID NO: 16264 - DNA, 96 bp, Aspergillus novofumigatus
  misc_feature: 92
ggatttagattagaagggataagagaggagattaagaagagatagaataagagatagataagagatagaataagagtaagagtagagtaagagtaa

SEQ ID NO: 16265 - DNA, 96 bp, Aspergillus novofumigatus
  misc_feature: 92
aagtaagggttattaagtttagataggaggaagggatagagggagggataaagggagggatagaggaagggatagaataaaagtaaggattagtaa

SEQ ID NO: 16266 - DNA, 96 bp, Aspergillus novofumigatus
  misc_feature: 92
ttaattatagaagataagagaatcagggatagagagaataaggataaaaagagagtagattaattataatataagagagaagaagggtatattttt

SEQ ID NO: 16267 - DNA, 96 bp, Aspergillus novofumigatus
  misc_feature: 92
gggtatatttttaatagaataagagagaagattaaaaaaggaaagaagaaagagtagagaagagaagaaagagtagagaaaagaagaaaggattaa

SEQ ID NO: 16268 - DNA, 96 bp, Aspergillus novofumigatus
  misc_feature: 92
ttaatccttcttttatctctttccttaactcttattctaactcttcttctaacccttactcttactctactcttactcttattctatctcttattc

SEQ ID NO: 16269 - DNA, 96 bp, Aspergillus novofumigatus
  misc_feature: 92
ttaataattctaacccttaccttaatatattaataatttctattttattcctaacccttattctctctcttattattatcttttattttcttttct

SEQ ID NO: 16270 - DNA, 96 bp, Aspergillus novofumigatus
  misc_feature: 92
atatcatattaaccatagttaggagagaggtaggtagcaaggtagacagtaaggtagatagtaaggtagatagtgagataggcagtgaggtaggca

SEQ ID NO: 16271 - DNA, 96 bp, Aspergillus novofumigatus
  misc_feature: 92
actgattcagctaacatactatataaaccaaccgtataatatatatctctgcgcattatggtatactaaaatatatattcattcccaaatatatca

SEQ ID NO: 16272 - DNA, 96 bp, Aspergillus novofumigatus
  misc_feature: 92
tatataagatagagagagttttagtaaagagaagaaataaatataattaaaaatagaagaagaaagggaagaggaaagggaagaggaaaggaaaga

SEQ ID NO: 16273 - DNA, 96 bp, Aspergillus novofumigatus
  misc_feature: 92
tcttctcttctctactctttcttctttccttttttaatcttctctcttattctattaaaaatatacccttcttctctcttatattataattaatct

SEQ ID NO: 16274 - DNA, 96 bp, Aspergillus novofumigatus
  misc_feature: 92
aagagtagagatagatagatataggaaaataaggatttagaaggatttaggaagagagaggatttagaatgaagatagaaagaagagaggagaaga

SEQ ID NO: 16275 - DNA, 96 bp, Aspergillus novofumigatus
  misc_feature: 92
ggaataagaataggagttaagaataagagttagaagaagagataaaaagggttagaagaagaattaggaataaaaataagaataaaaagtggaaga

SEQ ID NO: 16276 - DNA, 96 bp, Aspergillus novofumigatus
  misc_feature: 92
tcttaatctaataaatataaatatatatatctattatctagactaaatcttttctagtaactaaatctaattattatctagcttactagatctctt

SEQ ID NO: 16277 - DNA, 96 bp, Aspergillus novofumigatus
  misc_feature: 92
tctctttcttctcctttctatccctaactcttattctaacccttcttctatctcttcctctaatcctccttctaattcttattctatctctcctta

SEQ ID NO: 16278 - DNA, 96 bp, Aspergillus novofumigatus
  misc_feature: 92
tctcttcttctatctcttcttctaactctccttctacctctccttaatccttcttttattaactcttattctaactcttcttctaacccttactct

SEQ ID NO: 16279 - DNA, 96 bp, Aspergillus novofumigatus
  misc_feature: 92
atagaagataagagaatcagggatagagagaataaggataaaaagagagtagattaattataatataagagagaagaagggtatatttttaataga

SEQ ID NO: 16280 - DNA, 96 bp, Aspergillus novofumigatus
  misc_feature: 92
atagaatcataaggctagtataagttaaatatatttatttcactttaatatacatatttttatatatatatatattaaaatctgcctagatctaga

SEQ ID NO: 16281 - DNA, 96 bp, Aspergillus novofumigatus
  misc_feature: 92
tctaactctttccttcttcccttctattcttaactctctctttctctttcttctcctttctatccctaactcttattctaacccttcttctatctc

SEQ ID NO: 16282 - DNA, 96 bp, Aspergillus novofumigatus
  misc_feature: 92
attagaagggataagagaggagattaagaagagatagaataagagatagataagagatagaataagagtaagagtagagtaagagtaagggttaga

SEQ ID NO: 16283 - DNA, 96 bp, Aspergillus novofumigatus
  misc_feature: 92
ggtttagtttaggggagagttagggagagatagaaggggagatagagggagagatagaagaaggattagaagaagagtaaggaataataagaagga

SEQ ID NO: 16284 - DNA, 96 bp, Aspergillus novofumigatus
  misc_feature: 92
agagattagaatttaaaatagaagtaaaaaaagaggttttaagagattagatagagaagaagaggtaaaagagaatttagggatagattaagagga

SEQ ID NO: 16285 - DNA, 96 bp, Aspergillus novofumigatus
  misc_feature: 92
tcactgcctatctcactatctaccttactatctaccttactgtctaccttgctacctacctctctcctaactatggttaatatgatatatattccc

SEQ ID NO: 16286 - DNA, 96 bp, Aspergillus novofumigatus
  misc_feature: 92
tattactacctctcttactacttaccttactattaaccttactatctactatgatatttatattactatctaccttattacctaccttactattga

SEQ ID NO: 16287 - DNA, 96 bp, Aspergillus novofumigatus
  misc_feature: 92
ataaatcttaatatatatattagtcttatagaatagatatagaactatattctatattacttagctattatctagctattataagaatagaaaata

SEQ ID NO: 16288 - DNA, 96 bp, Aspergillus novofumigatus
  misc_feature: 92
gaagataagagaatcagggatagagagaataaggataaaaagagagtagattaattataatataagagagaagaagggtatatttttaatagaata

SEQ ID NO: 16289 - DNA, 96 bp, Aspergillus novofumigatus
  misc_feature: 92
tattaaccatagttaggagagaggtaggtagcaaggtagacagtaaggtagatagtaaggtagatagtgagataggcagtgaggtaggcagtaagg

SEQ ID NO: 16290 - DNA, 96 bp, Aspergillus novofumigatus
  misc_feature: 92
tattaaattattatttaactttatccttttcttttaattttatctttccttaattttaatttcttcttctctttcttcttctctttcttcttctct

SEQ ID NO: 16291 - DNA, 96 bp, Aspergillus novofumigatus
  misc_feature: 92
tatccatatatcaagtaatagatatatattaggagatcaaggttaattaggattaatatattaagtaaataaatatatatattttaggataccata

SEQ ID NO: 16292 - DNA, 96 bp, Aspergillus novofumigatus
  misc_feature: 92
tatctctttccttaactcttattctaactcttcttctaacccttactcttactctactcttactcttattctatctcttattctatctcttattct

SEQ ID NO: 16293 - DNA, 96 bp, Aspergillus novofumigatus
  misc_feature: 92
aaatcttaatatatatattagtcttatagaatagatatagaactatattctatattacttagctattatctagctattataagaatagaaaatata

SEQ ID NO: 16294 - DNA, 96 bp, Aspergillus novofumigatus
  misc_feature: 92
ctataacttatttccttctcttctcctctcttctttctatctttattctaaatccttctctcttcctaaatccttctaaatccttattttcctata

SEQ ID NO: 16295 - DNA, 96 bp, Aspergillus novofumigatus
  misc_feature: 92
tatagaatcataaggctagtataagttaaatatatttatttcactttaatatacatatttttatatatatatatattaaaatctgcctagatctag

SEQ ID NO: 16296 - DNA, 96 bp, Aspergillus novofumigatus
  misc_feature: 92
tataatctcttactaaaattctaattattcttttttctatatctgactcttctttcttttcttttctttcttcttttctctttcttttctatctat

SEQ ID NO: 16297 - DNA, 96 bp, Aspergillus novofumigatus
  misc_feature: 92
aatatatatattagtcttatagaatagatatagaactatattctatattacttagctattatctagctattataagaatagaaaatatagctacta

SEQ ID NO: 16298 - DNA, 96 bp, Aspergillus novofumigatus
  misc_feature: 92
atagatatatatatttatatttattagattaagataagaagagattaagtatatatatttaaaaaaaaaataagagaaatttagagattagatcta

SEQ ID NO: 16299 - DNA, 96 bp, Aspergillus novofumigatus
  misc_feature: 92
tagataagagatagaataagagtaagagtagagtaagagtaagggttagaagaagagttagaataagagttaataaaagaaggattaaggagaggt

SEQ ID NO: 16300 - DNA, 96 bp, Aspergillus novofumigatus
  misc_feature: 92
taaaagaagctagattatcctattatatatagaatattatagctctatagctataatattttaataagtctatattaatatatagcagctattcta

SEQ ID NO: 16301 - DNA, 96 bp, Aspergillus novofumigatus
  misc_feature: 92
acctctcctaatctcttcttctatctcttcttctaactctccttctacctctccttaatccttcttttattaactcttattctaactcttcttcta

SEQ ID NO: 16302 - DNA, 96 bp, Aspergillus novofumigatus
  misc_feature: 92
tacttcttatatatcttatattcttcttctaatctacttattaaatcctaactttaatcctttcttcttttctctactctttcttctcttctctac

SEQ ID NO: 16303 - DNA, 96 bp, Aspergillus novofumigatus
  misc_feature: 92
agggtaaggatttagattagaagggataagagaggagattaagaagagatagaataagagatagataagagatagaataagagtaagagtagagta

SEQ ID NO: 16304 - DNA, 96 bp, Aspergillus novofumigatus
  misc_feature: 92
tactagtatataagaatatagaatagctgctatatattaatatagacttattaaaatattatagctatagagctataatattctatatataatagg

SEQ ID NO: 16305 - DNA, 96 bp, Aspergillus novofumigatus
  misc_feature: 92
tactaccccttactcttattctatttcttactctccttctaactatcctaacctctcctaatctcttcttctatctcttcttctaactctccttct

SEQ ID NO: 16306 - DNA, 96 bp, Aspergillus novofumigatus
  misc_feature: 92
agataagagatagaataagagtaagagtagagtaagagtaagggttagaagaagagttagaataagagttaataaaagaaggattaaggagaggta

SEQ ID NO: 16307 - DNA, 96 bp, Aspergillus novofumigatus
  misc_feature: 92
taccccttactcttattctatttcttactctccttctaactatcctaacctctcctaatctcttcttctatctcttcttctaactctccttctacc

SEQ ID NO: 16308 - DNA, 96 bp, Aspergillus novofumigatus
  misc_feature: 92
taattatagaagataagagaatcagggatagagagaataaggataaaaagagagtagattaattataatataagagagaagaagggtatattttta

SEQ ID NO: 16309 - DNA, 96 bp, Aspergillus novofumigatus
  misc_feature: 92
taatctcttcttctatctcttcttctaactctccttctacctctccttaatccttcttttattaactcttattctaactcttcttctaacccttac

SEQ ID NO: 16310 - DNA, 96 bp, Aspergillus novofumigatus
  misc_feature: 92
taagacttatactaatagaaaggtaataaatatcttcttaagacttaatataatctatatctctatatattatctaagaaatctagaaagatatta

SEQ ID NO: 16311 - DNA, 96 bp, Aspergillus novofumigatus
  misc_feature: 92
taagggtaaggatttagattagaagggataagagaggagattaagaagagatagaataagagatagataagagatagaataagagtaagagtagag

SEQ ID NO: 16312 - DNA, 96 bp, Aspergillus novofumigatus
  misc_feature: 92
atatattagtcttatagaatagatatagaactatattctatattacttagctattatctagctattataagaatagaaaatatagctactaagtta

SEQ ID NO: 16313 - DNA, 96 bp, Aspergillus novofumigatus
  misc_feature: 92
taacccttactctatcccttatataatctcttactaaaattctaattattcttttttctatatctgactcttctttcttttcttttctttcttctt

SEQ ID NO: 16314 - DNA, 96 bp, Aspergillus novofumigatus
  misc_feature: 92
ggttaatcagtagtaatatataaatgaatatatacattttaggataccataatacgcagagatatatattatacagttagtttatagagtatgtta

SEQ ID NO: 16315 - DNA, 96 bp, Aspergillus novofumigatus
  misc_feature: 92
taaattattatttaactttatccttttcttttaattttatctttccttaattttaatttcttcttctctttcttcttctctttcttcttctctttc

SEQ ID NO: 16316 - DNA, 96 bp, Aspergillus novofumigatus
  misc_feature: 92
taaatcttaatatatatattagtcttatagaatagatatagaactatattctatattacttagctattatctagctattataagaatagaaaatat

SEQ ID NO: 16317 - DNA, 96 bp, Aspergillus novofumigatus
  misc_feature: 92
taaatattataaatcttaatatatatattagtcttatagaatagatatagaactatattctatattacttagctattatctagctattataagaat

SEQ ID NO: 16318 - DNA, 96 bp, Aspergillus novofumigatus
  misc_feature: 92
taaaaataatatatattaaagtatactatacttcttaaactctattaataaaatatatctaatactaaactagaaatatattaagatatactatcc

SEQ ID NO: 16319 - DNA, 96 bp, Aspergillus novofumigatus
  misc_feature: 92
gcctccctcactatctcactcactatctcactcactgccttacttactatctcactcactgtcttactcactacctccctcactatcttacttact

SEQ ID NO: 16320 - DNA, 96 bp, Aspergillus novofumigatus
  misc_feature: 92
ctattcctgatcctattcctgatcctattcctgatcctattcctgatcctattcctgatcctattcctgatcctattcctgatcctattcctgatc

SEQ ID NO: 16321 - DNA, 96 bp, Aspergillus novofumigatus
  misc_feature: 92
ctaaaaataatatatattaaagtatactatacttcttaaactctattaataaaatatatctaatactaaactagaaatatattaagatatactatc

SEQ ID NO: 16322 - DNA, 96 bp, Aspergillus novofumigatus
  misc_feature: 92
gatagatataggaaaataaggatttagaaggatttaggaagagagaggatttagaatgaagatagaaagaagagaggagaagagaaggaaataagt

SEQ ID NO: 16323 - DNA, 96 bp, Aspergillus novofumigatus
  misc_feature: 92
gagtattgaagagagttagggtttgagtaagaaagaggtaaggagagatagaataagaattagaaggaggattagaggaagagatagaagaagggt

SEQ ID NO: 16324 - DNA, 96 bp, Aspergillus novofumigatus
  misc_feature: 92
cttcttatatatcttatattcttcttctaatctacttattaaatcctaactttaatcctttcttcttttctctactctttcttctcttctctactc

SEQ ID NO: 16325 - DNA, 96 bp, Aspergillus novofumigatus
  misc_feature: 92
atctcttcttctatctcttcttctaactctccttctacctctccttaatccttcttttattaactcttattctaactcttcttctaacccttactc

SEQ ID NO: 16326 - DNA, 96 bp, Aspergillus novofumigatus
  misc_feature: 92
gaggagggaggcagtgagataggcagtaaggcaggcagcaagcaaagcagtgagcaaggcagtgagtaaggcagtcagcaagatagtgagtgagat

SEQ ID NO: 16327 - DNA, 96 bp, Aspergillus novofumigatus
  misc_feature: 92
acacttactaccccttactcttattctatttcttactctccttctaactatcctaacctctcctaatctcttcttctatctcttcttctaactctc

SEQ ID NO: 16328 - DNA, 96 bp, Aspergillus novofumigatus
  misc_feature: 92
ccttactcttattctatttcttactctccttctaactatcctaacctctcctaatctcttcttctatctcttcttctaactctccttctacctctc

SEQ ID NO: 16329 - DNA, 96 bp, Aspergillus novofumigatus
  misc_feature: 92
gactgaggagggaggcagtgagataggcagtaaggcaggcagcaagcaaagcagtgagcaaggcagtgagtaaggcagtcagcaagatagtgagtg

SEQ ID NO: 16330 - DNA, 96 bp, Aspergillus novofumigatus
  misc_feature: 92
ctgatcctattcctgatcctattcctgatcctattcctgatcctattcctgatcctattcctgatcctattcctgatcctattcctgatcctattc

SEQ ID NO: 16331 - DNA, 96 bp, Aspergillus novofumigatus
  misc_feature: 92
atctatctcttattctatctcttcttaatctcctctcttatcccttctaatctaaatccttacccttactcttatcctcaccctctttatcccttc

SEQ ID NO: 16332 - DNA, 96 bp, Aspergillus novofumigatus
  misc_feature: 92
atatataagatagagagagttttagtaaagagaagaaataaatataattaaaaatagaagaagaaagggaagaggaaagggaagaggaaaggaaag

SEQ ID NO: 16333 - DNA, 96 bp, Aspergillus novofumigatus
  misc_feature: 92
ctttaataattctaacccttaccttaatatattaataatttctattttattcctaacccttattctctctcttattattatcttttattttctttt

SEQ ID NO: 16334 - DNA, 96 bp, Aspergillus novofumigatus
  misc_feature: 92
aagagatagaaggagagatagaaggagagatagaaggagagatagaaggagagatagaaggagagatagaaggagagatagaaggagagttagaag

SEQ ID NO: 16335 - DNA, 96 bp, Aspergillus novofumigatus
  misc_feature: 92
aggaataagaataggagttaagaataagagttagaagaagagataaaaagggttagaagaagaattaggaataaaaataagaataaaaagtggaag

SEQ ID NO: 16336 - DNA, 96 bp, Aspergillus novofumigatus
  misc_feature: 92
cttatataatctcttactaaaattctaattattcttttttctatatctgactcttctttcttttcttttctttcttcttttctctttcttttctat

SEQ ID NO: 16337 - DNA, 96 bp, Aspergillus novofumigatus
  misc_feature: 92
cttatactaatagaaaggtaataaatatcttcttaagacttaatataatctatatctctatatattatctaagaaatctagaaagatattacttat

SEQ ID NO: 16338 - DNA, 96 bp, Aspergillus novofumigatus
  misc_feature: 92
agtaagggttattaagtttagataggaggaagggatagagggagggataaagggagggatagaggaagggatagaataaaagtaaggattagtaag

SEQ ID NO: 16339 - DNA, 96 bp, Aspergillus novofumigatus
  misc_feature: 92
cttaactcttattctaactcttcttctaacccttactcttactctactcttactcttattctatctcttattctatctcttattctatctcttatt

SEQ ID NO: 16340 - DNA, 96 bp, Aspergillus novofumigatus
  misc_feature: 92
ctattctataaaagaagctagattatcctattatatatagaatattatagctctatagctataatattttaataagtctatattaatatatagcag

SEQ ID NO: 16341 - DNA, 96 bp, Aspergillus novofumigatus
  misc_feature: 92
ctctttcttctcttctctactctttcttctttccttttttaatcttctctcttattctattaaaaatatacccttcttctctcttatattataatt

SEQ ID NO: 16342 - DNA, 96 bp, Aspergillus novofumigatus
  misc_feature: 92
ctcttcttctatctcttcttctaactctccttctacctctccttaatccttcttttattaactcttattctaactcttcttctaacccttactctt

SEQ ID NO: 16343 - DNA, 96 bp, Aspergillus novofumigatus
  misc_feature: 92
ctctcttattattatcttttattttcttttcttttctattccctttcctcttccctttcctcttccctttcttctcctatttttaattatatttat

SEQ ID NO: 16344 - DNA, 96 bp, Aspergillus novofumigatus
  misc_feature: 92
ctctctctttctctttcttctcctttctatccctaactcttattctaacccttcttctatctcttcctctaatcctccttctaattcttattctat

SEQ ID NO: 16345 - DNA, 96 bp, Aspergillus novofumigatus
  misc_feature: 92
ctcctttctatccctaactcttattctaacccttcttctatctcttcctctaatcctccttctaattcttattctatctctccttacctctttctt

SEQ ID NO: 16346 - DNA, 96 bp, Aspergillus novofumigatus
  misc_feature: 92
ctccttctaactctccttctaactctccttctatctctccttctatctctccttctatctctccttctatctctccttctatctctccttctatct

SEQ ID NO: 16347 - DNA, 96 bp, Aspergillus novofumigatus
  misc_feature: 92
agaagaagagattaggagaggttaggatagttagaaggagagtaagaaatagaataagagtaaggggtagtaagtgtagatagaagagagagatag

SEQ ID NO: 16348 - DNA, 96 bp, Aspergillus novofumigatus
  misc_feature: 92
attagttagtatccatatatcaagtaatagatatatattaggagatcaaggttaattaggattaatatattaagtaaataaatatatatattttag

SEQ ID NO: 16349 - DNA, 96 bp, Aspergillus novofumigatus
  misc_feature: 92
ccttactctatcccttatataatctcttactaaaattctaattattcttttttctatatctgactcttctttcttttcttttctttcttcttttct

SEQ ID NO: 16350 - DNA, 96 bp, Aspergillus novofumigatus
  misc_feature: 92
aaccatagttaggagagaggtaggtagcaaggtagacagtaaggtagatagtaaggtagatagtgagataggcagtgaggtaggcagtaaggcagg

SEQ ID NO: 16351 - DNA, 96 bp, Aspergillus novofumigatus
  misc_feature: 92
cctcttcttaatccttcttttatctctttccttaactcttattctaactcttcttctaacccttactcttactctactcttactcttattctatct

SEQ ID NO: 16352 - DNA, 96 bp, Aspergillus novofumigatus
  misc_feature: 92
attaattatagaagataagagaatcagggatagagagaataaggataaaaagagagtagattaattataatataagagagaagaagggtatatttt

SEQ ID NO: 16353 - DNA, 96 bp, Aspergillus novofumigatus
  misc_feature: 92
attaaattattatttaactttatccttttcttttaattttatctttccttaattttaatttcttcttctctttcttcttctctttcttcttctctt

SEQ ID NO: 16354 - DNA, 96 bp, Aspergillus novofumigatus
  misc_feature: 92
atcctaagacttatactaatagaaaggtaataaatatcttcttaagacttaatataatctatatctctatatattatctaagaaatctagaaagat

SEQ ID NO: 16355 - DNA, 96 bp, Aspergillus novofumigatus
  misc_feature: 92
atcttaatctaataaatataaatatatatatctattatctagactaaatcttttctagtaactaaatctaattattatctagcttactagatctct

SEQ ID NO: 16356 - DNA, 96 bp, Aspergillus novofumigatus
  misc_feature: 92
agtttctagtaaatattataaatcttaatatatatattagtcttatagaatagatatagaactatattctatattacttagctattatctagctat

SEQ ID NO: 16357 - DNA, 96 bp, Aspergillus novofumigatus
  misc_feature: 92
ataatctcttactaaaattctaattattcttttttctatatctgactcttctttcttttcttttctttcttcttttctctttcttttctatctatt

SEQ ID NO: 16358 - DNA, 96 bp, Aspergillus novofumigatus
  misc_feature: 92
ataaaagaagctagattatcctattatatatagaatattatagctctatagctataatattttaataagtctatattaatatatagcagctattct

SEQ ID NO: 16359 - DNA, 96 bp, Aspergillus novofumigatus
  misc_feature: 92
agtcttatagaatagatatagaactatattctatattacttagctattatctagctattataagaatagaaaatatagctactaagttagagccct

SEQ ID NO: 16360 - DNA, 96 bp, Aspergillus novofumigatus
  misc_feature: 92
agtattgaagagagttagggtttgagtaagaaagaggtaaggagagatagaataagaattagaaggaggattagaggaagagatagaagaagggtt

SEQ ID NO: 16361 - DNA, 96 bp, Aspergillus novofumigatus
  misc_feature: 92
accccttactcttattctatttcttactctccttctaactatcctaacctctcctaatctcttcttctatctcttcttctaactctccttctacct

SEQ ID NO: 16362 - DNA, 96 bp, Aspergillus novofumigatus
  misc_feature: 92
acttatagaactatcttaaaagtcctagaatactagtatataagaatatagaatagctgctatatattaatatagacttattaaaatattatagct

SEQ ID NO: 16363 - DNA, 96 bp, Aspergillus novofumigatus
  misc_feature: 92
agattcagtattataagagtattaataagtaaattaatattatattaataaggaaaaaatattatattaataatttaatatcctaatttaatatct

SEQ ID NO: 16364 - DNA, 96 bp, Aspergillus novofumigatus
  misc_feature: 92
agaataggagttaagaataagagttagaagaagagataaaaagggttagaagaagaattaggaataaaaataagaataaaaagtggaagaatagtt

SEQ ID NO: 16365 - DNA, 96 bp, Aspergillus novofumigatus
  misc_feature: 92
aacccttactctatcccttatataatctcttactaaaattctaattattcttttttctatatctgactcttctttcttttcttttctttcttcttt

SEQ ID NO: 16366 - DNA, 96 bp, Aspergillus novofumigatus
  misc_feature: 91
ttataaatcttaatatatatattagtcttatagaatagatatagaactatattctatattacttagctattatctagctattataagaatagaaaa

SEQ ID NO: 16367 - DNA, 96 bp, Aspergillus novofumigatus
  misc_feature: 91
ttttatctctttccttaactcttattctaactcttcttctaacccttactcttactctactcttactcttattctatctcttattctatctcttat

SEQ ID NO: 16368 - DNA, 96 bp, Aspergillus novofumigatus
  misc_feature: 91
ttttacttcttatatatcttatattcttcttctaatctacttattaaatcctaactttaatcctttcttcttttctctactctttcttctcttctc

SEQ ID NO: 16369 - DNA, 96 bp, Aspergillus novofumigatus
  misc_feature: 91
aaatataattaaaaatagaagaagaaagggaagaggaaagggaagaggaaaggaaagaggaaagggaagaggaaagggaatagaaaagaaaagaaa

SEQ ID NO: 16370 - DNA, 96 bp, Aspergillus novofumigatus
  misc_feature: 91
tttcttctcttctctactctttcttctttccttttttaatcttctctcttattctattaaaaatatacccttcttctctcttatattataattaat

SEQ ID NO: 16371 - DNA, 96 bp, Aspergillus novofumigatus
  misc_feature: 91
tttcttctcctttctatccctaactcttattctaacccttcttctatctcttcctctaatcctccttctaattcttattctatctctccttacctc

SEQ ID NO: 16372 - DNA, 96 bp, Aspergillus novofumigatus
  misc_feature: 91
tttataaaccactgattcggctaacatactatataaaccaaccgtataatatatatctctgcgcattatggtatactaaaatatatattcattccc

SEQ ID NO: 16373 - DNA, 96 bp, Aspergillus novofumigatus
  misc_feature: 91
ctgattcagctaacatactatataaaccaaccgtataatatatatctctgcgcattatggtatactaaaatatatattcattcccaaatatatcaa

SEQ ID NO: 16374 - DNA, 96 bp, Aspergillus novofumigatus
  misc_feature: 91
ttgagtaagaaagaggtaaggagagatagaataagaattagaaggaggattagaggaagagatagaagaagggttagaataagagttagggataga

SEQ ID NO: 16375 - DNA, 96 bp, Aspergillus novofumigatus
  misc_feature: 91
ttcttttatctctttccttaactcttattctaactcttcttctaacccttactcttactctactcttactcttattctatctcttattctatctct

SEQ ID NO: 16376 - DNA, 96 bp, Aspergillus novofumigatus
  misc_feature: 91
ttcttctcttctctactctttcttctttccttttttaatcttctctcttattctattaaaaatatacccttcttctctcttatattataattaatc

SEQ ID NO: 16377 - DNA, 96 bp, Aspergillus novofumigatus
  misc_feature: 91
gaataagaataggagttaagaataagagttagaagaagagataaaaagggttagaagaagaattaggaataaaaataagaataaaaagtggaagaa

SEQ ID NO: 16378 - DNA, 96 bp, Aspergillus novofumigatus
  misc_feature: 91
ttcttattccttctctcctaaaaacttttcttctaactcttattctaactctccttcttattattccttactcttcttctaatccttcttctatct

SEQ ID NO: 16379 - DNA, 96 bp, Aspergillus novofumigatus
  misc_feature: 91
ttagagaagggaaaagagtatataagttaatttagaaagaaaagaatagaaggtaaagatagataagatagaaagagtttaagtaaagggtaagaa

SEQ ID NO: 16380 - DNA, 96 bp, Aspergillus novofumigatus
  misc_feature: 91
ttcttaatccttcttttatctctttccttaactcttattctaactcttcttctaacccttactcttactctactcttactcttattctatctctta

SEQ ID NO: 16381 - DNA, 96 bp, Aspergillus novofumigatus
  misc_feature: 91
ttctctttcttctcctttctatccctaactcttattctaacccttcttctatctcttcctctaatcctccttctaattcttattctatctctcctt

SEQ ID NO: 16382 - DNA, 96 bp, Aspergillus novofumigatus
  misc_feature: 91
ttctcctttctatccctaactcttattctaacccttcttctatctcttcctctaatcctccttctaattcttattctatctctccttacctctttc

SEQ ID NO: 16383 - DNA, 96 bp, Aspergillus novofumigatus
  misc_feature: 91
ttctccctttttttacttcttatatatcttatattcttcttctaatctacttattaaatcctaactttaatcctttcttcttttctctactctttc

SEQ ID NO: 16384 - DNA, 96 bp, Aspergillus novofumigatus
  misc_feature: 91
ttctatttcttactctccttctaactatcctaacctctcctaatctcttcttctatctcttcttctaactctccttctacctctccttaatccttc

SEQ ID NO: 16385 - DNA, 96 bp, Aspergillus novofumigatus
  misc_feature: 91
tattataaatcttaatatatatattagtcttatagaatagatatagaactatattctatattacttagctattatctagctattataagaatagaa

SEQ ID NO: 16386 - DNA, 96 bp, Aspergillus novofumigatus
  misc_feature: 91
gagtagagtaagagtaagggttagaagaagagttagaataagagttaaggaaagagataaaagaaggattaagaagaggtagaagaagagttagaa

SEQ ID NO: 16387 - DNA, 96 bp, Aspergillus novofumigatus
  misc_feature: 91
ttccttaactcttattctaactcttcttctaacccttactcttactctactcttactcttattctatctcttattctatctcttattctatctctt

SEQ ID NO: 16388 - DNA, 96 bp, Aspergillus novofumigatus
  misc_feature: 91
ttagtcttatagaatagatatagaactatattctatattacttagctattatctagctattataagaatagaaaatatagctactaagttagagcc

SEQ ID NO: 16389 - DNA, 96 bp, Aspergillus novofumigatus
  misc_feature: 91
agagtcttccctataggacctatatttattatagtaataaataaaataataatacttataattataataaagagatagactttagtaaatacctaa

SEQ ID NO: 16390 - DNA, 96 bp, Aspergillus novofumigatus
  misc_feature: 91
ttagaataaagatagaaagaagagaggagaagagaaggaaataagttataggatattaatttagagagatttaagtaggtataaggttatagaaag

SEQ ID NO: 16391 - DNA, 96 bp, Aspergillus novofumigatus
  misc_feature: 91
ttactcttattctatttcttactctccttctaactatcctaacctctcctaatctcttcttctatctcttcttctaactctccttctacctctcct

SEQ ID NO: 16392 - DNA, 96 bp, Aspergillus novofumigatus
  misc_feature: 91
gggtaaggatttagattagaagggataagagaggagattaagaagagatagaataagagatagataagagatagaataagagtaagagtagagtaa

SEQ ID NO: 16393 - DNA, 96 bp, Aspergillus novofumigatus
  misc_feature: 91
ttaagtttctagtaaatattataaatcttaatatatatattagtcttatagaatagatatagaactatattctatattacttagctattatctagc

SEQ ID NO: 16394 - DNA, 96 bp, Aspergillus novofumigatus
  misc_feature: 91
tggtatcctaaaatatatatatttatttacttaatatattaatcctaattaaccttgatctcctaatatatatctattacttgatatatggatact

SEQ ID NO: 16395 - DNA, 96 bp, Aspergillus novofumigatus
  misc_feature: 91
ctgtcttgcttgctgcctccctcactatctcactcactatctcactcactgccttacttactatctcactcactgtcttactcactacctccctca

SEQ ID NO: 16396 - DNA, 96 bp, Aspergillus novofumigatus
  misc_feature: 91
tgaggagggaggcagtgagataggcagtaaggcaggcagcaagcaaagcagtgagcaaggcagtgagtaaggcagtcagcaagatagtgagtgaga

SEQ ID NO: 16397 - DNA, 96 bp, Aspergillus novofumigatus
  misc_feature: 91
tctttcttcttattcttcttattcttcctctctttcttaccctttacttaaactctttctatcttatctatctttaccttctattcttttctttct

SEQ ID NO: 16398 - DNA, 96 bp, Aspergillus novofumigatus
  misc_feature: 91
ggtaaagatagataagatagaaagagtttaagtaaagggtaagaaagagaagaagaataagaagaaagagaagaaagagaagaaagagaagaaaga

SEQ ID NO: 16399 - DNA, 96 bp, Aspergillus novofumigatus
  misc_feature: 91
tcttcttctatctcttcttctaactctccttctacctctccttaatccttcttttattaactcttattctaactcttcttctaacccttactctta

SEQ ID NO: 16400 - DNA, 96 bp, Aspergillus novofumigatus
  misc_feature: 91
gagtaagagtaagggttagaagaagagttagaataagagttaaggaaagagataaaagaaggattaagaagaggtagaagaagagttagaagaaga

SEQ ID NO: 16401 - DNA, 96 bp, Aspergillus novofumigatus
  misc_feature: 91
tcttcttctaacccttactcttactctactcttactcttattctatctcttatctatctcttattctatctcttcttaatctcctctcttatccct

SEQ ID NO: 16402 - DNA, 96 bp, Aspergillus novofumigatus
  misc_feature: 91
tcttcttataactcttcttctatccttactaacccttaccctctcctactatctcttctttctctaattcttttcttccctctttttatccctctt

SEQ ID NO: 16403 - DNA, 96 bp, Aspergillus novofumigatus
  misc_feature: 91
tcttattctatttcttactctccttctaactatcctaacctctcctaatctcttcttctatctcttcttctaactctccttctacctctccttaat

SEQ ID NO: 16404 - DNA, 96 bp, Aspergillus novofumigatus
  misc_feature: 91
gataagagaatcagggatagagagaataaggataaaaagagagtagattaattataatataagagagaagaagggtatatttttaatagaataaga

SEQ ID NO: 16405 - DNA, 96 bp, Aspergillus novofumigatus
  misc_feature: 91
tcttaatccttcttttatctctttccttaactcttattctaactcttcttctaacccttactcttactctactcttactcttattctatctcttat

SEQ ID NO: 16406 - DNA, 96 bp, Aspergillus novofumigatus
  misc_feature: 91
aatagaaggtaaagatagataagatagaaagagtttaagtaaagggtaagaaagagaagaagaataagaagaaagagaagaaagagaagaaagaga

SEQ ID NO: 16407 - DNA, 96 bp, Aspergillus novofumigatus
  misc_feature: 91
gagtagagatagatagatataggaaaataaggatttagaaggatttaggaagagagaggatttagaatgaagatagaaagaagagaggagaagaga

SEQ ID NO: 16408 - DNA, 96 bp, Aspergillus novofumigatus
  misc_feature: 91
tctcttactaaaattctaattattcttttttctatatctgactcttctttcttttcttttctttcttcttttctctttcttttctatctattatct

SEQ ID NO: 16409 - DNA, 96 bp, Aspergillus novofumigatus
  misc_feature: 91
tctctctttctctttcttctcctttctatccctaactcttattctaacccttcttctatctcttcctctaatcctccttctaattcttattctatc

SEQ ID NO: 16410 - DNA, 96 bp, Aspergillus novofumigatus
  misc_feature: 91
gaagagatagtaggagagggtaagggttagtaaggatagaagaagagttataagaagaggaagagggaggggaagagagagagaaagagttagaga

SEQ ID NO: 16411 - DNA, 96 bp, Aspergillus novofumigatus
  misc_feature: 91
tctatttcttactctccttctaactatcctaacctctcctaatctcttcttctatctcttcttctaactctccttctacctctccttaatccttct

SEQ ID NO: 16412 - DNA, 96 bp, Aspergillus novofumigatus
  misc_feature: 91
atattataaatcttaatatatatattagtcttatagaatagatatagaactatattctatattacttagctattatctagctattataagaataga

SEQ ID NO: 16413 - DNA, 96 bp, Aspergillus novofumigatus
  misc_feature: 91
tctattaaattattatttaactttatccttttcttttaattttatctttccttaattttaatttcttcttctctttcttcttctctttcttcttct

SEQ ID NO: 16414 - DNA, 96 bp, Aspergillus novofumigatus
  misc_feature: 91
tctagtaaatattataaatcttaatatatatattagtcttatagaatagatatagaactatattctatattacttagctattatctagctattata

SEQ ID NO: 16415 - DNA, 96 bp, Aspergillus novofumigatus
  misc_feature: 91
attaaggaaagataaaattaaaagaaaaggataaagttaaataataatttaatagaatgaattaggaatgtagtaaggattaatagaaatattaga

SEQ ID NO: 16416 - DNA, 96 bp, Aspergillus novofumigatus
  misc_feature: 91
tccttctaactctccttctaactctccttctatctctccttctatctctccttctatctctccttctatctctccttctatctctccttctatctc

SEQ ID NO: 16417 - DNA, 96 bp, Aspergillus novofumigatus
  misc_feature: 91
agaataaaagtaagggttattaagtttagataggaggaagggatagagggagggataaagggagggatagaggaagggatagaataaaagtaagga

SEQ ID NO: 16418 - DNA, 96 bp, Aspergillus novofumigatus
  misc_feature: 91
tccttaactcttattctaactcttcttctaacccttactcttactctactcttactcttattctatctcttattctatctcttattctatctctta

SEQ ID NO: 16419 - DNA, 96 bp, Aspergillus novofumigatus
  misc_feature: 91
tcctataacttatttccttctcttctcctctcttctttctatctttattctaaatccttctctcttcctaaatccttctaaatccttattttccta

SEQ ID NO: 16420 - DNA, 96 bp, Aspergillus novofumigatus
  misc_feature: 91
cctataggacctatatttattatagtaataaataaaataataatacttataattataataaagagatagactttagtaaatacctaaatagtagga

SEQ ID NO: 16421 - DNA, 96 bp, Aspergillus novofumigatus
  misc_feature: 91
tcctaatctcttcttctatctcttcttctaactctccttctacctctccttaatccttcttttattaactcttattctaactcttcttctaaccct

SEQ ID NO: 16422 - DNA, 96 bp, Aspergillus novofumigatus
  misc_feature: 91
tcctaagacttatactaatagaaaggtaataaatatcttcttaagacttaatataatctatatctctatatattatctaagaaatctagaaagata

SEQ ID NO: 16423 - DNA, 96 bp, Aspergillus novofumigatus
  misc_feature: 91
gggaggcagtgagataggcagtaaggcaggcagcaagcaaagcagtgagcaaggcagtgagtaaggcagtcagcaagatagtgagtgagatagtga

SEQ ID NO: 16424 - DNA, 96 bp, Aspergillus novofumigatus
  misc_feature: 91
tattgaagagagttagggtttgagtaagaaagaggtaaggagagatagaataagaattagaaggaggattagaggaagagatagaagaagggttag

SEQ ID NO: 16425 - DNA, 96 bp, Aspergillus novofumigatus
  misc_feature: 91
tattcttattccttctctcctaaaaacttttcttctaactcttattctaactctccttcttattattccttactcttcttctaatccttcttctat

SEQ ID NO: 16426 - DNA, 96 bp, Aspergillus novofumigatus
  misc_feature: 91
tattctatttcttactctccttctaactatcctaacctctcctaatctcttcttctatctcttcttctaactctccttctacctctccttaatcct

SEQ ID NO: 16427 - DNA, 96 bp, Aspergillus novofumigatus
  misc_feature: 91
tattctatctcttcttaatctcctctcttatcccttctaatctaaatccttacccttactcttatcctcaccctctttatcccttctaaactaaat

SEQ ID NO: 16428 - DNA, 96 bp, Aspergillus novofumigatus
  misc_feature: 91
tattctataaaagaagctagattatcctattatatatagaatattatagctctatagctataatattttaataagtctatattaatatatagcagc

SEQ ID NO: 16429 - DNA, 96 bp, Aspergillus novofumigatus
  misc_feature: 91
tatcttaatctaataaatataaatatatatatctattatctagactaaatcttttctagtaactaaatctaattattatctagcttactagatctc

SEQ ID NO: 16430 - DNA, 96 bp, Aspergillus novofumigatus
  misc_feature: 91
tatatattagtcttatagaatagatatagaactatattctatattacttagctattatctagctattataagaatagaaaatatagctactaagtt

SEQ ID NO: 16431 - DNA, 96 bp, Aspergillus novofumigatus
  misc_feature: 91
tatagaagataagagaatcagggatagagagaataaggataaaaagagagtagattaattataatataagagagaagaagggtatatttttaatag

SEQ ID NO: 16432 - DNA, 96 bp, Aspergillus novofumigatus
  misc_feature: 91
tataaatcttaatatatatattagtcttatagaatagatatagaactatattctatattacttagctattatctagctattataagaatagaaaat

SEQ ID NO: 16433 - DNA, 96 bp, Aspergillus novofumigatus
  misc_feature: 91
aagggaagtttagtattattatataatattattcttatttttcttatagtaaattaattactatactatatttacctagtatatttatatctacta

SEQ ID NO: 16434 - DNA, 96 bp, Aspergillus novofumigatus
  misc_feature: 91
tagtaatttaaaagataataataagaattactttatatatatatatttatatgtaagtatataagaaggataatttatatagattagtttagtagt

SEQ ID NO: 16435 - DNA, 96 bp, Aspergillus novofumigatus
  misc_feature: 91
tagtaaatattataaatcttaatatatatattagtcttatagaatagatatagaactatattctatattacttagctattatctagctattataag

SEQ ID NO: 16436 - DNA, 96 bp, Aspergillus novofumigatus
  misc_feature: 91
cttatagaactatcttaaaagtcctagaatactagtatataagaatatagaatagctgctatatattaatatagacttattaaaatattatagcta

SEQ ID NO: 16437 - DNA, 96 bp, Aspergillus novofumigatus
  misc_feature: 91
aagtttctagtaaatattataaatcttaatatatatattagtcttatagaatagatatagaactatattctatattacttagctattatctagcta

SEQ ID NO: 16438 - DNA, 96 bp, Aspergillus novofumigatus
  misc_feature: 91
tagattcagtattataagagtattaataagtaaattaatattatattaataaggaaaaaatattatattaataatttaatatcctaatttaatatc

SEQ ID NO: 16439 - DNA, 96 bp, Aspergillus novofumigatus
  misc_feature: 91
tagatatatatatttatatttattagattaagataagaagagattaagtatatatatttaaaaaaaaaataagagaaatttagagattagatctag

SEQ ID NO: 16440 - DNA, 96 bp, Aspergillus novofumigatus
  misc_feature: 91
tagaataagagtaagagtagagtaagagtaagggttagaagaagagttagaataagagttaataaaagaaggattaaggagaggtagaaggagagt

SEQ ID NO: 16441 - DNA, 96 bp, Aspergillus novofumigatus
  misc_feature: 91
tactcttattctatttcttactctccttctaactatcctaacctctcctaatctcttcttctatctcttcttctaactctccttctacctctcctt

SEQ ID NO: 16442 - DNA, 96 bp, Aspergillus novofumigatus
  misc_feature: 91
aaagtaagggttattaagtttagataggaggaagggatagagggagggataaagggagggatagaggaagggatagaataaaagtaaggattagta

SEQ ID NO: 16443 - DNA, 96 bp, Aspergillus novofumigatus
  misc_feature: 91
gatagtaatttaaaagataataataagaattactttatatatatatatttatatgtaagtatataagaaggataatttatatagattagtttagta

SEQ ID NO: 16444 - DNA, 96 bp, Aspergillus novofumigatus
  misc_feature: 91
taatctcttactaaaattctaattattcttttttctatatctgactcttctttcttttcttttctttcttcttttctctttcttttctatctatta

SEQ ID NO: 16445 - DNA, 96 bp, Aspergillus novofumigatus
  misc_feature: 91
ctaatctcttcttctatctcttcttctaactctccttctacctctccttaatccttcttttattaactcttattctaactcttcttctaaccctta

SEQ ID NO: 16446 - DNA, 96 bp, Aspergillus novofumigatus
  misc_feature: 91
taactcttattctaactcttcttctaacccttactcttactctactcttactcttattctatctcttattctatctcttattctatctcttattct

SEQ ID NO: 16447 - DNA, 96 bp, Aspergillus novofumigatus
  misc_feature: 91
taactctccttctaactctccttctatctctccttctatctctccttctatctctccttctatctctccttctatctctccttctatctctccttc

SEQ ID NO: 16448 - DNA, 96 bp, Aspergillus novofumigatus
  misc_feature: 91
gtattgaagagagttagggtttgagtaagaaagaggtaaggagagatagaataagaattagaaggaggattagaggaagagatagaagaagggtta

SEQ ID NO: 16449 - DNA, 96 bp, Aspergillus novofumigatus
  misc_feature: 91
aggatttagaaggatttaggaagagagaaggatttagaataaagatagaaagaagagaggagaagagaaggaaataagttataggatattaattta

SEQ ID NO: 16450 - DNA, 96 bp, Aspergillus novofumigatus
  misc_feature: 91
gaagatagtaatttaaaagataataataagaattactttatatatatatatttatatgtaagtatataagaaggataatttatatagattagttta

SEQ ID NO: 16451 - DNA, 96 bp, Aspergillus novofumigatus
  misc_feature: 91
gattagttagtatccatatatcaagtaatagatatatattaggagatcaaggttaattaggattaatatattaagtaaataaatatatatatttta

SEQ ID NO: 16452 - DNA, 96 bp, Aspergillus novofumigatus
  misc_feature: 91
ctataaagatttagattaaataattatagctaatagaggattataataatataatttatagatactatctcctatatataagatataaacttttta

SEQ ID NO: 16453 - DNA, 96 bp, Aspergillus novofumigatus
  misc_feature: 91
ctctcctaatctcttcttctatctcttcttctaactctccttctacctctccttaatccttcttttattaactcttattctaactcttcttctaac

SEQ ID NO: 16454 - DNA, 96 bp, Aspergillus novofumigatus
  misc_feature: 91
attactacctctcttactacttaccttactattaaccttactatctactatgatatttatattactatctaccttattacctaccttactattgac

SEQ ID NO: 16455 - DNA, 96 bp, Aspergillus novofumigatus
  misc_feature: 91
gtaatttaaaagataataataagaattactttatatatatatatttatatgtaagtatataagaaggataatttatatagattagtttagtagttt

SEQ ID NO: 16456 - DNA, 96 bp, Aspergillus novofumigatus
  misc_feature: 91
gtaagagtagagtaagagtaagggttagaagaagagttagaataagagttaaggaaagagataaaagaaggattaagaagaggtagaagaagagtt

SEQ ID NO: 16457 - DNA, 96 bp, Aspergillus novofumigatus
  misc_feature: 91
ctcctaatctcttcttctatctcttcttctaactctccttctacctctccttaatccttcttttattaactcttattctaactcttcttctaaccc

SEQ ID NO: 16458 - DNA, 96 bp, Aspergillus novofumigatus
  misc_feature: 91
cgaccggttccctcggatctccaccctccatgggaccacgccagttggcggtccgagatggccgggcgcgcgccctgaccggcagcaggggccccc

SEQ ID NO: 16459 - DNA, 96 bp, Aspergillus novofumigatus
  misc_feature: 91
caaactaactgtataatatatatctctgcgcattatggtatcctaaaatatatatattcattcattaatatatcaatgctgatcgacctgatctcc

SEQ ID NO: 16460 - DNA, 96 bp, Aspergillus novofumigatus
  misc_feature: 91
cttactcttattctatttcttactctccttctaactatcctaacctctcctaatctcttcttctatctcttcttctaactctccttctacctctcc

SEQ ID NO: 16461 - DNA, 96 bp, Aspergillus novofumigatus
  misc_feature: 91
atttataaaccactgattcggctaacatactatataaaccaaccgtataatatatatctctgcgcattatggtatactaaaatatatattcattcc

SEQ ID NO: 16462 - DNA, 96 bp, Aspergillus novofumigatus
  misc_feature: 91
gatttagattaaataattatagctaatagaggattataataatataatttatagatactatctcctatatataagatataaactttttaaatatag

SEQ ID NO: 16463 - DNA, 96 bp, Aspergillus novofumigatus
  misc_feature: 91
gattcagtattataagagtattaataagtaaattaatattatattaataaggaaaaaatattatattaataatttaatatcctaatttaatatctt

SEQ ID NO: 16464 - DNA, 96 bp, Aspergillus novofumigatus
  misc_feature: 91
cttatcttaatctaataaatataaatatatatatctattatctagactaaatcttttctagtaactaaatctaattattatctagcttactagatc

SEQ ID NO: 16465 - DNA, 96 bp, Aspergillus novofumigatus
  misc_feature: 91
acctcttcttaatccttcttttatctctttccttaactcttattctaactcttcttctaacccttactcttactctactcttactcttattctatc

SEQ ID NO: 16466 - DNA, 96 bp, Aspergillus novofumigatus
  misc_feature: 91
attcttattccttctctcctaaaaacttttcttctaactcttattctaactctccttcttattattccttactcttcttctaatccttcttctatc

SEQ ID NO: 16467 - DNA, 96 bp, Aspergillus novofumigatus
  misc_feature: 91
ccctctatctcttttactaactctccttcttcttctaactcttatctctaactctttctctctctcttcccctccctcttcctcttcttataactc

SEQ ID NO: 16468 - DNA, 96 bp, Aspergillus novofumigatus
  misc_feature: 91
gagatagataagagatagaataagagtaagagtagagtaagagtaagggttagaagaagagttagaataagagttaataaaagaaggattaaggag

SEQ ID NO: 16469 - DNA, 96 bp, Aspergillus novofumigatus
  misc_feature: 91
gagaagatagtaatttaaaagataataataagaattactttatatatatatatttatatgtaagtatataagaaggataatttatatagattagtt

SEQ ID NO: 16470 - DNA, 96 bp, Aspergillus novofumigatus
  misc_feature: 91
aaaagaggttttaagagattagatagagaagaagaggtaaaagagaatttagggatagattaagaggagagaagaaggagtaataagagtagaaag

SEQ ID NO: 16471 - DNA, 96 bp, Aspergillus novofumigatus
  misc_feature: 91
cttcttctaacccttactcttactctactcttactcttattctatctcttatctatctcttattctatctcttcttaatctcctctcttatccctt

SEQ ID NO: 16472 - DNA, 96 bp, Aspergillus novofumigatus
  misc_feature: 91
cttccctataggacctatatttattatagtaataaataaaataataatacttataattataataaagagatagactttagtaaatacctaaatagt

SEQ ID NO: 16473 - DNA, 96 bp, Aspergillus novofumigatus
  misc_feature: 91
cttattccttctctcctaaaaacttttcttctaactcttattctaactctccttcttattattccttactcttcttctaatccttcttctatctct

SEQ ID NO: 16474 - DNA, 96 bp, Aspergillus novofumigatus
  misc_feature: 91
agatagtaggagagggtaagggttagtaaggatagaagaagagttataagaagaggaagagggaggggaagagagagagaaagagttagagataag

SEQ ID NO: 16475 - DNA, 96 bp, Aspergillus novofumigatus
  misc_feature: 91
cttactaaaattctaattattcttttttctatatctgactcttctttcttttcttttctttcttcttttctctttcttttctatctattatcttct

SEQ ID NO: 16476 - DNA, 96 bp, Aspergillus novofumigatus
  misc_feature: 91
ctcttcttctaactcttattcttaactcctattcttattccttctctcctaaaaacttttcttctaactcttattctaactctccttcttattatt

SEQ ID NO: 16477 - DNA, 96 bp, Aspergillus novofumigatus
  misc_feature: 91
ctctctttctctttcttctcctttctatccctaactcttattctaacccttcttctatctcttcctctaatcctccttctaattcttattctatct

SEQ ID NO: 16478 - DNA, 96 bp, Aspergillus novofumigatus
  misc_feature: 91
ctctaactctttccttcttcccttctattcttaactctctctttctctttcttctcctttctatccctaactcttattctaacccttcttctatct

SEQ ID NO: 16479 - DNA, 96 bp, Aspergillus novofumigatus
  misc_feature: 91
agatagaataagagtaagagtagagtaagagtaagggttagaagaagagttagaataagagttaataaaagaaggattaaggagaggtagaaggag

SEQ ID NO: 16480 - DNA, 96 bp, Aspergillus novofumigatus
  misc_feature: 91
atactagtatataagaatatagaatagctgctatatattaatatagacttattaaaatattatagctatagagctataatattctatatataatag

SEQ ID NO: 16481 - DNA, 96 bp, Aspergillus novofumigatus
  misc_feature: 91
ctattagataagctattagaatatctactaatttattaactacttctaaccctctatatatctatatactattattaagctttattattattaaat

SEQ ID NO: 16482 - DNA, 96 bp, Aspergillus novofumigatus
  misc_feature: 91
aagatagtaatttaaaagataataataagaattactttatatatatatatttatatgtaagtatataagaaggataatttatatagattagtttag

SEQ ID NO: 16483 - DNA, 96 bp, Aspergillus novofumigatus
  misc_feature: 91
cctccctccctccctcgtccccctcgctcgcgcgcgcacccctgccggtcctcgccggcgccggccccccggtccctatgacggtgcgcgcgcgcg

SEQ ID NO: 16484 - DNA, 96 bp, Aspergillus novofumigatus
  misc_feature: 91
ccttctaactctccttctaactctccttctatctctccttctatctctccttctatctctccttctatctctccttctatctctccttctatctct

SEQ ID NO: 16485 - DNA, 96 bp, Aspergillus novofumigatus
  misc_feature: 91
cctcttaatctatccctaaattctcttttacctcttcttctctatctaatctcttaaaacctctttttttacttctattttaaattctaatctctt

SEQ ID NO: 16486 - DNA, 96 bp, Aspergillus novofumigatus
  misc_feature: 91
cctctatctcttttactaactctccttcttcttctaactcttatctctaactctttctctctctcttcccctccctcttcctcttcttataactct

SEQ ID NO: 16487 - DNA, 96 bp, Aspergillus novofumigatus
  misc_feature: 91
cctattcctgatcctattcctgatcctattcctgatcctattcctgatcctattcctgatcctattcctgatcctattcctgatcctattcctgat

SEQ ID NO: 16488 - DNA, 96 bp, Aspergillus novofumigatus
  misc_feature: 91
ccctataggacctatatttattatagtaataaataaaataataatacttataattataataaagagatagactttagtaaatacctaaatagtagg

SEQ ID NO: 16489 - DNA, 96 bp, Aspergillus novofumigatus
  misc_feature: 91
cctaagacttatactaatagaaaggtaataaatatcttcttaagacttaatataatctatatctctatatattatctaagaaatctagaaagatat

SEQ ID NO: 16490 - DNA, 96 bp, Aspergillus novofumigatus
  misc_feature: 91
cccttactcttattctatttcttactctccttctaactatcctaacctctcctaatctcttcttctatctcttcttctaactctccttctacctct

SEQ ID NO: 16491 - DNA, 96 bp, Aspergillus novofumigatus
  misc_feature: 91
cattctattaaattattatttaactttatccttttcttttaattttatctttccttaattttaatttcttcttctctttcttcttctctttcttct

SEQ ID NO: 16492 - DNA, 96 bp, Aspergillus novofumigatus
  misc_feature: 91
atcctattcctgatcctattcctgatcctattcctgatcctattcctgatcctattcctgatcctattcctgatcctattcctgatcctattcctg

SEQ ID NO: 16493 - DNA, 96 bp, Aspergillus novofumigatus
  misc_feature: 91
aataagaataggagttaagaataagagttagaagaagagataaaaagggttagaagaagaattaggaataaaaataagaataaaaagtggaagaat

SEQ ID NO: 16494 - DNA, 96 bp, Aspergillus novofumigatus
  misc_feature: 91
attctatttcttactctccttctaactatcctaacctctcctaatctcttcttctatctcttcttctaactctccttctacctctccttaatcctt

SEQ ID NO: 16495 - DNA, 96 bp, Aspergillus novofumigatus
  misc_feature: 91
attctattaaattattatttaactttatccttttcttttaattttatctttccttaattttaatttcttcttctctttcttcttctctttcttctt

SEQ ID NO: 16496 - DNA, 96 bp, Aspergillus novofumigatus
  misc_feature: 91
aggggagagttagggagagatagaaggggagatagagggagagatagaagaaggattagaagaagagtaaggaataataagaaggagagttagaat

SEQ ID NO: 16497 - DNA, 96 bp, Aspergillus novofumigatus
  misc_feature: 91
agtaatttaaaagataataataagaattactttatatatatatatttatatgtaagtatataagaaggataatttatatagattagtttagtagtt

SEQ ID NO: 16498 - DNA, 96 bp, Aspergillus novofumigatus
  misc_feature: 91
agacttatactaatagaaaggtaataaatatcttcttaagacttaatataatctatatctctatatattatctaagaaatctagaaagatattact

SEQ ID NO: 16499 - DNA, 96 bp, Aspergillus novofumigatus
  misc_feature: 91
agatagtaatttaaaagataataataagaattactttatatatatatatttatatgtaagtatataagaaggataatttatatagattagtttagt

SEQ ID NO: 16500 - DNA, 96 bp, Aspergillus novofumigatus
  misc_feature: 91
agaaagaagagatagtaggagagggtaagggttagtaaggatagaagaagagttataagaagaggaagagggaggggaagagagagagaaagagtt

SEQ ID NO: 16501 - DNA, 96 bp, Aspergillus novofumigatus
  misc_feature: 91
aagggtaaggatttagattagaagggataagagaggagattaagaagagatagaataagagatagataagagatagaataagagtaagagtagagt

SEQ ID NO: 16502 - DNA, 96 bp, Aspergillus novofumigatus
  misc_feature: 91
aataaaagtaagggttattaagtttagataggaggaagggatagagggagggataaagggagggatagaggaagggatagaataaaagtaaggatt

SEQ ID NO: 16503 - DNA, 96 bp, Aspergillus novofumigatus
  misc_feature: 91
aaggatttaggaagagagaaggatttagaataaagatagaaagaagagaggagaagagaaggaaataagttataggatattaatttagagagattt

SEQ ID NO: 16504 - DNA, 96 bp, Aspergillus novofumigatus
  misc_feature: 90
ttttcttttcttttctattccctttcctcttccctttcctcttccctttcttctcctatttttaattatatttatttcttctctttactaaaactc

SEQ ID NO: 16505 - DNA, 96 bp, Aspergillus novofumigatus
  misc_feature: 90
ttattttcttttcttttctattccctttcctcttccctttcctcttccctttcttctcctatttttaattatatttatttcttctctttactaaaa

SEQ ID NO: 16506 - DNA, 96 bp, Aspergillus novofumigatus
  misc_feature: 90
tagagaagggaaaagagtatataagttaatttagaaagaaaagaatagaaggtaaagatagataagatagaaagagtttaagtaaagggtaagaaa

SEQ ID NO: 16507 - DNA, 96 bp, Aspergillus novofumigatus
  misc_feature: 90
tttctctttcttctcctttctatccctaactcttattctaacccttcttctatctcttcctctaatcctccttctaattcttattctatctctcct

SEQ ID NO: 16508 - DNA, 96 bp, Aspergillus novofumigatus
  misc_feature: 90
attataaatcttaatatatatattagtcttatagaatagatatagaactatattctatattacttagctattatctagctattataagaatagaaa

SEQ ID NO: 16509 - DNA, 96 bp, Aspergillus novofumigatus
  misc_feature: 90
aatatataagatagagagagttttagtaaagagaagaaataaatataattaaaaatagaagaagaaagggaagaggaaagggaagaggaaaggaaa

SEQ ID NO: 16510 - DNA, 96 bp, Aspergillus novofumigatus
  misc_feature: 90
tttattttcttttcttttctattccctttcctcttccctttcctcttccctttcttctcctatttttaattatatttatttcttctctttactaaa

SEQ ID NO: 16511 - DNA, 96 bp, Aspergillus novofumigatus
  misc_feature: 90
tttatctctttccttaactcttattctaactcttcttctaacccttactcttactctactcttactcttattctatctcttattctatctcttatt

SEQ ID NO: 16512 - DNA, 96 bp, Aspergillus novofumigatus
  misc_feature: 90
aggtatactatctaaatttaaaataataagtatatactatataaatatttaatatatttataacttagctattatactacctagggatgctataaa

SEQ ID NO: 16513 - DNA, 96 bp, Aspergillus novofumigatus
  misc_feature: 90
tttagtttaggggagagttagggagagatagaaggggagatagagggagagatagaagaaggattagaagaagagtaaggaataataagaaggaga

SEQ ID NO: 16514 - DNA, 96 bp, Aspergillus novofumigatus
  misc_feature: 90
ttgctgcctccctcactcactcactgcctgccttacttactatcttactcactaccttacttactgcctcactccctcactatctcacttactacc

SEQ ID NO: 16515 - DNA, 96 bp, Aspergillus novofumigatus
  misc_feature: 90
ttcttttcttttctattccctttcctcttccctttcctcttccctttcttctcctatttttaattatatttatttcttctctttactaaaactctc

SEQ ID NO: 16516 - DNA, 96 bp, Aspergillus novofumigatus
  misc_feature: 90
ttcttctcctttctatccctaactcttattctaacccttcttctatctcttcctctaatcctccttctaattcttattctatctctccttacctct

SEQ ID NO: 16517 - DNA, 96 bp, Aspergillus novofumigatus
  misc_feature: 90
ttcttctatctcttcttctaactctccttctacctctccttaatccttcttttattaactcttattctaactcttcttctaacccttactcttact

SEQ ID NO: 16518 - DNA, 96 bp, Aspergillus novofumigatus
  misc_feature: 90
taatttagaaagaaaagaatagaaggtaaagatagataagatagaaagagtttaagtaaagggtaagaaagagaggaagaataagaagaataagaa

SEQ ID NO: 16519 - DNA, 96 bp, Aspergillus novofumigatus
  misc_feature: 90
ttcttatcttaatctaataaatataaatatatatatctattatctagactaaatcttttctagtaactaaatctaattattatctagcttactaga

SEQ ID NO: 16520 - DNA, 96 bp, Aspergillus novofumigatus
  misc_feature: 90
agtagagatagatagatataggaaaataaggatttagaaggatttaggaagagagaggatttagaatgaagatagaaagaagagaggagaagagaa

SEQ ID NO: 16521 - DNA, 96 bp, Aspergillus novofumigatus
  misc_feature: 90
ttctattaaattattatttaactttatccttttcttttaattttatctttccttaattttaatttcttcttctctttcttcttctctttcttcttc

SEQ ID NO: 16522 - DNA, 96 bp, Aspergillus novofumigatus
  misc_feature: 90
ttctaccccttattcttatcttaaacttactaacccttactctattacttatccttccttactttattctccttactacctcttaccttctatcta

SEQ ID NO: 16523 - DNA, 96 bp, Aspergillus novofumigatus
  misc_feature: 90
ttctaactctccttctaactctccttctatctctccttctatctctccttctatctctccttctatctctccttctatctctccttctatctctcc

SEQ ID NO: 16524 - DNA, 96 bp, Aspergillus novofumigatus
  misc_feature: 90
aaatatataagatagagagagttttagtaaagagaagaaataaatataattaaaaatagaagaagaaagggaagaggaaagggaagaggaaaggaa

SEQ ID NO: 16525 - DNA, 96 bp, Aspergillus novofumigatus
  misc_feature: 90
gggaagaaaagaattagagaaagaagagatagtaggagagggtaagggttagtaaggatagaagaagagttataagaagaggaagagggaggggaa

SEQ ID NO: 16526 - DNA, 96 bp, Aspergillus novofumigatus
  misc_feature: 90
aaggaataagaataggagttaagaataagagttagaagaagagataaaaagggttagaagaagaattaggaataaaaataagaataaaaagtggaa

SEQ ID NO: 16527 - DNA, 96 bp, Aspergillus novofumigatus
  misc_feature: 90
aagtttttaggagagaaggaataagaataggagttaagaataagagttagaagaagagataaaaagggttagaagaagaattaggaataaaaataa

SEQ ID NO: 16528 - DNA, 96 bp, Aspergillus novofumigatus
  misc_feature: 90
gaaggagagatagaaggagagatagaaggagagatagaaggagagatagaaggagagttagaaggagagttagaaggagagtaagaaatagaataa

SEQ ID NO: 16529 - DNA, 96 bp, Aspergillus novofumigatus
  misc_feature: 90
ttatctctttccttaactcttattctaactcttcttctaacccttactcttactctactcttactcttattctatctcttattctatctcttattc

SEQ ID NO: 16530 - DNA, 96 bp, Aspergillus novofumigatus
  misc_feature: 90
ttatagttatataataatatactaattaatatagcaagcttatattatataatcttagctataatttatatacccccttttatattcagccactat

SEQ ID NO: 16531 - DNA, 96 bp, Aspergillus novofumigatus
  misc_feature: 90
atcctaatccctactctcatcctaaccctcccccttattaatatccttatcctattaataattatccccttctttatcctatattactttctataa

SEQ ID NO: 16532 - DNA, 96 bp, Aspergillus novofumigatus
  misc_feature: 90
ctagtaaatattataaatcttaatatatatattagtcttatagaatagatatagaactatattctatattacttagctattatctagctattataa

SEQ ID NO: 16533 - DNA, 96 bp, Aspergillus novofumigatus
  misc_feature: 90
ttataaaccactgattcggctaacatactatataaaccaaccgtataatatatatctctgcgcattatggtatactaaaatatatattcattccca

SEQ ID NO: 16534 - DNA, 96 bp, Aspergillus novofumigatus
  misc_feature: 90
ttagtttaggggagagttagggagagatagaaggggagatagagggagagatagaagaaggattagaagaagagtaaggaataataagaaggagag

SEQ ID NO: 16535 - DNA, 96 bp, Aspergillus novofumigatus
  misc_feature: 90
acattaaattaggatattaaattattaatataatattttttccttattaatacaatattaatttacttattaatactcttataatactgaatctaa

SEQ ID NO: 16536 - DNA, 96 bp, Aspergillus novofumigatus
  misc_feature: 90
ttagataagctattagaatatctactaatttattaactacttctaaccctctatatatctatatactattattaagctttattattattaaattat

SEQ ID NO: 16537 - DNA, 96 bp, Aspergillus novofumigatus
  misc_feature: 90
ttactacctctcttactacttaccttactattaaccttactatctactatgatatttatattactatctaccttattacctaccttactattgact

SEQ ID NO: 16538 - DNA, 96 bp, Aspergillus novofumigatus
  misc_feature: 90
ctttcttctcttctctactctttcttctttccttttttaatcttctctcttattctattaaaaatatacccttcttctctcttatattataattaa

SEQ ID NO: 16539 - DNA, 96 bp, Aspergillus novofumigatus
  misc_feature: 90
ttaatatatatattagtcttatagaatagatatagaactatattctatattacttagctattatctagctattataagaatagaaaatatagctac

SEQ ID NO: 16540 - DNA, 96 bp, Aspergillus novofumigatus
  misc_feature: 90
cctctcttctttctatctttattctaaatccttctctcttcctaaatccttctaaatccttattttcctatatctatctatccctactcttattaa

SEQ ID NO: 16541 - DNA, 96 bp, Aspergillus novofumigatus
  misc_feature: 90
ttaaattattatttaactttatccttttcttttaattttatctttccttaattttaatttcttcttctctttcttcttctctttcttcttctcttt

SEQ ID NO: 16542 - DNA, 96 bp, Aspergillus novofumigatus
  misc_feature: 90
tgctgcctccctcactcactcactgcctgccttacttactatcttactcactaccttacttactgcctcactccctcactatctcacttactacct

SEQ ID NO: 16543 - DNA, 96 bp, Aspergillus novofumigatus
  misc_feature: 90
tcttttatctctttccttaactcttattctaactcttcttctaacccttactcttactctactcttactcttattctatctcttattctatctctt

SEQ ID NO: 16544 - DNA, 96 bp, Aspergillus novofumigatus
  misc_feature: 90
tcttcttaatccttcttttatctctttccttaactcttattctaactcttcttctaacccttactcttactctactcttactcttattctatctct

SEQ ID NO: 16545 - DNA, 96 bp, Aspergillus novofumigatus
  misc_feature: 90
agaaggtaaagatagataagatagaaagagtttaagtaaagggtaagaaagagaagaagaataagaagaaagagaagaaagagaagaaagagaaga

SEQ ID NO: 16546 - DNA, 96 bp, Aspergillus novofumigatus
  misc_feature: 90
tcttctcctttctatccctaactcttattctaacccttcttctatctcttcctctaatcctccttctaattcttattctatctctccttacctctt

SEQ ID NO: 16547 - DNA, 96 bp, Aspergillus novofumigatus
  misc_feature: 90
gaagaaaagaattagagaaagaagagatagtaggagagggtaagggttagtaaggatagaagaagagttataagaagaggaagagggaggggaaga

SEQ ID NO: 16548 - DNA, 96 bp, Aspergillus novofumigatus
  misc_feature: 90
gtatataagttaatttagaaagaaaagaatagaaggtaaagatagataagatagaaagagtttaagtaaagggtaagaaagagaggaagaataaga

SEQ ID NO: 16549 - DNA, 96 bp, Aspergillus novofumigatus
  misc_feature: 90
gatagaataagagtaagagtagagtaagagtaagggttagaagaagagttagaataagagttaataaaagaaggattaaggagaggtagaaggaga

SEQ ID NO: 16550 - DNA, 96 bp, Aspergillus novofumigatus
  misc_feature: 90
tctccttctaactctccttctaactctccttctatctctccttctatctctccttctatctctccttctatctctccttctatctctccttctatc

SEQ ID NO: 16551 - DNA, 96 bp, Aspergillus novofumigatus
  misc_feature: 90
tctcctaatctcttcttctatctcttcttctaactctccttctacctctccttaatccttcttttattaactcttattctaactcttcttctaacc

SEQ ID NO: 16552 - DNA, 96 bp, Aspergillus novofumigatus
  misc_feature: 90
gtaagggtaaggatttagattagaagggataagagaggagattaagaagagatagaataagagatagataagagatagaataagagtaagagtaga

SEQ ID NO: 16553 - DNA, 96 bp, Aspergillus novofumigatus
  misc_feature: 90
atattagtcttatagaatagatatagaactatattctatattacttagctattatctagctattataagaatagaaaatatagctactaagttaga

SEQ ID NO: 16554 - DNA, 96 bp, Aspergillus novofumigatus
  misc_feature: 90
tctaactctccttctaactctccttctatctctccttctatctctccttctatctctccttctatctctccttctatctctccttctatctctcct

SEQ ID NO: 16555 - DNA, 96 bp, Aspergillus novofumigatus
  misc_feature: 90
ggggttaaataagagatagaaggagagatagaaggagagatagaaggagagatagaaggagagatagaaggagagatagaaggagagatagaagga

SEQ ID NO: 16556 - DNA, 96 bp, Aspergillus novofumigatus
  misc_feature: 90
agagatagataagagatagaataagagtaagagtagagtaagagtaagggttagaagaagagttagaataagagttaataaaagaaggattaagga

SEQ ID NO: 16557 - DNA, 96 bp, Aspergillus novofumigatus
  misc_feature: 90
tcctcttcttataactcttcttctatccttactaacccttaccctctcctactatctcttctttctctaattcttttcttccctctttttatccct

SEQ ID NO: 16558 - DNA, 96 bp, Aspergillus novofumigatus
  misc_feature: 90
tcctattcctgatcctattcctgatcctattcctgatcctattcctgatcctattcctgatcctattcctgatcctattcctgatcctattcctga

SEQ ID NO: 16559 - DNA, 96 bp, Aspergillus novofumigatus
  misc_feature: 90
tcctaatccctactctcatcctaaccctcccccttattaatatccttatcctattaataattatccccttctttatcctatattactttctataac

SEQ ID NO: 16560 - DNA, 96 bp, Aspergillus novofumigatus
  misc_feature: 90
tccctcttcctcttcttataactcttcttctatccttactaacccttaccctctcctactatctcttctttctctaattcttttcttccctctttt

SEQ ID NO: 16561 - DNA, 96 bp, Aspergillus novofumigatus
  misc_feature: 90
tcatattaaccatagttaggagagaggtaggtagcaaggtagacagtaaggtagatagtaaggtagatagtgagataggcagtgaggtaggcagta

SEQ ID NO: 16562 - DNA, 96 bp, Aspergillus novofumigatus
  misc_feature: 90
actgaggagggaggcagtgagataggcagtaaggcaggcagcaagcaaagcagtgagcaaggcagtgagtaaggcagtcagcaagatagtgagtga

SEQ ID NO: 16563 - DNA, 96 bp, Aspergillus novofumigatus
  misc_feature: 90
tatttcttactctccttctaactctccttctaactctccttctatctctccttctatctctccttctatctctccttctatctctccttctatctc

SEQ ID NO: 16564 - DNA, 96 bp, Aspergillus novofumigatus
  misc_feature: 90
tatttacctcttttttcttctccctttttatctcttctctctatttctctcttaattcttactctatctcttactttacctctttctctatctctc

SEQ ID NO: 16565 - DNA, 96 bp, Aspergillus novofumigatus
  misc_feature: 90
agaaggagagatagaaggagagatagaaggagagatagaaggagagatagaaggagagttagaaggagagttagaaggagagtaagaaatagaata

SEQ ID NO: 16566 - DNA, 96 bp, Aspergillus novofumigatus
  misc_feature: 90
aatactagtatataagaatatagaatagctgctatatattaatatagacttattaaaatattatagctatagagctataatattctatatataata

SEQ ID NO: 16567 - DNA, 96 bp, Aspergillus novofumigatus
  misc_feature: 90
atactatctaaatttaaaataataagtatatactatataaatatttaatatatttataacttagctattatactacctagggatgctataaagata

SEQ ID NO: 16568 - DNA, 96 bp, Aspergillus novofumigatus
  misc_feature: 90
gtttgagtaagaaagaggtaaggagagatagaataagaattagaaggaggattagaggaagagatagaagaagggttagaataagagttagggata

SEQ ID NO: 16569 - DNA, 96 bp, Aspergillus novofumigatus
  misc_feature: 90
tatatcatattaaccatagttaggagagaggtaggtagcaaggtagacagtaaggtagatagtaaggtagatagtgagataggcagtgaggtaggc

SEQ ID NO: 16570 - DNA, 96 bp, Aspergillus novofumigatus
  misc_feature: 90
tatatatattagtcttatagaatagatatagaactatattctatattacttagctattatctagctattataagaatagaaaatatagctactaag

SEQ ID NO: 16571 - DNA, 96 bp, Aspergillus novofumigatus
  misc_feature: 90
tataggctgcccctataatatatactatcttatatatatagctatataatcacctaattagttatataattataactagttattatattaattagt

SEQ ID NO: 16572 - DNA, 96 bp, Aspergillus novofumigatus
  misc_feature: 90
tataacttatttccttctcttctcctctcttctttctatctttattctaaatccttctctcttcctaaatccttctaaatccttattttcctatat

SEQ ID NO: 16573 - DNA, 96 bp, Aspergillus novofumigatus
  misc_feature: 90
cttatagttatataataatatactaattaatatagcaagcttatattatataatcttagctataatttatatacccccttttatattcagccacta

SEQ ID NO: 16574 - DNA, 96 bp, Aspergillus novofumigatus
  misc_feature: 90
ggtatcctaaaatatatatatttatttacttaatatattaatcctaattaaccttgatctcctaatatatatctattacttgatatatggatacta

SEQ ID NO: 16575 - DNA, 96 bp, Aspergillus novofumigatus
  misc_feature: 90
aaaataatatatattaaagtatactatacttcttaaactctattaataaaatatatctaatactaaactagaaatatattaagatatactatccta

SEQ ID NO: 16576 - DNA, 96 bp, Aspergillus novofumigatus
  misc_feature: 90
ctattcttattccttctctcctaaaaacttttcttctaactcttattctaactctccttcttattattccttactcttcttctaatccttcttcta

SEQ ID NO: 16577 - DNA, 96 bp, Aspergillus novofumigatus
  misc_feature: 90
ctttcttcttattcttcttattcttcctctctttcttaccctttacttaaactctttctatcttatctatctttaccttctattcttttctttcta

SEQ ID NO: 16578 - DNA, 96 bp, Aspergillus novofumigatus
  misc_feature: 90
tactatctaaatttaaaataataagtatatactatataaatatttaatatatttataacttagctattatactacctagggatgctataaagatat

SEQ ID NO: 16579 - DNA, 96 bp, Aspergillus novofumigatus
  misc_feature: 90
tactataaagatttagattaaataattatagctaatagaggattataataatataatttatagatactatctcctatatataagatataaactttt

SEQ ID NO: 16580 - DNA, 96 bp, Aspergillus novofumigatus
  misc_feature: 90
taatcctattctataaaagaagctagattatcctattatatatagaatattatagctctatagctataatattttaataagtctatattaatatat

SEQ ID NO: 16581 - DNA, 96 bp, Aspergillus novofumigatus
  misc_feature: 90
actcttattctatttcttactctccttctaactatcctaacctctcctaatctcttcttctatctcttcttctaactctccttctacctctcctta

SEQ ID NO: 16582 - DNA, 96 bp, Aspergillus novofumigatus
  misc_feature: 90
ctcttaatctatccctaaattctcttttacctcttcttctctatctaatctcttaaaacctctttttttacttctattttaaattctaatctctta

SEQ ID NO: 16583 - DNA, 96 bp, Aspergillus novofumigatus
  misc_feature: 90
cttttatctctttccttaactcttattctaactcttcttctaacccttactcttactctactcttactcttattctatctcttattctatctctta

SEQ ID NO: 16584 - DNA, 96 bp, Aspergillus novofumigatus
  misc_feature: 90
gaaagaagagatagtaggagagggtaagggttagtaaggatagaagaagagttataagaagaggaagagggaggggaagagagagagaaagagtta

SEQ ID NO: 16585 - DNA, 96 bp, Aspergillus novofumigatus
  misc_feature: 90
aaataagagatagaaggagagatagaaggagagatagaaggagagatagaaggagagatagaaggagagatagaaggagagatagaaggagagtta

SEQ ID NO: 16586 - DNA, 96 bp, Aspergillus novofumigatus
  misc_feature: 90
gaataagagtaagagtagagtaagagtaagggttagaagaagagttagaataagagttaataaaagaaggattaaggagaggtagaaggagagtta

SEQ ID NO: 16587 - DNA, 96 bp, Aspergillus novofumigatus
  misc_feature: 90
aggatttaggaagagagaaggatttagaataaagatagaaagaagagaggagaagagaaggaaataagttataggatattaatttagagagattta

SEQ ID NO: 16588 - DNA, 96 bp, Aspergillus novofumigatus
  misc_feature: 90
gtttagtttaggggagagttagggagagatagaaggggagatagagggagagatagaagaaggattagaagaagagtaaggaataataagaaggag

SEQ ID NO: 16589 - DNA, 96 bp, Aspergillus novofumigatus
  misc_feature: 90
cattaaattaggatattaaattattaatataatattttttccttattaatacaatattaatttacttattaatactcttataatactgaatctaac

SEQ ID NO: 16590 - DNA, 96 bp, Aspergillus novofumigatus
  misc_feature: 90
gtatatttttaatagaataagagagaagattaaaaaaggaaagaagaaagagtagagaagagaagaaagagtagagaaaagaagaaaggattaaag

SEQ ID NO: 16591 - DNA, 96 bp, Aspergillus novofumigatus
  misc_feature: 90
ctaccccttactcttattctatttcttactctccttctaactatcctaacctctcctaatctcttcttctatctcttcttctaactctccttctac

SEQ ID NO: 16592 - DNA, 96 bp, Aspergillus novofumigatus
  misc_feature: 90
aagacttatactaatagaaaggtaataaatatcttcttaagacttaatataatctatatctctatatattatctaagaaatctagaaagatattac

SEQ ID NO: 16593 - DNA, 96 bp, Aspergillus novofumigatus
  misc_feature: 90
ctctttcttctcctttctatccctaactcttattctaacccttcttctatctcttcctctaatcctccttctaattcttattctatctctccttac

SEQ ID NO: 16594 - DNA, 96 bp, Aspergillus novofumigatus
  misc_feature: 90
cttcttctatctcttcttctaactctccttctacctctccttaatccttcttttattaactcttattctaactcttcttctaacccttactcttac

SEQ ID NO: 16595 - DNA, 96 bp, Aspergillus novofumigatus
  misc_feature: 90
ggtatactatctaaatttaaaataataagtatatactatataaatatttaatatatttataacttagctattatactacctagggatgctataaag

SEQ ID NO: 16596 - DNA, 96 bp, Aspergillus novofumigatus
  misc_feature: 90
attctatctcttattctatctcttattctatctcttattctatctctctcttactccctctctcctctatctcttcttaatctcctctcttatccc

SEQ ID NO: 16597 - DNA, 96 bp, Aspergillus novofumigatus
  misc_feature: 90
ggaagaaaagaattagagaaagaagagatagtaggagagggtaagggttagtaaggatagaagaagagttataagaagaggaagagggaggggaag

SEQ ID NO: 16598 - DNA, 96 bp, Aspergillus novofumigatus
  misc_feature: 90
gcttatagttatataataatatactaattaatatagcaagcttatattatataatcttagctataatttatatacccccttttatattcagccact

SEQ ID NO: 16599 - DNA, 96 bp, Aspergillus novofumigatus
  misc_feature: 90
gctgcctccctcactcactcactgcctgccttacttactatcttactcactaccttacttactgcctcactccctcactatctcacttactacctc

SEQ ID NO: 16600 - DNA, 96 bp, Aspergillus novofumigatus
  misc_feature: 90
actagcttatagttatataataatatactaattaatatagcaagcttatattatataatcttagctataatttatatacccccttttatattcagc

SEQ ID NO: 16601 - DNA, 96 bp, Aspergillus novofumigatus
  misc_feature: 90
accatagttaggagagaggtaggtagcaaggtagacagtaaggtagatagtaaggtagatagtgagataggcagtgaggtaggcagtaaggcaggc

SEQ ID NO: 16602 - DNA, 96 bp, Aspergillus novofumigatus
  misc_feature: 90
ctcttattctaactcttcttctaacccttactcttactctactcttactcttattctatctcttattctatctcttattctatctcttattctatc

SEQ ID NO: 16603 - DNA, 96 bp, Aspergillus novofumigatus
  misc_feature: 90
atctcttactaaaattctaattattcttttttctatatctgactcttctttcttttcttttctttcttcttttctctttcttttctatctattatc

SEQ ID NO: 16604 - DNA, 96 bp, Aspergillus novofumigatus
  misc_feature: 90
cttctatctctccttctatctctccttctatctctccttctatctctccttctatctctccttctatctctccttctatctcttatttaacccctc

SEQ ID NO: 16605 - DNA, 96 bp, Aspergillus novofumigatus
  misc_feature: 90
cctcttcttataactcttcttctatccttactaacccttaccctctcctactatctcttctttctctaattcttttcttccctctttttatccctc

SEQ ID NO: 16606 - DNA, 96 bp, Aspergillus novofumigatus
  misc_feature: 90
actgtcttgcttgctgcctccctcactatctcactcactatctcactcactgccttacttactatctcactcactgtcttactcactacctccctc

SEQ ID NO: 16607 - DNA, 96 bp, Aspergillus novofumigatus
  misc_feature: 90
cttctaactctccttctaactctccttctatctctccttctatctctccttctatctctccttctatctctccttctatctctccttctatctctc

SEQ ID NO: 16608 - DNA, 96 bp, Aspergillus novofumigatus
  misc_feature: 90
aaaagtcctagaatactagtatataagaatatagaatagctgctatatattaatatagacttattaaaatattatagctatagagctataatattc

SEQ ID NO: 16609 - DNA, 96 bp, Aspergillus novofumigatus
  misc_feature: 90
cccttactctatcccttatataatctcttactaaaattctaattattcttttttctatatctgactcttctttcttttcttttctttcttcttttc

SEQ ID NO: 16610 - DNA, 96 bp, Aspergillus novofumigatus
  misc_feature: 90
aggtaaagatagataagatagaaagagtttaagtaaagggtaagaaagagaagaagaataagaagaaagagaagaaagagaagaaagagaagaaag

SEQ ID NO: 16611 - DNA, 96 bp, Aspergillus novofumigatus
  misc_feature: 90
agagtaagagtaagggttagaagaagagttagaataagagttaaggaaagagataaaagaaggattaagaagaggtagaagaagagttagaagaag

SEQ ID NO: 16612 - DNA, 96 bp, Aspergillus novofumigatus
  misc_feature: 90
cttctcctttctatccctaactcttattctaacccttcttctatctcttcctctaatcctccttctaattcttattctatctctccttacctcttt

SEQ ID NO: 16613 - DNA, 96 bp, Aspergillus novofumigatus
  misc_feature: 90
agtttttaggagagaaggaataagaataggagttaagaataagagttagaagaagagataaaaagggttagaagaagaattaggaataaaaataag

SEQ ID NO: 16614 - DNA, 96 bp, Aspergillus novofumigatus
  misc_feature: 90
agataagagaatcagggatagagagaataaggataaaaagagagtagattaattataatataagagagaagaagggtatatttttaatagaataag

SEQ ID NO: 16615 - DNA, 96 bp, Aspergillus novofumigatus
  misc_feature: 90
atattaaccatagttaggagagaggtaggtagcaaggtagacagtaaggtagatagtaaggtagatagtgagataggcagtgaggtaggcagtaag

SEQ ID NO: 16616 - DNA, 96 bp, Aspergillus novofumigatus
  misc_feature: 90
cactagcttatagttatataataatatactaattaatatagcaagcttatattatataatcttagctataatttatatacccccttttatattcag

SEQ ID NO: 16617 - DNA, 96 bp, Aspergillus novofumigatus
  misc_feature: 90
ctcttcttataactcttcttctatccttactaacccttaccctctcctactatctcttctttctctaattcttttcttccctctttttatccctct

SEQ ID NO: 16618 - DNA, 96 bp, Aspergillus novofumigatus
  misc_feature: 90
ctcttactaaaattctaattattcttttttctatatctgactcttctttcttttcttttctttcttcttttctctttcttttctatctattatctt

SEQ ID NO: 16619 - DNA, 96 bp, Aspergillus novofumigatus
  misc_feature: 90
aagaagagattaggagaggttaggatagttagaaggagagtaagaaatagaataagagtaaggggtagtaagtgtagatagaagagagagatagag

SEQ ID NO: 16620 - DNA, 96 bp, Aspergillus novofumigatus
  misc_feature: 90
atttagaaggatttaggaagagagaaggatttagaataaagatagaaagaagagaggagaagagaaggaaataagttataggatattaatttagag

SEQ ID NO: 16621 - DNA, 96 bp, Aspergillus novofumigatus
  misc_feature: 90
atagtaatttaaaagataataataagaattactttatatatatatatttatatgtaagtatataagaaggataatttatatagattagtttagtag

SEQ ID NO: 16622 - DNA, 96 bp, Aspergillus novofumigatus
  misc_feature: 90
ctaagacttatactaatagaaaggtaataaatatcttcttaagacttaatataatctatatctctatatattatctaagaaatctagaaagatatt

SEQ ID NO: 16623 - DNA, 96 bp, Aspergillus novofumigatus
  misc_feature: 90
aagagtagagtaagagtaagggttagaagaagagttagaataagagttaaggaaagagataaaagaaggattaagaagaggtagaagaagagttag

SEQ ID NO: 16624 - DNA, 96 bp, Aspergillus novofumigatus
  misc_feature: 90
ctaactctccttctaactctccttctatctctccttctatctctccttctatctctccttctatctctccttctatctctccttctatctctcctt

SEQ ID NO: 16625 - DNA, 96 bp, Aspergillus novofumigatus
  misc_feature: 90
ctaacccttactctatcccttatataatctcttactaaaattctaattattcttttttctatatctgactcttctttcttttcttttctttcttct

SEQ ID NO: 16626 - DNA, 96 bp, Aspergillus novofumigatus
  misc_feature: 90
attaagtttagataggaggaagggatagagggagggataaagggagggatagaggaagggatagaataaaagtaaggattagtaagattagatagg

SEQ ID NO: 16627 - DNA, 96 bp, Aspergillus novofumigatus
  misc_feature: 90
cctaatctcttcttctatctcttcttctaactctccttctacctctccttaatccttcttttattaactcttattctaactcttcttctaaccctt

SEQ ID NO: 16628 - DNA, 96 bp, Aspergillus novofumigatus
  misc_feature: 90
agaatcataaggctagtataagttaaatatatttatttcactttaatatacatatttttatatatatatatattaaaatctgcctagatctagatg

SEQ ID NO: 16629 - DNA, 96 bp, Aspergillus novofumigatus
  misc_feature: 90
attttcttttcttttctattccctttcctcttccctttcctcttccctttcttctcctatttttaattatatttatttcttctctttactaaaact

SEQ ID NO: 16630 - DNA, 96 bp, Aspergillus novofumigatus
  misc_feature: 90
atttcttactctccttctaactctccttctaactctccttctatctctccttctatctctccttctatctctccttctatctctccttctatctct

SEQ ID NO: 16631 - DNA, 96 bp, Aspergillus novofumigatus
  misc_feature: 90
attctataaaagaagctagattatcctattatatatagaatattatagctctatagctataatattttaataagtctatattaatatatagcagct

SEQ ID NO: 16632 - DNA, 96 bp, Aspergillus novofumigatus
  misc_feature: 90
atcatattaaccatagttaggagagaggtaggtagcaaggtagacagtaaggtagatagtaaggtagatagtgagataggcagtgaggtaggcagt

SEQ ID NO: 16633 - DNA, 96 bp, Aspergillus novofumigatus
  misc_feature: 90
atatatattagtcttatagaatagatatagaactatattctatattacttagctattatctagctattataagaatagaaaatatagctactaagt

SEQ ID NO: 16634 - DNA, 96 bp, Aspergillus novofumigatus
  misc_feature: 90
aaagggaagtttagtattattatataatattattcttatttttcttatagtaaattaattactatactatatttacctagtatatttatatctact

SEQ ID NO: 16635 - DNA, 96 bp, Aspergillus novofumigatus
  misc_feature: 90
aatctcttcttctatctcttcttctaactctccttctacctctccttaatccttcttttattaactcttattctaactcttcttctaacccttact

SEQ ID NO: 16636 - DNA, 96 bp, Aspergillus novofumigatus
  misc_feature: 90
aaaaataatatatattaaagtatactatacttcttaaactctattaataaaatatatctaatactaaactagaaatatattaagatatactatcct

SEQ ID NO: 16637 - DNA, 96 bp, Aspergillus novofumigatus
  misc_feature: 90
aatagatatatatatttatatttattagattaagataagaagagattaagtatatatatttaaaaaaaaaataagagaaatttagagattagatct

SEQ ID NO: 16638 - DNA, 96 bp, Aspergillus novofumigatus
  misc_feature: 90
aaagtcctagaatactagtatataagaatatagaatagctgctatatattaatatagacttattaaaatattatagctatagagctataatattct

SEQ ID NO: 16639 - DNA, 96 bp, Aspergillus novofumigatus
  misc_feature: 90
agaagatagtaatttaaaagataataataagaattactttatatatatatatttatatgtaagtatataagaaggataatttatatagattagttt

SEQ ID NO: 16640 - DNA, 96 bp, Aspergillus novofumigatus
  misc_feature: 90
actataaagatttagattaaataattatagctaatagaggattataataatataatttatagatactatctcctatatataagatataaacttttt

SEQ ID NO: 16641 - DNA, 96 bp, Aspergillus novofumigatus
  misc_feature: 90
aatatatatcatattaaccatagttaggagagaggtaggtagcaaggtagacagtaaggtagatagtaaggtagatagtgagataggcagtgaggt

SEQ ID NO: 16642 - DNA, 96 bp, Aspergillus novofumigatus
  misc_feature: 90
acccttactctatcccttatataatctcttactaaaattctaattattcttttttctatatctgactcttctttcttttcttttctttcttctttt

SEQ ID NO: 16643 - DNA, 96 bp, Aspergillus novofumigatus
  misc_feature: 89
ttttatctcttctctctatttctctcttaattcttactctatctcttactttacccctttctctatctctctcttctatctacacttactacccct

SEQ ID NO: 16644 - DNA, 96 bp, Aspergillus novofumigatus
  misc_feature: 89
tttgagtaagaaagaggtaaggagagatagaataagaattagaaggaggattagaggaagagatagaagaagggttagaataagagttagggatag

SEQ ID NO: 16645 - DNA, 96 bp, Aspergillus novofumigatus
  misc_feature: 89
aaaaagaggttttaagagattagatagagaagaagaggtaaaagagaatttagggatagattaagaggagagaagaaggagtaataagagtagaaa

SEQ ID NO: 16646 - DNA, 96 bp, Aspergillus novofumigatus
  misc_feature: 89
taggagagaaggaataagaataggagttaagaataagagttagaagaagagataaaaagggttagaagaagaattaggaataaaaataagaataaa

SEQ ID NO: 16647 - DNA, 96 bp, Aspergillus novofumigatus
  misc_feature: 89
ttattctatctcttcttaatctcctctcttatcccttctaatctaaatccttacccttactcttatcctcaccctctttatcccttctaaactaaa

SEQ ID NO: 16648 - DNA, 96 bp, Aspergillus novofumigatus
  misc_feature: 89
ttcttcttattcttcttattcttcctctctttcttaccctttacttaaactctttctatcttatctatctttaccttctattcttttctttctaaa

SEQ ID NO: 16649 - DNA, 96 bp, Aspergillus novofumigatus
  misc_feature: 89
ttcttttattaactcttattctaactcttcttctaacccttactcttactctactcttactcttattctatctcttatctatctcttattctatct

SEQ ID NO: 16650 - DNA, 96 bp, Aspergillus novofumigatus
  misc_feature: 89
tagagtaagagtaagggttagaagaagagttagaataagagttaaggaaagagataaaagaaggattaagaagaggtagaagaagagttagaagaa

SEQ ID NO: 16651 - DNA, 96 bp, Aspergillus novofumigatus
  misc_feature: 89
atagaaggtaaagatagataagatagaaagagtttaagtaaagggtaagaaagagaagaagaataagaagaaagagaagaaagagaagaaagagaa

SEQ ID NO: 16652 - DNA, 96 bp, Aspergillus novofumigatus
  misc_feature: 89
ttctataaaagaagctagattatcctattatatatagaatattatagctctatagctataatattttaataagtctatattaatatatagcagcta

SEQ ID NO: 16653 - DNA, 96 bp, Aspergillus novofumigatus
  misc_feature: 89
ttctagtaaatattataaatcttaatatatatattagtcttatagaatagatatagaactatattctatattacttagctattatctagctattat

SEQ ID NO: 16654 - DNA, 96 bp, Aspergillus novofumigatus
  misc_feature: 89
taggggagagttagggagagatagaaggggagatagagggagagatagaagaaggattagaagaagagtaaggaataataagaaggagagttagaa

SEQ ID NO: 16655 - DNA, 96 bp, Aspergillus novofumigatus
  misc_feature: 89
taagagatagaaggagagatagaaggagagatagaaggagagatagaaggagagatagaaggagagatagaaggagagatagaaggagagttagaa

SEQ ID NO: 16656 - DNA, 96 bp, Aspergillus novofumigatus
  misc_feature: 89
ttaggagagaaggaataagaataggagttaagaataagagttagaagaagagataaaaagggttagaagaagaattaggaataaaaataagaataa

SEQ ID NO: 16657 - DNA, 96 bp, Aspergillus novofumigatus
  misc_feature: 89
ttattctatttcttactctccttctaactatcctaacctctcctaatctcttcttctatctcttcttctaactctccttctacctctccttaatcc

SEQ ID NO: 16658 - DNA, 96 bp, Aspergillus novofumigatus
  misc_feature: 89
ttatcctaatccctactctcatcctaaccctcccccttattaatatccttatcctattaataattatccccttctttatcctatattactttctat

SEQ ID NO: 16659 - DNA, 96 bp, Aspergillus novofumigatus
  misc_feature: 89
taggtatactatctaaatttaaaataataagtatatactatataaatatttaatatatttataacttagctattatactacctagggatgctataa

SEQ ID NO: 16660 - DNA, 96 bp, Aspergillus novofumigatus
  misc_feature: 89
gtatcctaaaatatatatatttatttacttaatatattaatcctaattaaccttgatctcctaatatatatctattacttgatatatggatactaa

SEQ ID NO: 16661 - DNA, 96 bp, Aspergillus novofumigatus
  misc_feature: 89
catattaaccatagttaggagagaggtaggtagcaaggtagacagtaaggtagatagtaaggtagatagtgagataggcagtgaggtaggcagtaa

SEQ ID NO: 16662 - DNA, 96 bp, Aspergillus novofumigatus
  misc_feature: 89
ttactctccttctaactctccttctaactctccttctatctctccttctatctctccttctatctctccttctatctctccttctatctctccttc

SEQ ID NO: 16663 - DNA, 96 bp, Aspergillus novofumigatus
  misc_feature: 89
ttactacctcccttactatcttacttactacctcccttactgttaaccttactatctacctcactacttatcttactacctccctcactgcctccc

SEQ ID NO: 16664 - DNA, 96 bp, Aspergillus novofumigatus
  misc_feature: 89
ttaatttagaaagaaaagaatagaaggtaaagatagataagatagaaagagtttaagtaaagggtaagaaagagaggaagaataagaagaataaga

SEQ ID NO: 16665 - DNA, 96 bp, Aspergillus novofumigatus
  misc_feature: 89
ctaagagatctagtaagctagataataattagatttagttactagaaaagatttagtctagataatagatatatatatttatatttattagattaa

SEQ ID NO: 16666 - DNA, 96 bp, Aspergillus novofumigatus
  misc_feature: 89
ctcttattctatttcttactctccttctaactatcctaacctctcctaatctcttcttctatctcttcttctaactctccttctacctctccttaa

SEQ ID NO: 16667 - DNA, 96 bp, Aspergillus novofumigatus
  misc_feature: 89
cttcttctaatctacttattaaatcctaactttaatcctttcttcttttctctactctttcttctcttctctactctttcttctttccttttttaa

SEQ ID NO: 16668 - DNA, 96 bp, Aspergillus novofumigatus
  misc_feature: 89
tagcttatagttatataataatatactaattaatatagcaagcttatattatataatcttagctataatttatatacccccttttatattcagcca

SEQ ID NO: 16669 - DNA, 96 bp, Aspergillus novofumigatus
  misc_feature: 89
tcagtattataagagtattaataagtaaattaatattatattaataaggaaaaaatattatattaataatttaatatcctaatttaatatcttcca

SEQ ID NO: 16670 - DNA, 96 bp, Aspergillus novofumigatus
  misc_feature: 89
ccatagttaggagagaggtaggtagcaaggtagacagtaaggtagatagtaaggtagatagtgagataggcagtgaggtaggcagtaaggcaggca

SEQ ID NO: 16671 - DNA, 96 bp, Aspergillus novofumigatus
  misc_feature: 89
tgcctccctcactcactcactgcctgccttacttactatcttactcactaccttacttactgcctcactccctcactatctcacttactacctccc

SEQ ID NO: 16672 - DNA, 96 bp, Aspergillus novofumigatus
  misc_feature: 89
tgcctatcttactacctcccttactatcttacttactacctcccttactgttaaccttactatctacctcactacttatcttactacctccctcac

SEQ ID NO: 16673 - DNA, 96 bp, Aspergillus novofumigatus
  misc_feature: 89
tgcaaaagcatgaggtttaggtggactacttaaacataatccgaggataaggattttagcggcttgtagtattttagccgcttgttgcatttttgc

SEQ ID NO: 16674 - DNA, 96 bp, Aspergillus novofumigatus
  misc_feature: 89
tcttttcttttctattccctttcctcttccctttcctcttccctttcttctcctatttttaattatatttatttcttctctttactaaaactctct

SEQ ID NO: 16675 - DNA, 96 bp, Aspergillus novofumigatus
  misc_feature: 89
agttaatttagaaagaaaagaatagaaggtaaagatagataagatagaaagagtttaagtaaagggtaagaaagagaagaagaataagaagaaaga

SEQ ID NO: 16676 - DNA, 96 bp, Aspergillus novofumigatus
  misc_feature: 89
agagtaagagtagagtaagagtaagggttagaagaagagttagaataagagttaataaaagaaggattaaggagaggtagaaggagagttagaaga

SEQ ID NO: 16677 - DNA, 96 bp, Aspergillus novofumigatus
  misc_feature: 89
tcttccctataggacctatatttattatagtaataaataaaataataatacttataattataataaagagatagactttagtaaatacctaaatag

SEQ ID NO: 16678 - DNA, 96 bp, Aspergillus novofumigatus
  misc_feature: 89
gtttttaggagagaaggaataagaataggagttaagaataagagttagaagaagagataaaaagggttagaagaagaattaggaataaaaataaga

SEQ ID NO: 16679 - DNA, 96 bp, Aspergillus novofumigatus
  misc_feature: 89
aggagagatagaaggagagatagaaggagagatagaaggagagatagaaggagagttagaaggagagttagaaggagagtaagaaatagaataaga

SEQ ID NO: 16680 - DNA, 96 bp, Aspergillus novofumigatus
  misc_feature: 89
tcttattctaactcttcttctaacccttactcttactctactcttactcttattctatctcttattctatctcttattctatctcttattctatct

SEQ ID NO: 16681 - DNA, 96 bp, Aspergillus novofumigatus
  misc_feature: 89
tcttatcttaatctaataaatataaatatatatatctattatctagactaaatcttttctagtaactaaatctaattattatctagcttactagat

SEQ ID NO: 16682 - DNA, 96 bp, Aspergillus novofumigatus
  misc_feature: 89
tcttactctccttctaactctccttctaactctccttctatctctccttctatctctccttctatctctccttctatctctccttctatctctcct

SEQ ID NO: 16683 - DNA, 96 bp, Aspergillus novofumigatus
  misc_feature: 89
tcttactaaaattctaattattcttttttctatatctgactcttctttcttttcttttctttcttcttttctctttcttttctatctattatcttc

SEQ ID NO: 16684 - DNA, 96 bp, Aspergillus novofumigatus
  misc_feature: 89
tcttaatatatatattagtcttatagaatagatatagaactatattctatattacttagctattatctagctattataagaatagaaaatatagct

SEQ ID NO: 16685 - DNA, 96 bp, Aspergillus novofumigatus
  misc_feature: 89
tctctttctctttcttctcctttctatccctaactcttattctaacccttcttctatctcttcctctaatcctccttctaattcttattctatctc

SEQ ID NO: 16686 - DNA, 96 bp, Aspergillus novofumigatus
  misc_feature: 89
tctcttattctatctcttcttaatctcctctcttatcccttctaatctaaatccttacccttactcttatcctcaccctctttatcccttctaaac

SEQ ID NO: 16687 - DNA, 96 bp, Aspergillus novofumigatus
  misc_feature: 89
tctctcctaaaaacttttcttctaactcttattctaactctccttcttattattccttactcttcttctaatccttcttctatctctccctctatc

SEQ ID NO: 16688 - DNA, 96 bp, Aspergillus novofumigatus
  misc_feature: 89
tctctaactctttccttcttcccttctattcttaactctctctttctctttcttctcctttctatccctaactcttattctaacccttcttctatc

SEQ ID NO: 16689 - DNA, 96 bp, Aspergillus novofumigatus
  misc_feature: 89
tctcctaaaaacttttcttctaactcttattctaactctccttcttattattccttactcttcttctaatccttcttctatctctccctctatctc

SEQ ID NO: 16690 - DNA, 96 bp, Aspergillus novofumigatus
  misc_feature: 89
tctatctcttcttctaactctccttctacctctccttaatccttcttttattaactcttattctaactcttcttctaacccttactcttactctac

SEQ ID NO: 16691 - DNA, 96 bp, Aspergillus novofumigatus
  misc_feature: 89
tcactgcctatcttactacctcccttactatcttacttactacctcccttactgttaaccttactatctacctcactacttatcttactacctccc

SEQ ID NO: 16692 - DNA, 96 bp, Aspergillus novofumigatus
  misc_feature: 89
ggggagagttagggagagatagaaggggagatagagggagagatagaagaaggattagaagaagagtaaggaataataagaaggagagttagaata

SEQ ID NO: 16693 - DNA, 96 bp, Aspergillus novofumigatus
  misc_feature: 89
tattagtcttatagaatagatatagaactatattctatattacttagctattatctagctattataagaatagaaaatatagctactaagttagag

SEQ ID NO: 16694 - DNA, 96 bp, Aspergillus novofumigatus
  misc_feature: 89
tattaagtttagataggaggaagggatagagggagggataaagggagggatagaggaagggatagaataaaagtaaggattagtaagattagatag

SEQ ID NO: 16695 - DNA, 96 bp, Aspergillus novofumigatus
  misc_feature: 89
tatattagtcttatagaatagatatagaactatattctatattacttagctattatctagctattataagaatagaaaatatagctactaagttag

SEQ ID NO: 16696 - DNA, 96 bp, Aspergillus novofumigatus
  misc_feature: 89
ataatcctattctataaaagaagctagattatcctattatatatagaatattatagctctatagctataatattttaataagtctatattaatata

SEQ ID NO: 16697 - DNA, 96 bp, Aspergillus novofumigatus
  misc_feature: 89
tataaaagaagctagattatcctattatatatagaatattatagctctatagctataatattttaataagtctatattaatatatagcagctattc

SEQ ID NO: 16698 - DNA, 96 bp, Aspergillus novofumigatus
  misc_feature: 89
cctcccttactatcttacttactacctcccttactgttaaccttactatctacctcactacttatcttactacctccctcactgcctccctcacta

SEQ ID NO: 16699 - DNA, 96 bp, Aspergillus novofumigatus
  misc_feature: 89
aactcttattctaactcttcttctaacccttactcttactctactcttactcttattctatctcttattctatctcttattctatctcttattcta

SEQ ID NO: 16700 - DNA, 96 bp, Aspergillus novofumigatus
  misc_feature: 89
tagaaggtaaagatagataagatagaaagagtttaagtaaagggtaagaaagagaagaagaataagaagaaagagaagaaagagaagaaagagaag

SEQ ID NO: 16701 - DNA, 96 bp, Aspergillus novofumigatus
  misc_feature: 89
aggatttagattagaagggataagagaggagattaagaagagatagaataagagatagataagagatagaataagagtaagagtagagtaagagta

SEQ ID NO: 16702 - DNA, 96 bp, Aspergillus novofumigatus
  misc_feature: 89
atatatatcatattaaccatagttaggagagaggtaggtagcaaggtagacagtaaggtagatagtaaggtagatagtgagataggcagtgaggta

SEQ ID NO: 16703 - DNA, 96 bp, Aspergillus novofumigatus
  misc_feature: 89
taatatatatattagtcttatagaatagatatagaactatattctatattacttagctattatctagctattataagaatagaaaatatagctact

SEQ ID NO: 16704 - DNA, 96 bp, Aspergillus novofumigatus
  misc_feature: 89
taagggttattaagtttagataggaggaagggatagagggagggataaagggagggatagaggaagggatagaataaaagtaaggattagtaagat

SEQ ID NO: 16705 - DNA, 96 bp, Aspergillus novofumigatus
  misc_feature: 89
cttcttataactcttcttctatccttactaacccttaccctctcctactatctcttctttctctaattcttttcttccctctttttatccctctta

SEQ ID NO: 16706 - DNA, 96 bp, Aspergillus novofumigatus
  misc_feature: 89
cttgctgcctccctcactcactcactgcctgccttacttactatcttactcactaccttacttactgcctcactccctcactatctcacttactac

SEQ ID NO: 16707 - DNA, 96 bp, Aspergillus novofumigatus
  misc_feature: 89
gtagagatagatagatataggaaaataaggatttagaaggatttaggaagagagaggatttagaatgaagatagaaagaagagaggagaagagaag

SEQ ID NO: 16708 - DNA, 96 bp, Aspergillus novofumigatus
  misc_feature: 89
cctaatccctactctcatcctaaccctcccccttattaatatccttatcctattaataattatccccttctttatcctatattactttctataacc

SEQ ID NO: 16709 - DNA, 96 bp, Aspergillus novofumigatus
  misc_feature: 89
ggggtccggcgcggacgggttggtggagggtgggccggtgaccagttggcggggggcccttgggggggcagaccggcaggcaggggcgcgcgccct

SEQ ID NO: 16710 - DNA, 96 bp, Aspergillus novofumigatus
  misc_feature: 89
gggggcagaccggcaggcaggggcgcgcgccatagacagacacttgtagagacacacagacaccggggtcggtataggccgggcgcgcgcgccccc

SEQ ID NO: 16711 - DNA, 96 bp, Aspergillus novofumigatus
  misc_feature: 89
ctcttcttctaacccttactcttactctactcttactcttattctatctcttatctatctcttattctatctcttcttaatctcctctcttatccc

SEQ ID NO: 16712 - DNA, 96 bp, Aspergillus novofumigatus
  misc_feature: 89
ctagcttatagttatataataatatactaattaatatagcaagcttatattatataatcttagctataatttatatacccccttttatattcagcc

SEQ ID NO: 16713 - DNA, 96 bp, Aspergillus novofumigatus
  misc_feature: 89
actcttcttctaacccttactcttactctactcttactcttattctatctcttatctatctcttattctatctcttcttaatctcctctcttatcc

SEQ ID NO: 16714 - DNA, 96 bp, Aspergillus novofumigatus
  misc_feature: 89
ggaggcagtgagataggcagtaaggcaggcagcaagcaaagcagtgagcaaggcagtgagtaaggcagtcagcaagatagtgagtgagatagtgag

SEQ ID NO: 16715 - DNA, 96 bp, Aspergillus novofumigatus
  misc_feature: 89
ctcactgcctatctcactatctaccttactatctaccttactgtctaccttgctacctacctctctcctaactatggttaatatgatatatattcc

SEQ ID NO: 16716 - DNA, 96 bp, Aspergillus novofumigatus
  misc_feature: 89
attagtcttatagaatagatatagaactatattctatattacttagctattatctagctattataagaatagaaaatatagctactaagttagagc

SEQ ID NO: 16717 - DNA, 96 bp, Aspergillus novofumigatus
  misc_feature: 89
atcttaatatatatattagtcttatagaatagatatagaactatattctatattacttagctattatctagctattataagaatagaaaatatagc

SEQ ID NO: 16718 - DNA, 96 bp, Aspergillus novofumigatus
  misc_feature: 89
cttattctatttcttactctccttctaactatcctaacctctcctaatctcttcttctatctcttcttctaactctccttctacctctccttaatc

SEQ ID NO: 16719 - DNA, 96 bp, Aspergillus novofumigatus
  misc_feature: 89
acttttcttctaactcttattctaactctccttcttattattccttactcttcttctaatccttcttctatctctccctctatctccccttctatc

SEQ ID NO: 16720 - DNA, 96 bp, Aspergillus novofumigatus
  misc_feature: 89
aactcttcttctaacccttactcttactctactcttactcttattctatctcttatctatctcttattctatctcttcttaatctcctctcttatc

SEQ ID NO: 16721 - DNA, 96 bp, Aspergillus novofumigatus
  misc_feature: 89
gagattagaatttaaaatagaagtaaaaaaagaggttttaagagattagatagagaagaagaggtaaaagagaatttagggatagattaagaggag

SEQ ID NO: 16722 - DNA, 96 bp, Aspergillus novofumigatus
  misc_feature: 89
gaataaaagtaagggttattaagtttagataggaggaagggatagagggagggataaagggagggatagaggaagggatagaataaaagtaaggat

SEQ ID NO: 16723 - DNA, 96 bp, Aspergillus novofumigatus
  misc_feature: 89
gaaggatttaggaagagagaaggatttagaataaagatagaaagaagagaggagaagagaaggaaataagttataggatattaatttagagagatt

SEQ ID NO: 16724 - DNA, 96 bp, Aspergillus novofumigatus
  misc_feature: 89
gaagaagggtatatttttaatagaataagagagaagattaaaaaaggaaagaagaaagagtagagaagagaagaaagagtagagaaaagaagaaag

SEQ ID NO: 16725 - DNA, 96 bp, Aspergillus novofumigatus
  misc_feature: 89
ctttcttctcctttctatccctaactcttattctaacccttcttctatctcttcctctaatcctccttctaattcttattctatctctccttacct

SEQ ID NO: 16726 - DNA, 96 bp, Aspergillus novofumigatus
  misc_feature: 89
aatttaaaatagaagtaaaaaaagaggttttaagagattagatagagaagaagaggtaaaagagaatttagggatagattaagaggagagaagaag

SEQ ID NO: 16727 - DNA, 96 bp, Aspergillus novofumigatus
  misc_feature: 89
ctgaggagggaggcagtgagataggcagtaaggcaggcagcaagcaaagcagtgagcaaggcagtgagtaaggcagtcagcaagatagtgagtgag

SEQ ID NO: 16728 - DNA, 96 bp, Aspergillus novofumigatus
  misc_feature: 89
ctcttattctatctcttcttaatctcctctcttatcccttctaatctaaatccttacccttactcttatcctcaccctctttatcccttctaaact

SEQ ID NO: 16729 - DNA, 96 bp, Aspergillus novofumigatus
  misc_feature: 89
atagaataagagtaagagtagagtaagagtaagggttagaagaagagttagaataagagttaataaaagaaggattaaggagaggtagaaggagag

SEQ ID NO: 16730 - DNA, 96 bp, Aspergillus novofumigatus
  misc_feature: 89
ctctccttctaactctccttctaactctccttctatctctccttctatctctccttctatctctccttctatctctccttctatctctccttctat

SEQ ID NO: 16731 - DNA, 96 bp, Aspergillus novofumigatus
  misc_feature: 89
ctctatctcttttactaactctccttcttcttctaactcttatctctaactctttctctctctcttcccctccctcttcctcttcttataactctt

SEQ ID NO: 16732 - DNA, 96 bp, Aspergillus novofumigatus
  misc_feature: 89
agaagagatagtaggagagggtaagggttagtaaggatagaagaagagttataagaagaggaagagggaggggaagagagagagaaagagttagag

SEQ ID NO: 16733 - DNA, 96 bp, Aspergillus novofumigatus
  misc_feature: 89
ctccctcttcctcttcttataactcttcttctatccttactaacccttaccctctcctactatctcttctttctctaattcttttcttccctcttt

SEQ ID NO: 16734 - DNA, 96 bp, Aspergillus novofumigatus
  misc_feature: 89
ctatttcttactctccttctaactatcctaacctctcctaatctcttcttctatctcttcttctaactctccttctacctctccttaatccttctt

SEQ ID NO: 16735 - DNA, 96 bp, Aspergillus novofumigatus
  misc_feature: 89
aatattataaatcttaatatatatattagtcttatagaatagatatagaactatattctatattacttagctattatctagctattataagaatag

SEQ ID NO: 16736 - DNA, 96 bp, Aspergillus novofumigatus
  misc_feature: 89
aattaaggaaagataaaattaaaagaaaaggataaagttaaataataatttaatagaatgaattaggaatgtagtaaggattaatagaaatattag

SEQ ID NO: 16737 - DNA, 96 bp, Aspergillus novofumigatus
  misc_feature: 89
aataggagttaagaataagagttagaagaagagataaaaagggttagaagaagaattaggaataaaaataagaataaaaagtggaagaatagttag

SEQ ID NO: 16738 - DNA, 96 bp, Aspergillus novofumigatus
  misc_feature: 89
aagaagggtatatttttaatagaataagagagaagattaaaaaaggaaagaagaaagagtagagaagagaagaaagagtagagaaaagaagaaagg

SEQ ID NO: 16739 - DNA, 96 bp, Aspergillus novofumigatus
  misc_feature: 89
aagagatagataagagatagaataagagtaagagtagagtaagagtaagggttagaagaagagttagaataagagttaataaaagaaggattaagg

SEQ ID NO: 16740 - DNA, 96 bp, Aspergillus novofumigatus
  misc_feature: 89
ccctcttcctcttcttataactcttcttctatccttactaacccttaccctctcctactatctcttctttctctaattcttttcttccctcttttt

SEQ ID NO: 16741 - DNA, 96 bp, Aspergillus novofumigatus
  misc_feature: 89
atataattaaaaatagaagaagaaagggaagaggaaagggaagaggaaaggaaagaggaaagggaagaggaaagggaatagaaaagaaaagaaaat

SEQ ID NO: 16742 - DNA, 96 bp, Aspergillus novofumigatus
  misc_feature: 89
attctatctctaactctttccttcttcccttctattcttaactctctctttctctttcttctcctttctatccctaactcttattctaacccttct

SEQ ID NO: 16743 - DNA, 96 bp, Aspergillus novofumigatus
  misc_feature: 89
atcttgctgcctccctcactcactcactgcctgccttacttactatcttactcactaccttacttactgcctcactccctcactatctcacttact

SEQ ID NO: 16744 - DNA, 96 bp, Aspergillus novofumigatus
  misc_feature: 89
atcctataacttatttccttctcttctcctctcttctttctatctttattctaaatccttctctcttcctaaatccttctaaatccttattttcct

SEQ ID NO: 16745 - DNA, 96 bp, Aspergillus novofumigatus
  misc_feature: 89
aaataatatatattaaagtatactatacttcttaaactctattaataaaatatatctaatactaaactagaaatatattaagatatactatcctat

SEQ ID NO: 16746 - DNA, 96 bp, Aspergillus novofumigatus
  misc_feature: 89
actcttattctaactcttcttctaacccttactcttactctactcttactcttattctatctcttattctatctcttattctatctcttattctat

SEQ ID NO: 16747 - DNA, 96 bp, Aspergillus novofumigatus
  misc_feature: 89
aacttttcttctaactcttattctaactctccttcttattattccttactcttcttctaatccttcttctatctctccctctatctccccttctat

SEQ ID NO: 16748 - DNA, 96 bp, Aspergillus novofumigatus
  misc_feature: 89
aacagggtattagtaaatttaaatatctaatagatattaaattaagaaatctttattaattatagttattatatagctagagttaaagtaaattat

SEQ ID NO: 16749 - DNA, 96 bp, Aspergillus novofumigatus
  misc_feature: 89
aatctcttactaaaattctaattattcttttttctatatctgactcttctttcttttcttttctttcttcttttctctttcttttctatctattat

SEQ ID NO: 16750 - DNA, 96 bp, Aspergillus novofumigatus
  misc_feature: 89
accctctatctcttttactaactctccttcttcttctaactcttatctctaactctttctctctctcttcccctccctcttcctcttcttataact

SEQ ID NO: 16751 - DNA, 96 bp, Aspergillus novofumigatus
  misc_feature: 89
acctcccttactatcttacttactacctcccttactgttaaccttactatctacctcactacttatcttactacctccctcactgcctccctcact

SEQ ID NO: 16752 - DNA, 96 bp, Aspergillus novofumigatus
  misc_feature: 89
actctattacttatccttccttactttattctccttactacctcttaccttctatctattctccttattttactaaatacctccctctctatctct

SEQ ID NO: 16753 - DNA, 96 bp, Aspergillus novofumigatus
  misc_feature: 89
actatctaaatttaaaataataagtatatactatataaatatttaatatatttataacttagctattatactacctagggatgctataaagatatt

SEQ ID NO: 16754 - DNA, 96 bp, Aspergillus novofumigatus
  misc_feature: 88
tttttaggagagaaggaataagaataggagttaagaataagagttagaagaagagataaaaagggttagaagaagaattaggaataaaaataagaa

SEQ ID NO: 16755 - DNA, 96 bp, Aspergillus novofumigatus
  misc_feature: 88
ttttaggagagaaggaataagaataggagttaagaataagagttagaagaagagataaaaagggttagaagaagaattaggaataaaaataagaat

SEQ ID NO: 16756 - DNA, 96 bp, Aspergillus novofumigatus
  misc_feature: 88
tttcttcttattcttcttattcttcctctctttcttaccctttacttaaactctttctatcttatctatctttaccttctattcttttctttctaa

SEQ ID NO: 16757 - DNA, 96 bp, Aspergillus novofumigatus
  misc_feature: 88
aattaaaattaaggaaagataaaattaaaagaaaaggataaagttaaataataatttaatagaatgaattaggaatgtagtaaggattaatagaaa

SEQ ID NO: 16758 - DNA, 96 bp, Aspergillus novofumigatus
  misc_feature: 88
tttattctatctctaactctttccttcttcccttctattcttaactctctctttctctttcttctcctttctatccctaactcttattctaaccct

SEQ ID NO: 16759 - DNA, 96 bp, Aspergillus novofumigatus
  misc_feature: 88
tttaggagagaaggaataagaataggagttaagaataagagttagaagaagagataaaaagggttagaagaagaattaggaataaaaataagaata

SEQ ID NO: 16760 - DNA, 96 bp, Aspergillus novofumigatus
  misc_feature: 88
atctcttattctatctcttcttaatctcctctcttatcccttctaatctaaatccttacccttactcttatcctcaccctctttatcccttctaaa

SEQ ID NO: 16761 - DNA, 96 bp, Aspergillus novofumigatus
  misc_feature: 88
tttagaaggatttaggaagagagaaggatttagaataaagatagaaagaagagaggagaagagaaggaaataagttataggatattaatttagaga

SEQ ID NO: 16762 - DNA, 96 bp, Aspergillus novofumigatus
  misc_feature: 88
ttgctcactgcctatcttactacctcccttactatcttacttactacctcccttactgttaaccttactatctacctcactacttatcttactacc

SEQ ID NO: 16763 - DNA, 96 bp, Aspergillus novofumigatus
  misc_feature: 88
gaatttaaaatagaagtaaaaaaagaggttttaagagattagatagagaagaagaggtaaaagagaatttagggatagattaagaggagagaagaa

SEQ ID NO: 16764 - DNA, 96 bp, Aspergillus novofumigatus
  misc_feature: 88
ttctctactctttcttctcttctctactctttcttctttccttttttaatcttctctcttattctattaaaaatatacccttcttctctcttatat

SEQ ID NO: 16765 - DNA, 96 bp, Aspergillus novofumigatus
  misc_feature: 88
taagagtaagagtagagtaagagtaagggttagaagaagagttagaataagagttaataaaagaaggattaaggagaggtagaaggagagttagaa

SEQ ID NO: 16766 - DNA, 96 bp, Aspergillus novofumigatus
  misc_feature: 88
ttcagtattataagagtattaataagtaaattaatattatattaataaggaaaaaatattatattaataatttaatatcctaatttaatatcttcc

SEQ ID NO: 16767 - DNA, 96 bp, Aspergillus novofumigatus
  misc_feature: 88
ttattctatctctaactctttccttcttcccttctattcttaactctctctttctctttcttctcctttctatccctaactcttattctaaccctt

SEQ ID NO: 16768 - DNA, 96 bp, Aspergillus novofumigatus
  misc_feature: 88
ttattaagtttagataggaggaagggatagagggagggataaagggagggatagaggaagggatagaataaaagtaaggattagtaagattagata

SEQ ID NO: 16769 - DNA, 96 bp, Aspergillus novofumigatus
  misc_feature: 88
ttataactcttcttctatccttactaacccttaccctctcctactatctcttctttctctaattcttttcttccctctttttatccctcttatcta

SEQ ID NO: 16770 - DNA, 96 bp, Aspergillus novofumigatus
  misc_feature: 88
cttattctatctcttcttaatctcctctcttatcccttctaatctaaatccttacccttactcttatcctcaccctctttatcccttctaaactaa

SEQ ID NO: 16771 - DNA, 96 bp, Aspergillus novofumigatus
  misc_feature: 88
ttaggggagagttagggagagatagaaggggagatagagggagagatagaagaaggattagaagaagagtaaggaataataagaaggagagttaga

SEQ ID NO: 16772 - DNA, 96 bp, Aspergillus novofumigatus
  misc_feature: 88
ttagatagaggggttaaataagagatagaaggagagatagaaggagagatagaaggagagatagaaggagagatagaaggagagatagaaggagag

SEQ ID NO: 16773 - DNA, 96 bp, Aspergillus novofumigatus
  misc_feature: 88
tatctcttattctatctcttcttaatctcctctcttatcccttctaatctaaatccttacccttactcttatcctcaccctctttatcccttctaa

SEQ ID NO: 16774 - DNA, 96 bp, Aspergillus novofumigatus
  misc_feature: 88
ttaactcttattctaactcttcttctaacccttactcttactctactcttactcttattctatctcttattctatctcttattctatctcttattc

SEQ ID NO: 16775 - DNA, 96 bp, Aspergillus novofumigatus
  misc_feature: 88
gtaagtaagatagtgagggaggcagtgagtgagatagtaagtaagatagtgagggaggtagtgagtaagacagtgagtgagatagtaagtaaggca

SEQ ID NO: 16776 - DNA, 96 bp, Aspergillus novofumigatus
  misc_feature: 88
ctgcctatcttactacctcccttactatcttacttactacctcccttactgttaaccttactatctacctcactacttatcttactacctccctca

SEQ ID NO: 16777 - DNA, 96 bp, Aspergillus novofumigatus
  misc_feature: 88
gtatactatctaaatttaaaataataagtatatactatataaatatttaatatatttataacttagctattatactacctagggatgctataaaga

SEQ ID NO: 16778 - DNA, 96 bp, Aspergillus novofumigatus
  misc_feature: 88
tcttgctgcctccctcactcactcactgcctgccttacttactatcttactcactaccttacttactgcctcactccctcactatctcacttacta

SEQ ID NO: 16779 - DNA, 96 bp, Aspergillus novofumigatus
  misc_feature: 88
agaatttaaaatagaagtaaaaaaagaggttttaagagattagatagagaagaagaggtaaaagagaatttagggatagattaagaggagagaaga

SEQ ID NO: 16780 - DNA, 96 bp, Aspergillus novofumigatus
  misc_feature: 88
tcttctatctcttcttctaactctccttctacctctccttaatccttcttttattaactcttattctaactcttcttctaacccttactcttactc

SEQ ID NO: 16781 - DNA, 96 bp, Aspergillus novofumigatus
  misc_feature: 88
tcttcctcttcttataactcttcttctatccttactaacccttaccctctcctactatctcttctttctctaattcttttcttccctctttttatc

SEQ ID NO: 16782 - DNA, 96 bp, Aspergillus novofumigatus
  misc_feature: 88
tcttattctatctcttcttaatctcctctcttatcccttctaatctaaatccttacccttactcttatcctcaccctctttatcccttctaaacta

SEQ ID NO: 16783 - DNA, 96 bp, Aspergillus novofumigatus
  misc_feature: 88
gatagtaggagagggtaagggttagtaaggatagaagaagagttataagaagaggaagagggaggggaagagagagagaaagagttagagataaga

SEQ ID NO: 16784 - DNA, 96 bp, Aspergillus novofumigatus
  misc_feature: 88
tcttataactcttcttctatccttactaacccttaccctctcctactatctcttctttctctaattcttttcttccctctttttatccctcttatc

SEQ ID NO: 16785 - DNA, 96 bp, Aspergillus novofumigatus
  misc_feature: 88
gtaaggatttagattagaagggataagagaggagattaagaagagatagaataagagatagataagagatagaataagagtaagagtagagtaaga

SEQ ID NO: 16786 - DNA, 96 bp, Aspergillus novofumigatus
  misc_feature: 88
gtaagagtaagggttagaagaagagttagaataagagttaaggaaagagataaaagaaggattaagaagaggtagaagaagagttagaagaagaga

SEQ ID NO: 16787 - DNA, 96 bp, Aspergillus novofumigatus
  misc_feature: 88
agattagaatttaaaatagaagtaaaaaaagaggttttaagagattagatagagaagaagaggtaaaagagaatttagggatagattaagaggaga

SEQ ID NO: 16788 - DNA, 96 bp, Aspergillus novofumigatus
  misc_feature: 88
tctatctcttttactaactctccttcttcttctaactcttatctctaactctttctctctctcttcccctccctcttcctcttcttataactcttc

SEQ ID NO: 16789 - DNA, 96 bp, Aspergillus novofumigatus
  misc_feature: 88
tctatctcttattctatctcttcttaatctcctctcttatcccttctaatctaaatccttacccttactcttatcctcaccctctttatcccttct

SEQ ID NO: 16790 - DNA, 96 bp, Aspergillus novofumigatus
  misc_feature: 88
ataagagtaagagtagagtaagagtaagggttagaagaagagttagaataagagttaataaaagaaggattaaggagaggtagaaggagagttaga

SEQ ID NO: 16791 - DNA, 96 bp, Aspergillus novofumigatus
  misc_feature: 88
attgaagagagttagggtttgagtaagaaagaggtaaggagagatagaataagaattagaaggaggattagaggaagagatagaagaagggttaga

SEQ ID NO: 16792 - DNA, 96 bp, Aspergillus novofumigatus
  misc_feature: 88
gaaatatataagatagagagagttttagtaaagagaagaaataaatataattaaaaatagaagaagaaagggaagaggaaagggaagaggaaagga

SEQ ID NO: 16793 - DNA, 96 bp, Aspergillus novofumigatus
  misc_feature: 88
gagatagaataagagtaagagtagagtaagagtaagggttagaagaagagttagaataagagttaataaaagaaggattaaggagaggtagaagga

SEQ ID NO: 16794 - DNA, 96 bp, Aspergillus novofumigatus
  misc_feature: 88
agggaagaaaagaattagagaaagaagagatagtaggagagggtaagggttagtaaggatagaagaagagttataagaagaggaagagggagggga

SEQ ID NO: 16795 - DNA, 96 bp, Aspergillus novofumigatus
  misc_feature: 88
gaaggaataagaataggagttaagaataagagttagaagaagagataaaaagggttagaagaagaattaggaataaaaataagaataaaaagtgga

SEQ ID NO: 16796 - DNA, 96 bp, Aspergillus novofumigatus
  misc_feature: 88
gtaagatagtgagggaggcagtgagtgagatagtaagtaagatagtgagggaggtagtgagtaagacagtgagtgagatagtaagtaaggcagtga

SEQ ID NO: 16797 - DNA, 96 bp, Aspergillus novofumigatus
  misc_feature: 88
tatctcttttactaactctccttcttcttctaactcttatctctaactctttctctctctcttcccctccctcttcctcttcttataactcttctt

SEQ ID NO: 16798 - DNA, 96 bp, Aspergillus novofumigatus
  misc_feature: 88
aagagagatttagatagaggggttaaataagagatagaaggagagatagaaggagagatagaaggagagatagaaggagagatagaaggagagata

SEQ ID NO: 16799 - DNA, 96 bp, Aspergillus novofumigatus
  misc_feature: 88
tatcctaatccctactctcatcctaaccctcccccttattaatatccttatcctattaataattatccccttctttatcctatattactttctata

SEQ ID NO: 16800 - DNA, 96 bp, Aspergillus novofumigatus
  misc_feature: 88
aaagaaagagaaaagaagaaagaaaagaaaagaaagaagagttagatatagaaaaaagaataattagaattttagtaagagattatataagggata

SEQ ID NO: 16801 - DNA, 96 bp, Aspergillus novofumigatus
  misc_feature: 88
tatatatcatattaaccatagttaggagagaggtaggtagcaaggtagacagtaaggtagatagtaaggtagatagtgagataggcagtgaggtag

SEQ ID NO: 16802 - DNA, 96 bp, Aspergillus novofumigatus
  misc_feature: 88
tagaatactagtatataagaatatagaatagctgctatatattaatatagacttattaaaatattatagctatagagctataatattctatatata

SEQ ID NO: 16803 - DNA, 96 bp, Aspergillus novofumigatus
  misc_feature: 88
tatactatctaaatttaaaataataagtatatactatataaatatttaatatatttataacttagctattatactacctagggatgctataaagat

SEQ ID NO: 16804 - DNA, 96 bp, Aspergillus novofumigatus
  misc_feature: 88
tataactcttcttctatccttactaacccttaccctctcctactatctcttctttctctaattcttttcttccctctttttatccctcttatctat

SEQ ID NO: 16805 - DNA, 96 bp, Aspergillus novofumigatus
  misc_feature: 88
tactacctctcttactacttaccttactattaaccttactatctactatgatatttatattactatctaccttattacctaccttactattgacta

SEQ ID NO: 16806 - DNA, 96 bp, Aspergillus novofumigatus
  misc_feature: 88
cttaatatatatattagtcttatagaatagatatagaactatattctatattacttagctattatctagctattataagaatagaaaatatagcta

SEQ ID NO: 16807 - DNA, 96 bp, Aspergillus novofumigatus
  misc_feature: 88
aagtcctagaatactagtatataagaatatagaatagctgctatatattaatatagacttattaaaatattatagctatagagctataatattcta

SEQ ID NO: 16808 - DNA, 96 bp, Aspergillus novofumigatus
  misc_feature: 88
ctatctcttattctatctcttcttaatctcctctcttatcccttctaatctaaatccttacccttactcttatcctcaccctctttatcccttcta

SEQ ID NO: 16809 - DNA, 96 bp, Aspergillus novofumigatus
  misc_feature: 88
tactctattacttatccttccttactttattctccttactacctcttaccttctatctattctccttattttactaaatacctccctctctatctc

SEQ ID NO: 16810 - DNA, 96 bp, Aspergillus novofumigatus
  misc_feature: 88
aataagagatagataagagatagaataagagtaagagtagagtaagagtaagggttagaagaagagttagaataagagttaataaaagaaggatta

SEQ ID NO: 16811 - DNA, 96 bp, Aspergillus novofumigatus
  misc_feature: 88
taatagatatatatatttatatttattagattaagataagaagagattaagtatatatatttaaaaaaaaaataagagaaatttagagattagatc

SEQ ID NO: 16812 - DNA, 96 bp, Aspergillus novofumigatus
  misc_feature: 88
taaggatttagattagaagggataagagaggagattaagaagagatagaataagagatagataagagatagaataagagtaagagtagagtaagag

SEQ ID NO: 16813 - DNA, 96 bp, Aspergillus novofumigatus
  misc_feature: 88
taaggatttagaaggatttaggaagagagaaggatttagaataaagatagaaagaagagaggagaagagaaggaaataagttataggatattaatt

SEQ ID NO: 16814 - DNA, 96 bp, Aspergillus novofumigatus
  misc_feature: 88
taacttatttccttctcttctcctctcttctttctatctttattctaaatccttctctcttcctaaatccttctaaatccttattttcctatatct

SEQ ID NO: 16815 - DNA, 96 bp, Aspergillus novofumigatus
  misc_feature: 88
gaataggagttaagaataagagttagaagaagagataaaaagggttagaagaagaattaggaataaaaataagaataaaaagtggaagaatagtta

SEQ ID NO: 16816 - DNA, 96 bp, Aspergillus novofumigatus
  misc_feature: 88
taaataagagatagaaggagagatagaaggagagatagaaggagagatagaaggagagatagaaggagagatagaaggagagatagaaggagagtt

SEQ ID NO: 16817 - DNA, 96 bp, Aspergillus novofumigatus
  misc_feature: 88
taaaattaaggaaagataaaattaaaagaaaaggataaagttaaataataatttaatagaatgaattaggaatgtagtaaggattaatagaaatat

SEQ ID NO: 16818 - DNA, 96 bp, Aspergillus novofumigatus
  misc_feature: 88
gtattagtaaatttaaatatctaatagatattaaattaagaaatctttattaattatagttattatatagctagagttaaagtaaattattataat

SEQ ID NO: 16819 - DNA, 96 bp, Aspergillus novofumigatus
  misc_feature: 88
ggtttgagtaagaaagaggtaaggagagatagaataagaattagaaggaggattagaggaagagatagaagaagggttagaataagagttagggat

SEQ ID NO: 16820 - DNA, 96 bp, Aspergillus novofumigatus
  misc_feature: 88
ggtaaggatttagattagaagggataagagaggagattaagaagagatagaataagagatagataagagatagaataagagtaagagtagagtaag

SEQ ID NO: 16821 - DNA, 96 bp, Aspergillus novofumigatus
  misc_feature: 88
gggttaaataagagatagaaggagagatagaaggagagatagaaggagagatagaaggagagatagaaggagagatagaaggagagatagaaggag

SEQ ID NO: 16822 - DNA, 96 bp, Aspergillus novofumigatus
  misc_feature: 88
ggatttagaaggatttaggaagagagaaggatttagaataaagatagaaagaagagaggagaagagaaggaaataagttataggatattaatttag

SEQ ID NO: 16823 - DNA, 96 bp, Aspergillus novofumigatus
  misc_feature: 88
ctgcctccctcactcactcactgcctgccttacttactatcttactcactaccttacttactgcctcactccctcactatctcacttactacctcc

SEQ ID NO: 16824 - DNA, 96 bp, Aspergillus novofumigatus
  misc_feature: 88
ctcactgcctatcttactacctcccttactatcttacttactacctcccttactgttaaccttactatctacctcactacttatcttactacctcc

SEQ ID NO: 16825 - DNA, 96 bp, Aspergillus novofumigatus
  misc_feature: 88
ctttctctttcttctcctttctatccctaactcttattctaacccttcttctatctcttcctctaatcctccttctaattcttattctatctctcc

SEQ ID NO: 16826 - DNA, 96 bp, Aspergillus novofumigatus
  misc_feature: 88
ggaacagggtattagtaaatttaaatatctaatagatattaaattaagaaatctttattaattatagttattatatagctagagttaaagtaaatt

SEQ ID NO: 16827 - DNA, 96 bp, Aspergillus novofumigatus
  misc_feature: 88
gctcactgcctatcttactacctcccttactatcttacttactacctcccttactgttaaccttactatctacctcactacttatcttactacctc

SEQ ID NO: 16828 - DNA, 96 bp, Aspergillus novofumigatus
  misc_feature: 88
gaggcagtgagataggcagtaaggcaggcagcaagcaaagcagtgagcaaggcagtgagtaaggcagtcagcaagatagtgagtgagatagtgagc

SEQ ID NO: 16829 - DNA, 96 bp, Aspergillus novofumigatus
  misc_feature: 88
ataggagttaagaataagagttagaagaagagataaaaagggttagaagaagaattaggaataaaaataagaataaaaagtggaagaatagttagc

SEQ ID NO: 16830 - DNA, 96 bp, Aspergillus novofumigatus
  misc_feature: 88
gcctatcttactacctcccttactatcttacttactacctcccttactgttaaccttactatctacctcactacttatcttactacctccctcact

SEQ ID NO: 16831 - DNA, 96 bp, Aspergillus novofumigatus
  misc_feature: 88
gattcagctaacatactatataaaccaaccgtataatatatatctctgcgcattatggtatactaaaatatatattcattcccaaatatatcaatg

SEQ ID NO: 16832 - DNA, 96 bp, Aspergillus novofumigatus
  misc_feature: 88
cttcttttattaactcttattctaactcttcttctaacccttactcttactctactcttactcttattctatctcttatctatctcttattctatc

SEQ ID NO: 16833 - DNA, 96 bp, Aspergillus novofumigatus
  misc_feature: 88
gagggaagaaaagaattagagaaagaagagatagtaggagagggtaagggttagtaaggatagaagaagagttataagaagaggaagagggagggg

SEQ ID NO: 16834 - DNA, 96 bp, Aspergillus novofumigatus
  misc_feature: 88
cccttattctctctcttattattaccttttattttcttttcttttctattccctttcctcttccctttcctctttcctttcctcttccctttcctc

SEQ ID NO: 16835 - DNA, 96 bp, Aspergillus novofumigatus
  misc_feature: 88
cttttcttttctattccctttcctcttccctttcctcttccctttcttctcctatttttaattatatttatttcttctctttactaaaactctctc

SEQ ID NO: 16836 - DNA, 96 bp, Aspergillus novofumigatus
  misc_feature: 88
ctattaaattattatttaactttatccttttcttttaattttatctttccttaattttaatttcttcttctctttcttcttctctttcttcttctc

SEQ ID NO: 16837 - DNA, 96 bp, Aspergillus novofumigatus
  misc_feature: 88
gagaaagaagagatagtaggagagggtaagggttagtaaggatagaagaagagttataagaagaggaagagggaggggaagagagagagaaagagt

SEQ ID NO: 16838 - DNA, 96 bp, Aspergillus novofumigatus
  misc_feature: 88
cctcactgcctatctcactatctaccttactatctaccttactgtctaccttgctacctacctctctcctaactatggttaatatgatatatattc

SEQ ID NO: 16839 - DNA, 96 bp, Aspergillus novofumigatus
  misc_feature: 88
attcagtattataagagtattaataagtaaattaatattatattaataaggaaaaaatattatattaataatttaatatcctaatttaatatcttc

SEQ ID NO: 16840 - DNA, 96 bp, Aspergillus novofumigatus
  misc_feature: 88
atctcttttactaactctccttcttcttctaactcttatctctaactctttctctctctcttcccctccctcttcctcttcttataactcttcttc

SEQ ID NO: 16841 - DNA, 96 bp, Aspergillus novofumigatus
  misc_feature: 88
gaaagggaagaggaaagggaagaggaaagggaatagaaaagaaaagaaaataaaaggtaataataagagagagaataagggttaggaataaaatag

SEQ ID NO: 16842 - DNA, 96 bp, Aspergillus novofumigatus
  misc_feature: 88
cttttcttctaactcttattctaactctccttcttattattccttactcttcttctaatccttcttctatctctccctctatctccccttctatct

SEQ ID NO: 16843 - DNA, 96 bp, Aspergillus novofumigatus
  misc_feature: 88
cttcttatcttaatctaataaatataaatatatatatctattatctagactaaatcttttctagtaactaaatctaattattatctagcttactag

SEQ ID NO: 16844 - DNA, 96 bp, Aspergillus novofumigatus
  misc_feature: 88
cttctatctcttcttctaactctccttctacctctccttaatccttcttttattaactcttattctaactcttcttctaacccttactcttactct

SEQ ID NO: 16845 - DNA, 96 bp, Aspergillus novofumigatus
  misc_feature: 88
aagagtaagagtagagtaagagtaagggttagaagaagagttagaataagagttaataaaagaaggattaaggagaggtagaaggagagttagaag

SEQ ID NO: 16846 - DNA, 96 bp, Aspergillus novofumigatus
  misc_feature: 88
agtatataagttaatttagaaagaaaagaatagaaggtaaagatagataagatagaaagagtttaagtaaagggtaagaaagagaggaagaataag

SEQ ID NO: 16847 - DNA, 96 bp, Aspergillus novofumigatus
  misc_feature: 88
aaggagagatagaaggagagatagaaggagagatagaaggagagatagaaggagagttagaaggagagttagaaggagagtaagaaatagaataag

SEQ ID NO: 16848 - DNA, 96 bp, Aspergillus novofumigatus
  misc_feature: 88
agaagtaaaaaaagaggttttaagagattagatagagaagaagaggtaaaagagaatttagggatagattaagaggagagaagaaggagtaataag

SEQ ID NO: 16849 - DNA, 96 bp, Aspergillus novofumigatus
  misc_feature: 88
cttactctccttctaactctccttctaactctccttctatctctccttctatctctccttctatctctccttctatctctccttctatctctcctt

SEQ ID NO: 16850 - DNA, 96 bp, Aspergillus novofumigatus
  misc_feature: 88
ctctttctctttcttctcctttctatccctaactcttattctaacccttcttctatctcttcctctaatcctccttctaattcttattctatctct

SEQ ID NO: 16851 - DNA, 96 bp, Aspergillus novofumigatus
  misc_feature: 88
agtaagagtaagggttagaagaagagttagaataagagttaaggaaagagataaaagaaggattaagaagaggtagaagaagagttagaagaagag

SEQ ID NO: 16852 - DNA, 96 bp, Aspergillus novofumigatus
  misc_feature: 88
aagaaaagaattagagaaagaagagatagtaggagagggtaagggttagtaaggatagaagaagagttataagaagaggaagagggaggggaagag

SEQ ID NO: 16853 - DNA, 96 bp, Aspergillus novofumigatus
  misc_feature: 88
aagtaaaaaaagaggttttaagagattagatagagaagaagaggtaaaagagaatttagggatagattaagaggagagaagaaggagtaataagag

SEQ ID NO: 16854 - DNA, 96 bp, Aspergillus novofumigatus
  misc_feature: 88
ctctcctaaaaacttttcttctaactcttattctaactctccttcttattattccttactcttcttctaatccttcttctatctctccctctatct

SEQ ID NO: 16855 - DNA, 96 bp, Aspergillus novofumigatus
  misc_feature: 88
ctatctctaactctttccttcttcccttctattcttaactctctctttctctttcttctcctttctatccctaactcttattctaacccttcttct

SEQ ID NO: 16856 - DNA, 96 bp, Aspergillus novofumigatus
  misc_feature: 88
ctaatccctactctcatcctaaccctcccccttattaatatccttatcctattaataattatccccttctttatcctatattactttctataacct

SEQ ID NO: 16857 - DNA, 96 bp, Aspergillus novofumigatus
  misc_feature: 88
ctaacctctcctaatctcttcttctatctcttcttctaactctccttctacctctccttaatccttcttttattaactcttattctaactcttctt

SEQ ID NO: 16858 - DNA, 96 bp, Aspergillus novofumigatus
  misc_feature: 88
atttaaaatagaagtaaaaaaagaggttttaagagattagatagagaagaagaggtaaaagagaatttagggatagattaagaggagagaagaagg

SEQ ID NO: 16859 - DNA, 96 bp, Aspergillus novofumigatus
  misc_feature: 88
ccttattctctctcttattattaccttttattttcttttcttttctattccctttcctcttccctttcctctttcctttcctcttccctttcctct

SEQ ID NO: 16860 - DNA, 96 bp, Aspergillus novofumigatus
  misc_feature: 88
cctccctcttcctcttcttataactcttcttctatccttactaacccttaccctctcctactatctcttctttctctaattcttttcttccctctt

SEQ ID NO: 16861 - DNA, 96 bp, Aspergillus novofumigatus
  misc_feature: 88
cctataacttatttccttctcttctcctctcttctttctatctttattctaaatccttctctcttcctaaatccttctaaatccttattttcctat

SEQ ID NO: 16862 - DNA, 96 bp, Aspergillus novofumigatus
  misc_feature: 88
agagggaagaaaagaattagagaaagaagagatagtaggagagggtaagggttagtaaggatagaagaagagttataagaagaggaagagggaggg

SEQ ID NO: 16863 - DNA, 96 bp, Aspergillus novofumigatus
  misc_feature: 88
ccctcactatctcactcactatctcactcactgccttacttactatctcactcactgtcttactcactacctccctcactatcttacttactatct

SEQ ID NO: 16864 - DNA, 96 bp, Aspergillus novofumigatus
  misc_feature: 88
agataggaggaagggatagagggagggataaagggagggatagaggaagggatagaataaaagtaaggattagtaagattagataggaggaagggg

SEQ ID NO: 16865 - DNA, 96 bp, Aspergillus novofumigatus
  misc_feature: 88
cagtattataagagtattaataagtaaattaatattatattaataaggaaaaaatattatattaataatttaatatcctaatttaatatcttccat

SEQ ID NO: 16866 - DNA, 96 bp, Aspergillus novofumigatus
  misc_feature: 88
ataaggatttagaaggatttaggaagagagaaggatttagaataaagatagaaagaagagaggagaagagaaggaaataagttataggatattaat

SEQ ID NO: 16867 - DNA, 96 bp, Aspergillus novofumigatus
  misc_feature: 88
ataatagatatatatatttatatttattagattaagataagaagagattaagtatatatatttaaaaaaaaaataagagaaatttagagattagat

SEQ ID NO: 16868 - DNA, 96 bp, Aspergillus novofumigatus
  misc_feature: 88
aagggttattaagtttagataggaggaagggatagagggagggataaagggagggatagaggaagggatagaataaaagtaaggattagtaagatt

SEQ ID NO: 16869 - DNA, 96 bp, Aspergillus novofumigatus
  misc_feature: 88
aaggatttagaaggatttaggaagagagaaggatttagaataaagatagaaagaagagaggagaagagaaggaaataagttataggatattaattt

SEQ ID NO: 16870 - DNA, 96 bp, Aspergillus novofumigatus
  misc_feature: 87
ggagagaaggaataagaataggagttaagaataagagttagaagaagagataaaaagggttagaagaagaattaggaataaaaataagaataaaaa

SEQ ID NO: 16871 - DNA, 96 bp, Aspergillus novofumigatus
  misc_feature: 87
aggagagaaggaataagaataggagttaagaataagagttagaagaagagataaaaagggttagaagaagaattaggaataaaaataagaataaaa

SEQ ID NO: 16872 - DNA, 96 bp, Aspergillus novofumigatus
  misc_feature: 87
ttttattaactcttattctaactcttcttctaacccttactcttactctactcttactcttattctatctcttatctatctcttattctatctctt

SEQ ID NO: 16873 - DNA, 96 bp, Aspergillus novofumigatus
  misc_feature: 87
tttcttactctccttctaactctccttctaactctccttctatctctccttctatctctccttctatctctccttctatctctccttctatctctc

SEQ ID NO: 16874 - DNA, 96 bp, Aspergillus novofumigatus
  misc_feature: 87
tttattaactcttattctaactcttcttctaacccttactcttactctactcttactcttattctatctcttatctatctcttattctatctcttc

SEQ ID NO: 16875 - DNA, 96 bp, Aspergillus novofumigatus
  misc_feature: 87
tttatctcttctctctatttctctcttaattcttactctatctcttactttacccctttctctatctctctcttctatctacacttactacccctt

SEQ ID NO: 16876 - DNA, 96 bp, Aspergillus novofumigatus
  misc_feature: 87
tttaggggagagttagggagagatagaaggggagatagagggagagatagaagaaggattagaagaagagtaaggaataataagaaggagagttag

SEQ ID NO: 16877 - DNA, 96 bp, Aspergillus novofumigatus
  misc_feature: 87
tttagataggaggaagggatagagggagggataaagggagggatagaggaagggatagaataaaagtaaggattagtaagattagataggaggaag

SEQ ID NO: 16878 - DNA, 96 bp, Aspergillus novofumigatus
  misc_feature: 87
taggaacagggtattagtaaatttaaatatctaatagatattaaattaagaaatctttattaattatagttattatatagctagagttaaagtaaa

SEQ ID NO: 16879 - DNA, 96 bp, Aspergillus novofumigatus
  misc_feature: 87
gagtaagagtagagtaagagtaagggttagaagaagagttagaataagagttaataaaagaaggattaaggagaggtagaaggagagttagaagaa

SEQ ID NO: 16880 - DNA, 96 bp, Aspergillus novofumigatus
  misc_feature: 87
tatataagttaatttagaaagaaaagaatagaaggtaaagatagataagatagaaagagtttaagtaaagggtaagaaagagaggaagaataagaa

SEQ ID NO: 16881 - DNA, 96 bp, Aspergillus novofumigatus
  misc_feature: 87
ttcttataactcttcttctatccttactaacccttaccctctcctactatctcttctttctctaattcttttcttccctctttttatccctcttat

SEQ ID NO: 16882 - DNA, 96 bp, Aspergillus novofumigatus
  misc_feature: 87
ttcttactctccttctaactctccttctaactctccttctatctctccttctatctctccttctatctctccttctatctctccttctatctctcc

SEQ ID NO: 16883 - DNA, 96 bp, Aspergillus novofumigatus
  misc_feature: 87
ttctcctctcttctttctatctttattctaaatccttctctcttcctaaatccttctaaatccttattttcctatatctatctatccctactctta

SEQ ID NO: 16884 - DNA, 96 bp, Aspergillus novofumigatus
  misc_feature: 87
aaattaaaattaaggaaagataaaattaaaagaaaaggataaagttaaataataatttaatagaatgaattaggaatgtagtaaggattaatagaa

SEQ ID NO: 16885 - DNA, 96 bp, Aspergillus novofumigatus
  misc_feature: 87
ttctatctcttcttctaactctccttctacctctccttaatccttcttttattaactcttattctaactcttcttctaacccttactcttactcta

SEQ ID NO: 16886 - DNA, 96 bp, Aspergillus novofumigatus
  misc_feature: 87
agagatttagatagaggggttaaataagagatagaaggagagatagaaggagagatagaaggagagatagaaggagagatagaaggagagatagaa

SEQ ID NO: 16887 - DNA, 96 bp, Aspergillus novofumigatus
  misc_feature: 87
ttcctcttcttataactcttcttctatccttactaacccttaccctctcctactatctcttctttctctaattcttttcttccctctttttatccc

SEQ ID NO: 16888 - DNA, 96 bp, Aspergillus novofumigatus
  misc_feature: 87
gtttagataggaggaagggatagagggagggataaagggagggatagaggaagggatagaataaaagtaaggattagtaagattagataggaggaa

SEQ ID NO: 16889 - DNA, 96 bp, Aspergillus novofumigatus
  misc_feature: 87
agaagaagaaagagaagaagaaattaaaattaaggaaagataaaattaaaagaaaaggataaagttaaataataatttaatagaatgaattaggaa

SEQ ID NO: 16890 - DNA, 96 bp, Aspergillus novofumigatus
  misc_feature: 87
tagatagatataggaaaataaggatttagaaggatttaggaagagagaggatttagaatgaagatagaaagaagagaggagaagagaaggaaataa

SEQ ID NO: 16891 - DNA, 96 bp, Aspergillus novofumigatus
  misc_feature: 87
ttatttacctcttttttcttctccctttttatctcttctctctatttctctcttaattcttactctatctcttactttacctctttctctatctct

SEQ ID NO: 16892 - DNA, 96 bp, Aspergillus novofumigatus
  misc_feature: 87
ttattcttatcttaaacttactaacccttactctattacttatccttccttactttattctccttactacctcttaccttctatctattctcctta

SEQ ID NO: 16893 - DNA, 96 bp, Aspergillus novofumigatus
  misc_feature: 87
tagaagtaaaaaaagaggttttaagagattagatagagaagaagaggtaaaagagaatttagggatagattaagaggagagaagaaggagtaataa

SEQ ID NO: 16894 - DNA, 96 bp, Aspergillus novofumigatus
  misc_feature: 87
ataccctctatctcttttactaactctccttcttcttctaactcttatctctaactctttctctctctcttcccctccctcttcctcttcttataa

SEQ ID NO: 16895 - DNA, 96 bp, Aspergillus novofumigatus
  misc_feature: 87
ttactctattacttatccttccttactttattctccttactacctcttaccttctatctattctccttattttactaaatacctccctctctatct

SEQ ID NO: 16896 - DNA, 96 bp, Aspergillus novofumigatus
  misc_feature: 87
ttaagtttagataggaggaagggatagagggagggataaagggagggatagaggaagggatagaataaaagtaaggattagtaagattagatagga

SEQ ID NO: 16897 - DNA, 96 bp, Aspergillus novofumigatus
  misc_feature: 87
ggatttaggaagagagaaggatttagaataaagatagaaagaagagaggagaagagaaggaaataagttataggatattaatttagagagatttaa

SEQ ID NO: 16898 - DNA, 96 bp, Aspergillus novofumigatus
  misc_feature: 87
tgctcactgcctatcttactacctcccttactatcttacttactacctcccttactgttaaccttactatctacctcactacttatcttactacct

SEQ ID NO: 16899 - DNA, 96 bp, Aspergillus novofumigatus
  misc_feature: 87
agaaagaaaagaatagaaggtaaagatagataagatagaaagagtttaagtaaagggtaagaaagagaagaagaataagaagaaagagaagaaaga

SEQ ID NO: 16900 - DNA, 96 bp, Aspergillus novofumigatus
  misc_feature: 87
tctttcttctcctttctatccctaactcttattctaacccttcttctatctcttcctctaatcctccttctaattcttattctatctctccttacc

SEQ ID NO: 16901 - DNA, 96 bp, Aspergillus novofumigatus
  misc_feature: 87
tctttctctttcttctcctttctatccctaactcttattctaacccttcttctatctcttcctctaatcctccttctaattcttattctatctctc

SEQ ID NO: 16902 - DNA, 96 bp, Aspergillus novofumigatus
  misc_feature: 87
tcttcttattcttcttattcttcctctctttcttaccctttacttaaactctttctatcttatctatctttaccttctattcttttctttctaaat

SEQ ID NO: 16903 - DNA, 96 bp, Aspergillus novofumigatus
  misc_feature: 87
tcttctcctctcttctttctatctttattctaaatccttctctcttcctaaatccttctaaatccttattttcctatatctatctatccctactct

SEQ ID NO: 16904 - DNA, 96 bp, Aspergillus novofumigatus
  misc_feature: 87
gtagagtaagagtaagggttagaagaagagttagaataagagttaaggaaagagataaaagaaggattaagaagaggtagaagaagagttagaaga

SEQ ID NO: 16905 - DNA, 96 bp, Aspergillus novofumigatus
  misc_feature: 87
gaagtaaaaaaagaggttttaagagattagatagagaagaagaggtaaaagagaatttagggatagattaagaggagagaagaaggagtaataaga

SEQ ID NO: 16906 - DNA, 96 bp, Aspergillus novofumigatus
  misc_feature: 87
gaagggaaaagagtatataagttaatttagaaagaaaagaatagaaggtaaagatagataagatagaaagagtttaagtaaagggtaagaaagaga

SEQ ID NO: 16907 - DNA, 96 bp, Aspergillus novofumigatus
  misc_feature: 87
tctctactctttcttctcttctctactctttcttctttccttttttaatcttctctcttattctattaaaaatatacccttcttctctcttatatt

SEQ ID NO: 16908 - DNA, 96 bp, Aspergillus novofumigatus
  misc_feature: 87
tctcctctcttctttctatctttattctaaatccttctctcttcctaaatccttctaaatccttattttcctatatctatctatccctactcttat

SEQ ID NO: 16909 - DNA, 96 bp, Aspergillus novofumigatus
  misc_feature: 87
tctcatcctaaccctcccccttattaatatccttatcctattaataattatccccttctttatcctatattactttctataaccttatacctactt

SEQ ID NO: 16910 - DNA, 96 bp, Aspergillus novofumigatus
  misc_feature: 87
tctatctctaactctttccttcttcccttctattcttaactctctctttctctttcttctcctttctatccctaactcttattctaacccttcttc

SEQ ID NO: 16911 - DNA, 96 bp, Aspergillus novofumigatus
  misc_feature: 87
tctactctttcttctcttctctactctttcttctttccttttttaatcttctctcttattctattaaaaatatacccttcttctctcttatattat

SEQ ID NO: 16912 - DNA, 96 bp, Aspergillus novofumigatus
  misc_feature: 87
tctacctctccttaatccttcttttattaactcttattctaactcttcttctaacccttactcttactctactcttactcttattctatctcttat

SEQ ID NO: 16913 - DNA, 96 bp, Aspergillus novofumigatus
  misc_feature: 87
aagaagagatagtaggagagggtaagggttagtaaggatagaagaagagttataagaagaggaagagggaggggaagagagagagaaagagttaga

SEQ ID NO: 16914 - DNA, 96 bp, Aspergillus novofumigatus
  misc_feature: 87
gatttagaaggatttaggaagagagaaggatttagaataaagatagaaagaagagaggagaagagaaggaaataagttataggatattaatttaga

SEQ ID NO: 16915 - DNA, 96 bp, Aspergillus novofumigatus
  misc_feature: 87
aggagaggttaggatagttagaaggagagtaagagagatttagatagaggggttaaataagagatagaaggagagatagaaggagagatagaagga

SEQ ID NO: 16916 - DNA, 96 bp, Aspergillus novofumigatus
  misc_feature: 87
tccctcactatctcactcactatctcactcactgccttacttactatctcactcactgtcttactcactacctccctcactatcttacttactatc

SEQ ID NO: 16917 - DNA, 96 bp, Aspergillus novofumigatus
  misc_feature: 87
gggtttgagtaagaaagaggtaaggagagatagaataagaattagaaggaggattagaggaagagatagaagaagggttagaataagagttaggga

SEQ ID NO: 16918 - DNA, 96 bp, Aspergillus novofumigatus
  misc_feature: 87
tcattctattaaattattatttaactttatccttttcttttaattttatctttccttaattttaatttcttcttctctttcttcttctctttcttc

SEQ ID NO: 16919 - DNA, 96 bp, Aspergillus novofumigatus
  misc_feature: 87
tatttttaatagaataagagagaagattaaaaaaggaaagaagaaagagtagagaagagaagaaagagtagagaaaagaagaaaggattaaagtta

SEQ ID NO: 16920 - DNA, 96 bp, Aspergillus novofumigatus
  misc_feature: 87
tataattaaaaatagaagaagaaagggaagaggaaagggaagaggaaaggaaagaggaaagggaagaggaaagggaatagaaaagaaaagaaaata

SEQ ID NO: 16921 - DNA, 96 bp, Aspergillus novofumigatus
  misc_feature: 87
ggaaagggaagaggaaagggaagaggaaagggaatagaaaagaaaagaaaataaaaggtaataataagagagagaataagggttaggaataaaata

SEQ ID NO: 16922 - DNA, 96 bp, Aspergillus novofumigatus
  misc_feature: 87
tatttcttactctccttctaactatcctaacctctcctaatctcttcttctatctcttcttctaactctccttctacctctccttaatccttcttt

SEQ ID NO: 16923 - DNA, 96 bp, Aspergillus novofumigatus
  misc_feature: 87
tattctatctctaactctttccttcttcccttctattcttaactctctctttctctttcttctcctttctatccctaactcttattctaacccttc

SEQ ID NO: 16924 - DNA, 96 bp, Aspergillus novofumigatus
  misc_feature: 87
atagaagtaaaaaaagaggttttaagagattagatagagaagaagaggtaaaagagaatttagggatagattaagaggagagaagaaggagtaata

SEQ ID NO: 16925 - DNA, 96 bp, Aspergillus novofumigatus
  misc_feature: 87
tatcttgctgcctccctcactcactcactgcctgccttacttactatcttactcactaccttacttactgcctcactccctcactatctcacttac

SEQ ID NO: 16926 - DNA, 96 bp, Aspergillus novofumigatus
  misc_feature: 87
tatctcttcttctaactctccttctacctctccttaatccttcttttattaactcttattctaactcttcttctaacccttactcttactctactc

SEQ ID NO: 16927 - DNA, 96 bp, Aspergillus novofumigatus
  misc_feature: 87
tatcctataacttatttccttctcttctcctctcttctttctatctttattctaaatccttctctcttcctaaatccttctaaatccttattttcc

SEQ ID NO: 16928 - DNA, 96 bp, Aspergillus novofumigatus
  misc_feature: 87
tatcctaaaatatatatatttatttacttaatatattaatcctaattaaccttgatctcctaatatatatctattacttgatatatggatactaac

SEQ ID NO: 16929 - DNA, 96 bp, Aspergillus novofumigatus
  misc_feature: 87
tagtttaggggagagttagggagagatagaaggggagatagagggagagatagaagaaggattagaagaagagtaaggaataataagaaggagagt

SEQ ID NO: 16930 - DNA, 96 bp, Aspergillus novofumigatus
  misc_feature: 87
cctctcttactacttaccttactattaaccttactatctactatgatatttatattactatctaccttattacctaccttactattgactacacta

SEQ ID NO: 16931 - DNA, 96 bp, Aspergillus novofumigatus
  misc_feature: 87
gacattaaattaggatattaaattattaatataatattttttccttattaatacaatattaatttacttattaatactcttataatactgaatcta

SEQ ID NO: 16932 - DNA, 96 bp, Aspergillus novofumigatus
  misc_feature: 87
tagataggaggaagggatagagggagggataaagggagggatagaggaagggatagaataaaagtaaggattagtaagattagataggaggaaggg

SEQ ID NO: 16933 - DNA, 96 bp, Aspergillus novofumigatus
  misc_feature: 87
tagaatttaaaatagaagtaaaaaaagaggttttaagagattagatagagaagaagaggtaaaagagaatttagggatagattaagaggagagaag

SEQ ID NO: 16934 - DNA, 96 bp, Aspergillus novofumigatus
  misc_feature: 87
tagaataaaagtaagggttattaagtttagataggaggaagggatagagggagggataaagggagggatagaggaagggatagaataaaagtaagg

SEQ ID NO: 16935 - DNA, 96 bp, Aspergillus novofumigatus
  misc_feature: 87
aaacttttcttctaactcttattctaactctccttcttattattccttactcttcttctaatccttcttctatctctccctctatctccccttcta

SEQ ID NO: 16936 - DNA, 96 bp, Aspergillus novofumigatus
  misc_feature: 87
actaccccttactcttattctatttcttactctccttctaactatcctaacctctcctaatctcttcttctatctcttcttctaactctccttcta

SEQ ID NO: 16937 - DNA, 96 bp, Aspergillus novofumigatus
  misc_feature: 87
tagaaggagagatagaaggagagatagaaggagagatagaaggagagatagaaggagagttagaaggagagttagaaggagagtaagaaatagaat

SEQ ID NO: 16938 - DNA, 96 bp, Aspergillus novofumigatus
  misc_feature: 87
gtaaaaaaagaggttttaagagattagatagagaagaagaggtaaaagagaatttagggatagattaagaggagagaagaaggagtaataagagta

SEQ ID NO: 16939 - DNA, 96 bp, Aspergillus novofumigatus
  misc_feature: 87
tactctccttctaactctccttctaactctccttctatctctccttctatctctccttctatctctccttctatctctccttctatctctccttct

SEQ ID NO: 16940 - DNA, 96 bp, Aspergillus novofumigatus
  misc_feature: 87
tactacctcccttactatcttacttactacctcccttactgttaaccttactatctacctcactacttatcttactacctccctcactgcctccct

SEQ ID NO: 16941 - DNA, 96 bp, Aspergillus novofumigatus
  misc_feature: 87
tacctcccttactatcttacttactacctcccttactgttaaccttactatctacctcactacttatcttactacctccctcactgcctccctcac

SEQ ID NO: 16942 - DNA, 96 bp, Aspergillus novofumigatus
  misc_feature: 87
taccccttattcttatcttaaacttactaacccttactctattacttatccttccttactttattctccttactacctcttaccttctatctattc

SEQ ID NO: 16943 - DNA, 96 bp, Aspergillus novofumigatus
  misc_feature: 87
gaacagggtattagtaaatttaaatatctaatagatattaaattaagaaatctttattaattatagttattatatagctagagttaaagtaaatta

SEQ ID NO: 16944 - DNA, 96 bp, Aspergillus novofumigatus
  misc_feature: 87
aaagagaagaagaaagagaagaagaaattaaaattaaggaaagataaaattaaaagaaaaggataaagttaaataataatttaatagaatgaatta

SEQ ID NO: 16945 - DNA, 96 bp, Aspergillus novofumigatus
  misc_feature: 87
agggttattaagtttagataggaggaagggatagagggagggataaagggagggatagaggaagggatagaataaaagtaaggattagtaagatta

SEQ ID NO: 16946 - DNA, 96 bp, Aspergillus novofumigatus
  misc_feature: 87
aaattaaggaaagataaaattaaaagaaaaggataaagttaaataataatttaatagaatgaattaggaatgtagtaaggattaatagaaatatta

SEQ ID NO: 16947 - DNA, 96 bp, Aspergillus novofumigatus
  misc_feature: 87
ctctactctttcttctcttctctactctttcttctttccttttttaatcttctctcttattctattaaaaatatacccttcttctctcttatatta

SEQ ID NO: 16948 - DNA, 96 bp, Aspergillus novofumigatus
  misc_feature: 87
taagtttagataggaggaagggatagagggagggataaagggagggatagaggaagggatagaataaaagtaaggattagtaagattagataggag

SEQ ID NO: 16949 - DNA, 96 bp, Aspergillus novofumigatus
  misc_feature: 87
gttattaagtttagataggaggaagggatagagggagggataaagggagggatagaggaagggatagaataaaagtaaggattagtaagattagat

SEQ ID NO: 16950 - DNA, 96 bp, Aspergillus novofumigatus
  misc_feature: 87
gttaatttagaaagaaaagaatagaaggtaaagatagataagatagaaagagtttaagtaaagggtaagaaagagaggaagaataagaagaataag

SEQ ID NO: 16951 - DNA, 96 bp, Aspergillus novofumigatus
  misc_feature: 87
gttaatttagaaagaaaagaatagaaggtaaagatagataagatagaaagagtttaagtaaagggtaagaaagagaagaagaataagaagaaagag

SEQ ID NO: 16952 - DNA, 96 bp, Aspergillus novofumigatus
  misc_feature: 87
gttaaataagagatagaaggagagatagaaggagagatagaaggagagatagaaggagagatagaaggagagatagaaggagagatagaaggagag

SEQ ID NO: 16953 - DNA, 96 bp, Aspergillus novofumigatus
  misc_feature: 87
aatcataaggctagtataagttaaatatatttatttcactttaatatacatatttttatatatatatatattaaaatctgcctagatctagatgac

SEQ ID NO: 16954 - DNA, 96 bp, Aspergillus novofumigatus
  misc_feature: 87
cttgctcactgcctatcttactacctcccttactatcttacttactacctcccttactgttaaccttactatctacctcactacttatcttactac

SEQ ID NO: 16955 - DNA, 96 bp, Aspergillus novofumigatus
  misc_feature: 87
aatatttatatagtatatacttattattttaaatttagatagtatacctagttatttataataatataaggtaactagctggtttatttaatttac

SEQ ID NO: 16956 - DNA, 96 bp, Aspergillus novofumigatus
  misc_feature: 87
gcaaaagcatgaggtttaggtggactacttaaacataatccgaggataaggattttagcggcttgtagtattttagccgcttgttgcatttttgcc

SEQ ID NO: 16957 - DNA, 96 bp, Aspergillus novofumigatus
  misc_feature: 87
cttcctcttcttataactcttcttctatccttactaacccttaccctctcctactatctcttctttctctaattcttttcttccctctttttatcc

SEQ ID NO: 16958 - DNA, 96 bp, Aspergillus novofumigatus
  misc_feature: 87
cttactacctcccttactatcttacttactacctcccttactgttaaccttactatctacctcactacttatcttactacctccctcactgcctcc

SEQ ID NO: 16959 - DNA, 96 bp, Aspergillus novofumigatus
  misc_feature: 87
gataggaggaagggatagagggagggataaagggagggatagaggaagggatagaataaaagtaaggattagtaagattagataggaggaaggggt

SEQ ID NO: 16960 - DNA, 96 bp, Aspergillus novofumigatus
  misc_feature: 87
gataagagatagaataagagtaagagtagagtaagagtaagggttagaagaagagttagaataagagttaataaaagaaggattaaggagaggtag

SEQ ID NO: 16961 - DNA, 96 bp, Aspergillus novofumigatus
  misc_feature: 87
ctcttctcctctcttctttctatctttattctaaatccttctctcttcctaaatccttctaaatccttattttcctatatctatctatccctactc

SEQ ID NO: 16962 - DNA, 96 bp, Aspergillus novofumigatus
  misc_feature: 87
actacctcccttactatcttacttactacctcccttactgttaaccttactatctacctcactacttatcttactacctccctcactgcctccctc

SEQ ID NO: 16963 - DNA, 96 bp, Aspergillus novofumigatus
  misc_feature: 87
acaaactaactgtataatatatatctctgcgcattatggtatcctaaaatatatatattcattcattaatatatcaatgctgatcgacctgatctc

SEQ ID NO: 16964 - DNA, 96 bp, Aspergillus novofumigatus
  misc_feature: 87
ccccttattcttatcttaaacttactaacccttactctattacttatccttccttactttattctccttactacctcttaccttctatctattctc

SEQ ID NO: 16965 - DNA, 96 bp, Aspergillus novofumigatus
  misc_feature: 87
gaaagaaaagaatagaaggtaaagatagataagatagaaagagtttaagtaaagggtaagaaagagaagaagaataagaagaaagagaagaaagag

SEQ ID NO: 16966 - DNA, 96 bp, Aspergillus novofumigatus
  misc_feature: 87
cttcttattcttcttattcttcctctctttcttaccctttacttaaactctttctatcttatctatctttaccttctattcttttctttctaaatt

SEQ ID NO: 16967 - DNA, 96 bp, Aspergillus novofumigatus
  misc_feature: 87
agtagagtaagagtaagggttagaagaagagttagaataagagttaaggaaagagataaaagaaggattaagaagaggtagaagaagagttagaag

SEQ ID NO: 16968 - DNA, 96 bp, Aspergillus novofumigatus
  misc_feature: 87
agatagatataggaaaataaggatttagaaggatttaggaagagagaggatttagaatgaagatagaaagaagagaggagaagagaaggaaataag

SEQ ID NO: 16969 - DNA, 96 bp, Aspergillus novofumigatus
  misc_feature: 87
agaagggaaaagagtatataagttaatttagaaagaaaagaatagaaggtaaagatagataagatagaaagagtttaagtaaagggtaagaaagag

SEQ ID NO: 16970 - DNA, 96 bp, Aspergillus novofumigatus
  misc_feature: 87
ctatctcttcttctaactctccttctacctctccttaatccttcttttattaactcttattctaactcttcttctaacccttactcttactctact

SEQ ID NO: 16971 - DNA, 96 bp, Aspergillus novofumigatus
  misc_feature: 87
agagagatttagatagaggggttaaataagagatagaaggagagatagaaggagagatagaaggagagatagaaggagagatagaaggagagatag

SEQ ID NO: 16972 - DNA, 96 bp, Aspergillus novofumigatus
  misc_feature: 87
aagagaagaagaaagagaagaagaaattaaaattaaggaaagataaaattaaaagaaaaggataaagttaaataataatttaatagaatgaattag

SEQ ID NO: 16973 - DNA, 96 bp, Aspergillus novofumigatus
  misc_feature: 87
aaagaagagatagtaggagagggtaagggttagtaaggatagaagaagagttataagaagaggaagagggaggggaagagagagagaaagagttag

SEQ ID NO: 16974 - DNA, 96 bp, Aspergillus novofumigatus
  misc_feature: 87
aataagagatagaaggagagatagaaggagagatagaaggagagatagaaggagagatagaaggagagatagaaggagagatagaaggagagttag

SEQ ID NO: 16975 - DNA, 96 bp, Aspergillus novofumigatus
  misc_feature: 87
atatatcatattaaccatagttaggagagaggtaggtagcaaggtagacagtaaggtagatagtaaggtagatagtgagataggcagtgaggtagg

SEQ ID NO: 16976 - DNA, 96 bp, Aspergillus novofumigatus
  misc_feature: 87
agagaagaagaaagagaagaagaaattaaaattaaggaaagataaaattaaaagaaaaggataaagttaaataataatttaatagaatgaattagg

SEQ ID NO: 16977 - DNA, 96 bp, Aspergillus novofumigatus
  misc_feature: 87
agtaagatagtgagggaggcagtgagtgagatagtaagtaagatagtgagggaggtagtgagtaagacagtgagtgagatagtaagtaaggcagtg

SEQ ID NO: 16978 - DNA, 96 bp, Aspergillus novofumigatus
  misc_feature: 87
aggaacagggtattagtaaatttaaatatctaatagatattaaattaagaaatctttattaattatagttattatatagctagagttaaagtaaat

SEQ ID NO: 16979 - DNA, 96 bp, Aspergillus novofumigatus
  misc_feature: 87
agaaggatttaggaagagagaaggatttagaataaagatagaaagaagagaggagaagagaaggaaataagttataggatattaatttagagagat

SEQ ID NO: 16980 - DNA, 96 bp, Aspergillus novofumigatus
  misc_feature: 87
atctctaactctttccttcttcccttctattcttaactctctctttctctttcttctcctttctatccctaactcttattctaacccttcttctat

SEQ ID NO: 16981 - DNA, 96 bp, Aspergillus novofumigatus
  misc_feature: 87
atcctaaaatatatatatttatttacttaatatattaatcctaattaaccttgatctcctaatatatatctattacttgatatatggatactaact

SEQ ID NO: 16982 - DNA, 96 bp, Aspergillus novofumigatus
  misc_feature: 87
actaggtatactatctaaatttaaaataataagtatatactatataaatatttaatatatttataacttagctattatactacctagggatgctat

SEQ ID NO: 16983 - DNA, 96 bp, Aspergillus novofumigatus
  misc_feature: 87
agtttaggggagagttagggagagatagaaggggagatagagggagagatagaagaaggattagaagaagagtaaggaataataagaaggagagtt

SEQ ID NO: 16984 - DNA, 96 bp, Aspergillus novofumigatus
  misc_feature: 87
accccttattcttatcttaaacttactaacccttactctattacttatccttccttactttattctccttactacctcttaccttctatctattct

SEQ ID NO: 16985 - DNA, 96 bp, Aspergillus novofumigatus
  misc_feature: 87
agaataagagtaagagtagagtaagagtaagggttagaagaagagttagaataagagttaataaaagaaggattaaggagaggtagaaggagagtt

SEQ ID NO: 16986 - DNA, 96 bp, Aspergillus novofumigatus
  misc_feature: 87
aagtaagatagtgagggaggcagtgagtgagatagtaagtaagatagtgagggaggtagtgagtaagacagtgagtgagatagtaagtaaggcagt

SEQ ID NO: 16987 - DNA, 96 bp, Aspergillus novofumigatus
  misc_feature: 87
acagggtattagtaaatttaaatatctaatagatattaaattaagaaatctttattaattatagttattatatagctagagttaaagtaaattatt

SEQ ID NO: 16988 - DNA, 96 bp, Aspergillus novofumigatus
  misc_feature: 86
tttttatctcttctctctatttctctcttaattcttactctatctcttactttacccctttctctatctctctcttctatctacacttactacccc

SEQ ID NO: 16989 - DNA, 96 bp, Aspergillus novofumigatus
  misc_feature: 86
ttttattctatctctaactctttccttcttcccttctattcttaactctctctttctctttcttctcctttctatccctaactcttattctaaccc

SEQ ID NO: 16990 - DNA, 96 bp, Aspergillus novofumigatus
  misc_feature: 86
agaagaagggtatatttttaatagaataagagagaagattaaaaaaggaaagaagaaagagtagagaagagaagaaagagtagagaaaagaagaaa

SEQ ID NO: 16991 - DNA, 96 bp, Aspergillus novofumigatus
  misc_feature: 86
ttagaaagaaaagaatagaaggtaaagatagataagatagaaagagtttaagtaaagggtaagaaagagaagaagaataagaagaaagagaagaaa

SEQ ID NO: 16992 - DNA, 96 bp, Aspergillus novofumigatus
  misc_feature: 86
tttagaataaagatagaaagaagagaggagaagagaaggaaataagttataggatattaatttagagagatttaagtaggtataaggttatagaaa

SEQ ID NO: 16993 - DNA, 96 bp, Aspergillus novofumigatus
  misc_feature: 86
tttaggaagagagaaggatttagaataaagatagaaagaagagaggagaagagaaggaaataagttataggatattaatttagagagatttaagta

SEQ ID NO: 16994 - DNA, 96 bp, Aspergillus novofumigatus
  misc_feature: 86
tttagatagaggggttaaataagagatagaaggagagatagaaggagagatagaaggagagatagaaggagagatagaaggagagatagaaggaga

SEQ ID NO: 16995 - DNA, 96 bp, Aspergillus novofumigatus
  misc_feature: 86
ttagaatttaaaatagaagtaaaaaaagaggttttaagagattagatagagaagaagaggtaaaagagaatttagggatagattaagaggagagaa

SEQ ID NO: 16996 - DNA, 96 bp, Aspergillus novofumigatus
  misc_feature: 86
ttctatttcttactctccttctaactctccttctaactctccttctatctctccttctatctctccttctatctctccttctatctctccttctat

SEQ ID NO: 16997 - DNA, 96 bp, Aspergillus novofumigatus
  misc_feature: 86
ttctatctctaactctttccttcttcccttctattcttaactctctctttctctttcttctcctttctatccctaactcttattctaacccttctt

SEQ ID NO: 16998 - DNA, 96 bp, Aspergillus novofumigatus
  misc_feature: 86
aaaaaagaggttttaagagattagatagagaagaagaggtaaaagagaatttagggatagattaagaggagagaagaaggagtaataagagtagaa

SEQ ID NO: 16999 - DNA, 96 bp, Aspergillus novofumigatus
  misc_feature: 86
taagagatagaataagagtaagagtagagtaagagtaagggttagaagaagagttagaataagagttaataaaagaaggattaaggagaggtagaa

SEQ ID NO: 17000 - DNA, 96 bp, Aspergillus novofumigatus
  misc_feature: 86
ttctaactcttcttctaacccttactcttactctactcttactcttattctatctcttatctatctcttattctatctcttcttaatctcctctct

SEQ ID NO: 17001 - DNA, 96 bp, Aspergillus novofumigatus
  misc_feature: 86
agggagagatagaaggggagatagagggagagatagaagaaggattagaagaagagtaaggaataataagaaggagagttagaataagagttagaa

SEQ ID NO: 17002 - DNA, 96 bp, Aspergillus novofumigatus
  misc_feature: 86
ttcattctattaaattattatttaactttatccttttcttttaattttatctttccttaattttaatttcttcttctctttcttcttctctttctt

SEQ ID NO: 17003 - DNA, 96 bp, Aspergillus novofumigatus
  misc_feature: 86
ttatctcttctctctatttctctcttaattcttactctatctcttactttacccctttctctatctctctcttctatctacacttactacccctta

SEQ ID NO: 17004 - DNA, 96 bp, Aspergillus novofumigatus
  misc_feature: 86
agaatactagtatataagaatatagaatagctgctatatattaatatagacttattaaaatattatagctatagagctataatattctatatataa

SEQ ID NO: 17005 - DNA, 96 bp, Aspergillus novofumigatus
  misc_feature: 86
ttagataggaggaagggatagagggagggataaagggagggatagaggaagggatagaataaaagtaaggattagtaagattagataggaggaagg

SEQ ID NO: 17006 - DNA, 96 bp, Aspergillus novofumigatus
  misc_feature: 86
ttagaaggatttaggaagagagaaggatttagaataaagatagaaagaagagaggagaagagaaggaaataagttataggatattaatttagagag

SEQ ID NO: 17007 - DNA, 96 bp, Aspergillus novofumigatus
  misc_feature: 86
ataggaacagggtattagtaaatttaaatatctaatagatattaaattaagaaatctttattaattatagttattatatagctagagttaaagtaa

SEQ ID NO: 17008 - DNA, 96 bp, Aspergillus novofumigatus
  misc_feature: 86
ttactgtcttgcttgctgcctccctcactatctcactcactatctcactcactgccttacttactatctcactcactgtcttactcactacctccc

SEQ ID NO: 17009 - DNA, 96 bp, Aspergillus novofumigatus
  misc_feature: 86
ttaaataagagatagaaggagagatagaaggagagatagaaggagagatagaaggagagatagaaggagagatagaaggagagatagaaggagagt

SEQ ID NO: 17010 - DNA, 96 bp, Aspergillus novofumigatus
  misc_feature: 86
tgggaccacgccagttggcggtccgagatggccgggcgcgcgccctgaccggcagcaggggcccgcgcgcgccgccgcctggtgacgaagggcggg

SEQ ID NO: 17011 - DNA, 96 bp, Aspergillus novofumigatus
  misc_feature: 86
ctacctcccttactatcttacttactacctcccttactgttaaccttactatctacctcactacttatcttactacctccctcactgcctccctca

SEQ ID NO: 17012 - DNA, 96 bp, Aspergillus novofumigatus
  misc_feature: 86
tcttctctctatttctctcttaattcttactctatctcttactttacccctttctctatctctctcttctatctacacttactaccccttactctt

SEQ ID NO: 17013 - DNA, 96 bp, Aspergillus novofumigatus
  misc_feature: 86
tctcttttactaactctccttcttcttctaactcttatctctaactctttctctctctcttcccctccctcttcctcttcttataactcttcttct

SEQ ID NO: 17014 - DNA, 96 bp, Aspergillus novofumigatus
  misc_feature: 86
gatagaaggagagatagaaggagagttagaaggagagttagaaggagagtaagaaatagaataagagtaaggggtagtaagtgtagatagaagaga

SEQ ID NO: 17015 - DNA, 96 bp, Aspergillus novofumigatus
  misc_feature: 86
tagaaggatttaggaagagagaaggatttagaataaagatagaaagaagagaggagaagagaaggaaataagttataggatattaatttagagaga

SEQ ID NO: 17016 - DNA, 96 bp, Aspergillus novofumigatus
  misc_feature: 86
ggttaaataagagatagaaggagagatagaaggagagatagaaggagagatagaaggagagatagaaggagagatagaaggagagatagaaggaga

SEQ ID NO: 17017 - DNA, 96 bp, Aspergillus novofumigatus
  misc_feature: 86
tctatttcttactctccttctaactctccttctaactctccttctatctctccttctatctctccttctatctctccttctatctctccttctatc

SEQ ID NO: 17018 - DNA, 96 bp, Aspergillus novofumigatus
  misc_feature: 86
gaaattaaaattaaggaaagataaaattaaaagaaaaggataaagttaaataataatttaatagaatgaattaggaatgtagtaaggattaataga

SEQ ID NO: 17019 - DNA, 96 bp, Aspergillus novofumigatus
  misc_feature: 86
gagagatttagatagaggggttaaataagagatagaaggagagatagaaggagagatagaaggagagatagaaggagagatagaaggagagataga

SEQ ID NO: 17020 - DNA, 96 bp, Aspergillus novofumigatus
  misc_feature: 86
tctataaaagaagctagattatcctattatatatagaatattatagctctatagctataatattttaataagtctatattaatatatagcagctat

SEQ ID NO: 17021 - DNA, 96 bp, Aspergillus novofumigatus
  misc_feature: 86
tctacaaactaactgtataatatatatctctgcgcattatggtatcctaaaatatatatattcattcattaatatatcaatgctgatcgacctgat

SEQ ID NO: 17022 - DNA, 96 bp, Aspergillus novofumigatus
  misc_feature: 86
ggttattaagtttagataggaggaagggatagagggagggataaagggagggatagaggaagggatagaataaaagtaaggattagtaagattaga

SEQ ID NO: 17023 - DNA, 96 bp, Aspergillus novofumigatus
  misc_feature: 86
gataatagatatatatatttatatttattagattaagataagaagagattaagtatatatatttaaaaaaaaaataagagaaatttagagattaga

SEQ ID NO: 17024 - DNA, 96 bp, Aspergillus novofumigatus
  misc_feature: 86
ataagagatagaaggagagatagaaggagagatagaaggagagatagaaggagagatagaaggagagatagaaggagagatagaaggagagttaga

SEQ ID NO: 17025 - DNA, 96 bp, Aspergillus novofumigatus
  misc_feature: 86
tcctctcttctttctatctttattctaaatccttctctcttcctaaatccttctaaatccttattttcctatatctatctatccctactcttatta

SEQ ID NO: 17026 - DNA, 96 bp, Aspergillus novofumigatus
  misc_feature: 86
gagaagaagaaagagaagaagaaattaaaattaaggaaagataaaattaaaagaaaaggataaagttaaataataatttaatagaatgaattagga

SEQ ID NO: 17027 - DNA, 96 bp, Aspergillus novofumigatus
  misc_feature: 86
gaatcataaggctagtataagttaaatatatttatttcactttaatatacatatttttatatatatatatattaaaatctgcctagatctagatga

SEQ ID NO: 17028 - DNA, 96 bp, Aspergillus novofumigatus
  misc_feature: 86
tattcttatcttaaacttactaacccttactctattacttatccttccttactttattctccttactacctcttaccttctatctattctccttat

SEQ ID NO: 17029 - DNA, 96 bp, Aspergillus novofumigatus
  misc_feature: 86
tatcttactacctcccttactatcttacttactacctcccttactgttaaccttactatctacctcactacttatcttactacctccctcactgcc

SEQ ID NO: 17030 - DNA, 96 bp, Aspergillus novofumigatus
  misc_feature: 86
tatctctaactctttccttcttcccttctattcttaactctctctttctctttcttctcctttctatccctaactcttattctaacccttcttcta

SEQ ID NO: 17031 - DNA, 96 bp, Aspergillus novofumigatus
  misc_feature: 86
tataggaacagggtattagtaaatttaaatatctaatagatattaaattaagaaatctttattaattatagttattatatagctagagttaaagta

SEQ ID NO: 17032 - DNA, 96 bp, Aspergillus novofumigatus
  misc_feature: 86
ctaggtatactatctaaatttaaaataataagtatatactatataaatatttaatatatttataacttagctattatactacctagggatgctata

SEQ ID NO: 17033 - DNA, 96 bp, Aspergillus novofumigatus
  misc_feature: 86
ctactctttcttctcttctctactctttcttctttccttttttaatcttctctcttattctattaaaaatatacccttcttctctcttatattata

SEQ ID NO: 17034 - DNA, 96 bp, Aspergillus novofumigatus
  misc_feature: 86
aataccctctatctcttttactaactctccttcttcttctaactcttatctctaactctttctctctctcttcccctccctcttcctcttcttata

SEQ ID NO: 17035 - DNA, 96 bp, Aspergillus novofumigatus
  misc_feature: 86
tataaattatccttcttatatacttacatataaatatatatatataaagtaattcttattattatcttttaaattactatcttctctattcttatt

SEQ ID NO: 17036 - DNA, 96 bp, Aspergillus novofumigatus
  misc_feature: 86
cctccctcactatctcactcactatctcactcactgccttacttactatctcactcactgtcttactcactacctccctcactatcttacttacta

SEQ ID NO: 17037 - DNA, 96 bp, Aspergillus novofumigatus
  misc_feature: 86
ccttgctcactgcctatcttactacctcccttactatcttacttactacctcccttactgttaaccttactatctacctcactacttatcttacta

SEQ ID NO: 17038 - DNA, 96 bp, Aspergillus novofumigatus
  misc_feature: 86
aactaggtatactatctaaatttaaaataataagtatatactatataaatatttaatatatttataacttagctattatactacctagggatgcta

SEQ ID NO: 17039 - DNA, 96 bp, Aspergillus novofumigatus
  misc_feature: 86
aacttatttccttctcttctcctctcttctttctatctttattctaaatccttctctcttcctaaatccttctaaatccttattttcctatatcta

SEQ ID NO: 17040 - DNA, 96 bp, Aspergillus novofumigatus
  misc_feature: 86
tagaaagaaaagaatagaaggtaaagatagataagatagaaagagtttaagtaaagggtaagaaagagaagaagaataagaagaaagagaagaaag

SEQ ID NO: 17041 - DNA, 96 bp, Aspergillus novofumigatus
  misc_feature: 86
tactctacaaactaactgtataatatatatctctgcgcattatggtatcctaaaatatatatattcattcattaatatatcaatgctgatcgacct

SEQ ID NO: 17042 - DNA, 96 bp, Aspergillus novofumigatus
  misc_feature: 86
agtttatatcttatatataggagatagtatctataaattatattattataatcctctattagctataattatttaatctaaatctttatagtagta

SEQ ID NO: 17043 - DNA, 96 bp, Aspergillus novofumigatus
  misc_feature: 86
taccctctatctcttttactaactctccttcttcttctaactcttatctctaactctttctctctctcttcccctccctcttcctcttcttataac

SEQ ID NO: 17044 - DNA, 96 bp, Aspergillus novofumigatus
  misc_feature: 86
gtattataagagtattaataagtaaattaatattatattaataaggaaaaaatattatattaataatttaatatcctaatttaatatcttccatta

SEQ ID NO: 17045 - DNA, 96 bp, Aspergillus novofumigatus
  misc_feature: 86
aagaagaaattaaaattaaggaaagataaaattaaaagaaaaggataaagttaaataataatttaatagaatgaattaggaatgtagtaaggatta

SEQ ID NO: 17046 - DNA, 96 bp, Aspergillus novofumigatus
  misc_feature: 86
taatccctactctcatcctaaccctcccccttattaatatccttatcctattaataattatccccttctttatcctatattactttctataacctt

SEQ ID NO: 17047 - DNA, 96 bp, Aspergillus novofumigatus
  misc_feature: 86
cagggtattagtaaatttaaatatctaatagatattaaattaagaaatctttattaattatagttattatatagctagagttaaagtaaattatta

SEQ ID NO: 17048 - DNA, 96 bp, Aspergillus novofumigatus
  misc_feature: 86
ataaattatccttcttatatacttacatataaatatatatatataaagtaattcttattattatcttttaaattactatcttctctattcttatta

SEQ ID NO: 17049 - DNA, 96 bp, Aspergillus novofumigatus
  misc_feature: 86
taagtaagatagtgagggaggcagtgagtgagatagtaagtaagatagtgagggaggtagtgagtaagacagtgagtgagatagtaagtaaggcag

SEQ ID NO: 17050 - DNA, 96 bp, Aspergillus novofumigatus
  misc_feature: 86
aatccctactctcatcctaaccctcccccttattaatatccttatcctattaataattatccccttctttatcctatattactttctataacctta

SEQ ID NO: 17051 - DNA, 96 bp, Aspergillus novofumigatus
  misc_feature: 86
taagatagtgagggaggcagtgagtgagatagtaagtaagatagtgagggaggtagtgagtaagacagtgagtgagatagtaagtaaggcagtgag

SEQ ID NO: 17052 - DNA, 96 bp, Aspergillus novofumigatus
  misc_feature: 86
taagagatagataagagatagaataagagtaagagtagagtaagagtaagggttagaagaagagttagaataagagttaataaaagaaggattaag

SEQ ID NO: 17053 - DNA, 96 bp, Aspergillus novofumigatus
  misc_feature: 86
taactcttcttctaacccttactcttactctactcttactcttattctatctcttatctatctcttattctatctcttcttaatctcctctcttat

SEQ ID NO: 17054 - DNA, 96 bp, Aspergillus novofumigatus
  misc_feature: 86
gtttaggggagagttagggagagatagaaggggagatagagggagagatagaagaaggattagaagaagagtaaggaataataagaaggagagtta

SEQ ID NO: 17055 - DNA, 96 bp, Aspergillus novofumigatus
  misc_feature: 86
taactaggtatactatctaaatttaaaataataagtatatactatataaatatttaatatatttataacttagctattatactacctagggatgct

SEQ ID NO: 17056 - DNA, 96 bp, Aspergillus novofumigatus
  misc_feature: 86
taaatatttatatagtatatacttattattttaaatttagatagtatacctagttatttataataatataaggtaactagctggtttatttaattt

SEQ ID NO: 17057 - DNA, 96 bp, Aspergillus novofumigatus
  misc_feature: 86
cctcttcctcttcttataactcttcttctatccttactaacccttaccctctcctactatctcttctttctctaattcttttcttccctcttttta

SEQ ID NO: 17058 - DNA, 96 bp, Aspergillus novofumigatus
  misc_feature: 86
gttaatcagtagtaatatataaatgaatatatacattttaggataccataatacgcagagatatatattatacagttagtttatagagtatgttag

SEQ ID NO: 17059 - DNA, 96 bp, Aspergillus novofumigatus
  misc_feature: 86
agtgaggggggcagtgagcgagatagtgagggaggcagtgagtgagatagtgagggaggcagtgagtgagatagtgagggaggcagtgagcaagac

SEQ ID NO: 17060 - DNA, 96 bp, Aspergillus novofumigatus
  misc_feature: 86
atactctacaaactaactgtataatatatatctctgcgcattatggtatcctaaaatatatatattcattcattaatatatcaatgctgatcgacc

SEQ ID NO: 17061 - DNA, 96 bp, Aspergillus novofumigatus
  misc_feature: 86
ctttttatctcttctctctatttctctcttaattcttactctatctcttactttacccctttctctatctctctcttctatctacacttactaccc

SEQ ID NO: 17062 - DNA, 96 bp, Aspergillus novofumigatus
  misc_feature: 86
ggagaggttaggatagttagaaggagagtaagagagatttagatagaggggttaaataagagatagaaggagagatagaaggagagatagaaggag

SEQ ID NO: 17063 - DNA, 96 bp, Aspergillus novofumigatus
  misc_feature: 86
ggagagatagaaggagagatagaaggagagatagaaggagagatagaaggagagttagaaggagagttagaaggagagtaagaaatagaataagag

SEQ ID NO: 17064 - DNA, 96 bp, Aspergillus novofumigatus
  misc_feature: 86
gcctccctcactcactcactgcctgccttacttactatcttactcactaccttacttactgcctcactccctcactatctcacttactacctccct

SEQ ID NO: 17065 - DNA, 96 bp, Aspergillus novofumigatus
  misc_feature: 86
ataactaggtatactatctaaatttaaaataataagtatatactatataaatatttaatatatttataacttagctattatactacctagggatgc

SEQ ID NO: 17066 - DNA, 96 bp, Aspergillus novofumigatus
  misc_feature: 86
aagacattaaattaggatattaaattattaatataatattttttccttattaatacaatattaatttacttattaatactcttataatactgaatc

SEQ ID NO: 17067 - DNA, 96 bp, Aspergillus novofumigatus
  misc_feature: 86
ataacttatttccttctcttctcctctcttctttctatctttattctaaatccttctctcttcctaaatccttctaaatccttattttcctatatc

SEQ ID NO: 17068 - DNA, 96 bp, Aspergillus novofumigatus
  misc_feature: 86
actgcctatcttactacctcccttactatcttacttactacctcccttactgttaaccttactatctacctcactacttatcttactacctccctc

SEQ ID NO: 17069 - DNA, 96 bp, Aspergillus novofumigatus
  misc_feature: 86
gagatttagatagaggggttaaataagagatagaaggagagatagaaggagagatagaaggagagatagaaggagagatagaaggagagatagaag

SEQ ID NO: 17070 - DNA, 96 bp, Aspergillus novofumigatus
  misc_feature: 86
cctcactatctcactcactatctcactcactgccttacttactatctcactcactgtcttactcactacctccctcactatcttacttactatctc

SEQ ID NO: 17071 - DNA, 96 bp, Aspergillus novofumigatus
  misc_feature: 86
gaatactagtatataagaatatagaatagctgctatatattaatatagacttattaaaatattatagctatagagctataatattctatatataat

SEQ ID NO: 17072 - DNA, 96 bp, Aspergillus novofumigatus
  misc_feature: 86
gaataagagatagataagagatagaataagagtaagagtagagtaagagtaagggttagaagaagagttagaataagagttaataaaagaaggatt

SEQ ID NO: 17073 - DNA, 96 bp, Aspergillus novofumigatus
  misc_feature: 86
atatcctataacttatttccttctcttctcctctcttctttctatctttattctaaatccttctctcttcctaaatccttctaaatccttattttc

SEQ ID NO: 17074 - DNA, 96 bp, Aspergillus novofumigatus
  misc_feature: 86
cttttattaactcttattctaactcttcttctaacccttactcttactctactcttactcttattctatctcttatctatctcttattctatctct

SEQ ID NO: 17075 - DNA, 96 bp, Aspergillus novofumigatus
  misc_feature: 86
agagaagggaaaagagtatataagttaatttagaaagaaaagaatagaaggtaaagatagataagatagaaagagtttaagtaaagggtaagaaag

SEQ ID NO: 17076 - DNA, 96 bp, Aspergillus novofumigatus
  misc_feature: 86
agtaagagtagagtaagagtaagggttagaagaagagttagaataagagttaataaaagaaggattaaggagaggtagaaggagagttagaagaag

SEQ ID NO: 17077 - DNA, 96 bp, Aspergillus novofumigatus
  misc_feature: 86
atataagttaatttagaaagaaaagaatagaaggtaaagatagataagatagaaagagtttaagtaaagggtaagaaagagaggaagaataagaag

SEQ ID NO: 17078 - DNA, 96 bp, Aspergillus novofumigatus
  misc_feature: 86
cttataactcttcttctatccttactaacccttaccctctcctactatctcttctttctctaattcttttcttccctctttttatccctcttatct

SEQ ID NO: 17079 - DNA, 96 bp, Aspergillus novofumigatus
  misc_feature: 86
aattaggtatcagggggatatcaccatagttaggagagagatagttagtaaggtagataataagattaatagtatagtagatagtgaggttaacag

SEQ ID NO: 17080 - DNA, 96 bp, Aspergillus novofumigatus
  misc_feature: 86
ctcttcctcttcttataactcttcttctatccttactaacccttaccctctcctactatctcttctttctctaattcttttcttccctctttttat

SEQ ID NO: 17081 - DNA, 96 bp, Aspergillus novofumigatus
  misc_feature: 86
ctctcttactacttaccttactattaaccttactatctactatgatatttatattactatctaccttattacctaccttactattgactacactat

SEQ ID NO: 17082 - DNA, 96 bp, Aspergillus novofumigatus
  misc_feature: 86
ctctcatcctaaccctcccccttattaatatccttatcctattaataattatccccttctttatcctatattactttctataaccttatacctact

SEQ ID NO: 17083 - DNA, 96 bp, Aspergillus novofumigatus
  misc_feature: 86
ctcctctcttctttctatctttattctaaatccttctctcttcctaaatccttctaaatccttattttcctatatctatctatccctactcttatt

SEQ ID NO: 17084 - DNA, 96 bp, Aspergillus novofumigatus
  misc_feature: 86
agaaattaaaattaaggaaagataaaattaaaagaaaaggataaagttaaataataatttaatagaatgaattaggaatgtagtaaggattaatag

SEQ ID NO: 17085 - DNA, 96 bp, Aspergillus novofumigatus
  misc_feature: 86
aatcttaatatatatattagtcttatagaatagatatagaactatattctatattacttagctattatctagctattataagaatagaaaatatag

SEQ ID NO: 17086 - DNA, 96 bp, Aspergillus novofumigatus
  misc_feature: 86
ctataaaagaagctagattatcctattatatatagaatattatagctctatagctataatattttaataagtctatattaatatatagcagctatt

SEQ ID NO: 17087 - DNA, 96 bp, Aspergillus novofumigatus
  misc_feature: 86
aaagtttatatcttatatataggagatagtatctataaattatattattataatcctctattagctataattatttaatctaaatctttatagtag

SEQ ID NO: 17088 - DNA, 96 bp, Aspergillus novofumigatus
  misc_feature: 86
aggggttaaataagagatagaaggagagatagaaggagagatagaaggagagatagaaggagagatagaaggagagatagaaggagagatagaagg

SEQ ID NO: 17089 - DNA, 96 bp, Aspergillus novofumigatus
  misc_feature: 86
cctaacctctcctaatctcttcttctatctcttcttctaactctccttctacctctccttaatccttcttttattaactcttattctaactcttct

SEQ ID NO: 17090 - DNA, 96 bp, Aspergillus novofumigatus
  misc_feature: 86
agggtttgagtaagaaagaggtaaggagagatagaataagaattagaaggaggattagaggaagagatagaagaagggttagaataagagttaggg

SEQ ID NO: 17091 - DNA, 96 bp, Aspergillus novofumigatus
  misc_feature: 86
cactgcctatcttactacctcccttactatcttacttactacctcccttactgttaaccttactatctacctcactacttatcttactacctccct

SEQ ID NO: 17092 - DNA, 96 bp, Aspergillus novofumigatus
  misc_feature: 86
aggaaagggaagaggaaagggaagaggaaagggaatagaaaagaaaagaaaataaaaggtaataataagagagagaataagggttaggaataaaat

SEQ ID NO: 17093 - DNA, 96 bp, Aspergillus novofumigatus
  misc_feature: 86
attaggtatcagggggatatcaccatagttaggagagagatagttagtaaggtagataataagattaatagtatagtagatagtgaggttaacagt

SEQ ID NO: 17094 - DNA, 96 bp, Aspergillus novofumigatus
  misc_feature: 86
atcttactacctcccttactatcttacttactacctcccttactgttaaccttactatctacctcactacttatcttactacctccctcactgcct

SEQ ID NO: 17095 - DNA, 96 bp, Aspergillus novofumigatus
  misc_feature: 86
agagtagagtaagagtaagggttagaagaagagttagaataagagttaataaaagaaggattaaggagaggtagaaggagagttagaagaagagat

SEQ ID NO: 17096 - DNA, 96 bp, Aspergillus novofumigatus
  misc_feature: 86
agaataagagatagataagagatagaataagagtaagagtagagtaagagtaagggttagaagaagagttagaataagagttaataaaagaaggat

SEQ ID NO: 17097 - DNA, 96 bp, Aspergillus novofumigatus
  misc_feature: 86
atccctactctcatcctaaccctcccccttattaatatccttatcctattaataattatccccttctttatcctatattactttctataaccttat

SEQ ID NO: 17098 - DNA, 96 bp, Aspergillus novofumigatus
  misc_feature: 86
agtcctagaatactagtatataagaatatagaatagctgctatatattaatatagacttattaaaatattatagctatagagctataatattctat

SEQ ID NO: 17099 - DNA, 96 bp, Aspergillus novofumigatus
  misc_feature: 86
acctctcttactacttaccttactattaaccttactatctactatgatatttatattactatctaccttattacctaccttactattgactacact

SEQ ID NO: 17100 - DNA, 96 bp, Aspergillus novofumigatus
  misc_feature: 86
agtattataagagtattaataagtaaattaatattatattaataaggaaaaaatattatattaataatttaatatcctaatttaatatcttccatt

SEQ ID NO: 17101 - DNA, 96 bp, Aspergillus novofumigatus
  misc_feature: 86
agtaaaaaaagaggttttaagagattagatagagaagaagaggtaaaagagaatttagggatagattaagaggagagaagaaggagtaataagagt

SEQ ID NO: 17102 - DNA, 96 bp, Aspergillus novofumigatus
  misc_feature: 86
acccttattctctctcttattattaccttttattttcttttcttttctattccctttcctcttccctttcctctttcctttcctcttccctttcct

SEQ ID NO: 17103 - DNA, 96 bp, Aspergillus novofumigatus
  misc_feature: 86
agacattaaattaggatattaaattattaatataatattttttccttattaatacaatattaatttacttattaatactcttataatactgaatct

SEQ ID NO: 17104 - DNA, 96 bp, Aspergillus novofumigatus
  misc_feature: 86
aaaacttttcttctaactcttattctaactctccttcttattattccttactcttcttctaatccttcttctatctctccctctatctccccttct

SEQ ID NO: 17105 - DNA, 96 bp, Aspergillus novofumigatus
  misc_feature: 86
aaggatttagattagaagggataagagaggagattaagaagagatagaataagagatagataagagatagaataagagtaagagtagagtaagagt

SEQ ID NO: 17106 - DNA, 96 bp, Aspergillus novofumigatus
  misc_feature: 86
aagtttatatcttatatataggagatagtatctataaattatattattataatcctctattagctataattatttaatctaaatctttatagtagt

SEQ ID NO: 17107 - DNA, 96 bp, Aspergillus novofumigatus
  misc_feature: 86
aaaattaaggaaagataaaattaaaagaaaaggataaagttaaataataatttaatagaatgaattaggaatgtagtaaggattaatagaaatatt

SEQ ID NO: 17108 - DNA, 96 bp, Aspergillus novofumigatus
  misc_feature: 85
tttcttactctccttctaactatcctaacctctcctaatctcttcttctatctcttcttctaactctccttctacctctccttaatccttctttta

SEQ ID NO: 17109 - DNA, 96 bp, Aspergillus novofumigatus
  misc_feature: 85
tttctcttattttttttttaaatatatatacttaatctcttcttatcttaatctaataaatataaatatatatatctattatctagactaaatctt

SEQ ID NO: 17110 - DNA, 96 bp, Aspergillus novofumigatus
  misc_feature: 85
agatagatagatataggaaaataaggatttagaaggatttaggaagagagaggatttagaatgaagatagaaagaagagaggagaagagaaggaaa

SEQ ID NO: 17111 - DNA, 96 bp, Aspergillus novofumigatus
  misc_feature: 85
agaggaaagggaagaggaaagggaagaggaaagggaatagaaaagaaaagaaaataaaaggtaataataagagagagaataagggttaggaataaa

SEQ ID NO: 17112 - DNA, 96 bp, Aspergillus novofumigatus
  misc_feature: 85
taaatttctcttattttttttttaaatatatatacttaatctcttcttatcttaatctaataaatataaatatatatatctattatctagactaaa

SEQ ID NO: 17113 - DNA, 96 bp, Aspergillus novofumigatus
  misc_feature: 85
tttaaaatagaagtaaaaaaagaggttttaagagattagatagagaagaagaggtaaaagagaatttagggatagattaagaggagagaagaagga

SEQ ID NO: 17114 - DNA, 96 bp, Aspergillus novofumigatus
  misc_feature: 85
ttgctaataccctctatctcttttactaactctccttcttcttctaactcttatctctaactctttctctctctcttcccctccctcttcctcttc

SEQ ID NO: 17115 - DNA, 96 bp, Aspergillus novofumigatus
  misc_feature: 85
ataagttaatttagaaagaaaagaatagaaggtaaagatagataagatagaaagagtttaagtaaagggtaagaaagagaggaagaataagaagaa

SEQ ID NO: 17116 - DNA, 96 bp, Aspergillus novofumigatus
  misc_feature: 85
ttcttactctccttctaactatcctaacctctcctaatctcttcttctatctcttcttctaactctccttctacctctccttaatccttcttttat

SEQ ID NO: 17117 - DNA, 96 bp, Aspergillus novofumigatus
  misc_feature: 85
aaggagagtaagagagatttagatagaggggttaaataagagatagaaggagagatagaaggagagatagaaggagagatagaaggagagatagaa

SEQ ID NO: 17118 - DNA, 96 bp, Aspergillus novofumigatus
  misc_feature: 85
atttagaataaagatagaaagaagagaggagaagagaaggaaataagttataggatattaatttagagagatttaagtaggtataaggttatagaa

SEQ ID NO: 17119 - DNA, 96 bp, Aspergillus novofumigatus
  misc_feature: 85
gagatagatagatataggaaaataaggatttagaaggatttaggaagagagaggatttagaatgaagatagaaagaagagaggagaagagaaggaa

SEQ ID NO: 17120 - DNA, 96 bp, Aspergillus novofumigatus
  misc_feature: 85
gggagagttagggagagatagaaggggagatagagggagagatagaagaaggattagaagaagagtaaggaataataagaaggagagttagaataa

SEQ ID NO: 17121 - DNA, 96 bp, Aspergillus novofumigatus
  misc_feature: 85
ttattaactcttattctaactcttcttctaacccttactcttactctactcttactcttattctatctcttatctatctcttattctatctcttct

SEQ ID NO: 17122 - DNA, 96 bp, Aspergillus novofumigatus
  misc_feature: 85
cctaaaatatatatatttatttacttaatatattaatcctaattaaccttgatctcctaatatatatctattacttgatatatggatactaactaa

SEQ ID NO: 17123 - DNA, 96 bp, Aspergillus novofumigatus
  misc_feature: 85
ttaggtatcagggggatatcaccatagttaggagagagatagttagtaaggtagataataagattaatagtatagtagatagtgaggttaacagta

SEQ ID NO: 17124 - DNA, 96 bp, Aspergillus novofumigatus
  misc_feature: 85
gacagtaagtaagatagtgagggaggcagtgagtgagatagtaagtaagatagtgagggaggtagtgagtaagacagtgagtgagatagtaagtaa

SEQ ID NO: 17125 - DNA, 96 bp, Aspergillus novofumigatus
  misc_feature: 85
ataagagatagataagagatagaataagagtaagagtagagtaagagtaagggttagaagaagagttagaataagagttaataaaagaaggattaa

SEQ ID NO: 17126 - DNA, 96 bp, Aspergillus novofumigatus
  misc_feature: 85
gctgtataggaacagggtattagtaaatttaaatatctaatagatattaaattaagaaatctttattaattatagttattatatagctagagttaa

SEQ ID NO: 17127 - DNA, 96 bp, Aspergillus novofumigatus
  misc_feature: 85
ttaaaatagaagtaaaaaaagaggttttaagagattagatagagaagaagaggtaaaagagaatttagggatagattaagaggagagaagaaggag

SEQ ID NO: 17128 - DNA, 96 bp, Aspergillus novofumigatus
  misc_feature: 85
taattaggtatcagggggatatcaccatagttaggagagagatagttagtaaggtagataataagattaatagtatagtagatagtgaggttaaca

SEQ ID NO: 17129 - DNA, 96 bp, Aspergillus novofumigatus
  misc_feature: 85
gtgaggggggcagtgagcgagatagtgagggaggcagtgagtgagatagtgagggaggcagtgagtgagatagtgagggaggcagtgagcaagaca

SEQ ID NO: 17130 - DNA, 96 bp, Aspergillus novofumigatus
  misc_feature: 85
tcttttattaactcttattctaactcttcttctaacccttactcttactctactcttactcttattctatctcttatctatctcttattctatctc

SEQ ID NO: 17131 - DNA, 96 bp, Aspergillus novofumigatus
  misc_feature: 85
gtaagagtagagtaagagtaagggttagaagaagagttagaataagagttaataaaagaaggattaaggagaggtagaaggagagttagaagaaga

SEQ ID NO: 17132 - DNA, 96 bp, Aspergillus novofumigatus
  misc_feature: 85
tataagttaatttagaaagaaaagaatagaaggtaaagatagataagatagaaagagtttaagtaaagggtaagaaagagaggaagaataagaaga

SEQ ID NO: 17133 - DNA, 96 bp, Aspergillus novofumigatus
  misc_feature: 85
atttagaaagaaaagaatagaaggtaaagatagataagatagaaagagtttaagtaaagggtaagaaagagaagaagaataagaagaaagagaaga

SEQ ID NO: 17134 - DNA, 96 bp, Aspergillus novofumigatus
  misc_feature: 85
gagatagaaggagagatagaaggagagttagaaggagagttagaaggagagtaagaaatagaataagagtaaggggtagtaagtgtagatagaaga

SEQ ID NO: 17135 - DNA, 96 bp, Aspergillus novofumigatus
  misc_feature: 85
ggagagatagaaggggagatagagggagagatagaagaaggattagaagaagagtaaggaataataagaaggagagttagaataagagttagaaga

SEQ ID NO: 17136 - DNA, 96 bp, Aspergillus novofumigatus
  misc_feature: 85
tcttactctccttctaactatcctaacctctcctaatctcttcttctatctcttcttctaactctccttctacctctccttaatccttcttttatt

SEQ ID NO: 17137 - DNA, 96 bp, Aspergillus novofumigatus
  misc_feature: 85
tcttactacctcccttactatcttacttactacctcccttactgttaaccttactatctacctcactacttatcttactacctccctcactgcctc

SEQ ID NO: 17138 - DNA, 96 bp, Aspergillus novofumigatus
  misc_feature: 85
tctcttctctctatttctctcttaattcttactctatctcttactttacccctttctctatctctctcttctatctacacttactaccccttactc

SEQ ID NO: 17139 - DNA, 96 bp, Aspergillus novofumigatus
  misc_feature: 85
tctcttactacttaccttactattaaccttactatctactatgatatttatattactatctaccttattacctaccttactattgactacactatc

SEQ ID NO: 17140 - DNA, 96 bp, Aspergillus novofumigatus
  misc_feature: 85
tagaaggagagatagaaggagagttagaaggagagttagaaggagagtaagaaatagaataagagtaaggggtagtaagtgtagatagaagagaga

SEQ ID NO: 17141 - DNA, 96 bp, Aspergillus novofumigatus
  misc_feature: 85
aaaagaattagagaaagaagagatagtaggagagggtaagggttagtaaggatagaagaagagttataagaagaggaagagggaggggaagagaga

SEQ ID NO: 17142 - DNA, 96 bp, Aspergillus novofumigatus
  misc_feature: 85
gaggttaggatagttagaaggagagtaagagagatttagatagaggggttaaataagagatagaaggagagatagaaggagagatagaaggagaga

SEQ ID NO: 17143 - DNA, 96 bp, Aspergillus novofumigatus
  misc_feature: 85
attagaatttaaaatagaagtaaaaaaagaggttttaagagattagatagagaagaagaggtaaaagagaatttagggatagattaagaggagaga

SEQ ID NO: 17144 - DNA, 96 bp, Aspergillus novofumigatus
  misc_feature: 85
gagaggttaggatagttagaaggagagtaagagagatttagatagaggggttaaataagagatagaaggagagatagaaggagagatagaaggaga

SEQ ID NO: 17145 - DNA, 96 bp, Aspergillus novofumigatus
  misc_feature: 85
tctccttctaactatcctaacctctcctaatctcttcttctatctcttcttctaactctccttctacctctccttaatccttcttttattaactct

SEQ ID NO: 17146 - DNA, 96 bp, Aspergillus novofumigatus
  misc_feature: 85
tctacttattaaatcctaactttaatcctttcttcttttctctactctttcttctcttctctactctttcttctttccttttttaatcttctctct

SEQ ID NO: 17147 - DNA, 96 bp, Aspergillus novofumigatus
  misc_feature: 85
tctaccccttattcttatcttaaacttactaacccttactctattacttatccttccttactttattctccttactacctcttaccttctatctat

SEQ ID NO: 17148 - DNA, 96 bp, Aspergillus novofumigatus
  misc_feature: 85
agaaggagagatagaaggagagatagaaggagagttagaaggagagttagaaggagagtaagaaatagaataagagtaaggggtagtaagtgtaga

SEQ ID NO: 17149 - DNA, 96 bp, Aspergillus novofumigatus
  misc_feature: 85
tctaactcttcttctaacccttactcttactctactcttactcttattctatctcttatctatctcttattctatctcttcttaatctcctctctt

SEQ ID NO: 17150 - DNA, 96 bp, Aspergillus novofumigatus
  misc_feature: 85
gagatagtgagggagatagtaagataggtagtaagataataagtaaatagataagtagggtagtaagatagtaatgcaggtaaaaggccccaagga

SEQ ID NO: 17151 - DNA, 96 bp, Aspergillus novofumigatus
  misc_feature: 85
agagatagatagatataggaaaataaggatttagaaggatttaggaagagagaggatttagaatgaagatagaaagaagagaggagaagagaagga

SEQ ID NO: 17152 - DNA, 96 bp, Aspergillus novofumigatus
  misc_feature: 85
gatagttagaaggagagtaagagagatttagatagaggggttaaataagagatagaaggagagatagaaggagagatagaaggagagatagaagga

SEQ ID NO: 17153 - DNA, 96 bp, Aspergillus novofumigatus
  misc_feature: 85
gatttagatagaggggttaaataagagatagaaggagagatagaaggagagatagaaggagagatagaaggagagatagaaggagagatagaagga

SEQ ID NO: 17154 - DNA, 96 bp, Aspergillus novofumigatus
  misc_feature: 85
agtttagataggaggaagggatagagggagggataaagggagggatagaggaagggatagaataaaagtaaggattagtaagattagataggagga

SEQ ID NO: 17155 - DNA, 96 bp, Aspergillus novofumigatus
  misc_feature: 85
tcctaacctctcctaatctcttcttctatctcttcttctaactctccttctacctctccttaatccttcttttattaactcttattctaactcttc

SEQ ID NO: 17156 - DNA, 96 bp, Aspergillus novofumigatus
  misc_feature: 85
tcctaaaatatatatatttatttacttaatatattaatcctaattaaccttgatctcctaatatatatctattacttgatatatggatactaacta

SEQ ID NO: 17157 - DNA, 96 bp, Aspergillus novofumigatus
  misc_feature: 85
tccctttttatctcttctctctatttctctcttaattcttactctatctcttactttacccctttctctatctctctcttctatctacacttacta

SEQ ID NO: 17158 - DNA, 96 bp, Aspergillus novofumigatus
  misc_feature: 85
ctctacaaactaactgtataatatatatctctgcgcattatggtatcctaaaatatatatattcattcattaatatatcaatgctgatcgacctga

SEQ ID NO: 17159 - DNA, 96 bp, Aspergillus novofumigatus
  misc_feature: 85
aagttaatttagaaagaaaagaatagaaggtaaagatagataagatagaaagagtttaagtaaagggtaagaaagagaggaagaataagaagaata

SEQ ID NO: 17160 - DNA, 96 bp, Aspergillus novofumigatus
  misc_feature: 85
aagagtaagggttagaagaagagttagaataagagttaaggaaagagataaaagaaggattaagaagaggtagaagaagagttagaagaagagata

SEQ ID NO: 17161 - DNA, 96 bp, Aspergillus novofumigatus
  misc_feature: 85
tatatttttaatagaataagagagaagattaaaaaaggaaagaagaaagagtagagaagagaagaaagagtagagaaaagaagaaaggattaaagt

SEQ ID NO: 17162 - DNA, 96 bp, Aspergillus novofumigatus
  misc_feature: 85
tagctgtataggaacagggtattagtaaatttaaatatctaatagatattaaattaagaaatctttattaattatagttattatatagctagagtt

SEQ ID NO: 17163 - DNA, 96 bp, Aspergillus novofumigatus
  misc_feature: 85
tagagatagatagatataggaaaataaggatttagaaggatttaggaagagagaggatttagaatgaagatagaaagaagagaggagaagagaagg

SEQ ID NO: 17164 - DNA, 96 bp, Aspergillus novofumigatus
  misc_feature: 85
tactgtcttgcttgctgcctccctcactatctcactcactatctcactcactgccttacttactatctcactcactgtcttactcactacctccct

SEQ ID NO: 17165 - DNA, 96 bp, Aspergillus novofumigatus
  misc_feature: 85
taccttgctcactgcctatcttactacctcccttactatcttacttactacctcccttactgttaaccttactatctacctcactacttatcttac

SEQ ID NO: 17166 - DNA, 96 bp, Aspergillus novofumigatus
  misc_feature: 85
tacaaactaactgtataatatatatctctgcgcattatggtatcctaaaatatatatattcattcattaatatatcaatgctgatcgacctgatct

SEQ ID NO: 17167 - DNA, 96 bp, Aspergillus novofumigatus
  misc_feature: 85
cttactctccttctaactatcctaacctctcctaatctcttcttctatctcttcttctaactctccttctacctctccttaatccttcttttatta

SEQ ID NO: 17168 - DNA, 96 bp, Aspergillus novofumigatus
  misc_feature: 85
aaatatttatatagtatatacttattattttaaatttagatagtatacctagttatttataataatataaggtaactagctggtttatttaattta

SEQ ID NO: 17169 - DNA, 96 bp, Aspergillus novofumigatus
  misc_feature: 85
taaaaaaagaggttttaagagattagatagagaagaagaggtaaaagagaatttagggatagattaagaggagagaagaaggagtaataagagtag

SEQ ID NO: 17170 - DNA, 96 bp, Aspergillus novofumigatus
  misc_feature: 85
actctcatcctaaccctcccccttattaatatccttatcctattaataattatccccttctttatcctatattactttctataaccttatacctac

SEQ ID NO: 17171 - DNA, 96 bp, Aspergillus novofumigatus
  misc_feature: 85
gggttattaagtttagataggaggaagggatagagggagggataaagggagggatagaggaagggatagaataaaagtaaggattagtaagattag

SEQ ID NO: 17172 - DNA, 96 bp, Aspergillus novofumigatus
  misc_feature: 85
gggagatagtaagataggtagtaagataataagtaaatagataagtagggtagtaagatagtaatgcaggtaaaaggccccagggagattatatat

SEQ ID NO: 17173 - DNA, 96 bp, Aspergillus novofumigatus
  misc_feature: 85
gggagagatagaaggggagatagagggagagatagaagaaggattagaagaagagtaaggaataataagaaggagagttagaataagagttagaag

SEQ ID NO: 17174 - DNA, 96 bp, Aspergillus novofumigatus
  misc_feature: 85
ggagatagtaagataggtagtaagataataagtaaatagataagtagggtagtaagatagtaatgcaggtaaaaggccccagggagattatatatc

SEQ ID NO: 17175 - DNA, 96 bp, Aspergillus novofumigatus
  misc_feature: 85
cccttattcttatcttaaacttactaacccttactctattacttatccttccttactttattctccttactacctcttaccttctatctattctcc

SEQ ID NO: 17176 - DNA, 96 bp, Aspergillus novofumigatus
  misc_feature: 85
aacccttattctctctcttattattaccttttattttcttttcttttctattccctttcctcttccctttcctctttcctttcctcttccctttcc

SEQ ID NO: 17177 - DNA, 96 bp, Aspergillus novofumigatus
  misc_feature: 85
gatttaggaagagagaaggatttagaataaagatagaaagaagagaggagaagagaaggaaataagttataggatattaatttagagagatttaag

SEQ ID NO: 17178 - DNA, 96 bp, Aspergillus novofumigatus
  misc_feature: 85
gattagaatttaaaatagaagtaaaaaaagaggttttaagagattagatagagaagaagaggtaaaagagaatttagggatagattaagaggagag

SEQ ID NO: 17179 - DNA, 96 bp, Aspergillus novofumigatus
  misc_feature: 85
cttactctattacttatccttccttactttattctccttactacctcttaccttctatctattctccttattttactaaatacctccctctctatc

SEQ ID NO: 17180 - DNA, 96 bp, Aspergillus novofumigatus
  misc_feature: 85
gagggagatagtaagataggtagtaagataataagtaaatagataagtagggtagtaagatagtaatgcaggtaaaaggccccaaggagattatat

SEQ ID NO: 17181 - DNA, 96 bp, Aspergillus novofumigatus
  misc_feature: 85
gaagacattaaattaggatattaaattattaatataatattttttccttattaatacaatattaatttacttattaatactcttataatactgaat

SEQ ID NO: 17182 - DNA, 96 bp, Aspergillus novofumigatus
  misc_feature: 85
gaagaagaaagagaagaagaaattaaaattaaggaaagataaaattaaaagaaaaggataaagttaaataataatttaatagaatgaattaggaat

SEQ ID NO: 17183 - DNA, 96 bp, Aspergillus novofumigatus
  misc_feature: 85
gaaagagaagaagaaagagaagaagaaattaaaattaaggaaagataaaattaaaagaaaaggataaagttaaataataatttaatagaatgaatt

SEQ ID NO: 17184 - DNA, 96 bp, Aspergillus novofumigatus
  misc_feature: 85
aagttaatttagaaagaaaagaatagaaggtaaagatagataagatagaaagagtttaagtaaagggtaagaaagagaagaagaataagaagaaag

SEQ ID NO: 17185 - DNA, 96 bp, Aspergillus novofumigatus
  misc_feature: 85
cttctcctctcttctttctatctttattctaaatccttctctcttcctaaatccttctaaatccttattttcctatatctatctatccctactctt

SEQ ID NO: 17186 - DNA, 96 bp, Aspergillus novofumigatus
  misc_feature: 85
aggagagtaagagagatttagatagaggggttaaataagagatagaaggagagatagaaggagagatagaaggagagatagaaggagagatagaag

SEQ ID NO: 17187 - DNA, 96 bp, Aspergillus novofumigatus
  misc_feature: 85
cttattcttatcttaaacttactaacccttactctattacttatccttccttactttattctccttactacctcttaccttctatctattctcctt

SEQ ID NO: 17188 - DNA, 96 bp, Aspergillus novofumigatus
  misc_feature: 85
cttattctctctcttattattaccttttattttcttttcttttctattccctttcctcttccctttcctctttcctttcctcttccctttcctctt

SEQ ID NO: 17189 - DNA, 96 bp, Aspergillus novofumigatus
  misc_feature: 85
acagtaagtaagatagtgagggaggcagtgagtgagatagtaagtaagatagtgagggaggtagtgagtaagacagtgagtgagatagtaagtaag

SEQ ID NO: 17190 - DNA, 96 bp, Aspergillus novofumigatus
  misc_feature: 85
agatagaaggagagatagaaggagagttagaaggagagttagaaggagagtaagaaatagaataagagtaaggggtagtaagtgtagatagaagag

SEQ ID NO: 17191 - DNA, 96 bp, Aspergillus novofumigatus
  misc_feature: 85
atagtaggagagggtaagggttagtaaggatagaagaagagttataagaagaggaagagggaggggaagagagagagaaagagttagagataagag

SEQ ID NO: 17192 - DNA, 96 bp, Aspergillus novofumigatus
  misc_feature: 85
agaaggagagatagaaggagagttagaaggagagttagaaggagagtaagaaatagaataagagtaaggggtagtaagtgtagatagaagagagag

SEQ ID NO: 17193 - DNA, 96 bp, Aspergillus novofumigatus
  misc_feature: 85
ctccctttttatctcttctctctatttctctcttaattcttactctatctcttactttacccctttctctatctctctcttctatctacacttact

SEQ ID NO: 17194 - DNA, 96 bp, Aspergillus novofumigatus
  misc_feature: 85
ctccctcactatctcactcactatctcactcactgccttacttactatctcactcactgtcttactcactacctccctcactatcttacttactat

SEQ ID NO: 17195 - DNA, 96 bp, Aspergillus novofumigatus
  misc_feature: 85
ctatttcttactctccttctaactctccttctaactctccttctatctctccttctatctctccttctatctctccttctatctctccttctatct

SEQ ID NO: 17196 - DNA, 96 bp, Aspergillus novofumigatus
  misc_feature: 85
ctatctcttttactaactctccttcttcttctaactcttatctctaactctttctctctctcttcccctccctcttcctcttcttataactcttct

SEQ ID NO: 17197 - DNA, 96 bp, Aspergillus novofumigatus
  misc_feature: 85
agagtaagggttagaagaagagttagaataagagttaaggaaagagataaaagaaggattaagaagaggtagaagaagagttagaagaagagatag

SEQ ID NO: 17198 - DNA, 96 bp, Aspergillus novofumigatus
  misc_feature: 85
agagatagaataagagtaagagtagagtaagagtaagggttagaagaagagttagaataagagttaataaaagaaggattaaggagaggtagaagg

SEQ ID NO: 17199 - DNA, 96 bp, Aspergillus novofumigatus
  misc_feature: 85
aagtttagataggaggaagggatagagggagggataaagggagggatagaggaagggatagaataaaagtaaggattagtaagattagataggagg

SEQ ID NO: 17200 - DNA, 96 bp, Aspergillus novofumigatus
  misc_feature: 85
agacacacaggcactggggtcaatggaagccgggcgcgcgcgccccgggggtgaccagttggcggggacccttgggggggggcagaccggcagggg

SEQ ID NO: 17201 - DNA, 96 bp, Aspergillus novofumigatus
  misc_feature: 85
aataactaggtatactatctaaatttaaaataataagtatatactatataaatatttaatatatttataacttagctattatactacctagggatg

SEQ ID NO: 17202 - DNA, 96 bp, Aspergillus novofumigatus
  misc_feature: 85
atttcttactctccttctaactatcctaacctctcctaatctcttcttctatctcttcttctaactctccttctacctctccttaatccttctttt

SEQ ID NO: 17203 - DNA, 96 bp, Aspergillus novofumigatus
  misc_feature: 85
atttctcttattttttttttaaatatatatacttaatctcttcttatcttaatctaataaatataaatatatatatctattatctagactaaatct

SEQ ID NO: 17204 - DNA, 96 bp, Aspergillus novofumigatus
  misc_feature: 85
atttaggaagagagaaggatttagaataaagatagaaagaagagaggagaagagaaggaaataagttataggatattaatttagagagatttaagt

SEQ ID NO: 17205 - DNA, 96 bp, Aspergillus novofumigatus
  misc_feature: 85
atatttttaatagaataagagagaagattaaaaaaggaaagaagaaagagtagagaagagaagaaagagtagagaaaagaagaaaggattaaagtt

SEQ ID NO: 17206 - DNA, 96 bp, Aspergillus novofumigatus
  misc_feature: 85
atagctgtataggaacagggtattagtaaatttaaatatctaatagatattaaattaagaaatctttattaattatagttattatatagctagagt

SEQ ID NO: 17207 - DNA, 96 bp, Aspergillus novofumigatus
  misc_feature: 85
accttgctcactgcctatcttactacctcccttactatcttacttactacctcccttactgttaaccttactatctacctcactacttatcttact

SEQ ID NO: 17208 - DNA, 96 bp, Aspergillus novofumigatus
  misc_feature: 85
actcttattctaactcttcttctaacccttactcttactctactcttactcttattctatctcttatctatctcttattctatctcttcttaatct

SEQ ID NO: 17209 - DNA, 96 bp, Aspergillus novofumigatus
  misc_feature: 84
ttttcttctaactcttattctaactctccttcttattattccttactcttcttctaatccttcttctatctctccctctatctccccttctatctc

SEQ ID NO: 17210 - DNA, 96 bp, Aspergillus novofumigatus
  misc_feature: 84
gaggaaagggaagaggaaagggaagaggaaagggaatagaaaagaaaagaaaataaaaggtaataataagagagagaataagggttaggaataaaa

SEQ ID NO: 17211 - DNA, 96 bp, Aspergillus novofumigatus
  misc_feature: 84
agagatagaaggggagatagagggagagatagaagaaggattagaagaagagtaaggaataataagaaggagagttagaataagagttagaagaaa

SEQ ID NO: 17212 - DNA, 96 bp, Aspergillus novofumigatus
  misc_feature: 84
tttctctactctttcttctcttctctactctttcttctttccttttttaatcttctctcttattctattaaaaatatacccttcttctctcttata

SEQ ID NO: 17213 - DNA, 96 bp, Aspergillus novofumigatus
  misc_feature: 84
tttagaaagaaaagaatagaaggtaaagatagataagatagaaagagtttaagtaaagggtaagaaagagaagaagaataagaagaaagagaagaa

SEQ ID NO: 17214 - DNA, 96 bp, Aspergillus novofumigatus
  misc_feature: 84
ctgtataggaacagggtattagtaaatttaaatatctaatagatattaaattaagaaatctttattaattatagttattatatagctagagttaaa

SEQ ID NO: 17215 - DNA, 96 bp, Aspergillus novofumigatus
  misc_feature: 84
ttgaagagagttagggtttgagtaagaaagaggtaaggagagatagaataagaattagaaggaggattagaggaagagatagaagaagggttagaa

SEQ ID NO: 17216 - DNA, 96 bp, Aspergillus novofumigatus
  misc_feature: 84
ttcttatcttaaacttactaacccttactctattacttatccttccttactttattctccttactacctcttaccttctatctattctccttattt

SEQ ID NO: 17217 - DNA, 96 bp, Aspergillus novofumigatus
  misc_feature: 84
taatttagaaagaaaagaatagaaggtaaagatagataagatagaaagagtttaagtaaagggtaagaaagagaagaagaataagaagaaagagaa

SEQ ID NO: 17218 - DNA, 96 bp, Aspergillus novofumigatus
  misc_feature: 84
ttctcttctcctctcttctttctatctttattctaaatccttctctcttcctaaatccttctaaatccttattttcctatatctatctatccctac

SEQ ID NO: 17219 - DNA, 96 bp, Aspergillus novofumigatus
  misc_feature: 84
ttctccctttttatctcttctctctatttctctcttaattcttactctatctcttactttacccctttctctatctctctcttctatctacactta

SEQ ID NO: 17220 - DNA, 96 bp, Aspergillus novofumigatus
  misc_feature: 84
gagagatagaaggagagatagaaggagagttagaaggagagttagaaggagagtaagaaatagaataagagtaaggggtagtaagtgtagatagaa

SEQ ID NO: 17221 - DNA, 96 bp, Aspergillus novofumigatus
  misc_feature: 84
ttctaactatcctaacctctcctaatctcttcttctatctcttcttctaactctccttctacctctccttaatccttcttttattaactcttattc

SEQ ID NO: 17222 - DNA, 96 bp, Aspergillus novofumigatus
  misc_feature: 84
ataattaaaaatagaagaagaaagggaagaggaaagggaagaggaaaggaaagaggaaagggaagaggaaagggaatagaaaagaaaagaaaataa

SEQ ID NO: 17223 - DNA, 96 bp, Aspergillus novofumigatus
  misc_feature: 84
ttatttccttctcttctcctctcttctttctatctttattctaaatccttctctcttcctaaatccttctaaatccttattttcctatatctatct

SEQ ID NO: 17224 - DNA, 96 bp, Aspergillus novofumigatus
  misc_feature: 84
agttaatttagaaagaaaagaatagaaggtaaagatagataagatagaaagagtttaagtaaagggtaagaaagagaggaagaataagaagaataa

SEQ ID NO: 17225 - DNA, 96 bp, Aspergillus novofumigatus
  misc_feature: 84
ttattcctaacccttattctctctcttattattaccttttattttcttttcttttctattccctttcctcttccctttcctcttccctttcctctt

SEQ ID NO: 17226 - DNA, 96 bp, Aspergillus novofumigatus
  misc_feature: 84
tactctttcttctcttctctactctttcttctttccttttttaatcttctctcttattctattaaaaatatacccttcttctctcttatattataa

SEQ ID NO: 17227 - DNA, 96 bp, Aspergillus novofumigatus
  misc_feature: 84
ttagggtttgagtaagaaagaggtaaggagagatagaataagaattagaaggaggattagaggaagagatagaagaagggttagaataagagttag

SEQ ID NO: 17228 - DNA, 96 bp, Aspergillus novofumigatus
  misc_feature: 84
taggtatcagggggatatcaccatagttaggagagagatagttagtaaggtagataataagattaatagtatagtagatagtgaggttaacagtaa

SEQ ID NO: 17229 - DNA, 96 bp, Aspergillus novofumigatus
  misc_feature: 84
aaatagaagtaaaaaaagaggttttaagagattagatagagaagaagaggtaaaagagaatttagggatagattaagaggagagaagaaggagtaa

SEQ ID NO: 17230 - DNA, 96 bp, Aspergillus novofumigatus
  misc_feature: 84
gagagatagaaggagagatagaaggagagatagaaggagagttagaaggagagttagaaggagagtaagaaatagaataagagtaaggggtagtaa

SEQ ID NO: 17231 - DNA, 96 bp, Aspergillus novofumigatus
  misc_feature: 84
ttaccttgctcactgcctatcttactacctcccttactatcttacttactacctcccttactgttaaccttactatctacctcactacttatctta

SEQ ID NO: 17232 - DNA, 96 bp, Aspergillus novofumigatus
  misc_feature: 84
ttaatttagaaagaaaagaatagaaggtaaagatagataagatagaaagagtttaagtaaagggtaagaaagagaagaagaataagaagaaagaga

SEQ ID NO: 17233 - DNA, 96 bp, Aspergillus novofumigatus
  misc_feature: 84
tattataagagtattaataagtaaattaatattatattaataaggaaaaaatattatattaataatttaatatcctaatttaatatcttccattaa

SEQ ID NO: 17234 - DNA, 96 bp, Aspergillus novofumigatus
  misc_feature: 84
ttaactcttattctaactcttcttctaacccttactcttactctactcttactcttattctatctcttatctatctcttattctatctcttcttaa

SEQ ID NO: 17235 - DNA, 96 bp, Aspergillus novofumigatus
  misc_feature: 84
ttaaatatttatatagtatatacttattattttaaatttagatagtatacctagttatttataataatataaggtaactagctggtttatttaatt

SEQ ID NO: 17236 - DNA, 96 bp, Aspergillus novofumigatus
  misc_feature: 84
tgtataggaacagggtattagtaaatttaaatatctaatagatattaaattaagaaatctttattaattatagttattatatagctagagttaaag

SEQ ID NO: 17237 - DNA, 96 bp, Aspergillus novofumigatus
  misc_feature: 84
taggagttaagaataagagttagaagaagagataaaaagggttagaagaagaattaggaataaaaataagaataaaaagtggaagaatagttagca

SEQ ID NO: 17238 - DNA, 96 bp, Aspergillus novofumigatus
  misc_feature: 84
ctcactatctcactcactatctcactcactgccttacttactatctcactcactgtcttactcactacctccctcactatcttacttactatctca

SEQ ID NO: 17239 - DNA, 96 bp, Aspergillus novofumigatus
  misc_feature: 84
gagaagggaaaagagtatataagttaatttagaaagaaaagaatagaaggtaaagatagataagatagaaagagtttaagtaaagggtaagaaaga

SEQ ID NO: 17240 - DNA, 96 bp, Aspergillus novofumigatus
  misc_feature: 84
agaaaagaattagagaaagaagagatagtaggagagggtaagggttagtaaggatagaagaagagttataagaagaggaagagggaggggaagaga

SEQ ID NO: 17241 - DNA, 96 bp, Aspergillus novofumigatus
  misc_feature: 84
tctctctcttattattaccttttattttcttttcttttctattccctttcctcttccctttcctctttcctttcctcttccctttcctcttccctt

SEQ ID NO: 17242 - DNA, 96 bp, Aspergillus novofumigatus
  misc_feature: 84
ggagagatagaaggagagatagaaggagagttagaaggagagttagaaggagagtaagaaatagaataagagtaaggggtagtaagtgtagataga

SEQ ID NO: 17243 - DNA, 96 bp, Aspergillus novofumigatus
  misc_feature: 84
aaaaaaagaggttttaagagattagatagagaagaagaggtaaaagagaatttagggatagattaagaggagagaagaaggagtaataagagtaga

SEQ ID NO: 17244 - DNA, 96 bp, Aspergillus novofumigatus
  misc_feature: 84
tagggagagatagaaggggagatagagggagagatagaagaaggattagaagaagagtaaggaataataagaaggagagttagaataagagttaga

SEQ ID NO: 17245 - DNA, 96 bp, Aspergillus novofumigatus
  misc_feature: 84
tctaactatcctaacctctcctaatctcttcttctatctcttcttctaactctccttctacctctccttaatccttcttttattaactcttattct

SEQ ID NO: 17246 - DNA, 96 bp, Aspergillus novofumigatus
  misc_feature: 84
tagaataagagatagataagagatagaataagagtaagagtagagtaagagtaagggttagaagaagagttagaataagagttaataaaagaagga

SEQ ID NO: 17247 - DNA, 96 bp, Aspergillus novofumigatus
  misc_feature: 84
tccctactctcatcctaaccctcccccttattaatatccttatcctattaataattatccccttctttatcctatattactttctataaccttata

SEQ ID NO: 17248 - DNA, 96 bp, Aspergillus novofumigatus
  misc_feature: 84
atagatagatataggaaaataaggatttagaaggatttaggaagagagaggatttagaatgaagatagaaagaagagaggagaagagaaggaaata

SEQ ID NO: 17249 - DNA, 96 bp, Aspergillus novofumigatus
  misc_feature: 84
tattcctaacccttattctctctcttattattaccttttattttcttttcttttctattccctttcctcttccctttcctctttcctttcctcttc

SEQ ID NO: 17250 - DNA, 96 bp, Aspergillus novofumigatus
  misc_feature: 84
aagaaattaaaattaaggaaagataaaattaaaagaaaaggataaagttaaataataatttaatagaatgaattaggaatgtagtaaggattaata

SEQ ID NO: 17251 - DNA, 96 bp, Aspergillus novofumigatus
  misc_feature: 84
tatctcttctctctatttctctcttaattcttactctatctcttactttacccctttctctatctctctcttctatctacacttactaccccttac

SEQ ID NO: 17252 - DNA, 96 bp, Aspergillus novofumigatus
  misc_feature: 84
tatcctaacctctcctaatctcttcttctatctcttcttctaactctccttctacctctccttaatccttcttttattaactcttattctaactct

SEQ ID NO: 17253 - DNA, 96 bp, Aspergillus novofumigatus
  misc_feature: 84
agggagatagtaagataggtagtaagataataagtaaatagataagtagggtagtaagatagtaatgcaggtaaaaggccccagggagattatata

SEQ ID NO: 17254 - DNA, 96 bp, Aspergillus novofumigatus
  misc_feature: 84
ctctagctatataataactataattaataaagatttcttaatttaatatctattagatatttaaatttactaataccctgttcctatacagctata

SEQ ID NO: 17255 - DNA, 96 bp, Aspergillus novofumigatus
  misc_feature: 84
gtcctagaatactagtatataagaatatagaatagctgctatatattaatatagacttattaaaatattatagctatagagctataatattctata

SEQ ID NO: 17256 - DNA, 96 bp, Aspergillus novofumigatus
  misc_feature: 84
gggtccggcgcggacgggttggtggagggtgggccggtgaccagttggcggggggcccttgggggggcagaccggcaggcaggggcgcgcgcccta

SEQ ID NO: 17257 - DNA, 96 bp, Aspergillus novofumigatus
  misc_feature: 84
actctccttctaactctccttctaactctccttctatctctccttctatctctccttctatctctccttctatctctccttctatctctccttcta

SEQ ID NO: 17258 - DNA, 96 bp, Aspergillus novofumigatus
  misc_feature: 84
ctcttttactaactctccttcttcttctaactcttatctctaactctttctctctctcttcccctccctcttcctcttcttataactcttcttcta

SEQ ID NO: 17259 - DNA, 96 bp, Aspergillus novofumigatus
  misc_feature: 84
tacctctcttactacttaccttactattaaccttactatctactatgatatttatattactatctaccttattacctaccttactattgactacac

SEQ ID NO: 17260 - DNA, 96 bp, Aspergillus novofumigatus
  misc_feature: 84
taataccctctatctcttttactaactctccttcttcttctaactcttatctctaactctttctctctctcttcccctccctcttcctcttcttat

SEQ ID NO: 17261 - DNA, 96 bp, Aspergillus novofumigatus
  misc_feature: 84
taagttaatttagaaagaaaagaatagaaggtaaagatagataagatagaaagagtttaagtaaagggtaagaaagagaggaagaataagaagaat

SEQ ID NO: 17262 - DNA, 96 bp, Aspergillus novofumigatus
  misc_feature: 84
ctatcttgctgcctccctcactcactcactgcctgccttacttactatcttactcactaccttacttactgcctcactccctcactatctcactta

SEQ ID NO: 17263 - DNA, 96 bp, Aspergillus novofumigatus
  misc_feature: 84
taagagtaagggttagaagaagagttagaataagagttaaggaaagagataaaagaaggattaagaagaggtagaagaagagttagaagaagagat

SEQ ID NO: 17264 - DNA, 96 bp, Aspergillus novofumigatus
  misc_feature: 84
cttctctctatttctctcttaattcttactctatctcttactttacccctttctctatctctctcttctatctacacttactaccccttactctta

SEQ ID NO: 17265 - DNA, 96 bp, Aspergillus novofumigatus
  misc_feature: 84
taactcttattctaactcttcttctaacccttactcttactctactcttactcttattctatctcttatctatctcttattctatctcttcttaat

SEQ ID NO: 17266 - DNA, 96 bp, Aspergillus novofumigatus
  misc_feature: 84
gttagggtttgagtaagaaagaggtaaggagagatagaataagaattagaaggaggattagaggaagagatagaagaagggttagaataagagtta

SEQ ID NO: 17267 - DNA, 96 bp, Aspergillus novofumigatus
  misc_feature: 84
gtttatatcttatatataggagatagtatctataaattatattattataatcctctattagctataattatttaatctaaatctttatagtagtat

SEQ ID NO: 17268 - DNA, 96 bp, Aspergillus novofumigatus
  misc_feature: 84
gtgtatgagatagtaagggagatagtaagataggtagtaagataataagtaaatagataagtagggtagtaagatagtaatgcaggtaaaaggccc

SEQ ID NO: 17269 - DNA, 96 bp, Aspergillus novofumigatus
  misc_feature: 84
gtataggaacagggtattagtaaatttaaatatctaatagatattaaattaagaaatctttattaattatagttattatatagctagagttaaagt

SEQ ID NO: 17270 - DNA, 96 bp, Aspergillus novofumigatus
  misc_feature: 84
ccctactctcatcctaaccctcccccttattaatatccttatcctattaataattatccccttctttatcctatattactttctataaccttatac

SEQ ID NO: 17271 - DNA, 96 bp, Aspergillus novofumigatus
  misc_feature: 84
actacctctcttactacttaccttactattaaccttactatctactatgatatttatattactatctaccttattacctaccttactattgactac

SEQ ID NO: 17272 - DNA, 96 bp, Aspergillus novofumigatus
  misc_feature: 84
ccctttttatctcttctctctatttctctcttaattcttactctatctcttactttacccctttctctatctctctcttctatctacacttactac

SEQ ID NO: 17273 - DNA, 96 bp, Aspergillus novofumigatus
  misc_feature: 84
cctttttatctcttctctctatttctctcttaattcttactctatctcttactttacccctttctctatctctctcttctatctacacttactacc

SEQ ID NO: 17274 - DNA, 96 bp, Aspergillus novofumigatus
  misc_feature: 84
attctctctcttattattaccttttattttcttttcttttctattccctttcctcttccctttcctctttcctttcctcttccctttcctcttccc

SEQ ID NO: 17275 - DNA, 96 bp, Aspergillus novofumigatus
  misc_feature: 84
agtgtatgagatagtaagggagatagtaagataggtagtaagataataagtaaatagataagtagggtagtaagatagtaatgcaggtaaaaggcc

SEQ ID NO: 17276 - DNA, 96 bp, Aspergillus novofumigatus
  misc_feature: 84
ctcctaaaaacttttcttctaactcttattctaactctccttcttattattccttactcttcttctaatccttcttctatctctccctctatctcc

SEQ ID NO: 17277 - DNA, 96 bp, Aspergillus novofumigatus
  misc_feature: 84
attcctaacccttattctctctcttattattaccttttattttcttttcttttctattccctttcctcttccctttcctctttcctttcctcttcc

SEQ ID NO: 17278 - DNA, 96 bp, Aspergillus novofumigatus
  misc_feature: 84
aaaagcatgaggtttaggtggactacttaaacataatccgaggataaggattttagcggcttgtagtattttagccgcttgttgcatttttgccgc

SEQ ID NO: 17279 - DNA, 96 bp, Aspergillus novofumigatus
  misc_feature: 84
agtaagtaagatagtgagggaggcagtgagtgagatagtaagtaagatagtgagggaggtagtgagtaagacagtgagtgagatagtaagtaaggc

SEQ ID NO: 17280 - DNA, 96 bp, Aspergillus novofumigatus
  misc_feature: 84
aatttctcttattttttttttaaatatatatacttaatctcttcttatcttaatctaataaatataaatatatatatctattatctagactaaatc

SEQ ID NO: 17281 - DNA, 96 bp, Aspergillus novofumigatus
  misc_feature: 84
aactcttattctaactcttcttctaacccttactcttactctactcttactcttattctatctcttatctatctcttattctatctcttcttaatc

SEQ ID NO: 17282 - DNA, 96 bp, Aspergillus novofumigatus
  misc_feature: 84
ctacaaactaactgtataatatatatctctgcgcattatggtatcctaaaatatatatattcattcattaatatatcaatgctgatcgacctgatc

SEQ ID NO: 17283 - DNA, 96 bp, Aspergillus novofumigatus
  misc_feature: 84
gatagatagatataggaaaataaggatttagaaggatttaggaagagagaggatttagaatgaagatagaaagaagagaggagaagagaaggaaat

SEQ ID NO: 17284 - DNA, 96 bp, Aspergillus novofumigatus
  misc_feature: 84
gagggggacgagggagggagggagggagggggaggcgcgcaggtgggcgcgcggtgggggagggcggcggccagttggctggccgagttggcgcgg

SEQ ID NO: 17285 - DNA, 96 bp, Aspergillus novofumigatus
  misc_feature: 84
cttatttacctcttttttcttctccctttttatctcttctctctatttctctcttaattcttactctatctcttactttacctctttctctatctc

SEQ ID NO: 17286 - DNA, 96 bp, Aspergillus novofumigatus
  misc_feature: 84
gagagaaggaataagaataggagttaagaataagagttagaagaagagataaaaagggttagaagaagaattaggaataaaaataagaataaaaag

SEQ ID NO: 17287 - DNA, 96 bp, Aspergillus novofumigatus
  misc_feature: 84
gagaaggaataagaataggagttaagaataagagttagaagaagagataaaaagggttagaagaagaattaggaataaaaataagaataaaaagtg

SEQ ID NO: 17288 - DNA, 96 bp, Aspergillus novofumigatus
  misc_feature: 84
gaaaagaattagagaaagaagagatagtaggagagggtaagggttagtaaggatagaagaagagttataagaagaggaagagggaggggaagagag

SEQ ID NO: 17289 - DNA, 96 bp, Aspergillus novofumigatus
  misc_feature: 84
agagatagaaggagagatagaaggagagttagaaggagagttagaaggagagtaagaaatagaataagagtaaggggtagtaagtgtagatagaag

SEQ ID NO: 17290 - DNA, 96 bp, Aspergillus novofumigatus
  misc_feature: 84
aagagatagaataagagtaagagtagagtaagagtaagggttagaagaagagttagaataagagttaataaaagaaggattaaggagaggtagaag

SEQ ID NO: 17291 - DNA, 96 bp, Aspergillus novofumigatus
  misc_feature: 84
agagatagaaggagagatagaaggagagatagaaggagagttagaaggagagttagaaggagagtaagaaatagaataagagtaaggggtagtaag

SEQ ID NO: 17292 - DNA, 96 bp, Aspergillus novofumigatus
  misc_feature: 84
agagaaagaagagatagtaggagagggtaagggttagtaaggatagaagaagagttataagaagaggaagagggaggggaagagagagagaaagag

SEQ ID NO: 17293 - DNA, 96 bp, Aspergillus novofumigatus
  misc_feature: 84
ctcttctctctatttctctcttaattcttactctatctcttactttacccctttctctatctctctcttctatctacacttactaccccttactct

SEQ ID NO: 17294 - DNA, 96 bp, Aspergillus novofumigatus
  misc_feature: 84
ctcttactacttaccttactattaaccttactatctactatgatatttatattactatctaccttattacctaccttactattgactacactatct

SEQ ID NO: 17295 - DNA, 96 bp, Aspergillus novofumigatus
  misc_feature: 84
atagaaggagagatagaaggagagttagaaggagagttagaaggagagtaagaaatagaataagagtaaggggtagtaagtgtagatagaagagag

SEQ ID NO: 17296 - DNA, 96 bp, Aspergillus novofumigatus
  misc_feature: 84
agaggttaggatagttagaaggagagtaagagagatttagatagaggggttaaataagagatagaaggagagatagaaggagagatagaaggagag

SEQ ID NO: 17297 - DNA, 96 bp, Aspergillus novofumigatus
  misc_feature: 84
agttagaaggagagtaagagagatttagatagaggggttaaataagagatagaaggagagatagaaggagagatagaaggagagatagaaggagag

SEQ ID NO: 17298 - DNA, 96 bp, Aspergillus novofumigatus
  misc_feature: 84
atagttagaaggagagtaagagagatttagatagaggggttaaataagagatagaaggagagatagaaggagagatagaaggagagatagaaggag

SEQ ID NO: 17299 - DNA, 96 bp, Aspergillus novofumigatus
  misc_feature: 84
atttagatagaggggttaaataagagatagaaggagagatagaaggagagatagaaggagagatagaaggagagatagaaggagagatagaaggag

SEQ ID NO: 17300 - DNA, 96 bp, Aspergillus novofumigatus
  misc_feature: 84
aggagagatagaaggagagatagaaggagagttagaaggagagttagaaggagagtaagaaatagaataagagtaaggggtagtaagtgtagatag

SEQ ID NO: 17301 - DNA, 96 bp, Aspergillus novofumigatus
  misc_feature: 84
ctagaatactagtatataagaatatagaatagctgctatatattaatatagacttattaaaatattatagctatagagctataatattctatatat

SEQ ID NO: 17302 - DNA, 96 bp, Aspergillus novofumigatus
  misc_feature: 84
ctacttattaaatcctaactttaatcctttcttcttttctctactctttcttctcttctctactctttcttctttccttttttaatcttctctctt

SEQ ID NO: 17303 - DNA, 96 bp, Aspergillus novofumigatus
  misc_feature: 84
ctaccccttattcttatcttaaacttactaacccttactctattacttatccttccttactttattctccttactacctcttaccttctatctatt

SEQ ID NO: 17304 - DNA, 96 bp, Aspergillus novofumigatus
  misc_feature: 84
agataatagatatatatatttatatttattagattaagataagaagagattaagtatatatatttaaaaaaaaaataagagaaatttagagattag

SEQ ID NO: 17305 - DNA, 96 bp, Aspergillus novofumigatus
  misc_feature: 84
ctaaaaacttttcttctaactcttattctaactctccttcttattattccttactcttcttctaatccttcttctatctctccctctatctcccct

SEQ ID NO: 17306 - DNA, 96 bp, Aspergillus novofumigatus
  misc_feature: 84
caaaagcatgaggtttaggtggactacttaaacataatccgaggataaggattttagcggcttgtagtattttagccgcttgttgcatttttgccg

SEQ ID NO: 17307 - DNA, 96 bp, Aspergillus novofumigatus
  misc_feature: 84
atagaataagagatagataagagatagaataagagtaagagtagagtaagagtaagggttagaagaagagttagaataagagttaataaaagaagg

SEQ ID NO: 17308 - DNA, 96 bp, Aspergillus novofumigatus
  misc_feature: 84
agatttagatagaggggttaaataagagatagaaggagagatagaaggagagatagaaggagagatagaaggagagatagaaggagagatagaagg

SEQ ID NO: 17309 - DNA, 96 bp, Aspergillus novofumigatus
  misc_feature: 84
cagtaagtaagatagtgagggaggcagtgagtgagatagtaagtaagatagtgagggaggtagtgagtaagacagtgagtgagatagtaagtaagg

SEQ ID NO: 17310 - DNA, 96 bp, Aspergillus novofumigatus
  misc_feature: 84
cctatcttgctgcctccctcactcactcactgcctgccttacttactatcttactcactaccttacttactgcctcactccctcactatctcactt

SEQ ID NO: 17311 - DNA, 96 bp, Aspergillus novofumigatus
  misc_feature: 84
agaaggaataagaataggagttaagaataagagttagaagaagagataaaaagggttagaagaagaattaggaataaaaataagaataaaaagtgg

SEQ ID NO: 17312 - DNA, 96 bp, Aspergillus novofumigatus
  misc_feature: 84
aagaagaaagagaagaagaaattaaaattaaggaaagataaaattaaaagaaaaggataaagttaaataataatttaatagaatgaattaggaatg

SEQ ID NO: 17313 - DNA, 96 bp, Aspergillus novofumigatus
  misc_feature: 84
attcttatcttaaacttactaacccttactctattacttatccttccttactttattctccttactacctcttaccttctatctattctccttatt

SEQ ID NO: 17314 - DNA, 96 bp, Aspergillus novofumigatus
  misc_feature: 84
agaaagagaagaagaaagagaagaagaaattaaaattaaggaaagataaaattaaaagaaaaggataaagttaaataataatttaatagaatgaat

SEQ ID NO: 17315 - DNA, 96 bp, Aspergillus novofumigatus
  misc_feature: 84
actctttcttctcttctctactctttcttctttccttttttaatcttctctcttattctattaaaaatatacccttcttctctcttatattataat

SEQ ID NO: 17316 - DNA, 96 bp, Aspergillus novofumigatus
  misc_feature: 84
atctcttctctctatttctctcttaattcttactctatctcttactttacccctttctctatctctctcttctatctacacttactaccccttact

SEQ ID NO: 17317 - DNA, 96 bp, Aspergillus novofumigatus
  misc_feature: 84
agtgagtgagatagtaagtaagatagtgagggaggtagtgagtaagacagtgagtgagatagtaagtaaggcagtgagtgagatagtgagtgagat

SEQ ID NO: 17318 - DNA, 96 bp, Aspergillus novofumigatus
  misc_feature: 84
agggtattagtaaatttaaatatctaatagatattaaattaagaaatctttattaattatagttattatatagctagagttaaagtaaattattat

SEQ ID NO: 17319 - DNA, 96 bp, Aspergillus novofumigatus
  misc_feature: 84
aggagatcaggttgatcagcattaatatattaataaatgaatatatatatttcaggataccataatgcgcagagatatatattatacatttagttt

SEQ ID NO: 17320 - DNA, 96 bp, Aspergillus novofumigatus
  misc_feature: 84
agagaaggaataagaataggagttaagaataagagttagaagaagagataaaaagggttagaagaagaattaggaataaaaataagaataaaaagt

SEQ ID NO: 17321 - DNA, 96 bp, Aspergillus novofumigatus
  misc_feature: 83
aattaaaaatagaagaagaaagggaagaggaaagggaagaggaaaggaaagaggaaagggaagaggaaagggaatagaaaagaaaagaaaataaaa

SEQ ID NO: 17322 - DNA, 96 bp, Aspergillus novofumigatus
  misc_feature: 83
tcctaactttaatcctttcttcttttctctactctttcttctcttctctactctttcttctttccttttttaatcttctctcttattctattaaaa

SEQ ID NO: 17323 - DNA, 96 bp, Aspergillus novofumigatus
  misc_feature: 83
tttgctaataccctctatctcttttactaactctccttcttcttctaactcttatctctaactctttctctctctcttcccctccctcttcctctt

SEQ ID NO: 17324 - DNA, 96 bp, Aspergillus novofumigatus
  misc_feature: 83
tttattcctaacccttattctctctcttattattaccttttattttcttttcttttctattccctttcctcttccctttcctctttcctttcctct

SEQ ID NO: 17325 - DNA, 96 bp, Aspergillus novofumigatus
  misc_feature: 83
cttaaacttactaacccttactctattacttatccttccttactttattctccttactacctcttaccttctatctattctccttattttactaaa

SEQ ID NO: 17326 - DNA, 96 bp, Aspergillus novofumigatus
  misc_feature: 83
tttactaactctccttcttcttctaactcttatctctaactctttctctctctcttcccctccctcttcctcttcttataactcttcttctatcct

SEQ ID NO: 17327 - DNA, 96 bp, Aspergillus novofumigatus
  misc_feature: 83
aggagttaagaataagagttagaagaagagataaaaagggttagaagaagaattaggaataaaaataagaataaaaagtggaagaatagttagcaa

SEQ ID NO: 17328 - DNA, 96 bp, Aspergillus novofumigatus
  misc_feature: 83
gagaagaagggtatatttttaatagaataagagagaagattaaaaaaggaaagaagaaagagtagagaagagaagaaagagtagagaaaagaagaa

SEQ ID NO: 17329 - DNA, 96 bp, Aspergillus novofumigatus
  misc_feature: 83
gagagatagaaggggagatagagggagagatagaagaaggattagaagaagagtaaggaataataagaaggagagttagaataagagttagaagaa

SEQ ID NO: 17330 - DNA, 96 bp, Aspergillus novofumigatus
  misc_feature: 83
ttctcttattttttttttaaatatatatacttaatctcttcttatcttaatctaataaatataaatatatatatctattatctagactaaatcttt

SEQ ID NO: 17331 - DNA, 96 bp, Aspergillus novofumigatus
  misc_feature: 83
ttctctctcttattattaccttttattttcttttcttttctattccctttcctcttccctttcctctttcctttcctcttccctttcctcttccct

SEQ ID NO: 17332 - DNA, 96 bp, Aspergillus novofumigatus
  misc_feature: 83
aattagagaaagaagagatagtaggagagggtaagggttagtaaggatagaagaagagttataagaagaggaagagggaggggaagagagagagaa

SEQ ID NO: 17333 - DNA, 96 bp, Aspergillus novofumigatus
  misc_feature: 83
ttctctctatttctctcttaattcttactctatctcttactttacccctttctctatctctctcttctatctacacttactaccccttactcttat

SEQ ID NO: 17334 - DNA, 96 bp, Aspergillus novofumigatus
  misc_feature: 83
ttcctaacccttattctctctcttattattaccttttattttcttttcttttctattccctttcctcttccctttcctctttcctttcctcttccc

SEQ ID NO: 17335 - DNA, 96 bp, Aspergillus novofumigatus
  misc_feature: 83
ttattctctctcttattattaccttttattttcttttcttttctattccctttcctcttccctttcctctttcctttcctcttccctttcctcttc

SEQ ID NO: 17336 - DNA, 96 bp, Aspergillus novofumigatus
  misc_feature: 83
ttattcctaacccttattctctctcttattattaccttttattttcttttcttttctattccctttcctcttccctttcctctttcctttcctctt

SEQ ID NO: 17337 - DNA, 96 bp, Aspergillus novofumigatus
  misc_feature: 83
ggtattagtaaatttaaatatctaatagatattaaattaagaaatctttattaattatagttattatatagctagagttaaagtaaattattataa

SEQ ID NO: 17338 - DNA, 96 bp, Aspergillus novofumigatus
  misc_feature: 83
ttaggtaagggttcacataagggttagtaagtttagagaagggaaaaggtagagatagtaagaaaaagaagatagtaagagattaagtaagggatc

SEQ ID NO: 17339 - DNA, 96 bp, Aspergillus novofumigatus
  misc_feature: 83
ttaggaagagagaaggatttagaataaagatagaaagaagagaggagaagagaaggaaataagttataggatattaatttagagagatttaagtag

SEQ ID NO: 17340 - DNA, 96 bp, Aspergillus novofumigatus
  misc_feature: 83
ttactctccttctaactatcctaacctctcctaatctcttcttctatctcttcttctaactctccttctacctctccttaatccttcttttattaa

SEQ ID NO: 17341 - DNA, 96 bp, Aspergillus novofumigatus
  misc_feature: 83
gggagtgagtaaggcagtgcatgagatagtgagggagatagtaagataggtagtaagataataagtaaatagataagtagggtagtaagatagtaa

SEQ ID NO: 17342 - DNA, 96 bp, Aspergillus novofumigatus
  misc_feature: 83
aaagagaagaagaaattaaaattaaggaaagataaaattaaaagaaaaggataaagttaaataataatttaatagaatgaattaggaatgtagtaa

SEQ ID NO: 17343 - DNA, 96 bp, Aspergillus novofumigatus
  misc_feature: 83
ttactaactctccttcttcttctaactcttatctctaactctttctctctctcttcccctccctcttcctcttcttataactcttcttctatcctt

SEQ ID NO: 17344 - DNA, 96 bp, Aspergillus novofumigatus
  misc_feature: 83
agaagaaattaaaattaaggaaagataaaattaaaagaaaaggataaagttaaataataatttaatagaatgaattaggaatgtagtaaggattaa

SEQ ID NO: 17345 - DNA, 96 bp, Aspergillus novofumigatus
  misc_feature: 83
ttaatcagtagtaatatataaatgaatatatacattttaggataccataatacgcagagatatatattatacagttagtttatagagtatgttagc

SEQ ID NO: 17346 - DNA, 96 bp, Aspergillus novofumigatus
  misc_feature: 83
aataaggatttagaaggatttaggaagagagaaggatttagaataaagatagaaagaagagaggagaagagaaggaaataagttataggatattaa

SEQ ID NO: 17347 - DNA, 96 bp, Aspergillus novofumigatus
  misc_feature: 83
tgtatgagatagtaagggagatagtaagataggtagtaagataataagtaaatagataagtagggtagtaagatagtaatgcaggtaaaaggcccc

SEQ ID NO: 17348 - DNA, 96 bp, Aspergillus novofumigatus
  misc_feature: 83
ctacctctcttactacttaccttactattaaccttactatctactatgatatttatattactatctaccttattacctaccttactattgactaca

SEQ ID NO: 17349 - DNA, 96 bp, Aspergillus novofumigatus
  misc_feature: 83
tgctaataccctctatctcttttactaactctccttcttcttctaactcttatctctaactctttctctctctcttcccctccctcttcctcttct

SEQ ID NO: 17350 - DNA, 96 bp, Aspergillus novofumigatus
  misc_feature: 83
ctacctatcttgctgcctccctcactcactcactgcctgccttacttactatcttactcactaccttacttactgcctcactccctcactatctca

SEQ ID NO: 17351 - DNA, 96 bp, Aspergillus novofumigatus
  misc_feature: 83
tagtgaggggggcagtgagcgagatagtgagggaggcagtgagtgagatagtgagggaggcagtgagtgagatagtgagggaggcagtgagcaaga

SEQ ID NO: 17352 - DNA, 96 bp, Aspergillus novofumigatus
  misc_feature: 83
tcttcttttctctactctttcttctcttctctactctttcttctttccttttttaatcttctctcttattctattaaaaatatacccttcttctct

SEQ ID NO: 17353 - DNA, 96 bp, Aspergillus novofumigatus
  misc_feature: 83
tcttcttatcttaatctaataaatataaatatatatatctattatctagactaaatcttttctagtaactaaatctaattattatctagcttacta

SEQ ID NO: 17354 - DNA, 96 bp, Aspergillus novofumigatus
  misc_feature: 83
tcttattttttttttaaatatatatacttaatctcttcttatcttaatctaataaatataaatatatatatctattatctagactaaatcttttct

SEQ ID NO: 17355 - DNA, 96 bp, Aspergillus novofumigatus
  misc_feature: 83
gagagttagggagagatagaaggggagatagagggagagatagaagaaggattagaagaagagtaaggaataataagaaggagagttagaataaga

SEQ ID NO: 17356 - DNA, 96 bp, Aspergillus novofumigatus
  misc_feature: 83
tcttactacttaccttactattaaccttactatctactatgatatttatattactatctaccttattacctaccttactattgactacactatcta

SEQ ID NO: 17357 - DNA, 96 bp, Aspergillus novofumigatus
  misc_feature: 83
tctcttctcctctcttctttctatctttattctaaatccttctctcttcctaaatccttctaaatccttattttcctatatctatctatccctact

SEQ ID NO: 17358 - DNA, 96 bp, Aspergillus novofumigatus
  misc_feature: 83
gaaggagagatagaaggagagttagaaggagagttagaaggagagtaagaaatagaataagagtaaggggtagtaagtgtagatagaagagagaga

SEQ ID NO: 17359 - DNA, 96 bp, Aspergillus novofumigatus
  misc_feature: 83
gaattagagaaagaagagatagtaggagagggtaagggttagtaaggatagaagaagagttataagaagaggaagagggaggggaagagagagaga

SEQ ID NO: 17360 - DNA, 96 bp, Aspergillus novofumigatus
  misc_feature: 83
gtaagagagatttagatagaggggttaaataagagatagaaggagagatagaaggagagatagaaggagagatagaaggagagatagaaggagaga

SEQ ID NO: 17361 - DNA, 96 bp, Aspergillus novofumigatus
  misc_feature: 83
tctctatttctctcttaattcttactctatctcttactttacccctttctctatctctctcttctatctacacttactaccccttactcttattct

SEQ ID NO: 17362 - DNA, 96 bp, Aspergillus novofumigatus
  misc_feature: 83
tagttagaaggagagtaagagagatttagatagaggggttaaataagagatagaaggagagatagaaggagagatagaaggagagatagaaggaga

SEQ ID NO: 17363 - DNA, 96 bp, Aspergillus novofumigatus
  misc_feature: 83
tctccctttttatctcttctctctatttctctcttaattcttactctatctcttactttacccctttctctatctctctcttctatctacacttac

SEQ ID NO: 17364 - DNA, 96 bp, Aspergillus novofumigatus
  misc_feature: 83
gagtaagggttagaagaagagttagaataagagttaaggaaagagataaaagaaggattaagaagaggtagaagaagagttagaagaagagataga

SEQ ID NO: 17365 - DNA, 96 bp, Aspergillus novofumigatus
  misc_feature: 83
gaaggagagtaagagagatttagatagaggggttaaataagagatagaaggagagatagaaggagagatagaaggagagatagaaggagagataga

SEQ ID NO: 17366 - DNA, 96 bp, Aspergillus novofumigatus
  misc_feature: 83
acatactctacaaactaactgtataatatatatctctgcgcattatggtatcctaaaatatatatattcattcattaatatatcaatgctgatcga

SEQ ID NO: 17367 - DNA, 96 bp, Aspergillus novofumigatus
  misc_feature: 83
gagagtaagagagatttagatagaggggttaaataagagatagaaggagagatagaaggagagatagaaggagagatagaaggagagatagaagga

SEQ ID NO: 17368 - DNA, 96 bp, Aspergillus novofumigatus
  misc_feature: 83
tcctaaaaacttttcttctaactcttattctaactctccttcttattattccttactcttcttctaatccttcttctatctctccctctatctccc

SEQ ID NO: 17369 - DNA, 96 bp, Aspergillus novofumigatus
  misc_feature: 83
tccctatatccttattccaccctgacctttcttcttcttcttttttctattttttttacttatttacctcttttttcttctccctttttatctctt

SEQ ID NO: 17370 - DNA, 96 bp, Aspergillus novofumigatus
  misc_feature: 83
agagtatataagttaatttagaaagaaaagaatagaaggtaaagatagataagatagaaagagtttaagtaaagggtaagaaagagaggaagaata

SEQ ID NO: 17371 - DNA, 96 bp, Aspergillus novofumigatus
  misc_feature: 83
tattctctctcttattattaccttttattttcttttcttttctattccctttcctcttccctttcctctttcctttcctcttccctttcctcttcc

SEQ ID NO: 17372 - DNA, 96 bp, Aspergillus novofumigatus
  misc_feature: 83
gtgagtgagatagtaagtaagatagtgagggaggtagtgagtaagacagtgagtgagatagtaagtaaggcagtgagtgagatagtgagtgagata

SEQ ID NO: 17373 - DNA, 96 bp, Aspergillus novofumigatus
  misc_feature: 83
agagagaagagataaaaagggagaagaaaaaagaggtaaataagtaaaaaaaatagaaaaaagaagaagaagaaaggtcagggtggaataaggata

SEQ ID NO: 17374 - DNA, 96 bp, Aspergillus novofumigatus
  misc_feature: 83
tatatcttatatataggagatagtatctataaattatattattataatcctctattagctataattatttaatctaaatctttatagtagtataag

SEQ ID NO: 17375 - DNA, 96 bp, Aspergillus novofumigatus
  misc_feature: 83
accagctagttaccttatattattataaataactaggtatactatctaaatttaaaataataagtatatactatataaatatttaatatatttata

SEQ ID NO: 17376 - DNA, 96 bp, Aspergillus novofumigatus
  misc_feature: 83
tagtaggagagggtaagggttagtaaggatagaagaagagttataagaagaggaagagggaggggaagagagagagaaagagttagagataagagt

SEQ ID NO: 17377 - DNA, 96 bp, Aspergillus novofumigatus
  misc_feature: 83
tagggtttgagtaagaaagaggtaaggagagatagaataagaattagaaggaggattagaggaagagatagaagaagggttagaataagagttagg

SEQ ID NO: 17378 - DNA, 96 bp, Aspergillus novofumigatus
  misc_feature: 83
aaataaggatttagaaggatttaggaagagagaaggatttagaataaagatagaaagaagagaggagaagagaaggaaataagttataggatatta

SEQ ID NO: 17379 - DNA, 96 bp, Aspergillus novofumigatus
  misc_feature: 83
ctaactcttcttctaacccttactcttactctactcttactcttattctatctcttatctatctcttattctatctcttcttaatctcctctctta

SEQ ID NO: 17380 - DNA, 96 bp, Aspergillus novofumigatus
  misc_feature: 83
taagagagatttagatagaggggttaaataagagatagaaggagagatagaaggagagatagaaggagagatagaaggagagatagaaggagagat

SEQ ID NO: 17381 - DNA, 96 bp, Aspergillus novofumigatus
  misc_feature: 83
attaactcttattctaactcttcttctaacccttactcttactctactcttactcttattctatctcttatctatctcttattctatctcttctta

SEQ ID NO: 17382 - DNA, 96 bp, Aspergillus novofumigatus
  misc_feature: 83
taacccttattctctctcttattattaccttttattttcttttcttttctattccctttcctcttccctttcctctttcctttcctcttccctttc

SEQ ID NO: 17383 - DNA, 96 bp, Aspergillus novofumigatus
  misc_feature: 83
taaaaacttttcttctaactcttattctaactctccttcttattattccttactcttcttctaatccttcttctatctctccctctatctcccctt

SEQ ID NO: 17384 - DNA, 96 bp, Aspergillus novofumigatus
  misc_feature: 83
ataattaggtatcagggggatatcaccatagttaggagagagatagttagtaaggtagataataagattaatagtatagtagatagtgaggttaac

SEQ ID NO: 17385 - DNA, 96 bp, Aspergillus novofumigatus
  misc_feature: 83
gtgcatgagatagtgagggagatagtaagataggtagtaagataataagtaaatagataagtagggtagtaagatagtaatgcaggtaaaaggccc

SEQ ID NO: 17386 - DNA, 96 bp, Aspergillus novofumigatus
  misc_feature: 83
accggtgggccatgccgacctggatcggtgcagatgtctggggggtgcatgcatgcgagggggcgtgtgcgtgtatatatatatatatatatatac

SEQ ID NO: 17387 - DNA, 96 bp, Aspergillus novofumigatus
  misc_feature: 83
gtaaggatagaagaagagttataagaagaggaagagggaggggaagagagagagaaagagttagagataagagttagaagaagaaggagagttagt

SEQ ID NO: 17388 - DNA, 96 bp, Aspergillus novofumigatus
  misc_feature: 83
atcataaggctagtataagttaaatatatttatttcactttaatatacatatttttatatatatatatattaaaatctgcctagatctagatgacc

SEQ ID NO: 17389 - DNA, 96 bp, Aspergillus novofumigatus
  misc_feature: 83
ggtatcagggggatatcaccatagttaggagagagatagttagtaaggtagataataagattaatagtatagtagatagtgaggttaacagtaagg

SEQ ID NO: 17390 - DNA, 96 bp, Aspergillus novofumigatus
  misc_feature: 83
ggggcagaccggcaggcaggggcgcgcgccatagacagacacttgtagagacacacagacaccggggtcggtataggccgggcgcgcgcgcccccg

SEQ ID NO: 17391 - DNA, 96 bp, Aspergillus novofumigatus
  misc_feature: 83
cctaaaaacttttcttctaactcttattctaactctccttcttattattccttactcttcttctaatccttcttctatctctccctctatctcccc

SEQ ID NO: 17392 - DNA, 96 bp, Aspergillus novofumigatus
  misc_feature: 83
gggcagaccggcaggcaggggcgcgcgccatagacagacacttgtagagacacacagacaccggggtcggtataggccgggcgcgcgcgcccccgg

SEQ ID NO: 17393 - DNA, 96 bp, Aspergillus novofumigatus
  misc_feature: 83
agtgcatgagatagtgagggagatagtaagataggtagtaagataataagtaaatagataagtagggtagtaagatagtaatgcaggtaaaaggcc

SEQ ID NO: 17394 - DNA, 96 bp, Aspergillus novofumigatus
  misc_feature: 83
ggatagttagaaggagagtaagagagatttagatagaggggttaaataagagatagaaggagagatagaaggagagatagaaggagagatagaagg

SEQ ID NO: 17395 - DNA, 96 bp, Aspergillus novofumigatus
  misc_feature: 83
cttactgtcttgcttgctgcctccctcactatctcactcactatctcactcactgccttacttactatctcactcactgtcttactcactacctcc

SEQ ID NO: 17396 - DNA, 96 bp, Aspergillus novofumigatus
  misc_feature: 83
ggagagttagggagagatagaaggggagatagagggagagatagaagaaggattagaagaagagtaaggaataataagaaggagagttagaataag

SEQ ID NO: 17397 - DNA, 96 bp, Aspergillus novofumigatus
  misc_feature: 83
attcctaacccttattctctctcttattattaccttttattttcttttcttttctattccctttcctcttccctttcctcttccctttcctcttcc

SEQ ID NO: 17398 - DNA, 96 bp, Aspergillus novofumigatus
  misc_feature: 83
ctatcttactacctcccttactatcttacttactacctcccttactgttaaccttactatctacctcactacttatcttactacctccctcactgc

SEQ ID NO: 17399 - DNA, 96 bp, Aspergillus novofumigatus
  misc_feature: 83
cttatttccttctcttctcctctcttctttctatctttattctaaatccttctctcttcctaaatccttctaaatccttattttcctatatctatc

SEQ ID NO: 17400 - DNA, 96 bp, Aspergillus novofumigatus
  misc_feature: 83
actacctatcttgctgcctccctcactcactcactgcctgccttacttactatcttactcactaccttacttactgcctcactccctcactatctc

SEQ ID NO: 17401 - DNA, 96 bp, Aspergillus novofumigatus
  misc_feature: 83
attctaactcttcttctaacccttactcttactctactcttactcttattctatctcttatctatctcttattctatctcttcttaatctcctctc

SEQ ID NO: 17402 - DNA, 96 bp, Aspergillus novofumigatus
  misc_feature: 83
gagagaagagataaaaagggagaagaaaaaagaggtaaataagtaaaaaaaatagaaaaaagaagaagaagaaaggtcagggtggaataaggatat

SEQ ID NO: 17403 - DNA, 96 bp, Aspergillus novofumigatus
  misc_feature: 83
cttcttttctctactctttcttctcttctctactctttcttctttccttttttaatcttctctcttattctattaaaaatatacccttcttctctc

SEQ ID NO: 17404 - DNA, 96 bp, Aspergillus novofumigatus
  misc_feature: 83
aaaaacttttcttctaactcttattctaactctccttcttattattccttactcttcttctaatccttcttctatctctccctctatctccccttc

SEQ ID NO: 17405 - DNA, 96 bp, Aspergillus novofumigatus
  misc_feature: 83
gaagaagaaattaaaattaaggaaagataaaattaaaagaaaaggataaagttaaataataatttaatagaatgaattaggaatgtagtaaggatt

SEQ ID NO: 17406 - DNA, 96 bp, Aspergillus novofumigatus
  misc_feature: 83
gaagaaattaaaattaaggaaagataaaattaaaagaaaaggataaagttaaataataatttaatagaatgaattaggaatgtagtaaggattaat

SEQ ID NO: 17407 - DNA, 96 bp, Aspergillus novofumigatus
  misc_feature: 83
gaaagaggaaagggaagaggaaagggaatagaaaagaaaagaaaataaaaggtaataataagagagagaataagggttaggaataaaatagaaatt

SEQ ID NO: 17408 - DNA, 96 bp, Aspergillus novofumigatus
  misc_feature: 83
aggatagttagaaggagagtaagagagatttagatagaggggttaaataagagatagaaggagagatagaaggagagatagaaggagagatagaag

SEQ ID NO: 17409 - DNA, 96 bp, Aspergillus novofumigatus
  misc_feature: 83
cttacttttattctatctctaactctttccttcttcccttctattcttaactctctctttctctttcttctcctttctatccctaactcttattct

SEQ ID NO: 17410 - DNA, 96 bp, Aspergillus novofumigatus
  misc_feature: 83
aagagaagaagaaattaaaattaaggaaagataaaattaaaagaaaaggataaagttaaataataatttaatagaatgaattaggaatgtagtaag

SEQ ID NO: 17411 - DNA, 96 bp, Aspergillus novofumigatus
  misc_feature: 83
ctcttcttatcttaatctaataaatataaatatatatatctattatctagactaaatcttttctagtaactaaatctaattattatctagcttact

SEQ ID NO: 17412 - DNA, 96 bp, Aspergillus novofumigatus
  misc_feature: 83
agagttagggagagatagaaggggagatagagggagagatagaagaaggattagaagaagagtaaggaataataagaaggagagttagaataagag

SEQ ID NO: 17413 - DNA, 96 bp, Aspergillus novofumigatus
  misc_feature: 83
agagttagggtttgagtaagaaagaggtaaggagagatagaataagaattagaaggaggattagaggaagagatagaagaagggttagaataagag

SEQ ID NO: 17414 - DNA, 96 bp, Aspergillus novofumigatus
  misc_feature: 83
aagggaaaagagtatataagttaatttagaaagaaaagaatagaaggtaaagatagataagatagaaagagtttaagtaaagggtaagaaagagag

SEQ ID NO: 17415 - DNA, 96 bp, Aspergillus novofumigatus
  misc_feature: 83
aaagaattagagaaagaagagatagtaggagagggtaagggttagtaaggatagaagaagagttataagaagaggaagagggaggggaagagagag

SEQ ID NO: 17416 - DNA, 96 bp, Aspergillus novofumigatus
  misc_feature: 83
ctctctcttattattaccttttattttcttttcttttctattccctttcctcttccctttcctctttcctttcctcttccctttcctcttcccttt

SEQ ID NO: 17417 - DNA, 96 bp, Aspergillus novofumigatus
  misc_feature: 83
ctccttctaactatcctaacctctcctaatctcttcttctatctcttcttctaactctccttctacctctccttaatccttcttttattaactctt

SEQ ID NO: 17418 - DNA, 96 bp, Aspergillus novofumigatus
  misc_feature: 83
atttttaatagaataagagagaagattaaaaaaggaaagaagaaagagtagagaagagaagaaagagtagagaaaagaagaaaggattaaagttag

SEQ ID NO: 17419 - DNA, 96 bp, Aspergillus novofumigatus
  misc_feature: 83
ctaacccttattctctctcttattattaccttttattttcttttcttttctattccctttcctcttccctttcctctttcctttcctcttcccttt

SEQ ID NO: 17420 - DNA, 96 bp, Aspergillus novofumigatus
  misc_feature: 83
cctccctcactcactcactgcctgccttacttactatcttactcactaccttacttactgcctcactccctcactatctcacttactacctccctt

SEQ ID NO: 17421 - DNA, 96 bp, Aspergillus novofumigatus
  misc_feature: 83
cctaacccttattctctctcttattattaccttttattttcttttcttttctattccctttcctcttccctttcctctttcctttcctcttccctt

SEQ ID NO: 17422 - DNA, 96 bp, Aspergillus novofumigatus
  misc_feature: 83
actctacaaactaactgtataatatatatctctgcgcattatggtatcctaaaatatatatattcattcattaatatatcaatgctgatcgacctg

SEQ ID NO: 17423 - DNA, 96 bp, Aspergillus novofumigatus
  misc_feature: 83
agaataagagttagaagaagagataaaaagggttagaagaagaattaggaataaaaataagaataaaaagtggaagaatagttagcaagagtattg

SEQ ID NO: 17424 - DNA, 96 bp, Aspergillus novofumigatus
  misc_feature: 83
aatagaagtaaaaaaagaggttttaagagattagatagagaagaagaggtaaaagagaatttagggatagattaagaggagagaagaaggagtaat

SEQ ID NO: 17425 - DNA, 96 bp, Aspergillus novofumigatus
  misc_feature: 83
attaccttgctcactgcctatcttactacctcccttactatcttacttactacctcccttactgttaaccttactatctacctcactacttatctt

SEQ ID NO: 17426 - DNA, 96 bp, Aspergillus novofumigatus
  misc_feature: 83
aaaagaaagagaaaagaagaaagaaaagaaaagaaagaagagttagatatagaaaaaagaataattagaattttagtaagagattatataagggat

SEQ ID NO: 17427 - DNA, 96 bp, Aspergillus novofumigatus
  misc_feature: 83
aaataactaggtatactatctaaatttaaaataataagtatatactatataaatatttaatatatttataacttagctattatactacctagggat

SEQ ID NO: 17428 - DNA, 96 bp, Aspergillus novofumigatus
  misc_feature: 83
agttagggtttgagtaagaaagaggtaaggagagatagaataagaattagaaggaggattagaggaagagatagaagaagggttagaataagagtt

SEQ ID NO: 17429 - DNA, 96 bp, Aspergillus novofumigatus
  misc_feature: 83
acttatttacctcttttttcttctccctttttatctcttctctctatttctctcttaattcttactctatctcttactttacctctttctctatct

SEQ ID NO: 17430 - DNA, 96 bp, Aspergillus novofumigatus
  misc_feature: 83
aagatagtgagggaggcagtgagtgagatagtaagtaagatagtgagggaggtagtgagtaagacagtgagtgagatagtaagtaaggcagtgagt

SEQ ID NO: 17431 - DNA, 96 bp, Aspergillus novofumigatus
  misc_feature: 83
aaaataaggatttagaaggatttaggaagagagaaggatttagaataaagatagaaagaagagaggagaagagaaggaaataagttataggatatt

SEQ ID NO: 17432 - DNA, 96 bp, Aspergillus novofumigatus
  misc_feature: 82
tttttacttatttacctcttttttcttctccctttttatctcttctctctatttctctcttaattcttactctatctcttactttacctctttctc

SEQ ID NO: 17433 - DNA, 96 bp, Aspergillus novofumigatus
  misc_feature: 82
cctaactttaatcctttcttcttttctctactctttcttctcttctctactctttcttctttccttttttaatcttctctcttattctattaaaaa

SEQ ID NO: 17434 - DNA, 96 bp, Aspergillus novofumigatus
  misc_feature: 82
ttttcttctccctttttatctcttctctctatttctctcttaattcttactctatctcttactttacccctttctctatctctctcttctatctac

SEQ ID NO: 17435 - DNA, 96 bp, Aspergillus novofumigatus
  misc_feature: 82
caagttaatttagaaagaaaagaatagaaggtaaagatagataagatagaaagagtttaagtaaagggtaagaaagagaagaagaataagaagaaa

SEQ ID NO: 17436 - DNA, 96 bp, Aspergillus novofumigatus
  misc_feature: 82
taattaaaaatagaagaagaaagggaagaggaaagggaagaggaaaggaaagaggaaagggaagaggaaagggaatagaaaagaaaagaaaataaa

SEQ ID NO: 17437 - DNA, 96 bp, Aspergillus novofumigatus
  misc_feature: 82
catgagatagtgagggagatagtaagataggtagtaagataataagtaaatagataagtagggtagtaagatagtaatgcaggtaaaaggccccaa

SEQ ID NO: 17438 - DNA, 96 bp, Aspergillus novofumigatus
  misc_feature: 82
ttcttttctctactctttcttctcttctctactctttcttctttccttttttaatcttctctcttattctattaaaaatatacccttcttctctct

SEQ ID NO: 17439 - DNA, 96 bp, Aspergillus novofumigatus
  misc_feature: 82
ggaaaagagtatataagttaatttagaaagaaaagaatagaaggtaaagatagataagatagaaagagtttaagtaaagggtaagaaagagaggaa

SEQ ID NO: 17440 - DNA, 96 bp, Aspergillus novofumigatus
  misc_feature: 82
aataagagttagaagaagagataaaaagggttagaagaagaattaggaataaaaataagaataaaaagtggaagaatagttagcaagagtattgaa

SEQ ID NO: 17441 - DNA, 96 bp, Aspergillus novofumigatus
  misc_feature: 82
gagtatataagttaatttagaaagaaaagaatagaaggtaaagatagataagatagaaagagtttaagtaaagggtaagaaagagaggaagaataa

SEQ ID NO: 17442 - DNA, 96 bp, Aspergillus novofumigatus
  misc_feature: 82
ttattataaataactaggtatactatctaaatttaaaataataagtatatactatataaatatttaatatatttataacttagctattatactacc

SEQ ID NO: 17443 - DNA, 96 bp, Aspergillus novofumigatus
  misc_feature: 82
ttattaaatcctaactttaatcctttcttcttttctctactctttcttctcttctctactctttcttctttccttttttaatcttctctcttattc

SEQ ID NO: 17444 - DNA, 96 bp, Aspergillus novofumigatus
  misc_feature: 82
ggaggtatttagtaaaataaggagaatagatagaaggtaagaggtagtaaggagaataaagtaaggaaggataagtaatagagtaagggttagtaa

SEQ ID NO: 17445 - DNA, 96 bp, Aspergillus novofumigatus
  misc_feature: 82
tgagtgagatagtaagtaagatagtgagggaggtagtgagtaagacagtgagtgagatagtaagtaaggcagtgagtgagatagtgagtgagatag

SEQ ID NO: 17446 - DNA, 96 bp, Aspergillus novofumigatus
  misc_feature: 82
tgagggagatagtaagataggtagtaagataataagtaaatagataagtagggtagtaagatagtaatgcaggtaaaaggccccaaggagattata

SEQ ID NO: 17447 - DNA, 96 bp, Aspergillus novofumigatus
  misc_feature: 82
tcttttactaactctccttcttcttctaactcttatctctaactctttctctctctcttcccctccctcttcctcttcttataactcttcttctat

SEQ ID NO: 17448 - DNA, 96 bp, Aspergillus novofumigatus
  misc_feature: 82
tagagaaagaagagatagtaggagagggtaagggttagtaaggatagaagaagagttataagaagaggaagagggaggggaagagagagagaaaga

SEQ ID NO: 17449 - DNA, 96 bp, Aspergillus novofumigatus
  misc_feature: 82
gagagttagggtttgagtaagaaagaggtaaggagagatagaataagaattagaaggaggattagaggaagagatagaagaagggttagaataaga

SEQ ID NO: 17450 - DNA, 96 bp, Aspergillus novofumigatus
  misc_feature: 82
tcttattattaccttttattttcttttcttttctattccctttcctcttccctttcctctttcctttcctcttccctttcctcttccctttcttct

SEQ ID NO: 17451 - DNA, 96 bp, Aspergillus novofumigatus
  misc_feature: 82
aagagtagagtaagagtaagggttagaagaagagttagaataagagttaataaaagaaggattaaggagaggtagaaggagagttagaagaagaga

SEQ ID NO: 17452 - DNA, 96 bp, Aspergillus novofumigatus
  misc_feature: 82
tctcttcttatcttaatctaataaatataaatatatatatctattatctagactaaatcttttctagtaactaaatctaattattatctagcttac

SEQ ID NO: 17453 - DNA, 96 bp, Aspergillus novofumigatus
  misc_feature: 82
tctcttattattaccttttattttcttttcttttctattccctttcctcttccctttcctctttcctttcctcttccctttcctcttccctttctt

SEQ ID NO: 17454 - DNA, 96 bp, Aspergillus novofumigatus
  misc_feature: 82
tctctctatttctctcttaattcttactctatctcttactttacccctttctctatctctctcttctatctacacttactaccccttactcttatt

SEQ ID NO: 17455 - DNA, 96 bp, Aspergillus novofumigatus
  misc_feature: 82
gttagaaggagagtaagagagatttagatagaggggttaaataagagatagaaggagagatagaaggagagatagaaggagagatagaaggagaga

SEQ ID NO: 17456 - DNA, 96 bp, Aspergillus novofumigatus
  misc_feature: 82
gatttagaataaagatagaaagaagagaggagaagagaaggaaataagttataggatattaatttagagagatttaagtaggtataaggttataga

SEQ ID NO: 17457 - DNA, 96 bp, Aspergillus novofumigatus
  misc_feature: 82
aggagagggtaagggttagtaaggatagaagaagagttataagaagaggaagagggaggggaagagagagagaaagagttagagataagagttaga

SEQ ID NO: 17458 - DNA, 96 bp, Aspergillus novofumigatus
  misc_feature: 82
tctaaatttctcttattttttttttaaatatatatacttaatctcttcttatcttaatctaataaatataaatatatatatctattatctagacta

SEQ ID NO: 17459 - DNA, 96 bp, Aspergillus novofumigatus
  misc_feature: 82
gagaagaagaaattaaaattaaggaaagataaaattaaaagaaaaggataaagttaaataataatttaatagaatgaattaggaatgtagtaagga

SEQ ID NO: 17460 - DNA, 96 bp, Aspergillus novofumigatus
  misc_feature: 82
gggaaaagagtatataagttaatttagaaagaaaagaatagaaggtaaagatagataagatagaaagagtttaagtaaagggtaagaaagagagga

SEQ ID NO: 17461 - DNA, 96 bp, Aspergillus novofumigatus
  misc_feature: 82
tcctagaatactagtatataagaatatagaatagctgctatatattaatatagacttattaaaatattatagctatagagctataatattctatat

SEQ ID NO: 17462 - DNA, 96 bp, Aspergillus novofumigatus
  misc_feature: 82
tcctaacccttattctctctcttattattaccttttattttcttttcttttctattccctttcctcttccctttcctctttcctttcctcttccct

SEQ ID NO: 17463 - DNA, 96 bp, Aspergillus novofumigatus
  misc_feature: 82
taaataactaggtatactatctaaatttaaaataataagtatatactatataaatatttaatatatttataacttagctattatactacctaggga

SEQ ID NO: 17464 - DNA, 96 bp, Aspergillus novofumigatus
  misc_feature: 82
tccaccctccatgggaccacgccagttggcggtccgagatggccgggcgcgcgccctgaccggcagcaggggcccgcgcgcgccgccgcctgggga

SEQ ID NO: 17465 - DNA, 96 bp, Aspergillus novofumigatus
  misc_feature: 82
tcataaggctagtataagttaaatatatttatttcactttaatatacatatttttatatatatatatattaaaatctgcctagatctagatgaccc

SEQ ID NO: 17466 - DNA, 96 bp, Aspergillus novofumigatus
  misc_feature: 82
tcactatctcactcactatctcactcactgccttacttactatctcactcactgtcttactcactacctccctcactatcttacttactatctcac

SEQ ID NO: 17467 - DNA, 96 bp, Aspergillus novofumigatus
  misc_feature: 82
gaataagagttagaagaagagataaaaagggttagaagaagaattaggaataaaaataagaataaaaagtggaagaatagttagcaagagtattga

SEQ ID NO: 17468 - DNA, 96 bp, Aspergillus novofumigatus
  misc_feature: 82
tatttataattactatctaccttattacctaccttactattgactacactatctatcttactgtctaccttactatctatcttactatctacctta

SEQ ID NO: 17469 - DNA, 96 bp, Aspergillus novofumigatus
  misc_feature: 82
tattctaactcttcttctaacccttactcttactctactcttactcttattctatctcttatctatctcttattctatctcttcttaatctcctct

SEQ ID NO: 17470 - DNA, 96 bp, Aspergillus novofumigatus
  misc_feature: 82
tattattataaataactaggtatactatctaaatttaaaataataagtatatactatataaatatttaatatatttataacttagctattatacta

SEQ ID NO: 17471 - DNA, 96 bp, Aspergillus novofumigatus
  misc_feature: 82
tattaactcttattctaactcttcttctaacccttactcttactctactcttactcttattctatctcttatctatctcttattctatctcttctt

SEQ ID NO: 17472 - DNA, 96 bp, Aspergillus novofumigatus
  misc_feature: 82
tagaaggagagtaagagagatttagatagaggggttaaataagagatagaaggagagatagaaggagagatagaaggagagatagaaggagagata

SEQ ID NO: 17473 - DNA, 96 bp, Aspergillus novofumigatus
  misc_feature: 82
aaataaaccagctagttaccttatattattataaataactaggtatactatctaaatttaaaataataagtatatactatataaatatttaatata

SEQ ID NO: 17474 - DNA, 96 bp, Aspergillus novofumigatus
  misc_feature: 82
agagaagagataaaaagggagaagaaaaaagaggtaaataagtaaaaaaaatagaaaaaagaagaagaagaaaggtcagggtggaataaggatata

SEQ ID NO: 17475 - DNA, 96 bp, Aspergillus novofumigatus
  misc_feature: 82
cctagaatactagtatataagaatatagaatagctgctatatattaatatagacttattaaaatattatagctatagagctataatattctatata

SEQ ID NO: 17476 - DNA, 96 bp, Aspergillus novofumigatus
  misc_feature: 82
taagggagatagtaagataggtagtaagataataagtaaatagataagtagggtagtaagatagtaatgcaggtaaaaggccccagggagattata

SEQ ID NO: 17477 - DNA, 96 bp, Aspergillus novofumigatus
  misc_feature: 82
gggtattagtaaatttaaatatctaatagatattaaattaagaaatctttattaattatagttattatatagctagagttaaagtaaattattata

SEQ ID NO: 17478 - DNA, 96 bp, Aspergillus novofumigatus
  misc_feature: 82
taaaaagtagcatagaaatactatatatcctaatcatatacctatataaagtgctataagctatatataactatataggttaccctagctttacta

SEQ ID NO: 17479 - DNA, 96 bp, Aspergillus novofumigatus
  misc_feature: 82
tactctcatcctaaccctcccccttattaatatccttatcctattaataattatccccttctttatcctatattactttctataaccttataccta

SEQ ID NO: 17480 - DNA, 96 bp, Aspergillus novofumigatus
  misc_feature: 82
cttctcttctcctctcttctttctatctttattctaaatccttctctcttcctaaatccttctaaatccttattttcctatatctatctatcccta

SEQ ID NO: 17481 - DNA, 96 bp, Aspergillus novofumigatus
  misc_feature: 82
taggagagggtaagggttagtaaggatagaagaagagttataagaagaggaagagggaggggaagagagagagaaagagttagagataagagttag

SEQ ID NO: 17482 - DNA, 96 bp, Aspergillus novofumigatus
  misc_feature: 82
taggaagagagaaggatttagaataaagatagaaagaagagaggagaagagaaggaaataagttataggatattaatttagagagatttaagtagg

SEQ ID NO: 17483 - DNA, 96 bp, Aspergillus novofumigatus
  misc_feature: 82
tagaagaagagataaaaagggttagaagaagaattaggaataaaaataagaataaaaagtggaagaatagttagcaagagtattgaagagagttag

SEQ ID NO: 17484 - DNA, 96 bp, Aspergillus novofumigatus
  misc_feature: 82
tacttatttacctcttttttcttctccctttttatctcttctctctatttctctcttaattcttactctatctcttactttacctctttctctatc

SEQ ID NO: 17485 - DNA, 96 bp, Aspergillus novofumigatus
  misc_feature: 82
tacttactacctatcttgctgcctccctcactcactcactgcctgccttacttactatcttactcactaccttacttactgcctcactccctcact

SEQ ID NO: 17486 - DNA, 96 bp, Aspergillus novofumigatus
  misc_feature: 82
aaaatagaagtaaaaaaagaggttttaagagattagatagagaagaagaggtaaaagagaatttagggatagattaagaggagagaagaaggagta

SEQ ID NO: 17487 - DNA, 96 bp, Aspergillus novofumigatus
  misc_feature: 82
tactataaaaagtagcatagaaatactatatatcctaatcatatacctatataaagtgctataagctatatataactatataggttaccctagctt

SEQ ID NO: 17488 - DNA, 96 bp, Aspergillus novofumigatus
  misc_feature: 82
ggagagatagaaggagagatagaaggagagatagaaggagagttagaaggagagttagaaggagagtaagaaatagaataagagtaaggggtagta

SEQ ID NO: 17489 - DNA, 96 bp, Aspergillus novofumigatus
  misc_feature: 82
gggaggtatttagtaaaataaggagaatagatagaaggtaagaggtagtaaggagaataaagtaaggaaggataagtaatagagtaagggttagta

SEQ ID NO: 17490 - DNA, 96 bp, Aspergillus novofumigatus
  misc_feature: 82
tacctatcttgctgcctccctcactcactcactgcctgccttacttactatcttactcactaccttacttactgcctcactccctcactatctcac

SEQ ID NO: 17491 - DNA, 96 bp, Aspergillus novofumigatus
  misc_feature: 82
aaagaggaaagggaagaggaaagggaatagaaaagaaaagaaaataaaaggtaataataagagagagaataagggttaggaataaaatagaaatta

SEQ ID NO: 17492 - DNA, 96 bp, Aspergillus novofumigatus
  misc_feature: 82
atctcttcttatcttaatctaataaatataaatatatatatctattatctagactaaatcttttctagtaactaaatctaattattatctagctta

SEQ ID NO: 17493 - DNA, 96 bp, Aspergillus novofumigatus
  misc_feature: 82
taagagtagagtaagagtaagggttagaagaagagttagaataagagttaataaaagaaggattaaggagaggtagaaggagagttagaagaagag

SEQ ID NO: 17494 - DNA, 96 bp, Aspergillus novofumigatus
  misc_feature: 82
agctgtataggaacagggtattagtaaatttaaatatctaatagatattaaattaagaaatctttattaattatagttattatatagctagagtta

SEQ ID NO: 17495 - DNA, 96 bp, Aspergillus novofumigatus
  misc_feature: 82
taaattatccttcttatatacttacatataaatatatatatataaagtaattcttattattatcttttaaattactatcttctctattcttattag

SEQ ID NO: 17496 - DNA, 96 bp, Aspergillus novofumigatus
  misc_feature: 82
ggagatcaggttgatcagcattaatatattaataaatgaatatatatatttcaggataccataatgcgcagagatatatattatacatttagttta

SEQ ID NO: 17497 - DNA, 96 bp, Aspergillus novofumigatus
  misc_feature: 82
taaaatagaagtaaaaaaagaggttttaagagattagatagagaagaagaggtaaaagagaatttagggatagattaagaggagagaagaaggagt

SEQ ID NO: 17498 - DNA, 96 bp, Aspergillus novofumigatus
  misc_feature: 82
gtgagggagatagtaagataggtagtaagataataagtaaatagataagtagggtagtaagatagtaatgcaggtaaaaggccccaaggagattat

SEQ ID NO: 17499 - DNA, 96 bp, Aspergillus novofumigatus
  misc_feature: 82
catactctacaaactaactgtataatatatatctctgcgcattatggtatcctaaaatatatatattcattcattaatatatcaatgctgatcgac

SEQ ID NO: 17500 - DNA, 96 bp, Aspergillus novofumigatus
  misc_feature: 82
gtatttagtaaaataaggagaatagatagaaggtaagaggtagtaaggagaataaagtaaggaaggataagtaatagagtaagggttagtaagttt

SEQ ID NO: 17501 - DNA, 96 bp, Aspergillus novofumigatus
  misc_feature: 82
gtatcagggggatatcaccatagttaggagagagatagttagtaaggtagataataagattaatagtatagtagatagtgaggttaacagtaaggt

SEQ ID NO: 17502 - DNA, 96 bp, Aspergillus novofumigatus
  misc_feature: 82
attattataaataactaggtatactatctaaatttaaaataataagtatatactatataaatatttaatatatttataacttagctattatactac

SEQ ID NO: 17503 - DNA, 96 bp, Aspergillus novofumigatus
  misc_feature: 82
cttttattctatctctaactctttccttcttcccttctattcttaactctctctttctctttcttctcctttctatccctaactcttattctaacc

SEQ ID NO: 17504 - DNA, 96 bp, Aspergillus novofumigatus
  misc_feature: 82
aagtagttataccaccttatactactataaagatttagattaaataattatagctaatagaggattataataatataatttatagatactatctcc

SEQ ID NO: 17505 - DNA, 96 bp, Aspergillus novofumigatus
  misc_feature: 82
ctatctcttactttacccctttctctatctctctcttctatctacacttactaccccttactcttattctatttcttactctccttctaactctcc

SEQ ID NO: 17506 - DNA, 96 bp, Aspergillus novofumigatus
  misc_feature: 82
ggagagtaagagagatttagatagaggggttaaataagagatagaaggagagatagaaggagagatagaaggagagatagaaggagagatagaagg

SEQ ID NO: 17507 - DNA, 96 bp, Aspergillus novofumigatus
  misc_feature: 82
gctaataccctctatctcttttactaactctccttcttcttctaactcttatctctaactctttctctctctcttcccctccctcttcctcttctt

SEQ ID NO: 17508 - DNA, 96 bp, Aspergillus novofumigatus
  misc_feature: 82
ctctccttctaactatcctaacctctcctaatctcttcttctatctcttcttctaactctccttctacctctccttaatccttcttttattaactc

SEQ ID NO: 17509 - DNA, 96 bp, Aspergillus novofumigatus
  misc_feature: 82
gagtgagatagtaagtaagatagtgagggaggtagtgagtaagacagtgagtgagatagtaagtaaggcagtgagtgagatagtgagtgagatagt

SEQ ID NO: 17510 - DNA, 96 bp, Aspergillus novofumigatus
  misc_feature: 82
ccttactgtcttgcttgctgcctccctcactatctcactcactatctcactcactgccttacttactatctcactcactgtcttactcactacctc

SEQ ID NO: 17511 - DNA, 96 bp, Aspergillus novofumigatus
  misc_feature: 82
aaagtagttataccaccttatactactataaagatttagattaaataattatagctaatagaggattataataatataatttatagatactatctc

SEQ ID NO: 17512 - DNA, 96 bp, Aspergillus novofumigatus
  misc_feature: 82
gaaggagagatagaaggagagatagaaggagagttagaaggagagttagaaggagagtaagaaatagaataagagtaaggggtagtaagtgtagat

SEQ ID NO: 17513 - DNA, 96 bp, Aspergillus novofumigatus
  misc_feature: 82
gaaagtagttataccaccttatactactataaagatttagattaaataattatagctaatagaggattataataatataatttatagatactatct

SEQ ID NO: 17514 - DNA, 96 bp, Aspergillus novofumigatus
  misc_feature: 82
ctcttattttttttttaaatatatatacttaatctcttcttatcttaatctaataaatataaatatatatatctattatctagactaaatcttttc

SEQ ID NO: 17515 - DNA, 96 bp, Aspergillus novofumigatus
  misc_feature: 82
attaaaaatagaagaagaaagggaagaggaaagggaagaggaaaggaaagaggaaagggaagaggaaagggaatagaaaagaaaagaaaataaaag

SEQ ID NO: 17516 - DNA, 96 bp, Aspergillus novofumigatus
  misc_feature: 82
agttaagaataagagttagaagaagagataaaaagggttagaagaagaattaggaataaaaataagaataaaaagtggaagaatagttagcaagag

SEQ ID NO: 17517 - DNA, 96 bp, Aspergillus novofumigatus
  misc_feature: 82
ctctcttattattaccttttattttcttttcttttctattccctttcctcttccctttcctctttcctttcctcttccctttcctcttccctttct

SEQ ID NO: 17518 - DNA, 96 bp, Aspergillus novofumigatus
  misc_feature: 82
agtaagagagatttagatagaggggttaaataagagatagaaggagagatagaaggagagatagaaggagagatagaaggagagatagaaggagag

SEQ ID NO: 17519 - DNA, 96 bp, Aspergillus novofumigatus
  misc_feature: 82
agatagtgagggagatagtaagataggtagtaagataataagtaaatagataagtagggtagtaagatagtaatgcaggtaaaaggccccaaggag

SEQ ID NO: 17520 - DNA, 96 bp, Aspergillus novofumigatus
  misc_feature: 82
agagtaagagagatttagatagaggggttaaataagagatagaaggagagatagaaggagagatagaaggagagatagaaggagagatagaaggag

SEQ ID NO: 17521 - DNA, 96 bp, Aspergillus novofumigatus
  misc_feature: 82
agaaggagagtaagagagatttagatagaggggttaaataagagatagaaggagagatagaaggagagatagaaggagagatagaaggagagatag

SEQ ID NO: 17522 - DNA, 96 bp, Aspergillus novofumigatus
  misc_feature: 82
ctactctcatcctaaccctcccccttattaatatccttatcctattaataattatccccttctttatcctatattactttctataaccttatacct

SEQ ID NO: 17523 - DNA, 96 bp, Aspergillus novofumigatus
  misc_feature: 82
ccttactctattacttatccttccttactttattctccttactacctcttaccttctatctattctccttattttactaaatacctccctctctat

SEQ ID NO: 17524 - DNA, 96 bp, Aspergillus novofumigatus
  misc_feature: 82
agagaagaagaaattaaaattaaggaaagataaaattaaaagaaaaggataaagttaaataataatttaatagaatgaattaggaatgtagtaagg

SEQ ID NO: 17525 - DNA, 96 bp, Aspergillus novofumigatus
  misc_feature: 82
agggaaaagagtatataagttaatttagaaagaaaagaatagaaggtaaagatagataagatagaaagagtttaagtaaagggtaagaaagagagg

SEQ ID NO: 17526 - DNA, 96 bp, Aspergillus novofumigatus
  misc_feature: 82
ccggccacttatcgagacacacaggcactggggtcaatggaagccgggcgcgcgcgccccgggggggaccagttggcggggacccttggggggggg

SEQ ID NO: 17527 - DNA, 96 bp, Aspergillus novofumigatus
  misc_feature: 82
aaatttctcttattttttttttaaatatatatacttaatctcttcttatcttaatctaataaatataaatatatatatctattatctagactaaat

SEQ ID NO: 17528 - DNA, 96 bp, Aspergillus novofumigatus
  misc_feature: 82
aagagtatataagttaatttagaaagaaaagaatagaaggtaaagatagataagatagaaagagtttaagtaaagggtaagaaagagaggaagaat

SEQ ID NO: 17529 - DNA, 96 bp, Aspergillus novofumigatus
  misc_feature: 82
aaggagagatagaaggagagttagaaggagagttagaaggagagtaagaaatagaataagagtaaggggtagtaagtgtagatagaagagagagat

SEQ ID NO: 17530 - DNA, 96 bp, Aspergillus novofumigatus
  misc_feature: 82
aggttaggatagttagaaggagagtaagagagatttagatagaggggttaaataagagatagaaggagagatagaaggagagatagaaggagagat

SEQ ID NO: 17531 - DNA, 96 bp, Aspergillus novofumigatus
  misc_feature: 82
agaagaagaaattaaaattaaggaaagataaaattaaaagaaaaggataaagttaaataataatttaatagaatgaattaggaatgtagtaaggat

SEQ ID NO: 17532 - DNA, 96 bp, Aspergillus novofumigatus
  misc_feature: 82
atcctaacctctcctaatctcttcttctatctcttcttctaactctccttctacctctccttaatccttcttttattaactcttattctaactctt

SEQ ID NO: 17533 - DNA, 96 bp, Aspergillus novofumigatus
  misc_feature: 82
atattattataaataactaggtatactatctaaatttaaaataataagtatatactatataaatatttaatatatttataacttagctattatact

SEQ ID NO: 17534 - DNA, 96 bp, Aspergillus novofumigatus
  misc_feature: 82
aagggagatagtaagataggtagtaagataataagtaaatagataagtagggtagtaagatagtaatgcaggtaaaaggccccagggagattatat

SEQ ID NO: 17535 - DNA, 96 bp, Aspergillus novofumigatus
  misc_feature: 82
acttatttccttctcttctcctctcttctttctatctttattctaaatccttctctcttcctaaatccttctaaatccttattttcctatatctat

SEQ ID NO: 17536 - DNA, 96 bp, Aspergillus novofumigatus
  misc_feature: 82
actatcctaacctctcctaatctcttcttctatctcttcttctaactctccttctacctctccttaatccttcttttattaactcttattctaact

SEQ ID NO: 17537 - DNA, 96 bp, Aspergillus novofumigatus
  misc_feature: 82
actctccttctaactatcctaacctctcctaatctcttcttctatctcttcttctaactctccttctacctctccttaatccttcttttattaact

SEQ ID NO: 17538 - DNA, 96 bp, Aspergillus novofumigatus
  misc_feature: 82
acctatcttgctgcctccctcactcactcactgcctgccttacttactatcttactcactaccttacttactgcctcactccctcactatctcact

SEQ ID NO: 17539 - DNA, 96 bp, Aspergillus novofumigatus
  misc_feature: 82
agtaggagagggtaagggttagtaaggatagaagaagagttataagaagaggaagagggaggggaagagagagagaaagagttagagataagagtt

SEQ ID NO: 17540 - DNA, 96 bp, Aspergillus novofumigatus
  misc_feature: 81
ttttttacttatttacctcttttttcttctccctttttatctcttctctctatttctctcttaattcttactctatctcttactttacctctttct

SEQ ID NO: 17541 - DNA, 96 bp, Aspergillus novofumigatus
  misc_feature: 81
ttttattcctaacccttattctctctcttattattaccttttattttcttttcttttctattccctttcctcttccctttcctctttcctttcctc

SEQ ID NO: 17542 - DNA, 96 bp, Aspergillus novofumigatus
  misc_feature: 81
ttttacttatttacctcttttttcttctccctttttatctcttctctctatttctctcttaattcttactctatctcttactttacctctttctct

SEQ ID NO: 17543 - DNA, 96 bp, Aspergillus novofumigatus
  misc_feature: 81
ttttactaactctccttcttcttctaactcttatctctaactctttctctctctcttcccctccctcttcctcttcttataactcttcttctatcc

SEQ ID NO: 17544 - DNA, 96 bp, Aspergillus novofumigatus
  misc_feature: 81
aggcagtgcatgagatagtgagggagatagtaagataggtagtaagataataagtaaatagataagtagggtagtaagatagtaatgcaggtaaaa

SEQ ID NO: 17545 - DNA, 96 bp, Aspergillus novofumigatus
  misc_feature: 81
attagagaaagaagagatagtaggagagggtaagggttagtaaggatagaagaagagttataagaagaggaagagggaggggaagagagagagaaa

SEQ ID NO: 17546 - DNA, 96 bp, Aspergillus novofumigatus
  misc_feature: 81
tttatatcttatatataggagatagtatctataaattatattattataatcctctattagctataattatttaatctaaatctttatagtagtata

SEQ ID NO: 17547 - DNA, 96 bp, Aspergillus novofumigatus
  misc_feature: 81
tttacttatttacctcttttttcttctccctttttatctcttctctctatttctctcttaattcttactctatctcttactttacctctttctcta

SEQ ID NO: 17548 - DNA, 96 bp, Aspergillus novofumigatus
  misc_feature: 81
atcctaactttaatcctttcttcttttctctactctttcttctcttctctactctttcttctttccttttttaatcttctctcttattctattaaa

SEQ ID NO: 17549 - DNA, 96 bp, Aspergillus novofumigatus
  misc_feature: 81
ttcttctccctttttatctcttctctctatttctctcttaattcttactctatctcttactttacccctttctctatctctctcttctatctacac

SEQ ID NO: 17550 - DNA, 96 bp, Aspergillus novofumigatus
  misc_feature: 81
taggatagttagaaggagagtaagagagatttagatagaggggttaaataagagatagaaggagagatagaaggagagatagaaggagagatagaa

SEQ ID NO: 17551 - DNA, 96 bp, Aspergillus novofumigatus
  misc_feature: 81
ttcctaacccttattctctctcttattattaccttttattttcttttcttttctattccctttcctcttccctttcctcttccctttcctcttccc

SEQ ID NO: 17552 - DNA, 96 bp, Aspergillus novofumigatus
  misc_feature: 81
ttatatcttatatataggagatagtatctataaattatattattataatcctctattagctataattatttaatctaaatctttatagtagtataa

SEQ ID NO: 17553 - DNA, 96 bp, Aspergillus novofumigatus
  misc_feature: 81
ctaaatttctcttattttttttttaaatatatatacttaatctcttcttatcttaatctaataaatataaatatatatatctattatctagactaa

SEQ ID NO: 17554 - DNA, 96 bp, Aspergillus novofumigatus
  misc_feature: 81
aaaaagtagcatagaaatactatatatcctaatcatatacctatataaagtgctataagctatatataactatataggttaccctagctttactaa

SEQ ID NO: 17555 - DNA, 96 bp, Aspergillus novofumigatus
  misc_feature: 81
tcttaaacttactaacccttactctattacttatccttccttactttattctccttactacctcttaccttctatctattctccttattttactaa

SEQ ID NO: 17556 - DNA, 96 bp, Aspergillus novofumigatus
  misc_feature: 81
taactatcctaacctctcctaatctcttcttctatctcttcttctaactctccttctacctctccttaatccttcttttattaactcttattctaa

SEQ ID NO: 17557 - DNA, 96 bp, Aspergillus novofumigatus
  misc_feature: 81
ttagaaggagagtaagagagatttagatagaggggttaaataagagatagaaggagagatagaaggagagatagaaggagagatagaaggagagat

SEQ ID NO: 17558 - DNA, 96 bp, Aspergillus novofumigatus
  misc_feature: 81
ttacttttattctatctctaactctttccttcttcccttctattcttaactctctctttctctttcttctcctttctatccctaactcttattcta

SEQ ID NO: 17559 - DNA, 96 bp, Aspergillus novofumigatus
  misc_feature: 81
ttactttacccctttctctatctctctcttctatctacacttactaccccttactcttattctatttcttactctccttctaactctccttctaac

SEQ ID NO: 17560 - DNA, 96 bp, Aspergillus novofumigatus
  misc_feature: 81
ttacttatttacctcttttttcttctccctttttatctcttctctctatttctctcttaattcttactctatctcttactttacctctttctctat

SEQ ID NO: 17561 - DNA, 96 bp, Aspergillus novofumigatus
  misc_feature: 81
ttaagaataagagttagaagaagagataaaaagggttagaagaagaattaggaataaaaataagaataaaaagtggaagaatagttagcaagagta

SEQ ID NO: 17562 - DNA, 96 bp, Aspergillus novofumigatus
  misc_feature: 81
ttaaatcctaactttaatcctttcttcttttctctactctttcttctcttctctactctttcttctttccttttttaatcttctctcttattctat

SEQ ID NO: 17563 - DNA, 96 bp, Aspergillus novofumigatus
  misc_feature: 81
ttaaaaatagaagaagaaagggaagaggaaagggaagaggaaaggaaagaggaaagggaagaggaaagggaatagaaaagaaaagaaaataaaagg

SEQ ID NO: 17564 - DNA, 96 bp, Aspergillus novofumigatus
  misc_feature: 81
ccggtgggccatgccgacctggatcggtgcagatgtctggggggtgcatgcatgcgagggggcgtgtgcgtgtatatatatatatatatatataca

SEQ ID NO: 17565 - DNA, 96 bp, Aspergillus novofumigatus
  misc_feature: 81
gcatgagatagtgagggagatagtaagataggtagtaagataataagtaaatagataagtagggtagtaagatagtaatgcaggtaaaaggcccca

SEQ ID NO: 17566 - DNA, 96 bp, Aspergillus novofumigatus
  misc_feature: 81
tgcatgagatagtgagggagatagtaagataggtagtaagataataagtaaatagataagtagggtagtaagatagtaatgcaggtaaaaggcccc

SEQ ID NO: 17567 - DNA, 96 bp, Aspergillus novofumigatus
  misc_feature: 81
tgatcagcattaatatattaataaatgaatatatatatttcaggataccataatgcgcagagatatatattatacatttagtttatagagtatgtt

SEQ ID NO: 17568 - DNA, 96 bp, Aspergillus novofumigatus
  misc_feature: 81
gagatagtaagataggtagtaagataataagtaaatagataagtagggtagtaagatagtaatgcaggtaaaaggccccaaggagattatatatca

SEQ ID NO: 17569 - DNA, 96 bp, Aspergillus novofumigatus
  misc_feature: 81
gagatagtaagataggtagtaagataataagtaaatagataagtagggtagtaagatagtaatgcaggtaaaaggccccagggagattatatatca

SEQ ID NO: 17570 - DNA, 96 bp, Aspergillus novofumigatus
  misc_feature: 81
tgagatagtgagggagatagtaagataggtagtaagataataagtaaatagataagtagggtagtaagatagtaatgcaggtaaaaggccccaagg

SEQ ID NO: 17571 - DNA, 96 bp, Aspergillus novofumigatus
  misc_feature: 81
tcttttctctactctttcttctcttctctactctttcttctttccttttttaatcttctctcttattctattaaaaatatacccttcttctctctt

SEQ ID NO: 17572 - DNA, 96 bp, Aspergillus novofumigatus
  misc_feature: 81
gggttagaagaagagttagaataagagttaaggaaagagataaaagaaggattaagaagaggtagaagaagagttagaagaagagatagaagaaga

SEQ ID NO: 17573 - DNA, 96 bp, Aspergillus novofumigatus
  misc_feature: 81
tctcttattttttttttaaatatatatacttaatctcttcttatcttaatctaataaatataaatatatatatctattatctagactaaatctttt

SEQ ID NO: 17574 - DNA, 96 bp, Aspergillus novofumigatus
  misc_feature: 81
tctcttactttacccctttctctatctctctcttctatctacacttactaccccttactcttattctatttcttactctccttctaactctccttc

SEQ ID NO: 17575 - DNA, 96 bp, Aspergillus novofumigatus
  misc_feature: 81
tctctaaatttctcttattttttttttaaatatatatacttaatctcttcttatcttaatctaataaatataaatatatatatctattatctagac

SEQ ID NO: 17576 - DNA, 96 bp, Aspergillus novofumigatus
  misc_feature: 81
gagtaagagagatttagatagaggggttaaataagagatagaaggagagatagaaggagagatagaaggagagatagaaggagagatagaaggaga

SEQ ID NO: 17577 - DNA, 96 bp, Aspergillus novofumigatus
  misc_feature: 81
gatagtaagggagatagtaagataggtagtaagataataagtaaatagataagtagggtagtaagatagtaatgcaggtaaaaggccccagggaga

SEQ ID NO: 17578 - DNA, 96 bp, Aspergillus novofumigatus
  misc_feature: 81
tctattttattcctaacccttattctctctcttattattaccttttattttcttttcttttctattccctttcctcttccctttcctctttccttt

SEQ ID NO: 17579 - DNA, 96 bp, Aspergillus novofumigatus
  misc_feature: 81
tctatctcttactttacccctttctctatctctctcttctatctacacttactaccccttactcttattctatttcttactctccttctaactctc

SEQ ID NO: 17580 - DNA, 96 bp, Aspergillus novofumigatus
  misc_feature: 81
gagagatagaaggagagttagaaggagagttagaaggagagtaagaaatagaataagagtaaggggtagtaagtgtagatagaagagagagataga

SEQ ID NO: 17581 - DNA, 96 bp, Aspergillus novofumigatus
  misc_feature: 81
agaagagttagaataagagttaaggaaagagataaaagaaggattaagaagaggtagaagaagagttagaagaagagatagaagaagagattagga

SEQ ID NO: 17582 - DNA, 96 bp, Aspergillus novofumigatus
  misc_feature: 81
gagatagtaagggagatagtaagataggtagtaagataataagtaaatagataagtagggtagtaagatagtaatgcaggtaaaaggccccaggga

SEQ ID NO: 17583 - DNA, 96 bp, Aspergillus novofumigatus
  misc_feature: 81
taaacttactaacccttactctattacttatccttccttactttattctccttactacctcttaccttctatctattctccttattttactaaata

SEQ ID NO: 17584 - DNA, 96 bp, Aspergillus novofumigatus
  misc_feature: 81
tattcctaacccttattctctctcttattattaccttttattttcttttcttttctattccctttcctcttccctttcctcttccctttcctcttc

SEQ ID NO: 17585 - DNA, 96 bp, Aspergillus novofumigatus
  misc_feature: 81
tattataaataactaggtatactatctaaatttaaaataataagtatatactatataaatatttaatatatttataacttagctattatactacct

SEQ ID NO: 17586 - DNA, 96 bp, Aspergillus novofumigatus
  misc_feature: 81
ctggggccttttacctgcattactatcttactaccctacttatctatttacttattatcttactacctatcttactatctcccttactatctcata

SEQ ID NO: 17587 - DNA, 96 bp, Aspergillus novofumigatus
  misc_feature: 81
tatcttaaacttactaacccttactctattacttatccttccttactttattctccttactacctcttaccttctatctattctccttattttact

SEQ ID NO: 17588 - DNA, 96 bp, Aspergillus novofumigatus
  misc_feature: 81
tatctcttactttacccctttctctatctctctcttctatctacacttactaccccttactcttattctatttcttactctccttctaactctcct

SEQ ID NO: 17589 - DNA, 96 bp, Aspergillus novofumigatus
  misc_feature: 81
agttataccaccttatactactataaagatttagattaaataattatagctaatagaggattataataatataatttatagatactatctcctata

SEQ ID NO: 17590 - DNA, 96 bp, Aspergillus novofumigatus
  misc_feature: 81
tagtaagggagatagtaagataggtagtaagataataagtaaatagataagtagggtagtaagatagtaatgcaggtaaaaggccccagggagatt

SEQ ID NO: 17591 - DNA, 96 bp, Aspergillus novofumigatus
  misc_feature: 81
tagtaagataggtagtaagataataagtaaatagataagtagggtagtaagatagtaatgcaggtaaaaggccccaaggagattatatatcaggta

SEQ ID NO: 17592 - DNA, 96 bp, Aspergillus novofumigatus
  misc_feature: 81
atcttaaacttactaacccttactctattacttatccttccttactttattctccttactacctcttaccttctatctattctccttattttacta

SEQ ID NO: 17593 - DNA, 96 bp, Aspergillus novofumigatus
  misc_feature: 81
attataaataactaggtatactatctaaatttaaaataataagtatatactatataaatatttaatatatttataacttagctattatactaccta

SEQ ID NO: 17594 - DNA, 96 bp, Aspergillus novofumigatus
  misc_feature: 81
acttaataacccttacttttattctatctctaactctttccttcttcccttctattcttaactctctctttctctttcttctcctttctatcccta

SEQ ID NO: 17595 - DNA, 96 bp, Aspergillus novofumigatus
  misc_feature: 81
taggagaggttaggatagttagaaggagagtaagagagatttagatagaggggttaaataagagatagaaggagagatagaaggagagatagaagg

SEQ ID NO: 17596 - DNA, 96 bp, Aspergillus novofumigatus
  misc_feature: 81
tagataatagatatatatatttatatttattagattaagataagaagagattaagtatatatatttaaaaaaaaaataagagaaatttagagatta

SEQ ID NO: 17597 - DNA, 96 bp, Aspergillus novofumigatus
  misc_feature: 81
ctctatttctctcttaattcttactctatctcttactttacccctttctctatctctctcttctatctacacttactaccccttactcttattcta

SEQ ID NO: 17598 - DNA, 96 bp, Aspergillus novofumigatus
  misc_feature: 81
cttattttttttttaaatatatatacttaatctcttcttatcttaatctaataaatataaatatatatatctattatctagactaaatcttttcta

SEQ ID NO: 17599 - DNA, 96 bp, Aspergillus novofumigatus
  misc_feature: 81
tacttattaaatcctaactttaatcctttcttcttttctctactctttcttctcttctctactctttcttctttccttttttaatcttctctctta

SEQ ID NO: 17600 - DNA, 96 bp, Aspergillus novofumigatus
  misc_feature: 81
agagatagaaggagagatagaaggagagatagaaggagagatagaaggagagttagaaggagagttagaaggagagtaagaaatagaataagagta

SEQ ID NO: 17601 - DNA, 96 bp, Aspergillus novofumigatus
  misc_feature: 81
agggagtgagtaaggcagtgcatgagatagtgagggagatagtaagataggtagtaagataataagtaaatagataagtagggtagtaagatagta

SEQ ID NO: 17602 - DNA, 96 bp, Aspergillus novofumigatus
  misc_feature: 81
tactacctatcttgctgcctccctcactcactcactgcctgccttacttactatcttactcactaccttacttactgcctcactccctcactatct

SEQ ID NO: 17603 - DNA, 96 bp, Aspergillus novofumigatus
  misc_feature: 81
gaaagagaagaagaaattaaaattaaggaaagataaaattaaaagaaaaggataaagttaaataataatttaatagaatgaattaggaatgtagta

SEQ ID NO: 17604 - DNA, 96 bp, Aspergillus novofumigatus
  misc_feature: 81
tactaactctccttcttcttctaactcttatctctaactctttctctctctcttcccctccctcttcctcttcttataactcttcttctatcctta

SEQ ID NO: 17605 - DNA, 96 bp, Aspergillus novofumigatus
  misc_feature: 81
atagaaggagagatagaaggagagatagaaggagagttagaaggagagttagaaggagagtaagaaatagaataagagtaaggggtagtaagtgta

SEQ ID NO: 17606 - DNA, 96 bp, Aspergillus novofumigatus
  misc_feature: 81
taatcagtagtaatatataaatgaatatatacattttaggataccataatacgcagagatatatattatacagttagtttatagagtatgttagct

SEQ ID NO: 17607 - DNA, 96 bp, Aspergillus novofumigatus
  misc_feature: 81
aaatcctaactttaatcctttcttcttttctctactctttcttctcttctctactctttcttctttccttttttaatcttctctcttattctatta

SEQ ID NO: 17608 - DNA, 96 bp, Aspergillus novofumigatus
  misc_feature: 81
ctagttaccttatattattataaataactaggtatactatctaaatttaaaataataagtatatactatataaatatttaatatatttataactta

SEQ ID NO: 17609 - DNA, 96 bp, Aspergillus novofumigatus
  misc_feature: 81
taagaataagagttagaagaagagataaaaagggttagaagaagaattaggaataaaaataagaataaaaagtggaagaatagttagcaagagtat

SEQ ID NO: 17610 - DNA, 96 bp, Aspergillus novofumigatus
  misc_feature: 81
acttttattctatctctaactctttccttcttcccttctattcttaactctctctttctctttcttctcctttctatccctaactcttattctaac

SEQ ID NO: 17611 - DNA, 96 bp, Aspergillus novofumigatus
  misc_feature: 81
aactatcctaacctctcctaatctcttcttctatctcttcttctaactctccttctacctctccttaatccttcttttattaactcttattctaac

SEQ ID NO: 17612 - DNA, 96 bp, Aspergillus novofumigatus
  misc_feature: 81
cctactctcatcctaaccctcccccttattaatatccttatcctattaataattatccccttctttatcctatattactttctataaccttatacc

SEQ ID NO: 17613 - DNA, 96 bp, Aspergillus novofumigatus
  misc_feature: 81
gggcgcgcgcgccccgggggtgaccagttggcggggacccttgggggggggcagaccggcaggcgggcaggagggaggccagggggccggcgccgg

SEQ ID NO: 17614 - DNA, 96 bp, Aspergillus novofumigatus
  misc_feature: 81
gggaccacgccagttggcggtccgagatggccgggcgcgcgccctgaccggcagcaggggcccgcgcgcgccgccgcctggtgacgaagggcgggg

SEQ ID NO: 17615 - DNA, 96 bp, Aspergillus novofumigatus
  misc_feature: 81
ggagttaagaataagagttagaagaagagataaaaagggttagaagaagaattaggaataaaaataagaataaaaagtggaagaatagttagcaag

SEQ ID NO: 17616 - DNA, 96 bp, Aspergillus novofumigatus
  misc_feature: 81
ggagatagtaagataggtagtaagataataagtaaatagataagtagggtagtaagatagtaatgcaggtaaaaggccccaaggagattatatatc

SEQ ID NO: 17617 - DNA, 96 bp, Aspergillus novofumigatus
  misc_feature: 81
ggaaagaggaaagggaagaggaaagggaatagaaaagaaaagaaaataaaaggtaataataagagagagaataagggttaggaataaaatagaaat

SEQ ID NO: 17618 - DNA, 96 bp, Aspergillus novofumigatus
  misc_feature: 81
agttaccttatattattataaataactaggtatactatctaaatttaaaataataagtatatactatataaatatttaatatatttataacttagc

SEQ ID NO: 17619 - DNA, 96 bp, Aspergillus novofumigatus
  misc_feature: 81
cagtgcatgagatagtgagggagatagtaagataggtagtaagataataagtaaatagataagtagggtagtaagatagtaatgcaggtaaaaggc

SEQ ID NO: 17620 - DNA, 96 bp, Aspergillus novofumigatus
  misc_feature: 81
gatagaaggagagatagaaggagagatagaaggagagttagaaggagagttagaaggagagtaagaaatagaataagagtaaggggtagtaagtgt

SEQ ID NO: 17621 - DNA, 96 bp, Aspergillus novofumigatus
  misc_feature: 81
gatagaaggagagatagaaggagagatagaaggagagatagaaggagagttagaaggagagttagaaggagagtaagaaatagaataagagtaagg

SEQ ID NO: 17622 - DNA, 96 bp, Aspergillus novofumigatus
  misc_feature: 81
cttttactaactctccttcttcttctaactcttatctctaactctttctctctctcttcccctccctcttcctcttcttataactcttcttctatc

SEQ ID NO: 17623 - DNA, 96 bp, Aspergillus novofumigatus
  misc_feature: 81
gagttagggtttgagtaagaaagaggtaaggagagatagaataagaattagaaggaggattagaggaagagatagaagaagggttagaataagagt

SEQ ID NO: 17624 - DNA, 96 bp, Aspergillus novofumigatus
  misc_feature: 81
gagttagggagagatagaaggggagatagagggagagatagaagaaggattagaagaagagtaaggaataataagaaggagagttagaataagagt

SEQ ID NO: 17625 - DNA, 96 bp, Aspergillus novofumigatus
  misc_feature: 81
ctatcctaacctctcctaatctcttcttctatctcttcttctaactctccttctacctctccttaatccttcttttattaactcttattctaactc

SEQ ID NO: 17626 - DNA, 96 bp, Aspergillus novofumigatus
  misc_feature: 81
gaggtatttagtaaaataaggagaatagatagaaggtaagaggtagtaaggagaataaagtaaggaaggataagtaatagagtaagggttagtaag

SEQ ID NO: 17627 - DNA, 96 bp, Aspergillus novofumigatus
  misc_feature: 81
gagatagaaggagagatagaaggagagatagaaggagagttagaaggagagttagaaggagagtaagaaatagaataagagtaaggggtagtaagt

SEQ ID NO: 17628 - DNA, 96 bp, Aspergillus novofumigatus
  misc_feature: 81
gagagatagaaggagagatagaaggagagatagaaggagagatagaaggagagttagaaggagagttagaaggagagtaagaaatagaataagagt

SEQ ID NO: 17629 - DNA, 96 bp, Aspergillus novofumigatus
  misc_feature: 81
gacagtaaggtagatagtaagatagatagtaaggtagacagtaagatagatagtgtagtcaatagtaaggtaggtaataaggtagatagtaattat

SEQ ID NO: 17630 - DNA, 96 bp, Aspergillus novofumigatus
  misc_feature: 81
ccttacttttattctatctctaactctttccttcttcccttctattcttaactctctctttctctttcttctcctttctatccctaactcttattc

SEQ ID NO: 17631 - DNA, 96 bp, Aspergillus novofumigatus
  misc_feature: 81
ctctctatttctctcttaattcttactctatctcttactttacccctttctctatctctctcttctatctacacttactaccccttactcttattc

SEQ ID NO: 17632 - DNA, 96 bp, Aspergillus novofumigatus
  misc_feature: 81
ctcttattattaccttttattttcttttcttttctattccctttcctcttccctttcctctttcctttcctcttccctttcctcttccctttcttc

SEQ ID NO: 17633 - DNA, 96 bp, Aspergillus novofumigatus
  misc_feature: 81
gaaaagagtatataagttaatttagaaagaaaagaatagaaggtaaagatagataagatagaaagagtttaagtaaagggtaagaaagagaggaag

SEQ ID NO: 17634 - DNA, 96 bp, Aspergillus novofumigatus
  misc_feature: 81
agggttagaagaagagttagaataagagttaaggaaagagataaaagaaggattaagaagaggtagaagaagagttagaagaagagatagaagaag

SEQ ID NO: 17635 - DNA, 96 bp, Aspergillus novofumigatus
  misc_feature: 81
aatttagaaagaaaagaatagaaggtaaagatagataagatagaaagagtttaagtaaagggtaagaaagagaagaagaataagaagaaagagaag

SEQ ID NO: 17636 - DNA, 96 bp, Aspergillus novofumigatus
  misc_feature: 81
cttctccctttttatctcttctctctatttctctcttaattcttactctatctcttactttacccctttctctatctctctcttctatctacactt

SEQ ID NO: 17637 - DNA, 96 bp, Aspergillus novofumigatus
  misc_feature: 81
cttctaactatcctaacctctcctaatctcttcttctatctcttcttctaactctccttctacctctccttaatccttcttttattaactcttatt

SEQ ID NO: 17638 - DNA, 96 bp, Aspergillus novofumigatus
  misc_feature: 81
agagagttagggtttgagtaagaaagaggtaaggagagatagaataagaattagaaggaggattagaggaagagatagaagaagggttagaataag

SEQ ID NO: 17639 - DNA, 96 bp, Aspergillus novofumigatus
  misc_feature: 81
cttattattaccttttattttcttttcttttctattccctttcctcttccctttcctctttcctttcctcttccctttcctcttccctttcttctt

SEQ ID NO: 17640 - DNA, 96 bp, Aspergillus novofumigatus
  misc_feature: 81
cttattaaatcctaactttaatcctttcttcttttctctactctttcttctcttctctactctttcttctttccttttttaatcttctctcttatt

SEQ ID NO: 17641 - DNA, 96 bp, Aspergillus novofumigatus
  misc_feature: 81
accaccttatactactataaagatttagattaaataattatagctaatagaggattataataatataatttatagatactatctcctatatataag

SEQ ID NO: 17642 - DNA, 96 bp, Aspergillus novofumigatus
  misc_feature: 81
aggtatcagggggatatcaccatagttaggagagagatagttagtaaggtagataataagattaatagtatagtagatagtgaggttaacagtaag

SEQ ID NO: 17643 - DNA, 96 bp, Aspergillus novofumigatus
  misc_feature: 81
agatagtaagataggtagtaagataataagtaaatagataagtagggtagtaagatagtaatgcaggtaaaaggccccaaggagattatatatcag

SEQ ID NO: 17644 - DNA, 96 bp, Aspergillus novofumigatus
  misc_feature: 81
agagttagaataagagttaaggaaagagataaaagaaggattaagaagaggtagaagaagagttagaagaagagatagaagaagagattaggagag

SEQ ID NO: 17645 - DNA, 96 bp, Aspergillus novofumigatus
  misc_feature: 81
agatagtaagggagatagtaagataggtagtaagataataagtaaatagataagtagggtagtaagatagtaatgcaggtaaaaggccccagggag

SEQ ID NO: 17646 - DNA, 96 bp, Aspergillus novofumigatus
  misc_feature: 81
aacatactctacaaactaactgtataatatatatctctgcgcattatggtatcctaaaatatatatattcattcattaatatatcaatgctgatcg

SEQ ID NO: 17647 - DNA, 96 bp, Aspergillus novofumigatus
  misc_feature: 81
ccttctcttctcctctcttctttctatctttattctaaatccttctctcttcctaaatccttctaaatccttattttcctatatctatctatccct

SEQ ID NO: 17648 - DNA, 96 bp, Aspergillus novofumigatus
  misc_feature: 81
ccttattcttatcttaaacttactaacccttactctattacttatccttccttactttattctccttactacctcttaccttctatctattctcct

SEQ ID NO: 17649 - DNA, 96 bp, Aspergillus novofumigatus
  misc_feature: 81
ccttatactactataaagatttagattaaataattatagctaatagaggattataataatataatttatagatactatctcctatatataagatat

SEQ ID NO: 17650 - DNA, 96 bp, Aspergillus novofumigatus
  misc_feature: 81
cctatcttactacctcccttactatcttacttactacctcccttactgttaaccttactatctacctcactacttatcttactacctccctcactg

SEQ ID NO: 17651 - DNA, 96 bp, Aspergillus novofumigatus
  misc_feature: 81
agatagtgagggaggcagtgagtgagatagtaagtaagatagtgagggaggtagtgagtaagacagtgagtgagatagtaagtaaggcagtgagtg

SEQ ID NO: 17652 - DNA, 96 bp, Aspergillus novofumigatus
  misc_feature: 81
cactatctcactcactatctcactcactgccttacttactatctcactcactgtcttactcactacctccctcactatcttacttactatctcact

SEQ ID NO: 17653 - DNA, 96 bp, Aspergillus novofumigatus
  misc_feature: 81
attttttttacttatttacctcttttttcttctccctttttatctcttctctctatttctctcttaattcttactctatctcttactttacctctt

SEQ ID NO: 17654 - DNA, 96 bp, Aspergillus novofumigatus
  misc_feature: 81
attttattcctaacccttattctctctcttattattaccttttattttcttttcttttctattccctttcctcttccctttcctctttcctttcct

SEQ ID NO: 17655 - DNA, 96 bp, Aspergillus novofumigatus
  misc_feature: 81
attaaataaaccagctagttaccttatattattataaataactaggtatactatctaaatttaaaataataagtatatactatataaatatttaat

SEQ ID NO: 17656 - DNA, 96 bp, Aspergillus novofumigatus
  misc_feature: 81
atagtaagggagatagtaagataggtagtaagataataagtaaatagataagtagggtagtaagatagtaatgcaggtaaaaggccccagggagat

SEQ ID NO: 17657 - DNA, 96 bp, Aspergillus novofumigatus
  misc_feature: 81
acttattaaatcctaactttaatcctttcttcttttctctactctttcttctcttctctactctttcttctttccttttttaatcttctctcttat

SEQ ID NO: 17658 - DNA, 96 bp, Aspergillus novofumigatus
  misc_feature: 81
aaccagctagttaccttatattattataaataactaggtatactatctaaatttaaaataataagtatatactatataaatatttaatatatttat

SEQ ID NO: 17659 - DNA, 96 bp, Aspergillus novofumigatus
  misc_feature: 81
agtctaatagcatcctattatttctattcttattattactaagttattattataactatatagattattatactattattattatattaagatact

SEQ ID NO: 17660 - DNA, 96 bp, Aspergillus novofumigatus
  misc_feature: 81
agtagttataccaccttatactactataaagatttagattaaataattatagctaatagaggattataataatataatttatagatactatctcct

SEQ ID NO: 17661 - DNA, 96 bp, Aspergillus novofumigatus
  misc_feature: 81
agggaggtatttagtaaaataaggagaatagatagaaggtaagaggtagtaaggagaataaagtaaggaaggataagtaatagagtaagggttagt

SEQ ID NO: 17662 - DNA, 96 bp, Aspergillus novofumigatus
  misc_feature: 81
agagagggaggtatttagtaaaataaggagaatagatagaaggtaagaggtagtaaggagaataaagtaaggaaggataagtaatagagtaagggt

SEQ ID NO: 17663 - DNA, 96 bp, Aspergillus novofumigatus
  misc_feature: 81
agaagaaagagaagaagaaattaaaattaaggaaagataaaattaaaagaaaaggataaagttaaataataatttaatagaatgaattaggaatgt

SEQ ID NO: 17664 - DNA, 96 bp, Aspergillus novofumigatus
  misc_feature: 81
aatctcttcttatcttaatctaataaatataaatatatatatctattatctagactaaatcttttctagtaactaaatctaattattatctagctt

SEQ ID NO: 17665 - DNA, 96 bp, Aspergillus novofumigatus
  misc_feature: 81
aagaataagagttagaagaagagataaaaagggttagaagaagaattaggaataaaaataagaataaaaagtggaagaatagttagcaagagtatt

SEQ ID NO: 17666 - DNA, 96 bp, Aspergillus novofumigatus
  misc_feature: 80
tttttttttaaatatatatacttaatctcttcttatcttaatctaataaatataaatatatatatctattatctagactaaatcttttctagtaac

SEQ ID NO: 17667 - DNA, 96 bp, Aspergillus novofumigatus
  misc_feature: 80
ttttttttacttatttacctcttttttcttctccctttttatctcttctctctatttctctcttaattcttactctatctcttactttacctcttt

SEQ ID NO: 17668 - DNA, 96 bp, Aspergillus novofumigatus
  misc_feature: 80
ttttttttaaatatatatacttaatctcttcttatcttaatctaataaatataaatatatatatctattatctagactaaatcttttctagtaact

SEQ ID NO: 17669 - DNA, 96 bp, Aspergillus novofumigatus
  misc_feature: 80
tttttttaaatatatatacttaatctcttcttatcttaatctaataaatataaatatatatatctattatctagactaaatcttttctagtaacta

SEQ ID NO: 17670 - DNA, 96 bp, Aspergillus novofumigatus
  misc_feature: 80
ttttttcttctccctttttatctcttctctctatttctctcttaattcttactctatctcttactttacccctttctctatctctctcttctatct

SEQ ID NO: 17671 - DNA, 96 bp, Aspergillus novofumigatus
  misc_feature: 80
ttttttaaatatatatacttaatctcttcttatcttaatctaataaatataaatatatatatctattatctagactaaatcttttctagtaactaa

SEQ ID NO: 17672 - DNA, 96 bp, Aspergillus novofumigatus
  misc_feature: 80
ttttctctactctttcttctcttctctactctttcttctttccttttttaatcttctctcttattctattaaaaatatacccttcttctctcttat

SEQ ID NO: 17673 - DNA, 96 bp, Aspergillus novofumigatus
  misc_feature: 80
tttcttctccctttttatctcttctctctatttctctcttaattcttactctatctcttactttacccctttctctatctctctcttctatctaca

SEQ ID NO: 17674 - DNA, 96 bp, Aspergillus novofumigatus
  misc_feature: 80
aaaagtagcatagaaatactatatatcctaatcatatacctatataaagtgctataagctatatataactatataggttaccctagctttactaaa

SEQ ID NO: 17675 - DNA, 96 bp, Aspergillus novofumigatus
  misc_feature: 80
aaggcagtgcatgagatagtgagggagatagtaagataggtagtaagataataagtaaatagataagtagggtagtaagatagtaatgcaggtaaa

SEQ ID NO: 17676 - DNA, 96 bp, Aspergillus novofumigatus
  misc_feature: 80
tttaaatatatatacttaatctcttcttatcttaatctaataaatataaatatatatatctattatctagactaaatcttttctagtaactaaatc

SEQ ID NO: 17677 - DNA, 96 bp, Aspergillus novofumigatus
  misc_feature: 80
gatagtgagtgagatagtgagggaggcagtaagtaagacagtgagggaggcagtgagtgagatagtgagggagtgaggcagtgagtaaggcagcaa

SEQ ID NO: 17678 - DNA, 96 bp, Aspergillus novofumigatus
  misc_feature: 80
ttgatcagcattaatatattaataaatgaatatatatatttcaggataccataatgcgcagagatatatattatacatttagtttatagagtatgt

SEQ ID NO: 17679 - DNA, 96 bp, Aspergillus novofumigatus
  misc_feature: 80
aagggttagaagaagagttagaataagagttaaggaaagagataaaagaaggattaagaagaggtagaagaagagttagaagaagagatagaagaa

SEQ ID NO: 17680 - DNA, 96 bp, Aspergillus novofumigatus
  misc_feature: 80
gagggtaagggttagtaaggatagaagaagagttataagaagaggaagagggaggggaagagagagagaaagagttagagataagagttagaagaa

SEQ ID NO: 17681 - DNA, 96 bp, Aspergillus novofumigatus
  misc_feature: 80
aaagagtatataagttaatttagaaagaaaagaatagaaggtaaagatagataagatagaaagagtttaagtaaagggtaagaaagagaggaagaa

SEQ ID NO: 17682 - DNA, 96 bp, Aspergillus novofumigatus
  misc_feature: 80
agtaagggttagaagaagagttagaataagagttaaggaaagagataaaagaaggattaagaagaggtagaagaagagttagaagaagagatagaa

SEQ ID NO: 17683 - DNA, 96 bp, Aspergillus novofumigatus
  misc_feature: 80
ggagagggtaagggttagtaaggatagaagaagagttataagaagaggaagagggaggggaagagagagagaaagagttagagataagagttagaa

SEQ ID NO: 17684 - DNA, 96 bp, Aspergillus novofumigatus
  misc_feature: 80
ttccttctcttctcctctcttctttctatctttattctaaatccttctctcttcctaaatccttctaaatccttattttcctatatctatctatcc

SEQ ID NO: 17685 - DNA, 96 bp, Aspergillus novofumigatus
  misc_feature: 80
ttccctatatccttattccaccctgacctttcttcttcttcttttttctattttttttacttatttacctcttttttcttctccctttttatctct

SEQ ID NO: 17686 - DNA, 96 bp, Aspergillus novofumigatus
  misc_feature: 80
ttattttttttttaaatatatatacttaatctcttcttatcttaatctaataaatataaatatatatatctattatctagactaaatcttttctag

SEQ ID NO: 17687 - DNA, 96 bp, Aspergillus novofumigatus
  misc_feature: 80
ttattctaactcttcttctaacccttactcttactctactcttactcttattctatctcttatctatctcttattctatctcttcttaatctcctc

SEQ ID NO: 17688 - DNA, 96 bp, Aspergillus novofumigatus
  misc_feature: 80
aagagagttagggtttgagtaagaaagaggtaaggagagatagaataagaattagaaggaggattagaggaagagatagaagaagggttagaataa

SEQ ID NO: 17689 - DNA, 96 bp, Aspergillus novofumigatus
  misc_feature: 80
ttattaccttgctcactgcctatcttactacctcccttactatcttacttactacctcccttactgttaaccttactatctacctcactacttatc

SEQ ID NO: 17690 - DNA, 96 bp, Aspergillus novofumigatus
  misc_feature: 80
taccaccttatactactataaagatttagattaaataattatagctaatagaggattataataatataatttatagatactatctcctatatataa

SEQ ID NO: 17691 - DNA, 96 bp, Aspergillus novofumigatus
  misc_feature: 80
ttagggagagatagaaggggagatagagggagagatagaagaaggattagaagaagagtaaggaataataagaaggagagttagaataagagttag

SEQ ID NO: 17692 - DNA, 96 bp, Aspergillus novofumigatus
  misc_feature: 80
ttaggatagttagaaggagagtaagagagatttagatagaggggttaaataagagatagaaggagagatagaaggagagatagaaggagagataga

SEQ ID NO: 17693 - DNA, 96 bp, Aspergillus novofumigatus
  misc_feature: 80
ttagagaaagaagagatagtaggagagggtaagggttagtaaggatagaagaagagttataagaagaggaagagggaggggaagagagagagaaag

SEQ ID NO: 17694 - DNA, 96 bp, Aspergillus novofumigatus
  misc_feature: 80
tacttttattctatctctaactctttccttcttcccttctattcttaactctctctttctctttcttctcctttctatccctaactcttattctaa

SEQ ID NO: 17695 - DNA, 96 bp, Aspergillus novofumigatus
  misc_feature: 80
gatagtgagggaggcagtgagtgagatagtgagggaggcagtgagtgagatagtgagggaggcagtgagcaagacagtgagcgagatagtaagtaa

SEQ ID NO: 17696 - DNA, 96 bp, Aspergillus novofumigatus
  misc_feature: 80
ttacttactacctatcttgctgcctccctcactcactcactgcctgccttacttactatcttactcactaccttacttactgcctcactccctcac

SEQ ID NO: 17697 - DNA, 96 bp, Aspergillus novofumigatus
  misc_feature: 80
ttactctatctcttactttacccctttctctatctctctcttctatctacacttactaccccttactcttattctatttcttactctccttctaac

SEQ ID NO: 17698 - DNA, 96 bp, Aspergillus novofumigatus
  misc_feature: 80
ttactacctatcttgctgcctccctcactcactcactgcctgccttacttactatcttactcactaccttacttactgcctcactccctcactatc

SEQ ID NO: 17699 - DNA, 96 bp, Aspergillus novofumigatus
  misc_feature: 80
taaggcagtgcatgagatagtgagggagatagtaagataggtagtaagataataagtaaatagataagtagggtagtaagatagtaatgcaggtaa

SEQ ID NO: 17700 - DNA, 96 bp, Aspergillus novofumigatus
  misc_feature: 80
aatcctaactttaatcctttcttcttttctctactctttcttctcttctctactctttcttctttccttttttaatcttctctcttattctattaa

SEQ ID NO: 17701 - DNA, 96 bp, Aspergillus novofumigatus
  misc_feature: 80
gtatgagatagtaagggagatagtaagataggtagtaagataataagtaaatagataagtagggtagtaagatagtaatgcaggtaaaaggcccca

SEQ ID NO: 17702 - DNA, 96 bp, Aspergillus novofumigatus
  misc_feature: 80
tgcattactatcttactaccctacttatctatttacttattatcttactacctatcttactatctcccttactatctcatacactaccttactcac

SEQ ID NO: 17703 - DNA, 96 bp, Aspergillus novofumigatus
  misc_feature: 80
taggtaagggttcacataagggttagtaagtttagagaagggaaaaggtagagatagtaagaaaaagaagatagtaagagattaagtaagggatca

SEQ ID NO: 17704 - DNA, 96 bp, Aspergillus novofumigatus
  misc_feature: 80
tgaggggggcagtgagcgagatagtgagggaggcagtgagtgagatagtgagggaggcagtgagtgagatagtgagggaggcagtgagcaagacag

SEQ ID NO: 17705 - DNA, 96 bp, Aspergillus novofumigatus
  misc_feature: 80
tgaagagagttagggtttgagtaagaaagaggtaaggagagatagaataagaattagaaggaggattagaggaagagatagaagaagggttagaat

SEQ ID NO: 17706 - DNA, 96 bp, Aspergillus novofumigatus
  misc_feature: 80
gagttaagaataagagttagaagaagagataaaaagggttagaagaagaattaggaataaaaataagaataaaaagtggaagaatagttagcaaga

SEQ ID NO: 17707 - DNA, 96 bp, Aspergillus novofumigatus
  misc_feature: 80
tcttctccctttttatctcttctctctatttctctcttaattcttactctatctcttactttacccctttctctatctctctcttctatctacact

SEQ ID NO: 17708 - DNA, 96 bp, Aspergillus novofumigatus
  misc_feature: 80
taagggttagaagaagagttagaataagagttaaggaaagagataaaagaaggattaagaagaggtagaagaagagttagaagaagagatagaaga

SEQ ID NO: 17709 - DNA, 96 bp, Aspergillus novofumigatus
  misc_feature: 80
agagggtaagggttagtaaggatagaagaagagttataagaagaggaagagggaggggaagagagagagaaagagttagagataagagttagaaga

SEQ ID NO: 17710 - DNA, 96 bp, Aspergillus novofumigatus
  misc_feature: 80
aaaagagtatataagttaatttagaaagaaaagaatagaaggtaaagatagataagatagaaagagtttaagtaaagggtaagaaagagaggaaga

SEQ ID NO: 17711 - DNA, 96 bp, Aspergillus novofumigatus
  misc_feature: 80
tcttattctaactcttcttctaacccttactcttactctactcttactcttattctatctcttatctatctcttattctatctcttcttaatctcc

SEQ ID NO: 17712 - DNA, 96 bp, Aspergillus novofumigatus
  misc_feature: 80
tcttatcttaaacttactaacccttactctattacttatccttccttactttattctccttactacctcttaccttctatctattctccttatttt

SEQ ID NO: 17713 - DNA, 96 bp, Aspergillus novofumigatus
  misc_feature: 80
gttagaagaagagttagaataagagttaaggaaagagataaaagaaggattaagaagaggtagaagaagagttagaagaagagatagaagaagaga

SEQ ID NO: 17714 - DNA, 96 bp, Aspergillus novofumigatus
  misc_feature: 80
tctctcttattattaccttttattttcttttcttttctattccctttcctcttccctttcctctttcctttcctcttccctttcctcttccctttc

SEQ ID NO: 17715 - DNA, 96 bp, Aspergillus novofumigatus
  misc_feature: 80
aagaattagagaaagaagagatagtaggagagggtaagggttagtaaggatagaagaagagttataagaagaggaagagggaggggaagagagaga

SEQ ID NO: 17716 - DNA, 96 bp, Aspergillus novofumigatus
  misc_feature: 80
aagagttagaataagagttaaggaaagagataaaagaaggattaagaagaggtagaagaagagttagaagaagagatagaagaagagattaggaga

SEQ ID NO: 17717 - DNA, 96 bp, Aspergillus novofumigatus
  misc_feature: 80
tctattttttttacttatttacctcttttttcttctccctttttatctcttctctctatttctctcttaattcttactctatctcttactttacct

SEQ ID NO: 17718 - DNA, 96 bp, Aspergillus novofumigatus
  misc_feature: 80
tccttctcttctcctctcttctttctatctttattctaaatccttctctcttcctaaatccttctaaatccttattttcctatatctatctatccc

SEQ ID NO: 17719 - DNA, 96 bp, Aspergillus novofumigatus
  misc_feature: 80
tccttctaactatcctaacctctcctaatctcttcttctatctcttcttctaactctccttctacctctccttaatccttcttttattaactctta

SEQ ID NO: 17720 - DNA, 96 bp, Aspergillus novofumigatus
  misc_feature: 80
tcctaacccttattctctctcttattattaccttttattttcttttcttttctattccctttcctcttccctttcctcttccctttcctcttccct

SEQ ID NO: 17721 - DNA, 96 bp, Aspergillus novofumigatus
  misc_feature: 80
ggggggcagtgagcgagatagtgagggaggcagtgagtgagatagtgagggaggcagtgagtgagatagtgagggaggcagtgagcaagacagtga

SEQ ID NO: 17722 - DNA, 96 bp, Aspergillus novofumigatus
  misc_feature: 80
tattttttttacttatttacctcttttttcttctccctttttatctcttctctctatttctctcttaattcttactctatctcttactttacctct

SEQ ID NO: 17723 - DNA, 96 bp, Aspergillus novofumigatus
  misc_feature: 80
tattttattcctaacccttattctctctcttattattaccttttattttcttttcttttctattccctttcctcttccctttcctctttcctttcc

SEQ ID NO: 17724 - DNA, 96 bp, Aspergillus novofumigatus
  misc_feature: 80
tatttctctcttaattcttactctatctcttactttacccctttctctatctctctcttctatctacacttactaccccttactcttattctattt

SEQ ID NO: 17725 - DNA, 96 bp, Aspergillus novofumigatus
  misc_feature: 80
gaagagagttagggtttgagtaagaaagaggtaaggagagatagaataagaattagaaggaggattagaggaagagatagaagaagggttagaata

SEQ ID NO: 17726 - DNA, 96 bp, Aspergillus novofumigatus
  misc_feature: 80
tattattaccttttattttcttttcttttctattccctttcctcttccctttcctctttcctttcctcttccctttcctcttccctttcttcttct

SEQ ID NO: 17727 - DNA, 96 bp, Aspergillus novofumigatus
  misc_feature: 80
tattaaatcctaactttaatcctttcttcttttctctactctttcttctcttctctactctttcttctttccttttttaatcttctctcttattct

SEQ ID NO: 17728 - DNA, 96 bp, Aspergillus novofumigatus
  misc_feature: 80
accttatactactataaagatttagattaaataattatagctaatagaggattataataatataatttatagatactatctcctatatataagata

SEQ ID NO: 17729 - DNA, 96 bp, Aspergillus novofumigatus
  misc_feature: 80
gacagggagtgagtaaggcagtgcatgagatagtgagggagatagtaagataggtagtaagataataagtaaatagataagtagggtagtaagata

SEQ ID NO: 17730 - DNA, 96 bp, Aspergillus novofumigatus
  misc_feature: 80
ggttaggatagttagaaggagagtaagagagatttagatagaggggttaaataagagatagaaggagagatagaaggagagatagaaggagagata

SEQ ID NO: 17731 - DNA, 96 bp, Aspergillus novofumigatus
  misc_feature: 80
aaggagagatagaaggagagatagaaggagagttagaaggagagttagaaggagagtaagaaatagaataagagtaaggggtagtaagtgtagata

SEQ ID NO: 17732 - DNA, 96 bp, Aspergillus novofumigatus
  misc_feature: 80
tataataataatagtataataatctatatagttataataataacttagtaataataagaatagaaataataggatgctattagacttttagtaagt

SEQ ID NO: 17733 - DNA, 96 bp, Aspergillus novofumigatus
  misc_feature: 80
aggatttagaataaagatagaaagaagagaggagaagagaaggaaataagttataggatattaatttagagagatttaagtaggtataaggttata

SEQ ID NO: 17734 - DNA, 96 bp, Aspergillus novofumigatus
  misc_feature: 80
tataaaaagtagcatagaaatactatatatcctaatcatatacctatataaagtgctataagctatatataactatataggttaccctagctttac

SEQ ID NO: 17735 - DNA, 96 bp, Aspergillus novofumigatus
  misc_feature: 80
tagttaccttatattattataaataactaggtatactatctaaatttaaaataataagtatatactatataaatatttaatatatttataacttag

SEQ ID NO: 17736 - DNA, 96 bp, Aspergillus novofumigatus
  misc_feature: 80
acttactacctatcttgctgcctccctcactcactcactgcctgccttacttactatcttactcactaccttacttactgcctcactccctcacta

SEQ ID NO: 17737 - DNA, 96 bp, Aspergillus novofumigatus
  misc_feature: 80
gtctaatagcatcctattatttctattcttattattactaagttattattataactatatagattattatactattattattatattaagatacta

SEQ ID NO: 17738 - DNA, 96 bp, Aspergillus novofumigatus
  misc_feature: 80
tagctaacatactctataaactaactgtataatatatatctctgcgtattatggtatcctaaaatgtatatattcatttatatattactactgatt

SEQ ID NO: 17739 - DNA, 96 bp, Aspergillus novofumigatus
  misc_feature: 80
tagagagggaggtatttagtaaaataaggagaatagatagaaggtaagaggtagtaaggagaataaagtaaggaaggataagtaatagagtaaggg

SEQ ID NO: 17740 - DNA, 96 bp, Aspergillus novofumigatus
  misc_feature: 80
ctaactatcctaacctctcctaatctcttcttctatctcttcttctaactctccttctacctctccttaatccttcttttattaactcttattcta

SEQ ID NO: 17741 - DNA, 96 bp, Aspergillus novofumigatus
  misc_feature: 80
attaaatcctaactttaatcctttcttcttttctctactctttcttctcttctctactctttcttctttccttttttaatcttctctcttattcta

SEQ ID NO: 17742 - DNA, 96 bp, Aspergillus novofumigatus
  misc_feature: 80
tagaaggagagatagaaggagagatagaaggagagttagaaggagagttagaaggagagtaagaaatagaataagagtaaggggtagtaagtgtag

SEQ ID NO: 17743 - DNA, 96 bp, Aspergillus novofumigatus
  misc_feature: 80
tactttacccctttctctatctctctcttctatctacacttactaccccttactcttattctatttcttactctccttctaactctccttctaact

SEQ ID NO: 17744 - DNA, 96 bp, Aspergillus novofumigatus
  misc_feature: 80
agatagtgagggaggcagtgagtgagatagtgagggaggcagtgagtgagatagtgagggaggcagtgagcaagacagtgagcgagatagtaagta

SEQ ID NO: 17745 - DNA, 96 bp, Aspergillus novofumigatus
  misc_feature: 80
ataataataatagtataataatctatatagttataataataacttagtaataataagaatagaaataataggatgctattagacttttagtaagta

SEQ ID NO: 17746 - DNA, 96 bp, Aspergillus novofumigatus
  misc_feature: 80
tactctccttctaactatcctaacctctcctaatctcttcttctatctcttcttctaactctccttctacctctccttaatccttcttttattaac

SEQ ID NO: 17747 - DNA, 96 bp, Aspergillus novofumigatus
  misc_feature: 80
aggttgatcagcattaatatattaataaatgaatatatatatttcaggataccataatgcgcagagatatatattatacatttagtttatagagta

SEQ ID NO: 17748 - DNA, 96 bp, Aspergillus novofumigatus
  misc_feature: 80
gaagaaagagaagaagaaattaaaattaaggaaagataaaattaaaagaaaaggataaagttaaataataatttaatagaatgaattaggaatgta

SEQ ID NO: 17749 - DNA, 96 bp, Aspergillus novofumigatus
  misc_feature: 80
taattcttactctatctcttactttacccctttctctatctctctcttctatctacacttactaccccttactcttattctatttcttactctcct

SEQ ID NO: 17750 - DNA, 96 bp, Aspergillus novofumigatus
  misc_feature: 80
acctctttaacctacctccttctaatatataatctatagattatatattacctatattataaactagcaataacatacactataataatataatta

SEQ ID NO: 17751 - DNA, 96 bp, Aspergillus novofumigatus
  misc_feature: 80
agacagtaaggtagatagtaagatagatagtaaggtagacagtaagatagatagtgtagtcaatagtaaggtaggtaataaggtagatagtaatta

SEQ ID NO: 17752 - DNA, 96 bp, Aspergillus novofumigatus
  misc_feature: 80
agtgagggagatagtaagataggtagtaagataataagtaaatagataagtagggtagtaagatagtaatgcaggtaaaaggccccaaggagatta

SEQ ID NO: 17753 - DNA, 96 bp, Aspergillus novofumigatus
  misc_feature: 80
agtaagggagatagtaagataggtagtaagataataagtaaatagataagtagggtagtaagatagtaatgcaggtaaaaggccccagggagatta

SEQ ID NO: 17754 - DNA, 96 bp, Aspergillus novofumigatus
  misc_feature: 80
gtaggagagggtaagggttagtaaggatagaagaagagttataagaagaggaagagggaggggaagagagagagaaagagttagagataagagtta

SEQ ID NO: 17755 - DNA, 96 bp, Aspergillus novofumigatus
  misc_feature: 80
ctataaaaagtagcatagaaatactatatatcctaatcatatacctatataaagtgctataagctatatataactatataggttaccctagcttta

SEQ ID NO: 17756 - DNA, 96 bp, Aspergillus novofumigatus
  misc_feature: 80
gttaggatagttagaaggagagtaagagagatttagatagaggggttaaataagagatagaaggagagatagaaggagagatagaaggagagatag

SEQ ID NO: 17757 - DNA, 96 bp, Aspergillus novofumigatus
  misc_feature: 80
gttagaagaagagataaaaagggttagaagaagaattaggaataaaaataagaataaaaagtggaagaatagttagcaagagtattgaagagagtt

SEQ ID NO: 17758 - DNA, 96 bp, Aspergillus novofumigatus
  misc_feature: 80
atttataattactatctaccttattacctaccttactattgactacactatctatcttactgtctaccttactatctatcttactatctaccttac

SEQ ID NO: 17759 - DNA, 96 bp, Aspergillus novofumigatus
  misc_feature: 80
gtaagggttagaagaagagttagaataagagttaaggaaagagataaaagaaggattaagaagaggtagaagaagagttagaagaagagatagaag

SEQ ID NO: 17760 - DNA, 96 bp, Aspergillus novofumigatus
  misc_feature: 80
gtaagggagatagtaagataggtagtaagataataagtaaatagataagtagggtagtaagatagtaatgcaggtaaaaggccccagggagattat

SEQ ID NO: 17761 - DNA, 96 bp, Aspergillus novofumigatus
  misc_feature: 80
ggttgatcagcattaatatattaataaatgaatatatatatttcaggataccataatgcgcagagatatatattatacatttagtttatagagtat

SEQ ID NO: 17762 - DNA, 96 bp, Aspergillus novofumigatus
  misc_feature: 80
ggttagaagaagagttagaataagagttaaggaaagagataaaagaaggattaagaagaggtagaagaagagttagaagaagagatagaagaagag

SEQ ID NO: 17763 - DNA, 96 bp, Aspergillus novofumigatus
  misc_feature: 80
ggcgcgcgcgccccgggggtgaccagttggcggggacccttgggggggggcagaccggcaggcgggcaggagggaggccagggggccggcgccggt

SEQ ID NO: 17764 - DNA, 96 bp, Aspergillus novofumigatus
  misc_feature: 80
ggatttagaataaagatagaaagaagagaggagaagagaaggaaataagttataggatattaatttagagagatttaagtaggtataaggttatag

SEQ ID NO: 17765 - DNA, 96 bp, Aspergillus novofumigatus
  misc_feature: 80
gcagtgcatgagatagtgagggagatagtaagataggtagtaagataataagtaaatagataagtagggtagtaagatagtaatgcaggtaaaagg

SEQ ID NO: 17766 - DNA, 96 bp, Aspergillus novofumigatus
  misc_feature: 80
gatcagcattaatatattaataaatgaatatatatatttcaggataccataatgcgcagagatatatattatacatttagtttatagagtatgttg

SEQ ID NO: 17767 - DNA, 96 bp, Aspergillus novofumigatus
  misc_feature: 80
gatagtaagataggtagtaagataataagtaaatagataagtagggtagtaagatagtaatgcaggtaaaaggccccaaggagattatatatcagg

SEQ ID NO: 17768 - DNA, 96 bp, Aspergillus novofumigatus
  misc_feature: 80
cttttttcttctccctttttatctcttctctctatttctctcttaattcttactctatctcttactttacccctttctctatctctctcttctatc

SEQ ID NO: 17769 - DNA, 96 bp, Aspergillus novofumigatus
  misc_feature: 80
gagtgagtaaggcagtgcatgagatagtgagggagatagtaagataggtagtaagataataagtaaatagataagtagggtagtaagatagtaatg

SEQ ID NO: 17770 - DNA, 96 bp, Aspergillus novofumigatus
  misc_feature: 80
gaggggggcagtgagcgagatagtgagggaggcagtgagtgagatagtgagggaggcagtgagtgagatagtgagggaggcagtgagcaagacagt

SEQ ID NO: 17771 - DNA, 96 bp, Aspergillus novofumigatus
  misc_feature: 80
ctcttattctaactcttcttctaacccttactcttactctactcttactcttattctatctcttatctatctcttattctatctcttcttaatctc

SEQ ID NO: 17772 - DNA, 96 bp, Aspergillus novofumigatus
  misc_feature: 80
cttaattcttactctatctcttactttacccctttctctatctctctcttctatctacacttactaccccttactcttattctatttcttactctc

SEQ ID NO: 17773 - DNA, 96 bp, Aspergillus novofumigatus
  misc_feature: 80
gagagggtaagggttagtaaggatagaagaagagttataagaagaggaagagggaggggaagagagagagaaagagttagagataagagttagaag

SEQ ID NO: 17774 - DNA, 96 bp, Aspergillus novofumigatus
  misc_feature: 80
gaagagttagaataagagttaaggaaagagataaaagaaggattaagaagaggtagaagaagagttagaagaagagatagaagaagagattaggag

SEQ ID NO: 17775 - DNA, 96 bp, Aspergillus novofumigatus
  misc_feature: 80
ccctatatccttattccaccctgacctttcttcttcttcttttttctattttttttacttatttacctcttttttcttctccctttttatctcttc

SEQ ID NO: 17776 - DNA, 96 bp, Aspergillus novofumigatus
  misc_feature: 80
ctattttattcctaacccttattctctctcttattattaccttttattttcttttcttttctattccctttcctcttccctttcctctttcctttc

SEQ ID NO: 17777 - DNA, 96 bp, Aspergillus novofumigatus
  misc_feature: 80
atgagatagtgagggagatagtaagataggtagtaagataataagtaaatagataagtagggtagtaagatagtaatgcaggtaaaaggccccaag

SEQ ID NO: 17778 - DNA, 96 bp, Aspergillus novofumigatus
  misc_feature: 80
atagtgagtgagatagtgagggaggcagtaagtaagacagtgagggaggcagtgagtgagatagtgagggagtgaggcagtgagtaaggcagcaag

SEQ ID NO: 17779 - DNA, 96 bp, Aspergillus novofumigatus
  misc_feature: 80
cttattctaactcttcttctaacccttactcttactctactcttactcttattctatctcttatctatctcttattctatctcttcttaatctcct

SEQ ID NO: 17780 - DNA, 96 bp, Aspergillus novofumigatus
  misc_feature: 80
agatagaaggagagatagaaggagagatagaaggagagatagaaggagagttagaaggagagttagaaggagagtaagaaatagaataagagtaag

SEQ ID NO: 17781 - DNA, 96 bp, Aspergillus novofumigatus
  misc_feature: 80
cttactacctatcttgctgcctccctcactcactcactgcctgccttacttactatcttactcactaccttacttactgcctcactccctcactat

SEQ ID NO: 17782 - DNA, 96 bp, Aspergillus novofumigatus
  misc_feature: 80
agatagtaagataggtagtaagataataagtaaatagataagtagggtagtaagatagtaatgcaggtaaaaggccccagggagattatatatcag

SEQ ID NO: 17783 - DNA, 96 bp, Aspergillus novofumigatus
  misc_feature: 80
ctcttactttacccctttctctatctctctcttctatctacacttactaccccttactcttattctatttcttactctccttctaactctccttct

SEQ ID NO: 17784 - DNA, 96 bp, Aspergillus novofumigatus
  misc_feature: 80
agaattagagaaagaagagatagtaggagagggtaagggttagtaaggatagaagaagagttataagaagaggaagagggaggggaagagagagag

SEQ ID NO: 17785 - DNA, 96 bp, Aspergillus novofumigatus
  misc_feature: 80
ctctatctcttactttacccctttctctatctctctcttctatctacacttactaccccttactcttattctatttcttactctccttctaactct

SEQ ID NO: 17786 - DNA, 96 bp, Aspergillus novofumigatus
  misc_feature: 80
ctctaaatttctcttattttttttttaaatatatatacttaatctcttcttatcttaatctaataaatataaatatatatatctattatctagact

SEQ ID NO: 17787 - DNA, 96 bp, Aspergillus novofumigatus
  misc_feature: 80
atagtgagggaggcagtgagtgagatagtaagtaagatagtgagggaggtagtgagtaagacagtgagtgagatagtaagtaaggcagtgagtgag

SEQ ID NO: 17788 - DNA, 96 bp, Aspergillus novofumigatus
  misc_feature: 80
ctatttctctcttaattcttactctatctcttactttacccctttctctatctctctcttctatctacacttactaccccttactcttattctatt

SEQ ID NO: 17789 - DNA, 96 bp, Aspergillus novofumigatus
  misc_feature: 80
ctactataaaaagtagcatagaaatactatatatcctaatcatatacctatataaagtgctataagctatatataactatataggttaccctagct

SEQ ID NO: 17790 - DNA, 96 bp, Aspergillus novofumigatus
  misc_feature: 80
cctggggccttttacctgcattactatcttactaccctacttatctatttacttattatcttactacctatcttactatctcccttactatctcat

SEQ ID NO: 17791 - DNA, 96 bp, Aspergillus novofumigatus
  misc_feature: 80
cctaacccttattctctctcttattattaccttttattttcttttcttttctattccctttcctcttccctttcctcttccctttcctcttccctt

SEQ ID NO: 17792 - DNA, 96 bp, Aspergillus novofumigatus
  misc_feature: 80
cccttacttttattctatctctaactctttccttcttcccttctattcttaactctctctttctctttcttctcctttctatccctaactcttatt

SEQ ID NO: 17793 - DNA, 96 bp, Aspergillus novofumigatus
  misc_feature: 80
cccttactgtcttgcttgctgcctccctcactatctcactcactatctcactcactgccttacttactatctcactcactgtcttactcactacct

SEQ ID NO: 17794 - DNA, 96 bp, Aspergillus novofumigatus
  misc_feature: 80
agatagaaggagagatagaaggagagatagaaggagagttagaaggagagttagaaggagagtaagaaatagaataagagtaaggggtagtaagtg

SEQ ID NO: 17795 - DNA, 96 bp, Aspergillus novofumigatus
  misc_feature: 80
cactcactcactgcctgccttacttactatcttactcactaccttacttactgcctcactccctcactatctcacttactacctcccttactgtct

SEQ ID NO: 17796 - DNA, 96 bp, Aspergillus novofumigatus
  misc_feature: 80
caccttatactactataaagatttagattaaataattatagctaatagaggattataataatataatttatagatactatctcctatatataagat

SEQ ID NO: 17797 - DNA, 96 bp, Aspergillus novofumigatus
  misc_feature: 80
agatagtaaggtagacagtaaggtagacagtaaggtagacagtaaggtagatagtaaggtagatagtaaggtggacagtaaaataggcagtaagat

SEQ ID NO: 17798 - DNA, 96 bp, Aspergillus novofumigatus
  misc_feature: 80
atctcttactttacccctttctctatctctctcttctatctacacttactaccccttactcttattctatttcttactctccttctaactctcctt

SEQ ID NO: 17799 - DNA, 96 bp, Aspergillus novofumigatus
  misc_feature: 80
ataaaaagtagcatagaaatactatatatcctaatcatatacctatataaagtgctataagctatatataactatataggttaccctagctttact

SEQ ID NO: 17800 - DNA, 96 bp, Aspergillus novofumigatus
  misc_feature: 80
agttagaagaagagataaaaagggttagaagaagaattaggaataaaaataagaataaaaagtggaagaatagttagcaagagtattgaagagagt

SEQ ID NO: 17801 - DNA, 96 bp, Aspergillus novofumigatus
  misc_feature: 80
aggtatttagtaaaataaggagaatagatagaaggtaagaggtagtaaggagaataaagtaaggaaggataagtaatagagtaagggttagtaagt

SEQ ID NO: 17802 - DNA, 96 bp, Aspergillus novofumigatus
  misc_feature: 80
aacttaataacccttacttttattctatctctaactctttccttcttcccttctattcttaactctctctttctctttcttctcctttctatccct

SEQ ID NO: 17803 - DNA, 96 bp, Aspergillus novofumigatus
  misc_feature: 80
aggagagatagaaggagagatagaaggagagatagaaggagagttagaaggagagttagaaggagagtaagaaatagaataagagtaaggggtagt

SEQ ID NO: 17804 - DNA, 96 bp, Aspergillus novofumigatus
  misc_feature: 80
actcactcactgcctgccttacttactatcttactcactaccttacttactgcctcactccctcactatctcacttactacctcccttactgtctt

SEQ ID NO: 17805 - DNA, 96 bp, Aspergillus novofumigatus
  misc_feature: 79
ttttttttttaaatatatatacttaatctcttcttatcttaatctaataaatataaatatatatatctattatctagactaaatcttttctagtaa

SEQ ID NO: 17806 - DNA, 96 bp, Aspergillus novofumigatus
  misc_feature: 79
tttttcttctccctttttatctcttctctctatttctctcttaattcttactctatctcttactttacccctttctctatctctctcttctatcta

SEQ ID NO: 17807 - DNA, 96 bp, Aspergillus novofumigatus
  misc_feature: 79
tttctctcttaattcttactctatctcttactttacccctttctctatctctctcttctatctacacttactaccccttactcttattctatttct

SEQ ID NO: 17808 - DNA, 96 bp, Aspergillus novofumigatus
  misc_feature: 79
tttctattttattcctaacccttattctctctcttattattaccttttattttcttttcttttctattccctttcctcttccctttcctctttcct

SEQ ID NO: 17809 - DNA, 96 bp, Aspergillus novofumigatus
  misc_feature: 79
tttataattactatctaccttattacctaccttactattgactacactatctatcttactgtctaccttactatctatcttactatctaccttact

SEQ ID NO: 17810 - DNA, 96 bp, Aspergillus novofumigatus
  misc_feature: 79
ttattattaccttttattttcttttcttttctattccctttcctcttccctttcctctttcctttcctcttccctttcctcttccctttcttcttc

SEQ ID NO: 17811 - DNA, 96 bp, Aspergillus novofumigatus
  misc_feature: 79
ttatattattataaataactaggtatactatctaaatttaaaataataagtatatactatataaatatttaatatatttataacttagctattata

SEQ ID NO: 17812 - DNA, 96 bp, Aspergillus novofumigatus
  misc_feature: 79
agagagaaggatttagaataaagatagaaagaagagaggagaagagaaggaaataagttataggatattaatttagagagatttaagtaggtataa

SEQ ID NO: 17813 - DNA, 96 bp, Aspergillus novofumigatus
  misc_feature: 79
ttataccaccttatactactataaagatttagattaaataattatagctaatagaggattataataatataatttatagatactatctcctatata

SEQ ID NO: 17814 - DNA, 96 bp, Aspergillus novofumigatus
  misc_feature: 79
ccagctagttaccttatattattataaataactaggtatactatctaaatttaaaataataagtatatactatataaatatttaatatatttataa

SEQ ID NO: 17815 - DNA, 96 bp, Aspergillus novofumigatus
  misc_feature: 79
ttataaataactaggtatactatctaaatttaaaataataagtatatactatataaatatttaatatatttataacttagctattatactacctag

SEQ ID NO: 17816 - DNA, 96 bp, Aspergillus novofumigatus
  misc_feature: 79
ttagtgaggggggcagtgagcgagatagtgagggaggcagtgagtgagatagtgagggaggcagtgagtgagatagtgagggaggcagtgagcaag

SEQ ID NO: 17817 - DNA, 96 bp, Aspergillus novofumigatus
  misc_feature: 79
ttagctaacatactctataaactaactgtataatatatatctctgcgtattatggtatcctaaaatgtatatattcatttatatattactactgat

SEQ ID NO: 17818 - DNA, 96 bp, Aspergillus novofumigatus
  misc_feature: 79
cttactttacccctttctctatctctctcttctatctacacttactaccccttactcttattctatttcttactctccttctaactctccttctaa

SEQ ID NO: 17819 - DNA, 96 bp, Aspergillus novofumigatus
  misc_feature: 79
gagatagaaggagagatagaaggagagatagaaggagagatagaaggagagttagaaggagagttagaaggagagtaagaaatagaataagagtaa

SEQ ID NO: 17820 - DNA, 96 bp, Aspergillus novofumigatus
  misc_feature: 79
ttaccttatattattataaataactaggtatactatctaaatttaaaataataagtatatactatataaatatttaatatatttataacttagcta

SEQ ID NO: 17821 - DNA, 96 bp, Aspergillus novofumigatus
  misc_feature: 79
ttacctgcattactatcttactaccctacttatctatttacttattatcttactacctatcttactatctcccttactatctcatacactacctta

SEQ ID NO: 17822 - DNA, 96 bp, Aspergillus novofumigatus
  misc_feature: 79
ataagggttagtaagtttagagaagggaaaaggtagagatagtaagaaaaagaagatagtaagagattaagtaagggatcatataagggtttgtaa

SEQ ID NO: 17823 - DNA, 96 bp, Aspergillus novofumigatus
  misc_feature: 79
ttaaatatatatacttaatctcttcttatcttaatctaataaatataaatatatatatctattatctagactaaatcttttctagtaactaaatct

SEQ ID NO: 17824 - DNA, 96 bp, Aspergillus novofumigatus
  misc_feature: 79
ttaaataaaccagctagttaccttatattattataaataactaggtatactatctaaatttaaaataataagtatatactatataaatatttaata

SEQ ID NO: 17825 - DNA, 96 bp, Aspergillus novofumigatus
  misc_feature: 79
ttaaacttactaacccttactctattacttatccttccttactttattctccttactacctcttaccttctatctattctccttattttactaaat

SEQ ID NO: 17826 - DNA, 96 bp, Aspergillus novofumigatus
  misc_feature: 79
agatagtgagtgagatagtgagggaggcagtaagtaagacagtgagggaggcagtgagtgagatagtgagggagtgaggcagtgagtaaggcagca

SEQ ID NO: 17827 - DNA, 96 bp, Aspergillus novofumigatus
  misc_feature: 79
tgagcgagatagtgagggaggcagtgagtgagatagtgagggaggcagtgagtgagatagtgagggaggcagtgagcaagacagtgagcgagatag

SEQ ID NO: 17828 - DNA, 96 bp, Aspergillus novofumigatus
  misc_feature: 79
tcttttttcttctccctttttatctcttctctctatttctctcttaattcttactctatctcttactttacccctttctctatctctctcttctat

SEQ ID NO: 17829 - DNA, 96 bp, Aspergillus novofumigatus
  misc_feature: 79
taagagttagaagaagagataaaaagggttagaagaagaattaggaataaaaataagaataaaaagtggaagaatagttagcaagagtattgaaga

SEQ ID NO: 17830 - DNA, 96 bp, Aspergillus novofumigatus
  misc_feature: 79
ccaccttatactactataaagatttagattaaataattatagctaatagaggattataataatataatttatagatactatctcctatatataaga

SEQ ID NO: 17831 - DNA, 96 bp, Aspergillus novofumigatus
  misc_feature: 79
tcttaattcttactctatctcttactttacccctttctctatctctctcttctatctacacttactaccccttactcttattctatttcttactct

SEQ ID NO: 17832 - DNA, 96 bp, Aspergillus novofumigatus
  misc_feature: 79
agagttagaagaagagataaaaagggttagaagaagaattaggaataaaaataagaataaaaagtggaagaatagttagcaagagtattgaagaga

SEQ ID NO: 17833 - DNA, 96 bp, Aspergillus novofumigatus
  misc_feature: 79
gatagtgagggagatagtaagataggtagtaagataataagtaaatagataagtagggtagtaagatagtaatgcaggtaaaaggccccaaggaga

SEQ ID NO: 17834 - DNA, 96 bp, Aspergillus novofumigatus
  misc_feature: 79
cagtgagtgagatagtaagtaagatagtgagggaggtagtgagtaagacagtgagtgagatagtaagtaaggcagtgagtgagatagtgagtgaga

SEQ ID NO: 17835 - DNA, 96 bp, Aspergillus novofumigatus
  misc_feature: 79
tctatttctctcttaattcttactctatctcttactttacccctttctctatctctctcttctatctacacttactaccccttactcttattctat

SEQ ID NO: 17836 - DNA, 96 bp, Aspergillus novofumigatus
  misc_feature: 79
aataataatagtataataatctatatagttataataataacttagtaataataagaatagaaataataggatgctattagacttttagtaagtaga

SEQ ID NO: 17837 - DNA, 96 bp, Aspergillus novofumigatus
  misc_feature: 79
tctaatagcatcctattatttctattcttattattactaagttattattataactatatagattattatactattattattatattaagatactat

SEQ ID NO: 17838 - DNA, 96 bp, Aspergillus novofumigatus
  misc_feature: 79
atagagagaagagataaaaagggagaagaaaaaagaggtaaataagtaaaaaaaatagaaaaaagaagaagaagaaaggtcagggtggaataagga

SEQ ID NO: 17839 - DNA, 96 bp, Aspergillus novofumigatus
  misc_feature: 79
gatagtgagggaggcagtgagtgagatagtaagtaagatagtgagggaggtagtgagtaagacagtgagtgagatagtaagtaaggcagtgagtga

SEQ ID NO: 17840 - DNA, 96 bp, Aspergillus novofumigatus
  misc_feature: 79
tcactcactgcctgccttacttactatcttactcactaccttacttactgcctcactccctcactatctcacttactacctcccttactgtcttgc

SEQ ID NO: 17841 - DNA, 96 bp, Aspergillus novofumigatus
  misc_feature: 79
tattttttttttaaatatatatacttaatctcttcttatcttaatctaataaatataaatatatatatctattatctagactaaatcttttctagt

SEQ ID NO: 17842 - DNA, 96 bp, Aspergillus novofumigatus
  misc_feature: 79
tatttccttctcttctcctctcttctttctatctttattctaaatccttctctcttcctaaatccttctaaatccttattttcctatatctatcta

SEQ ID NO: 17843 - DNA, 96 bp, Aspergillus novofumigatus
  misc_feature: 79
tattaccttgctcactgcctatcttactacctcccttactatcttacttactacctcccttactgttaaccttactatctacctcactacttatct

SEQ ID NO: 17844 - DNA, 96 bp, Aspergillus novofumigatus
  misc_feature: 79
tatattattataaataactaggtatactatctaaatttaaaataataagtatatactatataaatatttaatatatttataacttagctattatac

SEQ ID NO: 17845 - DNA, 96 bp, Aspergillus novofumigatus
  misc_feature: 79
ataccaccttatactactataaagatttagattaaataattatagctaatagaggattataataatataatttatagatactatctcctatatata

SEQ ID NO: 17846 - DNA, 96 bp, Aspergillus novofumigatus
  misc_feature: 79
tataccaccttatactactataaagatttagattaaataattatagctaatagaggattataataatataatttatagatactatctcctatatat

SEQ ID NO: 17847 - DNA, 96 bp, Aspergillus novofumigatus
  misc_feature: 79
tataaataactaggtatactatctaaatttaaaataataagtatatactatataaatatttaatatatttataacttagctattatactacctagg

SEQ ID NO: 17848 - DNA, 96 bp, Aspergillus novofumigatus
  misc_feature: 79
agatcaggttgatcagcattaatatattaataaatgaatatatatatttcaggataccataatgcgcagagatatatattatacatttagtttata

SEQ ID NO: 17849 - DNA, 96 bp, Aspergillus novofumigatus
  misc_feature: 79
tagttataccaccttatactactataaagatttagattaaataattatagctaatagaggattataataatataatttatagatactatctcctat

SEQ ID NO: 17850 - DNA, 96 bp, Aspergillus novofumigatus
  misc_feature: 79
tagtgtatgagatagtaagggagatagtaagataggtagtaagataataagtaaatagataagtagggtagtaagatagtaatgcaggtaaaaggc

SEQ ID NO: 17851 - DNA, 96 bp, Aspergillus novofumigatus
  misc_feature: 79
tagtgagggagatagtaagataggtagtaagataataagtaaatagataagtagggtagtaagatagtaatgcaggtaaaaggccccaaggagatt

SEQ ID NO: 17852 - DNA, 96 bp, Aspergillus novofumigatus
  misc_feature: 79
tacctactataaaaagtagcatagaaatactatatatcctaatcatatacctatataaagtgctataagctatatataactatataggttacccta

SEQ ID NO: 17853 - DNA, 96 bp, Aspergillus novofumigatus
  misc_feature: 79
tagagagtaagtaaggcagtgcatgagatagtaagggagatagtaagataggtagtaagataataagtaaatagataagtagggtagtaagatagt

SEQ ID NO: 17854 - DNA, 96 bp, Aspergillus novofumigatus
  misc_feature: 79
tagagagaagagataaaaagggagaagaaaaaagaggtaaataagtaaaaaaaatagaaaaaagaagaagaagaaaggtcagggtggaataaggat

SEQ ID NO: 17855 - DNA, 96 bp, Aspergillus novofumigatus
  misc_feature: 79
attttttttttaaatatatatacttaatctcttcttatcttaatctaataaatataaatatatatatctattatctagactaaatcttttctagta

SEQ ID NO: 17856 - DNA, 96 bp, Aspergillus novofumigatus
  misc_feature: 79
cataagggttagtaagtttagagaagggaaaaggtagagatagtaagaaaaagaagatagtaagagattaagtaagggatcatataagggtttgta

SEQ ID NO: 17857 - DNA, 96 bp, Aspergillus novofumigatus
  misc_feature: 79
agaagaagagttagaataagagttaaggaaagagataaaagaaggattaagaagaggtagaagaagagttagaagaagagatagaagaagagatta

SEQ ID NO: 17858 - DNA, 96 bp, Aspergillus novofumigatus
  misc_feature: 79
taatctcttcttatcttaatctaataaatataaatatatatatctattatctagactaaatcttttctagtaactaaatctaattattatctagct

SEQ ID NO: 17859 - DNA, 96 bp, Aspergillus novofumigatus
  misc_feature: 79
taataataatagtataataatctatatagttataataataacttagtaataataagaatagaaataataggatgctattagacttttagtaagtag

SEQ ID NO: 17860 - DNA, 96 bp, Aspergillus novofumigatus
  misc_feature: 79
ccttattaccttgctcactgcctatcttactacctcccttactatcttacttactacctcccttactgttaaccttactatctacctcactactta

SEQ ID NO: 17861 - DNA, 96 bp, Aspergillus novofumigatus
  misc_feature: 79
aacccttacttttattctatctctaactctttccttcttcccttctattcttaactctctctttctctttcttctcctttctatccctaactctta

SEQ ID NO: 17862 - DNA, 96 bp, Aspergillus novofumigatus
  misc_feature: 79
ctaataccctctatctcttttactaactctccttcttcttctaactcttatctctaactctttctctctctcttcccctccctcttcctcttctta

SEQ ID NO: 17863 - DNA, 96 bp, Aspergillus novofumigatus
  misc_feature: 79
gttagggagagatagaaggggagatagagggagagatagaagaaggattagaagaagagtaaggaataataagaaggagagttagaataagagtta

SEQ ID NO: 17864 - DNA, 96 bp, Aspergillus novofumigatus
  misc_feature: 79
gaaggatttagaataaagatagaaagaagagaggagaagagaaggaaataagttataggatattaatttagagagatttaagtaggtataaggtta

SEQ ID NO: 17865 - DNA, 96 bp, Aspergillus novofumigatus
  misc_feature: 79
taacccttacttttattctatctctaactctttccttcttcccttctattcttaactctctctttctctttcttctcctttctatccctaactctt

SEQ ID NO: 17866 - DNA, 96 bp, Aspergillus novofumigatus
  misc_feature: 79
taaatcctaactttaatcctttcttcttttctctactctttcttctcttctctactctttcttctttccttttttaatcttctctcttattctatt

SEQ ID NO: 17867 - DNA, 96 bp, Aspergillus novofumigatus
  misc_feature: 79
taaataaaccagctagttaccttatattattataaataactaggtatactatctaaatttaaaataataagtatatactatataaatatttaatat

SEQ ID NO: 17868 - DNA, 96 bp, Aspergillus novofumigatus
  misc_feature: 79
cttatcttaaacttactaacccttactctattacttatccttccttactttattctccttactacctcttaccttctatctattctccttatttta

SEQ ID NO: 17869 - DNA, 96 bp, Aspergillus novofumigatus
  misc_feature: 79
gttgatcagcattaatatattaataaatgaatatatatatttcaggataccataatgcgcagagatatatattatacatttagtttatagagtatg

SEQ ID NO: 17870 - DNA, 96 bp, Aspergillus novofumigatus
  misc_feature: 79
gttataccaccttatactactataaagatttagattaaataattatagctaatagaggattataataatataatttatagatactatctcctatat

SEQ ID NO: 17871 - DNA, 96 bp, Aspergillus novofumigatus
  misc_feature: 79
cagctagttaccttatattattataaataactaggtatactatctaaatttaaaataataagtatatactatataaatatttaatatatttataac

SEQ ID NO: 17872 - DNA, 96 bp, Aspergillus novofumigatus
  misc_feature: 79
gttagtaaggatagaagaagagttataagaagaggaagagggaggggaagagagagagaaagagttagagataagagttagaagaagaaggagagt

SEQ ID NO: 17873 - DNA, 96 bp, Aspergillus novofumigatus
  misc_feature: 79
gttaccttatattattataaataactaggtatactatctaaatttaaaataataagtatatactatataaatatttaatatatttataacttagct

SEQ ID NO: 17874 - DNA, 96 bp, Aspergillus novofumigatus
  misc_feature: 79
gttaagaataagagttagaagaagagataaaaagggttagaagaagaattaggaataaaaataagaataaaaagtggaagaatagttagcaagagt

SEQ ID NO: 17875 - DNA, 96 bp, Aspergillus novofumigatus
  misc_feature: 79
ggtatttagtaaaataaggagaatagatagaaggtaagaggtagtaaggagaataaagtaaggaaggataagtaatagagtaagggttagtaagtt

SEQ ID NO: 17876 - DNA, 96 bp, Aspergillus novofumigatus
  misc_feature: 79
gggggcagtgagcgagatagtgagggaggcagtgagtgagatagtgagggaggcagtgagtgagatagtgagggaggcagtgagcaagacagtgag

SEQ ID NO: 17877 - DNA, 96 bp, Aspergillus novofumigatus
  misc_feature: 79
aaacttaataacccttacttttattctatctctaactctttccttcttcccttctattcttaactctctctttctctttcttctcctttctatccc

SEQ ID NO: 17878 - DNA, 96 bp, Aspergillus novofumigatus
  misc_feature: 79
ggcagtgcatgagatagtgagggagatagtaagataggtagtaagataataagtaaatagataagtagggtagtaagatagtaatgcaggtaaaag

SEQ ID NO: 17879 - DNA, 96 bp, Aspergillus novofumigatus
  misc_feature: 79
ggagtgagtaaggcagtgcatgagatagtgagggagatagtaagataggtagtaagataataagtaaatagataagtagggtagtaagatagtaat

SEQ ID NO: 17880 - DNA, 96 bp, Aspergillus novofumigatus
  misc_feature: 79
ggagagatagaaggagagttagaaggagagttagaaggagagtaagaaatagaataagagtaaggggtagtaagtgtagatagaagagagagatag

SEQ ID NO: 17881 - DNA, 96 bp, Aspergillus novofumigatus
  misc_feature: 79
gagatagtgagtgagatagtgagggaggcagtaagtaagacagtgagggaggcagtgagtgagatagtgagggagtgaggcagtgagtaaggcagc

SEQ ID NO: 17882 - DNA, 96 bp, Aspergillus novofumigatus
  misc_feature: 79
gctagttaccttatattattataaataactaggtatactatctaaatttaaaataataagtatatactatataaatatttaatatatttataactt

SEQ ID NO: 17883 - DNA, 96 bp, Aspergillus novofumigatus
  misc_feature: 79
cctactataaaaagtagcatagaaatactatatatcctaatcatatacctatataaagtgctataagctatatataactatataggttaccctagc

SEQ ID NO: 17884 - DNA, 96 bp, Aspergillus novofumigatus
  misc_feature: 79
gcattactatcttactaccctacttatctatttacttattatcttactacctatcttactatctcccttactatctcatacactaccttactcact

SEQ ID NO: 17885 - DNA, 96 bp, Aspergillus novofumigatus
  misc_feature: 79
agtgagtaaggcagtgcatgagatagtgagggagatagtaagataggtagtaagataataagtaaatagataagtagggtagtaagatagtaatgc

SEQ ID NO: 17886 - DNA, 96 bp, Aspergillus novofumigatus
  misc_feature: 79
gcagtgagtgagatagtaagtaagatagtgagggaggtagtgagtaagacagtgagtgagatagtaagtaaggcagtgagtgagatagtgagtgag

SEQ ID NO: 17887 - DNA, 96 bp, Aspergillus novofumigatus
  misc_feature: 79
caacatactctacaaactaactgtataatatatatctctgcgcattatggtatcctaaaatatatatattcattcattaatatatcaatgctgatc

SEQ ID NO: 17888 - DNA, 96 bp, Aspergillus novofumigatus
  misc_feature: 79
gagttagaagaagagataaaaagggttagaagaagaattaggaataaaaataagaataaaaagtggaagaatagttagcaagagtattgaagagag

SEQ ID NO: 17889 - DNA, 96 bp, Aspergillus novofumigatus
  misc_feature: 79
gagatcaggttgatcagcattaatatattaataaatgaatatatatatttcaggataccataatgcgcagagatatatattatacatttagtttat

SEQ ID NO: 17890 - DNA, 96 bp, Aspergillus novofumigatus
  misc_feature: 79
gagatagtgagggaggcagtgagtgagatagtgagggaggcagtgagtgagatagtgagggaggcagtgagcaagacagtgagcgagatagtaagt

SEQ ID NO: 17891 - DNA, 96 bp, Aspergillus novofumigatus
  misc_feature: 79
gagagggaggtatttagtaaaataaggagaatagatagaaggtaagaggtagtaaggagaataaagtaaggaaggataagtaatagagtaagggtt

SEQ ID NO: 17892 - DNA, 96 bp, Aspergillus novofumigatus
  misc_feature: 79
ctatatccttattccaccctgacctttcttcttcttcttttttctattttttttacttatttacctcttttttcttctccctttttatctcttctc

SEQ ID NO: 17893 - DNA, 96 bp, Aspergillus novofumigatus
  misc_feature: 79
acctcttttttcttctccctttttatctcttctctctatttctctcttaattcttactctatctcttactttacccctttctctatctctctcttc

SEQ ID NO: 17894 - DNA, 96 bp, Aspergillus novofumigatus
  misc_feature: 79
atttctctcttaattcttactctatctcttactttacccctttctctatctctctcttctatctacacttactaccccttactcttattctatttc

SEQ ID NO: 17895 - DNA, 96 bp, Aspergillus novofumigatus
  misc_feature: 79
agggtaagggttagtaaggatagaagaagagttataagaagaggaagagggaggggaagagagagagaaagagttagagataagagttagaagaag

SEQ ID NO: 17896 - DNA, 96 bp, Aspergillus novofumigatus
  misc_feature: 79
cttattaccttgctcactgcctatcttactacctcccttactatcttacttactacctcccttactgttaaccttactatctacctcactacttat

SEQ ID NO: 17897 - DNA, 96 bp, Aspergillus novofumigatus
  misc_feature: 79
cttatattattataaataactaggtatactatctaaatttaaaataataagtatatactatataaatatttaatatatttataacttagctattat

SEQ ID NO: 17898 - DNA, 96 bp, Aspergillus novofumigatus
  misc_feature: 79
attataagagtattaataagtaaattaatattatattaataaggaaaaaatattatattaataatttaatatcctaatttaatatcttccattaag

SEQ ID NO: 17899 - DNA, 96 bp, Aspergillus novofumigatus
  misc_feature: 79
cttaaacataatccgaggataaggattttagcggcttgtagtattttagccgcttgttgcattttagccgcttgtagtattttagcggctttttgg

SEQ ID NO: 17900 - DNA, 96 bp, Aspergillus novofumigatus
  misc_feature: 79
ctctttaacctacctccttctaatatataatctatagattatatattacctatattataaactagcaataacatacactataataatataattact

SEQ ID NO: 17901 - DNA, 96 bp, Aspergillus novofumigatus
  misc_feature: 79
ctcactcactgcctgccttacttactatcttactcactaccttacttactgcctcactccctcactatctcacttactacctcccttactgtcttg

SEQ ID NO: 17902 - DNA, 96 bp, Aspergillus novofumigatus
  misc_feature: 79
agattaggagaggttaggatagttagaaggagagtaagagagatttagatagaggggttaaataagagatagaaggagagatagaaggagagatag

SEQ ID NO: 17903 - DNA, 96 bp, Aspergillus novofumigatus
  misc_feature: 79
ctaacccttattctctctcttattattaccttttattttcttttcttttctattccctttcctcttccctttcctcttccctttcctcttcccttt

SEQ ID NO: 17904 - DNA, 96 bp, Aspergillus novofumigatus
  misc_feature: 79
aatagagagaagagataaaaagggagaagaaaaaagaggtaaataagtaaaaaaaatagaaaaaagaagaagaagaaaggtcagggtggaataagg

SEQ ID NO: 17905 - DNA, 96 bp, Aspergillus novofumigatus
  misc_feature: 79
cctatatccttattccaccctgacctttcttcttcttcttttttctattttttttacttatttacctcttttttcttctccctttttatctcttct

SEQ ID NO: 17906 - DNA, 96 bp, Aspergillus novofumigatus
  misc_feature: 79
aagaagagttagaataagagttaaggaaagagataaaagaaggattaagaagaggtagaagaagagttagaagaagagatagaagaagagattagg

SEQ ID NO: 17907 - DNA, 96 bp, Aspergillus novofumigatus
  misc_feature: 79
atagaaggagagatagaaggagagatagaaggagagatagaaggagagttagaaggagagttagaaggagagtaagaaatagaataagagtaaggg

SEQ ID NO: 17908 - DNA, 96 bp, Aspergillus novofumigatus
  misc_feature: 79
cattactatcttactaccctacttatctatttacttattatcttactacctatcttactatctcccttactatctcatacactaccttactcactt

SEQ ID NO: 17909 - DNA, 96 bp, Aspergillus novofumigatus
  misc_feature: 79
cagggagtgagtaaggcagtgcatgagatagtgagggagatagtaagataggtagtaagataataagtaaatagataagtagggtagtaagatagt

SEQ ID NO: 17910 - DNA, 96 bp, Aspergillus novofumigatus
  misc_feature: 79
caggagatcaggttgatcagcattaatatattaataaatgaatatatatatttcaggataccataatgcgcagagatatatattatacatttagtt

SEQ ID NO: 17911 - DNA, 96 bp, Aspergillus novofumigatus
  misc_feature: 79
aggggggcagtgagcgagatagtgagggaggcagtgagtgagatagtgagggaggcagtgagtgagatagtgagggaggcagtgagcaagacagtg

SEQ ID NO: 17912 - DNA, 96 bp, Aspergillus novofumigatus
  misc_feature: 79
aggcagtgagtgagatagtaagtaagatagtgagggaggtagtgagtaagacagtgagtgagatagtaagtaaggcagtgagtgagatagtgagtg

SEQ ID NO: 17913 - DNA, 96 bp, Aspergillus novofumigatus
  misc_feature: 79
aagagagaaatagagagaagagataaaaagggagaagaaaaaagaggtaaataagtaaaaaaaatagaaaaaagaagaagaagaaaggtcagggtg

SEQ ID NO: 17914 - DNA, 96 bp, Aspergillus novofumigatus
  misc_feature: 79
atctctccttctatctcttatttaacccctctatctaaatctctcttactctccttctaactatcctaacctctcctaatctcttcttctatctct

SEQ ID NO: 17915 - DNA, 96 bp, Aspergillus novofumigatus
  misc_feature: 79
atagtgagggagatagtaagataggtagtaagataataagtaaatagataagtagggtagtaagatagtaatgcaggtaaaaggccccaaggagat

SEQ ID NO: 17916 - DNA, 96 bp, Aspergillus novofumigatus
  misc_feature: 79
aataaaccagctagttaccttatattattataaataactaggtatactatctaaatttaaaataataagtatatactatataaatatttaatatat

SEQ ID NO: 17917 - DNA, 96 bp, Aspergillus novofumigatus
  misc_feature: 79
atagtaagataggtagtaagataataagtaaatagataagtagggtagtaagatagtaatgcaggtaaaaggccccaaggagattatatatcaggt

SEQ ID NO: 17918 - DNA, 96 bp, Aspergillus novofumigatus
  misc_feature: 79
aaggatttagaataaagatagaaagaagagaggagaagagaaggaaataagttataggatattaatttagagagatttaagtaggtataaggttat

SEQ ID NO: 17919 - DNA, 96 bp, Aspergillus novofumigatus
  misc_feature: 79
ataaaccagctagttaccttatattattataaataactaggtatactatctaaatttaaaataataagtatatactatataaatatttaatatatt

SEQ ID NO: 17920 - DNA, 96 bp, Aspergillus novofumigatus
  misc_feature: 79
agctagttaccttatattattataaataactaggtatactatctaaatttaaaataataagtatatactatataaatatttaatatatttataact

SEQ ID NO: 17921 - DNA, 96 bp, Aspergillus novofumigatus
  misc_feature: 79
aggaagagagaaggatttagaataaagatagaaagaagagaggagaagagaaggaaataagttataggatattaatttagagagatttaagtaggt

SEQ ID NO: 17922 - DNA, 96 bp, Aspergillus novofumigatus
  misc_feature: 79
agaaggagagatagaaggagagatagaaggagagatagaaggagagttagaaggagagttagaaggagagtaagaaatagaataagagtaaggggt

SEQ ID NO: 17923 - DNA, 96 bp, Aspergillus novofumigatus
  misc_feature: 79
actataaaaagtagcatagaaatactatatatcctaatcatatacctatataaagtgctataagctatatataactatataggttaccctagcttt

SEQ ID NO: 17924 - DNA, 96 bp, Aspergillus novofumigatus
  misc_feature: 79
aattcttactctatctcttactttacccctttctctatctctctcttctatctacacttactaccccttactcttattctatttcttactctcctt

SEQ ID NO: 17925 - DNA, 96 bp, Aspergillus novofumigatus
  misc_feature: 78
tttttttacttatttacctcttttttcttctccctttttatctcttctctctatttctctcttaattcttactctatctcttactttacctctttc

SEQ ID NO: 17926 - DNA, 96 bp, Aspergillus novofumigatus
  misc_feature: 78
tttttaaatatatatacttaatctcttcttatcttaatctaataaatataaatatatatatctattatctagactaaatcttttctagtaactaaa

SEQ ID NO: 17927 - DNA, 96 bp, Aspergillus novofumigatus
  misc_feature: 78
aaagtagcatagaaatactatatatcctaatcatatacctatataaagtgctataagctatatataactatataggttaccctagctttactaaaa

SEQ ID NO: 17928 - DNA, 96 bp, Aspergillus novofumigatus
  misc_feature: 78
ttttaaatatatatacttaatctcttcttatcttaatctaataaatataaatatatatatctattatctagactaaatcttttctagtaactaaat

SEQ ID NO: 17929 - DNA, 96 bp, Aspergillus novofumigatus
  misc_feature: 78
tttacctgcattactatcttactaccctacttatctatttacttattatcttactacctatcttactatctcccttactatctcatacactacctt

SEQ ID NO: 17930 - DNA, 96 bp, Aspergillus novofumigatus
  misc_feature: 78
gttagtgaggggggcagtgagcgagatagtgagggaggcagtgagtgagatagtgagggaggcagtgagtgagatagtgagggaggcagtgagcaa

SEQ ID NO: 17931 - DNA, 96 bp, Aspergillus novofumigatus
  misc_feature: 78
ttctattttattcctaacccttattctctctcttattattaccttttattttcttttcttttctattccctttcctcttccctttcctctttcctt

SEQ ID NO: 17932 - DNA, 96 bp, Aspergillus novofumigatus
  misc_feature: 78
gaaatagagagaagagataaaaagggagaagaaaaaagaggtaaataagtaaaaaaaatagaaaaaagaagaagaagaaaggtcagggtggaataa

SEQ ID NO: 17933 - DNA, 96 bp, Aspergillus novofumigatus
  misc_feature: 78
ttatcttaaacttactaacccttactctattacttatccttccttactttattctccttactacctcttaccttctatctattctccttattttac

SEQ ID NO: 17934 - DNA, 96 bp, Aspergillus novofumigatus
  misc_feature: 78
ttaacctctttaacctacctccttctaatatataatctatagattatatattacctatattataaactagcaataacatacactataataatataa

SEQ ID NO: 17935 - DNA, 96 bp, Aspergillus novofumigatus
  misc_feature: 78
ttagtaaggatagaagaagagttataagaagaggaagagggaggggaagagagagagaaagagttagagataagagttagaagaagaaggagagtt

SEQ ID NO: 17936 - DNA, 96 bp, Aspergillus novofumigatus
  misc_feature: 78
ttaggagaggttaggatagttagaaggagagtaagagagatttagatagaggggttaaataagagatagaaggagagatagaaggagagatagaag

SEQ ID NO: 17937 - DNA, 96 bp, Aspergillus novofumigatus
  misc_feature: 78
ttagaagaagagataaaaagggttagaagaagaattaggaataaaaataagaataaaaagtggaagaatagttagcaagagtattgaagagagtta

SEQ ID NO: 17938 - DNA, 96 bp, Aspergillus novofumigatus
  misc_feature: 78
ttaattcttactctatctcttactttacccctttctctatctctctcttctatctacacttactaccccttactcttattctatttcttactctcc

SEQ ID NO: 17939 - DNA, 96 bp, Aspergillus novofumigatus
  misc_feature: 78
ctgcattactatcttactaccctacttatctatttacttattatcttactacctatcttactatctcccttactatctcatacactaccttactca

SEQ ID NO: 17940 - DNA, 96 bp, Aspergillus novofumigatus
  misc_feature: 78
cttacttactacctatcttgctgcctccctcactcactcactgcctgccttacttactatcttactcactaccttacttactgcctcactccctca

SEQ ID NO: 17941 - DNA, 96 bp, Aspergillus novofumigatus
  misc_feature: 78
ccctggggccttttacctgcattactatcttactaccctacttatctatttacttattatcttactacctatcttactatctcccttactatctca

SEQ ID NO: 17942 - DNA, 96 bp, Aspergillus novofumigatus
  misc_feature: 78
gggtaagggttagtaaggatagaagaagagttataagaagaggaagagggaggggaagagagagagaaagagttagagataagagttagaagaaga

SEQ ID NO: 17943 - DNA, 96 bp, Aspergillus novofumigatus
  misc_feature: 78
tcttactttacccctttctctatctctctcttctatctacacttactaccccttactcttattctatttcttactctccttctaactctccttcta

SEQ ID NO: 17944 - DNA, 96 bp, Aspergillus novofumigatus
  misc_feature: 78
tctctccttctatctcttatttaacccctctatctaaatctctcttactctccttctaactatcctaacctctcctaatctcttcttctatctctt

SEQ ID NO: 17945 - DNA, 96 bp, Aspergillus novofumigatus
  misc_feature: 78
aagagattaggagaggttaggatagttagaaggagagtaagagagatttagatagaggggttaaataagagatagaaggagagatagaaggagaga

SEQ ID NO: 17946 - DNA, 96 bp, Aspergillus novofumigatus
  misc_feature: 78
atcaggttgatcagcattaatatattaataaatgaatatatatatttcaggataccataatgcgcagagatatatattatacatttagtttataga

SEQ ID NO: 17947 - DNA, 96 bp, Aspergillus novofumigatus
  misc_feature: 78
gtaagataggtagtaagataataagtaaatagataagtagggtagtaagatagtaatgcaggtaaaaggccccaaggagattatatatcaggtaga

SEQ ID NO: 17948 - DNA, 96 bp, Aspergillus novofumigatus
  misc_feature: 78
tcaggagatcaggttgatcagcattaatatattaataaatgaatatatatatttcaggataccataatgcgcagagatatatattatacatttagt

SEQ ID NO: 17949 - DNA, 96 bp, Aspergillus novofumigatus
  misc_feature: 78
ggcagtgagtgagatagtaagtaagatagtgagggaggtagtgagtaagacagtgagtgagatagtaagtaaggcagtgagtgagatagtgagtga

SEQ ID NO: 17950 - DNA, 96 bp, Aspergillus novofumigatus
  misc_feature: 78
ggcaggcagcgagcaagttaggtagtgagtaagtgaggcagtgagtaagggagtcagtgagcaagatagtaagtaaggtagtgagtgagatagtga

SEQ ID NO: 17951 - DNA, 96 bp, Aspergillus novofumigatus
  misc_feature: 78
ggtaagggttcacataagggttagtaagtttagagaagggaaaaggtagagatagtaagaaaaagaagatagtaagagattaagtaagggatcata

SEQ ID NO: 17952 - DNA, 96 bp, Aspergillus novofumigatus
  misc_feature: 78
aggagagatagaaggagagttagaaggagagttagaaggagagtaagaaatagaataagagtaaggggtagtaagtgtagatagaagagagagata

SEQ ID NO: 17953 - DNA, 96 bp, Aspergillus novofumigatus
  misc_feature: 78
gtgagcgagatagtgagggaggcagtgagtgagatagtgagggaggcagtgagtgagatagtgagggaggcagtgagcaagacagtgagcgagata

SEQ ID NO: 17954 - DNA, 96 bp, Aspergillus novofumigatus
  misc_feature: 78
gggaggcaggcagcgagcaagttaggtagtgagtaagtgaggcagtgagtaagggagtcagtgagcaagatagtaagtaaggtagtgagtgagata

SEQ ID NO: 17955 - DNA, 96 bp, Aspergillus novofumigatus
  misc_feature: 78
gatatcaccatagttaggagagagatagttagtaaggtagataataagattaatagtatagtagatagtgaggttaacagtaaggttaatagtata

SEQ ID NO: 17956 - DNA, 96 bp, Aspergillus novofumigatus
  misc_feature: 78
aagagagaaggatttagaataaagatagaaagaagagaggagaagagaaggaaataagttataggatattaatttagagagatttaagtaggtata

SEQ ID NO: 17957 - DNA, 96 bp, Aspergillus novofumigatus
  misc_feature: 78
aaatataaccttttatagtagtctattctccttattactattattattaaatttattctaatcttctagggatttaagattattagatatattata

SEQ ID NO: 17958 - DNA, 96 bp, Aspergillus novofumigatus
  misc_feature: 78
gtagttataccaccttatactactataaagatttagattaaataattatagctaatagaggattataataatataatttatagatactatctccta

SEQ ID NO: 17959 - DNA, 96 bp, Aspergillus novofumigatus
  misc_feature: 78
taaatatatatacttaatctcttcttatcttaatctaataaatataaatatatatatctattatctagactaaatcttttctagtaactaaatcta

SEQ ID NO: 17960 - DNA, 96 bp, Aspergillus novofumigatus
  misc_feature: 78
ctcttttttcttctccctttttatctcttctctctatttctctcttaattcttactctatctcttactttacccctttctctatctctctcttcta

SEQ ID NO: 17961 - DNA, 96 bp, Aspergillus novofumigatus
  misc_feature: 78
tagaagaagagttagaataagagttaaggaaagagataaaagaaggattaagaagaggtagaagaagagttagaagaagagatagaagaagagatt

SEQ ID NO: 17962 - DNA, 96 bp, Aspergillus novofumigatus
  misc_feature: 78
tactctatctcttactttacccctttctctatctctctcttctatctacacttactaccccttactcttattctatttcttactctccttctaact

SEQ ID NO: 17963 - DNA, 96 bp, Aspergillus novofumigatus
  misc_feature: 78
agcgagatagtgagggaggcagtgagtgagatagtgagggaggcagtgagtgagatagtgagggaggcagtgagcaagacagtgagcgagatagta

SEQ ID NO: 17964 - DNA, 96 bp, Aspergillus novofumigatus
  misc_feature: 78
agacagacagtaaggtagatagtaagatagatagtaaggtagacagtaagatagatagtgtagtcaatagtaaggtaggtaataaggtagatagta

SEQ ID NO: 17965 - DNA, 96 bp, Aspergillus novofumigatus
  misc_feature: 78
gtaaggcagtgcatgagatagtgagggagatagtaagataggtagtaagataataagtaaatagataagtagggtagtaagatagtaatgcaggta

SEQ ID NO: 17966 - DNA, 96 bp, Aspergillus novofumigatus
  misc_feature: 78
ggaagagagaaggatttagaataaagatagaaagaagagaggagaagagaaggaaataagttataggatattaatttagagagatttaagtaggta

SEQ ID NO: 17967 - DNA, 96 bp, Aspergillus novofumigatus
  misc_feature: 78
gaaggagagatagaaggagagatagaaggagagatagaaggagagttagaaggagagttagaaggagagtaagaaatagaataagagtaaggggta

SEQ ID NO: 17968 - DNA, 96 bp, Aspergillus novofumigatus
  misc_feature: 78
aataaatagtaaatagataataaaataaatgaataaataaataaaaatcaaaaagttaaaaaatcaaaaacctaaaataaattaaaaaataaatta

SEQ ID NO: 17969 - DNA, 96 bp, Aspergillus novofumigatus
  misc_feature: 78
ccttatattattataaataactaggtatactatctaaatttaaaataataagtatatactatataaatatttaatatatttataacttagctatta

SEQ ID NO: 17970 - DNA, 96 bp, Aspergillus novofumigatus
  misc_feature: 78
cttttctctactctttcttctcttctctactctttcttctttccttttttaatcttctctcttattctattaaaaatatacccttcttctctctta

SEQ ID NO: 17971 - DNA, 96 bp, Aspergillus novofumigatus
  misc_feature: 78
taacctctttaacctacctccttctaatatataatctatagattatatattacctatattataaactagcaataacatacactataataatataat

SEQ ID NO: 17972 - DNA, 96 bp, Aspergillus novofumigatus
  misc_feature: 78
aaaccagctagttaccttatattattataaataactaggtatactatctaaatttaaaataataagtatatactatataaatatttaatatattta

SEQ ID NO: 17973 - DNA, 96 bp, Aspergillus novofumigatus
  misc_feature: 78
taaatataaccttttatagtagtctattctccttattactattattattaaatttattctaatcttctagggatttaagattattagatatattat

SEQ ID NO: 17974 - DNA, 96 bp, Aspergillus novofumigatus
  misc_feature: 78
ggttagtaagtttagagaagggaaaaggtagagatagtaagaaaaagaagatagtaagagattaagtaagggatcatataagggtttgtaagttta

SEQ ID NO: 17975 - DNA, 96 bp, Aspergillus novofumigatus
  misc_feature: 78
gttagtaagtttagagaagggaaaaggtagagatagtaagaaaaagaagatagtaagagattaagtaagggatcatataagggtttgtaagtttag

SEQ ID NO: 17976 - DNA, 96 bp, Aspergillus novofumigatus
  misc_feature: 78
agacagtaaggtagacagtaaggtagacagtaaggtagatagtaaggtagatagtaaggtggacagtaaaataggcagtaagataggtggtaagac

SEQ ID NO: 17977 - DNA, 96 bp, Aspergillus novofumigatus
  misc_feature: 78
gtagtgtatgagatagtaagggagatagtaagataggtagtaagataataagtaaatagataagtagggtagtaagatagtaatgcaggtaaaagg

SEQ ID NO: 17978 - DNA, 96 bp, Aspergillus novofumigatus
  misc_feature: 78
cctctttaacctacctccttctaatatataatctatagattatatattacctatattataaactagcaataacatacactataataatataattac

SEQ ID NO: 17979 - DNA, 96 bp, Aspergillus novofumigatus
  misc_feature: 78
gtaagggttcacataagggttagtaagtttagagaagggaaaaggtagagatagtaagaaaaagaagatagtaagagattaagtaagggatcatat

SEQ ID NO: 17980 - DNA, 96 bp, Aspergillus novofumigatus
  misc_feature: 78
ctctcttaattcttactctatctcttactttacccctttctctatctctctcttctatctacacttactaccccttactcttattctatttcttac

SEQ ID NO: 17981 - DNA, 96 bp, Aspergillus novofumigatus
  misc_feature: 78
ggttagtaaggatagaagaagagttataagaagaggaagagggaggggaagagagagagaaagagttagagataagagttagaagaagaaggagag

SEQ ID NO: 17982 - DNA, 96 bp, Aspergillus novofumigatus
  misc_feature: 78
gcgcgcgcgccccgggggtgaccagttggcggggacccttgggggggggcagaccggcaggcgggcaggagggaggccagggggccggcgccggtg

SEQ ID NO: 17983 - DNA, 96 bp, Aspergillus novofumigatus
  misc_feature: 78
gatagtaagataggtagtaagataataagtaaatagataagtagggtagtaagatagtaatgcaggtaaaaggccccagggagattatatatcagg

SEQ ID NO: 17984 - DNA, 96 bp, Aspergillus novofumigatus
  misc_feature: 78
ctaaacttaataacccttacttttattctatctctaactctttccttcttcccttctattcttaactctctctttctctttcttctcctttctatc

SEQ ID NO: 17985 - DNA, 96 bp, Aspergillus novofumigatus
  misc_feature: 78
ctattttttttacttatttacctcttttttcttctccctttttatctcttctctctatttctctcttaattcttactctatctcttactttacctc

SEQ ID NO: 17986 - DNA, 96 bp, Aspergillus novofumigatus
  misc_feature: 78
gaggcagtgagtgagatagtaagtaagatagtgagggaggtagtgagtaagacagtgagtgagatagtaagtaaggcagtgagtgagatagtgagt

SEQ ID NO: 17987 - DNA, 96 bp, Aspergillus novofumigatus
  misc_feature: 78
gagagaaggatttagaataaagatagaaagaagagaggagaagagaaggaaataagttataggatattaatttagagagatttaagtaggtataag

SEQ ID NO: 17988 - DNA, 96 bp, Aspergillus novofumigatus
  misc_feature: 78
gagaaggatttagaataaagatagaaagaagagaggagaagagaaggaaataagttataggatattaatttagagagatttaagtaggtataaggt

SEQ ID NO: 17989 - DNA, 96 bp, Aspergillus novofumigatus
  misc_feature: 78
gaagagagaaggatttagaataaagatagaaagaagagaggagaagagaaggaaataagttataggatattaatttagagagatttaagtaggtat

SEQ ID NO: 17990 - DNA, 96 bp, Aspergillus novofumigatus
  misc_feature: 78
gaagaagagttagaataagagttaaggaaagagataaaagaaggattaagaagaggtagaagaagagttagaagaagagatagaagaagagattag

SEQ ID NO: 17991 - DNA, 96 bp, Aspergillus novofumigatus
  misc_feature: 78
aaatagagagaagagataaaaagggagaagaaaaaagaggtaaataagtaaaaaaaatagaaaaaagaagaagaagaaaggtcagggtggaataag

SEQ ID NO: 17992 - DNA, 96 bp, Aspergillus novofumigatus
  misc_feature: 78
atataataataatagtataataatctatatagttataataataacttagtaataataagaatagaaataataggatgctattagacttttagtaag

SEQ ID NO: 17993 - DNA, 96 bp, Aspergillus novofumigatus
  misc_feature: 78
agtaagataggtagtaagataataagtaaatagataagtagggtagtaagatagtaatgcaggtaaaaggccccaaggagattatatatcaggtag

SEQ ID NO: 17994 - DNA, 96 bp, Aspergillus novofumigatus
  misc_feature: 78
ccttctaactatcctaacctctcctaatctcttcttctatctcttcttctaactctccttctacctctccttaatccttcttttattaactcttat

SEQ ID NO: 17995 - DNA, 96 bp, Aspergillus novofumigatus
  misc_feature: 78
agagaaggatttagaataaagatagaaagaagagaggagaagagaaggaaataagttataggatattaatttagagagatttaagtaggtataagg

SEQ ID NO: 17996 - DNA, 96 bp, Aspergillus novofumigatus
  misc_feature: 78
cctcttttttcttctccctttttatctcttctctctatttctctcttaattcttactctatctcttactttacccctttctctatctctctcttct

SEQ ID NO: 17997 - DNA, 96 bp, Aspergillus novofumigatus
  misc_feature: 78
agaaggagagttagaaggagagttagaaggagagtaagaaatagaataagagtaaggggtagtaagtgtagatagaagagagagatagagaaaggg

SEQ ID NO: 17998 - DNA, 96 bp, Aspergillus novofumigatus
  misc_feature: 78
cccttattaccttgctcactgcctatcttactacctcccttactatcttacttactacctcccttactgttaaccttactatctacctcactactt

SEQ ID NO: 17999 - DNA, 96 bp, Aspergillus novofumigatus
  misc_feature: 78
ataaataactaggtatactatctaaatttaaaataataagtatatactatataaatatttaatatatttataacttagctattatactacctaggg

SEQ ID NO: 18000 - DNA, 96 bp, Aspergillus novofumigatus
  misc_feature: 78
agagagaaatagagagaagagataaaaagggagaagaaaaaagaggtaaataagtaaaaaaaatagaaaaaagaagaagaagaaaggtcagggtgg

SEQ ID NO: 18001 - DNA, 96 bp, Aspergillus novofumigatus
  misc_feature: 78
ccaacatactctacaaactaactgtataatatatatctctgcgcattatggtatcctaaaatatatatattcattcattaatatatcaatgctgat

SEQ ID NO: 18002 - DNA, 96 bp, Aspergillus novofumigatus
  misc_feature: 78
caggttgatcagcattaatatattaataaatgaatatatatatttcaggataccataatgcgcagagatatatattatacatttagtttatagagt

SEQ ID NO: 18003 - DNA, 96 bp, Aspergillus novofumigatus
  misc_feature: 78
aattagtagtaatatatgaataaatatatatattttaggatactataatgcgtagagatatatattatacagttagtttgaagagtatgttggctg

SEQ ID NO: 18004 - DNA, 96 bp, Aspergillus novofumigatus
  misc_feature: 78
cactcactgcctgccttacttactatcttactcactaccttacttactgcctcactccctcactatctcacttactacctcccttactgtcttgct

SEQ ID NO: 18005 - DNA, 96 bp, Aspergillus novofumigatus
  misc_feature: 78
agggaggcagtgagtgagatagtaagtaagatagtgagggaggtagtgagtaagacagtgagtgagatagtaagtaaggcagtgagtgagatagtg

SEQ ID NO: 18006 - DNA, 96 bp, Aspergillus novofumigatus
  misc_feature: 78
aggcaggcagcgagcaagttaggtagtgagtaagtgaggcagtgagtaagggagtcagtgagcaagatagtaagtaaggtagtgagtgagatagtg

SEQ ID NO: 18007 - DNA, 96 bp, Aspergillus novofumigatus
  misc_feature: 78
cacataagggttagtaagtttagagaagggaaaaggtagagatagtaagaaaaagaagatagtaagagattaagtaagggatcatataagggtttg

SEQ ID NO: 18008 - DNA, 96 bp, Aspergillus novofumigatus
  misc_feature: 78
atgtcaggagatcaggttgatcagcattaatatattaataaatgaatatatatatttcaggataccataatgcgcagagatatatattatacattt

SEQ ID NO: 18009 - DNA, 96 bp, Aspergillus novofumigatus
  misc_feature: 78
aggtaagggttcacataagggttagtaagtttagagaagggaaaaggtagagatagtaagaaaaagaagatagtaagagattaagtaagggatcat

SEQ ID NO: 18010 - DNA, 96 bp, Aspergillus novofumigatus
  misc_feature: 78
acccttacttttattctatctctaactctttccttcttcccttctattcttaactctctctttctctttcttctcctttctatccctaactcttat

SEQ ID NO: 18011 - DNA, 96 bp, Aspergillus novofumigatus
  misc_feature: 78
agtaaggcagtgcatgagatagtgagggagatagtaagataggtagtaagataataagtaaatagataagtagggtagtaagatagtaatgcaggt

SEQ ID NO: 18012 - DNA, 96 bp, Aspergillus novofumigatus
  misc_feature: 78
agggttagtaagtttagagaagggaaaaggtagagatagtaagaaaaagaagatagtaagagattaagtaagggatcatataagggtttgtaagtt

SEQ ID NO: 18013 - DNA, 96 bp, Aspergillus novofumigatus
  misc_feature: 78
aggcagcaagacagacagtaaggtagatagtaagatagatagtaaggtagacagtaagatagatagtgtagtcaatagtaaggtaggtaataaggt

SEQ ID NO: 18014 - DNA, 96 bp, Aspergillus novofumigatus
  misc_feature: 78
aaagcatgaggtttaggtggactacttaaacataatccgaggataaggattttagcggcttgtagtattttagccgcttgttgcatttttgccgct

SEQ ID NO: 18015 - DNA, 96 bp, Aspergillus novofumigatus
  misc_feature: 78
agaaggatttagaataaagatagaaagaagagaggagaagagaaggaaataagttataggatattaatttagagagatttaagtaggtataaggtt

SEQ ID NO: 18016 - DNA, 96 bp, Aspergillus novofumigatus
  misc_feature: 78
agaaagagaagaagaaattaaaattaaggaaagataaaattaaaagaaaaggataaagttaaataataatttaatagaatgaattaggaatgtagt

SEQ ID NO: 18017 - DNA, 96 bp, Aspergillus novofumigatus
  misc_feature: 78
aagggttagtaagtttagagaagggaaaaggtagagatagtaagaaaaagaagatagtaagagattaagtaagggatcatataagggtttgtaagt

SEQ ID NO: 18018 - DNA, 96 bp, Aspergillus novofumigatus
  misc_feature: 78
acataagggttagtaagtttagagaagggaaaaggtagagatagtaagaaaaagaagatagtaagagattaagtaagggatcatataagggtttgt

SEQ ID NO: 18019 - DNA, 96 bp, Aspergillus novofumigatus
  misc_feature: 78
aacctctttaacctacctccttctaatatataatctatagattatatattacctatattataaactagcaataacatacactataataatataatt

SEQ ID NO: 18020 - DNA, 96 bp, Aspergillus novofumigatus
  misc_feature: 77
gatagaaggagagttagaaggagagttagaaggagagtaagaaatagaataagagtaaggggtagtaagtgtagatagaagagagagatagagaaa

SEQ ID NO: 18021 - DNA, 96 bp, Aspergillus novofumigatus
  misc_feature: 77
tttccttctcttctcctctcttctttctatctttattctaaatccttctctcttcctaaatccttctaaatccttattttcctatatctatctatc

SEQ ID NO: 18022 - DNA, 96 bp, Aspergillus novofumigatus
  misc_feature: 77
ataaataaatagtaaatagataataaaataaatgaataaataaataaaaatcaaaaagttaaaaaatcaaaaacctaaaataaattaaaaaataaa

SEQ ID NO: 18023 - DNA, 96 bp, Aspergillus novofumigatus
  misc_feature: 77
tcctactcttcttaatctactctcttaaaatcccttcttttttcttctactatctctctttaatctcttaaaccctttacctctctctactctaaa

SEQ ID NO: 18024 - DNA, 96 bp, Aspergillus novofumigatus
  misc_feature: 77
ggtaagggttagtaaggatagaagaagagttataagaagaggaagagggaggggaagagagagagaaagagttagagataagagttagaagaagaa

SEQ ID NO: 18025 - DNA, 96 bp, Aspergillus novofumigatus
  misc_feature: 77
ttctctcttaattcttactctatctcttactttacccctttctctatctctctcttctatctacacttactaccccttactcttattctatttctt

SEQ ID NO: 18026 - DNA, 96 bp, Aspergillus novofumigatus
  misc_feature: 77
ttcacataagggttagtaagtttagagaagggaaaaggtagagatagtaagaaaaagaagatagtaagagattaagtaagggatcatataagggtt

SEQ ID NO: 18027 - DNA, 96 bp, Aspergillus novofumigatus
  misc_feature: 77
ttataattactatctaccttattacctaccttactattgactacactatctatcttactgtctaccttactatctatcttactatctaccttactg

SEQ ID NO: 18028 - DNA, 96 bp, Aspergillus novofumigatus
  misc_feature: 77
cttaataacccttacttttattctatctctaactctttccttcttcccttctattcttaactctctctttctctttcttctcctttctatccctaa

SEQ ID NO: 18029 - DNA, 96 bp, Aspergillus novofumigatus
  misc_feature: 77
ttagaagaagagttagaataagagttaaggaaagagataaaagaaggattaagaagaggtagaagaagagttagaagaagagatagaagaagagat

SEQ ID NO: 18030 - DNA, 96 bp, Aspergillus novofumigatus
  misc_feature: 77
ttacctactataaaaagtagcatagaaatactatatatcctaatcatatacctatataaagtgctataagctatatataactatataggttaccct

SEQ ID NO: 18031 - DNA, 96 bp, Aspergillus novofumigatus
  misc_feature: 77
gagctatatctatactaaattttaaaaactataaaattaatttaactaaaaagcttctttaactttattagctttcttaataaaagctatatttaa

SEQ ID NO: 18032 - DNA, 96 bp, Aspergillus novofumigatus
  misc_feature: 77
agttagtgaggggggcagtgagcgagatagtgagggaggcagtgagtgagatagtgagggaggcagtgagtgagatagtgagggaggcagtgagca

SEQ ID NO: 18033 - DNA, 96 bp, Aspergillus novofumigatus
  misc_feature: 77
gtgagtaaggcagtgcatgagatagtgagggagatagtaagataggtagtaagataataagtaaatagataagtagggtagtaagatagtaatgca

SEQ ID NO: 18034 - DNA, 96 bp, Aspergillus novofumigatus
  misc_feature: 77
tcttacttactacctatcttgctgcctccctcactcactcactgcctgccttacttactatcttactcactaccttacttactgcctcactccctc

SEQ ID NO: 18035 - DNA, 96 bp, Aspergillus novofumigatus
  misc_feature: 77
tctcttaattcttactctatctcttactttacccctttctctatctctctcttctatctacacttactaccccttactcttattctatttcttact

SEQ ID NO: 18036 - DNA, 96 bp, Aspergillus novofumigatus
  misc_feature: 77
tagtgagggaggcagtgagtgagatagtaagtaagatagtgagggaggtagtgagtaagacagtgagtgagatagtaagtaaggcagtgagtgaga

SEQ ID NO: 18037 - DNA, 96 bp, Aspergillus novofumigatus
  misc_feature: 77
gattaggagaggttaggatagttagaaggagagtaagagagatttagatagaggggttaaataagagatagaaggagagatagaaggagagataga

SEQ ID NO: 18038 - DNA, 96 bp, Aspergillus novofumigatus
  misc_feature: 77
tcccttactgtcttgcttgctgcctccctcactatctcactcactatctcactcactgccttacttactatctcactcactgtcttactcactacc

SEQ ID NO: 18039 - DNA, 96 bp, Aspergillus novofumigatus
  misc_feature: 77
gagagaaatagagagaagagataaaaagggagaagaaaaaagaggtaaataagtaaaaaaaatagaaaaaagaagaagaagaaaggtcagggtgga

SEQ ID NO: 18040 - DNA, 96 bp, Aspergillus novofumigatus
  misc_feature: 77
tcaggttgatcagcattaatatattaataaatgaatatatatatttcaggataccataatgcgcagagatatatattatacatttagtttatagag

SEQ ID NO: 18041 - DNA, 96 bp, Aspergillus novofumigatus
  misc_feature: 77
tcacataagggttagtaagtttagagaagggaaaaggtagagatagtaagaaaaagaagatagtaagagattaagtaagggatcatataagggttt

SEQ ID NO: 18042 - DNA, 96 bp, Aspergillus novofumigatus
  misc_feature: 77
gatagtaaggtagacagtaaggtagacagtaaggtagacagtaaggtagatagtaaggtagatagtaaggtggacagtaaaataggcagtaagata

SEQ ID NO: 18043 - DNA, 96 bp, Aspergillus novofumigatus
  misc_feature: 77
gcaagacagacagtaaggtagatagtaagatagatagtaaggtagacagtaagatagatagtgtagtcaatagtaaggtaggtaataaggtagata

SEQ ID NO: 18044 - DNA, 96 bp, Aspergillus novofumigatus
  misc_feature: 77
cttaacctctttaacctacctccttctaatatataatctatagattatatattacctatattataaactagcaataacatacactataataatata

SEQ ID NO: 18045 - DNA, 96 bp, Aspergillus novofumigatus
  misc_feature: 77
taagggttcacataagggttagtaagtttagagaagggaaaaggtagagatagtaagaaaaagaagatagtaagagattaagtaagggatcatata

SEQ ID NO: 18046 - DNA, 96 bp, Aspergillus novofumigatus
  misc_feature: 77
acagtaaggtagatagtaagatagatagtaaggtagacagtaagatagatagtgtagtcaatagtaaggtaggtaataaggtagatagtaattata

SEQ ID NO: 18047 - DNA, 96 bp, Aspergillus novofumigatus
  misc_feature: 77
tagtaaggatagaagaagagttataagaagaggaagagggaggggaagagagagagaaagagttagagataagagttagaagaagaaggagagtta

SEQ ID NO: 18048 - DNA, 96 bp, Aspergillus novofumigatus
  misc_feature: 77
tagaaggagagatagaaggagagatagaaggagagatagaaggagagttagaaggagagttagaaggagagtaagaaatagaataagagtaagggg

SEQ ID NO: 18049 - DNA, 96 bp, Aspergillus novofumigatus
  misc_feature: 77
agagagtaagtaaggcagtgcatgagatagtaagggagatagtaagataggtagtaagataataagtaaatagataagtagggtagtaagatagta

SEQ ID NO: 18050 - DNA, 96 bp, Aspergillus novofumigatus
  misc_feature: 77
aggagagttagaaggagagttagaaggagagtaagaaatagaataagagtaaggggtagtaagtgtagatagaagagagagatagagaaaggggta

SEQ ID NO: 18051 - DNA, 96 bp, Aspergillus novofumigatus
  misc_feature: 77
taagggttagtaagtttagagaagggaaaaggtagagatagtaagaaaaagaagatagtaagagattaagtaagggatcatataagggtttgtaag

SEQ ID NO: 18052 - DNA, 96 bp, Aspergillus novofumigatus
  misc_feature: 77
ctccctcactcactcactgcctgccttacttactatcttactcactaccttacttactgcctcactccctcactatctcacttactacctccctta

SEQ ID NO: 18053 - DNA, 96 bp, Aspergillus novofumigatus
  misc_feature: 77
taacccttattctctctcttattattaccttttattttcttttcttttctattccctttcctcttccctttcctcttccctttcctcttccctttc

SEQ ID NO: 18054 - DNA, 96 bp, Aspergillus novofumigatus
  misc_feature: 77
agagggaggtatttagtaaaataaggagaatagatagaaggtaagaggtagtaaggagaataaagtaaggaaggataagtaatagagtaagggtta

SEQ ID NO: 18055 - DNA, 96 bp, Aspergillus novofumigatus
  misc_feature: 77
taaataaatagtaaatagataataaaataaatgaataaataaataaaaatcaaaaagttaaaaaatcaaaaacctaaaataaattaaaaaataaat

SEQ ID NO: 18056 - DNA, 96 bp, Aspergillus novofumigatus
  misc_feature: 77
aagtagcatagaaatactatatatcctaatcatatacctatataaagtgctataagctatatataactatataggttaccctagctttactaaaac

SEQ ID NO: 18057 - DNA, 96 bp, Aspergillus novofumigatus
  misc_feature: 77
gttcacataagggttagtaagtttagagaagggaaaaggtagagatagtaagaaaaagaagatagtaagagattaagtaagggatcatataagggt

SEQ ID NO: 18058 - DNA, 96 bp, Aspergillus novofumigatus
  misc_feature: 77
cgcgcgcgcagggccggtcctggccaacggcgccggccccctggcctccctcctgcccgcctgccggtctgcccccccccaagggtccccgcccac

SEQ ID NO: 18059 - DNA, 96 bp, Aspergillus novofumigatus
  misc_feature: 77
gtcaggagatcaggttgatcagcattaatatattaataaatgaatatatatatttcaggataccataatgcgcagagatatatattatacatttag

SEQ ID NO: 18060 - DNA, 96 bp, Aspergillus novofumigatus
  misc_feature: 77
gtaagggttagtaaggatagaagaagagttataagaagaggaagagggaggggaagagagagagaaagagttagagataagagttagaagaagaag

SEQ ID NO: 18061 - DNA, 96 bp, Aspergillus novofumigatus
  misc_feature: 77
gggttagtaagtttagagaagggaaaaggtagagatagtaagaaaaagaagatagtaagagattaagtaagggatcatataagggtttgtaagttt

SEQ ID NO: 18062 - DNA, 96 bp, Aspergillus novofumigatus
  misc_feature: 77
ggggcagtgagcgagatagtgagggaggcagtgagtgagatagtgagggaggcagtgagtgagatagtgagggaggcagtgagcaagacagtgagc

SEQ ID NO: 18063 - DNA, 96 bp, Aspergillus novofumigatus
  misc_feature: 77
ggatatcaccatagttaggagagagatagttagtaaggtagataataagattaatagtatagtagatagtgaggttaacagtaaggttaatagtat

SEQ ID NO: 18064 - DNA, 96 bp, Aspergillus novofumigatus
  misc_feature: 77
ggaggcagtgagtgagatagtaagtaagatagtgagggaggtagtgagtaagacagtgagtgagatagtaagtaaggcagtgagtgagatagtgag

SEQ ID NO: 18065 - DNA, 96 bp, Aspergillus novofumigatus
  misc_feature: 77
ggaggcaggcagcgagcaagttaggtagtgagtaagtgaggcagtgagtaagggagtcagtgagcaagatagtaagtaaggtagtgagtgagatag

SEQ ID NO: 18066 - DNA, 96 bp, Aspergillus novofumigatus
  misc_feature: 77
gatcaggttgatcagcattaatatattaataaatgaatatatatatttcaggataccataatgcgcagagatatatattatacatttagtttatag

SEQ ID NO: 18067 - DNA, 96 bp, Aspergillus novofumigatus
  misc_feature: 77
gagttagaataagagttaaggaaagagataaaagaaggattaagaagaggtagaagaagagttagaagaagagatagaagaagagattaggagagg

SEQ ID NO: 18068 - DNA, 96 bp, Aspergillus novofumigatus
  misc_feature: 77
cctgcattactatcttactaccctacttatctatttacttattatcttactacctatcttactatctcccttactatctcatacactaccttactc

SEQ ID NO: 18069 - DNA, 96 bp, Aspergillus novofumigatus
  misc_feature: 77
gaggggaagagagagagaaagagttagagataagagttagaagaagaaggagagttagtaaaagagatagagggtattagcaaaagtaagggttat

SEQ ID NO: 18070 - DNA, 96 bp, Aspergillus novofumigatus
  misc_feature: 77
gagaaatagagagaagagataaaaagggagaagaaaaaagaggtaaataagtaaaaaaaatagaaaaaagaagaagaagaaaggtcagggtggaat

SEQ ID NO: 18071 - DNA, 96 bp, Aspergillus novofumigatus
  misc_feature: 77
attactatcttactaccctacttatctatttacttattatcttactacctatcttactatctcccttactatctcatacactaccttactcacttc

SEQ ID NO: 18072 - DNA, 96 bp, Aspergillus novofumigatus
  misc_feature: 77
attcttactctatctcttactttacccctttctctatctctctcttctatctacacttactaccccttactcttattctatttcttactctccttc

SEQ ID NO: 18073 - DNA, 96 bp, Aspergillus novofumigatus
  misc_feature: 77
ataagagttagaagaagagataaaaagggttagaagaagaattaggaataaaaataagaataaaaagtggaagaatagttagcaagagtattgaag

SEQ ID NO: 18074 - DNA, 96 bp, Aspergillus novofumigatus
  misc_feature: 77
aagagttagaagaagagataaaaagggttagaagaagaattaggaataaaaataagaataaaaagtggaagaatagttagcaagagtattgaagag

SEQ ID NO: 18075 - DNA, 96 bp, Aspergillus novofumigatus
  misc_feature: 77
agattaaggttaattagtagtaatatatgaataaatatatatattttaggatactataatgcgtagagatatatattatacagttagtttgaagag

SEQ ID NO: 18076 - DNA, 96 bp, Aspergillus novofumigatus
  misc_feature: 77
agagatagaaggagagttagaaggagagttagaaggagagtaagaaatagaataagagtaaggggtagtaagtgtagatagaagagagagatagag

SEQ ID NO: 18077 - DNA, 96 bp, Aspergillus novofumigatus
  misc_feature: 77
acagggagtgagtaaggcagtgcatgagatagtgagggagatagtaagataggtagtaagataataagtaaatagataagtagggtagtaagatag

SEQ ID NO: 18078 - DNA, 96 bp, Aspergillus novofumigatus
  misc_feature: 77
acctactataaaaagtagcatagaaatactatatatcctaatcatatacctatataaagtgctataagctatatataactatataggttaccctag

SEQ ID NO: 18079 - DNA, 96 bp, Aspergillus novofumigatus
  misc_feature: 77
aatctctaaatttctcttattttttttttaaatatatatacttaatctcttcttatcttaatctaataaatataaatatatatatctattatctag

SEQ ID NO: 18080 - DNA, 96 bp, Aspergillus novofumigatus
  misc_feature: 77
ctaatagcatcctattatttctattcttattattactaagttattattataactatatagattattatactattattattatattaagatactatt

(The sequence listing continues in the following parts.)
